United States Patent Application Publication US 2005/0255487 A1 - sequence listing, part 70

SEQ ID NO: 1921673 - RNA, 19 nt, Homo sapiens
  misc_RNA (1)...(19): siRNA sense strand
ccgccgacgucuucaugug

SEQ ID NO: 1921674 - RNA, 19 nt, Homo sapiens
  misc_RNA (1)...(19): siRNA sense strand
uggaguacaucaccaagcu

SEQ ID NO: 1921675 - RNA, 19 nt, Homo sapiens
  misc_RNA (1)...(19): siRNA sense strand
gccaucacacugcagaaga

SEQ ID NO: 1921676 - RNA, 19 nt, Homo sapiens
  misc_RNA (1)...(19): siRNA sense strand
aagauccggcucaauaaug

SEQ ID NO: 1921677 - RNA, 19 nt, Homo sapiens
  misc_RNA (1)...(19): siRNA sense strand
aauagcacaucugggaaau

SEQ ID NO: 1921678 - RNA, 19 nt, Homo sapiens
  misc_RNA (1)...(19): siRNA sense strand
ucaccaggauuggcaagag

SEQ ID NO: 1921679 - RNA, 19 nt, Homo sapiens
  misc_RNA (1)...(19): siRNA sense strand
gagcucaaugccaccauca

SEQ ID NO: 1921680 - RNA, 19 nt, Homo sapiens
  misc_RNA (1)...(19): siRNA sense strand
cagccacgguuaacuuuug

SEQ ID NO: 1921681 - RNA, 19 nt, Homo sapiens
  misc_RNA (1)...(19): siRNA sense strand
cagagucagggccuuguga

SEQ ID NO: 1921682 - RNA, 19 nt, Homo sapiens
  misc_RNA (1)...(19): siRNA sense strand
ucaggccgaugguauugag

SEQ ID NO: 1921683 - RNA, 19 nt, Homo sapiens
  misc_RNA (1)...(19): siRNA sense strand
gacaauaggugaagaacaa

SEQ ID NO: 1921684 - RNA, 19 nt, Homo sapiens
  misc_RNA (1)...(19): siRNA sense strand
ggagauguuucuauacuuu

SEQ ID NO: 1921685 - RNA, 19 nt, Homo sapiens
  misc_RNA (1)...(19): siRNA sense strand
gggauauucuugaaguuaa

SEQ ID NO: 1921686 - RNA, 19 nt, Homo sapiens
  misc_RNA (1)...(19): siRNA sense strand
gaauguauuugcugcaguu

SEQ ID NO: 1921687 - RNA, 19 nt, Homo sapiens
  misc_RNA (1)...(19): siRNA sense strand
aauuagaucuccuguguaa

SEQ ID NO: 1921688 - RNA, 19 nt, Homo sapiens
  misc_RNA (1)...(19): siRNA sense strand
ggagaauggugacuuauac

SEQ ID NO: 1921689 - RNA, 19 nt, Homo sapiens
  misc_RNA (1)...(19): siRNA sense strand
ggacacccaacaagaaaua

SEQ ID NO: 1921690 - RNA, 19 nt, Homo sapiens
  misc_RNA (1)...(19): siRNA sense strand
gaaaucuccuuuacagaca

SEQ ID NO: 1921691 - RNA, 19 nt, Homo sapiens
  misc_RNA (1)...(19): siRNA sense strand
guguauagccuucaaauga

SEQ ID NO: 1921692 - RNA, 19 nt, Homo sapiens
  misc_RNA (1)...(19): siRNA sense strand
agaggagaauggugacuua

SEQ ID NO: 1921693 - RNA, 19 nt, Homo sapiens
  misc_RNA (1)...(19): siRNA sense strand
acaguuagaugacuacaga

SEQ ID NO: 1921694 - RNA, 19 nt, Homo sapiens
  misc_RNA (1)...(19): siRNA sense strand
ugaaauaccuaagaacugu

SEQ ID NO: 1921695 - RNA, 19 nt, Homo sapiens
  misc_RNA (1)...(19): siRNA sense strand
ggcaaagaacugauaauuu

SEQ ID NO: 1921696 - RNA, 19 nt, Homo sapiens
  misc_RNA (1)...(19): siRNA sense strand
ggacccaucuccacaacug

SEQ ID NO: 1921697 - RNA, 19 nt, Homo sapiens
  misc_RNA (1)...(19): siRNA sense strand
gaucuccuguguaagacua

SEQ ID NO: 1921698 - RNA, 19 nt, Homo sapiens
  misc_RNA (1)...(19): siRNA sense strand
caagccagccaaccuguua

SEQ ID NO: 1921699 - RNA, 19 nt, Homo sapiens
  misc_RNA (1)...(19): siRNA sense strand
gaauuguaguuguguggaa

SEQ ID NO: 1921700 - RNA, 19 nt, Homo sapiens
  misc_RNA (1)...(19): siRNA sense strand
ggauaauauucucucauug

SEQ ID NO: 1921701 - RNA, 19 nt, Homo sapiens
  misc_RNA (1)...(19): siRNA sense strand
ccagacaaguucagagaau

SEQ ID NO: 1921702 - RNA, 19 nt, Homo sapiens
  misc_RNA (1)...(19): siRNA sense strand
cagacaaguucagagaaua

SEQ ID NO: 1921703 - RNA, 19 nt, Homo sapiens
  misc_RNA (1)...(19): siRNA sense strand
uuagaugacuacagauuug

SEQ ID NO: 1921704 - RNA, 19 nt, Homo sapiens
  misc_RNA (1)...(19): siRNA sense strand
gaagaucauggacuaguga

SEQ ID NO: 1921705 - RNA, 19 nt, Homo sapiens
  misc_RNA (1)...(19): siRNA sense strand
acagaaggaucacuagaau

SEQ ID NO: 1921706 - RNA, 19 nt, Homo sapiens
  misc_RNA (1)...(19): siRNA sense strand
gcugaucaucucauuauuu

SEQ ID NO: 1921707 - RNA, 19 nt, Homo sapiens
  misc_RNA (1)...(19): siRNA sense strand
caaaugaagcgugugauug

SEQ ID NO: 1921708 - RNA, 19 nt, Homo sapiens
  misc_RNA (1)...(19): siRNA sense strand
gauagaacaguuauugugu

SEQ ID NO: 1921709 - RNA, 19 nt, Homo sapiens
  misc_RNA (1)...(19): siRNA sense strand
gcugauagaacaguuauug

SEQ ID NO: 1921710 - RNA, 19 nt, Homo sapiens
  misc_RNA (1)...(19): siRNA sense strand
gcaagaaaaugcuacuuca

SEQ ID NO: 1921711 - RNA, 19 nt, Homo sapiens
  misc_RNA (1)...(19): siRNA sense strand
ggaccaugcaggccuauga

SEQ ID NO: 1921712 - RNA, 19 nt, Homo sapiens
  misc_RNA (1)...(19): siRNA sense strand
cauguucacuggagcuuau

SEQ ID NO: 1921713 - RNA, 19 nt, Homo sapiens
  misc_RNA (1)...(19): siRNA sense strand
gauacuaccagacaaguuc

SEQ ID NO: 1921714 - RNA, 19 nt, Homo sapiens
  misc_RNA (1)...(19): siRNA sense strand
gaagaacaaacccagaauc

SEQ ID NO: 1921715 - RNA, 19 nt, Homo sapiens
  misc_RNA (1)...(19): siRNA sense strand
guacgcauuugggaguuaa

SEQ ID NO: 1921716 - RNA, 19 nt, Homo sapiens
  misc_RNA (1)...(19): siRNA sense strand
ggcagcaguuggcaaagaa

SEQ ID NO: 1921717 - RNA, 19 nt, Homo sapiens
  misc_RNA (1)...(19): siRNA sense strand
gggaaugaccugugugugu

SEQ ID NO: 1921718 - RNA, 19 nt, Homo sapiens
  misc_RNA (1)...(19): siRNA sense strand
aaaauuagaucuccugugu

SEQ ID NO: 1921719 - RNA, 19 nt, Homo sapiens
  misc_RNA (1)...(19): siRNA sense strand
ucggagagcugaucaucug

SEQ ID NO: 1921720 - RNA, 19 nt, Homo sapiens
  misc_RNA (1)...(19): siRNA sense strand
ggauugcgcaguuuaagau

SEQ ID NO: 1921721 - RNA, 19 nt, Homo sapiens
  misc_RNA (1)...(19): siRNA sense strand
cuguggagauguuucuaua

SEQ ID NO: 1921722 - RNA, 19 nt, Homo sapiens
  misc_RNA (1)...(19): siRNA sense strand
ggaagagucagcaaacaag

SEQ ID NO: 1921723 - RNA, 19 nt, Homo sapiens
  misc_RNA (1)...(19): siRNA sense strand
guacugaaggcucaucaug

SEQ ID NO: 1921724 - RNA, 19 nt, Homo sapiens
  misc_RNA (1)...(19): siRNA sense strand
uuagaucuccuguguaaga

SEQ ID NO: 1921725 - RNA, 19 nt, Homo sapiens
  misc_RNA (1)...(19): siRNA sense strand
uaacuguucuucagagacu

SEQ ID NO: 1921726 - RNA, 19 nt, Homo sapiens
  misc_RNA (1)...(19): siRNA sense strand
guuagaugacuacagauuu

SEQ ID NO: 1921727 - RNA, 19 nt, Homo sapiens
  misc_RNA (1)...(19): siRNA sense strand
ucaaaugaagcgugugauu

SEQ ID NO: 1921728 - RNA, 19 nt, Homo sapiens
  misc_RNA (1)...(19): siRNA sense strand
gaugauggaauuguaguug

SEQ ID NO: 1921729 - RNA, 19 nt, Homo sapiens
  misc_RNA (1)...(19): siRNA sense strand
acacugaacugcuaguacu

SEQ ID NO: 1921730 - RNA, 19 nt, Homo sapiens
  misc_RNA (1)...(19): siRNA sense strand
ggagcuuauuggagauuug

SEQ ID NO: 1921731 - RNA, 19 nt, Homo sapiens
  misc_RNA (1)...(19): siRNA sense strand
ccaaacaggcaguuaaucu

SEQ ID NO: 1921732 - RNA, 19 nt, Homo sapiens
  misc_RNA (1)...(19): siRNA sense strand
guuaagcgccuccuugauc

SEQ ID NO: 1921733 - RNA, 19 nt, Homo sapiens
  misc_RNA (1)...(19): siRNA sense strand
cuucagagacuagauguuu

SEQ ID NO: 1921734 - RNA, 19 nt, Homo sapiens
  misc_RNA (1)...(19): siRNA sense strand
ugaagaucauggacuagug

SEQ ID NO: 1921735 - RNA, 19 nt, Homo sapiens
  misc_RNA (1)...(19): siRNA sense strand
cucagaagauggcagugua

SEQ ID NO: 1921736 - RNA, 19 nt, Homo sapiens
  misc_RNA (1)...(19): siRNA sense strand
guuaaucucaugcucagaa

SEQ ID NO: 1921737 - RNA, 19 nt, Homo sapiens
  misc_RNA (1)...(19): siRNA sense strand
gauggcaguguacgcauuu

SEQ ID NO: 1921738 - RNA, 19 nt, Homo sapiens
  misc_RNA (1)...(19): siRNA sense strand
acuuauaccuugcugucua

SEQ ID NO: 1921739 - RNA, 19 nt, Homo sapiens
  misc_RNA (1)...(19): siRNA sense strand
gcuugcagcugagccugua

SEQ ID NO: 1921740 - RNA, 19 nt, Homo sapiens
  misc_RNA (1)...(19): siRNA sense strand
ggauauucuugaaguuaag

SEQ ID NO: 1921741 - RNA, 19 nt, Homo sapiens
  misc_RNA (1)...(19): siRNA sense strand
gaauggugacuuauaccuu

SEQ ID NO: 1921742 - RNA, 19 nt, Homo sapiens
  misc_RNA (1)...(19): siRNA sense strand
cagaaucccuacacugaac

SEQ ID NO: 1921743 - RNA, 19 nt, Homo sapiens
  misc_RNA (1)...(19): siRNA sense strand
cuuugaagaucauggacua

SEQ ID NO: 1921744 - RNA, 19 nt, Homo sapiens
  misc_RNA (1)...(19): siRNA sense strand
guggagauguuucuauacu

SEQ ID NO: 1921745 - RNA, 19 nt, Homo sapiens
  misc_RNA (1)...(19): siRNA sense strand
gcauuugggaguuaagaga

SEQ ID NO: 1921746 - RNA, 19 nt, Homo sapiens
  misc_RNA (1)...(19): siRNA sense strand
uuaagcgccuccuugauca

SEQ ID NO: 1921747 - RNA, 19 nt, Homo sapiens
  misc_RNA (1)...(19): siRNA sense strand
agucuacuguaaaguguuu

SEQ ID NO: 1921748 - RNA, 19 nt, Homo sapiens
  misc_RNA (1)...(19): siRNA sense strand
aaacaggcaguuaaucuca

SEQ ID NO: 1921749 - RNA, 19 nt, Homo sapiens
  misc_RNA (1)...(19): siRNA sense strand
gugaagaacaaacccagaa

SEQ ID NO: 1921750 - RNA, 19 nt, Homo sapiens
  misc_RNA (1)...(19): siRNA sense strand
cacagaaggaucacuagaa

SEQ ID NO: 1921751 - RNA, 19 nt, Homo sapiens
  misc_RNA (1)...(19): siRNA sense strand
uggcaaagaacugauaauu

SEQ ID NO: 1921752 - RNA, 19 nt, Homo sapiens
  misc_RNA (1)...(19): siRNA sense strand
ucccuacacugaacugcua

SEQ ID NO: 1921753 - RNA, 19 nt, Homo sapiens
  misc_RNA (1)...(19): siRNA sense strand
ccgcugaucaucucauuau

SEQ ID NO: 1921754 - RNA, 19 nt, Homo sapiens
  misc_RNA (1)...(19): siRNA sense strand
uguauuugcugcaguugga

SEQ ID NO: 1921755 - RNA, 19 nt, Homo sapiens
  misc_RNA (1)...(19): siRNA sense strand
agaaggaucacuagaaugg

SEQ ID NO: 1921756 - RNA, 19 nt, Homo sapiens
  misc_RNA (1)...(19): siRNA sense strand
cccagaaucccuacacuga

SEQ ID NO: 1921757 - RNA, 19 nt, Homo sapiens
  misc_RNA (1)...(19): siRNA sense strand
gcagggacuggccgagaaa

SEQ ID NO: 1921758 - RNA, 19 nt, Homo sapiens
  misc_RNA (1)...(19): siRNA sense strand
cacaugugaugaagagaau

SEQ ID NO: 1921759 - RNA, 19 nt, Homo sapiens
  misc_RNA (1)...(19): siRNA sense strand
ugauagaacaguuauugug

SEQ ID NO: 1921760 - RNA, 19 nt, Homo sapiens
  misc_RNA (1)...(19): siRNA sense strand
gagcuuauuggagauuuga

SEQ ID NO: 1921761 - RNA, 19 nt, Homo sapiens
  misc_RNA (1)...(19): siRNA sense strand
uacgauuucugguacaguu

SEQ ID NO: 1921762 - RNA, 19 nt, Homo sapiens
  misc_RNA (1)...(19): siRNA sense strand
caacuggacacccaacaag

SEQ ID NO: 1921763 - RNA, 19 nt, Homo sapiens
  misc_RNA (1)...(19): siRNA sense strand
gaucaccaggauaauauuc

SEQ ID NO: 1921764 - RNA, 19 nt, Homo sapiens
  misc_RNA (1)...(19): siRNA sense strand
aaugggauauucuugaagu

SEQ ID NO: 1921765 - RNA, 19 nt, Homo sapiens
  misc_RNA (1)...(19): siRNA sense strand
guugguagcacccacagaa

SEQ ID NO: 1921766 - RNA, 19 nt, Homo sapiens
  misc_RNA (1)...(19): siRNA sense strand
agacuagccaccuuucuga

SEQ ID NO: 1921767 - RNA, 19 nt, Homo sapiens
  misc_RNA (1)...(19): siRNA sense strand
gacuagauguuuggcuuuc

SEQ ID NO: 1921768 - RNA, 19 nt, Homo sapiens
  misc_RNA (1)...(19): siRNA sense strand
uauuagugcuuugguugaa

SEQ ID NO: 1921769 - RNA, 19 nt, Homo sapiens
  misc_RNA (1)...(19): siRNA sense strand
ugaagagaauguauuugcu

SEQ ID NO: 1921770 - RNA, 19 nt, Homo sapiens
  misc_RNA (1)...(19): siRNA sense strand
gugaugaagagaauguauu

SEQ ID NO: 1921771 - RNA, 19 nt, Homo sapiens
  misc_RNA (1)...(19): siRNA sense strand
ugggauauucuugaaguua

SEQ ID NO: 1921772 - RNA, 19 nt, Homo sapiens
  misc_RNA (1)...(19): siRNA sense strand
ggacacacucaaaagauaa

SEQ ID NO: 1921773 - RNA, 19 nt, Homo sapiens
  misc_RNA (1)...(19): siRNA sense strand
uugcgcaguuuaagauuau

SEQ ID NO: 1921774 - RNA, 19 nt, Homo sapiens
  misc_RNA (1)...(19): siRNA sense strand
aaacugcacaugacuccaa

SEQ ID NO: 1921775 - RNA, 19 nt, Homo sapiens
  misc_RNA (1)...(19): siRNA sense strand
ccaggauaauauucucuca

SEQ ID NO: 1921776 - RNA, 19 nt, Homo sapiens
  misc_RNA (1)...(19): siRNA sense strand
ccacagaaggaucacuaga

SEQ ID NO: 1921777 - RNA, 19 nt, Homo sapiens
  misc_RNA (1)...(19): siRNA sense strand
uaucaugcuuccagucuac

SEQ ID NO: 1921778 - RNA, 19 nt, Homo sapiens
  misc_RNA (1)...(19): siRNA sense strand
agacaaguucagagaauau

SEQ ID NO: 1921779 - RNA, 19 nt, Homo sapiens
  misc_RNA (1)...(19): siRNA sense strand
ugauggaauuguaguugug

SEQ ID NO: 1921780 - RNA, 19 nt, Homo sapiens
  misc_RNA (1)...(19): siRNA sense strand
gagauguuucuauacuuug

SEQ ID NO: 1921781 - RNA, 19 nt, Homo sapiens
  misc_RNA (1)...(19): siRNA sense strand
aggagaauggugacuuaua

SEQ ID NO: 1921782 - RNA, 19 nt, Homo sapiens
  misc_RNA (1)...(19): siRNA sense strand
gcgcaguuuaagauuauuu

SEQ ID NO: 1921783 - RNA, 19 nt, Homo sapiens
  misc_RNA (1)...(19): siRNA sense strand
gggaugaucaggugaauuu

SEQ ID NO: 1921784 - RNA, 19 nt, Homo sapiens
  misc_RNA (1)...(19): siRNA sense strand
gaacaaggagcaggaagaa

SEQ ID NO: 1921785 - RNA, 19 nt, Homo sapiens
  misc_RNA (1)...(19): siRNA sense strand
ggaucuggcuugagucaug

SEQ ID NO: 1921786 - RNA, 19 nt, Homo sapiens
  misc_RNA (1)...(19): siRNA sense strand
gagaucaaguacccacuga

SEQ ID NO: 1921787 - RNA, 19 nt, Homo sapiens
  misc_RNA (1)...(19): siRNA sense strand
cagcaugaguuacagaaga

SEQ ID NO: 1921788 - RNA, 19 nt, Homo sapiens
  misc_RNA (1)...(19): siRNA sense strand
gagcauggcuuuucucugu

SEQ ID NO: 1921789 - RNA, 19 nt, Homo sapiens
  misc_RNA (1)...(19): siRNA sense strand
gauccaggccuacgagaaa

SEQ ID NO: 1921790 - RNA, 19 nt, Homo sapiens
  misc_RNA (1)...(19): siRNA sense strand
agacagagcugagggagau

SEQ ID NO: 1921791 - RNA, 19 nt, Homo sapiens
  misc_RNA (1)...(19): siRNA sense strand
ucaaccaguuccagcauga

SEQ ID NO: 1921792 - RNA, 19 nt, Homo sapiens
  misc_RNA (1)...(19): siRNA sense strand
gaagaacagcuuggagaga

SEQ ID NO: 1921793 - RNA, 19 nt, Homo sapiens
  misc_RNA (1)...(19): siRNA sense strand
ccaguuccagcaugaguua

SEQ ID NO: 1921794 - RNA, 19 nt, Homo sapiens
  misc_RNA (1)...(19): siRNA sense strand
gaaaagaguuggggaugau

SEQ ID NO: 1921795 - RNA, 19 nt, Homo sapiens
  misc_RNA (1)...(19): siRNA sense strand
gaacagcuuggagagauga

SEQ ID NO: 1921796 - RNA, 19 nt, Homo sapiens
  misc_RNA (1)...(19): siRNA sense strand
ggaguugaguucccuacag

SEQ ID NO: 1921797 - RNA, 19 nt, Homo sapiens
  misc_RNA (1)...(19): siRNA sense strand
aagaacagcuuggagagau

SEQ ID NO: 1921798 - RNA, 19 nt, Homo sapiens
  misc_RNA (1)...(19): siRNA sense strand
cgucagaucugugguuugg

SEQ ID NO: 1921799 - RNA, 19 nt, Homo sapiens
  misc_RNA (1)...(19): siRNA sense strand
gaagaacaaggagcaggaa

SEQ ID NO: 1921800 - RNA, 19 nt, Homo sapiens
  misc_RNA (1)...(19): siRNA sense strand
gcaccugcgucagaucugu

SEQ ID NO: 1921801 - RNA, 19 nt, Homo sapiens
  misc_RNA (1)...(19): siRNA sense strand
gugcuccgccucccacuuu

SEQ ID NO: 1921802 - RNA, 19 nt, Homo sapiens
  misc_RNA (1)...(19): siRNA sense strand
agagugacuuggagacaga

SEQ ID NO: 1921803 - RNA, 19 nt, Homo sapiens
  misc_RNA (1)...(19): siRNA sense strand
acaaggagcaggaagaaca

SEQ ID NO: 1921804 - RNA, 19 nt, Homo sapiens
  misc_RNA (1)...(19): siRNA sense strand
gaagagugacuuggagaca

SEQ ID NO: 1921805 - RNA, 19 nt, Homo sapiens
  misc_RNA (1)...(19): siRNA sense strand
agacauggcgugggugaaa

SEQ ID NO: 1921806 - RNA, 19 nt, Homo sapiens
  misc_RNA (1)...(19): siRNA sense strand
uuacggagacaucaaggaa

SEQ ID NO: 1921807 - RNA, 19 nt, Homo sapiens
  misc_RNA (1)...(19): siRNA sense strand
gcaggaagaacagcuugga

SEQ ID NO: 1921808 - RNA, 19 nt, Homo sapiens
  misc_RNA (1)...(19): siRNA sense strand
agcaacggcucaaccaguu

SEQ ID NO: 1921809 - RNA, 19 nt, Homo sapiens
  misc_RNA (1)...(19): siRNA sense strand
gcacuaccuggcacugaga

SEQ ID NO: 1921810 - RNA, 19 nt, Homo sapiens
  misc_RNA (1)...(19): siRNA sense strand
ccucaaagucuacgagauc

SEQ ID NO: 1921811 - RNA, 19 nt, Homo sapiens
  misc_RNA (1)...(19): siRNA sense strand
agcaugaguuacagaagaa

SEQ ID NO: 1921812 - RNA, 19 nt, Homo sapiens
  misc_RNA (1)...(19): siRNA sense strand
gaugaucaggugaauuugg

SEQ ID NO: 1921813 - RNA, 19 nt, Homo sapiens
  misc_RNA (1)...(19): siRNA sense strand
gaaggucagccugcagcaa

SEQ ID NO: 1921814 - RNA, 19 nt, Homo sapiens
  misc_RNA (1)...(19): siRNA sense strand
agaacaaggagcaggaaga

SEQ ID NO: 1921815 - RNA, 19 nt, Homo sapiens
  misc_RNA (1)...(19): siRNA sense strand
ggagaacagcaagaucuag

SEQ ID NO: 1921816 - RNA, 19 nt, Homo sapiens
  misc_RNA (1)...(19): siRNA sense strand
caaagucuacgagaucaag

SEQ ID NO: 1921817 - RNA, 19 nt, Homo sapiens
  misc_RNA (1)...(19): siRNA sense strand
ggagaaucuugaggacucu

SEQ ID NO: 1921818 - RNA, 19 nt, Homo sapiens
  misc_RNA (1)...(19): siRNA sense strand
ugaaaagaguuggggauga

SEQ ID NO: 1921819 - RNA, 19 nt, Homo sapiens
  misc_RNA (1)...(19): siRNA sense strand
agaacagcuuggagagaug

SEQ ID NO: 1921820 - RNA, 19 nt, Homo sapiens
  misc_RNA (1)...(19): siRNA sense strand
ggagcaggaagaacagcuu

SEQ ID NO: 1921821 - RNA, 19 nt, Homo sapiens
  misc_RNA (1)...(19): siRNA sense strand
gaaacucugcguggagaag

SEQ ID NO: 1921822 - RNA, 19 nt, Homo sapiens
  misc_RNA (1)...(19): siRNA sense strand
gcccucaucaaacacauug

SEQ ID NO: 1921823 - RNA, 19 nt, Homo sapiens
  misc_RNA (1)...(19): siRNA sense strand
ccacuuugcccucaucacu

SEQ ID NO: 1921824 - RNA, 19 nt, Homo sapiens
  misc_RNA (1)...(19): siRNA sense strand
gcauggcuuuucucuguau

SEQ ID NO: 1921825 - RNA, 19 nt, Homo sapiens
  misc_RNA (1)...(19): siRNA sense strand
uggagaacagcaagaucua

SEQ ID NO: 1921826 - RNA, 19 nt, Homo sapiens
  misc_RNA (1)...(19): siRNA sense strand
ggucaaagcuccugaugaa

SEQ ID NO: 1921827 - RNA, 19 nt, Homo sapiens
  misc_RNA (1)...(19): siRNA sense strand
caaagucacuggucaccua

SEQ ID NO: 1921828 - RNA, 19 nt, Homo sapiens
  misc_RNA (1)...(19): siRNA sense strand
gggacugacuguaaguuua

SEQ ID NO: 1921829 - RNA, 19 nt, Homo sapiens
  misc_RNA (1)...(19): siRNA sense strand
gcaccaggcucucaaacug

SEQ ID NO: 1921830 - RNA, 19 nt, Homo sapiens
  misc_RNA (1)...(19): siRNA sense strand
gaagaaacccugauugcau

SEQ ID NO: 1921831 - RNA, 19 nt, Homo sapiens
  misc_RNA (1)...(19): siRNA sense strand
aagaagaaauccugaaaug

SEQ ID NO: 1921832 - RNA, 19 nt, Homo sapiens
  misc_RNA (1)...(19): siRNA sense strand
ggacugacuguaaguuuaa

SEQ ID NO: 1921833 - RNA, 19 nt, Homo sapiens
  misc_RNA (1)...(19): siRNA sense strand
caaagcuccugaugaagaa

SEQ ID NO: 1921834 - RNA, 19 nt, Homo sapiens
  misc_RNA (1)...(19): siRNA sense strand
cagcagaccuaauugacaa

SEQ ID NO: 1921835 - RNA, 19 nt, Homo sapiens
  misc_RNA (1)...(19): siRNA sense strand
caaagaagaaauccugaaa

SEQ ID NO: 1921836 - RNA, 19 nt, Homo sapiens
  misc_RNA (1)...(19): siRNA sense strand
gaagaaauccugaaaugcu

SEQ ID NO: 1921837 - RNA, 19 nt, Homo sapiens
  misc_RNA (1)...(19): siRNA sense strand
aagaaacccugauugcauu

SEQ ID NO: 1921838 - RNA, 19 nt, Homo sapiens
  misc_RNA (1)...(19): siRNA sense strand
acacagauacugaaaguga

SEQ ID NO: 1921839 - RNA, 19 nt, Homo sapiens
  misc_RNA (1)...(19): siRNA sense strand
ucaaagcuccugaugaaga

SEQ ID NO: 1921840 - RNA, 19 nt, Homo sapiens
  misc_RNA (1)...(19): siRNA sense strand
cggcuuggcuguuggaguu

SEQ ID NO: 1921841 - RNA, 19 nt, Homo sapiens
  misc_RNA (1)...(19): siRNA sense strand
acacacagauacugaaagu

SEQ ID NO: 1921842 - RNA, 19 nt, Homo sapiens
  misc_RNA (1)...(19): siRNA sense strand
cugaaaugcucaaacaaug

SEQ ID NO: 1921843 - RNA, 19 nt, Homo sapiens
  misc_RNA (1)...(19): siRNA sense strand
acaagcagauucaaagaag

SEQ ID NO: 1921844 - RNA, 19 nt, Homo sapiens
  misc_RNA (1)...(19): siRNA sense strand
aauccuugguuauggaaua

SEQ ID NO: 1921845 - RNA, 19 nt, Homo sapiens
  misc_RNA (1)...(19): siRNA sense strand
gcaagacacacacagauac

SEQ ID NO: 1921846 - RNA, 19 nt, Homo sapiens
  misc_RNA (1)...(19): siRNA sense strand
caagcagauucaaagaaga

SEQ ID NO: 1921847 - RNA, 19 nt, Homo sapiens
  misc_RNA (1)...(19): siRNA sense strand
gaaagugaagcaagcaucu

SEQ ID NO: 1921848 - RNA, 19 nt, Homo sapiens
  misc_RNA (1)...(19): siRNA sense strand
gaugaagaaacccugauug

SEQ ID NO: 1921849 - RNA, 19 nt, Homo sapiens
  misc_RNA (1)...(19): siRNA sense strand
gcaagacgagcaagacaca

SEQ ID NO: 1921850 - RNA, 19 nt, Homo sapiens
  misc_RNA (1)...(19): siRNA sense strand
aaacccugauugcauuauu

SEQ ID NO: 1921851 - RNA, 19 nt, Homo sapiens
  misc_RNA (1)...(19): siRNA sense strand
gagcaagacacacacagau

SEQ ID NO: 1921852 - RNA, 19 nt, Homo sapiens
  misc_RNA (1)...(19): siRNA sense strand
acacucggcuuggcuguug

SEQ ID NO: 1921853 - RNA, 19 nt, Homo sapiens
  misc_RNA (1)...(19): siRNA sense strand
caaacaaugggaauacugu

SEQ ID NO: 1921854 - RNA, 19 nt, Homo sapiens
  misc_RNA (1)...(19): siRNA sense strand
caaacuguccuagggauug

SEQ ID NO: 1921855 - RNA, 19 nt, Homo sapiens
  misc_RNA (1)...(19): siRNA sense strand
gaccagcagaccuaauuga

SEQ ID NO: 1921856 - RNA, 19 nt, Homo sapiens
  misc_RNA (1)...(19): siRNA sense strand
gguucgaaaugacuuaaag

SEQ ID NO: 1921857 - RNA, 19 nt, Homo sapiens
  misc_RNA (1)...(19): siRNA sense strand
ccuugguuauggaauauuu

SEQ ID NO: 1921858 - RNA, 19 nt, Homo sapiens
  misc_RNA (1)...(19): siRNA sense strand
cacagauacugaaagugaa

SEQ ID NO: 1921859 - RNA, 19 nt, Homo sapiens
  misc_RNA (1)...(19): siRNA sense strand
ggaguugcuuguggcaugu

SEQ ID NO: 1921860 - RNA, 19 nt, Homo sapiens
  misc_RNA (1)...(19): siRNA sense strand
ggaccagcagaccuaauug

SEQ ID NO: 1921861 - RNA, 19 nt, Homo sapiens
  misc_RNA (1)...(19): siRNA sense strand
agacacacacagauacuga

SEQ ID NO: 1921862 - RNA, 19 nt, Homo sapiens
  misc_RNA (1)...(19): siRNA sense strand
agaccuaauugacaaaguc

SEQ ID NO: 1921863 - RNA, 19 nt, Homo sapiens
  misc_RNA (1)...(19): siRNA sense strand
ucaaagaagaaauccugaa

SEQ ID NO: 1921864 - RNA, 19 nt, Homo sapiens
  misc_RNA (1)...(19): siRNA sense strand
ccugaaaugcucaaacaau

SEQ ID NO: 1921865 - RNA, 19 nt, Homo sapiens
  misc_RNA (1)...(19): siRNA sense strand
gccaggaccagcagaccua

SEQ ID NO: 1921866 - RNA, 19 nt, Homo sapiens
  misc_RNA (1)...(19): siRNA sense strand
gaugcuggacguacucaga

SEQ ID NO: 1921867 - RNA, 19 nt, Homo sapiens
  misc_RNA (1)...(19): siRNA sense strand
ucaagaugcuggacguacu

SEQ ID NO: 1921868 - RNA, 19 nt, Homo sapiens
  misc_RNA (1)...(19): siRNA sense strand
ccaaggugguggucaaagc

SEQ ID NO: 1921869 - RNA, 19 nt, Homo sapiens
  misc_RNA (1)...(19): siRNA sense strand
cuacaagcagauucaaaga

SEQ ID NO: 1921870 - RNA, 19 nt, Homo sapiens
  misc_RNA (1)...(19): siRNA sense strand
gcuggagccuucgaguaug

SEQ ID NO: 1921871 - RNA, 19 nt, Homo sapiens
  misc_RNA (1)...(19): siRNA sense strand
aagcagauucaaagaagaa

SEQ ID NO: 1921872 - RNA, 19 nt, Homo sapiens
  misc_RNA (1)...(19): siRNA sense strand
gcucaaacaaugggaauac

SEQ ID NO: 1921873 - RNA, 19 nt, Homo sapiens
  misc_RNA (1)...(19): siRNA sense strand
acacacacagauacugaaa

SEQ ID NO: 1921874 - RNA, 19 nt, Homo sapiens
  misc_RNA (1)...(19): siRNA sense strand
ucgaaaugacuuaaagaug

SEQ ID NO: 1921875 - RNA, 19 nt, Homo sapiens
  misc_RNA (1)...(19): siRNA sense strand
cgagcaagacacacacaga

SEQ ID NO: 1921876 - RNA, 19 nt, Homo sapiens
  misc_RNA (1)...(19): siRNA sense strand
gcagauucaaagaagaaau

SEQ ID NO: 1921877 - RNA, 19 nt, Homo sapiens
  misc_RNA (1)...(19): siRNA sense strand
gggaguacaagaugauucu

SEQ ID NO: 1921878 - RNA, 19 nt, Homo sapiens
  misc_RNA (1)...(19): siRNA sense strand
gaaacccugauugcauuau

SEQ ID NO: 1921879 - RNA, 19 nt, Homo sapiens
  misc_RNA (1)...(19): siRNA sense strand
agaaacccugauugcauua

SEQ ID NO: 1921880 - RNA, 19 nt, Homo sapiens
  misc_RNA (1)...(19): siRNA sense strand
ugaagaaacccugauugca

SEQ ID NO: 1921881 - RNA, 19 nt, Homo sapiens
  misc_RNA (1)...(19): siRNA sense strand
caaauccuugguuauggaa

SEQ ID NO: 1921882 - RNA, 19 nt, Homo sapiens
  misc_RNA (1)...(19): siRNA sense strand
uacaagcagauucaaagaa

SEQ ID NO: 1921883 - RNA, 19 nt, Homo sapiens
  misc_RNA (1)...(19): siRNA sense strand
gcucucaugcugcuguuuc

SEQ ID NO: 1921884 - RNA, 19 nt, Homo sapiens
  misc_RNA (1)...(19): siRNA sense strand
ugaugaagaaacccugauu

SEQ ID NO: 1921885 - RNA, 19 nt, Homo sapiens
  misc_RNA (1)...(19): siRNA sense strand
agcaagacacacacagaua

SEQ ID NO: 1921886 - RNA, 19 nt, Homo sapiens
  misc_RNA (1)...(19): siRNA sense strand
gaaauccugaaaugcucaa

SEQ ID NO: 1921887 - RNA, 19 nt, Homo sapiens
  misc_RNA (1)...(19): siRNA sense strand
ccuacaagcagauucaaag

SEQ ID NO: 1921888 - RNA, 19 nt, Homo sapiens
  misc_RNA (1)...(19): siRNA sense strand
aacccugauugcauuauug

SEQ ID NO: 1921889 - RNA, 19 nt, Homo sapiens
  misc_RNA (1)...(19): siRNA sense strand
guucgaaaugacuuaaaga

SEQ ID NO: 1921890 - RNA, 19 nt, Homo sapiens
  misc_RNA (1)...(19): siRNA sense strand
ccagcagaccuaauugaca

SEQ ID NO: 1921891 - RNA, 19 nt, Homo sapiens
  misc_RNA (1)...(19): siRNA sense strand
ugaaaugcucaaacaaugg

SEQ ID NO: 1921892 - RNA, 19 nt, Homo sapiens
  misc_RNA (1)...(19): siRNA sense strand
gacacacacagauacugaa

SEQ ID NO: 1921893 - RNA, 19 nt, Homo sapiens
  misc_RNA (1)...(19): siRNA sense strand
gcuggacguacucagauug

SEQ ID NO: 1921894 - RNA, 19 nt, Homo sapiens
  misc_RNA (1)...(19): siRNA sense strand
ucaaacaaugggaauacug

SEQ ID NO: 1921895 - RNA, 19 nt, Homo sapiens
  misc_RNA (1)...(19): siRNA sense strand
uuaagagacucaucagauu

SEQ ID NO: 1921896 - RNA, 19 nt, Homo sapiens
  misc_RNA (1)...(19): siRNA sense strand
gaagcaaaguuaagagacu

SEQ ID NO: 1921897 - RNA, 19 nt, Homo sapiens
  misc_RNA (1)...(19): siRNA sense strand
ccagcgggcuccucaauuc

SEQ ID NO: 1921898 - RNA, 19 nt, Homo sapiens
  misc_RNA (1)...(19): siRNA sense strand
guuaagagacucaucagau

SEQ ID NO: 1921899 - RNA, 19 nt, Homo sapiens
  misc_RNA (1)...(19): siRNA sense strand
gagcugcugcgggauauuu

SEQ ID NO: 1921900 - RNA, 19 nt, Homo sapiens
  misc_RNA (1)...(19): siRNA sense strand
uaagagacucaucagauuc

SEQ ID NO: 1921901 - RNA, 19 nt, Homo sapiens
  misc_RNA (1)...(19): siRNA sense strand
aaaguuaagagacucauca

SEQ ID NO: 1921902 - RNA, 19 nt, Homo sapiens
  misc_RNA (1)...(19): siRNA sense strand
uagaagcaaaguuaagaga

SEQ ID NO: 1921903 - RNA, 19 nt, Homo sapiens
  misc_RNA (1)...(19): siRNA sense strand
gagaugugccagcuguuca

SEQ ID NO: 1921904 - RNA, 19 nt, Homo sapiens
  misc_RNA (1)...(19): siRNA sense strand
gcuguucaccaccgagcua

SEQ ID NO: 1921905 - RNA, 19 nt, Homo sapiens
  misc_RNA (1)...(19): siRNA sense strand
uuaagagacucaucagauu

SEQ ID NO: 1921906 - RNA, 19 nt, Homo sapiens
  misc_RNA (1)...(19): siRNA sense strand
gaagcaaaguuaagagacu

SEQ ID NO: 1921907 - RNA, 19 nt, Homo sapiens
  misc_RNA (1)...(19): siRNA sense strand
ccagcgggcuccucaauuc

SEQ ID NO: 1921908 - RNA, 19 nt, Homo sapiens
  misc_RNA (1)...(19): siRNA sense strand
guuaagagacucaucagau

SEQ ID NO: 1921909 - RNA, 19 nt, Homo sapiens
  misc_RNA (1)...(19): siRNA sense strand
gagcugcugcgggauauuu

SEQ ID NO: 1921910 - RNA, 19 nt, Homo sapiens
  misc_RNA (1)...(19): siRNA sense strand
uaagagacucaucagauuc

SEQ ID NO: 1921911 - RNA, 19 nt, Homo sapiens
  misc_RNA (1)...(19): siRNA sense strand
aaaguuaagagacucauca

SEQ ID NO: 1921912 - RNA, 19 nt, Homo sapiens
  misc_RNA (1)...(19): siRNA sense strand
uagaagcaaaguuaagaga

SEQ ID NO: 1921913 - RNA, 19 nt, Homo sapiens
  misc_RNA (1)...(19): siRNA sense strand
gagaugugccagcuguuca

SEQ ID NO: 1921914 - RNA, 19 nt, Homo sapiens
  misc_RNA (1)...(19): siRNA sense strand
gcuguucaccaccgagcua

SEQ ID NO: 1921915 - RNA, 19 nt, Homo sapiens
  misc_RNA (1)...(19): siRNA sense strand
gaagacauccaguaaauuu

SEQ ID NO: 1921916 - RNA, 19 nt, Homo sapiens
  misc_RNA (1)...(19): siRNA sense strand
ggacaagucuuacagaaca

SEQ ID NO: 1921917 - RNA, 19 nt, Homo sapiens
  misc_RNA (1)...(19): siRNA sense strand
ggaugaaccuuuggaagua

SEQ ID NO: 1921918 - RNA, 19 nt, Homo sapiens
  misc_RNA (1)...(19): siRNA sense strand
ggagaaagacccuauaaau

SEQ ID NO: 1921919 - RNA, 19 nt, Homo sapiens
  misc_RNA (1)...(19): siRNA sense strand
gaaagacccuauaaaugug

SEQ ID NO: 1921920 - RNA, 19 nt, Homo sapiens
  misc_RNA (1)...(19): siRNA sense strand
gggaagacauccaguaaau

SEQ ID NO: 1921921 - RNA, 19 nt, Homo sapiens
  misc_RNA (1)...(19): siRNA sense strand
gagaaagacccuauaaaug

SEQ ID NO: 1921922 - RNA, 19 nt, Homo sapiens
  misc_RNA (1)...(19): siRNA sense strand
ggaguaagccugacugaga

SEQ ID NO: 1921923 - RNA, 19 nt, Homo sapiens
  misc_RNA (1)...(19): siRNA sense strand
cuacaaaugugacguaugu

SEQ ID NO: 1921924 - RNA, 19 nt, Homo sapiens
  misc_RNA (1)...(19): siRNA sense strand
gcaggccucuuucaccaua

SEQ ID NO: 1921925 - RNA, 19 nt, Homo sapiens
  misc_RNA (1)...(19): siRNA sense strand
caaccuaccugugaugaaa

SEQ ID NO: 1921926 - RNA, 19 nt, Homo sapiens
  misc_RNA (1)...(19): siRNA sense strand
ugacugugcuggaggauuu

SEQ ID NO: 1921927 - RNA, 19 nt, Homo sapiens
  misc_RNA (1)...(19): siRNA sense strand
ggaaauccaccacaaagaa

SEQ ID NO: 1921928 - RNA, 19 nt, Homo sapiens
  misc_RNA (1)...(19): siRNA sense strand
gagaaucuguccaggagaa

SEQ ID NO: 1921929 - RNA, 19 nt, Homo sapiens
  misc_RNA (1)...(19): siRNA sense strand
guaugaaucuccagaacuu

SEQ ID NO: 1921930 - RNA, 19 nt, Homo sapiens
  misc_RNA (1)...(19): siRNA sense strand
gggaaggcguuuacucaaa

SEQ ID NO: 1921931 - RNA, 19 nt, Homo sapiens
  misc_RNA (1)...(19): siRNA sense strand
ggaaaugaguaugggaauu

SEQ ID NO: 1921932 - RNA, 19 nt, Homo sapiens
  misc_RNA (1)...(19): siRNA sense strand
ggaccaggaugaaccuuug

SEQ ID NO: 1921933 - RNA, 19 nt, Homo sapiens
  misc_RNA (1)...(19): siRNA sense strand
agaaagacccuauaaaugu

SEQ ID NO: 1921934 - RNA, 19 nt, Homo sapiens
  misc_RNA (1)...(19): siRNA sense strand
gaauggcaaucuuguuuca

SEQ ID NO: 1921935 - RNA, 19 nt, Homo sapiens
  misc_RNA (1)...(19): siRNA sense strand
gaaauccaccacaaagaaa

SEQ ID NO: 1921936 - RNA, 19 nt, Homo sapiens
  misc_RNA (1)...(19): siRNA sense strand
ucgugaaccugaagaaaua

SEQ ID NO: 1921937 - RNA, 19 nt, Homo sapiens
  misc_RNA (1)...(19): siRNA sense strand
ggagaagcccuaccaaugu

SEQ ID NO: 1921938 - RNA, 19 nt, Homo sapiens
  misc_RNA (1)...(19): siRNA sense strand
gaacaucagcgaauucaca

SEQ ID NO: 1921939 - RNA, 19 nt, Homo sapiens
  misc_RNA (1)...(19): siRNA sense strand
gaguaagccugacugagaa

SEQ ID NO: 1921940 - RNA, 19 nt, Homo sapiens
  misc_RNA (1)...(19): siRNA sense strand
gggaaauccuucagucaga

SEQ ID NO: 1921941 - RNA, 19 nt, Homo sapiens
  misc_RNA (1)...(19): siRNA sense strand
ggaaaagccuucagacaga

SEQ ID NO: 1921942 - RNA, 19 nt, Homo sapiens
  misc_RNA (1)...(19): siRNA sense strand
ggaaggcguuuacucaaag

SEQ ID NO: 1921943 - RNA, 19 nt, Homo sapiens
  misc_RNA (1)...(19): siRNA sense strand
gggaggagguggugacugu

SEQ ID NO: 1921944 - RNA, 19 nt, Homo sapiens
  misc_RNA (1)...(19): siRNA sense strand
gagaagcccuaccaaugug

SEQ ID NO: 1921945 - RNA, 19 nt, Homo sapiens
  misc_RNA (1)...(19): siRNA sense strand
aaagauagaggaagagaaa

SEQ ID NO: 1921946 - RNA, 19 nt, Homo sapiens
  misc_RNA (1)...(19): siRNA sense strand
gcacucacaccucauagaa

SEQ ID NO: 1921947 - RNA, 19 nt, Homo sapiens
  misc_RNA (1)...(19): siRNA sense strand
gaugaaccuuuggaaguaa

SEQ ID NO: 1921948 - RNA, 19 nt, Homo sapiens
  misc_RNA (1)...(19): siRNA sense strand
gggagaagcccuaccaaug

SEQ ID NO: 1921949 - RNA, 19 nt, Homo sapiens
  misc_RNA (1)...(19): siRNA sense strand
ugaaagcccagccaaagua

SEQ ID NO: 1921950 - RNA, 19 nt, Homo sapiens
  misc_RNA (1)...(19): siRNA sense strand
ggaagaagaccagcuacaa

SEQ ID NO: 1921951 - RNA, 19 nt, Homo sapiens
  misc_RNA (1)...(19): siRNA sense strand
gaucaguccucacggaaca

SEQ ID NO: 1921952 - RNA, 19 nt, Homo sapiens
  misc_RNA (1)...(19): siRNA sense strand
ggagacagacccuacaaau

SEQ ID NO: 1921953 - RNA, 19 nt, Homo sapiens
  misc_RNA (1)...(19): siRNA sense strand
gagagaggcccuacaagug

SEQ ID NO: 1921954 - RNA, 19 nt, Homo sapiens
  misc_RNA (1)...(19): siRNA sense strand
gcuggaggauuuagagaga

SEQ ID NO: 1921955 - RNA, 19 nt, Homo sapiens
  misc_RNA (1)...(19): siRNA sense strand
cagaauggcaaucuuguuu

SEQ ID NO: 1921956 - RNA, 19 nt, Homo sapiens
  misc_RNA (1)...(19): siRNA sense strand
ggagagaggcccuacaagu

SEQ ID NO: 1921957 - RNA, 19 nt, Homo sapiens
  misc_RNA (1)...(19): siRNA sense strand
gaagaaauggaaccacaug

SEQ ID NO: 1921958 - RNA, 19 nt, Homo sapiens
  misc_RNA (1)...(19): siRNA sense strand
gaaggagaacccaguaugu

SEQ ID NO: 1921959 - RNA, 19 nt, Homo sapiens
  misc_RNA (1)...(19): siRNA sense strand
cuacaaaugcgaagaaugu

SEQ ID NO: 1921960 - RNA, 19 nt, Homo sapiens
  misc_RNA (1)...(19): siRNA sense strand
cuacaagugugaugagugu

SEQ ID NO: 1921961 - RNA, 19 nt, Homo sapiens
  misc_RNA (1)...(19): siRNA sense strand
ggagaacugugcuuauucg

SEQ ID NO: 1921962 - RNA, 19 nt, Homo sapiens
  misc_RNA (1)...(19): siRNA sense strand
gaaggcguuuacucaaaga

SEQ ID NO: 1921963 - RNA, 19 nt, Homo sapiens
  misc_RNA (1)...(19): siRNA sense strand
ggaaguaaagauagaggaa

SEQ ID NO: 1921964 - RNA, 19 nt, Homo sapiens
  misc_RNA (1)...(19): siRNA sense strand
gaagaccagcuacaaggaa

SEQ ID NO: 1921965 - RNA, 19 nt, Homo sapiens
  misc_RNA (1)...(19): siRNA sense strand
gaagaagaccagcuacaag

SEQ ID NO: 1921966 - RNA, 19 nt, Homo sapiens
  misc_RNA (1)...(19): siRNA sense strand
gagacagacccuacaaaug

SEQ ID NO: 1921967 - RNA, 19 nt, Homo sapiens
  misc_RNA (1)...(19): siRNA sense strand
agucggcguuccauacuua

SEQ ID NO: 1921968 - RNA, 19 nt, Homo sapiens
  misc_RNA (1)...(19): siRNA sense strand
uuacggaugugaugacugu

SEQ ID NO: 1921969 - RNA, 19 nt, Homo sapiens
  misc_RNA (1)...(19): siRNA sense strand
ggaagacauccaguaaauu

SEQ ID NO: 1921970 - RNA, 19 nt, Homo sapiens
  misc_RNA (1)...(19): siRNA sense strand
uauaacucaucccuuguuu

SEQ ID NO: 1921971 - RNA, 19 nt, Homo sapiens
  misc_RNA (1)...(19): siRNA sense strand
caagagacaaaccuuauca

SEQ ID NO: 1921972 - RNA, 19 nt, Homo sapiens
  misc_RNA (1)...(19): siRNA sense strand
acacaagagacaaaccuua

SEQ ID NO: 1921973 - RNA, 19 nt, Homo sapiens
  misc_RNA (1)...(19): siRNA sense strand
aauacacacuggagagaaa

SEQ ID NO: 1921974 - RNA, 19 nt, Homo sapiens
  misc_RNA (1)...(19): siRNA sense strand
uaaacaaccuaccugugau

SEQ ID NO: 1921975 - RNA, 19 nt, Homo sapiens
  misc_RNA (1)...(19): siRNA sense strand
auaaacaaccuaccuguga

SEQ ID NO: 1921976 - RNA, 19 nt, Homo sapiens
  misc_RNA (1)...(19): siRNA sense strand
acaaggaaauacuucugaa

SEQ ID NO: 1921977 - RNA, 19 nt, Homo sapiens
  misc_RNA (1)...(19): siRNA sense strand
agauagaggaagagaaaua

SEQ ID NO: 1921978 - RNA, 19 nt, Homo sapiens
  misc_RNA (1)...(19): siRNA sense strand
auucaaaggacaagucuua

SEQ ID NO: 1921979 - RNA, 19 nt, Homo sapiens
  misc_RNA (1)...(19): siRNA sense strand
gauagaggaagagaaauau

SEQ ID NO: 1921980 - RNA, 19 nt, Homo sapiens
  misc_RNA (1)...(19): siRNA sense strand
ugggagaacugugcuuauu

SEQ ID NO: 1921981 - RNA, 19 nt, Homo sapiens
  misc_RNA (1)...(19): siRNA sense strand
acugagaacucugaccaua

SEQ ID NO: 1921982 - RNA, 19 nt, Homo sapiens
  misc_RNA (1)...(19): siRNA sense strand
gaaagcccagccaaaguau

SEQ ID NO: 1921983 - RNA, 19 nt, Homo sapiens
  misc_RNA (1)...(19): siRNA sense strand
caaggaaauacuucugaaa

SEQ ID NO: 1921984 - RNA, 19 nt, Homo sapiens
  misc_RNA (1)...(19): siRNA sense strand
cuaccaaugugaugagugu

SEQ ID NO: 1921985 - RNA, 19 nt, Homo sapiens
  misc_RNA (1)...(19): siRNA sense strand
cugaagaaauaacagaaga

SEQ ID NO: 1921986 - RNA, 19 nt, Homo sapiens
  misc_RNA (1)...(19): siRNA sense strand
guaugggaauuuaaagcaa

SEQ ID NO: 1921987 - RNA, 19 nt, Homo sapiens
  misc_RNA (1)...(19): siRNA sense strand
gaacucugaccauacugaa

SEQ ID NO: 1921988 - RNA, 19 nt, Homo sapiens
  misc_RNA (1)...(19): siRNA sense strand
ugagaacucugaccauacu

SEQ ID NO: 1921989 - RNA, 19 nt, Homo sapiens
  misc_RNA (1)...(19): siRNA sense strand
agacagacccuacaaaugc

SEQ ID NO: 1921990 - RNA, 19 nt, Homo sapiens
  misc_RNA (1)...(19): siRNA sense strand
aaguaaagauagaggaaga

SEQ ID NO: 1921991 - RNA, 19 nt, Homo sapiens
  misc_RNA (1)...(19): siRNA sense strand
gaccagcuacaaggaaaua

SEQ ID NO: 1921992 - RNA, 19 nt, Homo sapiens
  misc_RNA (1)...(19): siRNA sense strand
caaaugugacguaugugaa

SEQ ID NO: 1921993 - RNA, 19 nt, Homo sapiens
  misc_RNA (1)...(19): siRNA sense strand
uaaccaacaucagagacuu

SEQ ID NO: 1921994 - RNA, 19 nt, Homo sapiens
  misc_RNA (1)...(19): siRNA sense strand
agagaggucuuccgucagu

SEQ ID NO: 1921995 - RNA, 19 nt, Homo sapiens
  misc_RNA (1)...(19): siRNA sense strand
ucacggaacaucagagaau

SEQ ID NO: 1921996 - RNA, 19 nt, Homo sapiens
  misc_RNA (1)...(19): siRNA sense strand
agacauccaguaaauuuga

SEQ ID NO: 1921997 - RNA, 19 nt, Homo sapiens
  misc_RNA (1)...(19): siRNA sense strand
aaggacaagucuuacagaa

SEQ ID NO: 1921998 - RNA, 19 nt, Homo sapiens
  misc_RNA (1)...(19): siRNA sense strand
gaagauaaacaaccuaccu

SEQ ID NO: 1921999 - RNA, 19 nt, Homo sapiens
  misc_RNA (1)...(19): siRNA sense strand
agaaauauaccaccagaca

SEQ ID NO: 1922000 - RNA, 19 nt, Homo sapiens
  misc_RNA (1)...(19): siRNA sense strand
gacauccaguaaauuugaa

SEQ ID NO: 1922001 - RNA, 19 nt, Homo sapiens
  misc_RNA (1)...(19): siRNA sense strand
acucacaccucauagaaca

SEQ ID NO: 1922002 - RNA, 19 nt, Homo sapiens
  misc_RNA (1)...(19): siRNA sense strand
caacaucagagacuucaca

SEQ ID NO: 1922003 - RNA, 19 nt, Homo sapiens
  misc_RNA (1)...(19): siRNA sense strand
ggagcaaguuuuagauguu

SEQ ID NO: 1922004 - RNA, 19 nt, Homo sapiens
  misc_RNA (1)...(19): siRNA sense strand
aaagaaggagaacccagua

SEQ ID NO: 1922005 - RNA, 19 nt, Homo sapiens
  misc_RNA (1)...(19): siRNA sense strand
cgagaacuuugccaucagu

SEQ ID NO: 1922006 - RNA, 19 nt, Homo sapiens
  misc_RNA (1)...(19): siRNA sense strand
aagaccagcuacaaggaaa

SEQ ID NO: 1922007 - RNA, 19 nt, Homo sapiens
  misc_RNA (1)...(19): siRNA sense strand
uacagaacaucagcgaauu

SEQ ID NO: 1922008 - RNA, 19 nt, Homo sapiens
  misc_RNA (1)...(19): siRNA sense strand
acaaaugugacguauguga

SEQ ID NO: 1922009 - RNA, 19 nt, Homo sapiens
  misc_RNA (1)...(19): siRNA sense strand
ggagcagcauccagagagu

SEQ ID NO: 1922010 - RNA, 19 nt, Homo sapiens
  misc_RNA (1)...(19): siRNA sense strand
ggaaccacaugggaagaca

SEQ ID NO: 1922011 - RNA, 19 nt, Homo sapiens
  misc_RNA (1)...(19): siRNA sense strand
ggccagagacccacaccaa

SEQ ID NO: 1922012 - RNA, 19 nt, Homo sapiens
  misc_RNA (1)...(19): siRNA sense strand
ggucuuccgucaguacuuc

SEQ ID NO: 1922013 - RNA, 19 nt, Homo sapiens
  misc_RNA (1)...(19): siRNA sense strand
ggcguuuacucaaagauca

SEQ ID NO: 1922014 - RNA, 19 nt, Homo sapiens
  misc_RNA (1)...(19): siRNA sense strand
cacaagagacaaaccuuau

SEQ ID NO: 1922015 - RNA, 19 nt, Homo sapiens
  misc_RNA (1)...(19): siRNA sense strand
ccaaagaacuggucaauga

SEQ ID NO: 1922016 - RNA, 19 nt, Homo sapiens
  misc_RNA (1)...(19): siRNA sense strand
gaaagaugcugccaagaag

SEQ ID NO: 1922017 - RNA, 19 nt, Homo sapiens
  misc_RNA (1)...(19): siRNA sense strand
ggaagaagcagaaauggaa

SEQ ID NO: 1922018 - RNA, 19 nt, Homo sapiens
  misc_RNA (1)...(19): siRNA sense strand
gaucauagaggagauguua

SEQ ID NO: 1922019 - RNA, 19 nt, Homo sapiens
  misc_RNA (1)...(19): siRNA sense strand
gaaaggaaaugagaguugu

SEQ ID NO: 1922020 - RNA, 19 nt, Homo sapiens
  misc_RNA (1)...(19): siRNA sense strand
aagcagaaauggaaauuga

SEQ ID NO: 1922021 - RNA, 19 nt, Homo sapiens
  misc_RNA (1)...(19): siRNA sense strand
ugacagaauucucuuugaa

SEQ ID NO: 1922022 - RNA, 19 nt, Homo sapiens
  misc_RNA (1)...(19): siRNA sense strand
uaagggauauccaaagaga

SEQ ID NO: 1922023 - RNA, 19 nt, Homo sapiens
  misc_RNA (1)...(19): siRNA sense strand
gauaagaaaggaaaugaga

SEQ ID NO: 1922024 - RNA, 19 nt, Homo sapiens
  misc_RNA (1)...(19): siRNA sense strand
gaagagcacagaagugaug

SEQ ID NO: 1922025 - RNA, 19 nt, Homo sapiens
  misc_RNA (1)...(19): siRNA sense strand
gcaaauaagggauauccaa

SEQ ID NO: 1922026 - RNA, 19 nt, Homo sapiens
  misc_RNA (1)...(19): siRNA sense strand
ggaggaagaagcagaaaug

SEQ ID NO: 1922027 - RNA, 19 nt, Homo sapiens
  misc_RNA (1)...(19): siRNA sense strand
gggcaaagcacccaguaaa

SEQ ID NO: 1922028 - RNA, 19 nt, Homo sapiens
  misc_RNA (1)...(19): siRNA sense strand
ugaaagaugcugccaagaa

SEQ ID NO: 1922029 - RNA, 19 nt, Homo sapiens
  misc_RNA (1)...(19): siRNA sense strand
ugagggaguuguccaaaga

SEQ ID NO: 1922030 - RNA, 19 nt, Homo sapiens
  misc_RNA (1)...(19): siRNA sense strand
gcauaguucuggccaagga

SEQ ID NO: 1922031 - RNA, 19 nt, Homo sapiens
  misc_RNA (1)...(19): siRNA sense strand
caaauaagggauauccaaa

SEQ ID NO: 1922032 - RNA, 19 nt, Homo sapiens
  misc_RNA (1)...(19): siRNA sense strand
aauaagggauauccaaaga

SEQ ID NO: 1922033 - RNA, 19 nt, Homo sapiens
  misc_RNA (1)...(19): siRNA sense strand
gaaaugagaguuguugaca

SEQ ID NO: 1922034 - RNA, 19 nt, Homo sapiens
  misc_RNA (1)...(19): siRNA sense strand
gagaugaucaggucaagga

SEQ ID NO: 1922035 - RNA, 19 nt, Homo sapiens
  misc_RNA (1)...(19): siRNA sense strand
ggaguuguccaaagaaaug

SEQ ID NO: 1922036 - RNA, 19 nt, Homo sapiens
  misc_RNA (1)...(19): siRNA sense strand
gcaaagcacccaguaaagu

SEQ ID NO: 1922037 - RNA, 19 nt, Homo sapiens
  misc_RNA (1)...(19): siRNA sense strand
gaagauaagaaaggaaaug

SEQ ID NO: 1922038 - RNA, 19 nt, Homo sapiens
  misc_RNA (1)...(19): siRNA sense strand
gaguggucauugaagauaa

SEQ ID NO: 1922039 - RNA, 19 nt, Homo sapiens
  misc_RNA (1)...(19): siRNA sense strand
caagcuguaugcauccaaa

SEQ ID NO: 1922040 - RNA, 19 nt, Homo sapiens
  misc_RNA (1)...(19): siRNA sense strand
cagaagagcacagaaguga

SEQ ID NO: 1922041 - RNA, 19 nt, Homo sapiens
  misc_RNA (1)...(19): siRNA sense strand
gaaggaugucugcauaguu

SEQ ID NO: 1922042 - RNA, 19 nt, Homo sapiens
  misc_RNA (1)...(19): siRNA sense strand
gacagaauucucuuugaaa

SEQ ID NO: 1922043 - RNA, 19 nt, Homo sapiens
  misc_RNA (1)...(19): siRNA sense strand
gaagaagcagaaauggaaa

SEQ ID NO: 1922044 - RNA, 19 nt, Homo sapiens
  misc_RNA (1)...(19): siRNA sense strand
aaagugaaacgaucuguga

SEQ ID NO: 1922045 - RNA, 19 nt, Homo sapiens
  misc_RNA (1)...(19): siRNA sense strand
aaggaugucugcauaguuc

SEQ ID NO: 1922046 - RNA, 19 nt, Homo sapiens
  misc_RNA (1)...(19): siRNA sense strand
gaaauggaaauugacagaa

SEQ ID NO: 1922047 - RNA, 19 nt, Homo sapiens
  misc_RNA (1)...(19): siRNA sense strand
aggaagaaauggaggaaga

SEQ ID NO: 1922048 - RNA, 19 nt, Homo sapiens
  misc_RNA (1)...(19): siRNA sense strand
caaggaaggcugugagcaa

SEQ ID NO: 1922049 - RNA, 19 nt, Homo sapiens
  misc_RNA (1)...(19): siRNA sense strand
ggucauugaagauaagaaa

SEQ ID NO: 1922050 - RNA, 19 nt, Homo sapiens
  misc_RNA (1)...(19): siRNA sense strand
caaagcacccaguaaagug

SEQ ID NO: 1922051 - RNA, 19 nt, Homo sapiens
  misc_RNA (1)...(19): siRNA sense strand
ccaagaagggccagaagga

SEQ ID NO: 1922052 - RNA, 19 nt, Homo sapiens
  misc_RNA (1)...(19): siRNA sense strand
guuguugacaggcaaauaa

SEQ ID NO: 1922053 - RNA, 19 nt, Homo sapiens
  misc_RNA (1)...(19): siRNA sense strand
gcagaaauggaaauugaca

SEQ ID NO: 1922054 - RNA, 19 nt, Homo sapiens
  misc_RNA (1)...(19): siRNA sense strand
ggaagaaauggaggaagaa

SEQ ID NO: 1922055 - RNA, 19 nt, Homo sapiens
  misc_RNA (1)...(19): siRNA sense strand
cauggacgaucaggaagaa

SEQ ID NO: 1922056 - RNA, 19 nt, Homo sapiens
  misc_RNA (1)...(19): siRNA sense strand
gcagaagagcacagaagug

SEQ ID NO: 1922057 - RNA, 19 nt, Homo sapiens
  misc_RNA (1)...(19): siRNA sense strand
gagauucaggccaccauga

SEQ ID NO: 1922058 - RNA, 19 nt, Homo sapiens
  misc_RNA (1)...(19): siRNA sense strand
gugaaacgaucugugaaag

SEQ ID NO: 1922059 - RNA, 19 nt, Homo sapiens
  misc_RNA (1)...(19): siRNA sense strand
gaagcagaaauggaaauug

SEQ ID NO: 1922060 - RNA, 19 nt, Homo sapiens
  misc_RNA (1)...(19): siRNA sense strand
ggacgaucaggaagaaaug

SEQ ID NO: 1922061 - RNA, 19 nt, Homo sapiens
  misc_RNA (1)...(19): siRNA sense strand
ugaaggccaugcaaagucu

SEQ ID NO: 1922062 - RNA, 19 nt, Homo sapiens
  misc_RNA (1)...(19): siRNA sense strand
uaagaaaggaaaugagagu

SEQ ID NO: 1922063 - RNA, 19 nt, Homo sapiens
  misc_RNA (1)...(19): siRNA sense strand
gacaggcaaauaagggaua

SEQ ID NO: 1922064 - RNA, 19 nt, Homo sapiens
  misc_RNA (1)...(19): siRNA sense strand
agaaaggaaaugagaguug

SEQ ID NO: 1922065 - RNA, 19 nt, Homo sapiens
  misc_RNA (1)...(19): siRNA sense strand
ucauagaggagauguuaga

SEQ ID NO: 1922066 - RNA, 19 nt, Homo sapiens
  misc_RNA (1)...(19): siRNA sense strand
ggauauccaaagagaagaa

SEQ ID NO: 1922067 - RNA, 19 nt, Homo sapiens
  misc_RNA (1)...(19): siRNA sense strand
aagcacacaugaacucagu

SEQ ID NO: 1922068 - RNA, 19 nt, Homo sapiens
  misc_RNA (1)...(19): siRNA sense strand
ugugaagauuccagagauu

SEQ ID NO: 1922069 - RNA, 19 nt, Homo sapiens
  misc_RNA (1)...(19): siRNA sense strand
gaugaaggccaugcaaagu

SEQ ID NO: 1922070 - RNA, 19 nt, Homo sapiens
  misc_RNA (1)...(19): siRNA sense strand
ccaaagcacacaugaacuc

SEQ ID NO: 1922071 - RNA, 19 nt, Homo sapiens
  misc_RNA (1)...(19): siRNA sense strand
cauugaagauaagaaagga

SEQ ID NO: 1922072 - RNA, 19 nt, Homo sapiens
  misc_RNA (1)...(19): siRNA sense strand
gcauggacgaucaggaaga

SEQ ID NO: 1922073 - RNA, 19 nt, Homo sapiens
  misc_RNA (1)...(19): siRNA sense strand
ugaguggucauugaagaua

SEQ ID NO: 1922074 - RNA, 19 nt, Homo sapiens
  misc_RNA (1)...(19): siRNA sense strand
agaaccagcucgcggucuu

SEQ ID NO: 1922075 - RNA, 19 nt, Homo sapiens
  misc_RNA (1)...(19): siRNA sense strand
ggaaggcugugagcaagcu

SEQ ID NO: 1922076 - RNA, 19 nt, Homo sapiens
  misc_RNA (1)...(19): siRNA sense strand
agaaauggaaauugacaga

SEQ ID NO: 1922077 - RNA, 19 nt, Homo sapiens
  misc_RNA (1)...(19): siRNA sense strand
aagcauggacgaucaggaa

SEQ ID NO: 1922078 - RNA, 19 nt, Homo sapiens
  misc_RNA (1)...(19): siRNA sense strand
ugaaacgaucugugaaaga

SEQ ID NO: 1922079 - RNA, 19 nt, Homo sapiens
  misc_RNA (1)...(19): siRNA sense strand
agaaggaugucugcauagu

SEQ ID NO: 1922080 - RNA, 19 nt, Homo sapiens
  misc_RNA (1)...(19): siRNA sense strand
gagcgauggcugccucaga

SEQ ID NO: 1922081 - RNA, 19 nt, Homo sapiens
  misc_RNA (1)...(19): siRNA sense strand
gaagaaauggaggaagaag

SEQ ID NO: 1922082 - RNA, 19 nt, Homo sapiens
  misc_RNA (1)...(19): siRNA sense strand
caugcaaagucuugugaag

SEQ ID NO: 1922083 - RNA, 19 nt, Homo sapiens
  misc_RNA (1)...(19): siRNA sense strand
uugaaagcauggacgauca

SEQ ID NO: 1922084 - RNA, 19 nt, Homo sapiens
  misc_RNA (1)...(19): siRNA sense strand
ggaaaugagaguuguugac

SEQ ID NO: 1922085 - RNA, 19 nt, Homo sapiens
  misc_RNA (1)...(19): siRNA sense strand
agaaauggaggaagaagca

SEQ ID NO: 1922086 - RNA, 19 nt, Homo sapiens
  misc_RNA (1)...(19): siRNA sense strand
gcugugagcaagcuguaug

SEQ ID NO: 1922087 - RNA, 19 nt, Homo sapiens
  misc_RNA (1)...(19): siRNA sense strand
aaagcacccaguaaaguga

SEQ ID NO: 1922088 - RNA, 19 nt, Homo sapiens
  misc_RNA (1)...(19): siRNA sense strand
gauguuagaggacacuuuu

SEQ ID NO: 1922089 - RNA, 19 nt, Homo sapiens
  misc_RNA (1)...(19): siRNA sense strand
uauccaaagagaagaagaa

SEQ ID NO: 1922090 - RNA, 19 nt, Homo sapiens
  misc_RNA (1)...(19): siRNA sense strand
caagaagggccagaaggau

SEQ ID NO: 1922091 - RNA, 19 nt, Homo sapiens
  misc_RNA (1)...(19): siRNA sense strand
gagcacagaagugaugaag

SEQ ID NO: 1922092 - RNA, 19 nt, Homo sapiens
  misc_RNA (1)...(19): siRNA sense strand
uugacagaauucucuuuga

SEQ ID NO: 1922093 - RNA, 19 nt, Homo sapiens
  misc_RNA (1)...(19): siRNA sense strand
gugaugaaggccaugcaaa

SEQ ID NO: 1922094 - RNA, 19 nt, Homo sapiens
  misc_RNA (1)...(19): siRNA sense strand
gaaccagcucgcggucuug

SEQ ID NO: 1922095 - RNA, 19 nt, Homo sapiens
  misc_RNA (1)...(19): siRNA sense strand
ggcaaagcacccaguaaag

SEQ ID NO: 1922096 - RNA, 19 nt, Homo sapiens
  misc_RNA (1)...(19): siRNA sense strand
gcauccaaagcacacauga

SEQ ID NO: 1922097 - RNA, 19 nt, Homo sapiens
  misc_RNA (1)...(19): siRNA sense strand
caaagaacuggucaaugag

SEQ ID NO: 1922098 - RNA, 19 nt, Homo sapiens
  misc_RNA (1)...(19): siRNA sense strand
gagggaguuguccaaagaa

SEQ ID NO: 1922099 - RNA, 19 nt, Homo sapiens
  misc_RNA (1)...(19): siRNA sense strand
gcccaaagaacuggucaau

SEQ ID NO: 1922100 - RNA, 19 nt, Homo sapiens
  misc_RNA (1)...(19): siRNA sense strand
caaagcacacaugaacuca

SEQ ID NO: 1922101 - RNA, 19 nt, Homo sapiens
  misc_RNA (1)...(19): siRNA sense strand
agggaguuguccaaagaaa

SEQ ID NO: 1922102 - RNA, 19 nt, Homo sapiens
  misc_RNA (1)...(19): siRNA sense strand
gccaugcaaagucuuguga

SEQ ID NO: 1922103 - RNA, 19 nt, Homo sapiens
  misc_RNA (1)...(19): siRNA sense strand
ugaaggcugggaucauaga

SEQ ID NO: 1922104 - RNA, 19 nt, Homo sapiens
  misc_RNA (1)...(19): siRNA sense strand
aaauaagggauauccaaag

SEQ ID NO: 1922105 - RNA, 19 nt, Homo sapiens
  misc_RNA (1)...(19): siRNA sense strand
uuggaaagacccaggagaa

SEQ ID NO: 1922106 - RNA, 19 nt, Homo sapiens
  misc_RNA (1)...(19): siRNA sense strand
agaagcagaaauggaaauu

SEQ ID NO: 1922107 - RNA, 19 nt, Homo sapiens
  misc_RNA (1)...(19): siRNA sense strand
gggaguuguccaaagaaau

SEQ ID NO: 1922108 - RNA, 19 nt, Homo sapiens
  misc_RNA (1)...(19): siRNA sense strand
gugaagauuccagagauuc

SEQ ID NO: 1922109 - RNA, 19 nt, Homo sapiens
  misc_RNA (1)...(19): siRNA sense strand
ugaugaaggccaugcaaag

SEQ ID NO: 1922110 - RNA, 19 nt, Homo sapiens
  misc_RNA (1)...(19): siRNA sense strand
aaagaacuggucaaugagu

SEQ ID NO: 1922111 - RNA, 19 nt, Homo sapiens
  misc_RNA (1)...(19): siRNA sense strand
agaagggccagaaggaugu

SEQ ID NO: 1922112 - RNA, 19 nt, Homo sapiens
  misc_RNA (1)...(19): siRNA sense strand
acaggcaaauaagggauau

SEQ ID NO: 1922113 - RNA, 19 nt, Homo sapiens
  misc_RNA (1)...(19): siRNA sense strand
agugaaacgaucugugaaa

SEQ ID NO: 1922114 - RNA, 19 nt, Homo sapiens
  misc_RNA (1)...(19): siRNA sense strand
gcugguucccugcagaaga

SEQ ID NO: 1922115 - RNA, 19 nt, Homo sapiens
  misc_RNA (1)...(19): siRNA sense strand
gaagaugccauuuccauuu

SEQ ID NO: 1922116 - RNA, 19 nt, Homo sapiens
  misc_RNA (1)...(19): siRNA sense strand
cagcauaacuugcagaaga

SEQ ID NO: 1922117 - RNA, 19 nt, Homo sapiens
  misc_RNA (1)...(19): siRNA sense strand
ucgaggagcugcagcauaa

SEQ ID NO: 1922118 - RNA, 19 nt, Homo sapiens
  misc_RNA (1)...(19): siRNA sense strand
ggagauggacuuugagaaa

SEQ ID NO: 1922119 - RNA, 19 nt, Homo sapiens
  misc_RNA (1)...(19): siRNA sense strand
aaaggaagcuggaggaaca

SEQ ID NO: 1922120 - RNA, 19 nt, Homo sapiens
  misc_RNA (1)...(19): siRNA sense strand
uaacuuagccgcagagauc

SEQ ID NO: 1922121 - RNA, 19 nt, Homo sapiens
  misc_RNA (1)...(19): siRNA sense strand
gguacuauuuccuaaguga

SEQ ID NO: 1922122 - RNA, 19 nt, Homo sapiens
  misc_RNA (1)...(19): siRNA sense strand
gaagaaggacgcggacuug

SEQ ID NO: 1922123 - RNA, 19 nt, Homo sapiens
  misc_RNA (1)...(19): siRNA sense strand
gcucaucagugccugguau

SEQ ID NO: 1922124 - RNA, 19 nt, Homo sapiens
  misc_RNA (1)...(19): siRNA sense strand
uccaagagcucaugaccaa

SEQ ID NO: 1922125 - RNA, 19 nt, Homo sapiens
  misc_RNA (1)...(19): siRNA sense strand
aagaaucgguucagcaugu

SEQ ID NO: 1922126 - RNA, 19 nt, Homo sapiens
  misc_RNA (1)...(19): siRNA sense strand
agagacguauggcaacuuu

SEQ ID NO: 1922127 - RNA, 19 nt, Homo sapiens
  misc_RNA (1)...(19): siRNA sense strand
ggaggaacauuugcagaag

SEQ ID NO: 1922128 - RNA, 19 nt, Homo sapiens
  misc_RNA (1)...(19): siRNA sense strand
gaagcuggaggaacauuug

SEQ ID NO: 1922129 - RNA, 19 nt, Homo sapiens
  misc_RNA (1)...(19): siRNA sense strand
ggaagaaucgguucagcau

SEQ ID NO: 1922130 - RNA, 19 nt, Homo sapiens
  misc_RNA (1)...(19): siRNA sense strand
gaccacauccagagaauca

SEQ ID NO: 1922131 - RNA, 19 nt, Homo sapiens
  misc_RNA (1)...(19): siRNA sense strand
ggaagcgggaguacauuga

SEQ ID NO: 1922132 - RNA, 19 nt, Homo sapiens
  misc_RNA (1)...(19): siRNA sense strand
ggucucugcucaccugguu

SEQ ID NO: 1922133 - RNA, 19 nt, Homo sapiens
  misc_RNA (1)...(19): siRNA sense strand
ucaugacgcuggaagaauc

SEQ ID NO: 1922134 - RNA, 19 nt, Homo sapiens
  misc_RNA (1)...(19): siRNA sense strand
aucagugccugguauaaua

SEQ ID NO: 1922135 - RNA, 19 nt, Homo sapiens
  misc_RNA (1)...(19): siRNA sense strand
ggaagcuggaggaacauuu

SEQ ID NO: 1922136 - RNA, 19 nt, Homo sapiens
  misc_RNA (1)...(19): siRNA sense strand
ugaaggaugagauggauga

SEQ ID NO: 1922137 - RNA, 19 nt, Homo sapiens
  misc_RNA (1)...(19): siRNA sense strand
gaagaaaagcugcucauca

SEQ ID NO: 1922138 - RNA, 19 nt, Homo sapiens
  misc_RNA (1)...(19): siRNA sense strand
ggcuucagcuggagaacaa

SEQ ID NO: 1922139 - RNA, 19 nt, Homo sapiens
  misc_RNA (1)...(19): siRNA sense strand
cgcgacaacuggaggauga

SEQ ID NO: 1922140 - RNA, 19 nt, Homo sapiens
  misc_RNA (1)...(19): siRNA sense strand
gagauggacuuugagaaaa

SEQ ID NO: 1922141 - RNA, 19 nt, Homo sapiens
  misc_RNA (1)...(19): siRNA sense strand
ccaugaaggccgagaaaug

SEQ ID NO: 1922142 - RNA, 19 nt, Homo sapiens
  misc_RNA (1)...(19): siRNA sense strand
ggucuuacggagccuagua

SEQ ID NO: 1922143 - RNA, 19 nt, Homo sapiens
  misc_RNA (1)...(19): siRNA sense strand
ugaggcagaucuggaguug

SEQ ID NO: 1922144 - RNA, 19 nt, Homo sapiens
  misc_RNA (1)...(19): siRNA sense strand
aaucccagcuggagcaguu

SEQ ID NO: 1922145 - RNA, 19 nt, Homo sapiens
  misc_RNA (1)...(19): siRNA sense strand
cagguacuauuuccuaagu

SEQ ID NO: 1922146 - RNA, 19 nt, Homo sapiens
  misc_RNA (1)...(19): siRNA sense strand
gagccucauuggagaguuc

SEQ ID NO: 1922147 - RNA, 19 nt, Homo sapiens
  misc_RNA (1)...(19): siRNA sense strand
ggaaccaggcgcugacuag

SEQ ID NO: 1922148 - RNA, 19 nt, Homo sapiens
  misc_RNA (1)...(19): siRNA sense strand
gugcugggcugugccauca

SEQ ID NO: 1922149 - RNA, 19 nt, Homo sapiens
  misc_RNA (1)...(19): siRNA sense strand
caagagcucaugaccaaag

SEQ ID NO: 1922150 - RNA, 19 nt, Homo sapiens
  misc_RNA (1)...(19): siRNA sense strand
ggagaaggagcggcuguug

SEQ ID NO: 1922151 - RNA, 19 nt, Homo sapiens
  misc_RNA (1)...(19): siRNA sense strand
ugccaucaguugcgagaaa

SEQ ID NO: 1922152 - RNA, 19 nt, Homo sapiens
  misc_RNA (1)...(19): siRNA sense strand
ccuaugugcugaaccagau

SEQ ID NO: 1922153 - RNA, 19 nt, Homo sapiens
  misc_RNA (1)...(19): siRNA sense strand
aggcagaucuggaguugca

SEQ ID NO: 1922154 - RNA, 19 nt, Homo sapiens
  misc_RNA (1)...(19): siRNA sense strand
cugcucaccugguuacaga

SEQ ID NO: 1922155 - RNA, 19 nt, Homo sapiens
  misc_RNA (1)...(19): siRNA sense strand
agacguauggcaacuuuga

SEQ ID NO: 1922156 - RNA, 19 nt, Homo sapiens
  misc_RNA (1)...(19): siRNA sense strand
gagccuggcgcaagagaau

SEQ ID NO: 1922157 - RNA, 19 nt, Homo sapiens
  misc_RNA (1)...(19): siRNA sense strand
ugaagaugccauuuccauu

SEQ ID NO: 1922158 - RNA, 19 nt, Homo sapiens
  misc_RNA (1)...(19): siRNA sense strand
uacggagccuaguagagua

SEQ ID NO: 1922159 - RNA, 19 nt, Homo sapiens
  misc_RNA (1)...(19): siRNA sense strand
ggacgccuggcaucucuga

SEQ ID NO: 1922160 - RNA, 19 nt, Homo sapiens
  misc_RNA (1)...(19): siRNA sense strand
aggccacgcugaccaguug

SEQ ID NO: 1922161 - RNA, 19 nt, Homo sapiens
  misc_RNA (1)...(19): siRNA sense strand
ccgcagguacuauuuccua

SEQ ID NO: 1922162 - RNA, 19 nt, Homo sapiens
  misc_RNA (1)...(19): siRNA sense strand
gaaucaugacgcuggaaga

SEQ ID NO: 1922163 - RNA, 19 nt, Homo sapiens
  misc_RNA (1)...(19): siRNA sense strand
ggagcugcagcauaacuug

SEQ ID NO: 1922164 - RNA, 19 nt, Homo sapiens
  misc_RNA (1)...(19): siRNA sense strand
ggaugagauggaugaacua

SEQ ID NO: 1922165 - RNA, 19 nt, Homo sapiens
  misc_RNA (1)...(19): siRNA sense strand
gaagauccaggucccaacu

SEQ ID NO: 1922166 - RNA, 19 nt, Homo sapiens
  misc_RNA (1)...(19): siRNA sense strand
gcaggaccacauccagaga

SEQ ID NO: 1922167 - RNA, 19 nt, Homo sapiens
  misc_RNA (1)...(19): siRNA sense strand
gaggacacagcuccgagaa

SEQ ID NO: 1922168 - RNA, 19 nt, Homo sapiens
  misc_RNA (1)...(19): siRNA sense strand
ucaccugguuacagacguu

SEQ ID NO: 1922169 - RNA, 19 nt, Homo sapiens
  misc_RNA (1)...(19): siRNA sense strand
agcauaacuugcagaagaa

SEQ ID NO: 1922170 - RNA, 19 nt, Homo sapiens
  misc_RNA (1)...(19): siRNA sense strand
uggaggaccugcagaaagc

SEQ ID NO: 1922171 - RNA, 19 nt, Homo sapiens
  misc_RNA (1)...(19): siRNA sense strand
cgcagguacuauuuccuaa

SEQ ID NO: 1922172 - RNA, 19 nt, Homo sapiens
  misc_RNA (1)...(19): siRNA sense strand
uggaggaacauuugcagaa

SEQ ID NO: 1922173 - RNA, 19 nt, Homo sapiens
  misc_RNA (1)...(19): siRNA sense strand
gaugaacuacggcagucuu

SEQ ID NO: 1922174 - RNA, 19 nt, Homo sapiens
  misc_RNA (1)...(19): siRNA sense strand
aggaugagauggaugaacu

SEQ ID NO: 1922175 - RNA, 19 nt, Homo sapiens
  misc_RNA (1)...(19): siRNA sense strand
ccacauccagagaaucaug

SEQ ID NO: 1922176 - RNA, 19 nt, Homo sapiens
  misc_RNA (1)...(19): siRNA sense strand
caucagugccugguauaau

SEQ ID NO: 1922177 - RNA, 19 nt, Homo sapiens
  misc_RNA (1)...(19): siRNA sense strand
agacugaagaugccauuuc

SEQ ID NO: 1922178 - RNA, 19 nt, Homo sapiens
  misc_RNA (1)...(19): siRNA sense strand
caugaaggccgagaaaugg

SEQ ID NO: 1922179 - RNA, 19 nt, Homo sapiens
  misc_RNA (1)...(19): siRNA sense strand
gcugggcugugccaucagu

SEQ ID NO: 1922180 - RNA, 19 nt, Homo sapiens
  misc_RNA (1)...(19): siRNA sense strand
gacugaagaugccauuucc

SEQ ID NO: 1922181 - RNA, 19 nt, Homo sapiens
  misc_RNA (1)...(19): siRNA sense strand
caagacugaagaugccauu

SEQ ID NO: 1922182 - RNA, 19 nt, Homo sapiens
  misc_RNA (1)...(19): siRNA sense strand
aguaugagucggugacaaa

SEQ ID NO: 1922183 - RNA, 19 nt, Homo sapiens
  misc_RNA (1)...(19): siRNA sense strand
gcaggaggaggccaugaag

SEQ ID NO: 1922184 - RNA, 19 nt, Homo sapiens
  misc_RNA (1)...(19): siRNA sense strand
gagcucaugaccaaagaca

SEQ ID NO: 1922185 - RNA, 19 nt, Homo sapiens
  misc_RNA (1)...(19): siRNA sense strand
gaagcuucaugaggcagau

SEQ ID NO: 1922186 - RNA, 19 nt, Homo sapiens
  misc_RNA (1)...(19): siRNA sense strand
uuacggagccuaguagagu

SEQ ID NO: 1922187 - RNA, 19 nt, Homo sapiens
  misc_RNA (1)...(19): siRNA sense strand
uagccuaugugcugaacca

SEQ ID NO: 1922188 - RNA, 19 nt, Homo sapiens
  misc_RNA (1)...(19): siRNA sense strand
agaagaaggacgcggacuu

SEQ ID NO: 1922189 - RNA, 19 nt, Homo sapiens
  misc_RNA (1)...(19): siRNA sense strand
agaggaagcgggaguacau

SEQ ID NO: 1922190 - RNA, 19 nt, Homo sapiens
  misc_RNA (1)...(19): siRNA sense strand
aagaugccauuuccauuuu

SEQ ID NO: 1922191 - RNA, 19 nt, Homo sapiens
  misc_RNA (1)...(19): siRNA sense strand
augagucggugacaaagga

SEQ ID NO: 1922192 - RNA, 19 nt, Homo sapiens
  misc_RNA (1)...(19): siRNA sense strand
gcucaugaccaaagacacu

SEQ ID NO: 1922193 - RNA, 19 nt, Homo sapiens
  misc_RNA (1)...(19): siRNA sense strand
ccugaaggaugagauggau

SEQ ID NO: 1922194 - RNA, 19 nt, Homo sapiens
  misc_RNA (1)...(19): siRNA sense strand
accuggagauggacuuuga

SEQ ID NO: 1922195 - RNA, 19 nt, Homo sapiens
  misc_RNA (1)...(19): siRNA sense strand
gaagcgggaguacauugag

SEQ ID NO: 1922196 - RNA, 19 nt, Homo sapiens
  misc_RNA (1)...(19): siRNA sense strand
gaggaagcgggaguacauu

SEQ ID NO: 1922197 - RNA, 19 nt, Homo sapiens
  misc_RNA (1)...(19): siRNA sense strand
gcagguacuauuuccuaag

SEQ ID NO: 1922198 - RNA, 19 nt, Homo sapiens
  misc_RNA (1)...(19): siRNA sense strand
gguggaggaccugcagaaa

SEQ ID NO: 1922199 - RNA, 19 nt, Homo sapiens
  misc_RNA (1)...(19): siRNA sense strand
aagagcucaugaccaaaga

SEQ ID NO: 1922200 - RNA, 19 nt, Homo sapiens
  misc_RNA (1)...(19): siRNA sense strand
gcaccuccagaacuccauu

SEQ ID NO: 1922201 - RNA, 19 nt, Homo sapiens
  misc_RNA (1)...(19): siRNA sense strand
aaucaugacgcuggaagaa

SEQ ID NO: 1922202 - RNA, 19 nt, Homo sapiens
  misc_RNA (1)...(19): siRNA sense strand
ccagagacguauggcaacu

SEQ ID NO: 1922203 - RNA, 19 nt, Homo sapiens
  misc_RNA (1)...(19): siRNA sense strand
ucagugccugguauaauau

SEQ ID NO: 1922204 - RNA, 19 nt, Homo sapiens
  misc_RNA (1)...(19): siRNA sense strand
aagaaaagcugcucaucag

SEQ ID NO: 1922205 - RNA, 19 nt, Homo sapiens
  misc_RNA (1)...(19): siRNA sense strand
uccgacaccuggagaugga

SEQ ID NO: 1922206 - RNA, 19 nt, Homo sapiens
  misc_RNA (1)...(19): siRNA sense strand
gaaggaugagauggaugaa

SEQ ID NO: 1922207 - RNA, 19 nt, Homo sapiens
  misc_RNA (1)...(19): siRNA sense strand
cugagaagcuuaagacaua

SEQ ID NO: 1922208 - RNA, 19 nt, Homo sapiens
  misc_RNA (1)...(19): siRNA sense strand
gcaagucucugcucuuugu

SEQ ID NO: 1922209 - RNA, 19 nt, Homo sapiens
  misc_RNA (1)...(19): siRNA sense strand
ucaaggagcugauauuaca

SEQ ID NO: 1922210 - RNA, 19 nt, Homo sapiens
  misc_RNA (1)...(19): siRNA sense strand
gaagccagaugugguagua

SEQ ID NO: 1922211 - RNA, 19 nt, Homo sapiens
  misc_RNA (1)...(19): siRNA sense strand
ugaaggagaucaaggaaga

SEQ ID NO: 1922212 - RNA, 19 nt, Homo sapiens
  misc_RNA (1)...(19): siRNA sense strand
gggcaagucucugcucuuu

SEQ ID NO: 1922213 - RNA, 19 nt, Homo sapiens
  misc_RNA (1)...(19): siRNA sense strand
gagcugugcugauggagaa

SEQ ID NO: 1922214 - RNA, 19 nt, Homo sapiens
  misc_RNA (1)...(19): siRNA sense strand
caagacagccugaaacuuc

SEQ ID NO: 1922215 - RNA, 19 nt, Homo sapiens
  misc_RNA (1)...(19): siRNA sense strand
gcacugggcuucgaacaca

SEQ ID NO: 1922216 - RNA, 19 nt, Homo sapiens
  misc_RNA (1)...(19): siRNA sense strand
ggagaagccagauguggua

SEQ ID NO: 1922217 - RNA, 19 nt, Homo sapiens
  misc_RNA (1)...(19): siRNA sense strand
aagaagagcucaagagucu

SEQ ID NO: 1922218 - RNA, 19 nt, Homo sapiens
  misc_RNA (1)...(19): siRNA sense strand
gcauagacuuccaccaugu

SEQ ID NO: 1922219 - RNA, 19 nt, Homo sapiens
  misc_RNA (1)...(19): siRNA sense strand
caacccaggcauagucuua

SEQ ID NO: 1922220 - RNA, 19 nt, Homo sapiens
  misc_RNA (1)...(19): siRNA sense strand
gcacaaaggaaagaaauuc

SEQ ID NO: 1922221 - RNA, 19 nt, Homo sapiens
  misc_RNA (1)...(19): siRNA sense strand
acaaauuccuccugcugua

SEQ ID NO: 1922222 - RNA, 19 nt, Homo sapiens
  misc_RNA (1)...(19): siRNA sense strand
ggcauagucuuaaccuuug

SEQ ID NO: 1922223 - RNA, 19 nt, Homo sapiens
  misc_RNA (1)...(19): siRNA sense strand
ggacagcacgcgcuaacaa

SEQ ID NO: 1922224 - RNA, 19 nt, Homo sapiens
  misc_RNA (1)...(19): siRNA sense strand
agacauacuuugaagacaa

SEQ ID NO: 1922225 - RNA, 19 nt, Homo sapiens
  misc_RNA (1)...(19): siRNA sense strand
gcagcuggcuaccuacugu

SEQ ID NO: 1922226 - RNA, 19 nt, Homo sapiens
  misc_RNA (1)...(19): siRNA sense strand
gaccccaucucgcauauua

SEQ ID NO: 1922227 - RNA, 19 nt, Homo sapiens
  misc_RNA (1)...(19): siRNA sense strand
gagaggccuuguucuuguu

SEQ ID NO: 1922228 - RNA, 19 nt, Homo sapiens
  misc_RNA (1)...(19): siRNA sense strand
gagcugauauuacauaacc

SEQ ID NO: 1922229 - RNA, 19 nt, Homo sapiens
  misc_RNA (1)...(19): siRNA sense strand
ugagaggccuuguucuugu

SEQ ID NO: 1922230 - RNA, 19 nt, Homo sapiens
  misc_RNA (1)...(19): siRNA sense strand
gcaagcacaguccaugauu

SEQ ID NO: 1922231 - RNA, 19 nt, Homo sapiens
  misc_RNA (1)...(19): siRNA sense strand
gcagugagaggccuuguuc

SEQ ID NO: 1922232 - RNA, 19 nt, Homo sapiens
  misc_RNA (1)...(19): siRNA sense strand
gcagcaagacagccugaaa

SEQ ID NO: 1922233 - RNA, 19 nt, Homo sapiens
  misc_RNA (1)...(19): siRNA sense strand
caaaggaaagaaauucaga

SEQ ID NO: 1922234 - RNA, 19 nt, Homo sapiens
  misc_RNA (1)...(19): siRNA sense strand
gccaugcgcucagugacua

SEQ ID NO: 1922235 - RNA, 19 nt, Homo sapiens
  misc_RNA (1)...(19): siRNA sense strand
caagcacaguccaugauuc

SEQ ID NO: 1922236 - RNA, 19 nt, Homo sapiens
  misc_RNA (1)...(19): siRNA sense strand
ccacggagcaguuccacuu

SEQ ID NO: 1922237 - RNA, 19 nt, Homo sapiens
  misc_RNA (1)...(19): siRNA sense strand
cugcagcuguugcuccaua

SEQ ID NO: 1922238 - RNA, 19 nt, Homo sapiens
  misc_RNA (1)...(19): siRNA sense strand
agacugaggaagacaaauu

SEQ ID NO: 1922239 - RNA, 19 nt, Homo sapiens
  misc_RNA (1)...(19): siRNA sense strand
gaucgagggcuuccgcuau

SEQ ID NO: 1922240 - RNA, 19 nt, Homo sapiens
  misc_RNA (1)...(19): siRNA sense strand
cacaucaucucacaguuca

SEQ ID NO: 1922241 - RNA, 19 nt, Homo sapiens
  misc_RNA (1)...(19): siRNA sense strand
gggcauagacuuccaccau

SEQ ID NO: 1922242 - RNA, 19 nt, Homo sapiens
  misc_RNA (1)...(19): siRNA sense strand
cgacagguccggugguaga

SEQ ID NO: 1922243 - RNA, 19 nt, Homo sapiens
  misc_RNA (1)...(19): siRNA sense strand
uaacaacccaggcauaguc

SEQ ID NO: 1922244 - RNA, 19 nt, Homo sapiens
  misc_RNA (1)...(19): siRNA sense strand
ggacguacaagcacucaag

SEQ ID NO: 1922245 - RNA, 19 nt, Homo sapiens
  misc_RNA (1)...(19): siRNA sense strand
uaacgaggacguacaagca

SEQ ID NO: 1922246 - RNA, 19 nt, Homo sapiens
  misc_RNA (1)...(19): siRNA sense strand
gcaagacagccugaaacuu

SEQ ID NO: 1922247 - RNA, 19 nt, Homo sapiens
  misc_RNA (1)...(19): siRNA sense strand
ggagaucaaggaagagcuu

SEQ ID NO: 1922248 - RNA, 19 nt, Homo sapiens
  misc_RNA (1)...(19): siRNA sense strand
aggcauagucuuaaccuuu

SEQ ID NO: 1922249 - RNA, 19 nt, Homo sapiens
  misc_RNA (1)...(19): siRNA sense strand
cuacgacugugucauagca

SEQ ID NO: 1922250 - RNA, 19 nt, Homo sapiens
  misc_RNA (1)...(19): siRNA sense strand
cuucuacgacugugucaua

SEQ ID NO: 1922251 - RNA, 19 nt, Homo sapiens
  misc_RNA (1)...(19): siRNA sense strand
ccaccugugugcucaaugg

SEQ ID NO: 1922252 - RNA, 19 nt, Homo sapiens
  misc_RNA (1)...(19): siRNA sense strand
acucaaggagcugauauua

SEQ ID NO: 1922253 - RNA, 19 nt, Homo sapiens
  misc_RNA (1)...(19): siRNA sense strand
gcacucaaggagcugauau

SEQ ID NO: 1922254 - RNA, 19 nt, Homo sapiens
  misc_RNA (1)...(19): siRNA sense strand
ccacaucaucucacaguuc

SEQ ID NO: 1922255 - RNA, 19 nt, Homo sapiens
  misc_RNA (1)...(19): siRNA sense strand
ggcaugaccuaccuuugca

SEQ ID NO: 1922256 - RNA, 19 nt, Homo sapiens
  misc_RNA (1)...(19): siRNA sense strand
gcuuaagacauacuuugaa

SEQ ID NO: 1922257 - RNA, 19 nt, Homo sapiens
  misc_RNA (1)...(19): siRNA sense strand
agagagcugugcugaugga

SEQ ID NO: 1922258 - RNA, 19 nt, Homo sapiens
  misc_RNA (1)...(19): siRNA sense strand
cuuaagacauacuuugaag

SEQ ID NO: 1922259 - RNA, 19 nt, Homo sapiens
  misc_RNA (1)...(19): siRNA sense strand
gaagcuuaagacauacuuu

SEQ ID NO: 1922260 - RNA, 19 nt, Homo sapiens
  misc_RNA (1)...(19): siRNA sense strand
gguagaacaggcagugaga

SEQ ID NO: 1922261 - RNA, 19 nt, Homo sapiens
  misc_RNA (1)...(19): siRNA sense strand
ugaagaagagcucaagagu

SEQ ID NO: 1922262 - RNA, 19 nt, Homo sapiens
  misc_RNA (1)...(19): siRNA sense strand
gugagaggccuuguucuug

SEQ ID NO: 1922263 - RNA, 19 nt, Homo sapiens
  misc_RNA (1)...(19): siRNA sense strand
gagcuucugcauucugaga

SEQ ID NO: 1922264 - RNA, 19 nt, Homo sapiens
  misc_RNA (1)...(19): siRNA sense strand
aagagcuucugcauucuga

SEQ ID NO: 1922265 - RNA, 19 nt, Homo sapiens
  misc_RNA (1)...(19): siRNA sense strand
gcuaacaacccaggcauag

SEQ ID NO: 1922266 - RNA, 19 nt, Homo sapiens
  misc_RNA (1)...(19): siRNA sense strand
gcauagucuuaaccuuugu

SEQ ID NO: 1922267 - RNA, 19 nt, Homo sapiens
  misc_RNA (1)...(19): siRNA sense strand
aaggagcugauauuacaua

SEQ ID NO: 1922268 - RNA, 19 nt, Homo sapiens
  misc_RNA (1)...(19): siRNA sense strand
caagcacaaaggaaagaaa

SEQ ID NO: 1922269 - RNA, 19 nt, Homo sapiens
  misc_RNA (1)...(19): siRNA sense strand
gacauacuuugaagacaac

SEQ ID NO: 1922270 - RNA, 19 nt, Homo sapiens
  misc_RNA (1)...(19): siRNA sense strand
cuacgcugauccaggagaa

SEQ ID NO: 1922271 - RNA, 19 nt, Homo sapiens
  misc_RNA (1)...(19): siRNA sense strand
uaagacauacuuugaagac

SEQ ID NO: 1922272 - RNA, 19 nt, Homo sapiens
  misc_RNA (1)...(19): siRNA sense strand
ugucugcugugcucaacuu

SEQ ID NO: 1922273 - RNA, 19 nt, Homo sapiens
  misc_RNA (1)...(19): siRNA sense strand
ugacuaagcaggccauucg

SEQ ID NO: 1922274 - RNA, 19 nt, Homo sapiens
  misc_RNA (1)...(19): siRNA sense strand
caaauuccuccugcuguau

SEQ ID NO: 1922275 - RNA, 19 nt, Homo sapiens
  misc_RNA (1)...(19): siRNA sense strand
acaagaagcggaagaagcu

SEQ ID NO: 1922276 - RNA, 19 nt, Homo sapiens
  misc_RNA (1)...(19): siRNA sense strand
ggaaggccaagagagcaaa

SEQ ID NO: 1922277 - RNA, 19 nt, Homo sapiens
  misc_RNA (1)...(19): siRNA sense strand
cagaccaguuacagcaguu

SEQ ID NO: 1922278 - RNA, 19 nt, Homo sapiens
  misc_RNA (1)...(19): siRNA sense strand
gaugccaugcgcucaguga

SEQ ID NO: 1922279 - RNA, 19 nt, Homo sapiens
  misc_RNA (1)...(19): siRNA sense strand
agucuuaaccuuugugcuu

SEQ ID NO: 1922280 - RNA, 19 nt, Homo sapiens
  misc_RNA (1)...(19): siRNA sense strand
aggagcugauauuacauaa

SEQ ID NO: 1922281 - RNA, 19 nt, Homo sapiens
  misc_RNA (1)...(19): siRNA sense strand
aagcugucuuccucuugua

SEQ ID NO: 1922282 - RNA, 19 nt, Homo sapiens
  misc_RNA (1)...(19): siRNA sense strand
cgguuacccuuaaguuaca

SEQ ID NO: 1922283 - RNA, 19 nt, Homo sapiens
  misc_RNA (1)...(19): siRNA sense strand
cccgguuacccuuaaguua

SEQ ID NO: 1922284 - RNA, 19 nt, Homo sapiens
  misc_RNA (1)...(19): siRNA sense strand
aagcuuaagacauacuuug

SEQ ID NO: 1922285 - RNA, 19 nt, Homo sapiens
  misc_RNA (1)...(19): siRNA sense strand
ggugccacaucaucucaca

SEQ ID NO: 1922286 - RNA, 19 nt, Homo sapiens
  misc_RNA (1)...(19): siRNA sense strand
ucugugagacugaggaaga

SEQ ID NO: 1922287 - RNA, 19 nt, Homo sapiens
  misc_RNA (1)...(19): siRNA sense strand
aguuucagguggucuguga

SEQ ID NO: 1922288 - RNA, 19 nt, Homo sapiens
  misc_RNA (1)...(19): siRNA sense strand
gacugaggaagacaaauuc

SEQ ID NO: 1922289 - RNA, 19 nt, Homo sapiens
  misc_RNA (1)...(19): siRNA sense strand
aagcacaguccaugauuca

SEQ ID NO: 1922290 - RNA, 19 nt, Homo sapiens
  misc_RNA (1)...(19): siRNA sense strand
cagguccggugguagaaca

SEQ ID NO: 1922291 - RNA, 19 nt, Homo sapiens
  misc_RNA (1)...(19): siRNA sense strand
ucucugcucuuugucaaca

SEQ ID NO: 1922292 - RNA, 19 nt, Homo sapiens
  misc_RNA (1)...(19): siRNA sense strand
ggcuacgccuguucuugga

SEQ ID NO: 1922293 - RNA, 19 nt, Homo sapiens
  misc_RNA (1)...(19): siRNA sense strand
cacaaaggaaagaaauuca

SEQ ID NO: 1922294 - RNA, 19 nt, Homo sapiens
  misc_RNA (1)...(19): siRNA sense strand
ccgaguggccaaugucuca

SEQ ID NO: 1922295 - RNA, 19 nt, Homo sapiens
  misc_RNA (1)...(19): siRNA sense strand
cacggagcaguuccacuua

SEQ ID NO: 1922296 - RNA, 19 nt, Homo sapiens
  misc_RNA (1)...(19): siRNA sense strand
ccaaggcuucuacgacugu

SEQ ID NO: 1922297 - RNA, 19 nt, Homo sapiens
  misc_RNA (1)...(19): siRNA sense strand
uuaccaggcuuuucucaug

SEQ ID NO: 1922298 - RNA, 19 nt, Homo sapiens
  misc_RNA (1)...(19): siRNA sense strand
gccacaucaucucacaguu

SEQ ID NO: 1922299 - RNA, 19 nt, Homo sapiens
  misc_RNA (1)...(19): siRNA sense strand
uguaugcccugcucaagcu

SEQ ID NO: 1922300 - RNA, 19 nt, Homo sapiens
  misc_RNA (1)...(19): siRNA sense strand
ggcaagcacaguccaugau

SEQ ID NO: 1922301 - RNA, 19 nt, Homo sapiens
  misc_RNA (1)...(19): siRNA sense strand
gggaugccaugcgcucagu

SEQ ID NO: 1922302 - RNA, 19 nt, Homo sapiens
  misc_RNA (1)...(19): siRNA sense strand
gagcaaauucucaccaguu

SEQ ID NO: 1922303 - RNA, 19 nt, Homo sapiens
  misc_RNA (1)...(19): siRNA sense strand
agcaaauucucaccaguua

SEQ ID NO: 1922304 - RNA, 19 nt, Homo sapiens
  misc_RNA (1)...(19): siRNA sense strand
caaauucucaccaguuaug

SEQ ID NO: 1922305 - RNA, 19 nt, Homo sapiens
  misc_RNA (1)...(19): siRNA sense strand
acaggaaauugguugguuu

SEQ ID NO: 1922306 - RNA, 19 nt, Homo sapiens
  misc_RNA (1)...(19): siRNA sense strand
ggaaauugguugguuuggu

SEQ ID NO: 1922307 - RNA, 19 nt, Homo sapiens
  misc_RNA (1)...(19): siRNA sense strand
ccaaguggcacaggaaauu

SEQ ID NO: 1922308 - RNA, 19 nt, Homo sapiens
  misc_RNA (1)...(19): siRNA sense strand
cacaggaaauugguugguu

SEQ ID NO: 1922309 - RNA, 19 nt, Homo sapiens
  misc_RNA (1)...(19): siRNA sense strand
ucaagccacgcccaaauga

SEQ ID NO: 1922310 - RNA, 19 nt, Homo sapiens
  misc_RNA (1)...(19): siRNA sense strand
cugcagauaauguucaauu

SEQ ID NO: 1922311 - RNA, 19 nt, Homo sapiens
  misc_RNA (1)...(19): siRNA sense strand
gcaaauucucaccaguuau

SEQ ID NO: 1922312 - RNA, 19 nt, Homo sapiens
  misc_RNA (1)...(19): siRNA sense strand
caaguggcacaggaaauug

SEQ ID NO: 1922313 - RNA, 19 nt, Homo sapiens
  misc_RNA (1)...(19): siRNA sense strand
ucucaccaguuaugauagu

SEQ ID NO: 1922314 - RNA, 19 nt, Homo sapiens
  misc_RNA (1)...(19): siRNA sense strand
ucaccaguuaugauaguuu

SEQ ID NO: 1922315 - RNA, 19 nt, Homo sapiens
  misc_RNA (1)...(19): siRNA sense strand
auucucaccaguuaugaua

SEQ ID NO: 1922316 - RNA, 19 nt, Homo sapiens
  misc_RNA (1)...(19): siRNA sense strand
caggaaauugguugguuug

SEQ ID NO: 1922317 - RNA, 19 nt, Homo sapiens
  misc_RNA (1)...(19): siRNA sense strand
gucaagccacgcccaaaug

SEQ ID NO: 1922318 - RNA, 19 nt, Homo sapiens
  misc_RNA (1)...(19): siRNA sense strand
gcacaggaaauugguuggu

SEQ ID NO: 1922319 - RNA, 19 nt, Homo sapiens
  misc_RNA (1)...(19): siRNA sense strand
guaauuuggucaacacuua

SEQ ID NO: 1922320 - RNA, 19 nt, Homo sapiens
  misc_RNA (1)...(19): siRNA sense strand
gcacuuggcucuuaucuac

SEQ ID NO: 1922321 - RNA, 19 nt, Homo sapiens
  misc_RNA (1)...(19): siRNA sense strand
gaacgacugucccgagcaa

SEQ ID NO: 1922322 - RNA, 19 nt, Homo sapiens
  misc_RNA (1)...(19): siRNA sense strand
caagggcauugaccacaaa

SEQ ID NO: 1922323 - RNA, 19 nt, Homo sapiens
  misc_RNA (1)...(19): siRNA sense strand
caacacuuacuaugacuuu

SEQ ID NO: 1922324 - RNA, 19 nt, Homo sapiens
  misc_RNA (1)...(19): siRNA sense strand
gcagugcccuugccuacag

SEQ ID NO: 1922325 - RNA, 19 nt, Homo sapiens
  misc_RNA (1)...(19): siRNA sense strand
ccaagggcauugaccacaa

SEQ ID NO: 1922326 - RNA, 19 nt, Homo sapiens
  misc_RNA (1)...(19): siRNA sense strand
ggacacuuguggaccgaau

SEQ ID NO: 1922327 - RNA, 19 nt, Homo sapiens
  misc_RNA (1)...(19): siRNA sense strand
gggagagacugucaaagcu

SEQ ID NO: 1922328 - RNA, 19 nt, Homo sapiens
  misc_RNA (1)...(19): siRNA sense strand
gggagaagauuaacauccu

SEQ ID NO: 1922329 - RNA, 19 nt, Homo sapiens
  misc_RNA (1)...(19): siRNA sense strand
ucaucauccucaucacuuu

SEQ ID NO: 1922330 - RNA, 19 nt, Homo sapiens
  misc_RNA (1)...(19): siRNA sense strand
caacaacaccagggacaug

SEQ ID NO: 1922331 - RNA, 19 nt, Homo sapiens
  misc_RNA (1)...(19): siRNA sense strand
gccacacacugcaccauca

SEQ ID NO: 1922332 - RNA, 19 nt, Homo sapiens
  misc_RNA (1)...(19): siRNA sense strand
ucuccuacauucucuacaa

SEQ ID NO: 1922333 - RNA, 19 nt, Homo sapiens
  misc_RNA (1)...(19): siRNA sense strand
gaccucaucauccucauca

SEQ ID NO: 1922334 - RNA, 19 nt, Homo sapiens
  misc_RNA (1)...(19): siRNA sense strand
gagucuuccucuacacguu

SEQ ID NO: 1922335 - RNA, 19 nt, Homo sapiens
  misc_RNA (1)...(19): siRNA sense strand
ccgaggccauucuccauuc

SEQ ID NO: 1922336 - RNA, 19 nt, Homo sapiens
  misc_RNA (1)...(19): siRNA sense strand
aagccaggccuucaacaaa

SEQ ID NO: 1922337 - RNA, 19 nt, Homo sapiens
  misc_RNA (1)...(19): siRNA sense strand
cuaugucuuuggcaucauu

SEQ ID NO: 1922338 - RNA, 19 nt, Homo sapiens
  misc_RNA (1)...(19): siRNA sense strand
cuacacaggaggaauugga

SEQ ID NO: 1922339 - RNA, 19 nt, Homo sapiens
  misc_RNA (1)...(19): siRNA sense strand
aggccugucuggcuccuuu

SEQ ID NO: 1922340 - RNA, 19 nt, Homo sapiens
  misc_RNA (1)...(19): siRNA sense strand
ccauggccuucucccuuga

SEQ ID NO: 1922341 - RNA, 19 nt, Homo sapiens
  misc_RNA (1)...(19): siRNA sense strand
acuuggcucuuaucuacuu

SEQ ID NO: 1922342 - RNA, 19 nt, Homo sapiens
  misc_RNA (1)...(19): siRNA sense strand
ucucuacacaggaggaauu

SEQ ID NO: 1922343 - RNA, 19 nt, Homo sapiens
  misc_RNA (1)...(19): siRNA sense strand
cuacaacacacugcucuuc

SEQ ID NO: 1922344 - RNA, 19 nt, Homo sapiens
  misc_RNA (1)...(19): siRNA sense strand
ggacuuuucuaugucuuug

SEQ ID NO: 1922345 - RNA, 19 nt, Homo sapiens
  misc_RNA (1)...(19): siRNA sense strand
gguaauuuggucaacacuu

SEQ ID NO: 1922346 - RNA, 19 nt, Homo sapiens
  misc_RNA (1)...(19): siRNA sense strand
cuugagagacaguuucgaa

SEQ ID NO: 1922347 - RNA, 19 nt, Homo sapiens
  misc_RNA (1)...(19): siRNA sense strand
gacugucccgagcaagaua

SEQ ID NO: 1922348 - RNA, 19 nt, Homo sapiens
  misc_RNA (1)...(19): siRNA sense strand
cugaggcccuggagcuuca

SEQ ID NO: 1922349 - RNA, 19 nt, Homo sapiens
  misc_RNA (1)...(19): siRNA sense strand
guucggagucuuccucuac

SEQ ID NO: 1922350 - RNA, 19 nt, Homo sapiens
  misc_RNA (1)...(19): siRNA sense strand
gaacagagguuuauaacaa

SEQ ID NO: 1922351 - RNA, 19 nt, Homo sapiens
  misc_RNA (1)...(19): siRNA sense strand
gaugaaggcuggacaauug

SEQ ID NO: 1922352 - RNA, 19 nt, Homo sapiens
  misc_RNA (1)...(19): siRNA sense strand
ggacaauugugcuaaauga

SEQ ID NO: 1922353 - RNA, 19 nt, Homo sapiens
  misc_RNA (1)...(19): siRNA sense strand
gauaauucuuugccuagua

SEQ ID NO: 1922354 - RNA, 19 nt, Homo sapiens
  misc_RNA (1)...(19): siRNA sense strand
gaagaaagccauggcauug

SEQ ID NO: 1922355 - RNA, 19 nt, Homo sapiens
  misc_RNA (1)...(19): siRNA sense strand
ccaaaccacuacaguauug

SEQ ID NO: 1922356 - RNA, 19 nt, Homo sapiens
  misc_RNA (1)...(19): siRNA sense strand
gcuaacaugccucauaaua

SEQ ID NO: 1922357 - RNA, 19 nt, Homo sapiens
  misc_RNA (1)...(19): siRNA sense strand
gaagccaucgcgauuguua

SEQ ID NO: 1922358 - RNA, 19 nt, Homo sapiens
  misc_RNA (1)...(19): siRNA sense strand
cacaaaggcuacaagcaua

SEQ ID NO: 1922359 - RNA, 19 nt, Homo sapiens
  misc_RNA (1)...(19): siRNA sense strand
cugauuaucugaagaacua

SEQ ID NO: 1922360 - RNA, 19 nt, Homo sapiens
  misc_RNA (1)...(19): siRNA sense strand
gauaccaucucuuccuauu

SEQ ID NO: 1922361 - RNA, 19 nt, Homo sapiens
  misc_RNA (1)...(19): siRNA sense strand
gcccucauaugaauguuua

SEQ ID NO: 1922362 - RNA, 19 nt, Homo sapiens
  misc_RNA (1)...(19): siRNA sense strand
auacggaccugaagauaaa

SEQ ID NO: 1922363 - RNA, 19 nt, Homo sapiens
  misc_RNA (1)...(19): siRNA sense strand
agacauuccuaacagauuu

SEQ ID NO: 1922364 - RNA, 19 nt, Homo sapiens
  misc_RNA (1)...(19): siRNA sense strand
cgaauucagcccauuauuu

SEQ ID NO: 1922365 - RNA, 19 nt, Homo sapiens
  misc_RNA (1)...(19): siRNA sense strand
gaucgaauucagcccauua

SEQ ID NO: 1922366 - RNA, 19 nt, Homo sapiens
  misc_RNA (1)...(19): siRNA sense strand
acaagaagaugaugaugau

SEQ ID NO: 1922367 - RNA, 19 nt, Homo sapiens
  misc_RNA (1)...(19): siRNA sense strand
ggaaugaggcaguaccuau

SEQ ID NO: 1922368 - RNA, 19 nt, Homo sapiens
  misc_RNA (1)...(19): siRNA sense strand
ccaccuaaguuacuacuag

SEQ ID NO: 1922369 - RNA, 19 nt, Homo sapiens
  misc_RNA (1)...(19): siRNA sense strand
ucaaagaagacauuccuaa

SEQ ID NO: 1922370 - RNA, 19 nt, Homo sapiens
  misc_RNA (1)...(19): siRNA sense strand
gaacccaccagucaccuuu

SEQ ID NO: 1922371 - RNA, 19 nt, Homo sapiens
  misc_RNA (1)...(19): siRNA sense strand
ccaaucagcuucaggaaaa

SEQ ID NO: 1922372 - RNA, 19 nt, Homo sapiens
  misc_RNA (1)...(19): siRNA sense strand
gaagaacuaugaauuuccu

SEQ ID NO: 1922373 - RNA, 19 nt, Homo sapiens
  misc_RNA (1)...(19): siRNA sense strand
gaugaugauccuuuaauug

SEQ ID NO: 1922374 - RNA, 19 nt, Homo sapiens
  misc_RNA (1)...(19): siRNA sense strand
cuacaagcauagcacaauu

SEQ ID NO: 1922375 - RNA, 19 nt, Homo sapiens
  misc_RNA (1)...(19): siRNA sense strand
gaaugaggcaguaccuauu

SEQ ID NO: 1922376 - RNA, 19 nt, Homo sapiens
  misc_RNA (1)...(19): siRNA sense strand
ggaagaaccagaugcaagu

SEQ ID NO: 1922377 - RNA, 19 nt, Homo sapiens
  misc_RNA (1)...(19): siRNA sense strand
gaauucagcccauuauuuu

SEQ ID NO: 1922378 - RNA, 19 nt, Homo sapiens
  misc_RNA (1)...(19): siRNA sense strand
cuaacaugccucauaauaa

SEQ ID NO: 1922379 - RNA, 19 nt, Homo sapiens
  misc_RNA (1)...(19): siRNA sense strand
ugacaggcuuguaugaaga

SEQ ID NO: 1922380 - RNA, 19 nt, Homo sapiens
  misc_RNA (1)...(19): siRNA sense strand
gcaucgaucauucauacua

SEQ ID NO: 1922381 - RNA, 19 nt, Homo sapiens
  misc_RNA (1)...(19): siRNA sense strand
ccaaagacucaagauguua

SEQ ID NO: 1922382 - RNA, 19 nt, Homo sapiens
  misc_RNA (1)...(19): siRNA sense strand
cuacuaguauccuuugaug

SEQ ID NO: 1922383 - RNA, 19 nt, Homo sapiens
  misc_RNA (1)...(19): siRNA sense strand
ggaccugcauuucacaaag

SEQ ID NO: 1922384 - RNA, 19 nt, Homo sapiens
  misc_RNA (1)...(19): siRNA sense strand
caacauaaugaucgaauuc

SEQ ID NO: 1922385 - RNA, 19 nt, Homo sapiens
  misc_RNA (1)...(19): siRNA sense strand
gcugcuauguggccuggua

SEQ ID NO: 1922386 - RNA, 19 nt, Homo sapiens
  misc_RNA (1)...(19): siRNA sense strand
gaauagacuuucuguaccu

SEQ ID NO: 1922387 - RNA, 19 nt, Homo sapiens
  misc_RNA (1)...(19): siRNA sense strand
aagcauagcacaauuaaca

SEQ ID NO: 1922388 - RNA, 19 nt, Homo sapiens
  misc_RNA (1)...(19): siRNA sense strand
cuauguggcuaaacaauuc

SEQ ID NO: 1922389 - RNA, 19 nt, Homo sapiens
  misc_RNA (1)...(19): siRNA sense strand
gcauagcacaauuaacauu

SEQ ID NO: 1922390 - RNA, 19 nt, Homo sapiens
  misc_RNA (1)...(19): siRNA sense strand
ccaacauaaugaucgaauu

SEQ ID NO: 1922391 - RNA, 19 nt, Homo sapiens
  misc_RNA (1)...(19): siRNA sense strand
ccacaaauacggaccugaa

SEQ ID NO: 1922392 - RNA, 19 nt, Homo sapiens
  misc_RNA (1)...(19): siRNA sense strand
gcuggacaauugugcuaaa

SEQ ID NO: 1922393 - RNA, 19 nt, Homo sapiens
  misc_RNA (1)...(19): siRNA sense strand
agaugaugaugauccuuua

SEQ ID NO: 1922394 - RNA, 19 nt, Homo sapiens
  misc_RNA (1)...(19): siRNA sense strand
gaucaagugcugcugcuau

SEQ ID NO: 1922395 - RNA, 19 nt, Homo sapiens
  misc_RNA (1)...(19): siRNA sense strand
cagaagccaucgcgauugu

SEQ ID NO: 1922396 - RNA, 19 nt, Homo sapiens
  misc_RNA (1)...(19): siRNA sense strand
gagcugauuaucugaagaa

SEQ ID NO: 1922397 - RNA, 19 nt, Homo sapiens
  misc_RNA (1)...(19): siRNA sense strand
gaagacauuccuaacagau

SEQ ID NO: 1922398 - RNA, 19 nt, Homo sapiens
  misc_RNA (1)...(19): siRNA sense strand
uuccucaucuccagaauuu

SEQ ID NO: 1922399 - RNA, 19 nt, Homo sapiens
  misc_RNA (1)...(19): siRNA sense strand
caauugugcuaaaugaauc

SEQ ID NO: 1922400 - RNA, 19 nt, Homo sapiens
  misc_RNA (1)...(19): siRNA sense strand
uccaaagacucaagauguu

SEQ ID NO: 1922401 - RNA, 19 nt, Homo sapiens
  misc_RNA (1)...(19): siRNA sense strand
agaaagccauggcauugug

SEQ ID NO: 1922402 - RNA, 19 nt, Homo sapiens
  misc_RNA (1)...(19): siRNA sense strand
augcuaacaugccucauaa

SEQ ID NO: 1922403 - RNA, 19 nt, Homo sapiens
  misc_RNA (1)...(19): siRNA sense strand
gggaaaaucuuaaugugau

SEQ ID NO: 1922404 - RNA, 19 nt, Homo sapiens
  misc_RNA (1)...(19): siRNA sense strand
caaauacggaccugaagau

SEQ ID NO: 1922405 - RNA, 19 nt, Homo sapiens
  misc_RNA (1)...(19): siRNA sense strand
ugaagaaagccauggcauu

SEQ ID NO: 1922406 - RNA, 19 nt, Homo sapiens
  misc_RNA (1)...(19): siRNA sense strand
ucacaaaggcuacaagcau

SEQ ID NO: 1922407 - RNA, 19 nt, Homo sapiens
  misc_RNA (1)...(19): siRNA sense strand
aaacauuuccaaaccacua

SEQ ID NO: 1922408 - RNA, 19 nt, Homo sapiens
  misc_RNA (1)...(19): siRNA sense strand
gugcauuaaucucccagaa

SEQ ID NO: 1922409 - RNA, 19 nt, Homo sapiens
  misc_RNA (1)...(19): siRNA sense strand
gcaauacuucccaaaauaa

SEQ ID NO: 1922410 - RNA, 19 nt, Homo sapiens
  misc_RNA (1)...(19): siRNA sense strand
gugacaggcuuguaugaag

SEQ ID NO: 1922411 - RNA, 19 nt, Homo sapiens
  misc_RNA (1)...(19): siRNA sense strand
ccacuacaguauugugaca

SEQ ID NO: 1922412 - RNA, 19 nt, Homo sapiens
  misc_RNA (1)...(19): siRNA sense strand
ggacuuauaacugguuuua

SEQ ID NO: 1922413 - RNA, 19 nt, Homo sapiens
  misc_RNA (1)...(19): siRNA sense strand
uaguaugcauccauuucua

SEQ ID NO: 1922414 - RNA, 19 nt, Homo sapiens
  misc_RNA (1)...(19): siRNA sense strand
agaagacauuccuaacaga

SEQ ID NO: 1922415 - RNA, 19 nt, Homo sapiens
  misc_RNA (1)...(19): siRNA sense strand
aaagaagacauuccuaaca

SEQ ID NO: 1922416 - RNA, 19 nt, Homo sapiens
  misc_RNA (1)...(19): siRNA sense strand
uuacaacuccucaguguca

SEQ ID NO: 1922417 - RNA, 19 nt, Homo sapiens
  misc_RNA (1)...(19): siRNA sense strand
uguuaucgguucacucuug

SEQ ID NO: 1922418 - RNA, 19 nt, Homo sapiens
  misc_RNA (1)...(19): siRNA sense strand
ccacggaccugcauuucac

SEQ ID NO: 1922419 - RNA, 19 nt, Homo sapiens
  misc_RNA (1)...(19): siRNA sense strand
cugaagaacuaugaauuuc

SEQ ID NO: 1922420 - RNA, 19 nt, Homo sapiens
  misc_RNA (1)...(19): siRNA sense strand
aagaagacauuccuaacag

SEQ ID NO: 1922421 - RNA, 19 nt, Homo sapiens
  misc_RNA (1)...(19): siRNA sense strand
cauucauacuacacucuua

SEQ ID NO: 1922422 - RNA, 19 nt, Homo sapiens
  misc_RNA (1)...(19): siRNA sense strand
guccaaagacucaagaugu

SEQ ID NO: 1922423 - RNA, 19 nt, Homo sapiens
  misc_RNA (1)...(19): siRNA sense strand
uaccaucucuuccuauuuu

SEQ ID NO: 1922424 - RNA, 19 nt, Homo sapiens
  misc_RNA (1)...(19): siRNA sense strand
uacaagcauagcacaauua

SEQ ID NO: 1922425 - RNA, 19 nt, Homo sapiens
  misc_RNA (1)...(19): siRNA sense strand
caacuccucagugucauuu

SEQ ID NO: 1922426 - RNA, 19 nt, Homo sapiens
  misc_RNA (1)...(19): siRNA sense strand
gcuaauuccauguaugaug

SEQ ID NO: 1922427 - RNA, 19 nt, Homo sapiens
  misc_RNA (1)...(19): siRNA sense strand
acaagcauagcacaauuaa

SEQ ID NO: 1922428 - RNA, 19 nt, Homo sapiens
  misc_RNA (1)...(19): siRNA sense strand
aauuacaacuccucagugu

SEQ ID NO: 1922429 - RNA, 19 nt, Homo sapiens
  misc_RNA (1)...(19): siRNA sense strand
gaugaugaugauccuuuaa

SEQ ID NO: 1922430 - RNA, 19 nt, Homo sapiens
  misc_RNA (1)...(19): siRNA sense strand
uaaaaccacaucccaauaa

SEQ ID NO: 1922431 - RNA, 19 nt, Homo sapiens
  misc_RNA (1)...(19): siRNA sense strand
ccucuaguuugccaccuaa

SEQ ID NO: 1922432 - RNA, 19 nt, Homo sapiens
  misc_RNA (1)...(19): siRNA sense strand
cugcaucgaucauucauac

SEQ ID NO: 1922433 - RNA, 19 nt, Homo sapiens
  misc_RNA (1)...(19): siRNA sense strand
ggaccugaagauaaagaaa

SEQ ID NO: 1922434 - RNA, 19 nt, Homo sapiens
  misc_RNA (1)...(19): siRNA sense strand
cauacuacacucuuauaga

SEQ ID NO: 1922435 - RNA, 19 nt, Homo sapiens
  misc_RNA (1)...(19): siRNA sense strand
uacaagaagaugaugauga

SEQ ID NO: 1922436 - RNA, 19 nt, Homo sapiens
  misc_RNA (1)...(19): siRNA sense strand
caaagaagacauuccuaac

SEQ ID NO: 1922437 - RNA, 19 nt, Homo sapiens
  misc_RNA (1)...(19): siRNA sense strand
aauacggaccugaagauaa

SEQ ID NO: 1922438 - RNA, 19 nt, Homo sapiens
  misc_RNA (1)...(19): siRNA sense strand
gaucuuaucggugacuuag

SEQ ID NO: 1922439 - RNA, 19 nt, Homo sapiens
  misc_RNA (1)...(19): siRNA sense strand
uaguuugccaccuaaguua

SEQ ID NO: 1922440 - RNA, 19 nt, Homo sapiens
  misc_RNA (1)...(19): siRNA sense strand
uggcuaauuccauguauga

SEQ ID NO: 1922441 - RNA, 19 nt, Homo sapiens
  misc_RNA (1)...(19): siRNA sense strand
aacuguagcccucauauga

SEQ ID NO: 1922442 - RNA, 19 nt, Homo sapiens
  misc_RNA (1)...(19): siRNA sense strand
caaagacucaagauguuag

SEQ ID NO: 1922443 - RNA, 19 nt, Homo sapiens
  misc_RNA (1)...(19): siRNA sense strand
gcaaguggccacaaauacg

SEQ ID NO: 1922444 - RNA, 19 nt, Homo sapiens
  misc_RNA (1)...(19): siRNA sense strand
agaugcaaguggccacaaa

SEQ ID NO: 1922445 - RNA, 19 nt, Homo sapiens
  misc_RNA (1)...(19): siRNA sense strand
gguucacucuugguguuaa

SEQ ID NO: 1922446 - RNA, 19 nt, Homo sapiens
  misc_RNA (1)...(19): siRNA sense strand
gaccugcauuucacaaagg

SEQ ID NO: 1922447 - RNA, 19 nt, Homo sapiens
  misc_RNA (1)...(19): siRNA sense strand
ugcaauacuucccaaaaua

SEQ ID NO: 1922448 - RNA, 19 nt, Homo sapiens
  misc_RNA (1)...(19): siRNA sense strand
ccaguguucucaggacaga

SEQ ID NO: 1922449 - RNA, 19 nt, Homo sapiens
  misc_RNA (1)...(19): siRNA sense strand
aagaugaugaugauccuuu

SEQ ID NO: 1922450 - RNA, 19 nt, Homo sapiens
  misc_RNA (1)...(19): siRNA sense strand
uuacacagcuugaauauga

SEQ ID NO: 1922451 - RNA, 19 nt, Homo sapiens
  misc_RNA (1)...(19): siRNA sense strand
gaaagaugaugaacuggaa

SEQ ID NO: 1922452 - RNA, 19 nt, Homo sapiens
  misc_RNA (1)...(19): siRNA sense strand
ggucaagggugcacaauga

SEQ ID NO: 1922453 - RNA, 19 nt, Homo sapiens
  misc_RNA (1)...(19): siRNA sense strand
gugaaacacugucuacgua

SEQ ID NO: 1922454 - RNA, 19 nt, Homo sapiens
  misc_RNA (1)...(19): siRNA sense strand
agacuucgaugacucuuua

SEQ ID NO: 1922455 - RNA, 19 nt, Homo sapiens
  misc_RNA (1)...(19): siRNA sense strand
gagaucagcucaguaacuu

SEQ ID NO: 1922456 - RNA, 19 nt, Homo sapiens
  misc_RNA (1)...(19): siRNA sense strand
ucccagggcugauacuuua

SEQ ID NO: 1922457 - RNA, 19 nt, Homo sapiens
  misc_RNA (1)...(19): siRNA sense strand
gaaacacugucuacguaug

SEQ ID NO: 1922458 - RNA, 19 nt, Homo sapiens
  misc_RNA (1)...(19): siRNA sense strand
guacaggaacuuauacaaa

SEQ ID NO: 1922459 - RNA, 19 nt, Homo sapiens
  misc_RNA (1)...(19): siRNA sense strand
agagagaccuagagaaaga

SEQ ID NO: 1922460 - RNA, 19 nt, Homo sapiens
  misc_RNA (1)...(19): siRNA sense strand
agagaaagaugaugaacug

SEQ ID NO: 1922461 - RNA, 19 nt, Homo sapiens
  misc_RNA (1)...(19): siRNA sense strand
uacacgagauuucauguuu

SEQ ID NO: 1922462 - RNA, 19 nt, Homo sapiens
  misc_RNA (1)...(19): siRNA sense strand
aaaccuccauuugugauua

SEQ ID NO: 1922463 - RNA, 19 nt, Homo sapiens
  misc_RNA (1)...(19): siRNA sense strand
aaacagaacaucaagauca

SEQ ID NO: 1922464 - RNA, 19 nt, Homo sapiens
  misc_RNA (1)...(19): siRNA sense strand
ugagagagaccuagagaaa

SEQ ID NO: 1922465 - RNA, 19 nt, Homo sapiens
  misc_RNA (1)...(19): siRNA sense strand
ccauuuggcuccaguugaa

SEQ ID NO: 1922466 - RNA, 19 nt, Homo sapiens
  misc_RNA (1)...(19): siRNA sense strand
ggaagagacugugaaagag

SEQ ID NO: 1922467 - RNA, 19 nt, Homo sapiens
  misc_RNA (1)...(19): siRNA sense strand
gaggacaucuaucuuagca

SEQ ID NO: 1922468 - RNA, 19 nt, Homo sapiens
  misc_RNA (1)...(19): siRNA sense strand
caacagggcagccucuuau

SEQ ID NO: 1922469 - RNA, 19 nt, Homo sapiens
  misc_RNA (1)...(19): siRNA sense strand
gaagagacugugaaagaga

SEQ ID NO: 1922470 - RNA, 19 nt, Homo sapiens
  misc_RNA (1)...(19): siRNA sense strand
gauaaaccuccauuuguga

SEQ ID NO: 1922471 - RNA, 19 nt, Homo sapiens
  misc_RNA (1)...(19): siRNA sense strand
ggucuucaaugccagaaug

SEQ ID NO: 1922472 - RNA, 19 nt, Homo sapiens
  misc_RNA (1)...(19): siRNA sense strand
agauaaaccuccauuugug

SEQ ID NO: 1922473 - RNA, 19 nt, Homo sapiens
  misc_RNA (1)...(19): siRNA sense strand
agacaaagaggacaucuau

SEQ ID NO: 1922474 - RNA, 19 nt, Homo sapiens
  misc_RNA (1)...(19): siRNA sense strand
gcccaggagucgugcuuaa

SEQ ID NO: 1922475 - RNA, 19 nt, Homo sapiens
  misc_RNA (1)...(19): siRNA sense strand
cugaaugucugauaaguuc

SEQ ID NO: 1922476 - RNA, 19 nt, Homo sapiens
  misc_RNA (1)...(19): siRNA sense strand
ucugauaaguucaaggaaa

SEQ ID NO: 1922477 - RNA, 19 nt, Homo sapiens
  misc_RNA (1)...(19): siRNA sense strand
caagauguacaggaacuua

SEQ ID NO: 1922478 - RNA, 19 nt, Homo sapiens
  misc_RNA (1)...(19): siRNA sense strand
gaacagcauggacaagaug

SEQ ID NO: 1922479 - RNA, 19 nt, Homo sapiens
  misc_RNA (1)...(19): siRNA sense strand
cagauaaaccuccauuugu

SEQ ID NO: 1922480 - RNA, 19 nt, Homo sapiens
  misc_RNA (1)...(19): siRNA sense strand
uggaagagacugugaaaga

SEQ ID NO: 1922481 - RNA, 19 nt, Homo sapiens
  misc_RNA (1)...(19): siRNA sense strand
gaacagccuacaauuucuu

SEQ ID NO: 1922482 - RNA, 19 nt, Homo sapiens
  misc_RNA (1)...(19): siRNA sense strand
gagaacagcauggacaaga

SEQ ID NO: 1922483 - RNA, 19 nt, Homo sapiens
  misc_RNA (1)...(19): siRNA sense strand
ugugugagcuaucugaaga

SEQ ID NO: 1922484 - RNA, 19 nt, Homo sapiens
  misc_RNA (1)...(19): siRNA sense strand
acagauaaaccuccauuug

SEQ ID NO: 1922485 - RNA, 19 nt, Homo sapiens
  misc_RNA (1)...(19): siRNA sense strand
gagcuucucucagggaaag

SEQ ID NO: 1922486 - RNA, 19 nt, Homo sapiens
  misc_RNA (1)...(19): siRNA sense strand
ccacguggcacuuuccauu

SEQ ID NO: 1922487 - RNA, 19 nt, Homo sapiens
  misc_RNA (1)...(19): siRNA sense strand
acaucaggcucaucaaaga

SEQ ID NO: 1922488 - RNA, 19 nt, Homo sapiens
  misc_RNA (1)...(19): siRNA sense strand
gaggauuucuggccuucga

SEQ ID NO: 1922489 - RNA, 19 nt, Homo sapiens
  misc_RNA (1)...(19): siRNA sense strand
uggacaagauguacaggaa

SEQ ID NO: 1922490 - RNA, 19 nt, Homo sapiens
  misc_RNA (1)...(19): siRNA sense strand
ccaacagggcagccucuua

SEQ ID NO: 1922491 - RNA, 19 nt, Homo sapiens
  misc_RNA (1)...(19): siRNA sense strand
ggugaauacugguccaaca

SEQ ID NO: 1922492 - RNA, 19 nt, Homo sapiens
  misc_RNA (1)...(19): siRNA sense strand
gaugagagagaccuagaga

SEQ ID NO: 1922493 - RNA, 19 nt, Homo sapiens
  misc_RNA (1)...(19): siRNA sense strand
gcucaucaaagacauuuau

SEQ ID NO: 1922494 - RNA, 19 nt, Homo sapiens
  misc_RNA (1)...(19): siRNA sense strand
gaaaucacaucaggcucau

SEQ ID NO: 1922495 - RNA, 19 nt, Homo sapiens
  misc_RNA (1)...(19): siRNA sense strand
uaucuuagcaucugugugu

SEQ ID NO: 1922496 - RNA, 19 nt, Homo sapiens
  misc_RNA (1)...(19): siRNA sense strand
auacagcaguguucgaguu

SEQ ID NO: 1922497 - RNA, 19 nt, Homo sapiens
  misc_RNA (1)...(19): siRNA sense strand
gacaagauguacaggaacu

SEQ ID NO: 1922498 - RNA, 19 nt, Homo sapiens
  misc_RNA (1)...(19): siRNA sense strand
gaacuggaacugaaaagaa

SEQ ID NO: 1922499 - RNA, 19 nt, Homo sapiens
  misc_RNA (1)...(19): siRNA sense strand
caagucaccugagagaagu

SEQ ID NO: 1922500 - RNA, 19 nt, Homo sapiens
  misc_RNA (1)...(19): siRNA sense strand
acaaagaggacaucuaucu

SEQ ID NO: 1922501 - RNA, 19 nt, Homo sapiens
  misc_RNA (1)...(19): siRNA sense strand
caagcccuguguuaaauag

SEQ ID NO: 1922502 - RNA, 19 nt, Homo sapiens
  misc_RNA (1)...(19): siRNA sense strand
cugauaaguucaaggaaau

SEQ ID NO: 1922503 - RNA, 19 nt, Homo sapiens
  misc_RNA (1)...(19): siRNA sense strand
cccaaggauuauaagguua

SEQ ID NO: 1922504 - RNA, 19 nt, Homo sapiens
  misc_RNA (1)...(19): siRNA sense strand
ccauuuggaugacggugaa

SEQ ID NO: 1922505 - RNA, 19 nt, Homo sapiens
  misc_RNA (1)...(19): siRNA sense strand
caggagucgugcuuaaaga

SEQ ID NO: 1922506 - RNA, 19 nt, Homo sapiens
  misc_RNA (1)...(19): siRNA sense strand
gaaaugccacacucaggau

SEQ ID NO: 1922507 - RNA, 19 nt, Homo sapiens
  misc_RNA (1)...(19): siRNA sense strand
ucacaucaggcucaucaaa

SEQ ID NO: 1922508 - RNA, 19 nt, Homo sapiens
  misc_RNA (1)...(19): siRNA sense strand
aaacagauaaaccuccauu

SEQ ID NO: 1922509 - RNA, 19 nt, Homo sapiens
  misc_RNA (1)...(19): siRNA sense strand
ccacacucaggauaaauuu

SEQ ID NO: 1922510 - RNA, 19 nt, Homo sapiens
  misc_RNA (1)...(19): siRNA sense strand
ggagaucagcucaguaacu

SEQ ID NO: 1922511 - RNA, 19 nt, Homo sapiens
  misc_RNA (1)...(19): siRNA sense strand
gaugaugaacuggaacuga

SEQ ID NO: 1922512 - RNA, 19 nt, Homo sapiens
  misc_RNA (1)...(19): siRNA sense strand
aaacacugucuacguauga

SEQ ID NO: 1922513 - RNA, 19 nt, Homo sapiens
  misc_RNA (1)...(19): siRNA sense strand
ccucaacaaugccaaagca

SEQ ID NO: 1922514 - RNA, 19 nt, Homo sapiens
  misc_RNA (1)...(19): siRNA sense strand
agcccaaggucguguagua

SEQ ID NO: 1922515 - RNA, 19 nt, Homo sapiens
  misc_RNA (1)...(19): siRNA sense strand
acccaaggauuauaagguu

SEQ ID NO: 1922516 - RNA, 19 nt, Homo sapiens
  misc_RNA (1)...(19): siRNA sense strand
ucuacgacuucagugauua

SEQ ID NO: 1922517 - RNA, 19 nt, Homo sapiens
  misc_RNA (1)...(19): siRNA sense strand
gagucgugcuuaaagacaa

SEQ ID NO: 1922518 - RNA, 19 nt, Homo sapiens
  misc_RNA (1)...(19): siRNA sense strand
cuacgaacagccuacaauu

SEQ ID NO: 1922519 - RNA, 19 nt, Homo sapiens
  misc_RNA (1)...(19): siRNA sense strand
uucgaugacucuuuagaaa

SEQ ID NO: 1922520 - RNA, 19 nt, Homo sapiens
  misc_RNA (1)...(19): siRNA sense strand
cgaacagccuacaauuucu

SEQ ID NO: 1922521 - RNA, 19 nt, Homo sapiens
  misc_RNA (1)...(19): siRNA sense strand
gauuacugaaugucugaua

SEQ ID NO: 1922522 - RNA, 19 nt, Homo sapiens
  misc_RNA (1)...(19): siRNA sense strand
acagggcagccucuuauaa

SEQ ID NO: 1922523 - RNA, 19 nt, Homo sapiens
  misc_RNA (1)...(19): siRNA sense strand
ccaagcccuguguuaaaua

SEQ ID NO: 1922524 - RNA, 19 nt, Homo sapiens
  misc_RNA (1)...(19): siRNA sense strand
gccagaaugguguuugaaa

SEQ ID NO: 1922525 - RNA, 19 nt, Homo sapiens
  misc_RNA (1)...(19): siRNA sense strand
ccagaaugguguuugaaaa

SEQ ID NO: 1922526 - RNA, 19 nt, Homo sapiens
  misc_RNA (1)...(19): siRNA sense strand
uuauugggaucuucuggaa

SEQ ID NO: 1922527 - RNA, 19 nt, Homo sapiens
  misc_RNA (1)...(19): siRNA sense strand
ccaagucccagggcugaua

SEQ ID NO: 1922528 - RNA, 19 nt, Homo sapiens
  misc_RNA (1)...(19): siRNA sense strand
acgaacagccuacaauuuc

SEQ ID NO: 1922529 - RNA, 19 nt, Homo sapiens
  misc_RNA (1)...(19): siRNA sense strand
gaacaucaagaucacaaaa

SEQ ID NO: 1922530 - RNA, 19 nt, Homo sapiens
  misc_RNA (1)...(19): siRNA sense strand
gaaugucugauaaguucaa

SEQ ID NO: 1922531 - RNA, 19 nt, Homo sapiens
  misc_RNA (1)...(19): siRNA sense strand
cgacccaucuuugagaaca

SEQ ID NO: 1922532 - RNA, 19 nt, Homo sapiens
  misc_RNA (1)...(19): siRNA sense strand
augaugaacuggaacugaa

SEQ ID NO: 1922533 - RNA, 19 nt, Homo sapiens
  misc_RNA (1)...(19): siRNA sense strand
gcugccgacccaaggauua

SEQ ID NO: 1922534 - RNA, 19 nt, Homo sapiens
  misc_RNA (1)...(19): siRNA sense strand
caagggugcacaaugauca

SEQ ID NO: 1922535 - RNA, 19 nt, Homo sapiens
  misc_RNA (1)...(19): siRNA sense strand
gcggcuggcccauuuaaau

SEQ ID NO: 1922536 - RNA, 19 nt, Homo sapiens
  misc_RNA (1)...(19): siRNA sense strand
uacgaacagccuacaauuu

SEQ ID NO: 1922537 - RNA, 19 nt, Homo sapiens
  misc_RNA (1)...(19): siRNA sense strand
ccaagucaccugagagaag

SEQ ID NO: 1922538 - RNA, 19 nt, Homo sapiens
  misc_RNA (1)...(19): siRNA sense strand
cuggagaucagcucaguaa

SEQ ID NO: 1922539 - RNA, 19 nt, Homo sapiens
  misc_RNA (1)...(19): siRNA sense strand
cgcaguagauccuggagau

SEQ ID NO: 1922540 - RNA, 19 nt, Homo sapiens
  misc_RNA (1)...(19): siRNA sense strand
acacgagauuucauguuuc

SEQ ID NO: 1922541 - RNA, 19 nt, Homo sapiens
  misc_RNA (1)...(19): siRNA sense strand
agauguacaggaacuuaua

SEQ ID NO: 1922542 - RNA, 19 nt, Homo sapiens
  misc_RNA (1)...(19): siRNA sense strand
gaaagagauggauggucaa

SEQ ID NO: 1922543 - RNA, 19 nt, Homo sapiens
  misc_RNA (1)...(19): siRNA sense strand
gcaugugugagcuaucuga

SEQ ID NO: 1922544 - RNA, 19 nt, Homo sapiens
  misc_RNA (1)...(19): siRNA sense strand
caccugagagaaguaaaua

SEQ ID NO: 1922545 - RNA, 19 nt, Homo sapiens
  misc_RNA (1)...(19): siRNA sense strand
aaacugcgaugagauccau

SEQ ID NO: 1922546 - RNA, 19 nt, Homo sapiens
  misc_RNA (1)...(19): siRNA sense strand
agaacagcauggacaagau

SEQ ID NO: 1922547 - RNA, 19 nt, Homo sapiens
  misc_RNA (1)...(19): siRNA sense strand
cagggcugauacuuuauug

SEQ ID NO: 1922548 - RNA, 19 nt, Homo sapiens
  misc_RNA (1)...(19): siRNA sense strand
uccaagcccuguguuaaau

SEQ ID NO: 1922549 - RNA, 19 nt, Homo sapiens
  misc_RNA (1)...(19): siRNA sense strand
acacagcuugaauaugaua

SEQ ID NO: 1922550 - RNA, 19 nt, Homo sapiens
  misc_RNA (1)...(19): siRNA sense strand
ucaaagggaagcccaagaa

SEQ ID NO: 1922551 - RNA, 19 nt, Homo sapiens
  misc_RNA (1)...(19): siRNA sense strand
ggcagcagaucacuacagu

SEQ ID NO: 1922552 - RNA, 19 nt, Homo sapiens
  misc_RNA (1)...(19): siRNA sense strand
aagggaagcccaagaagga

SEQ ID NO: 1922553 - RNA, 19 nt, Homo sapiens
  misc_RNA (1)...(19): siRNA sense strand
ugaucgugguguuugugua

SEQ ID NO: 1922554 - RNA, 19 nt, Homo sapiens
  misc_RNA (1)...(19): siRNA sense strand
gcucuugaucgugguguuu

SEQ ID NO: 1922555 - RNA, 19 nt, Homo sapiens
  misc_RNA (1)...(19): siRNA sense strand
gaucgugguguuuguguac

SEQ ID NO: 1922556 - RNA, 19 nt, Homo sapiens
  misc_RNA (1)...(19): siRNA sense strand
caaagggaagcccaagaag

SEQ ID NO: 1922557 - RNA, 19 nt, Homo sapiens
  misc_RNA (1)...(19): siRNA sense strand
caagaaggagcggaagcaa

SEQ ID NO: 1922558 - RNA, 19 nt, Homo sapiens
  misc_RNA (1)...(19): siRNA sense strand
ggacauagcuucucuuuau

SEQ ID NO: 1922559 - RNA, 19 nt, Homo sapiens
  misc_RNA (1)...(19): siRNA sense strand
ccacacagcuguuauauau

SEQ ID NO: 1922560 - RNA, 19 nt, Homo sapiens
  misc_RNA (1)...(19): siRNA sense strand
guaauaacaucguuccuaa

SEQ ID NO: 1922561 - RNA, 19 nt, Homo sapiens
  misc_RNA (1)...(19): siRNA sense strand
gaauggagauguaccaguu

SEQ ID NO: 1922562 - RNA, 19 nt, Homo sapiens
  misc_RNA (1)...(19): siRNA sense strand
gcaaugaguuauaugaguu

SEQ ID NO: 1922563 - RNA, 19 nt, Homo sapiens
  misc_RNA (1)...(19): siRNA sense strand
caaagaauguugaagguau

SEQ ID NO: 1922564 - RNA, 19 nt, Homo sapiens
  misc_RNA (1)...(19): siRNA sense strand
acaauaauguucccagaua

SEQ ID NO: 1922565 - RNA, 19 nt, Homo sapiens
  misc_RNA (1)...(19): siRNA sense strand
gaacgacaauggugugaug

SEQ ID NO: 1922566 - RNA, 19 nt, Homo sapiens
  misc_RNA (1)...(19): siRNA sense strand
gguaggaaaugcagaugua

SEQ ID NO: 1922567 - RNA, 19 nt, Homo sapiens
  misc_RNA (1)...(19): siRNA sense strand
gcaaggaucuuugguaucu

SEQ ID NO: 1922568 - RNA, 19 nt, Homo sapiens
  misc_RNA (1)...(19): siRNA sense strand
acacagcuguuauauauug

SEQ ID NO: 1922569 - RNA, 19 nt, Homo sapiens
  misc_RNA (1)...(19): siRNA sense strand
cagcacagauacaagauaa

SEQ ID NO: 1922570 - RNA, 19 nt, Homo sapiens
  misc_RNA (1)...(19): siRNA sense strand
uaaagagacuccuucaaau

SEQ ID NO: 1922571 - RNA, 19 nt, Homo sapiens
  misc_RNA (1)...(19): siRNA sense strand
ggaaacaagauguacauuu

SEQ ID NO: 1922572 - RNA, 19 nt, Homo sapiens
  misc_RNA (1)...(19): siRNA sense strand
gaaacuaugucauggucaa

SEQ ID NO: 1922573 - RNA, 19 nt, Homo sapiens
  misc_RNA (1)...(19): siRNA sense strand
gaugaagugucuacaguug

SEQ ID NO: 1922574 - RNA, 19 nt, Homo sapiens
  misc_RNA (1)...(19): siRNA sense strand
gacuacagcuugcuuaaga

SEQ ID NO: 1922575 - RNA, 19 nt, Homo sapiens
  misc_RNA (1)...(19): siRNA sense strand
gaagauacagcaaugaguu

SEQ ID NO: 1922576 - RNA, 19 nt, Homo sapiens
  misc_RNA (1)...(19): siRNA sense strand
uggaagagauggcuacaaa

SEQ ID NO: 1922577 - RNA, 19 nt, Homo sapiens
  misc_RNA (1)...(19): siRNA sense strand
gacauagcuucucuuuaua

SEQ ID NO: 1922578 - RNA, 19 nt, Homo sapiens
  misc_RNA (1)...(19): siRNA sense strand
cuaaagagacuccuucaaa

SEQ ID NO: 1922579 - RNA, 19 nt, Homo sapiens
  misc_RNA (1)...(19): siRNA sense strand
gcaagucguugguuaugga

SEQ ID NO: 1922580 - RNA, 19 nt, Homo sapiens
  misc_RNA (1)...(19): siRNA sense strand
gcaaaugcacauauugauu

SEQ ID NO: 1922581 - RNA, 19 nt, Homo sapiens
  misc_RNA (1)...(19): siRNA sense strand
gcaaagcaucucaaaggua

SEQ ID NO: 1922582 - RNA, 19 nt, Homo sapiens
  misc_RNA (1)...(19): siRNA sense strand
ggauuugucugugauggua

SEQ ID NO: 1922583 - RNA, 19 nt, Homo sapiens
  misc_RNA (1)...(19): siRNA sense strand
gauagguccuuucagcaaa

SEQ ID NO: 1922584 - RNA, 19 nt, Homo sapiens
  misc_RNA (1)...(19): siRNA sense strand
gaacaguaauuccugaaac

SEQ ID NO: 1922585 - RNA, 19 nt, Homo sapiens
  misc_RNA (1)...(19): siRNA sense strand
acaagcaagucguugguua

SEQ ID NO: 1922586 - RNA, 19 nt, Homo sapiens
  misc_RNA (1)...(19): siRNA sense strand
gcacugaauagucaaguuu

SEQ ID NO: 1922587 - RNA, 19 nt, Homo sapiens
  misc_RNA (1)...(19): siRNA sense strand
gcacagcacagauacaaga

SEQ ID NO: 1922588 - RNA, 19 nt, Homo sapiens
  misc_RNA (1)...(19): siRNA sense strand
gcgaagauucaaacaauaa

SEQ ID NO: 1922589 - RNA, 19 nt, Homo sapiens
  misc_RNA (1)...(19): siRNA sense strand
cagcauggcucugguguug

SEQ ID NO: 1922590 - RNA, 19 nt, Homo sapiens
  misc_RNA (1)...(19): siRNA sense strand
uaacaucguuccuaacagu

SEQ ID NO: 1922591 - RNA, 19 nt, Homo sapiens
  misc_RNA (1)...(19): siRNA sense strand
ggaccacccuaguaucaga

SEQ ID NO: 1922592 - RNA, 19 nt, Homo sapiens
  misc_RNA (1)...(19): siRNA sense strand
gggcaguuguuaaagauga

SEQ ID NO: 1922593 - RNA, 19 nt, Homo sapiens
  misc_RNA (1)...(19): siRNA sense strand
uuaaagcacugacggauuc

SEQ ID NO: 1922594 - RNA, 19 nt, Homo sapiens
  misc_RNA (1)...(19): siRNA sense strand
gcaguugaguacagacuug

SEQ ID NO: 1922595 - RNA, 19 nt, Homo sapiens
  misc_RNA (1)...(19): siRNA sense strand
cagcuugacuuagaaacua

SEQ ID NO: 1922596 - RNA, 19 nt, Homo sapiens
  misc_RNA (1)...(19): siRNA sense strand
gauacaagauaauccaagu

SEQ ID NO: 1922597 - RNA, 19 nt, Homo sapiens
  misc_RNA (1)...(19): siRNA sense strand
cggaugagcugcacgucua

SEQ ID NO: 1922598 - RNA, 19 nt, Homo sapiens
  misc_RNA (1)...(19): siRNA sense strand
caucaaaugcuucuaauca

SEQ ID NO: 1922599 - RNA, 19 nt, Homo sapiens
  misc_RNA (1)...(19): siRNA sense strand
gauugugaauggagaugua

SEQ ID NO: 1922600 - RNA, 19 nt, Homo sapiens
  misc_RNA (1)...(19): siRNA sense strand
gggaaugguugaauaugga

SEQ ID NO: 1922601 - RNA, 19 nt, Homo sapiens
  misc_RNA (1)...(19): siRNA sense strand
gaucagccguguagagaca

SEQ ID NO: 1922602 - RNA, 19 nt, Homo sapiens
  misc_RNA (1)...(19): siRNA sense strand
gcaaauguagguguucuaa

SEQ ID NO: 1922603 - RNA, 19 nt, Homo sapiens
  misc_RNA (1)...(19): siRNA sense strand
aagcgaagauucaaacaau

SEQ ID NO: 1922604 - RNA, 19 nt, Homo sapiens
  misc_RNA (1)...(19): siRNA sense strand
gcagucagaauuucaaaga

SEQ ID NO: 1922605 - RNA, 19 nt, Homo sapiens
  misc_RNA (1)...(19): siRNA sense strand
aaauguagguguucuaagu

SEQ ID NO: 1922606 - RNA, 19 nt, Homo sapiens
  misc_RNA (1)...(19): siRNA sense strand
uaccaaaucugaaguugau

SEQ ID NO: 1922607 - RNA, 19 nt, Homo sapiens
  misc_RNA (1)...(19): siRNA sense strand
caagcugcaucaucagauu

SEQ ID NO: 1922608 - RNA, 19 nt, Homo sapiens
  misc_RNA (1)...(19): siRNA sense strand
aaucaaugguugugggaua

SEQ ID NO: 1922609 - RNA, 19 nt, Homo sapiens
  misc_RNA (1)...(19): siRNA sense strand
uaacccagcagaccauuaa

SEQ ID NO: 1922610 - RNA, 19 nt, Homo sapiens
  misc_RNA (1)...(19): siRNA sense strand
gauggacccucacagacaa

SEQ ID NO: 1922611 - RNA, 19 nt, Homo sapiens
  misc_RNA (1)...(19): siRNA sense strand
caauaauguucccagauau

SEQ ID NO: 1922612 - RNA, 19 nt, Homo sapiens
  misc_RNA (1)...(19): siRNA sense strand
ggaagcaaagcaucucaaa

SEQ ID NO: 1922613 - RNA, 19 nt, Homo sapiens
  misc_RNA (1)...(19): siRNA sense strand
auaccaagcugcaucauca

SEQ ID NO: 1922614 - RNA, 19 nt, Homo sapiens
  misc_RNA (1)...(19): siRNA sense strand
guacagacuugccauacca

SEQ ID NO: 1922615 - RNA, 19 nt, Homo sapiens
  misc_RNA (1)...(19): siRNA sense strand
ccacugugcuguugcaauc

SEQ ID NO: 1922616 - RNA, 19 nt, Homo sapiens
  misc_RNA (1)...(19): siRNA sense strand
uauggcagcuugacuuaga

SEQ ID NO: 1922617 - RNA, 19 nt, Homo sapiens
  misc_RNA (1)...(19): siRNA sense strand
caagugggaugaagugucu

SEQ ID NO: 1922618 - RNA, 19 nt, Homo sapiens
  misc_RNA (1)...(19): siRNA sense strand
gggaugaagugucuacagu

SEQ ID NO: 1922619 - RNA, 19 nt, Homo sapiens
  misc_RNA (1)...(19): siRNA sense strand
ucauacagccaguguuaua

SEQ ID NO: 1922620 - RNA, 19 nt, Homo sapiens
  misc_RNA (1)...(19): siRNA sense strand
caaguucgguggcuucaag

SEQ ID NO: 1922621 - RNA, 19 nt, Homo sapiens
  misc_RNA (1)...(19): siRNA sense strand
ggauaucagcaaagaauga

SEQ ID NO: 1922622 - RNA, 19 nt, Homo sapiens
  misc_RNA (1)...(19): siRNA sense strand
ggaauauucagccuacuug

SEQ ID NO: 1922623 - RNA, 19 nt, Homo sapiens
  misc_RNA (1)...(19): siRNA sense strand
gcauggcucugguguugug

SEQ ID NO: 1922624 - RNA, 19 nt, Homo sapiens
  misc_RNA (1)...(19): siRNA sense strand
gcacagauacaagauaauc

SEQ ID NO: 1922625 - RNA, 19 nt, Homo sapiens
  misc_RNA (1)...(19): siRNA sense strand
ucacuaacaacauucagua

SEQ ID NO: 1922626 - RNA, 19 nt, Homo sapiens
  misc_RNA (1)...(19): siRNA sense strand
gagauguaccaguucauuu

SEQ ID NO: 1922627 - RNA, 19 nt, Homo sapiens
  misc_RNA (1)...(19): siRNA sense strand
gcacugacggauucuaaug

SEQ ID NO: 1922628 - RNA, 19 nt, Homo sapiens
  misc_RNA (1)...(19): siRNA sense strand
cagauucucaggaagauaa

SEQ ID NO: 1922629 - RNA, 19 nt, Homo sapiens
  misc_RNA (1)...(19): siRNA sense strand
gccauuguguucaggauau

SEQ ID NO: 1922630 - RNA, 19 nt, Homo sapiens
  misc_RNA (1)...(19): siRNA sense strand
gauacagcaaugaguuaua

SEQ ID NO: 1922631 - RNA, 19 nt, Homo sapiens
  misc_RNA (1)...(19): siRNA sense strand
gaugguaccagaauauuag

SEQ ID NO: 1922632 - RNA, 19 nt, Homo sapiens
  misc_RNA (1)...(19): siRNA sense strand
ggagauguaccaguucauu

SEQ ID NO: 1922633 - RNA, 19 nt, Homo sapiens
  misc_RNA (1)...(19): siRNA sense strand
caaccucaccuucuggaaa

SEQ ID NO: 1922634 - RNA, 19 nt, Homo sapiens
  misc_RNA (1)...(19): siRNA sense strand
ggauagguccuuucagcaa

SEQ ID NO: 1922635 - RNA, 19 nt, Homo sapiens
  misc_RNA (1)...(19): siRNA sense strand
gaagaucagccguguagag

SEQ ID NO: 1922636 - RNA, 19 nt, Homo sapiens
  misc_RNA (1)...(19): siRNA sense strand
agacaaggcaguaauaaca

SEQ ID NO: 1922637 - RNA, 19 nt, Homo sapiens
  misc_RNA (1)...(19): siRNA sense strand
aaacgaaagcgaagauuca

SEQ ID NO: 1922638 - RNA, 19 nt, Homo sapiens
  misc_RNA (1)...(19): siRNA sense strand
ggauguaagaacaguaauu

SEQ ID NO: 1922639 - RNA, 19 nt, Homo sapiens
  misc_RNA (1)...(19): siRNA sense strand
guaguugccuggauguaag

SEQ ID NO: 1922640 - RNA, 19 nt, Homo sapiens
  misc_RNA (1)...(19): siRNA sense strand
uauggaagauacagcaaug

SEQ ID NO: 1922641 - RNA, 19 nt, Homo sapiens
  misc_RNA (1)...(19): siRNA sense strand
guucccagauauuuaaaug

SEQ ID NO: 1922642 - RNA, 19 nt, Homo sapiens
  misc_RNA (1)...(19): siRNA sense strand
cuucauacagccaguguua

SEQ ID NO: 1922643 - RNA, 19 nt, Homo sapiens
  misc_RNA (1)...(19): siRNA sense strand
uaacaacauucaguaccaa

SEQ ID NO: 1922644 - RNA, 19 nt, Homo sapiens
  misc_RNA (1)...(19): siRNA sense strand
aaacaucuguauccaguac

SEQ ID NO: 1922645 - RNA, 19 nt, Homo sapiens
  misc_RNA (1)...(19): siRNA sense strand
gauguaagaacaguaauuc

SEQ ID NO: 1922646 - RNA, 19 nt, Homo sapiens
  misc_RNA (1)...(19): siRNA sense strand
agacuucaccucaugauug

SEQ ID NO: 1922647 - RNA, 19 nt, Homo sapiens
  misc_RNA (1)...(19): siRNA sense strand
gguugugccuucuccaaga

SEQ ID NO: 1922648 - RNA, 19 nt, Homo sapiens
  misc_RNA (1)...(19): siRNA sense strand
cugcaaggaucuuugguau

SEQ ID NO: 1922649 - RNA, 19 nt, Homo sapiens
  misc_RNA (1)...(19): siRNA sense strand
accaagagcuggccacugu

SEQ ID NO: 1922650 - RNA, 19 nt, Homo sapiens
  misc_RNA (1)...(19): siRNA sense strand
ggucaaaaccagaaacuaa

SEQ ID NO: 1922651 - RNA, 19 nt, Homo sapiens
  misc_RNA (1)...(19): siRNA sense strand
ggaggcgaguuucuuccuu

SEQ ID NO: 1922652 - RNA, 19 nt, Homo sapiens
  misc_RNA (1)...(19): siRNA sense strand
gacuucaccucaugauugu

SEQ ID NO: 1922653 - RNA, 19 nt, Homo sapiens
  misc_RNA (1)...(19): siRNA sense strand
uagcuucucuuuauauggu

SEQ ID NO: 1922654 - RNA, 19 nt, Homo sapiens
  misc_RNA (1)...(19): siRNA sense strand
gucagaauuucaaagaaug

SEQ ID NO: 1922655 - RNA, 19 nt, Homo sapiens
  misc_RNA (1)...(19): siRNA sense strand
caaaccagacuuuaaagca

SEQ ID NO: 1922656 - RNA, 19 nt, Homo sapiens
  misc_RNA (1)...(19): siRNA sense strand
gaggauuuauuguggucuu

SEQ ID NO: 1922657 - RNA, 19 nt, Homo sapiens
  misc_RNA (1)...(19): siRNA sense strand
caggauaucagcaaagaau

SEQ ID NO: 1922658 - RNA, 19 nt, Homo sapiens
  misc_RNA (1)...(19): siRNA sense strand
gaaacuaguugaugaaaug

SEQ ID NO: 1922659 - RNA, 19 nt, Homo sapiens
  misc_RNA (1)...(19): siRNA sense strand
gcaagaagcugcucaccaa

SEQ ID NO: 1922660 - RNA, 19 nt, Homo sapiens
  misc_RNA (1)...(19): siRNA sense strand
ggaaagcuuugaagaguaa

SEQ ID NO: 1922661 - RNA, 19 nt, Homo sapiens
  misc_RNA (1)...(19): siRNA sense strand
gaacaaugguggagcagaa

SEQ ID NO: 1922662 - RNA, 19 nt, Homo sapiens
  misc_RNA (1)...(19): siRNA sense strand
gaaccucaaugauagauga

SEQ ID NO: 1922663 - RNA, 19 nt, Homo sapiens
  misc_RNA (1)...(19): siRNA sense strand
gaacuaaugucccugagau

SEQ ID NO: 1922664 - RNA, 19 nt, Homo sapiens
  misc_RNA (1)...(19): siRNA sense strand
ggagugagaucgucguauu

SEQ ID NO: 1922665 - RNA, 19 nt, Homo sapiens
  misc_RNA (1)...(19): siRNA sense strand
ucaaggagauguuuaugaa

SEQ ID NO: 1922666 - RNA, 19 nt, Homo sapiens
  misc_RNA (1)...(19): siRNA sense strand
gaaccaagcuuuucuacaa

SEQ ID NO: 1922667 - RNA, 19 nt, Homo sapiens
  misc_RNA (1)...(19): siRNA sense strand
gcacuacucucuucagauc

SEQ ID NO: 1922668 - RNA, 19 nt, Homo sapiens
  misc_RNA (1)...(19): siRNA sense strand
gcacauacuggaaccaaua

SEQ ID NO: 1922669 - RNA, 19 nt, Homo sapiens
  misc_RNA (1)...(19): siRNA sense strand
cagaaagucuucaacuauu

SEQ ID NO: 1922670 - RNA, 19 nt, Homo sapiens
  misc_RNA (1)...(19): siRNA sense strand
gagaauuccuugaacauca

SEQ ID NO: 1922671 - RNA, 19 nt, Homo sapiens
  misc_RNA (1)...(19): siRNA sense strand
ucaagacgcucaaggaaga

SEQ ID NO: 1922672 - RNA, 19 nt, Homo sapiens
  misc_RNA (1)...(19): siRNA sense strand
gaacaucaagucagcugua

SEQ ID NO: 1922673 - RNA, 19 nt, Homo sapiens
  misc_RNA (1)...(19): siRNA sense strand
gaagaauucagcauuagaa

SEQ ID NO: 1922674 - RNA, 19 nt, Homo sapiens
  misc_RNA (1)...(19): siRNA sense strand
gaauaucaacugucagaaa

SEQ ID NO: 1922675 - RNA, 19 nt, Homo sapiens
  misc_RNA (1)...(19): siRNA sense strand
caagucagcuguaaaauug

SEQ ID NO: 1922676 - RNA, 19 nt, Homo sapiens
  misc_RNA (1)...(19): siRNA sense strand
ucagaucagugcaguguuu

SEQ ID NO: 1922677 - RNA, 19 nt, Homo sapiens
  misc_RNA (1)...(19): siRNA sense strand
gcagaucaaguccaacaua

SEQ ID NO: 1922678 - RNA, 19 nt, Homo sapiens
  misc_RNA (1)...(19): siRNA sense strand
gaugaagacugggacauau

SEQ ID NO: 1922679 - RNA, 19 nt, Homo sapiens
  misc_RNA (1)...(19): siRNA sense strand
gcagauauacguggcauuu

SEQ ID NO: 1922680 - RNA, 19 nt, Homo sapiens
  misc_RNA (1)...(19): siRNA sense strand
agaaugagcugauuauaac

SEQ ID NO: 1922681 - RNA, 19 nt, Homo sapiens
  misc_RNA (1)...(19): siRNA sense strand
cagaaugagcugauuauaa

SEQ ID NO: 1922682 - RNA, 19 nt, Homo sapiens
  misc_RNA (1)...(19): siRNA sense strand
gcacacgaguuuaaagaag

SEQ ID NO: 1922683 - RNA, 19 nt, Homo sapiens
  misc_RNA (1)...(19): siRNA sense strand
ggacauaucaucccuagag

SEQ ID NO: 1922684 - RNA, 19 nt, Homo sapiens
  misc_RNA (1)...(19): siRNA sense strand
gaagaccguucuccauauc

SEQ ID NO: 1922685 - RNA, 19 nt, Homo sapiens
  misc_RNA (1)...(19): siRNA sense strand
gagcagaaugagcugauua

SEQ ID NO: 1922686 - RNA, 19 nt, Homo sapiens
  misc_RNA (1)...(19): siRNA sense strand
ucaaauggauacccuuuca

SEQ ID NO: 1922687 - RNA, 19 nt, Homo sapiens
  misc_RNA (1)...(19): siRNA sense strand
gacagcagauuaaagacuu

SEQ ID NO: 1922688 - RNA, 19 nt, Homo sapiens
  misc_RNA (1)...(19): siRNA sense strand
gauacaacuuccuuccaaa

SEQ ID NO: 1922689 - RNA, 19 nt, Homo sapiens
  misc_RNA (1)...(19): siRNA sense strand
caagaaagagaaauaccua

SEQ ID NO: 1922690 - RNA, 19 nt, Homo sapiens
  misc_RNA (1)...(19): siRNA sense strand
gagaacaucaugaacauca

SEQ ID NO: 1922691 - RNA, 19 nt, Homo sapiens
  misc_RNA (1)...(19): siRNA sense strand
gagaagcuccggagugaga

SEQ ID NO: 1922692 - RNA, 19 nt, Homo sapiens
  misc_RNA (1)...(19): siRNA sense strand
ggaugaagacugggacaua

SEQ ID NO: 1922693 - RNA, 19 nt, Homo sapiens
  misc_RNA (1)...(19): siRNA sense strand
ccagaaagucuucaacuau

SEQ ID NO: 1922694 - RNA, 19 nt, Homo sapiens
  misc_RNA (1)...(19): siRNA sense strand
ggucggcuccugucacaua

SEQ ID NO: 1922695 - RNA, 19 nt, Homo sapiens
  misc_RNA (1)...(19): siRNA sense strand
agaaagcacuacucucuuc

SEQ ID NO: 1922696 - RNA, 19 nt, Homo sapiens
  misc_RNA (1)...(19): siRNA sense strand
uaaugucccugagauguuu

SEQ ID NO: 1922697 - RNA, 19 nt, Homo sapiens
  misc_RNA (1)...(19): siRNA sense strand
gaucaagacgcucaaggaa

SEQ ID NO: 1922698 - RNA, 19 nt, Homo sapiens
  misc_RNA (1)...(19): siRNA sense strand
gugcggauguggaggauga

SEQ ID NO: 1922699 - RNA, 19 nt, Homo sapiens
  misc_RNA (1)...(19): siRNA sense strand
gauaggacaucuguuccaa

SEQ ID NO: 1922700 - RNA, 19 nt, Homo sapiens
  misc_RNA (1)...(19): siRNA sense strand
caacauaggcacauuaaaa

SEQ ID NO: 1922701 - RNA, 19 nt, Homo sapiens
  misc_RNA (1)...(19): siRNA sense strand
gaaauccagaaguccaaua

SEQ ID NO: 1922702 - RNA, 19 nt, Homo sapiens
  misc_RNA (1)...(19): siRNA sense strand
agaaagacauaagcaagaa

SEQ ID NO: 1922703 - RNA, 19 nt, Homo sapiens
  misc_RNA (1)...(19): siRNA sense strand
aaacuucgaaccucaauga

SEQ ID NO: 1922704 - RNA, 19 nt, Homo sapiens
  misc_RNA (1)...(19): siRNA sense strand
uaucaucccuagaggaaga

SEQ ID NO: 1922705 - RNA, 19 nt, Homo sapiens
  misc_RNA (1)...(19): siRNA sense strand
acagacaacugauuagaca

SEQ ID NO: 1922706 - RNA, 19 nt, Homo sapiens
  misc_RNA (1)...(19): siRNA sense strand
ucaugcagcuucuugauag

SEQ ID NO: 1922707 - RNA, 19 nt, Homo sapiens
  misc_RNA (1)...(19): siRNA sense strand
cccagaaagucuucaacua

SEQ ID NO: 1922708 - RNA, 19 nt, Homo sapiens
  misc_RNA (1)...(19): siRNA sense strand
ccuuucaacuggagaagua

SEQ ID NO: 1922709 - RNA, 19 nt, Homo sapiens
  misc_RNA (1)...(19): siRNA sense strand
agaagaacuuucagaggaa

SEQ ID NO: 1922710 - RNA, 19 nt, Homo sapiens
  misc_RNA (1)...(19): siRNA sense strand
gcuagaggcugcacaccau

SEQ ID NO: 1922711 - RNA, 19 nt, Homo sapiens
  misc_RNA (1)...(19): siRNA sense strand
aaagcuguuucuacugaua

SEQ ID NO: 1922712 - RNA, 19 nt, Homo sapiens
  misc_RNA (1)...(19): siRNA sense strand
ugauacaacuuccuuccaa

SEQ ID NO: 1922713 - RNA, 19 nt, Homo sapiens
  misc_RNA (1)...(19): siRNA sense strand
gacauaagcaagaaagaga

SEQ ID NO: 1922714 - RNA, 19 nt, Homo sapiens
  misc_RNA (1)...(19): siRNA sense strand
gaaccaauagaagaacuuu

SEQ ID NO: 1922715 - RNA, 19 nt, Homo sapiens
  misc_RNA (1)...(19): siRNA sense strand
acucagagacagcagauua

SEQ ID NO: 1922716 - RNA, 19 nt, Homo sapiens
  misc_RNA (1)...(19): siRNA sense strand
ggagaaacuaguugaugaa

SEQ ID NO: 1922717 - RNA, 19 nt, Homo sapiens
  misc_RNA (1)...(19): siRNA sense strand
aggagaaacuaguugauga

SEQ ID NO: 1922718 - RNA, 19 nt, Homo sapiens
  misc_RNA (1)...(19): siRNA sense strand
gcauuagaauaucaacugu

SEQ ID NO: 1922719 - RNA, 19 nt, Homo sapiens
  misc_RNA (1)...(19): siRNA sense strand
gaaaaugaaucaagcacau

SEQ ID NO: 1922720 - RNA, 19 nt, Homo sapiens
  misc_RNA (1)...(19): siRNA sense strand
caagugaucaguugcauag

SEQ ID NO: 1922721 - RNA, 19 nt, Homo sapiens
  misc_RNA (1)...(19): siRNA sense strand
uaaaucaagucugccaaug

SEQ ID NO: 1922722 - RNA, 19 nt, Homo sapiens
  misc_RNA (1)...(19): siRNA sense strand
gcagaaugagcugauuaua

SEQ ID NO: 1922723 - RNA, 19 nt, Homo sapiens
  misc_RNA (1)...(19): siRNA sense strand
ggauuuccauaaugucaug

SEQ ID NO: 1922724 - RNA, 19 nt, Homo sapiens
  misc_RNA (1)...(19): siRNA sense strand
cuucgaaccucaaugauag

SEQ ID NO: 1922725 - RNA, 19 nt, Homo sapiens
  misc_RNA (1)...(19): siRNA sense strand
gaaagacauaagcaagaaa

SEQ ID NO: 1922726 - RNA, 19 nt, Homo sapiens
  misc_RNA (1)...(19): siRNA sense strand
uggagaaacuggaaaccuu

SEQ ID NO: 1922727 - RNA, 19 nt, Homo sapiens
  misc_RNA (1)...(19): siRNA sense strand
agagacagcagauuaaaga

SEQ ID NO: 1922728 - RNA, 19 nt, Homo sapiens
  misc_RNA (1)...(19): siRNA sense strand
caaauggacagcucgaguu

SEQ ID NO: 1922729 - RNA, 19 nt, Homo sapiens
  misc_RNA (1)...(19): siRNA sense strand
gugcaguguuucucaaaug

SEQ ID NO: 1922730 - RNA, 19 nt, Homo sapiens
  misc_RNA (1)...(19): siRNA sense strand
gaaagagaaauaccuaacu

SEQ ID NO: 1922731 - RNA, 19 nt, Homo sapiens
  misc_RNA (1)...(19): siRNA sense strand
ucaguugcauagaguacua

SEQ ID NO: 1922732 - RNA, 19 nt, Homo sapiens
  misc_RNA (1)...(19): siRNA sense strand
agauauacguggcauuuca

SEQ ID NO: 1922733 - RNA, 19 nt, Homo sapiens
  misc_RNA (1)...(19): siRNA sense strand
cuaaaugcaagcaauguuu

SEQ ID NO: 1922734 - RNA, 19 nt, Homo sapiens
  misc_RNA (1)...(19): siRNA sense strand
gcaaacgccggaagaagau

SEQ ID NO: 1922735 - RNA, 19 nt, Homo sapiens
  misc_RNA (1)...(19): siRNA sense strand
cgaggacacugaugauucu

SEQ ID NO: 1922736 - RNA, 19 nt, Homo sapiens
  misc_RNA (1)...(19): siRNA sense strand
ccagaagcaugucuacuac

SEQ ID NO: 1922737 - RNA, 19 nt, Homo sapiens
  misc_RNA (1)...(19): siRNA sense strand
cagaucaaguccaacauag

SEQ ID NO: 1922738 - RNA, 19 nt, Homo sapiens
  misc_RNA (1)...(19): siRNA sense strand
ggagauguuuaugaaggaa

SEQ ID NO: 1922739 - RNA, 19 nt, Homo sapiens
  misc_RNA (1)...(19): siRNA sense strand
aaggaaagcuuugaagagu

SEQ ID NO: 1922740 - RNA, 19 nt, Homo sapiens
  misc_RNA (1)...(19): siRNA sense strand
ggagcagaaugagcugauu

SEQ ID NO: 1922741 - RNA, 19 nt, Homo sapiens
  misc_RNA (1)...(19): siRNA sense strand
ugucagaaauccagaaguc

SEQ ID NO: 1922742 - RNA, 19 nt, Homo sapiens
  misc_RNA (1)...(19): siRNA sense strand
ugacaaggccuuuaugaac

SEQ ID NO: 1922743 - RNA, 19 nt, Homo sapiens
  misc_RNA (1)...(19): siRNA sense strand
ccgcaggagucgccguuaa

SEQ ID NO: 1922744 - RNA, 19 nt, Homo sapiens
  misc_RNA (1)...(19): siRNA sense strand
gaagauccuuuucccagaa

SEQ ID NO: 1922745 - RNA, 19 nt, Homo sapiens
  misc_RNA (1)...(19): siRNA sense strand
cagaaagacauaagcaaga

SEQ ID NO: 1922746 - RNA, 19 nt, Homo sapiens
  misc_RNA (1)...(19): siRNA sense strand
caagaacacaagaaagaga

SEQ ID NO: 1922747 - RNA, 19 nt, Homo sapiens
  misc_RNA (1)...(19): siRNA sense strand
gagaaacuaguugaugaaa

SEQ ID NO: 1922748 - RNA, 19 nt, Homo sapiens
  misc_RNA (1)...(19): siRNA sense strand
uucgaagaauucagcauua

SEQ ID NO: 1922749 - RNA, 19 nt, Homo sapiens
  misc_RNA (1)...(19): siRNA sense strand
cacacgaguuuaaagaaga

SEQ ID NO: 1922750 - RNA, 19 nt, Homo sapiens
  misc_RNA (1)...(19): siRNA sense strand
cauaucaucccuagaggaa

SEQ ID NO: 1922751 - RNA, 19 nt, Homo sapiens
  misc_RNA (1)...(19): siRNA sense strand
uaguaacugugacugauug

SEQ ID NO: 1922752 - RNA, 19 nt, Homo sapiens
  misc_RNA (1)...(19): siRNA sense strand
ggccaaagccaacuauuac

SEQ ID NO: 1922753 - RNA, 19 nt, Homo sapiens
  misc_RNA (1)...(19): siRNA sense strand
cauuucaagugaucaguug

SEQ ID NO: 1922754 - RNA, 19 nt, Homo sapiens
  misc_RNA (1)...(19): siRNA sense strand
aggaaagcuuugaagagua

SEQ ID NO: 1922755 - RNA, 19 nt, Homo sapiens
  misc_RNA (1)...(19): siRNA sense strand
gaucuaaaugcaagcaaug

SEQ ID NO: 1922756 - RNA, 19 nt, Homo sapiens
  misc_RNA (1)...(19): siRNA sense strand
uugagaagcuccggaguga

SEQ ID NO: 1922757 - RNA, 19 nt, Homo sapiens
  misc_RNA (1)...(19): siRNA sense strand
caguaucagugaacccaaa

SEQ ID NO: 1922758 - RNA, 19 nt, Homo sapiens
  misc_RNA (1)...(19): siRNA sense strand
gaaacuaguugaugaaaug

SEQ ID NO: 1922759 - RNA, 19 nt, Homo sapiens
  misc_RNA (1)...(19): siRNA sense strand
gcaagaagcugcucaccaa

SEQ ID NO: 1922760 - RNA, 19 nt, Homo sapiens
  misc_RNA (1)...(19): siRNA sense strand
ggaaagcuuugaagaguaa

SEQ ID NO: 1922761 - RNA, 19 nt, Homo sapiens
  misc_RNA (1)...(19): siRNA sense strand
gaacaaugguggagcagaa

SEQ ID NO: 1922762 - RNA, 19 nt, Homo sapiens
  misc_RNA (1)...(19): siRNA sense strand
gaaccucaaugauagauga

SEQ ID NO: 1922763 - RNA, 19 nt, Homo sapiens
  misc_RNA (1)...(19): siRNA sense strand
gaacuaaugucccugagau

SEQ ID NO: 1922764 - RNA, 19 nt, Homo sapiens
  misc_RNA (1)...(19): siRNA sense strand
ggagugagaucgucguauu

SEQ ID NO: 1922765 - RNA, 19 nt, Homo sapiens
  misc_RNA (1)...(19): siRNA sense strand
ucaaggagauguuuaugaa

SEQ ID NO: 1922766 - RNA, 19 nt, Homo sapiens
  misc_RNA (1)...(19): siRNA sense strand
gaaccaagcuuuucuacaa

SEQ ID NO: 1922767 - RNA, 19 nt, Homo sapiens
  misc_RNA (1)...(19): siRNA sense strand
gcacuacucucuucagauc

SEQ ID NO: 1922768 - RNA, 19 nt, Homo sapiens
  misc_RNA (1)...(19): siRNA sense strand
gcacauacuggaaccaaua

SEQ ID NO: 1922769 - RNA, 19 nt, Homo sapiens
  misc_RNA (1)...(19): siRNA sense strand
cagaaagucuucaacuauu

SEQ ID NO: 1922770 - RNA, 19 nt, Homo sapiens
  misc_RNA (1)...(19): siRNA sense strand
gagaauuccuugaacauca

SEQ ID NO: 1922771 - RNA, 19 nt, Homo sapiens
  misc_RNA (1)...(19): siRNA sense strand
ucaagacgcucaaggaaga

SEQ ID NO: 1922772 - RNA, 19 nt, Homo sapiens
  misc_RNA (1)...(19): siRNA sense strand
gaacaucaagucagcugua

SEQ ID NO: 1922773 - RNA, 19 nt, Homo sapiens
  misc_RNA (1)...(19): siRNA sense strand
gaagaauucagcauuagaa

SEQ ID NO: 1922774 - RNA, 19 nt, Homo sapiens
  misc_RNA (1)...(19): siRNA sense strand
gaauaucaacugucagaaa

SEQ ID NO: 1922775 - RNA, 19 nt, Homo sapiens
  misc_RNA (1)...(19): siRNA sense strand
caagucagcuguaaaauug

SEQ ID NO: 1922776 - RNA, 19 nt, Homo sapiens
  misc_RNA (1)...(19): siRNA sense strand
ucagaucagugcaguguuu

SEQ ID NO: 1922777 - RNA, 19 nt, Homo sapiens
  misc_RNA (1)...(19): siRNA sense strand
gcagaucaaguccaacaua

SEQ ID NO: 1922778 - RNA, 19 nt, Homo sapiens
  misc_RNA (1)...(19): siRNA sense strand
gaugaagacugggacauau

SEQ ID NO: 1922779 - RNA, 19 nt, Homo sapiens
  misc_RNA (1)...(19): siRNA sense strand
gcagauauacguggcauuu

SEQ ID NO: 1922780 - RNA, 19 nt, Homo sapiens
  misc_RNA (1)...(19): siRNA sense strand
agaaugagcugauuauaac

SEQ ID NO: 1922781 - RNA, 19 nt, Homo sapiens
  misc_RNA (1)...(19): siRNA sense strand
cagaaugagcugauuauaa

SEQ ID NO: 1922782 - RNA, 19 nt, Homo sapiens
  misc_RNA (1)...(19): siRNA sense strand
gcacacgaguuuaaagaag

SEQ ID NO: 1922783 - RNA, 19 nt, Homo sapiens
  misc_RNA (1)...(19): siRNA sense strand
ggacauaucaucccuagag

SEQ ID NO: 1922784 - RNA, 19 nt, Homo sapiens
  misc_RNA (1)...(19): siRNA sense strand
gaagaccguucuccauauc

SEQ ID NO: 1922785 - RNA, 19 nt, Homo sapiens
  misc_RNA (1)...(19): siRNA sense strand
gagcagaaugagcugauua

SEQ ID NO: 1922786 - RNA, 19 nt, Homo sapiens
  misc_RNA (1)...(19): siRNA sense strand
ucaaauggauacccuuuca

SEQ ID NO: 1922787 - RNA, 19 nt, Homo sapiens
  misc_RNA (1)...(19): siRNA sense strand
gacagcagauuaaagacuu

SEQ ID NO: 1922788 - RNA, 19 nt, Homo sapiens
  misc_RNA (1)...(19): siRNA sense strand
gauacaacuuccuuccaaa

SEQ ID NO: 1922789 - RNA, 19 nt, Homo sapiens
  misc_RNA (1)...(19): siRNA sense strand
caagaaagagaaauaccua

SEQ ID NO: 1922790 - RNA, 19 nt, Homo sapiens
  misc_RNA (1)...(19): siRNA sense strand
gagaacaucaugaacauca

SEQ ID NO: 1922791 - RNA, 19 nt, Homo sapiens
  misc_RNA (1)...(19): siRNA sense strand
gagaagcuccggagugaga

SEQ ID NO: 1922792 - RNA, 19 nt, Homo sapiens
  misc_RNA (1)...(19): siRNA sense strand
ggaugaagacugggacaua

SEQ ID NO: 1922793 - RNA, 19 nt, Homo sapiens
  misc_RNA (1)...(19): siRNA sense strand
ccagaaagucuucaacuau

SEQ ID NO: 1922794 - RNA, 19 nt, Homo sapiens
  misc_RNA (1)...(19): siRNA sense strand
ggucggcuccugucacaua

SEQ ID NO: 1922795 - RNA, 19 nt, Homo sapiens
  misc_RNA (1)...(19): siRNA sense strand
agaaagcacuacucucuuc

SEQ ID NO: 1922796 - RNA, 19 nt, Homo sapiens
  misc_RNA (1)...(19): siRNA sense strand
uaaugucccugagauguuu

SEQ ID NO: 1922797 - RNA, 19 nt, Homo sapiens
  misc_RNA (1)...(19): siRNA sense strand
gaucaagacgcucaaggaa

SEQ ID NO: 1922798 - RNA, 19 nt, Homo sapiens
  misc_RNA (1)...(19): siRNA sense strand
gugcggauguggaggauga

SEQ ID NO: 1922799 - RNA, 19 nt, Homo sapiens
  misc_RNA (1)...(19): siRNA sense strand
gauaggacaucuguuccaa

SEQ ID NO: 1922800 - RNA, 19 nt, Homo sapiens
  misc_RNA (1)...(19): siRNA sense strand
caacauaggcacauuaaaa

SEQ ID NO: 1922801 - RNA, 19 nt, Homo sapiens
  misc_RNA (1)...(19): siRNA sense strand
gaaauccagaaguccaaua

SEQ ID NO: 1922802 - RNA, 19 nt, Homo sapiens
  misc_RNA (1)...(19): siRNA sense strand
agaaagacauaagcaagaa

SEQ ID NO: 1922803 - RNA, 19 nt, Homo sapiens
  misc_RNA (1)...(19): siRNA sense strand
aaacuucgaaccucaauga

SEQ ID NO: 1922804 - RNA, 19 nt, Homo sapiens
  misc_RNA (1)...(19): siRNA sense strand
uaucaucccuagaggaaga

SEQ ID NO: 1922805 - RNA, 19 nt, Homo sapiens
  misc_RNA (1)...(19): siRNA sense strand
acagacaacugauuagaca

SEQ ID NO: 1922806 - RNA, 19 nt, Homo sapiens
  misc_RNA (1)...(19): siRNA sense strand
ucaugcagcuucuugauag

SEQ ID NO: 1922807 - RNA, 19 nt, Homo sapiens
  misc_RNA (1)...(19): siRNA sense strand
cccagaaagucuucaacua

SEQ ID NO: 1922808 - RNA, 19 nt, Homo sapiens
  misc_RNA (1)...(19): siRNA sense strand
ccuuucaacuggagaagua

SEQ ID NO: 1922809 - RNA, 19 nt, Homo sapiens
  misc_RNA (1)...(19): siRNA sense strand
agaagaacuuucagaggaa

SEQ ID NO: 1922810 - RNA, 19 nt, Homo sapiens
  misc_RNA (1)...(19): siRNA sense strand
gcuagaggcugcacaccau

SEQ ID NO: 1922811 - RNA, 19 nt, Homo sapiens
  misc_RNA (1)...(19): siRNA sense strand
aaagcuguuucuacugaua

SEQ ID NO: 1922812 - RNA, 19 nt, Homo sapiens
  misc_RNA (1)...(19): siRNA sense strand
ugauacaacuuccuuccaa

SEQ ID NO: 1922813 - RNA, 19 nt, Homo sapiens
  misc_RNA (1)...(19): siRNA sense strand
gacauaagcaagaaagaga

SEQ ID NO: 1922814 - RNA, 19 nt, Homo sapiens
  misc_RNA (1)...(19): siRNA sense strand
gaaccaauagaagaacuuu

SEQ ID NO: 1922815 - RNA, 19 nt, Homo sapiens
  misc_RNA (1)...(19): siRNA sense strand
acucagagacagcagauua

SEQ ID NO: 1922816 - RNA, 19 nt, Homo sapiens
  misc_RNA (1)...(19): siRNA sense strand
ggagaaacuaguugaugaa

SEQ ID NO: 1922817 - RNA, 19 nt, Homo sapiens
  misc_RNA (1)...(19): siRNA sense strand
aggagaaacuaguugauga

SEQ ID NO: 1922818 - RNA, 19 nt, Homo sapiens
  misc_RNA (1)...(19): siRNA sense strand
gcauuagaauaucaacugu

SEQ ID NO: 1922819 - RNA, 19 nt, Homo sapiens
  misc_RNA (1)...(19): siRNA sense strand
gaaaaugaaucaagcacau

SEQ ID NO: 1922820 - RNA, 19 nt, Homo sapiens
  misc_RNA (1)...(19): siRNA sense strand
caagugaucaguugcauag

SEQ ID NO: 1922821 - RNA, 19 nt, Homo sapiens
  misc_RNA (1)...(19): siRNA sense strand
uaaaucaagucugccaaug

SEQ ID NO: 1922822 - RNA, 19 nt, Homo sapiens
  misc_RNA (1)...(19): siRNA sense strand
gcagaaugagcugauuaua

SEQ ID NO: 1922823 - RNA, 19 nt, Homo sapiens
  misc_RNA (1)...(19): siRNA sense strand
ggauuuccauaaugucaug

SEQ ID NO: 1922824 - RNA, 19 nt, Homo sapiens
  misc_RNA (1)...(19): siRNA sense strand
cuucgaaccucaaugauag

SEQ ID NO: 1922825 - RNA, 19 nt, Homo sapiens
  misc_RNA (1)...(19): siRNA sense strand
gaaagacauaagcaagaaa

SEQ ID NO: 1922826 - RNA, 19 nt, Homo sapiens
  misc_RNA (1)...(19): siRNA sense strand
uggagaaacuggaaaccuu

SEQ ID NO: 1922827 - RNA, 19 nt, Homo sapiens
  misc_RNA (1)...(19): siRNA sense strand
agagacagcagauuaaaga

SEQ ID NO: 1922828 - RNA, 19 nt, Homo sapiens
  misc_RNA (1)...(19): siRNA sense strand
caaauggacagcucgaguu

SEQ ID NO: 1922829 - RNA, 19 nt, Homo sapiens
  misc_RNA (1)...(19): siRNA sense strand
gugcaguguuucucaaaug

SEQ ID NO: 1922830 - RNA, 19 nt, Homo sapiens
  misc_RNA (1)...(19): siRNA sense strand
gaaagagaaauaccuaacu

SEQ ID NO: 1922831 - RNA, 19 nt, Homo sapiens
  misc_RNA (1)...(19): siRNA sense strand
ucaguugcauagaguacua

SEQ ID NO: 1922832 - RNA, 19 nt, Homo sapiens
  misc_RNA (1)...(19): siRNA sense strand
agauauacguggcauuuca

SEQ ID NO: 1922833 - RNA, 19 nt, Homo sapiens
  misc_RNA (1)...(19): siRNA sense strand
cuaaaugcaagcaauguuu

SEQ ID NO: 1922834 - RNA, 19 nt, Homo sapiens
  misc_RNA (1)...(19): siRNA sense strand
gcaaacgccggaagaagau

SEQ ID NO: 1922835 - RNA, 19 nt, Homo sapiens
  misc_RNA (1)...(19): siRNA sense strand
cgaggacacugaugauucu

SEQ ID NO: 1922836 - RNA, 19 nt, Homo sapiens
  misc_RNA (1)...(19): siRNA sense strand
ccagaagcaugucuacuac

SEQ ID NO: 1922837 - RNA, 19 nt, Homo sapiens
  misc_RNA (1)...(19): siRNA sense strand
cagaucaaguccaacauag

SEQ ID NO: 1922838 - RNA, 19 nt, Homo sapiens
  misc_RNA (1)...(19): siRNA sense strand
ggagauguuuaugaaggaa

SEQ ID NO: 1922839 - RNA, 19 nt, Homo sapiens
  misc_RNA (1)...(19): siRNA sense strand
aaggaaagcuuugaagagu

SEQ ID NO: 1922840 - RNA, 19 nt, Homo sapiens
  misc_RNA (1)...(19): siRNA sense strand
ggagcagaaugagcugauu

SEQ ID NO: 1922841 - RNA, 19 nt, Homo sapiens
  misc_RNA (1)...(19): siRNA sense strand
ugucagaaauccagaaguc

SEQ ID NO: 1922842 - RNA, 19 nt, Homo sapiens
  misc_RNA (1)...(19): siRNA sense strand
ugacaaggccuuuaugaac

SEQ ID NO: 1922843 - RNA, 19 nt, Homo sapiens
  misc_RNA (1)...(19): siRNA sense strand
ccgcaggagucgccguuaa

SEQ ID NO: 1922844 - RNA, 19 nt, Homo sapiens
  misc_RNA (1)...(19): siRNA sense strand
gaagauccuuuucccagaa

SEQ ID NO: 1922845 - RNA, 19 nt, Homo sapiens
  misc_RNA (1)...(19): siRNA sense strand
cagaaagacauaagcaaga

SEQ ID NO: 1922846 - RNA, 19 nt, Homo sapiens
  misc_RNA (1)...(19): siRNA sense strand
caagaacacaagaaagaga

SEQ ID NO: 1922847 - RNA, 19 nt, Homo sapiens
  misc_RNA (1)...(19): siRNA sense strand
gagaaacuaguugaugaaa

SEQ ID NO: 1922848 - RNA, 19 nt, Homo sapiens
  misc_RNA (1)...(19): siRNA sense strand
uucgaagaauucagcauua

SEQ ID NO: 1922849 - RNA, 19 nt, Homo sapiens
  misc_RNA (1)...(19): siRNA sense strand
cacacgaguuuaaagaaga

SEQ ID NO: 1922850 - RNA, 19 nt, Homo sapiens
  misc_RNA (1)...(19): siRNA sense strand
cauaucaucccuagaggaa

SEQ ID NO: 1922851 - RNA, 19 nt, Homo sapiens
  misc_RNA (1)...(19): siRNA sense strand
uaguaacugugacugauug

SEQ ID NO: 1922852 - RNA, 19 nt, Homo sapiens
  misc_RNA (1)...(19): siRNA sense strand
ggccaaagccaacuauuac

SEQ ID NO: 1922853 - RNA, 19 nt, Homo sapiens
  misc_RNA (1)...(19): siRNA sense strand
cauuucaagugaucaguug

SEQ ID NO: 1922854 - RNA, 19 nt, Homo sapiens
  misc_RNA (1)...(19): siRNA sense strand
aggaaagcuuugaagagua

SEQ ID NO: 1922855 - RNA, 19 nt, Homo sapiens
  misc_RNA (1)...(19): siRNA sense strand
gaucuaaaugcaagcaaug

SEQ ID NO: 1922856 - RNA, 19 nt, Homo sapiens
  misc_RNA (1)...(19): siRNA sense strand
uugagaagcuccggaguga

SEQ ID NO: 1922857 - RNA, 19 nt, Homo sapiens
  misc_RNA (1)...(19): siRNA sense strand
caguaucagugaacccaaa

SEQ ID NO: 1922858 - RNA, 19 nt, Homo sapiens
  misc_RNA (1)...(19): siRNA sense strand
gaacaaagagucagugaau

SEQ ID NO: 1922859 - RNA, 19 nt, Homo sapiens
  misc_RNA (1)...(19): siRNA sense strand
cuauaaagcuuuggaagau

SEQ ID NO: 1922860 - RNA, 19 nt, Homo sapiens
  misc_RNA (1)...(19): siRNA sense strand
gucagugaauucuuuauga

SEQ ID NO: 1922861 - RNA, 19 nt, Homo sapiens
  misc_RNA (1)...(19): siRNA sense strand
caaaccagauauaugacuu

SEQ ID NO: 1922862 - RNA, 19 nt, Homo sapiens
  misc_RNA (1)...(19): siRNA sense strand
cuagaagacuaucuggaaa

SEQ ID NO: 1922863 - RNA, 19 nt, Homo sapiens
  misc_RNA (1)...(19): siRNA sense strand
ggaaaugauugagcagcuu

SEQ ID NO: 1922864 - RNA, 19 nt, Homo sapiens
  misc_RNA (1)...(19): siRNA sense strand
uggcaaaccagauauauga

SEQ ID NO: 1922865 - RNA, 19 nt, Homo sapiens
  misc_RNA (1)...(19): siRNA sense strand
ugcaauggaucaacuagaa

SEQ ID NO: 1922866 - RNA, 19 nt, Homo sapiens
  misc_RNA (1)...(19): siRNA sense strand
acaaagagucagugaauuc

SEQ ID NO: 1922867 - RNA, 19 nt, Homo sapiens
  misc_RNA (1)...(19): siRNA sense strand
ucaguuggcaaaccagaua

SEQ ID NO: 1922868 - RNA, 19 nt, Homo sapiens
  misc_RNA (1)...(19): siRNA sense strand
agacuacuauaaagcuuug

SEQ ID NO: 1922869 - RNA, 19 nt, Homo sapiens
  misc_RNA (1)...(19): siRNA sense strand
ccuagaagacuaucuggaa

SEQ ID NO: 1922870 - RNA, 19 nt, Homo sapiens
  misc_RNA (1)...(19): siRNA sense strand
aagacuaucuggaaaugau

SEQ ID NO: 1922871 - RNA, 19 nt, Homo sapiens
  misc_RNA (1)...(19): siRNA sense strand
gaaugcaauggaucaacua

SEQ ID NO: 1922872 - RNA, 19 nt, Homo sapiens
  misc_RNA (1)...(19): siRNA sense strand
ggaagaugcagaugagaag

SEQ ID NO: 1922873 - RNA, 19 nt, Homo sapiens
  misc_RNA (1)...(19): siRNA sense strand
agaagacuaucuggaaaug

SEQ ID NO: 1922874 - RNA, 19 nt, Homo sapiens
  misc_RNA (1)...(19): siRNA sense strand
cgggaccgcuucacggaaa

SEQ ID NO: 1922875 - RNA, 19 nt, Homo sapiens
  misc_RNA (1)...(19): siRNA sense strand
cagaugagaagguucaguu

SEQ ID NO: 1922876 - RNA, 19 nt, Homo sapiens
  misc_RNA (1)...(19): siRNA sense strand
caacuagaacaaagaguca

SEQ ID NO: 1922877 - RNA, 19 nt, Homo sapiens
  misc_RNA (1)...(19): siRNA sense strand
gaagacuaucuggaaauga

SEQ ID NO: 1922878 - RNA, 19 nt, Homo sapiens
  misc_RNA (1)...(19): siRNA sense strand
uugagcagcuuccuaugga

SEQ ID NO: 1922879 - RNA, 19 nt, Homo sapiens
  misc_RNA (1)...(19): siRNA sense strand
ugauugagcagcuuccuau

SEQ ID NO: 1922880 - RNA, 19 nt, Homo sapiens
  misc_RNA (1)...(19): siRNA sense strand
uauaaagcuuuggaagaug

SEQ ID NO: 1922881 - RNA, 19 nt, Homo sapiens
  misc_RNA (1)...(19): siRNA sense strand
ucacggaaaugcgcgagau

SEQ ID NO: 1922882 - RNA, 19 nt, Homo sapiens
  misc_RNA (1)...(19): siRNA sense strand
aacaaagagucagugaauu

SEQ ID NO: 1922883 - RNA, 19 nt, Homo sapiens
  misc_RNA (1)...(19): siRNA sense strand
agaaugcaauggaucaacu

SEQ ID NO: 1922884 - RNA, 19 nt, Homo sapiens
  misc_RNA (1)...(19): siRNA sense strand
guaccuagaagacuaucug

SEQ ID NO: 1922885 - RNA, 19 nt, Homo sapiens
  misc_RNA (1)...(19): siRNA sense strand
ggaucaacuagaacaaaga

SEQ ID NO: 1922886 - RNA, 19 nt, Homo sapiens
  misc_RNA (1)...(19): siRNA sense strand
uggaucaacuagaacaaag

SEQ ID NO: 1922887 - RNA, 19 nt, Homo sapiens
  misc_RNA (1)...(19): siRNA sense strand
gcaaaccagauauaugacu

SEQ ID NO: 1922888 - RNA, 19 nt, Homo sapiens
  misc_RNA (1)...(19): siRNA sense strand
gaucaacuagaacaaagag

SEQ ID NO: 1922889 - RNA, 19 nt, Homo sapiens
  misc_RNA (1)...(19): siRNA sense strand
caauggaucaacuagaaca

SEQ ID NO: 1922890 - RNA, 19 nt, Homo sapiens
  misc_RNA (1)...(19): siRNA sense strand
caaagagucagugaauucu

SEQ ID NO: 1922891 - RNA, 19 nt, Homo sapiens
  misc_RNA (1)...(19): siRNA sense strand
acuauaaagcuuuggaaga

SEQ ID NO: 1922892 - RNA, 19 nt, Homo sapiens
  misc_RNA (1)...(19): siRNA sense strand
uagaagacuaucuggaaau

SEQ ID NO: 1922893 - RNA, 19 nt, Homo sapiens
  misc_RNA (1)...(19): siRNA sense strand
uagaacaaagagucaguga

SEQ ID NO: 1922894 - RNA, 19 nt, Homo sapiens
  misc_RNA (1)...(19): siRNA sense strand
uggaagaugcagaugagaa

SEQ ID NO: 1922895 - RNA, 19 nt, Homo sapiens
  misc_RNA (1)...(19): siRNA sense strand
agagucagugaauucuuua

SEQ ID NO: 1922896 - RNA, 19 nt, Homo sapiens
  misc_RNA (1)...(19): siRNA sense strand
gcagaaugcaauggaucaa

SEQ ID NO: 1922897 - RNA, 19 nt, Homo sapiens
  misc_RNA (1)...(19): siRNA sense strand
agaugcagaugagaagguu

SEQ ID NO: 1922898 - RNA, 19 nt, Homo sapiens
  misc_RNA (1)...(19): siRNA sense strand
aaaccagauauaugacuug

SEQ ID NO: 1922899 - RNA, 19 nt, Homo sapiens
  misc_RNA (1)...(19): siRNA sense strand
gaacaaagagucagugaau

SEQ ID NO: 1922900 - RNA, 19 nt, Homo sapiens
  misc_RNA (1)...(19): siRNA sense strand
cuauaaagcuuuggaagau

SEQ ID NO: 1922901 - RNA, 19 nt, Homo sapiens
  misc_RNA (1)...(19): siRNA sense strand
gucagugaauucuuuauga

SEQ ID NO: 1922902 - RNA, 19 nt, Homo sapiens
  misc_RNA (1)...(19): siRNA sense strand
caaaccagauauaugacuu

SEQ ID NO: 1922903 - RNA, 19 nt, Homo sapiens
  misc_RNA (1)...(19): siRNA sense strand
cuagaagacuaucuggaaa

SEQ ID NO: 1922904 - RNA, 19 nt, Homo sapiens
  misc_RNA (1)...(19): siRNA sense strand
ggaaaugauugagcagcuu

SEQ ID NO: 1922905 - RNA, 19 nt, Homo sapiens
  misc_RNA (1)...(19): siRNA sense strand
uggcaaaccagauauauga

SEQ ID NO: 1922906 - RNA, 19 nt, Homo sapiens
  misc_RNA (1)...(19): siRNA sense strand
ugcaauggaucaacuagaa

SEQ ID NO: 1922907 - RNA, 19 nt, Homo sapiens
  misc_RNA (1)...(19): siRNA sense strand
acaaagagucagugaauuc

SEQ ID NO: 1922908 - RNA, 19 nt, Homo sapiens
  misc_RNA (1)...(19): siRNA sense strand
ucaguuggcaaaccagaua

SEQ ID NO: 1922909 - RNA, 19 nt, Homo sapiens
  misc_RNA (1)...(19): siRNA sense strand
agacuacuauaaagcuuug

SEQ ID NO: 1922910 - RNA, 19 nt, Homo sapiens
  misc_RNA (1)...(19): siRNA sense strand
ccuagaagacuaucuggaa

SEQ ID NO: 1922911 - RNA, 19 nt, Homo sapiens
  misc_RNA (1)...(19): siRNA sense strand
aagacuaucuggaaaugau

SEQ ID NO: 1922912 - RNA, 19 nt, Homo sapiens
  misc_RNA (1)...(19): siRNA sense strand
gaaugcaauggaucaacua

SEQ ID NO: 1922913 - RNA, 19 nt, Homo sapiens
  misc_RNA (1)...(19): siRNA sense strand
ggaagaugcagaugagaag

SEQ ID NO: 1922914 - RNA, 19 nt, Homo sapiens
  misc_RNA (1)...(19): siRNA sense strand
agaagacuaucuggaaaug

SEQ ID NO: 1922915 - RNA, 19 nt, Homo sapiens
  misc_RNA (1)...(19): siRNA sense strand
cgggaccgcuucacggaaa

SEQ ID NO: 1922916 - RNA, 19 nt, Homo sapiens
  misc_RNA (1)...(19): siRNA sense strand
cagaugagaagguucaguu

SEQ ID NO: 1922917 - RNA, 19 nt, Homo sapiens
  misc_RNA (1)...(19): siRNA sense strand
caacuagaacaaagaguca

SEQ ID NO: 1922918 - RNA, 19 nt, Homo sapiens
  misc_RNA (1)...(19): siRNA sense strand
gaagacuaucuggaaauga

SEQ ID NO: 1922919 - RNA, 19 nt, Homo sapiens
  misc_RNA (1)...(19): siRNA sense strand
uugagcagcuuccuaugga

SEQ ID NO: 1922920 - RNA, 19 nt, Homo sapiens
  misc_RNA (1)...(19): siRNA sense strand
ugauugagcagcuuccuau

SEQ ID NO: 1922921 - RNA, 19 nt, Homo sapiens
  misc_RNA (1)...(19): siRNA sense strand
uauaaagcuuuggaagaug

SEQ ID NO: 1922922 - RNA, 19 nt, Homo sapiens
  misc_RNA (1)...(19): siRNA sense strand
ucacggaaaugcgcgagau

SEQ ID NO: 1922923 - RNA, 19 nt, Homo sapiens
  misc_RNA (1)...(19): siRNA sense strand
aacaaagagucagugaauu

SEQ ID NO: 1922924 - RNA, 19 nt, Homo sapiens
  misc_RNA (1)...(19): siRNA sense strand
agaaugcaauggaucaacu

SEQ ID NO: 1922925 - RNA, 19 nt, Homo sapiens
  misc_RNA (1)...(19): siRNA sense strand
guaccuagaagacuaucug

SEQ ID NO: 1922926 - RNA, 19 nt, Homo sapiens
  misc_RNA (1)...(19): siRNA sense strand
ggaucaacuagaacaaaga

SEQ ID NO: 1922927 - RNA, 19 nt, Homo sapiens
  misc_RNA (1)...(19): siRNA sense strand
uggaucaacuagaacaaag

SEQ ID NO: 1922928 - RNA, 19 nt, Homo sapiens
  misc_RNA (1)...(19): siRNA sense strand
gcaaaccagauauaugacu

SEQ ID NO: 1922929 - RNA, 19 nt, Homo sapiens
  misc_RNA (1)...(19): siRNA sense strand
gaucaacuagaacaaagag

SEQ ID NO: 1922930 - RNA, 19 nt, Homo sapiens
  misc_RNA (1)...(19): siRNA sense strand
caauggaucaacuagaaca

SEQ ID NO: 1922931 - RNA, 19 nt, Homo sapiens
  misc_RNA (1)...(19): siRNA sense strand
caaagagucagugaauucu

SEQ ID NO: 1922932 - RNA, 19 nt, Homo sapiens
  misc_RNA (1)...(19): siRNA sense strand
acuauaaagcuuuggaaga

SEQ ID NO: 1922933 - RNA, 19 nt, Homo sapiens
  misc_RNA (1)...(19): siRNA sense strand
uagaagacuaucuggaaau

SEQ ID NO: 1922934 - RNA, 19 nt, Homo sapiens
  misc_RNA (1)...(19): siRNA sense strand
uagaacaaagagucaguga

SEQ ID NO: 1922935 - RNA, 19 nt, Homo sapiens
  misc_RNA (1)...(19): siRNA sense strand
uggaagaugcagaugagaa

SEQ ID NO: 1922936 - RNA, 19 nt, Homo sapiens
  misc_RNA (1)...(19): siRNA sense strand
agagucagugaauucuuua

SEQ ID NO: 1922937 - RNA, 19 nt, Homo sapiens
  misc_RNA (1)...(19): siRNA sense strand
gcagaaugcaauggaucaa

SEQ ID NO: 1922938 - RNA, 19 nt, Homo sapiens
  misc_RNA (1)...(19): siRNA sense strand
agaugcagaugagaagguu

SEQ ID NO: 1922939 - RNA, 19 nt, Homo sapiens
  misc_RNA (1)...(19): siRNA sense strand
aaaccagauauaugacuug

SEQ ID NO: 1922940 - RNA, 19 nt, Homo sapiens
  misc_RNA (1)...(19): siRNA sense strand
gaacaaagagucagugaau

SEQ ID NO: 1922941 - RNA, 19 nt, Homo sapiens
  misc_RNA (1)...(19): siRNA sense strand
cuauaaagcuuuggaagau

SEQ ID NO: 1922942 - RNA, 19 nt, Homo sapiens
  misc_RNA (1)...(19): siRNA sense strand
gucagugaauucuuuauga

SEQ ID NO: 1922943 - RNA, 19 nt, Homo sapiens
  misc_RNA (1)...(19): siRNA sense strand
caaaccagauauaugacuu

SEQ ID NO: 1922944 - RNA, 19 nt, Homo sapiens
  misc_RNA (1)...(19): siRNA sense strand
cuagaagacuaucuggaaa

SEQ ID NO: 1922945 - RNA, 19 nt, Homo sapiens
  misc_RNA (1)...(19): siRNA sense strand
ggaaaugauugagcagcuu

SEQ ID NO: 1922946 - RNA, 19 nt, Homo sapiens
  misc_RNA (1)...(19): siRNA sense strand
uggcaaaccagauauauga

SEQ ID NO: 1922947 - RNA, 19 nt, Homo sapiens
  misc_RNA (1)...(19): siRNA sense strand
ugcaauggaucaacuagaa

SEQ ID NO: 1922948 - RNA, 19 nt, Homo sapiens
  misc_RNA (1)...(19): siRNA sense strand
acaaagagucagugaauuc

SEQ ID NO: 1922949 - RNA, 19 nt, Homo sapiens
  misc_RNA (1)...(19): siRNA sense strand
ucaguuggcaaaccagaua

SEQ ID NO: 1922950 - RNA, 19 nt, Homo sapiens
  misc_RNA (1)...(19): siRNA sense strand
agacuacuauaaagcuuug

SEQ ID NO: 1922951 - RNA, 19 nt, Homo sapiens
  misc_RNA (1)...(19): siRNA sense strand
ccuagaagacuaucuggaa

SEQ ID NO: 1922952 - RNA, 19 nt, Homo sapiens
  misc_RNA (1)...(19): siRNA sense strand
aagacuaucuggaaaugau

SEQ ID NO: 1922953 - RNA, 19 nt, Homo sapiens
  misc_RNA (1)...(19): siRNA sense strand
gaaugcaauggaucaacua

SEQ ID NO: 1922954 - RNA, 19 nt, Homo sapiens
  misc_RNA (1)...(19): siRNA sense strand
ggaagaugcagaugagaag

SEQ ID NO: 1922955 - RNA, 19 nt, Homo sapiens
  misc_RNA (1)...(19): siRNA sense strand
agaagacuaucuggaaaug

SEQ ID NO: 1922956 - RNA, 19 nt, Homo sapiens
  misc_RNA (1)...(19): siRNA sense strand
cgggaccgcuucacggaaa

SEQ ID NO: 1922957 - RNA, 19 nt, Homo sapiens
  misc_RNA (1)...(19): siRNA sense strand
cagaugagaagguucaguu

SEQ ID NO: 1922958 - RNA, 19 nt, Homo sapiens
  misc_RNA (1)...(19): siRNA sense strand
caacuagaacaaagaguca

SEQ ID NO: 1922959 - RNA, 19 nt, Homo sapiens
  misc_RNA (1)...(19): siRNA sense strand
gaagacuaucuggaaauga

SEQ ID NO: 1922960 - RNA, 19 nt, Homo sapiens
  misc_RNA (1)...(19): siRNA sense strand
uugagcagcuuccuaugga

SEQ ID NO: 1922961 - RNA, 19 nt, Homo sapiens
  misc_RNA (1)...(19): siRNA sense strand
ugauugagcagcuuccuau

SEQ ID NO: 1922962 - RNA, 19 nt, Homo sapiens
  misc_RNA (1)...(19): siRNA sense strand
uauaaagcuuuggaagaug

SEQ ID NO: 1922963 - RNA, 19 nt, Homo sapiens
  misc_RNA (1)...(19): siRNA sense strand
ucacggaaaugcgcgagau

SEQ ID NO: 1922964 - RNA, 19 nt, Homo sapiens
  misc_RNA (1)...(19): siRNA sense strand
aacaaagagucagugaauu

SEQ ID NO: 1922965 - RNA, 19 nt, Homo sapiens
  misc_RNA (1)...(19): siRNA sense strand
agaaugcaauggaucaacu

SEQ ID NO: 1922966 - RNA, 19 nt, Homo sapiens
  misc_RNA (1)...(19): siRNA sense strand
guaccuagaagacuaucug

SEQ ID NO: 1922967 - RNA, 19 nt, Homo sapiens
  misc_RNA (1)...(19): siRNA sense strand
ggaucaacuagaacaaaga

SEQ ID NO: 1922968 - RNA, 19 nt, Homo sapiens
  misc_RNA (1)...(19): siRNA sense strand
uggaucaacuagaacaaag

SEQ ID NO: 1922969 - RNA, 19 nt, Homo sapiens
  misc_RNA (1)...(19): siRNA sense strand
gcaaaccagauauaugacu

SEQ ID NO: 1922970 - RNA, 19 nt, Homo sapiens
  misc_RNA (1)...(19): siRNA sense strand
gaucaacuagaacaaagag

SEQ ID NO: 1922971 - RNA, 19 nt, Homo sapiens
  misc_RNA (1)...(19): siRNA sense strand
caauggaucaacuagaaca

SEQ ID NO: 1922972 - RNA, 19 nt, Homo sapiens
  misc_RNA (1)...(19): siRNA sense strand
caaagagucagugaauucu

SEQ ID NO: 1922973 - RNA, 19 nt, Homo sapiens
  misc_RNA (1)...(19): siRNA sense strand
acuauaaagcuuuggaaga

SEQ ID NO: 1922974 - RNA, 19 nt, Homo sapiens
  misc_RNA (1)...(19): siRNA sense strand
uagaagacuaucuggaaau

SEQ ID NO: 1922975 - RNA, 19 nt, Homo sapiens
  misc_RNA (1)...(19): siRNA sense strand
uagaacaaagagucaguga

SEQ ID NO: 1922976 - RNA, 19 nt, Homo sapiens
  misc_RNA (1)...(19): siRNA sense strand
uggaagaugcagaugagaa

SEQ ID NO: 1922977 - RNA, 19 nt, Homo sapiens
  misc_RNA (1)...(19): siRNA sense strand
agagucagugaauucuuua

SEQ ID NO: 1922978 - RNA, 19 nt, Homo sapiens
  misc_RNA (1)...(19): siRNA sense strand
gcagaaugcaauggaucaa

SEQ ID NO: 1922979 - RNA, 19 nt, Homo sapiens
  misc_RNA (1)...(19): siRNA sense strand
agaugcagaugagaagguu

SEQ ID NO: 1922980 - RNA, 19 nt, Homo sapiens
  misc_RNA (1)...(19): siRNA sense strand
aaaccagauauaugacuug

SEQ ID NO: 1922981 - RNA, 19 nt, Homo sapiens
  misc_RNA (1)...(19): siRNA sense strand
ccaaggcgcuccaugaaau

SEQ ID NO: 1922982 - RNA, 19 nt, Homo sapiens
  misc_RNA (1)...(19): siRNA sense strand
gcauggagguggcccagaa

SEQ ID NO: 1922983 - RNA, 19 nt, Homo sapiens
  misc_RNA (1)...(19): siRNA sense strand
agacagacuucgugcagua

SEQ ID NO: 1922984 - RNA, 19 nt, Homo sapiens
  misc_RNA (1)...(19): siRNA sense strand
gacagugggugaugagcua

SEQ ID NO: 1922985 - RNA, 19 nt, Homo sapiens
  misc_RNA (1)...(19): siRNA sense strand
agaaggagcccaagagcua

SEQ ID NO: 1922986 - RNA, 19 nt, Homo sapiens
  misc_RNA (1)...(19): siRNA sense strand
agaacaaccugauugacaa

SEQ ID NO: 1922987 - RNA, 19 nt, Homo sapiens
  misc_RNA (1)...(19): siRNA sense strand
ugacaaccauggcaucaag

SEQ ID NO: 1922988 - RNA, 19 nt, Homo sapiens
  misc_RNA (1)...(19): siRNA sense strand
acaaggggcugcagaagua

SEQ ID NO: 1922989 - RNA, 19 nt, Homo sapiens
  misc_RNA (1)...(19): siRNA sense strand
gcaauucuggcuccuacaa

SEQ ID NO: 1922990 - RNA, 19 nt, Homo sapiens
  misc_RNA (1)...(19): siRNA sense strand
caaggcgcuccaugaaaua

SEQ ID NO: 1922991 - RNA, 19 nt, Homo sapiens
  misc_RNA (1)...(19): siRNA sense strand
ggaccgggacacagagauu

SEQ ID NO: 1922992 - RNA, 19 nt, Homo sapiens
  misc_RNA (1)...(19): siRNA sense strand
aauacacgcugugcaguga

SEQ ID NO: 1922993 - RNA, 19 nt, Homo sapiens
  misc_RNA (1)...(19): siRNA sense strand
cagcaacaccuaugagaag

SEQ ID NO: 1922994 - RNA, 19 nt, Homo sapiens
  misc_RNA (1)...(19): siRNA sense strand
cagcccaucuacaacauca

SEQ ID NO: 1922995 - RNA, 19 nt, Homo sapiens
  misc_RNA (1)...(19): siRNA sense strand
cagcagugguggugacagu

SEQ ID NO: 1922996 - RNA, 19 nt, Homo sapiens
  misc_RNA (1)...(19): siRNA sense strand
agacggaccucugcuggau

SEQ ID NO: 1922997 - RNA, 19 nt, Homo sapiens
  misc_RNA (1)...(19): siRNA sense strand
gaacaaccugauugacaag

SEQ ID NO: 1922998 - RNA, 19 nt, Homo sapiens
  misc_RNA (1)...(19): siRNA sense strand
agagauugaugaccugaag

SEQ ID NO: 1922999 - RNA, 19 nt, Homo sapiens
  misc_RNA (1)...(19): siRNA sense strand
ggacaucaacauccagaac

SEQ ID NO: 1923000 - RNA, 19 nt, Homo sapiens
  misc_RNA (1)...(19): siRNA sense strand
gccaaggcgcuccaugaaa

SEQ ID NO: 1923001 - RNA, 19 nt, Homo sapiens
  misc_RNA (1)...(19): siRNA sense strand
gucaagaacaaccugauug

SEQ ID NO: 1923002 - RNA, 19 nt, Homo sapiens
  misc_RNA (1)...(19): siRNA sense strand
aagaacaaccugauugaca

SEQ ID NO: 1923003 - RNA, 19 nt, Homo sapiens
  misc_RNA (1)...(19): siRNA sense strand
guaccagccugaccuugac

SEQ ID NO: 1923004 - RNA, 19 nt, Homo sapiens
  misc_RNA (1)...(19): siRNA sense strand
acaucaacauccagaacaa

SEQ ID NO: 1923005 - RNA, 19 nt, Homo sapiens
  misc_RNA (1)...(19): siRNA sense strand
ugaaggaggcccgaaagga

SEQ ID NO: 1923006 - RNA, 19 nt, Homo sapiens
  misc_RNA (1)...(19): siRNA sense strand
ccagcaacaccuaugagaa

SEQ ID NO: 1923007 - RNA, 19 nt, Homo sapiens
  misc_RNA (1)...(19): siRNA sense strand
gacaucaacauccagaaca

SEQ ID NO: 1923008 - RNA, 19 nt, Homo sapiens
  misc_RNA (1)...(19): siRNA sense strand
caacauccagaacaagaag

SEQ ID NO: 1923009 - RNA, 19 nt, Homo sapiens
  misc_RNA (1)...(19): siRNA sense strand
acaccauccuggagaaagu

SEQ ID NO: 1923010 - RNA, 19 nt, Homo sapiens
  misc_RNA (1)...(19): siRNA sense strand
ggacacagagauugaugac

SEQ ID NO: 1923011 - RNA, 19 nt, Homo sapiens
  misc_RNA (1)...(19): siRNA sense strand
gcugugcagugacaaccau

SEQ ID NO: 1923012 - RNA, 19 nt, Homo sapiens
  misc_RNA (1)...(19): siRNA sense strand
acaaccugauugacaagga

SEQ ID NO: 1923013 - RNA, 19 nt, Homo sapiens
  misc_RNA (1)...(19): siRNA sense strand
gccagcaacaccuaugaga

SEQ ID NO: 1923014 - RNA, 19 nt, Homo sapiens
  misc_RNA (1)...(19): siRNA sense strand
gggacacagagauugauga

SEQ ID NO: 1923015 - RNA, 19 nt, Homo sapiens
  misc_RNA (1)...(19): siRNA sense strand
gcaguaccagccugaccuu

SEQ ID NO: 1923016 - RNA, 19 nt, Homo sapiens
  misc_RNA (1)...(19): siRNA sense strand
ucaacauccagaacaagaa

SEQ ID NO: 1923017 - RNA, 19 nt, Homo sapiens
  misc_RNA (1)...(19): siRNA sense strand
ugucaagaacaaccugauu

SEQ ID NO: 1923018 - RNA, 19 nt, Homo sapiens
  misc_RNA (1)...(19): siRNA sense strand
ggcagacaguggcuuugca

SEQ ID NO: 1923019 - RNA, 19 nt, Homo sapiens
  misc_RNA (1)...(19): siRNA sense strand
gcagcuccaccuacaccaa

SEQ ID NO: 1923020 - RNA, 19 nt, Homo sapiens
  misc_RNA (1)...(19): siRNA sense strand
gcagcaauucuggcuccua

SEQ ID NO: 1923021 - RNA, 19 nt, Homo sapiens
  misc_RNA (1)...(19): siRNA sense strand
gaccgggacacagagauug

SEQ ID NO: 1923022 - RNA, 19 nt, Homo sapiens
  misc_RNA (1)...(19): siRNA sense strand
gcugagaaggagcccaaga

SEQ ID NO: 1923023 - RNA, 19 nt, Homo sapiens
  misc_RNA (1)...(19): siRNA sense strand
ggccagcccaucuacaaca

SEQ ID NO: 1923024 - RNA, 19 nt, Homo sapiens
  misc_RNA (1)...(19): siRNA sense strand
uuacgaagcuccuguuaaa

SEQ ID NO: 1923025 - RNA, 19 nt, Homo sapiens
  misc_RNA (1)...(19): siRNA sense strand
gcgauuaaccugaaacaaa

SEQ ID NO: 1923026 - RNA, 19 nt, Homo sapiens
  misc_RNA (1)...(19): siRNA sense strand
gcacaugccaagcuggaua

SEQ ID NO: 1923027 - RNA, 19 nt, Homo sapiens
  misc_RNA (1)...(19): siRNA sense strand
gcccagcccuuacuacaug

SEQ ID NO: 1923028 - RNA, 19 nt, Homo sapiens
  misc_RNA (1)...(19): siRNA sense strand
cgauuaaccugaaacaaag

SEQ ID NO: 1923029 - RNA, 19 nt, Homo sapiens
  misc_RNA (1)...(19): siRNA sense strand
cgaagcuccuguuaaauca

SEQ ID NO: 1923030 - RNA, 19 nt, Homo sapiens
  misc_RNA (1)...(19): siRNA sense strand
gaaacaaagacagaaaugu

SEQ ID NO: 1923031 - RNA, 19 nt, Homo sapiens
  misc_RNA (1)...(19): siRNA sense strand
cagaguggauggauguaga

SEQ ID NO: 1923032 - RNA, 19 nt, Homo sapiens
  misc_RNA (1)...(19): siRNA sense strand
ggacacucguauagccaaa

SEQ ID NO: 1923033 - RNA, 19 nt, Homo sapiens
  misc_RNA (1)...(19): siRNA sense strand
ggacaagaucuaccucauc

SEQ ID NO: 1923034 - RNA, 19 nt, Homo sapiens
  misc_RNA (1)...(19): siRNA sense strand
cacaagcgcucaaccacau

SEQ ID NO: 1923035 - RNA, 19 nt, Homo sapiens
  misc_RNA (1)...(19): siRNA sense strand
gaacgaaaggaagaaacuu

SEQ ID NO: 1923036 - RNA, 19 nt, Homo sapiens
  misc_RNA (1)...(19): siRNA sense strand
cagcgggacuuuccucaca

SEQ ID NO: 1923037 - RNA, 19 nt, Homo sapiens
  misc_RNA (1)...(19): siRNA sense strand
uaaaucaugcuucagacaa

SEQ ID NO: 1923038 - RNA, 19 nt, Homo sapiens
  misc_RNA (1)...(19): siRNA sense strand
caacuucagucuggacaag

SEQ ID NO: 1923039 - RNA, 19 nt, Homo sapiens
  misc_RNA (1)...(19): siRNA sense strand
ugagggaucaugaacgaaa

SEQ ID NO: 1923040 - RNA, 19 nt, Homo sapiens
  misc_RNA (1)...(19): siRNA sense strand
ccuguuaaaucaugcuuca

SEQ ID NO: 1923041 - RNA, 19 nt, Homo sapiens
  misc_RNA (1)...(19): siRNA sense strand
cccuguggcuggcgauuaa

SEQ ID NO: 1923042 - RNA, 19 nt, Homo sapiens
  misc_RNA (1)...(19): siRNA sense strand
augccaagcuggauaacuu

SEQ ID NO: 1923043 - RNA, 19 nt, Homo sapiens
  misc_RNA (1)...(19): siRNA sense strand
ugaaacaaagacagaaaug

SEQ ID NO: 1923044 - RNA, 19 nt, Homo sapiens
  misc_RNA (1)...(19): siRNA sense strand
uggagaagaugagggauca

SEQ ID NO: 1923045 - RNA, 19 nt, Homo sapiens
  misc_RNA (1)...(19): siRNA sense strand
ggauggauguagaaaaguu

SEQ ID NO: 1923046 - RNA, 19 nt, Homo sapiens
  misc_RNA (1)...(19): siRNA sense strand
guagaaaaguuggagaaga

SEQ ID NO: 1923047 - RNA, 19 nt, Homo sapiens
  misc_RNA (1)...(19): siRNA sense strand
uagaaaaguuggagaagau

SEQ ID NO: 1923048 - RNA, 19 nt, Homo sapiens
  misc_RNA (1)...(19): siRNA sense strand
ucaaccacauguacaaacu

SEQ ID NO: 1923049 - RNA, 19 nt, Homo sapiens
  misc_RNA (1)...(19): siRNA sense strand
gauaugugggacacucgua

SEQ ID NO: 1923050 - RNA, 19 nt, Homo sapiens
  misc_RNA (1)...(19): siRNA sense strand
gagggaucaugaacgaaag

SEQ ID NO: 1923051 - RNA, 19 nt, Homo sapiens
  misc_RNA (1)...(19): siRNA sense strand
acauggaacuuacgaagcu

SEQ ID NO: 1923052 - RNA, 19 nt, Homo sapiens
  misc_RNA (1)...(19): siRNA sense strand
aagcuccuguuaaaucaug

SEQ ID NO: 1923053 - RNA, 19 nt, Homo sapiens
  misc_RNA (1)...(19): siRNA sense strand
uguacaaacuccgcacgaa

SEQ ID NO: 1923054 - RNA, 19 nt, Homo sapiens
  misc_RNA (1)...(19): siRNA sense strand
gccgagaaggagcugguua

SEQ ID NO: 1923055 - RNA, 19 nt, Homo sapiens
  misc_RNA (1)...(19): siRNA sense strand
gcucaaccacauguacaaa

SEQ ID NO: 1923056 - RNA, 19 nt, Homo sapiens
  misc_RNA (1)...(19): siRNA sense strand
acgaagcuccuguuaaauc

SEQ ID NO: 1923057 - RNA, 19 nt, Homo sapiens
  misc_RNA (1)...(19): siRNA sense strand
ggcuggcgauuaaccugaa

SEQ ID NO: 1923058 - RNA, 19 nt, Homo sapiens
  misc_RNA (1)...(19): siRNA sense strand
uguuaaaucaugcuucaga

SEQ ID NO: 1923059 - RNA, 19 nt, Homo sapiens
  misc_RNA (1)...(19): siRNA sense strand
uaugugggacacucguaua

SEQ ID NO: 1923060 - RNA, 19 nt, Homo sapiens
  misc_RNA (1)...(19): siRNA sense strand
gcuggcgauuaaccugaaa

SEQ ID NO: 1923061 - RNA, 19 nt, Homo sapiens
  misc_RNA (1)...(19): siRNA sense strand
ccugaaacaaagacagaaa

SEQ ID NO: 1923062 - RNA, 19 nt, Homo sapiens
  misc_RNA (1)...(19): siRNA sense strand
gaaaaguuggagaagauga

SEQ ID NO: 1923063 - RNA, 19 nt, Homo sapiens
  misc_RNA (1)...(19): siRNA sense strand
gcgggacuuuccucacaca

SEQ ID NO: 1923064 - RNA, 19 nt, Homo sapiens
  misc_RNA (1)...(19): siRNA sense strand
cacaugccaagcuggauaa

SEQ ID NO: 1923065 - RNA, 19 nt, Homo sapiens
  misc_RNA (1)...(19): siRNA sense strand
gauuaaccugaaacaaaga

SEQ ID NO: 1923066 - RNA, 19 nt, Homo sapiens
  misc_RNA (1)...(19): siRNA sense strand
guggauggauguagaaaag

SEQ ID NO: 1923067 - RNA, 19 nt, Homo sapiens
  misc_RNA (1)...(19): siRNA sense strand
ucacacaagcgcucaacca

SEQ ID NO: 1923068 - RNA, 19 nt, Homo sapiens
  misc_RNA (1)...(19): siRNA sense strand
aaaucaugcuucagacaac

SEQ ID NO: 1923069 - RNA, 19 nt, Homo sapiens
  misc_RNA (1)...(19): siRNA sense strand
gaccauccauccagaagca

SEQ ID NO: 1923070 - RNA, 19 nt, Homo sapiens
  misc_RNA (1)...(19): siRNA sense strand
guugaaccucuaccuguua

SEQ ID NO: 1923071 - RNA, 19 nt, Homo sapiens
  misc_RNA (1)...(19): siRNA sense strand
gaagccaacuagccaacac

SEQ ID NO: 1923072 - RNA, 19 nt, Homo sapiens
  misc_RNA (1)...(19): siRNA sense strand
ggagucccuagaaggcuua

SEQ ID NO: 1923073 - RNA, 19 nt, Homo sapiens
  misc_RNA (1)...(19): siRNA sense strand
uguugaaccucuaccuguu

SEQ ID NO: 1923074 - RNA, 19 nt, Homo sapiens
  misc_RNA (1)...(19): siRNA sense strand
gugauggagucccuagaag

SEQ ID NO: 1923075 - RNA, 19 nt, Homo sapiens
  misc_RNA (1)...(19): siRNA sense strand
cuacucuccaucuucguua

SEQ ID NO: 1923076 - RNA, 19 nt, Homo sapiens
  misc_RNA (1)...(19): siRNA sense strand
ccuguuaggugugguacug

SEQ ID NO: 1923077 - RNA, 19 nt, Homo sapiens
  misc_RNA (1)...(19): siRNA sense strand
gucccuagaaggcuuacua

SEQ ID NO: 1923078 - RNA, 19 nt, Homo sapiens
  misc_RNA (1)...(19): siRNA sense strand
ugacccuacucuccaucuu

SEQ ID NO: 1923079 - RNA, 19 nt, Homo sapiens
  misc_RNA (1)...(19): siRNA sense strand
gacccuacucuccaucuuc

SEQ ID NO: 1923080 - RNA, 19 nt, Homo sapiens
  misc_RNA (1)...(19): siRNA sense strand
gaacgaccguguacagugu

SEQ ID NO: 1923081 - RNA, 19 nt, Homo sapiens
  misc_RNA (1)...(19): siRNA sense strand
ggcaggauguugucaauug

SEQ ID NO: 1923082 - RNA, 19 nt, Homo sapiens
  misc_RNA (1)...(19): siRNA sense strand
ccaaaacccuguugugaaa

SEQ ID NO: 1923083 - RNA, 19 nt, Homo sapiens
  misc_RNA (1)...(19): siRNA sense strand
gaacgcaccuuuugacaag

SEQ ID NO: 1923084 - RNA, 19 nt, Homo sapiens
  misc_RNA (1)...(19): siRNA sense strand
gggagcagaugauccaagu

SEQ ID NO: 1923085 - RNA, 19 nt, Homo sapiens
  misc_RNA (1)...(19): siRNA sense strand
ccucacgccuccuccgaua

SEQ ID NO: 1923086 - RNA, 19 nt, Homo sapiens
  misc_RNA (1)...(19): siRNA sense strand
gaggcaggauguugucaau

SEQ ID NO: 1923087 - RNA, 19 nt, Homo sapiens
  misc_RNA (1)...(19): siRNA sense strand
ggaagaggaggacgaggaa

SEQ ID NO: 1923088 - RNA, 19 nt, Homo sapiens
  misc_RNA (1)...(19): siRNA sense strand
gcaguuugaugaugaugag

SEQ ID NO: 1923089 - RNA, 19 nt, Homo sapiens
  misc_RNA (1)...(19): siRNA sense strand
ggagucugauggagaagau

SEQ ID NO: 1923090 - RNA, 19 nt, Homo sapiens
  misc_RNA (1)...(19): siRNA sense strand
cagaccagcucguguccuu

SEQ ID NO: 1923091 - RNA, 19 nt, Homo sapiens
  misc_RNA (1)...(19): siRNA sense strand
gaccucuucuuccauuaug

SEQ ID NO: 1923092 - RNA, 19 nt, Homo sapiens
  misc_RNA (1)...(19): siRNA sense strand
ggaggagaacgaccgugua

SEQ ID NO: 1923093 - RNA, 19 nt, Homo sapiens
  misc_RNA (1)...(19): siRNA sense strand
gcaggauguugucaauugg

SEQ ID NO: 1923094 - RNA, 19 nt, Homo sapiens
  misc_RNA (1)...(19): siRNA sense strand
gacaagacagccaacauca

SEQ ID NO: 1923095 - RNA, 19 nt, Homo sapiens
  misc_RNA (1)...(19): siRNA sense strand
uccauuaugucuucaacaa

SEQ ID NO: 1923096 - RNA, 19 nt, Homo sapiens
  misc_RNA (1)...(19): siRNA sense strand
ggaccucuucuuccauuau

SEQ ID NO: 1923097 - RNA, 19 nt, Homo sapiens
  misc_RNA (1)...(19): siRNA sense strand
ggagaacgaccguguacag

SEQ ID NO: 1923098 - RNA, 19 nt, Homo sapiens
  misc_RNA (1)...(19): siRNA sense strand
gcucuuaagcaacauguuc

SEQ ID NO: 1923099 - RNA, 19 nt, Homo sapiens
  misc_RNA (1)...(19): siRNA sense strand
ccaaccuacuugagauaug

SEQ ID NO: 1923100 - RNA, 19 nt, Homo sapiens
  misc_RNA (1)...(19): siRNA sense strand
cuucaaugaugaggaguuu

SEQ ID NO: 1923101 - RNA, 19 nt, Homo sapiens
  misc_RNA (1)...(19): siRNA sense strand
cauuaugucuucaacaacu

SEQ ID NO: 1923102 - RNA, 19 nt, Homo sapiens
  misc_RNA (1)...(19): siRNA sense strand
gcccugagcgccaaugaug

SEQ ID NO: 1923103 - RNA, 19 nt, Homo sapiens
  misc_RNA (1)...(19): siRNA sense strand
gagaagcaggagacgauug

SEQ ID NO: 1923104 - RNA, 19 nt, Homo sapiens
  misc_RNA (1)...(19): siRNA sense strand
uggcggagaccaacaagaa

SEQ ID NO: 1923105 - RNA, 19 nt, Homo sapiens
  misc_RNA (1)...(19): siRNA sense strand
ccacuucggcuucaaugau

SEQ ID NO: 1923106 - RNA, 19 nt, Homo sapiens
  misc_RNA (1)...(19): siRNA sense strand
cgucgaaggaugagaauca

SEQ ID NO: 1923107 - RNA, 19 nt, Homo sapiens
  misc_RNA (1)...(19): siRNA sense strand
acagaaggcagcaaaguca

SEQ ID NO: 1923108 - RNA, 19 nt, Homo sapiens
  misc_RNA (1)...(19): siRNA sense strand
caaccuacuugagauaugc

SEQ ID NO: 1923109 - RNA, 19 nt, Homo sapiens
  misc_RNA (1)...(19): siRNA sense strand
gagcaggaggagaguguga

SEQ ID NO: 1923110 - RNA, 19 nt, Homo sapiens
  misc_RNA (1)...(19): siRNA sense strand
gcggagaccaacaagaaga

SEQ ID NO: 1923111 - RNA, 19 nt, Homo sapiens
  misc_RNA (1)...(19): siRNA sense strand
gcccagagccugaccaacu

SEQ ID NO: 1923112 - RNA, 19 nt, Homo sapiens
  misc_RNA (1)...(19): siRNA sense strand
cgaaggaugagaaucaaca

SEQ ID NO: 1923113 - RNA, 19 nt, Homo sapiens
  misc_RNA (1)...(19): siRNA sense strand
ggaagacgaggagggcauu

SEQ ID NO: 1923114 - RNA, 19 nt, Homo sapiens
  misc_RNA (1)...(19): siRNA sense strand
cagcucguguccuuucuuc

SEQ ID NO: 1923115 - RNA, 19 nt, Homo sapiens
  misc_RNA (1)...(19): siRNA sense strand
ugacaagacagccaacauc

SEQ ID NO: 1923116 - RNA, 19 nt, Homo sapiens
  misc_RNA (1)...(19): siRNA sense strand
cuucuuccauuaugucuuc

SEQ ID NO: 1923117 - RNA, 19 nt, Homo sapiens
  misc_RNA (1)...(19): siRNA sense strand
uccagcaguuugaugauga

SEQ ID NO: 1923118 - RNA, 19 nt, Homo sapiens
  misc_RNA (1)...(19): siRNA sense strand
agaagcaggagacgauuga

SEQ ID NO: 1923119 - RNA, 19 nt, Homo sapiens
  misc_RNA (1)...(19): siRNA sense strand
ggacgaggaggaggaggaa

SEQ ID NO: 1923120 - RNA, 19 nt, Homo sapiens
  misc_RNA (1)...(19): siRNA sense strand
gaccagcucguguccuuuc

SEQ ID NO: 1923121 - RNA, 19 nt, Homo sapiens
  misc_RNA (1)...(19): siRNA sense strand
gaggagaacgaccguguac

SEQ ID NO: 1923122 - RNA, 19 nt, Homo sapiens
  misc_RNA (1)...(19): siRNA sense strand
gaacacccaccaccuacac

SEQ ID NO: 1923123 - RNA, 19 nt, Homo sapiens
  misc_RNA (1)...(19): siRNA sense strand
agacagugaggacgaagaa

SEQ ID NO: 1923124 - RNA, 19 nt, Homo sapiens
  misc_RNA (1)...(19): siRNA sense strand
guuugaugaugaugaggaa

SEQ ID NO: 1923125 - RNA, 19 nt, Homo sapiens
  misc_RNA (1)...(19): siRNA sense strand
cacuucggcuucaaugaug

SEQ ID NO: 1923126 - RNA, 19 nt, Homo sapiens
  misc_RNA (1)...(19): siRNA sense strand
ggagaagcaggagacgauu

SEQ ID NO: 1923127 - RNA, 19 nt, Homo sapiens
  misc_RNA (1)...(19): siRNA sense strand
acagugaggacgaagaaga

SEQ ID NO: 1923128 - RNA, 19 nt, Homo sapiens
  misc_RNA (1)...(19): siRNA sense strand
gaccgcauccagcaguuug

SEQ ID NO: 1923129 - RNA, 19 nt, Homo sapiens
  misc_RNA (1)...(19): siRNA sense strand
ugaccucugccuucauuga

SEQ ID NO: 1923130 - RNA, 19 nt, Homo sapiens
  misc_RNA (1)...(19): siRNA sense strand
gaaggaugagaaucaacau

SEQ ID NO: 1923131 - RNA, 19 nt, Homo sapiens
  misc_RNA (1)...(19): siRNA sense strand
ccacagaaggcagcaaagu

SEQ ID NO: 1923132 - RNA, 19 nt, Homo sapiens
  misc_RNA (1)...(19): siRNA sense strand
ggaccgcauccagcaguuu

SEQ ID NO: 1923133 - RNA, 19 nt, Homo sapiens
  misc_RNA (1)...(19): siRNA sense strand
ucaaugcugacgaugagaa

SEQ ID NO: 1923134 - RNA, 19 nt, Homo sapiens
  misc_RNA (1)...(19): siRNA sense strand
acaccaugcuggaccucuu

SEQ ID NO: 1923135 - RNA, 19 nt, Homo sapiens
  misc_RNA (1)...(19): siRNA sense strand
ucaaugaugaggaguuugg

SEQ ID NO: 1923136 - RNA, 19 nt, Homo sapiens
  misc_RNA (1)...(19): siRNA sense strand
gagaacgaccguguacagu

SEQ ID NO: 1923137 - RNA, 19 nt, Homo sapiens
  misc_RNA (1)...(19): siRNA sense strand
ccugagacgcccauccaaa

SEQ ID NO: 1923138 - RNA, 19 nt, Homo sapiens
  misc_RNA (1)...(19): siRNA sense strand
cccagagccugaccaacug

SEQ ID NO: 1923139 - RNA, 19 nt, Homo sapiens
  misc_RNA (1)...(19): siRNA sense strand
cauccucaggcucccaaua

SEQ ID NO: 1923140 - RNA, 19 nt, Homo sapiens
  misc_RNA (1)...(19): siRNA sense strand
cagcugaggcaggauguug

SEQ ID NO: 1923141 - RNA, 19 nt, Homo sapiens
  misc_RNA (1)...(19): siRNA sense strand
ccaacaagaagaacauggu

SEQ ID NO: 1923142 - RNA, 19 nt, Homo sapiens
  misc_RNA (1)...(19): siRNA sense strand
gucgaaggaugagaaucaa

SEQ ID NO: 1923143 - RNA, 19 nt, Homo sapiens
  misc_RNA (1)...(19): siRNA sense strand
ccgaguccgugaccgugaa

SEQ ID NO: 1923144 - RNA, 19 nt, Homo sapiens
  misc_RNA (1)...(19): siRNA sense strand
ccugacagcagcccugaga

SEQ ID NO: 1923145 - RNA, 19 nt, Homo sapiens
  misc_RNA (1)...(19): siRNA sense strand
aagaggaggacgaggaaga

SEQ ID NO: 1923146 - RNA, 19 nt, Homo sapiens
  misc_RNA (1)...(19): siRNA sense strand
cagccaacaucaccuucuc

SEQ ID NO: 1923147 - RNA, 19 nt, Homo sapiens
  misc_RNA (1)...(19): siRNA sense strand
gggagcaggaggagagugu

SEQ ID NO: 1923148 - RNA, 19 nt, Homo sapiens
  misc_RNA (1)...(19): siRNA sense strand
cgcaugaccucugccuuca

SEQ ID NO: 1923149 - RNA, 19 nt, Homo sapiens
  misc_RNA (1)...(19): siRNA sense strand
ccagcaguuugaugaugau

SEQ ID NO: 1923150 - RNA, 19 nt, Homo sapiens
  misc_RNA (1)...(19): siRNA sense strand
gcuggagccgcuacagaug

SEQ ID NO: 1923151 - RNA, 19 nt, Homo sapiens
  misc_RNA (1)...(19): siRNA sense strand
cacagacagugaggacgaa

SEQ ID NO: 1923152 - RNA, 19 nt, Homo sapiens
  misc_RNA (1)...(19): siRNA sense strand
uggagaagcaggagacgau

SEQ ID NO: 1923153 - RNA, 19 nt, Homo sapiens
  misc_RNA (1)...(19): siRNA sense strand
ggaagguacuauauaugua

SEQ ID NO: 1923154 - RNA, 19 nt, Homo sapiens
  misc_RNA (1)...(19): siRNA sense strand
gaacuggaagguacuauau

SEQ ID NO: 1923155 - RNA, 19 nt, Homo sapiens
  misc_RNA (1)...(19): siRNA sense strand
gccaugcccuguccuguuu

SEQ ID NO: 1923156 - RNA, 19 nt, Homo sapiens
  misc_RNA (1)...(19): siRNA sense strand
acuggaagguacuauauau

SEQ ID NO: 1923157 - RNA, 19 nt, Homo sapiens
  misc_RNA (1)...(19): siRNA sense strand
gcccuguccuguuuacuuc

SEQ ID NO: 1923158 - RNA, 19 nt, Homo sapiens
  misc_RNA (1)...(19): siRNA sense strand
uggaagguacuauauaugu

SEQ ID NO: 1923159 - RNA, 19 nt, Homo sapiens
  misc_RNA (1)...(19): siRNA sense strand
uguccaucuuugugauuua

SEQ ID NO: 1923160 - RNA, 19 nt, Homo sapiens
  misc_RNA (1)...(19): siRNA sense strand
gguacuauauauguaugug

SEQ ID NO: 1923161 - RNA, 19 nt, Homo sapiens
  misc_RNA (1)...(19): siRNA sense strand
guuuacuucuuaagagguu

SEQ ID NO: 1923162 - RNA, 19 nt, Homo sapiens
  misc_RNA (1)...(19): siRNA sense strand
agaacuggaagguacuaua

SEQ ID NO: 1923163 - RNA, 19 nt, Homo sapiens
  misc_RNA (1)...(19): siRNA sense strand
guccaucuuugugauuuau

SEQ ID NO: 1923164 - RNA, 19 nt, Homo sapiens
  misc_RNA (1)...(19): siRNA sense strand
ccuguuuacuucuuaagag

SEQ ID NO: 1923165 - RNA, 19 nt, Homo sapiens
  misc_RNA (1)...(19): siRNA sense strand
uaccgaauacaaauggaaa

SEQ ID NO: 1923166 - RNA, 19 nt, Homo sapiens
  misc_RNA (1)...(19): siRNA sense strand
gaagagguguuccgaauaa

SEQ ID NO: 1923167 - RNA, 19 nt, Homo sapiens
  misc_RNA (1)...(19): siRNA sense strand
cagcagagcuucuuucuag

SEQ ID NO: 1923168 - RNA, 19 nt, Homo sapiens
  misc_RNA (1)...(19): siRNA sense strand
gagaagagguguuccgaau

SEQ ID NO: 1923169 - RNA, 19 nt, Homo sapiens
  misc_RNA (1)...(19): siRNA sense strand
agacagauauggaggcuaa

SEQ ID NO: 1923170 - RNA, 19 nt, Homo sapiens
  misc_RNA (1)...(19): siRNA sense strand
ucaaggagaugaugcaguu

SEQ ID NO: 1923171 - RNA, 19 nt, Homo sapiens
  misc_RNA (1)...(19): siRNA sense strand
ggagaagcauccuuguuug

SEQ ID NO: 1923172 - RNA, 19 nt, Homo sapiens
  misc_RNA (1)...(19): siRNA sense strand
ccugaggccuucugguuua

SEQ ID NO: 1923173 - RNA, 19 nt, Homo sapiens
  misc_RNA (1)...(19): siRNA sense strand
gggcgucccuuuccgcuuu

SEQ ID NO: 1923174 - RNA, 19 nt, Homo sapiens
  misc_RNA (1)...(19): siRNA sense strand
gcaacaccaugucucaguu

SEQ ID NO: 1923175 - RNA, 19 nt, Homo sapiens
  misc_RNA (1)...(19): siRNA sense strand
cggagaagcauccuuguuu

SEQ ID NO: 1923176 - RNA, 19 nt, Homo sapiens
  misc_RNA (1)...(19): siRNA sense strand
gagaagcauccuuguuuga

SEQ ID NO: 1923177 - RNA, 19 nt, Homo sapiens
  misc_RNA (1)...(19): siRNA sense strand
caaagggcguggugagcuu

SEQ ID NO: 1923178 - RNA, 19 nt, Homo sapiens
  misc_RNA (1)...(19): siRNA sense strand
gaacuccguccacuaacaa

SEQ ID NO: 1923179 - RNA, 19 nt, Homo sapiens
  misc_RNA (1)...(19): siRNA sense strand
uagcggagacacuaaagua

SEQ ID NO: 1923180 - RNA, 19 nt, Homo sapiens
  misc_RNA (1)...(19): siRNA sense strand
gaacgugagcggagaagca

SEQ ID NO: 1923181 - RNA, 19 nt, Homo sapiens
  misc_RNA (1)...(19): siRNA sense strand
cuacgaggguaacauguuc

SEQ ID NO: 1923182 - RNA, 19 nt, Homo sapiens
  misc_RNA (1)...(19): siRNA sense strand
gagagagcuuccaccugaa

SEQ ID NO: 1923183 - RNA, 19 nt, Homo sapiens
  misc_RNA (1)...(19): siRNA sense strand
cgaacuccguccacuaaca

SEQ ID NO: 1923184 - RNA, 19 nt, Homo sapiens
  misc_RNA (1)...(19): siRNA sense strand
cagaggugguggagagcua

SEQ ID NO: 1923185 - RNA, 19 nt, Homo sapiens
  misc_RNA (1)...(19): siRNA sense strand
ggaagugguggcugaaauc

SEQ ID NO: 1923186 - RNA, 19 nt, Homo sapiens
  misc_RNA (1)...(19): siRNA sense strand
agaccuacuugcugaaugu

SEQ ID NO: 1923187 - RNA, 19 nt, Homo sapiens
  misc_RNA (1)...(19): siRNA sense strand
gagaccuacuugcugaaug

SEQ ID NO: 1923188 - RNA, 19 nt, Homo sapiens
  misc_RNA (1)...(19): siRNA sense strand
gagaugaugcaguuugcuu

SEQ ID NO: 1923189 - RNA, 19 nt, Homo sapiens
  misc_RNA (1)...(19): siRNA sense strand
guaucucuaucuucuguuc

SEQ ID NO: 1923190 - RNA, 19 nt, Homo sapiens
  misc_RNA (1)...(19): siRNA sense strand
acacuaaaguaucucuauc

SEQ ID NO: 1923191 - RNA, 19 nt, Homo sapiens
  misc_RNA (1)...(19): siRNA sense strand
ccacuccucucgccucaag

SEQ ID NO: 1923192 - RNA, 19 nt, Homo sapiens
  misc_RNA (1)...(19): siRNA sense strand
aaacgaacuccguccacua

SEQ ID NO: 1923193 - RNA, 19 nt, Homo sapiens
  misc_RNA (1)...(19): siRNA sense strand
gcagcagagcuucuuucua

SEQ ID NO: 1923194 - RNA, 19 nt, Homo sapiens
  misc_RNA (1)...(19): siRNA sense strand
agaagagguguuccgaaua

SEQ ID NO: 1923195 - RNA, 19 nt, Homo sapiens
  misc_RNA (1)...(19): siRNA sense strand
gacacuaaaguaucucuau

SEQ ID NO: 1923196 - RNA, 19 nt, Homo sapiens
  misc_RNA (1)...(19): siRNA sense strand
cggagacacuaaaguaucu

SEQ ID NO: 1923197 - RNA, 19 nt, Homo sapiens
  misc_RNA (1)...(19): siRNA sense strand
caagacguguacaguagca

SEQ ID NO: 1923198 - RNA, 19 nt, Homo sapiens
  misc_RNA (1)...(19): siRNA sense strand
uccaagacguguacaguag

SEQ ID NO: 1923199 - RNA, 19 nt, Homo sapiens
  misc_RNA (1)...(19): siRNA sense strand
aaccaggucuucgcugaaa

SEQ ID NO: 1923200 - RNA, 19 nt, Homo sapiens
  misc_RNA (1)...(19): siRNA sense strand
gcuacgaggguaacauguu

SEQ ID NO: 1923201 - RNA, 19 nt, Homo sapiens
  misc_RNA (1)...(19): siRNA sense strand
ucuaucuucuguucucuga

SEQ ID NO: 1923202 - RNA, 19 nt, Homo sapiens
  misc_RNA (1)...(19): siRNA sense strand
guggugagcuucaaaagug

SEQ ID NO: 1923203 - RNA, 19 nt, Homo sapiens
  misc_RNA (1)...(19): siRNA sense strand
ggacuccucucagccuucu

SEQ ID NO: 1923204 - RNA, 19 nt, Homo sapiens
  misc_RNA (1)...(19): siRNA sense strand
uggaagugguggcugaaau

SEQ ID NO: 1923205 - RNA, 19 nt, Homo sapiens
  misc_RNA (1)...(19): siRNA sense strand
gugcuggccuuggagaaau

SEQ ID NO: 1923206 - RNA, 19 nt, Homo sapiens
  misc_RNA (1)...(19): siRNA sense strand
gagcgagagcuacuacauc

SEQ ID NO: 1923207 - RNA, 19 nt, Homo sapiens
  misc_RNA (1)...(19): siRNA sense strand
acaccucacugaacucucu

SEQ ID NO: 1923208 - RNA, 19 nt, Homo sapiens
  misc_RNA (1)...(19): siRNA sense strand
gcacuuggaauucuuacac

SEQ ID NO: 1923209 - RNA, 19 nt, Homo sapiens
  misc_RNA (1)...(19): siRNA sense strand
ggaacgagggccgaugaga

SEQ ID NO: 1923210 - RNA, 19 nt, Homo sapiens
  misc_RNA (1)...(19): siRNA sense strand
uggaggcgauagagaccua

SEQ ID NO: 1923211 - RNA, 19 nt, Homo sapiens
  misc_RNA (1)...(19): siRNA sense strand
gcggagaagcauccuuguu

SEQ ID NO: 1923212 - RNA, 19 nt, Homo sapiens
  misc_RNA (1)...(19): siRNA sense strand
aaguaucucuaucuucugu

SEQ ID NO: 1923213 - RNA, 19 nt, Homo sapiens
  misc_RNA (1)...(19): siRNA sense strand
gcggagacacuaaaguauc

SEQ ID NO: 1923214 - RNA, 19 nt, Homo sapiens
  misc_RNA (1)...(19): siRNA sense strand
aacgaacuccguccacuaa

SEQ ID NO: 1923215 - RNA, 19 nt, Homo sapiens
  misc_RNA (1)...(19): siRNA sense strand
cgccgaggaugccaaggaa

SEQ ID NO: 1923216 - RNA, 19 nt, Homo sapiens
  misc_RNA (1)...(19): siRNA sense strand
ggcgauagagaccuacuug

SEQ ID NO: 1923217 - RNA, 19 nt, Homo sapiens
  misc_RNA (1)...(19): siRNA sense strand
ccaucaggcugggagagaa

SEQ ID NO: 1923218 - RNA, 19 nt, Homo sapiens
  misc_RNA (1)...(19): siRNA sense strand
gaggugaacauccgcuaca

SEQ ID NO: 1923219 - RNA, 19 nt, Homo sapiens
  misc_RNA (1)...(19): siRNA sense strand
gaucccugcacuuggaauu

SEQ ID NO: 1923220 - RNA, 19 nt, Homo sapiens
  misc_RNA (1)...(19): siRNA sense strand
gauccaagacguguacagu

SEQ ID NO: 1923221 - RNA, 19 nt, Homo sapiens
  misc_RNA (1)...(19): siRNA sense strand
gaggaugccaaggaagaaa

SEQ ID NO: 1923222 - RNA, 19 nt, Homo sapiens
  misc_RNA (1)...(19): siRNA sense strand
gggagaaaaucaaggagau

SEQ ID NO: 1923223 - RNA, 19 nt, Homo sapiens
  misc_RNA (1)...(19): siRNA sense strand
caaccaggucuucgcugaa

SEQ ID NO: 1923224 - RNA, 19 nt, Homo sapiens
  misc_RNA (1)...(19): siRNA sense strand
gcagcaucuuggcggaguu

SEQ ID NO: 1923225 - RNA, 19 nt, Homo sapiens
  misc_RNA (1)...(19): siRNA sense strand
gacaggagaagagguguuc

SEQ ID NO: 1923226 - RNA, 19 nt, Homo sapiens
  misc_RNA (1)...(19): siRNA sense strand
ggcagagcuauaagcguua

SEQ ID NO: 1923227 - RNA, 19 nt, Homo sapiens
  misc_RNA (1)...(19): siRNA sense strand
ccgaggaugccaaggaaga

SEQ ID NO: 1923228 - RNA, 19 nt, Homo sapiens
  misc_RNA (1)...(19): siRNA sense strand
ucaggaacauccgcaaggu

SEQ ID NO: 1923229 - RNA, 19 nt, Homo sapiens
  misc_RNA (1)...(19): siRNA sense strand
gagguguuccgaauaaagg

SEQ ID NO: 1923230 - RNA, 19 nt, Homo sapiens
  misc_RNA (1)...(19): siRNA sense strand
ggugcuggccuuggagaaa

SEQ ID NO: 1923231 - RNA, 19 nt, Homo sapiens
  misc_RNA (1)...(19): siRNA sense strand
gauucuggaccacaagaug

SEQ ID NO: 1923232 - RNA, 19 nt, Homo sapiens
  misc_RNA (1)...(19): siRNA sense strand
uuggaucccugcacuugga

SEQ ID NO: 1923233 - RNA, 19 nt, Homo sapiens
  misc_RNA (1)...(19): siRNA sense strand
cuaaaguaucucuaucuuc

SEQ ID NO: 1923234 - RNA, 19 nt, Homo sapiens
  misc_RNA (1)...(19): siRNA sense strand
gagaaaaucaaggagauga

SEQ ID NO: 1923235 - RNA, 19 nt, Homo sapiens
  misc_RNA (1)...(19): siRNA sense strand
cagcccagaucaccaagac

SEQ ID NO: 1923236 - RNA, 19 nt, Homo sapiens
  misc_RNA (1)...(19): siRNA sense strand
cauccuuguuugaggugaa

SEQ ID NO: 1923237 - RNA, 19 nt, Homo sapiens
  misc_RNA (1)...(19): siRNA sense strand
uugcuuggcagagcuauaa

SEQ ID NO: 1923238 - RNA, 19 nt, Homo sapiens
  misc_RNA (1)...(19): siRNA sense strand
cgauagagaccuacuugcu

SEQ ID NO: 1923239 - RNA, 19 nt, Homo sapiens
  misc_RNA (1)...(19): siRNA sense strand
ggaagacgccggagucauu

SEQ ID NO: 1923240 - RNA, 19 nt, Homo sapiens
  misc_RNA (1)...(19): siRNA sense strand
gaacuggcgucacguuuac

SEQ ID NO: 1923241 - RNA, 19 nt, Homo sapiens
  misc_RNA (1)...(19): siRNA sense strand
ggaccuugcugacgucuuc

SEQ ID NO: 1923242 - RNA, 19 nt, Homo sapiens
  misc_RNA (1)...(19): siRNA sense strand
gaacaucguccacaacuac

SEQ ID NO: 1923243 - RNA, 19 nt, Homo sapiens
  misc_RNA (1)...(19): siRNA sense strand
ugaagaacaucguccacaa

SEQ ID NO: 1923244 - RNA, 19 nt, Homo sapiens
  misc_RNA (1)...(19): siRNA sense strand
acacggagcccgacgaguu

SEQ ID NO: 1923245 - RNA, 19 nt, Homo sapiens
  misc_RNA (1)...(19): siRNA sense strand
ccagcucccucaugucaga

SEQ ID NO: 1923246 - RNA, 19 nt, Homo sapiens
  misc_RNA (1)...(19): siRNA sense strand
acuaaucccuuccuccuau

SEQ ID NO: 1923247 - RNA, 19 nt, Homo sapiens
  misc_RNA (1)...(19): siRNA sense strand
agaacuggcgucacguuua

SEQ ID NO: 1923248 - RNA, 19 nt, Homo sapiens
  misc_RNA (1)...(19): siRNA sense strand
gaacgugcgugagaaagcu

SEQ ID NO: 1923249 - RNA, 19 nt, Homo sapiens
  misc_RNA (1)...(19): siRNA sense strand
cgacgaguucucugacuuu

SEQ ID NO: 1923250 - RNA, 19 nt, Homo sapiens
  misc_RNA (1)...(19): siRNA sense strand
ccauccagcucccucaugu

SEQ ID NO: 1923251 - RNA, 19 nt, Homo sapiens
  misc_RNA (1)...(19): siRNA sense strand
cuaaucccuuccuccuaua

SEQ ID NO: 1923252 - RNA, 19 nt, Homo sapiens
  misc_RNA (1)...(19): siRNA sense strand
ucaaugaccauggcaagaa

SEQ ID NO: 1923253 - RNA, 19 nt, Homo sapiens
  misc_RNA (1)...(19): siRNA sense strand
ucuggaagcggcucaauga

SEQ ID NO: 1923254 - RNA, 19 nt, Homo sapiens
  misc_RNA (1)...(19): siRNA sense strand
gagaggccacgagcaauga

SEQ ID NO: 1923255 - RNA, 19 nt, Homo sapiens
  misc_RNA (1)...(19): siRNA sense strand
gacgaguucucugacuuug

SEQ ID NO: 1923256 - RNA, 19 nt, Homo sapiens
  misc_RNA (1)...(19): siRNA sense strand
cgaccucaccuacaacguu

SEQ ID NO: 1923257 - RNA, 19 nt, Homo sapiens
  misc_RNA (1)...(19): siRNA sense strand
cgaguucucugacuuugac

SEQ ID NO: 1923258 - RNA, 19 nt, Homo sapiens
  misc_RNA (1)...(19): siRNA sense strand
gcaaggaccagggcgugaa

SEQ ID NO: 1923259 - RNA, 19 nt, Homo sapiens
  misc_RNA (1)...(19): siRNA sense strand
uggaguaccucaucaagac

SEQ ID NO: 1923260 - RNA, 19 nt, Homo sapiens
  misc_RNA (1)...(19): siRNA sense strand
agaacaucguccacaacua

SEQ ID NO: 1923261 - RNA, 19 nt, Homo sapiens
  misc_RNA (1)...(19): siRNA sense strand
gaagaacaucguccacaac

SEQ ID NO: 1923262 - RNA, 19 nt, Homo sapiens
  misc_RNA (1)...(19): siRNA sense strand
caagaacuggcgucacguu

SEQ ID NO: 1923263 - RNA, 19 nt, Homo sapiens
  misc_RNA (1)...(19): siRNA sense strand
cagcaccaauggcacaaca

SEQ ID NO: 1923264 - RNA, 19 nt, Homo sapiens
  misc_RNA (1)...(19): siRNA sense strand
gaagacgccggagucauuc

SEQ ID NO: 1923265 - RNA, 19 nt, Homo sapiens
  misc_RNA (1)...(19): siRNA sense strand
ugcagacgcugaaggacuu

SEQ ID NO: 1923266 - RNA, 19 nt, Homo sapiens
  misc_RNA (1)...(19): siRNA sense strand
cgagaggccacgagcaaug

SEQ ID NO: 1923267 - RNA, 19 nt, Homo sapiens
  misc_RNA (1)...(19): siRNA sense strand
caaugaccauggcaagaac

SEQ ID NO: 1923268 - RNA, 19 nt, Homo sapiens
  misc_RNA (1)...(19): siRNA sense strand
uugccgaccucaccuacaa

SEQ ID NO: 1923269 - RNA, 19 nt, Homo sapiens
  misc_RNA (1)...(19): siRNA sense strand
ccgacgaguucucugacuu

SEQ ID NO: 1923270 - RNA, 19 nt, Homo sapiens
  misc_RNA (1)...(19): siRNA sense strand
gcgugaacgugcgugagaa

SEQ ID NO: 1923271 - RNA, 19 nt, Homo sapiens
  misc_RNA (1)...(19): siRNA sense strand
gccaagcccagcaccaaug

SEQ ID NO: 1923272 - RNA, 19 nt, Homo sapiens
  misc_RNA (1)...(19): siRNA sense strand
gaaccagcuccgucucagu

SEQ ID NO: 1923273 - RNA, 19 nt, Homo sapiens
  misc_RNA (1)...(19): siRNA sense strand
acucagaggcggagaucaa

SEQ ID NO: 1923274 - RNA, 19 nt, Homo sapiens
  misc_RNA (1)...(19): siRNA sense strand
gagcgccacccacguacau

SEQ ID NO: 1923275 - RNA, 19 nt, Homo sapiens
  misc_RNA (1)...(19): siRNA sense strand
gcgcucaagaccaaggaaa

SEQ ID NO: 1923276 - RNA, 19 nt, Homo sapiens
  misc_RNA (1)...(19): siRNA sense strand
cgcacgcgcucaagaccaa

SEQ ID NO: 1923277 - RNA, 19 nt, Homo sapiens
  misc_RNA (1)...(19): siRNA sense strand
acaaggccaugacgcugau

SEQ ID NO: 1923278 - RNA, 19 nt, Homo sapiens
  misc_RNA (1)...(19): siRNA sense strand
gcaaucgaggagagcaaga

SEQ ID NO: 1923279 - RNA, 19 nt, Homo sapiens
  misc_RNA (1)...(19): siRNA sense strand
cugcaggacccucaguuga

SEQ ID NO: 1923280 - RNA, 19 nt, Homo sapiens
  misc_RNA (1)...(19): siRNA sense strand
ggcgugaacgugcgugaga

SEQ ID NO: 1923281 - RNA, 19 nt, Homo sapiens
  misc_RNA (1)...(19): siRNA sense strand
ggcgccagaugaagaacau

SEQ ID NO: 1923282 - RNA, 19 nt, Homo sapiens
  misc_RNA (1)...(19): siRNA sense strand
gaagugaauuugcaaagua

SEQ ID NO: 1923283 - RNA, 19 nt, Homo sapiens
  misc_RNA (1)...(19): siRNA sense strand
gaacauaucucaggcauca

SEQ ID NO: 1923284 - RNA, 19 nt, Homo sapiens
  misc_RNA (1)...(19): siRNA sense strand
gaagagaacccauugguaa

SEQ ID NO: 1923285 - RNA, 19 nt, Homo sapiens
  misc_RNA (1)...(19): siRNA sense strand
ucaaacagcugucauagaa

SEQ ID NO: 1923286 - RNA, 19 nt, Homo sapiens
  misc_RNA (1)...(19): siRNA sense strand
ggaaagcaauccuuaguga

SEQ ID NO: 1923287 - RNA, 19 nt, Homo sapiens
  misc_RNA (1)...(19): siRNA sense strand
gaaaggacaucucauucaa

SEQ ID NO: 1923288 - RNA, 19 nt, Homo sapiens
  misc_RNA (1)...(19): siRNA sense strand
ggagaaaucuuaugaaugc

SEQ ID NO: 1923289 - RNA, 19 nt, Homo sapiens
  misc_RNA (1)...(19): siRNA sense strand
caugaaagcucucaauuau

SEQ ID NO: 1923290 - RNA, 19 nt, Homo sapiens
  misc_RNA (1)...(19): siRNA sense strand
gaagaaauuuguccggaaa

SEQ ID NO: 1923291 - RNA, 19 nt, Homo sapiens
  misc_RNA (1)...(19): siRNA sense strand
gaaaucaaaccucagaaua

SEQ ID NO: 1923292 - RNA, 19 nt, Homo sapiens
  misc_RNA (1)...(19): siRNA sense strand
ggacgugacuauagaauuc

SEQ ID NO: 1923293 - RNA, 19 nt, Homo sapiens
  misc_RNA (1)...(19): siRNA sense strand
ggagaaacauccucuaaag

SEQ ID NO: 1923294 - RNA, 19 nt, Homo sapiens
  misc_RNA (1)...(19): siRNA sense strand
agaaacaccugcaucuuaa

SEQ ID NO: 1923295 - RNA, 19 nt, Homo sapiens
  misc_RNA (1)...(19): siRNA sense strand
gaagucaaaccucagaaua

SEQ ID NO: 1923296 - RNA, 19 nt, Homo sapiens
  misc_RNA (1)...(19): siRNA sense strand
gaugaaacccuauaaaugu

SEQ ID NO: 1923297 - RNA, 19 nt, Homo sapiens
  misc_RNA (1)...(19): siRNA sense strand
gaacacagacuuggguuaa

SEQ ID NO: 1923298 - RNA, 19 nt, Homo sapiens
  misc_RNA (1)...(19): siRNA sense strand
gaaaauagguugcgguaau

SEQ ID NO: 1923299 - RNA, 19 nt, Homo sapiens
  misc_RNA (1)...(19): siRNA sense strand
gaagucaacuguggaggaa

SEQ ID NO: 1923300 - RNA, 19 nt, Homo sapiens
  misc_RNA (1)...(19): siRNA sense strand
agaagucacucaaugauga

SEQ ID NO: 1923301 - RNA, 19 nt, Homo sapiens
  misc_RNA (1)...(19): siRNA sense strand
gaaaggcacaccucacuga

SEQ ID NO: 1923302 - RNA, 19 nt, Homo sapiens
  misc_RNA (1)...(19): siRNA sense strand
ggaaauccuuugagaaguc

SEQ ID NO: 1923303 - RNA, 19 nt, Homo sapiens
  misc_RNA (1)...(19): siRNA sense strand
ccucagagaucaucacaga

SEQ ID NO: 1923304 - RNA, 19 nt, Homo sapiens
  misc_RNA (1)...(19): siRNA sense strand
aaacagcugucauagaaga

SEQ ID NO: 1923305 - RNA, 19 nt, Homo sapiens
  misc_RNA (1)...(19): siRNA sense strand
gagaacccauugguaagua

SEQ ID NO: 1923306 - RNA, 19 nt, Homo sapiens
  misc_RNA (1)...(19): siRNA sense strand
ggagagaaaccauuugaau

SEQ ID NO: 1923307 - RNA, 19 nt, Homo sapiens
  misc_RNA (1)...(19): siRNA sense strand
ggagagaaaccauucaaau

SEQ ID NO: 1923308 - RNA, 19 nt, Homo sapiens
  misc_RNA (1)...(19): siRNA sense strand
gguuaaauccucugaauau

SEQ ID NO: 1923309 - RNA, 19 nt, Homo sapiens
  misc_RNA (1)...(19): siRNA sense strand
uguaagaagucuacccuaa

SEQ ID NO: 1923310 - RNA, 19 nt, Homo sapiens
  misc_RNA (1)...(19): siRNA sense strand
ucaaggacgugacuauaga

SEQ ID NO: 1923311 - RNA, 19 nt, Homo sapiens
  misc_RNA (1)...(19): siRNA sense strand
gaagucuacccuaagcuua

SEQ ID NO: 1923312 - RNA, 19 nt, Homo sapiens
  misc_RNA (1)...(19): siRNA sense strand
ggagaaaacuuaccagugu

SEQ ID NO: 1923313 - RNA, 19 nt, Homo sapiens
  misc_RNA (1)...(19): siRNA sense strand
gguaauguaugugagaauu

SEQ ID NO: 1923314 - RNA, 19 nt, Homo sapiens
  misc_RNA (1)...(19): siRNA sense strand
cagaagccaucacagauug

SEQ ID NO: 1923315 - RNA, 19 nt, Homo sapiens
  misc_RNA (1)...(19): siRNA sense strand
gagaugugaugcuggagaa

SEQ ID NO: 1923316 - RNA, 19 nt, Homo sapiens
  misc_RNA (1)...(19): siRNA sense strand
caacuguggaggaauauaa

SEQ ID NO: 1923317 - RNA, 19 nt, Homo sapiens
  misc_RNA (1)...(19): siRNA sense strand
ggagcaagcuuuugaaugu

SEQ ID NO: 1923318 - RNA, 19 nt, Homo sapiens
  misc_RNA (1)...(19): siRNA sense strand
ggaagugaauuugcaaagu

SEQ ID NO: 1923319 - RNA, 19 nt, Homo sapiens
  misc_RNA (1)...(19): siRNA sense strand
ggacaucucauucaacauc

SEQ ID NO: 1923320 - RNA, 19 nt, Homo sapiens
  misc_RNA (1)...(19): siRNA sense strand
cagagugcaucaaagaauu

SEQ ID NO: 1923321 - RNA, 19 nt, Homo sapiens
  misc_RNA (1)...(19): siRNA sense strand
gaagaagucacucaaugau

SEQ ID NO: 1923322 - RNA, 19 nt, Homo sapiens
  misc_RNA (1)...(19): siRNA sense strand
ccgaagaagucacucaaug

SEQ ID NO: 1923323 - RNA, 19 nt, Homo sapiens
  misc_RNA (1)...(19): siRNA sense strand
acaugaaagcucucaauua

SEQ ID NO: 1923324 - RNA, 19 nt, Homo sapiens
  misc_RNA (1)...(19): siRNA sense strand
gcauguagcugcuguugcu

SEQ ID NO: 1923325 - RNA, 19 nt, Homo sapiens
  misc_RNA (1)...(19): siRNA sense strand
gagaauucauacagcagaa

SEQ ID NO: 1923326 - RNA, 19 nt, Homo sapiens
  misc_RNA (1)...(19): siRNA sense strand
cgaagaagucacucaauga

SEQ ID NO: 1923327 - RNA, 19 nt, Homo sapiens
  misc_RNA (1)...(19): siRNA sense strand
gagaaacauccucuaaaga

SEQ ID NO: 1923328 - RNA, 19 nt, Homo sapiens
  misc_RNA (1)...(19): siRNA sense strand
aaacauaacaguucucaca

SEQ ID NO: 1923329 - RNA, 19 nt, Homo sapiens
  misc_RNA (1)...(19): siRNA sense strand
agucaacuguggaggaaua

SEQ ID NO: 1923330 - RNA, 19 nt, Homo sapiens
  misc_RNA (1)...(19): siRNA sense strand
cagaggugaucuucaaguu

SEQ ID NO: 1923331 - RNA, 19 nt, Homo sapiens
  misc_RNA (1)...(19): siRNA sense strand
ucagaaaggacaucucauu

SEQ ID NO: 1923332 - RNA, 19 nt, Homo sapiens
  misc_RNA (1)...(19): siRNA sense strand
ggaagaaacaccugcaucu

SEQ ID NO: 1923333 - RNA, 19 nt, Homo sapiens
  misc_RNA (1)...(19): siRNA sense strand
gagcaagcaauauguauca

SEQ ID NO: 1923334 - RNA, 19 nt, Homo sapiens
  misc_RNA (1)...(19): siRNA sense strand
gaaauccuuugagaaguca

SEQ ID NO: 1923335 - RNA, 19 nt, Homo sapiens
  misc_RNA (1)...(19): siRNA sense strand
gcaaugaauaugggaaauu

SEQ ID NO: 1923336 - RNA, 19 nt, Homo sapiens
  misc_RNA (1)...(19): siRNA sense strand
uaaugaaugugggaagaaa

SEQ ID NO: 1923337 - RNA, 19 nt, Homo sapiens
  misc_RNA (1)...(19): siRNA sense strand
gaucaucucauucaacauc

SEQ ID NO: 1923338 - RNA, 19 nt, Homo sapiens
  misc_RNA (1)...(19): siRNA sense strand
gaucaucacagaauucaca

SEQ ID NO: 1923339 - RNA, 19 nt, Homo sapiens
  misc_RNA (1)...(19): siRNA sense strand
ggacaucaaagaauucaca

SEQ ID NO: 1923340 - RNA, 19 nt, Homo sapiens
  misc_RNA (1)...(19): siRNA sense strand
ugauaaggcuaacuguguu

SEQ ID NO: 1923341 - RNA, 19 nt, Homo sapiens
  misc_RNA (1)...(19): siRNA sense strand
gggaaauuauguaagaagu

SEQ ID NO: 1923342 - RNA, 19 nt, Homo sapiens
  misc_RNA (1)...(19): siRNA sense strand
aaucaaaccucagaauaca

SEQ ID NO: 1923343 - RNA, 19 nt, Homo sapiens
  misc_RNA (1)...(19): siRNA sense strand
ugaugaaacccuauaaaug

SEQ ID NO: 1923344 - RNA, 19 nt, Homo sapiens
  misc_RNA (1)...(19): siRNA sense strand
agaaacauccucuaaagau

SEQ ID NO: 1923345 - RNA, 19 nt, Homo sapiens
  misc_RNA (1)...(19): siRNA sense strand
aaucaaagacaaacacuug

SEQ ID NO: 1923346 - RNA, 19 nt, Homo sapiens
  misc_RNA (1)...(19): siRNA sense strand
ggacaucaacccucagagu

SEQ ID NO: 1923347 - RNA, 19 nt, Homo sapiens
  misc_RNA (1)...(19): siRNA sense strand
gguaaguaaugacagaaca

SEQ ID NO: 1923348 - RNA, 19 nt, Homo sapiens
  misc_RNA (1)...(19): siRNA sense strand
aaccagaggugaucuucaa

SEQ ID NO: 1923349 - RNA, 19 nt, Homo sapiens
  misc_RNA (1)...(19): siRNA sense strand
cagagaucaucacagaauu

SEQ ID NO: 1923350 - RNA, 19 nt, Homo sapiens
  misc_RNA (1)...(19): siRNA sense strand
aaacauuuguccagaaguc

SEQ ID NO: 1923351 - RNA, 19 nt, Homo sapiens
  misc_RNA (1)...(19): siRNA sense strand
ccucaguacucaucagaga

SEQ ID NO: 1923352 - RNA, 19 nt, Homo sapiens
  misc_RNA (1)...(19): siRNA sense strand
acacagacuuggguuaaau

SEQ ID NO: 1923353 - RNA, 19 nt, Homo sapiens
  misc_RNA (1)...(19): siRNA sense strand
gaucaagcagaacaagaaa

SEQ ID NO: 1923354 - RNA, 19 nt, Homo sapiens
  misc_RNA (1)...(19): siRNA sense strand
ccagaagccaucacagauu

SEQ ID NO: 1923355 - RNA, 19 nt, Homo sapiens
  misc_RNA (1)...(19): siRNA sense strand
ucccaagcauccaaaguuu

SEQ ID NO: 1923356 - RNA, 19 nt, Homo sapiens
  misc_RNA (1)...(19): siRNA sense strand
ucagagaucaucacagaau

SEQ ID NO: 1923357 - RNA, 19 nt, Homo sapiens
  misc_RNA (1)...(19): siRNA sense strand
uaagaagucuacccuaagc

SEQ ID NO: 1923358 - RNA, 19 nt, Homo sapiens
  misc_RNA (1)...(19): siRNA sense strand
gaaugugggaagaaauuug

SEQ ID NO: 1923359 - RNA, 19 nt, Homo sapiens
  misc_RNA (1)...(19): siRNA sense strand
ggagagaaauuuuaugaac

SEQ ID NO: 1923360 - RNA, 19 nt, Homo sapiens
  misc_RNA (1)...(19): siRNA sense strand
ccagaaaucaaaccucaga

SEQ ID NO: 1923361 - RNA, 19 nt, Homo sapiens
  misc_RNA (1)...(19): siRNA sense strand
gaauacaucagagaacuca

SEQ ID NO: 1923362 - RNA, 19 nt, Homo sapiens
  misc_RNA (1)...(19): siRNA sense strand
aaggacaucucauucaaca

SEQ ID NO: 1923363 - RNA, 19 nt, Homo sapiens
  misc_RNA (1)...(19): siRNA sense strand
gaauguagugaauguggaa

SEQ ID NO: 1923364 - RNA, 19 nt, Homo sapiens
  misc_RNA (1)...(19): siRNA sense strand
gggagaaaucuuaugaaug

SEQ ID NO: 1923365 - RNA, 19 nt, Homo sapiens
  misc_RNA (1)...(19): siRNA sense strand
caggaggaguggcagcaaa

SEQ ID NO: 1923366 - RNA, 19 nt, Homo sapiens
  misc_RNA (1)...(19): siRNA sense strand
gaacuggcacagggaagaa

SEQ ID NO: 1923367 - RNA, 19 nt, Homo sapiens
  misc_RNA (1)...(19): siRNA sense strand
gaaagcaauccuuagugau

SEQ ID NO: 1923368 - RNA, 19 nt, Homo sapiens
  misc_RNA (1)...(19): siRNA sense strand
gagaaaacuuaccagugua

SEQ ID NO: 1923369 - RNA, 19 nt, Homo sapiens
  misc_RNA (1)...(19): siRNA sense strand
gaaguccacccucagagau

SEQ ID NO: 1923370 - RNA, 19 nt, Homo sapiens
  misc_RNA (1)...(19): siRNA sense strand
ucaaugaugaaacccuaua

SEQ ID NO: 1923371 - RNA, 19 nt, Homo sapiens
  misc_RNA (1)...(19): siRNA sense strand
ggguuaaauccucugaaua

SEQ ID NO: 1923372 - RNA, 19 nt, Homo sapiens
  misc_RNA (1)...(19): siRNA sense strand
gcaagcaauauguaucaau

SEQ ID NO: 1923373 - RNA, 19 nt, Homo sapiens
  misc_RNA (1)...(19): siRNA sense strand
gaucaucagagaauucaca

SEQ ID NO: 1923374 - RNA, 19 nt, Homo sapiens
  misc_RNA (1)...(19): siRNA sense strand
cuaugaauguagugaaugu

SEQ ID NO: 1923375 - RNA, 19 nt, Homo sapiens
  misc_RNA (1)...(19): siRNA sense strand
caacaucagagaacucaca

SEQ ID NO: 1923376 - RNA, 19 nt, Homo sapiens
  misc_RNA (1)...(19): siRNA sense strand
gaagucacucaaugaugaa

SEQ ID NO: 1923377 - RNA, 19 nt, Homo sapiens
  misc_RNA (1)...(19): siRNA sense strand
agacgucgguucacagagu

SEQ ID NO: 1923378 - RNA, 19 nt, Homo sapiens
  misc_RNA (1)...(19): siRNA sense strand
gggaaauccuuugagaagu

SEQ ID NO: 1923379 - RNA, 19 nt, Homo sapiens
  misc_RNA (1)...(19): siRNA sense strand
ccaagcauccaaaguuuca

SEQ ID NO: 1923380 - RNA, 19 nt, Homo sapiens
  misc_RNA (1)...(19): siRNA sense strand
gaaaccauuuacucugcau

SEQ ID NO: 1923381 - RNA, 19 nt, Homo sapiens
  misc_RNA (1)...(19): siRNA sense strand
agaaaggacaucucauuca

SEQ ID NO: 1923382 - RNA, 19 nt, Homo sapiens
  misc_RNA (1)...(19): siRNA sense strand
gaagaaaccuaagaaggaa

SEQ ID NO: 1923383 - RNA, 19 nt, Homo sapiens
  misc_RNA (1)...(19): siRNA sense strand
guaauaaacugacuacucu

SEQ ID NO: 1923384 - RNA, 19 nt, Homo sapiens
  misc_RNA (1)...(19): siRNA sense strand
gguuggaccugaaggauaa

SEQ ID NO: 1923385 - RNA, 19 nt, Homo sapiens
  misc_RNA (1)...(19): siRNA sense strand
ggaucugucuuguaauaaa

SEQ ID NO: 1923386 - RNA, 19 nt, Homo sapiens
  misc_RNA (1)...(19): siRNA sense strand
ggaguaugaugcccucaaa

SEQ ID NO: 1923387 - RNA, 19 nt, Homo sapiens
  misc_RNA (1)...(19): siRNA sense strand
ugaaugaggucccggugaa

SEQ ID NO: 1923388 - RNA, 19 nt, Homo sapiens
  misc_RNA (1)...(19): siRNA sense strand
cuggaucugucuuguaaua

SEQ ID NO: 1923389 - RNA, 19 nt, Homo sapiens
  misc_RNA (1)...(19): siRNA sense strand
acaacaagcuggucaccuu

SEQ ID NO: 1923390 - RNA, 19 nt, Homo sapiens
  misc_RNA (1)...(19): siRNA sense strand
agaagaagcgugaggcuaa

SEQ ID NO: 1923391 - RNA, 19 nt, Homo sapiens
  misc_RNA (1)...(19): siRNA sense strand
agaagaaaccuaagaagga

SEQ ID NO: 1923392 - RNA, 19 nt, Homo sapiens
  misc_RNA (1)...(19): siRNA sense strand
caccuugccugucagcuuu

SEQ ID NO: 1923393 - RNA, 19 nt, Homo sapiens
  misc_RNA (1)...(19): siRNA sense strand
gaacaccaucuaugacaau

SEQ ID NO: 1923394 - RNA, 19 nt, Homo sapiens
  misc_RNA (1)...(19): siRNA sense strand
gaccgacucucagcaguga

SEQ ID NO: 1923395 - RNA, 19 nt, Homo sapiens
  misc_RNA (1)...(19): siRNA sense strand
gggagaaggcggaagagaa

SEQ ID NO: 1923396 - RNA, 19 nt, Homo sapiens
  misc_RNA (1)...(19): siRNA sense strand
ggagaaggcggaagagaag

SEQ ID NO: 1923397 - RNA, 19 nt, Homo sapiens
  misc_RNA (1)...(19): siRNA sense strand
gcaccuggaucuccucaac

SEQ ID NO: 1923398 - RNA, 19 nt, Homo sapiens
  misc_RNA (1)...(19): siRNA sense strand
gaagaagcgugaggcuaag

SEQ ID NO: 1923399 - RNA, 19 nt, Homo sapiens
  misc_RNA (1)...(19): siRNA sense strand
ugaagugguuggaccugaa

SEQ ID NO: 1923400 - RNA, 19 nt, Homo sapiens
  misc_RNA (1)...(19): siRNA sense strand
uccuggaucugucuuguaa

SEQ ID NO: 1923401 - RNA, 19 nt, Homo sapiens
  misc_RNA (1)...(19): siRNA sense strand
gcgugaacaccaucuauga

SEQ ID NO: 1923402 - RNA, 19 nt, Homo sapiens
  misc_RNA (1)...(19): siRNA sense strand
uggaugagaagcaguguaa

SEQ ID NO: 1923403 - RNA, 19 nt, Homo sapiens
  misc_RNA (1)...(19): siRNA sense strand
ugaacaccaucuaugacaa

SEQ ID NO: 1923404 - RNA, 19 nt, Homo sapiens
  misc_RNA (1)...(19): siRNA sense strand
gaucugucuuguaauaaac

SEQ ID NO: 1923405 - RNA, 19 nt, Homo sapiens
  misc_RNA (1)...(19): siRNA sense strand
gcaccagcgugaacaccau

SEQ ID NO: 1923406 - RNA, 19 nt, Homo sapiens
  misc_RNA (1)...(19): siRNA sense strand
cuaagaaggaagcaaauca

SEQ ID NO: 1923407 - RNA, 19 nt, Homo sapiens
  misc_RNA (1)...(19): siRNA sense strand
guaagcagugugcaaacaa

SEQ ID NO: 1923408 - RNA, 19 nt, Homo sapiens
  misc_RNA (1)...(19): siRNA sense strand
ggagaagaaaccuaagaag

SEQ ID NO: 1923409 - RNA, 19 nt, Homo sapiens
  misc_RNA (1)...(19): siRNA sense strand
gaacgugaggcagagaaga

SEQ ID NO: 1923410 - RNA, 19 nt, Homo sapiens
  misc_RNA (1)...(19): siRNA sense strand
aagcuagaccugaguaaga

SEQ ID NO: 1923411 - RNA, 19 nt, Homo sapiens
  misc_RNA (1)...(19): siRNA sense strand
gagcaggagaagaaaccua

SEQ ID NO: 1923412 - RNA, 19 nt, Homo sapiens
  misc_RNA (1)...(19): siRNA sense strand
ggugacugcuuggaugaga

SEQ ID NO: 1923413 - RNA, 19 nt, Homo sapiens
  misc_RNA (1)...(19): siRNA sense strand
gaagcaguguaagcagugu

SEQ ID NO: 1923414 - RNA, 19 nt, Homo sapiens
  misc_RNA (1)...(19): siRNA sense strand
uaagcagugugcaaacaag

SEQ ID NO: 1923415 - RNA, 19 nt, Homo sapiens
  misc_RNA (1)...(19): siRNA sense strand
caagcuggacggcaacgaa

SEQ ID NO: 1923416 - RNA, 19 nt, Homo sapiens
  misc_RNA (1)...(19): siRNA sense strand
gaagcuagaccugaguaag

SEQ ID NO: 1923417 - RNA, 19 nt, Homo sapiens
  misc_RNA (1)...(19): siRNA sense strand
cuacucuaccgucggauuu

SEQ ID NO: 1923418 - RNA, 19 nt, Homo sapiens
  misc_RNA (1)...(19): siRNA sense strand
gugaacaccaucuaugaca

SEQ ID NO: 1923419 - RNA, 19 nt, Homo sapiens
  misc_RNA (1)...(19): siRNA sense strand
caggagaagaaaccuaaga

SEQ ID NO: 1923420 - RNA, 19 nt, Homo sapiens
  misc_RNA (1)...(19): siRNA sense strand
uguaagcagugugcaaaca

SEQ ID NO: 1923421 - RNA, 19 nt, Homo sapiens
  misc_RNA (1)...(19): siRNA sense strand
cuaagcagcgagcuaagga

SEQ ID NO: 1923422 - RNA, 19 nt, Homo sapiens
  misc_RNA (1)...(19): siRNA sense strand
gcuuugcucagcucaagaa

SEQ ID NO: 1923423 - RNA, 19 nt, Homo sapiens
  misc_RNA (1)...(19): siRNA sense strand
uguaauaaacugacuacuc

SEQ ID NO: 1923424 - RNA, 19 nt, Homo sapiens
  misc_RNA (1)...(19): siRNA sense strand
gaugagaagcaguguaagc

SEQ ID NO: 1923425 - RNA, 19 nt, Homo sapiens
  misc_RNA (1)...(19): siRNA sense strand
gugacugcuuggaugagaa

SEQ ID NO: 1923426 - RNA, 19 nt, Homo sapiens
  misc_RNA (1)...(19): siRNA sense strand
gugaagcuagaccugagua

SEQ ID NO: 1923427 - RNA, 19 nt, Homo sapiens
  misc_RNA (1)...(19): siRNA sense strand
uggaucuccucaacaacaa

SEQ ID NO: 1923428 - RNA, 19 nt, Homo sapiens
  misc_RNA (1)...(19): siRNA sense strand
guaugaugcccucaaagca

SEQ ID NO: 1923429 - RNA, 19 nt, Homo sapiens
  misc_RNA (1)...(19): siRNA sense strand
cuggucaccuugccuguca

SEQ ID NO: 1923430 - RNA, 19 nt, Homo sapiens
  misc_RNA (1)...(19): siRNA sense strand
gaagugguuggaccugaag

SEQ ID NO: 1923431 - RNA, 19 nt, Homo sapiens
  misc_RNA (1)...(19): siRNA sense strand
agcuagaccugaguaagaa

SEQ ID NO: 1923432 - RNA, 19 nt, Homo sapiens
  misc_RNA (1)...(19): siRNA sense strand
gaggcuaagcagcgagcua

SEQ ID NO: 1923433 - RNA, 19 nt, Homo sapiens
  misc_RNA (1)...(19): siRNA sense strand
aaccuaagaaggaagcaaa

SEQ ID NO: 1923434 - RNA, 19 nt, Homo sapiens
  misc_RNA (1)...(19): siRNA sense strand
uaagaaggaagcaaaucag

SEQ ID NO: 1923435 - RNA, 19 nt, Homo sapiens
  misc_RNA (1)...(19): siRNA sense strand
cagcgugaacaccaucuau

SEQ ID NO: 1923436 - RNA, 19 nt, Homo sapiens
  misc_RNA (1)...(19): siRNA sense strand
gaccaaagaugagaaagua

SEQ ID NO: 1923437 - RNA, 19 nt, Homo sapiens
  misc_RNA (1)...(19): siRNA sense strand
gaaacgccuucucauacua

SEQ ID NO: 1923438 - RNA, 19 nt, Homo sapiens
  misc_RNA (1)...(19): siRNA sense strand
ggacaucccuguggaguuc

SEQ ID NO: 1923439 - RNA, 19 nt, Homo sapiens
  misc_RNA (1)...(19): siRNA sense strand
gagcaacaguggcaucaga

SEQ ID NO: 1923440 - RNA, 19 nt, Homo sapiens
  misc_RNA (1)...(19): siRNA sense strand
gaucaaguauuccuacgau

SEQ ID NO: 1923441 - RNA, 19 nt, Homo sapiens
  misc_RNA (1)...(19): siRNA sense strand
cagcaucccuguagaaaca

SEQ ID NO: 1923442 - RNA, 19 nt, Homo sapiens
  misc_RNA (1)...(19): siRNA sense strand
uggccaagcucuacaugua

SEQ ID NO: 1923443 - RNA, 19 nt, Homo sapiens
  misc_RNA (1)...(19): siRNA sense strand
ggaaacgccuucucauacu

SEQ ID NO: 1923444 - RNA, 19 nt, Homo sapiens
  misc_RNA (1)...(19): siRNA sense strand
ugaaggagcccaucgaaga

SEQ ID NO: 1923445 - RNA, 19 nt, Homo sapiens
  misc_RNA (1)...(19): siRNA sense strand
cgaacaaccuggagaccuu

SEQ ID NO: 1923446 - RNA, 19 nt, Homo sapiens
  misc_RNA (1)...(19): siRNA sense strand
gagaguacgcccauuguga

SEQ ID NO: 1923447 - RNA, 19 nt, Homo sapiens
  misc_RNA (1)...(19): siRNA sense strand
gagcagcugagaagaaauu

SEQ ID NO: 1923448 - RNA, 19 nt, Homo sapiens
  misc_RNA (1)...(19): siRNA sense strand
ccaaagaugagaaaguauu

SEQ ID NO: 1923449 - RNA, 19 nt, Homo sapiens
  misc_RNA (1)...(19): siRNA sense strand
caacagcaccgucuacauc

SEQ ID NO: 1923450 - RNA, 19 nt, Homo sapiens
  misc_RNA (1)...(19): siRNA sense strand
uccagaagaucaaguauuc

SEQ ID NO: 1923451 - RNA, 19 nt, Homo sapiens
  misc_RNA (1)...(19): siRNA sense strand
ggaggcccauugccaguga

SEQ ID NO: 1923452 - RNA, 19 nt, Homo sapiens
  misc_RNA (1)...(19): siRNA sense strand
gugcuugccucguaugaga

SEQ ID NO: 1923453 - RNA, 19 nt, Homo sapiens
  misc_RNA (1)...(19): siRNA sense strand
gaggugugcugcuuugaca

SEQ ID NO: 1923454 - RNA, 19 nt, Homo sapiens
  misc_RNA (1)...(19): siRNA sense strand
gggaaacgccuucucauac

SEQ ID NO: 1923455 - RNA, 19 nt, Homo sapiens
  misc_RNA (1)...(19): siRNA sense strand
ccgagcagcugagaagaaa

SEQ ID NO: 1923456 - RNA, 19 nt, Homo sapiens
  misc_RNA (1)...(19): siRNA sense strand
ugaccacgcuacagauguu

SEQ ID NO: 1923457 - RNA, 19 nt, Homo sapiens
  misc_RNA (1)...(19): siRNA sense strand
gcagaaggaguuugucauc

SEQ ID NO: 1923458 - RNA, 19 nt, Homo sapiens
  misc_RNA (1)...(19): siRNA sense strand
ccaccuucgccaucaauua

SEQ ID NO: 1923459 - RNA, 19 nt, Homo sapiens
  misc_RNA (1)...(19): siRNA sense strand
ggacgcugaccaaagauga

SEQ ID NO: 1923460 - RNA, 19 nt, Homo sapiens
  misc_RNA (1)...(19): siRNA sense strand
gcgaguggcgcuccauuga

SEQ ID NO: 1923461 - RNA, 19 nt, Homo sapiens
  misc_RNA (1)...(19): siRNA sense strand
ccagugcccugaagcgaau

SEQ ID NO: 1923462 - RNA, 19 nt, Homo sapiens
  misc_RNA (1)...(19): siRNA sense strand
caaguucgucggcuucauu

SEQ ID NO: 1923463 - RNA, 19 nt, Homo sapiens
  misc_RNA (1)...(19): siRNA sense strand
ucuggugccuggaugagua

SEQ ID NO: 1923464 - RNA, 19 nt, Homo sapiens
  misc_RNA (1)...(19): siRNA sense strand
ugaaggagcugggcuacgu

SEQ ID NO: 1923465 - RNA, 19 nt, Homo sapiens
  misc_RNA (1)...(19): siRNA sense strand
cagaaggaguuugucauca

SEQ ID NO: 1923466 - RNA, 19 nt, Homo sapiens
  misc_RNA (1)...(19): siRNA sense strand
ggaccggauucaacacauc

SEQ ID NO: 1923467 - RNA, 19 nt, Homo sapiens
  misc_RNA (1)...(19): siRNA sense strand
acuggacgcugaccaaaga

SEQ ID NO: 1923468 - RNA, 19 nt, Homo sapiens
  misc_RNA (1)...(19): siRNA sense strand
ggacgagaguacgcccauu

SEQ ID NO: 1923469 - RNA, 19 nt, Homo sapiens
  misc_RNA (1)...(19): siRNA sense strand
acgaugcccuggagaagaa

SEQ ID NO: 1923470 - RNA, 19 nt, Homo sapiens
  misc_RNA (1)...(19): siRNA sense strand
cgacuucaacagccaguuu

SEQ ID NO: 1923471 - RNA, 19 nt, Homo sapiens
  misc_RNA (1)...(19): siRNA sense strand
gaggugcuguccuucgaau

SEQ ID NO: 1923472 - RNA, 19 nt, Homo sapiens
  misc_RNA (1)...(19): siRNA sense strand
caccagcgcuuucauuuug

SEQ ID NO: 1923473 - RNA, 19 nt, Homo sapiens
  misc_RNA (1)...(19): siRNA sense strand
cuggagaccuucaucuuca

SEQ ID NO: 1923474 - RNA, 19 nt, Homo sapiens
  misc_RNA (1)...(19): siRNA sense strand
ugggaaacgccuucucaua

SEQ ID NO: 1923475 - RNA, 19 nt, Homo sapiens
  misc_RNA (1)...(19): siRNA sense strand
caaagaugagaaaguauuc

SEQ ID NO: 1923476 - RNA, 19 nt, Homo sapiens
  misc_RNA (1)...(19): siRNA sense strand
gaaccgcuacaagcuguuu

SEQ ID NO: 1923477 - RNA, 19 nt, Homo sapiens
  misc_RNA (1)...(19): siRNA sense strand
cagcagaugcggaacaugu

SEQ ID NO: 1923478 - RNA, 19 nt, Homo sapiens
  misc_RNA (1)...(19): siRNA sense strand
ccaggaagacucagagauc

SEQ ID NO: 1923479 - RNA, 19 nt, Homo sapiens
  misc_RNA (1)...(19): siRNA sense strand
ccuccaagcucucauccau

SEQ ID NO: 1923480 - RNA, 19 nt, Homo sapiens
  misc_RNA (1)...(19): siRNA sense strand
ggagugcagccucaaguuc

SEQ ID NO: 1923481 - RNA, 19 nt, Homo sapiens
  misc_RNA (1)...(19): siRNA sense strand
gcaacaaggccgagauggu

SEQ ID NO: 1923482 - RNA, 19 nt, Homo sapiens
  misc_RNA (1)...(19): siRNA sense strand
gauccgagcagcugagaag

SEQ ID NO: 1923483 - RNA, 19 nt, Homo sapiens
  misc_RNA (1)...(19): siRNA sense strand
guacgcccauugugaaacu

SEQ ID NO: 1923484 - RNA, 19 nt, Homo sapiens
  misc_RNA (1)...(19): siRNA sense strand
gaaacucugcacuccaugu

SEQ ID NO: 1923485 - RNA, 19 nt, Homo sapiens
  misc_RNA (1)...(19): siRNA sense strand
ccgaaacucugcacuccau

SEQ ID NO: 1923486 - RNA, 19 nt, Homo sapiens
  misc_RNA (1)...(19): siRNA sense strand
ggauugaagguaccaagga

SEQ ID NO: 1923487 - RNA, 19 nt, Homo sapiens
  misc_RNA (1)...(19): siRNA sense strand
gagcaacaaggccgagaug

SEQ ID NO: 1923488 - RNA, 19 nt, Homo sapiens
  misc_RNA (1)...(19): siRNA sense strand
ccaccgaccucugcuacau

SEQ ID NO: 1923489 - RNA, 19 nt, Homo sapiens
  misc_RNA (1)...(19): siRNA sense strand
ggacuggacgcugaccaaa

SEQ ID NO: 1923490 - RNA, 19 nt, Homo sapiens
  misc_RNA (1)...(19): siRNA sense strand
gggaguccgugccacagau

SEQ ID NO: 1923491 - RNA, 19 nt, Homo sapiens
  misc_RNA (1)...(19): siRNA sense strand
uggagagccugcccgagaa

SEQ ID NO: 1923492 - RNA, 19 nt, Homo sapiens
  misc_RNA (1)...(19): siRNA sense strand
gagccaagccuggucaaca

SEQ ID NO: 1923493 - RNA, 19 nt, Homo sapiens
  misc_RNA (1)...(19): siRNA sense strand
ccgagaagcaggagcaguu

SEQ ID NO: 1923494 - RNA, 19 nt, Homo sapiens
  misc_RNA (1)...(19): siRNA sense strand
gacgagaguacgcccauug

SEQ ID NO: 1923495 - RNA, 19 nt, Homo sapiens
  misc_RNA (1)...(19): siRNA sense strand
cccaggagcugcacuucau

SEQ ID NO: 1923496 - RNA, 19 nt, Homo sapiens
  misc_RNA (1)...(19): siRNA sense strand
uguccgugcuugccucgua

SEQ ID NO: 1923497 - RNA, 19 nt, Homo sapiens
  misc_RNA (1)...(19): siRNA sense strand
cgcugcagcugccuaugua

SEQ ID NO: 1923498 - RNA, 19 nt, Homo sapiens
  misc_RNA (1)...(19): siRNA sense strand
uauuucagguguucugugu

SEQ ID NO: 1923499 - RNA, 19 nt, Homo sapiens
  misc_RNA (1)...(19): siRNA sense strand
ccaagcagaaggaguuugu

SEQ ID NO: 1923500 - RNA, 19 nt, Homo sapiens
  misc_RNA (1)...(19): siRNA sense strand
gaaauuugggagcaacaag

SEQ ID NO: 1923501 - RNA, 19 nt, Homo sapiens
  misc_RNA (1)...(19): siRNA sense strand
ccaacaucuucaaccugua

SEQ ID NO: 1923502 - RNA, 19 nt, Homo sapiens
  misc_RNA (1)...(19): siRNA sense strand
ucaagauccuggcgcucaa

SEQ ID NO: 1923503 - RNA, 19 nt, Homo sapiens
  misc_RNA (1)...(19): siRNA sense strand
ucucggagcuuuucaagga

SEQ ID NO: 1923504 - RNA, 19 nt, Homo sapiens
  misc_RNA (1)...(19): siRNA sense strand
gcagcugccuauguaugga

SEQ ID NO: 1923505 - RNA, 19 nt, Homo sapiens
  misc_RNA (1)...(19): siRNA sense strand
cuacgugacccucaugugu

SEQ ID NO: 1923506 - RNA, 19 nt, Homo sapiens
  misc_RNA (1)...(19): siRNA sense strand
ggcuugaggugcuguccuu

SEQ ID NO: 1923507 - RNA, 19 nt, Homo sapiens
  misc_RNA (1)...(19): siRNA sense strand
cagcugagaagaaauuugg

SEQ ID NO: 1923508 - RNA, 19 nt, Homo sapiens
  misc_RNA (1)...(19): siRNA sense strand
gaguacgcccauugugaaa

SEQ ID NO: 1923509 - RNA, 19 nt, Homo sapiens
  misc_RNA (1)...(19): siRNA sense strand
agaguacgcccauugugaa

SEQ ID NO: 1923510 - RNA, 19 nt, Homo sapiens
  misc_RNA (1)...(19): siRNA sense strand
ggugcuguccuucgaauuc

SEQ ID NO: 1923511 - RNA, 19 nt, Homo sapiens
  misc_RNA (1)...(19): siRNA sense strand
gaaggagcccaucgaagac

SEQ ID NO: 1923512 - RNA, 19 nt, Homo sapiens
  misc_RNA (1)...(19): siRNA sense strand
agaagaaauuugggagcaa

SEQ ID NO: 1923513 - RNA, 19 nt, Homo sapiens
  misc_RNA (1)...(19): siRNA sense strand
gcaagcugcugcgcaccau

SEQ ID NO: 1923514 - RNA, 19 nt, Homo sapiens
  misc_RNA (1)...(19): siRNA sense strand
gcaacaagccccacaugau

SEQ ID NO: 1923515 - RNA, 19 nt, Homo sapiens
  misc_RNA (1)...(19): siRNA sense strand
ggaguucaagcuggucauu

SEQ ID NO: 1923516 - RNA, 19 nt, Homo sapiens
  misc_RNA (1)...(19): siRNA sense strand
gcuccucgcccgacuucaa

SEQ ID NO: 1923517 - RNA, 19 nt, Homo sapiens
  misc_RNA (1)...(19): siRNA sense strand
gagggugacugcgaacaac

SEQ ID NO: 1923518 - RNA, 19 nt, Homo sapiens
  misc_RNA (1)...(19): siRNA sense strand
caacaucuucaaccuguac

SEQ ID NO: 1923519 - RNA, 19 nt, Homo sapiens
  misc_RNA (1)...(19): siRNA sense strand
ggucgaggugugcugcuuu

SEQ ID NO: 1923520 - RNA, 19 nt, Homo sapiens
  misc_RNA (1)...(19): siRNA sense strand
gccuauguauggauugaag

SEQ ID NO: 1923521 - RNA, 19 nt, Homo sapiens
  misc_RNA (1)...(19): siRNA sense strand
cgcuacagauguucaagau

SEQ ID NO: 1923522 - RNA, 19 nt, Homo sapiens
  misc_RNA (1)...(19): siRNA sense strand
cgagaucucccgggaagga

SEQ ID NO: 1923523 - RNA, 19 nt, Homo sapiens
  misc_RNA (1)...(19): siRNA sense strand
gucgaggugugcugcuuug

SEQ ID NO: 1923524 - RNA, 19 nt, Homo sapiens
  misc_RNA (1)...(19): siRNA sense strand
gccaagcucuacauguacu

SEQ ID NO: 1923525 - RNA, 19 nt, Homo sapiens
  misc_RNA (1)...(19): siRNA sense strand
agaaccuggugccauguga

SEQ ID NO: 1923526 - RNA, 19 nt, Homo sapiens
  misc_RNA (1)...(19): siRNA sense strand
gguguggagucuggcaguu

SEQ ID NO: 1923527 - RNA, 19 nt, Homo sapiens
  misc_RNA (1)...(19): siRNA sense strand
ccaguucuuugugcacuuc

SEQ ID NO: 1923528 - RNA, 19 nt, Homo sapiens
  misc_RNA (1)...(19): siRNA sense strand
agaaggaguuugucaucac

SEQ ID NO: 1923529 - RNA, 19 nt, Homo sapiens
  misc_RNA (1)...(19): siRNA sense strand
gcugaccaaagaugagaaa

SEQ ID NO: 1923530 - RNA, 19 nt, Homo sapiens
  misc_RNA (1)...(19): siRNA sense strand
cgucaacaccucccucauc

SEQ ID NO: 1923531 - RNA, 19 nt, Homo sapiens
  misc_RNA (1)...(19): siRNA sense strand
cuccugagcugcccaucga

SEQ ID NO: 1923532 - RNA, 19 nt, Homo sapiens
  misc_RNA (1)...(19): siRNA sense strand
gcagcugagaagaaauuug

SEQ ID NO: 1923533 - RNA, 19 nt, Homo sapiens
  misc_RNA (1)...(19): siRNA sense strand
uguggagucuggcaguuuc

SEQ ID NO: 1923534 - RNA, 19 nt, Homo sapiens
  misc_RNA (1)...(19): siRNA sense strand
ucaccgucaugcuccaguu

SEQ ID NO: 1923535 - RNA, 19 nt, Homo sapiens
  misc_RNA (1)...(19): siRNA sense strand
caacaagccccacaugauc

SEQ ID NO: 1923536 - RNA, 19 nt, Homo sapiens
  misc_RNA (1)...(19): siRNA sense strand
gaaagaacaugggcagaga

SEQ ID NO: 1923537 - RNA, 19 nt, Homo sapiens
  misc_RNA (1)...(19): siRNA sense strand
guucagagcuggcuuaaag

SEQ ID NO: 1923538 - RNA, 19 nt, Homo sapiens
  misc_RNA (1)...(19): siRNA sense strand
gaacaucagacuugaagaa

SEQ ID NO: 1923539 - RNA, 19 nt, Homo sapiens
  misc_RNA (1)...(19): siRNA sense strand
cugcugcgauugauuauua

SEQ ID NO: 1923540 - RNA, 19 nt, Homo sapiens
  misc_RNA (1)...(19): siRNA sense strand
gaagaacagugucaucagu

SEQ ID NO: 1923541 - RNA, 19 nt, Homo sapiens
  misc_RNA (1)...(19): siRNA sense strand
caaaagaagugcugaaaga

SEQ ID NO: 1923542 - RNA, 19 nt, Homo sapiens
  misc_RNA (1)...(19): siRNA sense strand
gguguuugauagaaucuua

SEQ ID NO: 1923543 - RNA, 19 nt, Homo sapiens
  misc_RNA (1)...(19): siRNA sense strand
gaacaugggcagagaggaa

SEQ ID NO: 1923544 - RNA, 19 nt, Homo sapiens
  misc_RNA (1)...(19): siRNA sense strand
gggaggauuugucuuagga

SEQ ID NO: 1923545 - RNA, 19 nt, Homo sapiens
  misc_RNA (1)...(19): siRNA sense strand
ggaggagccuauugguuca

SEQ ID NO: 1923546 - RNA, 19 nt, Homo sapiens
  misc_RNA (1)...(19): siRNA sense strand
aagaagugcugaaagaaca

SEQ ID NO: 1923547 - RNA, 19 nt, Homo sapiens
  misc_RNA (1)...(19): siRNA sense strand
ucuuguaccugguguuuga

SEQ ID NO: 1923548 - RNA, 19 nt, Homo sapiens
  misc_RNA (1)...(19): siRNA sense strand
caucagacuugaagaacag

SEQ ID NO: 1923549 - RNA, 19 nt, Homo sapiens
  misc_RNA (1)...(19): siRNA sense strand
ccgaagcuccgcugcagua

SEQ ID NO: 1923550 - RNA, 19 nt, Homo sapiens
  misc_RNA (1)...(19): siRNA sense strand
ucucugcugcgauugauua

SEQ ID NO: 1923551 - RNA, 19 nt, Homo sapiens
  misc_RNA (1)...(19): siRNA sense strand
agcagaagaugaucgagaa

SEQ ID NO: 1923552 - RNA, 19 nt, Homo sapiens
  misc_RNA (1)...(19): siRNA sense strand
ugucuuaggaggugcauuu

SEQ ID NO: 1923553 - RNA, 19 nt, Homo sapiens
  misc_RNA (1)...(19): siRNA sense strand
ggagccauguuuucuugua

SEQ ID NO: 1923554 - RNA, 19 nt, Homo sapiens
  misc_RNA (1)...(19): siRNA sense strand
gugaggagcagaagaugau

SEQ ID NO: 1923555 - RNA, 19 nt, Homo sapiens
  misc_RNA (1)...(19): siRNA sense strand
caaguccagccaagaguga

SEQ ID NO: 1923556 - RNA, 19 nt, Homo sapiens
  misc_RNA (1)...(19): siRNA sense strand
guuuaccgcuggcaucgau

SEQ ID NO: 1923557 - RNA, 19 nt, Homo sapiens
  misc_RNA (1)...(19): siRNA sense strand
uaccugguguuugauagaa

SEQ ID NO: 1923558 - RNA, 19 nt, Homo sapiens
  misc_RNA (1)...(19): siRNA sense strand
ccgcuggcaucgauaccaa

SEQ ID NO: 1923559 - RNA, 19 nt, Homo sapiens
  misc_RNA (1)...(19): siRNA sense strand
guaccugguguuugauaga

SEQ ID NO: 1923560 - RNA, 19 nt, Homo sapiens
  misc_RNA (1)...(19): siRNA sense strand
ggaauguccuaugccaaaa

SEQ ID NO: 1923561 - RNA, 19 nt, Homo sapiens
  misc_RNA (1)...(19): siRNA sense strand
ccaagagugaggagcagaa

SEQ ID NO: 1923562 - RNA, 19 nt, Homo sapiens
  misc_RNA (1)...(19): siRNA sense strand
auaccaacgugggcuuuga

SEQ ID NO: 1923563 - RNA, 19 nt, Homo sapiens
  misc_RNA (1)...(19): siRNA sense strand
guacaccgacugcaaaaga

SEQ ID NO: 1923564 - RNA, 19 nt, Homo sapiens
  misc_RNA (1)...(19): siRNA sense strand
acaucagacuugaagaaca

SEQ ID NO: 1923565 - RNA, 19 nt, Homo sapiens
  misc_RNA (1)...(19): siRNA sense strand
gaagugcugaaagaacaug

SEQ ID NO: 1923566 - RNA, 19 nt, Homo sapiens
  misc_RNA (1)...(19): siRNA sense strand
agagugaggagcagaagau

SEQ ID NO: 1923567 - RNA, 19 nt, Homo sapiens
  misc_RNA (1)...(19): siRNA sense strand
cauugugggagccauguuu

SEQ ID NO: 1923568 - RNA, 19 nt, Homo sapiens
  misc_RNA (1)...(19): siRNA sense strand
aaagaagugcugaaagaac

SEQ ID NO: 1923569 - RNA, 19 nt, Homo sapiens
  misc_RNA (1)...(19): siRNA sense strand
gaagcuccgcugcaguaca

SEQ ID NO: 1923570 - RNA, 19 nt, Homo sapiens
  misc_RNA (1)...(19): siRNA sense strand
aagcuccgcugcaguacag

SEQ ID NO: 1923571 - RNA, 19 nt, Homo sapiens
  misc_RNA (1)...(19): siRNA sense strand
uaaaucagauguuggcuuu

SEQ ID NO: 1923572 - RNA, 19 nt, Homo sapiens
  misc_RNA (1)...(19): siRNA sense strand
gcaaagaccuccaguacca

SEQ ID NO: 1923573 - RNA, 19 nt, Homo sapiens
  misc_RNA (1)...(19): siRNA sense strand
uaacagcccuuagaauuga

SEQ ID NO: 1923574 - RNA, 19 nt, Homo sapiens
  misc_RNA (1)...(19): siRNA sense strand
uaacaggaaucaagugcua

SEQ ID NO: 1923575 - RNA, 19 nt, Homo sapiens
  misc_RNA (1)...(19): siRNA sense strand
gagcugccaucgucacaua

SEQ ID NO: 1923576 - RNA, 19 nt, Homo sapiens
  misc_RNA (1)...(19): siRNA sense strand
guaaggugguccuagauaa

SEQ ID NO: 1923577 - RNA, 19 nt, Homo sapiens
  misc_RNA (1)...(19): siRNA sense strand
gcaguaaggugguccuaga

SEQ ID NO: 1923578 - RNA, 19 nt, Homo sapiens
  misc_RNA (1)...(19): siRNA sense strand
cuacagauauucaaagguu

SEQ ID NO: 1923579 - RNA, 19 nt, Homo sapiens
  misc_RNA (1)...(19): siRNA sense strand
ccaagaucaugcaguauaa

SEQ ID NO: 1923580 - RNA, 19 nt, Homo sapiens
  misc_RNA (1)...(19): siRNA sense strand
caaugagugugaugagaua

SEQ ID NO: 1923581 - RNA, 19 nt, Homo sapiens
  misc_RNA (1)...(19): siRNA sense strand
uaauggaccuguuuaugaa

SEQ ID NO: 1923582 - RNA, 19 nt, Homo sapiens
  misc_RNA (1)...(19): siRNA sense strand
gagauaugccuuucaguuu

SEQ ID NO: 1923583 - RNA, 19 nt, Homo sapiens
  misc_RNA (1)...(19): siRNA sense strand
cuagugcucugacugguua

SEQ ID NO: 1923584 - RNA, 19 nt, Homo sapiens
  misc_RNA (1)...(19): siRNA sense strand
cuuacaagcugcauacuuu

SEQ ID NO: 1923585 - RNA, 19 nt, Homo sapiens
  misc_RNA (1)...(19): siRNA sense strand
gaacauaugaugagagaag

SEQ ID NO: 1923586 - RNA, 19 nt, Homo sapiens
  misc_RNA (1)...(19): siRNA sense strand
ucaaucaugucuacaaaug

SEQ ID NO: 1923587 - RNA, 19 nt, Homo sapiens
  misc_RNA (1)...(19): siRNA sense strand
ucaacaagcagaacuauga

SEQ ID NO: 1923588 - RNA, 19 nt, Homo sapiens
  misc_RNA (1)...(19): siRNA sense strand
acacauguuugaaguacua

SEQ ID NO: 1923589 - RNA, 19 nt, Homo sapiens
  misc_RNA (1)...(19): siRNA sense strand
aaucagcucugugaacaua

SEQ ID NO: 1923590 - RNA, 19 nt, Homo sapiens
  misc_RNA (1)...(19): siRNA sense strand
cauucaaacuggaacauuu

SEQ ID NO: 1923591 - RNA, 19 nt, Homo sapiens
  misc_RNA (1)...(19): siRNA sense strand
gaugaugaauugaagaaag

SEQ ID NO: 1923592 - RNA, 19 nt, Homo sapiens
  misc_RNA (1)...(19): siRNA sense strand
gauauucaaagguugcuua

SEQ ID NO: 1923593 - RNA, 19 nt, Homo sapiens
  misc_RNA (1)...(19): siRNA sense strand
ggauacaacuucugcuaca

SEQ ID NO: 1923594 - RNA, 19 nt, Homo sapiens
  misc_RNA (1)...(19): siRNA sense strand
gaacuaugaggcuauguug

SEQ ID NO: 1923595 - RNA, 19 nt, Homo sapiens
  misc_RNA (1)...(19): siRNA sense strand
gcacuugccacacaauuau

SEQ ID NO: 1923596 - RNA, 19 nt, Homo sapiens
  misc_RNA (1)...(19): siRNA sense strand
agaggaaacuggagaugaa

SEQ ID NO: 1923597 - RNA, 19 nt, Homo sapiens
  misc_RNA (1)...(19): siRNA sense strand
gugaugaaguguauuggaa

SEQ ID NO: 1923598 - RNA, 19 nt, Homo sapiens
  misc_RNA (1)...(19): siRNA sense strand
gcaacuauuucacagcaau

SEQ ID NO: 1923599 - RNA, 19 nt, Homo sapiens
  misc_RNA (1)...(19): siRNA sense strand
caaagguugcuuacauaua

SEQ ID NO: 1923600 - RNA, 19 nt, Homo sapiens
  misc_RNA (1)...(19): siRNA sense strand
guaauucccugagugaugu

SEQ ID NO: 1923601 - RNA, 19 nt, Homo sapiens
  misc_RNA (1)...(19): siRNA sense strand
gccaagaucaugcaguaua

SEQ ID NO: 1923602 - RNA, 19 nt, Homo sapiens
  misc_RNA (1)...(19): siRNA sense strand
gugaacauaugaugagaga

SEQ ID NO: 1923603 - RNA, 19 nt, Homo sapiens
  misc_RNA (1)...(19): siRNA sense strand
gaccagaagcgcuuugaaa

SEQ ID NO: 1923604 - RNA, 19 nt, Homo sapiens
  misc_RNA (1)...(19): siRNA sense strand
gcgcccacauuuccuagua

SEQ ID NO: 1923605 - RNA, 19 nt, Homo sapiens
  misc_RNA (1)...(19): siRNA sense strand
aagccaagaucaugcagua

SEQ ID NO: 1923606 - RNA, 19 nt, Homo sapiens
  misc_RNA (1)...(19): siRNA sense strand
gaauggacacuaacaggaa

SEQ ID NO: 1923607 - RNA, 19 nt, Homo sapiens
  misc_RNA (1)...(19): siRNA sense strand
gaaaucagaauggacacua

SEQ ID NO: 1923608 - RNA, 19 nt, Homo sapiens
  misc_RNA (1)...(19): siRNA sense strand
guacauuaguuucaacaag

SEQ ID NO: 1923609 - RNA, 19 nt, Homo sapiens
  misc_RNA (1)...(19): siRNA sense strand
ugacaacuuugaagccauu

SEQ ID NO: 1923610 - RNA, 19 nt, Homo sapiens
  misc_RNA (1)...(19): siRNA sense strand
cuuauuggaugcaguauau

SEQ ID NO: 1923611 - RNA, 19 nt, Homo sapiens
  misc_RNA (1)...(19): siRNA sense strand
uuaauggaccuguuuauga

SEQ ID NO: 1923612 - RNA, 19 nt, Homo sapiens
  misc_RNA (1)...(19): siRNA sense strand
ggguguccuuuaagaauaa

SEQ ID NO: 1923613 - RNA, 19 nt, Homo sapiens
  misc_RNA (1)...(19): siRNA sense strand
gauccugaaucccuaaaca

SEQ ID NO: 1923614 - RNA, 19 nt, Homo sapiens
  misc_RNA (1)...(19): siRNA sense strand
caugaagucuccaaugaag

SEQ ID NO: 1923615 - RNA, 19 nt, Homo sapiens
  misc_RNA (1)...(19): siRNA sense strand
gcagaacuaugaggcuaug

SEQ ID NO: 1923616 - RNA, 19 nt, Homo sapiens
  misc_RNA (1)...(19): siRNA sense strand
gaugagauaugccuuucag

SEQ ID NO: 1923617 - RNA, 19 nt, Homo sapiens
  misc_RNA (1)...(19): siRNA sense strand
gaauguucauguucuacga

SEQ ID NO: 1923618 - RNA, 19 nt, Homo sapiens
  misc_RNA (1)...(19): siRNA sense strand
uugcugggcuuucugaauu

SEQ ID NO: 1923619 - RNA, 19 nt, Homo sapiens
  misc_RNA (1)...(19): siRNA sense strand
cagaugacaugaagaaugc

SEQ ID NO: 1923620 - RNA, 19 nt, Homo sapiens
  misc_RNA (1)...(19): siRNA sense strand
cugguuaucuucacacuau

SEQ ID NO: 1923621 - RNA, 19 nt, Homo sapiens
  misc_RNA (1)...(19): siRNA sense strand
ucaccgaucucuuauacuc

SEQ ID NO: 1923622 - RNA, 19 nt, Homo sapiens
  misc_RNA (1)...(19): siRNA sense strand
gagagaagccaagaucaug

SEQ ID NO: 1923623 - RNA, 19 nt, Homo sapiens
  misc_RNA (1)...(19): siRNA sense strand
gaagagaauaguagaggau

SEQ ID NO: 1923624 - RNA, 19 nt, Homo sapiens
  misc_RNA (1)...(19): siRNA sense strand
gaagccauuuggaaguguu

SEQ ID NO: 1923625 - RNA, 19 nt, Homo sapiens
  misc_RNA (1)...(19): siRNA sense strand
guugauaaaucugaugaug

SEQ ID NO: 1923626 - RNA, 19 nt, Homo sapiens
  misc_RNA (1)...(19): siRNA sense strand
gccacacaauuaucauauu

SEQ ID NO: 1923627 - RNA, 19 nt, Homo sapiens
  misc_RNA (1)...(19): siRNA sense strand
ggaugcaguauauucauuu

SEQ ID NO: 1923628 - RNA, 19 nt, Homo sapiens
  misc_RNA (1)...(19): siRNA sense strand
acaaaugccagaacaaaga

SEQ ID NO: 1923629 - RNA, 19 nt, Homo sapiens
  misc_RNA (1)...(19): siRNA sense strand
uaauuuggaucucuucaag

SEQ ID NO: 1923630 - RNA, 19 nt, Homo sapiens
  misc_RNA (1)...(19): siRNA sense strand
ugagauaugccuuucaguu

SEQ ID NO: 1923631 - RNA, 19 nt, Homo sapiens
  misc_RNA (1)...(19): siRNA sense strand
aaaucagaauggacacuaa

SEQ ID NO: 1923632 - RNA, 19 nt, Homo sapiens
  misc_RNA (1)...(19): siRNA sense strand
gaccuccaguaccauaauu

SEQ ID NO: 1923633 - RNA, 19 nt, Homo sapiens
  misc_RNA (1)...(19): siRNA sense strand
ucagaauacuaguugauca

SEQ ID NO: 1923634 - RNA, 19 nt, Homo sapiens
  misc_RNA (1)...(19): siRNA sense strand
gaugagagaagccaagauc

SEQ ID NO: 1923635 - RNA, 19 nt, Homo sapiens
  misc_RNA (1)...(19): siRNA sense strand
aaacuuauuggaugcagua

SEQ ID NO: 1923636 - RNA, 19 nt, Homo sapiens
  misc_RNA (1)...(19): siRNA sense strand
uggguguccuuuaagaaua

SEQ ID NO: 1923637 - RNA, 19 nt, Homo sapiens
  misc_RNA (1)...(19): siRNA sense strand
ccauggguguccuuuaaga

SEQ ID NO: 1923638 - RNA, 19 nt, Homo sapiens
  misc_RNA (1)...(19): siRNA sense strand
gaaucaccgaucucuuaua

SEQ ID NO: 1923639 - RNA, 19 nt, Homo sapiens
  misc_RNA (1)...(19): siRNA sense strand
gagggaauuagacagauuu

SEQ ID NO: 1923640 - RNA, 19 nt, Homo sapiens
  misc_RNA (1)...(19): siRNA sense strand
ugagggaauuagacagauu

SEQ ID NO: 1923641 - RNA, 19 nt, Homo sapiens
  misc_RNA (1)...(19): siRNA sense strand
uucaaagguugcuuacaua

SEQ ID NO: 1923642 - RNA, 19 nt, Homo sapiens
  misc_RNA (1)...(19): siRNA sense strand
uuaaucagcuucugcaaaa

SEQ ID NO: 1923643 - RNA, 19 nt, Homo sapiens
  misc_RNA (1)...(19): siRNA sense strand
augaaucaccgaucucuua

SEQ ID NO: 1923644 - RNA, 19 nt, Homo sapiens
  misc_RNA (1)...(19): siRNA sense strand
aguacuagcugccaugaau

SEQ ID NO: 1923645 - RNA, 19 nt, Homo sapiens
  misc_RNA (1)...(19): siRNA sense strand
ugaaagccuugagggaauu

SEQ ID NO: 1923646 - RNA, 19 nt, Homo sapiens
  misc_RNA (1)...(19): siRNA sense strand
cuacaaaugccagaacaaa

SEQ ID NO: 1923647 - RNA, 19 nt, Homo sapiens
  misc_RNA (1)...(19): siRNA sense strand
ucucaaucaugucuacaaa

SEQ ID NO: 1923648 - RNA, 19 nt, Homo sapiens
  misc_RNA (1)...(19): siRNA sense strand
ccuuagaauugaaagacua

SEQ ID NO: 1923649 - RNA, 19 nt, Homo sapiens
  misc_RNA (1)...(19): siRNA sense strand
caugaagaaugcuuacaag

SEQ ID NO: 1923650 - RNA, 19 nt, Homo sapiens
  misc_RNA (1)...(19): siRNA sense strand
cuaugaggcuauguuguuu

SEQ ID NO: 1923651 - RNA, 19 nt, Homo sapiens
  misc_RNA (1)...(19): siRNA sense strand
cugaaucccuaaacaugaa

SEQ ID NO: 1923652 - RNA, 19 nt, Homo sapiens
  misc_RNA (1)...(19): siRNA sense strand
ucuggaaccuuagacaauu

SEQ ID NO: 1923653 - RNA, 19 nt, Homo sapiens
  misc_RNA (1)...(19): siRNA sense strand
aaucaccgaucucuuauac

SEQ ID NO: 1923654 - RNA, 19 nt, Homo sapiens
  misc_RNA (1)...(19): siRNA sense strand
gaaagccuugagggaauua

SEQ ID NO: 1923655 - RNA, 19 nt, Homo sapiens
  misc_RNA (1)...(19): siRNA sense strand
gcaccgauugcucuuaaga

SEQ ID NO: 1923656 - RNA, 19 nt, Homo sapiens
  misc_RNA (1)...(19): siRNA sense strand
uuaaucagcucugugaaca

SEQ ID NO: 1923657 - RNA, 19 nt, Homo sapiens
  misc_RNA (1)...(19): siRNA sense strand
aaucagauguuggcuuuca

SEQ ID NO: 1923658 - RNA, 19 nt, Homo sapiens
  misc_RNA (1)...(19): siRNA sense strand
gggcauaagcacucuaaca

SEQ ID NO: 1923659 - RNA, 19 nt, Homo sapiens
  misc_RNA (1)...(19): siRNA sense strand
caaaugccagaacaaagaa

SEQ ID NO: 1923660 - RNA, 19 nt, Homo sapiens
  misc_RNA (1)...(19): siRNA sense strand
cauacuuacucuucucuca

SEQ ID NO: 1923661 - RNA, 19 nt, Homo sapiens
  misc_RNA (1)...(19): siRNA sense strand
cuuucgaccuguugguuua

SEQ ID NO: 1923662 - RNA, 19 nt, Homo sapiens
  misc_RNA (1)...(19): siRNA sense strand
guucagucuucacgccaua

SEQ ID NO: 1923663 - RNA, 19 nt, Homo sapiens
  misc_RNA (1)...(19): siRNA sense strand
acucuucucucaaucaugu

SEQ ID NO: 1923664 - RNA, 19 nt, Homo sapiens
  misc_RNA (1)...(19): siRNA sense strand
auucaaagguugcuuacau

SEQ ID NO: 1923665 - RNA, 19 nt, Homo sapiens
  misc_RNA (1)...(19): siRNA sense strand
uagccacccugcauuuaau

SEQ ID NO: 1923666 - RNA, 19 nt, Homo sapiens
  misc_RNA (1)...(19): siRNA sense strand
gcugggcuuucugaauuaa

SEQ ID NO: 1923667 - RNA, 19 nt, Homo sapiens
  misc_RNA (1)...(19): siRNA sense strand
ucagaugacaugaagaaug

SEQ ID NO: 1923668 - RNA, 19 nt, Homo sapiens
  misc_RNA (1)...(19): siRNA sense strand
gaaguacuagcugccauga

SEQ ID NO: 1923669 - RNA, 19 nt, Homo sapiens
  misc_RNA (1)...(19): siRNA sense strand
caaguugugaugaagugua

SEQ ID NO: 1923670 - RNA, 19 nt, Homo sapiens
  misc_RNA (1)...(19): siRNA sense strand
gaucaugcaguauaaguac

SEQ ID NO: 1923671 - RNA, 19 nt, Homo sapiens
  misc_RNA (1)...(19): siRNA sense strand
gaaauaaccauucaugugu

SEQ ID NO: 1923672 - RNA, 19 nt, Homo sapiens
  misc_RNA (1)...(19): siRNA sense strand
ggaaauaaccauucaugug

SEQ ID NO: 1923673 - RNA, 19 nt, Homo sapiens
  misc_RNA (1)...(19): siRNA sense strand
aaaggacaguguuuagaaa

SEQ ID NO: 1923674 - RNA, 19 nt, Homo sapiens
  misc_RNA (1)...(19): siRNA sense strand
acacaauuuuccccuauua

SEQ ID NO: 1923675 - RNA, 19 nt, Homo sapiens
  misc_RNA (1)...(19): siRNA sense strand
ccuauuaccuggugcaaaa

SEQ ID NO: 1923676 - RNA, 19 nt, Homo sapiens
  misc_RNA (1)...(19): siRNA sense strand
cagaaaacacugggaauua

SEQ ID NO: 1923677 - RNA, 19 nt, Homo sapiens
  misc_RNA (1)...(19): siRNA sense strand
ugacucaucacuucccaaa

SEQ ID NO: 1923678 - RNA, 19 nt, Homo sapiens
  misc_RNA (1)...(19): siRNA sense strand
gcuggaggucacacaauuu

SEQ ID NO: 1923679 - RNA, 19 nt, Homo sapiens
  misc_RNA (1)...(19): siRNA sense strand
caggaaauaaccauucaug

SEQ ID NO: 1923680 - RNA, 19 nt, Homo sapiens
  misc_RNA (1)...(19): siRNA sense strand
ugcuggaggucacacaauu

SEQ ID NO: 1923681 - RNA, 19 nt, Homo sapiens
  misc_RNA (1)...(19): siRNA sense strand
aaaccacgauuuucccauu

SEQ ID NO: 1923682 - RNA, 19 nt, Homo sapiens
  misc_RNA (1)...(19): siRNA sense strand
uuuauggccuauagucuca

SEQ ID NO: 1923683 - RNA, 19 nt, Homo sapiens
  misc_RNA (1)...(19): siRNA sense strand
uccaggaaauaaccauuca

SEQ ID NO: 1923684 - RNA, 19 nt, Homo sapiens
  misc_RNA (1)...(19): siRNA sense strand
ucacacaauuuuccccuau

SEQ ID NO: 1923685 - RNA, 19 nt, Homo sapiens
  misc_RNA (1)...(19): siRNA sense strand
aaaaggacaguguuuagaa

SEQ ID NO: 1923686 - RNA, 19 nt, Homo sapiens
  misc_RNA (1)...(19): siRNA sense strand
ggacggcccucaacacaua

SEQ ID NO: 1923687 - RNA, 19 nt, Homo sapiens
  misc_RNA (1)...(19): siRNA sense strand
caugaucaaugcugacuuu

SEQ ID NO: 1923688 - RNA, 19 nt, Homo sapiens
  misc_RNA (1)...(19): siRNA sense strand
gagauggccuggagagugu

SEQ ID NO: 1923689 - RNA, 19 nt, Homo sapiens
  misc_RNA (1)...(19): siRNA sense strand
ccaugaagcuuacggagau

SEQ ID NO: 1923690 - RNA, 19 nt, Homo sapiens
  misc_RNA (1)...(19): siRNA sense strand
gcacuacgaggaccaaguu

SEQ ID NO: 1923691 - RNA, 19 nt, Homo sapiens
  misc_RNA (1)...(19): siRNA sense strand
gaccucaagugaaaugaug

SEQ ID NO: 1923692 - RNA, 19 nt, Homo sapiens
  misc_RNA (1)...(19): siRNA sense strand
uaacgcggacaaugaauuu

SEQ ID NO: 1923693 - RNA, 19 nt, Homo sapiens
  misc_RNA (1)...(19): siRNA sense strand
gaucaaugcugacuuuugu

SEQ ID NO: 1923694 - RNA, 19 nt, Homo sapiens
  misc_RNA (1)...(19): siRNA sense strand
gaagaugggaggcuugaca

SEQ ID NO: 1923695 - RNA, 19 nt, Homo sapiens
  misc_RNA (1)...(19): siRNA sense strand
guggagagcaugaucaaug

SEQ ID NO: 1923696 - RNA, 19 nt, Homo sapiens
  misc_RNA (1)...(19): siRNA sense strand
ucuggcagcuggcuucuug

SEQ ID NO: 1923697 - RNA, 19 nt, Homo sapiens
  misc_RNA (1)...(19): siRNA sense strand
ggcagacacucaggccuaa

SEQ ID NO: 1923698 - RNA, 19 nt, Homo sapiens
  misc_RNA (1)...(19): siRNA sense strand
ucagaccucuucgccauga

SEQ ID NO: 1923699 - RNA, 19 nt, Homo sapiens
  misc_RNA (1)...(19): siRNA sense strand
acaguaacgcggacaauga

SEQ ID NO: 1923700 - RNA, 19 nt, Homo sapiens
  misc_RNA (1)...(19): siRNA sense strand
guaacgcggacaaugaauu

SEQ ID NO: 1923701 - RNA, 19 nt, Homo sapiens
  misc_RNA (1)...(19): siRNA sense strand
ggacuugccacccaugaag

SEQ ID NO: 1923702 - RNA, 19 nt, Homo sapiens
  misc_RNA (1)...(19): siRNA sense strand
cagcacccuuggcaccuuu

SEQ ID NO: 1923703 - RNA, 19 nt, Homo sapiens
  misc_RNA (1)...(19): siRNA sense strand
caaaguccaagacacaugu

SEQ ID NO: 1923704 - RNA, 19 nt, Homo sapiens
  misc_RNA (1)...(19): siRNA sense strand
gggccgugcucaucuccuu

SEQ ID NO: 1923705 - RNA, 19 nt, Homo sapiens
  misc_RNA (1)...(19): siRNA sense strand
cuucaaugcugcacucaca

SEQ ID NO: 1923706 - RNA, 19 nt, Homo sapiens
  misc_RNA (1)...(19): siRNA sense strand
gacaugguccacauccaaa

SEQ ID NO: 1923707 - RNA, 19 nt, Homo sapiens
  misc_RNA (1)...(19): siRNA sense strand
caccggagcaaccacagua

SEQ ID NO: 1923708 - RNA, 19 nt, Homo sapiens
  misc_RNA (1)...(19): siRNA sense strand
ccucuuugcugucuuuguc

SEQ ID NO: 1923709 - RNA, 19 nt, Homo sapiens
  misc_RNA (1)...(19): siRNA sense strand
cguccucuuugcugucuuu

SEQ ID NO: 1923710 - RNA, 19 nt, Homo sapiens
  misc_RNA (1)...(19): siRNA sense strand
ugacaugguccacauccaa

SEQ ID NO: 1923711 - RNA, 19 nt, Homo sapiens
  misc_RNA (1)...(19): siRNA sense strand
ccaugacuauccacaccuu

SEQ ID NO: 1923712 - RNA, 19 nt, Homo sapiens
  misc_RNA (1)...(19): siRNA sense strand
ccacugccguccucuuugc

SEQ ID NO: 1923713 - RNA, 19 nt, Homo sapiens
  misc_RNA (1)...(19): siRNA sense strand
caguaacgcggacaaugaa

SEQ ID NO: 1923714 - RNA, 19 nt, Homo sapiens
  misc_RNA (1)...(19): siRNA sense strand
ucacgcccauccuugaauc

SEQ ID NO: 1923715 - RNA, 19 nt, Homo sapiens
  misc_RNA (1)...(19): siRNA sense strand
guggggaccucaagugaaa

SEQ ID NO: 1923716 - RNA, 19 nt, Homo sapiens
  misc_RNA (1)...(19): siRNA sense strand
ggaccaucuuccuguggau

SEQ ID NO: 1923717 - RNA, 19 nt, Homo sapiens
  misc_RNA (1)...(19): siRNA sense strand
ggaccucaagugaaaugau

SEQ ID NO: 1923718 - RNA, 19 nt, Homo sapiens
  misc_RNA (1)...(19): siRNA sense strand
gggcuuuggcuuccucaug

SEQ ID NO: 1923719 - RNA, 19 nt, Homo sapiens
  misc_RNA (1)...(19): siRNA sense strand
gggaagaugggaggcuuga

SEQ ID NO: 1923720 - RNA, 19 nt, Homo sapiens
  misc_RNA (1)...(19): siRNA sense strand
cuucuggccuagcuucaau

SEQ ID NO: 1923721 - RNA, 19 nt, Homo sapiens
  misc_RNA (1)...(19): siRNA sense strand
uggcgagcaugaggauaaa

SEQ ID NO: 1923722 - RNA, 19 nt, Homo sapiens
  misc_RNA (1)...(19): siRNA sense strand
ggugcuguuuggcaucaau

SEQ ID NO: 1923723 - RNA, 19 nt, Homo sapiens
  misc_RNA (1)...(19): siRNA sense strand
cuggcgagcaugaggauaa

SEQ ID NO: 1923724 - RNA, 19 nt, Homo sapiens
  misc_RNA (1)...(19): siRNA sense strand
uggcaucaaugaguuugug

SEQ ID NO: 1923725 - RNA, 19 nt, Homo sapiens
  misc_RNA (1)...(19): siRNA sense strand
ucaaaguccaagacacaug

SEQ ID NO: 1923726 - RNA, 19 nt, Homo sapiens
  misc_RNA (1)...(19): siRNA sense strand
ccaauaagcuuuccaugau

SEQ ID NO: 1923727 - RNA, 19 nt, Homo sapiens
  misc_RNA (1)...(19): siRNA sense strand
gagcccagguacuaaguua

SEQ ID NO: 1923728 - RNA, 19 nt, Homo sapiens
  misc_RNA (1)...(19): siRNA sense strand
aaacagagcccagguacua

SEQ ID NO: 1923729 - RNA, 19 nt, Homo sapiens
  misc_RNA (1)...(19): siRNA sense strand
cacaauaacgugcuacaua

SEQ ID NO: 1923730 - RNA, 19 nt, Homo sapiens
  misc_RNA (1)...(19): siRNA sense strand
gguacuaaguuaugucaug

SEQ ID NO: 1923731 - RNA, 19 nt, Homo sapiens
  misc_RNA (1)...(19): siRNA sense strand
gccaauaagcuuuccauga

SEQ ID NO: 1923732 - RNA, 19 nt, Homo sapiens
  misc_RNA (1)...(19): siRNA sense strand
caauaagcuuuccaugaug

SEQ ID NO: 1923733 - RNA, 19 nt, Homo sapiens
  misc_RNA (1)...(19): siRNA sense strand
acaauaacgugcuacauac

SEQ ID NO: 1923734 - RNA, 19 nt, Homo sapiens
  misc_RNA (1)...(19): siRNA sense strand
gcccaucauucuuuaaaca

SEQ ID NO: 1923735 - RNA, 19 nt, Homo sapiens
  misc_RNA (1)...(19): siRNA sense strand
uaaucuggcuguuguugug

SEQ ID NO: 1923736 - RNA, 19 nt, Homo sapiens
  misc_RNA (1)...(19): siRNA sense strand
uaaaucagccauucucaag

SEQ ID NO: 1923737 - RNA, 19 nt, Homo sapiens
  misc_RNA (1)...(19): siRNA sense strand
guaccaucuuagaaccuua

SEQ ID NO: 1923738 - RNA, 19 nt, Homo sapiens
  misc_RNA (1)...(19): siRNA sense strand
caagcgaaccaagccaaua

SEQ ID NO: 1923739 - RNA, 19 nt, Homo sapiens
  misc_RNA (1)...(19): siRNA sense strand
aagcgaaccaagccaauaa

SEQ ID NO: 1923740 - RNA, 19 nt, Homo sapiens
  misc_RNA (1)...(19): siRNA sense strand
gguaccaucuuagaaccuu

SEQ ID NO: 1923741 - RNA, 19 nt, Homo sapiens
  misc_RNA (1)...(19): siRNA sense strand
gaugcugcuuagaguuaaa

SEQ ID NO: 1923742 - RNA, 19 nt, Homo sapiens
  misc_RNA (1)...(19): siRNA sense strand
ccaugaugcugcuuagagu

SEQ ID NO: 1923743 - RNA, 19 nt, Homo sapiens
  misc_RNA (1)...(19): siRNA sense strand
gaacuccugguaccaucuu

SEQ ID NO: 1923744 - RNA, 19 nt, Homo sapiens
  misc_RNA (1)...(19): siRNA sense strand
ucauggagacagugaacua

SEQ ID NO: 1923745 - RNA, 19 nt, Homo sapiens
  misc_RNA (1)...(19): siRNA sense strand
guuaaacagagcccaggua

SEQ ID NO: 1923746 - RNA, 19 nt, Homo sapiens
  misc_RNA (1)...(19): siRNA sense strand
gcccagguacuaaguuaug

SEQ ID NO: 1923747 - RNA, 19 nt, Homo sapiens
  misc_RNA (1)...(19): siRNA sense strand
ccaucauucuuuaaacaca

SEQ ID NO: 1923748 - RNA, 19 nt, Homo sapiens
  misc_RNA (1)...(19): siRNA sense strand
ugaugcugcuuagaguuaa

SEQ ID NO: 1923749 - RNA, 19 nt, Homo sapiens
  misc_RNA (1)...(19): siRNA sense strand
acuaaccucuggacugcuu

SEQ ID NO: 1923750 - RNA, 19 nt, Homo sapiens
  misc_RNA (1)...(19): siRNA sense strand
cugcuuagaguuaaacaga

SEQ ID NO: 1923751 - RNA, 19 nt, Homo sapiens
  misc_RNA (1)...(19): siRNA sense strand
augaugcugcuuagaguua

SEQ ID NO: 1923752 - RNA, 19 nt, Homo sapiens
  misc_RNA (1)...(19): siRNA sense strand
cauggagacagugaacuaa

SEQ ID NO: 1923753 - RNA, 19 nt, Homo sapiens
  misc_RNA (1)...(19): siRNA sense strand
uuaaaucagccauucucaa

SEQ ID NO: 1923754 - RNA, 19 nt, Homo sapiens
  misc_RNA (1)...(19): siRNA sense strand
cuggacugcuugcuacaug

SEQ ID NO: 1923755 - RNA, 19 nt, Homo sapiens
  misc_RNA (1)...(19): siRNA sense strand
uggacugcuugcuacauga

SEQ ID NO: 1923756 - RNA, 19 nt, Homo sapiens
  misc_RNA (1)...(19): siRNA sense strand
gcaacaaccucguuaacuc

SEQ ID NO: 1923757 - RNA, 19 nt, Homo sapiens
  misc_RNA (1)...(19): siRNA sense strand
gaacugcaauaggaaagau

SEQ ID NO: 1923758 - RNA, 19 nt, Homo sapiens
  misc_RNA (1)...(19): siRNA sense strand
gauuggaccacaucgaaua

SEQ ID NO: 1923759 - RNA, 19 nt, Homo sapiens
  misc_RNA (1)...(19): siRNA sense strand
gcgcugcucugccaguuug

SEQ ID NO: 1923760 - RNA, 19 nt, Homo sapiens
  misc_RNA (1)...(19): siRNA sense strand
ggaccaccauuaugacaca

SEQ ID NO: 1923761 - RNA, 19 nt, Homo sapiens
  misc_RNA (1)...(19): siRNA sense strand
gguuugcccuuccugcuaa

SEQ ID NO: 1923762 - RNA, 19 nt, Homo sapiens
  misc_RNA (1)...(19): siRNA sense strand
acacguugaugcucauuga

SEQ ID NO: 1923763 - RNA, 19 nt, Homo sapiens
  misc_RNA (1)...(19): siRNA sense strand
gaaccacaccagacaaauc

SEQ ID NO: 1923764 - RNA, 19 nt, Homo sapiens
  misc_RNA (1)...(19): siRNA sense strand
acugagaacugcaauagga

SEQ ID NO: 1923765 - RNA, 19 nt, Homo sapiens
  misc_RNA (1)...(19): siRNA sense strand
gcucaagaacccacugauu

SEQ ID NO: 1923766 - RNA, 19 nt, Homo sapiens
  misc_RNA (1)...(19): siRNA sense strand
gaagaccaccauccacuca

SEQ ID NO: 1923767 - RNA, 19 nt, Homo sapiens
  misc_RNA (1)...(19): siRNA sense strand
caggaggacuucugcaaca

SEQ ID NO: 1923768 - RNA, 19 nt, Homo sapiens
  misc_RNA (1)...(19): siRNA sense strand
ggaccacacacuguuauga

SEQ ID NO: 1923769 - RNA, 19 nt, Homo sapiens
  misc_RNA (1)...(19): siRNA sense strand
ccucggaccugugcaauag

SEQ ID NO: 1923770 - RNA, 19 nt, Homo sapiens
  misc_RNA (1)...(19): siRNA sense strand
ccagucugcuugucuaugg

SEQ ID NO: 1923771 - RNA, 19 nt, Homo sapiens
  misc_RNA (1)...(19): siRNA sense strand
ggcaucuucuccaaucuga

SEQ ID NO: 1923772 - RNA, 19 nt, Homo sapiens
  misc_RNA (1)...(19): siRNA sense strand
guugcaaccugcucaaugg

SEQ ID NO: 1923773 - RNA, 19 nt, Homo sapiens
  misc_RNA (1)...(19): siRNA sense strand
agacgcugcugcucauaga

SEQ ID NO: 1923774 - RNA, 19 nt, Homo sapiens
  misc_RNA (1)...(19): siRNA sense strand
uuaacucccucccgcuuug

SEQ ID NO: 1923775 - RNA, 19 nt, Homo sapiens
  misc_RNA (1)...(19): siRNA sense strand
ggagaccggcaguguccua

SEQ ID NO: 1923776 - RNA, 19 nt, Homo sapiens
  misc_RNA (1)...(19): siRNA sense strand
gcucaaaauucccagaaga

SEQ ID NO: 1923777 - RNA, 19 nt, Homo sapiens
  misc_RNA (1)...(19): siRNA sense strand
ccacaucgaauaccgagau

SEQ ID NO: 1923778 - RNA, 19 nt, Homo sapiens
  misc_RNA (1)...(19): siRNA sense strand
cucaagaacccacugauug

SEQ ID NO: 1923779 - RNA, 19 nt, Homo sapiens
  misc_RNA (1)...(19): siRNA sense strand
ccagacaaaucgggaucuu

SEQ ID NO: 1923780 - RNA, 19 nt, Homo sapiens
  misc_RNA (1)...(19): siRNA sense strand
gaccacacacuguuaugau

SEQ ID NO: 1923781 - RNA, 19 nt, Homo sapiens
  misc_RNA (1)...(19): siRNA sense strand
ugacugagaacugcaauag

SEQ ID NO: 1923782 - RNA, 19 nt, Homo sapiens
  misc_RNA (1)...(19): siRNA sense strand
ucaagaacccacugauugg

SEQ ID NO: 1923783 - RNA, 19 nt, Homo sapiens
  misc_RNA (1)...(19): siRNA sense strand
ccuuccagcuucuuguuga

SEQ ID NO: 1923784 - RNA, 19 nt, Homo sapiens
  misc_RNA (1)...(19): siRNA sense strand
caaugggacacaggaaauu

SEQ ID NO: 1923785 - RNA, 19 nt, Homo sapiens
  misc_RNA (1)...(19): siRNA sense strand
ggccuggagucucucacuu

SEQ ID NO: 1923786 - RNA, 19 nt, Homo sapiens
  misc_RNA (1)...(19): siRNA sense strand
uaugacacacggaaacuug

SEQ ID NO: 1923787 - RNA, 19 nt, Homo sapiens
  misc_RNA (1)...(19): siRNA sense strand
gcagacccaggauccuuga

SEQ ID NO: 1923788 - RNA, 19 nt, Homo sapiens
  misc_RNA (1)...(19): siRNA sense strand
agacaaaucgggaucuucu

SEQ ID NO: 1923789 - RNA, 19 nt, Homo sapiens
  misc_RNA (1)...(19): siRNA sense strand
guuaugauggguacauuca

SEQ ID NO: 1923790 - RNA, 19 nt, Homo sapiens
  misc_RNA (1)...(19): siRNA sense strand
ucaaugggacacaggaaau

SEQ ID NO: 1923791 - RNA, 19 nt, Homo sapiens
  misc_RNA (1)...(19): siRNA sense strand
ugagaacugcaauaggaaa

SEQ ID NO: 1923792 - RNA, 19 nt, Homo sapiens
  misc_RNA (1)...(19): siRNA sense strand
caagaacccacugauugga

SEQ ID NO: 1923793 - RNA, 19 nt, Homo sapiens
  misc_RNA (1)...(19): siRNA sense strand
ggcaguguccuaccugugu

SEQ ID NO: 1923794 - RNA, 19 nt, Homo sapiens
  misc_RNA (1)...(19): siRNA sense strand
guuaacucccucccgcuuu

SEQ ID NO: 1923795 - RNA, 19 nt, Homo sapiens
  misc_RNA (1)...(19): siRNA sense strand
gccucucccugaucuccua

SEQ ID NO: 1923796 - RNA, 19 nt, Homo sapiens
  misc_RNA (1)...(19): siRNA sense strand
gagacgcugcugcucauag

SEQ ID NO: 1923797 - RNA, 19 nt, Homo sapiens
  misc_RNA (1)...(19): siRNA sense strand
gagaacugcaauaggaaag

SEQ ID NO: 1923798 - RNA, 19 nt, Homo sapiens
  misc_RNA (1)...(19): siRNA sense strand
gaacucccucccuccucaa

SEQ ID NO: 1923799 - RNA, 19 nt, Homo sapiens
  misc_RNA (1)...(19): siRNA sense strand
gugcuuguggccuccuaua

SEQ ID NO: 1923800 - RNA, 19 nt, Homo sapiens
  misc_RNA (1)...(19): siRNA sense strand
ggagacgcugcugcucaua

SEQ ID NO: 1923801 - RNA, 19 nt, Homo sapiens
  misc_RNA (1)...(19): siRNA sense strand
gccaggaggacuucugcaa

SEQ ID NO: 1923802 - RNA, 19 nt, Homo sapiens
  misc_RNA (1)...(19): siRNA sense strand
caguucagcauguguggaa

SEQ ID NO: 1923803 - RNA, 19 nt, Homo sapiens
  misc_RNA (1)...(19): siRNA sense strand
ccacugauuggaccacauc

SEQ ID NO: 1923804 - RNA, 19 nt, Homo sapiens
  misc_RNA (1)...(19): siRNA sense strand
gauaaagcccgucgugaua

SEQ ID NO: 1923805 - RNA, 19 nt, Homo sapiens
  misc_RNA (1)...(19): siRNA sense strand
caaagagccuugagguauu

SEQ ID NO: 1923806 - RNA, 19 nt, Homo sapiens
  misc_RNA (1)...(19): siRNA sense strand
gcucagcucugcgaccuua

SEQ ID NO: 1923807 - RNA, 19 nt, Homo sapiens
  misc_RNA (1)...(19): siRNA sense strand
gaguauaugucaaaguguu

SEQ ID NO: 1923808 - RNA, 19 nt, Homo sapiens
  misc_RNA (1)...(19): siRNA sense strand
gcacacaugaugcuggaua

SEQ ID NO: 1923809 - RNA, 19 nt, Homo sapiens
  misc_RNA (1)...(19): siRNA sense strand
gacccuguguucaagguua

SEQ ID NO: 1923810 - RNA, 19 nt, Homo sapiens
  misc_RNA (1)...(19): siRNA sense strand
ucaagcaggugacuccauu

SEQ ID NO: 1923811 - RNA, 19 nt, Homo sapiens
  misc_RNA (1)...(19): siRNA sense strand
caaggaagcgauugauuau

SEQ ID NO: 1923812 - RNA, 19 nt, Homo sapiens
  misc_RNA (1)...(19): siRNA sense strand
ucucagcucuacuguguuu

SEQ ID NO: 1923813 - RNA, 19 nt, Homo sapiens
  misc_RNA (1)...(19): siRNA sense strand
uagaggacaugaacgaguu

SEQ ID NO: 1923814 - RNA, 19 nt, Homo sapiens
  misc_RNA (1)...(19): siRNA sense strand
gaagugcugcguuugauuc

SEQ ID NO: 1923815 - RNA, 19 nt, Homo sapiens
  misc_RNA (1)...(19): siRNA sense strand
ggauaaagcccgucgugau

SEQ ID NO: 1923816 - RNA, 19 nt, Homo sapiens
  misc_RNA (1)...(19): siRNA sense strand
cggaguauaugucaaagug

SEQ ID NO: 1923817 - RNA, 19 nt, Homo sapiens
  misc_RNA (1)...(19): siRNA sense strand
gagagucaccgcaauuuca

SEQ ID NO: 1923818 - RNA, 19 nt, Homo sapiens
  misc_RNA (1)...(19): siRNA sense strand
gauaugaccgcgaaaccaa

SEQ ID NO: 1923819 - RNA, 19 nt, Homo sapiens
  misc_RNA (1)...(19): siRNA sense strand
gcccgacagugguuuggua

SEQ ID NO: 1923820 - RNA, 19 nt, Homo sapiens
  misc_RNA (1)...(19): siRNA sense strand
uugauuaucugaccguuga

SEQ ID NO: 1923821 - RNA, 19 nt, Homo sapiens
  misc_RNA (1)...(19): siRNA sense strand
gaugagagucaccgcaauu

SEQ ID NO: 1923822 - RNA, 19 nt, Homo sapiens
  misc_RNA (1)...(19): siRNA sense strand
acaaagagccuugagguau

SEQ ID NO: 1923823 - RNA, 19 nt, Homo sapiens
  misc_RNA (1)...(19): siRNA sense strand
gaugcaacuccugcuauua

SEQ ID NO: 1923824 - RNA, 19 nt, Homo sapiens
  misc_RNA (1)...(19): siRNA sense strand
aaagagccuugagguauug

SEQ ID NO: 1923825 - RNA, 19 nt, Homo sapiens
  misc_RNA (1)...(19): siRNA sense strand
cuucucagcucuacugugu

SEQ ID NO: 1923826 - RNA, 19 nt, Homo sapiens
  misc_RNA (1)...(19): siRNA sense strand
ugauaccacuguagaaagu

SEQ ID NO: 1923827 - RNA, 19 nt, Homo sapiens
  misc_RNA (1)...(19): siRNA sense strand
aggaagcgauugauuaucu

SEQ ID NO: 1923828 - RNA, 19 nt, Homo sapiens
  misc_RNA (1)...(19): siRNA sense strand
gugcugcguuugauucaug

SEQ ID NO: 1923829 - RNA, 19 nt, Homo sapiens
  misc_RNA (1)...(19): siRNA sense strand
gaaaauucauguccuagag

SEQ ID NO: 1923830 - RNA, 19 nt, Homo sapiens
  misc_RNA (1)...(19): siRNA sense strand
ggaagcgauugauuaucug

SEQ ID NO: 1923831 - RNA, 19 nt, Homo sapiens
  misc_RNA (1)...(19): siRNA sense strand
ggucaaugcacacaugaug

SEQ ID NO: 1923832 - RNA, 19 nt, Homo sapiens
  misc_RNA (1)...(19): siRNA sense strand
cacacaugaugcuggauaa

SEQ ID NO: 1923833 - RNA, 19 nt, Homo sapiens
  misc_RNA (1)...(19): siRNA sense strand
guagaaagugugccugugu

SEQ ID NO: 1923834 - RNA, 19 nt, Homo sapiens
  misc_RNA (1)...(19): siRNA sense strand
gagaugcaacuccugcuau

SEQ ID NO: 1923835 - RNA, 19 nt, Homo sapiens
  misc_RNA (1)...(19): siRNA sense strand
gaagcgauugauuaucuga

SEQ ID NO: 1923836 - RNA, 19 nt, Homo sapiens
  misc_RNA (1)...(19): siRNA sense strand
gacagugguuugguagaga

SEQ ID NO: 1923837 - RNA, 19 nt, Homo sapiens
  misc_RNA (1)...(19): siRNA sense strand
agaugcaacuccugcuauu

SEQ ID NO: 1923838 - RNA, 19 nt, Homo sapiens
  misc_RNA (1)...(19): siRNA sense strand
guagagagaaagucaagca

SEQ ID NO: 1923839 - RNA, 19 nt, Homo sapiens
  misc_RNA (1)...(19): siRNA sense strand
gacgaagugcugcguuuga

SEQ ID NO: 1923840 - RNA, 19 nt, Homo sapiens
  misc_RNA (1)...(19): siRNA sense strand
gcaacuccugcuauuaaga

SEQ ID NO: 1923841 - RNA, 19 nt, Homo sapiens
  misc_RNA (1)...(19): siRNA sense strand
cgucaaggccaucaaggaa

SEQ ID NO: 1923842 - RNA, 19 nt, Homo sapiens
  misc_RNA (1)...(19): siRNA sense strand
cgacagugguuugguagag

SEQ ID NO: 1923843 - RNA, 19 nt, Homo sapiens
  misc_RNA (1)...(19): siRNA sense strand
ggacgaagugcugcguuug

SEQ ID NO: 1923844 - RNA, 19 nt, Homo sapiens
  misc_RNA (1)...(19): siRNA sense strand
gggauaacgaugagaguca

SEQ ID NO: 1923845 - RNA, 19 nt, Homo sapiens
  misc_RNA (1)...(19): siRNA sense strand
gccugugucuccaucagaa

SEQ ID NO: 1923846 - RNA, 19 nt, Homo sapiens
  misc_RNA (1)...(19): siRNA sense strand
augcaacuccugcuauuaa

SEQ ID NO: 1923847 - RNA, 19 nt, Homo sapiens
  misc_RNA (1)...(19): siRNA sense strand
gaguucaccgugcauauuc

SEQ ID NO: 1923848 - RNA, 19 nt, Homo sapiens
  misc_RNA (1)...(19): siRNA sense strand
gugguuugguagagagaaa

SEQ ID NO: 1923849 - RNA, 19 nt, Homo sapiens
  misc_RNA (1)...(19): siRNA sense strand
cgaguucaccgugcauauu

SEQ ID NO: 1923850 - RNA, 19 nt, Homo sapiens
  misc_RNA (1)...(19): siRNA sense strand
gagccuugagguauugaaa

SEQ ID NO: 1923851 - RNA, 19 nt, Homo sapiens
  misc_RNA (1)...(19): siRNA sense strand
aggacgaagugcugcguuu

SEQ ID NO: 1923852 - RNA, 19 nt, Homo sapiens
  misc_RNA (1)...(19): siRNA sense strand
ugggagcuauggcagcauu

SEQ ID NO: 1923853 - RNA, 19 nt, Homo sapiens
  misc_RNA (1)...(19): siRNA sense strand
cauugucagucggaguaua

SEQ ID NO: 1923854 - RNA, 19 nt, Homo sapiens
  misc_RNA (1)...(19): siRNA sense strand
cgugauaccacuguagaaa

SEQ ID NO: 1923855 - RNA, 19 nt, Homo sapiens
  misc_RNA (1)...(19): siRNA sense strand
caccgugcauauucuggaa

SEQ ID NO: 1923856 - RNA, 19 nt, Homo sapiens
  misc_RNA (1)...(19): siRNA sense strand
aacaaagagccuugaggua

SEQ ID NO: 1923857 - RNA, 19 nt, Homo sapiens
  misc_RNA (1)...(19): siRNA sense strand
gcguuugauucaugagugu

SEQ ID NO: 1923858 - RNA, 19 nt, Homo sapiens
  misc_RNA (1)...(19): siRNA sense strand
cgaagugcugcguuugauu

SEQ ID NO: 1923859 - RNA, 19 nt, Homo sapiens
  misc_RNA (1)...(19): siRNA sense strand
cgaugagagucaccgcaau

SEQ ID NO: 1923860 - RNA, 19 nt, Homo sapiens
  misc_RNA (1)...(19): siRNA sense strand
aagggaagagcauccauga

SEQ ID NO: 1923861 - RNA, 19 nt, Homo sapiens
  misc_RNA (1)...(19): siRNA sense strand
auuaagacccaaagaccua

SEQ ID NO: 1923862 - RNA, 19 nt, Homo sapiens
  misc_RNA (1)...(19): siRNA sense strand
ccaacugugugagagagau

SEQ ID NO: 1923863 - RNA, 19 nt, Homo sapiens
  misc_RNA (1)...(19): siRNA sense strand
ucagcucuacuguguuuga

SEQ ID NO: 1923864 - RNA, 19 nt, Homo sapiens
  misc_RNA (1)...(19): siRNA sense strand
agaguggguuugggagcua

SEQ ID NO: 1923865 - RNA, 19 nt, Homo sapiens
  misc_RNA (1)...(19): siRNA sense strand
gaguggaggcagugaccaa

SEQ ID NO: 1923866 - RNA, 19 nt, Homo sapiens
  misc_RNA (1)...(19): siRNA sense strand
caacuccugcuauuaagac

SEQ ID NO: 1923867 - RNA, 19 nt, Homo sapiens
  misc_RNA (1)...(19): siRNA sense strand
ggccaucaaggaagcgauu

SEQ ID NO: 1923868 - RNA, 19 nt, Homo sapiens
  misc_RNA (1)...(19): siRNA sense strand
gcuauuaagacccaaagac

SEQ ID NO: 1923869 - RNA, 19 nt, Homo sapiens
  misc_RNA (1)...(19): siRNA sense strand
agucggaguauaugucaaa

SEQ ID NO: 1923870 - RNA, 19 nt, Homo sapiens
  misc_RNA (1)...(19): siRNA sense strand
gcgucaaggccaucaagga

SEQ ID NO: 1923871 - RNA, 19 nt, Homo sapiens
  misc_RNA (1)...(19): siRNA sense strand
cauuucugcugcugaugga

SEQ ID NO: 1923872 - RNA, 19 nt, Homo sapiens
  misc_RNA (1)...(19): siRNA sense strand
gaaacggucaaugcacaca

SEQ ID NO: 1923873 - RNA, 19 nt, Homo sapiens
  misc_RNA (1)...(19): siRNA sense strand
gaagagagauaguagaaga

SEQ ID NO: 1923874 - RNA, 19 nt, Homo sapiens
  misc_RNA (1)...(19): siRNA sense strand
caaauaagaugaagagaga

SEQ ID NO: 1923875 - RNA, 19 nt, Homo sapiens
  misc_RNA (1)...(19): siRNA sense strand
gcagaaagagagaggauua

SEQ ID NO: 1923876 - RNA, 19 nt, Homo sapiens
  misc_RNA (1)...(19): siRNA sense strand
gaauacauguuucagagaa

SEQ ID NO: 1923877 - RNA, 19 nt, Homo sapiens
  misc_RNA (1)...(19): siRNA sense strand
aaacaaagguccuauagca

SEQ ID NO: 1923878 - RNA, 19 nt, Homo sapiens
  misc_RNA (1)...(19): siRNA sense strand
aaagauugcucaagaagaa

SEQ ID NO: 1923879 - RNA, 19 nt, Homo sapiens
  misc_RNA (1)...(19): siRNA sense strand
gauaugaacagguggcuua

SEQ ID NO: 1923880 - RNA, 19 nt, Homo sapiens
  misc_RNA (1)...(19): siRNA sense strand
gaucaggaauaucgaaaga

SEQ ID NO: 1923881 - RNA, 19 nt, Homo sapiens
  misc_RNA (1)...(19): siRNA sense strand
agaaagaugcgaagaguua

SEQ ID NO: 1923882 - RNA, 19 nt, Homo sapiens
  misc_RNA (1)...(19): siRNA sense strand
gagaaggaguggccauuau

SEQ ID NO: 1923883 - RNA, 19 nt, Homo sapiens
  misc_RNA (1)...(19): siRNA sense strand
gcgaagggcuggguaugua

SEQ ID NO: 1923884 - RNA, 19 nt, Homo sapiens
  misc_RNA (1)...(19): siRNA sense strand
caagauuacuggagugaga

SEQ ID NO: 1923885 - RNA, 19 nt, Homo sapiens
  misc_RNA (1)...(19): siRNA sense strand
acaaauggaugcacugaga

SEQ ID NO: 1923886 - RNA, 19 nt, Homo sapiens
  misc_RNA (1)...(19): siRNA sense strand
gcacaaaucaaagaagaaa

SEQ ID NO: 1923887 - RNA, 19 nt, Homo sapiens
  misc_RNA (1)...(19): siRNA sense strand
gugacagacuauucaguua

SEQ ID NO: 1923888 - RNA, 19 nt, Homo sapiens
  misc_RNA (1)...(19): siRNA sense strand
ggauuguacuguauaugaa

SEQ ID NO: 1923889 - RNA, 19 nt, Homo sapiens
  misc_RNA (1)...(19): siRNA sense strand
gaacagguggcuuaacaga

SEQ ID NO: 1923890 - RNA, 19 nt, Homo sapiens
  misc_RNA (1)...(19): siRNA sense strand
cagcacaaaucaaagaaga

SEQ ID NO: 1923891 - RNA, 19 nt, Homo sapiens
  misc_RNA (1)...(19): siRNA sense strand
aaaggaagaucaaguaguc

SEQ ID NO: 1923892 - RNA, 19 nt, Homo sapiens
  misc_RNA (1)...(19): siRNA sense strand
ggaucugaaucaccaaauu

SEQ ID NO: 1923893 - RNA, 19 nt, Homo sapiens
  misc_RNA (1)...(19): siRNA sense strand
ggagaaggaguggccauua

SEQ ID NO: 1923894 - RNA, 19 nt, Homo sapiens
  misc_RNA (1)...(19): siRNA sense strand
gaagaauacauguuucaga

SEQ ID NO: 1923895 - RNA, 19 nt, Homo sapiens
  misc_RNA (1)...(19): siRNA sense strand
gaugaaaggucuugaugac

SEQ ID NO: 1923896 - RNA, 19 nt, Homo sapiens
  misc_RNA (1)...(19): siRNA sense strand
ggauuaagcaggaacaaga

SEQ ID NO: 1923897 - RNA, 19 nt, Homo sapiens
  misc_RNA (1)...(19): siRNA sense strand
gaaaggucuugaugacugu

SEQ ID NO: 1923898 - RNA, 19 nt, Homo sapiens
  misc_RNA (1)...(19): siRNA sense strand
gaagauccaaauaagauga

SEQ ID NO: 1923899 - RNA, 19 nt, Homo sapiens
  misc_RNA (1)...(19): siRNA sense strand
ucaggaauaucgaaagaga

SEQ ID NO: 1923900 - RNA, 19 nt, Homo sapiens
  misc_RNA (1)...(19): siRNA sense strand
gggcuggguauguauauua

SEQ ID NO: 1923901 - RNA, 19 nt, Homo sapiens
  misc_RNA (1)...(19): siRNA sense strand
gaaggaguggccauuauga

SEQ ID NO: 1923902 - RNA, 19 nt, Homo sapiens
  misc_RNA (1)...(19): siRNA sense strand
gcagaucggugcaagaaaa

SEQ ID NO: 1923903 - RNA, 19 nt, Homo sapiens
  misc_RNA (1)...(19): siRNA sense strand
caaagccugucauccuaaa

SEQ ID NO: 1923904 - RNA, 19 nt, Homo sapiens
  misc_RNA (1)...(19): siRNA sense strand
gcaaauggucuccgaguca

SEQ ID NO: 1923905 - RNA, 19 nt, Homo sapiens
  misc_RNA (1)...(19): siRNA sense strand
aaagaagggugauaagagu

SEQ ID NO: 1923906 - RNA, 19 nt, Homo sapiens
  misc_RNA (1)...(19): siRNA sense strand
caagaagaauacauguuuc

SEQ ID NO: 1923907 - RNA, 19 nt, Homo sapiens
  misc_RNA (1)...(19): siRNA sense strand
gaagggcuggguauguaua

SEQ ID NO: 1923908 - RNA, 19 nt, Homo sapiens
  misc_RNA (1)...(19): siRNA sense strand
acagguggcuuaacagaau

SEQ ID NO: 1923909 - RNA, 19 nt, Homo sapiens
  misc_RNA (1)...(19): siRNA sense strand
guaguggacuggaugaaag

SEQ ID NO: 1923910 - RNA, 19 nt, Homo sapiens
  misc_RNA (1)...(19): siRNA sense strand
ggagugagagugacaagga

SEQ ID NO: 1923911 - RNA, 19 nt, Homo sapiens
  misc_RNA (1)...(19): siRNA sense strand
aaagaaagaugcgaagagu

SEQ ID NO: 1923912 - RNA, 19 nt, Homo sapiens
  misc_RNA (1)...(19): siRNA sense strand
uagccugccugaauuuaaa

SEQ ID NO: 1923913 - RNA, 19 nt, Homo sapiens
  misc_RNA (1)...(19): siRNA sense strand
ucauaucccugucgucaga

SEQ ID NO: 1923914 - RNA, 19 nt, Homo sapiens
  misc_RNA (1)...(19): siRNA sense strand
cgaccucccucgaugaguu

SEQ ID NO: 1923915 - RNA, 19 nt, Homo sapiens
  misc_RNA (1)...(19): siRNA sense strand
ucauuagccugccugaauu

SEQ ID NO: 1923916 - RNA, 19 nt, Homo sapiens
  misc_RNA (1)...(19): siRNA sense strand
gcauaagggaucugaauca

SEQ ID NO: 1923917 - RNA, 19 nt, Homo sapiens
  misc_RNA (1)...(19): siRNA sense strand
ggaugcaagugcuaaaugg

SEQ ID NO: 1923918 - RNA, 19 nt, Homo sapiens
  misc_RNA (1)...(19): siRNA sense strand
ggaggauucugucuucucu

SEQ ID NO: 1923919 - RNA, 19 nt, Homo sapiens
  misc_RNA (1)...(19): siRNA sense strand
augcaucccuuuauuggua

SEQ ID NO: 1923920 - RNA, 19 nt, Homo sapiens
  misc_RNA (1)...(19): siRNA sense strand
gcuacgaccuauaucuaug

SEQ ID NO: 1923921 - RNA, 19 nt, Homo sapiens
  misc_RNA (1)...(19): siRNA sense strand
cccgagugguguuaucuua

SEQ ID NO: 1923922 - RNA, 19 nt, Homo sapiens
  misc_RNA (1)...(19): siRNA sense strand
guaauagcccaacucacua

SEQ ID NO: 1923923 - RNA, 19 nt, Homo sapiens
  misc_RNA (1)...(19): siRNA sense strand
gacagacuauucaguuaca

SEQ ID NO: 1923924 - RNA, 19 nt, Homo sapiens
  misc_RNA (1)...(19): siRNA sense strand
gauacuccaucaacaccaa

SEQ ID NO: 1923925 - RNA, 19 nt, Homo sapiens
  misc_RNA (1)...(19): siRNA sense strand
caaauggucuccgagucaa

SEQ ID NO: 1923926 - RNA, 19 nt, Homo sapiens
  misc_RNA (1)...(19): siRNA sense strand
cuaccuaguuuacaaaugg

SEQ ID NO: 1923927 - RNA, 19 nt, Homo sapiens
  misc_RNA (1)...(19): siRNA sense strand
ggaugaaaggucuugauga

SEQ ID NO: 1923928 - RNA, 19 nt, Homo sapiens
  misc_RNA (1)...(19): siRNA sense strand
gagcacaggcggcagucua

SEQ ID NO: 1923929 - RNA, 19 nt, Homo sapiens
  misc_RNA (1)...(19): siRNA sense strand
gagagauaguagaagagaa

SEQ ID NO: 1923930 - RNA, 19 nt, Homo sapiens
  misc_RNA (1)...(19): siRNA sense strand
guccuuauguggaagcaaa

SEQ ID NO: 1923931 - RNA, 19 nt, Homo sapiens
  misc_RNA (1)...(19): siRNA sense strand
gagaccacacuauaccaua

SEQ ID NO: 1923932 - RNA, 19 nt, Homo sapiens
  misc_RNA (1)...(19): siRNA sense strand
gcacugagacaagacauca

SEQ ID NO: 1923933 - RNA, 19 nt, Homo sapiens
  misc_RNA (1)...(19): siRNA sense strand
gauacugucuuauauugcu

SEQ ID NO: 1923934 - RNA, 19 nt, Homo sapiens
  misc_RNA (1)...(19): siRNA sense strand
gggcaagccucgaaguuuu

SEQ ID NO: 1923935 - RNA, 19 nt, Homo sapiens
  misc_RNA (1)...(19): siRNA sense strand
gaccuucugugugcauuga

SEQ ID NO: 1923936 - RNA, 19 nt, Homo sapiens
  misc_RNA (1)...(19): siRNA sense strand
agaagcagauacuccauca

SEQ ID NO: 1923937 - RNA, 19 nt, Homo sapiens
  misc_RNA (1)...(19): siRNA sense strand
gagugagagugacaaggaa

SEQ ID NO: 1923938 - RNA, 19 nt, Homo sapiens
  misc_RNA (1)...(19): siRNA sense strand
cuaugaagauccaaauaag

SEQ ID NO: 1923939 - RNA, 19 nt, Homo sapiens
  misc_RNA (1)...(19): siRNA sense strand
gagaaagcaccccaacuua

SEQ ID NO: 1923940 - RNA, 19 nt, Homo sapiens
  misc_RNA (1)...(19): siRNA sense strand
ggcuggguauguauauuaa

SEQ ID NO: 1923941 - RNA, 19 nt, Homo sapiens
  misc_RNA (1)...(19): siRNA sense strand
ugauucagcuggcaaacau

SEQ ID NO: 1923942 - RNA, 19 nt, Homo sapiens
  misc_RNA (1)...(19): siRNA sense strand
gcccaacucacuauucauu

SEQ ID NO: 1923943 - RNA, 19 nt, Homo sapiens
  misc_RNA (1)...(19): siRNA sense strand
cuaugccaguggaauauaa

SEQ ID NO: 1923944 - RNA, 19 nt, Homo sapiens
  misc_RNA (1)...(19): siRNA sense strand
ccuccaggaucucuacauu

SEQ ID NO: 1923945 - RNA, 19 nt, Homo sapiens
  misc_RNA (1)...(19): siRNA sense strand
ggacuaugaagauccaaau

SEQ ID NO: 1923946 - RNA, 19 nt, Homo sapiens
  misc_RNA (1)...(19): siRNA sense strand
uuaagcaggaacaagauua

SEQ ID NO: 1923947 - RNA, 19 nt, Homo sapiens
  misc_RNA (1)...(19): siRNA sense strand
auucauugcuaccuaguuu

SEQ ID NO: 1923948 - RNA, 19 nt, Homo sapiens
  misc_RNA (1)...(19): siRNA sense strand
acacagggaagaagucaaa

SEQ ID NO: 1923949 - RNA, 19 nt, Homo sapiens
  misc_RNA (1)...(19): siRNA sense strand
ggcaagcuacgaccuauau

SEQ ID NO: 1923950 - RNA, 19 nt, Homo sapiens
  misc_RNA (1)...(19): siRNA sense strand
agacgccacugacaaguuc

SEQ ID NO: 1923951 - RNA, 19 nt, Homo sapiens
  misc_RNA (1)...(19): siRNA sense strand
aaagagagaggauuaagca

SEQ ID NO: 1923952 - RNA, 19 nt, Homo sapiens
  misc_RNA (1)...(19): siRNA sense strand
uagcccaacucacuauuca

SEQ ID NO: 1923953 - RNA, 19 nt, Homo sapiens
  misc_RNA (1)...(19): siRNA sense strand
agagauaguagaagagaaa

SEQ ID NO: 1923954 - RNA, 19 nt, Homo sapiens
  misc_RNA (1)...(19): siRNA sense strand
uaucuaugccaguggaaua

SEQ ID NO: 1923955 - RNA, 19 nt, Homo sapiens
  misc_RNA (1)...(19): siRNA sense strand
gaaagcaccccaacuuaug

SEQ ID NO: 1923956 - RNA, 19 nt, Homo sapiens
  misc_RNA (1)...(19): siRNA sense strand
aaacauagccgacuuuccu

SEQ ID NO: 1923957 - RNA, 19 nt, Homo sapiens
  misc_RNA (1)...(19): siRNA sense strand
agacgaauuucuugcaaag

SEQ ID NO: 1923958 - RNA, 19 nt, Homo sapiens
  misc_RNA (1)...(19): siRNA sense strand
gaagggugauaagaguaau

SEQ ID NO: 1923959 - RNA, 19 nt, Homo sapiens
  misc_RNA (1)...(19): siRNA sense strand
aaagcagaaggauucauua

SEQ ID NO: 1923960 - RNA, 19 nt, Homo sapiens
  misc_RNA (1)...(19): siRNA sense strand
ugugagggcuggcuuugga

SEQ ID NO: 1923961 - RNA, 19 nt, Homo sapiens
  misc_RNA (1)...(19): siRNA sense strand
cacacuauaccauacauuu

SEQ ID NO: 1923962 - RNA, 19 nt, Homo sapiens
  misc_RNA (1)...(19): siRNA sense strand
ugccagagaccacacuaua

SEQ ID NO: 1923963 - RNA, 19 nt, Homo sapiens
  misc_RNA (1)...(19): siRNA sense strand
uaccucagcaccagcuuua

SEQ ID NO: 1923964 - RNA, 19 nt, Homo sapiens
  misc_RNA (1)...(19): siRNA sense strand
uaugcugacugcaggauau

SEQ ID NO: 1923965 - RNA, 19 nt, Homo sapiens
  misc_RNA (1)...(19): siRNA sense strand
guuugcagcaguauauuaa

SEQ ID NO: 1923966 - RNA, 19 nt, Homo sapiens
  misc_RNA (1)...(19): siRNA sense strand
ggacccgagugguguuauc

SEQ ID NO: 1923967 - RNA, 19 nt, Homo sapiens
  misc_RNA (1)...(19): siRNA sense strand
uggcaggauuuaauugaga

SEQ ID NO: 1923968 - RNA, 19 nt, Homo sapiens
  misc_RNA (1)...(19): siRNA sense strand
gaaagagagaggauuaagc

SEQ ID NO: 1923969 - RNA, 19 nt, Homo sapiens
  misc_RNA (1)...(19): siRNA sense strand
caaguucaggcuuacacua

SEQ ID NO: 1923970 - RNA, 19 nt, Homo sapiens
  misc_RNA (1)...(19): siRNA sense strand
gagaggaugcaagugcuaa

SEQ ID NO: 1923971 - RNA, 19 nt, Homo sapiens
  misc_RNA (1)...(19): siRNA sense strand
aggauucugucuucucuga

SEQ ID NO: 1923972 - RNA, 19 nt, Homo sapiens
  misc_RNA (1)...(19): siRNA sense strand
ccuggaggauucugucuuc

SEQ ID NO: 1923973 - RNA, 19 nt, Homo sapiens
  misc_RNA (1)...(19): siRNA sense strand
gauaucagcucgcuuggua

SEQ ID NO: 1923974 - RNA, 19 nt, Homo sapiens
  misc_RNA (1)...(19): siRNA sense strand
ggaacaggcuugagaaaca

SEQ ID NO: 1923975 - RNA, 19 nt, Homo sapiens
  misc_RNA (1)...(19): siRNA sense strand
cagcagauguuuauauaga

SEQ ID NO: 1923976 - RNA, 19 nt, Homo sapiens
  misc_RNA (1)...(19): siRNA sense strand
cacagcagauguuuauaua

SEQ ID NO: 1923977 - RNA, 19 nt, Homo sapiens
  misc_RNA (1)...(19): siRNA sense strand
gaaguagaaugucugaaag

SEQ ID NO: 1923978 - RNA, 19 nt, Homo sapiens
  misc_RNA (1)...(19): siRNA sense strand
gcacagcagauguuuauau

SEQ ID NO: 1923979 - RNA, 19 nt, Homo sapiens
  misc_RNA (1)...(19): siRNA sense strand
gcaaugaaguagaaugucu

SEQ ID NO: 1923980 - RNA, 19 nt, Homo sapiens
  misc_RNA (1)...(19): siRNA sense strand
ucaaggagguucucuucaa

SEQ ID NO: 1923981 - RNA, 19 nt, Homo sapiens
  misc_RNA (1)...(19): siRNA sense strand
gaugggagccuacucuuug

SEQ ID NO: 1923982 - RNA, 19 nt, Homo sapiens
  misc_RNA (1)...(19): siRNA sense strand
uaaaucugcucauccuuau

SEQ ID NO: 1923983 - RNA, 19 nt, Homo sapiens
  misc_RNA (1)...(19): siRNA sense strand
gcacgaggcaguagaggaa

SEQ ID NO: 1923984 - RNA, 19 nt, Homo sapiens
  misc_RNA (1)...(19): siRNA sense strand
gauaguagagcacaucuuc

SEQ ID NO: 1923985 - RNA, 19 nt, Homo sapiens
  misc_RNA (1)...(19): siRNA sense strand
gcagugucgucuucuauca

SEQ ID NO: 1923986 - RNA, 19 nt, Homo sapiens
  misc_RNA (1)...(19): siRNA sense strand
ugaaguagaaugucugaaa

SEQ ID NO: 1923987 - RNA, 19 nt, Homo sapiens
  misc_RNA (1)...(19): siRNA sense strand
ggugguauccuuacaauca

SEQ ID NO: 1923988 - RNA, 19 nt, Homo sapiens
  misc_RNA (1)...(19): siRNA sense strand
cagcacauuuggucagaaa

SEQ ID NO: 1923989 - RNA, 19 nt, Homo sapiens
  misc_RNA (1)...(19): siRNA sense strand
uaaggcaggugcagcauca

SEQ ID NO: 1923990 - RNA, 19 nt, Homo sapiens
  misc_RNA (1)...(19): siRNA sense strand
uuaaaucugcucauccuua

SEQ ID NO: 1923991 - RNA, 19 nt, Homo sapiens
  misc_RNA (1)...(19): siRNA sense strand
gcaaguggcagaaguugga

SEQ ID NO: 1923992 - RNA, 19 nt, Homo sapiens
  misc_RNA (1)...(19): siRNA sense strand
gaucaaugcuuuugucaug

SEQ ID NO: 1923993 - RNA, 19 nt, Homo sapiens
  misc_RNA (1)...(19): siRNA sense strand
ccuacccacucaacaguua

SEQ ID NO: 1923994 - RNA, 19 nt, Homo sapiens
  misc_RNA (1)...(19): siRNA sense strand
ggagccuacucuuugaauu

SEQ ID NO: 1923995 - RNA, 19 nt, Homo sapiens
  misc_RNA (1)...(19): siRNA sense strand
uguaugggcucucaucuca

SEQ ID NO: 1923996 - RNA, 19 nt, Homo sapiens
  misc_RNA (1)...(19): siRNA sense strand
ucuaucagcucuauuccuu

SEQ ID NO: 1923997 - RNA, 19 nt, Homo sapiens
  misc_RNA (1)...(19): siRNA sense strand
guucagcuuuaccuucuuu

SEQ ID NO: 1923998 - RNA, 19 nt, Homo sapiens
  misc_RNA (1)...(19): siRNA sense strand
cuacaugguucugauauca

SEQ ID NO: 1923999 - RNA, 19 nt, Homo sapiens
  misc_RNA (1)...(19): siRNA sense strand
guggauggguacuuuguug

SEQ ID NO: 1924000 - RNA, 19 nt, Homo sapiens
  misc_RNA (1)...(19): siRNA sense strand
cuuauuucaucgaccauua

SEQ ID NO: 1924001 - RNA, 19 nt, Homo sapiens
  misc_RNA (1)...(19): siRNA sense strand
gaacaggcuugagaaacag

SEQ ID NO: 1924002 - RNA, 19 nt, Homo sapiens
  misc_RNA (1)...(19): siRNA sense strand
gcaggugcagcaucaauga

SEQ ID NO: 1924003 - RNA, 19 nt, Homo sapiens
  misc_RNA (1)...(19): siRNA sense strand
acaaucauccugcuucuug

SEQ ID NO: 1924004 - RNA, 19 nt, Homo sapiens
  misc_RNA (1)...(19): siRNA sense strand
ggaugggagccuacucuuu

SEQ ID NO: 1924005 - RNA, 19 nt, Homo sapiens
  misc_RNA (1)...(19): siRNA sense strand
uaugggcucucaucucaga

SEQ ID NO: 1924006 - RNA, 19 nt, Homo sapiens
  misc_RNA (1)...(19): siRNA sense strand
gcagugccuucagauguau

SEQ ID NO: 1924007 - RNA, 19 nt, Homo sapiens
  misc_RNA (1)...(19): siRNA sense strand
guucgucauugccaaauuc

SEQ ID NO: 1924008 - RNA, 19 nt, Homo sapiens
  misc_RNA (1)...(19): siRNA sense strand
gguggaggcuguggcaaug

SEQ ID NO: 1924009 - RNA, 19 nt, Homo sapiens
  misc_RNA (1)...(19): siRNA sense strand
gagccuacucuuugaauuc

SEQ ID NO: 1924010 - RNA, 19 nt, Homo sapiens
  misc_RNA (1)...(19): siRNA sense strand
ccucuucagugccuacuau

SEQ ID NO: 1924011 - RNA, 19 nt, Homo sapiens
  misc_RNA (1)...(19): siRNA sense strand
acugugauuugcuacauaa

SEQ ID NO: 1924012 - RNA, 19 nt, Homo sapiens
  misc_RNA (1)...(19): siRNA sense strand
gcuugguacuacucacuuu

SEQ ID NO: 1924013 - RNA, 19 nt, Homo sapiens
  misc_RNA (1)...(19): siRNA sense strand
caauggaacaggcuugaga

SEQ ID NO: 1924014 - RNA, 19 nt, Homo sapiens
  misc_RNA (1)...(19): siRNA sense strand
cggcacagcagauguuuau

SEQ ID NO: 1924015 - RNA, 19 nt, Homo sapiens
  misc_RNA (1)...(19): siRNA sense strand
ugccuacuauguugcauuu

SEQ ID NO: 1924016 - RNA, 19 nt, Homo sapiens
  misc_RNA (1)...(19): siRNA sense strand
guguuuauguuccucuuug

SEQ ID NO: 1924017 - RNA, 19 nt, Homo sapiens
  misc_RNA (1)...(19): siRNA sense strand
uaccuucuuugcagacuuu

SEQ ID NO: 1924018 - RNA, 19 nt, Homo sapiens
  misc_RNA (1)...(19): siRNA sense strand
caacaguuaugagcucaag

SEQ ID NO: 1924019 - RNA, 19 nt, Homo sapiens
  misc_RNA (1)...(19): siRNA sense strand
caaggagguucucuucaac

SEQ ID NO: 1924020 - RNA, 19 nt, Homo sapiens
  misc_RNA (1)...(19): siRNA sense strand
ucacagacuacaacuaugu

SEQ ID NO: 1924021 - RNA, 19 nt, Homo sapiens
  misc_RNA (1)...(19): siRNA sense strand
ucuuguacaucacugaauu

SEQ ID NO: 1924022 - RNA, 19 nt, Homo sapiens
  misc_RNA (1)...(19): siRNA sense strand
ucucacagacuacaacuau

SEQ ID NO: 1924023 - RNA, 19 nt, Homo sapiens
  misc_RNA (1)...(19): siRNA sense strand
gccauucaguccucaaucu

SEQ ID NO: 1924024 - RNA, 19 nt, Homo sapiens
  misc_RNA (1)...(19): siRNA sense strand
gcuguuaaaucugcucauc

SEQ ID NO: 1924025 - RNA, 19 nt, Homo sapiens
  misc_RNA (1)...(19): siRNA sense strand
ucacuacaugguucugaua

SEQ ID NO: 1924026 - RNA, 19 nt, Homo sapiens
  misc_RNA (1)...(19): siRNA sense strand
gcauacuccuacccacuca

SEQ ID NO: 1924027 - RNA, 19 nt, Homo sapiens
  misc_RNA (1)...(19): siRNA sense strand
gcagauuucaaccacagaa

SEQ ID NO: 1924028 - RNA, 19 nt, Homo sapiens
  misc_RNA (1)...(19): siRNA sense strand
gcuacccguuugguguuua

SEQ ID NO: 1924029 - RNA, 19 nt, Homo sapiens
  misc_RNA (1)...(19): siRNA sense strand
guuggacccucgucaaucu

SEQ ID NO: 1924030 - RNA, 19 nt, Homo sapiens
  misc_RNA (1)...(19): siRNA sense strand
caggaaugguagugcuauu

SEQ ID NO: 1924031 - RNA, 19 nt, Homo sapiens
  misc_RNA (1)...(19): siRNA sense strand
ugagggcagugucgucuuc

SEQ ID NO: 1924032 - RNA, 19 nt, Homo sapiens
  misc_RNA (1)...(19): siRNA sense strand
aaucugcucauccuuauug

SEQ ID NO: 1924033 - RNA, 19 nt, Homo sapiens
  misc_RNA (1)...(19): siRNA sense strand
uggcagaaguuggaacaug

SEQ ID NO: 1924034 - RNA, 19 nt, Homo sapiens
  misc_RNA (1)...(19): siRNA sense strand
ggaaugguagugcuauugg

SEQ ID NO: 1924035 - RNA, 19 nt, Homo sapiens
  misc_RNA (1)...(19): siRNA sense strand
guggugguauccuuacaau

SEQ ID NO: 1924036 - RNA, 19 nt, Homo sapiens
  misc_RNA (1)...(19): siRNA sense strand
ccaccuaucacagccuuaa

SEQ ID NO: 1924037 - RNA, 19 nt, Homo sapiens
  misc_RNA (1)...(19): siRNA sense strand
ccauggcucucauccucuu

SEQ ID NO: 1924038 - RNA, 19 nt, Homo sapiens
  misc_RNA (1)...(19): siRNA sense strand
ugguguggaucaaugcuuu

SEQ ID NO: 1924039 - RNA, 19 nt, Homo sapiens
  misc_RNA (1)...(19): siRNA sense strand
auuaucaucuggcagcauu

SEQ ID NO: 1924040 - RNA, 19 nt, Homo sapiens
  misc_RNA (1)...(19): siRNA sense strand
ccuacuauguugcauuucu

SEQ ID NO: 1924041 - RNA, 19 nt, Homo sapiens
  misc_RNA (1)...(19): siRNA sense strand
gaaucaaggagguucucuu

SEQ ID NO: 1924042 - RNA, 19 nt, Homo sapiens
  misc_RNA (1)...(19): siRNA sense strand
agacuacaacuaugugguu

SEQ ID NO: 1924043 - RNA, 19 nt, Homo sapiens
  misc_RNA (1)...(19): siRNA sense strand
cgucuucuaucagcucuau

SEQ ID NO: 1924044 - RNA, 19 nt, Homo sapiens
  misc_RNA (1)...(19): siRNA sense strand
gggcagugucgucuucuau

SEQ ID NO: 1924045 - RNA, 19 nt, Homo sapiens
  misc_RNA (1)...(19): siRNA sense strand
uugagaaacaggaauggua

SEQ ID NO: 1924046 - RNA, 19 nt, Homo sapiens
  misc_RNA (1)...(19): siRNA sense strand
ccauccaaauacugugauu

SEQ ID NO: 1924047 - RNA, 19 nt, Homo sapiens
  misc_RNA (1)...(19): siRNA sense strand
gugggaggcuuggccaaau

SEQ ID NO: 1924048 - RNA, 19 nt, Homo sapiens
  misc_RNA (1)...(19): siRNA sense strand
cuacucacuuuguguggau

SEQ ID NO: 1924049 - RNA, 19 nt, Homo sapiens
  misc_RNA (1)...(19): siRNA sense strand
aauacaauauggccucaag

SEQ ID NO: 1924050 - RNA, 19 nt, Homo sapiens
  misc_RNA (1)...(19): siRNA sense strand
cacaucuucuucucacaga

SEQ ID NO: 1924051 - RNA, 19 nt, Homo sapiens
  misc_RNA (1)...(19): siRNA sense strand
uaguagagcacaucuucuu

SEQ ID NO: 1924052 - RNA, 19 nt, Homo sapiens
  misc_RNA (1)...(19): siRNA sense strand
caaucauccugcuucuugu

SEQ ID NO: 1924053 - RNA, 19 nt, Homo sapiens
  misc_RNA (1)...(19): siRNA sense strand
uacugugauuugcuacaua

SEQ ID NO: 1924054 - RNA, 19 nt, Homo sapiens
  misc_RNA (1)...(19): siRNA sense strand
caagauaguagagcacauc

SEQ ID NO: 1924055 - RNA, 19 nt, Homo sapiens
  misc_RNA (1)...(19): siRNA sense strand
ggauggguacuuuguugga

SEQ ID NO: 1924056 - RNA, 19 nt, Homo sapiens
  misc_RNA (1)...(19): siRNA sense strand
guagagcacaucuucuucu

SEQ ID NO: 1924057 - RNA, 19 nt, Homo sapiens
  misc_RNA (1)...(19): siRNA sense strand
aagacuuucucuccuuguu

SEQ ID NO: 1924058 - RNA, 19 nt, Homo sapiens
  misc_RNA (1)...(19): siRNA sense strand
aaucaaggagguucucuuc

SEQ ID NO: 1924059 - RNA, 19 nt, Homo sapiens
  misc_RNA (1)...(19): siRNA sense strand
cuucagugccuacuauguu

SEQ ID NO: 1924060 - RNA, 19 nt, Homo sapiens
  misc_RNA (1)...(19): siRNA sense strand
acaguguggugguauccuu

SEQ ID NO: 1924061 - RNA, 19 nt, Homo sapiens
  misc_RNA (1)...(19): siRNA sense strand
ccucgucaaucucuuucga

SEQ ID NO: 1924062 - RNA, 19 nt, Homo sapiens
  misc_RNA (1)...(19): siRNA sense strand
gacccucgucaaucucuuu

SEQ ID NO: 1924063 - RNA, 19 nt, Homo sapiens
  misc_RNA (1)...(19): siRNA sense strand
guugguugcucuuuucauu

SEQ ID NO: 1924064 - RNA, 19 nt, Homo sapiens
  misc_RNA (1)...(19): siRNA sense strand
cauggguccuacagcaaug

SEQ ID NO: 1924065 - RNA, 19 nt, Homo sapiens
  misc_RNA (1)...(19): siRNA sense strand
ucagcucgcuugguacuac

SEQ ID NO: 1924066 - RNA, 19 nt, Homo sapiens
  misc_RNA (1)...(19): siRNA sense strand
ccuagucggcaacagcuaa

SEQ ID NO: 1924067 - RNA, 19 nt, Homo sapiens
  misc_RNA (1)...(19): siRNA sense strand
cacagcacauuuggucaga

SEQ ID NO: 1924068 - RNA, 19 nt, Homo sapiens
  misc_RNA (1)...(19): siRNA sense strand
ggacccucgucaaucucuu

SEQ ID NO: 1924069 - RNA, 19 nt, Homo sapiens
  misc_RNA (1)...(19): siRNA sense strand
ccacagaaucaaggagguu

SEQ ID NO: 1924070 - RNA, 19 nt, Homo sapiens
  misc_RNA (1)...(19): siRNA sense strand
gggcaaguggcagaaguug

SEQ ID NO: 1924071 - RNA, 19 nt, Homo sapiens
  misc_RNA (1)...(19): siRNA sense strand
uugccaaauuccugacuug

SEQ ID NO: 1924072 - RNA, 19 nt, Homo sapiens
  misc_RNA (1)...(19): siRNA sense strand
ggucagaaaauacaauaug

SEQ ID NO: 1924073 - RNA, 19 nt, Homo sapiens
  misc_RNA (1)...(19): siRNA sense strand
gaacgcaucuucucuaaac

SEQ ID NO: 1924074 - RNA, 19 nt, Homo sapiens
  misc_RNA (1)...(19): siRNA sense strand
agaaagagcugaagaucaa

SEQ ID NO: 1924075 - RNA, 19 nt, Homo sapiens
  misc_RNA (1)...(19): siRNA sense strand
gaaauacuacgccaucaaa

SEQ ID NO: 1924076 - RNA, 19 nt, Homo sapiens
  misc_RNA (1)...(19): siRNA sense strand
guaauuuccugcccaagaa

SEQ ID NO: 1924077 - RNA, 19 nt, Homo sapiens
  misc_RNA (1)...(19): siRNA sense strand
gaagaucgcagacuuugga

SEQ ID NO: 1924078 - RNA, 19 nt, Homo sapiens
  misc_RNA (1)...(19): siRNA sense strand
ucaaagcacugaagaagca

SEQ ID NO: 1924079 - RNA, 19 nt, Homo sapiens
  misc_RNA (1)...(19): siRNA sense strand
ggacuucgacuuuguguca

SEQ ID NO: 1924080 - RNA, 19 nt, Homo sapiens
  misc_RNA (1)...(19): siRNA sense strand
agaagaagaucauuuacag

SEQ ID NO: 1924081 - RNA, 19 nt, Homo sapiens
  misc_RNA (1)...(19): siRNA sense strand
gggcuugaguucauucaga

SEQ ID NO: 1924082 - RNA, 19 nt, Homo sapiens
  misc_RNA (1)...(19): siRNA sense strand
ccaagaacguggugaaacu

SEQ ID NO: 1924083 - RNA, 19 nt, Homo sapiens
  misc_RNA (1)...(19): siRNA sense strand
gagaagaagaucauuuaca

SEQ ID NO: 1924084 - RNA, 19 nt, Homo sapiens
  misc_RNA (1)...(19): siRNA sense strand
ggaaauacuacgccaucaa

SEQ ID NO: 1924085 - RNA, 19 nt, Homo sapiens
  misc_RNA (1)...(19): siRNA sense strand
acgagaagaagaucauuua

SEQ ID NO: 1924086 - RNA, 19 nt, Homo sapiens
  misc_RNA (1)...(19): siRNA sense strand
cuacguggcuuguguuguc

SEQ ID NO: 1924087 - RNA, 19 nt, Homo sapiens
  misc_RNA (1)...(19): siRNA sense strand
guggugaaacugcuuagua

SEQ ID NO: 1924088 - RNA, 19 nt, Homo sapiens
  misc_RNA (1)...(19): siRNA sense strand
ggaccagaccuuugucauc

SEQ ID NO: 1924089 - RNA, 19 nt, Homo sapiens
  misc_RNA (1)...(19): siRNA sense strand
cuucugcgauccugucauu

SEQ ID NO: 1924090 - RNA, 19 nt, Homo sapiens
  misc_RNA (1)...(19): siRNA sense strand
gcucagccgggacgagaua

SEQ ID NO: 1924091 - RNA, 19 nt, Homo sapiens
  misc_RNA (1)...(19): siRNA sense strand
uucagaagcuccuccagaa

SEQ ID NO: 1924092 - RNA, 19 nt, Homo sapiens
  misc_RNA (1)...(19): siRNA sense strand
ggaguccucucagaaacug

SEQ ID NO: 1924093 - RNA, 19 nt, Homo sapiens
  misc_RNA (1)...(19): siRNA sense strand
aggaacgcaucuucucuaa

SEQ ID NO: 1924094 - RNA, 19 nt, Homo sapiens
  misc_RNA (1)...(19): siRNA sense strand
cagagugacccgagaguug

SEQ ID NO: 1924095 - RNA, 19 nt, Homo sapiens
  misc_RNA (1)...(19): siRNA sense strand
ggcuugaguucauucagaa

SEQ ID NO: 1924096 - RNA, 19 nt, Homo sapiens
  misc_RNA (1)...(19): siRNA sense strand
agccaugccugcuuuguga

SEQ ID NO: 1924097 - RNA, 19 nt, Homo sapiens
  misc_RNA (1)...(19): siRNA sense strand
guggugaccucaugaugca

SEQ ID NO: 1924098 - RNA, 19 nt, Homo sapiens
  misc_RNA (1)...(19): siRNA sense strand
cagaaagagcugaagauca

SEQ ID NO: 1924099 - RNA, 19 nt, Homo sapiens
  misc_RNA (1)...(19): siRNA sense strand
ggaacgcaucuucucuaaa

SEQ ID NO: 1924100 - RNA, 19 nt, Homo sapiens
  misc_RNA (1)...(19): siRNA sense strand
gaacguggugaaacugcuu

SEQ ID NO: 1924101 - RNA, 19 nt, Homo sapiens
  misc_RNA (1)...(19): siRNA sense strand
cagaggaagagguguuuga

SEQ ID NO: 1924102 - RNA, 19 nt, Homo sapiens
  misc_RNA (1)...(19): siRNA sense strand
caucaaagcacugaagaag

SEQ ID NO: 1924103 - RNA, 19 nt, Homo sapiens
  misc_RNA (1)...(19): siRNA sense strand
gggaaauacuacgccauca

SEQ ID NO: 1924104 - RNA, 19 nt, Homo sapiens
  misc_RNA (1)...(19): siRNA sense strand
ccugagggcuucgcagaug

SEQ ID NO: 1924105 - RNA, 19 nt, Homo sapiens
  misc_RNA (1)...(19): siRNA sense strand
caggaacgcaucuucucua

SEQ ID NO: 1924106 - RNA, 19 nt, Homo sapiens
  misc_RNA (1)...(19): siRNA sense strand
uggugaaacugcuuaguag

SEQ ID NO: 1924107 - RNA, 19 nt, Homo sapiens
  misc_RNA (1)...(19): siRNA sense strand
agaucaagguccagccauu

SEQ ID NO: 1924108 - RNA, 19 nt, Homo sapiens
  misc_RNA (1)...(19): siRNA sense strand
cagaagcuccuccagaagu

SEQ ID NO: 1924109 - RNA, 19 nt, Homo sapiens
  misc_RNA (1)...(19): siRNA sense strand
gaucaagguccagccauuc

SEQ ID NO: 1924110 - RNA, 19 nt, Homo sapiens
  misc_RNA (1)...(19): siRNA sense strand
gaagcccaccgcccuaaca

SEQ ID NO: 1924111 - RNA, 19 nt, Homo sapiens
  misc_RNA (1)...(19): siRNA sense strand
ggugcuggcugugcuaaag

SEQ ID NO: 1924112 - RNA, 19 nt, Homo sapiens
  misc_RNA (1)...(19): siRNA sense strand
cccgugagcuggagauugg

SEQ ID NO: 1924113 - RNA, 19 nt, Homo sapiens
  misc_RNA (1)...(19): siRNA sense strand
gcagagugacccgagaguu

SEQ ID NO: 1924114 - RNA, 19 nt, Homo sapiens
  misc_RNA (1)...(19): siRNA sense strand
agaagcuccuccagaagug

SEQ ID NO: 1924115 - RNA, 19 nt, Homo sapiens
  misc_RNA (1)...(19): siRNA sense strand
gcuucuacguggcuugugu

SEQ ID NO: 1924116 - RNA, 19 nt, Homo sapiens
  misc_RNA (1)...(19): siRNA sense strand
gcaggaacgcaucuucucu

SEQ ID NO: 1924117 - RNA, 19 nt, Homo sapiens
  misc_RNA (1)...(19): siRNA sense strand
ucaggacuuccgcugcuua

SEQ ID NO: 1924118 - RNA, 19 nt, Homo sapiens
  misc_RNA (1)...(19): siRNA sense strand
ggauaaccuucugcuggau

SEQ ID NO: 1924119 - RNA, 19 nt, Homo sapiens
  misc_RNA (1)...(19): siRNA sense strand
ggacuuccgcugcuuagcu

SEQ ID NO: 1924120 - RNA, 19 nt, Homo sapiens
  misc_RNA (1)...(19): siRNA sense strand
ccagaaagagcugaagauc

SEQ ID NO: 1924121 - RNA, 19 nt, Homo sapiens
  misc_RNA (1)...(19): siRNA sense strand
cacgagaagaagaucauuu

SEQ ID NO: 1924122 - RNA, 19 nt, Homo sapiens
  misc_RNA (1)...(19): siRNA sense strand
caaugccugucaccaacug

SEQ ID NO: 1924123 - RNA, 19 nt, Homo sapiens
  misc_RNA (1)...(19): siRNA sense strand
caagguccagccauucuuc

SEQ ID NO: 1924124 - RNA, 19 nt, Homo sapiens
  misc_RNA (1)...(19): siRNA sense strand
cuccagccaugccugcuuu

SEQ ID NO: 1924125 - RNA, 19 nt, Homo sapiens
  misc_RNA (1)...(19): siRNA sense strand
gacccugccacucccagua

SEQ ID NO: 1924126 - RNA, 19 nt, Homo sapiens
  misc_RNA (1)...(19): siRNA sense strand
gcaccaaacguccccauau

SEQ ID NO: 1924127 - RNA, 19 nt, Homo sapiens
  misc_RNA (1)...(19): siRNA sense strand
cgagauagagagccuguac

SEQ ID NO: 1924128 - RNA, 19 nt, Homo sapiens
  misc_RNA (1)...(19): siRNA sense strand
ggacuggcggcagcuaugu

SEQ ID NO: 1924129 - RNA, 19 nt, Homo sapiens
  misc_RNA (1)...(19): siRNA sense strand
cugcggaccugcgcuacuu

SEQ ID NO: 1924130 - RNA, 19 nt, Homo sapiens
  misc_RNA (1)...(19): siRNA sense strand
uggcguggccuuccugaga

SEQ ID NO: 1924131 - RNA, 19 nt, Homo sapiens
  misc_RNA (1)...(19): siRNA sense strand
ccugaagaucgcagacuuu

SEQ ID NO: 1924132 - RNA, 19 nt, Homo sapiens
  misc_RNA (1)...(19): siRNA sense strand
ccugagacuugaggacuuc

SEQ ID NO: 1924133 - RNA, 19 nt, Homo sapiens
  misc_RNA (1)...(19): siRNA sense strand
gcaggaugccgaggagauc

SEQ ID NO: 1924134 - RNA, 19 nt, Homo sapiens
  misc_RNA (1)...(19): siRNA sense strand
gcgccaagaacguggugaa

SEQ ID NO: 1924135 - RNA, 19 nt, Homo sapiens
  misc_RNA (1)...(19): siRNA sense strand
ucugcgauccugucauuga

SEQ ID NO: 1924136 - RNA, 19 nt, Homo sapiens
  misc_RNA (1)...(19): siRNA sense strand
gaccugaaguuggauaacc

SEQ ID NO: 1924137 - RNA, 19 nt, Homo sapiens
  misc_RNA (1)...(19): siRNA sense strand
auguggagcugaaggugaa

SEQ ID NO: 1924138 - RNA, 19 nt, Homo sapiens
  misc_RNA (1)...(19): siRNA sense strand
caccaaacguccccauaug

SEQ ID NO: 1924139 - RNA, 19 nt, Homo sapiens
  misc_RNA (1)...(19): siRNA sense strand
cugagggcuucgcagauga

SEQ ID NO: 1924140 - RNA, 19 nt, Homo sapiens
  misc_RNA (1)...(19): siRNA sense strand
gaauacaaguccucaaaua

SEQ ID NO: 1924141 - RNA, 19 nt, Homo sapiens
  misc_RNA (1)...(19): siRNA sense strand
ggaaggauguuguggauaa

SEQ ID NO: 1924142 - RNA, 19 nt, Homo sapiens
  misc_RNA (1)...(19): siRNA sense strand
gaacagugcccaaauuaaa

SEQ ID NO: 1924143 - RNA, 19 nt, Homo sapiens
  misc_RNA (1)...(19): siRNA sense strand
caaacuagaugucuucaga

SEQ ID NO: 1924144 - RNA, 19 nt, Homo sapiens
  misc_RNA (1)...(19): siRNA sense strand
gagaaugcauggccaacua

SEQ ID NO: 1924145 - RNA, 19 nt, Homo sapiens
  misc_RNA (1)...(19): siRNA sense strand
ggagguggcuguuucauca

SEQ ID NO: 1924146 - RNA, 19 nt, Homo sapiens
  misc_RNA (1)...(19): siRNA sense strand
ggaaaggaccuacgagaaa

SEQ ID NO: 1924147 - RNA, 19 nt, Homo sapiens
  misc_RNA (1)...(19): siRNA sense strand
gaaaggaccuacgagaaau

SEQ ID NO: 1924148 - RNA, 19 nt, Homo sapiens
  misc_RNA (1)...(19): siRNA sense strand
caacuaagccuuccucaau

SEQ ID NO: 1924149 - RNA, 19 nt, Homo sapiens
  misc_RNA (1)...(19): siRNA sense strand
gagcgaggauuuaauaaca

SEQ ID NO: 1924150 - RNA, 19 nt, Homo sapiens
  misc_RNA (1)...(19): siRNA sense strand
gcaaagagcgaggauuuaa

SEQ ID NO: 1924151 - RNA, 19 nt, Homo sapiens
  misc_RNA (1)...(19): siRNA sense strand
ccacauucgucaucaagua

SEQ ID NO: 1924152 - RNA, 19 nt, Homo sapiens
  misc_RNA (1)...(19): siRNA sense strand
gaacuguacaugugaaauu

SEQ ID NO: 1924153 - RNA, 19 nt, Homo sapiens
  misc_RNA (1)...(19): siRNA sense strand
gaacaaucguauuuccuau

SEQ ID NO: 1924154 - RNA, 19 nt, Homo sapiens
  misc_RNA (1)...(19): siRNA sense strand
gagacuauaucuacaugaa

SEQ ID NO: 1924155 - RNA, 19 nt, Homo sapiens
  misc_RNA (1)...(19): siRNA sense strand
cuagaugucuucagaaaug

SEQ ID NO: 1924156 - RNA, 19 nt, Homo sapiens
  misc_RNA (1)...(19): siRNA sense strand
aaagagcgaggauuuaaua

SEQ ID NO: 1924157 - RNA, 19 nt, Homo sapiens
  misc_RNA (1)...(19): siRNA sense strand
ccaaggagaaccauaguaa

SEQ ID NO: 1924158 - RNA, 19 nt, Homo sapiens
  misc_RNA (1)...(19): siRNA sense strand
guaauuugcacaucaauga

SEQ ID NO: 1924159 - RNA, 19 nt, Homo sapiens
  misc_RNA (1)...(19): siRNA sense strand
gaaguucuuugcccagaga

SEQ ID NO: 1924160 - RNA, 19 nt, Homo sapiens
  misc_RNA (1)...(19): siRNA sense strand
gaggaaggauguuguggau

SEQ ID NO: 1924161 - RNA, 19 nt, Homo sapiens
  misc_RNA (1)...(19): siRNA sense strand
gaaauuguacaacugaaga

SEQ ID NO: 1924162 - RNA, 19 nt, Homo sapiens
  misc_RNA (1)...(19): siRNA sense strand
gaaauagguuaaagguucu

SEQ ID NO: 1924163 - RNA, 19 nt, Homo sapiens
  misc_RNA (1)...(19): siRNA sense strand
gcgaggauuuaauaacauu

SEQ ID NO: 1924164 - RNA, 19 nt, Homo sapiens
  misc_RNA (1)...(19): siRNA sense strand
gcaggcagauuacaauguc

SEQ ID NO: 1924165 - RNA, 19 nt, Homo sapiens
  misc_RNA (1)...(19): siRNA sense strand
gggccaaacuucaaaccaa

SEQ ID NO: 1924166 - RNA, 19 nt, Homo sapiens
  misc_RNA (1)...(19): siRNA sense strand
ggaacagugcccaaauuaa

SEQ ID NO: 1924167 - RNA, 19 nt, Homo sapiens
  misc_RNA (1)...(19): siRNA sense strand
gugauuaccucgaguuaag

SEQ ID NO: 1924168 - RNA, 19 nt, Homo sapiens
  misc_RNA (1)...(19): siRNA sense strand
gccaagaaacuguaucuga

SEQ ID NO: 1924169 - RNA, 19 nt, Homo sapiens
  misc_RNA (1)...(19): siRNA sense strand
ggacucagaggaaauagau

SEQ ID NO: 1924170 - RNA, 19 nt, Homo sapiens
  misc_RNA (1)...(19): siRNA sense strand
ucaaugcuauccucuguuc

SEQ ID NO: 1924171 - RNA, 19 nt, Homo sapiens
  misc_RNA (1)...(19): siRNA sense strand
ugaauaaugcugugucuau

SEQ ID NO: 1924172 - RNA, 19 nt, Homo sapiens
  misc_RNA (1)...(19): siRNA sense strand
aagaaacuguaucugagua

SEQ ID NO: 1924173 - RNA, 19 nt, Homo sapiens
  misc_RNA (1)...(19): siRNA sense strand
ggaccuuacuggcauccaa

SEQ ID NO: 1924174 - RNA, 19 nt, Homo sapiens
  misc_RNA (1)...(19): siRNA sense strand
ugcaucaccuuaugaguuu

SEQ ID NO: 1924175 - RNA, 19 nt, Homo sapiens
  misc_RNA (1)...(19): siRNA sense strand
gaaaccaucagcucaguca

SEQ ID NO: 1924176 - RNA, 19 nt, Homo sapiens
  misc_RNA (1)...(19): siRNA sense strand
auuuaaggcugucucuuua

SEQ ID NO: 1924177 - RNA, 19 nt, Homo sapiens
  misc_RNA (1)...(19): siRNA sense strand
cagcuuaacaccauaguga

SEQ ID NO: 1924178 - RNA, 19 nt, Homo sapiens
  misc_RNA (1)...(19): siRNA sense strand
ugggagacauuaccuguga

SEQ ID NO: 1924179 - RNA, 19 nt, Homo sapiens
  misc_RNA (1)...(19): siRNA sense strand
gaacuacuuccucuaucuu

SEQ ID NO: 1924180 - RNA, 19 nt, Homo sapiens
  misc_RNA (1)...(19): siRNA sense strand
ucauauacauugugacagu

SEQ ID NO: 1924181 - RNA, 19 nt, Homo sapiens
  misc_RNA (1)...(19): siRNA sense strand
uaccggaccuugcuggaaa

SEQ ID NO: 1924182 - RNA, 19 nt, Homo sapiens
  misc_RNA (1)...(19): siRNA sense strand
cuuggaaagucuagaauau

SEQ ID NO: 1924183 - RNA, 19 nt, Homo sapiens
  misc_RNA (1)...(19): siRNA sense strand
ccuaggaagugagcaguuu

SEQ ID NO: 1924184 - RNA, 19 nt, Homo sapiens
  misc_RNA (1)...(19): siRNA sense strand
gggugaggcucuccuagga

SEQ ID NO: 1924185 - RNA, 19 nt, Homo sapiens
  misc_RNA (1)...(19): siRNA sense strand
gaacgcauuccuuauacug

SEQ ID NO: 1924186 - RNA, 19 nt, Homo sapiens
  misc_RNA (1)...(19): siRNA sense strand
gacuggagcuuucaauggu

SEQ ID NO: 1924187 - RNA, 19 nt, Homo sapiens
  misc_RNA (1)...(19): siRNA sense strand
caugcaauacccagacuua

SEQ ID NO: 1924188 - RNA, 19 nt, Homo sapiens
  misc_RNA (1)...(19): siRNA sense strand
gaaggauguuguggauaau

SEQ ID NO: 1924189 - RNA, 19 nt, Homo sapiens
  misc_RNA (1)...(19): siRNA sense strand
uuagucagauuaccgaguu

SEQ ID NO: 1924190 - RNA, 19 nt, Homo sapiens
  misc_RNA (1)...(19): siRNA sense strand
uggaacagugcccaaauua

SEQ ID NO: 1924191 - RNA, 19 nt, Homo sapiens
  misc_RNA (1)...(19): siRNA sense strand
ggacacaaccaccgggaau

SEQ ID NO: 1924192 - RNA, 19 nt, Homo sapiens
  misc_RNA (1)...(19): siRNA sense strand
gugcaucaccuuaugaguu

SEQ ID NO: 1924193 - RNA, 19 nt, Homo sapiens
  misc_RNA (1)...(19): siRNA sense strand
gcaacgauauagagaagcu

SEQ ID NO: 1924194 - RNA, 19 nt, Homo sapiens
  misc_RNA (1)...(19): siRNA sense strand
caacuugcccaacuuaaag

SEQ ID NO: 1924195 - RNA, 19 nt, Homo sapiens
  misc_RNA (1)...(19): siRNA sense strand
acaaucguauuuccuaugu

SEQ ID NO: 1924196 - RNA, 19 nt, Homo sapiens
  misc_RNA (1)...(19): siRNA sense strand
gaggcuaguuugggaauuc

SEQ ID NO: 1924197 - RNA, 19 nt, Homo sapiens
  misc_RNA (1)...(19): siRNA sense strand
gaaaacccuuggaacugua

SEQ ID NO: 1924198 - RNA, 19 nt, Homo sapiens
  misc_RNA (1)...(19): siRNA sense strand
gaggaaugcuagaucacau

SEQ ID NO: 1924199 - RNA, 19 nt, Homo sapiens
  misc_RNA (1)...(19): siRNA sense strand
uaaauugaggguucugauu

SEQ ID NO: 1924200 - RNA, 19 nt, Homo sapiens
  misc_RNA (1)...(19): siRNA sense strand
gcauuucggaaccuaagua

SEQ ID NO: 1924201 - RNA, 19 nt, Homo sapiens
  misc_RNA (1)...(19): siRNA sense strand
cauauacauugugacagua

SEQ ID NO: 1924202 - RNA, 19 nt, Homo sapiens
  misc_RNA (1)...(19): siRNA sense strand
caagccggauuaccucgaa

SEQ ID NO: 1924203 - RNA, 19 nt, Homo sapiens
  misc_RNA (1)...(19): siRNA sense strand
gcucccagcuuaacaccau

SEQ ID NO: 1924204 - RNA, 19 nt, Homo sapiens
  misc_RNA (1)...(19): siRNA sense strand
caaccagugcaucaccuua

SEQ ID NO: 1924205 - RNA, 19 nt, Homo sapiens
  misc_RNA (1)...(19): siRNA sense strand
uauuuaaggcugucucuuu

SEQ ID NO: 1924206 - RNA, 19 nt, Homo sapiens
  misc_RNA (1)...(19): siRNA sense strand
uggaaagucuagaauaucu

SEQ ID NO: 1924207 - RNA, 19 nt, Homo sapiens
  misc_RNA (1)...(19): siRNA sense strand
cuauuaaucuugggaacaa

SEQ ID NO: 1924208 - RNA, 19 nt, Homo sapiens
  misc_RNA (1)...(19): siRNA sense strand
gaggaauucuaugaggaaa

SEQ ID NO: 1924209 - RNA, 19 nt, Homo sapiens
  misc_RNA (1)...(19): siRNA sense strand
gcuauccucuguucauuuu

SEQ ID NO: 1924210 - RNA, 19 nt, Homo sapiens
  misc_RNA (1)...(19): siRNA sense strand
aaauagaugagcccuguuu

SEQ ID NO: 1924211 - RNA, 19 nt, Homo sapiens
  misc_RNA (1)...(19): siRNA sense strand
aaacaaacuagaugucuuc

SEQ ID NO: 1924212 - RNA, 19 nt, Homo sapiens
  misc_RNA (1)...(19): siRNA sense strand
cuauugagcuggaaguucu

SEQ ID NO: 1924213 - RNA, 19 nt, Homo sapiens
  misc_RNA (1)...(19): siRNA sense strand
uaucaacuugcccaacuua

SEQ ID NO: 1924214 - RNA, 19 nt, Homo sapiens
  misc_RNA (1)...(19): siRNA sense strand
ccucaaugcuauccucugu

SEQ ID NO: 1924215 - RNA, 19 nt, Homo sapiens
  misc_RNA (1)...(19): siRNA sense strand
gcuuggaaagucuagaaua

SEQ ID NO: 1924216 - RNA, 19 nt, Homo sapiens
  misc_RNA (1)...(19): siRNA sense strand
agaacucugucccuuguug

SEQ ID NO: 1924217 - RNA, 19 nt, Homo sapiens
  misc_RNA (1)...(19): siRNA sense strand
gaugccaggcucaaagaaa

SEQ ID NO: 1924218 - RNA, 19 nt, Homo sapiens
  misc_RNA (1)...(19): siRNA sense strand
cuacagaguuugcacuacu

SEQ ID NO: 1924219 - RNA, 19 nt, Homo sapiens
  misc_RNA (1)...(19): siRNA sense strand
ucaacuugcccaacuuaaa

SEQ ID NO: 1924220 - RNA, 19 nt, Homo sapiens
  misc_RNA (1)...(19): siRNA sense strand
ccaugcuacugugaaguua

SEQ ID NO: 1924221 - RNA, 19 nt, Homo sapiens
  misc_RNA (1)...(19): siRNA sense strand
gaaaauauaccguucugau

SEQ ID NO: 1924222 - RNA, 19 nt, Homo sapiens
  misc_RNA (1)...(19): siRNA sense strand
cugcaaagagcgaggauuu

SEQ ID NO: 1924223 - RNA, 19 nt, Homo sapiens
  misc_RNA (1)...(19): siRNA sense strand
ccacuggguguaccuguaa

SEQ ID NO: 1924224 - RNA, 19 nt, Homo sapiens
  misc_RNA (1)...(19): siRNA sense strand
aacuagaugucuucagaaa

SEQ ID NO: 1924225 - RNA, 19 nt, Homo sapiens
  misc_RNA (1)...(19): siRNA sense strand
gauccaugcuacugugaag

SEQ ID NO: 1924226 - RNA, 19 nt, Homo sapiens
  misc_RNA (1)...(19): siRNA sense strand
ggguguaccuguaauuugc

SEQ ID NO: 1924227 - RNA, 19 nt, Homo sapiens
  misc_RNA (1)...(19): siRNA sense strand
caugugaaauuguacaacu

SEQ ID NO: 1924228 - RNA, 19 nt, Homo sapiens
  misc_RNA (1)...(19): siRNA sense strand
uuuaaacaguggaucgaaa

SEQ ID NO: 1924229 - RNA, 19 nt, Homo sapiens
  misc_RNA (1)...(19): siRNA sense strand
caaagagcgaggauuuaau

SEQ ID NO: 1924230 - RNA, 19 nt, Homo sapiens
  misc_RNA (1)...(19): siRNA sense strand
guuaagggccaaacuucaa

SEQ ID NO: 1924231 - RNA, 19 nt, Homo sapiens
  misc_RNA (1)...(19): siRNA sense strand
gcaauacccagacuuacag

SEQ ID NO: 1924232 - RNA, 19 nt, Homo sapiens
  misc_RNA (1)...(19): siRNA sense strand
caacaguuuucuucauuug

SEQ ID NO: 1924233 - RNA, 19 nt, Homo sapiens
  misc_RNA (1)...(19): siRNA sense strand
gacaacauacagguucuaa

SEQ ID NO: 1924234 - RNA, 19 nt, Homo sapiens
  misc_RNA (1)...(19): siRNA sense strand
gccacuuucuguguuaauu

SEQ ID NO: 1924235 - RNA, 19 nt, Homo sapiens
  misc_RNA (1)...(19): siRNA sense strand
ccaaaccagccucccauug

SEQ ID NO: 1924236 - RNA, 19 nt, Homo sapiens
  misc_RNA (1)...(19): siRNA sense strand
gaaaucaggaagacagaac

SEQ ID NO: 1924237 - RNA, 19 nt, Homo sapiens
  misc_RNA (1)...(19): siRNA sense strand
ccaaccaauuuauuuaagg

SEQ ID NO: 1924238 - RNA, 19 nt, Homo sapiens
  misc_RNA (1)...(19): siRNA sense strand
gaugagcccuguuuugauc

SEQ ID NO: 1924239 - RNA, 19 nt, Homo sapiens
  misc_RNA (1)...(19): siRNA sense strand
gcacccuccuggcaugcaa

SEQ ID NO: 1924240 - RNA, 19 nt, Homo sapiens
  misc_RNA (1)...(19): siRNA sense strand
gaaagaagcuuaucugcaa

SEQ ID NO: 1924241 - RNA, 19 nt, Homo sapiens
  misc_RNA (1)...(19): siRNA sense strand
uaagagaccuuccaaguuu

SEQ ID NO: 1924242 - RNA, 19 nt, Homo sapiens
  misc_RNA (1)...(19): siRNA sense strand
guagaaaccugauacauga

SEQ ID NO: 1924243 - RNA, 19 nt, Homo sapiens
  misc_RNA (1)...(19): siRNA sense strand
gagcuaggauuucauagua

SEQ ID NO: 1924244 - RNA, 19 nt, Homo sapiens
  misc_RNA (1)...(19): siRNA sense strand
gaagagcaaucaucucaaa

SEQ ID NO: 1924245 - RNA, 19 nt, Homo sapiens
  misc_RNA (1)...(19): siRNA sense strand
gcaaucaucucaaacaguu

SEQ ID NO: 1924246 - RNA, 19 nt, Homo sapiens
  misc_RNA (1)...(19): siRNA sense strand
cagcauaccuaauaauuug

SEQ ID NO: 1924247 - RNA, 19 nt, Homo sapiens
  misc_RNA (1)...(19): siRNA sense strand
uaaagaagacuggaaguua

SEQ ID NO: 1924248 - RNA, 19 nt, Homo sapiens
  misc_RNA (1)...(19): siRNA sense strand
gaauuaacuuccuuuccua

SEQ ID NO: 1924249 - RNA, 19 nt, Homo sapiens
  misc_RNA (1)...(19): siRNA sense strand
caaaguagcuggguuucuu

SEQ ID NO: 1924250 - RNA, 19 nt, Homo sapiens
  misc_RNA (1)...(19): siRNA sense strand
uaacaacauuugcaucuug

SEQ ID NO: 1924251 - RNA, 19 nt, Homo sapiens
  misc_RNA (1)...(19): siRNA sense strand
uaacaaagccaguaucaug

SEQ ID NO: 1924252 - RNA, 19 nt, Homo sapiens
  misc_RNA (1)...(19): siRNA sense strand
gcuagcaacugucgaaaga

SEQ ID NO: 1924253 - RNA, 19 nt, Homo sapiens
  misc_RNA (1)...(19): siRNA sense strand
gaacucagcaucucacaau

SEQ ID NO: 1924254 - RNA, 19 nt, Homo sapiens
  misc_RNA (1)...(19): siRNA sense strand
gaagaugcauuuaagaacu

SEQ ID NO: 1924255 - RNA, 19 nt, Homo sapiens
  misc_RNA (1)...(19): siRNA sense strand
uaaccuagauguaaguuuc

SEQ ID NO: 1924256 - RNA, 19 nt, Homo sapiens
  misc_RNA (1)...(19): siRNA sense strand
ggacuuuggacuugucuua

SEQ ID NO: 1924257 - RNA, 19 nt, Homo sapiens
  misc_RNA (1)...(19): siRNA sense strand
gcgcuaugcuuacaaucua

SEQ ID NO: 1924258 - RNA, 19 nt, Homo sapiens
  misc_RNA (1)...(19): siRNA sense strand
ccugauaucucuaaggauu

SEQ ID NO: 1924259 - RNA, 19 nt, Homo sapiens
  misc_RNA (1)...(19): siRNA sense strand
gaacuuuccuuuucuagaa

SEQ ID NO: 1924260 - RNA, 19 nt, Homo sapiens
  misc_RNA (1)...(19): siRNA sense strand
gaagaagauuccuuugucu

SEQ ID NO: 1924261 - RNA, 19 nt, Homo sapiens
  misc_RNA (1)...(19): siRNA sense strand
uggcuaaucuucaccaauu

SEQ ID NO: 1924262 - RNA, 19 nt, Homo sapiens
  misc_RNA (1)...(19): siRNA sense strand
gccaauaacuaaccuagau

SEQ ID NO: 1924263 - RNA, 19 nt, Homo sapiens
  misc_RNA (1)...(19): siRNA sense strand
ggagaaagguacugcugau

SEQ ID NO: 1924264 - RNA, 19 nt, Homo sapiens
  misc_RNA (1)...(19): siRNA sense strand
ggaacaggauuucuacuac

SEQ ID NO: 1924265 - RNA, 19 nt, Homo sapiens
  misc_RNA (1)...(19): siRNA sense strand
acacuaagcuauacugcaa

SEQ ID NO: 1924266 - RNA, 19 nt, Homo sapiens
  misc_RNA (1)...(19): siRNA sense strand
ucauuaggauucacuguaa

SEQ ID NO: 1924267 - RNA, 19 nt, Homo sapiens
  misc_RNA (1)...(19): siRNA sense strand
gaaagguacugcugaugca

SEQ ID NO: 1924268 - RNA, 19 nt, Homo sapiens
  misc_RNA (1)...(19): siRNA sense strand
gaaacgccaucauuaggau

SEQ ID NO: 1924269 - RNA, 19 nt, Homo sapiens
  misc_RNA (1)...(19): siRNA sense strand
gaagucuguuacucugaua

SEQ ID NO: 1924270 - RNA, 19 nt, Homo sapiens
  misc_RNA (1)...(19): siRNA sense strand
gcagcauaccuaauaauuu

SEQ ID NO: 1924271 - RNA, 19 nt, Homo sapiens
  misc_RNA (1)...(19): siRNA sense strand
uaagcccugugaauauuua

SEQ ID NO: 1924272 - RNA, 19 nt, Homo sapiens
  misc_RNA (1)...(19): siRNA sense strand
gaaauucacaguagagcuu

SEQ ID NO: 1924273 - RNA, 19 nt, Homo sapiens
  misc_RNA (1)...(19): siRNA sense strand
gcaacgaccuuucuuuuau

SEQ ID NO: 1924274 - RNA, 19 nt, Homo sapiens
  misc_RNA (1)...(19): siRNA sense strand
ugaagaagauuccuuuguc

SEQ ID NO: 1924275 - RNA, 19 nt, Homo sapiens
  misc_RNA (1)...(19): siRNA sense strand
aggauucacuguaacguua

SEQ ID NO: 1924276 - RNA, 19 nt, Homo sapiens
  misc_RNA (1)...(19): siRNA sense strand
uaacuaaccuagauguaag

SEQ ID NO: 1924277 - RNA, 19 nt, Homo sapiens
  misc_RNA (1)...(19): siRNA sense strand
uuaaagagcuaggauuuca

SEQ ID NO: 1924278 - RNA, 19 nt, Homo sapiens
  misc_RNA (1)...(19): siRNA sense strand
ugaacaacauuacucaguu

SEQ ID NO: 1924279 - RNA, 19 nt, Homo sapiens
  misc_RNA (1)...(19): siRNA sense strand
uaagcagcauaccuaauaa

SEQ ID NO: 1924280 - RNA, 19 nt, Homo sapiens
  misc_RNA (1)...(19): siRNA sense strand
cucagcaucucacaauuua

SEQ ID NO: 1924281 - RNA, 19 nt, Homo sapiens
  misc_RNA (1)...(19): siRNA sense strand
ucacacagcuguccugcau

SEQ ID NO: 1924282 - RNA, 19 nt, Homo sapiens
  misc_RNA (1)...(19): siRNA sense strand
uagauaaccuggagaccuu

SEQ ID NO: 1924283 - RNA, 19 nt, Homo sapiens
  misc_RNA (1)...(19): siRNA sense strand
uuacugaagcgacguguua

SEQ ID NO: 1924284 - RNA, 19 nt, Homo sapiens
  misc_RNA (1)...(19): siRNA sense strand
auaagcagcauaccuaaua

SEQ ID NO: 1924285 - RNA, 19 nt, Homo sapiens
  misc_RNA (1)...(19): siRNA sense strand
gguaauccacucuuaagaa

SEQ ID NO: 1924286 - RNA, 19 nt, Homo sapiens
  misc_RNA (1)...(19): siRNA sense strand
acacagcuguccugcauug

SEQ ID NO: 1924287 - RNA, 19 nt, Homo sapiens
  misc_RNA (1)...(19): siRNA sense strand
gcaugucgcuuggcuaauc

SEQ ID NO: 1924288 - RNA, 19 nt, Homo sapiens
  misc_RNA (1)...(19): siRNA sense strand
gaucuucauucccuaguca

SEQ ID NO: 1924289 - RNA, 19 nt, Homo sapiens
  misc_RNA (1)...(19): siRNA sense strand
gccagaagaugcauuuaag

SEQ ID NO: 1924290 - RNA, 19 nt, Homo sapiens
  misc_RNA (1)...(19): siRNA sense strand
ggccugauaucucuaagga

SEQ ID NO: 1924291 - RNA, 19 nt, Homo sapiens
  misc_RNA (1)...(19): siRNA sense strand
gauggagcauuugauggua

SEQ ID NO: 1924292 - RNA, 19 nt, Homo sapiens
  misc_RNA (1)...(19): siRNA sense strand
aauccacucuuaagaacua

SEQ ID NO: 1924293 - RNA, 19 nt, Homo sapiens
  misc_RNA (1)...(19): siRNA sense strand
gcuaggauuucauaguaau

SEQ ID NO: 1924294 - RNA, 19 nt, Homo sapiens
  misc_RNA (1)...(19): siRNA sense strand
ucagaaaacucacaaucua

SEQ ID NO: 1924295 - RNA, 19 nt, Homo sapiens
  misc_RNA (1)...(19): siRNA sense strand
gggaagagcaaucaucuca

SEQ ID NO: 1924296 - RNA, 19 nt, Homo sapiens
  misc_RNA (1)...(19): siRNA sense strand
cucagaaagugccauauuu

SEQ ID NO: 1924297 - RNA, 19 nt, Homo sapiens
  misc_RNA (1)...(19): siRNA sense strand
guacaaagauaagcagcau

SEQ ID NO: 1924298 - RNA, 19 nt, Homo sapiens
  misc_RNA (1)...(19): siRNA sense strand
gaaaccugauacaugaaau

SEQ ID NO: 1924299 - RNA, 19 nt, Homo sapiens
  misc_RNA (1)...(19): siRNA sense strand
uacaaucuaccaagaguua

SEQ ID NO: 1924300 - RNA, 19 nt, Homo sapiens
  misc_RNA (1)...(19): siRNA sense strand
cagaagaugcauuuaagaa

SEQ ID NO: 1924301 - RNA, 19 nt, Homo sapiens
  misc_RNA (1)...(19): siRNA sense strand
ccaaggugguugucuggaa

SEQ ID NO: 1924302 - RNA, 19 nt, Homo sapiens
  misc_RNA (1)...(19): siRNA sense strand
aaagaagacuggaaguuac

SEQ ID NO: 1924303 - RNA, 19 nt, Homo sapiens
  misc_RNA (1)...(19): siRNA sense strand
auacuggcauccuaacuuu

SEQ ID NO: 1924304 - RNA, 19 nt, Homo sapiens
  misc_RNA (1)...(19): siRNA sense strand
uuagaugccaaccauauua

SEQ ID NO: 1924305 - RNA, 19 nt, Homo sapiens
  misc_RNA (1)...(19): siRNA sense strand
caagaaaaguggaucaguu

SEQ ID NO: 1924306 - RNA, 19 nt, Homo sapiens
  misc_RNA (1)...(19): siRNA sense strand
cuaaaucaacugaaacuug

SEQ ID NO: 1924307 - RNA, 19 nt, Homo sapiens
  misc_RNA (1)...(19): siRNA sense strand
cgaaugggcuaaaucaacu

SEQ ID NO: 1924308 - RNA, 19 nt, Homo sapiens
  misc_RNA (1)...(19): siRNA sense strand
gccaugcucuggaagaaau

SEQ ID NO: 1924309 - RNA, 19 nt, Homo sapiens
  misc_RNA (1)...(19): siRNA sense strand
guaauccacucuuaagaac

SEQ ID NO: 1924310 - RNA, 19 nt, Homo sapiens
  misc_RNA (1)...(19): siRNA sense strand
aaagagcuaggauuucaua

SEQ ID NO: 1924311 - RNA, 19 nt, Homo sapiens
  misc_RNA (1)...(19): siRNA sense strand
ugaugguaauccacucuua

SEQ ID NO: 1924312 - RNA, 19 nt, Homo sapiens
  misc_RNA (1)...(19): siRNA sense strand
ugagugcuuugcagucuuu

SEQ ID NO: 1924313 - RNA, 19 nt, Homo sapiens
  misc_RNA (1)...(19): siRNA sense strand
gcaaacacuugauaaaauc

SEQ ID NO: 1924314 - RNA, 19 nt, Homo sapiens
  misc_RNA (1)...(19): siRNA sense strand
gaugguaauccacucuuaa

SEQ ID NO: 1924315 - RNA, 19 nt, Homo sapiens
  misc_RNA (1)...(19): siRNA sense strand
ucaacaagaucucaagcau

SEQ ID NO: 1924316 - RNA, 19 nt, Homo sapiens
  misc_RNA (1)...(19): siRNA sense strand
caaccugcuuguuauuuua

SEQ ID NO: 1924317 - RNA, 19 nt, Homo sapiens
  misc_RNA (1)...(19): siRNA sense strand
gcuuaggacuuuggacuug

SEQ ID NO: 1924318 - RNA, 19 nt, Homo sapiens
  misc_RNA (1)...(19): siRNA sense strand
ccagaauaaucaguugaaa

SEQ ID NO: 1924319 - RNA, 19 nt, Homo sapiens
  misc_RNA (1)...(19): siRNA sense strand
cugggaagcuggaugauuc

SEQ ID NO: 1924320 - RNA, 19 nt, Homo sapiens
  misc_RNA (1)...(19): siRNA sense strand
ugaauuaacuuccuuuccu

SEQ ID NO: 1924321 - RNA, 19 nt, Homo sapiens
  misc_RNA (1)...(19): siRNA sense strand
gaacaaaagaugcuuagga

SEQ ID NO: 1924322 - RNA, 19 nt, Homo sapiens
  misc_RNA (1)...(19): siRNA sense strand
ccuaauaauuugugucaag

SEQ ID NO: 1924323 - RNA, 19 nt, Homo sapiens
  misc_RNA (1)...(19): siRNA sense strand
guaguucugcaucuucaua

SEQ ID NO: 1924324 - RNA, 19 nt, Homo sapiens
  misc_RNA (1)...(19): siRNA sense strand
gacccuggcucucaacaag

SEQ ID NO: 1924325 - RNA, 19 nt, Homo sapiens
  misc_RNA (1)...(19): siRNA sense strand
ugaauccaguccuguaugu

SEQ ID NO: 1924326 - RNA, 19 nt, Homo sapiens
  misc_RNA (1)...(19): siRNA sense strand
aaagaagccuuagcagcaa

SEQ ID NO: 1924327 - RNA, 19 nt, Homo sapiens
  misc_RNA (1)...(19): siRNA sense strand
aagauaagcagcauaccua

SEQ ID NO: 1924328 - RNA, 19 nt, Homo sapiens
  misc_RNA (1)...(19): siRNA sense strand
gaauuuccucaggcuauua

SEQ ID NO: 1924329 - RNA, 19 nt, Homo sapiens
  misc_RNA (1)...(19): siRNA sense strand
ccuuagacuugaguuauaa

SEQ ID NO: 1924330 - RNA, 19 nt, Homo sapiens
  misc_RNA (1)...(19): siRNA sense strand
cuucaccaauugcaucuuu

SEQ ID NO: 1924331 - RNA, 19 nt, Homo sapiens
  misc_RNA (1)...(19): siRNA sense strand
ggccuugucuggguugaaa

SEQ ID NO: 1924332 - RNA, 19 nt, Homo sapiens
  misc_RNA (1)...(19): siRNA sense strand
gcuccagaauaaucaguug

SEQ ID NO: 1924333 - RNA, 19 nt, Homo sapiens
  misc_RNA (1)...(19): siRNA sense strand
acccaaaguuuaaagaaga

SEQ ID NO: 1924334 - RNA, 19 nt, Homo sapiens
  misc_RNA (1)...(19): siRNA sense strand
caacccaaaguuuaaagaa

SEQ ID NO: 1924335 - RNA, 19 nt, Homo sapiens
  misc_RNA (1)...(19): siRNA sense strand
uaagcuauacugcaacuug

SEQ ID NO: 1924336 - RNA, 19 nt, Homo sapiens
  misc_RNA (1)...(19): siRNA sense strand
uuuccuaggugcuacagua

SEQ ID NO: 1924337 - RNA, 19 nt, Homo sapiens
  misc_RNA (1)...(19): siRNA sense strand
gagcaaucaucucaaacag

SEQ ID NO: 1924338 - RNA, 19 nt, Homo sapiens
  misc_RNA (1)...(19): siRNA sense strand
gguugugacucuuaugcaa

SEQ ID NO: 1924339 - RNA, 19 nt, Homo sapiens
  misc_RNA (1)...(19): siRNA sense strand
uauaagagaccuuccaagu

SEQ ID NO: 1924340 - RNA, 19 nt, Homo sapiens
  misc_RNA (1)...(19): siRNA sense strand
ggacagagagccacagaua

SEQ ID NO: 1924341 - RNA, 19 nt, Homo sapiens
  misc_RNA (1)...(19): siRNA sense strand
gagaugaguugcuggauga

SEQ ID NO: 1924342 - RNA, 19 nt, Homo sapiens
  misc_RNA (1)...(19): siRNA sense strand
gcgcaucacugacugcuau

SEQ ID NO: 1924343 - RNA, 19 nt, Homo sapiens
  misc_RNA (1)...(19): siRNA sense strand
ccacccagcuucccauuau

SEQ ID NO: 1924344 - RNA, 19 nt, Homo sapiens
  misc_RNA (1)...(19): siRNA sense strand
gcagaugugugucaacuac

SEQ ID NO: 1924345 - RNA, 19 nt, Homo sapiens
  misc_RNA (1)...(19): siRNA sense strand
ccuaugaucucaaccaaau

SEQ ID NO: 1924346 - RNA, 19 nt, Homo sapiens
  misc_RNA (1)...(19): siRNA sense strand
ccaacaagcgcaucacuga

SEQ ID NO: 1924347 - RNA, 19 nt, Homo sapiens
  misc_RNA (1)...(19): siRNA sense strand
ccaaauauccggagcucuu

SEQ ID NO: 1924348 - RNA, 19 nt, Homo sapiens
  misc_RNA (1)...(19): siRNA sense strand
acagaugagugccagauug

SEQ ID NO: 1924349 - RNA, 19 nt, Homo sapiens
  misc_RNA (1)...(19): siRNA sense strand
aaccagaccucacccauca

SEQ ID NO: 1924350 - RNA, 19 nt, Homo sapiens
  misc_RNA (1)...(19): siRNA sense strand
gagcaagagcccaacagaa

SEQ ID NO: 1924351 - RNA, 19 nt, Homo sapiens
  misc_RNA (1)...(19): siRNA sense strand
gcagccaacuauccagauc

SEQ ID NO: 1924352 - RNA, 19 nt, Homo sapiens
  misc_RNA (1)...(19): siRNA sense strand
ggaccucggagaugaguug

SEQ ID NO: 1924353 - RNA, 19 nt, Homo sapiens
  misc_RNA (1)...(19): siRNA sense strand
ccaccagccuccugugauc

SEQ ID NO: 1924354 - RNA, 19 nt, Homo sapiens
  misc_RNA (1)...(19): siRNA sense strand
gcacccagaccaccacuca

SEQ ID NO: 1924355 - RNA, 19 nt, Homo sapiens
  misc_RNA (1)...(19): siRNA sense strand
gggaggaugaggaagauga

SEQ ID NO: 1924356 - RNA, 19 nt, Homo sapiens
  misc_RNA (1)...(19): siRNA sense strand
ggagcaagagcccaacaga

SEQ ID NO: 1924357 - RNA, 19 nt, Homo sapiens
  misc_RNA (1)...(19): siRNA sense strand
ccacucauuugccuggaau

SEQ ID NO: 1924358 - RNA, 19 nt, Homo sapiens
  misc_RNA (1)...(19): siRNA sense strand
cccaggaccucggagauga

SEQ ID NO: 1924359 - RNA, 19 nt, Homo sapiens
  misc_RNA (1)...(19): siRNA sense strand
ggaggaugaggaagaugaa

SEQ ID NO: 1924360 - RNA, 19 nt, Homo sapiens
  misc_RNA (1)...(19): siRNA sense strand
gggcugcgaacacgaaugu

SEQ ID NO: 1924361 - RNA, 19 nt, Homo sapiens
  misc_RNA (1)...(19): siRNA sense strand
ccagaccaccacucauuug

SEQ ID NO: 1924362 - RNA, 19 nt, Homo sapiens
  misc_RNA (1)...(19): siRNA sense strand
caccuggucuccacagagu

SEQ ID NO: 1924363 - RNA, 19 nt, Homo sapiens
  misc_RNA (1)...(19): siRNA sense strand
cagcagaugugugucaacu

SEQ ID NO: 1924364 - RNA, 19 nt, Homo sapiens
  misc_RNA (1)...(19): siRNA sense strand
guugguggcuucgaguguu

SEQ ID NO: 1924365 - RNA, 19 nt, Homo sapiens
  misc_RNA (1)...(19): siRNA sense strand
cgugaucgcagccaacuau

SEQ ID NO: 1924366 - RNA, 19 nt, Homo sapiens
  misc_RNA (1)...(19): siRNA sense strand
cuacgcagccgccugacuu

SEQ ID NO: 1924367 - RNA, 19 nt, Homo sapiens
  misc_RNA (1)...(19): siRNA sense strand
ggugccaacgugugucuuu

SEQ ID NO: 1924368 - RNA, 19 nt, Homo sapiens
  misc_RNA (1)...(19): siRNA sense strand
cugcagaaccagcguguga

SEQ ID NO: 1924369 - RNA, 19 nt, Homo sapiens
  misc_RNA (1)...(19): siRNA sense strand
ggcuucgaguguuauugua

SEQ ID NO: 1924370 - RNA, 19 nt, Homo sapiens
  misc_RNA (1)...(19): siRNA sense strand
gaggacagagagccacaga

SEQ ID NO: 1924371 - RNA, 19 nt, Homo sapiens
  misc_RNA (1)...(19): siRNA sense strand
uugguggcuucgaguguua

SEQ ID NO: 1924372 - RNA, 19 nt, Homo sapiens
  misc_RNA (1)...(19): siRNA sense strand
gcacccaacaagcgcauca

SEQ ID NO: 1924373 - RNA, 19 nt, Homo sapiens
  misc_RNA (1)...(19): siRNA sense strand
gaucgcagccaacuaucca

SEQ ID NO: 1924374 - RNA, 19 nt, Homo sapiens
  misc_RNA (1)...(19): siRNA sense strand
ccacacacccagcuuuguc

SEQ ID NO: 1924375 - RNA, 19 nt, Homo sapiens
  misc_RNA (1)...(19): siRNA sense strand
caacugcccagcccucucu

SEQ ID NO: 1924376 - RNA, 19 nt, Homo sapiens
  misc_RNA (1)...(19): siRNA sense strand
ugccuggaaucccaccuaa

SEQ ID NO: 1924377 - RNA, 19 nt, Homo sapiens
  misc_RNA (1)...(19): siRNA sense strand
gagcuucccagaggacaga

SEQ ID NO: 1924378 - RNA, 19 nt, Homo sapiens
  misc_RNA (1)...(19): siRNA sense strand
acacggcuuucaccaacug

SEQ ID NO: 1924379 - RNA, 19 nt, Homo sapiens
  misc_RNA (1)...(19): siRNA sense strand
gccagcagaugugugucaa

SEQ ID NO: 1924380 - RNA, 19 nt, Homo sapiens
  misc_RNA (1)...(19): siRNA sense strand
gggaccaggacacggcuuu

SEQ ID NO: 1924381 - RNA, 19 nt, Homo sapiens
  misc_RNA (1)...(19): siRNA sense strand
gccacccagcuucccauua

SEQ ID NO: 1924382 - RNA, 19 nt, Homo sapiens
  misc_RNA (1)...(19): siRNA sense strand
ccuggucuccacagaguuu

SEQ ID NO: 1924383 - RNA, 19 nt, Homo sapiens
  misc_RNA (1)...(19): siRNA sense strand
caaauauccggagcucuuc

SEQ ID NO: 1924384 - RNA, 19 nt, Homo sapiens
  misc_RNA (1)...(19): siRNA sense strand
cagcugcuacgcucucuuc

SEQ ID NO: 1924385 - RNA, 19 nt, Homo sapiens
  misc_RNA (1)...(19): siRNA sense strand
cgugcgagcagcaguguga

SEQ ID NO: 1924386 - RNA, 19 nt, Homo sapiens
  misc_RNA (1)...(19): siRNA sense strand
ccaacccgguauucucucu

SEQ ID NO: 1924387 - RNA, 19 nt, Homo sapiens
  misc_RNA (1)...(19): siRNA sense strand
gaccaggacacggcuuuca

SEQ ID NO: 1924388 - RNA, 19 nt, Homo sapiens
  misc_RNA (1)...(19): siRNA sense strand
gaaacaggcugcaguugag

SEQ ID NO: 1924389 - RNA, 19 nt, Homo sapiens
  misc_RNA (1)...(19): siRNA sense strand
gcacaccacugagaugcua

SEQ ID NO: 1924390 - RNA, 19 nt, Homo sapiens
  misc_RNA (1)...(19): siRNA sense strand
ggaaugggaggccacuuua

SEQ ID NO: 1924391 - RNA, 19 nt, Homo sapiens
  misc_RNA (1)...(19): siRNA sense strand
ccacugagaugcuacagau

SEQ ID NO: 1924392 - RNA, 19 nt, Homo sapiens
  misc_RNA (1)...(19): siRNA sense strand
gaaguuguguaaagccuau

SEQ ID NO: 1924393 - RNA, 19 nt, Homo sapiens
  misc_RNA (1)...(19): siRNA sense strand
gaagaaacaggcugcaguu

SEQ ID NO: 1924394 - RNA, 19 nt, Homo sapiens
  misc_RNA (1)...(19): siRNA sense strand
caagggaaauaccaggaaa

SEQ ID NO: 1924395 - RNA, 19 nt, Homo sapiens
  misc_RNA (1)...(19): siRNA sense strand
gagagaaaguaucuagcuu

SEQ ID NO: 1924396 - RNA, 19 nt, Homo sapiens
  misc_RNA (1)...(19): siRNA sense strand
ccaaagagcuguagaaaac

SEQ ID NO: 1924397 - RNA, 19 nt, Homo sapiens
  misc_RNA (1)...(19): siRNA sense strand
gugauuggcaggauguuua

SEQ ID NO: 1924398 - RNA, 19 nt, Homo sapiens
  misc_RNA (1)...(19): siRNA sense strand
caggugcacuggccuuuga

SEQ ID NO: 1924399 - RNA, 19 nt, Homo sapiens
  misc_RNA (1)...(19): siRNA sense strand
ggcacaagauaucgacuau

SEQ ID NO: 1924400 - RNA, 19 nt, Homo sapiens
  misc_RNA (1)...(19): siRNA sense strand
gaauuucucaacagacuga

SEQ ID NO: 1924401 - RNA, 19 nt, Homo sapiens
  misc_RNA (1)...(19): siRNA sense strand
cacaagauaucgacuaugc

SEQ ID NO: 1924402 - RNA, 19 nt, Homo sapiens
  misc_RNA (1)...(19): siRNA sense strand
gacaagagccaucccaagu

SEQ ID NO: 1924403 - RNA, 19 nt, Homo sapiens
  misc_RNA (1)...(19): siRNA sense strand
caggugaaguuguguaaag

SEQ ID NO: 1924404 - RNA, 19 nt, Homo sapiens
  misc_RNA (1)...(19): siRNA sense strand
gcuccaagagugacuauau

SEQ ID NO: 1924405 - RNA, 19 nt, Homo sapiens
  misc_RNA (1)...(19): siRNA sense strand
uaacucagauggggaauuu

SEQ ID NO: 1924406 - RNA, 19 nt, Homo sapiens
  misc_RNA (1)...(19): siRNA sense strand
caagauaucgacuaugcuu

SEQ ID NO: 1924407 - RNA, 19 nt, Homo sapiens
  misc_RNA (1)...(19): siRNA sense strand
ggcggaggcugauggaaug

SEQ ID NO: 1924408 - RNA, 19 nt, Homo sapiens
  misc_RNA (1)...(19): siRNA sense strand
cgccacacauucugcuaua

SEQ ID NO: 1924409 - RNA, 19 nt, Homo sapiens
  misc_RNA (1)...(19): siRNA sense strand
gggaauuucucaacagacu

SEQ ID NO: 1924410 - RNA, 19 nt, Homo sapiens
  misc_RNA (1)...(19): siRNA sense strand
ggaggcaggagagaaagua

SEQ ID NO: 1924411 - RNA, 19 nt, Homo sapiens
  misc_RNA (1)...(19): siRNA sense strand
ccugggaagugauuguaaa

SEQ ID NO: 1924412 - RNA, 19 nt, Homo sapiens
  misc_RNA (1)...(19): siRNA sense strand
gcaaugcuuccauaacugu

SEQ ID NO: 1924413 - RNA, 19 nt, Homo sapiens
  misc_RNA (1)...(19): siRNA sense strand
agaaacaggcugcaguuga

SEQ ID NO: 1924414 - RNA, 19 nt, Homo sapiens
  misc_RNA (1)...(19): siRNA sense strand
ccaaguccaaggccaagua

SEQ ID NO: 1924415 - RNA, 19 nt, Homo sapiens
  misc_RNA (1)...(19): siRNA sense strand
cagacugaaccgcuucuua

SEQ ID NO: 1924416 - RNA, 19 nt, Homo sapiens
  misc_RNA (1)...(19): siRNA sense strand
cugacaaacuccgagauaa

SEQ ID NO: 1924417 - RNA, 19 nt, Homo sapiens
  misc_RNA (1)...(19): siRNA sense strand
gcagauacagggugauugg

SEQ ID NO: 1924418 - RNA, 19 nt, Homo sapiens
  misc_RNA (1)...(19): siRNA sense strand
ggucggacaccaauuguuc

SEQ ID NO: 1924419 - RNA, 19 nt, Homo sapiens
  misc_RNA (1)...(19): siRNA sense strand
ggaggcugauggaaugcuu

SEQ ID NO: 1924420 - RNA, 19 nt, Homo sapiens
  misc_RNA (1)...(19): siRNA sense strand
uacuggagcuggcacaaga

SEQ ID NO: 1924421 - RNA, 19 nt, Homo sapiens
  misc_RNA (1)...(19): siRNA sense strand
gggccacccuuccugacaa

SEQ ID NO: 1924422 - RNA, 19 nt, Homo sapiens
  misc_RNA (1)...(19): siRNA sense strand
ggagagaaaguaucuagcu

SEQ ID NO: 1924423 - RNA, 19 nt, Homo sapiens
  misc_RNA (1)...(19): siRNA sense strand
aaugugguaucacguagaa

SEQ ID NO: 1924424 - RNA, 19 nt, Homo sapiens
  misc_RNA (1)...(19): siRNA sense strand
gacuauaucaccagaguuc

SEQ ID NO: 1924425 - RNA, 19 nt, Homo sapiens
  misc_RNA (1)...(19): siRNA sense strand
aaacuccgagauaagcuua

SEQ ID NO: 1924426 - RNA, 19 nt, Homo sapiens
  misc_RNA (1)...(19): siRNA sense strand
guaucuagcuuuguguuac

SEQ ID NO: 1924427 - RNA, 19 nt, Homo sapiens
  misc_RNA (1)...(19): siRNA sense strand
ucaggaggcaggagagaaa

SEQ ID NO: 1924428 - RNA, 19 nt, Homo sapiens
  misc_RNA (1)...(19): siRNA sense strand
cguagaaacgugaaucaga

SEQ ID NO: 1924429 - RNA, 19 nt, Homo sapiens
  misc_RNA (1)...(19): siRNA sense strand
ccugacaaacuccgagaua

SEQ ID NO: 1924430 - RNA, 19 nt, Homo sapiens
  misc_RNA (1)...(19): siRNA sense strand
agacugaaccgcuucuuag

SEQ ID NO: 1924431 - RNA, 19 nt, Homo sapiens
  misc_RNA (1)...(19): siRNA sense strand
ggaaacgccacacauucug

SEQ ID NO: 1924432 - RNA, 19 nt, Homo sapiens
  misc_RNA (1)...(19): siRNA sense strand
ggagcuggcacaagauauc

SEQ ID NO: 1924433 - RNA, 19 nt, Homo sapiens
  misc_RNA (1)...(19): siRNA sense strand
gaacuaagaguguuuucug

SEQ ID NO: 1924434 - RNA, 19 nt, Homo sapiens
  misc_RNA (1)...(19): siRNA sense strand
ggccacccuuccugacaaa

SEQ ID NO: 1924435 - RNA, 19 nt, Homo sapiens
  misc_RNA (1)...(19): siRNA sense strand
ggcggaccgugucagauau

SEQ ID NO: 1924436 - RNA, 19 nt, Homo sapiens
  misc_RNA (1)...(19): siRNA sense strand
gggcagauacagggugauu

SEQ ID NO: 1924437 - RNA, 19 nt, Homo sapiens
  misc_RNA (1)...(19): siRNA sense strand
ugacaaacuccgagauaag

SEQ ID NO: 1924438 - RNA, 19 nt, Homo sapiens
  misc_RNA (1)...(19): siRNA sense strand
aggcggaccgugucagaua

SEQ ID NO: 1924439 - RNA, 19 nt, Homo sapiens
  misc_RNA (1)...(19): siRNA sense strand
ccaagggaaauaccaggaa

SEQ ID NO: 1924440 - RNA, 19 nt, Homo sapiens
  misc_RNA (1)...(19): siRNA sense strand
cgaggacuguggcgaggau

SEQ ID NO: 1924441 - RNA, 19 nt, Homo sapiens
  misc_RNA (1)...(19): siRNA sense strand
guggagagccauaaaauug

SEQ ID NO: 1924442 - RNA, 19 nt, Homo sapiens
  misc_RNA (1)...(19): siRNA sense strand
ggaccuguggagagccaua

SEQ ID NO: 1924443 - RNA, 19 nt, Homo sapiens
  misc_RNA (1)...(19): siRNA sense strand
ggcuugagcacaccacuga

SEQ ID NO: 1924444 - RNA, 19 nt, Homo sapiens
  misc_RNA (1)...(19): siRNA sense strand
agauaucgacuaugcuuug

SEQ ID NO: 1924445 - RNA, 19 nt, Homo sapiens
  misc_RNA (1)...(19): siRNA sense strand
caaauguuguaccgagaac

SEQ ID NO: 1924446 - RNA, 19 nt, Homo sapiens
  misc_RNA (1)...(19): siRNA sense strand
cuagcuuuguguuacguuu

SEQ ID NO: 1924447 - RNA, 19 nt, Homo sapiens
  misc_RNA (1)...(19): siRNA sense strand
gacugaaccgcuucuuaga

SEQ ID NO: 1924448 - RNA, 19 nt, Homo sapiens
  misc_RNA (1)...(19): siRNA sense strand
ugguaaagcagaagaaaca

SEQ ID NO: 1924449 - RNA, 19 nt, Homo sapiens
  misc_RNA (1)...(19): siRNA sense strand
gaaugggaggccacuuuag

SEQ ID NO: 1924450 - RNA, 19 nt, Homo sapiens
  misc_RNA (1)...(19): siRNA sense strand
caggagagaaaguaucuag

SEQ ID NO: 1924451 - RNA, 19 nt, Homo sapiens
  misc_RNA (1)...(19): siRNA sense strand
gaggcugauggaaugcuua

SEQ ID NO: 1924452 - RNA, 19 nt, Homo sapiens
  misc_RNA (1)...(19): siRNA sense strand
ggaacugggcuugggacaa

SEQ ID NO: 1924453 - RNA, 19 nt, Homo sapiens
  misc_RNA (1)...(19): siRNA sense strand
aaacggaaacgccacacau

SEQ ID NO: 1924454 - RNA, 19 nt, Homo sapiens
  misc_RNA (1)...(19): siRNA sense strand
aaauugcccaggugaaguu

SEQ ID NO: 1924455 - RNA, 19 nt, Homo sapiens
  misc_RNA (1)...(19): siRNA sense strand
ggaggugcaugcucauccu

SEQ ID NO: 1924456 - RNA, 19 nt, Homo sapiens
  misc_RNA (1)...(19): siRNA sense strand
gcaguugagucgggaaacg

SEQ ID NO: 1924457 - RNA, 19 nt, Homo sapiens
  misc_RNA (1)...(19): siRNA sense strand
gcacaagauaucgacuaug

SEQ ID NO: 1924458 - RNA, 19 nt, Homo sapiens
  misc_RNA (1)...(19): siRNA sense strand
aggaaugggaggccacuuu

SEQ ID NO: 1924459 - RNA, 19 nt, Homo sapiens
  misc_RNA (1)...(19): siRNA sense strand
gauaucgacuaugcuuugc

SEQ ID NO: 1924460 - RNA, 19 nt, Homo sapiens
  misc_RNA (1)...(19): siRNA sense strand
aauguuguaccgagaacua

SEQ ID NO: 1924461 - RNA, 19 nt, Homo sapiens
  misc_RNA (1)...(19): siRNA sense strand
ggaugaguuugaggagaca

SEQ ID NO: 1924462 - RNA, 19 nt, Homo sapiens
  misc_RNA (1)...(19): siRNA sense strand
caaacuccgagauaagcuu

SEQ ID NO: 1924463 - RNA, 19 nt, Homo sapiens
  misc_RNA (1)...(19): siRNA sense strand
agaaaacaaugugguauca

SEQ ID NO: 1924464 - RNA, 19 nt, Homo sapiens
  misc_RNA (1)...(19): siRNA sense strand
cggaaacgccacacauucu

SEQ ID NO: 1924465 - RNA, 19 nt, Homo sapiens
  misc_RNA (1)...(19): siRNA sense strand
aacaaugugguaucacgua

SEQ ID NO: 1924466 - RNA, 19 nt, Homo sapiens
  misc_RNA (1)...(19): siRNA sense strand
ggaccgugucagauaugaa

SEQ ID NO: 1924467 - RNA, 19 nt, Homo sapiens
  misc_RNA (1)...(19): siRNA sense strand
gcucucgaggcucaagaaa

SEQ ID NO: 1924468 - RNA, 19 nt, Homo sapiens
  misc_RNA (1)...(19): siRNA sense strand
cacuuuagguccagauagg

SEQ ID NO: 1924469 - RNA, 19 nt, Homo sapiens
  misc_RNA (1)...(19): siRNA sense strand
gacaaacuccgagauaagc

SEQ ID NO: 1924470 - RNA, 19 nt, Homo sapiens
  misc_RNA (1)...(19): siRNA sense strand
cugaaacgagucuuaagug

SEQ ID NO: 1924471 - RNA, 19 nt, Homo sapiens
  misc_RNA (1)...(19): siRNA sense strand
aaagagcuguagaaaacaa

SEQ ID NO: 1924472 - RNA, 19 nt, Homo sapiens
  misc_RNA (1)...(19): siRNA sense strand
ggugauuggcaggauguuu

SEQ ID NO: 1924473 - RNA, 19 nt, Homo sapiens
  misc_RNA (1)...(19): siRNA sense strand
cuccaagagugacuauauc

SEQ ID NO: 1924474 - RNA, 19 nt, Homo sapiens
  misc_RNA (1)...(19): siRNA sense strand
gaugaggauugaacaguua

SEQ ID NO: 1924475 - RNA, 19 nt, Homo sapiens
  misc_RNA (1)...(19): siRNA sense strand
ugaagaaacugaaugcaaa

SEQ ID NO: 1924476 - RNA, 19 nt, Homo sapiens
  misc_RNA (1)...(19): siRNA sense strand
caacucagcuggucaacau

SEQ ID NO: 1924477 - RNA, 19 nt, Homo sapiens
  misc_RNA (1)...(19): siRNA sense strand
gcagaugugucuucagaga

SEQ ID NO: 1924478 - RNA, 19 nt, Homo sapiens
  misc_RNA (1)...(19): siRNA sense strand
gagcucaccucugucauuu

SEQ ID NO: 1924479 - RNA, 19 nt, Homo sapiens
  misc_RNA (1)...(19): siRNA sense strand
ggacuacucugccuacuac

SEQ ID NO: 1924480 - RNA, 19 nt, Homo sapiens
  misc_RNA (1)...(19): siRNA sense strand
caaacuuggugaccuggua

SEQ ID NO: 1924481 - RNA, 19 nt, Homo sapiens
  misc_RNA (1)...(19): siRNA sense strand
gaaaugaagaaauggagaa

SEQ ID NO: 1924482 - RNA, 19 nt, Homo sapiens
  misc_RNA (1)...(19): siRNA sense strand
gacaccagcauuagcauua

SEQ ID NO: 1924483 - RNA, 19 nt, Homo sapiens
  misc_RNA (1)...(19): siRNA sense strand
ucgacgaucccauauauua

SEQ ID NO: 1924484 - RNA, 19 nt, Homo sapiens
  misc_RNA (1)...(19): siRNA sense strand
ucggugaccuccugguuua

SEQ ID NO: 1924485 - RNA, 19 nt, Homo sapiens
  misc_RNA (1)...(19): siRNA sense strand
gagaagauucagaggcaua

SEQ ID NO: 1924486 - RNA, 19 nt, Homo sapiens
  misc_RNA (1)...(19): siRNA sense strand
gcacaacggcaccaagaga

SEQ ID NO: 1924487 - RNA, 19 nt, Homo sapiens
  misc_RNA (1)...(19): siRNA sense strand
ccgcagaugugucuucaga

SEQ ID NO: 1924488 - RNA, 19 nt, Homo sapiens
  misc_RNA (1)...(19): siRNA sense strand
caacggagacaccagcauu

SEQ ID NO: 1924489 - RNA, 19 nt, Homo sapiens
  misc_RNA (1)...(19): siRNA sense strand
ugauguaaaucuucccaaa

SEQ ID NO: 1924490 - RNA, 19 nt, Homo sapiens
  misc_RNA (1)...(19): siRNA sense strand
ucaacauucugucucauau

SEQ ID NO: 1924491 - RNA, 19 nt, Homo sapiens
  misc_RNA (1)...(19): siRNA sense strand
caacauucugucucauaua

SEQ ID NO: 1924492 - RNA, 19 nt, Homo sapiens
  misc_RNA (1)...(19): siRNA sense strand
ccuccugguuuaaagcuua

SEQ ID NO: 1924493 - RNA, 19 nt, Homo sapiens
  misc_RNA (1)...(19): siRNA sense strand
gcacagacugggagaacuu

SEQ ID NO: 1924494 - RNA, 19 nt, Homo sapiens
  misc_RNA (1)...(19): siRNA sense strand
gagcacaacggcaccaaga

SEQ ID NO: 1924495 - RNA, 19 nt, Homo sapiens
  misc_RNA (1)...(19): siRNA sense strand
cggaguugcuggagaauca

SEQ ID NO: 1924496 - RNA, 19 nt, Homo sapiens
  misc_RNA (1)...(19): siRNA sense strand
gaagaaacugaaugcaaau

SEQ ID NO: 1924497 - RNA, 19 nt, Homo sapiens
  misc_RNA (1)...(19): siRNA sense strand
cuaagcaagcagaaauuua

SEQ ID NO: 1924498 - RNA, 19 nt, Homo sapiens
  misc_RNA (1)...(19): siRNA sense strand
cuucgacgaucccauauau

SEQ ID NO: 1924499 - RNA, 19 nt, Homo sapiens
  misc_RNA (1)...(19): siRNA sense strand
aaagaccauugacuuaaga

SEQ ID NO: 1924500 - RNA, 19 nt, Homo sapiens
  misc_RNA (1)...(19): siRNA sense strand
gaaguaaagacggguguga

SEQ ID NO: 1924501 - RNA, 19 nt, Homo sapiens
  misc_RNA (1)...(19): siRNA sense strand
gcucugcaacagugaauuu

SEQ ID NO: 1924502 - RNA, 19 nt, Homo sapiens
  misc_RNA (1)...(19): siRNA sense strand
ggucagggcccuuugaagu

SEQ ID NO: 1924503 - RNA, 19 nt, Homo sapiens
  misc_RNA (1)...(19): siRNA sense strand
caauuacaaccacugcaua

SEQ ID NO: 1924504 - RNA, 19 nt, Homo sapiens
  misc_RNA (1)...(19): siRNA sense strand
uccaagcucugaacaccua

SEQ ID NO: 1924505 - RNA, 19 nt, Homo sapiens
  misc_RNA (1)...(19): siRNA sense strand
ucagaggcauaaucgcaaa

SEQ ID NO: 1924506 - RNA, 19 nt, Homo sapiens
  misc_RNA (1)...(19): siRNA sense strand
aaaccgaccugggcacaga

SEQ ID NO: 1924507 - RNA, 19 nt, Homo sapiens
  misc_RNA (1)...(19): siRNA sense strand
ggagacaccagcauuagca

SEQ ID NO: 1924508 - RNA, 19 nt, Homo sapiens
  misc_RNA (1)...(19): siRNA sense strand
ugggagaacuugccuaguc

SEQ ID NO: 1924509 - RNA, 19 nt, Homo sapiens
  misc_RNA (1)...(19): siRNA sense strand
gugaagaaacugaaugcaa

SEQ ID NO: 1924510 - RNA, 19 nt, Homo sapiens
  misc_RNA (1)...(19): siRNA sense strand
agaugaggauugaacaguu

SEQ ID NO: 1924511 - RNA, 19 nt, Homo sapiens
  misc_RNA (1)...(19): siRNA sense strand
uaaagacgggugugagaga

SEQ ID NO: 1924512 - RNA, 19 nt, Homo sapiens
  misc_RNA (1)...(19): siRNA sense strand
gacgaucccauauauuaga

SEQ ID NO: 1924513 - RNA, 19 nt, Homo sapiens
  misc_RNA (1)...(19): siRNA sense strand
uaagcaagcagaaauuuac

SEQ ID NO: 1924514 - RNA, 19 nt, Homo sapiens
  misc_RNA (1)...(19): siRNA sense strand
ccucaggaaucuaauguac

SEQ ID NO: 1924515 - RNA, 19 nt, Homo sapiens
  misc_RNA (1)...(19): siRNA sense strand
gucagggcccuuugaagua

SEQ ID NO: 1924516 - RNA, 19 nt, Homo sapiens
  misc_RNA (1)...(19): siRNA sense strand
ugauaucccuucccagucu

SEQ ID NO: 1924517 - RNA, 19 nt, Homo sapiens
  misc_RNA (1)...(19): siRNA sense strand
aaucuucgacgaucccaua

SEQ ID NO: 1924518 - RNA, 19 nt, Homo sapiens
  misc_RNA (1)...(19): siRNA sense strand
cauucugucucauauacuu

SEQ ID NO: 1924519 - RNA, 19 nt, Homo sapiens
  misc_RNA (1)...(19): siRNA sense strand
gcaagaugaggauugaaca

SEQ ID NO: 1924520 - RNA, 19 nt, Homo sapiens
  misc_RNA (1)...(19): siRNA sense strand
gagagugacagugccauga

SEQ ID NO: 1924521 - RNA, 19 nt, Homo sapiens
  misc_RNA (1)...(19): siRNA sense strand
gcgcgucagcgaugaagaa

SEQ ID NO: 1924522 - RNA, 19 nt, Homo sapiens
  misc_RNA (1)...(19): siRNA sense strand
gucaacauucugucucaua

SEQ ID NO: 1924523 - RNA, 19 nt, Homo sapiens
  misc_RNA (1)...(19): siRNA sense strand
ggaaaagaaucagaagcuu

SEQ ID NO: 1924524 - RNA, 19 nt, Homo sapiens
  misc_RNA (1)...(19): siRNA sense strand
gcaggucagggcccuuuga

SEQ ID NO: 1924525 - RNA, 19 nt, Homo sapiens
  misc_RNA (1)...(19): siRNA sense strand
gaggcauaaucgcaaacuu

SEQ ID NO: 1924526 - RNA, 19 nt, Homo sapiens
  misc_RNA (1)...(19): siRNA sense strand
ccugcaagaugaggauuga

SEQ ID NO: 1924527 - RNA, 19 nt, Homo sapiens
  misc_RNA (1)...(19): siRNA sense strand
gcuggagaaucagaugaga

SEQ ID NO: 1924528 - RNA, 19 nt, Homo sapiens
  misc_RNA (1)...(19): siRNA sense strand
ucaggaaucuaauguaccu

SEQ ID NO: 1924529 - RNA, 19 nt, Homo sapiens
  misc_RNA (1)...(19): siRNA sense strand
gggacuacucugccuacua

SEQ ID NO: 1924530 - RNA, 19 nt, Homo sapiens
  misc_RNA (1)...(19): siRNA sense strand
gagcgucuggcaaaucuuc

SEQ ID NO: 1924531 - RNA, 19 nt, Homo sapiens
  misc_RNA (1)...(19): siRNA sense strand
ugaggaguccauggaauuu

SEQ ID NO: 1924532 - RNA, 19 nt, Homo sapiens
  misc_RNA (1)...(19): siRNA sense strand
gcugaagcccggaggacaa

SEQ ID NO: 1924533 - RNA, 19 nt, Homo sapiens
  misc_RNA (1)...(19): siRNA sense strand
aaucuaagcaagcagaaau

SEQ ID NO: 1924534 - RNA, 19 nt, Homo sapiens
  misc_RNA (1)...(19): siRNA sense strand
agaugugucuucagagagu

SEQ ID NO: 1924535 - RNA, 19 nt, Homo sapiens
  misc_RNA (1)...(19): siRNA sense strand
gaagucucccagagucaga

SEQ ID NO: 1924536 - RNA, 19 nt, Homo sapiens
  misc_RNA (1)...(19): siRNA sense strand
gcuuuacagucgagcacaa

SEQ ID NO: 1924537 - RNA, 19 nt, Homo sapiens
  misc_RNA (1)...(19): siRNA sense strand
cagaugagagcggagauga

SEQ ID NO: 1924538 - RNA, 19 nt, Homo sapiens
  misc_RNA (1)...(19): siRNA sense strand
gugcugcgcugugcuaugc

SEQ ID NO: 1924539 - RNA, 19 nt, Homo sapiens
  misc_RNA (1)...(19): siRNA sense strand
acagcuggguggaggagaa

SEQ ID NO: 1924540 - RNA, 19 nt, Homo sapiens
  misc_RNA (1)...(19): siRNA sense strand
uuacagggccuuggauuag

SEQ ID NO: 1924541 - RNA, 19 nt, Homo sapiens
  misc_RNA (1)...(19): siRNA sense strand
aacauucugucucauauac

SEQ ID NO: 1924542 - RNA, 19 nt, Homo sapiens
  misc_RNA (1)...(19): siRNA sense strand
ugucucauauacuugaugu

SEQ ID NO: 1924543 - RNA, 19 nt, Homo sapiens
  misc_RNA (1)...(19): siRNA sense strand
ggugaccuccugguuuaaa

SEQ ID NO: 1924544 - RNA, 19 nt, Homo sapiens
  misc_RNA (1)...(19): siRNA sense strand
cugcauacccucaggaauc

SEQ ID NO: 1924545 - RNA, 19 nt, Homo sapiens
  misc_RNA (1)...(19): siRNA sense strand
ucuaagcaagcagaaauuu

SEQ ID NO: 1924546 - RNA, 19 nt, Homo sapiens
  misc_RNA (1)...(19): siRNA sense strand
cgucagcgaugaagaaacc

SEQ ID NO: 1924547 - RNA, 19 nt, Homo sapiens
  misc_RNA (1)...(19): siRNA sense strand
ucccggaguugcuggagaa

SEQ ID NO: 1924548 - RNA, 19 nt, Homo sapiens
  misc_RNA (1)...(19): siRNA sense strand
cauacccucaggaaucuaa

SEQ ID NO: 1924549 - RNA, 19 nt, Homo sapiens
  misc_RNA (1)...(19): siRNA sense strand
gaagcccggaggacaacuu

SEQ ID NO: 1924550 - RNA, 19 nt, Homo sapiens
  misc_RNA (1)...(19): siRNA sense strand
ucagggcccuuugaaguac

SEQ ID NO: 1924551 - RNA, 19 nt, Homo sapiens
  misc_RNA (1)...(19): siRNA sense strand
cgacgaucccauauauuag

SEQ ID NO: 1924552 - RNA, 19 nt, Homo sapiens
  misc_RNA (1)...(19): siRNA sense strand
aggcauaaucgcaaacuug

SEQ ID NO: 1924553 - RNA, 19 nt, Homo sapiens
  misc_RNA (1)...(19): siRNA sense strand
cacaacggcaccaagagaa

SEQ ID NO: 1924554 - RNA, 19 nt, Homo sapiens
  misc_RNA (1)...(19): siRNA sense strand
aggaguccauggaauuugu

SEQ ID NO: 1924555 - RNA, 19 nt, Homo sapiens
  misc_RNA (1)...(19): siRNA sense strand
gaggaguccauggaauuug

SEQ ID NO: 1924556 - RNA, 19 nt, Homo sapiens
  misc_RNA (1)...(19): siRNA sense strand
ugaaguacgagcagaccuu

SEQ ID NO: 1924557 - RNA, 19 nt, Homo sapiens
  misc_RNA (1)...(19): siRNA sense strand
ggauugaacaguuaaaaca

SEQ ID NO: 1924558 - RNA, 19 nt, Homo sapiens
  misc_RNA (1)...(19): siRNA sense strand
gcgaaaaucuaagcaagca

SEQ ID NO: 1924559 - RNA, 19 nt, Homo sapiens
  misc_RNA (1)...(19): siRNA sense strand
gcugcgcugugcuaugcaa

SEQ ID NO: 1924560 - RNA, 19 nt, Homo sapiens
  misc_RNA (1)...(19): siRNA sense strand
aacggagacaccagcauua

SEQ ID NO: 1924561 - RNA, 19 nt, Homo sapiens
  misc_RNA (1)...(19): siRNA sense strand
auuacagggccuuggauua

SEQ ID NO: 1924562 - RNA, 19 nt, Homo sapiens
  misc_RNA (1)...(19): siRNA sense strand
acaacggcaccaagagaaa

SEQ ID NO: 1924563 - RNA, 19 nt, Homo sapiens
  misc_RNA (1)...(19): siRNA sense strand
auuaugagcgucuggcaaa

SEQ ID NO: 1924564 - RNA, 19 nt, Homo sapiens
  misc_RNA (1)...(19): siRNA sense strand
gauguaaaucuucccaaaa

SEQ ID NO: 1924565 - RNA, 19 nt, Homo sapiens
  misc_RNA (1)...(19): siRNA sense strand
ucagugcugcgcugugcua

SEQ ID NO: 1924566 - RNA, 19 nt, Homo sapiens
  misc_RNA (1)...(19): siRNA sense strand
gaaucagaagcuuuacagu

SEQ ID NO: 1924567 - RNA, 19 nt, Homo sapiens
  misc_RNA (1)...(19): siRNA sense strand
uugaggaguccauggaauu

SEQ ID NO: 1924568 - RNA, 19 nt, Homo sapiens
  misc_RNA (1)...(19): siRNA sense strand
agaagauucagaggcauaa

SEQ ID NO: 1924569 - RNA, 19 nt, Homo sapiens
  misc_RNA (1)...(19): siRNA sense strand
ucaauuacaaccacugcau

SEQ ID NO: 1924570 - RNA, 19 nt, Homo sapiens
  misc_RNA (1)...(19): siRNA sense strand
ccagaucgcuuuaaacaua

SEQ ID NO: 1924571 - RNA, 19 nt, Homo sapiens
  misc_RNA (1)...(19): siRNA sense strand
gaucauggcauuccuauua

SEQ ID NO: 1924572 - RNA, 19 nt, Homo sapiens
  misc_RNA (1)...(19): siRNA sense strand
gcaagaacgugcggauuua

SEQ ID NO: 1924573 - RNA, 19 nt, Homo sapiens
  misc_RNA (1)...(19): siRNA sense strand
caaauagccuugaggaaau

SEQ ID NO: 1924574 - RNA, 19 nt, Homo sapiens
  misc_RNA (1)...(19): siRNA sense strand
gaagaaaacugaagaggaa

SEQ ID NO: 1924575 - RNA, 19 nt, Homo sapiens
  misc_RNA (1)...(19): siRNA sense strand
ggacagaaguagaaguaga

SEQ ID NO: 1924576 - RNA, 19 nt, Homo sapiens
  misc_RNA (1)...(19): siRNA sense strand
caacaucuaugccuacaga

SEQ ID NO: 1924577 - RNA, 19 nt, Homo sapiens
  misc_RNA (1)...(19): siRNA sense strand
ggauaaacagaccuucuua

SEQ ID NO: 1924578 - RNA, 19 nt, Homo sapiens
  misc_RNA (1)...(19): siRNA sense strand
agaggaagauguugaaugu

SEQ ID NO: 1924579 - RNA, 19 nt, Homo sapiens
  misc_RNA (1)...(19): siRNA sense strand
caacugugccagaaacaua

SEQ ID NO: 1924580 - RNA, 19 nt, Homo sapiens
  misc_RNA (1)...(19): siRNA sense strand
cagaauauauugugaggau

SEQ ID NO: 1924581 - RNA, 19 nt, Homo sapiens
  misc_RNA (1)...(19): siRNA sense strand
ggaagauguugaaugugaa

SEQ ID NO: 1924582 - RNA, 19 nt, Homo sapiens
  misc_RNA (1)...(19): siRNA sense strand
ccaccuaucuaccaguuga

SEQ ID NO: 1924583 - RNA, 19 nt, Homo sapiens
  misc_RNA (1)...(19): siRNA sense strand
caucuaugccuacagaaua

SEQ ID NO: 1924584 - RNA, 19 nt, Homo sapiens
  misc_RNA (1)...(19): siRNA sense strand
gaagaauuaccuccgauug

SEQ ID NO: 1924585 - RNA, 19 nt, Homo sapiens
  misc_RNA (1)...(19): siRNA sense strand
cagaauaucggugaaagua

SEQ ID NO: 1924586 - RNA, 19 nt, Homo sapiens
  misc_RNA (1)...(19): siRNA sense strand
aggaagauguugaauguga

SEQ ID NO: 1924587 - RNA, 19 nt, Homo sapiens
  misc_RNA (1)...(19): siRNA sense strand
ggcaagaacgugcggauuu

SEQ ID NO: 1924588 - RNA, 19 nt, Homo sapiens
  misc_RNA (1)...(19): siRNA sense strand
caacaacugugccagaaac

SEQ ID NO: 1924589 - RNA, 19 nt, Homo sapiens
  misc_RNA (1)...(19): siRNA sense strand
gaccagaucgcuuuaaaca

SEQ ID NO: 1924590 - RNA, 19 nt, Homo sapiens
  misc_RNA (1)...(19): siRNA sense strand
guacagcuccaccuaucua

SEQ ID NO: 1924591 - RNA, 19 nt, Homo sapiens
  misc_RNA (1)...(19): siRNA sense strand
ggaguggugugucauugau

SEQ ID NO: 1924592 - RNA, 19 nt, Homo sapiens
  misc_RNA (1)...(19): siRNA sense strand
aaauagccuugaggaaaua

SEQ ID NO: 1924593 - RNA, 19 nt, Homo sapiens
  misc_RNA (1)...(19): siRNA sense strand
caucuaaggcuuugggaaa

SEQ ID NO: 1924594 - RNA, 19 nt, Homo sapiens
  misc_RNA (1)...(19): siRNA sense strand
ggagucaucuaaggcuuug

SEQ ID NO: 1924595 - RNA, 19 nt, Homo sapiens
  misc_RNA (1)...(19): siRNA sense strand
gcuaggaccagaucgcuuu

SEQ ID NO: 1924596 - RNA, 19 nt, Homo sapiens
  misc_RNA (1)...(19): siRNA sense strand
agaaguagaaguagaagaa

SEQ ID NO: 1924597 - RNA, 19 nt, Homo sapiens
  misc_RNA (1)...(19): siRNA sense strand
gaggaguggugugucauug

SEQ ID NO: 1924598 - RNA, 19 nt, Homo sapiens
  misc_RNA (1)...(19): siRNA sense strand
gcagaaugaggaaauugaa

SEQ ID NO: 1924599 - RNA, 19 nt, Homo sapiens
  misc_RNA (1)...(19): siRNA sense strand
gacagaaguagaaguagaa

SEQ ID NO: 1924600 - RNA, 19 nt, Homo sapiens
  misc_RNA (1)...(19): siRNA sense strand
gaaaagacaagaagaggaa

SEQ ID NO: 1924601 - RNA, 19 nt, Homo sapiens
  misc_RNA (1)...(19): siRNA sense strand
gaaugcuccuuggcuuaaa

SEQ ID NO: 1924602 - RNA, 19 nt, Homo sapiens
  misc_RNA (1)...(19): siRNA sense strand
agaauuaccuccgauugau

SEQ ID NO: 1924603 - RNA, 19 nt, Homo sapiens
  misc_RNA (1)...(19): siRNA sense strand
gauguugaaugugaagaug

SEQ ID NO: 1924604 - RNA, 19 nt, Homo sapiens
  misc_RNA (1)...(19): siRNA sense strand
gaggcagaaugaggaaauu

SEQ ID NO: 1924605 - RNA, 19 nt, Homo sapiens
  misc_RNA (1)...(19): siRNA sense strand
gaaacauacuaguggaaaa

SEQ ID NO: 1924606 - RNA, 19 nt, Homo sapiens
  misc_RNA (1)...(19): siRNA sense strand
gguaguaucacgcugguau

SEQ ID NO: 1924607 - RNA, 19 nt, Homo sapiens
  misc_RNA (1)...(19): siRNA sense strand
uagaauuagcgacgauaua

SEQ ID NO: 1924608 - RNA, 19 nt, Homo sapiens
  misc_RNA (1)...(19): siRNA sense strand
caccugaggagucaucuaa

SEQ ID NO: 1924609 - RNA, 19 nt, Homo sapiens
  misc_RNA (1)...(19): siRNA sense strand
cgauauagaugaccccaaa

SEQ ID NO: 1924610 - RNA, 19 nt, Homo sapiens
  misc_RNA (1)...(19): siRNA sense strand
gaauuagcgacgauauaga

SEQ ID NO: 1924611 - RNA, 19 nt, Homo sapiens
  misc_RNA (1)...(19): siRNA sense strand
cagaucgcuuuaaacauau

SEQ ID NO: 1924612 - RNA, 19 nt, Homo sapiens
  misc_RNA (1)...(19): siRNA sense strand
gaacgugcggauuuaucaa

SEQ ID NO: 1924613 - RNA, 19 nt, Homo sapiens
  misc_RNA (1)...(19): siRNA sense strand
gaagaaugucaugguggua

SEQ ID NO: 1924614 - RNA, 19 nt, Homo sapiens
  misc_RNA (1)...(19): siRNA sense strand
ugaaugcuccuuggcuuaa

SEQ ID NO: 1924615 - RNA, 19 nt, Homo sapiens
  misc_RNA (1)...(19): siRNA sense strand
aaacugaagaggaagaugu

SEQ ID NO: 1924616 - RNA, 19 nt, Homo sapiens
  misc_RNA (1)...(19): siRNA sense strand
cagugaaacucggacagaa

SEQ ID NO: 1924617 - RNA, 19 nt, Homo sapiens
  misc_RNA (1)...(19): siRNA sense strand
caugucagccggaaaguuc

SEQ ID NO: 1924618 - RNA, 19 nt, Homo sapiens
  misc_RNA (1)...(19): siRNA sense strand
ugaagaggaagauguugaa

SEQ ID NO: 1924619 - RNA, 19 nt, Homo sapiens
  misc_RNA (1)...(19): siRNA sense strand
ggcagaaugaggaaauuga

SEQ ID NO: 1924620 - RNA, 19 nt, Homo sapiens
  misc_RNA (1)...(19): siRNA sense strand
ggaaaagaacuacacaaau

SEQ ID NO: 1924621 - RNA, 19 nt, Homo sapiens
  misc_RNA (1)...(19): siRNA sense strand
ccuacagaauauauuguga

SEQ ID NO: 1924622 - RNA, 19 nt, Homo sapiens
  misc_RNA (1)...(19): siRNA sense strand
gaaguagaaguagaagaau

SEQ ID NO: 1924623 - RNA, 19 nt, Homo sapiens
  misc_RNA (1)...(19): siRNA sense strand
aagaauuaccuccgauuga

SEQ ID NO: 1924624 - RNA, 19 nt, Homo sapiens
  misc_RNA (1)...(19): siRNA sense strand
ggcgaggagugguguguca

SEQ ID NO: 1924625 - RNA, 19 nt, Homo sapiens
  misc_RNA (1)...(19): siRNA sense strand
acaagaagaggaaugaaca

SEQ ID NO: 1924626 - RNA, 19 nt, Homo sapiens
  misc_RNA (1)...(19): siRNA sense strand
aggaccagaucgcuuuaaa

SEQ ID NO: 1924627 - RNA, 19 nt, Homo sapiens
  misc_RNA (1)...(19): siRNA sense strand
gaaacucggacagaaguag

SEQ ID NO: 1924628 - RNA, 19 nt, Homo sapiens
  misc_RNA (1)...(19): siRNA sense strand
gcgaccagaggcagaauga

SEQ ID NO: 1924629 - RNA, 19 nt, Homo sapiens
  misc_RNA (1)...(19): siRNA sense strand
ucggacagaaguagaagua

SEQ ID NO: 1924630 - RNA, 19 nt, Homo sapiens
  misc_RNA (1)...(19): siRNA sense strand
aaauucaccugaggaguca

SEQ ID NO: 1924631 - RNA, 19 nt, Homo sapiens
  misc_RNA (1)...(19): siRNA sense strand
ucauggagauuuugaaugu

SEQ ID NO: 1924632 - RNA, 19 nt, Homo sapiens
  misc_RNA (1)...(19): siRNA sense strand
gaaugucauggugguagua

SEQ ID NO: 1924633 - RNA, 19 nt, Homo sapiens
  misc_RNA (1)...(19): siRNA sense strand
agaauuagcgacgauauag

SEQ ID NO: 1924634 - RNA, 19 nt, Homo sapiens
  misc_RNA (1)...(19): siRNA sense strand
ugaugacugugccaaaaua

SEQ ID NO: 1924635 - RNA, 19 nt, Homo sapiens
  misc_RNA (1)...(19): siRNA sense strand
gaaugugaagaaugucaug

SEQ ID NO: 1924636 - RNA, 19 nt, Homo sapiens
  misc_RNA (1)...(19): siRNA sense strand
auaaacagaccuucuuaca

SEQ ID NO: 1924637 - RNA, 19 nt, Homo sapiens
  misc_RNA (1)...(19): siRNA sense strand
gauaaacagaccuucuuac

SEQ ID NO: 1924638 - RNA, 19 nt, Homo sapiens
  misc_RNA (1)...(19): siRNA sense strand
gaaugaggaaauugaagca

SEQ ID NO: 1924639 - RNA, 19 nt, Homo sapiens
  misc_RNA (1)...(19): siRNA sense strand
ugaugcugccgaaugaaua

SEQ ID NO: 1924640 - RNA, 19 nt, Homo sapiens
  misc_RNA (1)...(19): siRNA sense strand
gaagaggaagauguugaau

SEQ ID NO: 1924641 - RNA, 19 nt, Homo sapiens
  misc_RNA (1)...(19): siRNA sense strand
gaagauguugaaugugaag

SEQ ID NO: 1924642 - RNA, 19 nt, Homo sapiens
  misc_RNA (1)...(19): siRNA sense strand
ccaaacaggugaaaauggu

SEQ ID NO: 1924643 - RNA, 19 nt, Homo sapiens
  misc_RNA (1)...(19): siRNA sense strand
gaauuaccuccgauugauc

SEQ ID NO: 1924644 - RNA, 19 nt, Homo sapiens
  misc_RNA (1)...(19): siRNA sense strand
caagaacgugcggauuuau

SEQ ID NO: 1924645 - RNA, 19 nt, Homo sapiens
  misc_RNA (1)...(19): siRNA sense strand
agaaacauacuaguggaaa

SEQ ID NO: 1924646 - RNA, 19 nt, Homo sapiens
  misc_RNA (1)...(19): siRNA sense strand
guauggagggauucugcua

SEQ ID NO: 1924647 - RNA, 19 nt, Homo sapiens
  misc_RNA (1)...(19): siRNA sense strand
cagaccuucuuacaggauu

SEQ ID NO: 1924648 - RNA, 19 nt, Homo sapiens
  misc_RNA (1)...(19): siRNA sense strand
uaaacagaccuucuuacag

SEQ ID NO: 1924649 - RNA, 19 nt, Homo sapiens
  misc_RNA (1)...(19): siRNA sense strand
gacaagaagaggaaugaac

SEQ ID NO: 1924650 - RNA, 19 nt, Homo sapiens
  misc_RNA (1)...(19): siRNA sense strand
aggugaugcugccgaauga

SEQ ID NO: 1924651 - RNA, 19 nt, Homo sapiens
  misc_RNA (1)...(19): siRNA sense strand
ugacugugccaaaauauuu

SEQ ID NO: 1924652 - RNA, 19 nt, Homo sapiens
  misc_RNA (1)...(19): siRNA sense strand
gcuggugggcgucuucuuc

SEQ ID NO: 1924653 - RNA, 19 nt, Homo sapiens
  misc_RNA (1)...(19): siRNA sense strand
gaggauaaacagaccuucu

SEQ ID NO: 1924654 - RNA, 19 nt, Homo sapiens
  misc_RNA (1)...(19): siRNA sense strand
aaugguucuuuccaaauug

SEQ ID NO: 1924655 - RNA, 19 nt, Homo sapiens
  misc_RNA (1)...(19): siRNA sense strand
ccugaggagucaucuaagg

SEQ ID NO: 1924656 - RNA, 19 nt, Homo sapiens
  misc_RNA (1)...(19): siRNA sense strand
gccuugaggaaauauauau

SEQ ID NO: 1924657 - RNA, 19 nt, Homo sapiens
  misc_RNA (1)...(19): siRNA sense strand
cgaggaguggugugucauu

SEQ ID NO: 1924658 - RNA, 19 nt, Homo sapiens
  misc_RNA (1)...(19): siRNA sense strand
cagaaacauacuaguggaa

SEQ ID NO: 1924659 - RNA, 19 nt, Homo sapiens
  misc_RNA (1)...(19): siRNA sense strand
ggagcgaccagaggcagaa

SEQ ID NO: 1924660 - RNA, 19 nt, Homo sapiens
  misc_RNA (1)...(19): siRNA sense strand
gugaaacucggacagaagu

SEQ ID NO: 1924661 - RNA, 19 nt, Homo sapiens
  misc_RNA (1)...(19): siRNA sense strand
gaccccaaauggacacuuu

SEQ ID NO: 1924662 - RNA, 19 nt, Homo sapiens
  misc_RNA (1)...(19): siRNA sense strand
caggugaugcugccgaaug

SEQ ID NO: 1924663 - RNA, 19 nt, Homo sapiens
  misc_RNA (1)...(19): siRNA sense strand
ucaacaacugugccagaaa

SEQ ID NO: 1924664 - RNA, 19 nt, Homo sapiens
  misc_RNA (1)...(19): siRNA sense strand
gcaugucagccggaaaguu

SEQ ID NO: 1924665 - RNA, 19 nt, Homo sapiens
  misc_RNA (1)...(19): siRNA sense strand
gcuagugccacccacaaca

SEQ ID NO: 1924666 - RNA, 19 nt, Homo sapiens
  misc_RNA (1)...(19): siRNA sense strand
caagaagaggaaugaacau

SEQ ID NO: 1924667 - RNA, 19 nt, Homo sapiens
  misc_RNA (1)...(19): siRNA sense strand
gggcaagaacgugcggauu

SEQ ID NO: 1924668 - RNA, 19 nt, Homo sapiens
  misc_RNA (1)...(19): siRNA sense strand
ggaccagaucgcuuuaaac

SEQ ID NO: 1924669 - RNA, 19 nt, Homo sapiens
  misc_RNA (1)...(19): siRNA sense strand
acgcugguauggagggauu

SEQ ID NO: 1924670 - RNA, 19 nt, Homo sapiens
  misc_RNA (1)...(19): siRNA sense strand
ggaaaucucuccaugguua

SEQ ID NO: 1924671 - RNA, 19 nt, Homo sapiens
  misc_RNA (1)...(19): siRNA sense strand
gaaaguguauucgcaguua

SEQ ID NO: 1924672 - RNA, 19 nt, Homo sapiens
  misc_RNA (1)...(19): siRNA sense strand
caucagagcuuauuuggaa

SEQ ID NO: 1924673 - RNA, 19 nt, Homo sapiens
  misc_RNA (1)...(19): siRNA sense strand
uaucagugcuguuauguua

SEQ ID NO: 1924674 - RNA, 19 nt, Homo sapiens
  misc_RNA (1)...(19): siRNA sense strand
gcaaugcaauuaugagaaa

SEQ ID NO: 1924675 - RNA, 19 nt, Homo sapiens
  misc_RNA (1)...(19): siRNA sense strand
ggaaaguguuacagaauuu

SEQ ID NO: 1924676 - RNA, 19 nt, Homo sapiens
  misc_RNA (1)...(19): siRNA sense strand
caaauggucuuacugagaa

SEQ ID NO: 1924677 - RNA, 19 nt, Homo sapiens
  misc_RNA (1)...(19): siRNA sense strand
gcagaaaucuauaaucagu

SEQ ID NO: 1924678 - RNA, 19 nt, Homo sapiens
  misc_RNA (1)...(19): siRNA sense strand
gagaauaucugggagcaaa

SEQ ID NO: 1924679 - RNA, 19 nt, Homo sapiens
  misc_RNA (1)...(19): siRNA sense strand
gaaacagagugcucagaaa

SEQ ID NO: 1924680 - RNA, 19 nt, Homo sapiens
  misc_RNA (1)...(19): siRNA sense strand
ggaggaaguuucuauugaa

SEQ ID NO: 1924681 - RNA, 19 nt, Homo sapiens
  misc_RNA (1)...(19): siRNA sense strand
gcacgaagcugcaaaagaa

SEQ ID NO: 1924682 - RNA, 19 nt, Homo sapiens
  misc_RNA (1)...(19): siRNA sense strand
caaagaagaccaugaaaga

SEQ ID NO: 1924683 - RNA, 19 nt, Homo sapiens
  misc_RNA (1)...(19): siRNA sense strand
ggaaguuucuauugaaguu

SEQ ID NO: 1924684 - RNA, 19 nt, Homo sapiens
  misc_RNA (1)...(19): siRNA sense strand
gaaaguggcucaugaacac

SEQ ID NO: 1924685 - RNA, 19 nt, Homo sapiens
  misc_RNA (1)...(19): siRNA sense strand
gcuggaaacuguaccauga

SEQ ID NO: 1924686 - RNA, 19 nt, Homo sapiens
  misc_RNA (1)...(19): siRNA sense strand
guaauugacugguugguau

SEQ ID NO: 1924687 - RNA, 19 nt, Homo sapiens
  misc_RNA (1)...(19): siRNA sense strand
gauauuuccugcauucuug

SEQ ID NO: 1924688 - RNA, 19 nt, Homo sapiens
  misc_RNA (1)...(19): siRNA sense strand
gaagcugcauccaugagua

SEQ ID NO: 1924689 - RNA, 19 nt, Homo sapiens
  misc_RNA (1)...(19): siRNA sense strand
gaaacaaggcaaugcaauu

SEQ ID NO: 1924690 - RNA, 19 nt, Homo sapiens
  misc_RNA (1)...(19): siRNA sense strand
gaagaacucccuagagaau

SEQ ID NO: 1924691 - RNA, 19 nt, Homo sapiens
  misc_RNA (1)...(19): siRNA sense strand
ccagggacuugacccauua

SEQ ID NO: 1924692 - RNA, 19 nt, Homo sapiens
  misc_RNA (1)...(19): siRNA sense strand
ggaggcugcuggcuucuuu

SEQ ID NO: 1924693 - RNA, 19 nt, Homo sapiens
  misc_RNA (1)...(19): siRNA sense strand
ggaagcccaugaaaccuuu

SEQ ID NO: 1924694 - RNA, 19 nt, Homo sapiens
  misc_RNA (1)...(19): siRNA sense strand
ggacaggaguggcuuugga

SEQ ID NO: 1924695 - RNA, 19 nt, Homo sapiens
  misc_RNA (1)...(19): siRNA sense strand
uagagaagaugaaguuaga

SEQ ID NO: 1924696 - RNA, 19 nt, Homo sapiens
  misc_RNA (1)...(19): siRNA sense strand
ggaagagaaucaagaacau

SEQ ID NO: 1924697 - RNA, 19 nt, Homo sapiens
  misc_RNA (1)...(19): siRNA sense strand
caugaaaccuuuaaugagu

SEQ ID NO: 1924698 - RNA, 19 nt, Homo sapiens
  misc_RNA (1)...(19): siRNA sense strand
aaacaaggcaaugcaauua

SEQ ID NO: 1924699 - RNA, 19 nt, Homo sapiens
  misc_RNA (1)...(19): siRNA sense strand
ggaguuggcuaaagaagca

SEQ ID NO: 1924700 - RNA, 19 nt, Homo sapiens
  misc_RNA (1)...(19): siRNA sense strand
ugaaagaacacaucaaaug

SEQ ID NO: 1924701 - RNA, 19 nt, Homo sapiens
  misc_RNA (1)...(19): siRNA sense strand
gcagcugacuucuuacguu

SEQ ID NO: 1924702 - RNA, 19 nt, Homo sapiens
  misc_RNA (1)...(19): siRNA sense strand
ggacaccugcuucgcuuua

SEQ ID NO: 1924703 - RNA, 19 nt, Homo sapiens
  misc_RNA (1)...(19): siRNA sense strand
ggauagagaagaugaaguu

SEQ ID NO: 1924704 - RNA, 19 nt, Homo sapiens
  misc_RNA (1)...(19): siRNA sense strand
ggaugaaacugaagaacuc

SEQ ID NO: 1924705 - RNA, 19 nt, Homo sapiens
  misc_RNA (1)...(19): siRNA sense strand
uaaggaaguugcugcagaa

SEQ ID NO: 1924706 - RNA, 19 nt, Homo sapiens
  misc_RNA (1)...(19): siRNA sense strand
cauacgauauugcacagua

SEQ ID NO: 1924707 - RNA, 19 nt, Homo sapiens
  misc_RNA (1)...(19): siRNA sense strand
gaaagaacacaucaaaugg

SEQ ID NO: 1924708 - RNA, 19 nt, Homo sapiens
  misc_RNA (1)...(19): siRNA sense strand
gaaaauguauaacgucuug

SEQ ID NO: 1924709 - RNA, 19 nt, Homo sapiens
  misc_RNA (1)...(19): siRNA sense strand
uaacugggcagcugcauuu

SEQ ID NO: 1924710 - RNA, 19 nt, Homo sapiens
  misc_RNA (1)...(19): siRNA sense strand
ggaaacagagugcucagaa

SEQ ID NO: 1924711 - RNA, 19 nt, Homo sapiens
  misc_RNA (1)...(19): siRNA sense strand
gauacgagagagcaauuua

SEQ ID NO: 1924712 - RNA, 19 nt, Homo sapiens
  misc_RNA (1)...(19): siRNA sense strand
ggagcaaacuggacguuag

SEQ ID NO: 1924713 - RNA, 19 nt, Homo sapiens
  misc_RNA (1)...(19): siRNA sense strand
ccagauauuuccugcauuc

SEQ ID NO: 1924714 - RNA, 19 nt, Homo sapiens
  misc_RNA (1)...(19): siRNA sense strand
guagauugguuagagagua

SEQ ID NO: 1924715 - RNA, 19 nt, Homo sapiens
  misc_RNA (1)...(19): siRNA sense strand
ucagagggauucacuuguu

SEQ ID NO: 1924716 - RNA, 19 nt, Homo sapiens
  misc_RNA (1)...(19): siRNA sense strand
aacggcagcugacuucuua

SEQ ID NO: 1924717 - RNA, 19 nt, Homo sapiens
  misc_RNA (1)...(19): siRNA sense strand
ucaggaaugccuacaguua

SEQ ID NO: 1924718 - RNA, 19 nt, Homo sapiens
  misc_RNA (1)...(19): siRNA sense strand
uaccaugacccuaauguua

SEQ ID NO: 1924719 - RNA, 19 nt, Homo sapiens
  misc_RNA (1)...(19): siRNA sense strand
gcugcuggcuucuuuguau

SEQ ID NO: 1924720 - RNA, 19 nt, Homo sapiens
  misc_RNA (1)...(19): siRNA sense strand
uagagaggaugccaaagaa

SEQ ID NO: 1924721 - RNA, 19 nt, Homo sapiens
  misc_RNA (1)...(19): siRNA sense strand
uaaagaagcagauuuggau

SEQ ID NO: 1924722 - RNA, 19 nt, Homo sapiens
  misc_RNA (1)...(19): siRNA sense strand
gcacaacgacucuguaaac

SEQ ID NO: 1924723 - RNA, 19 nt, Homo sapiens
  misc_RNA (1)...(19): siRNA sense strand
aaagucagcuggugguaga

SEQ ID NO: 1924724 - RNA, 19 nt, Homo sapiens
  misc_RNA (1)...(19): siRNA sense strand
ggaaguugcugcagaagcu

SEQ ID NO: 1924725 - RNA, 19 nt, Homo sapiens
  misc_RNA (1)...(19): siRNA sense strand
uauaacgucuuguuguuug

SEQ ID NO: 1924726 - RNA, 19 nt, Homo sapiens
  misc_RNA (1)...(19): siRNA sense strand
gagagaaacauacaaaucu

SEQ ID NO: 1924727 - RNA, 19 nt, Homo sapiens
  misc_RNA (1)...(19): siRNA sense strand
cugaagaacucccuagaga

SEQ ID NO: 1924728 - RNA, 19 nt, Homo sapiens
  misc_RNA (1)...(19): siRNA sense strand
guuccgggcuguucacaaa

SEQ ID NO: 1924729 - RNA, 19 nt, Homo sapiens
  misc_RNA (1)...(19): siRNA sense strand
gagaagaugaaguuagauu

SEQ ID NO: 1924730 - RNA, 19 nt, Homo sapiens
  misc_RNA (1)...(19): siRNA sense strand
gaauacagucugcauuaga

SEQ ID NO: 1924731 - RNA, 19 nt, Homo sapiens
  misc_RNA (1)...(19): siRNA sense strand
ugaagggaauccauauaga

SEQ ID NO: 1924732 - RNA, 19 nt, Homo sapiens
  misc_RNA (1)...(19): siRNA sense strand
agacauugaugguuugaug

SEQ ID NO: 1924733 - RNA, 19 nt, Homo sapiens
  misc_RNA (1)...(19): siRNA sense strand
acaguuagcagauauggua

SEQ ID NO: 1924734 - RNA, 19 nt, Homo sapiens
  misc_RNA (1)...(19): siRNA sense strand
uggaaaguguuacagaauu

SEQ ID NO: 1924735 - RNA, 19 nt, Homo sapiens
  misc_RNA (1)...(19): siRNA sense strand
ggacccugaugcucccaua

SEQ ID NO: 1924736 - RNA, 19 nt, Homo sapiens
  misc_RNA (1)...(19): siRNA sense strand
caugaaagaacacaucaaa

SEQ ID NO: 1924737 - RNA, 19 nt, Homo sapiens
  misc_RNA (1)...(19): siRNA sense strand
gagaggaugccaaagaaga

SEQ ID NO: 1924738 - RNA, 19 nt, Homo sapiens
  misc_RNA (1)...(19): siRNA sense strand
gaggguggaugguggaugu

SEQ ID NO: 1924739 - RNA, 19 nt, Homo sapiens
  misc_RNA (1)...(19): siRNA sense strand
uagagaguauugccaaaga

SEQ ID NO: 1924740 - RNA, 19 nt, Homo sapiens
  misc_RNA (1)...(19): siRNA sense strand
gaacacaucaaauggucuu

SEQ ID NO: 1924741 - RNA, 19 nt, Homo sapiens
  misc_RNA (1)...(19): siRNA sense strand
gguuuaagcauaugaauuc

SEQ ID NO: 1924742 - RNA, 19 nt, Homo sapiens
  misc_RNA (1)...(19): siRNA sense strand
gaaaauucuuggcaucaaa

SEQ ID NO: 1924743 - RNA, 19 nt, Homo sapiens
  misc_RNA (1)...(19): siRNA sense strand
gaagagaaucaagaacauu

SEQ ID NO: 1924744 - RNA, 19 nt, Homo sapiens
  misc_RNA (1)...(19): siRNA sense strand
gaguggcuuuggagagaua

SEQ ID NO: 1924745 - RNA, 19 nt, Homo sapiens
  misc_RNA (1)...(19): siRNA sense strand
caucaaauggucuuacuga

SEQ ID NO: 1924746 - RNA, 19 nt, Homo sapiens
  misc_RNA (1)...(19): siRNA sense strand
ugggagacauugaugguuu

SEQ ID NO: 1924747 - RNA, 19 nt, Homo sapiens
  misc_RNA (1)...(19): siRNA sense strand
gaaaacaucugugguaguc

SEQ ID NO: 1924748 - RNA, 19 nt, Homo sapiens
  misc_RNA (1)...(19): siRNA sense strand
aaugagugguuuaagcaua

SEQ ID NO: 1924749 - RNA, 19 nt, Homo sapiens
  misc_RNA (1)...(19): siRNA sense strand
gaacaaggaauggaaaguc

SEQ ID NO: 1924750 - RNA, 19 nt, Homo sapiens
  misc_RNA (1)...(19): siRNA sense strand
gagaauauucgaaagaaag

SEQ ID NO: 1924751 - RNA, 19 nt, Homo sapiens
  misc_RNA (1)...(19): siRNA sense strand
gaagaugaaguuagauuac

SEQ ID NO: 1924752 - RNA, 19 nt, Homo sapiens
  misc_RNA (1)...(19): siRNA sense strand
aauacagucugcauuagaa

SEQ ID NO: 1924753 - RNA, 19 nt, Homo sapiens
  misc_RNA (1)...(19): siRNA sense strand
agaacucccuagagaauau

SEQ ID NO: 1924754 - RNA, 19 nt, Homo sapiens
  misc_RNA (1)...(19): siRNA sense strand
uguauaacgucuuguuguu

SEQ ID NO: 1924755 - RNA, 19 nt, Homo sapiens
  misc_RNA (1)...(19): siRNA sense strand
cgagaacauuugugcauca

SEQ ID NO: 1924756 - RNA, 19 nt, Homo sapiens
  misc_RNA (1)...(19): siRNA sense strand
ucauuugccucaagaccua

SEQ ID NO: 1924757 - RNA, 19 nt, Homo sapiens
  misc_RNA (1)...(19): siRNA sense strand
caguauaacagaagaugua

SEQ ID NO: 1924758 - RNA, 19 nt, Homo sapiens
  misc_RNA (1)...(19): siRNA sense strand
aggaagagcuaaggaaguu

SEQ ID NO: 1924759 - RNA, 19 nt, Homo sapiens
  misc_RNA (1)...(19): siRNA sense strand
acaaggcaaugcaauuaug

SEQ ID NO: 1924760 - RNA, 19 nt, Homo sapiens
  misc_RNA (1)...(19): siRNA sense strand
gaagcagauuuggauguug

SEQ ID NO: 1924761 - RNA, 19 nt, Homo sapiens
  misc_RNA (1)...(19): siRNA sense strand
gaggaaguuucuauugaag

SEQ ID NO: 1924762 - RNA, 19 nt, Homo sapiens
  misc_RNA (1)...(19): siRNA sense strand
aggaggaaguuucuauuga

SEQ ID NO: 1924763 - RNA, 19 nt, Homo sapiens
  misc_RNA (1)...(19): siRNA sense strand
gaguuuagcaaauggcuuu

SEQ ID NO: 1924764 - RNA, 19 nt, Homo sapiens
  misc_RNA (1)...(19): siRNA sense strand
gcaaacuggacguuagaaa

SEQ ID NO: 1924765 - RNA, 19 nt, Homo sapiens
  misc_RNA (1)...(19): siRNA sense strand
uuacuaaggcagccagaua

SEQ ID NO: 1924766 - RNA, 19 nt, Homo sapiens
  misc_RNA (1)...(19): siRNA sense strand
uugaugaucuggauagaga

SEQ ID NO: 1924767 - RNA, 19 nt, Homo sapiens
  misc_RNA (1)...(19): siRNA sense strand
gaacuucaagcuacugaca

SEQ ID NO: 1924768 - RNA, 19 nt, Homo sapiens
  misc_RNA (1)...(19): siRNA sense strand
gguaauacuacaccaagaa

SEQ ID NO: 1924769 - RNA, 19 nt, Homo sapiens
  misc_RNA (1)...(19): siRNA sense strand
gacacggacugcacggaaa

SEQ ID NO: 1924770 - RNA, 19 nt, Homo sapiens
  misc_RNA (1)...(19): siRNA sense strand
caguguggcugacaacuua

SEQ ID NO: 1924771 - RNA, 19 nt, Homo sapiens
  misc_RNA (1)...(19): siRNA sense strand
gauauugacaccucuaugu

SEQ ID NO: 1924772 - RNA, 19 nt, Homo sapiens
  misc_RNA (1)...(19): siRNA sense strand
cgaauuggacuaccucaug

SEQ ID NO: 1924773 - RNA, 19 nt, Homo sapiens
  misc_RNA (1)...(19): siRNA sense strand
gccucuagcucccucuuug

SEQ ID NO: 1924774 - RNA, 19 nt, Homo sapiens
  misc_RNA (1)...(19): siRNA sense strand
uggacuaccucauggaugu

SEQ ID NO: 1924775 - RNA, 19 nt, Homo sapiens
  misc_RNA (1)...(19): siRNA sense strand
guaugacaaugaacuuugg

SEQ ID NO: 1924776 - RNA, 19 nt, Homo sapiens
  misc_RNA (1)...(19): siRNA sense strand
gagggccuguuugaggaua

SEQ ID NO: 1924777 - RNA, 19 nt, Homo sapiens
  misc_RNA (1)...(19): siRNA sense strand
gggaggaggaggaggagaa

SEQ ID NO: 1924778 - RNA, 19 nt, Homo sapiens
  misc_RNA (1)...(19): siRNA sense strand
acaccucuauguaugacaa

SEQ ID NO: 1924779 - RNA, 19 nt, Homo sapiens
  misc_RNA (1)...(19): siRNA sense strand
gcuggacgaggccgaauug

SEQ ID NO: 1924780 - RNA, 19 nt, Homo sapiens
  misc_RNA (1)...(19): siRNA sense strand
ggaggaggaggagaaggaa

SEQ ID NO: 1924781 - RNA, 19 nt, Homo sapiens
  misc_RNA (1)...(19): siRNA sense strand
gggccuguuugaggauauu

SEQ ID NO: 1924782 - RNA, 19 nt, Homo sapiens
  misc_RNA (1)...(19): siRNA sense strand
uauugacaccucuauguau

SEQ ID NO: 1924783 - RNA, 19 nt, Homo sapiens
  misc_RNA (1)...(19): siRNA sense strand
ggauauugacaccucuaug

SEQ ID NO: 1924784 - RNA, 19 nt, Homo sapiens
  misc_RNA (1)...(19): siRNA sense strand
auauugacaccucuaugua

SEQ ID NO: 1924785 - RNA, 19 nt, Homo sapiens
  misc_RNA (1)...(19): siRNA sense strand
auugacaccucuauguaug

SEQ ID NO: 1924786 - RNA, 19 nt, Homo sapiens
  misc_RNA (1)...(19): siRNA sense strand
ccaguguggcugacaacuu

SEQ ID NO: 1924787 - RNA, 19 nt, Homo sapiens
  misc_RNA (1)...(19): siRNA sense strand
uguaugacaaugaacuuug

SEQ ID NO: 1924788 - RNA, 19 nt, Homo sapiens
  misc_RNA (1)...(19): siRNA sense strand
gcagugcucuggaaucugu

SEQ ID NO: 1924789 - RNA, 19 nt, Homo sapiens
  misc_RNA (1)...(19): siRNA sense strand
gcaacaccauccacaagaa

SEQ ID NO: 1924790 - RNA, 19 nt, Homo sapiens
  misc_RNA (1)...(19): siRNA sense strand
gagagaacuuguaaggauu

SEQ ID NO: 1924791 - RNA, 19 nt, Homo sapiens
  misc_RNA (1)...(19): siRNA sense strand
ggucaaaguugucuucauc

SEQ ID NO: 1924792 - RNA, 19 nt, Homo sapiens
  misc_RNA (1)...(19): siRNA sense strand
caacuucgcugugcucaug

SEQ ID NO: 1924793 - RNA, 19 nt, Homo sapiens
  misc_RNA (1)...(19): siRNA sense strand
gcaacaucgucaaguauga

SEQ ID NO: 1924794 - RNA, 19 nt, Homo sapiens
  misc_RNA (1)...(19): siRNA sense strand
gggccagucuccuucguua

SEQ ID NO: 1924795 - RNA, 19 nt, Homo sapiens
  misc_RNA (1)...(19): siRNA sense strand
ggcaagaacuacaacaaga

SEQ ID NO: 1924796 - RNA, 19 nt, Homo sapiens
  misc_RNA (1)...(19): siRNA sense strand
agaagaaggugcacaagga

SEQ ID NO: 1924797 - RNA, 19 nt, Homo sapiens
  misc_RNA (1)...(19): siRNA sense strand
ggaaugacacugugaggaa

SEQ ID NO: 1924798 - RNA, 19 nt, Homo sapiens
  misc_RNA (1)...(19): siRNA sense strand
gaaugacacugugaggaaa

SEQ ID NO: 1924799 - RNA, 19 nt, Homo sapiens
  misc_RNA (1)...(19): siRNA sense strand
gcacgugggagacggguua

SEQ ID NO: 1924800 - RNA, 19 nt, Homo sapiens
  misc_RNA (1)...(19): siRNA sense strand
agagagaacuuguaaggau

SEQ ID NO: 1924801 - RNA, 19 nt, Homo sapiens
  misc_RNA (1)...(19): siRNA sense strand
ucucagagcuggugcacaa

SEQ ID NO: 1924802 - RNA, 19 nt, Homo sapiens
  misc_RNA (1)...(19): siRNA sense strand
ggaaccaccugcugaccaa

SEQ ID NO: 1924803 - RNA, 19 nt, Homo sapiens
  misc_RNA (1)...(19): siRNA sense strand
ggacaagaaccacuucaau

SEQ ID NO: 1924804 - RNA, 19 nt, Homo sapiens
  misc_RNA (1)...(19): siRNA sense strand
ggucauggccuaucucuuc

SEQ ID NO: 1924805 - RNA, 19 nt, Homo sapiens
  misc_RNA (1)...(19): siRNA sense strand
gcggaaagaccgacauuga

SEQ ID NO: 1924806 - RNA, 19 nt, Homo sapiens
  misc_RNA (1)...(19): siRNA sense strand
gcagccaccucaccaacuu

SEQ ID NO: 1924807 - RNA, 19 nt, Homo sapiens
  misc_RNA (1)...(19): siRNA sense strand
ucacaguccugaacacaga

SEQ ID NO: 1924808 - RNA, 19 nt, Homo sapiens
  misc_RNA (1)...(19): siRNA sense strand
gcacggacgacaagauuug

SEQ ID NO: 1924809 - RNA, 19 nt, Homo sapiens
  misc_RNA (1)...(19): siRNA sense strand
gggagacggucaucaauac

SEQ ID NO: 1924810 - RNA, 19 nt, Homo sapiens
  misc_RNA (1)...(19): siRNA sense strand
cagcauccaucaacaagga

SEQ ID NO: 1924811 - RNA, 19 nt, Homo sapiens
  misc_RNA (1)...(19): siRNA sense strand
gcacggacacacugacuga

SEQ ID NO: 1924812 - RNA, 19 nt, Homo sapiens
  misc_RNA (1)...(19): siRNA sense strand
gacaagaaccacuucaaug

SEQ ID NO: 1924813 - RNA, 19 nt, Homo sapiens
  misc_RNA (1)...(19): siRNA sense strand
ggagacggguuacgacaag

SEQ ID NO: 1924814 - RNA, 19 nt, Homo sapiens
  misc_RNA (1)...(19): siRNA sense strand
aagaaccacuucaaugcua

SEQ ID NO: 1924815 - RNA, 19 nt, Homo sapiens
  misc_RNA (1)...(19): siRNA sense strand
cggacacacugacugagua

SEQ ID NO: 1924816 - RNA, 19 nt, Homo sapiens
  misc_RNA (1)...(19): siRNA sense strand
gcaagaacuacaacaagau

SEQ ID NO: 1924817 - RNA, 19 nt, Homo sapiens
  misc_RNA (1)...(19): siRNA sense strand
acaagaaccugugcaucaa

SEQ ID NO: 1924818 - RNA, 19 nt, Homo sapiens
  misc_RNA (1)...(19): siRNA sense strand
cauggacccugucaucuuc

SEQ ID NO: 1924819 - RNA, 19 nt, Homo sapiens
  misc_RNA (1)...(19): siRNA sense strand
gaggaguacccgagaaaga

SEQ ID NO: 1924820 - RNA, 19 nt, Homo sapiens
  misc_RNA (1)...(19): siRNA sense strand
gaacggcaacuucaauaac

SEQ ID NO: 1924821 - RNA, 19 nt, Homo sapiens
  misc_RNA (1)...(19): siRNA sense strand
gaagcaacacccgcuacua

SEQ ID NO: 1924822 - RNA, 19 nt, Homo sapiens
  misc_RNA (1)...(19): siRNA sense strand
uggagaaugugcagugcua

SEQ ID NO: 1924823 - RNA, 19 nt, Homo sapiens
  misc_RNA (1)...(19): siRNA sense strand
ucaaccagguggcccagaa

SEQ ID NO: 1924824 - RNA, 19 nt, Homo sapiens
  misc_RNA (1)...(19): siRNA sense strand
gcaaugggguggucaaagu

SEQ ID NO: 1924825 - RNA, 19 nt, Homo sapiens
  misc_RNA (1)...(19): siRNA sense strand
gauugaacuucucuauaag

SEQ ID NO: 1924826 - RNA, 19 nt, Homo sapiens
  misc_RNA (1)...(19): siRNA sense strand
cuacaacccucgcgacaac

SEQ ID NO: 1924827 - RNA, 19 nt, Homo sapiens
  misc_RNA (1)...(19): siRNA sense strand
ggucuucaucuucgucuuu

SEQ ID NO: 1924828 - RNA, 19 nt, Homo sapiens
  misc_RNA (1)...(19): siRNA sense strand
gcgcacggacgacaagauu

SEQ ID NO: 1924829 - RNA, 19 nt, Homo sapiens
  misc_RNA (1)...(19): siRNA sense strand
caagaacuacaacaagaug

SEQ ID NO: 1924830 - RNA, 19 nt, Homo sapiens
  misc_RNA (1)...(19): siRNA sense strand
caaggggacucgaggaauu

SEQ ID NO: 1924831 - RNA, 19 nt, Homo sapiens
  misc_RNA (1)...(19): siRNA sense strand
gggccgagauugaacuucu

SEQ ID NO: 1924832 - RNA, 19 nt, Homo sapiens
  misc_RNA (1)...(19): siRNA sense strand
gcagcgacgucaucauggu

SEQ ID NO: 1924833 - RNA, 19 nt, Homo sapiens
  misc_RNA (1)...(19): siRNA sense strand
agagaacuuguaaggauua

SEQ ID NO: 1924834 - RNA, 19 nt, Homo sapiens
  misc_RNA (1)...(19): siRNA sense strand
ccuacaaaguggagcagaa

SEQ ID NO: 1924835 - RNA, 19 nt, Homo sapiens
  misc_RNA (1)...(19): siRNA sense strand
ccaaaaccaucaagcagaa

SEQ ID NO: 1924836 - RNA, 19 nt, Homo sapiens
  misc_RNA (1)...(19): siRNA sense strand
ucgacaagacucaguauga

SEQ ID NO: 1924837 - RNA, 19 nt, Homo sapiens
  misc_RNA (1)...(19): siRNA sense strand
agaaccacuucaaugcuaa

SEQ ID NO: 1924838 - RNA, 19 nt, Homo sapiens
  misc_RNA (1)...(19): siRNA sense strand
cgagagagaacuuguaagg

SEQ ID NO: 1924839 - RNA, 19 nt, Homo sapiens
  misc_RNA (1)...(19): siRNA sense strand
cggaggauguggaaugaca

SEQ ID NO: 1924840 - RNA, 19 nt, Homo sapiens
  misc_RNA (1)...(19): siRNA sense strand
ucacugcgccuuacagaag

SEQ ID NO: 1924841 - RNA, 19 nt, Homo sapiens
  misc_RNA (1)...(19): siRNA sense strand
ggagaaugccacagugaag

SEQ ID NO: 1924842 - RNA, 19 nt, Homo sapiens
  misc_RNA (1)...(19): siRNA sense strand
ggacacacugacugaguau

SEQ ID NO: 1924843 - RNA, 19 nt, Homo sapiens
  misc_RNA (1)...(19): siRNA sense strand
ggaucgacaagacucagua

SEQ ID NO: 1924844 - RNA, 19 nt, Homo sapiens
  misc_RNA (1)...(19): siRNA sense strand
gcgcaacaucgucaaguau

SEQ ID NO: 1924845 - RNA, 19 nt, Homo sapiens
  misc_RNA (1)...(19): siRNA sense strand
cuacgauggugccgucuuc

SEQ ID NO: 1924846 - RNA, 19 nt, Homo sapiens
  misc_RNA (1)...(19): siRNA sense strand
ccguguacguggaugauga

SEQ ID NO: 1924847 - RNA, 19 nt, Homo sapiens
  misc_RNA (1)...(19): siRNA sense strand
gcaccucuaccugcuacua

SEQ ID NO: 1924848 - RNA, 19 nt, Homo sapiens
  misc_RNA (1)...(19): siRNA sense strand
cgcgcaacaucgucaagua

SEQ ID NO: 1924849 - RNA, 19 nt, Homo sapiens
  misc_RNA (1)...(19): siRNA sense strand
gaauucggaggauguggaa

SEQ ID NO: 1924850 - RNA, 19 nt, Homo sapiens
  misc_RNA (1)...(19): siRNA sense strand
agaaggugcacaaggagua

SEQ ID NO: 1924851 - RNA, 19 nt, Homo sapiens
  misc_RNA (1)...(19): siRNA sense strand
gagaacuuguaaggauuau

SEQ ID NO: 1924852 - RNA, 19 nt, Homo sapiens
  misc_RNA (1)...(19): siRNA sense strand
gacgucuccuccucuguga

SEQ ID NO: 1924853 - RNA, 19 nt, Homo sapiens
  misc_RNA (1)...(19): siRNA sense strand
gacaagcgcucggcaucca

SEQ ID NO: 1924854 - RNA, 19 nt, Homo sapiens
  misc_RNA (1)...(19): siRNA sense strand
ggccuccucuucaucaaca

SEQ ID NO: 1924855 - RNA, 19 nt, Homo sapiens
  misc_RNA (1)...(19): siRNA sense strand
gguggagaaugccaacuac

SEQ ID NO: 1924856 - RNA, 19 nt, Homo sapiens
  misc_RNA (1)...(19): siRNA sense strand
caacacccgcuacuacaca

SEQ ID NO: 1924857 - RNA, 19 nt, Homo sapiens
  misc_RNA (1)...(19): siRNA sense strand
ggcuccgaguggacaauua

SEQ ID NO: 1924858 - RNA, 19 nt, Homo sapiens
  misc_RNA (1)...(19): siRNA sense strand
ccggacgccuucaagauca

SEQ ID NO: 1924859 - RNA, 19 nt, Homo sapiens
  misc_RNA (1)...(19): siRNA sense strand
gcgccucucuaguggugaa

SEQ ID NO: 1924860 - RNA, 19 nt, Homo sapiens
  misc_RNA (1)...(19): siRNA sense strand
gagagagaacuuguaagga

SEQ ID NO: 1924861 - RNA, 19 nt, Homo sapiens
  misc_RNA (1)...(19): siRNA sense strand
cuacaaaguggagcagaaa

SEQ ID NO: 1924862 - RNA, 19 nt, Homo sapiens
  misc_RNA (1)...(19): siRNA sense strand
gcaaccgcguggacuaugc

SEQ ID NO: 1924863 - RNA, 19 nt, Homo sapiens
  misc_RNA (1)...(19): siRNA sense strand
cuacggacgcgcaucaaga

SEQ ID NO: 1924864 - RNA, 19 nt, Homo sapiens
  misc_RNA (1)...(19): siRNA sense strand
ggauguggaaugacacugu

SEQ ID NO: 1924865 - RNA, 19 nt, Homo sapiens
  misc_RNA (1)...(19): siRNA sense strand
gcaucgcggcugccauuga

SEQ ID NO: 1924866 - RNA, 19 nt, Homo sapiens
  misc_RNA (1)...(19): siRNA sense strand
ccggccugcugcacuauuu

SEQ ID NO: 1924867 - RNA, 19 nt, Homo sapiens
  misc_RNA (1)...(19): siRNA sense strand
ccacggagaaugccacagu

SEQ ID NO: 1924868 - RNA, 19 nt, Homo sapiens
  misc_RNA (1)...(19): siRNA sense strand
aagcagaacagccgcaaug

SEQ ID NO: 1924869 - RNA, 19 nt, Homo sapiens
  misc_RNA (1)...(19): siRNA sense strand
caggaggaguacccgagaa

SEQ ID NO: 1924870 - RNA, 19 nt, Homo sapiens
  misc_RNA (1)...(19): siRNA sense strand
caacaaccugggccucuuc

SEQ ID NO: 1924871 - RNA, 19 nt, Homo sapiens
  misc_RNA (1)...(19): siRNA sense strand
cagagcuggugcacaacaa

SEQ ID NO: 1924872 - RNA, 19 nt, Homo sapiens
  misc_RNA (1)...(19): siRNA sense strand
aacggcaacuucaauaaca

SEQ ID NO: 1924873 - RNA, 19 nt, Homo sapiens
  misc_RNA (1)...(19): siRNA sense strand
acucacggaucccucaaga

SEQ ID NO: 1924874 - RNA, 19 nt, Homo sapiens
  misc_RNA (1)...(19): siRNA sense strand
gaucgacaagacucaguau

SEQ ID NO: 1924875 - RNA, 19 nt, Homo sapiens
  misc_RNA (1)...(19): siRNA sense strand
cgacaagauuugcgaugcu

SEQ ID NO: 1924876 - RNA, 19 nt, Homo sapiens
  misc_RNA (1)...(19): siRNA sense strand
acaagaaccacuucaaugc

SEQ ID NO: 1924877 - RNA, 19 nt, Homo sapiens
  misc_RNA (1)...(19): siRNA sense strand
guacgucuggaacaacuau

SEQ ID NO: 1924878 - RNA, 19 nt, Homo sapiens
  misc_RNA (1)...(19): siRNA sense strand
ccuacacacugcgcuuuga

SEQ ID NO: 1924879 - RNA, 19 nt, Homo sapiens
  misc_RNA (1)...(19): siRNA sense strand
ccgcagugcucuggaaucu

SEQ ID NO: 1924880 - RNA, 19 nt, Homo sapiens
  misc_RNA (1)...(19): siRNA sense strand
gcagcuacggcaccgagaa

SEQ ID NO: 1924881 - RNA, 19 nt, Homo sapiens
  misc_RNA (1)...(19): siRNA sense strand
cggcagcgacgucaucaug

SEQ ID NO: 1924882 - RNA, 19 nt, Homo sapiens
  misc_RNA (1)...(19): siRNA sense strand
ggagacaguggacaaucug

SEQ ID NO: 1924883 - RNA, 19 nt, Homo sapiens
  misc_RNA (1)...(19): siRNA sense strand
gggcggaaagaccgacauu

SEQ ID NO: 1924884 - RNA, 19 nt, Homo sapiens
  misc_RNA (1)...(19): siRNA sense strand
uacuucaucuggaguuuca

SEQ ID NO: 1924885 - RNA, 19 nt, Homo sapiens
  misc_RNA (1)...(19): siRNA sense strand
aguauucccgcaccaagua

SEQ ID NO: 1924886 - RNA, 19 nt, Homo sapiens
  misc_RNA (1)...(19): siRNA sense strand
gucauggccuaucucuuca

SEQ ID NO: 1924887 - RNA, 19 nt, Homo sapiens
  misc_RNA (1)...(19): siRNA sense strand
gggcaccagucccuacaac

SEQ ID NO: 1924888 - RNA, 19 nt, Homo sapiens
  misc_RNA (1)...(19): siRNA sense strand
gacaacaccugguccauca

SEQ ID NO: 1924889 - RNA, 19 nt, Homo sapiens
  misc_RNA (1)...(19): siRNA sense strand
cugcuggccuugcucauua

SEQ ID NO: 1924890 - RNA, 19 nt, Homo sapiens
  misc_RNA (1)...(19): siRNA sense strand
ggauggacaggaugaagua

SEQ ID NO: 1924891 - RNA, 19 nt, Homo sapiens
  misc_RNA (1)...(19): siRNA sense strand
caucuacccgggugucuua

SEQ ID NO: 1924892 - RNA, 19 nt, Homo sapiens
  misc_RNA (1)...(19): siRNA sense strand
gcaccaagacccugcaaca

SEQ ID NO: 1924893 - RNA, 19 nt, Homo sapiens
  misc_RNA (1)...(19): siRNA sense strand
gggagaggauggacaggau

SEQ ID NO: 1924894 - RNA, 19 nt, Homo sapiens
  misc_RNA (1)...(19): siRNA sense strand
gguggauccugcugacuug

SEQ ID NO: 1924895 - RNA, 19 nt, Homo sapiens
  misc_RNA (1)...(19): siRNA sense strand
gcagaaacacagccacauc

SEQ ID NO: 1924896 - RNA, 19 nt, Homo sapiens
  misc_RNA (1)...(19): siRNA sense strand
agccacaucucuuccauug

SEQ ID NO: 1924897 - RNA, 19 nt, Homo sapiens
  misc_RNA (1)...(19): siRNA sense strand
gagaggauggacaggauga

SEQ ID NO: 1924898 - RNA, 19 nt, Homo sapiens
  misc_RNA (1)...(19): siRNA sense strand
aaacacagccacaucucuu

SEQ ID NO: 1924899 - RNA, 19 nt, Homo sapiens
  misc_RNA (1)...(19): siRNA sense strand
gaaacacagccacaucucu

SEQ ID NO: 1924900 - RNA, 19 nt, Homo sapiens
  misc_RNA (1)...(19): siRNA sense strand
aaugugaccuggagugucu

SEQ ID NO: 1924901 - RNA, 19 nt, Homo sapiens
  misc_RNA (1)...(19): siRNA sense strand
uggacaggaugaaguaagu

SEQ ID NO: 1924902 - RNA, 19 nt, Homo sapiens
  misc_RNA (1)...(19): siRNA sense strand
gcugauguccacccucuuc

SEQ ID NO: 1924903 - RNA, 19 nt, Homo sapiens
  misc_RNA (1)...(19): siRNA sense strand
cagaaacacagccacaucu

SEQ ID NO: 1924904 - RNA, 19 nt, Homo sapiens
  misc_RNA (1)...(19): siRNA sense strand
caacagucccagcccaucu

SEQ ID NO: 1924905 - RNA, 19 nt, Homo sapiens
  misc_RNA (1)...(19): siRNA sense strand
gcaggagccaccacaacca

SEQ ID NO: 1924906 - RNA, 19 nt, Homo sapiens
  misc_RNA (1)...(19): siRNA sense strand
cuacccgggugucuuacga

SEQ ID NO: 1924907 - RNA, 19 nt, Homo sapiens
  misc_RNA (1)...(19): siRNA sense strand
gaugaaagcuugcgaaaug

SEQ ID NO: 1924908 - RNA, 19 nt, Homo sapiens
  misc_RNA (1)...(19): siRNA sense strand
gcugagagcugcagaagua

SEQ ID NO: 1924909 - RNA, 19 nt, Homo sapiens
  misc_RNA (1)...(19): siRNA sense strand
gaacagaagacuuugaaua

SEQ ID NO: 1924910 - RNA, 19 nt, Homo sapiens
  misc_RNA (1)...(19): siRNA sense strand
gaacgugccuuaaagauca

SEQ ID NO: 1924911 - RNA, 19 nt, Homo sapiens
  misc_RNA (1)...(19): siRNA sense strand
gagcuugagugucagaaua

SEQ ID NO: 1924912 - RNA, 19 nt, Homo sapiens
  misc_RNA (1)...(19): siRNA sense strand
gcaguuaauucaacagaaa

SEQ ID NO: 1924913 - RNA, 19 nt, Homo sapiens
  misc_RNA (1)...(19): siRNA sense strand
gagaguaugaccuguauua

SEQ ID NO: 1924914 - RNA, 19 nt, Homo sapiens
  misc_RNA (1)...(19): siRNA sense strand
gcagcaagcuuccugauca

SEQ ID NO: 1924915 - RNA, 19 nt, Homo sapiens
  misc_RNA (1)...(19): siRNA sense strand
cagaagacuuugaauauga

SEQ ID NO: 1924916 - RNA, 19 nt, Homo sapiens
  misc_RNA (1)...(19): siRNA sense strand
gcaagaaggagaucaauau

SEQ ID NO: 1924917 - RNA, 19 nt, Homo sapiens
  misc_RNA (1)...(19): siRNA sense strand
gaacagaugaugaagaaga

SEQ ID NO: 1924918 - RNA, 19 nt, Homo sapiens
  misc_RNA (1)...(19): siRNA sense strand
uaccacagcuccucauaua

SEQ ID NO: 1924919 - RNA, 19 nt, Homo sapiens
  misc_RNA (1)...(19): siRNA sense strand
gaacuucaguacaaugaga

SEQ ID NO: 1924920 - RNA, 19 nt, Homo sapiens
  misc_RNA (1)...(19): siRNA sense strand
ggacagagcaguaaagagu

SEQ ID NO: 1924921 - RNA, 19 nt, Homo sapiens
  misc_RNA (1)...(19): siRNA sense strand
gagcuacaguugcuuaaug

SEQ ID NO: 1924922 - RNA, 19 nt, Homo sapiens
  misc_RNA (1)...(19): siRNA sense strand
ggaagaagagcauaaugaa

SEQ ID NO: 1924923 - RNA, 19 nt, Homo sapiens
  misc_RNA (1)...(19): siRNA sense strand
gaaggacaguggaguagga

SEQ ID NO: 1924924 - RNA, 19 nt, Homo sapiens
  misc_RNA (1)...(19): siRNA sense strand
gaaagugacagaccaguau

SEQ ID NO: 1924925 - RNA, 19 nt, Homo sapiens
  misc_RNA (1)...(19): siRNA sense strand
ugaucaaccucaccaauaa

SEQ ID NO: 1924926 - RNA, 19 nt, Homo sapiens
  misc_RNA (1)...(19): siRNA sense strand
gugaauacauugacucaga

SEQ ID NO: 1924927 - RNA, 19 nt, Homo sapiens
  misc_RNA (1)...(19): siRNA sense strand
gcgaacaccucuuaguaga

SEQ ID NO: 1924928 - RNA, 19 nt, Homo sapiens
  misc_RNA (1)...(19): siRNA sense strand
ugagaaacauugagcuuga

SEQ ID NO: 1924929 - RNA, 19 nt, Homo sapiens
  misc_RNA (1)...(19): siRNA sense strand
ccgaacagaugaugaagaa

SEQ ID NO: 1924930 - RNA, 19 nt, Homo sapiens
  misc_RNA (1)...(19): siRNA sense strand
gcaguggccuugcugucua

SEQ ID NO: 1924931 - RNA, 19 nt, Homo sapiens
  misc_RNA (1)...(19): siRNA sense strand
gagcucaaaugcaagauuc

SEQ ID NO: 1924932 - RNA, 19 nt, Homo sapiens
  misc_RNA (1)...(19): siRNA sense strand
gaagaacugagaaacauug

SEQ ID NO: 1924933 - RNA, 19 nt, Homo sapiens
  misc_RNA (1)...(19): siRNA sense strand
agacagaacagaagacuuu

SEQ ID NO: 1924934 - RNA, 19 nt, Homo sapiens
  misc_RNA (1)...(19): siRNA sense strand
gaagaaggcacaacagaca

SEQ ID NO: 1924935 - RNA, 19 nt, Homo sapiens
  misc_RNA (1)...(19): siRNA sense strand
gaagacaccggcauuuaug

SEQ ID NO: 1924936 - RNA, 19 nt, Homo sapiens
  misc_RNA (1)...(19): siRNA sense strand
ggagacaucuggacauugc

SEQ ID NO: 1924937 - RNA, 19 nt, Homo sapiens
  misc_RNA (1)...(19): siRNA sense strand
gaagaagacaccggcauuu

SEQ ID NO: 1924938 - RNA, 19 nt, Homo sapiens
  misc_RNA (1)...(19): siRNA sense strand
guacuccgcucacuguaga

SEQ ID NO: 1924939 - RNA, 19 nt, Homo sapiens
  misc_RNA (1)...(19): siRNA sense strand
ucccuuaccucucuccuua

SEQ ID NO: 1924940 - RNA, 19 nt, Homo sapiens
  misc_RNA (1)...(19): siRNA sense strand
gcaaggagucucagaagug

SEQ ID NO: 1924941 - RNA, 19 nt, Homo sapiens
  misc_RNA (1)...(19): siRNA sense strand
gaaagcagcaccugguuag

SEQ ID NO: 1924942 - RNA, 19 nt, Homo sapiens
  misc_RNA (1)...(19): siRNA sense strand
gcacgagaguccauaaugc

SEQ ID NO: 1924943 - RNA, 19 nt, Homo sapiens
  misc_RNA (1)...(19): siRNA sense strand
gcuggaagaugaaaggaau

SEQ ID NO: 1924944 - RNA, 19 nt, Homo sapiens
  misc_RNA (1)...(19): siRNA sense strand
gaaguacuccgcucacugu

SEQ ID NO: 1924945 - RNA, 19 nt, Homo sapiens
  misc_RNA (1)...(19): siRNA sense strand
acauugagcuugaguguca

SEQ ID NO: 1924946 - RNA, 19 nt, Homo sapiens
  misc_RNA (1)...(19): siRNA sense strand
gaugaggacugugaaagau

SEQ ID NO: 1924947 - RNA, 19 nt, Homo sapiens
  misc_RNA (1)...(19): siRNA sense strand
gggaagauguccagaaucg

SEQ ID NO: 1924948 - RNA, 19 nt, Homo sapiens
  misc_RNA (1)...(19): siRNA sense strand
ccacagcuccucauauaga

SEQ ID NO: 1924949 - RNA, 19 nt, Homo sapiens
  misc_RNA (1)...(19): siRNA sense strand
uauaacaccagcauagaua

SEQ ID NO: 1924950 - RNA, 19 nt, Homo sapiens
  misc_RNA (1)...(19): siRNA sense strand
caacagacacugcaacauc

SEQ ID NO: 1924951 - RNA, 19 nt, Homo sapiens
  misc_RNA (1)...(19): siRNA sense strand
gaagaugaaaggaaugaau

SEQ ID NO: 1924952 - RNA, 19 nt, Homo sapiens
  misc_RNA (1)...(19): siRNA sense strand
gaagugcagcuuaugaaug

SEQ ID NO: 1924953 - RNA, 19 nt, Homo sapiens
  misc_RNA (1)...(19): siRNA sense strand
gaaaucugcagucgaguau

SEQ ID NO: 1924954 - RNA, 19 nt, Homo sapiens
  misc_RNA (1)...(19): siRNA sense strand
gaauggaaggugaaaauua

SEQ ID NO: 1924955 - RNA, 19 nt, Homo sapiens
  misc_RNA (1)...(19): siRNA sense strand
agaaggagaucaauaucau

SEQ ID NO: 1924956 - RNA, 19 nt, Homo sapiens
  misc_RNA (1)...(19): siRNA sense strand
gcaacauccucauccaaca

SEQ ID NO: 1924957 - RNA, 19 nt, Homo sapiens
  misc_RNA (1)...(19): siRNA sense strand
guucagagcccaagaugga

SEQ ID NO: 1924958 - RNA, 19 nt, Homo sapiens
  misc_RNA (1)...(19): siRNA sense strand
gaaagcaaggagaagguuu

SEQ ID NO: 1924959 - RNA, 19 nt, Homo sapiens
  misc_RNA (1)...(19): siRNA sense strand
ggacaguucuagugcuuac

SEQ ID NO: 1924960 - RNA, 19 nt, Homo sapiens
  misc_RNA (1)...(19): siRNA sense strand
caauggagcaugaauuuua

SEQ ID NO: 1924961 - RNA, 19 nt, Homo sapiens
  misc_RNA (1)...(19): siRNA sense strand
gcagugagggcaagaagga

SEQ ID NO: 1924962 - RNA, 19 nt, Homo sapiens
  misc_RNA (1)...(19): siRNA sense strand
caaggagucucagaagugu

SEQ ID NO: 1924963 - RNA, 19 nt, Homo sapiens
  misc_RNA (1)...(19): siRNA sense strand
acacaucccuuaccucucu

SEQ ID NO: 1924964 - RNA, 19 nt, Homo sapiens
  misc_RNA (1)...(19): siRNA sense strand
gcagcacaauugaaugcaa

SEQ ID NO: 1924965 - RNA, 19 nt, Homo sapiens
  misc_RNA (1)...(19): siRNA sense strand
ggaguaggacguacagaug

SEQ ID NO: 1924966 - RNA, 19 nt, Homo sapiens
  misc_RNA (1)...(19): siRNA sense strand
caaccucaccaauaagaaa

SEQ ID NO: 1924967 - RNA, 19 nt, Homo sapiens
  misc_RNA (1)...(19): siRNA sense strand
acagaagacuuugaauaug

SEQ ID NO: 1924968 - RNA, 19 nt, Homo sapiens
  misc_RNA (1)...(19): siRNA sense strand
gaaggagaucaauaucauu

SEQ ID NO: 1924969 - RNA, 19 nt, Homo sapiens
  misc_RNA (1)...(19): siRNA sense strand
gcaaagaggagagaaagca

SEQ ID NO: 1924970 - RNA, 19 nt, Homo sapiens
  misc_RNA (1)...(19): siRNA sense strand
gaagagcggaguggcauga

SEQ ID NO: 1924971 - RNA, 19 nt, Homo sapiens
  misc_RNA (1)...(19): siRNA sense strand
ggacacgguacaucacaaa

SEQ ID NO: 1924972 - RNA, 19 nt, Homo sapiens
  misc_RNA (1)...(19): siRNA sense strand
cccaauagcacaucuuuga

SEQ ID NO: 1924973 - RNA, 19 nt, Homo sapiens
  misc_RNA (1)...(19): siRNA sense strand
ucagcgagguugacccaaa

SEQ ID NO: 1924974 - RNA, 19 nt, Homo sapiens
  misc_RNA (1)...(19): siRNA sense strand
gcaaauaaauggggaagau

SEQ ID NO: 1924975 - RNA, 19 nt, Homo sapiens
  misc_RNA (1)...(19): siRNA sense strand
aaagcuacaugcaguuaau

SEQ ID NO: 1924976 - RNA, 19 nt, Homo sapiens
  misc_RNA (1)...(19): siRNA sense strand
uacaguugcuuaaugaaga

SEQ ID NO: 1924977 - RNA, 19 nt, Homo sapiens
  misc_RNA (1)...(19): siRNA sense strand
caaaggccacucaugaaga

SEQ ID NO: 1924978 - RNA, 19 nt, Homo sapiens
  misc_RNA (1)...(19): siRNA sense strand
gaagaagagcauaaugaag

SEQ ID NO: 1924979 - RNA, 19 nt, Homo sapiens
  misc_RNA (1)...(19): siRNA sense strand
ucagacagcugccauucuc

SEQ ID NO: 1924980 - RNA, 19 nt, Homo sapiens
  misc_RNA (1)...(19): siRNA sense strand
ccuaugggauggcuucaga

SEQ ID NO: 1924981 - RNA, 19 nt, Homo sapiens
  misc_RNA (1)...(19): siRNA sense strand
acaaacugcuguaugaagu

SEQ ID NO: 1924982 - RNA, 19 nt, Homo sapiens
  misc_RNA (1)...(19): siRNA sense strand
gucgaguugugucguguua

SEQ ID NO: 1924983 - RNA, 19 nt, Homo sapiens
  misc_RNA (1)...(19): siRNA sense strand
ggcaagaaggagaucaaua

SEQ ID NO: 1924984 - RNA, 19 nt, Homo sapiens
  misc_RNA (1)...(19): siRNA sense strand
ucaaagcuacaugcaguua

SEQ ID NO: 1924985 - RNA, 19 nt, Homo sapiens
  misc_RNA (1)...(19): siRNA sense strand
gagaggaacacuacaaacu

SEQ ID NO: 1924986 - RNA, 19 nt, Homo sapiens
  misc_RNA (1)...(19): siRNA sense strand
ugaggacugugaaagauuc

SEQ ID NO: 1924987 - RNA, 19 nt, Homo sapiens
  misc_RNA (1)...(19): siRNA sense strand
aagaagacaccggcauuua

SEQ ID NO: 1924988 - RNA, 19 nt, Homo sapiens
  misc_RNA (1)...(19): siRNA sense strand
gaggacaaugaguauauuu

SEQ ID NO: 1924989 - RNA, 19 nt, Homo sapiens
  misc_RNA (1)...(19): siRNA sense strand
ggaacgugccuuaaagauc

SEQ ID NO: 1924990 - RNA, 19 nt, Homo sapiens
  misc_RNA (1)...(19): siRNA sense strand
caacccagaugaggacugu

SEQ ID NO: 1924991 - RNA, 19 nt, Homo sapiens
  misc_RNA (1)...(19): siRNA sense strand
gaguaggacguacagauga

SEQ ID NO: 1924992 - RNA, 19 nt, Homo sapiens
  misc_RNA (1)...(19): siRNA sense strand
gaaaagagaggaacacuac

SEQ ID NO: 1924993 - RNA, 19 nt, Homo sapiens
  misc_RNA (1)...(19): siRNA sense strand
ggagcaaagaggagagaaa

SEQ ID NO: 1924994 - RNA, 19 nt, Homo sapiens
  misc_RNA (1)...(19): siRNA sense strand
ucagcgaacacaucccuua

SEQ ID NO: 1924995 - RNA, 19 nt, Homo sapiens
  misc_RNA (1)...(19): siRNA sense strand
gcaagcuuccugaucaaga

SEQ ID NO: 1924996 - RNA, 19 nt, Homo sapiens
  misc_RNA (1)...(19): siRNA sense strand
gacaaggacaguucuagug

SEQ ID NO: 1924997 - RNA, 19 nt, Homo sapiens
  misc_RNA (1)...(19): siRNA sense strand
ggaauuauaacaccagcau

SEQ ID NO: 1924998 - RNA, 19 nt, Homo sapiens
  misc_RNA (1)...(19): siRNA sense strand
ugaggacaaugaguauauu

SEQ ID NO: 1924999 - RNA, 19 nt, Homo sapiens
  misc_RNA (1)...(19): siRNA sense strand
gaaagcuugcgaaaugaug

SEQ ID NO: 1925000 - RNA, 19 nt, Homo sapiens
  misc_RNA (1)...(19): siRNA sense strand
uggaagaagagcauaauga

SEQ ID NO: 1925001 - RNA, 19 nt, Homo sapiens
  misc_RNA (1)...(19): siRNA sense strand
cagaacagaagacuuugaa

SEQ ID NO: 1925002 - RNA, 19 nt, Homo sapiens
  misc_RNA (1)...(19): siRNA sense strand
ucuuggagcucaaaugcaa

SEQ ID NO: 1925003 - RNA, 19 nt, Homo sapiens
  misc_RNA (1)...(19): siRNA sense strand
agaaagcagcaccugguua

SEQ ID NO: 1925004 - RNA, 19 nt, Homo sapiens
  misc_RNA (1)...(19): siRNA sense strand
gcaagguuguagcgcugaa

SEQ ID NO: 1925005 - RNA, 19 nt, Homo sapiens
  misc_RNA (1)...(19): siRNA sense strand
aagaggcaguggaagcuuu

SEQ ID NO: 1925006 - RNA, 19 nt, Homo sapiens
  misc_RNA (1)...(19): siRNA sense strand
gaauuauaacaccagcaua

SEQ ID NO: 1925007 - RNA, 19 nt, Homo sapiens
  misc_RNA (1)...(19): siRNA sense strand
ggaaaugcaagaagaauua

SEQ ID NO: 1925008 - RNA, 19 nt, Homo sapiens
  misc_RNA (1)...(19): siRNA sense strand
ccaagaaacucagagauuu

SEQ ID NO: 1925009 - RNA, 19 nt, Homo sapiens
  misc_RNA (1)...(19): siRNA sense strand
gaacauggcagcccuauca

SEQ ID NO: 1925010 - RNA, 19 nt, Homo sapiens
  misc_RNA (1)...(19): siRNA sense strand
gaagacaucccuccacauu

SEQ ID NO: 1925011 - RNA, 19 nt, Homo sapiens
  misc_RNA (1)...(19): siRNA sense strand
ggaccucgccuacgcaaua

SEQ ID NO: 1925012 - RNA, 19 nt, Homo sapiens
  misc_RNA (1)...(19): siRNA sense strand
ggaaauauuuguagaugag

SEQ ID NO: 1925013 - RNA, 19 nt, Homo sapiens
  misc_RNA (1)...(19): siRNA sense strand
cgaggaaggugcaagugua

SEQ ID NO: 1925014 - RNA, 19 nt, Homo sapiens
  misc_RNA (1)...(19): siRNA sense strand
caagauuccugucgauuca

SEQ ID NO: 1925015 - RNA, 19 nt, Homo sapiens
  misc_RNA (1)...(19): siRNA sense strand
caauauggcuucccucuac

SEQ ID NO: 1925016 - RNA, 19 nt, Homo sapiens
  misc_RNA (1)...(19): siRNA sense strand
ccacggacaugacaaaaua

SEQ ID NO: 1925017 - RNA, 19 nt, Homo sapiens
  misc_RNA (1)...(19): siRNA sense strand
ccaagccucuccagguuaa

SEQ ID NO: 1925018 - RNA, 19 nt, Homo sapiens
  misc_RNA (1)...(19): siRNA sense strand
gaagggaaaguuugggauu

SEQ ID NO: 1925019 - RNA, 19 nt, Homo sapiens
  misc_RNA (1)...(19): siRNA sense strand
gggaaauauuuguagauga

SEQ ID NO: 1925020 - RNA, 19 nt, Homo sapiens
  misc_RNA (1)...(19): siRNA sense strand
caacaggguauacaacaaa

SEQ ID NO: 1925021 - RNA, 19 nt, Homo sapiens
  misc_RNA (1)...(19): siRNA sense strand
uguguaagacucagauuua

SEQ ID NO: 1925022 - RNA, 19 nt, Homo sapiens
  misc_RNA (1)...(19): siRNA sense strand
ccauugagcuaacagacaa

SEQ ID NO: 1925023 - RNA, 19 nt, Homo sapiens
  misc_RNA (1)...(19): siRNA sense strand
agaagucucucgauuaugg

SEQ ID NO: 1925024 - RNA, 19 nt, Homo sapiens
  misc_RNA (1)...(19): siRNA sense strand
gcuaacagacaacauaguu

SEQ ID NO: 1925025 - RNA, 19 nt, Homo sapiens
  misc_RNA (1)...(19): siRNA sense strand
ucacagaccugaggauaag

SEQ ID NO: 1925026 - RNA, 19 nt, Homo sapiens
  misc_RNA (1)...(19): siRNA sense strand
acucagagauuucuuuaca

SEQ ID NO: 1925027 - RNA, 19 nt, Homo sapiens
  misc_RNA (1)...(19): siRNA sense strand
aagggaaaguuugggauua

SEQ ID NO: 1925028 - RNA, 19 nt, Homo sapiens
  misc_RNA (1)...(19): siRNA sense strand
agagauuucuuuacaguca

SEQ ID NO: 1925029 - RNA, 19 nt, Homo sapiens
  misc_RNA (1)...(19): siRNA sense strand
ucagagauuucuuuacagu

SEQ ID NO: 1925030 - RNA, 19 nt, Homo sapiens
  misc_RNA (1)...(19): siRNA sense strand
acacuuggcacgcuacuuu

SEQ ID NO: 1925031 - RNA, 19 nt, Homo sapiens
  misc_RNA (1)...(19): siRNA sense strand
gaggaaggugcaaguguaa

SEQ ID NO: 1925032 - RNA, 19 nt, Homo sapiens
  misc_RNA (1)...(19): siRNA sense strand
agacaucccuccacauuuu

SEQ ID NO: 1925033 - RNA, 19 nt, Homo sapiens
  misc_RNA (1)...(19): siRNA sense strand
cagcauacggucuuagaaa

SEQ ID NO: 1925034 - RNA, 19 nt, Homo sapiens
  misc_RNA (1)...(19): siRNA sense strand
cauggcagcccuaucagua

SEQ ID NO: 1925035 - RNA, 19 nt, Homo sapiens
  misc_RNA (1)...(19): siRNA sense strand
ugagcuaacagacaacaua

SEQ ID NO: 1925036 - RNA, 19 nt, Homo sapiens
  misc_RNA (1)...(19): siRNA sense strand
gaaaguuugggauuacaug

SEQ ID NO: 1925037 - RNA, 19 nt, Homo sapiens
  misc_RNA (1)...(19): siRNA sense strand
caguauugguaguaaguaa

SEQ ID NO: 1925038 - RNA, 19 nt, Homo sapiens
  misc_RNA (1)...(19): siRNA sense strand
gcaauauggcuucccucua

SEQ ID NO: 1925039 - RNA, 19 nt, Homo sapiens
  misc_RNA (1)...(19): siRNA sense strand
caaaugauccuggagaagu

SEQ ID NO: 1925040 - RNA, 19 nt, Homo sapiens
  misc_RNA (1)...(19): siRNA sense strand
cccaguauuuccaguauug

SEQ ID NO: 1925041 - RNA, 19 nt, Homo sapiens
  misc_RNA (1)...(19): siRNA sense strand
guuauuaccuuugaaucug

SEQ ID NO: 1925042 - RNA, 19 nt, Homo sapiens
  misc_RNA (1)...(19): siRNA sense strand
caaagacagguucgcguuu

SEQ ID NO: 1925043 - RNA, 19 nt, Homo sapiens
  misc_RNA (1)...(19): siRNA sense strand
ucaacaggguauacaacaa

SEQ ID NO: 1925044 - RNA, 19 nt, Homo sapiens
  misc_RNA (1)...(19): siRNA sense strand
gcacagaagaguacucaac

SEQ ID NO: 1925045 - RNA, 19 nt, Homo sapiens
  misc_RNA (1)...(19): siRNA sense strand
cauacggucuuagaaauca

SEQ ID NO: 1925046 - RNA, 19 nt, Homo sapiens
  misc_RNA (1)...(19): siRNA sense strand
ggaagaagggaaaguuugg

SEQ ID NO: 1925047 - RNA, 19 nt, Homo sapiens
  misc_RNA (1)...(19): siRNA sense strand
gggaaaugcaagaagaauu

SEQ ID NO: 1925048 - RNA, 19 nt, Homo sapiens
  misc_RNA (1)...(19): siRNA sense strand
caaaggcacugcaaauacc

SEQ ID NO: 1925049 - RNA, 19 nt, Homo sapiens
  misc_RNA (1)...(19): siRNA sense strand
gccacagacugcuuagaug

SEQ ID NO: 1925050 - RNA, 19 nt, Homo sapiens
  misc_RNA (1)...(19): siRNA sense strand
ccaaaggcacugcaaauac

SEQ ID NO: 1925051 - RNA, 19 nt, Homo sapiens
  misc_RNA (1)...(19): siRNA sense strand
aaggauuuaucacagcaua

SEQ ID NO: 1925052 - RNA, 19 nt, Homo sapiens
  misc_RNA (1)...(19): siRNA sense strand
gaggauaaggcuguuaaga

SEQ ID NO: 1925053 - RNA, 19 nt, Homo sapiens
  misc_RNA (1)...(19): siRNA sense strand
ggaaggugcaaguguaauc

SEQ ID NO: 1925054 - RNA, 19 nt, Homo sapiens
  misc_RNA (1)...(19): siRNA sense strand
ccugagacguucugugcaa

SEQ ID NO: 1925055 - RNA, 19 nt, Homo sapiens
  misc_RNA (1)...(19): siRNA sense strand
caaccaagaaacucagaga

SEQ ID NO: 1925056 - RNA, 19 nt, Homo sapiens
  misc_RNA (1)...(19): siRNA sense strand
gauacaaccaagaaacuca

SEQ ID NO: 1925057 - RNA, 19 nt, Homo sapiens
  misc_RNA (1)...(19): siRNA sense strand
uggcagcccuaucaguauu

SEQ ID NO: 1925058 - RNA, 19 nt, Homo sapiens
  misc_RNA (1)...(19): siRNA sense strand
gagcugauguuugauuuug

SEQ ID NO: 1925059 - RNA, 19 nt, Homo sapiens
  misc_RNA (1)...(19): siRNA sense strand
gagcaaaaccauugagcua

SEQ ID NO: 1925060 - RNA, 19 nt, Homo sapiens
  misc_RNA (1)...(19): siRNA sense strand
uaugacaacagcaaauuga

SEQ ID NO: 1925061 - RNA, 19 nt, Homo sapiens
  misc_RNA (1)...(19): siRNA sense strand
guuacgguguccucaguga

SEQ ID NO: 1925062 - RNA, 19 nt, Homo sapiens
  misc_RNA (1)...(19): siRNA sense strand
cccaaaggcacugcaaaua

SEQ ID NO: 1925063 - RNA, 19 nt, Homo sapiens
  misc_RNA (1)...(19): siRNA sense strand
ugugggaaaugcaagaaga

SEQ ID NO: 1925064 - RNA, 19 nt, Homo sapiens
  misc_RNA (1)...(19): siRNA sense strand
ugaugcagcccuacccuuu

SEQ ID NO: 1925065 - RNA, 19 nt, Homo sapiens
  misc_RNA (1)...(19): siRNA sense strand
uaucagggccgaccuugga

SEQ ID NO: 1925066 - RNA, 19 nt, Homo sapiens
  misc_RNA (1)...(19): siRNA sense strand
gcaaauugacaugcgaaug

SEQ ID NO: 1925067 - RNA, 19 nt, Homo sapiens
  misc_RNA (1)...(19): siRNA sense strand
uaaucuccaugccacugua

SEQ ID NO: 1925068 - RNA, 19 nt, Homo sapiens
  misc_RNA (1)...(19): siRNA sense strand
auucaugcccuuuggguua

SEQ ID NO: 1925069 - RNA, 19 nt, Homo sapiens
  misc_RNA (1)...(19): siRNA sense strand
gacauaaaggugcgaggaa

SEQ ID NO: 1925070 - RNA, 19 nt, Homo sapiens
  misc_RNA (1)...(19): siRNA sense strand
uacgcgaucucagacauaa

SEQ ID NO: 1925071 - RNA, 19 nt, Homo sapiens
  misc_RNA (1)...(19): siRNA sense strand
gcaaugggcaaucccuaca

SEQ ID NO: 1925072 - RNA, 19 nt, Homo sapiens
  misc_RNA (1)...(19): siRNA sense strand
gacaaaauaucugaaagug

SEQ ID NO: 1925073 - RNA, 19 nt, Homo sapiens
  misc_RNA (1)...(19): siRNA sense strand
gaccucgccuacgcaauau

SEQ ID NO: 1925074 - RNA, 19 nt, Homo sapiens
  misc_RNA (1)...(19): siRNA sense strand
ggaauccacggacaugaca

SEQ ID NO: 1925075 - RNA, 19 nt, Homo sapiens
  misc_RNA (1)...(19): siRNA sense strand
gggacauuaugauuugugu

SEQ ID NO: 1925076 - RNA, 19 nt, Homo sapiens
  misc_RNA (1)...(19): siRNA sense strand
gcauacggucuuagaaauc

SEQ ID NO: 1925077 - RNA, 19 nt, Homo sapiens
  misc_RNA (1)...(19): siRNA sense strand
gcagcccuaucaguauuau

SEQ ID NO: 1925078 - RNA, 19 nt, Homo sapiens
  misc_RNA (1)...(19): siRNA sense strand
ggacauuaugauuugugua

SEQ ID NO: 1925079 - RNA, 19 nt, Homo sapiens
  misc_RNA (1)...(19): siRNA sense strand
cagacaacauaguuauuac

SEQ ID NO: 1925080 - RNA, 19 nt, Homo sapiens
  misc_RNA (1)...(19): siRNA sense strand
gagcuaacagacaacauag

SEQ ID NO: 1925081 - RNA, 19 nt, Homo sapiens
  misc_RNA (1)...(19): siRNA sense strand
ucccaagccucuccagguu

SEQ ID NO: 1925082 - RNA, 19 nt, Homo sapiens
  misc_RNA (1)...(19): siRNA sense strand
cugagcugauguuugauuu

SEQ ID NO: 1925083 - RNA, 19 nt, Homo sapiens
  misc_RNA (1)...(19): siRNA sense strand
gguccagacugugggaaau

SEQ ID NO: 1925084 - RNA, 19 nt, Homo sapiens
  misc_RNA (1)...(19): siRNA sense strand
ccccugagcugauguuuga

SEQ ID NO: 1925085 - RNA, 19 nt, Homo sapiens
  misc_RNA (1)...(19): siRNA sense strand
gggaaaguuugggauuaca

SEQ ID NO: 1925086 - RNA, 19 nt, Homo sapiens
  misc_RNA (1)...(19): siRNA sense strand
guaugacaacagcaaauug

SEQ ID NO: 1925087 - RNA, 19 nt, Homo sapiens
  misc_RNA (1)...(19): siRNA sense strand
ucaagauuccugucgauuc

SEQ ID NO: 1925088 - RNA, 19 nt, Homo sapiens
  misc_RNA (1)...(19): siRNA sense strand
caugugcaauaaugagugu

SEQ ID NO: 1925089 - RNA, 19 nt, Homo sapiens
  misc_RNA (1)...(19): siRNA sense strand
cagguuaacaucacucugu

SEQ ID NO: 1925090 - RNA, 19 nt, Homo sapiens
  misc_RNA (1)...(19): siRNA sense strand
gagacguucugugcaaugg

SEQ ID NO: 1925091 - RNA, 19 nt, Homo sapiens
  misc_RNA (1)...(19): siRNA sense strand
gacaacagcaaauugacau

SEQ ID NO: 1925092 - RNA, 19 nt, Homo sapiens
  misc_RNA (1)...(19): siRNA sense strand
gauguuugauuuugaagga

SEQ ID NO: 1925093 - RNA, 19 nt, Homo sapiens
  misc_RNA (1)...(19): siRNA sense strand
cggaagaagggaaaguuug

SEQ ID NO: 1925094 - RNA, 19 nt, Homo sapiens
  misc_RNA (1)...(19): siRNA sense strand
gaugcagcccuacccuuug

SEQ ID NO: 1925095 - RNA, 19 nt, Homo sapiens
  misc_RNA (1)...(19): siRNA sense strand
gcaaaaccauugagcuaac

SEQ ID NO: 1925096 - RNA, 19 nt, Homo sapiens
  misc_RNA (1)...(19): siRNA sense strand
gucacagaccugaggauaa

SEQ ID NO: 1925097 - RNA, 19 nt, Homo sapiens
  misc_RNA (1)...(19): siRNA sense strand
caggguauacaacaaauag

SEQ ID NO: 1925098 - RNA, 19 nt, Homo sapiens
  misc_RNA (1)...(19): siRNA sense strand
ggguuacgguguccucagu

SEQ ID NO: 1925099 - RNA, 19 nt, Homo sapiens
  misc_RNA (1)...(19): siRNA sense strand
uaucacagcauacggucuu

SEQ ID NO: 1925100 - RNA, 19 nt, Homo sapiens
  misc_RNA (1)...(19): siRNA sense strand
aaaugauccuggagaaguc

SEQ ID NO: 1925101 - RNA, 19 nt, Homo sapiens
  misc_RNA (1)...(19): siRNA sense strand
cccuacaugugcaauaaug

SEQ ID NO: 1925102 - RNA, 19 nt, Homo sapiens
  misc_RNA (1)...(19): siRNA sense strand
gcgaggaaggugcaagugu

SEQ ID NO: 1925103 - RNA, 19 nt, Homo sapiens
  misc_RNA (1)...(19): siRNA sense strand
gguauacaacaaauagcaa

SEQ ID NO: 1925104 - RNA, 19 nt, Homo sapiens
  misc_RNA (1)...(19): siRNA sense strand
cagacugcuuagaugcuuu

SEQ ID NO: 1925105 - RNA, 19 nt, Homo sapiens
  misc_RNA (1)...(19): siRNA sense strand
gagacccuccugagacguu

SEQ ID NO: 1925106 - RNA, 19 nt, Homo sapiens
  misc_RNA (1)...(19): siRNA sense strand
ugacaacagcaaauugaca

SEQ ID NO: 1925107 - RNA, 19 nt, Homo sapiens
  misc_RNA (1)...(19): siRNA sense strand
gagaaggccuccugaagua

SEQ ID NO: 1925108 - RNA, 19 nt, Homo sapiens
  misc_RNA (1)...(19): siRNA sense strand
aaacaaggcuucauggaaa

SEQ ID NO: 1925109 - RNA, 19 nt, Homo sapiens
  misc_RNA (1)...(19): siRNA sense strand
aggaauggcuggaaaguuu

SEQ ID NO: 1925110 - RNA, 19 nt, Homo sapiens
  misc_RNA (1)...(19): siRNA sense strand
ggagauuuguccucacuug

SEQ ID NO: 1925111 - RNA, 19 nt, Homo sapiens
  misc_RNA (1)...(19): siRNA sense strand
gaacaauggauucgagcua

SEQ ID NO: 1925112 - RNA, 19 nt, Homo sapiens
  misc_RNA (1)...(19): siRNA sense strand
ggaggcugcucuauuacaa

SEQ ID NO: 1925113 - RNA, 19 nt, Homo sapiens
  misc_RNA (1)...(19): siRNA sense strand
ggaacaaggagcagggaua

SEQ ID NO: 1925114 - RNA, 19 nt, Homo sapiens
  misc_RNA (1)...(19): siRNA sense strand
caaacaaggcuucauggaa

SEQ ID NO: 1925115 - RNA, 19 nt, Homo sapiens
  misc_RNA (1)...(19): siRNA sense strand
gaacaaggagcagggauau

SEQ ID NO: 1925116 - RNA, 19 nt, Homo sapiens
  misc_RNA (1)...(19): siRNA sense strand
gauaugaagccuacgaaga

SEQ ID NO: 1925117 - RNA, 19 nt, Homo sapiens
  misc_RNA (1)...(19): siRNA sense strand
uaugagagacgggaauuua

SEQ ID NO: 1925118 - RNA, 19 nt, Homo sapiens
  misc_RNA (1)...(19): siRNA sense strand
agcggaggcugcucuauua

SEQ ID NO: 1925119 - RNA, 19 nt, Homo sapiens
  misc_RNA (1)...(19): siRNA sense strand
caacgacugccuggucuua

SEQ ID NO: 1925120 - RNA, 19 nt, Homo sapiens
  misc_RNA (1)...(19): siRNA sense strand
agucugagcucgugccauu

SEQ ID NO: 1925121 - RNA, 19 nt, Homo sapiens
  misc_RNA (1)...(19): siRNA sense strand
ccaucucgcucccagguaa

SEQ ID NO: 1925122 - RNA, 19 nt, Homo sapiens
  misc_RNA (1)...(19): siRNA sense strand
ucacaaaggaacaggguaa

SEQ ID NO: 1925123 - RNA, 19 nt, Homo sapiens
  misc_RNA (1)...(19): siRNA sense strand
ggaaccuguuuguguauca

SEQ ID NO: 1925124 - RNA, 19 nt, Homo sapiens
  misc_RNA (1)...(19): siRNA sense strand
gaaagccggacucaccauu

SEQ ID NO: 1925125 - RNA, 19 nt, Homo sapiens
  misc_RNA (1)...(19): siRNA sense strand
caccguaacuucccugaca

SEQ ID NO: 1925126 - RNA, 19 nt, Homo sapiens
  misc_RNA (1)...(19): siRNA sense strand
ccgaggaaaucgcuggaaa

SEQ ID NO: 1925127 - RNA, 19 nt, Homo sapiens
  misc_RNA (1)...(19): siRNA sense strand
cgacaguauuguggaguuu

SEQ ID NO: 1925128 - RNA, 19 nt, Homo sapiens
  misc_RNA (1)...(19): siRNA sense strand
acaaggagcagggauauga

SEQ ID NO: 1925129 - RNA, 19 nt, Homo sapiens
  misc_RNA (1)...(19): siRNA sense strand
ggauucgagcuaaguauga

SEQ ID NO: 1925130 - RNA, 19 nt, Homo sapiens
  misc_RNA (1)...(19): siRNA sense strand
cgacugggccucuuacaag

SEQ ID NO: 1925131 - RNA, 19 nt, Homo sapiens
  misc_RNA (1)...(19): siRNA sense strand
ugacaucagcagaguuaaa

SEQ ID NO: 1925132 - RNA, 19 nt, Homo sapiens
  misc_RNA (1)...(19): siRNA sense strand
aacaauggauucgagcuaa

SEQ ID NO: 1925133 - RNA, 19 nt, Homo sapiens
  misc_RNA (1)...(19): siRNA sense strand
uuaaaucugugcgacuuga

SEQ ID NO: 1925134 - RNA, 19 nt, Homo sapiens
  misc_RNA (1)...(19): siRNA sense strand
gagauggccacaccaggaa

SEQ ID NO: 1925135 - RNA, 19 nt, Homo sapiens
  misc_RNA (1)...(19): siRNA sense strand
caagagaaggccuccugaa

SEQ ID NO: 1925136 - RNA, 19 nt, Homo sapiens
  misc_RNA (1)...(19): siRNA sense strand
auaguggacugguucaaug

SEQ ID NO: 1925137 - RNA, 19 nt, Homo sapiens
  misc_RNA (1)...(19): siRNA sense strand
gacaucagcagaguuaaau

SEQ ID NO: 1925138 - RNA, 19 nt, Homo sapiens
  misc_RNA (1)...(19): siRNA sense strand
ccaagggcauccgaggaaa

SEQ ID NO: 1925139 - RNA, 19 nt, Homo sapiens
  misc_RNA (1)...(19): siRNA sense strand
gcucccagguaaccgagaa

SEQ ID NO: 1925140 - RNA, 19 nt, Homo sapiens
  misc_RNA (1)...(19): siRNA sense strand
ggucuuaaaggaacaaugg

SEQ ID NO: 1925141 - RNA, 19 nt, Homo sapiens
  misc_RNA (1)...(19): siRNA sense strand
agaaggaacagcaggaaug

SEQ ID NO: 1925142 - RNA, 19 nt, Homo sapiens
  misc_RNA (1)...(19): siRNA sense strand
gauaguggacugguucaau

SEQ ID NO: 1925143 - RNA, 19 nt, Homo sapiens
  misc_RNA (1)...(19): siRNA sense strand
aauggaaaccuccguguga

SEQ ID NO: 1925144 - RNA, 19 nt, Homo sapiens
  misc_RNA (1)...(19): siRNA sense strand
ggaauggcuggaaaguuug

SEQ ID NO: 1925145 - RNA, 19 nt, Homo sapiens
  misc_RNA (1)...(19): siRNA sense strand
gacaguauuguggaguuua

SEQ ID NO: 1925146 - RNA, 19 nt, Homo sapiens
  misc_RNA (1)...(19): siRNA sense strand
gaaggaacagcaggaaugg

SEQ ID NO: 1925147 - RNA, 19 nt, Homo sapiens
  misc_RNA (1)...(19): siRNA sense strand
gaaccuguuuguguaucau

SEQ ID NO: 1925148 - RNA, 19 nt, Homo sapiens
  misc_RNA (1)...(19): siRNA sense strand
ugagagacgggaauuuaug

SEQ ID NO: 1925149 - RNA, 19 nt, Homo sapiens
  misc_RNA (1)...(19): siRNA sense strand
acaguauuguggaguuuau

SEQ ID NO: 1925150 - RNA, 19 nt, Homo sapiens
  misc_RNA (1)...(19): siRNA sense strand
gaaagugggaaggagauag

SEQ ID NO: 1925151 - RNA, 19 nt, Homo sapiens
  misc_RNA (1)...(19): siRNA sense strand
ggaaaagacugggccaaag

SEQ ID NO: 1925152 - RNA, 19 nt, Homo sapiens
  misc_RNA (1)...(19): siRNA sense strand
acgacugccuggucuuaaa

SEQ ID NO: 1925153 - RNA, 19 nt, Homo sapiens
  misc_RNA (1)...(19): siRNA sense strand
gcggagauuuguccucacu

SEQ ID NO: 1925154 - RNA, 19 nt, Homo sapiens
  misc_RNA (1)...(19): siRNA sense strand
agacugggccaaagcagaa

SEQ ID NO: 1925155 - RNA, 19 nt, Homo sapiens
  misc_RNA (1)...(19): siRNA sense strand
caccaggaacuaccucaaa

SEQ ID NO: 1925156 - RNA, 19 nt, Homo sapiens
  misc_RNA (1)...(19): siRNA sense strand
gaaugccaccuuccagaca

SEQ ID NO: 1925157 - RNA, 19 nt, Homo sapiens
  misc_RNA (1)...(19): siRNA sense strand
gaguuuaugauccacaaug

SEQ ID NO: 1925158 - RNA, 19 nt, Homo sapiens
  misc_RNA (1)...(19): siRNA sense strand
caaccggcuuacugcauca

SEQ ID NO: 1925159 - RNA, 19 nt, Homo sapiens
  misc_RNA (1)...(19): siRNA sense strand
caucagcauuaaggacuug

SEQ ID NO: 1925160 - RNA, 19 nt, Homo sapiens
  misc_RNA (1)...(19): siRNA sense strand
agagaaggccuccugaagu

SEQ ID NO: 1925161 - RNA, 19 nt, Homo sapiens
  misc_RNA (1)...(19): siRNA sense strand
ggaagggacaacucacagu

SEQ ID NO: 1925162 - RNA, 19 nt, Homo sapiens
  misc_RNA (1)...(19): siRNA sense strand
gaggaagggacaacucaca

SEQ ID NO: 1925163 - RNA, 19 nt, Homo sapiens
  misc_RNA (1)...(19): siRNA sense strand
gagagacgggaauuuaugg

SEQ ID NO: 1925164 - RNA, 19 nt, Homo sapiens
  misc_RNA (1)...(19): siRNA sense strand
gagaaggaacagcaggaau

SEQ ID NO: 1925165 - RNA, 19 nt, Homo sapiens
  misc_RNA (1)...(19): siRNA sense strand
aggcugcucuauuacaaga

SEQ ID NO: 1925166 - RNA, 19 nt, Homo sapiens
  misc_RNA (1)...(19): siRNA sense strand
caggaacuaccucaaacaa

SEQ ID NO: 1925167 - RNA, 19 nt, Homo sapiens
  misc_RNA (1)...(19): siRNA sense strand
gcgaggaagggacaacuca

SEQ ID NO: 1925168 - RNA, 19 nt, Homo sapiens
  misc_RNA (1)...(19): siRNA sense strand
caaggagcagggauaugaa

SEQ ID NO: 1925169 - RNA, 19 nt, Homo sapiens
  misc_RNA (1)...(19): siRNA sense strand
guuuguguaucaugaaagu

SEQ ID NO: 1925170 - RNA, 19 nt, Homo sapiens
  misc_RNA (1)...(19): siRNA sense strand
ccucaaacaaggcuucaug

SEQ ID NO: 1925171 - RNA, 19 nt, Homo sapiens
  misc_RNA (1)...(19): siRNA sense strand
ucaaacaaggcuucaugga

SEQ ID NO: 1925172 - RNA, 19 nt, Homo sapiens
  misc_RNA (1)...(19): siRNA sense strand
gaucgcgagcgcaacaaga

SEQ ID NO: 1925173 - RNA, 19 nt, Homo sapiens
  misc_RNA (1)...(19): siRNA sense strand
aagccggacucaccauugu

SEQ ID NO: 1925174 - RNA, 19 nt, Homo sapiens
  misc_RNA (1)...(19): siRNA sense strand
ccagagucccagcuuucua

SEQ ID NO: 1925175 - RNA, 19 nt, Homo sapiens
  misc_RNA (1)...(19): siRNA sense strand
caucagcagaguuaaaucu

SEQ ID NO: 1925176 - RNA, 19 nt, Homo sapiens
  misc_RNA (1)...(19): siRNA sense strand
uuaaaggaacaauggauuc

SEQ ID NO: 1925177 - RNA, 19 nt, Homo sapiens
  misc_RNA (1)...(19): siRNA sense strand
agucccagcuuucuacuac

SEQ ID NO: 1925178 - RNA, 19 nt, Homo sapiens
  misc_RNA (1)...(19): siRNA sense strand
gcaggaauggcuggaaagu

SEQ ID NO: 1925179 - RNA, 19 nt, Homo sapiens
  misc_RNA (1)...(19): siRNA sense strand
gauucgagcuaaguaugag

SEQ ID NO: 1925180 - RNA, 19 nt, Homo sapiens
  misc_RNA (1)...(19): siRNA sense strand
cuuaaaggaacaauggauu

SEQ ID NO: 1925181 - RNA, 19 nt, Homo sapiens
  misc_RNA (1)...(19): siRNA sense strand
gaaggccuccugaaguacu

SEQ ID NO: 1925182 - RNA, 19 nt, Homo sapiens
  misc_RNA (1)...(19): siRNA sense strand
ccagguaaccgagaaggau

SEQ ID NO: 1925183 - RNA, 19 nt, Homo sapiens
  misc_RNA (1)...(19): siRNA sense strand
gggauaugaagccuacgaa

SEQ ID NO: 1925184 - RNA, 19 nt, Homo sapiens
  misc_RNA (1)...(19): siRNA sense strand
ugaaagugggaaggagaua

SEQ ID NO: 1925185 - RNA, 19 nt, Homo sapiens
  misc_RNA (1)...(19): siRNA sense strand
guaugagagacgggaauuu

SEQ ID NO: 1925186 - RNA, 19 nt, Homo sapiens
  misc_RNA (1)...(19): siRNA sense strand
cagguaaccgagaaggauu

SEQ ID NO: 1925187 - RNA, 19 nt, Homo sapiens
  misc_RNA (1)...(19): siRNA sense strand
gcugcucuauuacaagaac

SEQ ID NO: 1925188 - RNA, 19 nt, Homo sapiens
  misc_RNA (1)...(19): siRNA sense strand
cuuacugcaucaacagaga

SEQ ID NO: 1925189 - RNA, 19 nt, Homo sapiens
  misc_RNA (1)...(19): siRNA sense strand
aguuaaaucugugcgacuu

SEQ ID NO: 1925190 - RNA, 19 nt, Homo sapiens
  misc_RNA (1)...(19): siRNA sense strand
gaggaaaucgcuggaaagc

SEQ ID NO: 1925191 - RNA, 19 nt, Homo sapiens
  misc_RNA (1)...(19): siRNA sense strand
caagggcauccgaggaaau

SEQ ID NO: 1925192 - RNA, 19 nt, Homo sapiens
  misc_RNA (1)...(19): siRNA sense strand
acaauggauucgagcuaag

SEQ ID NO: 1925193 - RNA, 19 nt, Homo sapiens
  misc_RNA (1)...(19): siRNA sense strand
cccaagggcauccgaggaa

SEQ ID NO: 1925194 - RNA, 19 nt, Homo sapiens
  misc_RNA (1)...(19): siRNA sense strand
uuacaagaacccacuggau

SEQ ID NO: 1925195 - RNA, 19 nt, Homo sapiens
  misc_RNA (1)...(19): siRNA sense strand
ucaucagcauuaaggacuu

SEQ ID NO: 1925196 - RNA, 19 nt, Homo sapiens
  misc_RNA (1)...(19): siRNA sense strand
aagagaaggccuccugaag

SEQ ID NO: 1925197 - RNA, 19 nt, Homo sapiens
  misc_RNA (1)...(19): siRNA sense strand
ggacaaagcuucuauagca

SEQ ID NO: 1925198 - RNA, 19 nt, Homo sapiens
  misc_RNA (1)...(19): siRNA sense strand
gcccacaacugaagaauua

SEQ ID NO: 1925199 - RNA, 19 nt, Homo sapiens
  misc_RNA (1)...(19): siRNA sense strand
gaagagagucgacaguuua

SEQ ID NO: 1925200 - RNA, 19 nt, Homo sapiens
  misc_RNA (1)...(19): siRNA sense strand
gcacagaaauggaaguuca

SEQ ID NO: 1925201 - RNA, 19 nt, Homo sapiens
  misc_RNA (1)...(19): siRNA sense strand
ccacaaaggugaugaagug

SEQ ID NO: 1925202 - RNA, 19 nt, Homo sapiens
  misc_RNA (1)...(19): siRNA sense strand
ccaaacaccucccuucaaa

SEQ ID NO: 1925203 - RNA, 19 nt, Homo sapiens
  misc_RNA (1)...(19): siRNA sense strand
gagaggagcugauaagaag

SEQ ID NO: 1925204 - RNA, 19 nt, Homo sapiens
  misc_RNA (1)...(19): siRNA sense strand
cgaaggauccugcgauuua

SEQ ID NO: 1925205 - RNA, 19 nt, Homo sapiens
  misc_RNA (1)...(19): siRNA sense strand
ggaauugccugaucaagau

SEQ ID NO: 1925206 - RNA, 19 nt, Homo sapiens
  misc_RNA (1)...(19): siRNA sense strand
caacagaccaucuaagaaa

SEQ ID NO: 1925207 - RNA, 19 nt, Homo sapiens
  misc_RNA (1)...(19): siRNA sense strand
ggagacaguuucuagcaaa

SEQ ID NO: 1925208 - RNA, 19 nt, Homo sapiens
  misc_RNA (1)...(19): siRNA sense strand
gaagaccagcgacaaauuu

SEQ ID NO: 1925209 - RNA, 19 nt, Homo sapiens
  misc_RNA (1)...(19): siRNA sense strand
gaaggauccugcgauuuaa

SEQ ID NO: 1925210 - RNA, 19 nt, Homo sapiens
  misc_RNA (1)...(19): siRNA sense strand
gaacuuaaacgcagacuca

SEQ ID NO: 1925211 - RNA, 19 nt, Homo sapiens
  misc_RNA (1)...(19): siRNA sense strand
ugaagugccucccauuaaa

SEQ ID NO: 1925212 - RNA, 19 nt, Homo sapiens
  misc_RNA (1)...(19): siRNA sense strand
ggaaauccgacaacaaauu

SEQ ID NO: 1925213 - RNA, 19 nt, Homo sapiens
  misc_RNA (1)...(19): siRNA sense strand
gaacagaaccacucucuac

SEQ ID NO: 1925214 - RNA, 19 nt, Homo sapiens
  misc_RNA (1)...(19): siRNA sense strand
gggaaacuauccaccauug

SEQ ID NO: 1925215 - RNA, 19 nt, Homo sapiens
  misc_RNA (1)...(19): siRNA sense strand
gaaauccgacaacaaauug

SEQ ID NO: 1925216 - RNA, 19 nt, Homo sapiens
  misc_RNA (1)...(19): siRNA sense strand
gaagauauccacacgacaa

SEQ ID NO: 1925217 - RNA, 19 nt, Homo sapiens
  misc_RNA (1)...(19): siRNA sense strand
gaugaagugccucccauua

SEQ ID NO: 1925218 - RNA, 19 nt, Homo sapiens
  misc_RNA (1)...(19): siRNA sense strand
ugaagagagucgacaguuu

SEQ ID NO: 1925219 - RNA, 19 nt, Homo sapiens
  misc_RNA (1)...(19): siRNA sense strand
gagcaaagaaacauccuaa

SEQ ID NO: 1925220 - RNA, 19 nt, Homo sapiens
  misc_RNA (1)...(19): siRNA sense strand
agaaagaacuagaggacaa

SEQ ID NO: 1925221 - RNA, 19 nt, Homo sapiens
  misc_RNA (1)...(19): siRNA sense strand
gcaauaaggaaagaacuaa

SEQ ID NO: 1925222 - RNA, 19 nt, Homo sapiens
  misc_RNA (1)...(19): siRNA sense strand
gcagaacacaggcaaauuc

SEQ ID NO: 1925223 - RNA, 19 nt, Homo sapiens
  misc_RNA (1)...(19): siRNA sense strand
gaacacaggcaaauucaag

SEQ ID NO: 1925224 - RNA, 19 nt, Homo sapiens
  misc_RNA (1)...(19): siRNA sense strand
agaaaccucggcaguauua

SEQ ID NO: 1925225 - RNA, 19 nt, Homo sapiens
  misc_RNA (1)...(19): siRNA sense strand
caggaaauccgacaacaaa

SEQ ID NO: 1925226 - RNA, 19 nt, Homo sapiens
  misc_RNA (1)...(19): siRNA sense strand
gggaauaccaagccaauga

SEQ ID NO: 1925227 - RNA, 19 nt, Homo sapiens
  misc_RNA (1)...(19): siRNA sense strand
ugaucaagauggagaugua

SEQ ID NO: 1925228 - RNA, 19 nt, Homo sapiens
  misc_RNA (1)...(19): siRNA sense strand
uaacgaguauguagaaguc

SEQ ID NO: 1925229 - RNA, 19 nt, Homo sapiens
  misc_RNA (1)...(19): siRNA sense strand
gcugcuggcuccucucauu

SEQ ID NO: 1925230 - RNA, 19 nt, Homo sapiens
  misc_RNA (1)...(19): siRNA sense strand
uaucaaacuuggcaacaga

SEQ ID NO: 1925231 - RNA, 19 nt, Homo sapiens
  misc_RNA (1)...(19): siRNA sense strand
caaaggagacaguuucuag

SEQ ID NO: 1925232 - RNA, 19 nt, Homo sapiens
  misc_RNA (1)...(19): siRNA sense strand
ugaagaagaggaacaagaa

SEQ ID NO: 1925233 - RNA, 19 nt, Homo sapiens
  misc_RNA (1)...(19): siRNA sense strand
cagaaccacucucuacuca

SEQ ID NO: 1925234 - RNA, 19 nt, Homo sapiens
  misc_RNA (1)...(19): siRNA sense strand
agagaaaccucggcaguau

SEQ ID NO: 1925235 - RNA, 19 nt, Homo sapiens
  misc_RNA (1)...(19): siRNA sense strand
aaauggaaguucaugaaga

SEQ ID NO: 1925236 - RNA, 19 nt, Homo sapiens
  misc_RNA (1)...(19): siRNA sense strand
gcaacagaccaucuaagaa

SEQ ID NO: 1925237 - RNA, 19 nt, Homo sapiens
  misc_RNA (1)...(19): siRNA sense strand
gaagacagugccucagcua

SEQ ID NO: 1925238 - RNA, 19 nt, Homo sapiens
  misc_RNA (1)...(19): siRNA sense strand
gguaauggcucuguaucug

SEQ ID NO: 1925239 - RNA, 19 nt, Homo sapiens
  misc_RNA (1)...(19): siRNA sense strand
gggcgaaucuucagaaucc

SEQ ID NO: 1925240 - RNA, 19 nt, Homo sapiens
  misc_RNA (1)...(19): siRNA sense strand
ggaaguucaugaagagagu

SEQ ID NO: 1925241 - RNA, 19 nt, Homo sapiens
  misc_RNA (1)...(19): siRNA sense strand
gcaaagaaacauccuaaaa

SEQ ID NO: 1925242 - RNA, 19 nt, Homo sapiens
  misc_RNA (1)...(19): siRNA sense strand
gaagaagagaggcaggaaa

SEQ ID NO: 1925243 - RNA, 19 nt, Homo sapiens
  misc_RNA (1)...(19): siRNA sense strand
gaagguaauggcucuguau

SEQ ID NO: 1925244 - RNA, 19 nt, Homo sapiens
  misc_RNA (1)...(19): siRNA sense strand
guuaacaccugcagacaag

SEQ ID NO: 1925245 - RNA, 19 nt, Homo sapiens
  misc_RNA (1)...(19): siRNA sense strand
gaaagaacuagaggacaaa

SEQ ID NO: 1925246 - RNA, 19 nt, Homo sapiens
  misc_RNA (1)...(19): siRNA sense strand
ggagggauacucuugcuau

SEQ ID NO: 1925247 - RNA, 19 nt, Homo sapiens
  misc_RNA (1)...(19): siRNA sense strand
ggacgaagacgaagaugag

SEQ ID NO: 1925248 - RNA, 19 nt, Homo sapiens
  misc_RNA (1)...(19): siRNA sense strand
agauggagauguaacaguu

SEQ ID NO: 1925249 - RNA, 19 nt, Homo sapiens
  misc_RNA (1)...(19): siRNA sense strand
gcagacaaggcagcaauaa

SEQ ID NO: 1925250 - RNA, 19 nt, Homo sapiens
  misc_RNA (1)...(19): siRNA sense strand
gacaaagcuucuauagcaa

SEQ ID NO: 1925251 - RNA, 19 nt, Homo sapiens
  misc_RNA (1)...(19): siRNA sense strand
uaauggcucuguaucugaa

SEQ ID NO: 1925252 - RNA, 19 nt, Homo sapiens
  misc_RNA (1)...(19): siRNA sense strand
aagccuagauccaaaccua

SEQ ID NO: 1925253 - RNA, 19 nt, Homo sapiens
  misc_RNA (1)...(19): siRNA sense strand
gaagagccgacgaacagaa

SEQ ID NO: 1925254 - RNA, 19 nt, Homo sapiens
  misc_RNA (1)...(19): siRNA sense strand
ggcaacagaccaucuaaga

SEQ ID NO: 1925255 - RNA, 19 nt, Homo sapiens
  misc_RNA (1)...(19): siRNA sense strand
gaaauggaaguucaugaag

SEQ ID NO: 1925256 - RNA, 19 nt, Homo sapiens
  misc_RNA (1)...(19): siRNA sense strand
gaacaggcagaagauaaga

SEQ ID NO: 1925257 - RNA, 19 nt, Homo sapiens
  misc_RNA (1)...(19): siRNA sense strand
gaagaauuagagcaaagaa

SEQ ID NO: 1925258 - RNA, 19 nt, Homo sapiens
  misc_RNA (1)...(19): siRNA sense strand
ggauggcaguggagaaagu

SEQ ID NO: 1925259 - RNA, 19 nt, Homo sapiens
  misc_RNA (1)...(19): siRNA sense strand
agaccagaguggagaguuu

SEQ ID NO: 1925260 - RNA, 19 nt, Homo sapiens
  misc_RNA (1)...(19): siRNA sense strand
cagaagauaagaaagagaa

SEQ ID NO: 1925261 - RNA, 19 nt, Homo sapiens
  misc_RNA (1)...(19): siRNA sense strand
caccucaucucgucccaaa

SEQ ID NO: 1925262 - RNA, 19 nt, Homo sapiens
  misc_RNA (1)...(19): siRNA sense strand
gcaggaaauccgacaacaa

SEQ ID NO: 1925263 - RNA, 19 nt, Homo sapiens
  misc_RNA (1)...(19): siRNA sense strand
uuaaggaauugccugauca

SEQ ID NO: 1925264 - RNA, 19 nt, Homo sapiens
  misc_RNA (1)...(19): siRNA sense strand
gagagucgacaguuuacaa

SEQ ID NO: 1925265 - RNA, 19 nt, Homo sapiens
  misc_RNA (1)...(19): siRNA sense strand
cggauucuccugacuauga

SEQ ID NO: 1925266 - RNA, 19 nt, Homo sapiens
  misc_RNA (1)...(19): siRNA sense strand
gaaugaagaagaggaacaa

SEQ ID NO: 1925267 - RNA, 19 nt, Homo sapiens
  misc_RNA (1)...(19): siRNA sense strand
gcguacaucugaagaagag

SEQ ID NO: 1925268 - RNA, 19 nt, Homo sapiens
  misc_RNA (1)...(19): siRNA sense strand
gagcagaacacaggcaaau

SEQ ID NO: 1925269 - RNA, 19 nt, Homo sapiens
  misc_RNA (1)...(19): siRNA sense strand
guaguaaagucugaagaag

SEQ ID NO: 1925270 - RNA, 19 nt, Homo sapiens
  misc_RNA (1)...(19): siRNA sense strand
guaauggcucuguaucuga

SEQ ID NO: 1925271 - RNA, 19 nt, Homo sapiens
  misc_RNA (1)...(19): siRNA sense strand
gccagaggcccacaacuga

SEQ ID NO: 1925272 - RNA, 19 nt, Homo sapiens
  misc_RNA (1)...(19): siRNA sense strand
aaagaagaccagcgacaaa

SEQ ID NO: 1925273 - RNA, 19 nt, Homo sapiens
  misc_RNA (1)...(19): siRNA sense strand
gaggauggcaguggagaaa

SEQ ID NO: 1925274 - RNA, 19 nt, Homo sapiens
  misc_RNA (1)...(19): siRNA sense strand
ggaacaggcagaagauaag

SEQ ID NO: 1925275 - RNA, 19 nt, Homo sapiens
  misc_RNA (1)...(19): siRNA sense strand
caaggcagcaauaaggaaa

SEQ ID NO: 1925276 - RNA, 19 nt, Homo sapiens
  misc_RNA (1)...(19): siRNA sense strand
aaacgcagacucagcagaa

SEQ ID NO: 1925277 - RNA, 19 nt, Homo sapiens
  misc_RNA (1)...(19): siRNA sense strand
gaccagcgacaaauuuaga

SEQ ID NO: 1925278 - RNA, 19 nt, Homo sapiens
  misc_RNA (1)...(19): siRNA sense strand
gacaagcagccaauaacuu

SEQ ID NO: 1925279 - RNA, 19 nt, Homo sapiens
  misc_RNA (1)...(19): siRNA sense strand
ccaccaagggcaagagaaa

SEQ ID NO: 1925280 - RNA, 19 nt, Homo sapiens
  misc_RNA (1)...(19): siRNA sense strand
uaagaaagagaacacugaa

SEQ ID NO: 1925281 - RNA, 19 nt, Homo sapiens
  misc_RNA (1)...(19): siRNA sense strand
agaaauggaaguucaugaa

SEQ ID NO: 1925282 - RNA, 19 nt, Homo sapiens
  misc_RNA (1)...(19): siRNA sense strand
guagagaggagcugauaag

SEQ ID NO: 1925283 - RNA, 19 nt, Homo sapiens
  misc_RNA (1)...(19): siRNA sense strand
cacagcagguucccaaaca

SEQ ID NO: 1925284 - RNA, 19 nt, Homo sapiens
  misc_RNA (1)...(19): siRNA sense strand
gagaaaccucggcaguauu

SEQ ID NO: 1925285 - RNA, 19 nt, Homo sapiens
  misc_RNA (1)...(19): siRNA sense strand
cuacucaggcacuggcuua

SEQ ID NO: 1925286 - RNA, 19 nt, Homo sapiens
  misc_RNA (1)...(19): siRNA sense strand
aguaaagucugaagaaggu

SEQ ID NO: 1925287 - RNA, 19 nt, Homo sapiens
  misc_RNA (1)...(19): siRNA sense strand
gaaucuacccgagaggaaa

SEQ ID NO: 1925288 - RNA, 19 nt, Homo sapiens
  misc_RNA (1)...(19): siRNA sense strand
gaaggggagugcuuaagga

SEQ ID NO: 1925289 - RNA, 19 nt, Homo sapiens
  misc_RNA (1)...(19): siRNA sense strand
gaauuagagcaaagaaaca

SEQ ID NO: 1925290 - RNA, 19 nt, Homo sapiens
  misc_RNA (1)...(19): siRNA sense strand
gaugaaggccacagggaau

SEQ ID NO: 1925291 - RNA, 19 nt, Homo sapiens
  misc_RNA (1)...(19): siRNA sense strand
acaacuggcucuaaagcau

SEQ ID NO: 1925292 - RNA, 19 nt, Homo sapiens
  misc_RNA (1)...(19): siRNA sense strand
ggaggaacaggcagaagau

SEQ ID NO: 1925293 - RNA, 19 nt, Homo sapiens
  misc_RNA (1)...(19): siRNA sense strand
ggaaucuacccgagaggaa

SEQ ID NO: 1925294 - RNA, 19 nt, Homo sapiens
  misc_RNA (1)...(19): siRNA sense strand
gaucaagauggagauguaa

SEQ ID NO: 1925295 - RNA, 19 nt, Homo sapiens
  misc_RNA (1)...(19): siRNA sense strand
gaagauaagaaagagaaca

SEQ ID NO: 1925296 - RNA, 19 nt, Homo sapiens
  misc_RNA (1)...(19): siRNA sense strand
cagagaaaaugcaaaaugu

SEQ ID NO: 1925297 - RNA, 19 nt, Homo sapiens
  misc_RNA (1)...(19): siRNA sense strand
uggauuaccuugcaccuua

SEQ ID NO: 1925298 - RNA, 19 nt, Homo sapiens
  misc_RNA (1)...(19): siRNA sense strand
ggagacccgugucauguuu

SEQ ID NO: 1925299 - RNA, 19 nt, Homo sapiens
  misc_RNA (1)...(19): siRNA sense strand
gaagauagcgaaguacauu

SEQ ID NO: 1925300 - RNA, 19 nt, Homo sapiens
  misc_RNA (1)...(19): siRNA sense strand
ggaaccauguguugaaauc

SEQ ID NO: 1925301 - RNA, 19 nt, Homo sapiens
  misc_RNA (1)...(19): siRNA sense strand
gggaauaugugcggcauga

SEQ ID NO: 1925302 - RNA, 19 nt, Homo sapiens
  misc_RNA (1)...(19): siRNA sense strand
gagcaguccuuccuguaug

SEQ ID NO: 1925303 - RNA, 19 nt, Homo sapiens
  misc_RNA (1)...(19): siRNA sense strand
uugagaagauagcgaagua

SEQ ID NO: 1925304 - RNA, 19 nt, Homo sapiens
  misc_RNA (1)...(19): siRNA sense strand
augaagagacguugacuua

SEQ ID NO: 1925305 - RNA, 19 nt, Homo sapiens
  misc_RNA (1)...(19): siRNA sense strand
gugagaagauuaugaagcu

SEQ ID NO: 1925306 - RNA, 19 nt, Homo sapiens
  misc_RNA (1)...(19): siRNA sense strand
gaccggguguacuauguga

SEQ ID NO: 1925307 - RNA, 19 nt, Homo sapiens
  misc_RNA (1)...(19): siRNA sense strand
ccauggcgauugugguauu

SEQ ID NO: 1925308 - RNA, 19 nt, Homo sapiens
  misc_RNA (1)...(19): siRNA sense strand
gaagaggagacccguguca

SEQ ID NO: 1925309 - RNA, 19 nt, Homo sapiens
  misc_RNA (1)...(19): siRNA sense strand
ggauuaccuugcaccuuau

SEQ ID NO: 1925310 - RNA, 19 nt, Homo sapiens
  misc_RNA (1)...(19): siRNA sense strand
gcagccaaaucuacacaag

SEQ ID NO: 1925311 - RNA, 19 nt, Homo sapiens
  misc_RNA (1)...(19): siRNA sense strand
ugucauguuugagaagaua

SEQ ID NO: 1925312 - RNA, 19 nt, Homo sapiens
  misc_RNA (1)...(19): siRNA sense strand
ucacagcucuggauuaccu

SEQ ID NO: 1925313 - RNA, 19 nt, Homo sapiens
  misc_RNA (1)...(19): siRNA sense strand
ugagugagaagauuaugaa

SEQ ID NO: 1925314 - RNA, 19 nt, Homo sapiens
  misc_RNA (1)...(19): siRNA sense strand
gagaagauagcgaaguaca

SEQ ID NO: 1925315 - RNA, 19 nt, Homo sapiens
  misc_RNA (1)...(19): siRNA sense strand
gaauaugugcggcaugaag

SEQ ID NO: 1925316 - RNA, 19 nt, Homo sapiens
  misc_RNA (1)...(19): siRNA sense strand
gaggagacccgugucaugu

SEQ ID NO: 1925317 - RNA, 19 nt, Homo sapiens
  misc_RNA (1)...(19): siRNA sense strand
gcacgucacagcucuggau

SEQ ID NO: 1925318 - RNA, 19 nt, Homo sapiens
  misc_RNA (1)...(19): siRNA sense strand
cgucacagcucuggauuac

SEQ ID NO: 1925319 - RNA, 19 nt, Homo sapiens
  misc_RNA (1)...(19): siRNA sense strand
uaugugagugagaagauua

SEQ ID NO: 1925320 - RNA, 19 nt, Homo sapiens
  misc_RNA (1)...(19): siRNA sense strand
gcacaacgaccggguguac

SEQ ID NO: 1925321 - RNA, 19 nt, Homo sapiens
  misc_RNA (1)...(19): siRNA sense strand
acaacgaccggguguacua

SEQ ID NO: 1925322 - RNA, 19 nt, Homo sapiens
  misc_RNA (1)...(19): siRNA sense strand
ugaagagacguugacuuaa

SEQ ID NO: 1925323 - RNA, 19 nt, Homo sapiens
  misc_RNA (1)...(19): siRNA sense strand
ggucgaaucacugaaaaua

SEQ ID NO: 1925324 - RNA, 19 nt, Homo sapiens
  misc_RNA (1)...(19): siRNA sense strand
acacaagacugcagaaaag

SEQ ID NO: 1925325 - RNA, 19 nt, Homo sapiens
  misc_RNA (1)...(19): siRNA sense strand
agacccgugucauguuuga

SEQ ID NO: 1925326 - RNA, 19 nt, Homo sapiens
  misc_RNA (1)...(19): siRNA sense strand
cgauugugguauuucauca

SEQ ID NO: 1925327 - RNA, 19 nt, Homo sapiens
  misc_RNA (1)...(19): siRNA sense strand
ccgauggcaccuacuguuu

SEQ ID NO: 1925328 - RNA, 19 nt, Homo sapiens
  misc_RNA (1)...(19): siRNA sense strand
cagagcaguccuuccugua

SEQ ID NO: 1925329 - RNA, 19 nt, Homo sapiens
  misc_RNA (1)...(19): siRNA sense strand
ugggaaccauguguugaaa

SEQ ID NO: 1925330 - RNA, 19 nt, Homo sapiens
  misc_RNA (1)...(19): siRNA sense strand
aagcagacauuggggaaua

SEQ ID NO: 1925331 - RNA, 19 nt, Homo sapiens
  misc_RNA (1)...(19): siRNA sense strand
cauggcgauugugguauuu

SEQ ID NO: 1925332 - RNA, 19 nt, Homo sapiens
  misc_RNA (1)...(19): siRNA sense strand
agacaucccuuuggguuuu

SEQ ID NO: 1925333 - RNA, 19 nt, Homo sapiens
  misc_RNA (1)...(19): siRNA sense strand
gcaccuuaugccaaguaua

SEQ ID NO: 1925334 - RNA, 19 nt, Homo sapiens
  misc_RNA (1)...(19): siRNA sense strand
gauggcaccuacuguuucc

SEQ ID NO: 1925335 - RNA, 19 nt, Homo sapiens
  misc_RNA (1)...(19): siRNA sense strand
cuaugugagugagaagauu

SEQ ID NO: 1925336 - RNA, 19 nt, Homo sapiens
  misc_RNA (1)...(19): siRNA sense strand
uguacuaugugagugagaa

SEQ ID NO: 1925337 - RNA, 19 nt, Homo sapiens
  misc_RNA (1)...(19): siRNA sense strand
gugagugagaagauuauga

SEQ ID NO: 1925338 - RNA, 19 nt, Homo sapiens
  misc_RNA (1)...(19): siRNA sense strand
caacgaccggguguacuau

SEQ ID NO: 1925339 - RNA, 19 nt, Homo sapiens
  misc_RNA (1)...(19): siRNA sense strand
cgaaguacauuggggagaa

SEQ ID NO: 1925340 - RNA, 19 nt, Homo sapiens
  misc_RNA (1)...(19): siRNA sense strand
cagacaucccuuuggguuu

SEQ ID NO: 1925341 - RNA, 19 nt, Homo sapiens
  misc_RNA (1)...(19): siRNA sense strand
aaccauguguugaaaucug

SEQ ID NO: 1925342 - RNA, 19 nt, Homo sapiens
  misc_RNA (1)...(19): siRNA sense strand
ggaccugcuuuggaaaauu

SEQ ID NO: 1925343 - RNA, 19 nt, Homo sapiens
  misc_RNA (1)...(19): siRNA sense strand
ucacuaaaacccacaaguu

SEQ ID NO: 1925344 - RNA, 19 nt, Homo sapiens
  misc_RNA (1)...(19): siRNA sense strand
ugugguauuucaucaagca

SEQ ID NO: 1925345 - RNA, 19 nt, Homo sapiens
  misc_RNA (1)...(19): siRNA sense strand
gcgauugugguauuucauc

SEQ ID NO: 1925346 - RNA, 19 nt, Homo sapiens
  misc_RNA (1)...(19): siRNA sense strand
cagccaaaucuacacaaga

SEQ ID NO: 1925347 - RNA, 19 nt, Homo sapiens
  misc_RNA (1)...(19): siRNA sense strand
gaccugcuuuggaaaauuc

SEQ ID NO: 1925348 - RNA, 19 nt, Homo sapiens
  misc_RNA (1)...(19): siRNA sense strand
cuacacaagacugcagaaa

SEQ ID NO: 1925349 - RNA, 19 nt, Homo sapiens
  misc_RNA (1)...(19): siRNA sense strand
agaggagacccgugucaug

SEQ ID NO: 1925350 - RNA, 19 nt, Homo sapiens
  misc_RNA (1)...(19): siRNA sense strand
cgauggcaccuacuguuuc

SEQ ID NO: 1925351 - RNA, 19 nt, Homo sapiens
  misc_RNA (1)...(19): siRNA sense strand
uggcgauugugguauuuca

SEQ ID NO: 1925352 - RNA, 19 nt, Homo sapiens
  misc_RNA (1)...(19): siRNA sense strand
agccaaaucuacacaagac

SEQ ID NO: 1925353 - RNA, 19 nt, Homo sapiens
  misc_RNA (1)...(19): siRNA sense strand
aaucuggucugggucgaau

SEQ ID NO: 1925354 - RNA, 19 nt, Homo sapiens
  misc_RNA (1)...(19): siRNA sense strand
agagcaguccuuccuguau

SEQ ID NO: 1925355 - RNA, 19 nt, Homo sapiens
  misc_RNA (1)...(19): siRNA sense strand
cgugucauguuugagaaga

SEQ ID NO: 1925356 - RNA, 19 nt, Homo sapiens
  misc_RNA (1)...(19): siRNA sense strand
gggaauuccucaaauauuu

SEQ ID NO: 1925357 - RNA, 19 nt, Homo sapiens
  misc_RNA (1)...(19): siRNA sense strand
caagaggaaugaucacuuu

SEQ ID NO: 1925358 - RNA, 19 nt, Homo sapiens
  misc_RNA (1)...(19): siRNA sense strand
gaaaugagggaaagacaaa

SEQ ID NO: 1925359 - RNA, 19 nt, Homo sapiens
  misc_RNA (1)...(19): siRNA sense strand
gaaaggaacagaguagauu

SEQ ID NO: 1925360 - RNA, 19 nt, Homo sapiens
  misc_RNA (1)...(19): siRNA sense strand
cagaguagauucuucauag

SEQ ID NO: 1925361 - RNA, 19 nt, Homo sapiens
  misc_RNA (1)...(19): siRNA sense strand
gaacagaguagauucuuca

SEQ ID NO: 1925362 - RNA, 19 nt, Homo sapiens
  misc_RNA (1)...(19): siRNA sense strand
caaaaggaguucaugcuua

SEQ ID NO: 1925363 - RNA, 19 nt, Homo sapiens
  misc_RNA (1)...(19): siRNA sense strand
ggacauacuggaaacagaa

SEQ ID NO: 1925364 - RNA, 19 nt, Homo sapiens
  misc_RNA (1)...(19): siRNA sense strand
ggaacagaguagauucuuc

SEQ ID NO: 1925365 - RNA, 19 nt, Homo sapiens
  misc_RNA (1)...(19): siRNA sense strand
caaauggccaugcggauug

SEQ ID NO: 1925366 - RNA, 19 nt, Homo sapiens
  misc_RNA (1)...(19): siRNA sense strand
uuuaacagcuggagcgauu

SEQ ID NO: 1925367 - RNA, 19 nt, Homo sapiens
  misc_RNA (1)...(19): siRNA sense strand
ggaaugaucacuuuugaaa

SEQ ID NO: 1925368 - RNA, 19 nt, Homo sapiens
  misc_RNA (1)...(19): siRNA sense strand
ggaaaggcagcucaucaug

SEQ ID NO: 1925369 - RNA, 19 nt, Homo sapiens
  misc_RNA (1)...(19): siRNA sense strand
aaaggcagcucaucaugca

SEQ ID NO: 1925370 - RNA, 19 nt, Homo sapiens
  misc_RNA (1)...(19): siRNA sense strand
ggucccgauuguuccauua

SEQ ID NO: 1925371 - RNA, 19 nt, Homo sapiens
  misc_RNA (1)...(19): siRNA sense strand
gcagccaucucuuuaacag

SEQ ID NO: 1925372 - RNA, 19 nt, Homo sapiens
  misc_RNA (1)...(19): siRNA sense strand
uaacagcuggagcgauuaa

SEQ ID NO: 1925373 - RNA, 19 nt, Homo sapiens
  misc_RNA (1)...(19): siRNA sense strand
guagauucuucauagacaa

SEQ ID NO: 1925374 - RNA, 19 nt, Homo sapiens
  misc_RNA (1)...(19): siRNA sense strand
gaggaaugaucacuuuuga

SEQ ID NO: 1925375 - RNA, 19 nt, Homo sapiens
  misc_RNA (1)...(19): siRNA sense strand
aggugaagcugaggacaua

SEQ ID NO: 1925376 - RNA, 19 nt, Homo sapiens
  misc_RNA (1)...(19): siRNA sense strand
gcuuaugaaugcucgacuu

SEQ ID NO: 1925377 - RNA, 19 nt, Homo sapiens
  misc_RNA (1)...(19): siRNA sense strand
uaagcuuuauccucaccua

SEQ ID NO: 1925378 - RNA, 19 nt, Homo sapiens
  misc_RNA (1)...(19): siRNA sense strand
gcugaggacauacuggaaa

SEQ ID NO: 1925379 - RNA, 19 nt, Homo sapiens
  misc_RNA (1)...(19): siRNA sense strand
cucgggaauuccucaaaua

SEQ ID NO: 1925380 - RNA, 19 nt, Homo sapiens
  misc_RNA (1)...(19): siRNA sense strand
aaaaggaguucaugcuuau

SEQ ID NO: 1925381 - RNA, 19 nt, Homo sapiens
  misc_RNA (1)...(19): siRNA sense strand
agaguagauucuucauaga

SEQ ID NO: 1925382 - RNA, 19 nt, Homo sapiens
  misc_RNA (1)...(19): siRNA sense strand
ccagaaaggaacagaguag

SEQ ID NO: 1925383 - RNA, 19 nt, Homo sapiens
  misc_RNA (1)...(19): siRNA sense strand
gaaagaaugaaaggugaag

SEQ ID NO: 1925384 - RNA, 19 nt, Homo sapiens
  misc_RNA (1)...(19): siRNA sense strand
ccaagaggaaugaucacuu

SEQ ID NO: 1925385 - RNA, 19 nt, Homo sapiens
  misc_RNA (1)...(19): siRNA sense strand
ucucgggaauuccucaaau

SEQ ID NO: 1925386 - RNA, 19 nt, Homo sapiens
  misc_RNA (1)...(19): siRNA sense strand
gauuguuccauuaagcuuu

SEQ ID NO: 1925387 - RNA, 19 nt, Homo sapiens
  misc_RNA (1)...(19): siRNA sense strand
ugaaaugagggaaagacaa

SEQ ID NO: 1925388 - RNA, 19 nt, Homo sapiens
  misc_RNA (1)...(19): siRNA sense strand
cgggaauuccucaaauauu

SEQ ID NO: 1925389 - RNA, 19 nt, Homo sapiens
  misc_RNA (1)...(19): siRNA sense strand
acagaguagauucuucaua

SEQ ID NO: 1925390 - RNA, 19 nt, Homo sapiens
  misc_RNA (1)...(19): siRNA sense strand
ccuugcagccaucucuuua

SEQ ID NO: 1925391 - RNA, 19 nt, Homo sapiens
  misc_RNA (1)...(19): siRNA sense strand
ucaccuaccaguaugacuu

SEQ ID NO: 1925392 - RNA, 19 nt, Homo sapiens
  misc_RNA (1)...(19): siRNA sense strand
acaaauggccaugcggauu

SEQ ID NO: 1925393 - RNA, 19 nt, Homo sapiens
  misc_RNA (1)...(19): siRNA sense strand
uauccucaccuaccaguau

SEQ ID NO: 1925394 - RNA, 19 nt, Homo sapiens
  misc_RNA (1)...(19): siRNA sense strand
gccagaaaggaacagagua

SEQ ID NO: 1925395 - RNA, 19 nt, Homo sapiens
  misc_RNA (1)...(19): siRNA sense strand
gacauacuggaaacagaaa

SEQ ID NO: 1925396 - RNA, 19 nt, Homo sapiens
  misc_RNA (1)...(19): siRNA sense strand
caguaugacuugggcuaug

SEQ ID NO: 1925397 - RNA, 19 nt, Homo sapiens
  misc_RNA (1)...(19): siRNA sense strand
gauucuucauagacaaaug

SEQ ID NO: 1925398 - RNA, 19 nt, Homo sapiens
  misc_RNA (1)...(19): siRNA sense strand
caucaugcagagugaaaug

SEQ ID NO: 1925399 - RNA, 19 nt, Homo sapiens
  misc_RNA (1)...(19): siRNA sense strand
aguagauucuucauagaca

SEQ ID NO: 1925400 - RNA, 19 nt, Homo sapiens
  misc_RNA (1)...(19): siRNA sense strand
agaaaggaacagaguagau

SEQ ID NO: 1925401 - RNA, 19 nt, Homo sapiens
  misc_RNA (1)...(19): siRNA sense strand
agagugaaaugagggaaag

SEQ ID NO: 1925402 - RNA, 19 nt, Homo sapiens
  misc_RNA (1)...(19): siRNA sense strand
cagagugaaaugagggaaa

SEQ ID NO: 1925403 - RNA, 19 nt, Homo sapiens
  misc_RNA (1)...(19): siRNA sense strand
gaguagauucuucauagac

SEQ ID NO: 1925404 - RNA, 19 nt, Homo sapiens
  misc_RNA (1)...(19): siRNA sense strand
aaaggaacagaguagauuc

SEQ ID NO: 1925405 - RNA, 19 nt, Homo sapiens
  misc_RNA (1)...(19): siRNA sense strand
uaaauugcagcugccaaga

SEQ ID NO: 1925406 - RNA, 19 nt, Homo sapiens
  misc_RNA (1)...(19): siRNA sense strand
ucgggaauuccucaaauau

SEQ ID NO: 1925407 - RNA, 19 nt, Homo sapiens
  misc_RNA (1)...(19): siRNA sense strand
gcagcugccaagaggaaug

SEQ ID NO: 1925408 - RNA, 19 nt, Homo sapiens
  misc_RNA (1)...(19): siRNA sense strand
caacaggcaucaacacuua

SEQ ID NO: 1925409 - RNA, 19 nt, Homo sapiens
  misc_RNA (1)...(19): siRNA sense strand
uaagaaugcuggcuaauuu

SEQ ID NO: 1925410 - RNA, 19 nt, Homo sapiens
  misc_RNA (1)...(19): siRNA sense strand
ucaaagagcucaagaacuu

SEQ ID NO: 1925411 - RNA, 19 nt, Homo sapiens
  misc_RNA (1)...(19): siRNA sense strand
ggagaagcauuguuuauga

SEQ ID NO: 1925412 - RNA, 19 nt, Homo sapiens
  misc_RNA (1)...(19): siRNA sense strand
gaaaugaucucuggaauac

SEQ ID NO: 1925413 - RNA, 19 nt, Homo sapiens
  misc_RNA (1)...(19): siRNA sense strand
gcacuuaaacuucagaaua

SEQ ID NO: 1925414 - RNA, 19 nt, Homo sapiens
  misc_RNA (1)...(19): siRNA sense strand
cuacaaggcuacuuucaaa

SEQ ID NO: 1925415 - RNA, 19 nt, Homo sapiens
  misc_RNA (1)...(19): siRNA sense strand
caucaacacuuauuucaga

SEQ ID NO: 1925416 - RNA, 19 nt, Homo sapiens
  misc_RNA (1)...(19): siRNA sense strand
cuaaggaacuggagauuau

SEQ ID NO: 1925417 - RNA, 19 nt, Homo sapiens
  misc_RNA (1)...(19): siRNA sense strand
gaacagaauaccacuaaau

SEQ ID NO: 1925418 - RNA, 19 nt, Homo sapiens
  misc_RNA (1)...(19): siRNA sense strand
ggaaauagaagccaugugu

SEQ ID NO: 1925419 - RNA, 19 nt, Homo sapiens
  misc_RNA (1)...(19): siRNA sense strand
uaaacaggcuucuaaaucu

SEQ ID NO: 1925420 - RNA, 19 nt, Homo sapiens
  misc_RNA (1)...(19): siRNA sense strand
gagaagcauuguuuaugaa

SEQ ID NO: 1925421 - RNA, 19 nt, Homo sapiens
  misc_RNA (1)...(19): siRNA sense strand
cagauuccauuaacuauug

SEQ ID NO: 1925422 - RNA, 19 nt, Homo sapiens
  misc_RNA (1)...(19): siRNA sense strand
cuaaaucugucacugaauu

SEQ ID NO: 1925423 - RNA, 19 nt, Homo sapiens
  misc_RNA (1)...(19): siRNA sense strand
gaauauuccucuggagauu

SEQ ID NO: 1925424 - RNA, 19 nt, Homo sapiens
  misc_RNA (1)...(19): siRNA sense strand
caacacuuauuucagauug

SEQ ID NO: 1925425 - RNA, 19 nt, Homo sapiens
  misc_RNA (1)...(19): siRNA sense strand
cuaaagcacuuaaacuuca

SEQ ID NO: 1925426 - RNA, 19 nt, Homo sapiens
  misc_RNA (1)...(19): siRNA sense strand
gcaucaagcaaccuauuua

SEQ ID NO: 1925427 - RNA, 19 nt, Homo sapiens
  misc_RNA (1)...(19): siRNA sense strand
ggaaaaugcuuuaccaaga

SEQ ID NO: 1925428 - RNA, 19 nt, Homo sapiens
  misc_RNA (1)...(19): siRNA sense strand
uaauaagaaugcuggcuaa

SEQ ID NO: 1925429 - RNA, 19 nt, Homo sapiens
  misc_RNA (1)...(19): siRNA sense strand
guaguacgauuauaugcaa

SEQ ID NO: 1925430 - RNA, 19 nt, Homo sapiens
  misc_RNA (1)...(19): siRNA sense strand
gaacgccacccgcuacgua

SEQ ID NO: 1925431 - RNA, 19 nt, Homo sapiens
  misc_RNA (1)...(19): siRNA sense strand
cagauggguuauccuguua

SEQ ID NO: 1925432 - RNA, 19 nt, Homo sapiens
  misc_RNA (1)...(19): siRNA sense strand
uaauggaucucuuguucaa

SEQ ID NO: 1925433 - RNA, 19 nt, Homo sapiens
  misc_RNA (1)...(19): siRNA sense strand
gcaauuauuugggugucua

SEQ ID NO: 1925434 - RNA, 19 nt, Homo sapiens
  misc_RNA (1)...(19): siRNA sense strand
cuaccaacaugaagaacua

SEQ ID NO: 1925435 - RNA, 19 nt, Homo sapiens
  misc_RNA (1)...(19): siRNA sense strand
caagcaaccuauuuaucuu

SEQ ID NO: 1925436 - RNA, 19 nt, Homo sapiens
  misc_RNA (1)...(19): siRNA sense strand
ccagauggguuauccuguu

SEQ ID NO: 1925437 - RNA, 19 nt, Homo sapiens
  misc_RNA (1)...(19): siRNA sense strand
ugaccgauguucugcauga

SEQ ID NO: 1925438 - RNA, 19 nt, Homo sapiens
  misc_RNA (1)...(19): siRNA sense strand
ggaacagaauaccacuaaa

SEQ ID NO: 1925439 - RNA, 19 nt, Homo sapiens
  misc_RNA (1)...(19): siRNA sense strand
gaggaugucugggaauuca

SEQ ID NO: 1925440 - RNA, 19 nt, Homo sapiens
  misc_RNA (1)...(19): siRNA sense strand
ugaagccgcugcacuacaa

SEQ ID NO: 1925441 - RNA, 19 nt, Homo sapiens
  misc_RNA (1)...(19): siRNA sense strand
ggacacuccagauggguua

SEQ ID NO: 1925442 - RNA, 19 nt, Homo sapiens
  misc_RNA (1)...(19): siRNA sense strand
gcucaagaacuucaugaaa

SEQ ID NO: 1925443 - RNA, 19 nt, Homo sapiens
  misc_RNA (1)...(19): siRNA sense strand
cagaauaccacuaaauguu

SEQ ID NO: 1925444 - RNA, 19 nt, Homo sapiens
  misc_RNA (1)...(19): siRNA sense strand
uaacuauugugguaggaaa

SEQ ID NO: 1925445 - RNA, 19 nt, Homo sapiens
  misc_RNA (1)...(19): siRNA sense strand
caacuucacauacagagaa

SEQ ID NO: 1925446 - RNA, 19 nt, Homo sapiens
  misc_RNA (1)...(19): siRNA sense strand
gaaaagcucuaagacacua

SEQ ID NO: 1925447 - RNA, 19 nt, Homo sapiens
  misc_RNA (1)...(19): siRNA sense strand
gagcgggcuugaucgauga

SEQ ID NO: 1925448 - RNA, 19 nt, Homo sapiens
  misc_RNA (1)...(19): siRNA sense strand
caauuaauccggaaucaug

SEQ ID NO: 1925449 - RNA, 19 nt, Homo sapiens
  misc_RNA (1)...(19): siRNA sense strand
ucagagcaccacagaauaa

SEQ ID NO: 1925450 - RNA, 19 nt, Homo sapiens
  misc_RNA (1)...(19): siRNA sense strand
gaagaacuacguagagaag

SEQ ID NO: 1925451 - RNA, 19 nt, Homo sapiens
  misc_RNA (1)...(19): siRNA sense strand
gcagugaugacaggaauuu

SEQ ID NO: 1925452 - RNA, 19 nt, Homo sapiens
  misc_RNA (1)...(19): siRNA sense strand
guagagaaguuauaaugcu

SEQ ID NO: 1925453 - RNA, 19 nt, Homo sapiens
  misc_RNA (1)...(19): siRNA sense strand
uccauuaacuauuguggua

SEQ ID NO: 1925454 - RNA, 19 nt, Homo sapiens
  misc_RNA (1)...(19): siRNA sense strand
caucaguggugucacagaa

SEQ ID NO: 1925455 - RNA, 19 nt, Homo sapiens
  misc_RNA (1)...(19): siRNA sense strand
guauggagaagcauuguuu

SEQ ID NO: 1925456 - RNA, 19 nt, Homo sapiens
  misc_RNA (1)...(19): siRNA sense strand
caacaugaagaacuacgua

SEQ ID NO: 1925457 - RNA, 19 nt, Homo sapiens
  misc_RNA (1)...(19): siRNA sense strand
acaacgcgcucaucgagaa

SEQ ID NO: 1925458 - RNA, 19 nt, Homo sapiens
  misc_RNA (1)...(19): siRNA sense strand
gaagauuccuugguguuac

SEQ ID NO: 1925459 - RNA, 19 nt, Homo sapiens
  misc_RNA (1)...(19): siRNA sense strand
ucaguggugucacagaauu

SEQ ID NO: 1925460 - RNA, 19 nt, Homo sapiens
  misc_RNA (1)...(19): siRNA sense strand
gcagauuccauuaacuauu

SEQ ID NO: 1925461 - RNA, 19 nt, Homo sapiens
  misc_RNA (1)...(19): siRNA sense strand
ggaaggguuugcucacuac

SEQ ID NO: 1925462 - RNA, 19 nt, Homo sapiens
  misc_RNA (1)...(19): siRNA sense strand
ccacaucgccguacacaag

SEQ ID NO: 1925463 - RNA, 19 nt, Homo sapiens
  misc_RNA (1)...(19): siRNA sense strand
agaaaugaucucuggaaua

SEQ ID NO: 1925464 - RNA, 19 nt, Homo sapiens
  misc_RNA (1)...(19): siRNA sense strand
gcucacuacuuugaauuug

SEQ ID NO: 1925465 - RNA, 19 nt, Homo sapiens
  misc_RNA (1)...(19): siRNA sense strand
gucgagaccuugccuggaa

SEQ ID NO: 1925466 - RNA, 19 nt, Homo sapiens
  misc_RNA (1)...(19): siRNA sense strand
caaucaaacuggcuauuuu

SEQ ID NO: 1925467 - RNA, 19 nt, Homo sapiens
  misc_RNA (1)...(19): siRNA sense strand
gagaagauuccuugguguu

SEQ ID NO: 1925468 - RNA, 19 nt, Homo sapiens
  misc_RNA (1)...(19): siRNA sense strand
agggauaaauggaagauau

SEQ ID NO: 1925469 - RNA, 19 nt, Homo sapiens
  misc_RNA (1)...(19): siRNA sense strand
uuagagacaucguauacug

SEQ ID NO: 1925470 - RNA, 19 nt, Homo sapiens
  misc_RNA (1)...(19): siRNA sense strand
caacaagcacugucaccaa

SEQ ID NO: 1925471 - RNA, 19 nt, Homo sapiens
  misc_RNA (1)...(19): siRNA sense strand
caaaucagagcaccacaga

SEQ ID NO: 1925472 - RNA, 19 nt, Homo sapiens
  misc_RNA (1)...(19): siRNA sense strand
ggaaacacaacagcagaaa

SEQ ID NO: 1925473 - RNA, 19 nt, Homo sapiens
  misc_RNA (1)...(19): siRNA sense strand
uuuaauggaucucuuguuc

SEQ ID NO: 1925474 - RNA, 19 nt, Homo sapiens
  misc_RNA (1)...(19): siRNA sense strand
gaacucaaagagcucaaga

SEQ ID NO: 1925475 - RNA, 19 nt, Homo sapiens
  misc_RNA (1)...(19): siRNA sense strand
ccauguagcucgaaaucca

SEQ ID NO: 1925476 - RNA, 19 nt, Homo sapiens
  misc_RNA (1)...(19): siRNA sense strand
ggaugucugggaauucaua

SEQ ID NO: 1925477 - RNA, 19 nt, Homo sapiens
  misc_RNA (1)...(19): siRNA sense strand
gggaagacguguggcugaa

SEQ ID NO: 1925478 - RNA, 19 nt, Homo sapiens
  misc_RNA (1)...(19): siRNA sense strand
uacaagaaguaauggauca

SEQ ID NO: 1925479 - RNA, 19 nt, Homo sapiens
  misc_RNA (1)...(19): siRNA sense strand
uugacuggaucgcauauaa

SEQ ID NO: 1925480 - RNA, 19 nt, Homo sapiens
  misc_RNA (1)...(19): siRNA sense strand
ucaagcaaccuauuuaucu

SEQ ID NO: 1925481 - RNA, 19 nt, Homo sapiens
  misc_RNA (1)...(19): siRNA sense strand
uuaaacaggcuucuaaauc

SEQ ID NO: 1925482 - RNA, 19 nt, Homo sapiens
  misc_RNA (1)...(19): siRNA sense strand
gagguucuuucugucagua

SEQ ID NO: 1925483 - RNA, 19 nt, Homo sapiens
  misc_RNA (1)...(19): siRNA sense strand
ucaaucaaacuggcuauuu

SEQ ID NO: 1925484 - RNA, 19 nt, Homo sapiens
  misc_RNA (1)...(19): siRNA sense strand
gagcaccacagaauaacuu

SEQ ID NO: 1925485 - RNA, 19 nt, Homo sapiens
  misc_RNA (1)...(19): siRNA sense strand
ucuaugauaucagugcuaa

SEQ ID NO: 1925486 - RNA, 19 nt, Homo sapiens
  misc_RNA (1)...(19): siRNA sense strand
guaaugcagccagaaauga

SEQ ID NO: 1925487 - RNA, 19 nt, Homo sapiens
  misc_RNA (1)...(19): siRNA sense strand
cccaguguuucaucuauuu

SEQ ID NO: 1925488 - RNA, 19 nt, Homo sapiens
  misc_RNA (1)...(19): siRNA sense strand
ccgcugcacuacaaucuga

SEQ ID NO: 1925489 - RNA, 19 nt, Homo sapiens
  misc_RNA (1)...(19): siRNA sense strand
caauuugcaacuucacaua

SEQ ID NO: 1925490 - RNA, 19 nt, Homo sapiens
  misc_RNA (1)...(19): siRNA sense strand
gaggaagauggauggguua

SEQ ID NO: 1925491 - RNA, 19 nt, Homo sapiens
  misc_RNA (1)...(19): siRNA sense strand
uacugaaggugaacucaaa

SEQ ID NO: 1925492 - RNA, 19 nt, Homo sapiens
  misc_RNA (1)...(19): siRNA sense strand
caauugaugucauaaucca

SEQ ID NO: 1925493 - RNA, 19 nt, Homo sapiens
  misc_RNA (1)...(19): siRNA sense strand
gggugcugcuuuaauaaga

SEQ ID NO: 1925494 - RNA, 19 nt, Homo sapiens
  misc_RNA (1)...(19): siRNA sense strand
uauuuagccugggcaauuu

SEQ ID NO: 1925495 - RNA, 19 nt, Homo sapiens
  misc_RNA (1)...(19): siRNA sense strand
aaugaucucuggaauacau

SEQ ID NO: 1925496 - RNA, 19 nt, Homo sapiens
  misc_RNA (1)...(19): siRNA sense strand
gaguggcgguggagaaagu

SEQ ID NO: 1925497 - RNA, 19 nt, Homo sapiens
  misc_RNA (1)...(19): siRNA sense strand
agaugcaauugaugucaua

SEQ ID NO: 1925498 - RNA, 19 nt, Homo sapiens
  misc_RNA (1)...(19): siRNA sense strand
aaacaggcuucuaaaucug

SEQ ID NO: 1925499 - RNA, 19 nt, Homo sapiens
  misc_RNA (1)...(19): siRNA sense strand
cuacguagagaaguuauaa

SEQ ID NO: 1925500 - RNA, 19 nt, Homo sapiens
  misc_RNA (1)...(19): siRNA sense strand
aaucagagcaccacagaau

SEQ ID NO: 1925501 - RNA, 19 nt, Homo sapiens
  misc_RNA (1)...(19): siRNA sense strand
aggguuugcucacuacuuu

SEQ ID NO: 1925502 - RNA, 19 nt, Homo sapiens
  misc_RNA (1)...(19): siRNA sense strand
gguagcugcugcuucuuuc

SEQ ID NO: 1925503 - RNA, 19 nt, Homo sapiens
  misc_RNA (1)...(19): siRNA sense strand
gggauaaauggaagauauu

SEQ ID NO: 1925504 - RNA, 19 nt, Homo sapiens
  misc_RNA (1)...(19): siRNA sense strand
gagaaacuaccaccaagag

SEQ ID NO: 1925505 - RNA, 19 nt, Homo sapiens
  misc_RNA (1)...(19): siRNA sense strand
ccuaaggaacuggagauua

SEQ ID NO: 1925506 - RNA, 19 nt, Homo sapiens
  misc_RNA (1)...(19): siRNA sense strand
gguaaugcagccagaaaug

SEQ ID NO: 1925507 - RNA, 19 nt, Homo sapiens
  misc_RNA (1)...(19): siRNA sense strand
gugaugacaggaauuuauu

SEQ ID NO: 1925508 - RNA, 19 nt, Homo sapiens
  misc_RNA (1)...(19): siRNA sense strand
ggaaauggcugguuuggaa

SEQ ID NO: 1925509 - RNA, 19 nt, Homo sapiens
  misc_RNA (1)...(19): siRNA sense strand
gaaauucucucaacugaug

SEQ ID NO: 1925510 - RNA, 19 nt, Homo sapiens
  misc_RNA (1)...(19): siRNA sense strand
gcagaggucuucacacuuu

SEQ ID NO: 1925511 - RNA, 19 nt, Homo sapiens
  misc_RNA (1)...(19): siRNA sense strand
gcaaagaacacauaaauga

SEQ ID NO: 1925512 - RNA, 19 nt, Homo sapiens
  misc_RNA (1)...(19): siRNA sense strand
uaaaugaucuucagacaga

SEQ ID NO: 1925513 - RNA, 19 nt, Homo sapiens
  misc_RNA (1)...(19): siRNA sense strand
gaaagugacucuguucuug

SEQ ID NO: 1925514 - RNA, 19 nt, Homo sapiens
  misc_RNA (1)...(19): siRNA sense strand
gagcagcccuacucugaua

SEQ ID NO: 1925515 - RNA, 19 nt, Homo sapiens
  misc_RNA (1)...(19): siRNA sense strand
cgaagaaggugguggcuuu

SEQ ID NO: 1925516 - RNA, 19 nt, Homo sapiens
  misc_RNA (1)...(19): siRNA sense strand
gaugaggacuucuuccaaa

SEQ ID NO: 1925517 - RNA, 19 nt, Homo sapiens
  misc_RNA (1)...(19): siRNA sense strand
caaggaggauuauauugaa

SEQ ID NO: 1925518 - RNA, 19 nt, Homo sapiens
  misc_RNA (1)...(19): siRNA sense strand
uagaugguaugaagucuua

SEQ ID NO: 1925519 - RNA, 19 nt, Homo sapiens
  misc_RNA (1)...(19): siRNA sense strand
caaauauucuucagugugu

SEQ ID NO: 1925520 - RNA, 19 nt, Homo sapiens
  misc_RNA (1)...(19): siRNA sense strand
gguaugaagucuuacaguu

SEQ ID NO: 1925521 - RNA, 19 nt, Homo sapiens
  misc_RNA (1)...(19): siRNA sense strand
caacuuagauguccucaac

SEQ ID NO: 1925522 - RNA, 19 nt, Homo sapiens
  misc_RNA (1)...(19): siRNA sense strand
gcagguacaaggaggauua

SEQ ID NO: 1925523 - RNA, 19 nt, Homo sapiens
  misc_RNA (1)...(19): siRNA sense strand
agacagaacuuaagaaugc

SEQ ID NO: 1925524 - RNA, 19 nt, Homo sapiens
  misc_RNA (1)...(19): siRNA sense strand
cgacuauuauauccaguua

SEQ ID NO: 1925525 - RNA, 19 nt, Homo sapiens
  misc_RNA (1)...(19): siRNA sense strand
gaaagagccagccagauga

SEQ ID NO: 1925526 - RNA, 19 nt, Homo sapiens
  misc_RNA (1)...(19): siRNA sense strand
gaaacucuuuagauacuga

SEQ ID NO: 1925527 - RNA, 19 nt, Homo sapiens
  misc_RNA (1)...(19): siRNA sense strand
guucaagaauugucagaaa

SEQ ID NO: 1925528 - RNA, 19 nt, Homo sapiens
  misc_RNA (1)...(19): siRNA sense strand
guaaccagcuuucaagaca

SEQ ID NO: 1925529 - RNA, 19 nt, Homo sapiens
  misc_RNA (1)...(19): siRNA sense strand
gaaaagccccguaagauuu

SEQ ID NO: 1925530 - RNA, 19 nt, Homo sapiens
  misc_RNA (1)...(19): siRNA sense strand
uggagaaccuuacuacauu

SEQ ID NO: 1925531 - RNA, 19 nt, Homo sapiens
  misc_RNA (1)...(19): siRNA sense strand
uuagaaacgucauguagaa

SEQ ID NO: 1925532 - RNA, 19 nt, Homo sapiens
  misc_RNA (1)...(19): siRNA sense strand
guacaaggaggauuauauu

SEQ ID NO: 1925533 - RNA, 19 nt, Homo sapiens
  misc_RNA (1)...(19): siRNA sense strand
gaaccuuacuacauucuuc

SEQ ID NO: 1925534 - RNA, 19 nt, Homo sapiens
  misc_RNA (1)...(19): siRNA sense strand
ggacucagaggucgacuuu

SEQ ID NO: 1925535 - RNA, 19 nt, Homo sapiens
  misc_RNA (1)...(19): siRNA sense strand
cgagagcccuuucaacaau

SEQ ID NO: 1925536 - RNA, 19 nt, Homo sapiens
  misc_RNA (1)...(19): siRNA sense strand
gagagcccuuucaacaaua

SEQ ID NO: 1925537 - RNA, 19 nt, Homo sapiens
  misc_RNA (1)...(19): siRNA sense strand
ggaauuaaacggaguucaa

SEQ ID NO: 1925538 - RNA, 19 nt, Homo sapiens
  misc_RNA (1)...(19): siRNA sense strand
gcagaucagacuaaguaua

SEQ ID NO: 1925539 - RNA, 19 nt, Homo sapiens
  misc_RNA (1)...(19): siRNA sense strand
acucagaggucgacuuuga

SEQ ID NO: 1925540 - RNA, 19 nt, Homo sapiens
  misc_RNA (1)...(19): siRNA sense strand
gcacaaagggugacgauac

SEQ ID NO: 1925541 - RNA, 19 nt, Homo sapiens
  misc_RNA (1)...(19): siRNA sense strand
guaguaacuuggagcuuga

SEQ ID NO: 1925542 - RNA, 19 nt, Homo sapiens
  misc_RNA (1)...(19): siRNA sense strand
gcagaaguuuccucaucuu

SEQ ID NO: 1925543 - RNA, 19 nt, Homo sapiens
  misc_RNA (1)...(19): siRNA sense strand
agugggagauuacggaaua

SEQ ID NO: 1925544 - RNA, 19 nt, Homo sapiens
  misc_RNA (1)...(19): siRNA sense strand
cagcaaagaacacauaaau

SEQ ID NO: 1925545 - RNA, 19 nt, Homo sapiens
  misc_RNA (1)...(19): siRNA sense strand
uuaaugauguggacaaauc

SEQ ID NO: 1925546 - RNA, 19 nt, Homo sapiens
  misc_RNA (1)...(19): siRNA sense strand
guaaggacccagaaauaga

SEQ ID NO: 1925547 - RNA, 19 nt, Homo sapiens
  misc_RNA (1)...(19): siRNA sense strand
ggagaaccuuacuacauuc

SEQ ID NO: 1925548 - RNA, 19 nt, Homo sapiens
  misc_RNA (1)...(19): siRNA sense strand
caagagucaucgugaagga

SEQ ID NO: 1925549 - RNA, 19 nt, Homo sapiens
  misc_RNA (1)...(19): siRNA sense strand
aaagaaggcagucacguuu

SEQ ID NO: 1925550 - RNA, 19 nt, Homo sapiens
  misc_RNA (1)...(19): siRNA sense strand
gaggagacccugcgacuca

SEQ ID NO: 1925551 - RNA, 19 nt, Homo sapiens
  misc_RNA (1)...(19): siRNA sense strand
gaacccacagccuggauaa

SEQ ID NO: 1925552 - RNA, 19 nt, Homo sapiens
  misc_RNA (1)...(19): siRNA sense strand
caaagacucuagcuuacca

SEQ ID NO: 1925553 - RNA, 19 nt, Homo sapiens
  misc_RNA (1)...(19): siRNA sense strand
gaacuugaggaguccagua

SEQ ID NO: 1925554 - RNA, 19 nt, Homo sapiens
  misc_RNA (1)...(19): siRNA sense strand
agaaaggacuggcccugaa

SEQ ID NO: 1925555 - RNA, 19 nt, Homo sapiens
  misc_RNA (1)...(19): siRNA sense strand
gacgaaggcuuguccuaca

SEQ ID NO: 1925556 - RNA, 19 nt, Homo sapiens
  misc_RNA (1)...(19): siRNA sense strand
gaaguuuccucaucuuuug

SEQ ID NO: 1925557 - RNA, 19 nt, Homo sapiens
  misc_RNA (1)...(19): siRNA sense strand
uagaggcuguggagacuuu

SEQ ID NO: 1925558 - RNA, 19 nt, Homo sapiens
  misc_RNA (1)...(19): siRNA sense strand
cauaaaugaucuucagaca

SEQ ID NO: 1925559 - RNA, 19 nt, Homo sapiens
  misc_RNA (1)...(19): siRNA sense strand
uaacaggccacuuugagaa

SEQ ID NO: 1925560 - RNA, 19 nt, Homo sapiens
  misc_RNA (1)...(19): siRNA sense strand
ugcacaggcugcugacuua

SEQ ID NO: 1925561 - RNA, 19 nt, Homo sapiens
  misc_RNA (1)...(19): siRNA sense strand
cagcagaggucuucacacu

SEQ ID NO: 1925562 - RNA, 19 nt, Homo sapiens
  misc_RNA (1)...(19): siRNA sense strand
ccaaacauccaaguacuuu

SEQ ID NO: 1925563 - RNA, 19 nt, Homo sapiens
  misc_RNA (1)...(19): siRNA sense strand
caaagagucagucauaaca

SEQ ID NO: 1925564 - RNA, 19 nt, Homo sapiens
  misc_RNA (1)...(19): siRNA sense strand
auucaaaccuuuccaacuu

SEQ ID NO: 1925565 - RNA, 19 nt, Homo sapiens
  misc_RNA (1)...(19): siRNA sense strand
ccgcacagccguauucaaa

SEQ ID NO: 1925566 - RNA, 19 nt, Homo sapiens
  misc_RNA (1)...(19): siRNA sense strand
ggucuucacacuuucagua

SEQ ID NO: 1925567 - RNA, 19 nt, Homo sapiens
  misc_RNA (1)...(19): siRNA sense strand
ugagugggaugaugacuuc

SEQ ID NO: 1925568 - RNA, 19 nt, Homo sapiens
  misc_RNA (1)...(19): siRNA sense strand
gaaggagccggacaucgaa

SEQ ID NO: 1925569 - RNA, 19 nt, Homo sapiens
  misc_RNA (1)...(19): siRNA sense strand
gaaacgucauguagaaacu

SEQ ID NO: 1925570 - RNA, 19 nt, Homo sapiens
  misc_RNA (1)...(19): siRNA sense strand
gcagagacuccuccaacaa

SEQ ID NO: 1925571 - RNA, 19 nt, Homo sapiens
  misc_RNA (1)...(19): siRNA sense strand
acaaggaggauuauauuga

SEQ ID NO: 1925572 - RNA, 19 nt, Homo sapiens
  misc_RNA (1)...(19): siRNA sense strand
gguacaaggaggauuauau

SEQ ID NO: 1925573 - RNA, 19 nt, Homo sapiens
  misc_RNA (1)...(19): siRNA sense strand
agaaagagccagccagaug

SEQ ID NO: 1925574 - RNA, 19 nt, Homo sapiens
  misc_RNA (1)...(19): siRNA sense strand
cuacuggacucuuuaggau

SEQ ID NO: 1925575 - RNA, 19 nt, Homo sapiens
  misc_RNA (1)...(19): siRNA sense strand
gcaccucauugcagucuuc

SEQ ID NO: 1925576 - RNA, 19 nt, Homo sapiens
  misc_RNA (1)...(19): siRNA sense strand
gaucuucagacagaacuua

SEQ ID NO: 1925577 - RNA, 19 nt, Homo sapiens
  misc_RNA (1)...(19): siRNA sense strand
guaacuuggagcuugauua

SEQ ID NO: 1925578 - RNA, 19 nt, Homo sapiens
  misc_RNA (1)...(19): siRNA sense strand
guuggaagcgacuauuaua

SEQ ID NO: 1925579 - RNA, 19 nt, Homo sapiens
  misc_RNA (1)...(19): siRNA sense strand
uaacugcagaucagacuaa

SEQ ID NO: 1925580 - RNA, 19 nt, Homo sapiens
  misc_RNA (1)...(19): siRNA sense strand
gcaauuccagccuucugua

SEQ ID NO: 1925581 - RNA, 19 nt, Homo sapiens
  misc_RNA (1)...(19): siRNA sense strand
ggacccagaaauagacuuu

SEQ ID NO: 1925582 - RNA, 19 nt, Homo sapiens
  misc_RNA (1)...(19): siRNA sense strand
gaagacacucccucuguuc

SEQ ID NO: 1925583 - RNA, 19 nt, Homo sapiens
  misc_RNA (1)...(19): siRNA sense strand
cugcagaucagacuaagua

SEQ ID NO: 1925584 - RNA, 19 nt, Homo sapiens
  misc_RNA (1)...(19): siRNA sense strand
ggaggauuauauugaaaca

SEQ ID NO: 1925585 - RNA, 19 nt, Homo sapiens
  misc_RNA (1)...(19): siRNA sense strand
gcacuagcguagcaagagu

SEQ ID NO: 1925586 - RNA, 19 nt, Homo sapiens
  misc_RNA (1)...(19): siRNA sense strand
gaaauggcugguuuggaaa

SEQ ID NO: 1925587 - RNA, 19 nt, Homo sapiens
  misc_RNA (1)...(19): siRNA sense strand
gaaggcaccugcggagucu

SEQ ID NO: 1925588 - RNA, 19 nt, Homo sapiens
  misc_RNA (1)...(19): siRNA sense strand
agaagacacucccucuguu

SEQ ID NO: 1925589 - RNA, 19 nt, Homo sapiens
  misc_RNA (1)...(19): siRNA sense strand
ggaagaccaucacagucau

SEQ ID NO: 1925590 - RNA, 19 nt, Homo sapiens
  misc_RNA (1)...(19): siRNA sense strand
ccuccuaccuccuucgaaa

SEQ ID NO: 1925591 - RNA, 19 nt, Homo sapiens
  misc_RNA (1)...(19): siRNA sense strand
caagacagacugcuaacug

SEQ ID NO: 1925592 - RNA, 19 nt, Homo sapiens
  misc_RNA (1)...(19): siRNA sense strand
ucaaccaagucauuagaga

SEQ ID NO: 1925593 - RNA, 19 nt, Homo sapiens
  misc_RNA (1)...(19): siRNA sense strand
gaagcuauguuagaaacgu

SEQ ID NO: 1925594 - RNA, 19 nt, Homo sapiens
  misc_RNA (1)...(19): siRNA sense strand
acacauaaaugaucuucag

SEQ ID NO: 1925595 - RNA, 19 nt, Homo sapiens
  misc_RNA (1)...(19): siRNA sense strand
ucacaaccgacauggauaa

SEQ ID NO: 1925596 - RNA, 19 nt, Homo sapiens
  misc_RNA (1)...(19): siRNA sense strand
ggaagcgacuauuauaucc

SEQ ID NO: 1925597 - RNA, 19 nt, Homo sapiens
  misc_RNA (1)...(19): siRNA sense strand
ggccugagcuucgaguaug

SEQ ID NO: 1925598 - RNA, 19 nt, Homo sapiens
  misc_RNA (1)...(19): siRNA sense strand
ucugauagaugguaugaag

SEQ ID NO: 1925599 - RNA, 19 nt, Homo sapiens
  misc_RNA (1)...(19): siRNA sense strand
ugacuugggugaccugaag

SEQ ID NO: 1925600 - RNA, 19 nt, Homo sapiens
  misc_RNA (1)...(19): siRNA sense strand
gaagugcagguaccuccua

SEQ ID NO: 1925601 - RNA, 19 nt, Homo sapiens
  misc_RNA (1)...(19): siRNA sense strand
acccagaaauagacuuuaa

SEQ ID NO: 1925602 - RNA, 19 nt, Homo sapiens
  misc_RNA (1)...(19): siRNA sense strand
guacagaugaggacuucuu

SEQ ID NO: 1925603 - RNA, 19 nt, Homo sapiens
  misc_RNA (1)...(19): siRNA sense strand
cagaucagacuaaguauag

SEQ ID NO: 1925604 - RNA, 19 nt, Homo sapiens
  misc_RNA (1)...(19): siRNA sense strand
gaacacauaaaugaucuuc

SEQ ID NO: 1925605 - RNA, 19 nt, Homo sapiens
  misc_RNA (1)...(19): siRNA sense strand
gaaaguugucugucugcuu

SEQ ID NO: 1925606 - RNA, 19 nt, Homo sapiens
  misc_RNA (1)...(19): siRNA sense strand
ucacagaggcacagaagug

SEQ ID NO: 1925607 - RNA, 19 nt, Homo sapiens
  misc_RNA (1)...(19): siRNA sense strand
cacaaagggugacgauaca

SEQ ID NO: 1925608 - RNA, 19 nt, Homo sapiens
  misc_RNA (1)...(19): siRNA sense strand
gagcgccguuuccgccaaa

SEQ ID NO: 1925609 - RNA, 19 nt, Homo sapiens
  misc_RNA (1)...(19): siRNA sense strand
cgacagcggaguagugguu

SEQ ID NO: 1925610 - RNA, 19 nt, Homo sapiens
  misc_RNA (1)...(19): siRNA sense strand
ggucccagcgcuccaacaa

SEQ ID NO: 1925611 - RNA, 19 nt, Homo sapiens
  misc_RNA (1)...(19): siRNA sense strand
ggcuccagcuccaccaguu

SEQ ID NO: 1925612 - RNA, 19 nt, Homo sapiens
  misc_RNA (1)...(19): siRNA sense strand
gaagaugauuggaaagguu

SEQ ID NO: 1925613 - RNA, 19 nt, Homo sapiens
  misc_RNA (1)...(19): siRNA sense strand
acacuuugcuggccaauaa

SEQ ID NO: 1925614 - RNA, 19 nt, Homo sapiens
  misc_RNA (1)...(19): siRNA sense strand
ggacauuaauugugaagau

SEQ ID NO: 1925615 - RNA, 19 nt, Homo sapiens
  misc_RNA (1)...(19): siRNA sense strand
aaacagaaccuaugcagaa

SEQ ID NO: 1925616 - RNA, 19 nt, Homo sapiens
  misc_RNA (1)...(19): siRNA sense strand
gaaagguucuugggaggaa

SEQ ID NO: 1925617 - RNA, 19 nt, Homo sapiens
  misc_RNA (1)...(19): siRNA sense strand
gcucaugggccucuucuuu

SEQ ID NO: 1925618 - RNA, 19 nt, Homo sapiens
  misc_RNA (1)...(19): siRNA sense strand
ucaacuggcucuccaacuu

SEQ ID NO: 1925619 - RNA, 19 nt, Homo sapiens
  misc_RNA (1)...(19): siRNA sense strand
ggcaggagccuuugaaaug

SEQ ID NO: 1925620 - RNA, 19 nt, Homo sapiens
  misc_RNA (1)...(19): siRNA sense strand
caucuugacuggugaguuc

SEQ ID NO: 1925621 - RNA, 19 nt, Homo sapiens
  misc_RNA (1)...(19): siRNA sense strand
ggacaccuacuguuuccua

SEQ ID NO: 1925622 - RNA, 19 nt, Homo sapiens
  misc_RNA (1)...(19): siRNA sense strand
aagcagacguuucccaaga

SEQ ID NO: 1925623 - RNA, 19 nt, Homo sapiens
  misc_RNA (1)...(19): siRNA sense strand
ugaaagccuuccaaacguu

SEQ ID NO: 1925624 - RNA, 19 nt, Homo sapiens
  misc_RNA (1)...(19): siRNA sense strand
caacuggcucuccaacuuu

SEQ ID NO: 1925625 - RNA, 19 nt, Homo sapiens
  misc_RNA (1)...(19): siRNA sense strand
ugucacugaugguaagaua

SEQ ID NO: 1925626 - RNA, 19 nt, Homo sapiens
  misc_RNA (1)...(19): siRNA sense strand
uaucacaggugcuaucuac

SEQ ID NO: 1925627 - RNA, 19 nt, Homo sapiens
  misc_RNA (1)...(19): siRNA sense strand
ggugcuaucuaccuguauu

SEQ ID NO: 1925628 - RNA, 19 nt, Homo sapiens
  misc_RNA (1)...(19): siRNA sense strand
gacauuaauugugaagaug

SEQ ID NO: 1925629 - RNA, 19 nt, Homo sapiens
  misc_RNA (1)...(19): siRNA sense strand
ucacugaugguaagauaaa

SEQ ID NO: 1925630 - RNA, 19 nt, Homo sapiens
  misc_RNA (1)...(19): siRNA sense strand
gacuuuggcugccgucuuc

SEQ ID NO: 1925631 - RNA, 19 nt, Homo sapiens
  misc_RNA (1)...(19): siRNA sense strand
ucaaugcaauuugguucua

SEQ ID NO: 1925632 - RNA, 19 nt, Homo sapiens
  misc_RNA (1)...(19): siRNA sense strand
gcaggagccuuugaaaugc

SEQ ID NO: 1925633 - RNA, 19 nt, Homo sapiens
  misc_RNA (1)...(19): siRNA sense strand
gggcuccucuucccauuca

SEQ ID NO: 1925634 - RNA, 19 nt, Homo sapiens
  misc_RNA (1)...(19): siRNA sense strand
caaagcauacccaccagaa

SEQ ID NO: 1925635 - RNA, 19 nt, Homo sapiens
  misc_RNA (1)...(19): siRNA sense strand
cagaaccuaugcagaaauc

SEQ ID NO: 1925636 - RNA, 19 nt, Homo sapiens
  misc_RNA (1)...(19): siRNA sense strand
gaugguaagauaaauggaa

SEQ ID NO: 1925637 - RNA, 19 nt, Homo sapiens
  misc_RNA (1)...(19): siRNA sense strand
gugaaagccuuccaaacgu

SEQ ID NO: 1925638 - RNA, 19 nt, Homo sapiens
  misc_RNA (1)...(19): siRNA sense strand
gagaguaccuggccauacc

SEQ ID NO: 1925639 - RNA, 19 nt, Homo sapiens
  misc_RNA (1)...(19): siRNA sense strand
ggugaguucuuccagcaau

SEQ ID NO: 1925640 - RNA, 19 nt, Homo sapiens
  misc_RNA (1)...(19): siRNA sense strand
acucugcucuggucuguga

SEQ ID NO: 1925641 - RNA, 19 nt, Homo sapiens
  misc_RNA (1)...(19): siRNA sense strand
ccuagucuuugcuacaauu

SEQ ID NO: 1925642 - RNA, 19 nt, Homo sapiens
  misc_RNA (1)...(19): siRNA sense strand
uggcaaagaucccauacgu

SEQ ID NO: 1925643 - RNA, 19 nt, Homo sapiens
  misc_RNA (1)...(19): siRNA sense strand
auaauggguuugcaauuuc

SEQ ID NO: 1925644 - RNA, 19 nt, Homo sapiens
  misc_RNA (1)...(19): siRNA sense strand
ccaaggaacugggccuagu

SEQ ID NO: 1925645 - RNA, 19 nt, Homo sapiens
  misc_RNA (1)...(19): siRNA sense strand
caauaauggguuugcaauu

SEQ ID NO: 1925646 - RNA, 19 nt, Homo sapiens
  misc_RNA (1)...(19): siRNA sense strand
agaaaagucuggacaccua

SEQ ID NO: 1925647 - RNA, 19 nt, Homo sapiens
  misc_RNA (1)...(19): siRNA sense strand
gcuaccugcucuuggagaa

SEQ ID NO: 1925648 - RNA, 19 nt, Homo sapiens
  misc_RNA (1)...(19): siRNA sense strand
ugacugccaucuuuaucug

SEQ ID NO: 1925649 - RNA, 19 nt, Homo sapiens
  misc_RNA (1)...(19): siRNA sense strand
caaacguucuuggguaaag

SEQ ID NO: 1925650 - RNA, 19 nt, Homo sapiens
  misc_RNA (1)...(19): siRNA sense strand
ggaucccucuggcaaagau

SEQ ID NO: 1925651 - RNA, 19 nt, Homo sapiens
  misc_RNA (1)...(19): siRNA sense strand
ccaauaauggguuugcaau

SEQ ID NO: 1925652 - RNA, 19 nt, Homo sapiens
  misc_RNA (1)...(19): siRNA sense strand
caaugcaauuugguucuau

SEQ ID NO: 1925653 - RNA, 19 nt, Homo sapiens
  misc_RNA (1)...(19): siRNA sense strand
caauagacccagacacucu

SEQ ID NO: 1925654 - RNA, 19 nt, Homo sapiens
  misc_RNA (1)...(19): siRNA sense strand
aagcauacccaccagaaga

SEQ ID NO: 1925655 - RNA, 19 nt, Homo sapiens
  misc_RNA (1)...(19): siRNA sense strand
agacguuucccaagaggua

SEQ ID NO: 1925656 - RNA, 19 nt, Homo sapiens
  misc_RNA (1)...(19): siRNA sense strand
ugcccgagcugcugggaaa

SEQ ID NO: 1925657 - RNA, 19 nt, Homo sapiens
  misc_RNA (1)...(19): siRNA sense strand
aacagaaccuaugcagaaa

SEQ ID NO: 1925658 - RNA, 19 nt, Homo sapiens
  misc_RNA (1)...(19): siRNA sense strand
ccagguggaaggagaagaa

SEQ ID NO: 1925659 - RNA, 19 nt, Homo sapiens
  misc_RNA (1)...(19): siRNA sense strand
gcuggccaauaauggguuu

SEQ ID NO: 1925660 - RNA, 19 nt, Homo sapiens
  misc_RNA (1)...(19): siRNA sense strand
ccaaaaggaacaaagcaua

SEQ ID NO: 1925661 - RNA, 19 nt, Homo sapiens
  misc_RNA (1)...(19): siRNA sense strand
ccggcugccuucaucauug

SEQ ID NO: 1925662 - RNA, 19 nt, Homo sapiens
  misc_RNA (1)...(19): siRNA sense strand
ucucugguuuggucauuga

SEQ ID NO: 1925663 - RNA, 19 nt, Homo sapiens
  misc_RNA (1)...(19): siRNA sense strand
uugugaagaugauuggaaa

SEQ ID NO: 1925664 - RNA, 19 nt, Homo sapiens
  misc_RNA (1)...(19): siRNA sense strand
ggcaucccguucaucuuga

SEQ ID NO: 1925665 - RNA, 19 nt, Homo sapiens
  misc_RNA (1)...(19): siRNA sense strand
guaccuggccauaccuguu

SEQ ID NO: 1925666 - RNA, 19 nt, Homo sapiens
  misc_RNA (1)...(19): siRNA sense strand
ucaaggccuuuuacaauga

SEQ ID NO: 1925667 - RNA, 19 nt, Homo sapiens
  misc_RNA (1)...(19): siRNA sense strand
gcugccgucuucucugguu

SEQ ID NO: 1925668 - RNA, 19 nt, Homo sapiens
  misc_RNA (1)...(19): siRNA sense strand
ccauacgucaccuugagua

SEQ ID NO: 1925669 - RNA, 19 nt, Homo sapiens
  misc_RNA (1)...(19): siRNA sense strand
ccauaccuguuuggaguga

SEQ ID NO: 1925670 - RNA, 19 nt, Homo sapiens
  misc_RNA (1)...(19): siRNA sense strand
uaucugcauuggcguguuc

SEQ ID NO: 1925671 - RNA, 19 nt, Homo sapiens
  misc_RNA (1)...(19): siRNA sense strand
cgccaucgguggacuugug

SEQ ID NO: 1925672 - RNA, 19 nt, Homo sapiens
  misc_RNA (1)...(19): siRNA sense strand
gaaccuaugcagaaaucag

SEQ ID NO: 1925673 - RNA, 19 nt, Homo sapiens
  misc_RNA (1)...(19): siRNA sense strand
caccuacuguuuccuaguc

SEQ ID NO: 1925674 - RNA, 19 nt, Homo sapiens
  misc_RNA (1)...(19): siRNA sense strand
ucaugggccucuucuuugg

SEQ ID NO: 1925675 - RNA, 19 nt, Homo sapiens
  misc_RNA (1)...(19): siRNA sense strand
gcugugaaagccuuccaaa

SEQ ID NO: 1925676 - RNA, 19 nt, Homo sapiens
  misc_RNA (1)...(19): siRNA sense strand
caggugacugccaucuuua

SEQ ID NO: 1925677 - RNA, 19 nt, Homo sapiens
  misc_RNA (1)...(19): siRNA sense strand
gcaaggaaacaaaauagga

SEQ ID NO: 1925678 - RNA, 19 nt, Homo sapiens
  misc_RNA (1)...(19): siRNA sense strand
ugaagaugauuggaaaggu

SEQ ID NO: 1925679 - RNA, 19 nt, Homo sapiens
  misc_RNA (1)...(19): siRNA sense strand
ccagcucuguggccucaau

SEQ ID NO: 1925680 - RNA, 19 nt, Homo sapiens
  misc_RNA (1)...(19): siRNA sense strand
cacgcuaccugcucuugga

SEQ ID NO: 1925681 - RNA, 19 nt, Homo sapiens
  misc_RNA (1)...(19): siRNA sense strand
gauaaauggaaggccuuaa

SEQ ID NO: 1925682 - RNA, 19 nt, Homo sapiens
  misc_RNA (1)...(19): siRNA sense strand
caucaaggccuuuuacaau

SEQ ID NO: 1925683 - RNA, 19 nt, Homo sapiens
  misc_RNA (1)...(19): siRNA sense strand
ggacuuguggggacauuaa

SEQ ID NO: 1925684 - RNA, 19 nt, Homo sapiens
  misc_RNA (1)...(19): siRNA sense strand
ugacucugcucuggucugu

SEQ ID NO: 1925685 - RNA, 19 nt, Homo sapiens
  misc_RNA (1)...(19): siRNA sense strand
uggcaucccguucaucuug

SEQ ID NO: 1925686 - RNA, 19 nt, Homo sapiens
  misc_RNA (1)...(19): siRNA sense strand
caacagcaucuuuggaaaa

SEQ ID NO: 1925687 - RNA, 19 nt, Homo sapiens
  misc_RNA (1)...(19): siRNA sense strand
uaauggguuugcaauuucu

SEQ ID NO: 1925688 - RNA, 19 nt, Homo sapiens
  misc_RNA (1)...(19): siRNA sense strand
gaagcacaacgaggcaaga

SEQ ID NO: 1925689 - RNA, 19 nt, Homo sapiens
  misc_RNA (1)...(19): siRNA sense strand
ucagugugcuccccaugua

SEQ ID NO: 1925690 - RNA, 19 nt, Homo sapiens
  misc_RNA (1)...(19): siRNA sense strand
uaccuggccauaccuguuu

SEQ ID NO: 1925691 - RNA, 19 nt, Homo sapiens
  misc_RNA (1)...(19): siRNA sense strand
guggggacauuaauuguga

SEQ ID NO: 1925692 - RNA, 19 nt, Homo sapiens
  misc_RNA (1)...(19): siRNA sense strand
cugcugagccuucccuuuc

SEQ ID NO: 1925693 - RNA, 19 nt, Homo sapiens
  misc_RNA (1)...(19): siRNA sense strand
auaccuguuuggagugauu

SEQ ID NO: 1925694 - RNA, 19 nt, Homo sapiens
  misc_RNA (1)...(19): siRNA sense strand
cgaggcaagagcugugaaa

SEQ ID NO: 1925695 - RNA, 19 nt, Homo sapiens
  misc_RNA (1)...(19): siRNA sense strand
cuacuguuuccuagucuuu

SEQ ID NO: 1925696 - RNA, 19 nt, Homo sapiens
  misc_RNA (1)...(19): siRNA sense strand
ucuguggccucaaugcaau

SEQ ID NO: 1925697 - RNA, 19 nt, Homo sapiens
  misc_RNA (1)...(19): siRNA sense strand
ugugaaagccuuccaaacg

SEQ ID NO: 1925698 - RNA, 19 nt, Homo sapiens
  misc_RNA (1)...(19): siRNA sense strand
cagcugucacugaugguaa

SEQ ID NO: 1925699 - RNA, 19 nt, Homo sapiens
  misc_RNA (1)...(19): siRNA sense strand
gguggaaggagaagaaagg

SEQ ID NO: 1925700 - RNA, 19 nt, Homo sapiens
  misc_RNA (1)...(19): siRNA sense strand
ccagguggcaucccguuca

SEQ ID NO: 1925701 - RNA, 19 nt, Homo sapiens
  misc_RNA (1)...(19): siRNA sense strand
ccuccucauugguggcuuu

SEQ ID NO: 1925702 - RNA, 19 nt, Homo sapiens
  misc_RNA (1)...(19): siRNA sense strand
gccaauaauggguuugcaa

SEQ ID NO: 1925703 - RNA, 19 nt, Homo sapiens
  misc_RNA (1)...(19): siRNA sense strand
ggaaacaaaauaggaauuc

SEQ ID NO: 1925704 - RNA, 19 nt, Homo sapiens
  misc_RNA (1)...(19): siRNA sense strand
gucugugacuguguccaua

SEQ ID NO: 1925705 - RNA, 19 nt, Homo sapiens
  misc_RNA (1)...(19): siRNA sense strand
ggagaguaccuggccauac

SEQ ID NO: 1925706 - RNA, 19 nt, Homo sapiens
  misc_RNA (1)...(19): siRNA sense strand
gcuccucuucccauucauu

SEQ ID NO: 1925707 - RNA, 19 nt, Homo sapiens
  misc_RNA (1)...(19): siRNA sense strand
gaagaugagucugagauuu

SEQ ID NO: 1925708 - RNA, 19 nt, Homo sapiens
  misc_RNA (1)...(19): siRNA sense strand
caacagcaguggacaucua

SEQ ID NO: 1925709 - RNA, 19 nt, Homo sapiens
  misc_RNA (1)...(19): siRNA sense strand
gagaagagcagaagaaucu

SEQ ID NO: 1925710 - RNA, 19 nt, Homo sapiens
  misc_RNA (1)...(19): siRNA sense strand
gggcugacauuaaagagaa

SEQ ID NO: 1925711 - RNA, 19 nt, Homo sapiens
  misc_RNA (1)...(19): siRNA sense strand
gaacaaggccagggucauu

SEQ ID NO: 1925712 - RNA, 19 nt, Homo sapiens
  misc_RNA (1)...(19): siRNA sense strand
gaacaguacccucaacuca

SEQ ID NO: 1925713 - RNA, 19 nt, Homo sapiens
  misc_RNA (1)...(19): siRNA sense strand
gcugugaccugaugccaaa

SEQ ID NO: 1925714 - RNA, 19 nt, Homo sapiens
  misc_RNA (1)...(19): siRNA sense strand
cagcugggcuucauuagug

SEQ ID NO: 1925715 - RNA, 19 nt, Homo sapiens
  misc_RNA (1)...(19): siRNA sense strand
ggaagaagaagaaagugaa

SEQ ID NO: 1925716 - RNA, 19 nt, Homo sapiens
  misc_RNA (1)...(19): siRNA sense strand
gcaauggagaguccucaua

SEQ ID NO: 1925717 - RNA, 19 nt, Homo sapiens
  misc_RNA (1)...(19): siRNA sense strand
gugcauaccuggccaugga

SEQ ID NO: 1925718 - RNA, 19 nt, Homo sapiens
  misc_RNA (1)...(19): siRNA sense strand
gaagugcccucgcucaaac

SEQ ID NO: 1925719 - RNA, 19 nt, Homo sapiens
  misc_RNA (1)...(19): siRNA sense strand
caaauccucucugcccuaa

SEQ ID NO: 1925720 - RNA, 19 nt, Homo sapiens
  misc_RNA (1)...(19): siRNA sense strand
ggaaugagguacaguucuc

SEQ ID NO: 1925721 - RNA, 19 nt, Homo sapiens
  misc_RNA (1)...(19): siRNA sense strand
gaccagagccgguugacuu

SEQ ID NO: 1925722 - RNA, 19 nt, Homo sapiens
  misc_RNA (1)...(19): siRNA sense strand
acaaucaugugaagacuug

SEQ ID NO: 1925723 - RNA, 19 nt, Homo sapiens
  misc_RNA (1)...(19): siRNA sense strand
cagagggaguucauucaaa

SEQ ID NO: 1925724 - RNA, 19 nt, Homo sapiens
  misc_RNA (1)...(19): siRNA sense strand
agaggaagguguagagguu

SEQ ID NO: 1925725 - RNA, 19 nt, Homo sapiens
  misc_RNA (1)...(19): siRNA sense strand
uagaagagaccuugaacaa

SEQ ID NO: 1925726 - RNA, 19 nt, Homo sapiens
  misc_RNA (1)...(19): siRNA sense strand
guguagagguuguguggaa

SEQ ID NO: 1925727 - RNA, 19 nt, Homo sapiens
  misc_RNA (1)...(19): siRNA sense strand
gguagaauccucaucuuca

SEQ ID NO: 1925728 - RNA, 19 nt, Homo sapiens
  misc_RNA (1)...(19): siRNA sense strand
gcucuggaauuagauaaau

SEQ ID NO: 1925729 - RNA, 19 nt, Homo sapiens
  misc_RNA (1)...(19): siRNA sense strand
auauugggcugacauuaaa

SEQ ID NO: 1925730 - RNA, 19 nt, Homo sapiens
  misc_RNA (1)...(19): siRNA sense strand
ggccauggauacagaggaa

SEQ ID NO: 1925731 - RNA, 19 nt, Homo sapiens
  misc_RNA (1)...(19): siRNA sense strand
aaagguucgugcuguguuu

SEQ ID NO: 1925732 - RNA, 19 nt, Homo sapiens
  misc_RNA (1)...(19): siRNA sense strand
gcaagguggugcugaugca

SEQ ID NO: 1925733 - RNA, 19 nt, Homo sapiens
  misc_RNA (1)...(19): siRNA sense strand
gaagacuugucgagaagag

SEQ ID NO: 1925734 - RNA, 19 nt, Homo sapiens
  misc_RNA (1)...(19): siRNA sense strand
gcacaacggacucaucaag

SEQ ID NO: 1925735 - RNA, 19 nt, Homo sapiens
  misc_RNA (1)...(19): siRNA sense strand
uaucaacaaucaugugaag

SEQ ID NO: 1925736 - RNA, 19 nt, Homo sapiens
  misc_RNA (1)...(19): siRNA sense strand
ugugaagacuugucgagaa

SEQ ID NO: 1925737 - RNA, 19 nt, Homo sapiens
  misc_RNA (1)...(19): siRNA sense strand
aauauugggcugacauuaa

SEQ ID NO: 1925738 - RNA, 19 nt, Homo sapiens
  misc_RNA (1)...(19): siRNA sense strand
caacacaugaucccagaga

SEQ ID NO: 1925739 - RNA, 19 nt, Homo sapiens
  misc_RNA (1)...(19): siRNA sense strand
caacggacucaucaagauu

SEQ ID NO: 1925740 - RNA, 19 nt, Homo sapiens
  misc_RNA (1)...(19): siRNA sense strand
uggagcaucuuaacauugu

SEQ ID NO: 1925741 - RNA, 19 nt, Homo sapiens
  misc_RNA (1)...(19): siRNA sense strand
gugcagcugggcuucauua

SEQ ID NO: 1925742 - RNA, 19 nt, Homo sapiens
  misc_RNA (1)...(19): siRNA sense strand
gauaaauuccuugaagaug

SEQ ID NO: 1925743 - RNA, 19 nt, Homo sapiens
  misc_RNA (1)...(19): siRNA sense strand
caauggagaguccucauau

SEQ ID NO: 1925744 - RNA, 19 nt, Homo sapiens
  misc_RNA (1)...(19): siRNA sense strand
gcucagacccaaagguaga

SEQ ID NO: 1925745 - RNA, 19 nt, Homo sapiens
  misc_RNA (1)...(19): siRNA sense strand
acaacggacucaucaagau

SEQ ID NO: 1925746 - RNA, 19 nt, Homo sapiens
  misc_RNA (1)...(19): siRNA sense strand
gaccugaugccaaaugaga

SEQ ID NO: 1925747 - RNA, 19 nt, Homo sapiens
  misc_RNA (1)...(19): siRNA sense strand
uaaauuccuugaagauguc

SEQ ID NO: 1925748 - RNA, 19 nt, Homo sapiens
  misc_RNA (1)...(19): siRNA sense strand
gaagaagaaagugaagaug

SEQ ID NO: 1925749 - RNA, 19 nt, Homo sapiens
  misc_RNA (1)...(19): siRNA sense strand
guggacaucuacuccuuug

SEQ ID NO: 1925750 - RNA, 19 nt, Homo sapiens
  misc_RNA (1)...(19): siRNA sense strand
cugaagcaauuucugaaga

SEQ ID NO: 1925751 - RNA, 19 nt, Homo sapiens
  misc_RNA (1)...(19): siRNA sense strand
ccgguugacuucucugcua

SEQ ID NO: 1925752 - RNA, 19 nt, Homo sapiens
  misc_RNA (1)...(19): siRNA sense strand
uggcagugcuggagauuca

SEQ ID NO: 1925753 - RNA, 19 nt, Homo sapiens
  misc_RNA (1)...(19): siRNA sense strand
agaagaaagugaagaugag

SEQ ID NO: 1925754 - RNA, 19 nt, Homo sapiens
  misc_RNA (1)...(19): siRNA sense strand
gugaagacuugucgagaag

SEQ ID NO: 1925755 - RNA, 19 nt, Homo sapiens
  misc_RNA (1)...(19): siRNA sense strand
aaacaccaccugacacuuc

SEQ ID NO: 1925756 - RNA, 19 nt, Homo sapiens
  misc_RNA (1)...(19): siRNA sense strand
aagaagaaagugaagauga

SEQ ID NO: 1925757 - RNA, 19 nt, Homo sapiens
  misc_RNA (1)...(19): siRNA sense strand
cuagaagacccauuacaga

SEQ ID NO: 1925758 - RNA, 19 nt, Homo sapiens
  misc_RNA (1)...(19): siRNA sense strand
aaaagugccugcagucuga

SEQ ID NO: 1925759 - RNA, 19 nt, Homo sapiens
  misc_RNA (1)...(19): siRNA sense strand
cacaagacgaugaaugaaa

SEQ ID NO: 1925760 - RNA, 19 nt, Homo sapiens
  misc_RNA (1)...(19): siRNA sense strand
aaagugaagaugagucuga

SEQ ID NO: 1925761 - RNA, 19 nt, Homo sapiens
  misc_RNA (1)...(19): siRNA sense strand
guagaauccucaucuucag

SEQ ID NO: 1925762 - RNA, 19 nt, Homo sapiens
  misc_RNA (1)...(19): siRNA sense strand
gcagugccauccagcuucu

SEQ ID NO: 1925763 - RNA, 19 nt, Homo sapiens
  misc_RNA (1)...(19): siRNA sense strand
gaagaagaagaaagugaag

SEQ ID NO: 1925764 - RNA, 19 nt, Homo sapiens
  misc_RNA (1)...(19): siRNA sense strand
acaagacgaugaaugaaaa

SEQ ID NO: 1925765 - RNA, 19 nt, Homo sapiens
  misc_RNA (1)...(19): siRNA sense strand
ucucugaacgcaagaacua

SEQ ID NO: 1925766 - RNA, 19 nt, Homo sapiens
  misc_RNA (1)...(19): siRNA sense strand
caaauauugggcugacauu

SEQ ID NO: 1925767 - RNA, 19 nt, Homo sapiens
  misc_RNA (1)...(19): siRNA sense strand
aagcguuggugcacacaaa

SEQ ID NO: 1925768 - RNA, 19 nt, Homo sapiens
  misc_RNA (1)...(19): siRNA sense strand
uaucacagaauacauguca

SEQ ID NO: 1925769 - RNA, 19 nt, Homo sapiens
  misc_RNA (1)...(19): siRNA sense strand
cugggagucugaagcaauu

SEQ ID NO: 1925770 - RNA, 19 nt, Homo sapiens
  misc_RNA (1)...(19): siRNA sense strand
ugugggcgcuggcagaaga

SEQ ID NO: 1925771 - RNA, 19 nt, Homo sapiens
  misc_RNA (1)...(19): siRNA sense strand
cagcacaacggacucauca

SEQ ID NO: 1925772 - RNA, 19 nt, Homo sapiens
  misc_RNA (1)...(19): siRNA sense strand
gaagagcagaagaaucuac

SEQ ID NO: 1925773 - RNA, 19 nt, Homo sapiens
  misc_RNA (1)...(19): siRNA sense strand
gaagaaagugaagaugagu

SEQ ID NO: 1925774 - RNA, 19 nt, Homo sapiens
  misc_RNA (1)...(19): siRNA sense strand
caacaaucaugugaagacu

SEQ ID NO: 1925775 - RNA, 19 nt, Homo sapiens
  misc_RNA (1)...(19): siRNA sense strand
gugaccugaugccaaauga

SEQ ID NO: 1925776 - RNA, 19 nt, Homo sapiens
  misc_RNA (1)...(19): siRNA sense strand
auggagaagucacuaaugu

SEQ ID NO: 1925777 - RNA, 19 nt, Homo sapiens
  misc_RNA (1)...(19): siRNA sense strand
gaaucuacacuucuuugca

SEQ ID NO: 1925778 - RNA, 19 nt, Homo sapiens
  misc_RNA (1)...(19): siRNA sense strand
gcauaccuggccauggaua

SEQ ID NO: 1925779 - RNA, 19 nt, Homo sapiens
  misc_RNA (1)...(19): siRNA sense strand
ccugagcugugaccugaug

SEQ ID NO: 1925780 - RNA, 19 nt, Homo sapiens
  misc_RNA (1)...(19): siRNA sense strand
ccuugaagaugucaggaau

SEQ ID NO: 1925781 - RNA, 19 nt, Homo sapiens
  misc_RNA (1)...(19): siRNA sense strand
augggaaccugaccuguga

SEQ ID NO: 1925782 - RNA, 19 nt, Homo sapiens
  misc_RNA (1)...(19): siRNA sense strand
caguggacaucuacuccuu

SEQ ID NO: 1925783 - RNA, 19 nt, Homo sapiens
  misc_RNA (1)...(19): siRNA sense strand
ugaagaugagucugagauu

SEQ ID NO: 1925784 - RNA, 19 nt, Homo sapiens
  misc_RNA (1)...(19): siRNA sense strand
ugucaggaaugggaucuau

SEQ ID NO: 1925785 - RNA, 19 nt, Homo sapiens
  misc_RNA (1)...(19): siRNA sense strand
ugaagugcccucgcucaaa

SEQ ID NO: 1925786 - RNA, 19 nt, Homo sapiens
  misc_RNA (1)...(19): siRNA sense strand
uuacagagggaguucauuc

SEQ ID NO: 1925787 - RNA, 19 nt, Homo sapiens
  misc_RNA (1)...(19): siRNA sense strand
uagagguuguguggaauga

SEQ ID NO: 1925788 - RNA, 19 nt, Homo sapiens
  misc_RNA (1)...(19): siRNA sense strand
gacacuaucaacaaucaug

SEQ ID NO: 1925789 - RNA, 19 nt, Homo sapiens
  misc_RNA (1)...(19): siRNA sense strand
aaauauugggcugacauua

SEQ ID NO: 1925790 - RNA, 19 nt, Homo sapiens
  misc_RNA (1)...(19): siRNA sense strand
gugcuguguuugauaaucu

SEQ ID NO: 1925791 - RNA, 19 nt, Homo sapiens
  misc_RNA (1)...(19): siRNA sense strand
ucacagaauacaugucauc

SEQ ID NO: 1925792 - RNA, 19 nt, Homo sapiens
  misc_RNA (1)...(19): siRNA sense strand
gcagcugggcuucauuagu

SEQ ID NO: 1925793 - RNA, 19 nt, Homo sapiens
  misc_RNA (1)...(19): siRNA sense strand
agaagaagaaagugaagau

SEQ ID NO: 1925794 - RNA, 19 nt, Homo sapiens
  misc_RNA (1)...(19): siRNA sense strand
ggauacuagugccguacug

SEQ ID NO: 1925795 - RNA, 19 nt, Homo sapiens
  misc_RNA (1)...(19): siRNA sense strand
uggcucagacccaaaggua

SEQ ID NO: 1925796 - RNA, 19 nt, Homo sapiens
  misc_RNA (1)...(19): siRNA sense strand
agaggaagaagaagaaagu

SEQ ID NO: 1925797 - RNA, 19 nt, Homo sapiens
  misc_RNA (1)...(19): siRNA sense strand
gguggaggagggagucaaa

SEQ ID NO: 1925798 - RNA, 19 nt, Homo sapiens
  misc_RNA (1)...(19): siRNA sense strand
aaagguagaauccucaucu

SEQ ID NO: 1925799 - RNA, 19 nt, Homo sapiens
  misc_RNA (1)...(19): siRNA sense strand
guuccacccagcauuguuu

SEQ ID NO: 1925800 - RNA, 19 nt, Homo sapiens
  misc_RNA (1)...(19): siRNA sense strand
agagggaguucauucaaaa

SEQ ID NO: 1925801 - RNA, 19 nt, Homo sapiens
  misc_RNA (1)...(19): siRNA sense strand
agaggugaaucaacggaau

SEQ ID NO: 1925802 - RNA, 19 nt, Homo sapiens
  misc_RNA (1)...(19): siRNA sense strand
guauggagaagucacuaau

SEQ ID NO: 1925803 - RNA, 19 nt, Homo sapiens
  misc_RNA (1)...(19): siRNA sense strand
cugacacuaucaacaauca

SEQ ID NO: 1925804 - RNA, 19 nt, Homo sapiens
  misc_RNA (1)...(19): siRNA sense strand
gcagaagaggcgagaagag

SEQ ID NO: 1925805 - RNA, 19 nt, Homo sapiens
  misc_RNA (1)...(19): siRNA sense strand
gcagaccaacagccagaga

SEQ ID NO: 1925806 - RNA, 19 nt, Homo sapiens
  misc_RNA (1)...(19): siRNA sense strand
gaugccaaaugagaauauc

SEQ ID NO: 1925807 - RNA, 19 nt, Homo sapiens
  misc_RNA (1)...(19): siRNA sense strand
gaaauuaggucaaaucaga

SEQ ID NO: 1925808 - RNA, 19 nt, Homo sapiens
  misc_RNA (1)...(19): siRNA sense strand
gaaagaaguugaagugaaa

SEQ ID NO: 1925809 - RNA, 19 nt, Homo sapiens
  misc_RNA (1)...(19): siRNA sense strand
caacaaggcugacaauaaa

SEQ ID NO: 1925810 - RNA, 19 nt, Homo sapiens
  misc_RNA (1)...(19): siRNA sense strand
gaagagaaaugugcaacua

SEQ ID NO: 1925811 - RNA, 19 nt, Homo sapiens
  misc_RNA (1)...(19): siRNA sense strand
ggaaagcagucaccaacua

SEQ ID NO: 1925812 - RNA, 19 nt, Homo sapiens
  misc_RNA (1)...(19): siRNA sense strand
ggaaagaaguugaagugaa

SEQ ID NO: 1925813 - RNA, 19 nt, Homo sapiens
  misc_RNA (1)...(19): siRNA sense strand
caaagaagcugcugcugaa

SEQ ID NO: 1925814 - RNA, 19 nt, Homo sapiens
  misc_RNA (1)...(19): siRNA sense strand
ggaaguaucagcaaacaua

SEQ ID NO: 1925815 - RNA, 19 nt, Homo sapiens
  misc_RNA (1)...(19): siRNA sense strand
gaggaaacauuaacacaaa

SEQ ID NO: 1925816 - RNA, 19 nt, Homo sapiens
  misc_RNA (1)...(19): siRNA sense strand
gaaaggauaccuaaacauu

SEQ ID NO: 1925817 - RNA, 19 nt, Homo sapiens
  misc_RNA (1)...(19): siRNA sense strand
gaaguauguugauccuuua

SEQ ID NO: 1925818 - RNA, 19 nt, Homo sapiens
  misc_RNA (1)...(19): siRNA sense strand
gagaagacagugauuaaua

SEQ ID NO: 1925819 - RNA, 19 nt, Homo sapiens
  misc_RNA (1)...(19): siRNA sense strand
gaaagauucuguuccaaau

SEQ ID NO: 1925820 - RNA, 19 nt, Homo sapiens
  misc_RNA (1)...(19): siRNA sense strand
caaacaauaucccaguaua

SEQ ID NO: 1925821 - RNA, 19 nt, Homo sapiens
  misc_RNA (1)...(19): siRNA sense strand
ggaauggaguguaaagauu

SEQ ID NO: 1925822 - RNA, 19 nt, Homo sapiens
  misc_RNA (1)...(19): siRNA sense strand
ggaagaaauugcuaugcua

SEQ ID NO: 1925823 - RNA, 19 nt, Homo sapiens
  misc_RNA (1)...(19): siRNA sense strand
gaacugugcucuuugagau

SEQ ID NO: 1925824 - RNA, 19 nt, Homo sapiens
  misc_RNA (1)...(19): siRNA sense strand
gaaguugaaucauaccauu

SEQ ID NO: 1925825 - RNA, 19 nt, Homo sapiens
  misc_RNA (1)...(19): siRNA sense strand
ggaaauagaacuuuguuug

SEQ ID NO: 1925826 - RNA, 19 nt, Homo sapiens
  misc_RNA (1)...(19): siRNA sense strand
aagaauggcuugaacgaua

SEQ ID NO: 1925827 - RNA, 19 nt, Homo sapiens
  misc_RNA (1)...(19): siRNA sense strand
gaaggaaggccuacuaaga

SEQ ID NO: 1925828 - RNA, 19 nt, Homo sapiens
  misc_RNA (1)...(19): siRNA sense strand
aagcagaaguugaaucaua

SEQ ID NO: 1925829 - RNA, 19 nt, Homo sapiens
  misc_RNA (1)...(19): siRNA sense strand
gaaagacaguaucaauaug

SEQ ID NO: 1925830 - RNA, 19 nt, Homo sapiens
  misc_RNA (1)...(19): siRNA sense strand
gaaauugaguuccaucaca

SEQ ID NO: 1925831 - RNA, 19 nt, Homo sapiens
  misc_RNA (1)...(19): siRNA sense strand
caacacugcucuucacuau

SEQ ID NO: 1925832 - RNA, 19 nt, Homo sapiens
  misc_RNA (1)...(19): siRNA sense strand
gaagaaaugcugauacguu

SEQ ID NO: 1925833 - RNA, 19 nt, Homo sapiens
  misc_RNA (1)...(19): siRNA sense strand
gaagagaagagaagaaaug

SEQ ID NO: 1925834 - RNA, 19 nt, Homo sapiens
  misc_RNA (1)...(19): siRNA sense strand
ccacgggcuucaaauaaua

SEQ ID NO: 1925835 - RNA, 19 nt, Homo sapiens
  misc_RNA (1)...(19): siRNA sense strand
caagaggaguuguuaucua

SEQ ID NO: 1925836 - RNA, 19 nt, Homo sapiens
  misc_RNA (1)...(19): siRNA sense strand
ggauagagauuccgauagu

SEQ ID NO: 1925837 - RNA, 19 nt, Homo sapiens
  misc_RNA (1)...(19): siRNA sense strand
uagauuggcugcugcuaua

SEQ ID NO: 1925838 - RNA, 19 nt, Homo sapiens
  misc_RNA (1)...(19): siRNA sense strand
ugagagauaucuucacuug

SEQ ID NO: 1925839 - RNA, 19 nt, Homo sapiens
  misc_RNA (1)...(19): siRNA sense strand
gaugaaggcuguacaaugc

SEQ ID NO: 1925840 - RNA, 19 nt, Homo sapiens
  misc_RNA (1)...(19): siRNA sense strand
gaagucauauagaaaggaa

SEQ ID NO: 1925841 - RNA, 19 nt, Homo sapiens
  misc_RNA (1)...(19): siRNA sense strand
ggaugauguugaugacuua

SEQ ID NO: 1925842 - RNA, 19 nt, Homo sapiens
  misc_RNA (1)...(19): siRNA sense strand
ugaaauagaugaggaugaa

SEQ ID NO: 1925843 - RNA, 19 nt, Homo sapiens
  misc_RNA (1)...(19): siRNA sense strand
aaacggaccucgaaagaau

SEQ ID NO: 1925844 - RNA, 19 nt, Homo sapiens
  misc_RNA (1)...(19): siRNA sense strand
gaacuuuguuugaggauag

SEQ ID NO: 1925845 - RNA, 19 nt, Homo sapiens
  misc_RNA (1)...(19): siRNA sense strand
gaaagcaucaagagaauau

SEQ ID NO: 1925846 - RNA, 19 nt, Homo sapiens
  misc_RNA (1)...(19): siRNA sense strand
gaagaaauugcuaugcuaa

SEQ ID NO: 1925847 - RNA, 19 nt, Homo sapiens
  misc_RNA (1)...(19): siRNA sense strand
ggaugcagcucuuucaugu

SEQ ID NO: 1925848 - RNA, 19 nt, Homo sapiens
  misc_RNA (1)...(19): siRNA sense strand
agaaguauguugauccuuu

SEQ ID NO: 1925849 - RNA, 19 nt, Homo sapiens
  misc_RNA (1)...(19): siRNA sense strand
guuuagaucucaacagaaa

SEQ ID NO: 1925850 - RNA, 19 nt, Homo sapiens
  misc_RNA (1)...(19): siRNA sense strand
gaggaguuguuaucuauga

SEQ ID NO: 1925851 - RNA, 19 nt, Homo sapiens
  misc_RNA (1)...(19): siRNA sense strand
aaagagagauaacuggauu

SEQ ID NO: 1925852 - RNA, 19 nt, Homo sapiens
  misc_RNA (1)...(19): siRNA sense strand
gaaaugaacaagcagaaga

SEQ ID NO: 1925853 - RNA, 19 nt, Homo sapiens
  misc_RNA (1)...(19): siRNA sense strand
ccaaucaccuuuccaaaca

SEQ ID NO: 1925854 - RNA, 19 nt, Homo sapiens
  misc_RNA (1)...(19): siRNA sense strand
ggacauaucaguagcaaca

SEQ ID NO: 1925855 - RNA, 19 nt, Homo sapiens
  misc_RNA (1)...(19): siRNA sense strand
ugagacaacuucaacaaga

SEQ ID NO: 1925856 - RNA, 19 nt, Homo sapiens
  misc_RNA (1)...(19): siRNA sense strand
gaacagaaugccagaaugu

SEQ ID NO: 1925857 - RNA, 19 nt, Homo sapiens
  misc_RNA (1)...(19): siRNA sense strand
gaaaugcugauacguugua

SEQ ID NO: 1925858 - RNA, 19 nt, Homo sapiens
  misc_RNA (1)...(19): siRNA sense strand
gaacaggaaauagaacuuu

SEQ ID NO: 1925859 - RNA, 19 nt, Homo sapiens
  misc_RNA (1)...(19): siRNA sense strand
gaaagcagucaccaacuaa

SEQ ID NO: 1925860 - RNA, 19 nt, Homo sapiens
  misc_RNA (1)...(19): siRNA sense strand
gaaguaaagagcacugaaa

SEQ ID NO: 1925861 - RNA, 19 nt, Homo sapiens
  misc_RNA (1)...(19): siRNA sense strand
gaagaaaggauaccuaaac

SEQ ID NO: 1925862 - RNA, 19 nt, Homo sapiens
  misc_RNA (1)...(19): siRNA sense strand
gagacaacuucaacaagaa

SEQ ID NO: 1925863 - RNA, 19 nt, Homo sapiens
  misc_RNA (1)...(19): siRNA sense strand
gaagagcaauauaggaaag

SEQ ID NO: 1925864 - RNA, 19 nt, Homo sapiens
  misc_RNA (1)...(19): siRNA sense strand
gguccugccuugcaaauga

SEQ ID NO: 1925865 - RNA, 19 nt, Homo sapiens
  misc_RNA (1)...(19): siRNA sense strand
gacagcaguuuaagugaaa

SEQ ID NO: 1925866 - RNA, 19 nt, Homo sapiens
  misc_RNA (1)...(19): siRNA sense strand
aaacaaggaugaccucaca

SEQ ID NO: 1925867 - RNA, 19 nt, Homo sapiens
  misc_RNA (1)...(19): siRNA sense strand
cagauggaacucagaauua

SEQ ID NO: 1925868 - RNA, 19 nt, Homo sapiens
  misc_RNA (1)...(19): siRNA sense strand
ugaaauggcucaaaagaaa

SEQ ID NO: 1925869 - RNA, 19 nt, Homo sapiens
  misc_RNA (1)...(19): siRNA sense strand
cgagaacugugcucuuuga

SEQ ID NO: 1925870 - RNA, 19 nt, Homo sapiens
  misc_RNA (1)...(19): siRNA sense strand
gaugaugacagcaguuuaa

SEQ ID NO: 1925871 - RNA, 19 nt, Homo sapiens
  misc_RNA (1)...(19): siRNA sense strand
uaagauggcuaaacuagag

SEQ ID NO: 1925872 - RNA, 19 nt, Homo sapiens
  misc_RNA (1)...(19): siRNA sense strand
gauguccgcauuaggauua

SEQ ID NO: 1925873 - RNA, 19 nt, Homo sapiens
  misc_RNA (1)...(19): siRNA sense strand
gaacucagaauuaaagauc

SEQ ID NO: 1925874 - RNA, 19 nt, Homo sapiens
  misc_RNA (1)...(19): siRNA sense strand
agagauaacuggauuuaag

SEQ ID NO: 1925875 - RNA, 19 nt, Homo sapiens
  misc_RNA (1)...(19): siRNA sense strand
caacaagaacuagcugaua

SEQ ID NO: 1925876 - RNA, 19 nt, Homo sapiens
  misc_RNA (1)...(19): siRNA sense strand
gagaaugcaaugcuaaauu

SEQ ID NO: 1925877 - RNA, 19 nt, Homo sapiens
  misc_RNA (1)...(19): siRNA sense strand
agagaaaugugcaacuauu

SEQ ID NO: 1925878 - RNA, 19 nt, Homo sapiens
  misc_RNA (1)...(19): siRNA sense strand
ccugagaagucauauagaa

SEQ ID NO: 1925879 - RNA, 19 nt, Homo sapiens
  misc_RNA (1)...(19): siRNA sense strand
caagaccaguuucaugcua

SEQ ID NO: 1925880 - RNA, 19 nt, Homo sapiens
  misc_RNA (1)...(19): siRNA sense strand
agaugaauguucucguuua

SEQ ID NO: 1925881 - RNA, 19 nt, Homo sapiens
  misc_RNA (1)...(19): siRNA sense strand
ugaugaugaugauggauua

SEQ ID NO: 1925882 - RNA, 19 nt, Homo sapiens
  misc_RNA (1)...(19): siRNA sense strand
gaaaugaaagauucuguuc

SEQ ID NO: 1925883 - RNA, 19 nt, Homo sapiens
  misc_RNA (1)...(19): siRNA sense strand
gaugaaagcucugaagacu

SEQ ID NO: 1925884 - RNA, 19 nt, Homo sapiens
  misc_RNA (1)...(19): siRNA sense strand
ucacuaugcugucuauaau

SEQ ID NO: 1925885 - RNA, 19 nt, Homo sapiens
  misc_RNA (1)...(19): siRNA sense strand
caaagcagcugaacaugac

SEQ ID NO: 1925886 - RNA, 19 nt, Homo sapiens
  misc_RNA (1)...(19): siRNA sense strand
uagcagaggucaacaccaa

SEQ ID NO: 1925887 - RNA, 19 nt, Homo sapiens
  misc_RNA (1)...(19): siRNA sense strand
gaagaaauuaggucaaauc

SEQ ID NO: 1925888 - RNA, 19 nt, Homo sapiens
  misc_RNA (1)...(19): siRNA sense strand
ggaagcagaaguugaauca

SEQ ID NO: 1925889 - RNA, 19 nt, Homo sapiens
  misc_RNA (1)...(19): siRNA sense strand
agacaagguuaauguacua

SEQ ID NO: 1925890 - RNA, 19 nt, Homo sapiens
  misc_RNA (1)...(19): siRNA sense strand
ggaagacaagguuaaugua

SEQ ID NO: 1925891 - RNA, 19 nt, Homo sapiens
  misc_RNA (1)...(19): siRNA sense strand
gaaagggaagggagugaaa

SEQ ID NO: 1925892 - RNA, 19 nt, Homo sapiens
  misc_RNA (1)...(19): siRNA sense strand
gaaucuggaucaauagcuu

SEQ ID NO: 1925893 - RNA, 19 nt, Homo sapiens
  misc_RNA (1)...(19): siRNA sense strand
gcaaauuugucugaagaug

SEQ ID NO: 1925894 - RNA, 19 nt, Homo sapiens
  misc_RNA (1)...(19): siRNA sense strand
gaugcaagaucacaagcaa

SEQ ID NO: 1925895 - RNA, 19 nt, Homo sapiens
  misc_RNA (1)...(19): siRNA sense strand
ggucaaaucagaaaucaau

SEQ ID NO: 1925896 - RNA, 19 nt, Homo sapiens
  misc_RNA (1)...(19): siRNA sense strand
caggacggcucuacauuug

SEQ ID NO: 1925897 - RNA, 19 nt, Homo sapiens
  misc_RNA (1)...(19): siRNA sense strand
acaacaaggcugacaauaa

SEQ ID NO: 1925898 - RNA, 19 nt, Homo sapiens
  misc_RNA (1)...(19): siRNA sense strand
caccugaccuucuuccaaa

SEQ ID NO: 1925899 - RNA, 19 nt, Homo sapiens
  misc_RNA (1)...(19): siRNA sense strand
gaagugaucaaccugagaa

SEQ ID NO: 1925900 - RNA, 19 nt, Homo sapiens
  misc_RNA (1)...(19): siRNA sense strand
gggaaggccaguuuacuaa

SEQ ID NO: 1925901 - RNA, 19 nt, Homo sapiens
  misc_RNA (1)...(19): siRNA sense strand
agaaguagcaucagaagaa

SEQ ID NO: 1925902 - RNA, 19 nt, Homo sapiens
  misc_RNA (1)...(19): siRNA sense strand
agaggaagauauagaauca

SEQ ID NO: 1925903 - RNA, 19 nt, Homo sapiens
  misc_RNA (1)...(19): siRNA sense strand
gaacaggacggcucuacau

SEQ ID NO: 1925904 - RNA, 19 nt, Homo sapiens
  misc_RNA (1)...(19): siRNA sense strand
caaauaauagcauggagaa

SEQ ID NO: 1925905 - RNA, 19 nt, Homo sapiens
  misc_RNA (1)...(19): siRNA sense strand
ggagcuaucugaaacaaaa

SEQ ID NO: 1925906 - RNA, 19 nt, Homo sapiens
  misc_RNA (1)...(19): siRNA sense strand
ugacagcaguuuaagugaa

SEQ ID NO: 1925907 - RNA, 19 nt, Homo sapiens
  misc_RNA (1)...(19): siRNA sense strand
ccuagaagcugccauuaaa

SEQ ID NO: 1925908 - RNA, 19 nt, Homo sapiens
  misc_RNA (1)...(19): siRNA sense strand
gauuaggccuggcuuauga

SEQ ID NO: 1925909 - RNA, 19 nt, Homo sapiens
  misc_RNA (1)...(19): siRNA sense strand
gaagcaguaugaagugauu

SEQ ID NO: 1925910 - RNA, 19 nt, Homo sapiens
  misc_RNA (1)...(19): siRNA sense strand
gaaggcugcugcacugaaa

SEQ ID NO: 1925911 - RNA, 19 nt, Homo sapiens
  misc_RNA (1)...(19): siRNA sense strand
cccaguagcugcacacaua

SEQ ID NO: 1925912 - RNA, 19 nt, Homo sapiens
  misc_RNA (1)...(19): siRNA sense strand
ggugguaccugaacuguau

SEQ ID NO: 1925913 - RNA, 19 nt, Homo sapiens
  misc_RNA (1)...(19): siRNA sense strand
ggaauauucugaugcaaag

SEQ ID NO: 1925914 - RNA, 19 nt, Homo sapiens
  misc_RNA (1)...(19): siRNA sense strand
uggauggucuucucuauga

SEQ ID NO: 1925915 - RNA, 19 nt, Homo sapiens
  misc_RNA (1)...(19): siRNA sense strand
gagaagcaguaugaaguga

SEQ ID NO: 1925916 - RNA, 19 nt, Homo sapiens
  misc_RNA (1)...(19): siRNA sense strand
ugacgaggcuguguuacaa

SEQ ID NO: 1925917 - RNA, 19 nt, Homo sapiens
  misc_RNA (1)...(19): siRNA sense strand
gagcaucuccaaagaagga

SEQ ID NO: 1925918 - RNA, 19 nt, Homo sapiens
  misc_RNA (1)...(19): siRNA sense strand
gggagcaacucucugaagu

SEQ ID NO: 1925919 - RNA, 19 nt, Homo sapiens
  misc_RNA (1)...(19): siRNA sense strand
gaaaagcugccacucuaua

SEQ ID NO: 1925920 - RNA, 19 nt, Homo sapiens
  misc_RNA (1)...(19): siRNA sense strand
ccaagaguguuauucucaa

SEQ ID NO: 1925921 - RNA, 19 nt, Homo sapiens
  misc_RNA (1)...(19): siRNA sense strand
uccaugagguacaagauuu

SEQ ID NO: 1925922 - RNA, 19 nt, Homo sapiens
  misc_RNA (1)...(19): siRNA sense strand
gaaggaaaaucaugaagag

SEQ ID NO: 1925923 - RNA, 19 nt, Homo sapiens
  misc_RNA (1)...(19): siRNA sense strand
ccaggaauauucugaugca

SEQ ID NO: 1925924 - RNA, 19 nt, Homo sapiens
  misc_RNA (1)...(19): siRNA sense strand
ggcgggaugugaugacuau

SEQ ID NO: 1925925 - RNA, 19 nt, Homo sapiens
  misc_RNA (1)...(19): siRNA sense strand
ccuagagcaucuccaaaga

SEQ ID NO: 1925926 - RNA, 19 nt, Homo sapiens
  misc_RNA (1)...(19): siRNA sense strand
ggagaagcaguaugaagug

SEQ ID NO: 1925927 - RNA, 19 nt, Homo sapiens
  misc_RNA (1)...(19): siRNA sense strand
gggaugugaugacuaugga

SEQ ID NO: 1925928 - RNA, 19 nt, Homo sapiens
  misc_RNA (1)...(19): siRNA sense strand
ggagaagcauuuguuccau

SEQ ID NO: 1925929 - RNA, 19 nt, Homo sapiens
  misc_RNA (1)...(19): siRNA sense strand
uagagcaucuccaaagaag

SEQ ID NO: 1925930 - RNA, 19 nt, Homo sapiens
  misc_RNA (1)...(19): siRNA sense strand
cugcuaagcucuguggauu

SEQ ID NO: 1925931 - RNA, 19 nt, Homo sapiens
  misc_RNA (1)...(19): siRNA sense strand
ggucuucucuaugaucuca

SEQ ID NO: 1925932 - RNA, 19 nt, Homo sapiens
  misc_RNA (1)...(19): siRNA sense strand
cuacaacuauagcaugcuu

SEQ ID NO: 1925933 - RNA, 19 nt, Homo sapiens
  misc_RNA (1)...(19): siRNA sense strand
aggccuggcuuaugaaguu

SEQ ID NO: 1925934 - RNA, 19 nt, Homo sapiens
  misc_RNA (1)...(19): siRNA sense strand
ucuaugagauggugacucu

SEQ ID NO: 1925935 - RNA, 19 nt, Homo sapiens
  misc_RNA (1)...(19): siRNA sense strand
ggaaggcugcugcacugaa

SEQ ID NO: 1925936 - RNA, 19 nt, Homo sapiens
  misc_RNA (1)...(19): siRNA sense strand
ucuaagcccaagaguguua

SEQ ID NO: 1925937 - RNA, 19 nt, Homo sapiens
  misc_RNA (1)...(19): siRNA sense strand
gccaucuccucuacucaaa

SEQ ID NO: 1925938 - RNA, 19 nt, Homo sapiens
  misc_RNA (1)...(19): siRNA sense strand
gugauuaucgucccaacuu

SEQ ID NO: 1925939 - RNA, 19 nt, Homo sapiens
  misc_RNA (1)...(19): siRNA sense strand
ucuaugaucucacagaaaa

SEQ ID NO: 1925940 - RNA, 19 nt, Homo sapiens
  misc_RNA (1)...(19): siRNA sense strand
caagaguguuauucucaag

SEQ ID NO: 1925941 - RNA, 19 nt, Homo sapiens
  misc_RNA (1)...(19): siRNA sense strand
ugauuaucgucccaacuuu

SEQ ID NO: 1925942 - RNA, 19 nt, Homo sapiens
  misc_RNA (1)...(19): siRNA sense strand
uauggauggucuucucuau

SEQ ID NO: 1925943 - RNA, 19 nt, Homo sapiens
  misc_RNA (1)...(19): siRNA sense strand
gccuagaagcugccauuaa

SEQ ID NO: 1925944 - RNA, 19 nt, Homo sapiens
  misc_RNA (1)...(19): siRNA sense strand
gagaccugcuagcaucaga

SEQ ID NO: 1925945 - RNA, 19 nt, Homo sapiens
  misc_RNA (1)...(19): siRNA sense strand
guguuauucucaaggcuuu

SEQ ID NO: 1925946 - RNA, 19 nt, Homo sapiens
  misc_RNA (1)...(19): siRNA sense strand
ggauuaggccuggcuuaug

SEQ ID NO: 1925947 - RNA, 19 nt, Homo sapiens
  misc_RNA (1)...(19): siRNA sense strand
gcaggagaagcauuuguuc

SEQ ID NO: 1925948 - RNA, 19 nt, Homo sapiens
  misc_RNA (1)...(19): siRNA sense strand
cuucuaagcccaagagugu

SEQ ID NO: 1925949 - RNA, 19 nt, Homo sapiens
  misc_RNA (1)...(19): siRNA sense strand
gcaccaccguauccugaag

SEQ ID NO: 1925950 - RNA, 19 nt, Homo sapiens
  misc_RNA (1)...(19): siRNA sense strand
ucucuaugaucucacagaa

SEQ ID NO: 1925951 - RNA, 19 nt, Homo sapiens
  misc_RNA (1)...(19): siRNA sense strand
gauuaucgucccaacuuug

SEQ ID NO: 1925952 - RNA, 19 nt, Homo sapiens
  misc_RNA (1)...(19): siRNA sense strand
ccacaccugcccuggcuaa

SEQ ID NO: 1925953 - RNA, 19 nt, Homo sapiens
  misc_RNA (1)...(19): siRNA sense strand
gaaugcagucucagugaca

SEQ ID NO: 1925954 - RNA, 19 nt, Homo sapiens
  misc_RNA (1)...(19): siRNA sense strand
gcagcguucuggaccucaa

SEQ ID NO: 1925955 - RNA, 19 nt, Homo sapiens
  misc_RNA (1)...(19): siRNA sense strand
gaggcuguguuacaaguac

SEQ ID NO: 1925956 - RNA, 19 nt, Homo sapiens
  misc_RNA (1)...(19): siRNA sense strand
uaaggagacauccguggaa

SEQ ID NO: 1925957 - RNA, 19 nt, Homo sapiens
  misc_RNA (1)...(19): siRNA sense strand
cugaaaagcugccacucua

SEQ ID NO: 1925958 - RNA, 19 nt, Homo sapiens
  misc_RNA (1)...(19): siRNA sense strand
caaagaaggaaaaucauga

SEQ ID NO: 1925959 - RNA, 19 nt, Homo sapiens
  misc_RNA (1)...(19): siRNA sense strand
gcagccaggaauauucuga

SEQ ID NO: 1925960 - RNA, 19 nt, Homo sapiens
  misc_RNA (1)...(19): siRNA sense strand
ggauccugcucuaugagau

SEQ ID NO: 1925961 - RNA, 19 nt, Homo sapiens
  misc_RNA (1)...(19): siRNA sense strand
agaugacgaggcuguguua

SEQ ID NO: 1925962 - RNA, 19 nt, Homo sapiens
  misc_RNA (1)...(19): siRNA sense strand
gagaacaaagaacucaaca

SEQ ID NO: 1925963 - RNA, 19 nt, Homo sapiens
  misc_RNA (1)...(19): siRNA sense strand
cacggaugcuccuggaaug

SEQ ID NO: 1925964 - RNA, 19 nt, Homo sapiens
  misc_RNA (1)...(19): siRNA sense strand
gcccaagaguguuauucuc

SEQ ID NO: 1925965 - RNA, 19 nt, Homo sapiens
  misc_RNA (1)...(19): siRNA sense strand
aaggagacauccguggaaa

SEQ ID NO: 1925966 - RNA, 19 nt, Homo sapiens
  misc_RNA (1)...(19): siRNA sense strand
gcccaucuuucgagccaau

SEQ ID NO: 1925967 - RNA, 19 nt, Homo sapiens
  misc_RNA (1)...(19): siRNA sense strand
gagccucuucuacaacuau

SEQ ID NO: 1925968 - RNA, 19 nt, Homo sapiens
  misc_RNA (1)...(19): siRNA sense strand
gacuauggauggucuucuc

SEQ ID NO: 1925969 - RNA, 19 nt, Homo sapiens
  misc_RNA (1)...(19): siRNA sense strand
acucaaaccauaccucuca

SEQ ID NO: 1925970 - RNA, 19 nt, Homo sapiens
  misc_RNA (1)...(19): siRNA sense strand
gcgccuagaagcugccauu

SEQ ID NO: 1925971 - RNA, 19 nt, Homo sapiens
  misc_RNA (1)...(19): siRNA sense strand
caaaccauaccucucaagu

SEQ ID NO: 1925972 - RNA, 19 nt, Homo sapiens
  misc_RNA (1)...(19): siRNA sense strand
uaucagagaacaaagaacu

SEQ ID NO: 1925973 - RNA, 19 nt, Homo sapiens
  misc_RNA (1)...(19): siRNA sense strand
uggaggaaauguggcuuug

SEQ ID NO: 1925974 - RNA, 19 nt, Homo sapiens
  misc_RNA (1)...(19): siRNA sense strand
cuagagcaucuccaaagaa

SEQ ID NO: 1925975 - RNA, 19 nt, Homo sapiens
  misc_RNA (1)...(19): siRNA sense strand
ucuaggagcaccaccguau

SEQ ID NO: 1925976 - RNA, 19 nt, Homo sapiens
  misc_RNA (1)...(19): siRNA sense strand
ggccaucuccucuacucaa

SEQ ID NO: 1925977 - RNA, 19 nt, Homo sapiens
  misc_RNA (1)...(19): siRNA sense strand
aaguauaucacaucggaaa

SEQ ID NO: 1925978 - RNA, 19 nt, Homo sapiens
  misc_RNA (1)...(19): siRNA sense strand
uccaggagaagcaguauga

SEQ ID NO: 1925979 - RNA, 19 nt, Homo sapiens
  misc_RNA (1)...(19): siRNA sense strand
gaagcaggacauggaggaa

SEQ ID NO: 1925980 - RNA, 19 nt, Homo sapiens
  misc_RNA (1)...(19): siRNA sense strand
uugggauccugcucuauga

SEQ ID NO: 1925981 - RNA, 19 nt, Homo sapiens
  misc_RNA (1)...(19): siRNA sense strand
aggaauauucugaugcaaa

SEQ ID NO: 1925982 - RNA, 19 nt, Homo sapiens
  misc_RNA (1)...(19): siRNA sense strand
cagucucagugacaaguug

SEQ ID NO: 1925983 - RNA, 19 nt, Homo sapiens
  misc_RNA (1)...(19): siRNA sense strand
ggauggucuucucuaugau

SEQ ID NO: 1925984 - RNA, 19 nt, Homo sapiens
  misc_RNA (1)...(19): siRNA sense strand
guuacaaguaccagaguug

SEQ ID NO: 1925985 - RNA, 19 nt, Homo sapiens
  misc_RNA (1)...(19): siRNA sense strand
aaaccauaccucucaagug

SEQ ID NO: 1925986 - RNA, 19 nt, Homo sapiens
  misc_RNA (1)...(19): siRNA sense strand
ggaccuaagcugggaagca

SEQ ID NO: 1925987 - RNA, 19 nt, Homo sapiens
  misc_RNA (1)...(19): siRNA sense strand
agacauccguggaaaacuu

SEQ ID NO: 1925988 - RNA, 19 nt, Homo sapiens
  misc_RNA (1)...(19): siRNA sense strand
gauccugcucuaugagaug

SEQ ID NO: 1925989 - RNA, 19 nt, Homo sapiens
  misc_RNA (1)...(19): siRNA sense strand
ggccuggcuuaugaaguuu

SEQ ID NO: 1925990 - RNA, 19 nt, Homo sapiens
  misc_RNA (1)...(19): siRNA sense strand
uauaucacaucggaaagca

SEQ ID NO: 1925991 - RNA, 19 nt, Homo sapiens
  misc_RNA (1)...(19): siRNA sense strand
ucagagaacaaagaacuca

SEQ ID NO: 1925992 - RNA, 19 nt, Homo sapiens
  misc_RNA (1)...(19): siRNA sense strand
guuauucucaaggcuuuaa

SEQ ID NO: 1925993 - RNA, 19 nt, Homo sapiens
  misc_RNA (1)...(19): siRNA sense strand
gggauccugcucuaugaga

SEQ ID NO: 1925994 - RNA, 19 nt, Homo sapiens
  misc_RNA (1)...(19): siRNA sense strand
caacuauagcaugcuuuga

SEQ ID NO: 1925995 - RNA, 19 nt, Homo sapiens
  misc_RNA (1)...(19): siRNA sense strand
acaacuauagcaugcuuug

SEQ ID NO: 1925996 - RNA, 19 nt, Homo sapiens
  misc_RNA (1)...(19): siRNA sense strand
gcagaugacgaggcugugu

SEQ ID NO: 1925997 - RNA, 19 nt, Homo sapiens
  misc_RNA (1)...(19): siRNA sense strand
cauccuagagcaucuccaa

SEQ ID NO: 1925998 - RNA, 19 nt, Homo sapiens
  misc_RNA (1)...(19): siRNA sense strand
uaugagauggugacucuag

SEQ ID NO: 1925999 - RNA, 19 nt, Homo sapiens
  misc_RNA (1)...(19): siRNA sense strand
cccaagaguguuauucuca

SEQ ID NO: 1926000 - RNA, 19 nt, Homo sapiens
  misc_RNA (1)...(19): siRNA sense strand
acacggaugcuccuggaau

SEQ ID NO: 1926001 - RNA, 19 nt, Homo sapiens
  misc_RNA (1)...(19): siRNA sense strand
gauggucuucucuaugauc

SEQ ID NO: 1926002 - RNA, 19 nt, Homo sapiens
  misc_RNA (1)...(19): siRNA sense strand
agcaggacauggaggaaau

SEQ ID NO: 1926003 - RNA, 19 nt, Homo sapiens
  misc_RNA (1)...(19): siRNA sense strand
aguaugaagugauuaucgu

SEQ ID NO: 1926004 - RNA, 19 nt, Homo sapiens
  misc_RNA (1)...(19): siRNA sense strand
aggagaagcaguaugaagu

SEQ ID NO: 1926005 - RNA, 19 nt, Homo sapiens
  misc_RNA (1)...(19): siRNA sense strand
uguacaguaucaugaaguc

SEQ ID NO: 1926006 - RNA, 19 nt, Homo sapiens
  misc_RNA (1)...(19): siRNA sense strand
uggaaugcagucucaguga

SEQ ID NO: 1926007 - RNA, 19 nt, Homo sapiens
  misc_RNA (1)...(19): siRNA sense strand
gagauuggcuugaugaauu

SEQ ID NO: 1926008 - RNA, 19 nt, Homo sapiens
  misc_RNA (1)...(19): siRNA sense strand
aaagcuacaucuacacgua

SEQ ID NO: 1926009 - RNA, 19 nt, Homo sapiens
  misc_RNA (1)...(19): siRNA sense strand
ccaccaagaucuccuacga

SEQ ID NO: 1926010 - RNA, 19 nt, Homo sapiens
  misc_RNA (1)...(19): siRNA sense strand
ucaaugacuucaaggaugu

SEQ ID NO: 1926011 - RNA, 19 nt, Homo sapiens
  misc_RNA (1)...(19): siRNA sense strand
ugaauuucgugcuggguuu

SEQ ID NO: 1926012 - RNA, 19 nt, Homo sapiens
  misc_RNA (1)...(19): siRNA sense strand
agauuggcuugaugaauuu

SEQ ID NO: 1926013 - RNA, 19 nt, Homo sapiens
  misc_RNA (1)...(19): siRNA sense strand
cugcaaagcuacaucuaca

SEQ ID NO: 1926014 - RNA, 19 nt, Homo sapiens
  misc_RNA (1)...(19): siRNA sense strand
guacaagcgccugugcuaa

SEQ ID NO: 1926015 - RNA, 19 nt, Homo sapiens
  misc_RNA (1)...(19): siRNA sense strand
cuacaugccuccggguuuc

SEQ ID NO: 1926016 - RNA, 19 nt, Homo sapiens
  misc_RNA (1)...(19): siRNA sense strand
cuacgagauuggcuugaug

SEQ ID NO: 1926017 - RNA, 19 nt, Homo sapiens
  misc_RNA (1)...(19): siRNA sense strand
gugcuggguuucuucuguu

SEQ ID NO: 1926018 - RNA, 19 nt, Homo sapiens
  misc_RNA (1)...(19): siRNA sense strand
cguacaagcgccugugcua

SEQ ID NO: 1926019 - RNA, 19 nt, Homo sapiens
  misc_RNA (1)...(19): siRNA sense strand
caucaaugacuucaaggau

SEQ ID NO: 1926020 - RNA, 19 nt, Homo sapiens
  misc_RNA (1)...(19): siRNA sense strand
uuucuucuguugcuucaug

SEQ ID NO: 1926021 - RNA, 19 nt, Homo sapiens
  misc_RNA (1)...(19): siRNA sense strand
gcagggagagaucuuugag

SEQ ID NO: 1926022 - RNA, 19 nt, Homo sapiens
  misc_RNA (1)...(19): siRNA sense strand
cgugcuggguuucuucugu

SEQ ID NO: 1926023 - RNA, 19 nt, Homo sapiens
  misc_RNA (1)...(19): siRNA sense strand
cuagaaguccuguccucuu

SEQ ID NO: 1926024 - RNA, 19 nt, Homo sapiens
  misc_RNA (1)...(19): siRNA sense strand
ccuacgagauuggcuugau

SEQ ID NO: 1926025 - RNA, 19 nt, Homo sapiens
  misc_RNA (1)...(19): siRNA sense strand
ggccaucaccaccaagauc

SEQ ID NO: 1926026 - RNA, 19 nt, Homo sapiens
  misc_RNA (1)...(19): siRNA sense strand
gcaaaucguugaauaaaga

SEQ ID NO: 1926027 - RNA, 19 nt, Homo sapiens
  misc_RNA (1)...(19): siRNA sense strand
gguggacgcuguuauauuu

SEQ ID NO: 1926028 - RNA, 19 nt, Homo sapiens
  misc_RNA (1)...(19): siRNA sense strand
gcaagucgcuaccuaauuc

SEQ ID NO: 1926029 - RNA, 19 nt, Homo sapiens
  misc_RNA (1)...(19): siRNA sense strand
agaaagagauugucguuga

SEQ ID NO: 1926030 - RNA, 19 nt, Homo sapiens
  misc_RNA (1)...(19): siRNA sense strand
uuacacaucucacccaauu

SEQ ID NO: 1926031 - RNA, 19 nt, Homo sapiens
  misc_RNA (1)...(19): siRNA sense strand
cgaggaagcucuccaacga

SEQ ID NO: 1926032 - RNA, 19 nt, Homo sapiens
  misc_RNA (1)...(19): siRNA sense strand
gaaagagauugucguugau

SEQ ID NO: 1926033 - RNA, 19 nt, Homo sapiens
  misc_RNA (1)...(19): siRNA sense strand
ccaaggacaugagcaguuu

SEQ ID NO: 1926034 - RNA, 19 nt, Homo sapiens
  misc_RNA (1)...(19): siRNA sense strand
uaauggaggugggaguuua

SEQ ID NO: 1926035 - RNA, 19 nt, Homo sapiens
  misc_RNA (1)...(19): siRNA sense strand
gaagguggcagguucaaga

SEQ ID NO: 1926036 - RNA, 19 nt, Homo sapiens
  misc_RNA (1)...(19): siRNA sense strand
gaaaagcacuagcaacuuc

SEQ ID NO: 1926037 - RNA, 19 nt, Homo sapiens
  misc_RNA (1)...(19): siRNA sense strand
gaccuaucaucccaguuua

SEQ ID NO: 1926038 - RNA, 19 nt, Homo sapiens
  misc_RNA (1)...(19): siRNA sense strand
ggaacgagcuagccaacag

SEQ ID NO: 1926039 - RNA, 19 nt, Homo sapiens
  misc_RNA (1)...(19): siRNA sense strand
gaagcgaaguggcaaaucg

SEQ ID NO: 1926040 - RNA, 19 nt, Homo sapiens
  misc_RNA (1)...(19): siRNA sense strand
caaucgagcucaucaaggu

SEQ ID NO: 1926041 - RNA, 19 nt, Homo sapiens
  misc_RNA (1)...(19): siRNA sense strand
ccaauggccuauccaagga

SEQ ID NO: 1926042 - RNA, 19 nt, Homo sapiens
  misc_RNA (1)...(19): siRNA sense strand
cagcuuggaggaugaaaua

SEQ ID NO: 1926043 - RNA, 19 nt, Homo sapiens
  misc_RNA (1)...(19): siRNA sense strand
ggacgaaaccaucgguaga

SEQ ID NO: 1926044 - RNA, 19 nt, Homo sapiens
  misc_RNA (1)...(19): siRNA sense strand
gaacuugggagcccucaug

SEQ ID NO: 1926045 - RNA, 19 nt, Homo sapiens
  misc_RNA (1)...(19): siRNA sense strand
gccgagccaucccaauuaa

SEQ ID NO: 1926046 - RNA, 19 nt, Homo sapiens
  misc_RNA (1)...(19): siRNA sense strand
caagaaagagauugucguu

SEQ ID NO: 1926047 - RNA, 19 nt, Homo sapiens
  misc_RNA (1)...(19): siRNA sense strand
gaagaaaggccuggagagu

SEQ ID NO: 1926048 - RNA, 19 nt, Homo sapiens
  misc_RNA (1)...(19): siRNA sense strand
ggccgagccaucccaauua

SEQ ID NO: 1926049 - RNA, 19 nt, Homo sapiens
  misc_RNA (1)...(19): siRNA sense strand
ggagauugaccuucugaga

SEQ ID NO: 1926050 - RNA, 19 nt, Homo sapiens
  misc_RNA (1)...(19): siRNA sense strand
gagcgagauuccucugguu

SEQ ID NO: 1926051 - RNA, 19 nt, Homo sapiens
  misc_RNA (1)...(19): siRNA sense strand
gagaaccacugugaaaguc

SEQ ID NO: 1926052 - RNA, 19 nt, Homo sapiens
  misc_RNA (1)...(19): siRNA sense strand
ggacguugcccagaagauu

SEQ ID NO: 1926053 - RNA, 19 nt, Homo sapiens
  misc_RNA (1)...(19): siRNA sense strand
ugaccuaucaucccaguuu

SEQ ID NO: 1926054 - RNA, 19 nt, Homo sapiens
  misc_RNA (1)...(19): siRNA sense strand
gacaugagcaguuuacaca

SEQ ID NO: 1926055 - RNA, 19 nt, Homo sapiens
  misc_RNA (1)...(19): siRNA sense strand
caucccaguuuacaugauu

SEQ ID NO: 1926056 - RNA, 19 nt, Homo sapiens
  misc_RNA (1)...(19): siRNA sense strand
ggagcgacccagacaaaga

SEQ ID NO: 1926057 - RNA, 19 nt, Homo sapiens
  misc_RNA (1)...(19): siRNA sense strand
caacaucuacuccaucuac

SEQ ID NO: 1926058 - RNA, 19 nt, Homo sapiens
  misc_RNA (1)...(19): siRNA sense strand
ugcagaauguucaugguaa

SEQ ID NO: 1926059 - RNA, 19 nt, Homo sapiens
  misc_RNA (1)...(19): siRNA sense strand
gcagaauguucaugguaag

SEQ ID NO: 1926060 - RNA, 19 nt, Homo sapiens
  misc_RNA (1)...(19): siRNA sense strand
cacaucagccagacaagua

SEQ ID NO: 1926061 - RNA, 19 nt, Homo sapiens
  misc_RNA (1)...(19): siRNA sense strand
guccggcacugcugaagaa

SEQ ID NO: 1926062 - RNA, 19 nt, Homo sapiens
  misc_RNA (1)...(19): siRNA sense strand
acaauggcgugcugaccua

SEQ ID NO: 1926063 - RNA, 19 nt, Homo sapiens
  misc_RNA (1)...(19): siRNA sense strand
uaaguuuccagaccguuua

SEQ ID NO: 1926064 - RNA, 19 nt, Homo sapiens
  misc_RNA (1)...(19): siRNA sense strand
gaaacaauaaccggaacaa

SEQ ID NO: 1926065 - RNA, 19 nt, Homo sapiens
  misc_RNA (1)...(19): siRNA sense strand
gcuguuauauuugucuuca

SEQ ID NO: 1926066 - RNA, 19 nt, Homo sapiens
  misc_RNA (1)...(19): siRNA sense strand
caugagcaguuuacacauc

SEQ ID NO: 1926067 - RNA, 19 nt, Homo sapiens
  misc_RNA (1)...(19): siRNA sense strand
gguggcagguucaagaaag

SEQ ID NO: 1926068 - RNA, 19 nt, Homo sapiens
  misc_RNA (1)...(19): siRNA sense strand
cggcacugcugaagaacaa

SEQ ID NO: 1926069 - RNA, 19 nt, Homo sapiens
  misc_RNA (1)...(19): siRNA sense strand
ggcaaaucguugaauaaag

SEQ ID NO: 1926070 - RNA, 19 nt, Homo sapiens
  misc_RNA (1)...(19): siRNA sense strand
aguggcaaaucguugaaua

SEQ ID NO: 1926071 - RNA, 19 nt, Homo sapiens
  misc_RNA (1)...(19): siRNA sense strand
cgaaguggcaaaucguuga

SEQ ID NO: 1926072 - RNA, 19 nt, Homo sapiens
  misc_RNA (1)...(19): siRNA sense strand
gaauggacgcugagucgau

SEQ ID NO: 1926073 - RNA, 19 nt, Homo sapiens
  misc_RNA (1)...(19): siRNA sense strand
gcacgucaucgccaucgaa

SEQ ID NO: 1926074 - RNA, 19 nt, Homo sapiens
  misc_RNA (1)...(19): siRNA sense strand
gaaauaugucacccugugu

SEQ ID NO: 1926075 - RNA, 19 nt, Homo sapiens
  misc_RNA (1)...(19): siRNA sense strand
guggguggacgcuguuaua

SEQ ID NO: 1926076 - RNA, 19 nt, Homo sapiens
  misc_RNA (1)...(19): siRNA sense strand
gcucaaagugggaauugug

SEQ ID NO: 1926077 - RNA, 19 nt, Homo sapiens
  misc_RNA (1)...(19): siRNA sense strand
gaacccaggaugccauaag

SEQ ID NO: 1926078 - RNA, 19 nt, Homo sapiens
  misc_RNA (1)...(19): siRNA sense strand
gggauccaccggaaucuug

SEQ ID NO: 1926079 - RNA, 19 nt, Homo sapiens
  misc_RNA (1)...(19): siRNA sense strand
uaucaucccaguuuacaug

SEQ ID NO: 1926080 - RNA, 19 nt, Homo sapiens
  misc_RNA (1)...(19): siRNA sense strand
gaaguggcaaaucguugaa

SEQ ID NO: 1926081 - RNA, 19 nt, Homo sapiens
  misc_RNA (1)...(19): siRNA sense strand
acagucgaauggccaacua

SEQ ID NO: 1926082 - RNA, 19 nt, Homo sapiens
  misc_RNA (1)...(19): siRNA sense strand
acacaucucacccaauuca

SEQ ID NO: 1926083 - RNA, 19 nt, Homo sapiens
  misc_RNA (1)...(19): siRNA sense strand
uggcaaaucguugaauaaa

SEQ ID NO: 1926084 - RNA, 19 nt, Homo sapiens
  misc_RNA (1)...(19): siRNA sense strand
gcacugcugaagaacaaga

SEQ ID NO: 1926085 - RNA, 19 nt, Homo sapiens
  misc_RNA (1)...(19): siRNA sense strand
guaccugacgggcacauau

SEQ ID NO: 1926086 - RNA, 19 nt, Homo sapiens
  misc_RNA (1)...(19): siRNA sense strand
ccagaccguuuaccacuac

SEQ ID NO: 1926087 - RNA, 19 nt, Homo sapiens
  misc_RNA (1)...(19): siRNA sense strand
ccacaagggaagagaagga

SEQ ID NO: 1926088 - RNA, 19 nt, Homo sapiens
  misc_RNA (1)...(19): siRNA sense strand
ggacugcgagacccagaau

SEQ ID NO: 1926089 - RNA, 19 nt, Homo sapiens
  misc_RNA (1)...(19): siRNA sense strand
gagagcagcaagaacaagu

SEQ ID NO: 1926090 - RNA, 19 nt, Homo sapiens
  misc_RNA (1)...(19): siRNA sense strand
gagcucaaagugggaauug

SEQ ID NO: 1926091 - RNA, 19 nt, Homo sapiens
  misc_RNA (1)...(19): siRNA sense strand
ucugagaaccacugugaaa

SEQ ID NO: 1926092 - RNA, 19 nt, Homo sapiens
  misc_RNA (1)...(19): siRNA sense strand
ggaguuuaagcgacuauuc

SEQ ID NO: 1926093 - RNA, 19 nt, Homo sapiens
  misc_RNA (1)...(19): siRNA sense strand
gcacaucagccagacaagu

SEQ ID NO: 1926094 - RNA, 19 nt, Homo sapiens
  misc_RNA (1)...(19): siRNA sense strand
cgagacgugugcuacauac

SEQ ID NO: 1926095 - RNA, 19 nt, Homo sapiens
  misc_RNA (1)...(19): siRNA sense strand
guaauggaggugggaguuu

SEQ ID NO: 1926096 - RNA, 19 nt, Homo sapiens
  misc_RNA (1)...(19): siRNA sense strand
aaucuuggcacccaccuuu

SEQ ID NO: 1926097 - RNA, 19 nt, Homo sapiens
  misc_RNA (1)...(19): siRNA sense strand
guggcaaaucguugaauaa

SEQ ID NO: 1926098 - RNA, 19 nt, Homo sapiens
  misc_RNA (1)...(19): siRNA sense strand
ggguggacgcuguuauauu

SEQ ID NO: 1926099 - RNA, 19 nt, Homo sapiens
  misc_RNA (1)...(19): siRNA sense strand
aacaauaaccggaacaaca

SEQ ID NO: 1926100 - RNA, 19 nt, Homo sapiens
  misc_RNA (1)...(19): siRNA sense strand
guggcagguucaagaaaga

SEQ ID NO: 1926101 - RNA, 19 nt, Homo sapiens
  misc_RNA (1)...(19): siRNA sense strand
cuuggaggaugaaauaagu

SEQ ID NO: 1926102 - RNA, 19 nt, Homo sapiens
  misc_RNA (1)...(19): siRNA sense strand
gcccucaugugcaucgaau

SEQ ID NO: 1926103 - RNA, 19 nt, Homo sapiens
  misc_RNA (1)...(19): siRNA sense strand
ccauggcccugcagucgau

SEQ ID NO: 1926104 - RNA, 19 nt, Homo sapiens
  misc_RNA (1)...(19): siRNA sense strand
caaggacaugagcaguuua

SEQ ID NO: 1926105 - RNA, 19 nt, Homo sapiens
  misc_RNA (1)...(19): siRNA sense strand
cgucaucgccaucgaagau

SEQ ID NO: 1926106 - RNA, 19 nt, Homo sapiens
  misc_RNA (1)...(19): siRNA sense strand
ugaaacggugcacguacua

SEQ ID NO: 1926107 - RNA, 19 nt, Homo sapiens
  misc_RNA (1)...(19): siRNA sense strand
gggaacccaggaugccaua

SEQ ID NO: 1926108 - RNA, 19 nt, Homo sapiens
  misc_RNA (1)...(19): siRNA sense strand
ugagaaccacugugaaagu

SEQ ID NO: 1926109 - RNA, 19 nt, Homo sapiens
  misc_RNA (1)...(19): siRNA sense strand
gggaauuguggguaacuug

SEQ ID NO: 1926110 - RNA, 19 nt, Homo sapiens
  misc_RNA (1)...(19): siRNA sense strand
gacguugcccagaagauug

SEQ ID NO: 1926111 - RNA, 19 nt, Homo sapiens
  misc_RNA (1)...(19): siRNA sense strand
ccaggacguugcccagaag

SEQ ID NO: 1926112 - RNA, 19 nt, Homo sapiens
  misc_RNA (1)...(19): siRNA sense strand
agagcuaucugcugcugau

SEQ ID NO: 1926113 - RNA, 19 nt, Homo sapiens
  misc_RNA (1)...(19): siRNA sense strand
ggacgcuguuauauuuguc

SEQ ID NO: 1926114 - RNA, 19 nt, Homo sapiens
  misc_RNA (1)...(19): siRNA sense strand
gguggauccgugccaagua

SEQ ID NO: 1926115 - RNA, 19 nt, Homo sapiens
  misc_RNA (1)...(19): siRNA sense strand
gagcgacccagacaaagag

SEQ ID NO: 1926116 - RNA, 19 nt, Homo sapiens
  misc_RNA (1)...(19): siRNA sense strand
gcucuccaacgaccugaaa

SEQ ID NO: 1926117 - RNA, 19 nt, Homo sapiens
  misc_RNA (1)...(19): siRNA sense strand
ccacuacuacagucgaaug

SEQ ID NO: 1926118 - RNA, 19 nt, Homo sapiens
  misc_RNA (1)...(19): siRNA sense strand
ccaacagcgucugggaaga

SEQ ID NO: 1926119 - RNA, 19 nt, Homo sapiens
  misc_RNA (1)...(19): siRNA sense strand
uccaggacguugcccagaa

SEQ ID NO: 1926120 - RNA, 19 nt, Homo sapiens
  misc_RNA (1)...(19): siRNA sense strand
guggauccgugccaaguac

SEQ ID NO: 1926121 - RNA, 19 nt, Homo sapiens
  misc_RNA (1)...(19): siRNA sense strand
gcacuagcaacuucaaagc

SEQ ID NO: 1926122 - RNA, 19 nt, Homo sapiens
  misc_RNA (1)...(19): siRNA sense strand
ggacaugagcaguuuacac

SEQ ID NO: 1926123 - RNA, 19 nt, Homo sapiens
  misc_RNA (1)...(19): siRNA sense strand
aagugggaauuguggguaa

SEQ ID NO: 1926124 - RNA, 19 nt, Homo sapiens
  misc_RNA (1)...(19): siRNA sense strand
cggccgagccaucccaauu

SEQ ID NO: 1926125 - RNA, 19 nt, Homo sapiens
  misc_RNA (1)...(19): siRNA sense strand
gaucucuggaccuggauga

SEQ ID NO: 1926126 - RNA, 19 nt, Homo sapiens
  misc_RNA (1)...(19): siRNA sense strand
gaacagugguccucucuuu

SEQ ID NO: 1926127 - RNA, 19 nt, Homo sapiens
  misc_RNA (1)...(19): siRNA sense strand
ccaaagaugucauugcuaa

SEQ ID NO: 1926128 - RNA, 19 nt, Homo sapiens
  misc_RNA (1)...(19): siRNA sense strand
cagcuaaucucacguagua

SEQ ID NO: 1926129 - RNA, 19 nt, Homo sapiens
  misc_RNA (1)...(19): siRNA sense strand
gaaagcaccucuugucucu

SEQ ID NO: 1926130 - RNA, 19 nt, Homo sapiens
  misc_RNA (1)...(19): siRNA sense strand
ggacucagauacccuuuga

SEQ ID NO: 1926131 - RNA, 19 nt, Homo sapiens
  misc_RNA (1)...(19): siRNA sense strand
ccaacgagaugacauuauu

SEQ ID NO: 1926132 - RNA, 19 nt, Homo sapiens
  misc_RNA (1)...(19): siRNA sense strand
gaucaucuuucccauuauu

SEQ ID NO: 1926133 - RNA, 19 nt, Homo sapiens
  misc_RNA (1)...(19): siRNA sense strand
caaagaguguccaggaauu

SEQ ID NO: 1926134 - RNA, 19 nt, Homo sapiens
  misc_RNA (1)...(19): siRNA sense strand
caaggaaauugaacuaaga

SEQ ID NO: 1926135 - RNA, 19 nt, Homo sapiens
  misc_RNA (1)...(19): siRNA sense strand
gaaagggacagauucauug

SEQ ID NO: 1926136 - RNA, 19 nt, Homo sapiens
  misc_RNA (1)...(19): siRNA sense strand
gaagcaggacuccguauuu

SEQ ID NO: 1926137 - RNA, 19 nt, Homo sapiens
  misc_RNA (1)...(19): siRNA sense strand
gcaaggaaauugaacuaag

SEQ ID NO: 1926138 - RNA, 19 nt, Homo sapiens
  misc_RNA (1)...(19): siRNA sense strand
caccuuaccuuaaaccuuu

SEQ ID NO: 1926139 - RNA, 19 nt, Homo sapiens
  misc_RNA (1)...(19): siRNA sense strand
gagaugacauuauuagaag

SEQ ID NO: 1926140 - RNA, 19 nt, Homo sapiens
  misc_RNA (1)...(19): siRNA sense strand
gaacaugaugcccaaauug

SEQ ID NO: 1926141 - RNA, 19 nt, Homo sapiens
  misc_RNA (1)...(19): siRNA sense strand
uaacuagaguaccaguaua

SEQ ID NO: 1926142 - RNA, 19 nt, Homo sapiens
  misc_RNA (1)...(19): siRNA sense strand
gaagaagauccaauaauuc

SEQ ID NO: 1926143 - RNA, 19 nt, Homo sapiens
  misc_RNA (1)...(19): siRNA sense strand
gaacguuuccucuucuaaa

SEQ ID NO: 1926144 - RNA, 19 nt, Homo sapiens
  misc_RNA (1)...(19): siRNA sense strand
cagauuaugucccuuaugu

SEQ ID NO: 1926145 - RNA, 19 nt, Homo sapiens
  misc_RNA (1)...(19): siRNA sense strand
ggacaguggugauguuaag

SEQ ID NO: 1926146 - RNA, 19 nt, Homo sapiens
  misc_RNA (1)...(19): siRNA sense strand
ccaagacuccuguaaguaa

SEQ ID NO: 1926147 - RNA, 19 nt, Homo sapiens
  misc_RNA (1)...(19): siRNA sense strand
gaagaaagugggaaagguu

SEQ ID NO: 1926148 - RNA, 19 nt, Homo sapiens
  misc_RNA (1)...(19): siRNA sense strand
gaacaggugacccagcuaa

SEQ ID NO: 1926149 - RNA, 19 nt, Homo sapiens
  misc_RNA (1)...(19): siRNA sense strand
gaaauggagagguaaagaa

SEQ ID NO: 1926150 - RNA, 19 nt, Homo sapiens
  misc_RNA (1)...(19): siRNA sense strand
agggacagauucauuguua

SEQ ID NO: 1926151 - RNA, 19 nt, Homo sapiens
  misc_RNA (1)...(19): siRNA sense strand
caaaugcuguguuaaugga

SEQ ID NO: 1926152 - RNA, 19 nt, Homo sapiens
  misc_RNA (1)...(19): siRNA sense strand
gaucuucccguacagguua

SEQ ID NO: 1926153 - RNA, 19 nt, Homo sapiens
  misc_RNA (1)...(19): siRNA sense strand
gagacuagaaccaagauuu

SEQ ID NO: 1926154 - RNA, 19 nt, Homo sapiens
  misc_RNA (1)...(19): siRNA sense strand
gaaguggaauucccuggau

SEQ ID NO: 1926155 - RNA, 19 nt, Homo sapiens
  misc_RNA (1)...(19): siRNA sense strand
ugauuuaucuggucauaga

SEQ ID NO: 1926156 - RNA, 19 nt, Homo sapiens
  misc_RNA (1)...(19): siRNA sense strand
cgacuaagcccaucagugu

SEQ ID NO: 1926157 - RNA, 19 nt, Homo sapiens
  misc_RNA (1)...(19): siRNA sense strand
aaagaucaaugccacugua

SEQ ID NO: 1926158 - RNA, 19 nt, Homo sapiens
  misc_RNA (1)...(19): siRNA sense strand
acuaagaaauggagaggua

SEQ ID NO: 1926159 - RNA, 19 nt, Homo sapiens
  misc_RNA (1)...(19): siRNA sense strand
gaauguaugcuccugugua

SEQ ID NO: 1926160 - RNA, 19 nt, Homo sapiens
  misc_RNA (1)...(19): siRNA sense strand
gauccaauaauucccuuua

SEQ ID NO: 1926161 - RNA, 19 nt, Homo sapiens
  misc_RNA (1)...(19): siRNA sense strand
gaucaaugccacuguaaga

SEQ ID NO: 1926162 - RNA, 19 nt, Homo sapiens
  misc_RNA (1)...(19): siRNA sense strand
accauaggcuccuguauaa

SEQ ID NO: 1926163 - RNA, 19 nt, Homo sapiens
  misc_RNA (1)...(19): siRNA sense strand
gcacucaucugucuaucag

SEQ ID NO: 1926164 - RNA, 19 nt, Homo sapiens
  misc_RNA (1)...(19): siRNA sense strand
ugacccagcuaacuuaaau

SEQ ID NO: 1926165 - RNA, 19 nt, Homo sapiens
  misc_RNA (1)...(19): siRNA sense strand
caacgagaugacauuauua

SEQ ID NO: 1926166 - RNA, 19 nt, Homo sapiens
  misc_RNA (1)...(19): siRNA sense strand
gcugggcccucuaauguug

SEQ ID NO: 1926167 - RNA, 19 nt, Homo sapiens
  misc_RNA (1)...(19): siRNA sense strand
guacaaacggaauuucaaa

SEQ ID NO: 1926168 - RNA, 19 nt, Homo sapiens
  misc_RNA (1)...(19): siRNA sense strand
aggaagagcuugaaaagua

SEQ ID NO: 1926169 - RNA, 19 nt, Homo sapiens
  misc_RNA (1)...(19): siRNA sense strand
cgagaugacauuauuagaa

SEQ ID NO: 1926170 - RNA, 19 nt, Homo sapiens
  misc_RNA (1)...(19): siRNA sense strand
caccauaggcuccuguaua

SEQ ID NO: 1926171 - RNA, 19 nt, Homo sapiens
  misc_RNA (1)...(19): siRNA sense strand
ccaaacagcaaauacaaga

SEQ ID NO: 1926172 - RNA, 19 nt, Homo sapiens
  misc_RNA (1)...(19): siRNA sense strand
gcaaagaguguccaggaau

SEQ ID NO: 1926173 - RNA, 19 nt, Homo sapiens
  misc_RNA (1)...(19): siRNA sense strand
gccgucaccuuaccuuaaa

SEQ ID NO: 1926174 - RNA, 19 nt, Homo sapiens
  misc_RNA (1)...(19): siRNA sense strand
auaauucccuuuagugaug

SEQ ID NO: 1926175 - RNA, 19 nt, Homo sapiens
  misc_RNA (1)...(19): siRNA sense strand
guucugcccucucaaggaa

SEQ ID NO: 1926176 - RNA, 19 nt, Homo sapiens
  misc_RNA (1)...(19): siRNA sense strand
caacgaggccacaucauca

SEQ ID NO: 1926177 - RNA, 19 nt, Homo sapiens
  misc_RNA (1)...(19): siRNA sense strand
caauaauucccuuuaguga

SEQ ID NO: 1926178 - RNA, 19 nt, Homo sapiens
  misc_RNA (1)...(19): siRNA sense strand
aaacaaguauuggucaugu

SEQ ID NO: 1926179 - RNA, 19 nt, Homo sapiens
  misc_RNA (1)...(19): siRNA sense strand
aaucacacaugcagucuau

SEQ ID NO: 1926180 - RNA, 19 nt, Homo sapiens
  misc_RNA (1)...(19): siRNA sense strand
agagagaggccaaugcuuu

SEQ ID NO: 1926181 - RNA, 19 nt, Homo sapiens
  misc_RNA (1)...(19): siRNA sense strand
gagcaacucauuacuucuu

SEQ ID NO: 1926182 - RNA, 19 nt, Homo sapiens
  misc_RNA (1)...(19): siRNA sense strand
aagagcaacucauuacuuc

SEQ ID NO: 1926183 - RNA, 19 nt, Homo sapiens
  misc_RNA (1)...(19): siRNA sense strand
caagagcaacucauuacuu

SEQ ID NO: 1926184 - RNA, 19 nt, Homo sapiens
  misc_RNA (1)...(19): siRNA sense strand
cauaggaaguacugaaaca

SEQ ID NO: 1926185 - RNA, 19 nt, Homo sapiens
  misc_RNA (1)...(19): siRNA sense strand
caacuacuguaucgagcuu

SEQ ID NO: 1926186 - RNA, 19 nt, Homo sapiens
  misc_RNA (1)...(19): siRNA sense strand
cguuuccucuucuaaauaa

SEQ ID NO: 1926187 - RNA, 19 nt, Homo sapiens
  misc_RNA (1)...(19): siRNA sense strand
gcaaauacaagacuagcau

SEQ ID NO: 1926188 - RNA, 19 nt, Homo sapiens
  misc_RNA (1)...(19): siRNA sense strand
gcuacagucuccagaguca

SEQ ID NO: 1926189 - RNA, 19 nt, Homo sapiens
  misc_RNA (1)...(19): siRNA sense strand
ggaggaauuucggaguuau

SEQ ID NO: 1926190 - RNA, 19 nt, Homo sapiens
  misc_RNA (1)...(19): siRNA sense strand
gagagaggccaaugcuuug

SEQ ID NO: 1926191 - RNA, 19 nt, Homo sapiens
  misc_RNA (1)...(19): siRNA sense strand
ucggaguuaugaagcauua

SEQ ID NO: 1926192 - RNA, 19 nt, Homo sapiens
  misc_RNA (1)...(19): siRNA sense strand
agaacaugaugcccaaauu

SEQ ID NO: 1926193 - RNA, 19 nt, Homo sapiens
  misc_RNA (1)...(19): siRNA sense strand
ccuuucggcuucaugcuua

SEQ ID NO: 1926194 - RNA, 19 nt, Homo sapiens
  misc_RNA (1)...(19): siRNA sense strand
acagauucauuguuacuga

SEQ ID NO: 1926195 - RNA, 19 nt, Homo sapiens
  misc_RNA (1)...(19): siRNA sense strand
gcaacgaggccacaucauc

SEQ ID NO: 1926196 - RNA, 19 nt, Homo sapiens
  misc_RNA (1)...(19): siRNA sense strand
gauuaugucccuuauguca

SEQ ID NO: 1926197 - RNA, 19 nt, Homo sapiens
  misc_RNA (1)...(19): siRNA sense strand
ccaucaguguaucagauua

SEQ ID NO: 1926198 - RNA, 19 nt, Homo sapiens
  misc_RNA (1)...(19): siRNA sense strand
gcaauucuuuaccuccaau

SEQ ID NO: 1926199 - RNA, 19 nt, Homo sapiens
  misc_RNA (1)...(19): siRNA sense strand
caagacuccuguaaguaau

SEQ ID NO: 1926200 - RNA, 19 nt, Homo sapiens
  misc_RNA (1)...(19): siRNA sense strand
ccagcuaacuuaaauagac

SEQ ID NO: 1926201 - RNA, 19 nt, Homo sapiens
  misc_RNA (1)...(19): siRNA sense strand
ggaagcaggacuccguauu

SEQ ID NO: 1926202 - RNA, 19 nt, Homo sapiens
  misc_RNA (1)...(19): siRNA sense strand
gggaaagguuggcgcuaau

SEQ ID NO: 1926203 - RNA, 19 nt, Homo sapiens
  misc_RNA (1)...(19): siRNA sense strand
uaucagauuaugucccuua

SEQ ID NO: 1926204 - RNA, 19 nt, Homo sapiens
  misc_RNA (1)...(19): siRNA sense strand
gcacaguaccacacucaga

SEQ ID NO: 1926205 - RNA, 19 nt, Homo sapiens
  misc_RNA (1)...(19): siRNA sense strand
ugccauaugccgaucauua

SEQ ID NO: 1926206 - RNA, 19 nt, Homo sapiens
  misc_RNA (1)...(19): siRNA sense strand
ucagauacccuuugaaguc

SEQ ID NO: 1926207 - RNA, 19 nt, Homo sapiens
  misc_RNA (1)...(19): siRNA sense strand
cacaugcagucuaucauug

SEQ ID NO: 1926208 - RNA, 19 nt, Homo sapiens
  misc_RNA (1)...(19): siRNA sense strand
ggccaagagcaacucauua

SEQ ID NO: 1926209 - RNA, 19 nt, Homo sapiens
  misc_RNA (1)...(19): siRNA sense strand
cauaggcuccuguauaaau

SEQ ID NO: 1926210 - RNA, 19 nt, Homo sapiens
  misc_RNA (1)...(19): siRNA sense strand
ugucauuucugucauagga

SEQ ID NO: 1926211 - RNA, 19 nt, Homo sapiens
  misc_RNA (1)...(19): siRNA sense strand
ggaaccuuguggucauuug

SEQ ID NO: 1926212 - RNA, 19 nt, Homo sapiens
  misc_RNA (1)...(19): siRNA sense strand
gcagagacuagaaccaaga

SEQ ID NO: 1926213 - RNA, 19 nt, Homo sapiens
  misc_RNA (1)...(19): siRNA sense strand
guaucgagcuucuuguuuu

SEQ ID NO: 1926214 - RNA, 19 nt, Homo sapiens
  misc_RNA (1)...(19): siRNA sense strand
ggagagguaaagaaacuga

SEQ ID NO: 1926215 - RNA, 19 nt, Homo sapiens
  misc_RNA (1)...(19): siRNA sense strand
cauagaaagcauuccagua

SEQ ID NO: 1926216 - RNA, 19 nt, Homo sapiens
  misc_RNA (1)...(19): siRNA sense strand
ccaauaauucccuuuagug

SEQ ID NO: 1926217 - RNA, 19 nt, Homo sapiens
  misc_RNA (1)...(19): siRNA sense strand
gcccaaagaugucauugcu

SEQ ID NO: 1926218 - RNA, 19 nt, Homo sapiens
  misc_RNA (1)...(19): siRNA sense strand
cagcugggcccucuaaugu

SEQ ID NO: 1926219 - RNA, 19 nt, Homo sapiens
  misc_RNA (1)...(19): siRNA sense strand
gcaaacauagacccuaauc

SEQ ID NO: 1926220 - RNA, 19 nt, Homo sapiens
  misc_RNA (1)...(19): siRNA sense strand
auuuagagcuucuugcaaa

SEQ ID NO: 1926221 - RNA, 19 nt, Homo sapiens
  misc_RNA (1)...(19): siRNA sense strand
gcccaaauuguucauauug

SEQ ID NO: 1926222 - RNA, 19 nt, Homo sapiens
  misc_RNA (1)...(19): siRNA sense strand
caaggaaaguucugguacu

SEQ ID NO: 1926223 - RNA, 19 nt, Homo sapiens
  misc_RNA (1)...(19): siRNA sense strand
ucagagagugugaguggua

SEQ ID NO: 1926224 - RNA, 19 nt, Homo sapiens
  misc_RNA (1)...(19): siRNA sense strand
gaggagcagauaagaagaa

SEQ ID NO: 1926225 - RNA, 19 nt, Homo sapiens
  misc_RNA (1)...(19): siRNA sense strand
ggacaacugugccuuuacc

SEQ ID NO: 1926226 - RNA, 19 nt, Homo sapiens
  misc_RNA (1)...(19): siRNA sense strand
gaagagauccuuugacaga

SEQ ID NO: 1926227 - RNA, 19 nt, Homo sapiens
  misc_RNA (1)...(19): siRNA sense strand
ggaagagccucgaggugua

SEQ ID NO: 1926228 - RNA, 19 nt, Homo sapiens
  misc_RNA (1)...(19): siRNA sense strand
caaccgcucugccaucuuu

SEQ ID NO: 1926229 - RNA, 19 nt, Homo sapiens
  misc_RNA (1)...(19): siRNA sense strand
gggaagagauccuuugaca

SEQ ID NO: 1926230 - RNA, 19 nt, Homo sapiens
  misc_RNA (1)...(19): siRNA sense strand
ccauguaccuagaugagua

SEQ ID NO: 1926231 - RNA, 19 nt, Homo sapiens
  misc_RNA (1)...(19): siRNA sense strand
cagaugaggugcugcaguu

SEQ ID NO: 1926232 - RNA, 19 nt, Homo sapiens
  misc_RNA (1)...(19): siRNA sense strand
caacaccuaucaccgaaau

SEQ ID NO: 1926233 - RNA, 19 nt, Homo sapiens
  misc_RNA (1)...(19): siRNA sense strand
guaccgagaccgccucuuu

SEQ ID NO: 1926234 - RNA, 19 nt, Homo sapiens
  misc_RNA (1)...(19): siRNA sense strand
gaacaaauggagcacuuuc

SEQ ID NO: 1926235 - RNA, 19 nt, Homo sapiens
  misc_RNA (1)...(19): siRNA sense strand
gaaauggagaucucuguca

SEQ ID NO: 1926236 - RNA, 19 nt, Homo sapiens
  misc_RNA (1)...(19): siRNA sense strand
gagcuaggcaagaagauga

SEQ ID NO: 1926237 - RNA, 19 nt, Homo sapiens
  misc_RNA (1)...(19): siRNA sense strand
ggaggaguguguucgaaag

SEQ ID NO: 1926238 - RNA, 19 nt, Homo sapiens
  misc_RNA (1)...(19): siRNA sense strand
gugaacaaauggagcacuu

SEQ ID NO: 1926239 - RNA, 19 nt, Homo sapiens
  misc_RNA (1)...(19): siRNA sense strand
gaugggaccuacgauguca

SEQ ID NO: 1926240 - RNA, 19 nt, Homo sapiens
  misc_RNA (1)...(19): siRNA sense strand
aaauggagaucucugucaa

SEQ ID NO: 1926241 - RNA, 19 nt, Homo sapiens
  misc_RNA (1)...(19): siRNA sense strand
gaccaggcauggccagauc

SEQ ID NO: 1926242 - RNA, 19 nt, Homo sapiens
  misc_RNA (1)...(19): siRNA sense strand
gaggagcuccagguguuua

SEQ ID NO: 1926243 - RNA, 19 nt, Homo sapiens
  misc_RNA (1)...(19): siRNA sense strand
ggagaucucugucaaaagg

SEQ ID NO: 1926244 - RNA, 19 nt, Homo sapiens
  misc_RNA (1)...(19): siRNA sense strand
caaccggacccaccugcua

SEQ ID NO: 1926245 - RNA, 19 nt, Homo sapiens
  misc_RNA (1)...(19): siRNA sense strand
caagguguacuucuucuuc

SEQ ID NO: 1926246 - RNA, 19 nt, Homo sapiens
  misc_RNA (1)...(19): siRNA sense strand
gcaccaaugugagacuuac

SEQ ID NO: 1926247 - RNA, 19 nt, Homo sapiens
  misc_RNA (1)...(19): siRNA sense strand
gcucgaaccaugucacugu

SEQ ID NO: 1926248 - RNA, 19 nt, Homo sapiens
  misc_RNA (1)...(19): siRNA sense strand
gaugaggugcugcaguuug

SEQ ID NO: 1926249 - RNA, 19 nt, Homo sapiens
  misc_RNA (1)...(19): siRNA sense strand
gaagaggcagugggacuug

SEQ ID NO: 1926250 - RNA, 19 nt, Homo sapiens
  misc_RNA (1)...(19): siRNA sense strand
ggucugugcucaaagucau

SEQ ID NO: 1926251 - RNA, 19 nt, Homo sapiens
  misc_RNA (1)...(19): siRNA sense strand
ugacagagugcgccaacuu

SEQ ID NO: 1926252 - RNA, 19 nt, Homo sapiens
  misc_RNA (1)...(19): siRNA sense strand
cagcugaaccugaggaagu

SEQ ID NO: 1926253 - RNA, 19 nt, Homo sapiens
  misc_RNA (1)...(19): siRNA sense strand
gggaggaguguguucgaaa

SEQ ID NO: 1926254 - RNA, 19 nt, Homo sapiens
  misc_RNA (1)...(19): siRNA sense strand
ccucacagcuggacaaccu

SEQ ID NO: 1926255 - RNA, 19 nt, Homo sapiens
  misc_RNA (1)...(19): siRNA sense strand
ccaaggacuacccagauga

SEQ ID NO: 1926256 - RNA, 19 nt, Homo sapiens
  misc_RNA (1)...(19): siRNA sense strand
ugacaagguguacuucuuc

SEQ ID NO: 1926257 - RNA, 19 nt, Homo sapiens
  misc_RNA (1)...(19): siRNA sense strand
gacccacuuugaccagcua

SEQ ID NO: 1926258 - RNA, 19 nt, Homo sapiens
  misc_RNA (1)...(19): siRNA sense strand
gugccgagacccacuuuga

SEQ ID NO: 1926259 - RNA, 19 nt, Homo sapiens
  misc_RNA (1)...(19): siRNA sense strand
gacaagguguacuucuucu

SEQ ID NO: 1926260 - RNA, 19 nt, Homo sapiens
  misc_RNA (1)...(19): siRNA sense strand
acucugaccaggacaauga

SEQ ID NO: 1926261 - RNA, 19 nt, Homo sapiens
  misc_RNA (1)...(19): siRNA sense strand
ggcuggagcuaggcaagaa

SEQ ID NO: 1926262 - RNA, 19 nt, Homo sapiens
  misc_RNA (1)...(19): siRNA sense strand
ggacauccugcagcucauu

SEQ ID NO: 1926263 - RNA, 19 nt, Homo sapiens
  misc_RNA (1)...(19): siRNA sense strand
aaaggcaaaugcuauacgu

SEQ ID NO: 1926264 - RNA, 19 nt, Homo sapiens
  misc_RNA (1)...(19): siRNA sense strand
gaccuacgaugucauuuuc

SEQ ID NO: 1926265 - RNA, 19 nt, Homo sapiens
  misc_RNA (1)...(19): siRNA sense strand
cagggucugugcucaaagu

SEQ ID NO: 1926266 - RNA, 19 nt, Homo sapiens
  misc_RNA (1)...(19): siRNA sense strand
gggucucacugcugacuuc

SEQ ID NO: 1926267 - RNA, 19 nt, Homo sapiens
  misc_RNA (1)...(19): siRNA sense strand
acaaugacaagguguacuu

SEQ ID NO: 1926268 - RNA, 19 nt, Homo sapiens
  misc_RNA (1)...(19): siRNA sense strand
ggcgagaggccaugaucuu

SEQ ID NO: 1926269 - RNA, 19 nt, Homo sapiens
  misc_RNA (1)...(19): siRNA sense strand
gaacucugaccaggacaau

SEQ ID NO: 1926270 - RNA, 19 nt, Homo sapiens
  misc_RNA (1)...(19): siRNA sense strand
ggaccuacgaugucauuuu

SEQ ID NO: 1926271 - RNA, 19 nt, Homo sapiens
  misc_RNA (1)...(19): siRNA sense strand
ucaaaaggcaaaugcuaua

SEQ ID NO: 1926272 - RNA, 19 nt, Homo sapiens
  misc_RNA (1)...(19): siRNA sense strand
ucaccgaaauggagaucuc

SEQ ID NO: 1926273 - RNA, 19 nt, Homo sapiens
  misc_RNA (1)...(19): siRNA sense strand
ccagcuagaggauguguuc

SEQ ID NO: 1926274 - RNA, 19 nt, Homo sapiens
  misc_RNA (1)...(19): siRNA sense strand
agagauccuuugacagagu

SEQ ID NO: 1926275 - RNA, 19 nt, Homo sapiens
  misc_RNA (1)...(19): siRNA sense strand
caccgucagugccguguuc

SEQ ID NO: 1926276 - RNA, 19 nt, Homo sapiens
  misc_RNA (1)...(19): siRNA sense strand
gaaccuccaggccauguac

SEQ ID NO: 1926277 - RNA, 19 nt, Homo sapiens
  misc_RNA (1)...(19): siRNA sense strand
ggagcuaggcaagaagaug

SEQ ID NO: 1926278 - RNA, 19 nt, Homo sapiens
  misc_RNA (1)...(19): siRNA sense strand
uggagugccugcccaaguc

SEQ ID NO: 1926279 - RNA, 19 nt, Homo sapiens
  misc_RNA (1)...(19): siRNA sense strand
gccaaccgcucugccaucu

SEQ ID NO: 1926280 - RNA, 19 nt, Homo sapiens
  misc_RNA (1)...(19): siRNA sense strand
gacagagugcgccaacuuc

SEQ ID NO: 1926281 - RNA, 19 nt, Homo sapiens
  misc_RNA (1)...(19): siRNA sense strand
gggugcuggugaacaaaug

SEQ ID NO: 1926282 - RNA, 19 nt, Homo sapiens
  misc_RNA (1)...(19): siRNA sense strand
ggaugggaccuacgauguc

SEQ ID NO: 1926283 - RNA, 19 nt, Homo sapiens
  misc_RNA (1)...(19): siRNA sense strand
gagccuggcaguguggaaa

SEQ ID NO: 1926284 - RNA, 19 nt, Homo sapiens
  misc_RNA (1)...(19): siRNA sense strand
gcgagaggccaugaucuuc

SEQ ID NO: 1926285 - RNA, 19 nt, Homo sapiens
  misc_RNA (1)...(19): siRNA sense strand
ggacaaugacaagguguac

SEQ ID NO: 1926286 - RNA, 19 nt, Homo sapiens
  misc_RNA (1)...(19): siRNA sense strand
gacggacgagcgagucuug

SEQ ID NO: 1926287 - RNA, 19 nt, Homo sapiens
  misc_RNA (1)...(19): siRNA sense strand
gacagagggaggagugugu

SEQ ID NO: 1926288 - RNA, 19 nt, Homo sapiens
  misc_RNA (1)...(19): siRNA sense strand
cccagcagcuacaccagau

SEQ ID NO: 1926289 - RNA, 19 nt, Homo sapiens
  misc_RNA (1)...(19): siRNA sense strand
ggguggaugaguacuguga

SEQ ID NO: 1926290 - RNA, 19 nt, Homo sapiens
  misc_RNA (1)...(19): siRNA sense strand
augacaagguguacuucuu

SEQ ID NO: 1926291 - RNA, 19 nt, Homo sapiens
  misc_RNA (1)...(19): siRNA sense strand
caacuucgugcgggugcua

SEQ ID NO: 1926292 - RNA, 19 nt, Homo sapiens
  misc_RNA (1)...(19): siRNA sense strand
gccagagccaggaagaaga

SEQ ID NO: 1926293 - RNA, 19 nt, Homo sapiens
  misc_RNA (1)...(19): siRNA sense strand
accaaggacuacccagaug

SEQ ID NO: 1926294 - RNA, 19 nt, Homo sapiens
  misc_RNA (1)...(19): siRNA sense strand
caccaaggacuacccagau

SEQ ID NO: 1926295 - RNA, 19 nt, Homo sapiens
  misc_RNA (1)...(19): siRNA sense strand
gaagagccucgagguguac

SEQ ID NO: 1926296 - RNA, 19 nt, Homo sapiens
  misc_RNA (1)...(19): siRNA sense strand
ggaccaggcauggccagau

SEQ ID NO: 1926297 - RNA, 19 nt, Homo sapiens
  misc_RNA (1)...(19): siRNA sense strand
gggcauaugagguuuauua

SEQ ID NO: 1926298 - RNA, 19 nt, Homo sapiens
  misc_RNA (1)...(19): siRNA sense strand
gaacccaauucuccuauuc

SEQ ID NO: 1926299 - RNA, 19 nt, Homo sapiens
  misc_RNA (1)...(19): siRNA sense strand
gaacuucuuuacugauguu

SEQ ID NO: 1926300 - RNA, 19 nt, Homo sapiens
  misc_RNA (1)...(19): siRNA sense strand
gaacaacauguacuugaaa

SEQ ID NO: 1926301 - RNA, 19 nt, Homo sapiens
  misc_RNA (1)...(19): siRNA sense strand
acaagaagauggaauaaag

SEQ ID NO: 1926302 - RNA, 19 nt, Homo sapiens
  misc_RNA (1)...(19): siRNA sense strand
gagcuucuacuuuguaauu

SEQ ID NO: 1926303 - RNA, 19 nt, Homo sapiens
  misc_RNA (1)...(19): siRNA sense strand
cgaacaacauguacuugaa

SEQ ID NO: 1926304 - RNA, 19 nt, Homo sapiens
  misc_RNA (1)...(19): siRNA sense strand
caagugcauuugacagaaa

SEQ ID NO: 1926305 - RNA, 19 nt, Homo sapiens
  misc_RNA (1)...(19): siRNA sense strand
gagaacauguggcuaucga

SEQ ID NO: 1926306 - RNA, 19 nt, Homo sapiens
  misc_RNA (1)...(19): siRNA sense strand
gaugagaacauguggcuau

SEQ ID NO: 1926307 - RNA, 19 nt, Homo sapiens
  misc_RNA (1)...(19): siRNA sense strand
ucugggagcuucuacuuug

SEQ ID NO: 1926308 - RNA, 19 nt, Homo sapiens
  misc_RNA (1)...(19): siRNA sense strand
gaagauggaauaaagaacu

SEQ ID NO: 1926309 - RNA, 19 nt, Homo sapiens
  misc_RNA (1)...(19): siRNA sense strand
gggagcuucuacuuuguaa

SEQ ID NO: 1926310 - RNA, 19 nt, Homo sapiens
  misc_RNA (1)...(19): siRNA sense strand
ugacauaagacaagaagau

SEQ ID NO: 1926311 - RNA, 19 nt, Homo sapiens
  misc_RNA (1)...(19): siRNA sense strand
caagaagauggaauaaaga

SEQ ID NO: 1926312 - RNA, 19 nt, Homo sapiens
  misc_RNA (1)...(19): siRNA sense strand
ccucguagaugagaacaug

SEQ ID NO: 1926313 - RNA, 19 nt, Homo sapiens
  misc_RNA (1)...(19): siRNA sense strand
gacaagaagauggaauaaa

SEQ ID NO: 1926314 - RNA, 19 nt, Homo sapiens
  misc_RNA (1)...(19): siRNA sense strand
ggaaggcagaauccaaaga

SEQ ID NO: 1926315 - RNA, 19 nt, Homo sapiens
  misc_RNA (1)...(19): siRNA sense strand
aagacaagaagauggaaua

SEQ ID NO: 1926316 - RNA, 19 nt, Homo sapiens
  misc_RNA (1)...(19): siRNA sense strand
gguuuauuaugcuucauga

SEQ ID NO: 1926317 - RNA, 19 nt, Homo sapiens
  misc_RNA (1)...(19): siRNA sense strand
acauguggcuaucgaacaa

SEQ ID NO: 1926318 - RNA, 19 nt, Homo sapiens
  misc_RNA (1)...(19): siRNA sense strand
ccaccaugauaauccaguu

SEQ ID NO: 1926319 - RNA, 19 nt, Homo sapiens
  misc_RNA (1)...(19): siRNA sense strand
cauaagacaagaagaugga

SEQ ID NO: 1926320 - RNA, 19 nt, Homo sapiens
  misc_RNA (1)...(19): siRNA sense strand
gaaggcagaauccaaagac

SEQ ID NO: 1926321 - RNA, 19 nt, Homo sapiens
  misc_RNA (1)...(19): siRNA sense strand
ugaacccaauucuccuauu

SEQ ID NO: 1926322 - RNA, 19 nt, Homo sapiens
  misc_RNA (1)...(19): siRNA sense strand
caaguucaacgagugguuu

SEQ ID NO: 1926323 - RNA, 19 nt, Homo sapiens
  misc_RNA (1)...(19): siRNA sense strand
ccuauucgaucaagugcau

SEQ ID NO: 1926324 - RNA, 19 nt, Homo sapiens
  misc_RNA (1)...(19): siRNA sense strand
gacauaagacaagaagaug

SEQ ID NO: 1926325 - RNA, 19 nt, Homo sapiens
  misc_RNA (1)...(19): siRNA sense strand
gcuucuacuuuguaauugu

SEQ ID NO: 1926326 - RNA, 19 nt, Homo sapiens
  misc_RNA (1)...(19): siRNA sense strand
gggaagaaacaccuuuuaa

SEQ ID NO: 1926327 - RNA, 19 nt, Homo sapiens
  misc_RNA (1)...(19): siRNA sense strand
ugacagaaaaguucaguuu

SEQ ID NO: 1926328 - RNA, 19 nt, Homo sapiens
  misc_RNA (1)...(19): siRNA sense strand
ugagguuuauuaugcuuca

SEQ ID NO: 1926329 - RNA, 19 nt, Homo sapiens
  misc_RNA (1)...(19): siRNA sense strand
caauucuccuauucgauca

SEQ ID NO: 1926330 - RNA, 19 nt, Homo sapiens
  misc_RNA (1)...(19): siRNA sense strand
uaucgaacaacauguacuu

SEQ ID NO: 1926331 - RNA, 19 nt, Homo sapiens
  misc_RNA (1)...(19): siRNA sense strand
gaagaaacaccuuuuaagc

SEQ ID NO: 1926332 - RNA, 19 nt, Homo sapiens
  misc_RNA (1)...(19): siRNA sense strand
ggaagaaacaccuuuuaag

SEQ ID NO: 1926333 - RNA, 19 nt, Homo sapiens
  misc_RNA (1)...(19): siRNA sense strand
agacaagaagauggaauaa

SEQ ID NO: 1926334 - RNA, 19 nt, Homo sapiens
  misc_RNA (1)...(19): siRNA sense strand
ucgaacaacauguacuuga

SEQ ID NO: 1926335 - RNA, 19 nt, Homo sapiens
  misc_RNA (1)...(19): siRNA sense strand
ggcuaucgaacaacaugua

SEQ ID NO: 1926336 - RNA, 19 nt, Homo sapiens
  misc_RNA (1)...(19): siRNA sense strand
ugggaaggcagaauccaaa

SEQ ID NO: 1926337 - RNA, 19 nt, Homo sapiens
  misc_RNA (1)...(19): siRNA sense strand
ggcauaugagguuuauuau

SEQ ID NO: 1926338 - RNA, 19 nt, Homo sapiens
  misc_RNA (1)...(19): siRNA sense strand
uaugaacccaauucuccua

SEQ ID NO: 1926339 - RNA, 19 nt, Homo sapiens
  misc_RNA (1)...(19): siRNA sense strand
caacagagguuuucaauua

SEQ ID NO: 1926340 - RNA, 19 nt, Homo sapiens
  misc_RNA (1)...(19): siRNA sense strand
ggacgaggcucuucagauu

SEQ ID NO: 1926341 - RNA, 19 nt, Homo sapiens
  misc_RNA (1)...(19): siRNA sense strand
gaaacuaaaucaucuagga

SEQ ID NO: 1926342 - RNA, 19 nt, Homo sapiens
  misc_RNA (1)...(19): siRNA sense strand
caaaggugcuuacuucauu

SEQ ID NO: 1926343 - RNA, 19 nt, Homo sapiens
  misc_RNA (1)...(19): siRNA sense strand
ggagcgaugugauaaguuu

SEQ ID NO: 1926344 - RNA, 19 nt, Homo sapiens
  misc_RNA (1)...(19): siRNA sense strand
gaaaccauauccuaguaaa

SEQ ID NO: 1926345 - RNA, 19 nt, Homo sapiens
  misc_RNA (1)...(19): siRNA sense strand
gaagguauauuugcaugaa

SEQ ID NO: 1926346 - RNA, 19 nt, Homo sapiens
  misc_RNA (1)...(19): siRNA sense strand
cuacaaaggugcuuacuuc

SEQ ID NO: 1926347 - RNA, 19 nt, Homo sapiens
  misc_RNA (1)...(19): siRNA sense strand
acagagauuuggagaauaa

SEQ ID NO: 1926348 - RNA, 19 nt, Homo sapiens
  misc_RNA (1)...(19): siRNA sense strand
gcaaggaguuacugaagga

SEQ ID NO: 1926349 - RNA, 19 nt, Homo sapiens
  misc_RNA (1)...(19): siRNA sense strand
ggacuggacucuugaagca

SEQ ID NO: 1926350 - RNA, 19 nt, Homo sapiens
  misc_RNA (1)...(19): siRNA sense strand
ccuaugagcugcauuugaa

SEQ ID NO: 1926351 - RNA, 19 nt, Homo sapiens
  misc_RNA (1)...(19): siRNA sense strand
ucacaagccuucuguacuu

SEQ ID NO: 1926352 - RNA, 19 nt, Homo sapiens
  misc_RNA (1)...(19): siRNA sense strand
gaaagaaagugagauaucg

SEQ ID NO: 1926353 - RNA, 19 nt, Homo sapiens
  misc_RNA (1)...(19): siRNA sense strand
gaaguugccuauggauuau

SEQ ID NO: 1926354 - RNA, 19 nt, Homo sapiens
  misc_RNA (1)...(19): siRNA sense strand
agaauaagcuuagaucugu

SEQ ID NO: 1926355 - RNA, 19 nt, Homo sapiens
  misc_RNA (1)...(19): siRNA sense strand
gaacagagggaccuauugu

SEQ ID NO: 1926356 - RNA, 19 nt, Homo sapiens
  misc_RNA (1)...(19): siRNA sense strand
gaacuacacagugaauauu

SEQ ID NO: 1926357 - RNA, 19 nt, Homo sapiens
  misc_RNA (1)...(19): siRNA sense strand
agaaguugccuauggauua

SEQ ID NO: 1926358 - RNA, 19 nt, Homo sapiens
  misc_RNA (1)...(19): siRNA sense strand
ggaagaagaaguugccuau

SEQ ID NO: 1926359 - RNA, 19 nt, Homo sapiens
  misc_RNA (1)...(19): siRNA sense strand
ccuaagaacugaggaaaug

SEQ ID NO: 1926360 - RNA, 19 nt, Homo sapiens
  misc_RNA (1)...(19): siRNA sense strand
aaagugagauaucgaacaa

SEQ ID NO: 1926361 - RNA, 19 nt, Homo sapiens
  misc_RNA (1)...(19): siRNA sense strand
caaaccaggugcucaaaca

SEQ ID NO: 1926362 - RNA, 19 nt, Homo sapiens
  misc_RNA (1)...(19): siRNA sense strand
ggaaagaaagugagauauc

SEQ ID NO: 1926363 - RNA, 19 nt, Homo sapiens
  misc_RNA (1)...(19): siRNA sense strand
aagcuuagaucugugauuu

SEQ ID NO: 1926364 - RNA, 19 nt, Homo sapiens
  misc_RNA (1)...(19): siRNA sense strand
guccagaacuacacaguga

SEQ ID NO: 1926365 - RNA, 19 nt, Homo sapiens
  misc_RNA (1)...(19): siRNA sense strand
guaagugcuuggucucuga

SEQ ID NO: 1926366 - RNA, 19 nt, Homo sapiens
  misc_RNA (1)...(19): siRNA sense strand
uaaaguggaugagagagaa

SEQ ID NO: 1926367 - RNA, 19 nt, Homo sapiens
  misc_RNA (1)...(19): siRNA sense strand
caucagacauacacagaga

SEQ ID NO: 1926368 - RNA, 19 nt, Homo sapiens
  misc_RNA (1)...(19): siRNA sense strand
aaauugauguggcuucauu

SEQ ID NO: 1926369 - RNA, 19 nt, Homo sapiens
  misc_RNA (1)...(19): siRNA sense strand
cauaagaaaccauauccua

SEQ ID NO: 1926370 - RNA, 19 nt, Homo sapiens
  misc_RNA (1)...(19): siRNA sense strand
guccaagucuggugagaaa

SEQ ID NO: 1926371 - RNA, 19 nt, Homo sapiens
  misc_RNA (1)...(19): siRNA sense strand
ggugaaagguauucuugug

SEQ ID NO: 1926372 - RNA, 19 nt, Homo sapiens
  misc_RNA (1)...(19): siRNA sense strand
gaacaccaccuuccugaca

SEQ ID NO: 1926373 - RNA, 19 nt, Homo sapiens
  misc_RNA (1)...(19): siRNA sense strand
acacagagauuuggagaau

SEQ ID NO: 1926374 - RNA, 19 nt, Homo sapiens
  misc_RNA (1)...(19): siRNA sense strand
guuguggccucuguaaaua

SEQ ID NO: 1926375 - RNA, 19 nt, Homo sapiens
  misc_RNA (1)...(19): siRNA sense strand
aagaaaccauauccuagua

SEQ ID NO: 1926376 - RNA, 19 nt, Homo sapiens
  misc_RNA (1)...(19): siRNA sense strand
ugacgaguguugugccuuu

SEQ ID NO: 1926377 - RNA, 19 nt, Homo sapiens
  misc_RNA (1)...(19): siRNA sense strand
aaacgcacauugcuccaaa

SEQ ID NO: 1926378 - RNA, 19 nt, Homo sapiens
  misc_RNA (1)...(19): siRNA sense strand
gaacuguuguccucacucu

SEQ ID NO: 1926379 - RNA, 19 nt, Homo sapiens
  misc_RNA (1)...(19): siRNA sense strand
gaaagguauucuuguggau

SEQ ID NO: 1926380 - RNA, 19 nt, Homo sapiens
  misc_RNA (1)...(19): siRNA sense strand
gcuuagaucugugauuuca

SEQ ID NO: 1926381 - RNA, 19 nt, Homo sapiens
  misc_RNA (1)...(19): siRNA sense strand
aagaugaaauugaccaaga

SEQ ID NO: 1926382 - RNA, 19 nt, Homo sapiens
  misc_RNA (1)...(19): siRNA sense strand
gauacuguuucuauagaga

SEQ ID NO: 1926383 - RNA, 19 nt, Homo sapiens
  misc_RNA (1)...(19): siRNA sense strand
ugaaggccguucuuaugaa

SEQ ID NO: 1926384 - RNA, 19 nt, Homo sapiens
  misc_RNA (1)...(19): siRNA sense strand
guggugaagugaugcauga

SEQ ID NO: 1926385 - RNA, 19 nt, Homo sapiens
  misc_RNA (1)...(19): siRNA sense strand
caauaagucuguuggaacu

SEQ ID NO: 1926386 - RNA, 19 nt, Homo sapiens
  misc_RNA (1)...(19): siRNA sense strand
gagaauaagcuuagaucug

SEQ ID NO: 1926387 - RNA, 19 nt, Homo sapiens
  misc_RNA (1)...(19): siRNA sense strand
aagaagaaguugccuaugg

SEQ ID NO: 1926388 - RNA, 19 nt, Homo sapiens
  misc_RNA (1)...(19): siRNA sense strand
gaaggccguucuuaugaag

SEQ ID NO: 1926389 - RNA, 19 nt, Homo sapiens
  misc_RNA (1)...(19): siRNA sense strand
gugcuuacuucauucaaga

SEQ ID NO: 1926390 - RNA, 19 nt, Homo sapiens
  misc_RNA (1)...(19): siRNA sense strand
gugaagugaugcaugauuc

SEQ ID NO: 1926391 - RNA, 19 nt, Homo sapiens
  misc_RNA (1)...(19): siRNA sense strand
agaagaaguugccuaugga

SEQ ID NO: 1926392 - RNA, 19 nt, Homo sapiens
  misc_RNA (1)...(19): siRNA sense strand
gaaagugagauaucgaaca

SEQ ID NO: 1926393 - RNA, 19 nt, Homo sapiens
  misc_RNA (1)...(19): siRNA sense strand
gauuauagcaacagagguu

SEQ ID NO: 1926394 - RNA, 19 nt, Homo sapiens
  misc_RNA (1)...(19): siRNA sense strand
ucagagcacagcaggaaua

SEQ ID NO: 1926395 - RNA, 19 nt, Homo sapiens
  misc_RNA (1)...(19): siRNA sense strand
caccuuccaugauaucaaa

SEQ ID NO: 1926396 - RNA, 19 nt, Homo sapiens
  misc_RNA (1)...(19): siRNA sense strand
ugcgaugucugucuuguaa

SEQ ID NO: 1926397 - RNA, 19 nt, Homo sapiens
  misc_RNA (1)...(19): siRNA sense strand
guaaauacucuacaaaggu

SEQ ID NO: 1926398 - RNA, 19 nt, Homo sapiens
  misc_RNA (1)...(19): siRNA sense strand
gcaaauggcagugcuccaa

SEQ ID NO: 1926399 - RNA, 19 nt, Homo sapiens
  misc_RNA (1)...(19): siRNA sense strand
acauggagguagcgcauaa

SEQ ID NO: 1926400 - RNA, 19 nt, Homo sapiens
  misc_RNA (1)...(19): siRNA sense strand
gaaacaagugaaugggauu

SEQ ID NO: 1926401 - RNA, 19 nt, Homo sapiens
  misc_RNA (1)...(19): siRNA sense strand
gcagaagugcucccaagga

SEQ ID NO: 1926402 - RNA, 19 nt, Homo sapiens
  misc_RNA (1)...(19): siRNA sense strand
ggagaggcaccacaucaug

SEQ ID NO: 1926403 - RNA, 19 nt, Homo sapiens
  misc_RNA (1)...(19): siRNA sense strand
gccaggaugcguuaaugua

SEQ ID NO: 1926404 - RNA, 19 nt, Homo sapiens
  misc_RNA (1)...(19): siRNA sense strand
ggaaugaaagcagaacaga

SEQ ID NO: 1926405 - RNA, 19 nt, Homo sapiens
  misc_RNA (1)...(19): siRNA sense strand
ccuggaagccucacucauu

SEQ ID NO: 1926406 - RNA, 19 nt, Homo sapiens
  misc_RNA (1)...(19): siRNA sense strand
agacauacacagagauuug

SEQ ID NO: 1926407 - RNA, 19 nt, Homo sapiens
  misc_RNA (1)...(19): siRNA sense strand
gucaauaagucuguuggaa

SEQ ID NO: 1926408 - RNA, 19 nt, Homo sapiens
  misc_RNA (1)...(19): siRNA sense strand
gagcagccucccauccuaa

SEQ ID NO: 1926409 - RNA, 19 nt, Homo sapiens
  misc_RNA (1)...(19): siRNA sense strand
ugacaacugaggccuauga

SEQ ID NO: 1926410 - RNA, 19 nt, Homo sapiens
  misc_RNA (1)...(19): siRNA sense strand
gcacagcgaguccaagucu

SEQ ID NO: 1926411 - RNA, 19 nt, Homo sapiens
  misc_RNA (1)...(19): siRNA sense strand
caccaccugacaaauauua

SEQ ID NO: 1926412 - RNA, 19 nt, Homo sapiens
  misc_RNA (1)...(19): siRNA sense strand
gaacuuugaauaugaacca

SEQ ID NO: 1926413 - RNA, 19 nt, Homo sapiens
  misc_RNA (1)...(19): siRNA sense strand
uaagaaaccauauccuagu

SEQ ID NO: 1926414 - RNA, 19 nt, Homo sapiens
  misc_RNA (1)...(19): siRNA sense strand
uaugaaggccguucuuaug

SEQ ID NO: 1926415 - RNA, 19 nt, Homo sapiens
  misc_RNA (1)...(19): siRNA sense strand
gcacauugcuccaaaacca

SEQ ID NO: 1926416 - RNA, 19 nt, Homo sapiens
  misc_RNA (1)...(19): siRNA sense strand
ggugaucccuugcccaaac

SEQ ID NO: 1926417 - RNA, 19 nt, Homo sapiens
  misc_RNA (1)...(19): siRNA sense strand
ccugacaaauauuacugua

SEQ ID NO: 1926418 - RNA, 19 nt, Homo sapiens
  misc_RNA (1)...(19): siRNA sense strand
ccuccuugcuuccaucuug

SEQ ID NO: 1926419 - RNA, 19 nt, Homo sapiens
  misc_RNA (1)...(19): siRNA sense strand
cagaaaaggugacgagugu

SEQ ID NO: 1926420 - RNA, 19 nt, Homo sapiens
  misc_RNA (1)...(19): siRNA sense strand
ggcagcgugugcaccauuu

SEQ ID NO: 1926421 - RNA, 19 nt, Homo sapiens
  misc_RNA (1)...(19): siRNA sense strand
ccucagcccgucuuucuuu

SEQ ID NO: 1926422 - RNA, 19 nt, Homo sapiens
  misc_RNA (1)...(19): siRNA sense strand
ccaugaagaugaaauugac

SEQ ID NO: 1926423 - RNA, 19 nt, Homo sapiens
  misc_RNA (1)...(19): siRNA sense strand
ccaacauucugccugugaa

SEQ ID NO: 1926424 - RNA, 19 nt, Homo sapiens
  misc_RNA (1)...(19): siRNA sense strand
gauaucgaacaaagccaua

SEQ ID NO: 1926425 - RNA, 19 nt, Homo sapiens
  misc_RNA (1)...(19): siRNA sense strand
cagcagccaggaugcguua

SEQ ID NO: 1926426 - RNA, 19 nt, Homo sapiens
  misc_RNA (1)...(19): siRNA sense strand
cuaacgauacuguuucuau

SEQ ID NO: 1926427 - RNA, 19 nt, Homo sapiens
  misc_RNA (1)...(19): siRNA sense strand
gaaaauugauguggcuuca

SEQ ID NO: 1926428 - RNA, 19 nt, Homo sapiens
  misc_RNA (1)...(19): siRNA sense strand
uaaaccagggugugaauuc

SEQ ID NO: 1926429 - RNA, 19 nt, Homo sapiens
  misc_RNA (1)...(19): siRNA sense strand
caucuugcuuugccacaga

SEQ ID NO: 1926430 - RNA, 19 nt, Homo sapiens
  misc_RNA (1)...(19): siRNA sense strand
ugacagcugcaaggaguua

SEQ ID NO: 1926431 - RNA, 19 nt, Homo sapiens
  misc_RNA (1)...(19): siRNA sense strand
cccaccaccugacaaauau

SEQ ID NO: 1926432 - RNA, 19 nt, Homo sapiens
  misc_RNA (1)...(19): siRNA sense strand
gaucccaccaccugacaaa

SEQ ID NO: 1926433 - RNA, 19 nt, Homo sapiens
  misc_RNA (1)...(19): siRNA sense strand
gaaaguccagaacuacaca

SEQ ID NO: 1926434 - RNA, 19 nt, Homo sapiens
  misc_RNA (1)...(19): siRNA sense strand
cacaagccuucuguacuuu

SEQ ID NO: 1926435 - RNA, 19 nt, Homo sapiens
  misc_RNA (1)...(19): siRNA sense strand
cgaugucugucuuguaagu

SEQ ID NO: 1926436 - RNA, 19 nt, Homo sapiens
  misc_RNA (1)...(19): siRNA sense strand
acaucaggcucuauucuca

SEQ ID NO: 1926437 - RNA, 19 nt, Homo sapiens
  misc_RNA (1)...(19): siRNA sense strand
ugugaauccuccuguguug

SEQ ID NO: 1926438 - RNA, 19 nt, Homo sapiens
  misc_RNA (1)...(19): siRNA sense strand
gcuggccaaucccacauga

SEQ ID NO: 1926439 - RNA, 19 nt, Homo sapiens
  misc_RNA (1)...(19): siRNA sense strand
gcccaaggcucgauuaagg

SEQ ID NO: 1926440 - RNA, 19 nt, Homo sapiens
  misc_RNA (1)...(19): siRNA sense strand
gcaaggacagccuggguuu

SEQ ID NO: 1926441 - RNA, 19 nt, Homo sapiens
  misc_RNA (1)...(19): siRNA sense strand
ccagagcccugcagagagu

SEQ ID NO: 1926442 - RNA, 19 nt, Homo sapiens
  misc_RNA (1)...(19): siRNA sense strand
uaacacaucaucucugcaa

SEQ ID NO: 1926443 - RNA, 19 nt, Homo sapiens
  misc_RNA (1)...(19): siRNA sense strand
ggagagaauuuuggaguuu

SEQ ID NO: 1926444 - RNA, 19 nt, Homo sapiens
  misc_RNA (1)...(19): siRNA sense strand
ggacagccuggguuucaaa

SEQ ID NO: 1926445 - RNA, 19 nt, Homo sapiens
  misc_RNA (1)...(19): siRNA sense strand
cacaucaucucugcaaaga

SEQ ID NO: 1926446 - RNA, 19 nt, Homo sapiens
  misc_RNA (1)...(19): siRNA sense strand
ucccaucggucgccauaaa

SEQ ID NO: 1926447 - RNA, 19 nt, Homo sapiens
  misc_RNA (1)...(19): siRNA sense strand
caucggucgccauaaauaa

SEQ ID NO: 1926448 - RNA, 19 nt, Homo sapiens
  misc_RNA (1)...(19): siRNA sense strand
gcagagaguggugauaaca

SEQ ID NO: 1926449 - RNA, 19 nt, Homo sapiens
  misc_RNA (1)...(19): siRNA sense strand
ccaucggucgccauaaaua

SEQ ID NO: 1926450 - RNA, 19 nt, Homo sapiens
  misc_RNA (1)...(19): siRNA sense strand
agagaguggugauaacaca

SEQ ID NO: 1926451 - RNA, 19 nt, Homo sapiens
  misc_RNA (1)...(19): siRNA sense strand
caccagagcccugcagaga

SEQ ID NO: 1926452 - RNA, 19 nt, Homo sapiens
  misc_RNA (1)...(19): siRNA sense strand
cagccuggguuucaaaugc

SEQ ID NO: 1926453 - RNA, 19 nt, Homo sapiens
  misc_RNA (1)...(19): siRNA sense strand
ccacuucacucaggcuucu

SEQ ID NO: 1926454 - RNA, 19 nt, Homo sapiens
  misc_RNA (1)...(19): siRNA sense strand
cugcagagaguggugauaa

SEQ ID NO: 1926455 - RNA, 19 nt, Homo sapiens
  misc_RNA (1)...(19): siRNA sense strand
guugguuaauggagagaau

SEQ ID NO: 1926456 - RNA, 19 nt, Homo sapiens
  misc_RNA (1)...(19): siRNA sense strand
cgccauaaauaagucuuca

SEQ ID NO: 1926457 - RNA, 19 nt, Homo sapiens
  misc_RNA (1)...(19): siRNA sense strand
gcagauguauuucaugaua

SEQ ID NO: 1926458 - RNA, 19 nt, Homo sapiens
  misc_RNA (1)...(19): siRNA sense strand
ggucuugggugauuggaaa

SEQ ID NO: 1926459 - RNA, 19 nt, Homo sapiens
  misc_RNA (1)...(19): siRNA sense strand
gcacguauuuccgcccuuu

SEQ ID NO: 1926460 - RNA, 19 nt, Homo sapiens
  misc_RNA (1)...(19): siRNA sense strand
ccacuucacuacacaacaa

SEQ ID NO: 1926461 - RNA, 19 nt, Homo sapiens
  misc_RNA (1)...(19): siRNA sense strand
uaacacagacagcuauauu

SEQ ID NO: 1926462 - RNA, 19 nt, Homo sapiens
  misc_RNA (1)...(19): siRNA sense strand
uaacgcagauguauuucau

SEQ ID NO: 1926463 - RNA, 19 nt, Homo sapiens
  misc_RNA (1)...(19): siRNA sense strand
caacuucuacugugacauu

SEQ ID NO: 1926464 - RNA, 19 nt, Homo sapiens
  misc_RNA (1)...(19): siRNA sense strand
ucuuguaucuggcuuauug

SEQ ID NO: 1926465 - RNA, 19 nt, Homo sapiens
  misc_RNA (1)...(19): siRNA sense strand
guucugacauccacuuuca

SEQ ID NO: 1926466 - RNA, 19 nt, Homo sapiens
  misc_RNA (1)...(19): siRNA sense strand
gaaaauaaccaguccucua

SEQ ID NO: 1926467 - RNA, 19 nt, Homo sapiens
  misc_RNA (1)...(19): siRNA sense strand
gcagcaaauccaucucuuu

SEQ ID NO: 1926468 - RNA, 19 nt, Homo sapiens
  misc_RNA (1)...(19): siRNA sense strand
ccauuacuaugcaucauug

SEQ ID NO: 1926469 - RNA, 19 nt, Homo sapiens
  misc_RNA (1)...(19): siRNA sense strand
ucacgguugucucuuugua

SEQ ID NO: 1926470 - RNA, 19 nt, Homo sapiens
  misc_RNA (1)...(19): siRNA sense strand
gccuaacgcagauguauuu

SEQ ID NO: 1926471 - RNA, 19 nt, Homo sapiens
  misc_RNA (1)...(19): siRNA sense strand
acgcagauguauuucauga

SEQ ID NO: 1926472 - RNA, 19 nt, Homo sapiens
  misc_RNA (1)...(19): siRNA sense strand
gcaucauugucuccuauau

SEQ ID NO: 1926473 - RNA, 19 nt, Homo sapiens
  misc_RNA (1)...(19): siRNA sense strand
ugagaaaucgggacaugaa

SEQ ID NO: 1926474 - RNA, 19 nt, Homo sapiens
  misc_RNA (1)...(19): siRNA sense strand
gcaggaacaggaagauuuc

SEQ ID NO: 1926475 - RNA, 19 nt, Homo sapiens
  misc_RNA (1)...(19): siRNA sense strand
uggcugcaauggcauauga

SEQ ID NO: 1926476 - RNA, 19 nt, Homo sapiens
  misc_RNA (1)...(19): siRNA sense strand
gguugucucuuuguauuau

SEQ ID NO: 1926477 - RNA, 19 nt, Homo sapiens
  misc_RNA (1)...(19): siRNA sense strand
gcagugaccccaauguuaa

SEQ ID NO: 1926478 - RNA, 19 nt, Homo sapiens
  misc_RNA (1)...(19): siRNA sense strand
uuggaaaccugcucauugu

SEQ ID NO: 1926479 - RNA, 19 nt, Homo sapiens
  misc_RNA (1)...(19): siRNA sense strand
cagcuagucuguccuucug

SEQ ID NO: 1926480 - RNA, 19 nt, Homo sapiens
  misc_RNA (1)...(19): siRNA sense strand
gcucugauguucgccuuca

SEQ ID NO: 1926481 - RNA, 19 nt, Homo sapiens
  misc_RNA (1)...(19): siRNA sense strand
ggucuuguaucuggcuuau

SEQ ID NO: 1926482 - RNA, 19 nt, Homo sapiens
  misc_RNA (1)...(19): siRNA sense strand
gccauuugcucugauguuc

SEQ ID NO: 1926483 - RNA, 19 nt, Homo sapiens
  misc_RNA (1)...(19): siRNA sense strand
ugcggaaacucuucaacaa

SEQ ID NO: 1926484 - RNA, 19 nt, Homo sapiens
  misc_RNA (1)...(19): siRNA sense strand
caucauugucuccuauauu

SEQ ID NO: 1926485 - RNA, 19 nt, Homo sapiens
  misc_RNA (1)...(19): siRNA sense strand
gguaacacagacagcuaua

SEQ ID NO: 1926486 - RNA, 19 nt, Homo sapiens
  misc_RNA (1)...(19): siRNA sense strand
guugacaucuucuucucau

SEQ ID NO: 1926487 - RNA, 19 nt, Homo sapiens
  misc_RNA (1)...(19): siRNA sense strand
cuucacuacacaacaauua

SEQ ID NO: 1926488 - RNA, 19 nt, Homo sapiens
  misc_RNA (1)...(19): siRNA sense strand
cuaagaugcuggccaacca

SEQ ID NO: 1926489 - RNA, 19 nt, Homo sapiens
  misc_RNA (1)...(19): siRNA sense strand
ccucuacacuggaauucau

SEQ ID NO: 1926490 - RNA, 19 nt, Homo sapiens
  misc_RNA (1)...(19): siRNA sense strand
caucuacagucugagaaau

SEQ ID NO: 1926491 - RNA, 19 nt, Homo sapiens
  misc_RNA (1)...(19): siRNA sense strand
ccucacgguugucucuuug

SEQ ID NO: 1926492 - RNA, 19 nt, Homo sapiens
  misc_RNA (1)...(19): siRNA sense strand
acgguugucucuuuguauu

SEQ ID NO: 1926493 - RNA, 19 nt, Homo sapiens
  misc_RNA (1)...(19): siRNA sense strand
cagauguauuucaugauag

SEQ ID NO: 1926494 - RNA, 19 nt, Homo sapiens
  misc_RNA (1)...(19): siRNA sense strand
gcucauuguccuagccauu

SEQ ID NO: 1926495 - RNA, 19 nt, Homo sapiens
  misc_RNA (1)...(19): siRNA sense strand
aucauugucuccuauauuc

SEQ ID NO: 1926496 - RNA, 19 nt, Homo sapiens
  misc_RNA (1)...(19): siRNA sense strand
uggccaacuucuacuguga

SEQ ID NO: 1926497 - RNA, 19 nt, Homo sapiens
  misc_RNA (1)...(19): siRNA sense strand
ucacuacacaacaauuaug

SEQ ID NO: 1926498 - RNA, 19 nt, Homo sapiens
  misc_RNA (1)...(19): siRNA sense strand
ucauuguccuagccauuug

SEQ ID NO: 1926499 - RNA, 19 nt, Homo sapiens
  misc_RNA (1)...(19): siRNA sense strand
gaccaauuauagccuaaaa

SEQ ID NO: 1926500 - RNA, 19 nt, Homo sapiens
  misc_RNA (1)...(19): siRNA sense strand
uugcugaaguuauccuguu

SEQ ID NO: 1926501 - RNA, 19 nt, Homo sapiens
  misc_RNA (1)...(19): siRNA sense strand
gauuggaaaccugcucauu

SEQ ID NO: 1926502 - RNA, 19 nt, Homo sapiens
  misc_RNA (1)...(19): siRNA sense strand
ggcagcaaauccaucucuu

SEQ ID NO: 1926503 - RNA, 19 nt, Homo sapiens
  misc_RNA (1)...(19): siRNA sense strand
cagcaaauccaucucuuuu

SEQ ID NO: 1926504 - RNA, 19 nt, Homo sapiens
  misc_RNA (1)...(19): siRNA sense strand
gaaggcugcccugcggaaa

SEQ ID NO: 1926505 - RNA, 19 nt, Homo sapiens
  misc_RNA (1)...(19): siRNA sense strand
gccauuacuaugcaucauu

SEQ ID NO: 1926506 - RNA, 19 nt, Homo sapiens
  misc_RNA (1)...(19): siRNA sense strand
guuauccuguucugacauc

SEQ ID NO: 1926507 - RNA, 19 nt, Homo sapiens
  misc_RNA (1)...(19): siRNA sense strand
guucccaccucacgguugu

SEQ ID NO: 1926508 - RNA, 19 nt, Homo sapiens
  misc_RNA (1)...(19): siRNA sense strand
ucugagaaaucgggacaug

SEQ ID NO: 1926509 - RNA, 19 nt, Homo sapiens
  misc_RNA (1)...(19): siRNA sense strand
gcccuuugaccaauuauag

SEQ ID NO: 1926510 - RNA, 19 nt, Homo sapiens
  misc_RNA (1)...(19): siRNA sense strand
ggcagugaccccaauguua

SEQ ID NO: 1926511 - RNA, 19 nt, Homo sapiens
  misc_RNA (1)...(19): siRNA sense strand
acacagacagcuauauuuu

SEQ ID NO: 1926512 - RNA, 19 nt, Homo sapiens
  misc_RNA (1)...(19): siRNA sense strand
gcggaaacucuucaacaag

SEQ ID NO: 1926513 - RNA, 19 nt, Homo sapiens
  misc_RNA (1)...(19): siRNA sense strand
cuacauccucuuccuguuc

SEQ ID NO: 1926514 - RNA, 19 nt, Homo sapiens
  misc_RNA (1)...(19): siRNA sense strand
guaauguacacggcaguga

SEQ ID NO: 1926515 - RNA, 19 nt, Homo sapiens
  misc_RNA (1)...(19): siRNA sense strand
ccaauuauagccuaaaaga

SEQ ID NO: 1926516 - RNA, 19 nt, Homo sapiens
  misc_RNA (1)...(19): siRNA sense strand
uacauccucuuccuguuca

SEQ ID NO: 1926517 - RNA, 19 nt, Homo sapiens
  misc_RNA (1)...(19): siRNA sense strand
cauuuucucugugccauua

SEQ ID NO: 1926518 - RNA, 19 nt, Homo sapiens
  misc_RNA (1)...(19): siRNA sense strand
cuacacaacaauuaugagu

SEQ ID NO: 1926519 - RNA, 19 nt, Homo sapiens
  misc_RNA (1)...(19): siRNA sense strand
cgguaaccaucccuaagau

SEQ ID NO: 1926520 - RNA, 19 nt, Homo sapiens
  misc_RNA (1)...(19): siRNA sense strand
agcaggaacaggaagauuu

SEQ ID NO: 1926521 - RNA, 19 nt, Homo sapiens
  misc_RNA (1)...(19): siRNA sense strand
aacacagacagcuauauuu

SEQ ID NO: 1926522 - RNA, 19 nt, Homo sapiens
  misc_RNA (1)...(19): siRNA sense strand
caucgguaaccaucccuaa

SEQ ID NO: 1926523 - RNA, 19 nt, Homo sapiens
  misc_RNA (1)...(19): siRNA sense strand
guaacacagacagcuauau

SEQ ID NO: 1926524 - RNA, 19 nt, Homo sapiens
  misc_RNA (1)...(19): siRNA sense strand
ggguaacacagacagcuau

SEQ ID NO: 1926525 - RNA, 19 nt, Homo sapiens
  misc_RNA (1)...(19): siRNA sense strand
ucgguaaccaucccuaaga

SEQ ID NO: 1926526 - RNA, 19 nt, Homo sapiens
  misc_RNA (1)...(19): siRNA sense strand
gccaacuucuacugugaca

SEQ ID NO: 1926527 - RNA, 19 nt, Homo sapiens
  misc_RNA (1)...(19): siRNA sense strand
cgagucuucuccacagucu

SEQ ID NO: 1926528 - RNA, 19 nt, Homo sapiens
  misc_RNA (1)...(19): siRNA sense strand
uccucuuccuguucauuua

SEQ ID NO: 1926529 - RNA, 19 nt, Homo sapiens
  misc_RNA (1)...(19): siRNA sense strand
cacuacacaacaauuauga

SEQ ID NO: 1926530 - RNA, 19 nt, Homo sapiens
  misc_RNA (1)...(19): siRNA sense strand
ucacauugauuggaaaccu

SEQ ID NO: 1926531 - RNA, 19 nt, Homo sapiens
  misc_RNA (1)...(19): siRNA sense strand
gagaaaucgggacaugaag

SEQ ID NO: 1926532 - RNA, 19 nt, Homo sapiens
  misc_RNA (1)...(19): siRNA sense strand
gauaaggacugaucaugaa

SEQ ID NO: 1926533 - RNA, 19 nt, Homo sapiens
  misc_RNA (1)...(19): siRNA sense strand
ucaccugucugcaguauua

SEQ ID NO: 1926534 - RNA, 19 nt, Homo sapiens
  misc_RNA (1)...(19): siRNA sense strand
gagaacuccuuaauggaua

SEQ ID NO: 1926535 - RNA, 19 nt, Homo sapiens
  misc_RNA (1)...(19): siRNA sense strand
ggaccaugcucuuccagaa

SEQ ID NO: 1926536 - RNA, 19 nt, Homo sapiens
  misc_RNA (1)...(19): siRNA sense strand
gaggaaagcucaguacaag

SEQ ID NO: 1926537 - RNA, 19 nt, Homo sapiens
  misc_RNA (1)...(19): siRNA sense strand
ugagaucacugccagcuuu

SEQ ID NO: 1926538 - RNA, 19 nt, Homo sapiens
  misc_RNA (1)...(19): siRNA sense strand
guacaagcuuugauagaug

SEQ ID NO: 1926539 - RNA, 19 nt, Homo sapiens
  misc_RNA (1)...(19): siRNA sense strand
gcaggaugauuuacugaug

SEQ ID NO: 1926540 - RNA, 19 nt, Homo sapiens
  misc_RNA (1)...(19): siRNA sense strand
guuuggaccucucguagua

SEQ ID NO: 1926541 - RNA, 19 nt, Homo sapiens
  misc_RNA (1)...(19): siRNA sense strand
ccaggaacagauaauauua

SEQ ID NO: 1926542 - RNA, 19 nt, Homo sapiens
  misc_RNA (1)...(19): siRNA sense strand
ugacaaacggguugaagua

SEQ ID NO: 1926543 - RNA, 19 nt, Homo sapiens
  misc_RNA (1)...(19): siRNA sense strand
ggacaagccagugcaaauu

SEQ ID NO: 1926544 - RNA, 19 nt, Homo sapiens
  misc_RNA (1)...(19): siRNA sense strand
gcacuuaacagucgaucuu

SEQ ID NO: 1926545 - RNA, 19 nt, Homo sapiens
  misc_RNA (1)...(19): siRNA sense strand
acaaaccgcuggugaagga

SEQ ID NO: 1926546 - RNA, 19 nt, Homo sapiens
  misc_RNA (1)...(19): siRNA sense strand
gaacgcuacucuagaaagg

SEQ ID NO: 1926547 - RNA, 19 nt, Homo sapiens
  misc_RNA (1)...(19): siRNA sense strand
gauagaugccugccuagaa

SEQ ID NO: 1926548 - RNA, 19 nt, Homo sapiens
  misc_RNA (1)...(19): siRNA sense strand
gcugaaagcaagucuuauu

SEQ ID NO: 1926549 - RNA, 19 nt, Homo sapiens
  misc_RNA (1)...(19): siRNA sense strand
cauaugugcuggaugauca

SEQ ID NO: 1926550 - RNA, 19 nt, Homo sapiens
  misc_RNA (1)...(19): siRNA sense strand
acaaacggguugaaguaaa

SEQ ID NO: 1926551 - RNA, 19 nt, Homo sapiens
  misc_RNA (1)...(19): siRNA sense strand
cagucgaucuucucucuuu

SEQ ID NO: 1926552 - RNA, 19 nt, Homo sapiens
  misc_RNA (1)...(19): siRNA sense strand
gggauaaauuuccaucauc

SEQ ID NO: 1926553 - RNA, 19 nt, Homo sapiens
  misc_RNA (1)...(19): siRNA sense strand
caaacggguugaaguaaag

SEQ ID NO: 1926554 - RNA, 19 nt, Homo sapiens
  misc_RNA (1)...(19): siRNA sense strand
guaguagacuggccucaca

SEQ ID NO: 1926555 - RNA, 19 nt, Homo sapiens
  misc_RNA (1)...(19): siRNA sense strand
ggauggaggauaacgcuuu

SEQ ID NO: 1926556 - RNA, 19 nt, Homo sapiens
  misc_RNA (1)...(19): siRNA sense strand
guacgguggugucugcuau

SEQ ID NO: 1926557 - RNA, 19 nt, Homo sapiens
  misc_RNA (1)...(19): siRNA sense strand
gaucauggaccguuuguac

SEQ ID NO: 1926558 - RNA, 19 nt, Homo sapiens
  misc_RNA (1)...(19): siRNA sense strand
ggguugaaguaaagccaua

SEQ ID NO: 1926559 - RNA, 19 nt, Homo sapiens
  misc_RNA (1)...(19): siRNA sense strand
caaccugaguccagcguau

SEQ ID NO: 1926560 - RNA, 19 nt, Homo sapiens
  misc_RNA (1)...(19): siRNA sense strand
gacagugacuuuguaaugg

SEQ ID NO: 1926561 - RNA, 19 nt, Homo sapiens
  misc_RNA (1)...(19): siRNA sense strand
gaccauggaaccuaaguga

SEQ ID NO: 1926562 - RNA, 19 nt, Homo sapiens
  misc_RNA (1)...(19): siRNA sense strand
caucauccaggaacagaua

SEQ ID NO: 1926563 - RNA, 19 nt, Homo sapiens
  misc_RNA (1)...(19): siRNA sense strand
ugacagugacuuuguaaug

SEQ ID NO: 1926564 - RNA, 19 nt, Homo sapiens
  misc_RNA (1)...(19): siRNA sense strand
aagcugaaagcaagucuua

SEQ ID NO: 1926565 - RNA, 19 nt, Homo sapiens
  misc_RNA (1)...(19): siRNA sense strand
gauggaggauaacgcuuuc

SEQ ID NO: 1926566 - RNA, 19 nt, Homo sapiens
  misc_RNA (1)...(19): siRNA sense strand
caaugaucauggaccguuu

SEQ ID NO: 1926567 - RNA, 19 nt, Homo sapiens
  misc_RNA (1)...(19): siRNA sense strand
gacaaacggguugaaguaa

SEQ ID NO: 1926568 - RNA, 19 nt, Homo sapiens
  misc_RNA (1)...(19): siRNA sense strand
gaacuucccgcaccauguc

SEQ ID NO: 1926569 - RNA, 19 nt, Homo sapiens
  misc_RNA (1)...(19): siRNA sense strand
gaucaugaaccucugaaag

SEQ ID NO: 1926570 - RNA, 19 nt, Homo sapiens
  misc_RNA (1)...(19): siRNA sense strand
gauaugauaaggacugauc

SEQ ID NO: 1926571 - RNA, 19 nt, Homo sapiens
  misc_RNA (1)...(19): siRNA sense strand
ggacuuccuccugauauug

SEQ ID NO: 1926572 - RNA, 19 nt, Homo sapiens
  misc_RNA (1)...(19): siRNA sense strand
ucaugaaccucugaaagga

SEQ ID NO: 1926573 - RNA, 19 nt, Homo sapiens
  misc_RNA (1)...(19): siRNA sense strand
gaccgauaaugguaacaau

SEQ ID NO: 1926574 - RNA, 19 nt, Homo sapiens
  misc_RNA (1)...(19): siRNA sense strand
agccauaugugcuggauga

SEQ ID NO: 1926575 - RNA, 19 nt, Homo sapiens
  misc_RNA (1)...(19): siRNA sense strand
ucuccaaucagcagaguua

SEQ ID NO: 1926576 - RNA, 19 nt, Homo sapiens
  misc_RNA (1)...(19): siRNA sense strand
gaugauagccauggugauc

SEQ ID NO: 1926577 - RNA, 19 nt, Homo sapiens
  misc_RNA (1)...(19): siRNA sense strand
cggacaagaugcagaugga

SEQ ID NO: 1926578 - RNA, 19 nt, Homo sapiens
  misc_RNA (1)...(19): siRNA sense strand
gacaagccagugcaaauuc

SEQ ID NO: 1926579 - RNA, 19 nt, Homo sapiens
  misc_RNA (1)...(19): siRNA sense strand
ccaagaggaaagcucagua

SEQ ID NO: 1926580 - RNA, 19 nt, Homo sapiens
  misc_RNA (1)...(19): siRNA sense strand
gauaaugguaacaaucugu

SEQ ID NO: 1926581 - RNA, 19 nt, Homo sapiens
  misc_RNA (1)...(19): siRNA sense strand
agaagaagaugggaaacuc

SEQ ID NO: 1926582 - RNA, 19 nt, Homo sapiens
  misc_RNA (1)...(19): siRNA sense strand
gcuaugccuuucugcuguu

SEQ ID NO: 1926583 - RNA, 19 nt, Homo sapiens
  misc_RNA (1)...(19): siRNA sense strand
aguacaagcuuugauagau

SEQ ID NO: 1926584 - RNA, 19 nt, Homo sapiens
  misc_RNA (1)...(19): siRNA sense strand
acagugacuuuguaaugga

SEQ ID NO: 1926585 - RNA, 19 nt, Homo sapiens
  misc_RNA (1)...(19): siRNA sense strand
cugaaagcaagucuuauuu

SEQ ID NO: 1926586 - RNA, 19 nt, Homo sapiens
  misc_RNA (1)...(19): siRNA sense strand
uggaugaucagauguguga

SEQ ID NO: 1926587 - RNA, 19 nt, Homo sapiens
  misc_RNA (1)...(19): siRNA sense strand
ggaugguucucagccuuug

SEQ ID NO: 1926588 - RNA, 19 nt, Homo sapiens
  misc_RNA (1)...(19): siRNA sense strand
cuccugauauugaugaaga

SEQ ID NO: 1926589 - RNA, 19 nt, Homo sapiens
  misc_RNA (1)...(19): siRNA sense strand
caucagcgcucguuuugug

SEQ ID NO: 1926590 - RNA, 19 nt, Homo sapiens
  misc_RNA (1)...(19): siRNA sense strand
gaagaagaugggaaacucu

SEQ ID NO: 1926591 - RNA, 19 nt, Homo sapiens
  misc_RNA (1)...(19): siRNA sense strand
gcaagccguccucgucuuc

SEQ ID NO: 1926592 - RNA, 19 nt, Homo sapiens
  misc_RNA (1)...(19): siRNA sense strand
ccuagaagaagaugggaaa

SEQ ID NO: 1926593 - RNA, 19 nt, Homo sapiens
  misc_RNA (1)...(19): siRNA sense strand
auagaugccugccuagaag

SEQ ID NO: 1926594 - RNA, 19 nt, Homo sapiens
  misc_RNA (1)...(19): siRNA sense strand
gacaagaugcagauggaau

SEQ ID NO: 1926595 - RNA, 19 nt, Homo sapiens
  misc_RNA (1)...(19): siRNA sense strand
ggaccgauaaugguaacaa

SEQ ID NO: 1926596 - RNA, 19 nt, Homo sapiens
  misc_RNA (1)...(19): siRNA sense strand
ccauggaaccuaagugaca

SEQ ID NO: 1926597 - RNA, 19 nt, Homo sapiens
  misc_RNA (1)...(19): siRNA sense strand
agacuggccucacaaagcu

SEQ ID NO: 1926598 - RNA, 19 nt, Homo sapiens
  misc_RNA (1)...(19): siRNA sense strand
aagaugccuuccuggauga

SEQ ID NO: 1926599 - RNA, 19 nt, Homo sapiens
  misc_RNA (1)...(19): siRNA sense strand
cauccaggaacagauaaua

SEQ ID NO: 1926600 - RNA, 19 nt, Homo sapiens
  misc_RNA (1)...(19): siRNA sense strand
ugaaguaaagccauaugug

SEQ ID NO: 1926601 - RNA, 19 nt, Homo sapiens
  misc_RNA (1)...(19): siRNA sense strand
gguagaggacagcuucuuc

SEQ ID NO: 1926602 - RNA, 19 nt, Homo sapiens
  misc_RNA (1)...(19): siRNA sense strand
ggacaagaugcagauggaa

SEQ ID NO: 1926603 - RNA, 19 nt, Homo sapiens
  misc_RNA (1)...(19): siRNA sense strand
ccuucgagcuguugaacug

SEQ ID NO: 1926604 - RNA, 19 nt, Homo sapiens
  misc_RNA (1)...(19): siRNA sense strand
cuugucaucuggcuuaagu

SEQ ID NO: 1926605 - RNA, 19 nt, Homo sapiens
  misc_RNA (1)...(19): siRNA sense strand
agaggaaagcucaguacaa

SEQ ID NO: 1926606 - RNA, 19 nt, Homo sapiens
  misc_RNA (1)...(19): siRNA sense strand
uccaggaacagauaauauu

SEQ ID NO: 1926607 - RNA, 19 nt, Homo sapiens
  misc_RNA (1)...(19): siRNA sense strand
ccacaaaccgcuggugaag

SEQ ID NO: 1926608 - RNA, 19 nt, Homo sapiens
  misc_RNA (1)...(19): siRNA sense strand
gcguggcauucuccaauca

SEQ ID NO: 1926609 - RNA, 19 nt, Homo sapiens
  misc_RNA (1)...(19): siRNA sense strand
ugauauugaugaagaugag

SEQ ID NO: 1926610 - RNA, 19 nt, Homo sapiens
  misc_RNA (1)...(19): siRNA sense strand
ucuagaaagguguuuguug

SEQ ID NO: 1926611 - RNA, 19 nt, Homo sapiens
  misc_RNA (1)...(19): siRNA sense strand
aagaagaugggaaacucua

SEQ ID NO: 1926612 - RNA, 19 nt, Homo sapiens
  misc_RNA (1)...(19): siRNA sense strand
agaacuccuuaauggauau

SEQ ID NO: 1926613 - RNA, 19 nt, Homo sapiens
  misc_RNA (1)...(19): siRNA sense strand
aaucagcagaguuacauug

SEQ ID NO: 1926614 - RNA, 19 nt, Homo sapiens
  misc_RNA (1)...(19): siRNA sense strand
ccaaucagcagaguuacau

SEQ ID NO: 1926615 - RNA, 19 nt, Homo sapiens
  misc_RNA (1)...(19): siRNA sense strand
gcuguugaacuggcaauga

SEQ ID NO: 1926616 - RNA, 19 nt, Homo sapiens
  misc_RNA (1)...(19): siRNA sense strand
gugcaaauucgaccaugga

SEQ ID NO: 1926617 - RNA, 19 nt, Homo sapiens
  misc_RNA (1)...(19): siRNA sense strand
caacgggaccaugcucuuc

SEQ ID NO: 1926618 - RNA, 19 nt, Homo sapiens
  misc_RNA (1)...(19): siRNA sense strand
caagaggaaagcucaguac

SEQ ID NO: 1926619 - RNA, 19 nt, Homo sapiens
  misc_RNA (1)...(19): siRNA sense strand
gguguuuguuggaggacuu

SEQ ID NO: 1926620 - RNA, 19 nt, Homo sapiens
  misc_RNA (1)...(19): siRNA sense strand
ggacgcauggggauaaauu

SEQ ID NO: 1926621 - RNA, 19 nt, Homo sapiens
  misc_RNA (1)...(19): siRNA sense strand
cgauaaugguaacaaucug

SEQ ID NO: 1926622 - RNA, 19 nt, Homo sapiens
  misc_RNA (1)...(19): siRNA sense strand
gcuggaugaucagaugugu

SEQ ID NO: 1926623 - RNA, 19 nt, Homo sapiens
  misc_RNA (1)...(19): siRNA sense strand
auucgaccauggaaccuaa

SEQ ID NO: 1926624 - RNA, 19 nt, Homo sapiens
  misc_RNA (1)...(19): siRNA sense strand
gacuuccuccugauauuga

SEQ ID NO: 1926625 - RNA, 19 nt, Homo sapiens
  misc_RNA (1)...(19): siRNA sense strand
acaaucuguugccauuuca

SEQ ID NO: 1926626 - RNA, 19 nt, Homo sapiens
  misc_RNA (1)...(19): siRNA sense strand
gaaaggacgcauggggaua

SEQ ID NO: 1926627 - RNA, 19 nt, Homo sapiens
  misc_RNA (1)...(19): siRNA sense strand
gugccaacgucaccugucu

SEQ ID NO: 1926628 - RNA, 19 nt, Homo sapiens
  misc_RNA (1)...(19): siRNA sense strand
ugccagcuuucgcagguuu

SEQ ID NO: 1926629 - RNA, 19 nt, Homo sapiens
  misc_RNA (1)...(19): siRNA sense strand
aacagucgaucuucucucu

SEQ ID NO: 1926630 - RNA, 19 nt, Homo sapiens
  misc_RNA (1)...(19): siRNA sense strand
caguacaagcuuugauaga

SEQ ID NO: 1926631 - RNA, 19 nt, Homo sapiens
  misc_RNA (1)...(19): siRNA sense strand
ucaucuggcuuaaguucuc

SEQ ID NO: 1926632 - RNA, 19 nt, Homo sapiens
  misc_RNA (1)...(19): siRNA sense strand
cggaacagcugcucauuga

SEQ ID NO: 1926633 - RNA, 19 nt, Homo sapiens
  misc_RNA (1)...(19): siRNA sense strand
gcugaugccuagccaguug

SEQ ID NO: 1926634 - RNA, 19 nt, Homo sapiens
  misc_RNA (1)...(19): siRNA sense strand
ucacgacucuggcccaaga

SEQ ID NO: 1926635 - RNA, 19 nt, Homo sapiens
  misc_RNA (1)...(19): siRNA sense strand
agacacggcuuaccuggau

SEQ ID NO: 1926636 - RNA, 19 nt, Homo sapiens
  misc_RNA (1)...(19): siRNA sense strand
uaagccaggugggcaaaga

SEQ ID NO: 1926637 - RNA, 19 nt, Homo sapiens
  misc_RNA (1)...(19): siRNA sense strand
ccaggugggcaaagaacua

SEQ ID NO: 1926638 - RNA, 19 nt, Homo sapiens
  misc_RNA (1)...(19): siRNA sense strand
cggaggaagacacggcuua

SEQ ID NO: 1926639 - RNA, 19 nt, Homo sapiens
  misc_RNA (1)...(19): siRNA sense strand
ucaagaagaagcuguacag

SEQ ID NO: 1926640 - RNA, 19 nt, Homo sapiens
  misc_RNA (1)...(19): siRNA sense strand
cccugaggaugaacacuug

SEQ ID NO: 1926641 - RNA, 19 nt, Homo sapiens
  misc_RNA (1)...(19): siRNA sense strand
ccucuucgcccucguccuu

SEQ ID NO: 1926642 - RNA, 19 nt, Homo sapiens
  misc_RNA (1)...(19): siRNA sense strand
cagugacccugaggaugaa

SEQ ID NO: 1926643 - RNA, 19 nt, Homo sapiens
  misc_RNA (1)...(19): siRNA sense strand
ucaucaagaagaagcugua

SEQ ID NO: 1926644 - RNA, 19 nt, Homo sapiens
  misc_RNA (1)...(19): siRNA sense strand
gcuuccgagucaucaagaa

SEQ ID NO: 1926645 - RNA, 19 nt, Homo sapiens
  misc_RNA (1)...(19): siRNA sense strand
gcccugacguuuggaauua

SEQ ID NO: 1926646 - RNA, 19 nt, Homo sapiens
  misc_RNA (1)...(19): siRNA sense strand
ggaauuaaucccuucauug

SEQ ID NO: 1926647 - RNA, 19 nt, Homo sapiens
  misc_RNA (1)...(19): siRNA sense strand
ggagggagcauguaaugaa

SEQ ID NO: 1926648 - RNA, 19 nt, Homo sapiens
  misc_RNA (1)...(19): siRNA sense strand
gagggagcauguaaugaaa

SEQ ID NO: 1926649 - RNA, 19 nt, Homo sapiens
  misc_RNA (1)...(19): siRNA sense strand
gaacaagaagccacaagau

SEQ ID NO: 1926650 - RNA, 19 nt, Homo sapiens
  misc_RNA (1)...(19): siRNA sense strand
ccagggaugaggaaacuua

SEQ ID NO: 1926651 - RNA, 19 nt, Homo sapiens
  misc_RNA (1)...(19): siRNA sense strand
cuaaacagaccaaguguga

SEQ ID NO: 1926652 - RNA, 19 nt, Homo sapiens
  misc_RNA (1)...(19): siRNA sense strand
gaauuaaucccuucauugc

SEQ ID NO: 1926653 - RNA, 19 nt, Homo sapiens
  misc_RNA (1)...(19): siRNA sense strand
aagcaaagcccucgccaaa

SEQ ID NO: 1926654 - RNA, 19 nt, Homo sapiens
  misc_RNA (1)...(19): siRNA sense strand
ugaggaaacuuaccguaca

SEQ ID NO: 1926655 - RNA, 19 nt, Homo sapiens
  misc_RNA (1)...(19): siRNA sense strand
gcaaagcccucgccaaaag

SEQ ID NO: 1926656 - RNA, 19 nt, Homo sapiens
  misc_RNA (1)...(19): siRNA sense strand
acaagaagccacaagauuc

SEQ ID NO: 1926657 - RNA, 19 nt, Homo sapiens
  misc_RNA (1)...(19): siRNA sense strand
cagcuuccagaacuuauua

SEQ ID NO: 1926658 - RNA, 19 nt, Homo sapiens
  misc_RNA (1)...(19): siRNA sense strand
gaaacuuaccguacagaca

SEQ ID NO: 1926659 - RNA, 19 nt, Homo sapiens
  misc_RNA (1)...(19): siRNA sense strand
uggaauuaaucccuucauu

SEQ ID NO: 1926660 - RNA, 19 nt, Homo sapiens
  misc_RNA (1)...(19): siRNA sense strand
gaggaaacuuaccguacag

SEQ ID NO: 1926661 - RNA, 19 nt, Homo sapiens
  misc_RNA (1)...(19): siRNA sense strand
gcugccaccugaucuugga

SEQ ID NO: 1926662 - RNA, 19 nt, Homo sapiens
  misc_RNA (1)...(19): siRNA sense strand
aacaagaagccacaagauu

SEQ ID NO: 1926663 - RNA, 19 nt, Homo sapiens
  misc_RNA (1)...(19): siRNA sense strand
ugagggagggagcauguaa

SEQ ID NO: 1926664 - RNA, 19 nt, Homo sapiens
  misc_RNA (1)...(19): siRNA sense strand
aaacuuaccguacagacau

SEQ ID NO: 1926665 - RNA, 19 nt, Homo sapiens
  misc_RNA (1)...(19): siRNA sense strand
gcccuaaacagaccaagug

SEQ ID NO: 1926666 - RNA, 19 nt, Homo sapiens
  misc_RNA (1)...(19): siRNA sense strand
cgaugacugugguugacaa

SEQ ID NO: 1926667 - RNA, 19 nt, Homo sapiens
  misc_RNA (1)...(19): siRNA sense strand
cagcacugcccuaaacaga

SEQ ID NO: 1926668 - RNA, 19 nt, Homo sapiens
  misc_RNA (1)...(19): siRNA sense strand
gacuaugcccugacguuug

SEQ ID NO: 1926669 - RNA, 19 nt, Homo sapiens
  misc_RNA (1)...(19): siRNA sense strand
ggacuggggcuuccuguug

SEQ ID NO: 1926670 - RNA, 19 nt, Homo sapiens
  misc_RNA (1)...(19): siRNA sense strand
ugacgaugacugugguuga

SEQ ID NO: 1926671 - RNA, 19 nt, Homo sapiens
  misc_RNA (1)...(19): siRNA sense strand
caagaagccacaagauucg

SEQ ID NO: 1926672 - RNA, 19 nt, Homo sapiens
  misc_RNA (1)...(19): siRNA sense strand
agaacaagaagccacaaga

SEQ ID NO: 1926673 - RNA, 19 nt, Homo sapiens
  misc_RNA (1)...(19): siRNA sense strand
agacuaugcccugacguuu

SEQ ID NO: 1926674 - RNA, 19 nt, Homo sapiens
  misc_RNA (1)...(19): siRNA sense strand
acauucagcacaaagcaaa

SEQ ID NO: 1926675 - RNA, 19 nt, Homo sapiens
  misc_RNA (1)...(19): siRNA sense strand
caugcgggcugaccuucau

SEQ ID NO: 1926676 - RNA, 19 nt, Homo sapiens
  misc_RNA (1)...(19): siRNA sense strand
ccucccagcuuccagaacu

SEQ ID NO: 1926677 - RNA, 19 nt, Homo sapiens
  misc_RNA (1)...(19): siRNA sense strand
acuaugcccugacguuugg

SEQ ID NO: 1926678 - RNA, 19 nt, Homo sapiens
  misc_RNA (1)...(19): siRNA sense strand
uuauuaaguccaucugaga

SEQ ID NO: 1926679 - RNA, 19 nt, Homo sapiens
  misc_RNA (1)...(19): siRNA sense strand
gagaacaagaagccacaag

SEQ ID NO: 1926680 - RNA, 19 nt, Homo sapiens
  misc_RNA (1)...(19): siRNA sense strand
gacgaugacugugguugac

SEQ ID NO: 1926681 - RNA, 19 nt, Homo sapiens
  misc_RNA (1)...(19): siRNA sense strand
gggagggagcauguaauga

SEQ ID NO: 1926682 - RNA, 19 nt, Homo sapiens
  misc_RNA (1)...(19): siRNA sense strand
uauuaaguccaucugagaa

SEQ ID NO: 1926683 - RNA, 19 nt, Homo sapiens
  misc_RNA (1)...(19): siRNA sense strand
ccugacguuuggaauuaau

SEQ ID NO: 1926684 - RNA, 19 nt, Homo sapiens
  misc_RNA (1)...(19): siRNA sense strand
aaugaaaaguccacagaga

SEQ ID NO: 1926685 - RNA, 19 nt, Homo sapiens
  misc_RNA (1)...(19): siRNA sense strand
gagggagggagcauguaau

SEQ ID NO: 1926686 - RNA, 19 nt, Homo sapiens
  misc_RNA (1)...(19): siRNA sense strand
gcacacagcugcuacaaau

SEQ ID NO: 1926687 - RNA, 19 nt, Homo sapiens
  misc_RNA (1)...(19): siRNA sense strand
gaaaggaaguucugagaga

SEQ ID NO: 1926688 - RNA, 19 nt, Homo sapiens
  misc_RNA (1)...(19): siRNA sense strand
gagagaagcuggaagagaa

SEQ ID NO: 1926689 - RNA, 19 nt, Homo sapiens
  misc_RNA (1)...(19): siRNA sense strand
ggaaauaguucauccguau

SEQ ID NO: 1926690 - RNA, 19 nt, Homo sapiens
  misc_RNA (1)...(19): siRNA sense strand
guacagaggccaccaguua

SEQ ID NO: 1926691 - RNA, 19 nt, Homo sapiens
  misc_RNA (1)...(19): siRNA sense strand
ggacuucccuuuguacaua

SEQ ID NO: 1926692 - RNA, 19 nt, Homo sapiens
  misc_RNA (1)...(19): siRNA sense strand
ggacaaauaugacuucaca

SEQ ID NO: 1926693 - RNA, 19 nt, Homo sapiens
  misc_RNA (1)...(19): siRNA sense strand
gcagaugacccucaagaua

SEQ ID NO: 1926694 - RNA, 19 nt, Homo sapiens
  misc_RNA (1)...(19): siRNA sense strand
ccacagaucugauuaagca

SEQ ID NO: 1926695 - RNA, 19 nt, Homo sapiens
  misc_RNA (1)...(19): siRNA sense strand
caacucauccaccgaauua

SEQ ID NO: 1926696 - RNA, 19 nt, Homo sapiens
  misc_RNA (1)...(19): siRNA sense strand
gaaauuacuuauccguuug

SEQ ID NO: 1926697 - RNA, 19 nt, Homo sapiens
  misc_RNA (1)...(19): siRNA sense strand
gcaaauggcggauauguau

SEQ ID NO: 1926698 - RNA, 19 nt, Homo sapiens
  misc_RNA (1)...(19): siRNA sense strand
ggucaaccguucuguguuu

SEQ ID NO: 1926699 - RNA, 19 nt, Homo sapiens
  misc_RNA (1)...(19): siRNA sense strand
ccaauugccugaccacaaa

SEQ ID NO: 1926700 - RNA, 19 nt, Homo sapiens
  misc_RNA (1)...(19): siRNA sense strand
uauguuggcuuucucauuu

SEQ ID NO: 1926701 - RNA, 19 nt, Homo sapiens
  misc_RNA (1)...(19): siRNA sense strand
gaaagucaccagagagaaa

SEQ ID NO: 1926702 - RNA, 19 nt, Homo sapiens
  misc_RNA (1)...(19): siRNA sense strand
gaacaaugcacaaguggaa

SEQ ID NO: 1926703 - RNA, 19 nt, Homo sapiens
  misc_RNA (1)...(19): siRNA sense strand
ugagaaacguugcaaguga

SEQ ID NO: 1926704 - RNA, 19 nt, Homo sapiens
  misc_RNA (1)...(19): siRNA sense strand
cugcagaacuaaaucauaa

SEQ ID NO: 1926705 - RNA, 19 nt, Homo sapiens
  misc_RNA (1)...(19): siRNA sense strand
acagaaauauguuggcuuu

SEQ ID NO: 1926706 - RNA, 19 nt, Homo sapiens
  misc_RNA (1)...(19): siRNA sense strand
gagaggcaguccuauagaa

SEQ ID NO: 1926707 - RNA, 19 nt, Homo sapiens
  misc_RNA (1)...(19): siRNA sense strand
ugacauuccucuagauuug

SEQ ID NO: 1926708 - RNA, 19 nt, Homo sapiens
  misc_RNA (1)...(19): siRNA sense strand
gaucagaugucagaaaaua

SEQ ID NO: 1926709 - RNA, 19 nt, Homo sapiens
  misc_RNA (1)...(19): siRNA sense strand
gaaugcaaauggcggauau

SEQ ID NO: 1926710 - RNA, 19 nt, Homo sapiens
  misc_RNA (1)...(19): siRNA sense strand
gaacacucauguaccaaau

SEQ ID NO: 1926711 - RNA, 19 nt, Homo sapiens
  misc_RNA (1)...(19): siRNA sense strand
gagaaacguugcaagugaa

SEQ ID NO: 1926712 - RNA, 19 nt, Homo sapiens
  misc_RNA (1)...(19): siRNA sense strand
gcuggaagcucgcgaguca

SEQ ID NO: 1926713 - RNA, 19 nt, Homo sapiens
  misc_RNA (1)...(19): siRNA sense strand
gcaaagaacacucauguac

SEQ ID NO: 1926714 - RNA, 19 nt, Homo sapiens
  misc_RNA (1)...(19): siRNA sense strand
gcgaaacacccaaauuauu

SEQ ID NO: 1926715 - RNA, 19 nt, Homo sapiens
  misc_RNA (1)...(19): siRNA sense strand
gaaggcaccaccaaaugua

SEQ ID NO: 1926716 - RNA, 19 nt, Homo sapiens
  misc_RNA (1)...(19): siRNA sense strand
caagguaucuggaaagaac

SEQ ID NO: 1926717 - RNA, 19 nt, Homo sapiens
  misc_RNA (1)...(19): siRNA sense strand
gccaaacucuggauauuca

SEQ ID NO: 1926718 - RNA, 19 nt, Homo sapiens
  misc_RNA (1)...(19): siRNA sense strand
aaacaacggugagcagauu

SEQ ID NO: 1926719 - RNA, 19 nt, Homo sapiens
  misc_RNA (1)...(19): siRNA sense strand
guaacgagcuauaauuguc

SEQ ID NO: 1926720 - RNA, 19 nt, Homo sapiens
  misc_RNA (1)...(19): siRNA sense strand
gcagcagucugucaaggaa

SEQ ID NO: 1926721 - RNA, 19 nt, Homo sapiens
  misc_RNA (1)...(19): siRNA sense strand
ucacaaguguaccauuaaa

SEQ ID NO: 1926722 - RNA, 19 nt, Homo sapiens
  misc_RNA (1)...(19): siRNA sense strand
gagugaugcugcagaacua

SEQ ID NO: 1926723 - RNA, 19 nt, Homo sapiens
  misc_RNA (1)...(19): siRNA sense strand
gaagagauuucccgacacu

SEQ ID NO: 1926724 - RNA, 19 nt, Homo sapiens
  misc_RNA (1)...(19): siRNA sense strand
gcaaaucaccugcaaggau

SEQ ID NO: 1926725 - RNA, 19 nt, Homo sapiens
  misc_RNA (1)...(19): siRNA sense strand
ccauggcccugauguaauu

SEQ ID NO: 1926726 - RNA, 19 nt, Homo sapiens
  misc_RNA (1)...(19): siRNA sense strand
ccaaguauuuccgcuguaa

SEQ ID NO: 1926727 - RNA, 19 nt, Homo sapiens
  misc_RNA (1)...(19): siRNA sense strand
gcaagggagccgaggauaa

SEQ ID NO: 1926728 - RNA, 19 nt, Homo sapiens
  misc_RNA (1)...(19): siRNA sense strand
gggacucacuggagacaaa

SEQ ID NO: 1926729 - RNA, 19 nt, Homo sapiens
  misc_RNA (1)...(19): siRNA sense strand
cgaaacacccaaauuauuc

SEQ ID NO: 1926730 - RNA, 19 nt, Homo sapiens
  misc_RNA (1)...(19): siRNA sense strand
gagcagacaaagacucuaa

SEQ ID NO: 1926731 - RNA, 19 nt, Homo sapiens
  misc_RNA (1)...(19): siRNA sense strand
gaacaacauuuucuucaga

SEQ ID NO: 1926732 - RNA, 19 nt, Homo sapiens
  misc_RNA (1)...(19): siRNA sense strand
gcaguaagaaggacuugaa

SEQ ID NO: 1926733 - RNA, 19 nt, Homo sapiens
  misc_RNA (1)...(19): siRNA sense strand
guacuccucuuucacuaug

SEQ ID NO: 1926734 - RNA, 19 nt, Homo sapiens
  misc_RNA (1)...(19): siRNA sense strand
caacagcuccauaacauuc

SEQ ID NO: 1926735 - RNA, 19 nt, Homo sapiens
  misc_RNA (1)...(19): siRNA sense strand
gguguaagacugaauaaau

SEQ ID NO: 1926736 - RNA, 19 nt, Homo sapiens
  misc_RNA (1)...(19): siRNA sense strand
gaaagcaagguaucuggaa

SEQ ID NO: 1926737 - RNA, 19 nt, Homo sapiens
  misc_RNA (1)...(19): siRNA sense strand
gagaggaggucagaagauc

SEQ ID NO: 1926738 - RNA, 19 nt, Homo sapiens
  misc_RNA (1)...(19): siRNA sense strand
caagauaacagucaaagca

SEQ ID NO: 1926739 - RNA, 19 nt, Homo sapiens
  misc_RNA (1)...(19): siRNA sense strand
uagaaguacucaagaugaa

SEQ ID NO: 1926740 - RNA, 19 nt, Homo sapiens
  misc_RNA (1)...(19): siRNA sense strand
gaacaagaaagcgccuuaa

SEQ ID NO: 1926741 - RNA, 19 nt, Homo sapiens
  misc_RNA (1)...(19): siRNA sense strand
ggaccgagaguuccaguga

SEQ ID NO: 1926742 - RNA, 19 nt, Homo sapiens
  misc_RNA (1)...(19): siRNA sense strand
ggacuuugcagcccagaaa

SEQ ID NO: 1926743 - RNA, 19 nt, Homo sapiens
  misc_RNA (1)...(19): siRNA sense strand
auucacaaguguaccauua

SEQ ID NO: 1926744 - RNA, 19 nt, Homo sapiens
  misc_RNA (1)...(19): siRNA sense strand
gagcuauaauugucaguuc

SEQ ID NO: 1926745 - RNA, 19 nt, Homo sapiens
  misc_RNA (1)...(19): siRNA sense strand
gcaaagagcagaggcagau

SEQ ID NO: 1926746 - RNA, 19 nt, Homo sapiens
  misc_RNA (1)...(19): siRNA sense strand
ggagagacaaugaccaaga

SEQ ID NO: 1926747 - RNA, 19 nt, Homo sapiens
  misc_RNA (1)...(19): siRNA sense strand
gaacauucauuggcauugg

SEQ ID NO: 1926748 - RNA, 19 nt, Homo sapiens
  misc_RNA (1)...(19): siRNA sense strand
cagaagaugucaccaaagg

SEQ ID NO: 1926749 - RNA, 19 nt, Homo sapiens
  misc_RNA (1)...(19): siRNA sense strand
aaaggaagaucagaagaug

SEQ ID NO: 1926750 - RNA, 19 nt, Homo sapiens
  misc_RNA (1)...(19): siRNA sense strand
cagaugacccucaagauau

SEQ ID NO: 1926751 - RNA, 19 nt, Homo sapiens
  misc_RNA (1)...(19): siRNA sense strand
ucagaaugaucuagccaaa

SEQ ID NO: 1926752 - RNA, 19 nt, Homo sapiens
  misc_RNA (1)...(19): siRNA sense strand
gcagaucagaugucagaaa

SEQ ID NO: 1926753 - RNA, 19 nt, Homo sapiens
  misc_RNA (1)...(19): siRNA sense strand
ccaggcagcccuauugaaa

SEQ ID NO: 1926754 - RNA, 19 nt, Homo sapiens
  misc_RNA (1)...(19): siRNA sense strand
cugcgaaacacccaaauua

SEQ ID NO: 1926755 - RNA, 19 nt, Homo sapiens
  misc_RNA (1)...(19): siRNA sense strand
gagagaggcaguccuauag

SEQ ID NO: 1926756 - RNA, 19 nt, Homo sapiens
  misc_RNA (1)...(19): siRNA sense strand
ggagauccaggaaauaguu

SEQ ID NO: 1926757 - RNA, 19 nt, Homo sapiens
  misc_RNA (1)...(19): siRNA sense strand
gaacaggacaucacuacag

SEQ ID NO: 1926758 - RNA, 19 nt, Homo sapiens
  misc_RNA (1)...(19): siRNA sense strand
aaagaacacucauguacca

SEQ ID NO: 1926759 - RNA, 19 nt, Homo sapiens
  misc_RNA (1)...(19): siRNA sense strand
ggaaagcaaagaacacuca

SEQ ID NO: 1926760 - RNA, 19 nt, Homo sapiens
  misc_RNA (1)...(19): siRNA sense strand
gaggugacagacagaaaua

SEQ ID NO: 1926761 - RNA, 19 nt, Homo sapiens
  misc_RNA (1)...(19): siRNA sense strand
gcacuguggcauugucuuu

SEQ ID NO: 1926762 - RNA, 19 nt, Homo sapiens
  misc_RNA (1)...(19): siRNA sense strand
agagaaaguugauagaagu

SEQ ID NO: 1926763 - RNA, 19 nt, Homo sapiens
  misc_RNA (1)...(19): siRNA sense strand
cagagaaaguugauagaag

SEQ ID NO: 1926764 - RNA, 19 nt, Homo sapiens
  misc_RNA (1)...(19): siRNA sense strand
gcccaggguucauugacua

SEQ ID NO: 1926765 - RNA, 19 nt, Homo sapiens
  misc_RNA (1)...(19): siRNA sense strand
gugaugaccuucgcaaugu

SEQ ID NO: 1926766 - RNA, 19 nt, Homo sapiens
  misc_RNA (1)...(19): siRNA sense strand
agaggacggucaugccaua

SEQ ID NO: 1926767 - RNA, 19 nt, Homo sapiens
  misc_RNA (1)...(19): siRNA sense strand
aaacaucagugccaucagu

SEQ ID NO: 1926768 - RNA, 19 nt, Homo sapiens
  misc_RNA (1)...(19): siRNA sense strand
guguaagacugaauaaauc

SEQ ID NO: 1926769 - RNA, 19 nt, Homo sapiens
  misc_RNA (1)...(19): siRNA sense strand
cagccaaacucuggauauu

SEQ ID NO: 1926770 - RNA, 19 nt, Homo sapiens
  misc_RNA (1)...(19): siRNA sense strand
cguagaggcuccgguguuu

SEQ ID NO: 1926771 - RNA, 19 nt, Homo sapiens
  misc_RNA (1)...(19): siRNA sense strand
caaagacucuaagggauag

SEQ ID NO: 1926772 - RNA, 19 nt, Homo sapiens
  misc_RNA (1)...(19): siRNA sense strand
caagggaacaccaaguauu

SEQ ID NO: 1926773 - RNA, 19 nt, Homo sapiens
  misc_RNA (1)...(19): siRNA sense strand
uaaaugggaccuaugaugu

SEQ ID NO: 1926774 - RNA, 19 nt, Homo sapiens
  misc_RNA (1)...(19): siRNA sense strand
acaaagacucuaagggaua

SEQ ID NO: 1926775 - RNA, 19 nt, Homo sapiens
  misc_RNA (1)...(19): siRNA sense strand
uaaacacuguccauucugu

SEQ ID NO: 1926776 - RNA, 19 nt, Homo sapiens
  misc_RNA (1)...(19): siRNA sense strand
gguacucagugcccauaaa

SEQ ID NO: 1926777 - RNA, 19 nt, Homo sapiens
  misc_RNA (1)...(19): siRNA sense strand
gauagaaguacucaagaug

SEQ ID NO: 1926778 - RNA, 19 nt, Homo sapiens
  misc_RNA (1)...(19): siRNA sense strand
gaaaguugauagaaguacu

SEQ ID NO: 1926779 - RNA, 19 nt, Homo sapiens
  misc_RNA (1)...(19): siRNA sense strand
gagaaaguugauagaagua

SEQ ID NO: 1926780 - RNA, 19 nt, Homo sapiens
  misc_RNA (1)...(19): siRNA sense strand
gaaacacccaaauuauuca

SEQ ID NO: 1926781 - RNA, 19 nt, Homo sapiens
  misc_RNA (1)...(19): siRNA sense strand
aaagcaagguaucuggaaa

SEQ ID NO: 1926782 - RNA, 19 nt, Homo sapiens
  misc_RNA (1)...(19): siRNA sense strand
ugagagaggcaguccuaua

SEQ ID NO: 1926783 - RNA, 19 nt, Homo sapiens
  misc_RNA (1)...(19): siRNA sense strand
gcaaugaggagcaagucaa

SEQ ID NO: 1926784 - RNA, 19 nt, Homo sapiens
  misc_RNA (1)...(19): siRNA sense strand
gaaaauggcaggacaagau

SEQ ID NO: 1926785 - RNA, 19 nt, Homo sapiens
  misc_RNA (1)...(19): siRNA sense strand
gaagagagagaagcuggaa

SEQ ID NO: 1926786 - RNA, 19 nt, Homo sapiens
  misc_RNA (1)...(19): siRNA sense strand
aaaucgagcuccauacuaa

SEQ ID NO: 1926787 - RNA, 19 nt, Homo sapiens
  misc_RNA (1)...(19): siRNA sense strand
ccacgcagcugaccaugaa

SEQ ID NO: 1926788 - RNA, 19 nt, Homo sapiens
  misc_RNA (1)...(19): siRNA sense strand
ucuaugaguucuucaagua

SEQ ID NO: 1926789 - RNA, 19 nt, Homo sapiens
  misc_RNA (1)...(19): siRNA sense strand
gguaaugaauccagcagaa

SEQ ID NO: 1926790 - RNA, 19 nt, Homo sapiens
  misc_RNA (1)...(19): siRNA sense strand
cuacggagcccucaagaaa

SEQ ID NO: 1926791 - RNA, 19 nt, Homo sapiens
  misc_RNA (1)...(19): siRNA sense strand
agacacgaaugcagaguuu

SEQ ID NO: 1926792 - RNA, 19 nt, Homo sapiens
  misc_RNA (1)...(19): siRNA sense strand
cagcagaaguggugaagca

SEQ ID NO: 1926793 - RNA, 19 nt, Homo sapiens
  misc_RNA (1)...(19): siRNA sense strand
gaagggaucauagaaucuu

SEQ ID NO: 1926794 - RNA, 19 nt, Homo sapiens
  misc_RNA (1)...(19): siRNA sense strand
guaagacccuucugaacac

SEQ ID NO: 1926795 - RNA, 19 nt, Homo sapiens
  misc_RNA (1)...(19): siRNA sense strand
uaaaggaagggaucauaga

SEQ ID NO: 1926796 - RNA, 19 nt, Homo sapiens
  misc_RNA (1)...(19): siRNA sense strand
ggucggaggacuacgagaa

SEQ ID NO: 1926797 - RNA, 19 nt, Homo sapiens
  misc_RNA (1)...(19): siRNA sense strand
ccaaggaaacagccaccua

SEQ ID NO: 1926798 - RNA, 19 nt, Homo sapiens
  misc_RNA (1)...(19): siRNA sense strand
aggaagggaucauagaauc

SEQ ID NO: 1926799 - RNA, 19 nt, Homo sapiens
  misc_RNA (1)...(19): siRNA sense strand
aaaggaagggaucauagaa

SEQ ID NO: 1926800 - RNA, 19 nt, Homo sapiens
  misc_RNA (1)...(19): siRNA sense strand
cagcaccggucagcaauca

SEQ ID NO: 1926801 - RNA, 19 nt, Homo sapiens
  misc_RNA (1)...(19): siRNA sense strand
gcuccacgaugcgguaaug

SEQ ID NO: 1926802 - RNA, 19 nt, Homo sapiens
  misc_RNA (1)...(19): siRNA sense strand
acgagaaccugccgacuag

SEQ ID NO: 1926803 - RNA, 19 nt, Homo sapiens
  misc_RNA (1)...(19): siRNA sense strand
uguaagacccuucugaaca

SEQ ID NO: 1926804 - RNA, 19 nt, Homo sapiens
  misc_RNA (1)...(19): siRNA sense strand
acacgaaugcagaguuuga

SEQ ID NO: 1926805 - RNA, 19 nt, Homo sapiens
  misc_RNA (1)...(19): siRNA sense strand
ccaaagcccaguacacaag

SEQ ID NO: 1926806 - RNA, 19 nt, Homo sapiens
  misc_RNA (1)...(19): siRNA sense strand
aaagcccaguacacaagua

SEQ ID NO: 1926807 - RNA, 19 nt, Homo sapiens
  misc_RNA (1)...(19): siRNA sense strand
ccacgaugcgguaaugaau

SEQ ID NO: 1926808 - RNA, 19 nt, Homo sapiens
  misc_RNA (1)...(19): siRNA sense strand
uacgagaaccugccgacua

SEQ ID NO: 1926809 - RNA, 19 nt, Homo sapiens
  misc_RNA (1)...(19): siRNA sense strand
gcuugcagauguacaacuc

SEQ ID NO: 1926810 - RNA, 19 nt, Homo sapiens
  misc_RNA (1)...(19): siRNA sense strand
ggaagggaucauagaaucu

SEQ ID NO: 1926811 - RNA, 19 nt, Homo sapiens
  misc_RNA (1)...(19): siRNA sense strand
cgagcuccauacuaaagga

SEQ ID NO: 1926812 - RNA, 19 nt, Homo sapiens
  misc_RNA (1)...(19): siRNA sense strand
uaaugaauccagcagaagu

SEQ ID NO: 1926813 - RNA, 19 nt, Homo sapiens
  misc_RNA (1)...(19): siRNA sense strand
cuaaaggaagggaucauag

SEQ ID NO: 1926814 - RNA, 19 nt, Homo sapiens
  misc_RNA (1)...(19): siRNA sense strand
aagggaucauagaaucuuu

SEQ ID NO: 1926815 - RNA, 19 nt, Homo sapiens
  misc_RNA (1)...(19): siRNA sense strand
ccauccacuucaucaccua

SEQ ID NO: 1926816 - RNA, 19 nt, Homo sapiens
  misc_RNA (1)...(19): siRNA sense strand
acuaaaggaagggaucaua

SEQ ID NO: 1926817 - RNA, 19 nt, Homo sapiens
  misc_RNA (1)...(19): siRNA sense strand
cuuggucugucuaugaguu

SEQ ID NO: 1926818 - RNA, 19 nt, Homo sapiens
  misc_RNA (1)...(19): siRNA sense strand
gaaaaucgagcuccauacu

SEQ ID NO: 1926819 - RNA, 19 nt, Homo sapiens
  misc_RNA (1)...(19): siRNA sense strand
gaaaacaugaaaaggacuu

SEQ ID NO: 1926820 - RNA, 19 nt, Homo sapiens
  misc_RNA (1)...(19): siRNA sense strand
uaugaguucuucaaguacu

SEQ ID NO: 1926821 - RNA, 19 nt, Homo sapiens
  misc_RNA (1)...(19): siRNA sense strand
uuucuuggucugucuauga

SEQ ID NO: 1926822 - RNA, 19 nt, Homo sapiens
  misc_RNA (1)...(19): siRNA sense strand
agacccuucugaacacuca

SEQ ID NO: 1926823 - RNA, 19 nt, Homo sapiens
  misc_RNA (1)...(19): siRNA sense strand
guaaugaauccagcagaag

SEQ ID NO: 1926824 - RNA, 19 nt, Homo sapiens
  misc_RNA (1)...(19): siRNA sense strand
ggagcacucggucauguac

SEQ ID NO: 1926825 - RNA, 19 nt, Homo sapiens
  misc_RNA (1)...(19): siRNA sense strand
gacuuuaaaugacguuuuc

SEQ ID NO: 1926826 - RNA, 19 nt, Homo sapiens
  misc_RNA (1)...(19): siRNA sense strand
gcagucccacaucaucuca

SEQ ID NO: 1926827 - RNA, 19 nt, Homo sapiens
  misc_RNA (1)...(19): siRNA sense strand
ucuguaagacccuucugaa

SEQ ID NO: 1926828 - RNA, 19 nt, Homo sapiens
  misc_RNA (1)...(19): siRNA sense strand
cuacggagcccucaagaaa

SEQ ID NO: 1926829 - RNA, 19 nt, Homo sapiens
  misc_RNA (1)...(19): siRNA sense strand
agacacgaaugcagaguuu

SEQ ID NO: 1926830 - RNA, 19 nt, Homo sapiens
  misc_RNA (1)...(19): siRNA sense strand
ggucggaggacuacgagaa

SEQ ID NO: 1926831 - RNA, 19 nt, Homo sapiens
  misc_RNA (1)...(19): siRNA sense strand
ccaaggaaacagccaccua

SEQ ID NO: 1926832 - RNA, 19 nt, Homo sapiens
  misc_RNA (1)...(19): siRNA sense strand
acgagaaccugccgacuag

SEQ ID NO: 1926833 - RNA, 19 nt, Homo sapiens
  misc_RNA (1)...(19): siRNA sense strand
acacgaaugcagaguuuga

SEQ ID NO: 1926834 - RNA, 19 nt, Homo sapiens
  misc_RNA (1)...(19): siRNA sense strand
ccaaagcccaguacacaag

SEQ ID NO: 1926835 - RNA, 19 nt, Homo sapiens
  misc_RNA (1)...(19): siRNA sense strand
aaagcccaguacacaagua

SEQ ID NO: 1926836 - RNA, 19 nt, Homo sapiens
  misc_RNA (1)...(19): siRNA sense strand
uacgagaaccugccgacua

SEQ ID NO: 1926837 - RNA, 19 nt, Homo sapiens
  misc_RNA (1)...(19): siRNA sense strand
ggagcacucggucauguac

SEQ ID NO: 1926838 - RNA, 19 nt, Homo sapiens
  misc_RNA (1)...(19): siRNA sense strand
gacuuuaaaugacguuuuc

SEQ ID NO: 1926839 - RNA, 19 nt, Homo sapiens
  misc_RNA (1)...(19): siRNA sense strand
gaaaacaugaaaaggacuu

SEQ ID NO: 1926840 - RNA, 19 nt, Homo sapiens
  misc_RNA (1)...(19): siRNA sense strand
gaacaagagugcaagauuc

SEQ ID NO: 1926841 - RNA, 19 nt, Homo sapiens
  misc_RNA (1)...(19): siRNA sense strand
gaaaggagcuggucaacag

SEQ ID NO: 1926842 - RNA, 19 nt, Homo sapiens
  misc_RNA (1)...(19): siRNA sense strand
gggagaaccugcuggauaa

SEQ ID NO: 1926843 - RNA, 19 nt, Homo sapiens
  misc_RNA (1)...(19): siRNA sense strand
gaccagacuuuguuaauga

SEQ ID NO: 1926844 - RNA, 19 nt, Homo sapiens
  misc_RNA (1)...(19): siRNA sense strand
ggacaaugggauauuaaua

SEQ ID NO: 1926845 - RNA, 19 nt, Homo sapiens
  misc_RNA (1)...(19): siRNA sense strand
gagauuagcuguggcuuuc

SEQ ID NO: 1926846 - RNA, 19 nt, Homo sapiens
  misc_RNA (1)...(19): siRNA sense strand
gaagagcuguccugaccaa

SEQ ID NO: 1926847 - RNA, 19 nt, Homo sapiens
  misc_RNA (1)...(19): siRNA sense strand
gggaacugcuggcccaaua

SEQ ID NO: 1926848 - RNA, 19 nt, Homo sapiens
  misc_RNA (1)...(19): siRNA sense strand
gcacgaggaucaggaauca

SEQ ID NO: 1926849 - RNA, 19 nt, Homo sapiens
  misc_RNA (1)...(19): siRNA sense strand
ggaccagacuuuguuaaug

SEQ ID NO: 1926850 - RNA, 19 nt, Homo sapiens
  misc_RNA (1)...(19): siRNA sense strand
gaucucgccuuucuguuga

SEQ ID NO: 1926851 - RNA, 19 nt, Homo sapiens
  misc_RNA (1)...(19): siRNA sense strand
ggaacaagagugcaagauu

SEQ ID NO: 1926852 - RNA, 19 nt, Homo sapiens
  misc_RNA (1)...(19): siRNA sense strand
gaaggugacgauguuguua

SEQ ID NO: 1926853 - RNA, 19 nt, Homo sapiens
  misc_RNA (1)...(19): siRNA sense strand
guugaaagcagugaaauuu

SEQ ID NO: 1926854 - RNA, 19 nt, Homo sapiens
  misc_RNA (1)...(19): siRNA sense strand
ggacacaguugaugaucuc

SEQ ID NO: 1926855 - RNA, 19 nt, Homo sapiens
  misc_RNA (1)...(19): siRNA sense strand
gcacuggaggcauggguua

SEQ ID NO: 1926856 - RNA, 19 nt, Homo sapiens
  misc_RNA (1)...(19): siRNA sense strand
gaucaggaaucaggagaga

SEQ ID NO: 1926857 - RNA, 19 nt, Homo sapiens
  misc_RNA (1)...(19): siRNA sense strand
uuaaugaaguuucgucugu

SEQ ID NO: 1926858 - RNA, 19 nt, Homo sapiens
  misc_RNA (1)...(19): siRNA sense strand
gaaguuucgucuguuguau

SEQ ID NO: 1926859 - RNA, 19 nt, Homo sapiens
  misc_RNA (1)...(19): siRNA sense strand
gaagaucauugagcaccaa

SEQ ID NO: 1926860 - RNA, 19 nt, Homo sapiens
  misc_RNA (1)...(19): siRNA sense strand
gaagaggugaagaucauug

SEQ ID NO: 1926861 - RNA, 19 nt, Homo sapiens
  misc_RNA (1)...(19): siRNA sense strand
caguaccauucgccuauua

SEQ ID NO: 1926862 - RNA, 19 nt, Homo sapiens
  misc_RNA (1)...(19): siRNA sense strand
cagauguguuugccacuuu

SEQ ID NO: 1926863 - RNA, 19 nt, Homo sapiens
  misc_RNA (1)...(19): siRNA sense strand
aaucgaaucuccggcuuaa

SEQ ID NO: 1926864 - RNA, 19 nt, Homo sapiens
  misc_RNA (1)...(19): siRNA sense strand
gaaccugcuggauaaguuu

SEQ ID NO: 1926865 - RNA, 19 nt, Homo sapiens
  misc_RNA (1)...(19): siRNA sense strand
uguggacaaugggauauua

SEQ ID NO: 1926866 - RNA, 19 nt, Homo sapiens
  misc_RNA (1)...(19): siRNA sense strand
gagcuguccugaccaagag

SEQ ID NO: 1926867 - RNA, 19 nt, Homo sapiens
  misc_RNA (1)...(19): siRNA sense strand
ccugguauuuagaacauaa

SEQ ID NO: 1926868 - RNA, 19 nt, Homo sapiens
  misc_RNA (1)...(19): siRNA sense strand
gaugaucucgccuuucugu

SEQ ID NO: 1926869 - RNA, 19 nt, Homo sapiens
  misc_RNA (1)...(19): siRNA sense strand
caagaggaccagacuuugu

SEQ ID NO: 1926870 - RNA, 19 nt, Homo sapiens
  misc_RNA (1)...(19): siRNA sense strand
gacaguaccauucgccuau

SEQ ID NO: 1926871 - RNA, 19 nt, Homo sapiens
  misc_RNA (1)...(19): siRNA sense strand
cccaauacaccaaacagua

SEQ ID NO: 1926872 - RNA, 19 nt, Homo sapiens
  misc_RNA (1)...(19): siRNA sense strand
gaucauugagcaccaaaca

SEQ ID NO: 1926873 - RNA, 19 nt, Homo sapiens
  misc_RNA (1)...(19): siRNA sense strand
agaccaagaaggaggauuu

SEQ ID NO: 1926874 - RNA, 19 nt, Homo sapiens
  misc_RNA (1)...(19): siRNA sense strand
uaacauggacacaguugau

SEQ ID NO: 1926875 - RNA, 19 nt, Homo sapiens
  misc_RNA (1)...(19): siRNA sense strand
agaaccugcuggauaaguu

SEQ ID NO: 1926876 - RNA, 19 nt, Homo sapiens
  misc_RNA (1)...(19): siRNA sense strand
caccaaacaguaugaagaa

SEQ ID NO: 1926877 - RNA, 19 nt, Homo sapiens
  misc_RNA (1)...(19): siRNA sense strand
gaacugcuggcccaauaca

SEQ ID NO: 1926878 - RNA, 19 nt, Homo sapiens
  misc_RNA (1)...(19): siRNA sense strand
aagcuuggguugacgauag

SEQ ID NO: 1926879 - RNA, 19 nt, Homo sapiens
  misc_RNA (1)...(19): siRNA sense strand
aggaagaggugaagaucau

SEQ ID NO: 1926880 - RNA, 19 nt, Homo sapiens
  misc_RNA (1)...(19): siRNA sense strand
ugaaguuucgucuguugua

SEQ ID NO: 1926881 - RNA, 19 nt, Homo sapiens
  misc_RNA (1)...(19): siRNA sense strand
aaugaaguuucgucuguug

SEQ ID NO: 1926882 - RNA, 19 nt, Homo sapiens
  misc_RNA (1)...(19): siRNA sense strand
uaaugaaguuucgucuguu

SEQ ID NO: 1926883 - RNA, 19 nt, Homo sapiens
  misc_RNA (1)...(19): siRNA sense strand
caagagugcaagauucaau

SEQ ID NO: 1926884 - RNA, 19 nt, Homo sapiens
  misc_RNA (1)...(19): siRNA sense strand
ugacgauguuguuaugcuu

SEQ ID NO: 1926885 - RNA, 19 nt, Homo sapiens
  misc_RNA (1)...(19): siRNA sense strand
agggagaaccugcuggaua

SEQ ID NO: 1926886 - RNA, 19 nt, Homo sapiens
  misc_RNA (1)...(19): siRNA sense strand
ggccugguauuuagaacau

SEQ ID NO: 1926887 - RNA, 19 nt, Homo sapiens
  misc_RNA (1)...(19): siRNA sense strand
ggaaaggagcuggucaaca

SEQ ID NO: 1926888 - RNA, 19 nt, Homo sapiens
  misc_RNA (1)...(19): siRNA sense strand
ccaaggaagaggugaagau

SEQ ID NO: 1926889 - RNA, 19 nt, Homo sapiens
  misc_RNA (1)...(19): siRNA sense strand
ucaggaaucaggagagaug

SEQ ID NO: 1926890 - RNA, 19 nt, Homo sapiens
  misc_RNA (1)...(19): siRNA sense strand
cauuuaacauggacacagu

SEQ ID NO: 1926891 - RNA, 19 nt, Homo sapiens
  misc_RNA (1)...(19): siRNA sense strand
acaccaaacaguaugaaga

SEQ ID NO: 1926892 - RNA, 19 nt, Homo sapiens
  misc_RNA (1)...(19): siRNA sense strand
gaggaccagacuuuguuaa

SEQ ID NO: 1926893 - RNA, 19 nt, Homo sapiens
  misc_RNA (1)...(19): siRNA sense strand
cgagauuagcuguggcuuu

SEQ ID NO: 1926894 - RNA, 19 nt, Homo sapiens
  misc_RNA (1)...(19): siRNA sense strand
gacaagcugagaaccaguu

SEQ ID NO: 1926895 - RNA, 19 nt, Homo sapiens
  misc_RNA (1)...(19): siRNA sense strand
uugaugaucucgccuuucu

SEQ ID NO: 1926896 - RNA, 19 nt, Homo sapiens
  misc_RNA (1)...(19): siRNA sense strand
guggccagaauuuauuaua

SEQ ID NO: 1926897 - RNA, 19 nt, Homo sapiens
  misc_RNA (1)...(19): siRNA sense strand
guacaaggagggucugcau

SEQ ID NO: 1926898 - RNA, 19 nt, Homo sapiens
  misc_RNA (1)...(19): siRNA sense strand
ggaagaggugaagaucauu

SEQ ID NO: 1926899 - RNA, 19 nt, Homo sapiens
  misc_RNA (1)...(19): siRNA sense strand
gauuagcuguggcuuucca

SEQ ID NO: 1926900 - RNA, 19 nt, Homo sapiens
  misc_RNA (1)...(19): siRNA sense strand
ccaagaggaccagacuuug

SEQ ID NO: 1926901 - RNA, 19 nt, Homo sapiens
  misc_RNA (1)...(19): siRNA sense strand
ucaccgaguuaccuuagag

SEQ ID NO: 1926902 - RNA, 19 nt, Homo sapiens
  misc_RNA (1)...(19): siRNA sense strand
ugaucucgccuuucuguug

SEQ ID NO: 1926903 - RNA, 19 nt, Homo sapiens
  misc_RNA (1)...(19): siRNA sense strand
ugaaggugacgauguuguu

SEQ ID NO: 1926904 - RNA, 19 nt, Homo sapiens
  misc_RNA (1)...(19): siRNA sense strand
ucauugagcaccaaacaca

SEQ ID NO: 1926905 - RNA, 19 nt, Homo sapiens
  misc_RNA (1)...(19): siRNA sense strand
aagaggaccagacuuuguu

SEQ ID NO: 1926906 - RNA, 19 nt, Homo sapiens
  misc_RNA (1)...(19): siRNA sense strand
gaagcuuggguugacgaua

SEQ ID NO: 1926907 - RNA, 19 nt, Homo sapiens
  misc_RNA (1)...(19): siRNA sense strand
caaggagggucugcauggu

SEQ ID NO: 1926908 - RNA, 19 nt, Homo sapiens
  misc_RNA (1)...(19): siRNA sense strand
caaggaagaggugaagauc

SEQ ID NO: 1926909 - RNA, 19 nt, Homo sapiens
  misc_RNA (1)...(19): siRNA sense strand
uuucgucuguuguauggaa

SEQ ID NO: 1926910 - RNA, 19 nt, Homo sapiens
  misc_RNA (1)...(19): siRNA sense strand
ccaugaagcuuggguugac

SEQ ID NO: 1926911 - RNA, 19 nt, Homo sapiens
  misc_RNA (1)...(19): siRNA sense strand
accaagaggaccagacuuu

SEQ ID NO: 1926912 - RNA, 19 nt, Homo sapiens
  misc_RNA (1)...(19): siRNA sense strand
gaguuaccuuagagcaguu

SEQ ID NO: 1926913 - RNA, 19 nt, Homo sapiens
  misc_RNA (1)...(19): siRNA sense strand
gguuugguggccagaauuu

SEQ ID NO: 1926914 - RNA, 19 nt, Homo sapiens
  misc_RNA (1)...(19): siRNA sense strand
ucgaaucuccggcuuaaag

SEQ ID NO: 1926915 - RNA, 19 nt, Homo sapiens
  misc_RNA (1)...(19): siRNA sense strand
gcacugaccccuucgagau

SEQ ID NO: 1926916 - RNA, 19 nt, Homo sapiens
  misc_RNA (1)...(19): siRNA sense strand
aaaucgaaucuccggcuua

SEQ ID NO: 1926917 - RNA, 19 nt, Homo sapiens
  misc_RNA (1)...(19): siRNA sense strand
acagauguguuugccacuu

SEQ ID NO: 1926918 - RNA, 19 nt, Homo sapiens
  misc_RNA (1)...(19): siRNA sense strand
agaggaccagacuuuguua

SEQ ID NO: 1926919 - RNA, 19 nt, Homo sapiens
  misc_RNA (1)...(19): siRNA sense strand
guggacaaugggauauuaa

SEQ ID NO: 1926920 - RNA, 19 nt, Homo sapiens
  misc_RNA (1)...(19): siRNA sense strand
gaaucuccggcuuaaagug

SEQ ID NO: 1926921 - RNA, 19 nt, Homo sapiens
  misc_RNA (1)...(19): siRNA sense strand
acaguaccauucgccuauu

SEQ ID NO: 1926922 - RNA, 19 nt, Homo sapiens
  misc_RNA (1)...(19): siRNA sense strand
gagaaccugcuggauaagu

SEQ ID NO: 1926923 - RNA, 19 nt, Homo sapiens
  misc_RNA (1)...(19): siRNA sense strand
ccaaacaguaugaagaaaa

SEQ ID NO: 1926924 - RNA, 19 nt, Homo sapiens
  misc_RNA (1)...(19): siRNA sense strand
gaacgacacuuacaagaaa

SEQ ID NO: 1926925 - RNA, 19 nt, Homo sapiens
  misc_RNA (1)...(19): siRNA sense strand
gaaacaacagcaagaauua

SEQ ID NO: 1926926 - RNA, 19 nt, Homo sapiens
  misc_RNA (1)...(19): siRNA sense strand
uaaagucacuacucagaua

SEQ ID NO: 1926927 - RNA, 19 nt, Homo sapiens
  misc_RNA (1)...(19): siRNA sense strand
gguagagauugacauauua

SEQ ID NO: 1926928 - RNA, 19 nt, Homo sapiens
  misc_RNA (1)...(19): siRNA sense strand
gaaagaaguggucgaagua

SEQ ID NO: 1926929 - RNA, 19 nt, Homo sapiens
  misc_RNA (1)...(19): siRNA sense strand
agaaagaguuguccaaauu

SEQ ID NO: 1926930 - RNA, 19 nt, Homo sapiens
  misc_RNA (1)...(19): siRNA sense strand
gaacagcaguaaucaagga

SEQ ID NO: 1926931 - RNA, 19 nt, Homo sapiens
  misc_RNA (1)...(19): siRNA sense strand
gaaguaggccagaaauuaa

SEQ ID NO: 1926932 - RNA, 19 nt, Homo sapiens
  misc_RNA (1)...(19): siRNA sense strand
gaaaguggaugaagacagu

SEQ ID NO: 1926933 - RNA, 19 nt, Homo sapiens
  misc_RNA (1)...(19): siRNA sense strand
caauacaagugaugugaua

SEQ ID NO: 1926934 - RNA, 19 nt, Homo sapiens
  misc_RNA (1)...(19): siRNA sense strand
ggaaagaaguggucgaagu

SEQ ID NO: 1926935 - RNA, 19 nt, Homo sapiens
  misc_RNA (1)...(19): siRNA sense strand
gagagagagugccugaaua

SEQ ID NO: 1926936 - RNA, 19 nt, Homo sapiens
  misc_RNA (1)...(19): siRNA sense strand
gcaaagacaucagcuacuu

SEQ ID NO: 1926937 - RNA, 19 nt, Homo sapiens
  misc_RNA (1)...(19): siRNA sense strand
cgaaguaggccagaaauua

SEQ ID NO: 1926938 - RNA, 19 nt, Homo sapiens
  misc_RNA (1)...(19): siRNA sense strand
gagagugccugaauaacaa

SEQ ID NO: 1926939 - RNA, 19 nt, Homo sapiens
  misc_RNA (1)...(19): siRNA sense strand
uaaagacaguggaucgaua

SEQ ID NO: 1926940 - RNA, 19 nt, Homo sapiens
  misc_RNA (1)...(19): siRNA sense strand
gaauggccauguuuaagaa

SEQ ID NO: 1926941 - RNA, 19 nt, Homo sapiens
  misc_RNA (1)...(19): siRNA sense strand
gaaagaaggaggaacaaga

SEQ ID NO: 1926942 - RNA, 19 nt, Homo sapiens
  misc_RNA (1)...(19): siRNA sense strand
caucaaagauaguuacaga

SEQ ID NO: 1926943 - RNA, 19 nt, Homo sapiens
  misc_RNA (1)...(19): siRNA sense strand
gagcaagacugcccaagau

SEQ ID NO: 1926944 - RNA, 19 nt, Homo sapiens
  misc_RNA (1)...(19): siRNA sense strand
ccaagaaacuguggacauu

SEQ ID NO: 1926945 - RNA, 19 nt, Homo sapiens
  misc_RNA (1)...(19): siRNA sense strand
caacaacgagaacaaauuu

SEQ ID NO: 1926946 - RNA, 19 nt, Homo sapiens
  misc_RNA (1)...(19): siRNA sense strand
gcaauaaacaguucagaga

SEQ ID NO: 1926947 - RNA, 19 nt, Homo sapiens
  misc_RNA (1)...(19): siRNA sense strand
gaaagaguuguccaaauuu

SEQ ID NO: 1926948 - RNA, 19 nt, Homo sapiens
  misc_RNA (1)...(19): siRNA sense strand
gagaaagaguuguccaaau

SEQ ID NO: 1926949 - RNA, 19 nt, Homo sapiens
  misc_RNA (1)...(19): siRNA sense strand
gaacuugagagaccauuaa

SEQ ID NO: 1926950 - RNA, 19 nt, Homo sapiens
  misc_RNA (1)...(19): siRNA sense strand
gcaaagagcccaacaacag

SEQ ID NO: 1926951 - RNA, 19 nt, Homo sapiens
  misc_RNA (1)...(19): siRNA sense strand
gaagaaaacacgcaaauuu

SEQ ID NO: 1926952 - RNA, 19 nt, Homo sapiens
  misc_RNA (1)...(19): siRNA sense strand
ggaagacacccaagagaaa

SEQ ID NO: 1926953 - RNA, 19 nt, Homo sapiens
  misc_RNA (1)...(19): siRNA sense strand
agaaauggcugagauagaa

SEQ ID NO: 1926954 - RNA, 19 nt, Homo sapiens
  misc_RNA (1)...(19): siRNA sense strand
ggguaucacuuuaauagaa

SEQ ID NO: 1926955 - RNA, 19 nt, Homo sapiens
  misc_RNA (1)...(19): siRNA sense strand
gcauugaacuacuuacaug

SEQ ID NO: 1926956 - RNA, 19 nt, Homo sapiens
  misc_RNA (1)...(19): siRNA sense strand
ggacagacccuaugacuac

SEQ ID NO: 1926957 - RNA, 19 nt, Homo sapiens
  misc_RNA (1)...(19): siRNA sense strand
gcucgaagaacgacacuua

SEQ ID NO: 1926958 - RNA, 19 nt, Homo sapiens
  misc_RNA (1)...(19): siRNA sense strand
gaaggaggaacaagaguuu

SEQ ID NO: 1926959 - RNA, 19 nt, Homo sapiens
  misc_RNA (1)...(19): siRNA sense strand
caaaggagaacaagagaaa

SEQ ID NO: 1926960 - RNA, 19 nt, Homo sapiens
  misc_RNA (1)...(19): siRNA sense strand
gaacaagcaauaaacaguu

SEQ ID NO: 1926961 - RNA, 19 nt, Homo sapiens
  misc_RNA (1)...(19): siRNA sense strand
cguaguaacucugaagaua

SEQ ID NO: 1926962 - RNA, 19 nt, Homo sapiens
  misc_RNA (1)...(19): siRNA sense strand
gaaguagucaugugugaaa

SEQ ID NO: 1926963 - RNA, 19 nt, Homo sapiens
  misc_RNA (1)...(19): siRNA sense strand
gcaaacaguagauuuaguu

SEQ ID NO: 1926964 - RNA, 19 nt, Homo sapiens
  misc_RNA (1)...(19): siRNA sense strand
guaacaacaucaaagauag

SEQ ID NO: 1926965 - RNA, 19 nt, Homo sapiens
  misc_RNA (1)...(19): siRNA sense strand
gaacauaauggacaucaau

SEQ ID NO: 1926966 - RNA, 19 nt, Homo sapiens
  misc_RNA (1)...(19): siRNA sense strand
caacaaacccauccgagaa

SEQ ID NO: 1926967 - RNA, 19 nt, Homo sapiens
  misc_RNA (1)...(19): siRNA sense strand
guacaaggcccagaauaaa

SEQ ID NO: 1926968 - RNA, 19 nt, Homo sapiens
  misc_RNA (1)...(19): siRNA sense strand
cagagcaaaugcagcguua

SEQ ID NO: 1926969 - RNA, 19 nt, Homo sapiens
  misc_RNA (1)...(19): siRNA sense strand
gcaaagaggaagaugaaga

SEQ ID NO: 1926970 - RNA, 19 nt, Homo sapiens
  misc_RNA (1)...(19): siRNA sense strand
cacuaaaucugaagaagaa

SEQ ID NO: 1926971 - RNA, 19 nt, Homo sapiens
  misc_RNA (1)...(19): siRNA sense strand
agagagaaauugagaccua

SEQ ID NO: 1926972 - RNA, 19 nt, Homo sapiens
  misc_RNA (1)...(19): siRNA sense strand
gaggaacauacaagaauua

SEQ ID NO: 1926973 - RNA, 19 nt, Homo sapiens
  misc_RNA (1)...(19): siRNA sense strand
gcagaguaaugaugggaaa

SEQ ID NO: 1926974 - RNA, 19 nt, Homo sapiens
  misc_RNA (1)...(19): siRNA sense strand
ggacauuaauucagucagu

SEQ ID NO: 1926975 - RNA, 19 nt, Homo sapiens
  misc_RNA (1)...(19): siRNA sense strand
aagaaacuguggacauuaa

SEQ ID NO: 1926976 - RNA, 19 nt, Homo sapiens
  misc_RNA (1)...(19): siRNA sense strand
cgacggagccuuugggaaa

SEQ ID NO: 1926977 - RNA, 19 nt, Homo sapiens
  misc_RNA (1)...(19): siRNA sense strand
ucaaacagcagcuuaaaga

SEQ ID NO: 1926978 - RNA, 19 nt, Homo sapiens
  misc_RNA (1)...(19): siRNA sense strand
caagaaacaagaagacaaa

SEQ ID NO: 1926979 - RNA, 19 nt, Homo sapiens
  misc_RNA (1)...(19): siRNA sense strand
cagcagauguggcucagaa

SEQ ID NO: 1926980 - RNA, 19 nt, Homo sapiens
  misc_RNA (1)...(19): siRNA sense strand
ccagauggucuucaaauuu

SEQ ID NO: 1926981 - RNA, 19 nt, Homo sapiens
  misc_RNA (1)...(19): siRNA sense strand
agagauuccuuuauuggua

SEQ ID NO: 1926982 - RNA, 19 nt, Homo sapiens
  misc_RNA (1)...(19): siRNA sense strand
gaagaagaacuugaagauu

SEQ ID NO: 1926983 - RNA, 19 nt, Homo sapiens
  misc_RNA (1)...(19): siRNA sense strand
gcaacaacgagaacaaauu

SEQ ID NO: 1926984 - RNA, 19 nt, Homo sapiens
  misc_RNA (1)...(19): siRNA sense strand
ucaggaacuucgggaauua

SEQ ID NO: 1926985 - RNA, 19 nt, Homo sapiens
  misc_RNA (1)...(19): siRNA sense strand
cuacucagauagauaaaga

SEQ ID NO: 1926986 - RNA, 19 nt, Homo sapiens
  misc_RNA (1)...(19): siRNA sense strand
ggaguuagaugaggaacau

SEQ ID NO: 1926987 - RNA, 19 nt, Homo sapiens
  misc_RNA (1)...(19): siRNA sense strand
gaacaagagcacacaaauc

SEQ ID NO: 1926988 - RNA, 19 nt, Homo sapiens
  misc_RNA (1)...(19): siRNA sense strand
gcaacauucucuuuaccuu

SEQ ID NO: 1926989 - RNA, 19 nt, Homo sapiens
  misc_RNA (1)...(19): siRNA sense strand
gaaggaaacagagcaaaug

SEQ ID NO: 1926990 - RNA, 19 nt, Homo sapiens
  misc_RNA (1)...(19): siRNA sense strand
uagcuaauauugagagaga

SEQ ID NO: 1926991 - RNA, 19 nt, Homo sapiens
  misc_RNA (1)...(19): siRNA sense strand
acacgcaaauuuauuguug

SEQ ID NO: 1926992 - RNA, 19 nt, Homo sapiens
  misc_RNA (1)...(19): siRNA sense strand
caaguaagcgugcaucuuc

SEQ ID NO: 1926993 - RNA, 19 nt, Homo sapiens
  misc_RNA (1)...(19): siRNA sense strand
gaggacaauucaaagaaga

SEQ ID NO: 1926994 - RNA, 19 nt, Homo sapiens
  misc_RNA (1)...(19): siRNA sense strand
caacauucucuuuaccuua

SEQ ID NO: 1926995 - RNA, 19 nt, Homo sapiens
  misc_RNA (1)...(19): siRNA sense strand
ggcgaaggcugaaguaaca

SEQ ID NO: 1926996 - RNA, 19 nt, Homo sapiens
  misc_RNA (1)...(19): siRNA sense strand
gaucaguauuucaugcaaa

SEQ ID NO: 1926997 - RNA, 19 nt, Homo sapiens
  misc_RNA (1)...(19): siRNA sense strand
caaagauaguuacagauag

SEQ ID NO: 1926998 - RNA, 19 nt, Homo sapiens
  misc_RNA (1)...(19): siRNA sense strand
uauuaccgaugcucaguua

SEQ ID NO: 1926999 - RNA, 19 nt, Homo sapiens
  misc_RNA (1)...(19): siRNA sense strand
ucugaaggcuggcaacauu

SEQ ID NO: 1927000 - RNA, 19 nt, Homo sapiens
  misc_RNA (1)...(19): siRNA sense strand
cagacagacucaagaaaga

SEQ ID NO: 1927001 - RNA, 19 nt, Homo sapiens
  misc_RNA (1)...(19): siRNA sense strand
aagauaaacucaacagcaa

SEQ ID NO: 1927002 - RNA, 19 nt, Homo sapiens
  misc_RNA (1)...(19): siRNA sense strand
guaguaacucugaagauaa

SEQ ID NO: 1927003 - RNA, 19 nt, Homo sapiens
  misc_RNA (1)...(19): siRNA sense strand
ugaaguaacagaagaaguu

SEQ ID NO: 1927004 - RNA, 19 nt, Homo sapiens
  misc_RNA (1)...(19): siRNA sense strand
uuggauggcuccugaagua

SEQ ID NO: 1927005 - RNA, 19 nt, Homo sapiens
  misc_RNA (1)...(19): siRNA sense strand
gaagagauuccuuuauugg

SEQ ID NO: 1927006 - RNA, 19 nt, Homo sapiens
  misc_RNA (1)...(19): siRNA sense strand
agauggagauaucaaauug

SEQ ID NO: 1927007 - RNA, 19 nt, Homo sapiens
  misc_RNA (1)...(19): siRNA sense strand
ugaggaacauacaagaauu

SEQ ID NO: 1927008 - RNA, 19 nt, Homo sapiens
  misc_RNA (1)...(19): siRNA sense strand
caaagacaucagcuacuua

SEQ ID NO: 1927009 - RNA, 19 nt, Homo sapiens
  misc_RNA (1)...(19): siRNA sense strand
gcuuaaagaucaguauuuc

SEQ ID NO: 1927010 - RNA, 19 nt, Homo sapiens
  misc_RNA (1)...(19): siRNA sense strand
gaauugcgguuucuuagac

SEQ ID NO: 1927011 - RNA, 19 nt, Homo sapiens
  misc_RNA (1)...(19): siRNA sense strand
gaaaucacugagucaagua

SEQ ID NO: 1927012 - RNA, 19 nt, Homo sapiens
  misc_RNA (1)...(19): siRNA sense strand
uaauagaaauggcugagau

SEQ ID NO: 1927013 - RNA, 19 nt, Homo sapiens
  misc_RNA (1)...(19): siRNA sense strand
agaagagauuccuuuauug

SEQ ID NO: 1927014 - RNA, 19 nt, Homo sapiens
  misc_RNA (1)...(19): siRNA sense strand
gccaauaccugcaaguaag

SEQ ID NO: 1927015 - RNA, 19 nt, Homo sapiens
  misc_RNA (1)...(19): siRNA sense strand
ggaaauugagaaucuagaa

SEQ ID NO: 1927016 - RNA, 19 nt, Homo sapiens
  misc_RNA (1)...(19): siRNA sense strand
gagcaggaaaugaugagua

SEQ ID NO: 1927017 - RNA, 19 nt, Homo sapiens
  misc_RNA (1)...(19): siRNA sense strand
gacaguggaucgauaucuu

SEQ ID NO: 1927018 - RNA, 19 nt, Homo sapiens
  misc_RNA (1)...(19): siRNA sense strand
ucacuacucagauagauaa

SEQ ID NO: 1927019 - RNA, 19 nt, Homo sapiens
  misc_RNA (1)...(19): siRNA sense strand
gaagugugguggcugauac

SEQ ID NO: 1927020 - RNA, 19 nt, Homo sapiens
  misc_RNA (1)...(19): siRNA sense strand
ugguagagauugacauauu

SEQ ID NO: 1927021 - RNA, 19 nt, Homo sapiens
  misc_RNA (1)...(19): siRNA sense strand
gcgacaauaugaccaggaa

SEQ ID NO: 1927022 - RNA, 19 nt, Homo sapiens
  misc_RNA (1)...(19): siRNA sense strand
caagaaacuguggacauua

SEQ ID NO: 1927023 - RNA, 19 nt, Homo sapiens
  misc_RNA (1)...(19): siRNA sense strand
gagagaccauuaacugagu

SEQ ID NO: 1927024 - RNA, 19 nt, Homo sapiens
  misc_RNA (1)...(19): siRNA sense strand
gagauuugccuacaaggua

SEQ ID NO: 1927025 - RNA, 19 nt, Homo sapiens
  misc_RNA (1)...(19): siRNA sense strand
ggaacuggcuucuguuugc

SEQ ID NO: 1927026 - RNA, 19 nt, Homo sapiens
  misc_RNA (1)...(19): siRNA sense strand
gcaaggauuuccgggacua

SEQ ID NO: 1927027 - RNA, 19 nt, Homo sapiens
  misc_RNA (1)...(19): siRNA sense strand
gggacuaccucaugaguac

SEQ ID NO: 1927028 - RNA, 19 nt, Homo sapiens
  misc_RNA (1)...(19): siRNA sense strand
ccucggaacuggcuucugu

SEQ ID NO: 1927029 - RNA, 19 nt, Homo sapiens
  misc_RNA (1)...(19): siRNA sense strand
ccacgcaacaaaugaagua

SEQ ID NO: 1927030 - RNA, 19 nt, Homo sapiens
  misc_RNA (1)...(19): siRNA sense strand
ucaaacacgagaugacuaa

SEQ ID NO: 1927031 - RNA, 19 nt, Homo sapiens
  misc_RNA (1)...(19): siRNA sense strand
gaacuggcuucuguuugca

SEQ ID NO: 1927032 - RNA, 19 nt, Homo sapiens
  misc_RNA (1)...(19): siRNA sense strand
caugagauuugccuacaag

SEQ ID NO: 1927033 - RNA, 19 nt, Homo sapiens
  misc_RNA (1)...(19): siRNA sense strand
ucagugggcggaugacauu

SEQ ID NO: 1927034 - RNA, 19 nt, Homo sapiens
  misc_RNA (1)...(19): siRNA sense strand
uaaaacggcaucugcauaa

SEQ ID NO: 1927035 - RNA, 19 nt, Homo sapiens
  misc_RNA (1)...(19): siRNA sense strand
ugaaguagcccagcucauc

SEQ ID NO: 1927036 - RNA, 19 nt, Homo sapiens
  misc_RNA (1)...(19): siRNA sense strand
gcuauucuuugacauucau

SEQ ID NO: 1927037 - RNA, 19 nt, Homo sapiens
  misc_RNA (1)...(19): siRNA sense strand
gcaugccacgcaacaaaug

SEQ ID NO: 1927038 - RNA, 19 nt, Homo sapiens
  misc_RNA (1)...(19): siRNA sense strand
ucaugagauuugccuacaa

SEQ ID NO: 1927039 - RNA, 19 nt, Homo sapiens
  misc_RNA (1)...(19): siRNA sense strand
ucuuugacauucaugagau

SEQ ID NO: 1927040 - RNA, 19 nt, Homo sapiens
  misc_RNA (1)...(19): siRNA sense strand
guugcuauucuuugacauu

SEQ ID NO: 1927041 - RNA, 19 nt, Homo sapiens
  misc_RNA (1)...(19): siRNA sense strand
ugacauucaugagauuugc

SEQ ID NO: 1927042 - RNA, 19 nt, Homo sapiens
  misc_RNA (1)...(19): siRNA sense strand
gaaagaaacuguugaauca

SEQ ID NO: 1927043 - RNA, 19 nt, Homo sapiens
  misc_RNA (1)...(19): siRNA sense strand
ggacugaacucacuuauga

SEQ ID NO: 1927044 - RNA, 19 nt, Homo sapiens
  misc_RNA (1)...(19): siRNA sense strand
gagaaacaauggacaauua

SEQ ID NO: 1927045 - RNA, 19 nt, Homo sapiens
  misc_RNA (1)...(19): siRNA sense strand
guaaagggauugauaaaga

SEQ ID NO: 1927046 - RNA, 19 nt, Homo sapiens
  misc_RNA (1)...(19): siRNA sense strand
gaacaugcauucagcaaga

SEQ ID NO: 1927047 - RNA, 19 nt, Homo sapiens
  misc_RNA (1)...(19): siRNA sense strand
gcagacaccuuuacagauu

SEQ ID NO: 1927048 - RNA, 19 nt, Homo sapiens
  misc_RNA (1)...(19): siRNA sense strand
gaaauggucuguuaaugga

SEQ ID NO: 1927049 - RNA, 19 nt, Homo sapiens
  misc_RNA (1)...(19): siRNA sense strand
gaaauuggguucuacuguu

SEQ ID NO: 1927050 - RNA, 19 nt, Homo sapiens
  misc_RNA (1)...(19): siRNA sense strand
ccaagugucuguaguauga

SEQ ID NO: 1927051 - RNA, 19 nt, Homo sapiens
  misc_RNA (1)...(19): siRNA sense strand
ggagagcgauauaagcaua

SEQ ID NO: 1927052 - RNA, 19 nt, Homo sapiens
  misc_RNA (1)...(19): siRNA sense strand
gaaaagggaucuuaugaaa

SEQ ID NO: 1927053 - RNA, 19 nt, Homo sapiens
  misc_RNA (1)...(19): siRNA sense strand
caaaugaggucaccaguca

SEQ ID NO: 1927054 - RNA, 19 nt, Homo sapiens
  misc_RNA (1)...(19): siRNA sense strand
caaagaacuuggagaacua

SEQ ID NO: 1927055 - RNA, 19 nt, Homo sapiens
  misc_RNA (1)...(19): siRNA sense strand
ggagaugccucaacuggaa

SEQ ID NO: 1927056 - RNA, 19 nt, Homo sapiens
  misc_RNA (1)...(19): siRNA sense strand
gcacaccagugauaauauu

SEQ ID NO: 1927057 - RNA, 19 nt, Homo sapiens
  misc_RNA (1)...(19): siRNA sense strand
uaaaucggcuucacagaaa

SEQ ID NO: 1927058 - RNA, 19 nt, Homo sapiens
  misc_RNA (1)...(19): siRNA sense strand
gaggaaggccuaaaucuaa

SEQ ID NO: 1927059 - RNA, 19 nt, Homo sapiens
  misc_RNA (1)...(19): siRNA sense strand
gcaagcagccaaugagaua

SEQ ID NO: 1927060 - RNA, 19 nt, Homo sapiens
  misc_RNA (1)...(19): siRNA sense strand
gaaagaagcuaggaauugg

SEQ ID NO: 1927061 - RNA, 19 nt, Homo sapiens
  misc_RNA (1)...(19): siRNA sense strand
caagagaaguguaguggaa

SEQ ID NO: 1927062 - RNA, 19 nt, Homo sapiens
  misc_RNA (1)...(19): siRNA sense strand
ugacagcccuggacucuuu

SEQ ID NO: 1927063 - RNA, 19 nt, Homo sapiens
  misc_RNA (1)...(19): siRNA sense strand
ccaacuaucuuucgaauca

SEQ ID NO: 1927064 - RNA, 19 nt, Homo sapiens
  misc_RNA (1)...(19): siRNA sense strand
gaaagaaccaguuuacuuc

SEQ ID NO: 1927065 - RNA, 19 nt, Homo sapiens
  misc_RNA (1)...(19): siRNA sense strand
gacaaacacugccaaguug

SEQ ID NO: 1927066 - RNA, 19 nt, Homo sapiens
  misc_RNA (1)...(19): siRNA sense strand
ggauggugauugacaguua

SEQ ID NO: 1927067 - RNA, 19 nt, Homo sapiens
  misc_RNA (1)...(19): siRNA sense strand
caagcaagcuagaaucuga

SEQ ID NO: 1927068 - RNA, 19 nt, Homo sapiens
  misc_RNA (1)...(19): siRNA sense strand
gcugaaagccuaaguacua

SEQ ID NO: 1927069 - RNA, 19 nt, Homo sapiens
  misc_RNA (1)...(19): siRNA sense strand
gaaagcagaugauguugca

SEQ ID NO: 1927070 - RNA, 19 nt, Homo sapiens
  misc_RNA (1)...(19): siRNA sense strand
gcacaggacacuucacuaa

SEQ ID NO: 1927071 - RNA, 19 nt, Homo sapiens
  misc_RNA (1)...(19): siRNA sense strand
gaucuguccuggaaucuuu

SEQ ID NO: 1927072 - RNA, 19 nt, Homo sapiens
  misc_RNA (1)...(19): siRNA sense strand
ggaaagaaccaguuuacuu

SEQ ID NO: 1927073 - RNA, 19 nt, Homo sapiens
  misc_RNA (1)...(19): siRNA sense strand
gcacuucuccggacuuuaa

SEQ ID NO: 1927074 - RNA, 19 nt, Homo sapiens
  misc_RNA (1)...(19): siRNA sense strand
gcaaggauuugaucaggaa

SEQ ID NO: 1927075 - RNA, 19 nt, Homo sapiens
  misc_RNA (1)...(19): siRNA sense strand
gaucaugacuuccuuaaac

SEQ ID NO: 1927076 - RNA, 19 nt, Homo sapiens
  misc_RNA (1)...(19): siRNA sense strand
gaacuaauaagucgccuaa

SEQ ID NO: 1927077 - RNA, 19 nt, Homo sapiens
  misc_RNA (1)...(19): siRNA sense strand
gaagagcaagagaauaaua

SEQ ID NO: 1927078 - RNA, 19 nt, Homo sapiens
  misc_RNA (1)...(19): siRNA sense strand
cgacuguuaucucacauua

SEQ ID NO: 1927079 - RNA, 19 nt, Homo sapiens
  misc_RNA (1)...(19): siRNA sense strand
acucagaaauggcagauua

SEQ ID NO: 1927080 - RNA, 19 nt, Homo sapiens
  misc_RNA (1)...(19): siRNA sense strand
gacauaaacuugacaucuu

SEQ ID NO: 1927081 - RNA, 19 nt, Homo sapiens
  misc_RNA (1)...(19): siRNA sense strand
gcaagaaaggaaccauuua

SEQ ID NO: 1927082 - RNA, 19 nt, Homo sapiens
  misc_RNA (1)...(19): siRNA sense strand
ggaaagaagcuaggaauug

SEQ ID NO: 1927083 - RNA, 19 nt, Homo sapiens
  misc_RNA (1)...(19): siRNA sense strand
guaagaagccagaugauga

SEQ ID NO: 1927084 - RNA, 19 nt, Homo sapiens
  misc_RNA (1)...(19): siRNA sense strand
ggucagagcccuguaagua

SEQ ID NO: 1927085 - RNA, 19 nt, Homo sapiens
  misc_RNA (1)...(19): siRNA sense strand
caagaaagcagaugauguu

SEQ ID NO: 1927086 - RNA, 19 nt, Homo sapiens
  misc_RNA (1)...(19): siRNA sense strand
guaaagcacaccagugaua

SEQ ID NO: 1927087 - RNA, 19 nt, Homo sapiens
  misc_RNA (1)...(19): siRNA sense strand
gaacagagacgaggaagga

SEQ ID NO: 1927088 - RNA, 19 nt, Homo sapiens
  misc_RNA (1)...(19): siRNA sense strand
cuacagaacuaaucgaaga

SEQ ID NO: 1927089 - RNA, 19 nt, Homo sapiens
  misc_RNA (1)...(19): siRNA sense strand
cuacagcgguauucauuaa

SEQ ID NO: 1927090 - RNA, 19 nt, Homo sapiens
  misc_RNA (1)...(19): siRNA sense strand
gaauguaaagggauugaua

SEQ ID NO: 1927091 - RNA, 19 nt, Homo sapiens
  misc_RNA (1)...(19): siRNA sense strand
gcaccaaacccuaugcuuu

SEQ ID NO: 1927092 - RNA, 19 nt, Homo sapiens
  misc_RNA (1)...(19): siRNA sense strand
cagauugacuguucagaaa

SEQ ID NO: 1927093 - RNA, 19 nt, Homo sapiens
  misc_RNA (1)...(19): siRNA sense strand
ggaauuggaacagauaaua

SEQ ID NO: 1927094 - RNA, 19 nt, Homo sapiens
  misc_RNA (1)...(19): siRNA sense strand
ccaguucagugccauauuu

SEQ ID NO: 1927095 - RNA, 19 nt, Homo sapiens
  misc_RNA (1)...(19): siRNA sense strand
gagaagaggucgcaaacca

SEQ ID NO: 1927096 - RNA, 19 nt, Homo sapiens
  misc_RNA (1)...(19): siRNA sense strand
guggaaagaugacggauga

SEQ ID NO: 1927097 - RNA, 19 nt, Homo sapiens
  misc_RNA (1)...(19): siRNA sense strand
gaaggacgacgauguuauu

SEQ ID NO: 1927098 - RNA, 19 nt, Homo sapiens
  misc_RNA (1)...(19): siRNA sense strand
gguaucaucucuuauaaag

SEQ ID NO: 1927099 - RNA, 19 nt, Homo sapiens
  misc_RNA (1)...(19): siRNA sense strand
aagcagggcuguauucuga

SEQ ID NO: 1927100 - RNA, 19 nt, Homo sapiens
  misc_RNA (1)...(19): siRNA sense strand
gggaggugcuucugaugua

SEQ ID NO: 1927101 - RNA, 19 nt, Homo sapiens
  misc_RNA (1)...(19): siRNA sense strand
cgaaaggccuauuacaaug

SEQ ID NO: 1927102 - RNA, 19 nt, Homo sapiens
  misc_RNA (1)...(19): siRNA sense strand
gauccucacugguuacuau

SEQ ID NO: 1927103 - RNA, 19 nt, Homo sapiens
  misc_RNA (1)...(19): siRNA sense strand
gaagccaccuguacuguca

SEQ ID NO: 1927104 - RNA, 19 nt, Homo sapiens
  misc_RNA (1)...(19): siRNA sense strand
gaacuuggagaacuaugua

SEQ ID NO: 1927105 - RNA, 19 nt, Homo sapiens
  misc_RNA (1)...(19): siRNA sense strand
ccagaugucccacuauaua

SEQ ID NO: 1927106 - RNA, 19 nt, Homo sapiens
  misc_RNA (1)...(19): siRNA sense strand
ggaaacacaaucagcuaua

SEQ ID NO: 1927107 - RNA, 19 nt, Homo sapiens
  misc_RNA (1)...(19): siRNA sense strand
ggucauaguauaaguauug

SEQ ID NO: 1927108 - RNA, 19 nt, Homo sapiens
  misc_RNA (1)...(19): siRNA sense strand
guuaaagcaucauguauuc

SEQ ID NO: 1927109 - RNA, 19 nt, Homo sapiens
  misc_RNA (1)...(19): siRNA sense strand
caaagaagaaguaucagaa

SEQ ID NO: 1927110 - RNA, 19 nt, Homo sapiens
  misc_RNA (1)...(19): siRNA sense strand
gaaagugacaaccauagaa

SEQ ID NO: 1927111 - RNA, 19 nt, Homo sapiens
  misc_RNA (1)...(19): siRNA sense strand
gaugaugguuugacugaug

SEQ ID NO: 1927112 - RNA, 19 nt, Homo sapiens
  misc_RNA (1)...(19): siRNA sense strand
gcgaaggcguacuuuguuu

SEQ ID NO: 1927113 - RNA, 19 nt, Homo sapiens
  misc_RNA (1)...(19): siRNA sense strand
caaacggaaucgagaaaga

SEQ ID NO: 1927114 - RNA, 19 nt, Homo sapiens
  misc_RNA (1)...(19): siRNA sense strand
gaagaggucgcaaaccaaa

SEQ ID NO: 1927115 - RNA, 19 nt, Homo sapiens
  misc_RNA (1)...(19): siRNA sense strand
uggcaggucugaucaguaa

SEQ ID NO: 1927116 - RNA, 19 nt, Homo sapiens
  misc_RNA (1)...(19): siRNA sense strand
gaaagaugaugguuugacu

SEQ ID NO: 1927117 - RNA, 19 nt, Homo sapiens
  misc_RNA (1)...(19): siRNA sense strand
gagaagcuuuggaagaaug

SEQ ID NO: 1927118 - RNA, 19 nt, Homo sapiens
  misc_RNA (1)...(19): siRNA sense strand
gaagaaguaucagaaagca

SEQ ID NO: 1927119 - RNA, 19 nt, Homo sapiens
  misc_RNA (1)...(19): siRNA sense strand
gagcauguuucucugauuc

SEQ ID NO: 1927120 - RNA, 19 nt, Homo sapiens
  misc_RNA (1)...(19): siRNA sense strand
caucagagagcacaaauug

SEQ ID NO: 1927121 - RNA, 19 nt, Homo sapiens
  misc_RNA (1)...(19): siRNA sense strand
ggaaggaucaggcaggaaa

SEQ ID NO: 1927122 - RNA, 19 nt, Homo sapiens
  misc_RNA (1)...(19): siRNA sense strand
aaagauuucucgccucauu

SEQ ID NO: 1927123 - RNA, 19 nt, Homo sapiens
  misc_RNA (1)...(19): siRNA sense strand
aagagaagcuggaguauac

SEQ ID NO: 1927124 - RNA, 19 nt, Homo sapiens
  misc_RNA (1)...(19): siRNA sense strand
aagaagagcaagagaauaa

SEQ ID NO: 1927125 - RNA, 19 nt, Homo sapiens
  misc_RNA (1)...(19): siRNA sense strand
ggaagaagagcaagagaau

SEQ ID NO: 1927126 - RNA, 19 nt, Homo sapiens
  misc_RNA (1)...(19): siRNA sense strand
gcaucucacuccuaucuga

SEQ ID NO: 1927127 - RNA, 19 nt, Homo sapiens
  misc_RNA (1)...(19): siRNA sense strand
cuucaaaguuguacaagaa

SEQ ID NO: 1927128 - RNA, 19 nt, Homo sapiens
  misc_RNA (1)...(19): siRNA sense strand
caagucagcacaccuguuu

SEQ ID NO: 1927129 - RNA, 19 nt, Homo sapiens
  misc_RNA (1)...(19): siRNA sense strand
gaucuuaucaccauagaga

SEQ ID NO: 1927130 - RNA, 19 nt, Homo sapiens
  misc_RNA (1)...(19): siRNA sense strand
ggaguucccucucgaaguc

SEQ ID NO: 1927131 - RNA, 19 nt, Homo sapiens
  misc_RNA (1)...(19): siRNA sense strand
ucucuuagcugauagugaa

SEQ ID NO: 1927132 - RNA, 19 nt, Homo sapiens
  misc_RNA (1)...(19): siRNA sense strand
aaagaugccauaaaccuua

SEQ ID NO: 1927133 - RNA, 19 nt, Homo sapiens
  misc_RNA (1)...(19): siRNA sense strand
uaaagagucuggcaagaag

SEQ ID NO: 1927134 - RNA, 19 nt, Homo sapiens
  misc_RNA (1)...(19): siRNA sense strand
uagccgggauccugauuua

SEQ ID NO: 1927135 - RNA, 19 nt, Homo sapiens
  misc_RNA (1)...(19): siRNA sense strand
caucaguacuggcacauug

SEQ ID NO: 1927136 - RNA, 19 nt, Homo sapiens
  misc_RNA (1)...(19): siRNA sense strand
gaaguacuaugggcguaaa

SEQ ID NO: 1927137 - RNA, 19 nt, Homo sapiens
  misc_RNA (1)...(19): siRNA sense strand
gagaaaagguuggcuauug

SEQ ID NO: 1927138 - RNA, 19 nt, Homo sapiens
  misc_RNA (1)...(19): siRNA sense strand
ucauguagcucacuaucaa

SEQ ID NO: 1927139 - RNA, 19 nt, Homo sapiens
  misc_RNA (1)...(19): siRNA sense strand
gaagaagagcaagagaaua

SEQ ID NO: 1927140 - RNA, 19 nt, Homo sapiens
  misc_RNA (1)...(19): siRNA sense strand
uaaaggagcaagaugugua

SEQ ID NO: 1927141 - RNA, 19 nt, Homo sapiens
  misc_RNA (1)...(19): siRNA sense strand
ucacucagcaucauuauau

SEQ ID NO: 1927142 - RNA, 19 nt, Homo sapiens
  misc_RNA (1)...(19): siRNA sense strand
gaacaaagccaucuccuau

SEQ ID NO: 1927143 - RNA, 19 nt, Homo sapiens
  misc_RNA (1)...(19): siRNA sense strand
ucacugaccucuucuuugu

SEQ ID NO: 1927144 - RNA, 19 nt, Homo sapiens
  misc_RNA (1)...(19): siRNA sense strand
ggagauaaccagagugaga

SEQ ID NO: 1927145 - RNA, 19 nt, Homo sapiens
  misc_RNA (1)...(19): siRNA sense strand
ccaagaugcuggugaacuu

SEQ ID NO: 1927146 - RNA, 19 nt, Homo sapiens
  misc_RNA (1)...(19): siRNA sense strand
ggauguuccuguccaugua

SEQ ID NO: 1927147 - RNA, 19 nt, Homo sapiens
  misc_RNA (1)...(19): siRNA sense strand
gaaaugugcucaucauccu

SEQ ID NO: 1927148 - RNA, 19 nt, Homo sapiens
  misc_RNA (1)...(19): siRNA sense strand
ggauggagauaaccagagu

SEQ ID NO: 1927149 - RNA, 19 nt, Homo sapiens
  misc_RNA (1)...(19): siRNA sense strand
caaaugcccucggccucua

SEQ ID NO: 1927150 - RNA, 19 nt, Homo sapiens
  misc_RNA (1)...(19): siRNA sense strand
ucagaaccauccuucaaau

SEQ ID NO: 1927151 - RNA, 19 nt, Homo sapiens
  misc_RNA (1)...(19): siRNA sense strand
gagauaaccagagugagaa

SEQ ID NO: 1927152 - RNA, 19 nt, Homo sapiens
  misc_RNA (1)...(19): siRNA sense strand
cuccauaccuacuccauga

SEQ ID NO: 1927153 - RNA, 19 nt, Homo sapiens
  misc_RNA (1)...(19): siRNA sense strand
ucacggugcugggaaaugu

SEQ ID NO: 1927154 - RNA, 19 nt, Homo sapiens
  misc_RNA (1)...(19): siRNA sense strand
caccuaugaugaacccuuu

SEQ ID NO: 1927155 - RNA, 19 nt, Homo sapiens
  misc_RNA (1)...(19): siRNA sense strand
acaaagccaucuccuaugc

SEQ ID NO: 1927156 - RNA, 19 nt, Homo sapiens
  misc_RNA (1)...(19): siRNA sense strand
gugcugacaccuaugauga

SEQ ID NO: 1927157 - RNA, 19 nt, Homo sapiens
  misc_RNA (1)...(19): siRNA sense strand
gauggcguaugaucgcuau

SEQ ID NO: 1927158 - RNA, 19 nt, Homo sapiens
  misc_RNA (1)...(19): siRNA sense strand
uccacuaccucuucuguga

SEQ ID NO: 1927159 - RNA, 19 nt, Homo sapiens
  misc_RNA (1)...(19): siRNA sense strand
gauguaugcugugcugaca

SEQ ID NO: 1927160 - RNA, 19 nt, Homo sapiens
  misc_RNA (1)...(19): siRNA sense strand
gucagaaccauccuucaaa

SEQ ID NO: 1927161 - RNA, 19 nt, Homo sapiens
  misc_RNA (1)...(19): siRNA sense strand
gcccucggccucuaagaaa

SEQ ID NO: 1927162 - RNA, 19 nt, Homo sapiens
  misc_RNA (1)...(19): siRNA sense strand
cuauguacguauugucaga

SEQ ID NO: 1927163 - RNA, 19 nt, Homo sapiens
  misc_RNA (1)...(19): siRNA sense strand
gagauccacuaccucuucu

SEQ ID NO: 1927164 - RNA, 19 nt, Homo sapiens
  misc_RNA (1)...(19): siRNA sense strand
ccucggccucuaagaaaua

SEQ ID NO: 1927165 - RNA, 19 nt, Homo sapiens
  misc_RNA (1)...(19): siRNA sense strand
gaacuuccagucccagaac

SEQ ID NO: 1927166 - RNA, 19 nt, Homo sapiens
  misc_RNA (1)...(19): siRNA sense strand
guucaugaccacauccuau

SEQ ID NO: 1927167 - RNA, 19 nt, Homo sapiens
  misc_RNA (1)...(19): siRNA sense strand
gcugggaaaugugcucauc

SEQ ID NO: 1927168 - RNA, 19 nt, Homo sapiens
  misc_RNA (1)...(19): siRNA sense strand
ggacgcuugcuauggugua

SEQ ID NO: 1927169 - RNA, 19 nt, Homo sapiens
  misc_RNA (1)...(19): siRNA sense strand
agaacaaagccaucuccua

SEQ ID NO: 1927170 - RNA, 19 nt, Homo sapiens
  misc_RNA (1)...(19): siRNA sense strand
gauccacuaccucuucugu

SEQ ID NO: 1927171 - RNA, 19 nt, Homo sapiens
  misc_RNA (1)...(19): siRNA sense strand
gguguggucucccucuuuu

SEQ ID NO: 1927172 - RNA, 19 nt, Homo sapiens
  misc_RNA (1)...(19): siRNA sense strand
ugaccagggugaccuucug

SEQ ID NO: 1927173 - RNA, 19 nt, Homo sapiens
  misc_RNA (1)...(19): siRNA sense strand
cuauggagacccuuucaga

SEQ ID NO: 1927174 - RNA, 19 nt, Homo sapiens
  misc_RNA (1)...(19): siRNA sense strand
gcugugcugacaccuauga

SEQ ID NO: 1927175 - RNA, 19 nt, Homo sapiens
  misc_RNA (1)...(19): siRNA sense strand
ccucuucugugacauguac

SEQ ID NO: 1927176 - RNA, 19 nt, Homo sapiens
  misc_RNA (1)...(19): siRNA sense strand
ccaacacccacaucauuca

SEQ ID NO: 1927177 - RNA, 19 nt, Homo sapiens
  misc_RNA (1)...(19): siRNA sense strand
ucuacaggcugaggaacaa

SEQ ID NO: 1927178 - RNA, 19 nt, Homo sapiens
  misc_RNA (1)...(19): siRNA sense strand
ugucagaaccauccuucaa

SEQ ID NO: 1927179 - RNA, 19 nt, Homo sapiens
  misc_RNA (1)...(19): siRNA sense strand
uggccgugauggcguauga

SEQ ID NO: 1927180 - RNA, 19 nt, Homo sapiens
  misc_RNA (1)...(19): siRNA sense strand
cuaccugugccucccauuu

SEQ ID NO: 1927181 - RNA, 19 nt, Homo sapiens
  misc_RNA (1)...(19): siRNA sense strand
ugggaaaugugcucaucau

SEQ ID NO: 1927182 - RNA, 19 nt, Homo sapiens
  misc_RNA (1)...(19): siRNA sense strand
cuccuucacugaccucuuc

SEQ ID NO: 1927183 - RNA, 19 nt, Homo sapiens
  misc_RNA (1)...(19): siRNA sense strand
cagaaccauccuucaaaug

SEQ ID NO: 1927184 - RNA, 19 nt, Homo sapiens
  misc_RNA (1)...(19): siRNA sense strand
cauccuauguacguauugu

SEQ ID NO: 1927185 - RNA, 19 nt, Homo sapiens
  misc_RNA (1)...(19): siRNA sense strand
gcugaggaacaaagacaug

SEQ ID NO: 1927186 - RNA, 19 nt, Homo sapiens
  misc_RNA (1)...(19): siRNA sense strand
gcagcagcggauccuguuu

SEQ ID NO: 1927187 - RNA, 19 nt, Homo sapiens
  misc_RNA (1)...(19): siRNA sense strand
gcugacaccuaugaugaac

SEQ ID NO: 1927188 - RNA, 19 nt, Homo sapiens
  misc_RNA (1)...(19): siRNA sense strand
ggguguggucucccucuuu

SEQ ID NO: 1927189 - RNA, 19 nt, Homo sapiens
  misc_RNA (1)...(19): siRNA sense strand
ggcguaugaucgcuaugug

SEQ ID NO: 1927190 - RNA, 19 nt, Homo sapiens
  misc_RNA (1)...(19): siRNA sense strand
guacguauugucagaacca

SEQ ID NO: 1927191 - RNA, 19 nt, Homo sapiens
  misc_RNA (1)...(19): siRNA sense strand
uaccugugccucccauuug

SEQ ID NO: 1927192 - RNA, 19 nt, Homo sapiens
  misc_RNA (1)...(19): siRNA sense strand
gaaacaaugugguggaaua

SEQ ID NO: 1927193 - RNA, 19 nt, Homo sapiens
  misc_RNA (1)...(19): siRNA sense strand
gcaaguagauaguacauug

SEQ ID NO: 1927194 - RNA, 19 nt, Homo sapiens
  misc_RNA (1)...(19): siRNA sense strand
ggaaauugaugaacaaaga

SEQ ID NO: 1927195 - RNA, 19 nt, Homo sapiens
  misc_RNA (1)...(19): siRNA sense strand
uauaagagcugcagaguug

SEQ ID NO: 1927196 - RNA, 19 nt, Homo sapiens
  misc_RNA (1)...(19): siRNA sense strand
ccagauaccuugucaauag

SEQ ID NO: 1927197 - RNA, 19 nt, Homo sapiens
  misc_RNA (1)...(19): siRNA sense strand
gcaacacacucucuugaaa

SEQ ID NO: 1927198 - RNA, 19 nt, Homo sapiens
  misc_RNA (1)...(19): siRNA sense strand
ccaagaauuuccagugaua

SEQ ID NO: 1927199 - RNA, 19 nt, Homo sapiens
  misc_RNA (1)...(19): siRNA sense strand
ggaaggcuaugucuuauca

SEQ ID NO: 1927200 - RNA, 19 nt, Homo sapiens
  misc_RNA (1)...(19): siRNA sense strand
gcugauaaauguacuguug

SEQ ID NO: 1927201 - RNA, 19 nt, Homo sapiens
  misc_RNA (1)...(19): siRNA sense strand
caacagcgauacaaguuug

SEQ ID NO: 1927202 - RNA, 19 nt, Homo sapiens
  misc_RNA (1)...(19): siRNA sense strand
gaaagaggaguacaccuaa

SEQ ID NO: 1927203 - RNA, 19 nt, Homo sapiens
  misc_RNA (1)...(19): siRNA sense strand
gaacaggaagcuauacuga

SEQ ID NO: 1927204 - RNA, 19 nt, Homo sapiens
  misc_RNA (1)...(19): siRNA sense strand
gaagaaaguagcaguguug

SEQ ID NO: 1927205 - RNA, 19 nt, Homo sapiens
  misc_RNA (1)...(19): siRNA sense strand
gaaaguaucaucaguccuu

SEQ ID NO: 1927206 - RNA, 19 nt, Homo sapiens
  misc_RNA (1)...(19): siRNA sense strand
gaagaaaugcuagaaguga

SEQ ID NO: 1927207 - RNA, 19 nt, Homo sapiens
  misc_RNA (1)...(19): siRNA sense strand
ccaggaagguaucuaugua

SEQ ID NO: 1927208 - RNA, 19 nt, Homo sapiens
  misc_RNA (1)...(19): siRNA sense strand
ccaagaacuuugugagauu

SEQ ID NO: 1927209 - RNA, 19 nt, Homo sapiens
  misc_RNA (1)...(19): siRNA sense strand
uaacuagucuuaaccaaag

SEQ ID NO: 1927210 - RNA, 19 nt, Homo sapiens
  misc_RNA (1)...(19): siRNA sense strand
ggaagaaaguagcaguguu

SEQ ID NO: 1927211 - RNA, 19 nt, Homo sapiens
  misc_RNA (1)...(19): siRNA sense strand
gcugagaugucacaaacaa

SEQ ID NO: 1927212 - RNA, 19 nt, Homo sapiens
  misc_RNA (1)...(19): siRNA sense strand
gaacaguuaucaucuucau

SEQ ID NO: 1927213 - RNA, 19 nt, Homo sapiens
  misc_RNA (1)...(19): siRNA sense strand
uaaaccagauccauuaauc

SEQ ID NO: 1927214 - RNA, 19 nt, Homo sapiens
  misc_RNA (1)...(19): siRNA sense strand
ugaaagaguugcaggacaa

SEQ ID NO: 1927215 - RNA, 19 nt, Homo sapiens
  misc_RNA (1)...(19): siRNA sense strand
caugaacacugaaauggaa

SEQ ID NO: 1927216 - RNA, 19 nt, Homo sapiens
  misc_RNA (1)...(19): siRNA sense strand
gaacugaguauccacaaug

SEQ ID NO: 1927217 - RNA, 19 nt, Homo sapiens
  misc_RNA (1)...(19): siRNA sense strand
ugaaugaccaugacaauga

SEQ ID NO: 1927218 - RNA, 19 nt, Homo sapiens
  misc_RNA (1)...(19): siRNA sense strand
aaaaugaugucgccacuua

SEQ ID NO: 1927219 - RNA, 19 nt, Homo sapiens
  misc_RNA (1)...(19): siRNA sense strand
auaaaggccuggcuacuga

SEQ ID NO: 1927220 - RNA, 19 nt, Homo sapiens
  misc_RNA (1)...(19): siRNA sense strand
ggaagguaucuauguauuu

SEQ ID NO: 1927221 - RNA, 19 nt, Homo sapiens
  misc_RNA (1)...(19): siRNA sense strand
gagacagccuuaucagugu

SEQ ID NO: 1927222 - RNA, 19 nt, Homo sapiens
  misc_RNA (1)...(19): siRNA sense strand
gcgaaggaauggaugaugu

SEQ ID NO: 1927223 - RNA, 19 nt, Homo sapiens
  misc_RNA (1)...(19): siRNA sense strand
caauagcaacuucuaauga

SEQ ID NO: 1927224 - RNA, 19 nt, Homo sapiens
  misc_RNA (1)...(19): siRNA sense strand
ucagauggauuaacuaguc

SEQ ID NO: 1927225 - RNA, 19 nt, Homo sapiens
  misc_RNA (1)...(19): siRNA sense strand
gaaugaccaugacaaugau

SEQ ID NO: 1927226 - RNA, 19 nt, Homo sapiens
  misc_RNA (1)...(19): siRNA sense strand
ggagagagugaacugagua

SEQ ID NO: 1927227 - RNA, 19 nt, Homo sapiens
  misc_RNA (1)...(19): siRNA sense strand
gacaaucuacagacucaua

SEQ ID NO: 1927228 - RNA, 19 nt, Homo sapiens
  misc_RNA (1)...(19): siRNA sense strand
aggaauggaugauguuuau

SEQ ID NO: 1927229 - RNA, 19 nt, Homo sapiens
  misc_RNA (1)...(19): siRNA sense strand
uagaagggcugagauguca

SEQ ID NO: 1927230 - RNA, 19 nt, Homo sapiens
  misc_RNA (1)...(19): siRNA sense strand
cagcacagucuuccagaua

SEQ ID NO: 1927231 - RNA, 19 nt, Homo sapiens
  misc_RNA (1)...(19): siRNA sense strand
caacaagggcuacaucaag

SEQ ID NO: 1927232 - RNA, 19 nt, Homo sapiens
  misc_RNA (1)...(19): siRNA sense strand
aaacuaaaccagauccauu

SEQ ID NO: 1927233 - RNA, 19 nt, Homo sapiens
  misc_RNA (1)...(19): siRNA sense strand
ggacaaauucugagucucu

SEQ ID NO: 1927234 - RNA, 19 nt, Homo sapiens
  misc_RNA (1)...(19): siRNA sense strand
ugacaaugaugccaauauc

SEQ ID NO: 1927235 - RNA, 19 nt, Homo sapiens
  misc_RNA (1)...(19): siRNA sense strand
aagggaaggcuaugucuua

SEQ ID NO: 1927236 - RNA, 19 nt, Homo sapiens
  misc_RNA (1)...(19): siRNA sense strand
gggcugagaugucacaaac

SEQ ID NO: 1927237 - RNA, 19 nt, Homo sapiens
  misc_RNA (1)...(19): siRNA sense strand
gagauuccggcuaaaguaa

SEQ ID NO: 1927238 - RNA, 19 nt, Homo sapiens
  misc_RNA (1)...(19): siRNA sense strand
ggaggaaaugguaugcaua

SEQ ID NO: 1927239 - RNA, 19 nt, Homo sapiens
  misc_RNA (1)...(19): siRNA sense strand
guaaguuucuaucaucauc

SEQ ID NO: 1927240 - RNA, 19 nt, Homo sapiens
  misc_RNA (1)...(19): siRNA sense strand
gaaauggguaggaggaaau

SEQ ID NO: 1927241 - RNA, 19 nt, Homo sapiens
  misc_RNA (1)...(19): siRNA sense strand
cagaacaguuaucaucuuc

SEQ ID NO: 1927242 - RNA, 19 nt, Homo sapiens
  misc_RNA (1)...(19): siRNA sense strand
ucagaacaguuaucaucuu

SEQ ID NO: 1927243 - RNA, 19 nt, Homo sapiens
  misc_RNA (1)...(19): siRNA sense strand
gcucagaacaguuaucauc

SEQ ID NO: 1927244 - RNA, 19 nt, Homo sapiens
  misc_RNA (1)...(19): siRNA sense strand
gcaagauaguggaaaauga

SEQ ID NO: 1927245 - RNA, 19 nt, Homo sapiens
  misc_RNA (1)...(19): siRNA sense strand
gaaggaauggaugauguuu

SEQ ID NO: 1927246 - RNA, 19 nt, Homo sapiens
  misc_RNA (1)...(19): siRNA sense strand
agaaagaggaguacaccua

SEQ ID NO: 1927247 - RNA, 19 nt, Homo sapiens
  misc_RNA (1)...(19): siRNA sense strand
ggaagaaaugcuagaagug

SEQ ID NO: 1927248 - RNA, 19 nt, Homo sapiens
  misc_RNA (1)...(19): siRNA sense strand
ucuaaugagccaagaauuu

SEQ ID NO: 1927249 - RNA, 19 nt, Homo sapiens
  misc_RNA (1)...(19): siRNA sense strand
gaggaaccaugagagagaa

SEQ ID NO: 1927250 - RNA, 19 nt, Homo sapiens
  misc_RNA (1)...(19): siRNA sense strand
caagaacuuugugagauuc

SEQ ID NO: 1927251 - RNA, 19 nt, Homo sapiens
  misc_RNA (1)...(19): siRNA sense strand
guugauugcuccuauccaa

SEQ ID NO: 1927252 - RNA, 19 nt, Homo sapiens
  misc_RNA (1)...(19): siRNA sense strand
uaagcaacauggucagcaa

SEQ ID NO: 1927253 - RNA, 19 nt, Homo sapiens
  misc_RNA (1)...(19): siRNA sense strand
gcaacaagggcuacaucaa

SEQ ID NO: 1927254 - RNA, 19 nt, Homo sapiens
  misc_RNA (1)...(19): siRNA sense strand
gauggauuaacuagucuua

SEQ ID NO: 1927255 - RNA, 19 nt, Homo sapiens
  misc_RNA (1)...(19): siRNA sense strand
caaaggcaaguagauagua

SEQ ID NO: 1927256 - RNA, 19 nt, Homo sapiens
  misc_RNA (1)...(19): siRNA sense strand
gaccugagccugacagaag

SEQ ID NO: 1927257 - RNA, 19 nt, Homo sapiens
  misc_RNA (1)...(19): siRNA sense strand
cauguuauccagaaguuaa

SEQ ID NO: 1927258 - RNA, 19 nt, Homo sapiens
  misc_RNA (1)...(19): siRNA sense strand
gaacagagugcagaaagag

SEQ ID NO: 1927259 - RNA, 19 nt, Homo sapiens
  misc_RNA (1)...(19): siRNA sense strand
gaacaguacggcauguauc

SEQ ID NO: 1927260 - RNA, 19 nt, Homo sapiens
  misc_RNA (1)...(19): siRNA sense strand
aaacucuucagauggauua

SEQ ID NO: 1927261 - RNA, 19 nt, Homo sapiens
  misc_RNA (1)...(19): siRNA sense strand
guggagcgauugccaagug

SEQ ID NO: 1927262 - RNA, 19 nt, Homo sapiens
  misc_RNA (1)...(19): siRNA sense strand
ggaguacaccuaagucagu

SEQ ID NO: 1927263 - RNA, 19 nt, Homo sapiens
  misc_RNA (1)...(19): siRNA sense strand
gcuccuauccaaucuuuga

SEQ ID NO: 1927264 - RNA, 19 nt, Homo sapiens
  misc_RNA (1)...(19): siRNA sense strand
ggcuaugucuuaucagugu

SEQ ID NO: 1927265 - RNA, 19 nt, Homo sapiens
  misc_RNA (1)...(19): siRNA sense strand
ccaaaacgcuucagacgau

SEQ ID NO: 1927266 - RNA, 19 nt, Homo sapiens
  misc_RNA (1)...(19): siRNA sense strand
gaaguuaagcaagauagug

SEQ ID NO: 1927267 - RNA, 19 nt, Homo sapiens
  misc_RNA (1)...(19): siRNA sense strand
caccuaagucagucaguua

SEQ ID NO: 1927268 - RNA, 19 nt, Homo sapiens
  misc_RNA (1)...(19): siRNA sense strand
gauccauuaauccauguua

SEQ ID NO: 1927269 - RNA, 19 nt, Homo sapiens
  misc_RNA (1)...(19): siRNA sense strand
ccagauaucccaguaagug

SEQ ID NO: 1927270 - RNA, 19 nt, Homo sapiens
  misc_RNA (1)...(19): siRNA sense strand
agaacagagugcagaaaga

SEQ ID NO: 1927271 - RNA, 19 nt, Homo sapiens
  misc_RNA (1)...(19): siRNA sense strand
gaauauaccagugcaagca

SEQ ID NO: 1927272 - RNA, 19 nt, Homo sapiens
  misc_RNA (1)...(19): siRNA sense strand
cgacagagacagccuuauc

SEQ ID NO: 1927273 - RNA, 19 nt, Homo sapiens
  misc_RNA (1)...(19): siRNA sense strand
cuacacaaguggcaacaag

SEQ ID NO: 1927274 - RNA, 19 nt, Homo sapiens
  misc_RNA (1)...(19): siRNA sense strand
ggccggagaaggacaaauu

SEQ ID NO: 1927275 - RNA, 19 nt, Homo sapiens
  misc_RNA (1)...(19): siRNA sense strand
uuugugagauuccggcuaa

SEQ ID NO: 1927276 - RNA, 19 nt, Homo sapiens
  misc_RNA (1)...(19): siRNA sense strand
uauacugacugcugaaagu

SEQ ID NO: 1927277 - RNA, 19 nt, Homo sapiens
  misc_RNA (1)...(19): siRNA sense strand
ugauacagcugauggaaaa

SEQ ID NO: 1927278 - RNA, 19 nt, Homo sapiens
  misc_RNA (1)...(19): siRNA sense strand
uagcaguguugccauguug

SEQ ID NO: 1927279 - RNA, 19 nt, Homo sapiens
  misc_RNA (1)...(19): siRNA sense strand
gcggacaacagcaaagauu

SEQ ID NO: 1927280 - RNA, 19 nt, Homo sapiens
  misc_RNA (1)...(19): siRNA sense strand
gaaaacacacgcuuggaaa

SEQ ID NO: 1927281 - RNA, 19 nt, Homo sapiens
  misc_RNA (1)...(19): siRNA sense strand
guguagccuuuguaaguuu

SEQ ID NO: 1927282 - RNA, 19 nt, Homo sapiens
  misc_RNA (1)...(19): siRNA sense strand
ugagauuccggcuaaagua

SEQ ID NO: 1927283 - RNA, 19 nt, Homo sapiens
  misc_RNA (1)...(19): siRNA sense strand
aggaagguaucuauguauu

SEQ ID NO: 1927284 - RNA, 19 nt, Homo sapiens
  misc_RNA (1)...(19): siRNA sense strand
guagcaguguugccauguu

SEQ ID NO: 1927285 - RNA, 19 nt, Homo sapiens
  misc_RNA (1)...(19): siRNA sense strand
gaucauauuaagcaacaug

SEQ ID NO: 1927286 - RNA, 19 nt, Homo sapiens
  misc_RNA (1)...(19): siRNA sense strand
gagaugucacaaacaaauu

SEQ ID NO: 1927287 - RNA, 19 nt, Homo sapiens
  misc_RNA (1)...(19): siRNA sense strand
gaagggaaggcuaugucuu

SEQ ID NO: 1927288 - RNA, 19 nt, Homo sapiens
  misc_RNA (1)...(19): siRNA sense strand
agaaauggguaggaggaaa

SEQ ID NO: 1927289 - RNA, 19 nt, Homo sapiens
  misc_RNA (1)...(19): siRNA sense strand
gaagccaggaggaacuuga

SEQ ID NO: 1927290 - RNA, 19 nt, Homo sapiens
  misc_RNA (1)...(19): siRNA sense strand
cuacaucaagcagcacuua

SEQ ID NO: 1927291 - RNA, 19 nt, Homo sapiens
  misc_RNA (1)...(19): siRNA sense strand
gacagagacagccuuauca

SEQ ID NO: 1927292 - RNA, 19 nt, Homo sapiens
  misc_RNA (1)...(19): siRNA sense strand
ggagaaagguggcugagaa

SEQ ID NO: 1927293 - RNA, 19 nt, Homo sapiens
  misc_RNA (1)...(19): siRNA sense strand
ucacaaagaucuggagaaa

SEQ ID NO: 1927294 - RNA, 19 nt, Homo sapiens
  misc_RNA (1)...(19): siRNA sense strand
acaaagaucuggagaaagg

SEQ ID NO: 1927295 - RNA, 19 nt, Homo sapiens
  misc_RNA (1)...(19): siRNA sense strand
gaacaucgccuucaaugac

SEQ ID NO: 1927296 - RNA, 19 nt, Homo sapiens
  misc_RNA (1)...(19): siRNA sense strand
gaagugcgccuaccuccaa

SEQ ID NO: 1927297 - RNA, 19 nt, Homo sapiens
  misc_RNA (1)...(19): siRNA sense strand
agaauggccuggaaaucua

SEQ ID NO: 1927298 - RNA, 19 nt, Homo sapiens
  misc_RNA (1)...(19): siRNA sense strand
gaaagguggcugagaagga

SEQ ID NO: 1927299 - RNA, 19 nt, Homo sapiens
  misc_RNA (1)...(19): siRNA sense strand
gccggaagcugaugaacau

SEQ ID NO: 1927300 - RNA, 19 nt, Homo sapiens
  misc_RNA (1)...(19): siRNA sense strand
agauugagcuggaccugaa

SEQ ID NO: 1927301 - RNA, 19 nt, Homo sapiens
  misc_RNA (1)...(19): siRNA sense strand
ugacggugcccgacuauga

SEQ ID NO: 1927302 - RNA, 19 nt, Homo sapiens
  misc_RNA (1)...(19): siRNA sense strand
guaccuggccggucugaga

SEQ ID NO: 1927303 - RNA, 19 nt, Homo sapiens
  misc_RNA (1)...(19): siRNA sense strand
ucaguaaguaugaugagua

SEQ ID NO: 1927304 - RNA, 19 nt, Homo sapiens
  misc_RNA (1)...(19): siRNA sense strand
gaaggugguguuucgcuau

SEQ ID NO: 1927305 - RNA, 19 nt, Homo sapiens
  misc_RNA (1)...(19): siRNA sense strand
gcuacagaauggccuggaa

SEQ ID NO: 1927306 - RNA, 19 nt, Homo sapiens
  misc_RNA (1)...(19): siRNA sense strand
ugaagcugcuggccaagau

SEQ ID NO: 1927307 - RNA, 19 nt, Homo sapiens
  misc_RNA (1)...(19): siRNA sense strand
gaaacugccagguggaaag

SEQ ID NO: 1927308 - RNA, 19 nt, Homo sapiens
  misc_RNA (1)...(19): siRNA sense strand
gcugauuacuacugcaaca

SEQ ID NO: 1927309 - RNA, 19 nt, Homo sapiens
  misc_RNA (1)...(19): siRNA sense strand
ccaagaccaucuccaacag

SEQ ID NO: 1927310 - RNA, 19 nt, Homo sapiens
  misc_RNA (1)...(19): siRNA sense strand
ucaaguacaacgagaagga

SEQ ID NO: 1927311 - RNA, 19 nt, Homo sapiens
  misc_RNA (1)...(19): siRNA sense strand
cagaauggccuggaaaucu

SEQ ID NO: 1927312 - RNA, 19 nt, Homo sapiens
  misc_RNA (1)...(19): siRNA sense strand
cagaacugcuuccucaacu

SEQ ID NO: 1927313 - RNA, 19 nt, Homo sapiens
  misc_RNA (1)...(19): siRNA sense strand
ucaccaagaccaucuccaa

SEQ ID NO: 1927314 - RNA, 19 nt, Homo sapiens
  misc_RNA (1)...(19): siRNA sense strand
gaucuugaggcuacagaau

SEQ ID NO: 1927315 - RNA, 19 nt, Homo sapiens
  misc_RNA (1)...(19): siRNA sense strand
cggacagucucauuagcaa

SEQ ID NO: 1927316 - RNA, 19 nt, Homo sapiens
  misc_RNA (1)...(19): siRNA sense strand
caguaaguaugaugaguac

SEQ ID NO: 1927317 - RNA, 19 nt, Homo sapiens
  misc_RNA (1)...(19): siRNA sense strand
gggaugccuuccuguacga

SEQ ID NO: 1927318 - RNA, 19 nt, Homo sapiens
  misc_RNA (1)...(19): siRNA sense strand
caacgagaaggagaucuug

SEQ ID NO: 1927319 - RNA, 19 nt, Homo sapiens
  misc_RNA (1)...(19): siRNA sense strand
gagaaagguggcugagaag

SEQ ID NO: 1927320 - RNA, 19 nt, Homo sapiens
  misc_RNA (1)...(19): siRNA sense strand
gacagucucauuagcaaca

SEQ ID NO: 1927321 - RNA, 19 nt, Homo sapiens
  misc_RNA (1)...(19): siRNA sense strand
cuacagaauggccuggaaa

SEQ ID NO: 1927322 - RNA, 19 nt, Homo sapiens
  misc_RNA (1)...(19): siRNA sense strand
gcuaugccuuggccauuuu

SEQ ID NO: 1927323 - RNA, 19 nt, Homo sapiens
  misc_RNA (1)...(19): siRNA sense strand
caugcccgcugauuacuac

SEQ ID NO: 1927324 - RNA, 19 nt, Homo sapiens
  misc_RNA (1)...(19): siRNA sense strand
aagcuuaccggacccagaa

SEQ ID NO: 1927325 - RNA, 19 nt, Homo sapiens
  misc_RNA (1)...(19): siRNA sense strand
cgcuaugccuuggccauuu

SEQ ID NO: 1927326 - RNA, 19 nt, Homo sapiens
  misc_RNA (1)...(19): siRNA sense strand
gcccgacuaugagguggaa

SEQ ID NO: 1927327 - RNA, 19 nt, Homo sapiens
  misc_RNA (1)...(19): siRNA sense strand
gcggacagucucauuagca

SEQ ID NO: 1927328 - RNA, 19 nt, Homo sapiens
  misc_RNA (1)...(19): siRNA sense strand
gaagcugcccaggcugaug

SEQ ID NO: 1927329 - RNA, 19 nt, Homo sapiens
  misc_RNA (1)...(19): siRNA sense strand
ucuugaggcuacagaaugg

SEQ ID NO: 1927330 - RNA, 19 nt, Homo sapiens
  misc_RNA (1)...(19): siRNA sense strand
gaggagagauugaauuuga

SEQ ID NO: 1927331 - RNA, 19 nt, Homo sapiens
  misc_RNA (1)...(19): siRNA sense strand
gaagugaaauuguugagaa

SEQ ID NO: 1927332 - RNA, 19 nt, Homo sapiens
  misc_RNA (1)...(19): siRNA sense strand
gaaagaagcacaacuugaa

SEQ ID NO: 1927333 - RNA, 19 nt, Homo sapiens
  misc_RNA (1)...(19): siRNA sense strand
aaagagagcuugaggcaaa

SEQ ID NO: 1927334 - RNA, 19 nt, Homo sapiens
  misc_RNA (1)...(19): siRNA sense strand
ccaauuagaagcugaaaua

SEQ ID NO: 1927335 - RNA, 19 nt, Homo sapiens
  misc_RNA (1)...(19): siRNA sense strand
gaagggaccugcucaugau

SEQ ID NO: 1927336 - RNA, 19 nt, Homo sapiens
  misc_RNA (1)...(19): siRNA sense strand
gaucaagauucccuaaaga

SEQ ID NO: 1927337 - RNA, 19 nt, Homo sapiens
  misc_RNA (1)...(19): siRNA sense strand
gaucugaaaucugaacuga

SEQ ID NO: 1927338 - RNA, 19 nt, Homo sapiens
  misc_RNA (1)...(19): siRNA sense strand
gaaaaguucuccuccuuaa

SEQ ID NO: 1927339 - RNA, 19 nt, Homo sapiens
  misc_RNA (1)...(19): siRNA sense strand
gagacuagcugccaaguac

SEQ ID NO: 1927340 - RNA, 19 nt, Homo sapiens
  misc_RNA (1)...(19): siRNA sense strand
gagaggagagauugaauuu

SEQ ID NO: 1927341 - RNA, 19 nt, Homo sapiens
  misc_RNA (1)...(19): siRNA sense strand
ggccuuggcauuucaauua

SEQ ID NO: 1927342 - RNA, 19 nt, Homo sapiens
  misc_RNA (1)...(19): siRNA sense strand
ggacacaaagcauaaagaa

SEQ ID NO: 1927343 - RNA, 19 nt, Homo sapiens
  misc_RNA (1)...(19): siRNA sense strand
ggacaucguuaccguuugu

SEQ ID NO: 1927344 - RNA, 19 nt, Homo sapiens
  misc_RNA (1)...(19): siRNA sense strand
ugacggugcuucaaaauua

SEQ ID NO: 1927345 - RNA, 19 nt, Homo sapiens
  misc_RNA (1)...(19): siRNA sense strand
aagcggacaucacuuauga

SEQ ID NO: 1927346 - RNA, 19 nt, Homo sapiens
  misc_RNA (1)...(19): siRNA sense strand
ggagaaggaguucgacaaa

SEQ ID NO: 1927347 - RNA, 19 nt, Homo sapiens
  misc_RNA (1)...(19): siRNA sense strand
agaaagaaguacaugauca

SEQ ID NO: 1927348 - RNA, 19 nt, Homo sapiens
  misc_RNA (1)...(19): siRNA sense strand
uggaggagcuggaaagaga

SEQ ID NO: 1927349 - RNA, 19 nt, Homo sapiens
  misc_RNA (1)...(19): siRNA sense strand
ggagaaagaaguacaugau

SEQ ID NO: 1927350 - RNA, 19 nt, Homo sapiens
  misc_RNA (1)...(19): siRNA sense strand
gaagcuguaacuauucuuu

SEQ ID NO: 1927351 - RNA, 19 nt, Homo sapiens
  misc_RNA (1)...(19): siRNA sense strand
caacggaguuaaccuaagg

SEQ ID NO: 1927352 - RNA, 19 nt, Homo sapiens
  misc_RNA (1)...(19): siRNA sense strand
ucuccaggcugaaguauau

SEQ ID NO: 1927353 - RNA, 19 nt, Homo sapiens
  misc_RNA (1)...(19): siRNA sense strand
ugaaguggauucugaugau

SEQ ID NO: 1927354 - RNA, 19 nt, Homo sapiens
  misc_RNA (1)...(19): siRNA sense strand
gagauugaauuugaaguag

SEQ ID NO: 1927355 - RNA, 19 nt, Homo sapiens
  misc_RNA (1)...(19): siRNA sense strand
cagaggacguaaugacuug

SEQ ID NO: 1927356 - RNA, 19 nt, Homo sapiens
  misc_RNA (1)...(19): siRNA sense strand
agaaguacaugaucagcuu

SEQ ID NO: 1927357 - RNA, 19 nt, Homo sapiens
  misc_RNA (1)...(19): siRNA sense strand
aagcugaagugaaauuguu

SEQ ID NO: 1927358 - RNA, 19 nt, Homo sapiens
  misc_RNA (1)...(19): siRNA sense strand
guuuguaccuugaugaguu

SEQ ID NO: 1927359 - RNA, 19 nt, Homo sapiens
  misc_RNA (1)...(19): siRNA sense strand
gaaguggauucugaugaug

SEQ ID NO: 1927360 - RNA, 19 nt, Homo sapiens
  misc_RNA (1)...(19): siRNA sense strand
ucugaaaucugaacugaca

SEQ ID NO: 1927361 - RNA, 19 nt, Homo sapiens
  misc_RNA (1)...(19): siRNA sense strand
gugaaacuccgcuagauga

SEQ ID NO: 1927362 - RNA, 19 nt, Homo sapiens
  misc_RNA (1)...(19): siRNA sense strand
uaagggacacaaagcauaa

SEQ ID NO: 1927363 - RNA, 19 nt, Homo sapiens
  misc_RNA (1)...(19): siRNA sense strand
gcaggaaggguccaacaga

SEQ ID NO: 1927364 - RNA, 19 nt, Homo sapiens
  misc_RNA (1)...(19): siRNA sense strand
gcagaggacguaaugacuu

SEQ ID NO: 1927365 - RNA, 19 nt, Homo sapiens
  misc_RNA (1)...(19): siRNA sense strand
aaacguagaguaugaagau

SEQ ID NO: 1927366 - RNA, 19 nt, Homo sapiens
  misc_RNA (1)...(19): siRNA sense strand
gcagagaggagagauugaa

SEQ ID NO: 1927367 - RNA, 19 nt, Homo sapiens
  misc_RNA (1)...(19): siRNA sense strand
agagaucgauccagaccaa

SEQ ID NO: 1927368 - RNA, 19 nt, Homo sapiens
  misc_RNA (1)...(19): siRNA sense strand
guaacugacacacaugaaa

SEQ ID NO: 1927369 - RNA, 19 nt, Homo sapiens
  misc_RNA (1)...(19): siRNA sense strand
guaccuugaugaguuagaa

SEQ ID NO: 1927370 - RNA, 19 nt, Homo sapiens
  misc_RNA (1)...(19): siRNA sense strand
caugaaggccuuggcauuu

SEQ ID NO: 1927371 - RNA, 19 nt, Homo sapiens
  misc_RNA (1)...(19): siRNA sense strand
ugaagggaccugcucauga

SEQ ID NO: 1927372 - RNA, 19 nt, Homo sapiens
  misc_RNA (1)...(19): siRNA sense strand
ugguggaucugaaaucuga

SEQ ID NO: 1927373 - RNA, 19 nt, Homo sapiens
  misc_RNA (1)...(19): siRNA sense strand
gcauaaagaagcuguaacu

SEQ ID NO: 1927374 - RNA, 19 nt, Homo sapiens
  misc_RNA (1)...(19): siRNA sense strand
gagaaggaguucgacaaag

SEQ ID NO: 1927375 - RNA, 19 nt, Homo sapiens
  misc_RNA (1)...(19): siRNA sense strand
ucaagauucccuaaagaaa

SEQ ID NO: 1927376 - RNA, 19 nt, Homo sapiens
  misc_RNA (1)...(19): siRNA sense strand
ugaaagaagcacaacuuga

SEQ ID NO: 1927377 - RNA, 19 nt, Homo sapiens
  misc_RNA (1)...(19): siRNA sense strand
gaaagaaguacaugaucag

SEQ ID NO: 1927378 - RNA, 19 nt, Homo sapiens
  misc_RNA (1)...(19): siRNA sense strand
caggaaggguccaacagau

SEQ ID NO: 1927379 - RNA, 19 nt, Homo sapiens
  misc_RNA (1)...(19): siRNA sense strand
ugcacacucuguaucauaa

SEQ ID NO: 1927380 - RNA, 19 nt, Homo sapiens
  misc_RNA (1)...(19): siRNA sense strand
cuaagggacacaaagcaua

SEQ ID NO: 1927381 - RNA, 19 nt, Homo sapiens
  misc_RNA (1)...(19): siRNA sense strand
ugaucaagauucccuaaag

SEQ ID NO: 1927382 - RNA, 19 nt, Homo sapiens
  misc_RNA (1)...(19): siRNA sense strand
gaaccaauuagaagcugaa

SEQ ID NO: 1927383 - RNA, 19 nt, Homo sapiens
  misc_RNA (1)...(19): siRNA sense strand
gagaaagaaguacaugauc

SEQ ID NO: 1927384 - RNA, 19 nt, Homo sapiens
  misc_RNA (1)...(19): siRNA sense strand
caagugaaacuccgcuaga

SEQ ID NO: 1927385 - RNA, 19 nt, Homo sapiens
  misc_RNA (1)...(19): siRNA sense strand
guacuuggauaaggaacug

SEQ ID NO: 1927386 - RNA, 19 nt, Homo sapiens
  misc_RNA (1)...(19): siRNA sense strand
ggaaggguccaacagauac

SEQ ID NO: 1927387 - RNA, 19 nt, Homo sapiens
  misc_RNA (1)...(19): siRNA sense strand
uuauguggcuccugaagug

SEQ ID NO: 1927388 - RNA, 19 nt, Homo sapiens
  misc_RNA (1)...(19): siRNA sense strand
gaaaguuguuuuggagaaa

SEQ ID NO: 1927389 - RNA, 19 nt, Homo sapiens
  misc_RNA (1)...(19): siRNA sense strand
agccugagcuccugcuuug

SEQ ID NO: 1927390 - RNA, 19 nt, Homo sapiens
  misc_RNA (1)...(19): siRNA sense strand
caauugcuaggacgagaua

SEQ ID NO: 1927391 - RNA, 19 nt, Homo sapiens
  misc_RNA (1)...(19): siRNA sense strand
gaaguacaugaucagcuuu

SEQ ID NO: 1927392 - RNA, 19 nt, Homo sapiens
  misc_RNA (1)...(19): siRNA sense strand
guagacauauagcuguucu

SEQ ID NO: 1927393 - RNA, 19 nt, Homo sapiens
  misc_RNA (1)...(19): siRNA sense strand
ggugcuaguugcaaagaca

SEQ ID NO: 1927394 - RNA, 19 nt, Homo sapiens
  misc_RNA (1)...(19): siRNA sense strand
gauaaggaacuggcaggaa

SEQ ID NO: 1927395 - RNA, 19 nt, Homo sapiens
  misc_RNA (1)...(19): siRNA sense strand
gaagcugaagugaaauugu

SEQ ID NO: 1927396 - RNA, 19 nt, Homo sapiens
  misc_RNA (1)...(19): siRNA sense strand
uuuguaccuugaugaguua

SEQ ID NO: 1927397 - RNA, 19 nt, Homo sapiens
  misc_RNA (1)...(19): siRNA sense strand
ggcuggaggugcuggagaa

SEQ ID NO: 1927398 - RNA, 19 nt, Homo sapiens
  misc_RNA (1)...(19): siRNA sense strand
agaaggaguucgacaaagc

SEQ ID NO: 1927399 - RNA, 19 nt, Homo sapiens
  misc_RNA (1)...(19): siRNA sense strand
cagcagagaggagagauug

SEQ ID NO: 1927400 - RNA, 19 nt, Homo sapiens
  misc_RNA (1)...(19): siRNA sense strand
cuccugaaguggauucuga

SEQ ID NO: 1927401 - RNA, 19 nt, Homo sapiens
  misc_RNA (1)...(19): siRNA sense strand
uggaggugcuggagaagga

SEQ ID NO: 1927402 - RNA, 19 nt, Homo sapiens
  misc_RNA (1)...(19): siRNA sense strand
guggacaucguuaccguuu

SEQ ID NO: 1927403 - RNA, 19 nt, Homo sapiens
  misc_RNA (1)...(19): siRNA sense strand
gcacacucuguaucauaaa

SEQ ID NO: 1927404 - RNA, 19 nt, Homo sapiens
  misc_RNA (1)...(19): siRNA sense strand
aaugaaagaagcacaacuu

SEQ ID NO: 1927405 - RNA, 19 nt, Homo sapiens
  misc_RNA (1)...(19): siRNA sense strand
uagaugacggugcuucaaa

SEQ ID NO: 1927406 - RNA, 19 nt, Homo sapiens
  misc_RNA (1)...(19): siRNA sense strand
cauaaagaagcuguaacua

SEQ ID NO: 1927407 - RNA, 19 nt, Homo sapiens
  misc_RNA (1)...(19): siRNA sense strand
gguccaacagauacaauug

SEQ ID NO: 1927408 - RNA, 19 nt, Homo sapiens
  misc_RNA (1)...(19): siRNA sense strand
ugucucaaaucaaccacaa

SEQ ID NO: 1927409 - RNA, 19 nt, Homo sapiens
  misc_RNA (1)...(19): siRNA sense strand
ggugguaacccuggugcua

SEQ ID NO: 1927410 - RNA, 19 nt, Homo sapiens
  misc_RNA (1)...(19): siRNA sense strand
gcacaguugguggaucuga

SEQ ID NO: 1927411 - RNA, 19 nt, Homo sapiens
  misc_RNA (1)...(19): siRNA sense strand
ggagagauugaauuugaag

SEQ ID NO: 1927412 - RNA, 19 nt, Homo sapiens
  misc_RNA (1)...(19): siRNA sense strand
aauuacaggugggaaagaa

SEQ ID NO: 1927413 - RNA, 19 nt, Homo sapiens
  misc_RNA (1)...(19): siRNA sense strand
ucaugaaggccuuggcauu

SEQ ID NO: 1927414 - RNA, 19 nt, Homo sapiens
  misc_RNA (1)...(19): siRNA sense strand
aggaaggguccaacagaua

SEQ ID NO: 1927415 - RNA, 19 nt, Homo sapiens
  misc_RNA (1)...(19): siRNA sense strand
ccaagcagagaaaguuguu

SEQ ID NO: 1927416 - RNA, 19 nt, Homo sapiens
  misc_RNA (1)...(19): siRNA sense strand
gaucugcacacucuguauc

SEQ ID NO: 1927417 - RNA, 19 nt, Homo sapiens
  misc_RNA (1)...(19): siRNA sense strand
aaagaagcuguaacuauuc

SEQ ID NO: 1927418 - RNA, 19 nt, Homo sapiens
  misc_RNA (1)...(19): siRNA sense strand
caagauucccuaaagaaaa

SEQ ID NO: 1927419 - RNA, 19 nt, Homo sapiens
  misc_RNA (1)...(19): siRNA sense strand
gaaacgaccaaugcaagca

SEQ ID NO: 1927420 - RNA, 19 nt, Homo sapiens
  misc_RNA (1)...(19): siRNA sense strand
caaagugcugacucuggua

SEQ ID NO: 1927421 - RNA, 19 nt, Homo sapiens
  misc_RNA (1)...(19): siRNA sense strand
gaugaucugcacacucugu

SEQ ID NO: 1927422 - RNA, 19 nt, Homo sapiens
  misc_RNA (1)...(19): siRNA sense strand
caagcuggaggcacaguug

SEQ ID NO: 1927423 - RNA, 19 nt, Homo sapiens
  misc_RNA (1)...(19): siRNA sense strand
cgagacuagcugccaagua

SEQ ID NO: 1927424 - RNA, 19 nt, Homo sapiens
  misc_RNA (1)...(19): siRNA sense strand
uugcacagcuuugccacaa

SEQ ID NO: 1927425 - RNA, 19 nt, Homo sapiens
  misc_RNA (1)...(19): siRNA sense strand
caagcggacaucacuuaug

SEQ ID NO: 1927426 - RNA, 19 nt, Homo sapiens
  misc_RNA (1)...(19): siRNA sense strand
cagaaacccaagcagagaa

SEQ ID NO: 1927427 - RNA, 19 nt, Homo sapiens
  misc_RNA (1)...(19): siRNA sense strand
uuccaauccucaucucuga

SEQ ID NO: 1927428 - RNA, 19 nt, Homo sapiens
  misc_RNA (1)...(19): siRNA sense strand
aaaguucuccuccuuaagg

SEQ ID NO: 1927429 - RNA, 19 nt, Homo sapiens
  misc_RNA (1)...(19): siRNA sense strand
accaagcggacaucacuua

SEQ ID NO: 1927430 - RNA, 19 nt, Homo sapiens
  misc_RNA (1)...(19): siRNA sense strand
ccaaagcgcucuaugacaa

SEQ ID NO: 1927431 - RNA, 19 nt, Homo sapiens
  misc_RNA (1)...(19): siRNA sense strand
ggaaggaggaguuugagaa

SEQ ID NO: 1927432 - RNA, 19 nt, Homo sapiens
  misc_RNA (1)...(19): siRNA sense strand
ccaagcagcuggccuccuu

SEQ ID NO: 1927433 - RNA, 19 nt, Homo sapiens
  misc_RNA (1)...(19): siRNA sense strand
gcagccaggugacccacua

SEQ ID NO: 1927434 - RNA, 19 nt, Homo sapiens
  misc_RNA (1)...(19): siRNA sense strand
gggcauguaugauaagaag

SEQ ID NO: 1927435 - RNA, 19 nt, Homo sapiens
  misc_RNA (1)...(19): siRNA sense strand
ggucgacagugguguguau

SEQ ID NO: 1927436 - RNA, 19 nt, Homo sapiens
  misc_RNA (1)...(19): siRNA sense strand
ggaaccgccucaagaucuu

SEQ ID NO: 1927437 - RNA, 19 nt, Homo sapiens
  misc_RNA (1)...(19): siRNA sense strand
agaaggagcugcuggaaaa

SEQ ID NO: 1927438 - RNA, 19 nt, Homo sapiens
  misc_RNA (1)...(19): siRNA sense strand
ccgcaagggugacaucaug

SEQ ID NO: 1927439 - RNA, 19 nt, Homo sapiens
  misc_RNA (1)...(19): siRNA sense strand
ggauggaggacuaugacua

SEQ ID NO: 1927440 - RNA, 19 nt, Homo sapiens
  misc_RNA (1)...(19): siRNA sense strand
gcaagagccagcuggaguu

SEQ ID NO: 1927441 - RNA, 19 nt, Homo sapiens
  misc_RNA (1)...(19): siRNA sense strand
ggccacaggacaucuauga

SEQ ID NO: 1927442 - RNA, 19 nt, Homo sapiens
  misc_RNA (1)...(19): siRNA sense strand
gaaggaggaguuugagaag

SEQ ID NO: 1927443 - RNA, 19 nt, Homo sapiens
  misc_RNA (1)...(19): siRNA sense strand
gccggcagcugcagaagau

SEQ ID NO: 1927444 - RNA, 19 nt, Homo sapiens
  misc_RNA (1)...(19): siRNA sense strand
gcacagcaaguucgucauc

SEQ ID NO: 1927445 - RNA, 19 nt, Homo sapiens
  misc_RNA (1)...(19): siRNA sense strand
gcaaugcugcccacacauc

SEQ ID NO: 1927446 - RNA, 19 nt, Homo sapiens
  misc_RNA (1)...(19): siRNA sense strand
gaucuuggugggcauguau

SEQ ID NO: 1927447 - RNA, 19 nt, Homo sapiens
  misc_RNA (1)...(19): siRNA sense strand
gugaggagaccuacgaugu

SEQ ID NO: 1927448 - RNA, 19 nt, Homo sapiens
  misc_RNA (1)...(19): siRNA sense strand
cagaugggcaguacgagaa

SEQ ID NO: 1927449 - RNA, 19 nt, Homo sapiens
  misc_RNA (1)...(19): siRNA sense strand
gggaaccgccucaagaucu

SEQ ID NO: 1927450 - RNA, 19 nt, Homo sapiens
  misc_RNA (1)...(19): siRNA sense strand
ggaggugucacggcccaua

SEQ ID NO: 1927451 - RNA, 19 nt, Homo sapiens
  misc_RNA (1)...(19): siRNA sense strand
ucccaggacucaccagaug

SEQ ID NO: 1927452 - RNA, 19 nt, Homo sapiens
  misc_RNA (1)...(19): siRNA sense strand
agacauccaccuucucgaa

SEQ ID NO: 1927453 - RNA, 19 nt, Homo sapiens
  misc_RNA (1)...(19): siRNA sense strand
ccacagcacccagcaguuc

SEQ ID NO: 1927454 - RNA, 19 nt, Homo sapiens
  misc_RNA (1)...(19): siRNA sense strand
cagaaggagcugcuggaaa

SEQ ID NO: 1927455 - RNA, 19 nt, Homo sapiens
  misc_RNA (1)...(19): siRNA sense strand
gauggaggacuaugacuac

SEQ ID NO: 1927456 - RNA, 19 nt, Homo sapiens
  misc_RNA (1)...(19): siRNA sense strand
aagcagacauccaccuucu

SEQ ID NO: 1927457 - RNA, 19 nt, Homo sapiens
  misc_RNA (1)...(19): siRNA sense strand
gcaggacgaguacgacauc

SEQ ID NO: 1927458 - RNA, 19 nt, Homo sapiens
  misc_RNA (1)...(19): siRNA sense strand
ccacgcagucuacgacguu

SEQ ID NO: 1927459 - RNA, 19 nt, Homo sapiens
  misc_RNA (1)...(19): siRNA sense strand
uggugggcauguaugauaa

SEQ ID NO: 1927460 - RNA, 19 nt, Homo sapiens
  misc_RNA (1)...(19): siRNA sense strand
gccguggacgccuucuuua

SEQ ID NO: 1927461 - RNA, 19 nt, Homo sapiens
  misc_RNA (1)...(19): siRNA sense strand
gcaaggccucuaccaaguc

SEQ ID NO: 1927462 - RNA, 19 nt, Homo sapiens
  misc_RNA (1)...(19): siRNA sense strand
cccacaagcugguguucau

SEQ ID NO: 1927463 - RNA, 19 nt, Homo sapiens
  misc_RNA (1)...(19): siRNA sense strand
ccaagcagacauccaccuu

SEQ ID NO: 1927464 - RNA, 19 nt, Homo sapiens
  misc_RNA (1)...(19): siRNA sense strand
gggcagggcuauguauacg

SEQ ID NO: 1927465 - RNA, 19 nt, Homo sapiens
  misc_RNA (1)...(19): siRNA sense strand
caaagcgcucuaugacaau

SEQ ID NO: 1927466 - RNA, 19 nt, Homo sapiens
  misc_RNA (1)...(19): siRNA sense strand
gcuggauggaggacuauga

SEQ ID NO: 1927467 - RNA, 19 nt, Homo sapiens
  misc_RNA (1)...(19): siRNA sense strand
cggccgaggacguguauga

SEQ ID NO: 1927468 - RNA, 19 nt, Homo sapiens
  misc_RNA (1)...(19): siRNA sense strand
agagccagcuggaguugca

SEQ ID NO: 1927469 - RNA, 19 nt, Homo sapiens
  misc_RNA (1)...(19): siRNA sense strand
caagagccagcuggaguug

SEQ ID NO: 1927470 - RNA, 19 nt, Homo sapiens
  misc_RNA (1)...(19): siRNA sense strand
ggccaaagcgcucuaugac

SEQ ID NO: 1927471 - RNA, 19 nt, Homo sapiens
  misc_RNA (1)...(19): siRNA sense strand
ccugggaaccgccucaaga

SEQ ID NO: 1927472 - RNA, 19 nt, Homo sapiens
  misc_RNA (1)...(19): siRNA sense strand
uuggugggcauguaugaua

SEQ ID NO: 1927473 - RNA, 19 nt, Homo sapiens
  misc_RNA (1)...(19): siRNA sense strand
ugaacgugcuggccaaagc

SEQ ID NO: 1927474 - RNA, 19 nt, Homo sapiens
  misc_RNA (1)...(19): siRNA sense strand
uggccaaagcgcucuauga

SEQ ID NO: 1927475 - RNA, 19 nt, Homo sapiens
  misc_RNA (1)...(19): siRNA sense strand
aaggaggaguuugagaaga

SEQ ID NO: 1927476 - RNA, 19 nt, Homo sapiens
  misc_RNA (1)...(19): siRNA sense strand
aaagcgcucuaugacaaug

SEQ ID NO: 1927477 - RNA, 19 nt, Homo sapiens
  misc_RNA (1)...(19): siRNA sense strand
gaccagcagcauccaguca

SEQ ID NO: 1927478 - RNA, 19 nt, Homo sapiens
  misc_RNA (1)...(19): siRNA sense strand
ugaggagaccuacgaugug

SEQ ID NO: 1927479 - RNA, 19 nt, Homo sapiens
  misc_RNA (1)...(19): siRNA sense strand
gggaaggaggaguuugaga

SEQ ID NO: 1927480 - RNA, 19 nt, Homo sapiens
  misc_RNA (1)...(19): siRNA sense strand
cgccguggacgccuucuuu

SEQ ID NO: 1927481 - RNA, 19 nt, Homo sapiens
  misc_RNA (1)...(19): siRNA sense strand
ucagcaaggccucuaccaa

SEQ ID NO: 1927482 - RNA, 19 nt, Homo sapiens
  misc_RNA (1)...(19): siRNA sense strand
acccguugcuggaggugua

SEQ ID NO: 1927483 - RNA, 19 nt, Homo sapiens
  misc_RNA (1)...(19): siRNA sense strand
agcaaggccucuaccaagu

SEQ ID NO: 1927484 - RNA, 19 nt, Homo sapiens
  misc_RNA (1)...(19): siRNA sense strand
uugagaagacccagaagga

SEQ ID NO: 1927485 - RNA, 19 nt, Homo sapiens
  misc_RNA (1)...(19): siRNA sense strand
gccaaagcgcucuaugaca

SEQ ID NO: 1927486 - RNA, 19 nt, Homo sapiens
  misc_RNA (1)...(19): siRNA sense strand
ccaaccaccacgcagucua

SEQ ID NO: 1927487 - RNA, 19 nt, Homo sapiens
  misc_RNA (1)...(19): siRNA sense strand
gcugaagcaguuugaacga

SEQ ID NO: 1927488 - RNA, 19 nt, Homo sapiens
  misc_RNA (1)...(19): siRNA sense strand
gugggcauguaugauaaga

SEQ ID NO: 1927489 - RNA, 19 nt, Homo sapiens
  misc_RNA (1)...(19): siRNA sense strand
ggacacaguucuuugaaau

SEQ ID NO: 1927490 - RNA, 19 nt, Homo sapiens
  misc_RNA (1)...(19): siRNA sense strand
ucagagagcugcaguacaa

SEQ ID NO: 1927491 - RNA, 19 nt, Homo sapiens
  misc_RNA (1)...(19): siRNA sense strand
ccaaggaaaugaccaaaga

SEQ ID NO: 1927492 - RNA, 19 nt, Homo sapiens
  misc_RNA (1)...(19): siRNA sense strand
ccacagaccugcccaagau

SEQ ID NO: 1927493 - RNA, 19 nt, Homo sapiens
  misc_RNA (1)...(19): siRNA sense strand
ggaaacacguggccaagau

SEQ ID NO: 1927494 - RNA, 19 nt, Homo sapiens
  misc_RNA (1)...(19): siRNA sense strand
gcgaggaccugauguacaa

SEQ ID NO: 1927495 - RNA, 19 nt, Homo sapiens
  misc_RNA (1)...(19): siRNA sense strand
gaauuuaccucaccaacag

SEQ ID NO: 1927496 - RNA, 19 nt, Homo sapiens
  misc_RNA (1)...(19): siRNA sense strand
gaacagccgcagugaaaga

SEQ ID NO: 1927497 - RNA, 19 nt, Homo sapiens
  misc_RNA (1)...(19): siRNA sense strand
gggaaaggauguggaaaca

SEQ ID NO: 1927498 - RNA, 19 nt, Homo sapiens
  misc_RNA (1)...(19): siRNA sense strand
gggacacaguucuuugaaa

SEQ ID NO: 1927499 - RNA, 19 nt, Homo sapiens
  misc_RNA (1)...(19): siRNA sense strand
gagaugaggagccagaaga

SEQ ID NO: 1927500 - RNA, 19 nt, Homo sapiens
  misc_RNA (1)...(19): siRNA sense strand
ccaaagaggcccugccaau

SEQ ID NO: 1927501 - RNA, 19 nt, Homo sapiens
  misc_RNA (1)...(19): siRNA sense strand
ugauggaccuggccaagga

SEQ ID NO: 1927502 - RNA, 19 nt, Homo sapiens
  misc_RNA (1)...(19): siRNA sense strand
ggaauuuaccucaccaaca

SEQ ID NO: 1927503 - RNA, 19 nt, Homo sapiens
  misc_RNA (1)...(19): siRNA sense strand
gcuggcacgugcucaagaa

SEQ ID NO: 1927504 - RNA, 19 nt, Homo sapiens
  misc_RNA (1)...(19): siRNA sense strand
aaagaggcccugccaauca

SEQ ID NO: 1927505 - RNA, 19 nt, Homo sapiens
  misc_RNA (1)...(19): siRNA sense strand
ccaaggaccggaagaagga

SEQ ID NO: 1927506 - RNA, 19 nt, Homo sapiens
  misc_RNA (1)...(19): siRNA sense strand
gacaugcggcucaagauug

SEQ ID NO: 1927507 - RNA, 19 nt, Homo sapiens
  misc_RNA (1)...(19): siRNA sense strand
gaaccucagcccagagaga

SEQ ID NO: 1927508 - RNA, 19 nt, Homo sapiens
  misc_RNA (1)...(19): siRNA sense strand
gagcugcaguacaaucaca

SEQ ID NO: 1927509 - RNA, 19 nt, Homo sapiens
  misc_RNA (1)...(19): siRNA sense strand
gaacuacuuccgccacauc

SEQ ID NO: 1927510 - RNA, 19 nt, Homo sapiens
  misc_RNA (1)...(19): siRNA sense strand
cgacaugcggcucaagauu

SEQ ID NO: 1927511 - RNA, 19 nt, Homo sapiens
  misc_RNA (1)...(19): siRNA sense strand
gaugaggccaccugggaaa

SEQ ID NO: 1927512 - RNA, 19 nt, Homo sapiens
  misc_RNA (1)...(19): siRNA sense strand
gccgugauccugggaauuu

SEQ ID NO: 1927513 - RNA, 19 nt, Homo sapiens
  misc_RNA (1)...(19): siRNA sense strand
ggaccuggccaaggaaaug

SEQ ID NO: 1927514 - RNA, 19 nt, Homo sapiens
  misc_RNA (1)...(19): siRNA sense strand
aggaacagccgcagugaaa

SEQ ID NO: 1927515 - RNA, 19 nt, Homo sapiens
  misc_RNA (1)...(19): siRNA sense strand
uggagcagaucgaguggaa

SEQ ID NO: 1927516 - RNA, 19 nt, Homo sapiens
  misc_RNA (1)...(19): siRNA sense strand
caaagaggcccugccaauc

SEQ ID NO: 1927517 - RNA, 19 nt, Homo sapiens
  misc_RNA (1)...(19): siRNA sense strand
gagagcugcaguacaauca

SEQ ID NO: 1927518 - RNA, 19 nt, Homo sapiens
  misc_RNA (1)...(19): siRNA sense strand
gcgaugacuuccgcaagga

SEQ ID NO: 1927519 - RNA, 19 nt, Homo sapiens
  misc_RNA (1)...(19): siRNA sense strand
gacacaguucuuugaaauu

SEQ ID NO: 1927520 - RNA, 19 nt, Homo sapiens
  misc_RNA (1)...(19): siRNA sense strand
aagaggcccugccaaucaa

SEQ ID NO: 1927521 - RNA, 19 nt, Homo sapiens
  misc_RNA (1)...(19): siRNA sense strand
gaggccaccugggaaagga

SEQ ID NO: 1927522 - RNA, 19 nt, Homo sapiens
  misc_RNA (1)...(19): siRNA sense strand
gaaacacguggccaagauc

SEQ ID NO: 1927523 - RNA, 19 nt, Homo sapiens
  misc_RNA (1)...(19): siRNA sense strand
gcaggaacagccgcaguga

SEQ ID NO: 1927524 - RNA, 19 nt, Homo sapiens
  misc_RNA (1)...(19): siRNA sense strand
cuucaagaccuacuucuca

SEQ ID NO: 1927525 - RNA, 19 nt, Homo sapiens
  misc_RNA (1)...(19): siRNA sense strand
cagggacacaguucuuuga

SEQ ID NO: 1927526 - RNA, 19 nt, Homo sapiens
  misc_RNA (1)...(19): siRNA sense strand
ccgugauccugggaauuua

SEQ ID NO: 1927527 - RNA, 19 nt, Homo sapiens
  misc_RNA (1)...(19): siRNA sense strand
uaccgagugugccuacguu

SEQ ID NO: 1927528 - RNA, 19 nt, Homo sapiens
  misc_RNA (1)...(19): siRNA sense strand
ucacacagggacacaguuc

SEQ ID NO: 1927529 - RNA, 19 nt, Homo sapiens
  misc_RNA (1)...(19): siRNA sense strand
ggcacgugcucaagaaggu

SEQ ID NO: 1927530 - RNA, 19 nt, Homo sapiens
  misc_RNA (1)...(19): siRNA sense strand
gccaaucaaaugccuggaa

SEQ ID NO: 1927531 - RNA, 19 nt, Homo sapiens
  misc_RNA (1)...(19): siRNA sense strand
ccaccaaggaccggaagaa

SEQ ID NO: 1927532 - RNA, 19 nt, Homo sapiens
  misc_RNA (1)...(19): siRNA sense strand
acacagggacacaguucuu

SEQ ID NO: 1927533 - RNA, 19 nt, Homo sapiens
  misc_RNA (1)...(19): siRNA sense strand
gcccucgggugacaagaag

SEQ ID NO: 1927534 - RNA, 19 nt, Homo sapiens
  misc_RNA (1)...(19): siRNA sense strand
ccaucagcuucaagaccua

SEQ ID NO: 1927535 - RNA, 19 nt, Homo sapiens
  misc_RNA (1)...(19): siRNA sense strand
ugaggagccagaagaggaa

SEQ ID NO: 1927536 - RNA, 19 nt, Homo sapiens
  misc_RNA (1)...(19): siRNA sense strand
gaccggaagaaggauguuu

SEQ ID NO: 1927537 - RNA, 19 nt, Homo sapiens
  misc_RNA (1)...(19): siRNA sense strand
acaugcggcucaagauugg

SEQ ID NO: 1927538 - RNA, 19 nt, Homo sapiens
  misc_RNA (1)...(19): siRNA sense strand
gcacagcguggagcagauc

SEQ ID NO: 1927539 - RNA, 19 nt, Homo sapiens
  misc_RNA (1)...(19): siRNA sense strand
gaccuggccaaggaaauga

SEQ ID NO: 1927540 - RNA, 19 nt, Homo sapiens
  misc_RNA (1)...(19): siRNA sense strand
gaacugcgaucccacauuu

SEQ ID NO: 1927541 - RNA, 19 nt, Homo sapiens
  misc_RNA (1)...(19): siRNA sense strand
cuacauggcuccagaagua

SEQ ID NO: 1927542 - RNA, 19 nt, Homo sapiens
  misc_RNA (1)...(19): siRNA sense strand
gcaaugaaguacaugaaca

SEQ ID NO: 1927543 - RNA, 19 nt, Homo sapiens
  misc_RNA (1)...(19): siRNA sense strand
uggaguaucuucagaggua

SEQ ID NO: 1927544 - RNA, 19 nt, Homo sapiens
  misc_RNA (1)...(19): siRNA sense strand
gaugaaauccucaacaugu

SEQ ID NO: 1927545 - RNA, 19 nt, Homo sapiens
  misc_RNA (1)...(19): siRNA sense strand
gggaggaauucaucauauu

SEQ ID NO: 1927546 - RNA, 19 nt, Homo sapiens
  misc_RNA (1)...(19): siRNA sense strand
gaagcgagacacuaagaaa

SEQ ID NO: 1927547 - RNA, 19 nt, Homo sapiens
  misc_RNA (1)...(19): siRNA sense strand
gggaugagguucggaaugu

SEQ ID NO: 1927548 - RNA, 19 nt, Homo sapiens
  misc_RNA (1)...(19): siRNA sense strand
ugaaguacaugaacaagca

SEQ ID NO: 1927549 - RNA, 19 nt, Homo sapiens
  misc_RNA (1)...(19): siRNA sense strand
gaaaauguaugcaaugaag

SEQ ID NO: 1927550 - RNA, 19 nt, Homo sapiens
  misc_RNA (1)...(19): siRNA sense strand
cauuugagcuugaagagau

SEQ ID NO: 1927551 - RNA, 19 nt, Homo sapiens
  misc_RNA (1)...(19): siRNA sense strand
gggacgcgguguucaagaa

SEQ ID NO: 1927552 - RNA, 19 nt, Homo sapiens
  misc_RNA (1)...(19): siRNA sense strand
cauuacagacuucaacaua

SEQ ID NO: 1927553 - RNA, 19 nt, Homo sapiens
  misc_RNA (1)...(19): siRNA sense strand
uugaagagaugauucuaga

SEQ ID NO: 1927554 - RNA, 19 nt, Homo sapiens
  misc_RNA (1)...(19): siRNA sense strand
gaugagguucggaauguuu

SEQ ID NO: 1927555 - RNA, 19 nt, Homo sapiens
  misc_RNA (1)...(19): siRNA sense strand
caacauagcgacgguagug

SEQ ID NO: 1927556 - RNA, 19 nt, Homo sapiens
  misc_RNA (1)...(19): siRNA sense strand
guccagccuucaugacaua

SEQ ID NO: 1927557 - RNA, 19 nt, Homo sapiens
  misc_RNA (1)...(19): siRNA sense strand
aagaagcgauuggcaaaga

SEQ ID NO: 1927558 - RNA, 19 nt, Homo sapiens
  misc_RNA (1)...(19): siRNA sense strand
cgggaggaauucaucauau

SEQ ID NO: 1927559 - RNA, 19 nt, Homo sapiens
  misc_RNA (1)...(19): siRNA sense strand
cuucagagguaccacauca

SEQ ID NO: 1927560 - RNA, 19 nt, Homo sapiens
  misc_RNA (1)...(19): siRNA sense strand
cagaaguauuccaggugua

SEQ ID NO: 1927561 - RNA, 19 nt, Homo sapiens
  misc_RNA (1)...(19): siRNA sense strand
agaagaagcgauuggcaaa

SEQ ID NO: 1927562 - RNA, 19 nt, Homo sapiens
  misc_RNA (1)...(19): siRNA sense strand
gaaauccucaacauguuca

SEQ ID NO: 1927563 - RNA, 19 nt, Homo sapiens
  misc_RNA (1)...(19): siRNA sense strand
ggaugagguucggaauguu

SEQ ID NO: 1927564 - RNA, 19 nt, Homo sapiens
  misc_RNA (1)...(19): siRNA sense strand
gacaucaagccagacaaua

SEQ ID NO: 1927565 - RNA, 19 nt, Homo sapiens
  misc_RNA (1)...(19): siRNA sense strand
caaugaaguacaugaacaa

SEQ ID NO: 1927566 - RNA, 19 nt, Homo sapiens
  misc_RNA (1)...(19): siRNA sense strand
gcuggaggccguacgaaau

SEQ ID NO: 1927567 - RNA, 19 nt, Homo sapiens
  misc_RNA (1)...(19): siRNA sense strand
ucgaugaaauccucaacau

SEQ ID NO: 1927568 - RNA, 19 nt, Homo sapiens
  misc_RNA (1)...(19): siRNA sense strand
ucacgcccaucgaugaaau

SEQ ID NO: 1927569 - RNA, 19 nt, Homo sapiens
  misc_RNA (1)...(19): siRNA sense strand
agaagcgauuggcaaagaa

SEQ ID NO: 1927570 - RNA, 19 nt, Homo sapiens
  misc_RNA (1)...(19): siRNA sense strand
cagaagcgagacacuaaga

SEQ ID NO: 1927571 - RNA, 19 nt, Homo sapiens
  misc_RNA (1)...(19): siRNA sense strand
ggaugaggaggacauguuc

SEQ ID NO: 1927572 - RNA, 19 nt, Homo sapiens
  misc_RNA (1)...(19): siRNA sense strand
caucaagccagacaauauc

SEQ ID NO: 1927573 - RNA, 19 nt, Homo sapiens
  misc_RNA (1)...(19): siRNA sense strand
gcccuggaguaucuucaga

SEQ ID NO: 1927574 - RNA, 19 nt, Homo sapiens
  misc_RNA (1)...(19): siRNA sense strand
caggacgggugcaacaaca

SEQ ID NO: 1927575 - RNA, 19 nt, Homo sapiens
  misc_RNA (1)...(19): siRNA sense strand
guagugaaaggagcagaaa

SEQ ID NO: 1927576 - RNA, 19 nt, Homo sapiens
  misc_RNA (1)...(19): siRNA sense strand
acaucaagccagacaauau

SEQ ID NO: 1927577 - RNA, 19 nt, Homo sapiens
  misc_RNA (1)...(19): siRNA sense strand
uuacagacuucaacauagc

SEQ ID NO: 1927578 - RNA, 19 nt, Homo sapiens
  misc_RNA (1)...(19): siRNA sense strand
augaaauccucaacauguu

SEQ ID NO: 1927579 - RNA, 19 nt, Homo sapiens
  misc_RNA (1)...(19): siRNA sense strand
ugcagaagcgagacacuaa

SEQ ID NO: 1927580 - RNA, 19 nt, Homo sapiens
  misc_RNA (1)...(19): siRNA sense strand
ccgggaggaauucaucaua

SEQ ID NO: 1927581 - RNA, 19 nt, Homo sapiens
  misc_RNA (1)...(19): siRNA sense strand
ccacauuugagcuugaaga

SEQ ID NO: 1927582 - RNA, 19 nt, Homo sapiens
  misc_RNA (1)...(19): siRNA sense strand
ccaauaaagggagguugaa

SEQ ID NO: 1927583 - RNA, 19 nt, Homo sapiens
  misc_RNA (1)...(19): siRNA sense strand
gugcagaagcgagacacua

SEQ ID NO: 1927584 - RNA, 19 nt, Homo sapiens
  misc_RNA (1)...(19): siRNA sense strand
ugacgagaaugaggaaguc

SEQ ID NO: 1927585 - RNA, 19 nt, Homo sapiens
  misc_RNA (1)...(19): siRNA sense strand
ugaacaagcagaagugcau

SEQ ID NO: 1927586 - RNA, 19 nt, Homo sapiens
  misc_RNA (1)...(19): siRNA sense strand
ggacaccugcagcacuguu

SEQ ID NO: 1927587 - RNA, 19 nt, Homo sapiens
  misc_RNA (1)...(19): siRNA sense strand
gaagaagcgauuggcaaag

SEQ ID NO: 1927588 - RNA, 19 nt, Homo sapiens
  misc_RNA (1)...(19): siRNA sense strand
gagcuugaagagaugauuc

SEQ ID NO: 1927589 - RNA, 19 nt, Homo sapiens
  misc_RNA (1)...(19): siRNA sense strand
ggucacgcccaucgaugaa

SEQ ID NO: 1927590 - RNA, 19 nt, Homo sapiens
  misc_RNA (1)...(19): siRNA sense strand
cauagcgacgguagugaaa

SEQ ID NO: 1927591 - RNA, 19 nt, Homo sapiens
  misc_RNA (1)...(19): siRNA sense strand
guaaagggaguuuuggaaa

SEQ ID NO: 1927592 - RNA, 19 nt, Homo sapiens
  misc_RNA (1)...(19): siRNA sense strand
gcacuggcccuggaguauc

SEQ ID NO: 1927593 - RNA, 19 nt, Homo sapiens
  misc_RNA (1)...(19): siRNA sense strand
ccagggauggcacaaagga

SEQ ID NO: 1927594 - RNA, 19 nt, Homo sapiens
  misc_RNA (1)...(19): siRNA sense strand
cuacuuggccgacaugaac

SEQ ID NO: 1927595 - RNA, 19 nt, Homo sapiens
  misc_RNA (1)...(19): siRNA sense strand
gguagugaaaggagcagaa

SEQ ID NO: 1927596 - RNA, 19 nt, Homo sapiens
  misc_RNA (1)...(19): siRNA sense strand
uagcgacgguagugaaagg

SEQ ID NO: 1927597 - RNA, 19 nt, Homo sapiens
  misc_RNA (1)...(19): siRNA sense strand
ccggcuuugugcccaauaa

SEQ ID NO: 1927598 - RNA, 19 nt, Homo sapiens
  misc_RNA (1)...(19): siRNA sense strand
uacagagcgugcccuacuu

SEQ ID NO: 1927599 - RNA, 19 nt, Homo sapiens
  misc_RNA (1)...(19): siRNA sense strand
ugaaauccucaacauguuc

SEQ ID NO: 1927600 - RNA, 19 nt, Homo sapiens
  misc_RNA (1)...(19): siRNA sense strand
cagaaagggcuuccuccau

SEQ ID NO: 1927601 - RNA, 19 nt, Homo sapiens
  misc_RNA (1)...(19): siRNA sense strand
gaauccaagccacuucaca

SEQ ID NO: 1927602 - RNA, 19 nt, Homo sapiens
  misc_RNA (1)...(19): siRNA sense strand
ucagagguaccacaucauc

SEQ ID NO: 1927603 - RNA, 19 nt, Homo sapiens
  misc_RNA (1)...(19): siRNA sense strand
gcagaagcgagacacuaag

SEQ ID NO: 1927604 - RNA, 19 nt, Homo sapiens
  misc_RNA (1)...(19): siRNA sense strand
guucaagaaggcacugaug

SEQ ID NO: 1927605 - RNA, 19 nt, Homo sapiens
  misc_RNA (1)...(19): siRNA sense strand
uaaagggaguuuuggaaag

SEQ ID NO: 1927606 - RNA, 19 nt, Homo sapiens
  misc_RNA (1)...(19): siRNA sense strand
cgaugaaauccucaacaug

SEQ ID NO: 1927607 - RNA, 19 nt, Homo sapiens
  misc_RNA (1)...(19): siRNA sense strand
agacaucaagccagacaau

SEQ ID NO: 1927608 - RNA, 19 nt, Homo sapiens
  misc_RNA (1)...(19): siRNA sense strand
ggacugugaaacucuacau

SEQ ID NO: 1927609 - RNA, 19 nt, Homo sapiens
  misc_RNA (1)...(19): siRNA sense strand
gcgauuggcaaagaacaga

SEQ ID NO: 1927610 - RNA, 19 nt, Homo sapiens
  misc_RNA (1)...(19): siRNA sense strand
auuacagacuucaacauag

SEQ ID NO: 1927611 - RNA, 19 nt, Homo sapiens
  misc_RNA (1)...(19): siRNA sense strand
gacaccugcagcacuguuu

SEQ ID NO: 1927612 - RNA, 19 nt, Homo sapiens
  misc_RNA (1)...(19): siRNA sense strand
aauccaagccacuucacaa

SEQ ID NO: 1927613 - RNA, 19 nt, Homo sapiens
  misc_RNA (1)...(19): siRNA sense strand
gggcaucacagccuaugag

SEQ ID NO: 1927614 - RNA, 19 nt, Homo sapiens
  misc_RNA (1)...(19): siRNA sense strand
cccaauaaagggagguuga

SEQ ID NO: 1927615 - RNA, 19 nt, Homo sapiens
  misc_RNA (1)...(19): siRNA sense strand
gaauagaacuccacgaaac

SEQ ID NO: 1927616 - RNA, 19 nt, Homo sapiens
  misc_RNA (1)...(19): siRNA sense strand
gaagaugcgaugccuguua

SEQ ID NO: 1927617 - RNA, 19 nt, Homo sapiens
  misc_RNA (1)...(19): siRNA sense strand
uggaugagaugauggauuu

SEQ ID NO: 1927618 - RNA, 19 nt, Homo sapiens
  misc_RNA (1)...(19): siRNA sense strand
cgaugccuguuauaaauua

SEQ ID NO: 1927619 - RNA, 19 nt, Homo sapiens
  misc_RNA (1)...(19): siRNA sense strand
gaagaugauuuggaugaga

SEQ ID NO: 1927620 - RNA, 19 nt, Homo sapiens
  misc_RNA (1)...(19): siRNA sense strand
ggagagaaauaugaacuuc

SEQ ID NO: 1927621 - RNA, 19 nt, Homo sapiens
  misc_RNA (1)...(19): siRNA sense strand
gaugauggauuuaagugau

SEQ ID NO: 1927622 - RNA, 19 nt, Homo sapiens
  misc_RNA (1)...(19): siRNA sense strand
gauuuacucugugcuguuu

SEQ ID NO: 1927623 - RNA, 19 nt, Homo sapiens
  misc_RNA (1)...(19): siRNA sense strand
ggaaugauagccagucaga

SEQ ID NO: 1927624 - RNA, 19 nt, Homo sapiens
  misc_RNA (1)...(19): siRNA sense strand
gcagauguccggcgaagug

SEQ ID NO: 1927625 - RNA, 19 nt, Homo sapiens
  misc_RNA (1)...(19): siRNA sense strand
gggacacuaugaaaucuug

SEQ ID NO: 1927626 - RNA, 19 nt, Homo sapiens
  misc_RNA (1)...(19): siRNA sense strand
gcgaauagaacuccacgaa

SEQ ID NO: 1927627 - RNA, 19 nt, Homo sapiens
  misc_RNA (1)...(19): siRNA sense strand
gaugagaugauggauuuaa

SEQ ID NO: 1927628 - RNA, 19 nt, Homo sapiens
  misc_RNA (1)...(19): siRNA sense strand
gaaggaaagauuugaagca

SEQ ID NO: 1927629 - RNA, 19 nt, Homo sapiens
  misc_RNA (1)...(19): siRNA sense strand
gagcagaaggaaagauuug

SEQ ID NO: 1927630 - RNA, 19 nt, Homo sapiens
  misc_RNA (1)...(19): siRNA sense strand
gagagcagaaggaaagauu

SEQ ID NO: 1927631 - RNA, 19 nt, Homo sapiens
  misc_RNA (1)...(19): siRNA sense strand
guguagcacugaccaagaa

SEQ ID NO: 1927632 - RNA, 19 nt, Homo sapiens
  misc_RNA (1)...(19): siRNA sense strand
gcagaaggaaagauuugaa

SEQ ID NO: 1927633 - RNA, 19 nt, Homo sapiens
  misc_RNA (1)...(19): siRNA sense strand
gaccaggagagaaauauga

SEQ ID NO: 1927634 - RNA, 19 nt, Homo sapiens
  misc_RNA (1)...(19): siRNA sense strand
ccacgaaacagacuucaau

SEQ ID NO: 1927635 - RNA, 19 nt, Homo sapiens
  misc_RNA (1)...(19): siRNA sense strand
ucaaugggcagaagcuaaa

SEQ ID NO: 1927636 - RNA, 19 nt, Homo sapiens
  misc_RNA (1)...(19): siRNA sense strand
acuaugaaaucuuggaaug

SEQ ID NO: 1927637 - RNA, 19 nt, Homo sapiens
  misc_RNA (1)...(19): siRNA sense strand
gaggaagaagagaugauuu

SEQ ID NO: 1927638 - RNA, 19 nt, Homo sapiens
  misc_RNA (1)...(19): siRNA sense strand
aagugaaacugaagaggaa

SEQ ID NO: 1927639 - RNA, 19 nt, Homo sapiens
  misc_RNA (1)...(19): siRNA sense strand
gaugcgaugccuguuauaa

SEQ ID NO: 1927640 - RNA, 19 nt, Homo sapiens
  misc_RNA (1)...(19): siRNA sense strand
gcagcaagagcgcgaauag

SEQ ID NO: 1927641 - RNA, 19 nt, Homo sapiens
  misc_RNA (1)...(19): siRNA sense strand
cgaauagaacuccacgaaa

SEQ ID NO: 1927642 - RNA, 19 nt, Homo sapiens
  misc_RNA (1)...(19): siRNA sense strand
ucugugcuguuuccaaauu

SEQ ID NO: 1927643 - RNA, 19 nt, Homo sapiens
  misc_RNA (1)...(19): siRNA sense strand
aagaugcgaugccuguuau

SEQ ID NO: 1927644 - RNA, 19 nt, Homo sapiens
  misc_RNA (1)...(19): siRNA sense strand
gagaugauggauuuaagug

SEQ ID NO: 1927645 - RNA, 19 nt, Homo sapiens
  misc_RNA (1)...(19): siRNA sense strand
aaacugaagaggaagaaga

SEQ ID NO: 1927646 - RNA, 19 nt, Homo sapiens
  misc_RNA (1)...(19): siRNA sense strand
ugcgaugccuguuauaaau

SEQ ID NO: 1927647 - RNA, 19 nt, Homo sapiens
  misc_RNA (1)...(19): siRNA sense strand
gcugagggacacuaugaaa

SEQ ID NO: 1927648 - RNA, 19 nt, Homo sapiens
  misc_RNA (1)...(19): siRNA sense strand
gcacgagagcagaaggaaa

SEQ ID NO: 1927649 - RNA, 19 nt, Homo sapiens
  misc_RNA (1)...(19): siRNA sense strand
gaagaggaagaagagauga

SEQ ID NO: 1927650 - RNA, 19 nt, Homo sapiens
  misc_RNA (1)...(19): siRNA sense strand
gaauaaauuucagcaaacc

SEQ ID NO: 1927651 - RNA, 19 nt, Homo sapiens
  misc_RNA (1)...(19): siRNA sense strand
ccaagaagaggaagaagag

SEQ ID NO: 1927652 - RNA, 19 nt, Homo sapiens
  misc_RNA (1)...(19): siRNA sense strand
gaucugccuaccucacuuu

SEQ ID NO: 1927653 - RNA, 19 nt, Homo sapiens
  misc_RNA (1)...(19): siRNA sense strand
acucugugcuguuuccaaa

SEQ ID NO: 1927654 - RNA, 19 nt, Homo sapiens
  misc_RNA (1)...(19): siRNA sense strand
gagggacacuaugaaaucu

SEQ ID NO: 1927655 - RNA, 19 nt, Homo sapiens
  misc_RNA (1)...(19): siRNA sense strand
gcgaugccuguuauaaauu

SEQ ID NO: 1927656 - RNA, 19 nt, Homo sapiens
  misc_RNA (1)...(19): siRNA sense strand
cgaccgcagcguugaauga

SEQ ID NO: 1927657 - RNA, 19 nt, Homo sapiens
  misc_RNA (1)...(19): siRNA sense strand
ugagggacacuaugaaauc

SEQ ID NO: 1927658 - RNA, 19 nt, Homo sapiens
  misc_RNA (1)...(19): siRNA sense strand
gauagccagucagaucugu

SEQ ID NO: 1927659 - RNA, 19 nt, Homo sapiens
  misc_RNA (1)...(19): siRNA sense strand
aagaugauuuggaugagau

SEQ ID NO: 1927660 - RNA, 19 nt, Homo sapiens
  misc_RNA (1)...(19): siRNA sense strand
agcaagagcgcgaauagaa

SEQ ID NO: 1927661 - RNA, 19 nt, Homo sapiens
  misc_RNA (1)...(19): siRNA sense strand
ugauuuggaugagaugaug

SEQ ID NO: 1927662 - RNA, 19 nt, Homo sapiens
  misc_RNA (1)...(19): siRNA sense strand
ggaccaggagagaaauaug

SEQ ID NO: 1927663 - RNA, 19 nt, Homo sapiens
  misc_RNA (1)...(19): siRNA sense strand
gcaagagcgcgaauagaac

SEQ ID NO: 1927664 - RNA, 19 nt, Homo sapiens
  misc_RNA (1)...(19): siRNA sense strand
ucaugucugugaaagugaa

SEQ ID NO: 1927665 - RNA, 19 nt, Homo sapiens
  misc_RNA (1)...(19): siRNA sense strand
aaugauagccagucagauc

SEQ ID NO: 1927666 - RNA, 19 nt, Homo sapiens
  misc_RNA (1)...(19): siRNA sense strand
caagagcgcgaauagaacu

SEQ ID NO: 1927667 - RNA, 19 nt, Homo sapiens
  misc_RNA (1)...(19): siRNA sense strand
gguggaagcagagcgaaga

SEQ ID NO: 1927668 - RNA, 19 nt, Homo sapiens
  misc_RNA (1)...(19): siRNA sense strand
ucaagcaguuccucaucuc

SEQ ID NO: 1927669 - RNA, 19 nt, Homo sapiens
  misc_RNA (1)...(19): siRNA sense strand
gucaagcaguuccucaucu

SEQ ID NO: 1927670 - RNA, 19 nt, Homo sapiens
  misc_RNA (1)...(19): siRNA sense strand
agaagaggaagaagagaug

SEQ ID NO: 1927671 - RNA, 19 nt, Homo sapiens
  misc_RNA (1)...(19): siRNA sense strand
ugaaaucuuggaaugauag

SEQ ID NO: 1927672 - RNA, 19 nt, Homo sapiens
  misc_RNA (1)...(19): siRNA sense strand
ugaccaagaagaggaagaa

SEQ ID NO: 1927673 - RNA, 19 nt, Homo sapiens
  misc_RNA (1)...(19): siRNA sense strand
ccagcguggugguucaugu

SEQ ID NO: 1927674 - RNA, 19 nt, Homo sapiens
  misc_RNA (1)...(19): siRNA sense strand
gaacuucacgcgggaacag

SEQ ID NO: 1927675 - RNA, 19 nt, Homo sapiens
  misc_RNA (1)...(19): siRNA sense strand
gcgaagugcgggacaaguc

SEQ ID NO: 1927676 - RNA, 19 nt, Homo sapiens
  misc_RNA (1)...(19): siRNA sense strand
augaugaccagguuacuuu

SEQ ID NO: 1927677 - RNA, 19 nt, Homo sapiens
  misc_RNA (1)...(19): siRNA sense strand
cacgagagcagaaggaaag

SEQ ID NO: 1927678 - RNA, 19 nt, Homo sapiens
  misc_RNA (1)...(19): siRNA sense strand
gaagaggaagaagagacaa

SEQ ID NO: 1927679 - RNA, 19 nt, Homo sapiens
  misc_RNA (1)...(19): siRNA sense strand
ugaagaggaagaagagaca

SEQ ID NO: 1927680 - RNA, 19 nt, Homo sapiens
  misc_RNA (1)...(19): siRNA sense strand
cuuuagaagagucagaaua

SEQ ID NO: 1927681 - RNA, 19 nt, Homo sapiens
  misc_RNA (1)...(19): siRNA sense strand
gcacucuucaccaucuaug

SEQ ID NO: 1927682 - RNA, 19 nt, Homo sapiens
  misc_RNA (1)...(19): siRNA sense strand
agaggaagaagagaugauu

SEQ ID NO: 1927683 - RNA, 19 nt, Homo sapiens
  misc_RNA (1)...(19): siRNA sense strand
cguggugguucaugucugu

SEQ ID NO: 1927684 - RNA, 19 nt, Homo sapiens
  misc_RNA (1)...(19): siRNA sense strand
gaacuccacgaaacagacu

SEQ ID NO: 1927685 - RNA, 19 nt, Homo sapiens
  misc_RNA (1)...(19): siRNA sense strand
cagaaggaaagauuugaag

SEQ ID NO: 1927686 - RNA, 19 nt, Homo sapiens
  misc_RNA (1)...(19): siRNA sense strand
ggaugagaugauggauuua

SEQ ID NO: 1927687 - RNA, 19 nt, Homo sapiens
  misc_RNA (1)...(19): siRNA sense strand
ugaagaugauuuggaugag

SEQ ID NO: 1927688 - RNA, 19 nt, Homo sapiens
  misc_RNA (1)...(19): siRNA sense strand
augaagaugauuuggauga

SEQ ID NO: 1927689 - RNA, 19 nt, Homo sapiens
  misc_RNA (1)...(19): siRNA sense strand
ucugugaaagugaaacuga

SEQ ID NO: 1927690 - RNA, 19 nt, Homo sapiens
  misc_RNA (1)...(19): siRNA sense strand
ugaaugagccccagaccuu

SEQ ID NO: 1927691 - RNA, 19 nt, Homo sapiens
  misc_RNA (1)...(19): siRNA sense strand
gcucugaucuuaaucuuug

SEQ ID NO: 1927692 - RNA, 19 nt, Homo sapiens
  misc_RNA (1)...(19): siRNA sense strand
gaccaugacaucuauauuu

SEQ ID NO: 1927693 - RNA, 19 nt, Homo sapiens
  misc_RNA (1)...(19): siRNA sense strand
gagauccgcuggccuggaa

SEQ ID NO: 1927694 - RNA, 19 nt, Homo sapiens
  misc_RNA (1)...(19): siRNA sense strand
gggcuuggcuggagguguu

SEQ ID NO: 1927695 - RNA, 19 nt, Homo sapiens
  misc_RNA (1)...(19): siRNA sense strand
gcucuggcuucuucaguuu

SEQ ID NO: 1927696 - RNA, 19 nt, Homo sapiens
  misc_RNA (1)...(19): siRNA sense strand
cuggagguguuaucauuua

SEQ ID NO: 1927697 - RNA, 19 nt, Homo sapiens
  misc_RNA (1)...(19): siRNA sense strand
ggagguguuaucauuuaua

SEQ ID NO: 1927698 - RNA, 19 nt, Homo sapiens
  misc_RNA (1)...(19): siRNA sense strand
caucccagguaucaucuuu

SEQ ID NO: 1927699 - RNA, 19 nt, Homo sapiens
  misc_RNA (1)...(19): siRNA sense strand
ggcuggagguguuaucauu

SEQ ID NO: 1927700 - RNA, 19 nt, Homo sapiens
  misc_RNA (1)...(19): siRNA sense strand
gauagacaaucuccuucug

SEQ ID NO: 1927701 - RNA, 19 nt, Homo sapiens
  misc_RNA (1)...(19): siRNA sense strand
gaucuucguuuaucucaac

SEQ ID NO: 1927702 - RNA, 19 nt, Homo sapiens
  misc_RNA (1)...(19): siRNA sense strand
ggucaugccuuugcuugga

SEQ ID NO: 1927703 - RNA, 19 nt, Homo sapiens
  misc_RNA (1)...(19): siRNA sense strand
gugaggcacugcugguauu

SEQ ID NO: 1927704 - RNA, 19 nt, Homo sapiens
  misc_RNA (1)...(19): siRNA sense strand
gcaugucucuucccaucug

SEQ ID NO: 1927705 - RNA, 19 nt, Homo sapiens
  misc_RNA (1)...(19): siRNA sense strand
cuacaguuaugcuuggauu

SEQ ID NO: 1927706 - RNA, 19 nt, Homo sapiens
  misc_RNA (1)...(19): siRNA sense strand
cgcaaacaguggccuauug

SEQ ID NO: 1927707 - RNA, 19 nt, Homo sapiens
  misc_RNA (1)...(19): siRNA sense strand
caccaucgcccgaaaguau

SEQ ID NO: 1927708 - RNA, 19 nt, Homo sapiens
  misc_RNA (1)...(19): siRNA sense strand
ucaacaugauccugcugua

SEQ ID NO: 1927709 - RNA, 19 nt, Homo sapiens
  misc_RNA (1)...(19): siRNA sense strand
gaucuuaaucuuugacagu

SEQ ID NO: 1927710 - RNA, 19 nt, Homo sapiens
  misc_RNA (1)...(19): siRNA sense strand
ccgcuggccuggaaccaaa

SEQ ID NO: 1927711 - RNA, 19 nt, Homo sapiens
  misc_RNA (1)...(19): siRNA sense strand
ggaccaugacaucuauauu

SEQ ID NO: 1927712 - RNA, 19 nt, Homo sapiens
  misc_RNA (1)...(19): siRNA sense strand
ggaguggaccuaaacuaca

SEQ ID NO: 1927713 - RNA, 19 nt, Homo sapiens
  misc_RNA (1)...(19): siRNA sense strand
accaugacaucuauauuug

SEQ ID NO: 1927714 - RNA, 19 nt, Homo sapiens
  misc_RNA (1)...(19): siRNA sense strand
ucccagguaucaucuuuga

SEQ ID NO: 1927715 - RNA, 19 nt, Homo sapiens
  misc_RNA (1)...(19): siRNA sense strand
agcauacacuacacagaua

SEQ ID NO: 1927716 - RNA, 19 nt, Homo sapiens
  misc_RNA (1)...(19): siRNA sense strand
cuauguagccgccacugua

SEQ ID NO: 1927717 - RNA, 19 nt, Homo sapiens
  misc_RNA (1)...(19): siRNA sense strand
uucuguagcucugaucuua

SEQ ID NO: 1927718 - RNA, 19 nt, Homo sapiens
  misc_RNA (1)...(19): siRNA sense strand
gaguggaccuaaacuacag

SEQ ID NO: 1927719 - RNA, 19 nt, Homo sapiens
  misc_RNA (1)...(19): siRNA sense strand
gaagcauacacuacacaga

SEQ ID NO: 1927720 - RNA, 19 nt, Homo sapiens
  misc_RNA (1)...(19): siRNA sense strand
gguauuggguggcauuagc

SEQ ID NO: 1927721 - RNA, 19 nt, Homo sapiens
  misc_RNA (1)...(19): siRNA sense strand
acaguggaguggaccuaaa

SEQ ID NO: 1927722 - RNA, 19 nt, Homo sapiens
  misc_RNA (1)...(19): siRNA sense strand
ggucucugcuggccaccuu

SEQ ID NO: 1927723 - RNA, 19 nt, Homo sapiens
  misc_RNA (1)...(19): siRNA sense strand
ggcaguggcccucuucuca

SEQ ID NO: 1927724 - RNA, 19 nt, Homo sapiens
  misc_RNA (1)...(19): siRNA sense strand
gcacucuguuugucuucau

SEQ ID NO: 1927725 - RNA, 19 nt, Homo sapiens
  misc_RNA (1)...(19): siRNA sense strand
gcauuagcuuuguccucaa

SEQ ID NO: 1927726 - RNA, 19 nt, Homo sapiens
  misc_RNA (1)...(19): siRNA sense strand
gcuggagguguuaucauuu

SEQ ID NO: 1927727 - RNA, 19 nt, Homo sapiens
  misc_RNA (1)...(19): siRNA sense strand
ggugaucgaaguccuggaa

SEQ ID NO: 1927728 - RNA, 19 nt, Homo sapiens
  misc_RNA (1)...(19): siRNA sense strand
gagccuuggugugguccua

SEQ ID NO: 1927729 - RNA, 19 nt, Homo sapiens
  misc_RNA (1)...(19): siRNA sense strand
ucguuuaucucaacaugau

SEQ ID NO: 1927730 - RNA, 19 nt, Homo sapiens
  misc_RNA (1)...(19): siRNA sense strand
cuucugaucuucguuuauc

SEQ ID NO: 1927731 - RNA, 19 nt, Homo sapiens
  misc_RNA (1)...(19): siRNA sense strand
ucagcacucuguuugucuu

SEQ ID NO: 1927732 - RNA, 19 nt, Homo sapiens
  misc_RNA (1)...(19): siRNA sense strand
cccagacccugcacacaga

SEQ ID NO: 1927733 - RNA, 19 nt, Homo sapiens
  misc_RNA (1)...(19): siRNA sense strand
gcauggcaguggcccucuu

SEQ ID NO: 1927734 - RNA, 19 nt, Homo sapiens
  misc_RNA (1)...(19): siRNA sense strand
cuacaucccagguaucauc

SEQ ID NO: 1927735 - RNA, 19 nt, Homo sapiens
  misc_RNA (1)...(19): siRNA sense strand
cuguagcucugaucuuaau

SEQ ID NO: 1927736 - RNA, 19 nt, Homo sapiens
  misc_RNA (1)...(19): siRNA sense strand
gaccacucauucugacaca

SEQ ID NO: 1927737 - RNA, 19 nt, Homo sapiens
  misc_RNA (1)...(19): siRNA sense strand
ccucuucucaucaguguug

SEQ ID NO: 1927738 - RNA, 19 nt, Homo sapiens
  misc_RNA (1)...(19): siRNA sense strand
aagcauacacuacacagau

SEQ ID NO: 1927739 - RNA, 19 nt, Homo sapiens
  misc_RNA (1)...(19): siRNA sense strand
gccuuugggucacacucua

SEQ ID NO: 1927740 - RNA, 19 nt, Homo sapiens
  misc_RNA (1)...(19): siRNA sense strand
agacagacacccgcaucua

SEQ ID NO: 1927741 - RNA, 19 nt, Homo sapiens
  misc_RNA (1)...(19): siRNA sense strand
ggacccaguggacuucuuc

SEQ ID NO: 1927742 - RNA, 19 nt, Homo sapiens
  misc_RNA (1)...(19): siRNA sense strand
gaucgaaguccuggaaguc

SEQ ID NO: 1927743 - RNA, 19 nt, Homo sapiens
  misc_RNA (1)...(19): siRNA sense strand
agaggcggcaguaguguuu

SEQ ID NO: 1927744 - RNA, 19 nt, Homo sapiens
  misc_RNA (1)...(19): siRNA sense strand
uagcucugaucuuaaucuu

SEQ ID NO: 1927745 - RNA, 19 nt, Homo sapiens
  misc_RNA (1)...(19): siRNA sense strand
gggaccaugacaucuauau

SEQ ID NO: 1927746 - RNA, 19 nt, Homo sapiens
  misc_RNA (1)...(19): siRNA sense strand
caagugggaccggcugcua

SEQ ID NO: 1927747 - RNA, 19 nt, Homo sapiens
  misc_RNA (1)...(19): siRNA sense strand
gacagacacccgcaucuac

SEQ ID NO: 1927748 - RNA, 19 nt, Homo sapiens
  misc_RNA (1)...(19): siRNA sense strand
caguggcccucuucucauc

SEQ ID NO: 1927749 - RNA, 19 nt, Homo sapiens
  misc_RNA (1)...(19): siRNA sense strand
acacuacacagauagacaa

SEQ ID NO: 1927750 - RNA, 19 nt, Homo sapiens
  misc_RNA (1)...(19): siRNA sense strand
ucaucuuccuggaguaugu

SEQ ID NO: 1927751 - RNA, 19 nt, Homo sapiens
  misc_RNA (1)...(19): siRNA sense strand
gcccucuucucaucagugu

SEQ ID NO: 1927752 - RNA, 19 nt, Homo sapiens
  misc_RNA (1)...(19): siRNA sense strand
gcaguggcccucuucucau

SEQ ID NO: 1927753 - RNA, 19 nt, Homo sapiens
  misc_RNA (1)...(19): siRNA sense strand
ggagcuuccugucccuuuu

SEQ ID NO: 1927754 - RNA, 19 nt, Homo sapiens
  misc_RNA (1)...(19): siRNA sense strand
ggugaggcacugcugguau

SEQ ID NO: 1927755 - RNA, 19 nt, Homo sapiens
  misc_RNA (1)...(19): siRNA sense strand
ccgaauguccgcaaacagu

SEQ ID NO: 1927756 - RNA, 19 nt, Homo sapiens
  misc_RNA (1)...(19): siRNA sense strand
caucaagcgcucucugaca

SEQ ID NO: 1927757 - RNA, 19 nt, Homo sapiens
  misc_RNA (1)...(19): siRNA sense strand
gcauacacuacacagauag

SEQ ID NO: 1927758 - RNA, 19 nt, Homo sapiens
  misc_RNA (1)...(19): siRNA sense strand
gacaguggaguggaccuaa

SEQ ID NO: 1927759 - RNA, 19 nt, Homo sapiens
  misc_RNA (1)...(19): siRNA sense strand
ggucaucuuccgaguccaa

SEQ ID NO: 1927760 - RNA, 19 nt, Homo sapiens
  misc_RNA (1)...(19): siRNA sense strand
cguucuacguccaauacaa

SEQ ID NO: 1927761 - RNA, 19 nt, Homo sapiens
  misc_RNA (1)...(19): siRNA sense strand
gugauacuguggccuccau

SEQ ID NO: 1927762 - RNA, 19 nt, Homo sapiens
  misc_RNA (1)...(19): siRNA sense strand
ugaucgaaguccuggaagu

SEQ ID NO: 1927763 - RNA, 19 nt, Homo sapiens
  misc_RNA (1)...(19): siRNA sense strand
guggaguggaccuaaacua

SEQ ID NO: 1927764 - RNA, 19 nt, Homo sapiens
  misc_RNA (1)...(19): siRNA sense strand
uauauuugcgcagaucauu

SEQ ID NO: 1927765 - RNA, 19 nt, Homo sapiens
  misc_RNA (1)...(19): siRNA sense strand
ccaucgcccgaaaguauuu

SEQ ID NO: 1927766 - RNA, 19 nt, Homo sapiens
  misc_RNA (1)...(19): siRNA sense strand
ggugguaguagggauggua

SEQ ID NO: 1927767 - RNA, 19 nt, Homo sapiens
  misc_RNA (1)...(19): siRNA sense strand
cuucguuuaucucaacaug

SEQ ID NO: 1927768 - RNA, 19 nt, Homo sapiens
  misc_RNA (1)...(19): siRNA sense strand
uggagguguuaucauuuau

SEQ ID NO: 1927769 - RNA, 19 nt, Homo sapiens
  misc_RNA (1)...(19): siRNA sense strand
ccacucauucugacacaca

SEQ ID NO: 1927770 - RNA, 19 nt, Homo sapiens
  misc_RNA (1)...(19): siRNA sense strand
gccuggcggucuucaucuu

SEQ ID NO: 1927771 - RNA, 19 nt, Homo sapiens
  misc_RNA (1)...(19): siRNA sense strand
caacaugauccugcuguac

SEQ ID NO: 1927772 - RNA, 19 nt, Homo sapiens
  misc_RNA (1)...(19): siRNA sense strand
gauaagcucucaacuauag

SEQ ID NO: 1927773 - RNA, 19 nt, Homo sapiens
  misc_RNA (1)...(19): siRNA sense strand
gcagauaccuuagugacaa

SEQ ID NO: 1927774 - RNA, 19 nt, Homo sapiens
  misc_RNA (1)...(19): siRNA sense strand
caucacugcuuguuacaua

SEQ ID NO: 1927775 - RNA, 19 nt, Homo sapiens
  misc_RNA (1)...(19): siRNA sense strand
caugaaggaugacauugua

SEQ ID NO: 1927776 - RNA, 19 nt, Homo sapiens
  misc_RNA (1)...(19): siRNA sense strand
uuccaaaccuggcuuauaa

SEQ ID NO: 1927777 - RNA, 19 nt, Homo sapiens
  misc_RNA (1)...(19): siRNA sense strand
uuaaucagcuuccuguuga

SEQ ID NO: 1927778 - RNA, 19 nt, Homo sapiens
  misc_RNA (1)...(19): siRNA sense strand
gaugguaacucagaggaaa

SEQ ID NO: 1927779 - RNA, 19 nt, Homo sapiens
  misc_RNA (1)...(19): siRNA sense strand
gaggguggcuuaugcuuca

SEQ ID NO: 1927780 - RNA, 19 nt, Homo sapiens
  misc_RNA (1)...(19): siRNA sense strand
uaaagaagcugaacaucac

SEQ ID NO: 1927781 - RNA, 19 nt, Homo sapiens
  misc_RNA (1)...(19): siRNA sense strand
agaaggaguuuauaacguu

SEQ ID NO: 1927782 - RNA, 19 nt, Homo sapiens
  misc_RNA (1)...(19): siRNA sense strand
gagaaggucguggcucuua

SEQ ID NO: 1927783 - RNA, 19 nt, Homo sapiens
  misc_RNA (1)...(19): siRNA sense strand
aaaccuggcuuauaagaag

SEQ ID NO: 1927784 - RNA, 19 nt, Homo sapiens
  misc_RNA (1)...(19): siRNA sense strand
gcagguugccgaucgagua

SEQ ID NO: 1927785 - RNA, 19 nt, Homo sapiens
  misc_RNA (1)...(19): siRNA sense strand
guucaguacaguuucauua

SEQ ID NO: 1927786 - RNA, 19 nt, Homo sapiens
  misc_RNA (1)...(19): siRNA sense strand
gacauucaacuucuuguuu

SEQ ID NO: 1927787 - RNA, 19 nt, Homo sapiens
  misc_RNA (1)...(19): siRNA sense strand
gcauaagguuugauuacuc

SEQ ID NO: 1927788 - RNA, 19 nt, Homo sapiens
  misc_RNA (1)...(19): siRNA sense strand
ggucguggcucuuauuggu

SEQ ID NO: 1927789 - RNA, 19 nt, Homo sapiens
  misc_RNA (1)...(19): siRNA sense strand
cauaagguuugauuacuca

SEQ ID NO: 1927790 - RNA, 19 nt, Homo sapiens
  misc_RNA (1)...(19): siRNA sense strand
gaccagaccuuccaaaccu

SEQ ID NO: 1927791 - RNA, 19 nt, Homo sapiens
  misc_RNA (1)...(19): siRNA sense strand
gcaauugcacgaccagaga

SEQ ID NO: 1927792 - RNA, 19 nt, Homo sapiens
  misc_RNA (1)...(19): siRNA sense strand
caaaagcguuggcgauuga

SEQ ID NO: 1927793 - RNA, 19 nt, Homo sapiens
  misc_RNA (1)...(19): siRNA sense strand
gaaggucguggcucuuauu

SEQ ID NO: 1927794 - RNA, 19 nt, Homo sapiens
  misc_RNA (1)...(19): siRNA sense strand
cuggcuaucuuucuuauau

SEQ ID NO: 1927795 - RNA, 19 nt, Homo sapiens
  misc_RNA (1)...(19): siRNA sense strand
acacagugaucaccgaaug

SEQ ID NO: 1927796 - RNA, 19 nt, Homo sapiens
  misc_RNA (1)...(19): siRNA sense strand
gaagaaggaguuuauaacg

SEQ ID NO: 1927797 - RNA, 19 nt, Homo sapiens
  misc_RNA (1)...(19): siRNA sense strand
ggcuaucuuucuuauauga

SEQ ID NO: 1927798 - RNA, 19 nt, Homo sapiens
  misc_RNA (1)...(19): siRNA sense strand
ggucacgccugcauaaggu

SEQ ID NO: 1927799 - RNA, 19 nt, Homo sapiens
  misc_RNA (1)...(19): siRNA sense strand
gacauuguaccuuggcaua

SEQ ID NO: 1927800 - RNA, 19 nt, Homo sapiens
  misc_RNA (1)...(19): siRNA sense strand
gaguuuauaacguucagua

SEQ ID NO: 1927801 - RNA, 19 nt, Homo sapiens
  misc_RNA (1)...(19): siRNA sense strand
uuaaagaagcugaacauca

SEQ ID NO: 1927802 - RNA, 19 nt, Homo sapiens
  misc_RNA (1)...(19): siRNA sense strand
ggaguuggaaguucagaug

SEQ ID NO: 1927803 - RNA, 19 nt, Homo sapiens
  misc_RNA (1)...(19): siRNA sense strand
guuggaaguucagauggua

SEQ ID NO: 1927804 - RNA, 19 nt, Homo sapiens
  misc_RNA (1)...(19): siRNA sense strand
gcaugaaggaugacauugu

SEQ ID NO: 1927805 - RNA, 19 nt, Homo sapiens
  misc_RNA (1)...(19): siRNA sense strand
gcagacauucaacuucuug

SEQ ID NO: 1927806 - RNA, 19 nt, Homo sapiens
  misc_RNA (1)...(19): siRNA sense strand
gacaaaguuuaaucagcuu

SEQ ID NO: 1927807 - RNA, 19 nt, Homo sapiens
  misc_RNA (1)...(19): siRNA sense strand
aaaauacucugaagaagga

SEQ ID NO: 1927808 - RNA, 19 nt, Homo sapiens
  misc_RNA (1)...(19): siRNA sense strand
caguacaguuucauuaaag

SEQ ID NO: 1927809 - RNA, 19 nt, Homo sapiens
  misc_RNA (1)...(19): siRNA sense strand
caacuucuuguuuacacua

SEQ ID NO: 1927810 - RNA, 19 nt, Homo sapiens
  misc_RNA (1)...(19): siRNA sense strand
gaucaccgaaugagggaaa

SEQ ID NO: 1927811 - RNA, 19 nt, Homo sapiens
  misc_RNA (1)...(19): siRNA sense strand
cagauaccuuagugacaaa

SEQ ID NO: 1927812 - RNA, 19 nt, Homo sapiens
  misc_RNA (1)...(19): siRNA sense strand
cuucaucccuggcuaucuu

SEQ ID NO: 1927813 - RNA, 19 nt, Homo sapiens
  misc_RNA (1)...(19): siRNA sense strand
aagcagacauucaacuucu

SEQ ID NO: 1927814 - RNA, 19 nt, Homo sapiens
  misc_RNA (1)...(19): siRNA sense strand
gaacugccccauaagauug

SEQ ID NO: 1927815 - RNA, 19 nt, Homo sapiens
  misc_RNA (1)...(19): siRNA sense strand
guucagaugguaacucaga

SEQ ID NO: 1927816 - RNA, 19 nt, Homo sapiens
  misc_RNA (1)...(19): siRNA sense strand
cugaagaaggaguuuauaa

SEQ ID NO: 1927817 - RNA, 19 nt, Homo sapiens
  misc_RNA (1)...(19): siRNA sense strand
ccaaaccuggcuuauaaga

SEQ ID NO: 1927818 - RNA, 19 nt, Homo sapiens
  misc_RNA (1)...(19): siRNA sense strand
gcugaugggccacagauuc

SEQ ID NO: 1927819 - RNA, 19 nt, Homo sapiens
  misc_RNA (1)...(19): siRNA sense strand
caaaccuggcuuauaagaa

SEQ ID NO: 1927820 - RNA, 19 nt, Homo sapiens
  misc_RNA (1)...(19): siRNA sense strand
aagaaggaguuuauaacgu

SEQ ID NO: 1927821 - RNA, 19 nt, Homo sapiens
  misc_RNA (1)...(19): siRNA sense strand
cuaggucacgccugcauaa

SEQ ID NO: 1927822 - RNA, 19 nt, Homo sapiens
  misc_RNA (1)...(19): siRNA sense strand
ccugugaacugccccauaa

SEQ ID NO: 1927823 - RNA, 19 nt, Homo sapiens
  misc_RNA (1)...(19): siRNA sense strand
ggaaguagagaugaaaggu

SEQ ID NO: 1927824 - RNA, 19 nt, Homo sapiens
  misc_RNA (1)...(19): siRNA sense strand
ucacucucauuccuuaauc

SEQ ID NO: 1927825 - RNA, 19 nt, Homo sapiens
  misc_RNA (1)...(19): siRNA sense strand
ugaagaaggaguuuauaac

SEQ ID NO: 1927826 - RNA, 19 nt, Homo sapiens
  misc_RNA (1)...(19): siRNA sense strand
ggcaaaaguccaggaauua

SEQ ID NO: 1927827 - RNA, 19 nt, Homo sapiens
  misc_RNA (1)...(19): siRNA sense strand
caaaagacgucacucucau

SEQ ID NO: 1927828 - RNA, 19 nt, Homo sapiens
  misc_RNA (1)...(19): siRNA sense strand
cuuguuacauagcccaauu

SEQ ID NO: 1927829 - RNA, 19 nt, Homo sapiens
  misc_RNA (1)...(19): siRNA sense strand
aaaaggaaguagagaugaa

SEQ ID NO: 1927830 - RNA, 19 nt, Homo sapiens
  misc_RNA (1)...(19): siRNA sense strand
ugauaagcucucaacuaua

SEQ ID NO: 1927831 - RNA, 19 nt, Homo sapiens
  misc_RNA (1)...(19): siRNA sense strand
cuucuuguuuacacuauug

SEQ ID NO: 1927832 - RNA, 19 nt, Homo sapiens
  misc_RNA (1)...(19): siRNA sense strand
uguggagcaugccaucaaa

SEQ ID NO: 1927833 - RNA, 19 nt, Homo sapiens
  misc_RNA (1)...(19): siRNA sense strand
acgucacucucauuccuua

SEQ ID NO: 1927834 - RNA, 19 nt, Homo sapiens
  misc_RNA (1)...(19): siRNA sense strand
gaugggccacagauucuug

SEQ ID NO: 1927835 - RNA, 19 nt, Homo sapiens
  misc_RNA (1)...(19): siRNA sense strand
cgaguacucagcacagaug

SEQ ID NO: 1927836 - RNA, 19 nt, Homo sapiens
  misc_RNA (1)...(19): siRNA sense strand
guccaggaauuaucuucau

SEQ ID NO: 1927837 - RNA, 19 nt, Homo sapiens
  misc_RNA (1)...(19): siRNA sense strand
ggagcaugccaucaaaaua

SEQ ID NO: 1927838 - RNA, 19 nt, Homo sapiens
  misc_RNA (1)...(19): siRNA sense strand
agaaggucguggcucuuau

SEQ ID NO: 1927839 - RNA, 19 nt, Homo sapiens
  misc_RNA (1)...(19): siRNA sense strand
aaagacgucacucucauuc

SEQ ID NO: 1927840 - RNA, 19 nt, Homo sapiens
  misc_RNA (1)...(19): siRNA sense strand
aaaggaaguagagaugaaa

SEQ ID NO: 1927841 - RNA, 19 nt, Homo sapiens
  misc_RNA (1)...(19): siRNA sense strand
cguuggcgauugaggaguu

SEQ ID NO: 1927842 - RNA, 19 nt, Homo sapiens
  misc_RNA (1)...(19): siRNA sense strand
ugaaagguguguggagcau

SEQ ID NO: 1927843 - RNA, 19 nt, Homo sapiens
  misc_RNA (1)...(19): siRNA sense strand
ccacagauucuuguuggau

SEQ ID NO: 1927844 - RNA, 19 nt, Homo sapiens
  misc_RNA (1)...(19): siRNA sense strand
cauuaaagaagcugaacau

SEQ ID NO: 1927845 - RNA, 19 nt, Homo sapiens
  misc_RNA (1)...(19): siRNA sense strand
gcaaaaguccaggaauuau

SEQ ID NO: 1927846 - RNA, 19 nt, Homo sapiens
  misc_RNA (1)...(19): siRNA sense strand
auaccuuagugacaaaguu

SEQ ID NO: 1927847 - RNA, 19 nt, Homo sapiens
  misc_RNA (1)...(19): siRNA sense strand
ggaaauggagaaaagaugu

SEQ ID NO: 1927848 - RNA, 19 nt, Homo sapiens
  misc_RNA (1)...(19): siRNA sense strand
cuuccaaaccuggcuuaua

SEQ ID NO: 1927849 - RNA, 19 nt, Homo sapiens
  misc_RNA (1)...(19): siRNA sense strand
uaccuuagugacaaaguuu

SEQ ID NO: 1927850 - RNA, 19 nt, Homo sapiens
  misc_RNA (1)...(19): siRNA sense strand
uaccuuggcauacaucaau

SEQ ID NO: 1927851 - RNA, 19 nt, Homo sapiens
  misc_RNA (1)...(19): siRNA sense strand
aggcaaaaguccaggaauu

SEQ ID NO: 1927852 - RNA, 19 nt, Homo sapiens
  misc_RNA (1)...(19): siRNA sense strand
aaagcagacauucaacuuc

SEQ ID NO: 1927853 - RNA, 19 nt, Homo sapiens
  misc_RNA (1)...(19): siRNA sense strand
uuuauaacguucaguacag

SEQ ID NO: 1927854 - RNA, 19 nt, Homo sapiens
  misc_RNA (1)...(19): siRNA sense strand
uuuaaucagcuuccuguug

SEQ ID NO: 1927855 - RNA, 19 nt, Homo sapiens
  misc_RNA (1)...(19): siRNA sense strand
uaugcuucaugcugcaauu

SEQ ID NO: 1927856 - RNA, 19 nt, Homo sapiens
  misc_RNA (1)...(19): siRNA sense strand
uggcaugaaggaugacauu

SEQ ID NO: 1927857 - RNA, 19 nt, Homo sapiens
  misc_RNA (1)...(19): siRNA sense strand
gcccaauuccugugaacug

SEQ ID NO: 1927858 - RNA, 19 nt, Homo sapiens
  misc_RNA (1)...(19): siRNA sense strand
gagcaugccaucaaaauac

SEQ ID NO: 1927859 - RNA, 19 nt, Homo sapiens
  misc_RNA (1)...(19): siRNA sense strand
agacgucacucucauuccu

SEQ ID NO: 1927860 - RNA, 19 nt, Homo sapiens
  misc_RNA (1)...(19): siRNA sense strand
caauugcacgaccagagaa

SEQ ID NO: 1927861 - RNA, 19 nt, Homo sapiens
  misc_RNA (1)...(19): siRNA sense strand
gcucuuauugguguagcua

SEQ ID NO: 1927862 - RNA, 19 nt, Homo sapiens
  misc_RNA (1)...(19): siRNA sense strand
guuuauaacguucaguaca

SEQ ID NO: 1927863 - RNA, 19 nt, Homo sapiens
  misc_RNA (1)...(19): siRNA sense strand
uacagcugcagauaccuua

SEQ ID NO: 1927864 - RNA, 19 nt, Homo sapiens
  misc_RNA (1)...(19): siRNA sense strand
ggagaagucugucaacaaa

SEQ ID NO: 1927865 - RNA, 19 nt, Homo sapiens
  misc_RNA (1)...(19): siRNA sense strand
ggaagaggaugaagcaauu

SEQ ID NO: 1927866 - RNA, 19 nt, Homo sapiens
  misc_RNA (1)...(19): siRNA sense strand
gaaauaagcggaaacaaga

SEQ ID NO: 1927867 - RNA, 19 nt, Homo sapiens
  misc_RNA (1)...(19): siRNA sense strand
guauuuggcugguaucuuu

SEQ ID NO: 1927868 - RNA, 19 nt, Homo sapiens
  misc_RNA (1)...(19): siRNA sense strand
gaagauguguggcuacaau

SEQ ID NO: 1927869 - RNA, 19 nt, Homo sapiens
  misc_RNA (1)...(19): siRNA sense strand
gagagugucugacuacuau

SEQ ID NO: 1927870 - RNA, 19 nt, Homo sapiens
  misc_RNA (1)...(19): siRNA sense strand
ucacugagcuauugaacaa

SEQ ID NO: 1927871 - RNA, 19 nt, Homo sapiens
  misc_RNA (1)...(19): siRNA sense strand
gcaacuaccugccuuucaa

SEQ ID NO: 1927872 - RNA, 19 nt, Homo sapiens
  misc_RNA (1)...(19): siRNA sense strand
caaggaagcuaagaagaaa

SEQ ID NO: 1927873 - RNA, 19 nt, Homo sapiens
  misc_RNA (1)...(19): siRNA sense strand
agaaaucucuccagaaguu

SEQ ID NO: 1927874 - RNA, 19 nt, Homo sapiens
  misc_RNA (1)...(19): siRNA sense strand
cacaagaacuguaugauuc

SEQ ID NO: 1927875 - RNA, 19 nt, Homo sapiens
  misc_RNA (1)...(19): siRNA sense strand
guuaauggcuuaucuacug

SEQ ID NO: 1927876 - RNA, 19 nt, Homo sapiens
  misc_RNA (1)...(19): siRNA sense strand
gaaggagauugguucugua

SEQ ID NO: 1927877 - RNA, 19 nt, Homo sapiens
  misc_RNA (1)...(19): siRNA sense strand
gaggagguaugcaguggua

SEQ ID NO: 1927878 - RNA, 19 nt, Homo sapiens
  misc_RNA (1)...(19): siRNA sense strand
gggagaaggugucugaaau

SEQ ID NO: 1927879 - RNA, 19 nt, Homo sapiens
  misc_RNA (1)...(19): siRNA sense strand
gauggaggcugucccagaa

SEQ ID NO: 1927880 - RNA, 19 nt, Homo sapiens
  misc_RNA (1)...(19): siRNA sense strand
ccagaaaucucuccagaag

SEQ ID NO: 1927881 - RNA, 19 nt, Homo sapiens
  misc_RNA (1)...(19): siRNA sense strand
caacgaggaugacucugaa

SEQ ID NO: 1927882 - RNA, 19 nt, Homo sapiens
  misc_RNA (1)...(19): siRNA sense strand
gaucagucauccacuauuc

SEQ ID NO: 1927883 - RNA, 19 nt, Homo sapiens
  misc_RNA (1)...(19): siRNA sense strand
gggcaccacuacagagaua

SEQ ID NO: 1927884 - RNA, 19 nt, Homo sapiens
  misc_RNA (1)...(19): siRNA sense strand
gcaaggugcugggcuuuga

SEQ ID NO: 1927885 - RNA, 19 nt, Homo sapiens
  misc_RNA (1)...(19): siRNA sense strand
gaagcaauuuccagaagug

SEQ ID NO: 1927886 - RNA, 19 nt, Homo sapiens
  misc_RNA (1)...(19): siRNA sense strand
gcacuucacaaacaccuua

SEQ ID NO: 1927887 - RNA, 19 nt, Homo sapiens
  misc_RNA (1)...(19): siRNA sense strand
gcccugaucuucaagcauu

SEQ ID NO: 1927888 - RNA, 19 nt, Homo sapiens
  misc_RNA (1)...(19): siRNA sense strand
gcuuggagcuggaagaaga

SEQ ID NO: 1927889 - RNA, 19 nt, Homo sapiens
  misc_RNA (1)...(19): siRNA sense strand
ggagagaggugcgcaucaa

SEQ ID NO: 1927890 - RNA, 19 nt, Homo sapiens
  misc_RNA (1)...(19): siRNA sense strand
ggaagaagaggagucuaua

SEQ ID NO: 1927891 - RNA, 19 nt, Homo sapiens
  misc_RNA (1)...(19): siRNA sense strand
ccaguaaguucuucaaaca

SEQ ID NO: 1927892 - RNA, 19 nt, Homo sapiens
  misc_RNA (1)...(19): siRNA sense strand
ggagauugguucuguacug

SEQ ID NO: 1927893 - RNA, 19 nt, Homo sapiens
  misc_RNA (1)...(19): siRNA sense strand
gauaccagauccugagaug

SEQ ID NO: 1927894 - RNA, 19 nt, Homo sapiens
  misc_RNA (1)...(19): siRNA sense strand
acaaacaccuuaacaagca

SEQ ID NO: 1927895 - RNA, 19 nt, Homo sapiens
  misc_RNA (1)...(19): siRNA sense strand
gcccgaagccgaccucuaa

SEQ ID NO: 1927896 - RNA, 19 nt, Homo sapiens
  misc_RNA (1)...(19): siRNA sense strand
uaacagcuuugaccugaau

SEQ ID NO: 1927897 - RNA, 19 nt, Homo sapiens
  misc_RNA (1)...(19): siRNA sense strand
cuucaagcauucugguuua

SEQ ID NO: 1927898 - RNA, 19 nt, Homo sapiens
  misc_RNA (1)...(19): siRNA sense strand
ucgaagagauggagagguu

SEQ ID NO: 1927899 - RNA, 19 nt, Homo sapiens
  misc_RNA (1)...(19): siRNA sense strand
caaaaucacugagcuauug

SEQ ID NO: 1927900 - RNA, 19 nt, Homo sapiens
  misc_RNA (1)...(19): siRNA sense strand
gaacaggaagaaauggaaa

SEQ ID NO: 1927901 - RNA, 19 nt, Homo sapiens
  misc_RNA (1)...(19): siRNA sense strand
ggacuggcaccucaacgua

SEQ ID NO: 1927902 - RNA, 19 nt, Homo sapiens
  misc_RNA (1)...(19): siRNA sense strand
caagagaccaagagcuuaa

SEQ ID NO: 1927903 - RNA, 19 nt, Homo sapiens
  misc_RNA (1)...(19): siRNA sense strand
gaggauaaagcaaagauug

SEQ ID NO: 1927904 - RNA, 19 nt, Homo sapiens
  misc_RNA (1)...(19): siRNA sense strand
gaagaaauggaaacucaau

SEQ ID NO: 1927905 - RNA, 19 nt, Homo sapiens
  misc_RNA (1)...(19): siRNA sense strand
gcuuugaccugaauaaugg

SEQ ID NO: 1927906 - RNA, 19 nt, Homo sapiens
  misc_RNA (1)...(19): siRNA sense strand
cugaggaggugauaaagaa

SEQ ID NO: 1927907 - RNA, 19 nt, Homo sapiens
  misc_RNA (1)...(19): siRNA sense strand
ggagaccaguggcauggaa

SEQ ID NO: 1927908 - RNA, 19 nt, Homo sapiens
  misc_RNA (1)...(19): siRNA sense strand
gaacugggcggucugaagu

SEQ ID NO: 1927909 - RNA, 19 nt, Homo sapiens
  misc_RNA (1)...(19): siRNA sense strand
gagaguauguccagcuaca

SEQ ID NO: 1927910 - RNA, 19 nt, Homo sapiens
  misc_RNA (1)...(19): siRNA sense strand
gaaacucaaucuucagacu

SEQ ID NO: 1927911 - RNA, 19 nt, Homo sapiens
  misc_RNA (1)...(19): siRNA sense strand
aaauggcacuggcuuggua

SEQ ID NO: 1927912 - RNA, 19 nt, Homo sapiens
  misc_RNA (1)...(19): siRNA sense strand
gaggaugacucugaaguag

SEQ ID NO: 1927913 - RNA, 19 nt, Homo sapiens
  misc_RNA (1)...(19): siRNA sense strand
ggaaagacaaagcaggaaa

SEQ ID NO: 1927914 - RNA, 19 nt, Homo sapiens
  misc_RNA (1)...(19): siRNA sense strand
gaaacuggaggcccaagaa

SEQ ID NO: 1927915 - RNA, 19 nt, Homo sapiens
  misc_RNA (1)...(19): siRNA sense strand
agagaucacuggagaagga

SEQ ID NO: 1927916 - RNA, 19 nt, Homo sapiens
  misc_RNA (1)...(19): siRNA sense strand
agucaaacaucaacuucua

SEQ ID NO: 1927917 - RNA, 19 nt, Homo sapiens
  misc_RNA (1)...(19): siRNA sense strand
ggaggacuauaugguauug

SEQ ID NO: 1927918 - RNA, 19 nt, Homo sapiens
  misc_RNA (1)...(19): siRNA sense strand
gaagaacagccagaacuga

SEQ ID NO: 1927919 - RNA, 19 nt, Homo sapiens
  misc_RNA (1)...(19): siRNA sense strand
gagggagaauucacucaga

SEQ ID NO: 1927920 - RNA, 19 nt, Homo sapiens
  misc_RNA (1)...(19): siRNA sense strand
ucagacugcuugaccauug

SEQ ID NO: 1927921 - RNA, 19 nt, Homo sapiens
  misc_RNA (1)...(19): siRNA sense strand
gaaaagaaggagaagguua

SEQ ID NO: 1927922 - RNA, 19 nt, Homo sapiens
  misc_RNA (1)...(19): siRNA sense strand
ucacaagaacuguaugauu

SEQ ID NO: 1927923 - RNA, 19 nt, Homo sapiens
  misc_RNA (1)...(19): siRNA sense strand
gaagagauggagagguuga

SEQ ID NO: 1927924 - RNA, 19 nt, Homo sapiens
  misc_RNA (1)...(19): siRNA sense strand
ggaagaagaggaagaagag

SEQ ID NO: 1927925 - RNA, 19 nt, Homo sapiens
  misc_RNA (1)...(19): siRNA sense strand
gaaauggaaacucaaucuu

SEQ ID NO: 1927926 - RNA, 19 nt, Homo sapiens
  misc_RNA (1)...(19): siRNA sense strand
ggacugaaacccucuccuu

SEQ ID NO: 1927927 - RNA, 19 nt, Homo sapiens
  misc_RNA (1)...(19): siRNA sense strand
ccaaagagaagacauacga

SEQ ID NO: 1927928 - RNA, 19 nt, Homo sapiens
  misc_RNA (1)...(19): siRNA sense strand
gaaacugacuccuuaaaag

SEQ ID NO: 1927929 - RNA, 19 nt, Homo sapiens
  misc_RNA (1)...(19): siRNA sense strand
gaauguuaauggcuuaucu

SEQ ID NO: 1927930 - RNA, 19 nt, Homo sapiens
  misc_RNA (1)...(19): siRNA sense strand
gaaauccaaggcugagaaa

SEQ ID NO: 1927931 - RNA, 19 nt, Homo sapiens
  misc_RNA (1)...(19): siRNA sense strand
agaagaagaugaggcagaa

SEQ ID NO: 1927932 - RNA, 19 nt, Homo sapiens
  misc_RNA (1)...(19): siRNA sense strand
gaaacacugagaaggcuaa

SEQ ID NO: 1927933 - RNA, 19 nt, Homo sapiens
  misc_RNA (1)...(19): siRNA sense strand
gaacagccagaacugaaga

SEQ ID NO: 1927934 - RNA, 19 nt, Homo sapiens
  misc_RNA (1)...(19): siRNA sense strand
gggugacaaugaugaguuu

SEQ ID NO: 1927935 - RNA, 19 nt, Homo sapiens
  misc_RNA (1)...(19): siRNA sense strand
ggaagggugacaaugauga

SEQ ID NO: 1927936 - RNA, 19 nt, Homo sapiens
  misc_RNA (1)...(19): siRNA sense strand
ccacuacagagauaucaua

SEQ ID NO: 1927937 - RNA, 19 nt, Homo sapiens
  misc_RNA (1)...(19): siRNA sense strand
agccauagcucccuguuga

SEQ ID NO: 1927938 - RNA, 19 nt, Homo sapiens
  misc_RNA (1)...(19): siRNA sense strand
uuccagaagugaucaagua

SEQ ID NO: 1927939 - RNA, 19 nt, Homo sapiens
  misc_RNA (1)...(19): siRNA sense strand
ggagaaggacucacugcuu

SEQ ID NO: 1927940 - RNA, 19 nt, Homo sapiens
  misc_RNA (1)...(19): siRNA sense strand
ggagagugucugacuacua

SEQ ID NO: 1927941 - RNA, 19 nt, Homo sapiens
  misc_RNA (1)...(19): siRNA sense strand
gcugaaggcugcacuccau

SEQ ID NO: 1927942 - RNA, 19 nt, Homo sapiens
  misc_RNA (1)...(19): siRNA sense strand
gcacaaggaagcuaagaag

SEQ ID NO: 1927943 - RNA, 19 nt, Homo sapiens
  misc_RNA (1)...(19): siRNA sense strand
agaacuguaugauuccuuu

SEQ ID NO: 1927944 - RNA, 19 nt, Homo sapiens
  misc_RNA (1)...(19): siRNA sense strand
caagcauucugguuuaaca

SEQ ID NO: 1927945 - RNA, 19 nt, Homo sapiens
  misc_RNA (1)...(19): siRNA sense strand
caagggcaggccagaaaua

SEQ ID NO: 1927946 - RNA, 19 nt, Homo sapiens
  misc_RNA (1)...(19): siRNA sense strand
ggaagaagaacagccagaa

SEQ ID NO: 1927947 - RNA, 19 nt, Homo sapiens
  misc_RNA (1)...(19): siRNA sense strand
cuucacaucuuccugauca

SEQ ID NO: 1927948 - RNA, 19 nt, Homo sapiens
  misc_RNA (1)...(19): siRNA sense strand
caacaaagugacaugucua

SEQ ID NO: 1927949 - RNA, 19 nt, Homo sapiens
  misc_RNA (1)...(19): siRNA sense strand
gaagaagaggagucuauag

SEQ ID NO: 1927950 - RNA, 19 nt, Homo sapiens
  misc_RNA (1)...(19): siRNA sense strand
gaagagaucacuggagaag

SEQ ID NO: 1927951 - RNA, 19 nt, Homo sapiens
  misc_RNA (1)...(19): siRNA sense strand
uaacgggucucccaugaac

SEQ ID NO: 1927952 - RNA, 19 nt, Homo sapiens
  misc_RNA (1)...(19): siRNA sense strand
aggaagaaauggaaacuca

SEQ ID NO: 1927953 - RNA, 19 nt, Homo sapiens
  misc_RNA (1)...(19): siRNA sense strand
gggagucuguccugcaaga

SEQ ID NO: 1927954 - RNA, 19 nt, Homo sapiens
  misc_RNA (1)...(19): siRNA sense strand
agagaugacuuccguugug

SEQ ID NO: 1927955 - RNA, 19 nt, Homo sapiens
  misc_RNA (1)...(19): siRNA sense strand
gagauugguucuguacugu

SEQ ID NO: 1927956 - RNA, 19 nt, Homo sapiens
  misc_RNA (1)...(19): siRNA sense strand
aaagugacaugucuagucu

SEQ ID NO: 1927957 - RNA, 19 nt, Homo sapiens
  misc_RNA (1)...(19): siRNA sense strand
ugauaaagaaggaaacuga

SEQ ID NO: 1927958 - RNA, 19 nt, Homo sapiens
  misc_RNA (1)...(19): siRNA sense strand
agacgucgcuacuggguau

SEQ ID NO: 1927959 - RNA, 19 nt, Homo sapiens
  misc_RNA (1)...(19): siRNA sense strand
acaaggaagcuaagaagaa

SEQ ID NO: 1927960 - RNA, 19 nt, Homo sapiens
  misc_RNA (1)...(19): siRNA sense strand
aauggaaacucaaucuuca

SEQ ID NO: 1927961 - RNA, 19 nt, Homo sapiens
  misc_RNA (1)...(19): siRNA sense strand
gagaggugcgcaucaagaa

SEQ ID NO: 1927962 - RNA, 19 nt, Homo sapiens
  misc_RNA (1)...(19): siRNA sense strand
ccaguggcauggaagaaga

SEQ ID NO: 1927963 - RNA, 19 nt, Homo sapiens
  misc_RNA (1)...(19): siRNA sense strand
gcagguggagggagaauuc

SEQ ID NO: 1927964 - RNA, 19 nt, Homo sapiens
  misc_RNA (1)...(19): siRNA sense strand
gaccaaagcuuucaaguuu

SEQ ID NO: 1927965 - RNA, 19 nt, Homo sapiens
  misc_RNA (1)...(19): siRNA sense strand
gcagaucacucauaaagga

SEQ ID NO: 1927966 - RNA, 19 nt, Homo sapiens
  misc_RNA (1)...(19): siRNA sense strand
gaaagcacauagaauagaa

SEQ ID NO: 1927967 - RNA, 19 nt, Homo sapiens
  misc_RNA (1)...(19): siRNA sense strand
ggacaacuaucucuggaaa

SEQ ID NO: 1927968 - RNA, 19 nt, Homo sapiens
  misc_RNA (1)...(19): siRNA sense strand
gccauuagcuuccacauga

SEQ ID NO: 1927969 - RNA, 19 nt, Homo sapiens
  misc_RNA (1)...(19): siRNA sense strand
guaauucucugcuguguau

SEQ ID NO: 1927970 - RNA, 19 nt, Homo sapiens
  misc_RNA (1)...(19): siRNA sense strand
gccacaagcuugcagaaua

SEQ ID NO: 1927971 - RNA, 19 nt, Homo sapiens
  misc_RNA (1)...(19): siRNA sense strand
ccacaagcuugcagaauaa

SEQ ID NO: 1927972 - RNA, 19 nt, Homo sapiens
  misc_RNA (1)...(19): siRNA sense strand
gaugguggcucccaggaua

SEQ ID NO: 1927973 - RNA, 19 nt, Homo sapiens
  misc_RNA (1)...(19): siRNA sense strand
gaaagagacagagaaguua

SEQ ID NO: 1927974 - RNA, 19 nt, Homo sapiens
  misc_RNA (1)...(19): siRNA sense strand
ggaaagagacagagaaguu

SEQ ID NO: 1927975 - RNA, 19 nt, Homo sapiens
  misc_RNA (1)...(19): siRNA sense strand
gcaaagacaucaagaaagc

SEQ ID NO: 1927976 - RNA, 19 nt, Homo sapiens
  misc_RNA (1)...(19): siRNA sense strand
gauagagaauccuacauug

SEQ ID NO: 1927977 - RNA, 19 nt, Homo sapiens
  misc_RNA (1)...(19): siRNA sense strand
gcacauagaauagaacaaa

SEQ ID NO: 1927978 - RNA, 19 nt, Homo sapiens
  misc_RNA (1)...(19): siRNA sense strand
ucggagaacucaagacaua

SEQ ID NO: 1927979 - RNA, 19 nt, Homo sapiens
  misc_RNA (1)...(19): siRNA sense strand
gacuauggauuucacauuu

SEQ ID NO: 1927980 - RNA, 19 nt, Homo sapiens
  misc_RNA (1)...(19): siRNA sense strand
gagagaagcgggauugaaa

SEQ ID NO: 1927981 - RNA, 19 nt, Homo sapiens
  misc_RNA (1)...(19): siRNA sense strand
cgacagaagcaacuuauuu

SEQ ID NO: 1927982 - RNA, 19 nt, Homo sapiens
  misc_RNA (1)...(19): siRNA sense strand
ggaacgagcagucgauauu

SEQ ID NO: 1927983 - RNA, 19 nt, Homo sapiens
  misc_RNA (1)...(19): siRNA sense strand
ggaagagucugagaaagug

SEQ ID NO: 1927984 - RNA, 19 nt, Homo sapiens
  misc_RNA (1)...(19): siRNA sense strand
caagacauaugguggaaga

SEQ ID NO: 1927985 - RNA, 19 nt, Homo sapiens
  misc_RNA (1)...(19): siRNA sense strand
gggaauagagaacuuuaua

SEQ ID NO: 1927986 - RNA, 19 nt, Homo sapiens
  misc_RNA (1)...(19): siRNA sense strand
gaagagagccagacugaag

SEQ ID NO: 1927987 - RNA, 19 nt, Homo sapiens
  misc_RNA (1)...(19): siRNA sense strand
gaaagugagcgucgucaaa

SEQ ID NO: 1927988 - RNA, 19 nt, Homo sapiens
  misc_RNA (1)...(19): siRNA sense strand
gcgcuuugcuguagaaaug

SEQ ID NO: 1927989 - RNA, 19 nt, Homo sapiens
  misc_RNA (1)...(19): siRNA sense strand
gagaagagagccagacuga

SEQ ID NO: 1927990 - RNA, 19 nt, Homo sapiens
  misc_RNA (1)...(19): siRNA sense strand
gagaugagccuagaaguga

SEQ ID NO: 1927991 - RNA, 19 nt, Homo sapiens
  misc_RNA (1)...(19): siRNA sense strand
ggacacagccaggguaauu

SEQ ID NO: 1927992 - RNA, 19 nt, Homo sapiens
  misc_RNA (1)...(19): siRNA sense strand
ggugaugugucaaauaaug

SEQ ID NO: 1927993 - RNA, 19 nt, Homo sapiens
  misc_RNA (1)...(19): siRNA sense strand
ccaacgugcucaagcuaua

SEQ ID NO: 1927994 - RNA, 19 nt, Homo sapiens
  misc_RNA (1)...(19): siRNA sense strand
uaaccucccuuucuuuaga

SEQ ID NO: 1927995 - RNA, 19 nt, Homo sapiens
  misc_RNA (1)...(19): siRNA sense strand
ucacagacucuugauauua

SEQ ID NO: 1927996 - RNA, 19 nt, Homo sapiens
  misc_RNA (1)...(19): siRNA sense strand
gccauucgcuuccggauug

SEQ ID NO: 1927997 - RNA, 19 nt, Homo sapiens
  misc_RNA (1)...(19): siRNA sense strand
gaccuagccugccugauug

SEQ ID NO: 1927998 - RNA, 19 nt, Homo sapiens
  misc_RNA (1)...(19): siRNA sense strand
cgggugaugugucaaauaa

SEQ ID NO: 1927999 - RNA, 19 nt, Homo sapiens
  misc_RNA (1)...(19): siRNA sense strand
ggaagaggaugacuuagac

SEQ ID NO: 1928000 - RNA, 19 nt, Homo sapiens
  misc_RNA (1)...(19): siRNA sense strand
acagagaaguuacaaacaa

SEQ ID NO: 1928001 - RNA, 19 nt, Homo sapiens
  misc_RNA (1)...(19): siRNA sense strand
cagagaaguuacaaacaaa

SEQ ID NO: 1928002 - RNA, 19 nt, Homo sapiens
  misc_RNA (1)...(19): siRNA sense strand
caguaaagauagacaaaga

SEQ ID NO: 1928003 - RNA, 19 nt, Homo sapiens
  misc_RNA (1)...(19): siRNA sense strand
ccagcuacguuuaaauuau

SEQ ID NO: 1928004 - RNA, 19 nt, Homo sapiens
  misc_RNA (1)...(19): siRNA sense strand
ccaaagaaccaaccauaga

SEQ ID NO: 1928005 - RNA, 19 nt, Homo sapiens
  misc_RNA (1)...(19): siRNA sense strand
ucccaaaucuuaccucuau

SEQ ID NO: 1928006 - RNA, 19 nt, Homo sapiens
  misc_RNA (1)...(19): siRNA sense strand
uaaagagaauucugguguu

SEQ ID NO: 1928007 - RNA, 19 nt, Homo sapiens
  misc_RNA (1)...(19): siRNA sense strand
gagcagaucccaccacauc

SEQ ID NO: 1928008 - RNA, 19 nt, Homo sapiens
  misc_RNA (1)...(19): siRNA sense strand
gaagagcaguacagcaucu

SEQ ID NO: 1928009 - RNA, 19 nt, Homo sapiens
  misc_RNA (1)...(19): siRNA sense strand
gagaacagccugccuugug

SEQ ID NO: 1928010 - RNA, 19 nt, Homo sapiens
  misc_RNA (1)...(19): siRNA sense strand
gcaaacaucagccguguag

SEQ ID NO: 1928011 - RNA, 19 nt, Homo sapiens
  misc_RNA (1)...(19): siRNA sense strand
ucucgagugucuucuauuu

SEQ ID NO: 1928012 - RNA, 19 nt, Homo sapiens
  misc_RNA (1)...(19): siRNA sense strand
gaagaaggcuaugaaucca

SEQ ID NO: 1928013 - RNA, 19 nt, Homo sapiens
  misc_RNA (1)...(19): siRNA sense strand
acaaugagccugcugaaga

SEQ ID NO: 1928014 - RNA, 19 nt, Homo sapiens
  misc_RNA (1)...(19): siRNA sense strand
guacaccuaccaucaguuu

SEQ ID NO: 1928015 - RNA, 19 nt, Homo sapiens
  misc_RNA (1)...(19): siRNA sense strand
ggauuuagacccugauuuc

SEQ ID NO: 1928016 - RNA, 19 nt, Homo sapiens
  misc_RNA (1)...(19): siRNA sense strand
ccaaauacacagagccuuu

SEQ ID NO: 1928017 - RNA, 19 nt, Homo sapiens
  misc_RNA (1)...(19): siRNA sense strand
ggcaaggccuucccaaauc

SEQ ID NO: 1928018 - RNA, 19 nt, Homo sapiens
  misc_RNA (1)...(19): siRNA sense strand
ccggguaucugcagaagaa

SEQ ID NO: 1928019 - RNA, 19 nt, Homo sapiens
  misc_RNA (1)...(19): siRNA sense strand
caucagccguguagagcua

SEQ ID NO: 1928020 - RNA, 19 nt, Homo sapiens
  misc_RNA (1)...(19): siRNA sense strand
gaacaaaugguggcaagau

SEQ ID NO: 1928021 - RNA, 19 nt, Homo sapiens
  misc_RNA (1)...(19): siRNA sense strand
gaagaggaaccagaauuug

SEQ ID NO: 1928022 - RNA, 19 nt, Homo sapiens
  misc_RNA (1)...(19): siRNA sense strand
ugaagaggaaccagaauuu

SEQ ID NO: 1928023 - RNA, 19 nt, Homo sapiens
  misc_RNA (1)...(19): siRNA sense strand
gaauaaauccaggagagaa

SEQ ID NO: 1928024 - RNA, 19 nt, Homo sapiens
  misc_RNA (1)...(19): siRNA sense strand
ggaaagcacauagaauaga

SEQ ID NO: 1928025 - RNA, 19 nt, Homo sapiens
  misc_RNA (1)...(19): siRNA sense strand
gagccagacugaagaccaa

SEQ ID NO: 1928026 - RNA, 19 nt, Homo sapiens
  misc_RNA (1)...(19): siRNA sense strand
gauccucacuuagaaacuu

SEQ ID NO: 1928027 - RNA, 19 nt, Homo sapiens
  misc_RNA (1)...(19): siRNA sense strand
uuuagacccugauuucuuu

SEQ ID NO: 1928028 - RNA, 19 nt, Homo sapiens
  misc_RNA (1)...(19): siRNA sense strand
acaacuaucucuggaaaga

SEQ ID NO: 1928029 - RNA, 19 nt, Homo sapiens
  misc_RNA (1)...(19): siRNA sense strand
gcaaggccuucccaaaucu

SEQ ID NO: 1928030 - RNA, 19 nt, Homo sapiens
  misc_RNA (1)...(19): siRNA sense strand
ccucuggccuggaaacaaa

SEQ ID NO: 1928031 - RNA, 19 nt, Homo sapiens
  misc_RNA (1)...(19): siRNA sense strand
guguagagcuaacggaaga

SEQ ID NO: 1928032 - RNA, 19 nt, Homo sapiens
  misc_RNA (1)...(19): siRNA sense strand
ggagccaaguaugggauua

SEQ ID NO: 1928033 - RNA, 19 nt, Homo sapiens
  misc_RNA (1)...(19): siRNA sense strand
gcacgaagaggaacucauc

SEQ ID NO: 1928034 - RNA, 19 nt, Homo sapiens
  misc_RNA (1)...(19): siRNA sense strand
ggggaggggugaagaaaua

SEQ ID NO: 1928035 - RNA, 19 nt, Homo sapiens
  misc_RNA (1)...(19): siRNA sense strand
uagcuucuaucccuacaaa

SEQ ID NO: 1928036 - RNA, 19 nt, Homo sapiens
  misc_RNA (1)...(19): siRNA sense strand
ggacuauggauuucacauu

SEQ ID NO: 1928037 - RNA, 19 nt, Homo sapiens
  misc_RNA (1)...(19): siRNA sense strand
uaaaguugcugcagcugau

SEQ ID NO: 1928038 - RNA, 19 nt, Homo sapiens
  misc_RNA (1)...(19): siRNA sense strand
ggaagaagacagggacuug

SEQ ID NO: 1928039 - RNA, 19 nt, Homo sapiens
  misc_RNA (1)...(19): siRNA sense strand
gaacaaugagccugcugaa

SEQ ID NO: 1928040 - RNA, 19 nt, Homo sapiens
  misc_RNA (1)...(19): siRNA sense strand
aaagagaauucugguguug

SEQ ID NO: 1928041 - RNA, 19 nt, Homo sapiens
  misc_RNA (1)...(19): siRNA sense strand
cuacauugcccuucuaguu

SEQ ID NO: 1928042 - RNA, 19 nt, Homo sapiens
  misc_RNA (1)...(19): siRNA sense strand
ugacuuugcugcuggaauc

SEQ ID NO: 1928043 - RNA, 19 nt, Homo sapiens
  misc_RNA (1)...(19): siRNA sense strand
uauagaggcugcuaaaucg

SEQ ID NO: 1928044 - RNA, 19 nt, Homo sapiens
  misc_RNA (1)...(19): siRNA sense strand
acggaaagcacauagaaua

SEQ ID NO: 1928045 - RNA, 19 nt, Homo sapiens
  misc_RNA (1)...(19): siRNA sense strand
aaucuuaccucuaucucaa

SEQ ID NO: 1928046 - RNA, 19 nt, Homo sapiens
  misc_RNA (1)...(19): siRNA sense strand
gccuagaagugaugaaugu

SEQ ID NO: 1928047 - RNA, 19 nt, Homo sapiens
  misc_RNA (1)...(19): siRNA sense strand
cacagacucuugauauuag

SEQ ID NO: 1928048 - RNA, 19 nt, Homo sapiens
  misc_RNA (1)...(19): siRNA sense strand
ggagcgcuuugcuguagaa

SEQ ID NO: 1928049 - RNA, 19 nt, Homo sapiens
  misc_RNA (1)...(19): siRNA sense strand
gcacugagacagcugaaag

SEQ ID NO: 1928050 - RNA, 19 nt, Homo sapiens
  misc_RNA (1)...(19): siRNA sense strand
acacagagccuuuguuguc

SEQ ID NO: 1928051 - RNA, 19 nt, Homo sapiens
  misc_RNA (1)...(19): siRNA sense strand
gacagaagcaacuuauuuc

SEQ ID NO: 1928052 - RNA, 19 nt, Homo sapiens
  misc_RNA (1)...(19): siRNA sense strand
gcccagcuacguuuaaauu

SEQ ID NO: 1928053 - RNA, 19 nt, Homo sapiens
  misc_RNA (1)...(19): siRNA sense strand
cagaugaggaauacuauga

SEQ ID NO: 1928054 - RNA, 19 nt, Homo sapiens
  misc_RNA (1)...(19): siRNA sense strand
gaggauggcagcucagaug

SEQ ID NO: 1928055 - RNA, 19 nt, Homo sapiens
  misc_RNA (1)...(19): siRNA sense strand
agaccuagccugccugauu

SEQ ID NO: 1928056 - RNA, 19 nt, Homo sapiens
  misc_RNA (1)...(19): siRNA sense strand
cagcuacguuuaaauuauc

SEQ ID NO: 1928057 - RNA, 19 nt, Homo sapiens
  misc_RNA (1)...(19): siRNA sense strand
gaaggugcacuuugcugaa

SEQ ID NO: 1928058 - RNA, 19 nt, Homo sapiens
  misc_RNA (1)...(19): siRNA sense strand
gcgacacacaguaaagaua

SEQ ID NO: 1928059 - RNA, 19 nt, Homo sapiens
  misc_RNA (1)...(19): siRNA sense strand
ggagaacucaagacauaug

SEQ ID NO: 1928060 - RNA, 19 nt, Homo sapiens
  misc_RNA (1)...(19): siRNA sense strand
ggacagaccaaagcuuuca

SEQ ID NO: 1928061 - RNA, 19 nt, Homo sapiens
  misc_RNA (1)...(19): siRNA sense strand
gggauuagccagguuauca

SEQ ID NO: 1928062 - RNA, 19 nt, Homo sapiens
  misc_RNA (1)...(19): siRNA sense strand
ggaagagccacaaggacaa

SEQ ID NO: 1928063 - RNA, 19 nt, Homo sapiens
  misc_RNA (1)...(19): siRNA sense strand
ggagagaagcgggauugaa

SEQ ID NO: 1928064 - RNA, 19 nt, Homo sapiens
  misc_RNA (1)...(19): siRNA sense strand
gcgaggaccugcacgagua

SEQ ID NO: 1928065 - RNA, 19 nt, Homo sapiens
  misc_RNA (1)...(19): siRNA sense strand
gagaagaaccugcacuuug

SEQ ID NO: 1928066 - RNA, 19 nt, Homo sapiens
  misc_RNA (1)...(19): siRNA sense strand
agaagaaccugcacuuugu

SEQ ID NO: 1928067 - RNA, 19 nt, Homo sapiens
  misc_RNA (1)...(19): siRNA sense strand
gcaucaaccucacggagaa

SEQ ID NO: 1928068 - RNA, 19 nt, Homo sapiens
  misc_RNA (1)...(19): siRNA sense strand
ggagaagaaccugcacuuu

SEQ ID NO: 1928069 - RNA, 19 nt, Homo sapiens
  misc_RNA (1)...(19): siRNA sense strand
ucacggagaaccugcagua

SEQ ID NO: 1928070 - RNA, 19 nt, Homo sapiens
  misc_RNA (1)...(19): siRNA sense strand
cguacugccugaacaagaa

SEQ ID NO: 1928071 - RNA, 19 nt, Homo sapiens
  misc_RNA (1)...(19): siRNA sense strand
ucaucgcgcucaaucagaa

SEQ ID NO: 1928072 - RNA, 19 nt, Homo sapiens
  misc_RNA (1)...(19): siRNA sense strand
gaggacacacucacggaaa

SEQ ID NO: 1928073 - RNA, 19 nt, Homo sapiens
  misc_RNA (1)...(19): siRNA sense strand
ccgagucccuggagaagau

SEQ ID NO: 1928074 - RNA, 19 nt, Homo sapiens
  misc_RNA (1)...(19): siRNA sense strand
cggagaaccugcaguacgu

SEQ ID NO: 1928075 - RNA, 19 nt, Homo sapiens
  misc_RNA (1)...(19): siRNA sense strand
aaccugcacuuuguccaua

SEQ ID NO: 1928076 - RNA, 19 nt, Homo sapiens
  misc_RNA (1)...(19): siRNA sense strand
gaaccugcacuuuguccau

SEQ ID NO: 1928077 - RNA, 19 nt, Homo sapiens
  misc_RNA (1)...(19): siRNA sense strand
gcccugucgugcugaaaug

SEQ ID NO: 1928078 - RNA, 19 nt, Homo sapiens
  misc_RNA (1)...(19): siRNA sense strand
guaccuggaccugcggaua

SEQ ID NO: 1928079 - RNA, 19 nt, Homo sapiens
  misc_RNA (1)...(19): siRNA sense strand
gccacgacacgaugacgua

SEQ ID NO: 1928080 - RNA, 19 nt, Homo sapiens
  misc_RNA (1)...(19): siRNA sense strand
gaagaaccugcacuuuguc

SEQ ID NO: 1928081 - RNA, 19 nt, Homo sapiens
  misc_RNA (1)...(19): siRNA sense strand
caggugagcgcuuccaaca

SEQ ID NO: 1928082 - RNA, 19 nt, Homo sapiens
  misc_RNA (1)...(19): siRNA sense strand
cuggagggcucggagaaga

SEQ ID NO: 1928083 - RNA, 19 nt, Homo sapiens
  misc_RNA (1)...(19): siRNA sense strand
ucacggugcaccaacauca

SEQ ID NO: 1928084 - RNA, 19 nt, Homo sapiens
  misc_RNA (1)...(19): siRNA sense strand
ugacguacugccugaacaa

SEQ ID NO: 1928085 - RNA, 19 nt, Homo sapiens
  misc_RNA (1)...(19): siRNA sense strand
ggacacacucacggaaauc

SEQ ID NO: 1928086 - RNA, 19 nt, Homo sapiens
  misc_RNA (1)...(19): siRNA sense strand
aggacacacucacggaaau

SEQ ID NO: 1928087 - RNA, 19 nt, Homo sapiens
  misc_RNA (1)...(19): siRNA sense strand
uccgauaccuggagaccau

SEQ ID NO: 1928088 - RNA, 19 nt, Homo sapiens
  misc_RNA (1)...(19): siRNA sense strand
guccauaugguguacacaa

SEQ ID NO: 1928089 - RNA, 19 nt, Homo sapiens
  misc_RNA (1)...(19): siRNA sense strand
gguucacggugcaccaaca

SEQ ID NO: 1928090 - RNA, 19 nt, Homo sapiens
  misc_RNA (1)...(19): siRNA sense strand
gacuggaugucggcacugu

SEQ ID NO: 1928091 - RNA, 19 nt, Homo sapiens
  misc_RNA (1)...(19): siRNA sense strand
gaaccaaccugacagcauu

SEQ ID NO: 1928092 - RNA, 19 nt, Homo sapiens
  misc_RNA (1)...(19): siRNA sense strand
ccaaagaucugaagccaaa

SEQ ID NO: 1928093 - RNA, 19 nt, Homo sapiens
  misc_RNA (1)...(19): siRNA sense strand
ggagaaaguuagccuguuu

SEQ ID NO: 1928094 - RNA, 19 nt, Homo sapiens
  misc_RNA (1)...(19): siRNA sense strand
caggaaagcuggcaaauuc

SEQ ID NO: 1928095 - RNA, 19 nt, Homo sapiens
  misc_RNA (1)...(19): siRNA sense strand
gaagaaacgcccaguauuc

SEQ ID NO: 1928096 - RNA, 19 nt, Homo sapiens
  misc_RNA (1)...(19): siRNA sense strand
ggaugaaggugaauugugu

SEQ ID NO: 1928097 - RNA, 19 nt, Homo sapiens
  misc_RNA (1)...(19): siRNA sense strand
aaaguuagccuguuugaaa

SEQ ID NO: 1928098 - RNA, 19 nt, Homo sapiens
  misc_RNA (1)...(19): siRNA sense strand
auucagggcuucaaauaua

SEQ ID NO: 1928099 - RNA, 19 nt, Homo sapiens
  misc_RNA (1)...(19): siRNA sense strand
ccaguuagauuccuuugga

SEQ ID NO: 1928100 - RNA, 19 nt, Homo sapiens
  misc_RNA (1)...(19): siRNA sense strand
ggaagaaacgcccaguauu

SEQ ID NO: 1928101 - RNA, 19 nt, Homo sapiens
  misc_RNA (1)...(19): siRNA sense strand
ccacacagaagaacauuaa

SEQ ID NO: 1928102 - RNA, 19 nt, Homo sapiens
  misc_RNA (1)...(19): siRNA sense strand
ucucaaaucuccacacaga

SEQ ID NO: 1928103 - RNA, 19 nt, Homo sapiens
  misc_RNA (1)...(19): siRNA sense strand
cagaagaacauuaagcuuu

SEQ ID NO: 1928104 - RNA, 19 nt, Homo sapiens
  misc_RNA (1)...(19): siRNA sense strand
ggaggccucuuucgagcua

SEQ ID NO: 1928105 - RNA, 19 nt, Homo sapiens
  misc_RNA (1)...(19): siRNA sense strand
ggacagcagcaugaauuua

SEQ ID NO: 1928106 - RNA, 19 nt, Homo sapiens
  misc_RNA (1)...(19): siRNA sense strand
gaagaacauuaagcuuuga

SEQ ID NO: 1928107 - RNA, 19 nt, Homo sapiens
  misc_RNA (1)...(19): siRNA sense strand
agaagaacauuaagcuuug

SEQ ID NO: 1928108 - RNA, 19 nt, Homo sapiens
  misc_RNA (1)...(19): siRNA sense strand
gaaaguggaagucucaaau

SEQ ID NO: 1928109 - RNA, 19 nt, Homo sapiens
  misc_RNA (1)...(19): siRNA sense strand
caaauauaaugccaucuuc

SEQ ID NO: 1928110 - RNA, 19 nt, Homo sapiens
  misc_RNA (1)...(19): siRNA sense strand
cgagcuaccuggauugcua

SEQ ID NO: 1928111 - RNA, 19 nt, Homo sapiens
  misc_RNA (1)...(19): siRNA sense strand
gagauaaaggucaauauuc

SEQ ID NO: 1928112 - RNA, 19 nt, Homo sapiens
  misc_RNA (1)...(19): siRNA sense strand
gaagaaagcagcgaaacau

SEQ ID NO: 1928113 - RNA, 19 nt, Homo sapiens
  misc_RNA (1)...(19): siRNA sense strand
gauggaacauuuucugaua

SEQ ID NO: 1928114 - RNA, 19 nt, Homo sapiens
  misc_RNA (1)...(19): siRNA sense strand
ucagggaaguccagagaaa

SEQ ID NO: 1928115 - RNA, 19 nt, Homo sapiens
  misc_RNA (1)...(19): siRNA sense strand
ugaaaucaccuaaugcauu

SEQ ID NO: 1928116 - RNA, 19 nt, Homo sapiens
  misc_RNA (1)...(19): siRNA sense strand
ggacaaacaaagaaggaaa

SEQ ID NO: 1928117 - RNA, 19 nt, Homo sapiens
  misc_RNA (1)...(19): siRNA sense strand
caaucucaaugacaucuuu

SEQ ID NO: 1928118 - RNA, 19 nt, Homo sapiens
  misc_RNA (1)...(19): siRNA sense strand
ugauagcccuugugacuug

SEQ ID NO: 1928119 - RNA, 19 nt, Homo sapiens
  misc_RNA (1)...(19): siRNA sense strand
uacaggagcuggugaaaca

SEQ ID NO: 1928120 - RNA, 19 nt, Homo sapiens
  misc_RNA (1)...(19): siRNA sense strand
cagaugaaauccaaaccaa

SEQ ID NO: 1928121 - RNA, 19 nt, Homo sapiens
  misc_RNA (1)...(19): siRNA sense strand
ggcaaauucucuaacaguu

SEQ ID NO: 1928122 - RNA, 19 nt, Homo sapiens
  misc_RNA (1)...(19): siRNA sense strand
ugaauuguguuucggaaga

SEQ ID NO: 1928123 - RNA, 19 nt, Homo sapiens
  misc_RNA (1)...(19): siRNA sense strand
gaaggugaauuguguuucg

SEQ ID NO: 1928124 - RNA, 19 nt, Homo sapiens
  misc_RNA (1)...(19): siRNA sense strand
gacuugaaaucaccuaaug

SEQ ID NO: 1928125 - RNA, 19 nt, Homo sapiens
  misc_RNA (1)...(19): siRNA sense strand
cugauaaacuuaacaaugg

SEQ ID NO: 1928126 - RNA, 19 nt, Homo sapiens
  misc_RNA (1)...(19): siRNA sense strand
gcaaugaagaccucaggaa

SEQ ID NO: 1928127 - RNA, 19 nt, Homo sapiens
  misc_RNA (1)...(19): siRNA sense strand
cuaccuggauugcuaauuc

SEQ ID NO: 1928128 - RNA, 19 nt, Homo sapiens
  misc_RNA (1)...(19): siRNA sense strand
acugaaggcuggcaccaua

SEQ ID NO: 1928129 - RNA, 19 nt, Homo sapiens
  misc_RNA (1)...(19): siRNA sense strand
gaucugauagcccuuguga

SEQ ID NO: 1928130 - RNA, 19 nt, Homo sapiens
  misc_RNA (1)...(19): siRNA sense strand
ggucccauaugucuucuga

SEQ ID NO: 1928131 - RNA, 19 nt, Homo sapiens
  misc_RNA (1)...(19): siRNA sense strand
gaaacgcccaguauucuca

SEQ ID NO: 1928132 - RNA, 19 nt, Homo sapiens
  misc_RNA (1)...(19): siRNA sense strand
gagaaaagggagaaaguua

SEQ ID NO: 1928133 - RNA, 19 nt, Homo sapiens
  misc_RNA (1)...(19): siRNA sense strand
gacagcagcaugaauuuau

SEQ ID NO: 1928134 - RNA, 19 nt, Homo sapiens
  misc_RNA (1)...(19): siRNA sense strand
caaugaagaccucaggaaa

SEQ ID NO: 1928135 - RNA, 19 nt, Homo sapiens
  misc_RNA (1)...(19): siRNA sense strand
caaucaaucucaaugacau

SEQ ID NO: 1928136 - RNA, 19 nt, Homo sapiens
  misc_RNA (1)...(19): siRNA sense strand
aaacacaaagaacuccuua

SEQ ID NO: 1928137 - RNA, 19 nt, Homo sapiens
  misc_RNA (1)...(19): siRNA sense strand
caccauaggucaaacacau

SEQ ID NO: 1928138 - RNA, 19 nt, Homo sapiens
  misc_RNA (1)...(19): siRNA sense strand
caaugacacauacacuaua

SEQ ID NO: 1928139 - RNA, 19 nt, Homo sapiens
  misc_RNA (1)...(19): siRNA sense strand
gaacauuaagcuuugauac

SEQ ID NO: 1928140 - RNA, 19 nt, Homo sapiens
  misc_RNA (1)...(19): siRNA sense strand
auaaugccaucuucaaguu

SEQ ID NO: 1928141 - RNA, 19 nt, Homo sapiens
  misc_RNA (1)...(19): siRNA sense strand
aaauucagggcuucaaaua

SEQ ID NO: 1928142 - RNA, 19 nt, Homo sapiens
  misc_RNA (1)...(19): siRNA sense strand
uaauucagcugggcaagga

SEQ ID NO: 1928143 - RNA, 19 nt, Homo sapiens
  misc_RNA (1)...(19): siRNA sense strand
gcuggcaaauucucuaaca

SEQ ID NO: 1928144 - RNA, 19 nt, Homo sapiens
  misc_RNA (1)...(19): siRNA sense strand
ccaaugacacauacacuau

SEQ ID NO: 1928145 - RNA, 19 nt, Homo sapiens
  misc_RNA (1)...(19): siRNA sense strand
gagucaaccaauccauuua

SEQ ID NO: 1928146 - RNA, 19 nt, Homo sapiens
  misc_RNA (1)...(19): siRNA sense strand
ccaauccauuuacagcaaa

SEQ ID NO: 1928147 - RNA, 19 nt, Homo sapiens
  misc_RNA (1)...(19): siRNA sense strand
cgaugccaauagugaauuu

SEQ ID NO: 1928148 - RNA, 19 nt, Homo sapiens
  misc_RNA (1)...(19): siRNA sense strand
ucccauaugucuucugaga

SEQ ID NO: 1928149 - RNA, 19 nt, Homo sapiens
  misc_RNA (1)...(19): siRNA sense strand
acagagugguuuagauuag

SEQ ID NO: 1928150 - RNA, 19 nt, Homo sapiens
  misc_RNA (1)...(19): siRNA sense strand
cauaugaaccauccaggaa

SEQ ID NO: 1928151 - RNA, 19 nt, Homo sapiens
  misc_RNA (1)...(19): siRNA sense strand
ugagucaaccaauccauuu

SEQ ID NO: 1928152 - RNA, 19 nt, Homo sapiens
  misc_RNA (1)...(19): siRNA sense strand
gggagaaaguuagccuguu

SEQ ID NO: 1928153 - RNA, 19 nt, Homo sapiens
  misc_RNA (1)...(19): siRNA sense strand
caauaugaccgcaaguaug

SEQ ID NO: 1928154 - RNA, 19 nt, Homo sapiens
  misc_RNA (1)...(19): siRNA sense strand
gcaaucaaucucaaugaca

SEQ ID NO: 1928155 - RNA, 19 nt, Homo sapiens
  misc_RNA (1)...(19): siRNA sense strand
gaggaaagacacccacauc

SEQ ID NO: 1928156 - RNA, 19 nt, Homo sapiens
  misc_RNA (1)...(19): siRNA sense strand
gauaagaugaaggguagaa

SEQ ID NO: 1928157 - RNA, 19 nt, Homo sapiens
  misc_RNA (1)...(19): siRNA sense strand
gaaacacaaagaacuccuu

SEQ ID NO: 1928158 - RNA, 19 nt, Homo sapiens
  misc_RNA (1)...(19): siRNA sense strand
gaaaguuagccuguuugaa

SEQ ID NO: 1928159 - RNA, 19 nt, Homo sapiens
  misc_RNA (1)...(19): siRNA sense strand
gcaacacugccaaggaaga

SEQ ID NO: 1928160 - RNA, 19 nt, Homo sapiens
  misc_RNA (1)...(19): siRNA sense strand
uugcaacacugccaaggaa

SEQ ID NO: 1928161 - RNA, 19 nt, Homo sapiens
  misc_RNA (1)...(19): siRNA sense strand
guggugaaauacagaugaa

SEQ ID NO: 1928162 - RNA, 19 nt, Homo sapiens
  misc_RNA (1)...(19): siRNA sense strand
uggugggucuggauaaauu

SEQ ID NO: 1928163 - RNA, 19 nt, Homo sapiens
  misc_RNA (1)...(19): siRNA sense strand
gcaaaagugguaccaauga

SEQ ID NO: 1928164 - RNA, 19 nt, Homo sapiens
  misc_RNA (1)...(19): siRNA sense strand
acagcagcaugaauuuauu

SEQ ID NO: 1928165 - RNA, 19 nt, Homo sapiens
  misc_RNA (1)...(19): siRNA sense strand
gaugaaauccaaaccaaaa

SEQ ID NO: 1928166 - RNA, 19 nt, Homo sapiens
  misc_RNA (1)...(19): siRNA sense strand
ggugaaauacagaugaaau

SEQ ID NO: 1928167 - RNA, 19 nt, Homo sapiens
  misc_RNA (1)...(19): siRNA sense strand
cagagugguuuagauuaga

SEQ ID NO: 1928168 - RNA, 19 nt, Homo sapiens
  misc_RNA (1)...(19): siRNA sense strand
ccagaaaguggaagucuca

SEQ ID NO: 1928169 - RNA, 19 nt, Homo sapiens
  misc_RNA (1)...(19): siRNA sense strand
gaaauacagaugaaaucca

SEQ ID NO: 1928170 - RNA, 19 nt, Homo sapiens
  misc_RNA (1)...(19): siRNA sense strand
ucugauacgucuucugcaa

SEQ ID NO: 1928171 - RNA, 19 nt, Homo sapiens
  misc_RNA (1)...(19): siRNA sense strand
ugacagcauuguggaugaa

SEQ ID NO: 1928172 - RNA, 19 nt, Homo sapiens
  misc_RNA (1)...(19): siRNA sense strand
gaggacaaacaaagaagga

SEQ ID NO: 1928173 - RNA, 19 nt, Homo sapiens
  misc_RNA (1)...(19): siRNA sense strand
gaaaaucgccaggacuauu

SEQ ID NO: 1928174 - RNA, 19 nt, Homo sapiens
  misc_RNA (1)...(19): siRNA sense strand
cagcagcaugaauuuauuu

SEQ ID NO: 1928175 - RNA, 19 nt, Homo sapiens
  misc_RNA (1)...(19): siRNA sense strand
cauuaagcuuugauacuuc

SEQ ID NO: 1928176 - RNA, 19 nt, Homo sapiens
  misc_RNA (1)...(19): siRNA sense strand
ucacaugcccgaugccaau

SEQ ID NO: 1928177 - RNA, 19 nt, Homo sapiens
  misc_RNA (1)...(19): siRNA sense strand
ugauacgucuucugcaauc

SEQ ID NO: 1928178 - RNA, 19 nt, Homo sapiens
  misc_RNA (1)...(19): siRNA sense strand
aauaugaccgcaaguaugu

SEQ ID NO: 1928179 - RNA, 19 nt, Homo sapiens
  misc_RNA (1)...(19): siRNA sense strand
caguuuaugaggaacaaua

SEQ ID NO: 1928180 - RNA, 19 nt, Homo sapiens
  misc_RNA (1)...(19): siRNA sense strand
gggacagcagcaugaauuu

SEQ ID NO: 1928181 - RNA, 19 nt, Homo sapiens
  misc_RNA (1)...(19): siRNA sense strand
uugaaagagugacuggaaa

SEQ ID NO: 1928182 - RNA, 19 nt, Homo sapiens
  misc_RNA (1)...(19): siRNA sense strand
gagaaaguuagccuguuug

SEQ ID NO: 1928183 - RNA, 19 nt, Homo sapiens
  misc_RNA (1)...(19): siRNA sense strand
ggugagauaaaggucaaua

SEQ ID NO: 1928184 - RNA, 19 nt, Homo sapiens
  misc_RNA (1)...(19): siRNA sense strand
caacacugccaaggaagaa

SEQ ID NO: 1928185 - RNA, 19 nt, Homo sapiens
  misc_RNA (1)...(19): siRNA sense strand
ccaccucuguagcugagaa

SEQ ID NO: 1928186 - RNA, 19 nt, Homo sapiens
  misc_RNA (1)...(19): siRNA sense strand
cauuguggaugaaggugaa

SEQ ID NO: 1928187 - RNA, 19 nt, Homo sapiens
  misc_RNA (1)...(19): siRNA sense strand
ggucaauauucaguuuaug

SEQ ID NO: 1928188 - RNA, 19 nt, Homo sapiens
  misc_RNA (1)...(19): siRNA sense strand
caaggaaaacgaaucaaaa

SEQ ID NO: 1928189 - RNA, 19 nt, Homo sapiens
  misc_RNA (1)...(19): siRNA sense strand
uggaagaaacgcccaguau

SEQ ID NO: 1928190 - RNA, 19 nt, Homo sapiens
  misc_RNA (1)...(19): siRNA sense strand
ggaacucgaggacuacauc

SEQ ID NO: 1928191 - RNA, 19 nt, Homo sapiens
  misc_RNA (1)...(19): siRNA sense strand
ggagauaauuucugcauuu

SEQ ID NO: 1928192 - RNA, 19 nt, Homo sapiens
  misc_RNA (1)...(19): siRNA sense strand
aaagauggcugaauaggaa

SEQ ID NO: 1928193 - RNA, 19 nt, Homo sapiens
  misc_RNA (1)...(19): siRNA sense strand
guacccagcucaucucauu

SEQ ID NO: 1928194 - RNA, 19 nt, Homo sapiens
  misc_RNA (1)...(19): siRNA sense strand
cagcaaauuucaaacugua

SEQ ID NO: 1928195 - RNA, 19 nt, Homo sapiens
  misc_RNA (1)...(19): siRNA sense strand
cuggaaagauggcugaaua

SEQ ID NO: 1928196 - RNA, 19 nt, Homo sapiens
  misc_RNA (1)...(19): siRNA sense strand
gaaagauggcugaauagga

SEQ ID NO: 1928197 - RNA, 19 nt, Homo sapiens
  misc_RNA (1)...(19): siRNA sense strand
gcagcaaauuucaaacugu

SEQ ID NO: 1928198 - RNA, 19 nt, Homo sapiens
  misc_RNA (1)...(19): siRNA sense strand
gagauaauuucugcauuuc

SEQ ID NO: 1928199 - RNA, 19 nt, Homo sapiens
  misc_RNA (1)...(19): siRNA sense strand
ugaggugucuggaaagaug

SEQ ID NO: 1928200 - RNA, 19 nt, Homo sapiens
  misc_RNA (1)...(19): siRNA sense strand
gaucaacgcagaaggagau

SEQ ID NO: 1928201 - RNA, 19 nt, Homo sapiens
  misc_RNA (1)...(19): siRNA sense strand
ggacucuggcagcaaauuu

SEQ ID NO: 1928202 - RNA, 19 nt, Homo sapiens
  misc_RNA (1)...(19): siRNA sense strand
ccacagaaggcaagcagaa

SEQ ID NO: 1928203 - RNA, 19 nt, Homo sapiens
  misc_RNA (1)...(19): siRNA sense strand
caacgcagaaggagauaau

SEQ ID NO: 1928204 - RNA, 19 nt, Homo sapiens
  misc_RNA (1)...(19): siRNA sense strand
gcaaauuucaaacuguaug

SEQ ID NO: 1928205 - RNA, 19 nt, Homo sapiens
  misc_RNA (1)...(19): siRNA sense strand
uaaaguacccagcucaucu

SEQ ID NO: 1928206 - RNA, 19 nt, Homo sapiens
  misc_RNA (1)...(19): siRNA sense strand
ggcagcaaauuucaaacug

SEQ ID NO: 1928207 - RNA, 19 nt, Homo sapiens
  misc_RNA (1)...(19): siRNA sense strand
cgagaucaacgcagaagga

SEQ ID NO: 1928208 - RNA, 19 nt, Homo sapiens
  misc_RNA (1)...(19): siRNA sense strand
gcccuuugcagugauauaa

SEQ ID NO: 1928209 - RNA, 19 nt, Homo sapiens
  misc_RNA (1)...(19): siRNA sense strand
ggaaagauggcugaauagg

SEQ ID NO: 1928210 - RNA, 19 nt, Homo sapiens
  misc_RNA (1)...(19): siRNA sense strand
cauugggacugguuagaca

SEQ ID NO: 1928211 - RNA, 19 nt, Homo sapiens
  misc_RNA (1)...(19): siRNA sense strand
acgcagaaggagauaauuu

SEQ ID NO: 1928212 - RNA, 19 nt, Homo sapiens
  misc_RNA (1)...(19): siRNA sense strand
aggagauaauuucugcauu

SEQ ID NO: 1928213 - RNA, 19 nt, Homo sapiens
  misc_RNA (1)...(19): siRNA sense strand
cgcagaaggagauaauuuc

SEQ ID NO: 1928214 - RNA, 19 nt, Homo sapiens
  misc_RNA (1)...(19): siRNA sense strand
cuugaggugucuggaaaga

SEQ ID NO: 1928215 - RNA, 19 nt, Homo sapiens
  misc_RNA (1)...(19): siRNA sense strand
ggagauaauuucugcauuu

SEQ ID NO: 1928216 - RNA, 19 nt, Homo sapiens
  misc_RNA (1)...(19): siRNA sense strand
aaagauggcugaauaggaa

SEQ ID NO: 1928217 - RNA, 19 nt, Homo sapiens
  misc_RNA (1)...(19): siRNA sense strand
guacccagcucaucucauu

SEQ ID NO: 1928218 - RNA, 19 nt, Homo sapiens
  misc_RNA (1)...(19): siRNA sense strand
cagcaaauuucaaacugua

SEQ ID NO: 1928219 - RNA, 19 nt, Homo sapiens
  misc_RNA (1)...(19): siRNA sense strand
cuggaaagauggcugaaua

SEQ ID NO: 1928220 - RNA, 19 nt, Homo sapiens
  misc_RNA (1)...(19): siRNA sense strand
gaaagauggcugaauagga

SEQ ID NO: 1928221 - RNA, 19 nt, Homo sapiens
  misc_RNA (1)...(19): siRNA sense strand
gcagcaaauuucaaacugu

SEQ ID NO: 1928222 - RNA, 19 nt, Homo sapiens
  misc_RNA (1)...(19): siRNA sense strand
gagauaauuucugcauuuc

SEQ ID NO: 1928223 - RNA, 19 nt, Homo sapiens
  misc_RNA (1)...(19): siRNA sense strand
ugaggugucuggaaagaug

SEQ ID NO: 1928224 - RNA, 19 nt, Homo sapiens
  misc_RNA (1)...(19): siRNA sense strand
gaucaacgcagaaggagau

SEQ ID NO: 1928225 - RNA, 19 nt, Homo sapiens
  misc_RNA (1)...(19): siRNA sense strand
ggacucuggcagcaaauuu

SEQ ID NO: 1928226 - RNA, 19 nt, Homo sapiens
  misc_RNA (1)...(19): siRNA sense strand
ccacagaaggcaagcagaa

SEQ ID NO: 1928227 - RNA, 19 nt, Homo sapiens
  misc_RNA (1)...(19): siRNA sense strand
caacgcagaaggagauaau

SEQ ID NO: 1928228 - RNA, 19 nt, Homo sapiens
  misc_RNA (1)...(19): siRNA sense strand
gcaaauuucaaacuguaug

SEQ ID NO: 1928229 - RNA, 19 nt, Homo sapiens
  misc_RNA (1)...(19): siRNA sense strand
uaaaguacccagcucaucu

SEQ ID NO: 1928230 - RNA, 19 nt, Homo sapiens
  misc_RNA (1)...(19): siRNA sense strand
ggcagcaaauuucaaacug

SEQ ID NO: 1928231 - RNA, 19 nt, Homo sapiens
  misc_RNA (1)...(19): siRNA sense strand
cgagaucaacgcagaagga

SEQ ID NO: 1928232 - RNA, 19 nt, Homo sapiens
  misc_RNA (1)...(19): siRNA sense strand
gcccuuugcagugauauaa

SEQ ID NO: 1928233 - RNA, 19 nt, Homo sapiens
  misc_RNA (1)...(19): siRNA sense strand
ggaaagauggcugaauagg

SEQ ID NO: 1928234 - RNA, 19 nt, Homo sapiens
  misc_RNA (1)...(19): siRNA sense strand
cauugggacugguuagaca

SEQ ID NO: 1928235 - RNA, 19 nt, Homo sapiens
  misc_RNA (1)...(19): siRNA sense strand
acgcagaaggagauaauuu

SEQ ID NO: 1928236 - RNA, 19 nt, Homo sapiens
  misc_RNA (1)...(19): siRNA sense strand
aggagauaauuucugcauu

SEQ ID NO: 1928237 - RNA, 19 nt, Homo sapiens
  misc_RNA (1)...(19): siRNA sense strand
cgcagaaggagauaauuuc

SEQ ID NO: 1928238 - RNA, 19 nt, Homo sapiens
  misc_RNA (1)...(19): siRNA sense strand
cuugaggugucuggaaaga

SEQ ID NO: 1928239 - RNA, 19 nt, Homo sapiens
  misc_RNA (1)...(19): siRNA sense strand
gaagguaguugacaguaua

SEQ ID NO: 1928240 - RNA, 19 nt, Homo sapiens
  misc_RNA (1)...(19): siRNA sense strand
gaaagaaacugccauccaa

SEQ ID NO: 1928241 - RNA, 19 nt, Homo sapiens
  misc_RNA (1)...(19): siRNA sense strand
gaacagaaccacauuaaau

SEQ ID NO: 1928242 - RNA, 19 nt, Homo sapiens
  misc_RNA (1)...(19): siRNA sense strand
gaacagaauucccaaauac

SEQ ID NO: 1928243 - RNA, 19 nt, Homo sapiens
  misc_RNA (1)...(19): siRNA sense strand
gaaaauaacucugcacaua

SEQ ID NO: 1928244 - RNA, 19 nt, Homo sapiens
  misc_RNA (1)...(19): siRNA sense strand
guaaauaccucaagggaau

SEQ ID NO: 1928245 - RNA, 19 nt, Homo sapiens
  misc_RNA (1)...(19): siRNA sense strand
gaacagaugcgacagaguu

SEQ ID NO: 1928246 - RNA, 19 nt, Homo sapiens
  misc_RNA (1)...(19): siRNA sense strand
gcaggagccucuugacuug

SEQ ID NO: 1928247 - RNA, 19 nt, Homo sapiens
  misc_RNA (1)...(19): siRNA sense strand
gaaauuacacgagaguaua

SEQ ID NO: 1928248 - RNA, 19 nt, Homo sapiens
  misc_RNA (1)...(19): siRNA sense strand
gcagggaauucaucuuuga

SEQ ID NO: 1928249 - RNA, 19 nt, Homo sapiens
  misc_RNA (1)...(19): siRNA sense strand
gaacacagaagacaauaug

SEQ ID NO: 1928250 - RNA, 19 nt, Homo sapiens
  misc_RNA (1)...(19): siRNA sense strand
cagaaaccauagaguauaa

SEQ ID NO: 1928251 - RNA, 19 nt, Homo sapiens
  misc_RNA (1)...(19): siRNA sense strand
ggaaacaccaagaucauaa

SEQ ID NO: 1928252 - RNA, 19 nt, Homo sapiens
  misc_RNA (1)...(19): siRNA sense strand
ugaacagaauucccaaaua

SEQ ID NO: 1928253 - RNA, 19 nt, Homo sapiens
  misc_RNA (1)...(19): siRNA sense strand
gaagacucauucuguaaau

SEQ ID NO: 1928254 - RNA, 19 nt, Homo sapiens
  misc_RNA (1)...(19): siRNA sense strand
ggagaggccugcuucuugu

SEQ ID NO: 1928255 - RNA, 19 nt, Homo sapiens
  misc_RNA (1)...(19): siRNA sense strand
aaauuggcaugacuacuua

SEQ ID NO: 1928256 - RNA, 19 nt, Homo sapiens
  misc_RNA (1)...(19): siRNA sense strand
ucuagcagcuucaucagua

SEQ ID NO: 1928257 - RNA, 19 nt, Homo sapiens
  misc_RNA (1)...(19): siRNA sense strand
gggagaggcugcugccaaa

SEQ ID NO: 1928258 - RNA, 19 nt, Homo sapiens
  misc_RNA (1)...(19): siRNA sense strand
caugauagauaaagacguu

SEQ ID NO: 1928259 - RNA, 19 nt, Homo sapiens
  misc_RNA (1)...(19): siRNA sense strand
ggaaaccucugucuuugag

SEQ ID NO: 1928260 - RNA, 19 nt, Homo sapiens
  misc_RNA (1)...(19): siRNA sense strand
ucaaggcacccuaauuaua

SEQ ID NO: 1928261 - RNA, 19 nt, Homo sapiens
  misc_RNA (1)...(19): siRNA sense strand
gcuauaaguuacaaggaaa

SEQ ID NO: 1928262 - RNA, 19 nt, Homo sapiens
  misc_RNA (1)...(19): siRNA sense strand
uaaagacguugaacucuca

SEQ ID NO: 1928263 - RNA, 19 nt, Homo sapiens
  misc_RNA (1)...(19): siRNA sense strand
caacacucaugcuuaaguu

SEQ ID NO: 1928264 - RNA, 19 nt, Homo sapiens
  misc_RNA (1)...(19): siRNA sense strand
cauaucaacucaacacuca

SEQ ID NO: 1928265 - RNA, 19 nt, Homo sapiens
  misc_RNA (1)...(19): siRNA sense strand
gcaguaaaccuaugaugga

SEQ ID NO: 1928266 - RNA, 19 nt, Homo sapiens
  misc_RNA (1)...(19): siRNA sense strand
ggacuaagagaauuauaug

SEQ ID NO: 1928267 - RNA, 19 nt, Homo sapiens
  misc_RNA (1)...(19): siRNA sense strand
cagagaguccugccaaaua

SEQ ID NO: 1928268 - RNA, 19 nt, Homo sapiens
  misc_RNA (1)...(19): siRNA sense strand
aagcacagauggacaagaa

SEQ ID NO: 1928269 - RNA, 19 nt, Homo sapiens
  misc_RNA (1)...(19): siRNA sense strand
ggaagacucauucuguaaa

SEQ ID NO: 1928270 - RNA, 19 nt, Homo sapiens
  misc_RNA (1)...(19): siRNA sense strand
caaauauacugaugucucu

SEQ ID NO: 1928271 - RNA, 19 nt, Homo sapiens
  misc_RNA (1)...(19): siRNA sense strand
gacaaaagaugcagcaauu

SEQ ID NO: 1928272 - RNA, 19 nt, Homo sapiens
  misc_RNA (1)...(19): siRNA sense strand
caacauugauauggaaguu

SEQ ID NO: 1928273 - RNA, 19 nt, Homo sapiens
  misc_RNA (1)...(19): siRNA sense strand
ggucacagucuuucaguaa

SEQ ID NO: 1928274 - RNA, 19 nt, Homo sapiens
  misc_RNA (1)...(19): siRNA sense strand
gugcaaacuucaaauaaca

SEQ ID NO: 1928275 - RNA, 19 nt, Homo sapiens
  misc_RNA (1)...(19): siRNA sense strand
gcacauaaugaacagaauu

SEQ ID NO: 1928276 - RNA, 19 nt, Homo sapiens
  misc_RNA (1)...(19): siRNA sense strand
gcagacucuuucucccuua

SEQ ID NO: 1928277 - RNA, 19 nt, Homo sapiens
  misc_RNA (1)...(19): siRNA sense strand
gagaguaucgggucacuau

SEQ ID NO: 1928278 - RNA, 19 nt, Homo sapiens
  misc_RNA (1)...(19): siRNA sense strand
agucaaggcacccuaauua

SEQ ID NO: 1928279 - RNA, 19 nt, Homo sapiens
  misc_RNA (1)...(19): siRNA sense strand
guaaaccuaugauggacuu

SEQ ID NO: 1928280 - RNA, 19 nt, Homo sapiens
  misc_RNA (1)...(19): siRNA sense strand
cacaaaaucugaagacuuu

SEQ ID NO: 1928281 - RNA, 19 nt, Homo sapiens
  misc_RNA (1)...(19): siRNA sense strand
acucaacacucaugcuuaa

SEQ ID NO: 1928282 - RNA, 19 nt, Homo sapiens
  misc_RNA (1)...(19): siRNA sense strand
gggaauucaucuuugagaa

SEQ ID NO: 1928283 - RNA, 19 nt, Homo sapiens
  misc_RNA (1)...(19): siRNA sense strand
gaaagacuggcaaucagaa

SEQ ID NO: 1928284 - RNA, 19 nt, Homo sapiens
  misc_RNA (1)...(19): siRNA sense strand
ugaagugccuaaaguugaa

SEQ ID NO: 1928285 - RNA, 19 nt, Homo sapiens
  misc_RNA (1)...(19): siRNA sense strand
ucauugacaucuggaauaa

SEQ ID NO: 1928286 - RNA, 19 nt, Homo sapiens
  misc_RNA (1)...(19): siRNA sense strand
gauuauagccuugaagaga

SEQ ID NO: 1928287 - RNA, 19 nt, Homo sapiens
  misc_RNA (1)...(19): siRNA sense strand
ggucaagacucagccauuc

SEQ ID NO: 1928288 - RNA, 19 nt, Homo sapiens
  misc_RNA (1)...(19): siRNA sense strand
aaacugccauccaaacaga

SEQ ID NO: 1928289 - RNA, 19 nt, Homo sapiens
  misc_RNA (1)...(19): siRNA sense strand
uggcaugacuacuuauaaa

SEQ ID NO: 1928290 - RNA, 19 nt, Homo sapiens
  misc_RNA (1)...(19): siRNA sense strand
agagaguccugccaaauau

SEQ ID NO: 1928291 - RNA, 19 nt, Homo sapiens
  misc_RNA (1)...(19): siRNA sense strand
uguagaagguguugccaaa

SEQ ID NO: 1928292 - RNA, 19 nt, Homo sapiens
  misc_RNA (1)...(19): siRNA sense strand
ugaaacugauacugcuaua

SEQ ID NO: 1928293 - RNA, 19 nt, Homo sapiens
  misc_RNA (1)...(19): siRNA sense strand
ucugaaaccugcucccaaa

SEQ ID NO: 1928294 - RNA, 19 nt, Homo sapiens
  misc_RNA (1)...(19): siRNA sense strand
cagaagagccacugccaaa

SEQ ID NO: 1928295 - RNA, 19 nt, Homo sapiens
  misc_RNA (1)...(19): siRNA sense strand
gaauuacccacuuuauaga

SEQ ID NO: 1928296 - RNA, 19 nt, Homo sapiens
  misc_RNA (1)...(19): siRNA sense strand
cagcaugucugcagggaau

SEQ ID NO: 1928297 - RNA, 19 nt, Homo sapiens
  misc_RNA (1)...(19): siRNA sense strand
ccacgaccauacucaaguu

SEQ ID NO: 1928298 - RNA, 19 nt, Homo sapiens
  misc_RNA (1)...(19): siRNA sense strand
aaucagaaaccauagagua

SEQ ID NO: 1928299 - RNA, 19 nt, Homo sapiens
  misc_RNA (1)...(19): siRNA sense strand
ccacaugcaucgcuucaag

SEQ ID NO: 1928300 - RNA, 19 nt, Homo sapiens
  misc_RNA (1)...(19): siRNA sense strand
gagaggcugcugccaaauu

SEQ ID NO: 1928301 - RNA, 19 nt, Homo sapiens
  misc_RNA (1)...(19): siRNA sense strand
gagaacagagcaucaagug

SEQ ID NO: 1928302 - RNA, 19 nt, Homo sapiens
  misc_RNA (1)...(19): siRNA sense strand
guaguugacaguauaagaa

SEQ ID NO: 1928303 - RNA, 19 nt, Homo sapiens
  misc_RNA (1)...(19): siRNA sense strand
ucuccgaagucacaagaua

SEQ ID NO: 1928304 - RNA, 19 nt, Homo sapiens
  misc_RNA (1)...(19): siRNA sense strand
gaggccugcuucuuguaua

SEQ ID NO: 1928305 - RNA, 19 nt, Homo sapiens
  misc_RNA (1)...(19): siRNA sense strand
gaccaaauauacugauguc

SEQ ID NO: 1928306 - RNA, 19 nt, Homo sapiens
  misc_RNA (1)...(19): siRNA sense strand
gauaagagucccugugaag

SEQ ID NO: 1928307 - RNA, 19 nt, Homo sapiens
  misc_RNA (1)...(19): siRNA sense strand
gggaagacucauucuguaa

SEQ ID NO: 1928308 - RNA, 19 nt, Homo sapiens
  misc_RNA (1)...(19): siRNA sense strand
agaaaucaauguagaaggu

SEQ ID NO: 1928309 - RNA, 19 nt, Homo sapiens
  misc_RNA (1)...(19): siRNA sense strand
ugagugaagugccuaaagu

SEQ ID NO: 1928310 - RNA, 19 nt, Homo sapiens
  misc_RNA (1)...(19): siRNA sense strand
guucauggcaguaaaccua

SEQ ID NO: 1928311 - RNA, 19 nt, Homo sapiens
  misc_RNA (1)...(19): siRNA sense strand
gggaaacaccaagaucaua

SEQ ID NO: 1928312 - RNA, 19 nt, Homo sapiens
  misc_RNA (1)...(19): siRNA sense strand
gcacugcgcccaaacugau

SEQ ID NO: 1928313 - RNA, 19 nt, Homo sapiens
  misc_RNA (1)...(19): siRNA sense strand
cgauggaugucaacagaga

SEQ ID NO: 1928314 - RNA, 19 nt, Homo sapiens
  misc_RNA (1)...(19): siRNA sense strand
ccaaacacaccaauaggaa

SEQ ID NO: 1928315 - RNA, 19 nt, Homo sapiens
  misc_RNA (1)...(19): siRNA sense strand
gaaacugauacugcuauaa

SEQ ID NO: 1928316 - RNA, 19 nt, Homo sapiens
  misc_RNA (1)...(19): siRNA sense strand
uacaauaucugugaaugga

SEQ ID NO: 1928317 - RNA, 19 nt, Homo sapiens
  misc_RNA (1)...(19): siRNA sense strand
ccaaaagaacugacaaaua

SEQ ID NO: 1928318 - RNA, 19 nt, Homo sapiens
  misc_RNA (1)...(19): siRNA sense strand
gaacagaaagaaaacauga

SEQ ID NO: 1928319 - RNA, 19 nt, Homo sapiens
  misc_RNA (1)...(19): siRNA sense strand
gagccacugccaaaccuua

SEQ ID NO: 1928320 - RNA, 19 nt, Homo sapiens
  misc_RNA (1)...(19): siRNA sense strand
ucagaaaccauagaguaua

SEQ ID NO: 1928321 - RNA, 19 nt, Homo sapiens
  misc_RNA (1)...(19): siRNA sense strand
agaauuacccacuuuauag

SEQ ID NO: 1928322 - RNA, 19 nt, Homo sapiens
  misc_RNA (1)...(19): siRNA sense strand
caaggcacccuaauuauac

SEQ ID NO: 1928323 - RNA, 19 nt, Homo sapiens
  misc_RNA (1)...(19): siRNA sense strand
aagaaugugugcaaacuuc

SEQ ID NO: 1928324 - RNA, 19 nt, Homo sapiens
  misc_RNA (1)...(19): siRNA sense strand
gagaccaaauauacugaug

SEQ ID NO: 1928325 - RNA, 19 nt, Homo sapiens
  misc_RNA (1)...(19): siRNA sense strand
ugauggacuuguugauauu

SEQ ID NO: 1928326 - RNA, 19 nt, Homo sapiens
  misc_RNA (1)...(19): siRNA sense strand
aauggaaggucaagacuca

SEQ ID NO: 1928327 - RNA, 19 nt, Homo sapiens
  misc_RNA (1)...(19): siRNA sense strand
aaagcacacucaugagaau

SEQ ID NO: 1928328 - RNA, 19 nt, Homo sapiens
  misc_RNA (1)...(19): siRNA sense strand
uaaagaugaucaggacaug

SEQ ID NO: 1928329 - RNA, 19 nt, Homo sapiens
  misc_RNA (1)...(19): siRNA sense strand
cagauaagagucccuguga

SEQ ID NO: 1928330 - RNA, 19 nt, Homo sapiens
  misc_RNA (1)...(19): siRNA sense strand
ggagguagagaagguaauu

SEQ ID NO: 1928331 - RNA, 19 nt, Homo sapiens
  misc_RNA (1)...(19): siRNA sense strand
cagcugagaccaaauauac

SEQ ID NO: 1928332 - RNA, 19 nt, Homo sapiens
  misc_RNA (1)...(19): siRNA sense strand
ggguuaccauuccaucaaa

SEQ ID NO: 1928333 - RNA, 19 nt, Homo sapiens
  misc_RNA (1)...(19): siRNA sense strand
ggcccaucauucacuguua

SEQ ID NO: 1928334 - RNA, 19 nt, Homo sapiens
  misc_RNA (1)...(19): siRNA sense strand
uaaaaugccucacucuguu

SEQ ID NO: 1928335 - RNA, 19 nt, Homo sapiens
  misc_RNA (1)...(19): siRNA sense strand
gaucaggacaugcaugcuu

SEQ ID NO: 1928336 - RNA, 19 nt, Homo sapiens
  misc_RNA (1)...(19): siRNA sense strand
ccauagaguauaaagauga

SEQ ID NO: 1928337 - RNA, 19 nt, Homo sapiens
  misc_RNA (1)...(19): siRNA sense strand
ccuaaagaauuacccacuu

SEQ ID NO: 1928338 - RNA, 19 nt, Homo sapiens
  misc_RNA (1)...(19): siRNA sense strand
gcacccuaauuauacauuc

SEQ ID NO: 1928339 - RNA, 19 nt, Homo sapiens
  misc_RNA (1)...(19): siRNA sense strand
gaagguauccuccaagaag

SEQ ID NO: 1928340 - RNA, 19 nt, Homo sapiens
  misc_RNA (1)...(19): siRNA sense strand
gaaguuucaugggaaggua

SEQ ID NO: 1928341 - RNA, 19 nt, Homo sapiens
  misc_RNA (1)...(19): siRNA sense strand
gggaagguauccuccaaga

SEQ ID NO: 1928342 - RNA, 19 nt, Homo sapiens
  misc_RNA (1)...(19): siRNA sense strand
aaagauggccaagaacuaa

SEQ ID NO: 1928343 - RNA, 19 nt, Homo sapiens
  misc_RNA (1)...(19): siRNA sense strand
gaagccaaccuacgcaugu

SEQ ID NO: 1928344 - RNA, 19 nt, Homo sapiens
  misc_RNA (1)...(19): siRNA sense strand
gccaagaacuaaguaacga

SEQ ID NO: 1928345 - RNA, 19 nt, Homo sapiens
  misc_RNA (1)...(19): siRNA sense strand
cccagcaacccucacauua

SEQ ID NO: 1928346 - RNA, 19 nt, Homo sapiens
  misc_RNA (1)...(19): siRNA sense strand
ggaagguauccuccaagaa

SEQ ID NO: 1928347 - RNA, 19 nt, Homo sapiens
  misc_RNA (1)...(19): siRNA sense strand
cagcaacccucacauuagc

SEQ ID NO: 1928348 - RNA, 19 nt, Homo sapiens
  misc_RNA (1)...(19): siRNA sense strand
guguggagcuggagaagag

SEQ ID NO: 1928349 - RNA, 19 nt, Homo sapiens
  misc_RNA (1)...(19): siRNA sense strand
gggcucugaugaggaaauu

SEQ ID NO: 1928350 - RNA, 19 nt, Homo sapiens
  misc_RNA (1)...(19): siRNA sense strand
gaagcaggaccgggacauu

SEQ ID NO: 1928351 - RNA, 19 nt, Homo sapiens
  misc_RNA (1)...(19): siRNA sense strand
agaaccaccugcccaaagu

SEQ ID NO: 1928352 - RNA, 19 nt, Homo sapiens
  misc_RNA (1)...(19): siRNA sense strand
gcucagcugccgacugcua

SEQ ID NO: 1928353 - RNA, 19 nt, Homo sapiens
  misc_RNA (1)...(19): siRNA sense strand
ccaagagccggaagcagaa

SEQ ID NO: 1928354 - RNA, 19 nt, Homo sapiens
  misc_RNA (1)...(19): siRNA sense strand
gaaggaggaggaggaggaa

SEQ ID NO: 1928355 - RNA, 19 nt, Homo sapiens
  misc_RNA (1)...(19): siRNA sense strand
ccagcaacccucacauuag

SEQ ID NO: 1928356 - RNA, 19 nt, Homo sapiens
  misc_RNA (1)...(19): siRNA sense strand
uggaagaccuggacaaccu

SEQ ID NO: 1928357 - RNA, 19 nt, Homo sapiens
  misc_RNA (1)...(19): siRNA sense strand
caggauccaccagaagaua

SEQ ID NO: 1928358 - RNA, 19 nt, Homo sapiens
  misc_RNA (1)...(19): siRNA sense strand
gcuguggaccggcaguuug

SEQ ID NO: 1928359 - RNA, 19 nt, Homo sapiens
  misc_RNA (1)...(19): siRNA sense strand
gaguuccacugcccgaagu

SEQ ID NO: 1928360 - RNA, 19 nt, Homo sapiens
  misc_RNA (1)...(19): siRNA sense strand
gaaccaccugcccaaagug

SEQ ID NO: 1928361 - RNA, 19 nt, Homo sapiens
  misc_RNA (1)...(19): siRNA sense strand
gauggccaagaacuaagua

SEQ ID NO: 1928362 - RNA, 19 nt, Homo sapiens
  misc_RNA (1)...(19): siRNA sense strand
agaacuaaguaacgaucug

SEQ ID NO: 1928363 - RNA, 19 nt, Homo sapiens
  misc_RNA (1)...(19): siRNA sense strand
ggauccaccagaagauaug

SEQ ID NO: 1928364 - RNA, 19 nt, Homo sapiens
  misc_RNA (1)...(19): siRNA sense strand
agugccagcugacaagaug

SEQ ID NO: 1928365 - RNA, 19 nt, Homo sapiens
  misc_RNA (1)...(19): siRNA sense strand
caccagaagauaugaagca

SEQ ID NO: 1928366 - RNA, 19 nt, Homo sapiens
  misc_RNA (1)...(19): siRNA sense strand
cagaaccaccugcccaaag

SEQ ID NO: 1928367 - RNA, 19 nt, Homo sapiens
  misc_RNA (1)...(19): siRNA sense strand
aggguggccuccuggaaga

SEQ ID NO: 1928368 - RNA, 19 nt, Homo sapiens
  misc_RNA (1)...(19): siRNA sense strand
acaaggagauccaccauuu

SEQ ID NO: 1928369 - RNA, 19 nt, Homo sapiens
  misc_RNA (1)...(19): siRNA sense strand
guggugaccucggccauuu

SEQ ID NO: 1928370 - RNA, 19 nt, Homo sapiens
  misc_RNA (1)...(19): siRNA sense strand
aguaaacucuacccagaaa

SEQ ID NO: 1928371 - RNA, 19 nt, Homo sapiens
  misc_RNA (1)...(19): siRNA sense strand
cagauguucuucuccuuca

SEQ ID NO: 1928372 - RNA, 19 nt, Homo sapiens
  misc_RNA (1)...(19): siRNA sense strand
ggaacaaggagcugaaggu

SEQ ID NO: 1928373 - RNA, 19 nt, Homo sapiens
  misc_RNA (1)...(19): siRNA sense strand
ggucgugcacuauggcuuu

SEQ ID NO: 1928374 - RNA, 19 nt, Homo sapiens
  misc_RNA (1)...(19): siRNA sense strand
ccagucagauguucuucuc

SEQ ID NO: 1928375 - RNA, 19 nt, Homo sapiens
  misc_RNA (1)...(19): siRNA sense strand
ggcgugggcuuggugugua

SEQ ID NO: 1928376 - RNA, 19 nt, Homo sapiens
  misc_RNA (1)...(19): siRNA sense strand
ugccaccucuguugaaguu

SEQ ID NO: 1928377 - RNA, 19 nt, Homo sapiens
  misc_RNA (1)...(19): siRNA sense strand
gaaggucgccaugaagaag

SEQ ID NO: 1928378 - RNA, 19 nt, Homo sapiens
  misc_RNA (1)...(19): siRNA sense strand
gcuacaacgugcucaugag

SEQ ID NO: 1928379 - RNA, 19 nt, Homo sapiens
  misc_RNA (1)...(19): siRNA sense strand
ggcuuugccuccgucauuu

SEQ ID NO: 1928380 - RNA, 19 nt, Homo sapiens
  misc_RNA (1)...(19): siRNA sense strand
gagcugaaggucgccauga

SEQ ID NO: 1928381 - RNA, 19 nt, Homo sapiens
  misc_RNA (1)...(19): siRNA sense strand
gagccaaucacuccacagu

SEQ ID NO: 1928382 - RNA, 19 nt, Homo sapiens
  misc_RNA (1)...(19): siRNA sense strand
gcuuugccuccgucauuua

SEQ ID NO: 1928383 - RNA, 19 nt, Homo sapiens
  misc_RNA (1)...(19): siRNA sense strand
ugaaggucgccaugaagaa

SEQ ID NO: 1928384 - RNA, 19 nt, Homo sapiens
  misc_RNA (1)...(19): siRNA sense strand
ccacagugacccaauucau

SEQ ID NO: 1928385 - RNA, 19 nt, Homo sapiens
  misc_RNA (1)...(19): siRNA sense strand
gcgugggcuugguguguau

SEQ ID NO: 1928386 - RNA, 19 nt, Homo sapiens
  misc_RNA (1)...(19): siRNA sense strand
uggcuuugccuccgucauu

SEQ ID NO: 1928387 - RNA, 19 nt, Homo sapiens
  misc_RNA (1)...(19): siRNA sense strand
ccaugugccaccucuguug

SEQ ID NO: 1928388 - RNA, 19 nt, Homo sapiens
  misc_RNA (1)...(19): siRNA sense strand
caguaaacucuacccagaa

SEQ ID NO: 1928389 - RNA, 19 nt, Homo sapiens
  misc_RNA (1)...(19): siRNA sense strand
acuccacagugacccaauu

SEQ ID NO: 1928390 - RNA, 19 nt, Homo sapiens
  misc_RNA (1)...(19): siRNA sense strand
cacagugacccaauucauc

SEQ ID NO: 1928391 - RNA, 19 nt, Homo sapiens
  misc_RNA (1)...(19): siRNA sense strand
aaacagagauacugcauuu

SEQ ID NO: 1928392 - RNA, 19 nt, Homo sapiens
  misc_RNA (1)...(19): siRNA sense strand
gaaaugucguugcuuagua

SEQ ID NO: 1928393 - RNA, 19 nt, Homo sapiens
  misc_RNA (1)...(19): siRNA sense strand
ggaagaaguugaaagauuc

SEQ ID NO: 1928394 - RNA, 19 nt, Homo sapiens
  misc_RNA (1)...(19): siRNA sense strand
guaauuacauggaagcaaa

SEQ ID NO: 1928395 - RNA, 19 nt, Homo sapiens
  misc_RNA (1)...(19): siRNA sense strand
caaccuggcuacuucauuu

SEQ ID NO: 1928396 - RNA, 19 nt, Homo sapiens
  misc_RNA (1)...(19): siRNA sense strand
caacguuaaugacaaguuu

SEQ ID NO: 1928397 - RNA, 19 nt, Homo sapiens
  misc_RNA (1)...(19): siRNA sense strand
gcugaagcgucacauuaua

SEQ ID NO: 1928398 - RNA, 19 nt, Homo sapiens
  misc_RNA (1)...(19): siRNA sense strand
gaggaguguuggaguauuu

SEQ ID NO: 1928399 - RNA, 19 nt, Homo sapiens
  misc_RNA (1)...(19): siRNA sense strand
ggacauauuugacagugau

SEQ ID NO: 1928400 - RNA, 19 nt, Homo sapiens
  misc_RNA (1)...(19): siRNA sense strand
agagggagcuguguuagua

SEQ ID NO: 1928401 - RNA, 19 nt, Homo sapiens
  misc_RNA (1)...(19): siRNA sense strand
gaagauaucaggaagaagu

SEQ ID NO: 1928402 - RNA, 19 nt, Homo sapiens
  misc_RNA (1)...(19): siRNA sense strand
guacacuucucgaaaucua

SEQ ID NO: 1928403 - RNA, 19 nt, Homo sapiens
  misc_RNA (1)...(19): siRNA sense strand
ccggaaaugucguugcuua

SEQ ID NO: 1928404 - RNA, 19 nt, Homo sapiens
  misc_RNA (1)...(19): siRNA sense strand
gggaagaauuggaagaaga

SEQ ID NO: 1928405 - RNA, 19 nt, Homo sapiens
  misc_RNA (1)...(19): siRNA sense strand
cgagaaaguuaaaugcauu

SEQ ID NO: 1928406 - RNA, 19 nt, Homo sapiens
  misc_RNA (1)...(19): siRNA sense strand
gauguugucuucgaaauuc

SEQ ID NO: 1928407 - RNA, 19 nt, Homo sapiens
  misc_RNA (1)...(19): siRNA sense strand
gcaaagaguguccugauuc

SEQ ID NO: 1928408 - RNA, 19 nt, Homo sapiens
  misc_RNA (1)...(19): siRNA sense strand
ccucuucuguucuuguuua

SEQ ID NO: 1928409 - RNA, 19 nt, Homo sapiens
  misc_RNA (1)...(19): siRNA sense strand
gcagggaacuggcauccau

SEQ ID NO: 1928410 - RNA, 19 nt, Homo sapiens
  misc_RNA (1)...(19): siRNA sense strand
ugugagcuguucaucauua

SEQ ID NO: 1928411 - RNA, 19 nt, Homo sapiens
  misc_RNA (1)...(19): siRNA sense strand
gugaucaaauacaacguua

SEQ ID NO: 1928412 - RNA, 19 nt, Homo sapiens
  misc_RNA (1)...(19): siRNA sense strand
ggaaagauuaauugccuaa

SEQ ID NO: 1928413 - RNA, 19 nt, Homo sapiens
  misc_RNA (1)...(19): siRNA sense strand
aggaagaaguugaaagauu

SEQ ID NO: 1928414 - RNA, 19 nt, Homo sapiens
  misc_RNA (1)...(19): siRNA sense strand
gaagggauccaacuugcaa

SEQ ID NO: 1928415 - RNA, 19 nt, Homo sapiens
  misc_RNA (1)...(19): siRNA sense strand
caaauguaaucgagaaagu

SEQ ID NO: 1928416 - RNA, 19 nt, Homo sapiens
  misc_RNA (1)...(19): siRNA sense strand
caacuccuuucauggaauu

SEQ ID NO: 1928417 - RNA, 19 nt, Homo sapiens
  misc_RNA (1)...(19): siRNA sense strand
aaaugucguugcuuaguaa

SEQ ID NO: 1928418 - RNA, 19 nt, Homo sapiens
  misc_RNA (1)...(19): siRNA sense strand
uaaaucagaagacaaguga

SEQ ID NO: 1928419 - RNA, 19 nt, Homo sapiens
  misc_RNA (1)...(19): siRNA sense strand
gaagagucccacugacauu

SEQ ID NO: 1928420 - RNA, 19 nt, Homo sapiens
  misc_RNA (1)...(19): siRNA sense strand
gagcaacuccuuucaugga

SEQ ID NO: 1928421 - RNA, 19 nt, Homo sapiens
  misc_RNA (1)...(19): siRNA sense strand
ggaauuagaccaccucaac

SEQ ID NO: 1928422 - RNA, 19 nt, Homo sapiens
  misc_RNA (1)...(19): siRNA sense strand
cgucgaauauguacuugaa

SEQ ID NO: 1928423 - RNA, 19 nt, Homo sapiens
  misc_RNA (1)...(19): siRNA sense strand
ccaugaaccuugauauagu

SEQ ID NO: 1928424 - RNA, 19 nt, Homo sapiens
  misc_RNA (1)...(19): siRNA sense strand
uaaauaacuugcuguucug

SEQ ID NO: 1928425 - RNA, 19 nt, Homo sapiens
  misc_RNA (1)...(19): siRNA sense strand
acagauggccgucgaauau

SEQ ID NO: 1928426 - RNA, 19 nt, Homo sapiens
  misc_RNA (1)...(19): siRNA sense strand
uaccucaucuucagucaaa

SEQ ID NO: 1928427 - RNA, 19 nt, Homo sapiens
  misc_RNA (1)...(19): siRNA sense strand
aagaagauaucaggaagaa

SEQ ID NO: 1928428 - RNA, 19 nt, Homo sapiens
  misc_RNA (1)...(19): siRNA sense strand
aaugaagaguuaccuugua

SEQ ID NO: 1928429 - RNA, 19 nt, Homo sapiens
  misc_RNA (1)...(19): siRNA sense strand
uauauucacucccggaaau

SEQ ID NO: 1928430 - RNA, 19 nt, Homo sapiens
  misc_RNA (1)...(19): siRNA sense strand
caugaaccuugauauaguu

SEQ ID NO: 1928431 - RNA, 19 nt, Homo sapiens
  misc_RNA (1)...(19): siRNA sense strand
ccacagccuugaugacuuc

SEQ ID NO: 1928432 - RNA, 19 nt, Homo sapiens
  misc_RNA (1)...(19): siRNA sense strand
agacauccuucgcuucauu

SEQ ID NO: 1928433 - RNA, 19 nt, Homo sapiens
  misc_RNA (1)...(19): siRNA sense strand
gaagaacgcaguuuuguug

SEQ ID NO: 1928434 - RNA, 19 nt, Homo sapiens
  misc_RNA (1)...(19): siRNA sense strand
ccauuacgagucauuguua

SEQ ID NO: 1928435 - RNA, 19 nt, Homo sapiens
  misc_RNA (1)...(19): siRNA sense strand
cagacaaaaugaagaguua

SEQ ID NO: 1928436 - RNA, 19 nt, Homo sapiens
  misc_RNA (1)...(19): siRNA sense strand
cuacuucauuucauugcua

SEQ ID NO: 1928437 - RNA, 19 nt, Homo sapiens
  misc_RNA (1)...(19): siRNA sense strand
gaagaagauaucaggaaga

SEQ ID NO: 1928438 - RNA, 19 nt, Homo sapiens
  misc_RNA (1)...(19): siRNA sense strand
gaacuccacagccuugaug

SEQ ID NO: 1928439 - RNA, 19 nt, Homo sapiens
  misc_RNA (1)...(19): siRNA sense strand
ggaggaguguuggaguauu

SEQ ID NO: 1928440 - RNA, 19 nt, Homo sapiens
  misc_RNA (1)...(19): siRNA sense strand
gaacgcaguuuuguugaaa

SEQ ID NO: 1928441 - RNA, 19 nt, Homo sapiens
  misc_RNA (1)...(19): siRNA sense strand
ugauauaguugaccugcuu

SEQ ID NO: 1928442 - RNA, 19 nt, Homo sapiens
  misc_RNA (1)...(19): siRNA sense strand
caacuugaacaaccagaaa

SEQ ID NO: 1928443 - RNA, 19 nt, Homo sapiens
  misc_RNA (1)...(19): siRNA sense strand
gaugacuucuacauaggaa

SEQ ID NO: 1928444 - RNA, 19 nt, Homo sapiens
  misc_RNA (1)...(19): siRNA sense strand
ggaagaauuggaagaagau

SEQ ID NO: 1928445 - RNA, 19 nt, Homo sapiens
  misc_RNA (1)...(19): siRNA sense strand
gcaacuccuuucauggaau

SEQ ID NO: 1928446 - RNA, 19 nt, Homo sapiens
  misc_RNA (1)...(19): siRNA sense strand
gcuacuaacuaccucaucu

SEQ ID NO: 1928447 - RNA, 19 nt, Homo sapiens
  misc_RNA (1)...(19): siRNA sense strand
ucaggaagaaguugaaaga

SEQ ID NO: 1928448 - RNA, 19 nt, Homo sapiens
  misc_RNA (1)...(19): siRNA sense strand
uccaugaaguaaaggauaa

SEQ ID NO: 1928449 - RNA, 19 nt, Homo sapiens
  misc_RNA (1)...(19): siRNA sense strand
aagauuaauugccuaagga

SEQ ID NO: 1928450 - RNA, 19 nt, Homo sapiens
  misc_RNA (1)...(19): siRNA sense strand
gaagaguuaccuuguacau

SEQ ID NO: 1928451 - RNA, 19 nt, Homo sapiens
  misc_RNA (1)...(19): siRNA sense strand
ggacgagagcagcuuguug

SEQ ID NO: 1928452 - RNA, 19 nt, Homo sapiens
  misc_RNA (1)...(19): siRNA sense strand
auucaagccuuaaaucaga

SEQ ID NO: 1928453 - RNA, 19 nt, Homo sapiens
  misc_RNA (1)...(19): siRNA sense strand
cauuacgagucauuguuaa

SEQ ID NO: 1928454 - RNA, 19 nt, Homo sapiens
  misc_RNA (1)...(19): siRNA sense strand
gaagaauuggaagaagaua

SEQ ID NO: 1928455 - RNA, 19 nt, Homo sapiens
  misc_RNA (1)...(19): siRNA sense strand
cuugaugacuucuacauag

SEQ ID NO: 1928456 - RNA, 19 nt, Homo sapiens
  misc_RNA (1)...(19): siRNA sense strand
ggaaaugucguugcuuagu

SEQ ID NO: 1928457 - RNA, 19 nt, Homo sapiens
  misc_RNA (1)...(19): siRNA sense strand
ccacucugauugccuuuca

SEQ ID NO: 1928458 - RNA, 19 nt, Homo sapiens
  misc_RNA (1)...(19): siRNA sense strand
gagacuuucuugucauuuu

SEQ ID NO: 1928459 - RNA, 19 nt, Homo sapiens
  misc_RNA (1)...(19): siRNA sense strand
gaacuacccaggaucuuuu

SEQ ID NO: 1928460 - RNA, 19 nt, Homo sapiens
  misc_RNA (1)...(19): siRNA sense strand
aggcugaagcgucacauua

SEQ ID NO: 1928461 - RNA, 19 nt, Homo sapiens
  misc_RNA (1)...(19): siRNA sense strand
uggcauccaugaaccuuga

SEQ ID NO: 1928462 - RNA, 19 nt, Homo sapiens
  misc_RNA (1)...(19): siRNA sense strand
cuucuguucuuguuuauca

SEQ ID NO: 1928463 - RNA, 19 nt, Homo sapiens
  misc_RNA (1)...(19): siRNA sense strand
aaucagaagacaagugaaa

SEQ ID NO: 1928464 - RNA, 19 nt, Homo sapiens
  misc_RNA (1)...(19): siRNA sense strand
gauauaguugaccugcuua

SEQ ID NO: 1928465 - RNA, 19 nt, Homo sapiens
  misc_RNA (1)...(19): siRNA sense strand
gauaucaggaagaaguuga

SEQ ID NO: 1928466 - RNA, 19 nt, Homo sapiens
  misc_RNA (1)...(19): siRNA sense strand
auccuucgcuucauuuauu

SEQ ID NO: 1928467 - RNA, 19 nt, Homo sapiens
  misc_RNA (1)...(19): siRNA sense strand
gaaccuugauauaguugac

SEQ ID NO: 1928468 - RNA, 19 nt, Homo sapiens
  misc_RNA (1)...(19): siRNA sense strand
ucugugagcuguucaucau

SEQ ID NO: 1928469 - RNA, 19 nt, Homo sapiens
  misc_RNA (1)...(19): siRNA sense strand
gugccgagauguaccaagu

SEQ ID NO: 1928470 - RNA, 19 nt, Homo sapiens
  misc_RNA (1)...(19): siRNA sense strand
ggccaugugucuccugauc

SEQ ID NO: 1928471 - RNA, 19 nt, Homo sapiens
  misc_RNA (1)...(19): siRNA sense strand
caaagaguguccugauucc

SEQ ID NO: 1928472 - RNA, 19 nt, Homo sapiens
  misc_RNA (1)...(19): siRNA sense strand
aaagauuaauugccuaagg

SEQ ID NO: 1928473 - RNA, 19 nt, Homo sapiens
  misc_RNA (1)...(19): siRNA sense strand
cgaacuacccaggaucuuu

SEQ ID NO: 1928474 - RNA, 19 nt, Homo sapiens
  misc_RNA (1)...(19): siRNA sense strand
gccgagauguaccaagugu

SEQ ID NO: 1928475 - RNA, 19 nt, Homo sapiens
  misc_RNA (1)...(19): siRNA sense strand
aaaccuaucaagccagaaa

SEQ ID NO: 1928476 - RNA, 19 nt, Homo sapiens
  misc_RNA (1)...(19): siRNA sense strand
ucaguuccaguaauuauug

SEQ ID NO: 1928477 - RNA, 19 nt, Homo sapiens
  misc_RNA (1)...(19): siRNA sense strand
uuuaugguguuuccaaaga

SEQ ID NO: 1928478 - RNA, 19 nt, Homo sapiens
  misc_RNA (1)...(19): siRNA sense strand
gaaagauucuggggauguu

SEQ ID NO: 1928479 - RNA, 19 nt, Homo sapiens
  misc_RNA (1)...(19): siRNA sense strand
gauccaacuugcaaaagaa

SEQ ID NO: 1928480 - RNA, 19 nt, Homo sapiens
  misc_RNA (1)...(19): siRNA sense strand
cuaacuaccucaucuucag

SEQ ID NO: 1928481 - RNA, 19 nt, Homo sapiens
  misc_RNA (1)...(19): siRNA sense strand
ccaaguuucaccacucuga

SEQ ID NO: 1928482 - RNA, 19 nt, Homo sapiens
  misc_RNA (1)...(19): siRNA sense strand
uuauaacacuucccucaag

SEQ ID NO: 1928483 - RNA, 19 nt, Homo sapiens
  misc_RNA (1)...(19): siRNA sense strand
caccaggaaagauuaauug

SEQ ID NO: 1928484 - RNA, 19 nt, Homo sapiens
  misc_RNA (1)...(19): siRNA sense strand
ggauccaacuugcaaaaga

SEQ ID NO: 1928485 - RNA, 19 nt, Homo sapiens
  misc_RNA (1)...(19): siRNA sense strand
ugucguugcuuaguaaugu

SEQ ID NO: 1928486 - RNA, 19 nt, Homo sapiens
  misc_RNA (1)...(19): siRNA sense strand
gauggccgucgaauaugua

SEQ ID NO: 1928487 - RNA, 19 nt, Homo sapiens
  misc_RNA (1)...(19): siRNA sense strand
ccagugcguuugggaaugu

SEQ ID NO: 1928488 - RNA, 19 nt, Homo sapiens
  misc_RNA (1)...(19): siRNA sense strand
aaacaccaggaaagauuaa

SEQ ID NO: 1928489 - RNA, 19 nt, Homo sapiens
  misc_RNA (1)...(19): siRNA sense strand
ggggauguuucaaauguaa

SEQ ID NO: 1928490 - RNA, 19 nt, Homo sapiens
  misc_RNA (1)...(19): siRNA sense strand
ggaacuggcauccaugaac

SEQ ID NO: 1928491 - RNA, 19 nt, Homo sapiens
  misc_RNA (1)...(19): siRNA sense strand
gagcagcuguccucuuuga

SEQ ID NO: 1928492 - RNA, 19 nt, Homo sapiens
  misc_RNA (1)...(19): siRNA sense strand
gagacaaccuugacagaug

SEQ ID NO: 1928493 - RNA, 19 nt, Homo sapiens
  misc_RNA (1)...(19): siRNA sense strand
aaagguggcugaaguggaa

SEQ ID NO: 1928494 - RNA, 19 nt, Homo sapiens
  misc_RNA (1)...(19): siRNA sense strand
gugaagccauuuccaaaga

SEQ ID NO: 1928495 - RNA, 19 nt, Homo sapiens
  misc_RNA (1)...(19): siRNA sense strand
gaagguguuugcccucaug

SEQ ID NO: 1928496 - RNA, 19 nt, Homo sapiens
  misc_RNA (1)...(19): siRNA sense strand
ggaccugagugaagccauu

SEQ ID NO: 1928497 - RNA, 19 nt, Homo sapiens
  misc_RNA (1)...(19): siRNA sense strand
agaggaagcuguuugucaa

SEQ ID NO: 1928498 - RNA, 19 nt, Homo sapiens
  misc_RNA (1)...(19): siRNA sense strand
ggaagcagcugagcaagac

SEQ ID NO: 1928499 - RNA, 19 nt, Homo sapiens
  misc_RNA (1)...(19): siRNA sense strand
aggaggagcugaccaggaa

SEQ ID NO: 1928500 - RNA, 19 nt, Homo sapiens
  misc_RNA (1)...(19): siRNA sense strand
ggaagcuguuugucaagga

SEQ ID NO: 1928501 - RNA, 19 nt, Homo sapiens
  misc_RNA (1)...(19): siRNA sense strand
aggaggcucuuuccaguuu

SEQ ID NO: 1928502 - RNA, 19 nt, Homo sapiens
  misc_RNA (1)...(19): siRNA sense strand
gagugaagccauuuccaaa

SEQ ID NO: 1928503 - RNA, 19 nt, Homo sapiens
  misc_RNA (1)...(19): siRNA sense strand
gugcagagccucacacaca

SEQ ID NO: 1928504 - RNA, 19 nt, Homo sapiens
  misc_RNA (1)...(19): siRNA sense strand
gcaagguccucaccauucg

SEQ ID NO: 1928505 - RNA, 19 nt, Homo sapiens
  misc_RNA (1)...(19): siRNA sense strand
gcaagacccaggaagacuu

SEQ ID NO: 1928506 - RNA, 19 nt, Homo sapiens
  misc_RNA (1)...(19): siRNA sense strand
gcugagggcuuggagaagu

SEQ ID NO: 1928507 - RNA, 19 nt, Homo sapiens
  misc_RNA (1)...(19): siRNA sense strand
ccaccuggcucucagacau

SEQ ID NO: 1928508 - RNA, 19 nt, Homo sapiens
  misc_RNA (1)...(19): siRNA sense strand
gaccucaagugaccaugug

SEQ ID NO: 1928509 - RNA, 19 nt, Homo sapiens
  misc_RNA (1)...(19): siRNA sense strand
caacaaccgacucagcuau

SEQ ID NO: 1928510 - RNA, 19 nt, Homo sapiens
  misc_RNA (1)...(19): siRNA sense strand
uuucaacucugccaagaau

SEQ ID NO: 1928511 - RNA, 19 nt, Homo sapiens
  misc_RNA (1)...(19): siRNA sense strand
gaggcucuuuccaguuuga

SEQ ID NO: 1928512 - RNA, 19 nt, Homo sapiens
  misc_RNA (1)...(19): siRNA sense strand
ccugauugcucgaaagcuu

SEQ ID NO: 1928513 - RNA, 19 nt, Homo sapiens
  misc_RNA (1)...(19): siRNA sense strand
ggagacaaccuugacagau

SEQ ID NO: 1928514 - RNA, 19 nt, Homo sapiens
  misc_RNA (1)...(19): siRNA sense strand
ggucuccucucccguuaca

SEQ ID NO: 1928515 - RNA, 19 nt, Homo sapiens
  misc_RNA (1)...(19): siRNA sense strand
gagcggagccaggaacuca

SEQ ID NO: 1928516 - RNA, 19 nt, Homo sapiens
  misc_RNA (1)...(19): siRNA sense strand
gucagcagcucucagaucu

SEQ ID NO: 1928517 - RNA, 19 nt, Homo sapiens
  misc_RNA (1)...(19): siRNA sense strand
ggcaagcccugcaagaaaa

SEQ ID NO: 1928518 - RNA, 19 nt, Homo sapiens
  misc_RNA (1)...(19): siRNA sense strand
ucagagaggcggcuagaca

SEQ ID NO: 1928519 - RNA, 19 nt, Homo sapiens
  misc_RNA (1)...(19): siRNA sense strand
ucucuguccugcucgauga

SEQ ID NO: 1928520 - RNA, 19 nt, Homo sapiens
  misc_RNA (1)...(19): siRNA sense strand
aacgggauguuuccaguga

SEQ ID NO: 1928521 - RNA, 19 nt, Homo sapiens
  misc_RNA (1)...(19): siRNA sense strand
uggaaaccaugcagcacuu

SEQ ID NO: 1928522 - RNA, 19 nt, Homo sapiens
  misc_RNA (1)...(19): siRNA sense strand
agaagucucugaguagucu

SEQ ID NO: 1928523 - RNA, 19 nt, Homo sapiens
  misc_RNA (1)...(19): siRNA sense strand
gaggaggcucuuuccaguu

SEQ ID NO: 1928524 - RNA, 19 nt, Homo sapiens
  misc_RNA (1)...(19): siRNA sense strand
ccaccagggaguccauaaa

SEQ ID NO: 1928525 - RNA, 19 nt, Homo sapiens
  misc_RNA (1)...(19): siRNA sense strand
gacccugguugagaaucua

SEQ ID NO: 1928526 - RNA, 19 nt, Homo sapiens
  misc_RNA (1)...(19): siRNA sense strand
ggaggcucuuuccaguuug

SEQ ID NO: 1928527 - RNA, 19 nt, Homo sapiens
  misc_RNA (1)...(19): siRNA sense strand
gcuaucaagaugucucaga

SEQ ID NO: 1928528 - RNA, 19 nt, Homo sapiens
  misc_RNA (1)...(19): siRNA sense strand
ugagugaagccauuuccaa

SEQ ID NO: 1928529 - RNA, 19 nt, Homo sapiens
  misc_RNA (1)...(19): siRNA sense strand
aaggucuccucucccguua

SEQ ID NO: 1928530 - RNA, 19 nt, Homo sapiens
  misc_RNA (1)...(19): siRNA sense strand
ugagcaagacccaggaaga

SEQ ID NO: 1928531 - RNA, 19 nt, Homo sapiens
  misc_RNA (1)...(19): siRNA sense strand
uucagaggcugcaccaaga

SEQ ID NO: 1928532 - RNA, 19 nt, Homo sapiens
  misc_RNA (1)...(19): siRNA sense strand
uggauaagaagaaaucugu

SEQ ID NO: 1928533 - RNA, 19 nt, Homo sapiens
  misc_RNA (1)...(19): siRNA sense strand
uuccuucccuacuggauaa

SEQ ID NO: 1928534 - RNA, 19 nt, Homo sapiens
  misc_RNA (1)...(19): siRNA sense strand
acccagagaccucaaguga

SEQ ID NO: 1928535 - RNA, 19 nt, Homo sapiens
  misc_RNA (1)...(19): siRNA sense strand
gaaccgccuggaugcagaa

SEQ ID NO: 1928536 - RNA, 19 nt, Homo sapiens
  misc_RNA (1)...(19): siRNA sense strand
ggaacuggagcgacagaag

SEQ ID NO: 1928537 - RNA, 19 nt, Homo sapiens
  misc_RNA (1)...(19): siRNA sense strand
ucaacaaccgacucagcua

SEQ ID NO: 1928538 - RNA, 19 nt, Homo sapiens
  misc_RNA (1)...(19): siRNA sense strand
gagcuagagagggauaaga

SEQ ID NO: 1928539 - RNA, 19 nt, Homo sapiens
  misc_RNA (1)...(19): siRNA sense strand
aagaggaagcuguuuguca

SEQ ID NO: 1928540 - RNA, 19 nt, Homo sapiens
  misc_RNA (1)...(19): siRNA sense strand
ccuacuggauaagaagaaa

SEQ ID NO: 1928541 - RNA, 19 nt, Homo sapiens
  misc_RNA (1)...(19): siRNA sense strand
cagaggaggcugccagucu

SEQ ID NO: 1928542 - RNA, 19 nt, Homo sapiens
  misc_RNA (1)...(19): siRNA sense strand
uucagcaucugcaccugua

SEQ ID NO: 1928543 - RNA, 19 nt, Homo sapiens
  misc_RNA (1)...(19): siRNA sense strand
gagcaagacccaggaagac

SEQ ID NO: 1928544 - RNA, 19 nt, Homo sapiens
  misc_RNA (1)...(19): siRNA sense strand
ggagcaacucucagacaca

SEQ ID NO: 1928545 - RNA, 19 nt, Homo sapiens
  misc_RNA (1)...(19): siRNA sense strand
ggaaaccaugcagcacuug

SEQ ID NO: 1928546 - RNA, 19 nt, Homo sapiens
  misc_RNA (1)...(19): siRNA sense strand
ugaagccauuuccaaagag

SEQ ID NO: 1928547 - RNA, 19 nt, Homo sapiens
  misc_RNA (1)...(19): siRNA sense strand
gagguuguccggaagaacu

SEQ ID NO: 1928548 - RNA, 19 nt, Homo sapiens
  misc_RNA (1)...(19): siRNA sense strand
gaccugagugaagccauuu

SEQ ID NO: 1928549 - RNA, 19 nt, Homo sapiens
  misc_RNA (1)...(19): siRNA sense strand
aagaaaagguggcugaagu

SEQ ID NO: 1928550 - RNA, 19 nt, Homo sapiens
  misc_RNA (1)...(19): siRNA sense strand
aggagucccuggcuagcuu

SEQ ID NO: 1928551 - RNA, 19 nt, Homo sapiens
  misc_RNA (1)...(19): siRNA sense strand
gcuaugcuguccgcaaggu

SEQ ID NO: 1928552 - RNA, 19 nt, Homo sapiens
  misc_RNA (1)...(19): siRNA sense strand
gcugaggcuuguggucaau

SEQ ID NO: 1928553 - RNA, 19 nt, Homo sapiens
  misc_RNA (1)...(19): siRNA sense strand
cggaagcagcugagcaaga

SEQ ID NO: 1928554 - RNA, 19 nt, Homo sapiens
  misc_RNA (1)...(19): siRNA sense strand
cgcaagguccucaccauuc

SEQ ID NO: 1928555 - RNA, 19 nt, Homo sapiens
  misc_RNA (1)...(19): siRNA sense strand
gguugagaaucuaagaaaa

SEQ ID NO: 1928556 - RNA, 19 nt, Homo sapiens
  misc_RNA (1)...(19): siRNA sense strand
ccgccuggaugcagaacug

SEQ ID NO: 1928557 - RNA, 19 nt, Homo sapiens
  misc_RNA (1)...(19): siRNA sense strand
ccgcaagguccucaccauu

SEQ ID NO: 1928558 - RNA, 19 nt, Homo sapiens
  misc_RNA (1)...(19): siRNA sense strand
ugacccugguugagaaucu

SEQ ID NO: 1928559 - RNA, 19 nt, Homo sapiens
  misc_RNA (1)...(19): siRNA sense strand
aagcagcagcgacuguuga

SEQ ID NO: 1928560 - RNA, 19 nt, Homo sapiens
  misc_RNA (1)...(19): siRNA sense strand
caagcagcagcgacuguug

SEQ ID NO: 1928561 - RNA, 19 nt, Homo sapiens
  misc_RNA (1)...(19): siRNA sense strand
acacagagaggaggcugaa

SEQ ID NO: 1928562 - RNA, 19 nt, Homo sapiens
  misc_RNA (1)...(19): siRNA sense strand
agaccaccauggcuaaggu

SEQ ID NO: 1928563 - RNA, 19 nt, Homo sapiens
  misc_RNA (1)...(19): siRNA sense strand
gcagagccucacacacauc

SEQ ID NO: 1928564 - RNA, 19 nt, Homo sapiens
  misc_RNA (1)...(19): siRNA sense strand
ugguugagaaucuaagaaa

SEQ ID NO: 1928565 - RNA, 19 nt, Homo sapiens
  misc_RNA (1)...(19): siRNA sense strand
gcaaagagauuuucaacaa

SEQ ID NO: 1928566 - RNA, 19 nt, Homo sapiens
  misc_RNA (1)...(19): siRNA sense strand
gaacggaagcugcugaugu

SEQ ID NO: 1928567 - RNA, 19 nt, Homo sapiens
  misc_RNA (1)...(19): siRNA sense strand
caacaaggccacacucgaa

SEQ ID NO: 1928568 - RNA, 19 nt, Homo sapiens
  misc_RNA (1)...(19): siRNA sense strand
caacacgucuuccguuucu

SEQ ID NO: 1928569 - RNA, 19 nt, Homo sapiens
  misc_RNA (1)...(19): siRNA sense strand
gggagcggcugaucaggaa

SEQ ID NO: 1928570 - RNA, 19 nt, Homo sapiens
  misc_RNA (1)...(19): siRNA sense strand
gaaggucagcaaagagauu

SEQ ID NO: 1928571 - RNA, 19 nt, Homo sapiens
  misc_RNA (1)...(19): siRNA sense strand
caaaauccgugcugaaaau

SEQ ID NO: 1928572 - RNA, 19 nt, Homo sapiens
  misc_RNA (1)...(19): siRNA sense strand
ccaaggggcucuacucaga

SEQ ID NO: 1928573 - RNA, 19 nt, Homo sapiens
  misc_RNA (1)...(19): siRNA sense strand
gcucucuccuggccuguug

SEQ ID NO: 1928574 - RNA, 19 nt, Homo sapiens
  misc_RNA (1)...(19): siRNA sense strand
cgcaacacgucuuccguuu

SEQ ID NO: 1928575 - RNA, 19 nt, Homo sapiens
  misc_RNA (1)...(19): siRNA sense strand
caugcgggcucucuucugu

SEQ ID NO: 1928576 - RNA, 19 nt, Homo sapiens
  misc_RNA (1)...(19): siRNA sense strand
gcacuuugccugcgaacag

SEQ ID NO: 1928577 - RNA, 19 nt, Homo sapiens
  misc_RNA (1)...(19): siRNA sense strand
gugaaggucagcaaagaga

SEQ ID NO: 1928578 - RNA, 19 nt, Homo sapiens
  misc_RNA (1)...(19): siRNA sense strand
cagaggcguuacuccaaga

SEQ ID NO: 1928579 - RNA, 19 nt, Homo sapiens
  misc_RNA (1)...(19): siRNA sense strand
gggcaguccugaccuuugc

SEQ ID NO: 1928580 - RNA, 19 nt, Homo sapiens
  misc_RNA (1)...(19): siRNA sense strand
gcaacacgucuuccguuuc

SEQ ID NO: 1928581 - RNA, 19 nt, Homo sapiens
  misc_RNA (1)...(19): siRNA sense strand
aggaggagacgcauacuga

SEQ ID NO: 1928582 - RNA, 19 nt, Homo sapiens
  misc_RNA (1)...(19): siRNA sense strand
gacgcauacugacgccaaa

SEQ ID NO: 1928583 - RNA, 19 nt, Homo sapiens
  misc_RNA (1)...(19): siRNA sense strand
cuccuggccuguugucuga

SEQ ID NO: 1928584 - RNA, 19 nt, Homo sapiens
  misc_RNA (1)...(19): siRNA sense strand
aacggaagcugcugauguc

SEQ ID NO: 1928585 - RNA, 19 nt, Homo sapiens
  misc_RNA (1)...(19): siRNA sense strand
caaagagauuuucaacaag

SEQ ID NO: 1928586 - RNA, 19 nt, Homo sapiens
  misc_RNA (1)...(19): siRNA sense strand
gaggugaaggucagcaaag

SEQ ID NO: 1928587 - RNA, 19 nt, Homo sapiens
  misc_RNA (1)...(19): siRNA sense strand
gaggaggagacgcauacug

SEQ ID NO: 1928588 - RNA, 19 nt, Homo sapiens
  misc_RNA (1)...(19): siRNA sense strand
gagaugagcugcacacaga

SEQ ID NO: 1928589 - RNA, 19 nt, Homo sapiens
  misc_RNA (1)...(19): siRNA sense strand
gggaugaacuugcagauau

SEQ ID NO: 1928590 - RNA, 19 nt, Homo sapiens
  misc_RNA (1)...(19): siRNA sense strand
gaaaaugccugcaaaguga

SEQ ID NO: 1928591 - RNA, 19 nt, Homo sapiens
  misc_RNA (1)...(19): siRNA sense strand
aaacagaguucuuccuauu

SEQ ID NO: 1928592 - RNA, 19 nt, Homo sapiens
  misc_RNA (1)...(19): siRNA sense strand
agaagaaggugauugauga

SEQ ID NO: 1928593 - RNA, 19 nt, Homo sapiens
  misc_RNA (1)...(19): siRNA sense strand
gcaaacagaguucuuccua

SEQ ID NO: 1928594 - RNA, 19 nt, Homo sapiens
  misc_RNA (1)...(19): siRNA sense strand
ccacacaugccucauauaa

SEQ ID NO: 1928595 - RNA, 19 nt, Homo sapiens
  misc_RNA (1)...(19): siRNA sense strand
gaugauggcccaggaauuu

SEQ ID NO: 1928596 - RNA, 19 nt, Homo sapiens
  misc_RNA (1)...(19): siRNA sense strand
gacauggacuuccuuacaa

SEQ ID NO: 1928597 - RNA, 19 nt, Homo sapiens
  misc_RNA (1)...(19): siRNA sense strand
gaccagacaugcugaaagu

SEQ ID NO: 1928598 - RNA, 19 nt, Homo sapiens
  misc_RNA (1)...(19): siRNA sense strand
acacaugccucauauaagu

SEQ ID NO: 1928599 - RNA, 19 nt, Homo sapiens
  misc_RNA (1)...(19): siRNA sense strand
auagaaagcuugaaugaag

SEQ ID NO: 1928600 - RNA, 19 nt, Homo sapiens
  misc_RNA (1)...(19): siRNA sense strand
gcaaguagaaguggagaaa

SEQ ID NO: 1928601 - RNA, 19 nt, Homo sapiens
  misc_RNA (1)...(19): siRNA sense strand
caaacagaguucuuccuau

SEQ ID NO: 1928602 - RNA, 19 nt, Homo sapiens
  misc_RNA (1)...(19): siRNA sense strand
ggaugaacuugcagauaug

SEQ ID NO: 1928603 - RNA, 19 nt, Homo sapiens
  misc_RNA (1)...(19): siRNA sense strand
ggauggaucuaggcaguga

SEQ ID NO: 1928604 - RNA, 19 nt, Homo sapiens
  misc_RNA (1)...(19): siRNA sense strand
gaacuugcagauaugcuuu

SEQ ID NO: 1928605 - RNA, 19 nt, Homo sapiens
  misc_RNA (1)...(19): siRNA sense strand
gcagugauaaggacaguga

SEQ ID NO: 1928606 - RNA, 19 nt, Homo sapiens
  misc_RNA (1)...(19): siRNA sense strand
gcacuuggaagcuucuuug

SEQ ID NO: 1928607 - RNA, 19 nt, Homo sapiens
  misc_RNA (1)...(19): siRNA sense strand
ugagagacaugacuauugg

SEQ ID NO: 1928608 - RNA, 19 nt, Homo sapiens
  misc_RNA (1)...(19): siRNA sense strand
cuuggaagcuucuuugaug

SEQ ID NO: 1928609 - RNA, 19 nt, Homo sapiens
  misc_RNA (1)...(19): siRNA sense strand
gauagucaaugaucuccau

SEQ ID NO: 1928610 - RNA, 19 nt, Homo sapiens
  misc_RNA (1)...(19): siRNA sense strand
ggaagcuucuuugaugaug

SEQ ID NO: 1928611 - RNA, 19 nt, Homo sapiens
  misc_RNA (1)...(19): siRNA sense strand
auaagugaaugcuugauga

SEQ ID NO: 1928612 - RNA, 19 nt, Homo sapiens
  misc_RNA (1)...(19): siRNA sense strand
ggacagugaugcugaugac

SEQ ID NO: 1928613 - RNA, 19 nt, Homo sapiens
  misc_RNA (1)...(19): siRNA sense strand
gcagauaugcuuugucaac

SEQ ID NO: 1928614 - RNA, 19 nt, Homo sapiens
  misc_RNA (1)...(19): siRNA sense strand
uagaaagcuugaaugaaga

SEQ ID NO: 1928615 - RNA, 19 nt, Homo sapiens
  misc_RNA (1)...(19): siRNA sense strand
ggagaaacagaacaggaaa

SEQ ID NO: 1928616 - RNA, 19 nt, Homo sapiens
  misc_RNA (1)...(19): siRNA sense strand
uacaagugauagucaauga

SEQ ID NO: 1928617 - RNA, 19 nt, Homo sapiens
  misc_RNA (1)...(19): siRNA sense strand
gauagaaagcuugaaugaa

SEQ ID NO: 1928618 - RNA, 19 nt, Homo sapiens
  misc_RNA (1)...(19): siRNA sense strand
aagcuugaaugaagaguug

SEQ ID NO: 1928619 - RNA, 19 nt, Homo sapiens
  misc_RNA (1)...(19): siRNA sense strand
ugagagagagucuaucaga

SEQ ID NO: 1928620 - RNA, 19 nt, Homo sapiens
  misc_RNA (1)...(19): siRNA sense strand
gaugacauggacuuccuua

SEQ ID NO: 1928621 - RNA, 19 nt, Homo sapiens
  misc_RNA (1)...(19): siRNA sense strand
caacgacaguggcagugau

SEQ ID NO: 1928622 - RNA, 19 nt, Homo sapiens
  misc_RNA (1)...(19): siRNA sense strand
agaagcacauggcagagaa

SEQ ID NO: 1928623 - RNA, 19 nt, Homo sapiens
  misc_RNA (1)...(19): siRNA sense strand
uugcagauaugcuuuguca

SEQ ID NO: 1928624 - RNA, 19 nt, Homo sapiens
  misc_RNA (1)...(19): siRNA sense strand
gguggacauugaagacuug

SEQ ID NO: 1928625 - RNA, 19 nt, Homo sapiens
  misc_RNA (1)...(19): siRNA sense strand
gaauuuauaccagcuguag

SEQ ID NO: 1928626 - RNA, 19 nt, Homo sapiens
  misc_RNA (1)...(19): siRNA sense strand
ugacauggacuuccuuaca

SEQ ID NO: 1928627 - RNA, 19 nt, Homo sapiens
  misc_RNA (1)...(19): siRNA sense strand
cagaagaaggugauugaug

SEQ ID NO: 1928628 - RNA, 19 nt, Homo sapiens
  misc_RNA (1)...(19): siRNA sense strand
ugucugcccuggaggacua

SEQ ID NO: 1928629 - RNA, 19 nt, Homo sapiens
  misc_RNA (1)...(19): siRNA sense strand
ccagauagaaagcuugaau

SEQ ID NO: 1928630 - RNA, 19 nt, Homo sapiens
  misc_RNA (1)...(19): siRNA sense strand
agauagaaagcuugaauga

SEQ ID NO: 1928631 - RNA, 19 nt, Homo sapiens
  misc_RNA (1)...(19): siRNA sense strand
caagugauagucaaugauc

SEQ ID NO: 1928632 - RNA, 19 nt, Homo sapiens
  misc_RNA (1)...(19): siRNA sense strand
gauagagacacuacugaag

SEQ ID NO: 1928633 - RNA, 19 nt, Homo sapiens
  misc_RNA (1)...(19): siRNA sense strand
gaccugagagacaugacua

SEQ ID NO: 1928634 - RNA, 19 nt, Homo sapiens
  misc_RNA (1)...(19): siRNA sense strand
aaguagaaguggagaaaca

SEQ ID NO: 1928635 - RNA, 19 nt, Homo sapiens
  misc_RNA (1)...(19): siRNA sense strand
ccagacaugcugaaaguca

SEQ ID NO: 1928636 - RNA, 19 nt, Homo sapiens
  misc_RNA (1)...(19): siRNA sense strand
gauggcccaggaauuuaua

SEQ ID NO: 1928637 - RNA, 19 nt, Homo sapiens
  misc_RNA (1)...(19): siRNA sense strand
cuacugaagaggagucuga

SEQ ID NO: 1928638 - RNA, 19 nt, Homo sapiens
  misc_RNA (1)...(19): siRNA sense strand
acagaguucuuccuauucu

SEQ ID NO: 1928639 - RNA, 19 nt, Homo sapiens
  misc_RNA (1)...(19): siRNA sense strand
uaaggacagugaugcugau

SEQ ID NO: 1928640 - RNA, 19 nt, Homo sapiens
  misc_RNA (1)...(19): siRNA sense strand
uagagacacuacugaagag

SEQ ID NO: 1928641 - RNA, 19 nt, Homo sapiens
  misc_RNA (1)...(19): siRNA sense strand
gcacauggcagagaaaaug

SEQ ID NO: 1928642 - RNA, 19 nt, Homo sapiens
  misc_RNA (1)...(19): siRNA sense strand
ggaauuuauaccagcugua

SEQ ID NO: 1928643 - RNA, 19 nt, Homo sapiens
  misc_RNA (1)...(19): siRNA sense strand
gaagcacauggcagagaaa

SEQ ID NO: 1928644 - RNA, 19 nt, Homo sapiens
  misc_RNA (1)...(19): siRNA sense strand
uaagugaaugcuugaugaa

SEQ ID NO: 1928645 - RNA, 19 nt, Homo sapiens
  misc_RNA (1)...(19): siRNA sense strand
ugccacacaugccucauau

SEQ ID NO: 1928646 - RNA, 19 nt, Homo sapiens
  misc_RNA (1)...(19): siRNA sense strand
uauaccagcuguagcaaaa

SEQ ID NO: 1928647 - RNA, 19 nt, Homo sapiens
  misc_RNA (1)...(19): siRNA sense strand
gugaugcugaugacaguaa

SEQ ID NO: 1928648 - RNA, 19 nt, Homo sapiens
  misc_RNA (1)...(19): siRNA sense strand
auagagacacuacugaaga

SEQ ID NO: 1928649 - RNA, 19 nt, Homo sapiens
  misc_RNA (1)...(19): siRNA sense strand
cagagaaaaugccugcaaa

SEQ ID NO: 1928650 - RNA, 19 nt, Homo sapiens
  misc_RNA (1)...(19): siRNA sense strand
ccaccgaccugagagacau

SEQ ID NO: 1928651 - RNA, 19 nt, Homo sapiens
  misc_RNA (1)...(19): siRNA sense strand
auugcaagcugaagccaaa

SEQ ID NO: 1928652 - RNA, 19 nt, Homo sapiens
  misc_RNA (1)...(19): siRNA sense strand
agagugggaugaacuugca

SEQ ID NO: 1928653 - RNA, 19 nt, Homo sapiens
  misc_RNA (1)...(19): siRNA sense strand
gaagacuugaccagacaug

SEQ ID NO: 1928654 - RNA, 19 nt, Homo sapiens
  misc_RNA (1)...(19): siRNA sense strand
ccaugcugguggacauuga

SEQ ID NO: 1928655 - RNA, 19 nt, Homo sapiens
  misc_RNA (1)...(19): siRNA sense strand
cauauaagugaaugcuuga

SEQ ID NO: 1928656 - RNA, 19 nt, Homo sapiens
  misc_RNA (1)...(19): siRNA sense strand
ccaaaccaauggccaaaau

SEQ ID NO: 1928657 - RNA, 19 nt, Homo sapiens
  misc_RNA (1)...(19): siRNA sense strand
ugauagagacacuacugaa

SEQ ID NO: 1928658 - RNA, 19 nt, Homo sapiens
  misc_RNA (1)...(19): siRNA sense strand
gagaggaugggauggaucu

SEQ ID NO: 1928659 - RNA, 19 nt, Homo sapiens
  misc_RNA (1)...(19): siRNA sense strand
gaagaaggugauugaugag

SEQ ID NO: 1928660 - RNA, 19 nt, Homo sapiens
  misc_RNA (1)...(19): siRNA sense strand
uggagaaacagaacaggaa

SEQ ID NO: 1928661 - RNA, 19 nt, Homo sapiens
  misc_RNA (1)...(19): siRNA sense strand
gaaguggagaaacagaaca

SEQ ID NO: 1928662 - RNA, 19 nt, Homo sapiens
  misc_RNA (1)...(19): siRNA sense strand
aaagaaauugcaagcugaa

SEQ ID NO: 1928663 - RNA, 19 nt, Homo sapiens
  misc_RNA (1)...(19): siRNA sense strand
uuacaacgugggacuguga

SEQ ID NO: 1928664 - RNA, 19 nt, Homo sapiens
  misc_RNA (1)...(19): siRNA sense strand
guagaaguggagaaacaga

SEQ ID NO: 1928665 - RNA, 19 nt, Homo sapiens
  misc_RNA (1)...(19): siRNA sense strand
cagugaugcugaugacagu

SEQ ID NO: 1928666 - RNA, 19 nt, Homo sapiens
  misc_RNA (1)...(19): siRNA sense strand
gggcaagcacucugacagu

SEQ ID NO: 1928667 - RNA, 19 nt, Homo sapiens
  misc_RNA (1)...(19): siRNA sense strand
cugagagacaugacuauug

SEQ ID NO: 1928668 - RNA, 19 nt, Homo sapiens
  misc_RNA (1)...(19): siRNA sense strand
aaugagagagagucuauca

SEQ ID NO: 1928669 - RNA, 19 nt, Homo sapiens
  misc_RNA (1)...(19): siRNA sense strand
uuggaagcuucuuugauga

SEQ ID NO: 1928670 - RNA, 19 nt, Homo sapiens
  misc_RNA (1)...(19): siRNA sense strand
uauaagugaaugcuugaug

SEQ ID NO: 1928671 - RNA, 19 nt, Homo sapiens
  misc_RNA (1)...(19): siRNA sense strand
agauaugcuuugucaacga

SEQ ID NO: 1928672 - RNA, 19 nt, Homo sapiens
  misc_RNA (1)...(19): siRNA sense strand
uugaagacuugaccagaca

SEQ ID NO: 1928673 - RNA, 19 nt, Homo sapiens
  misc_RNA (1)...(19): siRNA sense strand
cagauagaaagcuugaaug

SEQ ID NO: 1928674 - RNA, 19 nt, Homo sapiens
  misc_RNA (1)...(19): siRNA sense strand
uagaaguggagaaacagaa

SEQ ID NO: 1928675 - RNA, 19 nt, Homo sapiens
  misc_RNA (1)...(19): siRNA sense strand
gcuccgagugcaaaucuuc

SEQ ID NO: 1928676 - RNA, 19 nt, Homo sapiens
  misc_RNA (1)...(19): siRNA sense strand
gaggaugggauggaucuag

SEQ ID NO: 1928677 - RNA, 19 nt, Homo sapiens
  misc_RNA (1)...(19): siRNA sense strand
gagugcaaaucuucaucgu

SEQ ID NO: 1928678 - RNA, 19 nt, Homo sapiens
  misc_RNA (1)...(19): siRNA sense strand
gcagagugggaugaacuug

SEQ ID NO: 1928679 - RNA, 19 nt, Homo sapiens
  misc_RNA (1)...(19): siRNA sense strand
cagaagcacauggcagaga

SEQ ID NO: 1928680 - RNA, 19 nt, Homo sapiens
  misc_RNA (1)...(19): siRNA sense strand
aaagucagcagaagcacau

SEQ ID NO: 1928681 - RNA, 19 nt, Homo sapiens
  misc_RNA (1)...(19): siRNA sense strand
cagcuacaagugauaguca

SEQ ID NO: 1928682 - RNA, 19 nt, Homo sapiens
  misc_RNA (1)...(19): siRNA sense strand
ucccgucgcugaucuucug

SEQ ID NO: 1928683 - RNA, 19 nt, Homo sapiens
  misc_RNA (1)...(19): siRNA sense strand
agaguucuuccuauucuga

SEQ ID NO: 1928684 - RNA, 19 nt, Homo sapiens
  misc_RNA (1)...(19): siRNA sense strand
cccaugagcaaacagaguu

SEQ ID NO: 1928685 - RNA, 19 nt, Homo sapiens
  misc_RNA (1)...(19): siRNA sense strand
cccaggaccucaggcacaa

SEQ ID NO: 1928686 - RNA, 19 nt, Homo sapiens
  misc_RNA (1)...(19): siRNA sense strand
caaaaugcaaguagaagug

SEQ ID NO: 1928687 - RNA, 19 nt, Homo sapiens
  misc_RNA (1)...(19): siRNA sense strand
guacagagaugugauauua

SEQ ID NO: 1928688 - RNA, 19 nt, Homo sapiens
  misc_RNA (1)...(19): siRNA sense strand
gaaaugaacuuaucucagu

SEQ ID NO: 1928689 - RNA, 19 nt, Homo sapiens
  misc_RNA (1)...(19): siRNA sense strand
ggaaagaucuucacaugug

SEQ ID NO: 1928690 - RNA, 19 nt, Homo sapiens
  misc_RNA (1)...(19): siRNA sense strand
gagaaacccuuuaagugua

SEQ ID NO: 1928691 - RNA, 19 nt, Homo sapiens
  misc_RNA (1)...(19): siRNA sense strand
gggaaugccugaacucaua

SEQ ID NO: 1928692 - RNA, 19 nt, Homo sapiens
  misc_RNA (1)...(19): siRNA sense strand
gaagauggacucuagauuu

SEQ ID NO: 1928693 - RNA, 19 nt, Homo sapiens
  misc_RNA (1)...(19): siRNA sense strand
caacuuacuuuccaucaaa

SEQ ID NO: 1928694 - RNA, 19 nt, Homo sapiens
  misc_RNA (1)...(19): siRNA sense strand
agagaaaccuuaugaaugu

SEQ ID NO: 1928695 - RNA, 19 nt, Homo sapiens
  misc_RNA (1)...(19): siRNA sense strand
ucacaucucuuccucugua

SEQ ID NO: 1928696 - RNA, 19 nt, Homo sapiens
  misc_RNA (1)...(19): siRNA sense strand
agacaacauucacaucuua

SEQ ID NO: 1928697 - RNA, 19 nt, Homo sapiens
  misc_RNA (1)...(19): siRNA sense strand
ggucaggccuuucugugua

SEQ ID NO: 1928698 - RNA, 19 nt, Homo sapiens
  misc_RNA (1)...(19): siRNA sense strand
gagaaacccuaugaaugua

SEQ ID NO: 1928699 - RNA, 19 nt, Homo sapiens
  misc_RNA (1)...(19): siRNA sense strand
gagaaacccuaugaaugua

SEQ ID NO: 1928700 - RNA, 19 nt, Homo sapiens
  misc_RNA (1)...(19): siRNA sense strand
gagaauacauacuggugaa

SEQ ID NO: 1928701 - RNA, 19 nt, Homo sapiens
  misc_RNA (1)...(19): siRNA sense strand
caacuuacccaacaucaaa

SEQ ID NO: 1928702 - RNA, 19 nt, Homo sapiens
  misc_RNA (1)...(19): siRNA sense strand
gagagaaaccuuaugaaug

SEQ ID NO: 1928703 - RNA, 19 nt, Homo sapiens
  misc_RNA (1)...(19): siRNA sense strand
gaaacccuaugaauguaaa

SEQ ID NO: 1928704 - RNA, 19 nt, Homo sapiens
  misc_RNA (1)...(19): siRNA sense strand
gaaacccuaugaauguaaa

SEQ ID NO: 1928705 - RNA, 19 nt, Homo sapiens
  misc_RNA (1)...(19): siRNA sense strand
caucagagaauucauauug

SEQ ID NO: 1928706 - RNA, 19 nt, Homo sapiens
  misc_RNA (1)...(19): siRNA sense strand
guacaucagagaauucaua

SEQ ID NO: 1928707 - RNA, 19 nt, Homo sapiens
  misc_RNA (1)...(19): siRNA sense strand
gacaaacucuaugaaugua

SEQ ID NO: 1928708 - RNA, 19 nt, Homo sapiens
  misc_RNA (1)...(19): siRNA sense strand
guggaaagaucuucacaug

SEQ ID NO: 1928709 - RNA, 19 nt, Homo sapiens
  misc_RNA (1)...(19): siRNA sense strand
agacugcuuucacaacuua

SEQ ID NO: 1928710 - RNA, 19 nt, Homo sapiens
  misc_RNA (1)...(19): siRNA sense strand
ggagagaaaccuuaugaau

SEQ ID NO: 1928711 - RNA, 19 nt, Homo sapiens
  misc_RNA (1)...(19): siRNA sense strand
gagagaaacccuacgaaug

SEQ ID NO: 1928712 - RNA, 19 nt, Homo sapiens
  misc_RNA (1)...(19): siRNA sense strand
gugagaagccuuaugauug

SEQ ID NO: 1928713 - RNA, 19 nt, Homo sapiens
  misc_RNA (1)...(19): siRNA sense strand
acagagaugugauauuaga

SEQ ID NO: 1928714 - RNA, 19 nt, Homo sapiens
  misc_RNA (1)...(19): siRNA sense strand
ugagaagccuuaugauugu

SEQ ID NO: 1928715 - RNA, 19 nt, Homo sapiens
  misc_RNA (1)...(19): siRNA sense strand
caacuuaaucuccaucaaa

SEQ ID NO: 1928716 - RNA, 19 nt, Homo sapiens
  misc_RNA (1)...(19): siRNA sense strand
gaacaagaaaguccucaug

SEQ ID NO: 1928717 - RNA, 19 nt, Homo sapiens
  misc_RNA (1)...(19): siRNA sense strand
gaacucauaucagaggaau

SEQ ID NO: 1928718 - RNA, 19 nt, Homo sapiens
  misc_RNA (1)...(19): siRNA sense strand
agauguggcuguagacuuu

SEQ ID NO: 1928719 - RNA, 19 nt, Homo sapiens
  misc_RNA (1)...(19): siRNA sense strand
ggaagguaauggaaagaau

SEQ ID NO: 1928720 - RNA, 19 nt, Homo sapiens
  misc_RNA (1)...(19): siRNA sense strand
gcaggauguucuauuucua

SEQ ID NO: 1928721 - RNA, 19 nt, Homo sapiens
  misc_RNA (1)...(19): siRNA sense strand
gaaaagcccuaugaaugua

SEQ ID NO: 1928722 - RNA, 19 nt, Homo sapiens
  misc_RNA (1)...(19): siRNA sense strand
gagaagugcuaugagugua

SEQ ID NO: 1928723 - RNA, 19 nt, Homo sapiens
  misc_RNA (1)...(19): siRNA sense strand
ugagaaacccuaugaaugu

SEQ ID NO: 1928724 - RNA, 19 nt, Homo sapiens
  misc_RNA (1)...(19): siRNA sense strand
ugagaaacccuaugaaugu

SEQ ID NO: 1928725 - RNA, 19 nt, Homo sapiens
  misc_RNA (1)...(19): siRNA sense strand
gaagguaauggaaagaauu

SEQ ID NO: 1928726 - RNA, 19 nt, Homo sapiens
  misc_RNA (1)...(19): siRNA sense strand
guucagagauguggcugua

SEQ ID NO: 1928727 - RNA, 19 nt, Homo sapiens
  misc_RNA (1)...(19): siRNA sense strand
caacaucagagaauucauu

SEQ ID NO: 1928728 - RNA, 19 nt, Homo sapiens
  misc_RNA (1)...(19): siRNA sense strand
caacaucagaguauucauu

SEQ ID NO: 1928729 - RNA, 19 nt, Homo sapiens
  misc_RNA (1)...(19): siRNA sense strand
cgacaucagagaauucaua

SEQ ID NO: 1928730 - RNA, 19 nt, Homo sapiens
  misc_RNA (1)...(19): siRNA sense strand
gagaugugauauuagagaa

SEQ ID NO: 1928731 - RNA, 19 nt, Homo sapiens
  misc_RNA (1)...(19): siRNA sense strand
ggaauguggucaggccuuu

SEQ ID NO: 1928732 - RNA, 19 nt, Homo sapiens
  misc_RNA (1)...(19): siRNA sense strand
gagaagccguaugaaugua

SEQ ID NO: 1928733 - RNA, 19 nt, Homo sapiens
  misc_RNA (1)...(19): siRNA sense strand
gaauucauauuggugagaa

SEQ ID NO: 1928734 - RNA, 19 nt, Homo sapiens
  misc_RNA (1)...(19): siRNA sense strand
gaagccguaugaauguaaa

SEQ ID NO: 1928735 - RNA, 19 nt, Homo sapiens
  misc_RNA (1)...(19): siRNA sense strand
aagauggacucuagauuug

SEQ ID NO: 1928736 - RNA, 19 nt, Homo sapiens
  misc_RNA (1)...(19): siRNA sense strand
acucagaacuuauuucaca

SEQ ID NO: 1928737 - RNA, 19 nt, Homo sapiens
  misc_RNA (1)...(19): siRNA sense strand
agaaacccuuuaaguguaa

SEQ ID NO: 1928738 - RNA, 19 nt, Homo sapiens
  misc_RNA (1)...(19): siRNA sense strand
gagaaaccuuaugaaugua

SEQ ID NO: 1928739 - RNA, 19 nt, Homo sapiens
  misc_RNA (1)...(19): siRNA sense strand
gaaagagcccuggaugguu

SEQ ID NO: 1928740 - RNA, 19 nt, Homo sapiens
  misc_RNA (1)...(19): siRNA sense strand
ugagaaaccauacaaaugu

SEQ ID NO: 1928741 - RNA, 19 nt, Homo sapiens
  misc_RNA (1)...(19): siRNA sense strand
ugagaaacccuuuaagugu

SEQ ID NO: 1928742 - RNA, 19 nt, Homo sapiens
  misc_RNA (1)...(19): siRNA sense strand
ucucacagcuuacucaaca

SEQ ID NO: 1928743 - RNA, 19 nt, Homo sapiens
  misc_RNA (1)...(19): siRNA sense strand
gacaacaacuuacuuucca

SEQ ID NO: 1928744 - RNA, 19 nt, Homo sapiens
  misc_RNA (1)...(19): siRNA sense strand
ggaaagagcccuggauggu

SEQ ID NO: 1928745 - RNA, 19 nt, Homo sapiens
  misc_RNA (1)...(19): siRNA sense strand
ucagagauguggcuguaga

SEQ ID NO: 1928746 - RNA, 19 nt, Homo sapiens
  misc_RNA (1)...(19): siRNA sense strand
ggugagaagccuuaugauu

SEQ ID NO: 1928747 - RNA, 19 nt, Homo sapiens
  misc_RNA (1)...(19): siRNA sense strand
gcugagaagugcuaugagu

SEQ ID NO: 1928748 - RNA, 19 nt, Homo sapiens
  misc_RNA (1)...(19): siRNA sense strand
gugagaagccguaugaaug

SEQ ID NO: 1928749 - RNA, 19 nt, Homo sapiens
  misc_RNA (1)...(19): siRNA sense strand
caucagagaauucauacuu

SEQ ID NO: 1928750 - RNA, 19 nt, Homo sapiens
  misc_RNA (1)...(19): siRNA sense strand
cuacaucacaaacuucaua

SEQ ID NO: 1928751 - RNA, 19 nt, Homo sapiens
  misc_RNA (1)...(19): siRNA sense strand
agucguggcuaucaucuaa

SEQ ID NO: 1928752 - RNA, 19 nt, Homo sapiens
  misc_RNA (1)...(19): siRNA sense strand
gagaagccuuaugauugua

SEQ ID NO: 1928753 - RNA, 19 nt, Homo sapiens
  misc_RNA (1)...(19): siRNA sense strand
gauggacucuagauuugga

SEQ ID NO: 1928754 - RNA, 19 nt, Homo sapiens
  misc_RNA (1)...(19): siRNA sense strand
ucagcgaauucauaaugua

SEQ ID NO: 1928755 - RNA, 19 nt, Homo sapiens
  misc_RNA (1)...(19): siRNA sense strand
gaaaagcccuaugacugua

SEQ ID NO: 1928756 - RNA, 19 nt, Homo sapiens
  misc_RNA (1)...(19): siRNA sense strand
uaaggaaugucagaaguuc

SEQ ID NO: 1928757 - RNA, 19 nt, Homo sapiens
  misc_RNA (1)...(19): siRNA sense strand
ugacaaacucuaugaaugu

SEQ ID NO: 1928758 - RNA, 19 nt, Homo sapiens
  misc_RNA (1)...(19): siRNA sense strand
agagaaacccuacgaaugu

SEQ ID NO: 1928759 - RNA, 19 nt, Homo sapiens
  misc_RNA (1)...(19): siRNA sense strand
gcucagaccuucgaguaca

SEQ ID NO: 1928760 - RNA, 19 nt, Homo sapiens
  misc_RNA (1)...(19): siRNA sense strand
cgucguuacucagaacuua

SEQ ID NO: 1928761 - RNA, 19 nt, Homo sapiens
  misc_RNA (1)...(19): siRNA sense strand
caacuuacucuccaucaga

SEQ ID NO: 1928762 - RNA, 19 nt, Homo sapiens
  misc_RNA (1)...(19): siRNA sense strand
gagaaacccuacgaaugug

SEQ ID NO: 1928763 - RNA, 19 nt, Homo sapiens
  misc_RNA (1)...(19): siRNA sense strand
gcuguggacuugaagaaca

SEQ ID NO: 1928764 - RNA, 19 nt, Homo sapiens
  misc_RNA (1)...(19): siRNA sense strand
agacuucauucaucacuga

SEQ ID NO: 1928765 - RNA, 19 nt, Homo sapiens
  misc_RNA (1)...(19): siRNA sense strand
gaaguucuuucgucguuac

SEQ ID NO: 1928766 - RNA, 19 nt, Homo sapiens
  misc_RNA (1)...(19): siRNA sense strand
caucaaagaauucauacug

SEQ ID NO: 1928767 - RNA, 19 nt, Homo sapiens
  misc_RNA (1)...(19): siRNA sense strand
caucagcgaauucauaaug

SEQ ID NO: 1928768 - RNA, 19 nt, Homo sapiens
  misc_RNA (1)...(19): siRNA sense strand
gugagaaacccuuuaagug

SEQ ID NO: 1928769 - RNA, 19 nt, Homo sapiens
  misc_RNA (1)...(19): siRNA sense strand
cauaucagaggaauuugua

SEQ ID NO: 1928770 - RNA, 19 nt, Homo sapiens
  misc_RNA (1)...(19): siRNA sense strand
guacaggccuucgacuaca

SEQ ID NO: 1928771 - RNA, 19 nt, Homo sapiens
  misc_RNA (1)...(19): siRNA sense strand
gacugaacauugcugagaa

SEQ ID NO: 1928772 - RNA, 19 nt, Homo sapiens
  misc_RNA (1)...(19): siRNA sense strand
gugagaaacccuaugaaug

SEQ ID NO: 1928773 - RNA, 19 nt, Homo sapiens
  misc_RNA (1)...(19): siRNA sense strand
gugagaaacccuaugaaug

SEQ ID NO: 1928774 - RNA, 19 nt, Homo sapiens
  misc_RNA (1)...(19): siRNA sense strand
agagaacuauagcaacuug

SEQ ID NO: 1928775 - RNA, 19 nt, Homo sapiens
  misc_RNA (1)...(19): siRNA sense strand
gugagaaaccauacaaaug

SEQ ID NO: 1928776 - RNA, 19 nt, Homo sapiens
  misc_RNA (1)...(19): siRNA sense strand
ggugagaaaccauacaaau

SEQ ID NO: 1928777 - RNA, 19 nt, Homo sapiens
  misc_RNA (1)...(19): siRNA sense strand
guaaggaaugucagaaguu

SEQ ID NO: 1928778 - RNA, 19 nt, Homo sapiens
  misc_RNA (1)...(19): siRNA sense strand
gaauccagauaugacacua

SEQ ID NO: 1928779 - RNA, 19 nt, Homo sapiens
  misc_RNA (1)...(19): siRNA sense strand
cagaugugaucacccuauu

SEQ ID NO: 1928780 - RNA, 19 nt, Homo sapiens
  misc_RNA (1)...(19): siRNA sense strand
gaauucauacuucugacaa

SEQ ID NO: 1928781 - RNA, 19 nt, Homo sapiens
  misc_RNA (1)...(19): siRNA sense strand
agaguacgacaacaacuua

SEQ ID NO: 1928782 - RNA, 19 nt, Homo sapiens
  misc_RNA (1)...(19): siRNA sense strand
gaauguaaagaauguggaa

SEQ ID NO: 1928783 - RNA, 19 nt, Homo sapiens
  misc_RNA (1)...(19): siRNA sense strand
caucagagaauacauacug

SEQ ID NO: 1928784 - RNA, 19 nt, Homo sapiens
  misc_RNA (1)...(19): siRNA sense strand
cugacaaacucuaugaaug

SEQ ID NO: 1928785 - RNA, 19 nt, Homo sapiens
  misc_RNA (1)...(19): siRNA sense strand
cauuuaggcuguucucaca

SEQ ID NO: 1928786 - RNA, 19 nt, Homo sapiens
  misc_RNA (1)...(19): siRNA sense strand
ggugagaaacccuuuaagu

SEQ ID NO: 1928787 - RNA, 19 nt, Homo sapiens
  misc_RNA (1)...(19): siRNA sense strand
caacaaagcuugaacauuu

SEQ ID NO: 1928788 - RNA, 19 nt, Homo sapiens
  misc_RNA (1)...(19): siRNA sense strand
uaaaggaagugaagaguaa

SEQ ID NO: 1928789 - RNA, 19 nt, Homo sapiens
  misc_RNA (1)...(19): siRNA sense strand
gcaaagagcuuggauuucu

SEQ ID NO: 1928790 - RNA, 19 nt, Homo sapiens
  misc_RNA (1)...(19): siRNA sense strand
ugaaagagcaagcaaguua

SEQ ID NO: 1928791 - RNA, 19 nt, Homo sapiens
  misc_RNA (1)...(19): siRNA sense strand
gaagugaagaguaaacuaa

SEQ ID NO: 1928792 - RNA, 19 nt, Homo sapiens
  misc_RNA (1)...(19): siRNA sense strand
gagcuuggauuucuuuaga

SEQ ID NO: 1928793 - RNA, 19 nt, Homo sapiens
  misc_RNA (1)...(19): siRNA sense strand
gagagauucuugauacauu

SEQ ID NO: 1928794 - RNA, 19 nt, Homo sapiens
  misc_RNA (1)...(19): siRNA sense strand
caaauggaaaccaaacuua

SEQ ID NO: 1928795 - RNA, 19 nt, Homo sapiens
  misc_RNA (1)...(19): siRNA sense strand
uaaccuggcuuuccucugu

SEQ ID NO: 1928796 - RNA, 19 nt, Homo sapiens
  misc_RNA (1)...(19): siRNA sense strand
gaaagaagccaaagagacu

SEQ ID NO: 1928797 - RNA, 19 nt, Homo sapiens
  misc_RNA (1)...(19): siRNA sense strand
gaaguagugucauuauguc

SEQ ID NO: 1928798 - RNA, 19 nt, Homo sapiens
  misc_RNA (1)...(19): siRNA sense strand
uaagccagauuucagauga

SEQ ID NO: 1928799 - RNA, 19 nt, Homo sapiens
  misc_RNA (1)...(19): siRNA sense strand
aaacacaaauggaaaccaa

SEQ ID NO: 1928800 - RNA, 19 nt, Homo sapiens
  misc_RNA (1)...(19): siRNA sense strand
uaugggaccuguucuaguu

SEQ ID NO: 1928801 - RNA, 19 nt, Homo sapiens
  misc_RNA (1)...(19): siRNA sense strand
gaaguuucccagacugaua

SEQ ID NO: 1928802 - RNA, 19 nt, Homo sapiens
  misc_RNA (1)...(19): siRNA sense strand
ugaagaugaugaugacauu

SEQ ID NO: 1928803 - RNA, 19 nt, Homo sapiens
  misc_RNA (1)...(19): siRNA sense strand
gcaagcaaguuaucuucug

SEQ ID NO: 1928804 - RNA, 19 nt, Homo sapiens
  misc_RNA (1)...(19): siRNA sense strand
gaaacacuaagccagauuu

SEQ ID NO: 1928805 - RNA, 19 nt, Homo sapiens
  misc_RNA (1)...(19): siRNA sense strand
ggaugacauugauuacaaa

SEQ ID NO: 1928806 - RNA, 19 nt, Homo sapiens
  misc_RNA (1)...(19): siRNA sense strand
caagcaaguuaucuucuga

SEQ ID NO: 1928807 - RNA, 19 nt, Homo sapiens
  misc_RNA (1)...(19): siRNA sense strand
gaaaagagggaaacacuaa

SEQ ID NO: 1928808 - RNA, 19 nt, Homo sapiens
  misc_RNA (1)...(19): siRNA sense strand
gauuacaaaccuacgaaua

SEQ ID NO: 1928809 - RNA, 19 nt, Homo sapiens
  misc_RNA (1)...(19): siRNA sense strand
ggagaaagaagggaaagaa

SEQ ID NO: 1928810 - RNA, 19 nt, Homo sapiens
  misc_RNA (1)...(19): siRNA sense strand
ugaaauggacuuacuagga

SEQ ID NO: 1928811 - RNA, 19 nt, Homo sapiens
  misc_RNA (1)...(19): siRNA sense strand
uaggagagauucuugauac

SEQ ID NO: 1928812 - RNA, 19 nt, Homo sapiens
  misc_RNA (1)...(19): siRNA sense strand
gaaagagcaagcaaguuau

SEQ ID NO: 1928813 - RNA, 19 nt, Homo sapiens
  misc_RNA (1)...(19): siRNA sense strand
ggacuuacuaggagagauu

SEQ ID NO: 1928814 - RNA, 19 nt, Homo sapiens
  misc_RNA (1)...(19): siRNA sense strand
guacggacagcauauaaau

SEQ ID NO: 1928815 - RNA, 19 nt, Homo sapiens
  misc_RNA (1)...(19): siRNA sense strand
ggaagugaagaguaaacua

SEQ ID NO: 1928816 - RNA, 19 nt, Homo sapiens
  misc_RNA (1)...(19): siRNA sense strand
uaugacaucugacuuccaa

SEQ ID NO: 1928817 - RNA, 19 nt, Homo sapiens
  misc_RNA (1)...(19): siRNA sense strand
uggaugacauugauuacaa

SEQ ID NO: 1928818 - RNA, 19 nt, Homo sapiens
  misc_RNA (1)...(19): siRNA sense strand
gcacacacagcucagauca

SEQ ID NO: 1928819 - RNA, 19 nt, Homo sapiens
  misc_RNA (1)...(19): siRNA sense strand
gaccuguucuaguucugua

SEQ ID NO: 1928820 - RNA, 19 nt, Homo sapiens
  misc_RNA (1)...(19): siRNA sense strand
acggacagcauauaaauuu

SEQ ID NO: 1928821 - RNA, 19 nt, Homo sapiens
  misc_RNA (1)...(19): siRNA sense strand
gacauugauuacaaaccua

SEQ ID NO: 1928822 - RNA, 19 nt, Homo sapiens
  misc_RNA (1)...(19): siRNA sense strand
gagcaagcaaguuaucuuc

SEQ ID NO: 1928823 - RNA, 19 nt, Homo sapiens
  misc_RNA (1)...(19): siRNA sense strand
ugaaguagugucauuaugu

SEQ ID NO: 1928824 - RNA, 19 nt, Homo sapiens
  misc_RNA (1)...(19): siRNA sense strand
cugcaaagagcuuggauuu

SEQ ID NO: 1928825 - RNA, 19 nt, Homo sapiens
  misc_RNA (1)...(19): siRNA sense strand
ucuagugguuugacagauu

SEQ ID NO: 1928826 - RNA, 19 nt, Homo sapiens
  misc_RNA (1)...(19): siRNA sense strand
cuaaaggaagugaagagua

SEQ ID NO: 1928827 - RNA, 19 nt, Homo sapiens
  misc_RNA (1)...(19): siRNA sense strand
ggauuucuuuagaucaaug

SEQ ID NO: 1928828 - RNA, 19 nt, Homo sapiens
  misc_RNA (1)...(19): siRNA sense strand
guacaauauacaccaguuu

SEQ ID NO: 1928829 - RNA, 19 nt, Homo sapiens
  misc_RNA (1)...(19): siRNA sense strand
ggaaacacuaagccagauu

SEQ ID NO: 1928830 - RNA, 19 nt, Homo sapiens
  misc_RNA (1)...(19): siRNA sense strand
gaagcggguuuccucuagu

SEQ ID NO: 1928831 - RNA, 19 nt, Homo sapiens
  misc_RNA (1)...(19): siRNA sense strand
augcaaagcugggacuaaa

SEQ ID NO: 1928832 - RNA, 19 nt, Homo sapiens
  misc_RNA (1)...(19): siRNA sense strand
caaggaaaaugaagaagau

SEQ ID NO: 1928833 - RNA, 19 nt, Homo sapiens
  misc_RNA (1)...(19): siRNA sense strand
guucuaguucuguacaaua

SEQ ID NO: 1928834 - RNA, 19 nt, Homo sapiens
  misc_RNA (1)...(19): siRNA sense strand
caucugacuuccaacaaag

SEQ ID NO: 1928835 - RNA, 19 nt, Homo sapiens
  misc_RNA (1)...(19): siRNA sense strand
acaucugacuuccaacaaa

SEQ ID NO: 1928836 - RNA, 19 nt, Homo sapiens
  misc_RNA (1)...(19): siRNA sense strand
gcaaagcugggacuaaagg

SEQ ID NO: 1928837 - RNA, 19 nt, Homo sapiens
  misc_RNA (1)...(19): siRNA sense strand
agugaagacuccuuacuca

SEQ ID NO: 1928838 - RNA, 19 nt, Homo sapiens
  misc_RNA (1)...(19): siRNA sense strand
gggaaacacuaagccagau

SEQ ID NO: 1928839 - RNA, 19 nt, Homo sapiens
  misc_RNA (1)...(19): siRNA sense strand
gauuaugggaccuguucua

SEQ ID NO: 1928840 - RNA, 19 nt, Homo sapiens
  misc_RNA (1)...(19): siRNA sense strand
aaucuaaugcuccuaguga

SEQ ID NO: 1928841 - RNA, 19 nt, Homo sapiens
  misc_RNA (1)...(19): siRNA sense strand
agagauucuugauacauug

SEQ ID NO: 1928842 - RNA, 19 nt, Homo sapiens
  misc_RNA (1)...(19): siRNA sense strand
ugacauugauuacaaaccu

SEQ ID NO: 1928843 - RNA, 19 nt, Homo sapiens
  misc_RNA (1)...(19): siRNA sense strand
agugaugacucuguugaaa

SEQ ID NO: 1928844 - RNA, 19 nt, Homo sapiens
  misc_RNA (1)...(19): siRNA sense strand
ccaacaaagcuugaacauu

SEQ ID NO: 1928845 - RNA, 19 nt, Homo sapiens
  misc_RNA (1)...(19): siRNA sense strand
gggaaagaagccaaagaga

SEQ ID NO: 1928846 - RNA, 19 nt, Homo sapiens
  misc_RNA (1)...(19): siRNA sense strand
gagaaagaagggaaagaag

SEQ ID NO: 1928847 - RNA, 19 nt, Homo sapiens
  misc_RNA (1)...(19): siRNA sense strand
gcuuggauuucuuuagauc

SEQ ID NO: 1928848 - RNA, 19 nt, Homo sapiens
  misc_RNA (1)...(19): siRNA sense strand
gacagcauauaaauuugca

SEQ ID NO: 1928849 - RNA, 19 nt, Homo sapiens
  misc_RNA (1)...(19): siRNA sense strand
ugauggugcucuauaugau

SEQ ID NO: 1928850 - RNA, 19 nt, Homo sapiens
  misc_RNA (1)...(19): siRNA sense strand
agaauaaccuggcuuuccu

SEQ ID NO: 1928851 - RNA, 19 nt, Homo sapiens
  misc_RNA (1)...(19): siRNA sense strand
gugagaauaaccuggcuuu

SEQ ID NO: 1928852 - RNA, 19 nt, Homo sapiens
  misc_RNA (1)...(19): siRNA sense strand
ggagagauucuugauacau

SEQ ID NO: 1928853 - RNA, 19 nt, Homo sapiens
  misc_RNA (1)...(19): siRNA sense strand
ggacuaaaggaagugaaga

SEQ ID NO: 1928854 - RNA, 19 nt, Homo sapiens
  misc_RNA (1)...(19): siRNA sense strand
ccucggugcugacaaugug

SEQ ID NO: 1928855 - RNA, 19 nt, Homo sapiens
  misc_RNA (1)...(19): siRNA sense strand
ggacugcuccaugaaguag

SEQ ID NO: 1928856 - RNA, 19 nt, Homo sapiens
  misc_RNA (1)...(19): siRNA sense strand
ugaugaagaugaugaugac

SEQ ID NO: 1928857 - RNA, 19 nt, Homo sapiens
  misc_RNA (1)...(19): siRNA sense strand
cuaguucuguacaauauac

SEQ ID NO: 1928858 - RNA, 19 nt, Homo sapiens
  misc_RNA (1)...(19): siRNA sense strand
gugcugacaaugugaguga

SEQ ID NO: 1928859 - RNA, 19 nt, Homo sapiens
  misc_RNA (1)...(19): siRNA sense strand
cuaggagagauucuugaua

SEQ ID NO: 1928860 - RNA, 19 nt, Homo sapiens
  misc_RNA (1)...(19): siRNA sense strand
gaagaugaugaugacauug

SEQ ID NO: 1928861 - RNA, 19 nt, Homo sapiens
  misc_RNA (1)...(19): siRNA sense strand
aagaugaugaugacauuga

SEQ ID NO: 1928862 - RNA, 19 nt, Homo sapiens
  misc_RNA (1)...(19): siRNA sense strand
ggacagcauauaaauuugc

SEQ ID NO: 1928863 - RNA, 19 nt, Homo sapiens
  misc_RNA (1)...(19): siRNA sense strand
cuagugguuugacagauuc

SEQ ID NO: 1928864 - RNA, 19 nt, Homo sapiens
  misc_RNA (1)...(19): siRNA sense strand
gagaauaaccuggcuuucc

SEQ ID NO: 1928865 - RNA, 19 nt, Homo sapiens
  misc_RNA (1)...(19): siRNA sense strand
gagauucuugauacauuga

SEQ ID NO: 1928866 - RNA, 19 nt, Homo sapiens
  misc_RNA (1)...(19): siRNA sense strand
caauauacaccaguuuaca

SEQ ID NO: 1928867 - RNA, 19 nt, Homo sapiens
  misc_RNA (1)...(19): siRNA sense strand
caggugaaauggacuuacu

SEQ ID NO: 1928868 - RNA, 19 nt, Homo sapiens
  misc_RNA (1)...(19): siRNA sense strand
gaugaugaugacauugaaa

SEQ ID NO: 1928869 - RNA, 19 nt, Homo sapiens
  misc_RNA (1)...(19): siRNA sense strand
agaugaugaugacauugaa

SEQ ID NO: 1928870 - RNA, 19 nt, Homo sapiens
  misc_RNA (1)...(19): siRNA sense strand
ugaagauggugaagaagcu

SEQ ID NO: 1928871 - RNA, 19 nt, Homo sapiens
  misc_RNA (1)...(19): siRNA sense strand
acaaauggaaaccaaacuu

SEQ ID NO: 1928872 - RNA, 19 nt, Homo sapiens
  misc_RNA (1)...(19): siRNA sense strand
aacaaagcuugaacauuuc

SEQ ID NO: 1928873 - RNA, 19 nt, Homo sapiens
  misc_RNA (1)...(19): siRNA sense strand
acaaaccuacgaauaaauc

SEQ ID NO: 1928874 - RNA, 19 nt, Homo sapiens
  misc_RNA (1)...(19): siRNA sense strand
uuagaucaauggaugacau

SEQ ID NO: 1928875 - RNA, 19 nt, Homo sapiens
  misc_RNA (1)...(19): siRNA sense strand
cggacagcauauaaauuug

SEQ ID NO: 1928876 - RNA, 19 nt, Homo sapiens
  misc_RNA (1)...(19): siRNA sense strand
ccuugauggugcucuauau

SEQ ID NO: 1928877 - RNA, 19 nt, Homo sapiens
  misc_RNA (1)...(19): siRNA sense strand
gauggugcucuauaugaug

SEQ ID NO: 1928878 - RNA, 19 nt, Homo sapiens
  misc_RNA (1)...(19): siRNA sense strand
ucauaugacaucugacuuc

SEQ ID NO: 1928879 - RNA, 19 nt, Homo sapiens
  misc_RNA (1)...(19): siRNA sense strand
aaagggaggaaacucagaa

SEQ ID NO: 1928880 - RNA, 19 nt, Homo sapiens
  misc_RNA (1)...(19): siRNA sense strand
gaagauuaugggaccuguu

SEQ ID NO: 1928881 - RNA, 19 nt, Homo sapiens
  misc_RNA (1)...(19): siRNA sense strand
cuaaugcuccuagugagaa

SEQ ID NO: 1928882 - RNA, 19 nt, Homo sapiens
  misc_RNA (1)...(19): siRNA sense strand
uaaaucuaaugcuccuagu

SEQ ID NO: 1928883 - RNA, 19 nt, Homo sapiens
  misc_RNA (1)...(19): siRNA sense strand
gaugaugacauugaaagag

SEQ ID NO: 1928884 - RNA, 19 nt, Homo sapiens
  misc_RNA (1)...(19): siRNA sense strand
gguuuccucuagugguuug

SEQ ID NO: 1928885 - RNA, 19 nt, Homo sapiens
  misc_RNA (1)...(19): siRNA sense strand
cggguuuccucuagugguu

SEQ ID NO: 1928886 - RNA, 19 nt, Homo sapiens
  misc_RNA (1)...(19): siRNA sense strand
ggugaaauggacuuacuag

SEQ ID NO: 1928887 - RNA, 19 nt, Homo sapiens
  misc_RNA (1)...(19): siRNA sense strand
gagcaggguucaugcauau

SEQ ID NO: 1928888 - RNA, 19 nt, Homo sapiens
  misc_RNA (1)...(19): siRNA sense strand
ggagcaggguucaugcaua

SEQ ID NO: 1928889 - RNA, 19 nt, Homo sapiens
  misc_RNA (1)...(19): siRNA sense strand
gcaguguucuccauacuau

SEQ ID NO: 1928890 - RNA, 19 nt, Homo sapiens
  misc_RNA (1)...(19): siRNA sense strand
gagcaacuacuaggaauaa

SEQ ID NO: 1928891 - RNA, 19 nt, Homo sapiens
  misc_RNA (1)...(19): siRNA sense strand
gcugguaccuuccuguaug

SEQ ID NO: 1928892 - RNA, 19 nt, Homo sapiens
  misc_RNA (1)...(19): siRNA sense strand
uaugucaccuuccuagaaa

SEQ ID NO: 1928893 - RNA, 19 nt, Homo sapiens
  misc_RNA (1)...(19): siRNA sense strand
gaucagcaagugagagaaa

SEQ ID NO: 1928894 - RNA, 19 nt, Homo sapiens
  misc_RNA (1)...(19): siRNA sense strand
cagaacagaucagcaagug

SEQ ID NO: 1928895 - RNA, 19 nt, Homo sapiens
  misc_RNA (1)...(19): siRNA sense strand
ggagcaacuacuaggaaua

SEQ ID NO: 1928896 - RNA, 19 nt, Homo sapiens
  misc_RNA (1)...(19): siRNA sense strand
ucccugggcuucuuucuug

SEQ ID NO: 1928897 - RNA, 19 nt, Homo sapiens
  misc_RNA (1)...(19): siRNA sense strand
gggcuucuuucuugucuuc

SEQ ID NO: 1928898 - RNA, 19 nt, Homo sapiens
  misc_RNA (1)...(19): siRNA sense strand
guaugucaccuuccuagaa

SEQ ID NO: 1928899 - RNA, 19 nt, Homo sapiens
  misc_RNA (1)...(19): siRNA sense strand
acucugggcuguggccuua

SEQ ID NO: 1928900 - RNA, 19 nt, Homo sapiens
  misc_RNA (1)...(19): siRNA sense strand
gguguuugguguaggaaug

SEQ ID NO: 1928901 - RNA, 19 nt, Homo sapiens
  misc_RNA (1)...(19): siRNA sense strand
cugaagcccuggaggaaau

SEQ ID NO: 1928902 - RNA, 19 nt, Homo sapiens
  misc_RNA (1)...(19): siRNA sense strand
cgacagugcaggacgaaga

SEQ ID NO: 1928903 - RNA, 19 nt, Homo sapiens
  misc_RNA (1)...(19): siRNA sense strand
uggaggaaauugaaucaca

SEQ ID NO: 1928904 - RNA, 19 nt, Homo sapiens
  misc_RNA (1)...(19): siRNA sense strand
aguguucuccauacuauua

SEQ ID NO: 1928905 - RNA, 19 nt, Homo sapiens
  misc_RNA (1)...(19): siRNA sense strand
gugcagaacagaucagcaa

SEQ ID NO: 1928906 - RNA, 19 nt, Homo sapiens
  misc_RNA (1)...(19): siRNA sense strand
agaaguucauggugcagaa

SEQ ID NO: 1928907 - RNA, 19 nt, Homo sapiens
  misc_RNA (1)...(19): siRNA sense strand
gggcucauaucuucgaacu

SEQ ID NO: 1928908 - RNA, 19 nt, Homo sapiens
  misc_RNA (1)...(19): siRNA sense strand
gcagaacagaucagcaagu

SEQ ID NO: 1928909 - RNA, 19 nt, Homo sapiens
  misc_RNA (1)...(19): siRNA sense strand
uugcuguccuggcucauaa

SEQ ID NO: 1928910 - RNA, 19 nt, Homo sapiens
  misc_RNA (1)...(19): siRNA sense strand
gaggaaauugaaucacaga

SEQ ID NO: 1928911 - RNA, 19 nt, Homo sapiens
  misc_RNA (1)...(19): siRNA sense strand
cuucaaaugguuccagauu

SEQ ID NO: 1928912 - RNA, 19 nt, Homo sapiens
  misc_RNA (1)...(19): siRNA sense strand
uggagucgcuggcauugca

SEQ ID NO: 1928913 - RNA, 19 nt, Homo sapiens
  misc_RNA (1)...(19): siRNA sense strand
cagaucagcaagugagaga

SEQ ID NO: 1928914 - RNA, 19 nt, Homo sapiens
  misc_RNA (1)...(19): siRNA sense strand
uucaaaugguuccagauug

SEQ ID NO: 1928915 - RNA, 19 nt, Homo sapiens
  misc_RNA (1)...(19): siRNA sense strand
cagcugguaccuuccugua

SEQ ID NO: 1928916 - RNA, 19 nt, Homo sapiens
  misc_RNA (1)...(19): siRNA sense strand
gacagugcaggacgaagaa

SEQ ID NO: 1928917 - RNA, 19 nt, Homo sapiens
  misc_RNA (1)...(19): siRNA sense strand
cuucuuucuugucuucuuu

SEQ ID NO: 1928918 - RNA, 19 nt, Homo sapiens
  misc_RNA (1)...(19): siRNA sense strand
uauggaguaucccuaugga

SEQ ID NO: 1928919 - RNA, 19 nt, Homo sapiens
  misc_RNA (1)...(19): siRNA sense strand
ucacagauucagaaguuca

SEQ ID NO: 1928920 - RNA, 19 nt, Homo sapiens
  misc_RNA (1)...(19): siRNA sense strand
cagcucauauggaguaucc

SEQ ID NO: 1928921 - RNA, 19 nt, Homo sapiens
  misc_RNA (1)...(19): siRNA sense strand
gcaacuacuaggaauaaaa

SEQ ID NO: 1928922 - RNA, 19 nt, Homo sapiens
  misc_RNA (1)...(19): siRNA sense strand
gggcaguguucuccauacu

SEQ ID NO: 1928923 - RNA, 19 nt, Homo sapiens
  misc_RNA (1)...(19): siRNA sense strand
gcugaagcccuggaggaaa

SEQ ID NO: 1928924 - RNA, 19 nt, Homo sapiens
  misc_RNA (1)...(19): siRNA sense strand
acucccaucugcuucaaau

SEQ ID NO: 1928925 - RNA, 19 nt, Homo sapiens
  misc_RNA (1)...(19): siRNA sense strand
ggcaguguucuccauacua

SEQ ID NO: 1928926 - RNA, 19 nt, Homo sapiens
  misc_RNA (1)...(19): siRNA sense strand
agacuccugggcuguauuu

SEQ ID NO: 1928927 - RNA, 19 nt, Homo sapiens
  misc_RNA (1)...(19): siRNA sense strand
ucagacuccugggcuguau

SEQ ID NO: 1928928 - RNA, 19 nt, Homo sapiens
  misc_RNA (1)...(19): siRNA sense strand
gcuaaguggagcuguguag

SEQ ID NO: 1928929 - RNA, 19 nt, Homo sapiens
  misc_RNA (1)...(19): siRNA sense strand
ucauauggaguaucccuau

SEQ ID NO: 1928930 - RNA, 19 nt, Homo sapiens
  misc_RNA (1)...(19): siRNA sense strand
ucagcaagugagagaaauu

SEQ ID NO: 1928931 - RNA, 19 nt, Homo sapiens
  misc_RNA (1)...(19): siRNA sense strand
gcuucuuucuugucuucuu

SEQ ID NO: 1928932 - RNA, 19 nt, Homo sapiens
  misc_RNA (1)...(19): siRNA sense strand
auucagcucauauggagua

SEQ ID NO: 1928933 - RNA, 19 nt, Homo sapiens
  misc_RNA (1)...(19): siRNA sense strand
cagcaagugagagaaauuc

SEQ ID NO: 1928934 - RNA, 19 nt, Homo sapiens
  misc_RNA (1)...(19): siRNA sense strand
cggcuagugcauuuaggua

SEQ ID NO: 1928935 - RNA, 19 nt, Homo sapiens
  misc_RNA (1)...(19): siRNA sense strand
cuccugggcuguauuucug

SEQ ID NO: 1928936 - RNA, 19 nt, Homo sapiens
  misc_RNA (1)...(19): siRNA sense strand
gagaagcacaugaacguua

SEQ ID NO: 1928937 - RNA, 19 nt, Homo sapiens
  misc_RNA (1)...(19): siRNA sense strand
cagaagaacagccauauuu

SEQ ID NO: 1928938 - RNA, 19 nt, Homo sapiens
  misc_RNA (1)...(19): siRNA sense strand
gagagaagcccuuuagaug

SEQ ID NO: 1928939 - RNA, 19 nt, Homo sapiens
  misc_RNA (1)...(19): siRNA sense strand
gcaugcagauuugugauaa

SEQ ID NO: 1928940 - RNA, 19 nt, Homo sapiens
  misc_RNA (1)...(19): siRNA sense strand
cagcuacgcucccacauga

SEQ ID NO: 1928941 - RNA, 19 nt, Homo sapiens
  misc_RNA (1)...(19): siRNA sense strand
gaacugugacgaaagguuu

SEQ ID NO: 1928942 - RNA, 19 nt, Homo sapiens
  misc_RNA (1)...(19): siRNA sense strand
gcaaaccgcaucuccauga

SEQ ID NO: 1928943 - RNA, 19 nt, Homo sapiens
  misc_RNA (1)...(19): siRNA sense strand
ggagaauucugaugacaca

SEQ ID NO: 1928944 - RNA, 19 nt, Homo sapiens
  misc_RNA (1)...(19): siRNA sense strand
aaagugagcugucccuuca

SEQ ID NO: 1928945 - RNA, 19 nt, Homo sapiens
  misc_RNA (1)...(19): siRNA sense strand
gaagaacagccauauuuca

SEQ ID NO: 1928946 - RNA, 19 nt, Homo sapiens
  misc_RNA (1)...(19): siRNA sense strand
guagagaaagucagcguua

SEQ ID NO: 1928947 - RNA, 19 nt, Homo sapiens
  misc_RNA (1)...(19): siRNA sense strand
gagaagcccuauccaugug

SEQ ID NO: 1928948 - RNA, 19 nt, Homo sapiens
  misc_RNA (1)...(19): siRNA sense strand
guucagcacagcaucauua

SEQ ID NO: 1928949 - RNA, 19 nt, Homo sapiens
  misc_RNA (1)...(19): siRNA sense strand
ccagaaagcuaagugugaa

SEQ ID NO: 1928950 - RNA, 19 nt, Homo sapiens
  misc_RNA (1)...(19): siRNA sense strand
ggagagaaacccuuuaucu

SEQ ID NO: 1928951 - RNA, 19 nt, Homo sapiens
  misc_RNA (1)...(19): siRNA sense strand
caagaaguuuguccuggaa

SEQ ID NO: 1928952 - RNA, 19 nt, Homo sapiens
  misc_RNA (1)...(19): siRNA sense strand
aaacugugcugugcaugua

SEQ ID NO: 1928953 - RNA, 19 nt, Homo sapiens
  misc_RNA (1)...(19): siRNA sense strand
ggagagaagcccuuuagau

SEQ ID NO: 1928954 - RNA, 19 nt, Homo sapiens
  misc_RNA (1)...(19): siRNA sense strand
gaaagucagcguuacacaa

SEQ ID NO: 1928955 - RNA, 19 nt, Homo sapiens
  misc_RNA (1)...(19): siRNA sense strand
agagugagccuuuaaauca

SEQ ID NO: 1928956 - RNA, 19 nt, Homo sapiens
  misc_RNA (1)...(19): siRNA sense strand
ugacagcaaugacuaugga

SEQ ID NO: 1928957 - RNA, 19 nt, Homo sapiens
  misc_RNA (1)...(19): siRNA sense strand
caaagcaccaguccagaaa

SEQ ID NO: 1928958 - RNA, 19 nt, Homo sapiens
  misc_RNA (1)...(19): siRNA sense strand
ggcaaggauuucaacauga

SEQ ID NO: 1928959 - RNA, 19 nt, Homo sapiens
  misc_RNA (1)...(19): siRNA sense strand
ggaaguccuuauucugugu

SEQ ID NO: 1928960 - RNA, 19 nt, Homo sapiens
  misc_RNA (1)...(19): siRNA sense strand
gagagaaacccuuuaucug

SEQ ID NO: 1928961 - RNA, 19 nt, Homo sapiens
  misc_RNA (1)...(19): siRNA sense strand
gcugguaccuggagaagca

SEQ ID NO: 1928962 - RNA, 19 nt, Homo sapiens
  misc_RNA (1)...(19): siRNA sense strand
cauaggcgcaugcagauuu

SEQ ID NO: 1928963 - RNA, 19 nt, Homo sapiens
  misc_RNA (1)...(19): siRNA sense strand
uggcaaggauuucaacaug

SEQ ID NO: 1928964 - RNA, 19 nt, Homo sapiens
  misc_RNA (1)...(19): siRNA sense strand
caagaucguccauggauau

SEQ ID NO: 1928965 - RNA, 19 nt, Homo sapiens
  misc_RNA (1)...(19): siRNA sense strand
ucaagaucguccauggaua

SEQ ID NO: 1928966 - RNA, 19 nt, Homo sapiens
  misc_RNA (1)...(19): siRNA sense strand
aaagucagcguuacacaaa

SEQ ID NO: 1928967 - RNA, 19 nt, Homo sapiens
  misc_RNA (1)...(19): siRNA sense strand
uguaacaaaucguucaaga

SEQ ID NO: 1928968 - RNA, 19 nt, Homo sapiens
  misc_RNA (1)...(19): siRNA sense strand
uagcaggaauggcacaaga

SEQ ID NO: 1928969 - RNA, 19 nt, Homo sapiens
  misc_RNA (1)...(19): siRNA sense strand
gaagagacaccgcagaacu

SEQ ID NO: 1928970 - RNA, 19 nt, Homo sapiens
  misc_RNA (1)...(19): siRNA sense strand
agagaaacccuuuaucugu

SEQ ID NO: 1928971 - RNA, 19 nt, Homo sapiens
  misc_RNA (1)...(19): siRNA sense strand
guaacaaaucguucaagaa

SEQ ID NO: 1928972 - RNA, 19 nt, Homo sapiens
  misc_RNA (1)...(19): siRNA sense strand
ggaauggcacaagaagaua

SEQ ID NO: 1928973 - RNA, 19 nt, Homo sapiens
  misc_RNA (1)...(19): siRNA sense strand
caaugacuauggagagaau

SEQ ID NO: 1928974 - RNA, 19 nt, Homo sapiens
  misc_RNA (1)...(19): siRNA sense strand
aaacagaagaacagccaua

SEQ ID NO: 1928975 - RNA, 19 nt, Homo sapiens
  misc_RNA (1)...(19): siRNA sense strand
gcaucuccaugaaacagaa

SEQ ID NO: 1928976 - RNA, 19 nt, Homo sapiens
  misc_RNA (1)...(19): siRNA sense strand
caaaagacaugccauuuac

SEQ ID NO: 1928977 - RNA, 19 nt, Homo sapiens
  misc_RNA (1)...(19): siRNA sense strand
acaaaucguucaagaaacu

SEQ ID NO: 1928978 - RNA, 19 nt, Homo sapiens
  misc_RNA (1)...(19): siRNA sense strand
ggagaagauaguagagaaa

SEQ ID NO: 1928979 - RNA, 19 nt, Homo sapiens
  misc_RNA (1)...(19): siRNA sense strand
ggccacagaugacagcaau

SEQ ID NO: 1928980 - RNA, 19 nt, Homo sapiens
  misc_RNA (1)...(19): siRNA sense strand
ccacagaugacagcaauga

SEQ ID NO: 1928981 - RNA, 19 nt, Homo sapiens
  misc_RNA (1)...(19): siRNA sense strand
agaaacccuuuaucuguga

SEQ ID NO: 1928982 - RNA, 19 nt, Homo sapiens
  misc_RNA (1)...(19): siRNA sense strand
gaucguccauggauaugca

SEQ ID NO: 1928983 - RNA, 19 nt, Homo sapiens
  misc_RNA (1)...(19): siRNA sense strand
gaagauaguagagaaaguc

SEQ ID NO: 1928984 - RNA, 19 nt, Homo sapiens
  misc_RNA (1)...(19): siRNA sense strand
ggaggaagaggaagaaguc

SEQ ID NO: 1928985 - RNA, 19 nt, Homo sapiens
  misc_RNA (1)...(19): siRNA sense strand
ugauaaauguggcaagaag

SEQ ID NO: 1928986 - RNA, 19 nt, Homo sapiens
  misc_RNA (1)...(19): siRNA sense strand
ccaaagagacuccuguucu

SEQ ID NO: 1928987 - RNA, 19 nt, Homo sapiens
  misc_RNA (1)...(19): siRNA sense strand
caaaccgcaucuccaugaa

SEQ ID NO: 1928988 - RNA, 19 nt, Homo sapiens
  misc_RNA (1)...(19): siRNA sense strand
gcaccaguccagaaagcua

SEQ ID NO: 1928989 - RNA, 19 nt, Homo sapiens
  misc_RNA (1)...(19): siRNA sense strand
ccaaagcaccaguccagaa

SEQ ID NO: 1928990 - RNA, 19 nt, Homo sapiens
  misc_RNA (1)...(19): siRNA sense strand
ggaagagagugaggaagag

SEQ ID NO: 1928991 - RNA, 19 nt, Homo sapiens
  misc_RNA (1)...(19): siRNA sense strand
gagcaaaccgcaucuccau

SEQ ID NO: 1928992 - RNA, 19 nt, Homo sapiens
  misc_RNA (1)...(19): siRNA sense strand
caauaugaauccuguaagc

SEQ ID NO: 1928993 - RNA, 19 nt, Homo sapiens
  misc_RNA (1)...(19): siRNA sense strand
cgagaacugugacgaaagg

SEQ ID NO: 1928994 - RNA, 19 nt, Homo sapiens
  misc_RNA (1)...(19): siRNA sense strand
acacaugguugcacacaca

SEQ ID NO: 1928995 - RNA, 19 nt, Homo sapiens
  misc_RNA (1)...(19): siRNA sense strand
gacaagcagugaggaggaa

SEQ ID NO: 1928996 - RNA, 19 nt, Homo sapiens
  misc_RNA (1)...(19): siRNA sense strand
ggaggaagaggaagagagu

SEQ ID NO: 1928997 - RNA, 19 nt, Homo sapiens
  misc_RNA (1)...(19): siRNA sense strand
agugagccuuuaaaucaua

SEQ ID NO: 1928998 - RNA, 19 nt, Homo sapiens
  misc_RNA (1)...(19): siRNA sense strand
gagugagccuuuaaaucau

SEQ ID NO: 1928999 - RNA, 19 nt, Homo sapiens
  misc_RNA (1)...(19): siRNA sense strand
guccagaucccacuuacaa

SEQ ID NO: 1929000 - RNA, 19 nt, Homo sapiens
  misc_RNA (1)...(19): siRNA sense strand
cgagaagcccuauccaugu

SEQ ID NO: 1929001 - RNA, 19 nt, Homo sapiens
  misc_RNA (1)...(19): siRNA sense strand
ccacacagccaguucuugu

SEQ ID NO: 1929002 - RNA, 19 nt, Homo sapiens
  misc_RNA (1)...(19): siRNA sense strand
ucaagugccaucuuccuuu

SEQ ID NO: 1929003 - RNA, 19 nt, Homo sapiens
  misc_RNA (1)...(19): siRNA sense strand
aggagaagauaguagagaa

SEQ ID NO: 1929004 - RNA, 19 nt, Homo sapiens
  misc_RNA (1)...(19): siRNA sense strand
aaagguuucaguacaagua

SEQ ID NO: 1929005 - RNA, 19 nt, Homo sapiens
  misc_RNA (1)...(19): siRNA sense strand
gaaacccuuuaucugugaa

SEQ ID NO: 1929006 - RNA, 19 nt, Homo sapiens
  misc_RNA (1)...(19): siRNA sense strand
gucaggagcugguugaaaa

SEQ ID NO: 1929007 - RNA, 19 nt, Homo sapiens
  misc_RNA (1)...(19): siRNA sense strand
ccagagugaggacaacuuu

SEQ ID NO: 1929008 - RNA, 19 nt, Homo sapiens
  misc_RNA (1)...(19): siRNA sense strand
ggaaaagggugucucuucu

SEQ ID NO: 1929009 - RNA, 19 nt, Homo sapiens
  misc_RNA (1)...(19): siRNA sense strand
ugacgugcaugcuguuaag

SEQ ID NO: 1929010 - RNA, 19 nt, Homo sapiens
  misc_RNA (1)...(19): siRNA sense strand
uaagagugagccuuuaaau

SEQ ID NO: 1929011 - RNA, 19 nt, Homo sapiens
  misc_RNA (1)...(19): siRNA sense strand
aaacucuggucccuucaug

SEQ ID NO: 1929012 - RNA, 19 nt, Homo sapiens
  misc_RNA (1)...(19): siRNA sense strand
aggaagaggccacagauga

SEQ ID NO: 1929013 - RNA, 19 nt, Homo sapiens
  misc_RNA (1)...(19): siRNA sense strand
aaagggagcagaucauagu

SEQ ID NO: 1929014 - RNA, 19 nt, Homo sapiens
  misc_RNA (1)...(19): siRNA sense strand
gaagaggccacagaugaca

SEQ ID NO: 1929015 - RNA, 19 nt, Homo sapiens
  misc_RNA (1)...(19): siRNA sense strand
cagaugacagcaaugacua

SEQ ID NO: 1929016 - RNA, 19 nt, Homo sapiens
  misc_RNA (1)...(19): siRNA sense strand
gcauucauauugggcacaa

SEQ ID NO: 1929017 - RNA, 19 nt, Homo sapiens
  misc_RNA (1)...(19): siRNA sense strand
acaaaagacaugccauuua

SEQ ID NO: 1929018 - RNA, 19 nt, Homo sapiens
  misc_RNA (1)...(19): siRNA sense strand
aaagcuaagugugaagaga

SEQ ID NO: 1929019 - RNA, 19 nt, Homo sapiens
  misc_RNA (1)...(19): siRNA sense strand
caagugccaucuuccuuuu

SEQ ID NO: 1929020 - RNA, 19 nt, Homo sapiens
  misc_RNA (1)...(19): siRNA sense strand
guccauggauaugcagaaa

SEQ ID NO: 1929021 - RNA, 19 nt, Homo sapiens
  misc_RNA (1)...(19): siRNA sense strand
gcaaugacuauggagagaa

SEQ ID NO: 1929022 - RNA, 19 nt, Homo sapiens
  misc_RNA (1)...(19): siRNA sense strand
gaagcccuauccaugugau

SEQ ID NO: 1929023 - RNA, 19 nt, Homo sapiens
  misc_RNA (1)...(19): siRNA sense strand
gaacucacacaggcgagaa

SEQ ID NO: 1929024 - RNA, 19 nt, Homo sapiens
  misc_RNA (1)...(19): siRNA sense strand
aacacacacuggagagaaa

SEQ ID NO: 1929025 - RNA, 19 nt, Homo sapiens
  misc_RNA (1)...(19): siRNA sense strand
ugugauaaauguggcaaga

SEQ ID NO: 1929026 - RNA, 19 nt, Homo sapiens
  misc_RNA (1)...(19): siRNA sense strand
caugcagauuugugauaaa

SEQ ID NO: 1929027 - RNA, 19 nt, Homo sapiens
  misc_RNA (1)...(19): siRNA sense strand
gaauggcacaagaagauag

SEQ ID NO: 1929028 - RNA, 19 nt, Homo sapiens
  misc_RNA (1)...(19): siRNA sense strand
gagaagauaguagagaaag

SEQ ID NO: 1929029 - RNA, 19 nt, Homo sapiens
  misc_RNA (1)...(19): siRNA sense strand
uaaauguggcaagaaguuu

SEQ ID NO: 1929030 - RNA, 19 nt, Homo sapiens
  misc_RNA (1)...(19): siRNA sense strand
ccaccuccagcucucuuua

SEQ ID NO: 1929031 - RNA, 19 nt, Homo sapiens
  misc_RNA (1)...(19): siRNA sense strand
ccugugaaauuugugagaa

SEQ ID NO: 1929032 - RNA, 19 nt, Homo sapiens
  misc_RNA (1)...(19): siRNA sense strand
gcaggaauggcacaagaag

SEQ ID NO: 1929033 - RNA, 19 nt, Homo sapiens
  misc_RNA (1)...(19): siRNA sense strand
ucaugaacauaucaagauc

SEQ ID NO: 1929034 - RNA, 19 nt, Homo sapiens
  misc_RNA (1)...(19): siRNA sense strand
cgaaaccuguggaaaauca

SEQ ID NO: 1929035 - RNA, 19 nt, Homo sapiens
  misc_RNA (1)...(19): siRNA sense strand
ccagugguguggcaaggau

SEQ ID NO: 1929036 - RNA, 19 nt, Homo sapiens
  misc_RNA (1)...(19): siRNA sense strand
gcagcaaggucuagcaauu

SEQ ID NO: 1929037 - RNA, 19 nt, Homo sapiens
  misc_RNA (1)...(19): siRNA sense strand
caucgugccugaaggagua

SEQ ID NO: 1929038 - RNA, 19 nt, Homo sapiens
  misc_RNA (1)...(19): siRNA sense strand
ggacugguuuccuucuuga

SEQ ID NO: 1929039 - RNA, 19 nt, Homo sapiens
  misc_RNA (1)...(19): siRNA sense strand
gacugaagcuggugacugu

SEQ ID NO: 1929040 - RNA, 19 nt, Homo sapiens
  misc_RNA (1)...(19): siRNA sense strand
acagaccaguguccaguua

SEQ ID NO: 1929041 - RNA, 19 nt, Homo sapiens
  misc_RNA (1)...(19): siRNA sense strand
gcaagugaaacacauaaug

SEQ ID NO: 1929042 - RNA, 19 nt, Homo sapiens
  misc_RNA (1)...(19): siRNA sense strand
ggaaguggcagcccugguu

SEQ ID NO: 1929043 - RNA, 19 nt, Homo sapiens
  misc_RNA (1)...(19): siRNA sense strand
guacaugcccuuuaugaag

SEQ ID NO: 1929044 - RNA, 19 nt, Homo sapiens
  misc_RNA (1)...(19): siRNA sense strand
gauguuacguggccggaau

SEQ ID NO: 1929045 - RNA, 19 nt, Homo sapiens
  misc_RNA (1)...(19): siRNA sense strand
gaguacaugcccuuuauga

SEQ ID NO: 1929046 - RNA, 19 nt, Homo sapiens
  misc_RNA (1)...(19): siRNA sense strand
uacaugcccuuuaugaaga

SEQ ID NO: 1929047 - RNA, 19 nt, Homo sapiens
  misc_RNA (1)...(19): siRNA sense strand
gcauuggcagcaccaguua

SEQ ID NO: 1929048 - RNA, 19 nt, Homo sapiens
  misc_RNA (1)...(19): siRNA sense strand
uggcaaucaugcuacauaa

SEQ ID NO: 1929049 - RNA, 19 nt, Homo sapiens
  misc_RNA (1)...(19): siRNA sense strand
uuacguggccggaaucauu

SEQ ID NO: 1929050 - RNA, 19 nt, Homo sapiens
  misc_RNA (1)...(19): siRNA sense strand
cuugaugcaugcuggcuua

SEQ ID NO: 1929051 - RNA, 19 nt, Homo sapiens
  misc_RNA (1)...(19): siRNA sense strand
gcaaucaugcuacauaagg

SEQ ID NO: 1929052 - RNA, 19 nt, Homo sapiens
  misc_RNA (1)...(19): siRNA sense strand
gagcggaaucgaaucagaa

SEQ ID NO: 1929053 - RNA, 19 nt, Homo sapiens
  misc_RNA (1)...(19): siRNA sense strand
gccgggacauuucuuuaug

SEQ ID NO: 1929054 - RNA, 19 nt, Homo sapiens
  misc_RNA (1)...(19): siRNA sense strand
ucccuuggcuguuaauuuc

SEQ ID NO: 1929055 - RNA, 19 nt, Homo sapiens
  misc_RNA (1)...(19): siRNA sense strand
caguaggacaccagcauua

SEQ ID NO: 1929056 - RNA, 19 nt, Homo sapiens
  misc_RNA (1)...(19): siRNA sense strand
gcacagccacgaccacaca

SEQ ID NO: 1929057 - RNA, 19 nt, Homo sapiens
  misc_RNA (1)...(19): siRNA sense strand
ccaagcaagugaaacacau

SEQ ID NO: 1929058 - RNA, 19 nt, Homo sapiens
  misc_RNA (1)...(19): siRNA sense strand
ggaaucgaaucagaaagca

SEQ ID NO: 1929059 - RNA, 19 nt, Homo sapiens
  misc_RNA (1)...(19): siRNA sense strand
caagcaagugaaacacaua

SEQ ID NO: 1929060 - RNA, 19 nt, Homo sapiens
  misc_RNA (1)...(19): siRNA sense strand
aggaguacaugcccuuuau

SEQ ID NO: 1929061 - RNA, 19 nt, Homo sapiens
  misc_RNA (1)...(19): siRNA sense strand
gaugcaugcuggcuuagag

SEQ ID NO: 1929062 - RNA, 19 nt, Homo sapiens
  misc_RNA (1)...(19): siRNA sense strand
gaauagggcacagccacaa

SEQ ID NO: 1929063 - RNA, 19 nt, Homo sapiens
  misc_RNA (1)...(19): siRNA sense strand
gagcagcagcaucuacuuc

SEQ ID NO: 1929064 - RNA, 19 nt, Homo sapiens
  misc_RNA (1)...(19): siRNA sense strand
cuauguuggugggauguua

SEQ ID NO: 1929065 - RNA, 19 nt, Homo sapiens
  misc_RNA (1)...(19): siRNA sense strand
guggcaaucaugcuacaua

SEQ ID NO: 1929066 - RNA, 19 nt, Homo sapiens
  misc_RNA (1)...(19): siRNA sense strand
ccaccaagcaagugaaaca

SEQ ID NO: 1929067 - RNA, 19 nt, Homo sapiens
  misc_RNA (1)...(19): siRNA sense strand
gcuuagagcggaaucgaau

SEQ ID NO: 1929068 - RNA, 19 nt, Homo sapiens
  misc_RNA (1)...(19): siRNA sense strand
cagcugaugguguugcuuu

SEQ ID NO: 1929069 - RNA, 19 nt, Homo sapiens
  misc_RNA (1)...(19): siRNA sense strand
gaguaagagcaguaaagaa

SEQ ID NO: 1929070 - RNA, 19 nt, Homo sapiens
  misc_RNA (1)...(19): siRNA sense strand
ccaguuaauuguguuugug

SEQ ID NO: 1929071 - RNA, 19 nt, Homo sapiens
  misc_RNA (1)...(19): siRNA sense strand
ccauuagccugcugucucu

SEQ ID NO: 1929072 - RNA, 19 nt, Homo sapiens
  misc_RNA (1)...(19): siRNA sense strand
acagcugcaugccuauauu

SEQ ID NO: 1929073 - RNA, 19 nt, Homo sapiens
  misc_RNA (1)...(19): siRNA sense strand
guaacucccaugugcauuc

SEQ ID NO: 1929074 - RNA, 19 nt, Homo sapiens
  misc_RNA (1)...(19): siRNA sense strand
ugaguaagagcaguaaaga

SEQ ID NO: 1929075 - RNA, 19 nt, Homo sapiens
  misc_RNA (1)...(19): siRNA sense strand
gcagucaucgugccugaag

SEQ ID NO: 1929076 - RNA, 19 nt, Homo sapiens
  misc_RNA (1)...(19): siRNA sense strand
aguaagagcaguaaagaag

SEQ ID NO: 1929077 - RNA, 19 nt, Homo sapiens
  misc_RNA (1)...(19): siRNA sense strand
agaccaguguccaguuaau

SEQ ID NO: 1929078 - RNA, 19 nt, Homo sapiens
  misc_RNA (1)...(19): siRNA sense strand
aaaaucaguuguccaugaa

SEQ ID NO: 1929079 - RNA, 19 nt, Homo sapiens
  misc_RNA (1)...(19): siRNA sense strand
guccauggugacauacuua

SEQ ID NO: 1929080 - RNA, 19 nt, Homo sapiens
  misc_RNA (1)...(19): siRNA sense strand
gggcuucguuuucauguug

SEQ ID NO: 1929081 - RNA, 19 nt, Homo sapiens
  misc_RNA (1)...(19): siRNA sense strand
gcaugccuauauugguguu

SEQ ID NO: 1929082 - RNA, 19 nt, Homo sapiens
  misc_RNA (1)...(19): siRNA sense strand
gaccaguguccaguuaauu

SEQ ID NO: 1929083 - RNA, 19 nt, Homo sapiens
  misc_RNA (1)...(19): siRNA sense strand
uggacugguuuccuucuug

SEQ ID NO: 1929084 - RNA, 19 nt, Homo sapiens
  misc_RNA (1)...(19): siRNA sense strand
gugacauacuuaggacuga

SEQ ID NO: 1929085 - RNA, 19 nt, Homo sapiens
  misc_RNA (1)...(19): siRNA sense strand
aucauucccuuggcuguua

SEQ ID NO: 1929086 - RNA, 19 nt, Homo sapiens
  misc_RNA (1)...(19): siRNA sense strand
aaucaguuguccaugaaca

SEQ ID NO: 1929087 - RNA, 19 nt, Homo sapiens
  misc_RNA (1)...(19): siRNA sense strand
ggccuucucuguggaacug

SEQ ID NO: 1929088 - RNA, 19 nt, Homo sapiens
  misc_RNA (1)...(19): siRNA sense strand
cagcaccaguuauguccau

SEQ ID NO: 1929089 - RNA, 19 nt, Homo sapiens
  misc_RNA (1)...(19): siRNA sense strand
cagcaaggucuagcaauuc

SEQ ID NO: 1929090 - RNA, 19 nt, Homo sapiens
  misc_RNA (1)...(19): siRNA sense strand
ggaguacaugcccuuuaug

SEQ ID NO: 1929091 - RNA, 19 nt, Homo sapiens
  misc_RNA (1)...(19): siRNA sense strand
agagcggaaucgaaucaga

SEQ ID NO: 1929092 - RNA, 19 nt, Homo sapiens
  misc_RNA (1)...(19): siRNA sense strand
caaggucuagcaauuccaa

SEQ ID NO: 1929093 - RNA, 19 nt, Homo sapiens
  misc_RNA (1)...(19): siRNA sense strand
aagcaagugaaacacauaa

SEQ ID NO: 1929094 - RNA, 19 nt, Homo sapiens
  misc_RNA (1)...(19): siRNA sense strand
ggaaaacaccaccaagcaa

SEQ ID NO: 1929095 - RNA, 19 nt, Homo sapiens
  misc_RNA (1)...(19): siRNA sense strand
cauggugacauacuuagga

SEQ ID NO: 1929096 - RNA, 19 nt, Homo sapiens
  misc_RNA (1)...(19): siRNA sense strand
cuacuucacagaccagugu

SEQ ID NO: 1929097 - RNA, 19 nt, Homo sapiens
  misc_RNA (1)...(19): siRNA sense strand
ccucucauccugucaguag

SEQ ID NO: 1929098 - RNA, 19 nt, Homo sapiens
  misc_RNA (1)...(19): siRNA sense strand
cagcugcaugccuauauug

SEQ ID NO: 1929099 - RNA, 19 nt, Homo sapiens
  misc_RNA (1)...(19): siRNA sense strand
ccagaagcagcaaggucua

SEQ ID NO: 1929100 - RNA, 19 nt, Homo sapiens
  misc_RNA (1)...(19): siRNA sense strand
uaacucccaugugcauucu

SEQ ID NO: 1929101 - RNA, 19 nt, Homo sapiens
  misc_RNA (1)...(19): siRNA sense strand
ucauucccuuggcuguuaa

SEQ ID NO: 1929102 - RNA, 19 nt, Homo sapiens
  misc_RNA (1)...(19): siRNA sense strand
ggagcagcagcaucuacuu

SEQ ID NO: 1929103 - RNA, 19 nt, Homo sapiens
  misc_RNA (1)...(19): siRNA sense strand
gaagcagcaaggucuagca

SEQ ID NO: 1929104 - RNA, 19 nt, Homo sapiens
  misc_RNA (1)...(19): siRNA sense strand
gauugcaucagacaaagca

SEQ ID NO: 1929105 - RNA, 19 nt, Homo sapiens
  misc_RNA (1)...(19): siRNA sense strand
ucaguaggacaccagcauu

SEQ ID NO: 1929106 - RNA, 19 nt, Homo sapiens
  misc_RNA (1)...(19): siRNA sense strand
gguucuggguugccucauc

SEQ ID NO: 1929107 - RNA, 19 nt, Homo sapiens
  misc_RNA (1)...(19): siRNA sense strand
auaaggcaccagcugcuuu

SEQ ID NO: 1929108 - RNA, 19 nt, Homo sapiens
  misc_RNA (1)...(19): siRNA sense strand
cugaagcuggugacuguuu

SEQ ID NO: 1929109 - RNA, 19 nt, Homo sapiens
  misc_RNA (1)...(19): siRNA sense strand
gcauucuacugacgaucca

SEQ ID NO: 1929110 - RNA, 19 nt, Homo sapiens
  misc_RNA (1)...(19): siRNA sense strand
gaaagaaacuuaggcagua

SEQ ID NO: 1929111 - RNA, 19 nt, Homo sapiens
  misc_RNA (1)...(19): siRNA sense strand
caagagggauugcuaaaua

SEQ ID NO: 1929112 - RNA, 19 nt, Homo sapiens
  misc_RNA (1)...(19): siRNA sense strand
gcaguacccugaaguaaua

SEQ ID NO: 1929113 - RNA, 19 nt, Homo sapiens
  misc_RNA (1)...(19): siRNA sense strand
gaaaugcaguggugucuuu

SEQ ID NO: 1929114 - RNA, 19 nt, Homo sapiens
  misc_RNA (1)...(19): siRNA sense strand
ccaaguaacucgagauauu

SEQ ID NO: 1929115 - RNA, 19 nt, Homo sapiens
  misc_RNA (1)...(19): siRNA sense strand
gaagaagaguaacagauga

SEQ ID NO: 1929116 - RNA, 19 nt, Homo sapiens
  misc_RNA (1)...(19): siRNA sense strand
gaaagaagaggaugucauu

SEQ ID NO: 1929117 - RNA, 19 nt, Homo sapiens
  misc_RNA (1)...(19): siRNA sense strand
ggaagaugaugaagaagaa

SEQ ID NO: 1929118 - RNA, 19 nt, Homo sapiens
  misc_RNA (1)...(19): siRNA sense strand
ggaggaaucugugaacaaa

SEQ ID NO: 1929119 - RNA, 19 nt, Homo sapiens
  misc_RNA (1)...(19): siRNA sense strand
uaaaguaucucagcagaaa

SEQ ID NO: 1929120 - RNA, 19 nt, Homo sapiens
  misc_RNA (1)...(19): siRNA sense strand
ugacaacugugaaacauuu

SEQ ID NO: 1929121 - RNA, 19 nt, Homo sapiens
  misc_RNA (1)...(19): siRNA sense strand
agaagaagaugaagaagaa

SEQ ID NO: 1929122 - RNA, 19 nt, Homo sapiens
  misc_RNA (1)...(19): siRNA sense strand
uaaagaagccuaaugaaga

SEQ ID NO: 1929123 - RNA, 19 nt, Homo sapiens
  misc_RNA (1)...(19): siRNA sense strand
gcaguuagcaauaauguaa

SEQ ID NO: 1929124 - RNA, 19 nt, Homo sapiens
  misc_RNA (1)...(19): siRNA sense strand
aaacugagcuuacugaaag

SEQ ID NO: 1929125 - RNA, 19 nt, Homo sapiens
  misc_RNA (1)...(19): siRNA sense strand
gaagaaauguuugagacuu

SEQ ID NO: 1929126 - RNA, 19 nt, Homo sapiens
  misc_RNA (1)...(19): siRNA sense strand
gaacuggcaugcagcaaga

SEQ ID NO: 1929127 - RNA, 19 nt, Homo sapiens
  misc_RNA (1)...(19): siRNA sense strand
cagcagaaauggaauaaug

SEQ ID NO: 1929128 - RNA, 19 nt, Homo sapiens
  misc_RNA (1)...(19): siRNA sense strand
gggaggacuugguauauuu

SEQ ID NO: 1929129 - RNA, 19 nt, Homo sapiens
  misc_RNA (1)...(19): siRNA sense strand
gcaagaguguggucaguga

SEQ ID NO: 1929130 - RNA, 19 nt, Homo sapiens
  misc_RNA (1)...(19): siRNA sense strand
uaacgcagaugcaaaguug

SEQ ID NO: 1929131 - RNA, 19 nt, Homo sapiens
  misc_RNA (1)...(19): siRNA sense strand
gcaaaugggugcacguugu

SEQ ID NO: 1929132 - RNA, 19 nt, Homo sapiens
  misc_RNA (1)...(19): siRNA sense strand
gcagagagagacaagaaua

SEQ ID NO: 1929133 - RNA, 19 nt, Homo sapiens
  misc_RNA (1)...(19): siRNA sense strand
ggacagaaagcaacugaaa

SEQ ID NO: 1929134 - RNA, 19 nt, Homo sapiens
  misc_RNA (1)...(19): siRNA sense strand
aaacaaagaccuccagaaa

SEQ ID NO: 1929135 - RNA, 19 nt, Homo sapiens
  misc_RNA (1)...(19): siRNA sense strand
ggagcaugauggagaauuu

SEQ ID NO: 1929136 - RNA, 19 nt, Homo sapiens
  misc_RNA (1)...(19): siRNA sense strand
aaggagaaguagcauauua

SEQ ID NO: 1929137 - RNA, 19 nt, Homo sapiens
  misc_RNA (1)...(19): siRNA sense strand
gccauuaccucuugcguuu

SEQ ID NO: 1929138 - RNA, 19 nt, Homo sapiens
  misc_RNA (1)...(19): siRNA sense strand
uuaagaagccuauggauuu

SEQ ID NO: 1929139 - RNA, 19 nt, Homo sapiens
  misc_RNA (1)...(19): siRNA sense strand
gcagcgaagauuagaauua

SEQ ID NO: 1929140 - RNA, 19 nt, Homo sapiens
  misc_RNA (1)...(19): siRNA sense strand
ucaagaagcuccucuagca

SEQ ID NO: 1929141 - RNA, 19 nt, Homo sapiens
  misc_RNA (1)...(19): siRNA sense strand
gcuauuacaugguauuuca

SEQ ID NO: 1929142 - RNA, 19 nt, Homo sapiens
  misc_RNA (1)...(19): siRNA sense strand
ggagaguggugaaggacua

SEQ ID NO: 1929143 - RNA, 19 nt, Homo sapiens
  misc_RNA (1)...(19): siRNA sense strand
ucagaauccuguuggcuua

SEQ ID NO: 1929144 - RNA, 19 nt, Homo sapiens
  misc_RNA (1)...(19): siRNA sense strand
gaagaagaagaucaaagua

SEQ ID NO: 1929145 - RNA, 19 nt, Homo sapiens
  misc_RNA (1)...(19): siRNA sense strand
gaagaugauucugauauag

SEQ ID NO: 1929146 - RNA, 19 nt, Homo sapiens
  misc_RNA (1)...(19): siRNA sense strand
gcaagaagguaacuuuaac

SEQ ID NO: 1929147 - RNA, 19 nt, Homo sapiens
  misc_RNA (1)...(19): siRNA sense strand
aaagggagauaaugaagaa

SEQ ID NO: 1929148 - RNA, 19 nt, Homo sapiens
  misc_RNA (1)...(19): siRNA sense strand
cgacaacacaugaugcuua

SEQ ID NO: 1929149 - RNA, 19 nt, Homo sapiens
  misc_RNA (1)...(19): siRNA sense strand
gauaagaaaccaaggaaga

SEQ ID NO: 1929150 - RNA, 19 nt, Homo sapiens
  misc_RNA (1)...(19): siRNA sense strand
uaagaugccuccugaguca

SEQ ID NO: 1929151 - RNA, 19 nt, Homo sapiens
  misc_RNA (1)...(19): siRNA sense strand
agaggaagaugaugaagaa

SEQ ID NO: 1929152 - RNA, 19 nt, Homo sapiens
  misc_RNA (1)...(19): siRNA sense strand
aaacaagagucaucgaaga

SEQ ID NO: 1929153 - RNA, 19 nt, Homo sapiens
  misc_RNA (1)...(19): siRNA sense strand
gaagaaaugcaguuugguu

SEQ ID NO: 1929154 - RNA, 19 nt, Homo sapiens
  misc_RNA (1)...(19): siRNA sense strand
ggugaaagguggaguaucu

SEQ ID NO: 1929155 - RNA, 19 nt, Homo sapiens
  misc_RNA (1)...(19): siRNA sense strand
gaaaugagaagacaacaag

SEQ ID NO: 1929156 - RNA, 19 nt, Homo sapiens
  misc_RNA (1)...(19): siRNA sense strand
acugcaagcucaagaaaua

SEQ ID NO: 1929157 - RNA, 19 nt, Homo sapiens
  misc_RNA (1)...(19): siRNA sense strand
gaacgugaacugcguauuc

SEQ ID NO: 1929158 - RNA, 19 nt, Homo sapiens
  misc_RNA (1)...(19): siRNA sense strand
gauccaaacgggaacaaua

SEQ ID NO: 1929159 - RNA, 19 nt, Homo sapiens
  misc_RNA (1)...(19): siRNA sense strand
gagaagggcauuaucagaa

SEQ ID NO: 1929160 - RNA, 19 nt, Homo sapiens
  misc_RNA (1)...(19): siRNA sense strand
ggaugaagaugaugaggau

SEQ ID NO: 1929161 - RNA, 19 nt, Homo sapiens
  misc_RNA (1)...(19): siRNA sense strand
ucacagcagcuuccauuua

SEQ ID NO: 1929162 - RNA, 19 nt, Homo sapiens
  misc_RNA (1)...(19): siRNA sense strand
ccuguaaacuugaaacuug

SEQ ID NO: 1929163 - RNA, 19 nt, Homo sapiens
  misc_RNA (1)...(19): siRNA sense strand
ugacugaaauggaaacuca

SEQ ID NO: 1929164 - RNA, 19 nt, Homo sapiens
  misc_RNA (1)...(19): siRNA sense strand
ccaaggaccuagcucuuug

SEQ ID NO: 1929165 - RNA, 19 nt, Homo sapiens
  misc_RNA (1)...(19): siRNA sense strand
ugucauaccuacugccaua

SEQ ID NO: 1929166 - RNA, 19 nt, Homo sapiens
  misc_RNA (1)...(19): siRNA sense strand
ucagugaaaucgacaagaa

SEQ ID NO: 1929167 - RNA, 19 nt, Homo sapiens
  misc_RNA (1)...(19): siRNA sense strand
caacacaugaugcuuauga

SEQ ID NO: 1929168 - RNA, 19 nt, Homo sapiens
  misc_RNA (1)...(19): siRNA sense strand
ccaaauccauucuugacaa

SEQ ID NO: 1929169 - RNA, 19 nt, Homo sapiens
  misc_RNA (1)...(19): siRNA sense strand
caacagugauagugauuca

SEQ ID NO: 1929170 - RNA, 19 nt, Homo sapiens
  misc_RNA (1)...(19): siRNA sense strand
gaggaaaacacuucuauua

SEQ ID NO: 1929171 - RNA, 19 nt, Homo sapiens
  misc_RNA (1)...(19): siRNA sense strand
caauguugcuucaaguaaa

SEQ ID NO: 1929172 - RNA, 19 nt, Homo sapiens
  misc_RNA (1)...(19): siRNA sense strand
acacaaaucuauuccuuca

SEQ ID NO: 1929173 - RNA, 19 nt, Homo sapiens
  misc_RNA (1)...(19): siRNA sense strand
cagcaugggugaaguacaa

SEQ ID NO: 1929174 - RNA, 19 nt, Homo sapiens
  misc_RNA (1)...(19): siRNA sense strand
gaacuaaagaagccuaaug

SEQ ID NO: 1929175 - RNA, 19 nt, Homo sapiens
  misc_RNA (1)...(19): siRNA sense strand
ggaagaugaugaagaugau

SEQ ID NO: 1929176 - RNA, 19 nt, Homo sapiens
  misc_RNA (1)...(19): siRNA sense strand
caaauggaguuauucaaag

SEQ ID NO: 1929177 - RNA, 19 nt, Homo sapiens
  misc_RNA (1)...(19): siRNA sense strand
gaagaagaucaaaguauug

SEQ ID NO: 1929178 - RNA, 19 nt, Homo sapiens
  misc_RNA (1)...(19): siRNA sense strand
caaaugcacuuuuagguaa

SEQ ID NO: 1929179 - RNA, 19 nt, Homo sapiens
  misc_RNA (1)...(19): siRNA sense strand
gacccaagauuacaacaau

SEQ ID NO: 1929180 - RNA, 19 nt, Homo sapiens
  misc_RNA (1)...(19): siRNA sense strand
uaaaacagcucuuggagaa

SEQ ID NO: 1929181 - RNA, 19 nt, Homo sapiens
  misc_RNA (1)...(19): siRNA sense strand
gaacuucgagcucagcaaa

SEQ ID NO: 1929182 - RNA, 19 nt, Homo sapiens
  misc_RNA (1)...(19): siRNA sense strand
gcaagcagcacaaauaaag

SEQ ID NO: 1929183 - RNA, 19 nt, Homo sapiens
  misc_RNA (1)...(19): siRNA sense strand
ugaggaagaugaugaagau

SEQ ID NO: 1929184 - RNA, 19 nt, Homo sapiens
  misc_RNA (1)...(19): siRNA sense strand
ccaaauggaguuauucaaa

SEQ ID NO: 1929185 - RNA, 19 nt, Homo sapiens
  misc_RNA (1)...(19): siRNA sense strand
cacagcagcuuccauuuau

SEQ ID NO: 1929186 - RNA, 19 nt, Homo sapiens
  misc_RNA (1)...(19): siRNA sense strand
aaagaagaauugaggaaga

SEQ ID NO: 1929187 - RNA, 19 nt, Homo sapiens
  misc_RNA (1)...(19): siRNA sense strand
acaaaucuauuccuucaga

SEQ ID NO: 1929188 - RNA, 19 nt, Homo sapiens
  misc_RNA (1)...(19): siRNA sense strand
ggaugaaggugaccaagca

SEQ ID NO: 1929189 - RNA, 19 nt, Homo sapiens
  misc_RNA (1)...(19): siRNA sense strand
gaggagacagugauuauga

SEQ ID NO: 1929190 - RNA, 19 nt, Homo sapiens
  misc_RNA (1)...(19): siRNA sense strand
gcauugaucugggagaaga

SEQ ID NO: 1929191 - RNA, 19 nt, Homo sapiens
  misc_RNA (1)...(19): siRNA sense strand
ggaaaguucuagcaacagu

SEQ ID NO: 1929192 - RNA, 19 nt, Homo sapiens
  misc_RNA (1)...(19): siRNA sense strand
gcuuugaugugaauauuga

SEQ ID NO: 1929193 - RNA, 19 nt, Homo sapiens
  misc_RNA (1)...(19): siRNA sense strand
gacaacacaugaugcuuau

SEQ ID NO: 1929194 - RNA, 19 nt, Homo sapiens
  misc_RNA (1)...(19): siRNA sense strand
caaauccauucuugacaaa

SEQ ID NO: 1929195 - RNA, 19 nt, Homo sapiens
  misc_RNA (1)...(19): siRNA sense strand
ugugaaaccuuuaucuuug

SEQ ID NO: 1929196 - RNA, 19 nt, Homo sapiens
  misc_RNA (1)...(19): siRNA sense strand
uaacaaccaggugcuauua

SEQ ID NO: 1929197 - RNA, 19 nt, Homo sapiens
  misc_RNA (1)...(19): siRNA sense strand
ggauguugcuauuauugaa

SEQ ID NO: 1929198 - RNA, 19 nt, Homo sapiens
  misc_RNA (1)...(19): siRNA sense strand
guaauucauucuugacuuc

SEQ ID NO: 1929199 - RNA, 19 nt, Homo sapiens
  misc_RNA (1)...(19): siRNA sense strand
agaaggaaaugguaauuca

SEQ ID NO: 1929200 - RNA, 19 nt, Homo sapiens
  misc_RNA (1)...(19): siRNA sense strand
gagaaacgaauaaaggaaa

SEQ ID NO: 1929201 - RNA, 19 nt, Homo sapiens
  misc_RNA (1)...(19): siRNA sense strand
agaagaagaugaugaugau

SEQ ID NO: 1929202 - RNA, 19 nt, Homo sapiens
  misc_RNA (1)...(19): siRNA sense strand
guaaagauucugaagauuc

SEQ ID NO: 1929203 - RNA, 19 nt, Homo sapiens
  misc_RNA (1)...(19): siRNA sense strand
gaaacuuguuccugguuau

SEQ ID NO: 1929204 - RNA, 19 nt, Homo sapiens
  misc_RNA (1)...(19): siRNA sense strand
ugaaacuuguuccugguua

SEQ ID NO: 1929205 - RNA, 19 nt, Homo sapiens
  misc_RNA (1)...(19): siRNA sense strand
gaagaaagcaauggaaagu

SEQ ID NO: 1929206 - RNA, 19 nt, Homo sapiens
  misc_RNA (1)...(19): siRNA sense strand
gcaaguggucaaacucuaa

SEQ ID NO: 1929207 - RNA, 19 nt, Homo sapiens
  misc_RNA (1)...(19): siRNA sense strand
gaagaacaagcaauggaaa

SEQ ID NO: 1929208 - RNA, 19 nt, Homo sapiens
  misc_RNA (1)...(19): siRNA sense strand
gagaauacagcaaaucaga

SEQ ID NO: 1929209 - RNA, 19 nt, Homo sapiens
  misc_RNA (1)...(19): siRNA sense strand
gaaagggagauaaugaaga

SEQ ID NO: 1929210 - RNA, 19 nt, Homo sapiens
  misc_RNA (1)...(19): siRNA sense strand
caaaguagcugaacuaaau

SEQ ID NO: 1929211 - RNA, 19 nt, Homo sapiens
  misc_RNA (1)...(19): siRNA sense strand
gaugaaaccuaucagaaua

SEQ ID NO: 1929212 - RNA, 19 nt, Homo sapiens
  misc_RNA (1)...(19): siRNA sense strand
gaacuagacucaauauuag

SEQ ID NO: 1929213 - RNA, 19 nt, Homo sapiens
  misc_RNA (1)...(19): siRNA sense strand
aaacaaaggugguuacauu

SEQ ID NO: 1929214 - RNA, 19 nt, Homo sapiens
  misc_RNA (1)...(19): siRNA sense strand
gcacagaacuagacucaau

SEQ ID NO: 1929215 - RNA, 19 nt, Homo sapiens
  misc_RNA (1)...(19): siRNA sense strand
uuaaugagcugcagaguaa

SEQ ID NO: 1929216 - RNA, 19 nt, Homo sapiens
  misc_RNA (1)...(19): siRNA sense strand
gagaaaggcuugacaucuu

SEQ ID NO: 1929217 - RNA, 19 nt, Homo sapiens
  misc_RNA (1)...(19): siRNA sense strand
caacaugacucucccagaa

SEQ ID NO: 1929218 - RNA, 19 nt, Homo sapiens
  misc_RNA (1)...(19): siRNA sense strand
gaacaaggagaagaaauua

SEQ ID NO: 1929219 - RNA, 19 nt, Homo sapiens
  misc_RNA (1)...(19): siRNA sense strand
caccagagaugaaacauuu

SEQ ID NO: 1929220 - RNA, 19 nt, Homo sapiens
  misc_RNA (1)...(19): siRNA sense strand
ccaaagaucagauugcuua

SEQ ID NO: 1929221 - RNA, 19 nt, Homo sapiens
  misc_RNA (1)...(19): siRNA sense strand
ggaacaggcucaugcuaaa

SEQ ID NO: 1929222 - RNA, 19 nt, Homo sapiens
  misc_RNA (1)...(19): siRNA sense strand
gcaaacacaccaaguagua

SEQ ID NO: 1929223 - RNA, 19 nt, Homo sapiens
  misc_RNA (1)...(19): siRNA sense strand
aaacagcuguccacaagua

SEQ ID NO: 1929224 - RNA, 19 nt, Homo sapiens
  misc_RNA (1)...(19): siRNA sense strand
cgaaauagacguucuuaaa

SEQ ID NO: 1929225 - RNA, 19 nt, Homo sapiens
  misc_RNA (1)...(19): siRNA sense strand
caaagagaauuccaaauca

SEQ ID NO: 1929226 - RNA, 19 nt, Homo sapiens
  misc_RNA (1)...(19): siRNA sense strand
gagcgaauguuuaaggaaa

SEQ ID NO: 1929227 - RNA, 19 nt, Homo sapiens
  misc_RNA (1)...(19): siRNA sense strand
gaaaggucauccucaagaa

SEQ ID NO: 1929228 - RNA, 19 nt, Homo sapiens
  misc_RNA (1)...(19): siRNA sense strand
ccacauacuuucacugauu

SEQ ID NO: 1929229 - RNA, 19 nt, Homo sapiens
  misc_RNA (1)...(19): siRNA sense strand
gagaaugaaucgaaacaug

SEQ ID NO: 1929230 - RNA, 19 nt, Homo sapiens
  misc_RNA (1)...(19): siRNA sense strand
gaagaugaacccaaauauu

SEQ ID NO: 1929231 - RNA, 19 nt, Homo sapiens
  misc_RNA (1)...(19): siRNA sense strand
ugaaguaacugccacagaa

SEQ ID NO: 1929232 - RNA, 19 nt, Homo sapiens
  misc_RNA (1)...(19): siRNA sense strand
gaaccucucucuuaaguac

SEQ ID NO: 1929233 - RNA, 19 nt, Homo sapiens
  misc_RNA (1)...(19): siRNA sense strand
agaaugaacugaagaugaa

SEQ ID NO: 1929234 - RNA, 19 nt, Homo sapiens
  misc_RNA (1)...(19): siRNA sense strand
guaaacagguaccauacaa

SEQ ID NO: 1929235 - RNA, 19 nt, Homo sapiens
  misc_RNA (1)...(19): siRNA sense strand
gaaacugauuccuguauuc

SEQ ID NO: 1929236 - RNA, 19 nt, Homo sapiens
  misc_RNA (1)...(19): siRNA sense strand
gaagaggagucugcugaaa

SEQ ID NO: 1929237 - RNA, 19 nt, Homo sapiens
  misc_RNA (1)...(19): siRNA sense strand
gaacaggaacuucaacaga

SEQ ID NO: 1929238 - RNA, 19 nt, Homo sapiens
  misc_RNA (1)...(19): siRNA sense strand
aaacaucucuacuauggaa

SEQ ID NO: 1929239 - RNA, 19 nt, Homo sapiens
  misc_RNA (1)...(19): siRNA sense strand
cagaagaacauguugauaa

SEQ ID NO: 1929240 - RNA, 19 nt, Homo sapiens
  misc_RNA (1)...(19): siRNA sense strand
gaaaugagacaugcacaaa

SEQ ID NO: 1929241 - RNA, 19 nt, Homo sapiens
  misc_RNA (1)...(19): siRNA sense strand
gaaaacagcuguccacaag

SEQ ID NO: 1929242 - RNA, 19 nt, Homo sapiens
  misc_RNA (1)...(19): siRNA sense strand
ugaaugcaccagaguauua

SEQ ID NO: 1929243 - RNA, 19 nt, Homo sapiens
  misc_RNA (1)...(19): siRNA sense strand
uagcugaacuaaaucguaa

SEQ ID NO: 1929244 - RNA, 19 nt, Homo sapiens
  misc_RNA (1)...(19): siRNA sense strand
ucaaggauaucaacaggaa

SEQ ID NO: 1929245 - RNA, 19 nt, Homo sapiens
  misc_RNA (1)...(19): siRNA sense strand
gaucuggagcgacaaguua

SEQ ID NO: 1929246 - RNA, 19 nt, Homo sapiens
  misc_RNA (1)...(19): siRNA sense strand
uuacagaucucaacuuagu

SEQ ID NO: 1929247 - RNA, 19 nt, Homo sapiens
  misc_RNA (1)...(19): siRNA sense strand
ugaauuagacgucaagaaa

SEQ ID NO: 1929248 - RNA, 19 nt, Homo sapiens
  misc_RNA (1)...(19): siRNA sense strand
gggcaaagaugaagaugca

SEQ ID NO: 1929249 - RNA, 19 nt, Homo sapiens
  misc_RNA (1)...(19): siRNA sense strand
ggauaaaccagcucacaaa

SEQ ID NO: 1929250 - RNA, 19 nt, Homo sapiens
  misc_RNA (1)...(19): siRNA sense strand
caacagauaauacagcaaa

SEQ ID NO: 1929251 - RNA, 19 nt, Homo sapiens
  misc_RNA (1)...(19): siRNA sense strand
gaaaucagucgucugcaaa

SEQ ID NO: 1929252 - RNA, 19 nt, Homo sapiens
  misc_RNA (1)...(19): siRNA sense strand
ucauauagcccauucauug

SEQ ID NO: 1929253 - RNA, 19 nt, Homo sapiens
  misc_RNA (1)...(19): siRNA sense strand
gcacucaaguaaaggaaau

SEQ ID NO: 1929254 - RNA, 19 nt, Homo sapiens
  misc_RNA (1)...(19): siRNA sense strand
gaaauggaagggauucuga

SEQ ID NO: 1929255 - RNA, 19 nt, Homo sapiens
  misc_RNA (1)...(19): siRNA sense strand
ugacaucuuccauugauua

SEQ ID NO: 1929256 - RNA, 19 nt, Homo sapiens
  misc_RNA (1)...(19): siRNA sense strand
gagcuagaaggauuaauuu

SEQ ID NO: 1929257 - RNA, 19 nt, Homo sapiens
  misc_RNA (1)...(19): siRNA sense strand
aaacuggcaugcuugcuaa

SEQ ID NO: 1929258 - RNA, 19 nt, Homo sapiens
  misc_RNA (1)...(19): siRNA sense strand
caucuuccauugauuauuc

SEQ ID NO: 1929259 - RNA, 19 nt, Homo sapiens
  misc_RNA (1)...(19): siRNA sense strand
aauagcaacucaagaggua

SEQ ID NO: 1929260 - RNA, 19 nt, Homo sapiens
  misc_RNA (1)...(19): siRNA sense strand
gaaauagacguucuuaaac

SEQ ID NO: 1929261 - RNA, 19 nt, Homo sapiens
  misc_RNA (1)...(19): siRNA sense strand
caucaagcuuauugucaua

SEQ ID NO: 1929262 - RNA, 19 nt, Homo sapiens
  misc_RNA (1)...(19): siRNA sense strand
agaacuaacugaugacgaa

SEQ ID NO: 1929263 - RNA, 19 nt, Homo sapiens
  misc_RNA (1)...(19): siRNA sense strand
ccaaagagaauuccaaauc

SEQ ID NO: 1929264 - RNA, 19 nt, Homo sapiens
  misc_RNA (1)...(19): siRNA sense strand
agaugaagaugcaaagaaa

SEQ ID NO: 1929265 - RNA, 19 nt, Homo sapiens
  misc_RNA (1)...(19): siRNA sense strand
ugagguagcuuccuuaaaa

SEQ ID NO: 1929266 - RNA, 19 nt, Homo sapiens
  misc_RNA (1)...(19): siRNA sense strand
acaaguaacugaaguaacu

SEQ ID NO: 1929267 - RNA, 19 nt, Homo sapiens
  misc_RNA (1)...(19): siRNA sense strand
gaaaguggccgaaagaaaa

SEQ ID NO: 1929268 - RNA, 19 nt, Homo sapiens
  misc_RNA (1)...(19): siRNA sense strand
gaaaugacugagaaugaaa

SEQ ID NO: 1929269 - RNA, 19 nt, Homo sapiens
  misc_RNA (1)...(19): siRNA sense strand
acaggaacuucaacagaua

SEQ ID NO: 1929270 - RNA, 19 nt, Homo sapiens
  misc_RNA (1)...(19): siRNA sense strand
ugagaagggucaaggaaga

SEQ ID NO: 1929271 - RNA, 19 nt, Homo sapiens
  misc_RNA (1)...(19): siRNA sense strand
gaauuaaagcccuagagaa

SEQ ID NO: 1929272 - RNA, 19 nt, Homo sapiens
  misc_RNA (1)...(19): siRNA sense strand
gaagaaacacauaaacaag

SEQ ID NO: 1929273 - RNA, 19 nt, Homo sapiens
  misc_RNA (1)...(19): siRNA sense strand
guaacacaguggaagauau

SEQ ID NO: 1929274 - RNA, 19 nt, Homo sapiens
  misc_RNA (1)...(19): siRNA sense strand
ggagaaaaguugaagcaaa

SEQ ID NO: 1929275 - RNA, 19 nt, Homo sapiens
  misc_RNA (1)...(19): siRNA sense strand
uggagaggcuucagaaaga

SEQ ID NO: 1929276 - RNA, 19 nt, Homo sapiens
  misc_RNA (1)...(19): siRNA sense strand
gcaaagaugaagaugcaaa

SEQ ID NO: 1929277 - RNA, 19 nt, Homo sapiens
  misc_RNA (1)...(19): siRNA sense strand
agaaaugacugagaaugaa

SEQ ID NO: 1929278 - RNA, 19 nt, Homo sapiens
  misc_RNA (1)...(19): siRNA sense strand
gaaauagagaaacuccuuu

SEQ ID NO: 1929279 - RNA, 19 nt, Homo sapiens
  misc_RNA (1)...(19): siRNA sense strand
cagaaagacagaagaauga

SEQ ID NO: 1929280 - RNA, 19 nt, Homo sapiens
  misc_RNA (1)...(19): siRNA sense strand
caaggaagcccaucagauc

SEQ ID NO: 1929281 - RNA, 19 nt, Homo sapiens
  misc_RNA (1)...(19): siRNA sense strand
aagagaagauaucccaauu

SEQ ID NO: 1929282 - RNA, 19 nt, Homo sapiens
  misc_RNA (1)...(19): siRNA sense strand
gaagagaagauaucccaau

SEQ ID NO: 1929283 - RNA, 19 nt, Homo sapiens
  misc_RNA (1)...(19): siRNA sense strand
uaaaagaucuccaagaaca

SEQ ID NO: 1929284 - RNA, 19 nt, Homo sapiens
  misc_RNA (1)...(19): siRNA sense strand
agacacuucuucaaggaua

SEQ ID NO: 1929285 - RNA, 19 nt, Homo sapiens
  misc_RNA (1)...(19): siRNA sense strand
uggaagaacuaaagaaaca

SEQ ID NO: 1929286 - RNA, 19 nt, Homo sapiens
  misc_RNA (1)...(19): siRNA sense strand
acuuacagaucucaacuua

SEQ ID NO: 1929287 - RNA, 19 nt, Homo sapiens
  misc_RNA (1)...(19): siRNA sense strand
uaagacauuuccaaaguca

SEQ ID NO: 1929288 - RNA, 19 nt, Homo sapiens
  misc_RNA (1)...(19): siRNA sense strand
aaugagacaugcacaaaga

SEQ ID NO: 1929289 - RNA, 19 nt, Homo sapiens
  misc_RNA (1)...(19): siRNA sense strand
acgcagaacuaacugauga

SEQ ID NO: 1929290 - RNA, 19 nt, Homo sapiens
  misc_RNA (1)...(19): siRNA sense strand
gaacuucaacagauaauac

SEQ ID NO: 1929291 - RNA, 19 nt, Homo sapiens
  misc_RNA (1)...(19): siRNA sense strand
caaaugaggaaauugagaa

SEQ ID NO: 1929292 - RNA, 19 nt, Homo sapiens
  misc_RNA (1)...(19): siRNA sense strand
ucagauugcuuaugucaca

SEQ ID NO: 1929293 - RNA, 19 nt, Homo sapiens
  misc_RNA (1)...(19): siRNA sense strand
uguaauggguaaacaggua

SEQ ID NO: 1929294 - RNA, 19 nt, Homo sapiens
  misc_RNA (1)...(19): siRNA sense strand
gaaugaaucgaaacaugaa

SEQ ID NO: 1929295 - RNA, 19 nt, Homo sapiens
  misc_RNA (1)...(19): siRNA sense strand
caguggaaccucucucuua

SEQ ID NO: 1929296 - RNA, 19 nt, Homo sapiens
  misc_RNA (1)...(19): siRNA sense strand
aagaucagauugcuuaugu

SEQ ID NO: 1929297 - RNA, 19 nt, Homo sapiens
  misc_RNA (1)...(19): siRNA sense strand
gagaaaaguugaagcaaau

SEQ ID NO: 1929298 - RNA, 19 nt, Homo sapiens
  misc_RNA (1)...(19): siRNA sense strand
gaaaguugccugucuacuc

SEQ ID NO: 1929299 - RNA, 19 nt, Homo sapiens
  misc_RNA (1)...(19): siRNA sense strand
uaccagaaaugacugagaa

SEQ ID NO: 1929300 - RNA, 19 nt, Homo sapiens
  misc_RNA (1)...(19): siRNA sense strand
gugcaccguugacuacuaa

SEQ ID NO: 1929301 - RNA, 19 nt, Homo sapiens
  misc_RNA (1)...(19): siRNA sense strand
uaacugaugacgaacauga

SEQ ID NO: 1929302 - RNA, 19 nt, Homo sapiens
  misc_RNA (1)...(19): siRNA sense strand
ucucguaguuucugaaguu

SEQ ID NO: 1929303 - RNA, 19 nt, Homo sapiens
  misc_RNA (1)...(19): siRNA sense strand
agaaggaacuugaugacau

SEQ ID NO: 1929304 - RNA, 19 nt, Homo sapiens
  misc_RNA (1)...(19): siRNA sense strand
uaaagcagcagaugccaaa

SEQ ID NO: 1929305 - RNA, 19 nt, Homo sapiens
  misc_RNA (1)...(19): siRNA sense strand
aaagaugcacuucggcuua

SEQ ID NO: 1929306 - RNA, 19 nt, Homo sapiens
  misc_RNA (1)...(19): siRNA sense strand
guucaccacucaagauguu

SEQ ID NO: 1929307 - RNA, 19 nt, Homo sapiens
  misc_RNA (1)...(19): siRNA sense strand
ucucaagacucacaacaug

SEQ ID NO: 1929308 - RNA, 19 nt, Homo sapiens
  misc_RNA (1)...(19): siRNA sense strand
caaggugccuaccagaaau

SEQ ID NO: 1929309 - RNA, 19 nt, Homo sapiens
  misc_RNA (1)...(19): siRNA sense strand
gagaugccuuccaaagaga

SEQ ID NO: 1929310 - RNA, 19 nt, Homo sapiens
  misc_RNA (1)...(19): siRNA sense strand
caaggucccuggucauuua

SEQ ID NO: 1929311 - RNA, 19 nt, Homo sapiens
  misc_RNA (1)...(19): siRNA sense strand
gaagaauucucuaaagaug

SEQ ID NO: 1929312 - RNA, 19 nt, Homo sapiens
  misc_RNA (1)...(19): siRNA sense strand
gcauuucagucaagauuua

SEQ ID NO: 1929313 - RNA, 19 nt, Homo sapiens
  misc_RNA (1)...(19): siRNA sense strand
gcaguaauauuuccaaugu

SEQ ID NO: 1929314 - RNA, 19 nt, Homo sapiens
  misc_RNA (1)...(19): siRNA sense strand
gagaaugacacucaaauuu

SEQ ID NO: 1929315 - RNA, 19 nt, Homo sapiens
  misc_RNA (1)...(19): siRNA sense strand
caaaucauguccuuagaaa

SEQ ID NO: 1929316 - RNA, 19 nt, Homo sapiens
  misc_RNA (1)...(19): siRNA sense strand
uggaagaacugcagaaauu

SEQ ID NO: 1929317 - RNA, 19 nt, Homo sapiens
  misc_RNA (1)...(19): siRNA sense strand
ggagugaaauccuaucaga

SEQ ID NO: 1929318 - RNA, 19 nt, Homo sapiens
  misc_RNA (1)...(19): siRNA sense strand
guuaauagccugagucaaa

SEQ ID NO: 1929319 - RNA, 19 nt, Homo sapiens
  misc_RNA (1)...(19): siRNA sense strand
aagaagaacucgaauaugu

SEQ ID NO: 1929320 - RNA, 19 nt, Homo sapiens
  misc_RNA (1)...(19): siRNA sense strand
gaagaacugcagaaauuaa

SEQ ID NO: 1929321 - RNA, 19 nt, Homo sapiens
  misc_RNA (1)...(19): siRNA sense strand
gagacucauugcaguaaua

SEQ ID NO: 1929322 - RNA, 19 nt, Homo sapiens
  misc_RNA (1)...(19): siRNA sense strand
gcaaaucaguggcaagaag

SEQ ID NO: 1929323 - RNA, 19 nt, Homo sapiens
  misc_RNA (1)...(19): siRNA sense strand
gcaagaaguuccagcaucu

SEQ ID NO: 1929324 - RNA, 19 nt, Homo sapiens
  misc_RNA (1)...(19): siRNA sense strand
ggaagaacugcagaaauua

SEQ ID NO: 1929325 - RNA, 19 nt, Homo sapiens
  misc_RNA (1)...(19): siRNA sense strand
ugaaagaggcaauguguuu

SEQ ID NO: 1929326 - RNA, 19 nt, Homo sapiens
  misc_RNA (1)...(19): siRNA sense strand
aaaggcaucugauaaaugu

SEQ ID NO: 1929327 - RNA, 19 nt, Homo sapiens
  misc_RNA (1)...(19): siRNA sense strand
gaaccaauugaucuucuua

SEQ ID NO: 1929328 - RNA, 19 nt, Homo sapiens
  misc_RNA (1)...(19): siRNA sense strand
gcaauguguuucuauggaa

SEQ ID NO: 1929329 - RNA, 19 nt, Homo sapiens
  misc_RNA (1)...(19): siRNA sense strand
caaaugaagccaaacugua

SEQ ID NO: 1929330 - RNA, 19 nt, Homo sapiens
  misc_RNA (1)...(19): siRNA sense strand
gguugaagcugaagagaau

SEQ ID NO: 1929331 - RNA, 19 nt, Homo sapiens
  misc_RNA (1)...(19): siRNA sense strand
uagaggaauugguugguua

SEQ ID NO: 1929332 - RNA, 19 nt, Homo sapiens
  misc_RNA (1)...(19): siRNA sense strand
gauguuaacuaccaguguu

SEQ ID NO: 1929333 - RNA, 19 nt, Homo sapiens
  misc_RNA (1)...(19): siRNA sense strand
ucagagcaaugcaaaggua

SEQ ID NO: 1929334 - RNA, 19 nt, Homo sapiens
  misc_RNA (1)...(19): siRNA sense strand
gaaaagaccaugccaacua

SEQ ID NO: 1929335 - RNA, 19 nt, Homo sapiens
  misc_RNA (1)...(19): siRNA sense strand
uaucaagcaucuagucauu

SEQ ID NO: 1929336 - RNA, 19 nt, Homo sapiens
  misc_RNA (1)...(19): siRNA sense strand
caacuaccuuuaacagaga

SEQ ID NO: 1929337 - RNA, 19 nt, Homo sapiens
  misc_RNA (1)...(19): siRNA sense strand
ucaagcaucuagucauuau

SEQ ID NO: 1929338 - RNA, 19 nt, Homo sapiens
  misc_RNA (1)...(19): siRNA sense strand
cugcagaaauuaagaagaa

SEQ ID NO: 1929339 - RNA, 19 nt, Homo sapiens
  misc_RNA (1)...(19): siRNA sense strand
ggaaguaauucagcaguuc

SEQ ID NO: 1929340 - RNA, 19 nt, Homo sapiens
  misc_RNA (1)...(19): siRNA sense strand
ucaaauuucagcagacuua

SEQ ID NO: 1929341 - RNA, 19 nt, Homo sapiens
  misc_RNA (1)...(19): siRNA sense strand
aauguugucuccuuucuaa

SEQ ID NO: 1929342 - RNA, 19 nt, Homo sapiens
  misc_RNA (1)...(19): siRNA sense strand
gggcauugauuccaugguu

SEQ ID NO: 1929343 - RNA, 19 nt, Homo sapiens
  misc_RNA (1)...(19): siRNA sense strand
gaagaacucgaauauguca

SEQ ID NO: 1929344 - RNA, 19 nt, Homo sapiens
  misc_RNA (1)...(19): siRNA sense strand
gguagcaaaugaagccaaa

SEQ ID NO: 1929345 - RNA, 19 nt, Homo sapiens
  misc_RNA (1)...(19): siRNA sense strand
gaagcaagauuuccuuucc

SEQ ID NO: 1929346 - RNA, 19 nt, Homo sapiens
  misc_RNA (1)...(19): siRNA sense strand
ggaacugggucgaauuucu

SEQ ID NO: 1929347 - RNA, 19 nt, Homo sapiens
  misc_RNA (1)...(19): siRNA sense strand
gaacugcagaaauuaagaa

SEQ ID NO: 1929348 - RNA, 19 nt, Homo sapiens
  misc_RNA (1)...(19): siRNA sense strand
gagaagggaauaaacagaa

SEQ ID NO: 1929349 - RNA, 19 nt, Homo sapiens
  misc_RNA (1)...(19): siRNA sense strand
uaacagagaagggaauaaa

SEQ ID NO: 1929350 - RNA, 19 nt, Homo sapiens
  misc_RNA (1)...(19): siRNA sense strand
gauaggaaagcaaauguug

SEQ ID NO: 1929351 - RNA, 19 nt, Homo sapiens
  misc_RNA (1)...(19): siRNA sense strand
gaagagaaugacacucaaa

SEQ ID NO: 1929352 - RNA, 19 nt, Homo sapiens
  misc_RNA (1)...(19): siRNA sense strand
caguuuggaucaagaauug

SEQ ID NO: 1929353 - RNA, 19 nt, Homo sapiens
  misc_RNA (1)...(19): siRNA sense strand
gaguguagcagucaagaaa

SEQ ID NO: 1929354 - RNA, 19 nt, Homo sapiens
  misc_RNA (1)...(19): siRNA sense strand
gaacugggucgaauuucuu

SEQ ID NO: 1929355 - RNA, 19 nt, Homo sapiens
  misc_RNA (1)...(19): siRNA sense strand
ggcauugauuccaugguua

SEQ ID NO: 1929356 - RNA, 19 nt, Homo sapiens
  misc_RNA (1)...(19): siRNA sense strand
uaucagugguagcaaauga

SEQ ID NO: 1929357 - RNA, 19 nt, Homo sapiens
  misc_RNA (1)...(19): siRNA sense strand
gaaaaggcaucugauaaau

SEQ ID NO: 1929358 - RNA, 19 nt, Homo sapiens
  misc_RNA (1)...(19): siRNA sense strand
gaaaacgugugauaggaaa

SEQ ID NO: 1929359 - RNA, 19 nt, Homo sapiens
  misc_RNA (1)...(19): siRNA sense strand
gccaaacuguaucuugaaa

SEQ ID NO: 1929360 - RNA, 19 nt, Homo sapiens
  misc_RNA (1)...(19): siRNA sense strand
gaugaaagaggcaaugugu

SEQ ID NO: 1929361 - RNA, 19 nt, Homo sapiens
  misc_RNA (1)...(19): siRNA sense strand
ucuauggaauggagaaauu

SEQ ID NO: 1929362 - RNA, 19 nt, Homo sapiens
  misc_RNA (1)...(19): siRNA sense strand
gagcauuucagucaagauu

SEQ ID NO: 1929363 - RNA, 19 nt, Homo sapiens
  misc_RNA (1)...(19): siRNA sense strand
gaagccaaacuguaucuug

SEQ ID NO: 1929364 - RNA, 19 nt, Homo sapiens
  misc_RNA (1)...(19): siRNA sense strand
gcaaaugaagccaaacugu

SEQ ID NO: 1929365 - RNA, 19 nt, Homo sapiens
  misc_RNA (1)...(19): siRNA sense strand
agacuuaccagcauuugua

SEQ ID NO: 1929366 - RNA, 19 nt, Homo sapiens
  misc_RNA (1)...(19): siRNA sense strand
guagcuugcuuuggcauuu

SEQ ID NO: 1929367 - RNA, 19 nt, Homo sapiens
  misc_RNA (1)...(19): siRNA sense strand
aagccaaacuguaucuuga

SEQ ID NO: 1929368 - RNA, 19 nt, Homo sapiens
  misc_RNA (1)...(19): siRNA sense strand
ggcauuuguuguucuguaa

SEQ ID NO: 1929369 - RNA, 19 nt, Homo sapiens
  misc_RNA (1)...(19): siRNA sense strand
gaaauccuaucagagcaau

SEQ ID NO: 1929370 - RNA, 19 nt, Homo sapiens
  misc_RNA (1)...(19): siRNA sense strand
acucgaauaugucacuuaa

SEQ ID NO: 1929371 - RNA, 19 nt, Homo sapiens
  misc_RNA (1)...(19): siRNA sense strand
gaggcaauguguuucuaug

SEQ ID NO: 1929372 - RNA, 19 nt, Homo sapiens
  misc_RNA (1)...(19): siRNA sense strand
agaagggaauaaacagaaa

SEQ ID NO: 1929373 - RNA, 19 nt, Homo sapiens
  misc_RNA (1)...(19): siRNA sense strand
guaauuugggcaagaguuu

SEQ ID NO: 1929374 - RNA, 19 nt, Homo sapiens
  misc_RNA (1)...(19): siRNA sense strand
ggcaauguguuucuaugga

SEQ ID NO: 1929375 - RNA, 19 nt, Homo sapiens
  misc_RNA (1)...(19): siRNA sense strand
uaauucagcaguucauuga

SEQ ID NO: 1929376 - RNA, 19 nt, Homo sapiens
  misc_RNA (1)...(19): siRNA sense strand
ggacggcuccaaaucaugu

SEQ ID NO: 1929377 - RNA, 19 nt, Homo sapiens
  misc_RNA (1)...(19): siRNA sense strand
aaaugaagccaaacuguau

SEQ ID NO: 1929378 - RNA, 19 nt, Homo sapiens
  misc_RNA (1)...(19): siRNA sense strand
ugacagaguuauuggugau

SEQ ID NO: 1929379 - RNA, 19 nt, Homo sapiens
  misc_RNA (1)...(19): siRNA sense strand
ucacuuaauucggccauug

SEQ ID NO: 1929380 - RNA, 19 nt, Homo sapiens
  misc_RNA (1)...(19): siRNA sense strand
cagcagacuuaccagcauu

SEQ ID NO: 1929381 - RNA, 19 nt, Homo sapiens
  misc_RNA (1)...(19): siRNA sense strand
uuaauucggccauuggaua

SEQ ID NO: 1929382 - RNA, 19 nt, Homo sapiens
  misc_RNA (1)...(19): siRNA sense strand
acacaugaaggaaguaauu

SEQ ID NO: 1929383 - RNA, 19 nt, Homo sapiens
  misc_RNA (1)...(19): siRNA sense strand
cuucaagucuuucuuacug

SEQ ID NO: 1929384 - RNA, 19 nt, Homo sapiens
  misc_RNA (1)...(19): siRNA sense strand
aauaaagguugaagcugaa

SEQ ID NO: 1929385 - RNA, 19 nt, Homo sapiens
  misc_RNA (1)...(19): siRNA sense strand
gcaguuuggaucaagaauu

SEQ ID NO: 1929386 - RNA, 19 nt, Homo sapiens
  misc_RNA (1)...(19): siRNA sense strand
guugucuccuuucuaaauu

SEQ ID NO: 1929387 - RNA, 19 nt, Homo sapiens
  misc_RNA (1)...(19): siRNA sense strand
gaacucgaauaugucacuu

SEQ ID NO: 1929388 - RNA, 19 nt, Homo sapiens
  misc_RNA (1)...(19): siRNA sense strand
cuaauaaacaugucagugu

SEQ ID NO: 1929389 - RNA, 19 nt, Homo sapiens
  misc_RNA (1)...(19): siRNA sense strand
ugacaguccuaauaaacau

SEQ ID NO: 1929390 - RNA, 19 nt, Homo sapiens
  misc_RNA (1)...(19): siRNA sense strand
guaauucagcaguucauug

SEQ ID NO: 1929391 - RNA, 19 nt, Homo sapiens
  misc_RNA (1)...(19): siRNA sense strand
ccaauugaucuucuuaaug

SEQ ID NO: 1929392 - RNA, 19 nt, Homo sapiens
  misc_RNA (1)...(19): siRNA sense strand
gggcuggaaggauugaaua

SEQ ID NO: 1929393 - RNA, 19 nt, Homo sapiens
  misc_RNA (1)...(19): siRNA sense strand
ugaagagaaugacacucaa

SEQ ID NO: 1929394 - RNA, 19 nt, Homo sapiens
  misc_RNA (1)...(19): siRNA sense strand
ggaaggauugaauaaggaa

SEQ ID NO: 1929395 - RNA, 19 nt, Homo sapiens
  misc_RNA (1)...(19): siRNA sense strand
cgcaugggcuggaaggauu

SEQ ID NO: 1929396 - RNA, 19 nt, Homo sapiens
  misc_RNA (1)...(19): siRNA sense strand
guuagcccuucccgaauuu

SEQ ID NO: 1929397 - RNA, 19 nt, Homo sapiens
  misc_RNA (1)...(19): siRNA sense strand
ggucccuggucauuuauau

SEQ ID NO: 1929398 - RNA, 19 nt, Homo sapiens
  misc_RNA (1)...(19): siRNA sense strand
ggagacucauugcaguaau

SEQ ID NO: 1929399 - RNA, 19 nt, Homo sapiens
  misc_RNA (1)...(19): siRNA sense strand
ccaaaucauguccuuagaa

SEQ ID NO: 1929400 - RNA, 19 nt, Homo sapiens
  misc_RNA (1)...(19): siRNA sense strand
gcugcugacaguccuaaua

SEQ ID NO: 1929401 - RNA, 19 nt, Homo sapiens
  misc_RNA (1)...(19): siRNA sense strand
gcucacguccuacacuuga

SEQ ID NO: 1929402 - RNA, 19 nt, Homo sapiens
  misc_RNA (1)...(19): siRNA sense strand
ucauugauguccugagugu

SEQ ID NO: 1929403 - RNA, 19 nt, Homo sapiens
  misc_RNA (1)...(19): siRNA sense strand
gaaguaauucagcaguuca

SEQ ID NO: 1929404 - RNA, 19 nt, Homo sapiens
  misc_RNA (1)...(19): siRNA sense strand
acaacuguauccuuggaaa

SEQ ID NO: 1929405 - RNA, 19 nt, Homo sapiens
  misc_RNA (1)...(19): siRNA sense strand
gaagaugaaagaggcaaug

SEQ ID NO: 1929406 - RNA, 19 nt, Homo sapiens
  misc_RNA (1)...(19): siRNA sense strand
guucauugauguccugagu

SEQ ID NO: 1929407 - RNA, 19 nt, Homo sapiens
  misc_RNA (1)...(19): siRNA sense strand
uuaauagccugagucaaau

SEQ ID NO: 1929408 - RNA, 19 nt, Homo sapiens
  misc_RNA (1)...(19): siRNA sense strand
gaccaugccaacuaccuuu

SEQ ID NO: 1929409 - RNA, 19 nt, Homo sapiens
  misc_RNA (1)...(19): siRNA sense strand
gcagucugguuugcuucua

SEQ ID NO: 1929410 - RNA, 19 nt, Homo sapiens
  misc_RNA (1)...(19): siRNA sense strand
uagaauaccucguuuauca

SEQ ID NO: 1929411 - RNA, 19 nt, Homo sapiens
  misc_RNA (1)...(19): siRNA sense strand
gaacguauacuaaaggaaa

SEQ ID NO: 1929412 - RNA, 19 nt, Homo sapiens
  misc_RNA (1)...(19): siRNA sense strand
ggagaugcauggaaauuau

SEQ ID NO: 1929413 - RNA, 19 nt, Homo sapiens
  misc_RNA (1)...(19): siRNA sense strand
ccagaacaccauuuaauua

SEQ ID NO: 1929414 - RNA, 19 nt, Homo sapiens
  misc_RNA (1)...(19): siRNA sense strand
gcauggaaauuaugaaugu

SEQ ID NO: 1929415 - RNA, 19 nt, Homo sapiens
  misc_RNA (1)...(19): siRNA sense strand
gaacuucaaugcagauucu

SEQ ID NO: 1929416 - RNA, 19 nt, Homo sapiens
  misc_RNA (1)...(19): siRNA sense strand
guacuggaauuacaacuau

SEQ ID NO: 1929417 - RNA, 19 nt, Homo sapiens
  misc_RNA (1)...(19): siRNA sense strand
ugagguggcuucuuucaaa

SEQ ID NO: 1929418 - RNA, 19 nt, Homo sapiens
  misc_RNA (1)...(19): siRNA sense strand
gcaggagauuccagagaua

SEQ ID NO: 1929419 - RNA, 19 nt, Homo sapiens
  misc_RNA (1)...(19): siRNA sense strand
acacauaguuccuccauug

SEQ ID NO: 1929420 - RNA, 19 nt, Homo sapiens
  misc_RNA (1)...(19): siRNA sense strand
gagaucaacuauacuggaa

SEQ ID NO: 1929421 - RNA, 19 nt, Homo sapiens
  misc_RNA (1)...(19): siRNA sense strand
gcaaggcauucagaugaua

SEQ ID NO: 1929422 - RNA, 19 nt, Homo sapiens
  misc_RNA (1)...(19): siRNA sense strand
gaagaacccauuuacuuug

SEQ ID NO: 1929423 - RNA, 19 nt, Homo sapiens
  misc_RNA (1)...(19): siRNA sense strand
gcucugaucuugcaguuuc

SEQ ID NO: 1929424 - RNA, 19 nt, Homo sapiens
  misc_RNA (1)...(19): siRNA sense strand
acagacaaguguacacaua

SEQ ID NO: 1929425 - RNA, 19 nt, Homo sapiens
  misc_RNA (1)...(19): siRNA sense strand
uaccuuaccugaacguaua

SEQ ID NO: 1929426 - RNA, 19 nt, Homo sapiens
  misc_RNA (1)...(19): siRNA sense strand
guucucagcuauuuaguau

SEQ ID NO: 1929427 - RNA, 19 nt, Homo sapiens
  misc_RNA (1)...(19): siRNA sense strand
agaagaugcugauugguuu

SEQ ID NO: 1929428 - RNA, 19 nt, Homo sapiens
  misc_RNA (1)...(19): siRNA sense strand
gaacacagacauugcugaa

SEQ ID NO: 1929429 - RNA, 19 nt, Homo sapiens
  misc_RNA (1)...(19): siRNA sense strand
ugaagaacccauuuacuuu

SEQ ID NO: 1929430 - RNA, 19 nt, Homo sapiens
  misc_RNA (1)...(19): siRNA sense strand
caacuauuauccuccugua

SEQ ID NO: 1929431 - RNA, 19 nt, Homo sapiens
  misc_RNA (1)...(19): siRNA sense strand
agaauucuuugcuggguua

SEQ ID NO: 1929432 - RNA, 19 nt, Homo sapiens
  misc_RNA (1)...(19): siRNA sense strand
caaccuaccuuaccugaac

SEQ ID NO: 1929433 - RNA, 19 nt, Homo sapiens
  misc_RNA (1)...(19): siRNA sense strand
ggaaauuagucaagcaaac

SEQ ID NO: 1929434 - RNA, 19 nt, Homo sapiens
  misc_RNA (1)...(19): siRNA sense strand
ggagcaggauauguacuaa

SEQ ID NO: 1929435 - RNA, 19 nt, Homo sapiens
  misc_RNA (1)...(19): siRNA sense strand
aauuugagguggcuucuuu

SEQ ID NO: 1929436 - RNA, 19 nt, Homo sapiens
  misc_RNA (1)...(19): siRNA sense strand
gaaauuagucaagcaaaca

SEQ ID NO: 1929437 - RNA, 19 nt, Homo sapiens
  misc_RNA (1)...(19): siRNA sense strand
gauauguacuaagcaaaga

SEQ ID NO: 1929438 - RNA, 19 nt, Homo sapiens
  misc_RNA (1)...(19): siRNA sense strand
gccagaacaccauuuaauu

SEQ ID NO: 1929439 - RNA, 19 nt, Homo sapiens
  misc_RNA (1)...(19): siRNA sense strand
gggagaugcauggaaauua

SEQ ID NO: 1929440 - RNA, 19 nt, Homo sapiens
  misc_RNA (1)...(19): siRNA sense strand
gaaaagauuuguugaugca

SEQ ID NO: 1929441 - RNA, 19 nt, Homo sapiens
  misc_RNA (1)...(19): siRNA sense strand
aggcagagaucaacuauac

SEQ ID NO: 1929442 - RNA, 19 nt, Homo sapiens
  misc_RNA (1)...(19): siRNA sense strand
ccagagauaccauuggaaa

SEQ ID NO: 1929443 - RNA, 19 nt, Homo sapiens
  misc_RNA (1)...(19): siRNA sense strand
gaugagaacacagacauug

SEQ ID NO: 1929444 - RNA, 19 nt, Homo sapiens
  misc_RNA (1)...(19): siRNA sense strand
ucuaaauccuggcugaauu

SEQ ID NO: 1929445 - RNA, 19 nt, Homo sapiens
  misc_RNA (1)...(19): siRNA sense strand
gcagagaucaacuauacug

SEQ ID NO: 1929446 - RNA, 19 nt, Homo sapiens
  misc_RNA (1)...(19): siRNA sense strand
caaagaaggcagagaucaa

SEQ ID NO: 1929447 - RNA, 19 nt, Homo sapiens
  misc_RNA (1)...(19): siRNA sense strand
gaaggcagagaucaacuau

SEQ ID NO: 1929448 - RNA, 19 nt, Homo sapiens
  misc_RNA (1)...(19): siRNA sense strand
guaaagcagggcuacauga

SEQ ID NO: 1929449 - RNA, 19 nt, Homo sapiens
  misc_RNA (1)...(19): siRNA sense strand
agccuaauguucuucauaa

SEQ ID NO: 1929450 - RNA, 19 nt, Homo sapiens
  misc_RNA (1)...(19): siRNA sense strand
guuuaugaguucagaagaa

SEQ ID NO: 1929451 - RNA, 19 nt, Homo sapiens
  misc_RNA (1)...(19): siRNA sense strand
gauaauggacagaaucauc

SEQ ID NO: 1929452 - RNA, 19 nt, Homo sapiens
  misc_RNA (1)...(19): siRNA sense strand
aaagugaaguuaggaaauc

SEQ ID NO: 1929453 - RNA, 19 nt, Homo sapiens
  misc_RNA (1)...(19): siRNA sense strand
caggauauguacuaagcaa

SEQ ID NO: 1929454 - RNA, 19 nt, Homo sapiens
  misc_RNA (1)...(19): siRNA sense strand
gaguuagaauaccucguuu

SEQ ID NO: 1929455 - RNA, 19 nt, Homo sapiens
  misc_RNA (1)...(19): siRNA sense strand
ccauguaugaguuagaaua

SEQ ID NO: 1929456 - RNA, 19 nt, Homo sapiens
  misc_RNA (1)...(19): siRNA sense strand
gaucaacuauacuggaaaa

SEQ ID NO: 1929457 - RNA, 19 nt, Homo sapiens
  misc_RNA (1)...(19): siRNA sense strand
gaauguagaagcaggagau

SEQ ID NO: 1929458 - RNA, 19 nt, Homo sapiens
  misc_RNA (1)...(19): siRNA sense strand
aagcaaagaagccuugaaa

SEQ ID NO: 1929459 - RNA, 19 nt, Homo sapiens
  misc_RNA (1)...(19): siRNA sense strand
ggacagaaucaucuagaag

SEQ ID NO: 1929460 - RNA, 19 nt, Homo sapiens
  misc_RNA (1)...(19): siRNA sense strand
guuagaauaccucguuuau

SEQ ID NO: 1929461 - RNA, 19 nt, Homo sapiens
  misc_RNA (1)...(19): siRNA sense strand
caaagaagccuugaaaaga

SEQ ID NO: 1929462 - RNA, 19 nt, Homo sapiens
  misc_RNA (1)...(19): siRNA sense strand
uagaagaugcugauugguu

SEQ ID NO: 1929463 - RNA, 19 nt, Homo sapiens
  misc_RNA (1)...(19): siRNA sense strand
gaaaaccucuaucagaaag

SEQ ID NO: 1929464 - RNA, 19 nt, Homo sapiens
  misc_RNA (1)...(19): siRNA sense strand
acacagacauugcugaaaa

SEQ ID NO: 1929465 - RNA, 19 nt, Homo sapiens
  misc_RNA (1)...(19): siRNA sense strand
uggaggagcaggauaugua

SEQ ID NO: 1929466 - RNA, 19 nt, Homo sapiens
  misc_RNA (1)...(19): siRNA sense strand
ggaauuacaacuauuaucc

SEQ ID NO: 1929467 - RNA, 19 nt, Homo sapiens
  misc_RNA (1)...(19): siRNA sense strand
gcagauucuagccaacaua

SEQ ID NO: 1929468 - RNA, 19 nt, Homo sapiens
  misc_RNA (1)...(19): siRNA sense strand
gaauaccucguuuaucauc

SEQ ID NO: 1929469 - RNA, 19 nt, Homo sapiens
  misc_RNA (1)...(19): siRNA sense strand
cugaagaacccauuuacuu

SEQ ID NO: 1929470 - RNA, 19 nt, Homo sapiens
  misc_RNA (1)...(19): siRNA sense strand
caacuauacuggaaaacaa

SEQ ID NO: 1929471 - RNA, 19 nt, Homo sapiens
  misc_RNA (1)...(19): siRNA sense strand
aaaccucuaucagaaaguu

SEQ ID NO: 1929472 - RNA, 19 nt, Homo sapiens
  misc_RNA (1)...(19): siRNA sense strand
gguacuggaauuacaacua

SEQ ID NO: 1929473 - RNA, 19 nt, Homo sapiens
  misc_RNA (1)...(19): siRNA sense strand
caucuagaaggacaaauga

SEQ ID NO: 1929474 - RNA, 19 nt, Homo sapiens
  misc_RNA (1)...(19): siRNA sense strand
gcaaagaagccuugaaaag

SEQ ID NO: 1929475 - RNA, 19 nt, Homo sapiens
  misc_RNA (1)...(19): siRNA sense strand
gccaaacacgucaaagcua

SEQ ID NO: 1929476 - RNA, 19 nt, Homo sapiens
  misc_RNA (1)...(19): siRNA sense strand
acauaaagaugagaacaca

SEQ ID NO: 1929477 - RNA, 19 nt, Homo sapiens
  misc_RNA (1)...(19): siRNA sense strand
cagauucuagccaacauaa

SEQ ID NO: 1929478 - RNA, 19 nt, Homo sapiens
  misc_RNA (1)...(19): siRNA sense strand
gaucagcaauaggauuucu

SEQ ID NO: 1929479 - RNA, 19 nt, Homo sapiens
  misc_RNA (1)...(19): siRNA sense strand
ugaguuagaauaccucguu

SEQ ID NO: 1929480 - RNA, 19 nt, Homo sapiens
  misc_RNA (1)...(19): siRNA sense strand
cauaguuccuccauugaag

SEQ ID NO: 1929481 - RNA, 19 nt, Homo sapiens
  misc_RNA (1)...(19): siRNA sense strand
caaggcauucagaugauaa

SEQ ID NO: 1929482 - RNA, 19 nt, Homo sapiens
  misc_RNA (1)...(19): siRNA sense strand
acagaaucaucuagaagga

SEQ ID NO: 1929483 - RNA, 19 nt, Homo sapiens
  misc_RNA (1)...(19): siRNA sense strand
ggauauguacuaagcaaag

SEQ ID NO: 1929484 - RNA, 19 nt, Homo sapiens
  misc_RNA (1)...(19): siRNA sense strand
aagcagaugaugacacgua

SEQ ID NO: 1929485 - RNA, 19 nt, Homo sapiens
  misc_RNA (1)...(19): siRNA sense strand
uuuaucaucuucguccaua

SEQ ID NO: 1929486 - RNA, 19 nt, Homo sapiens
  misc_RNA (1)...(19): siRNA sense strand
aaagaagccuugaaaagau

SEQ ID NO: 1929487 - RNA, 19 nt, Homo sapiens
  misc_RNA (1)...(19): siRNA sense strand
gauucuagccaacauaaag

SEQ ID NO: 1929488 - RNA, 19 nt, Homo sapiens
  misc_RNA (1)...(19): siRNA sense strand
agacaaguguacacauagu

SEQ ID NO: 1929489 - RNA, 19 nt, Homo sapiens
  misc_RNA (1)...(19): siRNA sense strand
ucagcaauaggauuucuuu

SEQ ID NO: 1929490 - RNA, 19 nt, Homo sapiens
  misc_RNA (1)...(19): siRNA sense strand
uuuagaagaugcugauugg

SEQ ID NO: 1929491 - RNA, 19 nt, Homo sapiens
  misc_RNA (1)...(19): siRNA sense strand
aaaggaaauuagucaagca

SEQ ID NO: 1929492 - RNA, 19 nt, Homo sapiens
  misc_RNA (1)...(19): siRNA sense strand
ucguccauaugguuauuua

SEQ ID NO: 1929493 - RNA, 19 nt, Homo sapiens
  misc_RNA (1)...(19): siRNA sense strand
cagaugaugacacguaugu

SEQ ID NO: 1929494 - RNA, 19 nt, Homo sapiens
  misc_RNA (1)...(19): siRNA sense strand
gaugauaauggacagaauc

SEQ ID NO: 1929495 - RNA, 19 nt, Homo sapiens
  misc_RNA (1)...(19): siRNA sense strand
gaguggaggagcaggauau

SEQ ID NO: 1929496 - RNA, 19 nt, Homo sapiens
  misc_RNA (1)...(19): siRNA sense strand
uggacagaaucaucuagaa

SEQ ID NO: 1929497 - RNA, 19 nt, Homo sapiens
  misc_RNA (1)...(19): siRNA sense strand
gguggcuucuuucaaaaua

SEQ ID NO: 1929498 - RNA, 19 nt, Homo sapiens
  misc_RNA (1)...(19): siRNA sense strand
cagccuaauguucuucaua

SEQ ID NO: 1929499 - RNA, 19 nt, Homo sapiens
  misc_RNA (1)...(19): siRNA sense strand
aaccauguaugaguuagaa

SEQ ID NO: 1929500 - RNA, 19 nt, Homo sapiens
  misc_RNA (1)...(19): siRNA sense strand
ccuaauguucuucauaaug

SEQ ID NO: 1929501 - RNA, 19 nt, Homo sapiens
  misc_RNA (1)...(19): siRNA sense strand
ccaaagaaggcagagauca

SEQ ID NO: 1929502 - RNA, 19 nt, Homo sapiens
  misc_RNA (1)...(19): siRNA sense strand
uaccugaacguauacuaaa

SEQ ID NO: 1929503 - RNA, 19 nt, Homo sapiens
  misc_RNA (1)...(19): siRNA sense strand
uuaccugaacguauacuaa

SEQ ID NO: 1929504 - RNA, 19 nt, Homo sapiens
  misc_RNA (1)...(19): siRNA sense strand
uggaucagcaauaggauuu

SEQ ID NO: 1929505 - RNA, 19 nt, Homo sapiens
  misc_RNA (1)...(19): siRNA sense strand
auaaagaugagaacacaga

SEQ ID NO: 1929506 - RNA, 19 nt, Homo sapiens
  misc_RNA (1)...(19): siRNA sense strand
caacauaaagaugagaaca

SEQ ID NO: 1929507 - RNA, 19 nt, Homo sapiens
  misc_RNA (1)...(19): siRNA sense strand
gacaaguguacacauaguu

SEQ ID NO: 1929508 - RNA, 19 nt, Homo sapiens
  misc_RNA (1)...(19): siRNA sense strand
ucacuauguugauucuaca

SEQ ID NO: 1929509 - RNA, 19 nt, Homo sapiens
  misc_RNA (1)...(19): siRNA sense strand
cagauaucaaccuaccuua

SEQ ID NO: 1929510 - RNA, 19 nt, Homo sapiens
  misc_RNA (1)...(19): siRNA sense strand
gggcagagaugcagccuua

SEQ ID NO: 1929511 - RNA, 19 nt, Homo sapiens
  misc_RNA (1)...(19): siRNA sense strand
ggaaauaccagcacaagaa

SEQ ID NO: 1929512 - RNA, 19 nt, Homo sapiens
  misc_RNA (1)...(19): siRNA sense strand
gaagaucugugaagacuca

SEQ ID NO: 1929513 - RNA, 19 nt, Homo sapiens
  misc_RNA (1)...(19): siRNA sense strand
cgacaaggacuuuaugaua

SEQ ID NO: 1929514 - RNA, 19 nt, Homo sapiens
  misc_RNA (1)...(19): siRNA sense strand
gacaaggacuuuaugauag

SEQ ID NO: 1929515 - RNA, 19 nt, Homo sapiens
  misc_RNA (1)...(19): siRNA sense strand
gcagcaacaucaugacauu

SEQ ID NO: 1929516 - RNA, 19 nt, Homo sapiens
  misc_RNA (1)...(19): siRNA sense strand
gcaguucucugagcaauuc

SEQ ID NO: 1929517 - RNA, 19 nt, Homo sapiens
  misc_RNA (1)...(19): siRNA sense strand
gggauaaacucaaacaacu

SEQ ID NO: 1929518 - RNA, 19 nt, Homo sapiens
  misc_RNA (1)...(19): siRNA sense strand
ucaacaaccugguggaaau

SEQ ID NO: 1929519 - RNA, 19 nt, Homo sapiens
  misc_RNA (1)...(19): siRNA sense strand
gcacugcagucccaagauc

SEQ ID NO: 1929520 - RNA, 19 nt, Homo sapiens
  misc_RNA (1)...(19): siRNA sense strand
aaacaggagugucucaaca

SEQ ID NO: 1929521 - RNA, 19 nt, Homo sapiens
  misc_RNA (1)...(19): siRNA sense strand
ggaugacgaugaugaugau

SEQ ID NO: 1929522 - RNA, 19 nt, Homo sapiens
  misc_RNA (1)...(19): siRNA sense strand
gggaugaaguacucggaaa

SEQ ID NO: 1929523 - RNA, 19 nt, Homo sapiens
  misc_RNA (1)...(19): siRNA sense strand
gcacgucccucaggaacau

SEQ ID NO: 1929524 - RNA, 19 nt, Homo sapiens
  misc_RNA (1)...(19): siRNA sense strand
gauaaacucaaacaacuca

SEQ ID NO: 1929525 - RNA, 19 nt, Homo sapiens
  misc_RNA (1)...(19): siRNA sense strand
caaggacuuuaugauagua

SEQ ID NO: 1929526 - RNA, 19 nt, Homo sapiens
  misc_RNA (1)...(19): siRNA sense strand
gcagagaugcagccuuaug

SEQ ID NO: 1929527 - RNA, 19 nt, Homo sapiens
  misc_RNA (1)...(19): siRNA sense strand
ccaaguuccugcaguucuu

SEQ ID NO: 1929528 - RNA, 19 nt, Homo sapiens
  misc_RNA (1)...(19): siRNA sense strand
gaaguggaaugagcucaag

SEQ ID NO: 1929529 - RNA, 19 nt, Homo sapiens
  misc_RNA (1)...(19): siRNA sense strand
ugaaugggaugaaguacuc

SEQ ID NO: 1929530 - RNA, 19 nt, Homo sapiens
  misc_RNA (1)...(19): siRNA sense strand
gaugaaguacucggaaauu

SEQ ID NO: 1929531 - RNA, 19 nt, Homo sapiens
  misc_RNA (1)...(19): siRNA sense strand
guaugaggcucccgacaag

SEQ ID NO: 1929532 - RNA, 19 nt, Homo sapiens
  misc_RNA (1)...(19): siRNA sense strand
ggacccaggaccaugauga

SEQ ID NO: 1929533 - RNA, 19 nt, Homo sapiens
  misc_RNA (1)...(19): siRNA sense strand
ccaagacacugcuggaaaa

SEQ ID NO: 1929534 - RNA, 19 nt, Homo sapiens
  misc_RNA (1)...(19): siRNA sense strand
ugaaguacucggaaauuga

SEQ ID NO: 1929535 - RNA, 19 nt, Homo sapiens
  misc_RNA (1)...(19): siRNA sense strand
ggaccaugaugagaacguu

SEQ ID NO: 1929536 - RNA, 19 nt, Homo sapiens
  misc_RNA (1)...(19): siRNA sense strand
ucaaaggccuccucuucca

SEQ ID NO: 1929537 - RNA, 19 nt, Homo sapiens
  misc_RNA (1)...(19): siRNA sense strand
aggagaggcuggcggcuuu

SEQ ID NO: 1929538 - RNA, 19 nt, Homo sapiens
  misc_RNA (1)...(19): siRNA sense strand
uccagugccugucggauaa

SEQ ID NO: 1929539 - RNA, 19 nt, Homo sapiens
  misc_RNA (1)...(19): siRNA sense strand
acaaggacuuuaugauagu

SEQ ID NO: 1929540 - RNA, 19 nt, Homo sapiens
  misc_RNA (1)...(19): siRNA sense strand
gugcaggacuuuauuuuau

SEQ ID NO: 1929541 - RNA, 19 nt, Homo sapiens
  misc_RNA (1)...(19): siRNA sense strand
uucaacaacuaccugauuu

SEQ ID NO: 1929542 - RNA, 19 nt, Homo sapiens
  misc_RNA (1)...(19): siRNA sense strand
agaguggcuuccugccuua

SEQ ID NO: 1929543 - RNA, 19 nt, Homo sapiens
  misc_RNA (1)...(19): siRNA sense strand
uggcagacuucaucaaaca

SEQ ID NO: 1929544 - RNA, 19 nt, Homo sapiens
  misc_RNA (1)...(19): siRNA sense strand
caacgugaaggcacacuau

SEQ ID NO: 1929545 - RNA, 19 nt, Homo sapiens
  misc_RNA (1)...(19): siRNA sense strand
gcgcugauggacaauauug

SEQ ID NO: 1929546 - RNA, 19 nt, Homo sapiens
  misc_RNA (1)...(19): siRNA sense strand
ccgaguggguggucaagga

SEQ ID NO: 1929547 - RNA, 19 nt, Homo sapiens
  misc_RNA (1)...(19): siRNA sense strand
cuucaucgagcaccuauuu

SEQ ID NO: 1929548 - RNA, 19 nt, Homo sapiens
  misc_RNA (1)...(19): siRNA sense strand
gaaauaccagcacaagaac

SEQ ID NO: 1929549 - RNA, 19 nt, Homo sapiens
  misc_RNA (1)...(19): siRNA sense strand
gcucaaggacgaagacaag

SEQ ID NO: 1929550 - RNA, 19 nt, Homo sapiens
  misc_RNA (1)...(19): siRNA sense strand
cggaauacauccagaagcu

SEQ ID NO: 1929551 - RNA, 19 nt, Homo sapiens
  misc_RNA (1)...(19): siRNA sense strand
ucaguggccucauccucaa

SEQ ID NO: 1929552 - RNA, 19 nt, Homo sapiens
  misc_RNA (1)...(19): siRNA sense strand
caaccugguggaaaucauu

SEQ ID NO: 1929553 - RNA, 19 nt, Homo sapiens
  misc_RNA (1)...(19): siRNA sense strand
uaguagcacuggaucuguu

SEQ ID NO: 1929554 - RNA, 19 nt, Homo sapiens
  misc_RNA (1)...(19): siRNA sense strand
cauccucuaugacgccauu

SEQ ID NO: 1929555 - RNA, 19 nt, Homo sapiens
  misc_RNA (1)...(19): siRNA sense strand
gcacaagaaccugcucauc

SEQ ID NO: 1929556 - RNA, 19 nt, Homo sapiens
  misc_RNA (1)...(19): siRNA sense strand
gauaguagcacuggaucug

SEQ ID NO: 1929557 - RNA, 19 nt, Homo sapiens
  misc_RNA (1)...(19): siRNA sense strand
agggugagcugcagaugug

SEQ ID NO: 1929558 - RNA, 19 nt, Homo sapiens
  misc_RNA (1)...(19): siRNA sense strand
gaaccugcucauccucuau

SEQ ID NO: 1929559 - RNA, 19 nt, Homo sapiens
  misc_RNA (1)...(19): siRNA sense strand
gaaguacucggaaauugac

SEQ ID NO: 1929560 - RNA, 19 nt, Homo sapiens
  misc_RNA (1)...(19): siRNA sense strand
ggaugaaguacucggaaau

SEQ ID NO: 1929561 - RNA, 19 nt, Homo sapiens
  misc_RNA (1)...(19): siRNA sense strand
cugcuuaacucggaggauu

SEQ ID NO: 1929562 - RNA, 19 nt, Homo sapiens
  misc_RNA (1)...(19): siRNA sense strand
cccaggcgcugauggacaa

SEQ ID NO: 1929563 - RNA, 19 nt, Homo sapiens
  misc_RNA (1)...(19): siRNA sense strand
gaggcuggcggcuuucuau

SEQ ID NO: 1929564 - RNA, 19 nt, Homo sapiens
  misc_RNA (1)...(19): siRNA sense strand
gaucugugaagacucauca

SEQ ID NO: 1929565 - RNA, 19 nt, Homo sapiens
  misc_RNA (1)...(19): siRNA sense strand
gcagaugguccucaacaac

SEQ ID NO: 1929566 - RNA, 19 nt, Homo sapiens
  misc_RNA (1)...(19): siRNA sense strand
ccagcacccugagcaguau

SEQ ID NO: 1929567 - RNA, 19 nt, Homo sapiens
  misc_RNA (1)...(19): siRNA sense strand
gggaaauaccagcacaaga

SEQ ID NO: 1929568 - RNA, 19 nt, Homo sapiens
  misc_RNA (1)...(19): siRNA sense strand
ggacagugacgcccucaac

SEQ ID NO: 1929569 - RNA, 19 nt, Homo sapiens
  misc_RNA (1)...(19): siRNA sense strand
ucaggaacaucagggacaa

SEQ ID NO: 1929570 - RNA, 19 nt, Homo sapiens
  misc_RNA (1)...(19): siRNA sense strand
ggccauuggugaaauuugc

SEQ ID NO: 1929571 - RNA, 19 nt, Homo sapiens
  misc_RNA (1)...(19): siRNA sense strand
acaagaaccugcucauccu

SEQ ID NO: 1929572 - RNA, 19 nt, Homo sapiens
  misc_RNA (1)...(19): siRNA sense strand
ucaccaccaucgcuuccaa

SEQ ID NO: 1929573 - RNA, 19 nt, Homo sapiens
  misc_RNA (1)...(19): siRNA sense strand
acucaaaggccuccucuuc

SEQ ID NO: 1929574 - RNA, 19 nt, Homo sapiens
  misc_RNA (1)...(19): siRNA sense strand
ggaggaugacgaugaugau

SEQ ID NO: 1929575 - RNA, 19 nt, Homo sapiens
  misc_RNA (1)...(19): siRNA sense strand
acagugagcaggacaucaa

SEQ ID NO: 1929576 - RNA, 19 nt, Homo sapiens
  misc_RNA (1)...(19): siRNA sense strand
uggacaauauugacaccuu

SEQ ID NO: 1929577 - RNA, 19 nt, Homo sapiens
  misc_RNA (1)...(19): siRNA sense strand
ugagaacguugcccuugag

SEQ ID NO: 1929578 - RNA, 19 nt, Homo sapiens
  misc_RNA (1)...(19): siRNA sense strand
cagcaguucucugagcaau

SEQ ID NO: 1929579 - RNA, 19 nt, Homo sapiens
  misc_RNA (1)...(19): siRNA sense strand
gcaggacuuuauuuuauuc

SEQ ID NO: 1929580 - RNA, 19 nt, Homo sapiens
  misc_RNA (1)...(19): siRNA sense strand
cagagaugcagccuuaugu

SEQ ID NO: 1929581 - RNA, 19 nt, Homo sapiens
  misc_RNA (1)...(19): siRNA sense strand
caucaugacauuguuguuc

SEQ ID NO: 1929582 - RNA, 19 nt, Homo sapiens
  misc_RNA (1)...(19): siRNA sense strand
ucaaccagccggaauacau

SEQ ID NO: 1929583 - RNA, 19 nt, Homo sapiens
  misc_RNA (1)...(19): siRNA sense strand
aggagugucucaacaacau

SEQ ID NO: 1929584 - RNA, 19 nt, Homo sapiens
  misc_RNA (1)...(19): siRNA sense strand
caaccagccggaauacauc

SEQ ID NO: 1929585 - RNA, 19 nt, Homo sapiens
  misc_RNA (1)...(19): siRNA sense strand
agaaccugcucauccucua

SEQ ID NO: 1929586 - RNA, 19 nt, Homo sapiens
  misc_RNA (1)...(19): siRNA sense strand
ccaggaccaugaugagaac

SEQ ID NO: 1929587 - RNA, 19 nt, Homo sapiens
  misc_RNA (1)...(19): siRNA sense strand
gcacagcaucauccaguac

SEQ ID NO: 1929588 - RNA, 19 nt, Homo sapiens
  misc_RNA (1)...(19): siRNA sense strand
cuucaacaacuaccugauu

SEQ ID NO: 1929589 - RNA, 19 nt, Homo sapiens
  misc_RNA (1)...(19): siRNA sense strand
ugaagacucaucagagcuu

SEQ ID NO: 1929590 - RNA, 19 nt, Homo sapiens
  misc_RNA (1)...(19): siRNA sense strand
gacuggaauuugaggaagu

SEQ ID NO: 1929591 - RNA, 19 nt, Homo sapiens
  misc_RNA (1)...(19): siRNA sense strand
gcccgcagcaacaucauga

SEQ ID NO: 1929592 - RNA, 19 nt, Homo sapiens
  misc_RNA (1)...(19): siRNA sense strand
uccugcagcugcucaaaga

SEQ ID NO: 1929593 - RNA, 19 nt, Homo sapiens
  misc_RNA (1)...(19): siRNA sense strand
uuccugacuucaacaacua

SEQ ID NO: 1929594 - RNA, 19 nt, Homo sapiens
  misc_RNA (1)...(19): siRNA sense strand
gagugucucaacaacauug

SEQ ID NO: 1929595 - RNA, 19 nt, Homo sapiens
  misc_RNA (1)...(19): siRNA sense strand
gggugagcccgaaggauga

SEQ ID NO: 1929596 - RNA, 19 nt, Homo sapiens
  misc_RNA (1)...(19): siRNA sense strand
gcucaggccaugauguaca

SEQ ID NO: 1929597 - RNA, 19 nt, Homo sapiens
  misc_RNA (1)...(19): siRNA sense strand
cgugcgggauaaacucaaa

SEQ ID NO: 1929598 - RNA, 19 nt, Homo sapiens
  misc_RNA (1)...(19): siRNA sense strand
augaaguacucggaaauug

SEQ ID NO: 1929599 - RNA, 19 nt, Homo sapiens
  misc_RNA (1)...(19): siRNA sense strand
augagaacguugcccuuga

SEQ ID NO: 1929600 - RNA, 19 nt, Homo sapiens
  misc_RNA (1)...(19): siRNA sense strand
cccaagacacugcuggaaa

SEQ ID NO: 1929601 - RNA, 19 nt, Homo sapiens
  misc_RNA (1)...(19): siRNA sense strand
cggaggaugacgaugauga

SEQ ID NO: 1929602 - RNA, 19 nt, Homo sapiens
  misc_RNA (1)...(19): siRNA sense strand
ggauaaacucaaacaacuc

SEQ ID NO: 1929603 - RNA, 19 nt, Homo sapiens
  misc_RNA (1)...(19): siRNA sense strand
aaacucaaacaacucaauc

SEQ ID NO: 1929604 - RNA, 19 nt, Homo sapiens
  misc_RNA (1)...(19): siRNA sense strand
ggaugaccuucgggacaug

SEQ ID NO: 1929605 - RNA, 19 nt, Homo sapiens
  misc_RNA (1)...(19): siRNA sense strand
cgacccaacacacccaaga

SEQ ID NO: 1929606 - RNA, 19 nt, Homo sapiens
  misc_RNA (1)...(19): siRNA sense strand
ugucuuugccuuugggaaa

SEQ ID NO: 1929607 - RNA, 19 nt, Homo sapiens
  misc_RNA (1)...(19): siRNA sense strand
caccuacucccacuacuca

SEQ ID NO: 1929608 - RNA, 19 nt, Homo sapiens
  misc_RNA (1)...(19): siRNA sense strand
ggacgcggaggaugacgau

SEQ ID NO: 1929609 - RNA, 19 nt, Homo sapiens
  misc_RNA (1)...(19): siRNA sense strand
gggauguggaggaggauga

SEQ ID NO: 1929610 - RNA, 19 nt, Homo sapiens
  misc_RNA (1)...(19): siRNA sense strand
gcgggaaccuguuuacaaa

SEQ ID NO: 1929611 - RNA, 19 nt, Homo sapiens
  misc_RNA (1)...(19): siRNA sense strand
ggauucagcccaaugguua

SEQ ID NO: 1929612 - RNA, 19 nt, Homo sapiens
  misc_RNA (1)...(19): siRNA sense strand
cagaaaagcuguccgauuu

SEQ ID NO: 1929613 - RNA, 19 nt, Homo sapiens
  misc_RNA (1)...(19): siRNA sense strand
gcaggcggcuuuagucguu

SEQ ID NO: 1929614 - RNA, 19 nt, Homo sapiens
  misc_RNA (1)...(19): siRNA sense strand
gcaagccuguggagaaguu

SEQ ID NO: 1929615 - RNA, 19 nt, Homo sapiens
  misc_RNA (1)...(19): siRNA sense strand
uuacaaaccuggacagcuu

SEQ ID NO: 1929616 - RNA, 19 nt, Homo sapiens
  misc_RNA (1)...(19): siRNA sense strand
ggagauaacgccucggaaa

SEQ ID NO: 1929617 - RNA, 19 nt, Homo sapiens
  misc_RNA (1)...(19): siRNA sense strand
gcgagaagcccuacaagug

SEQ ID NO: 1929618 - RNA, 19 nt, Homo sapiens
  misc_RNA (1)...(19): siRNA sense strand
gcaagagcagcacagauuu

SEQ ID NO: 1929619 - RNA, 19 nt, Homo sapiens
  misc_RNA (1)...(19): siRNA sense strand
agacguacauuccaaagga

SEQ ID NO: 1929620 - RNA, 19 nt, Homo sapiens
  misc_RNA (1)...(19): siRNA sense strand
ggacauccucaacaucuuu

SEQ ID NO: 1929621 - RNA, 19 nt, Homo sapiens
  misc_RNA (1)...(19): siRNA sense strand
ggcaagagcagcacagauu

SEQ ID NO: 1929622 - RNA, 19 nt, Homo sapiens
  misc_RNA (1)...(19): siRNA sense strand
gagagaccauucuaacaca

SEQ ID NO: 1929623 - RNA, 19 nt, Homo sapiens
  misc_RNA (1)...(19): siRNA sense strand
gcuagcaugccuaagaaua

SEQ ID NO: 1929624 - RNA, 19 nt, Homo sapiens
  misc_RNA (1)...(19): siRNA sense strand
ggacguggccuucgacaag

SEQ ID NO: 1929625 - RNA, 19 nt, Homo sapiens
  misc_RNA (1)...(19): siRNA sense strand
ccucaugccgcuagauuua

SEQ ID NO: 1929626 - RNA, 19 nt, Homo sapiens
  misc_RNA (1)...(19): siRNA sense strand
ugaaggcgcacaugaagaa

SEQ ID NO: 1929627 - RNA, 19 nt, Homo sapiens
  misc_RNA (1)...(19): siRNA sense strand
gaccacggcugccacaucu

SEQ ID NO: 1929628 - RNA, 19 nt, Homo sapiens
  misc_RNA (1)...(19): siRNA sense strand
agacagugccucugagaaa

SEQ ID NO: 1929629 - RNA, 19 nt, Homo sapiens
  misc_RNA (1)...(19): siRNA sense strand
gaagggcaaccugaagauu

SEQ ID NO: 1929630 - RNA, 19 nt, Homo sapiens
  misc_RNA (1)...(19): siRNA sense strand
gucacaagaugggagauaa

SEQ ID NO: 1929631 - RNA, 19 nt, Homo sapiens
  misc_RNA (1)...(19): siRNA sense strand
gauaacgccucggaaagag

SEQ ID NO: 1929632 - RNA, 19 nt, Homo sapiens
  misc_RNA (1)...(19): siRNA sense strand
cgagaagcccuacaagugu

SEQ ID NO: 1929633 - RNA, 19 nt, Homo sapiens
  misc_RNA (1)...(19): siRNA sense strand
cuagcaugccuaagaauaa

SEQ ID NO: 1929634 - RNA, 19 nt, Homo sapiens
  misc_RNA (1)...(19): siRNA sense strand
ccgcuagcaugccuaagaa

SEQ ID NO: 1929635 - RNA, 19 nt, Homo sapiens
  misc_RNA (1)...(19): siRNA sense strand
ggacaccaagcaguucuuu

SEQ ID NO: 1929636 - RNA, 19 nt, Homo sapiens
  misc_RNA (1)...(19): siRNA sense strand
caagggagagaccauucua

SEQ ID NO: 1929637 - RNA, 19 nt, Homo sapiens
  misc_RNA (1)...(19): siRNA sense strand
caucagaagcaauuugguu

SEQ ID NO: 1929638 - RNA, 19 nt, Homo sapiens
  misc_RNA (1)...(19): siRNA sense strand
gcacaacaaggaacacucu

SEQ ID NO: 1929639 - RNA, 19 nt, Homo sapiens
  misc_RNA (1)...(19): siRNA sense strand
ggagagaccauucuaacac

SEQ ID NO: 1929640 - RNA, 19 nt, Homo sapiens
  misc_RNA (1)...(19): siRNA sense strand
agaacaggcccaagaguga

SEQ ID NO: 1929641 - RNA, 19 nt, Homo sapiens
  misc_RNA (1)...(19): siRNA sense strand
gagauaacgccucggaaag

SEQ ID NO: 1929642 - RNA, 19 nt, Homo sapiens
  misc_RNA (1)...(19): siRNA sense strand
gcaagaacaggcccaagag

SEQ ID NO: 1929643 - RNA, 19 nt, Homo sapiens
  misc_RNA (1)...(19): siRNA sense strand
caagugcgggaaccuguuu

SEQ ID NO: 1929644 - RNA, 19 nt, Homo sapiens
  misc_RNA (1)...(19): siRNA sense strand
gcaagaucuuccgcaccua

SEQ ID NO: 1929645 - RNA, 19 nt, Homo sapiens
  misc_RNA (1)...(19): siRNA sense strand
gacauccucaacaucuuua

SEQ ID NO: 1929646 - RNA, 19 nt, Homo sapiens
  misc_RNA (1)...(19): siRNA sense strand
gcaauuugguuuuccuuuc

SEQ ID NO: 1929647 - RNA, 19 nt, Homo sapiens
  misc_RNA (1)...(19): siRNA sense strand
caggagaguucgucugcau

SEQ ID NO: 1929648 - RNA, 19 nt, Homo sapiens
  misc_RNA (1)...(19): siRNA sense strand
gaccucaugccgcuagauu

SEQ ID NO: 1929649 - RNA, 19 nt, Homo sapiens
  misc_RNA (1)...(19): siRNA sense strand
gacagugccucugagaaag

SEQ ID NO: 1929650 - RNA, 19 nt, Homo sapiens
  misc_RNA (1)...(19): siRNA sense strand
cagaagggcaaccugaaga

SEQ ID NO: 1929651 - RNA, 19 nt, Homo sapiens
  misc_RNA (1)...(19): siRNA sense strand
gagcccugguuccucaaga

SEQ ID NO: 1929652 - RNA, 19 nt, Homo sapiens
  misc_RNA (1)...(19): siRNA sense strand
gggagagaccauucuaaca

SEQ ID NO: 1929653 - RNA, 19 nt, Homo sapiens
  misc_RNA (1)...(19): siRNA sense strand
cagcacagauuuucuaugg

SEQ ID NO: 1929654 - RNA, 19 nt, Homo sapiens
  misc_RNA (1)...(19): siRNA sense strand
gaaaacaguagcagagaga

SEQ ID NO: 1929655 - RNA, 19 nt, Homo sapiens
  misc_RNA (1)...(19): siRNA sense strand
agaccagagucacaagaug

SEQ ID NO: 1929656 - RNA, 19 nt, Homo sapiens
  misc_RNA (1)...(19): siRNA sense strand
caagaucuuccgcaccuau

SEQ ID NO: 1929657 - RNA, 19 nt, Homo sapiens
  misc_RNA (1)...(19): siRNA sense strand
gcuucuguguccauacuug

SEQ ID NO: 1929658 - RNA, 19 nt, Homo sapiens
  misc_RNA (1)...(19): siRNA sense strand
gcagccacaagaccuacua

SEQ ID NO: 1929659 - RNA, 19 nt, Homo sapiens
  misc_RNA (1)...(19): siRNA sense strand
gcagaaaagcuguccgauu

SEQ ID NO: 1929660 - RNA, 19 nt, Homo sapiens
  misc_RNA (1)...(19): siRNA sense strand
ggagaccagagucacaaga

SEQ ID NO: 1929661 - RNA, 19 nt, Homo sapiens
  misc_RNA (1)...(19): siRNA sense strand
uuuaagacguacauuccaa

SEQ ID NO: 1929662 - RNA, 19 nt, Homo sapiens
  misc_RNA (1)...(19): siRNA sense strand
uagcaagccuguggagaag

SEQ ID NO: 1929663 - RNA, 19 nt, Homo sapiens
  misc_RNA (1)...(19): siRNA sense strand
ucagcccaaugguuacaaa

SEQ ID NO: 1929664 - RNA, 19 nt, Homo sapiens
  misc_RNA (1)...(19): siRNA sense strand
gcaagcacacgggcgagaa

SEQ ID NO: 1929665 - RNA, 19 nt, Homo sapiens
  misc_RNA (1)...(19): siRNA sense strand
agagccaguucgagcguaa

SEQ ID NO: 1929666 - RNA, 19 nt, Homo sapiens
  misc_RNA (1)...(19): siRNA sense strand
gcaaguccuccgagugcuu

SEQ ID NO: 1929667 - RNA, 19 nt, Homo sapiens
  misc_RNA (1)...(19): siRNA sense strand
gagaccagagucacaagau

SEQ ID NO: 1929668 - RNA, 19 nt, Homo sapiens
  misc_RNA (1)...(19): siRNA sense strand
aaacaagggagagaccauu

SEQ ID NO: 1929669 - RNA, 19 nt, Homo sapiens
  misc_RNA (1)...(19): siRNA sense strand
uagcaugccuaagaauaag

SEQ ID NO: 1929670 - RNA, 19 nt, Homo sapiens
  misc_RNA (1)...(19): siRNA sense strand
gcgcaagcgugagcaggau

SEQ ID NO: 1929671 - RNA, 19 nt, Homo sapiens
  misc_RNA (1)...(19): siRNA sense strand
gccgcuagcaugccuaaga

SEQ ID NO: 1929672 - RNA, 19 nt, Homo sapiens
  misc_RNA (1)...(19): siRNA sense strand
gggaugaccccagcaauaa

SEQ ID NO: 1929673 - RNA, 19 nt, Homo sapiens
  misc_RNA (1)...(19): siRNA sense strand
gagcagcacagauuuucua

SEQ ID NO: 1929674 - RNA, 19 nt, Homo sapiens
  misc_RNA (1)...(19): siRNA sense strand
agauaacgccucggaaaga

SEQ ID NO: 1929675 - RNA, 19 nt, Homo sapiens
  misc_RNA (1)...(19): siRNA sense strand
ccacaugcgggcacacuca

SEQ ID NO: 1929676 - RNA, 19 nt, Homo sapiens
  misc_RNA (1)...(19): siRNA sense strand
gcgcacaagccguucaagu

SEQ ID NO: 1929677 - RNA, 19 nt, Homo sapiens
  misc_RNA (1)...(19): siRNA sense strand
ggacuuugcgacccucuac

SEQ ID NO: 1929678 - RNA, 19 nt, Homo sapiens
  misc_RNA (1)...(19): siRNA sense strand
guccuacacuccaucaaac

SEQ ID NO: 1929679 - RNA, 19 nt, Homo sapiens
  misc_RNA (1)...(19): siRNA sense strand
cguccuacacuccaucaaa

SEQ ID NO: 1929680 - RNA, 19 nt, Homo sapiens
  misc_RNA (1)...(19): siRNA sense strand
auagcaagccuguggagaa

SEQ ID NO: 1929681 - RNA, 19 nt, Homo sapiens
  misc_RNA (1)...(19): siRNA sense strand
gaaaagcuguccgauuugc

SEQ ID NO: 1929682 - RNA, 19 nt, Homo sapiens
  misc_RNA (1)...(19): siRNA sense strand
uagcagagagacuucuaga

SEQ ID NO: 1929683 - RNA, 19 nt, Homo sapiens
  misc_RNA (1)...(19): siRNA sense strand
cagcuucuguguccauacu

SEQ ID NO: 1929684 - RNA, 19 nt, Homo sapiens
  misc_RNA (1)...(19): siRNA sense strand
ccaagacgggcagcaagaa

SEQ ID NO: 1929685 - RNA, 19 nt, Homo sapiens
  misc_RNA (1)...(19): siRNA sense strand
ucugagaaagggaaccuaa

SEQ ID NO: 1929686 - RNA, 19 nt, Homo sapiens
  misc_RNA (1)...(19): siRNA sense strand
uguccgauuugcacaacaa

SEQ ID NO: 1929687 - RNA, 19 nt, Homo sapiens
  misc_RNA (1)...(19): siRNA sense strand
acaccaagcaguucuuucu

SEQ ID NO: 1929688 - RNA, 19 nt, Homo sapiens
  misc_RNA (1)...(19): siRNA sense strand
caagaacaggcccaagagu

SEQ ID NO: 1929689 - RNA, 19 nt, Homo sapiens
  misc_RNA (1)...(19): siRNA sense strand
cagauuuucuauggacuua

SEQ ID NO: 1929690 - RNA, 19 nt, Homo sapiens
  misc_RNA (1)...(19): siRNA sense strand
gcacggggacucugauuca

SEQ ID NO: 1929691 - RNA, 19 nt, Homo sapiens
  misc_RNA (1)...(19): siRNA sense strand
cccaggagcugaggacucu

SEQ ID NO: 1929692 - RNA, 19 nt, Homo sapiens
  misc_RNA (1)...(19): siRNA sense strand
ucaugccgcuagauuuaag

SEQ ID NO: 1929693 - RNA, 19 nt, Homo sapiens
  misc_RNA (1)...(19): siRNA sense strand
cgcacaagccguucaagug

SEQ ID NO: 1929694 - RNA, 19 nt, Homo sapiens
  misc_RNA (1)...(19): siRNA sense strand
ccucggacaccaagcaguu

SEQ ID NO: 1929695 - RNA, 19 nt, Homo sapiens
  misc_RNA (1)...(19): siRNA sense strand
ccugacggguaucgacaga

SEQ ID NO: 1929696 - RNA, 19 nt, Homo sapiens
  misc_RNA (1)...(19): siRNA sense strand
cagguaccguccagacagu

SEQ ID NO: 1929697 - RNA, 19 nt, Homo sapiens
  misc_RNA (1)...(19): siRNA sense strand
ugccacaccugcugcaucu

SEQ ID NO: 1929698 - RNA, 19 nt, Homo sapiens
  misc_RNA (1)...(19): siRNA sense strand
cggccgaguaccucaagua

SEQ ID NO: 1929699 - RNA, 19 nt, Homo sapiens
  misc_RNA (1)...(19): siRNA sense strand
gccuggacauccucaacau

SEQ ID NO: 1929700 - RNA, 19 nt, Homo sapiens
  misc_RNA (1)...(19): siRNA sense strand
cagcuugaacgcccacaau

SEQ ID NO: 1929701 - RNA, 19 nt, Homo sapiens
  misc_RNA (1)...(19): siRNA sense strand
uuaagacguacauuccaaa

SEQ ID NO: 1929702 - RNA, 19 nt, Homo sapiens
  misc_RNA (1)...(19): siRNA sense strand
aagaauaaggagagccauu

SEQ ID NO: 1929703 - RNA, 19 nt, Homo sapiens
  misc_RNA (1)...(19): siRNA sense strand
caagagcagcacagauuuu

SEQ ID NO: 1929704 - RNA, 19 nt, Homo sapiens
  misc_RNA (1)...(19): siRNA sense strand
gcagggaucgcagcuucug

SEQ ID NO: 1929705 - RNA, 19 nt, Homo sapiens
  misc_RNA (1)...(19): siRNA sense strand
ccagaagggcaaccugaag

SEQ ID NO: 1929706 - RNA, 19 nt, Homo sapiens
  misc_RNA (1)...(19): siRNA sense strand
gaacugaagcccuaucaua

SEQ ID NO: 1929707 - RNA, 19 nt, Homo sapiens
  misc_RNA (1)...(19): siRNA sense strand
ggaaugugcugaccuucua

SEQ ID NO: 1929708 - RNA, 19 nt, Homo sapiens
  misc_RNA (1)...(19): siRNA sense strand
ugacaaagauccugugguu

SEQ ID NO: 1929709 - RNA, 19 nt, Homo sapiens
  misc_RNA (1)...(19): siRNA sense strand
gaaagacauugaauccauu

SEQ ID NO: 1929710 - RNA, 19 nt, Homo sapiens
  misc_RNA (1)...(19): siRNA sense strand
ggaaagacauugaauccau

SEQ ID NO: 1929711 - RNA, 19 nt, Homo sapiens
  misc_RNA (1)...(19): siRNA sense strand
gaagaugugguccuacuaa

SEQ ID NO: 1929712 - RNA, 19 nt, Homo sapiens
  misc_RNA (1)...(19): siRNA sense strand
gggaauaucucuguaaucu

SEQ ID NO: 1929713 - RNA, 19 nt, Homo sapiens
  misc_RNA (1)...(19): siRNA sense strand
gcuccaggcuuuagauuau

SEQ ID NO: 1929714 - RNA, 19 nt, Homo sapiens
  misc_RNA (1)...(19): siRNA sense strand
ucagugauguguuuagaaa

SEQ ID NO: 1929715 - RNA, 19 nt, Homo sapiens
  misc_RNA (1)...(19): siRNA sense strand
gacauugaauccauuagaa

SEQ ID NO: 1929716 - RNA, 19 nt, Homo sapiens
  misc_RNA (1)...(19): siRNA sense strand
gagauuggauuucuucaag

SEQ ID NO: 1929717 - RNA, 19 nt, Homo sapiens
  misc_RNA (1)...(19): siRNA sense strand
ucacaaagacuggaauuaa

SEQ ID NO: 1929718 - RNA, 19 nt, Homo sapiens
  misc_RNA (1)...(19): siRNA sense strand
ucagaguccucaacaguuu

SEQ ID NO: 1929719 - RNA, 19 nt, Homo sapiens
  misc_RNA (1)...(19): siRNA sense strand
ggaggugguucaauucgaa

SEQ ID NO: 1929720 - RNA, 19 nt, Homo sapiens
  misc_RNA (1)...(19): siRNA sense strand
aauaggaggugguucaauu

SEQ ID NO: 1929721 - RNA, 19 nt, Homo sapiens
  misc_RNA (1)...(19): siRNA sense strand
ggaauucuccaguugcuaa

SEQ ID NO: 1929722 - RNA, 19 nt, Homo sapiens
  misc_RNA (1)...(19): siRNA sense strand
gacacucgcuuuggaauga

SEQ ID NO: 1929723 - RNA, 19 nt, Homo sapiens
  misc_RNA (1)...(19): siRNA sense strand
cacaaagacuggaauuaau

SEQ ID NO: 1929724 - RNA, 19 nt, Homo sapiens
  misc_RNA (1)...(19): siRNA sense strand
ggaauugccuuaggguuag

SEQ ID NO: 1929725 - RNA, 19 nt, Homo sapiens
  misc_RNA (1)...(19): siRNA sense strand
uuacucagauugacauaga

SEQ ID NO: 1929726 - RNA, 19 nt, Homo sapiens
  misc_RNA (1)...(19): siRNA sense strand
aaucuuaccuguauuccuu

SEQ ID NO: 1929727 - RNA, 19 nt, Homo sapiens
  misc_RNA (1)...(19): siRNA sense strand
agacugauaugccuuguca

SEQ ID NO: 1929728 - RNA, 19 nt, Homo sapiens
  misc_RNA (1)...(19): siRNA sense strand
ggaaaucuuaccuguauuc

SEQ ID NO: 1929729 - RNA, 19 nt, Homo sapiens
  misc_RNA (1)...(19): siRNA sense strand
aaacacagagauuggauuu

SEQ ID NO: 1929730 - RNA, 19 nt, Homo sapiens
  misc_RNA (1)...(19): siRNA sense strand
caaagauccugugguuguu

SEQ ID NO: 1929731 - RNA, 19 nt, Homo sapiens
  misc_RNA (1)...(19): siRNA sense strand
gcauggguuuguggauaua

SEQ ID NO: 1929732 - RNA, 19 nt, Homo sapiens
  misc_RNA (1)...(19): siRNA sense strand
ggucccagauggucaugaa

SEQ ID NO: 1929733 - RNA, 19 nt, Homo sapiens
  misc_RNA (1)...(19): siRNA sense strand
cauaauggagucacaaaga

SEQ ID NO: 1929734 - RNA, 19 nt, Homo sapiens
  misc_RNA (1)...(19): siRNA sense strand
acacagagauuggauuucu

SEQ ID NO: 1929735 - RNA, 19 nt, Homo sapiens
  misc_RNA (1)...(19): siRNA sense strand
ucugaugguuggcgguuua

SEQ ID NO: 1929736 - RNA, 19 nt, Homo sapiens
  misc_RNA (1)...(19): siRNA sense strand
auagagaugucauuuguag

SEQ ID NO: 1929737 - RNA, 19 nt, Homo sapiens
  misc_RNA (1)...(19): siRNA sense strand
agacagacagccugaguuu

SEQ ID NO: 1929738 - RNA, 19 nt, Homo sapiens
  misc_RNA (1)...(19): siRNA sense strand
gcgggaauaucucuguaau

SEQ ID NO: 1929739 - RNA, 19 nt, Homo sapiens
  misc_RNA (1)...(19): siRNA sense strand
gaaacacagagauuggauu

SEQ ID NO: 1929740 - RNA, 19 nt, Homo sapiens
  misc_RNA (1)...(19): siRNA sense strand
gcuuuggaaugaagauuau

SEQ ID NO: 1929741 - RNA, 19 nt, Homo sapiens
  misc_RNA (1)...(19): siRNA sense strand
gugcugaccuucuagaaac

SEQ ID NO: 1929742 - RNA, 19 nt, Homo sapiens
  misc_RNA (1)...(19): siRNA sense strand
uccaguugcuaauuucaua

SEQ ID NO: 1929743 - RNA, 19 nt, Homo sapiens
  misc_RNA (1)...(19): siRNA sense strand
ugaaggagcaaaauacuua

SEQ ID NO: 1929744 - RNA, 19 nt, Homo sapiens
  misc_RNA (1)...(19): siRNA sense strand
gccaauagaaacuggaauu

SEQ ID NO: 1929745 - RNA, 19 nt, Homo sapiens
  misc_RNA (1)...(19): siRNA sense strand
aaauggcaaugaaauagga

SEQ ID NO: 1929746 - RNA, 19 nt, Homo sapiens
  misc_RNA (1)...(19): siRNA sense strand
aggaauugccuuaggguua

SEQ ID NO: 1929747 - RNA, 19 nt, Homo sapiens
  misc_RNA (1)...(19): siRNA sense strand
gaaauaggaggugguucaa

SEQ ID NO: 1929748 - RNA, 19 nt, Homo sapiens
  misc_RNA (1)...(19): siRNA sense strand
gguuggcgguuuagacaga

SEQ ID NO: 1929749 - RNA, 19 nt, Homo sapiens
  misc_RNA (1)...(19): siRNA sense strand
ggaagaugugguccuacua

SEQ ID NO: 1929750 - RNA, 19 nt, Homo sapiens
  misc_RNA (1)...(19): siRNA sense strand
cugcauggguuuguggaua

SEQ ID NO: 1929751 - RNA, 19 nt, Homo sapiens
  misc_RNA (1)...(19): siRNA sense strand
caaagacuggaauuaauca

SEQ ID NO: 1929752 - RNA, 19 nt, Homo sapiens
  misc_RNA (1)...(19): siRNA sense strand
agacagauauuuucagguu

SEQ ID NO: 1929753 - RNA, 19 nt, Homo sapiens
  misc_RNA (1)...(19): siRNA sense strand
ugucauagccuucccaaag

SEQ ID NO: 1929754 - RNA, 19 nt, Homo sapiens
  misc_RNA (1)...(19): siRNA sense strand
gaacugugaaagccauaug

SEQ ID NO: 1929755 - RNA, 19 nt, Homo sapiens
  misc_RNA (1)...(19): siRNA sense strand
gauccagaguuuaauugag

SEQ ID NO: 1929756 - RNA, 19 nt, Homo sapiens
  misc_RNA (1)...(19): siRNA sense strand
agaguuuaauugaggguuu

SEQ ID NO: 1929757 - RNA, 19 nt, Homo sapiens
  misc_RNA (1)...(19): siRNA sense strand
gucauagccuucccaaagu

SEQ ID NO: 1929758 - RNA, 19 nt, Homo sapiens
  misc_RNA (1)...(19): siRNA sense strand
uuaagcaacuucugauggu

SEQ ID NO: 1929759 - RNA, 19 nt, Homo sapiens
  misc_RNA (1)...(19): siRNA sense strand
gaugugguccuacuaacug

SEQ ID NO: 1929760 - RNA, 19 nt, Homo sapiens
  misc_RNA (1)...(19): siRNA sense strand
ggauccagaguuuaauuga

SEQ ID NO: 1929761 - RNA, 19 nt, Homo sapiens
  misc_RNA (1)...(19): siRNA sense strand
acucuguucucuuuccuuu

SEQ ID NO: 1929762 - RNA, 19 nt, Homo sapiens
  misc_RNA (1)...(19): siRNA sense strand
guuauauccuggcaaccuu

SEQ ID NO: 1929763 - RNA, 19 nt, Homo sapiens
  misc_RNA (1)...(19): siRNA sense strand
gaguuuaauugaggguuug

SEQ ID NO: 1929764 - RNA, 19 nt, Homo sapiens
  misc_RNA (1)...(19): siRNA sense strand
ccaccuauggaacugauaa

SEQ ID NO: 1929765 - RNA, 19 nt, Homo sapiens
  misc_RNA (1)...(19): siRNA sense strand
gacagacagccugaguuua

SEQ ID NO: 1929766 - RNA, 19 nt, Homo sapiens
  misc_RNA (1)...(19): siRNA sense strand
acagacagccugaguuuac

SEQ ID NO: 1929767 - RNA, 19 nt, Homo sapiens
  misc_RNA (1)...(19): siRNA sense strand
ucauggaggaauugccuua

SEQ ID NO: 1929768 - RNA, 19 nt, Homo sapiens
  misc_RNA (1)...(19): siRNA sense strand
acaaagacuggaauuaauc

SEQ ID NO: 1929769 - RNA, 19 nt, Homo sapiens
  misc_RNA (1)...(19): siRNA sense strand
uaagcaacuucugaugguu

SEQ ID NO: 1929770 - RNA, 19 nt, Homo sapiens
  misc_RNA (1)...(19): siRNA sense strand
auucuccaguugcuaauuu

SEQ ID NO: 1929771 - RNA, 19 nt, Homo sapiens
  misc_RNA (1)...(19): siRNA sense strand
caguauuccuggcccaaug

SEQ ID NO: 1929772 - RNA, 19 nt, Homo sapiens
  misc_RNA (1)...(19): siRNA sense strand
gggauccagaguuuaauug

SEQ ID NO: 1929773 - RNA, 19 nt, Homo sapiens
  misc_RNA (1)...(19): siRNA sense strand
gaauugccuuaggguuaga

SEQ ID NO: 1929774 - RNA, 19 nt, Homo sapiens
  misc_RNA (1)...(19): siRNA sense strand
gcccguagccaacacuaug

SEQ ID NO: 1929775 - RNA, 19 nt, Homo sapiens
  misc_RNA (1)...(19): siRNA sense strand
guugcuaauuucauaaugg

SEQ ID NO: 1929776 - RNA, 19 nt, Homo sapiens
  misc_RNA (1)...(19): siRNA sense strand
aggguuugcuccaguauuc

SEQ ID NO: 1929777 - RNA, 19 nt, Homo sapiens
  misc_RNA (1)...(19): siRNA sense strand
ggagagcacaauaaagcau

SEQ ID NO: 1929778 - RNA, 19 nt, Homo sapiens
  misc_RNA (1)...(19): siRNA sense strand
gccaacagacuccaaagca

SEQ ID NO: 1929779 - RNA, 19 nt, Homo sapiens
  misc_RNA (1)...(19): siRNA sense strand
caagccaacagacuccaaa

SEQ ID NO: 1929780 - RNA, 19 nt, Homo sapiens
  misc_RNA (1)...(19): siRNA sense strand
uagccaacacuaugacuug

SEQ ID NO: 1929781 - RNA, 19 nt, Homo sapiens
  misc_RNA (1)...(19): siRNA sense strand
cauagagaugucauuugua

SEQ ID NO: 1929782 - RNA, 19 nt, Homo sapiens
  misc_RNA (1)...(19): siRNA sense strand
uaaaggaggaugugaaaau

SEQ ID NO: 1929783 - RNA, 19 nt, Homo sapiens
  misc_RNA (1)...(19): siRNA sense strand
agacauugaauccauuaga

SEQ ID NO: 1929784 - RNA, 19 nt, Homo sapiens
  misc_RNA (1)...(19): siRNA sense strand
cuauggaacugauaaaccu

SEQ ID NO: 1929785 - RNA, 19 nt, Homo sapiens
  misc_RNA (1)...(19): siRNA sense strand
acuaaaggaggaugugaaa

SEQ ID NO: 1929786 - RNA, 19 nt, Homo sapiens
  misc_RNA (1)...(19): siRNA sense strand
uccuuugggugguagauuu

SEQ ID NO: 1929787 - RNA, 19 nt, Homo sapiens
  misc_RNA (1)...(19): siRNA sense strand
cagaguccucaacaguuua

SEQ ID NO: 1929788 - RNA, 19 nt, Homo sapiens
  misc_RNA (1)...(19): siRNA sense strand
ugcauggguuuguggauau

SEQ ID NO: 1929789 - RNA, 19 nt, Homo sapiens
  misc_RNA (1)...(19): siRNA sense strand
aggguuagacagacugaua

SEQ ID NO: 1929790 - RNA, 19 nt, Homo sapiens
  misc_RNA (1)...(19): siRNA sense strand
cccaucugcuccaggcuuu

SEQ ID NO: 1929791 - RNA, 19 nt, Homo sapiens
  misc_RNA (1)...(19): siRNA sense strand
ucuguucucuuuccuuugg

SEQ ID NO: 1929792 - RNA, 19 nt, Homo sapiens
  misc_RNA (1)...(19): siRNA sense strand
aaaggaaagacauugaauc

SEQ ID NO: 1929793 - RNA, 19 nt, Homo sapiens
  misc_RNA (1)...(19): siRNA sense strand
ccaauagaaacuggaauuc

SEQ ID NO: 1929794 - RNA, 19 nt, Homo sapiens
  misc_RNA (1)...(19): siRNA sense strand
ucagguugcccgauguuau

SEQ ID NO: 1929795 - RNA, 19 nt, Homo sapiens
  misc_RNA (1)...(19): siRNA sense strand
ugaaaaugcucucccaucu

SEQ ID NO: 1929796 - RNA, 19 nt, Homo sapiens
  misc_RNA (1)...(19): siRNA sense strand
caugcucuuuguuaggaaa

SEQ ID NO: 1929797 - RNA, 19 nt, Homo sapiens
  misc_RNA (1)...(19): siRNA sense strand
gcaugcucuuuguuaggaa

SEQ ID NO: 1929798 - RNA, 19 nt, Homo sapiens
  misc_RNA (1)...(19): siRNA sense strand
gucacaaagacuggaauua

SEQ ID NO: 1929799 - RNA, 19 nt, Homo sapiens
  misc_RNA (1)...(19): siRNA sense strand
cacagagauuggauuucuu

SEQ ID NO: 1929800 - RNA, 19 nt, Homo sapiens
  misc_RNA (1)...(19): siRNA sense strand
aacugaagcccuaucauau

SEQ ID NO: 1929801 - RNA, 19 nt, Homo sapiens
  misc_RNA (1)...(19): siRNA sense strand
ccuguacacugagcccaaa

SEQ ID NO: 1929802 - RNA, 19 nt, Homo sapiens
  misc_RNA (1)...(19): siRNA sense strand
gaaaauuacgacuggaaug

SEQ ID NO: 1929803 - RNA, 19 nt, Homo sapiens
  misc_RNA (1)...(19): siRNA sense strand
uauccuggcaaccuuacua

SEQ ID NO: 1929804 - RNA, 19 nt, Homo sapiens
  misc_RNA (1)...(19): siRNA sense strand
aagcagaaagagcucauug

SEQ ID NO: 1929805 - RNA, 19 nt, Homo sapiens
  misc_RNA (1)...(19): siRNA sense strand
ggguuagacagacugauau

SEQ ID NO: 1929806 - RNA, 19 nt, Homo sapiens
  misc_RNA (1)...(19): siRNA sense strand
caagagaccugguuagaaa

SEQ ID NO: 1929807 - RNA, 19 nt, Homo sapiens
  misc_RNA (1)...(19): siRNA sense strand
caagaaggcuuaagaacuu

SEQ ID NO: 1929808 - RNA, 19 nt, Homo sapiens
  misc_RNA (1)...(19): siRNA sense strand
ggaaauacuucaugaaauc

SEQ ID NO: 1929809 - RNA, 19 nt, Homo sapiens
  misc_RNA (1)...(19): siRNA sense strand
gaaggucucuguguagaaa

SEQ ID NO: 1929810 - RNA, 19 nt, Homo sapiens
  misc_RNA (1)...(19): siRNA sense strand
gcuagaaggucucugugua

SEQ ID NO: 1929811 - RNA, 19 nt, Homo sapiens
  misc_RNA (1)...(19): siRNA sense strand
gcacugcucugaagaucuu

SEQ ID NO: 1929812 - RNA, 19 nt, Homo sapiens
  misc_RNA (1)...(19): siRNA sense strand
caacagcgauuugauggaa

SEQ ID NO: 1929813 - RNA, 19 nt, Homo sapiens
  misc_RNA (1)...(19): siRNA sense strand
gaaaguggaccuaguuaug

SEQ ID NO: 1929814 - RNA, 19 nt, Homo sapiens
  misc_RNA (1)...(19): siRNA sense strand
cuacaagugugaaagaauu

SEQ ID NO: 1929815 - RNA, 19 nt, Homo sapiens
  misc_RNA (1)...(19): siRNA sense strand
caacgcauuuggaagaauu

SEQ ID NO: 1929816 - RNA, 19 nt, Homo sapiens
  misc_RNA (1)...(19): siRNA sense strand
gacacaacauuacagaauu

SEQ ID NO: 1929817 - RNA, 19 nt, Homo sapiens
  misc_RNA (1)...(19): siRNA sense strand
ugaacaagcugaacgacuu

SEQ ID NO: 1929818 - RNA, 19 nt, Homo sapiens
  misc_RNA (1)...(19): siRNA sense strand
ggacacaacauuacagaau

SEQ ID NO: 1929819 - RNA, 19 nt, Homo sapiens
  misc_RNA (1)...(19): siRNA sense strand
ggaccaagcaugaugauuc

SEQ ID NO: 1929820 - RNA, 19 nt, Homo sapiens
  misc_RNA (1)...(19): siRNA sense strand
ggaaugucaucuacgaaga

SEQ ID NO: 1929821 - RNA, 19 nt, Homo sapiens
  misc_RNA (1)...(19): siRNA sense strand
caugaugauucuucagaua

SEQ ID NO: 1929822 - RNA, 19 nt, Homo sapiens
  misc_RNA (1)...(19): siRNA sense strand
gcauuugagugcaagauau

SEQ ID NO: 1929823 - RNA, 19 nt, Homo sapiens
  misc_RNA (1)...(19): siRNA sense strand
ggacugugcugucaaacca

SEQ ID NO: 1929824 - RNA, 19 nt, Homo sapiens
  misc_RNA (1)...(19): siRNA sense strand
gaagguccaagaaggcuua

SEQ ID NO: 1929825 - RNA, 19 nt, Homo sapiens
  misc_RNA (1)...(19): siRNA sense strand
gauuguaccugugauguug

SEQ ID NO: 1929826 - RNA, 19 nt, Homo sapiens
  misc_RNA (1)...(19): siRNA sense strand
acuaagggcuuuauccaaa

SEQ ID NO: 1929827 - RNA, 19 nt, Homo sapiens
  misc_RNA (1)...(19): siRNA sense strand
uaauagaacuaagggcuuu

SEQ ID NO: 1929828 - RNA, 19 nt, Homo sapiens
  misc_RNA (1)...(19): siRNA sense strand
gcaaauaugccagaaagug

SEQ ID NO: 1929829 - RNA, 19 nt, Homo sapiens
  misc_RNA (1)...(19): siRNA sense strand
gugacuacuuuagguauua

SEQ ID NO: 1929830 - RNA, 19 nt, Homo sapiens
  misc_RNA (1)...(19): siRNA sense strand
caagaauuauggauugugu

SEQ ID NO: 1929831 - RNA, 19 nt, Homo sapiens
  misc_RNA (1)...(19): siRNA sense strand
gaagaagccaauaaucuca

SEQ ID NO: 1929832 - RNA, 19 nt, Homo sapiens
  misc_RNA (1)...(19): siRNA sense strand
ggaacuuguuacagaauau

SEQ ID NO: 1929833 - RNA, 19 nt, Homo sapiens
  misc_RNA (1)...(19): siRNA sense strand
gaauuaaaucugcgagcua

SEQ ID NO: 1929834 - RNA, 19 nt, Homo sapiens
  misc_RNA (1)...(19): siRNA sense strand
uagcaaauaugccagaaag

SEQ ID NO: 1929835 - RNA, 19 nt, Homo sapiens
  misc_RNA (1)...(19): siRNA sense strand
cccugaagcugaauaugua

SEQ ID NO: 1929836 - RNA, 19 nt, Homo sapiens
  misc_RNA (1)...(19): siRNA sense strand
gaagcugaauauguagauu

SEQ ID NO: 1929837 - RNA, 19 nt, Homo sapiens
  misc_RNA (1)...(19): siRNA sense strand
caucuaaccagacaagaaa

SEQ ID NO: 1929838 - RNA, 19 nt, Homo sapiens
  misc_RNA (1)...(19): siRNA sense strand
gaacuaagggcuuuaucca

SEQ ID NO: 1929839 - RNA, 19 nt, Homo sapiens
  misc_RNA (1)...(19): siRNA sense strand
gauguugaaaccauugaua

SEQ ID NO: 1929840 - RNA, 19 nt, Homo sapiens
  misc_RNA (1)...(19): siRNA sense strand
gaaggagaagguccaagaa

SEQ ID NO: 1929841 - RNA, 19 nt, Homo sapiens
  misc_RNA (1)...(19): siRNA sense strand
gcgcuacacugguuacaag

SEQ ID NO: 1929842 - RNA, 19 nt, Homo sapiens
  misc_RNA (1)...(19): siRNA sense strand
gaagaggccguguccuuuc

SEQ ID NO: 1929843 - RNA, 19 nt, Homo sapiens
  misc_RNA (1)...(19): siRNA sense strand
gggaccagaugcuuggaaa

SEQ ID NO: 1929844 - RNA, 19 nt, Homo sapiens
  misc_RNA (1)...(19): siRNA sense strand
gaccaagcaugaugauucu

SEQ ID NO: 1929845 - RNA, 19 nt, Homo sapiens
  misc_RNA (1)...(19): siRNA sense strand
ucaggaacuuguuacagaa

SEQ ID NO: 1929846 - RNA, 19 nt, Homo sapiens
  misc_RNA (1)...(19): siRNA sense strand
ggggaaagcuucagacuca

SEQ ID NO: 1929847 - RNA, 19 nt, Homo sapiens
  misc_RNA (1)...(19): siRNA sense strand
uuucaacucuuuacuggaa

SEQ ID NO: 1929848 - RNA, 19 nt, Homo sapiens
  misc_RNA (1)...(19): siRNA sense strand
cugugaagcugaugacauu

SEQ ID NO: 1929849 - RNA, 19 nt, Homo sapiens
  misc_RNA (1)...(19): siRNA sense strand
uauccaaaguguuaccauu

SEQ ID NO: 1929850 - RNA, 19 nt, Homo sapiens
  misc_RNA (1)...(19): siRNA sense strand
gaacuuguauuuucucuac

SEQ ID NO: 1929851 - RNA, 19 nt, Homo sapiens
  misc_RNA (1)...(19): siRNA sense strand
gaaaagaaauggggacaca

SEQ ID NO: 1929852 - RNA, 19 nt, Homo sapiens
  misc_RNA (1)...(19): siRNA sense strand
aaacuucaggaacuuguua

SEQ ID NO: 1929853 - RNA, 19 nt, Homo sapiens
  misc_RNA (1)...(19): siRNA sense strand
ugaagaaugugaacaagcu

SEQ ID NO: 1929854 - RNA, 19 nt, Homo sapiens
  misc_RNA (1)...(19): siRNA sense strand
gaaugucaucuacgaagaa

SEQ ID NO: 1929855 - RNA, 19 nt, Homo sapiens
  misc_RNA (1)...(19): siRNA sense strand
gcaugaugauucuucagau

SEQ ID NO: 1929856 - RNA, 19 nt, Homo sapiens
  misc_RNA (1)...(19): siRNA sense strand
gugguuacuuggaugauug

SEQ ID NO: 1929857 - RNA, 19 nt, Homo sapiens
  misc_RNA (1)...(19): siRNA sense strand
ccagaaaguggaccuaguu

SEQ ID NO: 1929858 - RNA, 19 nt, Homo sapiens
  misc_RNA (1)...(19): siRNA sense strand
aaagaagcacacaaacuaa

SEQ ID NO: 1929859 - RNA, 19 nt, Homo sapiens
  misc_RNA (1)...(19): siRNA sense strand
agagcauucuacagacuua

SEQ ID NO: 1929860 - RNA, 19 nt, Homo sapiens
  misc_RNA (1)...(19): siRNA sense strand
cagaaaguggaccuaguua

SEQ ID NO: 1929861 - RNA, 19 nt, Homo sapiens
  misc_RNA (1)...(19): siRNA sense strand
gauagcaaauaugccagaa

SEQ ID NO: 1929862 - RNA, 19 nt, Homo sapiens
  misc_RNA (1)...(19): siRNA sense strand
ucugagaaauugauagcaa

SEQ ID NO: 1929863 - RNA, 19 nt, Homo sapiens
  misc_RNA (1)...(19): siRNA sense strand
ggcuuaagaacuuguauuu

SEQ ID NO: 1929864 - RNA, 19 nt, Homo sapiens
  misc_RNA (1)...(19): siRNA sense strand
gaauuucaacagcgauuug

SEQ ID NO: 1929865 - RNA, 19 nt, Homo sapiens
  misc_RNA (1)...(19): siRNA sense strand
caaaccaugucaaucugau

SEQ ID NO: 1929866 - RNA, 19 nt, Homo sapiens
  misc_RNA (1)...(19): siRNA sense strand
ccagguuagugguuacuug

SEQ ID NO: 1929867 - RNA, 19 nt, Homo sapiens
  misc_RNA (1)...(19): siRNA sense strand
ccugagcgcuacacugguu

SEQ ID NO: 1929868 - RNA, 19 nt, Homo sapiens
  misc_RNA (1)...(19): siRNA sense strand
aaaagaagcacacaaacua

SEQ ID NO: 1929869 - RNA, 19 nt, Homo sapiens
  misc_RNA (1)...(19): siRNA sense strand
caagcaugaugauucuuca

SEQ ID NO: 1929870 - RNA, 19 nt, Homo sapiens
  misc_RNA (1)...(19): siRNA sense strand
aaaguggaccuaguuauga

SEQ ID NO: 1929871 - RNA, 19 nt, Homo sapiens
  misc_RNA (1)...(19): siRNA sense strand
gguccaagaaggcuuaaga

SEQ ID NO: 1929872 - RNA, 19 nt, Homo sapiens
  misc_RNA (1)...(19): siRNA sense strand
ugaaggagaagguccaaga

SEQ ID NO: 1929873 - RNA, 19 nt, Homo sapiens
  misc_RNA (1)...(19): siRNA sense strand
uagaaggucucuguguaga

SEQ ID NO: 1929874 - RNA, 19 nt, Homo sapiens
  misc_RNA (1)...(19): siRNA sense strand
uauggaaugucaucuacga

SEQ ID NO: 1929875 - RNA, 19 nt, Homo sapiens
  misc_RNA (1)...(19): siRNA sense strand
gacaucagccaguguggaa

SEQ ID NO: 1929876 - RNA, 19 nt, Homo sapiens
  misc_RNA (1)...(19): siRNA sense strand
ccaaaguguuaccauucuu

SEQ ID NO: 1929877 - RNA, 19 nt, Homo sapiens
  misc_RNA (1)...(19): siRNA sense strand
ccaagaaggcuuaagaacu

SEQ ID NO: 1929878 - RNA, 19 nt, Homo sapiens
  misc_RNA (1)...(19): siRNA sense strand
ugaagaggccguguccuuu

SEQ ID NO: 1929879 - RNA, 19 nt, Homo sapiens
  misc_RNA (1)...(19): siRNA sense strand
aaccagacaagaaauagua

SEQ ID NO: 1929880 - RNA, 19 nt, Homo sapiens
  misc_RNA (1)...(19): siRNA sense strand
ugaugaaguuccugaugga

SEQ ID NO: 1929881 - RNA, 19 nt, Homo sapiens
  misc_RNA (1)...(19): siRNA sense strand
uucaggaacuuguuacaga

SEQ ID NO: 1929882 - RNA, 19 nt, Homo sapiens
  misc_RNA (1)...(19): siRNA sense strand
cugagaaauugauagcaaa

SEQ ID NO: 1929883 - RNA, 19 nt, Homo sapiens
  misc_RNA (1)...(19): siRNA sense strand
acagcgauuugauggaauu

SEQ ID NO: 1929884 - RNA, 19 nt, Homo sapiens
  misc_RNA (1)...(19): siRNA sense strand
uuuaagccacagacaauua

SEQ ID NO: 1929885 - RNA, 19 nt, Homo sapiens
  misc_RNA (1)...(19): siRNA sense strand
agaagccaauaaucucauu

SEQ ID NO: 1929886 - RNA, 19 nt, Homo sapiens
  misc_RNA (1)...(19): siRNA sense strand
cuuuagguauuacaaggua

SEQ ID NO: 1929887 - RNA, 19 nt, Homo sapiens
  misc_RNA (1)...(19): siRNA sense strand
aggaacuuguuacagaaua

SEQ ID NO: 1929888 - RNA, 19 nt, Homo sapiens
  misc_RNA (1)...(19): siRNA sense strand
gaaggcuuaagaacuugua

SEQ ID NO: 1929889 - RNA, 19 nt, Homo sapiens
  misc_RNA (1)...(19): siRNA sense strand
agaagggacugugcuguca

SEQ ID NO: 1929890 - RNA, 19 nt, Homo sapiens
  misc_RNA (1)...(19): siRNA sense strand
uggauuguguugguuguuu

SEQ ID NO: 1929891 - RNA, 19 nt, Homo sapiens
  misc_RNA (1)...(19): siRNA sense strand
caagucauuuccuuugcau

SEQ ID NO: 1929892 - RNA, 19 nt, Homo sapiens
  misc_RNA (1)...(19): siRNA sense strand
aaucugcgagcuacaagua

SEQ ID NO: 1929893 - RNA, 19 nt, Homo sapiens
  misc_RNA (1)...(19): siRNA sense strand
agucauuuccuuugcauuu

SEQ ID NO: 1929894 - RNA, 19 nt, Homo sapiens
  misc_RNA (1)...(19): siRNA sense strand
ugaagaagccaauaaucuc

SEQ ID NO: 1929895 - RNA, 19 nt, Homo sapiens
  misc_RNA (1)...(19): siRNA sense strand
ucugcgagcuacaaguauu

SEQ ID NO: 1929896 - RNA, 19 nt, Homo sapiens
  misc_RNA (1)...(19): siRNA sense strand
gagcuacaaguauucugaa

SEQ ID NO: 1929897 - RNA, 19 nt, Homo sapiens
  misc_RNA (1)...(19): siRNA sense strand
ggaggacuuucgacugcau

SEQ ID NO: 1929898 - RNA, 19 nt, Homo sapiens
  misc_RNA (1)...(19): siRNA sense strand
cuggaaauacuucaugaaa

SEQ ID NO: 1929899 - RNA, 19 nt, Homo sapiens
  misc_RNA (1)...(19): siRNA sense strand
gguuagugguuacuuggau

SEQ ID NO: 1929900 - RNA, 19 nt, Homo sapiens
  misc_RNA (1)...(19): siRNA sense strand
ucuaaccagacaagaaaua

SEQ ID NO: 1929901 - RNA, 19 nt, Homo sapiens
  misc_RNA (1)...(19): siRNA sense strand
gccagaaaguggaccuagu

SEQ ID NO: 1929902 - RNA, 19 nt, Homo sapiens
  misc_RNA (1)...(19): siRNA sense strand
aagaagcacacaaacuaaa

SEQ ID NO: 1929903 - RNA, 19 nt, Homo sapiens
  misc_RNA (1)...(19): siRNA sense strand
aaucaagucauuuccuuug

SEQ ID NO: 1929904 - RNA, 19 nt, Homo sapiens
  misc_RNA (1)...(19): siRNA sense strand
caaaguguuaccauucuuc

SEQ ID NO: 1929905 - RNA, 19 nt, Homo sapiens
  misc_RNA (1)...(19): siRNA sense strand
aaguggaccuaguuaugaa

SEQ ID NO: 1929906 - RNA, 19 nt, Homo sapiens
  misc_RNA (1)...(19): siRNA sense strand
gacagaaacuggacucuua

SEQ ID NO: 1929907 - RNA, 19 nt, Homo sapiens
  misc_RNA (1)...(19): siRNA sense strand
gaaacuggacucuuaauaa

SEQ ID NO: 1929908 - RNA, 19 nt, Homo sapiens
  misc_RNA (1)...(19): siRNA sense strand
caaauucugucccaugaua

SEQ ID NO: 1929909 - RNA, 19 nt, Homo sapiens
  misc_RNA (1)...(19): siRNA sense strand
gcaaggcccucauaagcuu

SEQ ID NO: 1929910 - RNA, 19 nt, Homo sapiens
  misc_RNA (1)...(19): siRNA sense strand
agacaaacaucucccguaa

SEQ ID NO: 1929911 - RNA, 19 nt, Homo sapiens
  misc_RNA (1)...(19): siRNA sense strand
gcaacuggcacuacaagua

SEQ ID NO: 1929912 - RNA, 19 nt, Homo sapiens
  misc_RNA (1)...(19): siRNA sense strand
gaaaacagccaaaucuaua

SEQ ID NO: 1929913 - RNA, 19 nt, Homo sapiens
  misc_RNA (1)...(19): siRNA sense strand
cuacaacuguggcuacaaa

SEQ ID NO: 1929914 - RNA, 19 nt, Homo sapiens
  misc_RNA (1)...(19): siRNA sense strand
ugacaaacaugcucagaag

SEQ ID NO: 1929915 - RNA, 19 nt, Homo sapiens
  misc_RNA (1)...(19): siRNA sense strand
gaacuccuguuaccaaagg

SEQ ID NO: 1929916 - RNA, 19 nt, Homo sapiens
  misc_RNA (1)...(19): siRNA sense strand
acaaagagccuaagaccaa

SEQ ID NO: 1929917 - RNA, 19 nt, Homo sapiens
  misc_RNA (1)...(19): siRNA sense strand
gcuaccagcuggcuccaaa

SEQ ID NO: 1929918 - RNA, 19 nt, Homo sapiens
  misc_RNA (1)...(19): siRNA sense strand
caacaucugugacuuugag

SEQ ID NO: 1929919 - RNA, 19 nt, Homo sapiens
  misc_RNA (1)...(19): siRNA sense strand
ucacgcaacuccugcaaga

SEQ ID NO: 1929920 - RNA, 19 nt, Homo sapiens
  misc_RNA (1)...(19): siRNA sense strand
gacaacagcagcacaguga

SEQ ID NO: 1929921 - RNA, 19 nt, Homo sapiens
  misc_RNA (1)...(19): siRNA sense strand
caaagagccuaagaccaaa

SEQ ID NO: 1929922 - RNA, 19 nt, Homo sapiens
  misc_RNA (1)...(19): siRNA sense strand
acaaacaugcucagaagua

SEQ ID NO: 1929923 - RNA, 19 nt, Homo sapiens
  misc_RNA (1)...(19): siRNA sense strand
gagaagcacaugcagaaug

SEQ ID NO: 1929924 - RNA, 19 nt, Homo sapiens
  misc_RNA (1)...(19): siRNA sense strand
gcagaaguccaggcccuua

SEQ ID NO: 1929925 - RNA, 19 nt, Homo sapiens
  misc_RNA (1)...(19): siRNA sense strand
gcauccauaugaccucuga

SEQ ID NO: 1929926 - RNA, 19 nt, Homo sapiens
  misc_RNA (1)...(19): siRNA sense strand
caaagaaucgccaguagca

SEQ ID NO: 1929927 - RNA, 19 nt, Homo sapiens
  misc_RNA (1)...(19): siRNA sense strand
gcaggaggaggaagaagaa

SEQ ID NO: 1929928 - RNA, 19 nt, Homo sapiens
  misc_RNA (1)...(19): siRNA sense strand
ccucaagacugacaaacau

SEQ ID NO: 1929929 - RNA, 19 nt, Homo sapiens
  misc_RNA (1)...(19): siRNA sense strand
gcagugaacuccuguuacc

SEQ ID NO: 1929930 - RNA, 19 nt, Homo sapiens
  misc_RNA (1)...(19): siRNA sense strand
gcugugacgucugcaacua

SEQ ID NO: 1929931 - RNA, 19 nt, Homo sapiens
  misc_RNA (1)...(19): siRNA sense strand
uagcucuucugaccaaauu

SEQ ID NO: 1929932 - RNA, 19 nt, Homo sapiens
  misc_RNA (1)...(19): siRNA sense strand
gccaaagaaucgccaguag

SEQ ID NO: 1929933 - RNA, 19 nt, Homo sapiens
  misc_RNA (1)...(19): siRNA sense strand
gcagcacagugaacaugga

SEQ ID NO: 1929934 - RNA, 19 nt, Homo sapiens
  misc_RNA (1)...(19): siRNA sense strand
gugaacuccuguuaccaaa

SEQ ID NO: 1929935 - RNA, 19 nt, Homo sapiens
  misc_RNA (1)...(19): siRNA sense strand
gcucaaggccaacuuccaa

SEQ ID NO: 1929936 - RNA, 19 nt, Homo sapiens
  misc_RNA (1)...(19): siRNA sense strand
caagagaagcacccugaga

SEQ ID NO: 1929937 - RNA, 19 nt, Homo sapiens
  misc_RNA (1)...(19): siRNA sense strand
ccuccuggaugaagaaguu

SEQ ID NO: 1929938 - RNA, 19 nt, Homo sapiens
  misc_RNA (1)...(19): siRNA sense strand
uaagcuuucuggagccaaa

SEQ ID NO: 1929939 - RNA, 19 nt, Homo sapiens
  misc_RNA (1)...(19): siRNA sense strand
agaaacuggacucuuaaua

SEQ ID NO: 1929940 - RNA, 19 nt, Homo sapiens
  misc_RNA (1)...(19): siRNA sense strand
ggacagaaacuggacucuu

SEQ ID NO: 1929941 - RNA, 19 nt, Homo sapiens
  misc_RNA (1)...(19): siRNA sense strand
gaagaaaacagccaaaucu

SEQ ID NO: 1929942 - RNA, 19 nt, Homo sapiens
  misc_RNA (1)...(19): siRNA sense strand
gcucuaccacugcagcaua

SEQ ID NO: 1929943 - RNA, 19 nt, Homo sapiens
  misc_RNA (1)...(19): siRNA sense strand
gaacucuuccaguacuuug

SEQ ID NO: 1929944 - RNA, 19 nt, Homo sapiens
  misc_RNA (1)...(19): siRNA sense strand
ggagacaaagagccuaaga

SEQ ID NO: 1929945 - RNA, 19 nt, Homo sapiens
  misc_RNA (1)...(19): siRNA sense strand
caaacaugcucagaaguac

SEQ ID NO: 1929946 - RNA, 19 nt, Homo sapiens
  misc_RNA (1)...(19): siRNA sense strand
gaucacacacagucucaug

SEQ ID NO: 1929947 - RNA, 19 nt, Homo sapiens
  misc_RNA (1)...(19): siRNA sense strand
ucacauccaacauggcuuu

SEQ ID NO: 1929948 - RNA, 19 nt, Homo sapiens
  misc_RNA (1)...(19): siRNA sense strand
gcaaccacguggcggucuu

SEQ ID NO: 1929949 - RNA, 19 nt, Homo sapiens
  misc_RNA (1)...(19): siRNA sense strand
caccugcgcugcaacaucu

SEQ ID NO: 1929950 - RNA, 19 nt, Homo sapiens
  misc_RNA (1)...(19): siRNA sense strand
ucgccuagcugaugacuac

SEQ ID NO: 1929951 - RNA, 19 nt, Homo sapiens
  misc_RNA (1)...(19): siRNA sense strand
gcuaaccccugcccaauau

SEQ ID NO: 1929952 - RNA, 19 nt, Homo sapiens
  misc_RNA (1)...(19): siRNA sense strand
caugcagaauguccuaaug

SEQ ID NO: 1929953 - RNA, 19 nt, Homo sapiens
  misc_RNA (1)...(19): siRNA sense strand
gacccaauccaaggcuuua

SEQ ID NO: 1929954 - RNA, 19 nt, Homo sapiens
  misc_RNA (1)...(19): siRNA sense strand
acaaacaucucccguaacc

SEQ ID NO: 1929955 - RNA, 19 nt, Homo sapiens
  misc_RNA (1)...(19): siRNA sense strand
caugauaccucagcaccau

SEQ ID NO: 1929956 - RNA, 19 nt, Homo sapiens
  misc_RNA (1)...(19): siRNA sense strand
ucacugcccuucacaucca

SEQ ID NO: 1929957 - RNA, 19 nt, Homo sapiens
  misc_RNA (1)...(19): siRNA sense strand
caacuggcacuacaaguac

SEQ ID NO: 1929958 - RNA, 19 nt, Homo sapiens
  misc_RNA (1)...(19): siRNA sense strand
ucaagugucccaagugcaa

SEQ ID NO: 1929959 - RNA, 19 nt, Homo sapiens
  misc_RNA (1)...(19): siRNA sense strand
ggucacuucccaccaaaug

SEQ ID NO: 1929960 - RNA, 19 nt, Homo sapiens
  misc_RNA (1)...(19): siRNA sense strand
gggugcagcccacgaagaa

SEQ ID NO: 1929961 - RNA, 19 nt, Homo sapiens
  misc_RNA (1)...(19): siRNA sense strand
acccaccgcugcaagcuuu

SEQ ID NO: 1929962 - RNA, 19 nt, Homo sapiens
  misc_RNA (1)...(19): siRNA sense strand
gcuccuggguuccucaucu

SEQ ID NO: 1929963 - RNA, 19 nt, Homo sapiens
  misc_RNA (1)...(19): siRNA sense strand
ccuaucgccuagcugauga

SEQ ID NO: 1929964 - RNA, 19 nt, Homo sapiens
  misc_RNA (1)...(19): siRNA sense strand
accaaauucugucccauga

SEQ ID NO: 1929965 - RNA, 19 nt, Homo sapiens
  misc_RNA (1)...(19): siRNA sense strand
uggcagugaacuccuguua

SEQ ID NO: 1929966 - RNA, 19 nt, Homo sapiens
  misc_RNA (1)...(19): siRNA sense strand
ggcaaccucagcauccaua

SEQ ID NO: 1929967 - RNA, 19 nt, Homo sapiens
  misc_RNA (1)...(19): siRNA sense strand
caacagcaaggagaagaug

SEQ ID NO: 1929968 - RNA, 19 nt, Homo sapiens
  misc_RNA (1)...(19): siRNA sense strand
ccucugauccugucaccaa

SEQ ID NO: 1929969 - RNA, 19 nt, Homo sapiens
  misc_RNA (1)...(19): siRNA sense strand
ccagcuggcuccaaaucca

SEQ ID NO: 1929970 - RNA, 19 nt, Homo sapiens
  misc_RNA (1)...(19): siRNA sense strand
acagaaacuggacucuuaa

SEQ ID NO: 1929971 - RNA, 19 nt, Homo sapiens
  misc_RNA (1)...(19): siRNA sense strand
cugagaagcacaugcagaa

SEQ ID NO: 1929972 - RNA, 19 nt, Homo sapiens
  misc_RNA (1)...(19): siRNA sense strand
cgaauguggcccagacaga

SEQ ID NO: 1929973 - RNA, 19 nt, Homo sapiens
  misc_RNA (1)...(19): siRNA sense strand
ugcaacaucugugacuuug

SEQ ID NO: 1929974 - RNA, 19 nt, Homo sapiens
  misc_RNA (1)...(19): siRNA sense strand
gcccagcuacuucucaaug

SEQ ID NO: 1929975 - RNA, 19 nt, Homo sapiens
  misc_RNA (1)...(19): siRNA sense strand
aaccugcgcauccauauga

SEQ ID NO: 1929976 - RNA, 19 nt, Homo sapiens
  misc_RNA (1)...(19): siRNA sense strand
caacccaagccaaagaauc

SEQ ID NO: 1929977 - RNA, 19 nt, Homo sapiens
  misc_RNA (1)...(19): siRNA sense strand
aagcaaccacuuauucuuc

SEQ ID NO: 1929978 - RNA, 19 nt, Homo sapiens
  misc_RNA (1)...(19): siRNA sense strand
ccauaugaccucugagaag

SEQ ID NO: 1929979 - RNA, 19 nt, Homo sapiens
  misc_RNA (1)...(19): siRNA sense strand
gaggaaaggcauggagcuu

SEQ ID NO: 1929980 - RNA, 19 nt, Homo sapiens
  misc_RNA (1)...(19): siRNA sense strand
ccccugaacucuuccagua

SEQ ID NO: 1929981 - RNA, 19 nt, Homo sapiens
  misc_RNA (1)...(19): siRNA sense strand
acccggagaucccaaagau

SEQ ID NO: 1929982 - RNA, 19 nt, Homo sapiens
  misc_RNA (1)...(19): siRNA sense strand
agaagcacccugagagcaa

SEQ ID NO: 1929983 - RNA, 19 nt, Homo sapiens
  misc_RNA (1)...(19): siRNA sense strand
gcaccuggccaaccuacag

SEQ ID NO: 1929984 - RNA, 19 nt, Homo sapiens
  misc_RNA (1)...(19): siRNA sense strand
cuuuagcucuucugaccaa

SEQ ID NO: 1929985 - RNA, 19 nt, Homo sapiens
  misc_RNA (1)...(19): siRNA sense strand
guguuccgcugccuagugu

SEQ ID NO: 1929986 - RNA, 19 nt, Homo sapiens
  misc_RNA (1)...(19): siRNA sense strand
ggaagccuauccccugaug

SEQ ID NO: 1929987 - RNA, 19 nt, Homo sapiens
  misc_RNA (1)...(19): siRNA sense strand
ccugccaccuggauugaug

SEQ ID NO: 1929988 - RNA, 19 nt, Homo sapiens
  misc_RNA (1)...(19): siRNA sense strand
cguaaccugcgcauccaua

SEQ ID NO: 1929989 - RNA, 19 nt, Homo sapiens
  misc_RNA (1)...(19): siRNA sense strand
gcccaacccaagccaaaga

SEQ ID NO: 1929990 - RNA, 19 nt, Homo sapiens
  misc_RNA (1)...(19): siRNA sense strand
caucuccggcugccuguga

SEQ ID NO: 1929991 - RNA, 19 nt, Homo sapiens
  misc_RNA (1)...(19): siRNA sense strand
gcucacccaccuccaagga

SEQ ID NO: 1929992 - RNA, 19 nt, Homo sapiens
  misc_RNA (1)...(19): siRNA sense strand
gcugcaacaucugugacuu

SEQ ID NO: 1929993 - RNA, 19 nt, Homo sapiens
  misc_RNA (1)...(19): siRNA sense strand
guaaccugcgcauccauau

SEQ ID NO: 1929994 - RNA, 19 nt, Homo sapiens
  misc_RNA (1)...(19): siRNA sense strand
gcagcuacgagacaaacau

SEQ ID NO: 1929995 - RNA, 19 nt, Homo sapiens
  misc_RNA (1)...(19): siRNA sense strand
cugauccugucaccaaaga

SEQ ID NO: 1929996 - RNA, 19 nt, Homo sapiens
  misc_RNA (1)...(19): siRNA sense strand
caaccucagcauccauaug

SEQ ID NO: 1929997 - RNA, 19 nt, Homo sapiens
  misc_RNA (1)...(19): siRNA sense strand
guggagagagcuacaacug

SEQ ID NO: 1929998 - RNA, 19 nt, Homo sapiens
  misc_RNA (1)...(19): siRNA sense strand
caacagcagcacagugaac

SEQ ID NO: 1929999 - RNA, 19 nt, Homo sapiens
  misc_RNA (1)...(19): siRNA sense strand
gcaacaucugugacuuuga

SEQ ID NO: 1930000 - RNA, 19 nt, Homo sapiens
  misc_RNA (1)...(19): siRNA sense strand
cugcaacaucugugacuuu

SEQ ID NO: 1930001 - RNA, 19 nt, Homo sapiens
  misc_RNA (1)...(19): siRNA sense strand
gccugucccugaagguguu

SEQ ID NO: 1930002 - RNA, 19 nt, Homo sapiens
  misc_RNA (1)...(19): siRNA sense strand
gagcaccugcccgcaaguu

SEQ ID NO: 1930003 - RNA, 19 nt, Homo sapiens
  misc_RNA (1)...(19): siRNA sense strand
ccugaacucuuccaguacu

SEQ ID NO: 1930004 - RNA, 19 nt, Homo sapiens
  misc_RNA (1)...(19): siRNA sense strand
gcccuucacauccaacaug

SEQ ID NO: 1930005 - RNA, 19 nt, Homo sapiens
  misc_RNA (1)...(19): siRNA sense strand
cagcccaacccaagccaaa

SEQ ID NO: 1930006 - RNA, 19 nt, Homo sapiens
  misc_RNA (1)...(19): siRNA sense strand
gaugauggcuuaugguaua

SEQ ID NO: 1930007 - RNA, 19 nt, Homo sapiens
  misc_RNA (1)...(19): siRNA sense strand
caaauuccuucucaucuua

SEQ ID NO: 1930008 - RNA, 19 nt, Homo sapiens
  misc_RNA (1)...(19): siRNA sense strand
gagaaacaaugggaaauaa

SEQ ID NO: 1930009 - RNA, 19 nt, Homo sapiens
  misc_RNA (1)...(19): siRNA sense strand
gaaauaagguuugaggaau

SEQ ID NO: 1930010 - RNA, 19 nt, Homo sapiens
  misc_RNA (1)...(19): siRNA sense strand
gaagauuguugccauuaaa

SEQ ID NO: 1930011 - RNA, 19 nt, Homo sapiens
  misc_RNA (1)...(19): siRNA sense strand
gaacagauagugacauuau

SEQ ID NO: 1930012 - RNA, 19 nt, Homo sapiens
  misc_RNA (1)...(19): siRNA sense strand
caagaaaacugcugacaua

SEQ ID NO: 1930013 - RNA, 19 nt, Homo sapiens
  misc_RNA (1)...(19): siRNA sense strand
cugcaaagcugacauuaaa

SEQ ID NO: 1930014 - RNA, 19 nt, Homo sapiens
  misc_RNA (1)...(19): siRNA sense strand
ggagaagcaugugcaguaa

SEQ ID NO: 1930015 - RNA, 19 nt, Homo sapiens
  misc_RNA (1)...(19): siRNA sense strand
cauaaucagugaacagaaa

SEQ ID NO: 1930016 - RNA, 19 nt, Homo sapiens
  misc_RNA (1)...(19): siRNA sense strand
gacauuauaugacgaugaa

SEQ ID NO: 1930017 - RNA, 19 nt, Homo sapiens
  misc_RNA (1)...(19): siRNA sense strand
ggaaauaagguuugaggaa

SEQ ID NO: 1930018 - RNA, 19 nt, Homo sapiens
  misc_RNA (1)...(19): siRNA sense strand
caacacaacauggccauua

SEQ ID NO: 1930019 - RNA, 19 nt, Homo sapiens
  misc_RNA (1)...(19): siRNA sense strand
gaaacagacacuccucuuu

SEQ ID NO: 1930020 - RNA, 19 nt, Homo sapiens
  misc_RNA (1)...(19): siRNA sense strand
uaacagccauucauuaucu

SEQ ID NO: 1930021 - RNA, 19 nt, Homo sapiens
  misc_RNA (1)...(19): siRNA sense strand
gaagagaaacaaugggaaa

SEQ ID NO: 1930022 - RNA, 19 nt, Homo sapiens
  misc_RNA (1)...(19): siRNA sense strand
agaauaugaugauggcuua

SEQ ID NO: 1930023 - RNA, 19 nt, Homo sapiens
  misc_RNA (1)...(19): siRNA sense strand
acaggaagauucaguaguu

SEQ ID NO: 1930024 - RNA, 19 nt, Homo sapiens
  misc_RNA (1)...(19): siRNA sense strand
gcaguaagaggauccgaua

SEQ ID NO: 1930025 - RNA, 19 nt, Homo sapiens
  misc_RNA (1)...(19): siRNA sense strand
cagaacagauagugacauu

SEQ ID NO: 1930026 - RNA, 19 nt, Homo sapiens
  misc_RNA (1)...(19): siRNA sense strand
guagaggucuugcuguaug

SEQ ID NO: 1930027 - RNA, 19 nt, Homo sapiens
  misc_RNA (1)...(19): siRNA sense strand
cgaagauuguugccauuaa

SEQ ID NO: 1930028 - RNA, 19 nt, Homo sapiens
  misc_RNA (1)...(19): siRNA sense strand
guaccugacuggagcugua

SEQ ID NO: 1930029 - RNA, 19 nt, Homo sapiens
  misc_RNA (1)...(19): siRNA sense strand
gaacguauuugaggcaaca

SEQ ID NO: 1930030 - RNA, 19 nt, Homo sapiens
  misc_RNA (1)...(19): siRNA sense strand
ccaaauuccuucucaucuu

SEQ ID NO: 1930031 - RNA, 19 nt, Homo sapiens
  misc_RNA (1)...(19): siRNA sense strand
gaaaacugcugacauaauc

SEQ ID NO: 1930032 - RNA, 19 nt, Homo sapiens
  misc_RNA (1)...(19): siRNA sense strand
guauccagcucgagccaua

SEQ ID NO: 1930033 - RNA, 19 nt, Homo sapiens
  misc_RNA (1)...(19): siRNA sense strand
gauuauggaucaacugcaa

SEQ ID NO: 1930034 - RNA, 19 nt, Homo sapiens
  misc_RNA (1)...(19): siRNA sense strand
gugacugucuuucauugua

SEQ ID NO: 1930035 - RNA, 19 nt, Homo sapiens
  misc_RNA (1)...(19): siRNA sense strand
gcaaccagacgcaauagaa

SEQ ID NO: 1930036 - RNA, 19 nt, Homo sapiens
  misc_RNA (1)...(19): siRNA sense strand
gaugauggaacuauauuug

SEQ ID NO: 1930037 - RNA, 19 nt, Homo sapiens
  misc_RNA (1)...(19): siRNA sense strand
cauaauaccacaccuguug

SEQ ID NO: 1930038 - RNA, 19 nt, Homo sapiens
  misc_RNA (1)...(19): siRNA sense strand
ggaacaggaagauucagua

SEQ ID NO: 1930039 - RNA, 19 nt, Homo sapiens
  misc_RNA (1)...(19): siRNA sense strand
gaauguugacuguuuaaga

SEQ ID NO: 1930040 - RNA, 19 nt, Homo sapiens
  misc_RNA (1)...(19): siRNA sense strand
gcaaagcugacauuaaaca

SEQ ID NO: 1930041 - RNA, 19 nt, Homo sapiens
  misc_RNA (1)...(19): siRNA sense strand
gcaaggugauggagguugu

SEQ ID NO: 1930042 - RNA, 19 nt, Homo sapiens
  misc_RNA (1)...(19): siRNA sense strand
ggacagcaacagcuuguga

SEQ ID NO: 1930043 - RNA, 19 nt, Homo sapiens
  misc_RNA (1)...(19): siRNA sense strand
gcagaggguuaauaagaag

SEQ ID NO: 1930044 - RNA, 19 nt, Homo sapiens
  misc_RNA (1)...(19): siRNA sense strand
ugauguggguguugaacua

SEQ ID NO: 1930045 - RNA, 19 nt, Homo sapiens
  misc_RNA (1)...(19): siRNA sense strand
gauccgauacucuguggua

SEQ ID NO: 1930046 - RNA, 19 nt, Homo sapiens
  misc_RNA (1)...(19): siRNA sense strand
agaagcaugugcaguaaga

SEQ ID NO: 1930047 - RNA, 19 nt, Homo sapiens
  misc_RNA (1)...(19): siRNA sense strand
cagaucaucagaaugguua

SEQ ID NO: 1930048 - RNA, 19 nt, Homo sapiens
  misc_RNA (1)...(19): siRNA sense strand
caggaagauucaguaguua

SEQ ID NO: 1930049 - RNA, 19 nt, Homo sapiens
  misc_RNA (1)...(19): siRNA sense strand
uagugaauguugacuguuu

SEQ ID NO: 1930050 - RNA, 19 nt, Homo sapiens
  misc_RNA (1)...(19): siRNA sense strand
gcacugcagaggguuaaua

SEQ ID NO: 1930051 - RNA, 19 nt, Homo sapiens
  misc_RNA (1)...(19): siRNA sense strand
cuguuaagauccaagauaa

SEQ ID NO: 1930052 - RNA, 19 nt, Homo sapiens
  misc_RNA (1)...(19): siRNA sense strand
gguauaagccaccagcuau

SEQ ID NO: 1930053 - RNA, 19 nt, Homo sapiens
  misc_RNA (1)...(19): siRNA sense strand
gaacaggaagauucaguag

SEQ ID NO: 1930054 - RNA, 19 nt, Homo sapiens
  misc_RNA (1)...(19): siRNA sense strand
gcuguuaagauccaagaua

SEQ ID NO: 1930055 - RNA, 19 nt, Homo sapiens
  misc_RNA (1)...(19): siRNA sense strand
agagacagguggacauuca

SEQ ID NO: 1930056 - RNA, 19 nt, Homo sapiens
  misc_RNA (1)...(19): siRNA sense strand
gaaccaagaaccacuagag

SEQ ID NO: 1930057 - RNA, 19 nt, Homo sapiens
  misc_RNA (1)...(19): siRNA sense strand
ggagcuguagcaacuauaa

SEQ ID NO: 1930058 - RNA, 19 nt, Homo sapiens
  misc_RNA (1)...(19): siRNA sense strand
aaacaacucuaugcugugu

SEQ ID NO: 1930059 - RNA, 19 nt, Homo sapiens
  misc_RNA (1)...(19): siRNA sense strand
ugccuugccuugcagaaua

SEQ ID NO: 1930060 - RNA, 19 nt, Homo sapiens
  misc_RNA (1)...(19): siRNA sense strand
gaggccagaucaucagaau

SEQ ID NO: 1930061 - RNA, 19 nt, Homo sapiens
  misc_RNA (1)...(19): siRNA sense strand
gcgaagauuguugccauua

SEQ ID NO: 1930062 - RNA, 19 nt, Homo sapiens
  misc_RNA (1)...(19): siRNA sense strand
guguauauuugccuugauu

SEQ ID NO: 1930063 - RNA, 19 nt, Homo sapiens
  misc_RNA (1)...(19): siRNA sense strand
gaaacaaugggaaauaagg

SEQ ID NO: 1930064 - RNA, 19 nt, Homo sapiens
  misc_RNA (1)...(19): siRNA sense strand
cagguggacauucacauua

SEQ ID NO: 1930065 - RNA, 19 nt, Homo sapiens
  misc_RNA (1)...(19): siRNA sense strand
agauaacagccauucauua

SEQ ID NO: 1930066 - RNA, 19 nt, Homo sapiens
  misc_RNA (1)...(19): siRNA sense strand
agaaaugccuugccuugca

SEQ ID NO: 1930067 - RNA, 19 nt, Homo sapiens
  misc_RNA (1)...(19): siRNA sense strand
gaagcacugcagaggguua

SEQ ID NO: 1930068 - RNA, 19 nt, Homo sapiens
  misc_RNA (1)...(19): siRNA sense strand
ucuaugcuguucaaguuaa

SEQ ID NO: 1930069 - RNA, 19 nt, Homo sapiens
  misc_RNA (1)...(19): siRNA sense strand
ccuaaacuaucagaauuug

SEQ ID NO: 1930070 - RNA, 19 nt, Homo sapiens
  misc_RNA (1)...(19): siRNA sense strand
guaccuaaacuaucagaau

SEQ ID NO: 1930071 - RNA, 19 nt, Homo sapiens
  misc_RNA (1)...(19): siRNA sense strand
aaacuucuaaccagucuaa

SEQ ID NO: 1930072 - RNA, 19 nt, Homo sapiens
  misc_RNA (1)...(19): siRNA sense strand
uucaacaacugcuuucaaa

SEQ ID NO: 1930073 - RNA, 19 nt, Homo sapiens
  misc_RNA (1)...(19): siRNA sense strand
caacugcaaagcugacauu

SEQ ID NO: 1930074 - RNA, 19 nt, Homo sapiens
  misc_RNA (1)...(19): siRNA sense strand
cacguugucucaccuaaug

SEQ ID NO: 1930075 - RNA, 19 nt, Homo sapiens
  misc_RNA (1)...(19): siRNA sense strand
acucuaugcuguucaaguu

SEQ ID NO: 1930076 - RNA, 19 nt, Homo sapiens
  misc_RNA (1)...(19): siRNA sense strand
gagagcguguugauguuuc

SEQ ID NO: 1930077 - RNA, 19 nt, Homo sapiens
  misc_RNA (1)...(19): siRNA sense strand
ugguagaggucuugcugua

SEQ ID NO: 1930078 - RNA, 19 nt, Homo sapiens
  misc_RNA (1)...(19): siRNA sense strand
caccauauuugucuucauc

SEQ ID NO: 1930079 - RNA, 19 nt, Homo sapiens
  misc_RNA (1)...(19): siRNA sense strand
ggagagcguguugauguuu

SEQ ID NO: 1930080 - RNA, 19 nt, Homo sapiens
  misc_RNA (1)...(19): siRNA sense strand
ugcagaggguuaauaagaa

SEQ ID NO: 1930081 - RNA, 19 nt, Homo sapiens
  misc_RNA (1)...(19): siRNA sense strand
agagaaacaaugggaaaua

SEQ ID NO: 1930082 - RNA, 19 nt, Homo sapiens
  misc_RNA (1)...(19): siRNA sense strand
cgaagaggccagaucauca

SEQ ID NO: 1930083 - RNA, 19 nt, Homo sapiens
  misc_RNA (1)...(19): siRNA sense strand
ggguuuggcuuugagagaa

SEQ ID NO: 1930084 - RNA, 19 nt, Homo sapiens
  misc_RNA (1)...(19): siRNA sense strand
gaaauggggcuugcagaua

SEQ ID NO: 1930085 - RNA, 19 nt, Homo sapiens
  misc_RNA (1)...(19): siRNA sense strand
cauaugccguugguagaaa

SEQ ID NO: 1930086 - RNA, 19 nt, Homo sapiens
  misc_RNA (1)...(19): siRNA sense strand
ggagacaagaauaccauau

SEQ ID NO: 1930087 - RNA, 19 nt, Homo sapiens
  misc_RNA (1)...(19): siRNA sense strand
ggaauugcuuucggcugaa

SEQ ID NO: 1930088 - RNA, 19 nt, Homo sapiens
  misc_RNA (1)...(19): siRNA sense strand
gacuggagcuguagcaacu

SEQ ID NO: 1930089 - RNA, 19 nt, Homo sapiens
  misc_RNA (1)...(19): siRNA sense strand
guaagaggauccgauacuc

SEQ ID NO: 1930090 - RNA, 19 nt, Homo sapiens
  misc_RNA (1)...(19): siRNA sense strand
gaaccacuagaggguauaa

SEQ ID NO: 1930091 - RNA, 19 nt, Homo sapiens
  misc_RNA (1)...(19): siRNA sense strand
ucuuacagguggauaguga

SEQ ID NO: 1930092 - RNA, 19 nt, Homo sapiens
  misc_RNA (1)...(19): siRNA sense strand
ugagagaaaggagaauuaa

SEQ ID NO: 1930093 - RNA, 19 nt, Homo sapiens
  misc_RNA (1)...(19): siRNA sense strand
gcuugcagauaaagaugaa

SEQ ID NO: 1930094 - RNA, 19 nt, Homo sapiens
  misc_RNA (1)...(19): siRNA sense strand
aaauggggcuugcagauaa

SEQ ID NO: 1930095 - RNA, 19 nt, Homo sapiens
  misc_RNA (1)...(19): siRNA sense strand
gcaccagaacagauaguga

SEQ ID NO: 1930096 - RNA, 19 nt, Homo sapiens
  misc_RNA (1)...(19): siRNA sense strand
aauaagguuugaggaauug

SEQ ID NO: 1930097 - RNA, 19 nt, Homo sapiens
  misc_RNA (1)...(19): siRNA sense strand
ccacaccuguugggaaugu

SEQ ID NO: 1930098 - RNA, 19 nt, Homo sapiens
  misc_RNA (1)...(19): siRNA sense strand
cagaaugguuacagacaca

SEQ ID NO: 1930099 - RNA, 19 nt, Homo sapiens
  misc_RNA (1)...(19): siRNA sense strand
agugaauguugacuguuua

SEQ ID NO: 1930100 - RNA, 19 nt, Homo sapiens
  misc_RNA (1)...(19): siRNA sense strand
aaugggaaccuguuaaaug

SEQ ID NO: 1930101 - RNA, 19 nt, Homo sapiens
  misc_RNA (1)...(19): siRNA sense strand
cuugucagcuccauaauac

SEQ ID NO: 1930102 - RNA, 19 nt, Homo sapiens
  misc_RNA (1)...(19): siRNA sense strand
gauuguugccauuaaagaa

SEQ ID NO: 1930103 - RNA, 19 nt, Homo sapiens
  misc_RNA (1)...(19): siRNA sense strand
cauagugacacagaugaua

SEQ ID NO: 1930104 - RNA, 19 nt, Homo sapiens
  misc_RNA (1)...(19): siRNA sense strand
gguggacauucacauuaug

SEQ ID NO: 1930105 - RNA, 19 nt, Homo sapiens
  misc_RNA (1)...(19): siRNA sense strand
uaccacaccuguugggaau

SEQ ID NO: 1930106 - RNA, 19 nt, Homo sapiens
  misc_RNA (1)...(19): siRNA sense strand
gaagaccucucaacauuug

SEQ ID NO: 1930107 - RNA, 19 nt, Homo sapiens
  misc_RNA (1)...(19): siRNA sense strand
cagaagaccucucaacauu

SEQ ID NO: 1930108 - RNA, 19 nt, Homo sapiens
  misc_RNA (1)...(19): siRNA sense strand
gaaggucccuacuauuauu

SEQ ID NO: 1930109 - RNA, 19 nt, Homo sapiens
  misc_RNA (1)...(19): siRNA sense strand
gaagcaauguuauggaaga

SEQ ID NO: 1930110 - RNA, 19 nt, Homo sapiens
  misc_RNA (1)...(19): siRNA sense strand
cgaagucgcuuaccagcua

SEQ ID NO: 1930111 - RNA, 19 nt, Homo sapiens
  misc_RNA (1)...(19): siRNA sense strand
ugaagaaggucccuacuau

SEQ ID NO: 1930112 - RNA, 19 nt, Homo sapiens
  misc_RNA (1)...(19): siRNA sense strand
gagcaugaaauucguaaua

SEQ ID NO: 1930113 - RNA, 19 nt, Homo sapiens
  misc_RNA (1)...(19): siRNA sense strand
ccacuacugucauguguuu

SEQ ID NO: 1930114 - RNA, 19 nt, Homo sapiens
  misc_RNA (1)...(19): siRNA sense strand
gcauugggcuaccucagua

SEQ ID NO: 1930115 - RNA, 19 nt, Homo sapiens
  misc_RNA (1)...(19): siRNA sense strand
aagaaggucccuacuauua

SEQ ID NO: 1930116 - RNA, 19 nt, Homo sapiens
  misc_RNA (1)...(19): siRNA sense strand
gaucaggauuuguuggaaa

SEQ ID NO: 1930117 - RNA, 19 nt, Homo sapiens
  misc_RNA (1)...(19): siRNA sense strand
gggaagcaauguuauggaa

SEQ ID NO: 1930118 - RNA, 19 nt, Homo sapiens
  misc_RNA (1)...(19): siRNA sense strand
ccugauggcuaauggauuu

SEQ ID NO: 1930119 - RNA, 19 nt, Homo sapiens
  misc_RNA (1)...(19): siRNA sense strand
gcaauguuauggaagauca

SEQ ID NO: 1930120 - RNA, 19 nt, Homo sapiens
  misc_RNA (1)...(19): siRNA sense strand
gcuaauggauuugacaaug

SEQ ID NO: 1930121 - RNA, 19 nt, Homo sapiens
  misc_RNA (1)...(19): siRNA sense strand
ggacacuccuccacacuuc

SEQ ID NO: 1930122 - RNA, 19 nt, Homo sapiens
  misc_RNA (1)...(19): siRNA sense strand
gaagaaggucccuacuauu

SEQ ID NO: 1930123 - RNA, 19 nt, Homo sapiens
  misc_RNA (1)...(19): siRNA sense strand
gcacagacaaagaauucua

SEQ ID NO: 1930124 - RNA, 19 nt, Homo sapiens
  misc_RNA (1)...(19): siRNA sense strand
cuacagagcaaaugaagaa

SEQ ID NO: 1930125 - RNA, 19 nt, Homo sapiens
  misc_RNA (1)...(19): siRNA sense strand
caauccagcuccuuccaaa

SEQ ID NO: 1930126 - RNA, 19 nt, Homo sapiens
  misc_RNA (1)...(19): siRNA sense strand
gcaugaaauucguaauauc

SEQ ID NO: 1930127 - RNA, 19 nt, Homo sapiens
  misc_RNA (1)...(19): siRNA sense strand
ggacaaugguuggaaagca

SEQ ID NO: 1930128 - RNA, 19 nt, Homo sapiens
  misc_RNA (1)...(19): siRNA sense strand
gcaggaaccaucagagaga

SEQ ID NO: 1930129 - RNA, 19 nt, Homo sapiens
  misc_RNA (1)...(19): siRNA sense strand
ccaaagaugagacccauug

SEQ ID NO: 1930130 - RNA, 19 nt, Homo sapiens
  misc_RNA (1)...(19): siRNA sense strand
agaaccaccugauggcuaa

SEQ ID NO: 1930131 - RNA, 19 nt, Homo sapiens
  misc_RNA (1)...(19): siRNA sense strand
ggacagaaucaacccaaga

SEQ ID NO: 1930132 - RNA, 19 nt, Homo sapiens
  misc_RNA (1)...(19): siRNA sense strand
cagaugcccuguccaaaca

SEQ ID NO: 1930133 - RNA, 19 nt, Homo sapiens
  misc_RNA (1)...(19): siRNA sense strand
gagguugaacuuauuaaug

SEQ ID NO: 1930134 - RNA, 19 nt, Homo sapiens
  misc_RNA (1)...(19): siRNA sense strand
gcaaguccguggaucuucu

SEQ ID NO: 1930135 - RNA, 19 nt, Homo sapiens
  misc_RNA (1)...(19): siRNA sense strand
cuaauggauuugacaaugu

SEQ ID NO: 1930136 - RNA, 19 nt, Homo sapiens
  misc_RNA (1)...(19): siRNA sense strand
ucucaacauuugccuauau

SEQ ID NO: 1930137 - RNA, 19 nt, Homo sapiens
  misc_RNA (1)...(19): siRNA sense strand
ccagucgugugauuacaaa

SEQ ID NO: 1930138 - RNA, 19 nt, Homo sapiens
  misc_RNA (1)...(19): siRNA sense strand
uauggaagaucaggauuug

SEQ ID NO: 1930139 - RNA, 19 nt, Homo sapiens
  misc_RNA (1)...(19): siRNA sense strand
gggcacagacaaagaauuc

SEQ ID NO: 1930140 - RNA, 19 nt, Homo sapiens
  misc_RNA (1)...(19): siRNA sense strand
ucagaagucuacagagcaa

SEQ ID NO: 1930141 - RNA, 19 nt, Homo sapiens
  misc_RNA (1)...(19): siRNA sense strand
ccauugaacugggcgacua

SEQ ID NO: 1930142 - RNA, 19 nt, Homo sapiens
  misc_RNA (1)...(19): siRNA sense strand
ccagaaagcuuugaaaaca

SEQ ID NO: 1930143 - RNA, 19 nt, Homo sapiens
  misc_RNA (1)...(19): siRNA sense strand
uagguucuaugcugauaaa

SEQ ID NO: 1930144 - RNA, 19 nt, Homo sapiens
  misc_RNA (1)...(19): siRNA sense strand
acacuucgauggaccuguu

SEQ ID NO: 1930145 - RNA, 19 nt, Homo sapiens
  misc_RNA (1)...(19): siRNA sense strand
gacaaugguuggaaagcau

SEQ ID NO: 1930146 - RNA, 19 nt, Homo sapiens
  misc_RNA (1)...(19): siRNA sense strand
ggaagaucaggauuuguug

SEQ ID NO: 1930147 - RNA, 19 nt, Homo sapiens
  misc_RNA (1)...(19): siRNA sense strand
gaagucuaaucaccacuac

SEQ ID NO: 1930148 - RNA, 19 nt, Homo sapiens
  misc_RNA (1)...(19): siRNA sense strand
ggaaauuggaauccuuaau

SEQ ID NO: 1930149 - RNA, 19 nt, Homo sapiens
  misc_RNA (1)...(19): siRNA sense strand
uaauggauuugacaaugug

SEQ ID NO: 1930150 - RNA, 19 nt, Homo sapiens
  misc_RNA (1)...(19): siRNA sense strand
ucugggagguugaacuuau

SEQ ID NO: 1930151 - RNA, 19 nt, Homo sapiens
  misc_RNA (1)...(19): siRNA sense strand
ggccacaggaaacguauuu

SEQ ID NO: 1930152 - RNA, 19 nt, Homo sapiens
  misc_RNA (1)...(19): siRNA sense strand
aaagaauucuacaggcaau

SEQ ID NO: 1930153 - RNA, 19 nt, Homo sapiens
  misc_RNA (1)...(19): siRNA sense strand
gaugugaauuuagccuaug

SEQ ID NO: 1930154 - RNA, 19 nt, Homo sapiens
  misc_RNA (1)...(19): siRNA sense strand
cagagcaaaugaagaaggu

SEQ ID NO: 1930155 - RNA, 19 nt, Homo sapiens
  misc_RNA (1)...(19): siRNA sense strand
guagcugaguggcuggauu

SEQ ID NO: 1930156 - RNA, 19 nt, Homo sapiens
  misc_RNA (1)...(19): siRNA sense strand
gggagaaccuuccauuacc

SEQ ID NO: 1930157 - RNA, 19 nt, Homo sapiens
  misc_RNA (1)...(19): siRNA sense strand
guacgagaaccaccugaug

SEQ ID NO: 1930158 - RNA, 19 nt, Homo sapiens
  misc_RNA (1)...(19): siRNA sense strand
cagaaaagcuuaucuucca

SEQ ID NO: 1930159 - RNA, 19 nt, Homo sapiens
  misc_RNA (1)...(19): siRNA sense strand
uggaagaucaggauuuguu

SEQ ID NO: 1930160 - RNA, 19 nt, Homo sapiens
  misc_RNA (1)...(19): siRNA sense strand
gggcaggaaccaucagaga

SEQ ID NO: 1930161 - RNA, 19 nt, Homo sapiens
  misc_RNA (1)...(19): siRNA sense strand
ugaugugaauuuagccuau

SEQ ID NO: 1930162 - RNA, 19 nt, Homo sapiens
  misc_RNA (1)...(19): siRNA sense strand
ccagaagaccucucaacau

SEQ ID NO: 1930163 - RNA, 19 nt, Homo sapiens
  misc_RNA (1)...(19): siRNA sense strand
ggagguugaacuuauuaau

SEQ ID NO: 1930164 - RNA, 19 nt, Homo sapiens
  misc_RNA (1)...(19): siRNA sense strand
ugccuuugaugugaauuua

SEQ ID NO: 1930165 - RNA, 19 nt, Homo sapiens
  misc_RNA (1)...(19): siRNA sense strand
guucuaugcugauaaaaga

SEQ ID NO: 1930166 - RNA, 19 nt, Homo sapiens
  misc_RNA (1)...(19): siRNA sense strand
ggagaaccuuccauuaccu

SEQ ID NO: 1930167 - RNA, 19 nt, Homo sapiens
  misc_RNA (1)...(19): siRNA sense strand
gugggacaaugguuggaaa

SEQ ID NO: 1930168 - RNA, 19 nt, Homo sapiens
  misc_RNA (1)...(19): siRNA sense strand
aaucaccacuacugucaug

SEQ ID NO: 1930169 - RNA, 19 nt, Homo sapiens
  misc_RNA (1)...(19): siRNA sense strand
ggacccagaagaccucuca

SEQ ID NO: 1930170 - RNA, 19 nt, Homo sapiens
  misc_RNA (1)...(19): siRNA sense strand
guuggaaauuggaauccuu

SEQ ID NO: 1930171 - RNA, 19 nt, Homo sapiens
  misc_RNA (1)...(19): siRNA sense strand
uuuaugggaagcaauguua

SEQ ID NO: 1930172 - RNA, 19 nt, Homo sapiens
  misc_RNA (1)...(19): siRNA sense strand
agaagaccucucaacauuu

SEQ ID NO: 1930173 - RNA, 19 nt, Homo sapiens
  misc_RNA (1)...(19): siRNA sense strand
gcaauccagcuccuuccaa

SEQ ID NO: 1930174 - RNA, 19 nt, Homo sapiens
  misc_RNA (1)...(19): siRNA sense strand
gacagaaucaacccaagau

SEQ ID NO: 1930175 - RNA, 19 nt, Homo sapiens
  misc_RNA (1)...(19): siRNA sense strand
gauuugacaaugugcaguu

SEQ ID NO: 1930176 - RNA, 19 nt, Homo sapiens
  misc_RNA (1)...(19): siRNA sense strand
ugaagucuaaucaccacua

SEQ ID NO: 1930177 - RNA, 19 nt, Homo sapiens
  misc_RNA (1)...(19): siRNA sense strand
agaaggucccuacuauuau

SEQ ID NO: 1930178 - RNA, 19 nt, Homo sapiens
  misc_RNA (1)...(19): siRNA sense strand
ccaaacagugggacaaugg

SEQ ID NO: 1930179 - RNA, 19 nt, Homo sapiens
  misc_RNA (1)...(19): siRNA sense strand
uugacaaugugcaguuuau

SEQ ID NO: 1930180 - RNA, 19 nt, Homo sapiens
  misc_RNA (1)...(19): siRNA sense strand
uaauuaauggcuacacuuc

SEQ ID NO: 1930181 - RNA, 19 nt, Homo sapiens
  misc_RNA (1)...(19): siRNA sense strand
gacaaugugcaguuuaugg

SEQ ID NO: 1930182 - RNA, 19 nt, Homo sapiens
  misc_RNA (1)...(19): siRNA sense strand
caccacuacugucaugugu

SEQ ID NO: 1930183 - RNA, 19 nt, Homo sapiens
  misc_RNA (1)...(19): siRNA sense strand
cuaaucaccacuacuguca

SEQ ID NO: 1930184 - RNA, 19 nt, Homo sapiens
  misc_RNA (1)...(19): siRNA sense strand
acauuugccuauaucacaa

SEQ ID NO: 1930185 - RNA, 19 nt, Homo sapiens
  misc_RNA (1)...(19): siRNA sense strand
ccagcuagcacuacaagca

SEQ ID NO: 1930186 - RNA, 19 nt, Homo sapiens
  misc_RNA (1)...(19): siRNA sense strand
uuacugccuuugaugugaa

SEQ ID NO: 1930187 - RNA, 19 nt, Homo sapiens
  misc_RNA (1)...(19): siRNA sense strand
cgggcuaacugucagaagu

SEQ ID NO: 1930188 - RNA, 19 nt, Homo sapiens
  misc_RNA (1)...(19): siRNA sense strand
cugggagguugaacuuauu

SEQ ID NO: 1930189 - RNA, 19 nt, Homo sapiens
  misc_RNA (1)...(19): siRNA sense strand
gugaauuuagccuaugaaa

SEQ ID NO: 1930190 - RNA, 19 nt, Homo sapiens
  misc_RNA (1)...(19): siRNA sense strand
ggaaagcauugggcuaccu

SEQ ID NO: 1930191 - RNA, 19 nt, Homo sapiens
  misc_RNA (1)...(19): siRNA sense strand
gaagucuacagagcaaaug

SEQ ID NO: 1930192 - RNA, 19 nt, Homo sapiens
  misc_RNA (1)...(19): siRNA sense strand
gagaaccuuccauuaccuu

SEQ ID NO: 1930193 - RNA, 19 nt, Homo sapiens
  misc_RNA (1)...(19): siRNA sense strand
ccagcuccuuccaaagaug

SEQ ID NO: 1930194 - RNA, 19 nt, Homo sapiens
  misc_RNA (1)...(19): siRNA sense strand
ccuccacacuuccagaaag

SEQ ID NO: 1930195 - RNA, 19 nt, Homo sapiens
  misc_RNA (1)...(19): siRNA sense strand
gcuaccaucccaccucugu

SEQ ID NO: 1930196 - RNA, 19 nt, Homo sapiens
  misc_RNA (1)...(19): siRNA sense strand
auuaauggcuacacuucga

SEQ ID NO: 1930197 - RNA, 19 nt, Homo sapiens
  misc_RNA (1)...(19): siRNA sense strand
ucauguguuuacugccuuu

SEQ ID NO: 1930198 - RNA, 19 nt, Homo sapiens
  misc_RNA (1)...(19): siRNA sense strand
ccagaugcccuguccaaac

SEQ ID NO: 1930199 - RNA, 19 nt, Homo sapiens
  misc_RNA (1)...(19): siRNA sense strand
gaaucaacccaagaugcuu

SEQ ID NO: 1930200 - RNA, 19 nt, Homo sapiens
  misc_RNA (1)...(19): siRNA sense strand
uuauggaagaucaggauuu

SEQ ID NO: 1930201 - RNA, 19 nt, Homo sapiens
  misc_RNA (1)...(19): siRNA sense strand
gaaaacaaacccuccaaac

SEQ ID NO: 1930202 - RNA, 19 nt, Homo sapiens
  misc_RNA (1)...(19): siRNA sense strand
cagaaagcuuugaaaacaa

SEQ ID NO: 1930203 - RNA, 19 nt, Homo sapiens
  misc_RNA (1)...(19): siRNA sense strand
ucccuacuauuauucuuuc

SEQ ID NO: 1930204 - RNA, 19 nt, Homo sapiens
  misc_RNA (1)...(19): siRNA sense strand
guccguggaucuucuucau

SEQ ID NO: 1930205 - RNA, 19 nt, Homo sapiens
  misc_RNA (1)...(19): siRNA sense strand
gggacacuccuccacacuu

SEQ ID NO: 1930206 - RNA, 19 nt, Homo sapiens
  misc_RNA (1)...(19): siRNA sense strand
gaagaccucucaacauuug

SEQ ID NO: 1930207 - RNA, 19 nt, Homo sapiens
  misc_RNA (1)...(19): siRNA sense strand
cagaagaccucucaacauu

SEQ ID NO: 1930208 - RNA, 19 nt, Homo sapiens
  misc_RNA (1)...(19): siRNA sense strand
gaaggucccuacuauuauu

SEQ ID NO: 1930209 - RNA, 19 nt, Homo sapiens
  misc_RNA (1)...(19): siRNA sense strand
gaagcaauguuauggaaga

SEQ ID NO: 1930210 - RNA, 19 nt, Homo sapiens
  misc_RNA (1)...(19): siRNA sense strand
cgaagucgcuuaccagcua

SEQ ID NO: 1930211 - RNA, 19 nt, Homo sapiens
  misc_RNA (1)...(19): siRNA sense strand
ugaagaaggucccuacuau

SEQ ID NO: 1930212 - RNA, 19 nt, Homo sapiens
  misc_RNA (1)...(19): siRNA sense strand
gagcaugaaauucguaaua

SEQ ID NO: 1930213 - RNA, 19 nt, Homo sapiens
  misc_RNA (1)...(19): siRNA sense strand
ccacuacugucauguguuu

SEQ ID NO: 1930214 - RNA, 19 nt, Homo sapiens
  misc_RNA (1)...(19): siRNA sense strand
gcauugggcuaccucagua

SEQ ID NO: 1930215 - RNA, 19 nt, Homo sapiens
  misc_RNA (1)...(19): siRNA sense strand
aagaaggucccuacuauua

SEQ ID NO: 1930216 - RNA, 19 nt, Homo sapiens
  misc_RNA (1)...(19): siRNA sense strand
gaucaggauuuguuggaaa

SEQ ID NO: 1930217 - RNA, 19 nt, Homo sapiens
  misc_RNA (1)...(19): siRNA sense strand
gggaagcaauguuauggaa

SEQ ID NO: 1930218 - RNA, 19 nt, Homo sapiens
  misc_RNA (1)...(19): siRNA sense strand
ccugauggcuaauggauuu

SEQ ID NO: 1930219 - RNA, 19 nt, Homo sapiens
  misc_RNA (1)...(19): siRNA sense strand
gcaauguuauggaagauca

SEQ ID NO: 1930220 - RNA, 19 nt, Homo sapiens
  misc_RNA (1)...(19): siRNA sense strand
gcuaauggauuugacaaug

SEQ ID NO: 1930221 - RNA, 19 nt, Homo sapiens
  misc_RNA (1)...(19): siRNA sense strand
ggacacuccuccacacuuc

SEQ ID NO: 1930222 - RNA, 19 nt, Homo sapiens
  misc_RNA (1)...(19): siRNA sense strand
gaagaaggucccuacuauu

SEQ ID NO: 1930223 - RNA, 19 nt, Homo sapiens
  misc_RNA (1)...(19): siRNA sense strand
gcacagacaaagaauucua

SEQ ID NO: 1930224 - RNA, 19 nt, Homo sapiens
  misc_RNA (1)...(19): siRNA sense strand
cuacagagcaaaugaagaa

SEQ ID NO: 1930225 - RNA, 19 nt, Homo sapiens
  misc_RNA (1)...(19): siRNA sense strand
caauccagcuccuuccaaa

SEQ ID NO: 1930226 - RNA, 19 nt, Homo sapiens
  misc_RNA (1)...(19): siRNA sense strand
gcaugaaauucguaauauc

SEQ ID NO: 1930227 - RNA, 19 nt, Homo sapiens
  misc_RNA (1)...(19): siRNA sense strand
ggacaaugguuggaaagca

SEQ ID NO: 1930228 - RNA, 19 nt, Homo sapiens
  misc_RNA (1)...(19): siRNA sense strand
gcaggaaccaucagagaga

SEQ ID NO: 1930229 - RNA, 19 nt, Homo sapiens
  misc_RNA (1)...(19): siRNA sense strand
ccaaagaugagacccauug

SEQ ID NO: 1930230 - RNA, 19 nt, Homo sapiens
  misc_RNA (1)...(19): siRNA sense strand
agaaccaccugauggcuaa

SEQ ID NO: 1930231 - RNA, 19 nt, Homo sapiens
  misc_RNA (1)...(19): siRNA sense strand
ggacagaaucaacccaaga

SEQ ID NO: 1930232 - RNA, 19 nt, Homo sapiens
  misc_RNA (1)...(19): siRNA sense strand
cagaugcccuguccaaaca

SEQ ID NO: 1930233 - RNA, 19 nt, Homo sapiens
  misc_RNA (1)...(19): siRNA sense strand
gagguugaacuuauuaaug

SEQ ID NO: 1930234 - RNA, 19 nt, Homo sapiens
  misc_RNA (1)...(19): siRNA sense strand
gcaaguccguggaucuucu

SEQ ID NO: 1930235 - RNA, 19 nt, Homo sapiens
  misc_RNA (1)...(19): siRNA sense strand
cuaauggauuugacaaugu

SEQ ID NO: 1930236 - RNA, 19 nt, Homo sapiens
  misc_RNA (1)...(19): siRNA sense strand
ucucaacauuugccuauau

SEQ ID NO: 1930237 - RNA, 19 nt, Homo sapiens
  misc_RNA (1)...(19): siRNA sense strand
ccagucgugugauuacaaa

SEQ ID NO: 1930238 - RNA, 19 nt, Homo sapiens
  misc_RNA (1)...(19): siRNA sense strand
uauggaagaucaggauuug

SEQ ID NO: 1930239 - RNA, 19 nt, Homo sapiens
  misc_RNA (1)...(19): siRNA sense strand
gggcacagacaaagaauuc

SEQ ID NO: 1930240 - RNA, 19 nt, Homo sapiens
  misc_RNA (1)...(19): siRNA sense strand
ucagaagucuacagagcaa

SEQ ID NO: 1930241 - RNA, 19 nt, Homo sapiens
  misc_RNA (1)...(19): siRNA sense strand
ccauugaacugggcgacua

SEQ ID NO: 1930242 - RNA, 19 nt, Homo sapiens
  misc_RNA (1)...(19): siRNA sense strand
ccagaaagcuuugaaaaca

SEQ ID NO: 1930243 - RNA, 19 nt, Homo sapiens
  misc_RNA (1)...(19): siRNA sense strand
uagguucuaugcugauaaa

SEQ ID NO: 1930244 - RNA, 19 nt, Homo sapiens
  misc_RNA (1)...(19): siRNA sense strand
acacuucgauggaccuguu

SEQ ID NO: 1930245 - RNA, 19 nt, Homo sapiens
  misc_RNA (1)...(19): siRNA sense strand
gacaaugguuggaaagcau

SEQ ID NO: 1930246 - RNA, 19 nt, Homo sapiens
  misc_RNA (1)...(19): siRNA sense strand
ggaagaucaggauuuguug

SEQ ID NO: 1930247 - RNA, 19 nt, Homo sapiens
  misc_RNA (1)...(19): siRNA sense strand
gaagucuaaucaccacuac

SEQ ID NO: 1930248 - RNA, 19 nt, Homo sapiens
  misc_RNA (1)...(19): siRNA sense strand
ggaaauuggaauccuuaau

SEQ ID NO: 1930249 - RNA, 19 nt, Homo sapiens
  misc_RNA (1)...(19): siRNA sense strand
uaauggauuugacaaugug

SEQ ID NO: 1930250 - RNA, 19 nt, Homo sapiens
  misc_RNA (1)...(19): siRNA sense strand
ucugggagguugaacuuau

SEQ ID NO: 1930251 - RNA, 19 nt, Homo sapiens
  misc_RNA (1)...(19): siRNA sense strand
ggccacaggaaacguauuu

SEQ ID NO: 1930252 - RNA, 19 nt, Homo sapiens
  misc_RNA (1)...(19): siRNA sense strand
aaagaauucuacaggcaau

SEQ ID NO: 1930253 - RNA, 19 nt, Homo sapiens
  misc_RNA (1)...(19): siRNA sense strand
gaugugaauuuagccuaug

SEQ ID NO: 1930254 - RNA, 19 nt, Homo sapiens
  misc_RNA (1)...(19): siRNA sense strand
cagagcaaaugaagaaggu

SEQ ID NO: 1930255 - RNA, 19 nt, Homo sapiens
  misc_RNA (1)...(19): siRNA sense strand
guagcugaguggcuggauu

SEQ ID NO: 1930256 - RNA, 19 nt, Homo sapiens
  misc_RNA (1)...(19): siRNA sense strand
gggagaaccuuccauuacc

SEQ ID NO: 1930257 - RNA, 19 nt, Homo sapiens
  misc_RNA (1)...(19): siRNA sense strand
guacgagaaccaccugaug

SEQ ID NO: 1930258 - RNA, 19 nt, Homo sapiens
  misc_RNA (1)...(19): siRNA sense strand
cagaaaagcuuaucuucca

SEQ ID NO: 1930259 - RNA, 19 nt, Homo sapiens
  misc_RNA (1)...(19): siRNA sense strand
uggaagaucaggauuuguu

SEQ ID NO: 1930260 - RNA, 19 nt, Homo sapiens
  misc_RNA (1)...(19): siRNA sense strand
gggcaggaaccaucagaga

SEQ ID NO: 1930261 - RNA, 19 nt, Homo sapiens
  misc_RNA (1)...(19): siRNA sense strand
ugaugugaauuuagccuau

SEQ ID NO: 1930262 - RNA, 19 nt, Homo sapiens
  misc_RNA (1)...(19): siRNA sense strand
ccagaagaccucucaacau

SEQ ID NO: 1930263 - RNA, 19 nt, Homo sapiens
  misc_RNA (1)...(19): siRNA sense strand
ggagguugaacuuauuaau

SEQ ID NO: 1930264 - RNA, 19 nt, Homo sapiens
  misc_RNA (1)...(19): siRNA sense strand
ugccuuugaugugaauuua

SEQ ID NO: 1930265 - RNA, 19 nt, Homo sapiens
  misc_RNA (1)...(19): siRNA sense strand
guucuaugcugauaaaaga

SEQ ID NO: 1930266 - RNA, 19 nt, Homo sapiens
  misc_RNA (1)...(19): siRNA sense strand
ggagaaccuuccauuaccu

SEQ ID NO: 1930267 - RNA, 19 nt, Homo sapiens
  misc_RNA (1)...(19): siRNA sense strand
gugggacaaugguuggaaa

SEQ ID NO: 1930268 - RNA, 19 nt, Homo sapiens
  misc_RNA (1)...(19): siRNA sense strand
aaucaccacuacugucaug

SEQ ID NO: 1930269 - RNA, 19 nt, Homo sapiens
  misc_RNA (1)...(19): siRNA sense strand
ggacccagaagaccucuca

SEQ ID NO: 1930270 - RNA, 19 nt, Homo sapiens
  misc_RNA (1)...(19): siRNA sense strand
guuggaaauuggaauccuu

SEQ ID NO: 1930271 - RNA, 19 nt, Homo sapiens
  misc_RNA (1)...(19): siRNA sense strand
uuuaugggaagcaauguua

SEQ ID NO: 1930272 - RNA, 19 nt, Homo sapiens
  misc_RNA (1)...(19): siRNA sense strand
agaagaccucucaacauuu

SEQ ID NO: 1930273 - RNA, 19 nt, Homo sapiens
  misc_RNA (1)...(19): siRNA sense strand
gcaauccagcuccuuccaa

SEQ ID NO: 1930274 - RNA, 19 nt, Homo sapiens
  misc_RNA (1)...(19): siRNA sense strand
gacagaaucaacccaagau

SEQ ID NO: 1930275 - RNA, 19 nt, Homo sapiens
  misc_RNA (1)...(19): siRNA sense strand
gauuugacaaugugcaguu

SEQ ID NO: 1930276 - RNA, 19 nt, Homo sapiens
  misc_RNA (1)...(19): siRNA sense strand
ugaagucuaaucaccacua

SEQ ID NO: 1930277 - RNA, 19 nt, Homo sapiens
  misc_RNA (1)...(19): siRNA sense strand
agaaggucccuacuauuau

SEQ ID NO: 1930278 - RNA, 19 nt, Homo sapiens
  misc_RNA (1)...(19): siRNA sense strand
ccaaacagugggacaaugg

SEQ ID NO: 1930279 - RNA, 19 nt, Homo sapiens
  misc_RNA (1)...(19): siRNA sense strand
uugacaaugugcaguuuau

SEQ ID NO: 1930280 - RNA, 19 nt, Homo sapiens
  misc_RNA (1)...(19): siRNA sense strand
uaauuaauggcuacacuuc

SEQ ID NO: 1930281 - RNA, 19 nt, Homo sapiens
  misc_RNA (1)...(19): siRNA sense strand
gacaaugugcaguuuaugg

SEQ ID NO: 1930282 - RNA, 19 nt, Homo sapiens
  misc_RNA (1)...(19): siRNA sense strand
caccacuacugucaugugu

SEQ ID NO: 1930283 - RNA, 19 nt, Homo sapiens
  misc_RNA (1)...(19): siRNA sense strand
cuaaucaccacuacuguca

SEQ ID NO: 1930284 - RNA, 19 nt, Homo sapiens
  misc_RNA (1)...(19): siRNA sense strand
acauuugccuauaucacaa

SEQ ID NO: 1930285 - RNA, 19 nt, Homo sapiens
  misc_RNA (1)...(19): siRNA sense strand
ccagcuagcacuacaagca

SEQ ID NO: 1930286 - RNA, 19 nt, Homo sapiens
  misc_RNA (1)...(19): siRNA sense strand
uuacugccuuugaugugaa

SEQ ID NO: 1930287 - RNA, 19 nt, Homo sapiens
  misc_RNA (1)...(19): siRNA sense strand
cgggcuaacugucagaagu

SEQ ID NO: 1930288 - RNA, 19 nt, Homo sapiens
  misc_RNA (1)...(19): siRNA sense strand
cugggagguugaacuuauu

SEQ ID NO: 1930289 - RNA, 19 nt, Homo sapiens
  misc_RNA (1)...(19): siRNA sense strand
gugaauuuagccuaugaaa

SEQ ID NO: 1930290 - RNA, 19 nt, Homo sapiens
  misc_RNA (1)...(19): siRNA sense strand
ggaaagcauugggcuaccu

SEQ ID NO: 1930291 - RNA, 19 nt, Homo sapiens
  misc_RNA (1)...(19): siRNA sense strand
gaagucuacagagcaaaug

SEQ ID NO: 1930292 - RNA, 19 nt, Homo sapiens
  misc_RNA (1)...(19): siRNA sense strand
gagaaccuuccauuaccuu

SEQ ID NO: 1930293 - RNA, 19 nt, Homo sapiens
  misc_RNA (1)...(19): siRNA sense strand
ccagcuccuuccaaagaug

SEQ ID NO: 1930294 - RNA, 19 nt, Homo sapiens
  misc_RNA (1)...(19): siRNA sense strand
ccuccacacuuccagaaag

SEQ ID NO: 1930295 - RNA, 19 nt, Homo sapiens
  misc_RNA (1)...(19): siRNA sense strand
gcuaccaucccaccucugu

SEQ ID NO: 1930296 - RNA, 19 nt, Homo sapiens
  misc_RNA (1)...(19): siRNA sense strand
auuaauggcuacacuucga

SEQ ID NO: 1930297 - RNA, 19 nt, Homo sapiens
  misc_RNA (1)...(19): siRNA sense strand
ucauguguuuacugccuuu

SEQ ID NO: 1930298 - RNA, 19 nt, Homo sapiens
  misc_RNA (1)...(19): siRNA sense strand
ccagaugcccuguccaaac

SEQ ID NO: 1930299 - RNA, 19 nt, Homo sapiens
  misc_RNA (1)...(19): siRNA sense strand
gaaucaacccaagaugcuu

SEQ ID NO: 1930300 - RNA, 19 nt, Homo sapiens
  misc_RNA (1)...(19): siRNA sense strand
uuauggaagaucaggauuu

SEQ ID NO: 1930301 - RNA, 19 nt, Homo sapiens
  misc_RNA (1)...(19): siRNA sense strand
gaaaacaaacccuccaaac

SEQ ID NO: 1930302 - RNA, 19 nt, Homo sapiens
  misc_RNA (1)...(19): siRNA sense strand
cagaaagcuuugaaaacaa

SEQ ID NO: 1930303 - RNA, 19 nt, Homo sapiens
  misc_RNA (1)...(19): siRNA sense strand
ucccuacuauuauucuuuc

SEQ ID NO: 1930304 - RNA, 19 nt, Homo sapiens
  misc_RNA (1)...(19): siRNA sense strand
guccguggaucuucuucau

SEQ ID NO: 1930305 - RNA, 19 nt, Homo sapiens
  misc_RNA (1)...(19): siRNA sense strand
gggacacuccuccacacuu

SEQ ID NO: 1930306 - RNA, 19 nt, Homo sapiens
  misc_RNA (1)...(19): siRNA sense strand
gcacgacuuucaccacgua

SEQ ID NO: 1930307 - RNA, 19 nt, Homo sapiens
  misc_RNA (1)...(19): siRNA sense strand
ccacguaccagcugcauga

SEQ ID NO: 1930308 - RNA, 19 nt, Homo sapiens
  misc_RNA (1)...(19): siRNA sense strand
ggaggaacagcccaagaaa

SEQ ID NO: 1930309 - RNA, 19 nt, Homo sapiens
  misc_RNA (1)...(19): siRNA sense strand
ggaaguguccuccaugaag

SEQ ID NO: 1930310 - RNA, 19 nt, Homo sapiens
  misc_RNA (1)...(19): siRNA sense strand
gaaacugucagaggaggaa

SEQ ID NO: 1930311 - RNA, 19 nt, Homo sapiens
  misc_RNA (1)...(19): siRNA sense strand
gcgaagcgaaacugucaga

SEQ ID NO: 1930312 - RNA, 19 nt, Homo sapiens
  misc_RNA (1)...(19): siRNA sense strand
gaggaggaacagcccaaga

SEQ ID NO: 1930313 - RNA, 19 nt, Homo sapiens
  misc_RNA (1)...(19): siRNA sense strand
cggcgaagcgaaacuguca

SEQ ID NO: 1930314 - RNA, 19 nt, Homo sapiens
  misc_RNA (1)...(19): siRNA sense strand
aggaggaacagcccaagaa

SEQ ID NO: 1930315 - RNA, 19 nt, Homo sapiens
  misc_RNA (1)...(19): siRNA sense strand
ccacuacccggacguguac

SEQ ID NO: 1930316 - RNA, 19 nt, Homo sapiens
  misc_RNA (1)...(19): siRNA sense strand
gcgaaggagcgggauagga

SEQ ID NO: 1930317 - RNA, 19 nt, Homo sapiens
  misc_RNA (1)...(19): siRNA sense strand
cggaaccgcacgacuuuca

SEQ ID NO: 1930318 - RNA, 19 nt, Homo sapiens
  misc_RNA (1)...(19): siRNA sense strand
ccacagagcucuucaguug

SEQ ID NO: 1930319 - RNA, 19 nt, Homo sapiens
  misc_RNA (1)...(19): siRNA sense strand
gauaccaaguucauucaua

SEQ ID NO: 1930320 - RNA, 19 nt, Homo sapiens
  misc_RNA (1)...(19): siRNA sense strand
cgaauuaagugucaccauu

SEQ ID NO: 1930321 - RNA, 19 nt, Homo sapiens
  misc_RNA (1)...(19): siRNA sense strand
gaagacugccuuuacuuaa

SEQ ID NO: 1930322 - RNA, 19 nt, Homo sapiens
  misc_RNA (1)...(19): siRNA sense strand
gaccagcucuaucugcaua

SEQ ID NO: 1930323 - RNA, 19 nt, Homo sapiens
  misc_RNA (1)...(19): siRNA sense strand
gcaccuggaugaaagauuc

SEQ ID NO: 1930324 - RNA, 19 nt, Homo sapiens
  misc_RNA (1)...(19): siRNA sense strand
caaguacacucggauauug

SEQ ID NO: 1930325 - RNA, 19 nt, Homo sapiens
  misc_RNA (1)...(19): siRNA sense strand
uagaaugucugaagaacaa

SEQ ID NO: 1930326 - RNA, 19 nt, Homo sapiens
  misc_RNA (1)...(19): siRNA sense strand
acagagcucuucaguugua

SEQ ID NO: 1930327 - RNA, 19 nt, Homo sapiens
  misc_RNA (1)...(19): siRNA sense strand
gaacaccauuacccaguga

SEQ ID NO: 1930328 - RNA, 19 nt, Homo sapiens
  misc_RNA (1)...(19): siRNA sense strand
gaucaugucucugcagaug

SEQ ID NO: 1930329 - RNA, 19 nt, Homo sapiens
  misc_RNA (1)...(19): siRNA sense strand
caaaugauaucacucacau

SEQ ID NO: 1930330 - RNA, 19 nt, Homo sapiens
  misc_RNA (1)...(19): siRNA sense strand
gaaguggccugguccaagu

SEQ ID NO: 1930331 - RNA, 19 nt, Homo sapiens
  misc_RNA (1)...(19): siRNA sense strand
ugaacgagauauuccagua

SEQ ID NO: 1930332 - RNA, 19 nt, Homo sapiens
  misc_RNA (1)...(19): siRNA sense strand
uaacugcucuugccaucaa

SEQ ID NO: 1930333 - RNA, 19 nt, Homo sapiens
  misc_RNA (1)...(19): siRNA sense strand
ccacggacaugguagaaug

SEQ ID NO: 1930334 - RNA, 19 nt, Homo sapiens
  misc_RNA (1)...(19): siRNA sense strand
ggacaaaacaguacaaauu

SEQ ID NO: 1930335 - RNA, 19 nt, Homo sapiens
  misc_RNA (1)...(19): siRNA sense strand
acacaacuguccucauuga

SEQ ID NO: 1930336 - RNA, 19 nt, Homo sapiens
  misc_RNA (1)...(19): siRNA sense strand
ccgaaaugcuacucaguuu

SEQ ID NO: 1930337 - RNA, 19 nt, Homo sapiens
  misc_RNA (1)...(19): siRNA sense strand
agaaacaccacaaaugaua

SEQ ID NO: 1930338 - RNA, 19 nt, Homo sapiens
  misc_RNA (1)...(19): siRNA sense strand
ccaaguucauucauacaaa

SEQ ID NO: 1930339 - RNA, 19 nt, Homo sapiens
  misc_RNA (1)...(19): siRNA sense strand
uaacugccgucugggaaua

SEQ ID NO: 1930340 - RNA, 19 nt, Homo sapiens
  misc_RNA (1)...(19): siRNA sense strand
ugaagacugccuuuacuua

SEQ ID NO: 1930341 - RNA, 19 nt, Homo sapiens
  misc_RNA (1)...(19): siRNA sense strand
ggagggaaccgguaacaug

SEQ ID NO: 1930342 - RNA, 19 nt, Homo sapiens
  misc_RNA (1)...(19): siRNA sense strand
gcucuucaguuguaauuuc

SEQ ID NO: 1930343 - RNA, 19 nt, Homo sapiens
  misc_RNA (1)...(19): siRNA sense strand
guaagaagccuguuauggu

SEQ ID NO: 1930344 - RNA, 19 nt, Homo sapiens
  misc_RNA (1)...(19): siRNA sense strand
gaauuaagugucaccauug

SEQ ID NO: 1930345 - RNA, 19 nt, Homo sapiens
  misc_RNA (1)...(19): siRNA sense strand
gggaaccgguaacaugauu

SEQ ID NO: 1930346 - RNA, 19 nt, Homo sapiens
  misc_RNA (1)...(19): siRNA sense strand
ccaaacaccaucaccauga

SEQ ID NO: 1930347 - RNA, 19 nt, Homo sapiens
  misc_RNA (1)...(19): siRNA sense strand
ugaccuauguucaagauca

SEQ ID NO: 1930348 - RNA, 19 nt, Homo sapiens
  misc_RNA (1)...(19): siRNA sense strand
agagaaacaccacaaauga

SEQ ID NO: 1930349 - RNA, 19 nt, Homo sapiens
  misc_RNA (1)...(19): siRNA sense strand
gacaagaggcgccaugaga

SEQ ID NO: 1930350 - RNA, 19 nt, Homo sapiens
  misc_RNA (1)...(19): siRNA sense strand
cuacuucuaugccuucuau

SEQ ID NO: 1930351 - RNA, 19 nt, Homo sapiens
  misc_RNA (1)...(19): siRNA sense strand
ccaccaguuuggauacuuu

SEQ ID NO: 1930352 - RNA, 19 nt, Homo sapiens
  misc_RNA (1)...(19): siRNA sense strand
gagauauuccaguauguuu

SEQ ID NO: 1930353 - RNA, 19 nt, Homo sapiens
  misc_RNA (1)...(19): siRNA sense strand
gcacaacuugaacgagaua

SEQ ID NO: 1930354 - RNA, 19 nt, Homo sapiens
  misc_RNA (1)...(19): siRNA sense strand
gaugaccuauguucaagau

SEQ ID NO: 1930355 - RNA, 19 nt, Homo sapiens
  misc_RNA (1)...(19): siRNA sense strand
gagggaaccgguaacauga

SEQ ID NO: 1930356 - RNA, 19 nt, Homo sapiens
  misc_RNA (1)...(19): siRNA sense strand
gaacgaagagaucaugucu

SEQ ID NO: 1930357 - RNA, 19 nt, Homo sapiens
  misc_RNA (1)...(19): siRNA sense strand
gaaacaccacaaaugauau

SEQ ID NO: 1930358 - RNA, 19 nt, Homo sapiens
  misc_RNA (1)...(19): siRNA sense strand
gaaccgguaacaugauuga

SEQ ID NO: 1930359 - RNA, 19 nt, Homo sapiens
  misc_RNA (1)...(19): siRNA sense strand
ccacaaaugauaucacuca

SEQ ID NO: 1930360 - RNA, 19 nt, Homo sapiens
  misc_RNA (1)...(19): siRNA sense strand
gaacgagauauuccaguau

SEQ ID NO: 1930361 - RNA, 19 nt, Homo sapiens
  misc_RNA (1)...(19): siRNA sense strand
ccaaagaccagcucuaucu

SEQ ID NO: 1930362 - RNA, 19 nt, Homo sapiens
  misc_RNA (1)...(19): siRNA sense strand
ccaaguauaaucccaaaga

SEQ ID NO: 1930363 - RNA, 19 nt, Homo sapiens
  misc_RNA (1)...(19): siRNA sense strand
ugagguggauugaggagaa

SEQ ID NO: 1930364 - RNA, 19 nt, Homo sapiens
  misc_RNA (1)...(19): siRNA sense strand
gaaaccaaacgagauuauu

SEQ ID NO: 1930365 - RNA, 19 nt, Homo sapiens
  misc_RNA (1)...(19): siRNA sense strand
caacuguccucauugaaac

SEQ ID NO: 1930366 - RNA, 19 nt, Homo sapiens
  misc_RNA (1)...(19): siRNA sense strand
ugacaucauuucccuaugg

SEQ ID NO: 1930367 - RNA, 19 nt, Homo sapiens
  misc_RNA (1)...(19): siRNA sense strand
ccaauguucuucuguggau

SEQ ID NO: 1930368 - RNA, 19 nt, Homo sapiens
  misc_RNA (1)...(19): siRNA sense strand
cagagaaacaccacaaaug

SEQ ID NO: 1930369 - RNA, 19 nt, Homo sapiens
  misc_RNA (1)...(19): siRNA sense strand
caugauugauggcagcauu

SEQ ID NO: 1930370 - RNA, 19 nt, Homo sapiens
  misc_RNA (1)...(19): siRNA sense strand
gagaaacaccacaaaugau

SEQ ID NO: 1930371 - RNA, 19 nt, Homo sapiens
  misc_RNA (1)...(19): siRNA sense strand
ggagaaugucggagccuuu

SEQ ID NO: 1930372 - RNA, 19 nt, Homo sapiens
  misc_RNA (1)...(19): siRNA sense strand
ucaaguucauguacacaga

SEQ ID NO: 1930373 - RNA, 19 nt, Homo sapiens
  misc_RNA (1)...(19): siRNA sense strand
caagcacaguauccaguug

SEQ ID NO: 1930374 - RNA, 19 nt, Homo sapiens
  misc_RNA (1)...(19): siRNA sense strand
ucacucacauccagaacga

SEQ ID NO: 1930375 - RNA, 19 nt, Homo sapiens
  misc_RNA (1)...(19): siRNA sense strand
caacuugaacgagauauuc

SEQ ID NO: 1930376 - RNA, 19 nt, Homo sapiens
  misc_RNA (1)...(19): siRNA sense strand
gauccaaaccaaccaguuc

SEQ ID NO: 1930377 - RNA, 19 nt, Homo sapiens
  misc_RNA (1)...(19): siRNA sense strand
gcgggagacuaucaaguuc

SEQ ID NO: 1930378 - RNA, 19 nt, Homo sapiens
  misc_RNA (1)...(19): siRNA sense strand
gggaaggccugaaguucgu

SEQ ID NO: 1930379 - RNA, 19 nt, Homo sapiens
  misc_RNA (1)...(19): siRNA sense strand
agacugggccgauaaggaa

SEQ ID NO: 1930380 - RNA, 19 nt, Homo sapiens
  misc_RNA (1)...(19): siRNA sense strand
auacuuugaugaccuaugu

SEQ ID NO: 1930381 - RNA, 19 nt, Homo sapiens
  misc_RNA (1)...(19): siRNA sense strand
gauauuccaguauguuuca

SEQ ID NO: 1930382 - RNA, 19 nt, Homo sapiens
  misc_RNA (1)...(19): siRNA sense strand
ccaaguacacucggauauu

SEQ ID NO: 1930383 - RNA, 19 nt, Homo sapiens
  misc_RNA (1)...(19): siRNA sense strand
acuaugggcuccuggauca

SEQ ID NO: 1930384 - RNA, 19 nt, Homo sapiens
  misc_RNA (1)...(19): siRNA sense strand
gcccauggaagaugauauu

SEQ ID NO: 1930385 - RNA, 19 nt, Homo sapiens
  misc_RNA (1)...(19): siRNA sense strand
aaaccaaacgagauuauuc

SEQ ID NO: 1930386 - RNA, 19 nt, Homo sapiens
  misc_RNA (1)...(19): siRNA sense strand
gagcucuucaguuguaauu

SEQ ID NO: 1930387 - RNA, 19 nt, Homo sapiens
  misc_RNA (1)...(19): siRNA sense strand
ugaagaacaagaacuacaa

SEQ ID NO: 1930388 - RNA, 19 nt, Homo sapiens
  misc_RNA (1)...(19): siRNA sense strand
caaggucggcugcaacaug

SEQ ID NO: 1930389 - RNA, 19 nt, Homo sapiens
  misc_RNA (1)...(19): siRNA sense strand
gggccuaagaacaccauua

SEQ ID NO: 1930390 - RNA, 19 nt, Homo sapiens
  misc_RNA (1)...(19): siRNA sense strand
cgucaucguuaucaccauu

SEQ ID NO: 1930391 - RNA, 19 nt, Homo sapiens
  misc_RNA (1)...(19): siRNA sense strand
gaccuauguucaagaucaa

SEQ ID NO: 1930392 - RNA, 19 nt, Homo sapiens
  misc_RNA (1)...(19): siRNA sense strand
acaacuguccucauugaaa

SEQ ID NO: 1930393 - RNA, 19 nt, Homo sapiens
  misc_RNA (1)...(19): siRNA sense strand
guucuucuguggauaacug

SEQ ID NO: 1930394 - RNA, 19 nt, Homo sapiens
  misc_RNA (1)...(19): siRNA sense strand
gggagacuaucaaguucau

SEQ ID NO: 1930395 - RNA, 19 nt, Homo sapiens
  misc_RNA (1)...(19): siRNA sense strand
gcccaacgacuuugacuuc

SEQ ID NO: 1930396 - RNA, 19 nt, Homo sapiens
  misc_RNA (1)...(19): siRNA sense strand
gaagaacaagaacuacaag

SEQ ID NO: 1930397 - RNA, 19 nt, Homo sapiens
  misc_RNA (1)...(19): siRNA sense strand
cagaaggccaucauucaga

SEQ ID NO: 1930398 - RNA, 19 nt, Homo sapiens
  misc_RNA (1)...(19): siRNA sense strand
gagacuaucaaguucaugu

SEQ ID NO: 1930399 - RNA, 19 nt, Homo sapiens
  misc_RNA (1)...(19): siRNA sense strand
ggacauuccaccacuagag

SEQ ID NO: 1930400 - RNA, 19 nt, Homo sapiens
  misc_RNA (1)...(19): siRNA sense strand
cauguuaaacuccaauguu

SEQ ID NO: 1930401 - RNA, 19 nt, Homo sapiens
  misc_RNA (1)...(19): siRNA sense strand
guccaaguauaaucccaaa

SEQ ID NO: 1930402 - RNA, 19 nt, Homo sapiens
  misc_RNA (1)...(19): siRNA sense strand
gagaaugucggagccuuug

SEQ ID NO: 1930403 - RNA, 19 nt, Homo sapiens
  misc_RNA (1)...(19): siRNA sense strand
ccagagaaacaccacaaau

SEQ ID NO: 1930404 - RNA, 19 nt, Homo sapiens
  misc_RNA (1)...(19): siRNA sense strand
acacagacugggccgauaa

SEQ ID NO: 1930405 - RNA, 19 nt, Homo sapiens
  misc_RNA (1)...(19): siRNA sense strand
gguagaaugucugaagaac

SEQ ID NO: 1930406 - RNA, 19 nt, Homo sapiens
  misc_RNA (1)...(19): siRNA sense strand
gaugcagccuuuacacacu

SEQ ID NO: 1930407 - RNA, 19 nt, Homo sapiens
  misc_RNA (1)...(19): siRNA sense strand
gauauggccaaccaccaaa

SEQ ID NO: 1930408 - RNA, 19 nt, Homo sapiens
  misc_RNA (1)...(19): siRNA sense strand
caguuuggauacuuugaug

SEQ ID NO: 1930409 - RNA, 19 nt, Homo sapiens
  misc_RNA (1)...(19): siRNA sense strand
caacaaucccaaacacucu

SEQ ID NO: 1930410 - RNA, 19 nt, Homo sapiens
  misc_RNA (1)...(19): siRNA sense strand
caaguauaaucccaaagac

SEQ ID NO: 1930411 - RNA, 19 nt, Homo sapiens
  misc_RNA (1)...(19): siRNA sense strand
gcgaugaaguccccuaugu

SEQ ID NO: 1930412 - RNA, 19 nt, Homo sapiens
  misc_RNA (1)...(19): siRNA sense strand
agaagccuguuauggucua

SEQ ID NO: 1930413 - RNA, 19 nt, Homo sapiens
  misc_RNA (1)...(19): siRNA sense strand
guuaaacuccaauguucuu

SEQ ID NO: 1930414 - RNA, 19 nt, Homo sapiens
  misc_RNA (1)...(19): siRNA sense strand
aaacuccaauguucuucug

SEQ ID NO: 1930415 - RNA, 19 nt, Homo sapiens
  misc_RNA (1)...(19): siRNA sense strand
ccagcucuaucugcauauu

SEQ ID NO: 1930416 - RNA, 19 nt, Homo sapiens
  misc_RNA (1)...(19): siRNA sense strand
ugacagccaagcacaguau

SEQ ID NO: 1930417 - RNA, 19 nt, Homo sapiens
  misc_RNA (1)...(19): siRNA sense strand
aacgagauauuccaguaug

SEQ ID NO: 1930418 - RNA, 19 nt, Homo sapiens
  misc_RNA (1)...(19): siRNA sense strand
gacaacaggucaucucuug

SEQ ID NO: 1930419 - RNA, 19 nt, Homo sapiens
  misc_RNA (1)...(19): siRNA sense strand
gcaagcagcagauagcuaa

SEQ ID NO: 1930420 - RNA, 19 nt, Homo sapiens
  misc_RNA (1)...(19): siRNA sense strand
guaccagacugaucucuug

SEQ ID NO: 1930421 - RNA, 19 nt, Homo sapiens
  misc_RNA (1)...(19): siRNA sense strand
caaaggacgugacacuuca

SEQ ID NO: 1930422 - RNA, 19 nt, Homo sapiens
  misc_RNA (1)...(19): siRNA sense strand
gcaaaggacgugacacuuc

SEQ ID NO: 1930423 - RNA, 19 nt, Homo sapiens
  misc_RNA (1)...(19): siRNA sense strand
gagccugggugacuuugaa

SEQ ID NO: 1930424 - RNA, 19 nt, Homo sapiens
  misc_RNA (1)...(19): siRNA sense strand
ucacgauccuaacaucuuu

SEQ ID NO: 1930425 - RNA, 19 nt, Homo sapiens
  misc_RNA (1)...(19): siRNA sense strand
agacugaucucuugcuuac

SEQ ID NO: 1930426 - RNA, 19 nt, Homo sapiens
  misc_RNA (1)...(19): siRNA sense strand
cagcagauagcuaaggaaa

SEQ ID NO: 1930427 - RNA, 19 nt, Homo sapiens
  misc_RNA (1)...(19): siRNA sense strand
gcagauagcuaaggaaaac

SEQ ID NO: 1930428 - RNA, 19 nt, Homo sapiens
  misc_RNA (1)...(19): siRNA sense strand
ugaccagucugacccuuca

SEQ ID NO: 1930429 - RNA, 19 nt, Homo sapiens
  misc_RNA (1)...(19): siRNA sense strand
ggcuagggcuguccaugug

SEQ ID NO: 1930430 - RNA, 19 nt, Homo sapiens
  misc_RNA (1)...(19): siRNA sense strand
ccagacugaucucuugcuu

SEQ ID NO: 1930431 - RNA, 19 nt, Homo sapiens
  misc_RNA (1)...(19): siRNA sense strand
gguaccacuuugaggaugu

SEQ ID NO: 1930432 - RNA, 19 nt, Homo sapiens
  misc_RNA (1)...(19): siRNA sense strand
gggcuagggcuguccaugu

SEQ ID NO: 1930433 - RNA, 19 nt, Homo sapiens
  misc_RNA (1)...(19): siRNA sense strand
guaccacuuugaggauguu

SEQ ID NO: 1930434 - RNA, 19 nt, Homo sapiens
  misc_RNA (1)...(19): siRNA sense strand
cagacugaucucuugcuua

SEQ ID NO: 1930435 - RNA, 19 nt, Homo sapiens
  misc_RNA (1)...(19): siRNA sense strand
ggacgugacacuucaucag

SEQ ID NO: 1930436 - RNA, 19 nt, Homo sapiens
  misc_RNA (1)...(19): siRNA sense strand
caucuuugguccccaguaa

SEQ ID NO: 1930437 - RNA, 19 nt, Homo sapiens
  misc_RNA (1)...(19): siRNA sense strand
cccggacaaucaagaaguu

SEQ ID NO: 1930438 - RNA, 19 nt, Homo sapiens
  misc_RNA (1)...(19): siRNA sense strand
gcugcgcgguaccacuuug

SEQ ID NO: 1930439 - RNA, 19 nt, Homo sapiens
  misc_RNA (1)...(19): siRNA sense strand
cuguucagccucucaguuu

SEQ ID NO: 1930440 - RNA, 19 nt, Homo sapiens
  misc_RNA (1)...(19): siRNA sense strand
ggcaagcagcagauagcua

SEQ ID NO: 1930441 - RNA, 19 nt, Homo sapiens
  misc_RNA (1)...(19): siRNA sense strand
ggaccagagccugauagug

SEQ ID NO: 1930442 - RNA, 19 nt, Homo sapiens
  misc_RNA (1)...(19): siRNA sense strand
gacaacaggucaucucuug

SEQ ID NO: 1930443 - RNA, 19 nt, Homo sapiens
  misc_RNA (1)...(19): siRNA sense strand
gcaagcagcagauagcuaa

SEQ ID NO: 1930444 - RNA, 19 nt, Homo sapiens
  misc_RNA (1)...(19): siRNA sense strand
guaccagacugaucucuug

SEQ ID NO: 1930445 - RNA, 19 nt, Homo sapiens
  misc_RNA (1)...(19): siRNA sense strand
caaaggacgugacacuuca

SEQ ID NO: 1930446 - RNA, 19 nt, Homo sapiens
  misc_RNA (1)...(19): siRNA sense strand
gcaaaggacgugacacuuc

SEQ ID NO: 1930447 - RNA, 19 nt, Homo sapiens
  misc_RNA (1)...(19): siRNA sense strand
gagccugggugacuuugaa

SEQ ID NO: 1930448 - RNA, 19 nt, Homo sapiens
  misc_RNA (1)...(19): siRNA sense strand
ucacgauccuaacaucuuu

SEQ ID NO: 1930449 - RNA, 19 nt, Homo sapiens
  misc_RNA (1)...(19): siRNA sense strand
agacugaucucuugcuuac

SEQ ID NO: 1930450 - RNA, 19 nt, Homo sapiens
  misc_RNA (1)...(19): siRNA sense strand
cagcagauagcuaaggaaa

SEQ ID NO: 1930451 - RNA, 19 nt, Homo sapiens
  misc_RNA (1)...(19): siRNA sense strand
gcagauagcuaaggaaaac

SEQ ID NO: 1930452 - RNA, 19 nt, Homo sapiens
  misc_RNA (1)...(19): siRNA sense strand
ugaccagucugacccuuca

SEQ ID NO: 1930453 - RNA, 19 nt, Homo sapiens
  misc_RNA (1)...(19): siRNA sense strand
ggcuagggcuguccaugug

SEQ ID NO: 1930454 - RNA, 19 nt, Homo sapiens
  misc_RNA (1)...(19): siRNA sense strand
ccagacugaucucuugcuu

SEQ ID NO: 1930455 - RNA, 19 nt, Homo sapiens
  misc_RNA (1)...(19): siRNA sense strand
gguaccacuuugaggaugu

SEQ ID NO: 1930456 - RNA, 19 nt, Homo sapiens
  misc_RNA (1)...(19): siRNA sense strand
gggcuagggcuguccaugu

SEQ ID NO: 1930457 - RNA, 19 nt, Homo sapiens
  misc_RNA (1)...(19): siRNA sense strand
guaccacuuugaggauguu

SEQ ID NO: 1930458 - RNA, 19 nt, Homo sapiens
  misc_RNA (1)...(19): siRNA sense strand
cagacugaucucuugcuua

SEQ ID NO: 1930459 - RNA, 19 nt, Homo sapiens
  misc_RNA (1)...(19): siRNA sense strand
ggacgugacacuucaucag

SEQ ID NO: 1930460 - RNA, 19 nt, Homo sapiens
  misc_RNA (1)...(19): siRNA sense strand
caucuuugguccccaguaa

SEQ ID NO: 1930461 - RNA, 19 nt, Homo sapiens
  misc_RNA (1)...(19): siRNA sense strand
cccggacaaucaagaaguu

SEQ ID NO: 1930462 - RNA, 19 nt, Homo sapiens
  misc_RNA (1)...(19): siRNA sense strand
gcugcgcgguaccacuuug

SEQ ID NO: 1930463 - RNA, 19 nt, Homo sapiens
  misc_RNA (1)...(19): siRNA sense strand
cuguucagccucucaguuu

SEQ ID NO: 1930464 - RNA, 19 nt, Homo sapiens
  misc_RNA (1)...(19): siRNA sense strand
ggcaagcagcagauagcua

SEQ ID NO: 1930465 - RNA, 19 nt, Homo sapiens
  misc_RNA (1)...(19): siRNA sense strand
ggaccagagccugauagug

SEQ ID NO: 1930466 - RNA, 19 nt, Homo sapiens
  misc_RNA (1)...(19): siRNA sense strand
gaaagaaguuugaccauga

SEQ ID NO: 1930467 - RNA, 19 nt, Homo sapiens
  misc_RNA (1)...(19): siRNA sense strand
gaagacaguucaucaagaa

SEQ ID NO: 1930468 - RNA, 19 nt, Homo sapiens
  misc_RNA (1)...(19): siRNA sense strand
caaagaaggugccacaguu

SEQ ID NO: 1930469 - RNA, 19 nt, Homo sapiens
  misc_RNA (1)...(19): siRNA sense strand
ggaaauacaucagggagaa

SEQ ID NO: 1930470 - RNA, 19 nt, Homo sapiens
  misc_RNA (1)...(19): siRNA sense strand
gauagaaugugaccuacaa

SEQ ID NO: 1930471 - RNA, 19 nt, Homo sapiens
  misc_RNA (1)...(19): siRNA sense strand
gauaugggauagaauguga

SEQ ID NO: 1930472 - RNA, 19 nt, Homo sapiens
  misc_RNA (1)...(19): siRNA sense strand
acaucaagcugcagaauuu

SEQ ID NO: 1930473 - RNA, 19 nt, Homo sapiens
  misc_RNA (1)...(19): siRNA sense strand
agaaucaucugggaaauaa

SEQ ID NO: 1930474 - RNA, 19 nt, Homo sapiens
  misc_RNA (1)...(19): siRNA sense strand
gcaaagcccagcacauaaa

SEQ ID NO: 1930475 - RNA, 19 nt, Homo sapiens
  misc_RNA (1)...(19): siRNA sense strand
gcacuuuguuggacuguga

SEQ ID NO: 1930476 - RNA, 19 nt, Homo sapiens
  misc_RNA (1)...(19): siRNA sense strand
gugaaacucuccaagcaaa

SEQ ID NO: 1930477 - RNA, 19 nt, Homo sapiens
  misc_RNA (1)...(19): siRNA sense strand
gcugggaucaucuuuguua

SEQ ID NO: 1930478 - RNA, 19 nt, Homo sapiens
  misc_RNA (1)...(19): siRNA sense strand
uggaagagguuugagcuua

SEQ ID NO: 1930479 - RNA, 19 nt, Homo sapiens
  misc_RNA (1)...(19): siRNA sense strand
caggaggcauucacugaua

SEQ ID NO: 1930480 - RNA, 19 nt, Homo sapiens
  misc_RNA (1)...(19): siRNA sense strand
cuagagaggcuacugauuu

SEQ ID NO: 1930481 - RNA, 19 nt, Homo sapiens
  misc_RNA (1)...(19): siRNA sense strand
gguuugagcuuacucuuca

SEQ ID NO: 1930482 - RNA, 19 nt, Homo sapiens
  misc_RNA (1)...(19): siRNA sense strand
ggauuuauguacaguagga

SEQ ID NO: 1930483 - RNA, 19 nt, Homo sapiens
  misc_RNA (1)...(19): siRNA sense strand
ggaaugcacgcaaggguaa

SEQ ID NO: 1930484 - RNA, 19 nt, Homo sapiens
  misc_RNA (1)...(19): siRNA sense strand
gagaacggacucuuagaaa

SEQ ID NO: 1930485 - RNA, 19 nt, Homo sapiens
  misc_RNA (1)...(19): siRNA sense strand
caacguccauugagguuca

SEQ ID NO: 1930486 - RNA, 19 nt, Homo sapiens
  misc_RNA (1)...(19): siRNA sense strand
ugaauagguuccaaacaga

SEQ ID NO: 1930487 - RNA, 19 nt, Homo sapiens
  misc_RNA (1)...(19): siRNA sense strand
ccacugagcgaaagaaguu

SEQ ID NO: 1930488 - RNA, 19 nt, Homo sapiens
  misc_RNA (1)...(19): siRNA sense strand
ccaaaguccuccaucuuca

SEQ ID NO: 1930489 - RNA, 19 nt, Homo sapiens
  misc_RNA (1)...(19): siRNA sense strand
ggaagagguuugagcuuac

SEQ ID NO: 1930490 - RNA, 19 nt, Homo sapiens
  misc_RNA (1)...(19): siRNA sense strand
cugaagauaucugaaauga

SEQ ID NO: 1930491 - RNA, 19 nt, Homo sapiens
  misc_RNA (1)...(19): siRNA sense strand
gaauuuaucaggaacaaag

SEQ ID NO: 1930492 - RNA, 19 nt, Homo sapiens
  misc_RNA (1)...(19): siRNA sense strand
gaucaucuuuguuauccau

SEQ ID NO: 1930493 - RNA, 19 nt, Homo sapiens
  misc_RNA (1)...(19): siRNA sense strand
guucccagcugugacauuu

SEQ ID NO: 1930494 - RNA, 19 nt, Homo sapiens
  misc_RNA (1)...(19): siRNA sense strand
cagaugcuguagccaaauu

SEQ ID NO: 1930495 - RNA, 19 nt, Homo sapiens
  misc_RNA (1)...(19): siRNA sense strand
ccauguagcccaaaggauu

SEQ ID NO: 1930496 - RNA, 19 nt, Homo sapiens
  misc_RNA (1)...(19): siRNA sense strand
aaucaaagccggaaauaca

SEQ ID NO: 1930497 - RNA, 19 nt, Homo sapiens
  misc_RNA (1)...(19): siRNA sense strand
agacaguucaucaagaaua

SEQ ID NO: 1930498 - RNA, 19 nt, Homo sapiens
  misc_RNA (1)...(19): siRNA sense strand
gaaacucuccaagcaaaga

SEQ ID NO: 1930499 - RNA, 19 nt, Homo sapiens
  misc_RNA (1)...(19): siRNA sense strand
guaaccauccgccaaguga

SEQ ID NO: 1930500 - RNA, 19 nt, Homo sapiens
  misc_RNA (1)...(19): siRNA sense strand
gcugugacauuuuguaauu

SEQ ID NO: 1930501 - RNA, 19 nt, Homo sapiens
  misc_RNA (1)...(19): siRNA sense strand
caccaaaacuucagcauug

SEQ ID NO: 1930502 - RNA, 19 nt, Homo sapiens
  misc_RNA (1)...(19): siRNA sense strand
gaccaugacuuugccaucu

SEQ ID NO: 1930503 - RNA, 19 nt, Homo sapiens
  misc_RNA (1)...(19): siRNA sense strand
guacuugaccacauugaau

SEQ ID NO: 1930504 - RNA, 19 nt, Homo sapiens
  misc_RNA (1)...(19): siRNA sense strand
uaacuauagugaccuaaac

SEQ ID NO: 1930505 - RNA, 19 nt, Homo sapiens
  misc_RNA (1)...(19): siRNA sense strand
caaccacaacguccauuga

SEQ ID NO: 1930506 - RNA, 19 nt, Homo sapiens
  misc_RNA (1)...(19): siRNA sense strand
gagugugucugaguuacuu

SEQ ID NO: 1930507 - RNA, 19 nt, Homo sapiens
  misc_RNA (1)...(19): siRNA sense strand
uaagauaacccagcagcaa

SEQ ID NO: 1930508 - RNA, 19 nt, Homo sapiens
  misc_RNA (1)...(19): siRNA sense strand
agaaugcaauccuaacauc

SEQ ID NO: 1930509 - RNA, 19 nt, Homo sapiens
  misc_RNA (1)...(19): siRNA sense strand
ggagaaugcaauccuaaca

SEQ ID NO: 1930510 - RNA, 19 nt, Homo sapiens
  misc_RNA (1)...(19): siRNA sense strand
gccacaguuugauggguua

SEQ ID NO: 1930511 - RNA, 19 nt, Homo sapiens
  misc_RNA (1)...(19): siRNA sense strand
ugacauggcagaucuacau

SEQ ID NO: 1930512 - RNA, 19 nt, Homo sapiens
  misc_RNA (1)...(19): siRNA sense strand
gacaguucaucaagaauac

SEQ ID NO: 1930513 - RNA, 19 nt, Homo sapiens
  misc_RNA (1)...(19): siRNA sense strand
caauuccacuggcucuaga

SEQ ID NO: 1930514 - RNA, 19 nt, Homo sapiens
  misc_RNA (1)...(19): siRNA sense strand
aaagaaggugccacaguuu

SEQ ID NO: 1930515 - RNA, 19 nt, Homo sapiens
  misc_RNA (1)...(19): siRNA sense strand
ugaguuacuugcagaucuu

SEQ ID NO: 1930516 - RNA, 19 nt, Homo sapiens
  misc_RNA (1)...(19): siRNA sense strand
ugagaacggacucuuagaa

SEQ ID NO: 1930517 - RNA, 19 nt, Homo sapiens
  misc_RNA (1)...(19): siRNA sense strand
ucaagaaauuacugccaau

SEQ ID NO: 1930518 - RNA, 19 nt, Homo sapiens
  misc_RNA (1)...(19): siRNA sense strand
caucagggagaaucuugua

SEQ ID NO: 1930519 - RNA, 19 nt, Homo sapiens
  misc_RNA (1)...(19): siRNA sense strand
guacaguaggaacacauaa

SEQ ID NO: 1930520 - RNA, 19 nt, Homo sapiens
  misc_RNA (1)...(19): siRNA sense strand
gagcuuacucuucaaugug

SEQ ID NO: 1930521 - RNA, 19 nt, Homo sapiens
  misc_RNA (1)...(19): siRNA sense strand
ugagcuuacucuucaaugu

SEQ ID NO: 1930522 - RNA, 19 nt, Homo sapiens
  misc_RNA (1)...(19): siRNA sense strand
gaagagguuugagcuuacu

SEQ ID NO: 1930523 - RNA, 19 nt, Homo sapiens
  misc_RNA (1)...(19): siRNA sense strand
uugcacaugucuucacuga

SEQ ID NO: 1930524 - RNA, 19 nt, Homo sapiens
  misc_RNA (1)...(19): siRNA sense strand
gaaugcaauccuaacauca

SEQ ID NO: 1930525 - RNA, 19 nt, Homo sapiens
  misc_RNA (1)...(19): siRNA sense strand
ggacuccuccaccucagaa

SEQ ID NO: 1930526 - RNA, 19 nt, Homo sapiens
  misc_RNA (1)...(19): siRNA sense strand
gggccagucugaucacgau

SEQ ID NO: 1930527 - RNA, 19 nt, Homo sapiens
  misc_RNA (1)...(19): siRNA sense strand
ggugagugugucugaguua

SEQ ID NO: 1930528 - RNA, 19 nt, Homo sapiens
  misc_RNA (1)...(19): siRNA sense strand
ucagggagaaucuuguaaa

SEQ ID NO: 1930529 - RNA, 19 nt, Homo sapiens
  misc_RNA (1)...(19): siRNA sense strand
caugggauacacaauauug

SEQ ID NO: 1930530 - RNA, 19 nt, Homo sapiens
  misc_RNA (1)...(19): siRNA sense strand
cagcuguguuucuccugua

SEQ ID NO: 1930531 - RNA, 19 nt, Homo sapiens
  misc_RNA (1)...(19): siRNA sense strand
gaauagguuccaaacagau

SEQ ID NO: 1930532 - RNA, 19 nt, Homo sapiens
  misc_RNA (1)...(19): siRNA sense strand
ugaaucaaagccggaaaua

SEQ ID NO: 1930533 - RNA, 19 nt, Homo sapiens
  misc_RNA (1)...(19): siRNA sense strand
cggccacuauuucuuauuc

SEQ ID NO: 1930534 - RNA, 19 nt, Homo sapiens
  misc_RNA (1)...(19): siRNA sense strand
cuucagcauuguggaauuu

SEQ ID NO: 1930535 - RNA, 19 nt, Homo sapiens
  misc_RNA (1)...(19): siRNA sense strand
uagagaggcuacugauuuu

SEQ ID NO: 1930536 - RNA, 19 nt, Homo sapiens
  misc_RNA (1)...(19): siRNA sense strand
gagguucaauauguggaaa

SEQ ID NO: 1930537 - RNA, 19 nt, Homo sapiens
  misc_RNA (1)...(19): siRNA sense strand
ucaccaauuucuacuggau

SEQ ID NO: 1930538 - RNA, 19 nt, Homo sapiens
  misc_RNA (1)...(19): siRNA sense strand
guggucagcugggucuauu

SEQ ID NO: 1930539 - RNA, 19 nt, Homo sapiens
  misc_RNA (1)...(19): siRNA sense strand
guaggaacacauaacucua

SEQ ID NO: 1930540 - RNA, 19 nt, Homo sapiens
  misc_RNA (1)...(19): siRNA sense strand
augcaaagcccagcacaua

SEQ ID NO: 1930541 - RNA, 19 nt, Homo sapiens
  misc_RNA (1)...(19): siRNA sense strand
gagaaugcaauccuaacau

SEQ ID NO: 1930542 - RNA, 19 nt, Homo sapiens
  misc_RNA (1)...(19): siRNA sense strand
guuauccauucaccaaaga

SEQ ID NO: 1930543 - RNA, 19 nt, Homo sapiens
  misc_RNA (1)...(19): siRNA sense strand
cauguagcccaaaggauuu

SEQ ID NO: 1930544 - RNA, 19 nt, Homo sapiens
  misc_RNA (1)...(19): siRNA sense strand
uugaauagguuccaaacag

SEQ ID NO: 1930545 - RNA, 19 nt, Homo sapiens
  misc_RNA (1)...(19): siRNA sense strand
gcacauuguauccaaaguc

SEQ ID NO: 1930546 - RNA, 19 nt, Homo sapiens
  misc_RNA (1)...(19): siRNA sense strand
uuucaugggauacacaaua

SEQ ID NO: 1930547 - RNA, 19 nt, Homo sapiens
  misc_RNA (1)...(19): siRNA sense strand
ucucaacaauagcacuuug

SEQ ID NO: 1930548 - RNA, 19 nt, Homo sapiens
  misc_RNA (1)...(19): siRNA sense strand
ccaaagaaggugccacagu

SEQ ID NO: 1930549 - RNA, 19 nt, Homo sapiens
  misc_RNA (1)...(19): siRNA sense strand
gcugagaacggacucuuag

SEQ ID NO: 1930550 - RNA, 19 nt, Homo sapiens
  misc_RNA (1)...(19): siRNA sense strand
cacugaauauggaaauugu

SEQ ID NO: 1930551 - RNA, 19 nt, Homo sapiens
  misc_RNA (1)...(19): siRNA sense strand
uacauucgcuugcucaacu

SEQ ID NO: 1930552 - RNA, 19 nt, Homo sapiens
  misc_RNA (1)...(19): siRNA sense strand
aggaggcauucacugauaa

SEQ ID NO: 1930553 - RNA, 19 nt, Homo sapiens
  misc_RNA (1)...(19): siRNA sense strand
ggaguucccagcugugaca

SEQ ID NO: 1930554 - RNA, 19 nt, Homo sapiens
  misc_RNA (1)...(19): siRNA sense strand
caucuccacuuccuuucau

SEQ ID NO: 1930555 - RNA, 19 nt, Homo sapiens
  misc_RNA (1)...(19): siRNA sense strand
ccacauugaauuuaaggau

SEQ ID NO: 1930556 - RNA, 19 nt, Homo sapiens
  misc_RNA (1)...(19): siRNA sense strand
aaugugaccuacaaaagua

SEQ ID NO: 1930557 - RNA, 19 nt, Homo sapiens
  misc_RNA (1)...(19): siRNA sense strand
caaaguccuccaucuucaa

SEQ ID NO: 1930558 - RNA, 19 nt, Homo sapiens
  misc_RNA (1)...(19): siRNA sense strand
uauggcacauuguauccaa

SEQ ID NO: 1930559 - RNA, 19 nt, Homo sapiens
  misc_RNA (1)...(19): siRNA sense strand
gcagggugcucugguuggu

SEQ ID NO: 1930560 - RNA, 19 nt, Homo sapiens
  misc_RNA (1)...(19): siRNA sense strand
guacuucagcuguguuucu

SEQ ID NO: 1930561 - RNA, 19 nt, Homo sapiens
  misc_RNA (1)...(19): siRNA sense strand
caucuuuguuauccauuca

SEQ ID NO: 1930562 - RNA, 19 nt, Homo sapiens
  misc_RNA (1)...(19): siRNA sense strand
aaagugagugucucuggaa

SEQ ID NO: 1930563 - RNA, 19 nt, Homo sapiens
  misc_RNA (1)...(19): siRNA sense strand
uaggauagaggaguguuaa

SEQ ID NO: 1930564 - RNA, 19 nt, Homo sapiens
  misc_RNA (1)...(19): siRNA sense strand
gcacuucugguugcuugaa

SEQ ID NO: 1930565 - RNA, 19 nt, Homo sapiens
  misc_RNA (1)...(19): siRNA sense strand
gaacggacucuuagaaaag

SEQ ID NO: 1930566 - RNA, 19 nt, Homo sapiens
  misc_RNA (1)...(19): siRNA sense strand
gggagaagguggccauaaa

SEQ ID NO: 1930567 - RNA, 19 nt, Homo sapiens
  misc_RNA (1)...(19): siRNA sense strand
ucacucagcuccuugauau

SEQ ID NO: 1930568 - RNA, 19 nt, Homo sapiens
  misc_RNA (1)...(19): siRNA sense strand
gaagauagagaauuugcua

SEQ ID NO: 1930569 - RNA, 19 nt, Homo sapiens
  misc_RNA (1)...(19): siRNA sense strand
ccacagagacuugaagaua

SEQ ID NO: 1930570 - RNA, 19 nt, Homo sapiens
  misc_RNA (1)...(19): siRNA sense strand
gacacgagaucuugaauuc

SEQ ID NO: 1930571 - RNA, 19 nt, Homo sapiens
  misc_RNA (1)...(19): siRNA sense strand
caacaggauuucucuggaa

SEQ ID NO: 1930572 - RNA, 19 nt, Homo sapiens
  misc_RNA (1)...(19): siRNA sense strand
gauagagaauuugcuacua

SEQ ID NO: 1930573 - RNA, 19 nt, Homo sapiens
  misc_RNA (1)...(19): siRNA sense strand
gcuacuagaugaagacaau

SEQ ID NO: 1930574 - RNA, 19 nt, Homo sapiens
  misc_RNA (1)...(19): siRNA sense strand
gaagaugguagacaaagaa

SEQ ID NO: 1930575 - RNA, 19 nt, Homo sapiens
  misc_RNA (1)...(19): siRNA sense strand
ccauaggugugaacaugua

SEQ ID NO: 1930576 - RNA, 19 nt, Homo sapiens
  misc_RNA (1)...(19): siRNA sense strand
cagcuuggcucgcagaaau

SEQ ID NO: 1930577 - RNA, 19 nt, Homo sapiens
  misc_RNA (1)...(19): siRNA sense strand
gugaagaggccaaauauuc

SEQ ID NO: 1930578 - RNA, 19 nt, Homo sapiens
  misc_RNA (1)...(19): siRNA sense strand
ggucagauccagcagauga

SEQ ID NO: 1930579 - RNA, 19 nt, Homo sapiens
  misc_RNA (1)...(19): siRNA sense strand
gaaccuugccuuugacaug

SEQ ID NO: 1930580 - RNA, 19 nt, Homo sapiens
  misc_RNA (1)...(19): siRNA sense strand
gaacugcucgccaggaaga

SEQ ID NO: 1930581 - RNA, 19 nt, Homo sapiens
  misc_RNA (1)...(19): siRNA sense strand
agaauuugcuacuagauga

SEQ ID NO: 1930582 - RNA, 19 nt, Homo sapiens
  misc_RNA (1)...(19): siRNA sense strand
gcaaagugcccuguaaugu

SEQ ID NO: 1930583 - RNA, 19 nt, Homo sapiens
  misc_RNA (1)...(19): siRNA sense strand
gaaacuggagcgcuauuug

SEQ ID NO: 1930584 - RNA, 19 nt, Homo sapiens
  misc_RNA (1)...(19): siRNA sense strand
aaagugcccuguaauguca

SEQ ID NO: 1930585 - RNA, 19 nt, Homo sapiens
  misc_RNA (1)...(19): siRNA sense strand
ccaauuguguggcuucuuc

SEQ ID NO: 1930586 - RNA, 19 nt, Homo sapiens
  misc_RNA (1)...(19): siRNA sense strand
ggccaucuacuuccucuua

SEQ ID NO: 1930587 - RNA, 19 nt, Homo sapiens
  misc_RNA (1)...(19): siRNA sense strand
gcuacuaccuggucaugga

SEQ ID NO: 1930588 - RNA, 19 nt, Homo sapiens
  misc_RNA (1)...(19): siRNA sense strand
ggauuucucuggaagaucu

SEQ ID NO: 1930589 - RNA, 19 nt, Homo sapiens
  misc_RNA (1)...(19): siRNA sense strand
ccacaggugccaucaguuu

SEQ ID NO: 1930590 - RNA, 19 nt, Homo sapiens
  misc_RNA (1)...(19): siRNA sense strand
gaugguagacaaagaaaug

SEQ ID NO: 1930591 - RNA, 19 nt, Homo sapiens
  misc_RNA (1)...(19): siRNA sense strand
gaagcuggguuacaagaac

SEQ ID NO: 1930592 - RNA, 19 nt, Homo sapiens
  misc_RNA (1)...(19): siRNA sense strand
cgaggccgguucccuauga

SEQ ID NO: 1930593 - RNA, 19 nt, Homo sapiens
  misc_RNA (1)...(19): siRNA sense strand
ccgagaagcuggguuacaa

SEQ ID NO: 1930594 - RNA, 19 nt, Homo sapiens
  misc_RNA (1)...(19): siRNA sense strand
acagagacuugaagauaga

SEQ ID NO: 1930595 - RNA, 19 nt, Homo sapiens
  misc_RNA (1)...(19): siRNA sense strand
ggacacgagaucuugaauu

SEQ ID NO: 1930596 - RNA, 19 nt, Homo sapiens
  misc_RNA (1)...(19): siRNA sense strand
gacagccucugcuacaaga

SEQ ID NO: 1930597 - RNA, 19 nt, Homo sapiens
  misc_RNA (1)...(19): siRNA sense strand
cacaagaucuaugagaaga

SEQ ID NO: 1930598 - RNA, 19 nt, Homo sapiens
  misc_RNA (1)...(19): siRNA sense strand
gaaccugcccucgcacaaa

SEQ ID NO: 1930599 - RNA, 19 nt, Homo sapiens
  misc_RNA (1)...(19): siRNA sense strand
caauaucacucagcuccuu

SEQ ID NO: 1930600 - RNA, 19 nt, Homo sapiens
  misc_RNA (1)...(19): siRNA sense strand
caucgaccauucuccaaga

SEQ ID NO: 1930601 - RNA, 19 nt, Homo sapiens
  misc_RNA (1)...(19): siRNA sense strand
cacagagacuugaagauag

SEQ ID NO: 1930602 - RNA, 19 nt, Homo sapiens
  misc_RNA (1)...(19): siRNA sense strand
caagaucuaugagaagaag

SEQ ID NO: 1930603 - RNA, 19 nt, Homo sapiens
  misc_RNA (1)...(19): siRNA sense strand
guccauaggugugaacaug

SEQ ID NO: 1930604 - RNA, 19 nt, Homo sapiens
  misc_RNA (1)...(19): siRNA sense strand
ugacacagauucagaacac

SEQ ID NO: 1930605 - RNA, 19 nt, Homo sapiens
  misc_RNA (1)...(19): siRNA sense strand
ugaccgagaagcuggguua

SEQ ID NO: 1930606 - RNA, 19 nt, Homo sapiens
  misc_RNA (1)...(19): siRNA sense strand
gaauuacacgggcaaagug

SEQ ID NO: 1930607 - RNA, 19 nt, Homo sapiens
  misc_RNA (1)...(19): siRNA sense strand
gcaaccugaugcacaagau

SEQ ID NO: 1930608 - RNA, 19 nt, Homo sapiens
  misc_RNA (1)...(19): siRNA sense strand
ucggacagauguuaaggaa

SEQ ID NO: 1930609 - RNA, 19 nt, Homo sapiens
  misc_RNA (1)...(19): siRNA sense strand
ggaaccggauccugugaag

SEQ ID NO: 1930610 - RNA, 19 nt, Homo sapiens
  misc_RNA (1)...(19): siRNA sense strand
gagaauuugcuacuagaug

SEQ ID NO: 1930611 - RNA, 19 nt, Homo sapiens
  misc_RNA (1)...(19): siRNA sense strand
gcacaagaucuaugagaag

SEQ ID NO: 1930612 - RNA, 19 nt, Homo sapiens
  misc_RNA (1)...(19): siRNA sense strand
uagagaauuugcuacuaga

SEQ ID NO: 1930613 - RNA, 19 nt, Homo sapiens
  misc_RNA (1)...(19): siRNA sense strand
ucucaucacuacaggauuc

SEQ ID NO: 1930614 - RNA, 19 nt, Homo sapiens
  misc_RNA (1)...(19): siRNA sense strand
gaacagcgacgugaucaac

SEQ ID NO: 1930615 - RNA, 19 nt, Homo sapiens
  misc_RNA (1)...(19): siRNA sense strand
gagaagcuggguuacaaga

SEQ ID NO: 1930616 - RNA, 19 nt, Homo sapiens
  misc_RNA (1)...(19): siRNA sense strand
agaagaugguagacaaaga

SEQ ID NO: 1930617 - RNA, 19 nt, Homo sapiens
  misc_RNA (1)...(19): siRNA sense strand
caaagugcccuguaauguc

SEQ ID NO: 1930618 - RNA, 19 nt, Homo sapiens
  misc_RNA (1)...(19): siRNA sense strand
gccaucuacuuccucuuaa

SEQ ID NO: 1930619 - RNA, 19 nt, Homo sapiens
  misc_RNA (1)...(19): siRNA sense strand
ccaucuacuuccucuuaaa

SEQ ID NO: 1930620 - RNA, 19 nt, Homo sapiens
  misc_RNA (1)...(19): siRNA sense strand
auagagaauuugcuacuag

SEQ ID NO: 1930621 - RNA, 19 nt, Homo sapiens
  misc_RNA (1)...(19): siRNA sense strand
auccaacucuggucucuuu

SEQ ID NO: 1930622 - RNA, 19 nt, Homo sapiens
  misc_RNA (1)...(19): siRNA sense strand
caccaaagcccuccugaag

SEQ ID NO: 1930623 - RNA, 19 nt, Homo sapiens
  misc_RNA (1)...(19): siRNA sense strand
cacgagaucuugaauucca

SEQ ID NO: 1930624 - RNA, 19 nt, Homo sapiens
  misc_RNA (1)...(19): siRNA sense strand
gcaugucgccucuccauac

SEQ ID NO: 1930625 - RNA, 19 nt, Homo sapiens
  misc_RNA (1)...(19): siRNA sense strand
ugcacaagaucuaugagaa

SEQ ID NO: 1930626 - RNA, 19 nt, Homo sapiens
  misc_RNA (1)...(19): siRNA sense strand
cugugaaccuugccuuuga

SEQ ID NO: 1930627 - RNA, 19 nt, Homo sapiens
  misc_RNA (1)...(19): siRNA sense strand
uccuuuggcugccgcaaua

SEQ ID NO: 1930628 - RNA, 19 nt, Homo sapiens
  misc_RNA (1)...(19): siRNA sense strand
caggcucgcuuaugacaca

SEQ ID NO: 1930629 - RNA, 19 nt, Homo sapiens
  misc_RNA (1)...(19): siRNA sense strand
cugauugacuuugguuuga

SEQ ID NO: 1930630 - RNA, 19 nt, Homo sapiens
  misc_RNA (1)...(19): siRNA sense strand
acucagcuccuugauauuu

SEQ ID NO: 1930631 - RNA, 19 nt, Homo sapiens
  misc_RNA (1)...(19): siRNA sense strand
ccugugaagaggccaaaua

SEQ ID NO: 1930632 - RNA, 19 nt, Homo sapiens
  misc_RNA (1)...(19): siRNA sense strand
ggaucgcgacgaccacgua

SEQ ID NO: 1930633 - RNA, 19 nt, Homo sapiens
  misc_RNA (1)...(19): siRNA sense strand
ggacagccucugcuacaag

SEQ ID NO: 1930634 - RNA, 19 nt, Homo sapiens
  misc_RNA (1)...(19): siRNA sense strand
caagaacagcgacgugauc

SEQ ID NO: 1930635 - RNA, 19 nt, Homo sapiens
  misc_RNA (1)...(19): siRNA sense strand
gcugauugacuuugguuug

SEQ ID NO: 1930636 - RNA, 19 nt, Homo sapiens
  misc_RNA (1)...(19): siRNA sense strand
aaccucagauuccaauugu

SEQ ID NO: 1930637 - RNA, 19 nt, Homo sapiens
  misc_RNA (1)...(19): siRNA sense strand
gcgacgugaucaacacugu

SEQ ID NO: 1930638 - RNA, 19 nt, Homo sapiens
  misc_RNA (1)...(19): siRNA sense strand
gaauuugcuacuagaugaa

SEQ ID NO: 1930639 - RNA, 19 nt, Homo sapiens
  misc_RNA (1)...(19): siRNA sense strand
ucaacacugugcucuccaa

SEQ ID NO: 1930640 - RNA, 19 nt, Homo sapiens
  misc_RNA (1)...(19): siRNA sense strand
ugagggcuuuguaccagaa

SEQ ID NO: 1930641 - RNA, 19 nt, Homo sapiens
  misc_RNA (1)...(19): siRNA sense strand
uccaugccgugcaggauaa

SEQ ID NO: 1930642 - RNA, 19 nt, Homo sapiens
  misc_RNA (1)...(19): siRNA sense strand
aaaccucagauuccaauug

SEQ ID NO: 1930643 - RNA, 19 nt, Homo sapiens
  misc_RNA (1)...(19): siRNA sense strand
gaagaggccaaauauucag

SEQ ID NO: 1930644 - RNA, 19 nt, Homo sapiens
  misc_RNA (1)...(19): siRNA sense strand
cgacgaccacguagaagug

SEQ ID NO: 1930645 - RNA, 19 nt, Homo sapiens
  misc_RNA (1)...(19): siRNA sense strand
aaacuggagcgcuauuugu

SEQ ID NO: 1930646 - RNA, 19 nt, Homo sapiens
  misc_RNA (1)...(19): siRNA sense strand
ccagaagaugguagacaaa

SEQ ID NO: 1930647 - RNA, 19 nt, Homo sapiens
  misc_RNA (1)...(19): siRNA sense strand
uuaaggaagcgccaucaga

SEQ ID NO: 1930648 - RNA, 19 nt, Homo sapiens
  misc_RNA (1)...(19): siRNA sense strand
caggauuucucuggaagau

SEQ ID NO: 1930649 - RNA, 19 nt, Homo sapiens
  misc_RNA (1)...(19): siRNA sense strand
ugccuacgcugcaccugaa

SEQ ID NO: 1930650 - RNA, 19 nt, Homo sapiens
  misc_RNA (1)...(19): siRNA sense strand
ucuacuuccucuuaaacaa

SEQ ID NO: 1930651 - RNA, 19 nt, Homo sapiens
  misc_RNA (1)...(19): siRNA sense strand
cugaacugcucgccaggaa

SEQ ID NO: 1930652 - RNA, 19 nt, Homo sapiens
  misc_RNA (1)...(19): siRNA sense strand
ccucagauuccaauugugu

SEQ ID NO: 1930653 - RNA, 19 nt, Homo sapiens
  misc_RNA (1)...(19): siRNA sense strand
cccucaggcucgcuuauga

SEQ ID NO: 1930654 - RNA, 19 nt, Homo sapiens
  misc_RNA (1)...(19): siRNA sense strand
gcccuguaaugucaccuau

SEQ ID NO: 1930655 - RNA, 19 nt, Homo sapiens
  misc_RNA (1)...(19): siRNA sense strand
gagacuugaagauagagaa

SEQ ID NO: 1930656 - RNA, 19 nt, Homo sapiens
  misc_RNA (1)...(19): siRNA sense strand
agacccggcucuaccagau

SEQ ID NO: 1930657 - RNA, 19 nt, Homo sapiens
  misc_RNA (1)...(19): siRNA sense strand
ggagaagguggccauaaaa

SEQ ID NO: 1930658 - RNA, 19 nt, Homo sapiens
  misc_RNA (1)...(19): siRNA sense strand
ugaccgggacgcugccuuu

SEQ ID NO: 1930659 - RNA, 19 nt, Homo sapiens
  misc_RNA (1)...(19): siRNA sense strand
caggacagccucugcuaca

SEQ ID NO: 1930660 - RNA, 19 nt, Homo sapiens
  misc_RNA (1)...(19): siRNA sense strand
ggaagcgccaucagagucu

SEQ ID NO: 1930661 - RNA, 19 nt, Homo sapiens
  misc_RNA (1)...(19): siRNA sense strand
aagaggagggccuguguug

SEQ ID NO: 1930662 - RNA, 19 nt, Homo sapiens
  misc_RNA (1)...(19): siRNA sense strand
caucacuacaggauucuga

SEQ ID NO: 1930663 - RNA, 19 nt, Homo sapiens
  misc_RNA (1)...(19): siRNA sense strand
gaaccggauccugugaaga

SEQ ID NO: 1930664 - RNA, 19 nt, Homo sapiens
  misc_RNA (1)...(19): siRNA sense strand
gcauccaacucuggucucu

SEQ ID NO: 1930665 - RNA, 19 nt, Homo sapiens
  misc_RNA (1)...(19): siRNA sense strand
gaagguggccauaaaaguc

SEQ ID NO: 1930666 - RNA, 19 nt, Homo sapiens
  misc_RNA (1)...(19): siRNA sense strand
gcacccagauuuaguaaua

SEQ ID NO: 1930667 - RNA, 19 nt, Homo sapiens
  misc_RNA (1)...(19): siRNA sense strand
gcagagaaaugaauggaaa

SEQ ID NO: 1930668 - RNA, 19 nt, Homo sapiens
  misc_RNA (1)...(19): siRNA sense strand
caucaaagcuauuaaguuc

SEQ ID NO: 1930669 - RNA, 19 nt, Homo sapiens
  misc_RNA (1)...(19): siRNA sense strand
gaccaaauguaucaaguaa

SEQ ID NO: 1930670 - RNA, 19 nt, Homo sapiens
  misc_RNA (1)...(19): siRNA sense strand
ugacacaguugcugauaua

SEQ ID NO: 1930671 - RNA, 19 nt, Homo sapiens
  misc_RNA (1)...(19): siRNA sense strand
gaaaggagagccagagaaa

SEQ ID NO: 1930672 - RNA, 19 nt, Homo sapiens
  misc_RNA (1)...(19): siRNA sense strand
gggauuaccuccaauuaga

SEQ ID NO: 1930673 - RNA, 19 nt, Homo sapiens
  misc_RNA (1)...(19): siRNA sense strand
aaacugacaucuucaaaug

SEQ ID NO: 1930674 - RNA, 19 nt, Homo sapiens
  misc_RNA (1)...(19): siRNA sense strand
gcucagaucuugcaaaguc

SEQ ID NO: 1930675 - RNA, 19 nt, Homo sapiens
  misc_RNA (1)...(19): siRNA sense strand
gggccaagauucccuuuaa

SEQ ID NO: 1930676 - RNA, 19 nt, Homo sapiens
  misc_RNA (1)...(19): siRNA sense strand
ucaaauaguucuggacuuu

SEQ ID NO: 1930677 - RNA, 19 nt, Homo sapiens
  misc_RNA (1)...(19): siRNA sense strand
uaaccaaccuguuugaaga

SEQ ID NO: 1930678 - RNA, 19 nt, Homo sapiens
  misc_RNA (1)...(19): siRNA sense strand
uaagauugcuugggcuuua

SEQ ID NO: 1930679 - RNA, 19 nt, Homo sapiens
  misc_RNA (1)...(19): siRNA sense strand
gcucagaaccuguuaaaga

SEQ ID NO: 1930680 - RNA, 19 nt, Homo sapiens
  misc_RNA (1)...(19): siRNA sense strand
gacaagaaguucacagaga

SEQ ID NO: 1930681 - RNA, 19 nt, Homo sapiens
  misc_RNA (1)...(19): siRNA sense strand
ggagaaagaacgacagaaa

SEQ ID NO: 1930682 - RNA, 19 nt, Homo sapiens
  misc_RNA (1)...(19): siRNA sense strand
ggaaggagauagagauuac

SEQ ID NO: 1930683 - RNA, 19 nt, Homo sapiens
  misc_RNA (1)...(19): siRNA sense strand
ugugaaagauguuggauuu

SEQ ID NO: 1930684 - RNA, 19 nt, Homo sapiens
  misc_RNA (1)...(19): siRNA sense strand
gauaaugugccucagguua

SEQ ID NO: 1930685 - RNA, 19 nt, Homo sapiens
  misc_RNA (1)...(19): siRNA sense strand
ggagaagagugacacaguu

SEQ ID NO: 1930686 - RNA, 19 nt, Homo sapiens
  misc_RNA (1)...(19): siRNA sense strand
gaaugauccugaacuuuau

SEQ ID NO: 1930687 - RNA, 19 nt, Homo sapiens
  misc_RNA (1)...(19): siRNA sense strand
agaaugauccugaacuuua

SEQ ID NO: 1930688 - RNA, 19 nt, Homo sapiens
  misc_RNA (1)...(19): siRNA sense strand
guaccuggacuuuauguua

SEQ ID NO: 1930689 - RNA, 19 nt, Homo sapiens
  misc_RNA (1)...(19): siRNA sense strand
gccagcagcuucaacaauu

SEQ ID NO: 1930690 - RNA, 19 nt, Homo sapiens
  misc_RNA (1)...(19): siRNA sense strand
gaucuuggaguuacauaua

SEQ ID NO: 1930691 - RNA, 19 nt, Homo sapiens
  misc_RNA (1)...(19): siRNA sense strand
gaauggaaaucgucuugga

SEQ ID NO: 1930692 - RNA, 19 nt, Homo sapiens
  misc_RNA (1)...(19): siRNA sense strand
gaaaccagggaaagcauua

SEQ ID NO: 1930693 - RNA, 19 nt, Homo sapiens
  misc_RNA (1)...(19): siRNA sense strand
gcacuuuccagaauuuaua

SEQ ID NO: 1930694 - RNA, 19 nt, Homo sapiens
  misc_RNA (1)...(19): siRNA sense strand
gaagaccuccuguagauau

SEQ ID NO: 1930695 - RNA, 19 nt, Homo sapiens
  misc_RNA (1)...(19): siRNA sense strand
ucagauagcagaacaacua

SEQ ID NO: 1930696 - RNA, 19 nt, Homo sapiens
  misc_RNA (1)...(19): siRNA sense strand
gaacaacuacaacagcaaa

SEQ ID NO: 1930697 - RNA, 19 nt, Homo sapiens
  misc_RNA (1)...(19): siRNA sense strand
agauagagauuaccgguuu

SEQ ID NO: 1930698 - RNA, 19 nt, Homo sapiens
  misc_RNA (1)...(19): siRNA sense strand
cuaaguguauguaguacua

SEQ ID NO: 1930699 - RNA, 19 nt, Homo sapiens
  misc_RNA (1)...(19): siRNA sense strand
ggacgagacagaauucaaa

SEQ ID NO: 1930700 - RNA, 19 nt, Homo sapiens
  misc_RNA (1)...(19): siRNA sense strand
caaccuguuugaagaguuu

SEQ ID NO: 1930701 - RNA, 19 nt, Homo sapiens
  misc_RNA (1)...(19): siRNA sense strand
gaagucaauuuggaugauu

SEQ ID NO: 1930702 - RNA, 19 nt, Homo sapiens
  misc_RNA (1)...(19): siRNA sense strand
guugagaaguuuauucaga

SEQ ID NO: 1930703 - RNA, 19 nt, Homo sapiens
  misc_RNA (1)...(19): siRNA sense strand
ggauaccacuugggaauga

SEQ ID NO: 1930704 - RNA, 19 nt, Homo sapiens
  misc_RNA (1)...(19): siRNA sense strand
gccaagauucccuuuaaua

SEQ ID NO: 1930705 - RNA, 19 nt, Homo sapiens
  misc_RNA (1)...(19): siRNA sense strand
ggacagccgccaaauguga

SEQ ID NO: 1930706 - RNA, 19 nt, Homo sapiens
  misc_RNA (1)...(19): siRNA sense strand
ggauguggaucuuggaguu

SEQ ID NO: 1930707 - RNA, 19 nt, Homo sapiens
  misc_RNA (1)...(19): siRNA sense strand
ccagcagcuucaacaauua

SEQ ID NO: 1930708 - RNA, 19 nt, Homo sapiens
  misc_RNA (1)...(19): siRNA sense strand
aacaagaaguugauggaua

SEQ ID NO: 1930709 - RNA, 19 nt, Homo sapiens
  misc_RNA (1)...(19): siRNA sense strand
gguccaaggucauuaagau

SEQ ID NO: 1930710 - RNA, 19 nt, Homo sapiens
  misc_RNA (1)...(19): siRNA sense strand
ucacaacuuucucacguuu

SEQ ID NO: 1930711 - RNA, 19 nt, Homo sapiens
  misc_RNA (1)...(19): siRNA sense strand
auacaaaccuuacagauac

SEQ ID NO: 1930712 - RNA, 19 nt, Homo sapiens
  misc_RNA (1)...(19): siRNA sense strand
ggauagggaugacagagau

SEQ ID NO: 1930713 - RNA, 19 nt, Homo sapiens
  misc_RNA (1)...(19): siRNA sense strand
gcucuuacggcacaacuua

SEQ ID NO: 1930714 - RNA, 19 nt, Homo sapiens
  misc_RNA (1)...(19): siRNA sense strand
ucagaaauguaaaccagaa

SEQ ID NO: 1930715 - RNA, 19 nt, Homo sapiens
  misc_RNA (1)...(19): siRNA sense strand
caucuaauguuuccaguag

SEQ ID NO: 1930716 - RNA, 19 nt, Homo sapiens
  misc_RNA (1)...(19): siRNA sense strand
gaggacagccgccaaaugu

SEQ ID NO: 1930717 - RNA, 19 nt, Homo sapiens
  misc_RNA (1)...(19): siRNA sense strand
ggaguagucagcagcauuu

SEQ ID NO: 1930718 - RNA, 19 nt, Homo sapiens
  misc_RNA (1)...(19): siRNA sense strand
ccaaagaccaaauguauca

SEQ ID NO: 1930719 - RNA, 19 nt, Homo sapiens
  misc_RNA (1)...(19): siRNA sense strand
gaaauaaacaaggagaaga

SEQ ID NO: 1930720 - RNA, 19 nt, Homo sapiens
  misc_RNA (1)...(19): siRNA sense strand
ggaagacucugagcauagu

SEQ ID NO: 1930721 - RNA, 19 nt, Homo sapiens
  misc_RNA (1)...(19): siRNA sense strand
cacaguugcugauauagaa

SEQ ID NO: 1930722 - RNA, 19 nt, Homo sapiens
  misc_RNA (1)...(19): siRNA sense strand
gcagaaggaggcaugauug

SEQ ID NO: 1930723 - RNA, 19 nt, Homo sapiens
  misc_RNA (1)...(19): siRNA sense strand
acaagaaguugauggauag

SEQ ID NO: 1930724 - RNA, 19 nt, Homo sapiens
  misc_RNA (1)...(19): siRNA sense strand
uggaagaccuccuguagau

SEQ ID NO: 1930725 - RNA, 19 nt, Homo sapiens
  misc_RNA (1)...(19): siRNA sense strand
gccuauagauccaagagaa

SEQ ID NO: 1930726 - RNA, 19 nt, Homo sapiens
  misc_RNA (1)...(19): siRNA sense strand
caccaaauguuccaaauac

SEQ ID NO: 1930727 - RNA, 19 nt, Homo sapiens
  misc_RNA (1)...(19): siRNA sense strand
gaaagauguuggauuuggu

SEQ ID NO: 1930728 - RNA, 19 nt, Homo sapiens
  misc_RNA (1)...(19): siRNA sense strand
gaucaggagacuguaaaua

SEQ ID NO: 1930729 - RNA, 19 nt, Homo sapiens
  misc_RNA (1)...(19): siRNA sense strand
gaaggaggcaugauugauc

SEQ ID NO: 1930730 - RNA, 19 nt, Homo sapiens
  misc_RNA (1)...(19): siRNA sense strand
gaacaagaagcuaagaaag

SEQ ID NO: 1930731 - RNA, 19 nt, Homo sapiens
  misc_RNA (1)...(19): siRNA sense strand
acaagaagcuaagaaagug

SEQ ID NO: 1930732 - RNA, 19 nt, Homo sapiens
  misc_RNA (1)...(19): siRNA sense strand
gacaaagcguagacaaugu

SEQ ID NO: 1930733 - RNA, 19 nt, Homo sapiens
  misc_RNA (1)...(19): siRNA sense strand
ggaguuacauauauaccau

SEQ ID NO: 1930734 - RNA, 19 nt, Homo sapiens
  misc_RNA (1)...(19): siRNA sense strand
gcgguucgcucaagaucaa

SEQ ID NO: 1930735 - RNA, 19 nt, Homo sapiens
  misc_RNA (1)...(19): siRNA sense strand
ccauagauauucagcaaca

SEQ ID NO: 1930736 - RNA, 19 nt, Homo sapiens
  misc_RNA (1)...(19): siRNA sense strand
ugacagagauuuugauuuc

SEQ ID NO: 1930737 - RNA, 19 nt, Homo sapiens
  misc_RNA (1)...(19): siRNA sense strand
gaaccgaggauuuggacaa

SEQ ID NO: 1930738 - RNA, 19 nt, Homo sapiens
  misc_RNA (1)...(19): siRNA sense strand
gauuaccgguuuccuccua

SEQ ID NO: 1930739 - RNA, 19 nt, Homo sapiens
  misc_RNA (1)...(19): siRNA sense strand
gaauacagccacccagugu

SEQ ID NO: 1930740 - RNA, 19 nt, Homo sapiens
  misc_RNA (1)...(19): siRNA sense strand
agacuuaaccaaccuguuu

SEQ ID NO: 1930741 - RNA, 19 nt, Homo sapiens
  misc_RNA (1)...(19): siRNA sense strand
ugaagaaagagguagauuu

SEQ ID NO: 1930742 - RNA, 19 nt, Homo sapiens
  misc_RNA (1)...(19): siRNA sense strand
caacacucuuacucccuua

SEQ ID NO: 1930743 - RNA, 19 nt, Homo sapiens
  misc_RNA (1)...(19): siRNA sense strand
uaaacaaggagaagaguga

SEQ ID NO: 1930744 - RNA, 19 nt, Homo sapiens
  misc_RNA (1)...(19): siRNA sense strand
ggauuugguagccuuguua

SEQ ID NO: 1930745 - RNA, 19 nt, Homo sapiens
  misc_RNA (1)...(19): siRNA sense strand
ugaagaguuuggacagauu

SEQ ID NO: 1930746 - RNA, 19 nt, Homo sapiens
  misc_RNA (1)...(19): siRNA sense strand
gaaagaaagaggaaaucau

SEQ ID NO: 1930747 - RNA, 19 nt, Homo sapiens
  misc_RNA (1)...(19): siRNA sense strand
gacuauaaaccacccauuu

SEQ ID NO: 1930748 - RNA, 19 nt, Homo sapiens
  misc_RNA (1)...(19): siRNA sense strand
gaaaacaccagaucaguga

SEQ ID NO: 1930749 - RNA, 19 nt, Homo sapiens
  misc_RNA (1)...(19): siRNA sense strand
guccaaggcuuaccugauc

SEQ ID NO: 1930750 - RNA, 19 nt, Homo sapiens
  misc_RNA (1)...(19): siRNA sense strand
agagaccacuuuggcuuua

SEQ ID NO: 1930751 - RNA, 19 nt, Homo sapiens
  misc_RNA (1)...(19): siRNA sense strand
cauuagcacuuuccagaau

SEQ ID NO: 1930752 - RNA, 19 nt, Homo sapiens
  misc_RNA (1)...(19): siRNA sense strand
gagaagagugacacaguug

SEQ ID NO: 1930753 - RNA, 19 nt, Homo sapiens
  misc_RNA (1)...(19): siRNA sense strand
acaagaaguucacagagau

SEQ ID NO: 1930754 - RNA, 19 nt, Homo sapiens
  misc_RNA (1)...(19): siRNA sense strand
gaagacaaagcguagacaa

SEQ ID NO: 1930755 - RNA, 19 nt, Homo sapiens
  misc_RNA (1)...(19): siRNA sense strand
ccaccaaauguuccaaaua

SEQ ID NO: 1930756 - RNA, 19 nt, Homo sapiens
  misc_RNA (1)...(19): siRNA sense strand
guacagccaccaaauguuc

SEQ ID NO: 1930757 - RNA, 19 nt, Homo sapiens
  misc_RNA (1)...(19): siRNA sense strand
gcgaaaaugacccaaauua

SEQ ID NO: 1930758 - RNA, 19 nt, Homo sapiens
  misc_RNA (1)...(19): siRNA sense strand
guccaaagaccaaauguau

SEQ ID NO: 1930759 - RNA, 19 nt, Homo sapiens
  misc_RNA (1)...(19): siRNA sense strand
ucagugauuccaaaugaua

SEQ ID NO: 1930760 - RNA, 19 nt, Homo sapiens
  misc_RNA (1)...(19): siRNA sense strand
ugaaagauguuggauuugg

SEQ ID NO: 1930761 - RNA, 19 nt, Homo sapiens
  misc_RNA (1)...(19): siRNA sense strand
gauauucagcaacaggaua

SEQ ID NO: 1930762 - RNA, 19 nt, Homo sapiens
  misc_RNA (1)...(19): siRNA sense strand
gagcaauacuccaggaacu

SEQ ID NO: 1930763 - RNA, 19 nt, Homo sapiens
  misc_RNA (1)...(19): siRNA sense strand
aggcuuacaugaagaaaga

SEQ ID NO: 1930764 - RNA, 19 nt, Homo sapiens
  misc_RNA (1)...(19): siRNA sense strand
gauccugaacuuuaugaaa

SEQ ID NO: 1930765 - RNA, 19 nt, Homo sapiens
  misc_RNA (1)...(19): siRNA sense strand
gaccuucaauagcgaguug

SEQ ID NO: 1930766 - RNA, 19 nt, Homo sapiens
  misc_RNA (1)...(19): siRNA sense strand
gcaaggaggugacccugaa

SEQ ID NO: 1930767 - RNA, 19 nt, Homo sapiens
  misc_RNA (1)...(19): siRNA sense strand
ggaaggagcugaagaucgu

SEQ ID NO: 1930768 - RNA, 19 nt, Homo sapiens
  misc_RNA (1)...(19): siRNA sense strand
agacagaccugaggaagga

SEQ ID NO: 1930769 - RNA, 19 nt, Homo sapiens
  misc_RNA (1)...(19): siRNA sense strand
caucgguguucgagaagua

SEQ ID NO: 1930770 - RNA, 19 nt, Homo sapiens
  misc_RNA (1)...(19): siRNA sense strand
ucccugaggucacgcauuu

SEQ ID NO: 1930771 - RNA, 19 nt, Homo sapiens
  misc_RNA (1)...(19): siRNA sense strand
gcaggaaggagcugaagau

SEQ ID NO: 1930772 - RNA, 19 nt, Homo sapiens
  misc_RNA (1)...(19): siRNA sense strand
gcaagacagaccugaggaa

SEQ ID NO: 1930773 - RNA, 19 nt, Homo sapiens
  misc_RNA (1)...(19): siRNA sense strand
gaauguggaggacgucuuc

SEQ ID NO: 1930774 - RNA, 19 nt, Homo sapiens
  misc_RNA (1)...(19): siRNA sense strand
ucaugaaucccaccagcua

SEQ ID NO: 1930775 - RNA, 19 nt, Homo sapiens
  misc_RNA (1)...(19): siRNA sense strand
gcucaucggcugcaagaca

SEQ ID NO: 1930776 - RNA, 19 nt, Homo sapiens
  misc_RNA (1)...(19): siRNA sense strand
ccucgcugcucauggugua

SEQ ID NO: 1930777 - RNA, 19 nt, Homo sapiens
  misc_RNA (1)...(19): siRNA sense strand
cgacaacguccucaucaag

SEQ ID NO: 1930778 - RNA, 19 nt, Homo sapiens
  misc_RNA (1)...(19): siRNA sense strand
acaacguccucaucaagug

SEQ ID NO: 1930779 - RNA, 19 nt, Homo sapiens
  misc_RNA (1)...(19): siRNA sense strand
gacaacguccucaucaagu

SEQ ID NO: 1930780 - RNA, 19 nt, Homo sapiens
  misc_RNA (1)...(19): siRNA sense strand
ccaaguuucgggagaaugu

SEQ ID NO: 1930781 - RNA, 19 nt, Homo sapiens
  misc_RNA (1)...(19): siRNA sense strand
agaccucgcugcucauggu

SEQ ID NO: 1930782 - RNA, 19 nt, Homo sapiens
  misc_RNA (1)...(19): siRNA sense strand
gaauguuccgccaaguuuc

SEQ ID NO: 1930783 - RNA, 19 nt, Homo sapiens
  misc_RNA (1)...(19): siRNA sense strand
gcugcucucuaccuggaau

SEQ ID NO: 1930784 - RNA, 19 nt, Homo sapiens
  misc_RNA (1)...(19): siRNA sense strand
gugcucaucggcugcaaga

SEQ ID NO: 1930785 - RNA, 19 nt, Homo sapiens
  misc_RNA (1)...(19): siRNA sense strand
agaaagagcuggccuaugu

SEQ ID NO: 1930786 - RNA, 19 nt, Homo sapiens
  misc_RNA (1)...(19): siRNA sense strand
ggaguucgauggaugauug

SEQ ID NO: 1930787 - RNA, 19 nt, Homo sapiens
  misc_RNA (1)...(19): siRNA sense strand
gugaggagcuugagaaaug

SEQ ID NO: 1930788 - RNA, 19 nt, Homo sapiens
  misc_RNA (1)...(19): siRNA sense strand
guauaugacuguacacuca

SEQ ID NO: 1930789 - RNA, 19 nt, Homo sapiens
  misc_RNA (1)...(19): siRNA sense strand
gcacacgguucacggagaa

SEQ ID NO: 1930790 - RNA, 19 nt, Homo sapiens
  misc_RNA (1)...(19): siRNA sense strand
gcaagcagaaacugaauga

SEQ ID NO: 1930791 - RNA, 19 nt, Homo sapiens
  misc_RNA (1)...(19): siRNA sense strand
ccaagguccuggccaagaa

SEQ ID NO: 1930792 - RNA, 19 nt, Homo sapiens
  misc_RNA (1)...(19): siRNA sense strand
aaauguaguuucagcugua

SEQ ID NO: 1930793 - RNA, 19 nt, Homo sapiens
  misc_RNA (1)...(19): siRNA sense strand
gcgccuaccucaaguaugg

SEQ ID NO: 1930794 - RNA, 19 nt, Homo sapiens
  misc_RNA (1)...(19): siRNA sense strand
caugcagauuuguauguua

SEQ ID NO: 1930795 - RNA, 19 nt, Homo sapiens
  misc_RNA (1)...(19): siRNA sense strand
agacaucccugaagacgau

SEQ ID NO: 1930796 - RNA, 19 nt, Homo sapiens
  misc_RNA (1)...(19): siRNA sense strand
ccucaagcaucaccuguug

SEQ ID NO: 1930797 - RNA, 19 nt, Homo sapiens
  misc_RNA (1)...(19): siRNA sense strand
uggaagacaucccugaaga

SEQ ID NO: 1930798 - RNA, 19 nt, Homo sapiens
  misc_RNA (1)...(19): siRNA sense strand
ccucagggcuaaucaucaa

SEQ ID NO: 1930799 - RNA, 19 nt, Homo sapiens
  misc_RNA (1)...(19): siRNA sense strand
caaccacaaguuugaaauu

SEQ ID NO: 1930800 - RNA, 19 nt, Homo sapiens
  misc_RNA (1)...(19): siRNA sense strand
ucacggagaagaagcauga

SEQ ID NO: 1930801 - RNA, 19 nt, Homo sapiens
  misc_RNA (1)...(19): siRNA sense strand
ccaauuaucggcuggaugu

SEQ ID NO: 1930802 - RNA, 19 nt, Homo sapiens
  misc_RNA (1)...(19): siRNA sense strand
ggucuucugcuacgucuuu

SEQ ID NO: 1930803 - RNA, 19 nt, Homo sapiens
  misc_RNA (1)...(19): siRNA sense strand
ccauucagcucuucacucu

SEQ ID NO: 1930804 - RNA, 19 nt, Homo sapiens
  misc_RNA (1)...(19): siRNA sense strand
gcagaaacugaaugacuga

SEQ ID NO: 1930805 - RNA, 19 nt, Homo sapiens
  misc_RNA (1)...(19): siRNA sense strand
aagaucaacugcagacugu

SEQ ID NO: 1930806 - RNA, 19 nt, Homo sapiens
  misc_RNA (1)...(19): siRNA sense strand
cgaacgcuuugggcuguua

SEQ ID NO: 1930807 - RNA, 19 nt, Homo sapiens
  misc_RNA (1)...(19): siRNA sense strand
gagccuguccgaacgcuuu

SEQ ID NO: 1930808 - RNA, 19 nt, Homo sapiens
  misc_RNA (1)...(19): siRNA sense strand
caucaccuguugccacgaa

SEQ ID NO: 1930809 - RNA, 19 nt, Homo sapiens
  misc_RNA (1)...(19): siRNA sense strand
gcagauuuguauguuagga

SEQ ID NO: 1930810 - RNA, 19 nt, Homo sapiens
  misc_RNA (1)...(19): siRNA sense strand
ucaccgagauggucuucug

SEQ ID NO: 1930811 - RNA, 19 nt, Homo sapiens
  misc_RNA (1)...(19): siRNA sense strand
aaagaaauaccaugcagau

SEQ ID NO: 1930812 - RNA, 19 nt, Homo sapiens
  misc_RNA (1)...(19): siRNA sense strand
caacaccauucagcucuuc

SEQ ID NO: 1930813 - RNA, 19 nt, Homo sapiens
  misc_RNA (1)...(19): siRNA sense strand
caagaaagagcuggccuau

SEQ ID NO: 1930814 - RNA, 19 nt, Homo sapiens
  misc_RNA (1)...(19): siRNA sense strand
aaccacaaguuugaaauug

SEQ ID NO: 1930815 - RNA, 19 nt, Homo sapiens
  misc_RNA (1)...(19): siRNA sense strand
gcuggccuaugucccaauu

SEQ ID NO: 1930816 - RNA, 19 nt, Homo sapiens
  misc_RNA (1)...(19): siRNA sense strand
ccaugcagauuuguauguu

SEQ ID NO: 1930817 - RNA, 19 nt, Homo sapiens
  misc_RNA (1)...(19): siRNA sense strand
gagaagaagcaugagauca

SEQ ID NO: 1930818 - RNA, 19 nt, Homo sapiens
  misc_RNA (1)...(19): siRNA sense strand
ccacaaguuugaaauugac

SEQ ID NO: 1930819 - RNA, 19 nt, Homo sapiens
  misc_RNA (1)...(19): siRNA sense strand
ggagaagaagcaugagauc

SEQ ID NO: 1930820 - RNA, 19 nt, Homo sapiens
  misc_RNA (1)...(19): siRNA sense strand
cuccuccucuggcccauua

SEQ ID NO: 1930821 - RNA, 19 nt, Homo sapiens
  misc_RNA (1)...(19): siRNA sense strand
uggccuaugucccaauuau

SEQ ID NO: 1930822 - RNA, 19 nt, Homo sapiens
  misc_RNA (1)...(19): siRNA sense strand
gagcuugagaaauguaguu

SEQ ID NO: 1930823 - RNA, 19 nt, Homo sapiens
  misc_RNA (1)...(19): siRNA sense strand
caagccagcuggugaugcu

SEQ ID NO: 1930824 - RNA, 19 nt, Homo sapiens
  misc_RNA (1)...(19): siRNA sense strand
gcacggaaugcaccaucuu

SEQ ID NO: 1930825 - RNA, 19 nt, Homo sapiens
  misc_RNA (1)...(19): siRNA sense strand
ccucaaguaugggaaggaa

SEQ ID NO: 1930826 - RNA, 19 nt, Homo sapiens
  misc_RNA (1)...(19): siRNA sense strand
ccgagauggucuucuguuc

SEQ ID NO: 1930827 - RNA, 19 nt, Homo sapiens
  misc_RNA (1)...(19): siRNA sense strand
acugcagacuguccuauug

SEQ ID NO: 1930828 - RNA, 19 nt, Homo sapiens
  misc_RNA (1)...(19): siRNA sense strand
accacaaguuugaaauuga

SEQ ID NO: 1930829 - RNA, 19 nt, Homo sapiens
  misc_RNA (1)...(19): siRNA sense strand
ugauuggugugacggaaau

SEQ ID NO: 1930830 - RNA, 19 nt, Homo sapiens
  misc_RNA (1)...(19): siRNA sense strand
gacagcaagcagaaacuga

SEQ ID NO: 1930831 - RNA, 19 nt, Homo sapiens
  misc_RNA (1)...(19): siRNA sense strand
gcuaaucaucaacaccauu

SEQ ID NO: 1930832 - RNA, 19 nt, Homo sapiens
  misc_RNA (1)...(19): siRNA sense strand
ggaaaaugccaucgugguu

SEQ ID NO: 1930833 - RNA, 19 nt, Homo sapiens
  misc_RNA (1)...(19): siRNA sense strand
ggaggaucccacuggaaga

SEQ ID NO: 1930834 - RNA, 19 nt, Homo sapiens
  misc_RNA (1)...(19): siRNA sense strand
guccuaaacggaaagaaau

SEQ ID NO: 1930835 - RNA, 19 nt, Homo sapiens
  misc_RNA (1)...(19): siRNA sense strand
gacuguacacucaauuuca

SEQ ID NO: 1930836 - RNA, 19 nt, Homo sapiens
  misc_RNA (1)...(19): siRNA sense strand
gaggagcuugagaaaugua

SEQ ID NO: 1930837 - RNA, 19 nt, Homo sapiens
  misc_RNA (1)...(19): siRNA sense strand
ucaacaccauucagcucuu

SEQ ID NO: 1930838 - RNA, 19 nt, Homo sapiens
  misc_RNA (1)...(19): siRNA sense strand
uuuauugccucagggcuaa

SEQ ID NO: 1930839 - RNA, 19 nt, Homo sapiens
  misc_RNA (1)...(19): siRNA sense strand
guucucaaccacaaguuug

SEQ ID NO: 1930840 - RNA, 19 nt, Homo sapiens
  misc_RNA (1)...(19): siRNA sense strand
gaaagagcuggccuauguc

SEQ ID NO: 1930841 - RNA, 19 nt, Homo sapiens
  misc_RNA (1)...(19): siRNA sense strand
gggacuaccccgagaagua

SEQ ID NO: 1930842 - RNA, 19 nt, Homo sapiens
  misc_RNA (1)...(19): siRNA sense strand
uaguuucagcuguauauga

SEQ ID NO: 1930843 - RNA, 19 nt, Homo sapiens
  misc_RNA (1)...(19): siRNA sense strand
ccuggacccucgugaacug

SEQ ID NO: 1930844 - RNA, 19 nt, Homo sapiens
  misc_RNA (1)...(19): siRNA sense strand
ugacuguacacucaauuuc

SEQ ID NO: 1930845 - RNA, 19 nt, Homo sapiens
  misc_RNA (1)...(19): siRNA sense strand
cuaaucaucaacaccauuc

SEQ ID NO: 1930846 - RNA, 19 nt, Homo sapiens
  misc_RNA (1)...(19): siRNA sense strand
acagcaagcagaaacugaa

SEQ ID NO: 1930847 - RNA, 19 nt, Homo sapiens
  misc_RNA (1)...(19): siRNA sense strand
ggaucccacuggaagacau

SEQ ID NO: 1930848 - RNA, 19 nt, Homo sapiens
  misc_RNA (1)...(19): siRNA sense strand
ugaggagcuugagaaaugu

SEQ ID NO: 1930849 - RNA, 19 nt, Homo sapiens
  misc_RNA (1)...(19): siRNA sense strand
agaagaagcaugagaucag

SEQ ID NO: 1930850 - RNA, 19 nt, Homo sapiens
  misc_RNA (1)...(19): siRNA sense strand
ggcuggaugugguacuuca

SEQ ID NO: 1930851 - RNA, 19 nt, Homo sapiens
  misc_RNA (1)...(19): siRNA sense strand
caagguccuggccaagaaa

SEQ ID NO: 1930852 - RNA, 19 nt, Homo sapiens
  misc_RNA (1)...(19): siRNA sense strand
agacuguccuauugcaucu

SEQ ID NO: 1930853 - RNA, 19 nt, Homo sapiens
  misc_RNA (1)...(19): siRNA sense strand
cuucauccucgucuucuuu

SEQ ID NO: 1930854 - RNA, 19 nt, Homo sapiens
  misc_RNA (1)...(19): siRNA sense strand
ggaagacaucccugaagac

SEQ ID NO: 1930855 - RNA, 19 nt, Homo sapiens
  misc_RNA (1)...(19): siRNA sense strand
agacgguugccaccaguuu

SEQ ID NO: 1930856 - RNA, 19 nt, Homo sapiens
  misc_RNA (1)...(19): siRNA sense strand
augcagauuuguauguuag

SEQ ID NO: 1930857 - RNA, 19 nt, Homo sapiens
  misc_RNA (1)...(19): siRNA sense strand
accaagggcuucgccauca

SEQ ID NO: 1930858 - RNA, 19 nt, Homo sapiens
  misc_RNA (1)...(19): siRNA sense strand
ugggaguccuaaacggaaa

SEQ ID NO: 1930859 - RNA, 19 nt, Homo sapiens
  misc_RNA (1)...(19): siRNA sense strand
uguaguuucagcuguauau

SEQ ID NO: 1930860 - RNA, 19 nt, Homo sapiens
  misc_RNA (1)...(19): siRNA sense strand
acgggcaccuucccagaga

SEQ ID NO: 1930861 - RNA, 19 nt, Homo sapiens
  misc_RNA (1)...(19): siRNA sense strand
gcaaagagcuggacacagu

SEQ ID NO: 1930862 - RNA, 19 nt, Homo sapiens
  misc_RNA (1)...(19): siRNA sense strand
cgacggaacuccuccuuua

SEQ ID NO: 1930863 - RNA, 19 nt, Homo sapiens
  misc_RNA (1)...(19): siRNA sense strand
acaauaaccucaaagaugu

SEQ ID NO: 1930864 - RNA, 19 nt, Homo sapiens
  misc_RNA (1)...(19): siRNA sense strand
aggcagaggucauugauaa

SEQ ID NO: 1930865 - RNA, 19 nt, Homo sapiens
  misc_RNA (1)...(19): siRNA sense strand
gaauuccagucgugcauuu

SEQ ID NO: 1930866 - RNA, 19 nt, Homo sapiens
  misc_RNA (1)...(19): siRNA sense strand
gagaagaggagaaguaugu

SEQ ID NO: 1930867 - RNA, 19 nt, Homo sapiens
  misc_RNA (1)...(19): siRNA sense strand
gcaaccugcugaacaagaa

SEQ ID NO: 1930868 - RNA, 19 nt, Homo sapiens
  misc_RNA (1)...(19): siRNA sense strand
gaaggcuggugguauauca

SEQ ID NO: 1930869 - RNA, 19 nt, Homo sapiens
  misc_RNA (1)...(19): siRNA sense strand
ucagauaccugggcaaaga

SEQ ID NO: 1930870 - RNA, 19 nt, Homo sapiens
  misc_RNA (1)...(19): siRNA sense strand
cgcggaagcucaaguauga

SEQ ID NO: 1930871 - RNA, 19 nt, Homo sapiens
  misc_RNA (1)...(19): siRNA sense strand
ugaagaaggccaaggauga

SEQ ID NO: 1930872 - RNA, 19 nt, Homo sapiens
  misc_RNA (1)...(19): siRNA sense strand
gaggagaccaucuaugaga

SEQ ID NO: 1930873 - RNA, 19 nt, Homo sapiens
  misc_RNA (1)...(19): siRNA sense strand
cuggaaggcuggugguaua

SEQ ID NO: 1930874 - RNA, 19 nt, Homo sapiens
  misc_RNA (1)...(19): siRNA sense strand
cacaauaaccucaaagaug

SEQ ID NO: 1930875 - RNA, 19 nt, Homo sapiens
  misc_RNA (1)...(19): siRNA sense strand
ccagccaccucguacauga

SEQ ID NO: 1930876 - RNA, 19 nt, Homo sapiens
  misc_RNA (1)...(19): siRNA sense strand
gcagaggucauugauaaga

SEQ ID NO: 1930877 - RNA, 19 nt, Homo sapiens
  misc_RNA (1)...(19): siRNA sense strand
aagaggagaccaucuauga

SEQ ID NO: 1930878 - RNA, 19 nt, Homo sapiens
  misc_RNA (1)...(19): siRNA sense strand
caucaucacuccuaaagcu

SEQ ID NO: 1930879 - RNA, 19 nt, Homo sapiens
  misc_RNA (1)...(19): siRNA sense strand
gcagaacgaaggcaaguca

SEQ ID NO: 1930880 - RNA, 19 nt, Homo sapiens
  misc_RNA (1)...(19): siRNA sense strand
cagaggucauugauaagaa

SEQ ID NO: 1930881 - RNA, 19 nt, Homo sapiens
  misc_RNA (1)...(19): siRNA sense strand
ggaagaggagaccaucuau

SEQ ID NO: 1930882 - RNA, 19 nt, Homo sapiens
  misc_RNA (1)...(19): siRNA sense strand
caagucaucaucacuccua

SEQ ID NO: 1930883 - RNA, 19 nt, Homo sapiens
  misc_RNA (1)...(19): siRNA sense strand
gaggugauccggaagaauc

SEQ ID NO: 1930884 - RNA, 19 nt, Homo sapiens
  misc_RNA (1)...(19): siRNA sense strand
gacaucaacaccucuaaga

SEQ ID NO: 1930885 - RNA, 19 nt, Homo sapiens
  misc_RNA (1)...(19): siRNA sense strand
gagagcggguggugguaug

SEQ ID NO: 1930886 - RNA, 19 nt, Homo sapiens
  misc_RNA (1)...(19): siRNA sense strand
gaagaggagaccaucuaug

SEQ ID NO: 1930887 - RNA, 19 nt, Homo sapiens
  misc_RNA (1)...(19): siRNA sense strand
guggugguguccaacuaua

SEQ ID NO: 1930888 - RNA, 19 nt, Homo sapiens
  misc_RNA (1)...(19): siRNA sense strand
gaagaggagaaguauguca

SEQ ID NO: 1930889 - RNA, 19 nt, Homo sapiens
  misc_RNA (1)...(19): siRNA sense strand
ccaaagcaaggacgagauu

SEQ ID NO: 1930890 - RNA, 19 nt, Homo sapiens
  misc_RNA (1)...(19): siRNA sense strand
ggacgagauuggcuuugag

SEQ ID NO: 1930891 - RNA, 19 nt, Homo sapiens
  misc_RNA (1)...(19): siRNA sense strand
gaaggcagaggucauugau

SEQ ID NO: 1930892 - RNA, 19 nt, Homo sapiens
  misc_RNA (1)...(19): siRNA sense strand
ggagaucauugggaacauc

SEQ ID NO: 1930893 - RNA, 19 nt, Homo sapiens
  misc_RNA (1)...(19): siRNA sense strand
gagaccaucuaugagaaug

SEQ ID NO: 1930894 - RNA, 19 nt, Homo sapiens
  misc_RNA (1)...(19): siRNA sense strand
cuacaccauugccgaauuc

SEQ ID NO: 1930895 - RNA, 19 nt, Homo sapiens
  misc_RNA (1)...(19): siRNA sense strand
cagacagccuggagaagau

SEQ ID NO: 1930896 - RNA, 19 nt, Homo sapiens
  misc_RNA (1)...(19): siRNA sense strand
caaggugggugagucuuca

SEQ ID NO: 1930897 - RNA, 19 nt, Homo sapiens
  misc_RNA (1)...(19): siRNA sense strand
ggucauugauaagaacuca

SEQ ID NO: 1930898 - RNA, 19 nt, Homo sapiens
  misc_RNA (1)...(19): siRNA sense strand
cauccacaauaaccucaaa

SEQ ID NO: 1930899 - RNA, 19 nt, Homo sapiens
  misc_RNA (1)...(19): siRNA sense strand
ccucauccaucaccaucaa

SEQ ID NO: 1930900 - RNA, 19 nt, Homo sapiens
  misc_RNA (1)...(19): siRNA sense strand
augaggagccugaguauga

SEQ ID NO: 1930901 - RNA, 19 nt, Homo sapiens
  misc_RNA (1)...(19): siRNA sense strand
cuguugagguggaguacua

SEQ ID NO: 1930902 - RNA, 19 nt, Homo sapiens
  misc_RNA (1)...(19): siRNA sense strand
gcugggugccuuccaacua

SEQ ID NO: 1930903 - RNA, 19 nt, Homo sapiens
  misc_RNA (1)...(19): siRNA sense strand
cagccaggguucagacuca

SEQ ID NO: 1930904 - RNA, 19 nt, Homo sapiens
  misc_RNA (1)...(19): siRNA sense strand
gcaaagaaggaugcugaug

SEQ ID NO: 1930905 - RNA, 19 nt, Homo sapiens
  misc_RNA (1)...(19): siRNA sense strand
guggaguacuacaccauug

SEQ ID NO: 1930906 - RNA, 19 nt, Homo sapiens
  misc_RNA (1)...(19): siRNA sense strand
ccuaauggcuggugguacu

SEQ ID NO: 1930907 - RNA, 19 nt, Homo sapiens
  misc_RNA (1)...(19): siRNA sense strand
caaggacgagauuggcuuu

SEQ ID NO: 1930908 - RNA, 19 nt, Homo sapiens
  misc_RNA (1)...(19): siRNA sense strand
ccacaauaaccucaaagau

SEQ ID NO: 1930909 - RNA, 19 nt, Homo sapiens
  misc_RNA (1)...(19): siRNA sense strand
gcucaagggcuccaagagu

SEQ ID NO: 1930910 - RNA, 19 nt, Homo sapiens
  misc_RNA (1)...(19): siRNA sense strand
gcucaaggcagagaagaau

SEQ ID NO: 1930911 - RNA, 19 nt, Homo sapiens
  misc_RNA (1)...(19): siRNA sense strand
ucagacagccuggagaaga

SEQ ID NO: 1930912 - RNA, 19 nt, Homo sapiens
  misc_RNA (1)...(19): siRNA sense strand
gggugagucuucagaggau

SEQ ID NO: 1930913 - RNA, 19 nt, Homo sapiens
  misc_RNA (1)...(19): siRNA sense strand
ucucaguucauccacaaua

SEQ ID NO: 1930914 - RNA, 19 nt, Homo sapiens
  misc_RNA (1)...(19): siRNA sense strand
ccaagcccaucgagaaguc

SEQ ID NO: 1930915 - RNA, 19 nt, Homo sapiens
  misc_RNA (1)...(19): siRNA sense strand
uggaagaggagaccaucua

SEQ ID NO: 1930916 - RNA, 19 nt, Homo sapiens
  misc_RNA (1)...(19): siRNA sense strand
gaucauugggaacaucaug

SEQ ID NO: 1930917 - RNA, 19 nt, Homo sapiens
  misc_RNA (1)...(19): siRNA sense strand
gcacuccagcggugaagau

SEQ ID NO: 1930918 - RNA, 19 nt, Homo sapiens
  misc_RNA (1)...(19): siRNA sense strand
gcuccaagagugaggauuc

SEQ ID NO: 1930919 - RNA, 19 nt, Homo sapiens
  misc_RNA (1)...(19): siRNA sense strand
ggagaccaucuaugagaau

SEQ ID NO: 1930920 - RNA, 19 nt, Homo sapiens
  misc_RNA (1)...(19): siRNA sense strand
gaccaucuaugagaaugag

SEQ ID NO: 1930921 - RNA, 19 nt, Homo sapiens
  misc_RNA (1)...(19): siRNA sense strand
cucaguucauccacaauaa

SEQ ID NO: 1930922 - RNA, 19 nt, Homo sapiens
  misc_RNA (1)...(19): siRNA sense strand
ggcccaagccauuccuaaa

SEQ ID NO: 1930923 - RNA, 19 nt, Homo sapiens
  misc_RNA (1)...(19): siRNA sense strand
ccacuccucagccuccuuu

SEQ ID NO: 1930924 - RNA, 19 nt, Homo sapiens
  misc_RNA (1)...(19): siRNA sense strand
aaagauguguacgucucua

SEQ ID NO: 1930925 - RNA, 19 nt, Homo sapiens
  misc_RNA (1)...(19): siRNA sense strand
caucaacaccucuaagacu

SEQ ID NO: 1930926 - RNA, 19 nt, Homo sapiens
  misc_RNA (1)...(19): siRNA sense strand
gaagaaggccaaggaugac

SEQ ID NO: 1930927 - RNA, 19 nt, Homo sapiens
  misc_RNA (1)...(19): siRNA sense strand
aggagaccaucuaugagaa

SEQ ID NO: 1930928 - RNA, 19 nt, Homo sapiens
  misc_RNA (1)...(19): siRNA sense strand
gggaacaucauggagauca

SEQ ID NO: 1930929 - RNA, 19 nt, Homo sapiens
  misc_RNA (1)...(19): siRNA sense strand
ggugguaugugagguuugg

SEQ ID NO: 1930930 - RNA, 19 nt, Homo sapiens
  misc_RNA (1)...(19): siRNA sense strand
uggagguucuggagaggaa

SEQ ID NO: 1930931 - RNA, 19 nt, Homo sapiens
  misc_RNA (1)...(19): siRNA sense strand
gagaucauugggaacauca

SEQ ID NO: 1930932 - RNA, 19 nt, Homo sapiens
  misc_RNA (1)...(19): siRNA sense strand
ggagaagaggagaaguaug

SEQ ID NO: 1930933 - RNA, 19 nt, Homo sapiens
  misc_RNA (1)...(19): siRNA sense strand
guggugguaugugagguuu

SEQ ID NO: 1930934 - RNA, 19 nt, Homo sapiens
  misc_RNA (1)...(19): siRNA sense strand
ggagagcggguggugguau

SEQ ID NO: 1930935 - RNA, 19 nt, Homo sapiens
  misc_RNA (1)...(19): siRNA sense strand
aggacgagauuggcuuuga

SEQ ID NO: 1930936 - RNA, 19 nt, Homo sapiens
  misc_RNA (1)...(19): siRNA sense strand
guaugaggagccugaguau

SEQ ID NO: 1930937 - RNA, 19 nt, Homo sapiens
  misc_RNA (1)...(19): siRNA sense strand
aguaugaggagccugagua

SEQ ID NO: 1930938 - RNA, 19 nt, Homo sapiens
  misc_RNA (1)...(19): siRNA sense strand
acagaaggcagaggucauu

SEQ ID NO: 1930939 - RNA, 19 nt, Homo sapiens
  misc_RNA (1)...(19): siRNA sense strand
gacgagauuggcuuugaga

SEQ ID NO: 1930940 - RNA, 19 nt, Homo sapiens
  misc_RNA (1)...(19): siRNA sense strand
ucaagggcuccaagaguga

SEQ ID NO: 1930941 - RNA, 19 nt, Homo sapiens
  misc_RNA (1)...(19): siRNA sense strand
gcagagccaagagaagaug

SEQ ID NO: 1930942 - RNA, 19 nt, Homo sapiens
  misc_RNA (1)...(19): siRNA sense strand
ccgcaucauacaucgauaa

SEQ ID NO: 1930943 - RNA, 19 nt, Homo sapiens
  misc_RNA (1)...(19): siRNA sense strand
cuggagaagaggagaagua

SEQ ID NO: 1930944 - RNA, 19 nt, Homo sapiens
  misc_RNA (1)...(19): siRNA sense strand
ccagcauccuaccugaaga

SEQ ID NO: 1930945 - RNA, 19 nt, Homo sapiens
  misc_RNA (1)...(19): siRNA sense strand
gccaagagaagauggacau

SEQ ID NO: 1930946 - RNA, 19 nt, Homo sapiens
  misc_RNA (1)...(19): siRNA sense strand
ccucuaagacuggagaaga

SEQ ID NO: 1930947 - RNA, 19 nt, Homo sapiens
  misc_RNA (1)...(19): siRNA sense strand
ccucugcaaugccuccaau

SEQ ID NO: 1930948 - RNA, 19 nt, Homo sapiens
  misc_RNA (1)...(19): siRNA sense strand
ggaacaucauggagaucag

SEQ ID NO: 1930949 - RNA, 19 nt, Homo sapiens
  misc_RNA (1)...(19): siRNA sense strand
cagcauccuaccugaagaa

SEQ ID NO: 1930950 - RNA, 19 nt, Homo sapiens
  misc_RNA (1)...(19): siRNA sense strand
cggaacuccuccuuuagca

SEQ ID NO: 1930951 - RNA, 19 nt, Homo sapiens
  misc_RNA (1)...(19): siRNA sense strand
cgagauuggcuuugagaag

SEQ ID NO: 1930952 - RNA, 19 nt, Homo sapiens
  misc_RNA (1)...(19): siRNA sense strand
ucgcagagccaagagaaga

SEQ ID NO: 1930953 - RNA, 19 nt, Homo sapiens
  misc_RNA (1)...(19): siRNA sense strand
acuacaccauugccgaauu

SEQ ID NO: 1930954 - RNA, 19 nt, Homo sapiens
  misc_RNA (1)...(19): siRNA sense strand
acuauaagaagcaggagaa

SEQ ID NO: 1930955 - RNA, 19 nt, Homo sapiens
  misc_RNA (1)...(19): siRNA sense strand
auaagaagcaggagaacuc

SEQ ID NO: 1930956 - RNA, 19 nt, Homo sapiens
  misc_RNA (1)...(19): siRNA sense strand
caucacuccuaaagcucaa

SEQ ID NO: 1930957 - RNA, 19 nt, Homo sapiens
  misc_RNA (1)...(19): siRNA sense strand
agaaggcagaggucauuga

SEQ ID NO: 1930958 - RNA, 19 nt, Homo sapiens
  misc_RNA (1)...(19): siRNA sense strand
agucucaguucauccacaa

SEQ ID NO: 1930959 - RNA, 19 nt, Homo sapiens
  misc_RNA (1)...(19): siRNA sense strand
ggauguggcccuggaagag

SEQ ID NO: 1930960 - RNA, 19 nt, Homo sapiens
  misc_RNA (1)...(19): siRNA sense strand
ccaaggucagggcaaagaa

SEQ ID NO: 1930961 - RNA, 19 nt, Homo sapiens
  misc_RNA (1)...(19): siRNA sense strand
gaaagacucugguaguauc

SEQ ID NO: 1930962 - RNA, 19 nt, Homo sapiens
  misc_RNA (1)...(19): siRNA sense strand
ggacaucauuacccacauu

SEQ ID NO: 1930963 - RNA, 19 nt, Homo sapiens
  misc_RNA (1)...(19): siRNA sense strand
ggccugaccuguaccuuaa

SEQ ID NO: 1930964 - RNA, 19 nt, Homo sapiens
  misc_RNA (1)...(19): siRNA sense strand
gacaugaccucagaaagga

SEQ ID NO: 1930965 - RNA, 19 nt, Homo sapiens
  misc_RNA (1)...(19): siRNA sense strand
gcgggaagcugcuaucucu

SEQ ID NO: 1930966 - RNA, 19 nt, Homo sapiens
  misc_RNA (1)...(19): siRNA sense strand
caucguggcucauguccuu

SEQ ID NO: 1930967 - RNA, 19 nt, Homo sapiens
  misc_RNA (1)...(19): siRNA sense strand
cugaaagacucugguagua

SEQ ID NO: 1930968 - RNA, 19 nt, Homo sapiens
  misc_RNA (1)...(19): siRNA sense strand
ggacaggauuuggaucauc

SEQ ID NO: 1930969 - RNA, 19 nt, Homo sapiens
  misc_RNA (1)...(19): siRNA sense strand
ggacuggggucuuugagaa

SEQ ID NO: 1930970 - RNA, 19 nt, Homo sapiens
  misc_RNA (1)...(19): siRNA sense strand
gaucauccaccucgacaug

SEQ ID NO: 1930971 - RNA, 19 nt, Homo sapiens
  misc_RNA (1)...(19): siRNA sense strand
aaacagaggaacugguuga

SEQ ID NO: 1930972 - RNA, 19 nt, Homo sapiens
  misc_RNA (1)...(19): siRNA sense strand
cgacaugaccucagaaagg

SEQ ID NO: 1930973 - RNA, 19 nt, Homo sapiens
  misc_RNA (1)...(19): siRNA sense strand
guuauccagugccauagaa

SEQ ID NO: 1930974 - RNA, 19 nt, Homo sapiens
  misc_RNA (1)...(19): siRNA sense strand
gaccuguaccuuaaucuug

SEQ ID NO: 1930975 - RNA, 19 nt, Homo sapiens
  misc_RNA (1)...(19): siRNA sense strand
ggaauccagugaguacauc

SEQ ID NO: 1930976 - RNA, 19 nt, Homo sapiens
  misc_RNA (1)...(19): siRNA sense strand
gagggcauggacaucauua

SEQ ID NO: 1930977 - RNA, 19 nt, Homo sapiens
  misc_RNA (1)...(19): siRNA sense strand
agaaacagaggaacugguu

SEQ ID NO: 1930978 - RNA, 19 nt, Homo sapiens
  misc_RNA (1)...(19): siRNA sense strand
cuaucucucugacccauga

SEQ ID NO: 1930979 - RNA, 19 nt, Homo sapiens
  misc_RNA (1)...(19): siRNA sense strand
ggaugccggugcaguacau

SEQ ID NO: 1930980 - RNA, 19 nt, Homo sapiens
  misc_RNA (1)...(19): siRNA sense strand
ugaaagacucugguaguau

SEQ ID NO: 1930981 - RNA, 19 nt, Homo sapiens
  misc_RNA (1)...(19): siRNA sense strand
gaagcugcuaucucucuga

SEQ ID NO: 1930982 - RNA, 19 nt, Homo sapiens
  misc_RNA (1)...(19): siRNA sense strand
cggccugaccuguaccuua

SEQ ID NO: 1930983 - RNA, 19 nt, Homo sapiens
  misc_RNA (1)...(19): siRNA sense strand
gaggagggcauggacauca

SEQ ID NO: 1930984 - RNA, 19 nt, Homo sapiens
  misc_RNA (1)...(19): siRNA sense strand
ccacuggacuggggucuuu

SEQ ID NO: 1930985 - RNA, 19 nt, Homo sapiens
  misc_RNA (1)...(19): siRNA sense strand
ggagggcauggacaucauu

SEQ ID NO: 1930986 - RNA, 19 nt, Homo sapiens
  misc_RNA (1)...(19): siRNA sense strand
gagauccgcagcuaugaag

SEQ ID NO: 1930987 - RNA, 19 nt, Homo sapiens
  misc_RNA (1)...(19): siRNA sense strand
agaggaugccggugcagua

SEQ ID NO: 1930988 - RNA, 19 nt, Homo sapiens
  misc_RNA (1)...(19): siRNA sense strand
gauaagcgggaagcugcua

SEQ ID NO: 1930989 - RNA, 19 nt, Homo sapiens
  misc_RNA (1)...(19): siRNA sense strand
gagcugaguagccgucgau

SEQ ID NO: 1930990 - RNA, 19 nt, Homo sapiens
  misc_RNA (1)...(19): siRNA sense strand
ccugagauccgcagcuaug

SEQ ID NO: 1930991 - RNA, 19 nt, Homo sapiens
  misc_RNA (1)...(19): siRNA sense strand
gggaagcugcuaucucucu

SEQ ID NO: 1930992 - RNA, 19 nt, Homo sapiens
  misc_RNA (1)...(19): siRNA sense strand
uugagugggugcuggaaga

SEQ ID NO: 1930993 - RNA, 19 nt, Homo sapiens
  misc_RNA (1)...(19): siRNA sense strand
caggacaggauuuggauca

SEQ ID NO: 1930994 - RNA, 19 nt, Homo sapiens
  misc_RNA (1)...(19): siRNA sense strand
uggguuauccagugccaua

SEQ ID NO: 1930995 - RNA, 19 nt, Homo sapiens
  misc_RNA (1)...(19): siRNA sense strand
cugguaguaucuucuuaga

SEQ ID NO: 1930996 - RNA, 19 nt, Homo sapiens
  misc_RNA (1)...(19): siRNA sense strand
cuugaccucucagcaacua

SEQ ID NO: 1930997 - RNA, 19 nt, Homo sapiens
  misc_RNA (1)...(19): siRNA sense strand
gcugaguagccgucgauug

SEQ ID NO: 1930998 - RNA, 19 nt, Homo sapiens
  misc_RNA (1)...(19): siRNA sense strand
agacucugguaguaucuuc

SEQ ID NO: 1930999 - RNA, 19 nt, Homo sapiens
  misc_RNA (1)...(19): siRNA sense strand
caucauuacccacauucug

SEQ ID NO: 1931000 - RNA, 19 nt, Homo sapiens
  misc_RNA (1)...(19): siRNA sense strand
gcaacccucccuacgucuu

SEQ ID NO: 1931001 - RNA, 19 nt, Homo sapiens
  misc_RNA (1)...(19): siRNA sense strand
gcccuugaccucucagcaa

SEQ ID NO: 1931002 - RNA, 19 nt, Homo sapiens
  misc_RNA (1)...(19): siRNA sense strand
gggaauccagugaguacau

SEQ ID NO: 1931003 - RNA, 19 nt, Homo sapiens
  misc_RNA (1)...(19): siRNA sense strand
ccugaaagacucugguagu

SEQ ID NO: 1931004 - RNA, 19 nt, Homo sapiens
  misc_RNA (1)...(19): siRNA sense strand
ugagauccgcagcuaugaa

SEQ ID NO: 1931005 - RNA, 19 nt, Homo sapiens
  misc_RNA (1)...(19): siRNA sense strand
ggacacaaauggagaaguu

SEQ ID NO: 1931006 - RNA, 19 nt, Homo sapiens
  misc_RNA (1)...(19): siRNA sense strand
ggaccauccuucacucuua

SEQ ID NO: 1931007 - RNA, 19 nt, Homo sapiens
  misc_RNA (1)...(19): siRNA sense strand
gaccagaccucuaugaugu

SEQ ID NO: 1931008 - RNA, 19 nt, Homo sapiens
  misc_RNA (1)...(19): siRNA sense strand
ucaaagacauuguaucuca

SEQ ID NO: 1931009 - RNA, 19 nt, Homo sapiens
  misc_RNA (1)...(19): siRNA sense strand
uuacgucgcuggauuugua

SEQ ID NO: 1931010 - RNA, 19 nt, Homo sapiens
  misc_RNA (1)...(19): siRNA sense strand
gaaaagagaguccuuaauu

SEQ ID NO: 1931011 - RNA, 19 nt, Homo sapiens
  misc_RNA (1)...(19): siRNA sense strand
caacagaccagaccucuau

SEQ ID NO: 1931012 - RNA, 19 nt, Homo sapiens
  misc_RNA (1)...(19): siRNA sense strand
gaaaugggucagcuaauug

SEQ ID NO: 1931013 - RNA, 19 nt, Homo sapiens
  misc_RNA (1)...(19): siRNA sense strand
agaaaugggucagcuaauu

SEQ ID NO: 1931014 - RNA, 19 nt, Homo sapiens
  misc_RNA (1)...(19): siRNA sense strand
ggaaccugcugcugagaaa

SEQ ID NO: 1931015 - RNA, 19 nt, Homo sapiens
  misc_RNA (1)...(19): siRNA sense strand
uaauugaaguuccagauuc

SEQ ID NO: 1931016 - RNA, 19 nt, Homo sapiens
  misc_RNA (1)...(19): siRNA sense strand
gacauuguaucucaguuug

SEQ ID NO: 1931017 - RNA, 19 nt, Homo sapiens
  misc_RNA (1)...(19): siRNA sense strand
aaagagaguccuuaauuug

SEQ ID NO: 1931018 - RNA, 19 nt, Homo sapiens
  misc_RNA (1)...(19): siRNA sense strand
gaaaagaauugugguguau

SEQ ID NO: 1931019 - RNA, 19 nt, Homo sapiens
  misc_RNA (1)...(19): siRNA sense strand
ggagaguuauauugcaguu

SEQ ID NO: 1931020 - RNA, 19 nt, Homo sapiens
  misc_RNA (1)...(19): siRNA sense strand
aaacggcucuuuccuuagu

SEQ ID NO: 1931021 - RNA, 19 nt, Homo sapiens
  misc_RNA (1)...(19): siRNA sense strand
guacagaagaacaugguuu

SEQ ID NO: 1931022 - RNA, 19 nt, Homo sapiens
  misc_RNA (1)...(19): siRNA sense strand
uagaagcgguccaggaguu

SEQ ID NO: 1931023 - RNA, 19 nt, Homo sapiens
  misc_RNA (1)...(19): siRNA sense strand
aaagaauugugguguauca

SEQ ID NO: 1931024 - RNA, 19 nt, Homo sapiens
  misc_RNA (1)...(19): siRNA sense strand
gaauggaaacuguuaucuu

SEQ ID NO: 1931025 - RNA, 19 nt, Homo sapiens
  misc_RNA (1)...(19): siRNA sense strand
agaccucuaugauguguuu

SEQ ID NO: 1931026 - RNA, 19 nt, Homo sapiens
  misc_RNA (1)...(19): siRNA sense strand
ucacuaggauauuguguag

SEQ ID NO: 1931027 - RNA, 19 nt, Homo sapiens
  misc_RNA (1)...(19): siRNA sense strand
gaaaucagagagccacguu

SEQ ID NO: 1931028 - RNA, 19 nt, Homo sapiens
  misc_RNA (1)...(19): siRNA sense strand
gcaaacugcacaaagaaau

SEQ ID NO: 1931029 - RNA, 19 nt, Homo sapiens
  misc_RNA (1)...(19): siRNA sense strand
acuaggauauuguguagaa

SEQ ID NO: 1931030 - RNA, 19 nt, Homo sapiens
  misc_RNA (1)...(19): siRNA sense strand
gauauuguguagaauguac

SEQ ID NO: 1931031 - RNA, 19 nt, Homo sapiens
  misc_RNA (1)...(19): siRNA sense strand
caacagaaaacuuccuuua

SEQ ID NO: 1931032 - RNA, 19 nt, Homo sapiens
  misc_RNA (1)...(19): siRNA sense strand
ugcagaagauccagagaaa

SEQ ID NO: 1931033 - RNA, 19 nt, Homo sapiens
  misc_RNA (1)...(19): siRNA sense strand
aaagaaaugggucagcuaa

SEQ ID NO: 1931034 - RNA, 19 nt, Homo sapiens
  misc_RNA (1)...(19): siRNA sense strand
uacaggauauugcucuaaa

SEQ ID NO: 1931035 - RNA, 19 nt, Homo sapiens
  misc_RNA (1)...(19): siRNA sense strand
cagaagauccagagaaauc

SEQ ID NO: 1931036 - RNA, 19 nt, Homo sapiens
  misc_RNA (1)...(19): siRNA sense strand
caucaaagacauuguaucu

SEQ ID NO: 1931037 - RNA, 19 nt, Homo sapiens
  misc_RNA (1)...(19): siRNA sense strand
gcacugaugcuaaagaaaa

SEQ ID NO: 1931038 - RNA, 19 nt, Homo sapiens
  misc_RNA (1)...(19): siRNA sense strand
agaaaucuuuaccaaccua

SEQ ID NO: 1931039 - RNA, 19 nt, Homo sapiens
  misc_RNA (1)...(19): siRNA sense strand
caaagaaaugggucagcua

SEQ ID NO: 1931040 - RNA, 19 nt, Homo sapiens
  misc_RNA (1)...(19): siRNA sense strand
cagguuacgucgcuggauu

SEQ ID NO: 1931041 - RNA, 19 nt, Homo sapiens
  misc_RNA (1)...(19): siRNA sense strand
gauggagaguuauauugca

SEQ ID NO: 1931042 - RNA, 19 nt, Homo sapiens
  misc_RNA (1)...(19): siRNA sense strand
ucuaugauguguuugugaa

SEQ ID NO: 1931043 - RNA, 19 nt, Homo sapiens
  misc_RNA (1)...(19): siRNA sense strand
caacgccgaugagcuggaa

SEQ ID NO: 1931044 - RNA, 19 nt, Homo sapiens
  misc_RNA (1)...(19): siRNA sense strand
gagagugagauuaccauug

SEQ ID NO: 1931045 - RNA, 19 nt, Homo sapiens
  misc_RNA (1)...(19): siRNA sense strand
guuccagauucuuccauuu

SEQ ID NO: 1931046 - RNA, 19 nt, Homo sapiens
  misc_RNA (1)...(19): siRNA sense strand
agagaguccuuaauuugga

SEQ ID NO: 1931047 - RNA, 19 nt, Homo sapiens
  misc_RNA (1)...(19): siRNA sense strand
gggcaaacugcacaaagaa

SEQ ID NO: 1931048 - RNA, 19 nt, Homo sapiens
  misc_RNA (1)...(19): siRNA sense strand
ugggcaaacugcacaaaga

SEQ ID NO: 1931049 - RNA, 19 nt, Homo sapiens
  misc_RNA (1)...(19): siRNA sense strand
agagugagauuaccauugc

SEQ ID NO: 1931050 - RNA, 19 nt, Homo sapiens
  misc_RNA (1)...(19): siRNA sense strand
uggaaacuguuaucuuaca

SEQ ID NO: 1931051 - RNA, 19 nt, Homo sapiens
  misc_RNA (1)...(19): siRNA sense strand
cagaaaacuuccuuuauca

SEQ ID NO: 1931052 - RNA, 19 nt, Homo sapiens
  misc_RNA (1)...(19): siRNA sense strand
ggagucgggcugaucgaaa

SEQ ID NO: 1931053 - RNA, 19 nt, Homo sapiens
  misc_RNA (1)...(19): siRNA sense strand
aaugcugccuuacagauga

SEQ ID NO: 1931054 - RNA, 19 nt, Homo sapiens
  misc_RNA (1)...(19): siRNA sense strand
cgaacaaaaugcugaaaau

SEQ ID NO: 1931055 - RNA, 19 nt, Homo sapiens
  misc_RNA (1)...(19): siRNA sense strand
caaacugcacaaagaaaug

SEQ ID NO: 1931056 - RNA, 19 nt, Homo sapiens
  misc_RNA (1)...(19): siRNA sense strand
gcaacagaccagaccucua

SEQ ID NO: 1931057 - RNA, 19 nt, Homo sapiens
  misc_RNA (1)...(19): siRNA sense strand
uggaagcccugcagaugug

SEQ ID NO: 1931058 - RNA, 19 nt, Homo sapiens
  misc_RNA (1)...(19): siRNA sense strand
aaacuucuccaucccuuug

SEQ ID NO: 1931059 - RNA, 19 nt, Homo sapiens
  misc_RNA (1)...(19): siRNA sense strand
cgacagccacauuaaggaa

SEQ ID NO: 1931060 - RNA, 19 nt, Homo sapiens
  misc_RNA (1)...(19): siRNA sense strand
gaacaugguuuuauaucac

SEQ ID NO: 1931061 - RNA, 19 nt, Homo sapiens
  misc_RNA (1)...(19): siRNA sense strand
acagaaaacuuccuuuauc

SEQ ID NO: 1931062 - RNA, 19 nt, Homo sapiens
  misc_RNA (1)...(19): siRNA sense strand
cauuguaucucaguuugga

SEQ ID NO: 1931063 - RNA, 19 nt, Homo sapiens
  misc_RNA (1)...(19): siRNA sense strand
agaguuauauugcaguucu

SEQ ID NO: 1931064 - RNA, 19 nt, Homo sapiens
  misc_RNA (1)...(19): siRNA sense strand
gauaugccagagugaagaa

SEQ ID NO: 1931065 - RNA, 19 nt, Homo sapiens
  misc_RNA (1)...(19): siRNA sense strand
gagaaaagagaguccuuaa

SEQ ID NO: 1931066 - RNA, 19 nt, Homo sapiens
  misc_RNA (1)...(19): siRNA sense strand
uauacaggauauugcucua

SEQ ID NO: 1931067 - RNA, 19 nt, Homo sapiens
  misc_RNA (1)...(19): siRNA sense strand
agaaaagaauuguggugua

SEQ ID NO: 1931068 - RNA, 19 nt, Homo sapiens
  misc_RNA (1)...(19): siRNA sense strand
uaugcugccuucacuagga

SEQ ID NO: 1931069 - RNA, 19 nt, Homo sapiens
  misc_RNA (1)...(19): siRNA sense strand
gcuggaagcccugcagaug

SEQ ID NO: 1931070 - RNA, 19 nt, Homo sapiens
  misc_RNA (1)...(19): siRNA sense strand
gaccauccuucacucuuac

SEQ ID NO: 1931071 - RNA, 19 nt, Homo sapiens
  misc_RNA (1)...(19): siRNA sense strand
gaaacuguuaucuuacaca

SEQ ID NO: 1931072 - RNA, 19 nt, Homo sapiens
  misc_RNA (1)...(19): siRNA sense strand
agacauuguaucucaguuu

SEQ ID NO: 1931073 - RNA, 19 nt, Homo sapiens
  misc_RNA (1)...(19): siRNA sense strand
caaaagaggccauggcaau

SEQ ID NO: 1931074 - RNA, 19 nt, Homo sapiens
  misc_RNA (1)...(19): siRNA sense strand
ucagagagccacguuauac

SEQ ID NO: 1931075 - RNA, 19 nt, Homo sapiens
  misc_RNA (1)...(19): siRNA sense strand
aaucagagagccacguuau

SEQ ID NO: 1931076 - RNA, 19 nt, Homo sapiens
  misc_RNA (1)...(19): siRNA sense strand
ggcaaacugcacaaagaaa

SEQ ID NO: 1931077 - RNA, 19 nt, Homo sapiens
  misc_RNA (1)...(19): siRNA sense strand
ggauaugccagagugaaga

SEQ ID NO: 1931078 - RNA, 19 nt, Homo sapiens
  misc_RNA (1)...(19): siRNA sense strand
gagccacguuauacaggau

SEQ ID NO: 1931079 - RNA, 19 nt, Homo sapiens
  misc_RNA (1)...(19): siRNA sense strand
auauugcaguucucacaaa

SEQ ID NO: 1931080 - RNA, 19 nt, Homo sapiens
  misc_RNA (1)...(19): siRNA sense strand
ggagaaaagagaguccuua

SEQ ID NO: 1931081 - RNA, 19 nt, Homo sapiens
  misc_RNA (1)...(19): siRNA sense strand
ccagaccucuaugaugugu

SEQ ID NO: 1931082 - RNA, 19 nt, Homo sapiens
  misc_RNA (1)...(19): siRNA sense strand
guccugaccgccaaagauu

SEQ ID NO: 1931083 - RNA, 19 nt, Homo sapiens
  misc_RNA (1)...(19): siRNA sense strand
gaaaacuuccuuuaucauc

SEQ ID NO: 1931084 - RNA, 19 nt, Homo sapiens
  misc_RNA (1)...(19): siRNA sense strand
gcagagagugagauuacca

SEQ ID NO: 1931085 - RNA, 19 nt, Homo sapiens
  misc_RNA (1)...(19): siRNA sense strand
ggaaacuguuaucuuacac

SEQ ID NO: 1931086 - RNA, 19 nt, Homo sapiens
  misc_RNA (1)...(19): siRNA sense strand
ggaauggaaacuguuaucu

SEQ ID NO: 1931087 - RNA, 19 nt, Homo sapiens
  misc_RNA (1)...(19): siRNA sense strand
cugagaaaaugcugccuua

SEQ ID NO: 1931088 - RNA, 19 nt, Homo sapiens
  misc_RNA (1)...(19): siRNA sense strand
gagaaaucuuuaccaaccu

SEQ ID NO: 1931089 - RNA, 19 nt, Homo sapiens
  misc_RNA (1)...(19): siRNA sense strand
gcagaagauccagagaaau

SEQ ID NO: 1931090 - RNA, 19 nt, Homo sapiens
  misc_RNA (1)...(19): siRNA sense strand
ugggucagcuaauuguuca

SEQ ID NO: 1931091 - RNA, 19 nt, Homo sapiens
  misc_RNA (1)...(19): siRNA sense strand
gagucgggcugaucgaaaa

SEQ ID NO: 1931092 - RNA, 19 nt, Homo sapiens
  misc_RNA (1)...(19): siRNA sense strand
uaugauguguuugugaauc

SEQ ID NO: 1931093 - RNA, 19 nt, Homo sapiens
  misc_RNA (1)...(19): siRNA sense strand
ggauauuguguagaaugua

SEQ ID NO: 1931094 - RNA, 19 nt, Homo sapiens
  misc_RNA (1)...(19): siRNA sense strand
ucagcuaauuguucagucu

SEQ ID NO: 1931095 - RNA, 19 nt, Homo sapiens
  misc_RNA (1)...(19): siRNA sense strand
aggauauuguguagaaugu

SEQ ID NO: 1931096 - RNA, 19 nt, Homo sapiens
  misc_RNA (1)...(19): siRNA sense strand
gaacaaaaugcugaaaauc

SEQ ID NO: 1931097 - RNA, 19 nt, Homo sapiens
  misc_RNA (1)...(19): siRNA sense strand
gaaaaugcugccuuacaga

SEQ ID NO: 1931098 - RNA, 19 nt, Homo sapiens
  misc_RNA (1)...(19): siRNA sense strand
agaccagaccucuaugaug

SEQ ID NO: 1931099 - RNA, 19 nt, Homo sapiens
  misc_RNA (1)...(19): siRNA sense strand
uaucucaguuuggaaugga

SEQ ID NO: 1931100 - RNA, 19 nt, Homo sapiens
  misc_RNA (1)...(19): siRNA sense strand
guagaauguaccugaaaca

SEQ ID NO: 1931101 - RNA, 19 nt, Homo sapiens
  misc_RNA (1)...(19): siRNA sense strand
acaaaaugcugaaaaucug

SEQ ID NO: 1931102 - RNA, 19 nt, Homo sapiens
  misc_RNA (1)...(19): siRNA sense strand
gagaaaaugcugccuuaca

SEQ ID NO: 1931103 - RNA, 19 nt, Homo sapiens
  misc_RNA (1)...(19): siRNA sense strand
caaacuucuccaucccuuu

SEQ ID NO: 1931104 - RNA, 19 nt, Homo sapiens
  misc_RNA (1)...(19): siRNA sense strand
ggucaguacagaagaacau

SEQ ID NO: 1931105 - RNA, 19 nt, Homo sapiens
  misc_RNA (1)...(19): siRNA sense strand
ggacacgaguuucuuuaaa

SEQ ID NO: 1931106 - RNA, 19 nt, Homo sapiens
  misc_RNA (1)...(19): siRNA sense strand
ggacuccucuauauaauug

SEQ ID NO: 1931107 - RNA, 19 nt, Homo sapiens
  misc_RNA (1)...(19): siRNA sense strand
ggaccgcacuggaaacgua

SEQ ID NO: 1931108 - RNA, 19 nt, Homo sapiens
  misc_RNA (1)...(19): siRNA sense strand
gagcugagcccuucccuuu

SEQ ID NO: 1931109 - RNA, 19 nt, Homo sapiens
  misc_RNA (1)...(19): siRNA sense strand
gcaagugucuacugcuuug

SEQ ID NO: 1931110 - RNA, 19 nt, Homo sapiens
  misc_RNA (1)...(19): siRNA sense strand
gaagcgaccucucucuguu

SEQ ID NO: 1931111 - RNA, 19 nt, Homo sapiens
  misc_RNA (1)...(19): siRNA sense strand
ccaagaagaugcccaagau

SEQ ID NO: 1931112 - RNA, 19 nt, Homo sapiens
  misc_RNA (1)...(19): siRNA sense strand
gaaggcaaauuauagaagu

SEQ ID NO: 1931113 - RNA, 19 nt, Homo sapiens
  misc_RNA (1)...(19): siRNA sense strand
gagcaagggucccaaugug

SEQ ID NO: 1931114 - RNA, 19 nt, Homo sapiens
  misc_RNA (1)...(19): siRNA sense strand
gaagagaggaaauguggaa

SEQ ID NO: 1931115 - RNA, 19 nt, Homo sapiens
  misc_RNA (1)...(19): siRNA sense strand
cagaaaagcuggucaaguu

SEQ ID NO: 1931116 - RNA, 19 nt, Homo sapiens
  misc_RNA (1)...(19): siRNA sense strand
cgaagaugcuguuccaugu

SEQ ID NO: 1931117 - RNA, 19 nt, Homo sapiens
  misc_RNA (1)...(19): siRNA sense strand
caugugaacugcuucuuau

SEQ ID NO: 1931118 - RNA, 19 nt, Homo sapiens
  misc_RNA (1)...(19): siRNA sense strand
gguggacuccucuauauaa

SEQ ID NO: 1931119 - RNA, 19 nt, Homo sapiens
  misc_RNA (1)...(19): siRNA sense strand
gagagaacccuguuaucaa

SEQ ID NO: 1931120 - RNA, 19 nt, Homo sapiens
  misc_RNA (1)...(19): siRNA sense strand
agauauugcuggaugagua

SEQ ID NO: 1931121 - RNA, 19 nt, Homo sapiens
  misc_RNA (1)...(19): siRNA sense strand
gagaagagagucagaaucu

SEQ ID NO: 1931122 - RNA, 19 nt, Homo sapiens
  misc_RNA (1)...(19): siRNA sense strand
gcauuuacuuuacugacaa

SEQ ID NO: 1931123 - RNA, 19 nt, Homo sapiens
  misc_RNA (1)...(19): siRNA sense strand
gaggcccacucguaauuaa

SEQ ID NO: 1931124 - RNA, 19 nt, Homo sapiens
  misc_RNA (1)...(19): siRNA sense strand
ggaagcugcuaagucgaua

SEQ ID NO: 1931125 - RNA, 19 nt, Homo sapiens
  misc_RNA (1)...(19): siRNA sense strand
agagaacccuguuaucaau

SEQ ID NO: 1931126 - RNA, 19 nt, Homo sapiens
  misc_RNA (1)...(19): siRNA sense strand
gaaauuguaccuccucaca

SEQ ID NO: 1931127 - RNA, 19 nt, Homo sapiens
  misc_RNA (1)...(19): siRNA sense strand
gaggucaacugcaccaauc

SEQ ID NO: 1931128 - RNA, 19 nt, Homo sapiens
  misc_RNA (1)...(19): siRNA sense strand
gcaagggucccaaugugaa

SEQ ID NO: 1931129 - RNA, 19 nt, Homo sapiens
  misc_RNA (1)...(19): siRNA sense strand
gacacgaguuucuuuaaag

SEQ ID NO: 1931130 - RNA, 19 nt, Homo sapiens
  misc_RNA (1)...(19): siRNA sense strand
gaagagagucagaaucuac

SEQ ID NO: 1931131 - RNA, 19 nt, Homo sapiens
  misc_RNA (1)...(19): siRNA sense strand
gcucuggaguggaugcaaa

SEQ ID NO: 1931132 - RNA, 19 nt, Homo sapiens
  misc_RNA (1)...(19): siRNA sense strand
ucccagaaauugaagauau

SEQ ID NO: 1931133 - RNA, 19 nt, Homo sapiens
  misc_RNA (1)...(19): siRNA sense strand
agagaucccugccuacaug

SEQ ID NO: 1931134 - RNA, 19 nt, Homo sapiens
  misc_RNA (1)...(19): siRNA sense strand
uuuaaagucuccaagaaga

SEQ ID NO: 1931135 - RNA, 19 nt, Homo sapiens
  misc_RNA (1)...(19): siRNA sense strand
cgagagaacccuguuauca

SEQ ID NO: 1931136 - RNA, 19 nt, Homo sapiens
  misc_RNA (1)...(19): siRNA sense strand
gaagagaucccugccuaca

SEQ ID NO: 1931137 - RNA, 19 nt, Homo sapiens
  misc_RNA (1)...(19): siRNA sense strand
uaccauggcuguguuauag

SEQ ID NO: 1931138 - RNA, 19 nt, Homo sapiens
  misc_RNA (1)...(19): siRNA sense strand
ccaugugaacugcuucuua

SEQ ID NO: 1931139 - RNA, 19 nt, Homo sapiens
  misc_RNA (1)...(19): siRNA sense strand
ccucgaagccgugccaaua

SEQ ID NO: 1931140 - RNA, 19 nt, Homo sapiens
  misc_RNA (1)...(19): siRNA sense strand
aaaggguucuguucacguu

SEQ ID NO: 1931141 - RNA, 19 nt, Homo sapiens
  misc_RNA (1)...(19): siRNA sense strand
cugcagaggugcuaugcuu

SEQ ID NO: 1931142 - RNA, 19 nt, Homo sapiens
  misc_RNA (1)...(19): siRNA sense strand
aagaugcuguuccauguga

SEQ ID NO: 1931143 - RNA, 19 nt, Homo sapiens
  misc_RNA (1)...(19): siRNA sense strand
ucgaagccgugccaauauu

SEQ ID NO: 1931144 - RNA, 19 nt, Homo sapiens
  misc_RNA (1)...(19): siRNA sense strand
guacugggcucuacauacc

SEQ ID NO: 1931145 - RNA, 19 nt, Homo sapiens
  misc_RNA (1)...(19): siRNA sense strand
ggaagcgaccucucucugu

SEQ ID NO: 1931146 - RNA, 19 nt, Homo sapiens
  misc_RNA (1)...(19): siRNA sense strand
gguggcggcuugcucauag

SEQ ID NO: 1931147 - RNA, 19 nt, Homo sapiens
  misc_RNA (1)...(19): siRNA sense strand
gaccugaagauacagauug

SEQ ID NO: 1931148 - RNA, 19 nt, Homo sapiens
  misc_RNA (1)...(19): siRNA sense strand
agaacccuguuaucaauga

SEQ ID NO: 1931149 - RNA, 19 nt, Homo sapiens
  misc_RNA (1)...(19): siRNA sense strand
gcuuuagccuuuccucuag

SEQ ID NO: 1931150 - RNA, 19 nt, Homo sapiens
  misc_RNA (1)...(19): siRNA sense strand
aaugaaaccaugacagaaa

SEQ ID NO: 1931151 - RNA, 19 nt, Homo sapiens
  misc_RNA (1)...(19): siRNA sense strand
gauguucucccaccaagug

SEQ ID NO: 1931152 - RNA, 19 nt, Homo sapiens
  misc_RNA (1)...(19): siRNA sense strand
gcauggaccgcacuggaaa

SEQ ID NO: 1931153 - RNA, 19 nt, Homo sapiens
  misc_RNA (1)...(19): siRNA sense strand
gcagaggugcuaugcuuuc

SEQ ID NO: 1931154 - RNA, 19 nt, Homo sapiens
  misc_RNA (1)...(19): siRNA sense strand
gcuuugaacccgugaguga

SEQ ID NO: 1931155 - RNA, 19 nt, Homo sapiens
  misc_RNA (1)...(19): siRNA sense strand
gacuggccauaagguauua

SEQ ID NO: 1931156 - RNA, 19 nt, Homo sapiens
  misc_RNA (1)...(19): siRNA sense strand
acaaugaaaccaugacaga

SEQ ID NO: 1931157 - RNA, 19 nt, Homo sapiens
  misc_RNA (1)...(19): siRNA sense strand
ccgcaaaucuucguacucu

SEQ ID NO: 1931158 - RNA, 19 nt, Homo sapiens
  misc_RNA (1)...(19): siRNA sense strand
gugaacugcuucuuauugg

SEQ ID NO: 1931159 - RNA, 19 nt, Homo sapiens
  misc_RNA (1)...(19): siRNA sense strand
gggacacgaguuucuuuaa

SEQ ID NO: 1931160 - RNA, 19 nt, Homo sapiens
  misc_RNA (1)...(19): siRNA sense strand
cgagggcucuggaguggau

SEQ ID NO: 1931161 - RNA, 19 nt, Homo sapiens
  misc_RNA (1)...(19): siRNA sense strand
gcugggauguacccgaaga

SEQ ID NO: 1931162 - RNA, 19 nt, Homo sapiens
  misc_RNA (1)...(19): siRNA sense strand
ggcauuuacuuuacugaca

SEQ ID NO: 1931163 - RNA, 19 nt, Homo sapiens
  misc_RNA (1)...(19): siRNA sense strand
uggaguggaugcaaagguu

SEQ ID NO: 1931164 - RNA, 19 nt, Homo sapiens
  misc_RNA (1)...(19): siRNA sense strand
acacgaguuucuuuaaagu

SEQ ID NO: 1931165 - RNA, 19 nt, Homo sapiens
  misc_RNA (1)...(19): siRNA sense strand
uggccuaucugccugaaug

SEQ ID NO: 1931166 - RNA, 19 nt, Homo sapiens
  misc_RNA (1)...(19): siRNA sense strand
gaggcuucauuuccuguga

SEQ ID NO: 1931167 - RNA, 19 nt, Homo sapiens
  misc_RNA (1)...(19): siRNA sense strand
ggaaggcaaauuauagaag

SEQ ID NO: 1931168 - RNA, 19 nt, Homo sapiens
  misc_RNA (1)...(19): siRNA sense strand
auaccuggaaggcaaauua

SEQ ID NO: 1931169 - RNA, 19 nt, Homo sapiens
  misc_RNA (1)...(19): siRNA sense strand
gcaaauuauagaagucuca

SEQ ID NO: 1931170 - RNA, 19 nt, Homo sapiens
  misc_RNA (1)...(19): siRNA sense strand
agaagagagucagaaucua

SEQ ID NO: 1931171 - RNA, 19 nt, Homo sapiens
  misc_RNA (1)...(19): siRNA sense strand
acgagaagcucaucagaac

SEQ ID NO: 1931172 - RNA, 19 nt, Homo sapiens
  misc_RNA (1)...(19): siRNA sense strand
caacgagaagcucaucaga

SEQ ID NO: 1931173 - RNA, 19 nt, Homo sapiens
  misc_RNA (1)...(19): siRNA sense strand
gcugagcccuucccuuugc

SEQ ID NO: 1931174 - RNA, 19 nt, Homo sapiens
  misc_RNA (1)...(19): siRNA sense strand
gggcugugcaugcuccaua

SEQ ID NO: 1931175 - RNA, 19 nt, Homo sapiens
  misc_RNA (1)...(19): siRNA sense strand
cuacaugucugugcaucga

SEQ ID NO: 1931176 - RNA, 19 nt, Homo sapiens
  misc_RNA (1)...(19): siRNA sense strand
gagaagcucaucagaacca

SEQ ID NO: 1931177 - RNA, 19 nt, Homo sapiens
  misc_RNA (1)...(19): siRNA sense strand
ggaugaaaggguucuguuc

SEQ ID NO: 1931178 - RNA, 19 nt, Homo sapiens
  misc_RNA (1)...(19): siRNA sense strand
ggagaagagagucagaauc

SEQ ID NO: 1931179 - RNA, 19 nt, Homo sapiens
  misc_RNA (1)...(19): siRNA sense strand
gaagaugcuguuccaugug

SEQ ID NO: 1931180 - RNA, 19 nt, Homo sapiens
  misc_RNA (1)...(19): siRNA sense strand
ucgaggcccuuaugaaugg

SEQ ID NO: 1931181 - RNA, 19 nt, Homo sapiens
  misc_RNA (1)...(19): siRNA sense strand
ccagggcccuuucguacuc

SEQ ID NO: 1931182 - RNA, 19 nt, Homo sapiens
  misc_RNA (1)...(19): siRNA sense strand
gguggugggccuucaagaa

SEQ ID NO: 1931183 - RNA, 19 nt, Homo sapiens
  misc_RNA (1)...(19): siRNA sense strand
guggcuggcauuuacuuua

SEQ ID NO: 1931184 - RNA, 19 nt, Homo sapiens
  misc_RNA (1)...(19): siRNA sense strand
gcagauucccgcagaagag

SEQ ID NO: 1931185 - RNA, 19 nt, Homo sapiens
  misc_RNA (1)...(19): siRNA sense strand
gcacuggaaacguauuuac

SEQ ID NO: 1931186 - RNA, 19 nt, Homo sapiens
  misc_RNA (1)...(19): siRNA sense strand
gugacaagcugggauguac

SEQ ID NO: 1931187 - RNA, 19 nt, Homo sapiens
  misc_RNA (1)...(19): siRNA sense strand
acccaucccuggcaccuuu

SEQ ID NO: 1931188 - RNA, 19 nt, Homo sapiens
  misc_RNA (1)...(19): siRNA sense strand
caguguggcuggcauuuac

SEQ ID NO: 1931189 - RNA, 19 nt, Homo sapiens
  misc_RNA (1)...(19): siRNA sense strand
gaccagggccagcaagcuu

SEQ ID NO: 1931190 - RNA, 19 nt, Homo sapiens
  misc_RNA (1)...(19): siRNA sense strand
cccagaaauugaagauaug

SEQ ID NO: 1931191 - RNA, 19 nt, Homo sapiens
  misc_RNA (1)...(19): siRNA sense strand
gcaggaagagaggaaaugu

SEQ ID NO: 1931192 - RNA, 19 nt, Homo sapiens
  misc_RNA (1)...(19): siRNA sense strand
ugacuggccauaagguauu

SEQ ID NO: 1931193 - RNA, 19 nt, Homo sapiens
  misc_RNA (1)...(19): siRNA sense strand
uuucagagcuggacaucag

SEQ ID NO: 1931194 - RNA, 19 nt, Homo sapiens
  misc_RNA (1)...(19): siRNA sense strand
caagaucccaguguugguu

SEQ ID NO: 1931195 - RNA, 19 nt, Homo sapiens
  misc_RNA (1)...(19): siRNA sense strand
aaaugaaucugugggucaa

SEQ ID NO: 1931196 - RNA, 19 nt, Homo sapiens
  misc_RNA (1)...(19): siRNA sense strand
caagggucccaaugugaaa

SEQ ID NO: 1931197 - RNA, 19 nt, Homo sapiens
  misc_RNA (1)...(19): siRNA sense strand
ggguggacuccucuauaua

SEQ ID NO: 1931198 - RNA, 19 nt, Homo sapiens
  misc_RNA (1)...(19): siRNA sense strand
gaugaguacugggcucuac

SEQ ID NO: 1931199 - RNA, 19 nt, Homo sapiens
  misc_RNA (1)...(19): siRNA sense strand
ccaauccaggcaccagaua

SEQ ID NO: 1931200 - RNA, 19 nt, Homo sapiens
  misc_RNA (1)...(19): siRNA sense strand
cgaccucucucuguuaguc

SEQ ID NO: 1931201 - RNA, 19 nt, Homo sapiens
  misc_RNA (1)...(19): siRNA sense strand
gacaucagcaacucggauu

SEQ ID NO: 1931202 - RNA, 19 nt, Homo sapiens
  misc_RNA (1)...(19): siRNA sense strand
uauuggagaggcuucauuu

SEQ ID NO: 1931203 - RNA, 19 nt, Homo sapiens
  misc_RNA (1)...(19): siRNA sense strand
cacagaaaauguugacaaa

SEQ ID NO: 1931204 - RNA, 19 nt, Homo sapiens
  misc_RNA (1)...(19): siRNA sense strand
agaccaacuugcccacaga

SEQ ID NO: 1931205 - RNA, 19 nt, Homo sapiens
  misc_RNA (1)...(19): siRNA sense strand
guacagaccuugaagauug

SEQ ID NO: 1931206 - RNA, 19 nt, Homo sapiens
  misc_RNA (1)...(19): siRNA sense strand
ccacaaacauguaaggauu

SEQ ID NO: 1931207 - RNA, 19 nt, Homo sapiens
  misc_RNA (1)...(19): siRNA sense strand
cuaaagagccaguugauuu

SEQ ID NO: 1931208 - RNA, 19 nt, Homo sapiens
  misc_RNA (1)...(19): siRNA sense strand
gaaaggcuuguaauccaaa

SEQ ID NO: 1931209 - RNA, 19 nt, Homo sapiens
  misc_RNA (1)...(19): siRNA sense strand
ugaaaggcuuguaauccaa

SEQ ID NO: 1931210 - RNA, 19 nt, Homo sapiens
  misc_RNA (1)...(19): siRNA sense strand
caugauggcuccgcuacuu

SEQ ID NO: 1931211 - RNA, 19 nt, Homo sapiens
  misc_RNA (1)...(19): siRNA sense strand
ugaaggguccgaagugauu

SEQ ID NO: 1931212 - RNA, 19 nt, Homo sapiens
  misc_RNA (1)...(19): siRNA sense strand
gaccaccacaggaauguuu

SEQ ID NO: 1931213 - RNA, 19 nt, Homo sapiens
  misc_RNA (1)...(19): siRNA sense strand
acaaacauguaaggauuga

SEQ ID NO: 1931214 - RNA, 19 nt, Homo sapiens
  misc_RNA (1)...(19): siRNA sense strand
ggcuuguaauccaaaguua

SEQ ID NO: 1931215 - RNA, 19 nt, Homo sapiens
  misc_RNA (1)...(19): siRNA sense strand
cccaggaauucauuauuug

SEQ ID NO: 1931216 - RNA, 19 nt, Homo sapiens
  misc_RNA (1)...(19): siRNA sense strand
uggcuccgcuacuuacuug

SEQ ID NO: 1931217 - RNA, 19 nt, Homo sapiens
  misc_RNA (1)...(19): siRNA sense strand
uacagaccuugaagauuga

SEQ ID NO: 1931218 - RNA, 19 nt, Homo sapiens
  misc_RNA (1)...(19): siRNA sense strand
gauuuuagcuacaucaagu

SEQ ID NO: 1931219 - RNA, 19 nt, Homo sapiens
  misc_RNA (1)...(19): siRNA sense strand
uugaaaggcuuguaaucca

SEQ ID NO: 1931220 - RNA, 19 nt, Homo sapiens
  misc_RNA (1)...(19): siRNA sense strand
gaaggguccgaagugauuu

SEQ ID NO: 1931221 - RNA, 19 nt, Homo sapiens
  misc_RNA (1)...(19): siRNA sense strand
ccccaggaauucauuauuu

SEQ ID NO: 1931222 - RNA, 19 nt, Homo sapiens
  misc_RNA (1)...(19): siRNA sense strand
uaaagagccaguugauuuu

SEQ ID NO: 1931223 - RNA, 19 nt, Homo sapiens
  misc_RNA (1)...(19): siRNA sense strand
ucugaaggguccgaaguga

SEQ ID NO: 1931224 - RNA, 19 nt, Homo sapiens
  misc_RNA (1)...(19): siRNA sense strand
ggauugaaaggcuuguaau

SEQ ID NO: 1931225 - RNA, 19 nt, Homo sapiens
  misc_RNA (1)...(19): siRNA sense strand
aagauuugguacacacaga

SEQ ID NO: 1931226 - RNA, 19 nt, Homo sapiens
  misc_RNA (1)...(19): siRNA sense strand
gaagugauuuuagcuacau

SEQ ID NO: 1931227 - RNA, 19 nt, Homo sapiens
  misc_RNA (1)...(19): siRNA sense strand
ccaggaauucauuauuugu

SEQ ID NO: 1931228 - RNA, 19 nt, Homo sapiens
  misc_RNA (1)...(19): siRNA sense strand
cacaaacauguaaggauug

SEQ ID NO: 1931229 - RNA, 19 nt, Homo sapiens
  misc_RNA (1)...(19): siRNA sense strand
aggggcagcuucaaaauga

SEQ ID NO: 1931230 - RNA, 19 nt, Homo sapiens
  misc_RNA (1)...(19): siRNA sense strand
cgucuaaagagccaguuga

SEQ ID NO: 1931231 - RNA, 19 nt, Homo sapiens
  misc_RNA (1)...(19): siRNA sense strand
gcucugaaggguccgaagu

SEQ ID NO: 1931232 - RNA, 19 nt, Homo sapiens
  misc_RNA (1)...(19): siRNA sense strand
gaacauaugagaccaagua

SEQ ID NO: 1931233 - RNA, 19 nt, Homo sapiens
  misc_RNA (1)...(19): siRNA sense strand
ccaggaagcuucauaaaga

SEQ ID NO: 1931234 - RNA, 19 nt, Homo sapiens
  misc_RNA (1)...(19): siRNA sense strand
gaauagaguuggguuuaaa

SEQ ID NO: 1931235 - RNA, 19 nt, Homo sapiens
  misc_RNA (1)...(19): siRNA sense strand
caagagagagauaauguua

SEQ ID NO: 1931236 - RNA, 19 nt, Homo sapiens
  misc_RNA (1)...(19): siRNA sense strand
cgaaagagccauuguuaaa

SEQ ID NO: 1931237 - RNA, 19 nt, Homo sapiens
  misc_RNA (1)...(19): siRNA sense strand
gaaagcgaguucaucuaaa

SEQ ID NO: 1931238 - RNA, 19 nt, Homo sapiens
  misc_RNA (1)...(19): siRNA sense strand
gcgaguucaucuaaauuua

SEQ ID NO: 1931239 - RNA, 19 nt, Homo sapiens
  misc_RNA (1)...(19): siRNA sense strand
gaagcagccugauaaaaua

SEQ ID NO: 1931240 - RNA, 19 nt, Homo sapiens
  misc_RNA (1)...(19): siRNA sense strand
gugcagaccucuaaagaau

SEQ ID NO: 1931241 - RNA, 19 nt, Homo sapiens
  misc_RNA (1)...(19): siRNA sense strand
gcagaccucuaaagaauca

SEQ ID NO: 1931242 - RNA, 19 nt, Homo sapiens
  misc_RNA (1)...(19): siRNA sense strand
uaaagaagcuccgaguaau

SEQ ID NO: 1931243 - RNA, 19 nt, Homo sapiens
  misc_RNA (1)...(19): siRNA sense strand
uaaaugcacugaacgugaa

SEQ ID NO: 1931244 - RNA, 19 nt, Homo sapiens
  misc_RNA (1)...(19): siRNA sense strand
aaagagccauuguuaaaga

SEQ ID NO: 1931245 - RNA, 19 nt, Homo sapiens
  misc_RNA (1)...(19): siRNA sense strand
ggugaaagguaacacagaa

SEQ ID NO: 1931246 - RNA, 19 nt, Homo sapiens
  misc_RNA (1)...(19): siRNA sense strand
ggagcuacauucaaauuag

SEQ ID NO: 1931247 - RNA, 19 nt, Homo sapiens
  misc_RNA (1)...(19): siRNA sense strand
gaagcucaauucagccaaa

SEQ ID NO: 1931248 - RNA, 19 nt, Homo sapiens
  misc_RNA (1)...(19): siRNA sense strand
cgaaagcgaguucaucuaa

SEQ ID NO: 1931249 - RNA, 19 nt, Homo sapiens
  misc_RNA (1)...(19): siRNA sense strand
gaaagacagccaagagaga

SEQ ID NO: 1931250 - RNA, 19 nt, Homo sapiens
  misc_RNA (1)...(19): siRNA sense strand
ccaaaugccuccccaagua

SEQ ID NO: 1931251 - RNA, 19 nt, Homo sapiens
  misc_RNA (1)...(19): siRNA sense strand
guccagauaucuuacuaaa

SEQ ID NO: 1931252 - RNA, 19 nt, Homo sapiens
  misc_RNA (1)...(19): siRNA sense strand
ggaaaucaaaugagaaaca

SEQ ID NO: 1931253 - RNA, 19 nt, Homo sapiens
  misc_RNA (1)...(19): siRNA sense strand
guaauaaagcaucgaagaa

SEQ ID NO: 1931254 - RNA, 19 nt, Homo sapiens
  misc_RNA (1)...(19): siRNA sense strand
gaauacaaacucuguggaa

SEQ ID NO: 1931255 - RNA, 19 nt, Homo sapiens
  misc_RNA (1)...(19): siRNA sense strand
aaucaaacaugcuggaguu

SEQ ID NO: 1931256 - RNA, 19 nt, Homo sapiens
  misc_RNA (1)...(19): siRNA sense strand
ugaauagaguuggguuuaa

SEQ ID NO: 1931257 - RNA, 19 nt, Homo sapiens
  misc_RNA (1)...(19): siRNA sense strand
cauacaacauucuaaggaa

SEQ ID NO: 1931258 - RNA, 19 nt, Homo sapiens
  misc_RNA (1)...(19): siRNA sense strand
ggaagcuucauaaagauaa

SEQ ID NO: 1931259 - RNA, 19 nt, Homo sapiens
  misc_RNA (1)...(19): siRNA sense strand
aaagcgaguucaucuaaau

SEQ ID NO: 1931260 - RNA, 19 nt, Homo sapiens
  misc_RNA (1)...(19): siRNA sense strand
ugugggagcuacauucaaa

SEQ ID NO: 1931261 - RNA, 19 nt, Homo sapiens
  misc_RNA (1)...(19): siRNA sense strand
gaagaacggaaggauguaa

SEQ ID NO: 1931262 - RNA, 19 nt, Homo sapiens
  misc_RNA (1)...(19): siRNA sense strand
uuacaaaggcagaagcaua

SEQ ID NO: 1931263 - RNA, 19 nt, Homo sapiens
  misc_RNA (1)...(19): siRNA sense strand
ccuaaggaguauuuacaaa

SEQ ID NO: 1931264 - RNA, 19 nt, Homo sapiens
  misc_RNA (1)...(19): siRNA sense strand
aaagaagcuccgaguaaua

SEQ ID NO: 1931265 - RNA, 19 nt, Homo sapiens
  misc_RNA (1)...(19): siRNA sense strand
auaaagaagcuccgaguaa

SEQ ID NO: 1931266 - RNA, 19 nt, Homo sapiens
  misc_RNA (1)...(19): siRNA sense strand
gaagacugguuaaaauuug

SEQ ID NO: 1931267 - RNA, 19 nt, Homo sapiens
  misc_RNA (1)...(19): siRNA sense strand
gaaagagccauuguuaaag

SEQ ID NO: 1931268 - RNA, 19 nt, Homo sapiens
  misc_RNA (1)...(19): siRNA sense strand
gggagcuacauucaaauua

SEQ ID NO: 1931269 - RNA, 19 nt, Homo sapiens
  misc_RNA (1)...(19): siRNA sense strand
gaaaucaaaugagaaacac

SEQ ID NO: 1931270 - RNA, 19 nt, Homo sapiens
  misc_RNA (1)...(19): siRNA sense strand
uacaaaggcagaagcauaa

SEQ ID NO: 1931271 - RNA, 19 nt, Homo sapiens
  misc_RNA (1)...(19): siRNA sense strand
uuucaaaccuacaaacaga

SEQ ID NO: 1931272 - RNA, 19 nt, Homo sapiens
  misc_RNA (1)...(19): siRNA sense strand
caugcuggaguuuaaauua

SEQ ID NO: 1931273 - RNA, 19 nt, Homo sapiens
  misc_RNA (1)...(19): siRNA sense strand
gguugaaaguugugggaaa

SEQ ID NO: 1931274 - RNA, 19 nt, Homo sapiens
  misc_RNA (1)...(19): siRNA sense strand
uaaggaguauuuacaaagg

SEQ ID NO: 1931275 - RNA, 19 nt, Homo sapiens
  misc_RNA (1)...(19): siRNA sense strand
gcacugaacgugaaagcau

SEQ ID NO: 1931276 - RNA, 19 nt, Homo sapiens
  misc_RNA (1)...(19): siRNA sense strand
gaagaaaaucugugugaaa

SEQ ID NO: 1931277 - RNA, 19 nt, Homo sapiens
  misc_RNA (1)...(19): siRNA sense strand
uacaaacucuguggaagaa

SEQ ID NO: 1931278 - RNA, 19 nt, Homo sapiens
  misc_RNA (1)...(19): siRNA sense strand
gauaagagacaggaaaaua

SEQ ID NO: 1931279 - RNA, 19 nt, Homo sapiens
  misc_RNA (1)...(19): siRNA sense strand
aagcauuucucucaccaaa

SEQ ID NO: 1931280 - RNA, 19 nt, Homo sapiens
  misc_RNA (1)...(19): siRNA sense strand
ggaagcagccugauaaaau

SEQ ID NO: 1931281 - RNA, 19 nt, Homo sapiens
  misc_RNA (1)...(19): siRNA sense strand
gugggaagcagccugauaa

SEQ ID NO: 1931282 - RNA, 19 nt, Homo sapiens
  misc_RNA (1)...(19): siRNA sense strand
ucugcaaguuucaggaaua

SEQ ID NO: 1931283 - RNA, 19 nt, Homo sapiens
  misc_RNA (1)...(19): siRNA sense strand
gcagaagcauaaagaagcu

SEQ ID NO: 1931284 - RNA, 19 nt, Homo sapiens
  misc_RNA (1)...(19): siRNA sense strand
uagcaguccuguaaaauaa

SEQ ID NO: 1931285 - RNA, 19 nt, Homo sapiens
  misc_RNA (1)...(19): siRNA sense strand
aacgaaagagccauuguua

SEQ ID NO: 1931286 - RNA, 19 nt, Homo sapiens
  misc_RNA (1)...(19): siRNA sense strand
aagaagcuccgaguaauaa

SEQ ID NO: 1931287 - RNA, 19 nt, Homo sapiens
  misc_RNA (1)...(19): siRNA sense strand
aaagauaagagacaggaaa

SEQ ID NO: 1931288 - RNA, 19 nt, Homo sapiens
  misc_RNA (1)...(19): siRNA sense strand
ugaaaguugugggaaauca

SEQ ID NO: 1931289 - RNA, 19 nt, Homo sapiens
  misc_RNA (1)...(19): siRNA sense strand
cauaaagaagcuccgagua

SEQ ID NO: 1931290 - RNA, 19 nt, Homo sapiens
  misc_RNA (1)...(19): siRNA sense strand
gagcuacauucaaauuagg

SEQ ID NO: 1931291 - RNA, 19 nt, Homo sapiens
  misc_RNA (1)...(19): siRNA sense strand
cauaugagaccaaguaaac

SEQ ID NO: 1931292 - RNA, 19 nt, Homo sapiens
  misc_RNA (1)...(19): siRNA sense strand
guugaaaguugugggaaau

SEQ ID NO: 1931293 - RNA, 19 nt, Homo sapiens
  misc_RNA (1)...(19): siRNA sense strand
ggaagaacggaaggaugua

SEQ ID NO: 1931294 - RNA, 19 nt, Homo sapiens
  misc_RNA (1)...(19): siRNA sense strand
aaacaagaacagaaaggaa

SEQ ID NO: 1931295 - RNA, 19 nt, Homo sapiens
  misc_RNA (1)...(19): siRNA sense strand
ucaaauuaggugacucuuu

SEQ ID NO: 1931296 - RNA, 19 nt, Homo sapiens
  misc_RNA (1)...(19): siRNA sense strand
ugugggaaaucaaaugaga

SEQ ID NO: 1931297 - RNA, 19 nt, Homo sapiens
  misc_RNA (1)...(19): siRNA sense strand
gaaaguugugggaaaucaa

SEQ ID NO: 1931298 - RNA, 19 nt, Homo sapiens
  misc_RNA (1)...(19): siRNA sense strand
gccaagagagagauaaugu

SEQ ID NO: 1931299 - RNA, 19 nt, Homo sapiens
  misc_RNA (1)...(19): siRNA sense strand
caggaagcuucauaaagau

SEQ ID NO: 1931300 - RNA, 19 nt, Homo sapiens
  misc_RNA (1)...(19): siRNA sense strand
ucaccaaauuagaaaguuc

SEQ ID NO: 1931301 - RNA, 19 nt, Homo sapiens
  misc_RNA (1)...(19): siRNA sense strand
caaauacuaagucuguaga

SEQ ID NO: 1931302 - RNA, 19 nt, Homo sapiens
  misc_RNA (1)...(19): siRNA sense strand
aaacgaaagagccauuguu

SEQ ID NO: 1931303 - RNA, 19 nt, Homo sapiens
  misc_RNA (1)...(19): siRNA sense strand
cagaaagacagccaagaga

SEQ ID NO: 1931304 - RNA, 19 nt, Homo sapiens
  misc_RNA (1)...(19): siRNA sense strand
cugcaaguuucaggaauaa

SEQ ID NO: 1931305 - RNA, 19 nt, Homo sapiens
  misc_RNA (1)...(19): siRNA sense strand
gcuggaguuuaaauuaugu

SEQ ID NO: 1931306 - RNA, 19 nt, Homo sapiens
  misc_RNA (1)...(19): siRNA sense strand
ggugggaagcagccugaua

SEQ ID NO: 1931307 - RNA, 19 nt, Homo sapiens
  misc_RNA (1)...(19): siRNA sense strand
gaagugugggagcuacauu

SEQ ID NO: 1931308 - RNA, 19 nt, Homo sapiens
  misc_RNA (1)...(19): siRNA sense strand
aaaggcagaagcauaaaga

SEQ ID NO: 1931309 - RNA, 19 nt, Homo sapiens
  misc_RNA (1)...(19): siRNA sense strand
gaagcuucauaaagauaag

SEQ ID NO: 1931310 - RNA, 19 nt, Homo sapiens
  misc_RNA (1)...(19): siRNA sense strand
uaaccaauauaagcaacga

SEQ ID NO: 1931311 - RNA, 19 nt, Homo sapiens
  misc_RNA (1)...(19): siRNA sense strand
agauguaccuggagaagag

SEQ ID NO: 1931312 - RNA, 19 nt, Homo sapiens
  misc_RNA (1)...(19): siRNA sense strand
cugaauagaguuggguuua

SEQ ID NO: 1931313 - RNA, 19 nt, Homo sapiens
  misc_RNA (1)...(19): siRNA sense strand
agaguuggguuuaaaugca

SEQ ID NO: 1931314 - RNA, 19 nt, Homo sapiens
  misc_RNA (1)...(19): siRNA sense strand
cuugguagcaguccuguaa

SEQ ID NO: 1931315 - RNA, 19 nt, Homo sapiens
  misc_RNA (1)...(19): siRNA sense strand
agaagcagaagccuuggua

SEQ ID NO: 1931316 - RNA, 19 nt, Homo sapiens
  misc_RNA (1)...(19): siRNA sense strand
gaccucuaaagaaucauua

SEQ ID NO: 1931317 - RNA, 19 nt, Homo sapiens
  misc_RNA (1)...(19): siRNA sense strand
gcaaguuucaggaauaaaa

SEQ ID NO: 1931318 - RNA, 19 nt, Homo sapiens
  misc_RNA (1)...(19): siRNA sense strand
uaaagccucauccuaggaa

SEQ ID NO: 1931319 - RNA, 19 nt, Homo sapiens
  misc_RNA (1)...(19): siRNA sense strand
uaaacaagaacagaaagga

SEQ ID NO: 1931320 - RNA, 19 nt, Homo sapiens
  misc_RNA (1)...(19): siRNA sense strand
ccgugcagguugaaaguug

SEQ ID NO: 1931321 - RNA, 19 nt, Homo sapiens
  misc_RNA (1)...(19): siRNA sense strand
guagcaguccuguaaaaua

SEQ ID NO: 1931322 - RNA, 19 nt, Homo sapiens
  misc_RNA (1)...(19): siRNA sense strand
ccaagagagagauaauguu

SEQ ID NO: 1931323 - RNA, 19 nt, Homo sapiens
  misc_RNA (1)...(19): siRNA sense strand
aaaguugugggaaaucaaa

SEQ ID NO: 1931324 - RNA, 19 nt, Homo sapiens
  misc_RNA (1)...(19): siRNA sense strand
gaagcuccgaguaauaaag

SEQ ID NO: 1931325 - RNA, 19 nt, Homo sapiens
  misc_RNA (1)...(19): siRNA sense strand
aagcaacgaagcucaauuc

SEQ ID NO: 1931326 - RNA, 19 nt, Homo sapiens
  misc_RNA (1)...(19): siRNA sense strand
cuucagugcagauggauuu

SEQ ID NO: 1931327 - RNA, 19 nt, Homo sapiens
  misc_RNA (1)...(19): siRNA sense strand
guaaagccucauccuagga

SEQ ID NO: 1931328 - RNA, 19 nt, Homo sapiens
  misc_RNA (1)...(19): siRNA sense strand
cacugaacgugaaagcauu

SEQ ID NO: 1931329 - RNA, 19 nt, Homo sapiens
  misc_RNA (1)...(19): siRNA sense strand
ggguuuaaaugcacugaac

SEQ ID NO: 1931330 - RNA, 19 nt, Homo sapiens
  misc_RNA (1)...(19): siRNA sense strand
gauaaacaagaacagaaag

SEQ ID NO: 1931331 - RNA, 19 nt, Homo sapiens
  misc_RNA (1)...(19): siRNA sense strand
uggaagaacggaaggaugu

SEQ ID NO: 1931332 - RNA, 19 nt, Homo sapiens
  misc_RNA (1)...(19): siRNA sense strand
ccgcaaauaugcccauuau

SEQ ID NO: 1931333 - RNA, 19 nt, Homo sapiens
  misc_RNA (1)...(19): siRNA sense strand
gcaaguccgcccugcagua

SEQ ID NO: 1931334 - RNA, 19 nt, Homo sapiens
  misc_RNA (1)...(19): siRNA sense strand
gcaaauaugcccauuaucc

SEQ ID NO: 1931335 - RNA, 19 nt, Homo sapiens
  misc_RNA (1)...(19): siRNA sense strand
gcaccuacaaccgcaaaua

SEQ ID NO: 1931336 - RNA, 19 nt, Homo sapiens
  misc_RNA (1)...(19): siRNA sense strand
uggagaagcugggcuguga

SEQ ID NO: 1931337 - RNA, 19 nt, Homo sapiens
  misc_RNA (1)...(19): siRNA sense strand
caacgacuauggcuguuac

SEQ ID NO: 1931338 - RNA, 19 nt, Homo sapiens
  misc_RNA (1)...(19): siRNA sense strand
gugaugaucgagaagauga

SEQ ID NO: 1931339 - RNA, 19 nt, Homo sapiens
  misc_RNA (1)...(19): siRNA sense strand
caccuacaaccgcaaauau

SEQ ID NO: 1931340 - RNA, 19 nt, Homo sapiens
  misc_RNA (1)...(19): siRNA sense strand
gggugaugaucgagaagau

SEQ ID NO: 1931341 - RNA, 19 nt, Homo sapiens
  misc_RNA (1)...(19): siRNA sense strand
gcuacgggcgucuggagaa

SEQ ID NO: 1931342 - RNA, 19 nt, Homo sapiens
  misc_RNA (1)...(19): siRNA sense strand
gagaagaugacaggcaagu

SEQ ID NO: 1931343 - RNA, 19 nt, Homo sapiens
  misc_RNA (1)...(19): siRNA sense strand
cagcgaacguggcauuuuc

SEQ ID NO: 1931344 - RNA, 19 nt, Homo sapiens
  misc_RNA (1)...(19): siRNA sense strand
aguccgcccugcaguacaa

SEQ ID NO: 1931345 - RNA, 19 nt, Homo sapiens
  misc_RNA (1)...(19): siRNA sense strand
gaacagagauuuaggaaga

SEQ ID NO: 1931346 - RNA, 19 nt, Homo sapiens
  misc_RNA (1)...(19): siRNA sense strand
gaaaugaucuccugucaag

SEQ ID NO: 1931347 - RNA, 19 nt, Homo sapiens
  misc_RNA (1)...(19): siRNA sense strand
ccgaagaccucaugaauuu

SEQ ID NO: 1931348 - RNA, 19 nt, Homo sapiens
  misc_RNA (1)...(19): siRNA sense strand
ggaaacacauaccaaacua

SEQ ID NO: 1931349 - RNA, 19 nt, Homo sapiens
  misc_RNA (1)...(19): siRNA sense strand
gcagagaucucaauaagag

SEQ ID NO: 1931350 - RNA, 19 nt, Homo sapiens
  misc_RNA (1)...(19): siRNA sense strand
gaacgaagguaugcuaaug

SEQ ID NO: 1931351 - RNA, 19 nt, Homo sapiens
  misc_RNA (1)...(19): siRNA sense strand
ggagagagaugauuuaaaa

SEQ ID NO: 1931352 - RNA, 19 nt, Homo sapiens
  misc_RNA (1)...(19): siRNA sense strand
ccacaaaguuucaccaaga

SEQ ID NO: 1931353 - RNA, 19 nt, Homo sapiens
  misc_RNA (1)...(19): siRNA sense strand
gaucuccugucaagaguua

SEQ ID NO: 1931354 - RNA, 19 nt, Homo sapiens
  misc_RNA (1)...(19): siRNA sense strand
gaagaggagcugcaagaua

SEQ ID NO: 1931355 - RNA, 19 nt, Homo sapiens
  misc_RNA (1)...(19): siRNA sense strand
caagagaaguggaugcauu

SEQ ID NO: 1931356 - RNA, 19 nt, Homo sapiens
  misc_RNA (1)...(19): siRNA sense strand
agaagacgcuuucaacaaa

SEQ ID NO: 1931357 - RNA, 19 nt, Homo sapiens
  misc_RNA (1)...(19): siRNA sense strand
cuaaagagcuagaacaugu

SEQ ID NO: 1931358 - RNA, 19 nt, Homo sapiens
  misc_RNA (1)...(19): siRNA sense strand
caagaaugcuacucucuga

SEQ ID NO: 1931359 - RNA, 19 nt, Homo sapiens
  misc_RNA (1)...(19): siRNA sense strand
uggcgaagcucaccaauga

SEQ ID NO: 1931360 - RNA, 19 nt, Homo sapiens
  misc_RNA (1)...(19): siRNA sense strand
uuaaggagcucucucaaga

SEQ ID NO: 1931361 - RNA, 19 nt, Homo sapiens
  misc_RNA (1)...(19): siRNA sense strand
gaaauccacaacagcauua

SEQ ID NO: 1931362 - RNA, 19 nt, Homo sapiens
  misc_RNA (1)...(19): siRNA sense strand
uaucauggcugaaguggaa

SEQ ID NO: 1931363 - RNA, 19 nt, Homo sapiens
  misc_RNA (1)...(19): siRNA sense strand
gaaaagauguacagcguaa

SEQ ID NO: 1931364 - RNA, 19 nt, Homo sapiens
  misc_RNA (1)...(19): siRNA sense strand
gcacucagccggcagauug

SEQ ID NO: 1931365 - RNA, 19 nt, Homo sapiens
  misc_RNA (1)...(19): siRNA sense strand
cuaaagaaguucagacaga

SEQ ID NO: 1931366 - RNA, 19 nt, Homo sapiens
  misc_RNA (1)...(19): siRNA sense strand
aagaggagcugcaagauau

SEQ ID NO: 1931367 - RNA, 19 nt, Homo sapiens
  misc_RNA (1)...(19): siRNA sense strand
caaagcaguugucucaaga

SEQ ID NO: 1931368 - RNA, 19 nt, Homo sapiens
  misc_RNA (1)...(19): siRNA sense strand
ugaaagccauugaggauga

SEQ ID NO: 1931369 - RNA, 19 nt, Homo sapiens
  misc_RNA (1)...(19): siRNA sense strand
gcagauugaugaguuagaa

SEQ ID NO: 1931370 - RNA, 19 nt, Homo sapiens
  misc_RNA (1)...(19): siRNA sense strand
acaaacaggucuuuacgaa

SEQ ID NO: 1931371 - RNA, 19 nt, Homo sapiens
  misc_RNA (1)...(19): siRNA sense strand
uccaagagcugaccacaaa

SEQ ID NO: 1931372 - RNA, 19 nt, Homo sapiens
  misc_RNA (1)...(19): siRNA sense strand
gcacagcucacccuucaaa

SEQ ID NO: 1931373 - RNA, 19 nt, Homo sapiens
  misc_RNA (1)...(19): siRNA sense strand
acaaugaaccaccugauua

SEQ ID NO: 1931374 - RNA, 19 nt, Homo sapiens
  misc_RNA (1)...(19): siRNA sense strand
gaccacaaaugcaaaggaa

SEQ ID NO: 1931375 - RNA, 19 nt, Homo sapiens
  misc_RNA (1)...(19): siRNA sense strand
agucaucaauggucaguua

SEQ ID NO: 1931376 - RNA, 19 nt, Homo sapiens
  misc_RNA (1)...(19): siRNA sense strand
uaaagaaguucagacagaa

SEQ ID NO: 1931377 - RNA, 19 nt, Homo sapiens
  misc_RNA (1)...(19): siRNA sense strand
aagaaaggaugaccacaaa

SEQ ID NO: 1931378 - RNA, 19 nt, Homo sapiens
  misc_RNA (1)...(19): siRNA sense strand
aaacaggaacagagauuua

SEQ ID NO: 1931379 - RNA, 19 nt, Homo sapiens
  misc_RNA (1)...(19): siRNA sense strand
gggcagccacuucauauaa

SEQ ID NO: 1931380 - RNA, 19 nt, Homo sapiens
  misc_RNA (1)...(19): siRNA sense strand
gaucugugcuguccuucaa

SEQ ID NO: 1931381 - RNA, 19 nt, Homo sapiens
  misc_RNA (1)...(19): siRNA sense strand
gugcagagaucucaauaag

SEQ ID NO: 1931382 - RNA, 19 nt, Homo sapiens
  misc_RNA (1)...(19): siRNA sense strand
cagaagcaguagacaauga

SEQ ID NO: 1931383 - RNA, 19 nt, Homo sapiens
  misc_RNA (1)...(19): siRNA sense strand
ggagcucucucaagaagug

SEQ ID NO: 1931384 - RNA, 19 nt, Homo sapiens
  misc_RNA (1)...(19): siRNA sense strand
gaagagaaaggaaaugauc

SEQ ID NO: 1931385 - RNA, 19 nt, Homo sapiens
  misc_RNA (1)...(19): siRNA sense strand
agacagaauucacucuaaa

SEQ ID NO: 1931386 - RNA, 19 nt, Homo sapiens
  misc_RNA (1)...(19): siRNA sense strand
gaaagcggaagaagagaaa

SEQ ID NO: 1931387 - RNA, 19 nt, Homo sapiens
  misc_RNA (1)...(19): siRNA sense strand
gacugaaacugaagcuaaa

SEQ ID NO: 1931388 - RNA, 19 nt, Homo sapiens
  misc_RNA (1)...(19): siRNA sense strand
caaacuagcccuugcugaa

SEQ ID NO: 1931389 - RNA, 19 nt, Homo sapiens
  misc_RNA (1)...(19): siRNA sense strand
uggaaacgcugguaucaug

SEQ ID NO: 1931390 - RNA, 19 nt, Homo sapiens
  misc_RNA (1)...(19): siRNA sense strand
aaaccucacuaaggaguua

SEQ ID NO: 1931391 - RNA, 19 nt, Homo sapiens
  misc_RNA (1)...(19): siRNA sense strand
uaacugugauguuuguaga

SEQ ID NO: 1931392 - RNA, 19 nt, Homo sapiens
  misc_RNA (1)...(19): siRNA sense strand
uaacagaaagcuauggauu

SEQ ID NO: 1931393 - RNA, 19 nt, Homo sapiens
  misc_RNA (1)...(19): siRNA sense strand
gaagcuaaaggacaugaaa

SEQ ID NO: 1931394 - RNA, 19 nt, Homo sapiens
  misc_RNA (1)...(19): siRNA sense strand
caacagcauuacaccaaga

SEQ ID NO: 1931395 - RNA, 19 nt, Homo sapiens
  misc_RNA (1)...(19): siRNA sense strand
caaggagagagaugauuua

SEQ ID NO: 1931396 - RNA, 19 nt, Homo sapiens
  misc_RNA (1)...(19): siRNA sense strand
caaccagacuagagaagga

SEQ ID NO: 1931397 - RNA, 19 nt, Homo sapiens
  misc_RNA (1)...(19): siRNA sense strand
caaggcauguccccaauua

SEQ ID NO: 1931398 - RNA, 19 nt, Homo sapiens
  misc_RNA (1)...(19): siRNA sense strand
uaaacccaaugccaacuuu

SEQ ID NO: 1931399 - RNA, 19 nt, Homo sapiens
  misc_RNA (1)...(19): siRNA sense strand
ggagggccaucuucagaau

SEQ ID NO: 1931400 - RNA, 19 nt, Homo sapiens
  misc_RNA (1)...(19): siRNA sense strand
gucaagaguuaauauguug

SEQ ID NO: 1931401 - RNA, 19 nt, Homo sapiens
  misc_RNA (1)...(19): siRNA sense strand
aaacaggucuuuacgaaaa

SEQ ID NO: 1931402 - RNA, 19 nt, Homo sapiens
  misc_RNA (1)...(19): siRNA sense strand
ggaagaagagaaaggaaau

SEQ ID NO: 1931403 - RNA, 19 nt, Homo sapiens
  misc_RNA (1)...(19): siRNA sense strand
ccucaugaauuuagaacaa

SEQ ID NO: 1931404 - RNA, 19 nt, Homo sapiens
  misc_RNA (1)...(19): siRNA sense strand
ucaauggucaguuauauga

SEQ ID NO: 1931405 - RNA, 19 nt, Homo sapiens
  misc_RNA (1)...(19): siRNA sense strand
caucaauggucaguuauau

SEQ ID NO: 1931406 - RNA, 19 nt, Homo sapiens
  misc_RNA (1)...(19): siRNA sense strand
aaagggcgcucaaguccaa

SEQ ID NO: 1931407 - RNA, 19 nt, Homo sapiens
  misc_RNA (1)...(19): siRNA sense strand
gaagaccucaugaauuuag

SEQ ID NO: 1931408 - RNA, 19 nt, Homo sapiens
  misc_RNA (1)...(19): siRNA sense strand
ccaaggagagagaugauuu

SEQ ID NO: 1931409 - RNA, 19 nt, Homo sapiens
  misc_RNA (1)...(19): siRNA sense strand
caaaaccgauguagaagaa

SEQ ID NO: 1931410 - RNA, 19 nt, Homo sapiens
  misc_RNA (1)...(19): siRNA sense strand
gcagaaggcaaccagacua

SEQ ID NO: 1931411 - RNA, 19 nt, Homo sapiens
  misc_RNA (1)...(19): siRNA sense strand
caagaccaagacacaauua

SEQ ID NO: 1931412 - RNA, 19 nt, Homo sapiens
  misc_RNA (1)...(19): siRNA sense strand
aaacacagccacucuugaa

SEQ ID NO: 1931413 - RNA, 19 nt, Homo sapiens
  misc_RNA (1)...(19): siRNA sense strand
ggcagccacuucauauaaa

SEQ ID NO: 1931414 - RNA, 19 nt, Homo sapiens
  misc_RNA (1)...(19): siRNA sense strand
cauggcaacugaagaccua

SEQ ID NO: 1931415 - RNA, 19 nt, Homo sapiens
  misc_RNA (1)...(19): siRNA sense strand
guggaaagacugaaacuga

SEQ ID NO: 1931416 - RNA, 19 nt, Homo sapiens
  misc_RNA (1)...(19): siRNA sense strand
ggaaauccacaacagcauu

SEQ ID NO: 1931417 - RNA, 19 nt, Homo sapiens
  misc_RNA (1)...(19): siRNA sense strand
gcuagaagccauugaaagu

SEQ ID NO: 1931418 - RNA, 19 nt, Homo sapiens
  misc_RNA (1)...(19): siRNA sense strand
gaaagggagacguuacaga

SEQ ID NO: 1931419 - RNA, 19 nt, Homo sapiens
  misc_RNA (1)...(19): siRNA sense strand
gaacgugcagucaucaaug

SEQ ID NO: 1931420 - RNA, 19 nt, Homo sapiens
  misc_RNA (1)...(19): siRNA sense strand
gacagaagcaguagacaau

SEQ ID NO: 1931421 - RNA, 19 nt, Homo sapiens
  misc_RNA (1)...(19): siRNA sense strand
uggaagcaauugagaaaga

SEQ ID NO: 1931422 - RNA, 19 nt, Homo sapiens
  misc_RNA (1)...(19): siRNA sense strand
gaaugcuacucucugaaau

SEQ ID NO: 1931423 - RNA, 19 nt, Homo sapiens
  misc_RNA (1)...(19): siRNA sense strand
gcuacucucugaaaugcaa

SEQ ID NO: 1931424 - RNA, 19 nt, Homo sapiens
  misc_RNA (1)...(19): siRNA sense strand
cugaagaccuaauauguca

SEQ ID NO: 1931425 - RNA, 19 nt, Homo sapiens
  misc_RNA (1)...(19): siRNA sense strand
caacugaagaccuaauaug

SEQ ID NO: 1931426 - RNA, 19 nt, Homo sapiens
  misc_RNA (1)...(19): siRNA sense strand
ggaaaacaaugagugaaaa

SEQ ID NO: 1931427 - RNA, 19 nt, Homo sapiens
  misc_RNA (1)...(19): siRNA sense strand
aaacgcagaccacaaaguu

SEQ ID NO: 1931428 - RNA, 19 nt, Homo sapiens
  misc_RNA (1)...(19): siRNA sense strand
gagaaguggaugcauuaaa

SEQ ID NO: 1931429 - RNA, 19 nt, Homo sapiens
  misc_RNA (1)...(19): siRNA sense strand
uggaaagacugaaacugaa

SEQ ID NO: 1931430 - RNA, 19 nt, Homo sapiens
  misc_RNA (1)...(19): siRNA sense strand
ggaagcaauugagaaagau

SEQ ID NO: 1931431 - RNA, 19 nt, Homo sapiens
  misc_RNA (1)...(19): siRNA sense strand
guuuguagaugaacggaaa

SEQ ID NO: 1931432 - RNA, 19 nt, Homo sapiens
  misc_RNA (1)...(19): siRNA sense strand
cggcacagcucacccuuca

SEQ ID NO: 1931433 - RNA, 19 nt, Homo sapiens
  misc_RNA (1)...(19): siRNA sense strand
gacaaugaaccaccugauu

SEQ ID NO: 1931434 - RNA, 19 nt, Homo sapiens
  misc_RNA (1)...(19): siRNA sense strand
gaggagcagugcagagauc

SEQ ID NO: 1931435 - RNA, 19 nt, Homo sapiens
  misc_RNA (1)...(19): siRNA sense strand
ucuacuccauguccuguua

SEQ ID NO: 1931436 - RNA, 19 nt, Homo sapiens
  misc_RNA (1)...(19): siRNA sense strand
gagcugaccacaaaugcaa

SEQ ID NO: 1931437 - RNA, 19 nt, Homo sapiens
  misc_RNA (1)...(19): siRNA sense strand
gaagagagauugaaaaccu

SEQ ID NO: 1931438 - RNA, 19 nt, Homo sapiens
  misc_RNA (1)...(19): siRNA sense strand
gcuagaacauguuaaaaug

SEQ ID NO: 1931439 - RNA, 19 nt, Homo sapiens
  misc_RNA (1)...(19): siRNA sense strand
agacugaaacugaagcuaa

SEQ ID NO: 1931440 - RNA, 19 nt, Homo sapiens
  misc_RNA (1)...(19): siRNA sense strand
aaagagcuagaacauguua

SEQ ID NO: 1931441 - RNA, 19 nt, Homo sapiens
  misc_RNA (1)...(19): siRNA sense strand
uuagagagguaccggcauu

SEQ ID NO: 1931442 - RNA, 19 nt, Homo sapiens
  misc_RNA (1)...(19): siRNA sense strand
augaauacauggcaacuga

SEQ ID NO: 1931443 - RNA, 19 nt, Homo sapiens
  misc_RNA (1)...(19): siRNA sense strand
ccacuucauauaaagguua

SEQ ID NO: 1931444 - RNA, 19 nt, Homo sapiens
  misc_RNA (1)...(19): siRNA sense strand
aaaggaaacacauaccaaa

SEQ ID NO: 1931445 - RNA, 19 nt, Homo sapiens
  misc_RNA (1)...(19): siRNA sense strand
gaacagagauuuaggaaga

SEQ ID NO: 1931446 - RNA, 19 nt, Homo sapiens
  misc_RNA (1)...(19): siRNA sense strand
gaaaugaucuccugucaag

SEQ ID NO: 1931447 - RNA, 19 nt, Homo sapiens
  misc_RNA (1)...(19): siRNA sense strand
ugaccaagcugaagucuuu

SEQ ID NO: 1931448 - RNA, 19 nt, Homo sapiens
  misc_RNA (1)...(19): siRNA sense strand
gcagagaucucaauaagag

SEQ ID NO: 1931449 - RNA, 19 nt, Homo sapiens
  misc_RNA (1)...(19): siRNA sense strand
ggaaacacauaccaaacua

SEQ ID NO: 1931450 - RNA, 19 nt, Homo sapiens
  misc_RNA (1)...(19): siRNA sense strand
gaacgaagguaugcuaaug

SEQ ID NO: 1931451 - RNA, 19 nt, Homo sapiens
  misc_RNA (1)...(19): siRNA sense strand
ggagagagaugauuuaaaa

SEQ ID NO: 1931452 - RNA, 19 nt, Homo sapiens
  misc_RNA (1)...(19): siRNA sense strand
ccacaaaguuucaccaaga

SEQ ID NO: 1931453 - RNA, 19 nt, Homo sapiens
  misc_RNA (1)...(19): siRNA sense strand
gaucuccugucaagaguua

SEQ ID NO: 1931454 - RNA, 19 nt, Homo sapiens
  misc_RNA (1)...(19): siRNA sense strand
gaagcuaauugaucaagaa

SEQ ID NO: 1931455 - RNA, 19 nt, Homo sapiens
  misc_RNA (1)...(19): siRNA sense strand
gaagaggagcugcaagaua

SEQ ID NO: 1931456 - RNA, 19 nt, Homo sapiens
  misc_RNA (1)...(19): siRNA sense strand
caagagaaguggaugcauu

SEQ ID NO: 1931457 - RNA, 19 nt, Homo sapiens
  misc_RNA (1)...(19): siRNA sense strand
agaagacgcuuucaacaaa

SEQ ID NO: 1931458 - RNA, 19 nt, Homo sapiens
  misc_RNA (1)...(19): siRNA sense strand
cuaaagagcuagaacaugu

SEQ ID NO: 1931459 - RNA, 19 nt, Homo sapiens
  misc_RNA (1)...(19): siRNA sense strand
caagaaugcuacucucuga

SEQ ID NO: 1931460 - RNA, 19 nt, Homo sapiens
  misc_RNA (1)...(19): siRNA sense strand
uggcgaagcucaccaauga

SEQ ID NO: 1931461 - RNA, 19 nt, Homo sapiens
  misc_RNA (1)...(19): siRNA sense strand
uuaaggagcucucucaaga

SEQ ID NO: 1931462 - RNA, 19 nt, Homo sapiens
  misc_RNA (1)...(19): siRNA sense strand
gaaauccacaacagcauua

SEQ ID NO: 1931463 - RNA, 19 nt, Homo sapiens
  misc_RNA (1)...(19): siRNA sense strand
uaucauggcugaaguggaa

SEQ ID NO: 1931464 - RNA, 19 nt, Homo sapiens
  misc_RNA (1)...(19): siRNA sense strand
gaaaagauguacagcguaa

SEQ ID NO: 1931465 - RNA, 19 nt, Homo sapiens
  misc_RNA (1)...(19): siRNA sense strand
gcacucagccggcagauug

SEQ ID NO: 1931466 - RNA, 19 nt, Homo sapiens
  misc_RNA (1)...(19): siRNA sense strand
aagaggagcugcaagauau

SEQ ID NO: 1931467 - RNA, 19 nt, Homo sapiens
  misc_RNA (1)...(19): siRNA sense strand
caaagcaguugucucaaga

SEQ ID NO: 1931468 - RNA, 19 nt, Homo sapiens
  misc_RNA (1)...(19): siRNA sense strand
ugaaagccauugaggauga

SEQ ID NO: 1931469 - RNA, 19 nt, Homo sapiens
  misc_RNA (1)...(19): siRNA sense strand
gcagauugaugaguuagaa

SEQ ID NO: 1931470 - RNA, 19 nt, Homo sapiens
  misc_RNA (1)...(19): siRNA sense strand
acaaacaggucuuuacgaa

SEQ ID NO: 1931471 - RNA, 19 nt, Homo sapiens
  misc_RNA (1)...(19): siRNA sense strand
gcacagcucacccuucaaa

SEQ ID NO: 1931472 - RNA, 19 nt, Homo sapiens
  misc_RNA (1)...(19): siRNA sense strand
gcuaauugaucaagaaauc

SEQ ID NO: 1931473 - RNA, 19 nt, Homo sapiens
  misc_RNA (1)...(19): siRNA sense strand
uccaagagcugaccacaaa

SEQ ID NO: 1931474 - RNA, 19 nt, Homo sapiens
  misc_RNA (1)...(19): siRNA sense strand
gaccacaaaugcaaaggaa

SEQ ID NO: 1931475 - RNA, 19 nt, Homo sapiens
  misc_RNA (1)...(19): siRNA sense strand
aagaaaggaugaccacaaa

SEQ ID NO: 1931476 - RNA, 19 nt, Homo sapiens
  misc_RNA (1)...(19): siRNA sense strand
aaacaggaacagagauuua

SEQ ID NO: 1931477 - RNA, 19 nt, Homo sapiens
  misc_RNA (1)...(19): siRNA sense strand
gugcagagaucucaauaag

SEQ ID NO: 1931478 - RNA, 19 nt, Homo sapiens
  misc_RNA (1)...(19): siRNA sense strand
ggagcucucucaagaagug

SEQ ID NO: 1931479 - RNA, 19 nt, Homo sapiens
  misc_RNA (1)...(19): siRNA sense strand
gaagagaaaggaaaugauc

SEQ ID NO: 1931480 - RNA, 19 nt, Homo sapiens
  misc_RNA (1)...(19): siRNA sense strand
agacagaauucacucuaaa

SEQ ID NO: 1931481 - RNA, 19 nt, Homo sapiens
  misc_RNA (1)...(19): siRNA sense strand
gaaagcggaagaagagaaa

SEQ ID NO: 1931482 - RNA, 19 nt, Homo sapiens
  misc_RNA (1)...(19): siRNA sense strand
gacugaaacugaagcuaaa

SEQ ID NO: 1931483 - RNA, 19 nt, Homo sapiens
  misc_RNA (1)...(19): siRNA sense strand
caaacuagcccuugcugaa

SEQ ID NO: 1931484 - RNA, 19 nt, Homo sapiens
  misc_RNA (1)...(19): siRNA sense strand
uggaaacgcugguaucaug

SEQ ID NO: 1931485 - RNA, 19 nt, Homo sapiens
  misc_RNA (1)...(19): siRNA sense strand
uaacugugauguuuguaga

SEQ ID NO: 1931486 - RNA, 19 nt, Homo sapiens
  misc_RNA (1)...(19): siRNA sense strand
gaagcuaaaggacaugaaa

SEQ ID NO: 1931487 - RNA, 19 nt, Homo sapiens
  misc_RNA (1)...(19): siRNA sense strand
caacagcauuacaccaaga

SEQ ID NO: 1931488 - RNA, 19 nt, Homo sapiens
  misc_RNA (1)...(19): siRNA sense strand
caaggagagagaugauuua

SEQ ID NO: 1931489 - RNA, 19 nt, Homo sapiens
  misc_RNA (1)...(19): siRNA sense strand
caaccagacuagagaagga

SEQ ID NO: 1931490 - RNA, 19 nt, Homo sapiens
  misc_RNA (1)...(19): siRNA sense strand
gucaagaguuaauauguug

SEQ ID NO: 1931491 - RNA, 19 nt, Homo sapiens
  misc_RNA (1)...(19): siRNA sense strand
aaacaggucuuuacgaaaa

SEQ ID NO: 1931492 - RNA, 19 nt, Homo sapiens
  misc_RNA (1)...(19): siRNA sense strand
ggaagaagagaaaggaaau

SEQ ID NO: 1931493 - RNA, 19 nt, Homo sapiens
  misc_RNA (1)...(19): siRNA sense strand
gcagaaggcaaccagacua

SEQ ID NO: 1931494 - RNA, 19 nt, Homo sapiens
  misc_RNA (1)...(19): siRNA sense strand
ccaaggagagagaugauuu

SEQ ID NO: 1931495 - RNA, 19 nt, Homo sapiens
  misc_RNA (1)...(19): siRNA sense strand
caaaaccgauguagaagaa

SEQ ID NO: 1931496 - RNA, 19 nt, Homo sapiens
  misc_RNA (1)...(19): siRNA sense strand
aaagggcgcucaaguccaa

SEQ ID NO: 1931497 - RNA, 19 nt, Homo sapiens
  misc_RNA (1)...(19): siRNA sense strand
caagaccaagacacaauua

SEQ ID NO: 1931498 - RNA, 19 nt, Homo sapiens
  misc_RNA (1)...(19): siRNA sense strand
cauggcaacugaagaccua

SEQ ID NO: 1931499 - RNA, 19 nt, Homo sapiens
  misc_RNA (1)...(19): siRNA sense strand
guggaaagacugaaacuga

SEQ ID NO: 1931500 - RNA, 19 nt, Homo sapiens
  misc_RNA (1)...(19): siRNA sense strand
ggaaauccacaacagcauu

SEQ ID NO: 1931501 - RNA, 19 nt, Homo sapiens
  misc_RNA (1)...(19): siRNA sense strand
gcuagaagccauugaaagu

SEQ ID NO: 1931502 - RNA, 19 nt, Homo sapiens
  misc_RNA (1)...(19): siRNA sense strand
gaaagggagacguuacaga

SEQ ID NO: 1931503 - RNA, 19 nt, Homo sapiens
  misc_RNA (1)...(19): siRNA sense strand
uggaagcaauugagaaaga

SEQ ID NO: 1931504 - RNA, 19 nt, Homo sapiens
  misc_RNA (1)...(19): siRNA sense strand
gaaugcuacucucugaaau

SEQ ID NO: 1931505 - RNA, 19 nt, Homo sapiens
  misc_RNA (1)...(19): siRNA sense strand
gcuacucucugaaaugcaa

SEQ ID NO: 1931506 - RNA, 19 nt, Homo sapiens
  misc_RNA (1)...(19): siRNA sense strand
cugaagaccuaauauguca

SEQ ID NO: 1931507 - RNA, 19 nt, Homo sapiens
  misc_RNA (1)...(19): siRNA sense strand
caacugaagaccuaauaug

SEQ ID NO: 1931508 - RNA, 19 nt, Homo sapiens
  misc_RNA (1)...(19): siRNA sense strand
ggaaaacaaugagugaaaa

SEQ ID NO: 1931509 - RNA, 19 nt, Homo sapiens
  misc_RNA (1)...(19): siRNA sense strand
aaacgcagaccacaaaguu

SEQ ID NO: 1931510 - RNA, 19 nt, Homo sapiens
  misc_RNA (1)...(19): siRNA sense strand
gagaaguggaugcauuaaa

SEQ ID NO: 1931511 - RNA, 19 nt, Homo sapiens
  misc_RNA (1)...(19): siRNA sense strand
uggaaagacugaaacugaa

SEQ ID NO: 1931512 - RNA, 19 nt, Homo sapiens
  misc_RNA (1)...(19): siRNA sense strand
ggaagcaauugagaaagau

SEQ ID NO: 1931513 - RNA, 19 nt, Homo sapiens
  misc_RNA (1)...(19): siRNA sense strand
guuuguagaugaacggaaa

SEQ ID NO: 1931514 - RNA, 19 nt, Homo sapiens
  misc_RNA (1)...(19): siRNA sense strand
cggcacagcucacccuuca

SEQ ID NO: 1931515 - RNA, 19 nt, Homo sapiens
  misc_RNA (1)...(19): siRNA sense strand
gaggagcagugcagagauc

SEQ ID NO: 1931516 - RNA, 19 nt, Homo sapiens
  misc_RNA (1)...(19): siRNA sense strand
gcuagaacauguuaaaaug

SEQ ID NO: 1931517 - RNA, 19 nt, Homo sapiens
  misc_RNA (1)...(19): siRNA sense strand
agacugaaacugaagcuaa

SEQ ID NO: 1931518 - RNA, 19 nt, Homo sapiens
  misc_RNA (1)...(19): siRNA sense strand
gagcugaccacaaaugcaa

SEQ ID NO: 1931519 - RNA, 19 nt, Homo sapiens
  misc_RNA (1)...(19): siRNA sense strand
aaagagcuagaacauguua

SEQ ID NO: 1931520 - RNA, 19 nt, Homo sapiens
  misc_RNA (1)...(19): siRNA sense strand
aaaggaaacacauaccaaa

SEQ ID NO: 1931521 - RNA, 19 nt, Homo sapiens
  misc_RNA (1)...(19): siRNA sense strand
augaauacauggcaacuga

SEQ ID NO: 1931522 - RNA, 19 nt, Homo sapiens
  misc_RNA (1)...(19): siRNA sense strand
aagagaaguggaugcauua

SEQ ID NO: 1931523 - RNA, 19 nt, Homo sapiens
  misc_RNA (1)...(19): siRNA sense strand
aagacagaauucacucuaa

SEQ ID NO: 1931524 - RNA, 19 nt, Homo sapiens
  misc_RNA (1)...(19): siRNA sense strand
agggagacguuacagagua

SEQ ID NO: 1931525 - RNA, 19 nt, Homo sapiens
  misc_RNA (1)...(19): siRNA sense strand
caaaggaaacacauaccaa

SEQ ID NO: 1931526 - RNA, 19 nt, Homo sapiens
  misc_RNA (1)...(19): siRNA sense strand
ggugguggaugaacagcaa

SEQ ID NO: 1931527 - RNA, 19 nt, Homo sapiens
  misc_RNA (1)...(19): siRNA sense strand
uagaagacgcuuucaacaa

SEQ ID NO: 1931528 - RNA, 19 nt, Homo sapiens
  misc_RNA (1)...(19): siRNA sense strand
agaaguggaugcauuaaaa

SEQ ID NO: 1931529 - RNA, 19 nt, Homo sapiens
  misc_RNA (1)...(19): siRNA sense strand
gagcuagaagccauugaaa

SEQ ID NO: 1931530 - RNA, 19 nt, Homo sapiens
  misc_RNA (1)...(19): siRNA sense strand
gaaaggaugaccacaaagc

SEQ ID NO: 1931531 - RNA, 19 nt, Homo sapiens
  misc_RNA (1)...(19): siRNA sense strand
cagaagaggagcugcaaga

SEQ ID NO: 1931532 - RNA, 19 nt, Homo sapiens
  misc_RNA (1)...(19): siRNA sense strand
gaagacgcuuucaacaaaa

SEQ ID NO: 1931533 - RNA, 19 nt, Homo sapiens
  misc_RNA (1)...(19): siRNA sense strand
gaccaagacacaauuaugg

SEQ ID NO: 1931534 - RNA, 19 nt, Homo sapiens
  misc_RNA (1)...(19): siRNA sense strand
caagagcugaccacaaaug

SEQ ID NO: 1931535 - RNA, 19 nt, Homo sapiens
  misc_RNA (1)...(19): siRNA sense strand
agacagagaccagccauga

SEQ ID NO: 1931536 - RNA, 19 nt, Homo sapiens
  misc_RNA (1)...(19): siRNA sense strand
aaagaaaggaugaccacaa

SEQ ID NO: 1931537 - RNA, 19 nt, Homo sapiens
  misc_RNA (1)...(19): siRNA sense strand
ugaaagaggagcugaccaa

SEQ ID NO: 1931538 - RNA, 19 nt, Homo sapiens
  misc_RNA (1)...(19): siRNA sense strand
caaacaggucuuuacgaaa

SEQ ID NO: 1931539 - RNA, 19 nt, Homo sapiens
  misc_RNA (1)...(19): siRNA sense strand
gccggcagauugaugaguu

SEQ ID NO: 1931540 - RNA, 19 nt, Homo sapiens
  misc_RNA (1)...(19): siRNA sense strand
ggaaaugaucuccugucaa

SEQ ID NO: 1931541 - RNA, 19 nt, Homo sapiens
  misc_RNA (1)...(19): siRNA sense strand
cauuaacugugauguuugu

SEQ ID NO: 1931542 - RNA, 19 nt, Homo sapiens
  misc_RNA (1)...(19): siRNA sense strand
gaggagaaggagcaagaaa

SEQ ID NO: 1931543 - RNA, 19 nt, Homo sapiens
  misc_RNA (1)...(19): siRNA sense strand
gaggagcugcaagauauaa

SEQ ID NO: 1931544 - RNA, 19 nt, Homo sapiens
  misc_RNA (1)...(19): siRNA sense strand
gaaaacaggaacagagauu

SEQ ID NO: 1931545 - RNA, 19 nt, Homo sapiens
  misc_RNA (1)...(19): siRNA sense strand
gagcagcccaggugcaugu

SEQ ID NO: 1931546 - RNA, 19 nt, Homo sapiens
  misc_RNA (1)...(19): siRNA sense strand
gcgcucggcuuuucuuuug

SEQ ID NO: 1931547 - RNA, 19 nt, Homo sapiens
  misc_RNA (1)...(19): siRNA sense strand
ggccguguguagccaaguu

SEQ ID NO: 1931548 - RNA, 19 nt, Homo sapiens
  misc_RNA (1)...(19): siRNA sense strand
cuucaggacauucagcaaa

SEQ ID NO: 1931549 - RNA, 19 nt, Homo sapiens
  misc_RNA (1)...(19): siRNA sense strand
ggcggaauacggcuucuuc

SEQ ID NO: 1931550 - RNA, 19 nt, Homo sapiens
  misc_RNA (1)...(19): siRNA sense strand
gaaccacucuggaacauuc

SEQ ID NO: 1931551 - RNA, 19 nt, Homo sapiens
  misc_RNA (1)...(19): siRNA sense strand
ccacagaaacuccaugaua

SEQ ID NO: 1931552 - RNA, 19 nt, Homo sapiens
  misc_RNA (1)...(19): siRNA sense strand
gagcaucacuguguaugaa

SEQ ID NO: 1931553 - RNA, 19 nt, Homo sapiens
  misc_RNA (1)...(19): siRNA sense strand
guaacacuguccagaauga

SEQ ID NO: 1931554 - RNA, 19 nt, Homo sapiens
  misc_RNA (1)...(19): siRNA sense strand
gagcaggucugugaugaug

SEQ ID NO: 1931555 - RNA, 19 nt, Homo sapiens
  misc_RNA (1)...(19): siRNA sense strand
gcaugaagguccacgugaa

SEQ ID NO: 1931556 - RNA, 19 nt, Homo sapiens
  misc_RNA (1)...(19): siRNA sense strand
ggacugaggagaagaacaa

SEQ ID NO: 1931557 - RNA, 19 nt, Homo sapiens
  misc_RNA (1)...(19): siRNA sense strand
ggaaaugaauggccguuac

SEQ ID NO: 1931558 - RNA, 19 nt, Homo sapiens
  misc_RNA (1)...(19): siRNA sense strand
gaacauucaggccaccaua

SEQ ID NO: 1931559 - RNA, 19 nt, Homo sapiens
  misc_RNA (1)...(19): siRNA sense strand
gaaaccaucguauguaaca

SEQ ID NO: 1931560 - RNA, 19 nt, Homo sapiens
  misc_RNA (1)...(19): siRNA sense strand
cagagaagcugcaguacag

SEQ ID NO: 1931561 - RNA, 19 nt, Homo sapiens
  misc_RNA (1)...(19): siRNA sense strand
cuggauggcugugaaauuu

SEQ ID NO: 1931562 - RNA, 19 nt, Homo sapiens
  misc_RNA (1)...(19): siRNA sense strand
caaccuggauggcugugaa

SEQ ID NO: 1931563 - RNA, 19 nt, Homo sapiens
  misc_RNA (1)...(19): siRNA sense strand
acacggagcugcccucuac

SEQ ID NO: 1931564 - RNA, 19 nt, Homo sapiens
  misc_RNA (1)...(19): siRNA sense strand
acacagagaagcugcagua

SEQ ID NO: 1931565 - RNA, 19 nt, Homo sapiens
  misc_RNA (1)...(19): siRNA sense strand
gaaccaacggcgucccuuu

SEQ ID NO: 1931566 - RNA, 19 nt, Homo sapiens
  misc_RNA (1)...(19): siRNA sense strand
gggaugauguggagaccuu

SEQ ID NO: 1931567 - RNA, 19 nt, Homo sapiens
  misc_RNA (1)...(19): siRNA sense strand
aggaaaccaucguauguaa

SEQ ID NO: 1931568 - RNA, 19 nt, Homo sapiens
  misc_RNA (1)...(19): siRNA sense strand
gaggaaaccaucguaugua

SEQ ID NO: 1931569 - RNA, 19 nt, Homo sapiens
  misc_RNA (1)...(19): siRNA sense strand
ggaagaggaaaccaucgua

SEQ ID NO: 1931570 - RNA, 19 nt, Homo sapiens
  misc_RNA (1)...(19): siRNA sense strand
ucaacgaugugaacgaguu

SEQ ID NO: 1931571 - RNA, 19 nt, Homo sapiens
  misc_RNA (1)...(19): siRNA sense strand
ucaaaucaccugcuccauu

SEQ ID NO: 1931572 - RNA, 19 nt, Homo sapiens
  misc_RNA (1)...(19): siRNA sense strand
gcccagcuguggacuuuga

SEQ ID NO: 1931573 - RNA, 19 nt, Homo sapiens
  misc_RNA (1)...(19): siRNA sense strand
gcugggagcuuggcuuugu

SEQ ID NO: 1931574 - RNA, 19 nt, Homo sapiens
  misc_RNA (1)...(19): siRNA sense strand
gggcuggacuauagggauu

SEQ ID NO: 1931575 - RNA, 19 nt, Homo sapiens
  misc_RNA (1)...(19): siRNA sense strand
guccacggcuguaggauug

SEQ ID NO: 1931576 - RNA, 19 nt, Homo sapiens
  misc_RNA (1)...(19): siRNA sense strand
gaagaggaaaccaucguau

SEQ ID NO: 1931577 - RNA, 19 nt, Homo sapiens
  misc_RNA (1)...(19): siRNA sense strand
caugaacacucugcgcuuu

SEQ ID NO: 1931578 - RNA, 19 nt, Homo sapiens
  misc_RNA (1)...(19): siRNA sense strand
ccgcaacccucaucauugu

SEQ ID NO: 1931579 - RNA, 19 nt, Homo sapiens
  misc_RNA (1)...(19): siRNA sense strand
cacagaaacuccaugauac

SEQ ID NO: 1931580 - RNA, 19 nt, Homo sapiens
  misc_RNA (1)...(19): siRNA sense strand
caacaccccuuuccucauu

SEQ ID NO: 1931581 - RNA, 19 nt, Homo sapiens
  misc_RNA (1)...(19): siRNA sense strand
gaacaaaaggaucgaauau

SEQ ID NO: 1931582 - RNA, 19 nt, Homo sapiens
  misc_RNA (1)...(19): siRNA sense strand
gaugaagcauggcguaacu

SEQ ID NO: 1931583 - RNA, 19 nt, Homo sapiens
  misc_RNA (1)...(19): siRNA sense strand
gcaucacuguguaugaaga

SEQ ID NO: 1931584 - RNA, 19 nt, Homo sapiens
  misc_RNA (1)...(19): siRNA sense strand
gcugugaccgugacaacua

SEQ ID NO: 1931585 - RNA, 19 nt, Homo sapiens
  misc_RNA (1)...(19): siRNA sense strand
acacacgcaugucggauga

SEQ ID NO: 1931586 - RNA, 19 nt, Homo sapiens
  misc_RNA (1)...(19): siRNA sense strand
ggagacaacaguacagaca

SEQ ID NO: 1931587 - RNA, 19 nt, Homo sapiens
  misc_RNA (1)...(19): siRNA sense strand
gaggacggcuucucucacu

SEQ ID NO: 1931588 - RNA, 19 nt, Homo sapiens
  misc_RNA (1)...(19): siRNA sense strand
gaagaacaaagagaaggaa

SEQ ID NO: 1931589 - RNA, 19 nt, Homo sapiens
  misc_RNA (1)...(19): siRNA sense strand
ggagaccugugaugaacca

SEQ ID NO: 1931590 - RNA, 19 nt, Homo sapiens
  misc_RNA (1)...(19): siRNA sense strand
ggauggcugugaaauuucu

SEQ ID NO: 1931591 - RNA, 19 nt, Homo sapiens
  misc_RNA (1)...(19): siRNA sense strand
ggucaucgagugccucuau

SEQ ID NO: 1931592 - RNA, 19 nt, Homo sapiens
  misc_RNA (1)...(19): siRNA sense strand
gaaaagggagacaacagua

SEQ ID NO: 1931593 - RNA, 19 nt, Homo sapiens
  misc_RNA (1)...(19): siRNA sense strand
gcaggucugugaugaugag

SEQ ID NO: 1931594 - RNA, 19 nt, Homo sapiens
  misc_RNA (1)...(19): siRNA sense strand
cuagccagcucccacagaa

SEQ ID NO: 1931595 - RNA, 19 nt, Homo sapiens
  misc_RNA (1)...(19): siRNA sense strand
gcuuaugacugugggaaga

SEQ ID NO: 1931596 - RNA, 19 nt, Homo sapiens
  misc_RNA (1)...(19): siRNA sense strand
uggcguaacucccaacaag

SEQ ID NO: 1931597 - RNA, 19 nt, Homo sapiens
  misc_RNA (1)...(19): siRNA sense strand
caacggcgucccuuuguuc

SEQ ID NO: 1931598 - RNA, 19 nt, Homo sapiens
  misc_RNA (1)...(19): siRNA sense strand
ccaacggcgucccuuuguu

SEQ ID NO: 1931599 - RNA, 19 nt, Homo sapiens
  misc_RNA (1)...(19): siRNA sense strand
caacacgguccuacugaau

SEQ ID NO: 1931600 - RNA, 19 nt, Homo sapiens
  misc_RNA (1)...(19): siRNA sense strand
caacaagggcaagaaggaa

SEQ ID NO: 1931601 - RNA, 19 nt, Homo sapiens
  misc_RNA (1)...(19): siRNA sense strand
cagaucugcuacuaugaga

SEQ ID NO: 1931602 - RNA, 19 nt, Homo sapiens
  misc_RNA (1)...(19): siRNA sense strand
aaucggcaguccuguguga

SEQ ID NO: 1931603 - RNA, 19 nt, Homo sapiens
  misc_RNA (1)...(19): siRNA sense strand
guggagagcaucacugugu

SEQ ID NO: 1931604 - RNA, 19 nt, Homo sapiens
  misc_RNA (1)...(19): siRNA sense strand
ccgcccagcuguggacuuu

SEQ ID NO: 1931605 - RNA, 19 nt, Homo sapiens
  misc_RNA (1)...(19): siRNA sense strand
agccagaucugcuacuaug

SEQ ID NO: 1931606 - RNA, 19 nt, Homo sapiens
  misc_RNA (1)...(19): siRNA sense strand
gacaacacgguccuacuga

SEQ ID NO: 1931607 - RNA, 19 nt, Homo sapiens
  misc_RNA (1)...(19): siRNA sense strand
gggaggggcuggacuauag

SEQ ID NO: 1931608 - RNA, 19 nt, Homo sapiens
  misc_RNA (1)...(19): siRNA sense strand
gaggagaagaacaaagaga

SEQ ID NO: 1931609 - RNA, 19 nt, Homo sapiens
  misc_RNA (1)...(19): siRNA sense strand
gcagccugaucuacugguu

SEQ ID NO: 1931610 - RNA, 19 nt, Homo sapiens
  misc_RNA (1)...(19): siRNA sense strand
ggaacaaaaggaucgaaua

SEQ ID NO: 1931611 - RNA, 19 nt, Homo sapiens
  misc_RNA (1)...(19): siRNA sense strand
gaagaagcgggcagcagau

SEQ ID NO: 1931612 - RNA, 19 nt, Homo sapiens
  misc_RNA (1)...(19): siRNA sense strand
ggccguuacuccagcaaug

SEQ ID NO: 1931613 - RNA, 19 nt, Homo sapiens
  misc_RNA (1)...(19): siRNA sense strand
gaaaugaauggccguuacu

SEQ ID NO: 1931614 - RNA, 19 nt, Homo sapiens
  misc_RNA (1)...(19): siRNA sense strand
ggagagcaucacuguguau

SEQ ID NO: 1931615 - RNA, 19 nt, Homo sapiens
  misc_RNA (1)...(19): siRNA sense strand
acaacacgguccuacugaa

SEQ ID NO: 1931616 - RNA, 19 nt, Homo sapiens
  misc_RNA (1)...(19): siRNA sense strand
gaaugaggacggcuucucu

SEQ ID NO: 1931617 - RNA, 19 nt, Homo sapiens
  misc_RNA (1)...(19): siRNA sense strand
ccaacaagggcaagaagga

SEQ ID NO: 1931618 - RNA, 19 nt, Homo sapiens
  misc_RNA (1)...(19): siRNA sense strand
uggcaaggcuggaacaaaa

SEQ ID NO: 1931619 - RNA, 19 nt, Homo sapiens
  misc_RNA (1)...(19): siRNA sense strand
gaagcgggcagcagaugau

SEQ ID NO: 1931620 - RNA, 19 nt, Homo sapiens
  misc_RNA (1)...(19): siRNA sense strand
gugaugaaccacucuggaa

SEQ ID NO: 1931621 - RNA, 19 nt, Homo sapiens
  misc_RNA (1)...(19): siRNA sense strand
uggagagcaucacugugua

SEQ ID NO: 1931622 - RNA, 19 nt, Homo sapiens
  misc_RNA (1)...(19): siRNA sense strand
ggagaagaacaaagagaag

SEQ ID NO: 1931623 - RNA, 19 nt, Homo sapiens
  misc_RNA (1)...(19): siRNA sense strand
gcaagaaggaagaggaaac

SEQ ID NO: 1931624 - RNA, 19 nt, Homo sapiens
  misc_RNA (1)...(19): siRNA sense strand
cucuauaaguuuacaguga

SEQ ID NO: 1931625 - RNA, 19 nt, Homo sapiens
  misc_RNA (1)...(19): siRNA sense strand
ggauugccuuccucuacug

SEQ ID NO: 1931626 - RNA, 19 nt, Homo sapiens
  misc_RNA (1)...(19): siRNA sense strand
gaugaaccacucuggaaca

SEQ ID NO: 1931627 - RNA, 19 nt, Homo sapiens
  misc_RNA (1)...(19): siRNA sense strand
uuacagugacagcuuauga

SEQ ID NO: 1931628 - RNA, 19 nt, Homo sapiens
  misc_RNA (1)...(19): siRNA sense strand
agaggaaaccaucguaugu

SEQ ID NO: 1931629 - RNA, 19 nt, Homo sapiens
  misc_RNA (1)...(19): siRNA sense strand
caaggacccagaccucuuc

SEQ ID NO: 1931630 - RNA, 19 nt, Homo sapiens
  misc_RNA (1)...(19): siRNA sense strand
gggcaagaaggaagaggaa

SEQ ID NO: 1931631 - RNA, 19 nt, Homo sapiens
  misc_RNA (1)...(19): siRNA sense strand
uggcuuacaugaacacucu

SEQ ID NO: 1931632 - RNA, 19 nt, Homo sapiens
  misc_RNA (1)...(19): siRNA sense strand
caacgaugugaacgaguuu

SEQ ID NO: 1931633 - RNA, 19 nt, Homo sapiens
  misc_RNA (1)...(19): siRNA sense strand
cauccaggccuaugacugu

SEQ ID NO: 1931634 - RNA, 19 nt, Homo sapiens
  misc_RNA (1)...(19): siRNA sense strand
ucaauguccugcacagcau

SEQ ID NO: 1931635 - RNA, 19 nt, Homo sapiens
  misc_RNA (1)...(19): siRNA sense strand
ugacaacacgguccuacug

SEQ ID NO: 1931636 - RNA, 19 nt, Homo sapiens
  misc_RNA (1)...(19): siRNA sense strand
ccucaccacugcugucaag

SEQ ID NO: 1931637 - RNA, 19 nt, Homo sapiens
  misc_RNA (1)...(19): siRNA sense strand
uggagcaggucugugauga

SEQ ID NO: 1931638 - RNA, 19 nt, Homo sapiens
  misc_RNA (1)...(19): siRNA sense strand
augcugagguggagauuca

SEQ ID NO: 1931639 - RNA, 19 nt, Homo sapiens
  misc_RNA (1)...(19): siRNA sense strand
aguuuacagugacagcuua

SEQ ID NO: 1931640 - RNA, 19 nt, Homo sapiens
  misc_RNA (1)...(19): siRNA sense strand
acagccagaucugcuacua

SEQ ID NO: 1931641 - RNA, 19 nt, Homo sapiens
  misc_RNA (1)...(19): siRNA sense strand
gcucagcucccagcaguuc

SEQ ID NO: 1931642 - RNA, 19 nt, Homo sapiens
  misc_RNA (1)...(19): siRNA sense strand
ggucuggggugcccuuuga

SEQ ID NO: 1931643 - RNA, 19 nt, Homo sapiens
  misc_RNA (1)...(19): siRNA sense strand
gcaugucggaugagauugu

SEQ ID NO: 1931644 - RNA, 19 nt, Homo sapiens
  misc_RNA (1)...(19): siRNA sense strand
caaggccacugugcaugug

SEQ ID NO: 1931645 - RNA, 19 nt, Homo sapiens
  misc_RNA (1)...(19): siRNA sense strand
ggacagcagccugaucuac

SEQ ID NO: 1931646 - RNA, 19 nt, Homo sapiens
  misc_RNA (1)...(19): siRNA sense strand
aagcacaagccauggauug

SEQ ID NO: 1931647 - RNA, 19 nt, Homo sapiens
  misc_RNA (1)...(19): siRNA sense strand
uauguaacacuguccagaa

SEQ ID NO: 1931648 - RNA, 19 nt, Homo sapiens
  misc_RNA (1)...(19): siRNA sense strand
gccgcaacccucaucauug

SEQ ID NO: 1931649 - RNA, 19 nt, Homo sapiens
  misc_RNA (1)...(19): siRNA sense strand
ccaaggacccagaccucuu

SEQ ID NO: 1931650 - RNA, 19 nt, Homo sapiens
  misc_RNA (1)...(19): siRNA sense strand
gcaaagagccagccaaugu

SEQ ID NO: 1931651 - RNA, 19 nt, Homo sapiens
  misc_RNA (1)...(19): siRNA sense strand
ggacaucgucuucuccaaa

SEQ ID NO: 1931652 - RNA, 19 nt, Homo sapiens
  misc_RNA (1)...(19): siRNA sense strand
gggccaagcugugcaagga

SEQ ID NO: 1931653 - RNA, 19 nt, Homo sapiens
  misc_RNA (1)...(19): siRNA sense strand
acaaggagcgcuucgauga

SEQ ID NO: 1931654 - RNA, 19 nt, Homo sapiens
  misc_RNA (1)...(19): siRNA sense strand
gacaucgucuucuccaaag

SEQ ID NO: 1931655 - RNA, 19 nt, Homo sapiens
  misc_RNA (1)...(19): siRNA sense strand
gaagucugcucgggucauc

SEQ ID NO: 1931656 - RNA, 19 nt, Homo sapiens
  misc_RNA (1)...(19): siRNA sense strand
ugacggacaccagcagaua

SEQ ID NO: 1931657 - RNA, 19 nt, Homo sapiens
  misc_RNA (1)...(19): siRNA sense strand
caaagagccagccaaugug

SEQ ID NO: 1931658 - RNA, 19 nt, Homo sapiens
  misc_RNA (1)...(19): siRNA sense strand
aaggagcgcuucgaugaga

SEQ ID NO: 1931659 - RNA, 19 nt, Homo sapiens
  misc_RNA (1)...(19): siRNA sense strand
ccaaugugggcgucacuaa

SEQ ID NO: 1931660 - RNA, 19 nt, Homo sapiens
  misc_RNA (1)...(19): siRNA sense strand
caaugugggcgucacuaaa

SEQ ID NO: 1931661 - RNA, 19 nt, Homo sapiens
  misc_RNA (1)...(19): siRNA sense strand
cugcucgggucaucaacua

SEQ ID NO: 1931662 - RNA, 19 nt, Homo sapiens
  misc_RNA (1)...(19): siRNA sense strand
cgugagcgccuacaagaau

SEQ ID NO: 1931663 - RNA, 19 nt, Homo sapiens
  misc_RNA (1)...(19): siRNA sense strand
gggcgucacuaaagcaaaa

SEQ ID NO: 1931664 - RNA, 19 nt, Homo sapiens
  misc_RNA (1)...(19): siRNA sense strand
ccacaaggagcgcuucgau

SEQ ID NO: 1931665 - RNA, 19 nt, Homo sapiens
  misc_RNA (1)...(19): siRNA sense strand
gugagcgccuacaagaaug

SEQ ID NO: 1931666 - RNA, 19 nt, Homo sapiens
  misc_RNA (1)...(19): siRNA sense strand
acuaugaggaguucaagaa

SEQ ID NO: 1931667 - RNA, 19 nt, Homo sapiens
  misc_RNA (1)...(19): siRNA sense strand
agagaugaauggcaagaac

SEQ ID NO: 1931668 - RNA, 19 nt, Homo sapiens
  misc_RNA (1)...(19): siRNA sense strand
gaaugcaggcaccuacgau

SEQ ID NO: 1931669 - RNA, 19 nt, Homo sapiens
  misc_RNA (1)...(19): siRNA sense strand
ggacauccuggacgacagu

SEQ ID NO: 1931670 - RNA, 19 nt, Homo sapiens
  misc_RNA (1)...(19): siRNA sense strand
gcucgggucaucaacuaug

SEQ ID NO: 1931671 - RNA, 19 nt, Homo sapiens
  misc_RNA (1)...(19): siRNA sense strand
caagagaugaauggcaaga

SEQ ID NO: 1931672 - RNA, 19 nt, Homo sapiens
  misc_RNA (1)...(19): siRNA sense strand
augccaaggugaagaagug

SEQ ID NO: 1931673 - RNA, 19 nt, Homo sapiens
  misc_RNA (1)...(19): siRNA sense strand
uacgugagcgccuacaaga

SEQ ID NO: 1931674 - RNA, 19 nt, Homo sapiens
  misc_RNA (1)...(19): siRNA sense strand
gauacacgggcucccacaa

SEQ ID NO: 1931675 - RNA, 19 nt, Homo sapiens
  misc_RNA (1)...(19): siRNA sense strand
gcaagaacugggccaagcu

SEQ ID NO: 1931676 - RNA, 19 nt, Homo sapiens
  misc_RNA (1)...(19): siRNA sense strand
gcaaagagccagccaaugu

SEQ ID NO: 1931677 - RNA, 19 nt, Homo sapiens
  misc_RNA (1)...(19): siRNA sense strand
ggacaucgucuucuccaaa

SEQ ID NO: 1931678 - RNA, 19 nt, Homo sapiens
  misc_RNA (1)...(19): siRNA sense strand
gggccaagcugugcaagga

SEQ ID NO: 1931679 - RNA, 19 nt, Homo sapiens
  misc_RNA (1)...(19): siRNA sense strand
acaaggagcgcuucgauga

SEQ ID NO: 1931680 - RNA, 19 nt, Homo sapiens
  misc_RNA (1)...(19): siRNA sense strand
gacaucgucuucuccaaag

SEQ ID NO: 1931681 - RNA, 19 nt, Homo sapiens
  misc_RNA (1)...(19): siRNA sense strand
gaagucugcucgggucauc

SEQ ID NO: 1931682 - RNA, 19 nt, Homo sapiens
  misc_RNA (1)...(19): siRNA sense strand
ugacggacaccagcagaua

SEQ ID NO: 1931683 - RNA, 19 nt, Homo sapiens
  misc_RNA (1)...(19): siRNA sense strand
caaagagccagccaaugug

SEQ ID NO: 1931684 - RNA, 19 nt, Homo sapiens
  misc_RNA (1)...(19): siRNA sense strand
aaggagcgcuucgaugaga

SEQ ID NO: 1931685 - RNA, 19 nt, Homo sapiens
  misc_RNA (1)...(19): siRNA sense strand
ccaaugugggcgucacuaa

SEQ ID NO: 1931686 - RNA, 19 nt, Homo sapiens
  misc_RNA (1)...(19): siRNA sense strand
caaugugggcgucacuaaa

SEQ ID NO: 1931687 - RNA, 19 nt, Homo sapiens
  misc_RNA (1)...(19): siRNA sense strand
cugcucgggucaucaacua

SEQ ID NO: 1931688 - RNA, 19 nt, Homo sapiens
  misc_RNA (1)...(19): siRNA sense strand
cgugagcgccuacaagaau

SEQ ID NO: 1931689 - RNA, 19 nt, Homo sapiens
  misc_RNA (1)...(19): siRNA sense strand
gggcgucacuaaagcaaaa

SEQ ID NO: 1931690 - RNA, 19 nt, Homo sapiens
  misc_RNA (1)...(19): siRNA sense strand
ccacaaggagcgcuucgau

SEQ ID NO: 1931691 - RNA, 19 nt, Homo sapiens
  misc_RNA (1)...(19): siRNA sense strand
gugagcgccuacaagaaug

SEQ ID NO: 1931692 - RNA, 19 nt, Homo sapiens
  misc_RNA (1)...(19): siRNA sense strand
acuaugaggaguucaagaa

SEQ ID NO: 1931693 - RNA, 19 nt, Homo sapiens
  misc_RNA (1)...(19): siRNA sense strand
agagaugaauggcaagaac

SEQ ID NO: 1931694 - RNA, 19 nt, Homo sapiens
  misc_RNA (1)...(19): siRNA sense strand
gaaugcaggcaccuacgau

SEQ ID NO: 1931695 - RNA, 19 nt, Homo sapiens
  misc_RNA (1)...(19): siRNA sense strand
ggacauccuggacgacagu

SEQ ID NO: 1931696 - RNA, 19 nt, Homo sapiens
  misc_RNA (1)...(19): siRNA sense strand
gcucgggucaucaacuaug

SEQ ID NO: 1931697 - RNA, 19 nt, Homo sapiens
  misc_RNA (1)...(19): siRNA sense strand
caagagaugaauggcaaga

SEQ ID NO: 1931698 - RNA, 19 nt, Homo sapiens
  misc_RNA (1)...(19): siRNA sense strand
augccaaggugaagaagug

SEQ ID NO: 1931699 - RNA, 19 nt, Homo sapiens
  misc_RNA (1)...(19): siRNA sense strand
uacgugagcgccuacaaga

SEQ ID NO: 1931700 - RNA, 19 nt, Homo sapiens
  misc_RNA (1)...(19): siRNA sense strand
gauacacgggcucccacaa

SEQ ID NO: 1931701 - RNA, 19 nt, Homo sapiens
  misc_RNA (1)...(19): siRNA sense strand
gcaagaacugggccaagcu

SEQ ID NO: 1931702 - RNA, 19 nt, Homo sapiens
  misc_RNA (1)...(19): siRNA sense strand
gaacauggcuucuugucua

SEQ ID NO: 1931703 - RNA, 19 nt, Homo sapiens
  misc_RNA (1)...(19): siRNA sense strand
caaguaagcucgacccuuu

SEQ ID NO: 1931704 - RNA, 19 nt, Homo sapiens
  misc_RNA (1)...(19): siRNA sense strand
gaacaacgaugaagaggau

SEQ ID NO: 1931705 - RNA, 19 nt, Homo sapiens
  misc_RNA (1)...(19): siRNA sense strand
ggacuggucucaccuuuau

SEQ ID NO: 1931706 - RNA, 19 nt, Homo sapiens
  misc_RNA (1)...(19): siRNA sense strand
gcacugaccuuccuuccaa

SEQ ID NO: 1931707 - RNA, 19 nt, Homo sapiens
  misc_RNA (1)...(19): siRNA sense strand
agagagaccugccaaguaa

SEQ ID NO: 1931708 - RNA, 19 nt, Homo sapiens
  misc_RNA (1)...(19): siRNA sense strand
gcaaguagcacagcaaauu

SEQ ID NO: 1931709 - RNA, 19 nt, Homo sapiens
  misc_RNA (1)...(19): siRNA sense strand
cuacaguucugauggcuua

SEQ ID NO: 1931710 - RNA, 19 nt, Homo sapiens
  misc_RNA (1)...(19): siRNA sense strand
ggacaucccaucaccuuaa

SEQ ID NO: 1931711 - RNA, 19 nt, Homo sapiens
  misc_RNA (1)...(19): siRNA sense strand
gaucagcucucuagacucu

SEQ ID NO: 1931712 - RNA, 19 nt, Homo sapiens
  misc_RNA (1)...(19): siRNA sense strand
guaagaacacuacugauga

SEQ ID NO: 1931713 - RNA, 19 nt, Homo sapiens
  misc_RNA (1)...(19): siRNA sense strand
gaagcgggaguacguguua

SEQ ID NO: 1931714 - RNA, 19 nt, Homo sapiens
  misc_RNA (1)...(19): siRNA sense strand
gaugagaugucaagcaaag

SEQ ID NO: 1931715 - RNA, 19 nt, Homo sapiens
  misc_RNA (1)...(19): siRNA sense strand
ucaacaagcugucggugaa

SEQ ID NO: 1931716 - RNA, 19 nt, Homo sapiens
  misc_RNA (1)...(19): siRNA sense strand
gaccugggccucuccaaua

SEQ ID NO: 1931717 - RNA, 19 nt, Homo sapiens
  misc_RNA (1)...(19): siRNA sense strand
gagcaacggugugaauuuc

SEQ ID NO: 1931718 - RNA, 19 nt, Homo sapiens
  misc_RNA (1)...(19): siRNA sense strand
gaaaggcccacucugaaga

SEQ ID NO: 1931719 - RNA, 19 nt, Homo sapiens
  misc_RNA (1)...(19): siRNA sense strand
ccacaaggaugagauguca

SEQ ID NO: 1931720 - RNA, 19 nt, Homo sapiens
  misc_RNA (1)...(19): siRNA sense strand
acaaggagccugauggaaa

SEQ ID NO: 1931721 - RNA, 19 nt, Homo sapiens
  misc_RNA (1)...(19): siRNA sense strand
gaugaccucucugacauug

SEQ ID NO: 1931722 - RNA, 19 nt, Homo sapiens
  misc_RNA (1)...(19): siRNA sense strand
caaggagccugauggaaag

SEQ ID NO: 1931723 - RNA, 19 nt, Homo sapiens
  misc_RNA (1)...(19): siRNA sense strand
ccacguggacccugcauuu

SEQ ID NO: 1931724 - RNA, 19 nt, Homo sapiens
  misc_RNA (1)...(19): siRNA sense strand
cagagagaccugccaagua

SEQ ID NO: 1931725 - RNA, 19 nt, Homo sapiens
  misc_RNA (1)...(19): siRNA sense strand
acaagcaguuugguguuua

SEQ ID NO: 1931726 - RNA, 19 nt, Homo sapiens
  misc_RNA (1)...(19): siRNA sense strand
gggcaaagcgaaacgcaaa

SEQ ID NO: 1931727 - RNA, 19 nt, Homo sapiens
  misc_RNA (1)...(19): siRNA sense strand
ugagaaacccuacaagugu

SEQ ID NO: 1931728 - RNA, 19 nt, Homo sapiens
  misc_RNA (1)...(19): siRNA sense strand
gcaagggcaaguucaagaa

SEQ ID NO: 1931729 - RNA, 19 nt, Homo sapiens
  misc_RNA (1)...(19): siRNA sense strand
caucagacuucuacaagca

SEQ ID NO: 1931730 - RNA, 19 nt, Homo sapiens
  misc_RNA (1)...(19): siRNA sense strand
agaaggacaugaaggacaa

SEQ ID NO: 1931731 - RNA, 19 nt, Homo sapiens
  misc_RNA (1)...(19): siRNA sense strand
gucagaagcugcaccagau

SEQ ID NO: 1931732 - RNA, 19 nt, Homo sapiens
  misc_RNA (1)...(19): siRNA sense strand
ccgcaucccuggaggagaa

SEQ ID NO: 1931733 - RNA, 19 nt, Homo sapiens
  misc_RNA (1)...(19): siRNA sense strand
aaagcgaaacgcaaagaua

SEQ ID NO: 1931734 - RNA, 19 nt, Homo sapiens
  misc_RNA (1)...(19): siRNA sense strand
aagcgaaacgcaaagauaa

SEQ ID NO: 1931735 - RNA, 19 nt, Homo sapiens
  misc_RNA (1)...(19): siRNA sense strand
caacaaggagccugaugga

SEQ ID NO: 1931736 - RNA, 19 nt, Homo sapiens
  misc_RNA (1)...(19): siRNA sense strand
ggaaaggcccacucugaag

SEQ ID NO: 1931737 - RNA, 19 nt, Homo sapiens
  misc_RNA (1)...(19): siRNA sense strand
gauacacacaggugagaaa

SEQ ID NO: 1931738 - RNA, 19 nt, Homo sapiens
  misc_RNA (1)...(19): siRNA sense strand
gugagaaacccuacaagug

SEQ ID NO: 1931739 - RNA, 19 nt, Homo sapiens
  misc_RNA (1)...(19): siRNA sense strand
uuagaaagcagucgggauu

SEQ ID NO: 1931740 - RNA, 19 nt, Homo sapiens
  misc_RNA (1)...(19): siRNA sense strand
ggccagacuugugugguaa

SEQ ID NO: 1931741 - RNA, 19 nt, Homo sapiens
  misc_RNA (1)...(19): siRNA sense strand
uaacuucccaucagacuuc

SEQ ID NO: 1931742 - RNA, 19 nt, Homo sapiens
  misc_RNA (1)...(19): siRNA sense strand
gcaaagcgaaacgcaaaga

SEQ ID NO: 1931743 - RNA, 19 nt, Homo sapiens
  misc_RNA (1)...(19): siRNA sense strand
gaggaggcccugcaucuca

SEQ ID NO: 1931744 - RNA, 19 nt, Homo sapiens
  misc_RNA (1)...(19): siRNA sense strand
gcacucccguguccacaag

SEQ ID NO: 1931745 - RNA, 19 nt, Homo sapiens
  misc_RNA (1)...(19): siRNA sense strand
gcaaauucuggauguauca

SEQ ID NO: 1931746 - RNA, 19 nt, Homo sapiens
  misc_RNA (1)...(19): siRNA sense strand
ggagaacaacgaugaagag

SEQ ID NO: 1931747 - RNA, 19 nt, Homo sapiens
  misc_RNA (1)...(19): siRNA sense strand
uacaagcaguuugguguuu

SEQ ID NO: 1931748 - RNA, 19 nt, Homo sapiens
  misc_RNA (1)...(19): siRNA sense strand
gcagucagcauccuuaaaa

SEQ ID NO: 1931749 - RNA, 19 nt, Homo sapiens
  misc_RNA (1)...(19): siRNA sense strand
aggaugagaugucaagcaa

SEQ ID NO: 1931750 - RNA, 19 nt, Homo sapiens
  misc_RNA (1)...(19): siRNA sense strand
caaaucaagaccacaagga

SEQ ID NO: 1931751 - RNA, 19 nt, Homo sapiens
  misc_RNA (1)...(19): siRNA sense strand
gaaaccgaaccggaaauga

SEQ ID NO: 1931752 - RNA, 19 nt, Homo sapiens
  misc_RNA (1)...(19): siRNA sense strand
uaagaacacuacugaugac

SEQ ID NO: 1931753 - RNA, 19 nt, Homo sapiens
  misc_RNA (1)...(19): siRNA sense strand
ggaugguggugaggagaaa

SEQ ID NO: 1931754 - RNA, 19 nt, Homo sapiens
  misc_RNA (1)...(19): siRNA sense strand
aagcuuucauggacaguuu

SEQ ID NO: 1931755 - RNA, 19 nt, Homo sapiens
  misc_RNA (1)...(19): siRNA sense strand
uaagcucgacccuuuagaa

SEQ ID NO: 1931756 - RNA, 19 nt, Homo sapiens
  misc_RNA (1)...(19): siRNA sense strand
gcaacggugugaauuucca

SEQ ID NO: 1931757 - RNA, 19 nt, Homo sapiens
  misc_RNA (1)...(19): siRNA sense strand
gaucggaagagcuuaucaa

SEQ ID NO: 1931758 - RNA, 19 nt, Homo sapiens
  misc_RNA (1)...(19): siRNA sense strand
gggcagaaccugggcauca

SEQ ID NO: 1931759 - RNA, 19 nt, Homo sapiens
  misc_RNA (1)...(19): siRNA sense strand
cagaggaaguccgagaaau

SEQ ID NO: 1931760 - RNA, 19 nt, Homo sapiens
  misc_RNA (1)...(19): siRNA sense strand
gggacuggucucaccuuua

SEQ ID NO: 1931761 - RNA, 19 nt, Homo sapiens
  misc_RNA (1)...(19): siRNA sense strand
gaagaaggagaaggacaug

SEQ ID NO: 1931762 - RNA, 19 nt, Homo sapiens
  misc_RNA (1)...(19): siRNA sense strand
agaaggagaaggacaugaa

SEQ ID NO: 1931763 - RNA, 19 nt, Homo sapiens
  misc_RNA (1)...(19): siRNA sense strand
gcaaccacgaagacacuuu

SEQ ID NO: 1931764 - RNA, 19 nt, Homo sapiens
  misc_RNA (1)...(19): siRNA sense strand
cacagcaaauucuggaugu

SEQ ID NO: 1931765 - RNA, 19 nt, Homo sapiens
  misc_RNA (1)...(19): siRNA sense strand
caaguagcacagcaaauuc

SEQ ID NO: 1931766 - RNA, 19 nt, Homo sapiens
  misc_RNA (1)...(19): siRNA sense strand
ggacaagccgaugaacaug

SEQ ID NO: 1931767 - RNA, 19 nt, Homo sapiens
  misc_RNA (1)...(19): siRNA sense strand
gggagaacaacgaugaaga

SEQ ID NO: 1931768 - RNA, 19 nt, Homo sapiens
  misc_RNA (1)...(19): siRNA sense strand
gaaaccacgaguaagaaca

SEQ ID NO: 1931769 - RNA, 19 nt, Homo sapiens
  misc_RNA (1)...(19): siRNA sense strand
ugagcaacggugugaauuu

SEQ ID NO: 1931770 - RNA, 19 nt, Homo sapiens
  misc_RNA (1)...(19): siRNA sense strand
gcaaagcuucucuguucau

SEQ ID NO: 1931771 - RNA, 19 nt, Homo sapiens
  misc_RNA (1)...(19): siRNA sense strand
gcagucggccaacgaguuc

SEQ ID NO: 1931772 - RNA, 19 nt, Homo sapiens
  misc_RNA (1)...(19): siRNA sense strand
aaaccgaaccggaaaugau

SEQ ID NO: 1931773 - RNA, 19 nt, Homo sapiens
  misc_RNA (1)...(19): siRNA sense strand
ugaagaggauguugaaacc

SEQ ID NO: 1931774 - RNA, 19 nt, Homo sapiens
  misc_RNA (1)...(19): siRNA sense strand
cuacugaugaccucucuga

SEQ ID NO: 1931775 - RNA, 19 nt, Homo sapiens
  misc_RNA (1)...(19): siRNA sense strand
gcucauggcccuucaucuc

SEQ ID NO: 1931776 - RNA, 19 nt, Homo sapiens
  misc_RNA (1)...(19): siRNA sense strand
caaagcuucucuguucauc

SEQ ID NO: 1931777 - RNA, 19 nt, Homo sapiens
  misc_RNA (1)...(19): siRNA sense strand
uaaagugggcagccagaga

SEQ ID NO: 1931778 - RNA, 19 nt, Homo sapiens
  misc_RNA (1)...(19): siRNA sense strand
caaccacgaagacacuuug

SEQ ID NO: 1931779 - RNA, 19 nt, Homo sapiens
  misc_RNA (1)...(19): siRNA sense strand
ucaagaaccacaugaaggu

SEQ ID NO: 1931780 - RNA, 19 nt, Homo sapiens
  misc_RNA (1)...(19): siRNA sense strand
aacauggcuucuugucuaa

SEQ ID NO: 1931781 - RNA, 19 nt, Homo sapiens
  misc_RNA (1)...(19): siRNA sense strand
aggccagacuuguguggua

SEQ ID NO: 1931782 - RNA, 19 nt, Homo sapiens
  misc_RNA (1)...(19): siRNA sense strand
gaaggagaaggacaugaag

SEQ ID NO: 1931783 - RNA, 19 nt, Homo sapiens
  misc_RNA (1)...(19): siRNA sense strand
ggugagaaacccuacaagu

SEQ ID NO: 1931784 - RNA, 19 nt, Homo sapiens
  misc_RNA (1)...(19): siRNA sense strand
gagcccugguuccucaaga

SEQ ID NO: 1931785 - RNA, 19 nt, Homo sapiens
  misc_RNA (1)...(19): siRNA sense strand
cagccagggucuucuccaa

SEQ ID NO: 1931786 - RNA, 19 nt, Homo sapiens
  misc_RNA (1)...(19): siRNA sense strand
cgaugaagaggauguugaa

SEQ ID NO: 1931787 - RNA, 19 nt, Homo sapiens
  misc_RNA (1)...(19): siRNA sense strand
gaggaaguccgagaaaucu

SEQ ID NO: 1931788 - RNA, 19 nt, Homo sapiens
  misc_RNA (1)...(19): siRNA sense strand
ccagaggaaguccgagaaa

SEQ ID NO: 1931789 - RNA, 19 nt, Homo sapiens
  misc_RNA (1)...(19): siRNA sense strand
guccucaguuccuugaaga

SEQ ID NO: 1931790 - RNA, 19 nt, Homo sapiens
  misc_RNA (1)...(19): siRNA sense strand
cgaggaggcugggagaucu

SEQ ID NO: 1931791 - RNA, 19 nt, Homo sapiens
  misc_RNA (1)...(19): siRNA sense strand
ugucugcccucagcaaaga

SEQ ID NO: 1931792 - RNA, 19 nt, Homo sapiens
  misc_RNA (1)...(19): siRNA sense strand
ggugugcggucagguguuc

SEQ ID NO: 1931793 - RNA, 19 nt, Homo sapiens
  misc_RNA (1)...(19): siRNA sense strand
cagcaaauucuggauguau

SEQ ID NO: 1931794 - RNA, 19 nt, Homo sapiens
  misc_RNA (1)...(19): siRNA sense strand
cugaugaccucucugacau

SEQ ID NO: 1931795 - RNA, 19 nt, Homo sapiens
  misc_RNA (1)...(19): siRNA sense strand
uggaaaggcccacucugaa

SEQ ID NO: 1931796 - RNA, 19 nt, Homo sapiens
  misc_RNA (1)...(19): siRNA sense strand
cagaagagcggugcaugga

SEQ ID NO: 1931797 - RNA, 19 nt, Homo sapiens
  misc_RNA (1)...(19): siRNA sense strand
cugggccucuccaauauga

SEQ ID NO: 1931798 - RNA, 19 nt, Homo sapiens
  misc_RNA (1)...(19): siRNA sense strand
cugcugcccucguuacaau

SEQ ID NO: 1931799 - RNA, 19 nt, Homo sapiens
  misc_RNA (1)...(19): siRNA sense strand
gcgaaacgcaaagauaaca

SEQ ID NO: 1931800 - RNA, 19 nt, Homo sapiens
  misc_RNA (1)...(19): siRNA sense strand
aaccggaaaugaugaccaa

SEQ ID NO: 1931801 - RNA, 19 nt, Homo sapiens
  misc_RNA (1)...(19): siRNA sense strand
ccaauaugaucagcucucu

SEQ ID NO: 1931802 - RNA, 19 nt, Homo sapiens
  misc_RNA (1)...(19): siRNA sense strand
gggaggaccugaacaagaa

SEQ ID NO: 1931803 - RNA, 19 nt, Homo sapiens
  misc_RNA (1)...(19): siRNA sense strand
gcaaccagcuggaguacaa

SEQ ID NO: 1931804 - RNA, 19 nt, Homo sapiens
  misc_RNA (1)...(19): siRNA sense strand
gcacacggcuuggcuggua

SEQ ID NO: 1931805 - RNA, 19 nt, Homo sapiens
  misc_RNA (1)...(19): siRNA sense strand
ggaaaccaccgcucuuuaa

SEQ ID NO: 1931806 - RNA, 19 nt, Homo sapiens
  misc_RNA (1)...(19): siRNA sense strand
gaaaaucccucaagacaga

SEQ ID NO: 1931807 - RNA, 19 nt, Homo sapiens
  misc_RNA (1)...(19): siRNA sense strand
gaaacauccugcugucaga

SEQ ID NO: 1931808 - RNA, 19 nt, Homo sapiens
  misc_RNA (1)...(19): siRNA sense strand
ggaagcaguuggagagaga

SEQ ID NO: 1931809 - RNA, 19 nt, Homo sapiens
  misc_RNA (1)...(19): siRNA sense strand
gcaguacgauggcaaagug

SEQ ID NO: 1931810 - RNA, 19 nt, Homo sapiens
  misc_RNA (1)...(19): siRNA sense strand
ccaccgcucuuuaacauga

SEQ ID NO: 1931811 - RNA, 19 nt, Homo sapiens
  misc_RNA (1)...(19): siRNA sense strand
ggcaagacaucaucaagga

SEQ ID NO: 1931812 - RNA, 19 nt, Homo sapiens
  misc_RNA (1)...(19): siRNA sense strand
gcaaggaacagcugaagga

SEQ ID NO: 1931813 - RNA, 19 nt, Homo sapiens
  misc_RNA (1)...(19): siRNA sense strand
gaggugcgguucuuacaga

SEQ ID NO: 1931814 - RNA, 19 nt, Homo sapiens
  misc_RNA (1)...(19): siRNA sense strand
gggaagcaguccaaugaga

SEQ ID NO: 1931815 - RNA, 19 nt, Homo sapiens
  misc_RNA (1)...(19): siRNA sense strand
cuacaaacuucgcaaggaa

SEQ ID NO: 1931816 - RNA, 19 nt, Homo sapiens
  misc_RNA (1)...(19): siRNA sense strand
gaaggauucugggaaagga

SEQ ID NO: 1931817 - RNA, 19 nt, Homo sapiens
  misc_RNA (1)...(19): siRNA sense strand
ucaagaagauguccuacag

SEQ ID NO: 1931818 - RNA, 19 nt, Homo sapiens
  misc_RNA (1)...(19): siRNA sense strand
caccugcccuccagucuuu

SEQ ID NO: 1931819 - RNA, 19 nt, Homo sapiens
  misc_RNA (1)...(19): siRNA sense strand
uggcugagcucuucuucaa

SEQ ID NO: 1931820 - RNA, 19 nt, Homo sapiens
  misc_RNA (1)...(19): siRNA sense strand
ggaagcaguccaaugagaa

SEQ ID NO: 1931821 - RNA, 19 nt, Homo sapiens
  misc_RNA (1)...(19): siRNA sense strand
cgacuccugucuucagaaa

SEQ ID NO: 1931822 - RNA, 19 nt, Homo sapiens
  misc_RNA (1)...(19): siRNA sense strand
cgagcuggcugaacggaaa

SEQ ID NO: 1931823 - RNA, 19 nt, Homo sapiens
  misc_RNA (1)...(19): siRNA sense strand
gaagcaguccaaugagaaa

SEQ ID NO: 1931824 - RNA, 19 nt, Homo sapiens
  misc_RNA (1)...(19): siRNA sense strand
gcucugacaaccuauauga

SEQ ID NO: 1931825 - RNA, 19 nt, Homo sapiens
  misc_RNA (1)...(19): siRNA sense strand
gaaggaggaugagagucuu

SEQ ID NO: 1931826 - RNA, 19 nt, Homo sapiens
  misc_RNA (1)...(19): siRNA sense strand
gaagcggaccuacaaacuu

SEQ ID NO: 1931827 - RNA, 19 nt, Homo sapiens
  misc_RNA (1)...(19): siRNA sense strand
ugaagaagauccuguucca

SEQ ID NO: 1931828 - RNA, 19 nt, Homo sapiens
  misc_RNA (1)...(19): siRNA sense strand
gagccugguugaugaggaa

SEQ ID NO: 1931829 - RNA, 19 nt, Homo sapiens
  misc_RNA (1)...(19): siRNA sense strand
gcacagaagcggaccuaca

SEQ ID NO: 1931830 - RNA, 19 nt, Homo sapiens
  misc_RNA (1)...(19): siRNA sense strand
gugggaagcaguccaauga

SEQ ID NO: 1931831 - RNA, 19 nt, Homo sapiens
  misc_RNA (1)...(19): siRNA sense strand
ggaaggaggaugagagucu

SEQ ID NO: 1931832 - RNA, 19 nt, Homo sapiens
  misc_RNA (1)...(19): siRNA sense strand
uaacaugaaugcgaugagu

SEQ ID NO: 1931833 - RNA, 19 nt, Homo sapiens
  misc_RNA (1)...(19): siRNA sense strand
gaaauggcaagacaucauc

SEQ ID NO: 1931834 - RNA, 19 nt, Homo sapiens
  misc_RNA (1)...(19): siRNA sense strand
cggcuuggcugguaaugga

SEQ ID NO: 1931835 - RNA, 19 nt, Homo sapiens
  misc_RNA (1)...(19): siRNA sense strand
gcccaagagccucaaagua

SEQ ID NO: 1931836 - RNA, 19 nt, Homo sapiens
  misc_RNA (1)...(19): siRNA sense strand
acaagaagcagacccagaa

SEQ ID NO: 1931837 - RNA, 19 nt, Homo sapiens
  misc_RNA (1)...(19): siRNA sense strand
agaagauccuguuccaaga

SEQ ID NO: 1931838 - RNA, 19 nt, Homo sapiens
  misc_RNA (1)...(19): siRNA sense strand
cuucaaggaugacccagaa

SEQ ID NO: 1931839 - RNA, 19 nt, Homo sapiens
  misc_RNA (1)...(19): siRNA sense strand
caacacccauuagcucugu

SEQ ID NO: 1931840 - RNA, 19 nt, Homo sapiens
  misc_RNA (1)...(19): siRNA sense strand
guagagaucgcagcuguga

SEQ ID NO: 1931841 - RNA, 19 nt, Homo sapiens
  misc_RNA (1)...(19): siRNA sense strand
ugugaaggcuggaaacauc

SEQ ID NO: 1931842 - RNA, 19 nt, Homo sapiens
  misc_RNA (1)...(19): siRNA sense strand
aagcggaccuacaaacuuc

SEQ ID NO: 1931843 - RNA, 19 nt, Homo sapiens
  misc_RNA (1)...(19): siRNA sense strand
ucaaggaggugcgguucuu

SEQ ID NO: 1931844 - RNA, 19 nt, Homo sapiens
  misc_RNA (1)...(19): siRNA sense strand
ccuccuaccugcuccuuug

SEQ ID NO: 1931845 - RNA, 19 nt, Homo sapiens
  misc_RNA (1)...(19): siRNA sense strand
ggaugagagucuucuggau

SEQ ID NO: 1931846 - RNA, 19 nt, Homo sapiens
  misc_RNA (1)...(19): siRNA sense strand
uaucugcacucccacaaca

SEQ ID NO: 1931847 - RNA, 19 nt, Homo sapiens
  misc_RNA (1)...(19): siRNA sense strand
ggaggaggaagaagaggaa

SEQ ID NO: 1931848 - RNA, 19 nt, Homo sapiens
  misc_RNA (1)...(19): siRNA sense strand
cugacaaccuauaugauga

SEQ ID NO: 1931849 - RNA, 19 nt, Homo sapiens
  misc_RNA (1)...(19): siRNA sense strand
ggaggaagaaggcccugaa

SEQ ID NO: 1931850 - RNA, 19 nt, Homo sapiens
  misc_RNA (1)...(19): siRNA sense strand
aaugagaaauggcaagaca

SEQ ID NO: 1931851 - RNA, 19 nt, Homo sapiens
  misc_RNA (1)...(19): siRNA sense strand
ggguuuagcaucccacuug

SEQ ID NO: 1931852 - RNA, 19 nt, Homo sapiens
  misc_RNA (1)...(19): siRNA sense strand
caggagaggagcauuguug

SEQ ID NO: 1931853 - RNA, 19 nt, Homo sapiens
  misc_RNA (1)...(19): siRNA sense strand
ugaccagccucgagaguag

SEQ ID NO: 1931854 - RNA, 19 nt, Homo sapiens
  misc_RNA (1)...(19): siRNA sense strand
cggaaaccaccgcucuuua

SEQ ID NO: 1931855 - RNA, 19 nt, Homo sapiens
  misc_RNA (1)...(19): siRNA sense strand
acacuggucugaguacuuc

SEQ ID NO: 1931856 - RNA, 19 nt, Homo sapiens
  misc_RNA (1)...(19): siRNA sense strand
ucucacagcuccauuaucc

SEQ ID NO: 1931857 - RNA, 19 nt, Homo sapiens
  misc_RNA (1)...(19): siRNA sense strand
gcugucagagccaggguua

SEQ ID NO: 1931858 - RNA, 19 nt, Homo sapiens
  misc_RNA (1)...(19): siRNA sense strand
ucugaguacuuccggaauu

SEQ ID NO: 1931859 - RNA, 19 nt, Homo sapiens
  misc_RNA (1)...(19): siRNA sense strand
gaggagauagaggagcuua

SEQ ID NO: 1931860 - RNA, 19 nt, Homo sapiens
  misc_RNA (1)...(19): siRNA sense strand
gcaguccaaugagaaaugg

SEQ ID NO: 1931861 - RNA, 19 nt, Homo sapiens
  misc_RNA (1)...(19): siRNA sense strand
augagagucuucuggauga

SEQ ID NO: 1931862 - RNA, 19 nt, Homo sapiens
  misc_RNA (1)...(19): siRNA sense strand
ccuacaaacuucgcaagga

SEQ ID NO: 1931863 - RNA, 19 nt, Homo sapiens
  misc_RNA (1)...(19): siRNA sense strand
cuuuggagccguauacuuu

SEQ ID NO: 1931864 - RNA, 19 nt, Homo sapiens
  misc_RNA (1)...(19): siRNA sense strand
cacagaagcggaccuacaa

SEQ ID NO: 1931865 - RNA, 19 nt, Homo sapiens
  misc_RNA (1)...(19): siRNA sense strand
cugaguacuuccggaauuu

SEQ ID NO: 1931866 - RNA, 19 nt, Homo sapiens
  misc_RNA (1)...(19): siRNA sense strand
uauaccacauugcacagaa

SEQ ID NO: 1931867 - RNA, 19 nt, Homo sapiens
  misc_RNA (1)...(19): siRNA sense strand
caaggaggugcgguucuua

SEQ ID NO: 1931868 - RNA, 19 nt, Homo sapiens
  misc_RNA (1)...(19): siRNA sense strand
gaaaccaccgcucuuuaac

SEQ ID NO: 1931869 - RNA, 19 nt, Homo sapiens
  misc_RNA (1)...(19): siRNA sense strand
gcauaucucgacucugguu

SEQ ID NO: 1931870 - RNA, 19 nt, Homo sapiens
  misc_RNA (1)...(19): siRNA sense strand
agacggagcugggcaacca

SEQ ID NO: 1931871 - RNA, 19 nt, Homo sapiens
  misc_RNA (1)...(19): siRNA sense strand
cagagguucuccugaagca

SEQ ID NO: 1931872 - RNA, 19 nt, Homo sapiens
  misc_RNA (1)...(19): siRNA sense strand
cccaagagccucaaaguac

SEQ ID NO: 1931873 - RNA, 19 nt, Homo sapiens
  misc_RNA (1)...(19): siRNA sense strand
ggaagaggaggaggaggaa

SEQ ID NO: 1931874 - RNA, 19 nt, Homo sapiens
  misc_RNA (1)...(19): siRNA sense strand
gaagaagauccuguuccaa

SEQ ID NO: 1931875 - RNA, 19 nt, Homo sapiens
  misc_RNA (1)...(19): siRNA sense strand
aaccaccgcucuuuaacau

SEQ ID NO: 1931876 - RNA, 19 nt, Homo sapiens
  misc_RNA (1)...(19): siRNA sense strand
gggucugccugaggagaua

SEQ ID NO: 1931877 - RNA, 19 nt, Homo sapiens
  misc_RNA (1)...(19): siRNA sense strand
gcaguuggagagagaagga

SEQ ID NO: 1931878 - RNA, 19 nt, Homo sapiens
  misc_RNA (1)...(19): siRNA sense strand
caacaagcggcgugagcaa

SEQ ID NO: 1931879 - RNA, 19 nt, Homo sapiens
  misc_RNA (1)...(19): siRNA sense strand
gaagauccuguuccaagag

SEQ ID NO: 1931880 - RNA, 19 nt, Homo sapiens
  misc_RNA (1)...(19): siRNA sense strand
uagcagaugccucagacaa

SEQ ID NO: 1931881 - RNA, 19 nt, Homo sapiens
  misc_RNA (1)...(19): siRNA sense strand
ggaggaggaagcaguugga

SEQ ID NO: 1931882 - RNA, 19 nt, Homo sapiens
  misc_RNA (1)...(19): siRNA sense strand
guacaagcgcaagauguug

SEQ ID NO: 1931883 - RNA, 19 nt, Homo sapiens
  misc_RNA (1)...(19): siRNA sense strand
ccacauugcacagaacgaa

SEQ ID NO: 1931884 - RNA, 19 nt, Homo sapiens
  misc_RNA (1)...(19): siRNA sense strand
ucucugaccuccgggaaau

SEQ ID NO: 1931885 - RNA, 19 nt, Homo sapiens
  misc_RNA (1)...(19): siRNA sense strand
agaagcagacccagaagga

SEQ ID NO: 1931886 - RNA, 19 nt, Homo sapiens
  misc_RNA (1)...(19): siRNA sense strand
gagcagcugagcggcuaua

SEQ ID NO: 1931887 - RNA, 19 nt, Homo sapiens
  misc_RNA (1)...(19): siRNA sense strand
ccacuuccaccaccucuuc

SEQ ID NO: 1931888 - RNA, 19 nt, Homo sapiens
  misc_RNA (1)...(19): siRNA sense strand
gggauguccggaauaguga

SEQ ID NO: 1931889 - RNA, 19 nt, Homo sapiens
  misc_RNA (1)...(19): siRNA sense strand
gcaccugcccuccagucuu

SEQ ID NO: 1931890 - RNA, 19 nt, Homo sapiens
  misc_RNA (1)...(19): siRNA sense strand
ucugacaaccuauaugaug

SEQ ID NO: 1931891 - RNA, 19 nt, Homo sapiens
  misc_RNA (1)...(19): siRNA sense strand
ggagauagaggagcuuagg

SEQ ID NO: 1931892 - RNA, 19 nt, Homo sapiens
  misc_RNA (1)...(19): siRNA sense strand
caugggagccugguugaug

SEQ ID NO: 1931893 - RNA, 19 nt, Homo sapiens
  misc_RNA (1)...(19): siRNA sense strand
caacacaggcaccccuaua

SEQ ID NO: 1931894 - RNA, 19 nt, Homo sapiens
  misc_RNA (1)...(19): siRNA sense strand
gacgacagcaccagaagca

SEQ ID NO: 1931895 - RNA, 19 nt, Homo sapiens
  misc_RNA (1)...(19): siRNA sense strand
ugagaaauggcaagacauc

SEQ ID NO: 1931896 - RNA, 19 nt, Homo sapiens
  misc_RNA (1)...(19): siRNA sense strand
gcaccacccaacacccauu

SEQ ID NO: 1931897 - RNA, 19 nt, Homo sapiens
  misc_RNA (1)...(19): siRNA sense strand
ggaugaggaguuugagcuu

SEQ ID NO: 1931898 - RNA, 19 nt, Homo sapiens
  misc_RNA (1)...(19): siRNA sense strand
agauguggcugagcucuuc

SEQ ID NO: 1931899 - RNA, 19 nt, Homo sapiens
  misc_RNA (1)...(19): siRNA sense strand
cggcagcgccaguacuuug

SEQ ID NO: 1931900 - RNA, 19 nt, Homo sapiens
  misc_RNA (1)...(19): siRNA sense strand
ggaggaagaagaggaagag

SEQ ID NO: 1931901 - RNA, 19 nt, Homo sapiens
  misc_RNA (1)...(19): siRNA sense strand
caccacccaacacccauua

SEQ ID NO: 1931902 - RNA, 19 nt, Homo sapiens
  misc_RNA (1)...(19): siRNA sense strand
gaacagaggucccggaaau

SEQ ID NO: 1931903 - RNA, 19 nt, Homo sapiens
  misc_RNA (1)...(19): siRNA sense strand
gaacacagagaaacaagua

SEQ ID NO: 1931904 - RNA, 19 nt, Homo sapiens
  misc_RNA (1)...(19): siRNA sense strand
ggagaggcaagaauuaaua

SEQ ID NO: 1931905 - RNA, 19 nt, Homo sapiens
  misc_RNA (1)...(19): siRNA sense strand
gcacaaagcaaagcaggua

SEQ ID NO: 1931906 - RNA, 19 nt, Homo sapiens
  misc_RNA (1)...(19): siRNA sense strand
aaacugguauggaagauau

SEQ ID NO: 1931907 - RNA, 19 nt, Homo sapiens
  misc_RNA (1)...(19): siRNA sense strand
ggacaaugcacaaagcaaa

SEQ ID NO: 1931908 - RNA, 19 nt, Homo sapiens
  misc_RNA (1)...(19): siRNA sense strand
caagaaaacugguauggaa

SEQ ID NO: 1931909 - RNA, 19 nt, Homo sapiens
  misc_RNA (1)...(19): siRNA sense strand
ccaaauggaguuaaagaaa

SEQ ID NO: 1931910 - RNA, 19 nt, Homo sapiens
  misc_RNA (1)...(19): siRNA sense strand
gcaaagcagguacuagaaa

SEQ ID NO: 1931911 - RNA, 19 nt, Homo sapiens
  misc_RNA (1)...(19): siRNA sense strand
gaacagacaauauuugcau

SEQ ID NO: 1931912 - RNA, 19 nt, Homo sapiens
  misc_RNA (1)...(19): siRNA sense strand
gaaauucaaaggauacaga

SEQ ID NO: 1931913 - RNA, 19 nt, Homo sapiens
  misc_RNA (1)...(19): siRNA sense strand
uaacugcugucccuggaaa

SEQ ID NO: 1931914 - RNA, 19 nt, Homo sapiens
  misc_RNA (1)...(19): siRNA sense strand
gcugccaccuuuacaagaa

SEQ ID NO: 1931915 - RNA, 19 nt, Homo sapiens
  misc_RNA (1)...(19): siRNA sense strand
gagaggcaagaauuaauaa

SEQ ID NO: 1931916 - RNA, 19 nt, Homo sapiens
  misc_RNA (1)...(19): siRNA sense strand
cauguugccugaugaaauc

SEQ ID NO: 1931917 - RNA, 19 nt, Homo sapiens
  misc_RNA (1)...(19): siRNA sense strand
aaacuccaauguauacuuc

SEQ ID NO: 1931918 - RNA, 19 nt, Homo sapiens
  misc_RNA (1)...(19): siRNA sense strand
acagagagaaucccacuuu

SEQ ID NO: 1931919 - RNA, 19 nt, Homo sapiens
  misc_RNA (1)...(19): siRNA sense strand
gacaagaggcccaaaugga

SEQ ID NO: 1931920 - RNA, 19 nt, Homo sapiens
  misc_RNA (1)...(19): siRNA sense strand
ccagagacauguauuuuga

SEQ ID NO: 1931921 - RNA, 19 nt, Homo sapiens
  misc_RNA (1)...(19): siRNA sense strand
caaggaaugaugaccauga

SEQ ID NO: 1931922 - RNA, 19 nt, Homo sapiens
  misc_RNA (1)...(19): siRNA sense strand
aaugcaaacuccaauguau

SEQ ID NO: 1931923 - RNA, 19 nt, Homo sapiens
  misc_RNA (1)...(19): siRNA sense strand
cacagagaaacaaguauua

SEQ ID NO: 1931924 - RNA, 19 nt, Homo sapiens
  misc_RNA (1)...(19): siRNA sense strand
ugacuugccacgaguaauu

SEQ ID NO: 1931925 - RNA, 19 nt, Homo sapiens
  misc_RNA (1)...(19): siRNA sense strand
caaagcagguacuagaaaa

SEQ ID NO: 1931926 - RNA, 19 nt, Homo sapiens
  misc_RNA (1)...(19): siRNA sense strand
uaaccauguugccugauga

SEQ ID NO: 1931927 - RNA, 19 nt, Homo sapiens
  misc_RNA (1)...(19): siRNA sense strand
ggcaagaauuaauaagcaa

SEQ ID NO: 1931928 - RNA, 19 nt, Homo sapiens
  misc_RNA (1)...(19): siRNA sense strand
cauggagaggcaagaauua

SEQ ID NO: 1931929 - RNA, 19 nt, Homo sapiens
  misc_RNA (1)...(19): siRNA sense strand
aaacaucaagcagugaaua

SEQ ID NO: 1931930 - RNA, 19 nt, Homo sapiens
  misc_RNA (1)...(19): siRNA sense strand
cauauucacuggcaagacu

SEQ ID NO: 1931931 - RNA, 19 nt, Homo sapiens
  misc_RNA (1)...(19): siRNA sense strand
acacagagaaacaaguauu

SEQ ID NO: 1931932 - RNA, 19 nt, Homo sapiens
  misc_RNA (1)...(19): siRNA sense strand
cagcuucucugggacaguu

SEQ ID NO: 1931933 - RNA, 19 nt, Homo sapiens
  misc_RNA (1)...(19): siRNA sense strand
ucaaucagaauuuggaaga

SEQ ID NO: 1931934 - RNA, 19 nt, Homo sapiens
  misc_RNA (1)...(19): siRNA sense strand
gacuuugcauucaaucaga

SEQ ID NO: 1931935 - RNA, 19 nt, Homo sapiens
  misc_RNA (1)...(19): siRNA sense strand
gaaaugauccguaaaagac

SEQ ID NO: 1931936 - RNA, 19 nt, Homo sapiens
  misc_RNA (1)...(19): siRNA sense strand
aagcaaagcagguacuaga

SEQ ID NO: 1931937 - RNA, 19 nt, Homo sapiens
  misc_RNA (1)...(19): siRNA sense strand
ggaagauauucuacagcau

SEQ ID NO: 1931938 - RNA, 19 nt, Homo sapiens
  misc_RNA (1)...(19): siRNA sense strand
aaacaaagagguagagacu

SEQ ID NO: 1931939 - RNA, 19 nt, Homo sapiens
  misc_RNA (1)...(19): siRNA sense strand
caaucagaauuuggaagaa

SEQ ID NO: 1931940 - RNA, 19 nt, Homo sapiens
  misc_RNA (1)...(19): siRNA sense strand
gagaacagacaauauuugc

SEQ ID NO: 1931941 - RNA, 19 nt, Homo sapiens
  misc_RNA (1)...(19): siRNA sense strand
ugaugaccaugaccuucua

SEQ ID NO: 1931942 - RNA, 19 nt, Homo sapiens
  misc_RNA (1)...(19): siRNA sense strand
gaaaagacuucauauucac

SEQ ID NO: 1931943 - RNA, 19 nt, Homo sapiens
  misc_RNA (1)...(19): siRNA sense strand
gaccaugaccuucuaacca

SEQ ID NO: 1931944 - RNA, 19 nt, Homo sapiens
  misc_RNA (1)...(19): siRNA sense strand
ugagaacagacaauauuug

SEQ ID NO: 1931945 - RNA, 19 nt, Homo sapiens
  misc_RNA (1)...(19): siRNA sense strand
caaagcaaagcagguacua

SEQ ID NO: 1931946 - RNA, 19 nt, Homo sapiens
  misc_RNA (1)...(19): siRNA sense strand
gaaugaugaccaugaccuu

SEQ ID NO: 1931947 - RNA, 19 nt, Homo sapiens
  misc_RNA (1)...(19): siRNA sense strand
gaaaauuggcaaaauggaa

SEQ ID NO: 1931948 - RNA, 19 nt, Homo sapiens
  misc_RNA (1)...(19): siRNA sense strand
cccggaaauucaaaggaua

SEQ ID NO: 1931949 - RNA, 19 nt, Homo sapiens
  misc_RNA (1)...(19): siRNA sense strand
cuaaccauguugccugaug

SEQ ID NO: 1931950 - RNA, 19 nt, Homo sapiens
  misc_RNA (1)...(19): siRNA sense strand
ccacuggaacacagagaaa

SEQ ID NO: 1931951 - RNA, 19 nt, Homo sapiens
  misc_RNA (1)...(19): siRNA sense strand
aggcaagaauuaauaagca

SEQ ID NO: 1931952 - RNA, 19 nt, Homo sapiens
  misc_RNA (1)...(19): siRNA sense strand
gcccaaauggaguuaaaga

SEQ ID NO: 1931953 - RNA, 19 nt, Homo sapiens
  misc_RNA (1)...(19): siRNA sense strand
ggaaaugauccguaaaaga

SEQ ID NO: 1931954 - RNA, 19 nt, Homo sapiens
  misc_RNA (1)...(19): siRNA sense strand
caaacuccaauguauacuu

SEQ ID NO: 1931955 - RNA, 19 nt, Homo sapiens
  misc_RNA (1)...(19): siRNA sense strand
gaaaagaaaaugcaaacuc

SEQ ID NO: 1931956 - RNA, 19 nt, Homo sapiens
  misc_RNA (1)...(19): siRNA sense strand
gacugcaggaccagaauaa

SEQ ID NO: 1931957 - RNA, 19 nt, Homo sapiens
  misc_RNA (1)...(19): siRNA sense strand
gcgagaagccaggacaaug

SEQ ID NO: 1931958 - RNA, 19 nt, Homo sapiens
  misc_RNA (1)...(19): siRNA sense strand
gcuugaacccauugacuug

SEQ ID NO: 1931959 - RNA, 19 nt, Homo sapiens
  misc_RNA (1)...(19): siRNA sense strand
ccaaagacuucaaaagcuu

SEQ ID NO: 1931960 - RNA, 19 nt, Homo sapiens
  misc_RNA (1)...(19): siRNA sense strand
cauccagagacauguauuu

SEQ ID NO: 1931961 - RNA, 19 nt, Homo sapiens
  misc_RNA (1)...(19): siRNA sense strand
gaaucccacuuuucgauga

SEQ ID NO: 1931962 - RNA, 19 nt, Homo sapiens
  misc_RNA (1)...(19): siRNA sense strand
gcagcugccaccuuuacaa

SEQ ID NO: 1931963 - RNA, 19 nt, Homo sapiens
  misc_RNA (1)...(19): siRNA sense strand
aaaugcaaacuccaaugua

SEQ ID NO: 1931964 - RNA, 19 nt, Homo sapiens
  misc_RNA (1)...(19): siRNA sense strand
gacuugccacgaguaauua

SEQ ID NO: 1931965 - RNA, 19 nt, Homo sapiens
  misc_RNA (1)...(19): siRNA sense strand
uauggaagauauucuacag

SEQ ID NO: 1931966 - RNA, 19 nt, Homo sapiens
  misc_RNA (1)...(19): siRNA sense strand
caagacugcaggaccagaa

SEQ ID NO: 1931967 - RNA, 19 nt, Homo sapiens
  misc_RNA (1)...(19): siRNA sense strand
ucauggagaggcaagaauu

SEQ ID NO: 1931968 - RNA, 19 nt, Homo sapiens
  misc_RNA (1)...(19): siRNA sense strand
ggaccauaaagccaagaaa

SEQ ID NO: 1931969 - RNA, 19 nt, Homo sapiens
  misc_RNA (1)...(19): siRNA sense strand
gaaacaucaagcagugaau

SEQ ID NO: 1931970 - RNA, 19 nt, Homo sapiens
  misc_RNA (1)...(19): siRNA sense strand
cagacaauauuugcauaag

SEQ ID NO: 1931971 - RNA, 19 nt, Homo sapiens
  misc_RNA (1)...(19): siRNA sense strand
ggacuuugcauucaaucag

SEQ ID NO: 1931972 - RNA, 19 nt, Homo sapiens
  misc_RNA (1)...(19): siRNA sense strand
ugaaacaucaagcagugaa

SEQ ID NO: 1931973 - RNA, 19 nt, Homo sapiens
  misc_RNA (1)...(19): siRNA sense strand
ugcaagugcuggaaaugau

SEQ ID NO: 1931974 - RNA, 19 nt, Homo sapiens
  misc_RNA (1)...(19): siRNA sense strand
ccaggacaaugcacaaagc

SEQ ID NO: 1931975 - RNA, 19 nt, Homo sapiens
  misc_RNA (1)...(19): siRNA sense strand
gcaagugcuggaaaugauc

SEQ ID NO: 1931976 - RNA, 19 nt, Homo sapiens
  misc_RNA (1)...(19): siRNA sense strand
cugagaacagacaauauuu

SEQ ID NO: 1931977 - RNA, 19 nt, Homo sapiens
  misc_RNA (1)...(19): siRNA sense strand
cagcauccagagacaugua

SEQ ID NO: 1931978 - RNA, 19 nt, Homo sapiens
  misc_RNA (1)...(19): siRNA sense strand
ggaacacagagaaacaagu

SEQ ID NO: 1931979 - RNA, 19 nt, Homo sapiens
  misc_RNA (1)...(19): siRNA sense strand
cugaugaaaucuugaacag

SEQ ID NO: 1931980 - RNA, 19 nt, Homo sapiens
  misc_RNA (1)...(19): siRNA sense strand
ccauguugccugaugaaau

SEQ ID NO: 1931981 - RNA, 19 nt, Homo sapiens
  misc_RNA (1)...(19): siRNA sense strand
cguguggacuuugcauuca

SEQ ID NO: 1931982 - RNA, 19 nt, Homo sapiens
  misc_RNA (1)...(19): siRNA sense strand
cagagagaaucccacuuuu

SEQ ID NO: 1931983 - RNA, 19 nt, Homo sapiens
  misc_RNA (1)...(19): siRNA sense strand
gaccauaaagccaagaaaa

SEQ ID NO: 1931984 - RNA, 19 nt, Homo sapiens
  misc_RNA (1)...(19): siRNA sense strand
gaaaaugcaaacuccaaug

SEQ ID NO: 1931985 - RNA, 19 nt, Homo sapiens
  misc_RNA (1)...(19): siRNA sense strand
gagaagccaggacaaugca

SEQ ID NO: 1931986 - RNA, 19 nt, Homo sapiens
  misc_RNA (1)...(19): siRNA sense strand
ucccggaaauucaaaggau

SEQ ID NO: 1931987 - RNA, 19 nt, Homo sapiens
  misc_RNA (1)...(19): siRNA sense strand
acagaggucccggaaauuc

SEQ ID NO: 1931988 - RNA, 19 nt, Homo sapiens
  misc_RNA (1)...(19): siRNA sense strand
aggcccaaauggaguuaaa

SEQ ID NO: 1931989 - RNA, 19 nt, Homo sapiens
  misc_RNA (1)...(19): siRNA sense strand
ugcuggaaaugauccguaa

SEQ ID NO: 1931990 - RNA, 19 nt, Homo sapiens
  misc_RNA (1)...(19): siRNA sense strand
agaugcaagugcuggaaau

SEQ ID NO: 1931991 - RNA, 19 nt, Homo sapiens
  misc_RNA (1)...(19): siRNA sense strand
cgagaagccaggacaaugc

SEQ ID NO: 1931992 - RNA, 19 nt, Homo sapiens
  misc_RNA (1)...(19): siRNA sense strand
aacaucaagcagugaauaa

SEQ ID NO: 1931993 - RNA, 19 nt, Homo sapiens
  misc_RNA (1)...(19): siRNA sense strand
caaagcaccccaaggaaug

SEQ ID NO: 1931994 - RNA, 19 nt, Homo sapiens
  misc_RNA (1)...(19): siRNA sense strand
gaggcaagaauuaauaagc

SEQ ID NO: 1931995 - RNA, 19 nt, Homo sapiens
  misc_RNA (1)...(19): siRNA sense strand
agacugcaggaccagaaua

SEQ ID NO: 1931996 - RNA, 19 nt, Homo sapiens
  misc_RNA (1)...(19): siRNA sense strand
augcaaacuccaauguaua

SEQ ID NO: 1931997 - RNA, 19 nt, Homo sapiens
  misc_RNA (1)...(19): siRNA sense strand
gacaaugcacaaagcaaag

SEQ ID NO: 1931998 - RNA, 19 nt, Homo sapiens
  misc_RNA (1)...(19): siRNA sense strand
caagaaaacccuucaaagc

SEQ ID NO: 1931999 - RNA, 19 nt, Homo sapiens
  misc_RNA (1)...(19): siRNA sense strand
accaugaccuucuaaccau

SEQ ID NO: 1932000 - RNA, 19 nt, Homo sapiens
  misc_RNA (1)...(19): siRNA sense strand
gaugaccaugaccuucuaa

SEQ ID NO: 1932001 - RNA, 19 nt, Homo sapiens
  misc_RNA (1)...(19): siRNA sense strand
gaaaacugguauggaagau

SEQ ID NO: 1932002 - RNA, 19 nt, Homo sapiens
  misc_RNA (1)...(19): siRNA sense strand
gagaaacccuauaaaugua

SEQ ID NO: 1932003 - RNA, 19 nt, Homo sapiens
  misc_RNA (1)...(19): siRNA sense strand
ggagaaaccuuaugaaugc

SEQ ID NO: 1932004 - RNA, 19 nt, Homo sapiens
  misc_RNA (1)...(19): siRNA sense strand
gggaagguauucaguuaua

SEQ ID NO: 1932005 - RNA, 19 nt, Homo sapiens
  misc_RNA (1)...(19): siRNA sense strand
ggacagaaauccuaucgau

SEQ ID NO: 1932006 - RNA, 19 nt, Homo sapiens
  misc_RNA (1)...(19): siRNA sense strand
ggagaaacccuauaaaugu

SEQ ID NO: 1932007 - RNA, 19 nt, Homo sapiens
  misc_RNA (1)...(19): siRNA sense strand
gagaaacccuaugaauaua

SEQ ID NO: 1932008 - RNA, 19 nt, Homo sapiens
  misc_RNA (1)...(19): siRNA sense strand
gaagggagcagacuagaaa

SEQ ID NO: 1932009 - RNA, 19 nt, Homo sapiens
  misc_RNA (1)...(19): siRNA sense strand
ggagaagccuuaugagugu

SEQ ID NO: 1932010 - RNA, 19 nt, Homo sapiens
  misc_RNA (1)...(19): siRNA sense strand
ggaaauaacagaugaagau

SEQ ID NO: 1932011 - RNA, 19 nt, Homo sapiens
  misc_RNA (1)...(19): siRNA sense strand
ggacaaaccucagaugaag

SEQ ID NO: 1932012 - RNA, 19 nt, Homo sapiens
  misc_RNA (1)...(19): siRNA sense strand
agagaaaccuuaugaaugu

SEQ ID NO: 1932013 - RNA, 19 nt, Homo sapiens
  misc_RNA (1)...(19): siRNA sense strand
gcacagcucccaucucauu

SEQ ID NO: 1932014 - RNA, 19 nt, Homo sapiens
  misc_RNA (1)...(19): siRNA sense strand
ggaaagccuucaaucagaa

SEQ ID NO: 1932015 - RNA, 19 nt, Homo sapiens
  misc_RNA (1)...(19): siRNA sense strand
gggaaagccuucaaucaga

SEQ ID NO: 1932016 - RNA, 19 nt, Homo sapiens
  misc_RNA (1)...(19): siRNA sense strand
ggagaggcauucauucgaa

SEQ ID NO: 1932017 - RNA, 19 nt, Homo sapiens
  misc_RNA (1)...(19): siRNA sense strand
ucagaacucucaacucauu

SEQ ID NO: 1932018 - RNA, 19 nt, Homo sapiens
  misc_RNA (1)...(19): siRNA sense strand
ggagauguuugugaagaua

SEQ ID NO: 1932019 - RNA, 19 nt, Homo sapiens
  misc_RNA (1)...(19): siRNA sense strand
gugggaagguauucaguua

SEQ ID NO: 1932020 - RNA, 19 nt, Homo sapiens
  misc_RNA (1)...(19): siRNA sense strand
ugagaaacccuaugaauau

SEQ ID NO: 1932021 - RNA, 19 nt, Homo sapiens
  misc_RNA (1)...(19): siRNA sense strand
gagagaaaccuuaugaaug

SEQ ID NO: 1932022 - RNA, 19 nt, Homo sapiens
  misc_RNA (1)...(19): siRNA sense strand
gcucacagcuuauuguaca

SEQ ID NO: 1932023 - RNA, 19 nt, Homo sapiens
  misc_RNA (1)...(19): siRNA sense strand
gcagcagucuccagaagaa

SEQ ID NO: 1932024 - RNA, 19 nt, Homo sapiens
  misc_RNA (1)...(19): siRNA sense strand
aaucagaacucucaacuca

SEQ ID NO: 1932025 - RNA, 19 nt, Homo sapiens
  misc_RNA (1)...(19): siRNA sense strand
gugagaaacccuaugaaua

SEQ ID NO: 1932026 - RNA, 19 nt, Homo sapiens
  misc_RNA (1)...(19): siRNA sense strand
aguuauagcuccagccuua

SEQ ID NO: 1932027 - RNA, 19 nt, Homo sapiens
  misc_RNA (1)...(19): siRNA sense strand
ggacuucgcucaauguacu

SEQ ID NO: 1932028 - RNA, 19 nt, Homo sapiens
  misc_RNA (1)...(19): siRNA sense strand
gaauguagcgaguguggua

SEQ ID NO: 1932029 - RNA, 19 nt, Homo sapiens
  misc_RNA (1)...(19): siRNA sense strand
aaucggaguucucaccuua

SEQ ID NO: 1932030 - RNA, 19 nt, Homo sapiens
  misc_RNA (1)...(19): siRNA sense strand
ggagagaaaccuuaugaau

SEQ ID NO: 1932031 - RNA, 19 nt, Homo sapiens
  misc_RNA (1)...(19): siRNA sense strand
ggaaaauccuucaaucaaa

SEQ ID NO: 1932032 - RNA, 19 nt, Homo sapiens
  misc_RNA (1)...(19): siRNA sense strand
gggagaaacccuauaaaug

SEQ ID NO: 1932033 - RNA, 19 nt, Homo sapiens
  misc_RNA (1)...(19): siRNA sense strand
gagaaacccuaugagugua

SEQ ID NO: 1932034 - RNA, 19 nt, Homo sapiens
  misc_RNA (1)...(19): siRNA sense strand
gaaaucucauugaccauca

SEQ ID NO: 1932035 - RNA, 19 nt, Homo sapiens
  misc_RNA (1)...(19): siRNA sense strand
cggaguaaaugucuuauuc

SEQ ID NO: 1932036 - RNA, 19 nt, Homo sapiens
  misc_RNA (1)...(19): siRNA sense strand
aaucaaaacucacaccuua

SEQ ID NO: 1932037 - RNA, 19 nt, Homo sapiens
  misc_RNA (1)...(19): siRNA sense strand
gaaauccuaucgaugugau

SEQ ID NO: 1932038 - RNA, 19 nt, Homo sapiens
  misc_RNA (1)...(19): siRNA sense strand
gggagaaaccuuaugaaug

SEQ ID NO: 1932039 - RNA, 19 nt, Homo sapiens
  misc_RNA (1)...(19): siRNA sense strand
gaguaaaugucuuauucga

SEQ ID NO: 1932040 - RNA, 19 nt, Homo sapiens
  misc_RNA (1)...(19): siRNA sense strand
caucagagccuccauacug

SEQ ID NO: 1932041 - RNA, 19 nt, Homo sapiens
  misc_RNA (1)...(19): siRNA sense strand
gagaaaccuuaugaaugua

SEQ ID NO: 1932042 - RNA, 19 nt, Homo sapiens
  misc_RNA (1)...(19): siRNA sense strand
ggucugaguaaaugucuua

SEQ ID NO: 1932043 - RNA, 19 nt, Homo sapiens
  misc_RNA (1)...(19): siRNA sense strand
gguaaggcauuuggucuga

SEQ ID NO: 1932044 - RNA, 19 nt, Homo sapiens
  misc_RNA (1)...(19): siRNA sense strand
ucaauguacuucuccaguu

SEQ ID NO: 1932045 - RNA, 19 nt, Homo sapiens
  misc_RNA (1)...(19): siRNA sense strand
ggucuggcuuggucaguuu

SEQ ID NO: 1932046 - RNA, 19 nt, Homo sapiens
  misc_RNA (1)...(19): siRNA sense strand
guacaucagagaacccaua

SEQ ID NO: 1932047 - RNA, 19 nt, Homo sapiens
  misc_RNA (1)...(19): siRNA sense strand
gaacauccaccucugucuu

SEQ ID NO: 1932048 - RNA, 19 nt, Homo sapiens
  misc_RNA (1)...(19): siRNA sense strand
gaagaagggagcagacuag

SEQ ID NO: 1932049 - RNA, 19 nt, Homo sapiens
  misc_RNA (1)...(19): siRNA sense strand
agacuacacucagaagaaa

SEQ ID NO: 1932050 - RNA, 19 nt, Homo sapiens
  misc_RNA (1)...(19): siRNA sense strand
gcucauuguucaucucaga

SEQ ID NO: 1932051 - RNA, 19 nt, Homo sapiens
  misc_RNA (1)...(19): siRNA sense strand
ggagagaaacccuaugagu

SEQ ID NO: 1932052 - RNA, 19 nt, Homo sapiens
  misc_RNA (1)...(19): siRNA sense strand
cugaguaaaugucuuauuc

SEQ ID NO: 1932053 - RNA, 19 nt, Homo sapiens
  misc_RNA (1)...(19): siRNA sense strand
caauguacuucuccaguuc

SEQ ID NO: 1932054 - RNA, 19 nt, Homo sapiens
  misc_RNA (1)...(19): siRNA sense strand
caccagagacuccauaaug

SEQ ID NO: 1932055 - RNA, 19 nt, Homo sapiens
  misc_RNA (1)...(19): siRNA sense strand
gcaaaccucccagcucauu

SEQ ID NO: 1932056 - RNA, 19 nt, Homo sapiens
  misc_RNA (1)...(19): siRNA sense strand
uaaagggacagaaauccua

SEQ ID NO: 1932057 - RNA, 19 nt, Homo sapiens
  misc_RNA (1)...(19): siRNA sense strand
caacagcucuggguacaac

SEQ ID NO: 1932058 - RNA, 19 nt, Homo sapiens
  misc_RNA (1)...(19): siRNA sense strand
gaaaagcccuauaaaugca

SEQ ID NO: 1932059 - RNA, 19 nt, Homo sapiens
  misc_RNA (1)...(19): siRNA sense strand
gacuggagauguuugugaa

SEQ ID NO: 1932060 - RNA, 19 nt, Homo sapiens
  misc_RNA (1)...(19): siRNA sense strand
agagagcccugcaguggaa

SEQ ID NO: 1932061 - RNA, 19 nt, Homo sapiens
  misc_RNA (1)...(19): siRNA sense strand
gaacucaggagaccaagca

SEQ ID NO: 1932062 - RNA, 19 nt, Homo sapiens
  misc_RNA (1)...(19): siRNA sense strand
acagaaauccuaucgaugu

SEQ ID NO: 1932063 - RNA, 19 nt, Homo sapiens
  misc_RNA (1)...(19): siRNA sense strand
gacaacagcucuggguaca

SEQ ID NO: 1932064 - RNA, 19 nt, Homo sapiens
  misc_RNA (1)...(19): siRNA sense strand
gaacucacacuggagagaa

SEQ ID NO: 1932065 - RNA, 19 nt, Homo sapiens
  misc_RNA (1)...(19): siRNA sense strand
agagcauucuguuccaaua

SEQ ID NO: 1932066 - RNA, 19 nt, Homo sapiens
  misc_RNA (1)...(19): siRNA sense strand
aggcacagcucccaucuca

SEQ ID NO: 1932067 - RNA, 19 nt, Homo sapiens
  misc_RNA (1)...(19): siRNA sense strand
gaaaccuuaugaaugcaau

SEQ ID NO: 1932068 - RNA, 19 nt, Homo sapiens
  misc_RNA (1)...(19): siRNA sense strand
gcucccaucucauucaaca

SEQ ID NO: 1932069 - RNA, 19 nt, Homo sapiens
  misc_RNA (1)...(19): siRNA sense strand
gcccugcaguggaacauga

SEQ ID NO: 1932070 - RNA, 19 nt, Homo sapiens
  misc_RNA (1)...(19): siRNA sense strand
ggaagguauucaguuauag

SEQ ID NO: 1932071 - RNA, 19 nt, Homo sapiens
  misc_RNA (1)...(19): siRNA sense strand
caacaccagagacuccaua

SEQ ID NO: 1932072 - RNA, 19 nt, Homo sapiens
  misc_RNA (1)...(19): siRNA sense strand
agagaaacccuaugagugu

SEQ ID NO: 1932073 - RNA, 19 nt, Homo sapiens
  misc_RNA (1)...(19): siRNA sense strand
ggaucagagucaucuaaca

SEQ ID NO: 1932074 - RNA, 19 nt, Homo sapiens
  misc_RNA (1)...(19): siRNA sense strand
acucacaccuuauuauaca

SEQ ID NO: 1932075 - RNA, 19 nt, Homo sapiens
  misc_RNA (1)...(19): siRNA sense strand
cgacaucagagccuccaua

SEQ ID NO: 1932076 - RNA, 19 nt, Homo sapiens
  misc_RNA (1)...(19): siRNA sense strand
gcagagacuggagauguuu

SEQ ID NO: 1932077 - RNA, 19 nt, Homo sapiens
  misc_RNA (1)...(19): siRNA sense strand
gaaggacaaaccucagaug

SEQ ID NO: 1932078 - RNA, 19 nt, Homo sapiens
  misc_RNA (1)...(19): siRNA sense strand
cccuauaaaugcaaugauu

SEQ ID NO: 1932079 - RNA, 19 nt, Homo sapiens
  misc_RNA (1)...(19): siRNA sense strand
ggugagaaacccuaugaau

SEQ ID NO: 1932080 - RNA, 19 nt, Homo sapiens
  misc_RNA (1)...(19): siRNA sense strand
gugaaaagcccuauaaaug

SEQ ID NO: 1932081 - RNA, 19 nt, Homo sapiens
  misc_RNA (1)...(19): siRNA sense strand
gcgaauucauacuggagaa

SEQ ID NO: 1932082 - RNA, 19 nt, Homo sapiens
  misc_RNA (1)...(19): siRNA sense strand
gagaagccuuaugagugua

SEQ ID NO: 1932083 - RNA, 19 nt, Homo sapiens
  misc_RNA (1)...(19): siRNA sense strand
aggauacuguggcauauga

SEQ ID NO: 1932084 - RNA, 19 nt, Homo sapiens
  misc_RNA (1)...(19): siRNA sense strand
ggagagcauucuguuccaa

SEQ ID NO: 1932085 - RNA, 19 nt, Homo sapiens
  misc_RNA (1)...(19): siRNA sense strand
gggcagcagucuccagaag

SEQ ID NO: 1932086 - RNA, 19 nt, Homo sapiens
  misc_RNA (1)...(19): siRNA sense strand
ggagcagacuagaaaauga

SEQ ID NO: 1932087 - RNA, 19 nt, Homo sapiens
  misc_RNA (1)...(19): siRNA sense strand
ggaaaagccauacaaaugu

SEQ ID NO: 1932088 - RNA, 19 nt, Homo sapiens
  misc_RNA (1)...(19): siRNA sense strand
gggaaaagccauacaaaug

SEQ ID NO: 1932089 - RNA, 19 nt, Homo sapiens
  misc_RNA (1)...(19): siRNA sense strand
gaaacccuaugaguguaau

SEQ ID NO: 1932090 - RNA, 19 nt, Homo sapiens
  misc_RNA (1)...(19): siRNA sense strand
cagaaauccuaucgaugug

SEQ ID NO: 1932091 - RNA, 19 nt, Homo sapiens
  misc_RNA (1)...(19): siRNA sense strand
uuagucagcguuccacuuu

SEQ ID NO: 1932092 - RNA, 19 nt, Homo sapiens
  misc_RNA (1)...(19): siRNA sense strand
gaaaccuuaugaauguagu

SEQ ID NO: 1932093 - RNA, 19 nt, Homo sapiens
  misc_RNA (1)...(19): siRNA sense strand
uaaugagugugggaaggua

SEQ ID NO: 1932094 - RNA, 19 nt, Homo sapiens
  misc_RNA (1)...(19): siRNA sense strand
ggaacaugaugccagaaaa

SEQ ID NO: 1932095 - RNA, 19 nt, Homo sapiens
  misc_RNA (1)...(19): siRNA sense strand
caucagagaacccauacug

SEQ ID NO: 1932096 - RNA, 19 nt, Homo sapiens
  misc_RNA (1)...(19): siRNA sense strand
ccugcacacugguaagaaa

SEQ ID NO: 1932097 - RNA, 19 nt, Homo sapiens
  misc_RNA (1)...(19): siRNA sense strand
ggcauucauucgaagcaaa

SEQ ID NO: 1932098 - RNA, 19 nt, Homo sapiens
  misc_RNA (1)...(19): siRNA sense strand
uggcugugguggaggauuu

SEQ ID NO: 1932099 - RNA, 19 nt, Homo sapiens
  misc_RNA (1)...(19): siRNA sense strand
ucggaguucucaccuuauu

SEQ ID NO: 1932100 - RNA, 19 nt, Homo sapiens
  misc_RNA (1)...(19): siRNA sense strand
gaacaugaaggaguuuuaa

SEQ ID NO: 1932101 - RNA, 19 nt, Homo sapiens
  misc_RNA (1)...(19): siRNA sense strand
ccucccagcucauuguuca

SEQ ID NO: 1932102 - RNA, 19 nt, Homo sapiens
  misc_RNA (1)...(19): siRNA sense strand
ggaaggagcuggagaaagc

SEQ ID NO: 1932103 - RNA, 19 nt, Homo sapiens
  misc_RNA (1)...(19): siRNA sense strand
gaaacugaaucacaccaaa

SEQ ID NO: 1932104 - RNA, 19 nt, Homo sapiens
  misc_RNA (1)...(19): siRNA sense strand
ccaaggaggugucagagaa

SEQ ID NO: 1932105 - RNA, 19 nt, Homo sapiens
  misc_RNA (1)...(19): siRNA sense strand
cagcagagcuagcaucguu

SEQ ID NO: 1932106 - RNA, 19 nt, Homo sapiens
  misc_RNA (1)...(19): siRNA sense strand
acacucuucugaacuauua

SEQ ID NO: 1932107 - RNA, 19 nt, Homo sapiens
  misc_RNA (1)...(19): siRNA sense strand
gcacauuuccuuuggauga

SEQ ID NO: 1932108 - RNA, 19 nt, Homo sapiens
  misc_RNA (1)...(19): siRNA sense strand
gaacaccaagcccaauaua

SEQ ID NO: 1932109 - RNA, 19 nt, Homo sapiens
  misc_RNA (1)...(19): siRNA sense strand
cagagaagcagcaguuaua

SEQ ID NO: 1932110 - RNA, 19 nt, Homo sapiens
  misc_RNA (1)...(19): siRNA sense strand
cagaagacaucaagagguu

SEQ ID NO: 1932111 - RNA, 19 nt, Homo sapiens
  misc_RNA (1)...(19): siRNA sense strand
caaaggaaagcuuggauaa

SEQ ID NO: 1932112 - RNA, 19 nt, Homo sapiens
  misc_RNA (1)...(19): siRNA sense strand
cauagaagccucuguaaga

SEQ ID NO: 1932113 - RNA, 19 nt, Homo sapiens
  misc_RNA (1)...(19): siRNA sense strand
ugaacacucuucugaacua

SEQ ID NO: 1932114 - RNA, 19 nt, Homo sapiens
  misc_RNA (1)...(19): siRNA sense strand
aaacucagccuuccagaaa

SEQ ID NO: 1932115 - RNA, 19 nt, Homo sapiens
  misc_RNA (1)...(19): siRNA sense strand
gaagggaacaggcaucaug

SEQ ID NO: 1932116 - RNA, 19 nt, Homo sapiens
  misc_RNA (1)...(19): siRNA sense strand
gaacagcccagaugaccuu

SEQ ID NO: 1932117 - RNA, 19 nt, Homo sapiens
  misc_RNA (1)...(19): siRNA sense strand
agaaugccgugcucacaua

SEQ ID NO: 1932118 - RNA, 19 nt, Homo sapiens
  misc_RNA (1)...(19): siRNA sense strand
aaagcaacgucgaguguuu

SEQ ID NO: 1932119 - RNA, 19 nt, Homo sapiens
  misc_RNA (1)...(19): siRNA sense strand
gcaauuggccucuggaagu

SEQ ID NO: 1932120 - RNA, 19 nt, Homo sapiens
  misc_RNA (1)...(19): siRNA sense strand
gaugaacacucuucugaac

SEQ ID NO: 1932121 - RNA, 19 nt, Homo sapiens
  misc_RNA (1)...(19): siRNA sense strand
gagcaacacgugccagaaa

SEQ ID NO: 1932122 - RNA, 19 nt, Homo sapiens
  misc_RNA (1)...(19): siRNA sense strand
gaaaggccagcgucagaaa

SEQ ID NO: 1932123 - RNA, 19 nt, Homo sapiens
  misc_RNA (1)...(19): siRNA sense strand
ccaaagagaaacugaauca

SEQ ID NO: 1932124 - RNA, 19 nt, Homo sapiens
  misc_RNA (1)...(19): siRNA sense strand
cagguccacugaucacaua

SEQ ID NO: 1932125 - RNA, 19 nt, Homo sapiens
  misc_RNA (1)...(19): siRNA sense strand
agaagcagcaguuauauga

SEQ ID NO: 1932126 - RNA, 19 nt, Homo sapiens
  misc_RNA (1)...(19): siRNA sense strand
gaagacaucaagagguuug

SEQ ID NO: 1932127 - RNA, 19 nt, Homo sapiens
  misc_RNA (1)...(19): siRNA sense strand
ucacauagaagccucugua

SEQ ID NO: 1932128 - RNA, 19 nt, Homo sapiens
  misc_RNA (1)...(19): siRNA sense strand
gcucagaggagaccuauca

SEQ ID NO: 1932129 - RNA, 19 nt, Homo sapiens
  misc_RNA (1)...(19): siRNA sense strand
aaggaaagcuuggauaauc

SEQ ID NO: 1932130 - RNA, 19 nt, Homo sapiens
  misc_RNA (1)...(19): siRNA sense strand
ccagggcacuuuaugacaa

SEQ ID NO: 1932131 - RNA, 19 nt, Homo sapiens
  misc_RNA (1)...(19): siRNA sense strand
caauauagacaucccuaaa

SEQ ID NO: 1932132 - RNA, 19 nt, Homo sapiens
  misc_RNA (1)...(19): siRNA sense strand
gcauccugcuugaaacaaa

SEQ ID NO: 1932133 - RNA, 19 nt, Homo sapiens
  misc_RNA (1)...(19): siRNA sense strand
gaacacucuucugaacuau

SEQ ID NO: 1932134 - RNA, 19 nt, Homo sapiens
  misc_RNA (1)...(19): siRNA sense strand
ccgcggagaucaucacuca

SEQ ID NO: 1932135 - RNA, 19 nt, Homo sapiens
  misc_RNA (1)...(19): siRNA sense strand
ggaauggauuuaugacacu

SEQ ID NO: 1932136 - RNA, 19 nt, Homo sapiens
  misc_RNA (1)...(19): siRNA sense strand
uggaaguucuugugacuga

SEQ ID NO: 1932137 - RNA, 19 nt, Homo sapiens
  misc_RNA (1)...(19): siRNA sense strand
caauuggccucuggaaguu

SEQ ID NO: 1932138 - RNA, 19 nt, Homo sapiens
  misc_RNA (1)...(19): siRNA sense strand
ccuucaagcuucucugauu

SEQ ID NO: 1932139 - RNA, 19 nt, Homo sapiens
  misc_RNA (1)...(19): siRNA sense strand
gauaucagugacuaccuua

SEQ ID NO: 1932140 - RNA, 19 nt, Homo sapiens
  misc_RNA (1)...(19): siRNA sense strand
gacaguaaccuucagaaca

SEQ ID NO: 1932141 - RNA, 19 nt, Homo sapiens
  misc_RNA (1)...(19): siRNA sense strand
acaccaagcccaauauaga

SEQ ID NO: 1932142 - RNA, 19 nt, Homo sapiens
  misc_RNA (1)...(19): siRNA sense strand
ccggacagauuaucagguu

SEQ ID NO: 1932143 - RNA, 19 nt, Homo sapiens
  misc_RNA (1)...(19): siRNA sense strand
gugacuaccuuaagaagag

SEQ ID NO: 1932144 - RNA, 19 nt, Homo sapiens
  misc_RNA (1)...(19): siRNA sense strand
cugagaagcuggagcaaca

SEQ ID NO: 1932145 - RNA, 19 nt, Homo sapiens
  misc_RNA (1)...(19): siRNA sense strand
cagcuccacuuucuacaau

SEQ ID NO: 1932146 - RNA, 19 nt, Homo sapiens
  misc_RNA (1)...(19): siRNA sense strand
caacgucgaguguuucuca

SEQ ID NO: 1932147 - RNA, 19 nt, Homo sapiens
  misc_RNA (1)...(19): siRNA sense strand
uaccaaauccucagaaauc

SEQ ID NO: 1932148 - RNA, 19 nt, Homo sapiens
  misc_RNA (1)...(19): siRNA sense strand
gcggagaucaucacucaga

SEQ ID NO: 1932149 - RNA, 19 nt, Homo sapiens
  misc_RNA (1)...(19): siRNA sense strand
cagaacaccaagcccaaua

SEQ ID NO: 1932150 - RNA, 19 nt, Homo sapiens
  misc_RNA (1)...(19): siRNA sense strand
ggaaaggccagcgucagaa

SEQ ID NO: 1932151 - RNA, 19 nt, Homo sapiens
  misc_RNA (1)...(19): siRNA sense strand
acguagcgcuggccacuaa

SEQ ID NO: 1932152 - RNA, 19 nt, Homo sapiens
  misc_RNA (1)...(19): siRNA sense strand
ucaaagccaucagcgcauu

SEQ ID NO: 1932153 - RNA, 19 nt, Homo sapiens
  misc_RNA (1)...(19): siRNA sense strand
aaagagaaacugaaucaca

SEQ ID NO: 1932154 - RNA, 19 nt, Homo sapiens
  misc_RNA (1)...(19): siRNA sense strand
gagaagcagcaguuauaug

SEQ ID NO: 1932155 - RNA, 19 nt, Homo sapiens
  misc_RNA (1)...(19): siRNA sense strand
acaguaaccuucagaacag

SEQ ID NO: 1932156 - RNA, 19 nt, Homo sapiens
  misc_RNA (1)...(19): siRNA sense strand
cuccacaacugaauaacaa

SEQ ID NO: 1932157 - RNA, 19 nt, Homo sapiens
  misc_RNA (1)...(19): siRNA sense strand
cauaauuccucaugguucu

SEQ ID NO: 1932158 - RNA, 19 nt, Homo sapiens
  misc_RNA (1)...(19): siRNA sense strand
augcagaauuuaaguguga

SEQ ID NO: 1932159 - RNA, 19 nt, Homo sapiens
  misc_RNA (1)...(19): siRNA sense strand
gaggguugguggaaguguu

SEQ ID NO: 1932160 - RNA, 19 nt, Homo sapiens
  misc_RNA (1)...(19): siRNA sense strand
acaaaggaaagcuuggaua

SEQ ID NO: 1932161 - RNA, 19 nt, Homo sapiens
  misc_RNA (1)...(19): siRNA sense strand
ugaaggagccagagaagca

SEQ ID NO: 1932162 - RNA, 19 nt, Homo sapiens
  misc_RNA (1)...(19): siRNA sense strand
caacacacgcggcaguuca

SEQ ID NO: 1932163 - RNA, 19 nt, Homo sapiens
  misc_RNA (1)...(19): siRNA sense strand
agagggacgugcgcaauga

SEQ ID NO: 1932164 - RNA, 19 nt, Homo sapiens
  misc_RNA (1)...(19): siRNA sense strand
cagaauccuggcccucuua

SEQ ID NO: 1932165 - RNA, 19 nt, Homo sapiens
  misc_RNA (1)...(19): siRNA sense strand
acucagccuuccagaaauu

SEQ ID NO: 1932166 - RNA, 19 nt, Homo sapiens
  misc_RNA (1)...(19): siRNA sense strand
aagcagcaguuauaugaca

SEQ ID NO: 1932167 - RNA, 19 nt, Homo sapiens
  misc_RNA (1)...(19): siRNA sense strand
ugauaucagugacuaccuu

SEQ ID NO: 1932168 - RNA, 19 nt, Homo sapiens
  misc_RNA (1)...(19): siRNA sense strand
gcaagcuggucaucauggu

SEQ ID NO: 1932169 - RNA, 19 nt, Homo sapiens
  misc_RNA (1)...(19): siRNA sense strand
ucacuccacaacugaauaa

SEQ ID NO: 1932170 - RNA, 19 nt, Homo sapiens
  misc_RNA (1)...(19): siRNA sense strand
ucuuauggcuuucuuguac

SEQ ID NO: 1932171 - RNA, 19 nt, Homo sapiens
  misc_RNA (1)...(19): siRNA sense strand
agagcaagcuggucaucau

SEQ ID NO: 1932172 - RNA, 19 nt, Homo sapiens
  misc_RNA (1)...(19): siRNA sense strand
guccacugaucacauagaa

SEQ ID NO: 1932173 - RNA, 19 nt, Homo sapiens
  misc_RNA (1)...(19): siRNA sense strand
caagaaggcaggacuccau

SEQ ID NO: 1932174 - RNA, 19 nt, Homo sapiens
  misc_RNA (1)...(19): siRNA sense strand
gagagggacgugcgcaaug

SEQ ID NO: 1932175 - RNA, 19 nt, Homo sapiens
  misc_RNA (1)...(19): siRNA sense strand
gcaaagggaagaugaacac

SEQ ID NO: 1932176 - RNA, 19 nt, Homo sapiens
  misc_RNA (1)...(19): siRNA sense strand
ccucagaaaucggaaugga

SEQ ID NO: 1932177 - RNA, 19 nt, Homo sapiens
  misc_RNA (1)...(19): siRNA sense strand
ccacuaagcaaagggaaga

SEQ ID NO: 1932178 - RNA, 19 nt, Homo sapiens
  misc_RNA (1)...(19): siRNA sense strand
gaauccuggcccucuuaua

SEQ ID NO: 1932179 - RNA, 19 nt, Homo sapiens
  misc_RNA (1)...(19): siRNA sense strand
aagggaagaugaacacucu

SEQ ID NO: 1932180 - RNA, 19 nt, Homo sapiens
  misc_RNA (1)...(19): siRNA sense strand
uuacagcacauuaccaaau

SEQ ID NO: 1932181 - RNA, 19 nt, Homo sapiens
  misc_RNA (1)...(19): siRNA sense strand
gaacacugccggcuguacu

SEQ ID NO: 1932182 - RNA, 19 nt, Homo sapiens
  misc_RNA (1)...(19): siRNA sense strand
gcagagcuagcaucguuuc

SEQ ID NO: 1932183 - RNA, 19 nt, Homo sapiens
  misc_RNA (1)...(19): siRNA sense strand
ccagaggcacauuuccuuu

SEQ ID NO: 1932184 - RNA, 19 nt, Homo sapiens
  misc_RNA (1)...(19): siRNA sense strand
uacagcacauuaccaaauc

SEQ ID NO: 1932185 - RNA, 19 nt, Homo sapiens
  misc_RNA (1)...(19): siRNA sense strand
ccagagaagcagcaguuau

SEQ ID NO: 1932186 - RNA, 19 nt, Homo sapiens
  misc_RNA (1)...(19): siRNA sense strand
ugauggcucugcagcacaa

SEQ ID NO: 1932187 - RNA, 19 nt, Homo sapiens
  misc_RNA (1)...(19): siRNA sense strand
acaaugugcccaugcagaa

SEQ ID NO: 1932188 - RNA, 19 nt, Homo sapiens
  misc_RNA (1)...(19): siRNA sense strand
gguuacagcacauuaccaa

SEQ ID NO: 1932189 - RNA, 19 nt, Homo sapiens
  misc_RNA (1)...(19): siRNA sense strand
ccacaacugaauaacaaug

SEQ ID NO: 1932190 - RNA, 19 nt, Homo sapiens
  misc_RNA (1)...(19): siRNA sense strand
cuacugcccaagucuauga

SEQ ID NO: 1932191 - RNA, 19 nt, Homo sapiens
  misc_RNA (1)...(19): siRNA sense strand
cagcuuugcggaagaauca

SEQ ID NO: 1932192 - RNA, 19 nt, Homo sapiens
  misc_RNA (1)...(19): siRNA sense strand
uaugacaacugcccugacu

SEQ ID NO: 1932193 - RNA, 19 nt, Homo sapiens
  misc_RNA (1)...(19): siRNA sense strand
cuaaagcaacgucgagugu

SEQ ID NO: 1932194 - RNA, 19 nt, Homo sapiens
  misc_RNA (1)...(19): siRNA sense strand
ccaguuccagcuccacuuu

SEQ ID NO: 1932195 - RNA, 19 nt, Homo sapiens
  misc_RNA (1)...(19): siRNA sense strand
acacgccucucaccagcuu

SEQ ID NO: 1932196 - RNA, 19 nt, Homo sapiens
  misc_RNA (1)...(19): siRNA sense strand
ccaauauagacaucccuaa

SEQ ID NO: 1932197 - RNA, 19 nt, Homo sapiens
  misc_RNA (1)...(19): siRNA sense strand
gcgcuggccacuaagaaug

SEQ ID NO: 1932198 - RNA, 19 nt, Homo sapiens
  misc_RNA (1)...(19): siRNA sense strand
gagcaagcuggucaucaug

SEQ ID NO: 1932199 - RNA, 19 nt, Homo sapiens
  misc_RNA (1)...(19): siRNA sense strand
ugaccauucuggagcaaca

SEQ ID NO: 1932200 - RNA, 19 nt, Homo sapiens
  misc_RNA (1)...(19): siRNA sense strand
gaaguucuugugacugaca

SEQ ID NO: 1932201 - RNA, 19 nt, Homo sapiens
  misc_RNA (1)...(19): siRNA sense strand
ggccugaugcucuuuguca

SEQ ID NO: 1932202 - RNA, 19 nt, Homo sapiens
  misc_RNA (1)...(19): siRNA sense strand
gcacaaggauaaauggaaa

SEQ ID NO: 1932203 - RNA, 19 nt, Homo sapiens
  misc_RNA (1)...(19): siRNA sense strand
gacaucaacugcuucauga

SEQ ID NO: 1932204 - RNA, 19 nt, Homo sapiens
  misc_RNA (1)...(19): siRNA sense strand
gagaagaagucugagaaga

SEQ ID NO: 1932205 - RNA, 19 nt, Homo sapiens
  misc_RNA (1)...(19): siRNA sense strand
gaagaagucugagaagaag

SEQ ID NO: 1932206 - RNA, 19 nt, Homo sapiens
  misc_RNA (1)...(19): siRNA sense strand
cagcagagcccuugcauug

SEQ ID NO: 1932207 - RNA, 19 nt, Homo sapiens
  misc_RNA (1)...(19): siRNA sense strand
acacagaccugcagaucuu

SEQ ID NO: 1932208 - RNA, 19 nt, Homo sapiens
  misc_RNA (1)...(19): siRNA sense strand
ggacaucaacugcuucaug

SEQ ID NO: 1932209 - RNA, 19 nt, Homo sapiens
  misc_RNA (1)...(19): siRNA sense strand
ggaaauggaacgccgauuc

SEQ ID NO: 1932210 - RNA, 19 nt, Homo sapiens
  misc_RNA (1)...(19): siRNA sense strand
gcaacgagggugacaguga

SEQ ID NO: 1932211 - RNA, 19 nt, Homo sapiens
  misc_RNA (1)...(19): siRNA sense strand
gaagagggcagugaaagug

SEQ ID NO: 1932212 - RNA, 19 nt, Homo sapiens
  misc_RNA (1)...(19): siRNA sense strand
acacgacucuucugugaug

SEQ ID NO: 1932213 - RNA, 19 nt, Homo sapiens
  misc_RNA (1)...(19): siRNA sense strand
ucagaugacuguggcauga

SEQ ID NO: 1932214 - RNA, 19 nt, Homo sapiens
  misc_RNA (1)...(19): siRNA sense strand
caacgagggugacagugau

SEQ ID NO: 1932215 - RNA, 19 nt, Homo sapiens
  misc_RNA (1)...(19): siRNA sense strand
caagaggccugucccugau

SEQ ID NO: 1932216 - RNA, 19 nt, Homo sapiens
  misc_RNA (1)...(19): siRNA sense strand
gcacccgccuucaggaaau

SEQ ID NO: 1932217 - RNA, 19 nt, Homo sapiens
  misc_RNA (1)...(19): siRNA sense strand
cagcccagcuccaaguauu

SEQ ID NO: 1932218 - RNA, 19 nt, Homo sapiens
  misc_RNA (1)...(19): siRNA sense strand
ccacagccaucacagaagu

SEQ ID NO: 1932219 - RNA, 19 nt, Homo sapiens
  misc_RNA (1)...(19): siRNA sense strand
gcagagcccuugcauugcu

SEQ ID NO: 1932220 - RNA, 19 nt, Homo sapiens
  misc_RNA (1)...(19): siRNA sense strand
ccaacaagauccggcagaa

SEQ ID NO: 1932221 - RNA, 19 nt, Homo sapiens
  misc_RNA (1)...(19): siRNA sense strand
agaagaagucugagaagaa

SEQ ID NO: 1932222 - RNA, 19 nt, Homo sapiens
  misc_RNA (1)...(19): siRNA sense strand
ccuuguacgugaugucuuu

SEQ ID NO: 1932223 - RNA, 19 nt, Homo sapiens
  misc_RNA (1)...(19): siRNA sense strand
gaaagugaagcaugugaag

SEQ ID NO: 1932224 - RNA, 19 nt, Homo sapiens
  misc_RNA (1)...(19): siRNA sense strand
agaagaaggaggagcgaua

SEQ ID NO: 1932225 - RNA, 19 nt, Homo sapiens
  misc_RNA (1)...(19): siRNA sense strand
gggagaagaagucugagaa

SEQ ID NO: 1932226 - RNA, 19 nt, Homo sapiens
  misc_RNA (1)...(19): siRNA sense strand
ggaagagggcagugaaagu

SEQ ID NO: 1932227 - RNA, 19 nt, Homo sapiens
  misc_RNA (1)...(19): siRNA sense strand
guauaauccucagagcaaa

SEQ ID NO: 1932228 - RNA, 19 nt, Homo sapiens
  misc_RNA (1)...(19): siRNA sense strand
ccaaguauugcucagauga

SEQ ID NO: 1932229 - RNA, 19 nt, Homo sapiens
  misc_RNA (1)...(19): siRNA sense strand
gggagaaugcgcccaucua

SEQ ID NO: 1932230 - RNA, 19 nt, Homo sapiens
  misc_RNA (1)...(19): siRNA sense strand
gcccuugcauugcugaaga

SEQ ID NO: 1932231 - RNA, 19 nt, Homo sapiens
  misc_RNA (1)...(19): siRNA sense strand
gcauccggaucacugagaa

SEQ ID NO: 1932232 - RNA, 19 nt, Homo sapiens
  misc_RNA (1)...(19): siRNA sense strand
gaaggaggagcgauacaag

SEQ ID NO: 1932233 - RNA, 19 nt, Homo sapiens
  misc_RNA (1)...(19): siRNA sense strand
gcaaaccggacaucaacug

SEQ ID NO: 1932234 - RNA, 19 nt, Homo sapiens
  misc_RNA (1)...(19): siRNA sense strand
gcaguggcgucaucaacag

SEQ ID NO: 1932235 - RNA, 19 nt, Homo sapiens
  misc_RNA (1)...(19): siRNA sense strand
gucgggacaugaagaaguu

SEQ ID NO: 1932236 - RNA, 19 nt, Homo sapiens
  misc_RNA (1)...(19): siRNA sense strand
cagugaaagugaagcaugu

SEQ ID NO: 1932237 - RNA, 19 nt, Homo sapiens
  misc_RNA (1)...(19): siRNA sense strand
ccgcauguguggugagugu

SEQ ID NO: 1932238 - RNA, 19 nt, Homo sapiens
  misc_RNA (1)...(19): siRNA sense strand
gcugcuacgccaaguauga

SEQ ID NO: 1932239 - RNA, 19 nt, Homo sapiens
  misc_RNA (1)...(19): siRNA sense strand
gcagaagcacaaggauaaa

SEQ ID NO: 1932240 - RNA, 19 nt, Homo sapiens
  misc_RNA (1)...(19): siRNA sense strand
ggagcgggauggcaaugag

SEQ ID NO: 1932241 - RNA, 19 nt, Homo sapiens
  misc_RNA (1)...(19): siRNA sense strand
ggagaaugcgcccaucuac

SEQ ID NO: 1932242 - RNA, 19 nt, Homo sapiens
  misc_RNA (1)...(19): siRNA sense strand
aagcagaagcacaaggaua

SEQ ID NO: 1932243 - RNA, 19 nt, Homo sapiens
  misc_RNA (1)...(19): siRNA sense strand
ggcagaagcagaagcacaa

SEQ ID NO: 1932244 - RNA, 19 nt, Homo sapiens
  misc_RNA (1)...(19): siRNA sense strand
ugugacaacugcaaugagu

SEQ ID NO: 1932245 - RNA, 19 nt, Homo sapiens
  misc_RNA (1)...(19): siRNA sense strand
gagcaacgagggugacagu

SEQ ID NO: 1932246 - RNA, 19 nt, Homo sapiens
  misc_RNA (1)...(19): siRNA sense strand
ugaggacuguggucacugu

SEQ ID NO: 1932247 - RNA, 19 nt, Homo sapiens
  misc_RNA (1)...(19): siRNA sense strand
ggagaagaagucugagaag

SEQ ID NO: 1932248 - RNA, 19 nt, Homo sapiens
  misc_RNA (1)...(19): siRNA sense strand
ccagugcaaucgccauuac

SEQ ID NO: 1932249 - RNA, 19 nt, Homo sapiens
  misc_RNA (1)...(19): siRNA sense strand
acucuucugugauguguau

SEQ ID NO: 1932250 - RNA, 19 nt, Homo sapiens
  misc_RNA (1)...(19): siRNA sense strand
agaaugcgcccaucuacug

SEQ ID NO: 1932251 - RNA, 19 nt, Homo sapiens
  misc_RNA (1)...(19): siRNA sense strand
gaagcacaaggauaaaugg

SEQ ID NO: 1932252 - RNA, 19 nt, Homo sapiens
  misc_RNA (1)...(19): siRNA sense strand
agcagaagcacaaggauaa

SEQ ID NO: 1932253 - RNA, 19 nt, Homo sapiens
  misc_RNA (1)...(19): siRNA sense strand
gaagaaggaggagcgauac

SEQ ID NO: 1932254 - RNA, 19 nt, Homo sapiens
  misc_RNA (1)...(19): siRNA sense strand
gacagcaaguccgagaaug

SEQ ID NO: 1932255 - RNA, 19 nt, Homo sapiens
  misc_RNA (1)...(19): siRNA sense strand
uguauaauccucagagcaa

SEQ ID NO: 1932256 - RNA, 19 nt, Homo sapiens
  misc_RNA (1)...(19): siRNA sense strand
ccggaucacugagaagaug

SEQ ID NO: 1932257 - RNA, 19 nt, Homo sapiens
  misc_RNA (1)...(19): siRNA sense strand
agugccagcugacgaggua

SEQ ID NO: 1932258 - RNA, 19 nt, Homo sapiens
  misc_RNA (1)...(19): siRNA sense strand
gcauguguggugaguguga

SEQ ID NO: 1932259 - RNA, 19 nt, Homo sapiens
  misc_RNA (1)...(19): siRNA sense strand
gcgcugcuacgccaaguau

SEQ ID NO: 1932260 - RNA, 19 nt, Homo sapiens
  misc_RNA (1)...(19): siRNA sense strand
gagcuugaggccaucauuc

SEQ ID NO: 1932261 - RNA, 19 nt, Homo sapiens
  misc_RNA (1)...(19): siRNA sense strand
ccaaggacccugcgucacu

SEQ ID NO: 1932262 - RNA, 19 nt, Homo sapiens
  misc_RNA (1)...(19): siRNA sense strand
gaagcugcucgaacgcauu

SEQ ID NO: 1932263 - RNA, 19 nt, Homo sapiens
  misc_RNA (1)...(19): siRNA sense strand
ggaccuaccucuggauccu

SEQ ID NO: 1932264 - RNA, 19 nt, Homo sapiens
  misc_RNA (1)...(19): siRNA sense strand
gcuugaggccaucauucua

SEQ ID NO: 1932265 - RNA, 19 nt, Homo sapiens
  misc_RNA (1)...(19): siRNA sense strand
agagggcagugaaagugaa

SEQ ID NO: 1932266 - RNA, 19 nt, Homo sapiens
  misc_RNA (1)...(19): siRNA sense strand
caagcuagagauucgcuau

SEQ ID NO: 1932267 - RNA, 19 nt, Homo sapiens
  misc_RNA (1)...(19): siRNA sense strand
cgacucuucugugaugugu

SEQ ID NO: 1932268 - RNA, 19 nt, Homo sapiens
  misc_RNA (1)...(19): siRNA sense strand
gcagcagagcccuugcauu

SEQ ID NO: 1932269 - RNA, 19 nt, Homo sapiens
  misc_RNA (1)...(19): siRNA sense strand
agaagucugagaagaagaa

SEQ ID NO: 1932270 - RNA, 19 nt, Homo sapiens
  misc_RNA (1)...(19): siRNA sense strand
gaugagcgacacagaagag

SEQ ID NO: 1932271 - RNA, 19 nt, Homo sapiens
  misc_RNA (1)...(19): siRNA sense strand
gcggaagagggcagugaaa

SEQ ID NO: 1932272 - RNA, 19 nt, Homo sapiens
  misc_RNA (1)...(19): siRNA sense strand
cugaagagcacggcaagaa

SEQ ID NO: 1932273 - RNA, 19 nt, Homo sapiens
  misc_RNA (1)...(19): siRNA sense strand
agaagcacaaggauaaaug

SEQ ID NO: 1932274 - RNA, 19 nt, Homo sapiens
  misc_RNA (1)...(19): siRNA sense strand
ggugugacaacugcaauga

SEQ ID NO: 1932275 - RNA, 19 nt, Homo sapiens
  misc_RNA (1)...(19): siRNA sense strand
ugaagcgucgggagaagaa

SEQ ID NO: 1932276 - RNA, 19 nt, Homo sapiens
  misc_RNA (1)...(19): siRNA sense strand
ugaaagugaagcaugugaa

SEQ ID NO: 1932277 - RNA, 19 nt, Homo sapiens
  misc_RNA (1)...(19): siRNA sense strand
aaccggacaucaacugcuu

SEQ ID NO: 1932278 - RNA, 19 nt, Homo sapiens
  misc_RNA (1)...(19): siRNA sense strand
ugucgggagugcagagaga

SEQ ID NO: 1932279 - RNA, 19 nt, Homo sapiens
  misc_RNA (1)...(19): siRNA sense strand
gcgcccaucuacugcaucu

SEQ ID NO: 1932280 - RNA, 19 nt, Homo sapiens
  misc_RNA (1)...(19): siRNA sense strand
gcuaucggcacaagaaguc

SEQ ID NO: 1932281 - RNA, 19 nt, Homo sapiens
  misc_RNA (1)...(19): siRNA sense strand
guauugcucagaugacugu

SEQ ID NO: 1932282 - RNA, 19 nt, Homo sapiens
  misc_RNA (1)...(19): siRNA sense strand
agaagcagaagcacaagga

SEQ ID NO: 1932283 - RNA, 19 nt, Homo sapiens
  misc_RNA (1)...(19): siRNA sense strand
ucuggauccugaccuguau

SEQ ID NO: 1932284 - RNA, 19 nt, Homo sapiens
  misc_RNA (1)...(19): siRNA sense strand
gaagcagaagcacaaggau

SEQ ID NO: 1932285 - RNA, 19 nt, Homo sapiens
  misc_RNA (1)...(19): siRNA sense strand
gggugacagugaugacaca

SEQ ID NO: 1932286 - RNA, 19 nt, Homo sapiens
  misc_RNA (1)...(19): siRNA sense strand
aacaagauccggcagaagu

SEQ ID NO: 1932287 - RNA, 19 nt, Homo sapiens
  misc_RNA (1)...(19): siRNA sense strand
ugacacagaccugcagauc

SEQ ID NO: 1932288 - RNA, 19 nt, Homo sapiens
  misc_RNA (1)...(19): siRNA sense strand
gcgaggaugaggagagcaa

SEQ ID NO: 1932289 - RNA, 19 nt, Homo sapiens
  misc_RNA (1)...(19): siRNA sense strand
gugaaagugaagcauguga

SEQ ID NO: 1932290 - RNA, 19 nt, Homo sapiens
  misc_RNA (1)...(19): siRNA sense strand
ggaugagcgacacagaaga

SEQ ID NO: 1932291 - RNA, 19 nt, Homo sapiens
  misc_RNA (1)...(19): siRNA sense strand
ggcaguggcgucaucaaca

SEQ ID NO: 1932292 - RNA, 19 nt, Homo sapiens
  misc_RNA (1)...(19): siRNA sense strand
gccagugcaaucgccauua

SEQ ID NO: 1932293 - RNA, 19 nt, Homo sapiens
  misc_RNA (1)...(19): siRNA sense strand
acagccaucacagaaguua

SEQ ID NO: 1932294 - RNA, 19 nt, Homo sapiens
  misc_RNA (1)...(19): siRNA sense strand
gagcaaaacauacuguaag

SEQ ID NO: 1932295 - RNA, 19 nt, Homo sapiens
  misc_RNA (1)...(19): siRNA sense strand
cagaagcacaaggauaaau

SEQ ID NO: 1932296 - RNA, 19 nt, Homo sapiens
  misc_RNA (1)...(19): siRNA sense strand
gagaaugcgcccaucuacu

SEQ ID NO: 1932297 - RNA, 19 nt, Homo sapiens
  misc_RNA (1)...(19): siRNA sense strand
agaaggaggagcgauacaa

SEQ ID NO: 1932298 - RNA, 19 nt, Homo sapiens
  misc_RNA (1)...(19): siRNA sense strand
cgggauugcuggcccugau

SEQ ID NO: 1932299 - RNA, 19 nt, Homo sapiens
  misc_RNA (1)...(19): siRNA sense strand
ucugugauguguauaaucc

SEQ ID NO: 1932300 - RNA, 19 nt, Homo sapiens
  misc_RNA (1)...(19): siRNA sense strand
gggagugcagagagaaaga

SEQ ID NO: 1932301 - RNA, 19 nt, Homo sapiens
  misc_RNA (1)...(19): siRNA sense strand
ggcaucggcagaagcagaa

SEQ ID NO: 1932302 - RNA, 19 nt, Homo sapiens
  misc_RNA (1)...(19): siRNA sense strand
gcagacaccucucauguua

SEQ ID NO: 1932303 - RNA, 19 nt, Homo sapiens
  misc_RNA (1)...(19): siRNA sense strand
guuaucagcucacaaagua

SEQ ID NO: 1932304 - RNA, 19 nt, Homo sapiens
  misc_RNA (1)...(19): siRNA sense strand
uagcauaucucaucucaaa

SEQ ID NO: 1932305 - RNA, 19 nt, Homo sapiens
  misc_RNA (1)...(19): siRNA sense strand
ggagguggcugcagaaaug

SEQ ID NO: 1932306 - RNA, 19 nt, Homo sapiens
  misc_RNA (1)...(19): siRNA sense strand
ggagaaacaccucuugaua

SEQ ID NO: 1932307 - RNA, 19 nt, Homo sapiens
  misc_RNA (1)...(19): siRNA sense strand
ggacagagugugaauauga

SEQ ID NO: 1932308 - RNA, 19 nt, Homo sapiens
  misc_RNA (1)...(19): siRNA sense strand
ucaguuggguggagauuua

SEQ ID NO: 1932309 - RNA, 19 nt, Homo sapiens
  misc_RNA (1)...(19): siRNA sense strand
caucaugucuuauaaggaa

SEQ ID NO: 1932310 - RNA, 19 nt, Homo sapiens
  misc_RNA (1)...(19): siRNA sense strand
gagaaacaccucuugauau

SEQ ID NO: 1932311 - RNA, 19 nt, Homo sapiens
  misc_RNA (1)...(19): siRNA sense strand
agaaacaccucuugauaug

SEQ ID NO: 1932312 - RNA, 19 nt, Homo sapiens
  misc_RNA (1)...(19): siRNA sense strand
acaaagaacuugccaaugc

SEQ ID NO: 1932313 - RNA, 19 nt, Homo sapiens
  misc_RNA (1)...(19): siRNA sense strand
ccaacagccuuucugcuaa

SEQ ID NO: 1932314 - RNA, 19 nt, Homo sapiens
  misc_RNA (1)...(19): siRNA sense strand
ggacuucaauucagauucu

SEQ ID NO: 1932315 - RNA, 19 nt, Homo sapiens
  misc_RNA (1)...(19): siRNA sense strand
ugacuugguucaucuuauu

SEQ ID NO: 1932316 - RNA, 19 nt, Homo sapiens
  misc_RNA (1)...(19): siRNA sense strand
gaaccaacuggauuucuuu

SEQ ID NO: 1932317 - RNA, 19 nt, Homo sapiens
  misc_RNA (1)...(19): siRNA sense strand
ugucaaagcuacucaauac

SEQ ID NO: 1932318 - RNA, 19 nt, Homo sapiens
  misc_RNA (1)...(19): siRNA sense strand
gaaaaugugucgcuucuuc

SEQ ID NO: 1932319 - RNA, 19 nt, Homo sapiens
  misc_RNA (1)...(19): siRNA sense strand
caacagacuggaucuugua

SEQ ID NO: 1932320 - RNA, 19 nt, Homo sapiens
  misc_RNA (1)...(19): siRNA sense strand
ggguggagauuuaaauuca

SEQ ID NO: 1932321 - RNA, 19 nt, Homo sapiens
  misc_RNA (1)...(19): siRNA sense strand
gauccaggcuucacuaagg

SEQ ID NO: 1932322 - RNA, 19 nt, Homo sapiens
  misc_RNA (1)...(19): siRNA sense strand
ggauauuuaugacuugguu

SEQ ID NO: 1932323 - RNA, 19 nt, Homo sapiens
  misc_RNA (1)...(19): siRNA sense strand
gacuggaucuuguaagguu

SEQ ID NO: 1932324 - RNA, 19 nt, Homo sapiens
  misc_RNA (1)...(19): siRNA sense strand
aaaaggaugucuucuagua

SEQ ID NO: 1932325 - RNA, 19 nt, Homo sapiens
  misc_RNA (1)...(19): siRNA sense strand
caaaguaauugggccagaa

SEQ ID NO: 1932326 - RNA, 19 nt, Homo sapiens
  misc_RNA (1)...(19): siRNA sense strand
caaagaacuugccaaugca

SEQ ID NO: 1932327 - RNA, 19 nt, Homo sapiens
  misc_RNA (1)...(19): siRNA sense strand
ucacuccacugccauguau

SEQ ID NO: 1932328 - RNA, 19 nt, Homo sapiens
  misc_RNA (1)...(19): siRNA sense strand
gcugaugcuuucugugauu

SEQ ID NO: 1932329 - RNA, 19 nt, Homo sapiens
  misc_RNA (1)...(19): siRNA sense strand
gcucauuauucauaugcua

SEQ ID NO: 1932330 - RNA, 19 nt, Homo sapiens
  misc_RNA (1)...(19): siRNA sense strand
ugaacgauguaaagaguug

SEQ ID NO: 1932331 - RNA, 19 nt, Homo sapiens
  misc_RNA (1)...(19): siRNA sense strand
acaaggacauuuaccuaug

SEQ ID NO: 1932332 - RNA, 19 nt, Homo sapiens
  misc_RNA (1)...(19): siRNA sense strand
ucuaguaacugugacauug

SEQ ID NO: 1932333 - RNA, 19 nt, Homo sapiens
  misc_RNA (1)...(19): siRNA sense strand
ccaccuggcaguauuguuu

SEQ ID NO: 1932334 - RNA, 19 nt, Homo sapiens
  misc_RNA (1)...(19): siRNA sense strand
cgacaaggacauuuaccua

SEQ ID NO: 1932335 - RNA, 19 nt, Homo sapiens
  misc_RNA (1)...(19): siRNA sense strand
gaugucaggcaaccagaua

SEQ ID NO: 1932336 - RNA, 19 nt, Homo sapiens
  misc_RNA (1)...(19): siRNA sense strand
uuucaacacaugccuauua

SEQ ID NO: 1932337 - RNA, 19 nt, Homo sapiens
  misc_RNA (1)...(19): siRNA sense strand
gcauccaccuggcaguauu

SEQ ID NO: 1932338 - RNA, 19 nt, Homo sapiens
  misc_RNA (1)...(19): siRNA sense strand
aaacaaagaacuugccaau

SEQ ID NO: 1932339 - RNA, 19 nt, Homo sapiens
  misc_RNA (1)...(19): siRNA sense strand
caaccaucacuauuacaua

SEQ ID NO: 1932340 - RNA, 19 nt, Homo sapiens
  misc_RNA (1)...(19): siRNA sense strand
gaaauguuaaugcaguuga

SEQ ID NO: 1932341 - RNA, 19 nt, Homo sapiens
  misc_RNA (1)...(19): siRNA sense strand
gaagcaggauaugauguca

SEQ ID NO: 1932342 - RNA, 19 nt, Homo sapiens
  misc_RNA (1)...(19): siRNA sense strand
gcuauuggauacauauugg

SEQ ID NO: 1932343 - RNA, 19 nt, Homo sapiens
  misc_RNA (1)...(19): siRNA sense strand
gguagaagcaggauaugau

SEQ ID NO: 1932344 - RNA, 19 nt, Homo sapiens
  misc_RNA (1)...(19): siRNA sense strand
ccaacuggauuucuuuuaa

SEQ ID NO: 1932345 - RNA, 19 nt, Homo sapiens
  misc_RNA (1)...(19): siRNA sense strand
agacaccucucauguuauc

SEQ ID NO: 1932346 - RNA, 19 nt, Homo sapiens
  misc_RNA (1)...(19): siRNA sense strand
uauagcauaucucaucuca

SEQ ID NO: 1932347 - RNA, 19 nt, Homo sapiens
  misc_RNA (1)...(19): siRNA sense strand
caaggacauuuaccuaugg

SEQ ID NO: 1932348 - RNA, 19 nt, Homo sapiens
  misc_RNA (1)...(19): siRNA sense strand
caacagccuuucugcuaag

SEQ ID NO: 1932349 - RNA, 19 nt, Homo sapiens
  misc_RNA (1)...(19): siRNA sense strand
gacaaggacauuuaccuau

SEQ ID NO: 1932350 - RNA, 19 nt, Homo sapiens
  misc_RNA (1)...(19): siRNA sense strand
ggauacauauuggacuuca

SEQ ID NO: 1932351 - RNA, 19 nt, Homo sapiens
  misc_RNA (1)...(19): siRNA sense strand
gcagaaaugcgagcucuuc

SEQ ID NO: 1932352 - RNA, 19 nt, Homo sapiens
  misc_RNA (1)...(19): siRNA sense strand
ucaaagggacagaguguga

SEQ ID NO: 1932353 - RNA, 19 nt, Homo sapiens
  misc_RNA (1)...(19): siRNA sense strand
gcuacucaauacggaauuu

SEQ ID NO: 1932354 - RNA, 19 nt, Homo sapiens
  misc_RNA (1)...(19): siRNA sense strand
cauguuaucagcucacaaa

SEQ ID NO: 1932355 - RNA, 19 nt, Homo sapiens
  misc_RNA (1)...(19): siRNA sense strand
cauccgacaaggacauuua

SEQ ID NO: 1932356 - RNA, 19 nt, Homo sapiens
  misc_RNA (1)...(19): siRNA sense strand
gggcagacaccucucaugu

SEQ ID NO: 1932357 - RNA, 19 nt, Homo sapiens
  misc_RNA (1)...(19): siRNA sense strand
ccaucacuauuacauauuc

SEQ ID NO: 1932358 - RNA, 19 nt, Homo sapiens
  misc_RNA (1)...(19): siRNA sense strand
uaucaucacccuugcagaa

SEQ ID NO: 1932359 - RNA, 19 nt, Homo sapiens
  misc_RNA (1)...(19): siRNA sense strand
cagcauaguagccuuucua

SEQ ID NO: 1932360 - RNA, 19 nt, Homo sapiens
  misc_RNA (1)...(19): siRNA sense strand
gcaaccagauaaagaaaau

SEQ ID NO: 1932361 - RNA, 19 nt, Homo sapiens
  misc_RNA (1)...(19): siRNA sense strand
uaaugcaguugauaagcuu

SEQ ID NO: 1932362 - RNA, 19 nt, Homo sapiens
  misc_RNA (1)...(19): siRNA sense strand
gugaauaugacagauguaa

SEQ ID NO: 1932363 - RNA, 19 nt, Homo sapiens
  misc_RNA (1)...(19): siRNA sense strand
caucuuuguuuccaagguu

SEQ ID NO: 1932364 - RNA, 19 nt, Homo sapiens
  misc_RNA (1)...(19): siRNA sense strand
uggcaucugugcacaugaa

SEQ ID NO: 1932365 - RNA, 19 nt, Homo sapiens
  misc_RNA (1)...(19): siRNA sense strand
gcaaccaucacuauuacau

SEQ ID NO: 1932366 - RNA, 19 nt, Homo sapiens
  misc_RNA (1)...(19): siRNA sense strand
ccaugugggcuauuggaua

SEQ ID NO: 1932367 - RNA, 19 nt, Homo sapiens
  misc_RNA (1)...(19): siRNA sense strand
uaaauucaacuccucuuca

SEQ ID NO: 1932368 - RNA, 19 nt, Homo sapiens
  misc_RNA (1)...(19): siRNA sense strand
gguggagauuuaaauucaa

SEQ ID NO: 1932369 - RNA, 19 nt, Homo sapiens
  misc_RNA (1)...(19): siRNA sense strand
caugugggcuauuggauac

SEQ ID NO: 1932370 - RNA, 19 nt, Homo sapiens
  misc_RNA (1)...(19): siRNA sense strand
gcauaucucaucucaaagg

SEQ ID NO: 1932371 - RNA, 19 nt, Homo sapiens
  misc_RNA (1)...(19): siRNA sense strand
gugugaauaugacagaugu

SEQ ID NO: 1932372 - RNA, 19 nt, Homo sapiens
  misc_RNA (1)...(19): siRNA sense strand
ucauugggcugcuauuaac

SEQ ID NO: 1932373 - RNA, 19 nt, Homo sapiens
  misc_RNA (1)...(19): siRNA sense strand
guuuaauccuucucucaau

SEQ ID NO: 1932374 - RNA, 19 nt, Homo sapiens
  misc_RNA (1)...(19): siRNA sense strand
guagaagcaggauaugaug

SEQ ID NO: 1932375 - RNA, 19 nt, Homo sapiens
  misc_RNA (1)...(19): siRNA sense strand
gggcugcuauuaacaacag

SEQ ID NO: 1932376 - RNA, 19 nt, Homo sapiens
  misc_RNA (1)...(19): siRNA sense strand
gauguaaagaguugguaga

SEQ ID NO: 1932377 - RNA, 19 nt, Homo sapiens
  misc_RNA (1)...(19): siRNA sense strand
cagccuuucugcuaaguuc

SEQ ID NO: 1932378 - RNA, 19 nt, Homo sapiens
  misc_RNA (1)...(19): siRNA sense strand
aaaggaugucuucuaguaa

SEQ ID NO: 1932379 - RNA, 19 nt, Homo sapiens
  misc_RNA (1)...(19): siRNA sense strand
gggagaaacaccucuugau

SEQ ID NO: 1932380 - RNA, 19 nt, Homo sapiens
  misc_RNA (1)...(19): siRNA sense strand
cagacuggaucuuguaagg

SEQ ID NO: 1932381 - RNA, 19 nt, Homo sapiens
  misc_RNA (1)...(19): siRNA sense strand
cugaugcuuucugugauua

SEQ ID NO: 1932382 - RNA, 19 nt, Homo sapiens
  misc_RNA (1)...(19): siRNA sense strand
ucaggcaaccagauaaaga

SEQ ID NO: 1932383 - RNA, 19 nt, Homo sapiens
  misc_RNA (1)...(19): siRNA sense strand
gauacauauuggacuucaa

SEQ ID NO: 1932384 - RNA, 19 nt, Homo sapiens
  misc_RNA (1)...(19): siRNA sense strand
uuucugacaucuuuguuuc

SEQ ID NO: 1932385 - RNA, 19 nt, Homo sapiens
  misc_RNA (1)...(19): siRNA sense strand
aaaaggugcuguuguagau

SEQ ID NO: 1932386 - RNA, 19 nt, Homo sapiens
  misc_RNA (1)...(19): siRNA sense strand
uggcaaccaucacuauuac

SEQ ID NO: 1932387 - RNA, 19 nt, Homo sapiens
  misc_RNA (1)...(19): siRNA sense strand
uuggcaaccaucacuauua

SEQ ID NO: 1932388 - RNA, 19 nt, Homo sapiens
  misc_RNA (1)...(19): siRNA sense strand
gguucuugguuggguauaa

SEQ ID NO: 1932389 - RNA, 19 nt, Homo sapiens
  misc_RNA (1)...(19): siRNA sense strand
caggcaaccagauaaagaa

SEQ ID NO: 1932390 - RNA, 19 nt, Homo sapiens
  misc_RNA (1)...(19): siRNA sense strand
uuaaaaggaugucuucuag

SEQ ID NO: 1932391 - RNA, 19 nt, Homo sapiens
  misc_RNA (1)...(19): siRNA sense strand
guugguagaagcaggauau

SEQ ID NO: 1932392 - RNA, 19 nt, Homo sapiens
  misc_RNA (1)...(19): siRNA sense strand
ggaaauguuaaugcaguug

SEQ ID NO: 1932393 - RNA, 19 nt, Homo sapiens
  misc_RNA (1)...(19): siRNA sense strand
ggcagacaccucucauguu

SEQ ID NO: 1932394 - RNA, 19 nt, Homo sapiens
  misc_RNA (1)...(19): siRNA sense strand
gacagagugugaauaugac

SEQ ID NO: 1932395 - RNA, 19 nt, Homo sapiens
  misc_RNA (1)...(19): siRNA sense strand
cuuauaaggaagccauuaa

SEQ ID NO: 1932396 - RNA, 19 nt, Homo sapiens
  misc_RNA (1)...(19): siRNA sense strand
uauaagacuugggcaacug

SEQ ID NO: 1932397 - RNA, 19 nt, Homo sapiens
  misc_RNA (1)...(19): siRNA sense strand
uucaacacaugccuauuau

SEQ ID NO: 1932398 - RNA, 19 nt, Homo sapiens
  misc_RNA (1)...(19): siRNA sense strand
accaacagccuuucugcua

SEQ ID NO: 1932399 - RNA, 19 nt, Homo sapiens
  misc_RNA (1)...(19): siRNA sense strand
uuugaacgauguaaagagu

SEQ ID NO: 1932400 - RNA, 19 nt, Homo sapiens
  misc_RNA (1)...(19): siRNA sense strand
gaagaagaaaagaaaguga

SEQ ID NO: 1932401 - RNA, 19 nt, Homo sapiens
  misc_RNA (1)...(19): siRNA sense strand
uauggcaucugugcacaug

SEQ ID NO: 1932402 - RNA, 19 nt, Homo sapiens
  misc_RNA (1)...(19): siRNA sense strand
ggagauauauaaucagaag

SEQ ID NO: 1932403 - RNA, 19 nt, Homo sapiens
  misc_RNA (1)...(19): siRNA sense strand
gcagcucaguggcuucaua

SEQ ID NO: 1932404 - RNA, 19 nt, Homo sapiens
  misc_RNA (1)...(19): siRNA sense strand
gcuccaagguccucgcuaa

SEQ ID NO: 1932405 - RNA, 19 nt, Homo sapiens
  misc_RNA (1)...(19): siRNA sense strand
gggagcagcuuccuuugga

SEQ ID NO: 1932406 - RNA, 19 nt, Homo sapiens
  misc_RNA (1)...(19): siRNA sense strand
ccaagguccucgcuaagaa

SEQ ID NO: 1932407 - RNA, 19 nt, Homo sapiens
  misc_RNA (1)...(19): siRNA sense strand
gcagcugucuaugauguaa

SEQ ID NO: 1932408 - RNA, 19 nt, Homo sapiens
  misc_RNA (1)...(19): siRNA sense strand
caggagauauauaaucaga

SEQ ID NO: 1932409 - RNA, 19 nt, Homo sapiens
  misc_RNA (1)...(19): siRNA sense strand
gauaggaguaacugagaua

SEQ ID NO: 1932410 - RNA, 19 nt, Homo sapiens
  misc_RNA (1)...(19): siRNA sense strand
ggaguucgcagacugauag

SEQ ID NO: 1932411 - RNA, 19 nt, Homo sapiens
  misc_RNA (1)...(19): siRNA sense strand
ugaguggucuggucaucaa

SEQ ID NO: 1932412 - RNA, 19 nt, Homo sapiens
  misc_RNA (1)...(19): siRNA sense strand
aggaguaacugagauagaa

SEQ ID NO: 1932413 - RNA, 19 nt, Homo sapiens
  misc_RNA (1)...(19): siRNA sense strand
gaacuucagaggaaacaag

SEQ ID NO: 1932414 - RNA, 19 nt, Homo sapiens
  misc_RNA (1)...(19): siRNA sense strand
uccaggagauauauaauca

SEQ ID NO: 1932415 - RNA, 19 nt, Homo sapiens
  misc_RNA (1)...(19): siRNA sense strand
ggaaggagcacgcagucau

SEQ ID NO: 1932416 - RNA, 19 nt, Homo sapiens
  misc_RNA (1)...(19): siRNA sense strand
gguacuuucuggagauugu

SEQ ID NO: 1932417 - RNA, 19 nt, Homo sapiens
  misc_RNA (1)...(19): siRNA sense strand
cgagaucgacuuccucugu

SEQ ID NO: 1932418 - RNA, 19 nt, Homo sapiens
  misc_RNA (1)...(19): siRNA sense strand
ggaguaacugagauagaaa

SEQ ID NO: 1932419 - RNA, 19 nt, Homo sapiens
  misc_RNA (1)...(19): siRNA sense strand
gaaggagcacgcagucauc

SEQ ID NO: 1932420 - RNA, 19 nt, Homo sapiens
  misc_RNA (1)...(19): siRNA sense strand
ugaggcgccugucggacua

SEQ ID NO: 1932421 - RNA, 19 nt, Homo sapiens
  misc_RNA (1)...(19): siRNA sense strand
ucgcagcugucuaugaugu

SEQ ID NO: 1932422 - RNA, 19 nt, Homo sapiens
  misc_RNA (1)...(19): siRNA sense strand
gcagcuuccuuuggaguuc

SEQ ID NO: 1932423 - RNA, 19 nt, Homo sapiens
  misc_RNA (1)...(19): siRNA sense strand
gagaccaagcaccgcguua

SEQ ID NO: 1932424 - RNA, 19 nt, Homo sapiens
  misc_RNA (1)...(19): siRNA sense strand
cguggacccuccugaacuu

SEQ ID NO: 1932425 - RNA, 19 nt, Homo sapiens
  misc_RNA (1)...(19): siRNA sense strand
agucgcagcugucuaugau

SEQ ID NO: 1932426 - RNA, 19 nt, Homo sapiens
  misc_RNA (1)...(19): siRNA sense strand
gaaguacgaggcggacaug

SEQ ID NO: 1932427 - RNA, 19 nt, Homo sapiens
  misc_RNA (1)...(19): siRNA sense strand
cagcucaguggcuucauaa

SEQ ID NO: 1932428 - RNA, 19 nt, Homo sapiens
  misc_RNA (1)...(19): siRNA sense strand
ggagccaacuggucaugcu

SEQ ID NO: 1932429 - RNA, 19 nt, Homo sapiens
  misc_RNA (1)...(19): siRNA sense strand
acaugugguuucuccugua

SEQ ID NO: 1932430 - RNA, 19 nt, Homo sapiens
  misc_RNA (1)...(19): siRNA sense strand
ggagcacgcagucaucauc

SEQ ID NO: 1932431 - RNA, 19 nt, Homo sapiens
  misc_RNA (1)...(19): siRNA sense strand
ucuaugauguaacccugaa

SEQ ID NO: 1932432 - RNA, 19 nt, Homo sapiens
  misc_RNA (1)...(19): siRNA sense strand
ggcuuccuguccucaagua

SEQ ID NO: 1932433 - RNA, 19 nt, Homo sapiens
  misc_RNA (1)...(19): siRNA sense strand
gcuggucggcuuugucuuc

SEQ ID NO: 1932434 - RNA, 19 nt, Homo sapiens
  misc_RNA (1)...(19): siRNA sense strand
ugugggagcagcuuccuuu

SEQ ID NO: 1932435 - RNA, 19 nt, Homo sapiens
  misc_RNA (1)...(19): siRNA sense strand
caaccacaacuucgagauc

SEQ ID NO: 1932436 - RNA, 19 nt, Homo sapiens
  misc_RNA (1)...(19): siRNA sense strand
gcucaguggcuucauaaac

SEQ ID NO: 1932437 - RNA, 19 nt, Homo sapiens
  misc_RNA (1)...(19): siRNA sense strand
cucaguggcuucauaaacu

SEQ ID NO: 1932438 - RNA, 19 nt, Homo sapiens
  misc_RNA (1)...(19): siRNA sense strand
guggguggaccauguguga

SEQ ID NO: 1932439 - RNA, 19 nt, Homo sapiens
  misc_RNA (1)...(19): siRNA sense strand
gggauccucuacgggaaga

SEQ ID NO: 1932440 - RNA, 19 nt, Homo sapiens
  misc_RNA (1)...(19): siRNA sense strand
ugauaggaguaacugagau

SEQ ID NO: 1932441 - RNA, 19 nt, Homo sapiens
  misc_RNA (1)...(19): siRNA sense strand
gcaccugcuggucggcuuu

SEQ ID NO: 1932442 - RNA, 19 nt, Homo sapiens
  misc_RNA (1)...(19): siRNA sense strand
ggugaguggucuggucauc

SEQ ID NO: 1932443 - RNA, 19 nt, Homo sapiens
  misc_RNA (1)...(19): siRNA sense strand
ggcuggacgugguacuuuc

SEQ ID NO: 1932444 - RNA, 19 nt, Homo sapiens
  misc_RNA (1)...(19): siRNA sense strand
ugauguaacccugaacuuc

SEQ ID NO: 1932445 - RNA, 19 nt, Homo sapiens
  misc_RNA (1)...(19): siRNA sense strand
cgugguacuuucuggagau

SEQ ID NO: 1932446 - RNA, 19 nt, Homo sapiens
  misc_RNA (1)...(19): siRNA sense strand
uaaucagaagggcauguuu

SEQ ID NO: 1932447 - RNA, 19 nt, Homo sapiens
  misc_RNA (1)...(19): siRNA sense strand
ccgaguacaugugguuucu

SEQ ID NO: 1932448 - RNA, 19 nt, Homo sapiens
  misc_RNA (1)...(19): siRNA sense strand
gugguacuuucuggagauu

SEQ ID NO: 1932449 - RNA, 19 nt, Homo sapiens
  misc_RNA (1)...(19): siRNA sense strand
aaucagaagggcauguuuc

SEQ ID NO: 1932450 - RNA, 19 nt, Homo sapiens
  misc_RNA (1)...(19): siRNA sense strand
guggucuggucaucaacuu

SEQ ID NO: 1932451 - RNA, 19 nt, Homo sapiens
  misc_RNA (1)...(19): siRNA sense strand
gaacgaauuauccugacaa

SEQ ID NO: 1932452 - RNA, 19 nt, Homo sapiens
  misc_RNA (1)...(19): siRNA sense strand
caacuggagggagaucuua

SEQ ID NO: 1932453 - RNA, 19 nt, Homo sapiens
  misc_RNA (1)...(19): siRNA sense strand
gcugggagcacaucuuguu

SEQ ID NO: 1932454 - RNA, 19 nt, Homo sapiens
  misc_RNA (1)...(19): siRNA sense strand
cggauaaaguggccagugu

SEQ ID NO: 1932455 - RNA, 19 nt, Homo sapiens
  misc_RNA (1)...(19): siRNA sense strand
gauaaaguggccagugugu

SEQ ID NO: 1932456 - RNA, 19 nt, Homo sapiens
  misc_RNA (1)...(19): siRNA sense strand
ugaaguaccaccacugugu

SEQ ID NO: 1932457 - RNA, 19 nt, Homo sapiens
  misc_RNA (1)...(19): siRNA sense strand
uaaaguggccaguguguac

SEQ ID NO: 1932458 - RNA, 19 nt, Homo sapiens
  misc_RNA (1)...(19): siRNA sense strand
acacgcaggucuucaucug

SEQ ID NO: 1932459 - RNA, 19 nt, Homo sapiens
  misc_RNA (1)...(19): siRNA sense strand
cgaccuggcggauaaagug

SEQ ID NO: 1932460 - RNA, 19 nt, Homo sapiens
  misc_RNA (1)...(19): siRNA sense strand
ggacacgcaggucuucauc

SEQ ID NO: 1932461 - RNA, 19 nt, Homo sapiens
  misc_RNA (1)...(19): siRNA sense strand
gcugaaguaccaccacugu

SEQ ID NO: 1932462 - RNA, 19 nt, Homo sapiens
  misc_RNA (1)...(19): siRNA sense strand
gaugacaaggacacaguuc

SEQ ID NO: 1932463 - RNA, 19 nt, Homo sapiens
  misc_RNA (1)...(19): siRNA sense strand
ugacaaggacacaguucga

SEQ ID NO: 1932464 - RNA, 19 nt, Homo sapiens
  misc_RNA (1)...(19): siRNA sense strand
agaacgaauuauccugaca

SEQ ID NO: 1932465 - RNA, 19 nt, Homo sapiens
  misc_RNA (1)...(19): siRNA sense strand
cgagaaaggucuagaauua

SEQ ID NO: 1932466 - RNA, 19 nt, Homo sapiens
  misc_RNA (1)...(19): siRNA sense strand
ccacgaagcucaagcagaa

SEQ ID NO: 1932467 - RNA, 19 nt, Homo sapiens
  misc_RNA (1)...(19): siRNA sense strand
gcuauggagugaaauauuu

SEQ ID NO: 1932468 - RNA, 19 nt, Homo sapiens
  misc_RNA (1)...(19): siRNA sense strand
gaagaggauugcagaaaug

SEQ ID NO: 1932469 - RNA, 19 nt, Homo sapiens
  misc_RNA (1)...(19): siRNA sense strand
ccaauggcaugguguauuu

SEQ ID NO: 1932470 - RNA, 19 nt, Homo sapiens
  misc_RNA (1)...(19): siRNA sense strand
ggaaaucaguuagcuaaau

SEQ ID NO: 1932471 - RNA, 19 nt, Homo sapiens
  misc_RNA (1)...(19): siRNA sense strand
gaaguugggaaaucaguua

SEQ ID NO: 1932472 - RNA, 19 nt, Homo sapiens
  misc_RNA (1)...(19): siRNA sense strand
ucaguuagcuaaauucaga

SEQ ID NO: 1932473 - RNA, 19 nt, Homo sapiens
  misc_RNA (1)...(19): siRNA sense strand
gaauggaccacuucuugua

SEQ ID NO: 1932474 - RNA, 19 nt, Homo sapiens
  misc_RNA (1)...(19): siRNA sense strand
aauaugagguguucaguga

SEQ ID NO: 1932475 - RNA, 19 nt, Homo sapiens
  misc_RNA (1)...(19): siRNA sense strand
gcagaugccucagacagaa

SEQ ID NO: 1932476 - RNA, 19 nt, Homo sapiens
  misc_RNA (1)...(19): siRNA sense strand
ugaagaggauugcagaaau

SEQ ID NO: 1932477 - RNA, 19 nt, Homo sapiens
  misc_RNA (1)...(19): siRNA sense strand
gaauugaggcuuuacuuca

SEQ ID NO: 1932478 - RNA, 19 nt, Homo sapiens
  misc_RNA (1)...(19): siRNA sense strand
cagaacgauugaugaagua

SEQ ID NO: 1932479 - RNA, 19 nt, Homo sapiens
  misc_RNA (1)...(19): siRNA sense strand
caaacuuucugucuucuca

SEQ ID NO: 1932480 - RNA, 19 nt, Homo sapiens
  misc_RNA (1)...(19): siRNA sense strand
caacaaagcaaaccucaag

SEQ ID NO: 1932481 - RNA, 19 nt, Homo sapiens
  misc_RNA (1)...(19): siRNA sense strand
gaggccagaugacaaguau

SEQ ID NO: 1932482 - RNA, 19 nt, Homo sapiens
  misc_RNA (1)...(19): siRNA sense strand
gagauaucccuguucagua

SEQ ID NO: 1932483 - RNA, 19 nt, Homo sapiens
  misc_RNA (1)...(19): siRNA sense strand
gaauuacggagucaacaaa

SEQ ID NO: 1932484 - RNA, 19 nt, Homo sapiens
  misc_RNA (1)...(19): siRNA sense strand
uuaggaagcuggucaugga

SEQ ID NO: 1932485 - RNA, 19 nt, Homo sapiens
  misc_RNA (1)...(19): siRNA sense strand
ucaaggugcuggugaagau

SEQ ID NO: 1932486 - RNA, 19 nt, Homo sapiens
  misc_RNA (1)...(19): siRNA sense strand
gaucgaaaccugccagaca

SEQ ID NO: 1932487 - RNA, 19 nt, Homo sapiens
  misc_RNA (1)...(19): siRNA sense strand
uaacaacccgugcuuugaa

SEQ ID NO: 1932488 - RNA, 19 nt, Homo sapiens
  misc_RNA (1)...(19): siRNA sense strand
gcagcuauggagugaaaua

SEQ ID NO: 1932489 - RNA, 19 nt, Homo sapiens
  misc_RNA (1)...(19): siRNA sense strand
ugacaaguaucacgagaag

SEQ ID NO: 1932490 - RNA, 19 nt, Homo sapiens
  misc_RNA (1)...(19): siRNA sense strand
ccaaauucuugcauacaga

SEQ ID NO: 1932491 - RNA, 19 nt, Homo sapiens
  misc_RNA (1)...(19): siRNA sense strand
gcucccaggucauuaggaa

SEQ ID NO: 1932492 - RNA, 19 nt, Homo sapiens
  misc_RNA (1)...(19): siRNA sense strand
gcagaaaugacagauauca

SEQ ID NO: 1932493 - RNA, 19 nt, Homo sapiens
  misc_RNA (1)...(19): siRNA sense strand
uugcagaaaugacagauau

SEQ ID NO: 1932494 - RNA, 19 nt, Homo sapiens
  misc_RNA (1)...(19): siRNA sense strand
ggcagcagaucuacgagaa

SEQ ID NO: 1932495 - RNA, 19 nt, Homo sapiens
  misc_RNA (1)...(19): siRNA sense strand
ggagauaucccuguucagu

SEQ ID NO: 1932496 - RNA, 19 nt, Homo sapiens
  misc_RNA (1)...(19): siRNA sense strand
cagcagcucugguggagau

SEQ ID NO: 1932497 - RNA, 19 nt, Homo sapiens
  misc_RNA (1)...(19): siRNA sense strand
aagcugacuuuaucgauga

SEQ ID NO: 1932498 - RNA, 19 nt, Homo sapiens
  misc_RNA (1)...(19): siRNA sense strand
ugaauuacgugggugaaug

SEQ ID NO: 1932499 - RNA, 19 nt, Homo sapiens
  misc_RNA (1)...(19): siRNA sense strand
acagaacgauugaugaagu

SEQ ID NO: 1932500 - RNA, 19 nt, Homo sapiens
  misc_RNA (1)...(19): siRNA sense strand
gaacccaccauaccuguca

SEQ ID NO: 1932501 - RNA, 19 nt, Homo sapiens
  misc_RNA (1)...(19): siRNA sense strand
caaagcaaaccucaagaug

SEQ ID NO: 1932502 - RNA, 19 nt, Homo sapiens
  misc_RNA (1)...(19): siRNA sense strand
ccugacagcuggagauauc

SEQ ID NO: 1932503 - RNA, 19 nt, Homo sapiens
  misc_RNA (1)...(19): siRNA sense strand
acaaaggaauggaccacuu

SEQ ID NO: 1932504 - RNA, 19 nt, Homo sapiens
  misc_RNA (1)...(19): siRNA sense strand
ggagcucgccaauggaauu

SEQ ID NO: 1932505 - RNA, 19 nt, Homo sapiens
  misc_RNA (1)...(19): siRNA sense strand
cuguggagcucuugaaguu

SEQ ID NO: 1932506 - RNA, 19 nt, Homo sapiens
  misc_RNA (1)...(19): siRNA sense strand
gcugcggccuucuugacua

SEQ ID NO: 1932507 - RNA, 19 nt, Homo sapiens
  misc_RNA (1)...(19): siRNA sense strand
cgacgaagccaaacuuucu

SEQ ID NO: 1932508 - RNA, 19 nt, Homo sapiens
  misc_RNA (1)...(19): siRNA sense strand
ggacccaaauacaauagag

SEQ ID NO: 1932509 - RNA, 19 nt, Homo sapiens
  misc_RNA (1)...(19): siRNA sense strand
ccagaucaugccagucuua

SEQ ID NO: 1932510 - RNA, 19 nt, Homo sapiens
  misc_RNA (1)...(19): siRNA sense strand
gugauaauaugagguguuc

SEQ ID NO: 1932511 - RNA, 19 nt, Homo sapiens
  misc_RNA (1)...(19): siRNA sense strand
gaaaugacagauaucaaac

SEQ ID NO: 1932512 - RNA, 19 nt, Homo sapiens
  misc_RNA (1)...(19): siRNA sense strand
gagacaggcagcagaucua

SEQ ID NO: 1932513 - RNA, 19 nt, Homo sapiens
  misc_RNA (1)...(19): siRNA sense strand
ggaauggaccacuucuugu

SEQ ID NO: 1932514 - RNA, 19 nt, Homo sapiens
  misc_RNA (1)...(19): siRNA sense strand
agacaucgacgaagccaaa

SEQ ID NO: 1932515 - RNA, 19 nt, Homo sapiens
  misc_RNA (1)...(19): siRNA sense strand
cagcagaucuacgagaaag

SEQ ID NO: 1932516 - RNA, 19 nt, Homo sapiens
  misc_RNA (1)...(19): siRNA sense strand
gaucaugccagucuuaaaa

SEQ ID NO: 1932517 - RNA, 19 nt, Homo sapiens
  misc_RNA (1)...(19): siRNA sense strand
agacagaacgauugaugaa

SEQ ID NO: 1932518 - RNA, 19 nt, Homo sapiens
  misc_RNA (1)...(19): siRNA sense strand
gaugacugccaaauucuug

SEQ ID NO: 1932519 - RNA, 19 nt, Homo sapiens
  misc_RNA (1)...(19): siRNA sense strand
ccucauagacagaacgauu

SEQ ID NO: 1932520 - RNA, 19 nt, Homo sapiens
  misc_RNA (1)...(19): siRNA sense strand
gcauacagaaauucgagaa

SEQ ID NO: 1932521 - RNA, 19 nt, Homo sapiens
  misc_RNA (1)...(19): siRNA sense strand
ugggaaaucaguuagcuaa

SEQ ID NO: 1932522 - RNA, 19 nt, Homo sapiens
  misc_RNA (1)...(19): siRNA sense strand
caaaggaauggaccacuuc

SEQ ID NO: 1932523 - RNA, 19 nt, Homo sapiens
  misc_RNA (1)...(19): siRNA sense strand
caauggaauuccugacucu

SEQ ID NO: 1932524 - RNA, 19 nt, Homo sapiens
  misc_RNA (1)...(19): siRNA sense strand
ggccagaugacaaguauca

SEQ ID NO: 1932525 - RNA, 19 nt, Homo sapiens
  misc_RNA (1)...(19): siRNA sense strand
agacagugccugcaggaaa

SEQ ID NO: 1932526 - RNA, 19 nt, Homo sapiens
  misc_RNA (1)...(19): siRNA sense strand
agauaucccuguucaguac

SEQ ID NO: 1932527 - RNA, 19 nt, Homo sapiens
  misc_RNA (1)...(19): siRNA sense strand
acucacacauggacaccua

SEQ ID NO: 1932528 - RNA, 19 nt, Homo sapiens
  misc_RNA (1)...(19): siRNA sense strand
gacagugccugcaggaaaa

SEQ ID NO: 1932529 - RNA, 19 nt, Homo sapiens
  misc_RNA (1)...(19): siRNA sense strand
aagccaaacuuucugucuu

SEQ ID NO: 1932530 - RNA, 19 nt, Homo sapiens
  misc_RNA (1)...(19): siRNA sense strand
gccaaauucuugcauacag

SEQ ID NO: 1932531 - RNA, 19 nt, Homo sapiens
  misc_RNA (1)...(19): siRNA sense strand
aagcaucggucggaguaaa

SEQ ID NO: 1932532 - RNA, 19 nt, Homo sapiens
  misc_RNA (1)...(19): siRNA sense strand
gaggauugcagaaaugaca

SEQ ID NO: 1932533 - RNA, 19 nt, Homo sapiens
  misc_RNA (1)...(19): siRNA sense strand
gucagaagccucauagaca

SEQ ID NO: 1932534 - RNA, 19 nt, Homo sapiens
  misc_RNA (1)...(19): siRNA sense strand
ccuggcagaugaagacuca

SEQ ID NO: 1932535 - RNA, 19 nt, Homo sapiens
  misc_RNA (1)...(19): siRNA sense strand
agaagcaucggucggagua

SEQ ID NO: 1932536 - RNA, 19 nt, Homo sapiens
  misc_RNA (1)...(19): siRNA sense strand
ugaugcagcuauggaguga

SEQ ID NO: 1932537 - RNA, 19 nt, Homo sapiens
  misc_RNA (1)...(19): siRNA sense strand
aacgauugaugaaguaguu

SEQ ID NO: 1932538 - RNA, 19 nt, Homo sapiens
  misc_RNA (1)...(19): siRNA sense strand
gauauugaacccaccauac

SEQ ID NO: 1932539 - RNA, 19 nt, Homo sapiens
  misc_RNA (1)...(19): siRNA sense strand
ugaagaugaucgaauugag

SEQ ID NO: 1932540 - RNA, 19 nt, Homo sapiens
  misc_RNA (1)...(19): siRNA sense strand
gaagcaggcacagguggaa

SEQ ID NO: 1932541 - RNA, 19 nt, Homo sapiens
  misc_RNA (1)...(19): siRNA sense strand
uguacggccucucggauga

SEQ ID NO: 1932542 - RNA, 19 nt, Homo sapiens
  misc_RNA (1)...(19): siRNA sense strand
uucaagcccuggcagauga

SEQ ID NO: 1932543 - RNA, 19 nt, Homo sapiens
  misc_RNA (1)...(19): siRNA sense strand
cagcagauagaauugaaga

SEQ ID NO: 1932544 - RNA, 19 nt, Homo sapiens
  misc_RNA (1)...(19): siRNA sense strand
ggagacaggcagcagaucu

SEQ ID NO: 1932545 - RNA, 19 nt, Homo sapiens
  misc_RNA (1)...(19): siRNA sense strand
gaagccaaacuuucugucu

SEQ ID NO: 1932546 - RNA, 19 nt, Homo sapiens
  misc_RNA (1)...(19): siRNA sense strand
gugaaugcauccgaacugu

SEQ ID NO: 1932547 - RNA, 19 nt, Homo sapiens
  misc_RNA (1)...(19): siRNA sense strand
gauaauaugagguguucag

SEQ ID NO: 1932548 - RNA, 19 nt, Homo sapiens
  misc_RNA (1)...(19): siRNA sense strand
gaucuacgagaaaggucua

SEQ ID NO: 1932549 - RNA, 19 nt, Homo sapiens
  misc_RNA (1)...(19): siRNA sense strand
gcagcagaucuacgagaaa

SEQ ID NO: 1932550 - RNA, 19 nt, Homo sapiens
  misc_RNA (1)...(19): siRNA sense strand
gcaaaacucagccacaaug

SEQ ID NO: 1932551 - RNA, 19 nt, Homo sapiens
  misc_RNA (1)...(19): siRNA sense strand
uaaaauccuugcacguuug

SEQ ID NO: 1932552 - RNA, 19 nt, Homo sapiens
  misc_RNA (1)...(19): siRNA sense strand
caacccgugcuuugaagaa

SEQ ID NO: 1932553 - RNA, 19 nt, Homo sapiens
  misc_RNA (1)...(19): siRNA sense strand
augcagcuauggagugaaa

SEQ ID NO: 1932554 - RNA, 19 nt, Homo sapiens
  misc_RNA (1)...(19): siRNA sense strand
cgaauugaggcuuuacuuc

SEQ ID NO: 1932555 - RNA, 19 nt, Homo sapiens
  misc_RNA (1)...(19): siRNA sense strand
agaaaggucuagaauuacg

SEQ ID NO: 1932556 - RNA, 19 nt, Homo sapiens
  misc_RNA (1)...(19): siRNA sense strand
gaugaggccagaugacaag

SEQ ID NO: 1932557 - RNA, 19 nt, Homo sapiens
  misc_RNA (1)...(19): siRNA sense strand
cagggacccaaauacaaua

SEQ ID NO: 1932558 - RNA, 19 nt, Homo sapiens
  misc_RNA (1)...(19): siRNA sense strand
uuaaaauccuugcacguuu

SEQ ID NO: 1932559 - RNA, 19 nt, Homo sapiens
  misc_RNA (1)...(19): siRNA sense strand
auugaggcuuuacuucaua

SEQ ID NO: 1932560 - RNA, 19 nt, Homo sapiens
  misc_RNA (1)...(19): siRNA sense strand
ugaucgaauugaggcuuua

SEQ ID NO: 1932561 - RNA, 19 nt, Homo sapiens
  misc_RNA (1)...(19): siRNA sense strand
gagaaaggucuagaauuac

SEQ ID NO: 1932562 - RNA, 19 nt, Homo sapiens
  misc_RNA (1)...(19): siRNA sense strand
acaaguaucacgagaagca

SEQ ID NO: 1932563 - RNA, 19 nt, Homo sapiens
  misc_RNA (1)...(19): siRNA sense strand
uuacagggacccaaauaca

SEQ ID NO: 1932564 - RNA, 19 nt, Homo sapiens
  misc_RNA (1)...(19): siRNA sense strand
aggaauggaccacuucuug

SEQ ID NO: 1932565 - RNA, 19 nt, Homo sapiens
  misc_RNA (1)...(19): siRNA sense strand
cgagaaaggucuagaauua

SEQ ID NO: 1932566 - RNA, 19 nt, Homo sapiens
  misc_RNA (1)...(19): siRNA sense strand
ccacgaagcucaagcagaa

SEQ ID NO: 1932567 - RNA, 19 nt, Homo sapiens
  misc_RNA (1)...(19): siRNA sense strand
gcuauggagugaaauauuu

SEQ ID NO: 1932568 - RNA, 19 nt, Homo sapiens
  misc_RNA (1)...(19): siRNA sense strand
gaagaggauugcagaaaug

SEQ ID NO: 1932569 - RNA, 19 nt, Homo sapiens
  misc_RNA (1)...(19): siRNA sense strand
ccaauggcaugguguauuu

SEQ ID NO: 1932570 - RNA, 19 nt, Homo sapiens
  misc_RNA (1)...(19): siRNA sense strand
ggaaaucaguuagcuaaau

SEQ ID NO: 1932571 - RNA, 19 nt, Homo sapiens
  misc_RNA (1)...(19): siRNA sense strand
gaaguugggaaaucaguua

SEQ ID NO: 1932572 - RNA, 19 nt, Homo sapiens
  misc_RNA (1)...(19): siRNA sense strand
ucaguuagcuaaauucaga

SEQ ID NO: 1932573 - RNA, 19 nt, Homo sapiens
  misc_RNA (1)...(19): siRNA sense strand
gaauggaccacuucuugua

SEQ ID NO: 1932574 - RNA, 19 nt, Homo sapiens
  misc_RNA (1)...(19): siRNA sense strand
aauaugagguguucaguga

SEQ ID NO: 1932575 - RNA, 19 nt, Homo sapiens
  misc_RNA (1)...(19): siRNA sense strand
gcagaugccucagacagaa

SEQ ID NO: 1932576 - RNA, 19 nt, Homo sapiens
  misc_RNA (1)...(19): siRNA sense strand
ugaagaggauugcagaaau

SEQ ID NO: 1932577 - RNA, 19 nt, Homo sapiens
  misc_RNA (1)...(19): siRNA sense strand
caaacuuucugucuucuca

SEQ ID NO: 1932578 - RNA, 19 nt, Homo sapiens
  misc_RNA (1)...(19): siRNA sense strand
caacaaagcaaaccucaag

SEQ ID NO: 1932579 - RNA, 19 nt, Homo sapiens
  misc_RNA (1)...(19): siRNA sense strand
gaggccagaugacaaguau

SEQ ID NO: 1932580 - RNA, 19 nt, Homo sapiens
  misc_RNA (1)...(19): siRNA sense strand
gagauaucccuguucagua

SEQ ID NO: 1932581 - RNA, 19 nt, Homo sapiens
  misc_RNA (1)...(19): siRNA sense strand
gaauuacggagucaacaaa

SEQ ID NO: 1932582 - RNA, 19 nt, Homo sapiens
  misc_RNA (1)...(19): siRNA sense strand
uuaggaagcuggucaugga

SEQ ID NO: 1932583 - RNA, 19 nt, Homo sapiens
  misc_RNA (1)...(19): siRNA sense strand
ucaaggugcuggugaagau

SEQ ID NO: 1932584 - RNA, 19 nt, Homo sapiens
  misc_RNA (1)...(19): siRNA sense strand
gaucgaaaccugccagaca

SEQ ID NO: 1932585 - RNA, 19 nt, Homo sapiens
  misc_RNA (1)...(19): siRNA sense strand
uaacaacccgugcuuugaa

SEQ ID NO: 1932586 - RNA, 19 nt, Homo sapiens
  misc_RNA (1)...(19): siRNA sense strand
gcagcuauggagugaaaua

SEQ ID NO: 1932587 - RNA, 19 nt, Homo sapiens
  misc_RNA (1)...(19): siRNA sense strand
ugacaaguaucacgagaag

SEQ ID NO: 1932588 - RNA, 19 nt, Homo sapiens
  misc_RNA (1)...(19): siRNA sense strand
ccaaauucuugcauacaga

SEQ ID NO: 1932589 - RNA, 19 nt, Homo sapiens
  misc_RNA (1)...(19): siRNA sense strand
gcucccaggucauuaggaa

SEQ ID NO: 1932590 - RNA, 19 nt, Homo sapiens
  misc_RNA (1)...(19): siRNA sense strand
gcagaaaugacagauauca

SEQ ID NO: 1932591 - RNA, 19 nt, Homo sapiens
  misc_RNA (1)...(19): siRNA sense strand
uugcagaaaugacagauau

SEQ ID NO: 1932592 - RNA, 19 nt, Homo sapiens
  misc_RNA (1)...(19): siRNA sense strand
ggcagcagaucuacgagaa

SEQ ID NO: 1932593 - RNA, 19 nt, Homo sapiens
  misc_RNA (1)...(19): siRNA sense strand
ggagauaucccuguucagu

SEQ ID NO: 1932594 - RNA, 19 nt, Homo sapiens
  misc_RNA (1)...(19): siRNA sense strand
cagcagcucugguggagau

SEQ ID NO: 1932595 - RNA, 19 nt, Homo sapiens
  misc_RNA (1)...(19): siRNA sense strand
aagcugacuuuaucgauga

SEQ ID NO: 1932596 - RNA, 19 nt, Homo sapiens
  misc_RNA (1)...(19): siRNA sense strand
ugaauuacgugggugaaug

SEQ ID NO: 1932597 - RNA, 19 nt, Homo sapiens
  misc_RNA (1)...(19): siRNA sense strand
gaacccaccauaccuguca

SEQ ID NO: 1932598 - RNA, 19 nt, Homo sapiens
  misc_RNA (1)...(19): siRNA sense strand
caaagcaaaccucaagaug

SEQ ID NO: 1932599 - RNA, 19 nt, Homo sapiens
  misc_RNA (1)...(19): siRNA sense strand
ccugacagcuggagauauc

SEQ ID NO: 1932600 - RNA, 19 nt, Homo sapiens
  misc_RNA (1)...(19): siRNA sense strand
acaaaggaauggaccacuu

SEQ ID NO: 1932601 - RNA, 19 nt, Homo sapiens
  misc_RNA (1)...(19): siRNA sense strand
ggagcucgccaauggaauu

SEQ ID NO: 1932602 - RNA, 19 nt, Homo sapiens
  misc_RNA (1)...(19): siRNA sense strand
cuguggagcucuugaaguu

SEQ ID NO: 1932603 - RNA, 19 nt, Homo sapiens
  misc_RNA (1)...(19): siRNA sense strand
gcugcggccuucuugacua

SEQ ID NO: 1932604 - RNA, 19 nt, Homo sapiens
  misc_RNA (1)...(19): siRNA sense strand
cgacgaagccaaacuuucu

SEQ ID NO: 1932605 - RNA, 19 nt, Homo sapiens
  misc_RNA (1)...(19): siRNA sense strand
ggacccaaauacaauagag

SEQ ID NO: 1932606 - RNA, 19 nt, Homo sapiens
  misc_RNA (1)...(19): siRNA sense strand
ccagaucaugccagucuua

SEQ ID NO: 1932607 - RNA, 19 nt, Homo sapiens
  misc_RNA (1)...(19): siRNA sense strand
gugauaauaugagguguuc

SEQ ID NO: 1932608 - RNA, 19 nt, Homo sapiens
  misc_RNA (1)...(19): siRNA sense strand
gaaaugacagauaucaaac

SEQ ID NO: 1932609 - RNA, 19 nt, Homo sapiens
  misc_RNA (1)...(19): siRNA sense strand
gagacaggcagcagaucua

SEQ ID NO: 1932610 - RNA, 19 nt, Homo sapiens
  misc_RNA (1)...(19): siRNA sense strand
ggaauggaccacuucuugu

SEQ ID NO: 1932611 - RNA, 19 nt, Homo sapiens
  misc_RNA (1)...(19): siRNA sense strand
agacaucgacgaagccaaa

SEQ ID NO: 1932612 - RNA, 19 nt, Homo sapiens
  misc_RNA (1)...(19): siRNA sense strand
cagcagaucuacgagaaag

SEQ ID NO: 1932613 - RNA, 19 nt, Homo sapiens
  misc_RNA (1)...(19): siRNA sense strand
gaucaugccagucuuaaaa

SEQ ID NO: 1932614 - RNA, 19 nt, Homo sapiens
  misc_RNA (1)...(19): siRNA sense strand
gaugacugccaaauucuug

SEQ ID NO: 1932615 - RNA, 19 nt, Homo sapiens
  misc_RNA (1)...(19): siRNA sense strand
gcauacagaaauucgagaa

SEQ ID NO: 1932616 - RNA, 19 nt, Homo sapiens
  misc_RNA (1)...(19): siRNA sense strand
ggccagaugacaaguauca

SEQ ID NO: 1932617 - RNA, 19 nt, Homo sapiens
  misc_RNA (1)...(19): siRNA sense strand
caaaggaauggaccacuuc

SEQ ID NO: 1932618 - RNA, 19 nt, Homo sapiens
  misc_RNA (1)...(19): siRNA sense strand
agacagugccugcaggaaa

SEQ ID NO: 1932619 - RNA, 19 nt, Homo sapiens
  misc_RNA (1)...(19): siRNA sense strand
caauggaauuccugacucu

SEQ ID NO: 1932620 - RNA, 19 nt, Homo sapiens
  misc_RNA (1)...(19): siRNA sense strand
ugggaaaucaguuagcuaa

SEQ ID NO: 1932621 - RNA, 19 nt, Homo sapiens
  misc_RNA (1)...(19): siRNA sense strand
agauaucccuguucaguac

SEQ ID NO: 1932622 - RNA, 19 nt, Homo sapiens
  misc_RNA (1)...(19): siRNA sense strand
acucacacauggacaccua

SEQ ID NO: 1932623 - RNA, 19 nt, Homo sapiens
  misc_RNA (1)...(19): siRNA sense strand
gacagugccugcaggaaaa

SEQ ID NO: 1932624 - RNA, 19 nt, Homo sapiens
  misc_RNA (1)...(19): siRNA sense strand
aagccaaacuuucugucuu

SEQ ID NO: 1932625 - RNA, 19 nt, Homo sapiens
  misc_RNA (1)...(19): siRNA sense strand
gccaaauucuugcauacag

SEQ ID NO: 1932626 - RNA, 19 nt, Homo sapiens
  misc_RNA (1)...(19): siRNA sense strand
aagcaucggucggaguaaa

SEQ ID NO: 1932627 - RNA, 19 nt, Homo sapiens
  misc_RNA (1)...(19): siRNA sense strand
gaggauugcagaaaugaca

SEQ ID NO: 1932628 - RNA, 19 nt, Homo sapiens
  misc_RNA (1)...(19): siRNA sense strand
gauauugaacccaccauac

SEQ ID NO: 1932629 - RNA, 19 nt, Homo sapiens
  misc_RNA (1)...(19): siRNA sense strand
ccuggcagaugaagacuca

SEQ ID NO: 1932630 - RNA, 19 nt, Homo sapiens
  misc_RNA (1)...(19): siRNA sense strand
agaagcaucggucggagua

SEQ ID NO: 1932631 - RNA, 19 nt, Homo sapiens
  misc_RNA (1)...(19): siRNA sense strand
ugaugcagcuauggaguga

SEQ ID NO: 1932632 - RNA, 19 nt, Homo sapiens
  misc_RNA (1)...(19): siRNA sense strand
gaagcaggcacagguggaa

SEQ ID NO: 1932633 - RNA, 19 nt, Homo sapiens
  misc_RNA (1)...(19): siRNA sense strand
uguacggccucucggauga

SEQ ID NO: 1932634 - RNA, 19 nt, Homo sapiens
  misc_RNA (1)...(19): siRNA sense strand
uucaagcccuggcagauga

SEQ ID NO: 1932635 - RNA, 19 nt, Homo sapiens
  misc_RNA (1)...(19): siRNA sense strand
cagcagauagaauugaaga

SEQ ID NO: 1932636 - RNA, 19 nt, Homo sapiens
  misc_RNA (1)...(19): siRNA sense strand
ggagacaggcagcagaucu

SEQ ID NO: 1932637 - RNA, 19 nt, Homo sapiens
  misc_RNA (1)...(19): siRNA sense strand
gaagccaaacuuucugucu

SEQ ID NO: 1932638 - RNA, 19 nt, Homo sapiens
  misc_RNA (1)...(19): siRNA sense strand
gugaaugcauccgaacugu

SEQ ID NO: 1932639 - RNA, 19 nt, Homo sapiens
  misc_RNA (1)...(19): siRNA sense strand
gauaauaugagguguucag

SEQ ID NO: 1932640 - RNA, 19 nt, Homo sapiens
  misc_RNA (1)...(19): siRNA sense strand
gaucuacgagaaaggucua

SEQ ID NO: 1932641 - RNA, 19 nt, Homo sapiens
  misc_RNA (1)...(19): siRNA sense strand
gcagcagaucuacgagaaa

SEQ ID NO: 1932642 - RNA, 19 nt, Homo sapiens
  misc_RNA (1)...(19): siRNA sense strand
gcaaaacucagccacaaug

SEQ ID NO: 1932643 - RNA, 19 nt, Homo sapiens
  misc_RNA (1)...(19): siRNA sense strand
uaaaauccuugcacguuug

SEQ ID NO: 1932644 - RNA, 19 nt, Homo sapiens
  misc_RNA (1)...(19): siRNA sense strand
caacccgugcuuugaagaa

SEQ ID NO: 1932645 - RNA, 19 nt, Homo sapiens
  misc_RNA (1)...(19): siRNA sense strand
augcagcuauggagugaaa

SEQ ID NO: 1932646 - RNA, 19 nt, Homo sapiens
  misc_RNA (1)...(19): siRNA sense strand
agaaaggucuagaauuacg

SEQ ID NO: 1932647 - RNA, 19 nt, Homo sapiens
  misc_RNA (1)...(19): siRNA sense strand
gagaaaggucuagaauuac

SEQ ID NO: 1932648 - RNA, 19 nt, Homo sapiens
  misc_RNA (1)...(19): siRNA sense strand
cagggacccaaauacaaua

SEQ ID NO: 1932649 - RNA, 19 nt, Homo sapiens
  misc_RNA (1)...(19): siRNA sense strand
uuaaaauccuugcacguuu

SEQ ID NO: 1932650 - RNA, 19 nt, Homo sapiens
  misc_RNA (1)...(19): siRNA sense strand
acaaguaucacgagaagca

SEQ ID NO: 1932651 - RNA, 19 nt, Homo sapiens
  misc_RNA (1)...(19): siRNA sense strand
gaugaggccagaugacaag

SEQ ID NO: 1932652 - RNA, 19 nt, Homo sapiens
  misc_RNA (1)...(19): siRNA sense strand
cugccagcguugaaaguuu

SEQ ID NO: 1932653 - RNA, 19 nt, Homo sapiens
  misc_RNA (1)...(19): siRNA sense strand
aggaauggaccacuucuug

SEQ ID NO: 1932654 - RNA, 19 nt, Homo sapiens
  misc_RNA (1)...(19): siRNA sense strand
uuacagggacccaaauaca

SEQ ID NO: 1932655 - RNA, 19 nt, Homo sapiens
  misc_RNA (1)...(19): siRNA sense strand
uuagcuaaauucagacagu

SEQ ID NO: 1932656 - RNA, 19 nt, Homo sapiens
  misc_RNA (1)...(19): siRNA sense strand
gcgcaaaacucagccacaa

SEQ ID NO: 1932657 - RNA, 19 nt, Homo sapiens
  misc_RNA (1)...(19): siRNA sense strand
gcucagcagauagaauuga

SEQ ID NO: 1932658 - RNA, 19 nt, Homo sapiens
  misc_RNA (1)...(19): siRNA sense strand
cuggagauaucccuguuca

SEQ ID NO: 1932659 - RNA, 19 nt, Homo sapiens
  misc_RNA (1)...(19): siRNA sense strand
cgauauugaacccaccaua

SEQ ID NO: 1932660 - RNA, 19 nt, Homo sapiens
  misc_RNA (1)...(19): siRNA sense strand
gaugaagaggauugcagaa

SEQ ID NO: 1932661 - RNA, 19 nt, Homo sapiens
  misc_RNA (1)...(19): siRNA sense strand
gcagaucuacgagaaaggu

SEQ ID NO: 1932662 - RNA, 19 nt, Homo sapiens
  misc_RNA (1)...(19): siRNA sense strand
gggaaaucaguuagcuaaa

SEQ ID NO: 1932663 - RNA, 19 nt, Homo sapiens
  misc_RNA (1)...(19): siRNA sense strand
cuacgagaaaggucuagaa

SEQ ID NO: 1932664 - RNA, 19 nt, Homo sapiens
  misc_RNA (1)...(19): siRNA sense strand
agccaaacuuucugucuuc

SEQ ID NO: 1932665 - RNA, 19 nt, Homo sapiens
  misc_RNA (1)...(19): siRNA sense strand
ucaagaagauccgcgacua

SEQ ID NO: 1932666 - RNA, 19 nt, Homo sapiens
  misc_RNA (1)...(19): siRNA sense strand
cccaauaacuccaguauac

SEQ ID NO: 1932667 - RNA, 19 nt, Homo sapiens
  misc_RNA (1)...(19): siRNA sense strand
caacagggacuacuuugug

SEQ ID NO: 1932668 - RNA, 19 nt, Homo sapiens
  misc_RNA (1)...(19): siRNA sense strand
ugcgugagcucaacaacua

SEQ ID NO: 1932669 - RNA, 19 nt, Homo sapiens
  misc_RNA (1)...(19): siRNA sense strand
ggacaacugccgccucuuc

SEQ ID NO: 1932670 - RNA, 19 nt, Homo sapiens
  misc_RNA (1)...(19): siRNA sense strand
ugaagaagcgcgaggaaau

SEQ ID NO: 1932671 - RNA, 19 nt, Homo sapiens
  misc_RNA (1)...(19): siRNA sense strand
ccuacacacuggccuacua

SEQ ID NO: 1932672 - RNA, 19 nt, Homo sapiens
  misc_RNA (1)...(19): siRNA sense strand
gaggacaccaucaagaaga

SEQ ID NO: 1932673 - RNA, 19 nt, Homo sapiens
  misc_RNA (1)...(19): siRNA sense strand
gaagaagcgcgaggaaauc

SEQ ID NO: 1932674 - RNA, 19 nt, Homo sapiens
  misc_RNA (1)...(19): siRNA sense strand
cacgguggcuccaaacguu

SEQ ID NO: 1932675 - RNA, 19 nt, Homo sapiens
  misc_RNA (1)...(19): siRNA sense strand
gcuacgccuucgucaugua

SEQ ID NO: 1932676 - RNA, 19 nt, Homo sapiens
  misc_RNA (1)...(19): siRNA sense strand
gcuacagcauggugcaaga

SEQ ID NO: 1932677 - RNA, 19 nt, Homo sapiens
  misc_RNA (1)...(19): siRNA sense strand
uauacacgguggcuccaaa

SEQ ID NO: 1932678 - RNA, 19 nt, Homo sapiens
  misc_RNA (1)...(19): siRNA sense strand
ccaagcccguggacaagga

SEQ ID NO: 1932679 - RNA, 19 nt, Homo sapiens
  misc_RNA (1)...(19): siRNA sense strand
ccaguuacgugccauuugc

SEQ ID NO: 1932680 - RNA, 19 nt, Homo sapiens
  misc_RNA (1)...(19): siRNA sense strand
gcuccaaacguucagagaa

SEQ ID NO: 1932681 - RNA, 19 nt, Homo sapiens
  misc_RNA (1)...(19): siRNA sense strand
uggaggagauugccaaggu

SEQ ID NO: 1932682 - RNA, 19 nt, Homo sapiens
  misc_RNA (1)...(19): siRNA sense strand
guucagagaauuccuacug

SEQ ID NO: 1932683 - RNA, 19 nt, Homo sapiens
  misc_RNA (1)...(19): siRNA sense strand
gcguggagcgcgucaagaa

SEQ ID NO: 1932684 - RNA, 19 nt, Homo sapiens
  misc_RNA (1)...(19): siRNA sense strand
gcucaguauuccauguuuc

SEQ ID NO: 1932685 - RNA, 19 nt, Homo sapiens
  misc_RNA (1)...(19): siRNA sense strand
gcucaacaacuacgagauc

SEQ ID NO: 1932686 - RNA, 19 nt, Homo sapiens
  misc_RNA (1)...(19): siRNA sense strand
aacagggacuacuuuguga

SEQ ID NO: 1932687 - RNA, 19 nt, Homo sapiens
  misc_RNA (1)...(19): siRNA sense strand
gcccaacagggacuacuuu

SEQ ID NO: 1932688 - RNA, 19 nt, Homo sapiens
  misc_RNA (1)...(19): siRNA sense strand
cuccaaacguucagagaau

SEQ ID NO: 1932689 - RNA, 19 nt, Homo sapiens
  misc_RNA (1)...(19): siRNA sense strand
ccgaggacaccaucaagaa

SEQ ID NO: 1932690 - RNA, 19 nt, Homo sapiens
  misc_RNA (1)...(19): siRNA sense strand
gaacgggcagcgcaaguac

SEQ ID NO: 1932691 - RNA, 19 nt, Homo sapiens
  misc_RNA (1)...(19): siRNA sense strand
gcccaauaacuccaguaua

SEQ ID NO: 1932692 - RNA, 19 nt, Homo sapiens
  misc_RNA (1)...(19): siRNA sense strand
caacugccgccucuucauc

SEQ ID NO: 1932693 - RNA, 19 nt, Homo sapiens
  misc_RNA (1)...(19): siRNA sense strand
gaugaagaagcgcgaggaa

SEQ ID NO: 1932694 - RNA, 19 nt, Homo sapiens
  misc_RNA (1)...(19): siRNA sense strand
ccgcagccaugagcaguga

SEQ ID NO: 1932695 - RNA, 19 nt, Homo sapiens
  misc_RNA (1)...(19): siRNA sense strand
ggcucaguauuccauguuu

SEQ ID NO: 1932696 - RNA, 19 nt, Homo sapiens
  misc_RNA (1)...(19): siRNA sense strand
cggcuacgccuucgucaug

SEQ ID NO: 1932697 - RNA, 19 nt, Homo sapiens
  misc_RNA (1)...(19): siRNA sense strand
guggagcgcgucaagaaga

SEQ ID NO: 1932698 - RNA, 19 nt, Homo sapiens
  misc_RNA (1)...(19): siRNA sense strand
ggacuuugacggcaagaac

SEQ ID NO: 1932699 - RNA, 19 nt, Homo sapiens
  misc_RNA (1)...(19): siRNA sense strand
ucgccacacuacagaagaa

SEQ ID NO: 1932700 - RNA, 19 nt, Homo sapiens
  misc_RNA (1)...(19): siRNA sense strand
cagggacuacuuugugaaa

SEQ ID NO: 1932701 - RNA, 19 nt, Homo sapiens
  misc_RNA (1)...(19): siRNA sense strand
ugauggagaccgugaagau

SEQ ID NO: 1932702 - RNA, 19 nt, Homo sapiens
  misc_RNA (1)...(19): siRNA sense strand
uccaaacguucagagaauu

SEQ ID NO: 1932703 - RNA, 19 nt, Homo sapiens
  misc_RNA (1)...(19): siRNA sense strand
ccaaacguucagagaauuc

SEQ ID NO: 1932704 - RNA, 19 nt, Homo sapiens
  misc_RNA (1)...(19): siRNA sense strand
gacaacugccgccucuuca

SEQ ID NO: 1932705 - RNA, 19 nt, Homo sapiens
  misc_RNA (1)...(19): siRNA sense strand
gggcucaguauuccauguu

SEQ ID NO: 1932706 - RNA, 19 nt, Homo sapiens
  misc_RNA (1)...(19): siRNA sense strand
ccaccgaggacaccaucaa

SEQ ID NO: 1932707 - RNA, 19 nt, Homo sapiens
  misc_RNA (1)...(19): siRNA sense strand
caagaagauccgcgacuac

SEQ ID NO: 1932708 - RNA, 19 nt, Homo sapiens
  misc_RNA (1)...(19): siRNA sense strand
acagcauggugcaagagaa

SEQ ID NO: 1932709 - RNA, 19 nt, Homo sapiens
  misc_RNA (1)...(19): siRNA sense strand
ugucgacgccaccaccuuu

SEQ ID NO: 1932710 - RNA, 19 nt, Homo sapiens
  misc_RNA (1)...(19): siRNA sense strand
ccaacagggacuacuuugu

SEQ ID NO: 1932711 - RNA, 19 nt, Homo sapiens
  misc_RNA (1)...(19): siRNA sense strand
agaacgggcagcgcaagua

SEQ ID NO: 1932712 - RNA, 19 nt, Homo sapiens
  misc_RNA (1)...(19): siRNA sense strand
gcuucgccuucguggagua

SEQ ID NO: 1932713 - RNA, 19 nt, Homo sapiens
  misc_RNA (1)...(19): siRNA sense strand
gaucgccacacuacagaag

SEQ ID NO: 1932714 - RNA, 19 nt, Homo sapiens
  misc_RNA (1)...(19): siRNA sense strand
ccaauaacuccaguauaca

SEQ ID NO: 1932715 - RNA, 19 nt, Homo sapiens
  misc_RNA (1)...(19): siRNA sense strand
guagccaucccugccauug

SEQ ID NO: 1932716 - RNA, 19 nt, Homo sapiens
  misc_RNA (1)...(19): siRNA sense strand
gauggagaccgugaagauc

SEQ ID NO: 1932717 - RNA, 19 nt, Homo sapiens
  misc_RNA (1)...(19): siRNA sense strand
gagaacgggcagcgcaagu

SEQ ID NO: 1932718 - RNA, 19 nt, Homo sapiens
  misc_RNA (1)...(19): siRNA sense strand
gaagaagaguccacaguua

SEQ ID NO: 1932719 - RNA, 19 nt, Homo sapiens
  misc_RNA (1)...(19): siRNA sense strand
gaaaguaacuccaacaaag

SEQ ID NO: 1932720 - RNA, 19 nt, Homo sapiens
  misc_RNA (1)...(19): siRNA sense strand
cagacaaacuucccauuua

SEQ ID NO: 1932721 - RNA, 19 nt, Homo sapiens
  misc_RNA (1)...(19): siRNA sense strand
gaagaugaguuuagugaug

SEQ ID NO: 1932722 - RNA, 19 nt, Homo sapiens
  misc_RNA (1)...(19): siRNA sense strand
ccaagaaucucauacagaa

SEQ ID NO: 1932723 - RNA, 19 nt, Homo sapiens
  misc_RNA (1)...(19): siRNA sense strand
gaaguaggcagauggaaua

SEQ ID NO: 1932724 - RNA, 19 nt, Homo sapiens
  misc_RNA (1)...(19): siRNA sense strand
caagugagguugccauuga

SEQ ID NO: 1932725 - RNA, 19 nt, Homo sapiens
  misc_RNA (1)...(19): siRNA sense strand
uaacacagaucaaggagaa

SEQ ID NO: 1932726 - RNA, 19 nt, Homo sapiens
  misc_RNA (1)...(19): siRNA sense strand
uaugaaagcuccagaaaug

SEQ ID NO: 1932727 - RNA, 19 nt, Homo sapiens
  misc_RNA (1)...(19): siRNA sense strand
gaagcagaaucucauguuu

SEQ ID NO: 1932728 - RNA, 19 nt, Homo sapiens
  misc_RNA (1)...(19): siRNA sense strand
cagauaaacuacagucuaa

SEQ ID NO: 1932729 - RNA, 19 nt, Homo sapiens
  misc_RNA (1)...(19): siRNA sense strand
gaaugaagaggauacuuua

SEQ ID NO: 1932730 - RNA, 19 nt, Homo sapiens
  misc_RNA (1)...(19): siRNA sense strand
gaaaagaacuauuguggaa

SEQ ID NO: 1932731 - RNA, 19 nt, Homo sapiens
  misc_RNA (1)...(19): siRNA sense strand
gcaguugggugguuuguau

SEQ ID NO: 1932732 - RNA, 19 nt, Homo sapiens
  misc_RNA (1)...(19): siRNA sense strand
gaagacugcuggcugauuc

SEQ ID NO: 1932733 - RNA, 19 nt, Homo sapiens
  misc_RNA (1)...(19): siRNA sense strand
gaauugugcuuccuacaga

SEQ ID NO: 1932734 - RNA, 19 nt, Homo sapiens
  misc_RNA (1)...(19): siRNA sense strand
gcagaaagccgucauuaca

SEQ ID NO: 1932735 - RNA, 19 nt, Homo sapiens
  misc_RNA (1)...(19): siRNA sense strand
caacacaucucaggguaaa

SEQ ID NO: 1932736 - RNA, 19 nt, Homo sapiens
  misc_RNA (1)...(19): siRNA sense strand
gugaagacaugaacaguga

SEQ ID NO: 1932737 - RNA, 19 nt, Homo sapiens
  misc_RNA (1)...(19): siRNA sense strand
guaaggauuuggaugaaga

SEQ ID NO: 1932738 - RNA, 19 nt, Homo sapiens
  misc_RNA (1)...(19): siRNA sense strand
ugacacaacuccuggaaug

SEQ ID NO: 1932739 - RNA, 19 nt, Homo sapiens
  misc_RNA (1)...(19): siRNA sense strand
caaagggagucauuaagug

SEQ ID NO: 1932740 - RNA, 19 nt, Homo sapiens
  misc_RNA (1)...(19): siRNA sense strand
gaaggcagaucuuaauugc

SEQ ID NO: 1932741 - RNA, 19 nt, Homo sapiens
  misc_RNA (1)...(19): siRNA sense strand
ggaugaagaugccaaugga

SEQ ID NO: 1932742 - RNA, 19 nt, Homo sapiens
  misc_RNA (1)...(19): siRNA sense strand
caaaggagucuuacacuga

SEQ ID NO: 1932743 - RNA, 19 nt, Homo sapiens
  misc_RNA (1)...(19): siRNA sense strand
gaaguaaggcuaaaucucu

SEQ ID NO: 1932744 - RNA, 19 nt, Homo sapiens
  misc_RNA (1)...(19): siRNA sense strand
gcagauaaacuacagucua

SEQ ID NO: 1932745 - RNA, 19 nt, Homo sapiens
  misc_RNA (1)...(19): siRNA sense strand
caggaagucugucauguga

SEQ ID NO: 1932746 - RNA, 19 nt, Homo sapiens
  misc_RNA (1)...(19): siRNA sense strand
ucagguauuucuagaauug

SEQ ID NO: 1932747 - RNA, 19 nt, Homo sapiens
  misc_RNA (1)...(19): siRNA sense strand
gaagaugccaauggaauaa

SEQ ID NO: 1932748 - RNA, 19 nt, Homo sapiens
  misc_RNA (1)...(19): siRNA sense strand
caaauuauucugugucuga

SEQ ID NO: 1932749 - RNA, 19 nt, Homo sapiens
  misc_RNA (1)...(19): siRNA sense strand
gcacaaaggcuaaacuucu

SEQ ID NO: 1932750 - RNA, 19 nt, Homo sapiens
  misc_RNA (1)...(19): siRNA sense strand
guacaccugugaauucaga

SEQ ID NO: 1932751 - RNA, 19 nt, Homo sapiens
  misc_RNA (1)...(19): siRNA sense strand
gaagaguccacaguuauaa

SEQ ID NO: 1932752 - RNA, 19 nt, Homo sapiens
  misc_RNA (1)...(19): siRNA sense strand
guaggcagauggaauaaca

SEQ ID NO: 1932753 - RNA, 19 nt, Homo sapiens
  misc_RNA (1)...(19): siRNA sense strand
ggagaaggcagaucuuaau

SEQ ID NO: 1932754 - RNA, 19 nt, Homo sapiens
  misc_RNA (1)...(19): siRNA sense strand
aaagaacuauuguggaaga

SEQ ID NO: 1932755 - RNA, 19 nt, Homo sapiens
  misc_RNA (1)...(19): siRNA sense strand
aaacuacagucuaacaaga

SEQ ID NO: 1932756 - RNA, 19 nt, Homo sapiens
  misc_RNA (1)...(19): siRNA sense strand
ccaauggaauaacagauga

SEQ ID NO: 1932757 - RNA, 19 nt, Homo sapiens
  misc_RNA (1)...(19): siRNA sense strand
ugaagaggauacuuuaugu

SEQ ID NO: 1932758 - RNA, 19 nt, Homo sapiens
  misc_RNA (1)...(19): siRNA sense strand
acucuaaucugaacucuga

SEQ ID NO: 1932759 - RNA, 19 nt, Homo sapiens
  misc_RNA (1)...(19): siRNA sense strand
gaagaaauagugucugaag

SEQ ID NO: 1932760 - RNA, 19 nt, Homo sapiens
  misc_RNA (1)...(19): siRNA sense strand
gcagauggaauaacaacaa

SEQ ID NO: 1932761 - RNA, 19 nt, Homo sapiens
  misc_RNA (1)...(19): siRNA sense strand
gaaauuaaaggcacaaacu

SEQ ID NO: 1932762 - RNA, 19 nt, Homo sapiens
  misc_RNA (1)...(19): siRNA sense strand
acacuagccuucaacaguu

SEQ ID NO: 1932763 - RNA, 19 nt, Homo sapiens
  misc_RNA (1)...(19): siRNA sense strand
cgaaggaaguacucagaga

SEQ ID NO: 1932764 - RNA, 19 nt, Homo sapiens
  misc_RNA (1)...(19): siRNA sense strand
gaagaaguaaggcuaaauc

SEQ ID NO: 1932765 - RNA, 19 nt, Homo sapiens
  misc_RNA (1)...(19): siRNA sense strand
ggaauugcaacuagaagaa

SEQ ID NO: 1932766 - RNA, 19 nt, Homo sapiens
  misc_RNA (1)...(19): siRNA sense strand
gaacagugaagggaaugua

SEQ ID NO: 1932767 - RNA, 19 nt, Homo sapiens
  misc_RNA (1)...(19): siRNA sense strand
cuccagaaaugacaaauga

SEQ ID NO: 1932768 - RNA, 19 nt, Homo sapiens
  misc_RNA (1)...(19): siRNA sense strand
ugaaugugauaccaaacua

SEQ ID NO: 1932769 - RNA, 19 nt, Homo sapiens
  misc_RNA (1)...(19): siRNA sense strand
gaggcagagucaaauuauu

SEQ ID NO: 1932770 - RNA, 19 nt, Homo sapiens
  misc_RNA (1)...(19): siRNA sense strand
ucaaagcacugaagaugag

SEQ ID NO: 1932771 - RNA, 19 nt, Homo sapiens
  misc_RNA (1)...(19): siRNA sense strand
gaaaugacaaaugaacuga

SEQ ID NO: 1932772 - RNA, 19 nt, Homo sapiens
  misc_RNA (1)...(19): siRNA sense strand
ugacuuugaugaugauuuc

SEQ ID NO: 1932773 - RNA, 19 nt, Homo sapiens
  misc_RNA (1)...(19): siRNA sense strand
aaaggagucuuacacugaa

SEQ ID NO: 1932774 - RNA, 19 nt, Homo sapiens
  misc_RNA (1)...(19): siRNA sense strand
gcucagacauuucauucuc

SEQ ID NO: 1932775 - RNA, 19 nt, Homo sapiens
  misc_RNA (1)...(19): siRNA sense strand
ccagacaaacuucccauuu

SEQ ID NO: 1932776 - RNA, 19 nt, Homo sapiens
  misc_RNA (1)...(19): siRNA sense strand
ccacagaaguucagaaaau

SEQ ID NO: 1932777 - RNA, 19 nt, Homo sapiens
  misc_RNA (1)...(19): siRNA sense strand
cagauggaauaacaacaaa

SEQ ID NO: 1932778 - RNA, 19 nt, Homo sapiens
  misc_RNA (1)...(19): siRNA sense strand
ugaagaugccaauggaaua

SEQ ID NO: 1932779 - RNA, 19 nt, Homo sapiens
  misc_RNA (1)...(19): siRNA sense strand
uugggugguuuguauauua

SEQ ID NO: 1932780 - RNA, 19 nt, Homo sapiens
  misc_RNA (1)...(19): siRNA sense strand
uggaaugagugcugauaaa

SEQ ID NO: 1932781 - RNA, 19 nt, Homo sapiens
  misc_RNA (1)...(19): siRNA sense strand
ggaaguaggcagauggaau

SEQ ID NO: 1932782 - RNA, 19 nt, Homo sapiens
  misc_RNA (1)...(19): siRNA sense strand
gagaaggcagaucuuaauu

SEQ ID NO: 1932783 - RNA, 19 nt, Homo sapiens
  misc_RNA (1)...(19): siRNA sense strand
cagcugauuucuaccauuc

SEQ ID NO: 1932784 - RNA, 19 nt, Homo sapiens
  misc_RNA (1)...(19): siRNA sense strand
gaagaggauacuuuauguu

SEQ ID NO: 1932785 - RNA, 19 nt, Homo sapiens
  misc_RNA (1)...(19): siRNA sense strand
gaaagccaacagucugaaa

SEQ ID NO: 1932786 - RNA, 19 nt, Homo sapiens
  misc_RNA (1)...(19): siRNA sense strand
gugaagggaauguagauuu

SEQ ID NO: 1932787 - RNA, 19 nt, Homo sapiens
  misc_RNA (1)...(19): siRNA sense strand
ccacugggaagcaaaguuu

SEQ ID NO: 1932788 - RNA, 19 nt, Homo sapiens
  misc_RNA (1)...(19): siRNA sense strand
acaucaagcucagacauuu

SEQ ID NO: 1932789 - RNA, 19 nt, Homo sapiens
  misc_RNA (1)...(19): siRNA sense strand
cugaagaaauagugucuga

SEQ ID NO: 1932790 - RNA, 19 nt, Homo sapiens
  misc_RNA (1)...(19): siRNA sense strand
ggauucagauaccagacaa

SEQ ID NO: 1932791 - RNA, 19 nt, Homo sapiens
  misc_RNA (1)...(19): siRNA sense strand
ggggauggcugguuuggua

SEQ ID NO: 1932792 - RNA, 19 nt, Homo sapiens
  misc_RNA (1)...(19): siRNA sense strand
ucagauaccagacaaacuu

SEQ ID NO: 1932793 - RNA, 19 nt, Homo sapiens
  misc_RNA (1)...(19): siRNA sense strand
gcugaaaguuccgggcaaa

SEQ ID NO: 1932794 - RNA, 19 nt, Homo sapiens
  misc_RNA (1)...(19): siRNA sense strand
ccacuguguuccaccauau

SEQ ID NO: 1932795 - RNA, 19 nt, Homo sapiens
  misc_RNA (1)...(19): siRNA sense strand
gauaaacuacagucuaaca

SEQ ID NO: 1932796 - RNA, 19 nt, Homo sapiens
  misc_RNA (1)...(19): siRNA sense strand
gaggauacuuuauguuuug

SEQ ID NO: 1932797 - RNA, 19 nt, Homo sapiens
  misc_RNA (1)...(19): siRNA sense strand
agaaugaagaggauacuuu

SEQ ID NO: 1932798 - RNA, 19 nt, Homo sapiens
  misc_RNA (1)...(19): siRNA sense strand
agaagaguccacaguuaua

SEQ ID NO: 1932799 - RNA, 19 nt, Homo sapiens
  misc_RNA (1)...(19): siRNA sense strand
agacaaacuucccauuuac

SEQ ID NO: 1932800 - RNA, 19 nt, Homo sapiens
  misc_RNA (1)...(19): siRNA sense strand
cgaaaguaacuccaacaaa

SEQ ID NO: 1932801 - RNA, 19 nt, Homo sapiens
  misc_RNA (1)...(19): siRNA sense strand
gaaggaaguacucagagau

SEQ ID NO: 1932802 - RNA, 19 nt, Homo sapiens
  misc_RNA (1)...(19): siRNA sense strand
gguaugaaagcuccagaaa

SEQ ID NO: 1932803 - RNA, 19 nt, Homo sapiens
  misc_RNA (1)...(19): siRNA sense strand
aagaugaguuuagugauga

SEQ ID NO: 1932804 - RNA, 19 nt, Homo sapiens
  misc_RNA (1)...(19): siRNA sense strand
ggccaaagggagucauuaa

SEQ ID NO: 1932805 - RNA, 19 nt, Homo sapiens
  misc_RNA (1)...(19): siRNA sense strand
ccaggaguaugcagaggaa

SEQ ID NO: 1932806 - RNA, 19 nt, Homo sapiens
  misc_RNA (1)...(19): siRNA sense strand
gacauuucauucucuggaa

SEQ ID NO: 1932807 - RNA, 19 nt, Homo sapiens
  misc_RNA (1)...(19): siRNA sense strand
cagaagaaguaaggcuaaa

SEQ ID NO: 1932808 - RNA, 19 nt, Homo sapiens
  misc_RNA (1)...(19): siRNA sense strand
guaagauuguaccaggaaa

SEQ ID NO: 1932809 - RNA, 19 nt, Homo sapiens
  misc_RNA (1)...(19): siRNA sense strand
ugaguuuagugaugaagaa

SEQ ID NO: 1932810 - RNA, 19 nt, Homo sapiens
  misc_RNA (1)...(19): siRNA sense strand
ccaaagggagucauuaagu

SEQ ID NO: 1932811 - RNA, 19 nt, Homo sapiens
  misc_RNA (1)...(19): siRNA sense strand
gaacucugaggcuguaaug

SEQ ID NO: 1932812 - RNA, 19 nt, Homo sapiens
  misc_RNA (1)...(19): siRNA sense strand
ucucauguuucagguauuu

SEQ ID NO: 1932813 - RNA, 19 nt, Homo sapiens
  misc_RNA (1)...(19): siRNA sense strand
gaacuccuaaagcuagaaa

SEQ ID NO: 1932814 - RNA, 19 nt, Homo sapiens
  misc_RNA (1)...(19): siRNA sense strand
ugaagaagaguccacaguu

SEQ ID NO: 1932815 - RNA, 19 nt, Homo sapiens
  misc_RNA (1)...(19): siRNA sense strand
cacuagccuucaacaguua

SEQ ID NO: 1932816 - RNA, 19 nt, Homo sapiens
  misc_RNA (1)...(19): siRNA sense strand
ggaguaugcagaggaaauu

SEQ ID NO: 1932817 - RNA, 19 nt, Homo sapiens
  misc_RNA (1)...(19): siRNA sense strand
gaaguacucagagaucaug

SEQ ID NO: 1932818 - RNA, 19 nt, Homo sapiens
  misc_RNA (1)...(19): siRNA sense strand
caaccaaacucaaugauga

SEQ ID NO: 1932819 - RNA, 19 nt, Homo sapiens
  misc_RNA (1)...(19): siRNA sense strand
cuacaaagccucccagaua

SEQ ID NO: 1932820 - RNA, 19 nt, Homo sapiens
  misc_RNA (1)...(19): siRNA sense strand
ggaagggcauuaagacaaa

SEQ ID NO: 1932821 - RNA, 19 nt, Homo sapiens
  misc_RNA (1)...(19): siRNA sense strand
cauacaagauggaacaaua

SEQ ID NO: 1932822 - RNA, 19 nt, Homo sapiens
  misc_RNA (1)...(19): siRNA sense strand
ggacacagcugcacguucu

SEQ ID NO: 1932823 - RNA, 19 nt, Homo sapiens
  misc_RNA (1)...(19): siRNA sense strand
ugagugguguuaagaauaa

SEQ ID NO: 1932824 - RNA, 19 nt, Homo sapiens
  misc_RNA (1)...(19): siRNA sense strand
gaggagauguggcaccauu

SEQ ID NO: 1932825 - RNA, 19 nt, Homo sapiens
  misc_RNA (1)...(19): siRNA sense strand
gaacagcacauaaagaaca

SEQ ID NO: 1932826 - RNA, 19 nt, Homo sapiens
  misc_RNA (1)...(19): siRNA sense strand
ggagaaguauuagacacua

SEQ ID NO: 1932827 - RNA, 19 nt, Homo sapiens
  misc_RNA (1)...(19): siRNA sense strand
caagauggaacaauaguuu

SEQ ID NO: 1932828 - RNA, 19 nt, Homo sapiens
  misc_RNA (1)...(19): siRNA sense strand
ggagauguggcaccauuua

SEQ ID NO: 1932829 - RNA, 19 nt, Homo sapiens
  misc_RNA (1)...(19): siRNA sense strand
gggagcacaucuauuacua

SEQ ID NO: 1932830 - RNA, 19 nt, Homo sapiens
  misc_RNA (1)...(19): siRNA sense strand
ggaagagggaucaauguug

SEQ ID NO: 1932831 - RNA, 19 nt, Homo sapiens
  misc_RNA (1)...(19): siRNA sense strand
caaagccucccagauauaa

SEQ ID NO: 1932832 - RNA, 19 nt, Homo sapiens
  misc_RNA (1)...(19): siRNA sense strand
ggaugcaaguuuaggaaau

SEQ ID NO: 1932833 - RNA, 19 nt, Homo sapiens
  misc_RNA (1)...(19): siRNA sense strand
uacaaagccucccagauau

SEQ ID NO: 1932834 - RNA, 19 nt, Homo sapiens
  misc_RNA (1)...(19): siRNA sense strand
ggccugaaguuguagaaau

SEQ ID NO: 1932835 - RNA, 19 nt, Homo sapiens
  misc_RNA (1)...(19): siRNA sense strand
gauguggcaccauuuauug

SEQ ID NO: 1932836 - RNA, 19 nt, Homo sapiens
  misc_RNA (1)...(19): siRNA sense strand
gcacauaaagaacaauaag

SEQ ID NO: 1932837 - RNA, 19 nt, Homo sapiens
  misc_RNA (1)...(19): siRNA sense strand
gagcaaccaaacucaauga

SEQ ID NO: 1932838 - RNA, 19 nt, Homo sapiens
  misc_RNA (1)...(19): siRNA sense strand
gggaagggcauuaagacaa

SEQ ID NO: 1932839 - RNA, 19 nt, Homo sapiens
  misc_RNA (1)...(19): siRNA sense strand
aggauggccugaaguugua

SEQ ID NO: 1932840 - RNA, 19 nt, Homo sapiens
  misc_RNA (1)...(19): siRNA sense strand
gcaaccaaacucaaugaug

SEQ ID NO: 1932841 - RNA, 19 nt, Homo sapiens
  misc_RNA (1)...(19): siRNA sense strand
ggagcacaucuauuacuaa

SEQ ID NO: 1932842 - RNA, 19 nt, Homo sapiens
  misc_RNA (1)...(19): siRNA sense strand
gaugcaaguuuaggaaauc

SEQ ID NO: 1932843 - RNA, 19 nt, Homo sapiens
  misc_RNA (1)...(19): siRNA sense strand
gccugaaguuguagaaaug

SEQ ID NO: 1932844 - RNA, 19 nt, Homo sapiens
  misc_RNA (1)...(19): siRNA sense strand
gcaaguuuaggaaaucuau

SEQ ID NO: 1932845 - RNA, 19 nt, Homo sapiens
  misc_RNA (1)...(19): siRNA sense strand
acaaagccucccagauaua

SEQ ID NO: 1932846 - RNA, 19 nt, Homo sapiens
  misc_RNA (1)...(19): siRNA sense strand
cagcacauaaagaacaaua

SEQ ID NO: 1932847 - RNA, 19 nt, Homo sapiens
  misc_RNA (1)...(19): siRNA sense strand
ccuggaagauaauguuuua

SEQ ID NO: 1932848 - RNA, 19 nt, Homo sapiens
  misc_RNA (1)...(19): siRNA sense strand
gaacaauaaggauacaaac

SEQ ID NO: 1932849 - RNA, 19 nt, Homo sapiens
  misc_RNA (1)...(19): siRNA sense strand
gaaggauggccugaaguug

SEQ ID NO: 1932850 - RNA, 19 nt, Homo sapiens
  misc_RNA (1)...(19): siRNA sense strand
uaugaaggauggccugaag

SEQ ID NO: 1932851 - RNA, 19 nt, Homo sapiens
  misc_RNA (1)...(19): siRNA sense strand
ugaaggauggccugaaguu

SEQ ID NO: 1932852 - RNA, 19 nt, Homo sapiens
  misc_RNA (1)...(19): siRNA sense strand
cagcugcacguucuacaaa

SEQ ID NO: 1932853 - RNA, 19 nt, Homo sapiens
  misc_RNA (1)...(19): siRNA sense strand
gggaacauacgaugaugga

SEQ ID NO: 1932854 - RNA, 19 nt, Homo sapiens
  misc_RNA (1)...(19): siRNA sense strand
uugaacagcacauaaagaa

SEQ ID NO: 1932855 - RNA, 19 nt, Homo sapiens
  misc_RNA (1)...(19): siRNA sense strand
ggagcaaccaaacucaaug

SEQ ID NO: 1932856 - RNA, 19 nt, Homo sapiens
  misc_RNA (1)...(19): siRNA sense strand
aaugagugguguuaagaau

SEQ ID NO: 1932857 - RNA, 19 nt, Homo sapiens
  misc_RNA (1)...(19): siRNA sense strand
gagauguggcaccauuuau

SEQ ID NO: 1932858 - RNA, 19 nt, Homo sapiens
  misc_RNA (1)...(19): siRNA sense strand
gguguuaagaauaauguug

SEQ ID NO: 1932859 - RNA, 19 nt, Homo sapiens
  misc_RNA (1)...(19): siRNA sense strand
ggcaccauuuauugaguuu

SEQ ID NO: 1932860 - RNA, 19 nt, Homo sapiens
  misc_RNA (1)...(19): siRNA sense strand
ggugggaagggcauuaaga

SEQ ID NO: 1932861 - RNA, 19 nt, Homo sapiens
  misc_RNA (1)...(19): siRNA sense strand
aaacaggagaaguauuaga

SEQ ID NO: 1932862 - RNA, 19 nt, Homo sapiens
  misc_RNA (1)...(19): siRNA sense strand
gcggcucauugcugauuug

SEQ ID NO: 1932863 - RNA, 19 nt, Homo sapiens
  misc_RNA (1)...(19): siRNA sense strand
uaaugagugguguuaagaa

SEQ ID NO: 1932864 - RNA, 19 nt, Homo sapiens
  misc_RNA (1)...(19): siRNA sense strand
caccauuuauugaguuucu

SEQ ID NO: 1932865 - RNA, 19 nt, Homo sapiens
  misc_RNA (1)...(19): siRNA sense strand
agauguggcaccauuuauu

SEQ ID NO: 1932866 - RNA, 19 nt, Homo sapiens
  misc_RNA (1)...(19): siRNA sense strand
guuggaagagggaucaaug

SEQ ID NO: 1932867 - RNA, 19 nt, Homo sapiens
  misc_RNA (1)...(19): siRNA sense strand
gaugauggagcaaccaaac

SEQ ID NO: 1932868 - RNA, 19 nt, Homo sapiens
  misc_RNA (1)...(19): siRNA sense strand
uggcaccauuuauugaguu

SEQ ID NO: 1932869 - RNA, 19 nt, Homo sapiens
  misc_RNA (1)...(19): siRNA sense strand
uaaugggaacauacgauga

SEQ ID NO: 1932870 - RNA, 19 nt, Homo sapiens
  misc_RNA (1)...(19): siRNA sense strand
aaggauggccugaaguugu

SEQ ID NO: 1932871 - RNA, 19 nt, Homo sapiens
  misc_RNA (1)...(19): siRNA sense strand
gauggagcaaccaaacuca

SEQ ID NO: 1932872 - RNA, 19 nt, Homo sapiens
  misc_RNA (1)...(19): siRNA sense strand
uggaagagggaucaauguu

SEQ ID NO: 1932873 - RNA, 19 nt, Homo sapiens
  misc_RNA (1)...(19): siRNA sense strand
ggcggcucauugcugauuu

SEQ ID NO: 1932874 - RNA, 19 nt, Homo sapiens
  misc_RNA (1)...(19): siRNA sense strand
aacagcacauaaagaacaa

SEQ ID NO: 1932875 - RNA, 19 nt, Homo sapiens
  misc_RNA (1)...(19): siRNA sense strand
ucugaaggccauacaagau

SEQ ID NO: 1932876 - RNA, 19 nt, Homo sapiens
  misc_RNA (1)...(19): siRNA sense strand
gaagggcauuaagacaaaa

SEQ ID NO: 1932877 - RNA, 19 nt, Homo sapiens
  misc_RNA (1)...(19): siRNA sense strand
ggaacaauaguuuuaaugg

SEQ ID NO: 1932878 - RNA, 19 nt, Homo sapiens
  misc_RNA (1)...(19): siRNA sense strand
ggacauggaucaauuauaa

SEQ ID NO: 1932879 - RNA, 19 nt, Homo sapiens
  misc_RNA (1)...(19): siRNA sense strand
gaaagaagagcuaugauaa

SEQ ID NO: 1932880 - RNA, 19 nt, Homo sapiens
  misc_RNA (1)...(19): siRNA sense strand
gaaugaagauggugaaaga

SEQ ID NO: 1932881 - RNA, 19 nt, Homo sapiens
  misc_RNA (1)...(19): siRNA sense strand
uagaagaggugacuaguaa

SEQ ID NO: 1932882 - RNA, 19 nt, Homo sapiens
  misc_RNA (1)...(19): siRNA sense strand
uaaacaagguuaucaguug

SEQ ID NO: 1932883 - RNA, 19 nt, Homo sapiens
  misc_RNA (1)...(19): siRNA sense strand
gagaagcccuuacuaaaca

SEQ ID NO: 1932884 - RNA, 19 nt, Homo sapiens
  misc_RNA (1)...(19): siRNA sense strand
ggcaagaacuuacaggaaa

SEQ ID NO: 1932885 - RNA, 19 nt, Homo sapiens
  misc_RNA (1)...(19): siRNA sense strand
gaacaugauuaagcaguuu

SEQ ID NO: 1932886 - RNA, 19 nt, Homo sapiens
  misc_RNA (1)...(19): siRNA sense strand
gagauuccuugacaguuua

SEQ ID NO: 1932887 - RNA, 19 nt, Homo sapiens
  misc_RNA (1)...(19): siRNA sense strand
gaagagaagucugguuugu

SEQ ID NO: 1932888 - RNA, 19 nt, Homo sapiens
  misc_RNA (1)...(19): siRNA sense strand
gaagaaggaaugacgguaa

SEQ ID NO: 1932889 - RNA, 19 nt, Homo sapiens
  misc_RNA (1)...(19): siRNA sense strand
gaggaagcauccauugauu

SEQ ID NO: 1932890 - RNA, 19 nt, Homo sapiens
  misc_RNA (1)...(19): siRNA sense strand
aaacacacauucuauggaa

SEQ ID NO: 1932891 - RNA, 19 nt, Homo sapiens
  misc_RNA (1)...(19): siRNA sense strand
gcagaacgcuuugaagaag

SEQ ID NO: 1932892 - RNA, 19 nt, Homo sapiens
  misc_RNA (1)...(19): siRNA sense strand
gagccuaaauuccauuguu

SEQ ID NO: 1932893 - RNA, 19 nt, Homo sapiens
  misc_RNA (1)...(19): siRNA sense strand
gaacacgaacacucuaauu

SEQ ID NO: 1932894 - RNA, 19 nt, Homo sapiens
  misc_RNA (1)...(19): siRNA sense strand
gcaagaaaggcaaauguga

SEQ ID NO: 1932895 - RNA, 19 nt, Homo sapiens
  misc_RNA (1)...(19): siRNA sense strand
ugaaagaagagcuaugaua

SEQ ID NO: 1932896 - RNA, 19 nt, Homo sapiens
  misc_RNA (1)...(19): siRNA sense strand
ggucacaaacgcacaauuu

SEQ ID NO: 1932897 - RNA, 19 nt, Homo sapiens
  misc_RNA (1)...(19): siRNA sense strand
gaacaaaucaaaggcuauu

SEQ ID NO: 1932898 - RNA, 19 nt, Homo sapiens
  misc_RNA (1)...(19): siRNA sense strand
uaugagauaugcgguauuu

SEQ ID NO: 1932899 - RNA, 19 nt, Homo sapiens
  misc_RNA (1)...(19): siRNA sense strand
ggaccagccugaaaugauc

SEQ ID NO: 1932900 - RNA, 19 nt, Homo sapiens
  misc_RNA (1)...(19): siRNA sense strand
agagauuccuugacaguuu

SEQ ID NO: 1932901 - RNA, 19 nt, Homo sapiens
  misc_RNA (1)...(19): siRNA sense strand
ccaauaauguacccagaga

SEQ ID NO: 1932902 - RNA, 19 nt, Homo sapiens
  misc_RNA (1)...(19): siRNA sense strand
gcauuagccuuuggauuug

SEQ ID NO: 1932903 - RNA, 19 nt, Homo sapiens
  misc_RNA (1)...(19): siRNA sense strand
ggagaaaguucagcaagca

SEQ ID NO: 1932904 - RNA, 19 nt, Homo sapiens
  misc_RNA (1)...(19): siRNA sense strand
aaacaagguuaucaguuga

SEQ ID NO: 1932905 - RNA, 19 nt, Homo sapiens
  misc_RNA (1)...(19): siRNA sense strand
agagaagucugguuuguuc

SEQ ID NO: 1932906 - RNA, 19 nt, Homo sapiens
  misc_RNA (1)...(19): siRNA sense strand
uauuugggcuuugcuguua

SEQ ID NO: 1932907 - RNA, 19 nt, Homo sapiens
  misc_RNA (1)...(19): siRNA sense strand
gcuguuagcauuagccuuu

SEQ ID NO: 1932908 - RNA, 19 nt, Homo sapiens
  misc_RNA (1)...(19): siRNA sense strand
gagcauggaagaccaaguu

SEQ ID NO: 1932909 - RNA, 19 nt, Homo sapiens
  misc_RNA (1)...(19): siRNA sense strand
gaccucuucucaccuuuaa

SEQ ID NO: 1932910 - RNA, 19 nt, Homo sapiens
  misc_RNA (1)...(19): siRNA sense strand
auaaaugugucuucuguug

SEQ ID NO: 1932911 - RNA, 19 nt, Homo sapiens
  misc_RNA (1)...(19): siRNA sense strand
gcaaagggauucgcaacag

SEQ ID NO: 1932912 - RNA, 19 nt, Homo sapiens
  misc_RNA (1)...(19): siRNA sense strand
ccaaagacagccugaagaa

SEQ ID NO: 1932913 - RNA, 19 nt, Homo sapiens
  misc_RNA (1)...(19): siRNA sense strand
caagaaaggcaaaugugaa

SEQ ID NO: 1932914 - RNA, 19 nt, Homo sapiens
  misc_RNA (1)...(19): siRNA sense strand
ugaagauggugaaagaaga

SEQ ID NO: 1932915 - RNA, 19 nt, Homo sapiens
  misc_RNA (1)...(19): siRNA sense strand
ccaggaauaugaagauagu

SEQ ID NO: 1932916 - RNA, 19 nt, Homo sapiens
  misc_RNA (1)...(19): siRNA sense strand
gggaaauccugacuucauc

SEQ ID NO: 1932917 - RNA, 19 nt, Homo sapiens
  misc_RNA (1)...(19): siRNA sense strand
ggauuuguguccagauugu

SEQ ID NO: 1932918 - RNA, 19 nt, Homo sapiens
  misc_RNA (1)...(19): siRNA sense strand
ggacacaagacaucagaga

SEQ ID NO: 1932919 - RNA, 19 nt, Homo sapiens
  misc_RNA (1)...(19): siRNA sense strand
cuucucaccuuuaauauca

SEQ ID NO: 1932920 - RNA, 19 nt, Homo sapiens
  misc_RNA (1)...(19): siRNA sense strand
gaaaggcaaaugugaaucu

SEQ ID NO: 1932921 - RNA, 19 nt, Homo sapiens
  misc_RNA (1)...(19): siRNA sense strand
gauagcacacagaaaguuu

SEQ ID NO: 1932922 - RNA, 19 nt, Homo sapiens
  misc_RNA (1)...(19): siRNA sense strand
ggaccucuucucaccuuua

SEQ ID NO: 1932923 - RNA, 19 nt, Homo sapiens
  misc_RNA (1)...(19): siRNA sense strand
uggcagagauuccuugaca

SEQ ID NO: 1932924 - RNA, 19 nt, Homo sapiens
  misc_RNA (1)...(19): siRNA sense strand
ccucuucucaccuuuaaua

SEQ ID NO: 1932925 - RNA, 19 nt, Homo sapiens
  misc_RNA (1)...(19): siRNA sense strand
gcucaggauuugaugacaa

SEQ ID NO: 1932926 - RNA, 19 nt, Homo sapiens
  misc_RNA (1)...(19): siRNA sense strand
ccgagaagcccuuacuaaa

SEQ ID NO: 1932927 - RNA, 19 nt, Homo sapiens
  misc_RNA (1)...(19): siRNA sense strand
gguaugagauaugcgguau

SEQ ID NO: 1932928 - RNA, 19 nt, Homo sapiens
  misc_RNA (1)...(19): siRNA sense strand
gaucaugugaagaaagaaa

SEQ ID NO: 1932929 - RNA, 19 nt, Homo sapiens
  misc_RNA (1)...(19): siRNA sense strand
acacaagacaucagagaaa

SEQ ID NO: 1932930 - RNA, 19 nt, Homo sapiens
  misc_RNA (1)...(19): siRNA sense strand
aagaaggaaugacgguaaa

SEQ ID NO: 1932931 - RNA, 19 nt, Homo sapiens
  misc_RNA (1)...(19): siRNA sense strand
gcuaauaaaugugucuucu

SEQ ID NO: 1932932 - RNA, 19 nt, Homo sapiens
  misc_RNA (1)...(19): siRNA sense strand
ggugaaagaagagcuauga

SEQ ID NO: 1932933 - RNA, 19 nt, Homo sapiens
  misc_RNA (1)...(19): siRNA sense strand
gaccaucagagccuaaauu

SEQ ID NO: 1932934 - RNA, 19 nt, Homo sapiens
  misc_RNA (1)...(19): siRNA sense strand
caagacaucagagaaagaa

SEQ ID NO: 1932935 - RNA, 19 nt, Homo sapiens
  misc_RNA (1)...(19): siRNA sense strand
gaagauggaccagccugaa

SEQ ID NO: 1932936 - RNA, 19 nt, Homo sapiens
  misc_RNA (1)...(19): siRNA sense strand
caucagagccuaaauucca

SEQ ID NO: 1932937 - RNA, 19 nt, Homo sapiens
  misc_RNA (1)...(19): siRNA sense strand
caaagggauucgcaacagu

SEQ ID NO: 1932938 - RNA, 19 nt, Homo sapiens
  misc_RNA (1)...(19): siRNA sense strand
agcauuagccuuuggauuu

SEQ ID NO: 1932939 - RNA, 19 nt, Homo sapiens
  misc_RNA (1)...(19): siRNA sense strand
gcaagaacuuacaggaaaa

SEQ ID NO: 1932940 - RNA, 19 nt, Homo sapiens
  misc_RNA (1)...(19): siRNA sense strand
gguuaugucucccuucaag

SEQ ID NO: 1932941 - RNA, 19 nt, Homo sapiens
  misc_RNA (1)...(19): siRNA sense strand
gaagauagugguggaucaa

SEQ ID NO: 1932942 - RNA, 19 nt, Homo sapiens
  misc_RNA (1)...(19): siRNA sense strand
ggaagagaagucugguuug

SEQ ID NO: 1932943 - RNA, 19 nt, Homo sapiens
  misc_RNA (1)...(19): siRNA sense strand
uggaucaugugaagaaaga

SEQ ID NO: 1932944 - RNA, 19 nt, Homo sapiens
  misc_RNA (1)...(19): siRNA sense strand
gaggaagaacccuuugaga

SEQ ID NO: 1932945 - RNA, 19 nt, Homo sapiens
  misc_RNA (1)...(19): siRNA sense strand
gcagagauuccuugacagu

SEQ ID NO: 1932946 - RNA, 19 nt, Homo sapiens
  misc_RNA (1)...(19): siRNA sense strand
gggcaagaacuuacaggaa

SEQ ID NO: 1932947 - RNA, 19 nt, Homo sapiens
  misc_RNA (1)...(19): siRNA sense strand
aagaagagcuaugauaacu

SEQ ID NO: 1932948 - RNA, 19 nt, Homo sapiens
  misc_RNA (1)...(19): siRNA sense strand
gcaaaauuauggaucaugu

SEQ ID NO: 1932949 - RNA, 19 nt, Homo sapiens
  misc_RNA (1)...(19): siRNA sense strand
acccagagaucaacagguu

SEQ ID NO: 1932950 - RNA, 19 nt, Homo sapiens
  misc_RNA (1)...(19): siRNA sense strand
gguggacauggaucaauua

SEQ ID NO: 1932951 - RNA, 19 nt, Homo sapiens
  misc_RNA (1)...(19): siRNA sense strand
gcacacagaaaguuuaaaa

SEQ ID NO: 1932952 - RNA, 19 nt, Homo sapiens
  misc_RNA (1)...(19): siRNA sense strand
ggaagcauccauugauuuu

SEQ ID NO: 1932953 - RNA, 19 nt, Homo sapiens
  misc_RNA (1)...(19): siRNA sense strand
ggugaaugguggacaugga

SEQ ID NO: 1932954 - RNA, 19 nt, Homo sapiens
  misc_RNA (1)...(19): siRNA sense strand
caaagacagccugaagaaa

SEQ ID NO: 1932955 - RNA, 19 nt, Homo sapiens
  misc_RNA (1)...(19): siRNA sense strand
aagaauaugauccagauga

SEQ ID NO: 1932956 - RNA, 19 nt, Homo sapiens
  misc_RNA (1)...(19): siRNA sense strand
caucagagaaagaacaaau

SEQ ID NO: 1932957 - RNA, 19 nt, Homo sapiens
  misc_RNA (1)...(19): siRNA sense strand
ugaggaagugguacaguuu

SEQ ID NO: 1932958 - RNA, 19 nt, Homo sapiens
  misc_RNA (1)...(19): siRNA sense strand
uaagcaguuuaaaggagua

SEQ ID NO: 1932959 - RNA, 19 nt, Homo sapiens
  misc_RNA (1)...(19): siRNA sense strand
gagcuuggcgugugcuaau

SEQ ID NO: 1932960 - RNA, 19 nt, Homo sapiens
  misc_RNA (1)...(19): siRNA sense strand
uuugagagcuccagugaag

SEQ ID NO: 1932961 - RNA, 19 nt, Homo sapiens
  misc_RNA (1)...(19): siRNA sense strand
gaagaggugacuaguaaaa

SEQ ID NO: 1932962 - RNA, 19 nt, Homo sapiens
  misc_RNA (1)...(19): siRNA sense strand
caaaagcagcucaggauuu

SEQ ID NO: 1932963 - RNA, 19 nt, Homo sapiens
  misc_RNA (1)...(19): siRNA sense strand
gagaaagaacaaaucaaag

SEQ ID NO: 1932964 - RNA, 19 nt, Homo sapiens
  misc_RNA (1)...(19): siRNA sense strand
ugaagauagugguggauca

SEQ ID NO: 1932965 - RNA, 19 nt, Homo sapiens
  misc_RNA (1)...(19): siRNA sense strand
ugaagggcguuaccuacug

SEQ ID NO: 1932966 - RNA, 19 nt, Homo sapiens
  misc_RNA (1)...(19): siRNA sense strand
ugggagaaccaauaaugua

SEQ ID NO: 1932967 - RNA, 19 nt, Homo sapiens
  misc_RNA (1)...(19): siRNA sense strand
agaacaugauuaagcaguu

SEQ ID NO: 1932968 - RNA, 19 nt, Homo sapiens
  misc_RNA (1)...(19): siRNA sense strand
cugaaaugaucuugaagga

SEQ ID NO: 1932969 - RNA, 19 nt, Homo sapiens
  misc_RNA (1)...(19): siRNA sense strand
ggcgugugcuaauaaaugu

SEQ ID NO: 1932970 - RNA, 19 nt, Homo sapiens
  misc_RNA (1)...(19): siRNA sense strand
agaauaugauccagaugau

SEQ ID NO: 1932971 - RNA, 19 nt, Homo sapiens
  misc_RNA (1)...(19): siRNA sense strand
gagcuccagugaagaagag

SEQ ID NO: 1932972 - RNA, 19 nt, Homo sapiens
  misc_RNA (1)...(19): siRNA sense strand
ugagagcuccagugaagaa

SEQ ID NO: 1932973 - RNA, 19 nt, Homo sapiens
  misc_RNA (1)...(19): siRNA sense strand
ggaaauucugccuaugcua

SEQ ID NO: 1932974 - RNA, 19 nt, Homo sapiens
  misc_RNA (1)...(19): siRNA sense strand
caaacacacauucuaugga

SEQ ID NO: 1932975 - RNA, 19 nt, Homo sapiens
  misc_RNA (1)...(19): siRNA sense strand
ccugggaaauccugacuuc

SEQ ID NO: 1932976 - RNA, 19 nt, Homo sapiens
  misc_RNA (1)...(19): siRNA sense strand
gaagcuacuccaccagugu

SEQ ID NO: 1932977 - RNA, 19 nt, Homo sapiens
  misc_RNA (1)...(19): siRNA sense strand
gaucuugaaggaagccauu

SEQ ID NO: 1932978 - RNA, 19 nt, Homo sapiens
  misc_RNA (1)...(19): siRNA sense strand
gaacaaagcugaccagauc

SEQ ID NO: 1932979 - RNA, 19 nt, Homo sapiens
  misc_RNA (1)...(19): siRNA sense strand
gaggaaaguugccgaguga

SEQ ID NO: 1932980 - RNA, 19 nt, Homo sapiens
  misc_RNA (1)...(19): siRNA sense strand
agaaggagcuggucaacaa

SEQ ID NO: 1932981 - RNA, 19 nt, Homo sapiens
  misc_RNA (1)...(19): siRNA sense strand
caagaaacccuucaggaaa

SEQ ID NO: 1932982 - RNA, 19 nt, Homo sapiens
  misc_RNA (1)...(19): siRNA sense strand
gcucuucgaugcccacaaa

SEQ ID NO: 1932983 - RNA, 19 nt, Homo sapiens
  misc_RNA (1)...(19): siRNA sense strand
ggaaggacaacaagaagaa

SEQ ID NO: 1932984 - RNA, 19 nt, Homo sapiens
  misc_RNA (1)...(19): siRNA sense strand
ccaagaaacccuucaggaa

SEQ ID NO: 1932985 - RNA, 19 nt, Homo sapiens
  misc_RNA (1)...(19): siRNA sense strand
ggugguggaucccaagaaa

SEQ ID NO: 1932986 - RNA, 19 nt, Homo sapiens
  misc_RNA (1)...(19): siRNA sense strand
gcucaacgaccucaucaaa

SEQ ID NO: 1932987 - RNA, 19 nt, Homo sapiens
  misc_RNA (1)...(19): siRNA sense strand
ucaaagcccucaagaacca

SEQ ID NO: 1932988 - RNA, 19 nt, Homo sapiens
  misc_RNA (1)...(19): siRNA sense strand
ccaaccaccucaucaaagu

SEQ ID NO: 1932989 - RNA, 19 nt, Homo sapiens
  misc_RNA (1)...(19): siRNA sense strand
caucaaagcccucaagaac

SEQ ID NO: 1932990 - RNA, 19 nt, Homo sapiens
  misc_RNA (1)...(19): siRNA sense strand
gaaccacgaggacaagaug

SEQ ID NO: 1932991 - RNA, 19 nt, Homo sapiens
  misc_RNA (1)...(19): siRNA sense strand
ucaacaaccuggccgagau

SEQ ID NO: 1932992 - RNA, 19 nt, Homo sapiens
  misc_RNA (1)...(19): siRNA sense strand
gcuccaagcugcccaacag

SEQ ID NO: 1932993 - RNA, 19 nt, Homo sapiens
  misc_RNA (1)...(19): siRNA sense strand
gcaagcugcuggagguagu

SEQ ID NO: 1932994 - RNA, 19 nt, Homo sapiens
  misc_RNA (1)...(19): siRNA sense strand
ggaaggaccccgagguuuu

SEQ ID NO: 1932995 - RNA, 19 nt, Homo sapiens
  misc_RNA (1)...(19): siRNA sense strand
cagcuguccuugagugguu

SEQ ID NO: 1932996 - RNA, 19 nt, Homo sapiens
  misc_RNA (1)...(19): siRNA sense strand
gcuggacgacgacgaguuu

SEQ ID NO: 1932997 - RNA, 19 nt, Homo sapiens
  misc_RNA (1)...(19): siRNA sense strand
gcgcuaaugccaagaagga

SEQ ID NO: 1932998 - RNA, 19 nt, Homo sapiens
  misc_RNA (1)...(19): siRNA sense strand
gggacaagcccauguacga

SEQ ID NO: 1932999 - RNA, 19 nt, Homo sapiens
  misc_RNA (1)...(19): siRNA sense strand
ggcaacgccuucuugaaca

SEQ ID NO: 1933000 - RNA, 19 nt, Homo sapiens
  misc_RNA (1)...(19): siRNA sense strand
caaccuggccgagaucuau

SEQ ID NO: 1933001 - RNA, 19 nt, Homo sapiens
  misc_RNA (1)...(19): siRNA sense strand
caccacagacuccuucauu

SEQ ID NO: 1933002 - RNA, 19 nt, Homo sapiens
  misc_RNA (1)...(19): siRNA sense strand
ggaagcuggccgacauuga

SEQ ID NO: 1933003 - RNA, 19 nt, Homo sapiens
  misc_RNA (1)...(19): siRNA sense strand
ggagguaguggacgacaug

SEQ ID NO: 1933004 - RNA, 19 nt, Homo sapiens
  misc_RNA (1)...(19): siRNA sense strand
ggagaugcccucgguguuc

SEQ ID NO: 1933005 - RNA, 19 nt, Homo sapiens
  misc_RNA (1)...(19): siRNA sense strand
guucgugugugcccagcua

SEQ ID NO: 1933006 - RNA, 19 nt, Homo sapiens
  misc_RNA (1)...(19): siRNA sense strand
aagaaacccuucaggaaac

SEQ ID NO: 1933007 - RNA, 19 nt, Homo sapiens
  misc_RNA (1)...(19): siRNA sense strand
ucaagaaccacgaggacaa

SEQ ID NO: 1933008 - RNA, 19 nt, Homo sapiens
  misc_RNA (1)...(19): siRNA sense strand
ggccaaccaccucaucaaa

SEQ ID NO: 1933009 - RNA, 19 nt, Homo sapiens
  misc_RNA (1)...(19): siRNA sense strand
caagaucacaggcgcuaau

SEQ ID NO: 1933010 - RNA, 19 nt, Homo sapiens
  misc_RNA (1)...(19): siRNA sense strand
ucagggacauccagagucu

SEQ ID NO: 1933011 - RNA, 19 nt, Homo sapiens
  misc_RNA (1)...(19): siRNA sense strand
ucucagaagucaucaaagc

SEQ ID NO: 1933012 - RNA, 19 nt, Homo sapiens
  misc_RNA (1)...(19): siRNA sense strand
gggaaggacaacaagaaga

SEQ ID NO: 1933013 - RNA, 19 nt, Homo sapiens
  misc_RNA (1)...(19): siRNA sense strand
cgacaacaagcccaugguu

SEQ ID NO: 1933014 - RNA, 19 nt, Homo sapiens
  misc_RNA (1)...(19): siRNA sense strand
ccagggacaagcccaugua

SEQ ID NO: 1933015 - RNA, 19 nt, Homo sapiens
  misc_RNA (1)...(19): siRNA sense strand
gcaacgccuucuugaacag

SEQ ID NO: 1933016 - RNA, 19 nt, Homo sapiens
  misc_RNA (1)...(19): siRNA sense strand
gaagcuggccgacauugac

SEQ ID NO: 1933017 - RNA, 19 nt, Homo sapiens
  misc_RNA (1)...(19): siRNA sense strand
uggagaagguaucgaugau

SEQ ID NO: 1933018 - RNA, 19 nt, Homo sapiens
  misc_RNA (1)...(19): siRNA sense strand
gaguggugcugaacaaagc

SEQ ID NO: 1933019 - RNA, 19 nt, Homo sapiens
  misc_RNA (1)...(19): siRNA sense strand
gaucuucuacacccuguca

SEQ ID NO: 1933020 - RNA, 19 nt, Homo sapiens
  misc_RNA (1)...(19): siRNA sense strand
gguccacgccuacaucauc

SEQ ID NO: 1933021 - RNA, 19 nt, Homo sapiens
  misc_RNA (1)...(19): siRNA sense strand
ccuggaggaugccgacuuc

SEQ ID NO: 1933022 - RNA, 19 nt, Homo sapiens
  misc_RNA (1)...(19): siRNA sense strand
ucuggaagcuggccgacau

SEQ ID NO: 1933023 - RNA, 19 nt, Homo sapiens
  misc_RNA (1)...(19): siRNA sense strand
ugaggaacaggaccuauuc

SEQ ID NO: 1933024 - RNA, 19 nt, Homo sapiens
  misc_RNA (1)...(19): siRNA sense strand
gcaucauucugcucuucga

SEQ ID NO: 1933025 - RNA, 19 nt, Homo sapiens
  misc_RNA (1)...(19): siRNA sense strand
uggccgacauugacaagga

SEQ ID NO: 1933026 - RNA, 19 nt, Homo sapiens
  misc_RNA (1)...(19): siRNA sense strand
ggagaagguaucgaugaug

SEQ ID NO: 1933027 - RNA, 19 nt, Homo sapiens
  misc_RNA (1)...(19): siRNA sense strand
ugacauugcccagcucaug

SEQ ID NO: 1933028 - RNA, 19 nt, Homo sapiens
  misc_RNA (1)...(19): siRNA sense strand
ucaacgaccucaucaaaag

SEQ ID NO: 1933029 - RNA, 19 nt, Homo sapiens
  misc_RNA (1)...(19): siRNA sense strand
guccacgccuacaucauca

SEQ ID NO: 1933030 - RNA, 19 nt, Homo sapiens
  misc_RNA (1)...(19): siRNA sense strand
gaagaaggagcuggucaac

SEQ ID NO: 1933031 - RNA, 19 nt, Homo sapiens
  misc_RNA (1)...(19): siRNA sense strand
ccacaaacuggacaucucu

SEQ ID NO: 1933032 - RNA, 19 nt, Homo sapiens
  misc_RNA (1)...(19): siRNA sense strand
ggacgacgacgaguuugca

SEQ ID NO: 1933033 - RNA, 19 nt, Homo sapiens
  misc_RNA (1)...(19): siRNA sense strand
ccaagcugcccaacagugu

SEQ ID NO: 1933034 - RNA, 19 nt, Homo sapiens
  misc_RNA (1)...(19): siRNA sense strand
gcucaagaaacucuacaag

SEQ ID NO: 1933035 - RNA, 19 nt, Homo sapiens
  misc_RNA (1)...(19): siRNA sense strand
gcugcaggcccaggacuuu

SEQ ID NO: 1933036 - RNA, 19 nt, Homo sapiens
  misc_RNA (1)...(19): siRNA sense strand
ccacagacuccuucauugc

SEQ ID NO: 1933037 - RNA, 19 nt, Homo sapiens
  misc_RNA (1)...(19): siRNA sense strand
caggaaacucaacgccuuu

SEQ ID NO: 1933038 - RNA, 19 nt, Homo sapiens
  misc_RNA (1)...(19): siRNA sense strand
acaacaagcccaugguucu

SEQ ID NO: 1933039 - RNA, 19 nt, Homo sapiens
  misc_RNA (1)...(19): siRNA sense strand
ccacugggaagaccaccuu

SEQ ID NO: 1933040 - RNA, 19 nt, Homo sapiens
  misc_RNA (1)...(19): siRNA sense strand
caagguccacgccuacauc

SEQ ID NO: 1933041 - RNA, 19 nt, Homo sapiens
  misc_RNA (1)...(19): siRNA sense strand
ugaacaaagcugaccagau

SEQ ID NO: 1933042 - RNA, 19 nt, Homo sapiens
  misc_RNA (1)...(19): siRNA sense strand
caacaagcccaugguucug

SEQ ID NO: 1933043 - RNA, 19 nt, Homo sapiens
  misc_RNA (1)...(19): siRNA sense strand
caacaaccuggccgagauc

SEQ ID NO: 1933044 - RNA, 19 nt, Homo sapiens
  misc_RNA (1)...(19): siRNA sense strand
cucaagaaacucuacaaga

SEQ ID NO: 1933045 - RNA, 19 nt, Homo sapiens
  misc_RNA (1)...(19): siRNA sense strand
accacagacuccuucauug

SEQ ID NO: 1933046 - RNA, 19 nt, Homo sapiens
  misc_RNA (1)...(19): siRNA sense strand
ugacuuugcagcuguccuu

SEQ ID NO: 1933047 - RNA, 19 nt, Homo sapiens
  misc_RNA (1)...(19): siRNA sense strand
acagugugcugggcaagau

SEQ ID NO: 1933048 - RNA, 19 nt, Homo sapiens
  misc_RNA (1)...(19): siRNA sense strand
guacgacgagaucuucuac

SEQ ID NO: 1933049 - RNA, 19 nt, Homo sapiens
  misc_RNA (1)...(19): siRNA sense strand
gaucucaccuggggacuuc

SEQ ID NO: 1933050 - RNA, 19 nt, Homo sapiens
  misc_RNA (1)...(19): siRNA sense strand
gaggaacaggaccuauuca

SEQ ID NO: 1933051 - RNA, 19 nt, Homo sapiens
  misc_RNA (1)...(19): siRNA sense strand
ucaucaaagcccucaagaa

SEQ ID NO: 1933052 - RNA, 19 nt, Homo sapiens
  misc_RNA (1)...(19): siRNA sense strand
acaaacuggacaucucuga

SEQ ID NO: 1933053 - RNA, 19 nt, Homo sapiens
  misc_RNA (1)...(19): siRNA sense strand
ggccgacauugacaaggau

SEQ ID NO: 1933054 - RNA, 19 nt, Homo sapiens
  misc_RNA (1)...(19): siRNA sense strand
gcaagaucacaggcgcuaa

SEQ ID NO: 1933055 - RNA, 19 nt, Homo sapiens
  misc_RNA (1)...(19): siRNA sense strand
agaagaaggagcuggucaa

SEQ ID NO: 1933056 - RNA, 19 nt, Homo sapiens
  misc_RNA (1)...(19): siRNA sense strand
gaaggacaacaagaagaag

SEQ ID NO: 1933057 - RNA, 19 nt, Homo sapiens
  misc_RNA (1)...(19): siRNA sense strand
ucgggaaggacaacaagaa

SEQ ID NO: 1933058 - RNA, 19 nt, Homo sapiens
  misc_RNA (1)...(19): siRNA sense strand
gcucuuugaggcugaggaa

SEQ ID NO: 1933059 - RNA, 19 nt, Homo sapiens
  misc_RNA (1)...(19): siRNA sense strand
uggcaacgccuucuugaac

SEQ ID NO: 1933060 - RNA, 19 nt, Homo sapiens
  misc_RNA (1)...(19): siRNA sense strand
gccaaccaccucaucaaag

SEQ ID NO: 1933061 - RNA, 19 nt, Homo sapiens
  misc_RNA (1)...(19): siRNA sense strand
gaggugauccgggucuaca

SEQ ID NO: 1933062 - RNA, 19 nt, Homo sapiens
  misc_RNA (1)...(19): siRNA sense strand
cagaggugauccgggucua

SEQ ID NO: 1933063 - RNA, 19 nt, Homo sapiens
  misc_RNA (1)...(19): siRNA sense strand
caaacuggacaucucugau

SEQ ID NO: 1933064 - RNA, 19 nt, Homo sapiens
  misc_RNA (1)...(19): siRNA sense strand
ggugaugcagggagacaug

SEQ ID NO: 1933065 - RNA, 19 nt, Homo sapiens
  misc_RNA (1)...(19): siRNA sense strand
ccgcaucauucugcucuuc

SEQ ID NO: 1933066 - RNA, 19 nt, Homo sapiens
  misc_RNA (1)...(19): siRNA sense strand
ggagagcaucagcgucauc

SEQ ID NO: 1933067 - RNA, 19 nt, Homo sapiens
  misc_RNA (1)...(19): siRNA sense strand
gaagagagcuccauuggua

SEQ ID NO: 1933068 - RNA, 19 nt, Homo sapiens
  misc_RNA (1)...(19): siRNA sense strand
gaugaaagcuauacuccaa

SEQ ID NO: 1933069 - RNA, 19 nt, Homo sapiens
  misc_RNA (1)...(19): siRNA sense strand
aaacaacagugaagacauu

SEQ ID NO: 1933070 - RNA, 19 nt, Homo sapiens
  misc_RNA (1)...(19): siRNA sense strand
ccaaguggcuggauucaug

SEQ ID NO: 1933071 - RNA, 19 nt, Homo sapiens
  misc_RNA (1)...(19): siRNA sense strand
gaagccaacucguucauuc

SEQ ID NO: 1933072 - RNA, 19 nt, Homo sapiens
  misc_RNA (1)...(19): siRNA sense strand
caugauguaucguucaaua

SEQ ID NO: 1933073 - RNA, 19 nt, Homo sapiens
  misc_RNA (1)...(19): siRNA sense strand
ggaagagacacccauauga

SEQ ID NO: 1933074 - RNA, 19 nt, Homo sapiens
  misc_RNA (1)...(19): siRNA sense strand
gagcuccauugguaaauuu

SEQ ID NO: 1933075 - RNA, 19 nt, Homo sapiens
  misc_RNA (1)...(19): siRNA sense strand
gaacauccaauucagaaga

SEQ ID NO: 1933076 - RNA, 19 nt, Homo sapiens
  misc_RNA (1)...(19): siRNA sense strand
cuacaaaucugaugaaagc

SEQ ID NO: 1933077 - RNA, 19 nt, Homo sapiens
  misc_RNA (1)...(19): siRNA sense strand
caagaucucagucagagua

SEQ ID NO: 1933078 - RNA, 19 nt, Homo sapiens
  misc_RNA (1)...(19): siRNA sense strand
ggaaccaaguggcuggauu

SEQ ID NO: 1933079 - RNA, 19 nt, Homo sapiens
  misc_RNA (1)...(19): siRNA sense strand
caaaucugaugaaagcuau

SEQ ID NO: 1933080 - RNA, 19 nt, Homo sapiens
  misc_RNA (1)...(19): siRNA sense strand
gaagagacacccauaugag

SEQ ID NO: 1933081 - RNA, 19 nt, Homo sapiens
  misc_RNA (1)...(19): siRNA sense strand
gaaauucggcaacuugagu

SEQ ID NO: 1933082 - RNA, 19 nt, Homo sapiens
  misc_RNA (1)...(19): siRNA sense strand
gaaccaaguggcuggauuc

SEQ ID NO: 1933083 - RNA, 19 nt, Homo sapiens
  misc_RNA (1)...(19): siRNA sense strand
gaacaguacgggaaauugg

SEQ ID NO: 1933084 - RNA, 19 nt, Homo sapiens
  misc_RNA (1)...(19): siRNA sense strand
cauaagaagccaacucguu

SEQ ID NO: 1933085 - RNA, 19 nt, Homo sapiens
  misc_RNA (1)...(19): siRNA sense strand
uuuccuagauguacaacua

SEQ ID NO: 1933086 - RNA, 19 nt, Homo sapiens
  misc_RNA (1)...(19): siRNA sense strand
gauuuggaguggaucaguu

SEQ ID NO: 1933087 - RNA, 19 nt, Homo sapiens
  misc_RNA (1)...(19): siRNA sense strand
caacagugaagacauuaug

SEQ ID NO: 1933088 - RNA, 19 nt, Homo sapiens
  misc_RNA (1)...(19): siRNA sense strand
cauguucccuuaacugaca

SEQ ID NO: 1933089 - RNA, 19 nt, Homo sapiens
  misc_RNA (1)...(19): siRNA sense strand
acccauaugagacaaauua

SEQ ID NO: 1933090 - RNA, 19 nt, Homo sapiens
  misc_RNA (1)...(19): siRNA sense strand
gccaaucaccugaauggaa

SEQ ID NO: 1933091 - RNA, 19 nt, Homo sapiens
  misc_RNA (1)...(19): siRNA sense strand
gacuacaaaucugaugaaa

SEQ ID NO: 1933092 - RNA, 19 nt, Homo sapiens
  misc_RNA (1)...(19): siRNA sense strand
guggaucaguuacgagaug

SEQ ID NO: 1933093 - RNA, 19 nt, Homo sapiens
  misc_RNA (1)...(19): siRNA sense strand
ucacaaccuacaagaaauu

SEQ ID NO: 1933094 - RNA, 19 nt, Homo sapiens
  misc_RNA (1)...(19): siRNA sense strand
ggaacaguacgggaaauug

SEQ ID NO: 1933095 - RNA, 19 nt, Homo sapiens
  misc_RNA (1)...(19): siRNA sense strand
gguaaauuuccuagaugua

SEQ ID NO: 1933096 - RNA, 19 nt, Homo sapiens
  misc_RNA (1)...(19): siRNA sense strand
guagaagagagcuccauug

SEQ ID NO: 1933097 - RNA, 19 nt, Homo sapiens
  misc_RNA (1)...(19): siRNA sense strand
ucagucagaguaggaaaua

SEQ ID NO: 1933098 - RNA, 19 nt, Homo sapiens
  misc_RNA (1)...(19): siRNA sense strand
ggauucauguucccuuaac

SEQ ID NO: 1933099 - RNA, 19 nt, Homo sapiens
  misc_RNA (1)...(19): siRNA sense strand
gauguaucguucaauaagg

SEQ ID NO: 1933100 - RNA, 19 nt, Homo sapiens
  misc_RNA (1)...(19): siRNA sense strand
acaaaucugaugaaagcua

SEQ ID NO: 1933101 - RNA, 19 nt, Homo sapiens
  misc_RNA (1)...(19): siRNA sense strand
cuggauucauguucccuua

SEQ ID NO: 1933102 - RNA, 19 nt, Homo sapiens
  misc_RNA (1)...(19): siRNA sense strand
acaagaaauucggcaacuu

SEQ ID NO: 1933103 - RNA, 19 nt, Homo sapiens
  misc_RNA (1)...(19): siRNA sense strand
gaucucagucagaguagga

SEQ ID NO: 1933104 - RNA, 19 nt, Homo sapiens
  misc_RNA (1)...(19): siRNA sense strand
guaaauuuccuagauguac

SEQ ID NO: 1933105 - RNA, 19 nt, Homo sapiens
  misc_RNA (1)...(19): siRNA sense strand
uuuggucacucucaucuug

SEQ ID NO: 1933106 - RNA, 19 nt, Homo sapiens
  misc_RNA (1)...(19): siRNA sense strand
guauuuaugcagacuacaa

SEQ ID NO: 1933107 - RNA, 19 nt, Homo sapiens
  misc_RNA (1)...(19): siRNA sense strand
aauauacacaccaguagaa

SEQ ID NO: 1933108 - RNA, 19 nt, Homo sapiens
  misc_RNA (1)...(19): siRNA sense strand
ggaaauugggucacaagcu

SEQ ID NO: 1933109 - RNA, 19 nt, Homo sapiens
  misc_RNA (1)...(19): siRNA sense strand
uccuagauguacaacuaua

SEQ ID NO: 1933110 - RNA, 19 nt, Homo sapiens
  misc_RNA (1)...(19): siRNA sense strand
ucccuuaacugacaaucau

SEQ ID NO: 1933111 - RNA, 19 nt, Homo sapiens
  misc_RNA (1)...(19): siRNA sense strand
aacauccaauucagaagaa

SEQ ID NO: 1933112 - RNA, 19 nt, Homo sapiens
  misc_RNA (1)...(19): siRNA sense strand
agagcuccauugguaaauu

SEQ ID NO: 1933113 - RNA, 19 nt, Homo sapiens
  misc_RNA (1)...(19): siRNA sense strand
uagaagagagcuccauugg

SEQ ID NO: 1933114 - RNA, 19 nt, Homo sapiens
  misc_RNA (1)...(19): siRNA sense strand
aagagacacccauaugaga

SEQ ID NO: 1933115 - RNA, 19 nt, Homo sapiens
  misc_RNA (1)...(19): siRNA sense strand
gccaacucguucauucaug

SEQ ID NO: 1933116 - RNA, 19 nt, Homo sapiens
  misc_RNA (1)...(19): siRNA sense strand
uggaagagacacccauaug

SEQ ID NO: 1933117 - RNA, 19 nt, Homo sapiens
  misc_RNA (1)...(19): siRNA sense strand
ugguaaauuuccuagaugu

SEQ ID NO: 1933118 - RNA, 19 nt, Homo sapiens
  misc_RNA (1)...(19): siRNA sense strand
agagagcuccauugguaaa

SEQ ID NO: 1933119 - RNA, 19 nt, Homo sapiens
  misc_RNA (1)...(19): siRNA sense strand
ccaagcaagaucucaguca

SEQ ID NO: 1933120 - RNA, 19 nt, Homo sapiens
  misc_RNA (1)...(19): siRNA sense strand
gaugacaaucuagaaacuu

SEQ ID NO: 1933121 - RNA, 19 nt, Homo sapiens
  misc_RNA (1)...(19): siRNA sense strand
gucagaguaggaaauaauu

SEQ ID NO: 1933122 - RNA, 19 nt, Homo sapiens
  misc_RNA (1)...(19): siRNA sense strand
gaugguucccagccucauu

SEQ ID NO: 1933123 - RNA, 19 nt, Homo sapiens
  misc_RNA (1)...(19): siRNA sense strand
gagacacccauaugagaca

SEQ ID NO: 1933124 - RNA, 19 nt, Homo sapiens
  misc_RNA (1)...(19): siRNA sense strand
ucaguuacgagaugacaau

SEQ ID NO: 1933125 - RNA, 19 nt, Homo sapiens
  misc_RNA (1)...(19): siRNA sense strand
cuagauguacaacuauaga

SEQ ID NO: 1933126 - RNA, 19 nt, Homo sapiens
  misc_RNA (1)...(19): siRNA sense strand
caagcuguuuggucacucu

SEQ ID NO: 1933127 - RNA, 19 nt, Homo sapiens
  misc_RNA (1)...(19): siRNA sense strand
aaauauacacaccaguaga

SEQ ID NO: 1933128 - RNA, 19 nt, Homo sapiens
  misc_RNA (1)...(19): siRNA sense strand
uaagaagccaacucguuca

SEQ ID NO: 1933129 - RNA, 19 nt, Homo sapiens
  misc_RNA (1)...(19): siRNA sense strand
agacuacaaaucugaugaa

SEQ ID NO: 1933130 - RNA, 19 nt, Homo sapiens
  misc_RNA (1)...(19): siRNA sense strand
gauuucaugauguaucguu

SEQ ID NO: 1933131 - RNA, 19 nt, Homo sapiens
  misc_RNA (1)...(19): siRNA sense strand
uagauuucaugauguaucg

SEQ ID NO: 1933132 - RNA, 19 nt, Homo sapiens
  misc_RNA (1)...(19): siRNA sense strand
acucucaucuugcaaacca

SEQ ID NO: 1933133 - RNA, 19 nt, Homo sapiens
  misc_RNA (1)...(19): siRNA sense strand
aaagcuauacuccaagcaa

SEQ ID NO: 1933134 - RNA, 19 nt, Homo sapiens
  misc_RNA (1)...(19): siRNA sense strand
ccuuaacugacaaucauaa

SEQ ID NO: 1933135 - RNA, 19 nt, Homo sapiens
  misc_RNA (1)...(19): siRNA sense strand
ugauguaucguucaauaag

SEQ ID NO: 1933136 - RNA, 19 nt, Homo sapiens
  misc_RNA (1)...(19): siRNA sense strand
guucccagccucauuuagu

SEQ ID NO: 1933137 - RNA, 19 nt, Homo sapiens
  misc_RNA (1)...(19): siRNA sense strand
uugguaaauuuccuagaug

SEQ ID NO: 1933138 - RNA, 19 nt, Homo sapiens
  misc_RNA (1)...(19): siRNA sense strand
acacccauaugagacaaau

SEQ ID NO: 1933139 - RNA, 19 nt, Homo sapiens
  misc_RNA (1)...(19): siRNA sense strand
gcuauacuccaagcaagau

SEQ ID NO: 1933140 - RNA, 19 nt, Homo sapiens
  misc_RNA (1)...(19): siRNA sense strand
uggaguggaucaguuacga

SEQ ID NO: 1933141 - RNA, 19 nt, Homo sapiens
  misc_RNA (1)...(19): siRNA sense strand
ucuagccaaucaccugaau

SEQ ID NO: 1933142 - RNA, 19 nt, Homo sapiens
  misc_RNA (1)...(19): siRNA sense strand
aagaaauucggcaacuuga

SEQ ID NO: 1933143 - RNA, 19 nt, Homo sapiens
  misc_RNA (1)...(19): siRNA sense strand
uacaagaaauucggcaacu

SEQ ID NO: 1933144 - RNA, 19 nt, Homo sapiens
  misc_RNA (1)...(19): siRNA sense strand
cagucagaguaggaaauaa

SEQ ID NO: 1933145 - RNA, 19 nt, Homo sapiens
  misc_RNA (1)...(19): siRNA sense strand
ggaggaggaugaacacuau

SEQ ID NO: 1933146 - RNA, 19 nt, Homo sapiens
  misc_RNA (1)...(19): siRNA sense strand
gcacgggacucuugucaau

SEQ ID NO: 1933147 - RNA, 19 nt, Homo sapiens
  misc_RNA (1)...(19): siRNA sense strand
gcuaaccacuuggaagaua

SEQ ID NO: 1933148 - RNA, 19 nt, Homo sapiens
  misc_RNA (1)...(19): siRNA sense strand
ugacaaagacagaaaugua

SEQ ID NO: 1933149 - RNA, 19 nt, Homo sapiens
  misc_RNA (1)...(19): siRNA sense strand
gacaaagacagaaauguaa

SEQ ID NO: 1933150 - RNA, 19 nt, Homo sapiens
  misc_RNA (1)...(19): siRNA sense strand
ccacagagccaccgucuau

SEQ ID NO: 1933151 - RNA, 19 nt, Homo sapiens
  misc_RNA (1)...(19): siRNA sense strand
gcagauaugcuacaugaca

SEQ ID NO: 1933152 - RNA, 19 nt, Homo sapiens
  misc_RNA (1)...(19): siRNA sense strand
gcgaugugcugcccauguu

SEQ ID NO: 1933153 - RNA, 19 nt, Homo sapiens
  misc_RNA (1)...(19): siRNA sense strand
gcaagcaggccgucuacuu

SEQ ID NO: 1933154 - RNA, 19 nt, Homo sapiens
  misc_RNA (1)...(19): siRNA sense strand
aggaugaacacuaugauua

SEQ ID NO: 1933155 - RNA, 19 nt, Homo sapiens
  misc_RNA (1)...(19): siRNA sense strand
gcuaugcaguggaguuuca

SEQ ID NO: 1933156 - RNA, 19 nt, Homo sapiens
  misc_RNA (1)...(19): siRNA sense strand
ggccggaauuauuaacaaa

SEQ ID NO: 1933157 - RNA, 19 nt, Homo sapiens
  misc_RNA (1)...(19): siRNA sense strand
augcagauaugcuacauga

SEQ ID NO: 1933158 - RNA, 19 nt, Homo sapiens
  misc_RNA (1)...(19): siRNA sense strand
ggcagauccugaccuuuga

SEQ ID NO: 1933159 - RNA, 19 nt, Homo sapiens
  misc_RNA (1)...(19): siRNA sense strand
cuaaccacuuggaagauaa

SEQ ID NO: 1933160 - RNA, 19 nt, Homo sapiens
  misc_RNA (1)...(19): siRNA sense strand
ggccuugguucucgacauu

SEQ ID NO: 1933161 - RNA, 19 nt, Homo sapiens
  misc_RNA (1)...(19): siRNA sense strand
gaggaugaacacuaugauu

SEQ ID NO: 1933162 - RNA, 19 nt, Homo sapiens
  misc_RNA (1)...(19): siRNA sense strand
cagauaugcuacaugacaa

SEQ ID NO: 1933163 - RNA, 19 nt, Homo sapiens
  misc_RNA (1)...(19): siRNA sense strand
ccaacauccuggucacaga

SEQ ID NO: 1933164 - RNA, 19 nt, Homo sapiens
  misc_RNA (1)...(19): siRNA sense strand
gauccugaccuuugacuuc

SEQ ID NO: 1933165 - RNA, 19 nt, Homo sapiens
  misc_RNA (1)...(19): siRNA sense strand
acgggacucuugucaauga

SEQ ID NO: 1933166 - RNA, 19 nt, Homo sapiens
  misc_RNA (1)...(19): siRNA sense strand
ccggaauuauuaacaaaug

SEQ ID NO: 1933167 - RNA, 19 nt, Homo sapiens
  misc_RNA (1)...(19): siRNA sense strand
cgacacaggcgacaucauc

SEQ ID NO: 1933168 - RNA, 19 nt, Homo sapiens
  misc_RNA (1)...(19): siRNA sense strand
caagcaggccgucuacuuc

SEQ ID NO: 1933169 - RNA, 19 nt, Homo sapiens
  misc_RNA (1)...(19): siRNA sense strand
ggcgagccguucuucacua

SEQ ID NO: 1933170 - RNA, 19 nt, Homo sapiens
  misc_RNA (1)...(19): siRNA sense strand
gauuaagguuaucaacaag

SEQ ID NO: 1933171 - RNA, 19 nt, Homo sapiens
  misc_RNA (1)...(19): siRNA sense strand
uucagcagcuucucacaaa

SEQ ID NO: 1933172 - RNA, 19 nt, Homo sapiens
  misc_RNA (1)...(19): siRNA sense strand
cagaggaccagcccugaaa

SEQ ID NO: 1933173 - RNA, 19 nt, Homo sapiens
  misc_RNA (1)...(19): siRNA sense strand
gcauagacuucagcaagca

SEQ ID NO: 1933174 - RNA, 19 nt, Homo sapiens
  misc_RNA (1)...(19): siRNA sense strand
ggaugaacacuaugauuac

SEQ ID NO: 1933175 - RNA, 19 nt, Homo sapiens
  misc_RNA (1)...(19): siRNA sense strand
cagaguuguuugacacaga

SEQ ID NO: 1933176 - RNA, 19 nt, Homo sapiens
  misc_RNA (1)...(19): siRNA sense strand
uggcagauccugaccuuug

SEQ ID NO: 1933177 - RNA, 19 nt, Homo sapiens
  misc_RNA (1)...(19): siRNA sense strand
uaacaaaugaggaccuaca

SEQ ID NO: 1933178 - RNA, 19 nt, Homo sapiens
  misc_RNA (1)...(19): siRNA sense strand
gcagaggaccagcccugaa

SEQ ID NO: 1933179 - RNA, 19 nt, Homo sapiens
  misc_RNA (1)...(19): siRNA sense strand
ggcacaaccucuacuucug

SEQ ID NO: 1933180 - RNA, 19 nt, Homo sapiens
  misc_RNA (1)...(19): siRNA sense strand
cacagcaggugccgacuuc

SEQ ID NO: 1933181 - RNA, 19 nt, Homo sapiens
  misc_RNA (1)...(19): siRNA sense strand
gaccagcccugaaaagaau

SEQ ID NO: 1933182 - RNA, 19 nt, Homo sapiens
  misc_RNA (1)...(19): siRNA sense strand
uggcuuuagugauaagauu

SEQ ID NO: 1933183 - RNA, 19 nt, Homo sapiens
  misc_RNA (1)...(19): siRNA sense strand
gaucaaugaccaggacaga

SEQ ID NO: 1933184 - RNA, 19 nt, Homo sapiens
  misc_RNA (1)...(19): siRNA sense strand
ugagagaguccgccagaug

SEQ ID NO: 1933185 - RNA, 19 nt, Homo sapiens
  misc_RNA (1)...(19): siRNA sense strand
cacgaugacuacugcguau

SEQ ID NO: 1933186 - RNA, 19 nt, Homo sapiens
  misc_RNA (1)...(19): siRNA sense strand
ggucguggaacaagcuauu

SEQ ID NO: 1933187 - RNA, 19 nt, Homo sapiens
  misc_RNA (1)...(19): siRNA sense strand
cugugaagauuguggagaa

SEQ ID NO: 1933188 - RNA, 19 nt, Homo sapiens
  misc_RNA (1)...(19): siRNA sense strand
gagccguucuucacuacca

SEQ ID NO: 1933189 - RNA, 19 nt, Homo sapiens
  misc_RNA (1)...(19): siRNA sense strand
gaccaggacagaacugauc

SEQ ID NO: 1933190 - RNA, 19 nt, Homo sapiens
  misc_RNA (1)...(19): siRNA sense strand
ggcuuuagugauaagauua

SEQ ID NO: 1933191 - RNA, 19 nt, Homo sapiens
  misc_RNA (1)...(19): siRNA sense strand
gcgacaucaucauggaguu

SEQ ID NO: 1933192 - RNA, 19 nt, Homo sapiens
  misc_RNA (1)...(19): siRNA sense strand
aggcucaccugcucuggaa

SEQ ID NO: 1933193 - RNA, 19 nt, Homo sapiens
  misc_RNA (1)...(19): siRNA sense strand
gaaggacagaggacagaag

SEQ ID NO: 1933194 - RNA, 19 nt, Homo sapiens
  misc_RNA (1)...(19): siRNA sense strand
uggagcagguguuuacagu

SEQ ID NO: 1933195 - RNA, 19 nt, Homo sapiens
  misc_RNA (1)...(19): siRNA sense strand
gcuaugccaucgagguuuu

SEQ ID NO: 1933196 - RNA, 19 nt, Homo sapiens
  misc_RNA (1)...(19): siRNA sense strand
caggcgacaucaucaugga

SEQ ID NO: 1933197 - RNA, 19 nt, Homo sapiens
  misc_RNA (1)...(19): siRNA sense strand
gaugcaguguguguacuuc

SEQ ID NO: 1933198 - RNA, 19 nt, Homo sapiens
  misc_RNA (1)...(19): siRNA sense strand
uuacaguccucagcgaugu

SEQ ID NO: 1933199 - RNA, 19 nt, Homo sapiens
  misc_RNA (1)...(19): siRNA sense strand
gcaggccgucuacuucuuc

SEQ ID NO: 1933200 - RNA, 19 nt, Homo sapiens
  misc_RNA (1)...(19): siRNA sense strand
ggaccuacagggcagaaag

SEQ ID NO: 1933201 - RNA, 19 nt, Homo sapiens
  misc_RNA (1)...(19): siRNA sense strand
ccacuuggaagauaaaauu

SEQ ID NO: 1933202 - RNA, 19 nt, Homo sapiens
  misc_RNA (1)...(19): siRNA sense strand
uggccgagcucaggugguu

SEQ ID NO: 1933203 - RNA, 19 nt, Homo sapiens
  misc_RNA (1)...(19): siRNA sense strand
uuaagguuaucaacaagca

SEQ ID NO: 1933204 - RNA, 19 nt, Homo sapiens
  misc_RNA (1)...(19): siRNA sense strand
gcgagccguucuucacuac

SEQ ID NO: 1933205 - RNA, 19 nt, Homo sapiens
  misc_RNA (1)...(19): siRNA sense strand
ggaccagcccugaaaagaa

SEQ ID NO: 1933206 - RNA, 19 nt, Homo sapiens
  misc_RNA (1)...(19): siRNA sense strand
gccaugccgugccaacauc

SEQ ID NO: 1933207 - RNA, 19 nt, Homo sapiens
  misc_RNA (1)...(19): siRNA sense strand
gcagggcucagcgcucuau

SEQ ID NO: 1933208 - RNA, 19 nt, Homo sapiens
  misc_RNA (1)...(19): siRNA sense strand
gaguucaggcaugcagaua

SEQ ID NO: 1933209 - RNA, 19 nt, Homo sapiens
  misc_RNA (1)...(19): siRNA sense strand
gcccacggacugucagcua

SEQ ID NO: 1933210 - RNA, 19 nt, Homo sapiens
  misc_RNA (1)...(19): siRNA sense strand
acgcagcggugcuauggau

SEQ ID NO: 1933211 - RNA, 19 nt, Homo sapiens
  misc_RNA (1)...(19): siRNA sense strand
ccuggcagauccugaccuu

SEQ ID NO: 1933212 - RNA, 19 nt, Homo sapiens
  misc_RNA (1)...(19): siRNA sense strand
uaaccacuuggaagauaaa

SEQ ID NO: 1933213 - RNA, 19 nt, Homo sapiens
  misc_RNA (1)...(19): siRNA sense strand
uggaggaggaugaacacua

SEQ ID NO: 1933214 - RNA, 19 nt, Homo sapiens
  misc_RNA (1)...(19): siRNA sense strand
ugccauagcaggcgguuug

SEQ ID NO: 1933215 - RNA, 19 nt, Homo sapiens
  misc_RNA (1)...(19): siRNA sense strand
cagcuaugcaguggaguuu

SEQ ID NO: 1933216 - RNA, 19 nt, Homo sapiens
  misc_RNA (1)...(19): siRNA sense strand
gcugcacgcugugguugug

SEQ ID NO: 1933217 - RNA, 19 nt, Homo sapiens
  misc_RNA (1)...(19): siRNA sense strand
cagcuucucacaaacuguu

SEQ ID NO: 1933218 - RNA, 19 nt, Homo sapiens
  misc_RNA (1)...(19): siRNA sense strand
guucagcagcuucucacaa

SEQ ID NO: 1933219 - RNA, 19 nt, Homo sapiens
  misc_RNA (1)...(19): siRNA sense strand
ucaaugaccaggacagaac

SEQ ID NO: 1933220 - RNA, 19 nt, Homo sapiens
  misc_RNA (1)...(19): siRNA sense strand
ggaugcaguguguguacuu

SEQ ID NO: 1933221 - RNA, 19 nt, Homo sapiens
  misc_RNA (1)...(19): siRNA sense strand
ugaugcugcugugaagauu

SEQ ID NO: 1933222 - RNA, 19 nt, Homo sapiens
  misc_RNA (1)...(19): siRNA sense strand
ggaggaugaacacuaugau

SEQ ID NO: 1933223 - RNA, 19 nt, Homo sapiens
  misc_RNA (1)...(19): siRNA sense strand
gguuuggagagaucaauga

SEQ ID NO: 1933224 - RNA, 19 nt, Homo sapiens
  misc_RNA (1)...(19): siRNA sense strand
caucgucccucccguugac

SEQ ID NO: 1933225 - RNA, 19 nt, Homo sapiens
  misc_RNA (1)...(19): siRNA sense strand
ggugccgacuucugcuaug

SEQ ID NO: 1933226 - RNA, 19 nt, Homo sapiens
  misc_RNA (1)...(19): siRNA sense strand
ggaguucaggcaugcagau

SEQ ID NO: 1933227 - RNA, 19 nt, Homo sapiens
  misc_RNA (1)...(19): siRNA sense strand
gggcucagcgcucuaucug

SEQ ID NO: 1933228 - RNA, 19 nt, Homo sapiens
  misc_RNA (1)...(19): siRNA sense strand
gaugugcugcccauguuca

SEQ ID NO: 1933229 - RNA, 19 nt, Homo sapiens
  misc_RNA (1)...(19): siRNA sense strand
gcgcacccucugucuguga

SEQ ID NO: 1933230 - RNA, 19 nt, Homo sapiens
  misc_RNA (1)...(19): siRNA sense strand
guuugaaccucugacaucu

SEQ ID NO: 1933231 - RNA, 19 nt, Homo sapiens
  misc_RNA (1)...(19): siRNA sense strand
ugugaagauuguggagaaa

SEQ ID NO: 1933232 - RNA, 19 nt, Homo sapiens
  misc_RNA (1)...(19): siRNA sense strand
gaugaacacuaugauuacc

SEQ ID NO: 1933233 - RNA, 19 nt, Homo sapiens
  misc_RNA (1)...(19): siRNA sense strand
auuaacaaaugaggaccua

SEQ ID NO: 1933234 - RNA, 19 nt, Homo sapiens
  misc_RNA (1)...(19): siRNA sense strand
caugacaaagacagaaaug

SEQ ID NO: 1933235 - RNA, 19 nt, Homo sapiens
  misc_RNA (1)...(19): siRNA sense strand
uguacuuccugccacaaga

SEQ ID NO: 1933236 - RNA, 19 nt, Homo sapiens
  misc_RNA (1)...(19): siRNA sense strand
ucagcaagcaagucaguag

SEQ ID NO: 1933237 - RNA, 19 nt, Homo sapiens
  misc_RNA (1)...(19): siRNA sense strand
gacacaggcgacaucauca

SEQ ID NO: 1933238 - RNA, 19 nt, Homo sapiens
  misc_RNA (1)...(19): siRNA sense strand
cccacggacugucagcuau

SEQ ID NO: 1933239 - RNA, 19 nt, Homo sapiens
  misc_RNA (1)...(19): siRNA sense strand
auugcaaggucaucuuaug

SEQ ID NO: 1933240 - RNA, 19 nt, Homo sapiens
  misc_RNA (1)...(19): siRNA sense strand
uaugcuacaugacaaagac

SEQ ID NO: 1933241 - RNA, 19 nt, Homo sapiens
  misc_RNA (1)...(19): siRNA sense strand
ggguggagcagguguuuac

SEQ ID NO: 1933242 - RNA, 19 nt, Homo sapiens
  misc_RNA (1)...(19): siRNA sense strand
gaggagaacuugcuauauu

SEQ ID NO: 1933243 - RNA, 19 nt, Homo sapiens
  misc_RNA (1)...(19): siRNA sense strand
aaacaaaccuugauggaaa

SEQ ID NO: 1933244 - RNA, 19 nt, Homo sapiens
  misc_RNA (1)...(19): siRNA sense strand
ggacuuggcuuacccagaa

SEQ ID NO: 1933245 - RNA, 19 nt, Homo sapiens
  misc_RNA (1)...(19): siRNA sense strand
gcauaaaucugcugugaau

SEQ ID NO: 1933246 - RNA, 19 nt, Homo sapiens
  misc_RNA (1)...(19): siRNA sense strand
ccagaucuauucuuacaua

SEQ ID NO: 1933247 - RNA, 19 nt, Homo sapiens
  misc_RNA (1)...(19): siRNA sense strand
ccagaaagguccuauguug

SEQ ID NO: 1933248 - RNA, 19 nt, Homo sapiens
  misc_RNA (1)...(19): siRNA sense strand
acacagggcuucaucguaa

SEQ ID NO: 1933249 - RNA, 19 nt, Homo sapiens
  misc_RNA (1)...(19): siRNA sense strand
gagaauagcuaagcagaug

SEQ ID NO: 1933250 - RNA, 19 nt, Homo sapiens
  misc_RNA (1)...(19): siRNA sense strand
gcacagaauugucuaccuu

SEQ ID NO: 1933251 - RNA, 19 nt, Homo sapiens
  misc_RNA (1)...(19): siRNA sense strand
cggcagauuucaauuauuu

SEQ ID NO: 1933252 - RNA, 19 nt, Homo sapiens
  misc_RNA (1)...(19): siRNA sense strand
guaagucguucuauauuug

SEQ ID NO: 1933253 - RNA, 19 nt, Homo sapiens
  misc_RNA (1)...(19): siRNA sense strand
uggcaaagcuccucaauuc

SEQ ID NO: 1933254 - RNA, 19 nt, Homo sapiens
  misc_RNA (1)...(19): siRNA sense strand
ccacugaguuagaauauau

SEQ ID NO: 1933255 - RNA, 19 nt, Homo sapiens
  misc_RNA (1)...(19): siRNA sense strand
agugguagcucgucaaaua

SEQ ID NO: 1933256 - RNA, 19 nt, Homo sapiens
  misc_RNA (1)...(19): siRNA sense strand
cagcugaugucuacuguaa

SEQ ID NO: 1933257 - RNA, 19 nt, Homo sapiens
  misc_RNA (1)...(19): siRNA sense strand
gcuccaagauuaaguguug

SEQ ID NO: 1933258 - RNA, 19 nt, Homo sapiens
  misc_RNA (1)...(19): siRNA sense strand
gaaacgaaaugguucucuu

SEQ ID NO: 1933259 - RNA, 19 nt, Homo sapiens
  misc_RNA (1)...(19): siRNA sense strand
ccaaggcucccacuauuua

SEQ ID NO: 1933260 - RNA, 19 nt, Homo sapiens
  misc_RNA (1)...(19): siRNA sense strand
gaucccacauugccuuuaa

SEQ ID NO: 1933261 - RNA, 19 nt, Homo sapiens
  misc_RNA (1)...(19): siRNA sense strand
caacuccgcuuguagacuu

SEQ ID NO: 1933262 - RNA, 19 nt, Homo sapiens
  misc_RNA (1)...(19): siRNA sense strand
gcaucuacguggagcauuu

SEQ ID NO: 1933263 - RNA, 19 nt, Homo sapiens
  misc_RNA (1)...(19): siRNA sense strand
gcaacaaggucuuagugau

SEQ ID NO: 1933264 - RNA, 19 nt, Homo sapiens
  misc_RNA (1)...(19): siRNA sense strand
gcacacaaaucuggaguuc

SEQ ID NO: 1933265 - RNA, 19 nt, Homo sapiens
  misc_RNA (1)...(19): siRNA sense strand
gaagaaauagaugagguua

SEQ ID NO: 1933266 - RNA, 19 nt, Homo sapiens
  misc_RNA (1)...(19): siRNA sense strand
gagaaggccuggucguugu

SEQ ID NO: 1933267 - RNA, 19 nt, Homo sapiens
  misc_RNA (1)...(19): siRNA sense strand
caucguaacugcuucuaga

SEQ ID NO: 1933268 - RNA, 19 nt, Homo sapiens
  misc_RNA (1)...(19): siRNA sense strand
gaaagguccuauguuguug

SEQ ID NO: 1933269 - RNA, 19 nt, Homo sapiens
  misc_RNA (1)...(19): siRNA sense strand
gacagaagauuuacucucu

SEQ ID NO: 1933270 - RNA, 19 nt, Homo sapiens
  misc_RNA (1)...(19): siRNA sense strand
gugcaaugcugagagaaua

SEQ ID NO: 1933271 - RNA, 19 nt, Homo sapiens
  misc_RNA (1)...(19): siRNA sense strand
ggaacugauucuucauuug

SEQ ID NO: 1933272 - RNA, 19 nt, Homo sapiens
  misc_RNA (1)...(19): siRNA sense strand
cugaacaagugcuaaauaa

SEQ ID NO: 1933273 - RNA, 19 nt, Homo sapiens
  misc_RNA (1)...(19): siRNA sense strand
gaagguguaccauuauuug

SEQ ID NO: 1933274 - RNA, 19 nt, Homo sapiens
  misc_RNA (1)...(19): siRNA sense strand
guucagacaucuucacaug

SEQ ID NO: 1933275 - RNA, 19 nt, Homo sapiens
  misc_RNA (1)...(19): siRNA sense strand
acuguaaacugaugccuua

SEQ ID NO: 1933276 - RNA, 19 nt, Homo sapiens
  misc_RNA (1)...(19): siRNA sense strand
ggaaauccuauccuacuaa

SEQ ID NO: 1933277 - RNA, 19 nt, Homo sapiens
  misc_RNA (1)...(19): siRNA sense strand
gaaaaugaccccaauaaug

SEQ ID NO: 1933278 - RNA, 19 nt, Homo sapiens
  misc_RNA (1)...(19): siRNA sense strand
gcagugcaaugcugagaga

SEQ ID NO: 1933279 - RNA, 19 nt, Homo sapiens
  misc_RNA (1)...(19): siRNA sense strand
gaagacaacccggcagauu

SEQ ID NO: 1933280 - RNA, 19 nt, Homo sapiens
  misc_RNA (1)...(19): siRNA sense strand
gagaugggauugugaaggu

SEQ ID NO: 1933281 - RNA, 19 nt, Homo sapiens
  misc_RNA (1)...(19): siRNA sense strand
agaaacagcucugagauuc

SEQ ID NO: 1933282 - RNA, 19 nt, Homo sapiens
  misc_RNA (1)...(19): siRNA sense strand
ggaauuggguucuucuaac

SEQ ID NO: 1933283 - RNA, 19 nt, Homo sapiens
  misc_RNA (1)...(19): siRNA sense strand
ggaggacgguuguguugug

SEQ ID NO: 1933284 - RNA, 19 nt, Homo sapiens
  misc_RNA (1)...(19): siRNA sense strand
gauguuugccacugaguua

SEQ ID NO: 1933285 - RNA, 19 nt, Homo sapiens
  misc_RNA (1)...(19): siRNA sense strand
cuacaaagcagaauucuag

SEQ ID NO: 1933286 - RNA, 19 nt, Homo sapiens
  misc_RNA (1)...(19): siRNA sense strand
ggaccaagcacacaaaucu

SEQ ID NO: 1933287 - RNA, 19 nt, Homo sapiens
  misc_RNA (1)...(19): siRNA sense strand
ccucauagcguccauggua

SEQ ID NO: 1933288 - RNA, 19 nt, Homo sapiens
  misc_RNA (1)...(19): siRNA sense strand
uuacagccuucuccucaua

SEQ ID NO: 1933289 - RNA, 19 nt, Homo sapiens
  misc_RNA (1)...(19): siRNA sense strand
acuaccagaucuauucuua

SEQ ID NO: 1933290 - RNA, 19 nt, Homo sapiens
  misc_RNA (1)...(19): siRNA sense strand
gaccagagccaucuucaug

SEQ ID NO: 1933291 - RNA, 19 nt, Homo sapiens
  misc_RNA (1)...(19): siRNA sense strand
gccagaggauccugccaua

SEQ ID NO: 1933292 - RNA, 19 nt, Homo sapiens
  misc_RNA (1)...(19): siRNA sense strand
gaacugauucuucauuugg

SEQ ID NO: 1933293 - RNA, 19 nt, Homo sapiens
  misc_RNA (1)...(19): siRNA sense strand
ccacuuagcccaagaugau

SEQ ID NO: 1933294 - RNA, 19 nt, Homo sapiens
  misc_RNA (1)...(19): siRNA sense strand
gaaaguaggaccaagugau

SEQ ID NO: 1933295 - RNA, 19 nt, Homo sapiens
  misc_RNA (1)...(19): siRNA sense strand
ggagacuggugacagaaga

SEQ ID NO: 1933296 - RNA, 19 nt, Homo sapiens
  misc_RNA (1)...(19): siRNA sense strand
ucaagucacugucauccuu

SEQ ID NO: 1933297 - RNA, 19 nt, Homo sapiens
  misc_RNA (1)...(19): siRNA sense strand
ggacaugagguuccaguug

SEQ ID NO: 1933298 - RNA, 19 nt, Homo sapiens
  misc_RNA (1)...(19): siRNA sense strand
ugccuuaucuugacccaua

SEQ ID NO: 1933299 - RNA, 19 nt, Homo sapiens
  misc_RNA (1)...(19): siRNA sense strand
gaugucuacuguaaacuga

SEQ ID NO: 1933300 - RNA, 19 nt, Homo sapiens
  misc_RNA (1)...(19): siRNA sense strand
caacaaggucuuagugaug

SEQ ID NO: 1933301 - RNA, 19 nt, Homo sapiens
  misc_RNA (1)...(19): siRNA sense strand
agaaauagaugagguuaca

SEQ ID NO: 1933302 - RNA, 19 nt, Homo sapiens
  misc_RNA (1)...(19): siRNA sense strand
cagaagguguaccauuauu

SEQ ID NO: 1933303 - RNA, 19 nt, Homo sapiens
  misc_RNA (1)...(19): siRNA sense strand
ucaagacgcucacauucug

SEQ ID NO: 1933304 - RNA, 19 nt, Homo sapiens
  misc_RNA (1)...(19): siRNA sense strand
gcaacauguucaaaugaug

SEQ ID NO: 1933305 - RNA, 19 nt, Homo sapiens
  misc_RNA (1)...(19): siRNA sense strand
uaaagcaaaggccaauaua

SEQ ID NO: 1933306 - RNA, 19 nt, Homo sapiens
  misc_RNA (1)...(19): siRNA sense strand
aaacugaugccuuaucuug

SEQ ID NO: 1933307 - RNA, 19 nt, Homo sapiens
  misc_RNA (1)...(19): siRNA sense strand
guaaacugaugccuuaucu

SEQ ID NO: 1933308 - RNA, 19 nt, Homo sapiens
  misc_RNA (1)...(19): siRNA sense strand
caaagcuccucaauucuca

SEQ ID NO: 1933309 - RNA, 19 nt, Homo sapiens
  misc_RNA (1)...(19): siRNA sense strand
ccacaugauuacuuuccua

SEQ ID NO: 1933310 - RNA, 19 nt, Homo sapiens
  misc_RNA (1)...(19): siRNA sense strand
ucagagaauugguaacuca

SEQ ID NO: 1933311 - RNA, 19 nt, Homo sapiens
  misc_RNA (1)...(19): siRNA sense strand
gaauuggguucuucuaacu

SEQ ID NO: 1933312 - RNA, 19 nt, Homo sapiens
  misc_RNA (1)...(19): siRNA sense strand
caccaccacuuucugaauu

SEQ ID NO: 1933313 - RNA, 19 nt, Homo sapiens
  misc_RNA (1)...(19): siRNA sense strand
ggaagaggaagacaaacuu

SEQ ID NO: 1933314 - RNA, 19 nt, Homo sapiens
  misc_RNA (1)...(19): siRNA sense strand
ugaagaaguugcucucaca

SEQ ID NO: 1933315 - RNA, 19 nt, Homo sapiens
  misc_RNA (1)...(19): siRNA sense strand
ccaguaagucguucuauau

SEQ ID NO: 1933316 - RNA, 19 nt, Homo sapiens
  misc_RNA (1)...(19): siRNA sense strand
gcuccaagccuuacaugaa

SEQ ID NO: 1933317 - RNA, 19 nt, Homo sapiens
  misc_RNA (1)...(19): siRNA sense strand
gaugagcguauucugguua

SEQ ID NO: 1933318 - RNA, 19 nt, Homo sapiens
  misc_RNA (1)...(19): siRNA sense strand
ggcagaagauuacuuaaaa

SEQ ID NO: 1933319 - RNA, 19 nt, Homo sapiens
  misc_RNA (1)...(19): siRNA sense strand
gaacaagaggagaguugaa

SEQ ID NO: 1933320 - RNA, 19 nt, Homo sapiens
  misc_RNA (1)...(19): siRNA sense strand
ggacuuuaaagcaugauuu

SEQ ID NO: 1933321 - RNA, 19 nt, Homo sapiens
  misc_RNA (1)...(19): siRNA sense strand
gcaaugcguggacuuuaaa

SEQ ID NO: 1933322 - RNA, 19 nt, Homo sapiens
  misc_RNA (1)...(19): siRNA sense strand
uaauugacuuggcagcuuu

SEQ ID NO: 1933323 - RNA, 19 nt, Homo sapiens
  misc_RNA (1)...(19): siRNA sense strand
guaauugacuuggcagcuu

SEQ ID NO: 1933324 - RNA, 19 nt, Homo sapiens
  misc_RNA (1)...(19): siRNA sense strand
ucacaugcgucagaagaaa

SEQ ID NO: 1933325 - RNA, 19 nt, Homo sapiens
  misc_RNA (1)...(19): siRNA sense strand
gaaggagagccuaaggaaa

SEQ ID NO: 1933326 - RNA, 19 nt, Homo sapiens
  misc_RNA (1)...(19): siRNA sense strand
gagaauugguaacucagau

SEQ ID NO: 1933327 - RNA, 19 nt, Homo sapiens
  misc_RNA (1)...(19): siRNA sense strand
gaucuauucuuacauacag

SEQ ID NO: 1933328 - RNA, 19 nt, Homo sapiens
  misc_RNA (1)...(19): siRNA sense strand
uaagaaugauuggcaucua

SEQ ID NO: 1933329 - RNA, 19 nt, Homo sapiens
  misc_RNA (1)...(19): siRNA sense strand
ucagaaagccaacgauguu

SEQ ID NO: 1933330 - RNA, 19 nt, Homo sapiens
  misc_RNA (1)...(19): siRNA sense strand
gcaacauuauucacaaucu

SEQ ID NO: 1933331 - RNA, 19 nt, Homo sapiens
  misc_RNA (1)...(19): siRNA sense strand
guuuagaggcagaagauua

SEQ ID NO: 1933332 - RNA, 19 nt, Homo sapiens
  misc_RNA (1)...(19): siRNA sense strand
acacaaaucuggaguucgu

SEQ ID NO: 1933333 - RNA, 19 nt, Homo sapiens
  misc_RNA (1)...(19): siRNA sense strand
gaaauccuauccuacuaac

SEQ ID NO: 1933334 - RNA, 19 nt, Homo sapiens
  misc_RNA (1)...(19): siRNA sense strand
gaaggaggacgguuguguu

SEQ ID NO: 1933335 - RNA, 19 nt, Homo sapiens
  misc_RNA (1)...(19): siRNA sense strand
cagaagaaacgaaaugguu

SEQ ID NO: 1933336 - RNA, 19 nt, Homo sapiens
  misc_RNA (1)...(19): siRNA sense strand
gaaaugguccagcagaaag

SEQ ID NO: 1933337 - RNA, 19 nt, Homo sapiens
  misc_RNA (1)...(19): siRNA sense strand
gaagagagcaauggacauc

SEQ ID NO: 1933338 - RNA, 19 nt, Homo sapiens
  misc_RNA (1)...(19): siRNA sense strand
ccaccuggauggcguccua

SEQ ID NO: 1933339 - RNA, 19 nt, Homo sapiens
  misc_RNA (1)...(19): siRNA sense strand
cuuggcagcuuuaggcaua

SEQ ID NO: 1933340 - RNA, 19 nt, Homo sapiens
  misc_RNA (1)...(19): siRNA sense strand
ucagaaagguguaauugac

SEQ ID NO: 1933341 - RNA, 19 nt, Homo sapiens
  misc_RNA (1)...(19): siRNA sense strand
gcaaagcuccucaauucuc

SEQ ID NO: 1933342 - RNA, 19 nt, Homo sapiens
  misc_RNA (1)...(19): siRNA sense strand
gaaagaaacuucgggauuu

SEQ ID NO: 1933343 - RNA, 19 nt, Homo sapiens
  misc_RNA (1)...(19): siRNA sense strand
caaaugaccuugccaaauu

SEQ ID NO: 1933344 - RNA, 19 nt, Homo sapiens
  misc_RNA (1)...(19): siRNA sense strand
gaagaaauguccagaagga

SEQ ID NO: 1933345 - RNA, 19 nt, Homo sapiens
  misc_RNA (1)...(19): siRNA sense strand
gaaaguggcucugcagaaa

SEQ ID NO: 1933346 - RNA, 19 nt, Homo sapiens
  misc_RNA (1)...(19): siRNA sense strand
gaacuggaccugaugauuu

SEQ ID NO: 1933347 - RNA, 19 nt, Homo sapiens
  misc_RNA (1)...(19): siRNA sense strand
ggagacaacuuaaagaauc

SEQ ID NO: 1933348 - RNA, 19 nt, Homo sapiens
  misc_RNA (1)...(19): siRNA sense strand
gaagauagauucgaagaag

SEQ ID NO: 1933349 - RNA, 19 nt, Homo sapiens
  misc_RNA (1)...(19): siRNA sense strand
gaaagaagaugagaagaag

SEQ ID NO: 1933350 - RNA, 19 nt, Homo sapiens
  misc_RNA (1)...(19): siRNA sense strand
gaaaggaaaggaaaugaaa

SEQ ID NO: 1933351 - RNA, 19 nt, Homo sapiens
  misc_RNA (1)...(19): siRNA sense strand
guacagaccuucccacagu

SEQ ID NO: 1933352 - RNA, 19 nt, Homo sapiens
  misc_RNA (1)...(19): siRNA sense strand
ggacuuaucaacaaagaaa

SEQ ID NO: 1933353 - RNA, 19 nt, Homo sapiens
  misc_RNA (1)...(19): siRNA sense strand
gaauggaugucugaugaaa

SEQ ID NO: 1933354 - RNA, 19 nt, Homo sapiens
  misc_RNA (1)...(19): siRNA sense strand
cgucagaaauccaguacua

SEQ ID NO: 1933355 - RNA, 19 nt, Homo sapiens
  misc_RNA (1)...(19): siRNA sense strand
gcaauaaagcccaguguug

SEQ ID NO: 1933356 - RNA, 19 nt, Homo sapiens
  misc_RNA (1)...(19): siRNA sense strand
gaacagugacucugaugaa

SEQ ID NO: 1933357 - RNA, 19 nt, Homo sapiens
  misc_RNA (1)...(19): siRNA sense strand
ccaaagaccagauugcuaa

SEQ ID NO: 1933358 - RNA, 19 nt, Homo sapiens
  misc_RNA (1)...(19): siRNA sense strand
gaaauccaguacuaaacuu

SEQ ID NO: 1933359 - RNA, 19 nt, Homo sapiens
  misc_RNA (1)...(19): siRNA sense strand
ccagauugcuaaugagaaa

SEQ ID NO: 1933360 - RNA, 19 nt, Homo sapiens
  misc_RNA (1)...(19): siRNA sense strand
agcaagagcugguggauaa

SEQ ID NO: 1933361 - RNA, 19 nt, Homo sapiens
  misc_RNA (1)...(19): siRNA sense strand
ggaccugacugcauugugu

SEQ ID NO: 1933362 - RNA, 19 nt, Homo sapiens
  misc_RNA (1)...(19): siRNA sense strand
gagaagaaguacagaccuu

SEQ ID NO: 1933363 - RNA, 19 nt, Homo sapiens
  misc_RNA (1)...(19): siRNA sense strand
ucaaggagauaaaggaaga

SEQ ID NO: 1933364 - RNA, 19 nt, Homo sapiens
  misc_RNA (1)...(19): siRNA sense strand
guucugaaauggacaaaug

SEQ ID NO: 1933365 - RNA, 19 nt, Homo sapiens
  misc_RNA (1)...(19): siRNA sense strand
gaaaaggauucgaaagaaa

SEQ ID NO: 1933366 - RNA, 19 nt, Homo sapiens
  misc_RNA (1)...(19): siRNA sense strand
uuaaggauaugaccaaaga

SEQ ID NO: 1933367 - RNA, 19 nt, Homo sapiens
  misc_RNA (1)...(19): siRNA sense strand
gcugguggauaaagcaaua

SEQ ID NO: 1933368 - RNA, 19 nt, Homo sapiens
  misc_RNA (1)...(19): siRNA sense strand
gaaaucaugccucugcaaa

SEQ ID NO: 1933369 - RNA, 19 nt, Homo sapiens
  misc_RNA (1)...(19): siRNA sense strand
cgaaacugcuuccuucuuc

SEQ ID NO: 1933370 - RNA, 19 nt, Homo sapiens
  misc_RNA (1)...(19): siRNA sense strand
agaugacgcugauggauuu

SEQ ID NO: 1933371 - RNA, 19 nt, Homo sapiens
  misc_RNA (1)...(19): siRNA sense strand
acaagggacuuaucaacaa

SEQ ID NO: 1933372 - RNA, 19 nt, Homo sapiens
  misc_RNA (1)...(19): siRNA sense strand
gaaaggagcaagccuaaac

SEQ ID NO: 1933373 - RNA, 19 nt, Homo sapiens
  misc_RNA (1)...(19): siRNA sense strand
caagggacuuaucaacaaa

SEQ ID NO: 1933374 - RNA, 19 nt, Homo sapiens
  misc_RNA (1)...(19): siRNA sense strand
gagaaaggagcaagccuaa

SEQ ID NO: 1933375 - RNA, 19 nt, Homo sapiens
  misc_RNA (1)...(19): siRNA sense strand
gcacuccuauggcugaaga

SEQ ID NO: 1933376 - RNA, 19 nt, Homo sapiens
  misc_RNA (1)...(19): siRNA sense strand
gaacaccuccaggaaauga

SEQ ID NO: 1933377 - RNA, 19 nt, Homo sapiens
  misc_RNA (1)...(19): siRNA sense strand
ccaccaaacucccauucuu

SEQ ID NO: 1933378 - RNA, 19 nt, Homo sapiens
  misc_RNA (1)...(19): siRNA sense strand
ccgaucagcuguagaacaa

SEQ ID NO: 1933379 - RNA, 19 nt, Homo sapiens
  misc_RNA (1)...(19): siRNA sense strand
cagccuaucugacaccaaa

SEQ ID NO: 1933380 - RNA, 19 nt, Homo sapiens
  misc_RNA (1)...(19): siRNA sense strand
ggacacagggcuuucaaau

SEQ ID NO: 1933381 - RNA, 19 nt, Homo sapiens
  misc_RNA (1)...(19): siRNA sense strand
gagacaacuuaaagaauca

SEQ ID NO: 1933382 - RNA, 19 nt, Homo sapiens
  misc_RNA (1)...(19): siRNA sense strand
caauaaagcccaguguuga

SEQ ID NO: 1933383 - RNA, 19 nt, Homo sapiens
  misc_RNA (1)...(19): siRNA sense strand
gaaacugcuuccuucuuca

SEQ ID NO: 1933384 - RNA, 19 nt, Homo sapiens
  misc_RNA (1)...(19): siRNA sense strand
gaucagcuguagaacaaca

SEQ ID NO: 1933385 - RNA, 19 nt, Homo sapiens
  misc_RNA (1)...(19): siRNA sense strand
gaaauguccagaaggaaga

SEQ ID NO: 1933386 - RNA, 19 nt, Homo sapiens
  misc_RNA (1)...(19): siRNA sense strand
ggagaacagugacucugau

SEQ ID NO: 1933387 - RNA, 19 nt, Homo sapiens
  misc_RNA (1)...(19): siRNA sense strand
ugagagaacuggaccugau

SEQ ID NO: 1933388 - RNA, 19 nt, Homo sapiens
  misc_RNA (1)...(19): siRNA sense strand
gaagccacauuggaaucua

SEQ ID NO: 1933389 - RNA, 19 nt, Homo sapiens
  misc_RNA (1)...(19): siRNA sense strand
guucccaacuugagaaaga

SEQ ID NO: 1933390 - RNA, 19 nt, Homo sapiens
  misc_RNA (1)...(19): siRNA sense strand
aagaccagauugcuaauga

SEQ ID NO: 1933391 - RNA, 19 nt, Homo sapiens
  misc_RNA (1)...(19): siRNA sense strand
gaagaccgcacuccuaugg

SEQ ID NO: 1933392 - RNA, 19 nt, Homo sapiens
  misc_RNA (1)...(19): siRNA sense strand
uaauaacucuggaggucaa

SEQ ID NO: 1933393 - RNA, 19 nt, Homo sapiens
  misc_RNA (1)...(19): siRNA sense strand
gaugcuuucuggaccaauu

SEQ ID NO: 1933394 - RNA, 19 nt, Homo sapiens
  misc_RNA (1)...(19): siRNA sense strand
gaaauggacaaaugaccuu

SEQ ID NO: 1933395 - RNA, 19 nt, Homo sapiens
  misc_RNA (1)...(19): siRNA sense strand
gaagaugaaagaccucugu

SEQ ID NO: 1933396 - RNA, 19 nt, Homo sapiens
  misc_RNA (1)...(19): siRNA sense strand
uugaauggaugucugauga

SEQ ID NO: 1933397 - RNA, 19 nt, Homo sapiens
  misc_RNA (1)...(19): siRNA sense strand
ucagaaauccaguacuaaa

SEQ ID NO: 1933398 - RNA, 19 nt, Homo sapiens
  misc_RNA (1)...(19): siRNA sense strand
ccaaacagcagagaaauca

SEQ ID NO: 1933399 - RNA, 19 nt, Homo sapiens
  misc_RNA (1)...(19): siRNA sense strand
uuucugagcuucaugacaa

SEQ ID NO: 1933400 - RNA, 19 nt, Homo sapiens
  misc_RNA (1)...(19): siRNA sense strand
gaaguuugaagauagauuc

SEQ ID NO: 1933401 - RNA, 19 nt, Homo sapiens
  misc_RNA (1)...(19): siRNA sense strand
gaauauaagcacauaaagg

SEQ ID NO: 1933402 - RNA, 19 nt, Homo sapiens
  misc_RNA (1)...(19): siRNA sense strand
gaaaagaaaaggauucgaa

SEQ ID NO: 1933403 - RNA, 19 nt, Homo sapiens
  misc_RNA (1)...(19): siRNA sense strand
ccggagaacucuuagaaag

SEQ ID NO: 1933404 - RNA, 19 nt, Homo sapiens
  misc_RNA (1)...(19): siRNA sense strand
agaaagaagaugagaagaa

SEQ ID NO: 1933405 - RNA, 19 nt, Homo sapiens
  misc_RNA (1)...(19): siRNA sense strand
ccaccuugaugauuguauu

SEQ ID NO: 1933406 - RNA, 19 nt, Homo sapiens
  misc_RNA (1)...(19): siRNA sense strand
gaaagaaccauccgaucag

SEQ ID NO: 1933407 - RNA, 19 nt, Homo sapiens
  misc_RNA (1)...(19): siRNA sense strand
gaugucugaugaaaggaaa

SEQ ID NO: 1933408 - RNA, 19 nt, Homo sapiens
  misc_RNA (1)...(19): siRNA sense strand
cccaauggaugauaaaaua

SEQ ID NO: 1933409 - RNA, 19 nt, Homo sapiens
  misc_RNA (1)...(19): siRNA sense strand
ugacgcugauggauuuauu

SEQ ID NO: 1933410 - RNA, 19 nt, Homo sapiens
  misc_RNA (1)...(19): siRNA sense strand
ggagauaaaggaagaagag

SEQ ID NO: 1933411 - RNA, 19 nt, Homo sapiens
  misc_RNA (1)...(19): siRNA sense strand
aaacucccauucuuucaug

SEQ ID NO: 1933412 - RNA, 19 nt, Homo sapiens
  misc_RNA (1)...(19): siRNA sense strand
ggagcaggaugaaguucga

SEQ ID NO: 1933413 - RNA, 19 nt, Homo sapiens
  misc_RNA (1)...(19): siRNA sense strand
cugaggacauuaaggauau

SEQ ID NO: 1933414 - RNA, 19 nt, Homo sapiens
  misc_RNA (1)...(19): siRNA sense strand
ucugucaccuuucuauuug

SEQ ID NO: 1933415 - RNA, 19 nt, Homo sapiens
  misc_RNA (1)...(19): siRNA sense strand
aagaagauccggaaguuug

SEQ ID NO: 1933416 - RNA, 19 nt, Homo sapiens
  misc_RNA (1)...(19): siRNA sense strand
ucaggacggucuugugaau

SEQ ID NO: 1933417 - RNA, 19 nt, Homo sapiens
  misc_RNA (1)...(19): siRNA sense strand
ccaaggagcaggaugaagu

SEQ ID NO: 1933418 - RNA, 19 nt, Homo sapiens
  misc_RNA (1)...(19): siRNA sense strand
gcugaagaauacagugaau

SEQ ID NO: 1933419 - RNA, 19 nt, Homo sapiens
  misc_RNA (1)...(19): siRNA sense strand
cagauccucucccgagcua

SEQ ID NO: 1933420 - RNA, 19 nt, Homo sapiens
  misc_RNA (1)...(19): siRNA sense strand
gguaccggcuggucaaaca

SEQ ID NO: 1933421 - RNA, 19 nt, Homo sapiens
  misc_RNA (1)...(19): siRNA sense strand
agaaagaaccauccgauca

SEQ ID NO: 1933422 - RNA, 19 nt, Homo sapiens
  misc_RNA (1)...(19): siRNA sense strand
gaauauggaaagucucaau

SEQ ID NO: 1933423 - RNA, 19 nt, Homo sapiens
  misc_RNA (1)...(19): siRNA sense strand
gacaagggacuuaucaaca

SEQ ID NO: 1933424 - RNA, 19 nt, Homo sapiens
  misc_RNA (1)...(19): siRNA sense strand
gaaagaccucugucaccuu

SEQ ID NO: 1933425 - RNA, 19 nt, Homo sapiens
  misc_RNA (1)...(19): siRNA sense strand
ucgaagaagagaagaagua

SEQ ID NO: 1933426 - RNA, 19 nt, Homo sapiens
  misc_RNA (1)...(19): siRNA sense strand
caaccaccuugaugauugu

SEQ ID NO: 1933427 - RNA, 19 nt, Homo sapiens
  misc_RNA (1)...(19): siRNA sense strand
guuugaagauagauucgaa

SEQ ID NO: 1933428 - RNA, 19 nt, Homo sapiens
  misc_RNA (1)...(19): siRNA sense strand
gcaagagagacacugauuc

SEQ ID NO: 1933429 - RNA, 19 nt, Homo sapiens
  misc_RNA (1)...(19): siRNA sense strand
gaagacgauagcaauguga

SEQ ID NO: 1933430 - RNA, 19 nt, Homo sapiens
  misc_RNA (1)...(19): siRNA sense strand
gcuaacaccauacccauca

SEQ ID NO: 1933431 - RNA, 19 nt, Homo sapiens
  misc_RNA (1)...(19): siRNA sense strand
caccaaacucccauucuuu

SEQ ID NO: 1933432 - RNA, 19 nt, Homo sapiens
  misc_RNA (1)...(19): siRNA sense strand
uaccugaacuccuggaaca

SEQ ID NO: 1933433 - RNA, 19 nt, Homo sapiens
  misc_RNA (1)...(19): siRNA sense strand
ggaacacuaucagcaucuu

SEQ ID NO: 1933434 - RNA, 19 nt, Homo sapiens
  misc_RNA (1)...(19): siRNA sense strand
gaacgaacggcaggugaug

SEQ ID NO: 1933435 - RNA, 19 nt, Homo sapiens
  misc_RNA (1)...(19): siRNA sense strand
gggagaacagugacucuga

SEQ ID NO: 1933436 - RNA, 19 nt, Homo sapiens
  misc_RNA (1)...(19): siRNA sense strand
gcacauaaaggcgaaacug

SEQ ID NO: 1933437 - RNA, 19 nt, Homo sapiens
  misc_RNA (1)...(19): siRNA sense strand
gacaaaugaccuugccaaa

SEQ ID NO: 1933438 - RNA, 19 nt, Homo sapiens
  misc_RNA (1)...(19): siRNA sense strand
aaaguucacaggaagauga

SEQ ID NO: 1933439 - RNA, 19 nt, Homo sapiens
  misc_RNA (1)...(19): siRNA sense strand
cagugaauauaagcacaua

SEQ ID NO: 1933440 - RNA, 19 nt, Homo sapiens
  misc_RNA (1)...(19): siRNA sense strand
gaugaaaggaaaggaaaug

SEQ ID NO: 1933441 - RNA, 19 nt, Homo sapiens
  misc_RNA (1)...(19): siRNA sense strand
gaagaugacgcugauggau

SEQ ID NO: 1933442 - RNA, 19 nt, Homo sapiens
  misc_RNA (1)...(19): siRNA sense strand
ggagacggcuuccucguuu

SEQ ID NO: 1933443 - RNA, 19 nt, Homo sapiens
  misc_RNA (1)...(19): siRNA sense strand
uaucgcagcucgaauuuca

SEQ ID NO: 1933444 - RNA, 19 nt, Homo sapiens
  misc_RNA (1)...(19): siRNA sense strand
cagcucgaauuucaguuua

SEQ ID NO: 1933445 - RNA, 19 nt, Homo sapiens
  misc_RNA (1)...(19): siRNA sense strand
caacagcguuugauugcau

SEQ ID NO: 1933446 - RNA, 19 nt, Homo sapiens
  misc_RNA (1)...(19): siRNA sense strand
uaagaagugugcugcaaca

SEQ ID NO: 1933447 - RNA, 19 nt, Homo sapiens
  misc_RNA (1)...(19): siRNA sense strand
gcagcucgaauuucaguuu

SEQ ID NO: 1933448 - RNA, 19 nt, Homo sapiens
  misc_RNA (1)...(19): siRNA sense strand
caagccagauucucaccuu

SEQ ID NO: 1933449 - RNA, 19 nt, Homo sapiens
  misc_RNA (1)...(19): siRNA sense strand
ugaacccgaucuccuaaga

SEQ ID NO: 1933450 - RNA, 19 nt, Homo sapiens
  misc_RNA (1)...(19): siRNA sense strand
cccaaucccugccguugaa

SEQ ID NO: 1933451 - RNA, 19 nt, Homo sapiens
  misc_RNA (1)...(19): siRNA sense strand
gaacccgaucuccuaagaa

SEQ ID NO: 1933452 - RNA, 19 nt, Homo sapiens
  misc_RNA (1)...(19): siRNA sense strand
ccuaagaagugugcugcaa

SEQ ID NO: 1933453 - RNA, 19 nt, Homo sapiens
  misc_RNA (1)...(19): siRNA sense strand
aagccagauucucaccuua

SEQ ID NO: 1933454 - RNA, 19 nt, Homo sapiens
  misc_RNA (1)...(19): siRNA sense strand
gcguuugauugcauuagga

SEQ ID NO: 1933455 - RNA, 19 nt, Homo sapiens
  misc_RNA (1)...(19): siRNA sense strand
gagacggcuuccucguuuc

SEQ ID NO: 1933456 - RNA, 19 nt, Homo sapiens
  misc_RNA (1)...(19): siRNA sense strand
guuaucgcagcucgaauuu

SEQ ID NO: 1933457 - RNA, 19 nt, Homo sapiens
  misc_RNA (1)...(19): siRNA sense strand
uuccaggccugaagcgauu

SEQ ID NO: 1933458 - RNA, 19 nt, Homo sapiens
  misc_RNA (1)...(19): siRNA sense strand
guugaacccgaucuccuaa

SEQ ID NO: 1933459 - RNA, 19 nt, Homo sapiens
  misc_RNA (1)...(19): siRNA sense strand
aacccgaucuccuaagaag

SEQ ID NO: 1933460 - RNA, 19 nt, Homo sapiens
  misc_RNA (1)...(19): siRNA sense strand
cguugaacccgaucuccua

SEQ ID NO: 1933461 - RNA, 19 nt, Homo sapiens
  misc_RNA (1)...(19): siRNA sense strand
gguguuaucgcagcucgaa

SEQ ID NO: 1933462 - RNA, 19 nt, Homo sapiens
  misc_RNA (1)...(19): siRNA sense strand
cugcaacagcguuugauug

SEQ ID NO: 1933463 - RNA, 19 nt, Homo sapiens
  misc_RNA (1)...(19): siRNA sense strand
ccgccaagccagauucuca

SEQ ID NO: 1933464 - RNA, 19 nt, Homo sapiens
  misc_RNA (1)...(19): siRNA sense strand
uguuaucgcagcucgaauu

SEQ ID NO: 1933465 - RNA, 19 nt, Homo sapiens
  misc_RNA (1)...(19): siRNA sense strand
auucucaccuuacccaauc

SEQ ID NO: 1933466 - RNA, 19 nt, Homo sapiens
  misc_RNA (1)...(19): siRNA sense strand
cgucagcguuggcgauggu

SEQ ID NO: 1933467 - RNA, 19 nt, Homo sapiens
  misc_RNA (1)...(19): siRNA sense strand
gcaaaucgauggaguccuu

SEQ ID NO: 1933468 - RNA, 19 nt, Homo sapiens
  misc_RNA (1)...(19): siRNA sense strand
guuaugagaucaaggauau

SEQ ID NO: 1933469 - RNA, 19 nt, Homo sapiens
  misc_RNA (1)...(19): siRNA sense strand
gaucagagcucggcaaacu

SEQ ID NO: 1933470 - RNA, 19 nt, Homo sapiens
  misc_RNA (1)...(19): siRNA sense strand
gaaagagucuaugcagaug

SEQ ID NO: 1933471 - RNA, 19 nt, Homo sapiens
  misc_RNA (1)...(19): siRNA sense strand
gaucaaggauauccaugug

SEQ ID NO: 1933472 - RNA, 19 nt, Homo sapiens
  misc_RNA (1)...(19): siRNA sense strand
agaaaaggcugaacagaua

SEQ ID NO: 1933473 - RNA, 19 nt, Homo sapiens
  misc_RNA (1)...(19): siRNA sense strand
gccaaggacuccaacacua

SEQ ID NO: 1933474 - RNA, 19 nt, Homo sapiens
  misc_RNA (1)...(19): siRNA sense strand
ucaaggaaauugucaucaa

SEQ ID NO: 1933475 - RNA, 19 nt, Homo sapiens
  misc_RNA (1)...(19): siRNA sense strand
ccacaguucuagagucuga

SEQ ID NO: 1933476 - RNA, 19 nt, Homo sapiens
  misc_RNA (1)...(19): siRNA sense strand
caaacucucucuggacaaa

SEQ ID NO: 1933477 - RNA, 19 nt, Homo sapiens
  misc_RNA (1)...(19): siRNA sense strand
gaaacgggccacaguucua

SEQ ID NO: 1933478 - RNA, 19 nt, Homo sapiens
  misc_RNA (1)...(19): siRNA sense strand
caauguaacucugcaaauc

SEQ ID NO: 1933479 - RNA, 19 nt, Homo sapiens
  misc_RNA (1)...(19): siRNA sense strand
aaacaaccaugagaucaga

SEQ ID NO: 1933480 - RNA, 19 nt, Homo sapiens
  misc_RNA (1)...(19): siRNA sense strand
ggccaaggcuaaagcugaa

SEQ ID NO: 1933481 - RNA, 19 nt, Homo sapiens
  misc_RNA (1)...(19): siRNA sense strand
gaagaaacaggcccagauc

SEQ ID NO: 1933482 - RNA, 19 nt, Homo sapiens
  misc_RNA (1)...(19): siRNA sense strand
gagagucggccaucaaugu

SEQ ID NO: 1933483 - RNA, 19 nt, Homo sapiens
  misc_RNA (1)...(19): siRNA sense strand
ggaagaaacaggcccagau

SEQ ID NO: 1933484 - RNA, 19 nt, Homo sapiens
  misc_RNA (1)...(19): siRNA sense strand
caaggaaauugucaucaac

SEQ ID NO: 1933485 - RNA, 19 nt, Homo sapiens
  misc_RNA (1)...(19): siRNA sense strand
ugaaagagucuaugcagau

SEQ ID NO: 1933486 - RNA, 19 nt, Homo sapiens
  misc_RNA (1)...(19): siRNA sense strand
gccagggacuccagacuca

SEQ ID NO: 1933487 - RNA, 19 nt, Homo sapiens
  misc_RNA (1)...(19): siRNA sense strand
gcucugacacaacauaaug

SEQ ID NO: 1933488 - RNA, 19 nt, Homo sapiens
  misc_RNA (1)...(19): siRNA sense strand
gugcagagucucaaggaaa

SEQ ID NO: 1933489 - RNA, 19 nt, Homo sapiens
  misc_RNA (1)...(19): siRNA sense strand
gcagcucugacacaacaua

SEQ ID NO: 1933490 - RNA, 19 nt, Homo sapiens
  misc_RNA (1)...(19): siRNA sense strand
gagaucagagcucggcaaa

SEQ ID NO: 1933491 - RNA, 19 nt, Homo sapiens
  misc_RNA (1)...(19): siRNA sense strand
ccaaggacuccaacacuau

SEQ ID NO: 1933492 - RNA, 19 nt, Homo sapiens
  misc_RNA (1)...(19): siRNA sense strand
ucuccaaacuggccaagga

SEQ ID NO: 1933493 - RNA, 19 nt, Homo sapiens
  misc_RNA (1)...(19): siRNA sense strand
gacaauguaacucugcaaa

SEQ ID NO: 1933494 - RNA, 19 nt, Homo sapiens
  misc_RNA (1)...(19): siRNA sense strand
ggguacagaugcaagucuu

SEQ ID NO: 1933495 - RNA, 19 nt, Homo sapiens
  misc_RNA (1)...(19): siRNA sense strand
gauccgauaugugcagagu

SEQ ID NO: 1933496 - RNA, 19 nt, Homo sapiens
  misc_RNA (1)...(19): siRNA sense strand
gaucgagucaagaugaguu

SEQ ID NO: 1933497 - RNA, 19 nt, Homo sapiens
  misc_RNA (1)...(19): siRNA sense strand
gacacaacauaauggagau

SEQ ID NO: 1933498 - RNA, 19 nt, Homo sapiens
  misc_RNA (1)...(19): siRNA sense strand
ggccacaguucuagagucu

SEQ ID NO: 1933499 - RNA, 19 nt, Homo sapiens
  misc_RNA (1)...(19): siRNA sense strand
ggacuccaacacuauccua

SEQ ID NO: 1933500 - RNA, 19 nt, Homo sapiens
  misc_RNA (1)...(19): siRNA sense strand
gauccuggccuccgaagca

SEQ ID NO: 1933501 - RNA, 19 nt, Homo sapiens
  misc_RNA (1)...(19): siRNA sense strand
cugcagcucugacacaaca

SEQ ID NO: 1933502 - RNA, 19 nt, Homo sapiens
  misc_RNA (1)...(19): siRNA sense strand
caucauggacccuuacaag

SEQ ID NO: 1933503 - RNA, 19 nt, Homo sapiens
  misc_RNA (1)...(19): siRNA sense strand
ggaaacgggccacaguucu

SEQ ID NO: 1933504 - RNA, 19 nt, Homo sapiens
  misc_RNA (1)...(19): siRNA sense strand
cauccucaucccuguguua

SEQ ID NO: 1933505 - RNA, 19 nt, Homo sapiens
  misc_RNA (1)...(19): siRNA sense strand
ugcagagucucaaggaaau

SEQ ID NO: 1933506 - RNA, 19 nt, Homo sapiens
  misc_RNA (1)...(19): siRNA sense strand
ggagaggccagugcaguuc

SEQ ID NO: 1933507 - RNA, 19 nt, Homo sapiens
  misc_RNA (1)...(19): siRNA sense strand
gaaaaggcugaacagauaa

SEQ ID NO: 1933508 - RNA, 19 nt, Homo sapiens
  misc_RNA (1)...(19): siRNA sense strand
ucaaacaaccaugagauca

SEQ ID NO: 1933509 - RNA, 19 nt, Homo sapiens
  misc_RNA (1)...(19): siRNA sense strand
ugucagcgcguucuccaaa

SEQ ID NO: 1933510 - RNA, 19 nt, Homo sapiens
  misc_RNA (1)...(19): siRNA sense strand
ggcugugacucucgacaau

SEQ ID NO: 1933511 - RNA, 19 nt, Homo sapiens
  misc_RNA (1)...(19): siRNA sense strand
aggcugaacagauaaauca

SEQ ID NO: 1933512 - RNA, 19 nt, Homo sapiens
  misc_RNA (1)...(19): siRNA sense strand
ucacccagcuagcucaaac

SEQ ID NO: 1933513 - RNA, 19 nt, Homo sapiens
  misc_RNA (1)...(19): siRNA sense strand
cgaaacaccgugguacugu

SEQ ID NO: 1933514 - RNA, 19 nt, Homo sapiens
  misc_RNA (1)...(19): siRNA sense strand
gcggaaacgggccacaguu

SEQ ID NO: 1933515 - RNA, 19 nt, Homo sapiens
  misc_RNA (1)...(19): siRNA sense strand
gcucaggccauggguguau

SEQ ID NO: 1933516 - RNA, 19 nt, Homo sapiens
  misc_RNA (1)...(19): siRNA sense strand
gauccuggagccugguuug

SEQ ID NO: 1933517 - RNA, 19 nt, Homo sapiens
  misc_RNA (1)...(19): siRNA sense strand
caaacaaccaugagaucag

SEQ ID NO: 1933518 - RNA, 19 nt, Homo sapiens
  misc_RNA (1)...(19): siRNA sense strand
auauggagcccucaccaaa

SEQ ID NO: 1933519 - RNA, 19 nt, Homo sapiens
  misc_RNA (1)...(19): siRNA sense strand
uguuagaccggauccgaua

SEQ ID NO: 1933520 - RNA, 19 nt, Homo sapiens
  misc_RNA (1)...(19): siRNA sense strand
caaggacuccaacacuauc

SEQ ID NO: 1933521 - RNA, 19 nt, Homo sapiens
  misc_RNA (1)...(19): siRNA sense strand
ccugagcagucggcuguga

SEQ ID NO: 1933522 - RNA, 19 nt, Homo sapiens
  misc_RNA (1)...(19): siRNA sense strand
ccucaucccuguguuagac

SEQ ID NO: 1933523 - RNA, 19 nt, Homo sapiens
  misc_RNA (1)...(19): siRNA sense strand
gcaaacucucucuggacaa

SEQ ID NO: 1933524 - RNA, 19 nt, Homo sapiens
  misc_RNA (1)...(19): siRNA sense strand
gugacucucgacaauguaa

SEQ ID NO: 1933525 - RNA, 19 nt, Homo sapiens
  misc_RNA (1)...(19): siRNA sense strand
cugugacucucgacaaugu

SEQ ID NO: 1933526 - RNA, 19 nt, Homo sapiens
  misc_RNA (1)...(19): siRNA sense strand
gcagagucucaaggaaauu

SEQ ID NO: 1933527 - RNA, 19 nt, Homo sapiens
  misc_RNA (1)...(19): siRNA sense strand
cagagucucaaggaaauug

SEQ ID NO: 1933528 - RNA, 19 nt, Homo sapiens
  misc_RNA (1)...(19): siRNA sense strand
gaugcagcagcuucacuga

SEQ ID NO: 1933529 - RNA, 19 nt, Homo sapiens
  misc_RNA (1)...(19): siRNA sense strand
cagcucugacacaacauaa

SEQ ID NO: 1933530 - RNA, 19 nt, Homo sapiens
  misc_RNA (1)...(19): siRNA sense strand
guguggaggacccugagua

SEQ ID NO: 1933531 - RNA, 19 nt, Homo sapiens
  misc_RNA (1)...(19): siRNA sense strand
uggcagaagggaagaaaca

SEQ ID NO: 1933532 - RNA, 19 nt, Homo sapiens
  misc_RNA (1)...(19): siRNA sense strand
ggaaagaaauggaaacuua

SEQ ID NO: 1933533 - RNA, 19 nt, Homo sapiens
  misc_RNA (1)...(19): siRNA sense strand
gaauguagcugcagagaua

SEQ ID NO: 1933534 - RNA, 19 nt, Homo sapiens
  misc_RNA (1)...(19): siRNA sense strand
gaauagcgauugugucaua

SEQ ID NO: 1933535 - RNA, 19 nt, Homo sapiens
  misc_RNA (1)...(19): siRNA sense strand
ggaaagaggugcugcuauu

SEQ ID NO: 1933536 - RNA, 19 nt, Homo sapiens
  misc_RNA (1)...(19): siRNA sense strand
gagaagauguugaauauag

SEQ ID NO: 1933537 - RNA, 19 nt, Homo sapiens
  misc_RNA (1)...(19): siRNA sense strand
cgaaagaagucugauguua

SEQ ID NO: 1933538 - RNA, 19 nt, Homo sapiens
  misc_RNA (1)...(19): siRNA sense strand
gaagaugacuuugacauau

SEQ ID NO: 1933539 - RNA, 19 nt, Homo sapiens
  misc_RNA (1)...(19): siRNA sense strand
gaaaguacaugaugaaggu

SEQ ID NO: 1933540 - RNA, 19 nt, Homo sapiens
  misc_RNA (1)...(19): siRNA sense strand
ggaacagacucaguuauaa

SEQ ID NO: 1933541 - RNA, 19 nt, Homo sapiens
  misc_RNA (1)...(19): siRNA sense strand
ggaggaagaugacguugaa

SEQ ID NO: 1933542 - RNA, 19 nt, Homo sapiens
  misc_RNA (1)...(19): siRNA sense strand
caacagacccugcguacua

SEQ ID NO: 1933543 - RNA, 19 nt, Homo sapiens
  misc_RNA (1)...(19): siRNA sense strand
cagaagaacagaagaaaua

SEQ ID NO: 1933544 - RNA, 19 nt, Homo sapiens
  misc_RNA (1)...(19): siRNA sense strand
gggagaagcuuuaucaaca

SEQ ID NO: 1933545 - RNA, 19 nt, Homo sapiens
  misc_RNA (1)...(19): siRNA sense strand
ccaaguaccucguguggaa

SEQ ID NO: 1933546 - RNA, 19 nt, Homo sapiens
  misc_RNA (1)...(19): siRNA sense strand
caucaacacugucuucuug

SEQ ID NO: 1933547 - RNA, 19 nt, Homo sapiens
  misc_RNA (1)...(19): siRNA sense strand
ggaagaugacguugaauuu

SEQ ID NO: 1933548 - RNA, 19 nt, Homo sapiens
  misc_RNA (1)...(19): siRNA sense strand
gaacagacucaguuauaaa

SEQ ID NO: 1933549 - RNA, 19 nt, Homo sapiens
  misc_RNA (1)...(19): siRNA sense strand
gaaagccucuggaagacuu

SEQ ID NO: 1933550 - RNA, 19 nt, Homo sapiens
  misc_RNA (1)...(19): siRNA sense strand
gcacugauauuugaagaug

SEQ ID NO: 1933551 - RNA, 19 nt, Homo sapiens
  misc_RNA (1)...(19): siRNA sense strand
guaaugaacuguguacuuc

SEQ ID NO: 1933552 - RNA, 19 nt, Homo sapiens
  misc_RNA (1)...(19): siRNA sense strand
gaaaauaugugggaaugua

SEQ ID NO: 1933553 - RNA, 19 nt, Homo sapiens
  misc_RNA (1)...(19): siRNA sense strand
ucgcaaagccaaauaaaua

SEQ ID NO: 1933554 - RNA, 19 nt, Homo sapiens
  misc_RNA (1)...(19): siRNA sense strand
aagcaugccuuguucauuu

SEQ ID NO: 1933555 - RNA, 19 nt, Homo sapiens
  misc_RNA (1)...(19): siRNA sense strand
gaaagaggugcugcuauua

SEQ ID NO: 1933556 - RNA, 19 nt, Homo sapiens
  misc_RNA (1)...(19): siRNA sense strand
cuucuacucuuucugauua

SEQ ID NO: 1933557 - RNA, 19 nt, Homo sapiens
  misc_RNA (1)...(19): siRNA sense strand
gacacacucuugagcauuu

SEQ ID NO: 1933558 - RNA, 19 nt, Homo sapiens
  misc_RNA (1)...(19): siRNA sense strand
guuagaaugucucaucaaa

SEQ ID NO: 1933559 - RNA, 19 nt, Homo sapiens
  misc_RNA (1)...(19): siRNA sense strand
gaaugaaggugguggucaa

SEQ ID NO: 1933560 - RNA, 19 nt, Homo sapiens
  misc_RNA (1)...(19): siRNA sense strand
cauccuacuuugucaguua

SEQ ID NO: 1933561 - RNA, 19 nt, Homo sapiens
  misc_RNA (1)...(19): siRNA sense strand
guacaaugauuucuaccuu

SEQ ID NO: 1933562 - RNA, 19 nt, Homo sapiens
  misc_RNA (1)...(19): siRNA sense strand
gcucagggucuucaaguua

SEQ ID NO: 1933563 - RNA, 19 nt, Homo sapiens
  misc_RNA (1)...(19): siRNA sense strand
ccaauccucucaagaaguu

SEQ ID NO: 1933564 - RNA, 19 nt, Homo sapiens
  misc_RNA (1)...(19): siRNA sense strand
gcgauugugucauauauuc

SEQ ID NO: 1933565 - RNA, 19 nt, Homo sapiens
  misc_RNA (1)...(19): siRNA sense strand
ggaggagcuugguauacua

SEQ ID NO: 1933566 - RNA, 19 nt, Homo sapiens
  misc_RNA (1)...(19): siRNA sense strand
ugaaagcaaugauggaaga

SEQ ID NO: 1933567 - RNA, 19 nt, Homo sapiens
  misc_RNA (1)...(19): siRNA sense strand
guacauugcugugauuuua

SEQ ID NO: 1933568 - RNA, 19 nt, Homo sapiens
  misc_RNA (1)...(19): siRNA sense strand
ggaaucaccaucaaacuau

SEQ ID NO: 1933569 - RNA, 19 nt, Homo sapiens
  misc_RNA (1)...(19): siRNA sense strand
gugcuucuuuccauuguua

SEQ ID NO: 1933570 - RNA, 19 nt, Homo sapiens
  misc_RNA (1)...(19): siRNA sense strand
gcaagaagcgaaugcauca

SEQ ID NO: 1933571 - RNA, 19 nt, Homo sapiens
  misc_RNA (1)...(19): siRNA sense strand
ccaaacgacugucccagaa

SEQ ID NO: 1933572 - RNA, 19 nt, Homo sapiens
  misc_RNA (1)...(19): siRNA sense strand
ucacuuacuucccuugaaa

SEQ ID NO: 1933573 - RNA, 19 nt, Homo sapiens
  misc_RNA (1)...(19): siRNA sense strand
gacagaugcuacccaguaa

SEQ ID NO: 1933574 - RNA, 19 nt, Homo sapiens
  misc_RNA (1)...(19): siRNA sense strand
ugaagaagcuggucaacgu

SEQ ID NO: 1933575 - RNA, 19 nt, Homo sapiens
  misc_RNA (1)...(19): siRNA sense strand
gaugacauauucaacuuca

SEQ ID NO: 1933576 - RNA, 19 nt, Homo sapiens
  misc_RNA (1)...(19): siRNA sense strand
uuuaagggcuggauggaua

SEQ ID NO: 1933577 - RNA, 19 nt, Homo sapiens
  misc_RNA (1)...(19): siRNA sense strand
gguggucaaugcucucaua

SEQ ID NO: 1933578 - RNA, 19 nt, Homo sapiens
  misc_RNA (1)...(19): siRNA sense strand
ggauggcuuuggaugguua

SEQ ID NO: 1933579 - RNA, 19 nt, Homo sapiens
  misc_RNA (1)...(19): siRNA sense strand
ucaguaacccggaagcuua

SEQ ID NO: 1933580 - RNA, 19 nt, Homo sapiens
  misc_RNA (1)...(19): siRNA sense strand
gaaaugcauuaauggaaca

SEQ ID NO: 1933581 - RNA, 19 nt, Homo sapiens
  misc_RNA (1)...(19): siRNA sense strand
gagcauuucugucacaagu

SEQ ID NO: 1933582 - RNA, 19 nt, Homo sapiens
  misc_RNA (1)...(19): siRNA sense strand
aaucagaaguuuagccauu

SEQ ID NO: 1933583 - RNA, 19 nt, Homo sapiens
  misc_RNA (1)...(19): siRNA sense strand
gcaauucacucgguuacau

SEQ ID NO: 1933584 - RNA, 19 nt, Homo sapiens
  misc_RNA (1)...(19): siRNA sense strand
aaauugacauguucucuga

SEQ ID NO: 1933585 - RNA, 19 nt, Homo sapiens
  misc_RNA (1)...(19): siRNA sense strand
gaauauagggaauuugguu

SEQ ID NO: 1933586 - RNA, 19 nt, Homo sapiens
  misc_RNA (1)...(19): siRNA sense strand
ugagaacugugaugacuga

SEQ ID NO: 1933587 - RNA, 19 nt, Homo sapiens
  misc_RNA (1)...(19): siRNA sense strand
ggccucagcuugaccuaaa

SEQ ID NO: 1933588 - RNA, 19 nt, Homo sapiens
  misc_RNA (1)...(19): siRNA sense strand
gaaucaccaucaaacuauu

SEQ ID NO: 1933589 - RNA, 19 nt, Homo sapiens
  misc_RNA (1)...(19): siRNA sense strand
ggucaaugcucucauaggu

SEQ ID NO: 1933590 - RNA, 19 nt, Homo sapiens
  misc_RNA (1)...(19): siRNA sense strand
gaaagaagucugauguuac

SEQ ID NO: 1933591 - RNA, 19 nt, Homo sapiens
  misc_RNA (1)...(19): siRNA sense strand
gcacaaagcaaagacauca

SEQ ID NO: 1933592 - RNA, 19 nt, Homo sapiens
  misc_RNA (1)...(19): siRNA sense strand
ugacagaugcuacccagua

SEQ ID NO: 1933593 - RNA, 19 nt, Homo sapiens
  misc_RNA (1)...(19): siRNA sense strand
ugacugacccguuuacuga

SEQ ID NO: 1933594 - RNA, 19 nt, Homo sapiens
  misc_RNA (1)...(19): siRNA sense strand
gauguuaccaguauacuau

SEQ ID NO: 1933595 - RNA, 19 nt, Homo sapiens
  misc_RNA (1)...(19): siRNA sense strand
caacauuggucuucuacuc

SEQ ID NO: 1933596 - RNA, 19 nt, Homo sapiens
  misc_RNA (1)...(19): siRNA sense strand
gagaagcuuuaucaacaga

SEQ ID NO: 1933597 - RNA, 19 nt, Homo sapiens
  misc_RNA (1)...(19): siRNA sense strand
ccagaagcaacacaauuua

SEQ ID NO: 1933598 - RNA, 19 nt, Homo sapiens
  misc_RNA (1)...(19): siRNA sense strand
gaaaaccugcuaccaaaua

SEQ ID NO: 1933599 - RNA, 19 nt, Homo sapiens
  misc_RNA (1)...(19): siRNA sense strand
ggcaagagguuucauucug

SEQ ID NO: 1933600 - RNA, 19 nt, Homo sapiens
  misc_RNA (1)...(19): siRNA sense strand
caaauauucugcccuuucu

SEQ ID NO: 1933601 - RNA, 19 nt, Homo sapiens
  misc_RNA (1)...(19): siRNA sense strand
gaagcaacacaauuuauca

SEQ ID NO: 1933602 - RNA, 19 nt, Homo sapiens
  misc_RNA (1)...(19): siRNA sense strand
ggaauuuauuugacugugu

SEQ ID NO: 1933603 - RNA, 19 nt, Homo sapiens
  misc_RNA (1)...(19): siRNA sense strand
cgccgaggcuggaacauuu

SEQ ID NO: 1933604 - RNA, 19 nt, Homo sapiens
  misc_RNA (1)...(19): siRNA sense strand
caauacagccacugaagaa

SEQ ID NO: 1933605 - RNA, 19 nt, Homo sapiens
  misc_RNA (1)...(19): siRNA sense strand
caaagugaauccagagucu

SEQ ID NO: 1933606 - RNA, 19 nt, Homo sapiens
  misc_RNA (1)...(19): siRNA sense strand
gggaauggaucgaaaauau

SEQ ID NO: 1933607 - RNA, 19 nt, Homo sapiens
  misc_RNA (1)...(19): siRNA sense strand
ggaaguugcccaagcucua

SEQ ID NO: 1933608 - RNA, 19 nt, Homo sapiens
  misc_RNA (1)...(19): siRNA sense strand
uaucaucuccuuucucauu

SEQ ID NO: 1933609 - RNA, 19 nt, Homo sapiens
  misc_RNA (1)...(19): siRNA sense strand
gaacaacagccagaguuug

SEQ ID NO: 1933610 - RNA, 19 nt, Homo sapiens
  misc_RNA (1)...(19): siRNA sense strand
gagaaaaccuggcauccaa

SEQ ID NO: 1933611 - RNA, 19 nt, Homo sapiens
  misc_RNA (1)...(19): siRNA sense strand
cagcaucuuugcccuggua

SEQ ID NO: 1933612 - RNA, 19 nt, Homo sapiens
  misc_RNA (1)...(19): siRNA sense strand
ugaagaugacuuugacaua

SEQ ID NO: 1933613 - RNA, 19 nt, Homo sapiens
  misc_RNA (1)...(19): siRNA sense strand
gcccgacagucucauguuu

SEQ ID NO: 1933614 - RNA, 19 nt, Homo sapiens
  misc_RNA (1)...(19): siRNA sense strand
gagcagaacaagaauguag

SEQ ID NO: 1933615 - RNA, 19 nt, Homo sapiens
  misc_RNA (1)...(19): siRNA sense strand
gaccaagggugaccaaggu

SEQ ID NO: 1933616 - RNA, 19 nt, Homo sapiens
  misc_RNA (1)...(19): siRNA sense strand
aagaggugcugcuauuauu

SEQ ID NO: 1933617 - RNA, 19 nt, Homo sapiens
  misc_RNA (1)...(19): siRNA sense strand
ggcaauuucucuuggauca

SEQ ID NO: 1933618 - RNA, 19 nt, Homo sapiens
  misc_RNA (1)...(19): siRNA sense strand
ugaccacccucauuaacuu

SEQ ID NO: 1933619 - RNA, 19 nt, Homo sapiens
  misc_RNA (1)...(19): siRNA sense strand
caagcucuauggcgacauu

SEQ ID NO: 1933620 - RNA, 19 nt, Homo sapiens
  misc_RNA (1)...(19): siRNA sense strand
gaaagaaauggaaacuuag

SEQ ID NO: 1933621 - RNA, 19 nt, Homo sapiens
  misc_RNA (1)...(19): siRNA sense strand
guaguuggcaugcagcuuu

SEQ ID NO: 1933622 - RNA, 19 nt, Homo sapiens
  misc_RNA (1)...(19): siRNA sense strand
caagagaaaggaagaggaa

SEQ ID NO: 1933623 - RNA, 19 nt, Homo sapiens
  misc_RNA (1)...(19): siRNA sense strand
uuagagaacuucaauacag

SEQ ID NO: 1933624 - RNA, 19 nt, Homo sapiens
  misc_RNA (1)...(19): siRNA sense strand
cuaaaggccuccaggaagu

SEQ ID NO: 1933625 - RNA, 19 nt, Homo sapiens
  misc_RNA (1)...(19): siRNA sense strand
accaauggcuggaauuuau

SEQ ID NO: 1933626 - RNA, 19 nt, Homo sapiens
  misc_RNA (1)...(19): siRNA sense strand
uggaacagacucaguuaua

SEQ ID NO: 1933627 - RNA, 19 nt, Homo sapiens
  misc_RNA (1)...(19): siRNA sense strand
uaggaaagccucuggaaga

SEQ ID NO: 1933628 - RNA, 19 nt, Homo sapiens
  misc_RNA (1)...(19): siRNA sense strand
ucacaagccagaucuuuga

SEQ ID NO: 1933629 - RNA, 19 nt, Homo sapiens
  misc_RNA (1)...(19): siRNA sense strand
guucaacauuggucuucua

SEQ ID NO: 1933630 - RNA, 19 nt, Homo sapiens
  misc_RNA (1)...(19): siRNA sense strand
ccaaagccaugaaauccau

SEQ ID NO: 1933631 - RNA, 19 nt, Homo sapiens
  misc_RNA (1)...(19): siRNA sense strand
ccgacgcucuucagaauug

SEQ ID NO: 1933632 - RNA, 19 nt, Homo sapiens
  misc_RNA (1)...(19): siRNA sense strand
guaauuggauucagcagua

SEQ ID NO: 1933633 - RNA, 19 nt, Homo sapiens
  misc_RNA (1)...(19): siRNA sense strand
guaacaagcugaugaggaa

SEQ ID NO: 1933634 - RNA, 19 nt, Homo sapiens
  misc_RNA (1)...(19): siRNA sense strand
uaaauguguucgacaagua

SEQ ID NO: 1933635 - RNA, 19 nt, Homo sapiens
  misc_RNA (1)...(19): siRNA sense strand
ucaagucacugaaguuuau

SEQ ID NO: 1933636 - RNA, 19 nt, Homo sapiens
  misc_RNA (1)...(19): siRNA sense strand
ggaggcagagguugauuua

SEQ ID NO: 1933637 - RNA, 19 nt, Homo sapiens
  misc_RNA (1)...(19): siRNA sense strand
gcucgaauguguuuggaaa

SEQ ID NO: 1933638 - RNA, 19 nt, Homo sapiens
  misc_RNA (1)...(19): siRNA sense strand
gauguuggcaguuucauuu

SEQ ID NO: 1933639 - RNA, 19 nt, Homo sapiens
  misc_RNA (1)...(19): siRNA sense strand
ggacuagagcagauugaua

SEQ ID NO: 1933640 - RNA, 19 nt, Homo sapiens
  misc_RNA (1)...(19): siRNA sense strand
uaacuaugaugcucucaga

SEQ ID NO: 1933641 - RNA, 19 nt, Homo sapiens
  misc_RNA (1)...(19): siRNA sense strand
ggauucagcaguacaguuu

SEQ ID NO: 1933642 - RNA, 19 nt, Homo sapiens
  misc_RNA (1)...(19): siRNA sense strand
gaggcuacauuuauauuca

SEQ ID NO: 1933643 - RNA, 19 nt, Homo sapiens
  misc_RNA (1)...(19): siRNA sense strand
ucacugaaguuuaugaaca

SEQ ID NO: 1933644 - RNA, 19 nt, Homo sapiens
  misc_RNA (1)...(19): siRNA sense strand
acggaaauauguggaauua

SEQ ID NO: 1933645 - RNA, 19 nt, Homo sapiens
  misc_RNA (1)...(19): siRNA sense strand
gagcagauugauauguuua

SEQ ID NO: 1933646 - RNA, 19 nt, Homo sapiens
  misc_RNA (1)...(19): siRNA sense strand
uaaaguucaucaugcugua

SEQ ID NO: 1933647 - RNA, 19 nt, Homo sapiens
  misc_RNA (1)...(19): siRNA sense strand
cgacaaguaaggagagaua

SEQ ID NO: 1933648 - RNA, 19 nt, Homo sapiens
  misc_RNA (1)...(19): siRNA sense strand
uagagcagauugauauguu

SEQ ID NO: 1933649 - RNA, 19 nt, Homo sapiens
  misc_RNA (1)...(19): siRNA sense strand
ucagaucaguguuauuuca

SEQ ID NO: 1933650 - RNA, 19 nt, Homo sapiens
  misc_RNA (1)...(19): siRNA sense strand
uuggauaucugcagagaaa

SEQ ID NO: 1933651 - RNA, 19 nt, Homo sapiens
  misc_RNA (1)...(19): siRNA sense strand
cauuagagauuaucacaag

SEQ ID NO: 1933652 - RNA, 19 nt, Homo sapiens
  misc_RNA (1)...(19): siRNA sense strand
aagcugaaaugguggauug

SEQ ID NO: 1933653 - RNA, 19 nt, Homo sapiens
  misc_RNA (1)...(19): siRNA sense strand
gacauccucugauccuuug

SEQ ID NO: 1933654 - RNA, 19 nt, Homo sapiens
  misc_RNA (1)...(19): siRNA sense strand
gacuagagcagauugauau

SEQ ID NO: 1933655 - RNA, 19 nt, Homo sapiens
  misc_RNA (1)...(19): siRNA sense strand
gaaaugguggauuggauau

SEQ ID NO: 1933656 - RNA, 19 nt, Homo sapiens
  misc_RNA (1)...(19): siRNA sense strand
cgacacauguggacuagag

SEQ ID NO: 1933657 - RNA, 19 nt, Homo sapiens
  misc_RNA (1)...(19): siRNA sense strand
gagguugauuuacucaguu

SEQ ID NO: 1933658 - RNA, 19 nt, Homo sapiens
  misc_RNA (1)...(19): siRNA sense strand
uauacaggcucgaaugugu

SEQ ID NO: 1933659 - RNA, 19 nt, Homo sapiens
  misc_RNA (1)...(19): siRNA sense strand
ucagacuguucaaguuuaa

SEQ ID NO: 1933660 - RNA, 19 nt, Homo sapiens
  misc_RNA (1)...(19): siRNA sense strand
ugaaaugguggauuggaua

SEQ ID NO: 1933661 - RNA, 19 nt, Homo sapiens
  misc_RNA (1)...(19): siRNA sense strand
gcucucagaucaguguuau

SEQ ID NO: 1933662 - RNA, 19 nt, Homo sapiens
  misc_RNA (1)...(19): siRNA sense strand
ucucagaucaguguuauuu

SEQ ID NO: 1933663 - RNA, 19 nt, Homo sapiens
  misc_RNA (1)...(19): siRNA sense strand
gaucaguguuauuucagau

SEQ ID NO: 1933664 - RNA, 19 nt, Homo sapiens
  misc_RNA (1)...(19): siRNA sense strand
uaaggagagauaacuauga

SEQ ID NO: 1933665 - RNA, 19 nt, Homo sapiens
  misc_RNA (1)...(19): siRNA sense strand
gauuggauaucugcagaga

SEQ ID NO: 1933666 - RNA, 19 nt, Homo sapiens
  misc_RNA (1)...(19): siRNA sense strand
guucagacuguucaaguuu

SEQ ID NO: 1933667 - RNA, 19 nt, Homo sapiens
  misc_RNA (1)...(19): siRNA sense strand
uccggaggcuacauuuaua

SEQ ID NO: 1933668 - RNA, 19 nt, Homo sapiens
  misc_RNA (1)...(19): siRNA sense strand
cuaccacauuccagucuuu

SEQ ID NO: 1933669 - RNA, 19 nt, Homo sapiens
  misc_RNA (1)...(19): siRNA sense strand
cacaagagaggaaguaugu

SEQ ID NO: 1933670 - RNA, 19 nt, Homo sapiens
  misc_RNA (1)...(19): siRNA sense strand
guaaggagagauaacuaug

SEQ ID NO: 1933671 - RNA, 19 nt, Homo sapiens
  misc_RNA (1)...(19): siRNA sense strand
cgcaggaagugaccaaguu

SEQ ID NO: 1933672 - RNA, 19 nt, Homo sapiens
  misc_RNA (1)...(19): siRNA sense strand
gggcaucucuuuuccauca

SEQ ID NO: 1933673 - RNA, 19 nt, Homo sapiens
  misc_RNA (1)...(19): siRNA sense strand
aaggagagauaacuaugau

SEQ ID NO: 1933674 - RNA, 19 nt, Homo sapiens
  misc_RNA (1)...(19): siRNA sense strand
ccagggagacauccucuga

SEQ ID NO: 1933675 - RNA, 19 nt, Homo sapiens
  misc_RNA (1)...(19): siRNA sense strand
gaaagaaaaggacauuguu

SEQ ID NO: 1933676 - RNA, 19 nt, Homo sapiens
  misc_RNA (1)...(19): siRNA sense strand
gaaggcuuaugaggagcua

SEQ ID NO: 1933677 - RNA, 19 nt, Homo sapiens
  misc_RNA (1)...(19): siRNA sense strand
uaucaagucacugaaguuu

SEQ ID NO: 1933678 - RNA, 19 nt, Homo sapiens
  misc_RNA (1)...(19): siRNA sense strand
agagcagauugauauguuu

SEQ ID NO: 1933679 - RNA, 19 nt, Homo sapiens
  misc_RNA (1)...(19): siRNA sense strand
uagagauuaucacaagaga

SEQ ID NO: 1933680 - RNA, 19 nt, Homo sapiens
  misc_RNA (1)...(19): siRNA sense strand
cacugaaguuuaugaacaa

SEQ ID NO: 1933681 - RNA, 19 nt, Homo sapiens
  misc_RNA (1)...(19): siRNA sense strand
cagagaaaauucaaaagga

SEQ ID NO: 1933682 - RNA, 19 nt, Homo sapiens
  misc_RNA (1)...(19): siRNA sense strand
gaccgccacuaccacauuc

SEQ ID NO: 1933683 - RNA, 19 nt, Homo sapiens
  misc_RNA (1)...(19): siRNA sense strand
uucagacuguucaaguuua

SEQ ID NO: 1933684 - RNA, 19 nt, Homo sapiens
  misc_RNA (1)...(19): siRNA sense strand
aaaggacauuguuaagcuu

SEQ ID NO: 1933685 - RNA, 19 nt, Homo sapiens
  misc_RNA (1)...(19): siRNA sense strand
ggaggcuacauuuauauuc

SEQ ID NO: 1933686 - RNA, 19 nt, Homo sapiens
  misc_RNA (1)...(19): siRNA sense strand
aggcagagguugauuuacu

SEQ ID NO: 1933687 - RNA, 19 nt, Homo sapiens
  misc_RNA (1)...(19): siRNA sense strand
ggaaaacuacggaaauaug

SEQ ID NO: 1933688 - RNA, 19 nt, Homo sapiens
  misc_RNA (1)...(19): siRNA sense strand
gaaguauacaggcucgaau

SEQ ID NO: 1933689 - RNA, 19 nt, Homo sapiens
  misc_RNA (1)...(19): siRNA sense strand
gcaggaagugaccaaguuc

SEQ ID NO: 1933690 - RNA, 19 nt, Homo sapiens
  misc_RNA (1)...(19): siRNA sense strand
guuuaacuccagagacuuu

SEQ ID NO: 1933691 - RNA, 19 nt, Homo sapiens
  misc_RNA (1)...(19): siRNA sense strand
ccucugauccuuugagcuu

SEQ ID NO: 1933692 - RNA, 19 nt, Homo sapiens
  misc_RNA (1)...(19): siRNA sense strand
agacauccucugauccuuu

SEQ ID NO: 1933693 - RNA, 19 nt, Homo sapiens
  misc_RNA (1)...(19): siRNA sense strand
agguugauuuacucaguua

SEQ ID NO: 1933694 - RNA, 19 nt, Homo sapiens
  misc_RNA (1)...(19): siRNA sense strand
gauuaucacaagagaggaa

SEQ ID NO: 1933695 - RNA, 19 nt, Homo sapiens
  misc_RNA (1)...(19): siRNA sense strand
gaaaacuacggaaauaugu

SEQ ID NO: 1933696 - RNA, 19 nt, Homo sapiens
  misc_RNA (1)...(19): siRNA sense strand
uuaaauguguucgacaagu

SEQ ID NO: 1933697 - RNA, 19 nt, Homo sapiens
  misc_RNA (1)...(19): siRNA sense strand
uuacucaguuauugugcaa

SEQ ID NO: 1933698 - RNA, 19 nt, Homo sapiens
  misc_RNA (1)...(19): siRNA sense strand
ggcagagguugauuuacuc

SEQ ID NO: 1933699 - RNA, 19 nt, Homo sapiens
  misc_RNA (1)...(19): siRNA sense strand
cauguggacuagagcagau

SEQ ID NO: 1933700 - RNA, 19 nt, Homo sapiens
  misc_RNA (1)...(19): siRNA sense strand
gagacauccucugauccuu

SEQ ID NO: 1933701 - RNA, 19 nt, Homo sapiens
  misc_RNA (1)...(19): siRNA sense strand
ugaugaggaaggcuuauga

SEQ ID NO: 1933702 - RNA, 19 nt, Homo sapiens
  misc_RNA (1)...(19): siRNA sense strand
agagguugauuuacucagu

SEQ ID NO: 1933703 - RNA, 19 nt, Homo sapiens
  misc_RNA (1)...(19): siRNA sense strand
uaucacaagagaggaagua

SEQ ID NO: 1933704 - RNA, 19 nt, Homo sapiens
  misc_RNA (1)...(19): siRNA sense strand
gcauuagagauuaucacaa

SEQ ID NO: 1933705 - RNA, 19 nt, Homo sapiens
  misc_RNA (1)...(19): siRNA sense strand
aaauguguucgacaaguaa

SEQ ID NO: 1933706 - RNA, 19 nt, Homo sapiens
  misc_RNA (1)...(19): siRNA sense strand
acucaguuauugugcaaga

SEQ ID NO: 1933707 - RNA, 19 nt, Homo sapiens
  misc_RNA (1)...(19): siRNA sense strand
gauuuacucaguuauugug

SEQ ID NO: 1933708 - RNA, 19 nt, Homo sapiens
  misc_RNA (1)...(19): siRNA sense strand
gcagagguugauuuacuca

SEQ ID NO: 1933709 - RNA, 19 nt, Homo sapiens
  misc_RNA (1)...(19): siRNA sense strand
cgaccgccacuaccacauu

SEQ ID NO: 1933710 - RNA, 19 nt, Homo sapiens
  misc_RNA (1)...(19): siRNA sense strand
cgagaacgaccgccacuac

SEQ ID NO: 1933711 - RNA, 19 nt, Homo sapiens
  misc_RNA (1)...(19): siRNA sense strand
ggagacauccucugauccu

SEQ ID NO: 1933712 - RNA, 19 nt, Homo sapiens
  misc_RNA (1)...(19): siRNA sense strand
uguaucaagucacugaagu

SEQ ID NO: 1933713 - RNA, 19 nt, Homo sapiens
  misc_RNA (1)...(19): siRNA sense strand
cuacggaaauauguggaau

SEQ ID NO: 1933714 - RNA, 19 nt, Homo sapiens
  misc_RNA (1)...(19): siRNA sense strand
uuugugauguuggcaguuu

SEQ ID NO: 1933715 - RNA, 19 nt, Homo sapiens
  misc_RNA (1)...(19): siRNA sense strand
gacaaguaaggagagauaa

SEQ ID NO: 1933716 - RNA, 19 nt, Homo sapiens
  misc_RNA (1)...(19): siRNA sense strand
uguucagacuguucaaguu

SEQ ID NO: 1933717 - RNA, 19 nt, Homo sapiens
  misc_RNA (1)...(19): siRNA sense strand
cuacaagccaagccuuaga

SEQ ID NO: 1933718 - RNA, 19 nt, Homo sapiens
  misc_RNA (1)...(19): siRNA sense strand
gccaagccuuagacacugu

SEQ ID NO: 1933719 - RNA, 19 nt, Homo sapiens
  misc_RNA (1)...(19): siRNA sense strand
caaguaaggagagauaacu

SEQ ID NO: 1933720 - RNA, 19 nt, Homo sapiens
  misc_RNA (1)...(19): siRNA sense strand
agaucaguguuauuucaga

SEQ ID NO: 1933721 - RNA, 19 nt, Homo sapiens
  misc_RNA (1)...(19): siRNA sense strand
uaacuccagagacuuugaa

SEQ ID NO: 1933722 - RNA, 19 nt, Homo sapiens
  misc_RNA (1)...(19): siRNA sense strand
cccuugaaguaaagauaaa

SEQ ID NO: 1933723 - RNA, 19 nt, Homo sapiens
  misc_RNA (1)...(19): siRNA sense strand
cugaaaugguggauuggau

SEQ ID NO: 1933724 - RNA, 19 nt, Homo sapiens
  misc_RNA (1)...(19): siRNA sense strand
agggagacauccucugauc

SEQ ID NO: 1933725 - RNA, 19 nt, Homo sapiens
  misc_RNA (1)...(19): siRNA sense strand
guaucaagucacugaaguu

SEQ ID NO: 1933726 - RNA, 19 nt, Homo sapiens
  misc_RNA (1)...(19): siRNA sense strand
ucaucaugcuguaucaagu

SEQ ID NO: 1933727 - RNA, 19 nt, Homo sapiens
  misc_RNA (1)...(19): siRNA sense strand
ucacaagagaggaaguaug

SEQ ID NO: 1933728 - RNA, 19 nt, Homo sapiens
  misc_RNA (1)...(19): siRNA sense strand
ggagagacaccccguaaca

SEQ ID NO: 1933729 - RNA, 19 nt, Homo sapiens
  misc_RNA (1)...(19): siRNA sense strand
ccacauuccagucuuuuaa

SEQ ID NO: 1933730 - RNA, 19 nt, Homo sapiens
  misc_RNA (1)...(19): siRNA sense strand
aaaggucauucccagucuu

SEQ ID NO: 1933731 - RNA, 19 nt, Homo sapiens
  misc_RNA (1)...(19): siRNA sense strand
guuggcaguuucauuucug

SEQ ID NO: 1933732 - RNA, 19 nt, Homo sapiens
  misc_RNA (1)...(19): siRNA sense strand
ggagaaaguugucugagaa

SEQ ID NO: 1933733 - RNA, 19 nt, Homo sapiens
  misc_RNA (1)...(19): siRNA sense strand
gcagcaugcucgauuaaga

SEQ ID NO: 1933734 - RNA, 19 nt, Homo sapiens
  misc_RNA (1)...(19): siRNA sense strand
gaagccaaguauuaagaaa

SEQ ID NO: 1933735 - RNA, 19 nt, Homo sapiens
  misc_RNA (1)...(19): siRNA sense strand
gggagaaaguugucugaga

SEQ ID NO: 1933736 - RNA, 19 nt, Homo sapiens
  misc_RNA (1)...(19): siRNA sense strand
aaaggaagccaaguauuaa

SEQ ID NO: 1933737 - RNA, 19 nt, Homo sapiens
  misc_RNA (1)...(19): siRNA sense strand
uaaagacacugcucaagcu

SEQ ID NO: 1933738 - RNA, 19 nt, Homo sapiens
  misc_RNA (1)...(19): siRNA sense strand
ggacugcaauaccagaaag

SEQ ID NO: 1933739 - RNA, 19 nt, Homo sapiens
  misc_RNA (1)...(19): siRNA sense strand
aaaaggaagccaaguauua

SEQ ID NO: 1933740 - RNA, 19 nt, Homo sapiens
  misc_RNA (1)...(19): siRNA sense strand
uagaaaggcagcuugauga

SEQ ID NO: 1933741 - RNA, 19 nt, Homo sapiens
  misc_RNA (1)...(19): siRNA sense strand
gacaagagggagaaaguug

SEQ ID NO: 1933742 - RNA, 19 nt, Homo sapiens
  misc_RNA (1)...(19): siRNA sense strand
ggaagccaaguauuaagaa

SEQ ID NO: 1933743 - RNA, 19 nt, Homo sapiens
  misc_RNA (1)...(19): siRNA sense strand
gaagccaauugaccagcaa

SEQ ID NO: 1933744 - RNA, 19 nt, Homo sapiens
  misc_RNA (1)...(19): siRNA sense strand
caugcucgauuaagaguau

SEQ ID NO: 1933745 - RNA, 19 nt, Homo sapiens
  misc_RNA (1)...(19): siRNA sense strand
ggacaagagggagaaaguu

SEQ ID NO: 1933746 - RNA, 19 nt, Homo sapiens
  misc_RNA (1)...(19): siRNA sense strand
gcauaaagacacugcucaa

SEQ ID NO: 1933747 - RNA, 19 nt, Homo sapiens
  misc_RNA (1)...(19): siRNA sense strand
uggcacacaugcagaagga

SEQ ID NO: 1933748 - RNA, 19 nt, Homo sapiens
  misc_RNA (1)...(19): siRNA sense strand
cgauuaagaguaugccaaa

SEQ ID NO: 1933749 - RNA, 19 nt, Homo sapiens
  misc_RNA (1)...(19): siRNA sense strand
gaagggacaagagggagaa

SEQ ID NO: 1933750 - RNA, 19 nt, Homo sapiens
  misc_RNA (1)...(19): siRNA sense strand
ccagaagagggcauaaaga

SEQ ID NO: 1933751 - RNA, 19 nt, Homo sapiens
  misc_RNA (1)...(19): siRNA sense strand
gagcucugcugaccugcau

SEQ ID NO: 1933752 - RNA, 19 nt, Homo sapiens
  misc_RNA (1)...(19): siRNA sense strand
gacacggacugcaauacca

SEQ ID NO: 1933753 - RNA, 19 nt, Homo sapiens
  misc_RNA (1)...(19): siRNA sense strand
ucggcagcaugcucgauua

SEQ ID NO: 1933754 - RNA, 19 nt, Homo sapiens
  misc_RNA (1)...(19): siRNA sense strand
gaagaugcaaccccaauau

SEQ ID NO: 1933755 - RNA, 19 nt, Homo sapiens
  misc_RNA (1)...(19): siRNA sense strand
gagggagaaaguugucuga

SEQ ID NO: 1933756 - RNA, 19 nt, Homo sapiens
  misc_RNA (1)...(19): siRNA sense strand
ugagcaagauggcacacau

SEQ ID NO: 1933757 - RNA, 19 nt, Homo sapiens
  misc_RNA (1)...(19): siRNA sense strand
gaaaaccaacccaaaagga

SEQ ID NO: 1933758 - RNA, 19 nt, Homo sapiens
  misc_RNA (1)...(19): siRNA sense strand
ugaacgauguuuguacuac

SEQ ID NO: 1933759 - RNA, 19 nt, Homo sapiens
  misc_RNA (1)...(19): siRNA sense strand
agccaaguauuaagaaauc

SEQ ID NO: 1933760 - RNA, 19 nt, Homo sapiens
  misc_RNA (1)...(19): siRNA sense strand
uuagaaaggcagcuugaug

SEQ ID NO: 1933761 - RNA, 19 nt, Homo sapiens
  misc_RNA (1)...(19): siRNA sense strand
gagcaagauggcacacaug

SEQ ID NO: 1933762 - RNA, 19 nt, Homo sapiens
  misc_RNA (1)...(19): siRNA sense strand
gccguucugugcuacaugu

SEQ ID NO: 1933763 - RNA, 19 nt, Homo sapiens
  misc_RNA (1)...(19): siRNA sense strand
cgacuguggcccuggacua

SEQ ID NO: 1933764 - RNA, 19 nt, Homo sapiens
  misc_RNA (1)...(19): siRNA sense strand
cagaagagggcauaaagac

SEQ ID NO: 1933765 - RNA, 19 nt, Homo sapiens
  misc_RNA (1)...(19): siRNA sense strand
ggaagaugcaaccccaaua

SEQ ID NO: 1933766 - RNA, 19 nt, Homo sapiens
  misc_RNA (1)...(19): siRNA sense strand
gggacaagagggagaaagu

SEQ ID NO: 1933767 - RNA, 19 nt, Homo sapiens
  misc_RNA (1)...(19): siRNA sense strand
gacuguggcccuggacuuu

SEQ ID NO: 1933768 - RNA, 19 nt, Homo sapiens
  misc_RNA (1)...(19): siRNA sense strand
ucugagaacuuuugacugu

SEQ ID NO: 1933769 - RNA, 19 nt, Homo sapiens
  misc_RNA (1)...(19): siRNA sense strand
agaugcaaccccaauauua

SEQ ID NO: 1933770 - RNA, 19 nt, Homo sapiens
  misc_RNA (1)...(19): siRNA sense strand
caagagggagaaaguuguc

SEQ ID NO: 1933771 - RNA, 19 nt, Homo sapiens
  misc_RNA (1)...(19): siRNA sense strand
gaccagcaaucggcagcau

SEQ ID NO: 1933772 - RNA, 19 nt, Homo sapiens
  misc_RNA (1)...(19): siRNA sense strand
ugcucaagcuccagaaauc

SEQ ID NO: 1933773 - RNA, 19 nt, Homo sapiens
  misc_RNA (1)...(19): siRNA sense strand
gcaagauggcacacaugca

SEQ ID NO: 1933774 - RNA, 19 nt, Homo sapiens
  misc_RNA (1)...(19): siRNA sense strand
ccaaaaggaagccaaguau

SEQ ID NO: 1933775 - RNA, 19 nt, Homo sapiens
  misc_RNA (1)...(19): siRNA sense strand
caaaaggaagccaaguauu

SEQ ID NO: 1933776 - RNA, 19 nt, Homo sapiens
  misc_RNA (1)...(19): siRNA sense strand
cggcagcaugcucgauuaa

SEQ ID NO: 1933777 - RNA, 19 nt, Homo sapiens
  misc_RNA (1)...(19): siRNA sense strand
ugugaacgauguuuguacu

SEQ ID NO: 1933778 - RNA, 19 nt, Homo sapiens
  misc_RNA (1)...(19): siRNA sense strand
gugaacgauguuuguacua

SEQ ID NO: 1933779 - RNA, 19 nt, Homo sapiens
  misc_RNA (1)...(19): siRNA sense strand
gccaaguauuaagaaauca

SEQ ID NO: 1933780 - RNA, 19 nt, Homo sapiens
  misc_RNA (1)...(19): siRNA sense strand
gaacugagaucugcaacua

SEQ ID NO: 1933781 - RNA, 19 nt, Homo sapiens
  misc_RNA (1)...(19): siRNA sense strand
gaagaugugugcauuguag

SEQ ID NO: 1933782 - RNA, 19 nt, Homo sapiens
  misc_RNA (1)...(19): siRNA sense strand
caaggaagcuaaagguuug

SEQ ID NO: 1933783 - RNA, 19 nt, Homo sapiens
  misc_RNA (1)...(19): siRNA sense strand
ugacagaaauguucaacca

SEQ ID NO: 1933784 - RNA, 19 nt, Homo sapiens
  misc_RNA (1)...(19): siRNA sense strand
ccaaggaagcuaaagguuu

SEQ ID NO: 1933785 - RNA, 19 nt, Homo sapiens
  misc_RNA (1)...(19): siRNA sense strand
ggcagaggcugauaguaug

SEQ ID NO: 1933786 - RNA, 19 nt, Homo sapiens
  misc_RNA (1)...(19): siRNA sense strand
ggucuucgauaccauuaau

SEQ ID NO: 1933787 - RNA, 19 nt, Homo sapiens
  misc_RNA (1)...(19): siRNA sense strand
caacgacaacugcuacuug

SEQ ID NO: 1933788 - RNA, 19 nt, Homo sapiens
  misc_RNA (1)...(19): siRNA sense strand
ugacgcaaguggaacuaaa

SEQ ID NO: 1933789 - RNA, 19 nt, Homo sapiens
  misc_RNA (1)...(19): siRNA sense strand
uagcggcacuggccuuuga

SEQ ID NO: 1933790 - RNA, 19 nt, Homo sapiens
  misc_RNA (1)...(19): siRNA sense strand
ugaaggugcugcauacgau

SEQ ID NO: 1933791 - RNA, 19 nt, Homo sapiens
  misc_RNA (1)...(19): siRNA sense strand
ggaagaugugugcauugua

SEQ ID NO: 1933792 - RNA, 19 nt, Homo sapiens
  misc_RNA (1)...(19): siRNA sense strand
gacaugaaggugcugcaua

SEQ ID NO: 1933793 - RNA, 19 nt, Homo sapiens
  misc_RNA (1)...(19): siRNA sense strand
ggaccgugauuaggguauu

SEQ ID NO: 1933794 - RNA, 19 nt, Homo sapiens
  misc_RNA (1)...(19): siRNA sense strand
ccaagugacagaaauguuc

SEQ ID NO: 1933795 - RNA, 19 nt, Homo sapiens
  misc_RNA (1)...(19): siRNA sense strand
gaccgugauuaggguauuu

SEQ ID NO: 1933796 - RNA, 19 nt, Homo sapiens
  misc_RNA (1)...(19): siRNA sense strand
cuaccugccuucccaagug

SEQ ID NO: 1933797 - RNA, 19 nt, Homo sapiens
  misc_RNA (1)...(19): siRNA sense strand
gcaacuacagcuacuccaa

SEQ ID NO: 1933798 - RNA, 19 nt, Homo sapiens
  misc_RNA (1)...(19): siRNA sense strand
cggaagaugugugcauugu

SEQ ID NO: 1933799 - RNA, 19 nt, Homo sapiens
  misc_RNA (1)...(19): siRNA sense strand
ccacaacauucgggacaug

SEQ ID NO: 1933800 - RNA, 19 nt, Homo sapiens
  misc_RNA (1)...(19): siRNA sense strand
acacgauucuggcugugaa

SEQ ID NO: 1933801 - RNA, 19 nt, Homo sapiens
  misc_RNA (1)...(19): siRNA sense strand
caaacucgagacugugaaa

SEQ ID NO: 1933802 - RNA, 19 nt, Homo sapiens
  misc_RNA (1)...(19): siRNA sense strand
ugugugcgcugucaaucaa

SEQ ID NO: 1933803 - RNA, 19 nt, Homo sapiens
  misc_RNA (1)...(19): siRNA sense strand
aggcagaggcugauaguau

SEQ ID NO: 1933804 - RNA, 19 nt, Homo sapiens
  misc_RNA (1)...(19): siRNA sense strand
caacaggcagaggcugaua

SEQ ID NO: 1933805 - RNA, 19 nt, Homo sapiens
  misc_RNA (1)...(19): siRNA sense strand
gcaggucuucgauaccauu

SEQ ID NO: 1933806 - RNA, 19 nt, Homo sapiens
  misc_RNA (1)...(19): siRNA sense strand
acugagaucugcaacuaca

SEQ ID NO: 1933807 - RNA, 19 nt, Homo sapiens
  misc_RNA (1)...(19): siRNA sense strand
gaggugcaggucuucgaua

SEQ ID NO: 1933808 - RNA, 19 nt, Homo sapiens
  misc_RNA (1)...(19): siRNA sense strand
acaugaaggugcugcauac

SEQ ID NO: 1933809 - RNA, 19 nt, Homo sapiens
  misc_RNA (1)...(19): siRNA sense strand
acucgagacugugaaagaa

SEQ ID NO: 1933810 - RNA, 19 nt, Homo sapiens
  misc_RNA (1)...(19): siRNA sense strand
uagccacaauucagaagau

SEQ ID NO: 1933811 - RNA, 19 nt, Homo sapiens
  misc_RNA (1)...(19): siRNA sense strand
ccaugauucuucggacuga

SEQ ID NO: 1933812 - RNA, 19 nt, Homo sapiens
  misc_RNA (1)...(19): siRNA sense strand
ucggagaggugcaggucuu

SEQ ID NO: 1933813 - RNA, 19 nt, Homo sapiens
  misc_RNA (1)...(19): siRNA sense strand
gagagcugcaaacaugauu

SEQ ID NO: 1933814 - RNA, 19 nt, Homo sapiens
  misc_RNA (1)...(19): siRNA sense strand
uacggaagaugugugcauu

SEQ ID NO: 1933815 - RNA, 19 nt, Homo sapiens
  misc_RNA (1)...(19): siRNA sense strand
gaccgugcacaucuucaaa

SEQ ID NO: 1933816 - RNA, 19 nt, Homo sapiens
  misc_RNA (1)...(19): siRNA sense strand
gcaccaaggaagcuaaagg

SEQ ID NO: 1933817 - RNA, 19 nt, Homo sapiens
  misc_RNA (1)...(19): siRNA sense strand
gugcaggucuucgauacca

SEQ ID NO: 1933818 - RNA, 19 nt, Homo sapiens
  misc_RNA (1)...(19): siRNA sense strand
cagcuacuccaacacgauu

SEQ ID NO: 1933819 - RNA, 19 nt, Homo sapiens
  misc_RNA (1)...(19): siRNA sense strand
gcgagugugcccugaugaa

SEQ ID NO: 1933820 - RNA, 19 nt, Homo sapiens
  misc_RNA (1)...(19): siRNA sense strand
ucaacaacgacaacugcua

SEQ ID NO: 1933821 - RNA, 19 nt, Homo sapiens
  misc_RNA (1)...(19): siRNA sense strand
ggaggagucccuguacauc

SEQ ID NO: 1933822 - RNA, 19 nt, Homo sapiens
  misc_RNA (1)...(19): siRNA sense strand
cgauaccauuaauuugaga

SEQ ID NO: 1933823 - RNA, 19 nt, Homo sapiens
  misc_RNA (1)...(19): siRNA sense strand
caagugacagaaauguuca

SEQ ID NO: 1933824 - RNA, 19 nt, Homo sapiens
  misc_RNA (1)...(19): siRNA sense strand
gaccggguacuucgggaaa

SEQ ID NO: 1933825 - RNA, 19 nt, Homo sapiens
  misc_RNA (1)...(19): siRNA sense strand
gagaaggggaccgugauua

SEQ ID NO: 1933826 - RNA, 19 nt, Homo sapiens
  misc_RNA (1)...(19): siRNA sense strand
gcucacgacaguccuuuag

SEQ ID NO: 1933827 - RNA, 19 nt, Homo sapiens
  misc_RNA (1)...(19): siRNA sense strand
cggcgcagcugcaggaaaa

SEQ ID NO: 1933828 - RNA, 19 nt, Homo sapiens
  misc_RNA (1)...(19): siRNA sense strand
uaccugccuucccaaguga

SEQ ID NO: 1933829 - RNA, 19 nt, Homo sapiens
  misc_RNA (1)...(19): siRNA sense strand
gccauucugcggccacaaa

SEQ ID NO: 1933830 - RNA, 19 nt, Homo sapiens
  misc_RNA (1)...(19): siRNA sense strand
gaguuucggagaggaguaa

SEQ ID NO: 1933831 - RNA, 19 nt, Homo sapiens
  misc_RNA (1)...(19): siRNA sense strand
uaagaagggaacugagauc

SEQ ID NO: 1933832 - RNA, 19 nt, Homo sapiens
  misc_RNA (1)...(19): siRNA sense strand
ucuucaaacucgagacugu

SEQ ID NO: 1933833 - RNA, 19 nt, Homo sapiens
  misc_RNA (1)...(19): siRNA sense strand
caacauucgggacaugaag

SEQ ID NO: 1933834 - RNA, 19 nt, Homo sapiens
  misc_RNA (1)...(19): siRNA sense strand
acacugagaccgugcacau

SEQ ID NO: 1933835 - RNA, 19 nt, Homo sapiens
  misc_RNA (1)...(19): siRNA sense strand
ucgauaccauuaauuugag

SEQ ID NO: 1933836 - RNA, 19 nt, Homo sapiens
  misc_RNA (1)...(19): siRNA sense strand
uaaagcaccaaggaagcua

SEQ ID NO: 1933837 - RNA, 19 nt, Homo sapiens
  misc_RNA (1)...(19): siRNA sense strand
gaugugugcauuguagaga

SEQ ID NO: 1933838 - RNA, 19 nt, Homo sapiens
  misc_RNA (1)...(19): siRNA sense strand
gagaggugcaggucuucga

SEQ ID NO: 1933839 - RNA, 19 nt, Homo sapiens
  misc_RNA (1)...(19): siRNA sense strand
aaacgaccaaugagaucuu

SEQ ID NO: 1933840 - RNA, 19 nt, Homo sapiens
  misc_RNA (1)...(19): siRNA sense strand
guggccaucgugagccuua

SEQ ID NO: 1933841 - RNA, 19 nt, Homo sapiens
  misc_RNA (1)...(19): siRNA sense strand
gaacugagaucugcaacua

SEQ ID NO: 1933842 - RNA, 19 nt, Homo sapiens
  misc_RNA (1)...(19): siRNA sense strand
caaggaagcuaaagguuug

SEQ ID NO: 1933843 - RNA, 19 nt, Homo sapiens
  misc_RNA (1)...(19): siRNA sense strand
gaagaugugugcauuguag

SEQ ID NO: 1933844 - RNA, 19 nt, Homo sapiens
  misc_RNA (1)...(19): siRNA sense strand
ugacagaaauguucaacca

SEQ ID NO: 1933845 - RNA, 19 nt, Homo sapiens
  misc_RNA (1)...(19): siRNA sense strand
ccaaggaagcuaaagguuu

SEQ ID NO: 1933846 - RNA, 19 nt, Homo sapiens
  misc_RNA (1)...(19): siRNA sense strand
ggcagaggcugauaguaug

SEQ ID NO: 1933847 - RNA, 19 nt, Homo sapiens
  misc_RNA (1)...(19): siRNA sense strand
ggucuucgauaccauuaau

SEQ ID NO: 1933848 - RNA, 19 nt, Homo sapiens
  misc_RNA (1)...(19): siRNA sense strand
caacgacaacugcuacuug

SEQ ID NO: 1933849 - RNA, 19 nt, Homo sapiens
  misc_RNA (1)...(19): siRNA sense strand
ugacgcaaguggaacuaaa

SEQ ID NO: 1933850 - RNA, 19 nt, Homo sapiens
  misc_RNA (1)...(19): siRNA sense strand
uagcggcacuggccuuuga

SEQ ID NO: 1933851 - RNA, 19 nt, Homo sapiens
  misc_RNA (1)...(19): siRNA sense strand
ugaaggugcugcauacgau

SEQ ID NO: 1933852 - RNA, 19 nt, Homo sapiens
  misc_RNA (1)...(19): siRNA sense strand
gacaugaaggugcugcaua

SEQ ID NO: 1933853 - RNA, 19 nt, Homo sapiens
  misc_RNA (1)...(19): siRNA sense strand
ggaccgugauuaggguauu

SEQ ID NO: 1933854 - RNA, 19 nt, Homo sapiens
  misc_RNA (1)...(19): siRNA sense strand
ccaagugacagaaauguuc

SEQ ID NO: 1933855 - RNA, 19 nt, Homo sapiens
  misc_RNA (1)...(19): siRNA sense strand
gaccgugauuaggguauuu

SEQ ID NO: 1933856 - RNA, 19 nt, Homo sapiens
  misc_RNA (1)...(19): siRNA sense strand
cuaccugccuucccaagug

SEQ ID NO: 1933857 - RNA, 19 nt, Homo sapiens
  misc_RNA (1)...(19): siRNA sense strand
gcaacuacagcuacuccaa

SEQ ID NO: 1933858 - RNA, 19 nt, Homo sapiens
  misc_RNA (1)...(19): siRNA sense strand
ccacaacauucgggacaug

SEQ ID NO: 1933859 - RNA, 19 nt, Homo sapiens
  misc_RNA (1)...(19): siRNA sense strand
acacgauucuggcugugaa

SEQ ID NO: 1933860 - RNA, 19 nt, Homo sapiens
  misc_RNA (1)...(19): siRNA sense strand
caaacucgagacugugaaa

SEQ ID NO: 1933861 - RNA, 19 nt, Homo sapiens
  misc_RNA (1)...(19): siRNA sense strand
ugugugcgcugucaaucaa

SEQ ID NO: 1933862 - RNA, 19 nt, Homo sapiens
  misc_RNA (1)...(19): siRNA sense strand
aggcagaggcugauaguau

SEQ ID NO: 1933863 - RNA, 19 nt, Homo sapiens
  misc_RNA (1)...(19): siRNA sense strand
caacaggcagaggcugaua

SEQ ID NO: 1933864 - RNA, 19 nt, Homo sapiens
  misc_RNA (1)...(19): siRNA sense strand
gcaggucuucgauaccauu

SEQ ID NO: 1933865 - RNA, 19 nt, Homo sapiens
  misc_RNA (1)...(19): siRNA sense strand
acugagaucugcaacuaca

SEQ ID NO: 1933866 - RNA, 19 nt, Homo sapiens
  misc_RNA (1)...(19): siRNA sense strand
gaggugcaggucuucgaua

SEQ ID NO: 1933867 - RNA, 19 nt, Homo sapiens
  misc_RNA (1)...(19): siRNA sense strand
acaugaaggugcugcauac

SEQ ID NO: 1933868 - RNA, 19 nt, Homo sapiens
  misc_RNA (1)...(19): siRNA sense strand
acucgagacugugaaagaa

SEQ ID NO: 1933869 - RNA, 19 nt, Homo sapiens
  misc_RNA (1)...(19): siRNA sense strand
uagccacaauucagaagau

SEQ ID NO: 1933870 - RNA, 19 nt, Homo sapiens
  misc_RNA (1)...(19): siRNA sense strand
ccaugauucuucggacuga

SEQ ID NO: 1933871 - RNA, 19 nt, Homo sapiens
  misc_RNA (1)...(19): siRNA sense strand
ucggagaggugcaggucuu

SEQ ID NO: 1933872 - RNA, 19 nt, Homo sapiens
  misc_RNA (1)...(19): siRNA sense strand
gagagcugcaaacaugauu

SEQ ID NO: 1933873 - RNA, 19 nt, Homo sapiens
  misc_RNA (1)...(19): siRNA sense strand
gcaccaaggaagcuaaagg

SEQ ID NO: 1933874 - RNA, 19 nt, Homo sapiens
  misc_RNA (1)...(19): siRNA sense strand
gaccgugcacaucuucaaa

SEQ ID NO: 1933875 - RNA, 19 nt, Homo sapiens
  misc_RNA (1)...(19): siRNA sense strand
gugcaggucuucgauacca

SEQ ID NO: 1933876 - RNA, 19 nt, Homo sapiens
  misc_RNA (1)...(19): siRNA sense strand
cagcuacuccaacacgauu

SEQ ID NO: 1933877 - RNA, 19 nt, Homo sapiens
  misc_RNA (1)...(19): siRNA sense strand
gcgagugugcccugaugaa

SEQ ID NO: 1933878 - RNA, 19 nt, Homo sapiens
  misc_RNA (1)...(19): siRNA sense strand
ucaacaacgacaacugcua

SEQ ID NO: 1933879 - RNA, 19 nt, Homo sapiens
  misc_RNA (1)...(19): siRNA sense strand
ggaggagucccuguacauc

SEQ ID NO: 1933880 - RNA, 19 nt, Homo sapiens
  misc_RNA (1)...(19): siRNA sense strand
cgauaccauuaauuugaga

SEQ ID NO: 1933881 - RNA, 19 nt, Homo sapiens
  misc_RNA (1)...(19): siRNA sense strand
caagugacagaaauguuca

SEQ ID NO: 1933882 - RNA, 19 nt, Homo sapiens
  misc_RNA (1)...(19): siRNA sense strand
gaccggguacuucgggaaa

SEQ ID NO: 1933883 - RNA, 19 nt, Homo sapiens
  misc_RNA (1)...(19): siRNA sense strand
gagaaggggaccgugauua

SEQ ID NO: 1933884 - RNA, 19 nt, Homo sapiens
  misc_RNA (1)...(19): siRNA sense strand
gcucacgacaguccuuuag

SEQ ID NO: 1933885 - RNA, 19 nt, Homo sapiens
  misc_RNA (1)...(19): siRNA sense strand
cggcgcagcugcaggaaaa

SEQ ID NO: 1933886 - RNA, 19 nt, Homo sapiens
  misc_RNA (1)...(19): siRNA sense strand
uaccugccuucccaaguga

SEQ ID NO: 1933887 - RNA, 19 nt, Homo sapiens
  misc_RNA (1)...(19): siRNA sense strand
gccauucugcggccacaaa

SEQ ID NO: 1933888 - RNA, 19 nt, Homo sapiens
  misc_RNA (1)...(19): siRNA sense strand
gaguuucggagaggaguaa

SEQ ID NO: 1933889 - RNA, 19 nt, Homo sapiens
  misc_RNA (1)...(19): siRNA sense strand
uaagaagggaacugagauc

SEQ ID NO: 1933890 - RNA, 19 nt, Homo sapiens
  misc_RNA (1)...(19): siRNA sense strand
ucuucaaacucgagacugu

SEQ ID NO: 1933891 - RNA, 19 nt, Homo sapiens
  misc_RNA (1)...(19): siRNA sense strand
uaaagcaccaaggaagcua

SEQ ID NO: 1933892 - RNA, 19 nt, Homo sapiens
  misc_RNA (1)...(19): siRNA sense strand
gaugugugcauuguagaga

SEQ ID NO: 1933893 - RNA, 19 nt, Homo sapiens
  misc_RNA (1)...(19): siRNA sense strand
acacugagaccgugcacau

SEQ ID NO: 1933894 - RNA, 19 nt, Homo sapiens
  misc_RNA (1)...(19): siRNA sense strand
ucgauaccauuaauuugag

SEQ ID NO: 1933895 - RNA, 19 nt, Homo sapiens
  misc_RNA (1)...(19): siRNA sense strand
caacauucgggacaugaag

SEQ ID NO: 1933896 - RNA, 19 nt, Homo sapiens
  misc_RNA (1)...(19): siRNA sense strand
gagaggugcaggucuucga

SEQ ID NO: 1933897 - RNA, 19 nt, Homo sapiens
  misc_RNA (1)...(19): siRNA sense strand
aaacgaccaaugagaucuu

SEQ ID NO: 1933898 - RNA, 19 nt, Homo sapiens
  misc_RNA (1)...(19): siRNA sense strand
gcacggaauccacuaguua

SEQ ID NO: 1933899 - RNA, 19 nt, Homo sapiens
  misc_RNA (1)...(19): siRNA sense strand
caacgaagacgaaagcuaa

SEQ ID NO: 1933900 - RNA, 19 nt, Homo sapiens
  misc_RNA (1)...(19): siRNA sense strand
uuaaagaucugcugacugu

SEQ ID NO: 1933901 - RNA, 19 nt, Homo sapiens
  misc_RNA (1)...(19): siRNA sense strand
uaaagaagacacagaguuu

SEQ ID NO: 1933902 - RNA, 19 nt, Homo sapiens
  misc_RNA (1)...(19): siRNA sense strand
aaaccuaacuccaaagugu

SEQ ID NO: 1933903 - RNA, 19 nt, Homo sapiens
  misc_RNA (1)...(19): siRNA sense strand
gaagcuggcuaacaucauc

SEQ ID NO: 1933904 - RNA, 19 nt, Homo sapiens
  misc_RNA (1)...(19): siRNA sense strand
acacagaguuuagaugaaa

SEQ ID NO: 1933905 - RNA, 19 nt, Homo sapiens
  misc_RNA (1)...(19): siRNA sense strand
gaaccccucuuaccaauaa

SEQ ID NO: 1933906 - RNA, 19 nt, Homo sapiens
  misc_RNA (1)...(19): siRNA sense strand
ucacaugagugguaaacuu

SEQ ID NO: 1933907 - RNA, 19 nt, Homo sapiens
  misc_RNA (1)...(19): siRNA sense strand
agccaaagccgaaagauua

SEQ ID NO: 1933908 - RNA, 19 nt, Homo sapiens
  misc_RNA (1)...(19): siRNA sense strand
gcaccuguguugcucagaa

SEQ ID NO: 1933909 - RNA, 19 nt, Homo sapiens
  misc_RNA (1)...(19): siRNA sense strand
ccaccacccucaccagaaa

SEQ ID NO: 1933910 - RNA, 19 nt, Homo sapiens
  misc_RNA (1)...(19): siRNA sense strand
ccagaaagagucgguauuu

SEQ ID NO: 1933911 - RNA, 19 nt, Homo sapiens
  misc_RNA (1)...(19): siRNA sense strand
gaaaguucuuccuguccaa

SEQ ID NO: 1933912 - RNA, 19 nt, Homo sapiens
  misc_RNA (1)...(19): siRNA sense strand
caaagcagaagcuggcuaa

SEQ ID NO: 1933913 - RNA, 19 nt, Homo sapiens
  misc_RNA (1)...(19): siRNA sense strand
ccugaaaccuaacuccaaa

SEQ ID NO: 1933914 - RNA, 19 nt, Homo sapiens
  misc_RNA (1)...(19): siRNA sense strand
aaagaucugcugacuguaa

SEQ ID NO: 1933915 - RNA, 19 nt, Homo sapiens
  misc_RNA (1)...(19): siRNA sense strand
gaucugcggaaacugcuua

SEQ ID NO: 1933916 - RNA, 19 nt, Homo sapiens
  misc_RNA (1)...(19): siRNA sense strand
cacaugagugguaaacuua

SEQ ID NO: 1933917 - RNA, 19 nt, Homo sapiens
  misc_RNA (1)...(19): siRNA sense strand
gccgaaagauuauucaaaa

SEQ ID NO: 1933918 - RNA, 19 nt, Homo sapiens
  misc_RNA (1)...(19): siRNA sense strand
agacacagaguuuagauga

SEQ ID NO: 1933919 - RNA, 19 nt, Homo sapiens
  misc_RNA (1)...(19): siRNA sense strand
cauguuacccugaaaccua

SEQ ID NO: 1933920 - RNA, 19 nt, Homo sapiens
  misc_RNA (1)...(19): siRNA sense strand
gacacagaguuuagaugaa

SEQ ID NO: 1933921 - RNA, 19 nt, Homo sapiens
  misc_RNA (1)...(19): siRNA sense strand
aaagaagacacagaguuua

SEQ ID NO: 1933922 - RNA, 19 nt, Homo sapiens
  misc_RNA (1)...(19): siRNA sense strand
gaaagcacggaauccacua

SEQ ID NO: 1933923 - RNA, 19 nt, Homo sapiens
  misc_RNA (1)...(19): siRNA sense strand
uguccaagcuguggucaaa

SEQ ID NO: 1933924 - RNA, 19 nt, Homo sapiens
  misc_RNA (1)...(19): siRNA sense strand
gaaacaggaacaggacuga

SEQ ID NO: 1933925 - RNA, 19 nt, Homo sapiens
  misc_RNA (1)...(19): siRNA sense strand
ugcggaaacugcuuagaaa

SEQ ID NO: 1933926 - RNA, 19 nt, Homo sapiens
  misc_RNA (1)...(19): siRNA sense strand
gaagacacagaguuuagau

SEQ ID NO: 1933927 - RNA, 19 nt, Homo sapiens
  misc_RNA (1)...(19): siRNA sense strand
cugcauaacccagaguuua

SEQ ID NO: 1933928 - RNA, 19 nt, Homo sapiens
  misc_RNA (1)...(19): siRNA sense strand
cauccuggaacuucaauuu

SEQ ID NO: 1933929 - RNA, 19 nt, Homo sapiens
  misc_RNA (1)...(19): siRNA sense strand
acgcaggccuuaaggagaa

SEQ ID NO: 1933930 - RNA, 19 nt, Homo sapiens
  misc_RNA (1)...(19): siRNA sense strand
ugaagaccaucucagaaag

SEQ ID NO: 1933931 - RNA, 19 nt, Homo sapiens
  misc_RNA (1)...(19): siRNA sense strand
acuucaggcuggaccauua

SEQ ID NO: 1933932 - RNA, 19 nt, Homo sapiens
  misc_RNA (1)...(19): siRNA sense strand
gaagaccaucucagaaagu

SEQ ID NO: 1933933 - RNA, 19 nt, Homo sapiens
  misc_RNA (1)...(19): siRNA sense strand
ccuagaagcccaacuccaa

SEQ ID NO: 1933934 - RNA, 19 nt, Homo sapiens
  misc_RNA (1)...(19): siRNA sense strand
gaaaauauggaaacaggaa

SEQ ID NO: 1933935 - RNA, 19 nt, Homo sapiens
  misc_RNA (1)...(19): siRNA sense strand
guuacaaacgucuuaauca

SEQ ID NO: 1933936 - RNA, 19 nt, Homo sapiens
  misc_RNA (1)...(19): siRNA sense strand
gaaaagaggaagcuuauac

SEQ ID NO: 1933937 - RNA, 19 nt, Homo sapiens
  misc_RNA (1)...(19): siRNA sense strand
gagaggaggccagguggaa

SEQ ID NO: 1933938 - RNA, 19 nt, Homo sapiens
  misc_RNA (1)...(19): siRNA sense strand
ucagcuggcucacccuaga

SEQ ID NO: 1933939 - RNA, 19 nt, Homo sapiens
  misc_RNA (1)...(19): siRNA sense strand
gcagcauguuacccugaaa

SEQ ID NO: 1933940 - RNA, 19 nt, Homo sapiens
  misc_RNA (1)...(19): siRNA sense strand
aagaucugcugacuguaaa

SEQ ID NO: 1933941 - RNA, 19 nt, Homo sapiens
  misc_RNA (1)...(19): siRNA sense strand
caaagccgaaagauuauuc

SEQ ID NO: 1933942 - RNA, 19 nt, Homo sapiens
  misc_RNA (1)...(19): siRNA sense strand
gaugaaaagaggaagcuua

SEQ ID NO: 1933943 - RNA, 19 nt, Homo sapiens
  misc_RNA (1)...(19): siRNA sense strand
uuaaagaagacacagaguu

SEQ ID NO: 1933944 - RNA, 19 nt, Homo sapiens
  misc_RNA (1)...(19): siRNA sense strand
aacccagaguuuagaagua

SEQ ID NO: 1933945 - RNA, 19 nt, Homo sapiens
  misc_RNA (1)...(19): siRNA sense strand
accgagaacuuuacagugu

SEQ ID NO: 1933946 - RNA, 19 nt, Homo sapiens
  misc_RNA (1)...(19): siRNA sense strand
gagucgguauuucuucaau

SEQ ID NO: 1933947 - RNA, 19 nt, Homo sapiens
  misc_RNA (1)...(19): siRNA sense strand
ggaaacugcuuagaaaagu

SEQ ID NO: 1933948 - RNA, 19 nt, Homo sapiens
  misc_RNA (1)...(19): siRNA sense strand
caaguucaaacaacgaaga

SEQ ID NO: 1933949 - RNA, 19 nt, Homo sapiens
  misc_RNA (1)...(19): siRNA sense strand
gcaauaaaacuuuggacaa

SEQ ID NO: 1933950 - RNA, 19 nt, Homo sapiens
  misc_RNA (1)...(19): siRNA sense strand
agcagaagcuggcuaacau

SEQ ID NO: 1933951 - RNA, 19 nt, Homo sapiens
  misc_RNA (1)...(19): siRNA sense strand
uuacaaacgucuuaaucac

SEQ ID NO: 1933952 - RNA, 19 nt, Homo sapiens
  misc_RNA (1)...(19): siRNA sense strand
gaacuucaauuuuccuaac

SEQ ID NO: 1933953 - RNA, 19 nt, Homo sapiens
  misc_RNA (1)...(19): siRNA sense strand
gcauaacccagaguuuaga

SEQ ID NO: 1933954 - RNA, 19 nt, Homo sapiens
  misc_RNA (1)...(19): siRNA sense strand
ucugcugacuguaaaauua

SEQ ID NO: 1933955 - RNA, 19 nt, Homo sapiens
  misc_RNA (1)...(19): siRNA sense strand
aagaccaucucagaaaguu

SEQ ID NO: 1933956 - RNA, 19 nt, Homo sapiens
  misc_RNA (1)...(19): siRNA sense strand
ggccuuaaggagaaaguuu

SEQ ID NO: 1933957 - RNA, 19 nt, Homo sapiens
  misc_RNA (1)...(19): siRNA sense strand
gacaccaucuuuccaucuc

SEQ ID NO: 1933958 - RNA, 19 nt, Homo sapiens
  misc_RNA (1)...(19): siRNA sense strand
gaaaccuaacuccaaagug

SEQ ID NO: 1933959 - RNA, 19 nt, Homo sapiens
  misc_RNA (1)...(19): siRNA sense strand
caccuguguugcucagaaa

SEQ ID NO: 1933960 - RNA, 19 nt, Homo sapiens
  misc_RNA (1)...(19): siRNA sense strand
gagaugcaauaaaacuuug

SEQ ID NO: 1933961 - RNA, 19 nt, Homo sapiens
  misc_RNA (1)...(19): siRNA sense strand
ccaacucugccacuuucua

SEQ ID NO: 1933962 - RNA, 19 nt, Homo sapiens
  misc_RNA (1)...(19): siRNA sense strand
gccaaagccgaaagauuau

SEQ ID NO: 1933963 - RNA, 19 nt, Homo sapiens
  misc_RNA (1)...(19): siRNA sense strand
aagcuguggucaaacaugu

SEQ ID NO: 1933964 - RNA, 19 nt, Homo sapiens
  misc_RNA (1)...(19): siRNA sense strand
cacuuucaguccaagcuaa

SEQ ID NO: 1933965 - RNA, 19 nt, Homo sapiens
  misc_RNA (1)...(19): siRNA sense strand
cuuaaucacuccuggaaaa

SEQ ID NO: 1933966 - RNA, 19 nt, Homo sapiens
  misc_RNA (1)...(19): siRNA sense strand
cgacucgaguuacaaacgu

SEQ ID NO: 1933967 - RNA, 19 nt, Homo sapiens
  misc_RNA (1)...(19): siRNA sense strand
ucucugacuugcagcaugu

SEQ ID NO: 1933968 - RNA, 19 nt, Homo sapiens
  misc_RNA (1)...(19): siRNA sense strand
acccagaguuuagaaguau

SEQ ID NO: 1933969 - RNA, 19 nt, Homo sapiens
  misc_RNA (1)...(19): siRNA sense strand
uuucaguccaagcuaauua

SEQ ID NO: 1933970 - RNA, 19 nt, Homo sapiens
  misc_RNA (1)...(19): siRNA sense strand
uaacaucauccuggaacuu

SEQ ID NO: 1933971 - RNA, 19 nt, Homo sapiens
  misc_RNA (1)...(19): siRNA sense strand
gaaaacccagucucgcuaa

SEQ ID NO: 1933972 - RNA, 19 nt, Homo sapiens
  misc_RNA (1)...(19): siRNA sense strand
ccacagccagccagccauu

SEQ ID NO: 1933973 - RNA, 19 nt, Homo sapiens
  misc_RNA (1)...(19): siRNA sense strand
gugccugccugcguucuga

SEQ ID NO: 1933974 - RNA, 19 nt, Homo sapiens
  misc_RNA (1)...(19): siRNA sense strand
ccaccgagaacuuuacagu

SEQ ID NO: 1933975 - RNA, 19 nt, Homo sapiens
  misc_RNA (1)...(19): siRNA sense strand
uccaagcuguggucaaaca

SEQ ID NO: 1933976 - RNA, 19 nt, Homo sapiens
  misc_RNA (1)...(19): siRNA sense strand
aggaagcacugaagaccau

SEQ ID NO: 1933977 - RNA, 19 nt, Homo sapiens
  misc_RNA (1)...(19): siRNA sense strand
ccagaguuuagaaguauug

SEQ ID NO: 1933978 - RNA, 19 nt, Homo sapiens
  misc_RNA (1)...(19): siRNA sense strand
cuccaacucugccacuuuc

SEQ ID NO: 1933979 - RNA, 19 nt, Homo sapiens
  misc_RNA (1)...(19): siRNA sense strand
aaacaacgaagacgaaagc

SEQ ID NO: 1933980 - RNA, 19 nt, Homo sapiens
  misc_RNA (1)...(19): siRNA sense strand
cagaagcuggcuaacauca

SEQ ID NO: 1933981 - RNA, 19 nt, Homo sapiens
  misc_RNA (1)...(19): siRNA sense strand
uaacccagaguuuagaagu

SEQ ID NO: 1933982 - RNA, 19 nt, Homo sapiens
  misc_RNA (1)...(19): siRNA sense strand
gcagaagcuggcuaacauc

SEQ ID NO: 1933983 - RNA, 19 nt, Homo sapiens
  misc_RNA (1)...(19): siRNA sense strand
cugcggaaacugcuuagaa

SEQ ID NO: 1933984 - RNA, 19 nt, Homo sapiens
  misc_RNA (1)...(19): siRNA sense strand
ucaaacaacgaagacgaaa

SEQ ID NO: 1933985 - RNA, 19 nt, Homo sapiens
  misc_RNA (1)...(19): siRNA sense strand
aagaagacacagaguuuag

SEQ ID NO: 1933986 - RNA, 19 nt, Homo sapiens
  misc_RNA (1)...(19): siRNA sense strand
aagccaaagccgaaagauu

SEQ ID NO: 1933987 - RNA, 19 nt, Homo sapiens
  misc_RNA (1)...(19): siRNA sense strand
caacucugccacuuucuac

SEQ ID NO: 1933988 - RNA, 19 nt, Homo sapiens
  misc_RNA (1)...(19): siRNA sense strand
ccucucacuuucaguccaa

SEQ ID NO: 1933989 - RNA, 19 nt, Homo sapiens
  misc_RNA (1)...(19): siRNA sense strand
ccaaagccgaaagauuauu

SEQ ID NO: 1933990 - RNA, 19 nt, Homo sapiens
  misc_RNA (1)...(19): siRNA sense strand
gcuuauaccaucgccgaaa

SEQ ID NO: 1933991 - RNA, 19 nt, Homo sapiens
  misc_RNA (1)...(19): siRNA sense strand
gaacugcauaacccagagu

SEQ ID NO: 1933992 - RNA, 19 nt, Homo sapiens
  misc_RNA (1)...(19): siRNA sense strand
ucgaguuacaaacgucuua

SEQ ID NO: 1933993 - RNA, 19 nt, Homo sapiens
  misc_RNA (1)...(19): siRNA sense strand
acaacgaagacgaaagcua

SEQ ID NO: 1933994 - RNA, 19 nt, Homo sapiens
  misc_RNA (1)...(19): siRNA sense strand
gauauaucucaaagcagaa

SEQ ID NO: 1933995 - RNA, 19 nt, Homo sapiens
  misc_RNA (1)...(19): siRNA sense strand
uuagaaaagucgauguaga

SEQ ID NO: 1933996 - RNA, 19 nt, Homo sapiens
  misc_RNA (1)...(19): siRNA sense strand
ugaaaccuaacuccaaagu

SEQ ID NO: 1933997 - RNA, 19 nt, Homo sapiens
  misc_RNA (1)...(19): siRNA sense strand
auguuacccugaaaccuaa

SEQ ID NO: 1933998 - RNA, 19 nt, Homo sapiens
  misc_RNA (1)...(19): siRNA sense strand
gggcauagacagcuuauuc

SEQ ID NO: 1933999 - RNA, 19 nt, Homo sapiens
  misc_RNA (1)...(19): siRNA sense strand
ggagaaggaggcccuggua

SEQ ID NO: 1934000 - RNA, 19 nt, Homo sapiens
  misc_RNA (1)...(19): siRNA sense strand
ggacagcuuccacacagaa

SEQ ID NO: 1934001 - RNA, 19 nt, Homo sapiens
  misc_RNA (1)...(19): siRNA sense strand
caagaugaccgacaacaag

SEQ ID NO: 1934002 - RNA, 19 nt, Homo sapiens
  misc_RNA (1)...(19): siRNA sense strand
gagcuucgagggugauuug

SEQ ID NO: 1934003 - RNA, 19 nt, Homo sapiens
  misc_RNA (1)...(19): siRNA sense strand
cgagggugauuugaaggua

SEQ ID NO: 1934004 - RNA, 19 nt, Homo sapiens
  misc_RNA (1)...(19): siRNA sense strand
guggccuucuggaucauua

SEQ ID NO: 1934005 - RNA, 19 nt, Homo sapiens
  misc_RNA (1)...(19): siRNA sense strand
ucgacaagaugaccgacaa

SEQ ID NO: 1934006 - RNA, 19 nt, Homo sapiens
  misc_RNA (1)...(19): siRNA sense strand
cugcagcuccuauccauga

SEQ ID NO: 1934007 - RNA, 19 nt, Homo sapiens
  misc_RNA (1)...(19): siRNA sense strand
cggguggccuucuggauca

SEQ ID NO: 1934008 - RNA, 19 nt, Homo sapiens
  misc_RNA (1)...(19): siRNA sense strand
ccugggaacuaccacaaag

SEQ ID NO: 1934009 - RNA, 19 nt, Homo sapiens
  misc_RNA (1)...(19): siRNA sense strand
ccagccaccuccagaucga

SEQ ID NO: 1934010 - RNA, 19 nt, Homo sapiens
  misc_RNA (1)...(19): siRNA sense strand
gcauagacagcuuauucuc

SEQ ID NO: 1934011 - RNA, 19 nt, Homo sapiens
  misc_RNA (1)...(19): siRNA sense strand
uacccaggauggaggagaa

SEQ ID NO: 1934012 - RNA, 19 nt, Homo sapiens
  misc_RNA (1)...(19): siRNA sense strand
acaagaugaccgacaacaa

SEQ ID NO: 1934013 - RNA, 19 nt, Homo sapiens
  misc_RNA (1)...(19): siRNA sense strand
gaugaccgacaacaagaca

SEQ ID NO: 1934014 - RNA, 19 nt, Homo sapiens
  misc_RNA (1)...(19): siRNA sense strand
gcaaggggacccacaagga

SEQ ID NO: 1934015 - RNA, 19 nt, Homo sapiens
  misc_RNA (1)...(19): siRNA sense strand
agaaugugguggcauccau

SEQ ID NO: 1934016 - RNA, 19 nt, Homo sapiens
  misc_RNA (1)...(19): siRNA sense strand
gaugcugacgcccaagaga

SEQ ID NO: 1934017 - RNA, 19 nt, Homo sapiens
  misc_RNA (1)...(19): siRNA sense strand
cauagacagcuuauucucu

SEQ ID NO: 1934018 - RNA, 19 nt, Homo sapiens
  misc_RNA (1)...(19): siRNA sense strand
aagaugaccgacaacaaga

SEQ ID NO: 1934019 - RNA, 19 nt, Homo sapiens
  misc_RNA (1)...(19): siRNA sense strand
cagcagagauggacucaua

SEQ ID NO: 1934020 - RNA, 19 nt, Homo sapiens
  misc_RNA (1)...(19): siRNA sense strand
caaagaaccugcagaccua

SEQ ID NO: 1934021 - RNA, 19 nt, Homo sapiens
  misc_RNA (1)...(19): siRNA sense strand
gaagauaaacuaccagaaa

SEQ ID NO: 1934022 - RNA, 19 nt, Homo sapiens
  misc_RNA (1)...(19): siRNA sense strand
gagauggacucauaucaga

SEQ ID NO: 1934023 - RNA, 19 nt, Homo sapiens
  misc_RNA (1)...(19): siRNA sense strand
ggaagaagauaaacuacca

SEQ ID NO: 1934024 - RNA, 19 nt, Homo sapiens
  misc_RNA (1)...(19): siRNA sense strand
ggaccggccaccaauauua

SEQ ID NO: 1934025 - RNA, 19 nt, Homo sapiens
  misc_RNA (1)...(19): siRNA sense strand
caaccaaagucaucuguuc

SEQ ID NO: 1934026 - RNA, 19 nt, Homo sapiens
  misc_RNA (1)...(19): siRNA sense strand
ucaaagagcaugaauauac

SEQ ID NO: 1934027 - RNA, 19 nt, Homo sapiens
  misc_RNA (1)...(19): siRNA sense strand
gcacccaaacaauauaaua

SEQ ID NO: 1934028 - RNA, 19 nt, Homo sapiens
  misc_RNA (1)...(19): siRNA sense strand
gggagaagcccauguugaa

SEQ ID NO: 1934029 - RNA, 19 nt, Homo sapiens
  misc_RNA (1)...(19): siRNA sense strand
cagcaaacuuggaagaaga

SEQ ID NO: 1934030 - RNA, 19 nt, Homo sapiens
  misc_RNA (1)...(19): siRNA sense strand
gcaugaauauacggaguuu

SEQ ID NO: 1934031 - RNA, 19 nt, Homo sapiens
  misc_RNA (1)...(19): siRNA sense strand
cauaucagacucaacauuu

SEQ ID NO: 1934032 - RNA, 19 nt, Homo sapiens
  misc_RNA (1)...(19): siRNA sense strand
aaagucaucuguucgauag

SEQ ID NO: 1934033 - RNA, 19 nt, Homo sapiens
  misc_RNA (1)...(19): siRNA sense strand
gcagaaaaccucauaaaga

SEQ ID NO: 1934034 - RNA, 19 nt, Homo sapiens
  misc_RNA (1)...(19): siRNA sense strand
cgacuggaguuacuugguu

SEQ ID NO: 1934035 - RNA, 19 nt, Homo sapiens
  misc_RNA (1)...(19): siRNA sense strand
ggcacauccuggaguaaua

SEQ ID NO: 1934036 - RNA, 19 nt, Homo sapiens
  misc_RNA (1)...(19): siRNA sense strand
caaagucaucuguucgaua

SEQ ID NO: 1934037 - RNA, 19 nt, Homo sapiens
  misc_RNA (1)...(19): siRNA sense strand
gcacauccuggaguaauaa

SEQ ID NO: 1934038 - RNA, 19 nt, Homo sapiens
  misc_RNA (1)...(19): siRNA sense strand
gcagcaaacuuggaagaag

SEQ ID NO: 1934039 - RNA, 19 nt, Homo sapiens
  misc_RNA (1)...(19): siRNA sense strand
ggacauggcaucugaaucc

SEQ ID NO: 1934040 - RNA, 19 nt, Homo sapiens
  misc_RNA (1)...(19): siRNA sense strand
gggugucuguguaggauuu

SEQ ID NO: 1934041 - RNA, 19 nt, Homo sapiens
  misc_RNA (1)...(19): siRNA sense strand
ggacucauaucagacucaa

SEQ ID NO: 1934042 - RNA, 19 nt, Homo sapiens
  misc_RNA (1)...(19): siRNA sense strand
uguguaggauuuaguaaug

SEQ ID NO: 1934043 - RNA, 19 nt, Homo sapiens
  misc_RNA (1)...(19): siRNA sense strand
ugacagcccgugcuucaaa

SEQ ID NO: 1934044 - RNA, 19 nt, Homo sapiens
  misc_RNA (1)...(19): siRNA sense strand
caaagagcaugaauauacg

SEQ ID NO: 1934045 - RNA, 19 nt, Homo sapiens
  misc_RNA (1)...(19): siRNA sense strand
ggacuucacccagcugaug

SEQ ID NO: 1934046 - RNA, 19 nt, Homo sapiens
  misc_RNA (1)...(19): siRNA sense strand
gguggaauugcacgacuua

SEQ ID NO: 1934047 - RNA, 19 nt, Homo sapiens
  misc_RNA (1)...(19): siRNA sense strand
ggaauugcacgacuuagag

SEQ ID NO: 1934048 - RNA, 19 nt, Homo sapiens
  misc_RNA (1)...(19): siRNA sense strand
agaagcccauguugaaguu

SEQ ID NO: 1934049 - RNA, 19 nt, Homo sapiens
  misc_RNA (1)...(19): siRNA sense strand
gagaagcccauguugaagu

SEQ ID NO: 1934050 - RNA, 19 nt, Homo sapiens
  misc_RNA (1)...(19): siRNA sense strand
cccuagagcuccaagaugu

SEQ ID NO: 1934051 - RNA, 19 nt, Homo sapiens
  misc_RNA (1)...(19): siRNA sense strand
cagaaaaccucauaaagag

SEQ ID NO: 1934052 - RNA, 19 nt, Homo sapiens
  misc_RNA (1)...(19): siRNA sense strand
uaccagaaaucccagaaag

SEQ ID NO: 1934053 - RNA, 19 nt, Homo sapiens
  misc_RNA (1)...(19): siRNA sense strand
cuucaaagcaaacccuuaa

SEQ ID NO: 1934054 - RNA, 19 nt, Homo sapiens
  misc_RNA (1)...(19): siRNA sense strand
ugacagcuguaaaguggau

SEQ ID NO: 1934055 - RNA, 19 nt, Homo sapiens
  misc_RNA (1)...(19): siRNA sense strand
ucacccagcugauggacau

SEQ ID NO: 1934056 - RNA, 19 nt, Homo sapiens
  misc_RNA (1)...(19): siRNA sense strand
auacggaguuugggaaaug

SEQ ID NO: 1934057 - RNA, 19 nt, Homo sapiens
  misc_RNA (1)...(19): siRNA sense strand
caaacuuggaagaagauaa

SEQ ID NO: 1934058 - RNA, 19 nt, Homo sapiens
  misc_RNA (1)...(19): siRNA sense strand
cccaaacaauauaauagga

SEQ ID NO: 1934059 - RNA, 19 nt, Homo sapiens
  misc_RNA (1)...(19): siRNA sense strand
gggcacccaaacaauauaa

SEQ ID NO: 1934060 - RNA, 19 nt, Homo sapiens
  misc_RNA (1)...(19): siRNA sense strand
gcagagauggacucauauc

SEQ ID NO: 1934061 - RNA, 19 nt, Homo sapiens
  misc_RNA (1)...(19): siRNA sense strand
gaaaucccagaaagaggaa

SEQ ID NO: 1934062 - RNA, 19 nt, Homo sapiens
  misc_RNA (1)...(19): siRNA sense strand
ugaggaguuugaagccauu

SEQ ID NO: 1934063 - RNA, 19 nt, Homo sapiens
  misc_RNA (1)...(19): siRNA sense strand
ccagaaaucccagaaagag

SEQ ID NO: 1934064 - RNA, 19 nt, Homo sapiens
  misc_RNA (1)...(19): siRNA sense strand
gguugugaaugggcaguuu

SEQ ID NO: 1934065 - RNA, 19 nt, Homo sapiens
  misc_RNA (1)...(19): siRNA sense strand
ugaagccauugcugagcua

SEQ ID NO: 1934066 - RNA, 19 nt, Homo sapiens
  misc_RNA (1)...(19): siRNA sense strand
ucgauagccugacccuaga

SEQ ID NO: 1934067 - RNA, 19 nt, Homo sapiens
  misc_RNA (1)...(19): siRNA sense strand
ggccacaacuauuuucuug

SEQ ID NO: 1934068 - RNA, 19 nt, Homo sapiens
  misc_RNA (1)...(19): siRNA sense strand
ucaauucccagcagagaug

SEQ ID NO: 1934069 - RNA, 19 nt, Homo sapiens
  misc_RNA (1)...(19): siRNA sense strand
ccaaagucaucuguucgau

SEQ ID NO: 1934070 - RNA, 19 nt, Homo sapiens
  misc_RNA (1)...(19): siRNA sense strand
cguggacguuucuuacuuc

SEQ ID NO: 1934071 - RNA, 19 nt, Homo sapiens
  misc_RNA (1)...(19): siRNA sense strand
ggugcauccugacaacuca

SEQ ID NO: 1934072 - RNA, 19 nt, Homo sapiens
  misc_RNA (1)...(19): siRNA sense strand
ggaagacugacccgguuuc

SEQ ID NO: 1934073 - RNA, 19 nt, Homo sapiens
  misc_RNA (1)...(19): siRNA sense strand
gcaaacuuggaagaagaua

SEQ ID NO: 1934074 - RNA, 19 nt, Homo sapiens
  misc_RNA (1)...(19): siRNA sense strand
cuuggaagaagauaaacua

SEQ ID NO: 1934075 - RNA, 19 nt, Homo sapiens
  misc_RNA (1)...(19): siRNA sense strand
gaauugcacgacuuagagu

SEQ ID NO: 1934076 - RNA, 19 nt, Homo sapiens
  misc_RNA (1)...(19): siRNA sense strand
ccaccaauauuagaaaaug

SEQ ID NO: 1934077 - RNA, 19 nt, Homo sapiens
  misc_RNA (1)...(19): siRNA sense strand
ucauaucagacucaacauu

SEQ ID NO: 1934078 - RNA, 19 nt, Homo sapiens
  misc_RNA (1)...(19): siRNA sense strand
ggagaagcccauguugaag

SEQ ID NO: 1934079 - RNA, 19 nt, Homo sapiens
  misc_RNA (1)...(19): siRNA sense strand
gacccuagagcuccaagau

SEQ ID NO: 1934080 - RNA, 19 nt, Homo sapiens
  misc_RNA (1)...(19): siRNA sense strand
gcuggaccggccaccaaua

SEQ ID NO: 1934081 - RNA, 19 nt, Homo sapiens
  misc_RNA (1)...(19): siRNA sense strand
gcggaugguugggaaacug

SEQ ID NO: 1934082 - RNA, 19 nt, Homo sapiens
  misc_RNA (1)...(19): siRNA sense strand
gggaagacugacccgguuu

SEQ ID NO: 1934083 - RNA, 19 nt, Homo sapiens
  misc_RNA (1)...(19): siRNA sense strand
ccucgaguguccauucaag

SEQ ID NO: 1934084 - RNA, 19 nt, Homo sapiens
  misc_RNA (1)...(19): siRNA sense strand
gaccggccaccaauauuag

SEQ ID NO: 1934085 - RNA, 19 nt, Homo sapiens
  misc_RNA (1)...(19): siRNA sense strand
gacagcccgugcuucaaag

SEQ ID NO: 1934086 - RNA, 19 nt, Homo sapiens
  misc_RNA (1)...(19): siRNA sense strand
acucauaucagacucaaca

SEQ ID NO: 1934087 - RNA, 19 nt, Homo sapiens
  misc_RNA (1)...(19): siRNA sense strand
cgggagaagcccauguuga

SEQ ID NO: 1934088 - RNA, 19 nt, Homo sapiens
  misc_RNA (1)...(19): siRNA sense strand
gaaggcaaugcuccugaca

SEQ ID NO: 1934089 - RNA, 19 nt, Homo sapiens
  misc_RNA (1)...(19): siRNA sense strand
gauaaacuaccagaaaucc

SEQ ID NO: 1934090 - RNA, 19 nt, Homo sapiens
  misc_RNA (1)...(19): siRNA sense strand
cagagauggacucauauca

SEQ ID NO: 1934091 - RNA, 19 nt, Homo sapiens
  misc_RNA (1)...(19): siRNA sense strand
cgacgacuggaguuacuug

SEQ ID NO: 1934092 - RNA, 19 nt, Homo sapiens
  misc_RNA (1)...(19): siRNA sense strand
uuacuugguucccaugacu

SEQ ID NO: 1934093 - RNA, 19 nt, Homo sapiens
  misc_RNA (1)...(19): siRNA sense strand
ucaggaagaagccgugauc

SEQ ID NO: 1934094 - RNA, 19 nt, Homo sapiens
  misc_RNA (1)...(19): siRNA sense strand
uggaauugcacgacuuaga

SEQ ID NO: 1934095 - RNA, 19 nt, Homo sapiens
  misc_RNA (1)...(19): siRNA sense strand
ccgaaggagggaagacuga

SEQ ID NO: 1934096 - RNA, 19 nt, Homo sapiens
  misc_RNA (1)...(19): siRNA sense strand
gaagccgugaucaggcaaa

SEQ ID NO: 1934097 - RNA, 19 nt, Homo sapiens
  misc_RNA (1)...(19): siRNA sense strand
cacccaaacaauauaauag

SEQ ID NO: 1934098 - RNA, 19 nt, Homo sapiens
  misc_RNA (1)...(19): siRNA sense strand
aagacuggacugcaacuga

SEQ ID NO: 1934099 - RNA, 19 nt, Homo sapiens
  misc_RNA (1)...(19): siRNA sense strand
gauggacucauaucagacu

SEQ ID NO: 1934100 - RNA, 19 nt, Homo sapiens
  misc_RNA (1)...(19): siRNA sense strand
uugcacgacuuagaguauu

SEQ ID NO: 1934101 - RNA, 19 nt, Homo sapiens
  misc_RNA (1)...(19): siRNA sense strand
guacaaagcucauaaaucu

SEQ ID NO: 1934102 - RNA, 19 nt, Homo sapiens
  misc_RNA (1)...(19): siRNA sense strand
ggaagaacauuaccuaaau

SEQ ID NO: 1934103 - RNA, 19 nt, Homo sapiens
  misc_RNA (1)...(19): siRNA sense strand
gaagaagcaucucauaaau

SEQ ID NO: 1934104 - RNA, 19 nt, Homo sapiens
  misc_RNA (1)...(19): siRNA sense strand
gaacaaccaugaaggaguu

SEQ ID NO: 1934105 - RNA, 19 nt, Homo sapiens
  misc_RNA (1)...(19): siRNA sense strand
ugaagcaagucaaagauua

SEQ ID NO: 1934106 - RNA, 19 nt, Homo sapiens
  misc_RNA (1)...(19): siRNA sense strand
gcaagugguuaauuaugua

SEQ ID NO: 1934107 - RNA, 19 nt, Homo sapiens
  misc_RNA (1)...(19): siRNA sense strand
gaaauuguacuacugguaa

SEQ ID NO: 1934108 - RNA, 19 nt, Homo sapiens
  misc_RNA (1)...(19): siRNA sense strand
gaaccaagcgggaauuuau

SEQ ID NO: 1934109 - RNA, 19 nt, Homo sapiens
  misc_RNA (1)...(19): siRNA sense strand
gaaauggagucuguugauu

SEQ ID NO: 1934110 - RNA, 19 nt, Homo sapiens
  misc_RNA (1)...(19): siRNA sense strand
ggagucuguugauuuaaua

SEQ ID NO: 1934111 - RNA, 19 nt, Homo sapiens
  misc_RNA (1)...(19): siRNA sense strand
ugaaagagcuagagauuac

SEQ ID NO: 1934112 - RNA, 19 nt, Homo sapiens
  misc_RNA (1)...(19): siRNA sense strand
caucuuagcucgucaucuu

SEQ ID NO: 1934113 - RNA, 19 nt, Homo sapiens
  misc_RNA (1)...(19): siRNA sense strand
gcucagaaguuaguucaaa

SEQ ID NO: 1934114 - RNA, 19 nt, Homo sapiens
  misc_RNA (1)...(19): siRNA sense strand
gaagcuaucugaaguugca

SEQ ID NO: 1934115 - RNA, 19 nt, Homo sapiens
  misc_RNA (1)...(19): siRNA sense strand
gaacauaugaguauucaca

SEQ ID NO: 1934116 - RNA, 19 nt, Homo sapiens
  misc_RNA (1)...(19): siRNA sense strand
agaagcagcuaacaguaua

SEQ ID NO: 1934117 - RNA, 19 nt, Homo sapiens
  misc_RNA (1)...(19): siRNA sense strand
ucagaagucuuagagauuu

SEQ ID NO: 1934118 - RNA, 19 nt, Homo sapiens
  misc_RNA (1)...(19): siRNA sense strand
agacagaacuagaaacuuc

SEQ ID NO: 1934119 - RNA, 19 nt, Homo sapiens
  misc_RNA (1)...(19): siRNA sense strand
aauggagucuguugauuua

SEQ ID NO: 1934120 - RNA, 19 nt, Homo sapiens
  misc_RNA (1)...(19): siRNA sense strand
gaaaguguacauaagcuaa

SEQ ID NO: 1934121 - RNA, 19 nt, Homo sapiens
  misc_RNA (1)...(19): siRNA sense strand
cuacauagaugcucgaaca

SEQ ID NO: 1934122 - RNA, 19 nt, Homo sapiens
  misc_RNA (1)...(19): siRNA sense strand
cagaaggcauguaaagaaa

SEQ ID NO: 1934123 - RNA, 19 nt, Homo sapiens
  misc_RNA (1)...(19): siRNA sense strand
gauaagugcuauaguugga

SEQ ID NO: 1934124 - RNA, 19 nt, Homo sapiens
  misc_RNA (1)...(19): siRNA sense strand
caacaaguuuaccuacuga

SEQ ID NO: 1934125 - RNA, 19 nt, Homo sapiens
  misc_RNA (1)...(19): siRNA sense strand
agaagcaucucauaaaugu

SEQ ID NO: 1934126 - RNA, 19 nt, Homo sapiens
  misc_RNA (1)...(19): siRNA sense strand
gaagcuauucaaacuguua

SEQ ID NO: 1934127 - RNA, 19 nt, Homo sapiens
  misc_RNA (1)...(19): siRNA sense strand
gaaagccguucccaaguca

SEQ ID NO: 1934128 - RNA, 19 nt, Homo sapiens
  misc_RNA (1)...(19): siRNA sense strand
guucgaggcuaucauugua

SEQ ID NO: 1934129 - RNA, 19 nt, Homo sapiens
  misc_RNA (1)...(19): siRNA sense strand
gcacaucuuauucgucaua

SEQ ID NO: 1934130 - RNA, 19 nt, Homo sapiens
  misc_RNA (1)...(19): siRNA sense strand
acagguggcucagaaguua

SEQ ID NO: 1934131 - RNA, 19 nt, Homo sapiens
  misc_RNA (1)...(19): siRNA sense strand
gaagaaagauugguauucc

SEQ ID NO: 1934132 - RNA, 19 nt, Homo sapiens
  misc_RNA (1)...(19): siRNA sense strand
gaacuuguguuuguugaca

SEQ ID NO: 1934133 - RNA, 19 nt, Homo sapiens
  misc_RNA (1)...(19): siRNA sense strand
gcaagcacuucaagaaaca

SEQ ID NO: 1934134 - RNA, 19 nt, Homo sapiens
  misc_RNA (1)...(19): siRNA sense strand
aaacauaggcagaaaguug

SEQ ID NO: 1934135 - RNA, 19 nt, Homo sapiens
  misc_RNA (1)...(19): siRNA sense strand
agaagaagcaucucauaaa

SEQ ID NO: 1934136 - RNA, 19 nt, Homo sapiens
  misc_RNA (1)...(19): siRNA sense strand
uacauaagcuaauggaaga

SEQ ID NO: 1934137 - RNA, 19 nt, Homo sapiens
  misc_RNA (1)...(19): siRNA sense strand
gaacacagaagaagcaucu

SEQ ID NO: 1934138 - RNA, 19 nt, Homo sapiens
  misc_RNA (1)...(19): siRNA sense strand
cgacaacguucuguuaaug

SEQ ID NO: 1934139 - RNA, 19 nt, Homo sapiens
  misc_RNA (1)...(19): siRNA sense strand
gcaagucaaagauuacauu

SEQ ID NO: 1934140 - RNA, 19 nt, Homo sapiens
  misc_RNA (1)...(19): siRNA sense strand
guagagguagcacauauuu

SEQ ID NO: 1934141 - RNA, 19 nt, Homo sapiens
  misc_RNA (1)...(19): siRNA sense strand
gaacacuccguaaacauau

SEQ ID NO: 1934142 - RNA, 19 nt, Homo sapiens
  misc_RNA (1)...(19): siRNA sense strand
cgaacacuccguaaacaua

SEQ ID NO: 1934143 - RNA, 19 nt, Homo sapiens
  misc_RNA (1)...(19): siRNA sense strand
gaaaggaagagcaaagcaa

SEQ ID NO: 1934144 - RNA, 19 nt, Homo sapiens
  misc_RNA (1)...(19): siRNA sense strand
gagacgauacgcccuuaua

SEQ ID NO: 1934145 - RNA, 19 nt, Homo sapiens
  misc_RNA (1)...(19): siRNA sense strand
gaacuagaaacuucaaaca

SEQ ID NO: 1934146 - RNA, 19 nt, Homo sapiens
  misc_RNA (1)...(19): siRNA sense strand
cagaaauguuggaagaauu

SEQ ID NO: 1934147 - RNA, 19 nt, Homo sapiens
  misc_RNA (1)...(19): siRNA sense strand
cagaagcuauucaaacugu

SEQ ID NO: 1934148 - RNA, 19 nt, Homo sapiens
  misc_RNA (1)...(19): siRNA sense strand
ugacuaaauuccacagaga

SEQ ID NO: 1934149 - RNA, 19 nt, Homo sapiens
  misc_RNA (1)...(19): siRNA sense strand
gaucuucgccagcacauga

SEQ ID NO: 1934150 - RNA, 19 nt, Homo sapiens
  misc_RNA (1)...(19): siRNA sense strand
guaaugaaucggaagauga

SEQ ID NO: 1934151 - RNA, 19 nt, Homo sapiens
  misc_RNA (1)...(19): siRNA sense strand
gcugaugcccgaucucuaa

SEQ ID NO: 1934152 - RNA, 19 nt, Homo sapiens
  misc_RNA (1)...(19): siRNA sense strand
ggagacacaugaacaacca

SEQ ID NO: 1934153 - RNA, 19 nt, Homo sapiens
  misc_RNA (1)...(19): siRNA sense strand
ugugauaagugcuauaguu

SEQ ID NO: 1934154 - RNA, 19 nt, Homo sapiens
  misc_RNA (1)...(19): siRNA sense strand
gagaagcagcuaacaguau

SEQ ID NO: 1934155 - RNA, 19 nt, Homo sapiens
  misc_RNA (1)...(19): siRNA sense strand
cagaagaagcaucucauaa

SEQ ID NO: 1934156 - RNA, 19 nt, Homo sapiens
  misc_RNA (1)...(19): siRNA sense strand
gagacuaugugccuugcaa

SEQ ID NO: 1934157 - RNA, 19 nt, Homo sapiens
  misc_RNA (1)...(19): siRNA sense strand
gagaagaaaguaaugaauc

SEQ ID NO: 1934158 - RNA, 19 nt, Homo sapiens
  misc_RNA (1)...(19): siRNA sense strand
ugaaggaguuaagccauuu

SEQ ID NO: 1934159 - RNA, 19 nt, Homo sapiens
  misc_RNA (1)...(19): siRNA sense strand
ucagaaggcauguaaagaa

SEQ ID NO: 1934160 - RNA, 19 nt, Homo sapiens
  misc_RNA (1)...(19): siRNA sense strand
ccaauuccacgucuaauga

SEQ ID NO: 1934161 - RNA, 19 nt, Homo sapiens
  misc_RNA (1)...(19): siRNA sense strand
gaauuugccuauacuucug

SEQ ID NO: 1934162 - RNA, 19 nt, Homo sapiens
  misc_RNA (1)...(19): siRNA sense strand
uaaaacagcugaacgaaca

SEQ ID NO: 1934163 - RNA, 19 nt, Homo sapiens
  misc_RNA (1)...(19): siRNA sense strand
gcaaaauuaugcuggaaaa

SEQ ID NO: 1934164 - RNA, 19 nt, Homo sapiens
  misc_RNA (1)...(19): siRNA sense strand
gaguauaggagacacauga

SEQ ID NO: 1934165 - RNA, 19 nt, Homo sapiens
  misc_RNA (1)...(19): siRNA sense strand
gaagaaaggaagagcaaag

SEQ ID NO: 1934166 - RNA, 19 nt, Homo sapiens
  misc_RNA (1)...(19): siRNA sense strand
ccaaguaccuuugcucagu

SEQ ID NO: 1934167 - RNA, 19 nt, Homo sapiens
  misc_RNA (1)...(19): siRNA sense strand
gaugauacuuauagaagca

SEQ ID NO: 1934168 - RNA, 19 nt, Homo sapiens
  misc_RNA (1)...(19): siRNA sense strand
gaagaugaccugagcaacu

SEQ ID NO: 1934169 - RNA, 19 nt, Homo sapiens
  misc_RNA (1)...(19): siRNA sense strand
aaagagaugcuaaagagaa

SEQ ID NO: 1934170 - RNA, 19 nt, Homo sapiens
  misc_RNA (1)...(19): siRNA sense strand
gcccugaugaugauacuua

SEQ ID NO: 1934171 - RNA, 19 nt, Homo sapiens
  misc_RNA (1)...(19): siRNA sense strand
gccagaagcugagcagaau

SEQ ID NO: 1934172 - RNA, 19 nt, Homo sapiens
  misc_RNA (1)...(19): siRNA sense strand
gagggaaccacaacaaguu

SEQ ID NO: 1934173 - RNA, 19 nt, Homo sapiens
  misc_RNA (1)...(19): siRNA sense strand
ggacuuacgaguacagaau

SEQ ID NO: 1934174 - RNA, 19 nt, Homo sapiens
  misc_RNA (1)...(19): siRNA sense strand
ccuugaaucuggagaagaa

SEQ ID NO: 1934175 - RNA, 19 nt, Homo sapiens
  misc_RNA (1)...(19): siRNA sense strand
ggaagaaagauugguauuc

SEQ ID NO: 1934176 - RNA, 19 nt, Homo sapiens
  misc_RNA (1)...(19): siRNA sense strand
agaagcaguuccaguguga

SEQ ID NO: 1934177 - RNA, 19 nt, Homo sapiens
  misc_RNA (1)...(19): siRNA sense strand
cuaaagagaacacagaaga

SEQ ID NO: 1934178 - RNA, 19 nt, Homo sapiens
  misc_RNA (1)...(19): siRNA sense strand
ucagaaauguuggaagaau

SEQ ID NO: 1934179 - RNA, 19 nt, Homo sapiens
  misc_RNA (1)...(19): siRNA sense strand
caaguaccuuugcucaguu

SEQ ID NO: 1934180 - RNA, 19 nt, Homo sapiens
  misc_RNA (1)...(19): siRNA sense strand
caugaaagagcuagagauu

SEQ ID NO: 1934181 - RNA, 19 nt, Homo sapiens
  misc_RNA (1)...(19): siRNA sense strand
gauacgcccuuauaaugca

SEQ ID NO: 1934182 - RNA, 19 nt, Homo sapiens
  misc_RNA (1)...(19): siRNA sense strand
gaucgaucccguccaauau

SEQ ID NO: 1934183 - RNA, 19 nt, Homo sapiens
  misc_RNA (1)...(19): siRNA sense strand
gaagggcgaaguacaaaca

SEQ ID NO: 1934184 - RNA, 19 nt, Homo sapiens
  misc_RNA (1)...(19): siRNA sense strand
uaagaagggcgaaguacaa

SEQ ID NO: 1934185 - RNA, 19 nt, Homo sapiens
  misc_RNA (1)...(19): siRNA sense strand
gaagaguacaaagcucaua

SEQ ID NO: 1934186 - RNA, 19 nt, Homo sapiens
  misc_RNA (1)...(19): siRNA sense strand
uagcgaagccuacauagau

SEQ ID NO: 1934187 - RNA, 19 nt, Homo sapiens
  misc_RNA (1)...(19): siRNA sense strand
gugcuuaacauguggagua

SEQ ID NO: 1934188 - RNA, 19 nt, Homo sapiens
  misc_RNA (1)...(19): siRNA sense strand
ucaagaaacaccaaccaaa

SEQ ID NO: 1934189 - RNA, 19 nt, Homo sapiens
  misc_RNA (1)...(19): siRNA sense strand
gcaaaugccaggagaaacu

SEQ ID NO: 1934190 - RNA, 19 nt, Homo sapiens
  misc_RNA (1)...(19): siRNA sense strand
gcacaaacugaaacaugaa

SEQ ID NO: 1934191 - RNA, 19 nt, Homo sapiens
  misc_RNA (1)...(19): siRNA sense strand
caacagcaaagacaaacuu

SEQ ID NO: 1934192 - RNA, 19 nt, Homo sapiens
  misc_RNA (1)...(19): siRNA sense strand
ggagaagaaaguaaugaau

SEQ ID NO: 1934193 - RNA, 19 nt, Homo sapiens
  misc_RNA (1)...(19): siRNA sense strand
acaaacaucuuggugugaa

SEQ ID NO: 1934194 - RNA, 19 nt, Homo sapiens
  misc_RNA (1)...(19): siRNA sense strand
gcacaugaacaaacaucuu

SEQ ID NO: 1934195 - RNA, 19 nt, Homo sapiens
  misc_RNA (1)...(19): siRNA sense strand
caagaaacaccaaccaaag

SEQ ID NO: 1934196 - RNA, 19 nt, Homo sapiens
  misc_RNA (1)...(19): siRNA sense strand
cuagaaacuucaaacaaca

SEQ ID NO: 1934197 - RNA, 19 nt, Homo sapiens
  misc_RNA (1)...(19): siRNA sense strand
ggaguuaagccauuugagu

SEQ ID NO: 1934198 - RNA, 19 nt, Homo sapiens
  misc_RNA (1)...(19): siRNA sense strand
gaaggcauguaaagaaagc

SEQ ID NO: 1934199 - RNA, 19 nt, Homo sapiens
  misc_RNA (1)...(19): siRNA sense strand
caucagagucuucaucaau

SEQ ID NO: 1934200 - RNA, 19 nt, Homo sapiens
  misc_RNA (1)...(19): siRNA sense strand
gaagacauuccaaaacaua

SEQ ID NO: 1934201 - RNA, 19 nt, Homo sapiens
  misc_RNA (1)...(19): siRNA sense strand
gcucuuagcugaucucgaa

SEQ ID NO: 1934202 - RNA, 19 nt, Homo sapiens
  misc_RNA (1)...(19): siRNA sense strand
gcuacgaacugaaggauga

SEQ ID NO: 1934203 - RNA, 19 nt, Homo sapiens
  misc_RNA (1)...(19): siRNA sense strand
gagcugaacaucauccaua

SEQ ID NO: 1934204 - RNA, 19 nt, Homo sapiens
  misc_RNA (1)...(19): siRNA sense strand
ugaugaagauugaggagua

SEQ ID NO: 1934205 - RNA, 19 nt, Homo sapiens
  misc_RNA (1)...(19): siRNA sense strand
gauaaguacucaaagagau

SEQ ID NO: 1934206 - RNA, 19 nt, Homo sapiens
  misc_RNA (1)...(19): siRNA sense strand
gcaacagccuggacaagug

SEQ ID NO: 1934207 - RNA, 19 nt, Homo sapiens
  misc_RNA (1)...(19): siRNA sense strand
agacacagcuggaucuuuc

SEQ ID NO: 1934208 - RNA, 19 nt, Homo sapiens
  misc_RNA (1)...(19): siRNA sense strand
uaagauguuugcugagauu

SEQ ID NO: 1934209 - RNA, 19 nt, Homo sapiens
  misc_RNA (1)...(19): siRNA sense strand
ucaaagagauucccugaac

SEQ ID NO: 1934210 - RNA, 19 nt, Homo sapiens
  misc_RNA (1)...(19): siRNA sense strand
gagauuaugaugaagauug

SEQ ID NO: 1934211 - RNA, 19 nt, Homo sapiens
  misc_RNA (1)...(19): siRNA sense strand
ccaaugcacuggauuacau

SEQ ID NO: 1934212 - RNA, 19 nt, Homo sapiens
  misc_RNA (1)...(19): siRNA sense strand
ugaccaaccucuccaagau

SEQ ID NO: 1934213 - RNA, 19 nt, Homo sapiens
  misc_RNA (1)...(19): siRNA sense strand
gagaagaguggccuuaugu

SEQ ID NO: 1934214 - RNA, 19 nt, Homo sapiens
  misc_RNA (1)...(19): siRNA sense strand
gcagguaccgcaagaugaa

SEQ ID NO: 1934215 - RNA, 19 nt, Homo sapiens
  misc_RNA (1)...(19): siRNA sense strand
cagcagauccucaccaaug

SEQ ID NO: 1934216 - RNA, 19 nt, Homo sapiens
  misc_RNA (1)...(19): siRNA sense strand
gauguuugcugagauuaug

SEQ ID NO: 1934217 - RNA, 19 nt, Homo sapiens
  misc_RNA (1)...(19): siRNA sense strand
cgagaagaguggccuuaug

SEQ ID NO: 1934218 - RNA, 19 nt, Homo sapiens
  misc_RNA (1)...(19): siRNA sense strand
cguaugagcuucggagaga

SEQ ID NO: 1934219 - RNA, 19 nt, Homo sapiens
  misc_RNA (1)...(19): siRNA sense strand
ggaagcaggccaaccguau

SEQ ID NO: 1934220 - RNA, 19 nt, Homo sapiens
  misc_RNA (1)...(19): siRNA sense strand
gaagcagagcgucguauau

SEQ ID NO: 1934221 - RNA, 19 nt, Homo sapiens
  misc_RNA (1)...(19): siRNA sense strand
cccaaccuguccaucauua

SEQ ID NO: 1934222 - RNA, 19 nt, Homo sapiens
  misc_RNA (1)...(19): siRNA sense strand
ggauaaguacucaaagaga

SEQ ID NO: 1934223 - RNA, 19 nt, Homo sapiens
  misc_RNA (1)...(19): siRNA sense strand
uugcugagauuaugaugaa

SEQ ID NO: 1934224 - RNA, 19 nt, Homo sapiens
  misc_RNA (1)...(19): siRNA sense strand
ggaggaaggaggaagcuau

SEQ ID NO: 1934225 - RNA, 19 nt, Homo sapiens
  misc_RNA (1)...(19): siRNA sense strand
gaaggugggcuacgaacug

SEQ ID NO: 1934226 - RNA, 19 nt, Homo sapiens
  misc_RNA (1)...(19): siRNA sense strand
cgggauaaguacucaaaga

SEQ ID NO: 1934227 - RNA, 19 nt, Homo sapiens
  misc_RNA (1)...(19): siRNA sense strand
gaugaagauugaggaguau

SEQ ID NO: 1934228 - RNA, 19 nt, Homo sapiens
  misc_RNA (1)...(19): siRNA sense strand
gcacccaaccuguccauca

SEQ ID NO: 1934229 - RNA, 19 nt, Homo sapiens
  misc_RNA (1)...(19): siRNA sense strand
ggaugaggccugcgacaug

SEQ ID NO: 1934230 - RNA, 19 nt, Homo sapiens
  misc_RNA (1)...(19): siRNA sense strand
guaagauguuugcugagau

SEQ ID NO: 1934231 - RNA, 19 nt, Homo sapiens
  misc_RNA (1)...(19): siRNA sense strand
ugaacaucauccauaaguu

SEQ ID NO: 1934232 - RNA, 19 nt, Homo sapiens
  misc_RNA (1)...(19): siRNA sense strand
ucaaggagcugggcaacag

SEQ ID NO: 1934233 - RNA, 19 nt, Homo sapiens
  misc_RNA (1)...(19): siRNA sense strand
gaugagaucgagcgcaaau

SEQ ID NO: 1934234 - RNA, 19 nt, Homo sapiens
  misc_RNA (1)...(19): siRNA sense strand
caaagagauucccugaacu

SEQ ID NO: 1934235 - RNA, 19 nt, Homo sapiens
  misc_RNA (1)...(19): siRNA sense strand
gcagaagcagagcgucgua

SEQ ID NO: 1934236 - RNA, 19 nt, Homo sapiens
  misc_RNA (1)...(19): siRNA sense strand
gaagcaggccaaccguaug

SEQ ID NO: 1934237 - RNA, 19 nt, Homo sapiens
  misc_RNA (1)...(19): siRNA sense strand
ugagaucgagcgcaaauuc

SEQ ID NO: 1934238 - RNA, 19 nt, Homo sapiens
  misc_RNA (1)...(19): siRNA sense strand
gagcgcaaauucgacaagu

SEQ ID NO: 1934239 - RNA, 19 nt, Homo sapiens
  misc_RNA (1)...(19): siRNA sense strand
gggauucagucaagaccau

SEQ ID NO: 1934240 - RNA, 19 nt, Homo sapiens
  misc_RNA (1)...(19): siRNA sense strand
aguaagauguuugcugaga

SEQ ID NO: 1934241 - RNA, 19 nt, Homo sapiens
  misc_RNA (1)...(19): siRNA sense strand
ggacaagugcaagaacaau

SEQ ID NO: 1934242 - RNA, 19 nt, Homo sapiens
  misc_RNA (1)...(19): siRNA sense strand
agaagcagagcgucguaua

SEQ ID NO: 1934243 - RNA, 19 nt, Homo sapiens
  misc_RNA (1)...(19): siRNA sense strand
acaagugcaagaacaauga

SEQ ID NO: 1934244 - RNA, 19 nt, Homo sapiens
  misc_RNA (1)...(19): siRNA sense strand
gcugagauuaugaugaaga

SEQ ID NO: 1934245 - RNA, 19 nt, Homo sapiens
  misc_RNA (1)...(19): siRNA sense strand
cagcccguguggacaguuu

SEQ ID NO: 1934246 - RNA, 19 nt, Homo sapiens
  misc_RNA (1)...(19): siRNA sense strand
gcaccgcaucuacgaguau

SEQ ID NO: 1934247 - RNA, 19 nt, Homo sapiens
  misc_RNA (1)...(19): siRNA sense strand
acauggcgcuggagcugaa

SEQ ID NO: 1934248 - RNA, 19 nt, Homo sapiens
  misc_RNA (1)...(19): siRNA sense strand
gaggaaggaggaagcuaug

SEQ ID NO: 1934249 - RNA, 19 nt, Homo sapiens
  misc_RNA (1)...(19): siRNA sense strand
gaagauugaggaguauauc

SEQ ID NO: 1934250 - RNA, 19 nt, Homo sapiens
  misc_RNA (1)...(19): siRNA sense strand
cgaagaggcagcagaagag

SEQ ID NO: 1934251 - RNA, 19 nt, Homo sapiens
  misc_RNA (1)...(19): siRNA sense strand
gacaagugcaagaacaaug

SEQ ID NO: 1934252 - RNA, 19 nt, Homo sapiens
  misc_RNA (1)...(19): siRNA sense strand
ucccugaacuggaguccuu

SEQ ID NO: 1934253 - RNA, 19 nt, Homo sapiens
  misc_RNA (1)...(19): siRNA sense strand
gagacacagcuggaucuuu

SEQ ID NO: 1934254 - RNA, 19 nt, Homo sapiens
  misc_RNA (1)...(19): siRNA sense strand
caaccuguccaucauuauc

SEQ ID NO: 1934255 - RNA, 19 nt, Homo sapiens
  misc_RNA (1)...(19): siRNA sense strand
gaaaacgagcugaacauca

SEQ ID NO: 1934256 - RNA, 19 nt, Homo sapiens
  misc_RNA (1)...(19): siRNA sense strand
aggccaaccagaaguauuu

SEQ ID NO: 1934257 - RNA, 19 nt, Homo sapiens
  misc_RNA (1)...(19): siRNA sense strand
gcaagaacaaugagaaccu

SEQ ID NO: 1934258 - RNA, 19 nt, Homo sapiens
  misc_RNA (1)...(19): siRNA sense strand
aaaacgagcugaacaucau

SEQ ID NO: 1934259 - RNA, 19 nt, Homo sapiens
  misc_RNA (1)...(19): siRNA sense strand
aagcagagcgucguauaug

SEQ ID NO: 1934260 - RNA, 19 nt, Homo sapiens
  misc_RNA (1)...(19): siRNA sense strand
aaagagauucccugaacug

SEQ ID NO: 1934261 - RNA, 19 nt, Homo sapiens
  misc_RNA (1)...(19): siRNA sense strand
caucauccauaaguucauc

SEQ ID NO: 1934262 - RNA, 19 nt, Homo sapiens
  misc_RNA (1)...(19): siRNA sense strand
gggauaaguacucaaagag

SEQ ID NO: 1934263 - RNA, 19 nt, Homo sapiens
  misc_RNA (1)...(19): siRNA sense strand
ccacaccggcuacaucuac

SEQ ID NO: 1934264 - RNA, 19 nt, Homo sapiens
  misc_RNA (1)...(19): siRNA sense strand
gaccaaccucuccaagaug

SEQ ID NO: 1934265 - RNA, 19 nt, Homo sapiens
  misc_RNA (1)...(19): siRNA sense strand
ccaagcaccgcaucuacga

SEQ ID NO: 1934266 - RNA, 19 nt, Homo sapiens
  misc_RNA (1)...(19): siRNA sense strand
ugaagauugaggaguauau

SEQ ID NO: 1934267 - RNA, 19 nt, Homo sapiens
  misc_RNA (1)...(19): siRNA sense strand
ucaagaccaucgccaagcu

SEQ ID NO: 1934268 - RNA, 19 nt, Homo sapiens
  misc_RNA (1)...(19): siRNA sense strand
caagaccaucgccaagcua

SEQ ID NO: 1934269 - RNA, 19 nt, Homo sapiens
  misc_RNA (1)...(19): siRNA sense strand
ucgaagaggcagcagaaga

SEQ ID NO: 1934270 - RNA, 19 nt, Homo sapiens
  misc_RNA (1)...(19): siRNA sense strand
agcugaacaucauccauaa

SEQ ID NO: 1934271 - RNA, 19 nt, Homo sapiens
  misc_RNA (1)...(19): siRNA sense strand
gaagaggaggaaggaggaa

SEQ ID NO: 1934272 - RNA, 19 nt, Homo sapiens
  misc_RNA (1)...(19): siRNA sense strand
aaggugggcuacgaacuga

SEQ ID NO: 1934273 - RNA, 19 nt, Homo sapiens
  misc_RNA (1)...(19): siRNA sense strand
cacccaaccuguccaucau

SEQ ID NO: 1934274 - RNA, 19 nt, Homo sapiens
  misc_RNA (1)...(19): siRNA sense strand
uauguggagucccggaugu

SEQ ID NO: 1934275 - RNA, 19 nt, Homo sapiens
  misc_RNA (1)...(19): siRNA sense strand
aagcaggccaaccguauga

SEQ ID NO: 1934276 - RNA, 19 nt, Homo sapiens
  misc_RNA (1)...(19): siRNA sense strand
uaucagcaagcaagccaaa

SEQ ID NO: 1934277 - RNA, 19 nt, Homo sapiens
  misc_RNA (1)...(19): siRNA sense strand
gcgagaagaguggccuuau

SEQ ID NO: 1934278 - RNA, 19 nt, Homo sapiens
  misc_RNA (1)...(19): siRNA sense strand
gaggccaaccagaaguauu

SEQ ID NO: 1934279 - RNA, 19 nt, Homo sapiens
  misc_RNA (1)...(19): siRNA sense strand
agccagcgaucgaggaugu

SEQ ID NO: 1934280 - RNA, 19 nt, Homo sapiens
  misc_RNA (1)...(19): siRNA sense strand
ggcgagaagaguggccuua

SEQ ID NO: 1934281 - RNA, 19 nt, Homo sapiens
  misc_RNA (1)...(19): siRNA sense strand
ggcaacagccuggacaagu

SEQ ID NO: 1934282 - RNA, 19 nt, Homo sapiens
  misc_RNA (1)...(19): siRNA sense strand
uaugggauaguaagauguu

SEQ ID NO: 1934283 - RNA, 19 nt, Homo sapiens
  misc_RNA (1)...(19): siRNA sense strand
ugcagcagauccucaccaa

SEQ ID NO: 1934284 - RNA, 19 nt, Homo sapiens
  misc_RNA (1)...(19): siRNA sense strand
ggucaagggcgagaagagu

SEQ ID NO: 1934285 - RNA, 19 nt, Homo sapiens
  misc_RNA (1)...(19): siRNA sense strand
ucucgaagaggcagcagaa

SEQ ID NO: 1934286 - RNA, 19 nt, Homo sapiens
  misc_RNA (1)...(19): siRNA sense strand
cugaacaucauccauaagu

SEQ ID NO: 1934287 - RNA, 19 nt, Homo sapiens
  misc_RNA (1)...(19): siRNA sense strand
caccaaugccaccaucaug

SEQ ID NO: 1934288 - RNA, 19 nt, Homo sapiens
  misc_RNA (1)...(19): siRNA sense strand
cugagauuaugaugaagau

SEQ ID NO: 1934289 - RNA, 19 nt, Homo sapiens
  misc_RNA (1)...(19): siRNA sense strand
caaagaaucucucauguuu

SEQ ID NO: 1934290 - RNA, 19 nt, Homo sapiens
  misc_RNA (1)...(19): siRNA sense strand
caucaaaucucaggaauua

SEQ ID NO: 1934291 - RNA, 19 nt, Homo sapiens
  misc_RNA (1)...(19): siRNA sense strand
aaacgucucuuccaacuua

SEQ ID NO: 1934292 - RNA, 19 nt, Homo sapiens
  misc_RNA (1)...(19): siRNA sense strand
gaaggacuacuccaaauua

SEQ ID NO: 1934293 - RNA, 19 nt, Homo sapiens
  misc_RNA (1)...(19): siRNA sense strand
caaauuaccuuucugcaau

SEQ ID NO: 1934294 - RNA, 19 nt, Homo sapiens
  misc_RNA (1)...(19): siRNA sense strand
gcagacagcugaauuuuga

SEQ ID NO: 1934295 - RNA, 19 nt, Homo sapiens
  misc_RNA (1)...(19): siRNA sense strand
aaucagcacuucacucuuu

SEQ ID NO: 1934296 - RNA, 19 nt, Homo sapiens
  misc_RNA (1)...(19): siRNA sense strand
gaacacaugcuaccagaug

SEQ ID NO: 1934297 - RNA, 19 nt, Homo sapiens
  misc_RNA (1)...(19): siRNA sense strand
gaagauaaagcagucagua

SEQ ID NO: 1934298 - RNA, 19 nt, Homo sapiens
  misc_RNA (1)...(19): siRNA sense strand
gaaaucagcacuucacucu

SEQ ID NO: 1934299 - RNA, 19 nt, Homo sapiens
  misc_RNA (1)...(19): siRNA sense strand
gcaaacgucucuuccaacu

SEQ ID NO: 1934300 - RNA, 19 nt, Homo sapiens
  misc_RNA (1)...(19): siRNA sense strand
aaacagaaaucagcacuuc

SEQ ID NO: 1934301 - RNA, 19 nt, Homo sapiens
  misc_RNA (1)...(19): siRNA sense strand
gcaagaagaagauaaagca

SEQ ID NO: 1934302 - RNA, 19 nt, Homo sapiens
  misc_RNA (1)...(19): siRNA sense strand
aagaaucucucauguuuca

SEQ ID NO: 1934303 - RNA, 19 nt, Homo sapiens
  misc_RNA (1)...(19): siRNA sense strand
ggacuacuccaaauuagga

SEQ ID NO: 1934304 - RNA, 19 nt, Homo sapiens
  misc_RNA (1)...(19): siRNA sense strand
gcaaugauggguuugaaau

SEQ ID NO: 1934305 - RNA, 19 nt, Homo sapiens
  misc_RNA (1)...(19): siRNA sense strand
agacagaaaugccagcaau

SEQ ID NO: 1934306 - RNA, 19 nt, Homo sapiens
  misc_RNA (1)...(19): siRNA sense strand
gguuugaaaugugcaguuu

SEQ ID NO: 1934307 - RNA, 19 nt, Homo sapiens
  misc_RNA (1)...(19): siRNA sense strand
gacaauaaagacagaaaug

SEQ ID NO: 1934308 - RNA, 19 nt, Homo sapiens
  misc_RNA (1)...(19): siRNA sense strand
ucaaagaaucucucauguu

SEQ ID NO: 1934309 - RNA, 19 nt, Homo sapiens
  misc_RNA (1)...(19): siRNA sense strand
ccgcaaacgucucuuccaa

SEQ ID NO: 1934310 - RNA, 19 nt, Homo sapiens
  misc_RNA (1)...(19): siRNA sense strand
ggauugugauauucccauu

SEQ ID NO: 1934311 - RNA, 19 nt, Homo sapiens
  misc_RNA (1)...(19): siRNA sense strand
gaugauucccaguaccaua

SEQ ID NO: 1934312 - RNA, 19 nt, Homo sapiens
  misc_RNA (1)...(19): siRNA sense strand
ccaaauuaccuuucugcaa

SEQ ID NO: 1934313 - RNA, 19 nt, Homo sapiens
  misc_RNA (1)...(19): siRNA sense strand
ugaaaugugcaguuuauca

SEQ ID NO: 1934314 - RNA, 19 nt, Homo sapiens
  misc_RNA (1)...(19): siRNA sense strand
gaaaugugcaguuuaucag

SEQ ID NO: 1934315 - RNA, 19 nt, Homo sapiens
  misc_RNA (1)...(19): siRNA sense strand
cagcaaugauggguuugaa

SEQ ID NO: 1934316 - RNA, 19 nt, Homo sapiens
  misc_RNA (1)...(19): siRNA sense strand
aaugauggguuugaaaugu

SEQ ID NO: 1934317 - RNA, 19 nt, Homo sapiens
  misc_RNA (1)...(19): siRNA sense strand
ugacaugaacgaccgcaaa

SEQ ID NO: 1934318 - RNA, 19 nt, Homo sapiens
  misc_RNA (1)...(19): siRNA sense strand
gauugugauauucccauua

SEQ ID NO: 1934319 - RNA, 19 nt, Homo sapiens
  misc_RNA (1)...(19): siRNA sense strand
ucaaaucucaggaauuaag

SEQ ID NO: 1934320 - RNA, 19 nt, Homo sapiens
  misc_RNA (1)...(19): siRNA sense strand
ccacagcuggugauuccua

SEQ ID NO: 1934321 - RNA, 19 nt, Homo sapiens
  misc_RNA (1)...(19): siRNA sense strand
gcaucaaaucucaggaauu

SEQ ID NO: 1934322 - RNA, 19 nt, Homo sapiens
  misc_RNA (1)...(19): siRNA sense strand
agaaaugccagcaaugaug

SEQ ID NO: 1934323 - RNA, 19 nt, Homo sapiens
  misc_RNA (1)...(19): siRNA sense strand
acagaaaugccagcaauga

SEQ ID NO: 1934324 - RNA, 19 nt, Homo sapiens
  misc_RNA (1)...(19): siRNA sense strand
ugccagcaaugauggguuu

SEQ ID NO: 1934325 - RNA, 19 nt, Homo sapiens
  misc_RNA (1)...(19): siRNA sense strand
gcgcaucaaaucucaggaa

SEQ ID NO: 1934326 - RNA, 19 nt, Homo sapiens
  misc_RNA (1)...(19): siRNA sense strand
caaauuaggaguccaugac

SEQ ID NO: 1934327 - RNA, 19 nt, Homo sapiens
  misc_RNA (1)...(19): siRNA sense strand
uaccagaugauucccagua

SEQ ID NO: 1934328 - RNA, 19 nt, Homo sapiens
  misc_RNA (1)...(19): siRNA sense strand
ggugauuccuaugugcaaa

SEQ ID NO: 1934329 - RNA, 19 nt, Homo sapiens
  misc_RNA (1)...(19): siRNA sense strand
ucucauguuucaggguaua

SEQ ID NO: 1934330 - RNA, 19 nt, Homo sapiens
  misc_RNA (1)...(19): siRNA sense strand
caaaucucaggaauuaaga

SEQ ID NO: 1934331 - RNA, 19 nt, Homo sapiens
  misc_RNA (1)...(19): siRNA sense strand
ucucaggaauuaagaucug

SEQ ID NO: 1934332 - RNA, 19 nt, Homo sapiens
  misc_RNA (1)...(19): siRNA sense strand
gugauauucccauuauuca

SEQ ID NO: 1934333 - RNA, 19 nt, Homo sapiens
  misc_RNA (1)...(19): siRNA sense strand
caaugauggguuugaaaug

SEQ ID NO: 1934334 - RNA, 19 nt, Homo sapiens
  misc_RNA (1)...(19): siRNA sense strand
ugugauauucccauuauuc

SEQ ID NO: 1934335 - RNA, 19 nt, Homo sapiens
  misc_RNA (1)...(19): siRNA sense strand
gauuaugcaagaagaagau

SEQ ID NO: 1934336 - RNA, 19 nt, Homo sapiens
  misc_RNA (1)...(19): siRNA sense strand
gagcgucaucuucagacaa

SEQ ID NO: 1934337 - RNA, 19 nt, Homo sapiens
  misc_RNA (1)...(19): siRNA sense strand
aagauaaagcagucaguau

SEQ ID NO: 1934338 - RNA, 19 nt, Homo sapiens
  misc_RNA (1)...(19): siRNA sense strand
uuaccuuucugcaauacug

SEQ ID NO: 1934339 - RNA, 19 nt, Homo sapiens
  misc_RNA (1)...(19): siRNA sense strand
ccaaauuaggaguccauga

SEQ ID NO: 1934340 - RNA, 19 nt, Homo sapiens
  misc_RNA (1)...(19): siRNA sense strand
gacagaaaugccagcaaug

SEQ ID NO: 1934341 - RNA, 19 nt, Homo sapiens
  misc_RNA (1)...(19): siRNA sense strand
ccagagcgucaucuucaga

SEQ ID NO: 1934342 - RNA, 19 nt, Homo sapiens
  misc_RNA (1)...(19): siRNA sense strand
caaacagaaaucagcacuu

SEQ ID NO: 1934343 - RNA, 19 nt, Homo sapiens
  misc_RNA (1)...(19): siRNA sense strand
uaaaagugcuagaacacau

SEQ ID NO: 1934344 - RNA, 19 nt, Homo sapiens
  misc_RNA (1)...(19): siRNA sense strand
cagaaaugccagcaaugau

SEQ ID NO: 1934345 - RNA, 19 nt, Homo sapiens
  misc_RNA (1)...(19): siRNA sense strand
aaggacuacuccaaauuag

SEQ ID NO: 1934346 - RNA, 19 nt, Homo sapiens
  misc_RNA (1)...(19): siRNA sense strand
ggguauaacuauggaaucc

SEQ ID NO: 1934347 - RNA, 19 nt, Homo sapiens
  misc_RNA (1)...(19): siRNA sense strand
uucaaagaaucucucaugu

SEQ ID NO: 1934348 - RNA, 19 nt, Homo sapiens
  misc_RNA (1)...(19): siRNA sense strand
aaugugcaguuuaucagau

SEQ ID NO: 1934349 - RNA, 19 nt, Homo sapiens
  misc_RNA (1)...(19): siRNA sense strand
guuugaaaugugcaguuua

SEQ ID NO: 1934350 - RNA, 19 nt, Homo sapiens
  misc_RNA (1)...(19): siRNA sense strand
gaagaagauaaagcaguca

SEQ ID NO: 1934351 - RNA, 19 nt, Homo sapiens
  misc_RNA (1)...(19): siRNA sense strand
aacacaugcuaccagauga

SEQ ID NO: 1934352 - RNA, 19 nt, Homo sapiens
  misc_RNA (1)...(19): siRNA sense strand
ucaccaaauuaccuuucug

SEQ ID NO: 1934353 - RNA, 19 nt, Homo sapiens
  misc_RNA (1)...(19): siRNA sense strand
ccucgcagacagcugaauu

SEQ ID NO: 1934354 - RNA, 19 nt, Homo sapiens
  misc_RNA (1)...(19): siRNA sense strand
ucccagagcgucaucuuca

SEQ ID NO: 1934355 - RNA, 19 nt, Homo sapiens
  misc_RNA (1)...(19): siRNA sense strand
cgcaucaaaucucaggaau

SEQ ID NO: 1934356 - RNA, 19 nt, Homo sapiens
  misc_RNA (1)...(19): siRNA sense strand
auuccuaugugcaaacaga

SEQ ID NO: 1934357 - RNA, 19 nt, Homo sapiens
  misc_RNA (1)...(19): siRNA sense strand
cagcuggugauuccuaugu

SEQ ID NO: 1934358 - RNA, 19 nt, Homo sapiens
  misc_RNA (1)...(19): siRNA sense strand
cacagcuggugauuccuau

SEQ ID NO: 1934359 - RNA, 19 nt, Homo sapiens
  misc_RNA (1)...(19): siRNA sense strand
ccauucuuguaucagguaa

SEQ ID NO: 1934360 - RNA, 19 nt, Homo sapiens
  misc_RNA (1)...(19): siRNA sense strand
gaacuuugccuccaucuua

SEQ ID NO: 1934361 - RNA, 19 nt, Homo sapiens
  misc_RNA (1)...(19): siRNA sense strand
gagaaggacuuggagaaua

SEQ ID NO: 1934362 - RNA, 19 nt, Homo sapiens
  misc_RNA (1)...(19): siRNA sense strand
gaaagagaagagcuuauua

SEQ ID NO: 1934363 - RNA, 19 nt, Homo sapiens
  misc_RNA (1)...(19): siRNA sense strand
gcuauggaguguucuauaa

SEQ ID NO: 1934364 - RNA, 19 nt, Homo sapiens
  misc_RNA (1)...(19): siRNA sense strand
gaaaugaucauccaguuug

SEQ ID NO: 1934365 - RNA, 19 nt, Homo sapiens
  misc_RNA (1)...(19): siRNA sense strand
gggagaagauguaccugua

SEQ ID NO: 1934366 - RNA, 19 nt, Homo sapiens
  misc_RNA (1)...(19): siRNA sense strand
gaagcuacgucuauguauu

SEQ ID NO: 1934367 - RNA, 19 nt, Homo sapiens
  misc_RNA (1)...(19): siRNA sense strand
ggaccugacuggcauagaa

SEQ ID NO: 1934368 - RNA, 19 nt, Homo sapiens
  misc_RNA (1)...(19): siRNA sense strand
gaacacagcaacaacaaga

SEQ ID NO: 1934369 - RNA, 19 nt, Homo sapiens
  misc_RNA (1)...(19): siRNA sense strand
acaggaagcugcuauauca

SEQ ID NO: 1934370 - RNA, 19 nt, Homo sapiens
  misc_RNA (1)...(19): siRNA sense strand
ggaagcaguugauccagaa

SEQ ID NO: 1934371 - RNA, 19 nt, Homo sapiens
  misc_RNA (1)...(19): siRNA sense strand
agaaggacuuggagaauaa

SEQ ID NO: 1934372 - RNA, 19 nt, Homo sapiens
  misc_RNA (1)...(19): siRNA sense strand
guucaguucugcagguuua

SEQ ID NO: 1934373 - RNA, 19 nt, Homo sapiens
  misc_RNA (1)...(19): siRNA sense strand
caacagcagucaucaucaa

SEQ ID NO: 1934374 - RNA, 19 nt, Homo sapiens
  misc_RNA (1)...(19): siRNA sense strand
caaaguuccuaccaagaaa

SEQ ID NO: 1934375 - RNA, 19 nt, Homo sapiens
  misc_RNA (1)...(19): siRNA sense strand
gaaacugacucugcccauu

SEQ ID NO: 1934376 - RNA, 19 nt, Homo sapiens
  misc_RNA (1)...(19): siRNA sense strand
agaaagagauguacgagau

SEQ ID NO: 1934377 - RNA, 19 nt, Homo sapiens
  misc_RNA (1)...(19): siRNA sense strand
caucccaucuucuguaauu

SEQ ID NO: 1934378 - RNA, 19 nt, Homo sapiens
  misc_RNA (1)...(19): siRNA sense strand
gaccgaagcuggagaaacu

SEQ ID NO: 1934379 - RNA, 19 nt, Homo sapiens
  misc_RNA (1)...(19): siRNA sense strand
gcagggcgguuccaacaga

SEQ ID NO: 1934380 - RNA, 19 nt, Homo sapiens
  misc_RNA (1)...(19): siRNA sense strand
gcgaucaccuccgacuuua

SEQ ID NO: 1934381 - RNA, 19 nt, Homo sapiens
  misc_RNA (1)...(19): siRNA sense strand
gaaggucgacuauguacuu

SEQ ID NO: 1934382 - RNA, 19 nt, Homo sapiens
  misc_RNA (1)...(19): siRNA sense strand
ggaagcugcuauaucaaga

SEQ ID NO: 1934383 - RNA, 19 nt, Homo sapiens
  misc_RNA (1)...(19): siRNA sense strand
gggauuauauacaucauuc

SEQ ID NO: 1934384 - RNA, 19 nt, Homo sapiens
  misc_RNA (1)...(19): siRNA sense strand
cagaaugccuucaccaugu

SEQ ID NO: 1934385 - RNA, 19 nt, Homo sapiens
  misc_RNA (1)...(19): siRNA sense strand
gacuggagcuugagaagga

SEQ ID NO: 1934386 - RNA, 19 nt, Homo sapiens
  misc_RNA (1)...(19): siRNA sense strand
aagauaaacugaccuggaa

SEQ ID NO: 1934387 - RNA, 19 nt, Homo sapiens
  misc_RNA (1)...(19): siRNA sense strand
cuauugaccucaucagaaa

SEQ ID NO: 1934388 - RNA, 19 nt, Homo sapiens
  misc_RNA (1)...(19): siRNA sense strand
ggaaaugaucauccaguuu

SEQ ID NO: 1934389 - RNA, 19 nt, Homo sapiens
  misc_RNA (1)...(19): siRNA sense strand
gcuguaagaaccaaagaua

SEQ ID NO: 1934390 - RNA, 19 nt, Homo sapiens
  misc_RNA (1)...(19): siRNA sense strand
gcgaccagaucaagaaaga

SEQ ID NO: 1934391 - RNA, 19 nt, Homo sapiens
  misc_RNA (1)...(19): siRNA sense strand
agaggaaggucgacuaugu

SEQ ID NO: 1934392 - RNA, 19 nt, Homo sapiens
  misc_RNA (1)...(19): siRNA sense strand
gugcaacaauugaagaaga

SEQ ID NO: 1934393 - RNA, 19 nt, Homo sapiens
  misc_RNA (1)...(19): siRNA sense strand
ccaaugagccuguguccuu

SEQ ID NO: 1934394 - RNA, 19 nt, Homo sapiens
  misc_RNA (1)...(19): siRNA sense strand
gagugauuguguuucuuua

SEQ ID NO: 1934395 - RNA, 19 nt, Homo sapiens
  misc_RNA (1)...(19): siRNA sense strand
ggagugauuguguuucuuu

SEQ ID NO: 1934396 - RNA, 19 nt, Homo sapiens
  misc_RNA (1)...(19): siRNA sense strand
caagaaagagaagagcuua

SEQ ID NO: 1934397 - RNA, 19 nt, Homo sapiens
  misc_RNA (1)...(19): siRNA sense strand
aaccaaaguucgagagaaa

SEQ ID NO: 1934398 - RNA, 19 nt, Homo sapiens
  misc_RNA (1)...(19): siRNA sense strand
uucgaaagcugaaagauga

SEQ ID NO: 1934399 - RNA, 19 nt, Homo sapiens
  misc_RNA (1)...(19): siRNA sense strand
gcucugucaucaacaacua

SEQ ID NO: 1934400 - RNA, 19 nt, Homo sapiens
  misc_RNA (1)...(19): siRNA sense strand
ugaggaugaugaagauaaa

SEQ ID NO: 1934401 - RNA, 19 nt, Homo sapiens
  misc_RNA (1)...(19): siRNA sense strand
cagcaacgcuuuugucauu

SEQ ID NO: 1934402 - RNA, 19 nt, Homo sapiens
  misc_RNA (1)...(19): siRNA sense strand
gcagcucugucaucaacaa

SEQ ID NO: 1934403 - RNA, 19 nt, Homo sapiens
  misc_RNA (1)...(19): siRNA sense strand
gaggaaggucgacuaugua

SEQ ID NO: 1934404 - RNA, 19 nt, Homo sapiens
  misc_RNA (1)...(19): siRNA sense strand
ugaaagaggagcaugagaa

SEQ ID NO: 1934405 - RNA, 19 nt, Homo sapiens
  misc_RNA (1)...(19): siRNA sense strand
cccgaacccuuaugaguuu

SEQ ID NO: 1934406 - RNA, 19 nt, Homo sapiens
  misc_RNA (1)...(19): siRNA sense strand
cauagaagaggaagaagaa

SEQ ID NO: 1934407 - RNA, 19 nt, Homo sapiens
  misc_RNA (1)...(19): siRNA sense strand
gaaagaggagcaugagaag

SEQ ID NO: 1934408 - RNA, 19 nt, Homo sapiens
  misc_RNA (1)...(19): siRNA sense strand
agaagaacgugcccaggaa

SEQ ID NO: 1934409 - RNA, 19 nt, Homo sapiens
  misc_RNA (1)...(19): siRNA sense strand
ucaaaguuccuaccaagaa

SEQ ID NO: 1934410 - RNA, 19 nt, Homo sapiens
  misc_RNA (1)...(19): siRNA sense strand
caaccacacccucuccuuu

SEQ ID NO: 1934411 - RNA, 19 nt, Homo sapiens
  misc_RNA (1)...(19): siRNA sense strand
gaacgugcccaggaacauu

SEQ ID NO: 1934412 - RNA, 19 nt, Homo sapiens
  misc_RNA (1)...(19): siRNA sense strand
gugauuguguuucuuuaug

SEQ ID NO: 1934413 - RNA, 19 nt, Homo sapiens
  misc_RNA (1)...(19): siRNA sense strand
gaggcagcauugcaaagaa

SEQ ID NO: 1934414 - RNA, 19 nt, Homo sapiens
  misc_RNA (1)...(19): siRNA sense strand
ggaggaauuugagcacaau

SEQ ID NO: 1934415 - RNA, 19 nt, Homo sapiens
  misc_RNA (1)...(19): siRNA sense strand
gggaggaauuugagcacaa

SEQ ID NO: 1934416 - RNA, 19 nt, Homo sapiens
  misc_RNA (1)...(19): siRNA sense strand
ccaaguggcucaccaaaau

SEQ ID NO: 1934417 - RNA, 19 nt, Homo sapiens
  misc_RNA (1)...(19): siRNA sense strand
gagagaaaaugcuaaagga

SEQ ID NO: 1934418 - RNA, 19 nt, Homo sapiens
  misc_RNA (1)...(19): siRNA sense strand
ucucugaucgcaaacaaua

SEQ ID NO: 1934419 - RNA, 19 nt, Homo sapiens
  misc_RNA (1)...(19): siRNA sense strand
acaacacgauggguauuaa

SEQ ID NO: 1934420 - RNA, 19 nt, Homo sapiens
  misc_RNA (1)...(19): siRNA sense strand
ggacaucagcgaccagauc

SEQ ID NO: 1934421 - RNA, 19 nt, Homo sapiens
  misc_RNA (1)...(19): siRNA sense strand
gaaccaaagauaucggaau

SEQ ID NO: 1934422 - RNA, 19 nt, Homo sapiens
  misc_RNA (1)...(19): siRNA sense strand
gcauagaagaggaagaaga

SEQ ID NO: 1934423 - RNA, 19 nt, Homo sapiens
  misc_RNA (1)...(19): siRNA sense strand
ucuauaaguuccaaccuau

SEQ ID NO: 1934424 - RNA, 19 nt, Homo sapiens
  misc_RNA (1)...(19): siRNA sense strand
gaauuugagcacaaucuga

SEQ ID NO: 1934425 - RNA, 19 nt, Homo sapiens
  misc_RNA (1)...(19): siRNA sense strand
gaccagaucaagaaagaga

SEQ ID NO: 1934426 - RNA, 19 nt, Homo sapiens
  misc_RNA (1)...(19): siRNA sense strand
caacaacgucauugaagug

SEQ ID NO: 1934427 - RNA, 19 nt, Homo sapiens
  misc_RNA (1)...(19): siRNA sense strand
cgaugaggaugaugaagau

SEQ ID NO: 1934428 - RNA, 19 nt, Homo sapiens
  misc_RNA (1)...(19): siRNA sense strand
gaaaccaaaguucgagaga

SEQ ID NO: 1934429 - RNA, 19 nt, Homo sapiens
  misc_RNA (1)...(19): siRNA sense strand
uuaacucucugaucgcaaa

SEQ ID NO: 1934430 - RNA, 19 nt, Homo sapiens
  misc_RNA (1)...(19): siRNA sense strand
cagagaggcagaauucuug

SEQ ID NO: 1934431 - RNA, 19 nt, Homo sapiens
  misc_RNA (1)...(19): siRNA sense strand
gcucucagcacaccaaugu

SEQ ID NO: 1934432 - RNA, 19 nt, Homo sapiens
  misc_RNA (1)...(19): siRNA sense strand
ucauggagcucugcauuca

SEQ ID NO: 1934433 - RNA, 19 nt, Homo sapiens
  misc_RNA (1)...(19): siRNA sense strand
gcgaugaggaugaugaaga

SEQ ID NO: 1934434 - RNA, 19 nt, Homo sapiens
  misc_RNA (1)...(19): siRNA sense strand
gaacauuccaggccugagu

SEQ ID NO: 1934435 - RNA, 19 nt, Homo sapiens
  misc_RNA (1)...(19): siRNA sense strand
gauauucccagcagagaga

SEQ ID NO: 1934436 - RNA, 19 nt, Homo sapiens
  misc_RNA (1)...(19): siRNA sense strand
uuauggaugugcaacaauu

SEQ ID NO: 1934437 - RNA, 19 nt, Homo sapiens
  misc_RNA (1)...(19): siRNA sense strand
guaauuggagugauugugu

SEQ ID NO: 1934438 - RNA, 19 nt, Homo sapiens
  misc_RNA (1)...(19): siRNA sense strand
gcugcuauaucaagaaugg

SEQ ID NO: 1934439 - RNA, 19 nt, Homo sapiens
  misc_RNA (1)...(19): siRNA sense strand
cagaggacgauaugaauga

SEQ ID NO: 1934440 - RNA, 19 nt, Homo sapiens
  misc_RNA (1)...(19): siRNA sense strand
ggaggcagcauugcaaaga

SEQ ID NO: 1934441 - RNA, 19 nt, Homo sapiens
  misc_RNA (1)...(19): siRNA sense strand
cagcagcucugucaucaac

SEQ ID NO: 1934442 - RNA, 19 nt, Homo sapiens
  misc_RNA (1)...(19): siRNA sense strand
gaucgcaaacaauaucuau

SEQ ID NO: 1934443 - RNA, 19 nt, Homo sapiens
  misc_RNA (1)...(19): siRNA sense strand
ggcaaguucucuguuauca

SEQ ID NO: 1934444 - RNA, 19 nt, Homo sapiens
  misc_RNA (1)...(19): siRNA sense strand
cagaacaacaucuuugaga

SEQ ID NO: 1934445 - RNA, 19 nt, Homo sapiens
  misc_RNA (1)...(19): siRNA sense strand
aaaccaaaguucgagagaa

SEQ ID NO: 1934446 - RNA, 19 nt, Homo sapiens
  misc_RNA (1)...(19): siRNA sense strand
ucgcaaacaauaucuauga

SEQ ID NO: 1934447 - RNA, 19 nt, Homo sapiens
  misc_RNA (1)...(19): siRNA sense strand
ggccagagaggcagaauuc

SEQ ID NO: 1934448 - RNA, 19 nt, Homo sapiens
  misc_RNA (1)...(19): siRNA sense strand
gcagccagcucagcaccuu

SEQ ID NO: 1934449 - RNA, 19 nt, Homo sapiens
  misc_RNA (1)...(19): siRNA sense strand
ucugcagguuuaaggauua

SEQ ID NO: 1934450 - RNA, 19 nt, Homo sapiens
  misc_RNA (1)...(19): siRNA sense strand
gaucaccuccgacuuuauc

SEQ ID NO: 1934451 - RNA, 19 nt, Homo sapiens
  misc_RNA (1)...(19): siRNA sense strand
gacauucucaaucgucuuu

SEQ ID NO: 1934452 - RNA, 19 nt, Homo sapiens
  misc_RNA (1)...(19): siRNA sense strand
gcaggaggcagcauugcaa

SEQ ID NO: 1934453 - RNA, 19 nt, Homo sapiens
  misc_RNA (1)...(19): siRNA sense strand
aaagagauguacgagauca

SEQ ID NO: 1934454 - RNA, 19 nt, Homo sapiens
  misc_RNA (1)...(19): siRNA sense strand
agaaagagaagagcuuauu

SEQ ID NO: 1934455 - RNA, 19 nt, Homo sapiens
  misc_RNA (1)...(19): siRNA sense strand
caucuucuauguggccuuu

SEQ ID NO: 1934456 - RNA, 19 nt, Homo sapiens
  misc_RNA (1)...(19): siRNA sense strand
ggacaccuucuuugauaau

SEQ ID NO: 1934457 - RNA, 19 nt, Homo sapiens
  misc_RNA (1)...(19): siRNA sense strand
caaagcaggaggcagcauu

SEQ ID NO: 1934458 - RNA, 19 nt, Homo sapiens
  misc_RNA (1)...(19): siRNA sense strand
gauccagaacaacaucuuu

SEQ ID NO: 1934459 - RNA, 19 nt, Homo sapiens
  misc_RNA (1)...(19): siRNA sense strand
uccagaaccucgugauguu

SEQ ID NO: 1934460 - RNA, 19 nt, Homo sapiens
  misc_RNA (1)...(19): siRNA sense strand
ccacaucugucaccacuuc

SEQ ID NO: 1934461 - RNA, 19 nt, Homo sapiens
  misc_RNA (1)...(19): siRNA sense strand
cgaacaagaugaagacagu

SEQ ID NO: 1934462 - RNA, 19 nt, Homo sapiens
  misc_RNA (1)...(19): siRNA sense strand
gaccauccacggacaauuc

SEQ ID NO: 1934463 - RNA, 19 nt, Homo sapiens
  misc_RNA (1)...(19): siRNA sense strand
ccaacggcguggagugcua

SEQ ID NO: 1934464 - RNA, 19 nt, Homo sapiens
  misc_RNA (1)...(19): siRNA sense strand
gcaacaagaccuacuucuc

SEQ ID NO: 1934465 - RNA, 19 nt, Homo sapiens
  misc_RNA (1)...(19): siRNA sense strand
ucauccagcugcagcaaug

SEQ ID NO: 1934466 - RNA, 19 nt, Homo sapiens
  misc_RNA (1)...(19): siRNA sense strand
gaugaggagcccagguuga

SEQ ID NO: 1934467 - RNA, 19 nt, Homo sapiens
  misc_RNA (1)...(19): siRNA sense strand
gggaugaggagcccagguu

SEQ ID NO: 1934468 - RNA, 19 nt, Homo sapiens
  misc_RNA (1)...(19): siRNA sense strand
ccagcgaucaugucuacaa

SEQ ID NO: 1934469 - RNA, 19 nt, Homo sapiens
  misc_RNA (1)...(19): siRNA sense strand
gacggcagcuaaugugacu

SEQ ID NO: 1934470 - RNA, 19 nt, Homo sapiens
  misc_RNA (1)...(19): siRNA sense strand
cgccagcgaucaugucuac

SEQ ID NO: 1934471 - RNA, 19 nt, Homo sapiens
  misc_RNA (1)...(19): siRNA sense strand
acucugaccuccgcaacaa

SEQ ID NO: 1934472 - RNA, 19 nt, Homo sapiens
  misc_RNA (1)...(19): siRNA sense strand
gcagcaaugcgcucaggau

SEQ ID NO: 1934473 - RNA, 19 nt, Homo sapiens
  misc_RNA (1)...(19): siRNA sense strand
cagcgaucaugucuacaag

SEQ ID NO: 1934474 - RNA, 19 nt, Homo sapiens
  misc_RNA (1)...(19): siRNA sense strand
cuccagagcccacgacugu

SEQ ID NO: 1934475 - RNA, 19 nt, Homo sapiens
  misc_RNA (1)...(19): siRNA sense strand
gcagcuaaugugacugugu

SEQ ID NO: 1934476 - RNA, 19 nt, Homo sapiens
  misc_RNA (1)...(19): siRNA sense strand
cuacaacgccagcgaucau

SEQ ID NO: 1934477 - RNA, 19 nt, Homo sapiens
  misc_RNA (1)...(19): siRNA sense strand
cguggcugcugguguccua

SEQ ID NO: 1934478 - RNA, 19 nt, Homo sapiens
  misc_RNA (1)...(19): siRNA sense strand
guaacaggcccaggguuca

SEQ ID NO: 1934479 - RNA, 19 nt, Homo sapiens
  misc_RNA (1)...(19): siRNA sense strand
ucaccuugacggcagcuaa

SEQ ID NO: 1934480 - RNA, 19 nt, Homo sapiens
  misc_RNA (1)...(19): siRNA sense strand
gcuguguccaggaugaauu

SEQ ID NO: 1934481 - RNA, 19 nt, Homo sapiens
  misc_RNA (1)...(19): siRNA sense strand
ggagaccauccacggacaa

SEQ ID NO: 1934482 - RNA, 19 nt, Homo sapiens
  misc_RNA (1)...(19): siRNA sense strand
caagaugaagacagugaag

SEQ ID NO: 1934483 - RNA, 19 nt, Homo sapiens
  misc_RNA (1)...(19): siRNA sense strand
ccagugagacccacaucca

SEQ ID NO: 1934484 - RNA, 19 nt, Homo sapiens
  misc_RNA (1)...(19): siRNA sense strand
cagguaaugagagugcaua

SEQ ID NO: 1934485 - RNA, 19 nt, Homo sapiens
  misc_RNA (1)...(19): siRNA sense strand
gaaugaaguugaagaggua

SEQ ID NO: 1934486 - RNA, 19 nt, Homo sapiens
  misc_RNA (1)...(19): siRNA sense strand
gcaaacagcugcgcaagga

SEQ ID NO: 1934487 - RNA, 19 nt, Homo sapiens
  misc_RNA (1)...(19): siRNA sense strand
cgaauuaacugacuuggau

SEQ ID NO: 1934488 - RNA, 19 nt, Homo sapiens
  misc_RNA (1)...(19): siRNA sense strand
caaaugauauaacgucuca

SEQ ID NO: 1934489 - RNA, 19 nt, Homo sapiens
  misc_RNA (1)...(19): siRNA sense strand
aagaagaccugaucaacaa

SEQ ID NO: 1934490 - RNA, 19 nt, Homo sapiens
  misc_RNA (1)...(19): siRNA sense strand
gcaaggagucccagaaaga

SEQ ID NO: 1934491 - RNA, 19 nt, Homo sapiens
  misc_RNA (1)...(19): siRNA sense strand
gaagaagaccugaucaaca

SEQ ID NO: 1934492 - RNA, 19 nt, Homo sapiens
  misc_RNA (1)...(19): siRNA sense strand
gaagccagcaaaugauaua

SEQ ID NO: 1934493 - RNA, 19 nt, Homo sapiens
  misc_RNA (1)...(19): siRNA sense strand
gaaggaauaagacgaguug

SEQ ID NO: 1934494 - RNA, 19 nt, Homo sapiens
  misc_RNA (1)...(19): siRNA sense strand
ugaagaggcucaugcugaa

SEQ ID NO: 1934495 - RNA, 19 nt, Homo sapiens
  misc_RNA (1)...(19): siRNA sense strand
ugacuuggaucaaucaaau

SEQ ID NO: 1934496 - RNA, 19 nt, Homo sapiens
  misc_RNA (1)...(19): siRNA sense strand
ggaauaagacgaguuggaa

SEQ ID NO: 1934497 - RNA, 19 nt, Homo sapiens
  misc_RNA (1)...(19): siRNA sense strand
guugauagaccgauuauug

SEQ ID NO: 1934498 - RNA, 19 nt, Homo sapiens
  misc_RNA (1)...(19): siRNA sense strand
caaccgauucgaccaguua

SEQ ID NO: 1934499 - RNA, 19 nt, Homo sapiens
  misc_RNA (1)...(19): siRNA sense strand
uaaggagaaugaaguugaa

SEQ ID NO: 1934500 - RNA, 19 nt, Homo sapiens
  misc_RNA (1)...(19): siRNA sense strand
uaacugacuuggaucaauc

SEQ ID NO: 1934501 - RNA, 19 nt, Homo sapiens
  misc_RNA (1)...(19): siRNA sense strand
gggauuuguucuucauaaa

SEQ ID NO: 1934502 - RNA, 19 nt, Homo sapiens
  misc_RNA (1)...(19): siRNA sense strand
gggcaaaaguagaauuuaa

SEQ ID NO: 1934503 - RNA, 19 nt, Homo sapiens
  misc_RNA (1)...(19): siRNA sense strand
ccaguuauuugacgacgaa

SEQ ID NO: 1934504 - RNA, 19 nt, Homo sapiens
  misc_RNA (1)...(19): siRNA sense strand
ggagguagcggaucucaca

SEQ ID NO: 1934505 - RNA, 19 nt, Homo sapiens
  misc_RNA (1)...(19): siRNA sense strand
ugauagaucuggccugaag

SEQ ID NO: 1934506 - RNA, 19 nt, Homo sapiens
  misc_RNA (1)...(19): siRNA sense strand
ggaaugggccgaggagaug

SEQ ID NO: 1934507 - RNA, 19 nt, Homo sapiens
  misc_RNA (1)...(19): siRNA sense strand
ccgaggagauggauuugau

SEQ ID NO: 1934508 - RNA, 19 nt, Homo sapiens
  misc_RNA (1)...(19): siRNA sense strand
ucaaagacgaauuaacuga

SEQ ID NO: 1934509 - RNA, 19 nt, Homo sapiens
  misc_RNA (1)...(19): siRNA sense strand
gcgcaaggagucccagaaa

SEQ ID NO: 1934510 - RNA, 19 nt, Homo sapiens
  misc_RNA (1)...(19): siRNA sense strand
ccguggcgcuuaagaaaga

SEQ ID NO: 1934511 - RNA, 19 nt, Homo sapiens
  misc_RNA (1)...(19): siRNA sense strand
gggugaaggaggcgaauuu

SEQ ID NO: 1934512 - RNA, 19 nt, Homo sapiens
  misc_RNA (1)...(19): siRNA sense strand
gcuuaagaaagaaggaaua

SEQ ID NO: 1934513 - RNA, 19 nt, Homo sapiens
  misc_RNA (1)...(19): siRNA sense strand
gagaugacuuuggaugagu

SEQ ID NO: 1934514 - RNA, 19 nt, Homo sapiens
  misc_RNA (1)...(19): siRNA sense strand
gaacugucaaagacgaauu

SEQ ID NO: 1934515 - RNA, 19 nt, Homo sapiens
  misc_RNA (1)...(19): siRNA sense strand
gggccgaggagauggauuu

SEQ ID NO: 1934516 - RNA, 19 nt, Homo sapiens
  misc_RNA (1)...(19): siRNA sense strand
ggaagaagaccugaucaac

SEQ ID NO: 1934517 - RNA, 19 nt, Homo sapiens
  misc_RNA (1)...(19): siRNA sense strand
gauucgaccaguuauuuga

SEQ ID NO: 1934518 - RNA, 19 nt, Homo sapiens
  misc_RNA (1)...(19): siRNA sense strand
cagcaggaccgacaaguca

SEQ ID NO: 1934519 - RNA, 19 nt, Homo sapiens
  misc_RNA (1)...(19): siRNA sense strand
uggcgugguugacaagaaa

SEQ ID NO: 1934520 - RNA, 19 nt, Homo sapiens
  misc_RNA (1)...(19): siRNA sense strand
ggaagccagcaaaugauau

SEQ ID NO: 1934521 - RNA, 19 nt, Homo sapiens
  misc_RNA (1)...(19): siRNA sense strand
aaaagccacuugaagaaaa

SEQ ID NO: 1934522 - RNA, 19 nt, Homo sapiens
  misc_RNA (1)...(19): siRNA sense strand
gcccguggcgcuuaagaaa

SEQ ID NO: 1934523 - RNA, 19 nt, Homo sapiens
  misc_RNA (1)...(19): siRNA sense strand
uuggaucaaucaaauguga

SEQ ID NO: 1934524 - RNA, 19 nt, Homo sapiens
  misc_RNA (1)...(19): siRNA sense strand
gaggagauggauuugauuc

SEQ ID NO: 1934525 - RNA, 19 nt, Homo sapiens
  misc_RNA (1)...(19): siRNA sense strand
gaaaagccacuugaagaaa

SEQ ID NO: 1934526 - RNA, 19 nt, Homo sapiens
  misc_RNA (1)...(19): siRNA sense strand
aagacgaguuggaagaaga

SEQ ID NO: 1934527 - RNA, 19 nt, Homo sapiens
  misc_RNA (1)...(19): siRNA sense strand
ccgauucgaccaguuauuu

SEQ ID NO: 1934528 - RNA, 19 nt, Homo sapiens
  misc_RNA (1)...(19): siRNA sense strand
cggaagccagcaaaugaua

SEQ ID NO: 1934529 - RNA, 19 nt, Homo sapiens
  misc_RNA (1)...(19): siRNA sense strand
agggauuuguucuucauaa

SEQ ID NO: 1934530 - RNA, 19 nt, Homo sapiens
  misc_RNA (1)...(19): siRNA sense strand
gaguggaaggcuauucaaa

SEQ ID NO: 1934531 - RNA, 19 nt, Homo sapiens
  misc_RNA (1)...(19): siRNA sense strand
gaaggcagcagagaacaag

SEQ ID NO: 1934532 - RNA, 19 nt, Homo sapiens
  misc_RNA (1)...(19): siRNA sense strand
gaggacaaacguggaggua

SEQ ID NO: 1934533 - RNA, 19 nt, Homo sapiens
  misc_RNA (1)...(19): siRNA sense strand
aggcauaguggaagugaua

SEQ ID NO: 1934534 - RNA, 19 nt, Homo sapiens
  misc_RNA (1)...(19): siRNA sense strand
ccagaaagaccgcaagaac

SEQ ID NO: 1934535 - RNA, 19 nt, Homo sapiens
  misc_RNA (1)...(19): siRNA sense strand
ugucaaagacgaauuaacu

SEQ ID NO: 1934536 - RNA, 19 nt, Homo sapiens
  misc_RNA (1)...(19): siRNA sense strand
ucaguugauagaccgauua

SEQ ID NO: 1934537 - RNA, 19 nt, Homo sapiens
  misc_RNA (1)...(19): siRNA sense strand
aaaugugacugaggaaaca

SEQ ID NO: 1934538 - RNA, 19 nt, Homo sapiens
  misc_RNA (1)...(19): siRNA sense strand
gauuauugaccgaccuauu

SEQ ID NO: 1934539 - RNA, 19 nt, Homo sapiens
  misc_RNA (1)...(19): siRNA sense strand
auaaggagaaugaaguuga

SEQ ID NO: 1934540 - RNA, 19 nt, Homo sapiens
  misc_RNA (1)...(19): siRNA sense strand
ggagaaugaaguugaagag

SEQ ID NO: 1934541 - RNA, 19 nt, Homo sapiens
  misc_RNA (1)...(19): siRNA sense strand
aaagacgaauuaacugacu

SEQ ID NO: 1934542 - RNA, 19 nt, Homo sapiens
  misc_RNA (1)...(19): siRNA sense strand
ggaggcgaauuuucaguug

SEQ ID NO: 1934543 - RNA, 19 nt, Homo sapiens
  misc_RNA (1)...(19): siRNA sense strand
guggaaggcuauucaaaau

SEQ ID NO: 1934544 - RNA, 19 nt, Homo sapiens
  misc_RNA (1)...(19): siRNA sense strand
gaaggugaagaacaucauc

SEQ ID NO: 1934545 - RNA, 19 nt, Homo sapiens
  misc_RNA (1)...(19): siRNA sense strand
uuaacugacuuggaucaau

SEQ ID NO: 1934546 - RNA, 19 nt, Homo sapiens
  misc_RNA (1)...(19): siRNA sense strand
aauaagacgaguuggaaga

SEQ ID NO: 1934547 - RNA, 19 nt, Homo sapiens
  misc_RNA (1)...(19): siRNA sense strand
gguagcggaucucacaacu

SEQ ID NO: 1934548 - RNA, 19 nt, Homo sapiens
  misc_RNA (1)...(19): siRNA sense strand
gaauuugauaggcauagug

SEQ ID NO: 1934549 - RNA, 19 nt, Homo sapiens
  misc_RNA (1)...(19): siRNA sense strand
gaccugaucaacaacuuca

SEQ ID NO: 1934550 - RNA, 19 nt, Homo sapiens
  misc_RNA (1)...(19): siRNA sense strand
gaaaauaaggagaaugaag

SEQ ID NO: 1934551 - RNA, 19 nt, Homo sapiens
  misc_RNA (1)...(19): siRNA sense strand
uugauagaccgauuauuga

SEQ ID NO: 1934552 - RNA, 19 nt, Homo sapiens
  misc_RNA (1)...(19): siRNA sense strand
gcugaugggcaguggaaga

SEQ ID NO: 1934553 - RNA, 19 nt, Homo sapiens
  misc_RNA (1)...(19): siRNA sense strand
caaaugugacugaggaaac

SEQ ID NO: 1934554 - RNA, 19 nt, Homo sapiens
  misc_RNA (1)...(19): siRNA sense strand
cgaaaagccacuugaagaa

SEQ ID NO: 1934555 - RNA, 19 nt, Homo sapiens
  misc_RNA (1)...(19): siRNA sense strand
gcagcaggaccgacaaguc

SEQ ID NO: 1934556 - RNA, 19 nt, Homo sapiens
  misc_RNA (1)...(19): siRNA sense strand
gccagcaaaugauauaacg

SEQ ID NO: 1934557 - RNA, 19 nt, Homo sapiens
  misc_RNA (1)...(19): siRNA sense strand
gcugaagauucgguuaugg

SEQ ID NO: 1934558 - RNA, 19 nt, Homo sapiens
  misc_RNA (1)...(19): siRNA sense strand
uaagacgaguuggaagaag

SEQ ID NO: 1934559 - RNA, 19 nt, Homo sapiens
  misc_RNA (1)...(19): siRNA sense strand
agagaugacuuuggaugag

SEQ ID NO: 1934560 - RNA, 19 nt, Homo sapiens
  misc_RNA (1)...(19): siRNA sense strand
uggcagacacugaaaauaa

SEQ ID NO: 1934561 - RNA, 19 nt, Homo sapiens
  misc_RNA (1)...(19): siRNA sense strand
gaagaccugaucaacaacu

SEQ ID NO: 1934562 - RNA, 19 nt, Homo sapiens
  misc_RNA (1)...(19): siRNA sense strand
uccggaagccagcaaauga

SEQ ID NO: 1934563 - RNA, 19 nt, Homo sapiens
  misc_RNA (1)...(19): siRNA sense strand
uggaagaagggauuuguuc

SEQ ID NO: 1934564 - RNA, 19 nt, Homo sapiens
  misc_RNA (1)...(19): siRNA sense strand
gcaguggaagaagggauuu

SEQ ID NO: 1934565 - RNA, 19 nt, Homo sapiens
  misc_RNA (1)...(19): siRNA sense strand
aagagaugacuuuggauga

SEQ ID NO: 1934566 - RNA, 19 nt, Homo sapiens
  misc_RNA (1)...(19): siRNA sense strand
uaguggaagugauagaucu

SEQ ID NO: 1934567 - RNA, 19 nt, Homo sapiens
  misc_RNA (1)...(19): siRNA sense strand
ccaaccgauucgaccaguu

SEQ ID NO: 1934568 - RNA, 19 nt, Homo sapiens
  misc_RNA (1)...(19): siRNA sense strand
gcauaguggaagugauaga

SEQ ID NO: 1934569 - RNA, 19 nt, Homo sapiens
  misc_RNA (1)...(19): siRNA sense strand
ccaaaugaaggugcugaug

SEQ ID NO: 1934570 - RNA, 19 nt, Homo sapiens
  misc_RNA (1)...(19): siRNA sense strand
gcguuggcgugguugacaa

SEQ ID NO: 1934571 - RNA, 19 nt, Homo sapiens
  misc_RNA (1)...(19): siRNA sense strand
gaagcacgaggacaaacgu

SEQ ID NO: 1934572 - RNA, 19 nt, Homo sapiens
  misc_RNA (1)...(19): siRNA sense strand
ugauaggcauaguggaagu

SEQ ID NO: 1934573 - RNA, 19 nt, Homo sapiens
  misc_RNA (1)...(19): siRNA sense strand
ggcagcagagaacaagaaa

SEQ ID NO: 1934574 - RNA, 19 nt, Homo sapiens
  misc_RNA (1)...(19): siRNA sense strand
ugacuuuggaugaguggaa

SEQ ID NO: 1934575 - RNA, 19 nt, Homo sapiens
  misc_RNA (1)...(19): siRNA sense strand
ucaaaugugacugaggaaa

SEQ ID NO: 1934576 - RNA, 19 nt, Homo sapiens
  misc_RNA (1)...(19): siRNA sense strand
ggucgugguggucuuggaa

SEQ ID NO: 1934577 - RNA, 19 nt, Homo sapiens
  misc_RNA (1)...(19): siRNA sense strand
ggcaguggaagaagggauu

SEQ ID NO: 1934578 - RNA, 19 nt, Homo sapiens
  misc_RNA (1)...(19): siRNA sense strand
auugauagaagaccagaaa

SEQ ID NO: 1934579 - RNA, 19 nt, Homo sapiens
  misc_RNA (1)...(19): siRNA sense strand
cgaggagauggauuugauu

SEQ ID NO: 1934580 - RNA, 19 nt, Homo sapiens
  misc_RNA (1)...(19): siRNA sense strand
caacgcggcaggcaaacag

SEQ ID NO: 1934581 - RNA, 19 nt, Homo sapiens
  misc_RNA (1)...(19): siRNA sense strand
uggaugacccagaggcauu

SEQ ID NO: 1934582 - RNA, 19 nt, Homo sapiens
  misc_RNA (1)...(19): siRNA sense strand
gugcugaugggcaguggaa

SEQ ID NO: 1934583 - RNA, 19 nt, Homo sapiens
  misc_RNA (1)...(19): siRNA sense strand
ugaaggcagcagagaacaa

SEQ ID NO: 1934584 - RNA, 19 nt, Homo sapiens
  misc_RNA (1)...(19): siRNA sense strand
cgcaaggagucccagaaag

SEQ ID NO: 1934585 - RNA, 19 nt, Homo sapiens
  misc_RNA (1)...(19): siRNA sense strand
gcugcuaucuggaguaaua

SEQ ID NO: 1934586 - RNA, 19 nt, Homo sapiens
  misc_RNA (1)...(19): siRNA sense strand
gcugauuccuauaacuuua

SEQ ID NO: 1934587 - RNA, 19 nt, Homo sapiens
  misc_RNA (1)...(19): siRNA sense strand
cagcaugaauuacaaguga

SEQ ID NO: 1934588 - RNA, 19 nt, Homo sapiens
  misc_RNA (1)...(19): siRNA sense strand
caaacagcaugaauuacaa

SEQ ID NO: 1934589 - RNA, 19 nt, Homo sapiens
  misc_RNA (1)...(19): siRNA sense strand
gaaguuuaauuuccuugga

SEQ ID NO: 1934590 - RNA, 19 nt, Homo sapiens
  misc_RNA (1)...(19): siRNA sense strand
ggagaaggaggaauauuug

SEQ ID NO: 1934591 - RNA, 19 nt, Homo sapiens
  misc_RNA (1)...(19): siRNA sense strand
gaacaggaaggaaguagga

SEQ ID NO: 1934592 - RNA, 19 nt, Homo sapiens
  misc_RNA (1)...(19): siRNA sense strand
ggaaggaaguaggaguaaa

SEQ ID NO: 1934593 - RNA, 19 nt, Homo sapiens
  misc_RNA (1)...(19): siRNA sense strand
uuacaucccuuuaucaagu

SEQ ID NO: 1934594 - RNA, 19 nt, Homo sapiens
  misc_RNA (1)...(19): siRNA sense strand
gagccaaacagcaugaauu

SEQ ID NO: 1934595 - RNA, 19 nt, Homo sapiens
  misc_RNA (1)...(19): siRNA sense strand
gauccacuguccauuaauc

SEQ ID NO: 1934596 - RNA, 19 nt, Homo sapiens
  misc_RNA (1)...(19): siRNA sense strand
ccaaacagcaugaauuaca

SEQ ID NO: 1934597 - RNA, 19 nt, Homo sapiens
  misc_RNA (1)...(19): siRNA sense strand
caaguucugcauugcuuua

SEQ ID NO: 1934598 - RNA, 19 nt, Homo sapiens
  misc_RNA (1)...(19): siRNA sense strand
ucaccuggcugggcuugua

SEQ ID NO: 1934599 - RNA, 19 nt, Homo sapiens
  misc_RNA (1)...(19): siRNA sense strand
gcuuuguggucuucacuaa

SEQ ID NO: 1934600 - RNA, 19 nt, Homo sapiens
  misc_RNA (1)...(19): siRNA sense strand
gguguaauccuaaauucuu

SEQ ID NO: 1934601 - RNA, 19 nt, Homo sapiens
  misc_RNA (1)...(19): siRNA sense strand
cuucaccugucaccuauaa

SEQ ID NO: 1934602 - RNA, 19 nt, Homo sapiens
  misc_RNA (1)...(19): siRNA sense strand
gggaacacuucaccuguca

SEQ ID NO: 1934603 - RNA, 19 nt, Homo sapiens
  misc_RNA (1)...(19): siRNA sense strand
uggagaaggaggaauauuu

SEQ ID NO: 1934604 - RNA, 19 nt, Homo sapiens
  misc_RNA (1)...(19): siRNA sense strand
gaugugaaguuuaauuucc

SEQ ID NO: 1934605 - RNA, 19 nt, Homo sapiens
  misc_RNA (1)...(19): siRNA sense strand
cggaggauauguuuuauuu

SEQ ID NO: 1934606 - RNA, 19 nt, Homo sapiens
  misc_RNA (1)...(19): siRNA sense strand
uggcugggcuuguauaucu

SEQ ID NO: 1934607 - RNA, 19 nt, Homo sapiens
  misc_RNA (1)...(19): siRNA sense strand
gaaggaaguaggaguaaac

SEQ ID NO: 1934608 - RNA, 19 nt, Homo sapiens
  misc_RNA (1)...(19): siRNA sense strand
guucugcauugcuuuauuc

SEQ ID NO: 1934609 - RNA, 19 nt, Homo sapiens
  misc_RNA (1)...(19): siRNA sense strand
uaucuggaguaauagcuuu

SEQ ID NO: 1934610 - RNA, 19 nt, Homo sapiens
  misc_RNA (1)...(19): siRNA sense strand
ggucuucacuaaccuuucu

SEQ ID NO: 1934611 - RNA, 19 nt, Homo sapiens
  misc_RNA (1)...(19): siRNA sense strand
uaagcucagugaacaggaa

SEQ ID NO: 1934612 - RNA, 19 nt, Homo sapiens
  misc_RNA (1)...(19): siRNA sense strand
agccaaacagcaugaauua

SEQ ID NO: 1934613 - RNA, 19 nt, Homo sapiens
  misc_RNA (1)...(19): siRNA sense strand
aggauccacuguccauuaa

SEQ ID NO: 1934614 - RNA, 19 nt, Homo sapiens
  misc_RNA (1)...(19): siRNA sense strand
gugcugcuaucuggaguaa

SEQ ID NO: 1934615 - RNA, 19 nt, Homo sapiens
  misc_RNA (1)...(19): siRNA sense strand
uuaguuacaucccuuuauc

SEQ ID NO: 1934616 - RNA, 19 nt, Homo sapiens
  misc_RNA (1)...(19): siRNA sense strand
aaggauccacuguccauua

SEQ ID NO: 1934617 - RNA, 19 nt, Homo sapiens
  misc_RNA (1)...(19): siRNA sense strand
uaacauguucggacacuuc

SEQ ID NO: 1934618 - RNA, 19 nt, Homo sapiens
  misc_RNA (1)...(19): siRNA sense strand
acacuucaccugucaccua

SEQ ID NO: 1934619 - RNA, 19 nt, Homo sapiens
  misc_RNA (1)...(19): siRNA sense strand
uaaucaggcccuugacauu

SEQ ID NO: 1934620 - RNA, 19 nt, Homo sapiens
  misc_RNA (1)...(19): siRNA sense strand
caggaaggaaguaggagua

SEQ ID NO: 1934621 - RNA, 19 nt, Homo sapiens
  misc_RNA (1)...(19): siRNA sense strand
ccuggucaguuucugcuuu

SEQ ID NO: 1934622 - RNA, 19 nt, Homo sapiens
  misc_RNA (1)...(19): siRNA sense strand
cagcuucuguggcuuugug

SEQ ID NO: 1934623 - RNA, 19 nt, Homo sapiens
  misc_RNA (1)...(19): siRNA sense strand
uuuggucccuggucaguuu

SEQ ID NO: 1934624 - RNA, 19 nt, Homo sapiens
  misc_RNA (1)...(19): siRNA sense strand
guuuggagaaggaggaaua

SEQ ID NO: 1934625 - RNA, 19 nt, Homo sapiens
  misc_RNA (1)...(19): siRNA sense strand
aaucaggcccuugacauuu

SEQ ID NO: 1934626 - RNA, 19 nt, Homo sapiens
  misc_RNA (1)...(19): siRNA sense strand
gguaggagccaaacagcau

SEQ ID NO: 1934627 - RNA, 19 nt, Homo sapiens
  misc_RNA (1)...(19): siRNA sense strand
cauggugaacuuaucaauu

SEQ ID NO: 1934628 - RNA, 19 nt, Homo sapiens
  misc_RNA (1)...(19): siRNA sense strand
cuaccaggcuccgauguca

SEQ ID NO: 1934629 - RNA, 19 nt, Homo sapiens
  misc_RNA (1)...(19): siRNA sense strand
gguguuugcugcucuuggu

SEQ ID NO: 1934630 - RNA, 19 nt, Homo sapiens
  misc_RNA (1)...(19): siRNA sense strand
ucauagccauccagaccuu

SEQ ID NO: 1934631 - RNA, 19 nt, Homo sapiens
  misc_RNA (1)...(19): siRNA sense strand
ccauuaaucaggcccuuga

SEQ ID NO: 1934632 - RNA, 19 nt, Homo sapiens
  misc_RNA (1)...(19): siRNA sense strand
gccaguguuuggagaagga

SEQ ID NO: 1934633 - RNA, 19 nt, Homo sapiens
  misc_RNA (1)...(19): siRNA sense strand
ccugucaccuauaacaugu

SEQ ID NO: 1934634 - RNA, 19 nt, Homo sapiens
  misc_RNA (1)...(19): siRNA sense strand
gaccacgccggugaucaua

SEQ ID NO: 1934635 - RNA, 19 nt, Homo sapiens
  misc_RNA (1)...(19): siRNA sense strand
gaauuacaagugaacucaa

SEQ ID NO: 1934636 - RNA, 19 nt, Homo sapiens
  misc_RNA (1)...(19): siRNA sense strand
guacauuauuuggcauucu

SEQ ID NO: 1934637 - RNA, 19 nt, Homo sapiens
  misc_RNA (1)...(19): siRNA sense strand
ucgccuauacccacuuuaa

SEQ ID NO: 1934638 - RNA, 19 nt, Homo sapiens
  misc_RNA (1)...(19): siRNA sense strand
gucaguuucugcuuugcuu

SEQ ID NO: 1934639 - RNA, 19 nt, Homo sapiens
  misc_RNA (1)...(19): siRNA sense strand
gcucuugguguuuuaguua

SEQ ID NO: 1934640 - RNA, 19 nt, Homo sapiens
  misc_RNA (1)...(19): siRNA sense strand
cacuucaccugucaccuau

SEQ ID NO: 1934641 - RNA, 19 nt, Homo sapiens
  misc_RNA (1)...(19): siRNA sense strand
ugaauuacaagugaacuca

SEQ ID NO: 1934642 - RNA, 19 nt, Homo sapiens
  misc_RNA (1)...(19): siRNA sense strand
ugucaccuauaacauguuc

SEQ ID NO: 1934643 - RNA, 19 nt, Homo sapiens
  misc_RNA (1)...(19): siRNA sense strand
gagaaggaggaauauuugg

SEQ ID NO: 1934644 - RNA, 19 nt, Homo sapiens
  misc_RNA (1)...(19): siRNA sense strand
cuuauuacgaugugaaguu

SEQ ID NO: 1934645 - RNA, 19 nt, Homo sapiens
  misc_RNA (1)...(19): siRNA sense strand
gcugguguccaucugcauu

SEQ ID NO: 1934646 - RNA, 19 nt, Homo sapiens
  misc_RNA (1)...(19): siRNA sense strand
ucucgccuauacccacuuu

SEQ ID NO: 1934647 - RNA, 19 nt, Homo sapiens
  misc_RNA (1)...(19): siRNA sense strand
gaucauugggaacacuuca

SEQ ID NO: 1934648 - RNA, 19 nt, Homo sapiens
  misc_RNA (1)...(19): siRNA sense strand
gagccaguguuuggagaag

SEQ ID NO: 1934649 - RNA, 19 nt, Homo sapiens
  misc_RNA (1)...(19): siRNA sense strand
ucaccugucaccuauaaca

SEQ ID NO: 1934650 - RNA, 19 nt, Homo sapiens
  misc_RNA (1)...(19): siRNA sense strand
ccacgccggugaucauagc

SEQ ID NO: 1934651 - RNA, 19 nt, Homo sapiens
  misc_RNA (1)...(19): siRNA sense strand
ccucagcuucuguggcuuu

SEQ ID NO: 1934652 - RNA, 19 nt, Homo sapiens
  misc_RNA (1)...(19): siRNA sense strand
guguccaucugcauugugu

SEQ ID NO: 1934653 - RNA, 19 nt, Homo sapiens
  misc_RNA (1)...(19): siRNA sense strand
ucacgcugauuccuauaac

SEQ ID NO: 1934654 - RNA, 19 nt, Homo sapiens
  misc_RNA (1)...(19): siRNA sense strand
acuuuaagcucagugaaca

SEQ ID NO: 1934655 - RNA, 19 nt, Homo sapiens
  misc_RNA (1)...(19): siRNA sense strand
ggagccaaacagcaugaau

SEQ ID NO: 1934656 - RNA, 19 nt, Homo sapiens
  misc_RNA (1)...(19): siRNA sense strand
gccugacccuggugcacuu

SEQ ID NO: 1934657 - RNA, 19 nt, Homo sapiens
  misc_RNA (1)...(19): siRNA sense strand
uauaacauguucggacacu

SEQ ID NO: 1934658 - RNA, 19 nt, Homo sapiens
  misc_RNA (1)...(19): siRNA sense strand
gcaugugucugacggauaa

SEQ ID NO: 1934659 - RNA, 19 nt, Homo sapiens
  misc_RNA (1)...(19): siRNA sense strand
gcaaugaaguggagaugga

SEQ ID NO: 1934660 - RNA, 19 nt, Homo sapiens
  misc_RNA (1)...(19): siRNA sense strand
gcaucaaccuucacaacuu

SEQ ID NO: 1934661 - RNA, 19 nt, Homo sapiens
  misc_RNA (1)...(19): siRNA sense strand
ggaggacgauuacgacuac

SEQ ID NO: 1934662 - RNA, 19 nt, Homo sapiens
  misc_RNA (1)...(19): siRNA sense strand
cuucacaacuucagcaauu

SEQ ID NO: 1934663 - RNA, 19 nt, Homo sapiens
  misc_RNA (1)...(19): siRNA sense strand
cagaaacccucaccagcaa

SEQ ID NO: 1934664 - RNA, 19 nt, Homo sapiens
  misc_RNA (1)...(19): siRNA sense strand
ggagagaagcaaugaagug

SEQ ID NO: 1934665 - RNA, 19 nt, Homo sapiens
  misc_RNA (1)...(19): siRNA sense strand
cagcagacccaguuuguga

SEQ ID NO: 1934666 - RNA, 19 nt, Homo sapiens
  misc_RNA (1)...(19): siRNA sense strand
gcacagcuggcaacaccua

SEQ ID NO: 1934667 - RNA, 19 nt, Homo sapiens
  misc_RNA (1)...(19): siRNA sense strand
caucaaccuucacaacuuc

SEQ ID NO: 1934668 - RNA, 19 nt, Homo sapiens
  misc_RNA (1)...(19): siRNA sense strand
gcacggaggggaccacuua

SEQ ID NO: 1934669 - RNA, 19 nt, Homo sapiens
  misc_RNA (1)...(19): siRNA sense strand
gcagacaaaccagcuagaa

SEQ ID NO: 1934670 - RNA, 19 nt, Homo sapiens
  misc_RNA (1)...(19): siRNA sense strand
acacaggagugagggcaua

SEQ ID NO: 1934671 - RNA, 19 nt, Homo sapiens
  misc_RNA (1)...(19): siRNA sense strand
aggauuaccuuaucaagca

SEQ ID NO: 1934672 - RNA, 19 nt, Homo sapiens
  misc_RNA (1)...(19): siRNA sense strand
ggcgucagcuccuccauag

SEQ ID NO: 1934673 - RNA, 19 nt, Homo sapiens
  misc_RNA (1)...(19): siRNA sense strand
gcacauguucguacacaca

SEQ ID NO: 1934674 - RNA, 19 nt, Homo sapiens
  misc_RNA (1)...(19): siRNA sense strand
cgacaagagcguccuacaa

SEQ ID NO: 1934675 - RNA, 19 nt, Homo sapiens
  misc_RNA (1)...(19): siRNA sense strand
gacaagagcguccuacaac

SEQ ID NO: 1934676 - RNA, 19 nt, Homo sapiens
  misc_RNA (1)...(19): siRNA sense strand
guacccagcucuacuuacg

SEQ ID NO: 1934677 - RNA, 19 nt, Homo sapiens
  misc_RNA (1)...(19): siRNA sense strand
gcaguucaacgaccacaug

SEQ ID NO: 1934678 - RNA, 19 nt, Homo sapiens
  misc_RNA (1)...(19): siRNA sense strand
ucaagcacauggugacaca

SEQ ID NO: 1934679 - RNA, 19 nt, Homo sapiens
  misc_RNA (1)...(19): siRNA sense strand
ggagauggaggacgauuac

SEQ ID NO: 1934680 - RNA, 19 nt, Homo sapiens
  misc_RNA (1)...(19): siRNA sense strand
cagacaaaccagcuagaaa

SEQ ID NO: 1934681 - RNA, 19 nt, Homo sapiens
  misc_RNA (1)...(19): siRNA sense strand
caacagccuucggucaaca

SEQ ID NO: 1934682 - RNA, 19 nt, Homo sapiens
  misc_RNA (1)...(19): siRNA sense strand
gcaacacgcaggucauugg

SEQ ID NO: 1934683 - RNA, 19 nt, Homo sapiens
  misc_RNA (1)...(19): siRNA sense strand
ucaagcacauguucguaca

SEQ ID NO: 1934684 - RNA, 19 nt, Homo sapiens
  misc_RNA (1)...(19): siRNA sense strand
gggcgucagcuccuccaua

SEQ ID NO: 1934685 - RNA, 19 nt, Homo sapiens
  misc_RNA (1)...(19): siRNA sense strand
gaacuacgucaagcacaug

SEQ ID NO: 1934686 - RNA, 19 nt, Homo sapiens
  misc_RNA (1)...(19): siRNA sense strand
acaagagcguccuacaaca

SEQ ID NO: 1934687 - RNA, 19 nt, Homo sapiens
  misc_RNA (1)...(19): siRNA sense strand
gaccaaaucgagcaguuca

SEQ ID NO: 1934688 - RNA, 19 nt, Homo sapiens
  misc_RNA (1)...(19): siRNA sense strand
ccaaacagaacuacgucaa

SEQ ID NO: 1934689 - RNA, 19 nt, Homo sapiens
  misc_RNA (1)...(19): siRNA sense strand
ccacuucugugacguaacg

SEQ ID NO: 1934690 - RNA, 19 nt, Homo sapiens
  misc_RNA (1)...(19): siRNA sense strand
ggagugcacggaagacaca

SEQ ID NO: 1934691 - RNA, 19 nt, Homo sapiens
  misc_RNA (1)...(19): siRNA sense strand
gugagggcauaccagugua

SEQ ID NO: 1934692 - RNA, 19 nt, Homo sapiens
  misc_RNA (1)...(19): siRNA sense strand
gacaaaccagcuagaaaca

SEQ ID NO: 1934693 - RNA, 19 nt, Homo sapiens
  misc_RNA (1)...(19): siRNA sense strand
gcucauugacuucauguac

SEQ ID NO: 1934694 - RNA, 19 nt, Homo sapiens
  misc_RNA (1)...(19): siRNA sense strand
gaucuacucggcacucuac

SEQ ID NO: 1934695 - RNA, 19 nt, Homo sapiens
  misc_RNA (1)...(19): siRNA sense strand
ggccacuucugugacguaa

SEQ ID NO: 1934696 - RNA, 19 nt, Homo sapiens
  misc_RNA (1)...(19): siRNA sense strand
cgucugcccagcaaaguuu

SEQ ID NO: 1934697 - RNA, 19 nt, Homo sapiens
  misc_RNA (1)...(19): siRNA sense strand
gcacauggugacacacaca

SEQ ID NO: 1934698 - RNA, 19 nt, Homo sapiens
  misc_RNA (1)...(19): siRNA sense strand
aaagcucauugacuucaug

SEQ ID NO: 1934699 - RNA, 19 nt, Homo sapiens
  misc_RNA (1)...(19): siRNA sense strand
agacaaaccagcuagaaac

SEQ ID NO: 1934700 - RNA, 19 nt, Homo sapiens
  misc_RNA (1)...(19): siRNA sense strand
gauccuggaacgcaacgaa

SEQ ID NO: 1934701 - RNA, 19 nt, Homo sapiens
  misc_RNA (1)...(19): siRNA sense strand
ggacgauuacgacuacuac

SEQ ID NO: 1934702 - RNA, 19 nt, Homo sapiens
  misc_RNA (1)...(19): siRNA sense strand
agaacuacgucaagcacau

SEQ ID NO: 1934703 - RNA, 19 nt, Homo sapiens
  misc_RNA (1)...(19): siRNA sense strand
ugaggaugcaugugucuga

SEQ ID NO: 1934704 - RNA, 19 nt, Homo sapiens
  misc_RNA (1)...(19): siRNA sense strand
ugcaaaagcucauugacuu

SEQ ID NO: 1934705 - RNA, 19 nt, Homo sapiens
  misc_RNA (1)...(19): siRNA sense strand
caaacagaacuacgucaag

SEQ ID NO: 1934706 - RNA, 19 nt, Homo sapiens
  misc_RNA (1)...(19): siRNA sense strand
gccagcauccugcagauca

SEQ ID NO: 1934707 - RNA, 19 nt, Homo sapiens
  misc_RNA (1)...(19): siRNA sense strand
gucggaagcucugcagauc

SEQ ID NO: 1934708 - RNA, 19 nt, Homo sapiens
  misc_RNA (1)...(19): siRNA sense strand
cagcaacacgcaggucauu

SEQ ID NO: 1934709 - RNA, 19 nt, Homo sapiens
  misc_RNA (1)...(19): siRNA sense strand
agcaacagcuccgacaaga

SEQ ID NO: 1934710 - RNA, 19 nt, Homo sapiens
  misc_RNA (1)...(19): siRNA sense strand
ccagcauccugcagaucaa

SEQ ID NO: 1934711 - RNA, 19 nt, Homo sapiens
  misc_RNA (1)...(19): siRNA sense strand
gaagcaaugaaguggagau

SEQ ID NO: 1934712 - RNA, 19 nt, Homo sapiens
  misc_RNA (1)...(19): siRNA sense strand
caagagcguccuacaacag

SEQ ID NO: 1934713 - RNA, 19 nt, Homo sapiens
  misc_RNA (1)...(19): siRNA sense strand
uacaacagccuucggucaa

SEQ ID NO: 1934714 - RNA, 19 nt, Homo sapiens
  misc_RNA (1)...(19): siRNA sense strand
gcaacauccacaucaagca

SEQ ID NO: 1934715 - RNA, 19 nt, Homo sapiens
  misc_RNA (1)...(19): siRNA sense strand
uggcgcuccuucuccuuaa

SEQ ID NO: 1934716 - RNA, 19 nt, Homo sapiens
  misc_RNA (1)...(19): siRNA sense strand
ugccagcccucuucacuac

SEQ ID NO: 1934717 - RNA, 19 nt, Homo sapiens
  misc_RNA (1)...(19): siRNA sense strand
ggaugccucugaccuugac

SEQ ID NO: 1934718 - RNA, 19 nt, Homo sapiens
  misc_RNA (1)...(19): siRNA sense strand
cuacagcgacaucgagauc

SEQ ID NO: 1934719 - RNA, 19 nt, Homo sapiens
  misc_RNA (1)...(19): siRNA sense strand
agacccaguuugugacagu

SEQ ID NO: 1934720 - RNA, 19 nt, Homo sapiens
  misc_RNA (1)...(19): siRNA sense strand
gcagacccaguuugugaca

SEQ ID NO: 1934721 - RNA, 19 nt, Homo sapiens
  misc_RNA (1)...(19): siRNA sense strand
gccagcagacccaguuugu

SEQ ID NO: 1934722 - RNA, 19 nt, Homo sapiens
  misc_RNA (1)...(19): siRNA sense strand
gcaguggccccaagccuuu

SEQ ID NO: 1934723 - RNA, 19 nt, Homo sapiens
  misc_RNA (1)...(19): siRNA sense strand
cuacuuacgccagacagaa

SEQ ID NO: 1934724 - RNA, 19 nt, Homo sapiens
  misc_RNA (1)...(19): siRNA sense strand
caaccguggccacuucugu

SEQ ID NO: 1934725 - RNA, 19 nt, Homo sapiens
  misc_RNA (1)...(19): siRNA sense strand
cacagaacgugggcgaugu

SEQ ID NO: 1934726 - RNA, 19 nt, Homo sapiens
  misc_RNA (1)...(19): siRNA sense strand
aagcacauguucguacaca

SEQ ID NO: 1934727 - RNA, 19 nt, Homo sapiens
  misc_RNA (1)...(19): siRNA sense strand
ucaacgaccacaugaggau

SEQ ID NO: 1934728 - RNA, 19 nt, Homo sapiens
  misc_RNA (1)...(19): siRNA sense strand
aaaucgagcaguucaacga

SEQ ID NO: 1934729 - RNA, 19 nt, Homo sapiens
  misc_RNA (1)...(19): siRNA sense strand
acaagcgcuucacccagaa

SEQ ID NO: 1934730 - RNA, 19 nt, Homo sapiens
  misc_RNA (1)...(19): siRNA sense strand
ucauugacuucauguacag

SEQ ID NO: 1934731 - RNA, 19 nt, Homo sapiens
  misc_RNA (1)...(19): siRNA sense strand
gcgaccaccacauggaaga

SEQ ID NO: 1934732 - RNA, 19 nt, Homo sapiens
  misc_RNA (1)...(19): siRNA sense strand
gaucacacgcauccaugag

SEQ ID NO: 1934733 - RNA, 19 nt, Homo sapiens
  misc_RNA (1)...(19): siRNA sense strand
cgagugcuacaucugcaaa

SEQ ID NO: 1934734 - RNA, 19 nt, Homo sapiens
  misc_RNA (1)...(19): siRNA sense strand
gggcaacauccacaucaag

SEQ ID NO: 1934735 - RNA, 19 nt, Homo sapiens
  misc_RNA (1)...(19): siRNA sense strand
gcaagcagccggucaguuu

SEQ ID NO: 1934736 - RNA, 19 nt, Homo sapiens
  misc_RNA (1)...(19): siRNA sense strand
ggaggaggcuguacugaag

SEQ ID NO: 1934737 - RNA, 19 nt, Homo sapiens
  misc_RNA (1)...(19): siRNA sense strand
gcaauuuggucaacuucuu

SEQ ID NO: 1934738 - RNA, 19 nt, Homo sapiens
  misc_RNA (1)...(19): siRNA sense strand
gugcaagcccuacaaauuu

SEQ ID NO: 1934739 - RNA, 19 nt, Homo sapiens
  misc_RNA (1)...(19): siRNA sense strand
ugauggagcuaaagccuaa

SEQ ID NO: 1934740 - RNA, 19 nt, Homo sapiens
  misc_RNA (1)...(19): siRNA sense strand
cagcaucucugccuucuca

SEQ ID NO: 1934741 - RNA, 19 nt, Homo sapiens
  misc_RNA (1)...(19): siRNA sense strand
gagcacaccgucaacaauu

SEQ ID NO: 1934742 - RNA, 19 nt, Homo sapiens
  misc_RNA (1)...(19): siRNA sense strand
ggugcaagcccuacaaauu

SEQ ID NO: 1934743 - RNA, 19 nt, Homo sapiens
  misc_RNA (1)...(19): siRNA sense strand
gcaaagaaucguccaugga

SEQ ID NO: 1934744 - RNA, 19 nt, Homo sapiens
  misc_RNA (1)...(19): siRNA sense strand
gcacuacugucaagcugau

SEQ ID NO: 1934745 - RNA, 19 nt, Homo sapiens
  misc_RNA (1)...(19): siRNA sense strand
ccaagacacaggagaauga

SEQ ID NO: 1934746 - RNA, 19 nt, Homo sapiens
  misc_RNA (1)...(19): siRNA sense strand
guccauggaucuucaacaa

SEQ ID NO: 1934747 - RNA, 19 nt, Homo sapiens
  misc_RNA (1)...(19): siRNA sense strand
caaagaaucguccauggau

SEQ ID NO: 1934748 - RNA, 19 nt, Homo sapiens
  misc_RNA (1)...(19): siRNA sense strand
gaccgucacuaccaaagga

SEQ ID NO: 1934749 - RNA, 19 nt, Homo sapiens
  misc_RNA (1)...(19): siRNA sense strand
gaaagaaaacuucaacaug

SEQ ID NO: 1934750 - RNA, 19 nt, Homo sapiens
  misc_RNA (1)...(19): siRNA sense strand
ugaagccgcugccaguaga

SEQ ID NO: 1934751 - RNA, 19 nt, Homo sapiens
  misc_RNA (1)...(19): siRNA sense strand
gaugaaugcccuugaccaa

SEQ ID NO: 1934752 - RNA, 19 nt, Homo sapiens
  misc_RNA (1)...(19): siRNA sense strand
cagaggcacuccaucaagu

SEQ ID NO: 1934753 - RNA, 19 nt, Homo sapiens
  misc_RNA (1)...(19): siRNA sense strand
gcagcuuuccugagaacua

SEQ ID NO: 1934754 - RNA, 19 nt, Homo sapiens
  misc_RNA (1)...(19): siRNA sense strand
ugaaugcccuugaccaacu

SEQ ID NO: 1934755 - RNA, 19 nt, Homo sapiens
  misc_RNA (1)...(19): siRNA sense strand
uugcaacccuggccacuga

SEQ ID NO: 1934756 - RNA, 19 nt, Homo sapiens
  misc_RNA (1)...(19): siRNA sense strand
gggaggaggcuguacugaa

SEQ ID NO: 1934757 - RNA, 19 nt, Homo sapiens
  misc_RNA (1)...(19): siRNA sense strand
acccugagcuggagacaga

SEQ ID NO: 1934758 - RNA, 19 nt, Homo sapiens
  misc_RNA (1)...(19): siRNA sense strand
caucagaggcacuccauca

SEQ ID NO: 1934759 - RNA, 19 nt, Homo sapiens
  misc_RNA (1)...(19): siRNA sense strand
ugcaagcccuacaaauuug

SEQ ID NO: 1934760 - RNA, 19 nt, Homo sapiens
  misc_RNA (1)...(19): siRNA sense strand
auaccuauuucccuguuaa

SEQ ID NO: 1934761 - RNA, 19 nt, Homo sapiens
  misc_RNA (1)...(19): siRNA sense strand
gcugaaccccaucaaauua

SEQ ID NO: 1934762 - RNA, 19 nt, Homo sapiens
  misc_RNA (1)...(19): siRNA sense strand
caacagcagcuucuuugca

SEQ ID NO: 1934763 - RNA, 19 nt, Homo sapiens
  misc_RNA (1)...(19): siRNA sense strand
gacugcagcucugaugaga

SEQ ID NO: 1934764 - RNA, 19 nt, Homo sapiens
  misc_RNA (1)...(19): siRNA sense strand
gauaccaucaaccuacuga

SEQ ID NO: 1934765 - RNA, 19 nt, Homo sapiens
  misc_RNA (1)...(19): siRNA sense strand
agacacaggagaaugaguu

SEQ ID NO: 1934766 - RNA, 19 nt, Homo sapiens
  misc_RNA (1)...(19): siRNA sense strand
aggcuguacugaagaaaga

SEQ ID NO: 1934767 - RNA, 19 nt, Homo sapiens
  misc_RNA (1)...(19): siRNA sense strand
gcuggaggaucuggaauac

SEQ ID NO: 1934768 - RNA, 19 nt, Homo sapiens
  misc_RNA (1)...(19): siRNA sense strand
uaccaaaggacucccacua

SEQ ID NO: 1934769 - RNA, 19 nt, Homo sapiens
  misc_RNA (1)...(19): siRNA sense strand
gaaugcccuugaccaacug

SEQ ID NO: 1934770 - RNA, 19 nt, Homo sapiens
  misc_RNA (1)...(19): siRNA sense strand
ucuaccagcuccuguuaca

SEQ ID NO: 1934771 - RNA, 19 nt, Homo sapiens
  misc_RNA (1)...(19): siRNA sense strand
gcccaacagcagcuucuuu

SEQ ID NO: 1934772 - RNA, 19 nt, Homo sapiens
  misc_RNA (1)...(19): siRNA sense strand
ucaacgcacucagaaucuu

SEQ ID NO: 1934773 - RNA, 19 nt, Homo sapiens
  misc_RNA (1)...(19): siRNA sense strand
caauuuggucaacuucuug

SEQ ID NO: 1934774 - RNA, 19 nt, Homo sapiens
  misc_RNA (1)...(19): siRNA sense strand
ggcuggaggaucuggaaua

SEQ ID NO: 1934775 - RNA, 19 nt, Homo sapiens
  misc_RNA (1)...(19): siRNA sense strand
ucaacuucuuggaggauga

SEQ ID NO: 1934776 - RNA, 19 nt, Homo sapiens
  misc_RNA (1)...(19): siRNA sense strand
ugaacaaacucagcuucuc

SEQ ID NO: 1934777 - RNA, 19 nt, Homo sapiens
  misc_RNA (1)...(19): siRNA sense strand
aaucguccauggaucuuca

SEQ ID NO: 1934778 - RNA, 19 nt, Homo sapiens
  misc_RNA (1)...(19): siRNA sense strand
ccucaacgcacucagaauc

SEQ ID NO: 1934779 - RNA, 19 nt, Homo sapiens
  misc_RNA (1)...(19): siRNA sense strand
ccaagaaugcagaaaauga

SEQ ID NO: 1934780 - RNA, 19 nt, Homo sapiens
  misc_RNA (1)...(19): siRNA sense strand
ggccaagaaugcagaaaau

SEQ ID NO: 1934781 - RNA, 19 nt, Homo sapiens
  misc_RNA (1)...(19): siRNA sense strand
uggaggaucuggaauaccu

SEQ ID NO: 1934782 - RNA, 19 nt, Homo sapiens
  misc_RNA (1)...(19): siRNA sense strand
caacgcacucagaaucuuc

SEQ ID NO: 1934783 - RNA, 19 nt, Homo sapiens
  misc_RNA (1)...(19): siRNA sense strand
cccaucaaauuagcuguga

SEQ ID NO: 1934784 - RNA, 19 nt, Homo sapiens
  misc_RNA (1)...(19): siRNA sense strand
gaaaacuucaacaugauga

SEQ ID NO: 1934785 - RNA, 19 nt, Homo sapiens
  misc_RNA (1)...(19): siRNA sense strand
cagcagcuuuccugagaac

SEQ ID NO: 1934786 - RNA, 19 nt, Homo sapiens
  misc_RNA (1)...(19): siRNA sense strand
uacaggagguggccaagac

SEQ ID NO: 1934787 - RNA, 19 nt, Homo sapiens
  misc_RNA (1)...(19): siRNA sense strand
agacagaaaccuccucaac

SEQ ID NO: 1934788 - RNA, 19 nt, Homo sapiens
  misc_RNA (1)...(19): siRNA sense strand
cccaacagcagcuucuuug

SEQ ID NO: 1934789 - RNA, 19 nt, Homo sapiens
  misc_RNA (1)...(19): siRNA sense strand
gaggaucuggaauaccuau

SEQ ID NO: 1934790 - RNA, 19 nt, Homo sapiens
  misc_RNA (1)...(19): siRNA sense strand
gaggaggcuguacugaaga

SEQ ID NO: 1934791 - RNA, 19 nt, Homo sapiens
  misc_RNA (1)...(19): siRNA sense strand
ggcaaaagaucguguccau

SEQ ID NO: 1934792 - RNA, 19 nt, Homo sapiens
  misc_RNA (1)...(19): siRNA sense strand
aggaggcuguacugaagaa

SEQ ID NO: 1934793 - RNA, 19 nt, Homo sapiens
  misc_RNA (1)...(19): siRNA sense strand
caugaugaaugcccuugac

SEQ ID NO: 1934794 - RNA, 19 nt, Homo sapiens
  misc_RNA (1)...(19): siRNA sense strand
cagcuuuccugagaacuac

SEQ ID NO: 1934795 - RNA, 19 nt, Homo sapiens
  misc_RNA (1)...(19): siRNA sense strand
gaacuaccccauccagauc

SEQ ID NO: 1934796 - RNA, 19 nt, Homo sapiens
  misc_RNA (1)...(19): siRNA sense strand
uuucuaccagcuccuguua

SEQ ID NO: 1934797 - RNA, 19 nt, Homo sapiens
  misc_RNA (1)...(19): siRNA sense strand
gaggcuggaggaucuggaa

SEQ ID NO: 1934798 - RNA, 19 nt, Homo sapiens
  misc_RNA (1)...(19): siRNA sense strand
gcuguacugaagaaagaaa

SEQ ID NO: 1934799 - RNA, 19 nt, Homo sapiens
  misc_RNA (1)...(19): siRNA sense strand
gacacaggagaaugaguug

SEQ ID NO: 1934800 - RNA, 19 nt, Homo sapiens
  misc_RNA (1)...(19): siRNA sense strand
ggaaugaacugaaauacuu

SEQ ID NO: 1934801 - RNA, 19 nt, Homo sapiens
  misc_RNA (1)...(19): siRNA sense strand
gaagacugaucacaaauaa

SEQ ID NO: 1934802 - RNA, 19 nt, Homo sapiens
  misc_RNA (1)...(19): siRNA sense strand
gaagaacccuccauuuaug

SEQ ID NO: 1934803 - RNA, 19 nt, Homo sapiens
  misc_RNA (1)...(19): siRNA sense strand
ggagaagacugaucacaaa

SEQ ID NO: 1934804 - RNA, 19 nt, Homo sapiens
  misc_RNA (1)...(19): siRNA sense strand
gcacaggaaugaacugaaa

SEQ ID NO: 1934805 - RNA, 19 nt, Homo sapiens
  misc_RNA (1)...(19): siRNA sense strand
ggccaaagauucuguuaaa

SEQ ID NO: 1934806 - RNA, 19 nt, Homo sapiens
  misc_RNA (1)...(19): siRNA sense strand
ggaagaacccuccauuuau

SEQ ID NO: 1934807 - RNA, 19 nt, Homo sapiens
  misc_RNA (1)...(19): siRNA sense strand
ggaaauuggucaaggacaa

SEQ ID NO: 1934808 - RNA, 19 nt, Homo sapiens
  misc_RNA (1)...(19): siRNA sense strand
aaacaucccuacccaagaa

SEQ ID NO: 1934809 - RNA, 19 nt, Homo sapiens
  misc_RNA (1)...(19): siRNA sense strand
gaacagaagaugaccuugu

SEQ ID NO: 1934810 - RNA, 19 nt, Homo sapiens
  misc_RNA (1)...(19): siRNA sense strand
gcacucugaugguucuaaa

SEQ ID NO: 1934811 - RNA, 19 nt, Homo sapiens
  misc_RNA (1)...(19): siRNA sense strand
gauauuacgcuggaaauug

SEQ ID NO: 1934812 - RNA, 19 nt, Homo sapiens
  misc_RNA (1)...(19): siRNA sense strand
gacggcagcuaccuucuga

SEQ ID NO: 1934813 - RNA, 19 nt, Homo sapiens
  misc_RNA (1)...(19): siRNA sense strand
caagaaaggguaaacuguu

SEQ ID NO: 1934814 - RNA, 19 nt, Homo sapiens
  misc_RNA (1)...(19): siRNA sense strand
gauccuagaccuaacagaa

SEQ ID NO: 1934815 - RNA, 19 nt, Homo sapiens
  misc_RNA (1)...(19): siRNA sense strand
ucucaucuuugaaggauuu

SEQ ID NO: 1934816 - RNA, 19 nt, Homo sapiens
  misc_RNA (1)...(19): siRNA sense strand
gcucuucuccucucaaaug

SEQ ID NO: 1934817 - RNA, 19 nt, Homo sapiens
  misc_RNA (1)...(19): siRNA sense strand
gaaauuggucaaggacaaa

SEQ ID NO: 1934818 - RNA, 19 nt, Homo sapiens
  misc_RNA (1)...(19): siRNA sense strand
gguuuacucugcacaggaa

SEQ ID NO: 1934819 - RNA, 19 nt, Homo sapiens
  misc_RNA (1)...(19): siRNA sense strand
agaagacugaucacaaaua

SEQ ID NO: 1934820 - RNA, 19 nt, Homo sapiens
  misc_RNA (1)...(19): siRNA sense strand
gcuggaaauuggucaagga

SEQ ID NO: 1934821 - RNA, 19 nt, Homo sapiens
  misc_RNA (1)...(19): siRNA sense strand
gcaaagaccggaguagaag

SEQ ID NO: 1934822 - RNA, 19 nt, Homo sapiens
  misc_RNA (1)...(19): siRNA sense strand
ccaccgggcuguacucucu

SEQ ID NO: 1934823 - RNA, 19 nt, Homo sapiens
  misc_RNA (1)...(19): siRNA sense strand
gcuguacaauucgauuauu

SEQ ID NO: 1934824 - RNA, 19 nt, Homo sapiens
  misc_RNA (1)...(19): siRNA sense strand
gacaggcacucugaugguu

SEQ ID NO: 1934825 - RNA, 19 nt, Homo sapiens
  misc_RNA (1)...(19): siRNA sense strand
caagauauuacgcuggaaa

SEQ ID NO: 1934826 - RNA, 19 nt, Homo sapiens
  misc_RNA (1)...(19): siRNA sense strand
gcagacaggaagaacagaa

SEQ ID NO: 1934827 - RNA, 19 nt, Homo sapiens
  misc_RNA (1)...(19): siRNA sense strand
acaggaaugaacugaaaua

SEQ ID NO: 1934828 - RNA, 19 nt, Homo sapiens
  misc_RNA (1)...(19): siRNA sense strand
gaugaguggaucaagauau

SEQ ID NO: 1934829 - RNA, 19 nt, Homo sapiens
  misc_RNA (1)...(19): siRNA sense strand
aacagaagaugaccuugug

SEQ ID NO: 1934830 - RNA, 19 nt, Homo sapiens
  misc_RNA (1)...(19): siRNA sense strand
cagcuguacaauucgauua

SEQ ID NO: 1934831 - RNA, 19 nt, Homo sapiens
  misc_RNA (1)...(19): siRNA sense strand
gaagaugagcacccaggau

SEQ ID NO: 1934832 - RNA, 19 nt, Homo sapiens
  misc_RNA (1)...(19): siRNA sense strand
augaguggaucaagauauu

SEQ ID NO: 1934833 - RNA, 19 nt, Homo sapiens
  misc_RNA (1)...(19): siRNA sense strand
gcaaugcagacaggaagaa

SEQ ID NO: 1934834 - RNA, 19 nt, Homo sapiens
  misc_RNA (1)...(19): siRNA sense strand
gggccaaagauucuguuaa

SEQ ID NO: 1934835 - RNA, 19 nt, Homo sapiens
  misc_RNA (1)...(19): siRNA sense strand
gagaagacugaucacaaau

SEQ ID NO: 1934836 - RNA, 19 nt, Homo sapiens
  misc_RNA (1)...(19): siRNA sense strand
gucaagaccuggaaaacaa

SEQ ID NO: 1934837 - RNA, 19 nt, Homo sapiens
  misc_RNA (1)...(19): siRNA sense strand
gcacccaggaucccucaga

SEQ ID NO: 1934838 - RNA, 19 nt, Homo sapiens
  misc_RNA (1)...(19): siRNA sense strand
gaaugaacugaaauacuuc

SEQ ID NO: 1934839 - RNA, 19 nt, Homo sapiens
  misc_RNA (1)...(19): siRNA sense strand
gaacccuccauuuaugaau

SEQ ID NO: 1934840 - RNA, 19 nt, Homo sapiens
  misc_RNA (1)...(19): siRNA sense strand
aagcucuucuccucucaaa

SEQ ID NO: 1934841 - RNA, 19 nt, Homo sapiens
  misc_RNA (1)...(19): siRNA sense strand
ugaauucucaucuuugaag

SEQ ID NO: 1934842 - RNA, 19 nt, Homo sapiens
  misc_RNA (1)...(19): siRNA sense strand
guauuuccauucaggacau

SEQ ID NO: 1934843 - RNA, 19 nt, Homo sapiens
  misc_RNA (1)...(19): siRNA sense strand
cgagacaggcacucugaug

SEQ ID NO: 1934844 - RNA, 19 nt, Homo sapiens
  misc_RNA (1)...(19): siRNA sense strand
auauuacgcuggaaauugg

SEQ ID NO: 1934845 - RNA, 19 nt, Homo sapiens
  misc_RNA (1)...(19): siRNA sense strand
guucagcuguacaauucga

SEQ ID NO: 1934846 - RNA, 19 nt, Homo sapiens
  misc_RNA (1)...(19): siRNA sense strand
acaagaaaggguaaacugu

SEQ ID NO: 1934847 - RNA, 19 nt, Homo sapiens
  misc_RNA (1)...(19): siRNA sense strand
caggaagaacagaagauga

SEQ ID NO: 1934848 - RNA, 19 nt, Homo sapiens
  misc_RNA (1)...(19): siRNA sense strand
ugaguggaucaagauauua

SEQ ID NO: 1934849 - RNA, 19 nt, Homo sapiens
  misc_RNA (1)...(19): siRNA sense strand
ugcaaagaccggaguagaa

SEQ ID NO: 1934850 - RNA, 19 nt, Homo sapiens
  misc_RNA (1)...(19): siRNA sense strand
auguucagcuguacaauuc

SEQ ID NO: 1934851 - RNA, 19 nt, Homo sapiens
  misc_RNA (1)...(19): siRNA sense strand
cauguugaauauacuggau

SEQ ID NO: 1934852 - RNA, 19 nt, Homo sapiens
  misc_RNA (1)...(19): siRNA sense strand
gugcaaagaccggaguaga

SEQ ID NO: 1934853 - RNA, 19 nt, Homo sapiens
  misc_RNA (1)...(19): siRNA sense strand
uggcuuuaaugaauucuca

SEQ ID NO: 1934854 - RNA, 19 nt, Homo sapiens
  misc_RNA (1)...(19): siRNA sense strand
uuugucugcucucuguaua

SEQ ID NO: 1934855 - RNA, 19 nt, Homo sapiens
  misc_RNA (1)...(19): siRNA sense strand
uccuagaccuaacagaaug

SEQ ID NO: 1934856 - RNA, 19 nt, Homo sapiens
  misc_RNA (1)...(19): siRNA sense strand
ccgaggagaagacugauca

SEQ ID NO: 1934857 - RNA, 19 nt, Homo sapiens
  misc_RNA (1)...(19): siRNA sense strand
gccaaagauucuguuaaac

SEQ ID NO: 1934858 - RNA, 19 nt, Homo sapiens
  misc_RNA (1)...(19): siRNA sense strand
ugucugcucucuguauauc

SEQ ID NO: 1934859 - RNA, 19 nt, Homo sapiens
  misc_RNA (1)...(19): siRNA sense strand
cacaagaaaggguaaacug

SEQ ID NO: 1934860 - RNA, 19 nt, Homo sapiens
  misc_RNA (1)...(19): siRNA sense strand
cuguacaauucgauuauuc

SEQ ID NO: 1934861 - RNA, 19 nt, Homo sapiens
  misc_RNA (1)...(19): siRNA sense strand
aagaacccuccauuuauga

SEQ ID NO: 1934862 - RNA, 19 nt, Homo sapiens
  misc_RNA (1)...(19): siRNA sense strand
gacaggaagaacagaagau

SEQ ID NO: 1934863 - RNA, 19 nt, Homo sapiens
  misc_RNA (1)...(19): siRNA sense strand
aggagaagacugaucacaa

SEQ ID NO: 1934864 - RNA, 19 nt, Homo sapiens
  misc_RNA (1)...(19): siRNA sense strand
aagaacagaagaugaccuu

SEQ ID NO: 1934865 - RNA, 19 nt, Homo sapiens
  misc_RNA (1)...(19): siRNA sense strand
gaggagaagacugaucaca

SEQ ID NO: 1934866 - RNA, 19 nt, Homo sapiens
  misc_RNA (1)...(19): siRNA sense strand
ucugugagggccaaagauu

SEQ ID NO: 1934867 - RNA, 19 nt, Homo sapiens
  misc_RNA (1)...(19): siRNA sense strand
gaguggaucaagauauuac

SEQ ID NO: 1934868 - RNA, 19 nt, Homo sapiens
  misc_RNA (1)...(19): siRNA sense strand
cuucuccucucaaauggau

SEQ ID NO: 1934869 - RNA, 19 nt, Homo sapiens
  misc_RNA (1)...(19): siRNA sense strand
aauguucagcuguacaauu

SEQ ID NO: 1934870 - RNA, 19 nt, Homo sapiens
  misc_RNA (1)...(19): siRNA sense strand
caccuucucugggcaccaa

SEQ ID NO: 1934871 - RNA, 19 nt, Homo sapiens
  misc_RNA (1)...(19): siRNA sense strand
agaauguucagcuguacaa

SEQ ID NO: 1934872 - RNA, 19 nt, Homo sapiens
  misc_RNA (1)...(19): siRNA sense strand
uguuugguauuuccauuca

SEQ ID NO: 1934873 - RNA, 19 nt, Homo sapiens
  misc_RNA (1)...(19): siRNA sense strand
gaagagaggaccccaguug

SEQ ID NO: 1934874 - RNA, 19 nt, Homo sapiens
  misc_RNA (1)...(19): siRNA sense strand
gcucagccaucggauuuag

SEQ ID NO: 1934875 - RNA, 19 nt, Homo sapiens
  misc_RNA (1)...(19): siRNA sense strand
gcgauuggccuggcagcua

SEQ ID NO: 1934876 - RNA, 19 nt, Homo sapiens
  misc_RNA (1)...(19): siRNA sense strand
gacgucaccaggagccuaa

SEQ ID NO: 1934877 - RNA, 19 nt, Homo sapiens
  misc_RNA (1)...(19): siRNA sense strand
cugcucagccaucggauuu

SEQ ID NO: 1934878 - RNA, 19 nt, Homo sapiens
  misc_RNA (1)...(19): siRNA sense strand
gcgcagggcaaggaagaga

SEQ ID NO: 1934879 - RNA, 19 nt, Homo sapiens
  misc_RNA (1)...(19): siRNA sense strand
ggaaugaaaucacuaguaa

SEQ ID NO: 1934880 - RNA, 19 nt, Homo sapiens
  misc_RNA (1)...(19): siRNA sense strand
ggagaaggcagcagaauua

SEQ ID NO: 1934881 - RNA, 19 nt, Homo sapiens
  misc_RNA (1)...(19): siRNA sense strand
ccuaauggcucaagugaua

SEQ ID NO: 1934882 - RNA, 19 nt, Homo sapiens
  misc_RNA (1)...(19): siRNA sense strand
gaagaagacauguauauga

SEQ ID NO: 1934883 - RNA, 19 nt, Homo sapiens
  misc_RNA (1)...(19): siRNA sense strand
ggaaaggauuggcuuauau

SEQ ID NO: 1934884 - RNA, 19 nt, Homo sapiens
  misc_RNA (1)...(19): siRNA sense strand
gcacucaacuggcuuggaa

SEQ ID NO: 1934885 - RNA, 19 nt, Homo sapiens
  misc_RNA (1)...(19): siRNA sense strand
gaagauugcucugaauguu

SEQ ID NO: 1934886 - RNA, 19 nt, Homo sapiens
  misc_RNA (1)...(19): siRNA sense strand
gaauagaaaucuuggcaau

SEQ ID NO: 1934887 - RNA, 19 nt, Homo sapiens
  misc_RNA (1)...(19): siRNA sense strand
gaaaggauuggcuuauaua

SEQ ID NO: 1934888 - RNA, 19 nt, Homo sapiens
  misc_RNA (1)...(19): siRNA sense strand
gaacagaacacuauucaca

SEQ ID NO: 1934889 - RNA, 19 nt, Homo sapiens
  misc_RNA (1)...(19): siRNA sense strand
gacaagcgcugaauucugu

SEQ ID NO: 1934890 - RNA, 19 nt, Homo sapiens
  misc_RNA (1)...(19): siRNA sense strand
gaaaagagguuguaaacau

SEQ ID NO: 1934891 - RNA, 19 nt, Homo sapiens
  misc_RNA (1)...(19): siRNA sense strand
aaauauagcacaucccuua

SEQ ID NO: 1934892 - RNA, 19 nt, Homo sapiens
  misc_RNA (1)...(19): siRNA sense strand
gaagacauguauaugaaca

SEQ ID NO: 1934893 - RNA, 19 nt, Homo sapiens
  misc_RNA (1)...(19): siRNA sense strand
cuugaaacguugagaaaua

SEQ ID NO: 1934894 - RNA, 19 nt, Homo sapiens
  misc_RNA (1)...(19): siRNA sense strand
ggauggauaucuacaacaa

SEQ ID NO: 1934895 - RNA, 19 nt, Homo sapiens
  misc_RNA (1)...(19): siRNA sense strand
ucagguugcucauccaaua

SEQ ID NO: 1934896 - RNA, 19 nt, Homo sapiens
  misc_RNA (1)...(19): siRNA sense strand
aaacaaaccagaugucaaa

SEQ ID NO: 1934897 - RNA, 19 nt, Homo sapiens
  misc_RNA (1)...(19): siRNA sense strand
ggaugcaacuaaagccaua

SEQ ID NO: 1934898 - RNA, 19 nt, Homo sapiens
  misc_RNA (1)...(19): siRNA sense strand
gcgcugaauucuguaguua

SEQ ID NO: 1934899 - RNA, 19 nt, Homo sapiens
  misc_RNA (1)...(19): siRNA sense strand
gcugaauucuguaguuaaa

SEQ ID NO: 1934900 - RNA, 19 nt, Homo sapiens
  misc_RNA (1)...(19): siRNA sense strand
gaucugagggccaaaguuu

SEQ ID NO: 1934901 - RNA, 19 nt, Homo sapiens
  misc_RNA (1)...(19): siRNA sense strand
cagcagaucaugaaaguuu

SEQ ID NO: 1934902 - RNA, 19 nt, Homo sapiens
  misc_RNA (1)...(19): siRNA sense strand
ugaagucacucaggcaaua

SEQ ID NO: 1934903 - RNA, 19 nt, Homo sapiens
  misc_RNA (1)...(19): siRNA sense strand
gaaggcagcagaauuacuu

SEQ ID NO: 1934904 - RNA, 19 nt, Homo sapiens
  misc_RNA (1)...(19): siRNA sense strand
gcacagaagcaguccauug

SEQ ID NO: 1934905 - RNA, 19 nt, Homo sapiens
  misc_RNA (1)...(19): siRNA sense strand
aaagauugccugcaguuua

SEQ ID NO: 1934906 - RNA, 19 nt, Homo sapiens
  misc_RNA (1)...(19): siRNA sense strand
ucaaggagcaguaucaauu

SEQ ID NO: 1934907 - RNA, 19 nt, Homo sapiens
  misc_RNA (1)...(19): siRNA sense strand
gagcuuuguucuuaucuug

SEQ ID NO: 1934908 - RNA, 19 nt, Homo sapiens
  misc_RNA (1)...(19): siRNA sense strand
cagaugaaauugacaguuc

SEQ ID NO: 1934909 - RNA, 19 nt, Homo sapiens
  misc_RNA (1)...(19): siRNA sense strand
gauggugaaucuccuaaug

SEQ ID NO: 1934910 - RNA, 19 nt, Homo sapiens
  misc_RNA (1)...(19): siRNA sense strand
gaacacuauucacaaagau

SEQ ID NO: 1934911 - RNA, 19 nt, Homo sapiens
  misc_RNA (1)...(19): siRNA sense strand
guugugaucuugaaacguu

SEQ ID NO: 1934912 - RNA, 19 nt, Homo sapiens
  misc_RNA (1)...(19): siRNA sense strand
gaaagguauuugauuccaa

SEQ ID NO: 1934913 - RNA, 19 nt, Homo sapiens
  misc_RNA (1)...(19): siRNA sense strand
acagaacacuauucacaaa

SEQ ID NO: 1934914 - RNA, 19 nt, Homo sapiens
  misc_RNA (1)...(19): siRNA sense strand
cggaaaggauuggcuuaua

SEQ ID NO: 1934915 - RNA, 19 nt, Homo sapiens
  misc_RNA (1)...(19): siRNA sense strand
ggaggaagaagacauguau

SEQ ID NO: 1934916 - RNA, 19 nt, Homo sapiens
  misc_RNA (1)...(19): siRNA sense strand
gaaggaguccgguucuuug

SEQ ID NO: 1934917 - RNA, 19 nt, Homo sapiens
  misc_RNA (1)...(19): siRNA sense strand
ggauauggccauuggauug

SEQ ID NO: 1934918 - RNA, 19 nt, Homo sapiens
  misc_RNA (1)...(19): siRNA sense strand
agccugagcuuuguucuua

SEQ ID NO: 1934919 - RNA, 19 nt, Homo sapiens
  misc_RNA (1)...(19): siRNA sense strand
ggaaggaguccgguucuuu

SEQ ID NO: 1934920 - RNA, 19 nt, Homo sapiens
  misc_RNA (1)...(19): siRNA sense strand
ugaagaagcucuggaagca

SEQ ID NO: 1934921 - RNA, 19 nt, Homo sapiens
  misc_RNA (1)...(19): siRNA sense strand
gauaaucaccaucucuuug

SEQ ID NO: 1934922 - RNA, 19 nt, Homo sapiens
  misc_RNA (1)...(19): siRNA sense strand
guacuuuguugggaauuaa

SEQ ID NO: 1934923 - RNA, 19 nt, Homo sapiens
  misc_RNA (1)...(19): siRNA sense strand
guucuucaaugucagauga

SEQ ID NO: 1934924 - RNA, 19 nt, Homo sapiens
  misc_RNA (1)...(19): siRNA sense strand
caacugcuuuccacucaga

SEQ ID NO: 1934925 - RNA, 19 nt, Homo sapiens
  misc_RNA (1)...(19): siRNA sense strand
acaacaagcagauccauuu

SEQ ID NO: 1934926 - RNA, 19 nt, Homo sapiens
  misc_RNA (1)...(19): siRNA sense strand
gcaaaacaccggcuucuuu

SEQ ID NO: 1934927 - RNA, 19 nt, Homo sapiens
  misc_RNA (1)...(19): siRNA sense strand
gaagauauagaagaccuuu

SEQ ID NO: 1934928 - RNA, 19 nt, Homo sapiens
  misc_RNA (1)...(19): siRNA sense strand
caaagaagaaguuaucaag

SEQ ID NO: 1934929 - RNA, 19 nt, Homo sapiens
  misc_RNA (1)...(19): siRNA sense strand
gcaaagaagaaguuaucaa

SEQ ID NO: 1934930 - RNA, 19 nt, Homo sapiens
  misc_RNA (1)...(19): siRNA sense strand
gcaggagguugugaucuug

SEQ ID NO: 1934931 - RNA, 19 nt, Homo sapiens
  misc_RNA (1)...(19): siRNA sense strand
ggagcaguaucaauucugu

SEQ ID NO: 1934932 - RNA, 19 nt, Homo sapiens
  misc_RNA (1)...(19): siRNA sense strand
cauccagucugaauauaga

SEQ ID NO: 1934933 - RNA, 19 nt, Homo sapiens
  misc_RNA (1)...(19): siRNA sense strand
aagauugccugcaguuuau

SEQ ID NO: 1934934 - RNA, 19 nt, Homo sapiens
  misc_RNA (1)...(19): siRNA sense strand
cgacacagaugaaauugac

SEQ ID NO: 1934935 - RNA, 19 nt, Homo sapiens
  misc_RNA (1)...(19): siRNA sense strand
uaauguggauggaccagaa

SEQ ID NO: 1934936 - RNA, 19 nt, Homo sapiens
  misc_RNA (1)...(19): siRNA sense strand
ggaagaagacauguauaug

SEQ ID NO: 1934937 - RNA, 19 nt, Homo sapiens
  misc_RNA (1)...(19): siRNA sense strand
agaagaaguuaucaaguuc

SEQ ID NO: 1934938 - RNA, 19 nt, Homo sapiens
  misc_RNA (1)...(19): siRNA sense strand
ccagaaagggagaccauuu

SEQ ID NO: 1934939 - RNA, 19 nt, Homo sapiens
  misc_RNA (1)...(19): siRNA sense strand
cuggauacaucuacugaaa

SEQ ID NO: 1934940 - RNA, 19 nt, Homo sapiens
  misc_RNA (1)...(19): siRNA sense strand
cauugagucuggcuccaua

SEQ ID NO: 1934941 - RNA, 19 nt, Homo sapiens
  misc_RNA (1)...(19): siRNA sense strand
agaacacuauucacaaaga

SEQ ID NO: 1934942 - RNA, 19 nt, Homo sapiens
  misc_RNA (1)...(19): siRNA sense strand
ggauaaucaccaucucuuu

SEQ ID NO: 1934943 - RNA, 19 nt, Homo sapiens
  misc_RNA (1)...(19): siRNA sense strand
ggauugccguccugcagaa

SEQ ID NO: 1934944 - RNA, 19 nt, Homo sapiens
  misc_RNA (1)...(19): siRNA sense strand
gcaccuggcagacauuaau

SEQ ID NO: 1934945 - RNA, 19 nt, Homo sapiens
  misc_RNA (1)...(19): siRNA sense strand
ggaagauugcucugaaugu

SEQ ID NO: 1934946 - RNA, 19 nt, Homo sapiens
  misc_RNA (1)...(19): siRNA sense strand
gcaaucgaaagguauuuga

SEQ ID NO: 1934947 - RNA, 19 nt, Homo sapiens
  misc_RNA (1)...(19): siRNA sense strand
aaacauccugaacucauua

SEQ ID NO: 1934948 - RNA, 19 nt, Homo sapiens
  misc_RNA (1)...(19): siRNA sense strand
gggcauuuaucaacugcuu

SEQ ID NO: 1934949 - RNA, 19 nt, Homo sapiens
  misc_RNA (1)...(19): siRNA sense strand
cacagaagcaguccauuga

SEQ ID NO: 1934950 - RNA, 19 nt, Homo sapiens
  misc_RNA (1)...(19): siRNA sense strand
ucccuuagcuggauacauc

SEQ ID NO: 1934951 - RNA, 19 nt, Homo sapiens
  misc_RNA (1)...(19): siRNA sense strand
gaagaauacgacacagaug

SEQ ID NO: 1934952 - RNA, 19 nt, Homo sapiens
  misc_RNA (1)...(19): siRNA sense strand
gcuaguaccucaggcucaa

SEQ ID NO: 1934953 - RNA, 19 nt, Homo sapiens
  misc_RNA (1)...(19): siRNA sense strand
cagaagcaguccauugagu

SEQ ID NO: 1934954 - RNA, 19 nt, Homo sapiens
  misc_RNA (1)...(19): siRNA sense strand
ggaaggauaaucaccaucu

SEQ ID NO: 1934955 - RNA, 19 nt, Homo sapiens
  misc_RNA (1)...(19): siRNA sense strand
cagcaaagaagaaguuauc

SEQ ID NO: 1934956 - RNA, 19 nt, Homo sapiens
  misc_RNA (1)...(19): siRNA sense strand
aaugucagaugaugauaga

SEQ ID NO: 1934957 - RNA, 19 nt, Homo sapiens
  misc_RNA (1)...(19): siRNA sense strand
uaaggaugaugaugcagau

SEQ ID NO: 1934958 - RNA, 19 nt, Homo sapiens
  misc_RNA (1)...(19): siRNA sense strand
ccagucaucuguugguuac

SEQ ID NO: 1934959 - RNA, 19 nt, Homo sapiens
  misc_RNA (1)...(19): siRNA sense strand
gccauuggauugcuaguac

SEQ ID NO: 1934960 - RNA, 19 nt, Homo sapiens
  misc_RNA (1)...(19): siRNA sense strand
caacuggcuuggaagucuu

SEQ ID NO: 1934961 - RNA, 19 nt, Homo sapiens
  misc_RNA (1)...(19): siRNA sense strand
gaauacgacacagaugaaa

SEQ ID NO: 1934962 - RNA, 19 nt, Homo sapiens
  misc_RNA (1)...(19): siRNA sense strand
gaaggauaaucaccaucuc

SEQ ID NO: 1934963 - RNA, 19 nt, Homo sapiens
  misc_RNA (1)...(19): siRNA sense strand
gcagcgauuuauacaacug

SEQ ID NO: 1934964 - RNA, 19 nt, Homo sapiens
  misc_RNA (1)...(19): siRNA sense strand
gaucuugaaacguugagaa

SEQ ID NO: 1934965 - RNA, 19 nt, Homo sapiens
  misc_RNA (1)...(19): siRNA sense strand
gaggaagaagacauguaua

SEQ ID NO: 1934966 - RNA, 19 nt, Homo sapiens
  misc_RNA (1)...(19): siRNA sense strand
ggauacaucuacugaaacc

SEQ ID NO: 1934967 - RNA, 19 nt, Homo sapiens
  misc_RNA (1)...(19): siRNA sense strand
cagaacagaacacuauuca

SEQ ID NO: 1934968 - RNA, 19 nt, Homo sapiens
  misc_RNA (1)...(19): siRNA sense strand
agaaaguggacacauguuu

SEQ ID NO: 1934969 - RNA, 19 nt, Homo sapiens
  misc_RNA (1)...(19): siRNA sense strand
aaaugacuguggcuuugaa

SEQ ID NO: 1934970 - RNA, 19 nt, Homo sapiens
  misc_RNA (1)...(19): siRNA sense strand
guaguacuuuguugggaau

SEQ ID NO: 1934971 - RNA, 19 nt, Homo sapiens
  misc_RNA (1)...(19): siRNA sense strand
aaagggagaccauuucauc

SEQ ID NO: 1934972 - RNA, 19 nt, Homo sapiens
  misc_RNA (1)...(19): siRNA sense strand
gcaguuuauugaccagcuu

SEQ ID NO: 1934973 - RNA, 19 nt, Homo sapiens
  misc_RNA (1)...(19): siRNA sense strand
gaacucauuaccuucaagu

SEQ ID NO: 1934974 - RNA, 19 nt, Homo sapiens
  misc_RNA (1)...(19): siRNA sense strand
ugaagaagaauacgacaca

SEQ ID NO: 1934975 - RNA, 19 nt, Homo sapiens
  misc_RNA (1)...(19): siRNA sense strand
uaaaaugacuguggcuuug

SEQ ID NO: 1934976 - RNA, 19 nt, Homo sapiens
  misc_RNA (1)...(19): siRNA sense strand
caaggagcaguaucaauuc

SEQ ID NO: 1934977 - RNA, 19 nt, Homo sapiens
  misc_RNA (1)...(19): siRNA sense strand
cucauuaccuucaaguaug

SEQ ID NO: 1934978 - RNA, 19 nt, Homo sapiens
  misc_RNA (1)...(19): siRNA sense strand
gaaaucuuggcaaucgaaa

SEQ ID NO: 1934979 - RNA, 19 nt, Homo sapiens
  misc_RNA (1)...(19): siRNA sense strand
gcagaaguaucaccaaugu

SEQ ID NO: 1934980 - RNA, 19 nt, Homo sapiens
  misc_RNA (1)...(19): siRNA sense strand
gcauguuccuucuguauga

SEQ ID NO: 1934981 - RNA, 19 nt, Homo sapiens
  misc_RNA (1)...(19): siRNA sense strand
uaucaagcgugcagaagua

SEQ ID NO: 1934982 - RNA, 19 nt, Homo sapiens
  misc_RNA (1)...(19): siRNA sense strand
gcuugggacugucuaauga

SEQ ID NO: 1934983 - RNA, 19 nt, Homo sapiens
  misc_RNA (1)...(19): siRNA sense strand
aagaaucaauggcuguuaa

SEQ ID NO: 1934984 - RNA, 19 nt, Homo sapiens
  misc_RNA (1)...(19): siRNA sense strand
caaagaggcagcauuggaa

SEQ ID NO: 1934985 - RNA, 19 nt, Homo sapiens
  misc_RNA (1)...(19): siRNA sense strand
agaauuccaucacgaagaa

SEQ ID NO: 1934986 - RNA, 19 nt, Homo sapiens
  misc_RNA (1)...(19): siRNA sense strand
ggcaauguacgguggauua

SEQ ID NO: 1934987 - RNA, 19 nt, Homo sapiens
  misc_RNA (1)...(19): siRNA sense strand
gggccugggucucgucuuu

SEQ ID NO: 1934988 - RNA, 19 nt, Homo sapiens
  misc_RNA (1)...(19): siRNA sense strand
gagauuggagcuauugaaa

SEQ ID NO: 1934989 - RNA, 19 nt, Homo sapiens
  misc_RNA (1)...(19): siRNA sense strand
ugggagaacuggccaagaa

SEQ ID NO: 1934990 - RNA, 19 nt, Homo sapiens
  misc_RNA (1)...(19): siRNA sense strand
gaagaaucaauggcuguua

SEQ ID NO: 1934991 - RNA, 19 nt, Homo sapiens
  misc_RNA (1)...(19): siRNA sense strand
caauggcuguuaacaccua

SEQ ID NO: 1934992 - RNA, 19 nt, Homo sapiens
  misc_RNA (1)...(19): siRNA sense strand
cuaaugagauuggagcuau

SEQ ID NO: 1934993 - RNA, 19 nt, Homo sapiens
  misc_RNA (1)...(19): siRNA sense strand
gggacugucuaaugagauu

SEQ ID NO: 1934994 - RNA, 19 nt, Homo sapiens
  misc_RNA (1)...(19): siRNA sense strand
gacaauuggugugaccuuu

SEQ ID NO: 1934995 - RNA, 19 nt, Homo sapiens
  misc_RNA (1)...(19): siRNA sense strand
cagggaauaugccaccaaa

SEQ ID NO: 1934996 - RNA, 19 nt, Homo sapiens
  misc_RNA (1)...(19): siRNA sense strand
gcucuugggugacaauugg

SEQ ID NO: 1934997 - RNA, 19 nt, Homo sapiens
  misc_RNA (1)...(19): siRNA sense strand
uaauuuggccucaguaugu

SEQ ID NO: 1934998 - RNA, 19 nt, Homo sapiens
  misc_RNA (1)...(19): siRNA sense strand
agaaguaucaccaauguau

SEQ ID NO: 1934999 - RNA, 19 nt, Homo sapiens
  misc_RNA (1)...(19): siRNA sense strand
gcagggaguauugguuuaa

SEQ ID NO: 1935000 - RNA, 19 nt, Homo sapiens
  misc_RNA (1)...(19): siRNA sense strand
aauguacgguggauuaguu

SEQ ID NO: 1935001 - RNA, 19 nt, Homo sapiens
  misc_RNA (1)...(19): siRNA sense strand
acacuaccuucuaggguuu

SEQ ID NO: 1935002 - RNA, 19 nt, Homo sapiens
  misc_RNA (1)...(19): siRNA sense strand
ugaaaaggcuguaauuugg

SEQ ID NO: 1935003 - RNA, 19 nt, Homo sapiens
  misc_RNA (1)...(19): siRNA sense strand
gugcagaaguaucaccaau

SEQ ID NO: 1935004 - RNA, 19 nt, Homo sapiens
  misc_RNA (1)...(19): siRNA sense strand
uacgaucaauaccauauga

SEQ ID NO: 1935005 - RNA, 19 nt, Homo sapiens
  misc_RNA (1)...(19): siRNA sense strand
gcuacauucuggugugaug

SEQ ID NO: 1935006 - RNA, 19 nt, Homo sapiens
  misc_RNA (1)...(19): siRNA sense strand
ucaaagaggcagcauugga

SEQ ID NO: 1935007 - RNA, 19 nt, Homo sapiens
  misc_RNA (1)...(19): siRNA sense strand
gcaucuugcuugguugcua

SEQ ID NO: 1935008 - RNA, 19 nt, Homo sapiens
  misc_RNA (1)...(19): siRNA sense strand
uggcuccucugacaauauu

SEQ ID NO: 1935009 - RNA, 19 nt, Homo sapiens
  misc_RNA (1)...(19): siRNA sense strand
gaacuggccaagaacucaa

SEQ ID NO: 1935010 - RNA, 19 nt, Homo sapiens
  misc_RNA (1)...(19): siRNA sense strand
gaaguaucaccaauguaug

SEQ ID NO: 1935011 - RNA, 19 nt, Homo sapiens
  misc_RNA (1)...(19): siRNA sense strand
ucauugggaucuauguuuc

SEQ ID NO: 1935012 - RNA, 19 nt, Homo sapiens
  misc_RNA (1)...(19): siRNA sense strand
guauugguuuaacagcuuu

SEQ ID NO: 1935013 - RNA, 19 nt, Homo sapiens
  misc_RNA (1)...(19): siRNA sense strand
uagcagggaguauugguuu

SEQ ID NO: 1935014 - RNA, 19 nt, Homo sapiens
  misc_RNA (1)...(19): siRNA sense strand
uaaugagauuggagcuauu

SEQ ID NO: 1935015 - RNA, 19 nt, Homo sapiens
  misc_RNA (1)...(19): siRNA sense strand
ugaagaauuccaucacgaa

SEQ ID NO: 1935016 - RNA, 19 nt, Homo sapiens
  misc_RNA (1)...(19): siRNA sense strand
ggaaugcugguacgaucaa

SEQ ID NO: 1935017 - RNA, 19 nt, Homo sapiens
  misc_RNA (1)...(19): siRNA sense strand
cugcaaggcuggugugucu

SEQ ID NO: 1935018 - RNA, 19 nt, Homo sapiens
  misc_RNA (1)...(19): siRNA sense strand
gcuguaauuuggccucagu

SEQ ID NO: 1935019 - RNA, 19 nt, Homo sapiens
  misc_RNA (1)...(19): siRNA sense strand
gaucagaugggaagauggu

SEQ ID NO: 1935020 - RNA, 19 nt, Homo sapiens
  misc_RNA (1)...(19): siRNA sense strand
uacgguggauuaguucuuu

SEQ ID NO: 1935021 - RNA, 19 nt, Homo sapiens
  misc_RNA (1)...(19): siRNA sense strand
gcagugguggcuccucuga

SEQ ID NO: 1935022 - RNA, 19 nt, Homo sapiens
  misc_RNA (1)...(19): siRNA sense strand
ccaccuauauguacuuagc

SEQ ID NO: 1935023 - RNA, 19 nt, Homo sapiens
  misc_RNA (1)...(19): siRNA sense strand
gauuggagcuauugaaaag

SEQ ID NO: 1935024 - RNA, 19 nt, Homo sapiens
  misc_RNA (1)...(19): siRNA sense strand
augggaagaugguuuguug

SEQ ID NO: 1935025 - RNA, 19 nt, Homo sapiens
  misc_RNA (1)...(19): siRNA sense strand
guaauuuggccucaguaug

SEQ ID NO: 1935026 - RNA, 19 nt, Homo sapiens
  misc_RNA (1)...(19): siRNA sense strand
gguggcuccucugacaaua

SEQ ID NO: 1935027 - RNA, 19 nt, Homo sapiens
  misc_RNA (1)...(19): siRNA sense strand
uaacaccuagcagggaaua

SEQ ID NO: 1935028 - RNA, 19 nt, Homo sapiens
  misc_RNA (1)...(19): siRNA sense strand
gugccacucuuuacucagu

SEQ ID NO: 1935029 - RNA, 19 nt, Homo sapiens
  misc_RNA (1)...(19): siRNA sense strand
acucaaagaggcagcauug

SEQ ID NO: 1935030 - RNA, 19 nt, Homo sapiens
  misc_RNA (1)...(19): siRNA sense strand
cagcauguuccuucuguau

SEQ ID NO: 1935031 - RNA, 19 nt, Homo sapiens
  misc_RNA (1)...(19): siRNA sense strand
caagcgugcagaaguauca

SEQ ID NO: 1935032 - RNA, 19 nt, Homo sapiens
  misc_RNA (1)...(19): siRNA sense strand
ucagaugggaagaugguuu

SEQ ID NO: 1935033 - RNA, 19 nt, Homo sapiens
  misc_RNA (1)...(19): siRNA sense strand
aauaugaucccauuaacuc

SEQ ID NO: 1935034 - RNA, 19 nt, Homo sapiens
  misc_RNA (1)...(19): siRNA sense strand
guaugucaaggauagaauu

SEQ ID NO: 1935035 - RNA, 19 nt, Homo sapiens
  misc_RNA (1)...(19): siRNA sense strand
ugucaaggauagaauucau

SEQ ID NO: 1935036 - RNA, 19 nt, Homo sapiens
  misc_RNA (1)...(19): siRNA sense strand
caauuggugugaccuuugc

SEQ ID NO: 1935037 - RNA, 19 nt, Homo sapiens
  misc_RNA (1)...(19): siRNA sense strand
gaauaugccaccaaaacaa

SEQ ID NO: 1935038 - RNA, 19 nt, Homo sapiens
  misc_RNA (1)...(19): siRNA sense strand
ucaccaauguauggaguuc

SEQ ID NO: 1935039 - RNA, 19 nt, Homo sapiens
  misc_RNA (1)...(19): siRNA sense strand
gaccuuugcagccaugguu

SEQ ID NO: 1935040 - RNA, 19 nt, Homo sapiens
  misc_RNA (1)...(19): siRNA sense strand
cagaugggaagaugguuug

SEQ ID NO: 1935041 - RNA, 19 nt, Homo sapiens
  misc_RNA (1)...(19): siRNA sense strand
gcagggaauaugccaccaa

SEQ ID NO: 1935042 - RNA, 19 nt, Homo sapiens
  misc_RNA (1)...(19): siRNA sense strand
aguauugguuuaacagcuu

SEQ ID NO: 1935043 - RNA, 19 nt, Homo sapiens
  misc_RNA (1)...(19): siRNA sense strand
cucaguaugucaaggauag

SEQ ID NO: 1935044 - RNA, 19 nt, Homo sapiens
  misc_RNA (1)...(19): siRNA sense strand
gccugggucucgucuuugu

SEQ ID NO: 1935045 - RNA, 19 nt, Homo sapiens
  misc_RNA (1)...(19): siRNA sense strand
ucagcauguuccuucugua

SEQ ID NO: 1935046 - RNA, 19 nt, Homo sapiens
  misc_RNA (1)...(19): siRNA sense strand
uuuacucaguggcaaugua

SEQ ID NO: 1935047 - RNA, 19 nt, Homo sapiens
  misc_RNA (1)...(19): siRNA sense strand
agcagggaguauugguuua

SEQ ID NO: 1935048 - RNA, 19 nt, Homo sapiens
  misc_RNA (1)...(19): siRNA sense strand
guaucaagcgugcagaagu

SEQ ID NO: 1935049 - RNA, 19 nt, Homo sapiens
  misc_RNA (1)...(19): siRNA sense strand
gcaauguacgguggauuag

SEQ ID NO: 1935050 - RNA, 19 nt, Homo sapiens
  misc_RNA (1)...(19): siRNA sense strand
guacgaucaauaccauaug

SEQ ID NO: 1935051 - RNA, 19 nt, Homo sapiens
  misc_RNA (1)...(19): siRNA sense strand
ugagauuggagcuauugaa

SEQ ID NO: 1935052 - RNA, 19 nt, Homo sapiens
  misc_RNA (1)...(19): siRNA sense strand
guacgguggauuaguucuu

SEQ ID NO: 1935053 - RNA, 19 nt, Homo sapiens
  misc_RNA (1)...(19): siRNA sense strand
gaaucaauggcuguuaaca

SEQ ID NO: 1935054 - RNA, 19 nt, Homo sapiens
  misc_RNA (1)...(19): siRNA sense strand
gaugggaagaugguuuguu

SEQ ID NO: 1935055 - RNA, 19 nt, Homo sapiens
  misc_RNA (1)...(19): siRNA sense strand
agugguggcuccucugaca

SEQ ID NO: 1935056 - RNA, 19 nt, Homo sapiens
  misc_RNA (1)...(19): siRNA sense strand
uugcuugguugcuacauuc

SEQ ID NO: 1935057 - RNA, 19 nt, Homo sapiens
  misc_RNA (1)...(19): siRNA sense strand
gaaugcugguacgaucaau

SEQ ID NO: 1935058 - RNA, 19 nt, Homo sapiens
  misc_RNA (1)...(19): siRNA sense strand
uacuauggcuugggacugu

SEQ ID NO: 1935059 - RNA, 19 nt, Homo sapiens
  misc_RNA (1)...(19): siRNA sense strand
accaauguauggaguucaa

SEQ ID NO: 1935060 - RNA, 19 nt, Homo sapiens
  misc_RNA (1)...(19): siRNA sense strand
ggagaacuggccaagaacu

SEQ ID NO: 1935061 - RNA, 19 nt, Homo sapiens
  misc_RNA (1)...(19): siRNA sense strand
ggaauaugccaccaaaaca

SEQ ID NO: 1935062 - RNA, 19 nt, Homo sapiens
  misc_RNA (1)...(19): siRNA sense strand
cgaagaaucaauggcuguu

SEQ ID NO: 1935063 - RNA, 19 nt, Homo sapiens
  misc_RNA (1)...(19): siRNA sense strand
acaccuagcagggaauaug

SEQ ID NO: 1935064 - RNA, 19 nt, Homo sapiens
  misc_RNA (1)...(19): siRNA sense strand
cagaaguaucaccaaugua

SEQ ID NO: 1935065 - RNA, 19 nt, Homo sapiens
  misc_RNA (1)...(19): siRNA sense strand
gagaacuggccaagaacuc

SEQ ID NO: 1935066 - RNA, 19 nt, Homo sapiens
  misc_RNA (1)...(19): siRNA sense strand
ccuuugagcucaucuauaa

SEQ ID NO: 1935067 - RNA, 19 nt, Homo sapiens
  misc_RNA (1)...(19): siRNA sense strand
gcaaguggguggugcagaa

SEQ ID NO: 1935068 - RNA, 19 nt, Homo sapiens
  misc_RNA (1)...(19): siRNA sense strand
cgacagcuauauccgcuuu

SEQ ID NO: 1935069 - RNA, 19 nt, Homo sapiens
  misc_RNA (1)...(19): siRNA sense strand
agacagugguuccugguaa

SEQ ID NO: 1935070 - RNA, 19 nt, Homo sapiens
  misc_RNA (1)...(19): siRNA sense strand
ugaagaaccuggacaacuc

SEQ ID NO: 1935071 - RNA, 19 nt, Homo sapiens
  misc_RNA (1)...(19): siRNA sense strand
gcaagcuggugggcacuaa

SEQ ID NO: 1935072 - RNA, 19 nt, Homo sapiens
  misc_RNA (1)...(19): siRNA sense strand
caugaaggaugcugugauc

SEQ ID NO: 1935073 - RNA, 19 nt, Homo sapiens
  misc_RNA (1)...(19): siRNA sense strand
gcucugugcuggcgugcaa

SEQ ID NO: 1935074 - RNA, 19 nt, Homo sapiens
  misc_RNA (1)...(19): siRNA sense strand
ucaggcaccucgacacuca

SEQ ID NO: 1935075 - RNA, 19 nt, Homo sapiens
  misc_RNA (1)...(19): siRNA sense strand
gcaacaacuccauccagaa

SEQ ID NO: 1935076 - RNA, 19 nt, Homo sapiens
  misc_RNA (1)...(19): siRNA sense strand
caacaacuccauccagaag

SEQ ID NO: 1935077 - RNA, 19 nt, Homo sapiens
  misc_RNA (1)...(19): siRNA sense strand
gaagaaccuggacaacuca

SEQ ID NO: 1935078 - RNA, 19 nt, Homo sapiens
  misc_RNA (1)...(19): siRNA sense strand
ggaaggggaucgcaacauc

SEQ ID NO: 1935079 - RNA, 19 nt, Homo sapiens
  misc_RNA (1)...(19): siRNA sense strand
agaagcaccuggagaacuc

SEQ ID NO: 1935080 - RNA, 19 nt, Homo sapiens
  misc_RNA (1)...(19): siRNA sense strand
caccaaguuugaccucaga

SEQ ID NO: 1935081 - RNA, 19 nt, Homo sapiens
  misc_RNA (1)...(19): siRNA sense strand
gacgaggcaucaugugcau

SEQ ID NO: 1935082 - RNA, 19 nt, Homo sapiens
  misc_RNA (1)...(19): siRNA sense strand
uggaggagaugcugaagcu

SEQ ID NO: 1935083 - RNA, 19 nt, Homo sapiens
  misc_RNA (1)...(19): siRNA sense strand
aguggguggugcagaagua

SEQ ID NO: 1935084 - RNA, 19 nt, Homo sapiens
  misc_RNA (1)...(19): siRNA sense strand
caacaucuggaucgugaag

SEQ ID NO: 1935085 - RNA, 19 nt, Homo sapiens
  misc_RNA (1)...(19): siRNA sense strand
gcucuauggcgcugacuuc

SEQ ID NO: 1935086 - RNA, 19 nt, Homo sapiens
  misc_RNA (1)...(19): siRNA sense strand
acaacuccauccagaagca

SEQ ID NO: 1935087 - RNA, 19 nt, Homo sapiens
  misc_RNA (1)...(19): siRNA sense strand
ggguggugcagaaguauau

SEQ ID NO: 1935088 - RNA, 19 nt, Homo sapiens
  misc_RNA (1)...(19): siRNA sense strand
agugguuccugguaacuga

SEQ ID NO: 1935089 - RNA, 19 nt, Homo sapiens
  misc_RNA (1)...(19): siRNA sense strand
gacagugguuccugguaac

SEQ ID NO: 1935090 - RNA, 19 nt, Homo sapiens
  misc_RNA (1)...(19): siRNA sense strand
gcaguuggagcgcgaguua

SEQ ID NO: 1935091 - RNA, 19 nt, Homo sapiens
  misc_RNA (1)...(19): siRNA sense strand
gaagaaagagggagagaag

SEQ ID NO: 1935092 - RNA, 19 nt, Homo sapiens
  misc_RNA (1)...(19): siRNA sense strand
cuaaagcgguuccugguau

SEQ ID NO: 1935093 - RNA, 19 nt, Homo sapiens
  misc_RNA (1)...(19): siRNA sense strand
gaauuuggccuggcauauu

SEQ ID NO: 1935094 - RNA, 19 nt, Homo sapiens
  misc_RNA (1)...(19): siRNA sense strand
aauuuggccuggcauauuu

SEQ ID NO: 1935095 - RNA, 19 nt, Homo sapiens
  misc_RNA (1)...(19): siRNA sense strand
gagcgcgaguuacaguuga

SEQ ID NO: 1935096 - RNA, 19 nt, Homo sapiens
  misc_RNA (1)...(19): siRNA sense strand
ugaccaauaucaccuucuu

SEQ ID NO: 1935097 - RNA, 19 nt, Homo sapiens
  misc_RNA (1)...(19): siRNA sense strand
gaagcagcagcgacucuaa

SEQ ID NO: 1935098 - RNA, 19 nt, Homo sapiens
  misc_RNA (1)...(19): siRNA sense strand
caucagagacaccauggaa

SEQ ID NO: 1935099 - RNA, 19 nt, Homo sapiens
  misc_RNA (1)...(19): siRNA sense strand
gcuaaagcgguuccuggua

SEQ ID NO: 1935100 - RNA, 19 nt, Homo sapiens
  misc_RNA (1)...(19): siRNA sense strand
ggaagcagcagcgacucua

SEQ ID NO: 1935101 - RNA, 19 nt, Homo sapiens
  misc_RNA (1)...(19): siRNA sense strand
uaaagcgguuccugguaug

SEQ ID NO: 1935102 - RNA, 19 nt, Homo sapiens
  misc_RNA (1)...(19): siRNA sense strand
agucuuuccugaccaauau

SEQ ID NO: 1935103 - RNA, 19 nt, Homo sapiens
  misc_RNA (1)...(19): siRNA sense strand
ggaauuuggccuggcauau

SEQ ID NO: 1935104 - RNA, 19 nt, Homo sapiens
  misc_RNA (1)...(19): siRNA sense strand
ggagcgcgaguuacaguug

SEQ ID NO: 1935105 - RNA, 19 nt, Homo sapiens
  misc_RNA (1)...(19): siRNA sense strand
ggacacgaggcccugaaga

SEQ ID NO: 1935106 - RNA, 19 nt, Homo sapiens
  misc_RNA (1)...(19): siRNA sense strand
guccuguccuuguucuauu

SEQ ID NO: 1935107 - RNA, 19 nt, Homo sapiens
  misc_RNA (1)...(19): siRNA sense strand
gagagaagagcgccuacuc

SEQ ID NO: 1935108 - RNA, 19 nt, Homo sapiens
  misc_RNA (1)...(19): siRNA sense strand
ucagagacaccauggaaca

SEQ ID NO: 1935109 - RNA, 19 nt, Homo sapiens
  misc_RNA (1)...(19): siRNA sense strand
gcacaaaccccaggagaga

SEQ ID NO: 1935110 - RNA, 19 nt, Homo sapiens
  misc_RNA (1)...(19): siRNA sense strand
gcccugaagagaagaaaga

SEQ ID NO: 1935111 - RNA, 19 nt, Homo sapiens
  misc_RNA (1)...(19): siRNA sense strand
ccaauaucaccuucuugaa

SEQ ID NO: 1935112 - RNA, 19 nt, Homo sapiens
  misc_RNA (1)...(19): siRNA sense strand
gggcagcacaucagagaca

SEQ ID NO: 1935113 - RNA, 19 nt, Homo sapiens
  misc_RNA (1)...(19): siRNA sense strand
gagaagaaagagggagaga

SEQ ID NO: 1935114 - RNA, 19 nt, Homo sapiens
  misc_RNA (1)...(19): siRNA sense strand
gagcgccuacucuguguuc

SEQ ID NO: 1935115 - RNA, 19 nt, Homo sapiens
  misc_RNA (1)...(19): siRNA sense strand
acacgaggcccugaagaga

SEQ ID NO: 1935116 - RNA, 19 nt, Homo sapiens
  misc_RNA (1)...(19): siRNA sense strand
cagggcagcacaucagaga

SEQ ID NO: 1935117 - RNA, 19 nt, Homo sapiens
  misc_RNA (1)...(19): siRNA sense strand
accaauaucaccuucuuga

SEQ ID NO: 1935118 - RNA, 19 nt, Homo sapiens
  misc_RNA (1)...(19): siRNA sense strand
agaaagagggagagaagag

SEQ ID NO: 1935119 - RNA, 19 nt, Homo sapiens
  misc_RNA (1)...(19): siRNA sense strand
cacgaggcccugaagagaa

SEQ ID NO: 1935120 - RNA, 19 nt, Homo sapiens
  misc_RNA (1)...(19): siRNA sense strand
aagcagcagcgacucuaaa

SEQ ID NO: 1935121 - RNA, 19 nt, Homo sapiens
  misc_RNA (1)...(19): siRNA sense strand
gacacgaggcccugaagag

SEQ ID NO: 1935122 - RNA, 19 nt, Homo sapiens
  misc_RNA (1)...(19): siRNA sense strand
cgccuacucuguguucaau

SEQ ID NO: 1935123 - RNA, 19 nt, Homo sapiens
  misc_RNA (1)...(19): siRNA sense strand
acgaggcccugaagagaag

SEQ ID NO: 1935124 - RNA, 19 nt, Homo sapiens
  misc_RNA (1)...(19): siRNA sense strand
gaugaucagucaacacaua

SEQ ID NO: 1935125 - RNA, 19 nt, Homo sapiens
  misc_RNA (1)...(19): siRNA sense strand
gcuuauaucuuaggucuua

SEQ ID NO: 1935126 - RNA, 19 nt, Homo sapiens
  misc_RNA (1)...(19): siRNA sense strand
ccacggagcucauauuuua

SEQ ID NO: 1935127 - RNA, 19 nt, Homo sapiens
  misc_RNA (1)...(19): siRNA sense strand
caaauuccgucuccaaguu

SEQ ID NO: 1935128 - RNA, 19 nt, Homo sapiens
  misc_RNA (1)...(19): siRNA sense strand
guacaaucccuaugaguuu

SEQ ID NO: 1935129 - RNA, 19 nt, Homo sapiens
  misc_RNA (1)...(19): siRNA sense strand
ccuaugaguuugccuuaaa

SEQ ID NO: 1935130 - RNA, 19 nt, Homo sapiens
  misc_RNA (1)...(19): siRNA sense strand
uaucuuaggucuuaucaca

SEQ ID NO: 1935131 - RNA, 19 nt, Homo sapiens
  misc_RNA (1)...(19): siRNA sense strand
gccuuaaaguucaaaguuu

SEQ ID NO: 1935132 - RNA, 19 nt, Homo sapiens
  misc_RNA (1)...(19): siRNA sense strand
ggaaggcuuugggaagaaa

SEQ ID NO: 1935133 - RNA, 19 nt, Homo sapiens
  misc_RNA (1)...(19): siRNA sense strand
caguaaagccucaguguug

SEQ ID NO: 1935134 - RNA, 19 nt, Homo sapiens
  misc_RNA (1)...(19): siRNA sense strand
ggccauacuuagaacauga

SEQ ID NO: 1935135 - RNA, 19 nt, Homo sapiens
  misc_RNA (1)...(19): siRNA sense strand
gaguuugccuuaaaguuca

SEQ ID NO: 1935136 - RNA, 19 nt, Homo sapiens
  misc_RNA (1)...(19): siRNA sense strand
auaaguauguugucguuga

SEQ ID NO: 1935137 - RNA, 19 nt, Homo sapiens
  misc_RNA (1)...(19): siRNA sense strand
gcaguaaagccucaguguu

SEQ ID NO: 1935138 - RNA, 19 nt, Homo sapiens
  misc_RNA (1)...(19): siRNA sense strand
gcagucguuucaaccagaa

SEQ ID NO: 1935139 - RNA, 19 nt, Homo sapiens
  misc_RNA (1)...(19): siRNA sense strand
aguggcugcuuauaucuua

SEQ ID NO: 1935140 - RNA, 19 nt, Homo sapiens
  misc_RNA (1)...(19): siRNA sense strand
gauguucgauccugucacu

SEQ ID NO: 1935141 - RNA, 19 nt, Homo sapiens
  misc_RNA (1)...(19): siRNA sense strand
aaggaaggcuuugggaaga

SEQ ID NO: 1935142 - RNA, 19 nt, Homo sapiens
  misc_RNA (1)...(19): siRNA sense strand
acaauggccauacuuagaa

SEQ ID NO: 1935143 - RNA, 19 nt, Homo sapiens
  misc_RNA (1)...(19): siRNA sense strand
cagaguuaguggaaggaaa

SEQ ID NO: 1935144 - RNA, 19 nt, Homo sapiens
  misc_RNA (1)...(19): siRNA sense strand
cacaauggccauacuuaga

SEQ ID NO: 1935145 - RNA, 19 nt, Homo sapiens
  misc_RNA (1)...(19): siRNA sense strand
ucuuaggucuuaucacaau

SEQ ID NO: 1935146 - RNA, 19 nt, Homo sapiens
  misc_RNA (1)...(19): siRNA sense strand
ugaguuugccuuaaaguuc

SEQ ID NO: 1935147 - RNA, 19 nt, Homo sapiens
  misc_RNA (1)...(19): siRNA sense strand
uaaguauguugucguugau

SEQ ID NO: 1935148 - RNA, 19 nt, Homo sapiens
  misc_RNA (1)...(19): siRNA sense strand
caaaagaacaacaaaagga

SEQ ID NO: 1935149 - RNA, 19 nt, Homo sapiens
  misc_RNA (1)...(19): siRNA sense strand
cagaugaucagucaacaca

SEQ ID NO: 1935150 - RNA, 19 nt, Homo sapiens
  misc_RNA (1)...(19): siRNA sense strand
uuaugcagaugaucaguca

SEQ ID NO: 1935151 - RNA, 19 nt, Homo sapiens
  misc_RNA (1)...(19): siRNA sense strand
guucgauccugucacuaug

SEQ ID NO: 1935152 - RNA, 19 nt, Homo sapiens
  misc_RNA (1)...(19): siRNA sense strand
uguguacuacuccaaauaa

SEQ ID NO: 1935153 - RNA, 19 nt, Homo sapiens
  misc_RNA (1)...(19): siRNA sense strand
gauauugugauucgucauc

SEQ ID NO: 1935154 - RNA, 19 nt, Homo sapiens
  misc_RNA (1)...(19): siRNA sense strand
auuaguggcugcuuauauc

SEQ ID NO: 1935155 - RNA, 19 nt, Homo sapiens
  misc_RNA (1)...(19): siRNA sense strand
ccucaguguuguguggaua

SEQ ID NO: 1935156 - RNA, 19 nt, Homo sapiens
  misc_RNA (1)...(19): siRNA sense strand
uacaaucccuaugaguuug

SEQ ID NO: 1935157 - RNA, 19 nt, Homo sapiens
  misc_RNA (1)...(19): siRNA sense strand
uguacaaucccuaugaguu

SEQ ID NO: 1935158 - RNA, 19 nt, Homo sapiens
  misc_RNA (1)...(19): siRNA sense strand
cugucacuaugguguaaua

SEQ ID NO: 1935159 - RNA, 19 nt, Homo sapiens
  misc_RNA (1)...(19): siRNA sense strand
ucacaauggccauacuuag

SEQ ID NO: 1935160 - RNA, 19 nt, Homo sapiens
  misc_RNA (1)...(19): siRNA sense strand
aaagacaaccagaguuagu

SEQ ID NO: 1935161 - RNA, 19 nt, Homo sapiens
  misc_RNA (1)...(19): siRNA sense strand
ucaguguuguguggauauu

SEQ ID NO: 1935162 - RNA, 19 nt, Homo sapiens
  misc_RNA (1)...(19): siRNA sense strand
ucuccaaguuuccgagcaa

SEQ ID NO: 1935163 - RNA, 19 nt, Homo sapiens
  misc_RNA (1)...(19): siRNA sense strand
ucagucaacacauaagcaa

SEQ ID NO: 1935164 - RNA, 19 nt, Homo sapiens
  misc_RNA (1)...(19): siRNA sense strand
aguaaagccucaguguugu

SEQ ID NO: 1935165 - RNA, 19 nt, Homo sapiens
  misc_RNA (1)...(19): siRNA sense strand
aaauuccgucuccaaguuu

SEQ ID NO: 1935166 - RNA, 19 nt, Homo sapiens
  misc_RNA (1)...(19): siRNA sense strand
guaaagccucaguguugug

SEQ ID NO: 1935167 - RNA, 19 nt, Homo sapiens
  misc_RNA (1)...(19): siRNA sense strand
gagauguucgauccuguca

SEQ ID NO: 1935168 - RNA, 19 nt, Homo sapiens
  misc_RNA (1)...(19): siRNA sense strand
caauggccauacuuagaac

SEQ ID NO: 1935169 - RNA, 19 nt, Homo sapiens
  misc_RNA (1)...(19): siRNA sense strand
guuaguggaaggaaaucuu

SEQ ID NO: 1935170 - RNA, 19 nt, Homo sapiens
  misc_RNA (1)...(19): siRNA sense strand
cuaugaguuugccuuaaag

SEQ ID NO: 1935171 - RNA, 19 nt, Homo sapiens
  misc_RNA (1)...(19): siRNA sense strand
agaguuaguggaaggaaau

SEQ ID NO: 1935172 - RNA, 19 nt, Homo sapiens
  misc_RNA (1)...(19): siRNA sense strand
ggaagucuguuucacgaua

SEQ ID NO: 1935173 - RNA, 19 nt, Homo sapiens
  misc_RNA (1)...(19): siRNA sense strand
gaacgcagcuccuacuaca

SEQ ID NO: 1935174 - RNA, 19 nt, Homo sapiens
  misc_RNA (1)...(19): siRNA sense strand
ucacagagcuccuccugaa

SEQ ID NO: 1935175 - RNA, 19 nt, Homo sapiens
  misc_RNA (1)...(19): siRNA sense strand
agaaagugaucacagaaua

SEQ ID NO: 1935176 - RNA, 19 nt, Homo sapiens
  misc_RNA (1)...(19): siRNA sense strand
gaauacgucuucagugguu

SEQ ID NO: 1935177 - RNA, 19 nt, Homo sapiens
  misc_RNA (1)...(19): siRNA sense strand
ggaagcagauggcagugaa

SEQ ID NO: 1935178 - RNA, 19 nt, Homo sapiens
  misc_RNA (1)...(19): siRNA sense strand
ggccagagcuauuaagaau

SEQ ID NO: 1935179 - RNA, 19 nt, Homo sapiens
  misc_RNA (1)...(19): siRNA sense strand
gcaaaggucuagccacagu

SEQ ID NO: 1935180 - RNA, 19 nt, Homo sapiens
  misc_RNA (1)...(19): siRNA sense strand
gcagaggccagagcuauua

SEQ ID NO: 1935181 - RNA, 19 nt, Homo sapiens
  misc_RNA (1)...(19): siRNA sense strand
gaucucaaguauaccauug

SEQ ID NO: 1935182 - RNA, 19 nt, Homo sapiens
  misc_RNA (1)...(19): siRNA sense strand
ggagaaacaguuccagaaa

SEQ ID NO: 1935183 - RNA, 19 nt, Homo sapiens
  misc_RNA (1)...(19): siRNA sense strand
ucagagagauguucagauc

SEQ ID NO: 1935184 - RNA, 19 nt, Homo sapiens
  misc_RNA (1)...(19): siRNA sense strand
gagaaggcaugagagcuaa

SEQ ID NO: 1935185 - RNA, 19 nt, Homo sapiens
  misc_RNA (1)...(19): siRNA sense strand
gaaccggcuuucagaaugu

SEQ ID NO: 1935186 - RNA, 19 nt, Homo sapiens
  misc_RNA (1)...(19): siRNA sense strand
gagaaacaguuccagaaag

SEQ ID NO: 1935187 - RNA, 19 nt, Homo sapiens
  misc_RNA (1)...(19): siRNA sense strand
aaacuugccuuaucaccuu

SEQ ID NO: 1935188 - RNA, 19 nt, Homo sapiens
  misc_RNA (1)...(19): siRNA sense strand
caacauucgugcuggaaau

SEQ ID NO: 1935189 - RNA, 19 nt, Homo sapiens
  misc_RNA (1)...(19): siRNA sense strand
gaccagagaucaucacacu

SEQ ID NO: 1935190 - RNA, 19 nt, Homo sapiens
  misc_RNA (1)...(19): siRNA sense strand
gaacucaggcgauuacaag

SEQ ID NO: 1935191 - RNA, 19 nt, Homo sapiens
  misc_RNA (1)...(19): siRNA sense strand
gcaggaugaugaccagaga

SEQ ID NO: 1935192 - RNA, 19 nt, Homo sapiens
  misc_RNA (1)...(19): siRNA sense strand
guucugcauugccaaauuu

SEQ ID NO: 1935193 - RNA, 19 nt, Homo sapiens
  misc_RNA (1)...(19): siRNA sense strand
ccacacaaccugaugcaaa

SEQ ID NO: 1935194 - RNA, 19 nt, Homo sapiens
  misc_RNA (1)...(19): siRNA sense strand
gagcgcaggcugagaauau

SEQ ID NO: 1935195 - RNA, 19 nt, Homo sapiens
  misc_RNA (1)...(19): siRNA sense strand
gagaguuccuucgaaagaa

SEQ ID NO: 1935196 - RNA, 19 nt, Homo sapiens
  misc_RNA (1)...(19): siRNA sense strand
ccagagcuauuaagaaugg

SEQ ID NO: 1935197 - RNA, 19 nt, Homo sapiens
  misc_RNA (1)...(19): siRNA sense strand
ggcaugaucuaccuuggaa

SEQ ID NO: 1935198 - RNA, 19 nt, Homo sapiens
  misc_RNA (1)...(19): siRNA sense strand
ccgcaaagcagaagaaaga

SEQ ID NO: 1935199 - RNA, 19 nt, Homo sapiens
  misc_RNA (1)...(19): siRNA sense strand
gggagaacacccaggauaa

SEQ ID NO: 1935200 - RNA, 19 nt, Homo sapiens
  misc_RNA (1)...(19): siRNA sense strand
gaaggcaugagagcuaaua

SEQ ID NO: 1935201 - RNA, 19 nt, Homo sapiens
  misc_RNA (1)...(19): siRNA sense strand
cuaauaauccugagcagaa

SEQ ID NO: 1935202 - RNA, 19 nt, Homo sapiens
  misc_RNA (1)...(19): siRNA sense strand
agaaagggauguggaguga

SEQ ID NO: 1935203 - RNA, 19 nt, Homo sapiens
  misc_RNA (1)...(19): siRNA sense strand
guaccauccuucauccaaa

SEQ ID NO: 1935204 - RNA, 19 nt, Homo sapiens
  misc_RNA (1)...(19): siRNA sense strand
agaaacaguuccagaaagu

SEQ ID NO: 1935205 - RNA, 19 nt, Homo sapiens
  misc_RNA (1)...(19): siRNA sense strand
gggaagaaggucaauguga

SEQ ID NO: 1935206 - RNA, 19 nt, Homo sapiens
  misc_RNA (1)...(19): siRNA sense strand
gaucacagaauaccugaau

SEQ ID NO: 1935207 - RNA, 19 nt, Homo sapiens
  misc_RNA (1)...(19): siRNA sense strand
caaagcagaagaaagagaa

SEQ ID NO: 1935208 - RNA, 19 nt, Homo sapiens
  misc_RNA (1)...(19): siRNA sense strand
cugaagcugugguggaaua

SEQ ID NO: 1935209 - RNA, 19 nt, Homo sapiens
  misc_RNA (1)...(19): siRNA sense strand
ggaaaacauugcagaauca

SEQ ID NO: 1935210 - RNA, 19 nt, Homo sapiens
  misc_RNA (1)...(19): siRNA sense strand
caaaauacaugucuucuac

SEQ ID NO: 1935211 - RNA, 19 nt, Homo sapiens
  misc_RNA (1)...(19): siRNA sense strand
cugaugaccugcacuucua

SEQ ID NO: 1935212 - RNA, 19 nt, Homo sapiens
  misc_RNA (1)...(19): siRNA sense strand
gagaaggagcgaucugcua

SEQ ID NO: 1935213 - RNA, 19 nt, Homo sapiens
  misc_RNA (1)...(19): siRNA sense strand
gagaauauggagagacuau

SEQ ID NO: 1935214 - RNA, 19 nt, Homo sapiens
  misc_RNA (1)...(19): siRNA sense strand
gagaguauggcaugaucua

SEQ ID NO: 1935215 - RNA, 19 nt, Homo sapiens
  misc_RNA (1)...(19): siRNA sense strand
ccaccguguugcagauaua

SEQ ID NO: 1935216 - RNA, 19 nt, Homo sapiens
  misc_RNA (1)...(19): siRNA sense strand
gaauauggagagacuaugu

SEQ ID NO: 1935217 - RNA, 19 nt, Homo sapiens
  misc_RNA (1)...(19): siRNA sense strand
gaagucuguuucacgauag

SEQ ID NO: 1935218 - RNA, 19 nt, Homo sapiens
  misc_RNA (1)...(19): siRNA sense strand
gcaagaaggaagugccuau

SEQ ID NO: 1935219 - RNA, 19 nt, Homo sapiens
  misc_RNA (1)...(19): siRNA sense strand
uagccacagugaucagaua

SEQ ID NO: 1935220 - RNA, 19 nt, Homo sapiens
  misc_RNA (1)...(19): siRNA sense strand
ucagauaccggcaggauga

SEQ ID NO: 1935221 - RNA, 19 nt, Homo sapiens
  misc_RNA (1)...(19): siRNA sense strand
acacuacgaugaacugcuu

SEQ ID NO: 1935222 - RNA, 19 nt, Homo sapiens
  misc_RNA (1)...(19): siRNA sense strand
gagagauguucagaucauu

SEQ ID NO: 1935223 - RNA, 19 nt, Homo sapiens
  misc_RNA (1)...(19): siRNA sense strand
gcaaagcagaagaaagaga

SEQ ID NO: 1935224 - RNA, 19 nt, Homo sapiens
  misc_RNA (1)...(19): siRNA sense strand
gagaacacccaggauaaga

SEQ ID NO: 1935225 - RNA, 19 nt, Homo sapiens
  misc_RNA (1)...(19): siRNA sense strand
cgagaguuccuucgaaaga

SEQ ID NO: 1935226 - RNA, 19 nt, Homo sapiens
  misc_RNA (1)...(19): siRNA sense strand
gaaagugaucacagaauac

SEQ ID NO: 1935227 - RNA, 19 nt, Homo sapiens
  misc_RNA (1)...(19): siRNA sense strand
aaacaguuccagaaaguga

SEQ ID NO: 1935228 - RNA, 19 nt, Homo sapiens
  misc_RNA (1)...(19): siRNA sense strand
gaaggaagggcuggucaug

SEQ ID NO: 1935229 - RNA, 19 nt, Homo sapiens
  misc_RNA (1)...(19): siRNA sense strand
guucucgucucaaacucua

SEQ ID NO: 1935230 - RNA, 19 nt, Homo sapiens
  misc_RNA (1)...(19): siRNA sense strand
agaaccggcuuucagaaug

SEQ ID NO: 1935231 - RNA, 19 nt, Homo sapiens
  misc_RNA (1)...(19): siRNA sense strand
gcgagaguauggcaugauc

SEQ ID NO: 1935232 - RNA, 19 nt, Homo sapiens
  misc_RNA (1)...(19): siRNA sense strand
gcagaaccggcuuucagaa

SEQ ID NO: 1935233 - RNA, 19 nt, Homo sapiens
  misc_RNA (1)...(19): siRNA sense strand
gagaacaugcgcaaugaca

SEQ ID NO: 1935234 - RNA, 19 nt, Homo sapiens
  misc_RNA (1)...(19): siRNA sense strand
aaacauugcugaggcucuu

SEQ ID NO: 1935235 - RNA, 19 nt, Homo sapiens
  misc_RNA (1)...(19): siRNA sense strand
gagcagaaccggcuuucag

SEQ ID NO: 1935236 - RNA, 19 nt, Homo sapiens
  misc_RNA (1)...(19): siRNA sense strand
uggagaacaugcgcaauga

SEQ ID NO: 1935237 - RNA, 19 nt, Homo sapiens
  misc_RNA (1)...(19): siRNA sense strand
gaaggucugggcccacuau

SEQ ID NO: 1935238 - RNA, 19 nt, Homo sapiens
  misc_RNA (1)...(19): siRNA sense strand
aaagagcgcaggcugagaa

SEQ ID NO: 1935239 - RNA, 19 nt, Homo sapiens
  misc_RNA (1)...(19): siRNA sense strand
agagagauguucagaucau

SEQ ID NO: 1935240 - RNA, 19 nt, Homo sapiens
  misc_RNA (1)...(19): siRNA sense strand
ccagaagccuguuaaugcu

SEQ ID NO: 1935241 - RNA, 19 nt, Homo sapiens
  misc_RNA (1)...(19): siRNA sense strand
caaauggcaacaucacaga

SEQ ID NO: 1935242 - RNA, 19 nt, Homo sapiens
  misc_RNA (1)...(19): siRNA sense strand
gaucaaccucagcaacauu

SEQ ID NO: 1935243 - RNA, 19 nt, Homo sapiens
  misc_RNA (1)...(19): siRNA sense strand
ugucaccauuggaggaaua

SEQ ID NO: 1935244 - RNA, 19 nt, Homo sapiens
  misc_RNA (1)...(19): siRNA sense strand
agagaaggcaugagagcua

SEQ ID NO: 1935245 - RNA, 19 nt, Homo sapiens
  misc_RNA (1)...(19): siRNA sense strand
gaagcugauugggaaggaa

SEQ ID NO: 1935246 - RNA, 19 nt, Homo sapiens
  misc_RNA (1)...(19): siRNA sense strand
gcgggcaggucguucugaa

SEQ ID NO: 1935247 - RNA, 19 nt, Homo sapiens
  misc_RNA (1)...(19): siRNA sense strand
uauuaagaauggcaaagga

SEQ ID NO: 1935248 - RNA, 19 nt, Homo sapiens
  misc_RNA (1)...(19): siRNA sense strand
ccagagaucaucacacuac

SEQ ID NO: 1935249 - RNA, 19 nt, Homo sapiens
  misc_RNA (1)...(19): siRNA sense strand
guaugacauuccuuacaug

SEQ ID NO: 1935250 - RNA, 19 nt, Homo sapiens
  misc_RNA (1)...(19): siRNA sense strand
gaaacugcguccccuguau

SEQ ID NO: 1935251 - RNA, 19 nt, Homo sapiens
  misc_RNA (1)...(19): siRNA sense strand
gugaaacuccagagccuuu

SEQ ID NO: 1935252 - RNA, 19 nt, Homo sapiens
  misc_RNA (1)...(19): siRNA sense strand
gcaaaggcagccaagaaag

SEQ ID NO: 1935253 - RNA, 19 nt, Homo sapiens
  misc_RNA (1)...(19): siRNA sense strand
caugagagcuaauaauccu

SEQ ID NO: 1935254 - RNA, 19 nt, Homo sapiens
  misc_RNA (1)...(19): siRNA sense strand
aagcaaaggcagccaagaa

SEQ ID NO: 1935255 - RNA, 19 nt, Homo sapiens
  misc_RNA (1)...(19): siRNA sense strand
uaagaauggcaaaggauug

SEQ ID NO: 1935256 - RNA, 19 nt, Homo sapiens
  misc_RNA (1)...(19): siRNA sense strand
gauaccggcaggaugauga

SEQ ID NO: 1935257 - RNA, 19 nt, Homo sapiens
  misc_RNA (1)...(19): siRNA sense strand
uguguggacuggucgauug

SEQ ID NO: 1935258 - RNA, 19 nt, Homo sapiens
  misc_RNA (1)...(19): siRNA sense strand
gggaaaacauugcagaauc

SEQ ID NO: 1935259 - RNA, 19 nt, Homo sapiens
  misc_RNA (1)...(19): siRNA sense strand
cacacaaccugaugcaaag

SEQ ID NO: 1935260 - RNA, 19 nt, Homo sapiens
  misc_RNA (1)...(19): siRNA sense strand
gaguaugccuucgccuuca

SEQ ID NO: 1935261 - RNA, 19 nt, Homo sapiens
  misc_RNA (1)...(19): siRNA sense strand
cgaggaagcuacacuuuuc

SEQ ID NO: 1935262 - RNA, 19 nt, Homo sapiens
  misc_RNA (1)...(19): siRNA sense strand
gagaucaucacacuacgau

SEQ ID NO: 1935263 - RNA, 19 nt, Homo sapiens
  misc_RNA (1)...(19): siRNA sense strand
ggcaugagagcuaauaauc

SEQ ID NO: 1935264 - RNA, 19 nt, Homo sapiens
  misc_RNA (1)...(19): siRNA sense strand
ggacucacaccaccagaag

SEQ ID NO: 1935265 - RNA, 19 nt, Homo sapiens
  misc_RNA (1)...(19): siRNA sense strand
ugaugaugcagacgaauuu

SEQ ID NO: 1935266 - RNA, 19 nt, Homo sapiens
  misc_RNA (1)...(19): siRNA sense strand
ggaaggaagucuguuucac

SEQ ID NO: 1935267 - RNA, 19 nt, Homo sapiens
  misc_RNA (1)...(19): siRNA sense strand
gcacccaguuccagaagcu

SEQ ID NO: 1935268 - RNA, 19 nt, Homo sapiens
  misc_RNA (1)...(19): siRNA sense strand
gcgauuacaagacgauuca

SEQ ID NO: 1935269 - RNA, 19 nt, Homo sapiens
  misc_RNA (1)...(19): siRNA sense strand
agaagccuguuaaugcuau

SEQ ID NO: 1935270 - RNA, 19 nt, Homo sapiens
  misc_RNA (1)...(19): siRNA sense strand
ggagaacacccaggauaag

SEQ ID NO: 1935271 - RNA, 19 nt, Homo sapiens
  misc_RNA (1)...(19): siRNA sense strand
uccagaaagugaucacaga

SEQ ID NO: 1935272 - RNA, 19 nt, Homo sapiens
  misc_RNA (1)...(19): siRNA sense strand
gaacuucccugagaucaaa

SEQ ID NO: 1935273 - RNA, 19 nt, Homo sapiens
  misc_RNA (1)...(19): siRNA sense strand
ggacagugcugcauucaau

SEQ ID NO: 1935274 - RNA, 19 nt, Homo sapiens
  misc_RNA (1)...(19): siRNA sense strand
gcaaagagcggcuggaaga

SEQ ID NO: 1935275 - RNA, 19 nt, Homo sapiens
  misc_RNA (1)...(19): siRNA sense strand
ggacagcucugaggaggaa

SEQ ID NO: 1935276 - RNA, 19 nt, Homo sapiens
  misc_RNA (1)...(19): siRNA sense strand
gaccugaacuucccugaga

SEQ ID NO: 1935277 - RNA, 19 nt, Homo sapiens
  misc_RNA (1)...(19): siRNA sense strand
ggacaggaagcaauuuaaa

SEQ ID NO: 1935278 - RNA, 19 nt, Homo sapiens
  misc_RNA (1)...(19): siRNA sense strand
cuccaaagcuguuccauga

SEQ ID NO: 1935279 - RNA, 19 nt, Homo sapiens
  misc_RNA (1)...(19): siRNA sense strand
ggaaagguggcaaaggaua

SEQ ID NO: 1935280 - RNA, 19 nt, Homo sapiens
  misc_RNA (1)...(19): siRNA sense strand
aaacauaccagucugugua

SEQ ID NO: 1935281 - RNA, 19 nt, Homo sapiens
  misc_RNA (1)...(19): siRNA sense strand
ggacgacacugagggauuc

SEQ ID NO: 1935282 - RNA, 19 nt, Homo sapiens
  misc_RNA (1)...(19): siRNA sense strand
ggagaucaguggcaaagag

SEQ ID NO: 1935283 - RNA, 19 nt, Homo sapiens
  misc_RNA (1)...(19): siRNA sense strand
gaggacaggaagcaauuua

SEQ ID NO: 1935284 - RNA, 19 nt, Homo sapiens
  misc_RNA (1)...(19): siRNA sense strand
gcuguuccaugaaguggua

SEQ ID NO: 1935285 - RNA, 19 nt, Homo sapiens
  misc_RNA (1)...(19): siRNA sense strand
ucaaugcucugguuaccuu

SEQ ID NO: 1935286 - RNA, 19 nt, Homo sapiens
  misc_RNA (1)...(19): siRNA sense strand
gaaggaaacauaccagucu

SEQ ID NO: 1935287 - RNA, 19 nt, Homo sapiens
  misc_RNA (1)...(19): siRNA sense strand
gaccagagccugcuaaacu

SEQ ID NO: 1935288 - RNA, 19 nt, Homo sapiens
  misc_RNA (1)...(19): siRNA sense strand
gugcugaggccaacaaauu

SEQ ID NO: 1935289 - RNA, 19 nt, Homo sapiens
  misc_RNA (1)...(19): siRNA sense strand
ccaaagcuguuccaugaag

SEQ ID NO: 1935290 - RNA, 19 nt, Homo sapiens
  misc_RNA (1)...(19): siRNA sense strand
gauggaagcaggcagcaaa

SEQ ID NO: 1935291 - RNA, 19 nt, Homo sapiens
  misc_RNA (1)...(19): siRNA sense strand
gcaaauguacaucacguau

SEQ ID NO: 1935292 - RNA, 19 nt, Homo sapiens
  misc_RNA (1)...(19): siRNA sense strand
guuccuagcuucgggcuuu

SEQ ID NO: 1935293 - RNA, 19 nt, Homo sapiens
  misc_RNA (1)...(19): siRNA sense strand
guguggacaucaaggcuua

SEQ ID NO: 1935294 - RNA, 19 nt, Homo sapiens
  misc_RNA (1)...(19): siRNA sense strand
ggaaggaugaggacaggaa

SEQ ID NO: 1935295 - RNA, 19 nt, Homo sapiens
  misc_RNA (1)...(19): siRNA sense strand
gcuccaagcccaucaacuu

SEQ ID NO: 1935296 - RNA, 19 nt, Homo sapiens
  misc_RNA (1)...(19): siRNA sense strand
gcacaaagaccagcucucu

SEQ ID NO: 1935297 - RNA, 19 nt, Homo sapiens
  misc_RNA (1)...(19): siRNA sense strand
ggaagauggcugacaggaa

SEQ ID NO: 1935298 - RNA, 19 nt, Homo sapiens
  misc_RNA (1)...(19): siRNA sense strand
gagaucaaacgaaggaaga

SEQ ID NO: 1935299 - RNA, 19 nt, Homo sapiens
  misc_RNA (1)...(19): siRNA sense strand
agaagcugcuguuuggaaa

SEQ ID NO: 1935300 - RNA, 19 nt, Homo sapiens
  misc_RNA (1)...(19): siRNA sense strand
ggagaacucggcauacauc

SEQ ID NO: 1935301 - RNA, 19 nt, Homo sapiens
  misc_RNA (1)...(19): siRNA sense strand
gcacaagaaggacacuuuc

SEQ ID NO: 1935302 - RNA, 19 nt, Homo sapiens
  misc_RNA (1)...(19): siRNA sense strand
gaagcaggcagcaaagcaa

SEQ ID NO: 1935303 - RNA, 19 nt, Homo sapiens
  misc_RNA (1)...(19): siRNA sense strand
gaaagguggcaaaggauag

SEQ ID NO: 1935304 - RNA, 19 nt, Homo sapiens
  misc_RNA (1)...(19): siRNA sense strand
acaggaagcaauuuaaaga

SEQ ID NO: 1935305 - RNA, 19 nt, Homo sapiens
  misc_RNA (1)...(19): siRNA sense strand
caggagaacucggcauaca

SEQ ID NO: 1935306 - RNA, 19 nt, Homo sapiens
  misc_RNA (1)...(19): siRNA sense strand
uuggaaagguggcaaagga

SEQ ID NO: 1935307 - RNA, 19 nt, Homo sapiens
  misc_RNA (1)...(19): siRNA sense strand
ggacagagaccccgaguuc

SEQ ID NO: 1935308 - RNA, 19 nt, Homo sapiens
  misc_RNA (1)...(19): siRNA sense strand
gcaagaaggaaacauacca

SEQ ID NO: 1935309 - RNA, 19 nt, Homo sapiens
  misc_RNA (1)...(19): siRNA sense strand
cugguuaccuucugcauca

SEQ ID NO: 1935310 - RNA, 19 nt, Homo sapiens
  misc_RNA (1)...(19): siRNA sense strand
gaaacauaccagucugugu

SEQ ID NO: 1935311 - RNA, 19 nt, Homo sapiens
  misc_RNA (1)...(19): siRNA sense strand
uccagaagcugcuguuugg

SEQ ID NO: 1935312 - RNA, 19 nt, Homo sapiens
  misc_RNA (1)...(19): siRNA sense strand
ggaagcaggcagcaaagca

SEQ ID NO: 1935313 - RNA, 19 nt, Homo sapiens
  misc_RNA (1)...(19): siRNA sense strand
ggcacaagaaggacacuuu

SEQ ID NO: 1935314 - RNA, 19 nt, Homo sapiens
  misc_RNA (1)...(19): siRNA sense strand
cagcugguguccugucugu

SEQ ID NO: 1935315 - RNA, 19 nt, Homo sapiens
  misc_RNA (1)...(19): siRNA sense strand
cagaagcugcuguuuggaa

SEQ ID NO: 1935316 - RNA, 19 nt, Homo sapiens
  misc_RNA (1)...(19): siRNA sense strand
gcaagguggccaacuacug

SEQ ID NO: 1935317 - RNA, 19 nt, Homo sapiens
  misc_RNA (1)...(19): siRNA sense strand
uccugaagcuguccaaugu

SEQ ID NO: 1935318 - RNA, 19 nt, Homo sapiens
  misc_RNA (1)...(19): siRNA sense strand
caaagcuguuccaugaagu

SEQ ID NO: 1935319 - RNA, 19 nt, Homo sapiens
  misc_RNA (1)...(19): siRNA sense strand
ggauggagcggaggaagga

SEQ ID NO: 1935320 - RNA, 19 nt, Homo sapiens
  misc_RNA (1)...(19): siRNA sense strand
gacaggaagcaauuuaaag

SEQ ID NO: 1935321 - RNA, 19 nt, Homo sapiens
  misc_RNA (1)...(19): siRNA sense strand
gaugaggacaggaagcaau

SEQ ID NO: 1935322 - RNA, 19 nt, Homo sapiens
  misc_RNA (1)...(19): siRNA sense strand
cugaagcuguccaauguca

SEQ ID NO: 1935323 - RNA, 19 nt, Homo sapiens
  misc_RNA (1)...(19): siRNA sense strand
cagcacgccuuccucuaca

SEQ ID NO: 1935324 - RNA, 19 nt, Homo sapiens
  misc_RNA (1)...(19): siRNA sense strand
caaauguacaucacguaug

SEQ ID NO: 1935325 - RNA, 19 nt, Homo sapiens
  misc_RNA (1)...(19): siRNA sense strand
aagcaacgccucacuccaa

SEQ ID NO: 1935326 - RNA, 19 nt, Homo sapiens
  misc_RNA (1)...(19): siRNA sense strand
caagucaucauuggcugua

SEQ ID NO: 1935327 - RNA, 19 nt, Homo sapiens
  misc_RNA (1)...(19): siRNA sense strand
gguggaagacgaugaagag

SEQ ID NO: 1935328 - RNA, 19 nt, Homo sapiens
  misc_RNA (1)...(19): siRNA sense strand
uugggaagguucaggagaa

SEQ ID NO: 1935329 - RNA, 19 nt, Homo sapiens
  misc_RNA (1)...(19): siRNA sense strand
gaccugaacagcucugaag

SEQ ID NO: 1935330 - RNA, 19 nt, Homo sapiens
  misc_RNA (1)...(19): siRNA sense strand
cugaagaggacgacacuga

SEQ ID NO: 1935331 - RNA, 19 nt, Homo sapiens
  misc_RNA (1)...(19): siRNA sense strand
gaucaaacgaaggaagaug

SEQ ID NO: 1935332 - RNA, 19 nt, Homo sapiens
  misc_RNA (1)...(19): siRNA sense strand
ucacggacagugcugcauu

SEQ ID NO: 1935333 - RNA, 19 nt, Homo sapiens
  misc_RNA (1)...(19): siRNA sense strand
gccaugaccacccgcaaga

SEQ ID NO: 1935334 - RNA, 19 nt, Homo sapiens
  misc_RNA (1)...(19): siRNA sense strand
ucggagagagggauacuga

SEQ ID NO: 1935335 - RNA, 19 nt, Homo sapiens
  misc_RNA (1)...(19): siRNA sense strand
aggacgagcuggaggaucu

SEQ ID NO: 1935336 - RNA, 19 nt, Homo sapiens
  misc_RNA (1)...(19): siRNA sense strand
gaagcuguccaaugucaac

SEQ ID NO: 1935337 - RNA, 19 nt, Homo sapiens
  misc_RNA (1)...(19): siRNA sense strand
gaaugaccagagccugcua

SEQ ID NO: 1935338 - RNA, 19 nt, Homo sapiens
  misc_RNA (1)...(19): siRNA sense strand
accagagccugcuaaacuu

SEQ ID NO: 1935339 - RNA, 19 nt, Homo sapiens
  misc_RNA (1)...(19): siRNA sense strand
caucauuggcuguaucaag

SEQ ID NO: 1935340 - RNA, 19 nt, Homo sapiens
  misc_RNA (1)...(19): siRNA sense strand
gaagcuucguguggacauc

SEQ ID NO: 1935341 - RNA, 19 nt, Homo sapiens
  misc_RNA (1)...(19): siRNA sense strand
ucaagcaaauguacaucac

SEQ ID NO: 1935342 - RNA, 19 nt, Homo sapiens
  misc_RNA (1)...(19): siRNA sense strand
gcagcugcuugggaagguu

SEQ ID NO: 1935343 - RNA, 19 nt, Homo sapiens
  misc_RNA (1)...(19): siRNA sense strand
gagcggaggaaggagaaga

SEQ ID NO: 1935344 - RNA, 19 nt, Homo sapiens
  misc_RNA (1)...(19): siRNA sense strand
caaaggauagcagcaggau

SEQ ID NO: 1935345 - RNA, 19 nt, Homo sapiens
  misc_RNA (1)...(19): siRNA sense strand
agcaacgccucacuccaaa

SEQ ID NO: 1935346 - RNA, 19 nt, Homo sapiens
  misc_RNA (1)...(19): siRNA sense strand
guggacgaguuccuagcuu

SEQ ID NO: 1935347 - RNA, 19 nt, Homo sapiens
  misc_RNA (1)...(19): siRNA sense strand
ccugagaucaaacgaagga

SEQ ID NO: 1935348 - RNA, 19 nt, Homo sapiens
  misc_RNA (1)...(19): siRNA sense strand
ccaagcccaucaacuucuc

SEQ ID NO: 1935349 - RNA, 19 nt, Homo sapiens
  misc_RNA (1)...(19): siRNA sense strand
cacggacagugcugcauuc

SEQ ID NO: 1935350 - RNA, 19 nt, Homo sapiens
  misc_RNA (1)...(19): siRNA sense strand
gguacaggcguuccaagca

SEQ ID NO: 1935351 - RNA, 19 nt, Homo sapiens
  misc_RNA (1)...(19): siRNA sense strand
ucaucccggugcugccuuu

SEQ ID NO: 1935352 - RNA, 19 nt, Homo sapiens
  misc_RNA (1)...(19): siRNA sense strand
ccagcacgccuuccucuac

SEQ ID NO: 1935353 - RNA, 19 nt, Homo sapiens
  misc_RNA (1)...(19): siRNA sense strand
gaagcugacccgggaagag

SEQ ID NO: 1935354 - RNA, 19 nt, Homo sapiens
  misc_RNA (1)...(19): siRNA sense strand
uccagcaggucgacuucaa

SEQ ID NO: 1935355 - RNA, 19 nt, Homo sapiens
  misc_RNA (1)...(19): siRNA sense strand
guaugugcacugccucuuc

SEQ ID NO: 1935356 - RNA, 19 nt, Homo sapiens
  misc_RNA (1)...(19): siRNA sense strand
cauaccagucuguguacaa

SEQ ID NO: 1935357 - RNA, 19 nt, Homo sapiens
  misc_RNA (1)...(19): siRNA sense strand
gcacgccuuccucuacauc

SEQ ID NO: 1935358 - RNA, 19 nt, Homo sapiens
  misc_RNA (1)...(19): siRNA sense strand
ccacauggaucacuauuga

SEQ ID NO: 1935359 - RNA, 19 nt, Homo sapiens
  misc_RNA (1)...(19): siRNA sense strand
gaagaaagccauacaacga

SEQ ID NO: 1935360 - RNA, 19 nt, Homo sapiens
  misc_RNA (1)...(19): siRNA sense strand
uaagguugcugagucauua

SEQ ID NO: 1935361 - RNA, 19 nt, Homo sapiens
  misc_RNA (1)...(19): siRNA sense strand
gagaagcccuguccaacga

SEQ ID NO: 1935362 - RNA, 19 nt, Homo sapiens
  misc_RNA (1)...(19): siRNA sense strand
gaagagaagcccuguccaa

SEQ ID NO: 1935363 - RNA, 19 nt, Homo sapiens
  misc_RNA (1)...(19): siRNA sense strand
gaagcccuguccaacgaua

SEQ ID NO: 1935364 - RNA, 19 nt, Homo sapiens
  misc_RNA (1)...(19): siRNA sense strand
caagauuaccucaguaguu

SEQ ID NO: 1935365 - RNA, 19 nt, Homo sapiens
  misc_RNA (1)...(19): siRNA sense strand
ucagugggcugccuguuug

SEQ ID NO: 1935366 - RNA, 19 nt, Homo sapiens
  misc_RNA (1)...(19): siRNA sense strand
cauuaggaaucacagaauu

SEQ ID NO: 1935367 - RNA, 19 nt, Homo sapiens
  misc_RNA (1)...(19): siRNA sense strand
gagagaaugcuuuggaaca

SEQ ID NO: 1935368 - RNA, 19 nt, Homo sapiens
  misc_RNA (1)...(19): siRNA sense strand
aagauuaccucaguaguuc

SEQ ID NO: 1935369 - RNA, 19 nt, Homo sapiens
  misc_RNA (1)...(19): siRNA sense strand
uauaggugcugcucucuca

SEQ ID NO: 1935370 - RNA, 19 nt, Homo sapiens
  misc_RNA (1)...(19): siRNA sense strand
aggagacccuggaaauaaa

SEQ ID NO: 1935371 - RNA, 19 nt, Homo sapiens
  misc_RNA (1)...(19): siRNA sense strand
cggcaagguuugugacuuc

SEQ ID NO: 1935372 - RNA, 19 nt, Homo sapiens
  misc_RNA (1)...(19): siRNA sense strand
ugauaagguugcugaguca

SEQ ID NO: 1935373 - RNA, 19 nt, Homo sapiens
  misc_RNA (1)...(19): siRNA sense strand
ccgaugggcuuaucuuguc

SEQ ID NO: 1935374 - RNA, 19 nt, Homo sapiens
  misc_RNA (1)...(19): siRNA sense strand
gugccaagauuaccucagu

SEQ ID NO: 1935375 - RNA, 19 nt, Homo sapiens
  misc_RNA (1)...(19): siRNA sense strand
gaaaaggcccagaagagaa

SEQ ID NO: 1935376 - RNA, 19 nt, Homo sapiens
  misc_RNA (1)...(19): siRNA sense strand
aagaaaaugugccaagauu

SEQ ID NO: 1935377 - RNA, 19 nt, Homo sapiens
  misc_RNA (1)...(19): siRNA sense strand
ggaucacuauugacugaag

SEQ ID NO: 1935378 - RNA, 19 nt, Homo sapiens
  misc_RNA (1)...(19): siRNA sense strand
cgauaccacugaaucucuu

SEQ ID NO: 1935379 - RNA, 19 nt, Homo sapiens
  misc_RNA (1)...(19): siRNA sense strand
ggagcuagcagcgagaaga

SEQ ID NO: 1935380 - RNA, 19 nt, Homo sapiens
  misc_RNA (1)...(19): siRNA sense strand
gcugagucauuaggaauca

SEQ ID NO: 1935381 - RNA, 19 nt, Homo sapiens
  misc_RNA (1)...(19): siRNA sense strand
uggagagaaugcuuuggaa

SEQ ID NO: 1935382 - RNA, 19 nt, Homo sapiens
  misc_RNA (1)...(19): siRNA sense strand
gcaccucagccgagacaug

SEQ ID NO: 1935383 - RNA, 19 nt, Homo sapiens
  misc_RNA (1)...(19): siRNA sense strand
guccaacgauaccacugaa

SEQ ID NO: 1935384 - RNA, 19 nt, Homo sapiens
  misc_RNA (1)...(19): siRNA sense strand
gaaaaugugccaagauuac

SEQ ID NO: 1935385 - RNA, 19 nt, Homo sapiens
  misc_RNA (1)...(19): siRNA sense strand
caguaguucuggucugugu

SEQ ID NO: 1935386 - RNA, 19 nt, Homo sapiens
  misc_RNA (1)...(19): siRNA sense strand
caacgauaccacugaaucu

SEQ ID NO: 1935387 - RNA, 19 nt, Homo sapiens
  misc_RNA (1)...(19): siRNA sense strand
aaagaaauacacccagaca

SEQ ID NO: 1935388 - RNA, 19 nt, Homo sapiens
  misc_RNA (1)...(19): siRNA sense strand
cagguacaauagugucuca

SEQ ID NO: 1935389 - RNA, 19 nt, Homo sapiens
  misc_RNA (1)...(19): siRNA sense strand
gagaaugcuuuggaacacu

SEQ ID NO: 1935390 - RNA, 19 nt, Homo sapiens
  misc_RNA (1)...(19): siRNA sense strand
ccaggcccuugcaugcuuu

SEQ ID NO: 1935391 - RNA, 19 nt, Homo sapiens
  misc_RNA (1)...(19): siRNA sense strand
ccaacgauaccacugaauc

SEQ ID NO: 1935392 - RNA, 19 nt, Homo sapiens
  misc_RNA (1)...(19): siRNA sense strand
cccuggaaauaaacaauga

SEQ ID NO: 1935393 - RNA, 19 nt, Homo sapiens
  misc_RNA (1)...(19): siRNA sense strand
gacgguuucugguggcaau

SEQ ID NO: 1935394 - RNA, 19 nt, Homo sapiens
  misc_RNA (1)...(19): siRNA sense strand
auggaucacuauugacuga

SEQ ID NO: 1935395 - RNA, 19 nt, Homo sapiens
  misc_RNA (1)...(19): siRNA sense strand
ccagcguccugccuacaga

SEQ ID NO: 1935396 - RNA, 19 nt, Homo sapiens
  misc_RNA (1)...(19): siRNA sense strand
gucagugggcugccuguuu

SEQ ID NO: 1935397 - RNA, 19 nt, Homo sapiens
  misc_RNA (1)...(19): siRNA sense strand
ucaggcacuggcuaacuua

SEQ ID NO: 1935398 - RNA, 19 nt, Homo sapiens
  misc_RNA (1)...(19): siRNA sense strand
agaaauacacccagacaac

SEQ ID NO: 1935399 - RNA, 19 nt, Homo sapiens
  misc_RNA (1)...(19): siRNA sense strand
guugcugagucauuaggaa

SEQ ID NO: 1935400 - RNA, 19 nt, Homo sapiens
  misc_RNA (1)...(19): siRNA sense strand
gcaaugggagcguguucca

SEQ ID NO: 1935401 - RNA, 19 nt, Homo sapiens
  misc_RNA (1)...(19): siRNA sense strand
guaguucuggucuguguuc

SEQ ID NO: 1935402 - RNA, 19 nt, Homo sapiens
  misc_RNA (1)...(19): siRNA sense strand
ugccaagauuaccucagua

SEQ ID NO: 1935403 - RNA, 19 nt, Homo sapiens
  misc_RNA (1)...(19): siRNA sense strand
cccaggcccuugcaugcuu

SEQ ID NO: 1935404 - RNA, 19 nt, Homo sapiens
  misc_RNA (1)...(19): siRNA sense strand
gcacagguggcagcguuuc

SEQ ID NO: 1935405 - RNA, 19 nt, Homo sapiens
  misc_RNA (1)...(19): siRNA sense strand
gggugucucagaagccuuu

SEQ ID NO: 1935406 - RNA, 19 nt, Homo sapiens
  misc_RNA (1)...(19): siRNA sense strand
uggcccacauggaucacua

SEQ ID NO: 1935407 - RNA, 19 nt, Homo sapiens
  misc_RNA (1)...(19): siRNA sense strand
gccaagauuaccucaguag

SEQ ID NO: 1935408 - RNA, 19 nt, Homo sapiens
  misc_RNA (1)...(19): siRNA sense strand
gucauuaggaaucacagaa

SEQ ID NO: 1935409 - RNA, 19 nt, Homo sapiens
  misc_RNA (1)...(19): siRNA sense strand
ccuacggaagaaagaaaua

SEQ ID NO: 1935410 - RNA, 19 nt, Homo sapiens
  misc_RNA (1)...(19): siRNA sense strand
uucaggcacuggcuaacuu

SEQ ID NO: 1935411 - RNA, 19 nt, Homo sapiens
  misc_RNA (1)...(19): siRNA sense strand
gacagcacauccucagaua

SEQ ID NO: 1935412 - RNA, 19 nt, Homo sapiens
  misc_RNA (1)...(19): siRNA sense strand
gcacauccucagauaguuu

SEQ ID NO: 1935413 - RNA, 19 nt, Homo sapiens
  misc_RNA (1)...(19): siRNA sense strand
cagaggaaguggaggaaga

SEQ ID NO: 1935414 - RNA, 19 nt, Homo sapiens
  misc_RNA (1)...(19): siRNA sense strand
ccaacaguguggcgagcua

SEQ ID NO: 1935415 - RNA, 19 nt, Homo sapiens
  misc_RNA (1)...(19): siRNA sense strand
ggaguccauugaugauuac

SEQ ID NO: 1935416 - RNA, 19 nt, Homo sapiens
  misc_RNA (1)...(19): siRNA sense strand
cagcacauccucagauagu

SEQ ID NO: 1935417 - RNA, 19 nt, Homo sapiens
  misc_RNA (1)...(19): siRNA sense strand
cgacagcacauccucagau

SEQ ID NO: 1935418 - RNA, 19 nt, Homo sapiens
  misc_RNA (1)...(19): siRNA sense strand
gaaugugucccaggaacug

SEQ ID NO: 1935419 - RNA, 19 nt, Homo sapiens
  misc_RNA (1)...(19): siRNA sense strand
ggaugcagaugaggaugag

SEQ ID NO: 1935420 - RNA, 19 nt, Homo sapiens
  misc_RNA (1)...(19): siRNA sense strand
gaugaggacgacuaucaca

SEQ ID NO: 1935421 - RNA, 19 nt, Homo sapiens
  misc_RNA (1)...(19): siRNA sense strand
ccugugaggaugcagauga

SEQ ID NO: 1935422 - RNA, 19 nt, Homo sapiens
  misc_RNA (1)...(19): siRNA sense strand
gauggcagccgggaguaug

SEQ ID NO: 1935423 - RNA, 19 nt, Homo sapiens
  misc_RNA (1)...(19): siRNA sense strand
gcugaccccugugucguua

SEQ ID NO: 1935424 - RNA, 19 nt, Homo sapiens
  misc_RNA (1)...(19): siRNA sense strand
agaaccagccugugaggau

SEQ ID NO: 1935425 - RNA, 19 nt, Homo sapiens
  misc_RNA (1)...(19): siRNA sense strand
aggaugaggacgacuauca

SEQ ID NO: 1935426 - RNA, 19 nt, Homo sapiens
  misc_RNA (1)...(19): siRNA sense strand
ccauugaugauuacgugaa

SEQ ID NO: 1935427 - RNA, 19 nt, Homo sapiens
  misc_RNA (1)...(19): siRNA sense strand
ggcuccagauuacgagaau

SEQ ID NO: 1935428 - RNA, 19 nt, Homo sapiens
  misc_RNA (1)...(19): siRNA sense strand
gaagggagcuguuugauug

SEQ ID NO: 1935429 - RNA, 19 nt, Homo sapiens
  misc_RNA (1)...(19): siRNA sense strand
ggagacagaaucacaguua

SEQ ID NO: 1935430 - RNA, 19 nt, Homo sapiens
  misc_RNA (1)...(19): siRNA sense strand
ccgaagaucuuuaugaaau

SEQ ID NO: 1935431 - RNA, 19 nt, Homo sapiens
  misc_RNA (1)...(19): siRNA sense strand
uauccgagcuuaugacauu

SEQ ID NO: 1935432 - RNA, 19 nt, Homo sapiens
  misc_RNA (1)...(19): siRNA sense strand
ugagagaguuggcaauuug

SEQ ID NO: 1935433 - RNA, 19 nt, Homo sapiens
  misc_RNA (1)...(19): siRNA sense strand
gcuaaagaauuaccuccaa

SEQ ID NO: 1935434 - RNA, 19 nt, Homo sapiens
  misc_RNA (1)...(19): siRNA sense strand
gucaagauauccgagcuua

SEQ ID NO: 1935435 - RNA, 19 nt, Homo sapiens
  misc_RNA (1)...(19): siRNA sense strand
ggacaacgaaucaaugcaa

SEQ ID NO: 1935436 - RNA, 19 nt, Homo sapiens
  misc_RNA (1)...(19): siRNA sense strand
gaaggacaacgaaucaaug

SEQ ID NO: 1935437 - RNA, 19 nt, Homo sapiens
  misc_RNA (1)...(19): siRNA sense strand
caagauauccgagcuuaug

SEQ ID NO: 1935438 - RNA, 19 nt, Homo sapiens
  misc_RNA (1)...(19): siRNA sense strand
cuaaagaauuaccuccaaa

SEQ ID NO: 1935439 - RNA, 19 nt, Homo sapiens
  misc_RNA (1)...(19): siRNA sense strand
gagacagaaucacaguuau

SEQ ID NO: 1935440 - RNA, 19 nt, Homo sapiens
  misc_RNA (1)...(19): siRNA sense strand
caaagcaacagaaaugaau

SEQ ID NO: 1935441 - RNA, 19 nt, Homo sapiens
  misc_RNA (1)...(19): siRNA sense strand
cagaaucacaguuauauca

SEQ ID NO: 1935442 - RNA, 19 nt, Homo sapiens
  misc_RNA (1)...(19): siRNA sense strand
gcaaaaggcggaaaucuga

SEQ ID NO: 1935443 - RNA, 19 nt, Homo sapiens
  misc_RNA (1)...(19): siRNA sense strand
gcuguuugauugaaaggaa

SEQ ID NO: 1935444 - RNA, 19 nt, Homo sapiens
  misc_RNA (1)...(19): siRNA sense strand
ccaacuacguaaccaugaa

SEQ ID NO: 1935445 - RNA, 19 nt, Homo sapiens
  misc_RNA (1)...(19): siRNA sense strand
gcugaacucuggcucucaa

SEQ ID NO: 1935446 - RNA, 19 nt, Homo sapiens
  misc_RNA (1)...(19): siRNA sense strand
gacagaaucacaguuauau

SEQ ID NO: 1935447 - RNA, 19 nt, Homo sapiens
  misc_RNA (1)...(19): siRNA sense strand
agacagaaucacaguuaua

SEQ ID NO: 1935448 - RNA, 19 nt, Homo sapiens
  misc_RNA (1)...(19): siRNA sense strand
ccaaagccauugucaagac

SEQ ID NO: 1935449 - RNA, 19 nt, Homo sapiens
  misc_RNA (1)...(19): siRNA sense strand
caacgaaucaaugcaagaa

SEQ ID NO: 1935450 - RNA, 19 nt, Homo sapiens
  misc_RNA (1)...(19): siRNA sense strand
gaaucaacccauagaagug

SEQ ID NO: 1935451 - RNA, 19 nt, Homo sapiens
  misc_RNA (1)...(19): siRNA sense strand
gaauuaugaccgugcugua

SEQ ID NO: 1935452 - RNA, 19 nt, Homo sapiens
  misc_RNA (1)...(19): siRNA sense strand
cuacguaaccaugaauuaa

SEQ ID NO: 1935453 - RNA, 19 nt, Homo sapiens
  misc_RNA (1)...(19): siRNA sense strand
ucucaaagcaacagaaaug

SEQ ID NO: 1935454 - RNA, 19 nt, Homo sapiens
  misc_RNA (1)...(19): siRNA sense strand
cuugauuccuuuacugaaa

SEQ ID NO: 1935455 - RNA, 19 nt, Homo sapiens
  misc_RNA (1)...(19): siRNA sense strand
ggacuuuccagcuaucaug

SEQ ID NO: 1935456 - RNA, 19 nt, Homo sapiens
  misc_RNA (1)...(19): siRNA sense strand
gggagcuguuugauugaaa

SEQ ID NO: 1935457 - RNA, 19 nt, Homo sapiens
  misc_RNA (1)...(19): siRNA sense strand
gcaggcgugucuuuagaag

SEQ ID NO: 1935458 - RNA, 19 nt, Homo sapiens
  misc_RNA (1)...(19): siRNA sense strand
agccgaagaucuuuaugaa

SEQ ID NO: 1935459 - RNA, 19 nt, Homo sapiens
  misc_RNA (1)...(19): siRNA sense strand
ccgcugccgucuucacgua

SEQ ID NO: 1935460 - RNA, 19 nt, Homo sapiens
  misc_RNA (1)...(19): siRNA sense strand
ggagcuguuugauugaaag

SEQ ID NO: 1935461 - RNA, 19 nt, Homo sapiens
  misc_RNA (1)...(19): siRNA sense strand
ugaaucaacccauagaagu

SEQ ID NO: 1935462 - RNA, 19 nt, Homo sapiens
  misc_RNA (1)...(19): siRNA sense strand
ucaaagcaacagaaaugaa

SEQ ID NO: 1935463 - RNA, 19 nt, Homo sapiens
  misc_RNA (1)...(19): siRNA sense strand
gaaaaugaaggacaacgaa

SEQ ID NO: 1935464 - RNA, 19 nt, Homo sapiens
  misc_RNA (1)...(19): siRNA sense strand
gcucucaaagcaacagaaa

SEQ ID NO: 1935465 - RNA, 19 nt, Homo sapiens
  misc_RNA (1)...(19): siRNA sense strand
uaagcucuauccuggacuu

SEQ ID NO: 1935466 - RNA, 19 nt, Homo sapiens
  misc_RNA (1)...(19): siRNA sense strand
gagagaguuggcaauuuga

SEQ ID NO: 1935467 - RNA, 19 nt, Homo sapiens
  misc_RNA (1)...(19): siRNA sense strand
gcucaagccgaagaucuuu

SEQ ID NO: 1935468 - RNA, 19 nt, Homo sapiens
  misc_RNA (1)...(19): siRNA sense strand
aagcuccgcugccgucuuc

SEQ ID NO: 1935469 - RNA, 19 nt, Homo sapiens
  misc_RNA (1)...(19): siRNA sense strand
agaagggagcuguuugauu

SEQ ID NO: 1935470 - RNA, 19 nt, Homo sapiens
  misc_RNA (1)...(19): siRNA sense strand
caugagagaguuggcaauu

SEQ ID NO: 1935471 - RNA, 19 nt, Homo sapiens
  misc_RNA (1)...(19): siRNA sense strand
ugaaggacaacgaaucaau

SEQ ID NO: 1935472 - RNA, 19 nt, Homo sapiens
  misc_RNA (1)...(19): siRNA sense strand
caagggagcagaggaaguc

SEQ ID NO: 1935473 - RNA, 19 nt, Homo sapiens
  misc_RNA (1)...(19): siRNA sense strand
gagaguuggcaauuugaau

SEQ ID NO: 1935474 - RNA, 19 nt, Homo sapiens
  misc_RNA (1)...(19): siRNA sense strand
uuaugaccgugcuguagaa

SEQ ID NO: 1935475 - RNA, 19 nt, Homo sapiens
  misc_RNA (1)...(19): siRNA sense strand
cagcaagggagcagaggaa

SEQ ID NO: 1935476 - RNA, 19 nt, Homo sapiens
  misc_RNA (1)...(19): siRNA sense strand
uuagaagggagcuguuuga

SEQ ID NO: 1935477 - RNA, 19 nt, Homo sapiens
  misc_RNA (1)...(19): siRNA sense strand
aaacuucgaggucaaacug

SEQ ID NO: 1935478 - RNA, 19 nt, Homo sapiens
  misc_RNA (1)...(19): siRNA sense strand
uaaagaauuaccuccaaag

SEQ ID NO: 1935479 - RNA, 19 nt, Homo sapiens
  misc_RNA (1)...(19): siRNA sense strand
gauauccgagcuuaugaca

SEQ ID NO: 1935480 - RNA, 19 nt, Homo sapiens
  misc_RNA (1)...(19): siRNA sense strand
caacuacguaaccaugaau

SEQ ID NO: 1935481 - RNA, 19 nt, Homo sapiens
  misc_RNA (1)...(19): siRNA sense strand
uugcaggcgugucuuuaga

SEQ ID NO: 1935482 - RNA, 19 nt, Homo sapiens
  misc_RNA (1)...(19): siRNA sense strand
gccgaagaucuuuaugaaa

SEQ ID NO: 1935483 - RNA, 19 nt, Homo sapiens
  misc_RNA (1)...(19): siRNA sense strand
ucaagccgaagaucuuuau

SEQ ID NO: 1935484 - RNA, 19 nt, Homo sapiens
  misc_RNA (1)...(19): siRNA sense strand
caagaccacagcagucauc

SEQ ID NO: 1935485 - RNA, 19 nt, Homo sapiens
  misc_RNA (1)...(19): siRNA sense strand
gaacucuggcucucaaagc

SEQ ID NO: 1935486 - RNA, 19 nt, Homo sapiens
  misc_RNA (1)...(19): siRNA sense strand
gcaagggagcagaggaagu

SEQ ID NO: 1935487 - RNA, 19 nt, Homo sapiens
  misc_RNA (1)...(19): siRNA sense strand
cagacuuggugauaauucu

SEQ ID NO: 1935488 - RNA, 19 nt, Homo sapiens
  misc_RNA (1)...(19): siRNA sense strand
gaguuggcaauuugaauca

SEQ ID NO: 1935489 - RNA, 19 nt, Homo sapiens
  misc_RNA (1)...(19): siRNA sense strand
ugaccgugcuguagaagcu

SEQ ID NO: 1935490 - RNA, 19 nt, Homo sapiens
  misc_RNA (1)...(19): siRNA sense strand
augagagaguuggcaauuu

SEQ ID NO: 1935491 - RNA, 19 nt, Homo sapiens
  misc_RNA (1)...(19): siRNA sense strand
guaugaaaaugaaggacaa

SEQ ID NO: 1935492 - RNA, 19 nt, Homo sapiens
  misc_RNA (1)...(19): siRNA sense strand
aagccgaagaucuuuauga

SEQ ID NO: 1935493 - RNA, 19 nt, Homo sapiens
  misc_RNA (1)...(19): siRNA sense strand
aaugaaggacaacgaauca

SEQ ID NO: 1935494 - RNA, 19 nt, Homo sapiens
  misc_RNA (1)...(19): siRNA sense strand
aaucaacccauagaaguga

SEQ ID NO: 1935495 - RNA, 19 nt, Homo sapiens
  misc_RNA (1)...(19): siRNA sense strand
aaaugaaggacaacgaauc

SEQ ID NO: 1935496 - RNA, 19 nt, Homo sapiens
  misc_RNA (1)...(19): siRNA sense strand
acuacguaaccaugaauua

SEQ ID NO: 1935497 - RNA, 19 nt, Homo sapiens
  misc_RNA (1)...(19): siRNA sense strand
caagcuggagacagaauca

SEQ ID NO: 1935498 - RNA, 19 nt, Homo sapiens
  misc_RNA (1)...(19): siRNA sense strand
cagcuaucaugagagaguu

SEQ ID NO: 1935499 - RNA, 19 nt, Homo sapiens
  misc_RNA (1)...(19): siRNA sense strand
gcucuauccuggacuuucc

SEQ ID NO: 1935500 - RNA, 19 nt, Homo sapiens
  misc_RNA (1)...(19): siRNA sense strand
uuccagcuaucaugagaga

SEQ ID NO: 1935501 - RNA, 19 nt, Homo sapiens
  misc_RNA (1)...(19): siRNA sense strand
ccagcuaucaugagagagu

SEQ ID NO: 1935502 - RNA, 19 nt, Homo sapiens
  misc_RNA (1)...(19): siRNA sense strand
gccaacuacguaaccauga

SEQ ID NO: 1935503 - RNA, 19 nt, Homo sapiens
  misc_RNA (1)...(19): siRNA sense strand
gcacauacuuccauagaaa

SEQ ID NO: 1935504 - RNA, 19 nt, Homo sapiens
  misc_RNA (1)...(19): siRNA sense strand
ugaugaagcugccuacaua

SEQ ID NO: 1935505 - RNA, 19 nt, Homo sapiens
  misc_RNA (1)...(19): siRNA sense strand
gaagaaggcuuuguucgau

SEQ ID NO: 1935506 - RNA, 19 nt, Homo sapiens
  misc_RNA (1)...(19): siRNA sense strand
gucaagaccuggccuagua

SEQ ID NO: 1935507 - RNA, 19 nt, Homo sapiens
  misc_RNA (1)...(19): siRNA sense strand
gaagagauggcaacauuau

SEQ ID NO: 1935508 - RNA, 19 nt, Homo sapiens
  misc_RNA (1)...(19): siRNA sense strand
agaagggucugaaauggua

SEQ ID NO: 1935509 - RNA, 19 nt, Homo sapiens
  misc_RNA (1)...(19): siRNA sense strand
uggaagagauggcaacauu

SEQ ID NO: 1935510 - RNA, 19 nt, Homo sapiens
  misc_RNA (1)...(19): siRNA sense strand
gcacagacgauaacaucua

SEQ ID NO: 1935511 - RNA, 19 nt, Homo sapiens
  misc_RNA (1)...(19): siRNA sense strand
gcaagugaaucaaaucagu

SEQ ID NO: 1935512 - RNA, 19 nt, Homo sapiens
  misc_RNA (1)...(19): siRNA sense strand
gaacauguacuagcaguug

SEQ ID NO: 1935513 - RNA, 19 nt, Homo sapiens
  misc_RNA (1)...(19): siRNA sense strand
gggauuuacguaagaauua

SEQ ID NO: 1935514 - RNA, 19 nt, Homo sapiens
  misc_RNA (1)...(19): siRNA sense strand
ucacuggaaugccgucuuu

SEQ ID NO: 1935515 - RNA, 19 nt, Homo sapiens
  misc_RNA (1)...(19): siRNA sense strand
ggaagagauggcaacauua

SEQ ID NO: 1935516 - RNA, 19 nt, Homo sapiens
  misc_RNA (1)...(19): siRNA sense strand
gcgcuugaauagaggcuua

SEQ ID NO: 1935517 - RNA, 19 nt, Homo sapiens
  misc_RNA (1)...(19): siRNA sense strand
acuccuacguucucuauua

SEQ ID NO: 1935518 - RNA, 19 nt, Homo sapiens
  misc_RNA (1)...(19): siRNA sense strand
ggauguaccuucucuucug

SEQ ID NO: 1935519 - RNA, 19 nt, Homo sapiens
  misc_RNA (1)...(19): siRNA sense strand
ggagaagggucugaaaugg

SEQ ID NO: 1935520 - RNA, 19 nt, Homo sapiens
  misc_RNA (1)...(19): siRNA sense strand
gaaaccaggaggugauaaa

SEQ ID NO: 1935521 - RNA, 19 nt, Homo sapiens
  misc_RNA (1)...(19): siRNA sense strand
gaauuauacugcuuaucga

SEQ ID NO: 1935522 - RNA, 19 nt, Homo sapiens
  misc_RNA (1)...(19): siRNA sense strand
gaacgcuaccucuuccuuu

SEQ ID NO: 1935523 - RNA, 19 nt, Homo sapiens
  misc_RNA (1)...(19): siRNA sense strand
gaagcugccuacauaugga

SEQ ID NO: 1935524 - RNA, 19 nt, Homo sapiens
  misc_RNA (1)...(19): siRNA sense strand
gguuaucagugcaguggua

SEQ ID NO: 1935525 - RNA, 19 nt, Homo sapiens
  misc_RNA (1)...(19): siRNA sense strand
caauauggaacauguacua

SEQ ID NO: 1935526 - RNA, 19 nt, Homo sapiens
  misc_RNA (1)...(19): siRNA sense strand
ccagaguacuccugccaaa

SEQ ID NO: 1935527 - RNA, 19 nt, Homo sapiens
  misc_RNA (1)...(19): siRNA sense strand
ccgaacaccuuccucauca

SEQ ID NO: 1935528 - RNA, 19 nt, Homo sapiens
  misc_RNA (1)...(19): siRNA sense strand
gaauccaucuccacgaagu

SEQ ID NO: 1935529 - RNA, 19 nt, Homo sapiens
  misc_RNA (1)...(19): siRNA sense strand
uaacacagaaucacaaagu

SEQ ID NO: 1935530 - RNA, 19 nt, Homo sapiens
  misc_RNA (1)...(19): siRNA sense strand
ugaacacucaacagaauua

SEQ ID NO: 1935531 - RNA, 19 nt, Homo sapiens
  misc_RNA (1)...(19): siRNA sense strand
caagcugucuggagagugu

SEQ ID NO: 1935532 - RNA, 19 nt, Homo sapiens
  misc_RNA (1)...(19): siRNA sense strand
ccaagccaccuucaucuuu

SEQ ID NO: 1935533 - RNA, 19 nt, Homo sapiens
  misc_RNA (1)...(19): siRNA sense strand
gcucuacuuuauuugcuaa

SEQ ID NO: 1935534 - RNA, 19 nt, Homo sapiens
  misc_RNA (1)...(19): siRNA sense strand
ugaacacacuucuuaugga

SEQ ID NO: 1935535 - RNA, 19 nt, Homo sapiens
  misc_RNA (1)...(19): siRNA sense strand
gagaauaguuccccagaga

SEQ ID NO: 1935536 - RNA, 19 nt, Homo sapiens
  misc_RNA (1)...(19): siRNA sense strand
gagccuccgucuccuauca

SEQ ID NO: 1935537 - RNA, 19 nt, Homo sapiens
  misc_RNA (1)...(19): siRNA sense strand
caagccaccuucaucuuuc

SEQ ID NO: 1935538 - RNA, 19 nt, Homo sapiens
  misc_RNA (1)...(19): siRNA sense strand
gaugaacacacuucuuaug

SEQ ID NO: 1935539 - RNA, 19 nt, Homo sapiens
  misc_RNA (1)...(19): siRNA sense strand
ccaucugacuucacaaaga

SEQ ID NO: 1935540 - RNA, 19 nt, Homo sapiens
  misc_RNA (1)...(19): siRNA sense strand
gucaguggcucaagugaug

SEQ ID NO: 1935541 - RNA, 19 nt, Homo sapiens
  misc_RNA (1)...(19): siRNA sense strand
gaaacagaauucaaaagga

SEQ ID NO: 1935542 - RNA, 19 nt, Homo sapiens
  misc_RNA (1)...(19): siRNA sense strand
ccaagaagaaacagaauuc

SEQ ID NO: 1935543 - RNA, 19 nt, Homo sapiens
  misc_RNA (1)...(19): siRNA sense strand
gaaacaggagucccaguuc

SEQ ID NO: 1935544 - RNA, 19 nt, Homo sapiens
  misc_RNA (1)...(19): siRNA sense strand
ccugaacacucaacagaau

SEQ ID NO: 1935545 - RNA, 19 nt, Homo sapiens
  misc_RNA (1)...(19): siRNA sense strand
gaacuuaaacuuguuacag

SEQ ID NO: 1935546 - RNA, 19 nt, Homo sapiens
  misc_RNA (1)...(19): siRNA sense strand
gaugggauaaucaaaguau

SEQ ID NO: 1935547 - RNA, 19 nt, Homo sapiens
  misc_RNA (1)...(19): siRNA sense strand
guaugggauuuacguaaga

SEQ ID NO: 1935548 - RNA, 19 nt, Homo sapiens
  misc_RNA (1)...(19): siRNA sense strand
ccucuucaaucccuucuga

SEQ ID NO: 1935549 - RNA, 19 nt, Homo sapiens
  misc_RNA (1)...(19): siRNA sense strand
acacagaaucacaaaguuu

SEQ ID NO: 1935550 - RNA, 19 nt, Homo sapiens
  misc_RNA (1)...(19): siRNA sense strand
uuugagaccuuguggagaa

SEQ ID NO: 1935551 - RNA, 19 nt, Homo sapiens
  misc_RNA (1)...(19): siRNA sense strand
gagaaaccaggaggugaua

SEQ ID NO: 1935552 - RNA, 19 nt, Homo sapiens
  misc_RNA (1)...(19): siRNA sense strand
ccagguagcagcacucgaa

SEQ ID NO: 1935553 - RNA, 19 nt, Homo sapiens
  misc_RNA (1)...(19): siRNA sense strand
ucaagacgagaauaccuua

SEQ ID NO: 1935554 - RNA, 19 nt, Homo sapiens
  misc_RNA (1)...(19): siRNA sense strand
agaaggcuuuguucgauug

SEQ ID NO: 1935555 - RNA, 19 nt, Homo sapiens
  misc_RNA (1)...(19): siRNA sense strand
uucaagaugucgauuagaa

SEQ ID NO: 1935556 - RNA, 19 nt, Homo sapiens
  misc_RNA (1)...(19): siRNA sense strand
ggagaaaccaggaggugau

SEQ ID NO: 1935557 - RNA, 19 nt, Homo sapiens
  misc_RNA (1)...(19): siRNA sense strand
caccagaacucuaccuuuu

SEQ ID NO: 1935558 - RNA, 19 nt, Homo sapiens
  misc_RNA (1)...(19): siRNA sense strand
cacuggcucuacuuuauuu

SEQ ID NO: 1935559 - RNA, 19 nt, Homo sapiens
  misc_RNA (1)...(19): siRNA sense strand
gaucaaacagccaaauuuu

SEQ ID NO: 1935560 - RNA, 19 nt, Homo sapiens
  misc_RNA (1)...(19): siRNA sense strand
guaacgaguagccagagua

SEQ ID NO: 1935561 - RNA, 19 nt, Homo sapiens
  misc_RNA (1)...(19): siRNA sense strand
ggauauucaagucugauuu

SEQ ID NO: 1935562 - RNA, 19 nt, Homo sapiens
  misc_RNA (1)...(19): siRNA sense strand
caaugaagaaggcuuuguu

SEQ ID NO: 1935563 - RNA, 19 nt, Homo sapiens
  misc_RNA (1)...(19): siRNA sense strand
cacaauacccucuucaauc

SEQ ID NO: 1935564 - RNA, 19 nt, Homo sapiens
  misc_RNA (1)...(19): siRNA sense strand
ugaucaaacagccaaauuu

SEQ ID NO: 1935565 - RNA, 19 nt, Homo sapiens
  misc_RNA (1)...(19): siRNA sense strand
gcuaauugcacagacgaua

SEQ ID NO: 1935566 - RNA, 19 nt, Homo sapiens
  misc_RNA (1)...(19): siRNA sense strand
gguugggccucucagaaga

SEQ ID NO: 1935567 - RNA, 19 nt, Homo sapiens
  misc_RNA (1)...(19): siRNA sense strand
uggauggucuucacaauac

SEQ ID NO: 1935568 - RNA, 19 nt, Homo sapiens
  misc_RNA (1)...(19): siRNA sense strand
caagaggucacgucugugu

SEQ ID NO: 1935569 - RNA, 19 nt, Homo sapiens
  misc_RNA (1)...(19): siRNA sense strand
gauaccaggugcaacaaaa

SEQ ID NO: 1935570 - RNA, 19 nt, Homo sapiens
  misc_RNA (1)...(19): siRNA sense strand
guaaagaggaggcuagacu

SEQ ID NO: 1935571 - RNA, 19 nt, Homo sapiens
  misc_RNA (1)...(19): siRNA sense strand
augaugaacacacuucuua

SEQ ID NO: 1935572 - RNA, 19 nt, Homo sapiens
  misc_RNA (1)...(19): siRNA sense strand
uaauaugacuggguugaag

SEQ ID NO: 1935573 - RNA, 19 nt, Homo sapiens
  misc_RNA (1)...(19): siRNA sense strand
gugcagugguaaugaugaa

SEQ ID NO: 1935574 - RNA, 19 nt, Homo sapiens
  misc_RNA (1)...(19): siRNA sense strand
uauggaacauguacuagca

SEQ ID NO: 1935575 - RNA, 19 nt, Homo sapiens
  misc_RNA (1)...(19): siRNA sense strand
ucacaauacccucuucaau

SEQ ID NO: 1935576 - RNA, 19 nt, Homo sapiens
  misc_RNA (1)...(19): siRNA sense strand
aaagugcaauccauccaau

SEQ ID NO: 1935577 - RNA, 19 nt, Homo sapiens
  misc_RNA (1)...(19): siRNA sense strand
gaccuggccuaguaacagu

SEQ ID NO: 1935578 - RNA, 19 nt, Homo sapiens
  misc_RNA (1)...(19): siRNA sense strand
cguaagaauuauacugcuu

SEQ ID NO: 1935579 - RNA, 19 nt, Homo sapiens
  misc_RNA (1)...(19): siRNA sense strand
ggugaacuuaaacuuguua

SEQ ID NO: 1935580 - RNA, 19 nt, Homo sapiens
  misc_RNA (1)...(19): siRNA sense strand
ugaagaaggcuuuguucga

SEQ ID NO: 1935581 - RNA, 19 nt, Homo sapiens
  misc_RNA (1)...(19): siRNA sense strand
aagaaggcuuuguucgauu

SEQ ID NO: 1935582 - RNA, 19 nt, Homo sapiens
  misc_RNA (1)...(19): siRNA sense strand
acacucaacagaauuauag

SEQ ID NO: 1935583 - RNA, 19 nt, Homo sapiens
  misc_RNA (1)...(19): siRNA sense strand
acaauacccucuucaaucc

SEQ ID NO: 1935584 - RNA, 19 nt, Homo sapiens
  misc_RNA (1)...(19): siRNA sense strand
gaaauggauggucuucaca

SEQ ID NO: 1935585 - RNA, 19 nt, Homo sapiens
  misc_RNA (1)...(19): siRNA sense strand
caaauacuccuacguucuc

SEQ ID NO: 1935586 - RNA, 19 nt, Homo sapiens
  misc_RNA (1)...(19): siRNA sense strand
cucaagaggucacgucugu

SEQ ID NO: 1935587 - RNA, 19 nt, Homo sapiens
  misc_RNA (1)...(19): siRNA sense strand
uauguaaaauccagccuua

SEQ ID NO: 1935588 - RNA, 19 nt, Homo sapiens
  misc_RNA (1)...(19): siRNA sense strand
gaacucuaccuuuuaugua

SEQ ID NO: 1935589 - RNA, 19 nt, Homo sapiens
  misc_RNA (1)...(19): siRNA sense strand
guaaugaugaacacacuuc

SEQ ID NO: 1935590 - RNA, 19 nt, Homo sapiens
  misc_RNA (1)...(19): siRNA sense strand
gaacaugcaaaggucauca

SEQ ID NO: 1935591 - RNA, 19 nt, Homo sapiens
  misc_RNA (1)...(19): siRNA sense strand
agacagagcggaaagacau

SEQ ID NO: 1935592 - RNA, 19 nt, Homo sapiens
  misc_RNA (1)...(19): siRNA sense strand
cuaguaacaguaacgagua

SEQ ID NO: 1935593 - RNA, 19 nt, Homo sapiens
  misc_RNA (1)...(19): siRNA sense strand
ccacuggcucuacuuuauu

SEQ ID NO: 1935594 - RNA, 19 nt, Homo sapiens
  misc_RNA (1)...(19): siRNA sense strand
gcucugagucuagaaauag

SEQ ID NO: 1935595 - RNA, 19 nt, Homo sapiens
  misc_RNA (1)...(19): siRNA sense strand
cuccuacguucucuauuaa

SEQ ID NO: 1935596 - RNA, 19 nt, Homo sapiens
  misc_RNA (1)...(19): siRNA sense strand
gcaauccauccaauucuuc

SEQ ID NO: 1935597 - RNA, 19 nt, Homo sapiens
  misc_RNA (1)...(19): siRNA sense strand
accaggaggugauaaacuu

SEQ ID NO: 1935598 - RNA, 19 nt, Homo sapiens
  misc_RNA (1)...(19): siRNA sense strand
aaagauugcuaccuguucu

SEQ ID NO: 1935599 - RNA, 19 nt, Homo sapiens
  misc_RNA (1)...(19): siRNA sense strand
caaagauugcuaccuguuc

SEQ ID NO: 1935600 - RNA, 19 nt, Homo sapiens
  misc_RNA (1)...(19): siRNA sense strand
gcuccugggucauucucaa

SEQ ID NO: 1935601 - RNA, 19 nt, Homo sapiens
  misc_RNA (1)...(19): siRNA sense strand
uaguccagaugaccaguuu

SEQ ID NO: 1935602 - RNA, 19 nt, Homo sapiens
  misc_RNA (1)...(19): siRNA sense strand
cuaauugcacagacgauaa

SEQ ID NO: 1935603 - RNA, 19 nt, Homo sapiens
  misc_RNA (1)...(19): siRNA sense strand
ggagaaggauuaugaagaa

SEQ ID NO: 1935604 - RNA, 19 nt, Homo sapiens
  misc_RNA (1)...(19): siRNA sense strand
gcaggaaccuugacauuga

SEQ ID NO: 1935605 - RNA, 19 nt, Homo sapiens
  misc_RNA (1)...(19): siRNA sense strand
gaacgccucucccuggauu

SEQ ID NO: 1935606 - RNA, 19 nt, Homo sapiens
  misc_RNA (1)...(19): siRNA sense strand
gauggaagaaggagaauuu

SEQ ID NO: 1935607 - RNA, 19 nt, Homo sapiens
  misc_RNA (1)...(19): siRNA sense strand
cgagaaagccuaucacgaa

SEQ ID NO: 1935608 - RNA, 19 nt, Homo sapiens
  misc_RNA (1)...(19): siRNA sense strand
gaaggauuaugaagaagug

SEQ ID NO: 1935609 - RNA, 19 nt, Homo sapiens
  misc_RNA (1)...(19): siRNA sense strand
ggacaacgaagccaucuau

SEQ ID NO: 1935610 - RNA, 19 nt, Homo sapiens
  misc_RNA (1)...(19): siRNA sense strand
caagaggaccauccaguuu

SEQ ID NO: 1935611 - RNA, 19 nt, Homo sapiens
  misc_RNA (1)...(19): siRNA sense strand
cuagcaagaucaacgauga

SEQ ID NO: 1935612 - RNA, 19 nt, Homo sapiens
  misc_RNA (1)...(19): siRNA sense strand
ggacugauucguuugaaga

SEQ ID NO: 1935613 - RNA, 19 nt, Homo sapiens
  misc_RNA (1)...(19): siRNA sense strand
ggaugugaaugucgcuauu

SEQ ID NO: 1935614 - RNA, 19 nt, Homo sapiens
  misc_RNA (1)...(19): siRNA sense strand
ucacuucucugcugaugga

SEQ ID NO: 1935615 - RNA, 19 nt, Homo sapiens
  misc_RNA (1)...(19): siRNA sense strand
ucacugaguuccagaccaa

SEQ ID NO: 1935616 - RNA, 19 nt, Homo sapiens
  misc_RNA (1)...(19): siRNA sense strand
gaaagccuaucacgaacag

SEQ ID NO: 1935617 - RNA, 19 nt, Homo sapiens
  misc_RNA (1)...(19): siRNA sense strand
ggaugcagccaacaacuau

SEQ ID NO: 1935618 - RNA, 19 nt, Homo sapiens
  misc_RNA (1)...(19): siRNA sense strand
gauaaccagcuccugcuuu

SEQ ID NO: 1935619 - RNA, 19 nt, Homo sapiens
  misc_RNA (1)...(19): siRNA sense strand
uagcugcccuggagaagga

SEQ ID NO: 1935620 - RNA, 19 nt, Homo sapiens
  misc_RNA (1)...(19): siRNA sense strand
acaccacacuggaacauuc

SEQ ID NO: 1935621 - RNA, 19 nt, Homo sapiens
  misc_RNA (1)...(19): siRNA sense strand
gaaccuaccgccagcucuu

SEQ ID NO: 1935622 - RNA, 19 nt, Homo sapiens
  misc_RNA (1)...(19): siRNA sense strand
ccaagaggaccauccaguu

SEQ ID NO: 1935623 - RNA, 19 nt, Homo sapiens
  misc_RNA (1)...(19): siRNA sense strand
auaaccagcuccugcuuug

SEQ ID NO: 1935624 - RNA, 19 nt, Homo sapiens
  misc_RNA (1)...(19): siRNA sense strand
acaacgaagccaucuauga

SEQ ID NO: 1935625 - RNA, 19 nt, Homo sapiens
  misc_RNA (1)...(19): siRNA sense strand
caacgaagccaucuaugac

SEQ ID NO: 1935626 - RNA, 19 nt, Homo sapiens
  misc_RNA (1)...(19): siRNA sense strand
gagcagcugaucacaggaa

SEQ ID NO: 1935627 - RNA, 19 nt, Homo sapiens
  misc_RNA (1)...(19): siRNA sense strand
gggccuuugugcauuggua

SEQ ID NO: 1935628 - RNA, 19 nt, Homo sapiens
  misc_RNA (1)...(19): siRNA sense strand
gaagccaucuaugacaucu

SEQ ID NO: 1935629 - RNA, 19 nt, Homo sapiens
  misc_RNA (1)...(19): siRNA sense strand
gaacauucagauugugcuu

SEQ ID NO: 1935630 - RNA, 19 nt, Homo sapiens
  misc_RNA (1)...(19): siRNA sense strand
ucaaccgccucaucaguca

SEQ ID NO: 1935631 - RNA, 19 nt, Homo sapiens
  misc_RNA (1)...(19): siRNA sense strand
caaguucgaccucauguac

SEQ ID NO: 1935632 - RNA, 19 nt, Homo sapiens
  misc_RNA (1)...(19): siRNA sense strand
cugauucguuugaagaaga

SEQ ID NO: 1935633 - RNA, 19 nt, Homo sapiens
  misc_RNA (1)...(19): siRNA sense strand
acauucagauugugcuuuc

SEQ ID NO: 1935634 - RNA, 19 nt, Homo sapiens
  misc_RNA (1)...(19): siRNA sense strand
ccacaaguucgaccucaug

SEQ ID NO: 1935635 - RNA, 19 nt, Homo sapiens
  misc_RNA (1)...(19): siRNA sense strand
caagcgggaguucagauug

SEQ ID NO: 1935636 - RNA, 19 nt, Homo sapiens
  misc_RNA (1)...(19): siRNA sense strand
gagaaggauuaugaagaag

SEQ ID NO: 1935637 - RNA, 19 nt, Homo sapiens
  misc_RNA (1)...(19): siRNA sense strand
agaggaccauccaguuugu

SEQ ID NO: 1935638 - RNA, 19 nt, Homo sapiens
  misc_RNA (1)...(19): siRNA sense strand
gcauacggaagcugacaga

SEQ ID NO: 1935639 - RNA, 19 nt, Homo sapiens
  misc_RNA (1)...(19): siRNA sense strand
ccaagcgggaguucagauu

SEQ ID NO: 1935640 - RNA, 19 nt, Homo sapiens
  misc_RNA (1)...(19): siRNA sense strand
ccgcaggaaccuugacauu

SEQ ID NO: 1935641 - RNA, 19 nt, Homo sapiens
  misc_RNA (1)...(19): siRNA sense strand
acuggaacauucagauugu

SEQ ID NO: 1935642 - RNA, 19 nt, Homo sapiens
  misc_RNA (1)...(19): siRNA sense strand
uggagaaggauuaugaaga

SEQ ID NO: 1935643 - RNA, 19 nt, Homo sapiens
  misc_RNA (1)...(19): siRNA sense strand
ucaaggugggcaucaacua

SEQ ID NO: 1935644 - RNA, 19 nt, Homo sapiens
  misc_RNA (1)...(19): siRNA sense strand
gaugugaaugucgcuauug

SEQ ID NO: 1935645 - RNA, 19 nt, Homo sapiens
  misc_RNA (1)...(19): siRNA sense strand
gcccaaggaugugaauguc

SEQ ID NO: 1935646 - RNA, 19 nt, Homo sapiens
  misc_RNA (1)...(19): siRNA sense strand
acauugagcgcccuaccua

SEQ ID NO: 1935647 - RNA, 19 nt, Homo sapiens
  misc_RNA (1)...(19): siRNA sense strand
ccuggauuauggcaagaaa

SEQ ID NO: 1935648 - RNA, 19 nt, Homo sapiens
  misc_RNA (1)...(19): siRNA sense strand
ugauucguuugaagaagaa

SEQ ID NO: 1935649 - RNA, 19 nt, Homo sapiens
  misc_RNA (1)...(19): siRNA sense strand
gaagaaguggggacugauu

SEQ ID NO: 1935650 - RNA, 19 nt, Homo sapiens
  misc_RNA (1)...(19): siRNA sense strand
cugcuucucuccgcuuuga

SEQ ID NO: 1935651 - RNA, 19 nt, Homo sapiens
  misc_RNA (1)...(19): siRNA sense strand
acacuggaacauucagauu

SEQ ID NO: 1935652 - RNA, 19 nt, Homo sapiens
  misc_RNA (1)...(19): siRNA sense strand
ggaccauccaguuuguaga

SEQ ID NO: 1935653 - RNA, 19 nt, Homo sapiens
  misc_RNA (1)...(19): siRNA sense strand
aagaggaccauccaguuug

SEQ ID NO: 1935654 - RNA, 19 nt, Homo sapiens
  misc_RNA (1)...(19): siRNA sense strand
ucaauguggaccucacuga

SEQ ID NO: 1935655 - RNA, 19 nt, Homo sapiens
  misc_RNA (1)...(19): siRNA sense strand
auugagcgcccuaccuaua

SEQ ID NO: 1935656 - RNA, 19 nt, Homo sapiens
  misc_RNA (1)...(19): siRNA sense strand
ugaggccagggaagacuua

SEQ ID NO: 1935657 - RNA, 19 nt, Homo sapiens
  misc_RNA (1)...(19): siRNA sense strand
ccucaucagucagauugug

SEQ ID NO: 1935658 - RNA, 19 nt, Homo sapiens
  misc_RNA (1)...(19): siRNA sense strand
gugcuuucaugguggacaa

SEQ ID NO: 1935659 - RNA, 19 nt, Homo sapiens
  misc_RNA (1)...(19): siRNA sense strand
gggacugauucguuugaag

SEQ ID NO: 1935660 - RNA, 19 nt, Homo sapiens
  misc_RNA (1)...(19): siRNA sense strand
gaagugcgacccgagacau

SEQ ID NO: 1935661 - RNA, 19 nt, Homo sapiens
  misc_RNA (1)...(19): siRNA sense strand
auacggaagcugacagaug

SEQ ID NO: 1935662 - RNA, 19 nt, Homo sapiens
  misc_RNA (1)...(19): siRNA sense strand
caaggugggcaucaacuac

SEQ ID NO: 1935663 - RNA, 19 nt, Homo sapiens
  misc_RNA (1)...(19): siRNA sense strand
gcucaagcuagcaagauca

SEQ ID NO: 1935664 - RNA, 19 nt, Homo sapiens
  misc_RNA (1)...(19): siRNA sense strand
gcuggaguuugccaucuac

SEQ ID NO: 1935665 - RNA, 19 nt, Homo sapiens
  misc_RNA (1)...(19): siRNA sense strand
caaccucaaccgccucauc

SEQ ID NO: 1935666 - RNA, 19 nt, Homo sapiens
  misc_RNA (1)...(19): siRNA sense strand
cccgagacauggcaaguac

SEQ ID NO: 1935667 - RNA, 19 nt, Homo sapiens
  misc_RNA (1)...(19): siRNA sense strand
cacuggaacauucagauug

SEQ ID NO: 1935668 - RNA, 19 nt, Homo sapiens
  misc_RNA (1)...(19): siRNA sense strand
cgcaggaaccuugacauug

SEQ ID NO: 1935669 - RNA, 19 nt, Homo sapiens
  misc_RNA (1)...(19): siRNA sense strand
ugaaggggaggaauuuuaa

SEQ ID NO: 1935670 - RNA, 19 nt, Homo sapiens
  misc_RNA (1)...(19): siRNA sense strand
aagcgggaguucagauugg

SEQ ID NO: 1935671 - RNA, 19 nt, Homo sapiens
  misc_RNA (1)...(19): siRNA sense strand
ggauggaagaaggagaauu

SEQ ID NO: 1935672 - RNA, 19 nt, Homo sapiens
  misc_RNA (1)...(19): siRNA sense strand
ggaggaugcagccaacaac

SEQ ID NO: 1935673 - RNA, 19 nt, Homo sapiens
  misc_RNA (1)...(19): siRNA sense strand
gcuucaaggugggcaucaa

SEQ ID NO: 1935674 - RNA, 19 nt, Homo sapiens
  misc_RNA (1)...(19): siRNA sense strand
gcagacggcacuuuugaug

SEQ ID NO: 1935675 - RNA, 19 nt, Homo sapiens
  misc_RNA (1)...(19): siRNA sense strand
ggagcucuucugccuggaa

SEQ ID NO: 1935676 - RNA, 19 nt, Homo sapiens
  misc_RNA (1)...(19): siRNA sense strand
caggaaccuugacauugag

SEQ ID NO: 1935677 - RNA, 19 nt, Homo sapiens
  misc_RNA (1)...(19): siRNA sense strand
gcaaauauacuucugcaaa

SEQ ID NO: 1935678 - RNA, 19 nt, Homo sapiens
  misc_RNA (1)...(19): siRNA sense strand
gaaaggaaguagaaauuac

SEQ ID NO: 1935679 - RNA, 19 nt, Homo sapiens
  misc_RNA (1)...(19): siRNA sense strand
ggagauauucuacuucuaa

SEQ ID NO: 1935680 - RNA, 19 nt, Homo sapiens
  misc_RNA (1)...(19): siRNA sense strand
caaccacacuucaggaauu

SEQ ID NO: 1935681 - RNA, 19 nt, Homo sapiens
  misc_RNA (1)...(19): siRNA sense strand
gaacagcagucgcaucuac

SEQ ID NO: 1935682 - RNA, 19 nt, Homo sapiens
  misc_RNA (1)...(19): siRNA sense strand
ggaaagagaggcuugagaa

SEQ ID NO: 1935683 - RNA, 19 nt, Homo sapiens
  misc_RNA (1)...(19): siRNA sense strand
augaagaccucucuaauuu

SEQ ID NO: 1935684 - RNA, 19 nt, Homo sapiens
  misc_RNA (1)...(19): siRNA sense strand
gcaacuggaggaauacuua

SEQ ID NO: 1935685 - RNA, 19 nt, Homo sapiens
  misc_RNA (1)...(19): siRNA sense strand
caagaagaauuucgagaug

SEQ ID NO: 1935686 - RNA, 19 nt, Homo sapiens
  misc_RNA (1)...(19): siRNA sense strand
ggacagcuguugaaaagua

SEQ ID NO: 1935687 - RNA, 19 nt, Homo sapiens
  misc_RNA (1)...(19): siRNA sense strand
cgaaacauaaguugcauua

SEQ ID NO: 1935688 - RNA, 19 nt, Homo sapiens
  misc_RNA (1)...(19): siRNA sense strand
uaaacaagguuaugucauc

SEQ ID NO: 1935689 - RNA, 19 nt, Homo sapiens
  misc_RNA (1)...(19): siRNA sense strand
cuucaucacuuucaucuuu

SEQ ID NO: 1935690 - RNA, 19 nt, Homo sapiens
  misc_RNA (1)...(19): siRNA sense strand
gaauuguucuuggagauuu

SEQ ID NO: 1935691 - RNA, 19 nt, Homo sapiens
  misc_RNA (1)...(19): siRNA sense strand
gaaauuacaaccacacuuc

SEQ ID NO: 1935692 - RNA, 19 nt, Homo sapiens
  misc_RNA (1)...(19): siRNA sense strand
gcagucgcaucuacuauga

SEQ ID NO: 1935693 - RNA, 19 nt, Homo sapiens
  misc_RNA (1)...(19): siRNA sense strand
caaaugaagaccucucuaa

SEQ ID NO: 1935694 - RNA, 19 nt, Homo sapiens
  misc_RNA (1)...(19): siRNA sense strand
gaggaauacuuacuucaug

SEQ ID NO: 1935695 - RNA, 19 nt, Homo sapiens
  misc_RNA (1)...(19): siRNA sense strand
gaauuuaagucugccuauu

SEQ ID NO: 1935696 - RNA, 19 nt, Homo sapiens
  misc_RNA (1)...(19): siRNA sense strand
ucagauauguuagcuacua

SEQ ID NO: 1935697 - RNA, 19 nt, Homo sapiens
  misc_RNA (1)...(19): siRNA sense strand
gaacuuggcaaaaugauua

SEQ ID NO: 1935698 - RNA, 19 nt, Homo sapiens
  misc_RNA (1)...(19): siRNA sense strand
gaagaccucucuaauuuug

SEQ ID NO: 1935699 - RNA, 19 nt, Homo sapiens
  misc_RNA (1)...(19): siRNA sense strand
gaaagagaggcuugagaaa

SEQ ID NO: 1935700 - RNA, 19 nt, Homo sapiens
  misc_RNA (1)...(19): siRNA sense strand
gaaggucuguacugggauu

SEQ ID NO: 1935701 - RNA, 19 nt, Homo sapiens
  misc_RNA (1)...(19): siRNA sense strand
ccauuuacuucaucacuuu

SEQ ID NO: 1935702 - RNA, 19 nt, Homo sapiens
  misc_RNA (1)...(19): siRNA sense strand
gagugaauguuauggcaaa

SEQ ID NO: 1935703 - RNA, 19 nt, Homo sapiens
  misc_RNA (1)...(19): siRNA sense strand
gaacaagccagaagagaag

SEQ ID NO: 1935704 - RNA, 19 nt, Homo sapiens
  misc_RNA (1)...(19): siRNA sense strand
caguuaggauuucuuguuu

SEQ ID NO: 1935705 - RNA, 19 nt, Homo sapiens
  misc_RNA (1)...(19): siRNA sense strand
ggaauuguuacucuacuuu

SEQ ID NO: 1935706 - RNA, 19 nt, Homo sapiens
  misc_RNA (1)...(19): siRNA sense strand
cagaaaggaaguagaaauu

SEQ ID NO: 1935707 - RNA, 19 nt, Homo sapiens
  misc_RNA (1)...(19): siRNA sense strand
caugcuggcacauuuauua

SEQ ID NO: 1935708 - RNA, 19 nt, Homo sapiens
  misc_RNA (1)...(19): siRNA sense strand
cugugaagcuccucagaua

SEQ ID NO: 1935709 - RNA, 19 nt, Homo sapiens
  misc_RNA (1)...(19): siRNA sense strand
ucagauugguggcagaauu

SEQ ID NO: 1935710 - RNA, 19 nt, Homo sapiens
  misc_RNA (1)...(19): siRNA sense strand
gguuaugucaucucuauuu

SEQ ID NO: 1935711 - RNA, 19 nt, Homo sapiens
  misc_RNA (1)...(19): siRNA sense strand
cuauggaaauucaagauga

SEQ ID NO: 1935712 - RNA, 19 nt, Homo sapiens
  misc_RNA (1)...(19): siRNA sense strand
gguaaacccacauauguau

SEQ ID NO: 1935713 - RNA, 19 nt, Homo sapiens
  misc_RNA (1)...(19): siRNA sense strand
agagaaggcuuugacgaaa

SEQ ID NO: 1935714 - RNA, 19 nt, Homo sapiens
  misc_RNA (1)...(19): siRNA sense strand
caacacaugcaaagucuau

SEQ ID NO: 1935715 - RNA, 19 nt, Homo sapiens
  misc_RNA (1)...(19): siRNA sense strand
ggggauacauuuucacuuu

SEQ ID NO: 1935716 - RNA, 19 nt, Homo sapiens
  misc_RNA (1)...(19): siRNA sense strand
caacaacacaugcaaaguc

SEQ ID NO: 1935717 - RNA, 19 nt, Homo sapiens
  misc_RNA (1)...(19): siRNA sense strand
gcuggcacauuuauuacaa

SEQ ID NO: 1935718 - RNA, 19 nt, Homo sapiens
  misc_RNA (1)...(19): siRNA sense strand
acaagagggacuagaguua

SEQ ID NO: 1935719 - RNA, 19 nt, Homo sapiens
  misc_RNA (1)...(19): siRNA sense strand
gaacagcuggaucacaaga

SEQ ID NO: 1935720 - RNA, 19 nt, Homo sapiens
  misc_RNA (1)...(19): siRNA sense strand
uggcuagaauugcuacuuu

SEQ ID NO: 1935721 - RNA, 19 nt, Homo sapiens
  misc_RNA (1)...(19): siRNA sense strand
cugaacagcuggaucacaa

SEQ ID NO: 1935722 - RNA, 19 nt, Homo sapiens
  misc_RNA (1)...(19): siRNA sense strand
gaacuggcuagaauugcua

SEQ ID NO: 1935723 - RNA, 19 nt, Homo sapiens
  misc_RNA (1)...(19): siRNA sense strand
gcagcuguauaauuuaaag

SEQ ID NO: 1935724 - RNA, 19 nt, Homo sapiens
  misc_RNA (1)...(19): siRNA sense strand
uaaguugcauuacagaaag

SEQ ID NO: 1935725 - RNA, 19 nt, Homo sapiens
  misc_RNA (1)...(19): siRNA sense strand
aagguuaugucaucucuau

SEQ ID NO: 1935726 - RNA, 19 nt, Homo sapiens
  misc_RNA (1)...(19): siRNA sense strand
gaugguaaacccacauaug

SEQ ID NO: 1935727 - RNA, 19 nt, Homo sapiens
  misc_RNA (1)...(19): siRNA sense strand
aaugaagaccucucuaauu

SEQ ID NO: 1935728 - RNA, 19 nt, Homo sapiens
  misc_RNA (1)...(19): siRNA sense strand
cgacugaacagcuggauca

SEQ ID NO: 1935729 - RNA, 19 nt, Homo sapiens
  misc_RNA (1)...(19): siRNA sense strand
gaagugaaagcugacuauu

SEQ ID NO: 1935730 - RNA, 19 nt, Homo sapiens
  misc_RNA (1)...(19): siRNA sense strand
ggaacuggcuagaauugcu

SEQ ID NO: 1935731 - RNA, 19 nt, Homo sapiens
  misc_RNA (1)...(19): siRNA sense strand
gauauguuagcuacuauga

SEQ ID NO: 1935732 - RNA, 19 nt, Homo sapiens
  misc_RNA (1)...(19): siRNA sense strand
uuacagaaaggaaguagaa

SEQ ID NO: 1935733 - RNA, 19 nt, Homo sapiens
  misc_RNA (1)...(19): siRNA sense strand
aagagggacuagaguuauu

SEQ ID NO: 1935734 - RNA, 19 nt, Homo sapiens
  misc_RNA (1)...(19): siRNA sense strand
uaaguccauucgcagcaua

SEQ ID NO: 1935735 - RNA, 19 nt, Homo sapiens
  misc_RNA (1)...(19): siRNA sense strand
ugaacaagccagaagagaa

SEQ ID NO: 1935736 - RNA, 19 nt, Homo sapiens
  misc_RNA (1)...(19): siRNA sense strand
uaccuauucugaagugaaa

SEQ ID NO: 1935737 - RNA, 19 nt, Homo sapiens
  misc_RNA (1)...(19): siRNA sense strand
ggacccauuuacuucauca

SEQ ID NO: 1935738 - RNA, 19 nt, Homo sapiens
  misc_RNA (1)...(19): siRNA sense strand
ccaguuaggauuucuuguu

SEQ ID NO: 1935739 - RNA, 19 nt, Homo sapiens
  misc_RNA (1)...(19): siRNA sense strand
uaagucugccuauuucaaa

SEQ ID NO: 1935740 - RNA, 19 nt, Homo sapiens
  misc_RNA (1)...(19): siRNA sense strand
gggauucaugguacaauaa

SEQ ID NO: 1935741 - RNA, 19 nt, Homo sapiens
  misc_RNA (1)...(19): siRNA sense strand
gccugucacucaagaagaa

SEQ ID NO: 1935742 - RNA, 19 nt, Homo sapiens
  misc_RNA (1)...(19): siRNA sense strand
gcggagauuuggcugaaca

SEQ ID NO: 1935743 - RNA, 19 nt, Homo sapiens
  misc_RNA (1)...(19): siRNA sense strand
aaugauaccuauucugaag

SEQ ID NO: 1935744 - RNA, 19 nt, Homo sapiens
  misc_RNA (1)...(19): siRNA sense strand
ugggauucaugguacaaua

SEQ ID NO: 1935745 - RNA, 19 nt, Homo sapiens
  misc_RNA (1)...(19): siRNA sense strand
gcaccacaaccaaguacaa

SEQ ID NO: 1935746 - RNA, 19 nt, Homo sapiens
  misc_RNA (1)...(19): siRNA sense strand
gaauauguucuuggcaauu

SEQ ID NO: 1935747 - RNA, 19 nt, Homo sapiens
  misc_RNA (1)...(19): siRNA sense strand
ggaggaauacuuacuucau

SEQ ID NO: 1935748 - RNA, 19 nt, Homo sapiens
  misc_RNA (1)...(19): siRNA sense strand
gccuucaaauuaauacuga

SEQ ID NO: 1935749 - RNA, 19 nt, Homo sapiens
  misc_RNA (1)...(19): siRNA sense strand
gcaaaugaagaccucucua

SEQ ID NO: 1935750 - RNA, 19 nt, Homo sapiens
  misc_RNA (1)...(19): siRNA sense strand
ucuaggaguucccagaguu

SEQ ID NO: 1935751 - RNA, 19 nt, Homo sapiens
  misc_RNA (1)...(19): siRNA sense strand
uauguuagcuacuaugacu

SEQ ID NO: 1935752 - RNA, 19 nt, Homo sapiens
  misc_RNA (1)...(19): siRNA sense strand
gugaagcuccucagauaug

SEQ ID NO: 1935753 - RNA, 19 nt, Homo sapiens
  misc_RNA (1)...(19): siRNA sense strand
gggauacauuuucacuuua

SEQ ID NO: 1935754 - RNA, 19 nt, Homo sapiens
  misc_RNA (1)...(19): siRNA sense strand
gagaaggcuuugacgaaaa

SEQ ID NO: 1935755 - RNA, 19 nt, Homo sapiens
  misc_RNA (1)...(19): siRNA sense strand
agucgcaucuacuaugaaa

SEQ ID NO: 1935756 - RNA, 19 nt, Homo sapiens
  misc_RNA (1)...(19): siRNA sense strand
ucaagaagaauuucgagau

SEQ ID NO: 1935757 - RNA, 19 nt, Homo sapiens
  misc_RNA (1)...(19): siRNA sense strand
gcagaaggccagauuuuga

SEQ ID NO: 1935758 - RNA, 19 nt, Homo sapiens
  misc_RNA (1)...(19): siRNA sense strand
caagagggacuagaguuau

SEQ ID NO: 1935759 - RNA, 19 nt, Homo sapiens
  misc_RNA (1)...(19): siRNA sense strand
caugcaaagucuauucauc

SEQ ID NO: 1935760 - RNA, 19 nt, Homo sapiens
  misc_RNA (1)...(19): siRNA sense strand
aagagaaggcuuugacgaa

SEQ ID NO: 1935761 - RNA, 19 nt, Homo sapiens
  misc_RNA (1)...(19): siRNA sense strand
guaaacccacauauguauu

SEQ ID NO: 1935762 - RNA, 19 nt, Homo sapiens
  misc_RNA (1)...(19): siRNA sense strand
caaguucauugaccuucga

SEQ ID NO: 1935763 - RNA, 19 nt, Homo sapiens
  misc_RNA (1)...(19): siRNA sense strand
gaaguagaaauuacaacca

SEQ ID NO: 1935764 - RNA, 19 nt, Homo sapiens
  misc_RNA (1)...(19): siRNA sense strand
aagcuccucagauauguua

SEQ ID NO: 1935765 - RNA, 19 nt, Homo sapiens
  misc_RNA (1)...(19): siRNA sense strand
ugaauauguucuuggcaau

SEQ ID NO: 1935766 - RNA, 19 nt, Homo sapiens
  misc_RNA (1)...(19): siRNA sense strand
cauaagcuuuaacaagaca

SEQ ID NO: 1935767 - RNA, 19 nt, Homo sapiens
  misc_RNA (1)...(19): siRNA sense strand
cagauauguuagcuacuau

SEQ ID NO: 1935768 - RNA, 19 nt, Homo sapiens
  misc_RNA (1)...(19): siRNA sense strand
aucgaaaucugaaaccaaa

SEQ ID NO: 1935769 - RNA, 19 nt, Homo sapiens
  misc_RNA (1)...(19): siRNA sense strand
ggaaauucaagaugacuac

SEQ ID NO: 1935770 - RNA, 19 nt, Homo sapiens
  misc_RNA (1)...(19): siRNA sense strand
ugauaccuauucugaagug

SEQ ID NO: 1935771 - RNA, 19 nt, Homo sapiens
  misc_RNA (1)...(19): siRNA sense strand
cccugcaacuggaggaaua

SEQ ID NO: 1935772 - RNA, 19 nt, Homo sapiens
  misc_RNA (1)...(19): siRNA sense strand
ucauugaccuucgacugaa

SEQ ID NO: 1935773 - RNA, 19 nt, Homo sapiens
  misc_RNA (1)...(19): siRNA sense strand
ugucucagcugucaucaac

SEQ ID NO: 1935774 - RNA, 19 nt, Homo sapiens
  misc_RNA (1)...(19): siRNA sense strand
gggcuucgaaacauaaguu

SEQ ID NO: 1935775 - RNA, 19 nt, Homo sapiens
  misc_RNA (1)...(19): siRNA sense strand
gagauggcaccacaaccaa

SEQ ID NO: 1935776 - RNA, 19 nt, Homo sapiens
  misc_RNA (1)...(19): siRNA sense strand
ccaaaggcagcggagauuu

SEQ ID NO: 1935777 - RNA, 19 nt, Homo sapiens
  misc_RNA (1)...(19): siRNA sense strand
gcaguuguguggcguaaag

SEQ ID NO: 1935778 - RNA, 19 nt, Homo sapiens
  misc_RNA (1)...(19): siRNA sense strand
caacaggcccucuggacaa

SEQ ID NO: 1935779 - RNA, 19 nt, Homo sapiens
  misc_RNA (1)...(19): siRNA sense strand
aaaugaugcuguuuggaaa

SEQ ID NO: 1935780 - RNA, 19 nt, Homo sapiens
  misc_RNA (1)...(19): siRNA sense strand
gauuugaucacauggguaa

SEQ ID NO: 1935781 - RNA, 19 nt, Homo sapiens
  misc_RNA (1)...(19): siRNA sense strand
caggcccucuggacaaaua

SEQ ID NO: 1935782 - RNA, 19 nt, Homo sapiens
  misc_RNA (1)...(19): siRNA sense strand
caccgacucuuguaucaug

SEQ ID NO: 1935783 - RNA, 19 nt, Homo sapiens
  misc_RNA (1)...(19): siRNA sense strand
guaaagaaacucccauggu

SEQ ID NO: 1935784 - RNA, 19 nt, Homo sapiens
  misc_RNA (1)...(19): siRNA sense strand
cgacucaccugugcagauc

SEQ ID NO: 1935785 - RNA, 19 nt, Homo sapiens
  misc_RNA (1)...(19): siRNA sense strand
uaacuacccuaucguuuug

SEQ ID NO: 1935786 - RNA, 19 nt, Homo sapiens
  misc_RNA (1)...(19): siRNA sense strand
uaucaugagcauuggauuu

SEQ ID NO: 1935787 - RNA, 19 nt, Homo sapiens
  misc_RNA (1)...(19): siRNA sense strand
gccaccgacucuuguauca

SEQ ID NO: 1935788 - RNA, 19 nt, Homo sapiens
  misc_RNA (1)...(19): siRNA sense strand
cugguugaaugcaguguuu

SEQ ID NO: 1935789 - RNA, 19 nt, Homo sapiens
  misc_RNA (1)...(19): siRNA sense strand
cauuggauuugaucacaug

SEQ ID NO: 1935790 - RNA, 19 nt, Homo sapiens
  misc_RNA (1)...(19): siRNA sense strand
gguugaaugcaguguuuaa

SEQ ID NO: 1935791 - RNA, 19 nt, Homo sapiens
  misc_RNA (1)...(19): siRNA sense strand
guaacuacccuaucguuuu

SEQ ID NO: 1935792 - RNA, 19 nt, Homo sapiens
  misc_RNA (1)...(19): siRNA sense strand
cagcaguuguguggcguaa

SEQ ID NO: 1935793 - RNA, 19 nt, Homo sapiens
  misc_RNA (1)...(19): siRNA sense strand
gcauuggauuugaucacau

SEQ ID NO: 1935794 - RNA, 19 nt, Homo sapiens
  misc_RNA (1)...(19): siRNA sense strand
gaaugcaguguuuaauaag

SEQ ID NO: 1935795 - RNA, 19 nt, Homo sapiens
  misc_RNA (1)...(19): siRNA sense strand
caugagcauuggauuugau

SEQ ID NO: 1935796 - RNA, 19 nt, Homo sapiens
  misc_RNA (1)...(19): siRNA sense strand
gaucgacgccaccgacucu

SEQ ID NO: 1935797 - RNA, 19 nt, Homo sapiens
  misc_RNA (1)...(19): siRNA sense strand
ucaugagcauuggauuuga

SEQ ID NO: 1935798 - RNA, 19 nt, Homo sapiens
  misc_RNA (1)...(19): siRNA sense strand
agagguggcagaaggacua

SEQ ID NO: 1935799 - RNA, 19 nt, Homo sapiens
  misc_RNA (1)...(19): siRNA sense strand
ggacaaauacaagauucag

SEQ ID NO: 1935800 - RNA, 19 nt, Homo sapiens
  misc_RNA (1)...(19): siRNA sense strand
ggacuacaaccaccuucca

SEQ ID NO: 1935801 - RNA, 19 nt, Homo sapiens
  misc_RNA (1)...(19): siRNA sense strand
cuacaaccaccuuccaaca

SEQ ID NO: 1935802 - RNA, 19 nt, Homo sapiens
  misc_RNA (1)...(19): siRNA sense strand
ucaugugacuccagauacu

SEQ ID NO: 1935803 - RNA, 19 nt, Homo sapiens
  misc_RNA (1)...(19): siRNA sense strand
aacaggcccucuggacaaa

SEQ ID NO: 1935804 - RNA, 19 nt, Homo sapiens
  misc_RNA (1)...(19): siRNA sense strand
gguggcagaaggacuacaa

SEQ ID NO: 1935805 - RNA, 19 nt, Homo sapiens
  misc_RNA (1)...(19): siRNA sense strand
cuggacaaauacaagauuc

SEQ ID NO: 1935806 - RNA, 19 nt, Homo sapiens
  misc_RNA (1)...(19): siRNA sense strand
guuguguggcguaaagaaa

SEQ ID NO: 1935807 - RNA, 19 nt, Homo sapiens
  misc_RNA (1)...(19): siRNA sense strand
uugaucacauggguaacua

SEQ ID NO: 1935808 - RNA, 19 nt, Homo sapiens
  misc_RNA (1)...(19): siRNA sense strand
caccugugcagaucaaaug

SEQ ID NO: 1935809 - RNA, 19 nt, Homo sapiens
  misc_RNA (1)...(19): siRNA sense strand
cugaagagcucacucauua

SEQ ID NO: 1935810 - RNA, 19 nt, Homo sapiens
  misc_RNA (1)...(19): siRNA sense strand
aaacagaaaugcaggcuaa

SEQ ID NO: 1935811 - RNA, 19 nt, Homo sapiens
  misc_RNA (1)...(19): siRNA sense strand
gaauugcucuuuaccaguu

SEQ ID NO: 1935812 - RNA, 19 nt, Homo sapiens
  misc_RNA (1)...(19): siRNA sense strand
cagaaacuauucagaagaa

SEQ ID NO: 1935813 - RNA, 19 nt, Homo sapiens
  misc_RNA (1)...(19): siRNA sense strand
uaacgucacucuuauugug

SEQ ID NO: 1935814 - RNA, 19 nt, Homo sapiens
  misc_RNA (1)...(19): siRNA sense strand
gagcagaaacuauucagaa

SEQ ID NO: 1935815 - RNA, 19 nt, Homo sapiens
  misc_RNA (1)...(19): siRNA sense strand
cagaaguacugacacauga

SEQ ID NO: 1935816 - RNA, 19 nt, Homo sapiens
  misc_RNA (1)...(19): siRNA sense strand
gaagagcucacucauuaug

SEQ ID NO: 1935817 - RNA, 19 nt, Homo sapiens
  misc_RNA (1)...(19): siRNA sense strand
gaucaggcccaucguuuaa

SEQ ID NO: 1935818 - RNA, 19 nt, Homo sapiens
  misc_RNA (1)...(19): siRNA sense strand
gaaaagaauuccuggaguu

SEQ ID NO: 1935819 - RNA, 19 nt, Homo sapiens
  misc_RNA (1)...(19): siRNA sense strand
gcuaagaguuuccacagau

SEQ ID NO: 1935820 - RNA, 19 nt, Homo sapiens
  misc_RNA (1)...(19): siRNA sense strand
gaacgaugaccuacacuau

SEQ ID NO: 1935821 - RNA, 19 nt, Homo sapiens
  misc_RNA (1)...(19): siRNA sense strand
gaaauuugccaguucuaga

SEQ ID NO: 1935822 - RNA, 19 nt, Homo sapiens
  misc_RNA (1)...(19): siRNA sense strand
ggaguucuuuggaggacua

SEQ ID NO: 1935823 - RNA, 19 nt, Homo sapiens
  misc_RNA (1)...(19): siRNA sense strand
uuugguagauucagaagua

SEQ ID NO: 1935824 - RNA, 19 nt, Homo sapiens
  misc_RNA (1)...(19): siRNA sense strand
gcauggcuguugaaagcua

SEQ ID NO: 1935825 - RNA, 19 nt, Homo sapiens
  misc_RNA (1)...(19): siRNA sense strand
gaaaacguuugaucuacua

SEQ ID NO: 1935826 - RNA, 19 nt, Homo sapiens
  misc_RNA (1)...(19): siRNA sense strand
aaacuuuccucucagcauu

SEQ ID NO: 1935827 - RNA, 19 nt, Homo sapiens
  misc_RNA (1)...(19): siRNA sense strand
gaaaugcaggcuaagaguu

SEQ ID NO: 1935828 - RNA, 19 nt, Homo sapiens
  misc_RNA (1)...(19): siRNA sense strand
ucuauaccgugaacagaua

SEQ ID NO: 1935829 - RNA, 19 nt, Homo sapiens
  misc_RNA (1)...(19): siRNA sense strand
uaaaucaggccauugaaga

SEQ ID NO: 1935830 - RNA, 19 nt, Homo sapiens
  misc_RNA (1)...(19): siRNA sense strand
aaauuuagccucugauaug

SEQ ID NO: 1935831 - RNA, 19 nt, Homo sapiens
  misc_RNA (1)...(19): siRNA sense strand
gcagaaacuauucagaaga

SEQ ID NO: 1935832 - RNA, 19 nt, Homo sapiens
  misc_RNA (1)...(19): siRNA sense strand
gaucagcugagaacgauga

SEQ ID NO: 1935833 - RNA, 19 nt, Homo sapiens
  misc_RNA (1)...(19): siRNA sense strand
ggaggacuauuucaaacag

SEQ ID NO: 1935834 - RNA, 19 nt, Homo sapiens
  misc_RNA (1)...(19): siRNA sense strand
gaccuacacuauaguccuu

SEQ ID NO: 1935835 - RNA, 19 nt, Homo sapiens
  misc_RNA (1)...(19): siRNA sense strand
ggauauuacaggaaagaaa

SEQ ID NO: 1935836 - RNA, 19 nt, Homo sapiens
  misc_RNA (1)...(19): siRNA sense strand
cuaagaguuuccacagauu

SEQ ID NO: 1935837 - RNA, 19 nt, Homo sapiens
  misc_RNA (1)...(19): siRNA sense strand
uaaagaaagucgggaagca

SEQ ID NO: 1935838 - RNA, 19 nt, Homo sapiens
  misc_RNA (1)...(19): siRNA sense strand
gcagacacuguauaaagaa

SEQ ID NO: 1935839 - RNA, 19 nt, Homo sapiens
  misc_RNA (1)...(19): siRNA sense strand
gucaagagcagaaacuauu

SEQ ID NO: 1935840 - RNA, 19 nt, Homo sapiens
  misc_RNA (1)...(19): siRNA sense strand
gaaguacugacacaugaug

SEQ ID NO: 1935841 - RNA, 19 nt, Homo sapiens
  misc_RNA (1)...(19): siRNA sense strand
gcagaaacaguuccuaaac

SEQ ID NO: 1935842 - RNA, 19 nt, Homo sapiens
  misc_RNA (1)...(19): siRNA sense strand
cagcagaaacaguuccuaa

SEQ ID NO: 1935843 - RNA, 19 nt, Homo sapiens
  misc_RNA (1)...(19): siRNA sense strand
gaaaagcagacacuguaua

SEQ ID NO: 1935844 - RNA, 19 nt, Homo sapiens
  misc_RNA (1)...(19): siRNA sense strand
caaccgaacagcagaaaca

SEQ ID NO: 1935845 - RNA, 19 nt, Homo sapiens
  misc_RNA (1)...(19): siRNA sense strand
cuaccaugauuacuucuau

SEQ ID NO: 1935846 - RNA, 19 nt, Homo sapiens
  misc_RNA (1)...(19): siRNA sense strand
gcauuccucuggagaugug

SEQ ID NO: 1935847 - RNA, 19 nt, Homo sapiens
  misc_RNA (1)...(19): siRNA sense strand
ugccaguucuagaaauaua

SEQ ID NO: 1935848 - RNA, 19 nt, Homo sapiens
  misc_RNA (1)...(19): siRNA sense strand
acgaugaccuacacuauag

SEQ ID NO: 1935849 - RNA, 19 nt, Homo sapiens
  misc_RNA (1)...(19): siRNA sense strand
aaaugcaggcuaagaguuu

SEQ ID NO: 1935850 - RNA, 19 nt, Homo sapiens
  misc_RNA (1)...(19): siRNA sense strand
cagacacuguauaaagaaa

SEQ ID NO: 1935851 - RNA, 19 nt, Homo sapiens
  misc_RNA (1)...(19): siRNA sense strand
caaacagcuugaaucagau

SEQ ID NO: 1935852 - RNA, 19 nt, Homo sapiens
  misc_RNA (1)...(19): siRNA sense strand
agacuggcauggcuguuga

SEQ ID NO: 1935853 - RNA, 19 nt, Homo sapiens
  misc_RNA (1)...(19): siRNA sense strand
aacuauaacgucacucuua

SEQ ID NO: 1935854 - RNA, 19 nt, Homo sapiens
  misc_RNA (1)...(19): siRNA sense strand
gcugaagagcucacucauu

SEQ ID NO: 1935855 - RNA, 19 nt, Homo sapiens
  misc_RNA (1)...(19): siRNA sense strand
agcagacacuguauaaaga

SEQ ID NO: 1935856 - RNA, 19 nt, Homo sapiens
  misc_RNA (1)...(19): siRNA sense strand
uggcauggcuguugaaagc

SEQ ID NO: 1935857 - RNA, 19 nt, Homo sapiens
  misc_RNA (1)...(19): siRNA sense strand
uaagaguuuccacagauuu

SEQ ID NO: 1935858 - RNA, 19 nt, Homo sapiens
  misc_RNA (1)...(19): siRNA sense strand
uauuaaaucaggccauuga

SEQ ID NO: 1935859 - RNA, 19 nt, Homo sapiens
  misc_RNA (1)...(19): siRNA sense strand
gugaucagcugagaacgau

SEQ ID NO: 1935860 - RNA, 19 nt, Homo sapiens
  misc_RNA (1)...(19): siRNA sense strand
ccauagugaugcuugaaca

SEQ ID NO: 1935861 - RNA, 19 nt, Homo sapiens
  misc_RNA (1)...(19): siRNA sense strand
ccucugauauggugucaag

SEQ ID NO: 1935862 - RNA, 19 nt, Homo sapiens
  misc_RNA (1)...(19): siRNA sense strand
ccgaacagcagaaacaguu

SEQ ID NO: 1935863 - RNA, 19 nt, Homo sapiens
  misc_RNA (1)...(19): siRNA sense strand
gcuccgagacuccauagug

SEQ ID NO: 1935864 - RNA, 19 nt, Homo sapiens
  misc_RNA (1)...(19): siRNA sense strand
gacacuguauaaagaaagu

SEQ ID NO: 1935865 - RNA, 19 nt, Homo sapiens
  misc_RNA (1)...(19): siRNA sense strand
cagcauuccucuggagaug

SEQ ID NO: 1935866 - RNA, 19 nt, Homo sapiens
  misc_RNA (1)...(19): siRNA sense strand
uuccuaaacuuuccucuca

SEQ ID NO: 1935867 - RNA, 19 nt, Homo sapiens
  misc_RNA (1)...(19): siRNA sense strand
uguauuaaaucaggccauu

SEQ ID NO: 1935868 - RNA, 19 nt, Homo sapiens
  misc_RNA (1)...(19): siRNA sense strand
guucuuuggaggacuauuu

SEQ ID NO: 1935869 - RNA, 19 nt, Homo sapiens
  misc_RNA (1)...(19): siRNA sense strand
gaagcacgauuuuauuugg

SEQ ID NO: 1935870 - RNA, 19 nt, Homo sapiens
  misc_RNA (1)...(19): siRNA sense strand
guccuuaauaguccacuua

SEQ ID NO: 1935871 - RNA, 19 nt, Homo sapiens
  misc_RNA (1)...(19): siRNA sense strand
cugaagcugucaaagauag

SEQ ID NO: 1935872 - RNA, 19 nt, Homo sapiens
  misc_RNA (1)...(19): siRNA sense strand
guucacgcuuuaugcagaa

SEQ ID NO: 1935873 - RNA, 19 nt, Homo sapiens
  misc_RNA (1)...(19): siRNA sense strand
ggccuugucaaaucuuuaa

SEQ ID NO: 1935874 - RNA, 19 nt, Homo sapiens
  misc_RNA (1)...(19): siRNA sense strand
aagcagacacuguauaaag

SEQ ID NO: 1935875 - RNA, 19 nt, Homo sapiens
  misc_RNA (1)...(19): siRNA sense strand
gcucacucauuaugcuuca

SEQ ID NO: 1935876 - RNA, 19 nt, Homo sapiens
  misc_RNA (1)...(19): siRNA sense strand
uuugccaguucuagaaaua

SEQ ID NO: 1935877 - RNA, 19 nt, Homo sapiens
  misc_RNA (1)...(19): siRNA sense strand
ugagaacgaugaccuacac

SEQ ID NO: 1935878 - RNA, 19 nt, Homo sapiens
  misc_RNA (1)...(19): siRNA sense strand
ggcuaagaguuuccacaga

SEQ ID NO: 1935879 - RNA, 19 nt, Homo sapiens
  misc_RNA (1)...(19): siRNA sense strand
gaagcugucaaagauagaa

SEQ ID NO: 1935880 - RNA, 19 nt, Homo sapiens
  misc_RNA (1)...(19): siRNA sense strand
cuccgagacuccauaguga

SEQ ID NO: 1935881 - RNA, 19 nt, Homo sapiens
  misc_RNA (1)...(19): siRNA sense strand
uuuaccaguucacgcuuua

SEQ ID NO: 1935882 - RNA, 19 nt, Homo sapiens
  misc_RNA (1)...(19): siRNA sense strand
agaucaggcccaucguuua

SEQ ID NO: 1935883 - RNA, 19 nt, Homo sapiens
  misc_RNA (1)...(19): siRNA sense strand
ugaagacccuggaaaacuu

SEQ ID NO: 1935884 - RNA, 19 nt, Homo sapiens
  misc_RNA (1)...(19): siRNA sense strand
aaauuugccaguucuagaa

SEQ ID NO: 1935885 - RNA, 19 nt, Homo sapiens
  misc_RNA (1)...(19): siRNA sense strand
ccuacacuauaguccuuaa

SEQ ID NO: 1935886 - RNA, 19 nt, Homo sapiens
  misc_RNA (1)...(19): siRNA sense strand
aacgaugaccuacacuaua

SEQ ID NO: 1935887 - RNA, 19 nt, Homo sapiens
  misc_RNA (1)...(19): siRNA sense strand
gggaagcacgauuuuauuu

SEQ ID NO: 1935888 - RNA, 19 nt, Homo sapiens
  misc_RNA (1)...(19): siRNA sense strand
aagaucaggcccaucguuu

SEQ ID NO: 1935889 - RNA, 19 nt, Homo sapiens
  misc_RNA (1)...(19): siRNA sense strand
caagagcagaaacuauuca

SEQ ID NO: 1935890 - RNA, 19 nt, Homo sapiens
  misc_RNA (1)...(19): siRNA sense strand
aaugugacacuguuucuga

SEQ ID NO: 1935891 - RNA, 19 nt, Homo sapiens
  misc_RNA (1)...(19): siRNA sense strand
gaagacccuggaaaacuua

SEQ ID NO: 1935892 - RNA, 19 nt, Homo sapiens
  misc_RNA (1)...(19): siRNA sense strand
aaaagcagacacuguauaa

SEQ ID NO: 1935893 - RNA, 19 nt, Homo sapiens
  misc_RNA (1)...(19): siRNA sense strand
aaacuuacuggccuacgaa

SEQ ID NO: 1935894 - RNA, 19 nt, Homo sapiens
  misc_RNA (1)...(19): siRNA sense strand
ucaggcccaucguuuaaag

SEQ ID NO: 1935895 - RNA, 19 nt, Homo sapiens
  misc_RNA (1)...(19): siRNA sense strand
gcacugcugccacugaaaa

SEQ ID NO: 1935896 - RNA, 19 nt, Homo sapiens
  misc_RNA (1)...(19): siRNA sense strand
ggaaaacuauaacgucacu

SEQ ID NO: 1935897 - RNA, 19 nt, Homo sapiens
  misc_RNA (1)...(19): siRNA sense strand
gaggugaucagcugagaac

SEQ ID NO: 1935898 - RNA, 19 nt, Homo sapiens
  misc_RNA (1)...(19): siRNA sense strand
ggaagcacgauuuuauuug

SEQ ID NO: 1935899 - RNA, 19 nt, Homo sapiens
  misc_RNA (1)...(19): siRNA sense strand
ucagaaaacguuugaucua

SEQ ID NO: 1935900 - RNA, 19 nt, Homo sapiens
  misc_RNA (1)...(19): siRNA sense strand
cuuuaaauuuagccucuga

SEQ ID NO: 1935901 - RNA, 19 nt, Homo sapiens
  misc_RNA (1)...(19): siRNA sense strand
ucacucuuauugugguaau

SEQ ID NO: 1935902 - RNA, 19 nt, Homo sapiens
  misc_RNA (1)...(19): siRNA sense strand
ggugaucagcugagaacga

SEQ ID NO: 1935903 - RNA, 19 nt, Homo sapiens
  misc_RNA (1)...(19): siRNA sense strand
cuuaauaguccacuuacug

SEQ ID NO: 1935904 - RNA, 19 nt, Homo sapiens
  misc_RNA (1)...(19): siRNA sense strand
ugcagaaauuugccaguuc

SEQ ID NO: 1935905 - RNA, 19 nt, Homo sapiens
  misc_RNA (1)...(19): siRNA sense strand
ucaagagcagaaacuauuc

SEQ ID NO: 1935906 - RNA, 19 nt, Homo sapiens
  misc_RNA (1)...(19): siRNA sense strand
cacgcuuuaugcagaaauu

SEQ ID NO: 1935907 - RNA, 19 nt, Homo sapiens
  misc_RNA (1)...(19): siRNA sense strand
aaagaucaggcccaucguu

SEQ ID NO: 1935908 - RNA, 19 nt, Homo sapiens
  misc_RNA (1)...(19): siRNA sense strand
ucagaagaauaaagaucag

SEQ ID NO: 1935909 - RNA, 19 nt, Homo sapiens
  misc_RNA (1)...(19): siRNA sense strand
gggaacagcucaucucuuu

SEQ ID NO: 1935910 - RNA, 19 nt, Homo sapiens
  misc_RNA (1)...(19): siRNA sense strand
ccucagaacuugacuguga

SEQ ID NO: 1935911 - RNA, 19 nt, Homo sapiens
  misc_RNA (1)...(19): siRNA sense strand
ggaggagucugacccugua

SEQ ID NO: 1935912 - RNA, 19 nt, Homo sapiens
  misc_RNA (1)...(19): siRNA sense strand
gaacagcucaucucuuuca

SEQ ID NO: 1935913 - RNA, 19 nt, Homo sapiens
  misc_RNA (1)...(19): siRNA sense strand
ggaaagagagauccaguau

SEQ ID NO: 1935914 - RNA, 19 nt, Homo sapiens
  misc_RNA (1)...(19): siRNA sense strand
gggagauacuucuuucgua

SEQ ID NO: 1935915 - RNA, 19 nt, Homo sapiens
  misc_RNA (1)...(19): siRNA sense strand
ggaaugauauaagcuggaa

SEQ ID NO: 1935916 - RNA, 19 nt, Homo sapiens
  misc_RNA (1)...(19): siRNA sense strand
aaagagagauccaguaugc

SEQ ID NO: 1935917 - RNA, 19 nt, Homo sapiens
  misc_RNA (1)...(19): siRNA sense strand
agaguaaccggaaggauua

SEQ ID NO: 1935918 - RNA, 19 nt, Homo sapiens
  misc_RNA (1)...(19): siRNA sense strand
gaaagagagauccaguaug

SEQ ID NO: 1935919 - RNA, 19 nt, Homo sapiens
  misc_RNA (1)...(19): siRNA sense strand
caagaagccaccaacaaug

SEQ ID NO: 1935920 - RNA, 19 nt, Homo sapiens
  misc_RNA (1)...(19): siRNA sense strand
uggaaggacagaagaguaa

SEQ ID NO: 1935921 - RNA, 19 nt, Homo sapiens
  misc_RNA (1)...(19): siRNA sense strand
aagaagccaccaacaauga

SEQ ID NO: 1935922 - RNA, 19 nt, Homo sapiens
  misc_RNA (1)...(19): siRNA sense strand
aagaguaaccggaaggauu

SEQ ID NO: 1935923 - RNA, 19 nt, Homo sapiens
  misc_RNA (1)...(19): siRNA sense strand
gacugugacugucuuccaa

SEQ ID NO: 1935924 - RNA, 19 nt, Homo sapiens
  misc_RNA (1)...(19): siRNA sense strand
ugugucaucuucauuguag

SEQ ID NO: 1935925 - RNA, 19 nt, Homo sapiens
  misc_RNA (1)...(19): siRNA sense strand
caugugcgcugcuccuucu

SEQ ID NO: 1935926 - RNA, 19 nt, Homo sapiens
  misc_RNA (1)...(19): siRNA sense strand
guggaaggacagaagagua

SEQ ID NO: 1935927 - RNA, 19 nt, Homo sapiens
  misc_RNA (1)...(19): siRNA sense strand
ccacagcccuggucuuccu

SEQ ID NO: 1935928 - RNA, 19 nt, Homo sapiens
  misc_RNA (1)...(19): siRNA sense strand
gagaugccagaaugaguga

SEQ ID NO: 1935929 - RNA, 19 nt, Homo sapiens
  misc_RNA (1)...(19): siRNA sense strand
gggcagggaaugauauaag

SEQ ID NO: 1935930 - RNA, 19 nt, Homo sapiens
  misc_RNA (1)...(19): siRNA sense strand
ggaccgauuccaccuccuu

SEQ ID NO: 1935931 - RNA, 19 nt, Homo sapiens
  misc_RNA (1)...(19): siRNA sense strand
gcccucaaacccucuggua

SEQ ID NO: 1935932 - RNA, 19 nt, Homo sapiens
  misc_RNA (1)...(19): siRNA sense strand
guauggagaaaggaaauau

SEQ ID NO: 1935933 - RNA, 19 nt, Homo sapiens
  misc_RNA (1)...(19): siRNA sense strand
ggcagggaaugauauaagc

SEQ ID NO: 1935934 - RNA, 19 nt, Homo sapiens
  misc_RNA (1)...(19): siRNA sense strand
aauaugaccagcucucugu

SEQ ID NO: 1935935 - RNA, 19 nt, Homo sapiens
  misc_RNA (1)...(19): siRNA sense strand
ggacagccagacugacucu

SEQ ID NO: 1935936 - RNA, 19 nt, Homo sapiens
  misc_RNA (1)...(19): siRNA sense strand
gaagccaccaacaaugagu

SEQ ID NO: 1935937 - RNA, 19 nt, Homo sapiens
  misc_RNA (1)...(19): siRNA sense strand
gaaccucucccugcaacag

SEQ ID NO: 1935938 - RNA, 19 nt, Homo sapiens
  misc_RNA (1)...(19): siRNA sense strand
gaagaguaaccggaaggau

SEQ ID NO: 1935939 - RNA, 19 nt, Homo sapiens
  misc_RNA (1)...(19): siRNA sense strand
gaugccagaaugagugaug

SEQ ID NO: 1935940 - RNA, 19 nt, Homo sapiens
  misc_RNA (1)...(19): siRNA sense strand
caaaaugaggccuguauca

SEQ ID NO: 1935941 - RNA, 19 nt, Homo sapiens
  misc_RNA (1)...(19): siRNA sense strand
ggaguacacaggcaaaaug

SEQ ID NO: 1935942 - RNA, 19 nt, Homo sapiens
  misc_RNA (1)...(19): siRNA sense strand
ggagaaggcacagcaucca

SEQ ID NO: 1935943 - RNA, 19 nt, Homo sapiens
  misc_RNA (1)...(19): siRNA sense strand
gcgcuuggucugugcuguu

SEQ ID NO: 1935944 - RNA, 19 nt, Homo sapiens
  misc_RNA (1)...(19): siRNA sense strand
agacauaggcaugaaggau

SEQ ID NO: 1935945 - RNA, 19 nt, Homo sapiens
  misc_RNA (1)...(19): siRNA sense strand
gggaacagcucaucucuuu

SEQ ID NO: 1935946 - RNA, 19 nt, Homo sapiens
  misc_RNA (1)...(19): siRNA sense strand
ccucagaacuugacuguga

SEQ ID NO: 1935947 - RNA, 19 nt, Homo sapiens
  misc_RNA (1)...(19): siRNA sense strand
ggaggagucugacccugua

SEQ ID NO: 1935948 - RNA, 19 nt, Homo sapiens
  misc_RNA (1)...(19): siRNA sense strand
gaacagcucaucucuuuca

SEQ ID NO: 1935949 - RNA, 19 nt, Homo sapiens
  misc_RNA (1)...(19): siRNA sense strand
gggagauacuucuuucgua

SEQ ID NO: 1935950 - RNA, 19 nt, Homo sapiens
  misc_RNA (1)...(19): siRNA sense strand
ggaaugauauaagcuggaa

SEQ ID NO: 1935951 - RNA, 19 nt, Homo sapiens
  misc_RNA (1)...(19): siRNA sense strand
agaguaaccggaaggauua

SEQ ID NO: 1935952 - RNA, 19 nt, Homo sapiens
  misc_RNA (1)...(19): siRNA sense strand
uggaaggacagaagaguaa

SEQ ID NO: 1935953 - RNA, 19 nt, Homo sapiens
  misc_RNA (1)...(19): siRNA sense strand
aagaguaaccggaaggauu

SEQ ID NO: 1935954 - RNA, 19 nt, Homo sapiens
  misc_RNA (1)...(19): siRNA sense strand
gacugugacugucuuccaa

SEQ ID NO: 1935955 - RNA, 19 nt, Homo sapiens
  misc_RNA (1)...(19): siRNA sense strand
ugugucaucuucauuguag

SEQ ID NO: 1935956 - RNA, 19 nt, Homo sapiens
  misc_RNA (1)...(19): siRNA sense strand
caugugcgcugcuccuucu

SEQ ID NO: 1935957 - RNA, 19 nt, Homo sapiens
  misc_RNA (1)...(19): siRNA sense strand
ccacagcccuggucuuccu

SEQ ID NO: 1935958 - RNA, 19 nt, Homo sapiens
  misc_RNA (1)...(19): siRNA sense strand
guggaaggacagaagagua

SEQ ID NO: 1935959 - RNA, 19 nt, Homo sapiens
  misc_RNA (1)...(19): siRNA sense strand
gagaugccagaaugaguga

SEQ ID NO: 1935960 - RNA, 19 nt, Homo sapiens
  misc_RNA (1)...(19): siRNA sense strand
gggcagggaaugauauaag

SEQ ID NO: 1935961 - RNA, 19 nt, Homo sapiens
  misc_RNA (1)...(19): siRNA sense strand
ggaccgauuccaccuccuu

SEQ ID NO: 1935962 - RNA, 19 nt, Homo sapiens
  misc_RNA (1)...(19): siRNA sense strand
gcccucaaacccucuggua

SEQ ID NO: 1935963 - RNA, 19 nt, Homo sapiens
  misc_RNA (1)...(19): siRNA sense strand
guauggagaaaggaaauau

SEQ ID NO: 1935964 - RNA, 19 nt, Homo sapiens
  misc_RNA (1)...(19): siRNA sense strand
ggcagggaaugauauaagc

SEQ ID NO: 1935965 - RNA, 19 nt, Homo sapiens
  misc_RNA (1)...(19): siRNA sense strand
aauaugaccagcucucugu

SEQ ID NO: 1935966 - RNA, 19 nt, Homo sapiens
  misc_RNA (1)...(19): siRNA sense strand
ggacagccagacugacucu

SEQ ID NO: 1935967 - RNA, 19 nt, Homo sapiens
  misc_RNA (1)...(19): siRNA sense strand
gaaccucucccugcaacag

SEQ ID NO: 1935968 - RNA, 19 nt, Homo sapiens
  misc_RNA (1)...(19): siRNA sense strand
gaagaguaaccggaaggau

SEQ ID NO: 1935969 - RNA, 19 nt, Homo sapiens
  misc_RNA (1)...(19): siRNA sense strand
gaugccagaaugagugaug

SEQ ID NO: 1935970 - RNA, 19 nt, Homo sapiens
  misc_RNA (1)...(19): siRNA sense strand
caaaaugaggccuguauca

SEQ ID NO: 1935971 - RNA, 19 nt, Homo sapiens
  misc_RNA (1)...(19): siRNA sense strand
ggaguacacaggcaaaaug

SEQ ID NO: 1935972 - RNA, 19 nt, Homo sapiens
  misc_RNA (1)...(19): siRNA sense strand
ggagaaggcacagcaucca

SEQ ID NO: 1935973 - RNA, 19 nt, Homo sapiens
  misc_RNA (1)...(19): siRNA sense strand
gcgcuuggucugugcuguu

SEQ ID NO: 1935974 - RNA, 19 nt, Homo sapiens
  misc_RNA (1)...(19): siRNA sense strand
agacauaggcaugaaggau

SEQ ID NO: 1935975 - RNA, 19 nt, Homo sapiens
  misc_RNA (1)...(19): siRNA sense strand
gcaacgggcuccucaccaa

SEQ ID NO: 1935976 - RNA, 19 nt, Homo sapiens
  misc_RNA (1)...(19): siRNA sense strand
gaccagcuccugcagauug

SEQ ID NO: 1935977 - RNA, 19 nt, Homo sapiens
  misc_RNA (1)...(19): siRNA sense strand
gauugucucucuggucaaa

SEQ ID NO: 1935978 - RNA, 19 nt, Homo sapiens
  misc_RNA (1)...(19): siRNA sense strand
ggguggagcucgcacaaag

SEQ ID NO: 1935979 - RNA, 19 nt, Homo sapiens
  misc_RNA (1)...(19): siRNA sense strand
gggaccagcuccugcagau

SEQ ID NO: 1935980 - RNA, 19 nt, Homo sapiens
  misc_RNA (1)...(19): siRNA sense strand
cccaucagguggugaagaa

SEQ ID NO: 1935981 - RNA, 19 nt, Homo sapiens
  misc_RNA (1)...(19): siRNA sense strand
gaaggcaucaggcgauaag

SEQ ID NO: 1935982 - RNA, 19 nt, Homo sapiens
  misc_RNA (1)...(19): siRNA sense strand
ggcaucaggcgauaagauu

SEQ ID NO: 1935983 - RNA, 19 nt, Homo sapiens
  misc_RNA (1)...(19): siRNA sense strand
aagaaggcaucaggcgaua

SEQ ID NO: 1935984 - RNA, 19 nt, Homo sapiens
  misc_RNA (1)...(19): siRNA sense strand
gcaucaggcgauaagauug

SEQ ID NO: 1935985 - RNA, 19 nt, Homo sapiens
  misc_RNA (1)...(19): siRNA sense strand
guggacgggcagaauguua

SEQ ID NO: 1935986 - RNA, 19 nt, Homo sapiens
  misc_RNA (1)...(19): siRNA sense strand
gcggcgagcugagaucaag

SEQ ID NO: 1935987 - RNA, 19 nt, Homo sapiens
  misc_RNA (1)...(19): siRNA sense strand
ggacugucaccaugcacaa

SEQ ID NO: 1935988 - RNA, 19 nt, Homo sapiens
  misc_RNA (1)...(19): siRNA sense strand
gagguggacgggcagaaug

SEQ ID NO: 1935989 - RNA, 19 nt, Homo sapiens
  misc_RNA (1)...(19): siRNA sense strand
ggaccacuccaucccagau

SEQ ID NO: 1935990 - RNA, 19 nt, Homo sapiens
  misc_RNA (1)...(19): siRNA sense strand
caucaggcgauaagauugu

SEQ ID NO: 1935991 - RNA, 19 nt, Homo sapiens
  misc_RNA (1)...(19): siRNA sense strand
uuaucgggcugaaggacaa

SEQ ID NO: 1935992 - RNA, 19 nt, Homo sapiens
  misc_RNA (1)...(19): siRNA sense strand
ggacgggcagaauguuauc

SEQ ID NO: 1935993 - RNA, 19 nt, Homo sapiens
  misc_RNA (1)...(19): siRNA sense strand
gcaacgggcuccucaccaa

SEQ ID NO: 1935994 - RNA, 19 nt, Homo sapiens
  misc_RNA (1)...(19): siRNA sense strand
gaccagcuccugcagauug

SEQ ID NO: 1935995 - RNA, 19 nt, Homo sapiens
  misc_RNA (1)...(19): siRNA sense strand
gauugucucucuggucaaa

SEQ ID NO: 1935996 - RNA, 19 nt, Homo sapiens
  misc_RNA (1)...(19): siRNA sense strand
ggguggagcucgcacaaag

SEQ ID NO: 1935997 - RNA, 19 nt, Homo sapiens
  misc_RNA (1)...(19): siRNA sense strand
gggaccagcuccugcagau

SEQ ID NO: 1935998 - RNA, 19 nt, Homo sapiens
  misc_RNA (1)...(19): siRNA sense strand
cccaucagguggugaagaa

SEQ ID NO: 1935999 - RNA, 19 nt, Homo sapiens
  misc_RNA (1)...(19): siRNA sense strand
gaaggcaucaggcgauaag

SEQ ID NO: 1936000 - RNA, 19 nt, Homo sapiens
  misc_RNA (1)...(19): siRNA sense strand
ggcaucaggcgauaagauu

SEQ ID NO: 1936001 - RNA, 19 nt, Homo sapiens
  misc_RNA (1)...(19): siRNA sense strand
aagaaggcaucaggcgaua

SEQ ID NO: 1936002 - RNA, 19 nt, Homo sapiens
  misc_RNA (1)...(19): siRNA sense strand
gcaucaggcgauaagauug

SEQ ID NO: 1936003 - RNA, 19 nt, Homo sapiens
  misc_RNA (1)...(19): siRNA sense strand
guggacgggcagaauguua

SEQ ID NO: 1936004 - RNA, 19 nt, Homo sapiens
  misc_RNA (1)...(19): siRNA sense strand
gcggcgagcugagaucaag

SEQ ID NO: 1936005 - RNA, 19 nt, Homo sapiens
  misc_RNA (1)...(19): siRNA sense strand
ggacugucaccaugcacaa

SEQ ID NO: 1936006 - RNA, 19 nt, Homo sapiens
  misc_RNA (1)...(19): siRNA sense strand
gagguggacgggcagaaug

SEQ ID NO: 1936007 - RNA, 19 nt, Homo sapiens
  misc_RNA (1)...(19): siRNA sense strand
ggaccacuccaucccagau

SEQ ID NO: 1936008 - RNA, 19 nt, Homo sapiens
  misc_RNA (1)...(19): siRNA sense strand
caucaggcgauaagauugu

SEQ ID NO: 1936009 - RNA, 19 nt, Homo sapiens
  misc_RNA (1)...(19): siRNA sense strand
uuaucgggcugaaggacaa

SEQ ID NO: 1936010 - RNA, 19 nt, Homo sapiens
  misc_RNA (1)...(19): siRNA sense strand
ggacgggcagaauguuauc

SEQ ID NO: 1936011 - RNA, 19 nt, Homo sapiens
  misc_RNA (1)...(19): siRNA sense strand
gaagaagaaucuccaauua

SEQ ID NO: 1936012 - RNA, 19 nt, Homo sapiens
  misc_RNA (1)...(19): siRNA sense strand
gaaauaaacugaacacuag

SEQ ID NO: 1936013 - RNA, 19 nt, Homo sapiens
  misc_RNA (1)...(19): siRNA sense strand
gaacaaauccggagagaga

SEQ ID NO: 1936014 - RNA, 19 nt, Homo sapiens
  misc_RNA (1)...(19): siRNA sense strand
caagaagacugggcauuua

SEQ ID NO: 1936015 - RNA, 19 nt, Homo sapiens
  misc_RNA (1)...(19): siRNA sense strand
cagcagauauugaagauuu

SEQ ID NO: 1936016 - RNA, 19 nt, Homo sapiens
  misc_RNA (1)...(19): siRNA sense strand
uaagugggcuugugaauau

SEQ ID NO: 1936017 - RNA, 19 nt, Homo sapiens
  misc_RNA (1)...(19): siRNA sense strand
gaaguacgcuugcugaauc

SEQ ID NO: 1936018 - RNA, 19 nt, Homo sapiens
  misc_RNA (1)...(19): siRNA sense strand
gggagaaacuuuaggauau

SEQ ID NO: 1936019 - RNA, 19 nt, Homo sapiens
  misc_RNA (1)...(19): siRNA sense strand
ggagaaacuuuaggauaua

SEQ ID NO: 1936020 - RNA, 19 nt, Homo sapiens
  misc_RNA (1)...(19): siRNA sense strand
ggaauuggcuacacguuug

SEQ ID NO: 1936021 - RNA, 19 nt, Homo sapiens
  misc_RNA (1)...(19): siRNA sense strand
gcaaucaaguguacuaugu

SEQ ID NO: 1936022 - RNA, 19 nt, Homo sapiens
  misc_RNA (1)...(19): siRNA sense strand
ugacugaccugguaacauu

SEQ ID NO: 1936023 - RNA, 19 nt, Homo sapiens
  misc_RNA (1)...(19): siRNA sense strand
gaucaucccagaccuaaua

SEQ ID NO: 1936024 - RNA, 19 nt, Homo sapiens
  misc_RNA (1)...(19): siRNA sense strand
ugauuuagcugccauagaa

SEQ ID NO: 1936025 - RNA, 19 nt, Homo sapiens
  misc_RNA (1)...(19): siRNA sense strand
gauguuggcuauacucuug

SEQ ID NO: 1936026 - RNA, 19 nt, Homo sapiens
  misc_RNA (1)...(19): siRNA sense strand
gcacuggacuugcucuguu

SEQ ID NO: 1936027 - RNA, 19 nt, Homo sapiens
  misc_RNA (1)...(19): siRNA sense strand
gaagaacaauggcaagaag

SEQ ID NO: 1936028 - RNA, 19 nt, Homo sapiens
  misc_RNA (1)...(19): siRNA sense strand
ggaaguaguccuuugauau

SEQ ID NO: 1936029 - RNA, 19 nt, Homo sapiens
  misc_RNA (1)...(19): siRNA sense strand
gcaagaagacugggcauuu

SEQ ID NO: 1936030 - RNA, 19 nt, Homo sapiens
  misc_RNA (1)...(19): siRNA sense strand
gaaguaguccuuugauaug

SEQ ID NO: 1936031 - RNA, 19 nt, Homo sapiens
  misc_RNA (1)...(19): siRNA sense strand
aaagauguguuguuuguga

SEQ ID NO: 1936032 - RNA, 19 nt, Homo sapiens
  misc_RNA (1)...(19): siRNA sense strand
gaccaagggugaaaucuuc

SEQ ID NO: 1936033 - RNA, 19 nt, Homo sapiens
  misc_RNA (1)...(19): siRNA sense strand
ccaaagaccuaguggaaca

SEQ ID NO: 1936034 - RNA, 19 nt, Homo sapiens
  misc_RNA (1)...(19): siRNA sense strand
ccacuucucugcuuugguu

SEQ ID NO: 1936035 - RNA, 19 nt, Homo sapiens
  misc_RNA (1)...(19): siRNA sense strand
gacgaccaauuauaguuua

SEQ ID NO: 1936036 - RNA, 19 nt, Homo sapiens
  misc_RNA (1)...(19): siRNA sense strand
gcuauacucuuguacacuu

SEQ ID NO: 1936037 - RNA, 19 nt, Homo sapiens
  misc_RNA (1)...(19): siRNA sense strand
ggagcuagguaaugaggaa

SEQ ID NO: 1936038 - RNA, 19 nt, Homo sapiens
  misc_RNA (1)...(19): siRNA sense strand
aaaggaagcuacuccaugu

SEQ ID NO: 1936039 - RNA, 19 nt, Homo sapiens
  misc_RNA (1)...(19): siRNA sense strand
ggaaguugcaguaguggua

SEQ ID NO: 1936040 - RNA, 19 nt, Homo sapiens
  misc_RNA (1)...(19): siRNA sense strand
guacuggcacauauucuua

SEQ ID NO: 1936041 - RNA, 19 nt, Homo sapiens
  misc_RNA (1)...(19): siRNA sense strand
gcgggacucugaagugaaa

SEQ ID NO: 1936042 - RNA, 19 nt, Homo sapiens
  misc_RNA (1)...(19): siRNA sense strand
ggaauuaagugggcuugug

SEQ ID NO: 1936043 - RNA, 19 nt, Homo sapiens
  misc_RNA (1)...(19): siRNA sense strand
caaaguguauuccagcaau

SEQ ID NO: 1936044 - RNA, 19 nt, Homo sapiens
  misc_RNA (1)...(19): siRNA sense strand
uuacagaggugucucaaca

SEQ ID NO: 1936045 - RNA, 19 nt, Homo sapiens
  misc_RNA (1)...(19): siRNA sense strand
ccuaguggaacaauuauua

SEQ ID NO: 1936046 - RNA, 19 nt, Homo sapiens
  misc_RNA (1)...(19): siRNA sense strand
gcuaaaagauguguuguuu

SEQ ID NO: 1936047 - RNA, 19 nt, Homo sapiens
  misc_RNA (1)...(19): siRNA sense strand
ggacacagcacuggacuug

SEQ ID NO: 1936048 - RNA, 19 nt, Homo sapiens
  misc_RNA (1)...(19): siRNA sense strand
gaagauccauuuaaaagug

SEQ ID NO: 1936049 - RNA, 19 nt, Homo sapiens
  misc_RNA (1)...(19): siRNA sense strand
gcucaccgcagaugaagua

SEQ ID NO: 1936050 - RNA, 19 nt, Homo sapiens
  misc_RNA (1)...(19): siRNA sense strand
gcauuuauacucucucuug

SEQ ID NO: 1936051 - RNA, 19 nt, Homo sapiens
  misc_RNA (1)...(19): siRNA sense strand
gaaucguccuucugccuuu

SEQ ID NO: 1936052 - RNA, 19 nt, Homo sapiens
  misc_RNA (1)...(19): siRNA sense strand
caagugauguugguagaga

SEQ ID NO: 1936053 - RNA, 19 nt, Homo sapiens
  misc_RNA (1)...(19): siRNA sense strand
ggagacugccuacuugauu

SEQ ID NO: 1936054 - RNA, 19 nt, Homo sapiens
  misc_RNA (1)...(19): siRNA sense strand
agaggcuucuucaauaaua

SEQ ID NO: 1936055 - RNA, 19 nt, Homo sapiens
  misc_RNA (1)...(19): siRNA sense strand
gguaauagccaaaggagau

SEQ ID NO: 1936056 - RNA, 19 nt, Homo sapiens
  misc_RNA (1)...(19): siRNA sense strand
cugcaugacuguucacauu

SEQ ID NO: 1936057 - RNA, 19 nt, Homo sapiens
  misc_RNA (1)...(19): siRNA sense strand
gaauuaagugggcuuguga

SEQ ID NO: 1936058 - RNA, 19 nt, Homo sapiens
  misc_RNA (1)...(19): siRNA sense strand
gguuguagaaggugauuua

SEQ ID NO: 1936059 - RNA, 19 nt, Homo sapiens
  misc_RNA (1)...(19): siRNA sense strand
cauagaagcauacaaguca

SEQ ID NO: 1936060 - RNA, 19 nt, Homo sapiens
  misc_RNA (1)...(19): siRNA sense strand
auucuuagacgaccaauua

SEQ ID NO: 1936061 - RNA, 19 nt, Homo sapiens
  misc_RNA (1)...(19): siRNA sense strand
guggaacaauuauuacaga

SEQ ID NO: 1936062 - RNA, 19 nt, Homo sapiens
  misc_RNA (1)...(19): siRNA sense strand
gagacugccuacuugauuc

SEQ ID NO: 1936063 - RNA, 19 nt, Homo sapiens
  misc_RNA (1)...(19): siRNA sense strand
caacaagcagcaaagugua

SEQ ID NO: 1936064 - RNA, 19 nt, Homo sapiens
  misc_RNA (1)...(19): siRNA sense strand
ucccagaccuaauaacauu

SEQ ID NO: 1936065 - RNA, 19 nt, Homo sapiens
  misc_RNA (1)...(19): siRNA sense strand
agaccuaguggaacaauua

SEQ ID NO: 1936066 - RNA, 19 nt, Homo sapiens
  misc_RNA (1)...(19): siRNA sense strand
gaggcuucuucaauaauaa

SEQ ID NO: 1936067 - RNA, 19 nt, Homo sapiens
  misc_RNA (1)...(19): siRNA sense strand
gagaggaagaugaggauga

SEQ ID NO: 1936068 - RNA, 19 nt, Homo sapiens
  misc_RNA (1)...(19): siRNA sense strand
uaacugguccuuggaauug

SEQ ID NO: 1936069 - RNA, 19 nt, Homo sapiens
  misc_RNA (1)...(19): siRNA sense strand
gcaaugguguguccugaac

SEQ ID NO: 1936070 - RNA, 19 nt, Homo sapiens
  misc_RNA (1)...(19): siRNA sense strand
gcucaagaccaguugcuuu

SEQ ID NO: 1936071 - RNA, 19 nt, Homo sapiens
  misc_RNA (1)...(19): siRNA sense strand
guguuuaucugccuuuguu

SEQ ID NO: 1936072 - RNA, 19 nt, Homo sapiens
  misc_RNA (1)...(19): siRNA sense strand
cuacgaagcgggacucuga

SEQ ID NO: 1936073 - RNA, 19 nt, Homo sapiens
  misc_RNA (1)...(19): siRNA sense strand
gcccaaagaccuaguggaa

SEQ ID NO: 1936074 - RNA, 19 nt, Homo sapiens
  misc_RNA (1)...(19): siRNA sense strand
gagcuuugguuuacauuuu

SEQ ID NO: 1936075 - RNA, 19 nt, Homo sapiens
  misc_RNA (1)...(19): siRNA sense strand
agaagaagaaucuccaauu

SEQ ID NO: 1936076 - RNA, 19 nt, Homo sapiens
  misc_RNA (1)...(19): siRNA sense strand
gaucaccuccugcuacgaa

SEQ ID NO: 1936077 - RNA, 19 nt, Homo sapiens
  misc_RNA (1)...(19): siRNA sense strand
uacacacgcuggaaagauu

SEQ ID NO: 1936078 - RNA, 19 nt, Homo sapiens
  misc_RNA (1)...(19): siRNA sense strand
ugugaggaauacaaugaua

SEQ ID NO: 1936079 - RNA, 19 nt, Homo sapiens
  misc_RNA (1)...(19): siRNA sense strand
gugaauauuguacguauga

SEQ ID NO: 1936080 - RNA, 19 nt, Homo sapiens
  misc_RNA (1)...(19): siRNA sense strand
ucucagagcuuugguuuac

SEQ ID NO: 1936081 - RNA, 19 nt, Homo sapiens
  misc_RNA (1)...(19): siRNA sense strand
gaagcgggacucugaagug

SEQ ID NO: 1936082 - RNA, 19 nt, Homo sapiens
  misc_RNA (1)...(19): siRNA sense strand
guaaugaggaacagcaaga

SEQ ID NO: 1936083 - RNA, 19 nt, Homo sapiens
  misc_RNA (1)...(19): siRNA sense strand
ggauuuugcuugcuauauu

SEQ ID NO: 1936084 - RNA, 19 nt, Homo sapiens
  misc_RNA (1)...(19): siRNA sense strand
guccugaacugacagaaca

SEQ ID NO: 1936085 - RNA, 19 nt, Homo sapiens
  misc_RNA (1)...(19): siRNA sense strand
uuuauacucucucuugcua

SEQ ID NO: 1936086 - RNA, 19 nt, Homo sapiens
  misc_RNA (1)...(19): siRNA sense strand
ugaggaugaugaagaugaa

SEQ ID NO: 1936087 - RNA, 19 nt, Homo sapiens
  misc_RNA (1)...(19): siRNA sense strand
ggaagaugaggaugaugaa

SEQ ID NO: 1936088 - RNA, 19 nt, Homo sapiens
  misc_RNA (1)...(19): siRNA sense strand
uggcuggacugcuguguga

SEQ ID NO: 1936089 - RNA, 19 nt, Homo sapiens
  misc_RNA (1)...(19): siRNA sense strand
agggugaaaucuucguaua

SEQ ID NO: 1936090 - RNA, 19 nt, Homo sapiens
  misc_RNA (1)...(19): siRNA sense strand
gaccaauuauaguuuaugg

SEQ ID NO: 1936091 - RNA, 19 nt, Homo sapiens
  misc_RNA (1)...(19): siRNA sense strand
gcaugacuguucacauugg

SEQ ID NO: 1936092 - RNA, 19 nt, Homo sapiens
  misc_RNA (1)...(19): siRNA sense strand
ggcaggauaugcuagcaau

SEQ ID NO: 1936093 - RNA, 19 nt, Homo sapiens
  misc_RNA (1)...(19): siRNA sense strand
uagcugccauagaagcaua

SEQ ID NO: 1936094 - RNA, 19 nt, Homo sapiens
  misc_RNA (1)...(19): siRNA sense strand
caagagcaaucagauguac

SEQ ID NO: 1936095 - RNA, 19 nt, Homo sapiens
  misc_RNA (1)...(19): siRNA sense strand
gaacuggccaagagcaauc

SEQ ID NO: 1936096 - RNA, 19 nt, Homo sapiens
  misc_RNA (1)...(19): siRNA sense strand
ggaugaugaagaugaauga

SEQ ID NO: 1936097 - RNA, 19 nt, Homo sapiens
  misc_RNA (1)...(19): siRNA sense strand
caauaccgaugaugauguc

SEQ ID NO: 1936098 - RNA, 19 nt, Homo sapiens
  misc_RNA (1)...(19): siRNA sense strand
gagaagaacaauggcaaga

SEQ ID NO: 1936099 - RNA, 19 nt, Homo sapiens
  misc_RNA (1)...(19): siRNA sense strand
ggacucagugcuucggaaa

SEQ ID NO: 1936100 - RNA, 19 nt, Homo sapiens
  misc_RNA (1)...(19): siRNA sense strand
ccaagagcaaucagaugua

SEQ ID NO: 1936101 - RNA, 19 nt, Homo sapiens
  misc_RNA (1)...(19): siRNA sense strand
ucacucagaugguagaaaa

SEQ ID NO: 1936102 - RNA, 19 nt, Homo sapiens
  misc_RNA (1)...(19): siRNA sense strand
gagaaacuuuaggauauac

SEQ ID NO: 1936103 - RNA, 19 nt, Homo sapiens
  misc_RNA (1)...(19): siRNA sense strand
ggcagcagauauugaagau

SEQ ID NO: 1936104 - RNA, 19 nt, Homo sapiens
  misc_RNA (1)...(19): siRNA sense strand
cagaacaaauccggagaga

SEQ ID NO: 1936105 - RNA, 19 nt, Homo sapiens
  misc_RNA (1)...(19): siRNA sense strand
ucaacaagcagcaaagugu

SEQ ID NO: 1936106 - RNA, 19 nt, Homo sapiens
  misc_RNA (1)...(19): siRNA sense strand
gaaguugcaguagugguaa

SEQ ID NO: 1936107 - RNA, 19 nt, Homo sapiens
  misc_RNA (1)...(19): siRNA sense strand
gccaagagcaaucagaugu

SEQ ID NO: 1936108 - RNA, 19 nt, Homo sapiens
  misc_RNA (1)...(19): siRNA sense strand
ugacaaggacucagugcuu

SEQ ID NO: 1936109 - RNA, 19 nt, Homo sapiens
  misc_RNA (1)...(19): siRNA sense strand
caucugcaaucaaguguac

SEQ ID NO: 1936110 - RNA, 19 nt, Homo sapiens
  misc_RNA (1)...(19): siRNA sense strand
uugaugaggugcuugauag

SEQ ID NO: 1936111 - RNA, 19 nt, Homo sapiens
  misc_RNA (1)...(19): siRNA sense strand
gagaauaaaucaagagcua

SEQ ID NO: 1936112 - RNA, 19 nt, Homo sapiens
  misc_RNA (1)...(19): siRNA sense strand
gaaauggauuccuuuaaug

SEQ ID NO: 1936113 - RNA, 19 nt, Homo sapiens
  misc_RNA (1)...(19): siRNA sense strand
guacucaucuugacacaaa

SEQ ID NO: 1936114 - RNA, 19 nt, Homo sapiens
  misc_RNA (1)...(19): siRNA sense strand
caagcaaccuuaaaugaaa

SEQ ID NO: 1936115 - RNA, 19 nt, Homo sapiens
  misc_RNA (1)...(19): siRNA sense strand
caaacuacaugaccaagaa

SEQ ID NO: 1936116 - RNA, 19 nt, Homo sapiens
  misc_RNA (1)...(19): siRNA sense strand
cgaaauggauuccuuuaau

SEQ ID NO: 1936117 - RNA, 19 nt, Homo sapiens
  misc_RNA (1)...(19): siRNA sense strand
gaaaguaccaacuauaaug

SEQ ID NO: 1936118 - RNA, 19 nt, Homo sapiens
  misc_RNA (1)...(19): siRNA sense strand
gcgcagcucucaucagaaa

SEQ ID NO: 1936119 - RNA, 19 nt, Homo sapiens
  misc_RNA (1)...(19): siRNA sense strand
gagaauaagggaaguagua

SEQ ID NO: 1936120 - RNA, 19 nt, Homo sapiens
  misc_RNA (1)...(19): siRNA sense strand
gacagagacugaauaaaga

SEQ ID NO: 1936121 - RNA, 19 nt, Homo sapiens
  misc_RNA (1)...(19): siRNA sense strand
ggaaauaccauuggaacua

SEQ ID NO: 1936122 - RNA, 19 nt, Homo sapiens
  misc_RNA (1)...(19): siRNA sense strand
gaaaggguguagaucauuc

SEQ ID NO: 1936123 - RNA, 19 nt, Homo sapiens
  misc_RNA (1)...(19): siRNA sense strand
gcaagagaauaaaucaaga

SEQ ID NO: 1936124 - RNA, 19 nt, Homo sapiens
  misc_RNA (1)...(19): siRNA sense strand
gaaccaagcaaccuuaaau

SEQ ID NO: 1936125 - RNA, 19 nt, Homo sapiens
  misc_RNA (1)...(19): siRNA sense strand
gaaauaccauuggaacuag

SEQ ID NO: 1936126 - RNA, 19 nt, Homo sapiens
  misc_RNA (1)...(19): siRNA sense strand
ggaaagaaagaaagauuug

SEQ ID NO: 1936127 - RNA, 19 nt, Homo sapiens
  misc_RNA (1)...(19): siRNA sense strand
caagagcuaucaucuaaag

SEQ ID NO: 1936128 - RNA, 19 nt, Homo sapiens
  misc_RNA (1)...(19): siRNA sense strand
gagcuaucaucuaaagaaa

SEQ ID NO: 1936129 - RNA, 19 nt, Homo sapiens
  misc_RNA (1)...(19): siRNA sense strand
gaaagaggcagaugcuguu

SEQ ID NO: 1936130 - RNA, 19 nt, Homo sapiens
  misc_RNA (1)...(19): siRNA sense strand
gcagcucucaucagaaaua

SEQ ID NO: 1936131 - RNA, 19 nt, Homo sapiens
  misc_RNA (1)...(19): siRNA sense strand
uaagucaacugggaauaaa

SEQ ID NO: 1936132 - RNA, 19 nt, Homo sapiens
  misc_RNA (1)...(19): siRNA sense strand
ggaagguugaguuucauua

SEQ ID NO: 1936133 - RNA, 19 nt, Homo sapiens
  misc_RNA (1)...(19): siRNA sense strand
gccugaggaugucaauuua

SEQ ID NO: 1936134 - RNA, 19 nt, Homo sapiens
  misc_RNA (1)...(19): siRNA sense strand
guagagggcagcaacgaua

SEQ ID NO: 1936135 - RNA, 19 nt, Homo sapiens
  misc_RNA (1)...(19): siRNA sense strand
ggaaguaguaaaucucaaa

SEQ ID NO: 1936136 - RNA, 19 nt, Homo sapiens
  misc_RNA (1)...(19): siRNA sense strand
gcaaaggcaguaccagaaa

SEQ ID NO: 1936137 - RNA, 19 nt, Homo sapiens
  misc_RNA (1)...(19): siRNA sense strand
ggagcucccuggaagagaa

SEQ ID NO: 1936138 - RNA, 19 nt, Homo sapiens
  misc_RNA (1)...(19): siRNA sense strand
ugauauaucuccuuucagu

SEQ ID NO: 1936139 - RNA, 19 nt, Homo sapiens
  misc_RNA (1)...(19): siRNA sense strand
caaagagaauacucacaau

SEQ ID NO: 1936140 - RNA, 19 nt, Homo sapiens
  misc_RNA (1)...(19): siRNA sense strand
ggauggagaugaugcuauc

SEQ ID NO: 1936141 - RNA, 19 nt, Homo sapiens
  misc_RNA (1)...(19): siRNA sense strand
aaagaagccucaaagagau

SEQ ID NO: 1936142 - RNA, 19 nt, Homo sapiens
  misc_RNA (1)...(19): siRNA sense strand
aaagcacacucgaaggaua

SEQ ID NO: 1936143 - RNA, 19 nt, Homo sapiens
  misc_RNA (1)...(19): siRNA sense strand
gaauaaaggguuugaggau

SEQ ID NO: 1936144 - RNA, 19 nt, Homo sapiens
  misc_RNA (1)...(19): siRNA sense strand
caucagaaauaacaugcaa

SEQ ID NO: 1936145 - RNA, 19 nt, Homo sapiens
  misc_RNA (1)...(19): siRNA sense strand
gcaaguaugaauuaugcua

SEQ ID NO: 1936146 - RNA, 19 nt, Homo sapiens
  misc_RNA (1)...(19): siRNA sense strand
aucaagagcuaucaucuaa

SEQ ID NO: 1936147 - RNA, 19 nt, Homo sapiens
  misc_RNA (1)...(19): siRNA sense strand
ccagaaaaguccaguaaaa

SEQ ID NO: 1936148 - RNA, 19 nt, Homo sapiens
  misc_RNA (1)...(19): siRNA sense strand
acaaauagacagagacuga

SEQ ID NO: 1936149 - RNA, 19 nt, Homo sapiens
  misc_RNA (1)...(19): siRNA sense strand
ccaagcaaccuuaaaugaa

SEQ ID NO: 1936150 - RNA, 19 nt, Homo sapiens
  misc_RNA (1)...(19): siRNA sense strand
aacaaagguuuccuaguaa

SEQ ID NO: 1936151 - RNA, 19 nt, Homo sapiens
  misc_RNA (1)...(19): siRNA sense strand
agacagagacugaauaaag

SEQ ID NO: 1936152 - RNA, 19 nt, Homo sapiens
  misc_RNA (1)...(19): siRNA sense strand
ggccugaggaugucaauuu

SEQ ID NO: 1936153 - RNA, 19 nt, Homo sapiens
  misc_RNA (1)...(19): siRNA sense strand
gcaaagcuguguggaagag

SEQ ID NO: 1936154 - RNA, 19 nt, Homo sapiens
  misc_RNA (1)...(19): siRNA sense strand
ugagagcgauggugacuag

SEQ ID NO: 1936155 - RNA, 19 nt, Homo sapiens
  misc_RNA (1)...(19): siRNA sense strand
acacaacauugacuaccua

SEQ ID NO: 1936156 - RNA, 19 nt, Homo sapiens
  misc_RNA (1)...(19): siRNA sense strand
uaagggaaguaguaaaucu

SEQ ID NO: 1936157 - RNA, 19 nt, Homo sapiens
  misc_RNA (1)...(19): siRNA sense strand
gggaugaaacugcgaaaga

SEQ ID NO: 1936158 - RNA, 19 nt, Homo sapiens
  misc_RNA (1)...(19): siRNA sense strand
gaauaaggguaugccacaa

SEQ ID NO: 1936159 - RNA, 19 nt, Homo sapiens
  misc_RNA (1)...(19): siRNA sense strand
gcugaaaguaccaacuaua

SEQ ID NO: 1936160 - RNA, 19 nt, Homo sapiens
  misc_RNA (1)...(19): siRNA sense strand
gagaacacaccuaggaaug

SEQ ID NO: 1936161 - RNA, 19 nt, Homo sapiens
  misc_RNA (1)...(19): siRNA sense strand
ggaugaaacugcgaaagag

SEQ ID NO: 1936162 - RNA, 19 nt, Homo sapiens
  misc_RNA (1)...(19): siRNA sense strand
gaaggcaaagauauucaaa

SEQ ID NO: 1936163 - RNA, 19 nt, Homo sapiens
  misc_RNA (1)...(19): siRNA sense strand
cagcaaguaugaauuaugc

SEQ ID NO: 1936164 - RNA, 19 nt, Homo sapiens
  misc_RNA (1)...(19): siRNA sense strand
gaauaagggaaguaguaaa

SEQ ID NO: 1936165 - RNA, 19 nt, Homo sapiens
  misc_RNA (1)...(19): siRNA sense strand
gagcagaggcaggaagaaa

SEQ ID NO: 1936166 - RNA, 19 nt, Homo sapiens
  misc_RNA (1)...(19): siRNA sense strand
aggcaaagauauucaaaca

SEQ ID NO: 1936167 - RNA, 19 nt, Homo sapiens
  misc_RNA (1)...(19): siRNA sense strand
aaagagaacacaccuagga

SEQ ID NO: 1936168 - RNA, 19 nt, Homo sapiens
  misc_RNA (1)...(19): siRNA sense strand
cagaaaggguguagaucau

SEQ ID NO: 1936169 - RNA, 19 nt, Homo sapiens
  misc_RNA (1)...(19): siRNA sense strand
aaacaucucucaaaaguca

SEQ ID NO: 1936170 - RNA, 19 nt, Homo sapiens
  misc_RNA (1)...(19): siRNA sense strand
gaauaaaucaagagcuauc

SEQ ID NO: 1936171 - RNA, 19 nt, Homo sapiens
  misc_RNA (1)...(19): siRNA sense strand
gaagggaugacaguaguga

SEQ ID NO: 1936172 - RNA, 19 nt, Homo sapiens
  misc_RNA (1)...(19): siRNA sense strand
ccagaaaggguguagauca

SEQ ID NO: 1936173 - RNA, 19 nt, Homo sapiens
  misc_RNA (1)...(19): siRNA sense strand
uggcgcagcucucaucaga

SEQ ID NO: 1936174 - RNA, 19 nt, Homo sapiens
  misc_RNA (1)...(19): siRNA sense strand
aaagaaggcaguagugaug

SEQ ID NO: 1936175 - RNA, 19 nt, Homo sapiens
  misc_RNA (1)...(19): siRNA sense strand
acaaagagaauacucacaa

SEQ ID NO: 1936176 - RNA, 19 nt, Homo sapiens
  misc_RNA (1)...(19): siRNA sense strand
cugaaaguaccaacuauaa

SEQ ID NO: 1936177 - RNA, 19 nt, Homo sapiens
  misc_RNA (1)...(19): siRNA sense strand
aagggaagguugaguuuca

SEQ ID NO: 1936178 - RNA, 19 nt, Homo sapiens
  misc_RNA (1)...(19): siRNA sense strand
gaagagaaggaaacagagu

SEQ ID NO: 1936179 - RNA, 19 nt, Homo sapiens
  misc_RNA (1)...(19): siRNA sense strand
gcaaacuacaugaccaaga

SEQ ID NO: 1936180 - RNA, 19 nt, Homo sapiens
  misc_RNA (1)...(19): siRNA sense strand
caaaggcaguaccagaaag

SEQ ID NO: 1936181 - RNA, 19 nt, Homo sapiens
  misc_RNA (1)...(19): siRNA sense strand
gaccuagaaggcaaagaua

SEQ ID NO: 1936182 - RNA, 19 nt, Homo sapiens
  misc_RNA (1)...(19): siRNA sense strand
gaaggcagcgguuauacag

SEQ ID NO: 1936183 - RNA, 19 nt, Homo sapiens
  misc_RNA (1)...(19): siRNA sense strand
gaauauggcgcagcucuca

SEQ ID NO: 1936184 - RNA, 19 nt, Homo sapiens
  misc_RNA (1)...(19): siRNA sense strand
caggaaagaaagaaagauu

SEQ ID NO: 1936185 - RNA, 19 nt, Homo sapiens
  misc_RNA (1)...(19): siRNA sense strand
uagaagggaugacaguagu

SEQ ID NO: 1936186 - RNA, 19 nt, Homo sapiens
  misc_RNA (1)...(19): siRNA sense strand
cagcugaaaguaccaacua

SEQ ID NO: 1936187 - RNA, 19 nt, Homo sapiens
  misc_RNA (1)...(19): siRNA sense strand
ccaagggaagguugaguuu

SEQ ID NO: 1936188 - RNA, 19 nt, Homo sapiens
  misc_RNA (1)...(19): siRNA sense strand
ccuaaaacaucucucaaaa

SEQ ID NO: 1936189 - RNA, 19 nt, Homo sapiens
  misc_RNA (1)...(19): siRNA sense strand
caacauugacuaccuaaaa

SEQ ID NO: 1936190 - RNA, 19 nt, Homo sapiens
  misc_RNA (1)...(19): siRNA sense strand
gaagaaaaugguggaaaua

SEQ ID NO: 1936191 - RNA, 19 nt, Homo sapiens
  misc_RNA (1)...(19): siRNA sense strand
aaacgaaauggauuccuuu

SEQ ID NO: 1936192 - RNA, 19 nt, Homo sapiens
  misc_RNA (1)...(19): siRNA sense strand
gaaaauauuguccaggaaa

SEQ ID NO: 1936193 - RNA, 19 nt, Homo sapiens
  misc_RNA (1)...(19): siRNA sense strand
ggaaccaagcaaccuuaaa

SEQ ID NO: 1936194 - RNA, 19 nt, Homo sapiens
  misc_RNA (1)...(19): siRNA sense strand
ggcaaaggcaguaccagaa

SEQ ID NO: 1936195 - RNA, 19 nt, Homo sapiens
  misc_RNA (1)...(19): siRNA sense strand
guaacaaagagaauacuca

SEQ ID NO: 1936196 - RNA, 19 nt, Homo sapiens
  misc_RNA (1)...(19): siRNA sense strand
gacaguggcaguucaagug

SEQ ID NO: 1936197 - RNA, 19 nt, Homo sapiens
  misc_RNA (1)...(19): siRNA sense strand
gcucucaucagaaauaaca

SEQ ID NO: 1936198 - RNA, 19 nt, Homo sapiens
  misc_RNA (1)...(19): siRNA sense strand
caauuuauccuaagucaac

SEQ ID NO: 1936199 - RNA, 19 nt, Homo sapiens
  misc_RNA (1)...(19): siRNA sense strand
cacaauggccugaggaugu

SEQ ID NO: 1936200 - RNA, 19 nt, Homo sapiens
  misc_RNA (1)...(19): siRNA sense strand
gggcagcaacgauaucaug

SEQ ID NO: 1936201 - RNA, 19 nt, Homo sapiens
  misc_RNA (1)...(19): siRNA sense strand
ccuagaaggcaaagauauu

SEQ ID NO: 1936202 - RNA, 19 nt, Homo sapiens
  misc_RNA (1)...(19): siRNA sense strand
aaaagaagccucaaagaga

SEQ ID NO: 1936203 - RNA, 19 nt, Homo sapiens
  misc_RNA (1)...(19): siRNA sense strand
cuaagucaacugggaauaa

SEQ ID NO: 1936204 - RNA, 19 nt, Homo sapiens
  misc_RNA (1)...(19): siRNA sense strand
guagaagggaugacaguag

SEQ ID NO: 1936205 - RNA, 19 nt, Homo sapiens
  misc_RNA (1)...(19): siRNA sense strand
ggcaagagaauaaaucaag

SEQ ID NO: 1936206 - RNA, 19 nt, Homo sapiens
  misc_RNA (1)...(19): siRNA sense strand
ucccagcaaguaugaauua

SEQ ID NO: 1936207 - RNA, 19 nt, Homo sapiens
  misc_RNA (1)...(19): siRNA sense strand
gggcagcaccaacauuuca

SEQ ID NO: 1936208 - RNA, 19 nt, Homo sapiens
  misc_RNA (1)...(19): siRNA sense strand
uacaugaccaagaagaaua

SEQ ID NO: 1936209 - RNA, 19 nt, Homo sapiens
  misc_RNA (1)...(19): siRNA sense strand
gcuaucagcaaacuacaug

SEQ ID NO: 1936210 - RNA, 19 nt, Homo sapiens
  misc_RNA (1)...(19): siRNA sense strand
cucguggucuugauaauga

SEQ ID NO: 1936211 - RNA, 19 nt, Homo sapiens
  misc_RNA (1)...(19): siRNA sense strand
caucaaagcuggauuagaa

SEQ ID NO: 1936212 - RNA, 19 nt, Homo sapiens
  misc_RNA (1)...(19): siRNA sense strand
ggacgucggucaucagaua

SEQ ID NO: 1936213 - RNA, 19 nt, Homo sapiens
  misc_RNA (1)...(19): siRNA sense strand
gaagaaagcagaagcaaga

SEQ ID NO: 1936214 - RNA, 19 nt, Homo sapiens
  misc_RNA (1)...(19): siRNA sense strand
ggaaggaaaucaagaucaa

SEQ ID NO: 1936215 - RNA, 19 nt, Homo sapiens
  misc_RNA (1)...(19): siRNA sense strand
gggcagagauaaagagaaa

SEQ ID NO: 1936216 - RNA, 19 nt, Homo sapiens
  misc_RNA (1)...(19): siRNA sense strand
gaaaugaggaagaagcaaa

SEQ ID NO: 1936217 - RNA, 19 nt, Homo sapiens
  misc_RNA (1)...(19): siRNA sense strand
gaaagcugaugcugaggaa

SEQ ID NO: 1936218 - RNA, 19 nt, Homo sapiens
  misc_RNA (1)...(19): siRNA sense strand
gaacauacagccgaaagaa

SEQ ID NO: 1936219 - RNA, 19 nt, Homo sapiens
  misc_RNA (1)...(19): siRNA sense strand
gacaaggaauuacauaaca

SEQ ID NO: 1936220 - RNA, 19 nt, Homo sapiens
  misc_RNA (1)...(19): siRNA sense strand
gaaagcagaagcaagagaa

SEQ ID NO: 1936221 - RNA, 19 nt, Homo sapiens
  misc_RNA (1)...(19): siRNA sense strand
aaacaucaaagcuggauua

SEQ ID NO: 1936222 - RNA, 19 nt, Homo sapiens
  misc_RNA (1)...(19): siRNA sense strand
agaaagaaaugaggaagaa

SEQ ID NO: 1936223 - RNA, 19 nt, Homo sapiens
  misc_RNA (1)...(19): siRNA sense strand
gacuacagcugguucuuga

SEQ ID NO: 1936224 - RNA, 19 nt, Homo sapiens
  misc_RNA (1)...(19): siRNA sense strand
gagcaguucuucagauagu

SEQ ID NO: 1936225 - RNA, 19 nt, Homo sapiens
  misc_RNA (1)...(19): siRNA sense strand
cagcagacauucagaucaa

SEQ ID NO: 1936226 - RNA, 19 nt, Homo sapiens
  misc_RNA (1)...(19): siRNA sense strand
gaaaucaagaucaaaguca

SEQ ID NO: 1936227 - RNA, 19 nt, Homo sapiens
  misc_RNA (1)...(19): siRNA sense strand
acaagcaacuucaacauca

SEQ ID NO: 1936228 - RNA, 19 nt, Homo sapiens
  misc_RNA (1)...(19): siRNA sense strand
gaaacaagcaacuucaaca

SEQ ID NO: 1936229 - RNA, 19 nt, Homo sapiens
  misc_RNA (1)...(19): siRNA sense strand
guucagaggucuaggucaa

SEQ ID NO: 1936230 - RNA, 19 nt, Homo sapiens
  misc_RNA (1)...(19): siRNA sense strand
gaaaggaggaaggaaauca

SEQ ID NO: 1936231 - RNA, 19 nt, Homo sapiens
  misc_RNA (1)...(19): siRNA sense strand
gaagaagcaaagagaagaa

SEQ ID NO: 1936232 - RNA, 19 nt, Homo sapiens
  misc_RNA (1)...(19): siRNA sense strand
aggcaucgaucaagcagua

SEQ ID NO: 1936233 - RNA, 19 nt, Homo sapiens
  misc_RNA (1)...(19): siRNA sense strand
ggaagaagcaaagagaaga

SEQ ID NO: 1936234 - RNA, 19 nt, Homo sapiens
  misc_RNA (1)...(19): siRNA sense strand
cgacguaagggcagagaua

SEQ ID NO: 1936235 - RNA, 19 nt, Homo sapiens
  misc_RNA (1)...(19): siRNA sense strand
gggaaauccuauagaguuc

SEQ ID NO: 1936236 - RNA, 19 nt, Homo sapiens
  misc_RNA (1)...(19): siRNA sense strand
cguagucggucucgggaua

SEQ ID NO: 1936237 - RNA, 19 nt, Homo sapiens
  misc_RNA (1)...(19): siRNA sense strand
ucgagcaguucuucagaua

SEQ ID NO: 1936238 - RNA, 19 nt, Homo sapiens
  misc_RNA (1)...(19): siRNA sense strand
gaaagguccagucacagaa

SEQ ID NO: 1936239 - RNA, 19 nt, Homo sapiens
  misc_RNA (1)...(19): siRNA sense strand
gagaaaaggagaaggauaa

SEQ ID NO: 1936240 - RNA, 19 nt, Homo sapiens
  misc_RNA (1)...(19): siRNA sense strand
aaagaaaggaggaaggaaa

SEQ ID NO: 1936241 - RNA, 19 nt, Homo sapiens
  misc_RNA (1)...(19): siRNA sense strand
ggaaccuagugaagugaaa

SEQ ID NO: 1936242 - RNA, 19 nt, Homo sapiens
  misc_RNA (1)...(19): siRNA sense strand
gcauugaaagccaaagaaa

SEQ ID NO: 1936243 - RNA, 19 nt, Homo sapiens
  misc_RNA (1)...(19): siRNA sense strand
acaagaagguccaggucaa

SEQ ID NO: 1936244 - RNA, 19 nt, Homo sapiens
  misc_RNA (1)...(19): siRNA sense strand
cgagggaaauccuauagag

SEQ ID NO: 1936245 - RNA, 19 nt, Homo sapiens
  misc_RNA (1)...(19): siRNA sense strand
ggaccagcaucagcaguug

SEQ ID NO: 1936246 - RNA, 19 nt, Homo sapiens
  misc_RNA (1)...(19): siRNA sense strand
ggacaaggaauuacauaac

SEQ ID NO: 1936247 - RNA, 19 nt, Homo sapiens
  misc_RNA (1)...(19): siRNA sense strand
agcaguagcucuucuuaug

SEQ ID NO: 1936248 - RNA, 19 nt, Homo sapiens
  misc_RNA (1)...(19): siRNA sense strand
ggaaggacaaggaauuaca

SEQ ID NO: 1936249 - RNA, 19 nt, Homo sapiens
  misc_RNA (1)...(19): siRNA sense strand
caagcaguagcucuucuua

SEQ ID NO: 1936250 - RNA, 19 nt, Homo sapiens
  misc_RNA (1)...(19): siRNA sense strand
guaccaagaugacaauucc

SEQ ID NO: 1936251 - RNA, 19 nt, Homo sapiens
  misc_RNA (1)...(19): siRNA sense strand
gcuaucaaguaccaagaug

SEQ ID NO: 1936252 - RNA, 19 nt, Homo sapiens
  misc_RNA (1)...(19): siRNA sense strand
gaagaagaaagcagaagca

SEQ ID NO: 1936253 - RNA, 19 nt, Homo sapiens
  misc_RNA (1)...(19): siRNA sense strand
caaagaaagaaaugaggaa

SEQ ID NO: 1936254 - RNA, 19 nt, Homo sapiens
  misc_RNA (1)...(19): siRNA sense strand
gaaagccaaagaaagaaau

SEQ ID NO: 1936255 - RNA, 19 nt, Homo sapiens
  misc_RNA (1)...(19): siRNA sense strand
gaaggaaaucaagaucaaa

SEQ ID NO: 1936256 - RNA, 19 nt, Homo sapiens
  misc_RNA (1)...(19): siRNA sense strand
gggcaguccuguggccuaa

SEQ ID NO: 1936257 - RNA, 19 nt, Homo sapiens
  misc_RNA (1)...(19): siRNA sense strand
uugaagcuauugaaaguga

SEQ ID NO: 1936258 - RNA, 19 nt, Homo sapiens
  misc_RNA (1)...(19): siRNA sense strand
ccucgucuccguucucaua

SEQ ID NO: 1936259 - RNA, 19 nt, Homo sapiens
  misc_RNA (1)...(19): siRNA sense strand
ggaggaaggaaaucaagau

SEQ ID NO: 1936260 - RNA, 19 nt, Homo sapiens
  misc_RNA (1)...(19): siRNA sense strand
ccuggcccauccaaauuua

SEQ ID NO: 1936261 - RNA, 19 nt, Homo sapiens
  misc_RNA (1)...(19): siRNA sense strand
ucuuauggcuccagaagga

SEQ ID NO: 1936262 - RNA, 19 nt, Homo sapiens
  misc_RNA (1)...(19): siRNA sense strand
gaaagaaaggaggaaggaa

SEQ ID NO: 1936263 - RNA, 19 nt, Homo sapiens
  misc_RNA (1)...(19): siRNA sense strand
gcagugaaagguccaguca

SEQ ID NO: 1936264 - RNA, 19 nt, Homo sapiens
  misc_RNA (1)...(19): siRNA sense strand
ggaaaucaagaucaaaguc

SEQ ID NO: 1936265 - RNA, 19 nt, Homo sapiens
  misc_RNA (1)...(19): siRNA sense strand
gauccacccaguacugaaa

SEQ ID NO: 1936266 - RNA, 19 nt, Homo sapiens
  misc_RNA (1)...(19): siRNA sense strand
gaaauccuauagaguucag

SEQ ID NO: 1936267 - RNA, 19 nt, Homo sapiens
  misc_RNA (1)...(19): siRNA sense strand
ugaaagguccagucacaga

SEQ ID NO: 1936268 - RNA, 19 nt, Homo sapiens
  misc_RNA (1)...(19): siRNA sense strand
uaauugcucuccgacaaga

SEQ ID NO: 1936269 - RNA, 19 nt, Homo sapiens
  misc_RNA (1)...(19): siRNA sense strand
gaagcuauugaaagugauu

SEQ ID NO: 1936270 - RNA, 19 nt, Homo sapiens
  misc_RNA (1)...(19): siRNA sense strand
gaaggacaaggaauuacau

SEQ ID NO: 1936271 - RNA, 19 nt, Homo sapiens
  misc_RNA (1)...(19): siRNA sense strand
acauucagaucaaguaaag

SEQ ID NO: 1936272 - RNA, 19 nt, Homo sapiens
  misc_RNA (1)...(19): siRNA sense strand
agaaggaaacgaagucgaa

SEQ ID NO: 1936273 - RNA, 19 nt, Homo sapiens
  misc_RNA (1)...(19): siRNA sense strand
gaggaagaagcaaagagaa

SEQ ID NO: 1936274 - RNA, 19 nt, Homo sapiens
  misc_RNA (1)...(19): siRNA sense strand
ugaggaagaagcaaagaga

SEQ ID NO: 1936275 - RNA, 19 nt, Homo sapiens
  misc_RNA (1)...(19): siRNA sense strand
cgacaagaaagacuaaugg

SEQ ID NO: 1936276 - RNA, 19 nt, Homo sapiens
  misc_RNA (1)...(19): siRNA sense strand
gaagcaaagagaagaaagg

SEQ ID NO: 1936277 - RNA, 19 nt, Homo sapiens
  misc_RNA (1)...(19): siRNA sense strand
ggauagagaacgacguaag

SEQ ID NO: 1936278 - RNA, 19 nt, Homo sapiens
  misc_RNA (1)...(19): siRNA sense strand
cagaucaaguaaagaaguc

SEQ ID NO: 1936279 - RNA, 19 nt, Homo sapiens
  misc_RNA (1)...(19): siRNA sense strand
ugaaagccaaagaaagaaa

SEQ ID NO: 1936280 - RNA, 19 nt, Homo sapiens
  misc_RNA (1)...(19): siRNA sense strand
gacguaagggcagagauaa

SEQ ID NO: 1936281 - RNA, 19 nt, Homo sapiens
  misc_RNA (1)...(19): siRNA sense strand
ggucgagggaaauccuaua

SEQ ID NO: 1936282 - RNA, 19 nt, Homo sapiens
  misc_RNA (1)...(19): siRNA sense strand
uaaagggaaggacaaggaa

SEQ ID NO: 1936283 - RNA, 19 nt, Homo sapiens
  misc_RNA (1)...(19): siRNA sense strand
cgaaagaaaggaggaagga

SEQ ID NO: 1936284 - RNA, 19 nt, Homo sapiens
  misc_RNA (1)...(19): siRNA sense strand
agggaaauccuauagaguu

SEQ ID NO: 1936285 - RNA, 19 nt, Homo sapiens
  misc_RNA (1)...(19): siRNA sense strand
ggaaucuggaaacaucaaa

SEQ ID NO: 1936286 - RNA, 19 nt, Homo sapiens
  misc_RNA (1)...(19): siRNA sense strand
guaagggcagagauaaaga

SEQ ID NO: 1936287 - RNA, 19 nt, Homo sapiens
  misc_RNA (1)...(19): siRNA sense strand
gcaguagcucuucuuaugg

SEQ ID NO: 1936288 - RNA, 19 nt, Homo sapiens
  misc_RNA (1)...(19): siRNA sense strand
ucaaguaccaagaugacaa

SEQ ID NO: 1936289 - RNA, 19 nt, Homo sapiens
  misc_RNA (1)...(19): siRNA sense strand
aaauagauccuaccagcau

SEQ ID NO: 1936290 - RNA, 19 nt, Homo sapiens
  misc_RNA (1)...(19): siRNA sense strand
gacauucagaucaaguaaa

SEQ ID NO: 1936291 - RNA, 19 nt, Homo sapiens
  misc_RNA (1)...(19): siRNA sense strand
gauagagaacgacguaagg

SEQ ID NO: 1936292 - RNA, 19 nt, Homo sapiens
  misc_RNA (1)...(19): siRNA sense strand
gaccucgucuccguucuca

SEQ ID NO: 1936293 - RNA, 19 nt, Homo sapiens
  misc_RNA (1)...(19): siRNA sense strand
auugaaagccaaagaaaga

SEQ ID NO: 1936294 - RNA, 19 nt, Homo sapiens
  misc_RNA (1)...(19): siRNA sense strand
ggaaacaucaaagcuggau

SEQ ID NO: 1936295 - RNA, 19 nt, Homo sapiens
  misc_RNA (1)...(19): siRNA sense strand
caaggaauuacauaacauc

SEQ ID NO: 1936296 - RNA, 19 nt, Homo sapiens
  misc_RNA (1)...(19): siRNA sense strand
ucagauaguagaacauaca

SEQ ID NO: 1936297 - RNA, 19 nt, Homo sapiens
  misc_RNA (1)...(19): siRNA sense strand
cgaagucgaagucguucaa

SEQ ID NO: 1936298 - RNA, 19 nt, Homo sapiens
  misc_RNA (1)...(19): siRNA sense strand
auuaauugcucuccgacaa

SEQ ID NO: 1936299 - RNA, 19 nt, Homo sapiens
  misc_RNA (1)...(19): siRNA sense strand
caaguaccaagaugacaau

SEQ ID NO: 1936300 - RNA, 19 nt, Homo sapiens
  misc_RNA (1)...(19): siRNA sense strand
cagacauucagaucaagua

SEQ ID NO: 1936301 - RNA, 19 nt, Homo sapiens
  misc_RNA (1)...(19): siRNA sense strand
cuucagauaguagaacaua

SEQ ID NO: 1936302 - RNA, 19 nt, Homo sapiens
  misc_RNA (1)...(19): siRNA sense strand
ggccaaagccagacuacag

SEQ ID NO: 1936303 - RNA, 19 nt, Homo sapiens
  misc_RNA (1)...(19): siRNA sense strand
aaacaagcaacuucaacau

SEQ ID NO: 1936304 - RNA, 19 nt, Homo sapiens
  misc_RNA (1)...(19): siRNA sense strand
cauagucguagcagugaaa

SEQ ID NO: 1936305 - RNA, 19 nt, Homo sapiens
  misc_RNA (1)...(19): siRNA sense strand
guucacauucuuaugauag

SEQ ID NO: 1936306 - RNA, 19 nt, Homo sapiens
  misc_RNA (1)...(19): siRNA sense strand
aguggaaccuagugaagug

SEQ ID NO: 1936307 - RNA, 19 nt, Homo sapiens
  misc_RNA (1)...(19): siRNA sense strand
gaggaaggaaaucaagauc

SEQ ID NO: 1936308 - RNA, 19 nt, Homo sapiens
  misc_RNA (1)...(19): siRNA sense strand
cagccucguucacauucuu

SEQ ID NO: 1936309 - RNA, 19 nt, Homo sapiens
  misc_RNA (1)...(19): siRNA sense strand
cgggauagagaacgacgua

SEQ ID NO: 1936310 - RNA, 19 nt, Homo sapiens
  misc_RNA (1)...(19): siRNA sense strand
gaucaagcaguagcucuuc

SEQ ID NO: 1936311 - RNA, 19 nt, Homo sapiens
  misc_RNA (1)...(19): siRNA sense strand
acaaggagcuggaugauuu

SEQ ID NO: 1936312 - RNA, 19 nt, Homo sapiens
  misc_RNA (1)...(19): siRNA sense strand
gaagagaacaguagguuaa

SEQ ID NO: 1936313 - RNA, 19 nt, Homo sapiens
  misc_RNA (1)...(19): siRNA sense strand
gcagaucgcuggacuucaa

SEQ ID NO: 1936314 - RNA, 19 nt, Homo sapiens
  misc_RNA (1)...(19): siRNA sense strand
gagaguaagucccugcaaa

SEQ ID NO: 1936315 - RNA, 19 nt, Homo sapiens
  misc_RNA (1)...(19): siRNA sense strand
ggagcuggaugauuugaga

SEQ ID NO: 1936316 - RNA, 19 nt, Homo sapiens
  misc_RNA (1)...(19): siRNA sense strand
ggaagagaacaguagguua

SEQ ID NO: 1936317 - RNA, 19 nt, Homo sapiens
  misc_RNA (1)...(19): siRNA sense strand
aagaaugccuguuggaaga

SEQ ID NO: 1936318 - RNA, 19 nt, Homo sapiens
  misc_RNA (1)...(19): siRNA sense strand
ugucaucuguugaagaauu

SEQ ID NO: 1936319 - RNA, 19 nt, Homo sapiens
  misc_RNA (1)...(19): siRNA sense strand
gagccgagguggagcagau

SEQ ID NO: 1936320 - RNA, 19 nt, Homo sapiens
  misc_RNA (1)...(19): siRNA sense strand
gcccgcaguugguacagua

SEQ ID NO: 1936321 - RNA, 19 nt, Homo sapiens
  misc_RNA (1)...(19): siRNA sense strand
gaaugccuguuggaagauu

SEQ ID NO: 1936322 - RNA, 19 nt, Homo sapiens
  misc_RNA (1)...(19): siRNA sense strand
gaggcugugugucgagauu

SEQ ID NO: 1936323 - RNA, 19 nt, Homo sapiens
  misc_RNA (1)...(19): siRNA sense strand
cacccagacuccauggaua

SEQ ID NO: 1936324 - RNA, 19 nt, Homo sapiens
  misc_RNA (1)...(19): siRNA sense strand
gauggugggugaagauguc

SEQ ID NO: 1936325 - RNA, 19 nt, Homo sapiens
  misc_RNA (1)...(19): siRNA sense strand
gcacgagcuucagccagaa

SEQ ID NO: 1936326 - RNA, 19 nt, Homo sapiens
  misc_RNA (1)...(19): siRNA sense strand
gaagaccauggcccuguuu

SEQ ID NO: 1936327 - RNA, 19 nt, Homo sapiens
  misc_RNA (1)...(19): siRNA sense strand
cuugucaucuguugaagaa

SEQ ID NO: 1936328 - RNA, 19 nt, Homo sapiens
  misc_RNA (1)...(19): siRNA sense strand
agacaggacagcucagaaa

SEQ ID NO: 1936329 - RNA, 19 nt, Homo sapiens
  misc_RNA (1)...(19): siRNA sense strand
caggacagcucagaaagca

SEQ ID NO: 1936330 - RNA, 19 nt, Homo sapiens
  misc_RNA (1)...(19): siRNA sense strand
gcacagcaacgaggcauuc

SEQ ID NO: 1936331 - RNA, 19 nt, Homo sapiens
  misc_RNA (1)...(19): siRNA sense strand
ggugcugucuggagaagau

SEQ ID NO: 1936332 - RNA, 19 nt, Homo sapiens
  misc_RNA (1)...(19): siRNA sense strand
gauuugagacaacauuuag

SEQ ID NO: 1936333 - RNA, 19 nt, Homo sapiens
  misc_RNA (1)...(19): siRNA sense strand
cugcagccacguuaaauuu

SEQ ID NO: 1936334 - RNA, 19 nt, Homo sapiens
  misc_RNA (1)...(19): siRNA sense strand
ucucagaaguuggauuugu

SEQ ID NO: 1936335 - RNA, 19 nt, Homo sapiens
  misc_RNA (1)...(19): siRNA sense strand
gaugauuugagacaacauu

SEQ ID NO: 1936336 - RNA, 19 nt, Homo sapiens
  misc_RNA (1)...(19): siRNA sense strand
gcagccacguuaaauuugc

SEQ ID NO: 1936337 - RNA, 19 nt, Homo sapiens
  misc_RNA (1)...(19): siRNA sense strand
agacacugcagccacguua

SEQ ID NO: 1936338 - RNA, 19 nt, Homo sapiens
  misc_RNA (1)...(19): siRNA sense strand
caucuugucaucuguugaa

SEQ ID NO: 1936339 - RNA, 19 nt, Homo sapiens
  misc_RNA (1)...(19): siRNA sense strand
uccaggagcucacgcagau

SEQ ID NO: 1936340 - RNA, 19 nt, Homo sapiens
  misc_RNA (1)...(19): siRNA sense strand
gaggccgacucucgugguu

SEQ ID NO: 1936341 - RNA, 19 nt, Homo sapiens
  misc_RNA (1)...(19): siRNA sense strand
cgaagaaugccuguuggaa

SEQ ID NO: 1936342 - RNA, 19 nt, Homo sapiens
  misc_RNA (1)...(19): siRNA sense strand
gcagacaggacagcucaga

SEQ ID NO: 1936343 - RNA, 19 nt, Homo sapiens
  misc_RNA (1)...(19): siRNA sense strand
agaagaccauggcccuguu

SEQ ID NO: 1936344 - RNA, 19 nt, Homo sapiens
  misc_RNA (1)...(19): siRNA sense strand
gcucuacccgggaagaaga

SEQ ID NO: 1936345 - RNA, 19 nt, Homo sapiens
  misc_RNA (1)...(19): siRNA sense strand
ucgcuggacuucaaacaag

SEQ ID NO: 1936346 - RNA, 19 nt, Homo sapiens
  misc_RNA (1)...(19): siRNA sense strand
ggagagcuuccgccacugu

SEQ ID NO: 1936347 - RNA, 19 nt, Homo sapiens
  misc_RNA (1)...(19): siRNA sense strand
gaagugaagagugcagaca

SEQ ID NO: 1936348 - RNA, 19 nt, Homo sapiens
  misc_RNA (1)...(19): siRNA sense strand
aagcgaagaaugccuguug

SEQ ID NO: 1936349 - RNA, 19 nt, Homo sapiens
  misc_RNA (1)...(19): siRNA sense strand
acacugcagccacguuaaa

SEQ ID NO: 1936350 - RNA, 19 nt, Homo sapiens
  misc_RNA (1)...(19): siRNA sense strand
gacucggccucuucucaga

SEQ ID NO: 1936351 - RNA, 19 nt, Homo sapiens
  misc_RNA (1)...(19): siRNA sense strand
gagcugcaccacacacaca

SEQ ID NO: 1936352 - RNA, 19 nt, Homo sapiens
  misc_RNA (1)...(19): siRNA sense strand
gagagcuuccgccacugua

SEQ ID NO: 1936353 - RNA, 19 nt, Homo sapiens
  misc_RNA (1)...(19): siRNA sense strand
gcuaccaggagcucaagaa

SEQ ID NO: 1936354 - RNA, 19 nt, Homo sapiens
  misc_RNA (1)...(19): siRNA sense strand
ucucgugguucccaagaau

SEQ ID NO: 1936355 - RNA, 19 nt, Homo sapiens
  misc_RNA (1)...(19): siRNA sense strand
caacgaggcauuccuugcu

SEQ ID NO: 1936356 - RNA, 19 nt, Homo sapiens
  misc_RNA (1)...(19): siRNA sense strand
gcgaagaaugccuguugga

SEQ ID NO: 1936357 - RNA, 19 nt, Homo sapiens
  misc_RNA (1)...(19): siRNA sense strand
caaggagcuggaugauuug

SEQ ID NO: 1936358 - RNA, 19 nt, Homo sapiens
  misc_RNA (1)...(19): siRNA sense strand
cagcaacgaggcauuccuu

SEQ ID NO: 1936359 - RNA, 19 nt, Homo sapiens
  misc_RNA (1)...(19): siRNA sense strand
gcuggaugauuugagacaa

SEQ ID NO: 1936360 - RNA, 19 nt, Homo sapiens
  misc_RNA (1)...(19): siRNA sense strand
accaggagcucaagaagac

SEQ ID NO: 1936361 - RNA, 19 nt, Homo sapiens
  misc_RNA (1)...(19): siRNA sense strand
gaacgggaggaccuugucu

SEQ ID NO: 1936362 - RNA, 19 nt, Homo sapiens
  misc_RNA (1)...(19): siRNA sense strand
ggagcacuacgacaagauc

SEQ ID NO: 1936363 - RNA, 19 nt, Homo sapiens
  misc_RNA (1)...(19): siRNA sense strand
agcagcaccuggagcacua

SEQ ID NO: 1936364 - RNA, 19 nt, Homo sapiens
  misc_RNA (1)...(19): siRNA sense strand
cacaucuugucaucuguug

SEQ ID NO: 1936365 - RNA, 19 nt, Homo sapiens
  misc_RNA (1)...(19): siRNA sense strand
ggagaguaagucccugcaa

SEQ ID NO: 1936366 - RNA, 19 nt, Homo sapiens
  misc_RNA (1)...(19): siRNA sense strand
cacguuaaauuugcagauc

SEQ ID NO: 1936367 - RNA, 19 nt, Homo sapiens
  misc_RNA (1)...(19): siRNA sense strand
gaagauuccagacguuuuc

SEQ ID NO: 1936368 - RNA, 19 nt, Homo sapiens
  misc_RNA (1)...(19): siRNA sense strand
gagaacaguagguuaaaau

SEQ ID NO: 1936369 - RNA, 19 nt, Homo sapiens
  misc_RNA (1)...(19): siRNA sense strand
cacacaaggagcuggauga

SEQ ID NO: 1936370 - RNA, 19 nt, Homo sapiens
  misc_RNA (1)...(19): siRNA sense strand
gucaucuguugaagaauuc

SEQ ID NO: 1936371 - RNA, 19 nt, Homo sapiens
  misc_RNA (1)...(19): siRNA sense strand
ucccaagaauccagacauc

SEQ ID NO: 1936372 - RNA, 19 nt, Homo sapiens
  misc_RNA (1)...(19): siRNA sense strand
gacaggacagcucagaaag

SEQ ID NO: 1936373 - RNA, 19 nt, Homo sapiens
  misc_RNA (1)...(19): siRNA sense strand
gugcaggaagcgaagaaug

SEQ ID NO: 1936374 - RNA, 19 nt, Homo sapiens
  misc_RNA (1)...(19): siRNA sense strand
ggaacgggaggaccuuguc

SEQ ID NO: 1936375 - RNA, 19 nt, Homo sapiens
  misc_RNA (1)...(19): siRNA sense strand
gggcagggcuuccucauug

SEQ ID NO: 1936376 - RNA, 19 nt, Homo sapiens
  misc_RNA (1)...(19): siRNA sense strand
gcaaugaagugaugaggau

SEQ ID NO: 1936377 - RNA, 19 nt, Homo sapiens
  misc_RNA (1)...(19): siRNA sense strand
ggagggaggaucaauauug

SEQ ID NO: 1936378 - RNA, 19 nt, Homo sapiens
  misc_RNA (1)...(19): siRNA sense strand
agagauggcuccaaauaug

SEQ ID NO: 1936379 - RNA, 19 nt, Homo sapiens
  misc_RNA (1)...(19): siRNA sense strand
gaacagaggcacaaauuuu

SEQ ID NO: 1936380 - RNA, 19 nt, Homo sapiens
  misc_RNA (1)...(19): siRNA sense strand
gaagugaugaggauacuga

SEQ ID NO: 1936381 - RNA, 19 nt, Homo sapiens
  misc_RNA (1)...(19): siRNA sense strand
cgagagauggcuccaaaua

SEQ ID NO: 1936382 - RNA, 19 nt, Homo sapiens
  misc_RNA (1)...(19): siRNA sense strand
gaagguagcaaugaaguga

SEQ ID NO: 1936383 - RNA, 19 nt, Homo sapiens
  misc_RNA (1)...(19): siRNA sense strand
gaugcugccucucuucuga

SEQ ID NO: 1936384 - RNA, 19 nt, Homo sapiens
  misc_RNA (1)...(19): siRNA sense strand
ggaacagaggcacaaauuu

SEQ ID NO: 1936385 - RNA, 19 nt, Homo sapiens
  misc_RNA (1)...(19): siRNA sense strand
gcucuuugcuacagaugaa

SEQ ID NO: 1936386 - RNA, 19 nt, Homo sapiens
  misc_RNA (1)...(19): siRNA sense strand
cuugauaccucugucauuu

SEQ ID NO: 1936387 - RNA, 19 nt, Homo sapiens
  misc_RNA (1)...(19): siRNA sense strand
agaaacagggagaucauua

SEQ ID NO: 1936388 - RNA, 19 nt, Homo sapiens
  misc_RNA (1)...(19): siRNA sense strand
ccaugggacuuaaugaaga

SEQ ID NO: 1936389 - RNA, 19 nt, Homo sapiens
  misc_RNA (1)...(19): siRNA sense strand
acggcuaccugaaggauua

SEQ ID NO: 1936390 - RNA, 19 nt, Homo sapiens
  misc_RNA (1)...(19): siRNA sense strand
gagagauggcuccaaauau

SEQ ID NO: 1936391 - RNA, 19 nt, Homo sapiens
  misc_RNA (1)...(19): siRNA sense strand
acagggagaucauuacauc

SEQ ID NO: 1936392 - RNA, 19 nt, Homo sapiens
  misc_RNA (1)...(19): siRNA sense strand
ucuagaagguagcaaugaa

SEQ ID NO: 1936393 - RNA, 19 nt, Homo sapiens
  misc_RNA (1)...(19): siRNA sense strand
gagggaggaucaauauugc

SEQ ID NO: 1936394 - RNA, 19 nt, Homo sapiens
  misc_RNA (1)...(19): siRNA sense strand
ggccucagcuuuggcaaga

SEQ ID NO: 1936395 - RNA, 19 nt, Homo sapiens
  misc_RNA (1)...(19): siRNA sense strand
cagcaccacagccuauaua

SEQ ID NO: 1936396 - RNA, 19 nt, Homo sapiens
  misc_RNA (1)...(19): siRNA sense strand
cccgagagauggcuccaaa

SEQ ID NO: 1936397 - RNA, 19 nt, Homo sapiens
  misc_RNA (1)...(19): siRNA sense strand
gaaacagggagaucauuac

SEQ ID NO: 1936398 - RNA, 19 nt, Homo sapiens
  misc_RNA (1)...(19): siRNA sense strand
auugauagcuucggaaaug

SEQ ID NO: 1936399 - RNA, 19 nt, Homo sapiens
  misc_RNA (1)...(19): siRNA sense strand
uauauaagcauccacaaca

SEQ ID NO: 1936400 - RNA, 19 nt, Homo sapiens
  misc_RNA (1)...(19): siRNA sense strand
ggaggggucuacauacaaa

SEQ ID NO: 1936401 - RNA, 19 nt, Homo sapiens
  misc_RNA (1)...(19): siRNA sense strand
ggauacugaucucuagaag

SEQ ID NO: 1936402 - RNA, 19 nt, Homo sapiens
  misc_RNA (1)...(19): siRNA sense strand
ugaagagcagaaagaauuu

SEQ ID NO: 1936403 - RNA, 19 nt, Homo sapiens
  misc_RNA (1)...(19): siRNA sense strand
ugaggauacugaucucuag

SEQ ID NO: 1936404 - RNA, 19 nt, Homo sapiens
  misc_RNA (1)...(19): siRNA sense strand
ccugaaggauuacgcuguu

SEQ ID NO: 1936405 - RNA, 19 nt, Homo sapiens
  misc_RNA (1)...(19): siRNA sense strand
gaacggagggaggaucaau

SEQ ID NO: 1936406 - RNA, 19 nt, Homo sapiens
  misc_RNA (1)...(19): siRNA sense strand
augaagagcagaaagaauu

SEQ ID NO: 1936407 - RNA, 19 nt, Homo sapiens
  misc_RNA (1)...(19): siRNA sense strand
gugccuggaugauugauag

SEQ ID NO: 1936408 - RNA, 19 nt, Homo sapiens
  misc_RNA (1)...(19): siRNA sense strand
cuucugaccuccgcuaaga

SEQ ID NO: 1936409 - RNA, 19 nt, Homo sapiens
  misc_RNA (1)...(19): siRNA sense strand
gggcugucacgucuugaua

SEQ ID NO: 1936410 - RNA, 19 nt, Homo sapiens
  misc_RNA (1)...(19): siRNA sense strand
ucucaugcauaguuguuga

SEQ ID NO: 1936411 - RNA, 19 nt, Homo sapiens
  misc_RNA (1)...(19): siRNA sense strand
uuaaugaagagcagaaaga

SEQ ID NO: 1936412 - RNA, 19 nt, Homo sapiens
  misc_RNA (1)...(19): siRNA sense strand
ggagugaugcugccucucu

SEQ ID NO: 1936413 - RNA, 19 nt, Homo sapiens
  misc_RNA (1)...(19): siRNA sense strand
caacacgagcugugaucuu

SEQ ID NO: 1936414 - RNA, 19 nt, Homo sapiens
  misc_RNA (1)...(19): siRNA sense strand
caaccaggccuugcagaug

SEQ ID NO: 1936415 - RNA, 19 nt, Homo sapiens
  misc_RNA (1)...(19): siRNA sense strand
gagugaugcugccucucuu

SEQ ID NO: 1936416 - RNA, 19 nt, Homo sapiens
  misc_RNA (1)...(19): siRNA sense strand
aaccaguacuugcaauuca

SEQ ID NO: 1936417 - RNA, 19 nt, Homo sapiens
  misc_RNA (1)...(19): siRNA sense strand
guaaccaguacuugcaauu

SEQ ID NO: 1936418 - RNA, 19 nt, Homo sapiens
  misc_RNA (1)...(19): siRNA sense strand
caauucacacuggcugaua

SEQ ID NO: 1936419 - RNA, 19 nt, Homo sapiens
  misc_RNA (1)...(19): siRNA sense strand
uaaugaagagcagaaagaa

SEQ ID NO: 1936420 - RNA, 19 nt, Homo sapiens
  misc_RNA (1)...(19): siRNA sense strand
ugcuacagaugaaugcuuu

SEQ ID NO: 1936421 - RNA, 19 nt, Homo sapiens
  misc_RNA (1)...(19): siRNA sense strand
ucuguaccauggagaaguu

SEQ ID NO: 1936422 - RNA, 19 nt, Homo sapiens
  misc_RNA (1)...(19): siRNA sense strand
gggaggaucaauauugcuu

SEQ ID NO: 1936423 - RNA, 19 nt, Homo sapiens
  misc_RNA (1)...(19): siRNA sense strand
gcaccacagccuauauaag

SEQ ID NO: 1936424 - RNA, 19 nt, Homo sapiens
  misc_RNA (1)...(19): siRNA sense strand
uggcugauauggcaacaag

SEQ ID NO: 1936425 - RNA, 19 nt, Homo sapiens
  misc_RNA (1)...(19): siRNA sense strand
aggaacagaggcacaaauu

SEQ ID NO: 1936426 - RNA, 19 nt, Homo sapiens
  misc_RNA (1)...(19): siRNA sense strand
caagcucuuugcuacagau

SEQ ID NO: 1936427 - RNA, 19 nt, Homo sapiens
  misc_RNA (1)...(19): siRNA sense strand
gagauggcuccaaauaugg

SEQ ID NO: 1936428 - RNA, 19 nt, Homo sapiens
  misc_RNA (1)...(19): siRNA sense strand
gggucuacauacaaacaga

SEQ ID NO: 1936429 - RNA, 19 nt, Homo sapiens
  misc_RNA (1)...(19): siRNA sense strand
aacacgagcugugaucuuc

SEQ ID NO: 1936430 - RNA, 19 nt, Homo sapiens
  misc_RNA (1)...(19): siRNA sense strand
caguggugcuggugaguca

SEQ ID NO: 1936431 - RNA, 19 nt, Homo sapiens
  misc_RNA (1)...(19): siRNA sense strand
gaggaacagaggcacaaau

SEQ ID NO: 1936432 - RNA, 19 nt, Homo sapiens
  misc_RNA (1)...(19): siRNA sense strand
caccacagccuauauaagc

SEQ ID NO: 1936433 - RNA, 19 nt, Homo sapiens
  misc_RNA (1)...(19): siRNA sense strand
gccaagcucuuugcuacag

SEQ ID NO: 1936434 - RNA, 19 nt, Homo sapiens
  misc_RNA (1)...(19): siRNA sense strand
augcauaguuguugagaag

SEQ ID NO: 1936435 - RNA, 19 nt, Homo sapiens
  misc_RNA (1)...(19): siRNA sense strand
aaacagggagaucauuaca

SEQ ID NO: 1936436 - RNA, 19 nt, Homo sapiens
  misc_RNA (1)...(19): siRNA sense strand
uaagaaacagggagaucau

SEQ ID NO: 1936437 - RNA, 19 nt, Homo sapiens
  misc_RNA (1)...(19): siRNA sense strand
ccaccagauucuagaaggu

SEQ ID NO: 1936438 - RNA, 19 nt, Homo sapiens
  misc_RNA (1)...(19): siRNA sense strand
cuaagaaacagggagauca

SEQ ID NO: 1936439 - RNA, 19 nt, Homo sapiens
  misc_RNA (1)...(19): siRNA sense strand
caccagauucuagaaggua

SEQ ID NO: 1936440 - RNA, 19 nt, Homo sapiens
  misc_RNA (1)...(19): siRNA sense strand
ccaagcucuuugcuacaga

SEQ ID NO: 1936441 - RNA, 19 nt, Homo sapiens
  misc_RNA (1)...(19): siRNA sense strand
uaaccaguacuugcaauuc

SEQ ID NO: 1936442 - RNA, 19 nt, Homo sapiens
  misc_RNA (1)...(19): siRNA sense strand
uauaagcauccacaacaug

SEQ ID NO: 1936443 - RNA, 19 nt, Homo sapiens
  misc_RNA (1)...(19): siRNA sense strand
aauucacacuggcugauau

SEQ ID NO: 1936444 - RNA, 19 nt, Homo sapiens
  misc_RNA (1)...(19): siRNA sense strand
ccaggaagugggagugaug

SEQ ID NO: 1936445 - RNA, 19 nt, Homo sapiens
  misc_RNA (1)...(19): siRNA sense strand
ucugggcugucacgucuug

SEQ ID NO: 1936446 - RNA, 19 nt, Homo sapiens
  misc_RNA (1)...(19): siRNA sense strand
gugaugaggauacugaucu

SEQ ID NO: 1936447 - RNA, 19 nt, Homo sapiens
  misc_RNA (1)...(19): siRNA sense strand
gggcuacggcuaccugaag

SEQ ID NO: 1936448 - RNA, 19 nt, Homo sapiens
  misc_RNA (1)...(19): siRNA sense strand
ccucagcuuuggcaagaag

SEQ ID NO: 1936449 - RNA, 19 nt, Homo sapiens
  misc_RNA (1)...(19): siRNA sense strand
ccuggaugauugauagcuu

SEQ ID NO: 1936450 - RNA, 19 nt, Homo sapiens
  misc_RNA (1)...(19): siRNA sense strand
gcaauucacacuggcugau

SEQ ID NO: 1936451 - RNA, 19 nt, Homo sapiens
  misc_RNA (1)...(19): siRNA sense strand
caugcauaguuguugagaa

SEQ ID NO: 1936452 - RNA, 19 nt, Homo sapiens
  misc_RNA (1)...(19): siRNA sense strand
caugggacuuaaugaagag

SEQ ID NO: 1936453 - RNA, 19 nt, Homo sapiens
  misc_RNA (1)...(19): siRNA sense strand
gaggauacugaucucuaga

SEQ ID NO: 1936454 - RNA, 19 nt, Homo sapiens
  misc_RNA (1)...(19): siRNA sense strand
caaugaagugaugaggaua

SEQ ID NO: 1936455 - RNA, 19 nt, Homo sapiens
  misc_RNA (1)...(19): siRNA sense strand
caucucaugcauaguuguu

SEQ ID NO: 1936456 - RNA, 19 nt, Homo sapiens
  misc_RNA (1)...(19): siRNA sense strand
cagagugggaccagaagga

SEQ ID NO: 1936457 - RNA, 19 nt, Homo sapiens
  misc_RNA (1)...(19): siRNA sense strand
ugauugauagcuucggaaa

SEQ ID NO: 1936458 - RNA, 19 nt, Homo sapiens
  misc_RNA (1)...(19): siRNA sense strand
ucaauguccggaagcaguu

SEQ ID NO: 1936459 - RNA, 19 nt, Homo sapiens
  misc_RNA (1)...(19): siRNA sense strand
gcuaagaaacagggagauc

SEQ ID NO: 1936460 - RNA, 19 nt, Homo sapiens
  misc_RNA (1)...(19): siRNA sense strand
gcccaccgcucuguaccau

SEQ ID NO: 1936461 - RNA, 19 nt, Homo sapiens
  misc_RNA (1)...(19): siRNA sense strand
ucugaccuccgcuaagaaa

SEQ ID NO: 1936462 - RNA, 19 nt, Homo sapiens
  misc_RNA (1)...(19): siRNA sense strand
gauucuagaagguagcaau

SEQ ID NO: 1936463 - RNA, 19 nt, Homo sapiens
  misc_RNA (1)...(19): siRNA sense strand
auauaagcauccacaacau

SEQ ID NO: 1936464 - RNA, 19 nt, Homo sapiens
  misc_RNA (1)...(19): siRNA sense strand
cacgagcugugaucuucga

SEQ ID NO: 1936465 - RNA, 19 nt, Homo sapiens
  misc_RNA (1)...(19): siRNA sense strand
gaacuucacucucuccuuu

SEQ ID NO: 1936466 - RNA, 19 nt, Homo sapiens
  misc_RNA (1)...(19): siRNA sense strand
ggacgcagcuugcaccaaa

SEQ ID NO: 1936467 - RNA, 19 nt, Homo sapiens
  misc_RNA (1)...(19): siRNA sense strand
gcaccaaauugcaaucuuu

SEQ ID NO: 1936468 - RNA, 19 nt, Homo sapiens
  misc_RNA (1)...(19): siRNA sense strand
caaagcgucuggaaaccaa

SEQ ID NO: 1936469 - RNA, 19 nt, Homo sapiens
  misc_RNA (1)...(19): siRNA sense strand
cgaagaagaagaagaaguu

SEQ ID NO: 1936470 - RNA, 19 nt, Homo sapiens
  misc_RNA (1)...(19): siRNA sense strand
guacaggguugcuggauac

SEQ ID NO: 1936471 - RNA, 19 nt, Homo sapiens
  misc_RNA (1)...(19): siRNA sense strand
gcaauuccaccacuccuau

SEQ ID NO: 1936472 - RNA, 19 nt, Homo sapiens
  misc_RNA (1)...(19): siRNA sense strand
ggaccgacacgcucaggaa

SEQ ID NO: 1936473 - RNA, 19 nt, Homo sapiens
  misc_RNA (1)...(19): siRNA sense strand
caggguugcuggauacuuc

SEQ ID NO: 1936474 - RNA, 19 nt, Homo sapiens
  misc_RNA (1)...(19): siRNA sense strand
uguacaggguugcuggaua

SEQ ID NO: 1936475 - RNA, 19 nt, Homo sapiens
  misc_RNA (1)...(19): siRNA sense strand
agaagaagaaguucaagga

SEQ ID NO: 1936476 - RNA, 19 nt, Homo sapiens
  misc_RNA (1)...(19): siRNA sense strand
cgugcugcauaaauacuua

SEQ ID NO: 1936477 - RNA, 19 nt, Homo sapiens
  misc_RNA (1)...(19): siRNA sense strand
agaagaagaagaaguucaa

SEQ ID NO: 1936478 - RNA, 19 nt, Homo sapiens
  misc_RNA (1)...(19): siRNA sense strand
ggaggcguguagcaacugu

SEQ ID NO: 1936479 - RNA, 19 nt, Homo sapiens
  misc_RNA (1)...(19): siRNA sense strand
guucucaugcuccuccaua

SEQ ID NO: 1936480 - RNA, 19 nt, Homo sapiens
  misc_RNA (1)...(19): siRNA sense strand
gaagaagaagaagaaguuc

SEQ ID NO: 1936481 - RNA, 19 nt, Homo sapiens
  misc_RNA (1)...(19): siRNA sense strand
ccugugaggcgaagaagaa

SEQ ID NO: 1936482 - RNA, 19 nt, Homo sapiens
  misc_RNA (1)...(19): siRNA sense strand
gcuggauacuucaccaaag

SEQ ID NO: 1936483 - RNA, 19 nt, Homo sapiens
  misc_RNA (1)...(19): siRNA sense strand
acaaugaggaaauggugua

SEQ ID NO: 1936484 - RNA, 19 nt, Homo sapiens
  misc_RNA (1)...(19): siRNA sense strand
gacacugccugcccuagag

SEQ ID NO: 1936485 - RNA, 19 nt, Homo sapiens
  misc_RNA (1)...(19): siRNA sense strand
uuucggaacuucacucucu

SEQ ID NO: 1936486 - RNA, 19 nt, Homo sapiens
  misc_RNA (1)...(19): siRNA sense strand
ugcagugggucuccuguga

SEQ ID NO: 1936487 - RNA, 19 nt, Homo sapiens
  misc_RNA (1)...(19): siRNA sense strand
gcugcucgcugaccaucug

SEQ ID NO: 1936488 - RNA, 19 nt, Homo sapiens
  misc_RNA (1)...(19): siRNA sense strand
cucccuggcuuuaucugua

SEQ ID NO: 1936489 - RNA, 19 nt, Homo sapiens
  misc_RNA (1)...(19): siRNA sense strand
ucaccaaagcgucuggaaa

SEQ ID NO: 1936490 - RNA, 19 nt, Homo sapiens
  misc_RNA (1)...(19): siRNA sense strand
gaccgacacgcucaggaaa

SEQ ID NO: 1936491 - RNA, 19 nt, Homo sapiens
  misc_RNA (1)...(19): siRNA sense strand
aaacccaccagcagcaauu

SEQ ID NO: 1936492 - RNA, 19 nt, Homo sapiens
  misc_RNA (1)...(19): siRNA sense strand
gugaggcgaagaagaagaa

SEQ ID NO: 1936493 - RNA, 19 nt, Homo sapiens
  misc_RNA (1)...(19): siRNA sense strand
gcugugcucagaauacuuc

SEQ ID NO: 1936494 - RNA, 19 nt, Homo sapiens
  misc_RNA (1)...(19): siRNA sense strand
uggcgucccugcucuucuu

SEQ ID NO: 1936495 - RNA, 19 nt, Homo sapiens
  misc_RNA (1)...(19): siRNA sense strand
caccaaagcgucuggaaac

SEQ ID NO: 1936496 - RNA, 19 nt, Homo sapiens
  misc_RNA (1)...(19): siRNA sense strand
acagcaaccugaccaaagc

SEQ ID NO: 1936497 - RNA, 19 nt, Homo sapiens
  misc_RNA (1)...(19): siRNA sense strand
gcgaagaagaagaagaagu

SEQ ID NO: 1936498 - RNA, 19 nt, Homo sapiens
  misc_RNA (1)...(19): siRNA sense strand
aggcgaagaagaagaagaa

SEQ ID NO: 1936499 - RNA, 19 nt, Homo sapiens
  misc_RNA (1)...(19): siRNA sense strand
gaccucgugcugcauaaau

SEQ ID NO: 1936500 - RNA, 19 nt, Homo sapiens
  misc_RNA (1)...(19): siRNA sense strand
ccacuaccaccaacaguac

SEQ ID NO: 1936501 - RNA, 19 nt, Homo sapiens
  misc_RNA (1)...(19): siRNA sense strand
gaagaagaagaaguucaag

SEQ ID NO: 1936502 - RNA, 19 nt, Homo sapiens
  misc_RNA (1)...(19): siRNA sense strand
ggaacuucacucucuccuu

SEQ ID NO: 1936503 - RNA, 19 nt, Homo sapiens
  misc_RNA (1)...(19): siRNA sense strand
acuccuauuuccaccacua

SEQ ID NO: 1936504 - RNA, 19 nt, Homo sapiens
  misc_RNA (1)...(19): siRNA sense strand
accucgugcugcauaaaua

SEQ ID NO: 1936505 - RNA, 19 nt, Homo sapiens
  misc_RNA (1)...(19): siRNA sense strand
gcggaagaguacucaaucc

SEQ ID NO: 1936506 - RNA, 19 nt, Homo sapiens
  misc_RNA (1)...(19): siRNA sense strand
caauuccaccacuccuauu

SEQ ID NO: 1936507 - RNA, 19 nt, Homo sapiens
  misc_RNA (1)...(19): siRNA sense strand
gaacagguuucuagaacug

SEQ ID NO: 1936508 - RNA, 19 nt, Homo sapiens
  misc_RNA (1)...(19): siRNA sense strand
gagaaacccucaaggaauc

SEQ ID NO: 1936509 - RNA, 19 nt, Homo sapiens
  misc_RNA (1)...(19): siRNA sense strand
caucagcccuucuaccuuu

SEQ ID NO: 1936510 - RNA, 19 nt, Homo sapiens
  misc_RNA (1)...(19): siRNA sense strand
gauauggcauucccuucua

SEQ ID NO: 1936511 - RNA, 19 nt, Homo sapiens
  misc_RNA (1)...(19): siRNA sense strand
ggcauucccuucuaccaua

SEQ ID NO: 1936512 - RNA, 19 nt, Homo sapiens
  misc_RNA (1)...(19): siRNA sense strand
gcaggaggcucagcaggaa

SEQ ID NO: 1936513 - RNA, 19 nt, Homo sapiens
  misc_RNA (1)...(19): siRNA sense strand
cagagaaacccucaaggaa

SEQ ID NO: 1936514 - RNA, 19 nt, Homo sapiens
  misc_RNA (1)...(19): siRNA sense strand
ccagagaaacccucaagga

SEQ ID NO: 1936515 - RNA, 19 nt, Homo sapiens
  misc_RNA (1)...(19): siRNA sense strand
gcacacaggcgcacuugca

SEQ ID NO: 1936516 - RNA, 19 nt, Homo sapiens
  misc_RNA (1)...(19): siRNA sense strand
cacaagcacucgccaccaa

SEQ ID NO: 1936517 - RNA, 19 nt, Homo sapiens
  misc_RNA (1)...(19): siRNA sense strand
gcugcagccuggagagcua

SEQ ID NO: 1936518 - RNA, 19 nt, Homo sapiens
  misc_RNA (1)...(19): siRNA sense strand
ggaucccacugucccuaaa

SEQ ID NO: 1936519 - RNA, 19 nt, Homo sapiens
  misc_RNA (1)...(19): siRNA sense strand
ggagugcucacgugguuga

SEQ ID NO: 1936520 - RNA, 19 nt, Homo sapiens
  misc_RNA (1)...(19): siRNA sense strand
agagaaacccucaaggaau

SEQ ID NO: 1936521 - RNA, 19 nt, Homo sapiens
  misc_RNA (1)...(19): siRNA sense strand
gcccagcuccugaacuuug

SEQ ID NO: 1936522 - RNA, 19 nt, Homo sapiens
  misc_RNA (1)...(19): siRNA sense strand
ccaagcaccugcggacaca

SEQ ID NO: 1936523 - RNA, 19 nt, Homo sapiens
  misc_RNA (1)...(19): siRNA sense strand
gauccaggccugaagaaac

SEQ ID NO: 1936524 - RNA, 19 nt, Homo sapiens
  misc_RNA (1)...(19): siRNA sense strand
ggccagcacucugugauac

SEQ ID NO: 1936525 - RNA, 19 nt, Homo sapiens
  misc_RNA (1)...(19): siRNA sense strand
gcauucccuucuaccauag

SEQ ID NO: 1936526 - RNA, 19 nt, Homo sapiens
  misc_RNA (1)...(19): siRNA sense strand
gcuccugaacuuuguguau

SEQ ID NO: 1936527 - RNA, 19 nt, Homo sapiens
  misc_RNA (1)...(19): siRNA sense strand
gcacuaccgaguccacaca

SEQ ID NO: 1936528 - RNA, 19 nt, Homo sapiens
  misc_RNA (1)...(19): siRNA sense strand
ucaggaggagccagagaaa

SEQ ID NO: 1936529 - RNA, 19 nt, Homo sapiens
  misc_RNA (1)...(19): siRNA sense strand
gaacuggugggagagaaca

SEQ ID NO: 1936530 - RNA, 19 nt, Homo sapiens
  misc_RNA (1)...(19): siRNA sense strand
uugcccagcuccugaacuu

SEQ ID NO: 1936531 - RNA, 19 nt, Homo sapiens
  misc_RNA (1)...(19): siRNA sense strand
gcucugaucggcugguaca

SEQ ID NO: 1936532 - RNA, 19 nt, Homo sapiens
  misc_RNA (1)...(19): siRNA sense strand
caagcacucgccaccaaga

SEQ ID NO: 1936533 - RNA, 19 nt, Homo sapiens
  misc_RNA (1)...(19): siRNA sense strand
gcaucagcccuucuaccuu

SEQ ID NO: 1936534 - RNA, 19 nt, Homo sapiens
  misc_RNA (1)...(19): siRNA sense strand
gggagcagaugggaagcau

SEQ ID NO: 1936535 - RNA, 19 nt, Homo sapiens
  misc_RNA (1)...(19): siRNA sense strand
ccagauccaggccugaaga

SEQ ID NO: 1936536 - RNA, 19 nt, Homo sapiens
  misc_RNA (1)...(19): siRNA sense strand
caaccugugcgggucauga

SEQ ID NO: 1936537 - RNA, 19 nt, Homo sapiens
  misc_RNA (1)...(19): siRNA sense strand
auccaggccugaagaaaca

SEQ ID NO: 1936538 - RNA, 19 nt, Homo sapiens
  misc_RNA (1)...(19): siRNA sense strand
gauggaagagucugaucag

SEQ ID NO: 1936539 - RNA, 19 nt, Homo sapiens
  misc_RNA (1)...(19): siRNA sense strand
ggagauggaagagucugau

SEQ ID NO: 1936540 - RNA, 19 nt, Homo sapiens
  misc_RNA (1)...(19): siRNA sense strand
uagaacuggugggagagaa

SEQ ID NO: 1936541 - RNA, 19 nt, Homo sapiens
  misc_RNA (1)...(19): siRNA sense strand
cuccugaacuuuguguaug

SEQ ID NO: 1936542 - RNA, 19 nt, Homo sapiens
  misc_RNA (1)...(19): siRNA sense strand
cggccagcacucugugaua

SEQ ID NO: 1936543 - RNA, 19 nt, Homo sapiens
  misc_RNA (1)...(19): siRNA sense strand
gcacucugugauacucuga

SEQ ID NO: 1936544 - RNA, 19 nt, Homo sapiens
  misc_RNA (1)...(19): siRNA sense strand
ggaagaagcagacccagaa

SEQ ID NO: 1936545 - RNA, 19 nt, Homo sapiens
  misc_RNA (1)...(19): siRNA sense strand
gcucugcccuaugaacuuu

SEQ ID NO: 1936546 - RNA, 19 nt, Homo sapiens
  misc_RNA (1)...(19): siRNA sense strand
gcagagcccugaggaugau

SEQ ID NO: 1936547 - RNA, 19 nt, Homo sapiens
  misc_RNA (1)...(19): siRNA sense strand
ggagagagaucgggaagcu

SEQ ID NO: 1936548 - RNA, 19 nt, Homo sapiens
  misc_RNA (1)...(19): siRNA sense strand
gcucagagaagucggaaga

SEQ ID NO: 1936549 - RNA, 19 nt, Homo sapiens
  misc_RNA (1)...(19): siRNA sense strand
ugaaggagcacgagaagau

SEQ ID NO: 1936550 - RNA, 19 nt, Homo sapiens
  misc_RNA (1)...(19): siRNA sense strand
cugcugcucugcccuauga

SEQ ID NO: 1936551 - RNA, 19 nt, Homo sapiens
  misc_RNA (1)...(19): siRNA sense strand
ugacagaggcacugaagga

SEQ ID NO: 1936552 - RNA, 19 nt, Homo sapiens
  misc_RNA (1)...(19): siRNA sense strand
caagcuccaugaggaauau

SEQ ID NO: 1936553 - RNA, 19 nt, Homo sapiens
  misc_RNA (1)...(19): siRNA sense strand
ccgaguugcugcucagaga

SEQ ID NO: 1936554 - RNA, 19 nt, Homo sapiens
  misc_RNA (1)...(19): siRNA sense strand
ugacagaggagcugaagca

SEQ ID NO: 1936555 - RNA, 19 nt, Homo sapiens
  misc_RNA (1)...(19): siRNA sense strand
ucagagaagucggaagaag

SEQ ID NO: 1936556 - RNA, 19 nt, Homo sapiens
  misc_RNA (1)...(19): siRNA sense strand
gaaggagcacgagaagaug

SEQ ID NO: 1936557 - RNA, 19 nt, Homo sapiens
  misc_RNA (1)...(19): siRNA sense strand
ugacaagcuccaugaggaa

SEQ ID NO: 1936558 - RNA, 19 nt, Homo sapiens
  misc_RNA (1)...(19): siRNA sense strand
gacaggaagguccgaagga

SEQ ID NO: 1936559 - RNA, 19 nt, Homo sapiens
  misc_RNA (1)...(19): siRNA sense strand
gaagaagcagacccagaag

SEQ ID NO: 1936560 - RNA, 19 nt, Homo sapiens
  misc_RNA (1)...(19): siRNA sense strand
acaagcuccaugaggaaua

SEQ ID NO: 1936561 - RNA, 19 nt, Homo sapiens
  misc_RNA (1)...(19): siRNA sense strand
augagagccuggagcaaga

SEQ ID NO: 1936562 - RNA, 19 nt, Homo sapiens
  misc_RNA (1)...(19): siRNA sense strand
acaccaugcugcggagaga

SEQ ID NO: 1936563 - RNA, 19 nt, Homo sapiens
  misc_RNA (1)...(19): siRNA sense strand
gggcagaccuugacacuua

SEQ ID NO: 1936564 - RNA, 19 nt, Homo sapiens
  misc_RNA (1)...(19): siRNA sense strand
gaaguaacauugccuuuau

SEQ ID NO: 1936565 - RNA, 19 nt, Homo sapiens
  misc_RNA (1)...(19): siRNA sense strand
gaaaggugcuuacgaacaa

SEQ ID NO: 1936566 - RNA, 19 nt, Homo sapiens
  misc_RNA (1)...(19): siRNA sense strand
gaucuugcaucgagaagua

SEQ ID NO: 1936567 - RNA, 19 nt, Homo sapiens
  misc_RNA (1)...(19): siRNA sense strand
caacaagacuacaucagaa

SEQ ID NO: 1936568 - RNA, 19 nt, Homo sapiens
  misc_RNA (1)...(19): siRNA sense strand
guacagauguuugcaaaga

SEQ ID NO: 1936569 - RNA, 19 nt, Homo sapiens
  misc_RNA (1)...(19): siRNA sense strand
gcauggaccucuuaggaaa

SEQ ID NO: 1936570 - RNA, 19 nt, Homo sapiens
  misc_RNA (1)...(19): siRNA sense strand
gacaggagauggaguaaau

SEQ ID NO: 1936571 - RNA, 19 nt, Homo sapiens
  misc_RNA (1)...(19): siRNA sense strand
ggaguuggcuauaaucaau

SEQ ID NO: 1936572 - RNA, 19 nt, Homo sapiens
  misc_RNA (1)...(19): siRNA sense strand
gcaagugaauuaccaguca

SEQ ID NO: 1936573 - RNA, 19 nt, Homo sapiens
  misc_RNA (1)...(19): siRNA sense strand
gaaaagauauccuggaaau

SEQ ID NO: 1936574 - RNA, 19 nt, Homo sapiens
  misc_RNA (1)...(19): siRNA sense strand
cauaaugucugcaaucgaa

SEQ ID NO: 1936575 - RNA, 19 nt, Homo sapiens
  misc_RNA (1)...(19): siRNA sense strand
gaacacugacgaagaauga

SEQ ID NO: 1936576 - RNA, 19 nt, Homo sapiens
  misc_RNA (1)...(19): siRNA sense strand
gcagagagauguguaccaa

SEQ ID NO: 1936577 - RNA, 19 nt, Homo sapiens
  misc_RNA (1)...(19): siRNA sense strand
agaaauagaugcaauggau

SEQ ID NO: 1936578 - RNA, 19 nt, Homo sapiens
  misc_RNA (1)...(19): siRNA sense strand
gagaagaaauagaugcaau

SEQ ID NO: 1936579 - RNA, 19 nt, Homo sapiens
  misc_RNA (1)...(19): siRNA sense strand
uagaguuccugcugacuua

SEQ ID NO: 1936580 - RNA, 19 nt, Homo sapiens
  misc_RNA (1)...(19): siRNA sense strand
uaugaaaggugcuuacgaa

SEQ ID NO: 1936581 - RNA, 19 nt, Homo sapiens
  misc_RNA (1)...(19): siRNA sense strand
gugcaaugaugcuguaauu

SEQ ID NO: 1936582 - RNA, 19 nt, Homo sapiens
  misc_RNA (1)...(19): siRNA sense strand
gcaaugaugcuguaauuag

SEQ ID NO: 1936583 - RNA, 19 nt, Homo sapiens
  misc_RNA (1)...(19): siRNA sense strand
caaugaugcuguaauuaga

SEQ ID NO: 1936584 - RNA, 19 nt, Homo sapiens
  misc_RNA (1)...(19): siRNA sense strand
cauaguggcagaaauuaua

SEQ ID NO: 1936585 - RNA, 19 nt, Homo sapiens
  misc_RNA (1)...(19): siRNA sense strand
ucagaauggucuaaacaaa

SEQ ID NO: 1936586 - RNA, 19 nt, Homo sapiens
  misc_RNA (1)...(19): siRNA sense strand
gagauuggacucugcagua

SEQ ID NO: 1936587 - RNA, 19 nt, Homo sapiens
  misc_RNA (1)...(19): siRNA sense strand
ggauaaagaugucauucgu

SEQ ID NO: 1936588 - RNA, 19 nt, Homo sapiens
  misc_RNA (1)...(19): siRNA sense strand
gcuguaaugugauuuguuc

SEQ ID NO: 1936589 - RNA, 19 nt, Homo sapiens
  misc_RNA (1)...(19): siRNA sense strand
gcacgaguauagcagcauu

SEQ ID NO: 1936590 - RNA, 19 nt, Homo sapiens
  misc_RNA (1)...(19): siRNA sense strand
uuaagucgcuacagaagaa

SEQ ID NO: 1936591 - RNA, 19 nt, Homo sapiens
  misc_RNA (1)...(19): siRNA sense strand
uaccaaagguugcaguauu

SEQ ID NO: 1936592 - RNA, 19 nt, Homo sapiens
  misc_RNA (1)...(19): siRNA sense strand
ggucagauguggcaaagca

SEQ ID NO: 1936593 - RNA, 19 nt, Homo sapiens
  misc_RNA (1)...(19): siRNA sense strand
gaguagaaccaguggauaa

SEQ ID NO: 1936594 - RNA, 19 nt, Homo sapiens
  misc_RNA (1)...(19): siRNA sense strand
gacuguuacucacauauuu

SEQ ID NO: 1936595 - RNA, 19 nt, Homo sapiens
  misc_RNA (1)...(19): siRNA sense strand
agaauggucuaaacaaaug

SEQ ID NO: 1936596 - RNA, 19 nt, Homo sapiens
  misc_RNA (1)...(19): siRNA sense strand
guggauggcuguuaagugu

SEQ ID NO: 1936597 - RNA, 19 nt, Homo sapiens
  misc_RNA (1)...(19): siRNA sense strand
ucaggaauaucguucagaa

SEQ ID NO: 1936598 - RNA, 19 nt, Homo sapiens
  misc_RNA (1)...(19): siRNA sense strand
ggucucaccucaucagugu

SEQ ID NO: 1936599 - RNA, 19 nt, Homo sapiens
  misc_RNA (1)...(19): siRNA sense strand
ggacagcugacauuucuug

SEQ ID NO: 1936600 - RNA, 19 nt, Homo sapiens
  misc_RNA (1)...(19): siRNA sense strand
gaaaagggccauugugaaa

SEQ ID NO: 1936601 - RNA, 19 nt, Homo sapiens
  misc_RNA (1)...(19): siRNA sense strand
gagcauggaccucuuagga

SEQ ID NO: 1936602 - RNA, 19 nt, Homo sapiens
  misc_RNA (1)...(19): siRNA sense strand
gcuguuagcagaauuguug

SEQ ID NO: 1936603 - RNA, 19 nt, Homo sapiens
  misc_RNA (1)...(19): siRNA sense strand
cauguugguuggcugguua

SEQ ID NO: 1936604 - RNA, 19 nt, Homo sapiens
  misc_RNA (1)...(19): siRNA sense strand
ggagauggaguaaaugaug

SEQ ID NO: 1936605 - RNA, 19 nt, Homo sapiens
  misc_RNA (1)...(19): siRNA sense strand
agacaaugauuccuguauu

SEQ ID NO: 1936606 - RNA, 19 nt, Homo sapiens
  misc_RNA (1)...(19): siRNA sense strand
gaagaauugaguaaacuug

SEQ ID NO: 1936607 - RNA, 19 nt, Homo sapiens
  misc_RNA (1)...(19): siRNA sense strand
cgaagaggguaaagggauu

SEQ ID NO: 1936608 - RNA, 19 nt, Homo sapiens
  misc_RNA (1)...(19): siRNA sense strand
gaaggaaaauuggagcaua

SEQ ID NO: 1936609 - RNA, 19 nt, Homo sapiens
  misc_RNA (1)...(19): siRNA sense strand
gauuacaccucgagacaca

SEQ ID NO: 1936610 - RNA, 19 nt, Homo sapiens
  misc_RNA (1)...(19): siRNA sense strand
ggacagaccagagauuugu

SEQ ID NO: 1936611 - RNA, 19 nt, Homo sapiens
  misc_RNA (1)...(19): siRNA sense strand
caaaggguguugucauugg

SEQ ID NO: 1936612 - RNA, 19 nt, Homo sapiens
  misc_RNA (1)...(19): siRNA sense strand
gcaauacuuaucguuguua

SEQ ID NO: 1936613 - RNA, 19 nt, Homo sapiens
  misc_RNA (1)...(19): siRNA sense strand
caacaaugaccuucacaug

SEQ ID NO: 1936614 - RNA, 19 nt, Homo sapiens
  misc_RNA (1)...(19): siRNA sense strand
gauaaagaugucauucgua

SEQ ID NO: 1936615 - RNA, 19 nt, Homo sapiens
  misc_RNA (1)...(19): siRNA sense strand
caaagaggcagcagacaug

SEQ ID NO: 1936616 - RNA, 19 nt, Homo sapiens
  misc_RNA (1)...(19): siRNA sense strand
guaaugugauuuguucaga

SEQ ID NO: 1936617 - RNA, 19 nt, Homo sapiens
  misc_RNA (1)...(19): siRNA sense strand
gacgcuagcucuugguguu

SEQ ID NO: 1936618 - RNA, 19 nt, Homo sapiens
  misc_RNA (1)...(19): siRNA sense strand
aaagauauccuggaaaugu

SEQ ID NO: 1936619 - RNA, 19 nt, Homo sapiens
  misc_RNA (1)...(19): siRNA sense strand
caucaugggacaauuacua

SEQ ID NO: 1936620 - RNA, 19 nt, Homo sapiens
  misc_RNA (1)...(19): siRNA sense strand
ggacucugcaguaauagaa

SEQ ID NO: 1936621 - RNA, 19 nt, Homo sapiens
  misc_RNA (1)...(19): siRNA sense strand
cagcagcuuucacaaauag

SEQ ID NO: 1936622 - RNA, 19 nt, Homo sapiens
  misc_RNA (1)...(19): siRNA sense strand
ucagcagcuuucacaaaua

SEQ ID NO: 1936623 - RNA, 19 nt, Homo sapiens
  misc_RNA (1)...(19): siRNA sense strand
gaaaugacuguuacucaca

SEQ ID NO: 1936624 - RNA, 19 nt, Homo sapiens
  misc_RNA (1)...(19): siRNA sense strand
uuucauggcuggaauaagu

SEQ ID NO: 1936625 - RNA, 19 nt, Homo sapiens
  misc_RNA (1)...(19): siRNA sense strand
cauacuggaucuguuguuu

SEQ ID NO: 1936626 - RNA, 19 nt, Homo sapiens
  misc_RNA (1)...(19): siRNA sense strand
uagaaccaguggauaaaga

SEQ ID NO: 1936627 - RNA, 19 nt, Homo sapiens
  misc_RNA (1)...(19): siRNA sense strand
ccagagauuuguuuuauga

SEQ ID NO: 1936628 - RNA, 19 nt, Homo sapiens
  misc_RNA (1)...(19): siRNA sense strand
ggauggcuguuaagugugu

SEQ ID NO: 1936629 - RNA, 19 nt, Homo sapiens
  misc_RNA (1)...(19): siRNA sense strand
uuacuggaguuggcuauaa

SEQ ID NO: 1936630 - RNA, 19 nt, Homo sapiens
  misc_RNA (1)...(19): siRNA sense strand
gggcugcuguaaugugauu

SEQ ID NO: 1936631 - RNA, 19 nt, Homo sapiens
  misc_RNA (1)...(19): siRNA sense strand
ccaagucuguguuugagau

SEQ ID NO: 1936632 - RNA, 19 nt, Homo sapiens
  misc_RNA (1)...(19): siRNA sense strand
gcaaagaggcagcagacau

SEQ ID NO: 1936633 - RNA, 19 nt, Homo sapiens
  misc_RNA (1)...(19): siRNA sense strand
agaaguaacauugccuuua

SEQ ID NO: 1936634 - RNA, 19 nt, Homo sapiens
  misc_RNA (1)...(19): siRNA sense strand
gugcauaguggcagaaauu

SEQ ID NO: 1936635 - RNA, 19 nt, Homo sapiens
  misc_RNA (1)...(19): siRNA sense strand
ggacuuuguuugucuucug

SEQ ID NO: 1936636 - RNA, 19 nt, Homo sapiens
  misc_RNA (1)...(19): siRNA sense strand
cagcugagcacgaguauag

SEQ ID NO: 1936637 - RNA, 19 nt, Homo sapiens
  misc_RNA (1)...(19): siRNA sense strand
accaaagguugcaguauuu

SEQ ID NO: 1936638 - RNA, 19 nt, Homo sapiens
  misc_RNA (1)...(19): siRNA sense strand
ccucaggaguaucaauaaa

SEQ ID NO: 1936639 - RNA, 19 nt, Homo sapiens
  misc_RNA (1)...(19): siRNA sense strand
agagagauguguaccaaca

SEQ ID NO: 1936640 - RNA, 19 nt, Homo sapiens
  misc_RNA (1)...(19): siRNA sense strand
ggaagugauuguugauggu

SEQ ID NO: 1936641 - RNA, 19 nt, Homo sapiens
  misc_RNA (1)...(19): siRNA sense strand
acucugggcugcuguaaug

SEQ ID NO: 1936642 - RNA, 19 nt, Homo sapiens
  misc_RNA (1)...(19): siRNA sense strand
ggcaauacuuaucguuguu

SEQ ID NO: 1936643 - RNA, 19 nt, Homo sapiens
  misc_RNA (1)...(19): siRNA sense strand
ucagagccuuggaguagaa

SEQ ID NO: 1936644 - RNA, 19 nt, Homo sapiens
  misc_RNA (1)...(19): siRNA sense strand
cagcagacaugauccuagu

SEQ ID NO: 1936645 - RNA, 19 nt, Homo sapiens
  misc_RNA (1)...(19): siRNA sense strand
uggaguaaaugaugcaguu

SEQ ID NO: 1936646 - RNA, 19 nt, Homo sapiens
  misc_RNA (1)...(19): siRNA sense strand
gcagcuuucacaaauagua

SEQ ID NO: 1936647 - RNA, 19 nt, Homo sapiens
  misc_RNA (1)...(19): siRNA sense strand
ggugauacaguuugccuuu

SEQ ID NO: 1936648 - RNA, 19 nt, Homo sapiens
  misc_RNA (1)...(19): siRNA sense strand
cuggaucuguuguuucuuu

SEQ ID NO: 1936649 - RNA, 19 nt, Homo sapiens
  misc_RNA (1)...(19): siRNA sense strand
auuggacucugcaguaaua

SEQ ID NO: 1936650 - RNA, 19 nt, Homo sapiens
  misc_RNA (1)...(19): siRNA sense strand
gaguauagcagcauuaacu

SEQ ID NO: 1936651 - RNA, 19 nt, Homo sapiens
  misc_RNA (1)...(19): siRNA sense strand
ucaacaagacuacaucaga

SEQ ID NO: 1936652 - RNA, 19 nt, Homo sapiens
  misc_RNA (1)...(19): siRNA sense strand
gcaaaggguguugucauug

SEQ ID NO: 1936653 - RNA, 19 nt, Homo sapiens
  misc_RNA (1)...(19): siRNA sense strand
gaccagagauuuguuuuau

SEQ ID NO: 1936654 - RNA, 19 nt, Homo sapiens
  misc_RNA (1)...(19): siRNA sense strand
gauuguugauggugauguu

SEQ ID NO: 1936655 - RNA, 19 nt, Homo sapiens
  misc_RNA (1)...(19): siRNA sense strand
agaaugaaaugacuguuac

SEQ ID NO: 1936656 - RNA, 19 nt, Homo sapiens
  misc_RNA (1)...(19): siRNA sense strand
cuggaacacugacgaagaa

SEQ ID NO: 1936657 - RNA, 19 nt, Homo sapiens
  misc_RNA (1)...(19): siRNA sense strand
gcaucgagaaguaacauug

SEQ ID NO: 1936658 - RNA, 19 nt, Homo sapiens
  misc_RNA (1)...(19): siRNA sense strand
gaaaggagcagggaaaaga

SEQ ID NO: 1936659 - RNA, 19 nt, Homo sapiens
  misc_RNA (1)...(19): siRNA sense strand
gggaaaagauauccuggaa

SEQ ID NO: 1936660 - RNA, 19 nt, Homo sapiens
  misc_RNA (1)...(19): siRNA sense strand
gguauaauaggaaucauca

SEQ ID NO: 1936661 - RNA, 19 nt, Homo sapiens
  misc_RNA (1)...(19): siRNA sense strand
gaagaggguaaagggauuu

SEQ ID NO: 1936662 - RNA, 19 nt, Homo sapiens
  misc_RNA (1)...(19): siRNA sense strand
guauagcagcauuaacuuu

SEQ ID NO: 1936663 - RNA, 19 nt, Homo sapiens
  misc_RNA (1)...(19): siRNA sense strand
ggaaacaccuucaggagaa

SEQ ID NO: 1936664 - RNA, 19 nt, Homo sapiens
  misc_RNA (1)...(19): siRNA sense strand
ugaagaagaugaugaaguu

SEQ ID NO: 1936665 - RNA, 19 nt, Homo sapiens
  misc_RNA (1)...(19): siRNA sense strand
gaaguuguggcaaugauua

SEQ ID NO: 1936666 - RNA, 19 nt, Homo sapiens
  misc_RNA (1)...(19): siRNA sense strand
uagaacagguuauggauga

SEQ ID NO: 1936667 - RNA, 19 nt, Homo sapiens
  misc_RNA (1)...(19): siRNA sense strand
gaaaccagauauuuaugca

SEQ ID NO: 1936668 - RNA, 19 nt, Homo sapiens
  misc_RNA (1)...(19): siRNA sense strand
gaccagauuucaucacugu

SEQ ID NO: 1936669 - RNA, 19 nt, Homo sapiens
  misc_RNA (1)...(19): siRNA sense strand
agacuggaauuuacugaaa

SEQ ID NO: 1936670 - RNA, 19 nt, Homo sapiens
  misc_RNA (1)...(19): siRNA sense strand
caacaaucauggacuucuu

SEQ ID NO: 1936671 - RNA, 19 nt, Homo sapiens
  misc_RNA (1)...(19): siRNA sense strand
ggagguagaaggcguagaa

SEQ ID NO: 1936672 - RNA, 19 nt, Homo sapiens
  misc_RNA (1)...(19): siRNA sense strand
agacaaggaccauggauuu

SEQ ID NO: 1936673 - RNA, 19 nt, Homo sapiens
  misc_RNA (1)...(19): siRNA sense strand
gcuaggcaguuauuuagga

SEQ ID NO: 1936674 - RNA, 19 nt, Homo sapiens
  misc_RNA (1)...(19): siRNA sense strand
uggcaaugauuaaggaauu

SEQ ID NO: 1936675 - RNA, 19 nt, Homo sapiens
  misc_RNA (1)...(19): siRNA sense strand
ugcccuaguucaaucauua

SEQ ID NO: 1936676 - RNA, 19 nt, Homo sapiens
  misc_RNA (1)...(19): siRNA sense strand
gcaguuauuuaggauugaa

SEQ ID NO: 1936677 - RNA, 19 nt, Homo sapiens
  misc_RNA (1)...(19): siRNA sense strand
gaagcaggaucugaagaag

SEQ ID NO: 1936678 - RNA, 19 nt, Homo sapiens
  misc_RNA (1)...(19): siRNA sense strand
ggccaacugugcaggaaga

SEQ ID NO: 1936679 - RNA, 19 nt, Homo sapiens
  misc_RNA (1)...(19): siRNA sense strand
cuuugaagauggcauugua

SEQ ID NO: 1936680 - RNA, 19 nt, Homo sapiens
  misc_RNA (1)...(19): siRNA sense strand
uguaccagcugcccuaguu

SEQ ID NO: 1936681 - RNA, 19 nt, Homo sapiens
  misc_RNA (1)...(19): siRNA sense strand
gagacaaggaccauggauu

SEQ ID NO: 1936682 - RNA, 19 nt, Homo sapiens
  misc_RNA (1)...(19): siRNA sense strand
gaaggcguagaacagguua

SEQ ID NO: 1936683 - RNA, 19 nt, Homo sapiens
  misc_RNA (1)...(19): siRNA sense strand
ccagauauuuaugcaacaa

SEQ ID NO: 1936684 - RNA, 19 nt, Homo sapiens
  misc_RNA (1)...(19): siRNA sense strand
agaacaugcugcaguuuua

SEQ ID NO: 1936685 - RNA, 19 nt, Homo sapiens
  misc_RNA (1)...(19): siRNA sense strand
ccaaauccaaacagcuuaa

SEQ ID NO: 1936686 - RNA, 19 nt, Homo sapiens
  misc_RNA (1)...(19): siRNA sense strand
gaacagguuauggaugaug

SEQ ID NO: 1936687 - RNA, 19 nt, Homo sapiens
  misc_RNA (1)...(19): siRNA sense strand
agaagaugaugaaguugug

SEQ ID NO: 1936688 - RNA, 19 nt, Homo sapiens
  misc_RNA (1)...(19): siRNA sense strand
ggaauuguuagauacuaga

SEQ ID NO: 1936689 - RNA, 19 nt, Homo sapiens
  misc_RNA (1)...(19): siRNA sense strand
cagcugcccuaguucaauc

SEQ ID NO: 1936690 - RNA, 19 nt, Homo sapiens
  misc_RNA (1)...(19): siRNA sense strand
uuucaucacugucacaaag

SEQ ID NO: 1936691 - RNA, 19 nt, Homo sapiens
  misc_RNA (1)...(19): siRNA sense strand
aggcaguuauuuaggauug

SEQ ID NO: 1936692 - RNA, 19 nt, Homo sapiens
  misc_RNA (1)...(19): siRNA sense strand
cuaguucaaucauuacucu

SEQ ID NO: 1936693 - RNA, 19 nt, Homo sapiens
  misc_RNA (1)...(19): siRNA sense strand
agaagcaggaucugaagaa

SEQ ID NO: 1936694 - RNA, 19 nt, Homo sapiens
  misc_RNA (1)...(19): siRNA sense strand
caagauaccccaaauccaa

SEQ ID NO: 1936695 - RNA, 19 nt, Homo sapiens
  misc_RNA (1)...(19): siRNA sense strand
gguagaaggcguagaacag

SEQ ID NO: 1936696 - RNA, 19 nt, Homo sapiens
  misc_RNA (1)...(19): siRNA sense strand
gagaagcaggaucugaaga

SEQ ID NO: 1936697 - RNA, 19 nt, Homo sapiens
  misc_RNA (1)...(19): siRNA sense strand
gaagaagaugaugaaguug

SEQ ID NO: 1936698 - RNA, 19 nt, Homo sapiens
  misc_RNA (1)...(19): siRNA sense strand
gaaacuccaggguucuugu

SEQ ID NO: 1936699 - RNA, 19 nt, Homo sapiens
  misc_RNA (1)...(19): siRNA sense strand
ggagaagcaggaucugaag

SEQ ID NO: 1936700 - RNA, 19 nt, Homo sapiens
  misc_RNA (1)...(19): siRNA sense strand
gaagauggaggggauguaa

SEQ ID NO: 1936701 - RNA, 19 nt, Homo sapiens
  misc_RNA (1)...(19): siRNA sense strand
ugaugaaguuguggcaaug

SEQ ID NO: 1936702 - RNA, 19 nt, Homo sapiens
  misc_RNA (1)...(19): siRNA sense strand
gcguagaacagguuaugga

SEQ ID NO: 1936703 - RNA, 19 nt, Homo sapiens
  misc_RNA (1)...(19): siRNA sense strand
ccagauuucaucacuguca

SEQ ID NO: 1936704 - RNA, 19 nt, Homo sapiens
  misc_RNA (1)...(19): siRNA sense strand
aaauggaauucagaacaug

SEQ ID NO: 1936705 - RNA, 19 nt, Homo sapiens
  misc_RNA (1)...(19): siRNA sense strand
cuucuuugcaucuggcuua

SEQ ID NO: 1936706 - RNA, 19 nt, Homo sapiens
  misc_RNA (1)...(19): siRNA sense strand
gaugaaguuguggcaauga

SEQ ID NO: 1936707 - RNA, 19 nt, Homo sapiens
  misc_RNA (1)...(19): siRNA sense strand
caaauccaaacagcuuaaa

SEQ ID NO: 1936708 - RNA, 19 nt, Homo sapiens
  misc_RNA (1)...(19): siRNA sense strand
aaacuccaggguucuugua

SEQ ID NO: 1936709 - RNA, 19 nt, Homo sapiens
  misc_RNA (1)...(19): siRNA sense strand
ggaaaaccaguucuugaga

SEQ ID NO: 1936710 - RNA, 19 nt, Homo sapiens
  misc_RNA (1)...(19): siRNA sense strand
ucaucacugucacaaagga

SEQ ID NO: 1936711 - RNA, 19 nt, Homo sapiens
  misc_RNA (1)...(19): siRNA sense strand
aacagguuauggaugauga

SEQ ID NO: 1936712 - RNA, 19 nt, Homo sapiens
  misc_RNA (1)...(19): siRNA sense strand
cuggcuaggcaguuauuua

SEQ ID NO: 1936713 - RNA, 19 nt, Homo sapiens
  misc_RNA (1)...(19): siRNA sense strand
gaauuuacugaaaccagau

SEQ ID NO: 1936714 - RNA, 19 nt, Homo sapiens
  misc_RNA (1)...(19): siRNA sense strand
gcaacaaucauggacuucu

SEQ ID NO: 1936715 - RNA, 19 nt, Homo sapiens
  misc_RNA (1)...(19): siRNA sense strand
augaagaauuagacuggaa

SEQ ID NO: 1936716 - RNA, 19 nt, Homo sapiens
  misc_RNA (1)...(19): siRNA sense strand
uucagaacaugcugcaguu

SEQ ID NO: 1936717 - RNA, 19 nt, Homo sapiens
  misc_RNA (1)...(19): siRNA sense strand
cuaggcaguuauuuaggau

SEQ ID NO: 1936718 - RNA, 19 nt, Homo sapiens
  misc_RNA (1)...(19): siRNA sense strand
caccccagcugcagcauuu

SEQ ID NO: 1936719 - RNA, 19 nt, Homo sapiens
  misc_RNA (1)...(19): siRNA sense strand
gacuggaauuuacugaaac

SEQ ID NO: 1936720 - RNA, 19 nt, Homo sapiens
  misc_RNA (1)...(19): siRNA sense strand
aaucauggacuucuuugca

SEQ ID NO: 1936721 - RNA, 19 nt, Homo sapiens
  misc_RNA (1)...(19): siRNA sense strand
uggcuaggcaguuauuuag

SEQ ID NO: 1936722 - RNA, 19 nt, Homo sapiens
  misc_RNA (1)...(19): siRNA sense strand
ugaaguuguggcaaugauu

SEQ ID NO: 1936723 - RNA, 19 nt, Homo sapiens
  misc_RNA (1)...(19): siRNA sense strand
aagaagaugaugaaguugu

SEQ ID NO: 1936724 - RNA, 19 nt, Homo sapiens
  misc_RNA (1)...(19): siRNA sense strand
ugaagaauuagacuggaau

SEQ ID NO: 1936725 - RNA, 19 nt, Homo sapiens
  misc_RNA (1)...(19): siRNA sense strand
aauccaaacagcuuaaagu

SEQ ID NO: 1936726 - RNA, 19 nt, Homo sapiens
  misc_RNA (1)...(19): siRNA sense strand
aggagaagcaggaucugaa

SEQ ID NO: 1936727 - RNA, 19 nt, Homo sapiens
  misc_RNA (1)...(19): siRNA sense strand
augcaacaaucauggacuu

SEQ ID NO: 1936728 - RNA, 19 nt, Homo sapiens
  misc_RNA (1)...(19): siRNA sense strand
ggcaguuauuuaggauuga

SEQ ID NO: 1936729 - RNA, 19 nt, Homo sapiens
  misc_RNA (1)...(19): siRNA sense strand
augaugaaguuguggcaau

SEQ ID NO: 1936730 - RNA, 19 nt, Homo sapiens
  misc_RNA (1)...(19): siRNA sense strand
gaacucaacuaggguguua

SEQ ID NO: 1936731 - RNA, 19 nt, Homo sapiens
  misc_RNA (1)...(19): siRNA sense strand
caacuaggguguuauuuga

SEQ ID NO: 1936732 - RNA, 19 nt, Homo sapiens
  misc_RNA (1)...(19): siRNA sense strand
gaacugggcacacuuguaa

SEQ ID NO: 1936733 - RNA, 19 nt, Homo sapiens
  misc_RNA (1)...(19): siRNA sense strand
gagcugaucgcuuuaaaua

SEQ ID NO: 1936734 - RNA, 19 nt, Homo sapiens
  misc_RNA (1)...(19): siRNA sense strand
gggcacacuuguaauguua

SEQ ID NO: 1936735 - RNA, 19 nt, Homo sapiens
  misc_RNA (1)...(19): siRNA sense strand
gaacacaacaaugcaaaua

SEQ ID NO: 1936736 - RNA, 19 nt, Homo sapiens
  misc_RNA (1)...(19): siRNA sense strand
ggacacgacuccaugaaug

SEQ ID NO: 1936737 - RNA, 19 nt, Homo sapiens
  misc_RNA (1)...(19): siRNA sense strand
uaagagagcugagcauuca

SEQ ID NO: 1936738 - RNA, 19 nt, Homo sapiens
  misc_RNA (1)...(19): siRNA sense strand
gaaacaagccagaacaaau

SEQ ID NO: 1936739 - RNA, 19 nt, Homo sapiens
  misc_RNA (1)...(19): siRNA sense strand
gagccaaccugcagaaugu

SEQ ID NO: 1936740 - RNA, 19 nt, Homo sapiens
  misc_RNA (1)...(19): siRNA sense strand
gcugaucgcuuuaaauauc

SEQ ID NO: 1936741 - RNA, 19 nt, Homo sapiens
  misc_RNA (1)...(19): siRNA sense strand
gagcauucauucugauauu

SEQ ID NO: 1936742 - RNA, 19 nt, Homo sapiens
  misc_RNA (1)...(19): siRNA sense strand
gaaccagcaaacaauauua

SEQ ID NO: 1936743 - RNA, 19 nt, Homo sapiens
  misc_RNA (1)...(19): siRNA sense strand
ugacaacuaugaaggguuu

SEQ ID NO: 1936744 - RNA, 19 nt, Homo sapiens
  misc_RNA (1)...(19): siRNA sense strand
cgagaaagcuauggaguga

SEQ ID NO: 1936745 - RNA, 19 nt, Homo sapiens
  misc_RNA (1)...(19): siRNA sense strand
gcugauggguagugaagua

SEQ ID NO: 1936746 - RNA, 19 nt, Homo sapiens
  misc_RNA (1)...(19): siRNA sense strand
ugaagcauguggaauauga

SEQ ID NO: 1936747 - RNA, 19 nt, Homo sapiens
  misc_RNA (1)...(19): siRNA sense strand
ggacucaucuaugcauuug

SEQ ID NO: 1936748 - RNA, 19 nt, Homo sapiens
  misc_RNA (1)...(19): siRNA sense strand
gcaaaguacuugagcucuu

SEQ ID NO: 1936749 - RNA, 19 nt, Homo sapiens
  misc_RNA (1)...(19): siRNA sense strand
caacugguuucacuugauu

SEQ ID NO: 1936750 - RNA, 19 nt, Homo sapiens
  misc_RNA (1)...(19): siRNA sense strand
gcaaaguacuagauaacug

SEQ ID NO: 1936751 - RNA, 19 nt, Homo sapiens
  misc_RNA (1)...(19): siRNA sense strand
gaacagauuuugaacaguu

SEQ ID NO: 1936752 - RNA, 19 nt, Homo sapiens
  misc_RNA (1)...(19): siRNA sense strand
gcaccaaccugcagggaau

SEQ ID NO: 1936753 - RNA, 19 nt, Homo sapiens
  misc_RNA (1)...(19): siRNA sense strand
gguguuauuugagaaguua

SEQ ID NO: 1936754 - RNA, 19 nt, Homo sapiens
  misc_RNA (1)...(19): siRNA sense strand
acagacagaugcugaacua

SEQ ID NO: 1936755 - RNA, 19 nt, Homo sapiens
  misc_RNA (1)...(19): siRNA sense strand
guaacugugugcaaggaua

SEQ ID NO: 1936756 - RNA, 19 nt, Homo sapiens
  misc_RNA (1)...(19): siRNA sense strand
aaacaagccagaacaaauu

SEQ ID NO: 1936757 - RNA, 19 nt, Homo sapiens
  misc_RNA (1)...(19): siRNA sense strand
agaaagcuauggagugauu

SEQ ID NO: 1936758 - RNA, 19 nt, Homo sapiens
  misc_RNA (1)...(19): siRNA sense strand
uccaagagcuuuuagauua

SEQ ID NO: 1936759 - RNA, 19 nt, Homo sapiens
  misc_RNA (1)...(19): siRNA sense strand
acacagcaguucucacaaa

SEQ ID NO: 1936760 - RNA, 19 nt, Homo sapiens
  misc_RNA (1)...(19): siRNA sense strand
gagcacaacugguuucacu

SEQ ID NO: 1936761 - RNA, 19 nt, Homo sapiens
  misc_RNA (1)...(19): siRNA sense strand
gaacagccaugggcagcuu

SEQ ID NO: 1936762 - RNA, 19 nt, Homo sapiens
  misc_RNA (1)...(19): siRNA sense strand
gcuguugacuucaggacua

SEQ ID NO: 1936763 - RNA, 19 nt, Homo sapiens
  misc_RNA (1)...(19): siRNA sense strand
gcacaacugguuucacuug

SEQ ID NO: 1936764 - RNA, 19 nt, Homo sapiens
  misc_RNA (1)...(19): siRNA sense strand
ccagcaaaguacuagauaa

SEQ ID NO: 1936765 - RNA, 19 nt, Homo sapiens
  misc_RNA (1)...(19): siRNA sense strand
guagugaaguaacucaaau

SEQ ID NO: 1936766 - RNA, 19 nt, Homo sapiens
  misc_RNA (1)...(19): siRNA sense strand
gguauaaccuguggacuag

SEQ ID NO: 1936767 - RNA, 19 nt, Homo sapiens
  misc_RNA (1)...(19): siRNA sense strand
caaugguguuguucagaua

SEQ ID NO: 1936768 - RNA, 19 nt, Homo sapiens
  misc_RNA (1)...(19): siRNA sense strand
ggaaacaagccagaacaaa

SEQ ID NO: 1936769 - RNA, 19 nt, Homo sapiens
  misc_RNA (1)...(19): siRNA sense strand
ccacacaucccacuguaaa

SEQ ID NO: 1936770 - RNA, 19 nt, Homo sapiens
  misc_RNA (1)...(19): siRNA sense strand
ggugugugguggcaaagua

SEQ ID NO: 1936771 - RNA, 19 nt, Homo sapiens
  misc_RNA (1)...(19): siRNA sense strand
uacaagaaguuacucaaug

SEQ ID NO: 1936772 - RNA, 19 nt, Homo sapiens
  misc_RNA (1)...(19): siRNA sense strand
gccaugagaaucuauuuaa

SEQ ID NO: 1936773 - RNA, 19 nt, Homo sapiens
  misc_RNA (1)...(19): siRNA sense strand
ggcuagaccaucaauaaua

SEQ ID NO: 1936774 - RNA, 19 nt, Homo sapiens
  misc_RNA (1)...(19): siRNA sense strand
acaagaaguuacucaaugu

SEQ ID NO: 1936775 - RNA, 19 nt, Homo sapiens
  misc_RNA (1)...(19): siRNA sense strand
gcuagaccaucaauaauac

SEQ ID NO: 1936776 - RNA, 19 nt, Homo sapiens
  misc_RNA (1)...(19): siRNA sense strand
gaagaguucuagagcugau

SEQ ID NO: 1936777 - RNA, 19 nt, Homo sapiens
  misc_RNA (1)...(19): siRNA sense strand
caaaguacuugagcucuuc

SEQ ID NO: 1936778 - RNA, 19 nt, Homo sapiens
  misc_RNA (1)...(19): siRNA sense strand
ggagaaguuauauaaggua

SEQ ID NO: 1936779 - RNA, 19 nt, Homo sapiens
  misc_RNA (1)...(19): siRNA sense strand
caucuccugucaaggguua

SEQ ID NO: 1936780 - RNA, 19 nt, Homo sapiens
  misc_RNA (1)...(19): siRNA sense strand
ugaaguaacucaaauugcu

SEQ ID NO: 1936781 - RNA, 19 nt, Homo sapiens
  misc_RNA (1)...(19): siRNA sense strand
ccaaaucucaguucaugaa

SEQ ID NO: 1936782 - RNA, 19 nt, Homo sapiens
  misc_RNA (1)...(19): siRNA sense strand
ucaaaucucuugugguuuu

SEQ ID NO: 1936783 - RNA, 19 nt, Homo sapiens
  misc_RNA (1)...(19): siRNA sense strand
gcuccaaauacgagaauua

SEQ ID NO: 1936784 - RNA, 19 nt, Homo sapiens
  misc_RNA (1)...(19): siRNA sense strand
gcgaucggauucccaucua

SEQ ID NO: 1936785 - RNA, 19 nt, Homo sapiens
  misc_RNA (1)...(19): siRNA sense strand
guacacagccuucucuagu

SEQ ID NO: 1936786 - RNA, 19 nt, Homo sapiens
  misc_RNA (1)...(19): siRNA sense strand
gaacagaagaagcugauac

SEQ ID NO: 1936787 - RNA, 19 nt, Homo sapiens
  misc_RNA (1)...(19): siRNA sense strand
auucaaaucucuugugguu

SEQ ID NO: 1936788 - RNA, 19 nt, Homo sapiens
  misc_RNA (1)...(19): siRNA sense strand
gcacauuauaccaguuuaa

SEQ ID NO: 1936789 - RNA, 19 nt, Homo sapiens
  misc_RNA (1)...(19): siRNA sense strand
gugcccagguuaauacaaa

SEQ ID NO: 1936790 - RNA, 19 nt, Homo sapiens
  misc_RNA (1)...(19): siRNA sense strand
cagcagcucucaaacucuu

SEQ ID NO: 1936791 - RNA, 19 nt, Homo sapiens
  misc_RNA (1)...(19): siRNA sense strand
acacaacaaugcaaauaca

SEQ ID NO: 1936792 - RNA, 19 nt, Homo sapiens
  misc_RNA (1)...(19): siRNA sense strand
gaauggaaguuuucuugaa

SEQ ID NO: 1936793 - RNA, 19 nt, Homo sapiens
  misc_RNA (1)...(19): siRNA sense strand
ucucagcacuccaugauuc

SEQ ID NO: 1936794 - RNA, 19 nt, Homo sapiens
  misc_RNA (1)...(19): siRNA sense strand
uaucacagcagcucucaaa

SEQ ID NO: 1936795 - RNA, 19 nt, Homo sapiens
  misc_RNA (1)...(19): siRNA sense strand
ggccacacaucccacugua

SEQ ID NO: 1936796 - RNA, 19 nt, Homo sapiens
  misc_RNA (1)...(19): siRNA sense strand
cauuggcucucuacaagaa

SEQ ID NO: 1936797 - RNA, 19 nt, Homo sapiens
  misc_RNA (1)...(19): siRNA sense strand
gaucuccacuucccauugg

SEQ ID NO: 1936798 - RNA, 19 nt, Homo sapiens
  misc_RNA (1)...(19): siRNA sense strand
gagcugagcauucauucug

SEQ ID NO: 1936799 - RNA, 19 nt, Homo sapiens
  misc_RNA (1)...(19): siRNA sense strand
gaaguuuacacaugugguu

SEQ ID NO: 1936800 - RNA, 19 nt, Homo sapiens
  misc_RNA (1)...(19): siRNA sense strand
guacagcagcaaagagauu

SEQ ID NO: 1936801 - RNA, 19 nt, Homo sapiens
  misc_RNA (1)...(19): siRNA sense strand
ggagauaauguaacugugu

SEQ ID NO: 1936802 - RNA, 19 nt, Homo sapiens
  misc_RNA (1)...(19): siRNA sense strand
gcuauggagugauugaaca

SEQ ID NO: 1936803 - RNA, 19 nt, Homo sapiens
  misc_RNA (1)...(19): siRNA sense strand
ccagguguguggguucaua

SEQ ID NO: 1936804 - RNA, 19 nt, Homo sapiens
  misc_RNA (1)...(19): siRNA sense strand
uuaauucccguacuguuua

SEQ ID NO: 1936805 - RNA, 19 nt, Homo sapiens
  misc_RNA (1)...(19): siRNA sense strand
gcugguaaaccucuauaaa

SEQ ID NO: 1936806 - RNA, 19 nt, Homo sapiens
  misc_RNA (1)...(19): siRNA sense strand
ggaacugggcacacuugua

SEQ ID NO: 1936807 - RNA, 19 nt, Homo sapiens
  misc_RNA (1)...(19): siRNA sense strand
gguuaacccuagaagaguu

SEQ ID NO: 1936808 - RNA, 19 nt, Homo sapiens
  misc_RNA (1)...(19): siRNA sense strand
aagacuaccucaugugguu

SEQ ID NO: 1936809 - RNA, 19 nt, Homo sapiens
  misc_RNA (1)...(19): siRNA sense strand
agcaagaggucaauuagga

SEQ ID NO: 1936810 - RNA, 19 nt, Homo sapiens
  misc_RNA (1)...(19): siRNA sense strand
caagaaguuacucaaugua

SEQ ID NO: 1936811 - RNA, 19 nt, Homo sapiens
  misc_RNA (1)...(19): siRNA sense strand
gcaagaggucaauuaggaa

SEQ ID NO: 1936812 - RNA, 19 nt, Homo sapiens
  misc_RNA (1)...(19): siRNA sense strand
gagguuaacccuagaagag

SEQ ID NO: 1936813 - RNA, 19 nt, Homo sapiens
  misc_RNA (1)...(19): siRNA sense strand
gcagaucagcauaucauuc

SEQ ID NO: 1936814 - RNA, 19 nt, Homo sapiens
  misc_RNA (1)...(19): siRNA sense strand
aggaauuuguggaugcuua

SEQ ID NO: 1936815 - RNA, 19 nt, Homo sapiens
  misc_RNA (1)...(19): siRNA sense strand
ucaaugguguuguucagau

SEQ ID NO: 1936816 - RNA, 19 nt, Homo sapiens
  misc_RNA (1)...(19): siRNA sense strand
gaaguaacucaaauugcuu

SEQ ID NO: 1936817 - RNA, 19 nt, Homo sapiens
  misc_RNA (1)...(19): siRNA sense strand
caacaaugcaaauacaauc

SEQ ID NO: 1936818 - RNA, 19 nt, Homo sapiens
  misc_RNA (1)...(19): siRNA sense strand
uaugaaggguuuaguuugg

SEQ ID NO: 1936819 - RNA, 19 nt, Homo sapiens
  misc_RNA (1)...(19): siRNA sense strand
aaaggugugugguggcaaa

SEQ ID NO: 1936820 - RNA, 19 nt, Homo sapiens
  misc_RNA (1)...(19): siRNA sense strand
gauaacaggcaggaauuug

SEQ ID NO: 1936821 - RNA, 19 nt, Homo sapiens
  misc_RNA (1)...(19): siRNA sense strand
gaauguuuaccuacuauca

SEQ ID NO: 1936822 - RNA, 19 nt, Homo sapiens
  misc_RNA (1)...(19): siRNA sense strand
ucuauggaauguuuaccua

SEQ ID NO: 1936823 - RNA, 19 nt, Homo sapiens
  misc_RNA (1)...(19): siRNA sense strand
caggaagacuaccucaugu

SEQ ID NO: 1936824 - RNA, 19 nt, Homo sapiens
  misc_RNA (1)...(19): siRNA sense strand
cagcaguucucacaaagag

SEQ ID NO: 1936825 - RNA, 19 nt, Homo sapiens
  misc_RNA (1)...(19): siRNA sense strand
cccaggcccuugacaacua

SEQ ID NO: 1936826 - RNA, 19 nt, Homo sapiens
  misc_RNA (1)...(19): siRNA sense strand
gcagguggcagucaaugga

SEQ ID NO: 1936827 - RNA, 19 nt, Homo sapiens
  misc_RNA (1)...(19): siRNA sense strand
ucaacuaggguguuauuug

SEQ ID NO: 1936828 - RNA, 19 nt, Homo sapiens
  misc_RNA (1)...(19): siRNA sense strand
cagaucagcauaucauuca

SEQ ID NO: 1936829 - RNA, 19 nt, Homo sapiens
  misc_RNA (1)...(19): siRNA sense strand
ggauaacaggcaggaauuu

SEQ ID NO: 1936830 - RNA, 19 nt, Homo sapiens
  misc_RNA (1)...(19): siRNA sense strand
ggaaguggcucuacagauu

SEQ ID NO: 1936831 - RNA, 19 nt, Homo sapiens
  misc_RNA (1)...(19): siRNA sense strand
gcagagcacuucuccauga

SEQ ID NO: 1936832 - RNA, 19 nt, Homo sapiens
  misc_RNA (1)...(19): siRNA sense strand
gcaauaggcuggcugacuu

SEQ ID NO: 1936833 - RNA, 19 nt, Homo sapiens
  misc_RNA (1)...(19): siRNA sense strand
caauauauaucccugcuuu

SEQ ID NO: 1936834 - RNA, 19 nt, Homo sapiens
  misc_RNA (1)...(19): siRNA sense strand
gaaccugucuuugaaguga

SEQ ID NO: 1936835 - RNA, 19 nt, Homo sapiens
  misc_RNA (1)...(19): siRNA sense strand
uaaggaaccugucuuugaa

SEQ ID NO: 1936836 - RNA, 19 nt, Homo sapiens
  misc_RNA (1)...(19): siRNA sense strand
ggagugauccuucugguaa

SEQ ID NO: 1936837 - RNA, 19 nt, Homo sapiens
  misc_RNA (1)...(19): siRNA sense strand
caaaggagcaacuauuaaa

SEQ ID NO: 1936838 - RNA, 19 nt, Homo sapiens
  misc_RNA (1)...(19): siRNA sense strand
caauccaaauucacucuua

SEQ ID NO: 1936839 - RNA, 19 nt, Homo sapiens
  misc_RNA (1)...(19): siRNA sense strand
gcaagaaugauauccaauu

SEQ ID NO: 1936840 - RNA, 19 nt, Homo sapiens
  misc_RNA (1)...(19): siRNA sense strand
gaaaugauaguuccaguuc

SEQ ID NO: 1936841 - RNA, 19 nt, Homo sapiens
  misc_RNA (1)...(19): siRNA sense strand
cagaagaccuagcaguuga

SEQ ID NO: 1936842 - RNA, 19 nt, Homo sapiens
  misc_RNA (1)...(19): siRNA sense strand
gaaacuauauagagcucaa

SEQ ID NO: 1936843 - RNA, 19 nt, Homo sapiens
  misc_RNA (1)...(19): siRNA sense strand
auauagagcucaaugaaga

SEQ ID NO: 1936844 - RNA, 19 nt, Homo sapiens
  misc_RNA (1)...(19): siRNA sense strand
caacaucugcucaaacuau

SEQ ID NO: 1936845 - RNA, 19 nt, Homo sapiens
  misc_RNA (1)...(19): siRNA sense strand
cuaaugguaccaauaguua

SEQ ID NO: 1936846 - RNA, 19 nt, Homo sapiens
  misc_RNA (1)...(19): siRNA sense strand
gagcacuucuccaugauuc

SEQ ID NO: 1936847 - RNA, 19 nt, Homo sapiens
  misc_RNA (1)...(19): siRNA sense strand
gcgcaagaaugauauccaa

SEQ ID NO: 1936848 - RNA, 19 nt, Homo sapiens
  misc_RNA (1)...(19): siRNA sense strand
gguuauugcugcccuaguu

SEQ ID NO: 1936849 - RNA, 19 nt, Homo sapiens
  misc_RNA (1)...(19): siRNA sense strand
gagcauagaacauccacuu

SEQ ID NO: 1936850 - RNA, 19 nt, Homo sapiens
  misc_RNA (1)...(19): siRNA sense strand
uagcucaccuccagaauca

SEQ ID NO: 1936851 - RNA, 19 nt, Homo sapiens
  misc_RNA (1)...(19): siRNA sense strand
ccaaaggagcaacuauuaa

SEQ ID NO: 1936852 - RNA, 19 nt, Homo sapiens
  misc_RNA (1)...(19): siRNA sense strand
gcacugagagccaagacaa

SEQ ID NO: 1936853 - RNA, 19 nt, Homo sapiens
  misc_RNA (1)...(19): siRNA sense strand
gagccaagacaaacacgua

SEQ ID NO: 1936854 - RNA, 19 nt, Homo sapiens
  misc_RNA (1)...(19): siRNA sense strand
gggaagaaauagaaaugca

SEQ ID NO: 1936855 - RNA, 19 nt, Homo sapiens
  misc_RNA (1)...(19): siRNA sense strand
acaaacacguauaucaaga

SEQ ID NO: 1936856 - RNA, 19 nt, Homo sapiens
  misc_RNA (1)...(19): siRNA sense strand
gcacaggaaacuucugguu

SEQ ID NO: 1936857 - RNA, 19 nt, Homo sapiens
  misc_RNA (1)...(19): siRNA sense strand
cccaaaggagcaacuauua

SEQ ID NO: 1936858 - RNA, 19 nt, Homo sapiens
  misc_RNA (1)...(19): siRNA sense strand
ggauuaucauguaguccua

SEQ ID NO: 1936859 - RNA, 19 nt, Homo sapiens
  misc_RNA (1)...(19): siRNA sense strand
gacccacaccuacauagua

SEQ ID NO: 1936860 - RNA, 19 nt, Homo sapiens
  misc_RNA (1)...(19): siRNA sense strand
guacaggaaacuauauaga

SEQ ID NO: 1936861 - RNA, 19 nt, Homo sapiens
  misc_RNA (1)...(19): siRNA sense strand
ccaacaagcccauuuagca

SEQ ID NO: 1936862 - RNA, 19 nt, Homo sapiens
  misc_RNA (1)...(19): siRNA sense strand
ggaggauuaucauguaguc

SEQ ID NO: 1936863 - RNA, 19 nt, Homo sapiens
  misc_RNA (1)...(19): siRNA sense strand
gacgaaagcacgacugugu

SEQ ID NO: 1936864 - RNA, 19 nt, Homo sapiens
  misc_RNA (1)...(19): siRNA sense strand
auaaggaaccugucuuuga

SEQ ID NO: 1936865 - RNA, 19 nt, Homo sapiens
  misc_RNA (1)...(19): siRNA sense strand
gcagacccacaccuacaua

SEQ ID NO: 1936866 - RNA, 19 nt, Homo sapiens
  misc_RNA (1)...(19): siRNA sense strand
guaccgauguaagcuuuga

SEQ ID NO: 1936867 - RNA, 19 nt, Homo sapiens
  misc_RNA (1)...(19): siRNA sense strand
ugauuugcuuugagaauga

SEQ ID NO: 1936868 - RNA, 19 nt, Homo sapiens
  misc_RNA (1)...(19): siRNA sense strand
aaagagaacgccaucaugu

SEQ ID NO: 1936869 - RNA, 19 nt, Homo sapiens
  misc_RNA (1)...(19): siRNA sense strand
agacaaacacguauaucaa

SEQ ID NO: 1936870 - RNA, 19 nt, Homo sapiens
  misc_RNA (1)...(19): siRNA sense strand
aagcacgacugugugauuu

SEQ ID NO: 1936871 - RNA, 19 nt, Homo sapiens
  misc_RNA (1)...(19): siRNA sense strand
gcacgggaagaaauagaaa

SEQ ID NO: 1936872 - RNA, 19 nt, Homo sapiens
  misc_RNA (1)...(19): siRNA sense strand
ccaagacaaacacguauau

SEQ ID NO: 1936873 - RNA, 19 nt, Homo sapiens
  misc_RNA (1)...(19): siRNA sense strand
ggaaugugccaacaagauc

SEQ ID NO: 1936874 - RNA, 19 nt, Homo sapiens
  misc_RNA (1)...(19): siRNA sense strand
cgaaagcacgacuguguga

SEQ ID NO: 1936875 - RNA, 19 nt, Homo sapiens
  misc_RNA (1)...(19): siRNA sense strand
gaaguggcucuacagauuc

SEQ ID NO: 1936876 - RNA, 19 nt, Homo sapiens
  misc_RNA (1)...(19): siRNA sense strand
gugauuugcuuugagaaug

SEQ ID NO: 1936877 - RNA, 19 nt, Homo sapiens
  misc_RNA (1)...(19): siRNA sense strand
cugggaggauuaucaugua

SEQ ID NO: 1936878 - RNA, 19 nt, Homo sapiens
  misc_RNA (1)...(19): siRNA sense strand
caagaucugugaaaagaga

SEQ ID NO: 1936879 - RNA, 19 nt, Homo sapiens
  misc_RNA (1)...(19): siRNA sense strand
ugaagagaaugauuuccau

SEQ ID NO: 1936880 - RNA, 19 nt, Homo sapiens
  misc_RNA (1)...(19): siRNA sense strand
acccacaccuacauaguaa

SEQ ID NO: 1936881 - RNA, 19 nt, Homo sapiens
  misc_RNA (1)...(19): siRNA sense strand
ggaaggaaagaagauguug

SEQ ID NO: 1936882 - RNA, 19 nt, Homo sapiens
  misc_RNA (1)...(19): siRNA sense strand
ccacuugcucggaggguua

SEQ ID NO: 1936883 - RNA, 19 nt, Homo sapiens
  misc_RNA (1)...(19): siRNA sense strand
guaacuccgagcagagaua

SEQ ID NO: 1936884 - RNA, 19 nt, Homo sapiens
  misc_RNA (1)...(19): siRNA sense strand
gacaaacacguauaucaag

SEQ ID NO: 1936885 - RNA, 19 nt, Homo sapiens
  misc_RNA (1)...(19): siRNA sense strand
cgccaggguuguaaaauua

SEQ ID NO: 1936886 - RNA, 19 nt, Homo sapiens
  misc_RNA (1)...(19): siRNA sense strand
gauaaggaaccugucuuug

SEQ ID NO: 1936887 - RNA, 19 nt, Homo sapiens
  misc_RNA (1)...(19): siRNA sense strand
gagcagagauaaggaaccu

SEQ ID NO: 1936888 - RNA, 19 nt, Homo sapiens
  misc_RNA (1)...(19): siRNA sense strand
cauggaaugugccaacaag

SEQ ID NO: 1936889 - RNA, 19 nt, Homo sapiens
  misc_RNA (1)...(19): siRNA sense strand
uaucaagacuccuguucgu

SEQ ID NO: 1936890 - RNA, 19 nt, Homo sapiens
  misc_RNA (1)...(19): siRNA sense strand
gcacgacugugugauuugc

SEQ ID NO: 1936891 - RNA, 19 nt, Homo sapiens
  misc_RNA (1)...(19): siRNA sense strand
uuaccaacaucugcucaaa

SEQ ID NO: 1936892 - RNA, 19 nt, Homo sapiens
  misc_RNA (1)...(19): siRNA sense strand
ggagaaagagcgucaacac

SEQ ID NO: 1936893 - RNA, 19 nt, Homo sapiens
  misc_RNA (1)...(19): siRNA sense strand
gccaagacaaacacguaua

SEQ ID NO: 1936894 - RNA, 19 nt, Homo sapiens
  misc_RNA (1)...(19): siRNA sense strand
caaugaagagaaugauuuc

SEQ ID NO: 1936895 - RNA, 19 nt, Homo sapiens
  misc_RNA (1)...(19): siRNA sense strand
cuauauagagcucaaugaa

SEQ ID NO: 1936896 - RNA, 19 nt, Homo sapiens
  misc_RNA (1)...(19): siRNA sense strand
gcguacaggaaacuauaua

SEQ ID NO: 1936897 - RNA, 19 nt, Homo sapiens
  misc_RNA (1)...(19): siRNA sense strand
ggaagaaauagaaaugcau

SEQ ID NO: 1936898 - RNA, 19 nt, Homo sapiens
  misc_RNA (1)...(19): siRNA sense strand
cucuacagauuccuacuuu

SEQ ID NO: 1936899 - RNA, 19 nt, Homo sapiens
  misc_RNA (1)...(19): siRNA sense strand
ggaagucagccaucuacuc

SEQ ID NO: 1936900 - RNA, 19 nt, Homo sapiens
  misc_RNA (1)...(19): siRNA sense strand
ucgugcaucucgaaacaaa

SEQ ID NO: 1936901 - RNA, 19 nt, Homo sapiens
  misc_RNA (1)...(19): siRNA sense strand
ccaacaagaucugugaaaa

SEQ ID NO: 1936902 - RNA, 19 nt, Homo sapiens
  misc_RNA (1)...(19): siRNA sense strand
gccacaaccucuucugcau

SEQ ID NO: 1936903 - RNA, 19 nt, Homo sapiens
  misc_RNA (1)...(19): siRNA sense strand
ucagaagaccuagcaguug

SEQ ID NO: 1936904 - RNA, 19 nt, Homo sapiens
  misc_RNA (1)...(19): siRNA sense strand
caaaccaccguccaaguca

SEQ ID NO: 1936905 - RNA, 19 nt, Homo sapiens
  misc_RNA (1)...(19): siRNA sense strand
agauaaggaaccugucuuu

SEQ ID NO: 1936906 - RNA, 19 nt, Homo sapiens
  misc_RNA (1)...(19): siRNA sense strand
gaaaagagaacgccaucau

SEQ ID NO: 1936907 - RNA, 19 nt, Homo sapiens
  misc_RNA (1)...(19): siRNA sense strand
gccaacaagaucugugaaa

SEQ ID NO: 1936908 - RNA, 19 nt, Homo sapiens
  misc_RNA (1)...(19): siRNA sense strand
cauagaacauccacuugcu

SEQ ID NO: 1936909 - RNA, 19 nt, Homo sapiens
  misc_RNA (1)...(19): siRNA sense strand
gggagugauccuucuggua

SEQ ID NO: 1936910 - RNA, 19 nt, Homo sapiens
  misc_RNA (1)...(19): siRNA sense strand
gccuuugacucuuuaccaa

SEQ ID NO: 1936911 - RNA, 19 nt, Homo sapiens
  misc_RNA (1)...(19): siRNA sense strand
gcccugcuccggagaaaga

SEQ ID NO: 1936912 - RNA, 19 nt, Homo sapiens
  misc_RNA (1)...(19): siRNA sense strand
cgaaaugauaguuccaguu

SEQ ID NO: 1936913 - RNA, 19 nt, Homo sapiens
  misc_RNA (1)...(19): siRNA sense strand
uaacuccgagcagagauaa

SEQ ID NO: 1936914 - RNA, 19 nt, Homo sapiens
  misc_RNA (1)...(19): siRNA sense strand
aaagcacgacugugugauu

SEQ ID NO: 1936915 - RNA, 19 nt, Homo sapiens
  misc_RNA (1)...(19): siRNA sense strand
gauaguuccaguucucuag

SEQ ID NO: 1936916 - RNA, 19 nt, Homo sapiens
  misc_RNA (1)...(19): siRNA sense strand
cugcguggcucuccuccaa

SEQ ID NO: 1936917 - RNA, 19 nt, Homo sapiens
  misc_RNA (1)...(19): siRNA sense strand
gagauaaggaaccugucuu

SEQ ID NO: 1936918 - RNA, 19 nt, Homo sapiens
  misc_RNA (1)...(19): siRNA sense strand
ugugugauuugcuuugaga

SEQ ID NO: 1936919 - RNA, 19 nt, Homo sapiens
  misc_RNA (1)...(19): siRNA sense strand
uacauuuccugagagcaua

SEQ ID NO: 1936920 - RNA, 19 nt, Homo sapiens
  misc_RNA (1)...(19): siRNA sense strand
gaggaagucagccaucuac

SEQ ID NO: 1936921 - RNA, 19 nt, Homo sapiens
  misc_RNA (1)...(19): siRNA sense strand
cugguaacaugaagacuca

SEQ ID NO: 1936922 - RNA, 19 nt, Homo sapiens
  misc_RNA (1)...(19): siRNA sense strand
caauaggcuggcugacuuu

SEQ ID NO: 1936923 - RNA, 19 nt, Homo sapiens
  misc_RNA (1)...(19): siRNA sense strand
ccgagcacgggaagaaaua

SEQ ID NO: 1936924 - RNA, 19 nt, Homo sapiens
  misc_RNA (1)...(19): siRNA sense strand
gagcacgggaagaaauaga

SEQ ID NO: 1936925 - RNA, 19 nt, Homo sapiens
  misc_RNA (1)...(19): siRNA sense strand
ucgucugucuccuacauuu

SEQ ID NO: 1936926 - RNA, 19 nt, Homo sapiens
  misc_RNA (1)...(19): siRNA sense strand
uaggcuggcugacuuuagu

SEQ ID NO: 1936927 - RNA, 19 nt, Homo sapiens
  misc_RNA (1)...(19): siRNA sense strand
gcguggcucuccuccaauc

SEQ ID NO: 1936928 - RNA, 19 nt, Homo sapiens
  misc_RNA (1)...(19): siRNA sense strand
ugguaccgauguaagcuuu

SEQ ID NO: 1936929 - RNA, 19 nt, Homo sapiens
  misc_RNA (1)...(19): siRNA sense strand
aagacaaacacguauauca

SEQ ID NO: 1936930 - RNA, 19 nt, Homo sapiens
  misc_RNA (1)...(19): siRNA sense strand
ccacucaacugcacuccua

SEQ ID NO: 1936931 - RNA, 19 nt, Homo sapiens
  misc_RNA (1)...(19): siRNA sense strand
caacugcacuccuaucaag

SEQ ID NO: 1936932 - RNA, 19 nt, Homo sapiens
  misc_RNA (1)...(19): siRNA sense strand
gcagggagacacauguuug

SEQ ID NO: 1936933 - RNA, 19 nt, Homo sapiens
  misc_RNA (1)...(19): siRNA sense strand
aguggaagaucauuuaugu

SEQ ID NO: 1936934 - RNA, 19 nt, Homo sapiens
  misc_RNA (1)...(19): siRNA sense strand
uggaagaucauuuauguug

SEQ ID NO: 1936935 - RNA, 19 nt, Homo sapiens
  misc_RNA (1)...(19): siRNA sense strand
gaccuggaguggaagauca

SEQ ID NO: 1936936 - RNA, 19 nt, Homo sapiens
  misc_RNA (1)...(19): siRNA sense strand
gcuacuacgucaacaacga

SEQ ID NO: 1936937 - RNA, 19 nt, Homo sapiens
  misc_RNA (1)...(19): siRNA sense strand
gugacccgcuuccauauca

SEQ ID NO: 1936938 - RNA, 19 nt, Homo sapiens
  misc_RNA (1)...(19): siRNA sense strand
caacugggacaacaacaug

SEQ ID NO: 1936939 - RNA, 19 nt, Homo sapiens
  misc_RNA (1)...(19): siRNA sense strand
cggacgaccuggaguggaa

SEQ ID NO: 1936940 - RNA, 19 nt, Homo sapiens
  misc_RNA (1)...(19): siRNA sense strand
uggaguggaagaucauuua

SEQ ID NO: 1936941 - RNA, 19 nt, Homo sapiens
  misc_RNA (1)...(19): siRNA sense strand
gugaggaauuugaucagau

SEQ ID NO: 1936942 - RNA, 19 nt, Homo sapiens
  misc_RNA (1)...(19): siRNA sense strand
ggaacaucuuggccucgaa

SEQ ID NO: 1936943 - RNA, 19 nt, Homo sapiens
  misc_RNA (1)...(19): siRNA sense strand
cauaucaacugggacaaca

SEQ ID NO: 1936944 - RNA, 19 nt, Homo sapiens
  misc_RNA (1)...(19): siRNA sense strand
caacaacgaguaccucaac

SEQ ID NO: 1936945 - RNA, 19 nt, Homo sapiens
  misc_RNA (1)...(19): siRNA sense strand
uauguuggcucggcugaga

SEQ ID NO: 1936946 - RNA, 19 nt, Homo sapiens
  misc_RNA (1)...(19): siRNA sense strand
ggaguggaagaucauuuau

SEQ ID NO: 1936947 - RNA, 19 nt, Homo sapiens
  misc_RNA (1)...(19): siRNA sense strand
cggcugagagugaggaauu

SEQ ID NO: 1936948 - RNA, 19 nt, Homo sapiens
  misc_RNA (1)...(19): siRNA sense strand
ggacaggcuggaggccaua

SEQ ID NO: 1936949 - RNA, 19 nt, Homo sapiens
  misc_RNA (1)...(19): siRNA sense strand
gaguggaagaucauuuaug

SEQ ID NO: 1936950 - RNA, 19 nt, Homo sapiens
  misc_RNA (1)...(19): siRNA sense strand
ggcugagagugaggaauuu

SEQ ID NO: 1936951 - RNA, 19 nt, Homo sapiens
  misc_RNA (1)...(19): siRNA sense strand
ggagaacccgagcccuuuc

SEQ ID NO: 1936952 - RNA, 19 nt, Homo sapiens
  misc_RNA (1)...(19): siRNA sense strand
cuccauggacugcaucuaa

SEQ ID NO: 1936953 - RNA, 19 nt, Homo sapiens
  misc_RNA (1)...(19): siRNA sense strand
acccugagcugcgugagaa

SEQ ID NO: 1936954 - RNA, 19 nt, Homo sapiens
  misc_RNA (1)...(19): siRNA sense strand
acacauguuugucuuucag

SEQ ID NO: 1936955 - RNA, 19 nt, Homo sapiens
  misc_RNA (1)...(19): siRNA sense strand
cagcagggagacacauguu

SEQ ID NO: 1936956 - RNA, 19 nt, Homo sapiens
  misc_RNA (1)...(19): siRNA sense strand
agagugaggaauuugauca

SEQ ID NO: 1936957 - RNA, 19 nt, Homo sapiens
  misc_RNA (1)...(19): siRNA sense strand
gagagugaggaauuugauc

SEQ ID NO: 1936958 - RNA, 19 nt, Homo sapiens
  misc_RNA (1)...(19): siRNA sense strand
gcccaugaagccagauuuc

SEQ ID NO: 1936959 - RNA, 19 nt, Homo sapiens
  misc_RNA (1)...(19): siRNA sense strand
uggagaacccgagcccuuu

SEQ ID NO: 1936960 - RNA, 19 nt, Homo sapiens
  misc_RNA (1)...(19): siRNA sense strand
gaacguagcucuuuagaaa

SEQ ID NO: 1936961 - RNA, 19 nt, Homo sapiens
  misc_RNA (1)...(19): siRNA sense strand
gcaaguagauaacaaguuu

SEQ ID NO: 1936962 - RNA, 19 nt, Homo sapiens
  misc_RNA (1)...(19): siRNA sense strand
uaaagaaucuggucaauug

SEQ ID NO: 1936963 - RNA, 19 nt, Homo sapiens
  misc_RNA (1)...(19): siRNA sense strand
gcugagagcuuagcaguua

SEQ ID NO: 1936964 - RNA, 19 nt, Homo sapiens
  misc_RNA (1)...(19): siRNA sense strand
ggacaaagcuacauaaacu

SEQ ID NO: 1936965 - RNA, 19 nt, Homo sapiens
  misc_RNA (1)...(19): siRNA sense strand
gaagucaucugaaucacua

SEQ ID NO: 1936966 - RNA, 19 nt, Homo sapiens
  misc_RNA (1)...(19): siRNA sense strand
ccaaagagauuuaaagaug

SEQ ID NO: 1936967 - RNA, 19 nt, Homo sapiens
  misc_RNA (1)...(19): siRNA sense strand
ggagaggccuuggcaaaua

SEQ ID NO: 1936968 - RNA, 19 nt, Homo sapiens
  misc_RNA (1)...(19): siRNA sense strand
ggaguuaucucucuuuaau

SEQ ID NO: 1936969 - RNA, 19 nt, Homo sapiens
  misc_RNA (1)...(19): siRNA sense strand
ggaugaagauuguuuagaa

SEQ ID NO: 1936970 - RNA, 19 nt, Homo sapiens
  misc_RNA (1)...(19): siRNA sense strand
gcagaacgaauauaaguua

SEQ ID NO: 1936971 - RNA, 19 nt, Homo sapiens
  misc_RNA (1)...(19): siRNA sense strand
gaacuugcccucaacagua

SEQ ID NO: 1936972 - RNA, 19 nt, Homo sapiens
  misc_RNA (1)...(19): siRNA sense strand
ggaaauagaacacgucauu

SEQ ID NO: 1936973 - RNA, 19 nt, Homo sapiens
  misc_RNA (1)...(19): siRNA sense strand
gaaaguugccgccuuauug

SEQ ID NO: 1936974 - RNA, 19 nt, Homo sapiens
  misc_RNA (1)...(19): siRNA sense strand
gaacaaaggagacucuuau

SEQ ID NO: 1936975 - RNA, 19 nt, Homo sapiens
  misc_RNA (1)...(19): siRNA sense strand
caggaagcauguaauaaua

SEQ ID NO: 1936976 - RNA, 19 nt, Homo sapiens
  misc_RNA (1)...(19): siRNA sense strand
gaacucugauguuuguaaa

SEQ ID NO: 1936977 - RNA, 19 nt, Homo sapiens
  misc_RNA (1)...(19): siRNA sense strand
gcacuaagacugaagagaa

SEQ ID NO: 1936978 - RNA, 19 nt, Homo sapiens
  misc_RNA (1)...(19): siRNA sense strand
gcaaaugaauucaagucuu

SEQ ID NO: 1936979 - RNA, 19 nt, Homo sapiens
  misc_RNA (1)...(19): siRNA sense strand
cuaaagaccugacaacugu

SEQ ID NO: 1936980 - RNA, 19 nt, Homo sapiens
  misc_RNA (1)...(19): siRNA sense strand
gaaccuacagcaacuuaua

SEQ ID NO: 1936981 - RNA, 19 nt, Homo sapiens
  misc_RNA (1)...(19): siRNA sense strand
caaaugaauucaagucuuc

SEQ ID NO: 1936982 - RNA, 19 nt, Homo sapiens
  misc_RNA (1)...(19): siRNA sense strand
caacagaugccuaguuuga

SEQ ID NO: 1936983 - RNA, 19 nt, Homo sapiens
  misc_RNA (1)...(19): siRNA sense strand
ggaaagagaagccaaugaa

SEQ ID NO: 1936984 - RNA, 19 nt, Homo sapiens
  misc_RNA (1)...(19): siRNA sense strand
gaagaaugguuuaugucaa

SEQ ID NO: 1936985 - RNA, 19 nt, Homo sapiens
  misc_RNA (1)...(19): siRNA sense strand
ucacuagccucuaaauuau

SEQ ID NO: 1936986 - RNA, 19 nt, Homo sapiens
  misc_RNA (1)...(19): siRNA sense strand
caggaaaguugccgccuua

SEQ ID NO: 1936987 - RNA, 19 nt, Homo sapiens
  misc_RNA (1)...(19): siRNA sense strand
caagggacauugccacuga

SEQ ID NO: 1936988 - RNA, 19 nt, Homo sapiens
  misc_RNA (1)...(19): siRNA sense strand
caacaagaauaugcaguuu

SEQ ID NO: 1936989 - RNA, 19 nt, Homo sapiens
  misc_RNA (1)...(19): siRNA sense strand
ggacucagcacauucauug

SEQ ID NO: 1936990 - RNA, 19 nt, Homo sapiens
  misc_RNA (1)...(19): siRNA sense strand
agacguauguucccgauuu

SEQ ID NO: 1936991 - RNA, 19 nt, Homo sapiens
  misc_RNA (1)...(19): siRNA sense strand
guuaugggcuagagaauga

SEQ ID NO: 1936992 - RNA, 19 nt, Homo sapiens
  misc_RNA (1)...(19): siRNA sense strand
gaacaacagaugccuaguu

SEQ ID NO: 1936993 - RNA, 19 nt, Homo sapiens
  misc_RNA (1)...(19): siRNA sense strand
gugaggauauuaaggaauu

SEQ ID NO: 1936994 - RNA, 19 nt, Homo sapiens
  misc_RNA (1)...(19): siRNA sense strand
gcuaggaucuuuagagaag

SEQ ID NO: 1936995 - RNA, 19 nt, Homo sapiens
  misc_RNA (1)...(19): siRNA sense strand
gcacauuacaacaagaaua

SEQ ID NO: 1936996 - RNA, 19 nt, Homo sapiens
  misc_RNA (1)...(19): siRNA sense strand
gagcauagugauucagaua

SEQ ID NO: 1936997 - RNA, 19 nt, Homo sapiens
  misc_RNA (1)...(19): siRNA sense strand
agaggaagaucuacuguga

SEQ ID NO: 1936998 - RNA, 19 nt, Homo sapiens
  misc_RNA (1)...(19): siRNA sense strand
caacagauaggaagucuug

SEQ ID NO: 1936999 - RNA, 19 nt, Homo sapiens
  misc_RNA (1)...(19): siRNA sense strand
acacagaguucuagggauu

SEQ ID NO: 1937000 - RNA, 19 nt, Homo sapiens
  misc_RNA (1)...(19): siRNA sense strand
gaacacgucauucaguuga

SEQ ID NO: 1937001 - RNA, 19 nt, Homo sapiens
  misc_RNA (1)...(19): siRNA sense strand
gaacugggacacucucuug

SEQ ID NO: 1937002 - RNA, 19 nt, Homo sapiens
  misc_RNA (1)...(19): siRNA sense strand
aagagaaacucaaacaaug

SEQ ID NO: 1937003 - RNA, 19 nt, Homo sapiens
  misc_RNA (1)...(19): siRNA sense strand
agacagcucuugcucagaa

SEQ ID NO: 1937004 - RNA, 19 nt, Homo sapiens
  misc_RNA (1)...(19): siRNA sense strand
ccaaaccaaucguccguaa

SEQ ID NO: 1937005 - RNA, 19 nt, Homo sapiens
  misc_RNA (1)...(19): siRNA sense strand
gaauuuguauuuccagaca

SEQ ID NO: 1937006 - RNA, 19 nt, Homo sapiens
  misc_RNA (1)...(19): siRNA sense strand
gacaagaaccgcuuagaga

SEQ ID NO: 1937007 - RNA, 19 nt, Homo sapiens
  misc_RNA (1)...(19): siRNA sense strand
guucacagcuaggaucuuu

SEQ ID NO: 1937008 - RNA, 19 nt, Homo sapiens
  misc_RNA (1)...(19): siRNA sense strand
gagaggccuuggcaaauau

SEQ ID NO: 1937009 - RNA, 19 nt, Homo sapiens
  misc_RNA (1)...(19): siRNA sense strand
ugacauagaccacuuggaa

SEQ ID NO: 1937010 - RNA, 19 nt, Homo sapiens
  misc_RNA (1)...(19): siRNA sense strand
ggaacaaaggagacucuua

SEQ ID NO: 1937011 - RNA, 19 nt, Homo sapiens
  misc_RNA (1)...(19): siRNA sense strand
uaucagagccucagaacaa

SEQ ID NO: 1937012 - RNA, 19 nt, Homo sapiens
  misc_RNA (1)...(19): siRNA sense strand
uaaagaugcuacugaagug

SEQ ID NO: 1937013 - RNA, 19 nt, Homo sapiens
  misc_RNA (1)...(19): siRNA sense strand
ccaaaacucugauugaauu

SEQ ID NO: 1937014 - RNA, 19 nt, Homo sapiens
  misc_RNA (1)...(19): siRNA sense strand
gcagcggcauuucgaugua

SEQ ID NO: 1937015 - RNA, 19 nt, Homo sapiens
  misc_RNA (1)...(19): siRNA sense strand
gaaagagaaacucaaacaa

SEQ ID NO: 1937016 - RNA, 19 nt, Homo sapiens
  misc_RNA (1)...(19): siRNA sense strand
cagcuaggaucuuuagaga

SEQ ID NO: 1937017 - RNA, 19 nt, Homo sapiens
  misc_RNA (1)...(19): siRNA sense strand
ggaagaaugguuuauguca

SEQ ID NO: 1937018 - RNA, 19 nt, Homo sapiens
  misc_RNA (1)...(19): siRNA sense strand
ugaggaaucuaaagcaaga

SEQ ID NO: 1937019 - RNA, 19 nt, Homo sapiens
  misc_RNA (1)...(19): siRNA sense strand
aacaacagaugccuaguuu

SEQ ID NO: 1937020 - RNA, 19 nt, Homo sapiens
  misc_RNA (1)...(19): siRNA sense strand
guacaggacuuggagaauc

SEQ ID NO: 1937021 - RNA, 19 nt, Homo sapiens
  misc_RNA (1)...(19): siRNA sense strand
ggaggaauuuauccgagaa

SEQ ID NO: 1937022 - RNA, 19 nt, Homo sapiens
  misc_RNA (1)...(19): siRNA sense strand
gaaccaguuuagaaauguu

SEQ ID NO: 1937023 - RNA, 19 nt, Homo sapiens
  misc_RNA (1)...(19): siRNA sense strand
caaaagcugugaaaagaaa

SEQ ID NO: 1937024 - RNA, 19 nt, Homo sapiens
  misc_RNA (1)...(19): siRNA sense strand
ggaauuaucaggugaggau

SEQ ID NO: 1937025 - RNA, 19 nt, Homo sapiens
  misc_RNA (1)...(19): siRNA sense strand
gaagaucuacugugaccaa

SEQ ID NO: 1937026 - RNA, 19 nt, Homo sapiens
  misc_RNA (1)...(19): siRNA sense strand
guaauggagucacuaccaa

SEQ ID NO: 1937027 - RNA, 19 nt, Homo sapiens
  misc_RNA (1)...(19): siRNA sense strand
gaggagaggccuuggcaaa

SEQ ID NO: 1937028 - RNA, 19 nt, Homo sapiens
  misc_RNA (1)...(19): siRNA sense strand
agagguugcuguugaugua

SEQ ID NO: 1937029 - RNA, 19 nt, Homo sapiens
  misc_RNA (1)...(19): siRNA sense strand
gaacuuccaaauucagauu

SEQ ID NO: 1937030 - RNA, 19 nt, Homo sapiens
  misc_RNA (1)...(19): siRNA sense strand
gaaugaaccuacagcaacu

SEQ ID NO: 1937031 - RNA, 19 nt, Homo sapiens
  misc_RNA (1)...(19): siRNA sense strand
ggcaggaucuagaaauaug

SEQ ID NO: 1937032 - RNA, 19 nt, Homo sapiens
  misc_RNA (1)...(19): siRNA sense strand
ggaaccaguuuagaaaugu

SEQ ID NO: 1937033 - RNA, 19 nt, Homo sapiens
  misc_RNA (1)...(19): siRNA sense strand
acagagccaucuuuacaaa

SEQ ID NO: 1937034 - RNA, 19 nt, Homo sapiens
  misc_RNA (1)...(19): siRNA sense strand
agacacguuuccaaugaua

SEQ ID NO: 1937035 - RNA, 19 nt, Homo sapiens
  misc_RNA (1)...(19): siRNA sense strand
ccaaauugcguucugguuu

SEQ ID NO: 1937036 - RNA, 19 nt, Homo sapiens
  misc_RNA (1)...(19): siRNA sense strand
ggaaagacagcaaguugug

SEQ ID NO: 1937037 - RNA, 19 nt, Homo sapiens
  misc_RNA (1)...(19): siRNA sense strand
ggccagugcuguggaaauu

SEQ ID NO: 1937038 - RNA, 19 nt, Homo sapiens
  misc_RNA (1)...(19): siRNA sense strand
gagaacaacuggagcuacu

SEQ ID NO: 1937039 - RNA, 19 nt, Homo sapiens
  misc_RNA (1)...(19): siRNA sense strand
gaucugggccuugaauuug

SEQ ID NO: 1937040 - RNA, 19 nt, Homo sapiens
  misc_RNA (1)...(19): siRNA sense strand
gagcuuagcaguuaaaauu

SEQ ID NO: 1937041 - RNA, 19 nt, Homo sapiens
  misc_RNA (1)...(19): siRNA sense strand
gagauacuguggaugauac

SEQ ID NO: 1937042 - RNA, 19 nt, Homo sapiens
  misc_RNA (1)...(19): siRNA sense strand
ccaguggaauguuaaugaa

SEQ ID NO: 1937043 - RNA, 19 nt, Homo sapiens
  misc_RNA (1)...(19): siRNA sense strand
caaguugugcaguguguua

SEQ ID NO: 1937044 - RNA, 19 nt, Homo sapiens
  misc_RNA (1)...(19): siRNA sense strand
cuccagacaucaaagauuu

SEQ ID NO: 1937045 - RNA, 19 nt, Homo sapiens
  misc_RNA (1)...(19): siRNA sense strand
uagaacacgucauucaguu

SEQ ID NO: 1937046 - RNA, 19 nt, Homo sapiens
  misc_RNA (1)...(19): siRNA sense strand
ggaaaguugccgccuuauu

SEQ ID NO: 1937047 - RNA, 19 nt, Homo sapiens
  misc_RNA (1)...(19): siRNA sense strand
acaaguuuauugccuguuu

SEQ ID NO: 1937048 - RNA, 19 nt, Homo sapiens
  misc_RNA (1)...(19): siRNA sense strand
gagugaugauguagagaaa

SEQ ID NO: 1937049 - RNA, 19 nt, Homo sapiens
  misc_RNA (1)...(19): siRNA sense strand
gcagagaggacugugauga

SEQ ID NO: 1937050 - RNA, 19 nt, Homo sapiens
  misc_RNA (1)...(19): siRNA sense strand
cugaaucacuagccucuaa

SEQ ID NO: 1937051 - RNA, 19 nt, Homo sapiens
  misc_RNA (1)...(19): siRNA sense strand
gaaggaguuaucucucuuu

SEQ ID NO: 1937052 - RNA, 19 nt, Homo sapiens
  misc_RNA (1)...(19): siRNA sense strand
gcauagugauucagauagu

SEQ ID NO: 1937053 - RNA, 19 nt, Homo sapiens
  misc_RNA (1)...(19): siRNA sense strand
gaaggacaagaaccgcuua

SEQ ID NO: 1937054 - RNA, 19 nt, Homo sapiens
  misc_RNA (1)...(19): siRNA sense strand
ggacauugccacugacugu

SEQ ID NO: 1937055 - RNA, 19 nt, Homo sapiens
  misc_RNA (1)...(19): siRNA sense strand
acaaggcucuggucggaaa

SEQ ID NO: 1937056 - RNA, 19 nt, Homo sapiens
  misc_RNA (1)...(19): siRNA sense strand
ugacuggacucagcacauu

SEQ ID NO: 1937057 - RNA, 19 nt, Homo sapiens
  misc_RNA (1)...(19): siRNA sense strand
cgguaaagauucagauguu

SEQ ID NO: 1937058 - RNA, 19 nt, Homo sapiens
  misc_RNA (1)...(19): siRNA sense strand
gaaggguuccgaaagagaa

SEQ ID NO: 1937059 - RNA, 19 nt, Homo sapiens
  misc_RNA (1)...(19): siRNA sense strand
gaaagugggaaaucguuau

SEQ ID NO: 1937060 - RNA, 19 nt, Homo sapiens
  misc_RNA (1)...(19): siRNA sense strand
gcagagagcuggaaucuuc

SEQ ID NO: 1937061 - RNA, 19 nt, Homo sapiens
  misc_RNA (1)...(19): siRNA sense strand
ggaaggaggaggucuauaa

SEQ ID NO: 1937062 - RNA, 19 nt, Homo sapiens
  misc_RNA (1)...(19): siRNA sense strand
gaaaucaacucccuaucug

SEQ ID NO: 1937063 - RNA, 19 nt, Homo sapiens
  misc_RNA (1)...(19): siRNA sense strand
ccacugagcugguuguaga

SEQ ID NO: 1937064 - RNA, 19 nt, Homo sapiens
  misc_RNA (1)...(19): siRNA sense strand
agacagagcugggcaagaa

SEQ ID NO: 1937065 - RNA, 19 nt, Homo sapiens
  misc_RNA (1)...(19): siRNA sense strand
ggagugaaccgcagcauug

SEQ ID NO: 1937066 - RNA, 19 nt, Homo sapiens
  misc_RNA (1)...(19): siRNA sense strand
gcaggugacucagcuauuc

SEQ ID NO: 1937067 - RNA, 19 nt, Homo sapiens
  misc_RNA (1)...(19): siRNA sense strand
gcaagaagacccucagcaa

SEQ ID NO: 1937068 - RNA, 19 nt, Homo sapiens
  misc_RNA (1)...(19): siRNA sense strand
ccacucaggugucagaugu

SEQ ID NO: 1937069 - RNA, 19 nt, Homo sapiens
  misc_RNA (1)...(19): siRNA sense strand
ggaaaucaacucccuaucu

SEQ ID NO: 1937070 - RNA, 19 nt, Homo sapiens
  misc_RNA (1)...(19): siRNA sense strand
uccgaaagcugcaggauug

SEQ ID NO: 1937071 - RNA, 19 nt, Homo sapiens
  misc_RNA (1)...(19): siRNA sense strand
cugaugagcuuguguucaa

SEQ ID NO: 1937072 - RNA, 19 nt, Homo sapiens
  misc_RNA (1)...(19): siRNA sense strand
gaccgaauccucauccauu

SEQ ID NO: 1937073 - RNA, 19 nt, Homo sapiens
  misc_RNA (1)...(19): siRNA sense strand
ggacacaggcaccaucaug

SEQ ID NO: 1937074 - RNA, 19 nt, Homo sapiens
  misc_RNA (1)...(19): siRNA sense strand
gagcuuggcuaucagaacu

SEQ ID NO: 1937075 - RNA, 19 nt, Homo sapiens
  misc_RNA (1)...(19): siRNA sense strand
aggaagagaucaccaagau

SEQ ID NO: 1937076 - RNA, 19 nt, Homo sapiens
  misc_RNA (1)...(19): siRNA sense strand
ccuaagggcucccgcuuca

SEQ ID NO: 1937077 - RNA, 19 nt, Homo sapiens
  misc_RNA (1)...(19): siRNA sense strand
guucaaggaugccaagaag

SEQ ID NO: 1937078 - RNA, 19 nt, Homo sapiens
  misc_RNA (1)...(19): siRNA sense strand
uagcugcucugcacgagaa

SEQ ID NO: 1937079 - RNA, 19 nt, Homo sapiens
  misc_RNA (1)...(19): siRNA sense strand
ucagcaaccuggagaagau

SEQ ID NO: 1937080 - RNA, 19 nt, Homo sapiens
  misc_RNA (1)...(19): siRNA sense strand
caagaaggacgaugcuguu

SEQ ID NO: 1937081 - RNA, 19 nt, Homo sapiens
  misc_RNA (1)...(19): siRNA sense strand
gaaggccuauaaguaucua

SEQ ID NO: 1937082 - RNA, 19 nt, Homo sapiens
  misc_RNA (1)...(19): siRNA sense strand
gcaggaaggaggaggucua

SEQ ID NO: 1937083 - RNA, 19 nt, Homo sapiens
  misc_RNA (1)...(19): siRNA sense strand
gaaggaggaggucuauaag

SEQ ID NO: 1937084 - RNA, 19 nt, Homo sapiens
  misc_RNA (1)...(19): siRNA sense strand
ggacguuugcggugacuga

SEQ ID NO: 1937085 - RNA, 19 nt, Homo sapiens
  misc_RNA (1)...(19): siRNA sense strand
ggaagcagaaggaagagau

SEQ ID NO: 1937086 - RNA, 19 nt, Homo sapiens
  misc_RNA (1)...(19): siRNA sense strand
gcaacugacugagcaucug

SEQ ID NO: 1937087 - RNA, 19 nt, Homo sapiens
  misc_RNA (1)...(19): siRNA sense strand
ucaaggaugccaagaagga

SEQ ID NO: 1937088 - RNA, 19 nt, Homo sapiens
  misc_RNA (1)...(19): siRNA sense strand
uggcagagauccaagaacu

SEQ ID NO: 1937089 - RNA, 19 nt, Homo sapiens
  misc_RNA (1)...(19): siRNA sense strand
ccuuggagcuuggcuauca

SEQ ID NO: 1937090 - RNA, 19 nt, Homo sapiens
  misc_RNA (1)...(19): siRNA sense strand
ucggaaggccuauaaguau

SEQ ID NO: 1937091 - RNA, 19 nt, Homo sapiens
  misc_RNA (1)...(19): siRNA sense strand
gaagcuggaccggacguuu

SEQ ID NO: 1937092 - RNA, 19 nt, Homo sapiens
  misc_RNA (1)...(19): siRNA sense strand
cgaugggacugccaaccuu

SEQ ID NO: 1937093 - RNA, 19 nt, Homo sapiens
  misc_RNA (1)...(19): siRNA sense strand
aggaggaggucuauaagca

SEQ ID NO: 1937094 - RNA, 19 nt, Homo sapiens
  misc_RNA (1)...(19): siRNA sense strand
gcuaucagaacuuccucua

SEQ ID NO: 1937095 - RNA, 19 nt, Homo sapiens
  misc_RNA (1)...(19): siRNA sense strand
cguuugcggugacugauga

SEQ ID NO: 1937096 - RNA, 19 nt, Homo sapiens
  misc_RNA (1)...(19): siRNA sense strand
gcacagcaagcucaguaca

SEQ ID NO: 1937097 - RNA, 19 nt, Homo sapiens
  misc_RNA (1)...(19): siRNA sense strand
ccaagacuggugcuccuaa

SEQ ID NO: 1937098 - RNA, 19 nt, Homo sapiens
  misc_RNA (1)...(19): siRNA sense strand
cggcacagcaagcucagua

SEQ ID NO: 1937099 - RNA, 19 nt, Homo sapiens
  misc_RNA (1)...(19): siRNA sense strand
gaacugcagccagcucauc

SEQ ID NO: 1937100 - RNA, 19 nt, Homo sapiens
  misc_RNA (1)...(19): siRNA sense strand
cggaaggccuauaaguauc

SEQ ID NO: 1937101 - RNA, 19 nt, Homo sapiens
  misc_RNA (1)...(19): siRNA sense strand
gcauggaccugggcuaucc

SEQ ID NO: 1937102 - RNA, 19 nt, Homo sapiens
  misc_RNA (1)...(19): siRNA sense strand
aggagcagaucgagacaga

SEQ ID NO: 1937103 - RNA, 19 nt, Homo sapiens
  misc_RNA (1)...(19): siRNA sense strand
gaggugagccacgggaguu

SEQ ID NO: 1937104 - RNA, 19 nt, Homo sapiens
  misc_RNA (1)...(19): siRNA sense strand
ggaaggccuauaaguaucu

SEQ ID NO: 1937105 - RNA, 19 nt, Homo sapiens
  misc_RNA (1)...(19): siRNA sense strand
agaccugcuucucuucuug

SEQ ID NO: 1937106 - RNA, 19 nt, Homo sapiens
  misc_RNA (1)...(19): siRNA sense strand
gcaacauccggaagcagaa

SEQ ID NO: 1937107 - RNA, 19 nt, Homo sapiens
  misc_RNA (1)...(19): siRNA sense strand
ggagaucgugggcaacauc

SEQ ID NO: 1937108 - RNA, 19 nt, Homo sapiens
  misc_RNA (1)...(19): siRNA sense strand
caagacuggugcuccuaag

SEQ ID NO: 1937109 - RNA, 19 nt, Homo sapiens
  misc_RNA (1)...(19): siRNA sense strand
ggcaguuccuccagaugug

SEQ ID NO: 1937110 - RNA, 19 nt, Homo sapiens
  misc_RNA (1)...(19): siRNA sense strand
gacccugggcgucagcuuu

SEQ ID NO: 1937111 - RNA, 19 nt, Homo sapiens
  misc_RNA (1)...(19): siRNA sense strand
gagugaaccgcagcauuga

SEQ ID NO: 1937112 - RNA, 19 nt, Homo sapiens
  misc_RNA (1)...(19): siRNA sense strand
gaggacacaggcaccauca

SEQ ID NO: 1937113 - RNA, 19 nt, Homo sapiens
  misc_RNA (1)...(19): siRNA sense strand
ugacugaugagcuuguguu

SEQ ID NO: 1937114 - RNA, 19 nt, Homo sapiens
  misc_RNA (1)...(19): siRNA sense strand
gaagcagaaggaagagauc

SEQ ID NO: 1937115 - RNA, 19 nt, Homo sapiens
  misc_RNA (1)...(19): siRNA sense strand
gagcaucugcgccaaagcu

SEQ ID NO: 1937116 - RNA, 19 nt, Homo sapiens
  misc_RNA (1)...(19): siRNA sense strand
cuccagaugugcagaccuu

SEQ ID NO: 1937117 - RNA, 19 nt, Homo sapiens
  misc_RNA (1)...(19): siRNA sense strand
ccaggccacucagguguca

SEQ ID NO: 1937118 - RNA, 19 nt, Homo sapiens
  misc_RNA (1)...(19): siRNA sense strand
uggccucgcuccucgaaca

SEQ ID NO: 1937119 - RNA, 19 nt, Homo sapiens
  misc_RNA (1)...(19): siRNA sense strand
ggagguugaggccgacaug

SEQ ID NO: 1937120 - RNA, 19 nt, Homo sapiens
  misc_RNA (1)...(19): siRNA sense strand
ggucgugccagaauugagu

SEQ ID NO: 1937121 - RNA, 19 nt, Homo sapiens
  misc_RNA (1)...(19): siRNA sense strand
ggaccgaauccucauccau

SEQ ID NO: 1937122 - RNA, 19 nt, Homo sapiens
  misc_RNA (1)...(19): siRNA sense strand
cagcuugugguggagaaua

SEQ ID NO: 1937123 - RNA, 19 nt, Homo sapiens
  misc_RNA (1)...(19): siRNA sense strand
gaagauccgggaggacuac

SEQ ID NO: 1937124 - RNA, 19 nt, Homo sapiens
  misc_RNA (1)...(19): siRNA sense strand
uucggaaggccuauaagua

SEQ ID NO: 1937125 - RNA, 19 nt, Homo sapiens
  misc_RNA (1)...(19): siRNA sense strand
agaaggaagagaucaccaa

SEQ ID NO: 1937126 - RNA, 19 nt, Homo sapiens
  misc_RNA (1)...(19): siRNA sense strand
ucuauaagcagcugauguc

SEQ ID NO: 1937127 - RNA, 19 nt, Homo sapiens
  misc_RNA (1)...(19): siRNA sense strand
gcuuggcuaucagaacuuc

SEQ ID NO: 1937128 - RNA, 19 nt, Homo sapiens
  misc_RNA (1)...(19): siRNA sense strand
guucggaaggccuauaagu

SEQ ID NO: 1937129 - RNA, 19 nt, Homo sapiens
  misc_RNA (1)...(19): siRNA sense strand
gcuggcagagauccaagaa

SEQ ID NO: 1937130 - RNA, 19 nt, Homo sapiens
  misc_RNA (1)...(19): siRNA sense strand
acucagagaaguucaccuu

SEQ ID NO: 1937131 - RNA, 19 nt, Homo sapiens
  misc_RNA (1)...(19): siRNA sense strand
gguugaggccgacaugaag

SEQ ID NO: 1937132 - RNA, 19 nt, Homo sapiens
  misc_RNA (1)...(19): siRNA sense strand
gagcagcuggaaggaguga

SEQ ID NO: 1937133 - RNA, 19 nt, Homo sapiens
  misc_RNA (1)...(19): siRNA sense strand
gagcugcaguugaggaauu

SEQ ID NO: 1937134 - RNA, 19 nt, Homo sapiens
  misc_RNA (1)...(19): siRNA sense strand
ccaauaggcagaucaauga

SEQ ID NO: 1937135 - RNA, 19 nt, Homo sapiens
  misc_RNA (1)...(19): siRNA sense strand
ugagagaaaucagaagaaa

SEQ ID NO: 1937136 - RNA, 19 nt, Homo sapiens
  misc_RNA (1)...(19): siRNA sense strand
gcaaauauucaccaggaaa

SEQ ID NO: 1937137 - RNA, 19 nt, Homo sapiens
  misc_RNA (1)...(19): siRNA sense strand
gagaugagagaaaucagaa

SEQ ID NO: 1937138 - RNA, 19 nt, Homo sapiens
  misc_RNA (1)...(19): siRNA sense strand
gaugagagaaaucagaaga

SEQ ID NO: 1937139 - RNA, 19 nt, Homo sapiens
  misc_RNA (1)...(19): siRNA sense strand
ccaccagccugcaggaaau

SEQ ID NO: 1937140 - RNA, 19 nt, Homo sapiens
  misc_RNA (1)...(19): siRNA sense strand
ggagaugagagaaaucaga

SEQ ID NO: 1937141 - RNA, 19 nt, Homo sapiens
  misc_RNA (1)...(19): siRNA sense strand
caugaugaauuuugccuua

SEQ ID NO: 1937142 - RNA, 19 nt, Homo sapiens
  misc_RNA (1)...(19): siRNA sense strand
uuagggagcugcaguugag

SEQ ID NO: 1937143 - RNA, 19 nt, Homo sapiens
  misc_RNA (1)...(19): siRNA sense strand
gaggagaugagagaaauca

SEQ ID NO: 1937144 - RNA, 19 nt, Homo sapiens
  misc_RNA (1)...(19): siRNA sense strand
ggagcucucuaaucaccau

SEQ ID NO: 1937145 - RNA, 19 nt, Homo sapiens
  misc_RNA (1)...(19): siRNA sense strand
uggagaugauauggaaaua

SEQ ID NO: 1937146 - RNA, 19 nt, Homo sapiens
  misc_RNA (1)...(19): siRNA sense strand
uggaggagaugagagaaau

SEQ ID NO: 1937147 - RNA, 19 nt, Homo sapiens
  misc_RNA (1)...(19): siRNA sense strand
ggaauugucugcguauccu

SEQ ID NO: 1937148 - RNA, 19 nt, Homo sapiens
  misc_RNA (1)...(19): siRNA sense strand
gaggaagaccgcccuuugg

SEQ ID NO: 1937149 - RNA, 19 nt, Homo sapiens
  misc_RNA (1)...(19): siRNA sense strand
ggcaaauauucaccaggaa

SEQ ID NO: 1937150 - RNA, 19 nt, Homo sapiens
  misc_RNA (1)...(19): siRNA sense strand
ggagcagccuaugcagaau

SEQ ID NO: 1937151 - RNA, 19 nt, Homo sapiens
  misc_RNA (1)...(19): siRNA sense strand
gagaggaagaccgcccuuu

SEQ ID NO: 1937152 - RNA, 19 nt, Homo sapiens
  misc_RNA (1)...(19): siRNA sense strand
cuaaucaccaugaccauca

SEQ ID NO: 1937153 - RNA, 19 nt, Homo sapiens
  misc_RNA (1)...(19): siRNA sense strand
uggagcagccuaugcagaa

SEQ ID NO: 1937154 - RNA, 19 nt, Homo sapiens
  misc_RNA (1)...(19): siRNA sense strand
agaggaagaccgcccuuug

SEQ ID NO: 1937155 - RNA, 19 nt, Homo sapiens
  misc_RNA (1)...(19): siRNA sense strand
gagcagccuaugcagaaug

SEQ ID NO: 1937156 - RNA, 19 nt, Homo sapiens
  misc_RNA (1)...(19): siRNA sense strand
aaauauucauggaggagau

SEQ ID NO: 1937157 - RNA, 19 nt, Homo sapiens
  misc_RNA (1)...(19): siRNA sense strand
gccaccagccugcaggaaa

SEQ ID NO: 1937158 - RNA, 19 nt, Homo sapiens
  misc_RNA (1)...(19): siRNA sense strand
cccaauaggcagaucaaug

SEQ ID NO: 1937159 - RNA, 19 nt, Homo sapiens
  misc_RNA (1)...(19): siRNA sense strand
uaugcagaauggagaggaa

SEQ ID NO: 1937160 - RNA, 19 nt, Homo sapiens
  misc_RNA (1)...(19): siRNA sense strand
caaauauucaccaggaaaa

SEQ ID NO: 1937161 - RNA, 19 nt, Homo sapiens
  misc_RNA (1)...(19): siRNA sense strand
gaggaauugucugcguauc

SEQ ID NO: 1937162 - RNA, 19 nt, Homo sapiens
  misc_RNA (1)...(19): siRNA sense strand
aauugucugcguauccuua

SEQ ID NO: 1937163 - RNA, 19 nt, Homo sapiens
  misc_RNA (1)...(19): siRNA sense strand
gaaccaagcguuuaaugaa

SEQ ID NO: 1937164 - RNA, 19 nt, Homo sapiens
  misc_RNA (1)...(19): siRNA sense strand
gcacccugcugcugaauaa

SEQ ID NO: 1937165 - RNA, 19 nt, Homo sapiens
  misc_RNA (1)...(19): siRNA sense strand
ugaagacaaucucaaauuc

SEQ ID NO: 1937166 - RNA, 19 nt, Homo sapiens
  misc_RNA (1)...(19): siRNA sense strand
ggaaccaagcguuuaauga

SEQ ID NO: 1937167 - RNA, 19 nt, Homo sapiens
  misc_RNA (1)...(19): siRNA sense strand
gaagacaaucucaaauuca

SEQ ID NO: 1937168 - RNA, 19 nt, Homo sapiens
  misc_RNA (1)...(19): siRNA sense strand
ccaaguggcggcaucuuaa

SEQ ID NO: 1937169 - RNA, 19 nt, Homo sapiens
  misc_RNA (1)...(19): siRNA sense strand
gaucacugcuggccuacuc

SEQ ID NO: 1937170 - RNA, 19 nt, Homo sapiens
  misc_RNA (1)...(19): siRNA sense strand
ucaaauucauccucaugga

SEQ ID NO: 1937171 - RNA, 19 nt, Homo sapiens
  misc_RNA (1)...(19): siRNA sense strand
ccgcugccauagccaguaa

SEQ ID NO: 1937172 - RNA, 19 nt, Homo sapiens
  misc_RNA (1)...(19): siRNA sense strand
caaggagaccgugggcuuu

SEQ ID NO: 1937173 - RNA, 19 nt, Homo sapiens
  misc_RNA (1)...(19): siRNA sense strand
gaccgugggcuuuggaaug

SEQ ID NO: 1937174 - RNA, 19 nt, Homo sapiens
  misc_RNA (1)...(19): siRNA sense strand
cccaaguggcggcaucuua

SEQ ID NO: 1937175 - RNA, 19 nt, Homo sapiens
  misc_RNA (1)...(19): siRNA sense strand
gggaaccaagcguuuaaug

SEQ ID NO: 1937176 - RNA, 19 nt, Homo sapiens
  misc_RNA (1)...(19): siRNA sense strand
accaagcguuuaaugaaga

SEQ ID NO: 1937177 - RNA, 19 nt, Homo sapiens
  misc_RNA (1)...(19): siRNA sense strand
aaccaagcguuuaaugaag

SEQ ID NO: 1937178 - RNA, 19 nt, Homo sapiens
  misc_RNA (1)...(19): siRNA sense strand
cccaggcuuuggugcagua

SEQ ID NO: 1937179 - RNA, 19 nt, Homo sapiens
  misc_RNA (1)...(19): siRNA sense strand
ugccauagccaguaacauc

SEQ ID NO: 1937180 - RNA, 19 nt, Homo sapiens
  misc_RNA (1)...(19): siRNA sense strand
cugcuggccuacucugguu

SEQ ID NO: 1937181 - RNA, 19 nt, Homo sapiens
  misc_RNA (1)...(19): siRNA sense strand
gcucuaaggucucaacuga

SEQ ID NO: 1937182 - RNA, 19 nt, Homo sapiens
  misc_RNA (1)...(19): siRNA sense strand
uggcagacauccucaauga

SEQ ID NO: 1937183 - RNA, 19 nt, Homo sapiens
  misc_RNA (1)...(19): siRNA sense strand
cguaacaggugaucgucua

SEQ ID NO: 1937184 - RNA, 19 nt, Homo sapiens
  misc_RNA (1)...(19): siRNA sense strand
gcagaguugcgaggaaaua

SEQ ID NO: 1937185 - RNA, 19 nt, Homo sapiens
  misc_RNA (1)...(19): siRNA sense strand
ccucgaagguauuguagug

SEQ ID NO: 1937186 - RNA, 19 nt, Homo sapiens
  misc_RNA (1)...(19): siRNA sense strand
ggugaucgucuaagagaaa

SEQ ID NO: 1937187 - RNA, 19 nt, Homo sapiens
  misc_RNA (1)...(19): siRNA sense strand
ucaaauaccuggggcuaaa

SEQ ID NO: 1937188 - RNA, 19 nt, Homo sapiens
  misc_RNA (1)...(19): siRNA sense strand
caggugaucgucuaagaga

SEQ ID NO: 1937189 - RNA, 19 nt, Homo sapiens
  misc_RNA (1)...(19): siRNA sense strand
guaacaggugaucgucuaa

SEQ ID NO: 1937190 - RNA, 19 nt, Homo sapiens
  misc_RNA (1)...(19): siRNA sense strand
gcugcagaguugcgaggaa

SEQ ID NO: 1937191 - RNA, 19 nt, Homo sapiens
  misc_RNA (1)...(19): siRNA sense strand
gaucgggaaccagccauga

SEQ ID NO: 1937192 - RNA, 19 nt, Homo sapiens
  misc_RNA (1)...(19): siRNA sense strand
aacaggugaucgucuaaga

SEQ ID NO: 1937193 - RNA, 19 nt, Homo sapiens
  misc_RNA (1)...(19): siRNA sense strand
cugcagaguugcgaggaaa

SEQ ID NO: 1937194 - RNA, 19 nt, Homo sapiens
  misc_RNA (1)...(19): siRNA sense strand
guucugcucuaaggucuca

SEQ ID NO: 1937195 - RNA, 19 nt, Homo sapiens
  misc_RNA (1)...(19): siRNA sense strand
ggaaccagccaugaagaca

SEQ ID NO: 1937196 - RNA, 19 nt, Homo sapiens
  misc_RNA (1)...(19): siRNA sense strand
caugaagacaggccagaga

SEQ ID NO: 1937197 - RNA, 19 nt, Homo sapiens
  misc_RNA (1)...(19): siRNA sense strand
auaccucccuugcuguugu

SEQ ID NO: 1937198 - RNA, 19 nt, Homo sapiens
  misc_RNA (1)...(19): siRNA sense strand
acccugugaugccaguaua

SEQ ID NO: 1937199 - RNA, 19 nt, Homo sapiens
  misc_RNA (1)...(19): siRNA sense strand
cccagguugugguaacuug

SEQ ID NO: 1937200 - RNA, 19 nt, Homo sapiens
  misc_RNA (1)...(19): siRNA sense strand
gggaagcgcuuuaccaaua

SEQ ID NO: 1937201 - RNA, 19 nt, Homo sapiens
  misc_RNA (1)...(19): siRNA sense strand
ggaagcgcuuuaccaauaa

SEQ ID NO: 1937202 - RNA, 19 nt, Homo sapiens
  misc_RNA (1)...(19): siRNA sense strand
gaagaagcacgaugucuga

SEQ ID NO: 1937203 - RNA, 19 nt, Homo sapiens
  misc_RNA (1)...(19): siRNA sense strand
aauaagcccuaucugacuu

SEQ ID NO: 1937204 - RNA, 19 nt, Homo sapiens
  misc_RNA (1)...(19): siRNA sense strand
gcgggaagcgcuuuaccaa

SEQ ID NO: 1937205 - RNA, 19 nt, Homo sapiens
  misc_RNA (1)...(19): siRNA sense strand
gaagcgcuuuaccaauaag

SEQ ID NO: 1937206 - RNA, 19 nt, Homo sapiens
  misc_RNA (1)...(19): siRNA sense strand
gcaaggccuuccgccacaa

SEQ ID NO: 1937207 - RNA, 19 nt, Homo sapiens
  misc_RNA (1)...(19): siRNA sense strand
ccagcuaguugcccacaag

SEQ ID NO: 1937208 - RNA, 19 nt, Homo sapiens
  misc_RNA (1)...(19): siRNA sense strand
caauaagcccuaucugacu

SEQ ID NO: 1937209 - RNA, 19 nt, Homo sapiens
  misc_RNA (1)...(19): siRNA sense strand
aacccaaccugcugucuca

SEQ ID NO: 1937210 - RNA, 19 nt, Homo sapiens
  misc_RNA (1)...(19): siRNA sense strand
gaguguggccgucgcuuuc

SEQ ID NO: 1937211 - RNA, 19 nt, Homo sapiens
  misc_RNA (1)...(19): siRNA sense strand
ccagaaguccaaccucauc

SEQ ID NO: 1937212 - RNA, 19 nt, Homo sapiens
  misc_RNA (1)...(19): siRNA sense strand
agacgcuucuggcgacgaa

SEQ ID NO: 1937213 - RNA, 19 nt, Homo sapiens
  misc_RNA (1)...(19): siRNA sense strand
ccacaagcgggugcacgua

SEQ ID NO: 1937214 - RNA, 19 nt, Homo sapiens
  misc_RNA (1)...(19): siRNA sense strand
accaauaagcccuaucuga

SEQ ID NO: 1937215 - RNA, 19 nt, Homo sapiens
  misc_RNA (1)...(19): siRNA sense strand
ccagugggaccagcuaguu

SEQ ID NO: 1937216 - RNA, 19 nt, Homo sapiens
  misc_RNA (1)...(19): siRNA sense strand
gcaagcgcuuccggcacaa

SEQ ID NO: 1937217 - RNA, 19 nt, Homo sapiens
  misc_RNA (1)...(19): siRNA sense strand
cuucugcugugccaucugu

SEQ ID NO: 1937218 - RNA, 19 nt, Homo sapiens
  misc_RNA (1)...(19): siRNA sense strand
ugaguguggccgucgcuuu

SEQ ID NO: 1937219 - RNA, 19 nt, Homo sapiens
  misc_RNA (1)...(19): siRNA sense strand
gggaagcgcuuuaccaaua

SEQ ID NO: 1937220 - RNA, 19 nt, Homo sapiens
  misc_RNA (1)...(19): siRNA sense strand
ggaagcgcuuuaccaauaa

SEQ ID NO: 1937221 - RNA, 19 nt, Homo sapiens
  misc_RNA (1)...(19): siRNA sense strand
gaagaagcacgaugucuga

SEQ ID NO: 1937222 - RNA, 19 nt, Homo sapiens
  misc_RNA (1)...(19): siRNA sense strand
aauaagcccuaucugacuu

SEQ ID NO: 1937223 - RNA, 19 nt, Homo sapiens
  misc_RNA (1)...(19): siRNA sense strand
gcgggaagcgcuuuaccaa

SEQ ID NO: 1937224 - RNA, 19 nt, Homo sapiens
  misc_RNA (1)...(19): siRNA sense strand
gaagcgcuuuaccaauaag

SEQ ID NO: 1937225 - RNA, 19 nt, Homo sapiens
  misc_RNA (1)...(19): siRNA sense strand
gcaaggccuuccgccacaa

SEQ ID NO: 1937226 - RNA, 19 nt, Homo sapiens
  misc_RNA (1)...(19): siRNA sense strand
ccagcuaguugcccacaag

SEQ ID NO: 1937227 - RNA, 19 nt, Homo sapiens
  misc_RNA (1)...(19): siRNA sense strand
caauaagcccuaucugacu

SEQ ID NO: 1937228 - RNA, 19 nt, Homo sapiens
  misc_RNA (1)...(19): siRNA sense strand
aacccaaccugcugucuca

SEQ ID NO: 1937229 - RNA, 19 nt, Homo sapiens
  misc_RNA (1)...(19): siRNA sense strand
gaguguggccgucgcuuuc

SEQ ID NO: 1937230 - RNA, 19 nt, Homo sapiens
  misc_RNA (1)...(19): siRNA sense strand
ccagaaguccaaccucauc

SEQ ID NO: 1937231 - RNA, 19 nt, Homo sapiens
  misc_RNA (1)...(19): siRNA sense strand
agacgcuucuggcgacgaa

SEQ ID NO: 1937232 - RNA, 19 nt, Homo sapiens
  misc_RNA (1)...(19): siRNA sense strand
ccacaagcgggugcacgua

SEQ ID NO: 1937233 - RNA, 19 nt, Homo sapiens
  misc_RNA (1)...(19): siRNA sense strand
accaauaagcccuaucuga

SEQ ID NO: 1937234 - RNA, 19 nt, Homo sapiens
  misc_RNA (1)...(19): siRNA sense strand
ccagugggaccagcuaguu

SEQ ID NO: 1937235 - RNA, 19 nt, Homo sapiens
  misc_RNA (1)...(19): siRNA sense strand
gcaagcgcuuccggcacaa

SEQ ID NO: 1937236 - RNA, 19 nt, Homo sapiens
  misc_RNA (1)...(19): siRNA sense strand
cuucugcugugccaucugu

SEQ ID NO: 1937237 - RNA, 19 nt, Homo sapiens
  misc_RNA (1)...(19): siRNA sense strand
ugaguguggccgucgcuuu

SEQ ID NO: 1937238 - RNA, 19 nt, Homo sapiens
  misc_RNA (1)...(19): siRNA sense strand
gugacccucuggauucuaa

SEQ ID NO: 1937239 - RNA, 19 nt, Homo sapiens
  misc_RNA (1)...(19): siRNA sense strand
gcccugguguuggcuauuu

SEQ ID NO: 1937240 - RNA, 19 nt, Homo sapiens
  misc_RNA (1)...(19): siRNA sense strand
gguguuggcuauuuauggu

SEQ ID NO: 1937241 - RNA, 19 nt, Homo sapiens
  misc_RNA (1)...(19): siRNA sense strand
uguuggcuauuuaugguua

SEQ ID NO: 1937242 - RNA, 19 nt, Homo sapiens
  misc_RNA (1)...(19): siRNA sense strand
gcuagaagacgaggccaaa

SEQ ID NO: 1937243 - RNA, 19 nt, Homo sapiens
  misc_RNA (1)...(19): siRNA sense strand
gaagcugacacccgagcaa

SEQ ID NO: 1937244 - RNA, 19 nt, Homo sapiens
  misc_RNA (1)...(19): siRNA sense strand
gcuggugacccucuggauu

SEQ ID NO: 1937245 - RNA, 19 nt, Homo sapiens
  misc_RNA (1)...(19): siRNA sense strand
ccgagcaacugcauuccau

SEQ ID NO: 1937246 - RNA, 19 nt, Homo sapiens
  misc_RNA (1)...(19): siRNA sense strand
cgauuucccaggagcguuu

SEQ ID NO: 1937247 - RNA, 19 nt, Homo sapiens
  misc_RNA (1)...(19): siRNA sense strand
cccugguguuggcuauuua

SEQ ID NO: 1937248 - RNA, 19 nt, Homo sapiens
  misc_RNA (1)...(19): siRNA sense strand
gcagggcauguuucuguuu

SEQ ID NO: 1937249 - RNA, 19 nt, Homo sapiens
  misc_RNA (1)...(19): siRNA sense strand
guacaaguccuggcccuau

SEQ ID NO: 1937250 - RNA, 19 nt, Homo sapiens
  misc_RNA (1)...(19): siRNA sense strand
gauaagcagagcuguucuu

SEQ ID NO: 1937251 - RNA, 19 nt, Homo sapiens
  misc_RNA (1)...(19): siRNA sense strand
ggaggucucgggaguguag

SEQ ID NO: 1937252 - RNA, 19 nt, Homo sapiens
  misc_RNA (1)...(19): siRNA sense strand
guccugggauggaguguca

SEQ ID NO: 1937253 - RNA, 19 nt, Homo sapiens
  misc_RNA (1)...(19): siRNA sense strand
ggcagggcauguuucuguu

SEQ ID NO: 1937254 - RNA, 19 nt, Homo sapiens
  misc_RNA (1)...(19): siRNA sense strand
aguccugggugaagauauu

SEQ ID NO: 1937255 - RNA, 19 nt, Homo sapiens
  misc_RNA (1)...(19): siRNA sense strand
ccucagggccuacuggaau

SEQ ID NO: 1937256 - RNA, 19 nt, Homo sapiens
  misc_RNA (1)...(19): siRNA sense strand
cucccagcgugacuuauuu

SEQ ID NO: 1937257 - RNA, 19 nt, Homo sapiens
  misc_RNA (1)...(19): siRNA sense strand
uacaaguccuggcccuaug

SEQ ID NO: 1937258 - RNA, 19 nt, Homo sapiens
  misc_RNA (1)...(19): siRNA sense strand
ccagcugccucggguacaa

SEQ ID NO: 1937259 - RNA, 19 nt, Homo sapiens
  misc_RNA (1)...(19): siRNA sense strand
uggcagggcauguuucugu

SEQ ID NO: 1937260 - RNA, 19 nt, Homo sapiens
  misc_RNA (1)...(19): siRNA sense strand
ccucccagcgugacuuauu

SEQ ID NO: 1937261 - RNA, 19 nt, Homo sapiens
  misc_RNA (1)...(19): siRNA sense strand
aaccagcccugcgcgaaga

SEQ ID NO: 1937262 - RNA, 19 nt, Homo sapiens
  misc_RNA (1)...(19): siRNA sense strand
caaccaagcuuucauuuaa

SEQ ID NO: 1937263 - RNA, 19 nt, Homo sapiens
  misc_RNA (1)...(19): siRNA sense strand
uaccacaucugccuauuua

SEQ ID NO: 1937264 - RNA, 19 nt, Homo sapiens
  misc_RNA (1)...(19): siRNA sense strand
ggauuucaguccuugcuua

SEQ ID NO: 1937265 - RNA, 19 nt, Homo sapiens
  misc_RNA (1)...(19): siRNA sense strand
cagcauauauugagaugaa

SEQ ID NO: 1937266 - RNA, 19 nt, Homo sapiens
  misc_RNA (1)...(19): siRNA sense strand
gaugaauauucccugguua

SEQ ID NO: 1937267 - RNA, 19 nt, Homo sapiens
  misc_RNA (1)...(19): siRNA sense strand
gaucauacuugggaaaaua

SEQ ID NO: 1937268 - RNA, 19 nt, Homo sapiens
  misc_RNA (1)...(19): siRNA sense strand
cagcuuguauagauuauug

SEQ ID NO: 1937269 - RNA, 19 nt, Homo sapiens
  misc_RNA (1)...(19): siRNA sense strand
gacguuaacuaucugcuau

SEQ ID NO: 1937270 - RNA, 19 nt, Homo sapiens
  misc_RNA (1)...(19): siRNA sense strand
ccugacagcuuguauagau

SEQ ID NO: 1937271 - RNA, 19 nt, Homo sapiens
  misc_RNA (1)...(19): siRNA sense strand
gguuauacuuugucaauag

SEQ ID NO: 1937272 - RNA, 19 nt, Homo sapiens
  misc_RNA (1)...(19): siRNA sense strand
ugacagcuuguauagauua

SEQ ID NO: 1937273 - RNA, 19 nt, Homo sapiens
  misc_RNA (1)...(19): siRNA sense strand
ugaaggcacagaaugcuua

SEQ ID NO: 1937274 - RNA, 19 nt, Homo sapiens
  misc_RNA (1)...(19): siRNA sense strand
gacauuggauuaccuuugg

SEQ ID NO: 1937275 - RNA, 19 nt, Homo sapiens
  misc_RNA (1)...(19): siRNA sense strand
guuauacugugagaucuaa

SEQ ID NO: 1937276 - RNA, 19 nt, Homo sapiens
  misc_RNA (1)...(19): siRNA sense strand
ccaagcucauugucuguuu

SEQ ID NO: 1937277 - RNA, 19 nt, Homo sapiens
  misc_RNA (1)...(19): siRNA sense strand
uaucugcuauucuugauca

SEQ ID NO: 1937278 - RNA, 19 nt, Homo sapiens
  misc_RNA (1)...(19): siRNA sense strand
aaacaaccaagcuuucauu

SEQ ID NO: 1937279 - RNA, 19 nt, Homo sapiens
  misc_RNA (1)...(19): siRNA sense strand
acaaccaagcuuucauuua

SEQ ID NO: 1937280 - RNA, 19 nt, Homo sapiens
  misc_RNA (1)...(19): siRNA sense strand
ccaguuacgucaaacaaac

SEQ ID NO: 1937281 - RNA, 19 nt, Homo sapiens
  misc_RNA (1)...(19): siRNA sense strand
ccacuuacaauuccuaauc

SEQ ID NO: 1937282 - RNA, 19 nt, Homo sapiens
  misc_RNA (1)...(19): siRNA sense strand
ggauaacuuccuauaugaa

SEQ ID NO: 1937283 - RNA, 19 nt, Homo sapiens
  misc_RNA (1)...(19): siRNA sense strand
ucaucccacuccaguuaua

SEQ ID NO: 1937284 - RNA, 19 nt, Homo sapiens
  misc_RNA (1)...(19): siRNA sense strand
agaugaauauucccugguu

SEQ ID NO: 1937285 - RNA, 19 nt, Homo sapiens
  misc_RNA (1)...(19): siRNA sense strand
aaguucagauuccagcaua

SEQ ID NO: 1937286 - RNA, 19 nt, Homo sapiens
  misc_RNA (1)...(19): siRNA sense strand
cauaaccuguugggaagaa

SEQ ID NO: 1937287 - RNA, 19 nt, Homo sapiens
  misc_RNA (1)...(19): siRNA sense strand
ugaauauucccugguuaua

SEQ ID NO: 1937288 - RNA, 19 nt, Homo sapiens
  misc_RNA (1)...(19): siRNA sense strand
guucagauuccagcauaua

SEQ ID NO: 1937289 - RNA, 19 nt, Homo sapiens
  misc_RNA (1)...(19): siRNA sense strand
uuucaucccacuccaguua

SEQ ID NO: 1937290 - RNA, 19 nt, Homo sapiens
  misc_RNA (1)...(19): siRNA sense strand
gauuaccuuuggauccauu

SEQ ID NO: 1937291 - RNA, 19 nt, Homo sapiens
  misc_RNA (1)...(19): siRNA sense strand
cagauuccagcauauauug

SEQ ID NO: 1937292 - RNA, 19 nt, Homo sapiens
  misc_RNA (1)...(19): siRNA sense strand
acacuaggaaugagaagaa

SEQ ID NO: 1937293 - RNA, 19 nt, Homo sapiens
  misc_RNA (1)...(19): siRNA sense strand
gaauauucccugguuauac

SEQ ID NO: 1937294 - RNA, 19 nt, Homo sapiens
  misc_RNA (1)...(19): siRNA sense strand
ucacuguccuuucuauguc

SEQ ID NO: 1937295 - RNA, 19 nt, Homo sapiens
  misc_RNA (1)...(19): siRNA sense strand
caguaccaguuacgucaaa

SEQ ID NO: 1937296 - RNA, 19 nt, Homo sapiens
  misc_RNA (1)...(19): siRNA sense strand
uuccuaaucuugagcaaau

SEQ ID NO: 1937297 - RNA, 19 nt, Homo sapiens
  misc_RNA (1)...(19): siRNA sense strand
uuucaguccuugcuuaugu

SEQ ID NO: 1937298 - RNA, 19 nt, Homo sapiens
  misc_RNA (1)...(19): siRNA sense strand
gauuauugccugaauuucu

SEQ ID NO: 1937299 - RNA, 19 nt, Homo sapiens
  misc_RNA (1)...(19): siRNA sense strand
ucagauuccagcauauauu

SEQ ID NO: 1937300 - RNA, 19 nt, Homo sapiens
  misc_RNA (1)...(19): siRNA sense strand
gcauuucacuagcauucgu

SEQ ID NO: 1937301 - RNA, 19 nt, Homo sapiens
  misc_RNA (1)...(19): siRNA sense strand
aauauucccugguuauacu

SEQ ID NO: 1937302 - RNA, 19 nt, Homo sapiens
  misc_RNA (1)...(19): siRNA sense strand
gaaggcacagaaugcuuau

SEQ ID NO: 1937303 - RNA, 19 nt, Homo sapiens
  misc_RNA (1)...(19): siRNA sense strand
cuacuuugguacaggcuau

SEQ ID NO: 1937304 - RNA, 19 nt, Homo sapiens
  misc_RNA (1)...(19): siRNA sense strand
ucacuagcauucguugauc

SEQ ID NO: 1937305 - RNA, 19 nt, Homo sapiens
  misc_RNA (1)...(19): siRNA sense strand
cuacuucagguaaucauug

SEQ ID NO: 1937306 - RNA, 19 nt, Homo sapiens
  misc_RNA (1)...(19): siRNA sense strand
guuaccauuuguacuacuu

SEQ ID NO: 1937307 - RNA, 19 nt, Homo sapiens
  misc_RNA (1)...(19): siRNA sense strand
gacagcuuguauagauuau

SEQ ID NO: 1937308 - RNA, 19 nt, Homo sapiens
  misc_RNA (1)...(19): siRNA sense strand
uagcuuucauaaccuguug

SEQ ID NO: 1937309 - RNA, 19 nt, Homo sapiens
  misc_RNA (1)...(19): siRNA sense strand
ucucgucacuguccuuucu

SEQ ID NO: 1937310 - RNA, 19 nt, Homo sapiens
  misc_RNA (1)...(19): siRNA sense strand
cuucagguaaucauuguuu

SEQ ID NO: 1937311 - RNA, 19 nt, Homo sapiens
  misc_RNA (1)...(19): siRNA sense strand
uaugucagcauucagaguu

SEQ ID NO: 1937312 - RNA, 19 nt, Homo sapiens
  misc_RNA (1)...(19): siRNA sense strand
ccacaucugccuauuuacu

SEQ ID NO: 1937313 - RNA, 19 nt, Homo sapiens
  misc_RNA (1)...(19): siRNA sense strand
ucagggauuuuguacuuuu

SEQ ID NO: 1937314 - RNA, 19 nt, Homo sapiens
  misc_RNA (1)...(19): siRNA sense strand
gauuucaguccuugcuuau

SEQ ID NO: 1937315 - RNA, 19 nt, Homo sapiens
  misc_RNA (1)...(19): siRNA sense strand
agacauuggauuaccuuug

SEQ ID NO: 1937316 - RNA, 19 nt, Homo sapiens
  misc_RNA (1)...(19): siRNA sense strand
cguuaacuaucugcuauuc

SEQ ID NO: 1937317 - RNA, 19 nt, Homo sapiens
  misc_RNA (1)...(19): siRNA sense strand
cacuaggaaugagaagaaa

SEQ ID NO: 1937318 - RNA, 19 nt, Homo sapiens
  misc_RNA (1)...(19): siRNA sense strand
cccuagacguuaacuaucu

SEQ ID NO: 1937319 - RNA, 19 nt, Homo sapiens
  misc_RNA (1)...(19): siRNA sense strand
uaacuaucugcuauucuug

SEQ ID NO: 1937320 - RNA, 19 nt, Homo sapiens
  misc_RNA (1)...(19): siRNA sense strand
uuccuuuacuuauggcuuu

SEQ ID NO: 1937321 - RNA, 19 nt, Homo sapiens
  misc_RNA (1)...(19): siRNA sense strand
caguguauugguuuaauug

SEQ ID NO: 1937322 - RNA, 19 nt, Homo sapiens
  misc_RNA (1)...(19): siRNA sense strand
guguauugguuuaauuguc

SEQ ID NO: 1937323 - RNA, 19 nt, Homo sapiens
  misc_RNA (1)...(19): siRNA sense strand
caagcuuucauuuaagugu

SEQ ID NO: 1937324 - RNA, 19 nt, Homo sapiens
  misc_RNA (1)...(19): siRNA sense strand
gacccagccaucuaccaaa

SEQ ID NO: 1937325 - RNA, 19 nt, Homo sapiens
  misc_RNA (1)...(19): siRNA sense strand
cugcuauucuugaucauac

SEQ ID NO: 1937326 - RNA, 19 nt, Homo sapiens
  misc_RNA (1)...(19): siRNA sense strand
agacguuaacuaucugcua

SEQ ID NO: 1937327 - RNA, 19 nt, Homo sapiens
  misc_RNA (1)...(19): siRNA sense strand
acaucugccuauuuacuca

SEQ ID NO: 1937328 - RNA, 19 nt, Homo sapiens
  misc_RNA (1)...(19): siRNA sense strand
cacuuacaauuccuaaucu

SEQ ID NO: 1937329 - RNA, 19 nt, Homo sapiens
  misc_RNA (1)...(19): siRNA sense strand
cuucauuccacuuacaauu

SEQ ID NO: 1937330 - RNA, 19 nt, Homo sapiens
  misc_RNA (1)...(19): siRNA sense strand
cagaguuacuggcugucau

SEQ ID NO: 1937331 - RNA, 19 nt, Homo sapiens
  misc_RNA (1)...(19): siRNA sense strand
uagcauucguugaucuuuu

SEQ ID NO: 1937332 - RNA, 19 nt, Homo sapiens
  misc_RNA (1)...(19): siRNA sense strand
gucacuguccuuucuaugu

SEQ ID NO: 1937333 - RNA, 19 nt, Homo sapiens
  misc_RNA (1)...(19): siRNA sense strand
aaccaagcuuucauuuaag

SEQ ID NO: 1937334 - RNA, 19 nt, Homo sapiens
  misc_RNA (1)...(19): siRNA sense strand
cugacagcuuguauagauu

SEQ ID NO: 1937335 - RNA, 19 nt, Homo sapiens
  misc_RNA (1)...(19): siRNA sense strand
ugacagaagucccggaaga

SEQ ID NO: 1937336 - RNA, 19 nt, Homo sapiens
  misc_RNA (1)...(19): siRNA sense strand
ggccaccacugcuguuaua

SEQ ID NO: 1937337 - RNA, 19 nt, Homo sapiens
  misc_RNA (1)...(19): siRNA sense strand
gcucguagcugugauugug

SEQ ID NO: 1937338 - RNA, 19 nt, Homo sapiens
  misc_RNA (1)...(19): siRNA sense strand
gagcaggagucgggcauug

SEQ ID NO: 1937339 - RNA, 19 nt, Homo sapiens
  misc_RNA (1)...(19): siRNA sense strand
ccucuuugcugccuucuug

SEQ ID NO: 1937340 - RNA, 19 nt, Homo sapiens
  misc_RNA (1)...(19): siRNA sense strand
ggaagagcccagccagaga

SEQ ID NO: 1937341 - RNA, 19 nt, Homo sapiens
  misc_RNA (1)...(19): siRNA sense strand
ucacacugcucaucuaucg

SEQ ID NO: 1937342 - RNA, 19 nt, Homo sapiens
  misc_RNA (1)...(19): siRNA sense strand
cugcucagcugccucagaa

SEQ ID NO: 1937343 - RNA, 19 nt, Homo sapiens
  misc_RNA (1)...(19): siRNA sense strand
acacugcucaucuaucgua

SEQ ID NO: 1937344 - RNA, 19 nt, Homo sapiens
  misc_RNA (1)...(19): siRNA sense strand
gcgcuucagcccagaugua

SEQ ID NO: 1937345 - RNA, 19 nt, Homo sapiens
  misc_RNA (1)...(19): siRNA sense strand
gcucagcugccucagaaga

SEQ ID NO: 1937346 - RNA, 19 nt, Homo sapiens
  misc_RNA (1)...(19): siRNA sense strand
ccacagugccugccacagu

SEQ ID NO: 1937347 - RNA, 19 nt, Homo sapiens
  misc_RNA (1)...(19): siRNA sense strand
gaagaagagaccacacaac

SEQ ID NO: 1937348 - RNA, 19 nt, Homo sapiens
  misc_RNA (1)...(19): siRNA sense strand
caccacugcuguuauaagg

SEQ ID NO: 1937349 - RNA, 19 nt, Homo sapiens
  misc_RNA (1)...(19): siRNA sense strand
gggcacaccauuugaagag

SEQ ID NO: 1937350 - RNA, 19 nt, Homo sapiens
  misc_RNA (1)...(19): siRNA sense strand
gagcgucacauaccagaag

SEQ ID NO: 1937351 - RNA, 19 nt, Homo sapiens
  misc_RNA (1)...(19): siRNA sense strand
gagccugacaucccugaga

SEQ ID NO: 1937352 - RNA, 19 nt, Homo sapiens
  misc_RNA (1)...(19): siRNA sense strand
agaccuuccugaccacaau

SEQ ID NO: 1937353 - RNA, 19 nt, Homo sapiens
  misc_RNA (1)...(19): siRNA sense strand
ggucacacugcucaucuau

SEQ ID NO: 1937354 - RNA, 19 nt, Homo sapiens
  misc_RNA (1)...(19): siRNA sense strand
cagaagaagagaccacaca

SEQ ID NO: 1937355 - RNA, 19 nt, Homo sapiens
  misc_RNA (1)...(19): siRNA sense strand
ccaccaccgucuccacuac

SEQ ID NO: 1937356 - RNA, 19 nt, Homo sapiens
  misc_RNA (1)...(19): siRNA sense strand
acaagcaggaggaguucua

SEQ ID NO: 1937357 - RNA, 19 nt, Homo sapiens
  misc_RNA (1)...(19): siRNA sense strand
caucuaucguaugaagaaa

SEQ ID NO: 1937358 - RNA, 19 nt, Homo sapiens
  misc_RNA (1)...(19): siRNA sense strand
gaggugcucguagcuguga

SEQ ID NO: 1937359 - RNA, 19 nt, Homo sapiens
  misc_RNA (1)...(19): siRNA sense strand
gcggaaggaggugcucgua

SEQ ID NO: 1937360 - RNA, 19 nt, Homo sapiens
  misc_RNA (1)...(19): siRNA sense strand
agaagaagagaccacacaa

SEQ ID NO: 1937361 - RNA, 19 nt, Homo sapiens
  misc_RNA (1)...(19): siRNA sense strand
gcaggagucgggcauugag

SEQ ID NO: 1937362 - RNA, 19 nt, Homo sapiens
  misc_RNA (1)...(19): siRNA sense strand
gagacagccaugcgcuuca

SEQ ID NO: 1937363 - RNA, 19 nt, Homo sapiens
  misc_RNA (1)...(19): siRNA sense strand
ccgaggaggugcucaagua

SEQ ID NO: 1937364 - RNA, 19 nt, Homo sapiens
  misc_RNA (1)...(19): siRNA sense strand
ggaggaagcugauggucau

SEQ ID NO: 1937365 - RNA, 19 nt, Homo sapiens
  misc_RNA (1)...(19): siRNA sense strand
gggugaagcuggagaugga

SEQ ID NO: 1937366 - RNA, 19 nt, Homo sapiens
  misc_RNA (1)...(19): siRNA sense strand
ggaccuggguggcuuugau

SEQ ID NO: 1937367 - RNA, 19 nt, Homo sapiens
  misc_RNA (1)...(19): siRNA sense strand
gcucaacgaggaacucaaa

SEQ ID NO: 1937368 - RNA, 19 nt, Homo sapiens
  misc_RNA (1)...(19): siRNA sense strand
gaacgaggccaagcagaug

SEQ ID NO: 1937369 - RNA, 19 nt, Homo sapiens
  misc_RNA (1)...(19): siRNA sense strand
gggcaguccuucugaugga

SEQ ID NO: 1937370 - RNA, 19 nt, Homo sapiens
  misc_RNA (1)...(19): siRNA sense strand
caacgaggaacucaaagug

SEQ ID NO: 1937371 - RNA, 19 nt, Homo sapiens
  misc_RNA (1)...(19): siRNA sense strand
gccaggacauugacgacaa

SEQ ID NO: 1937372 - RNA, 19 nt, Homo sapiens
  misc_RNA (1)...(19): siRNA sense strand
ggacgaggaaacacaggaa

SEQ ID NO: 1937373 - RNA, 19 nt, Homo sapiens
  misc_RNA (1)...(19): siRNA sense strand
guaaaggccauagcgagaa

SEQ ID NO: 1937374 - RNA, 19 nt, Homo sapiens
  misc_RNA (1)...(19): siRNA sense strand
ccaacagggaggagaauga

SEQ ID NO: 1937375 - RNA, 19 nt, Homo sapiens
  misc_RNA (1)...(19): siRNA sense strand
caaaguggacgaggaaaca

SEQ ID NO: 1937376 - RNA, 19 nt, Homo sapiens
  misc_RNA (1)...(19): siRNA sense strand
ggacgaguauaaggugaag

SEQ ID NO: 1937377 - RNA, 19 nt, Homo sapiens
  misc_RNA (1)...(19): siRNA sense strand
uaaaggccauagcgagaag

SEQ ID NO: 1937378 - RNA, 19 nt, Homo sapiens
  misc_RNA (1)...(19): siRNA sense strand
gagaugcagcgcuggauca

SEQ ID NO: 1937379 - RNA, 19 nt, Homo sapiens
  misc_RNA (1)...(19): siRNA sense strand
gacgacaacugggugaaag

SEQ ID NO: 1937380 - RNA, 19 nt, Homo sapiens
  misc_RNA (1)...(19): siRNA sense strand
ugucuugggacgaguauaa

SEQ ID NO: 1937381 - RNA, 19 nt, Homo sapiens
  misc_RNA (1)...(19): siRNA sense strand
caagguggaugugaacacu

SEQ ID NO: 1937382 - RNA, 19 nt, Homo sapiens
  misc_RNA (1)...(19): siRNA sense strand
ggaccaggacggugacaag

SEQ ID NO: 1937383 - RNA, 19 nt, Homo sapiens
  misc_RNA (1)...(19): siRNA sense strand
gagagagaguagccaacag

SEQ ID NO: 1937384 - RNA, 19 nt, Homo sapiens
  misc_RNA (1)...(19): siRNA sense strand
ggagagcaagacacacuuc

SEQ ID NO: 1937385 - RNA, 19 nt, Homo sapiens
  misc_RNA (1)...(19): siRNA sense strand
gaggagagcaagacacacu

SEQ ID NO: 1937386 - RNA, 19 nt, Homo sapiens
  misc_RNA (1)...(19): siRNA sense strand
gaucagugccaaggagaug

SEQ ID NO: 1937387 - RNA, 19 nt, Homo sapiens
  misc_RNA (1)...(19): siRNA sense strand
gaacacugaccggaagauc

SEQ ID NO: 1937388 - RNA, 19 nt, Homo sapiens
  misc_RNA (1)...(19): siRNA sense strand
ggaagaucagugccaagga

SEQ ID NO: 1937389 - RNA, 19 nt, Homo sapiens
  misc_RNA (1)...(19): siRNA sense strand
cagcagggccaggacauug

SEQ ID NO: 1937390 - RNA, 19 nt, Homo sapiens
  misc_RNA (1)...(19): siRNA sense strand
gcucaaguacagcgaguuc

SEQ ID NO: 1937391 - RNA, 19 nt, Homo sapiens
  misc_RNA (1)...(19): siRNA sense strand
gugacaagcagcucucugu

SEQ ID NO: 1937392 - RNA, 19 nt, Homo sapiens
  misc_RNA (1)...(19): siRNA sense strand
caacugggugaaagacaga

SEQ ID NO: 1937393 - RNA, 19 nt, Homo sapiens
  misc_RNA (1)...(19): siRNA sense strand
ucaaguacagcgaguucuu

SEQ ID NO: 1937394 - RNA, 19 nt, Homo sapiens
  misc_RNA (1)...(19): siRNA sense strand
ugaacgaggccaagcagau

SEQ ID NO: 1937395 - RNA, 19 nt, Homo sapiens
  misc_RNA (1)...(19): siRNA sense strand
agguggaugugaacacuga

SEQ ID NO: 1937396 - RNA, 19 nt, Homo sapiens
  misc_RNA (1)...(19): siRNA sense strand
gauggacgggcaccucaau

SEQ ID NO: 1937397 - RNA, 19 nt, Homo sapiens
  misc_RNA (1)...(19): siRNA sense strand
gggacggucacgugucuug

SEQ ID NO: 1937398 - RNA, 19 nt, Homo sapiens
  misc_RNA (1)...(19): siRNA sense strand
gcagcgugcacgaggaguu

SEQ ID NO: 1937399 - RNA, 19 nt, Homo sapiens
  misc_RNA (1)...(19): siRNA sense strand
gaggaggugcucaaguaca

SEQ ID NO: 1937400 - RNA, 19 nt, Homo sapiens
  misc_RNA (1)...(19): siRNA sense strand
cgagagagaguagccaaca

SEQ ID NO: 1937401 - RNA, 19 nt, Homo sapiens
  misc_RNA (1)...(19): siRNA sense strand
caaguacagcgaguucuuc

SEQ ID NO: 1937402 - RNA, 19 nt, Homo sapiens
  misc_RNA (1)...(19): siRNA sense strand
ugacgacaacugggugaaa

SEQ ID NO: 1937403 - RNA, 19 nt, Homo sapiens
  misc_RNA (1)...(19): siRNA sense strand
caaggaccuggguggcuuu

SEQ ID NO: 1937404 - RNA, 19 nt, Homo sapiens
  misc_RNA (1)...(19): siRNA sense strand
agaagacggccgagcacuu

SEQ ID NO: 1937405 - RNA, 19 nt, Homo sapiens
  misc_RNA (1)...(19): siRNA sense strand
cagcgugcacgaggaguuu

SEQ ID NO: 1937406 - RNA, 19 nt, Homo sapiens
  misc_RNA (1)...(19): siRNA sense strand
caacagggaggagaaugag

SEQ ID NO: 1937407 - RNA, 19 nt, Homo sapiens
  misc_RNA (1)...(19): siRNA sense strand
ggaggaagcugauggucau

SEQ ID NO: 1937408 - RNA, 19 nt, Homo sapiens
  misc_RNA (1)...(19): siRNA sense strand
gggugaagcuggagaugga

SEQ ID NO: 1937409 - RNA, 19 nt, Homo sapiens
  misc_RNA (1)...(19): siRNA sense strand
ggaccuggguggcuuugau

SEQ ID NO: 1937410 - RNA, 19 nt, Homo sapiens
  misc_RNA (1)...(19): siRNA sense strand
gcucaacgaggaacucaaa

SEQ ID NO: 1937411 - RNA, 19 nt, Homo sapiens
  misc_RNA (1)...(19): siRNA sense strand
gggcaguccuucugaugga

SEQ ID NO: 1937412 - RNA, 19 nt, Homo sapiens
  misc_RNA (1)...(19): siRNA sense strand
caacgaggaacucaaagug

SEQ ID NO: 1937413 - RNA, 19 nt, Homo sapiens
  misc_RNA (1)...(19): siRNA sense strand
gccaggacauugacgacaa

SEQ ID NO: 1937414 - RNA, 19 nt, Homo sapiens
  misc_RNA (1)...(19): siRNA sense strand
ggacgaggaaacacaggaa

SEQ ID NO: 1937415 - RNA, 19 nt, Homo sapiens
  misc_RNA (1)...(19): siRNA sense strand
guaaaggccauagcgagaa

SEQ ID NO: 1937416 - RNA, 19 nt, Homo sapiens
  misc_RNA (1)...(19): siRNA sense strand
ccaacagggaggagaauga

SEQ ID NO: 1937417 - RNA, 19 nt, Homo sapiens
  misc_RNA (1)...(19): siRNA sense strand
caaaguggacgaggaaaca

SEQ ID NO: 1937418 - RNA, 19 nt, Homo sapiens
  misc_RNA (1)...(19): siRNA sense strand
ggacgaguauaaggugaag

SEQ ID NO: 1937419 - RNA, 19 nt, Homo sapiens
  misc_RNA (1)...(19): siRNA sense strand
uaaaggccauagcgagaag

SEQ ID NO: 1937420 - RNA, 19 nt, Homo sapiens
  misc_RNA (1)...(19): siRNA sense strand
gagaugcagcgcuggauca

SEQ ID NO: 1937421 - RNA, 19 nt, Homo sapiens
  misc_RNA (1)...(19): siRNA sense strand
gacgacaacugggugaaag

SEQ ID NO: 1937422 - RNA, 19 nt, Homo sapiens
  misc_RNA (1)...(19): siRNA sense strand
ugucuugggacgaguauaa

SEQ ID NO: 1937423 - RNA, 19 nt, Homo sapiens
  misc_RNA (1)...(19): siRNA sense strand
caagguggaugugaacacu

SEQ ID NO: 1937424 - RNA, 19 nt, Homo sapiens
  misc_RNA (1)...(19): siRNA sense strand
ggaccaggacggugacaag

SEQ ID NO: 1937425 - RNA, 19 nt, Homo sapiens
  misc_RNA (1)...(19): siRNA sense strand
gaacacugaccggaagauc

SEQ ID NO: 1937426 - RNA, 19 nt, Homo sapiens
  misc_RNA (1)...(19): siRNA sense strand
gagagagaguagccaacag

SEQ ID NO: 1937427 - RNA, 19 nt, Homo sapiens
  misc_RNA (1)...(19): siRNA sense strand
ggagagcaagacacacuuc

SEQ ID NO: 1937428 - RNA, 19 nt, Homo sapiens
  misc_RNA (1)...(19): siRNA sense strand
gaggagagcaagacacacu

SEQ ID NO: 1937429 - RNA, 19 nt, Homo sapiens
  misc_RNA (1)...(19): siRNA sense strand
gaucagugccaaggagaug

SEQ ID NO: 1937430 - RNA, 19 nt, Homo sapiens
  misc_RNA (1)...(19): siRNA sense strand
ggaagaucagugccaagga

SEQ ID NO: 1937431 - RNA, 19 nt, Homo sapiens
  misc_RNA (1)...(19): siRNA sense strand
cagcagggccaggacauug

SEQ ID NO: 1937432 - RNA, 19 nt, Homo sapiens
  misc_RNA (1)...(19): siRNA sense strand
gugacaagcagcucucugu

SEQ ID NO: 1937433 - RNA, 19 nt, Homo sapiens
  misc_RNA (1)...(19): siRNA sense strand
caacugggugaaagacaga

SEQ ID NO: 1937434 - RNA, 19 nt, Homo sapiens
  misc_RNA (1)...(19): siRNA sense strand
agguggaugugaacacuga

SEQ ID NO: 1937435 - RNA, 19 nt, Homo sapiens
  misc_RNA (1)...(19): siRNA sense strand
gauggacgggcaccucaau

SEQ ID NO: 1937436 - RNA, 19 nt, Homo sapiens
  misc_RNA (1)...(19): siRNA sense strand
gggacggucacgugucuug

SEQ ID NO: 1937437 - RNA, 19 nt, Homo sapiens
  misc_RNA (1)...(19): siRNA sense strand
ugacgacaacugggugaaa

SEQ ID NO: 1937438 - RNA, 19 nt, Homo sapiens
  misc_RNA (1)...(19): siRNA sense strand
cgagagagaguagccaaca

SEQ ID NO: 1937439 - RNA, 19 nt, Homo sapiens
  misc_RNA (1)...(19): siRNA sense strand
caaggaccuggguggcuuu

SEQ ID NO: 1937440 - RNA, 19 nt, Homo sapiens
  misc_RNA (1)...(19): siRNA sense strand
agaagacggccgagcacuu

SEQ ID NO: 1937441 - RNA, 19 nt, Homo sapiens
  misc_RNA (1)...(19): siRNA sense strand
caacagggaggagaaugag

SEQ ID NO: 1937442 - RNA, 19 nt, Homo sapiens
  misc_RNA (1)...(19): siRNA sense strand
ccacaucgcucacauagug

SEQ ID NO: 1937443 - RNA, 19 nt, Homo sapiens
  misc_RNA (1)...(19): siRNA sense strand
ucaaauggaucaucaaguc

SEQ ID NO: 1937444 - RNA, 19 nt, Homo sapiens
  misc_RNA (1)...(19): siRNA sense strand
gaagaucggcgacguguuc

SEQ ID NO: 1937445 - RNA, 19 nt, Homo sapiens
  misc_RNA (1)...(19): siRNA sense strand
ggagacagcuguggaugag

SEQ ID NO: 1937446 - RNA, 19 nt, Homo sapiens
  misc_RNA (1)...(19): siRNA sense strand
agaucaagcuccugaaaug

SEQ ID NO: 1937447 - RNA, 19 nt, Homo sapiens
  misc_RNA (1)...(19): siRNA sense strand
gccaccagcuccucaaaug

SEQ ID NO: 1937448 - RNA, 19 nt, Homo sapiens
  misc_RNA (1)...(19): siRNA sense strand
gaggagagcugcggcacau

SEQ ID NO: 1937449 - RNA, 19 nt, Homo sapiens
  misc_RNA (1)...(19): siRNA sense strand
ugaggacucuggcuugaga

SEQ ID NO: 1937450 - RNA, 19 nt, Homo sapiens
  misc_RNA (1)...(19): siRNA sense strand
ccucgaaccuccuggugaa

SEQ ID NO: 1937451 - RNA, 19 nt, Homo sapiens
  misc_RNA (1)...(19): siRNA sense strand
ggaccacaucgcucacaua

SEQ ID NO: 1937452 - RNA, 19 nt, Homo sapiens
  misc_RNA (1)...(19): siRNA sense strand
gcugaggacucuggcuuga

SEQ ID NO: 1937453 - RNA, 19 nt, Homo sapiens
  misc_RNA (1)...(19): siRNA sense strand
ccacaccggugccucagau

SEQ ID NO: 1937454 - RNA, 19 nt, Homo sapiens
  misc_RNA (1)...(19): siRNA sense strand
agacagcuguggaugagau

SEQ ID NO: 1937455 - RNA, 19 nt, Homo sapiens
  misc_RNA (1)...(19): siRNA sense strand
gcaaacggaaacagcagaa

SEQ ID NO: 1937456 - RNA, 19 nt, Homo sapiens
  misc_RNA (1)...(19): siRNA sense strand
gagaucaagcuccugaaau

SEQ ID NO: 1937457 - RNA, 19 nt, Homo sapiens
  misc_RNA (1)...(19): siRNA sense strand
gcacauccacaaucucaag

SEQ ID NO: 1937458 - RNA, 19 nt, Homo sapiens
  misc_RNA (1)...(19): siRNA sense strand
ucaagcuccugaaaugugu

SEQ ID NO: 1937459 - RNA, 19 nt, Homo sapiens
  misc_RNA (1)...(19): siRNA sense strand
gagcaggccacacaguuca

SEQ ID NO: 1937460 - RNA, 19 nt, Homo sapiens
  misc_RNA (1)...(19): siRNA sense strand
gacucuggcuugagacuag

SEQ ID NO: 1937461 - RNA, 19 nt, Homo sapiens
  misc_RNA (1)...(19): siRNA sense strand
gaccacaucgcucacauag

SEQ ID NO: 1937462 - RNA, 19 nt, Homo sapiens
  misc_RNA (1)...(19): siRNA sense strand
gaucucaggagucaaugga

SEQ ID NO: 1937463 - RNA, 19 nt, Homo sapiens
  misc_RNA (1)...(19): siRNA sense strand
gaucaucaaguccaacuac

SEQ ID NO: 1937464 - RNA, 19 nt, Homo sapiens
  misc_RNA (1)...(19): siRNA sense strand
gaucaagcuccugaaaugu

SEQ ID NO: 1937465 - RNA, 19 nt, Homo sapiens
  misc_RNA (1)...(19): siRNA sense strand
cgacgacgaggaacaggaa

SEQ ID NO: 1937466 - RNA, 19 nt, Homo sapiens
  misc_RNA (1)...(19): siRNA sense strand
ugagaucaagcuccugaaa

SEQ ID NO: 1937467 - RNA, 19 nt, Homo sapiens
  misc_RNA (1)...(19): siRNA sense strand
gaucggcgacguguucaau

SEQ ID NO: 1937468 - RNA, 19 nt, Homo sapiens
  misc_RNA (1)...(19): siRNA sense strand
gaugaggcgcaaacggaaa

SEQ ID NO: 1937469 - RNA, 19 nt, Homo sapiens
  misc_RNA (1)...(19): siRNA sense strand
ggacaucaagcccgagaac

SEQ ID NO: 1937470 - RNA, 19 nt, Homo sapiens
  misc_RNA (1)...(19): siRNA sense strand
gcuaccacccugugaagau

SEQ ID NO: 1937471 - RNA, 19 nt, Homo sapiens
  misc_RNA (1)...(19): siRNA sense strand
caccagcuccucaaaugga

SEQ ID NO: 1937472 - RNA, 19 nt, Homo sapiens
  misc_RNA (1)...(19): siRNA sense strand
gcuggccacuggugacuac

SEQ ID NO: 1937473 - RNA, 19 nt, Homo sapiens
  misc_RNA (1)...(19): siRNA sense strand
aacaagaggaagaagauga

SEQ ID NO: 1937474 - RNA, 19 nt, Homo sapiens
  misc_RNA (1)...(19): siRNA sense strand
uagagcaggccacacaguu

SEQ ID NO: 1937475 - RNA, 19 nt, Homo sapiens
  misc_RNA (1)...(19): siRNA sense strand
gcuauucccgggaguucuu

SEQ ID NO: 1937476 - RNA, 19 nt, Homo sapiens
  misc_RNA (1)...(19): siRNA sense strand
ggacucuggcuugagacua

SEQ ID NO: 1937477 - RNA, 19 nt, Homo sapiens
  misc_RNA (1)...(19): siRNA sense strand
caggaucucaggagucaau

SEQ ID NO: 1937478 - RNA, 19 nt, Homo sapiens
  misc_RNA (1)...(19): siRNA sense strand
cacaccaagugcaagauca

SEQ ID NO: 1937479 - RNA, 19 nt, Homo sapiens
  misc_RNA (1)...(19): siRNA sense strand
cggcacauccacaaucuca

SEQ ID NO: 1937480 - RNA, 19 nt, Homo sapiens
  misc_RNA (1)...(19): siRNA sense strand
caucaagcccgagaacauc

SEQ ID NO: 1937481 - RNA, 19 nt, Homo sapiens
  misc_RNA (1)...(19): siRNA sense strand
cuaccacccugugaagauc

SEQ ID NO: 1937482 - RNA, 19 nt, Homo sapiens
  misc_RNA (1)...(19): siRNA sense strand
cggagacagcuguggauga

SEQ ID NO: 1937483 - RNA, 19 nt, Homo sapiens
  misc_RNA (1)...(19): siRNA sense strand
gaccauuguccagcucauu

SEQ ID NO: 1937484 - RNA, 19 nt, Homo sapiens
  misc_RNA (1)...(19): siRNA sense strand
gaagaagaugaggcgcaaa

SEQ ID NO: 1937485 - RNA, 19 nt, Homo sapiens
  misc_RNA (1)...(19): siRNA sense strand
ggccaaagcugcuaagaag

SEQ ID NO: 1937486 - RNA, 19 nt, Homo sapiens
  misc_RNA (1)...(19): siRNA sense strand
gcucagagaagauccauuu

SEQ ID NO: 1937487 - RNA, 19 nt, Homo sapiens
  misc_RNA (1)...(19): siRNA sense strand
ccaaagaccucagcaagca

SEQ ID NO: 1937488 - RNA, 19 nt, Homo sapiens
  misc_RNA (1)...(19): siRNA sense strand
cagagcaggucaccaagaa

SEQ ID NO: 1937489 - RNA, 19 nt, Homo sapiens
  misc_RNA (1)...(19): siRNA sense strand
ggacgacgccaucuauuca

SEQ ID NO: 1937490 - RNA, 19 nt, Homo sapiens
  misc_RNA (1)...(19): siRNA sense strand
gcacacccauugacuaugc

SEQ ID NO: 1937491 - RNA, 19 nt, Homo sapiens
  misc_RNA (1)...(19): siRNA sense strand
ccaaagcugcuaagaagaa

SEQ ID NO: 1937492 - RNA, 19 nt, Homo sapiens
  misc_RNA (1)...(19): siRNA sense strand
cgagguggaucgaagagaa

SEQ ID NO: 1937493 - RNA, 19 nt, Homo sapiens
  misc_RNA (1)...(19): siRNA sense strand
ucaugaaggucaacaguag

SEQ ID NO: 1937494 - RNA, 19 nt, Homo sapiens
  misc_RNA (1)...(19): siRNA sense strand
ccaagaacauucaggaacu

SEQ ID NO: 1937495 - RNA, 19 nt, Homo sapiens
  misc_RNA (1)...(19): siRNA sense strand
gaagggaagagguuucuag

SEQ ID NO: 1937496 - RNA, 19 nt, Homo sapiens
  misc_RNA (1)...(19): siRNA sense strand
cgagauggccucccucuuc

SEQ ID NO: 1937497 - RNA, 19 nt, Homo sapiens
  misc_RNA (1)...(19): siRNA sense strand
ccacagcacucuggugaca

SEQ ID NO: 1937498 - RNA, 19 nt, Homo sapiens
  misc_RNA (1)...(19): siRNA sense strand
gcaagccggaucacaagaa

SEQ ID NO: 1937499 - RNA, 19 nt, Homo sapiens
  misc_RNA (1)...(19): siRNA sense strand
gaagaaggcccuggcuaca

SEQ ID NO: 1937500 - RNA, 19 nt, Homo sapiens
  misc_RNA (1)...(19): siRNA sense strand
ggacgccacaucuccauug

SEQ ID NO: 1937501 - RNA, 19 nt, Homo sapiens
  misc_RNA (1)...(19): siRNA sense strand
gagccgacagugacuauga

SEQ ID NO: 1937502 - RNA, 19 nt, Homo sapiens
  misc_RNA (1)...(19): siRNA sense strand
ccacagcacugagcuagag

SEQ ID NO: 1937503 - RNA, 19 nt, Homo sapiens
  misc_RNA (1)...(19): siRNA sense strand
agacagagcaggucaccaa

SEQ ID NO: 1937504 - RNA, 19 nt, Homo sapiens
  misc_RNA (1)...(19): siRNA sense strand
gcaguggagccgacaguga

SEQ ID NO: 1937505 - RNA, 19 nt, Homo sapiens
  misc_RNA (1)...(19): siRNA sense strand
cgccacaucuccauuguca

SEQ ID NO: 1937506 - RNA, 19 nt, Homo sapiens
  misc_RNA (1)...(19): siRNA sense strand
cccaggaguucaagcauga

SEQ ID NO: 1937507 - RNA, 19 nt, Homo sapiens
  misc_RNA (1)...(19): siRNA sense strand
gaucaucgacauucucagu

SEQ ID NO: 1937508 - RNA, 19 nt, Homo sapiens
  misc_RNA (1)...(19): siRNA sense strand
ucaucgacauucucaguga

SEQ ID NO: 1937509 - RNA, 19 nt, Homo sapiens
  misc_RNA (1)...(19): siRNA sense strand
gccaauaugagcucacuga

SEQ ID NO: 1937510 - RNA, 19 nt, Homo sapiens
  misc_RNA (1)...(19): siRNA sense strand
cagagugagugccggaaga

SEQ ID NO: 1937511 - RNA, 19 nt, Homo sapiens
  misc_RNA (1)...(19): siRNA sense strand
gagcaggucaccaagaaca

SEQ ID NO: 1937512 - RNA, 19 nt, Homo sapiens
  misc_RNA (1)...(19): siRNA sense strand
agaaggcccuggcuacauc

SEQ ID NO: 1937513 - RNA, 19 nt, Homo sapiens
  misc_RNA (1)...(19): siRNA sense strand
caagccggaucacaagaau

SEQ ID NO: 1937514 - RNA, 19 nt, Homo sapiens
  misc_RNA (1)...(19): siRNA sense strand
ccgagcugcuuguagugua

SEQ ID NO: 1937515 - RNA, 19 nt, Homo sapiens
  misc_RNA (1)...(19): siRNA sense strand
ccuaccggcugcagaguga

SEQ ID NO: 1937516 - RNA, 19 nt, Homo sapiens
  misc_RNA (1)...(19): siRNA sense strand
caagaacauucaggaacug

SEQ ID NO: 1937517 - RNA, 19 nt, Homo sapiens
  misc_RNA (1)...(19): siRNA sense strand
gcaggucaccaagaacauu

SEQ ID NO: 1937518 - RNA, 19 nt, Homo sapiens
  misc_RNA (1)...(19): siRNA sense strand
aggaguaccuggagcugaa

SEQ ID NO: 1937519 - RNA, 19 nt, Homo sapiens
  misc_RNA (1)...(19): siRNA sense strand
ccacaucuccauugucaag

SEQ ID NO: 1937520 - RNA, 19 nt, Homo sapiens
  misc_RNA (1)...(19): siRNA sense strand
ccagugcgccuaugacauc

SEQ ID NO: 1937521 - RNA, 19 nt, Homo sapiens
  misc_RNA (1)...(19): siRNA sense strand
uaugagaacacgcaaagug

SEQ ID NO: 1937522 - RNA, 19 nt, Homo sapiens
  misc_RNA (1)...(19): siRNA sense strand
cugugacgcugcaggagua

SEQ ID NO: 1937523 - RNA, 19 nt, Homo sapiens
  misc_RNA (1)...(19): siRNA sense strand
gcgcucagcaaccggcuuu

SEQ ID NO: 1937524 - RNA, 19 nt, Homo sapiens
  misc_RNA (1)...(19): siRNA sense strand
aagccuggauggagaccua

SEQ ID NO: 1937525 - RNA, 19 nt, Homo sapiens
  misc_RNA (1)...(19): siRNA sense strand
gacagugacuaugagaaca

SEQ ID NO: 1937526 - RNA, 19 nt, Homo sapiens
  misc_RNA (1)...(19): siRNA sense strand
cgagcugcuuguaguguau

SEQ ID NO: 1937527 - RNA, 19 nt, Homo sapiens
  misc_RNA (1)...(19): siRNA sense strand
gagguggaucgaagagaaa

SEQ ID NO: 1937528 - RNA, 19 nt, Homo sapiens
  misc_RNA (1)...(19): siRNA sense strand
uugaggaacucgccaugga

SEQ ID NO: 1937529 - RNA, 19 nt, Homo sapiens
  misc_RNA (1)...(19): siRNA sense strand
gacgcaagccggaucacaa

SEQ ID NO: 1937530 - RNA, 19 nt, Homo sapiens
  misc_RNA (1)...(19): siRNA sense strand
caaagcugcuaagaagaag

SEQ ID NO: 1937531 - RNA, 19 nt, Homo sapiens
  misc_RNA (1)...(19): siRNA sense strand
gaggacgacgccaucuauu

SEQ ID NO: 1937532 - RNA, 19 nt, Homo sapiens
  misc_RNA (1)...(19): siRNA sense strand
ggagacagcagggcaagag

SEQ ID NO: 1937533 - RNA, 19 nt, Homo sapiens
  misc_RNA (1)...(19): siRNA sense strand
accaugagcuggcggaaag

SEQ ID NO: 1937534 - RNA, 19 nt, Homo sapiens
  misc_RNA (1)...(19): siRNA sense strand
ugacagccuugacuuaucc

SEQ ID NO: 1937535 - RNA, 19 nt, Homo sapiens
  misc_RNA (1)...(19): siRNA sense strand
ccgcacacccauugacuau

SEQ ID NO: 1937536 - RNA, 19 nt, Homo sapiens
  misc_RNA (1)...(19): siRNA sense strand
ugcagcagcucaugaaggu

SEQ ID NO: 1937537 - RNA, 19 nt, Homo sapiens
  misc_RNA (1)...(19): siRNA sense strand
ggacuccucggacuugucu

SEQ ID NO: 1937538 - RNA, 19 nt, Homo sapiens
  misc_RNA (1)...(19): siRNA sense strand
uggccucccucuucccaaa

SEQ ID NO: 1937539 - RNA, 19 nt, Homo sapiens
  misc_RNA (1)...(19): siRNA sense strand
ccaccuugaucaucgacau

SEQ ID NO: 1937540 - RNA, 19 nt, Homo sapiens
  misc_RNA (1)...(19): siRNA sense strand
gacgccacaucuccauugu

SEQ ID NO: 1937541 - RNA, 19 nt, Homo sapiens
  misc_RNA (1)...(19): siRNA sense strand
gccuugacuuauccgaauu

SEQ ID NO: 1937542 - RNA, 19 nt, Homo sapiens
  misc_RNA (1)...(19): siRNA sense strand
cgacagugacuaugagaac

SEQ ID NO: 1937543 - RNA, 19 nt, Homo sapiens
  misc_RNA (1)...(19): siRNA sense strand
agaggacgacgccaucuau

SEQ ID NO: 1937544 - RNA, 19 nt, Homo sapiens
  misc_RNA (1)...(19): siRNA sense strand
gaguuugccaccuugauca

SEQ ID NO: 1937545 - RNA, 19 nt, Homo sapiens
  misc_RNA (1)...(19): siRNA sense strand
cccgagaguuugccaccuu

SEQ ID NO: 1937546 - RNA, 19 nt, Homo sapiens
  misc_RNA (1)...(19): siRNA sense strand
gcugguugagugccaauau

SEQ ID NO: 1937547 - RNA, 19 nt, Homo sapiens
  misc_RNA (1)...(19): siRNA sense strand
ucagagaagauccauuugg

SEQ ID NO: 1937548 - RNA, 19 nt, Homo sapiens
  misc_RNA (1)...(19): siRNA sense strand
gcucaugaaggucaacagu

SEQ ID NO: 1937549 - RNA, 19 nt, Homo sapiens
  misc_RNA (1)...(19): siRNA sense strand
gaauuggccaaagcugcua

SEQ ID NO: 1937550 - RNA, 19 nt, Homo sapiens
  misc_RNA (1)...(19): siRNA sense strand
gcggaaaggcugguugagu

SEQ ID NO: 1937551 - RNA, 19 nt, Homo sapiens
  misc_RNA (1)...(19): siRNA sense strand
uucuagagcugggcaaaga

SEQ ID NO: 1937552 - RNA, 19 nt, Homo sapiens
  misc_RNA (1)...(19): siRNA sense strand
ggaagggaagagguuucua

SEQ ID NO: 1937553 - RNA, 19 nt, Homo sapiens
  misc_RNA (1)...(19): siRNA sense strand
cauuacaucaucccacaga

SEQ ID NO: 1937554 - RNA, 19 nt, Homo sapiens
  misc_RNA (1)...(19): siRNA sense strand
aggccgagcugcuuguagu

SEQ ID NO: 1937555 - RNA, 19 nt, Homo sapiens
  misc_RNA (1)...(19): siRNA sense strand
ggggugugcugguguguga

SEQ ID NO: 1937556 - RNA, 19 nt, Homo sapiens
  misc_RNA (1)...(19): siRNA sense strand
gcauggacuccucggacuu

SEQ ID NO: 1937557 - RNA, 19 nt, Homo sapiens
  misc_RNA (1)...(19): siRNA sense strand
cuuuaaugcccgagaguuu

SEQ ID NO: 1937558 - RNA, 19 nt, Homo sapiens
  misc_RNA (1)...(19): siRNA sense strand
cugaccggcuggccuucua

SEQ ID NO: 1937559 - RNA, 19 nt, Homo sapiens
  misc_RNA (1)...(19): siRNA sense strand
cuacaucggaggcaaaggu

SEQ ID NO: 1937560 - RNA, 19 nt, Homo sapiens
  misc_RNA (1)...(19): siRNA sense strand
gcagugcugugcccuuccu

SEQ ID NO: 1937561 - RNA, 19 nt, Homo sapiens
  misc_RNA (1)...(19): siRNA sense strand
ggacgcaagccggaucaca

SEQ ID NO: 1937562 - RNA, 19 nt, Homo sapiens
  misc_RNA (1)...(19): siRNA sense strand
caaagaccucagcaagcaa

SEQ ID NO: 1937563 - RNA, 19 nt, Homo sapiens
  misc_RNA (1)...(19): siRNA sense strand
caucaccacccgagagaag

SEQ ID NO: 1937564 - RNA, 19 nt, Homo sapiens
  misc_RNA (1)...(19): siRNA sense strand
gaccucagcaagcaacuac

SEQ ID NO: 1937565 - RNA, 19 nt, Homo sapiens
  misc_RNA (1)...(19): siRNA sense strand
gugcccuuccugccuguua

SEQ ID NO: 1937566 - RNA, 19 nt, Homo sapiens
  misc_RNA (1)...(19): siRNA sense strand
ugacgagguggaucgaaga

SEQ ID NO: 1937567 - RNA, 19 nt, Homo sapiens
  misc_RNA (1)...(19): siRNA sense strand
cugacagccuugacuuauc

SEQ ID NO: 1937568 - RNA, 19 nt, Homo sapiens
  misc_RNA (1)...(19): siRNA sense strand
ggaagaaucucaucaagaa

SEQ ID NO: 1937569 - RNA, 19 nt, Homo sapiens
  misc_RNA (1)...(19): siRNA sense strand
gaaugccggugacaaauua

SEQ ID NO: 1937570 - RNA, 19 nt, Homo sapiens
  misc_RNA (1)...(19): siRNA sense strand
uaacagagguccuugaaga

SEQ ID NO: 1937571 - RNA, 19 nt, Homo sapiens
  misc_RNA (1)...(19): siRNA sense strand
gugaagaccuuugagauuu

SEQ ID NO: 1937572 - RNA, 19 nt, Homo sapiens
  misc_RNA (1)...(19): siRNA sense strand
gaaacucuacucacacaua

SEQ ID NO: 1937573 - RNA, 19 nt, Homo sapiens
  misc_RNA (1)...(19): siRNA sense strand
gaccugagcuccuuugaca

SEQ ID NO: 1937574 - RNA, 19 nt, Homo sapiens
  misc_RNA (1)...(19): siRNA sense strand
uaauagagccuguuaguau

SEQ ID NO: 1937575 - RNA, 19 nt, Homo sapiens
  misc_RNA (1)...(19): siRNA sense strand
gagcuccuuugacauguua

SEQ ID NO: 1937576 - RNA, 19 nt, Homo sapiens
  misc_RNA (1)...(19): siRNA sense strand
gcuagaagcugaagaacuc

SEQ ID NO: 1937577 - RNA, 19 nt, Homo sapiens
  misc_RNA (1)...(19): siRNA sense strand
gaagauaacaggcagaaca

SEQ ID NO: 1937578 - RNA, 19 nt, Homo sapiens
  misc_RNA (1)...(19): siRNA sense strand
gcagaaaacaccuuuaaua

SEQ ID NO: 1937579 - RNA, 19 nt, Homo sapiens
  misc_RNA (1)...(19): siRNA sense strand
caaagcagcugcgcucaga

SEQ ID NO: 1937580 - RNA, 19 nt, Homo sapiens
  misc_RNA (1)...(19): siRNA sense strand
gaaagaaguagaaagaauc

SEQ ID NO: 1937581 - RNA, 19 nt, Homo sapiens
  misc_RNA (1)...(19): siRNA sense strand
ggaauuauagcuuugaguu

SEQ ID NO: 1937582 - RNA, 19 nt, Homo sapiens
  misc_RNA (1)...(19): siRNA sense strand
gaugcccacuuucuuguuu

SEQ ID NO: 1937583 - RNA, 19 nt, Homo sapiens
  misc_RNA (1)...(19): siRNA sense strand
uaagaagaauggaagaauc

SEQ ID NO: 1937584 - RNA, 19 nt, Homo sapiens
  misc_RNA (1)...(19): siRNA sense strand
acacagagccgucggauuc

SEQ ID NO: 1937585 - RNA, 19 nt, Homo sapiens
  misc_RNA (1)...(19): siRNA sense strand
ccuuugacauguuaagaua

SEQ ID NO: 1937586 - RNA, 19 nt, Homo sapiens
  misc_RNA (1)...(19): siRNA sense strand
ucaagaagcaacagagaaa

SEQ ID NO: 1937587 - RNA, 19 nt, Homo sapiens
  misc_RNA (1)...(19): siRNA sense strand
aaugagggauuugaacaua

SEQ ID NO: 1937588 - RNA, 19 nt, Homo sapiens
  misc_RNA (1)...(19): siRNA sense strand
caacagagaaagaaguaga

SEQ ID NO: 1937589 - RNA, 19 nt, Homo sapiens
  misc_RNA (1)...(19): siRNA sense strand
aaacucuacucacacauau

SEQ ID NO: 1937590 - RNA, 19 nt, Homo sapiens
  misc_RNA (1)...(19): siRNA sense strand
gggaggagauugugaagac

SEQ ID NO: 1937591 - RNA, 19 nt, Homo sapiens
  misc_RNA (1)...(19): siRNA sense strand
gauuguugcagacauauuu

SEQ ID NO: 1937592 - RNA, 19 nt, Homo sapiens
  misc_RNA (1)...(19): siRNA sense strand
acacacaaguuagaaauca

SEQ ID NO: 1937593 - RNA, 19 nt, Homo sapiens
  misc_RNA (1)...(19): siRNA sense strand
agagaaagaaguagaaaga

SEQ ID NO: 1937594 - RNA, 19 nt, Homo sapiens
  misc_RNA (1)...(19): siRNA sense strand
gaagaccuuugagauuuca

SEQ ID NO: 1937595 - RNA, 19 nt, Homo sapiens
  misc_RNA (1)...(19): siRNA sense strand
guaauagagccuguuagua

SEQ ID NO: 1937596 - RNA, 19 nt, Homo sapiens
  misc_RNA (1)...(19): siRNA sense strand
ucaaggaauuauagcuuug

SEQ ID NO: 1937597 - RNA, 19 nt, Homo sapiens
  misc_RNA (1)...(19): siRNA sense strand
uaugacuccuggaagauaa

SEQ ID NO: 1937598 - RNA, 19 nt, Homo sapiens
  misc_RNA (1)...(19): siRNA sense strand
ccaguaauagagccuguua

SEQ ID NO: 1937599 - RNA, 19 nt, Homo sapiens
  misc_RNA (1)...(19): siRNA sense strand
gcagacauauuuucgagaa

SEQ ID NO: 1937600 - RNA, 19 nt, Homo sapiens
  misc_RNA (1)...(19): siRNA sense strand
gagagugcccugugccaaa

SEQ ID NO: 1937601 - RNA, 19 nt, Homo sapiens
  misc_RNA (1)...(19): siRNA sense strand
gaguugaucguccaagaaa

SEQ ID NO: 1937602 - RNA, 19 nt, Homo sapiens
  misc_RNA (1)...(19): siRNA sense strand
caaguuagaaaucaaggaa

SEQ ID NO: 1937603 - RNA, 19 nt, Homo sapiens
  misc_RNA (1)...(19): siRNA sense strand
aagaaaaguuccugugaua

SEQ ID NO: 1937604 - RNA, 19 nt, Homo sapiens
  misc_RNA (1)...(19): siRNA sense strand
caucaacuccguccaacaa

SEQ ID NO: 1937605 - RNA, 19 nt, Homo sapiens
  misc_RNA (1)...(19): siRNA sense strand
ugaagaccuuugagauuuc

SEQ ID NO: 1937606 - RNA, 19 nt, Homo sapiens
  misc_RNA (1)...(19): siRNA sense strand
gagaaagaaguagaaagaa

SEQ ID NO: 1937607 - RNA, 19 nt, Homo sapiens
  misc_RNA (1)...(19): siRNA sense strand
gaagaauggaagaaucuca

SEQ ID NO: 1937608 - RNA, 19 nt, Homo sapiens
  misc_RNA (1)...(19): siRNA sense strand
caaauuaacagagguccuu

SEQ ID NO: 1937609 - RNA, 19 nt, Homo sapiens
  misc_RNA (1)...(19): siRNA sense strand
cauguuuccuucauuauac

SEQ ID NO: 1937610 - RNA, 19 nt, Homo sapiens
  misc_RNA (1)...(19): siRNA sense strand
ugaagugucccgagcaaga

SEQ ID NO: 1937611 - RNA, 19 nt, Homo sapiens
  misc_RNA (1)...(19): siRNA sense strand
ccaauguccuucuuugacu

SEQ ID NO: 1937612 - RNA, 19 nt, Homo sapiens
  misc_RNA (1)...(19): siRNA sense strand
ugggauuguugcagacaua

SEQ ID NO: 1937613 - RNA, 19 nt, Homo sapiens
  misc_RNA (1)...(19): siRNA sense strand
gcaaugccugcccaguuaa

SEQ ID NO: 1937614 - RNA, 19 nt, Homo sapiens
  misc_RNA (1)...(19): siRNA sense strand
ggguguaaauccgcuagaa

SEQ ID NO: 1937615 - RNA, 19 nt, Homo sapiens
  misc_RNA (1)...(19): siRNA sense strand
gaauggaagaaucucauca

SEQ ID NO: 1937616 - RNA, 19 nt, Homo sapiens
  misc_RNA (1)...(19): siRNA sense strand
gaagauaguccugauuuug

SEQ ID NO: 1937617 - RNA, 19 nt, Homo sapiens
  misc_RNA (1)...(19): siRNA sense strand
gcauagagaaagcaaagca

SEQ ID NO: 1937618 - RNA, 19 nt, Homo sapiens
  misc_RNA (1)...(19): siRNA sense strand
gauuugaacauaacacaca

SEQ ID NO: 1937619 - RNA, 19 nt, Homo sapiens
  misc_RNA (1)...(19): siRNA sense strand
uagagccuguuaguauuaa

SEQ ID NO: 1937620 - RNA, 19 nt, Homo sapiens
  misc_RNA (1)...(19): siRNA sense strand
ugaaugccggugacaaauu

SEQ ID NO: 1937621 - RNA, 19 nt, Homo sapiens
  misc_RNA (1)...(19): siRNA sense strand
gaugaagauaguccugauu

SEQ ID NO: 1937622 - RNA, 19 nt, Homo sapiens
  misc_RNA (1)...(19): siRNA sense strand
caagucagaggcagcagaa

SEQ ID NO: 1937623 - RNA, 19 nt, Homo sapiens
  misc_RNA (1)...(19): siRNA sense strand
caauguccuucuuugacuu

SEQ ID NO: 1937624 - RNA, 19 nt, Homo sapiens
  misc_RNA (1)...(19): siRNA sense strand
auagagccuguuaguauua

SEQ ID NO: 1937625 - RNA, 19 nt, Homo sapiens
  misc_RNA (1)...(19): siRNA sense strand
ugugaagaccuuugagauu

SEQ ID NO: 1937626 - RNA, 19 nt, Homo sapiens
  misc_RNA (1)...(19): siRNA sense strand
aguccuggaugcccacuuu

SEQ ID NO: 1937627 - RNA, 19 nt, Homo sapiens
  misc_RNA (1)...(19): siRNA sense strand
gauuucagagccugugauu

SEQ ID NO: 1937628 - RNA, 19 nt, Homo sapiens
  misc_RNA (1)...(19): siRNA sense strand
ugguugauccucauucuuu

SEQ ID NO: 1937629 - RNA, 19 nt, Homo sapiens
  misc_RNA (1)...(19): siRNA sense strand
gaaaaguuccugugauaca

SEQ ID NO: 1937630 - RNA, 19 nt, Homo sapiens
  misc_RNA (1)...(19): siRNA sense strand
ucuguuggguucaauauac

SEQ ID NO: 1937631 - RNA, 19 nt, Homo sapiens
  misc_RNA (1)...(19): siRNA sense strand
gucuaugacuccuggaaga

SEQ ID NO: 1937632 - RNA, 19 nt, Homo sapiens
  misc_RNA (1)...(19): siRNA sense strand
gggcauagagaaagcaaag

SEQ ID NO: 1937633 - RNA, 19 nt, Homo sapiens
  misc_RNA (1)...(19): siRNA sense strand
gcucaucaacuccguccaa

SEQ ID NO: 1937634 - RNA, 19 nt, Homo sapiens
  misc_RNA (1)...(19): siRNA sense strand
caagaaaaguuccugugau

SEQ ID NO: 1937635 - RNA, 19 nt, Homo sapiens
  misc_RNA (1)...(19): siRNA sense strand
uguugaaacucuacucaca

SEQ ID NO: 1937636 - RNA, 19 nt, Homo sapiens
  misc_RNA (1)...(19): siRNA sense strand
gugaggacauacugaaugc

SEQ ID NO: 1937637 - RNA, 19 nt, Homo sapiens
  misc_RNA (1)...(19): siRNA sense strand
ggcuucagauuugggcaua

SEQ ID NO: 1937638 - RNA, 19 nt, Homo sapiens
  misc_RNA (1)...(19): siRNA sense strand
uuucagagccugugauuac

SEQ ID NO: 1937639 - RNA, 19 nt, Homo sapiens
  misc_RNA (1)...(19): siRNA sense strand
caaggaauuauagcuuuga

SEQ ID NO: 1937640 - RNA, 19 nt, Homo sapiens
  misc_RNA (1)...(19): siRNA sense strand
caucaagaagcaacagaga

SEQ ID NO: 1937641 - RNA, 19 nt, Homo sapiens
  misc_RNA (1)...(19): siRNA sense strand
gguugauccucauucuuuc

SEQ ID NO: 1937642 - RNA, 19 nt, Homo sapiens
  misc_RNA (1)...(19): siRNA sense strand
ugagggauuugaacauaac

SEQ ID NO: 1937643 - RNA, 19 nt, Homo sapiens
  misc_RNA (1)...(19): siRNA sense strand
ugaugaagauaguccugau

SEQ ID NO: 1937644 - RNA, 19 nt, Homo sapiens
  misc_RNA (1)...(19): siRNA sense strand
acccauacauuccacuuuc

SEQ ID NO: 1937645 - RNA, 19 nt, Homo sapiens
  misc_RNA (1)...(19): siRNA sense strand
ugaagauaguccugauuuu

SEQ ID NO: 1937646 - RNA, 19 nt, Homo sapiens
  misc_RNA (1)...(19): siRNA sense strand
gugauuacuccaagucaga

SEQ ID NO: 1937647 - RNA, 19 nt, Homo sapiens
  misc_RNA (1)...(19): siRNA sense strand
cacacaaguuagaaaucaa

SEQ ID NO: 1937648 - RNA, 19 nt, Homo sapiens
  misc_RNA (1)...(19): siRNA sense strand
augagggauuugaacauaa

SEQ ID NO: 1937649 - RNA, 19 nt, Homo sapiens
  misc_RNA (1)...(19): siRNA sense strand
uggaagaaucucaucaaga

SEQ ID NO: 1937650 - RNA, 19 nt, Homo sapiens
  misc_RNA (1)...(19): siRNA sense strand
ccugagcuccuuugacaug

SEQ ID NO: 1937651 - RNA, 19 nt, Homo sapiens
  misc_RNA (1)...(19): siRNA sense strand
acaaaaccgugaggacaua

SEQ ID NO: 1937652 - RNA, 19 nt, Homo sapiens
  misc_RNA (1)...(19): siRNA sense strand
gaaaucaaggaauuauagc

SEQ ID NO: 1937653 - RNA, 19 nt, Homo sapiens
  misc_RNA (1)...(19): siRNA sense strand
aaugaagugucccgagcaa

SEQ ID NO: 1937654 - RNA, 19 nt, Homo sapiens
  misc_RNA (1)...(19): siRNA sense strand
gaagcaacagagaaagaag

SEQ ID NO: 1937655 - RNA, 19 nt, Homo sapiens
  misc_RNA (1)...(19): siRNA sense strand
ccaguuaagaagaauggaa

SEQ ID NO: 1937656 - RNA, 19 nt, Homo sapiens
  misc_RNA (1)...(19): siRNA sense strand
cgaguugaucguccaagaa

SEQ ID NO: 1937657 - RNA, 19 nt, Homo sapiens
  misc_RNA (1)...(19): siRNA sense strand
augaagauaguccugauuu

SEQ ID NO: 1937658 - RNA, 19 nt, Homo sapiens
  misc_RNA (1)...(19): siRNA sense strand
uugaaacucuacucacaca

SEQ ID NO: 1937659 - RNA, 19 nt, Homo sapiens
  misc_RNA (1)...(19): siRNA sense strand
aagaauaagacuugaccaa

SEQ ID NO: 1937660 - RNA, 19 nt, Homo sapiens
  misc_RNA (1)...(19): siRNA sense strand
gagauugugaagaccuuug

SEQ ID NO: 1937661 - RNA, 19 nt, Homo sapiens
  misc_RNA (1)...(19): siRNA sense strand
gagccuguuaguauuaaug

SEQ ID NO: 1937662 - RNA, 19 nt, Homo sapiens
  misc_RNA (1)...(19): siRNA sense strand
aagagaagcaguccuggau

SEQ ID NO: 1937663 - RNA, 19 nt, Homo sapiens
  misc_RNA (1)...(19): siRNA sense strand
ggaugguuuugcaagaaua

SEQ ID NO: 1937664 - RNA, 19 nt, Homo sapiens
  misc_RNA (1)...(19): siRNA sense strand
cuucagauuugggcauaga

SEQ ID NO: 1937665 - RNA, 19 nt, Homo sapiens
  misc_RNA (1)...(19): siRNA sense strand
agaagcaacagagaaagaa

SEQ ID NO: 1937666 - RNA, 19 nt, Homo sapiens
  misc_RNA (1)...(19): siRNA sense strand
aagaagcaacagagaaaga

SEQ ID NO: 1937667 - RNA, 19 nt, Homo sapiens
  misc_RNA (1)...(19): siRNA sense strand
gaagaaucucaucaagaag

SEQ ID NO: 1937668 - RNA, 19 nt, Homo sapiens
  misc_RNA (1)...(19): siRNA sense strand
cuaaggugauucaaacuaa

SEQ ID NO: 1937669 - RNA, 19 nt, Homo sapiens
  misc_RNA (1)...(19): siRNA sense strand
caaacuaaaucaacccaau

SEQ ID NO: 1937670 - RNA, 19 nt, Homo sapiens
  misc_RNA (1)...(19): siRNA sense strand
ggaaucgucaccagcuuua

SEQ ID NO: 1937671 - RNA, 19 nt, Homo sapiens
  misc_RNA (1)...(19): siRNA sense strand
uggcauaucugcauuacug

SEQ ID NO: 1937672 - RNA, 19 nt, Homo sapiens
  misc_RNA (1)...(19): siRNA sense strand
ugacuuggcuaaggugauu

SEQ ID NO: 1937673 - RNA, 19 nt, Homo sapiens
  misc_RNA (1)...(19): siRNA sense strand
gcuaaggugauucaaacua

SEQ ID NO: 1937674 - RNA, 19 nt, Homo sapiens
  misc_RNA (1)...(19): siRNA sense strand
acucagagaucccuauauc

SEQ ID NO: 1937675 - RNA, 19 nt, Homo sapiens
  misc_RNA (1)...(19): siRNA sense strand
uuucuggacucgcucauuu

SEQ ID NO: 1937676 - RNA, 19 nt, Homo sapiens
  misc_RNA (1)...(19): siRNA sense strand
gaacuacuggcuccugcaa

SEQ ID NO: 1937677 - RNA, 19 nt, Homo sapiens
  misc_RNA (1)...(19): siRNA sense strand
uuuauccgcuucuggcuuu

SEQ ID NO: 1937678 - RNA, 19 nt, Homo sapiens
  misc_RNA (1)...(19): siRNA sense strand
ucagagaucccuauaucau

SEQ ID NO: 1937679 - RNA, 19 nt, Homo sapiens
  misc_RNA (1)...(19): siRNA sense strand
uaucaugguguccaacuuu

SEQ ID NO: 1937680 - RNA, 19 nt, Homo sapiens
  misc_RNA (1)...(19): siRNA sense strand
cgacucagagaucccuaua

SEQ ID NO: 1937681 - RNA, 19 nt, Homo sapiens
  misc_RNA (1)...(19): siRNA sense strand
ccacggaagucaacaaccu

SEQ ID NO: 1937682 - RNA, 19 nt, Homo sapiens
  misc_RNA (1)...(19): siRNA sense strand
aaccugggcuggcugaguu

SEQ ID NO: 1937683 - RNA, 19 nt, Homo sapiens
  misc_RNA (1)...(19): siRNA sense strand
gaagcguguugugcuccua

SEQ ID NO: 1937684 - RNA, 19 nt, Homo sapiens
  misc_RNA (1)...(19): siRNA sense strand
uggcuaaggugauucaaac

SEQ ID NO: 1937685 - RNA, 19 nt, Homo sapiens
  misc_RNA (1)...(19): siRNA sense strand
ucagauuccugcccuuucu

SEQ ID NO: 1937686 - RNA, 19 nt, Homo sapiens
  misc_RNA (1)...(19): siRNA sense strand
cuucagacccuguauaucu

SEQ ID NO: 1937687 - RNA, 19 nt, Homo sapiens
  misc_RNA (1)...(19): siRNA sense strand
cccuguauaucuuggcaua

SEQ ID NO: 1937688 - RNA, 19 nt, Homo sapiens
  misc_RNA (1)...(19): siRNA sense strand
gcgcuucagacccuguaua

SEQ ID NO: 1937689 - RNA, 19 nt, Homo sapiens
  misc_RNA (1)...(19): siRNA sense strand
gagcaugcguggucuucac

SEQ ID NO: 1937690 - RNA, 19 nt, Homo sapiens
  misc_RNA (1)...(19): siRNA sense strand
aaacuaaaucaacccaaug

SEQ ID NO: 1937691 - RNA, 19 nt, Homo sapiens
  misc_RNA (1)...(19): siRNA sense strand
ccuggguuauggcuacuuu

SEQ ID NO: 1937692 - RNA, 19 nt, Homo sapiens
  misc_RNA (1)...(19): siRNA sense strand
ugcagugucuucaccauca

SEQ ID NO: 1937693 - RNA, 19 nt, Homo sapiens
  misc_RNA (1)...(19): siRNA sense strand
gagacgggauccucaucgu

SEQ ID NO: 1937694 - RNA, 19 nt, Homo sapiens
  misc_RNA (1)...(19): siRNA sense strand
ucucaccacuggcugacuu

SEQ ID NO: 1937695 - RNA, 19 nt, Homo sapiens
  misc_RNA (1)...(19): siRNA sense strand
cagagaucccuauaucaug

SEQ ID NO: 1937696 - RNA, 19 nt, Homo sapiens
  misc_RNA (1)...(19): siRNA sense strand
cuaaaucaacccaaugucu

SEQ ID NO: 1937697 - RNA, 19 nt, Homo sapiens
  misc_RNA (1)...(19): siRNA sense strand
ggguccuucuccuggguua

SEQ ID NO: 1937698 - RNA, 19 nt, Homo sapiens
  misc_RNA (1)...(19): siRNA sense strand
gagcaagacaggaacuacu

SEQ ID NO: 1937699 - RNA, 19 nt, Homo sapiens
  misc_RNA (1)...(19): siRNA sense strand
caggaaucgucaccagcuu

SEQ ID NO: 1937700 - RNA, 19 nt, Homo sapiens
  misc_RNA (1)...(19): siRNA sense strand
ccuauaucaugguguccaa

SEQ ID NO: 1937701 - RNA, 19 nt, Homo sapiens
  misc_RNA (1)...(19): siRNA sense strand
caacccaaugucucuccua

SEQ ID NO: 1937702 - RNA, 19 nt, Homo sapiens
  misc_RNA (1)...(19): siRNA sense strand
gaguguggacaacgucaga

SEQ ID NO: 1937703 - RNA, 19 nt, Homo sapiens
  misc_RNA (1)...(19): siRNA sense strand
uaucuuggcauaucugcau

SEQ ID NO: 1937704 - RNA, 19 nt, Homo sapiens
  misc_RNA (1)...(19): siRNA sense strand
gcaagaagguggcauuguu

SEQ ID NO: 1937705 - RNA, 19 nt, Homo sapiens
  misc_RNA (1)...(19): siRNA sense strand
ucuaagaacuucacaaaga

SEQ ID NO: 1937706 - RNA, 19 nt, Homo sapiens
  misc_RNA (1)...(19): siRNA sense strand
ggagagagcaguuucaaca

SEQ ID NO: 1937707 - RNA, 19 nt, Homo sapiens
  misc_RNA (1)...(19): siRNA sense strand
uggcaaacaugaagagaaa

SEQ ID NO: 1937708 - RNA, 19 nt, Homo sapiens
  misc_RNA (1)...(19): siRNA sense strand
cuaagaacuucacaaagaa

SEQ ID NO: 1937709 - RNA, 19 nt, Homo sapiens
  misc_RNA (1)...(19): siRNA sense strand
gaaagugugugugaaugug

SEQ ID NO: 1937710 - RNA, 19 nt, Homo sapiens
  misc_RNA (1)...(19): siRNA sense strand
ggaggugucuggcaaacau

SEQ ID NO: 1937711 - RNA, 19 nt, Homo sapiens
  misc_RNA (1)...(19): siRNA sense strand
gaagguggcauuguuucua

SEQ ID NO: 1937712 - RNA, 19 nt, Homo sapiens
  misc_RNA (1)...(19): siRNA sense strand
gaagagaaacagcaagaag

SEQ ID NO: 1937713 - RNA, 19 nt, Homo sapiens
  misc_RNA (1)...(19): siRNA sense strand
caagaagguggcauuguuu

SEQ ID NO: 1937714 - RNA, 19 nt, Homo sapiens
  misc_RNA (1)...(19): siRNA sense strand
ccaggucccuccuuacuca

SEQ ID NO: 1937715 - RNA, 19 nt, Homo sapiens
  misc_RNA (1)...(19): siRNA sense strand
cagaggaguugauggugaa

SEQ ID NO: 1937716 - RNA, 19 nt, Homo sapiens
  misc_RNA (1)...(19): siRNA sense strand
gacaguauuugccucacuu

SEQ ID NO: 1937717 - RNA, 19 nt, Homo sapiens
  misc_RNA (1)...(19): siRNA sense strand
ggaaagugugugugaaugu

SEQ ID NO: 1937718 - RNA, 19 nt, Homo sapiens
  misc_RNA (1)...(19): siRNA sense strand
gcaaacaugaagagaaaca

SEQ ID NO: 1937719 - RNA, 19 nt, Homo sapiens
  misc_RNA (1)...(19): siRNA sense strand
aagguggcauuguuucuaa

SEQ ID NO: 1937720 - RNA, 19 nt, Homo sapiens
  misc_RNA (1)...(19): siRNA sense strand
ccucucgccugcuggauga

SEQ ID NO: 1937721 - RNA, 19 nt, Homo sapiens
  misc_RNA (1)...(19): siRNA sense strand
gagagagcaguuucaacaa

SEQ ID NO: 1937722 - RNA, 19 nt, Homo sapiens
  misc_RNA (1)...(19): siRNA sense strand
gcagagguggauccuguga

SEQ ID NO: 1937723 - RNA, 19 nt, Homo sapiens
  misc_RNA (1)...(19): siRNA sense strand
ccuccuuacucaacauuug

SEQ ID NO: 1937724 - RNA, 19 nt, Homo sapiens
  misc_RNA (1)...(19): siRNA sense strand
gaagaccaaagauggauac

SEQ ID NO: 1937725 - RNA, 19 nt, Homo sapiens
  misc_RNA (1)...(19): siRNA sense strand
ccugcuggaugauggcuuu

SEQ ID NO: 1937726 - RNA, 19 nt, Homo sapiens
  misc_RNA (1)...(19): siRNA sense strand
agagguggauccugugaca

SEQ ID NO: 1937727 - RNA, 19 nt, Homo sapiens
  misc_RNA (1)...(19): siRNA sense strand
ggugaagaccaaagaugga

SEQ ID NO: 1937728 - RNA, 19 nt, Homo sapiens
  misc_RNA (1)...(19): siRNA sense strand
agagagcaguuucaacaac

SEQ ID NO: 1937729 - RNA, 19 nt, Homo sapiens
  misc_RNA (1)...(19): siRNA sense strand
uggaaagugugugugaaug

SEQ ID NO: 1937730 - RNA, 19 nt, Homo sapiens
  misc_RNA (1)...(19): siRNA sense strand
ugaagaccaaagauggaua

SEQ ID NO: 1937731 - RNA, 19 nt, Homo sapiens
  misc_RNA (1)...(19): siRNA sense strand
ggggagcccuggaaagugu

SEQ ID NO: 1937732 - RNA, 19 nt, Homo sapiens
  misc_RNA (1)...(19): siRNA sense strand
gaaugugcacagcuucaag

SEQ ID NO: 1937733 - RNA, 19 nt, Homo sapiens
  misc_RNA (1)...(19): siRNA sense strand
ggucccuccuuacucaaca

SEQ ID NO: 1937734 - RNA, 19 nt, Homo sapiens
  misc_RNA (1)...(19): siRNA sense strand
ccuggaaagugugugugaa

SEQ ID NO: 1937735 - RNA, 19 nt, Homo sapiens
  misc_RNA (1)...(19): siRNA sense strand
ugacaguauuugccucacu

SEQ ID NO: 1937736 - RNA, 19 nt, Homo sapiens
  misc_RNA (1)...(19): siRNA sense strand
ugaagagaaacagcaagaa

SEQ ID NO: 1937737 - RNA, 19 nt, Homo sapiens
  misc_RNA (1)...(19): siRNA sense strand
gaaaucccuucuaaacaug

SEQ ID NO: 1937738 - RNA, 19 nt, Homo sapiens
  misc_RNA (1)...(19): siRNA sense strand
gaaaagagauacagcgaau

SEQ ID NO: 1937739 - RNA, 19 nt, Homo sapiens
  misc_RNA (1)...(19): siRNA sense strand
gcagaaaguuguggaucuu

SEQ ID NO: 1937740 - RNA, 19 nt, Homo sapiens
  misc_RNA (1)...(19): siRNA sense strand
aaagagauacagcgaauuu

SEQ ID NO: 1937741 - RNA, 19 nt, Homo sapiens
  misc_RNA (1)...(19): siRNA sense strand
agauagaagugcuaaugaa

SEQ ID NO: 1937742 - RNA, 19 nt, Homo sapiens
  misc_RNA (1)...(19): siRNA sense strand
gaagugcuaaugaauggaa

SEQ ID NO: 1937743 - RNA, 19 nt, Homo sapiens
  misc_RNA (1)...(19): siRNA sense strand
cagcgaauuucaugcuuug

SEQ ID NO: 1937744 - RNA, 19 nt, Homo sapiens
  misc_RNA (1)...(19): siRNA sense strand
uaagauagaagugcuaaug

SEQ ID NO: 1937745 - RNA, 19 nt, Homo sapiens
  misc_RNA (1)...(19): siRNA sense strand
gauagaagugcuaaugaau

SEQ ID NO: 1937746 - RNA, 19 nt, Homo sapiens
  misc_RNA (1)...(19): siRNA sense strand
uagaagugcuaaugaaugg

SEQ ID NO: 1937747 - RNA, 19 nt, Homo sapiens
  misc_RNA (1)...(19): siRNA sense strand
gcuaaugaauggaagaaaa

SEQ ID NO: 1937748 - RNA, 19 nt, Homo sapiens
  misc_RNA (1)...(19): siRNA sense strand
uuccaaaugugguuauuga

SEQ ID NO: 1937749 - RNA, 19 nt, Homo sapiens
  misc_RNA (1)...(19): siRNA sense strand
ggcagaaaguuguggaucu

SEQ ID NO: 1937750 - RNA, 19 nt, Homo sapiens
  misc_RNA (1)...(19): siRNA sense strand
acagcgaauuucaugcuuu

SEQ ID NO: 1937751 - RNA, 19 nt, Homo sapiens
  misc_RNA (1)...(19): siRNA sense strand
gaagagucaagcaaacugu

SEQ ID NO: 1937752 - RNA, 19 nt, Homo sapiens
  misc_RNA (1)...(19): siRNA sense strand
ccucagggauccauauguc

SEQ ID NO: 1937753 - RNA, 19 nt, Homo sapiens
  misc_RNA (1)...(19): siRNA sense strand
uaccaaaggcagaaaguug

SEQ ID NO: 1937754 - RNA, 19 nt, Homo sapiens
  misc_RNA (1)...(19): siRNA sense strand
ccaaaugugguuauugaag

SEQ ID NO: 1937755 - RNA, 19 nt, Homo sapiens
  misc_RNA (1)...(19): siRNA sense strand
aaaugugguuauugaagga

SEQ ID NO: 1937756 - RNA, 19 nt, Homo sapiens
  misc_RNA (1)...(19): siRNA sense strand
agagauacagcgaauuuca

SEQ ID NO: 1937757 - RNA, 19 nt, Homo sapiens
  misc_RNA (1)...(19): siRNA sense strand
gagauacagcgaauuucau

SEQ ID NO: 1937758 - RNA, 19 nt, Homo sapiens
  misc_RNA (1)...(19): siRNA sense strand
aagauagaagugcuaauga

SEQ ID NO: 1937759 - RNA, 19 nt, Homo sapiens
  misc_RNA (1)...(19): siRNA sense strand
aggcuuggaaacauacuua

SEQ ID NO: 1937760 - RNA, 19 nt, Homo sapiens
  misc_RNA (1)...(19): siRNA sense strand
aguccuccaugggauauuu

SEQ ID NO: 1937761 - RNA, 19 nt, Homo sapiens
  misc_RNA (1)...(19): siRNA sense strand
agauacagcgaauuucaug

SEQ ID NO: 1937762 - RNA, 19 nt, Homo sapiens
  misc_RNA (1)...(19): siRNA sense strand
auagaagugcuaaugaaug

SEQ ID NO: 1937763 - RNA, 19 nt, Homo sapiens
  misc_RNA (1)...(19): siRNA sense strand
ucagggauccauaugucuu

SEQ ID NO: 1937764 - RNA, 19 nt, Homo sapiens
  misc_RNA (1)...(19): siRNA sense strand
gcgaauuucaugcuuugca

SEQ ID NO: 1937765 - RNA, 19 nt, Homo sapiens
  misc_RNA (1)...(19): siRNA sense strand
ccaaaggcagaaaguugug

SEQ ID NO: 1937766 - RNA, 19 nt, Homo sapiens
  misc_RNA (1)...(19): siRNA sense strand
cacuugcccucucuaccaa

SEQ ID NO: 1937767 - RNA, 19 nt, Homo sapiens
  misc_RNA (1)...(19): siRNA sense strand
cgacaaagaugcugaauua

SEQ ID NO: 1937768 - RNA, 19 nt, Homo sapiens
  misc_RNA (1)...(19): siRNA sense strand
uaacaaagaugccgucauu

SEQ ID NO: 1937769 - RNA, 19 nt, Homo sapiens
  misc_RNA (1)...(19): siRNA sense strand
gaacuuggcagacuuuaua

SEQ ID NO: 1937770 - RNA, 19 nt, Homo sapiens
  misc_RNA (1)...(19): siRNA sense strand
caaagaugcugaauuagug

SEQ ID NO: 1937771 - RNA, 19 nt, Homo sapiens
  misc_RNA (1)...(19): siRNA sense strand
gagcgagccuugaaagaga

SEQ ID NO: 1937772 - RNA, 19 nt, Homo sapiens
  misc_RNA (1)...(19): siRNA sense strand
ggacaaaucugcagaaaag

SEQ ID NO: 1937773 - RNA, 19 nt, Homo sapiens
  misc_RNA (1)...(19): siRNA sense strand
gaaggcagcaucucacauu

SEQ ID NO: 1937774 - RNA, 19 nt, Homo sapiens
  misc_RNA (1)...(19): siRNA sense strand
gagcgaagcuggaaaagaa

SEQ ID NO: 1937775 - RNA, 19 nt, Homo sapiens
  misc_RNA (1)...(19): siRNA sense strand
gaagaagccagccuugauu

SEQ ID NO: 1937776 - RNA, 19 nt, Homo sapiens
  misc_RNA (1)...(19): siRNA sense strand
aaugagagcucuucuggaa

SEQ ID NO: 1937777 - RNA, 19 nt, Homo sapiens
  misc_RNA (1)...(19): siRNA sense strand
cgaagaagguugagaaggu

SEQ ID NO: 1937778 - RNA, 19 nt, Homo sapiens
  misc_RNA (1)...(19): siRNA sense strand
ggcagcaucucacauuaaa

SEQ ID NO: 1937779 - RNA, 19 nt, Homo sapiens
  misc_RNA (1)...(19): siRNA sense strand
gaacuauuguacucuaagu

SEQ ID NO: 1937780 - RNA, 19 nt, Homo sapiens
  misc_RNA (1)...(19): siRNA sense strand
uggcagacuuuauaacaaa

SEQ ID NO: 1937781 - RNA, 19 nt, Homo sapiens
  misc_RNA (1)...(19): siRNA sense strand
caaagaugccgucauugaa

SEQ ID NO: 1937782 - RNA, 19 nt, Homo sapiens
  misc_RNA (1)...(19): siRNA sense strand
gaccaauaguugccuguga

SEQ ID NO: 1937783 - RNA, 19 nt, Homo sapiens
  misc_RNA (1)...(19): siRNA sense strand
acaaagaugccgucauuga

SEQ ID NO: 1937784 - RNA, 19 nt, Homo sapiens
  misc_RNA (1)...(19): siRNA sense strand
ggauaaaggaaacacuaaa

SEQ ID NO: 1937785 - RNA, 19 nt, Homo sapiens
  misc_RNA (1)...(19): siRNA sense strand
guccaucgcugacagugaa

SEQ ID NO: 1937786 - RNA, 19 nt, Homo sapiens
  misc_RNA (1)...(19): siRNA sense strand
gaagccagccuugauucua

SEQ ID NO: 1937787 - RNA, 19 nt, Homo sapiens
  misc_RNA (1)...(19): siRNA sense strand
gccuacaagucccucuuua

SEQ ID NO: 1937788 - RNA, 19 nt, Homo sapiens
  misc_RNA (1)...(19): siRNA sense strand
uugagaaggucgacaaaga

SEQ ID NO: 1937789 - RNA, 19 nt, Homo sapiens
  misc_RNA (1)...(19): siRNA sense strand
gggauaaaggaaacacuaa

SEQ ID NO: 1937790 - RNA, 19 nt, Homo sapiens
  misc_RNA (1)...(19): siRNA sense strand
aagaugccgucauugaauu

SEQ ID NO: 1937791 - RNA, 19 nt, Homo sapiens
  misc_RNA (1)...(19): siRNA sense strand
gauaaaggaaacacuaaag

SEQ ID NO: 1937792 - RNA, 19 nt, Homo sapiens
  misc_RNA (1)...(19): siRNA sense strand
gcugaagcuuucugauaau

SEQ ID NO: 1937793 - RNA, 19 nt, Homo sapiens
  misc_RNA (1)...(19): siRNA sense strand
gagaaggucgacaaagaug

SEQ ID NO: 1937794 - RNA, 19 nt, Homo sapiens
  misc_RNA (1)...(19): siRNA sense strand
gaaauauuaagacgaccaa

SEQ ID NO: 1937795 - RNA, 19 nt, Homo sapiens
  misc_RNA (1)...(19): siRNA sense strand
ccagggccaucaaaaguua

SEQ ID NO: 1937796 - RNA, 19 nt, Homo sapiens
  misc_RNA (1)...(19): siRNA sense strand
aaggcagcaucucacauua

SEQ ID NO: 1937797 - RNA, 19 nt, Homo sapiens
  misc_RNA (1)...(19): siRNA sense strand
uuaagacgaccaauaguug

SEQ ID NO: 1937798 - RNA, 19 nt, Homo sapiens
  misc_RNA (1)...(19): siRNA sense strand
gagaugaacggccgacaca

SEQ ID NO: 1937799 - RNA, 19 nt, Homo sapiens
  misc_RNA (1)...(19): siRNA sense strand
acaaagaugcugaauuagu

SEQ ID NO: 1937800 - RNA, 19 nt, Homo sapiens
  misc_RNA (1)...(19): siRNA sense strand
ugagagcucuucuggaaaa

SEQ ID NO: 1937801 - RNA, 19 nt, Homo sapiens
  misc_RNA (1)...(19): siRNA sense strand
gaaaagaaaccaaagaaac

SEQ ID NO: 1937802 - RNA, 19 nt, Homo sapiens
  misc_RNA (1)...(19): siRNA sense strand
gugcugcggcuguguguuu

SEQ ID NO: 1937803 - RNA, 19 nt, Homo sapiens
  misc_RNA (1)...(19): siRNA sense strand
ugaagaagccagccuugau

SEQ ID NO: 1937804 - RNA, 19 nt, Homo sapiens
  misc_RNA (1)...(19): siRNA sense strand
aaagaugccgucauugaau

SEQ ID NO: 1937805 - RNA, 19 nt, Homo sapiens
  misc_RNA (1)...(19): siRNA sense strand
ggaaaagaaaccaaagaaa

SEQ ID NO: 1937806 - RNA, 19 nt, Homo sapiens
  misc_RNA (1)...(19): siRNA sense strand
uaaaggaaacacuaaaggu

SEQ ID NO: 1937807 - RNA, 19 nt, Homo sapiens
  misc_RNA (1)...(19): siRNA sense strand
ucauugaauuucucuugga

SEQ ID NO: 1937808 - RNA, 19 nt, Homo sapiens
  misc_RNA (1)...(19): siRNA sense strand
gauguggacgugcugaaga

SEQ ID NO: 1937809 - RNA, 19 nt, Homo sapiens
  misc_RNA (1)...(19): siRNA sense strand
gaagcuuucugauaauccu

SEQ ID NO: 1937810 - RNA, 19 nt, Homo sapiens
  misc_RNA (1)...(19): siRNA sense strand
ggccgaagaagguugagaa

SEQ ID NO: 1937811 - RNA, 19 nt, Homo sapiens
  misc_RNA (1)...(19): siRNA sense strand
aaccagaugucagugaaga

SEQ ID NO: 1937812 - RNA, 19 nt, Homo sapiens
  misc_RNA (1)...(19): siRNA sense strand
aagccagccuugauucuag

SEQ ID NO: 1937813 - RNA, 19 nt, Homo sapiens
  misc_RNA (1)...(19): siRNA sense strand
uggaacuauuguacucuaa

SEQ ID NO: 1937814 - RNA, 19 nt, Homo sapiens
  misc_RNA (1)...(19): siRNA sense strand
accaauaguugccugugaa

SEQ ID NO: 1937815 - RNA, 19 nt, Homo sapiens
  misc_RNA (1)...(19): siRNA sense strand
uugaauuucucuuggacaa

SEQ ID NO: 1937816 - RNA, 19 nt, Homo sapiens
  misc_RNA (1)...(19): siRNA sense strand
ugagaaggucgacaaagau

SEQ ID NO: 1937817 - RNA, 19 nt, Homo sapiens
  misc_RNA (1)...(19): siRNA sense strand
ugaauuaguggcccaaugg

SEQ ID NO: 1937818 - RNA, 19 nt, Homo sapiens
  misc_RNA (1)...(19): siRNA sense strand
uacucuaagucaggaaaua

SEQ ID NO: 1937819 - RNA, 19 nt, Homo sapiens
  misc_RNA (1)...(19): siRNA sense strand
cgucauugaauuucucuug

SEQ ID NO: 1937820 - RNA, 19 nt, Homo sapiens
  misc_RNA (1)...(19): siRNA sense strand
gauaaaagcggaaguuugc

SEQ ID NO: 1937821 - RNA, 19 nt, Homo sapiens
  misc_RNA (1)...(19): siRNA sense strand
gaauuaguggcccaaugga

SEQ ID NO: 1937822 - RNA, 19 nt, Homo sapiens
  misc_RNA (1)...(19): siRNA sense strand
gcugagagcgaagcuggaa

SEQ ID NO: 1937823 - RNA, 19 nt, Homo sapiens
  misc_RNA (1)...(19): siRNA sense strand
caaaagcacagcaaugaau

SEQ ID NO: 1937824 - RNA, 19 nt, Homo sapiens
  misc_RNA (1)...(19): siRNA sense strand
ggccuacaagucccucuuu

SEQ ID NO: 1937825 - RNA, 19 nt, Homo sapiens
  misc_RNA (1)...(19): siRNA sense strand
gaaggucgacaaagaugcu

SEQ ID NO: 1937826 - RNA, 19 nt, Homo sapiens
  misc_RNA (1)...(19): siRNA sense strand
ggaacuauuguacucuaag

SEQ ID NO: 1937827 - RNA, 19 nt, Homo sapiens
  misc_RNA (1)...(19): siRNA sense strand
gcaaugaaugagagcucuu

SEQ ID NO: 1937828 - RNA, 19 nt, Homo sapiens
  misc_RNA (1)...(19): siRNA sense strand
aaagcacagcaaugaauga

SEQ ID NO: 1937829 - RNA, 19 nt, Homo sapiens
  misc_RNA (1)...(19): siRNA sense strand
cugaauuaguggcccaaug

SEQ ID NO: 1937830 - RNA, 19 nt, Homo sapiens
  misc_RNA (1)...(19): siRNA sense strand
aaucggaggccuacaaguc

SEQ ID NO: 1937831 - RNA, 19 nt, Homo sapiens
  misc_RNA (1)...(19): siRNA sense strand
guugugggccuggagauga

SEQ ID NO: 1937832 - RNA, 19 nt, Homo sapiens
  misc_RNA (1)...(19): siRNA sense strand
ggaaggggauaaaggaaac

SEQ ID NO: 1937833 - RNA, 19 nt, Homo sapiens
  misc_RNA (1)...(19): siRNA sense strand
ggaaggcagcaucucacau

SEQ ID NO: 1937834 - RNA, 19 nt, Homo sapiens
  misc_RNA (1)...(19): siRNA sense strand
uuggcagacuuuauaacaa

SEQ ID NO: 1937835 - RNA, 19 nt, Homo sapiens
  misc_RNA (1)...(19): siRNA sense strand
aagaaucggaggccuacaa

SEQ ID NO: 1937836 - RNA, 19 nt, Homo sapiens
  misc_RNA (1)...(19): siRNA sense strand
gagccuugaaagagauaaa

SEQ ID NO: 1937837 - RNA, 19 nt, Homo sapiens
  misc_RNA (1)...(19): siRNA sense strand
aggcagcaucucacauuaa

SEQ ID NO: 1937838 - RNA, 19 nt, Homo sapiens
  misc_RNA (1)...(19): siRNA sense strand
acacuaaaggugacaagca

SEQ ID NO: 1937839 - RNA, 19 nt, Homo sapiens
  misc_RNA (1)...(19): siRNA sense strand
gggaaggcagcaucucaca

SEQ ID NO: 1937840 - RNA, 19 nt, Homo sapiens
  misc_RNA (1)...(19): siRNA sense strand
aaaaccagaugucagugaa

SEQ ID NO: 1937841 - RNA, 19 nt, Homo sapiens
  misc_RNA (1)...(19): siRNA sense strand
auggaacuauuguacucua

SEQ ID NO: 1937842 - RNA, 19 nt, Homo sapiens
  misc_RNA (1)...(19): siRNA sense strand
gaaugugacagagcugaag

SEQ ID NO: 1937843 - RNA, 19 nt, Homo sapiens
  misc_RNA (1)...(19): siRNA sense strand
gaacaaugcugcucuugaa

SEQ ID NO: 1937844 - RNA, 19 nt, Homo sapiens
  misc_RNA (1)...(19): siRNA sense strand
ccaaggcucuaaagaaauu

SEQ ID NO: 1937845 - RNA, 19 nt, Homo sapiens
  misc_RNA (1)...(19): siRNA sense strand
ucaauaagaucgaggaguu

SEQ ID NO: 1937846 - RNA, 19 nt, Homo sapiens
  misc_RNA (1)...(19): siRNA sense strand
agaaauaccgcaacuauga

SEQ ID NO: 1937847 - RNA, 19 nt, Homo sapiens
  misc_RNA (1)...(19): siRNA sense strand
aaccaaggcucuaaagaaa

SEQ ID NO: 1937848 - RNA, 19 nt, Homo sapiens
  misc_RNA (1)...(19): siRNA sense strand
caagaaauaccgcaacuau

SEQ ID NO: 1937849 - RNA, 19 nt, Homo sapiens
  misc_RNA (1)...(19): siRNA sense strand
agacagacgucaauaagau

SEQ ID NO: 1937850 - RNA, 19 nt, Homo sapiens
  misc_RNA (1)...(19): siRNA sense strand
gaagacagacgucaauaag

SEQ ID NO: 1937851 - RNA, 19 nt, Homo sapiens
  misc_RNA (1)...(19): siRNA sense strand
uaaccaaggcucuaaagaa

SEQ ID NO: 1937852 - RNA, 19 nt, Homo sapiens
  misc_RNA (1)...(19): siRNA sense strand
gaaaggagucguguucaau

SEQ ID NO: 1937853 - RNA, 19 nt, Homo sapiens
  misc_RNA (1)...(19): siRNA sense strand
gcaacuguccuuucucuca

SEQ ID NO: 1937854 - RNA, 19 nt, Homo sapiens
  misc_RNA (1)...(19): siRNA sense strand
ggagucguguucaauguca

SEQ ID NO: 1937855 - RNA, 19 nt, Homo sapiens
  misc_RNA (1)...(19): siRNA sense strand
ugaagacagacgucaauaa

SEQ ID NO: 1937856 - RNA, 19 nt, Homo sapiens
  misc_RNA (1)...(19): siRNA sense strand
ucaagauuguggccaagaa

SEQ ID NO: 1937857 - RNA, 19 nt, Homo sapiens
  misc_RNA (1)...(19): siRNA sense strand
gaacgccuaugcccgugau

SEQ ID NO: 1937858 - RNA, 19 nt, Homo sapiens
  misc_RNA (1)...(19): siRNA sense strand
gagaaagcaucggcaacug

SEQ ID NO: 1937859 - RNA, 19 nt, Homo sapiens
  misc_RNA (1)...(19): siRNA sense strand
gaaauaccgcaacuaugau

SEQ ID NO: 1937860 - RNA, 19 nt, Homo sapiens
  misc_RNA (1)...(19): siRNA sense strand
gacccuggcugacugcaau

SEQ ID NO: 1937861 - RNA, 19 nt, Homo sapiens
  misc_RNA (1)...(19): siRNA sense strand
ucucagcgccucuucauga

SEQ ID NO: 1937862 - RNA, 19 nt, Homo sapiens
  misc_RNA (1)...(19): siRNA sense strand
cgacaucuuuuccaaguuu

SEQ ID NO: 1937863 - RNA, 19 nt, Homo sapiens
  misc_RNA (1)...(19): siRNA sense strand
agaucgagcucuuugugaa

SEQ ID NO: 1937864 - RNA, 19 nt, Homo sapiens
  misc_RNA (1)...(19): siRNA sense strand
ugugaaggcuggaaucgau

SEQ ID NO: 1937865 - RNA, 19 nt, Homo sapiens
  misc_RNA (1)...(19): siRNA sense strand
gcugaaaggagucguguuc

SEQ ID NO: 1937866 - RNA, 19 nt, Homo sapiens
  misc_RNA (1)...(19): siRNA sense strand
gagaucgagcucuuuguga

SEQ ID NO: 1937867 - RNA, 19 nt, Homo sapiens
  misc_RNA (1)...(19): siRNA sense strand
cuaaagaaauuggaugacu

SEQ ID NO: 1937868 - RNA, 19 nt, Homo sapiens
  misc_RNA (1)...(19): siRNA sense strand
aaauaccgcaacuaugaua

SEQ ID NO: 1937869 - RNA, 19 nt, Homo sapiens
  misc_RNA (1)...(19): siRNA sense strand
gagauugacgccaacacuu

SEQ ID NO: 1937870 - RNA, 19 nt, Homo sapiens
  misc_RNA (1)...(19): siRNA sense strand
ggagaaagcaucggcaacu

SEQ ID NO: 1937871 - RNA, 19 nt, Homo sapiens
  misc_RNA (1)...(19): siRNA sense strand
cagcugaccugcacaaccu

SEQ ID NO: 1937872 - RNA, 19 nt, Homo sapiens
  misc_RNA (1)...(19): siRNA sense strand
caagauuguggccaagaaa

SEQ ID NO: 1937873 - RNA, 19 nt, Homo sapiens
  misc_RNA (1)...(19): siRNA sense strand
ccaagcagcagaacaaugc

SEQ ID NO: 1937874 - RNA, 19 nt, Homo sapiens
  misc_RNA (1)...(19): siRNA sense strand
cagcgggcaucgacaucuu

SEQ ID NO: 1937875 - RNA, 19 nt, Homo sapiens
  misc_RNA (1)...(19): siRNA sense strand
gccaagaaauaccgcaacu

SEQ ID NO: 1937876 - RNA, 19 nt, Homo sapiens
  misc_RNA (1)...(19): siRNA sense strand
agauuguggccaagaaaua

SEQ ID NO: 1937877 - RNA, 19 nt, Homo sapiens
  misc_RNA (1)...(19): siRNA sense strand
cggcaacuguccuuucucu

SEQ ID NO: 1937878 - RNA, 19 nt, Homo sapiens
  misc_RNA (1)...(19): siRNA sense strand
uggaaucgauggagaaagc

SEQ ID NO: 1937879 - RNA, 19 nt, Homo sapiens
  misc_RNA (1)...(19): siRNA sense strand
aaaggagucguguucaaug

SEQ ID NO: 1937880 - RNA, 19 nt, Homo sapiens
  misc_RNA (1)...(19): siRNA sense strand
cuacgcugaugucgccaaa

SEQ ID NO: 1937881 - RNA, 19 nt, Homo sapiens
  misc_RNA (1)...(19): siRNA sense strand
gugaagacagacgucaaua

SEQ ID NO: 1937882 - RNA, 19 nt, Homo sapiens
  misc_RNA (1)...(19): siRNA sense strand
cgagaucgagcucuuugug

SEQ ID NO: 1937883 - RNA, 19 nt, Homo sapiens
  misc_RNA (1)...(19): siRNA sense strand
uaugauaucccggcugaga

SEQ ID NO: 1937884 - RNA, 19 nt, Homo sapiens
  misc_RNA (1)...(19): siRNA sense strand
ccaagaaauaccgcaacua

SEQ ID NO: 1937885 - RNA, 19 nt, Homo sapiens
  misc_RNA (1)...(19): siRNA sense strand
cagacucggcgacagcuaa

SEQ ID NO: 1937886 - RNA, 19 nt, Homo sapiens
  misc_RNA (1)...(19): siRNA sense strand
agaacaaugcugcucuuga

SEQ ID NO: 1937887 - RNA, 19 nt, Homo sapiens
  misc_RNA (1)...(19): siRNA sense strand
aaggagucguguucaaugu

SEQ ID NO: 1937888 - RNA, 19 nt, Homo sapiens
  misc_RNA (1)...(19): siRNA sense strand
ggagauugacgccaacacu

SEQ ID NO: 1937889 - RNA, 19 nt, Homo sapiens
  misc_RNA (1)...(19): siRNA sense strand
auaccaagcagcagaacaa

SEQ ID NO: 1937890 - RNA, 19 nt, Homo sapiens
  misc_RNA (1)...(19): siRNA sense strand
cgaguuggccuacgcugau

SEQ ID NO: 1937891 - RNA, 19 nt, Homo sapiens
  misc_RNA (1)...(19): siRNA sense strand
aaagaaauuggaugacuac

SEQ ID NO: 1937892 - RNA, 19 nt, Homo sapiens
  misc_RNA (1)...(19): siRNA sense strand
gaguuggccuacgcugaug

SEQ ID NO: 1937893 - RNA, 19 nt, Homo sapiens
  misc_RNA (1)...(19): siRNA sense strand
ugacagugagaucgaguug

SEQ ID NO: 1937894 - RNA, 19 nt, Homo sapiens
  misc_RNA (1)...(19): siRNA sense strand
gauugacgccaacacuugu

SEQ ID NO: 1937895 - RNA, 19 nt, Homo sapiens
  misc_RNA (1)...(19): siRNA sense strand
agauugacgccaacacuug

SEQ ID NO: 1937896 - RNA, 19 nt, Homo sapiens
  misc_RNA (1)...(19): siRNA sense strand
gaucgagcucuuugugaag

SEQ ID NO: 1937897 - RNA, 19 nt, Homo sapiens
  misc_RNA (1)...(19): siRNA sense strand
gcuggaaucgauggagaaa

SEQ ID NO: 1937898 - RNA, 19 nt, Homo sapiens
  misc_RNA (1)...(19): siRNA sense strand
caaguuuucugccuacauc

SEQ ID NO: 1937899 - RNA, 19 nt, Homo sapiens
  misc_RNA (1)...(19): siRNA sense strand
gagcugacccuggcugacu

SEQ ID NO: 1937900 - RNA, 19 nt, Homo sapiens
  misc_RNA (1)...(19): siRNA sense strand
aagacagacgucaauaaga

SEQ ID NO: 1937901 - RNA, 19 nt, Homo sapiens
  misc_RNA (1)...(19): siRNA sense strand
ugauaucccggcugagaug

SEQ ID NO: 1937902 - RNA, 19 nt, Homo sapiens
  misc_RNA (1)...(19): siRNA sense strand
aagaaauaccgcaacuaug

SEQ ID NO: 1937903 - RNA, 19 nt, Homo sapiens
  misc_RNA (1)...(19): siRNA sense strand
agaaagcaucggcaacugu

SEQ ID NO: 1937904 - RNA, 19 nt, Homo sapiens
  misc_RNA (1)...(19): siRNA sense strand
gcaucgacaucuuuuccaa

SEQ ID NO: 1937905 - RNA, 19 nt, Homo sapiens
  misc_RNA (1)...(19): siRNA sense strand
caaaacaccgggaauccaa

SEQ ID NO: 1937906 - RNA, 19 nt, Homo sapiens
  misc_RNA (1)...(19): siRNA sense strand
caaacuggcugcaaaacac

SEQ ID NO: 1937907 - RNA, 19 nt, Homo sapiens
  misc_RNA (1)...(19): siRNA sense strand
guaguaagcuugacucuuu

SEQ ID NO: 1937908 - RNA, 19 nt, Homo sapiens
  misc_RNA (1)...(19): siRNA sense strand
ggaaagaacugaccaaagu

SEQ ID NO: 1937909 - RNA, 19 nt, Homo sapiens
  misc_RNA (1)...(19): siRNA sense strand
gaucauauuuccaugguua

SEQ ID NO: 1937910 - RNA, 19 nt, Homo sapiens
  misc_RNA (1)...(19): siRNA sense strand
gaaagaagaucaggaagaa

SEQ ID NO: 1937911 - RNA, 19 nt, Homo sapiens
  misc_RNA (1)...(19): siRNA sense strand
gaacacaccugucuuaagu

SEQ ID NO: 1937912 - RNA, 19 nt, Homo sapiens
  misc_RNA (1)...(19): siRNA sense strand
gcaaagcauuucuaugaua

SEQ ID NO: 1937913 - RNA, 19 nt, Homo sapiens
  misc_RNA (1)...(19): siRNA sense strand
ggaaaggccuccaaauuau

SEQ ID NO: 1937914 - RNA, 19 nt, Homo sapiens
  misc_RNA (1)...(19): siRNA sense strand
gaaaggagaucucuguaau

SEQ ID NO: 1937915 - RNA, 19 nt, Homo sapiens
  misc_RNA (1)...(19): siRNA sense strand
gaaagguuguaaagucuua

SEQ ID NO: 1937916 - RNA, 19 nt, Homo sapiens
  misc_RNA (1)...(19): siRNA sense strand
gaacaaagcaaauaacaga

SEQ ID NO: 1937917 - RNA, 19 nt, Homo sapiens
  misc_RNA (1)...(19): siRNA sense strand
gaaauggcauccugacaaa

SEQ ID NO: 1937918 - RNA, 19 nt, Homo sapiens
  misc_RNA (1)...(19): siRNA sense strand
gcaaagacuuguuuaugaa

SEQ ID NO: 1937919 - RNA, 19 nt, Homo sapiens
  misc_RNA (1)...(19): siRNA sense strand
gcacggcauucaagaaaua

SEQ ID NO: 1937920 - RNA, 19 nt, Homo sapiens
  misc_RNA (1)...(19): siRNA sense strand
gcaaugacauccuguguau

SEQ ID NO: 1937921 - RNA, 19 nt, Homo sapiens
  misc_RNA (1)...(19): siRNA sense strand
ggagugaucucgagaaugu

SEQ ID NO: 1937922 - RNA, 19 nt, Homo sapiens
  misc_RNA (1)...(19): siRNA sense strand
ggacaaagagagccacuua

SEQ ID NO: 1937923 - RNA, 19 nt, Homo sapiens
  misc_RNA (1)...(19): siRNA sense strand
gcaaacagauacuacuuga

SEQ ID NO: 1937924 - RNA, 19 nt, Homo sapiens
  misc_RNA (1)...(19): siRNA sense strand
ggacacaggcuuaucauuu

SEQ ID NO: 1937925 - RNA, 19 nt, Homo sapiens
  misc_RNA (1)...(19): siRNA sense strand
agagaaagcuacacccuua

SEQ ID NO: 1937926 - RNA, 19 nt, Homo sapiens
  misc_RNA (1)...(19): siRNA sense strand
gaacuuagagauccuuuaa

SEQ ID NO: 1937927 - RNA, 19 nt, Homo sapiens
  misc_RNA (1)...(19): siRNA sense strand
gaggaaagcucucaaagca

SEQ ID NO: 1937928 - RNA, 19 nt, Homo sapiens
  misc_RNA (1)...(19): siRNA sense strand
gguccaaacuucaacauuu

SEQ ID NO: 1937929 - RNA, 19 nt, Homo sapiens
  misc_RNA (1)...(19): siRNA sense strand
gaaggaauauggagucuca

SEQ ID NO: 1937930 - RNA, 19 nt, Homo sapiens
  misc_RNA (1)...(19): siRNA sense strand
guaaggcacugaaacauga

SEQ ID NO: 1937931 - RNA, 19 nt, Homo sapiens
  misc_RNA (1)...(19): siRNA sense strand
gaucauaccagccaacaua

SEQ ID NO: 1937932 - RNA, 19 nt, Homo sapiens
  misc_RNA (1)...(19): siRNA sense strand
gcaauaacaucaccugugu

SEQ ID NO: 1937933 - RNA, 19 nt, Homo sapiens
  misc_RNA (1)...(19): siRNA sense strand
gcuacacccuuaagcauua

SEQ ID NO: 1937934 - RNA, 19 nt, Homo sapiens
  misc_RNA (1)...(19): siRNA sense strand
caaauaaccuauacuaugg

SEQ ID NO: 1937935 - RNA, 19 nt, Homo sapiens
  misc_RNA (1)...(19): siRNA sense strand
gaacuuccuucuucgguaa

SEQ ID NO: 1937936 - RNA, 19 nt, Homo sapiens
  misc_RNA (1)...(19): siRNA sense strand
ugaagaagcuggcugcaaa

SEQ ID NO: 1937937 - RNA, 19 nt, Homo sapiens
  misc_RNA (1)...(19): siRNA sense strand
ggacagacuuacucucaaa

SEQ ID NO: 1937938 - RNA, 19 nt, Homo sapiens
  misc_RNA (1)...(19): siRNA sense strand
gcaaugauauuuacaggau

SEQ ID NO: 1937939 - RNA, 19 nt, Homo sapiens
  misc_RNA (1)...(19): siRNA sense strand
ggacgcauguuuagagauu

SEQ ID NO: 1937940 - RNA, 19 nt, Homo sapiens
  misc_RNA (1)...(19): siRNA sense strand
gaagcuggcugcaaacaga

SEQ ID NO: 1937941 - RNA, 19 nt, Homo sapiens
  misc_RNA (1)...(19): siRNA sense strand
gcagauauuuauucucuug

SEQ ID NO: 1937942 - RNA, 19 nt, Homo sapiens
  misc_RNA (1)...(19): siRNA sense strand
gcaaauaacagaagagaau

SEQ ID NO: 1937943 - RNA, 19 nt, Homo sapiens
  misc_RNA (1)...(19): siRNA sense strand
gaagagacucccaaaguuu

SEQ ID NO: 1937944 - RNA, 19 nt, Homo sapiens
  misc_RNA (1)...(19): siRNA sense strand
gaaaaucucucuuaugaug

SEQ ID NO: 1937945 - RNA, 19 nt, Homo sapiens
  misc_RNA (1)...(19): siRNA sense strand
gaucugcgacuuucuauuu

SEQ ID NO: 1937946 - RNA, 19 nt, Homo sapiens
  misc_RNA (1)...(19): siRNA sense strand
caacugcacuugcucagaa

SEQ ID NO: 1937947 - RNA, 19 nt, Homo sapiens
  misc_RNA (1)...(19): siRNA sense strand
gguagaagaugguuggaaa

SEQ ID NO: 1937948 - RNA, 19 nt, Homo sapiens
  misc_RNA (1)...(19): siRNA sense strand
ggacacaguucucagaugu

SEQ ID NO: 1937949 - RNA, 19 nt, Homo sapiens
  misc_RNA (1)...(19): siRNA sense strand
caaaugugcuugagugguu

SEQ ID NO: 1937950 - RNA, 19 nt, Homo sapiens
  misc_RNA (1)...(19): siRNA sense strand
gaccauggauuucacacua

SEQ ID NO: 1937951 - RNA, 19 nt, Homo sapiens
  misc_RNA (1)...(19): siRNA sense strand
ugaaacaccucuuaccaaa

SEQ ID NO: 1937952 - RNA, 19 nt, Homo sapiens
  misc_RNA (1)...(19): siRNA sense strand
cuacguggcuaauuuguaa

SEQ ID NO: 1937953 - RNA, 19 nt, Homo sapiens
  misc_RNA (1)...(19): siRNA sense strand
acacaaagccuuagaaaga

SEQ ID NO: 1937954 - RNA, 19 nt, Homo sapiens
  misc_RNA (1)...(19): siRNA sense strand
gaacaagaaagcaaacaaa

SEQ ID NO: 1937955 - RNA, 19 nt, Homo sapiens
  misc_RNA (1)...(19): siRNA sense strand
gcaaucaucugaaggaaag

SEQ ID NO: 1937956 - RNA, 19 nt, Homo sapiens
  misc_RNA (1)...(19): siRNA sense strand
cuacaaccuucacaacuua

SEQ ID NO: 1937957 - RNA, 19 nt, Homo sapiens
  misc_RNA (1)...(19): siRNA sense strand
gggaaagucugauaaagau

SEQ ID NO: 1937958 - RNA, 19 nt, Homo sapiens
  misc_RNA (1)...(19): siRNA sense strand
gaccagaaguggacaguga

SEQ ID NO: 1937959 - RNA, 19 nt, Homo sapiens
  misc_RNA (1)...(19): siRNA sense strand
cagaaggauugcugauuua

SEQ ID NO: 1937960 - RNA, 19 nt, Homo sapiens
  misc_RNA (1)...(19): siRNA sense strand
gaaugcaguuucuugauug

SEQ ID NO: 1937961 - RNA, 19 nt, Homo sapiens
  misc_RNA (1)...(19): siRNA sense strand
gaacugcuauaaguaacua

SEQ ID NO: 1937962 - RNA, 19 nt, Homo sapiens
  misc_RNA (1)...(19): siRNA sense strand
gcacaggccucccaguuca

SEQ ID NO: 1937963 - RNA, 19 nt, Homo sapiens
  misc_RNA (1)...(19): siRNA sense strand
ggcaaugacucuuaaauca

SEQ ID NO: 1937964 - RNA, 19 nt, Homo sapiens
  misc_RNA (1)...(19): siRNA sense strand
guccaaacuucaacauuua

SEQ ID NO: 1937965 - RNA, 19 nt, Homo sapiens
  misc_RNA (1)...(19): siRNA sense strand
ucaaauaacuucgcuacuu

SEQ ID NO: 1937966 - RNA, 19 nt, Homo sapiens
  misc_RNA (1)...(19): siRNA sense strand
gcaauauguugaaguguug

SEQ ID NO: 1937967 - RNA, 19 nt, Homo sapiens
  misc_RNA (1)...(19): siRNA sense strand
caagcuaccuuuagaacuu

SEQ ID NO: 1937968 - RNA, 19 nt, Homo sapiens
  misc_RNA (1)...(19): siRNA sense strand
gagcacagguaaauccaaa

SEQ ID NO: 1937969 - RNA, 19 nt, Homo sapiens
  misc_RNA (1)...(19): siRNA sense strand
gaacacuuccucuuauaaa

SEQ ID NO: 1937970 - RNA, 19 nt, Homo sapiens
  misc_RNA (1)...(19): siRNA sense strand
ggaacaugcuacguacuua

SEQ ID NO: 1937971 - RNA, 19 nt, Homo sapiens
  misc_RNA (1)...(19): siRNA sense strand
gggagaaguugacaaaguu

SEQ ID NO: 1937972 - RNA, 19 nt, Homo sapiens
  misc_RNA (1)...(19): siRNA sense strand
uaaggucugugguucaaua

SEQ ID NO: 1937973 - RNA, 19 nt, Homo sapiens
  misc_RNA (1)...(19): siRNA sense strand
gaagagguaacacagcuua

SEQ ID NO: 1937974 - RNA, 19 nt, Homo sapiens
  misc_RNA (1)...(19): siRNA sense strand
caaauaacuucgcuacuuc

SEQ ID NO: 1937975 - RNA, 19 nt, Homo sapiens
  misc_RNA (1)...(19): siRNA sense strand
ccaaguuucuaacaacaua

SEQ ID NO: 1937976 - RNA, 19 nt, Homo sapiens
  misc_RNA (1)...(19): siRNA sense strand
caccauaccuuuaucaguu

SEQ ID NO: 1937977 - RNA, 19 nt, Homo sapiens
  misc_RNA (1)...(19): siRNA sense strand
gaaauugaagcagaacuua

SEQ ID NO: 1937978 - RNA, 19 nt, Homo sapiens
  misc_RNA (1)...(19): siRNA sense strand
gcagagaauugauuguuca

SEQ ID NO: 1937979 - RNA, 19 nt, Homo sapiens
  misc_RNA (1)...(19): siRNA sense strand
gauguuccuuguaucuuua

SEQ ID NO: 1937980 - RNA, 19 nt, Homo sapiens
  misc_RNA (1)...(19): siRNA sense strand
caacuugguuuauaacugu

SEQ ID NO: 1937981 - RNA, 19 nt, Homo sapiens
  misc_RNA (1)...(19): siRNA sense strand
ggaauauggagucucauua

SEQ ID NO: 1937982 - RNA, 19 nt, Homo sapiens
  misc_RNA (1)...(19): siRNA sense strand
ugacccagcugcucucuuu

SEQ ID NO: 1937983 - RNA, 19 nt, Homo sapiens
  misc_RNA (1)...(19): siRNA sense strand
ggacagugcuccuucuaca

SEQ ID NO: 1937984 - RNA, 19 nt, Homo sapiens
  misc_RNA (1)...(19): siRNA sense strand
gagaagaugcugacaauuc

SEQ ID NO: 1937985 - RNA, 19 nt, Homo sapiens
  misc_RNA (1)...(19): siRNA sense strand
ugaagagacucccaaaguu

SEQ ID NO: 1937986 - RNA, 19 nt, Homo sapiens
  misc_RNA (1)...(19): siRNA sense strand
gaagauauagcucauggaa

SEQ ID NO: 1937987 - RNA, 19 nt, Homo sapiens
  misc_RNA (1)...(19): siRNA sense strand
gaugacagcaaagaaauua

SEQ ID NO: 1937988 - RNA, 19 nt, Homo sapiens
  misc_RNA (1)...(19): siRNA sense strand
gaggaauuaucagagauua

SEQ ID NO: 1937989 - RNA, 19 nt, Homo sapiens
  misc_RNA (1)...(19): siRNA sense strand
ugaaggcucuacauuauau

SEQ ID NO: 1937990 - RNA, 19 nt, Homo sapiens
  misc_RNA (1)...(19): siRNA sense strand
cgaagugacuggaauaaca

SEQ ID NO: 1937991 - RNA, 19 nt, Homo sapiens
  misc_RNA (1)...(19): siRNA sense strand
cauaccaguucaacaaaua

SEQ ID NO: 1937992 - RNA, 19 nt, Homo sapiens
  misc_RNA (1)...(19): siRNA sense strand
ggaagaauuucaccaugug

SEQ ID NO: 1937993 - RNA, 19 nt, Homo sapiens
  misc_RNA (1)...(19): siRNA sense strand
caacacaccaguuccuaua

SEQ ID NO: 1937994 - RNA, 19 nt, Homo sapiens
  misc_RNA (1)...(19): siRNA sense strand
ggaaaggagaucucuguaa

SEQ ID NO: 1937995 - RNA, 19 nt, Homo sapiens
  misc_RNA (1)...(19): siRNA sense strand
ggaaagaugacauugaaga

SEQ ID NO: 1937996 - RNA, 19 nt, Homo sapiens
  misc_RNA (1)...(19): siRNA sense strand
gaucacaguggaagaauuu

SEQ ID NO: 1937997 - RNA, 19 nt, Homo sapiens
  misc_RNA (1)...(19): siRNA sense strand
gcacuggcaaugacucuua

SEQ ID NO: 1937998 - RNA, 19 nt, Homo sapiens
  misc_RNA (1)...(19): siRNA sense strand
ggacugauuagaauuauga

SEQ ID NO: 1937999 - RNA, 19 nt, Homo sapiens
  misc_RNA (1)...(19): siRNA sense strand
uacgagaccuugcgcuuua

SEQ ID NO: 1938000 - RNA, 19 nt, Homo sapiens
  misc_RNA (1)...(19): siRNA sense strand
uaucagagauuaaggaaca

SEQ ID NO: 1938001 - RNA, 19 nt, Homo sapiens
  misc_RNA (1)...(19): siRNA sense strand
gaaauggacacaaucauca

SEQ ID NO: 1938002 - RNA, 19 nt, Homo sapiens
  misc_RNA (1)...(19): siRNA sense strand
cgcaaagacuuguuuauga

SEQ ID NO: 1938003 - RNA, 19 nt, Homo sapiens
  misc_RNA (1)...(19): siRNA sense strand
cgaaagagggaaauccuua

SEQ ID NO: 1938004 - RNA, 19 nt, Homo sapiens
  misc_RNA (1)...(19): siRNA sense strand
gcacagaauuugggcagaa

SEQ ID NO: 1938005 - RNA, 19 nt, Homo sapiens
  misc_RNA (1)...(19): siRNA sense strand
gaaagaggaacaaagcaaa

SEQ ID NO: 1938006 - RNA, 19 nt, Homo sapiens
  misc_RNA (1)...(19): siRNA sense strand
ugaaauaccucaagaagac

SEQ ID NO: 1938007 - RNA, 19 nt, Homo sapiens
  misc_RNA (1)...(19): siRNA sense strand
ggacaacacccuccauaua

SEQ ID NO: 1938008 - RNA, 19 nt, Homo sapiens
  misc_RNA (1)...(19): siRNA sense strand
ugauaaaccugcucacuuu

SEQ ID NO: 1938009 - RNA, 19 nt, Homo sapiens
  misc_RNA (1)...(19): siRNA sense strand
gguaaucuaugucuuggua

SEQ ID NO: 1938010 - RNA, 19 nt, Homo sapiens
  misc_RNA (1)...(19): siRNA sense strand
ugagaggaaugcugaaaua

SEQ ID NO: 1938011 - RNA, 19 nt, Homo sapiens
  misc_RNA (1)...(19): siRNA sense strand
gaggaaugcugaaauacuu

SEQ ID NO: 1938012 - RNA, 19 nt, Homo sapiens
  misc_RNA (1)...(19): siRNA sense strand
caacauagagacucaguuu

SEQ ID NO: 1938013 - RNA, 19 nt, Homo sapiens
  misc_RNA (1)...(19): siRNA sense strand
gaugaacucuaguggcuuu

SEQ ID NO: 1938014 - RNA, 19 nt, Homo sapiens
  misc_RNA (1)...(19): siRNA sense strand
caagcaaauuucuguauug

SEQ ID NO: 1938015 - RNA, 19 nt, Homo sapiens
  misc_RNA (1)...(19): siRNA sense strand
caggugggcuucucuauga

SEQ ID NO: 1938016 - RNA, 19 nt, Homo sapiens
  misc_RNA (1)...(19): siRNA sense strand
caucgucguugucguauuu

SEQ ID NO: 1938017 - RNA, 19 nt, Homo sapiens
  misc_RNA (1)...(19): siRNA sense strand
gaaacaaaguacccaucaa

SEQ ID NO: 1938018 - RNA, 19 nt, Homo sapiens
  misc_RNA (1)...(19): siRNA sense strand
uaucggauguguacaauau

SEQ ID NO: 1938019 - RNA, 19 nt, Homo sapiens
  misc_RNA (1)...(19): siRNA sense strand
gaagguaaucuaugucuug

SEQ ID NO: 1938020 - RNA, 19 nt, Homo sapiens
  misc_RNA (1)...(19): siRNA sense strand
auacaaagcugcucauagu

SEQ ID NO: 1938021 - RNA, 19 nt, Homo sapiens
  misc_RNA (1)...(19): siRNA sense strand
ccaagcaaauuucuguauu

SEQ ID NO: 1938022 - RNA, 19 nt, Homo sapiens
  misc_RNA (1)...(19): siRNA sense strand
guaaagagguucaaaagga

SEQ ID NO: 1938023 - RNA, 19 nt, Homo sapiens
  misc_RNA (1)...(19): siRNA sense strand
gaagacaaggguucauuga

SEQ ID NO: 1938024 - RNA, 19 nt, Homo sapiens
  misc_RNA (1)...(19): siRNA sense strand
ggagaaaugucccuuaacg

SEQ ID NO: 1938025 - RNA, 19 nt, Homo sapiens
  misc_RNA (1)...(19): siRNA sense strand
guaugaagccgauuaccua

SEQ ID NO: 1938026 - RNA, 19 nt, Homo sapiens
  misc_RNA (1)...(19): siRNA sense strand
aaaugucccuuaacgauga

SEQ ID NO: 1938027 - RNA, 19 nt, Homo sapiens
  misc_RNA (1)...(19): siRNA sense strand
gcucauagugggagucuuu

SEQ ID NO: 1938028 - RNA, 19 nt, Homo sapiens
  misc_RNA (1)...(19): siRNA sense strand
guccugcccuucuuucuuu

SEQ ID NO: 1938029 - RNA, 19 nt, Homo sapiens
  misc_RNA (1)...(19): siRNA sense strand
gagccaguccuuccaguuu

SEQ ID NO: 1938030 - RNA, 19 nt, Homo sapiens
  misc_RNA (1)...(19): siRNA sense strand
caaguccacugggaaggua

SEQ ID NO: 1938031 - RNA, 19 nt, Homo sapiens
  misc_RNA (1)...(19): siRNA sense strand
caagauaucggauguguac

SEQ ID NO: 1938032 - RNA, 19 nt, Homo sapiens
  misc_RNA (1)...(19): siRNA sense strand
ggaagacaaggguucauug

SEQ ID NO: 1938033 - RNA, 19 nt, Homo sapiens
  misc_RNA (1)...(19): siRNA sense strand
ggaagguaaucuaugucuu

SEQ ID NO: 1938034 - RNA, 19 nt, Homo sapiens
  misc_RNA (1)...(19): siRNA sense strand
gcagaugacagagaagaaa

SEQ ID NO: 1938035 - RNA, 19 nt, Homo sapiens
  misc_RNA (1)...(19): siRNA sense strand
ucaggcagcuacuucauca

SEQ ID NO: 1938036 - RNA, 19 nt, Homo sapiens
  misc_RNA (1)...(19): siRNA sense strand
gcauuccuguccuuuguug

SEQ ID NO: 1938037 - RNA, 19 nt, Homo sapiens
  misc_RNA (1)...(19): siRNA sense strand
uaaaccugcucacuuuguu

SEQ ID NO: 1938038 - RNA, 19 nt, Homo sapiens
  misc_RNA (1)...(19): siRNA sense strand
gaacucuaguggcuuugau

SEQ ID NO: 1938039 - RNA, 19 nt, Homo sapiens
  misc_RNA (1)...(19): siRNA sense strand
guacuucaauguggucaau

SEQ ID NO: 1938040 - RNA, 19 nt, Homo sapiens
  misc_RNA (1)...(19): siRNA sense strand
gagcagcgcaauagggauu

SEQ ID NO: 1938041 - RNA, 19 nt, Homo sapiens
  misc_RNA (1)...(19): siRNA sense strand
gcugauaaaccuagggaaa

SEQ ID NO: 1938042 - RNA, 19 nt, Homo sapiens
  misc_RNA (1)...(19): siRNA sense strand
uuucacaucuuucaacuuc

SEQ ID NO: 1938043 - RNA, 19 nt, Homo sapiens
  misc_RNA (1)...(19): siRNA sense strand
gauaucggauguguacaau

SEQ ID NO: 1938044 - RNA, 19 nt, Homo sapiens
  misc_RNA (1)...(19): siRNA sense strand
gcuuugauccugaauguga

SEQ ID NO: 1938045 - RNA, 19 nt, Homo sapiens
  misc_RNA (1)...(19): siRNA sense strand
gacaacacccuccauauac

SEQ ID NO: 1938046 - RNA, 19 nt, Homo sapiens
  misc_RNA (1)...(19): siRNA sense strand
caucaucgucguugucgua

SEQ ID NO: 1938047 - RNA, 19 nt, Homo sapiens
  misc_RNA (1)...(19): siRNA sense strand
cagcaaaacugaguauauu

SEQ ID NO: 1938048 - RNA, 19 nt, Homo sapiens
  misc_RNA (1)...(19): siRNA sense strand
gaaauucuacaaguugaug

SEQ ID NO: 1938049 - RNA, 19 nt, Homo sapiens
  misc_RNA (1)...(19): siRNA sense strand
gggcacugcucuugaugau

SEQ ID NO: 1938050 - RNA, 19 nt, Homo sapiens
  misc_RNA (1)...(19): siRNA sense strand
gccaagauaucggaugugu

SEQ ID NO: 1938051 - RNA, 19 nt, Homo sapiens
  misc_RNA (1)...(19): siRNA sense strand
caggacaccuucucuuucu

SEQ ID NO: 1938052 - RNA, 19 nt, Homo sapiens
  misc_RNA (1)...(19): siRNA sense strand
gagacucaguuucuuaagg

SEQ ID NO: 1938053 - RNA, 19 nt, Homo sapiens
  misc_RNA (1)...(19): siRNA sense strand
caaccuccaucuacaaugc

SEQ ID NO: 1938054 - RNA, 19 nt, Homo sapiens
  misc_RNA (1)...(19): siRNA sense strand
ccaucaacuuguaauguga

SEQ ID NO: 1938055 - RNA, 19 nt, Homo sapiens
  misc_RNA (1)...(19): siRNA sense strand
ccagucagcccaagcaaau

SEQ ID NO: 1938056 - RNA, 19 nt, Homo sapiens
  misc_RNA (1)...(19): siRNA sense strand
caacuuguaaugugacuuc

SEQ ID NO: 1938057 - RNA, 19 nt, Homo sapiens
  misc_RNA (1)...(19): siRNA sense strand
gcugagugacuacuggaua

SEQ ID NO: 1938058 - RNA, 19 nt, Homo sapiens
  misc_RNA (1)...(19): siRNA sense strand
ucggauguguacaauauga

SEQ ID NO: 1938059 - RNA, 19 nt, Homo sapiens
  misc_RNA (1)...(19): siRNA sense strand
ggacaccuucucuuucuuc

SEQ ID NO: 1938060 - RNA, 19 nt, Homo sapiens
  misc_RNA (1)...(19): siRNA sense strand
cauagagacucaguuucuu

SEQ ID NO: 1938061 - RNA, 19 nt, Homo sapiens
  misc_RNA (1)...(19): siRNA sense strand
ccacugggaagguaaucua

SEQ ID NO: 1938062 - RNA, 19 nt, Homo sapiens
  misc_RNA (1)...(19): siRNA sense strand
ugaagccgauuaccuacau

SEQ ID NO: 1938063 - RNA, 19 nt, Homo sapiens
  misc_RNA (1)...(19): siRNA sense strand
ucacaucuuucaacuucug

SEQ ID NO: 1938064 - RNA, 19 nt, Homo sapiens
  misc_RNA (1)...(19): siRNA sense strand
agaaaugucccuuaacgau

SEQ ID NO: 1938065 - RNA, 19 nt, Homo sapiens
  misc_RNA (1)...(19): siRNA sense strand
cuuguaaugugacuuccua

SEQ ID NO: 1938066 - RNA, 19 nt, Homo sapiens
  misc_RNA (1)...(19): siRNA sense strand
acaaguugaugaaacaaag

SEQ ID NO: 1938067 - RNA, 19 nt, Homo sapiens
  misc_RNA (1)...(19): siRNA sense strand
uagcgagggcccaaaguuu

SEQ ID NO: 1938068 - RNA, 19 nt, Homo sapiens
  misc_RNA (1)...(19): siRNA sense strand
gaagucaaacgugggaaga

SEQ ID NO: 1938069 - RNA, 19 nt, Homo sapiens
  misc_RNA (1)...(19): siRNA sense strand
gggcgacagucaucacaca

SEQ ID NO: 1938070 - RNA, 19 nt, Homo sapiens
  misc_RNA (1)...(19): siRNA sense strand
cagagaagaaagagaguga

SEQ ID NO: 1938071 - RNA, 19 nt, Homo sapiens
  misc_RNA (1)...(19): siRNA sense strand
ucuacaaguugaugaaaca

SEQ ID NO: 1938072 - RNA, 19 nt, Homo sapiens
  misc_RNA (1)...(19): siRNA sense strand
aagaggugcuucgaccaua

SEQ ID NO: 1938073 - RNA, 19 nt, Homo sapiens
  misc_RNA (1)...(19): siRNA sense strand
uagagacucaguuucuuaa

SEQ ID NO: 1938074 - RNA, 19 nt, Homo sapiens
  misc_RNA (1)...(19): siRNA sense strand
uuucuuugcuggugucuug

SEQ ID NO: 1938075 - RNA, 19 nt, Homo sapiens
  misc_RNA (1)...(19): siRNA sense strand
ccuuaacgaugaacucuag

SEQ ID NO: 1938076 - RNA, 19 nt, Homo sapiens
  misc_RNA (1)...(19): siRNA sense strand
caugagaaggugcagauga

SEQ ID NO: 1938077 - RNA, 19 nt, Homo sapiens
  misc_RNA (1)...(19): siRNA sense strand
uaaagagguucaaaaggaa

SEQ ID NO: 1938078 - RNA, 19 nt, Homo sapiens
  misc_RNA (1)...(19): siRNA sense strand
auagagacucaguuucuua

SEQ ID NO: 1938079 - RNA, 19 nt, Homo sapiens
  misc_RNA (1)...(19): siRNA sense strand
caacaucuuggaccucaga

SEQ ID NO: 1938080 - RNA, 19 nt, Homo sapiens
  misc_RNA (1)...(19): siRNA sense strand
cauugucggugguuucuuc

SEQ ID NO: 1938081 - RNA, 19 nt, Homo sapiens
  misc_RNA (1)...(19): siRNA sense strand
caacacccuccauauacuu

SEQ ID NO: 1938082 - RNA, 19 nt, Homo sapiens
  misc_RNA (1)...(19): siRNA sense strand
gggaaacugccuccugaug

SEQ ID NO: 1938083 - RNA, 19 nt, Homo sapiens
  misc_RNA (1)...(19): siRNA sense strand
gauaaaccugcucacuuug

SEQ ID NO: 1938084 - RNA, 19 nt, Homo sapiens
  misc_RNA (1)...(19): siRNA sense strand
ggucaccagucuacagucu

SEQ ID NO: 1938085 - RNA, 19 nt, Homo sapiens
  misc_RNA (1)...(19): siRNA sense strand
caguuucgcugccaucuac

SEQ ID NO: 1938086 - RNA, 19 nt, Homo sapiens
  misc_RNA (1)...(19): siRNA sense strand
cagaaacccacgcaugaga

SEQ ID NO: 1938087 - RNA, 19 nt, Homo sapiens
  misc_RNA (1)...(19): siRNA sense strand
cccaucaacuuguaaugug

SEQ ID NO: 1938088 - RNA, 19 nt, Homo sapiens
  misc_RNA (1)...(19): siRNA sense strand
ugaaacaaaguacccauca

SEQ ID NO: 1938089 - RNA, 19 nt, Homo sapiens
  misc_RNA (1)...(19): siRNA sense strand
gcagcuacuucaucagacu

SEQ ID NO: 1938090 - RNA, 19 nt, Homo sapiens
  misc_RNA (1)...(19): siRNA sense strand
ugacugagugcaacauaga

SEQ ID NO: 1938091 - RNA, 19 nt, Homo sapiens
  misc_RNA (1)...(19): siRNA sense strand
gagaaaugucccuuaacga

SEQ ID NO: 1938092 - RNA, 19 nt, Homo sapiens
  misc_RNA (1)...(19): siRNA sense strand
gggaagacaaggguucauu

SEQ ID NO: 1938093 - RNA, 19 nt, Homo sapiens
  misc_RNA (1)...(19): siRNA sense strand
uggcuuugauccugaaugu

SEQ ID NO: 1938094 - RNA, 19 nt, Homo sapiens
  misc_RNA (1)...(19): siRNA sense strand
cugcuaaucaucuuuguga

SEQ ID NO: 1938095 - RNA, 19 nt, Homo sapiens
  misc_RNA (1)...(19): siRNA sense strand
ccaguugugcugcuaauca

SEQ ID NO: 1938096 - RNA, 19 nt, Homo sapiens
  misc_RNA (1)...(19): siRNA sense strand
cugggaagguaaucuaugu

SEQ ID NO: 1938097 - RNA, 19 nt, Homo sapiens
  misc_RNA (1)...(19): siRNA sense strand
gaaggccucagacagaauc

SEQ ID NO: 1938098 - RNA, 19 nt, Homo sapiens
  misc_RNA (1)...(19): siRNA sense strand
uggcuccguugccuccuua

SEQ ID NO: 1938099 - RNA, 19 nt, Homo sapiens
  misc_RNA (1)...(19): siRNA sense strand
gcuaacacccaguaaagag

SEQ ID NO: 1938100 - RNA, 19 nt, Homo sapiens
  misc_RNA (1)...(19): siRNA sense strand
cagcuaacacccaguaaag

SEQ ID NO: 1938101 - RNA, 19 nt, Homo sapiens
  misc_RNA (1)...(19): siRNA sense strand
caacccaaccuccaucuac

SEQ ID NO: 1938102 - RNA, 19 nt, Homo sapiens
  misc_RNA (1)...(19): siRNA sense strand
aauuuggccuucaacaguu

SEQ ID NO: 1938103 - RNA, 19 nt, Homo sapiens
  misc_RNA (1)...(19): siRNA sense strand
gaagccgauuaccuacaug

SEQ ID NO: 1938104 - RNA, 19 nt, Homo sapiens
  misc_RNA (1)...(19): siRNA sense strand
ggggucaaguuuugucuaa

SEQ ID NO: 1938105 - RNA, 19 nt, Homo sapiens
  misc_RNA (1)...(19): siRNA sense strand
gcagcgcaauagggauuau

SEQ ID NO: 1938106 - RNA, 19 nt, Homo sapiens
  misc_RNA (1)...(19): siRNA sense strand
ccagcuaacacccaguaaa

SEQ ID NO: 1938107 - RNA, 19 nt, Homo sapiens
  misc_RNA (1)...(19): siRNA sense strand
gaggauggauggcaaauaa

SEQ ID NO: 1938108 - RNA, 19 nt, Homo sapiens
  misc_RNA (1)...(19): siRNA sense strand
ggauggauggcaaauaaua

SEQ ID NO: 1938109 - RNA, 19 nt, Homo sapiens
  misc_RNA (1)...(19): siRNA sense strand
gggaguaggugggcgcaua

SEQ ID NO: 1938110 - RNA, 19 nt, Homo sapiens
  misc_RNA (1)...(19): siRNA sense strand
cgacugaaggguuaauuaa

SEQ ID NO: 1938111 - RNA, 19 nt, Homo sapiens
  misc_RNA (1)...(19): siRNA sense strand
gcgacugaaggguuaauua

SEQ ID NO: 1938112 - RNA, 19 nt, Homo sapiens
  misc_RNA (1)...(19): siRNA sense strand
cagauuaauugaacaccuu

SEQ ID NO: 1938113 - RNA, 19 nt, Homo sapiens
  misc_RNA (1)...(19): siRNA sense strand
acugaaggguuaauuaaug

SEQ ID NO: 1938114 - RNA, 19 nt, Homo sapiens
  misc_RNA (1)...(19): siRNA sense strand
cugaaggguuaauuaauga

SEQ ID NO: 1938115 - RNA, 19 nt, Homo sapiens
  misc_RNA (1)...(19): siRNA sense strand
gcagaacgcacccauaacu

SEQ ID NO: 1938116 - RNA, 19 nt, Homo sapiens
  misc_RNA (1)...(19): siRNA sense strand
gagaggagaaauacucgaa

SEQ ID NO: 1938117 - RNA, 19 nt, Homo sapiens
  misc_RNA (1)...(19): siRNA sense strand
uggcagaacgcacccauaa

SEQ ID NO: 1938118 - RNA, 19 nt, Homo sapiens
  misc_RNA (1)...(19): siRNA sense strand
gauugcagauuaauugaac

SEQ ID NO: 1938119 - RNA, 19 nt, Homo sapiens
  misc_RNA (1)...(19): siRNA sense strand
ggaggauggauggcaaaua

SEQ ID NO: 1938120 - RNA, 19 nt, Homo sapiens
  misc_RNA (1)...(19): siRNA sense strand
uguccguccugcucuuuaa

SEQ ID NO: 1938121 - RNA, 19 nt, Homo sapiens
  misc_RNA (1)...(19): siRNA sense strand
agaacgcacccauaacuug

SEQ ID NO: 1938122 - RNA, 19 nt, Homo sapiens
  misc_RNA (1)...(19): siRNA sense strand
accagcgacugaaggguua

SEQ ID NO: 1938123 - RNA, 19 nt, Homo sapiens
  misc_RNA (1)...(19): siRNA sense strand
gacugaaggguuaauuaau

SEQ ID NO: 1938124 - RNA, 19 nt, Homo sapiens
  misc_RNA (1)...(19): siRNA sense strand
gcgccuggcccuuaaagag

SEQ ID NO: 1938125 - RNA, 19 nt, Homo sapiens
  misc_RNA (1)...(19): siRNA sense strand
aaauaauaccagcgacuga

SEQ ID NO: 1938126 - RNA, 19 nt, Homo sapiens
  misc_RNA (1)...(19): siRNA sense strand
cagaacgcacccauaacuu

SEQ ID NO: 1938127 - RNA, 19 nt, Homo sapiens
  misc_RNA (1)...(19): siRNA sense strand
ggaguaggugggcgcauag

SEQ ID NO: 1938128 - RNA, 19 nt, Homo sapiens
  misc_RNA (1)...(19): siRNA sense strand
gggaccaagacgcgcguua

SEQ ID NO: 1938129 - RNA, 19 nt, Homo sapiens
  misc_RNA (1)...(19): siRNA sense strand
gauggauggcaaauaauac

SEQ ID NO: 1938130 - RNA, 19 nt, Homo sapiens
  misc_RNA (1)...(19): siRNA sense strand
ggaccaagacgcgcguuac

SEQ ID NO: 1938131 - RNA, 19 nt, Homo sapiens
  misc_RNA (1)...(19): siRNA sense strand
aauaauaccagcgacugaa

SEQ ID NO: 1938132 - RNA, 19 nt, Homo sapiens
  misc_RNA (1)...(19): siRNA sense strand
aauugaacaccuuccguaa

SEQ ID NO: 1938133 - RNA, 19 nt, Homo sapiens
  misc_RNA (1)...(19): siRNA sense strand
gcaacaaacuaugguauaa

SEQ ID NO: 1938134 - RNA, 19 nt, Homo sapiens
  misc_RNA (1)...(19): siRNA sense strand
gacaagagauuaucaaagu

SEQ ID NO: 1938135 - RNA, 19 nt, Homo sapiens
  misc_RNA (1)...(19): siRNA sense strand
gaaccaagaugcaguccaa

SEQ ID NO: 1938136 - RNA, 19 nt, Homo sapiens
  misc_RNA (1)...(19): siRNA sense strand
guaauggacucauggauca

SEQ ID NO: 1938137 - RNA, 19 nt, Homo sapiens
  misc_RNA (1)...(19): siRNA sense strand
caaccuggauuauaaugaa

SEQ ID NO: 1938138 - RNA, 19 nt, Homo sapiens
  misc_RNA (1)...(19): siRNA sense strand
agacacaacuuuggacaua

SEQ ID NO: 1938139 - RNA, 19 nt, Homo sapiens
  misc_RNA (1)...(19): siRNA sense strand
uaccugcuaugaucaauua

SEQ ID NO: 1938140 - RNA, 19 nt, Homo sapiens
  misc_RNA (1)...(19): siRNA sense strand
gagccaacauuuaugauca

SEQ ID NO: 1938141 - RNA, 19 nt, Homo sapiens
  misc_RNA (1)...(19): siRNA sense strand
gcaauguacugguauaacu

SEQ ID NO: 1938142 - RNA, 19 nt, Homo sapiens
  misc_RNA (1)...(19): siRNA sense strand
ugacaccucuucaacaaau

SEQ ID NO: 1938143 - RNA, 19 nt, Homo sapiens
  misc_RNA (1)...(19): siRNA sense strand
guacugguauaacuaugaa

SEQ ID NO: 1938144 - RNA, 19 nt, Homo sapiens
  misc_RNA (1)...(19): siRNA sense strand
uuaaagaagugguuaugug

SEQ ID NO: 1938145 - RNA, 19 nt, Homo sapiens
  misc_RNA (1)...(19): siRNA sense strand
gaaaucugguuuauaugag

SEQ ID NO: 1938146 - RNA, 19 nt, Homo sapiens
  misc_RNA (1)...(19): siRNA sense strand
ugugauaagucaacuagaa

SEQ ID NO: 1938147 - RNA, 19 nt, Homo sapiens
  misc_RNA (1)...(19): siRNA sense strand
uaaagaagugguuauguga

SEQ ID NO: 1938148 - RNA, 19 nt, Homo sapiens
  misc_RNA (1)...(19): siRNA sense strand
gggcugggcuccuacuguu

SEQ ID NO: 1938149 - RNA, 19 nt, Homo sapiens
  misc_RNA (1)...(19): siRNA sense strand
uaagugcucuucugagauc

SEQ ID NO: 1938150 - RNA, 19 nt, Homo sapiens
  misc_RNA (1)...(19): siRNA sense strand
gaaaccugcauaccaauug

SEQ ID NO: 1938151 - RNA, 19 nt, Homo sapiens
  misc_RNA (1)...(19): siRNA sense strand
caagagauuaucaaaguga

SEQ ID NO: 1938152 - RNA, 19 nt, Homo sapiens
  misc_RNA (1)...(19): siRNA sense strand
aaugaaaccugcauaccaa

SEQ ID NO: 1938153 - RNA, 19 nt, Homo sapiens
  misc_RNA (1)...(19): siRNA sense strand
ggcauuaaaucucuaugga

SEQ ID NO: 1938154 - RNA, 19 nt, Homo sapiens
  misc_RNA (1)...(19): siRNA sense strand
ucucagcaauguacuggua

SEQ ID NO: 1938155 - RNA, 19 nt, Homo sapiens
  misc_RNA (1)...(19): siRNA sense strand
gaacugcaucgauuuguca

SEQ ID NO: 1938156 - RNA, 19 nt, Homo sapiens
  misc_RNA (1)...(19): siRNA sense strand
ggaauuguagccagauuug

SEQ ID NO: 1938157 - RNA, 19 nt, Homo sapiens
  misc_RNA (1)...(19): siRNA sense strand
acucauggaucaucuaugu

SEQ ID NO: 1938158 - RNA, 19 nt, Homo sapiens
  misc_RNA (1)...(19): siRNA sense strand
gauaagucaacuagaauug

SEQ ID NO: 1938159 - RNA, 19 nt, Homo sapiens
  misc_RNA (1)...(19): siRNA sense strand
ucaauuaagugcucuucug

SEQ ID NO: 1938160 - RNA, 19 nt, Homo sapiens
  misc_RNA (1)...(19): siRNA sense strand
caacuuuggacauaugaaa

SEQ ID NO: 1938161 - RNA, 19 nt, Homo sapiens
  misc_RNA (1)...(19): siRNA sense strand
ggcaacaaacuaugguaua

SEQ ID NO: 1938162 - RNA, 19 nt, Homo sapiens
  misc_RNA (1)...(19): siRNA sense strand
gguauaagaagccaggaaa

SEQ ID NO: 1938163 - RNA, 19 nt, Homo sapiens
  misc_RNA (1)...(19): siRNA sense strand
auaagaagccaggaaauuu

SEQ ID NO: 1938164 - RNA, 19 nt, Homo sapiens
  misc_RNA (1)...(19): siRNA sense strand
acacaacuuuggacauaug

SEQ ID NO: 1938165 - RNA, 19 nt, Homo sapiens
  misc_RNA (1)...(19): siRNA sense strand
gaagugguuaugugagaaa

SEQ ID NO: 1938166 - RNA, 19 nt, Homo sapiens
  misc_RNA (1)...(19): siRNA sense strand
ggacaagagauuaucaaag

SEQ ID NO: 1938167 - RNA, 19 nt, Homo sapiens
  misc_RNA (1)...(19): siRNA sense strand
ucagcaauguacugguaua

SEQ ID NO: 1938168 - RNA, 19 nt, Homo sapiens
  misc_RNA (1)...(19): siRNA sense strand
ggaacugcaucgauuuguc

SEQ ID NO: 1938169 - RNA, 19 nt, Homo sapiens
  misc_RNA (1)...(19): siRNA sense strand
gaaguuuucuuacguggaa

SEQ ID NO: 1938170 - RNA, 19 nt, Homo sapiens
  misc_RNA (1)...(19): siRNA sense strand
uguugcaacuuuaccauuu

SEQ ID NO: 1938171 - RNA, 19 nt, Homo sapiens
  misc_RNA (1)...(19): siRNA sense strand
uauaagaagccaggaaauu

SEQ ID NO: 1938172 - RNA, 19 nt, Homo sapiens
  misc_RNA (1)...(19): siRNA sense strand
aagaagugguuaugugaga

SEQ ID NO: 1938173 - RNA, 19 nt, Homo sapiens
  misc_RNA (1)...(19): siRNA sense strand
cugccacaguuauuuauuu

SEQ ID NO: 1938174 - RNA, 19 nt, Homo sapiens
  misc_RNA (1)...(19): siRNA sense strand
uaagaagccaggaaauuuc

SEQ ID NO: 1938175 - RNA, 19 nt, Homo sapiens
  misc_RNA (1)...(19): siRNA sense strand
gaauugauuagaaccaaga

SEQ ID NO: 1938176 - RNA, 19 nt, Homo sapiens
  misc_RNA (1)...(19): siRNA sense strand
caauuaagugcucuucuga

SEQ ID NO: 1938177 - RNA, 19 nt, Homo sapiens
  misc_RNA (1)...(19): siRNA sense strand
caaagugacaccucuucaa

SEQ ID NO: 1938178 - RNA, 19 nt, Homo sapiens
  misc_RNA (1)...(19): siRNA sense strand
ccaagaugcaguccaagaa

SEQ ID NO: 1938179 - RNA, 19 nt, Homo sapiens
  misc_RNA (1)...(19): siRNA sense strand
acaaaugcuugccucaugu

SEQ ID NO: 1938180 - RNA, 19 nt, Homo sapiens
  misc_RNA (1)...(19): siRNA sense strand
aacaaaugcuugccucaug

SEQ ID NO: 1938181 - RNA, 19 nt, Homo sapiens
  misc_RNA (1)...(19): siRNA sense strand
gaagagggaggcaacaaac

SEQ ID NO: 1938182 - RNA, 19 nt, Homo sapiens
  misc_RNA (1)...(19): siRNA sense strand
gcuccugcuugugccauua

SEQ ID NO: 1938183 - RNA, 19 nt, Homo sapiens
  misc_RNA (1)...(19): siRNA sense strand
guaccuuucucagcaaugu

SEQ ID NO: 1938184 - RNA, 19 nt, Homo sapiens
  misc_RNA (1)...(19): siRNA sense strand
gauguaccuuucucagcaa

SEQ ID NO: 1938185 - RNA, 19 nt, Homo sapiens
  misc_RNA (1)...(19): siRNA sense strand
caaaugcuugccucaugua

SEQ ID NO: 1938186 - RNA, 19 nt, Homo sapiens
  misc_RNA (1)...(19): siRNA sense strand
gggaacauuggaugcauuu

SEQ ID NO: 1938187 - RNA, 19 nt, Homo sapiens
  misc_RNA (1)...(19): siRNA sense strand
ggacucauggaucaucuau

SEQ ID NO: 1938188 - RNA, 19 nt, Homo sapiens
  misc_RNA (1)...(19): siRNA sense strand
caacuuuaccauuugaugu

SEQ ID NO: 1938189 - RNA, 19 nt, Homo sapiens
  misc_RNA (1)...(19): siRNA sense strand
agugacaccucuucaacaa

SEQ ID NO: 1938190 - RNA, 19 nt, Homo sapiens
  misc_RNA (1)...(19): siRNA sense strand
caguacauaugaauuugga

SEQ ID NO: 1938191 - RNA, 19 nt, Homo sapiens
  misc_RNA (1)...(19): siRNA sense strand
uaaaauugcuccugcuugu

SEQ ID NO: 1938192 - RNA, 19 nt, Homo sapiens
  misc_RNA (1)...(19): siRNA sense strand
caauguacugguauaacua

SEQ ID NO: 1938193 - RNA, 19 nt, Homo sapiens
  misc_RNA (1)...(19): siRNA sense strand
ucuuagagauguaccuuuc

SEQ ID NO: 1938194 - RNA, 19 nt, Homo sapiens
  misc_RNA (1)...(19): siRNA sense strand
gagggaggcaacaaacuau

SEQ ID NO: 1938195 - RNA, 19 nt, Homo sapiens
  misc_RNA (1)...(19): siRNA sense strand
ugugagaaaucugguuuau

SEQ ID NO: 1938196 - RNA, 19 nt, Homo sapiens
  misc_RNA (1)...(19): siRNA sense strand
gggacaagagauuaucaaa

SEQ ID NO: 1938197 - RNA, 19 nt, Homo sapiens
  misc_RNA (1)...(19): siRNA sense strand
ugaagagggaggcaacaaa

SEQ ID NO: 1938198 - RNA, 19 nt, Homo sapiens
  misc_RNA (1)...(19): siRNA sense strand
gcauaugucaaccuggauu

SEQ ID NO: 1938199 - RNA, 19 nt, Homo sapiens
  misc_RNA (1)...(19): siRNA sense strand
gacacaacuuuggacauau

SEQ ID NO: 1938200 - RNA, 19 nt, Homo sapiens
  misc_RNA (1)...(19): siRNA sense strand
guugcaacuuuaccauuug

SEQ ID NO: 1938201 - RNA, 19 nt, Homo sapiens
  misc_RNA (1)...(19): siRNA sense strand
auuaagugcucuucugaga

SEQ ID NO: 1938202 - RNA, 19 nt, Homo sapiens
  misc_RNA (1)...(19): siRNA sense strand
caaacuaugguauaagaag

SEQ ID NO: 1938203 - RNA, 19 nt, Homo sapiens
  misc_RNA (1)...(19): siRNA sense strand
augucaaccuggauuauaa

SEQ ID NO: 1938204 - RNA, 19 nt, Homo sapiens
  misc_RNA (1)...(19): siRNA sense strand
cauaugucaaccuggauua

SEQ ID NO: 1938205 - RNA, 19 nt, Homo sapiens
  misc_RNA (1)...(19): siRNA sense strand
gcaacuuuaccauuugaug

SEQ ID NO: 1938206 - RNA, 19 nt, Homo sapiens
  misc_RNA (1)...(19): siRNA sense strand
agagggaggcaacaaacua

SEQ ID NO: 1938207 - RNA, 19 nt, Homo sapiens
  misc_RNA (1)...(19): siRNA sense strand
gugagaaaucugguuuaua

SEQ ID NO: 1938208 - RNA, 19 nt, Homo sapiens
  misc_RNA (1)...(19): siRNA sense strand
agccagauuuggugcagua

SEQ ID NO: 1938209 - RNA, 19 nt, Homo sapiens
  misc_RNA (1)...(19): siRNA sense strand
gugcucuucugagaucuaa

SEQ ID NO: 1938210 - RNA, 19 nt, Homo sapiens
  misc_RNA (1)...(19): siRNA sense strand
aggccuaauuccucgcuua

SEQ ID NO: 1938211 - RNA, 19 nt, Homo sapiens
  misc_RNA (1)...(19): siRNA sense strand
uaugucaaccuggauuaua

SEQ ID NO: 1938212 - RNA, 19 nt, Homo sapiens
  misc_RNA (1)...(19): siRNA sense strand
uaugagccaacauuuauga

SEQ ID NO: 1938213 - RNA, 19 nt, Homo sapiens
  misc_RNA (1)...(19): siRNA sense strand
aaaccugcauaccaauugu

SEQ ID NO: 1938214 - RNA, 19 nt, Homo sapiens
  misc_RNA (1)...(19): siRNA sense strand
ggcauugucugguucuuuu

SEQ ID NO: 1938215 - RNA, 19 nt, Homo sapiens
  misc_RNA (1)...(19): siRNA sense strand
cuacuguucuuagagaugu

SEQ ID NO: 1938216 - RNA, 19 nt, Homo sapiens
  misc_RNA (1)...(19): siRNA sense strand
acaagagauuaucaaagug

SEQ ID NO: 1938217 - RNA, 19 nt, Homo sapiens
  misc_RNA (1)...(19): siRNA sense strand
cagauuuggugcaguaacu

SEQ ID NO: 1938218 - RNA, 19 nt, Homo sapiens
  misc_RNA (1)...(19): siRNA sense strand
gaugguuggauuucccuuu

SEQ ID NO: 1938219 - RNA, 19 nt, Homo sapiens
  misc_RNA (1)...(19): siRNA sense strand
ggccuaauuccucgcuuaa

SEQ ID NO: 1938220 - RNA, 19 nt, Homo sapiens
  misc_RNA (1)...(19): siRNA sense strand
ucaucuaugugucugugaa

SEQ ID NO: 1938221 - RNA, 19 nt, Homo sapiens
  misc_RNA (1)...(19): siRNA sense strand
ugaaaccugcauaccaauu

SEQ ID NO: 1938222 - RNA, 19 nt, Homo sapiens
  misc_RNA (1)...(19): siRNA sense strand
gugguuaugugagaaaucu

SEQ ID NO: 1938223 - RNA, 19 nt, Homo sapiens
  misc_RNA (1)...(19): siRNA sense strand
gguuggauuucccuuugga

SEQ ID NO: 1938224 - RNA, 19 nt, Homo sapiens
  misc_RNA (1)...(19): siRNA sense strand
gaggcaacaaacuauggua

SEQ ID NO: 1938225 - RNA, 19 nt, Homo sapiens
  misc_RNA (1)...(19): siRNA sense strand
gggcauugucugguucuuu

SEQ ID NO: 1938226 - RNA, 19 nt, Homo sapiens
  misc_RNA (1)...(19): siRNA sense strand
guuuauaugagccaacauu

SEQ ID NO: 1938227 - RNA, 19 nt, Homo sapiens
  misc_RNA (1)...(19): siRNA sense strand
gagaaaucugguuuauaug

SEQ ID NO: 1938228 - RNA, 19 nt, Homo sapiens
  misc_RNA (1)...(19): siRNA sense strand
cugcuaugaucaauuaagu

SEQ ID NO: 1938229 - RNA, 19 nt, Homo sapiens
  misc_RNA (1)...(19): siRNA sense strand
cucauguacuggagcuaua

SEQ ID NO: 1938230 - RNA, 19 nt, Homo sapiens
  misc_RNA (1)...(19): siRNA sense strand
caacaaacuaugguauaag

SEQ ID NO: 1938231 - RNA, 19 nt, Homo sapiens
  misc_RNA (1)...(19): siRNA sense strand
caacaaaugcuugccucau

SEQ ID NO: 1938232 - RNA, 19 nt, Homo sapiens
  misc_RNA (1)...(19): siRNA sense strand
uaugugagaaaucugguuu

SEQ ID NO: 1938233 - RNA, 19 nt, Homo sapiens
  misc_RNA (1)...(19): siRNA sense strand
ggaaggaacugcagaagga

SEQ ID NO: 1938234 - RNA, 19 nt, Homo sapiens
  misc_RNA (1)...(19): siRNA sense strand
ucaaggagguggugcuuua

SEQ ID NO: 1938235 - RNA, 19 nt, Homo sapiens
  misc_RNA (1)...(19): siRNA sense strand
ugaagcaccugaagcaaua

SEQ ID NO: 1938236 - RNA, 19 nt, Homo sapiens
  misc_RNA (1)...(19): siRNA sense strand
gaaauuuguugagugguua

SEQ ID NO: 1938237 - RNA, 19 nt, Homo sapiens
  misc_RNA (1)...(19): siRNA sense strand
aaacagagcagacaaaguu

SEQ ID NO: 1938238 - RNA, 19 nt, Homo sapiens
  misc_RNA (1)...(19): siRNA sense strand
gaaggcauuugaagaugaa

SEQ ID NO: 1938239 - RNA, 19 nt, Homo sapiens
  misc_RNA (1)...(19): siRNA sense strand
gacagaguguggaucauuu

SEQ ID NO: 1938240 - RNA, 19 nt, Homo sapiens
  misc_RNA (1)...(19): siRNA sense strand
gaacaagaaggaagaacuu

SEQ ID NO: 1938241 - RNA, 19 nt, Homo sapiens
  misc_RNA (1)...(19): siRNA sense strand
gcucaggucuucaauaaac

SEQ ID NO: 1938242 - RNA, 19 nt, Homo sapiens
  misc_RNA (1)...(19): siRNA sense strand
uuaaggagcuuuccgacuu

SEQ ID NO: 1938243 - RNA, 19 nt, Homo sapiens
  misc_RNA (1)...(19): siRNA sense strand
gcagacacacucuucgaua

SEQ ID NO: 1938244 - RNA, 19 nt, Homo sapiens
  misc_RNA (1)...(19): siRNA sense strand
ggucuucuguggacaugua

SEQ ID NO: 1938245 - RNA, 19 nt, Homo sapiens
  misc_RNA (1)...(19): siRNA sense strand
ggagaaggcauuugaagau

SEQ ID NO: 1938246 - RNA, 19 nt, Homo sapiens
  misc_RNA (1)...(19): siRNA sense strand
aagaagaaaugaagaggaa

SEQ ID NO: 1938247 - RNA, 19 nt, Homo sapiens
  misc_RNA (1)...(19): siRNA sense strand
cgaagaagcaauacugaaa

SEQ ID NO: 1938248 - RNA, 19 nt, Homo sapiens
  misc_RNA (1)...(19): siRNA sense strand
gaaaugaagaggaaugauc

SEQ ID NO: 1938249 - RNA, 19 nt, Homo sapiens
  misc_RNA (1)...(19): siRNA sense strand
aagcaauacugaaauggua

SEQ ID NO: 1938250 - RNA, 19 nt, Homo sapiens
  misc_RNA (1)...(19): siRNA sense strand
uccagaagguucaggaaua

SEQ ID NO: 1938251 - RNA, 19 nt, Homo sapiens
  misc_RNA (1)...(19): siRNA sense strand
gaggaacgcgcauagauga

SEQ ID NO: 1938252 - RNA, 19 nt, Homo sapiens
  misc_RNA (1)...(19): siRNA sense strand
aaacucaucaggagauaua

SEQ ID NO: 1938253 - RNA, 19 nt, Homo sapiens
  misc_RNA (1)...(19): siRNA sense strand
gagaaggcauuugaagaug

SEQ ID NO: 1938254 - RNA, 19 nt, Homo sapiens
  misc_RNA (1)...(19): siRNA sense strand
gaaaccauccgaaacuaug

SEQ ID NO: 1938255 - RNA, 19 nt, Homo sapiens
  misc_RNA (1)...(19): siRNA sense strand
gaagaaaugaagaggaaug

SEQ ID NO: 1938256 - RNA, 19 nt, Homo sapiens
  misc_RNA (1)...(19): siRNA sense strand
ccaaauuucuggacucuac

SEQ ID NO: 1938257 - RNA, 19 nt, Homo sapiens
  misc_RNA (1)...(19): siRNA sense strand
gaagaagcaauacugaaau

SEQ ID NO: 1938258 - RNA, 19 nt, Homo sapiens
  misc_RNA (1)...(19): siRNA sense strand
ggagauauaaguauuugga

SEQ ID NO: 1938259 - RNA, 19 nt, Homo sapiens
  misc_RNA (1)...(19): siRNA sense strand
gacaacauccauuucauga

SEQ ID NO: 1938260 - RNA, 19 nt, Homo sapiens
  misc_RNA (1)...(19): siRNA sense strand
aaagaugccaacucuguua

SEQ ID NO: 1938261 - RNA, 19 nt, Homo sapiens
  misc_RNA (1)...(19): siRNA sense strand
ucuguuaccucgucuuuga

SEQ ID NO: 1938262 - RNA, 19 nt, Homo sapiens
  misc_RNA (1)...(19): siRNA sense strand
cagacacacucuucgauau

SEQ ID NO: 1938263 - RNA, 19 nt, Homo sapiens
  misc_RNA (1)...(19): siRNA sense strand
gaaaugguauaaggaagca

SEQ ID NO: 1938264 - RNA, 19 nt, Homo sapiens
  misc_RNA (1)...(19): siRNA sense strand
uuauaaagcugauguucug

SEQ ID NO: 1938265 - RNA, 19 nt, Homo sapiens
  misc_RNA (1)...(19): siRNA sense strand
gaccaaccacuguguguuu

SEQ ID NO: 1938266 - RNA, 19 nt, Homo sapiens
  misc_RNA (1)...(19): siRNA sense strand
ccuugaagcuguagccaaa

SEQ ID NO: 1938267 - RNA, 19 nt, Homo sapiens
  misc_RNA (1)...(19): siRNA sense strand
gaaggaagaacuuguugca

SEQ ID NO: 1938268 - RNA, 19 nt, Homo sapiens
  misc_RNA (1)...(19): siRNA sense strand
gaaacuaugcucaggucuu

SEQ ID NO: 1938269 - RNA, 19 nt, Homo sapiens
  misc_RNA (1)...(19): siRNA sense strand
augcucaggucuucaauaa

SEQ ID NO: 1938270 - RNA, 19 nt, Homo sapiens
  misc_RNA (1)...(19): siRNA sense strand
ggaggaacgcgcauagaug

SEQ ID NO: 1938271 - RNA, 19 nt, Homo sapiens
  misc_RNA (1)...(19): siRNA sense strand
agaaauuuguugagugguu

SEQ ID NO: 1938272 - RNA, 19 nt, Homo sapiens
  misc_RNA (1)...(19): siRNA sense strand
agaaggcauuugaagauga

SEQ ID NO: 1938273 - RNA, 19 nt, Homo sapiens
  misc_RNA (1)...(19): siRNA sense strand
aaacuaugcucaggucuuc

SEQ ID NO: 1938274 - RNA, 19 nt, Homo sapiens
  misc_RNA (1)...(19): siRNA sense strand
caggagauauaaguauuug

SEQ ID NO: 1938275 - RNA, 19 nt, Homo sapiens
  misc_RNA (1)...(19): siRNA sense strand
aagcuucuccucuuccuua

SEQ ID NO: 1938276 - RNA, 19 nt, Homo sapiens
  misc_RNA (1)...(19): siRNA sense strand
aagaagcaauacugaaaug

SEQ ID NO: 1938277 - RNA, 19 nt, Homo sapiens
  misc_RNA (1)...(19): siRNA sense strand
gguggugcuuuaugucaaa

SEQ ID NO: 1938278 - RNA, 19 nt, Homo sapiens
  misc_RNA (1)...(19): siRNA sense strand
gagcgaagaagcaauacug

SEQ ID NO: 1938279 - RNA, 19 nt, Homo sapiens
  misc_RNA (1)...(19): siRNA sense strand
gaaugaucuuccagaaaca

SEQ ID NO: 1938280 - RNA, 19 nt, Homo sapiens
  misc_RNA (1)...(19): siRNA sense strand
caagaugaccaaccacugu

SEQ ID NO: 1938281 - RNA, 19 nt, Homo sapiens
  misc_RNA (1)...(19): siRNA sense strand
gaccagaugaagaaauuug

SEQ ID NO: 1938282 - RNA, 19 nt, Homo sapiens
  misc_RNA (1)...(19): siRNA sense strand
ggucuucaauaaacucauc

SEQ ID NO: 1938283 - RNA, 19 nt, Homo sapiens
  misc_RNA (1)...(19): siRNA sense strand
gagcgucuuucucaggaau

SEQ ID NO: 1938284 - RNA, 19 nt, Homo sapiens
  misc_RNA (1)...(19): siRNA sense strand
ucucuucaccgacagcuua

SEQ ID NO: 1938285 - RNA, 19 nt, Homo sapiens
  misc_RNA (1)...(19): siRNA sense strand
gaagcaauacugaaauggu

SEQ ID NO: 1938286 - RNA, 19 nt, Homo sapiens
  misc_RNA (1)...(19): siRNA sense strand
gcuacgacaacauccauuu

SEQ ID NO: 1938287 - RNA, 19 nt, Homo sapiens
  misc_RNA (1)...(19): siRNA sense strand
ucuacaggcucaagauuag

SEQ ID NO: 1938288 - RNA, 19 nt, Homo sapiens
  misc_RNA (1)...(19): siRNA sense strand
uugaccagaugaagaaauu

SEQ ID NO: 1938289 - RNA, 19 nt, Homo sapiens
  misc_RNA (1)...(19): siRNA sense strand
ugaacgcuguugaguggaa

SEQ ID NO: 1938290 - RNA, 19 nt, Homo sapiens
  misc_RNA (1)...(19): siRNA sense strand
uaaggagcuuuccgacuuc

SEQ ID NO: 1938291 - RNA, 19 nt, Homo sapiens
  misc_RNA (1)...(19): siRNA sense strand
gaaacagagcagacaaagu

SEQ ID NO: 1938292 - RNA, 19 nt, Homo sapiens
  misc_RNA (1)...(19): siRNA sense strand
gcgaagaagcaauacugaa

SEQ ID NO: 1938293 - RNA, 19 nt, Homo sapiens
  misc_RNA (1)...(19): siRNA sense strand
cgacaacauccauuucaug

SEQ ID NO: 1938294 - RNA, 19 nt, Homo sapiens
  misc_RNA (1)...(19): siRNA sense strand
cuguggacauguauaauga

SEQ ID NO: 1938295 - RNA, 19 nt, Homo sapiens
  misc_RNA (1)...(19): siRNA sense strand
caucagaagccagugcuaa

SEQ ID NO: 1938296 - RNA, 19 nt, Homo sapiens
  misc_RNA (1)...(19): siRNA sense strand
caucaggagauauaaguau

SEQ ID NO: 1938297 - RNA, 19 nt, Homo sapiens
  misc_RNA (1)...(19): siRNA sense strand
gaauacugcuacgacaaca

SEQ ID NO: 1938298 - RNA, 19 nt, Homo sapiens
  misc_RNA (1)...(19): siRNA sense strand
ccagaagguucaggaauac

SEQ ID NO: 1938299 - RNA, 19 nt, Homo sapiens
  misc_RNA (1)...(19): siRNA sense strand
agaccaagaugaccaacca

SEQ ID NO: 1938300 - RNA, 19 nt, Homo sapiens
  misc_RNA (1)...(19): siRNA sense strand
aaagccaacuuagacaaga

SEQ ID NO: 1938301 - RNA, 19 nt, Homo sapiens
  misc_RNA (1)...(19): siRNA sense strand
cgacagcuuagucaaagaa

SEQ ID NO: 1938302 - RNA, 19 nt, Homo sapiens
  misc_RNA (1)...(19): siRNA sense strand
ggaacgcgcauagaugaug

SEQ ID NO: 1938303 - RNA, 19 nt, Homo sapiens
  misc_RNA (1)...(19): siRNA sense strand
gaagcuguagccaaauuuc

SEQ ID NO: 1938304 - RNA, 19 nt, Homo sapiens
  misc_RNA (1)...(19): siRNA sense strand
guauaaggaagcacauguu

SEQ ID NO: 1938305 - RNA, 19 nt, Homo sapiens
  misc_RNA (1)...(19): siRNA sense strand
uugaagcuguagccaaauu

SEQ ID NO: 1938306 - RNA, 19 nt, Homo sapiens
  misc_RNA (1)...(19): siRNA sense strand
ggaacaagaaggaagaacu

SEQ ID NO: 1938307 - RNA, 19 nt, Homo sapiens
  misc_RNA (1)...(19): siRNA sense strand
gcucaagauuagauuaucg

SEQ ID NO: 1938308 - RNA, 19 nt, Homo sapiens
  misc_RNA (1)...(19): siRNA sense strand
cauagaugauggugacaag

SEQ ID NO: 1938309 - RNA, 19 nt, Homo sapiens
  misc_RNA (1)...(19): siRNA sense strand
uaaugaggcuggugaugac

SEQ ID NO: 1938310 - RNA, 19 nt, Homo sapiens
  misc_RNA (1)...(19): siRNA sense strand
ggaauacugcuacgacaac

SEQ ID NO: 1938311 - RNA, 19 nt, Homo sapiens
  misc_RNA (1)...(19): siRNA sense strand
uuaaugaggcuggugauga

SEQ ID NO: 1938312 - RNA, 19 nt, Homo sapiens
  misc_RNA (1)...(19): siRNA sense strand
ucucaggaaugcccgauca

SEQ ID NO: 1938313 - RNA, 19 nt, Homo sapiens
  misc_RNA (1)...(19): siRNA sense strand
agacaaaguuggcgaugcu

SEQ ID NO: 1938314 - RNA, 19 nt, Homo sapiens
  misc_RNA (1)...(19): siRNA sense strand
ccugguggcuggcaguaug

SEQ ID NO: 1938315 - RNA, 19 nt, Homo sapiens
  misc_RNA (1)...(19): siRNA sense strand
cagaugaagaaauuuguug

SEQ ID NO: 1938316 - RNA, 19 nt, Homo sapiens
  misc_RNA (1)...(19): siRNA sense strand
gguauaaggaagcacaugu

SEQ ID NO: 1938317 - RNA, 19 nt, Homo sapiens
  misc_RNA (1)...(19): siRNA sense strand
gcagugauuggucuucugu

SEQ ID NO: 1938318 - RNA, 19 nt, Homo sapiens
  misc_RNA (1)...(19): siRNA sense strand
ggugacaagaccaagauga

SEQ ID NO: 1938319 - RNA, 19 nt, Homo sapiens
  misc_RNA (1)...(19): siRNA sense strand
uauaaggaagcacauguug

SEQ ID NO: 1938320 - RNA, 19 nt, Homo sapiens
  misc_RNA (1)...(19): siRNA sense strand
gagguggugcuuuauguca

SEQ ID NO: 1938321 - RNA, 19 nt, Homo sapiens
  misc_RNA (1)...(19): siRNA sense strand
ccagaaacagcagugauug

SEQ ID NO: 1938322 - RNA, 19 nt, Homo sapiens
  misc_RNA (1)...(19): siRNA sense strand
gcuaaaggcaaaaguguuu

SEQ ID NO: 1938323 - RNA, 19 nt, Homo sapiens
  misc_RNA (1)...(19): siRNA sense strand
ucugagcgaagaagcaaua

SEQ ID NO: 1938324 - RNA, 19 nt, Homo sapiens
  misc_RNA (1)...(19): siRNA sense strand
uaacagacagaguguggau

SEQ ID NO: 1938325 - RNA, 19 nt, Homo sapiens
  misc_RNA (1)...(19): siRNA sense strand
auaaacucaucaggagaua

SEQ ID NO: 1938326 - RNA, 19 nt, Homo sapiens
  misc_RNA (1)...(19): siRNA sense strand
ggaaggugaggaaaauuaa

SEQ ID NO: 1938327 - RNA, 19 nt, Homo sapiens
  misc_RNA (1)...(19): siRNA sense strand
ggacucuacaggcucaaga

SEQ ID NO: 1938328 - RNA, 19 nt, Homo sapiens
  misc_RNA (1)...(19): siRNA sense strand
ggagcgucuuucucaggaa

SEQ ID NO: 1938329 - RNA, 19 nt, Homo sapiens
  misc_RNA (1)...(19): siRNA sense strand
aagcauggauggcagaaaa

SEQ ID NO: 1938330 - RNA, 19 nt, Homo sapiens
  misc_RNA (1)...(19): siRNA sense strand
gaaaagccaacuuagacaa

SEQ ID NO: 1938331 - RNA, 19 nt, Homo sapiens
  misc_RNA (1)...(19): siRNA sense strand
ugucaaagaagaaaugaag

SEQ ID NO: 1938332 - RNA, 19 nt, Homo sapiens
  misc_RNA (1)...(19): siRNA sense strand
agacagaguguggaucauu

SEQ ID NO: 1938333 - RNA, 19 nt, Homo sapiens
  misc_RNA (1)...(19): siRNA sense strand
ccaacaaccugcaacucaa

SEQ ID NO: 1938334 - RNA, 19 nt, Homo sapiens
  misc_RNA (1)...(19): siRNA sense strand
caacucaagauccgucuga

SEQ ID NO: 1938335 - RNA, 19 nt, Homo sapiens
  misc_RNA (1)...(19): siRNA sense strand
gacguacucuggagguguu

SEQ ID NO: 1938336 - RNA, 19 nt, Homo sapiens
  misc_RNA (1)...(19): siRNA sense strand
gcgaugcuguggacuccuu

SEQ ID NO: 1938337 - RNA, 19 nt, Homo sapiens
  misc_RNA (1)...(19): siRNA sense strand
gccaacaaccugcaacuca

SEQ ID NO: 1938338 - RNA, 19 nt, Homo sapiens
  misc_RNA (1)...(19): siRNA sense strand
gagcaucaagggcauguac

SEQ ID NO: 1938339 - RNA, 19 nt, Homo sapiens
  misc_RNA (1)...(19): siRNA sense strand
gugaagccguggacaugag

SEQ ID NO: 1938340 - RNA, 19 nt, Homo sapiens
  misc_RNA (1)...(19): siRNA sense strand
cggcgaccuuacccacuuu

SEQ ID NO: 1938341 - RNA, 19 nt, Homo sapiens
  misc_RNA (1)...(19): siRNA sense strand
caacaaccugcaacucaag

SEQ ID NO: 1938342 - RNA, 19 nt, Homo sapiens
  misc_RNA (1)...(19): siRNA sense strand
ggugaagccguggacauga

SEQ ID NO: 1938343 - RNA, 19 nt, Homo sapiens
  misc_RNA (1)...(19): siRNA sense strand
uggguugcauccagaccua

SEQ ID NO: 1938344 - RNA, 19 nt, Homo sapiens
  misc_RNA (1)...(19): siRNA sense strand
gcaggaggaggaagacaac

SEQ ID NO: 1938345 - RNA, 19 nt, Homo sapiens
  misc_RNA (1)...(19): siRNA sense strand
cgggauauccgacguacuc

SEQ ID NO: 1938346 - RNA, 19 nt, Homo sapiens
  misc_RNA (1)...(19): siRNA sense strand
gagugacccuuugcugaua

SEQ ID NO: 1938347 - RNA, 19 nt, Homo sapiens
  misc_RNA (1)...(19): siRNA sense strand
ggaauaccaacuucagaaa

SEQ ID NO: 1938348 - RNA, 19 nt, Homo sapiens
  misc_RNA (1)...(19): siRNA sense strand
gauuagaagccuccauuga

SEQ ID NO: 1938349 - RNA, 19 nt, Homo sapiens
  misc_RNA (1)...(19): siRNA sense strand
gcaagcaccaacaauauag

SEQ ID NO: 1938350 - RNA, 19 nt, Homo sapiens
  misc_RNA (1)...(19): siRNA sense strand
gugcagcaguuaagauuag

SEQ ID NO: 1938351 - RNA, 19 nt, Homo sapiens
  misc_RNA (1)...(19): siRNA sense strand
acagcaagcaccaacaaua

SEQ ID NO: 1938352 - RNA, 19 nt, Homo sapiens
  misc_RNA (1)...(19): siRNA sense strand
cagcaagcaccaacaauau

SEQ ID NO: 1938353 - RNA, 19 nt, Homo sapiens
  misc_RNA (1)...(19): siRNA sense strand
ggagugacccuuugcugau

SEQ ID NO: 1938354 - RNA, 19 nt, Homo sapiens
  misc_RNA (1)...(19): siRNA sense strand
uuagaagccuccauugaag

SEQ ID NO: 1938355 - RNA, 19 nt, Homo sapiens
  misc_RNA (1)...(19): siRNA sense strand
aaacagcaagcaccaacaa

SEQ ID NO: 1938356 - RNA, 19 nt, Homo sapiens
  misc_RNA (1)...(19): siRNA sense strand
ugauaggaauaccaacuuc

SEQ ID NO: 1938357 - RNA, 19 nt, Homo sapiens
  misc_RNA (1)...(19): siRNA sense strand
gauaggaauaccaacuuca

SEQ ID NO: 1938358 - RNA, 19 nt, Homo sapiens
  misc_RNA (1)...(19): siRNA sense strand
auuagaagccuccauugaa

SEQ ID NO: 1938359 - RNA, 19 nt, Homo sapiens
  misc_RNA (1)...(19): siRNA sense strand
aagauuagaagccuccauu

SEQ ID NO: 1938360 - RNA, 19 nt, Homo sapiens
  misc_RNA (1)...(19): siRNA sense strand
ggcaucagcggaccucaug

SEQ ID NO: 1938361 - RNA, 19 nt, Homo sapiens
  misc_RNA (1)...(19): siRNA sense strand
agcaagcaccaacaauaua

SEQ ID NO: 1938362 - RNA, 19 nt, Homo sapiens
  misc_RNA (1)...(19): siRNA sense strand
gaauaccaacuucagaaaa

SEQ ID NO: 1938363 - RNA, 19 nt, Homo sapiens
  misc_RNA (1)...(19): siRNA sense strand
ugccaggagugacccuuug

SEQ ID NO: 1938364 - RNA, 19 nt, Homo sapiens
  misc_RNA (1)...(19): siRNA sense strand
aggaauaccaacuucagaa

SEQ ID NO: 1938365 - RNA, 19 nt, Homo sapiens
  misc_RNA (1)...(19): siRNA sense strand
gaaggaauaaagguuucga

SEQ ID NO: 1938366 - RNA, 19 nt, Homo sapiens
  misc_RNA (1)...(19): siRNA sense strand
uugaaggaauaaagguuuc

SEQ ID NO: 1938367 - RNA, 19 nt, Homo sapiens
  misc_RNA (1)...(19): siRNA sense strand
ucaaagggcugacaaaguu

SEQ ID NO: 1938368 - RNA, 19 nt, Homo sapiens
  misc_RNA (1)...(19): siRNA sense strand
ggauugaccucuccaacaa

SEQ ID NO: 1938369 - RNA, 19 nt, Homo sapiens
  misc_RNA (1)...(19): siRNA sense strand
caacuauggugaagucauu

SEQ ID NO: 1938370 - RNA, 19 nt, Homo sapiens
  misc_RNA (1)...(19): siRNA sense strand
ugacaaaguugaagaggau

SEQ ID NO: 1938371 - RNA, 19 nt, Homo sapiens
  misc_RNA (1)...(19): siRNA sense strand
cagaauaaccugauagaga

SEQ ID NO: 1938372 - RNA, 19 nt, Homo sapiens
  misc_RNA (1)...(19): siRNA sense strand
agagagacgucuucuguga

SEQ ID NO: 1938373 - RNA, 19 nt, Homo sapiens
  misc_RNA (1)...(19): siRNA sense strand
gcauugaguuccuggaugu

SEQ ID NO: 1938374 - RNA, 19 nt, Homo sapiens
  misc_RNA (1)...(19): siRNA sense strand
gcaggcagcuggaagacau

SEQ ID NO: 1938375 - RNA, 19 nt, Homo sapiens
  misc_RNA (1)...(19): siRNA sense strand
gcgaugacauugaccuaga

SEQ ID NO: 1938376 - RNA, 19 nt, Homo sapiens
  misc_RNA (1)...(19): siRNA sense strand
cagcuucucucccaaggaa

SEQ ID NO: 1938377 - RNA, 19 nt, Homo sapiens
  misc_RNA (1)...(19): siRNA sense strand
cagacaaccugcuggauuc

SEQ ID NO: 1938378 - RNA, 19 nt, Homo sapiens
  misc_RNA (1)...(19): siRNA sense strand
gcaguuccuuuaccuguca

SEQ ID NO: 1938379 - RNA, 19 nt, Homo sapiens
  misc_RNA (1)...(19): siRNA sense strand
ucauugaccugagcaacua

SEQ ID NO: 1938380 - RNA, 19 nt, Homo sapiens
  misc_RNA (1)...(19): siRNA sense strand
cuguacaccugcagaauaa

SEQ ID NO: 1938381 - RNA, 19 nt, Homo sapiens
  misc_RNA (1)...(19): siRNA sense strand
agacaacuauggugaaguc

SEQ ID NO: 1938382 - RNA, 19 nt, Homo sapiens
  misc_RNA (1)...(19): siRNA sense strand
gagaagcugcaguuccuuu

SEQ ID NO: 1938383 - RNA, 19 nt, Homo sapiens
  misc_RNA (1)...(19): siRNA sense strand
gcuccuggcuuuccugagu

SEQ ID NO: 1938384 - RNA, 19 nt, Homo sapiens
  misc_RNA (1)...(19): siRNA sense strand
ggacauuccuccucuuccu

SEQ ID NO: 1938385 - RNA, 19 nt, Homo sapiens
  misc_RNA (1)...(19): siRNA sense strand
ggaggacugccuaccugua

SEQ ID NO: 1938386 - RNA, 19 nt, Homo sapiens
  misc_RNA (1)...(19): siRNA sense strand
ucagacaaccugcuggauu

SEQ ID NO: 1938387 - RNA, 19 nt, Homo sapiens
  misc_RNA (1)...(19): siRNA sense strand
gaggacugccuaccuguau

SEQ ID NO: 1938388 - RNA, 19 nt, Homo sapiens
  misc_RNA (1)...(19): siRNA sense strand
uagagaccaugcagagaga

SEQ ID NO: 1938389 - RNA, 19 nt, Homo sapiens
  misc_RNA (1)...(19): siRNA sense strand
gaccucauccucccagaga

SEQ ID NO: 1938390 - RNA, 19 nt, Homo sapiens
  misc_RNA (1)...(19): siRNA sense strand
caauggagaagcugcaguu

SEQ ID NO: 1938391 - RNA, 19 nt, Homo sapiens
  misc_RNA (1)...(19): siRNA sense strand
acaaccugcuggauucuau

SEQ ID NO: 1938392 - RNA, 19 nt, Homo sapiens
  misc_RNA (1)...(19): siRNA sense strand
ccagacaacuauggugaag

SEQ ID NO: 1938393 - RNA, 19 nt, Homo sapiens
  misc_RNA (1)...(19): siRNA sense strand
agaagcugcaguuccuuua

SEQ ID NO: 1938394 - RNA, 19 nt, Homo sapiens
  misc_RNA (1)...(19): siRNA sense strand
gaggagagaggagcagaug

SEQ ID NO: 1938395 - RNA, 19 nt, Homo sapiens
  misc_RNA (1)...(19): siRNA sense strand
gaacccagacaacuauggu

SEQ ID NO: 1938396 - RNA, 19 nt, Homo sapiens
  misc_RNA (1)...(19): siRNA sense strand
caaaguugaagaggauuga

SEQ ID NO: 1938397 - RNA, 19 nt, Homo sapiens
  misc_RNA (1)...(19): siRNA sense strand
gcggaaugauguccugaac

SEQ ID NO: 1938398 - RNA, 19 nt, Homo sapiens
  misc_RNA (1)...(19): siRNA sense strand
gauagagaccaugcagaga

SEQ ID NO: 1938399 - RNA, 19 nt, Homo sapiens
  misc_RNA (1)...(19): siRNA sense strand
ccugcagaauaaccugaua

SEQ ID NO: 1938400 - RNA, 19 nt, Homo sapiens
  misc_RNA (1)...(19): siRNA sense strand
uuuccuccaucgauaauga

SEQ ID NO: 1938401 - RNA, 19 nt, Homo sapiens
  misc_RNA (1)...(19): siRNA sense strand
cucauuuccuccaucgaua

SEQ ID NO: 1938402 - RNA, 19 nt, Homo sapiens
  misc_RNA (1)...(19): siRNA sense strand
guauugcgaugacauugac

SEQ ID NO: 1938403 - RNA, 19 nt, Homo sapiens
  misc_RNA (1)...(19): siRNA sense strand
gaggagcucacagauuaug

SEQ ID NO: 1938404 - RNA, 19 nt, Homo sapiens
  misc_RNA (1)...(19): siRNA sense strand
acgaugaccagaccuacua

SEQ ID NO: 1938405 - RNA, 19 nt, Homo sapiens
  misc_RNA (1)...(19): siRNA sense strand
gcgauuccuuugaaguucu

SEQ ID NO: 1938406 - RNA, 19 nt, Homo sapiens
  misc_RNA (1)...(19): siRNA sense strand
ggcgauuccuuugaaguuc

SEQ ID NO: 1938407 - RNA, 19 nt, Homo sapiens
  misc_RNA (1)...(19): siRNA sense strand
ccaaggaaggagaggaaga

SEQ ID NO: 1938408 - RNA, 19 nt, Homo sapiens
  misc_RNA (1)...(19): siRNA sense strand
gggcugacaaaguugaaga

SEQ ID NO: 1938409 - RNA, 19 nt, Homo sapiens
  misc_RNA (1)...(19): siRNA sense strand
caaagggcugacaaaguug

SEQ ID NO: 1938410 - RNA, 19 nt, Homo sapiens
  misc_RNA (1)...(19): siRNA sense strand
uggagaagcugcaguuccu

SEQ ID NO: 1938411 - RNA, 19 nt, Homo sapiens
  misc_RNA (1)...(19): siRNA sense strand
ccugaacccagacaacuau

SEQ ID NO: 1938412 - RNA, 19 nt, Homo sapiens
  misc_RNA (1)...(19): siRNA sense strand
ucauuuccuccaucgauaa

SEQ ID NO: 1938413 - RNA, 19 nt, Homo sapiens
  misc_RNA (1)...(19): siRNA sense strand
gaagcugcaguuccuuuac

SEQ ID NO: 1938414 - RNA, 19 nt, Homo sapiens
  misc_RNA (1)...(19): siRNA sense strand
acauugaccuagaggacau

SEQ ID NO: 1938415 - RNA, 19 nt, Homo sapiens
  misc_RNA (1)...(19): siRNA sense strand
cagggcugcuacugaguuc

SEQ ID NO: 1938416 - RNA, 19 nt, Homo sapiens
  misc_RNA (1)...(19): siRNA sense strand
caaggaaggagaggaagag

SEQ ID NO: 1938417 - RNA, 19 nt, Homo sapiens
  misc_RNA (1)...(19): siRNA sense strand
gaagcuagcugaacagaug

SEQ ID NO: 1938418 - RNA, 19 nt, Homo sapiens
  misc_RNA (1)...(19): siRNA sense strand
gugguuaccuguucaagaa

SEQ ID NO: 1938419 - RNA, 19 nt, Homo sapiens
  misc_RNA (1)...(19): siRNA sense strand
cggguggacugucuauaua

SEQ ID NO: 1938420 - RNA, 19 nt, Homo sapiens
  misc_RNA (1)...(19): siRNA sense strand
uggacugucuauauaguua

SEQ ID NO: 1938421 - RNA, 19 nt, Homo sapiens
  misc_RNA (1)...(19): siRNA sense strand
gccagaagcuagcugaaca

SEQ ID NO: 1938422 - RNA, 19 nt, Homo sapiens
  misc_RNA (1)...(19): siRNA sense strand
aaauuaagaggcaugcuaa

SEQ ID NO: 1938423 - RNA, 19 nt, Homo sapiens
  misc_RNA (1)...(19): siRNA sense strand
ggcauccucucaagugguu

SEQ ID NO: 1938424 - RNA, 19 nt, Homo sapiens
  misc_RNA (1)...(19): siRNA sense strand
aagcacagacgacaagaaa

SEQ ID NO: 1938425 - RNA, 19 nt, Homo sapiens
  misc_RNA (1)...(19): siRNA sense strand
ugcaauaguuggauuuauc

SEQ ID NO: 1938426 - RNA, 19 nt, Homo sapiens
  misc_RNA (1)...(19): siRNA sense strand
gcaauaguuggauuuaucu

SEQ ID NO: 1938427 - RNA, 19 nt, Homo sapiens
  misc_RNA (1)...(19): siRNA sense strand
gguggacugucuauauagu

SEQ ID NO: 1938428 - RNA, 19 nt, Homo sapiens
  misc_RNA (1)...(19): siRNA sense strand
ucaagugguuaccuguuca

SEQ ID NO: 1938429 - RNA, 19 nt, Homo sapiens
  misc_RNA (1)...(19): siRNA sense strand
acagauguuucagggaauu

SEQ ID NO: 1938430 - RNA, 19 nt, Homo sapiens
  misc_RNA (1)...(19): siRNA sense strand
gcacagacgacaagaaacc

SEQ ID NO: 1938431 - RNA, 19 nt, Homo sapiens
  misc_RNA (1)...(19): siRNA sense strand
gacugucuauauaguuaug

SEQ ID NO: 1938432 - RNA, 19 nt, Homo sapiens
  misc_RNA (1)...(19): siRNA sense strand
gaaaccaggggaaagaaaa

SEQ ID NO: 1938433 - RNA, 19 nt, Homo sapiens
  misc_RNA (1)...(19): siRNA sense strand
gguuaccuguucaagaauc

SEQ ID NO: 1938434 - RNA, 19 nt, Homo sapiens
  misc_RNA (1)...(19): siRNA sense strand
gauguuucagggaauuauu

SEQ ID NO: 1938435 - RNA, 19 nt, Homo sapiens
  misc_RNA (1)...(19): siRNA sense strand
ggacugucuauauaguuau

SEQ ID NO: 1938436 - RNA, 19 nt, Homo sapiens
  misc_RNA (1)...(19): siRNA sense strand
uuacaagggccagaagcua

SEQ ID NO: 1938437 - RNA, 19 nt, Homo sapiens
  misc_RNA (1)...(19): siRNA sense strand
caagcacagacgacaagaa

SEQ ID NO: 1938438 - RNA, 19 nt, Homo sapiens
  misc_RNA (1)...(19): siRNA sense strand
ucggguggacugucuauau

SEQ ID NO: 1938439 - RNA, 19 nt, Homo sapiens
  misc_RNA (1)...(19): siRNA sense strand
cucaagugguuaccuguuc

SEQ ID NO: 1938440 - RNA, 19 nt, Homo sapiens
  misc_RNA (1)...(19): siRNA sense strand
guuaccuguucaagaauca

SEQ ID NO: 1938441 - RNA, 19 nt, Homo sapiens
  misc_RNA (1)...(19): siRNA sense strand
cugcaauaguuggauuuau

SEQ ID NO: 1938442 - RNA, 19 nt, Homo sapiens
  misc_RNA (1)...(19): siRNA sense strand
caagaaaccaggggaaaga

SEQ ID NO: 1938443 - RNA, 19 nt, Homo sapiens
  misc_RNA (1)...(19): siRNA sense strand
caacuccacuucugagcuu

SEQ ID NO: 1938444 - RNA, 19 nt, Homo sapiens
  misc_RNA (1)...(19): siRNA sense strand
ccaccuuccuaauuccuua

SEQ ID NO: 1938445 - RNA, 19 nt, Homo sapiens
  misc_RNA (1)...(19): siRNA sense strand
gcagggcuuugcagacaga

SEQ ID NO: 1938446 - RNA, 19 nt, Homo sapiens
  misc_RNA (1)...(19): siRNA sense strand
cuuaugagcuucagugucu

SEQ ID NO: 1938447 - RNA, 19 nt, Homo sapiens
  misc_RNA (1)...(19): siRNA sense strand
ucaugggacuugaugugaa

SEQ ID NO: 1938448 - RNA, 19 nt, Homo sapiens
  misc_RNA (1)...(19): siRNA sense strand
ucaugcaccugcugcuuau

SEQ ID NO: 1938449 - RNA, 19 nt, Homo sapiens
  misc_RNA (1)...(19): siRNA sense strand
ugacggcucugcuggacau

SEQ ID NO: 1938450 - RNA, 19 nt, Homo sapiens
  misc_RNA (1)...(19): siRNA sense strand
ccacucaccagccauccua

SEQ ID NO: 1938451 - RNA, 19 nt, Homo sapiens
  misc_RNA (1)...(19): siRNA sense strand
ggacaucugcaagcuccua

SEQ ID NO: 1938452 - RNA, 19 nt, Homo sapiens
  misc_RNA (1)...(19): siRNA sense strand
caccugugcccuccuaauu

SEQ ID NO: 1938453 - RNA, 19 nt, Homo sapiens
  misc_RNA (1)...(19): siRNA sense strand
cagacagcauccucaguca

SEQ ID NO: 1938454 - RNA, 19 nt, Homo sapiens
  misc_RNA (1)...(19): siRNA sense strand
gcacuccuccugccaacuc

SEQ ID NO: 1938455 - RNA, 19 nt, Homo sapiens
  misc_RNA (1)...(19): siRNA sense strand
caccaccugugcccuccua

SEQ ID NO: 1938456 - RNA, 19 nt, Homo sapiens
  misc_RNA (1)...(19): siRNA sense strand
uaccuccucuggccaugaa

SEQ ID NO: 1938457 - RNA, 19 nt, Homo sapiens
  misc_RNA (1)...(19): siRNA sense strand
ucggccaccuuccuaauuc

SEQ ID NO: 1938458 - RNA, 19 nt, Homo sapiens
  misc_RNA (1)...(19): siRNA sense strand
gcuccuagaggcugucugu

SEQ ID NO: 1938459 - RNA, 19 nt, Homo sapiens
  misc_RNA (1)...(19): siRNA sense strand
cucaugcaccugcugcuua

SEQ ID NO: 1938460 - RNA, 19 nt, Homo sapiens
  misc_RNA (1)...(19): siRNA sense strand
ccugucaucucuccuugca

SEQ ID NO: 1938461 - RNA, 19 nt, Homo sapiens
  misc_RNA (1)...(19): siRNA sense strand
cauccucagucacgagaag

SEQ ID NO: 1938462 - RNA, 19 nt, Homo sapiens
  misc_RNA (1)...(19): siRNA sense strand
caugggacuugaugugaac

SEQ ID NO: 1938463 - RNA, 19 nt, Homo sapiens
  misc_RNA (1)...(19): siRNA sense strand
gcagacagagcuccaugcu

SEQ ID NO: 1938464 - RNA, 19 nt, Homo sapiens
  misc_RNA (1)...(19): siRNA sense strand
ccucugaucaugggacuug

SEQ ID NO: 1938465 - RNA, 19 nt, Homo sapiens
  misc_RNA (1)...(19): siRNA sense strand
acacugccauccauuauga

SEQ ID NO: 1938466 - RNA, 19 nt, Homo sapiens
  misc_RNA (1)...(19): siRNA sense strand
ggaggauaaggaugaauuu

SEQ ID NO: 1938467 - RNA, 19 nt, Homo sapiens
  misc_RNA (1)...(19): siRNA sense strand
gggaggauaaggaugaauu

SEQ ID NO: 1938468 - RNA, 19 nt, Homo sapiens
  misc_RNA (1)...(19): siRNA sense strand
ugccauccauuaugacuga

SEQ ID NO: 1938469 - RNA, 19 nt, Homo sapiens
  misc_RNA (1)...(19): siRNA sense strand
acagauugaugaggaagaa

SEQ ID NO: 1938470 - RNA, 19 nt, Homo sapiens
  misc_RNA (1)...(19): siRNA sense strand
gguccugggugucauuugg

SEQ ID NO: 1938471 - RNA, 19 nt, Homo sapiens
  misc_RNA (1)...(19): siRNA sense strand
cagcaauuaccuacagauu

SEQ ID NO: 1938472 - RNA, 19 nt, Homo sapiens
  misc_RNA (1)...(19): siRNA sense strand
gauucugccugaucaaugc

SEQ ID NO: 1938473 - RNA, 19 nt, Homo sapiens
  misc_RNA (1)...(19): siRNA sense strand
cgaggguucuugggaauag

SEQ ID NO: 1938474 - RNA, 19 nt, Homo sapiens
  misc_RNA (1)...(19): siRNA sense strand
agauugaugaggaagaaua

SEQ ID NO: 1938475 - RNA, 19 nt, Homo sapiens
  misc_RNA (1)...(19): siRNA sense strand
ggauucugccugaucaaug

SEQ ID NO: 1938476 - RNA, 19 nt, Homo sapiens
  misc_RNA (1)...(19): siRNA sense strand
aaggguuuaugaccucuuu

SEQ ID NO: 1938477 - RNA, 19 nt, Homo sapiens
  misc_RNA (1)...(19): siRNA sense strand
gauugaugaggaagaauau

SEQ ID NO: 1938478 - RNA, 19 nt, Homo sapiens
  misc_RNA (1)...(19): siRNA sense strand
ggucauuuggaucaucuuu

SEQ ID NO: 1938479 - RNA, 19 nt, Homo sapiens
  misc_RNA (1)...(19): siRNA sense strand
uaccucuacuucagcaauu

SEQ ID NO: 1938480 - RNA, 19 nt, Homo sapiens
  misc_RNA (1)...(19): siRNA sense strand
gcucacgaaggaaggguuu

SEQ ID NO: 1938481 - RNA, 19 nt, Homo sapiens
  misc_RNA (1)...(19): siRNA sense strand
ccugggaggauaaggauga

SEQ ID NO: 1938482 - RNA, 19 nt, Homo sapiens
  misc_RNA (1)...(19): siRNA sense strand
cuacuucagcaauuaccua

SEQ ID NO: 1938483 - RNA, 19 nt, Homo sapiens
  misc_RNA (1)...(19): siRNA sense strand
guaccucuacuucagcaau

SEQ ID NO: 1938484 - RNA, 19 nt, Homo sapiens
  misc_RNA (1)...(19): siRNA sense strand
ccuacagauugaugaggaa

SEQ ID NO: 1938485 - RNA, 19 nt, Homo sapiens
  misc_RNA (1)...(19): siRNA sense strand
uuacacugccauccauuau

SEQ ID NO: 1938486 - RNA, 19 nt, Homo sapiens
  misc_RNA (1)...(19): siRNA sense strand
acgaaggaaggguuuauga

SEQ ID NO: 1938487 - RNA, 19 nt, Homo sapiens
  misc_RNA (1)...(19): siRNA sense strand
cuucagcaauuaccuacag

SEQ ID NO: 1938488 - RNA, 19 nt, Homo sapiens
  misc_RNA (1)...(19): siRNA sense strand
uuuacacugccauccauua

SEQ ID NO: 1938489 - RNA, 19 nt, Homo sapiens
  misc_RNA (1)...(19): siRNA sense strand
ucacgaaggaaggguuuau

SEQ ID NO: 1938490 - RNA, 19 nt, Homo sapiens
  misc_RNA (1)...(19): siRNA sense strand
ggaaggaguugccagauag

SEQ ID NO: 1938491 - RNA, 19 nt, Homo sapiens
  misc_RNA (1)...(19): siRNA sense strand
agacacagguuuauuucaa

SEQ ID NO: 1938492 - RNA, 19 nt, Homo sapiens
  misc_RNA (1)...(19): siRNA sense strand
uggaaggaguugccagaua

SEQ ID NO: 1938493 - RNA, 19 nt, Homo sapiens
  misc_RNA (1)...(19): siRNA sense strand
gccagacacagguuuauuu

SEQ ID NO: 1938494 - RNA, 19 nt, Homo sapiens
  misc_RNA (1)...(19): siRNA sense strand
ucacuucagacuucccuua

SEQ ID NO: 1938495 - RNA, 19 nt, Homo sapiens
  misc_RNA (1)...(19): siRNA sense strand
aaggcuccauuccuacuua

SEQ ID NO: 1938496 - RNA, 19 nt, Homo sapiens
  misc_RNA (1)...(19): siRNA sense strand
cagcucgacugcucacuuc

SEQ ID NO: 1938497 - RNA, 19 nt, Homo sapiens
  misc_RNA (1)...(19): siRNA sense strand
ccagauagagcaaguaaaa

SEQ ID NO: 1938498 - RNA, 19 nt, Homo sapiens
  misc_RNA (1)...(19): siRNA sense strand
gaaggaguugccagauaga

SEQ ID NO: 1938499 - RNA, 19 nt, Homo sapiens
  misc_RNA (1)...(19): siRNA sense strand
cuucagacuucccuuaugg

SEQ ID NO: 1938500 - RNA, 19 nt, Homo sapiens
  misc_RNA (1)...(19): siRNA sense strand
acacagguuuauuucaaca

SEQ ID NO: 1938501 - RNA, 19 nt, Homo sapiens
  misc_RNA (1)...(19): siRNA sense strand
ccagacacagguuuauuuc

SEQ ID NO: 1938502 - RNA, 19 nt, Homo sapiens
  misc_RNA (1)...(19): siRNA sense strand
gaaggcuccauuccuacuu

SEQ ID NO: 1938503 - RNA, 19 nt, Homo sapiens
  misc_RNA (1)...(19): siRNA sense strand
gacacagguuuauuucaac

SEQ ID NO: 1938504 - RNA, 19 nt, Homo sapiens
  misc_RNA (1)...(19): siRNA sense strand
acacugggaaggcuccauu

SEQ ID NO: 1938505 - RNA, 19 nt, Homo sapiens
  misc_RNA (1)...(19): siRNA sense strand
ggaagaagaucgaacauga

SEQ ID NO: 1938506 - RNA, 19 nt, Homo sapiens
  misc_RNA (1)...(19): siRNA sense strand
gcacaaacccgcaaagagu

SEQ ID NO: 1938507 - RNA, 19 nt, Homo sapiens
  misc_RNA (1)...(19): siRNA sense strand
gaacaugacguggugauga

SEQ ID NO: 1938508 - RNA, 19 nt, Homo sapiens
  misc_RNA (1)...(19): siRNA sense strand
gaaccuagaagucggaauc

SEQ ID NO: 1938509 - RNA, 19 nt, Homo sapiens
  misc_RNA (1)...(19): siRNA sense strand
caagaagaaccuagaaguc

SEQ ID NO: 1938510 - RNA, 19 nt, Homo sapiens
  misc_RNA (1)...(19): siRNA sense strand
cacaaacccgcaaagagua

SEQ ID NO: 1938511 - RNA, 19 nt, Homo sapiens
  misc_RNA (1)...(19): siRNA sense strand
agaaaaggcggucguguua

SEQ ID NO: 1938512 - RNA, 19 nt, Homo sapiens
  misc_RNA (1)...(19): siRNA sense strand
agcaaaagcucaagaagaa

SEQ ID NO: 1938513 - RNA, 19 nt, Homo sapiens
  misc_RNA (1)...(19): siRNA sense strand
aacaugacguggugaugaa

SEQ ID NO: 1938514 - RNA, 19 nt, Homo sapiens
  misc_RNA (1)...(19): siRNA sense strand
ucaagaagaaccuagaagu

SEQ ID NO: 1938515 - RNA, 19 nt, Homo sapiens
  misc_RNA (1)...(19): siRNA sense strand
gcucaagaagaaccuagaa

SEQ ID NO: 1938516 - RNA, 19 nt, Homo sapiens
  misc_RNA (1)...(19): siRNA sense strand
uguuaucgcucccaagaag

SEQ ID NO: 1938517 - RNA, 19 nt, Homo sapiens
  misc_RNA (1)...(19): siRNA sense strand
gaagaagaucgaacaugac

SEQ ID NO: 1938518 - RNA, 19 nt, Homo sapiens
  misc_RNA (1)...(19): siRNA sense strand
acaaacccgcaaagaguaa

SEQ ID NO: 1938519 - RNA, 19 nt, Homo sapiens
  misc_RNA (1)...(19): siRNA sense strand
gcgcacaaacccgcaaaga

SEQ ID NO: 1938520 - RNA, 19 nt, Homo sapiens
  misc_RNA (1)...(19): siRNA sense strand
gcagcggcagccucugaaa

SEQ ID NO: 1938521 - RNA, 19 nt, Homo sapiens
  misc_RNA (1)...(19): siRNA sense strand
gaagcuggcacugcugaag

SEQ ID NO: 1938522 - RNA, 19 nt, Homo sapiens
  misc_RNA (1)...(19): siRNA sense strand
aaaaggcggucguguuauc

SEQ ID NO: 1938523 - RNA, 19 nt, Homo sapiens
  misc_RNA (1)...(19): siRNA sense strand
cguguuaucgcucccaaga

SEQ ID NO: 1938524 - RNA, 19 nt, Homo sapiens
  misc_RNA (1)...(19): siRNA sense strand
ccaaugugcuggaauuaca

SEQ ID NO: 1938525 - RNA, 19 nt, Homo sapiens
  misc_RNA (1)...(19): siRNA sense strand
gugcuggaauuacagguau

SEQ ID NO: 1938526 - RNA, 19 nt, Homo sapiens
  misc_RNA (1)...(19): siRNA sense strand
gaggguuggucucaaacuc

SEQ ID NO: 1938527 - RNA, 19 nt, Homo sapiens
  misc_RNA (1)...(19): siRNA sense strand
ucaaacuccugggcucaug

SEQ ID NO: 1938528 - RNA, 19 nt, Homo sapiens
  misc_RNA (1)...(19): siRNA sense strand
cuccugggcucaugcaauc

SEQ ID NO: 1938529 - RNA, 19 nt, Homo sapiens
  misc_RNA (1)...(19): siRNA sense strand
cucccaaugugcuggaauu

SEQ ID NO: 1938530 - RNA, 19 nt, Homo sapiens
  misc_RNA (1)...(19): siRNA sense strand
cagcgaggguuggucucaa

SEQ ID NO: 1938531 - RNA, 19 nt, Homo sapiens
  misc_RNA (1)...(19): siRNA sense strand
gcuggaauuacagguauga

SEQ ID NO: 1938532 - RNA, 19 nt, Homo sapiens
  misc_RNA (1)...(19): siRNA sense strand
ggaggcagcgugaguguga

SEQ ID NO: 1938533 - RNA, 19 nt, Homo sapiens
  misc_RNA (1)...(19): siRNA sense strand
gcagaugcagcucucauga

SEQ ID NO: 1938534 - RNA, 19 nt, Homo sapiens
  misc_RNA (1)...(19): siRNA sense strand
gcuguacgcgucaugauag

SEQ ID NO: 1938535 - RNA, 19 nt, Homo sapiens
  misc_RNA (1)...(19): siRNA sense strand
ggcuguacgcgucaugaua

SEQ ID NO: 1938536 - RNA, 19 nt, Homo sapiens
  misc_RNA (1)...(19): siRNA sense strand
ggaccugcagggacaagga

SEQ ID NO: 1938537 - RNA, 19 nt, Homo sapiens
  misc_RNA (1)...(19): siRNA sense strand
gccaucagcccgugaaugc

SEQ ID NO: 1938538 - RNA, 19 nt, Homo sapiens
  misc_RNA (1)...(19): siRNA sense strand
caggugauguggcgaugag

SEQ ID NO: 1938539 - RNA, 19 nt, Homo sapiens
  misc_RNA (1)...(19): siRNA sense strand
gauggugccaggugaugug

SEQ ID NO: 1938540 - RNA, 19 nt, Homo sapiens
  misc_RNA (1)...(19): siRNA sense strand
gcacagauauuuggaauuu

SEQ ID NO: 1938541 - RNA, 19 nt, Homo sapiens
  misc_RNA (1)...(19): siRNA sense strand
gcaauugccuucaaagaaa

SEQ ID NO: 1938542 - RNA, 19 nt, Homo sapiens
  misc_RNA (1)...(19): siRNA sense strand
gaagaguacuccuauaaga

SEQ ID NO: 1938543 - RNA, 19 nt, Homo sapiens
  misc_RNA (1)...(19): siRNA sense strand
caaacagacuacccugaua

SEQ ID NO: 1938544 - RNA, 19 nt, Homo sapiens
  misc_RNA (1)...(19): siRNA sense strand
caaaucuccuggcuuguaa

SEQ ID NO: 1938545 - RNA, 19 nt, Homo sapiens
  misc_RNA (1)...(19): siRNA sense strand
gugcuuggcuucuucauga

SEQ ID NO: 1938546 - RNA, 19 nt, Homo sapiens
  misc_RNA (1)...(19): siRNA sense strand
uaucaugacuggugccuuu

SEQ ID NO: 1938547 - RNA, 19 nt, Homo sapiens
  misc_RNA (1)...(19): siRNA sense strand
ugaaaucacuuacccugaa

SEQ ID NO: 1938548 - RNA, 19 nt, Homo sapiens
  misc_RNA (1)...(19): siRNA sense strand
aaggaaagcucacaucaga

SEQ ID NO: 1938549 - RNA, 19 nt, Homo sapiens
  misc_RNA (1)...(19): siRNA sense strand
uaacagcaauugccuucaa

SEQ ID NO: 1938550 - RNA, 19 nt, Homo sapiens
  misc_RNA (1)...(19): siRNA sense strand
gcuuauggcuggauuauac

SEQ ID NO: 1938551 - RNA, 19 nt, Homo sapiens
  misc_RNA (1)...(19): siRNA sense strand
ucacuuacccugaaucuga

SEQ ID NO: 1938552 - RNA, 19 nt, Homo sapiens
  misc_RNA (1)...(19): siRNA sense strand
gaaaucacuuacccugaau

SEQ ID NO: 1938553 - RNA, 19 nt, Homo sapiens
  misc_RNA (1)...(19): siRNA sense strand
cgaagacacaacauaaaua

SEQ ID NO: 1938554 - RNA, 19 nt, Homo sapiens
  misc_RNA (1)...(19): siRNA sense strand
cagcauuaaucaagucuga

SEQ ID NO: 1938555 - RNA, 19 nt, Homo sapiens
  misc_RNA (1)...(19): siRNA sense strand
gaucacuuaugguaucaug

SEQ ID NO: 1938556 - RNA, 19 nt, Homo sapiens
  misc_RNA (1)...(19): siRNA sense strand
gcagucagaaucagcaauu

SEQ ID NO: 1938557 - RNA, 19 nt, Homo sapiens
  misc_RNA (1)...(19): siRNA sense strand
cauuggaccuuagauauau

SEQ ID NO: 1938558 - RNA, 19 nt, Homo sapiens
  misc_RNA (1)...(19): siRNA sense strand
caucuggucuucuuaaugc

SEQ ID NO: 1938559 - RNA, 19 nt, Homo sapiens
  misc_RNA (1)...(19): siRNA sense strand
gcgaagacacaacauaaau

SEQ ID NO: 1938560 - RNA, 19 nt, Homo sapiens
  misc_RNA (1)...(19): siRNA sense strand
ucacauuggaccuuagaua

SEQ ID NO: 1938561 - RNA, 19 nt, Homo sapiens
  misc_RNA (1)...(19): siRNA sense strand
uaacagcauuaaucaaguc

SEQ ID NO: 1938562 - RNA, 19 nt, Homo sapiens
  misc_RNA (1)...(19): siRNA sense strand
ccacagaccaagaaccaaa

SEQ ID NO: 1938563 - RNA, 19 nt, Homo sapiens
  misc_RNA (1)...(19): siRNA sense strand
cacauuggcucaaggaaag

SEQ ID NO: 1938564 - RNA, 19 nt, Homo sapiens
  misc_RNA (1)...(19): siRNA sense strand
acacacagaaugacacaaa

SEQ ID NO: 1938565 - RNA, 19 nt, Homo sapiens
  misc_RNA (1)...(19): siRNA sense strand
guugaucacuuaugguauc

SEQ ID NO: 1938566 - RNA, 19 nt, Homo sapiens
  misc_RNA (1)...(19): siRNA sense strand
aaagagguguccacagcuu

SEQ ID NO: 1938567 - RNA, 19 nt, Homo sapiens
  misc_RNA (1)...(19): siRNA sense strand
agucaaugcuggaaggauu

SEQ ID NO: 1938568 - RNA, 19 nt, Homo sapiens
  misc_RNA (1)...(19): siRNA sense strand
cugaagaguacuccuauaa

SEQ ID NO: 1938569 - RNA, 19 nt, Homo sapiens
  misc_RNA (1)...(19): siRNA sense strand
ggaaagcucacaucagacu

SEQ ID NO: 1938570 - RNA, 19 nt, Homo sapiens
  misc_RNA (1)...(19): siRNA sense strand
ggauugggcuaacgcuagu

SEQ ID NO: 1938571 - RNA, 19 nt, Homo sapiens
  misc_RNA (1)...(19): siRNA sense strand
agaguacuccuauaagaaa

SEQ ID NO: 1938572 - RNA, 19 nt, Homo sapiens
  misc_RNA (1)...(19): siRNA sense strand
gaagaagucaaugcuggaa

SEQ ID NO: 1938573 - RNA, 19 nt, Homo sapiens
  misc_RNA (1)...(19): siRNA sense strand
acauuggaccuuagauaua

SEQ ID NO: 1938574 - RNA, 19 nt, Homo sapiens
  misc_RNA (1)...(19): siRNA sense strand
ggaaugguuaucuuuacuu

SEQ ID NO: 1938575 - RNA, 19 nt, Homo sapiens
  misc_RNA (1)...(19): siRNA sense strand
ggugggcucuauucuuugu

SEQ ID NO: 1938576 - RNA, 19 nt, Homo sapiens
  misc_RNA (1)...(19): siRNA sense strand
auggugggcucuauucuuu

SEQ ID NO: 1938577 - RNA, 19 nt, Homo sapiens
  misc_RNA (1)...(19): siRNA sense strand
ccugaagaguacuccuaua

SEQ ID NO: 1938578 - RNA, 19 nt, Homo sapiens
  misc_RNA (1)...(19): siRNA sense strand
uaauaucagcaccauguuu

SEQ ID NO: 1938579 - RNA, 19 nt, Homo sapiens
  misc_RNA (1)...(19): siRNA sense strand
guacuccuauaagaaauca

SEQ ID NO: 1938580 - RNA, 19 nt, Homo sapiens
  misc_RNA (1)...(19): siRNA sense strand
ucacauuggcucaaggaaa

SEQ ID NO: 1938581 - RNA, 19 nt, Homo sapiens
  misc_RNA (1)...(19): siRNA sense strand
ggaauuacaaauguugaug

SEQ ID NO: 1938582 - RNA, 19 nt, Homo sapiens
  misc_RNA (1)...(19): siRNA sense strand
gucagaaucagcaauuuga

SEQ ID NO: 1938583 - RNA, 19 nt, Homo sapiens
  misc_RNA (1)...(19): siRNA sense strand
ucuccuggcuuguaauauc

SEQ ID NO: 1938584 - RNA, 19 nt, Homo sapiens
  misc_RNA (1)...(19): siRNA sense strand
uguaauaucagcaccaugu

SEQ ID NO: 1938585 - RNA, 19 nt, Homo sapiens
  misc_RNA (1)...(19): siRNA sense strand
gaaagcucacaucagacua

SEQ ID NO: 1938586 - RNA, 19 nt, Homo sapiens
  misc_RNA (1)...(19): siRNA sense strand
cacauuggaccuuagauau

SEQ ID NO: 1938587 - RNA, 19 nt, Homo sapiens
  misc_RNA (1)...(19): siRNA sense strand
gaguacuccuauaagaaau

SEQ ID NO: 1938588 - RNA, 19 nt, Homo sapiens
  misc_RNA (1)...(19): siRNA sense strand
aaaccucgguauccaccaa

SEQ ID NO: 1938589 - RNA, 19 nt, Homo sapiens
  misc_RNA (1)...(19): siRNA sense strand
cugcgaagacacaacauaa

SEQ ID NO: 1938590 - RNA, 19 nt, Homo sapiens
  misc_RNA (1)...(19): siRNA sense strand
gaucugcgaagacacaaca

SEQ ID NO: 1938591 - RNA, 19 nt, Homo sapiens
  misc_RNA (1)...(19): siRNA sense strand
ucaaggaaagcucacauca

SEQ ID NO: 1938592 - RNA, 19 nt, Homo sapiens
  misc_RNA (1)...(19): siRNA sense strand
gcuucuucaugacugguua

SEQ ID NO: 1938593 - RNA, 19 nt, Homo sapiens
  misc_RNA (1)...(19): siRNA sense strand
guacccaacacacagaaug

SEQ ID NO: 1938594 - RNA, 19 nt, Homo sapiens
  misc_RNA (1)...(19): siRNA sense strand
gacacaacauaaauauagg

SEQ ID NO: 1938595 - RNA, 19 nt, Homo sapiens
  misc_RNA (1)...(19): siRNA sense strand
cagcaauugccuucaaaga

SEQ ID NO: 1938596 - RNA, 19 nt, Homo sapiens
  misc_RNA (1)...(19): siRNA sense strand
caucagcuguugccacacu

SEQ ID NO: 1938597 - RNA, 19 nt, Homo sapiens
  misc_RNA (1)...(19): siRNA sense strand
ggcaucauauuaacagcau

SEQ ID NO: 1938598 - RNA, 19 nt, Homo sapiens
  misc_RNA (1)...(19): siRNA sense strand
ccuaaggcagggaacauuu

SEQ ID NO: 1938599 - RNA, 19 nt, Homo sapiens
  misc_RNA (1)...(19): siRNA sense strand
aaacagacuacccugauag

SEQ ID NO: 1938600 - RNA, 19 nt, Homo sapiens
  misc_RNA (1)...(19): siRNA sense strand
ucaccuugcugcacaucga

SEQ ID NO: 1938601 - RNA, 19 nt, Homo sapiens
  misc_RNA (1)...(19): siRNA sense strand
ugagggagaagaagucaau

SEQ ID NO: 1938602 - RNA, 19 nt, Homo sapiens
  misc_RNA (1)...(19): siRNA sense strand
aagaguacuccuauaagaa

SEQ ID NO: 1938603 - RNA, 19 nt, Homo sapiens
  misc_RNA (1)...(19): siRNA sense strand
gauccaguacagcaucauu

SEQ ID NO: 1938604 - RNA, 19 nt, Homo sapiens
  misc_RNA (1)...(19): siRNA sense strand
caacacacagaaugacaca

SEQ ID NO: 1938605 - RNA, 19 nt, Homo sapiens
  misc_RNA (1)...(19): siRNA sense strand
caagucugaucugcgaaga

SEQ ID NO: 1938606 - RNA, 19 nt, Homo sapiens
  misc_RNA (1)...(19): siRNA sense strand
cucugugucuggauguuua

SEQ ID NO: 1938607 - RNA, 19 nt, Homo sapiens
  misc_RNA (1)...(19): siRNA sense strand
cugcacagauauuuggaau

SEQ ID NO: 1938608 - RNA, 19 nt, Homo sapiens
  misc_RNA (1)...(19): siRNA sense strand
cuacccugauaguuuauau

SEQ ID NO: 1938609 - RNA, 19 nt, Homo sapiens
  misc_RNA (1)...(19): siRNA sense strand
aaacauacaaacagacuac

SEQ ID NO: 1938610 - RNA, 19 nt, Homo sapiens
  misc_RNA (1)...(19): siRNA sense strand
aaacauuccuuuuguccuu

SEQ ID NO: 1938611 - RNA, 19 nt, Homo sapiens
  misc_RNA (1)...(19): siRNA sense strand
uuuauucagucucaacguu

SEQ ID NO: 1938612 - RNA, 19 nt, Homo sapiens
  misc_RNA (1)...(19): siRNA sense strand
cagucagaaucagcaauuu

SEQ ID NO: 1938613 - RNA, 19 nt, Homo sapiens
  misc_RNA (1)...(19): siRNA sense strand
cacacagaaugacacaaau

SEQ ID NO: 1938614 - RNA, 19 nt, Homo sapiens
  misc_RNA (1)...(19): siRNA sense strand
uuauucagucucaacguua

SEQ ID NO: 1938615 - RNA, 19 nt, Homo sapiens
  misc_RNA (1)...(19): siRNA sense strand
guccuucuguugaucacuu

SEQ ID NO: 1938616 - RNA, 19 nt, Homo sapiens
  misc_RNA (1)...(19): siRNA sense strand
aacagcaauugccuucaaa

SEQ ID NO: 1938617 - RNA, 19 nt, Homo sapiens
  misc_RNA (1)...(19): siRNA sense strand
gcucacaucagacuauggu

SEQ ID NO: 1938618 - RNA, 19 nt, Homo sapiens
  misc_RNA (1)...(19): siRNA sense strand
acaaacagacuacccugau

SEQ ID NO: 1938619 - RNA, 19 nt, Homo sapiens
  misc_RNA (1)...(19): siRNA sense strand
gcuggaaggauugggcuaa

SEQ ID NO: 1938620 - RNA, 19 nt, Homo sapiens
  misc_RNA (1)...(19): siRNA sense strand
uauucagucucaacguuau

SEQ ID NO: 1938621 - RNA, 19 nt, Homo sapiens
  misc_RNA (1)...(19): siRNA sense strand
guaauaucagcaccauguu

SEQ ID NO: 1938622 - RNA, 19 nt, Homo sapiens
  misc_RNA (1)...(19): siRNA sense strand
cacuuacccugaaucugaa

SEQ ID NO: 1938623 - RNA, 19 nt, Homo sapiens
  misc_RNA (1)...(19): siRNA sense strand
aaucuccuggcuuguaaua

SEQ ID NO: 1938624 - RNA, 19 nt, Homo sapiens
  misc_RNA (1)...(19): siRNA sense strand
aaagcucacaucagacuau

SEQ ID NO: 1938625 - RNA, 19 nt, Homo sapiens
  misc_RNA (1)...(19): siRNA sense strand
ggaauuuuguucacauugg

SEQ ID NO: 1938626 - RNA, 19 nt, Homo sapiens
  misc_RNA (1)...(19): siRNA sense strand
gguuaucuuuacuuucaca

SEQ ID NO: 1938627 - RNA, 19 nt, Homo sapiens
  misc_RNA (1)...(19): siRNA sense strand
ugaagaguacuccuauaag

SEQ ID NO: 1938628 - RNA, 19 nt, Homo sapiens
  misc_RNA (1)...(19): siRNA sense strand
agcaauugccuucaaagaa

SEQ ID NO: 1938629 - RNA, 19 nt, Homo sapiens
  misc_RNA (1)...(19): siRNA sense strand
ugggcuaacgcuaguagua

SEQ ID NO: 1938630 - RNA, 19 nt, Homo sapiens
  misc_RNA (1)...(19): siRNA sense strand
cagcugacagucccacaga

SEQ ID NO: 1938631 - RNA, 19 nt, Homo sapiens
  misc_RNA (1)...(19): siRNA sense strand
caucagacuaugguccuaa

SEQ ID NO: 1938632 - RNA, 19 nt, Homo sapiens
  misc_RNA (1)...(19): siRNA sense strand
caagugcggcagugugcaa

SEQ ID NO: 1938633 - RNA, 19 nt, Homo sapiens
  misc_RNA (1)...(19): siRNA sense strand
gggcuaacgcuaguaguag

SEQ ID NO: 1938634 - RNA, 19 nt, Homo sapiens
  misc_RNA (1)...(19): siRNA sense strand
caauugccuucaaagaaaa

SEQ ID NO: 1938635 - RNA, 19 nt, Homo sapiens
  misc_RNA (1)...(19): siRNA sense strand
caaggaaagcucacaucag

SEQ ID NO: 1938636 - RNA, 19 nt, Homo sapiens
  misc_RNA (1)...(19): siRNA sense strand
caguacagcaucauuagca

SEQ ID NO: 1938637 - RNA, 19 nt, Homo sapiens
  misc_RNA (1)...(19): siRNA sense strand
gucucaacguuauuaaauc

SEQ ID NO: 1938638 - RNA, 19 nt, Homo sapiens
  misc_RNA (1)...(19): siRNA sense strand
gugcggcagugugcaacaa

SEQ ID NO: 1938639 - RNA, 19 nt, Homo sapiens
  misc_RNA (1)...(19): siRNA sense strand
gaagucaaugcuggaagga

SEQ ID NO: 1938640 - RNA, 19 nt, Homo sapiens
  misc_RNA (1)...(19): siRNA sense strand
gaagcaguaugaccaguuc

SEQ ID NO: 1938641 - RNA, 19 nt, Homo sapiens
  misc_RNA (1)...(19): siRNA sense strand
ggaauguggaagaugauua

SEQ ID NO: 1938642 - RNA, 19 nt, Homo sapiens
  misc_RNA (1)...(19): siRNA sense strand
ggaaggagaagcagcagaa

SEQ ID NO: 1938643 - RNA, 19 nt, Homo sapiens
  misc_RNA (1)...(19): siRNA sense strand
gucaagcaauguaaagauu

SEQ ID NO: 1938644 - RNA, 19 nt, Homo sapiens
  misc_RNA (1)...(19): siRNA sense strand
gaauguggaagaugauuau

SEQ ID NO: 1938645 - RNA, 19 nt, Homo sapiens
  misc_RNA (1)...(19): siRNA sense strand
guaccgggcacgcuacuuu

SEQ ID NO: 1938646 - RNA, 19 nt, Homo sapiens
  misc_RNA (1)...(19): siRNA sense strand
ccacagagcacagaagaug

SEQ ID NO: 1938647 - RNA, 19 nt, Homo sapiens
  misc_RNA (1)...(19): siRNA sense strand
gcagacuggcccucaaauu

SEQ ID NO: 1938648 - RNA, 19 nt, Homo sapiens
  misc_RNA (1)...(19): siRNA sense strand
gaagcugagcgcuguauca

SEQ ID NO: 1938649 - RNA, 19 nt, Homo sapiens
  misc_RNA (1)...(19): siRNA sense strand
gaaggaaggcuugcuguac

SEQ ID NO: 1938650 - RNA, 19 nt, Homo sapiens
  misc_RNA (1)...(19): siRNA sense strand
gagaagaggaagcaguaug

SEQ ID NO: 1938651 - RNA, 19 nt, Homo sapiens
  misc_RNA (1)...(19): siRNA sense strand
uguggaagaugauuauauc

SEQ ID NO: 1938652 - RNA, 19 nt, Homo sapiens
  misc_RNA (1)...(19): siRNA sense strand
ggaagcaguaugaccaguu

SEQ ID NO: 1938653 - RNA, 19 nt, Homo sapiens
  misc_RNA (1)...(19): siRNA sense strand
agaagaggaagcaguauga

SEQ ID NO: 1938654 - RNA, 19 nt, Homo sapiens
  misc_RNA (1)...(19): siRNA sense strand
ucaaggccauccagagcaa

SEQ ID NO: 1938655 - RNA, 19 nt, Homo sapiens
  misc_RNA (1)...(19): siRNA sense strand
cagacuggcccucaaauuc

SEQ ID NO: 1938656 - RNA, 19 nt, Homo sapiens
  misc_RNA (1)...(19): siRNA sense strand
ugaaaagggucaagcaaug

SEQ ID NO: 1938657 - RNA, 19 nt, Homo sapiens
  misc_RNA (1)...(19): siRNA sense strand
cauaugcgguacucagcaa

SEQ ID NO: 1938658 - RNA, 19 nt, Homo sapiens
  misc_RNA (1)...(19): siRNA sense strand
cggagaagaggaagcagua

SEQ ID NO: 1938659 - RNA, 19 nt, Homo sapiens
  misc_RNA (1)...(19): siRNA sense strand
gaggagagagcaccaaagg

SEQ ID NO: 1938660 - RNA, 19 nt, Homo sapiens
  misc_RNA (1)...(19): siRNA sense strand
caaaggcuacacugcagaa

SEQ ID NO: 1938661 - RNA, 19 nt, Homo sapiens
  misc_RNA (1)...(19): siRNA sense strand
ggucaagcaauguaaagau

SEQ ID NO: 1938662 - RNA, 19 nt, Homo sapiens
  misc_RNA (1)...(19): siRNA sense strand
caaauuccacccagacaag

SEQ ID NO: 1938663 - RNA, 19 nt, Homo sapiens
  misc_RNA (1)...(19): siRNA sense strand
cggaugaggaccugaagaa

SEQ ID NO: 1938664 - RNA, 19 nt, Homo sapiens
  misc_RNA (1)...(19): siRNA sense strand
aggccucccugcauggaua

SEQ ID NO: 1938665 - RNA, 19 nt, Homo sapiens
  misc_RNA (1)...(19): siRNA sense strand
cgcuauaccuaccagcaaa

SEQ ID NO: 1938666 - RNA, 19 nt, Homo sapiens
  misc_RNA (1)...(19): siRNA sense strand
agaaggaaggcuugcugua

SEQ ID NO: 1938667 - RNA, 19 nt, Homo sapiens
  misc_RNA (1)...(19): siRNA sense strand
ggagaagcagcagaaggaa

SEQ ID NO: 1938668 - RNA, 19 nt, Homo sapiens
  misc_RNA (1)...(19): siRNA sense strand
gcaacccggagaagaggaa

SEQ ID NO: 1938669 - RNA, 19 nt, Homo sapiens
  misc_RNA (1)...(19): siRNA sense strand
cauccugauucucguguca

SEQ ID NO: 1938670 - RNA, 19 nt, Homo sapiens
  misc_RNA (1)...(19): siRNA sense strand
ucaaauuccacccagacaa

SEQ ID NO: 1938671 - RNA, 19 nt, Homo sapiens
  misc_RNA (1)...(19): siRNA sense strand
aggagaagcagcagaagga

SEQ ID NO: 1938672 - RNA, 19 nt, Homo sapiens
  misc_RNA (1)...(19): siRNA sense strand
agcggaauguggaagauga

SEQ ID NO: 1938673 - RNA, 19 nt, Homo sapiens
  misc_RNA (1)...(19): siRNA sense strand
gcgcuauaccuaccagcaa

SEQ ID NO: 1938674 - RNA, 19 nt, Homo sapiens
  misc_RNA (1)...(19): siRNA sense strand
aaagggucaagcaauguaa

SEQ ID NO: 1938675 - RNA, 19 nt, Homo sapiens
  misc_RNA (1)...(19): siRNA sense strand
ggagaagaggaagcaguau

SEQ ID NO: 1938676 - RNA, 19 nt, Homo sapiens
  misc_RNA (1)...(19): siRNA sense strand
cuacacugcagaacagguu

SEQ ID NO: 1938677 - RNA, 19 nt, Homo sapiens
  misc_RNA (1)...(19): siRNA sense strand
ccaguucggcgaugacaag

SEQ ID NO: 1938678 - RNA, 19 nt, Homo sapiens
  misc_RNA (1)...(19): siRNA sense strand
ucgccaaccuccggaacaa

SEQ ID NO: 1938679 - RNA, 19 nt, Homo sapiens
  misc_RNA (1)...(19): siRNA sense strand
aguccacccuacagucuga

SEQ ID NO: 1938680 - RNA, 19 nt, Homo sapiens
  misc_RNA (1)...(19): siRNA sense strand
gaaaagggucaagcaaugu

SEQ ID NO: 1938681 - RNA, 19 nt, Homo sapiens
  misc_RNA (1)...(19): siRNA sense strand
uaccacagagcacagaaga

SEQ ID NO: 1938682 - RNA, 19 nt, Homo sapiens
  misc_RNA (1)...(19): siRNA sense strand
ggaaacaaauacuaugaag

SEQ ID NO: 1938683 - RNA, 19 nt, Homo sapiens
  misc_RNA (1)...(19): siRNA sense strand
ggacgaaccauaaauucaa

SEQ ID NO: 1938684 - RNA, 19 nt, Homo sapiens
  misc_RNA (1)...(19): siRNA sense strand
gaagacaaauauggaaaca

SEQ ID NO: 1938685 - RNA, 19 nt, Homo sapiens
  misc_RNA (1)...(19): siRNA sense strand
gaagguugguacauuagug

SEQ ID NO: 1938686 - RNA, 19 nt, Homo sapiens
  misc_RNA (1)...(19): siRNA sense strand
caaauacuaugaagacaac

SEQ ID NO: 1938687 - RNA, 19 nt, Homo sapiens
  misc_RNA (1)...(19): siRNA sense strand
ggacaaaugaugcgaaggu

SEQ ID NO: 1938688 - RNA, 19 nt, Homo sapiens
  misc_RNA (1)...(19): siRNA sense strand
cuucaacaccuuacaagua

SEQ ID NO: 1938689 - RNA, 19 nt, Homo sapiens
  misc_RNA (1)...(19): siRNA sense strand
ugcgaagguugguacauua

SEQ ID NO: 1938690 - RNA, 19 nt, Homo sapiens
  misc_RNA (1)...(19): siRNA sense strand
gacaaaugaugcgaagguu

SEQ ID NO: 1938691 - RNA, 19 nt, Homo sapiens
  misc_RNA (1)...(19): siRNA sense strand
cagaacaauauguaccuua

SEQ ID NO: 1938692 - RNA, 19 nt, Homo sapiens
  misc_RNA (1)...(19): siRNA sense strand
gaagacaacaagcaauuuu

SEQ ID NO: 1938693 - RNA, 19 nt, Homo sapiens
  misc_RNA (1)...(19): siRNA sense strand
ucauuuggacgaaccauaa

SEQ ID NO: 1938694 - RNA, 19 nt, Homo sapiens
  misc_RNA (1)...(19): siRNA sense strand
gggaagacaaauauggaaa

SEQ ID NO: 1938695 - RNA, 19 nt, Homo sapiens
  misc_RNA (1)...(19): siRNA sense strand
cauggugccuccugaaugg

SEQ ID NO: 1938696 - RNA, 19 nt, Homo sapiens
  misc_RNA (1)...(19): siRNA sense strand
guaccuuauucuaccacua

SEQ ID NO: 1938697 - RNA, 19 nt, Homo sapiens
  misc_RNA (1)...(19): siRNA sense strand
gguuguauauacuacugaa

SEQ ID NO: 1938698 - RNA, 19 nt, Homo sapiens
  misc_RNA (1)...(19): siRNA sense strand
gcauggugccuccugaaug

SEQ ID NO: 1938699 - RNA, 19 nt, Homo sapiens
  misc_RNA (1)...(19): siRNA sense strand
gaugauccuccaacaacaa

SEQ ID NO: 1938700 - RNA, 19 nt, Homo sapiens
  misc_RNA (1)...(19): siRNA sense strand
caucguuggcuucacagua

SEQ ID NO: 1938701 - RNA, 19 nt, Homo sapiens
  misc_RNA (1)...(19): siRNA sense strand
ugaagacaacaagcaauuu

SEQ ID NO: 1938702 - RNA, 19 nt, Homo sapiens
  misc_RNA (1)...(19): siRNA sense strand
ucaccgauggguuguauau

SEQ ID NO: 1938703 - RNA, 19 nt, Homo sapiens
  misc_RNA (1)...(19): siRNA sense strand
ggaagacaaauauggaaac

SEQ ID NO: 1938704 - RNA, 19 nt, Homo sapiens
  misc_RNA (1)...(19): siRNA sense strand
ccacuagaaagaagauuca

SEQ ID NO: 1938705 - RNA, 19 nt, Homo sapiens
  misc_RNA (1)...(19): siRNA sense strand
cgucaccgauggguuguau

SEQ ID NO: 1938706 - RNA, 19 nt, Homo sapiens
  misc_RNA (1)...(19): siRNA sense strand
ccagaacaauauguaccuu

SEQ ID NO: 1938707 - RNA, 19 nt, Homo sapiens
  misc_RNA (1)...(19): siRNA sense strand
gacgaaccauaaauucaac

SEQ ID NO: 1938708 - RNA, 19 nt, Homo sapiens
  misc_RNA (1)...(19): siRNA sense strand
uggcaucguuggcuucaca

SEQ ID NO: 1938709 - RNA, 19 nt, Homo sapiens
  misc_RNA (1)...(19): siRNA sense strand
augcgaagguugguacauu

SEQ ID NO: 1938710 - RNA, 19 nt, Homo sapiens
  misc_RNA (1)...(19): siRNA sense strand
gauggguuguauauacuac

SEQ ID NO: 1938711 - RNA, 19 nt, Homo sapiens
  misc_RNA (1)...(19): siRNA sense strand
ccuccugaauggcaucguu

SEQ ID NO: 1938712 - RNA, 19 nt, Homo sapiens
  misc_RNA (1)...(19): siRNA sense strand
ugaugauccuccaacaaca

SEQ ID NO: 1938713 - RNA, 19 nt, Homo sapiens
  misc_RNA (1)...(19): siRNA sense strand
accgauggguuguauauac

SEQ ID NO: 1938714 - RNA, 19 nt, Homo sapiens
  misc_RNA (1)...(19): siRNA sense strand
aucguuggcuucacaguau

SEQ ID NO: 1938715 - RNA, 19 nt, Homo sapiens
  misc_RNA (1)...(19): siRNA sense strand
gacugaugauccuccaaca

SEQ ID NO: 1938716 - RNA, 19 nt, Homo sapiens
  misc_RNA (1)...(19): siRNA sense strand
ccgauggguuguauauacu

SEQ ID NO: 1938717 - RNA, 19 nt, Homo sapiens
  misc_RNA (1)...(19): siRNA sense strand
gcgaagguugguacauuag

SEQ ID NO: 1938718 - RNA, 19 nt, Homo sapiens
  misc_RNA (1)...(19): siRNA sense strand
gaucaugaauggaggaaua

SEQ ID NO: 1938719 - RNA, 19 nt, Homo sapiens
  misc_RNA (1)...(19): siRNA sense strand
gcagcaagcucaagaagaa

SEQ ID NO: 1938720 - RNA, 19 nt, Homo sapiens
  misc_RNA (1)...(19): siRNA sense strand
ggaaagaauugggauguga

SEQ ID NO: 1938721 - RNA, 19 nt, Homo sapiens
  misc_RNA (1)...(19): siRNA sense strand
ggaaugaacugaucaagcu

SEQ ID NO: 1938722 - RNA, 19 nt, Homo sapiens
  misc_RNA (1)...(19): siRNA sense strand
ggacauggaugcuguucug

SEQ ID NO: 1938723 - RNA, 19 nt, Homo sapiens
  misc_RNA (1)...(19): siRNA sense strand
gaaucuaucugccuuugga

SEQ ID NO: 1938724 - RNA, 19 nt, Homo sapiens
  misc_RNA (1)...(19): siRNA sense strand
gaagggaguugagaaggaa

SEQ ID NO: 1938725 - RNA, 19 nt, Homo sapiens
  misc_RNA (1)...(19): siRNA sense strand
gaaggagaauaccaaggaa

SEQ ID NO: 1938726 - RNA, 19 nt, Homo sapiens
  misc_RNA (1)...(19): siRNA sense strand
ugaaaguacuugaggauca

SEQ ID NO: 1938727 - RNA, 19 nt, Homo sapiens
  misc_RNA (1)...(19): siRNA sense strand
gaacaggcagggcguuuga

SEQ ID NO: 1938728 - RNA, 19 nt, Homo sapiens
  misc_RNA (1)...(19): siRNA sense strand
gcagagaggaagaucauga

SEQ ID NO: 1938729 - RNA, 19 nt, Homo sapiens
  misc_RNA (1)...(19): siRNA sense strand
gcacugagacacuggagaa

SEQ ID NO: 1938730 - RNA, 19 nt, Homo sapiens
  misc_RNA (1)...(19): siRNA sense strand
cugcauagcuacaugaaug

SEQ ID NO: 1938731 - RNA, 19 nt, Homo sapiens
  misc_RNA (1)...(19): siRNA sense strand
ucacaggggugccuuguua

SEQ ID NO: 1938732 - RNA, 19 nt, Homo sapiens
  misc_RNA (1)...(19): siRNA sense strand
agacacagcagaauaaaga

SEQ ID NO: 1938733 - RNA, 19 nt, Homo sapiens
  misc_RNA (1)...(19): siRNA sense strand
ggaagcagcggcacugaga

SEQ ID NO: 1938734 - RNA, 19 nt, Homo sapiens
  misc_RNA (1)...(19): siRNA sense strand
caaagaugauagugacaau

SEQ ID NO: 1938735 - RNA, 19 nt, Homo sapiens
  misc_RNA (1)...(19): siRNA sense strand
ugagagccuugaagaguuu

SEQ ID NO: 1938736 - RNA, 19 nt, Homo sapiens
  misc_RNA (1)...(19): siRNA sense strand
ggaguggaaugaacugauc

SEQ ID NO: 1938737 - RNA, 19 nt, Homo sapiens
  misc_RNA (1)...(19): siRNA sense strand
uuccagaucucacuguaua

SEQ ID NO: 1938738 - RNA, 19 nt, Homo sapiens
  misc_RNA (1)...(19): siRNA sense strand
gcggaaagcuuuguaugca

SEQ ID NO: 1938739 - RNA, 19 nt, Homo sapiens
  misc_RNA (1)...(19): siRNA sense strand
gaacugcagcuucuaugga

SEQ ID NO: 1938740 - RNA, 19 nt, Homo sapiens
  misc_RNA (1)...(19): siRNA sense strand
agaggaagaucaugaaugg

SEQ ID NO: 1938741 - RNA, 19 nt, Homo sapiens
  misc_RNA (1)...(19): siRNA sense strand
gaaagaauugggaugugaa

SEQ ID NO: 1938742 - RNA, 19 nt, Homo sapiens
  misc_RNA (1)...(19): siRNA sense strand
caaccgaacugcagcuucu

SEQ ID NO: 1938743 - RNA, 19 nt, Homo sapiens
  misc_RNA (1)...(19): siRNA sense strand
gggaugggccugugucuga

SEQ ID NO: 1938744 - RNA, 19 nt, Homo sapiens
  misc_RNA (1)...(19): siRNA sense strand
cagcagacacagcagaaua

SEQ ID NO: 1938745 - RNA, 19 nt, Homo sapiens
  misc_RNA (1)...(19): siRNA sense strand
ccgaguggcugauuccuau

SEQ ID NO: 1938746 - RNA, 19 nt, Homo sapiens
  misc_RNA (1)...(19): siRNA sense strand
cugaggagccuguauauga

SEQ ID NO: 1938747 - RNA, 19 nt, Homo sapiens
  misc_RNA (1)...(19): siRNA sense strand
caacucagaccaaaugcaa

SEQ ID NO: 1938748 - RNA, 19 nt, Homo sapiens
  misc_RNA (1)...(19): siRNA sense strand
uaacaaacugggcagcuuu

SEQ ID NO: 1938749 - RNA, 19 nt, Homo sapiens
  misc_RNA (1)...(19): siRNA sense strand
gcaaagaugauagugacaa

SEQ ID NO: 1938750 - RNA, 19 nt, Homo sapiens
  misc_RNA (1)...(19): siRNA sense strand
uguaugcacugauggagaa

SEQ ID NO: 1938751 - RNA, 19 nt, Homo sapiens
  misc_RNA (1)...(19): siRNA sense strand
gagaggaagaucaugaaug

SEQ ID NO: 1938752 - RNA, 19 nt, Homo sapiens
  misc_RNA (1)...(19): siRNA sense strand
ggaucccacuguccucuga

SEQ ID NO: 1938753 - RNA, 19 nt, Homo sapiens
  misc_RNA (1)...(19): siRNA sense strand
gcaucuagguaccaaugga

SEQ ID NO: 1938754 - RNA, 19 nt, Homo sapiens
  misc_RNA (1)...(19): siRNA sense strand
cauggaugcuguucuguca

SEQ ID NO: 1938755 - RNA, 19 nt, Homo sapiens
  misc_RNA (1)...(19): siRNA sense strand
gcugauuccuauagcaaug

SEQ ID NO: 1938756 - RNA, 19 nt, Homo sapiens
  misc_RNA (1)...(19): siRNA sense strand
cagcugagucuguugguaa

SEQ ID NO: 1938757 - RNA, 19 nt, Homo sapiens
  misc_RNA (1)...(19): siRNA sense strand
cugagacacuggagaagaa

SEQ ID NO: 1938758 - RNA, 19 nt, Homo sapiens
  misc_RNA (1)...(19): siRNA sense strand
gaaugcaucuagguaccaa

SEQ ID NO: 1938759 - RNA, 19 nt, Homo sapiens
  misc_RNA (1)...(19): siRNA sense strand
agaagggaguugagaagga

SEQ ID NO: 1938760 - RNA, 19 nt, Homo sapiens
  misc_RNA (1)...(19): siRNA sense strand
guucugaggagccuguaua

SEQ ID NO: 1938761 - RNA, 19 nt, Homo sapiens
  misc_RNA (1)...(19): siRNA sense strand
gguauacacagaagaugaa

SEQ ID NO: 1938762 - RNA, 19 nt, Homo sapiens
  misc_RNA (1)...(19): siRNA sense strand
uaacggagggagcaaguau

SEQ ID NO: 1938763 - RNA, 19 nt, Homo sapiens
  misc_RNA (1)...(19): siRNA sense strand
caagcugugaucccacuua

SEQ ID NO: 1938764 - RNA, 19 nt, Homo sapiens
  misc_RNA (1)...(19): siRNA sense strand
cucagaggcugcuuccuuu

SEQ ID NO: 1938765 - RNA, 19 nt, Homo sapiens
  misc_RNA (1)...(19): siRNA sense strand
ccgauuggccaguguaauu

SEQ ID NO: 1938766 - RNA, 19 nt, Homo sapiens
  misc_RNA (1)...(19): siRNA sense strand
gcaugcagccucccuugga

SEQ ID NO: 1938767 - RNA, 19 nt, Homo sapiens
  misc_RNA (1)...(19): siRNA sense strand
gcacagcaaggguucaaag

SEQ ID NO: 1938768 - RNA, 19 nt, Homo sapiens
  misc_RNA (1)...(19): siRNA sense strand
gcagaaggaguggaaugaa

SEQ ID NO: 1938769 - RNA, 19 nt, Homo sapiens
  misc_RNA (1)...(19): siRNA sense strand
gcagacacagcagaauaaa

SEQ ID NO: 1938770 - RNA, 19 nt, Homo sapiens
  misc_RNA (1)...(19): siRNA sense strand
ggagaagggaguugagaag

SEQ ID NO: 1938771 - RNA, 19 nt, Homo sapiens
  misc_RNA (1)...(19): siRNA sense strand
gcuuccagaucucacugua

SEQ ID NO: 1938772 - RNA, 19 nt, Homo sapiens
  misc_RNA (1)...(19): siRNA sense strand
ggagaaggacaagaagaga

SEQ ID NO: 1938773 - RNA, 19 nt, Homo sapiens
  misc_RNA (1)...(19): siRNA sense strand
agaaggagaauaccaagga

SEQ ID NO: 1938774 - RNA, 19 nt, Homo sapiens
  misc_RNA (1)...(19): siRNA sense strand
ccauggagcagaaggagaa

SEQ ID NO: 1938775 - RNA, 19 nt, Homo sapiens
  misc_RNA (1)...(19): siRNA sense strand
gaaaguacuugaggaucac

SEQ ID NO: 1938776 - RNA, 19 nt, Homo sapiens
  misc_RNA (1)...(19): siRNA sense strand
uauaugagagccuugaaga

SEQ ID NO: 1938777 - RNA, 19 nt, Homo sapiens
  misc_RNA (1)...(19): siRNA sense strand
ggagguggcagcagacaca

SEQ ID NO: 1938778 - RNA, 19 nt, Homo sapiens
  misc_RNA (1)...(19): siRNA sense strand
ucccaugucuccuccaaug

SEQ ID NO: 1938779 - RNA, 19 nt, Homo sapiens
  misc_RNA (1)...(19): siRNA sense strand
ggagagauuccuggcagaa

SEQ ID NO: 1938780 - RNA, 19 nt, Homo sapiens
  misc_RNA (1)...(19): siRNA sense strand
cagaaggaguggaaugaac

SEQ ID NO: 1938781 - RNA, 19 nt, Homo sapiens
  misc_RNA (1)...(19): siRNA sense strand
uaaagagucagggcuggua

SEQ ID NO: 1938782 - RNA, 19 nt, Homo sapiens
  misc_RNA (1)...(19): siRNA sense strand
cacgccagcuccagcauug

SEQ ID NO: 1938783 - RNA, 19 nt, Homo sapiens
  misc_RNA (1)...(19): siRNA sense strand
cagaacagaagcagaagga

SEQ ID NO: 1938784 - RNA, 19 nt, Homo sapiens
  misc_RNA (1)...(19): siRNA sense strand
gacaagaagagagcagauu

SEQ ID NO: 1938785 - RNA, 19 nt, Homo sapiens
  misc_RNA (1)...(19): siRNA sense strand
acuuacagauucagaguau

SEQ ID NO: 1938786 - RNA, 19 nt, Homo sapiens
  misc_RNA (1)...(19): siRNA sense strand
ugaggagccuguauaugag

SEQ ID NO: 1938787 - RNA, 19 nt, Homo sapiens
  misc_RNA (1)...(19): siRNA sense strand
cuaacaaacugggcagcuu

SEQ ID NO: 1938788 - RNA, 19 nt, Homo sapiens
  misc_RNA (1)...(19): siRNA sense strand
caugcagccucccuuggaa

SEQ ID NO: 1938789 - RNA, 19 nt, Homo sapiens
  misc_RNA (1)...(19): siRNA sense strand
agagauuccuggcagaaca

SEQ ID NO: 1938790 - RNA, 19 nt, Homo sapiens
  misc_RNA (1)...(19): siRNA sense strand
guacuugaggaucacauga

SEQ ID NO: 1938791 - RNA, 19 nt, Homo sapiens
  misc_RNA (1)...(19): siRNA sense strand
gaucccacuuacagauuca

SEQ ID NO: 1938792 - RNA, 19 nt, Homo sapiens
  misc_RNA (1)...(19): siRNA sense strand
uggcagaacagaagcagaa

SEQ ID NO: 1938793 - RNA, 19 nt, Homo sapiens
  misc_RNA (1)...(19): siRNA sense strand
ucugaggacugccaugcaa

SEQ ID NO: 1938794 - RNA, 19 nt, Homo sapiens
  misc_RNA (1)...(19): siRNA sense strand
gcagcuucauagagagaga

SEQ ID NO: 1938795 - RNA, 19 nt, Homo sapiens
  misc_RNA (1)...(19): siRNA sense strand
ccagcugagucuguuggua

SEQ ID NO: 1938796 - RNA, 19 nt, Homo sapiens
  misc_RNA (1)...(19): siRNA sense strand
ggacaagaagagagcagau

SEQ ID NO: 1938797 - RNA, 19 nt, Homo sapiens
  misc_RNA (1)...(19): siRNA sense strand
cugcugcccuugcacuuug

SEQ ID NO: 1938798 - RNA, 19 nt, Homo sapiens
  misc_RNA (1)...(19): siRNA sense strand
uuccgcagcuucauagaga

SEQ ID NO: 1938799 - RNA, 19 nt, Homo sapiens
  misc_RNA (1)...(19): siRNA sense strand
gagccaggcagccacucua

SEQ ID NO: 1938800 - RNA, 19 nt, Homo sapiens
  misc_RNA (1)...(19): siRNA sense strand
agaaggaggcagagaggaa

SEQ ID NO: 1938801 - RNA, 19 nt, Homo sapiens
  misc_RNA (1)...(19): siRNA sense strand
gggagaaggacaagaagag

SEQ ID NO: 1938802 - RNA, 19 nt, Homo sapiens
  misc_RNA (1)...(19): siRNA sense strand
agaucucacuguauacaau

SEQ ID NO: 1938803 - RNA, 19 nt, Homo sapiens
  misc_RNA (1)...(19): siRNA sense strand
caaggaacaagcugugauc

SEQ ID NO: 1938804 - RNA, 19 nt, Homo sapiens
  misc_RNA (1)...(19): siRNA sense strand
gagaauaccaaggaacaag

SEQ ID NO: 1938805 - RNA, 19 nt, Homo sapiens
  misc_RNA (1)...(19): siRNA sense strand
ggucccaugucuccuccaa

SEQ ID NO: 1938806 - RNA, 19 nt, Homo sapiens
  misc_RNA (1)...(19): siRNA sense strand
ggaagcauuugccccuauu

SEQ ID NO: 1938807 - RNA, 19 nt, Homo sapiens
  misc_RNA (1)...(19): siRNA sense strand
ggcagaaggaguggaauga

SEQ ID NO: 1938808 - RNA, 19 nt, Homo sapiens
  misc_RNA (1)...(19): siRNA sense strand
agacuuccgcagcuucaua

SEQ ID NO: 1938809 - RNA, 19 nt, Homo sapiens
  misc_RNA (1)...(19): siRNA sense strand
gaucucacuguauacaaug

SEQ ID NO: 1938810 - RNA, 19 nt, Homo sapiens
  misc_RNA (1)...(19): siRNA sense strand
ggaacaggcagggcguuug

SEQ ID NO: 1938811 - RNA, 19 nt, Homo sapiens
  misc_RNA (1)...(19): siRNA sense strand
cagagaggaagaucaugaa

SEQ ID NO: 1938812 - RNA, 19 nt, Homo sapiens
  misc_RNA (1)...(19): siRNA sense strand
gggacaggguugggaggaa

SEQ ID NO: 1938813 - RNA, 19 nt, Homo sapiens
  misc_RNA (1)...(19): siRNA sense strand
ggcggaaggagaagucaaa

SEQ ID NO: 1938814 - RNA, 19 nt, Homo sapiens
  misc_RNA (1)...(19): siRNA sense strand
ggagaauaccaaggaacaa

SEQ ID NO: 1938815 - RNA, 19 nt, Homo sapiens
  misc_RNA (1)...(19): siRNA sense strand
gggcugguauacacagaag

SEQ ID NO: 1938816 - RNA, 19 nt, Homo sapiens
  misc_RNA (1)...(19): siRNA sense strand
ucucagaggcugcuuccuu

SEQ ID NO: 1938817 - RNA, 19 nt, Homo sapiens
  misc_RNA (1)...(19): siRNA sense strand
uaugagagccuugaagagu

SEQ ID NO: 1938818 - RNA, 19 nt, Homo sapiens
  misc_RNA (1)...(19): siRNA sense strand
gcaggaagauuaaugguua

SEQ ID NO: 1938819 - RNA, 19 nt, Homo sapiens
  misc_RNA (1)...(19): siRNA sense strand
agaauaagcugaaggauga

SEQ ID NO: 1938820 - RNA, 19 nt, Homo sapiens
  misc_RNA (1)...(19): siRNA sense strand
caaaaggaauggcuaauua

SEQ ID NO: 1938821 - RNA, 19 nt, Homo sapiens
  misc_RNA (1)...(19): siRNA sense strand
gaagauagagucaaauuuc

SEQ ID NO: 1938822 - RNA, 19 nt, Homo sapiens
  misc_RNA (1)...(19): siRNA sense strand
gaggauauaugucaccaaa

SEQ ID NO: 1938823 - RNA, 19 nt, Homo sapiens
  misc_RNA (1)...(19): siRNA sense strand
gaaggagacaaacaacuua

SEQ ID NO: 1938824 - RNA, 19 nt, Homo sapiens
  misc_RNA (1)...(19): siRNA sense strand
ggagacaaacaacuuauaa

SEQ ID NO: 1938825 - RNA, 19 nt, Homo sapiens
  misc_RNA (1)...(19): siRNA sense strand
gaaauuugcgcaccauauu

SEQ ID NO: 1938826 - RNA, 19 nt, Homo sapiens
  misc_RNA (1)...(19): siRNA sense strand
gcacaugggcuauuauuca

SEQ ID NO: 1938827 - RNA, 19 nt, Homo sapiens
  misc_RNA (1)...(19): siRNA sense strand
ggagacaauguucuaguua

SEQ ID NO: 1938828 - RNA, 19 nt, Homo sapiens
  misc_RNA (1)...(19): siRNA sense strand
acaaagggacggagaauaa

SEQ ID NO: 1938829 - RNA, 19 nt, Homo sapiens
  misc_RNA (1)...(19): siRNA sense strand
ggaaggagacaaacaacuu

SEQ ID NO: 1938830 - RNA, 19 nt, Homo sapiens
  misc_RNA (1)...(19): siRNA sense strand
caaaggagacaauguucua

SEQ ID NO: 1938831 - RNA, 19 nt, Homo sapiens
  misc_RNA (1)...(19): siRNA sense strand
cauuugacauuccugauaa

SEQ ID NO: 1938832 - RNA, 19 nt, Homo sapiens
  misc_RNA (1)...(19): siRNA sense strand
guucauacuuucaaggauu

SEQ ID NO: 1938833 - RNA, 19 nt, Homo sapiens
  misc_RNA (1)...(19): siRNA sense strand
uaacugccaucaagaaagu

SEQ ID NO: 1938834 - RNA, 19 nt, Homo sapiens
  misc_RNA (1)...(19): siRNA sense strand
ggaaacuauuuacuugaga

SEQ ID NO: 1938835 - RNA, 19 nt, Homo sapiens
  misc_RNA (1)...(19): siRNA sense strand
ggaaacauccacacaucaa

SEQ ID NO: 1938836 - RNA, 19 nt, Homo sapiens
  misc_RNA (1)...(19): siRNA sense strand
aagcuuggcuacauuggua

SEQ ID NO: 1938837 - RNA, 19 nt, Homo sapiens
  misc_RNA (1)...(19): siRNA sense strand
uagcagacuuuaauucuuc

SEQ ID NO: 1938838 - RNA, 19 nt, Homo sapiens
  misc_RNA (1)...(19): siRNA sense strand
agaaagcgguaucuuacaa

SEQ ID NO: 1938839 - RNA, 19 nt, Homo sapiens
  misc_RNA (1)...(19): siRNA sense strand
ggacggagaauaagcugaa

SEQ ID NO: 1938840 - RNA, 19 nt, Homo sapiens
  misc_RNA (1)...(19): siRNA sense strand
gaacuuguacauugaagau

SEQ ID NO: 1938841 - RNA, 19 nt, Homo sapiens
  misc_RNA (1)...(19): siRNA sense strand
gauuggcuauugacucauu

SEQ ID NO: 1938842 - RNA, 19 nt, Homo sapiens
  misc_RNA (1)...(19): siRNA sense strand
agaaaugccuugugauugg

SEQ ID NO: 1938843 - RNA, 19 nt, Homo sapiens
  misc_RNA (1)...(19): siRNA sense strand
augaagagcugaaggaaau

SEQ ID NO: 1938844 - RNA, 19 nt, Homo sapiens
  misc_RNA (1)...(19): siRNA sense strand
gugauuggcuauugacuca

SEQ ID NO: 1938845 - RNA, 19 nt, Homo sapiens
  misc_RNA (1)...(19): siRNA sense strand
aauccuagauggccuuaaa

SEQ ID NO: 1938846 - RNA, 19 nt, Homo sapiens
  misc_RNA (1)...(19): siRNA sense strand
caauuggacuuucuucagu

SEQ ID NO: 1938847 - RNA, 19 nt, Homo sapiens
  misc_RNA (1)...(19): siRNA sense strand
gcaagucuguacaccaaca

SEQ ID NO: 1938848 - RNA, 19 nt, Homo sapiens
  misc_RNA (1)...(19): siRNA sense strand
gaagagcugaaggaaauuu

SEQ ID NO: 1938849 - RNA, 19 nt, Homo sapiens
  misc_RNA (1)...(19): siRNA sense strand
gaagaucggcaaaaugaua

SEQ ID NO: 1938850 - RNA, 19 nt, Homo sapiens
  misc_RNA (1)...(19): siRNA sense strand
acaguaguguugaugagua

SEQ ID NO: 1938851 - RNA, 19 nt, Homo sapiens
  misc_RNA (1)...(19): siRNA sense strand
cuacauugguaaacucuau

SEQ ID NO: 1938852 - RNA, 19 nt, Homo sapiens
  misc_RNA (1)...(19): siRNA sense strand
caaauuucguuccaagcaa

SEQ ID NO: 1938853 - RNA, 19 nt, Homo sapiens
  misc_RNA (1)...(19): siRNA sense strand
ugaaaugucagguguaaau

SEQ ID NO: 1938854 - RNA, 19 nt, Homo sapiens
  misc_RNA (1)...(19): siRNA sense strand
gcugaaggaugaugauuuu

SEQ ID NO: 1938855 - RNA, 19 nt, Homo sapiens
  misc_RNA (1)...(19): siRNA sense strand
gagacaauguucuaguuac

SEQ ID NO: 1938856 - RNA, 19 nt, Homo sapiens
  misc_RNA (1)...(19): siRNA sense strand
ugaagaugauguucgaugu

SEQ ID NO: 1938857 - RNA, 19 nt, Homo sapiens
  misc_RNA (1)...(19): siRNA sense strand
cuggguaacucuugaauuc

SEQ ID NO: 1938858 - RNA, 19 nt, Homo sapiens
  misc_RNA (1)...(19): siRNA sense strand
aaagcgguaucuuacaauu

SEQ ID NO: 1938859 - RNA, 19 nt, Homo sapiens
  misc_RNA (1)...(19): siRNA sense strand
gaagaugauguucgauguu

SEQ ID NO: 1938860 - RNA, 19 nt, Homo sapiens
  misc_RNA (1)...(19): siRNA sense strand
cagaagauagagucaaauu

SEQ ID NO: 1938861 - RNA, 19 nt, Homo sapiens
  misc_RNA (1)...(19): siRNA sense strand
uuacaaugauccagaagau

SEQ ID NO: 1938862 - RNA, 19 nt, Homo sapiens
  misc_RNA (1)...(19): siRNA sense strand
gaauucagaacgcuauguu

SEQ ID NO: 1938863 - RNA, 19 nt, Homo sapiens
  misc_RNA (1)...(19): siRNA sense strand
gaaggaugaugauuuugaa

SEQ ID NO: 1938864 - RNA, 19 nt, Homo sapiens
  misc_RNA (1)...(19): siRNA sense strand
aaaaugagaugccugagaa

SEQ ID NO: 1938865 - RNA, 19 nt, Homo sapiens
  misc_RNA (1)...(19): siRNA sense strand
gguaaacucuaucauucuc

SEQ ID NO: 1938866 - RNA, 19 nt, Homo sapiens
  misc_RNA (1)...(19): siRNA sense strand
ccauaaaugucaccuaucg

SEQ ID NO: 1938867 - RNA, 19 nt, Homo sapiens
  misc_RNA (1)...(19): siRNA sense strand
ccacacaucaacugaauuc

SEQ ID NO: 1938868 - RNA, 19 nt, Homo sapiens
  misc_RNA (1)...(19): siRNA sense strand
cucaugaucucccacguuu

SEQ ID NO: 1938869 - RNA, 19 nt, Homo sapiens
  misc_RNA (1)...(19): siRNA sense strand
cauugaagauagcuauguu

SEQ ID NO: 1938870 - RNA, 19 nt, Homo sapiens
  misc_RNA (1)...(19): siRNA sense strand
gcuugaagaugauguucga

SEQ ID NO: 1938871 - RNA, 19 nt, Homo sapiens
  misc_RNA (1)...(19): siRNA sense strand
gaaagcgguaucuuacaau

SEQ ID NO: 1938872 - RNA, 19 nt, Homo sapiens
  misc_RNA (1)...(19): siRNA sense strand
caugggcuauuauucauca

SEQ ID NO: 1938873 - RNA, 19 nt, Homo sapiens
  misc_RNA (1)...(19): siRNA sense strand
aaauuucguuccaagcaaa

SEQ ID NO: 1938874 - RNA, 19 nt, Homo sapiens
  misc_RNA (1)...(19): siRNA sense strand
gauagagucaaauuucguu

SEQ ID NO: 1938875 - RNA, 19 nt, Homo sapiens
  misc_RNA (1)...(19): siRNA sense strand
uccagaagauagagucaaa

SEQ ID NO: 1938876 - RNA, 19 nt, Homo sapiens
  misc_RNA (1)...(19): siRNA sense strand
aaauuugcgcaccauauua

SEQ ID NO: 1938877 - RNA, 19 nt, Homo sapiens
  misc_RNA (1)...(19): siRNA sense strand
guacauugaagauagcuau

SEQ ID NO: 1938878 - RNA, 19 nt, Homo sapiens
  misc_RNA (1)...(19): siRNA sense strand
ucaccuagcagacuuuaau

SEQ ID NO: 1938879 - RNA, 19 nt, Homo sapiens
  misc_RNA (1)...(19): siRNA sense strand
uugguaaacucuaucauuc

SEQ ID NO: 1938880 - RNA, 19 nt, Homo sapiens
  misc_RNA (1)...(19): siRNA sense strand
gccaugguccaggauauua

SEQ ID NO: 1938881 - RNA, 19 nt, Homo sapiens
  misc_RNA (1)...(19): siRNA sense strand
gcaaacaaaggagacaaug

SEQ ID NO: 1938882 - RNA, 19 nt, Homo sapiens
  misc_RNA (1)...(19): siRNA sense strand
ucauggagcccuagauguu

SEQ ID NO: 1938883 - RNA, 19 nt, Homo sapiens
  misc_RNA (1)...(19): siRNA sense strand
agauagcuauguucuggaa

SEQ ID NO: 1938884 - RNA, 19 nt, Homo sapiens
  misc_RNA (1)...(19): siRNA sense strand
cugcaagucuguacaccaa

SEQ ID NO: 1938885 - RNA, 19 nt, Homo sapiens
  misc_RNA (1)...(19): siRNA sense strand
guucuacagugucauucuu

SEQ ID NO: 1938886 - RNA, 19 nt, Homo sapiens
  misc_RNA (1)...(19): siRNA sense strand
ucauuugacauuccugaua

SEQ ID NO: 1938887 - RNA, 19 nt, Homo sapiens
  misc_RNA (1)...(19): siRNA sense strand
uaaaccaucucucuuucag

SEQ ID NO: 1938888 - RNA, 19 nt, Homo sapiens
  misc_RNA (1)...(19): siRNA sense strand
uaauuucucaggagccaua

SEQ ID NO: 1938889 - RNA, 19 nt, Homo sapiens
  misc_RNA (1)...(19): siRNA sense strand
uuugaaaugucagguguaa

SEQ ID NO: 1938890 - RNA, 19 nt, Homo sapiens
  misc_RNA (1)...(19): siRNA sense strand
ucucuaagcuuggcuacau

SEQ ID NO: 1938891 - RNA, 19 nt, Homo sapiens
  misc_RNA (1)...(19): siRNA sense strand
gauuaugcuuuucugcuua

SEQ ID NO: 1938892 - RNA, 19 nt, Homo sapiens
  misc_RNA (1)...(19): siRNA sense strand
ggaguauuacccaauccua

SEQ ID NO: 1938893 - RNA, 19 nt, Homo sapiens
  misc_RNA (1)...(19): siRNA sense strand
cuagcagacuuuaauucuu

SEQ ID NO: 1938894 - RNA, 19 nt, Homo sapiens
  misc_RNA (1)...(19): siRNA sense strand
ggaaauuucaguggugguu

SEQ ID NO: 1938895 - RNA, 19 nt, Homo sapiens
  misc_RNA (1)...(19): siRNA sense strand
cuugggaguucuugucauu

SEQ ID NO: 1938896 - RNA, 19 nt, Homo sapiens
  misc_RNA (1)...(19): siRNA sense strand
uggaaacuuugaaauguca

SEQ ID NO: 1938897 - RNA, 19 nt, Homo sapiens
  misc_RNA (1)...(19): siRNA sense strand
guaaauacuggaacagaag

SEQ ID NO: 1938898 - RNA, 19 nt, Homo sapiens
  misc_RNA (1)...(19): siRNA sense strand
ucauuuccguggucuguug

SEQ ID NO: 1938899 - RNA, 19 nt, Homo sapiens
  misc_RNA (1)...(19): siRNA sense strand
acaaugauccagaagauag

SEQ ID NO: 1938900 - RNA, 19 nt, Homo sapiens
  misc_RNA (1)...(19): siRNA sense strand
uccaggauauuacacagaa

SEQ ID NO: 1938901 - RNA, 19 nt, Homo sapiens
  misc_RNA (1)...(19): siRNA sense strand
ugccaauacuucagacuau

SEQ ID NO: 1938902 - RNA, 19 nt, Homo sapiens
  misc_RNA (1)...(19): siRNA sense strand
aggagacaauguucuaguu

SEQ ID NO: 1938903 - RNA, 19 nt, Homo sapiens
  misc_RNA (1)...(19): siRNA sense strand
gggcuauuauucaucauac

SEQ ID NO: 1938904 - RNA, 19 nt, Homo sapiens
  misc_RNA (1)...(19): siRNA sense strand
uuucuuaacugccaucaag

SEQ ID NO: 1938905 - RNA, 19 nt, Homo sapiens
  misc_RNA (1)...(19): siRNA sense strand
aauuggacuuucuucagua

SEQ ID NO: 1938906 - RNA, 19 nt, Homo sapiens
  misc_RNA (1)...(19): siRNA sense strand
ggauauaugucaccaaaac

SEQ ID NO: 1938907 - RNA, 19 nt, Homo sapiens
  misc_RNA (1)...(19): siRNA sense strand
aaugucagguguaaaucaa

SEQ ID NO: 1938908 - RNA, 19 nt, Homo sapiens
  misc_RNA (1)...(19): siRNA sense strand
caaacaaaggagacaaugu

SEQ ID NO: 1938909 - RNA, 19 nt, Homo sapiens
  misc_RNA (1)...(19): siRNA sense strand
ggguaacucuugaauucuc

SEQ ID NO: 1938910 - RNA, 19 nt, Homo sapiens
  misc_RNA (1)...(19): siRNA sense strand
agccauaaaugucaccuau

SEQ ID NO: 1938911 - RNA, 19 nt, Homo sapiens
  misc_RNA (1)...(19): siRNA sense strand
uagauggccuuaaaagaaa

SEQ ID NO: 1938912 - RNA, 19 nt, Homo sapiens
  misc_RNA (1)...(19): siRNA sense strand
gcuaugaagagcugaagga

SEQ ID NO: 1938913 - RNA, 19 nt, Homo sapiens
  misc_RNA (1)...(19): siRNA sense strand
aagaugauguucgauguuc

SEQ ID NO: 1938914 - RNA, 19 nt, Homo sapiens
  misc_RNA (1)...(19): siRNA sense strand
cagaagaucggcaaaauga

SEQ ID NO: 1938915 - RNA, 19 nt, Homo sapiens
  misc_RNA (1)...(19): siRNA sense strand
gaacagaagaucggcaaaa

SEQ ID NO: 1938916 - RNA, 19 nt, Homo sapiens
  misc_RNA (1)...(19): siRNA sense strand
cagcacaugggcuauuauu

SEQ ID NO: 1938917 - RNA, 19 nt, Homo sapiens
  misc_RNA (1)...(19): siRNA sense strand
guauuagcauuuggacuuc

SEQ ID NO: 1938918 - RNA, 19 nt, Homo sapiens
  misc_RNA (1)...(19): siRNA sense strand
gcaaugaaccucaagcuua

SEQ ID NO: 1938919 - RNA, 19 nt, Homo sapiens
  misc_RNA (1)...(19): siRNA sense strand
gaaaugagccagagacuug

SEQ ID NO: 1938920 - RNA, 19 nt, Homo sapiens
  misc_RNA (1)...(19): siRNA sense strand
ggagcaaccuuaauuaaug

SEQ ID NO: 1938921 - RNA, 19 nt, Homo sapiens
  misc_RNA (1)...(19): siRNA sense strand
uaaaguagauccucacuca

SEQ ID NO: 1938922 - RNA, 19 nt, Homo sapiens
  misc_RNA (1)...(19): siRNA sense strand
gagaauaauuguccaugaa

SEQ ID NO: 1938923 - RNA, 19 nt, Homo sapiens
  misc_RNA (1)...(19): siRNA sense strand
ggagaauaauuguccauga

SEQ ID NO: 1938924 - RNA, 19 nt, Homo sapiens
  misc_RNA (1)...(19): siRNA sense strand
gaaacagacagcuaucuaa

SEQ ID NO: 1938925 - RNA, 19 nt, Homo sapiens
  misc_RNA (1)...(19): siRNA sense strand
gcagagaggcuucuaacaa

SEQ ID NO: 1938926 - RNA, 19 nt, Homo sapiens
  misc_RNA (1)...(19): siRNA sense strand
gcucauaugcuguugauuu

SEQ ID NO: 1938927 - RNA, 19 nt, Homo sapiens
  misc_RNA (1)...(19): siRNA sense strand
guuaugugcuggcuccuua

SEQ ID NO: 1938928 - RNA, 19 nt, Homo sapiens
  misc_RNA (1)...(19): siRNA sense strand
ggaagaauuugucaagucu

SEQ ID NO: 1938929 - RNA, 19 nt, Homo sapiens
  misc_RNA (1)...(19): siRNA sense strand
cagagaggcuucuaacaau

SEQ ID NO: 1938930 - RNA, 19 nt, Homo sapiens
  misc_RNA (1)...(19): siRNA sense strand
cauaugcuguugauuugua

SEQ ID NO: 1938931 - RNA, 19 nt, Homo sapiens
  misc_RNA (1)...(19): siRNA sense strand
cagauggacugcuuccuuu

SEQ ID NO: 1938932 - RNA, 19 nt, Homo sapiens
  misc_RNA (1)...(19): siRNA sense strand
gggacuggauuacuucaaa

SEQ ID NO: 1938933 - RNA, 19 nt, Homo sapiens
  misc_RNA (1)...(19): siRNA sense strand
gagaggcuucuaacaauuu

SEQ ID NO: 1938934 - RNA, 19 nt, Homo sapiens
  misc_RNA (1)...(19): siRNA sense strand
guaccuugcuggaauagug

SEQ ID NO: 1938935 - RNA, 19 nt, Homo sapiens
  misc_RNA (1)...(19): siRNA sense strand
gcuguugauuuguagauuu

SEQ ID NO: 1938936 - RNA, 19 nt, Homo sapiens
  misc_RNA (1)...(19): siRNA sense strand
gggaagaauuugucaaguc

SEQ ID NO: 1938937 - RNA, 19 nt, Homo sapiens
  misc_RNA (1)...(19): siRNA sense strand
cgccauaacuccuagaaug

SEQ ID NO: 1938938 - RNA, 19 nt, Homo sapiens
  misc_RNA (1)...(19): siRNA sense strand
gcauuggacucacuguuca

SEQ ID NO: 1938939 - RNA, 19 nt, Homo sapiens
  misc_RNA (1)...(19): siRNA sense strand
caaugaaccucaagcuuac

SEQ ID NO: 1938940 - RNA, 19 nt, Homo sapiens
  misc_RNA (1)...(19): siRNA sense strand
gaagaccuacaauuacuau

SEQ ID NO: 1938941 - RNA, 19 nt, Homo sapiens
  misc_RNA (1)...(19): siRNA sense strand
gcugcaagaugcuguagga

SEQ ID NO: 1938942 - RNA, 19 nt, Homo sapiens
  misc_RNA (1)...(19): siRNA sense strand
aaacagacagcuaucuaaa

SEQ ID NO: 1938943 - RNA, 19 nt, Homo sapiens
  misc_RNA (1)...(19): siRNA sense strand
acagaagcauggaguguug

SEQ ID NO: 1938944 - RNA, 19 nt, Homo sapiens
  misc_RNA (1)...(19): siRNA sense strand
caaaugcaguacauagagu

SEQ ID NO: 1938945 - RNA, 19 nt, Homo sapiens
  misc_RNA (1)...(19): siRNA sense strand
caaguucagucaacagaag

SEQ ID NO: 1938946 - RNA, 19 nt, Homo sapiens
  misc_RNA (1)...(19): siRNA sense strand
acagcuaucuaaaccauug

SEQ ID NO: 1938947 - RNA, 19 nt, Homo sapiens
  misc_RNA (1)...(19): siRNA sense strand
guagauccucacucaguua

SEQ ID NO: 1938948 - RNA, 19 nt, Homo sapiens
  misc_RNA (1)...(19): siRNA sense strand
cuacacaaaugcaguacau

SEQ ID NO: 1938949 - RNA, 19 nt, Homo sapiens
  misc_RNA (1)...(19): siRNA sense strand
ucaaccaggugaugugaug

SEQ ID NO: 1938950 - RNA, 19 nt, Homo sapiens
  misc_RNA (1)...(19): siRNA sense strand
ugaggauccugaaacugua

SEQ ID NO: 1938951 - RNA, 19 nt, Homo sapiens
  misc_RNA (1)...(19): siRNA sense strand
caggugaugugauguuugu

SEQ ID NO: 1938952 - RNA, 19 nt, Homo sapiens
  misc_RNA (1)...(19): siRNA sense strand
agagaggcuucuaacaauu

SEQ ID NO: 1938953 - RNA, 19 nt, Homo sapiens
  misc_RNA (1)...(19): siRNA sense strand
gagcaaccuuaauuaaugc

SEQ ID NO: 1938954 - RNA, 19 nt, Homo sapiens
  misc_RNA (1)...(19): siRNA sense strand
agucucagguuaucaaguu

SEQ ID NO: 1938955 - RNA, 19 nt, Homo sapiens
  misc_RNA (1)...(19): siRNA sense strand
gcacaggugacucucauag

SEQ ID NO: 1938956 - RNA, 19 nt, Homo sapiens
  misc_RNA (1)...(19): siRNA sense strand
gaaccucaagcuuacaaug

SEQ ID NO: 1938957 - RNA, 19 nt, Homo sapiens
  misc_RNA (1)...(19): siRNA sense strand
gacagaaacagacagcuau

SEQ ID NO: 1938958 - RNA, 19 nt, Homo sapiens
  misc_RNA (1)...(19): siRNA sense strand
acaaacacccaucacauga

SEQ ID NO: 1938959 - RNA, 19 nt, Homo sapiens
  misc_RNA (1)...(19): siRNA sense strand
gaucguuggugggacagaa

SEQ ID NO: 1938960 - RNA, 19 nt, Homo sapiens
  misc_RNA (1)...(19): siRNA sense strand
ugaugcauccuaugaguuu

SEQ ID NO: 1938961 - RNA, 19 nt, Homo sapiens
  misc_RNA (1)...(19): siRNA sense strand
guggagcaaccuuaauuaa

SEQ ID NO: 1938962 - RNA, 19 nt, Homo sapiens
  misc_RNA (1)...(19): siRNA sense strand
aaagaagaccuacaauuac

SEQ ID NO: 1938963 - RNA, 19 nt, Homo sapiens
  misc_RNA (1)...(19): siRNA sense strand
cauggaguguuggcucaua

SEQ ID NO: 1938964 - RNA, 19 nt, Homo sapiens
  misc_RNA (1)...(19): siRNA sense strand
aagaagaccuacaauuacu

SEQ ID NO: 1938965 - RNA, 19 nt, Homo sapiens
  misc_RNA (1)...(19): siRNA sense strand
uggacucacuguucauuau

SEQ ID NO: 1938966 - RNA, 19 nt, Homo sapiens
  misc_RNA (1)...(19): siRNA sense strand
ggagaugaaugugcgaaac

SEQ ID NO: 1938967 - RNA, 19 nt, Homo sapiens
  misc_RNA (1)...(19): siRNA sense strand
ucauagacgcuacaacuug

SEQ ID NO: 1938968 - RNA, 19 nt, Homo sapiens
  misc_RNA (1)...(19): siRNA sense strand
agacagcuaucuaaaccau

SEQ ID NO: 1938969 - RNA, 19 nt, Homo sapiens
  misc_RNA (1)...(19): siRNA sense strand
agaaacagacagcuaucua

SEQ ID NO: 1938970 - RNA, 19 nt, Homo sapiens
  misc_RNA (1)...(19): siRNA sense strand
caaaagaagaccuacaauu

SEQ ID NO: 1938971 - RNA, 19 nt, Homo sapiens
  misc_RNA (1)...(19): siRNA sense strand
aaugaugguuacagucaaa

SEQ ID NO: 1938972 - RNA, 19 nt, Homo sapiens
  misc_RNA (1)...(19): siRNA sense strand
agacagaaacagacagcua

SEQ ID NO: 1938973 - RNA, 19 nt, Homo sapiens
  misc_RNA (1)...(19): siRNA sense strand
uccugaaacuguagauaaa

SEQ ID NO: 1938974 - RNA, 19 nt, Homo sapiens
  misc_RNA (1)...(19): siRNA sense strand
aagaauuugucaagucuca

SEQ ID NO: 1938975 - RNA, 19 nt, Homo sapiens
  misc_RNA (1)...(19): siRNA sense strand
ccuguucccuacacaaaug

SEQ ID NO: 1938976 - RNA, 19 nt, Homo sapiens
  misc_RNA (1)...(19): siRNA sense strand
ggacucacuguucauuaug

SEQ ID NO: 1938977 - RNA, 19 nt, Homo sapiens
  misc_RNA (1)...(19): siRNA sense strand
gauccucacucaguuaaaa

SEQ ID NO: 1938978 - RNA, 19 nt, Homo sapiens
  misc_RNA (1)...(19): siRNA sense strand
cucauaugcuguugauuug

SEQ ID NO: 1938979 - RNA, 19 nt, Homo sapiens
  misc_RNA (1)...(19): siRNA sense strand
uuugucaagucucagguua

SEQ ID NO: 1938980 - RNA, 19 nt, Homo sapiens
  misc_RNA (1)...(19): siRNA sense strand
guucagaugcuagagauau

SEQ ID NO: 1938981 - RNA, 19 nt, Homo sapiens
  misc_RNA (1)...(19): siRNA sense strand
ggugaugugauguuuguga

SEQ ID NO: 1938982 - RNA, 19 nt, Homo sapiens
  misc_RNA (1)...(19): siRNA sense strand
ccagauggacugcuuccuu

SEQ ID NO: 1938983 - RNA, 19 nt, Homo sapiens
  misc_RNA (1)...(19): siRNA sense strand
ucaacaagacagaaacaga

SEQ ID NO: 1938984 - RNA, 19 nt, Homo sapiens
  misc_RNA (1)...(19): siRNA sense strand
caacagaagcauggagugu

SEQ ID NO: 1938985 - RNA, 19 nt, Homo sapiens
  misc_RNA (1)...(19): siRNA sense strand
acacaaaugcaguacauag

SEQ ID NO: 1938986 - RNA, 19 nt, Homo sapiens
  misc_RNA (1)...(19): siRNA sense strand
ggacuggauuacuucaaaa

SEQ ID NO: 1938987 - RNA, 19 nt, Homo sapiens
  misc_RNA (1)...(19): siRNA sense strand
auaagaacccugccagaug

SEQ ID NO: 1938988 - RNA, 19 nt, Homo sapiens
  misc_RNA (1)...(19): siRNA sense strand
ucugguaccuugcuggaau

SEQ ID NO: 1938989 - RNA, 19 nt, Homo sapiens
  misc_RNA (1)...(19): siRNA sense strand
aaacacccaucacaugacu

SEQ ID NO: 1938990 - RNA, 19 nt, Homo sapiens
  misc_RNA (1)...(19): siRNA sense strand
gaccuacaauuacuauagc

SEQ ID NO: 1938991 - RNA, 19 nt, Homo sapiens
  misc_RNA (1)...(19): siRNA sense strand
uccauuaagggaagaauuu

SEQ ID NO: 1938992 - RNA, 19 nt, Homo sapiens
  misc_RNA (1)...(19): siRNA sense strand
gacucacuguucauuaugu

SEQ ID NO: 1938993 - RNA, 19 nt, Homo sapiens
  misc_RNA (1)...(19): siRNA sense strand
caacugacaaacuauaugc

SEQ ID NO: 1938994 - RNA, 19 nt, Homo sapiens
  misc_RNA (1)...(19): siRNA sense strand
cgcuacaacuugcaaugaa

SEQ ID NO: 1938995 - RNA, 19 nt, Homo sapiens
  misc_RNA (1)...(19): siRNA sense strand
uacaaacacccaucacaug

SEQ ID NO: 1938996 - RNA, 19 nt, Homo sapiens
  misc_RNA (1)...(19): siRNA sense strand
gauccugaaacuguagaua

SEQ ID NO: 1938997 - RNA, 19 nt, Homo sapiens
  misc_RNA (1)...(19): siRNA sense strand
ugucaagucucagguuauc

SEQ ID NO: 1938998 - RNA, 19 nt, Homo sapiens
  misc_RNA (1)...(19): siRNA sense strand
gccauaacuccuagaaugu

SEQ ID NO: 1938999 - RNA, 19 nt, Homo sapiens
  misc_RNA (1)...(19): siRNA sense strand
gacaaacuauaugcugagu

SEQ ID NO: 1939000 - RNA, 19 nt, Homo sapiens
  misc_RNA (1)...(19): siRNA sense strand
uguggagcaaccuuaauua

SEQ ID NO: 1939001 - RNA, 19 nt, Homo sapiens
  misc_RNA (1)...(19): siRNA sense strand
ggaacacgaagaaguaaaa

SEQ ID NO: 1939002 - RNA, 19 nt, Homo sapiens
  misc_RNA (1)...(19): siRNA sense strand
guuaucaaguucagucaac

SEQ ID NO: 1939003 - RNA, 19 nt, Homo sapiens
  misc_RNA (1)...(19): siRNA sense strand
ucaagucucagguuaucaa

SEQ ID NO: 1939004 - RNA, 19 nt, Homo sapiens
  misc_RNA (1)...(19): siRNA sense strand
acagacagcuaucuaaacc

SEQ ID NO: 1939005 - RNA, 19 nt, Homo sapiens
  misc_RNA (1)...(19): siRNA sense strand
uugcgggacuggauuacuu

SEQ ID NO: 1939006 - RNA, 19 nt, Homo sapiens
  misc_RNA (1)...(19): siRNA sense strand
gcuacaacuugcaaugaac

SEQ ID NO: 1939007 - RNA, 19 nt, Homo sapiens
  misc_RNA (1)...(19): siRNA sense strand
cacaaaugcaguacauaga

SEQ ID NO: 1939008 - RNA, 19 nt, Homo sapiens
  misc_RNA (1)...(19): siRNA sense strand
agucaucgcuguggagcaa

SEQ ID NO: 1939009 - RNA, 19 nt, Homo sapiens
  misc_RNA (1)...(19): siRNA sense strand
acaggugacucucauagac

SEQ ID NO: 1939010 - RNA, 19 nt, Homo sapiens
  misc_RNA (1)...(19): siRNA sense strand
gguguuuauacuagaguua

SEQ ID NO: 1939011 - RNA, 19 nt, Homo sapiens
  misc_RNA (1)...(19): siRNA sense strand
ccauaacuccuagaauguu

SEQ ID NO: 1939012 - RNA, 19 nt, Homo sapiens
  misc_RNA (1)...(19): siRNA sense strand
gagccagagacuugaauca

SEQ ID NO: 1939013 - RNA, 19 nt, Homo sapiens
  misc_RNA (1)...(19): siRNA sense strand
ccugaugcauccuaugagu

SEQ ID NO: 1939014 - RNA, 19 nt, Homo sapiens
  misc_RNA (1)...(19): siRNA sense strand
uauaagaacccugccagau

SEQ ID NO: 1939015 - RNA, 19 nt, Homo sapiens
  misc_RNA (1)...(19): siRNA sense strand
gcagugggaugggagucau

SEQ ID NO: 1939016 - RNA, 19 nt, Homo sapiens
  misc_RNA (1)...(19): siRNA sense strand
gacaagcacaggugacucu

SEQ ID NO: 1939017 - RNA, 19 nt, Homo sapiens
  misc_RNA (1)...(19): siRNA sense strand
cugguaccuugcuggaaua

SEQ ID NO: 1939018 - RNA, 19 nt, Homo sapiens
  misc_RNA (1)...(19): siRNA sense strand
gaagcggacucccaaauuu

SEQ ID NO: 1939019 - RNA, 19 nt, Homo sapiens
  misc_RNA (1)...(19): siRNA sense strand
gaacggagguggacauugc

SEQ ID NO: 1939020 - RNA, 19 nt, Homo sapiens
  misc_RNA (1)...(19): siRNA sense strand
ucacugagauucugaugaa

SEQ ID NO: 1939021 - RNA, 19 nt, Homo sapiens
  misc_RNA (1)...(19): siRNA sense strand
ggaaugucuucgucaguga

SEQ ID NO: 1939022 - RNA, 19 nt, Homo sapiens
  misc_RNA (1)...(19): siRNA sense strand
ucagugagcugcuggaaac

SEQ ID NO: 1939023 - RNA, 19 nt, Homo sapiens
  misc_RNA (1)...(19): siRNA sense strand
gaugugcuaugcccagaau

SEQ ID NO: 1939024 - RNA, 19 nt, Homo sapiens
  misc_RNA (1)...(19): siRNA sense strand
gaacugaggcccacguacu

SEQ ID NO: 1939025 - RNA, 19 nt, Homo sapiens
  misc_RNA (1)...(19): siRNA sense strand
gagaagcggacucccaaau

SEQ ID NO: 1939026 - RNA, 19 nt, Homo sapiens
  misc_RNA (1)...(19): siRNA sense strand
ugaaggagcgggaacagau

SEQ ID NO: 1939027 - RNA, 19 nt, Homo sapiens
  misc_RNA (1)...(19): siRNA sense strand
gaaggagcgggaacagaug

SEQ ID NO: 1939028 - RNA, 19 nt, Homo sapiens
  misc_RNA (1)...(19): siRNA sense strand
gaccaagggaucacugaga

SEQ ID NO: 1939029 - RNA, 19 nt, Homo sapiens
  misc_RNA (1)...(19): siRNA sense strand
caagggaucacugagauuc

SEQ ID NO: 1939030 - RNA, 19 nt, Homo sapiens
  misc_RNA (1)...(19): siRNA sense strand
agaagcggacucccaaauu

SEQ ID NO: 1939031 - RNA, 19 nt, Homo sapiens
  misc_RNA (1)...(19): siRNA sense strand
ugggcaaaguagccauuaa

SEQ ID NO: 1939032 - RNA, 19 nt, Homo sapiens
  misc_RNA (1)...(19): siRNA sense strand
ggagguggacauugcaucu

SEQ ID NO: 1939033 - RNA, 19 nt, Homo sapiens
  misc_RNA (1)...(19): siRNA sense strand
gugagcugcuggaaacucu

SEQ ID NO: 1939034 - RNA, 19 nt, Homo sapiens
  misc_RNA (1)...(19): siRNA sense strand
gugcuaugcccagaauauu

SEQ ID NO: 1939035 - RNA, 19 nt, Homo sapiens
  misc_RNA (1)...(19): siRNA sense strand
ccauugaagggaugugcua

SEQ ID NO: 1939036 - RNA, 19 nt, Homo sapiens
  misc_RNA (1)...(19): siRNA sense strand
gggcaaaguagccauuaac

SEQ ID NO: 1939037 - RNA, 19 nt, Homo sapiens
  misc_RNA (1)...(19): siRNA sense strand
ggccgacgacugaguggaa

SEQ ID NO: 1939038 - RNA, 19 nt, Homo sapiens
  misc_RNA (1)...(19): siRNA sense strand
ccaagggaucacugagauu

SEQ ID NO: 1939039 - RNA, 19 nt, Homo sapiens
  misc_RNA (1)...(19): siRNA sense strand
gucaugggacugauugaga

SEQ ID NO: 1939040 - RNA, 19 nt, Homo sapiens
  misc_RNA (1)...(19): siRNA sense strand
accaagggaucacugagau

SEQ ID NO: 1939041 - RNA, 19 nt, Homo sapiens
  misc_RNA (1)...(19): siRNA sense strand
ggaacggagguggacauug

SEQ ID NO: 1939042 - RNA, 19 nt, Homo sapiens
  misc_RNA (1)...(19): siRNA sense strand
aagcggacucccaaauuug

SEQ ID NO: 1939043 - RNA, 19 nt, Homo sapiens
  misc_RNA (1)...(19): siRNA sense strand
gugcguguccugcucuuca

SEQ ID NO: 1939044 - RNA, 19 nt, Homo sapiens
  misc_RNA (1)...(19): siRNA sense strand
gagaagagguuucaagaua

SEQ ID NO: 1939045 - RNA, 19 nt, Homo sapiens
  misc_RNA (1)...(19): siRNA sense strand
gcacacagauaucaagaug

SEQ ID NO: 1939046 - RNA, 19 nt, Homo sapiens
  misc_RNA (1)...(19): siRNA sense strand
ucaaggaccugccaugaug

SEQ ID NO: 1939047 - RNA, 19 nt, Homo sapiens
  misc_RNA (1)...(19): siRNA sense strand
ccaaaugucugggcuaaau

SEQ ID NO: 1939048 - RNA, 19 nt, Homo sapiens
  misc_RNA (1)...(19): siRNA sense strand
agaagagguuucaagauaa

SEQ ID NO: 1939049 - RNA, 19 nt, Homo sapiens
  misc_RNA (1)...(19): siRNA sense strand
ucgaggagcuggagaaguu

SEQ ID NO: 1939050 - RNA, 19 nt, Homo sapiens
  misc_RNA (1)...(19): siRNA sense strand
uaccaugccuggaacagua

SEQ ID NO: 1939051 - RNA, 19 nt, Homo sapiens
  misc_RNA (1)...(19): siRNA sense strand
cagccucagugaaguauuu

SEQ ID NO: 1939052 - RNA, 19 nt, Homo sapiens
  misc_RNA (1)...(19): siRNA sense strand
gaagagguuucaagauaac

SEQ ID NO: 1939053 - RNA, 19 nt, Homo sapiens
  misc_RNA (1)...(19): siRNA sense strand
gauuucaacaggcagauua

SEQ ID NO: 1939054 - RNA, 19 nt, Homo sapiens
  misc_RNA (1)...(19): siRNA sense strand
gaaagaaacggaccagcau

SEQ ID NO: 1939055 - RNA, 19 nt, Homo sapiens
  misc_RNA (1)...(19): siRNA sense strand
gccaggauccucuuuagaa

SEQ ID NO: 1939056 - RNA, 19 nt, Homo sapiens
  misc_RNA (1)...(19): siRNA sense strand
acacagauaucaagaugag

SEQ ID NO: 1939057 - RNA, 19 nt, Homo sapiens
  misc_RNA (1)...(19): siRNA sense strand
ggaccagcaucgagaccaa

SEQ ID NO: 1939058 - RNA, 19 nt, Homo sapiens
  misc_RNA (1)...(19): siRNA sense strand
aaccugagcuucaagaaca

SEQ ID NO: 1939059 - RNA, 19 nt, Homo sapiens
  misc_RNA (1)...(19): siRNA sense strand
caaaccaccugucuacaac

SEQ ID NO: 1939060 - RNA, 19 nt, Homo sapiens
  misc_RNA (1)...(19): siRNA sense strand
gagaaguggcugaaugaug

SEQ ID NO: 1939061 - RNA, 19 nt, Homo sapiens
  misc_RNA (1)...(19): siRNA sense strand
ggagaagagguuucaagau

SEQ ID NO: 1939062 - RNA, 19 nt, Homo sapiens
  misc_RNA (1)...(19): siRNA sense strand
ucaaaccaccugucuacaa

SEQ ID NO: 1939063 - RNA, 19 nt, Homo sapiens
  misc_RNA (1)...(19): siRNA sense strand
aaccaaaugucugggcuaa

SEQ ID NO: 1939064 - RNA, 19 nt, Homo sapiens
  misc_RNA (1)...(19): siRNA sense strand
cagagcaguuguccaugga

SEQ ID NO: 1939065 - RNA, 19 nt, Homo sapiens
  misc_RNA (1)...(19): siRNA sense strand
caucaaaccaccugucuac

SEQ ID NO: 1939066 - RNA, 19 nt, Homo sapiens
  misc_RNA (1)...(19): siRNA sense strand
cuacaacucccggcuggua

SEQ ID NO: 1939067 - RNA, 19 nt, Homo sapiens
  misc_RNA (1)...(19): siRNA sense strand
aaaccgaagaucucaguga

SEQ ID NO: 1939068 - RNA, 19 nt, Homo sapiens
  misc_RNA (1)...(19): siRNA sense strand
cuggagaaguggcugaaug

SEQ ID NO: 1939069 - RNA, 19 nt, Homo sapiens
  misc_RNA (1)...(19): siRNA sense strand
gaacaugugcaagcucaag

SEQ ID NO: 1939070 - RNA, 19 nt, Homo sapiens
  misc_RNA (1)...(19): siRNA sense strand
gaccaccaucucacgauuu

SEQ ID NO: 1939071 - RNA, 19 nt, Homo sapiens
  misc_RNA (1)...(19): siRNA sense strand
gcuaaaugccagcccaugu

SEQ ID NO: 1939072 - RNA, 19 nt, Homo sapiens
  misc_RNA (1)...(19): siRNA sense strand
gccaggaaaugaucgaaaa

SEQ ID NO: 1939073 - RNA, 19 nt, Homo sapiens
  misc_RNA (1)...(19): siRNA sense strand
gaacaacagcaggccuuca

SEQ ID NO: 1939074 - RNA, 19 nt, Homo sapiens
  misc_RNA (1)...(19): siRNA sense strand
agaccaccaucucacgauu

SEQ ID NO: 1939075 - RNA, 19 nt, Homo sapiens
  misc_RNA (1)...(19): siRNA sense strand
caugauguccggaaaccaa

SEQ ID NO: 1939076 - RNA, 19 nt, Homo sapiens
  misc_RNA (1)...(19): siRNA sense strand
agcaaggucugcagccaaa

SEQ ID NO: 1939077 - RNA, 19 nt, Homo sapiens
  misc_RNA (1)...(19): siRNA sense strand
gcugccaggauccucuuua

SEQ ID NO: 1939078 - RNA, 19 nt, Homo sapiens
  misc_RNA (1)...(19): siRNA sense strand
caacagcaggccuucaucu

SEQ ID NO: 1939079 - RNA, 19 nt, Homo sapiens
  misc_RNA (1)...(19): siRNA sense strand
caagaugaguggggaugua

SEQ ID NO: 1939080 - RNA, 19 nt, Homo sapiens
  misc_RNA (1)...(19): siRNA sense strand
gaaguauuugguaggaaga

SEQ ID NO: 1939081 - RNA, 19 nt, Homo sapiens
  misc_RNA (1)...(19): siRNA sense strand
ucaagcagaggcgcauuaa

SEQ ID NO: 1939082 - RNA, 19 nt, Homo sapiens
  misc_RNA (1)...(19): siRNA sense strand
ccaggauccucuuuagaac

SEQ ID NO: 1939083 - RNA, 19 nt, Homo sapiens
  misc_RNA (1)...(19): siRNA sense strand
uaaaugccagcccauguca

SEQ ID NO: 1939084 - RNA, 19 nt, Homo sapiens
  misc_RNA (1)...(19): siRNA sense strand
ugguaccgauggaaucauu

SEQ ID NO: 1939085 - RNA, 19 nt, Homo sapiens
  misc_RNA (1)...(19): siRNA sense strand
ucaagaacaugugcaagcu

SEQ ID NO: 1939086 - RNA, 19 nt, Homo sapiens
  misc_RNA (1)...(19): siRNA sense strand
uggagaaguggcugaauga

SEQ ID NO: 1939087 - RNA, 19 nt, Homo sapiens
  misc_RNA (1)...(19): siRNA sense strand
ggucuccuccucccacaga

SEQ ID NO: 1939088 - RNA, 19 nt, Homo sapiens
  misc_RNA (1)...(19): siRNA sense strand
cacaguaccaugccuggaa

SEQ ID NO: 1939089 - RNA, 19 nt, Homo sapiens
  misc_RNA (1)...(19): siRNA sense strand
uggagaagagguuucaaga

SEQ ID NO: 1939090 - RNA, 19 nt, Homo sapiens
  misc_RNA (1)...(19): siRNA sense strand
caaaugucugggcuaaaug

SEQ ID NO: 1939091 - RNA, 19 nt, Homo sapiens
  misc_RNA (1)...(19): siRNA sense strand
ggccaugccaccugaguca

SEQ ID NO: 1939092 - RNA, 19 nt, Homo sapiens
  misc_RNA (1)...(19): siRNA sense strand
ccacugcaucucaaaauaa

SEQ ID NO: 1939093 - RNA, 19 nt, Homo sapiens
  misc_RNA (1)...(19): siRNA sense strand
uggagaaguuugccaagac

SEQ ID NO: 1939094 - RNA, 19 nt, Homo sapiens
  misc_RNA (1)...(19): siRNA sense strand
cuggagaaguuugccaaga

SEQ ID NO: 1939095 - RNA, 19 nt, Homo sapiens
  misc_RNA (1)...(19): siRNA sense strand
cccaguuccugcuaucuca

SEQ ID NO: 1939096 - RNA, 19 nt, Homo sapiens
  misc_RNA (1)...(19): siRNA sense strand
gaucgaaaaggccuagauu

SEQ ID NO: 1939097 - RNA, 19 nt, Homo sapiens
  misc_RNA (1)...(19): siRNA sense strand
caaggucugcagccaaauc

SEQ ID NO: 1939098 - RNA, 19 nt, Homo sapiens
  misc_RNA (1)...(19): siRNA sense strand
ggaagcaucccagcaucuc

SEQ ID NO: 1939099 - RNA, 19 nt, Homo sapiens
  misc_RNA (1)...(19): siRNA sense strand
gugaaguauuugguaggaa

SEQ ID NO: 1939100 - RNA, 19 nt, Homo sapiens
  misc_RNA (1)...(19): siRNA sense strand
accaccaucucacgauuug

SEQ ID NO: 1939101 - RNA, 19 nt, Homo sapiens
  misc_RNA (1)...(19): siRNA sense strand
gaggagcuggagaaguuug

SEQ ID NO: 1939102 - RNA, 19 nt, Homo sapiens
  misc_RNA (1)...(19): siRNA sense strand
ggaucuugguaccgaugga

SEQ ID NO: 1939103 - RNA, 19 nt, Homo sapiens
  misc_RNA (1)...(19): siRNA sense strand
gaguccaugcacacagaua

SEQ ID NO: 1939104 - RNA, 19 nt, Homo sapiens
  misc_RNA (1)...(19): siRNA sense strand
gguaggaagagaaagaaac

SEQ ID NO: 1939105 - RNA, 19 nt, Homo sapiens
  misc_RNA (1)...(19): siRNA sense strand
guauuugguaggaagagaa

SEQ ID NO: 1939106 - RNA, 19 nt, Homo sapiens
  misc_RNA (1)...(19): siRNA sense strand
aagcagaggcgcauuaagc

SEQ ID NO: 1939107 - RNA, 19 nt, Homo sapiens
  misc_RNA (1)...(19): siRNA sense strand
gauguccggaaaccaaaug

SEQ ID NO: 1939108 - RNA, 19 nt, Homo sapiens
  misc_RNA (1)...(19): siRNA sense strand
gaucuugguaccgauggaa

SEQ ID NO: 1939109 - RNA, 19 nt, Homo sapiens
  misc_RNA (1)...(19): siRNA sense strand
ccagguggagccaggaaau

SEQ ID NO: 1939110 - RNA, 19 nt, Homo sapiens
  misc_RNA (1)...(19): siRNA sense strand
cagauucacuuuauaggaa

SEQ ID NO: 1939111 - RNA, 19 nt, Homo sapiens
  misc_RNA (1)...(19): siRNA sense strand
gcagauucacuuuauagga

SEQ ID NO: 1939112 - RNA, 19 nt, Homo sapiens
  misc_RNA (1)...(19): siRNA sense strand
aaacugaauucuccaacag

SEQ ID NO: 1939113 - RNA, 19 nt, Homo sapiens
  misc_RNA (1)...(19): siRNA sense strand
cacugucacuccucagaaa

SEQ ID NO: 1939114 - RNA, 19 nt, Homo sapiens
  misc_RNA (1)...(19): siRNA sense strand
ucacuccucagaaagcuaa

SEQ ID NO: 1939115 - RNA, 19 nt, Homo sapiens
  misc_RNA (1)...(19): siRNA sense strand
gugcagauucacuuuauag

SEQ ID NO: 1939116 - RNA, 19 nt, Homo sapiens
  misc_RNA (1)...(19): siRNA sense strand
ggacgcgcugugcgaguuu

SEQ ID NO: 1939117 - RNA, 19 nt, Homo sapiens
  misc_RNA (1)...(19): siRNA sense strand
cauugcugaucuugacaaa

SEQ ID NO: 1939118 - RNA, 19 nt, Homo sapiens
  misc_RNA (1)...(19): siRNA sense strand
gcaccuggagcgcaugaag

SEQ ID NO: 1939119 - RNA, 19 nt, Homo sapiens
  misc_RNA (1)...(19): siRNA sense strand
ccacugucacuccucagaa

SEQ ID NO: 1939120 - RNA, 19 nt, Homo sapiens
  misc_RNA (1)...(19): siRNA sense strand
cuucauugcugaucuugac

SEQ ID NO: 1939121 - RNA, 19 nt, Homo sapiens
  misc_RNA (1)...(19): siRNA sense strand
gagcaccuggagcgcauga

SEQ ID NO: 1939122 - RNA, 19 nt, Homo sapiens
  misc_RNA (1)...(19): siRNA sense strand
caugugagcucuuugaaaa

SEQ ID NO: 1939123 - RNA, 19 nt, Homo sapiens
  misc_RNA (1)...(19): siRNA sense strand
ccucuuugcuguggcuuua

SEQ ID NO: 1939124 - RNA, 19 nt, Homo sapiens
  misc_RNA (1)...(19): siRNA sense strand
guagcagugagaauaaaua

SEQ ID NO: 1939125 - RNA, 19 nt, Homo sapiens
  misc_RNA (1)...(19): siRNA sense strand
gguuacaugugagcucuuu

SEQ ID NO: 1939126 - RNA, 19 nt, Homo sapiens
  misc_RNA (1)...(19): siRNA sense strand
ggauucgacuuggcucuug

SEQ ID NO: 1939127 - RNA, 19 nt, Homo sapiens
  misc_RNA (1)...(19): siRNA sense strand
ucaguagcagugagaauaa

SEQ ID NO: 1939128 - RNA, 19 nt, Homo sapiens
  misc_RNA (1)...(19): siRNA sense strand
caauauaaagaacgacuuc

SEQ ID NO: 1939129 - RNA, 19 nt, Homo sapiens
  misc_RNA (1)...(19): siRNA sense strand
gggcaggcuucauggcaau

SEQ ID NO: 1939130 - RNA, 19 nt, Homo sapiens
  misc_RNA (1)...(19): siRNA sense strand
caguagcagugagaauaaa

SEQ ID NO: 1939131 - RNA, 19 nt, Homo sapiens
  misc_RNA (1)...(19): siRNA sense strand
gcgcaaggcccagaaugga

SEQ ID NO: 1939132 - RNA, 19 nt, Homo sapiens
  misc_RNA (1)...(19): siRNA sense strand
uuacaugugagcucuuuga

SEQ ID NO: 1939133 - RNA, 19 nt, Homo sapiens
  misc_RNA (1)...(19): siRNA sense strand
uugcagaggcagccaauug

SEQ ID NO: 1939134 - RNA, 19 nt, Homo sapiens
  misc_RNA (1)...(19): siRNA sense strand
gcaguuugaaggcaagcaa

SEQ ID NO: 1939135 - RNA, 19 nt, Homo sapiens
  misc_RNA (1)...(19): siRNA sense strand
aacaggugcuugugccaau

SEQ ID NO: 1939136 - RNA, 19 nt, Homo sapiens
  misc_RNA (1)...(19): siRNA sense strand
caagcauuuugccaauaua

SEQ ID NO: 1939137 - RNA, 19 nt, Homo sapiens
  misc_RNA (1)...(19): siRNA sense strand
gaagaaaguucaucagcuu

SEQ ID NO: 1939138 - RNA, 19 nt, Homo sapiens
  misc_RNA (1)...(19): siRNA sense strand
ccacagaugucuuuaauuc

SEQ ID NO: 1939139 - RNA, 19 nt, Homo sapiens
  misc_RNA (1)...(19): siRNA sense strand
cagagaagaucaucaagaa

SEQ ID NO: 1939140 - RNA, 19 nt, Homo sapiens
  misc_RNA (1)...(19): siRNA sense strand
guagugaggugcuggauga

SEQ ID NO: 1939141 - RNA, 19 nt, Homo sapiens
  misc_RNA (1)...(19): siRNA sense strand
uauccaggcuguuaaauga

SEQ ID NO: 1939142 - RNA, 19 nt, Homo sapiens
  misc_RNA (1)...(19): siRNA sense strand
uagcauugauggagaaauu

SEQ ID NO: 1939143 - RNA, 19 nt, Homo sapiens
  misc_RNA (1)...(19): siRNA sense strand
gagagaugcugcaccaaau

SEQ ID NO: 1939144 - RNA, 19 nt, Homo sapiens
  misc_RNA (1)...(19): siRNA sense strand
ucacauggacggguuaaua

SEQ ID NO: 1939145 - RNA, 19 nt, Homo sapiens
  misc_RNA (1)...(19): siRNA sense strand
ggccacagaugucuuuaau

SEQ ID NO: 1939146 - RNA, 19 nt, Homo sapiens
  misc_RNA (1)...(19): siRNA sense strand
gcauugauggagaaauuua

SEQ ID NO: 1939147 - RNA, 19 nt, Homo sapiens
  misc_RNA (1)...(19): siRNA sense strand
gcagagaagaucaucaaga

SEQ ID NO: 1939148 - RNA, 19 nt, Homo sapiens
  misc_RNA (1)...(19): siRNA sense strand
ucaagaaccucaucaagac

SEQ ID NO: 1939149 - RNA, 19 nt, Homo sapiens
  misc_RNA (1)...(19): siRNA sense strand
uuaaaugaaugcagagaga

SEQ ID NO: 1939150 - RNA, 19 nt, Homo sapiens
  misc_RNA (1)...(19): siRNA sense strand
ggaugaagagaacauauga

SEQ ID NO: 1939151 - RNA, 19 nt, Homo sapiens
  misc_RNA (1)...(19): siRNA sense strand
ccaccucacugccaaguca

SEQ ID NO: 1939152 - RNA, 19 nt, Homo sapiens
  misc_RNA (1)...(19): siRNA sense strand
aagaugagcuagcauugau

SEQ ID NO: 1939153 - RNA, 19 nt, Homo sapiens
  misc_RNA (1)...(19): siRNA sense strand
cacauggacggguuaauaa

SEQ ID NO: 1939154 - RNA, 19 nt, Homo sapiens
  misc_RNA (1)...(19): siRNA sense strand
caagcuggccauucuuuau

SEQ ID NO: 1939155 - RNA, 19 nt, Homo sapiens
  misc_RNA (1)...(19): siRNA sense strand
caucgccaccaccuuaaua

SEQ ID NO: 1939156 - RNA, 19 nt, Homo sapiens
  misc_RNA (1)...(19): siRNA sense strand
caagaugagcuagcauuga

SEQ ID NO: 1939157 - RNA, 19 nt, Homo sapiens
  misc_RNA (1)...(19): siRNA sense strand
acagaugucuuuaauucca

SEQ ID NO: 1939158 - RNA, 19 nt, Homo sapiens
  misc_RNA (1)...(19): siRNA sense strand
guaaaaugguguccaaauc

SEQ ID NO: 1939159 - RNA, 19 nt, Homo sapiens
  misc_RNA (1)...(19): siRNA sense strand
gaaggaggcagagaagauc

SEQ ID NO: 1939160 - RNA, 19 nt, Homo sapiens
  misc_RNA (1)...(19): siRNA sense strand
uuaauagacgacacaagua

SEQ ID NO: 1939161 - RNA, 19 nt, Homo sapiens
  misc_RNA (1)...(19): siRNA sense strand
aagcuggccauucuuuaua

SEQ ID NO: 1939162 - RNA, 19 nt, Homo sapiens
  misc_RNA (1)...(19): siRNA sense strand
ucaucaagcuggccauucu

SEQ ID NO: 1939163 - RNA, 19 nt, Homo sapiens
  misc_RNA (1)...(19): siRNA sense strand
ucaagcuggccauucuuua

SEQ ID NO: 1939164 - RNA, 19 nt, Homo sapiens
  misc_RNA (1)...(19): siRNA sense strand
gagaugcugcaccaaauca

SEQ ID NO: 1939165 - RNA, 19 nt, Homo sapiens
  misc_RNA (1)...(19): siRNA sense strand
acaagaaggaggcagagaa

SEQ ID NO: 1939166 - RNA, 19 nt, Homo sapiens
  misc_RNA (1)...(19): siRNA sense strand
agagagaugcugcaccaaa

SEQ ID NO: 1939167 - RNA, 19 nt, Homo sapiens
  misc_RNA (1)...(19): siRNA sense strand
caagaaggaggcagagaag

SEQ ID NO: 1939168 - RNA, 19 nt, Homo sapiens
  misc_RNA (1)...(19): siRNA sense strand
gaugcugcaccaaaucauu

SEQ ID NO: 1939169 - RNA, 19 nt, Homo sapiens
  misc_RNA (1)...(19): siRNA sense strand
ucaagacagucaucaagcu

SEQ ID NO: 1939170 - RNA, 19 nt, Homo sapiens
  misc_RNA (1)...(19): siRNA sense strand
uaauagacgacacaaguag

SEQ ID NO: 1939171 - RNA, 19 nt, Homo sapiens
  misc_RNA (1)...(19): siRNA sense strand
uaaucaagaugagcuagca

SEQ ID NO: 1939172 - RNA, 19 nt, Homo sapiens
  misc_RNA (1)...(19): siRNA sense strand
cuuaauagacgacacaagu

SEQ ID NO: 1939173 - RNA, 19 nt, Homo sapiens
  misc_RNA (1)...(19): siRNA sense strand
caucaagacagucaucaag

SEQ ID NO: 1939174 - RNA, 19 nt, Homo sapiens
  misc_RNA (1)...(19): siRNA sense strand
gaaaguucaucagcuugcu

SEQ ID NO: 1939175 - RNA, 19 nt, Homo sapiens
  misc_RNA (1)...(19): siRNA sense strand
agaaggaggcagagaagau

SEQ ID NO: 1939176 - RNA, 19 nt, Homo sapiens
  misc_RNA (1)...(19): siRNA sense strand
cauggacggguuaauaaug

SEQ ID NO: 1939177 - RNA, 19 nt, Homo sapiens
  misc_RNA (1)...(19): siRNA sense strand
ucaagaugagcuagcauug

SEQ ID NO: 1939178 - RNA, 19 nt, Homo sapiens
  misc_RNA (1)...(19): siRNA sense strand
gaucaucaagaaccucauc

SEQ ID NO: 1939179 - RNA, 19 nt, Homo sapiens
  misc_RNA (1)...(19): siRNA sense strand
cagaugucuuuaauuccaa

SEQ ID NO: 1939180 - RNA, 19 nt, Homo sapiens
  misc_RNA (1)...(19): siRNA sense strand
uguguuauccaggcuguua

SEQ ID NO: 1939181 - RNA, 19 nt, Homo sapiens
  misc_RNA (1)...(19): siRNA sense strand
caucaagaaccucaucaag

SEQ ID NO: 1939182 - RNA, 19 nt, Homo sapiens
  misc_RNA (1)...(19): siRNA sense strand
uggccauucuuuauaggaa

SEQ ID NO: 1939183 - RNA, 19 nt, Homo sapiens
  misc_RNA (1)...(19): siRNA sense strand
gaagaucuuggguaaaaug

SEQ ID NO: 1939184 - RNA, 19 nt, Homo sapiens
  misc_RNA (1)...(19): siRNA sense strand
gauggagaaauuuaagaag

SEQ ID NO: 1939185 - RNA, 19 nt, Homo sapiens
  misc_RNA (1)...(19): siRNA sense strand
gaauuuuaaaccccacuua

SEQ ID NO: 1939186 - RNA, 19 nt, Homo sapiens
  misc_RNA (1)...(19): siRNA sense strand
uccaggcuguuaaaugaau

SEQ ID NO: 1939187 - RNA, 19 nt, Homo sapiens
  misc_RNA (1)...(19): siRNA sense strand
aauguuggaugaagagaac

SEQ ID NO: 1939188 - RNA, 19 nt, Homo sapiens
  misc_RNA (1)...(19): siRNA sense strand
auggacggguuaauaaugu

SEQ ID NO: 1939189 - RNA, 19 nt, Homo sapiens
  misc_RNA (1)...(19): siRNA sense strand
aucaagaaccucaucaaga

SEQ ID NO: 1939190 - RNA, 19 nt, Homo sapiens
  misc_RNA (1)...(19): siRNA sense strand
ucaguuuaaucaagaugag

SEQ ID NO: 1939191 - RNA, 19 nt, Homo sapiens
  misc_RNA (1)...(19): siRNA sense strand
caagaaccucaucaagaca

SEQ ID NO: 1939192 - RNA, 19 nt, Homo sapiens
  misc_RNA (1)...(19): siRNA sense strand
aggcagagaagaucaucaa

SEQ ID NO: 1939193 - RNA, 19 nt, Homo sapiens
  misc_RNA (1)...(19): siRNA sense strand
aaaugaaugcagagagaug

SEQ ID NO: 1939194 - RNA, 19 nt, Homo sapiens
  misc_RNA (1)...(19): siRNA sense strand
uaagaaagauccugucaaa

SEQ ID NO: 1939195 - RNA, 19 nt, Homo sapiens
  misc_RNA (1)...(19): siRNA sense strand
uaaaggagccaucaaauuu

SEQ ID NO: 1939196 - RNA, 19 nt, Homo sapiens
  misc_RNA (1)...(19): siRNA sense strand
gaaagauccugucaaaaua

SEQ ID NO: 1939197 - RNA, 19 nt, Homo sapiens
  misc_RNA (1)...(19): siRNA sense strand
caaaggaauuggcauugaa

SEQ ID NO: 1939198 - RNA, 19 nt, Homo sapiens
  misc_RNA (1)...(19): siRNA sense strand
uaucauguguccaggcuua

SEQ ID NO: 1939199 - RNA, 19 nt, Homo sapiens
  misc_RNA (1)...(19): siRNA sense strand
cagaagacauugagaaagu

SEQ ID NO: 1939200 - RNA, 19 nt, Homo sapiens
  misc_RNA (1)...(19): siRNA sense strand
gaaagucaacaaaggaauu

SEQ ID NO: 1939201 - RNA, 19 nt, Homo sapiens
  misc_RNA (1)...(19): siRNA sense strand
gaugggcuguggcauauga

SEQ ID NO: 1939202 - RNA, 19 nt, Homo sapiens
  misc_RNA (1)...(19): siRNA sense strand
gaaccauggcuuaaucaaa

SEQ ID NO: 1939203 - RNA, 19 nt, Homo sapiens
  misc_RNA (1)...(19): siRNA sense strand
caacaaaggaauuggcauu

SEQ ID NO: 1939204 - RNA, 19 nt, Homo sapiens
  misc_RNA (1)...(19): siRNA sense strand
ccgaugccaugaacauaua

SEQ ID NO: 1939205 - RNA, 19 nt, Homo sapiens
  misc_RNA (1)...(19): siRNA sense strand
aaccauggcuuaaucaaau

SEQ ID NO: 1939206 - RNA, 19 nt, Homo sapiens
  misc_RNA (1)...(19): siRNA sense strand
gguauugaaccauggcuua

SEQ ID NO: 1939207 - RNA, 19 nt, Homo sapiens
  misc_RNA (1)...(19): siRNA sense strand
caucaaauuuguacucagu

SEQ ID NO: 1939208 - RNA, 19 nt, Homo sapiens
  misc_RNA (1)...(19): siRNA sense strand
gauaaaggagccaucaaau

SEQ ID NO: 1939209 - RNA, 19 nt, Homo sapiens
  misc_RNA (1)...(19): siRNA sense strand
ggaauuggcauugaaaaua

SEQ ID NO: 1939210 - RNA, 19 nt, Homo sapiens
  misc_RNA (1)...(19): siRNA sense strand
aaucaaaucaugccuaaga

SEQ ID NO: 1939211 - RNA, 19 nt, Homo sapiens
  misc_RNA (1)...(19): siRNA sense strand
acaaaggaauuggcauuga

SEQ ID NO: 1939212 - RNA, 19 nt, Homo sapiens
  misc_RNA (1)...(19): siRNA sense strand
guagauaccauuguugcua

SEQ ID NO: 1939213 - RNA, 19 nt, Homo sapiens
  misc_RNA (1)...(19): siRNA sense strand
auagagcaauuuccaggua

SEQ ID NO: 1939214 - RNA, 19 nt, Homo sapiens
  misc_RNA (1)...(19): siRNA sense strand
gagaaagucaacaaaggaa

SEQ ID NO: 1939215 - RNA, 19 nt, Homo sapiens
  misc_RNA (1)...(19): siRNA sense strand
ccaugaacauauagaaauc

SEQ ID NO: 1939216 - RNA, 19 nt, Homo sapiens
  misc_RNA (1)...(19): siRNA sense strand
guacucaguggagcaaaua

SEQ ID NO: 1939217 - RNA, 19 nt, Homo sapiens
  misc_RNA (1)...(19): siRNA sense strand
gaaaacagcaugcucuaug

SEQ ID NO: 1939218 - RNA, 19 nt, Homo sapiens
  misc_RNA (1)...(19): siRNA sense strand
uagauaccauuguugcuau

SEQ ID NO: 1939219 - RNA, 19 nt, Homo sapiens
  misc_RNA (1)...(19): siRNA sense strand
auaaaggagccaucaaauu

SEQ ID NO: 1939220 - RNA, 19 nt, Homo sapiens
  misc_RNA (1)...(19): siRNA sense strand
caaaucaugccuaagaaag

SEQ ID NO: 1939221 - RNA, 19 nt, Homo sapiens
  misc_RNA (1)...(19): siRNA sense strand
gccaugaacauauagaaau

SEQ ID NO: 1939222 - RNA, 19 nt, Homo sapiens
  misc_RNA (1)...(19): siRNA sense strand
ccagcagguugauaaagga

SEQ ID NO: 1939223 - RNA, 19 nt, Homo sapiens
  misc_RNA (1)...(19): siRNA sense strand
aaaggagccaucaaauuug

SEQ ID NO: 1939224 - RNA, 19 nt, Homo sapiens
  misc_RNA (1)...(19): siRNA sense strand
gaagacauugagaaaguca

SEQ ID NO: 1939225 - RNA, 19 nt, Homo sapiens
  misc_RNA (1)...(19): siRNA sense strand
ucaaaucaugccuaagaaa

SEQ ID NO: 1939226 - RNA, 19 nt, Homo sapiens
  misc_RNA (1)...(19): siRNA sense strand
ugagaaagucaacaaagga

SEQ ID NO: 1939227 - RNA, 19 nt, Homo sapiens
  misc_RNA (1)...(19): siRNA sense strand
gcaguagauaccauuguug

SEQ ID NO: 1939228 - RNA, 19 nt, Homo sapiens
  misc_RNA (1)...(19): siRNA sense strand
uuauccaacccuaagauua

SEQ ID NO: 1939229 - RNA, 19 nt, Homo sapiens
  misc_RNA (1)...(19): siRNA sense strand
ugcaguagauaccauuguu

SEQ ID NO: 1939230 - RNA, 19 nt, Homo sapiens
  misc_RNA (1)...(19): siRNA sense strand
aaggagccaucaaauuugu

SEQ ID NO: 1939231 - RNA, 19 nt, Homo sapiens
  misc_RNA (1)...(19): siRNA sense strand
ccuaagauuacuucacaaa

SEQ ID NO: 1939232 - RNA, 19 nt, Homo sapiens
  misc_RNA (1)...(19): siRNA sense strand
agaaagauccugucaaaau

SEQ ID NO: 1939233 - RNA, 19 nt, Homo sapiens
  misc_RNA (1)...(19): siRNA sense strand
aaugaugggcuguggcaua

SEQ ID NO: 1939234 - RNA, 19 nt, Homo sapiens
  misc_RNA (1)...(19): siRNA sense strand
gccaucaaauuuguacuca

SEQ ID NO: 1939235 - RNA, 19 nt, Homo sapiens
  misc_RNA (1)...(19): siRNA sense strand
cagcaugcucuauguguug

SEQ ID NO: 1939236 - RNA, 19 nt, Homo sapiens
  misc_RNA (1)...(19): siRNA sense strand
uagagcaauuuccagguau

SEQ ID NO: 1939237 - RNA, 19 nt, Homo sapiens
  misc_RNA (1)...(19): siRNA sense strand
aaaggaauuggcauugaaa

SEQ ID NO: 1939238 - RNA, 19 nt, Homo sapiens
  misc_RNA (1)...(19): siRNA sense strand
guauugaaccauggcuuaa

SEQ ID NO: 1939239 - RNA, 19 nt, Homo sapiens
  misc_RNA (1)...(19): siRNA sense strand
aaucaugccuaagaaagau

SEQ ID NO: 1939240 - RNA, 19 nt, Homo sapiens
  misc_RNA (1)...(19): siRNA sense strand
gcagaagacauugagaaag

SEQ ID NO: 1939241 - RNA, 19 nt, Homo sapiens
  misc_RNA (1)...(19): siRNA sense strand
acccuaagauuacuucaca

SEQ ID NO: 1939242 - RNA, 19 nt, Homo sapiens
  misc_RNA (1)...(19): siRNA sense strand
cacaccagcagguugauaa

SEQ ID NO: 1939243 - RNA, 19 nt, Homo sapiens
  misc_RNA (1)...(19): siRNA sense strand
agagcaauuuccagguauu

SEQ ID NO: 1939244 - RNA, 19 nt, Homo sapiens
  misc_RNA (1)...(19): siRNA sense strand
uaccauuguugcuaucaug

SEQ ID NO: 1939245 - RNA, 19 nt, Homo sapiens
  misc_RNA (1)...(19): siRNA sense strand
cuucaguuauuaaggguau

SEQ ID NO: 1939246 - RNA, 19 nt, Homo sapiens
  misc_RNA (1)...(19): siRNA sense strand
acagcaugcucuauguguu

SEQ ID NO: 1939247 - RNA, 19 nt, Homo sapiens
  misc_RNA (1)...(19): siRNA sense strand
aaaucaugccuaagaaaga

SEQ ID NO: 1939248 - RNA, 19 nt, Homo sapiens
  misc_RNA (1)...(19): siRNA sense strand
uauccaacccuaagauuac

SEQ ID NO: 1939249 - RNA, 19 nt, Homo sapiens
  misc_RNA (1)...(19): siRNA sense strand
ccacaccagcagguugaua

SEQ ID NO: 1939250 - RNA, 19 nt, Homo sapiens
  misc_RNA (1)...(19): siRNA sense strand
uggagcaaauaucaugugu

SEQ ID NO: 1939251 - RNA, 19 nt, Homo sapiens
  misc_RNA (1)...(19): siRNA sense strand
aaagucaacaaaggaauug

SEQ ID NO: 1939252 - RNA, 19 nt, Homo sapiens
  misc_RNA (1)...(19): siRNA sense strand
ugcagaagacauugagaaa

SEQ ID NO: 1939253 - RNA, 19 nt, Homo sapiens
  misc_RNA (1)...(19): siRNA sense strand
caguggagcaaauaucaug

SEQ ID NO: 1939254 - RNA, 19 nt, Homo sapiens
  misc_RNA (1)...(19): siRNA sense strand
augaugggcuguggcauau

SEQ ID NO: 1939255 - RNA, 19 nt, Homo sapiens
  misc_RNA (1)...(19): siRNA sense strand
guguuggagucaugaagau

SEQ ID NO: 1939256 - RNA, 19 nt, Homo sapiens
  misc_RNA (1)...(19): siRNA sense strand
uaucauggcagaaggaaaa

SEQ ID NO: 1939257 - RNA, 19 nt, Homo sapiens
  misc_RNA (1)...(19): siRNA sense strand
ugaagaugucugcagaaga

SEQ ID NO: 1939258 - RNA, 19 nt, Homo sapiens
  misc_RNA (1)...(19): siRNA sense strand
ucuauguguuggagucaug

SEQ ID NO: 1939259 - RNA, 19 nt, Homo sapiens
  misc_RNA (1)...(19): siRNA sense strand
ccuaagaaagauccuguca

SEQ ID NO: 1939260 - RNA, 19 nt, Homo sapiens
  misc_RNA (1)...(19): siRNA sense strand
cugcagaagacauugagaa

SEQ ID NO: 1939261 - RNA, 19 nt, Homo sapiens
  misc_RNA (1)...(19): siRNA sense strand
aagaaaauguguccaacug

SEQ ID NO: 1939262 - RNA, 19 nt, Homo sapiens
  misc_RNA (1)...(19): siRNA sense strand
aaaacagcaugcucuaugu

SEQ ID NO: 1939263 - RNA, 19 nt, Homo sapiens
  misc_RNA (1)...(19): siRNA sense strand
cuaagaaagauccugucaa

SEQ ID NO: 1939264 - RNA, 19 nt, Homo sapiens
  misc_RNA (1)...(19): siRNA sense strand
uguccaggcuuaacuucuc

SEQ ID NO: 1939265 - RNA, 19 nt, Homo sapiens
  misc_RNA (1)...(19): siRNA sense strand
uguacucaguggagcaaau

SEQ ID NO: 1939266 - RNA, 19 nt, Homo sapiens
  misc_RNA (1)...(19): siRNA sense strand
gaagggagcuauauuugaa

SEQ ID NO: 1939267 - RNA, 19 nt, Homo sapiens
  misc_RNA (1)...(19): siRNA sense strand
gaacugauuuagagaauug

SEQ ID NO: 1939268 - RNA, 19 nt, Homo sapiens
  misc_RNA (1)...(19): siRNA sense strand
uagaggagcuuucuuaauu

SEQ ID NO: 1939269 - RNA, 19 nt, Homo sapiens
  misc_RNA (1)...(19): siRNA sense strand
gaaaggugguugcuguaua

SEQ ID NO: 1939270 - RNA, 19 nt, Homo sapiens
  misc_RNA (1)...(19): siRNA sense strand
gaaaggaauuuguccgauu

SEQ ID NO: 1939271 - RNA, 19 nt, Homo sapiens
  misc_RNA (1)...(19): siRNA sense strand
gcaguaaacucggcauaaa

SEQ ID NO: 1939272 - RNA, 19 nt, Homo sapiens
  misc_RNA (1)...(19): siRNA sense strand
uaaagaaccugacaguaug

SEQ ID NO: 1939273 - RNA, 19 nt, Homo sapiens
  misc_RNA (1)...(19): siRNA sense strand
gguauugacucauugauug

SEQ ID NO: 1939274 - RNA, 19 nt, Homo sapiens
  misc_RNA (1)...(19): siRNA sense strand
gaaauaagcaagaucauag

SEQ ID NO: 1939275 - RNA, 19 nt, Homo sapiens
  misc_RNA (1)...(19): siRNA sense strand
gugcugaucuuucucguuu

SEQ ID NO: 1939276 - RNA, 19 nt, Homo sapiens
  misc_RNA (1)...(19): siRNA sense strand
gaagaacuguaaccucaga

SEQ ID NO: 1939277 - RNA, 19 nt, Homo sapiens
  misc_RNA (1)...(19): siRNA sense strand
ggaaauaagcaagaucaua

SEQ ID NO: 1939278 - RNA, 19 nt, Homo sapiens
  misc_RNA (1)...(19): siRNA sense strand
ggaggaucauucaccaaua

SEQ ID NO: 1939279 - RNA, 19 nt, Homo sapiens
  misc_RNA (1)...(19): siRNA sense strand
gaaggagagccauuuauug

SEQ ID NO: 1939280 - RNA, 19 nt, Homo sapiens
  misc_RNA (1)...(19): siRNA sense strand
ggagagccauuuauugauc

SEQ ID NO: 1939281 - RNA, 19 nt, Homo sapiens
  misc_RNA (1)...(19): siRNA sense strand
gaggaucauucaccaauau

SEQ ID NO: 1939282 - RNA, 19 nt, Homo sapiens
  misc_RNA (1)...(19): siRNA sense strand
aaaggaauuuguccgauuu

SEQ ID NO: 1939283 - RNA, 19 nt, Homo sapiens
  misc_RNA (1)...(19): siRNA sense strand
cagacuggcugacauuaaa

SEQ ID NO: 1939284 - RNA, 19 nt, Homo sapiens
  misc_RNA (1)...(19): siRNA sense strand
gaggagcuuucuuaauuga

SEQ ID NO: 1939285 - RNA, 19 nt, Homo sapiens
  misc_RNA (1)...(19): siRNA sense strand
ucaagaugcucuguucuaa

SEQ ID NO: 1939286 - RNA, 19 nt, Homo sapiens
  misc_RNA (1)...(19): siRNA sense strand
gggcgguacuuuacaacua

SEQ ID NO: 1939287 - RNA, 19 nt, Homo sapiens
  misc_RNA (1)...(19): siRNA sense strand
gaggauccuucuggucuua

SEQ ID NO: 1939288 - RNA, 19 nt, Homo sapiens
  misc_RNA (1)...(19): siRNA sense strand
ucauagaggagcuuucuua

SEQ ID NO: 1939289 - RNA, 19 nt, Homo sapiens
  misc_RNA (1)...(19): siRNA sense strand
ggagggcgguacuuuacaa

SEQ ID NO: 1939290 - RNA, 19 nt, Homo sapiens
  misc_RNA (1)...(19): siRNA sense strand
gaaguggcaauaaagaauu

SEQ ID NO: 1939291 - RNA, 19 nt, Homo sapiens
  misc_RNA (1)...(19): siRNA sense strand
uuaagccgcuguaaucuug

SEQ ID NO: 1939292 - RNA, 19 nt, Homo sapiens
  misc_RNA (1)...(19): siRNA sense strand
aaaggugguugcuguauau

SEQ ID NO: 1939293 - RNA, 19 nt, Homo sapiens
  misc_RNA (1)...(19): siRNA sense strand
ugaacgagcugaucucucu

SEQ ID NO: 1939294 - RNA, 19 nt, Homo sapiens
  misc_RNA (1)...(19): siRNA sense strand
gagaguggcuaccuuaaaa

SEQ ID NO: 1939295 - RNA, 19 nt, Homo sapiens
  misc_RNA (1)...(19): siRNA sense strand
ugggaaagguggacugauu

SEQ ID NO: 1939296 - RNA, 19 nt, Homo sapiens
  misc_RNA (1)...(19): siRNA sense strand
cuacacaugucacaaagug

SEQ ID NO: 1939297 - RNA, 19 nt, Homo sapiens
  misc_RNA (1)...(19): siRNA sense strand
ggagcuauauuugaagaga

SEQ ID NO: 1939298 - RNA, 19 nt, Homo sapiens
  misc_RNA (1)...(19): siRNA sense strand
aagaugcucuguucuaaug

SEQ ID NO: 1939299 - RNA, 19 nt, Homo sapiens
  misc_RNA (1)...(19): siRNA sense strand
gaauaaagaaccugacagu

SEQ ID NO: 1939300 - RNA, 19 nt, Homo sapiens
  misc_RNA (1)...(19): siRNA sense strand
guuagaagaagcaagauuu

SEQ ID NO: 1939301 - RNA, 19 nt, Homo sapiens
  misc_RNA (1)...(19): siRNA sense strand
auaaagaaccugacaguau

SEQ ID NO: 1939302 - RNA, 19 nt, Homo sapiens
  misc_RNA (1)...(19): siRNA sense strand
ggcaggaacugauuuagag

SEQ ID NO: 1939303 - RNA, 19 nt, Homo sapiens
  misc_RNA (1)...(19): siRNA sense strand
ugaaagguguggauaugga

SEQ ID NO: 1939304 - RNA, 19 nt, Homo sapiens
  misc_RNA (1)...(19): siRNA sense strand
agaaggugcuaaucugaaa

SEQ ID NO: 1939305 - RNA, 19 nt, Homo sapiens
  misc_RNA (1)...(19): siRNA sense strand
ggaacugauuuagagaauu

SEQ ID NO: 1939306 - RNA, 19 nt, Homo sapiens
  misc_RNA (1)...(19): siRNA sense strand
ugaaggagagccauuuauu

SEQ ID NO: 1939307 - RNA, 19 nt, Homo sapiens
  misc_RNA (1)...(19): siRNA sense strand
agaaggagcaucccugaaa

SEQ ID NO: 1939308 - RNA, 19 nt, Homo sapiens
  misc_RNA (1)...(19): siRNA sense strand
gagucaagaugcucuguuc

SEQ ID NO: 1939309 - RNA, 19 nt, Homo sapiens
  misc_RNA (1)...(19): siRNA sense strand
gaaggagcaucccugaaac

SEQ ID NO: 1939310 - RNA, 19 nt, Homo sapiens
  misc_RNA (1)...(19): siRNA sense strand
ucaagaagccaaccugaga

SEQ ID NO: 1939311 - RNA, 19 nt, Homo sapiens
  misc_RNA (1)...(19): siRNA sense strand
ggaaagguggacugauuga

SEQ ID NO: 1939312 - RNA, 19 nt, Homo sapiens
  misc_RNA (1)...(19): siRNA sense strand
ccacuacacaugucacaaa

SEQ ID NO: 1939313 - RNA, 19 nt, Homo sapiens
  misc_RNA (1)...(19): siRNA sense strand
aagguggacugauugauga

SEQ ID NO: 1939314 - RNA, 19 nt, Homo sapiens
  misc_RNA (1)...(19): siRNA sense strand
caacgugaagggagcuaua

SEQ ID NO: 1939315 - RNA, 19 nt, Homo sapiens
  misc_RNA (1)...(19): siRNA sense strand
caacuacacggagcacuuu

SEQ ID NO: 1939316 - RNA, 19 nt, Homo sapiens
  misc_RNA (1)...(19): siRNA sense strand
ggugguugcuguauaugga

SEQ ID NO: 1939317 - RNA, 19 nt, Homo sapiens
  misc_RNA (1)...(19): siRNA sense strand
aaggagagccauuuauuga

SEQ ID NO: 1939318 - RNA, 19 nt, Homo sapiens
  misc_RNA (1)...(19): siRNA sense strand
uaucugauuugcuuucugu

SEQ ID NO: 1939319 - RNA, 19 nt, Homo sapiens
  misc_RNA (1)...(19): siRNA sense strand
agaggagcuuucuuaauug

SEQ ID NO: 1939320 - RNA, 19 nt, Homo sapiens
  misc_RNA (1)...(19): siRNA sense strand
ccacauguuuaaggacaaa

SEQ ID NO: 1939321 - RNA, 19 nt, Homo sapiens
  misc_RNA (1)...(19): siRNA sense strand
gaaagguguggauauggaa

SEQ ID NO: 1939322 - RNA, 19 nt, Homo sapiens
  misc_RNA (1)...(19): siRNA sense strand
ccaccaguguguauaaugg

SEQ ID NO: 1939323 - RNA, 19 nt, Homo sapiens
  misc_RNA (1)...(19): siRNA sense strand
gucacaaagugucagauga

SEQ ID NO: 1939324 - RNA, 19 nt, Homo sapiens
  misc_RNA (1)...(19): siRNA sense strand
ugaagggagcuauauuuga

SEQ ID NO: 1939325 - RNA, 19 nt, Homo sapiens
  misc_RNA (1)...(19): siRNA sense strand
gaccuucgauacauuaacu

SEQ ID NO: 1939326 - RNA, 19 nt, Homo sapiens
  misc_RNA (1)...(19): siRNA sense strand
ggaugaugauguuuuguuu

SEQ ID NO: 1939327 - RNA, 19 nt, Homo sapiens
  misc_RNA (1)...(19): siRNA sense strand
cccugaaacuguguaauuu

SEQ ID NO: 1939328 - RNA, 19 nt, Homo sapiens
  misc_RNA (1)...(19): siRNA sense strand
cauagaggagcuuucuuaa

SEQ ID NO: 1939329 - RNA, 19 nt, Homo sapiens
  misc_RNA (1)...(19): siRNA sense strand
gugaagggagcuauauuug

SEQ ID NO: 1939330 - RNA, 19 nt, Homo sapiens
  misc_RNA (1)...(19): siRNA sense strand
cgugaagggagcuauauuu

SEQ ID NO: 1939331 - RNA, 19 nt, Homo sapiens
  misc_RNA (1)...(19): siRNA sense strand
ggauccuucuggucuuaaa

SEQ ID NO: 1939332 - RNA, 19 nt, Homo sapiens
  misc_RNA (1)...(19): siRNA sense strand
ggaaaggugguugcuguau

SEQ ID NO: 1939333 - RNA, 19 nt, Homo sapiens
  misc_RNA (1)...(19): siRNA sense strand
auggacagcucauuguaaa

SEQ ID NO: 1939334 - RNA, 19 nt, Homo sapiens
  misc_RNA (1)...(19): siRNA sense strand
caauaucccgaaaggaauu

SEQ ID NO: 1939335 - RNA, 19 nt, Homo sapiens
  misc_RNA (1)...(19): siRNA sense strand
ggacugauugaugauauug

SEQ ID NO: 1939336 - RNA, 19 nt, Homo sapiens
  misc_RNA (1)...(19): siRNA sense strand
ucaccaauaucccgaaagg

SEQ ID NO: 1939337 - RNA, 19 nt, Homo sapiens
  misc_RNA (1)...(19): siRNA sense strand
gagcuauauuugaagagau

SEQ ID NO: 1939338 - RNA, 19 nt, Homo sapiens
  misc_RNA (1)...(19): siRNA sense strand
ugcuguauauggaacuuua

SEQ ID NO: 1939339 - RNA, 19 nt, Homo sapiens
  misc_RNA (1)...(19): siRNA sense strand
gauugaugauauugcuuug

SEQ ID NO: 1939340 - RNA, 19 nt, Homo sapiens
  misc_RNA (1)...(19): siRNA sense strand
guuggagggcgguacuuua

SEQ ID NO: 1939341 - RNA, 19 nt, Homo sapiens
  misc_RNA (1)...(19): siRNA sense strand
gauauggaaggaagucaga

SEQ ID NO: 1939342 - RNA, 19 nt, Homo sapiens
  misc_RNA (1)...(19): siRNA sense strand
ucugaaagguguggauaug

SEQ ID NO: 1939343 - RNA, 19 nt, Homo sapiens
  misc_RNA (1)...(19): siRNA sense strand
gggaaagguggacugauug

SEQ ID NO: 1939344 - RNA, 19 nt, Homo sapiens
  misc_RNA (1)...(19): siRNA sense strand
guggacugauugaugauau

SEQ ID NO: 1939345 - RNA, 19 nt, Homo sapiens
  misc_RNA (1)...(19): siRNA sense strand
ccugagggauuguuaggau

SEQ ID NO: 1939346 - RNA, 19 nt, Homo sapiens
  misc_RNA (1)...(19): siRNA sense strand
gucaagaugcucuguucua

SEQ ID NO: 1939347 - RNA, 19 nt, Homo sapiens
  misc_RNA (1)...(19): siRNA sense strand
gauugaacaccuagaagug

SEQ ID NO: 1939348 - RNA, 19 nt, Homo sapiens
  misc_RNA (1)...(19): siRNA sense strand
gaacuacuugcgucaugga

SEQ ID NO: 1939349 - RNA, 19 nt, Homo sapiens
  misc_RNA (1)...(19): siRNA sense strand
gaucauagaggagcuuucu

SEQ ID NO: 1939350 - RNA, 19 nt, Homo sapiens
  misc_RNA (1)...(19): siRNA sense strand
aaagguggacugauugaug

SEQ ID NO: 1939351 - RNA, 19 nt, Homo sapiens
  misc_RNA (1)...(19): siRNA sense strand
ugagaguggcuaccuuaaa

SEQ ID NO: 1939352 - RNA, 19 nt, Homo sapiens
  misc_RNA (1)...(19): siRNA sense strand
ccugagaguggcuaccuua

SEQ ID NO: 1939353 - RNA, 19 nt, Homo sapiens
  misc_RNA (1)...(19): siRNA sense strand
caacuccaaccaagucaga

SEQ ID NO: 1939354 - RNA, 19 nt, Homo sapiens
  misc_RNA (1)...(19): siRNA sense strand
cauggacagcucauuguaa

SEQ ID NO: 1939355 - RNA, 19 nt, Homo sapiens
  misc_RNA (1)...(19): siRNA sense strand
ugaccgaaguccugaguac

SEQ ID NO: 1939356 - RNA, 19 nt, Homo sapiens
  misc_RNA (1)...(19): siRNA sense strand
aaaggugucuggggaaaua

SEQ ID NO: 1939357 - RNA, 19 nt, Homo sapiens
  misc_RNA (1)...(19): siRNA sense strand
uaugcuggcccacauguuu

SEQ ID NO: 1939358 - RNA, 19 nt, Homo sapiens
  misc_RNA (1)...(19): siRNA sense strand
gcaauaaagaauucucaac

SEQ ID NO: 1939359 - RNA, 19 nt, Homo sapiens
  misc_RNA (1)...(19): siRNA sense strand
gcugaucuuucucguuugg

SEQ ID NO: 1939360 - RNA, 19 nt, Homo sapiens
  misc_RNA (1)...(19): siRNA sense strand
gcugacaccacuacacaug

SEQ ID NO: 1939361 - RNA, 19 nt, Homo sapiens
  misc_RNA (1)...(19): siRNA sense strand
caauuuaagccgcuguaau

SEQ ID NO: 1939362 - RNA, 19 nt, Homo sapiens
  misc_RNA (1)...(19): siRNA sense strand
caagaugcucuguucuaau

SEQ ID NO: 1939363 - RNA, 19 nt, Homo sapiens
  misc_RNA (1)...(19): siRNA sense strand
uuagagaauugugaucugu

SEQ ID NO: 1939364 - RNA, 19 nt, Homo sapiens
  misc_RNA (1)...(19): siRNA sense strand
gcaggaacugauuuagaga

SEQ ID NO: 1939365 - RNA, 19 nt, Homo sapiens
  misc_RNA (1)...(19): siRNA sense strand
gaugcucuguucuaaugca

SEQ ID NO: 1939366 - RNA, 19 nt, Homo sapiens
  misc_RNA (1)...(19): siRNA sense strand
ccaagaaggucugguacga

SEQ ID NO: 1939367 - RNA, 19 nt, Homo sapiens
  misc_RNA (1)...(19): siRNA sense strand
caucagaaccacugucuuc

SEQ ID NO: 1939368 - RNA, 19 nt, Homo sapiens
  misc_RNA (1)...(19): siRNA sense strand
ugcaggaaguuucuacuga

SEQ ID NO: 1939369 - RNA, 19 nt, Homo sapiens
  misc_RNA (1)...(19): siRNA sense strand
gaaggucugguacgacaug

SEQ ID NO: 1939370 - RNA, 19 nt, Homo sapiens
  misc_RNA (1)...(19): siRNA sense strand
caggaaguuucuacugaca

SEQ ID NO: 1939371 - RNA, 19 nt, Homo sapiens
  misc_RNA (1)...(19): siRNA sense strand
ggucugguacgacauguuc

SEQ ID NO: 1939372 - RNA, 19 nt, Homo sapiens
  misc_RNA (1)...(19): siRNA sense strand
gacaggccagugcgacuuu

SEQ ID NO: 1939373 - RNA, 19 nt, Homo sapiens
  misc_RNA (1)...(19): siRNA sense strand
uacgacauguuccgagaug

SEQ ID NO: 1939374 - RNA, 19 nt, Homo sapiens
  misc_RNA (1)...(19): siRNA sense strand
ccaaguagcagggcugaac

SEQ ID NO: 1939375 - RNA, 19 nt, Homo sapiens
  misc_RNA (1)...(19): siRNA sense strand
gcagaugcaucccuacuua

SEQ ID NO: 1939376 - RNA, 19 nt, Homo sapiens
  misc_RNA (1)...(19): siRNA sense strand
ccacaaacaucuucaguaa

SEQ ID NO: 1939377 - RNA, 19 nt, Homo sapiens
  misc_RNA (1)...(19): siRNA sense strand
uaaaugagcuggaugguau

SEQ ID NO: 1939378 - RNA, 19 nt, Homo sapiens
  misc_RNA (1)...(19): siRNA sense strand
gaauggccguucuugauua

SEQ ID NO: 1939379 - RNA, 19 nt, Homo sapiens
  misc_RNA (1)...(19): siRNA sense strand
ggaaaucuguguuacaaga

SEQ ID NO: 1939380 - RNA, 19 nt, Homo sapiens
  misc_RNA (1)...(19): siRNA sense strand
agaaagaguuacacuguua

SEQ ID NO: 1939381 - RNA, 19 nt, Homo sapiens
  misc_RNA (1)...(19): siRNA sense strand
ugaaagaacuggaggagaa

SEQ ID NO: 1939382 - RNA, 19 nt, Homo sapiens
  misc_RNA (1)...(19): siRNA sense strand
uuacaucccuuaaucauga

SEQ ID NO: 1939383 - RNA, 19 nt, Homo sapiens
  misc_RNA (1)...(19): siRNA sense strand
gaaccucaauauugcaauu

SEQ ID NO: 1939384 - RNA, 19 nt, Homo sapiens
  misc_RNA (1)...(19): siRNA sense strand
gaauaaagauaaccaagac

SEQ ID NO: 1939385 - RNA, 19 nt, Homo sapiens
  misc_RNA (1)...(19): siRNA sense strand
gaaaucuucucaugcuguu

SEQ ID NO: 1939386 - RNA, 19 nt, Homo sapiens
  misc_RNA (1)...(19): siRNA sense strand
gaagauucccagucuauug

SEQ ID NO: 1939387 - RNA, 19 nt, Homo sapiens
  misc_RNA (1)...(19): siRNA sense strand
gagcuugccugcagagauc

SEQ ID NO: 1939388 - RNA, 19 nt, Homo sapiens
  misc_RNA (1)...(19): siRNA sense strand
caagaaagaguuacacugu

SEQ ID NO: 1939389 - RNA, 19 nt, Homo sapiens
  misc_RNA (1)...(19): siRNA sense strand
ugucauagaugcuuaccaa

SEQ ID NO: 1939390 - RNA, 19 nt, Homo sapiens
  misc_RNA (1)...(19): siRNA sense strand
guuuaagucucaucucauu

SEQ ID NO: 1939391 - RNA, 19 nt, Homo sapiens
  misc_RNA (1)...(19): siRNA sense strand
ccaauggguuuaagucuca

SEQ ID NO: 1939392 - RNA, 19 nt, Homo sapiens
  misc_RNA (1)...(19): siRNA sense strand
uggccguucuugauuauua

SEQ ID NO: 1939393 - RNA, 19 nt, Homo sapiens
  misc_RNA (1)...(19): siRNA sense strand
gaacaaucaagaaagaguu

SEQ ID NO: 1939394 - RNA, 19 nt, Homo sapiens
  misc_RNA (1)...(19): siRNA sense strand
ccaaagaguucuggauauc

SEQ ID NO: 1939395 - RNA, 19 nt, Homo sapiens
  misc_RNA (1)...(19): siRNA sense strand
gcgaaaagcugauccugaa

SEQ ID NO: 1939396 - RNA, 19 nt, Homo sapiens
  misc_RNA (1)...(19): siRNA sense strand
gaaggugacaucuccaaug

SEQ ID NO: 1939397 - RNA, 19 nt, Homo sapiens
  misc_RNA (1)...(19): siRNA sense strand
gaaaagcccggaauuggua

SEQ ID NO: 1939398 - RNA, 19 nt, Homo sapiens
  misc_RNA (1)...(19): siRNA sense strand
gaaaugacugugaauacug

SEQ ID NO: 1939399 - RNA, 19 nt, Homo sapiens
  misc_RNA (1)...(19): siRNA sense strand
caacauugccucacggaau

SEQ ID NO: 1939400 - RNA, 19 nt, Homo sapiens
  misc_RNA (1)...(19): siRNA sense strand
caacaucagugacaguaac

SEQ ID NO: 1939401 - RNA, 19 nt, Homo sapiens
  misc_RNA (1)...(19): siRNA sense strand
gaaacagcacccaggacua

SEQ ID NO: 1939402 - RNA, 19 nt, Homo sapiens
  misc_RNA (1)...(19): siRNA sense strand
gcagagauccaucccaagu

SEQ ID NO: 1939403 - RNA, 19 nt, Homo sapiens
  misc_RNA (1)...(19): siRNA sense strand
aaaugacugugaauacuga

SEQ ID NO: 1939404 - RNA, 19 nt, Homo sapiens
  misc_RNA (1)...(19): siRNA sense strand
gaacuuggauacgauuggu

SEQ ID NO: 1939405 - RNA, 19 nt, Homo sapiens
  misc_RNA (1)...(19): siRNA sense strand
uagccaagauaacgaguga

SEQ ID NO: 1939406 - RNA, 19 nt, Homo sapiens
  misc_RNA (1)...(19): siRNA sense strand
guaaaugagcuggauggua

SEQ ID NO: 1939407 - RNA, 19 nt, Homo sapiens
  misc_RNA (1)...(19): siRNA sense strand
gcaagacugugcucaagcu

SEQ ID NO: 1939408 - RNA, 19 nt, Homo sapiens
  misc_RNA (1)...(19): siRNA sense strand
cgaaaugacugugaauacu

SEQ ID NO: 1939409 - RNA, 19 nt, Homo sapiens
  misc_RNA (1)...(19): siRNA sense strand
ggguuuaagucucaucuca

SEQ ID NO: 1939410 - RNA, 19 nt, Homo sapiens
  misc_RNA (1)...(19): siRNA sense strand
gaggcacuggcuacaauua

SEQ ID NO: 1939411 - RNA, 19 nt, Homo sapiens
  misc_RNA (1)...(19): siRNA sense strand
gaaaucuguguuacaagaa

SEQ ID NO: 1939412 - RNA, 19 nt, Homo sapiens
  misc_RNA (1)...(19): siRNA sense strand
gaaaagaaaccacaaacau

SEQ ID NO: 1939413 - RNA, 19 nt, Homo sapiens
  misc_RNA (1)...(19): siRNA sense strand
gcucacggcgcucuucaaa

SEQ ID NO: 1939414 - RNA, 19 nt, Homo sapiens
  misc_RNA (1)...(19): siRNA sense strand
caagguaaaugagcuggau

SEQ ID NO: 1939415 - RNA, 19 nt, Homo sapiens
  misc_RNA (1)...(19): siRNA sense strand
ugccuacucuucaaugauu

SEQ ID NO: 1939416 - RNA, 19 nt, Homo sapiens
  misc_RNA (1)...(19): siRNA sense strand
aagcugauccugaaaucua

SEQ ID NO: 1939417 - RNA, 19 nt, Homo sapiens
  misc_RNA (1)...(19): siRNA sense strand
caauguggccaauggguuu

SEQ ID NO: 1939418 - RNA, 19 nt, Homo sapiens
  misc_RNA (1)...(19): siRNA sense strand
ucauguagcuggaaaagaa

SEQ ID NO: 1939419 - RNA, 19 nt, Homo sapiens
  misc_RNA (1)...(19): siRNA sense strand
gauuauuacagaccucuuu

SEQ ID NO: 1939420 - RNA, 19 nt, Homo sapiens
  misc_RNA (1)...(19): siRNA sense strand
aagaaagaguuacacuguu

SEQ ID NO: 1939421 - RNA, 19 nt, Homo sapiens
  misc_RNA (1)...(19): siRNA sense strand
uccgaaaccuuaccgaaga

SEQ ID NO: 1939422 - RNA, 19 nt, Homo sapiens
  misc_RNA (1)...(19): siRNA sense strand
acuguuagaccuuaugaua

SEQ ID NO: 1939423 - RNA, 19 nt, Homo sapiens
  misc_RNA (1)...(19): siRNA sense strand
gcuguugauuugauucuuc

SEQ ID NO: 1939424 - RNA, 19 nt, Homo sapiens
  misc_RNA (1)...(19): siRNA sense strand
uugcaaagauggaggaaca

SEQ ID NO: 1939425 - RNA, 19 nt, Homo sapiens
  misc_RNA (1)...(19): siRNA sense strand
guuacacuguuagaccuua

SEQ ID NO: 1939426 - RNA, 19 nt, Homo sapiens
  misc_RNA (1)...(19): siRNA sense strand
gauucccagucuauuguuu

SEQ ID NO: 1939427 - RNA, 19 nt, Homo sapiens
  misc_RNA (1)...(19): siRNA sense strand
gcauagaguguucugugaa

SEQ ID NO: 1939428 - RNA, 19 nt, Homo sapiens
  misc_RNA (1)...(19): siRNA sense strand
gagcagcggaaccgagaaa

SEQ ID NO: 1939429 - RNA, 19 nt, Homo sapiens
  misc_RNA (1)...(19): siRNA sense strand
caaacaucuucaguaauug

SEQ ID NO: 1939430 - RNA, 19 nt, Homo sapiens
  misc_RNA (1)...(19): siRNA sense strand
aaagaaaccacaaacaucu

SEQ ID NO: 1939431 - RNA, 19 nt, Homo sapiens
  misc_RNA (1)...(19): siRNA sense strand
acugaacaaucaagaaaga

SEQ ID NO: 1939432 - RNA, 19 nt, Homo sapiens
  misc_RNA (1)...(19): siRNA sense strand
caaacugaacaaucaagaa

SEQ ID NO: 1939433 - RNA, 19 nt, Homo sapiens
  misc_RNA (1)...(19): siRNA sense strand
gcaauugaugucauagaug

SEQ ID NO: 1939434 - RNA, 19 nt, Homo sapiens
  misc_RNA (1)...(19): siRNA sense strand
ggugcaugcuuucccagaa

SEQ ID NO: 1939435 - RNA, 19 nt, Homo sapiens
  misc_RNA (1)...(19): siRNA sense strand
uaauugugguugcgugaga

SEQ ID NO: 1939436 - RNA, 19 nt, Homo sapiens
  misc_RNA (1)...(19): siRNA sense strand
aaaccaagauuugauugca

SEQ ID NO: 1939437 - RNA, 19 nt, Homo sapiens
  misc_RNA (1)...(19): siRNA sense strand
aaacagcacccaggacuau

SEQ ID NO: 1939438 - RNA, 19 nt, Homo sapiens
  misc_RNA (1)...(19): siRNA sense strand
cgauugguguugcuguuga

SEQ ID NO: 1939439 - RNA, 19 nt, Homo sapiens
  misc_RNA (1)...(19): siRNA sense strand
gcaacaucagugacaguaa

SEQ ID NO: 1939440 - RNA, 19 nt, Homo sapiens
  misc_RNA (1)...(19): siRNA sense strand
ucauucgucugauuggaaa

SEQ ID NO: 1939441 - RNA, 19 nt, Homo sapiens
  misc_RNA (1)...(19): siRNA sense strand
ccaggacuaucuuccaaag

SEQ ID NO: 1939442 - RNA, 19 nt, Homo sapiens
  misc_RNA (1)...(19): siRNA sense strand
gcgaaaugacugugaauac

SEQ ID NO: 1939443 - RNA, 19 nt, Homo sapiens
  misc_RNA (1)...(19): siRNA sense strand
gaaagaguuacacuguuag

SEQ ID NO: 1939444 - RNA, 19 nt, Homo sapiens
  misc_RNA (1)...(19): siRNA sense strand
ucaaucaggaacuuggaua

SEQ ID NO: 1939445 - RNA, 19 nt, Homo sapiens
  misc_RNA (1)...(19): siRNA sense strand
ugauauaugccauccgaaa

SEQ ID NO: 1939446 - RNA, 19 nt, Homo sapiens
  misc_RNA (1)...(19): siRNA sense strand
cuggacaacugcaacauca

SEQ ID NO: 1939447 - RNA, 19 nt, Homo sapiens
  misc_RNA (1)...(19): siRNA sense strand
agaauucaaucaggaacuu

SEQ ID NO: 1939448 - RNA, 19 nt, Homo sapiens
  misc_RNA (1)...(19): siRNA sense strand
caagcaccuuuguggauca

SEQ ID NO: 1939449 - RNA, 19 nt, Homo sapiens
  misc_RNA (1)...(19): siRNA sense strand
gauaaccaagacaagguaa

SEQ ID NO: 1939450 - RNA, 19 nt, Homo sapiens
  misc_RNA (1)...(19): siRNA sense strand
uuggaaaucuguguuacaa

SEQ ID NO: 1939451 - RNA, 19 nt, Homo sapiens
  misc_RNA (1)...(19): siRNA sense strand
ucaggaacuuggauacgau

SEQ ID NO: 1939452 - RNA, 19 nt, Homo sapiens
  misc_RNA (1)...(19): siRNA sense strand
caagauaacgagugaugag

SEQ ID NO: 1939453 - RNA, 19 nt, Homo sapiens
  misc_RNA (1)...(19): siRNA sense strand
uaugccauccgaaaccuua

SEQ ID NO: 1939454 - RNA, 19 nt, Homo sapiens
  misc_RNA (1)...(19): siRNA sense strand
uaaccaagacaagguaaau

SEQ ID NO: 1939455 - RNA, 19 nt, Homo sapiens
  misc_RNA (1)...(19): siRNA sense strand
cuggauauccuaaagaaau

SEQ ID NO: 1939456 - RNA, 19 nt, Homo sapiens
  misc_RNA (1)...(19): siRNA sense strand
gugcaagacugugcucaag

SEQ ID NO: 1939457 - RNA, 19 nt, Homo sapiens
  misc_RNA (1)...(19): siRNA sense strand
gcuuaaaucauccggacaa

SEQ ID NO: 1939458 - RNA, 19 nt, Homo sapiens
  misc_RNA (1)...(19): siRNA sense strand
ucucaucucauucgucuga

SEQ ID NO: 1939459 - RNA, 19 nt, Homo sapiens
  misc_RNA (1)...(19): siRNA sense strand
uggaaagagugauugaucu

SEQ ID NO: 1939460 - RNA, 19 nt, Homo sapiens
  misc_RNA (1)...(19): siRNA sense strand
gcucggcuaucugcagguu

SEQ ID NO: 1939461 - RNA, 19 nt, Homo sapiens
  misc_RNA (1)...(19): siRNA sense strand
gccaagauaacgagugaug

SEQ ID NO: 1939462 - RNA, 19 nt, Homo sapiens
  misc_RNA (1)...(19): siRNA sense strand
aggagaaccucaauauugc

SEQ ID NO: 1939463 - RNA, 19 nt, Homo sapiens
  misc_RNA (1)...(19): siRNA sense strand
ugcauagaguguucuguga

SEQ ID NO: 1939464 - RNA, 19 nt, Homo sapiens
  misc_RNA (1)...(19): siRNA sense strand
gagagcagaaggugacauc

SEQ ID NO: 1939465 - RNA, 19 nt, Homo sapiens
  misc_RNA (1)...(19): siRNA sense strand
gcggcaugcugaguugauu

SEQ ID NO: 1939466 - RNA, 19 nt, Homo sapiens
  misc_RNA (1)...(19): siRNA sense strand
uucccaaacugaacaauca

SEQ ID NO: 1939467 - RNA, 19 nt, Homo sapiens
  misc_RNA (1)...(19): siRNA sense strand
gagaaccucaauauugcaa

SEQ ID NO: 1939468 - RNA, 19 nt, Homo sapiens
  misc_RNA (1)...(19): siRNA sense strand
ugcaauugaugucauagau

SEQ ID NO: 1939469 - RNA, 19 nt, Homo sapiens
  misc_RNA (1)...(19): siRNA sense strand
gaaaagcugauccugaaau

SEQ ID NO: 1939470 - RNA, 19 nt, Homo sapiens
  misc_RNA (1)...(19): siRNA sense strand
gacaguaaccccuuucuga

SEQ ID NO: 1939471 - RNA, 19 nt, Homo sapiens
  misc_RNA (1)...(19): siRNA sense strand
guugccuacucuucaauga

SEQ ID NO: 1939472 - RNA, 19 nt, Homo sapiens
  misc_RNA (1)...(19): siRNA sense strand
gacguccugugcgaaauga

SEQ ID NO: 1939473 - RNA, 19 nt, Homo sapiens
  misc_RNA (1)...(19): siRNA sense strand
ggaggcacuggcuacaauu

SEQ ID NO: 1939474 - RNA, 19 nt, Homo sapiens
  misc_RNA (1)...(19): siRNA sense strand
ccaaacugaacaaucaaga

SEQ ID NO: 1939475 - RNA, 19 nt, Homo sapiens
  misc_RNA (1)...(19): siRNA sense strand
gaaagaaguuugugaagaa

SEQ ID NO: 1939476 - RNA, 19 nt, Homo sapiens
  misc_RNA (1)...(19): siRNA sense strand
gaauuuaguuccuucaugu

SEQ ID NO: 1939477 - RNA, 19 nt, Homo sapiens
  misc_RNA (1)...(19): siRNA sense strand
caacaucgaucaugaacug

SEQ ID NO: 1939478 - RNA, 19 nt, Homo sapiens
  misc_RNA (1)...(19): siRNA sense strand
gaacaagacccugaagaaa

SEQ ID NO: 1939479 - RNA, 19 nt, Homo sapiens
  misc_RNA (1)...(19): siRNA sense strand
ggaagaacauuuacaccau

SEQ ID NO: 1939480 - RNA, 19 nt, Homo sapiens
  misc_RNA (1)...(19): siRNA sense strand
ggaacaagacccugaagaa

SEQ ID NO: 1939481 - RNA, 19 nt, Homo sapiens
  misc_RNA (1)...(19): siRNA sense strand
gcacauuucugguuuccau

SEQ ID NO: 1939482 - RNA, 19 nt, Homo sapiens
  misc_RNA (1)...(19): siRNA sense strand
aaacaccucugcacauuuc

SEQ ID NO: 1939483 - RNA, 19 nt, Homo sapiens
  misc_RNA (1)...(19): siRNA sense strand
ugacagaggugaggacguu

SEQ ID NO: 1939484 - RNA, 19 nt, Homo sapiens
  misc_RNA (1)...(19): siRNA sense strand
agaaacaccucugcacauu

SEQ ID NO: 1939485 - RNA, 19 nt, Homo sapiens
  misc_RNA (1)...(19): siRNA sense strand
agaaagaaguuugugaaga

SEQ ID NO: 1939486 - RNA, 19 nt, Homo sapiens
  misc_RNA (1)...(19): siRNA sense strand
gugaggacguuccaaguga

SEQ ID NO: 1939487 - RNA, 19 nt, Homo sapiens
  misc_RNA (1)...(19): siRNA sense strand
gaaacaccucugcacauuu

SEQ ID NO: 1939488 - RNA, 19 nt, Homo sapiens
  misc_RNA (1)...(19): siRNA sense strand
aaggugagcucaucgauuc

SEQ ID NO: 1939489 - RNA, 19 nt, Homo sapiens
  misc_RNA (1)...(19): siRNA sense strand
acaagacccugaagaaagu

SEQ ID NO: 1939490 - RNA, 19 nt, Homo sapiens
  misc_RNA (1)...(19): siRNA sense strand
ccugagaaccuggaauuua

SEQ ID NO: 1939491 - RNA, 19 nt, Homo sapiens
  misc_RNA (1)...(19): siRNA sense strand
ccaguaacaucaagcagau

SEQ ID NO: 1939492 - RNA, 19 nt, Homo sapiens
  misc_RNA (1)...(19): siRNA sense strand
ugccauggcuguuucaaga

SEQ ID NO: 1939493 - RNA, 19 nt, Homo sapiens
  misc_RNA (1)...(19): siRNA sense strand
ucacugagauucgggacaa

SEQ ID NO: 1939494 - RNA, 19 nt, Homo sapiens
  misc_RNA (1)...(19): siRNA sense strand
cugagaaccuggaauuuag

SEQ ID NO: 1939495 - RNA, 19 nt, Homo sapiens
  misc_RNA (1)...(19): siRNA sense strand
ccagaaagaaguuugugaa

SEQ ID NO: 1939496 - RNA, 19 nt, Homo sapiens
  misc_RNA (1)...(19): siRNA sense strand
gggcggagacgcuuaaauc

SEQ ID NO: 1939497 - RNA, 19 nt, Homo sapiens
  misc_RNA (1)...(19): siRNA sense strand
ugacugaguuuucaaagaa

SEQ ID NO: 1939498 - RNA, 19 nt, Homo sapiens
  misc_RNA (1)...(19): siRNA sense strand
ccacagacuucgccaugca

SEQ ID NO: 1939499 - RNA, 19 nt, Homo sapiens
  misc_RNA (1)...(19): siRNA sense strand
ggacaucgggaagaacauu

SEQ ID NO: 1939500 - RNA, 19 nt, Homo sapiens
  misc_RNA (1)...(19): siRNA sense strand
ccaguuggaagcagaguuu

SEQ ID NO: 1939501 - RNA, 19 nt, Homo sapiens
  misc_RNA (1)...(19): siRNA sense strand
gaaacccuuugcccaacau

SEQ ID NO: 1939502 - RNA, 19 nt, Homo sapiens
  misc_RNA (1)...(19): siRNA sense strand
gcgcugccauggcuguuuc

SEQ ID NO: 1939503 - RNA, 19 nt, Homo sapiens
  misc_RNA (1)...(19): siRNA sense strand
ggagguggucacugagauu

SEQ ID NO: 1939504 - RNA, 19 nt, Homo sapiens
  misc_RNA (1)...(19): siRNA sense strand
gaaaagaugacagcgauga

SEQ ID NO: 1939505 - RNA, 19 nt, Homo sapiens
  misc_RNA (1)...(19): siRNA sense strand
ucccaacgcuuccagaaag

SEQ ID NO: 1939506 - RNA, 19 nt, Homo sapiens
  misc_RNA (1)...(19): siRNA sense strand
ugacaugagccgaguguuc

SEQ ID NO: 1939507 - RNA, 19 nt, Homo sapiens
  misc_RNA (1)...(19): siRNA sense strand
gggagguggucacugagau

SEQ ID NO: 1939508 - RNA, 19 nt, Homo sapiens
  misc_RNA (1)...(19): siRNA sense strand
gagaaccuggaauuuaguu

SEQ ID NO: 1939509 - RNA, 19 nt, Homo sapiens
  misc_RNA (1)...(19): siRNA sense strand
uaaggugagcucaucgauu

SEQ ID NO: 1939510 - RNA, 19 nt, Homo sapiens
  misc_RNA (1)...(19): siRNA sense strand
gcagaaaaccaacguguuc

SEQ ID NO: 1939511 - RNA, 19 nt, Homo sapiens
  misc_RNA (1)...(19): siRNA sense strand
aaaggacacucagcuugug

SEQ ID NO: 1939512 - RNA, 19 nt, Homo sapiens
  misc_RNA (1)...(19): siRNA sense strand
ggaggaggaggaggaagaa

SEQ ID NO: 1939513 - RNA, 19 nt, Homo sapiens
  misc_RNA (1)...(19): siRNA sense strand
caaaaggccaggcagaaaa

SEQ ID NO: 1939514 - RNA, 19 nt, Homo sapiens
  misc_RNA (1)...(19): siRNA sense strand
ggugaggacguuccaagug

SEQ ID NO: 1939515 - RNA, 19 nt, Homo sapiens
  misc_RNA (1)...(19): siRNA sense strand
cagcugcgacucucccaaa

SEQ ID NO: 1939516 - RNA, 19 nt, Homo sapiens
  misc_RNA (1)...(19): siRNA sense strand
gggaacaagacccugaaga

SEQ ID NO: 1939517 - RNA, 19 nt, Homo sapiens
  misc_RNA (1)...(19): siRNA sense strand
ccuacgagcugcgguucaa

SEQ ID NO: 1939518 - RNA, 19 nt, Homo sapiens
  misc_RNA (1)...(19): siRNA sense strand
uccgggagguggucacuga

SEQ ID NO: 1939519 - RNA, 19 nt, Homo sapiens
  misc_RNA (1)...(19): siRNA sense strand
ccauggcuguuucaagaca

SEQ ID NO: 1939520 - RNA, 19 nt, Homo sapiens
  misc_RNA (1)...(19): siRNA sense strand
ugcccaacaucgaucauga

SEQ ID NO: 1939521 - RNA, 19 nt, Homo sapiens
  misc_RNA (1)...(19): siRNA sense strand
gugaacggcaugcugauuc

SEQ ID NO: 1939522 - RNA, 19 nt, Homo sapiens
  misc_RNA (1)...(19): siRNA sense strand
gacaucgggaagaacauuu

SEQ ID NO: 1939523 - RNA, 19 nt, Homo sapiens
  misc_RNA (1)...(19): siRNA sense strand
cacccuuugucgagaauga

SEQ ID NO: 1939524 - RNA, 19 nt, Homo sapiens
  misc_RNA (1)...(19): siRNA sense strand
gacaugagccgaguguucu

SEQ ID NO: 1939525 - RNA, 19 nt, Homo sapiens
  misc_RNA (1)...(19): siRNA sense strand
aacaagacccugaagaaag

SEQ ID NO: 1939526 - RNA, 19 nt, Homo sapiens
  misc_RNA (1)...(19): siRNA sense strand
acaucgggaagaacauuua

SEQ ID NO: 1939527 - RNA, 19 nt, Homo sapiens
  misc_RNA (1)...(19): siRNA sense strand
guuuccaucugcccuacaa

SEQ ID NO: 1939528 - RNA, 19 nt, Homo sapiens
  misc_RNA (1)...(19): siRNA sense strand
guuggaagcagaguuuguu

SEQ ID NO: 1939529 - RNA, 19 nt, Homo sapiens
  misc_RNA (1)...(19): siRNA sense strand
gcugggcggagacgcuuaa

SEQ ID NO: 1939530 - RNA, 19 nt, Homo sapiens
  misc_RNA (1)...(19): siRNA sense strand
agaaacccuuugcccaaca

SEQ ID NO: 1939531 - RNA, 19 nt, Homo sapiens
  misc_RNA (1)...(19): siRNA sense strand
gcccaacaucgaucaugaa

SEQ ID NO: 1939532 - RNA, 19 nt, Homo sapiens
  misc_RNA (1)...(19): siRNA sense strand
cagaaagaaguuugugaag

SEQ ID NO: 1939533 - RNA, 19 nt, Homo sapiens
  misc_RNA (1)...(19): siRNA sense strand
ggugaacggcaugcugauu

SEQ ID NO: 1939534 - RNA, 19 nt, Homo sapiens
  misc_RNA (1)...(19): siRNA sense strand
ccucugcacauuucugguu

SEQ ID NO: 1939535 - RNA, 19 nt, Homo sapiens
  misc_RNA (1)...(19): siRNA sense strand
cccaacgcuuccagaaaga

SEQ ID NO: 1939536 - RNA, 19 nt, Homo sapiens
  misc_RNA (1)...(19): siRNA sense strand
ugucacccuuugucgagaa

SEQ ID NO: 1939537 - RNA, 19 nt, Homo sapiens
  misc_RNA (1)...(19): siRNA sense strand
ugcaggacaucgggaagaa

SEQ ID NO: 1939538 - RNA, 19 nt, Homo sapiens
  misc_RNA (1)...(19): siRNA sense strand
gaacaaggcguggcacuuc

SEQ ID NO: 1939539 - RNA, 19 nt, Homo sapiens
  misc_RNA (1)...(19): siRNA sense strand
gcccagaggucagaaauca

SEQ ID NO: 1939540 - RNA, 19 nt, Homo sapiens
  misc_RNA (1)...(19): siRNA sense strand
gauggaggcccuucacauu

SEQ ID NO: 1939541 - RNA, 19 nt, Homo sapiens
  misc_RNA (1)...(19): siRNA sense strand
ggaaugacuccuccacauc

SEQ ID NO: 1939542 - RNA, 19 nt, Homo sapiens
  misc_RNA (1)...(19): siRNA sense strand
ccagaggucagaaaucaga

SEQ ID NO: 1939543 - RNA, 19 nt, Homo sapiens
  misc_RNA (1)...(19): siRNA sense strand
gaugcugccaccucccuua

SEQ ID NO: 1939544 - RNA, 19 nt, Homo sapiens
  misc_RNA (1)...(19): siRNA sense strand
uggaggcccuucacauuuc

SEQ ID NO: 1939545 - RNA, 19 nt, Homo sapiens
  misc_RNA (1)...(19): siRNA sense strand
gguaccgggucacuguuga

SEQ ID NO: 1939546 - RNA, 19 nt, Homo sapiens
  misc_RNA (1)...(19): siRNA sense strand
gcccaguacacacaaguuu

SEQ ID NO: 1939547 - RNA, 19 nt, Homo sapiens
  misc_RNA (1)...(19): siRNA sense strand
gaggucagaaaucagauau

SEQ ID NO: 1939548 - RNA, 19 nt, Homo sapiens
  misc_RNA (1)...(19): siRNA sense strand
uaaagcacccaguauggau

SEQ ID NO: 1939549 - RNA, 19 nt, Homo sapiens
  misc_RNA (1)...(19): siRNA sense strand
gacccuagaguccaagaga

SEQ ID NO: 1939550 - RNA, 19 nt, Homo sapiens
  misc_RNA (1)...(19): siRNA sense strand
cagggaagauaguguugag

SEQ ID NO: 1939551 - RNA, 19 nt, Homo sapiens
  misc_RNA (1)...(19): siRNA sense strand
ggauggaggcccuucacau

SEQ ID NO: 1939552 - RNA, 19 nt, Homo sapiens
  misc_RNA (1)...(19): siRNA sense strand
ggacaauggaggccucucu

SEQ ID NO: 1939553 - RNA, 19 nt, Homo sapiens
  misc_RNA (1)...(19): siRNA sense strand
gcacagcaggagacacaca

SEQ ID NO: 1939554 - RNA, 19 nt, Homo sapiens
  misc_RNA (1)...(19): siRNA sense strand
ggaggcccuucacauuucu

SEQ ID NO: 1939555 - RNA, 19 nt, Homo sapiens
  misc_RNA (1)...(19): siRNA sense strand
gcugccaccucccuuagag

SEQ ID NO: 1939556 - RNA, 19 nt, Homo sapiens
  misc_RNA (1)...(19): siRNA sense strand
ucacggccuucccacacuu

SEQ ID NO: 1939557 - RNA, 19 nt, Homo sapiens
  misc_RNA (1)...(19): siRNA sense strand
cuaaagcacccaguaugga

SEQ ID NO: 1939558 - RNA, 19 nt, Homo sapiens
  misc_RNA (1)...(19): siRNA sense strand
ccugccaccucuucccauu

SEQ ID NO: 1939559 - RNA, 19 nt, Homo sapiens
  misc_RNA (1)...(19): siRNA sense strand
ccacauccgaggccucuag

SEQ ID NO: 1939560 - RNA, 19 nt, Homo sapiens
  misc_RNA (1)...(19): siRNA sense strand
gaggucagaaccagagauc

SEQ ID NO: 1939561 - RNA, 19 nt, Homo sapiens
  misc_RNA (1)...(19): siRNA sense strand
agacacacaagucccaaga

SEQ ID NO: 1939562 - RNA, 19 nt, Homo sapiens
  misc_RNA (1)...(19): siRNA sense strand
gcaggacaaggacccuaga

SEQ ID NO: 1939563 - RNA, 19 nt, Homo sapiens
  misc_RNA (1)...(19): siRNA sense strand
cacacuuuguccucacuug

SEQ ID NO: 1939564 - RNA, 19 nt, Homo sapiens
  misc_RNA (1)...(19): siRNA sense strand
agaggucagaaaucagaua

SEQ ID NO: 1939565 - RNA, 19 nt, Homo sapiens
  misc_RNA (1)...(19): siRNA sense strand
gcaagagggugaggaacua

SEQ ID NO: 1939566 - RNA, 19 nt, Homo sapiens
  misc_RNA (1)...(19): siRNA sense strand
ggaaguuucugcagagguu

SEQ ID NO: 1939567 - RNA, 19 nt, Homo sapiens
  misc_RNA (1)...(19): siRNA sense strand
gaugagaucuaccaugucu

SEQ ID NO: 1939568 - RNA, 19 nt, Homo sapiens
  misc_RNA (1)...(19): siRNA sense strand
caacagcucccggaaguuu

SEQ ID NO: 1939569 - RNA, 19 nt, Homo sapiens
  misc_RNA (1)...(19): siRNA sense strand
cgagcgaggugauagaaga

SEQ ID NO: 1939570 - RNA, 19 nt, Homo sapiens
  misc_RNA (1)...(19): siRNA sense strand
ccgaugagaucuaccaugu

SEQ ID NO: 1939571 - RNA, 19 nt, Homo sapiens
  misc_RNA (1)...(19): siRNA sense strand
ucagagagguggauauggu

SEQ ID NO: 1939572 - RNA, 19 nt, Homo sapiens
  misc_RNA (1)...(19): siRNA sense strand
gugaggaacuacuucuguu

SEQ ID NO: 1939573 - RNA, 19 nt, Homo sapiens
  misc_RNA (1)...(19): siRNA sense strand
gauagaagacgagaagcaa

SEQ ID NO: 1939574 - RNA, 19 nt, Homo sapiens
  misc_RNA (1)...(19): siRNA sense strand
uaccaugucuauagcuuug

SEQ ID NO: 1939575 - RNA, 19 nt, Homo sapiens
  misc_RNA (1)...(19): siRNA sense strand
gccaagaccuacuggaaac

SEQ ID NO: 1939576 - RNA, 19 nt, Homo sapiens
  misc_RNA (1)...(19): siRNA sense strand
ggccaagaccuacuggaaa

SEQ ID NO: 1939577 - RNA, 19 nt, Homo sapiens
  misc_RNA (1)...(19): siRNA sense strand
gcaucaucgucaucaaaga

SEQ ID NO: 1939578 - RNA, 19 nt, Homo sapiens
  misc_RNA (1)...(19): siRNA sense strand
guugugggcuccaggacuu

SEQ ID NO: 1939579 - RNA, 19 nt, Homo sapiens
  misc_RNA (1)...(19): siRNA sense strand
uagaagacgagaagcaauu

SEQ ID NO: 1939580 - RNA, 19 nt, Homo sapiens
  misc_RNA (1)...(19): siRNA sense strand
cgacauaacggaggacuuc

SEQ ID NO: 1939581 - RNA, 19 nt, Homo sapiens
  misc_RNA (1)...(19): siRNA sense strand
gaucuaccaugucuauagc

SEQ ID NO: 1939582 - RNA, 19 nt, Homo sapiens
  misc_RNA (1)...(19): siRNA sense strand
ugagaucuaccaugucuau

SEQ ID NO: 1939583 - RNA, 19 nt, Homo sapiens
  misc_RNA (1)...(19): siRNA sense strand
gaggaacuacuucuguugu

SEQ ID NO: 1939584 - RNA, 19 nt, Homo sapiens
  misc_RNA (1)...(19): siRNA sense strand
ggacuguggagcuggcauu

SEQ ID NO: 1939585 - RNA, 19 nt, Homo sapiens
  misc_RNA (1)...(19): siRNA sense strand
ggugauagaagacgagaag

SEQ ID NO: 1939586 - RNA, 19 nt, Homo sapiens
  misc_RNA (1)...(19): siRNA sense strand
ggaaggcccgaacaagaca

SEQ ID NO: 1939587 - RNA, 19 nt, Homo sapiens
  misc_RNA (1)...(19): siRNA sense strand
ggugaggaacuacuucugu

SEQ ID NO: 1939588 - RNA, 19 nt, Homo sapiens
  misc_RNA (1)...(19): siRNA sense strand
gagcuggcauugggaggau

SEQ ID NO: 1939589 - RNA, 19 nt, Homo sapiens
  misc_RNA (1)...(19): siRNA sense strand
ccagcagcaucgacaucaa

SEQ ID NO: 1939590 - RNA, 19 nt, Homo sapiens
  misc_RNA (1)...(19): siRNA sense strand
gggaaggcccgaacaagac

SEQ ID NO: 1939591 - RNA, 19 nt, Homo sapiens
  misc_RNA (1)...(19): siRNA sense strand
cuauagcuuugcccugaga

SEQ ID NO: 1939592 - RNA, 19 nt, Homo sapiens
  misc_RNA (1)...(19): siRNA sense strand
guucagagagguggauaug

SEQ ID NO: 1939593 - RNA, 19 nt, Homo sapiens
  misc_RNA (1)...(19): siRNA sense strand
aagaccuacuggaaacaaa

SEQ ID NO: 1939594 - RNA, 19 nt, Homo sapiens
  misc_RNA (1)...(19): siRNA sense strand
gacgugguccgcaggauca

SEQ ID NO: 1939595 - RNA, 19 nt, Homo sapiens
  misc_RNA (1)...(19): siRNA sense strand
cggcaucaucgucaucaaa

SEQ ID NO: 1939596 - RNA, 19 nt, Homo sapiens
  misc_RNA (1)...(19): siRNA sense strand
uaggccaccucaccgauca

SEQ ID NO: 1939597 - RNA, 19 nt, Homo sapiens
  misc_RNA (1)...(19): siRNA sense strand
caagaccuacuggaaacaa

SEQ ID NO: 1939598 - RNA, 19 nt, Homo sapiens
  misc_RNA (1)...(19): siRNA sense strand
ugaggaacuacuucuguug

SEQ ID NO: 1939599 - RNA, 19 nt, Homo sapiens
  misc_RNA (1)...(19): siRNA sense strand
gacgagcgaggugauagaa

SEQ ID NO: 1939600 - RNA, 19 nt, Homo sapiens
  misc_RNA (1)...(19): siRNA sense strand
gagaucuaccaugucuaua

SEQ ID NO: 1939601 - RNA, 19 nt, Homo sapiens
  misc_RNA (1)...(19): siRNA sense strand
ccgaggagaggcaggagaa

SEQ ID NO: 1939602 - RNA, 19 nt, Homo sapiens
  misc_RNA (1)...(19): siRNA sense strand
uagcuuugcccugagauga

SEQ ID NO: 1939603 - RNA, 19 nt, Homo sapiens
  misc_RNA (1)...(19): siRNA sense strand
agggaaggcccgaacaaga

SEQ ID NO: 1939604 - RNA, 19 nt, Homo sapiens
  misc_RNA (1)...(19): siRNA sense strand
cgucaucaaagacaacaug

SEQ ID NO: 1939605 - RNA, 19 nt, Homo sapiens
  misc_RNA (1)...(19): siRNA sense strand
gagggaaggcccgaacaag

SEQ ID NO: 1939606 - RNA, 19 nt, Homo sapiens
  misc_RNA (1)...(19): siRNA sense strand
ucuaccaugucuauagcuu

SEQ ID NO: 1939607 - RNA, 19 nt, Homo sapiens
  misc_RNA (1)...(19): siRNA sense strand
ggacucuuacgacgugauc

SEQ ID NO: 1939608 - RNA, 19 nt, Homo sapiens
  misc_RNA (1)...(19): siRNA sense strand
gaacaccaauuaaugcuaa

SEQ ID NO: 1939609 - RNA, 19 nt, Homo sapiens
  misc_RNA (1)...(19): siRNA sense strand
gaaaggcucuggaaagaug

SEQ ID NO: 1939610 - RNA, 19 nt, Homo sapiens
  misc_RNA (1)...(19): siRNA sense strand
gagcagaccucuacggauu

SEQ ID NO: 1939611 - RNA, 19 nt, Homo sapiens
  misc_RNA (1)...(19): siRNA sense strand
ggaaggcucuugaugaaau

SEQ ID NO: 1939612 - RNA, 19 nt, Homo sapiens
  misc_RNA (1)...(19): siRNA sense strand
gcagaaaacucaacaauau

SEQ ID NO: 1939613 - RNA, 19 nt, Homo sapiens
  misc_RNA (1)...(19): siRNA sense strand
cagagaagcugaugcagaa

SEQ ID NO: 1939614 - RNA, 19 nt, Homo sapiens
  misc_RNA (1)...(19): siRNA sense strand
agagaaagcuguugugguu

SEQ ID NO: 1939615 - RNA, 19 nt, Homo sapiens
  misc_RNA (1)...(19): siRNA sense strand
gaaccuuucuccaguuguu

SEQ ID NO: 1939616 - RNA, 19 nt, Homo sapiens
  misc_RNA (1)...(19): siRNA sense strand
ggaagcagcuaggcaugaa

SEQ ID NO: 1939617 - RNA, 19 nt, Homo sapiens
  misc_RNA (1)...(19): siRNA sense strand
gcaguuugaugaugaagau

SEQ ID NO: 1939618 - RNA, 19 nt, Homo sapiens
  misc_RNA (1)...(19): siRNA sense strand
ggaaaauggugauaaaaga

SEQ ID NO: 1939619 - RNA, 19 nt, Homo sapiens
  misc_RNA (1)...(19): siRNA sense strand
gauggaaggcucuugauga

SEQ ID NO: 1939620 - RNA, 19 nt, Homo sapiens
  misc_RNA (1)...(19): siRNA sense strand
gugagcagguugauagaaa

SEQ ID NO: 1939621 - RNA, 19 nt, Homo sapiens
  misc_RNA (1)...(19): siRNA sense strand
gagaacaaccaccacguuu

SEQ ID NO: 1939622 - RNA, 19 nt, Homo sapiens
  misc_RNA (1)...(19): siRNA sense strand
cagagaagccaaagagaaa

SEQ ID NO: 1939623 - RNA, 19 nt, Homo sapiens
  misc_RNA (1)...(19): siRNA sense strand
gaaacuggaggcagaaaug

SEQ ID NO: 1939624 - RNA, 19 nt, Homo sapiens
  misc_RNA (1)...(19): siRNA sense strand
gcaugaacaccaauuaaug

SEQ ID NO: 1939625 - RNA, 19 nt, Homo sapiens
  misc_RNA (1)...(19): siRNA sense strand
gaagaaaugauccgacaca

SEQ ID NO: 1939626 - RNA, 19 nt, Homo sapiens
  misc_RNA (1)...(19): siRNA sense strand
gaugaucgcgguagagcua

SEQ ID NO: 1939627 - RNA, 19 nt, Homo sapiens
  misc_RNA (1)...(19): siRNA sense strand
caaauacaacuaagacaug

SEQ ID NO: 1939628 - RNA, 19 nt, Homo sapiens
  misc_RNA (1)...(19): siRNA sense strand
gcaaauacaacuaagacau

SEQ ID NO: 1939629 - RNA, 19 nt, Homo sapiens
  misc_RNA (1)...(19): siRNA sense strand
gcacgaaaggcucuggaaa

SEQ ID NO: 1939630 - RNA, 19 nt, Homo sapiens
  misc_RNA (1)...(19): siRNA sense strand
gcaagcauuuucucaguuu

SEQ ID NO: 1939631 - RNA, 19 nt, Homo sapiens
  misc_RNA (1)...(19): siRNA sense strand
gauagaaacaucagagaag

SEQ ID NO: 1939632 - RNA, 19 nt, Homo sapiens
  misc_RNA (1)...(19): siRNA sense strand
gaagcaaauacaacuaaga

SEQ ID NO: 1939633 - RNA, 19 nt, Homo sapiens
  misc_RNA (1)...(19): siRNA sense strand
ggaagcaaauacaacuaag

SEQ ID NO: 1939634 - RNA, 19 nt, Homo sapiens
  misc_RNA (1)...(19): siRNA sense strand
ggacauuugaauuugagua

SEQ ID NO: 1939635 - RNA, 19 nt, Homo sapiens
  misc_RNA (1)...(19): siRNA sense strand
gaaggcucuugaugaaaug

SEQ ID NO: 1939636 - RNA, 19 nt, Homo sapiens
  misc_RNA (1)...(19): siRNA sense strand
ccauggagcaguuugauga

SEQ ID NO: 1939637 - RNA, 19 nt, Homo sapiens
  misc_RNA (1)...(19): siRNA sense strand
ggagcaguuugaugaugaa

SEQ ID NO: 1939638 - RNA, 19 nt, Homo sapiens
  misc_RNA (1)...(19): siRNA sense strand
caucaagaguuuccucaag

SEQ ID NO: 1939639 - RNA, 19 nt, Homo sapiens
  misc_RNA (1)...(19): siRNA sense strand
cuaucgacaucaagaguuu

SEQ ID NO: 1939640 - RNA, 19 nt, Homo sapiens
  misc_RNA (1)...(19): siRNA sense strand
gcagguugauagaaacauc

SEQ ID NO: 1939641 - RNA, 19 nt, Homo sapiens
  misc_RNA (1)...(19): siRNA sense strand
acgaaaggcucuggaaaga

SEQ ID NO: 1939642 - RNA, 19 nt, Homo sapiens
  misc_RNA (1)...(19): siRNA sense strand
agaaagcuguugugguugu

SEQ ID NO: 1939643 - RNA, 19 nt, Homo sapiens
  misc_RNA (1)...(19): siRNA sense strand
ucagagaagccaaagagaa

SEQ ID NO: 1939644 - RNA, 19 nt, Homo sapiens
  misc_RNA (1)...(19): siRNA sense strand
gaacaaccaccacguuuug

SEQ ID NO: 1939645 - RNA, 19 nt, Homo sapiens
  misc_RNA (1)...(19): siRNA sense strand
aaugaggcgucaagaagaa

SEQ ID NO: 1939646 - RNA, 19 nt, Homo sapiens
  misc_RNA (1)...(19): siRNA sense strand
uggagcaguuugaugauga

SEQ ID NO: 1939647 - RNA, 19 nt, Homo sapiens
  misc_RNA (1)...(19): siRNA sense strand
cuaaugaggcaagaucuaa

SEQ ID NO: 1939648 - RNA, 19 nt, Homo sapiens
  misc_RNA (1)...(19): siRNA sense strand
aagccaaacuacauggaaa

SEQ ID NO: 1939649 - RNA, 19 nt, Homo sapiens
  misc_RNA (1)...(19): siRNA sense strand
gaccguggcuucggcuuca

SEQ ID NO: 1939650 - RNA, 19 nt, Homo sapiens
  misc_RNA (1)...(19): siRNA sense strand
ggaagaacucagaaaccaa

SEQ ID NO: 1939651 - RNA, 19 nt, Homo sapiens
  misc_RNA (1)...(19): siRNA sense strand
gcuaaugaggcaagaucua

SEQ ID NO: 1939652 - RNA, 19 nt, Homo sapiens
  misc_RNA (1)...(19): siRNA sense strand
gaaaucugcccaccgacau

SEQ ID NO: 1939653 - RNA, 19 nt, Homo sapiens
  misc_RNA (1)...(19): siRNA sense strand
cggaagcaaauacaacuaa

SEQ ID NO: 1939654 - RNA, 19 nt, Homo sapiens
  misc_RNA (1)...(19): siRNA sense strand
aaacaucagagaagccaaa

SEQ ID NO: 1939655 - RNA, 19 nt, Homo sapiens
  misc_RNA (1)...(19): siRNA sense strand
ggacggcaccauucucaag

SEQ ID NO: 1939656 - RNA, 19 nt, Homo sapiens
  misc_RNA (1)...(19): siRNA sense strand
caaacuacauggaaaaugg

SEQ ID NO: 1939657 - RNA, 19 nt, Homo sapiens
  misc_RNA (1)...(19): siRNA sense strand
ggcaugaacaccaauuaau

SEQ ID NO: 1939658 - RNA, 19 nt, Homo sapiens
  misc_RNA (1)...(19): siRNA sense strand
auggaaggcucuugaugaa

SEQ ID NO: 1939659 - RNA, 19 nt, Homo sapiens
  misc_RNA (1)...(19): siRNA sense strand
gagcuggacggcaccauuc

SEQ ID NO: 1939660 - RNA, 19 nt, Homo sapiens
  misc_RNA (1)...(19): siRNA sense strand
uaaugaggcgucaagaaga

SEQ ID NO: 1939661 - RNA, 19 nt, Homo sapiens
  misc_RNA (1)...(19): siRNA sense strand
gaaagcuguugugguugug

SEQ ID NO: 1939662 - RNA, 19 nt, Homo sapiens
  misc_RNA (1)...(19): siRNA sense strand
ccugggacauuugaauuug

SEQ ID NO: 1939663 - RNA, 19 nt, Homo sapiens
  misc_RNA (1)...(19): siRNA sense strand
cuaaugaggcgucaagaag

SEQ ID NO: 1939664 - RNA, 19 nt, Homo sapiens
  misc_RNA (1)...(19): siRNA sense strand
caucagagaagccaaagag

SEQ ID NO: 1939665 - RNA, 19 nt, Homo sapiens
  misc_RNA (1)...(19): siRNA sense strand
caaccugggacauuugaau

SEQ ID NO: 1939666 - RNA, 19 nt, Homo sapiens
  misc_RNA (1)...(19): siRNA sense strand
uggaagaacucagaaacca

SEQ ID NO: 1939667 - RNA, 19 nt, Homo sapiens
  misc_RNA (1)...(19): siRNA sense strand
gcagaaauggaagcagcua

SEQ ID NO: 1939668 - RNA, 19 nt, Homo sapiens
  misc_RNA (1)...(19): siRNA sense strand
gaucuaaugaggcgucaag

SEQ ID NO: 1939669 - RNA, 19 nt, Homo sapiens
  misc_RNA (1)...(19): siRNA sense strand
cauggaaaauggugauaaa

SEQ ID NO: 1939670 - RNA, 19 nt, Homo sapiens
  misc_RNA (1)...(19): siRNA sense strand
ucgcuucgcuacacaugga

SEQ ID NO: 1939671 - RNA, 19 nt, Homo sapiens
  misc_RNA (1)...(19): siRNA sense strand
cuggaaagauguggugaug

SEQ ID NO: 1939672 - RNA, 19 nt, Homo sapiens
  misc_RNA (1)...(19): siRNA sense strand
gagcaagcauuuucucagu

SEQ ID NO: 1939673 - RNA, 19 nt, Homo sapiens
  misc_RNA (1)...(19): siRNA sense strand
gauggggcauucuugcuaa

SEQ ID NO: 1939674 - RNA, 19 nt, Homo sapiens
  misc_RNA (1)...(19): siRNA sense strand
cuccaguuguuuccaauga

SEQ ID NO: 1939675 - RNA, 19 nt, Homo sapiens
  misc_RNA (1)...(19): siRNA sense strand
ucacggaggaggacuucaa

SEQ ID NO: 1939676 - RNA, 19 nt, Homo sapiens
  misc_RNA (1)...(19): siRNA sense strand
gcagcagcgugagcagguu

SEQ ID NO: 1939677 - RNA, 19 nt, Homo sapiens
  misc_RNA (1)...(19): siRNA sense strand
gaacccauggagcaguuug

SEQ ID NO: 1939678 - RNA, 19 nt, Homo sapiens
  misc_RNA (1)...(19): siRNA sense strand
acacagagaacaggaggaa

SEQ ID NO: 1939679 - RNA, 19 nt, Homo sapiens
  misc_RNA (1)...(19): siRNA sense strand
ucaguuugguccaguagag

SEQ ID NO: 1939680 - RNA, 19 nt, Homo sapiens
  misc_RNA (1)...(19): siRNA sense strand
cauuugaauuugaguaugc

SEQ ID NO: 1939681 - RNA, 19 nt, Homo sapiens
  misc_RNA (1)...(19): siRNA sense strand
gcucaaccugggacauuug

SEQ ID NO: 1939682 - RNA, 19 nt, Homo sapiens
  misc_RNA (1)...(19): siRNA sense strand
agaaaugauccgacacaga

SEQ ID NO: 1939683 - RNA, 19 nt, Homo sapiens
  misc_RNA (1)...(19): siRNA sense strand
uaagccaaacuacauggaa

SEQ ID NO: 1939684 - RNA, 19 nt, Homo sapiens
  misc_RNA (1)...(19): siRNA sense strand
cgacagcaagagggcuuua

SEQ ID NO: 1939685 - RNA, 19 nt, Homo sapiens
  misc_RNA (1)...(19): siRNA sense strand
uggaacccauggagcaguu

SEQ ID NO: 1939686 - RNA, 19 nt, Homo sapiens
  misc_RNA (1)...(19): siRNA sense strand
uaggcaugaacaccaauua

SEQ ID NO: 1939687 - RNA, 19 nt, Homo sapiens
  misc_RNA (1)...(19): siRNA sense strand
gagaugggguucacuaucg

SEQ ID NO: 1939688 - RNA, 19 nt, Homo sapiens
  misc_RNA (1)...(19): siRNA sense strand
gagaaacuggaggcagaaa

SEQ ID NO: 1939689 - RNA, 19 nt, Homo sapiens
  misc_RNA (1)...(19): siRNA sense strand
caaaaccuccugcacgaaa

SEQ ID NO: 1939690 - RNA, 19 nt, Homo sapiens
  misc_RNA (1)...(19): siRNA sense strand
agagaacaaccaccacguu

SEQ ID NO: 1939691 - RNA, 19 nt, Homo sapiens
  misc_RNA (1)...(19): siRNA sense strand
gaaaccaagaguugcaaaa

SEQ ID NO: 1939692 - RNA, 19 nt, Homo sapiens
  misc_RNA (1)...(19): siRNA sense strand
ugaacaccaauuaaugcua

SEQ ID NO: 1939693 - RNA, 19 nt, Homo sapiens
  misc_RNA (1)...(19): siRNA sense strand
caugaacaccaauuaaugc

SEQ ID NO: 1939694 - RNA, 19 nt, Homo sapiens
  misc_RNA (1)...(19): siRNA sense strand
gagcagguugauagaaaca

SEQ ID NO: 1939695 - RNA, 19 nt, Homo sapiens
  misc_RNA (1)...(19): siRNA sense strand
gacggcaccauucucaaga

SEQ ID NO: 1939696 - RNA, 19 nt, Homo sapiens
  misc_RNA (1)...(19): siRNA sense strand
cacgaaaggcucuggaaag

SEQ ID NO: 1939697 - RNA, 19 nt, Homo sapiens
  misc_RNA (1)...(19): siRNA sense strand
gcagaccucuacggauucg

SEQ ID NO: 1939698 - RNA, 19 nt, Homo sapiens
  misc_RNA (1)...(19): siRNA sense strand
aggcaugaacaccaauuaa

SEQ ID NO: 1939699 - RNA, 19 nt, Homo sapiens
  misc_RNA (1)...(19): siRNA sense strand
ggauucgcuucgcuacaca

SEQ ID NO: 1939700 - RNA, 19 nt, Homo sapiens
  misc_RNA (1)...(19): siRNA sense strand
cugggacauuugaauuuga

SEQ ID NO: 1939701 - RNA, 19 nt, Homo sapiens
  misc_RNA (1)...(19): siRNA sense strand
gggcauucuugcuaacaac

SEQ ID NO: 1939702 - RNA, 19 nt, Homo sapiens
  misc_RNA (1)...(19): siRNA sense strand
acucaacaauaucauaagg

SEQ ID NO: 1939703 - RNA, 19 nt, Homo sapiens
  misc_RNA (1)...(19): siRNA sense strand
gacagcaagagggcuuuaa

SEQ ID NO: 1939704 - RNA, 19 nt, Homo sapiens
  misc_RNA (1)...(19): siRNA sense strand
ggaacugaggcgacagcaa

SEQ ID NO: 1939705 - RNA, 19 nt, Homo sapiens
  misc_RNA (1)...(19): siRNA sense strand
ucuaaugaggcgucaagaa

SEQ ID NO: 1939706 - RNA, 19 nt, Homo sapiens
  misc_RNA (1)...(19): siRNA sense strand
gaauuugaguaugcaucuc

SEQ ID NO: 1939707 - RNA, 19 nt, Homo sapiens
  misc_RNA (1)...(19): siRNA sense strand
uaaggaaagagaacaacca

SEQ ID NO: 1939708 - RNA, 19 nt, Homo sapiens
  misc_RNA (1)...(19): siRNA sense strand
gcaaagauaugacgguaaa

SEQ ID NO: 1939709 - RNA, 19 nt, Homo sapiens
  misc_RNA (1)...(19): siRNA sense strand
aaucacagcucuaaaguua

SEQ ID NO: 1939710 - RNA, 19 nt, Homo sapiens
  misc_RNA (1)...(19): siRNA sense strand
ugagaagucuguuugauua

SEQ ID NO: 1939711 - RNA, 19 nt, Homo sapiens
  misc_RNA (1)...(19): siRNA sense strand
gagcagaucugaacuuaug

SEQ ID NO: 1939712 - RNA, 19 nt, Homo sapiens
  misc_RNA (1)...(19): siRNA sense strand
gcagagauauuuccuuuag

SEQ ID NO: 1939713 - RNA, 19 nt, Homo sapiens
  misc_RNA (1)...(19): siRNA sense strand
gaaacuggauuuaaacaag

SEQ ID NO: 1939714 - RNA, 19 nt, Homo sapiens
  misc_RNA (1)...(19): siRNA sense strand
gcucuaaaguuaauucaga

SEQ ID NO: 1939715 - RNA, 19 nt, Homo sapiens
  misc_RNA (1)...(19): siRNA sense strand
ugacugaccuuaaguguuc

SEQ ID NO: 1939716 - RNA, 19 nt, Homo sapiens
  misc_RNA (1)...(19): siRNA sense strand
gcaacugucuggaaacuuc

SEQ ID NO: 1939717 - RNA, 19 nt, Homo sapiens
  misc_RNA (1)...(19): siRNA sense strand
gaagagugcccuguguuua

SEQ ID NO: 1939718 - RNA, 19 nt, Homo sapiens
  misc_RNA (1)...(19): siRNA sense strand
gaaguuuacucaugcuuuc

SEQ ID NO: 1939719 - RNA, 19 nt, Homo sapiens
  misc_RNA (1)...(19): siRNA sense strand
gguaaaguaugacucaaga

SEQ ID NO: 1939720 - RNA, 19 nt, Homo sapiens
  misc_RNA (1)...(19): siRNA sense strand
ccaagcaacugucuggaaa

SEQ ID NO: 1939721 - RNA, 19 nt, Homo sapiens
  misc_RNA (1)...(19): siRNA sense strand
ggaaggaagagaaguuaaa

SEQ ID NO: 1939722 - RNA, 19 nt, Homo sapiens
  misc_RNA (1)...(19): siRNA sense strand
ggacaaagcagaccaugca

SEQ ID NO: 1939723 - RNA, 19 nt, Homo sapiens
  misc_RNA (1)...(19): siRNA sense strand
ggaagagugcccuguguuu

SEQ ID NO: 1939724 - RNA, 19 nt, Homo sapiens
  misc_RNA (1)...(19): siRNA sense strand
ucacagcucuaaaguuaau

SEQ ID NO: 1939725 - RNA, 19 nt, Homo sapiens
  misc_RNA (1)...(19): siRNA sense strand
caacuaauccugaaagaag

SEQ ID NO: 1939726 - RNA, 19 nt, Homo sapiens
  misc_RNA (1)...(19): siRNA sense strand
uggcagagauauuuccuuu

SEQ ID NO: 1939727 - RNA, 19 nt, Homo sapiens
  misc_RNA (1)...(19): siRNA sense strand
ggagaaacaagauuuaaca

SEQ ID NO: 1939728 - RNA, 19 nt, Homo sapiens
  misc_RNA (1)...(19): siRNA sense strand
ucacggugcuuacaugaga

SEQ ID NO: 1939729 - RNA, 19 nt, Homo sapiens
  misc_RNA (1)...(19): siRNA sense strand
gaaccuacaggaucaucua

SEQ ID NO: 1939730 - RNA, 19 nt, Homo sapiens
  misc_RNA (1)...(19): siRNA sense strand
uaaauggacugacugaaac

SEQ ID NO: 1939731 - RNA, 19 nt, Homo sapiens
  misc_RNA (1)...(19): siRNA sense strand
cuaaauggacugacugaaa

SEQ ID NO: 1939732 - RNA, 19 nt, Homo sapiens
  misc_RNA (1)...(19): siRNA sense strand
gaggaaggaagagaaguua

SEQ ID NO: 1939733 - RNA, 19 nt, Homo sapiens
  misc_RNA (1)...(19): siRNA sense strand
guaugaaccuacaggauca

SEQ ID NO: 1939734 - RNA, 19 nt, Homo sapiens
  misc_RNA (1)...(19): siRNA sense strand
gcauggagaaacaagauuu

SEQ ID NO: 1939735 - RNA, 19 nt, Homo sapiens
  misc_RNA (1)...(19): siRNA sense strand
gggaugagucucuuuauca

SEQ ID NO: 1939736 - RNA, 19 nt, Homo sapiens
  misc_RNA (1)...(19): siRNA sense strand
cagcgguauuccaggauua

SEQ ID NO: 1939737 - RNA, 19 nt, Homo sapiens
  misc_RNA (1)...(19): siRNA sense strand
cugagcagaucugaacuua

SEQ ID NO: 1939738 - RNA, 19 nt, Homo sapiens
  misc_RNA (1)...(19): siRNA sense strand
gccagugucuuaguuguga

SEQ ID NO: 1939739 - RNA, 19 nt, Homo sapiens
  misc_RNA (1)...(19): siRNA sense strand
ccuacaggaucaucuaaau

SEQ ID NO: 1939740 - RNA, 19 nt, Homo sapiens
  misc_RNA (1)...(19): siRNA sense strand
aaugugaaguuuacucaug

SEQ ID NO: 1939741 - RNA, 19 nt, Homo sapiens
  misc_RNA (1)...(19): siRNA sense strand
ggaagagaaguuaaaccaa

SEQ ID NO: 1939742 - RNA, 19 nt, Homo sapiens
  misc_RNA (1)...(19): siRNA sense strand
gauaugacgguaaaguaug

SEQ ID NO: 1939743 - RNA, 19 nt, Homo sapiens
  misc_RNA (1)...(19): siRNA sense strand
gaaaaugcguggaauagac

SEQ ID NO: 1939744 - RNA, 19 nt, Homo sapiens
  misc_RNA (1)...(19): siRNA sense strand
cauggagaaacaagauuua

SEQ ID NO: 1939745 - RNA, 19 nt, Homo sapiens
  misc_RNA (1)...(19): siRNA sense strand
gaaaauaauccaaggacaa

SEQ ID NO: 1939746 - RNA, 19 nt, Homo sapiens
  misc_RNA (1)...(19): siRNA sense strand
gaaauacgggguuguagaa

SEQ ID NO: 1939747 - RNA, 19 nt, Homo sapiens
  misc_RNA (1)...(19): siRNA sense strand
gaaggcaaagcgcuaagug

SEQ ID NO: 1939748 - RNA, 19 nt, Homo sapiens
  misc_RNA (1)...(19): siRNA sense strand
gagucacggugcuuacaug

SEQ ID NO: 1939749 - RNA, 19 nt, Homo sapiens
  misc_RNA (1)...(19): siRNA sense strand
gaaacuucuuuggcagaga

SEQ ID NO: 1939750 - RNA, 19 nt, Homo sapiens
  misc_RNA (1)...(19): siRNA sense strand
cauaaacuuugaggaagga

SEQ ID NO: 1939751 - RNA, 19 nt, Homo sapiens
  misc_RNA (1)...(19): siRNA sense strand
aaacuucuuuggcagagau

SEQ ID NO: 1939752 - RNA, 19 nt, Homo sapiens
  misc_RNA (1)...(19): siRNA sense strand
aagauaugacgguaaagua

SEQ ID NO: 1939753 - RNA, 19 nt, Homo sapiens
  misc_RNA (1)...(19): siRNA sense strand
acagggaugagucucuuua

SEQ ID NO: 1939754 - RNA, 19 nt, Homo sapiens
  misc_RNA (1)...(19): siRNA sense strand
caugagaagucuguuugau

SEQ ID NO: 1939755 - RNA, 19 nt, Homo sapiens
  misc_RNA (1)...(19): siRNA sense strand
auaugacgguaaaguauga

SEQ ID NO: 1939756 - RNA, 19 nt, Homo sapiens
  misc_RNA (1)...(19): siRNA sense strand
guagaaggcaaagcgcuaa

SEQ ID NO: 1939757 - RNA, 19 nt, Homo sapiens
  misc_RNA (1)...(19): siRNA sense strand
gucagucacucccaauaca

SEQ ID NO: 1939758 - RNA, 19 nt, Homo sapiens
  misc_RNA (1)...(19): siRNA sense strand
ccaaggacaaggaguagau

SEQ ID NO: 1939759 - RNA, 19 nt, Homo sapiens
  misc_RNA (1)...(19): siRNA sense strand
caagauuuaacaaggagaa

SEQ ID NO: 1939760 - RNA, 19 nt, Homo sapiens
  misc_RNA (1)...(19): siRNA sense strand
gaaggaagagaaguuaaac

SEQ ID NO: 1939761 - RNA, 19 nt, Homo sapiens
  misc_RNA (1)...(19): siRNA sense strand
ugaaguuuacucaugcuuu

SEQ ID NO: 1939762 - RNA, 19 nt, Homo sapiens
  misc_RNA (1)...(19): siRNA sense strand
ggaguagaugaaccucuuu

SEQ ID NO: 1939763 - RNA, 19 nt, Homo sapiens
  misc_RNA (1)...(19): siRNA sense strand
guucaguguauuuguauga

SEQ ID NO: 1939764 - RNA, 19 nt, Homo sapiens
  misc_RNA (1)...(19): siRNA sense strand
acgguucaguguauuugua

SEQ ID NO: 1939765 - RNA, 19 nt, Homo sapiens
  misc_RNA (1)...(19): siRNA sense strand
aggaguagaugaaccucuu

SEQ ID NO: 1939766 - RNA, 19 nt, Homo sapiens
  misc_RNA (1)...(19): siRNA sense strand
auuagcagccagugucuua

SEQ ID NO: 1939767 - RNA, 19 nt, Homo sapiens
  misc_RNA (1)...(19): siRNA sense strand
gagaagucuguuugauuau

SEQ ID NO: 1939768 - RNA, 19 nt, Homo sapiens
  misc_RNA (1)...(19): siRNA sense strand
gggaagagugcccuguguu

SEQ ID NO: 1939769 - RNA, 19 nt, Homo sapiens
  misc_RNA (1)...(19): siRNA sense strand
gaucaucuaaauggacuga

SEQ ID NO: 1939770 - RNA, 19 nt, Homo sapiens
  misc_RNA (1)...(19): siRNA sense strand
ugaggaaggaagagaaguu

SEQ ID NO: 1939771 - RNA, 19 nt, Homo sapiens
  misc_RNA (1)...(19): siRNA sense strand
ugaaagaagcggaucaaaa

SEQ ID NO: 1939772 - RNA, 19 nt, Homo sapiens
  misc_RNA (1)...(19): siRNA sense strand
gucaacuaauccugaaaga

SEQ ID NO: 1939773 - RNA, 19 nt, Homo sapiens
  misc_RNA (1)...(19): siRNA sense strand
ggacaaggaguagaugaac

SEQ ID NO: 1939774 - RNA, 19 nt, Homo sapiens
  misc_RNA (1)...(19): siRNA sense strand
caacgguucaguguauuug

SEQ ID NO: 1939775 - RNA, 19 nt, Homo sapiens
  misc_RNA (1)...(19): siRNA sense strand
ccaacgguucaguguauuu

SEQ ID NO: 1939776 - RNA, 19 nt, Homo sapiens
  misc_RNA (1)...(19): siRNA sense strand
uuacaugagaagucuguuu

SEQ ID NO: 1939777 - RNA, 19 nt, Homo sapiens
  misc_RNA (1)...(19): siRNA sense strand
gcagccagugucuuaguug

SEQ ID NO: 1939778 - RNA, 19 nt, Homo sapiens
  misc_RNA (1)...(19): siRNA sense strand
agauaugacgguaaaguau

SEQ ID NO: 1939779 - RNA, 19 nt, Homo sapiens
  misc_RNA (1)...(19): siRNA sense strand
gugcuuacaugagaagucu

SEQ ID NO: 1939780 - RNA, 19 nt, Homo sapiens
  misc_RNA (1)...(19): siRNA sense strand
ggcagagauauuuccuuua

SEQ ID NO: 1939781 - RNA, 19 nt, Homo sapiens
  misc_RNA (1)...(19): siRNA sense strand
gaacaguuuucccaaggau

SEQ ID NO: 1939782 - RNA, 19 nt, Homo sapiens
  misc_RNA (1)...(19): siRNA sense strand
uaaaguaugacucaagacu

SEQ ID NO: 1939783 - RNA, 19 nt, Homo sapiens
  misc_RNA (1)...(19): siRNA sense strand
gacgguaaaguaugacuca

SEQ ID NO: 1939784 - RNA, 19 nt, Homo sapiens
  misc_RNA (1)...(19): siRNA sense strand
aaacuuugaggaaggaaga

SEQ ID NO: 1939785 - RNA, 19 nt, Homo sapiens
  misc_RNA (1)...(19): siRNA sense strand
aauccaaggacaaggagua

SEQ ID NO: 1939786 - RNA, 19 nt, Homo sapiens
  misc_RNA (1)...(19): siRNA sense strand
caagacuucgggaaaggaa

SEQ ID NO: 1939787 - RNA, 19 nt, Homo sapiens
  misc_RNA (1)...(19): siRNA sense strand
cuacaggaucaucuaaaug

SEQ ID NO: 1939788 - RNA, 19 nt, Homo sapiens
  misc_RNA (1)...(19): siRNA sense strand
ucgcuucgcucugacuguu

SEQ ID NO: 1939789 - RNA, 19 nt, Homo sapiens
  misc_RNA (1)...(19): siRNA sense strand
ucccaaggaucuccaagca

SEQ ID NO: 1939790 - RNA, 19 nt, Homo sapiens
  misc_RNA (1)...(19): siRNA sense strand
ggaaauacgggguuguaga

SEQ ID NO: 1939791 - RNA, 19 nt, Homo sapiens
  misc_RNA (1)...(19): siRNA sense strand
uacaugagaagucuguuug

SEQ ID NO: 1939792 - RNA, 19 nt, Homo sapiens
  misc_RNA (1)...(19): siRNA sense strand
cagccagugucuuaguugu

SEQ ID NO: 1939793 - RNA, 19 nt, Homo sapiens
  misc_RNA (1)...(19): siRNA sense strand
ccaaagcagccagggaaga

SEQ ID NO: 1939794 - RNA, 19 nt, Homo sapiens
  misc_RNA (1)...(19): siRNA sense strand
caaagcagccagggaagag

SEQ ID NO: 1939795 - RNA, 19 nt, Homo sapiens
  misc_RNA (1)...(19): siRNA sense strand
uacaggaucaucuaaaugg

SEQ ID NO: 1939796 - RNA, 19 nt, Homo sapiens
  misc_RNA (1)...(19): siRNA sense strand
acagcgguauuccaggauu

SEQ ID NO: 1939797 - RNA, 19 nt, Homo sapiens
  misc_RNA (1)...(19): siRNA sense strand
gacucaagacuucgggaaa

SEQ ID NO: 1939798 - RNA, 19 nt, Homo sapiens
  misc_RNA (1)...(19): siRNA sense strand
cagaaacuggauuuaaaca

SEQ ID NO: 1939799 - RNA, 19 nt, Homo sapiens
  misc_RNA (1)...(19): siRNA sense strand
auacagggaugagucucuu

SEQ ID NO: 1939800 - RNA, 19 nt, Homo sapiens
  misc_RNA (1)...(19): siRNA sense strand
aaagauaugacgguaaagu

SEQ ID NO: 1939801 - RNA, 19 nt, Homo sapiens
  misc_RNA (1)...(19): siRNA sense strand
uaauucagacagcgguauu

SEQ ID NO: 1939802 - RNA, 19 nt, Homo sapiens
  misc_RNA (1)...(19): siRNA sense strand
agagugcccuguguuuaca

SEQ ID NO: 1939803 - RNA, 19 nt, Homo sapiens
  misc_RNA (1)...(19): siRNA sense strand
acaggaucaucuaaaugga

SEQ ID NO: 1939804 - RNA, 19 nt, Homo sapiens
  misc_RNA (1)...(19): siRNA sense strand
gcuucgcucugacuguugu

SEQ ID NO: 1939805 - RNA, 19 nt, Homo sapiens
  misc_RNA (1)...(19): siRNA sense strand
ucaacuaauccugaaagaa

SEQ ID NO: 1939806 - RNA, 19 nt, Homo sapiens
  misc_RNA (1)...(19): siRNA sense strand
gcagaucugaacuuauguc

SEQ ID NO: 1939807 - RNA, 19 nt, Homo sapiens
  misc_RNA (1)...(19): siRNA sense strand
ucagaaacuggauuuaaac

SEQ ID NO: 1939808 - RNA, 19 nt, Homo sapiens
  misc_RNA (1)...(19): siRNA sense strand
ggcaaggccuuccggcaua

SEQ ID NO: 1939809 - RNA, 19 nt, Homo sapiens
  misc_RNA (1)...(19): siRNA sense strand
ccacgagcuuucccagaua

SEQ ID NO: 1939810 - RNA, 19 nt, Homo sapiens
  misc_RNA (1)...(19): siRNA sense strand
gcagcaaaguguucgugaa

SEQ ID NO: 1939811 - RNA, 19 nt, Homo sapiens
  misc_RNA (1)...(19): siRNA sense strand
gcaaaguguucgugaagag

SEQ ID NO: 1939812 - RNA, 19 nt, Homo sapiens
  misc_RNA (1)...(19): siRNA sense strand
ggauguggcuguguacuuc

SEQ ID NO: 1939813 - RNA, 19 nt, Homo sapiens
  misc_RNA (1)...(19): siRNA sense strand
cgacugaccuccccgcuua

SEQ ID NO: 1939814 - RNA, 19 nt, Homo sapiens
  misc_RNA (1)...(19): siRNA sense strand
gacagaggauagagauguu

SEQ ID NO: 1939815 - RNA, 19 nt, Homo sapiens
  misc_RNA (1)...(19): siRNA sense strand
gagaauggccacgagcuuu

SEQ ID NO: 1939816 - RNA, 19 nt, Homo sapiens
  misc_RNA (1)...(19): siRNA sense strand
cuagacaacuucgcacuug

SEQ ID NO: 1939817 - RNA, 19 nt, Homo sapiens
  misc_RNA (1)...(19): siRNA sense strand
gccacgagcuuucccagau

SEQ ID NO: 1939818 - RNA, 19 nt, Homo sapiens
  misc_RNA (1)...(19): siRNA sense strand
gcuccgaccuccucaagca

SEQ ID NO: 1939819 - RNA, 19 nt, Homo sapiens
  misc_RNA (1)...(19): siRNA sense strand
gaugacuacuagcgucuuc

SEQ ID NO: 1939820 - RNA, 19 nt, Homo sapiens
  misc_RNA (1)...(19): siRNA sense strand
caccugggaugacuacuag

SEQ ID NO: 1939821 - RNA, 19 nt, Homo sapiens
  misc_RNA (1)...(19): siRNA sense strand
ccgaaugggugcaguuugg

SEQ ID NO: 1939822 - RNA, 19 nt, Homo sapiens
  misc_RNA (1)...(19): siRNA sense strand
ggagaauggccacgagcuu

SEQ ID NO: 1939823 - RNA, 19 nt, Homo sapiens
  misc_RNA (1)...(19): siRNA sense strand
gcaaggccuuccggcauag

SEQ ID NO: 1939824 - RNA, 19 nt, Homo sapiens
  misc_RNA (1)...(19): siRNA sense strand
ugacagaggauagagaugu

SEQ ID NO: 1939825 - RNA, 19 nt, Homo sapiens
  misc_RNA (1)...(19): siRNA sense strand
ccaccugggaugacuacua

SEQ ID NO: 1939826 - RNA, 19 nt, Homo sapiens
  misc_RNA (1)...(19): siRNA sense strand
uugaggauguggcugugua

SEQ ID NO: 1939827 - RNA, 19 nt, Homo sapiens
  misc_RNA (1)...(19): siRNA sense strand
ccugguuccuggaguuuga

SEQ ID NO: 1939828 - RNA, 19 nt, Homo sapiens
  misc_RNA (1)...(19): siRNA sense strand
gcgugaugcuagacaacuu

SEQ ID NO: 1939829 - RNA, 19 nt, Homo sapiens
  misc_RNA (1)...(19): siRNA sense strand
gggugucggugaucuacug

SEQ ID NO: 1939830 - RNA, 19 nt, Homo sapiens
  misc_RNA (1)...(19): siRNA sense strand
acuagcgucuucccuguug

SEQ ID NO: 1939831 - RNA, 19 nt, Homo sapiens
  misc_RNA (1)...(19): siRNA sense strand
ccagggcuccucgcucuuu

SEQ ID NO: 1939832 - RNA, 19 nt, Homo sapiens
  misc_RNA (1)...(19): siRNA sense strand
gcacgagcguacgcacaca

SEQ ID NO: 1939833 - RNA, 19 nt, Homo sapiens
  misc_RNA (1)...(19): siRNA sense strand
ggcaggagccucauagacu

SEQ ID NO: 1939834 - RNA, 19 nt, Homo sapiens
  misc_RNA (1)...(19): siRNA sense strand
ggaguuugacagaggauag

SEQ ID NO: 1939835 - RNA, 19 nt, Homo sapiens
  misc_RNA (1)...(19): siRNA sense strand
agccagacgucgcacuuga

SEQ ID NO: 1939836 - RNA, 19 nt, Homo sapiens
  misc_RNA (1)...(19): siRNA sense strand
gcuagacaacuucgcacuu

SEQ ID NO: 1939837 - RNA, 19 nt, Homo sapiens
  misc_RNA (1)...(19): siRNA sense strand
cagcaaaguguucgugaag

SEQ ID NO: 1939838 - RNA, 19 nt, Homo sapiens
  misc_RNA (1)...(19): siRNA sense strand
gcaacucgcaccugaucca

SEQ ID NO: 1939839 - RNA, 19 nt, Homo sapiens
  misc_RNA (1)...(19): siRNA sense strand
gggaaaagacacucacaga

SEQ ID NO: 1939840 - RNA, 19 nt, Homo sapiens
  misc_RNA (1)...(19): siRNA sense strand
gagcuccgaccuccucaag

SEQ ID NO: 1939841 - RNA, 19 nt, Homo sapiens
  misc_RNA (1)...(19): siRNA sense strand
gaacagaugcuucaacuuu

SEQ ID NO: 1939842 - RNA, 19 nt, Homo sapiens
  misc_RNA (1)...(19): siRNA sense strand
ggaaagaacagaugcuuca

SEQ ID NO: 1939843 - RNA, 19 nt, Homo sapiens
  misc_RNA (1)...(19): siRNA sense strand
uaaauuguauccucaagug

SEQ ID NO: 1939844 - RNA, 19 nt, Homo sapiens
  misc_RNA (1)...(19): siRNA sense strand
gaacagcagagaaacacua

SEQ ID NO: 1939845 - RNA, 19 nt, Homo sapiens
  misc_RNA (1)...(19): siRNA sense strand
ucagcaaacuucagccauu

SEQ ID NO: 1939846 - RNA, 19 nt, Homo sapiens
  misc_RNA (1)...(19): siRNA sense strand
gaaaaguuaucaaggauuc

SEQ ID NO: 1939847 - RNA, 19 nt, Homo sapiens
  misc_RNA (1)...(19): siRNA sense strand
gcagagaaacacuaaaaua

SEQ ID NO: 1939848 - RNA, 19 nt, Homo sapiens
  misc_RNA (1)...(19): siRNA sense strand
gaaaucauggaacaucaga

SEQ ID NO: 1939849 - RNA, 19 nt, Homo sapiens
  misc_RNA (1)...(19): siRNA sense strand
cagcaaacuucagccauug

SEQ ID NO: 1939850 - RNA, 19 nt, Homo sapiens
  misc_RNA (1)...(19): siRNA sense strand
ccauugaacagcagagaaa

SEQ ID NO: 1939851 - RNA, 19 nt, Homo sapiens
  misc_RNA (1)...(19): siRNA sense strand
gcuucaacuuucucacaaa

SEQ ID NO: 1939852 - RNA, 19 nt, Homo sapiens
  misc_RNA (1)...(19): siRNA sense strand
aaucauggaacaucagaaa

SEQ ID NO: 1939853 - RNA, 19 nt, Homo sapiens
  misc_RNA (1)...(19): siRNA sense strand
gaaagaacagaugcuucaa

SEQ ID NO: 1939854 - RNA, 19 nt, Homo sapiens
  misc_RNA (1)...(19): siRNA sense strand
aagaacagaugcuucaacu

SEQ ID NO: 1939855 - RNA, 19 nt, Homo sapiens
  misc_RNA (1)...(19): siRNA sense strand
aaagaccauuugccaagga

SEQ ID NO: 1939856 - RNA, 19 nt, Homo sapiens
  misc_RNA (1)...(19): siRNA sense strand
aauaaaaccucguuaccuu

SEQ ID NO: 1939857 - RNA, 19 nt, Homo sapiens
  misc_RNA (1)...(19): siRNA sense strand
gaggaaagaacagaugcuu

SEQ ID NO: 1939858 - RNA, 19 nt, Homo sapiens
  misc_RNA (1)...(19): siRNA sense strand
acagaaaaguuaucaagga

SEQ ID NO: 1939859 - RNA, 19 nt, Homo sapiens
  misc_RNA (1)...(19): siRNA sense strand
uagcaucucagcaaacuuc

SEQ ID NO: 1939860 - RNA, 19 nt, Homo sapiens
  misc_RNA (1)...(19): siRNA sense strand
gaccauuugccaaggacua

SEQ ID NO: 1939861 - RNA, 19 nt, Homo sapiens
  misc_RNA (1)...(19): siRNA sense strand
aacagaugcuucaacuuuc

SEQ ID NO: 1939862 - RNA, 19 nt, Homo sapiens
  misc_RNA (1)...(19): siRNA sense strand
aaagaggaaagaacagaug

SEQ ID NO: 1939863 - RNA, 19 nt, Homo sapiens
  misc_RNA (1)...(19): siRNA sense strand
acagaugcuucaacuuucu

SEQ ID NO: 1939864 - RNA, 19 nt, Homo sapiens
  misc_RNA (1)...(19): siRNA sense strand
caaaauguccauaacugaa

SEQ ID NO: 1939865 - RNA, 19 nt, Homo sapiens
  misc_RNA (1)...(19): siRNA sense strand
cauuugccaaggacuauuu

SEQ ID NO: 1939866 - RNA, 19 nt, Homo sapiens
  misc_RNA (1)...(19): siRNA sense strand
cagcagagaaacacuaaaa

SEQ ID NO: 1939867 - RNA, 19 nt, Homo sapiens
  misc_RNA (1)...(19): siRNA sense strand
cagaaaaguuaucaaggau

SEQ ID NO: 1939868 - RNA, 19 nt, Homo sapiens
  misc_RNA (1)...(19): siRNA sense strand
cacaaaauguccauaacug

SEQ ID NO: 1939869 - RNA, 19 nt, Homo sapiens
  misc_RNA (1)...(19): siRNA sense strand
ucaacuuucucacaaaaug

SEQ ID NO: 1939870 - RNA, 19 nt, Homo sapiens
  misc_RNA (1)...(19): siRNA sense strand
gagaugguauuccuccuua

SEQ ID NO: 1939871 - RNA, 19 nt, Homo sapiens
  misc_RNA (1)...(19): siRNA sense strand
gaacuucgcagaacagcua

SEQ ID NO: 1939872 - RNA, 19 nt, Homo sapiens
  misc_RNA (1)...(19): siRNA sense strand
gaaccucaccgacuucuug

SEQ ID NO: 1939873 - RNA, 19 nt, Homo sapiens
  misc_RNA (1)...(19): siRNA sense strand
ucaugaagauuauggugua

SEQ ID NO: 1939874 - RNA, 19 nt, Homo sapiens
  misc_RNA (1)...(19): siRNA sense strand
ggaauuaagugugguagca

SEQ ID NO: 1939875 - RNA, 19 nt, Homo sapiens
  misc_RNA (1)...(19): siRNA sense strand
guaagggcaucaugaagau

SEQ ID NO: 1939876 - RNA, 19 nt, Homo sapiens
  misc_RNA (1)...(19): siRNA sense strand
ggacauuuguuccguaagg

SEQ ID NO: 1939877 - RNA, 19 nt, Homo sapiens
  misc_RNA (1)...(19): siRNA sense strand
ggcaggacauggucucuga

SEQ ID NO: 1939878 - RNA, 19 nt, Homo sapiens
  misc_RNA (1)...(19): siRNA sense strand
agacuuuccuugaccauga

SEQ ID NO: 1939879 - RNA, 19 nt, Homo sapiens
  misc_RNA (1)...(19): siRNA sense strand
gaccaugaguuuguugcua

SEQ ID NO: 1939880 - RNA, 19 nt, Homo sapiens
  misc_RNA (1)...(19): siRNA sense strand
ucuccuaucucguggaauu

SEQ ID NO: 1939881 - RNA, 19 nt, Homo sapiens
  misc_RNA (1)...(19): siRNA sense strand
gaaacugcguggacauugc

SEQ ID NO: 1939882 - RNA, 19 nt, Homo sapiens
  misc_RNA (1)...(19): siRNA sense strand
ccagcaagccagcccauuu

SEQ ID NO: 1939883 - RNA, 19 nt, Homo sapiens
  misc_RNA (1)...(19): siRNA sense strand
gcacugaggccuugucacu

SEQ ID NO: 1939884 - RNA, 19 nt, Homo sapiens
  misc_RNA (1)...(19): siRNA sense strand
ugaagauuaugguguacaa

SEQ ID NO: 1939885 - RNA, 19 nt, Homo sapiens
  misc_RNA (1)...(19): siRNA sense strand
gccaugcccuggugcgaaa

SEQ ID NO: 1939886 - RNA, 19 nt, Homo sapiens
  misc_RNA (1)...(19): siRNA sense strand
caagccagcccauuuguuc

SEQ ID NO: 1939887 - RNA, 19 nt, Homo sapiens
  misc_RNA (1)...(19): siRNA sense strand
acauggaaccugagacuuu

SEQ ID NO: 1939888 - RNA, 19 nt, Homo sapiens
  misc_RNA (1)...(19): siRNA sense strand
gcagggaaguguuuuagau

SEQ ID NO: 1939889 - RNA, 19 nt, Homo sapiens
  misc_RNA (1)...(19): siRNA sense strand
cugaugacaugaagaacuu

SEQ ID NO: 1939890 - RNA, 19 nt, Homo sapiens
  misc_RNA (1)...(19): siRNA sense strand
gacauggucucugaugaca

SEQ ID NO: 1939891 - RNA, 19 nt, Homo sapiens
  misc_RNA (1)...(19): siRNA sense strand
accaugaguuuguugcuaa

SEQ ID NO: 1939892 - RNA, 19 nt, Homo sapiens
  misc_RNA (1)...(19): siRNA sense strand
cguaagggcaucaugaaga

SEQ ID NO: 1939893 - RNA, 19 nt, Homo sapiens
  misc_RNA (1)...(19): siRNA sense strand
cauggaaccugagacuuuc

SEQ ID NO: 1939894 - RNA, 19 nt, Homo sapiens
  misc_RNA (1)...(19): siRNA sense strand
aagggcaucaugaagauua

SEQ ID NO: 1939895 - RNA, 19 nt, Homo sapiens
  misc_RNA (1)...(19): siRNA sense strand
gcaagccagcccauuuguu

SEQ ID NO: 1939896 - RNA, 19 nt, Homo sapiens
  misc_RNA (1)...(19): siRNA sense strand
cagcaagccagcccauuug

SEQ ID NO: 1939897 - RNA, 19 nt, Homo sapiens
  misc_RNA (1)...(19): siRNA sense strand
gcaccuccagucaccauga

SEQ ID NO: 1939898 - RNA, 19 nt, Homo sapiens
  misc_RNA (1)...(19): siRNA sense strand
caugauggaguaccuguug

SEQ ID NO: 1939899 - RNA, 19 nt, Homo sapiens
  misc_RNA (1)...(19): siRNA sense strand
gacauugccacaucugaga

SEQ ID NO: 1939900 - RNA, 19 nt, Homo sapiens
  misc_RNA (1)...(19): siRNA sense strand
caacauggaaccugagacu

SEQ ID NO: 1939901 - RNA, 19 nt, Homo sapiens
  misc_RNA (1)...(19): siRNA sense strand
ucaccgacuucuugaugga

SEQ ID NO: 1939902 - RNA, 19 nt, Homo sapiens
  misc_RNA (1)...(19): siRNA sense strand
ggacauggucucugaugac

SEQ ID NO: 1939903 - RNA, 19 nt, Homo sapiens
  misc_RNA (1)...(19): siRNA sense strand
gggcaccauuaacaugaug

SEQ ID NO: 1939904 - RNA, 19 nt, Homo sapiens
  misc_RNA (1)...(19): siRNA sense strand
gcgaaacugcguggacauu

SEQ ID NO: 1939905 - RNA, 19 nt, Homo sapiens
  misc_RNA (1)...(19): siRNA sense strand
uuagaucacaguuuggaaa

SEQ ID NO: 1939906 - RNA, 19 nt, Homo sapiens
  misc_RNA (1)...(19): siRNA sense strand
ggucucugaugacaugaag

SEQ ID NO: 1939907 - RNA, 19 nt, Homo sapiens
  misc_RNA (1)...(19): siRNA sense strand
aaccugagacuuuccuuga

SEQ ID NO: 1939908 - RNA, 19 nt, Homo sapiens
  misc_RNA (1)...(19): siRNA sense strand
agggacauuuguuccguaa

SEQ ID NO: 1939909 - RNA, 19 nt, Homo sapiens
  misc_RNA (1)...(19): siRNA sense strand
gaugguauuccuccuuaag

SEQ ID NO: 1939910 - RNA, 19 nt, Homo sapiens
  misc_RNA (1)...(19): siRNA sense strand
ccagaaaugggagacaaga

SEQ ID NO: 1939911 - RNA, 19 nt, Homo sapiens
  misc_RNA (1)...(19): siRNA sense strand
ucucugaugacaugaagaa

SEQ ID NO: 1939912 - RNA, 19 nt, Homo sapiens
  misc_RNA (1)...(19): siRNA sense strand
aagauuaugguguacaaga

SEQ ID NO: 1939913 - RNA, 19 nt, Homo sapiens
  misc_RNA (1)...(19): siRNA sense strand
cgaaacugcguggacauug

SEQ ID NO: 1939914 - RNA, 19 nt, Homo sapiens
  misc_RNA (1)...(19): siRNA sense strand
ccuugucacucuccuaucu

SEQ ID NO: 1939915 - RNA, 19 nt, Homo sapiens
  misc_RNA (1)...(19): siRNA sense strand
cagaaaugggagacaagaa

SEQ ID NO: 1939916 - RNA, 19 nt, Homo sapiens
  misc_RNA (1)...(19): siRNA sense strand
ggaacacagacagcacuga

SEQ ID NO: 1939917 - RNA, 19 nt, Homo sapiens
  misc_RNA (1)...(19): siRNA sense strand
gacaacauggaaccugaga

SEQ ID NO: 1939918 - RNA, 19 nt, Homo sapiens
  misc_RNA (1)...(19): siRNA sense strand
ccucaccgacuucuugaug

SEQ ID NO: 1939919 - RNA, 19 nt, Homo sapiens
  misc_RNA (1)...(19): siRNA sense strand
acugaggccuugucacucu

SEQ ID NO: 1939920 - RNA, 19 nt, Homo sapiens
  misc_RNA (1)...(19): siRNA sense strand
ggccuugucacucuccuau

SEQ ID NO: 1939921 - RNA, 19 nt, Homo sapiens
  misc_RNA (1)...(19): siRNA sense strand
aggacauggucucugauga

SEQ ID NO: 1939922 - RNA, 19 nt, Homo sapiens
  misc_RNA (1)...(19): siRNA sense strand
gaacgaaacucaccuaauc

SEQ ID NO: 1939923 - RNA, 19 nt, Homo sapiens
  misc_RNA (1)...(19): siRNA sense strand
gcucagaucuugggaauua

SEQ ID NO: 1939924 - RNA, 19 nt, Homo sapiens
  misc_RNA (1)...(19): siRNA sense strand
ggagaaggauggccacaaa

SEQ ID NO: 1939925 - RNA, 19 nt, Homo sapiens
  misc_RNA (1)...(19): siRNA sense strand
caaagaaucucagaaguug

SEQ ID NO: 1939926 - RNA, 19 nt, Homo sapiens
  misc_RNA (1)...(19): siRNA sense strand
gggaagaggugauucuaaa

SEQ ID NO: 1939927 - RNA, 19 nt, Homo sapiens
  misc_RNA (1)...(19): siRNA sense strand
gcaaguagaugaugacagu

SEQ ID NO: 1939928 - RNA, 19 nt, Homo sapiens
  misc_RNA (1)...(19): siRNA sense strand
gcaaggaguuucaguuguu

SEQ ID NO: 1939929 - RNA, 19 nt, Homo sapiens
  misc_RNA (1)...(19): siRNA sense strand
gaagugaaacuccaaguaa

SEQ ID NO: 1939930 - RNA, 19 nt, Homo sapiens
  misc_RNA (1)...(19): siRNA sense strand
gaagcuaggucuuuacuca

SEQ ID NO: 1939931 - RNA, 19 nt, Homo sapiens
  misc_RNA (1)...(19): siRNA sense strand
gggaugaccugacugauga

SEQ ID NO: 1939932 - RNA, 19 nt, Homo sapiens
  misc_RNA (1)...(19): siRNA sense strand
gagcuaaagcgcaaacuua

SEQ ID NO: 1939933 - RNA, 19 nt, Homo sapiens
  misc_RNA (1)...(19): siRNA sense strand
ucacucauaugcacaauaa

SEQ ID NO: 1939934 - RNA, 19 nt, Homo sapiens
  misc_RNA (1)...(19): siRNA sense strand
caaaguggcucagaucuug

SEQ ID NO: 1939935 - RNA, 19 nt, Homo sapiens
  misc_RNA (1)...(19): siRNA sense strand
gaaauggucaguuguagaa

SEQ ID NO: 1939936 - RNA, 19 nt, Homo sapiens
  misc_RNA (1)...(19): siRNA sense strand
aaacagcccuccauuccua

SEQ ID NO: 1939937 - RNA, 19 nt, Homo sapiens
  misc_RNA (1)...(19): siRNA sense strand
ggauaugccuguugauuuc

SEQ ID NO: 1939938 - RNA, 19 nt, Homo sapiens
  misc_RNA (1)...(19): siRNA sense strand
ccaaguaucucuaaagaag

SEQ ID NO: 1939939 - RNA, 19 nt, Homo sapiens
  misc_RNA (1)...(19): siRNA sense strand
gcaaagaaucucagaaguu

SEQ ID NO: 1939940 - RNA, 19 nt, Homo sapiens
  misc_RNA (1)...(19): siRNA sense strand
gaagagauucuagaaagua

SEQ ID NO: 1939941 - RNA, 19 nt, Homo sapiens
  misc_RNA (1)...(19): siRNA sense strand
ggacaaagaggauggcaaa

SEQ ID NO: 1939942 - RNA, 19 nt, Homo sapiens
  misc_RNA (1)...(19): siRNA sense strand
gguuaaagcuccaguguca

SEQ ID NO: 1939943 - RNA, 19 nt, Homo sapiens
  misc_RNA (1)...(19): siRNA sense strand
ccaugcagcuugagaguuu

SEQ ID NO: 1939944 - RNA, 19 nt, Homo sapiens
  misc_RNA (1)...(19): siRNA sense strand
ggauugagguggacauaau

SEQ ID NO: 1939945 - RNA, 19 nt, Homo sapiens
  misc_RNA (1)...(19): siRNA sense strand
gagaaaugcugcgcaagaa

SEQ ID NO: 1939946 - RNA, 19 nt, Homo sapiens
  misc_RNA (1)...(19): siRNA sense strand
caagaaauauguggaugaa

SEQ ID NO: 1939947 - RNA, 19 nt, Homo sapiens
  misc_RNA (1)...(19): siRNA sense strand
caacagaccuugggcuuca

SEQ ID NO: 1939948 - RNA, 19 nt, Homo sapiens
  misc_RNA (1)...(19): siRNA sense strand
aaagugagauagagacaaa

SEQ ID NO: 1939949 - RNA, 19 nt, Homo sapiens
  misc_RNA (1)...(19): siRNA sense strand
uagcagagauuagucaauu

SEQ ID NO: 1939950 - RNA, 19 nt, Homo sapiens
  misc_RNA (1)...(19): siRNA sense strand
guacagaagucucaaacuc

SEQ ID NO: 1939951 - RNA, 19 nt, Homo sapiens
  misc_RNA (1)...(19): siRNA sense strand
gaaggacauugcagagcua

SEQ ID NO: 1939952 - RNA, 19 nt, Homo sapiens
  misc_RNA (1)...(19): siRNA sense strand
gauauacagugcaaagaau

SEQ ID NO: 1939953 - RNA, 19 nt, Homo sapiens
  misc_RNA (1)...(19): siRNA sense strand
gaaggaaucaccaacauca

SEQ ID NO: 1939954 - RNA, 19 nt, Homo sapiens
  misc_RNA (1)...(19): siRNA sense strand
ugagucggcuucaggauaa

SEQ ID NO: 1939955 - RNA, 19 nt, Homo sapiens
  misc_RNA (1)...(19): siRNA sense strand
caagggagcagguaauuga

SEQ ID NO: 1939956 - RNA, 19 nt, Homo sapiens
  misc_RNA (1)...(19): siRNA sense strand
gaacacaccaggcccuuga

SEQ ID NO: 1939957 - RNA, 19 nt, Homo sapiens
  misc_RNA (1)...(19): siRNA sense strand
cagaucagcuauguguuua

SEQ ID NO: 1939958 - RNA, 19 nt, Homo sapiens
  misc_RNA (1)...(19): siRNA sense strand
caaaggaggagaagaaaga

SEQ ID NO: 1939959 - RNA, 19 nt, Homo sapiens
  misc_RNA (1)...(19): siRNA sense strand
caagcaagaugccauaaag

SEQ ID NO: 1939960 - RNA, 19 nt, Homo sapiens
  misc_RNA (1)...(19): siRNA sense strand
caaagcaggccuuaugaaa

SEQ ID NO: 1939961 - RNA, 19 nt, Homo sapiens
  misc_RNA (1)...(19): siRNA sense strand
ggcaaaggcugugaaagaa

SEQ ID NO: 1939962 - RNA, 19 nt, Homo sapiens
  misc_RNA (1)...(19): siRNA sense strand
aaagcgcacugacaagaua

SEQ ID NO: 1939963 - RNA, 19 nt, Homo sapiens
  misc_RNA (1)...(19): siRNA sense strand
gccaagagcuccguaaauc

SEQ ID NO: 1939964 - RNA, 19 nt, Homo sapiens
  misc_RNA (1)...(19): siRNA sense strand
caaggaguuucaguuguua

SEQ ID NO: 1939965 - RNA, 19 nt, Homo sapiens
  misc_RNA (1)...(19): siRNA sense strand
ggaagugaaacuccaagua

SEQ ID NO: 1939966 - RNA, 19 nt, Homo sapiens
  misc_RNA (1)...(19): siRNA sense strand
gaugaggacuaccgaacaa

SEQ ID NO: 1939967 - RNA, 19 nt, Homo sapiens
  misc_RNA (1)...(19): siRNA sense strand
gcaaggcccuagaagacuu

SEQ ID NO: 1939968 - RNA, 19 nt, Homo sapiens
  misc_RNA (1)...(19): siRNA sense strand
gacaaacacugaacuaaaa

SEQ ID NO: 1939969 - RNA, 19 nt, Homo sapiens
  misc_RNA (1)...(19): siRNA sense strand
ucagacaccucuucuacuu

SEQ ID NO: 1939970 - RNA, 19 nt, Homo sapiens
  misc_RNA (1)...(19): siRNA sense strand
gcuaaguggugguccauug

SEQ ID NO: 1939971 - RNA, 19 nt, Homo sapiens
  misc_RNA (1)...(19): siRNA sense strand
gaaauuagaagaccaacuc

SEQ ID NO: 1939972 - RNA, 19 nt, Homo sapiens
  misc_RNA (1)...(19): siRNA sense strand
gcgcaaacuuagugagaaa

SEQ ID NO: 1939973 - RNA, 19 nt, Homo sapiens
  misc_RNA (1)...(19): siRNA sense strand
gaagagaccaauccagaau

SEQ ID NO: 1939974 - RNA, 19 nt, Homo sapiens
  misc_RNA (1)...(19): siRNA sense strand
gcugaacaguccaauaaau

SEQ ID NO: 1939975 - RNA, 19 nt, Homo sapiens
  misc_RNA (1)...(19): siRNA sense strand
cagcccaacuugcuaauga

SEQ ID NO: 1939976 - RNA, 19 nt, Homo sapiens
  misc_RNA (1)...(19): siRNA sense strand
ccaagggccucucaguuug

SEQ ID NO: 1939977 - RNA, 19 nt, Homo sapiens
  misc_RNA (1)...(19): siRNA sense strand
ggagaaaugcugcgcaaga

SEQ ID NO: 1939978 - RNA, 19 nt, Homo sapiens
  misc_RNA (1)...(19): siRNA sense strand
gaaagugugugaagaaaau

SEQ ID NO: 1939979 - RNA, 19 nt, Homo sapiens
  misc_RNA (1)...(19): siRNA sense strand
gaaauccaccucagagaau

SEQ ID NO: 1939980 - RNA, 19 nt, Homo sapiens
  misc_RNA (1)...(19): siRNA sense strand
gcacauaccagcccuugga

SEQ ID NO: 1939981 - RNA, 19 nt, Homo sapiens
  misc_RNA (1)...(19): siRNA sense strand
ccacaaggauaauuuggau

SEQ ID NO: 1939982 - RNA, 19 nt, Homo sapiens
  misc_RNA (1)...(19): siRNA sense strand
cuuugaagcuacagacuua

SEQ ID NO: 1939983 - RNA, 19 nt, Homo sapiens
  misc_RNA (1)...(19): siRNA sense strand
gacagacacuuuggccaua

SEQ ID NO: 1939984 - RNA, 19 nt, Homo sapiens
  misc_RNA (1)...(19): siRNA sense strand
caaccucucuagaaccaaa

SEQ ID NO: 1939985 - RNA, 19 nt, Homo sapiens
  misc_RNA (1)...(19): siRNA sense strand
ggucuugagcgauauauuu

SEQ ID NO: 1939986 - RNA, 19 nt, Homo sapiens
  misc_RNA (1)...(19): siRNA sense strand
gcaucgaucugauuauagu

SEQ ID NO: 1939987 - RNA, 19 nt, Homo sapiens
  misc_RNA (1)...(19): siRNA sense strand
gccaagggccucucaguuu

SEQ ID NO: 1939988 - RNA, 19 nt, Homo sapiens
  misc_RNA (1)...(19): siRNA sense strand
ggaugaagaagaggauuua

SEQ ID NO: 1939989 - RNA, 19 nt, Homo sapiens
  misc_RNA (1)...(19): siRNA sense strand
agaagaagcccaaguccua

SEQ ID NO: 1939990 - RNA, 19 nt, Homo sapiens
  misc_RNA (1)...(19): siRNA sense strand
ccaacugucuugugucaga

SEQ ID NO: 1939991 - RNA, 19 nt, Homo sapiens
  misc_RNA (1)...(19): siRNA sense strand
gcacauagauccccaacug

SEQ ID NO: 1939992 - RNA, 19 nt, Homo sapiens
  misc_RNA (1)...(19): siRNA sense strand
gggauaugccuguugauuu

SEQ ID NO: 1939993 - RNA, 19 nt, Homo sapiens
  misc_RNA (1)...(19): siRNA sense strand
gagcaaggaguuucaguug

SEQ ID NO: 1939994 - RNA, 19 nt, Homo sapiens
  misc_RNA (1)...(19): siRNA sense strand
caaguaaaguagugaucaa

SEQ ID NO: 1939995 - RNA, 19 nt, Homo sapiens
  misc_RNA (1)...(19): siRNA sense strand
gauauaauccagagaagau

SEQ ID NO: 1939996 - RNA, 19 nt, Homo sapiens
  misc_RNA (1)...(19): siRNA sense strand
ccacuaagcaguuggauca

SEQ ID NO: 1939997 - RNA, 19 nt, Homo sapiens
  misc_RNA (1)...(19): siRNA sense strand
gaguuucaguuguuaguga

SEQ ID NO: 1939998 - RNA, 19 nt, Homo sapiens
  misc_RNA (1)...(19): siRNA sense strand
ccaacuugcuaaugauuga

SEQ ID NO: 1939999 - RNA, 19 nt, Homo sapiens
  misc_RNA (1)...(19): siRNA sense strand
caaaggcugugaaagaagu

SEQ ID NO: 1940000 - RNA, 19 nt, Homo sapiens
  misc_RNA (1)...(19): siRNA sense strand
gaagaggaggagcgaagua

SEQ ID NO: 1940001 - RNA, 19 nt, Homo sapiens
  misc_RNA (1)...(19): siRNA sense strand
gaccauguuugauuucuuc

SEQ ID NO: 1940002 - RNA, 19 nt, Homo sapiens
  misc_RNA (1)...(19): siRNA sense strand
aaucugaacuggacaaagu

SEQ ID NO: 1940003 - RNA, 19 nt, Homo sapiens
  misc_RNA (1)...(19): siRNA sense strand
ugagagagcuagccaggau

SEQ ID NO: 1940004 - RNA, 19 nt, Homo sapiens
  misc_RNA (1)...(19): siRNA sense strand
uuccaucacucauaagaua

SEQ ID NO: 1940005 - RNA, 19 nt, Homo sapiens
  misc_RNA (1)...(19): siRNA sense strand
gccauuacagcuagaaaua

SEQ ID NO: 1940006 - RNA, 19 nt, Homo sapiens
  misc_RNA (1)...(19): siRNA sense strand
caucaucuccaaagcauuu

SEQ ID NO: 1940007 - RNA, 19 nt, Homo sapiens
  misc_RNA (1)...(19): siRNA sense strand
gaugacacagugaagauaa

SEQ ID NO: 1940008 - RNA, 19 nt, Homo sapiens
  misc_RNA (1)...(19): siRNA sense strand
cagaguugcugcuucauuc

SEQ ID NO: 1940009 - RNA, 19 nt, Homo sapiens
  misc_RNA (1)...(19): siRNA sense strand
cuagggaaauggucaguug

SEQ ID NO: 1940010 - RNA, 19 nt, Homo sapiens
  misc_RNA (1)...(19): siRNA sense strand
ggucgcugcuccuauaguu

SEQ ID NO: 1940011 - RNA, 19 nt, Homo sapiens
  misc_RNA (1)...(19): siRNA sense strand
caagaggaguugcaucaag

SEQ ID NO: 1940012 - RNA, 19 nt, Homo sapiens
  misc_RNA (1)...(19): siRNA sense strand
acaccuuucugucuauuaa

SEQ ID NO: 1940013 - RNA, 19 nt, Homo sapiens
  misc_RNA (1)...(19): siRNA sense strand
aaggaacacuggcaucaaa

SEQ ID NO: 1940014 - RNA, 19 nt, Homo sapiens
  misc_RNA (1)...(19): siRNA sense strand
ggacccaaccugccuauuc

SEQ ID NO: 1940015 - RNA, 19 nt, Homo sapiens
  misc_RNA (1)...(19): siRNA sense strand
gggagcagguaauugaaga

SEQ ID NO: 1940016 - RNA, 19 nt, Homo sapiens
  misc_RNA (1)...(19): siRNA sense strand
ucacucggauuggaauuaa

SEQ ID NO: 1940017 - RNA, 19 nt, Homo sapiens
  misc_RNA (1)...(19): siRNA sense strand
ccuaaucccaggaguguua

SEQ ID NO: 1940018 - RNA, 19 nt, Homo sapiens
  misc_RNA (1)...(19): siRNA sense strand
cagaaagugugugaagaaa

SEQ ID NO: 1940019 - RNA, 19 nt, Homo sapiens
  misc_RNA (1)...(19): siRNA sense strand
ccagaucagcuauguguuu

SEQ ID NO: 1940020 - RNA, 19 nt, Homo sapiens
  misc_RNA (1)...(19): siRNA sense strand
uuacucaacccacaagaua

SEQ ID NO: 1940021 - RNA, 19 nt, Homo sapiens
  misc_RNA (1)...(19): siRNA sense strand
aagcaggccuuaugaaaca

SEQ ID NO: 1940022 - RNA, 19 nt, Homo sapiens
  misc_RNA (1)...(19): siRNA sense strand
ggaauuaucuucuuaguug

SEQ ID NO: 1940023 - RNA, 19 nt, Homo sapiens
  misc_RNA (1)...(19): siRNA sense strand
gaagacaccuuggaaauga

SEQ ID NO: 1940024 - RNA, 19 nt, Homo sapiens
  misc_RNA (1)...(19): siRNA sense strand
gagagaaggagaauuauua

SEQ ID NO: 1940025 - RNA, 19 nt, Homo sapiens
  misc_RNA (1)...(19): siRNA sense strand
gaaaucaucuacaacauca

SEQ ID NO: 1940026 - RNA, 19 nt, Homo sapiens
  misc_RNA (1)...(19): siRNA sense strand
gaaggagaauuauuaggaa

SEQ ID NO: 1940027 - RNA, 19 nt, Homo sapiens
  misc_RNA (1)...(19): siRNA sense strand
gcucaaagccuuccagaaa

SEQ ID NO: 1940028 - RNA, 19 nt, Homo sapiens
  misc_RNA (1)...(19): siRNA sense strand
gcaaauccuugacuaugaa

SEQ ID NO: 1940029 - RNA, 19 nt, Homo sapiens
  misc_RNA (1)...(19): siRNA sense strand
cccgagagcucuuacuuua

SEQ ID NO: 1940030 - RNA, 19 nt, Homo sapiens
  misc_RNA (1)...(19): siRNA sense strand
gaauaaagacagacaguug

SEQ ID NO: 1940031 - RNA, 19 nt, Homo sapiens
  misc_RNA (1)...(19): siRNA sense strand
acacuggaguucuuuauuu

SEQ ID NO: 1940032 - RNA, 19 nt, Homo sapiens
  misc_RNA (1)...(19): siRNA sense strand
uuaaaccucuggauuauga

SEQ ID NO: 1940033 - RNA, 19 nt, Homo sapiens
  misc_RNA (1)...(19): siRNA sense strand
aaagucaacucaacaaaga

SEQ ID NO: 1940034 - RNA, 19 nt, Homo sapiens
  misc_RNA (1)...(19): siRNA sense strand
gauuaaaccucuggauuau

SEQ ID NO: 1940035 - RNA, 19 nt, Homo sapiens
  misc_RNA (1)...(19): siRNA sense strand
guugagagaaggagaauua

SEQ ID NO: 1940036 - RNA, 19 nt, Homo sapiens
  misc_RNA (1)...(19): siRNA sense strand
guaaauagaaccaauggaa

SEQ ID NO: 1940037 - RNA, 19 nt, Homo sapiens
  misc_RNA (1)...(19): siRNA sense strand
ggucacaguuccugaauca

SEQ ID NO: 1940038 - RNA, 19 nt, Homo sapiens
  misc_RNA (1)...(19): siRNA sense strand
gagcaucccuacagaaagu

SEQ ID NO: 1940039 - RNA, 19 nt, Homo sapiens
  misc_RNA (1)...(19): siRNA sense strand
auacucaucugcauucuaa

SEQ ID NO: 1940040 - RNA, 19 nt, Homo sapiens
  misc_RNA (1)...(19): siRNA sense strand
ugauuaaaccucuggauua

SEQ ID NO: 1940041 - RNA, 19 nt, Homo sapiens
  misc_RNA (1)...(19): siRNA sense strand
ccacagcugucauaucaau

SEQ ID NO: 1940042 - RNA, 19 nt, Homo sapiens
  misc_RNA (1)...(19): siRNA sense strand
gcagaaaucaucuacaaca

SEQ ID NO: 1940043 - RNA, 19 nt, Homo sapiens
  misc_RNA (1)...(19): siRNA sense strand
gaccagcucuccugccuau

SEQ ID NO: 1940044 - RNA, 19 nt, Homo sapiens
  misc_RNA (1)...(19): siRNA sense strand
ccucuugccucaguauuua

SEQ ID NO: 1940045 - RNA, 19 nt, Homo sapiens
  misc_RNA (1)...(19): siRNA sense strand
ugaugcaacugccuccuua

SEQ ID NO: 1940046 - RNA, 19 nt, Homo sapiens
  misc_RNA (1)...(19): siRNA sense strand
gugcagcucuuucaacuca

SEQ ID NO: 1940047 - RNA, 19 nt, Homo sapiens
  misc_RNA (1)...(19): siRNA sense strand
gagaaacugcagaagauaa

SEQ ID NO: 1940048 - RNA, 19 nt, Homo sapiens
  misc_RNA (1)...(19): siRNA sense strand
cuaaggaauucuccauuga

SEQ ID NO: 1940049 - RNA, 19 nt, Homo sapiens
  misc_RNA (1)...(19): siRNA sense strand
gauggugacugccgaaaca

SEQ ID NO: 1940050 - RNA, 19 nt, Homo sapiens
  misc_RNA (1)...(19): siRNA sense strand
gaugcggacuugagaguga

SEQ ID NO: 1940051 - RNA, 19 nt, Homo sapiens
  misc_RNA (1)...(19): siRNA sense strand
cgagagcucuuacuuuagu

SEQ ID NO: 1940052 - RNA, 19 nt, Homo sapiens
  misc_RNA (1)...(19): siRNA sense strand
cacaguuccugaaucaaua

SEQ ID NO: 1940053 - RNA, 19 nt, Homo sapiens
  misc_RNA (1)...(19): siRNA sense strand
caaagaagacaccuuggaa

SEQ ID NO: 1940054 - RNA, 19 nt, Homo sapiens
  misc_RNA (1)...(19): siRNA sense strand
caucaucagugguaauuca

SEQ ID NO: 1940055 - RNA, 19 nt, Homo sapiens
  misc_RNA (1)...(19): siRNA sense strand
ggcacaauauuuacuauca

SEQ ID NO: 1940056 - RNA, 19 nt, Homo sapiens
  misc_RNA (1)...(19): siRNA sense strand
acuaaaggaugaacauuug

SEQ ID NO: 1940057 - RNA, 19 nt, Homo sapiens
  misc_RNA (1)...(19): siRNA sense strand
ggaaugguugaguuuaaua

SEQ ID NO: 1940058 - RNA, 19 nt, Homo sapiens
  misc_RNA (1)...(19): siRNA sense strand
gaccaugcaccucaguuua

SEQ ID NO: 1940059 - RNA, 19 nt, Homo sapiens
  misc_RNA (1)...(19): siRNA sense strand
ucaguguccuggaugauaa

SEQ ID NO: 1940060 - RNA, 19 nt, Homo sapiens
  misc_RNA (1)...(19): siRNA sense strand
cagaauauccuuauaagca

SEQ ID NO: 1940061 - RNA, 19 nt, Homo sapiens
  misc_RNA (1)...(19): siRNA sense strand
caucugcauucuaauugua

SEQ ID NO: 1940062 - RNA, 19 nt, Homo sapiens
  misc_RNA (1)...(19): siRNA sense strand
uacuaucagucccguauua

SEQ ID NO: 1940063 - RNA, 19 nt, Homo sapiens
  misc_RNA (1)...(19): siRNA sense strand
ggaacacacaucaguggua

SEQ ID NO: 1940064 - RNA, 19 nt, Homo sapiens
  misc_RNA (1)...(19): siRNA sense strand
cuaagcaaauccuugacua

SEQ ID NO: 1940065 - RNA, 19 nt, Homo sapiens
  misc_RNA (1)...(19): siRNA sense strand
ggagauaggaauagaagau

SEQ ID NO: 1940066 - RNA, 19 nt, Homo sapiens
  misc_RNA (1)...(19): siRNA sense strand
gaacuuaaagcagaagaug

SEQ ID NO: 1940067 - RNA, 19 nt, Homo sapiens
  misc_RNA (1)...(19): siRNA sense strand
ggaugaacauuugcauaug

SEQ ID NO: 1940068 - RNA, 19 nt, Homo sapiens
  misc_RNA (1)...(19): siRNA sense strand
agacaaaggugaugcaacu

SEQ ID NO: 1940069 - RNA, 19 nt, Homo sapiens
  misc_RNA (1)...(19): siRNA sense strand
gaccuauucuauuguauca

SEQ ID NO: 1940070 - RNA, 19 nt, Homo sapiens
  misc_RNA (1)...(19): siRNA sense strand
gagauaggaauagaagaua

SEQ ID NO: 1940071 - RNA, 19 nt, Homo sapiens
  misc_RNA (1)...(19): siRNA sense strand
aaccucaucuccuuucuuu

SEQ ID NO: 1940072 - RNA, 19 nt, Homo sapiens
  misc_RNA (1)...(19): siRNA sense strand
uaaagcagaagaugaaguu

SEQ ID NO: 1940073 - RNA, 19 nt, Homo sapiens
  misc_RNA (1)...(19): siRNA sense strand
caagaaugccggcaguaaa

SEQ ID NO: 1940074 - RNA, 19 nt, Homo sapiens
  misc_RNA (1)...(19): siRNA sense strand
cauccuggcugacguuaga

SEQ ID NO: 1940075 - RNA, 19 nt, Homo sapiens
  misc_RNA (1)...(19): siRNA sense strand
ggaaggagaaacugcagaa

SEQ ID NO: 1940076 - RNA, 19 nt, Homo sapiens
  misc_RNA (1)...(19): siRNA sense strand
ccacagacuuagaaagcaa

SEQ ID NO: 1940077 - RNA, 19 nt, Homo sapiens
  misc_RNA (1)...(19): siRNA sense strand
uuucaaacaucgaccauga

SEQ ID NO: 1940078 - RNA, 19 nt, Homo sapiens
  misc_RNA (1)...(19): siRNA sense strand
ucuaaggaauucuccauug

SEQ ID NO: 1940079 - RNA, 19 nt, Homo sapiens
  misc_RNA (1)...(19): siRNA sense strand
ccggaaugguugaguuuaa

SEQ ID NO: 1940080 - RNA, 19 nt, Homo sapiens
  misc_RNA (1)...(19): siRNA sense strand
acaacuaucacuggaauua

SEQ ID NO: 1940081 - RNA, 19 nt, Homo sapiens
  misc_RNA (1)...(19): siRNA sense strand
ggagaaacugcagaagaua

SEQ ID NO: 1940082 - RNA, 19 nt, Homo sapiens
  misc_RNA (1)...(19): siRNA sense strand
ucuaccauaugcucuauaa

SEQ ID NO: 1940083 - RNA, 19 nt, Homo sapiens
  misc_RNA (1)...(19): siRNA sense strand
ucacuggaauuaucuucuu

SEQ ID NO: 1940084 - RNA, 19 nt, Homo sapiens
  misc_RNA (1)...(19): siRNA sense strand
ucacucaagaucaguauuu

SEQ ID NO: 1940085 - RNA, 19 nt, Homo sapiens
  misc_RNA (1)...(19): siRNA sense strand
gaaggcaugacucccaauu

SEQ ID NO: 1940086 - RNA, 19 nt, Homo sapiens
  misc_RNA (1)...(19): siRNA sense strand
ucacacccaugucaaggaa

SEQ ID NO: 1940087 - RNA, 19 nt, Homo sapiens
  misc_RNA (1)...(19): siRNA sense strand
gaugaacauuugcauaugc

SEQ ID NO: 1940088 - RNA, 19 nt, Homo sapiens
  misc_RNA (1)...(19): siRNA sense strand
ucacuguggucucagcaaa

SEQ ID NO: 1940089 - RNA, 19 nt, Homo sapiens
  misc_RNA (1)...(19): siRNA sense strand
agacaacuaucacuggaau

SEQ ID NO: 1940090 - RNA, 19 nt, Homo sapiens
  misc_RNA (1)...(19): siRNA sense strand
cauggaaugucuuaugauc

SEQ ID NO: 1940091 - RNA, 19 nt, Homo sapiens
  misc_RNA (1)...(19): siRNA sense strand
gaacaauuuucauguggaa

SEQ ID NO: 1940092 - RNA, 19 nt, Homo sapiens
  misc_RNA (1)...(19): siRNA sense strand
uugauggagucauucuuua

SEQ ID NO: 1940093 - RNA, 19 nt, Homo sapiens
  misc_RNA (1)...(19): siRNA sense strand
ccuauuuccucuaccauau

SEQ ID NO: 1940094 - RNA, 19 nt, Homo sapiens
  misc_RNA (1)...(19): siRNA sense strand
caacaucaucucuggaaau

SEQ ID NO: 1940095 - RNA, 19 nt, Homo sapiens
  misc_RNA (1)...(19): siRNA sense strand
uuccacagcugucauauca

SEQ ID NO: 1940096 - RNA, 19 nt, Homo sapiens
  misc_RNA (1)...(19): siRNA sense strand
gacaguggcugcccuccau

SEQ ID NO: 1940097 - RNA, 19 nt, Homo sapiens
  misc_RNA (1)...(19): siRNA sense strand
gcagcucuuucaacucaga

SEQ ID NO: 1940098 - RNA, 19 nt, Homo sapiens
  misc_RNA (1)...(19): siRNA sense strand
uaaaugagcaucccuacag

SEQ ID NO: 1940099 - RNA, 19 nt, Homo sapiens
  misc_RNA (1)...(19): siRNA sense strand
aggagaaacugcagaagau

SEQ ID NO: 1940100 - RNA, 19 nt, Homo sapiens
  misc_RNA (1)...(19): siRNA sense strand
gcaccucaguuuauguucu

SEQ ID NO: 1940101 - RNA, 19 nt, Homo sapiens
  misc_RNA (1)...(19): siRNA sense strand
cauccaaauuucugauuca

SEQ ID NO: 1940102 - RNA, 19 nt, Homo sapiens
  misc_RNA (1)...(19): siRNA sense strand
agaaggagaauuauuagga

SEQ ID NO: 1940103 - RNA, 19 nt, Homo sapiens
  misc_RNA (1)...(19): siRNA sense strand
ccaagaaugccggcaguaa

SEQ ID NO: 1940104 - RNA, 19 nt, Homo sapiens
  misc_RNA (1)...(19): siRNA sense strand
uaaguaucauggagaagga

SEQ ID NO: 1940105 - RNA, 19 nt, Homo sapiens
  misc_RNA (1)...(19): siRNA sense strand
aaagacagacaguugauug

SEQ ID NO: 1940106 - RNA, 19 nt, Homo sapiens
  misc_RNA (1)...(19): siRNA sense strand
gcacaauauuuacuaucag

SEQ ID NO: 1940107 - RNA, 19 nt, Homo sapiens
  misc_RNA (1)...(19): siRNA sense strand
ccagacaguucagaagaga

SEQ ID NO: 1940108 - RNA, 19 nt, Homo sapiens
  misc_RNA (1)...(19): siRNA sense strand
caauaaauacugccucaca

SEQ ID NO: 1940109 - RNA, 19 nt, Homo sapiens
  misc_RNA (1)...(19): siRNA sense strand
cuuauaagcaagucgguua

SEQ ID NO: 1940110 - RNA, 19 nt, Homo sapiens
  misc_RNA (1)...(19): siRNA sense strand
acagucaaauccuauaauc

SEQ ID NO: 1940111 - RNA, 19 nt, Homo sapiens
  misc_RNA (1)...(19): siRNA sense strand
cuaagaauggcacaauauu

SEQ ID NO: 1940112 - RNA, 19 nt, Homo sapiens
  misc_RNA (1)...(19): siRNA sense strand
cacuggaauuaucuucuua

SEQ ID NO: 1940113 - RNA, 19 nt, Homo sapiens
  misc_RNA (1)...(19): siRNA sense strand
gaagggauagaugaauuug

SEQ ID NO: 1940114 - RNA, 19 nt, Homo sapiens
  misc_RNA (1)...(19): siRNA sense strand
uugaagggauagaugaauu

SEQ ID NO: 1940115 - RNA, 19 nt, Homo sapiens
  misc_RNA (1)...(19): siRNA sense strand
agcaaauccuugacuauga

SEQ ID NO: 1940116 - RNA, 19 nt, Homo sapiens
  misc_RNA (1)...(19): siRNA sense strand
ucacucauggaaugucuua

SEQ ID NO: 1940117 - RNA, 19 nt, Homo sapiens
  misc_RNA (1)...(19): siRNA sense strand
gaacaauuaugccccugaa

SEQ ID NO: 1940118 - RNA, 19 nt, Homo sapiens
  misc_RNA (1)...(19): siRNA sense strand
gauaggaauagaagauaug

SEQ ID NO: 1940119 - RNA, 19 nt, Homo sapiens
  misc_RNA (1)...(19): siRNA sense strand
acaauuaugaggagaagaa

SEQ ID NO: 1940120 - RNA, 19 nt, Homo sapiens
  misc_RNA (1)...(19): siRNA sense strand
gccucaguauuuaaugaua

SEQ ID NO: 1940121 - RNA, 19 nt, Homo sapiens
  misc_RNA (1)...(19): siRNA sense strand
gacgaccucugaucaugau

SEQ ID NO: 1940122 - RNA, 19 nt, Homo sapiens
  misc_RNA (1)...(19): siRNA sense strand
ggaaaccuuuggcuucuuc

SEQ ID NO: 1940123 - RNA, 19 nt, Homo sapiens
  misc_RNA (1)...(19): siRNA sense strand
ccaacaccaucuucgagaa

SEQ ID NO: 1940124 - RNA, 19 nt, Homo sapiens
  misc_RNA (1)...(19): siRNA sense strand
ggaacgucaucaccaccaa

SEQ ID NO: 1940125 - RNA, 19 nt, Homo sapiens
  misc_RNA (1)...(19): siRNA sense strand
guggaaaccuuuggcuucu

SEQ ID NO: 1940126 - RNA, 19 nt, Homo sapiens
  misc_RNA (1)...(19): siRNA sense strand
cgauggcuguggaaaccuu

SEQ ID NO: 1940127 - RNA, 19 nt, Homo sapiens
  misc_RNA (1)...(19): siRNA sense strand
gggugacucugccaaacag

SEQ ID NO: 1940128 - RNA, 19 nt, Homo sapiens
  misc_RNA (1)...(19): siRNA sense strand
ugacucugccaaacagcua

SEQ ID NO: 1940129 - RNA, 19 nt, Homo sapiens
  misc_RNA (1)...(19): siRNA sense strand
ccaccaacaccaucuucga

SEQ ID NO: 1940130 - RNA, 19 nt, Homo sapiens
  misc_RNA (1)...(19): siRNA sense strand
ggaaaccuuuggcuucuuc

SEQ ID NO: 1940131 - RNA, 19 nt, Homo sapiens
  misc_RNA (1)...(19): siRNA sense strand
ccaacaccaucuucgagaa

SEQ ID NO: 1940132 - RNA, 19 nt, Homo sapiens
  misc_RNA (1)...(19): siRNA sense strand
ggaacgucaucaccaccaa

SEQ ID NO: 1940133 - RNA, 19 nt, Homo sapiens
  misc_RNA (1)...(19): siRNA sense strand
guggaaaccuuuggcuucu

SEQ ID NO: 1940134 - RNA, 19 nt, Homo sapiens
  misc_RNA (1)...(19): siRNA sense strand
cgauggcuguggaaaccuu

SEQ ID NO: 1940135 - RNA, 19 nt, Homo sapiens
  misc_RNA (1)...(19): siRNA sense strand
gggugacucugccaaacag

SEQ ID NO: 1940136 - RNA, 19 nt, Homo sapiens
  misc_RNA (1)...(19): siRNA sense strand
ugacucugccaaacagcua

SEQ ID NO: 1940137 - RNA, 19 nt, Homo sapiens
  misc_RNA (1)...(19): siRNA sense strand
ccaccaacaccaucuucga

SEQ ID NO: 1940138 - RNA, 19 nt, Homo sapiens
  misc_RNA (1)...(19): siRNA sense strand
ggaggaagauuaagacuag

SEQ ID NO: 1940139 - RNA, 19 nt, Homo sapiens
  misc_RNA (1)...(19): siRNA sense strand
ggaaugaaauuggaagcua

SEQ ID NO: 1940140 - RNA, 19 nt, Homo sapiens
  misc_RNA (1)...(19): siRNA sense strand
gauuaagacuaguguauga

SEQ ID NO: 1940141 - RNA, 19 nt, Homo sapiens
  misc_RNA (1)...(19): siRNA sense strand
gaaauuagaagcaguagau

SEQ ID NO: 1940142 - RNA, 19 nt, Homo sapiens
  misc_RNA (1)...(19): siRNA sense strand
gaagaaagcgaagauagaa

SEQ ID NO: 1940143 - RNA, 19 nt, Homo sapiens
  misc_RNA (1)...(19): siRNA sense strand
cacaguaacucgaauuauu

SEQ ID NO: 1940144 - RNA, 19 nt, Homo sapiens
  misc_RNA (1)...(19): siRNA sense strand
cuagaacuauucagcauaa

SEQ ID NO: 1940145 - RNA, 19 nt, Homo sapiens
  misc_RNA (1)...(19): siRNA sense strand
gaaugaaauuggaagcuau

SEQ ID NO: 1940146 - RNA, 19 nt, Homo sapiens
  misc_RNA (1)...(19): siRNA sense strand
gaaacaggauggacauuuu

SEQ ID NO: 1940147 - RNA, 19 nt, Homo sapiens
  misc_RNA (1)...(19): siRNA sense strand
ggacuucuggugcaauaua

SEQ ID NO: 1940148 - RNA, 19 nt, Homo sapiens
  misc_RNA (1)...(19): siRNA sense strand
guaaguugguauacagaaa

SEQ ID NO: 1940149 - RNA, 19 nt, Homo sapiens
  misc_RNA (1)...(19): siRNA sense strand
aagcauaggucaucgauuc

SEQ ID NO: 1940150 - RNA, 19 nt, Homo sapiens
  misc_RNA (1)...(19): siRNA sense strand
gaucugacugguucuguua

SEQ ID NO: 1940151 - RNA, 19 nt, Homo sapiens
  misc_RNA (1)...(19): siRNA sense strand
gaugacuucuggugccaua

SEQ ID NO: 1940152 - RNA, 19 nt, Homo sapiens
  misc_RNA (1)...(19): siRNA sense strand
gaguagaaguucccaauac

SEQ ID NO: 1940153 - RNA, 19 nt, Homo sapiens
  misc_RNA (1)...(19): siRNA sense strand
ggugcuagcugacggauuc

SEQ ID NO: 1940154 - RNA, 19 nt, Homo sapiens
  misc_RNA (1)...(19): siRNA sense strand
ggagccacguuuaauaugu

SEQ ID NO: 1940155 - RNA, 19 nt, Homo sapiens
  misc_RNA (1)...(19): siRNA sense strand
gaguagaagugguugacaa

SEQ ID NO: 1940156 - RNA, 19 nt, Homo sapiens
  misc_RNA (1)...(19): siRNA sense strand
gcugacggauuccugauga

SEQ ID NO: 1940157 - RNA, 19 nt, Homo sapiens
  misc_RNA (1)...(19): siRNA sense strand
caauauaugugguucugau

SEQ ID NO: 1940158 - RNA, 19 nt, Homo sapiens
  misc_RNA (1)...(19): siRNA sense strand
guaggguggugucaguuaa

SEQ ID NO: 1940159 - RNA, 19 nt, Homo sapiens
  misc_RNA (1)...(19): siRNA sense strand
auaaggauguuccaaauca

SEQ ID NO: 1940160 - RNA, 19 nt, Homo sapiens
  misc_RNA (1)...(19): siRNA sense strand
cagggaaacuggcuccauu

SEQ ID NO: 1940161 - RNA, 19 nt, Homo sapiens
  misc_RNA (1)...(19): siRNA sense strand
uuucaaaccuugcaugaga

SEQ ID NO: 1940162 - RNA, 19 nt, Homo sapiens
  misc_RNA (1)...(19): siRNA sense strand
aaacacugccuccugauuu

SEQ ID NO: 1940163 - RNA, 19 nt, Homo sapiens
  misc_RNA (1)...(19): siRNA sense strand
gcacagcccauuaauacau

SEQ ID NO: 1940164 - RNA, 19 nt, Homo sapiens
  misc_RNA (1)...(19): siRNA sense strand
gaagcuauagacccauuaa

SEQ ID NO: 1940165 - RNA, 19 nt, Homo sapiens
  misc_RNA (1)...(19): siRNA sense strand
uauacaaacuggaaagcuu

SEQ ID NO: 1940166 - RNA, 19 nt, Homo sapiens
  misc_RNA (1)...(19): siRNA sense strand
caugcaaccucuccuucua

SEQ ID NO: 1940167 - RNA, 19 nt, Homo sapiens
  misc_RNA (1)...(19): siRNA sense strand
gguggaaaguguaauugga

SEQ ID NO: 1940168 - RNA, 19 nt, Homo sapiens
  misc_RNA (1)...(19): siRNA sense strand
ugauacaccaccacauuua

SEQ ID NO: 1940169 - RNA, 19 nt, Homo sapiens
  misc_RNA (1)...(19): siRNA sense strand
gaagaagaguaugaucagu

SEQ ID NO: 1940170 - RNA, 19 nt, Homo sapiens
  misc_RNA (1)...(19): siRNA sense strand
acaaugcccuuuuaagaua

SEQ ID NO: 1940171 - RNA, 19 nt, Homo sapiens
  misc_RNA (1)...(19): siRNA sense strand
gcuauagacccauuaaauc

SEQ ID NO: 1940172 - RNA, 19 nt, Homo sapiens
  misc_RNA (1)...(19): siRNA sense strand
cauauugguuggucucgaa

SEQ ID NO: 1940173 - RNA, 19 nt, Homo sapiens
  misc_RNA (1)...(19): siRNA sense strand
gaaauuggaagcuauagac

SEQ ID NO: 1940174 - RNA, 19 nt, Homo sapiens
  misc_RNA (1)...(19): siRNA sense strand
cuggauugcuggaauugua

SEQ ID NO: 1940175 - RNA, 19 nt, Homo sapiens
  misc_RNA (1)...(19): siRNA sense strand
cauaggucaucgauucaaa

SEQ ID NO: 1940176 - RNA, 19 nt, Homo sapiens
  misc_RNA (1)...(19): siRNA sense strand
caucgucucuugaggauac

SEQ ID NO: 1940177 - RNA, 19 nt, Homo sapiens
  misc_RNA (1)...(19): siRNA sense strand
gagccacguuuaauaugug

SEQ ID NO: 1940178 - RNA, 19 nt, Homo sapiens
  misc_RNA (1)...(19): siRNA sense strand
cauggagccacguuuaaua

SEQ ID NO: 1940179 - RNA, 19 nt, Homo sapiens
  misc_RNA (1)...(19): siRNA sense strand
ggaucugacugguucuguu

SEQ ID NO: 1940180 - RNA, 19 nt, Homo sapiens
  misc_RNA (1)...(19): siRNA sense strand
ccaccacauuuauuugcua

SEQ ID NO: 1940181 - RNA, 19 nt, Homo sapiens
  misc_RNA (1)...(19): siRNA sense strand
ugaagaaagcgaagauaga

SEQ ID NO: 1940182 - RNA, 19 nt, Homo sapiens
  misc_RNA (1)...(19): siRNA sense strand
gagaguagaaguucccaau

SEQ ID NO: 1940183 - RNA, 19 nt, Homo sapiens
  misc_RNA (1)...(19): siRNA sense strand
gggaagaagaguaugauca

SEQ ID NO: 1940184 - RNA, 19 nt, Homo sapiens
  misc_RNA (1)...(19): siRNA sense strand
cauaugcacagcccauuaa

SEQ ID NO: 1940185 - RNA, 19 nt, Homo sapiens
  misc_RNA (1)...(19): siRNA sense strand
gcgaagauagaacagauga

SEQ ID NO: 1940186 - RNA, 19 nt, Homo sapiens
  misc_RNA (1)...(19): siRNA sense strand
uaagacuaguguaugaaga

SEQ ID NO: 1940187 - RNA, 19 nt, Homo sapiens
  misc_RNA (1)...(19): siRNA sense strand
gaaaguguaauuggaggaa

SEQ ID NO: 1940188 - RNA, 19 nt, Homo sapiens
  misc_RNA (1)...(19): siRNA sense strand
accaaagucuucuggauug

SEQ ID NO: 1940189 - RNA, 19 nt, Homo sapiens
  misc_RNA (1)...(19): siRNA sense strand
gaagauuaagacuagugua

SEQ ID NO: 1940190 - RNA, 19 nt, Homo sapiens
  misc_RNA (1)...(19): siRNA sense strand
ucaaggaaggaaugaaauu

SEQ ID NO: 1940191 - RNA, 19 nt, Homo sapiens
  misc_RNA (1)...(19): siRNA sense strand
gaagauagaacagaugacu

SEQ ID NO: 1940192 - RNA, 19 nt, Homo sapiens
  misc_RNA (1)...(19): siRNA sense strand
ggugauaucucagaaaaug

SEQ ID NO: 1940193 - RNA, 19 nt, Homo sapiens
  misc_RNA (1)...(19): siRNA sense strand
ggaagaagaguaugaucag

SEQ ID NO: 1940194 - RNA, 19 nt, Homo sapiens
  misc_RNA (1)...(19): siRNA sense strand
gaugggaagaagaguauga

SEQ ID NO: 1940195 - RNA, 19 nt, Homo sapiens
  misc_RNA (1)...(19): siRNA sense strand
ggaaggaaugaaauuggaa

SEQ ID NO: 1940196 - RNA, 19 nt, Homo sapiens
  misc_RNA (1)...(19): siRNA sense strand
caaggaaggaaugaaauug

SEQ ID NO: 1940197 - RNA, 19 nt, Homo sapiens
  misc_RNA (1)...(19): siRNA sense strand
caccacauuuauuugcuaa

SEQ ID NO: 1940198 - RNA, 19 nt, Homo sapiens
  misc_RNA (1)...(19): siRNA sense strand
ggucaucgauucaaaagau

SEQ ID NO: 1940199 - RNA, 19 nt, Homo sapiens
  misc_RNA (1)...(19): siRNA sense strand
uagcagugguggaaagugu

SEQ ID NO: 1940200 - RNA, 19 nt, Homo sapiens
  misc_RNA (1)...(19): siRNA sense strand
gaggauacauuuugaugga

SEQ ID NO: 1940201 - RNA, 19 nt, Homo sapiens
  misc_RNA (1)...(19): siRNA sense strand
guguaggaaugaaauuaga

SEQ ID NO: 1940202 - RNA, 19 nt, Homo sapiens
  misc_RNA (1)...(19): siRNA sense strand
gcccauuaauacaucauau

SEQ ID NO: 1940203 - RNA, 19 nt, Homo sapiens
  misc_RNA (1)...(19): siRNA sense strand
ccauaugcacagcccauua

SEQ ID NO: 1940204 - RNA, 19 nt, Homo sapiens
  misc_RNA (1)...(19): siRNA sense strand
gcagugguggaaaguguaa

SEQ ID NO: 1940205 - RNA, 19 nt, Homo sapiens
  misc_RNA (1)...(19): siRNA sense strand
caauaugugucgcaaccau

SEQ ID NO: 1940206 - RNA, 19 nt, Homo sapiens
  misc_RNA (1)...(19): siRNA sense strand
gauacaccaccacauuuau

SEQ ID NO: 1940207 - RNA, 19 nt, Homo sapiens
  misc_RNA (1)...(19): siRNA sense strand
gcaguauccuuucaaaccu

SEQ ID NO: 1940208 - RNA, 19 nt, Homo sapiens
  misc_RNA (1)...(19): siRNA sense strand
ggaagcuauagacccauua

SEQ ID NO: 1940209 - RNA, 19 nt, Homo sapiens
  misc_RNA (1)...(19): siRNA sense strand
gagaguaugcaguauccuu

SEQ ID NO: 1940210 - RNA, 19 nt, Homo sapiens
  misc_RNA (1)...(19): siRNA sense strand
gccacaguaacucgaauua

SEQ ID NO: 1940211 - RNA, 19 nt, Homo sapiens
  misc_RNA (1)...(19): siRNA sense strand
ucucauggagccacguuua

SEQ ID NO: 1940212 - RNA, 19 nt, Homo sapiens
  misc_RNA (1)...(19): siRNA sense strand
ugggaucgauggcucagaa

SEQ ID NO: 1940213 - RNA, 19 nt, Homo sapiens
  misc_RNA (1)...(19): siRNA sense strand
cuaccaaagucuucuggau

SEQ ID NO: 1940214 - RNA, 19 nt, Homo sapiens
  misc_RNA (1)...(19): siRNA sense strand
aagcgaagauagaacagau

SEQ ID NO: 1940215 - RNA, 19 nt, Homo sapiens
  misc_RNA (1)...(19): siRNA sense strand
gaguagcagugguggaaag

SEQ ID NO: 1940216 - RNA, 19 nt, Homo sapiens
  misc_RNA (1)...(19): siRNA sense strand
uuucagagaguaugcagua

SEQ ID NO: 1940217 - RNA, 19 nt, Homo sapiens
  misc_RNA (1)...(19): siRNA sense strand
agaaacaggauggacauuu

SEQ ID NO: 1940218 - RNA, 19 nt, Homo sapiens
  misc_RNA (1)...(19): siRNA sense strand
cagccuaccuaccaaaguc

SEQ ID NO: 1940219 - RNA, 19 nt, Homo sapiens
  misc_RNA (1)...(19): siRNA sense strand
uagaagugguugacaagag

SEQ ID NO: 1940220 - RNA, 19 nt, Homo sapiens
  misc_RNA (1)...(19): siRNA sense strand
uaugcaguauccuuucaaa

SEQ ID NO: 1940221 - RNA, 19 nt, Homo sapiens
  misc_RNA (1)...(19): siRNA sense strand
caaaagguuucagagagua

SEQ ID NO: 1940222 - RNA, 19 nt, Homo sapiens
  misc_RNA (1)...(19): siRNA sense strand
gacuucuggugcaauauau

SEQ ID NO: 1940223 - RNA, 19 nt, Homo sapiens
  misc_RNA (1)...(19): siRNA sense strand
ggggugauaucucagaaaa

SEQ ID NO: 1940224 - RNA, 19 nt, Homo sapiens
  misc_RNA (1)...(19): siRNA sense strand
ugguuggucucgaagcaua

SEQ ID NO: 1940225 - RNA, 19 nt, Homo sapiens
  misc_RNA (1)...(19): siRNA sense strand
agacuaguguaugaagaaa

SEQ ID NO: 1940226 - RNA, 19 nt, Homo sapiens
  misc_RNA (1)...(19): siRNA sense strand
ggaagauuaagacuagugu

SEQ ID NO: 1940227 - RNA, 19 nt, Homo sapiens
  misc_RNA (1)...(19): siRNA sense strand
caaccucuccuucuauuuu

SEQ ID NO: 1940228 - RNA, 19 nt, Homo sapiens
  misc_RNA (1)...(19): siRNA sense strand
uagaaguucccaauacaga

SEQ ID NO: 1940229 - RNA, 19 nt, Homo sapiens
  misc_RNA (1)...(19): siRNA sense strand
ccacauuuauuugcuaagg

SEQ ID NO: 1940230 - RNA, 19 nt, Homo sapiens
  misc_RNA (1)...(19): siRNA sense strand
uaccaaagucuucuggauu

SEQ ID NO: 1940231 - RNA, 19 nt, Homo sapiens
  misc_RNA (1)...(19): siRNA sense strand
cuggacuucuggugcaaua

SEQ ID NO: 1940232 - RNA, 19 nt, Homo sapiens
  misc_RNA (1)...(19): siRNA sense strand
gcaaccucuccuucuauuu

SEQ ID NO: 1940233 - RNA, 19 nt, Homo sapiens
  misc_RNA (1)...(19): siRNA sense strand
ucugauauccauccaguug

SEQ ID NO: 1940234 - RNA, 19 nt, Homo sapiens
  misc_RNA (1)...(19): siRNA sense strand
aggaaggaaugaaauugga

SEQ ID NO: 1940235 - RNA, 19 nt, Homo sapiens
  misc_RNA (1)...(19): siRNA sense strand
cccauuaaaucuuucuaca

SEQ ID NO: 1940236 - RNA, 19 nt, Homo sapiens
  misc_RNA (1)...(19): siRNA sense strand
cagcaucacaguguaaguu

SEQ ID NO: 1940237 - RNA, 19 nt, Homo sapiens
  misc_RNA (1)...(19): siRNA sense strand
ugcaaccucuccuucuauu

SEQ ID NO: 1940238 - RNA, 19 nt, Homo sapiens
  misc_RNA (1)...(19): siRNA sense strand
ggaaacaucugagcaauga

SEQ ID NO: 1940239 - RNA, 19 nt, Homo sapiens
  misc_RNA (1)...(19): siRNA sense strand
ccaagacucuggccuuuaa

SEQ ID NO: 1940240 - RNA, 19 nt, Homo sapiens
  misc_RNA (1)...(19): siRNA sense strand
gaacagaggauuccaacau

SEQ ID NO: 1940241 - RNA, 19 nt, Homo sapiens
  misc_RNA (1)...(19): siRNA sense strand
gagcagaggugguggaucu

SEQ ID NO: 1940242 - RNA, 19 nt, Homo sapiens
  misc_RNA (1)...(19): siRNA sense strand
gcaagaacauucccacucu

SEQ ID NO: 1940243 - RNA, 19 nt, Homo sapiens
  misc_RNA (1)...(19): siRNA sense strand
gagcaaugauuucuugaag

SEQ ID NO: 1940244 - RNA, 19 nt, Homo sapiens
  misc_RNA (1)...(19): siRNA sense strand
agaaagcucuggauagugu

SEQ ID NO: 1940245 - RNA, 19 nt, Homo sapiens
  misc_RNA (1)...(19): siRNA sense strand
gaaaggcaaacuaggugua

SEQ ID NO: 1940246 - RNA, 19 nt, Homo sapiens
  misc_RNA (1)...(19): siRNA sense strand
gaagccagcugucuguacu

SEQ ID NO: 1940247 - RNA, 19 nt, Homo sapiens
  misc_RNA (1)...(19): siRNA sense strand
gaucaugaaguaugcagaa

SEQ ID NO: 1940248 - RNA, 19 nt, Homo sapiens
  misc_RNA (1)...(19): siRNA sense strand
caagugguaccaucaagaa

SEQ ID NO: 1940249 - RNA, 19 nt, Homo sapiens
  misc_RNA (1)...(19): siRNA sense strand
aaacaucugagcaaugauu

SEQ ID NO: 1940250 - RNA, 19 nt, Homo sapiens
  misc_RNA (1)...(19): siRNA sense strand
caacaauggaaacaucuga

SEQ ID NO: 1940251 - RNA, 19 nt, Homo sapiens
  misc_RNA (1)...(19): siRNA sense strand
acccuaagaagaagaauua

SEQ ID NO: 1940252 - RNA, 19 nt, Homo sapiens
  misc_RNA (1)...(19): siRNA sense strand
ucugagcaaugauuucuug

SEQ ID NO: 1940253 - RNA, 19 nt, Homo sapiens
  misc_RNA (1)...(19): siRNA sense strand
cagcaugucuuccaaaaug

SEQ ID NO: 1940254 - RNA, 19 nt, Homo sapiens
  misc_RNA (1)...(19): siRNA sense strand
acagaggauuccaacauug

SEQ ID NO: 1940255 - RNA, 19 nt, Homo sapiens
  misc_RNA (1)...(19): siRNA sense strand
aacagaggauuccaacauu

SEQ ID NO: 1940256 - RNA, 19 nt, Homo sapiens
  misc_RNA (1)...(19): siRNA sense strand
gcaagugguaccaucaaga

SEQ ID NO: 1940257 - RNA, 19 nt, Homo sapiens
  misc_RNA (1)...(19): siRNA sense strand
gugguaccaucaagaaguu

SEQ ID NO: 1940258 - RNA, 19 nt, Homo sapiens
  misc_RNA (1)...(19): siRNA sense strand
ccacugaucccaagacucu

SEQ ID NO: 1940259 - RNA, 19 nt, Homo sapiens
  misc_RNA (1)...(19): siRNA sense strand
gcaucaucuuugagccuua

SEQ ID NO: 1940260 - RNA, 19 nt, Homo sapiens
  misc_RNA (1)...(19): siRNA sense strand
ugucuguacucgugaacua

SEQ ID NO: 1940261 - RNA, 19 nt, Homo sapiens
  misc_RNA (1)...(19): siRNA sense strand
gagaagaggcacaguuggu

SEQ ID NO: 1940262 - RNA, 19 nt, Homo sapiens
  misc_RNA (1)...(19): siRNA sense strand
cagaggauuccaacauuga

SEQ ID NO: 1940263 - RNA, 19 nt, Homo sapiens
  misc_RNA (1)...(19): siRNA sense strand
gcagaacagaggauuccaa

SEQ ID NO: 1940264 - RNA, 19 nt, Homo sapiens
  misc_RNA (1)...(19): siRNA sense strand
ccuuuaacccuaagaagaa

SEQ ID NO: 1940265 - RNA, 19 nt, Homo sapiens
  misc_RNA (1)...(19): siRNA sense strand
gagcagcaugucuuccaaa

SEQ ID NO: 1940266 - RNA, 19 nt, Homo sapiens
  misc_RNA (1)...(19): siRNA sense strand
gcugaaaggcaaacuaggu

SEQ ID NO: 1940267 - RNA, 19 nt, Homo sapiens
  misc_RNA (1)...(19): siRNA sense strand
caucaucuuugagccuuau

SEQ ID NO: 1940268 - RNA, 19 nt, Homo sapiens
  misc_RNA (1)...(19): siRNA sense strand
gaagaaccccaaaguggaa

SEQ ID NO: 1940269 - RNA, 19 nt, Homo sapiens
  misc_RNA (1)...(19): siRNA sense strand
caugaaguaugcagaacag

SEQ ID NO: 1940270 - RNA, 19 nt, Homo sapiens
  misc_RNA (1)...(19): siRNA sense strand
ggaguauggauuccucguu

SEQ ID NO: 1940271 - RNA, 19 nt, Homo sapiens
  misc_RNA (1)...(19): siRNA sense strand
gccuuuaacccuaagaaga

SEQ ID NO: 1940272 - RNA, 19 nt, Homo sapiens
  misc_RNA (1)...(19): siRNA sense strand
ugaagacccagcaggagaa

SEQ ID NO: 1940273 - RNA, 19 nt, Homo sapiens
  misc_RNA (1)...(19): siRNA sense strand
ucccaagacucuggccuuu

SEQ ID NO: 1940274 - RNA, 19 nt, Homo sapiens
  misc_RNA (1)...(19): siRNA sense strand
gugaugagcagcaugucuu

SEQ ID NO: 1940275 - RNA, 19 nt, Homo sapiens
  misc_RNA (1)...(19): siRNA sense strand
ucucccaguuucccuauca

SEQ ID NO: 1940276 - RNA, 19 nt, Homo sapiens
  misc_RNA (1)...(19): siRNA sense strand
ccuaagaagaagaauuaug

SEQ ID NO: 1940277 - RNA, 19 nt, Homo sapiens
  misc_RNA (1)...(19): siRNA sense strand
uuacaucccaacaauggaa

SEQ ID NO: 1940278 - RNA, 19 nt, Homo sapiens
  misc_RNA (1)...(19): siRNA sense strand
aaauggaucuaugcugaag

SEQ ID NO: 1940279 - RNA, 19 nt, Homo sapiens
  misc_RNA (1)...(19): siRNA sense strand
ggauuccucguucagauca

SEQ ID NO: 1940280 - RNA, 19 nt, Homo sapiens
  misc_RNA (1)...(19): siRNA sense strand
ggcaagugguaccaucaag

SEQ ID NO: 1940281 - RNA, 19 nt, Homo sapiens
  misc_RNA (1)...(19): siRNA sense strand
ugagcagcaugucuuccaa

SEQ ID NO: 1940282 - RNA, 19 nt, Homo sapiens
  misc_RNA (1)...(19): siRNA sense strand
caggagaagaggcacaguu

SEQ ID NO: 1940283 - RNA, 19 nt, Homo sapiens
  misc_RNA (1)...(19): siRNA sense strand
ucccaacaauggaaacauc

SEQ ID NO: 1940284 - RNA, 19 nt, Homo sapiens
  misc_RNA (1)...(19): siRNA sense strand
ugaguacuguguggugugu

SEQ ID NO: 1940285 - RNA, 19 nt, Homo sapiens
  misc_RNA (1)...(19): siRNA sense strand
guuuacaucccaacaaugg

SEQ ID NO: 1940286 - RNA, 19 nt, Homo sapiens
  misc_RNA (1)...(19): siRNA sense strand
aguacugugugguguguga

SEQ ID NO: 1940287 - RNA, 19 nt, Homo sapiens
  misc_RNA (1)...(19): siRNA sense strand
ccaguuucccuaucauaca

SEQ ID NO: 1940288 - RNA, 19 nt, Homo sapiens
  misc_RNA (1)...(19): siRNA sense strand
ugagcaaugauuucuugaa

SEQ ID NO: 1940289 - RNA, 19 nt, Homo sapiens
  misc_RNA (1)...(19): siRNA sense strand
ggucacugcaagaacauuc

SEQ ID NO: 1940290 - RNA, 19 nt, Homo sapiens
  misc_RNA (1)...(19): siRNA sense strand
auuaugagcggcuucagaa

SEQ ID NO: 1940291 - RNA, 19 nt, Homo sapiens
  misc_RNA (1)...(19): siRNA sense strand
agaagaggcacaguugguu

SEQ ID NO: 1940292 - RNA, 19 nt, Homo sapiens
  misc_RNA (1)...(19): siRNA sense strand
aggagaagaggcacaguug

SEQ ID NO: 1940293 - RNA, 19 nt, Homo sapiens
  misc_RNA (1)...(19): siRNA sense strand
ggaaacaucugagcaauga

SEQ ID NO: 1940294 - RNA, 19 nt, Homo sapiens
  misc_RNA (1)...(19): siRNA sense strand
ggagggagauaaugaauca

SEQ ID NO: 1940295 - RNA, 19 nt, Homo sapiens
  misc_RNA (1)...(19): siRNA sense strand
ccaagacucuggccuuuaa

SEQ ID NO: 1940296 - RNA, 19 nt, Homo sapiens
  misc_RNA (1)...(19): siRNA sense strand
ugaaggagaucuacaguga

SEQ ID NO: 1940297 - RNA, 19 nt, Homo sapiens
  misc_RNA (1)...(19): siRNA sense strand
ggacagaaccuauuguguu

SEQ ID NO: 1940298 - RNA, 19 nt, Homo sapiens
  misc_RNA (1)...(19): siRNA sense strand
gcaaugggcuggucaaugc

SEQ ID NO: 1940299 - RNA, 19 nt, Homo sapiens
  misc_RNA (1)...(19): siRNA sense strand
gacagaaccuauuguguug

SEQ ID NO: 1940300 - RNA, 19 nt, Homo sapiens
  misc_RNA (1)...(19): siRNA sense strand
agaaacagauggacaaguu

SEQ ID NO: 1940301 - RNA, 19 nt, Homo sapiens
  misc_RNA (1)...(19): siRNA sense strand
guaccuagauggaccagaa

SEQ ID NO: 1940302 - RNA, 19 nt, Homo sapiens
  misc_RNA (1)...(19): siRNA sense strand
gagcagaggugguggaucu

SEQ ID NO: 1940303 - RNA, 19 nt, Homo sapiens
  misc_RNA (1)...(19): siRNA sense strand
gaacagaggauuccaacau

SEQ ID NO: 1940304 - RNA, 19 nt, Homo sapiens
  misc_RNA (1)...(19): siRNA sense strand
gcaagaacauucccacucu

SEQ ID NO: 1940305 - RNA, 19 nt, Homo sapiens
  misc_RNA (1)...(19): siRNA sense strand
gagcaaugauuucuugaag

SEQ ID NO: 1940306 - RNA, 19 nt, Homo sapiens
  misc_RNA (1)...(19): siRNA sense strand
agaaagcucuggauagugu

SEQ ID NO: 1940307 - RNA, 19 nt, Homo sapiens
  misc_RNA (1)...(19): siRNA sense strand
gaccagaaccauccauuga

SEQ ID NO: 1940308 - RNA, 19 nt, Homo sapiens
  misc_RNA (1)...(19): siRNA sense strand
gaaaggcaaacuaggugua

SEQ ID NO: 1940309 - RNA, 19 nt, Homo sapiens
  misc_RNA (1)...(19): siRNA sense strand
gauaaugaaucagaggaau

SEQ ID NO: 1940310 - RNA, 19 nt, Homo sapiens
  misc_RNA (1)...(19): siRNA sense strand
gaagccagcugucuguacu

SEQ ID NO: 1940311 - RNA, 19 nt, Homo sapiens
  misc_RNA (1)...(19): siRNA sense strand
ggucacacauugucaaacu

SEQ ID NO: 1940312 - RNA, 19 nt, Homo sapiens
  misc_RNA (1)...(19): siRNA sense strand
gaucaugaaguaugcagaa

SEQ ID NO: 1940313 - RNA, 19 nt, Homo sapiens
  misc_RNA (1)...(19): siRNA sense strand
aaggagaucuacagugaga

SEQ ID NO: 1940314 - RNA, 19 nt, Homo sapiens
  misc_RNA (1)...(19): siRNA sense strand
ggaaaucaagaaacagaug

SEQ ID NO: 1940315 - RNA, 19 nt, Homo sapiens
  misc_RNA (1)...(19): siRNA sense strand
ggacaucaaaggccaguuc

SEQ ID NO: 1940316 - RNA, 19 nt, Homo sapiens
  misc_RNA (1)...(19): siRNA sense strand
ucgaugacguggacauuga

SEQ ID NO: 1940317 - RNA, 19 nt, Homo sapiens
  misc_RNA (1)...(19): siRNA sense strand
cagagaauauggaacuauc

SEQ ID NO: 1940318 - RNA, 19 nt, Homo sapiens
  misc_RNA (1)...(19): siRNA sense strand
ggacauugaccuccacauc

SEQ ID NO: 1940319 - RNA, 19 nt, Homo sapiens
  misc_RNA (1)...(19): siRNA sense strand
caagugguaccaucaagaa

SEQ ID NO: 1940320 - RNA, 19 nt, Homo sapiens
  misc_RNA (1)...(19): siRNA sense strand
ggaccagaaccauccauug

SEQ ID NO: 1940321 - RNA, 19 nt, Homo sapiens
  misc_RNA (1)...(19): siRNA sense strand
gcacaccucacaccaguuc

SEQ ID NO: 1940322 - RNA, 19 nt, Homo sapiens
  misc_RNA (1)...(19): siRNA sense strand
aaacaucugagcaaugauu

SEQ ID NO: 1940323 - RNA, 19 nt, Homo sapiens
  misc_RNA (1)...(19): siRNA sense strand
caucaaauaaggaaggauu

SEQ ID NO: 1940324 - RNA, 19 nt, Homo sapiens
  misc_RNA (1)...(19): siRNA sense strand
acccuaagaagaagaauua

SEQ ID NO: 1940325 - RNA, 19 nt, Homo sapiens
  misc_RNA (1)...(19): siRNA sense strand
caacaauggaaacaucuga

SEQ ID NO: 1940326 - RNA, 19 nt, Homo sapiens
  misc_RNA (1)...(19): siRNA sense strand
ucugagcaaugauuucuug

SEQ ID NO: 1940327 - RNA, 19 nt, Homo sapiens
  misc_RNA (1)...(19): siRNA sense strand
cagcaugucuuccaaaaug

SEQ ID NO: 1940328 - RNA, 19 nt, Homo sapiens
  misc_RNA (1)...(19): siRNA sense strand
acagaggauuccaacauug

SEQ ID NO: 1940329 - RNA, 19 nt, Homo sapiens
  misc_RNA (1)...(19): siRNA sense strand
aacagaggauuccaacauu

SEQ ID NO: 1940330 - RNA, 19 nt, Homo sapiens
  misc_RNA (1)...(19): siRNA sense strand
gcaagugguaccaucaaga

SEQ ID NO: 1940331 - RNA, 19 nt, Homo sapiens
  misc_RNA (1)...(19): siRNA sense strand
caacaucagcuuccucgau

SEQ ID NO: 1940332 - RNA, 19 nt, Homo sapiens
  misc_RNA (1)...(19): siRNA sense strand
gaaacagauggacaaguug

SEQ ID NO: 1940333 - RNA, 19 nt, Homo sapiens
  misc_RNA (1)...(19): siRNA sense strand
ccacugaucccaagacucu

SEQ ID NO: 1940334 - RNA, 19 nt, Homo sapiens
  misc_RNA (1)...(19): siRNA sense strand
gcaucaucuuugagccuua

SEQ ID NO: 1940335 - RNA, 19 nt, Homo sapiens
  misc_RNA (1)...(19): siRNA sense strand
ugucuguacucgugaacua

SEQ ID NO: 1940336 - RNA, 19 nt, Homo sapiens
  misc_RNA (1)...(19): siRNA sense strand
gugguaccaucaagaaguu

SEQ ID NO: 1940337 - RNA, 19 nt, Homo sapiens
  misc_RNA (1)...(19): siRNA sense strand
gacauugaccuccacauca

SEQ ID NO: 1940338 - RNA, 19 nt, Homo sapiens
  misc_RNA (1)...(19): siRNA sense strand
caaugcauccuacaccaaa

SEQ ID NO: 1940339 - RNA, 19 nt, Homo sapiens
  misc_RNA (1)...(19): siRNA sense strand
ucaagaaacagauggacaa

SEQ ID NO: 1940340 - RNA, 19 nt, Homo sapiens
  misc_RNA (1)...(19): siRNA sense strand
caacaggucacacauuguc

SEQ ID NO: 1940341 - RNA, 19 nt, Homo sapiens
  misc_RNA (1)...(19): siRNA sense strand
gagaagaggcacaguuggu

SEQ ID NO: 1940342 - RNA, 19 nt, Homo sapiens
  misc_RNA (1)...(19): siRNA sense strand
agcaacaggucacacauug

SEQ ID NO: 1940343 - RNA, 19 nt, Homo sapiens
  misc_RNA (1)...(19): siRNA sense strand
gauuuucucucucccagua

SEQ ID NO: 1940344 - RNA, 19 nt, Homo sapiens
  misc_RNA (1)...(19): siRNA sense strand
cagaggauuccaacauuga

SEQ ID NO: 1940345 - RNA, 19 nt, Homo sapiens
  misc_RNA (1)...(19): siRNA sense strand
gauuugggcugggucuuca

SEQ ID NO: 1940346 - RNA, 19 nt, Homo sapiens
  misc_RNA (1)...(19): siRNA sense strand
gaucuacagugagaacucu

SEQ ID NO: 1940347 - RNA, 19 nt, Homo sapiens
  misc_RNA (1)...(19): siRNA sense strand
gcagaacagaggauuccaa

SEQ ID NO: 1940348 - RNA, 19 nt, Homo sapiens
  misc_RNA (1)...(19): siRNA sense strand
uggaucaucucuagcaaca

SEQ ID NO: 1940349 - RNA, 19 nt, Homo sapiens
  misc_RNA (1)...(19): siRNA sense strand
gagaauauggaacuaucga

SEQ ID NO: 1940350 - RNA, 19 nt, Homo sapiens
  misc_RNA (1)...(19): siRNA sense strand
ccuuuaacccuaagaagaa

SEQ ID NO: 1940351 - RNA, 19 nt, Homo sapiens
  misc_RNA (1)...(19): siRNA sense strand
aaagauccuggguauguuu

SEQ ID NO: 1940352 - RNA, 19 nt, Homo sapiens
  misc_RNA (1)...(19): siRNA sense strand
gagcagcaugucuuccaaa

SEQ ID NO: 1940353 - RNA, 19 nt, Homo sapiens
  misc_RNA (1)...(19): siRNA sense strand
gcugaaaggcaaacuaggu

SEQ ID NO: 1940354 - RNA, 19 nt, Homo sapiens
  misc_RNA (1)...(19): siRNA sense strand
ggucccacauugagaacug

SEQ ID NO: 1940355 - RNA, 19 nt, Homo sapiens
  misc_RNA (1)...(19): siRNA sense strand
caucaucuuugagccuuau

SEQ ID NO: 1940356 - RNA, 19 nt, Homo sapiens
  misc_RNA (1)...(19): siRNA sense strand
gaagaaccccaaaguggaa

SEQ ID NO: 1940357 - RNA, 19 nt, Homo sapiens
  misc_RNA (1)...(19): siRNA sense strand
caucagagaauauggaacu

SEQ ID NO: 1940358 - RNA, 19 nt, Homo sapiens
  misc_RNA (1)...(19): siRNA sense strand
caugaaguaugcagaacag

SEQ ID NO: 1940359 - RNA, 19 nt, Homo sapiens
  misc_RNA (1)...(19): siRNA sense strand
ggaguauggauuccucguu

SEQ ID NO: 1940360 - RNA, 19 nt, Homo sapiens
  misc_RNA (1)...(19): siRNA sense strand
acagcuugaugcagacauu

SEQ ID NO: 1940361 - RNA, 19 nt, Homo sapiens
  misc_RNA (1)...(19): siRNA sense strand
gccuuuaacccuaagaaga

SEQ ID NO: 1940362 - RNA, 19 nt, Homo sapiens
  misc_RNA (1)...(19): siRNA sense strand
aauauggaacuaucgauga

SEQ ID NO: 1940363 - RNA, 19 nt, Homo sapiens
  misc_RNA (1)...(19): siRNA sense strand
cagaaccuauuguguugag

SEQ ID NO: 1940364 - RNA, 19 nt, Homo sapiens
  misc_RNA (1)...(19): siRNA sense strand
gaaaaggacagcacaggau

SEQ ID NO: 1940365 - RNA, 19 nt, Homo sapiens
  misc_RNA (1)...(19): siRNA sense strand
ucccaagacucuggccuuu

SEQ ID NO: 1940366 - RNA, 19 nt, Homo sapiens
  misc_RNA (1)...(19): siRNA sense strand
gugaugagcagcaugucuu

SEQ ID NO: 1940367 - RNA, 19 nt, Homo sapiens
  misc_RNA (1)...(19): siRNA sense strand
ugaagacccagcaggagaa

SEQ ID NO: 1940368 - RNA, 19 nt, Homo sapiens
  misc_RNA (1)...(19): siRNA sense strand
gauccuggguauguuuaca

SEQ ID NO: 1940369 - RNA, 19 nt, Homo sapiens
  misc_RNA (1)...(19): siRNA sense strand
gggcugggucuucaguuga

SEQ ID NO: 1940370 - RNA, 19 nt, Homo sapiens
  misc_RNA (1)...(19): siRNA sense strand
gucacacauugucaaacua

SEQ ID NO: 1940371 - RNA, 19 nt, Homo sapiens
  misc_RNA (1)...(19): siRNA sense strand
uagcaacaggucacacauu

SEQ ID NO: 1940372 - RNA, 19 nt, Homo sapiens
  misc_RNA (1)...(19): siRNA sense strand
gcaacaggucacacauugu

SEQ ID NO: 1940373 - RNA, 19 nt, Homo sapiens
  misc_RNA (1)...(19): siRNA sense strand
ugcaguggaucaucucuag

SEQ ID NO: 1940374 - RNA, 19 nt, Homo sapiens
  misc_RNA (1)...(19): siRNA sense strand
uuacaucccaacaauggaa

SEQ ID NO: 1940375 - RNA, 19 nt, Homo sapiens
  misc_RNA (1)...(19): siRNA sense strand
ccuaagaagaagaauuaug

SEQ ID NO: 1940376 - RNA, 19 nt, Homo sapiens
  misc_RNA (1)...(19): siRNA sense strand
aaauggaucuaugcugaag

SEQ ID NO: 1940377 - RNA, 19 nt, Homo sapiens
  misc_RNA (1)...(19): siRNA sense strand
ggauuccucguucagauca

SEQ ID NO: 1940378 - RNA, 19 nt, Homo sapiens
  misc_RNA (1)...(19): siRNA sense strand
cuguauccaucagagaaua

SEQ ID NO: 1940379 - RNA, 19 nt, Homo sapiens
  misc_RNA (1)...(19): siRNA sense strand
ucucccaguuucccuauca

SEQ ID NO: 1940380 - RNA, 19 nt, Homo sapiens
  misc_RNA (1)...(19): siRNA sense strand
ucccaacaauggaaacauc

SEQ ID NO: 1940381 - RNA, 19 nt, Homo sapiens
  misc_RNA (1)...(19): siRNA sense strand
auugagaacuggcauucga

SEQ ID NO: 1940382 - RNA, 19 nt, Homo sapiens
  misc_RNA (1)...(19): siRNA sense strand
gcucuauggcagcaccuuu

SEQ ID NO: 1940383 - RNA, 19 nt, Homo sapiens
  misc_RNA (1)...(19): siRNA sense strand
ggagaucuacagugagaac

SEQ ID NO: 1940384 - RNA, 19 nt, Homo sapiens
  misc_RNA (1)...(19): siRNA sense strand
ugagcagcaugucuuccaa

SEQ ID NO: 1940385 - RNA, 19 nt, Homo sapiens
  misc_RNA (1)...(19): siRNA sense strand
ggcaagugguaccaucaag

SEQ ID NO: 1940386 - RNA, 19 nt, Homo sapiens
  misc_RNA (1)...(19): siRNA sense strand
caggagaagaggcacaguu

SEQ ID NO: 1940387 - RNA, 19 nt, Homo sapiens
  misc_RNA (1)...(19): siRNA sense strand
guuuacaucccaacaaugg

SEQ ID NO: 1940388 - RNA, 19 nt, Homo sapiens
  misc_RNA (1)...(19): siRNA sense strand
ggaccgccaagaagcucua

SEQ ID NO: 1940389 - RNA, 19 nt, Homo sapiens
  misc_RNA (1)...(19): siRNA sense strand
ugaguacuguguggugugu

SEQ ID NO: 1940390 - RNA, 19 nt, Homo sapiens
  misc_RNA (1)...(19): siRNA sense strand
ugggcugggucuucaguug

SEQ ID NO: 1940391 - RNA, 19 nt, Homo sapiens
  misc_RNA (1)...(19): siRNA sense strand
gaccuccacaucaacauca

SEQ ID NO: 1940392 - RNA, 19 nt, Homo sapiens
  misc_RNA (1)...(19): siRNA sense strand
aguacugugugguguguga

SEQ ID NO: 1940393 - RNA, 19 nt, Homo sapiens
  misc_RNA (1)...(19): siRNA sense strand
gcaaguggaugguaagaua

SEQ ID NO: 1940394 - RNA, 19 nt, Homo sapiens
  misc_RNA (1)...(19): siRNA sense strand
caacaaggaugauaugaag

SEQ ID NO: 1940395 - RNA, 19 nt, Homo sapiens
  misc_RNA (1)...(19): siRNA sense strand
ugaagaaaguugugaagga

SEQ ID NO: 1940396 - RNA, 19 nt, Homo sapiens
  misc_RNA (1)...(19): siRNA sense strand
ccaaguacaucgugcaagu

SEQ ID NO: 1940397 - RNA, 19 nt, Homo sapiens
  misc_RNA (1)...(19): siRNA sense strand
gggauucuucguuggauua

SEQ ID NO: 1940398 - RNA, 19 nt, Homo sapiens
  misc_RNA (1)...(19): siRNA sense strand
ccaacgcccucucuacugu

SEQ ID NO: 1940399 - RNA, 19 nt, Homo sapiens
  misc_RNA (1)...(19): siRNA sense strand
aggaagggcugcugggauu

SEQ ID NO: 1940400 - RNA, 19 nt, Homo sapiens
  misc_RNA (1)...(19): siRNA sense strand
ccaacaaggaugauaugaa

SEQ ID NO: 1940401 - RNA, 19 nt, Homo sapiens
  misc_RNA (1)...(19): siRNA sense strand
gaacaacugcgggcugcaa

SEQ ID NO: 1940402 - RNA, 19 nt, Homo sapiens
  misc_RNA (1)...(19): siRNA sense strand
gaugagauugagcagguuu

SEQ ID NO: 1940403 - RNA, 19 nt, Homo sapiens
  misc_RNA (1)...(19): siRNA sense strand
guaaccugcuggcccacuu

SEQ ID NO: 1940404 - RNA, 19 nt, Homo sapiens
  misc_RNA (1)...(19): siRNA sense strand
gagcuccauugggaagauu

SEQ ID NO: 1940405 - RNA, 19 nt, Homo sapiens
  misc_RNA (1)...(19): siRNA sense strand
ucaucaggaucaugcuuug

SEQ ID NO: 1940406 - RNA, 19 nt, Homo sapiens
  misc_RNA (1)...(19): siRNA sense strand
uugagcagguuuccaacaa

SEQ ID NO: 1940407 - RNA, 19 nt, Homo sapiens
  misc_RNA (1)...(19): siRNA sense strand
uggauucacugcuggaagu

SEQ ID NO: 1940408 - RNA, 19 nt, Homo sapiens
  misc_RNA (1)...(19): siRNA sense strand
ccucauggcugugaacaac

SEQ ID NO: 1940409 - RNA, 19 nt, Homo sapiens
  misc_RNA (1)...(19): siRNA sense strand
ccuacgagaugaugaugca

SEQ ID NO: 1940410 - RNA, 19 nt, Homo sapiens
  misc_RNA (1)...(19): siRNA sense strand
guacaucgugcaaguggau

SEQ ID NO: 1940411 - RNA, 19 nt, Homo sapiens
  misc_RNA (1)...(19): siRNA sense strand
augccuaccugguggauga

SEQ ID NO: 1940412 - RNA, 19 nt, Homo sapiens
  misc_RNA (1)...(19): siRNA sense strand
cagugagcaugcugaccua

SEQ ID NO: 1940413 - RNA, 19 nt, Homo sapiens
  misc_RNA (1)...(19): siRNA sense strand
gguagcaugaagaagguuu

SEQ ID NO: 1940414 - RNA, 19 nt, Homo sapiens
  misc_RNA (1)...(19): siRNA sense strand
gcuaguuggcgaccucaug

SEQ ID NO: 1940415 - RNA, 19 nt, Homo sapiens
  misc_RNA (1)...(19): siRNA sense strand
ccggagcuauaccaaguuc

SEQ ID NO: 1940416 - RNA, 19 nt, Homo sapiens
  misc_RNA (1)...(19): siRNA sense strand
gcugcaugguccaguuugu

SEQ ID NO: 1940417 - RNA, 19 nt, Homo sapiens
  misc_RNA (1)...(19): siRNA sense strand
agauugagcagguuuccaa

SEQ ID NO: 1940418 - RNA, 19 nt, Homo sapiens
  misc_RNA (1)...(19): siRNA sense strand
ucauggcugugaacaacug

SEQ ID NO: 1940419 - RNA, 19 nt, Homo sapiens
  misc_RNA (1)...(19): siRNA sense strand
gcgcugcaugguccaguuu

SEQ ID NO: 1940420 - RNA, 19 nt, Homo sapiens
  misc_RNA (1)...(19): siRNA sense strand
gcagguuuccaacaaggau

SEQ ID NO: 1940421 - RNA, 19 nt, Homo sapiens
  misc_RNA (1)...(19): siRNA sense strand
gucaucaggaucaugcuuu

SEQ ID NO: 1940422 - RNA, 19 nt, Homo sapiens
  misc_RNA (1)...(19): siRNA sense strand
agaugaugaugcagugugu

SEQ ID NO: 1940423 - RNA, 19 nt, Homo sapiens
  misc_RNA (1)...(19): siRNA sense strand
auucuucguuggauuaauc

SEQ ID NO: 1940424 - RNA, 19 nt, Homo sapiens
  misc_RNA (1)...(19): siRNA sense strand
ucgugcaaguggaugguaa

SEQ ID NO: 1940425 - RNA, 19 nt, Homo sapiens
  misc_RNA (1)...(19): siRNA sense strand
gcuggaaguaccugagugu

SEQ ID NO: 1940426 - RNA, 19 nt, Homo sapiens
  misc_RNA (1)...(19): siRNA sense strand
gagaccuccuacgagauga

SEQ ID NO: 1940427 - RNA, 19 nt, Homo sapiens
  misc_RNA (1)...(19): siRNA sense strand
ugagcagguuuccaacaag

SEQ ID NO: 1940428 - RNA, 19 nt, Homo sapiens
  misc_RNA (1)...(19): siRNA sense strand
caaguggaugguaagauag

SEQ ID NO: 1940429 - RNA, 19 nt, Homo sapiens
  misc_RNA (1)...(19): siRNA sense strand
ggauucacugcuggaagua

SEQ ID NO: 1940430 - RNA, 19 nt, Homo sapiens
  misc_RNA (1)...(19): siRNA sense strand
ggagcuauaccaaguucgu

SEQ ID NO: 1940431 - RNA, 19 nt, Homo sapiens
  misc_RNA (1)...(19): siRNA sense strand
ggauucuucguuggauuaa

SEQ ID NO: 1940432 - RNA, 19 nt, Homo sapiens
  misc_RNA (1)...(19): siRNA sense strand
ggacgggaggccaaguaca

SEQ ID NO: 1940433 - RNA, 19 nt, Homo sapiens
  misc_RNA (1)...(19): siRNA sense strand
ucacagauguuaucauuug

SEQ ID NO: 1940434 - RNA, 19 nt, Homo sapiens
  misc_RNA (1)...(19): siRNA sense strand
gaagaucacuacagagaau

SEQ ID NO: 1940435 - RNA, 19 nt, Homo sapiens
  misc_RNA (1)...(19): siRNA sense strand
ucaagccucuuucagauua

SEQ ID NO: 1940436 - RNA, 19 nt, Homo sapiens
  misc_RNA (1)...(19): siRNA sense strand
uaaacaaccugaucuaugu

SEQ ID NO: 1940437 - RNA, 19 nt, Homo sapiens
  misc_RNA (1)...(19): siRNA sense strand
gaaaugcuuuaaacucuga

SEQ ID NO: 1940438 - RNA, 19 nt, Homo sapiens
  misc_RNA (1)...(19): siRNA sense strand
ccaaggcaauauacuguua

SEQ ID NO: 1940439 - RNA, 19 nt, Homo sapiens
  misc_RNA (1)...(19): siRNA sense strand
gagaaaugcuuuaaacucu

SEQ ID NO: 1940440 - RNA, 19 nt, Homo sapiens
  misc_RNA (1)...(19): siRNA sense strand
cgugaugucuggauuuaua

SEQ ID NO: 1940441 - RNA, 19 nt, Homo sapiens
  misc_RNA (1)...(19): siRNA sense strand
uggcuaagcuuccagaauu

SEQ ID NO: 1940442 - RNA, 19 nt, Homo sapiens
  misc_RNA (1)...(19): siRNA sense strand
gaauguacaguaucucuuu

SEQ ID NO: 1940443 - RNA, 19 nt, Homo sapiens
  misc_RNA (1)...(19): siRNA sense strand
agaauucuccugaguguua

SEQ ID NO: 1940444 - RNA, 19 nt, Homo sapiens
  misc_RNA (1)...(19): siRNA sense strand
ugacuucucuucaggauca

SEQ ID NO: 1940445 - RNA, 19 nt, Homo sapiens
  misc_RNA (1)...(19): siRNA sense strand
uaacagcuguaucccuaaa

SEQ ID NO: 1940446 - RNA, 19 nt, Homo sapiens
  misc_RNA (1)...(19): siRNA sense strand
gaaaugauguccccaagga

SEQ ID NO: 1940447 - RNA, 19 nt, Homo sapiens
  misc_RNA (1)...(19): siRNA sense strand
uaucauggcugugugacua

SEQ ID NO: 1940448 - RNA, 19 nt, Homo sapiens
  misc_RNA (1)...(19): siRNA sense strand
gugaugaacuuguuauugg

SEQ ID NO: 1940449 - RNA, 19 nt, Homo sapiens
  misc_RNA (1)...(19): siRNA sense strand
ucaaaucgauggacugaag

SEQ ID NO: 1940450 - RNA, 19 nt, Homo sapiens
  misc_RNA (1)...(19): siRNA sense strand
ggaaagccgagaaauguug

SEQ ID NO: 1940451 - RNA, 19 nt, Homo sapiens
  misc_RNA (1)...(19): siRNA sense strand
caucaagccucuuucagau

SEQ ID NO: 1940452 - RNA, 19 nt, Homo sapiens
  misc_RNA (1)...(19): siRNA sense strand
caacuugauccuuguaauu

SEQ ID NO: 1940453 - RNA, 19 nt, Homo sapiens
  misc_RNA (1)...(19): siRNA sense strand
ggugauaguugucguugga

SEQ ID NO: 1940454 - RNA, 19 nt, Homo sapiens
  misc_RNA (1)...(19): siRNA sense strand
gcaagacgguaccacauac

SEQ ID NO: 1940455 - RNA, 19 nt, Homo sapiens
  misc_RNA (1)...(19): siRNA sense strand
cgagaaauguugguugaga

SEQ ID NO: 1940456 - RNA, 19 nt, Homo sapiens
  misc_RNA (1)...(19): siRNA sense strand
guuaucaguuguugcauga

SEQ ID NO: 1940457 - RNA, 19 nt, Homo sapiens
  misc_RNA (1)...(19): siRNA sense strand
caaaauggcuguccuccuu

SEQ ID NO: 1940458 - RNA, 19 nt, Homo sapiens
  misc_RNA (1)...(19): siRNA sense strand
gccgagaaauguugguuga

SEQ ID NO: 1940459 - RNA, 19 nt, Homo sapiens
  misc_RNA (1)...(19): siRNA sense strand
gccgugaugucuggauuua

SEQ ID NO: 1940460 - RNA, 19 nt, Homo sapiens
  misc_RNA (1)...(19): siRNA sense strand
ugagcgaguuggaggauuu

SEQ ID NO: 1940461 - RNA, 19 nt, Homo sapiens
  misc_RNA (1)...(19): siRNA sense strand
ccacauacuugggaaugaa

SEQ ID NO: 1940462 - RNA, 19 nt, Homo sapiens
  misc_RNA (1)...(19): siRNA sense strand
ucaaaacacucuucacaaa

SEQ ID NO: 1940463 - RNA, 19 nt, Homo sapiens
  misc_RNA (1)...(19): siRNA sense strand
cugaagcuauggaauguuu

SEQ ID NO: 1940464 - RNA, 19 nt, Homo sapiens
  misc_RNA (1)...(19): siRNA sense strand
gagaaauguugguugagau

SEQ ID NO: 1940465 - RNA, 19 nt, Homo sapiens
  misc_RNA (1)...(19): siRNA sense strand
gcaacuugauccuuguaau

SEQ ID NO: 1940466 - RNA, 19 nt, Homo sapiens
  misc_RNA (1)...(19): siRNA sense strand
ccagaauucuccugagugu

SEQ ID NO: 1940467 - RNA, 19 nt, Homo sapiens
  misc_RNA (1)...(19): siRNA sense strand
acacuauucucuguuauga

SEQ ID NO: 1940468 - RNA, 19 nt, Homo sapiens
  misc_RNA (1)...(19): siRNA sense strand
gaaaacauacuccagauau

SEQ ID NO: 1940469 - RNA, 19 nt, Homo sapiens
  misc_RNA (1)...(19): siRNA sense strand
uggaggaccugaugauaau

SEQ ID NO: 1940470 - RNA, 19 nt, Homo sapiens
  misc_RNA (1)...(19): siRNA sense strand
gaucugagaagaccacugu

SEQ ID NO: 1940471 - RNA, 19 nt, Homo sapiens
  misc_RNA (1)...(19): siRNA sense strand
ggacugaccaaggcaauau

SEQ ID NO: 1940472 - RNA, 19 nt, Homo sapiens
  misc_RNA (1)...(19): siRNA sense strand
gugcuacgauccuguaaca

SEQ ID NO: 1940473 - RNA, 19 nt, Homo sapiens
  misc_RNA (1)...(19): siRNA sense strand
agaauuuccuugccauaga

SEQ ID NO: 1940474 - RNA, 19 nt, Homo sapiens
  misc_RNA (1)...(19): siRNA sense strand
guggaggaccugaugauaa

SEQ ID NO: 1940475 - RNA, 19 nt, Homo sapiens
  misc_RNA (1)...(19): siRNA sense strand
gcuaagcuuccagaauuua

SEQ ID NO: 1940476 - RNA, 19 nt, Homo sapiens
  misc_RNA (1)...(19): siRNA sense strand
cgugauagccgcuuauuca

SEQ ID NO: 1940477 - RNA, 19 nt, Homo sapiens
  misc_RNA (1)...(19): siRNA sense strand
caguugaaguggaccaauu

SEQ ID NO: 1940478 - RNA, 19 nt, Homo sapiens
  misc_RNA (1)...(19): siRNA sense strand
cagagaauguacaguaucu

SEQ ID NO: 1940479 - RNA, 19 nt, Homo sapiens
  misc_RNA (1)...(19): siRNA sense strand
gaccugaugauaauacuug

SEQ ID NO: 1940480 - RNA, 19 nt, Homo sapiens
  misc_RNA (1)...(19): siRNA sense strand
ggcuaagcuuccagaauuu

SEQ ID NO: 1940481 - RNA, 19 nt, Homo sapiens
  misc_RNA (1)...(19): siRNA sense strand
gaauuuccuugccauagag

SEQ ID NO: 1940482 - RNA, 19 nt, Homo sapiens
  misc_RNA (1)...(19): siRNA sense strand
acgauccaguugaagauua

SEQ ID NO: 1940483 - RNA, 19 nt, Homo sapiens
  misc_RNA (1)...(19): siRNA sense strand
gaugaacuuguuauuggua

SEQ ID NO: 1940484 - RNA, 19 nt, Homo sapiens
  misc_RNA (1)...(19): siRNA sense strand
ggagcaacuugauccuugu

SEQ ID NO: 1940485 - RNA, 19 nt, Homo sapiens
  misc_RNA (1)...(19): siRNA sense strand
cuaaacaaccugaucuaug

SEQ ID NO: 1940486 - RNA, 19 nt, Homo sapiens
  misc_RNA (1)...(19): siRNA sense strand
gcugauacccauucacuca

SEQ ID NO: 1940487 - RNA, 19 nt, Homo sapiens
  misc_RNA (1)...(19): siRNA sense strand
ggaagucuuuggcuaagcu

SEQ ID NO: 1940488 - RNA, 19 nt, Homo sapiens
  misc_RNA (1)...(19): siRNA sense strand
gagaagccacagacacuau

SEQ ID NO: 1940489 - RNA, 19 nt, Homo sapiens
  misc_RNA (1)...(19): siRNA sense strand
ucagagcuauguuuuguaa

SEQ ID NO: 1940490 - RNA, 19 nt, Homo sapiens
  misc_RNA (1)...(19): siRNA sense strand
gcaaugcccaggccagugu

SEQ ID NO: 1940491 - RNA, 19 nt, Homo sapiens
  misc_RNA (1)...(19): siRNA sense strand
gacuagcuguguaggcaaa

SEQ ID NO: 1940492 - RNA, 19 nt, Homo sapiens
  misc_RNA (1)...(19): siRNA sense strand
ugauacccauucacucaaa

SEQ ID NO: 1940493 - RNA, 19 nt, Homo sapiens
  misc_RNA (1)...(19): siRNA sense strand
guaaagaggagaugguuuu

SEQ ID NO: 1940494 - RNA, 19 nt, Homo sapiens
  misc_RNA (1)...(19): siRNA sense strand
ggagaagccacagacacua

SEQ ID NO: 1940495 - RNA, 19 nt, Homo sapiens
  misc_RNA (1)...(19): siRNA sense strand
gaccaaggcaauauacugu

SEQ ID NO: 1940496 - RNA, 19 nt, Homo sapiens
  misc_RNA (1)...(19): siRNA sense strand
aaaggcagauggcgucaca

SEQ ID NO: 1940497 - RNA, 19 nt, Homo sapiens
  misc_RNA (1)...(19): siRNA sense strand
ucugagaagaccacuguua

SEQ ID NO: 1940498 - RNA, 19 nt, Homo sapiens
  misc_RNA (1)...(19): siRNA sense strand
ggaaaacugugguaugucu

SEQ ID NO: 1940499 - RNA, 19 nt, Homo sapiens
  misc_RNA (1)...(19): siRNA sense strand
uuagcagcguagaauguua

SEQ ID NO: 1940500 - RNA, 19 nt, Homo sapiens
  misc_RNA (1)...(19): siRNA sense strand
caucccaacuacuuuguuc

SEQ ID NO: 1940501 - RNA, 19 nt, Homo sapiens
  misc_RNA (1)...(19): siRNA sense strand
cagauguuaucauuugugu

SEQ ID NO: 1940502 - RNA, 19 nt, Homo sapiens
  misc_RNA (1)...(19): siRNA sense strand
ggaugcacguacagaauac

SEQ ID NO: 1940503 - RNA, 19 nt, Homo sapiens
  misc_RNA (1)...(19): siRNA sense strand
ugagacaucaagccucuuu

SEQ ID NO: 1940504 - RNA, 19 nt, Homo sapiens
  misc_RNA (1)...(19): siRNA sense strand
acuauucucuguuaugauc

SEQ ID NO: 1940505 - RNA, 19 nt, Homo sapiens
  misc_RNA (1)...(19): siRNA sense strand
ucauuuguguggaaggaaa

SEQ ID NO: 1940506 - RNA, 19 nt, Homo sapiens
  misc_RNA (1)...(19): siRNA sense strand
ggcaauauacuguuacgau

SEQ ID NO: 1940507 - RNA, 19 nt, Homo sapiens
  misc_RNA (1)...(19): siRNA sense strand
gaguugccucucucaauaa

SEQ ID NO: 1940508 - RNA, 19 nt, Homo sapiens
  misc_RNA (1)...(19): siRNA sense strand
gaauucuccugaguguuau

SEQ ID NO: 1940509 - RNA, 19 nt, Homo sapiens
  misc_RNA (1)...(19): siRNA sense strand
uacacgagcuccugacaca

SEQ ID NO: 1940510 - RNA, 19 nt, Homo sapiens
  misc_RNA (1)...(19): siRNA sense strand
ucaaucuuaugauccagaa

SEQ ID NO: 1940511 - RNA, 19 nt, Homo sapiens
  misc_RNA (1)...(19): siRNA sense strand
ccaggccaguguccuauca

SEQ ID NO: 1940512 - RNA, 19 nt, Homo sapiens
  misc_RNA (1)...(19): siRNA sense strand
guuaugauccugcaacaag

SEQ ID NO: 1940513 - RNA, 19 nt, Homo sapiens
  misc_RNA (1)...(19): siRNA sense strand
cuacuucagagcuauguuu

SEQ ID NO: 1940514 - RNA, 19 nt, Homo sapiens
  misc_RNA (1)...(19): siRNA sense strand
gcagauggcgucacaaaau

SEQ ID NO: 1940515 - RNA, 19 nt, Homo sapiens
  misc_RNA (1)...(19): siRNA sense strand
caggagaauggaagucuuu

SEQ ID NO: 1940516 - RNA, 19 nt, Homo sapiens
  misc_RNA (1)...(19): siRNA sense strand
uggcuauucugaggugaua

SEQ ID NO: 1940517 - RNA, 19 nt, Homo sapiens
  misc_RNA (1)...(19): siRNA sense strand
gagcaacuugauccuugua

SEQ ID NO: 1940518 - RNA, 19 nt, Homo sapiens
  misc_RNA (1)...(19): siRNA sense strand
gacaaagaugaacuuauug

SEQ ID NO: 1940519 - RNA, 19 nt, Homo sapiens
  misc_RNA (1)...(19): siRNA sense strand
ugagaaaugcuuuaaacuc

SEQ ID NO: 1940520 - RNA, 19 nt, Homo sapiens
  misc_RNA (1)...(19): siRNA sense strand
gauacaaugagaaaugcuu

SEQ ID NO: 1940521 - RNA, 19 nt, Homo sapiens
  misc_RNA (1)...(19): siRNA sense strand
uggaugcacguacagaaua

SEQ ID NO: 1940522 - RNA, 19 nt, Homo sapiens
  misc_RNA (1)...(19): siRNA sense strand
gguggaggaccugaugaua

SEQ ID NO: 1940523 - RNA, 19 nt, Homo sapiens
  misc_RNA (1)...(19): siRNA sense strand
uggcuguccuccuugguaa

SEQ ID NO: 1940524 - RNA, 19 nt, Homo sapiens
  misc_RNA (1)...(19): siRNA sense strand
uaugcagucugugcucuaa

SEQ ID NO: 1940525 - RNA, 19 nt, Homo sapiens
  misc_RNA (1)...(19): siRNA sense strand
gacgcagacuaaacagaga

SEQ ID NO: 1940526 - RNA, 19 nt, Homo sapiens
  misc_RNA (1)...(19): siRNA sense strand
ugaaguggaccaauugauc

SEQ ID NO: 1940527 - RNA, 19 nt, Homo sapiens
  misc_RNA (1)...(19): siRNA sense strand
gggaaagccgagaaauguu

SEQ ID NO: 1940528 - RNA, 19 nt, Homo sapiens
  misc_RNA (1)...(19): siRNA sense strand
gagcgaguuggaggauuua

SEQ ID NO: 1940529 - RNA, 19 nt, Homo sapiens
  misc_RNA (1)...(19): siRNA sense strand
gguaaagaggagaugguuu

SEQ ID NO: 1940530 - RNA, 19 nt, Homo sapiens
  misc_RNA (1)...(19): siRNA sense strand
gaacuuguuauugguaaag

SEQ ID NO: 1940531 - RNA, 19 nt, Homo sapiens
  misc_RNA (1)...(19): siRNA sense strand
uguccuccuugguaaagua

SEQ ID NO: 1940532 - RNA, 19 nt, Homo sapiens
  misc_RNA (1)...(19): siRNA sense strand
cagcguagaauguuaugau

SEQ ID NO: 1940533 - RNA, 19 nt, Homo sapiens
  misc_RNA (1)...(19): siRNA sense strand
gaacucggcugugaugaga

SEQ ID NO: 1940534 - RNA, 19 nt, Homo sapiens
  misc_RNA (1)...(19): siRNA sense strand
gugaugagauuauugauag

SEQ ID NO: 1940535 - RNA, 19 nt, Homo sapiens
  misc_RNA (1)...(19): siRNA sense strand
gguuucagaugcauuauga

SEQ ID NO: 1940536 - RNA, 19 nt, Homo sapiens
  misc_RNA (1)...(19): siRNA sense strand
ggacgagggcgaggaauuu

SEQ ID NO: 1940537 - RNA, 19 nt, Homo sapiens
  misc_RNA (1)...(19): siRNA sense strand
gaagaacucggcugugaug

SEQ ID NO: 1940538 - RNA, 19 nt, Homo sapiens
  misc_RNA (1)...(19): siRNA sense strand
ugaagaagccgacaagaug

SEQ ID NO: 1940539 - RNA, 19 nt, Homo sapiens
  misc_RNA (1)...(19): siRNA sense strand
ggaaacggagccuugcuaa

SEQ ID NO: 1940540 - RNA, 19 nt, Homo sapiens
  misc_RNA (1)...(19): siRNA sense strand
ggaggacgacuacgacuau

SEQ ID NO: 1940541 - RNA, 19 nt, Homo sapiens
  misc_RNA (1)...(19): siRNA sense strand
uguccgagcuguaugaaga

SEQ ID NO: 1940542 - RNA, 19 nt, Homo sapiens
  misc_RNA (1)...(19): siRNA sense strand
ucaguuagcuuuuaucgaa

SEQ ID NO: 1940543 - RNA, 19 nt, Homo sapiens
  misc_RNA (1)...(19): siRNA sense strand
ucaaucgucugaccgaaga

SEQ ID NO: 1940544 - RNA, 19 nt, Homo sapiens
  misc_RNA (1)...(19): siRNA sense strand
gaagaagccgacaagaugu

SEQ ID NO: 1940545 - RNA, 19 nt, Homo sapiens
  misc_RNA (1)...(19): siRNA sense strand
ucagaugcauuaugagaag

SEQ ID NO: 1940546 - RNA, 19 nt, Homo sapiens
  misc_RNA (1)...(19): siRNA sense strand
gauuauugauagagaguag

SEQ ID NO: 1940547 - RNA, 19 nt, Homo sapiens
  misc_RNA (1)...(19): siRNA sense strand
gggaaacggagccuugcua

SEQ ID NO: 1940548 - RNA, 19 nt, Homo sapiens
  misc_RNA (1)...(19): siRNA sense strand
gcugugaugagauuauuga

SEQ ID NO: 1940549 - RNA, 19 nt, Homo sapiens
  misc_RNA (1)...(19): siRNA sense strand
gcggguuucagaugcauua

SEQ ID NO: 1940550 - RNA, 19 nt, Homo sapiens
  misc_RNA (1)...(19): siRNA sense strand
gggaggacgacuacgacua

SEQ ID NO: 1940551 - RNA, 19 nt, Homo sapiens
  misc_RNA (1)...(19): siRNA sense strand
cuacgacuaucccgaagag

SEQ ID NO: 1940552 - RNA, 19 nt, Homo sapiens
  misc_RNA (1)...(19): siRNA sense strand
cgacaagauguuucugaga

SEQ ID NO: 1940553 - RNA, 19 nt, Homo sapiens
  misc_RNA (1)...(19): siRNA sense strand
ggugccggcuacagaguau

SEQ ID NO: 1940554 - RNA, 19 nt, Homo sapiens
  misc_RNA (1)...(19): siRNA sense strand
gagaagaccccguuugauc

SEQ ID NO: 1940555 - RNA, 19 nt, Homo sapiens
  misc_RNA (1)...(19): siRNA sense strand
acucggcugugaugagauu

SEQ ID NO: 1940556 - RNA, 19 nt, Homo sapiens
  misc_RNA (1)...(19): siRNA sense strand
gaguaucagccgcucuuga

SEQ ID NO: 1940557 - RNA, 19 nt, Homo sapiens
  misc_RNA (1)...(19): siRNA sense strand
ggauggcggguuucagaug

SEQ ID NO: 1940558 - RNA, 19 nt, Homo sapiens
  misc_RNA (1)...(19): siRNA sense strand
cggcugugaugagauuauu

SEQ ID NO: 1940559 - RNA, 19 nt, Homo sapiens
  misc_RNA (1)...(19): siRNA sense strand
aaacggagccuugcuaacg

SEQ ID NO: 1940560 - RNA, 19 nt, Homo sapiens
  misc_RNA (1)...(19): siRNA sense strand
cguuugaucaguuagcuuu

SEQ ID NO: 1940561 - RNA, 19 nt, Homo sapiens
  misc_RNA (1)...(19): siRNA sense strand
aguaucagccgcucuugaa

SEQ ID NO: 1940562 - RNA, 19 nt, Homo sapiens
  misc_RNA (1)...(19): siRNA sense strand
gagauuauugauagagagu

SEQ ID NO: 1940563 - RNA, 19 nt, Homo sapiens
  misc_RNA (1)...(19): siRNA sense strand
gaaacggagccuugcuaac

SEQ ID NO: 1940564 - RNA, 19 nt, Homo sapiens
  misc_RNA (1)...(19): siRNA sense strand
gccgacaagauguuucuga

SEQ ID NO: 1940565 - RNA, 19 nt, Homo sapiens
  misc_RNA (1)...(19): siRNA sense strand
agggugaccuuccgcagau

SEQ ID NO: 1940566 - RNA, 19 nt, Homo sapiens
  misc_RNA (1)...(19): siRNA sense strand
gaggaggaaggcccaaugg

SEQ ID NO: 1940567 - RNA, 19 nt, Homo sapiens
  misc_RNA (1)...(19): siRNA sense strand
ugaguuguccgagcuguau

SEQ ID NO: 1940568 - RNA, 19 nt, Homo sapiens
  misc_RNA (1)...(19): siRNA sense strand
gaggacgacuacgacuauc

SEQ ID NO: 1940569 - RNA, 19 nt, Homo sapiens
  misc_RNA (1)...(19): siRNA sense strand
gacgagggcgaggaauuug

SEQ ID NO: 1940570 - RNA, 19 nt, Homo sapiens
  misc_RNA (1)...(19): siRNA sense strand
cagaugcauuaugagaaga

SEQ ID NO: 1940571 - RNA, 19 nt, Homo sapiens
  misc_RNA (1)...(19): siRNA sense strand
cgaggaggaaggcccaaug

SEQ ID NO: 1940572 - RNA, 19 nt, Homo sapiens
  misc_RNA (1)...(19): siRNA sense strand
cagcaaauaugggaaauua

SEQ ID NO: 1940573 - RNA, 19 nt, Homo sapiens
  misc_RNA (1)...(19): siRNA sense strand
ccaaagcucuucacucuug

SEQ ID NO: 1940574 - RNA, 19 nt, Homo sapiens
  misc_RNA (1)...(19): siRNA sense strand
gagcaaagcguuaugaaug

SEQ ID NO: 1940575 - RNA, 19 nt, Homo sapiens
  misc_RNA (1)...(19): siRNA sense strand
ggaauggagucuucuuaau

SEQ ID NO: 1940576 - RNA, 19 nt, Homo sapiens
  misc_RNA (1)...(19): siRNA sense strand
cuggagaccuugacacuua

SEQ ID NO: 1940577 - RNA, 19 nt, Homo sapiens
  misc_RNA (1)...(19): siRNA sense strand
gcugaaaacuccagucuua

SEQ ID NO: 1940578 - RNA, 19 nt, Homo sapiens
  misc_RNA (1)...(19): siRNA sense strand
cagagcacguguauacaua

SEQ ID NO: 1940579 - RNA, 19 nt, Homo sapiens
  misc_RNA (1)...(19): siRNA sense strand
gggaaguccuuugcuuaua

SEQ ID NO: 1940580 - RNA, 19 nt, Homo sapiens
  misc_RNA (1)...(19): siRNA sense strand
agauguggcuguaaacuuu

SEQ ID NO: 1940581 - RNA, 19 nt, Homo sapiens
  misc_RNA (1)...(19): siRNA sense strand
caucuagucucauuaaaca

SEQ ID NO: 1940582 - RNA, 19 nt, Homo sapiens
  misc_RNA (1)...(19): siRNA sense strand
gaauggagucuucuuaaug

SEQ ID NO: 1940583 - RNA, 19 nt, Homo sapiens
  misc_RNA (1)...(19): siRNA sense strand
agaaaggccuuaugagugu

SEQ ID NO: 1940584 - RNA, 19 nt, Homo sapiens
  misc_RNA (1)...(19): siRNA sense strand
agaaaggccuuaugagugu

SEQ ID NO: 1940585 - RNA, 19 nt, Homo sapiens
  misc_RNA (1)...(19): siRNA sense strand
caccaaagcucuucacucu

SEQ ID NO: 1940586 - RNA, 19 nt, Homo sapiens
  misc_RNA (1)...(19): siRNA sense strand
ggagaaaggccuuaugagu

SEQ ID NO: 1940587 - RNA, 19 nt, Homo sapiens
  misc_RNA (1)...(19): siRNA sense strand
ggaaguccuuugcuuauac

SEQ ID NO: 1940588 - RNA, 19 nt, Homo sapiens
  misc_RNA (1)...(19): siRNA sense strand
ggagaaaggccuuaugagu

SEQ ID NO: 1940589 - RNA, 19 nt, Homo sapiens
  misc_RNA (1)...(19): siRNA sense strand
aauggagucuucuuaauga

SEQ ID NO: 1940590 - RNA, 19 nt, Homo sapiens
  misc_RNA (1)...(19): siRNA sense strand
gaaaaguccagucucauua

SEQ ID NO: 1940591 - RNA, 19 nt, Homo sapiens
  misc_RNA (1)...(19): siRNA sense strand
ggagagaggccuuaugagu

SEQ ID NO: 1940592 - RNA, 19 nt, Homo sapiens
  misc_RNA (1)...(19): siRNA sense strand
gcuuauacaucuagucuca

SEQ ID NO: 1940593 - RNA, 19 nt, Homo sapiens
  misc_RNA (1)...(19): siRNA sense strand
gaggaauggagucuucuua

SEQ ID NO: 1940594 - RNA, 19 nt, Homo sapiens
  misc_RNA (1)...(19): siRNA sense strand
gaaaacuccagucuuauua

SEQ ID NO: 1940595 - RNA, 19 nt, Homo sapiens
  misc_RNA (1)...(19): siRNA sense strand
gaacaaguccugccucacu

SEQ ID NO: 1940596 - RNA, 19 nt, Homo sapiens
  misc_RNA (1)...(19): siRNA sense strand
gaaaggccuuaugagugua

SEQ ID NO: 1940597 - RNA, 19 nt, Homo sapiens
  misc_RNA (1)...(19): siRNA sense strand
cagaagagaucacaaacac

SEQ ID NO: 1940598 - RNA, 19 nt, Homo sapiens
  misc_RNA (1)...(19): siRNA sense strand
gaaguccuuugcuuauaca

SEQ ID NO: 1940599 - RNA, 19 nt, Homo sapiens
  misc_RNA (1)...(19): siRNA sense strand
cuagagaaaggccuuauga

SEQ ID NO: 1940600 - RNA, 19 nt, Homo sapiens
  misc_RNA (1)...(19): siRNA sense strand
gggagauccuuugcugaaa

SEQ ID NO: 1940601 - RNA, 19 nt, Homo sapiens
  misc_RNA (1)...(19): siRNA sense strand
gcagagcacguguauacau

SEQ ID NO: 1940602 - RNA, 19 nt, Homo sapiens
  misc_RNA (1)...(19): siRNA sense strand
uugaagauguggcuguaaa

SEQ ID NO: 1940603 - RNA, 19 nt, Homo sapiens
  misc_RNA (1)...(19): siRNA sense strand
gaucacaaacacaggaaug

SEQ ID NO: 1940604 - RNA, 19 nt, Homo sapiens
  misc_RNA (1)...(19): siRNA sense strand
gugggaaguccuuugcuua

SEQ ID NO: 1940605 - RNA, 19 nt, Homo sapiens
  misc_RNA (1)...(19): siRNA sense strand
gcaaagcguuaugaaugca

SEQ ID NO: 1940606 - RNA, 19 nt, Homo sapiens
  misc_RNA (1)...(19): siRNA sense strand
ggagcaaagcguuaugaau

SEQ ID NO: 1940607 - RNA, 19 nt, Homo sapiens
  misc_RNA (1)...(19): siRNA sense strand
gcagugugaccuuugaaga

SEQ ID NO: 1940608 - RNA, 19 nt, Homo sapiens
  misc_RNA (1)...(19): siRNA sense strand
ggagauccuuugcugaaaa

SEQ ID NO: 1940609 - RNA, 19 nt, Homo sapiens
  misc_RNA (1)...(19): siRNA sense strand
gaaugugggagauccuuug

SEQ ID NO: 1940610 - RNA, 19 nt, Homo sapiens
  misc_RNA (1)...(19): siRNA sense strand
ucagagcagugugaccuuu

SEQ ID NO: 1940611 - RNA, 19 nt, Homo sapiens
  misc_RNA (1)...(19): siRNA sense strand
ccauauucaugagagauuu

SEQ ID NO: 1940612 - RNA, 19 nt, Homo sapiens
  misc_RNA (1)...(19): siRNA sense strand
cgucagacacuucacacua

SEQ ID NO: 1940613 - RNA, 19 nt, Homo sapiens
  misc_RNA (1)...(19): siRNA sense strand
gucagacacuucacacuag

SEQ ID NO: 1940614 - RNA, 19 nt, Homo sapiens
  misc_RNA (1)...(19): siRNA sense strand
aagcagagcacguguauac

SEQ ID NO: 1940615 - RNA, 19 nt, Homo sapiens
  misc_RNA (1)...(19): siRNA sense strand
acacuucacacuagagaaa

SEQ ID NO: 1940616 - RNA, 19 nt, Homo sapiens
  misc_RNA (1)...(19): siRNA sense strand
guggagaaaggccuuauga

SEQ ID NO: 1940617 - RNA, 19 nt, Homo sapiens
  misc_RNA (1)...(19): siRNA sense strand
ucacugaacccagaagaga

SEQ ID NO: 1940618 - RNA, 19 nt, Homo sapiens
  misc_RNA (1)...(19): siRNA sense strand
ucagacacuucacacuaga

SEQ ID NO: 1940619 - RNA, 19 nt, Homo sapiens
  misc_RNA (1)...(19): siRNA sense strand
aaaguucacucuggagcaa

SEQ ID NO: 1940620 - RNA, 19 nt, Homo sapiens
  misc_RNA (1)...(19): siRNA sense strand
agagaaaggccuuaugagu

SEQ ID NO: 1940621 - RNA, 19 nt, Homo sapiens
  misc_RNA (1)...(19): siRNA sense strand
aaacacaggaggauucaca

SEQ ID NO: 1940622 - RNA, 19 nt, Homo sapiens
  misc_RNA (1)...(19): siRNA sense strand
gaugaggcagcaccuucua

SEQ ID NO: 1940623 - RNA, 19 nt, Homo sapiens
  misc_RNA (1)...(19): siRNA sense strand
guccuuugcuuauacaucu

SEQ ID NO: 1940624 - RNA, 19 nt, Homo sapiens
  misc_RNA (1)...(19): siRNA sense strand
gcacuggagaaaggccuua

SEQ ID NO: 1940625 - RNA, 19 nt, Homo sapiens
  misc_RNA (1)...(19): siRNA sense strand
ggagaccuugacacuuaua

SEQ ID NO: 1940626 - RNA, 19 nt, Homo sapiens
  misc_RNA (1)...(19): siRNA sense strand
ccuuaugaguguauugaau

SEQ ID NO: 1940627 - RNA, 19 nt, Homo sapiens
  misc_RNA (1)...(19): siRNA sense strand
acuccagucuuauuaaaca

SEQ ID NO: 1940628 - RNA, 19 nt, Homo sapiens
  misc_RNA (1)...(19): siRNA sense strand
cguuaugaaugcaaugaau

SEQ ID NO: 1940629 - RNA, 19 nt, Homo sapiens
  misc_RNA (1)...(19): siRNA sense strand
agagcagugugaccuuuga

SEQ ID NO: 1940630 - RNA, 19 nt, Homo sapiens
  misc_RNA (1)...(19): siRNA sense strand
gaaugugggaaguccuuug

SEQ ID NO: 1940631 - RNA, 19 nt, Homo sapiens
  misc_RNA (1)...(19): siRNA sense strand
gcugaaaaguccagucuca

SEQ ID NO: 1940632 - RNA, 19 nt, Homo sapiens
  misc_RNA (1)...(19): siRNA sense strand
cuaagcagagcacguguau

SEQ ID NO: 1940633 - RNA, 19 nt, Homo sapiens
  misc_RNA (1)...(19): siRNA sense strand
cuggagagaggccuuauga

SEQ ID NO: 1940634 - RNA, 19 nt, Homo sapiens
  misc_RNA (1)...(19): siRNA sense strand
gcagcaaauaugggaaauu

SEQ ID NO: 1940635 - RNA, 19 nt, Homo sapiens
  misc_RNA (1)...(19): siRNA sense strand
uauccucccuggguuguug

SEQ ID NO: 1940636 - RNA, 19 nt, Homo sapiens
  misc_RNA (1)...(19): siRNA sense strand
gggaggucauaguggagaa

SEQ ID NO: 1940637 - RNA, 19 nt, Homo sapiens
  misc_RNA (1)...(19): siRNA sense strand
ccagaagagaucacaaaca

SEQ ID NO: 1940638 - RNA, 19 nt, Homo sapiens
  misc_RNA (1)...(19): siRNA sense strand
gaacccagaagagaucaca

SEQ ID NO: 1940639 - RNA, 19 nt, Homo sapiens
  misc_RNA (1)...(19): siRNA sense strand
ccagucuuauuaaacacuu

SEQ ID NO: 1940640 - RNA, 19 nt, Homo sapiens
  misc_RNA (1)...(19): siRNA sense strand
aggaauggagucuucuuaa

SEQ ID NO: 1940641 - RNA, 19 nt, Homo sapiens
  misc_RNA (1)...(19): siRNA sense strand
gaagaugaggcagcaccuu

SEQ ID NO: 1940642 - RNA, 19 nt, Homo sapiens
  misc_RNA (1)...(19): siRNA sense strand
cuacacuccauauucauga

SEQ ID NO: 1940643 - RNA, 19 nt, Homo sapiens
  misc_RNA (1)...(19): siRNA sense strand
gaagauguggcuguaaacu

SEQ ID NO: 1940644 - RNA, 19 nt, Homo sapiens
  misc_RNA (1)...(19): siRNA sense strand
ggaggaauggagucuucuu

SEQ ID NO: 1940645 - RNA, 19 nt, Homo sapiens
  misc_RNA (1)...(19): siRNA sense strand
gagaucacaaacacaggaa

SEQ ID NO: 1940646 - RNA, 19 nt, Homo sapiens
  misc_RNA (1)...(19): siRNA sense strand
ugggagauccuuugcugaa

SEQ ID NO: 1940647 - RNA, 19 nt, Homo sapiens
  misc_RNA (1)...(19): siRNA sense strand
ccuuaugagugcagugaau

SEQ ID NO: 1940648 - RNA, 19 nt, Homo sapiens
  misc_RNA (1)...(19): siRNA sense strand
agugugaccuuugaagaug

SEQ ID NO: 1940649 - RNA, 19 nt, Homo sapiens
  misc_RNA (1)...(19): siRNA sense strand
agccuacacuccauauuca

SEQ ID NO: 1940650 - RNA, 19 nt, Homo sapiens
  misc_RNA (1)...(19): siRNA sense strand
ccuuaugagugcagcaaau

SEQ ID NO: 1940651 - RNA, 19 nt, Homo sapiens
  misc_RNA (1)...(19): siRNA sense strand
gugcagcaaauaugggaaa

SEQ ID NO: 1940652 - RNA, 19 nt, Homo sapiens
  misc_RNA (1)...(19): siRNA sense strand
ugugggaaguccuuugcuu

SEQ ID NO: 1940653 - RNA, 19 nt, Homo sapiens
  misc_RNA (1)...(19): siRNA sense strand
cuuaugagugcagcaaaua

SEQ ID NO: 1940654 - RNA, 19 nt, Homo sapiens
  misc_RNA (1)...(19): siRNA sense strand
guuaugaaugcaaugaaug

SEQ ID NO: 1940655 - RNA, 19 nt, Homo sapiens
  misc_RNA (1)...(19): siRNA sense strand
ccuguaccgugacgugaug

SEQ ID NO: 1940656 - RNA, 19 nt, Homo sapiens
  misc_RNA (1)...(19): siRNA sense strand
cuggaggaauggagucuuc

SEQ ID NO: 1940657 - RNA, 19 nt, Homo sapiens
  misc_RNA (1)...(19): siRNA sense strand
gcaaugaaugugggaaguc

SEQ ID NO: 1940658 - RNA, 19 nt, Homo sapiens
  misc_RNA (1)...(19): siRNA sense strand
ccacaggaaaguucacucu

SEQ ID NO: 1940659 - RNA, 19 nt, Homo sapiens
  misc_RNA (1)...(19): siRNA sense strand
uaugagugcagcaaauaug

SEQ ID NO: 1940660 - RNA, 19 nt, Homo sapiens
  misc_RNA (1)...(19): siRNA sense strand
cuggagaaaggccuuauga

SEQ ID NO: 1940661 - RNA, 19 nt, Homo sapiens
  misc_RNA (1)...(19): siRNA sense strand
aagccuacacuccauauuc

SEQ ID NO: 1940662 - RNA, 19 nt, Homo sapiens
  misc_RNA (1)...(19): siRNA sense strand
ugaaaacuccagucuuauu

SEQ ID NO: 1940663 - RNA, 19 nt, Homo sapiens
  misc_RNA (1)...(19): siRNA sense strand
ugggaaguccuuugcuuau

SEQ ID NO: 1940664 - RNA, 19 nt, Homo sapiens
  misc_RNA (1)...(19): siRNA sense strand
gaauguucgcacuggagaa

SEQ ID NO: 1940665 - RNA, 19 nt, Homo sapiens
  misc_RNA (1)...(19): siRNA sense strand
aaaguccagucucauuaac

SEQ ID NO: 1940666 - RNA, 19 nt, Homo sapiens
  misc_RNA (1)...(19): siRNA sense strand
ugaaaaguccagucucauu

SEQ ID NO: 1940667 - RNA, 19 nt, Homo sapiens
  misc_RNA (1)...(19): siRNA sense strand
ggccuuaugaguguauuga

SEQ ID NO: 1940668 - RNA, 19 nt, Homo sapiens
  misc_RNA (1)...(19): siRNA sense strand
cuuugaagauguggcugua

SEQ ID NO: 1940669 - RNA, 19 nt, Homo sapiens
  misc_RNA (1)...(19): siRNA sense strand
uggagaccuugacacuuau

SEQ ID NO: 1940670 - RNA, 19 nt, Homo sapiens
  misc_RNA (1)...(19): siRNA sense strand
gagcagugugaccuuugaa

SEQ ID NO: 1940671 - RNA, 19 nt, Homo sapiens
  misc_RNA (1)...(19): siRNA sense strand
aaagcguuaugaaugcaau

SEQ ID NO: 1940672 - RNA, 19 nt, Homo sapiens
  misc_RNA (1)...(19): siRNA sense strand
uaucggaaauccagaauau

SEQ ID NO: 1940673 - RNA, 19 nt, Homo sapiens
  misc_RNA (1)...(19): siRNA sense strand
ucggaaauccagaauauua

SEQ ID NO: 1940674 - RNA, 19 nt, Homo sapiens
  misc_RNA (1)...(19): siRNA sense strand
cagccaguuuccaauguua

SEQ ID NO: 1940675 - RNA, 19 nt, Homo sapiens
  misc_RNA (1)...(19): siRNA sense strand
agaauguacuccugaagug

SEQ ID NO: 1940676 - RNA, 19 nt, Homo sapiens
  misc_RNA (1)...(19): siRNA sense strand
uuagagccauccaggcaaa

SEQ ID NO: 1940677 - RNA, 19 nt, Homo sapiens
  misc_RNA (1)...(19): siRNA sense strand
cggaaauccagaauauuaa

SEQ ID NO: 1940678 - RNA, 19 nt, Homo sapiens
  misc_RNA (1)...(19): siRNA sense strand
gcagucaaucuaucggaaa

SEQ ID NO: 1940679 - RNA, 19 nt, Homo sapiens
  misc_RNA (1)...(19): siRNA sense strand
gaggagaagaagccaauuc

SEQ ID NO: 1940680 - RNA, 19 nt, Homo sapiens
  misc_RNA (1)...(19): siRNA sense strand
ggaccugcagucaaucuau

SEQ ID NO: 1940681 - RNA, 19 nt, Homo sapiens
  misc_RNA (1)...(19): siRNA sense strand
gaccugcagucaaucuauc

SEQ ID NO: 1940682 - RNA, 19 nt, Homo sapiens
  misc_RNA (1)...(19): siRNA sense strand
uaaaauauguccccaaagc

SEQ ID NO: 1940683 - RNA, 19 nt, Homo sapiens
  misc_RNA (1)...(19): siRNA sense strand
gagccauccaggcaaauau

SEQ ID NO: 1940684 - RNA, 19 nt, Homo sapiens
  misc_RNA (1)...(19): siRNA sense strand
cagucaaucuaucggaaau

SEQ ID NO: 1940685 - RNA, 19 nt, Homo sapiens
  misc_RNA (1)...(19): siRNA sense strand
ccccaaagcugaacaguag

SEQ ID NO: 1940686 - RNA, 19 nt, Homo sapiens
  misc_RNA (1)...(19): siRNA sense strand
acagccaguuuccaauguu

SEQ ID NO: 1940687 - RNA, 19 nt, Homo sapiens
  misc_RNA (1)...(19): siRNA sense strand
aaaagaauguacuccugaa

SEQ ID NO: 1940688 - RNA, 19 nt, Homo sapiens
  misc_RNA (1)...(19): siRNA sense strand
acuaaaauauguccccaaa

SEQ ID NO: 1940689 - RNA, 19 nt, Homo sapiens
  misc_RNA (1)...(19): siRNA sense strand
ggagaagaagccaauucca

SEQ ID NO: 1940690 - RNA, 19 nt, Homo sapiens
  misc_RNA (1)...(19): siRNA sense strand
cauccaggcaaauaucaau

SEQ ID NO: 1940691 - RNA, 19 nt, Homo sapiens
  misc_RNA (1)...(19): siRNA sense strand
ggguauaccucccuuguuc

SEQ ID NO: 1940692 - RNA, 19 nt, Homo sapiens
  misc_RNA (1)...(19): siRNA sense strand
ugcaagaccugaccaguug

SEQ ID NO: 1940693 - RNA, 19 nt, Homo sapiens
  misc_RNA (1)...(19): siRNA sense strand
cauugucggugcucacuuu

SEQ ID NO: 1940694 - RNA, 19 nt, Homo sapiens
  misc_RNA (1)...(19): siRNA sense strand
gaacccugcccacagauga

SEQ ID NO: 1940695 - RNA, 19 nt, Homo sapiens
  misc_RNA (1)...(19): siRNA sense strand
agagaacccugcccacaga

SEQ ID NO: 1940696 - RNA, 19 nt, Homo sapiens
  misc_RNA (1)...(19): siRNA sense strand
gagaauggagcccuaaagu

SEQ ID NO: 1940697 - RNA, 19 nt, Homo sapiens
  misc_RNA (1)...(19): siRNA sense strand
cagcgucuccguugauaaa

SEQ ID NO: 1940698 - RNA, 19 nt, Homo sapiens
  misc_RNA (1)...(19): siRNA sense strand
gauaaaaucaucucgcauu

SEQ ID NO: 1940699 - RNA, 19 nt, Homo sapiens
  misc_RNA (1)...(19): siRNA sense strand
gacugcagcugaagaaggu

SEQ ID NO: 1940700 - RNA, 19 nt, Homo sapiens
  misc_RNA (1)...(19): siRNA sense strand
auaccucccuuguucugua

SEQ ID NO: 1940701 - RNA, 19 nt, Homo sapiens
  misc_RNA (1)...(19): siRNA sense strand
gcaguuggagcugugguuu

SEQ ID NO: 1940702 - RNA, 19 nt, Homo sapiens
  misc_RNA (1)...(19): siRNA sense strand
gaccugaccaguugagcuu

SEQ ID NO: 1940703 - RNA, 19 nt, Homo sapiens
  misc_RNA (1)...(19): siRNA sense strand
gaagugcugcgugucauca

SEQ ID NO: 1940704 - RNA, 19 nt, Homo sapiens
  misc_RNA (1)...(19): siRNA sense strand
ucaugggacugcagcugaa

SEQ ID NO: 1940705 - RNA, 19 nt, Homo sapiens
  misc_RNA (1)...(19): siRNA sense strand
ugaucacacugcugcaaga

SEQ ID NO: 1940706 - RNA, 19 nt, Homo sapiens
  misc_RNA (1)...(19): siRNA sense strand
uguguuggcucuugugaag

SEQ ID NO: 1940707 - RNA, 19 nt, Homo sapiens
  misc_RNA (1)...(19): siRNA sense strand
gucagcgucuccguugaua

SEQ ID NO: 1940708 - RNA, 19 nt, Homo sapiens
  misc_RNA (1)...(19): siRNA sense strand
gugaguguguuggcucuug

SEQ ID NO: 1940709 - RNA, 19 nt, Homo sapiens
  misc_RNA (1)...(19): siRNA sense strand
ccaccuggaccugcucuuu

SEQ ID NO: 1940710 - RNA, 19 nt, Homo sapiens
  misc_RNA (1)...(19): siRNA sense strand
ccgcuuccaugccuuuauc

SEQ ID NO: 1940711 - RNA, 19 nt, Homo sapiens
  misc_RNA (1)...(19): siRNA sense strand
gaaggugcacaggagagaa

SEQ ID NO: 1940712 - RNA, 19 nt, Homo sapiens
  misc_RNA (1)...(19): siRNA sense strand
gggaagugcugcgugucau

SEQ ID NO: 1940713 - RNA, 19 nt, Homo sapiens
  misc_RNA (1)...(19): siRNA sense strand
caagccaugcugcacuuug

SEQ ID NO: 1940714 - RNA, 19 nt, Homo sapiens
  misc_RNA (1)...(19): siRNA sense strand
cugcaagaccugaccaguu

SEQ ID NO: 1940715 - RNA, 19 nt, Homo sapiens
  misc_RNA (1)...(19): siRNA sense strand
gcaagaccugaccaguuga

SEQ ID NO: 1940716 - RNA, 19 nt, Homo sapiens
  misc_RNA (1)...(19): siRNA sense strand
caccuggaccugcucuuug

SEQ ID NO: 1940717 - RNA, 19 nt, Homo sapiens
  misc_RNA (1)...(19): siRNA sense strand
ggaagugcugcgugucauc

SEQ ID NO: 1940718 - RNA, 19 nt, Homo sapiens
  misc_RNA (1)...(19): siRNA sense strand
accuggaccugcucuuuga

SEQ ID NO: 1940719 - RNA, 19 nt, Homo sapiens
  misc_RNA (1)...(19): siRNA sense strand
gcaagccaugcugcacuuu

SEQ ID NO: 1940720 - RNA, 19 nt, Homo sapiens
  misc_RNA (1)...(19): siRNA sense strand
ucucccaacuggccacuua

SEQ ID NO: 1940721 - RNA, 19 nt, Homo sapiens
  misc_RNA (1)...(19): siRNA sense strand
gcuguugacuuugcaaaug

SEQ ID NO: 1940722 - RNA, 19 nt, Homo sapiens
  misc_RNA (1)...(19): siRNA sense strand
gaacaggagcagcuauuuu

SEQ ID NO: 1940723 - RNA, 19 nt, Homo sapiens
  misc_RNA (1)...(19): siRNA sense strand
cacuuccgcuguugacuuu

SEQ ID NO: 1940724 - RNA, 19 nt, Homo sapiens
  misc_RNA (1)...(19): siRNA sense strand
gagcagcuauuuucacuca

SEQ ID NO: 1940725 - RNA, 19 nt, Homo sapiens
  misc_RNA (1)...(19): siRNA sense strand
ccaacuggccacuuaggaa

SEQ ID NO: 1940726 - RNA, 19 nt, Homo sapiens
  misc_RNA (1)...(19): siRNA sense strand
uagaacaggagcagcuauu

SEQ ID NO: 1940727 - RNA, 19 nt, Homo sapiens
  misc_RNA (1)...(19): siRNA sense strand
ccacuuaggaagaguaaaa

SEQ ID NO: 1940728 - RNA, 19 nt, Homo sapiens
  misc_RNA (1)...(19): siRNA sense strand
agaacaggagcagcuauuu

SEQ ID NO: 1940729 - RNA, 19 nt, Homo sapiens
  misc_RNA (1)...(19): siRNA sense strand
ggaagauccuuuagaaauu

SEQ ID NO: 1940730 - RNA, 19 nt, Homo sapiens
  misc_RNA (1)...(19): siRNA sense strand
ggagagaaguccuuugaau

SEQ ID NO: 1940731 - RNA, 19 nt, Homo sapiens
  misc_RNA (1)...(19): siRNA sense strand
gggaaauccuucacuaauu

SEQ ID NO: 1940732 - RNA, 19 nt, Homo sapiens
  misc_RNA (1)...(19): siRNA sense strand
gagaaacccuaucagugua

SEQ ID NO: 1940733 - RNA, 19 nt, Homo sapiens
  misc_RNA (1)...(19): siRNA sense strand
agaaauuccucauccuuua

SEQ ID NO: 1940734 - RNA, 19 nt, Homo sapiens
  misc_RNA (1)...(19): siRNA sense strand
gagagaagccuuaugaaug

SEQ ID NO: 1940735 - RNA, 19 nt, Homo sapiens
  misc_RNA (1)...(19): siRNA sense strand
ggaaaagucuucaccuuaa

SEQ ID NO: 1940736 - RNA, 19 nt, Homo sapiens
  misc_RNA (1)...(19): siRNA sense strand
gaagacaacccuacgaaug

SEQ ID NO: 1940737 - RNA, 19 nt, Homo sapiens
  misc_RNA (1)...(19): siRNA sense strand
gaagauccuuuagaaauuc

SEQ ID NO: 1940738 - RNA, 19 nt, Homo sapiens
  misc_RNA (1)...(19): siRNA sense strand
gagaaguccuuugaaugua

SEQ ID NO: 1940739 - RNA, 19 nt, Homo sapiens
  misc_RNA (1)...(19): siRNA sense strand
caacucaccuuacucaaca

SEQ ID NO: 1940740 - RNA, 19 nt, Homo sapiens
  misc_RNA (1)...(19): siRNA sense strand
gggaaagccuucacuagau

SEQ ID NO: 1940741 - RNA, 19 nt, Homo sapiens
  misc_RNA (1)...(19): siRNA sense strand
guggagaggucuucaguga

SEQ ID NO: 1940742 - RNA, 19 nt, Homo sapiens
  misc_RNA (1)...(19): siRNA sense strand
gaauguggaagauccuuua

SEQ ID NO: 1940743 - RNA, 19 nt, Homo sapiens
  misc_RNA (1)...(19): siRNA sense strand
gauggaaacucugugagaa

SEQ ID NO: 1940744 - RNA, 19 nt, Homo sapiens
  misc_RNA (1)...(19): siRNA sense strand
gaaauuccucauccuuuaa

SEQ ID NO: 1940745 - RNA, 19 nt, Homo sapiens
  misc_RNA (1)...(19): siRNA sense strand
agagaagccuuaugaaugu

SEQ ID NO: 1940746 - RNA, 19 nt, Homo sapiens
  misc_RNA (1)...(19): siRNA sense strand
ggaaagccuucacuagauc

SEQ ID NO: 1940747 - RNA, 19 nt, Homo sapiens
  misc_RNA (1)...(19): siRNA sense strand
gaggguaauuguuauggaa

SEQ ID NO: 1940748 - RNA, 19 nt, Homo sapiens
  misc_RNA (1)...(19): siRNA sense strand
ggagagaagccuuaugaau

SEQ ID NO: 1940749 - RNA, 19 nt, Homo sapiens
  misc_RNA (1)...(19): siRNA sense strand
gaaguccuuugaauguaaa

SEQ ID NO: 1940750 - RNA, 19 nt, Homo sapiens
  misc_RNA (1)...(19): siRNA sense strand
caaggaagccucuauugga

SEQ ID NO: 1940751 - RNA, 19 nt, Homo sapiens
  misc_RNA (1)...(19): siRNA sense strand
gggagagccuucaauagau

SEQ ID NO: 1940752 - RNA, 19 nt, Homo sapiens
  misc_RNA (1)...(19): siRNA sense strand
gcacaaggaagccucuauu

SEQ ID NO: 1940753 - RNA, 19 nt, Homo sapiens
  misc_RNA (1)...(19): siRNA sense strand
gaacucacacuggaauaaa

SEQ ID NO: 1940754 - RNA, 19 nt, Homo sapiens
  misc_RNA (1)...(19): siRNA sense strand
gggccuugcuauacacaua

SEQ ID NO: 1940755 - RNA, 19 nt, Homo sapiens
  misc_RNA (1)...(19): siRNA sense strand
gaaacucugugagaauugu

SEQ ID NO: 1940756 - RNA, 19 nt, Homo sapiens
  misc_RNA (1)...(19): siRNA sense strand
ccacacaaauguacggaau

SEQ ID NO: 1940757 - RNA, 19 nt, Homo sapiens
  misc_RNA (1)...(19): siRNA sense strand
agaaguccuuugaauguaa

SEQ ID NO: 1940758 - RNA, 19 nt, Homo sapiens
  misc_RNA (1)...(19): siRNA sense strand
acaagaagcuacaguggau

SEQ ID NO: 1940759 - RNA, 19 nt, Homo sapiens
  misc_RNA (1)...(19): siRNA sense strand
gagagaaguccuuugaaug

SEQ ID NO: 1940760 - RNA, 19 nt, Homo sapiens
  misc_RNA (1)...(19): siRNA sense strand
ggagagccuucaauagauc

SEQ ID NO: 1940761 - RNA, 19 nt, Homo sapiens
  misc_RNA (1)...(19): siRNA sense strand
guacacgggccuugcuaua

SEQ ID NO: 1940762 - RNA, 19 nt, Homo sapiens
  misc_RNA (1)...(19): siRNA sense strand
uguggaagauccuuuagaa

SEQ ID NO: 1940763 - RNA, 19 nt, Homo sapiens
  misc_RNA (1)...(19): siRNA sense strand
ggauacaaaugcagacaag

SEQ ID NO: 1940764 - RNA, 19 nt, Homo sapiens
  misc_RNA (1)...(19): siRNA sense strand
ucaccuuacucaacaugua

SEQ ID NO: 1940765 - RNA, 19 nt, Homo sapiens
  misc_RNA (1)...(19): siRNA sense strand
gaucaacucaccuuacuca

SEQ ID NO: 1940766 - RNA, 19 nt, Homo sapiens
  misc_RNA (1)...(19): siRNA sense strand
ggagagaaacccuaucagu

SEQ ID NO: 1940767 - RNA, 19 nt, Homo sapiens
  misc_RNA (1)...(19): siRNA sense strand
agacaacccuacgaaugua

SEQ ID NO: 1940768 - RNA, 19 nt, Homo sapiens
  misc_RNA (1)...(19): siRNA sense strand
caggagagaagccuuauga

SEQ ID NO: 1940769 - RNA, 19 nt, Homo sapiens
  misc_RNA (1)...(19): siRNA sense strand
gaaauacaaccuagaacca

SEQ ID NO: 1940770 - RNA, 19 nt, Homo sapiens
  misc_RNA (1)...(19): siRNA sense strand
gaauaaaacccuaugaaug

SEQ ID NO: 1940771 - RNA, 19 nt, Homo sapiens
  misc_RNA (1)...(19): siRNA sense strand
gaaaucacacuggagagaa

SEQ ID NO: 1940772 - RNA, 19 nt, Homo sapiens
  misc_RNA (1)...(19): siRNA sense strand
gccaagccuucacucagua

SEQ ID NO: 1940773 - RNA, 19 nt, Homo sapiens
  misc_RNA (1)...(19): siRNA sense strand
gaacaguuuugccuuaaga

SEQ ID NO: 1940774 - RNA, 19 nt, Homo sapiens
  misc_RNA (1)...(19): siRNA sense strand
ucaaauauucacugggaua

SEQ ID NO: 1940775 - RNA, 19 nt, Homo sapiens
  misc_RNA (1)...(19): siRNA sense strand
uggaaacucugugagaauu

SEQ ID NO: 1940776 - RNA, 19 nt, Homo sapiens
  misc_RNA (1)...(19): siRNA sense strand
cugcuuaacuucagaaugg

SEQ ID NO: 1940777 - RNA, 19 nt, Homo sapiens
  misc_RNA (1)...(19): siRNA sense strand
gaacuuuccaaacuuaauc

SEQ ID NO: 1940778 - RNA, 19 nt, Homo sapiens
  misc_RNA (1)...(19): siRNA sense strand
aaaucacacuggagagaaa

SEQ ID NO: 1940779 - RNA, 19 nt, Homo sapiens
  misc_RNA (1)...(19): siRNA sense strand
uggaagauccuuuagaaau

SEQ ID NO: 1940780 - RNA, 19 nt, Homo sapiens
  misc_RNA (1)...(19): siRNA sense strand
ggccaagccuucacucagu

SEQ ID NO: 1940781 - RNA, 19 nt, Homo sapiens
  misc_RNA (1)...(19): siRNA sense strand
acacaaauguacggaaugu

SEQ ID NO: 1940782 - RNA, 19 nt, Homo sapiens
  misc_RNA (1)...(19): siRNA sense strand
gaauaaaaccacacaaaug

SEQ ID NO: 1940783 - RNA, 19 nt, Homo sapiens
  misc_RNA (1)...(19): siRNA sense strand
ggauggaaacucugugaga

SEQ ID NO: 1940784 - RNA, 19 nt, Homo sapiens
  misc_RNA (1)...(19): siRNA sense strand
agagaaacccuaucagugu

SEQ ID NO: 1940785 - RNA, 19 nt, Homo sapiens
  misc_RNA (1)...(19): siRNA sense strand
uuugauaugucccaugauu

SEQ ID NO: 1940786 - RNA, 19 nt, Homo sapiens
  misc_RNA (1)...(19): siRNA sense strand
agagaaguccuuugaaugu

SEQ ID NO: 1940787 - RNA, 19 nt, Homo sapiens
  misc_RNA (1)...(19): siRNA sense strand
aauacaaccuagaaccaaa

SEQ ID NO: 1940788 - RNA, 19 nt, Homo sapiens
  misc_RNA (1)...(19): siRNA sense strand
gaaccaaacggucaucacu

SEQ ID NO: 1940789 - RNA, 19 nt, Homo sapiens
  misc_RNA (1)...(19): siRNA sense strand
gaauguaaagaauguggaa

SEQ ID NO: 1940790 - RNA, 19 nt, Homo sapiens
  misc_RNA (1)...(19): siRNA sense strand
uaugucccaugauuucuuu

SEQ ID NO: 1940791 - RNA, 19 nt, Homo sapiens
  misc_RNA (1)...(19): siRNA sense strand
gaaugggaaauacaaccua

SEQ ID NO: 1940792 - RNA, 19 nt, Homo sapiens
  misc_RNA (1)...(19): siRNA sense strand
uagaaauuccucauccuuu

SEQ ID NO: 1940793 - RNA, 19 nt, Homo sapiens
  misc_RNA (1)...(19): siRNA sense strand
ggaagacaacccuacgaau

SEQ ID NO: 1940794 - RNA, 19 nt, Homo sapiens
  misc_RNA (1)...(19): siRNA sense strand
ugggagagccuucaauaga

SEQ ID NO: 1940795 - RNA, 19 nt, Homo sapiens
  misc_RNA (1)...(19): siRNA sense strand
acacgggccuugcuauaca

SEQ ID NO: 1940796 - RNA, 19 nt, Homo sapiens
  misc_RNA (1)...(19): siRNA sense strand
caacauguaagaacucaca

SEQ ID NO: 1940797 - RNA, 19 nt, Homo sapiens
  misc_RNA (1)...(19): siRNA sense strand
gcaucagugugcacaagga

SEQ ID NO: 1940798 - RNA, 19 nt, Homo sapiens
  misc_RNA (1)...(19): siRNA sense strand
acacaggagagaagccuua

SEQ ID NO: 1940799 - RNA, 19 nt, Homo sapiens
  misc_RNA (1)...(19): siRNA sense strand
gcuauacacauacgaaauc

SEQ ID NO: 1940800 - RNA, 19 nt, Homo sapiens
  misc_RNA (1)...(19): siRNA sense strand
ccuuugauaugucccauga

SEQ ID NO: 1940801 - RNA, 19 nt, Homo sapiens
  misc_RNA (1)...(19): siRNA sense strand
gaaaagacagcaucagugu

SEQ ID NO: 1940802 - RNA, 19 nt, Homo sapiens
  misc_RNA (1)...(19): siRNA sense strand
cuacgaauguaaggaaugu

SEQ ID NO: 1940803 - RNA, 19 nt, Homo sapiens
  misc_RNA (1)...(19): siRNA sense strand
aauauucacugggauacaa

SEQ ID NO: 1940804 - RNA, 19 nt, Homo sapiens
  misc_RNA (1)...(19): siRNA sense strand
aauagaucuucaacgcuua

SEQ ID NO: 1940805 - RNA, 19 nt, Homo sapiens
  misc_RNA (1)...(19): siRNA sense strand
gaagccuuaugaauguguu

SEQ ID NO: 1940806 - RNA, 19 nt, Homo sapiens
  misc_RNA (1)...(19): siRNA sense strand
ggaaacucugugagaauug

SEQ ID NO: 1940807 - RNA, 19 nt, Homo sapiens
  misc_RNA (1)...(19): siRNA sense strand
ucacaguggagaaagguaa

SEQ ID NO: 1940808 - RNA, 19 nt, Homo sapiens
  misc_RNA (1)...(19): siRNA sense strand
aagcuacaguggauggaaa

SEQ ID NO: 1940809 - RNA, 19 nt, Homo sapiens
  misc_RNA (1)...(19): siRNA sense strand
ggaauaaaacccuaugaau

SEQ ID NO: 1940810 - RNA, 19 nt, Homo sapiens
  misc_RNA (1)...(19): siRNA sense strand
auacaaaugcagacaagaa

SEQ ID NO: 1940811 - RNA, 19 nt, Homo sapiens
  misc_RNA (1)...(19): siRNA sense strand
ggaauaaaaccacacaaau

SEQ ID NO: 1940812 - RNA, 19 nt, Homo sapiens
  misc_RNA (1)...(19): siRNA sense strand
ucacaugggaauccacauu

SEQ ID NO: 1940813 - RNA, 19 nt, Homo sapiens
  misc_RNA (1)...(19): siRNA sense strand
aaagcaguguguagcaguu

SEQ ID NO: 1940814 - RNA, 19 nt, Homo sapiens
  misc_RNA (1)...(19): siRNA sense strand
uaagaacucacacuggaau

SEQ ID NO: 1940815 - RNA, 19 nt, Homo sapiens
  misc_RNA (1)...(19): siRNA sense strand
guaagaacucacacuggaa

SEQ ID NO: 1940816 - RNA, 19 nt, Homo sapiens
  misc_RNA (1)...(19): siRNA sense strand
ucacugggauacaaaugca

SEQ ID NO: 1940817 - RNA, 19 nt, Homo sapiens
  misc_RNA (1)...(19): siRNA sense strand
uagaucaacucaccuuacu

SEQ ID NO: 1940818 - RNA, 19 nt, Homo sapiens
  misc_RNA (1)...(19): siRNA sense strand
ugggaaagccuucacuaga

SEQ ID NO: 1940819 - RNA, 19 nt, Homo sapiens
  misc_RNA (1)...(19): siRNA sense strand
ugauaugucccaugauuuc

SEQ ID NO: 1940820 - RNA, 19 nt, Homo sapiens
  misc_RNA (1)...(19): siRNA sense strand
ccucauccuuuaauguuca

SEQ ID NO: 1940821 - RNA, 19 nt, Homo sapiens
  misc_RNA (1)...(19): siRNA sense strand
cgaaaucacacuggagaga

SEQ ID NO: 1940822 - RNA, 19 nt, Homo sapiens
  misc_RNA (1)...(19): siRNA sense strand
caucguaguaaacauuuga

SEQ ID NO: 1940823 - RNA, 19 nt, Homo sapiens
  misc_RNA (1)...(19): siRNA sense strand
ggaacacuuuugaggguaa

SEQ ID NO: 1940824 - RNA, 19 nt, Homo sapiens
  misc_RNA (1)...(19): siRNA sense strand
gaaagccuucacuagauca

SEQ ID NO: 1940825 - RNA, 19 nt, Homo sapiens
  misc_RNA (1)...(19): siRNA sense strand
gugggaaauccuucacuaa

SEQ ID NO: 1940826 - RNA, 19 nt, Homo sapiens
  misc_RNA (1)...(19): siRNA sense strand
agaauggagggaacacuuu

SEQ ID NO: 1940827 - RNA, 19 nt, Homo sapiens
  misc_RNA (1)...(19): siRNA sense strand
gagaagccuuaugaaugug

SEQ ID NO: 1940828 - RNA, 19 nt, Homo sapiens
  misc_RNA (1)...(19): siRNA sense strand
ugugggagagccuucaaua

SEQ ID NO: 1940829 - RNA, 19 nt, Homo sapiens
  misc_RNA (1)...(19): siRNA sense strand
uaaccgugcuggccuauga

SEQ ID NO: 1940830 - RNA, 19 nt, Homo sapiens
  misc_RNA (1)...(19): siRNA sense strand
caacucuucuuccaucauu

SEQ ID NO: 1940831 - RNA, 19 nt, Homo sapiens
  misc_RNA (1)...(19): siRNA sense strand
gaagugaaaugcagaucag

SEQ ID NO: 1940832 - RNA, 19 nt, Homo sapiens
  misc_RNA (1)...(19): siRNA sense strand
ccuggucacuccaacaaua

SEQ ID NO: 1940833 - RNA, 19 nt, Homo sapiens
  misc_RNA (1)...(19): siRNA sense strand
uuucguaccucuuugcuaa

SEQ ID NO: 1940834 - RNA, 19 nt, Homo sapiens
  misc_RNA (1)...(19): siRNA sense strand
aaaagaaacuggccaaaau

SEQ ID NO: 1940835 - RNA, 19 nt, Homo sapiens
  misc_RNA (1)...(19): siRNA sense strand
cuaaaucgaacacuguaua

SEQ ID NO: 1940836 - RNA, 19 nt, Homo sapiens
  misc_RNA (1)...(19): siRNA sense strand
caauucaagugaucaagau

SEQ ID NO: 1940837 - RNA, 19 nt, Homo sapiens
  misc_RNA (1)...(19): siRNA sense strand
ggagggccauuaccuacau

SEQ ID NO: 1940838 - RNA, 19 nt, Homo sapiens
  misc_RNA (1)...(19): siRNA sense strand
gaaaagaaacuggccaaaa

SEQ ID NO: 1940839 - RNA, 19 nt, Homo sapiens
  misc_RNA (1)...(19): siRNA sense strand
ucuguuggaugccuuauau

SEQ ID NO: 1940840 - RNA, 19 nt, Homo sapiens
  misc_RNA (1)...(19): siRNA sense strand
ugccaacgauuccuccuuu

SEQ ID NO: 1940841 - RNA, 19 nt, Homo sapiens
  misc_RNA (1)...(19): siRNA sense strand
ggaagugaaaugcagauca

SEQ ID NO: 1940842 - RNA, 19 nt, Homo sapiens
  misc_RNA (1)...(19): siRNA sense strand
gccagaggccugcuaaaga

SEQ ID NO: 1940843 - RNA, 19 nt, Homo sapiens
  misc_RNA (1)...(19): siRNA sense strand
ccaaggaugccaacgauuc

SEQ ID NO: 1940844 - RNA, 19 nt, Homo sapiens
  misc_RNA (1)...(19): siRNA sense strand
cagaucagacccauuguga

SEQ ID NO: 1940845 - RNA, 19 nt, Homo sapiens
  misc_RNA (1)...(19): siRNA sense strand
ccagaggccugcuaaagac

SEQ ID NO: 1940846 - RNA, 19 nt, Homo sapiens
  misc_RNA (1)...(19): siRNA sense strand
ucaccuuccuggucuguug

SEQ ID NO: 1940847 - RNA, 19 nt, Homo sapiens
  misc_RNA (1)...(19): siRNA sense strand
ccaaguucguccuuuguag

SEQ ID NO: 1940848 - RNA, 19 nt, Homo sapiens
  misc_RNA (1)...(19): siRNA sense strand
ucagacaauucaagugauc

SEQ ID NO: 1940849 - RNA, 19 nt, Homo sapiens
  misc_RNA (1)...(19): siRNA sense strand
caacgauuccuccuuugug

SEQ ID NO: 1940850 - RNA, 19 nt, Homo sapiens
  misc_RNA (1)...(19): siRNA sense strand
aauccaaguucguccuuug

SEQ ID NO: 1940851 - RNA, 19 nt, Homo sapiens
  misc_RNA (1)...(19): siRNA sense strand
aaucgaacacuguauacaa

SEQ ID NO: 1940852 - RNA, 19 nt, Homo sapiens
  misc_RNA (1)...(19): siRNA sense strand
gcagaucagacccauugug

SEQ ID NO: 1940853 - RNA, 19 nt, Homo sapiens
  misc_RNA (1)...(19): siRNA sense strand
guaccucuuugcuaaaucg

SEQ ID NO: 1940854 - RNA, 19 nt, Homo sapiens
  misc_RNA (1)...(19): siRNA sense strand
gaggccugcuaaagaccua

SEQ ID NO: 1940855 - RNA, 19 nt, Homo sapiens
  misc_RNA (1)...(19): siRNA sense strand
cuucagacaauucaaguga

SEQ ID NO: 1940856 - RNA, 19 nt, Homo sapiens
  misc_RNA (1)...(19): siRNA sense strand
gcugcacuguggacuggaa

SEQ ID NO: 1940857 - RNA, 19 nt, Homo sapiens
  misc_RNA (1)...(19): siRNA sense strand
augccagagugaucaauuu

SEQ ID NO: 1940858 - RNA, 19 nt, Homo sapiens
  misc_RNA (1)...(19): siRNA sense strand
gaucuucagacaauucaag

SEQ ID NO: 1940859 - RNA, 19 nt, Homo sapiens
  misc_RNA (1)...(19): siRNA sense strand
gccaacgauuccuccuuug

SEQ ID NO: 1940860 - RNA, 19 nt, Homo sapiens
  misc_RNA (1)...(19): siRNA sense strand
ggcagccucuucgggauug

SEQ ID NO: 1940861 - RNA, 19 nt, Homo sapiens
  misc_RNA (1)...(19): siRNA sense strand
uaauccaaguucguccuuu

SEQ ID NO: 1940862 - RNA, 19 nt, Homo sapiens
  misc_RNA (1)...(19): siRNA sense strand
gugcuuuucuuauuucuug

SEQ ID NO: 1940863 - RNA, 19 nt, Homo sapiens
  misc_RNA (1)...(19): siRNA sense strand
gugcuggccuaugaacguu

SEQ ID NO: 1940864 - RNA, 19 nt, Homo sapiens
  misc_RNA (1)...(19): siRNA sense strand
acaauucaagugaucaaga

SEQ ID NO: 1940865 - RNA, 19 nt, Homo sapiens
  misc_RNA (1)...(19): siRNA sense strand
cuacaucuggcucuacuca

SEQ ID NO: 1940866 - RNA, 19 nt, Homo sapiens
  misc_RNA (1)...(19): siRNA sense strand
ucagacccauugugauguc

SEQ ID NO: 1940867 - RNA, 19 nt, Homo sapiens
  misc_RNA (1)...(19): siRNA sense strand
uuaccuacaucuggcucua

SEQ ID NO: 1940868 - RNA, 19 nt, Homo sapiens
  misc_RNA (1)...(19): siRNA sense strand
ccaacgauuccuccuuugu

SEQ ID NO: 1940869 - RNA, 19 nt, Homo sapiens
  misc_RNA (1)...(19): siRNA sense strand
gcaccucuccugggaugga

SEQ ID NO: 1940870 - RNA, 19 nt, Homo sapiens
  misc_RNA (1)...(19): siRNA sense strand
uaaaucgaacacuguauac

SEQ ID NO: 1940871 - RNA, 19 nt, Homo sapiens
  misc_RNA (1)...(19): siRNA sense strand
ccagugauuuaugucuuca

SEQ ID NO: 1940872 - RNA, 19 nt, Homo sapiens
  misc_RNA (1)...(19): siRNA sense strand
gcacuguggacuggaaauc

SEQ ID NO: 1940873 - RNA, 19 nt, Homo sapiens
  misc_RNA (1)...(19): siRNA sense strand
augcagaucagacccauug

SEQ ID NO: 1940874 - RNA, 19 nt, Homo sapiens
  misc_RNA (1)...(19): siRNA sense strand
agugauuuaugucuucaug

SEQ ID NO: 1940875 - RNA, 19 nt, Homo sapiens
  misc_RNA (1)...(19): siRNA sense strand
ucacuccaacaauaucuau

SEQ ID NO: 1940876 - RNA, 19 nt, Homo sapiens
  misc_RNA (1)...(19): siRNA sense strand
cuucgggauuguuuccauu

SEQ ID NO: 1940877 - RNA, 19 nt, Homo sapiens
  misc_RNA (1)...(19): siRNA sense strand
gaacacuguauacaaucca

SEQ ID NO: 1940878 - RNA, 19 nt, Homo sapiens
  misc_RNA (1)...(19): siRNA sense strand
uaucgugaucugcuucuug

SEQ ID NO: 1940879 - RNA, 19 nt, Homo sapiens
  misc_RNA (1)...(19): siRNA sense strand
ggccuaugaacguuacauu

SEQ ID NO: 1940880 - RNA, 19 nt, Homo sapiens
  misc_RNA (1)...(19): siRNA sense strand
ugccuuauaucgugaucug

SEQ ID NO: 1940881 - RNA, 19 nt, Homo sapiens
  misc_RNA (1)...(19): siRNA sense strand
cgaacacuguauacaaucc

SEQ ID NO: 1940882 - RNA, 19 nt, Homo sapiens
  misc_RNA (1)...(19): siRNA sense strand
aucgaacacuguauacaau

SEQ ID NO: 1940883 - RNA, 19 nt, Homo sapiens
  misc_RNA (1)...(19): siRNA sense strand
gcuaaaucgaacacuguau

SEQ ID NO: 1940884 - RNA, 19 nt, Homo sapiens
  misc_RNA (1)...(19): siRNA sense strand
gcaggaagaucgcuugagu

SEQ ID NO: 1940885 - RNA, 19 nt, Homo sapiens
  misc_RNA (1)...(19): siRNA sense strand
acauuuagguugcuacauu

SEQ ID NO: 1940886 - RNA, 19 nt, Homo sapiens
  misc_RNA (1)...(19): siRNA sense strand
ggagguggcagcaguggua

SEQ ID NO: 1940887 - RNA, 19 nt, Homo sapiens
  misc_RNA (1)...(19): siRNA sense strand
cauuuagguugcuacauuu

SEQ ID NO: 1940888 - RNA, 19 nt, Homo sapiens
  misc_RNA (1)...(19): siRNA sense strand
ucgcuugaguccaggauuu

SEQ ID NO: 1940889 - RNA, 19 nt, Homo sapiens
  misc_RNA (1)...(19): siRNA sense strand
gcacauuaugcuaaaguau

SEQ ID NO: 1940890 - RNA, 19 nt, Homo sapiens
  misc_RNA (1)...(19): siRNA sense strand
gcugauggacauuuagguu

SEQ ID NO: 1940891 - RNA, 19 nt, Homo sapiens
  misc_RNA (1)...(19): siRNA sense strand
ccaucuggcugacaugaag

SEQ ID NO: 1940892 - RNA, 19 nt, Homo sapiens
  misc_RNA (1)...(19): siRNA sense strand
uggcugacaugaagaacug

SEQ ID NO: 1940893 - RNA, 19 nt, Homo sapiens
  misc_RNA (1)...(19): siRNA sense strand
aguauucacugcugaugga

SEQ ID NO: 1940894 - RNA, 19 nt, Homo sapiens
  misc_RNA (1)...(19): siRNA sense strand
cacugcugauggacauuua

SEQ ID NO: 1940895 - RNA, 19 nt, Homo sapiens
  misc_RNA (1)...(19): siRNA sense strand
ccucaucucuuaaaacugu

SEQ ID NO: 1940896 - RNA, 19 nt, Homo sapiens
  misc_RNA (1)...(19): siRNA sense strand
ggacauuuagguugcuaca

SEQ ID NO: 1940897 - RNA, 19 nt, Homo sapiens
  misc_RNA (1)...(19): siRNA sense strand
cagcuaugcaagagguuaa

SEQ ID NO: 1940898 - RNA, 19 nt, Homo sapiens
  misc_RNA (1)...(19): siRNA sense strand
gaccucaucucuuaaaacu

SEQ ID NO: 1940899 - RNA, 19 nt, Homo sapiens
  misc_RNA (1)...(19): siRNA sense strand
ccagcuaugcaagagguua

SEQ ID NO: 1940900 - RNA, 19 nt, Homo sapiens
  misc_RNA (1)...(19): siRNA sense strand
ucacugcugauggacauuu

SEQ ID NO: 1940901 - RNA, 19 nt, Homo sapiens
  misc_RNA (1)...(19): siRNA sense strand
uaaaguauucacugcugau

SEQ ID NO: 1940902 - RNA, 19 nt, Homo sapiens
  misc_RNA (1)...(19): siRNA sense strand
gagguuaaagcaggaagau

SEQ ID NO: 1940903 - RNA, 19 nt, Homo sapiens
  misc_RNA (1)...(19): siRNA sense strand
cuacaugccugcuaacuua

SEQ ID NO: 1940904 - RNA, 19 nt, Homo sapiens
  misc_RNA (1)...(19): siRNA sense strand
gaaauacuuagcacaguua

SEQ ID NO: 1940905 - RNA, 19 nt, Homo sapiens
  misc_RNA (1)...(19): siRNA sense strand
gaacagugagguugaguuu

SEQ ID NO: 1940906 - RNA, 19 nt, Homo sapiens
  misc_RNA (1)...(19): siRNA sense strand
gaauguagcuaccgaagag

SEQ ID NO: 1940907 - RNA, 19 nt, Homo sapiens
  misc_RNA (1)...(19): siRNA sense strand
caaguaugauguacaagaa

SEQ ID NO: 1940908 - RNA, 19 nt, Homo sapiens
  misc_RNA (1)...(19): siRNA sense strand
gcaaaccuacuccagauaa

SEQ ID NO: 1940909 - RNA, 19 nt, Homo sapiens
  misc_RNA (1)...(19): siRNA sense strand
ccgaguaggugauguuaaa

SEQ ID NO: 1940910 - RNA, 19 nt, Homo sapiens
  misc_RNA (1)...(19): siRNA sense strand
acuaaacaguguacgauua

SEQ ID NO: 1940911 - RNA, 19 nt, Homo sapiens
  misc_RNA (1)...(19): siRNA sense strand
ugacuuggaugaaauuguu

SEQ ID NO: 1940912 - RNA, 19 nt, Homo sapiens
  misc_RNA (1)...(19): siRNA sense strand
gaaugaagcccuaaaguac

SEQ ID NO: 1940913 - RNA, 19 nt, Homo sapiens
  misc_RNA (1)...(19): siRNA sense strand
ugaaugaagcccuaaagua

SEQ ID NO: 1940914 - RNA, 19 nt, Homo sapiens
  misc_RNA (1)...(19): siRNA sense strand
ugacaucauucuccgagua

SEQ ID NO: 1940915 - RNA, 19 nt, Homo sapiens
  misc_RNA (1)...(19): siRNA sense strand
agggaaaucuggacucuuu

SEQ ID NO: 1940916 - RNA, 19 nt, Homo sapiens
  misc_RNA (1)...(19): siRNA sense strand
cgaccuacaugccugcuaa

SEQ ID NO: 1940917 - RNA, 19 nt, Homo sapiens
  misc_RNA (1)...(19): siRNA sense strand
uacaagaacgccagaaaua

SEQ ID NO: 1940918 - RNA, 19 nt, Homo sapiens
  misc_RNA (1)...(19): siRNA sense strand
ccacuugcauucugaacaa

SEQ ID NO: 1940919 - RNA, 19 nt, Homo sapiens
  misc_RNA (1)...(19): siRNA sense strand
guauuggaauuucucguuu

SEQ ID NO: 1940920 - RNA, 19 nt, Homo sapiens
  misc_RNA (1)...(19): siRNA sense strand
cauagacucucccaucaga

SEQ ID NO: 1940921 - RNA, 19 nt, Homo sapiens
  misc_RNA (1)...(19): siRNA sense strand
gauaaaacuuguccugaaa

SEQ ID NO: 1940922 - RNA, 19 nt, Homo sapiens
  misc_RNA (1)...(19): siRNA sense strand
cgaacucugugacaucauu

SEQ ID NO: 1940923 - RNA, 19 nt, Homo sapiens
  misc_RNA (1)...(19): siRNA sense strand
gcauuagagucuuggauca

SEQ ID NO: 1940924 - RNA, 19 nt, Homo sapiens
  misc_RNA (1)...(19): siRNA sense strand
caaaccuacuccagauaaa

SEQ ID NO: 1940925 - RNA, 19 nt, Homo sapiens
  misc_RNA (1)...(19): siRNA sense strand
cagcaaaccuacuccagau

SEQ ID NO: 1940926 - RNA, 19 nt, Homo sapiens
  misc_RNA (1)...(19): siRNA sense strand
acagugagguugaguuuca

SEQ ID NO: 1940927 - RNA, 19 nt, Homo sapiens
  misc_RNA (1)...(19): siRNA sense strand
ggcagccacuaaauacaua

SEQ ID NO: 1940928 - RNA, 19 nt, Homo sapiens
  misc_RNA (1)...(19): siRNA sense strand
gugaugaucgcacuuguaa

SEQ ID NO: 1940929 - RNA, 19 nt, Homo sapiens
  misc_RNA (1)...(19): siRNA sense strand
ucgcugugcucccaaagua

SEQ ID NO: 1940930 - RNA, 19 nt, Homo sapiens
  misc_RNA (1)...(19): siRNA sense strand
cugcagggcuugaaucuuc

SEQ ID NO: 1940931 - RNA, 19 nt, Homo sapiens
  misc_RNA (1)...(19): siRNA sense strand
caaugacuguuugaaugua

SEQ ID NO: 1940932 - RNA, 19 nt, Homo sapiens
  misc_RNA (1)...(19): siRNA sense strand
agaaauacuuagcacaguu

SEQ ID NO: 1940933 - RNA, 19 nt, Homo sapiens
  misc_RNA (1)...(19): siRNA sense strand
aaagcuauguucacuggaa

SEQ ID NO: 1940934 - RNA, 19 nt, Homo sapiens
  misc_RNA (1)...(19): siRNA sense strand
gcuuacacaugcugacuug

SEQ ID NO: 1940935 - RNA, 19 nt, Homo sapiens
  misc_RNA (1)...(19): siRNA sense strand
uaacccacuugcauucuga

SEQ ID NO: 1940936 - RNA, 19 nt, Homo sapiens
  misc_RNA (1)...(19): siRNA sense strand
uuaccauuguugaguguua

SEQ ID NO: 1940937 - RNA, 19 nt, Homo sapiens
  misc_RNA (1)...(19): siRNA sense strand
cuaaauacauaugccagaa

SEQ ID NO: 1940938 - RNA, 19 nt, Homo sapiens
  misc_RNA (1)...(19): siRNA sense strand
aaacuuguccugaaagaau

SEQ ID NO: 1940939 - RNA, 19 nt, Homo sapiens
  misc_RNA (1)...(19): siRNA sense strand
uaacuuaacccacuugcau

SEQ ID NO: 1940940 - RNA, 19 nt, Homo sapiens
  misc_RNA (1)...(19): siRNA sense strand
gaucgcacuuguaaacauc

SEQ ID NO: 1940941 - RNA, 19 nt, Homo sapiens
  misc_RNA (1)...(19): siRNA sense strand
gaagcaaaucaucuuauuc

SEQ ID NO: 1940942 - RNA, 19 nt, Homo sapiens
  misc_RNA (1)...(19): siRNA sense strand
guacaagaacgccagaaau

SEQ ID NO: 1940943 - RNA, 19 nt, Homo sapiens
  misc_RNA (1)...(19): siRNA sense strand
uccaaugacuguuugaaug

SEQ ID NO: 1940944 - RNA, 19 nt, Homo sapiens
  misc_RNA (1)...(19): siRNA sense strand
gaugaucgcacuuguaaac

SEQ ID NO: 1940945 - RNA, 19 nt, Homo sapiens
  misc_RNA (1)...(19): siRNA sense strand
gcccguauuucaaagcuau

SEQ ID NO: 1940946 - RNA, 19 nt, Homo sapiens
  misc_RNA (1)...(19): siRNA sense strand
ggagggaaaucuggacucu

SEQ ID NO: 1940947 - RNA, 19 nt, Homo sapiens
  misc_RNA (1)...(19): siRNA sense strand
uauguucacuggaaaccuu

SEQ ID NO: 1940948 - RNA, 19 nt, Homo sapiens
  misc_RNA (1)...(19): siRNA sense strand
ucaaguaugauguacaaga

SEQ ID NO: 1940949 - RNA, 19 nt, Homo sapiens
  misc_RNA (1)...(19): siRNA sense strand
caacuugauccugguaauu

SEQ ID NO: 1940950 - RNA, 19 nt, Homo sapiens
  misc_RNA (1)...(19): siRNA sense strand
ccaaugacuguuugaaugu

SEQ ID NO: 1940951 - RNA, 19 nt, Homo sapiens
  misc_RNA (1)...(19): siRNA sense strand
auacuuagcacaguuacua

SEQ ID NO: 1940952 - RNA, 19 nt, Homo sapiens
  misc_RNA (1)...(19): siRNA sense strand
ccugguaauuguauuggaa

SEQ ID NO: 1940953 - RNA, 19 nt, Homo sapiens
  misc_RNA (1)...(19): siRNA sense strand
caagaacgccagaaauacu

SEQ ID NO: 1940954 - RNA, 19 nt, Homo sapiens
  misc_RNA (1)...(19): siRNA sense strand
cgucagcccguauuucaaa

SEQ ID NO: 1940955 - RNA, 19 nt, Homo sapiens
  misc_RNA (1)...(19): siRNA sense strand
guguuaaguuucucacuag

SEQ ID NO: 1940956 - RNA, 19 nt, Homo sapiens
  misc_RNA (1)...(19): siRNA sense strand
uugccagacugaagaguuu

SEQ ID NO: 1940957 - RNA, 19 nt, Homo sapiens
  misc_RNA (1)...(19): siRNA sense strand
guacgauuaccauuguuga

SEQ ID NO: 1940958 - RNA, 19 nt, Homo sapiens
  misc_RNA (1)...(19): siRNA sense strand
aacauagacucucccauca

SEQ ID NO: 1940959 - RNA, 19 nt, Homo sapiens
  misc_RNA (1)...(19): siRNA sense strand
ccaacuugauccugguaau

SEQ ID NO: 1940960 - RNA, 19 nt, Homo sapiens
  misc_RNA (1)...(19): siRNA sense strand
gauuaccauuguugagugu

SEQ ID NO: 1940961 - RNA, 19 nt, Homo sapiens
  misc_RNA (1)...(19): siRNA sense strand
cagaaauacuuagcacagu

SEQ ID NO: 1940962 - RNA, 19 nt, Homo sapiens
  misc_RNA (1)...(19): siRNA sense strand
caugcugacuuggaugaaa

SEQ ID NO: 1940963 - RNA, 19 nt, Homo sapiens
  misc_RNA (1)...(19): siRNA sense strand
guuucucacuagacuauau

SEQ ID NO: 1940964 - RNA, 19 nt, Homo sapiens
  misc_RNA (1)...(19): siRNA sense strand
gauccugguaauuguauug

SEQ ID NO: 1940965 - RNA, 19 nt, Homo sapiens
  misc_RNA (1)...(19): siRNA sense strand
cacgaacucugugacauca

SEQ ID NO: 1940966 - RNA, 19 nt, Homo sapiens
  misc_RNA (1)...(19): siRNA sense strand
uaaaacuuguccugaaaga

SEQ ID NO: 1940967 - RNA, 19 nt, Homo sapiens
  misc_RNA (1)...(19): siRNA sense strand
aagcuauguucacuggaaa

SEQ ID NO: 1940968 - RNA, 19 nt, Homo sapiens
  misc_RNA (1)...(19): siRNA sense strand
gcaguaggagggaaaucug

SEQ ID NO: 1940969 - RNA, 19 nt, Homo sapiens
  misc_RNA (1)...(19): siRNA sense strand
aguguacgauuaccauugu

SEQ ID NO: 1940970 - RNA, 19 nt, Homo sapiens
  misc_RNA (1)...(19): siRNA sense strand
cacaguuacuaaacagugu

SEQ ID NO: 1940971 - RNA, 19 nt, Homo sapiens
  misc_RNA (1)...(19): siRNA sense strand
agauaaaacuuguccugaa

SEQ ID NO: 1940972 - RNA, 19 nt, Homo sapiens
  misc_RNA (1)...(19): siRNA sense strand
ugaucgcacuuguaaacau

SEQ ID NO: 1940973 - RNA, 19 nt, Homo sapiens
  misc_RNA (1)...(19): siRNA sense strand
gacuauaugaagcaaauca

SEQ ID NO: 1940974 - RNA, 19 nt, Homo sapiens
  misc_RNA (1)...(19): siRNA sense strand
uuaaguuucucacuagacu

SEQ ID NO: 1940975 - RNA, 19 nt, Homo sapiens
  misc_RNA (1)...(19): siRNA sense strand
uaccauuguugaguguuaa

SEQ ID NO: 1940976 - RNA, 19 nt, Homo sapiens
  misc_RNA (1)...(19): siRNA sense strand
agaacgccagaaauacuua

SEQ ID NO: 1940977 - RNA, 19 nt, Homo sapiens
  misc_RNA (1)...(19): siRNA sense strand
uagcacaguuacuaaacag

SEQ ID NO: 1940978 - RNA, 19 nt, Homo sapiens
  misc_RNA (1)...(19): siRNA sense strand
ggaaaucuggacucuuugc

SEQ ID NO: 1940979 - RNA, 19 nt, Homo sapiens
  misc_RNA (1)...(19): siRNA sense strand
uuucaaagcuauguucacu

SEQ ID NO: 1940980 - RNA, 19 nt, Homo sapiens
  misc_RNA (1)...(19): siRNA sense strand
cucuuugccuguuuggaua

SEQ ID NO: 1940981 - RNA, 19 nt, Homo sapiens
  misc_RNA (1)...(19): siRNA sense strand
aagcaaaucaucuuauucg

SEQ ID NO: 1940982 - RNA, 19 nt, Homo sapiens
  misc_RNA (1)...(19): siRNA sense strand
gaacgccagaaauacuuag

SEQ ID NO: 1940983 - RNA, 19 nt, Homo sapiens
  misc_RNA (1)...(19): siRNA sense strand
uuacacaugcugacuugga

SEQ ID NO: 1940984 - RNA, 19 nt, Homo sapiens
  misc_RNA (1)...(19): siRNA sense strand
cuugaaagccaacuugauc

SEQ ID NO: 1940985 - RNA, 19 nt, Homo sapiens
  misc_RNA (1)...(19): siRNA sense strand
cugaaagaauguugugcau

SEQ ID NO: 1940986 - RNA, 19 nt, Homo sapiens
  misc_RNA (1)...(19): siRNA sense strand
guauuucaaagcuauguuc

SEQ ID NO: 1940987 - RNA, 19 nt, Homo sapiens
  misc_RNA (1)...(19): siRNA sense strand
gaacucugugacaucauuc

SEQ ID NO: 1940988 - RNA, 19 nt, Homo sapiens
  misc_RNA (1)...(19): siRNA sense strand
gaaucuucuucgccaacau

SEQ ID NO: 1940989 - RNA, 19 nt, Homo sapiens
  misc_RNA (1)...(19): siRNA sense strand
uguacaagaacgccagaaa

SEQ ID NO: 1940990 - RNA, 19 nt, Homo sapiens
  misc_RNA (1)...(19): siRNA sense strand
ugaauguagcuaccgaaga

SEQ ID NO: 1940991 - RNA, 19 nt, Homo sapiens
  misc_RNA (1)...(19): siRNA sense strand
ucaggacacaguugaaucu

SEQ ID NO: 1940992 - RNA, 19 nt, Homo sapiens
  misc_RNA (1)...(19): siRNA sense strand
cuaaacaguguacgauuac

SEQ ID NO: 1940993 - RNA, 19 nt, Homo sapiens
  misc_RNA (1)...(19): siRNA sense strand
uguauuggaauuucucguu

SEQ ID NO: 1940994 - RNA, 19 nt, Homo sapiens
  misc_RNA (1)...(19): siRNA sense strand
aagagaacagugagguuga

SEQ ID NO: 1940995 - RNA, 19 nt, Homo sapiens
  misc_RNA (1)...(19): siRNA sense strand
cgugaugaucgcacuugua

SEQ ID NO: 1940996 - RNA, 19 nt, Homo sapiens
  misc_RNA (1)...(19): siRNA sense strand
caguguacgauuaccauug

SEQ ID NO: 1940997 - RNA, 19 nt, Homo sapiens
  misc_RNA (1)...(19): siRNA sense strand
gacaucauucuccgaguag

SEQ ID NO: 1940998 - RNA, 19 nt, Homo sapiens
  misc_RNA (1)...(19): siRNA sense strand
uacacaugcugacuuggau

SEQ ID NO: 1940999 - RNA, 19 nt, Homo sapiens
  misc_RNA (1)...(19): siRNA sense strand
cgaaaugacuguguuugua

SEQ ID NO: 1941000 - RNA, 19 nt, Homo sapiens
  misc_RNA (1)...(19): siRNA sense strand
gaagauagagccgaaauga

SEQ ID NO: 1941001 - RNA, 19 nt, Homo sapiens
  misc_RNA (1)...(19): siRNA sense strand
gaugacagcuccagugaca

SEQ ID NO: 1941002 - RNA, 19 nt, Homo sapiens
  misc_RNA (1)...(19): siRNA sense strand
uuacgaaacugaacagcua

SEQ ID NO: 1941003 - RNA, 19 nt, Homo sapiens
  misc_RNA (1)...(19): siRNA sense strand
ccugucaaauugcuuaaua

SEQ ID NO: 1941004 - RNA, 19 nt, Homo sapiens
  misc_RNA (1)...(19): siRNA sense strand
agagucagaugucuucauu

SEQ ID NO: 1941005 - RNA, 19 nt, Homo sapiens
  misc_RNA (1)...(19): siRNA sense strand
agucagaugucuucauuga

SEQ ID NO: 1941006 - RNA, 19 nt, Homo sapiens
  misc_RNA (1)...(19): siRNA sense strand
guuaugagauccgacacua

SEQ ID NO: 1941007 - RNA, 19 nt, Homo sapiens
  misc_RNA (1)...(19): siRNA sense strand
gagccgaaaugacuguguu

SEQ ID NO: 1941008 - RNA, 19 nt, Homo sapiens
  misc_RNA (1)...(19): siRNA sense strand
uuuagugagucuaccauua

SEQ ID NO: 1941009 - RNA, 19 nt, Homo sapiens
  misc_RNA (1)...(19): siRNA sense strand
gaacaacuuuugacauuag

SEQ ID NO: 1941010 - RNA, 19 nt, Homo sapiens
  misc_RNA (1)...(19): siRNA sense strand
gaaacugaacagcuacauu

SEQ ID NO: 1941011 - RNA, 19 nt, Homo sapiens
  misc_RNA (1)...(19): siRNA sense strand
aaacugaacagcuacauuc

SEQ ID NO: 1941012 - RNA, 19 nt, Homo sapiens
  misc_RNA (1)...(19): siRNA sense strand
gaaaugacuguguuuguac

SEQ ID NO: 1941013 - RNA, 19 nt, Homo sapiens
  misc_RNA (1)...(19): siRNA sense strand
gagucuaccauuaccauuu

SEQ ID NO: 1941014 - RNA, 19 nt, Homo sapiens
  misc_RNA (1)...(19): siRNA sense strand
gacauuagcaagcauuuua

SEQ ID NO: 1941015 - RNA, 19 nt, Homo sapiens
  misc_RNA (1)...(19): siRNA sense strand
ccauuaccauuucccugua

SEQ ID NO: 1941016 - RNA, 19 nt, Homo sapiens
  misc_RNA (1)...(19): siRNA sense strand
gcccggaaguuaugagauc

SEQ ID NO: 1941017 - RNA, 19 nt, Homo sapiens
  misc_RNA (1)...(19): siRNA sense strand
ccaaaagaaucaagaacaa

SEQ ID NO: 1941018 - RNA, 19 nt, Homo sapiens
  misc_RNA (1)...(19): siRNA sense strand
cagcuacauucaaggcaaa

SEQ ID NO: 1941019 - RNA, 19 nt, Homo sapiens
  misc_RNA (1)...(19): siRNA sense strand
ccucugaacagcaauuuga

SEQ ID NO: 1941020 - RNA, 19 nt, Homo sapiens
  misc_RNA (1)...(19): siRNA sense strand
ucgaugagaagguuuacua

SEQ ID NO: 1941021 - RNA, 19 nt, Homo sapiens
  misc_RNA (1)...(19): siRNA sense strand
aaaugaacccaccaaagaa

SEQ ID NO: 1941022 - RNA, 19 nt, Homo sapiens
  misc_RNA (1)...(19): siRNA sense strand
uaugagauccgacacuaug

SEQ ID NO: 1941023 - RNA, 19 nt, Homo sapiens
  misc_RNA (1)...(19): siRNA sense strand
ugagaagguuuacuacacu

SEQ ID NO: 1941024 - RNA, 19 nt, Homo sapiens
  misc_RNA (1)...(19): siRNA sense strand
aaaaugaacccaccaaaga

SEQ ID NO: 1941025 - RNA, 19 nt, Homo sapiens
  misc_RNA (1)...(19): siRNA sense strand
cagacgggcuuuacgaaac

SEQ ID NO: 1941026 - RNA, 19 nt, Homo sapiens
  misc_RNA (1)...(19): siRNA sense strand
gaugagaagguuuacuaca

SEQ ID NO: 1941027 - RNA, 19 nt, Homo sapiens
  misc_RNA (1)...(19): siRNA sense strand
ccagacgggcuuuacgaaa

SEQ ID NO: 1941028 - RNA, 19 nt, Homo sapiens
  misc_RNA (1)...(19): siRNA sense strand
agucuaccauuaccauuuc

SEQ ID NO: 1941029 - RNA, 19 nt, Homo sapiens
  misc_RNA (1)...(19): siRNA sense strand
acccaggccuuuagaguca

SEQ ID NO: 1941030 - RNA, 19 nt, Homo sapiens
  misc_RNA (1)...(19): siRNA sense strand
aaugaacccaccaaagaaa

SEQ ID NO: 1941031 - RNA, 19 nt, Homo sapiens
  misc_RNA (1)...(19): siRNA sense strand
cccuguauauucccucuga

SEQ ID NO: 1941032 - RNA, 19 nt, Homo sapiens
  misc_RNA (1)...(19): siRNA sense strand
agauagagccgaaaugacu

SEQ ID NO: 1941033 - RNA, 19 nt, Homo sapiens
  misc_RNA (1)...(19): siRNA sense strand
gaaucaagaacaacuuuug

SEQ ID NO: 1941034 - RNA, 19 nt, Homo sapiens
  misc_RNA (1)...(19): siRNA sense strand
cgagaaagagaugaaaaua

SEQ ID NO: 1941035 - RNA, 19 nt, Homo sapiens
  misc_RNA (1)...(19): siRNA sense strand
aagggaagauggaaaaguu

SEQ ID NO: 1941036 - RNA, 19 nt, Homo sapiens
  misc_RNA (1)...(19): siRNA sense strand
uguacggucuuucgaugga

SEQ ID NO: 1941037 - RNA, 19 nt, Homo sapiens
  misc_RNA (1)...(19): siRNA sense strand
ccauuucccuguauauucc

SEQ ID NO: 1941038 - RNA, 19 nt, Homo sapiens
  misc_RNA (1)...(19): siRNA sense strand
cauuaccauuucccuguau

SEQ ID NO: 1941039 - RNA, 19 nt, Homo sapiens
  misc_RNA (1)...(19): siRNA sense strand
ugacagcuccagugacaag

SEQ ID NO: 1941040 - RNA, 19 nt, Homo sapiens
  misc_RNA (1)...(19): siRNA sense strand
aaacgagaaagagaugaaa

SEQ ID NO: 1941041 - RNA, 19 nt, Homo sapiens
  misc_RNA (1)...(19): siRNA sense strand
aagaugacagcuccaguga

SEQ ID NO: 1941042 - RNA, 19 nt, Homo sapiens
  misc_RNA (1)...(19): siRNA sense strand
gauccacccaggccuuuag

SEQ ID NO: 1941043 - RNA, 19 nt, Homo sapiens
  misc_RNA (1)...(19): siRNA sense strand
guucagguccuuuuaguga

SEQ ID NO: 1941044 - RNA, 19 nt, Homo sapiens
  misc_RNA (1)...(19): siRNA sense strand
ccgaaaugacuguguuugu

SEQ ID NO: 1941045 - RNA, 19 nt, Homo sapiens
  misc_RNA (1)...(19): siRNA sense strand
agacgggcuuuacgaaacu

SEQ ID NO: 1941046 - RNA, 19 nt, Homo sapiens
  misc_RNA (1)...(19): siRNA sense strand
ccacccaggccuuuagagu

SEQ ID NO: 1941047 - RNA, 19 nt, Homo sapiens
  misc_RNA (1)...(19): siRNA sense strand
gaaaguucucaguuuauga

SEQ ID NO: 1941048 - RNA, 19 nt, Homo sapiens
  misc_RNA (1)...(19): siRNA sense strand
ccacuauauuuaaguaugg

SEQ ID NO: 1941049 - RNA, 19 nt, Homo sapiens
  misc_RNA (1)...(19): siRNA sense strand
aaaaucaccugugguaaaa

SEQ ID NO: 1941050 - RNA, 19 nt, Homo sapiens
  misc_RNA (1)...(19): siRNA sense strand
guucauuuauccacauucu

SEQ ID NO: 1941051 - RNA, 19 nt, Homo sapiens
  misc_RNA (1)...(19): siRNA sense strand
guucucaguuuaugaugca

SEQ ID NO: 1941052 - RNA, 19 nt, Homo sapiens
  misc_RNA (1)...(19): siRNA sense strand
ucauuuauccacauucuca

SEQ ID NO: 1941053 - RNA, 19 nt, Homo sapiens
  misc_RNA (1)...(19): siRNA sense strand
cauucucaauagaggauuu

SEQ ID NO: 1941054 - RNA, 19 nt, Homo sapiens
  misc_RNA (1)...(19): siRNA sense strand
uauccacauucucaauaga

SEQ ID NO: 1941055 - RNA, 19 nt, Homo sapiens
  misc_RNA (1)...(19): siRNA sense strand
uagaggauuuuccacuaua

SEQ ID NO: 1941056 - RNA, 19 nt, Homo sapiens
  misc_RNA (1)...(19): siRNA sense strand
gaugcaaaacuuacaauug

SEQ ID NO: 1941057 - RNA, 19 nt, Homo sapiens
  misc_RNA (1)...(19): siRNA sense strand
aauagaggauuuuccacua

SEQ ID NO: 1941058 - RNA, 19 nt, Homo sapiens
  misc_RNA (1)...(19): siRNA sense strand
auuuaaguauggcaggaua

SEQ ID NO: 1941059 - RNA, 19 nt, Homo sapiens
  misc_RNA (1)...(19): siRNA sense strand
uuauccacauucucaauag

SEQ ID NO: 1941060 - RNA, 19 nt, Homo sapiens
  misc_RNA (1)...(19): siRNA sense strand
gcaaaacuuacaauuguuc

SEQ ID NO: 1941061 - RNA, 19 nt, Homo sapiens
  misc_RNA (1)...(19): siRNA sense strand
ggaaaucuccaagucagaa

SEQ ID NO: 1941062 - RNA, 19 nt, Homo sapiens
  misc_RNA (1)...(19): siRNA sense strand
ggagcuggaucccuucaca

SEQ ID NO: 1941063 - RNA, 19 nt, Homo sapiens
  misc_RNA (1)...(19): siRNA sense strand
agaagcgucugcaccguuu

SEQ ID NO: 1941064 - RNA, 19 nt, Homo sapiens
  misc_RNA (1)...(19): siRNA sense strand
ccaccaggauccaggcuau

SEQ ID NO: 1941065 - RNA, 19 nt, Homo sapiens
  misc_RNA (1)...(19): siRNA sense strand
gugaagaggcgcugaagga

SEQ ID NO: 1941066 - RNA, 19 nt, Homo sapiens
  misc_RNA (1)...(19): siRNA sense strand
cagcgucucuggagcacuu

SEQ ID NO: 1941067 - RNA, 19 nt, Homo sapiens
  misc_RNA (1)...(19): siRNA sense strand
guucggcucuugccucugu

SEQ ID NO: 1941068 - RNA, 19 nt, Homo sapiens
  misc_RNA (1)...(19): siRNA sense strand
gaaaucuccaagucagaaa

SEQ ID NO: 1941069 - RNA, 19 nt, Homo sapiens
  misc_RNA (1)...(19): siRNA sense strand
ccaguggacuuuggcaaug

SEQ ID NO: 1941070 - RNA, 19 nt, Homo sapiens
  misc_RNA (1)...(19): siRNA sense strand
gagcugcgggucccauuga

SEQ ID NO: 1941071 - RNA, 19 nt, Homo sapiens
  misc_RNA (1)...(19): siRNA sense strand
ggagcuggcccaagcacuu

SEQ ID NO: 1941072 - RNA, 19 nt, Homo sapiens
  misc_RNA (1)...(19): siRNA sense strand
cuauugagcucuuuaugcu

SEQ ID NO: 1941073 - RNA, 19 nt, Homo sapiens
  misc_RNA (1)...(19): siRNA sense strand
gcucggcguucuacaccau

SEQ ID NO: 1941074 - RNA, 19 nt, Homo sapiens
  misc_RNA (1)...(19): siRNA sense strand
ccucauggagccacucuug

SEQ ID NO: 1941075 - RNA, 19 nt, Homo sapiens
  misc_RNA (1)...(19): siRNA sense strand
gcuauugagcucuuuaugc

SEQ ID NO: 1941076 - RNA, 19 nt, Homo sapiens
  misc_RNA (1)...(19): siRNA sense strand
cuguguuccuggcugaaua

SEQ ID NO: 1941077 - RNA, 19 nt, Homo sapiens
  misc_RNA (1)...(19): siRNA sense strand
cggcugaggagcauugaga

SEQ ID NO: 1941078 - RNA, 19 nt, Homo sapiens
  misc_RNA (1)...(19): siRNA sense strand
ggacaccgaggucaaucuc

SEQ ID NO: 1941079 - RNA, 19 nt, Homo sapiens
  misc_RNA (1)...(19): siRNA sense strand
gcaacugcucuucuuggau

SEQ ID NO: 1941080 - RNA, 19 nt, Homo sapiens
  misc_RNA (1)...(19): siRNA sense strand
ccaggauccaggcuauuga

SEQ ID NO: 1941081 - RNA, 19 nt, Homo sapiens
  misc_RNA (1)...(19): siRNA sense strand
gggaaaucuccaagucaga

SEQ ID NO: 1941082 - RNA, 19 nt, Homo sapiens
  misc_RNA (1)...(19): siRNA sense strand
acccuugccugccauuaug

SEQ ID NO: 1941083 - RNA, 19 nt, Homo sapiens
  misc_RNA (1)...(19): siRNA sense strand
ugcaacugcucuucuugga

SEQ ID NO: 1941084 - RNA, 19 nt, Homo sapiens
  misc_RNA (1)...(19): siRNA sense strand
caacuugugccgcauucuc

SEQ ID NO: 1941085 - RNA, 19 nt, Homo sapiens
  misc_RNA (1)...(19): siRNA sense strand
cacccacgguacacaacuu

SEQ ID NO: 1941086 - RNA, 19 nt, Homo sapiens
  misc_RNA (1)...(19): siRNA sense strand
gagcugagcagggccaaaa

SEQ ID NO: 1941087 - RNA, 19 nt, Homo sapiens
  misc_RNA (1)...(19): siRNA sense strand
caagggccauggcuucauu

SEQ ID NO: 1941088 - RNA, 19 nt, Homo sapiens
  misc_RNA (1)...(19): siRNA sense strand
cuacaaaggagucugcaaa

SEQ ID NO: 1941089 - RNA, 19 nt, Homo sapiens
  misc_RNA (1)...(19): siRNA sense strand
acaaaggagucugcaaaug

SEQ ID NO: 1941090 - RNA, 19 nt, Homo sapiens
  misc_RNA (1)...(19): siRNA sense strand
caaaggagucugcaaaugc

SEQ ID NO: 1941091 - RNA, 19 nt, Homo sapiens
  misc_RNA (1)...(19): siRNA sense strand
aaaggagucugcaaaugcu

SEQ ID NO: 1941092 - RNA, 19 nt, Homo sapiens
  misc_RNA (1)...(19): siRNA sense strand
ggaguaugucccaguggaa

SEQ ID NO: 1941093 - RNA, 19 nt, Homo sapiens
  misc_RNA (1)...(19): siRNA sense strand
gacaugucaucagcuccua

SEQ ID NO: 1941094 - RNA, 19 nt, Homo sapiens
  misc_RNA (1)...(19): siRNA sense strand
caccaggcaccaagcauga

SEQ ID NO: 1941095 - RNA, 19 nt, Homo sapiens
  misc_RNA (1)...(19): siRNA sense strand
uacaaaggagucugcaaau

SEQ ID NO: 1941096 - RNA, 19 nt, Homo sapiens
  misc_RNA (1)...(19): siRNA sense strand
ccaucccacccaagaauga

SEQ ID NO: 1941097 - RNA, 19 nt, Homo sapiens
  misc_RNA (1)...(19): siRNA sense strand
agugugaucucauguauua

SEQ ID NO: 1941098 - RNA, 19 nt, Homo sapiens
  misc_RNA (1)...(19): siRNA sense strand
caaaguggcucaggaggaa

SEQ ID NO: 1941099 - RNA, 19 nt, Homo sapiens
  misc_RNA (1)...(19): siRNA sense strand
gaauuaugggagagaaaua

SEQ ID NO: 1941100 - RNA, 19 nt, Homo sapiens
  misc_RNA (1)...(19): siRNA sense strand
guuauucgguuaaagaaac

SEQ ID NO: 1941101 - RNA, 19 nt, Homo sapiens
  misc_RNA (1)...(19): siRNA sense strand
gugaucucauguauuaguu

SEQ ID NO: 1941102 - RNA, 19 nt, Homo sapiens
  misc_RNA (1)...(19): siRNA sense strand
ugaauuaugggagagaaau

SEQ ID NO: 1941103 - RNA, 19 nt, Homo sapiens
  misc_RNA (1)...(19): siRNA sense strand
gagugugaucucauguauu

SEQ ID NO: 1941104 - RNA, 19 nt, Homo sapiens
  misc_RNA (1)...(19): siRNA sense strand
gcaaaugguuggaaauuaa

SEQ ID NO: 1941105 - RNA, 19 nt, Homo sapiens
  misc_RNA (1)...(19): siRNA sense strand
gaaauuaagcccaguaguu

SEQ ID NO: 1941106 - RNA, 19 nt, Homo sapiens
  misc_RNA (1)...(19): siRNA sense strand
gcagagggcggacaguaua

SEQ ID NO: 1941107 - RNA, 19 nt, Homo sapiens
  misc_RNA (1)...(19): siRNA sense strand
guucguaacuuucgagaau

SEQ ID NO: 1941108 - RNA, 19 nt, Homo sapiens
  misc_RNA (1)...(19): siRNA sense strand
gcacguguaaugaccaaua

SEQ ID NO: 1941109 - RNA, 19 nt, Homo sapiens
  misc_RNA (1)...(19): siRNA sense strand
gauaugcagccuacagaua

SEQ ID NO: 1941110 - RNA, 19 nt, Homo sapiens
  misc_RNA (1)...(19): siRNA sense strand
gcagauguuugggcaguuu

SEQ ID NO: 1941111 - RNA, 19 nt, Homo sapiens
  misc_RNA (1)...(19): siRNA sense strand
gagcauaaccugacacucu

SEQ ID NO: 1941112 - RNA, 19 nt, Homo sapiens
  misc_RNA (1)...(19): siRNA sense strand
cugcaugucucuaauauuc

SEQ ID NO: 1941113 - RNA, 19 nt, Homo sapiens
  misc_RNA (1)...(19): siRNA sense strand
caacaacuccugacgcaau

SEQ ID NO: 1941114 - RNA, 19 nt, Homo sapiens
  misc_RNA (1)...(19): siRNA sense strand
guaaugaccaauaagaaga

SEQ ID NO: 1941115 - RNA, 19 nt, Homo sapiens
  misc_RNA (1)...(19): siRNA sense strand
ugcaaaugguuggaaauua

SEQ ID NO: 1941116 - RNA, 19 nt, Homo sapiens
  misc_RNA (1)...(19): siRNA sense strand
gauucggguucguaacuuu

SEQ ID NO: 1941117 - RNA, 19 nt, Homo sapiens
  misc_RNA (1)...(19): siRNA sense strand
gccacacacucaagacuau

SEQ ID NO: 1941118 - RNA, 19 nt, Homo sapiens
  misc_RNA (1)...(19): siRNA sense strand
caacacuuacauuccuuua

SEQ ID NO: 1941119 - RNA, 19 nt, Homo sapiens
  misc_RNA (1)...(19): siRNA sense strand
ggucacaccauaugcaaau

SEQ ID NO: 1941120 - RNA, 19 nt, Homo sapiens
  misc_RNA (1)...(19): siRNA sense strand
aaauuaagcccaguaguug

SEQ ID NO: 1941121 - RNA, 19 nt, Homo sapiens
  misc_RNA (1)...(19): siRNA sense strand
cacguguaaugaccaauaa

SEQ ID NO: 1941122 - RNA, 19 nt, Homo sapiens
  misc_RNA (1)...(19): siRNA sense strand
gguaucaacacuuacauuc

SEQ ID NO: 1941123 - RNA, 19 nt, Homo sapiens
  misc_RNA (1)...(19): siRNA sense strand
ucacagacacaaaguagug

SEQ ID NO: 1941124 - RNA, 19 nt, Homo sapiens
  misc_RNA (1)...(19): siRNA sense strand
uguauaugguccggaguua

SEQ ID NO: 1941125 - RNA, 19 nt, Homo sapiens
  misc_RNA (1)...(19): siRNA sense strand
cccaguaguuggagcugua

SEQ ID NO: 1941126 - RNA, 19 nt, Homo sapiens
  misc_RNA (1)...(19): siRNA sense strand
gcaaaauccuagauguaga

SEQ ID NO: 1941127 - RNA, 19 nt, Homo sapiens
  misc_RNA (1)...(19): siRNA sense strand
aaaucgaggugaauaaugc

SEQ ID NO: 1941128 - RNA, 19 nt, Homo sapiens
  misc_RNA (1)...(19): siRNA sense strand
uuaaugaacguggcucuaa

SEQ ID NO: 1941129 - RNA, 19 nt, Homo sapiens
  misc_RNA (1)...(19): siRNA sense strand
caacucacccagcacacaa

SEQ ID NO: 1941130 - RNA, 19 nt, Homo sapiens
  misc_RNA (1)...(19): siRNA sense strand
acgcaaugguucagccuuu

SEQ ID NO: 1941131 - RNA, 19 nt, Homo sapiens
  misc_RNA (1)...(19): siRNA sense strand
ggauucggguucguaacuu

SEQ ID NO: 1941132 - RNA, 19 nt, Homo sapiens
  misc_RNA (1)...(19): siRNA sense strand
ggcugcaugucucuaauau

SEQ ID NO: 1941133 - RNA, 19 nt, Homo sapiens
  misc_RNA (1)...(19): siRNA sense strand
agcauaaccugacacucua

SEQ ID NO: 1941134 - RNA, 19 nt, Homo sapiens
  misc_RNA (1)...(19): siRNA sense strand
ccgcuuacagugacgguua

SEQ ID NO: 1941135 - RNA, 19 nt, Homo sapiens
  misc_RNA (1)...(19): siRNA sense strand
gaguaaaucuaccccgaaa

SEQ ID NO: 1941136 - RNA, 19 nt, Homo sapiens
  misc_RNA (1)...(19): siRNA sense strand
uaaugaacguggcucuaag

SEQ ID NO: 1941137 - RNA, 19 nt, Homo sapiens
  misc_RNA (1)...(19): siRNA sense strand
uaucaacacuuacauuccu

SEQ ID NO: 1941138 - RNA, 19 nt, Homo sapiens
  misc_RNA (1)...(19): siRNA sense strand
ggaauucccacagaguaug

SEQ ID NO: 1941139 - RNA, 19 nt, Homo sapiens
  misc_RNA (1)...(19): siRNA sense strand
ggccagaccggugagcaua

SEQ ID NO: 1941140 - RNA, 19 nt, Homo sapiens
  misc_RNA (1)...(19): siRNA sense strand
gccgcuagcuauggaguug

SEQ ID NO: 1941141 - RNA, 19 nt, Homo sapiens
  misc_RNA (1)...(19): siRNA sense strand
gcacagccugcuacugcaa

SEQ ID NO: 1941142 - RNA, 19 nt, Homo sapiens
  misc_RNA (1)...(19): siRNA sense strand
gcgcuguggcgaguuuaua

SEQ ID NO: 1941143 - RNA, 19 nt, Homo sapiens
  misc_RNA (1)...(19): siRNA sense strand
cgagaauagugcugaugca

SEQ ID NO: 1941144 - RNA, 19 nt, Homo sapiens
  misc_RNA (1)...(19): siRNA sense strand
gcaaugguucagccuuuua

SEQ ID NO: 1941145 - RNA, 19 nt, Homo sapiens
  misc_RNA (1)...(19): siRNA sense strand
agacagggccagggagaaa

SEQ ID NO: 1941146 - RNA, 19 nt, Homo sapiens
  misc_RNA (1)...(19): siRNA sense strand
acacaaaauggaucucuua

SEQ ID NO: 1941147 - RNA, 19 nt, Homo sapiens
  misc_RNA (1)...(19): siRNA sense strand
cagcacguguaaugaccaa

SEQ ID NO: 1941148 - RNA, 19 nt, Homo sapiens
  misc_RNA (1)...(19): siRNA sense strand
uaagggauucggguucgua

SEQ ID NO: 1941149 - RNA, 19 nt, Homo sapiens
  misc_RNA (1)...(19): siRNA sense strand
gcaugucucuaauauuccu

SEQ ID NO: 1941150 - RNA, 19 nt, Homo sapiens
  misc_RNA (1)...(19): siRNA sense strand
ggcagagggcggacaguau

SEQ ID NO: 1941151 - RNA, 19 nt, Homo sapiens
  misc_RNA (1)...(19): siRNA sense strand
guaaaaucgaggugaauaa

SEQ ID NO: 1941152 - RNA, 19 nt, Homo sapiens
  misc_RNA (1)...(19): siRNA sense strand
cgaggugaauaaugcuaca

SEQ ID NO: 1941153 - RNA, 19 nt, Homo sapiens
  misc_RNA (1)...(19): siRNA sense strand
ggguaucaacacuuacauu

SEQ ID NO: 1941154 - RNA, 19 nt, Homo sapiens
  misc_RNA (1)...(19): siRNA sense strand
ggaaauuaagcccaguagu

SEQ ID NO: 1941155 - RNA, 19 nt, Homo sapiens
  misc_RNA (1)...(19): siRNA sense strand
caaaugguuggaaauuaag

SEQ ID NO: 1941156 - RNA, 19 nt, Homo sapiens
  misc_RNA (1)...(19): siRNA sense strand
guguaaugaccaauaagaa

SEQ ID NO: 1941157 - RNA, 19 nt, Homo sapiens
  misc_RNA (1)...(19): siRNA sense strand
gcaacucacccagcacaca

SEQ ID NO: 1941158 - RNA, 19 nt, Homo sapiens
  misc_RNA (1)...(19): siRNA sense strand
uuucagaggagcccauuug

SEQ ID NO: 1941159 - RNA, 19 nt, Homo sapiens
  misc_RNA (1)...(19): siRNA sense strand
cguguaaugaccaauaaga

SEQ ID NO: 1941160 - RNA, 19 nt, Homo sapiens
  misc_RNA (1)...(19): siRNA sense strand
cggcugcaugucucuaaua

SEQ ID NO: 1941161 - RNA, 19 nt, Homo sapiens
  misc_RNA (1)...(19): siRNA sense strand
gccagaccggugagcauaa

SEQ ID NO: 1941162 - RNA, 19 nt, Homo sapiens
  misc_RNA (1)...(19): siRNA sense strand
uaugcagccuacagauaug

SEQ ID NO: 1941163 - RNA, 19 nt, Homo sapiens
  misc_RNA (1)...(19): siRNA sense strand
ggauaugcagccuacagau

SEQ ID NO: 1941164 - RNA, 19 nt, Homo sapiens
  misc_RNA (1)...(19): siRNA sense strand
auaugcaaaugguuggaaa

SEQ ID NO: 1941165 - RNA, 19 nt, Homo sapiens
  misc_RNA (1)...(19): siRNA sense strand
aguuggagcuguauauggu

SEQ ID NO: 1941166 - RNA, 19 nt, Homo sapiens
  misc_RNA (1)...(19): siRNA sense strand
gcagucacagacacaaagu

SEQ ID NO: 1941167 - RNA, 19 nt, Homo sapiens
  misc_RNA (1)...(19): siRNA sense strand
guaguuggagcuguauaug

SEQ ID NO: 1941168 - RNA, 19 nt, Homo sapiens
  misc_RNA (1)...(19): siRNA sense strand
gacacaaaguagugaaaau

SEQ ID NO: 1941169 - RNA, 19 nt, Homo sapiens
  misc_RNA (1)...(19): siRNA sense strand
gaucucuuacgcagacaga

SEQ ID NO: 1941170 - RNA, 19 nt, Homo sapiens
  misc_RNA (1)...(19): siRNA sense strand
ucguaacuuucgagaauag

SEQ ID NO: 1941171 - RNA, 19 nt, Homo sapiens
  misc_RNA (1)...(19): siRNA sense strand
caaaauccuagauguagaa

SEQ ID NO: 1941172 - RNA, 19 nt, Homo sapiens
  misc_RNA (1)...(19): siRNA sense strand
cugacacucuacggaagua

SEQ ID NO: 1941173 - RNA, 19 nt, Homo sapiens
  misc_RNA (1)...(19): siRNA sense strand
cagacacaaaguagugaaa

SEQ ID NO: 1941174 - RNA, 19 nt, Homo sapiens
  misc_RNA (1)...(19): siRNA sense strand
cagcagucacagacacaaa

SEQ ID NO: 1941175 - RNA, 19 nt, Homo sapiens
  misc_RNA (1)...(19): siRNA sense strand
gcagugccccuaucaggaa

SEQ ID NO: 1941176 - RNA, 19 nt, Homo sapiens
  misc_RNA (1)...(19): siRNA sense strand
aacaacuccugacgcaaug

SEQ ID NO: 1941177 - RNA, 19 nt, Homo sapiens
  misc_RNA (1)...(19): siRNA sense strand
uguaaugaccaauaagaag

SEQ ID NO: 1941178 - RNA, 19 nt, Homo sapiens
  misc_RNA (1)...(19): siRNA sense strand
ugacauaccuccucaucag

SEQ ID NO: 1941179 - RNA, 19 nt, Homo sapiens
  misc_RNA (1)...(19): siRNA sense strand
aaugaucucucucacuguu

SEQ ID NO: 1941180 - RNA, 19 nt, Homo sapiens
  misc_RNA (1)...(19): siRNA sense strand
caacuuauuugagccuaca

SEQ ID NO: 1941181 - RNA, 19 nt, Homo sapiens
  misc_RNA (1)...(19): siRNA sense strand
cucaguauacccaauaaua

SEQ ID NO: 1941182 - RNA, 19 nt, Homo sapiens
  misc_RNA (1)...(19): siRNA sense strand
cuaagaaugaucucucuca

SEQ ID NO: 1941183 - RNA, 19 nt, Homo sapiens
  misc_RNA (1)...(19): siRNA sense strand
ccagacaguccauuuuaua

SEQ ID NO: 1941184 - RNA, 19 nt, Homo sapiens
  misc_RNA (1)...(19): siRNA sense strand
ugagacguucaacuuauuu

SEQ ID NO: 1941185 - RNA, 19 nt, Homo sapiens
  misc_RNA (1)...(19): siRNA sense strand
gagacguucaacuuauuug

SEQ ID NO: 1941186 - RNA, 19 nt, Homo sapiens
  misc_RNA (1)...(19): siRNA sense strand
auaaggaagugacauaccu

SEQ ID NO: 1941187 - RNA, 19 nt, Homo sapiens
  misc_RNA (1)...(19): siRNA sense strand
gaaugaucucucucacugu

SEQ ID NO: 1941188 - RNA, 19 nt, Homo sapiens
  misc_RNA (1)...(19): siRNA sense strand
gaugaaagcuccucuaguu

SEQ ID NO: 1941189 - RNA, 19 nt, Homo sapiens
  misc_RNA (1)...(19): siRNA sense strand
caacaaagcauuggagaaa

SEQ ID NO: 1941190 - RNA, 19 nt, Homo sapiens
  misc_RNA (1)...(19): siRNA sense strand
gagacaagcugaagcgaau

SEQ ID NO: 1941191 - RNA, 19 nt, Homo sapiens
  misc_RNA (1)...(19): siRNA sense strand
gauuccagcucuuccagua

SEQ ID NO: 1941192 - RNA, 19 nt, Homo sapiens
  misc_RNA (1)...(19): siRNA sense strand
gcgaauaagcaacauguaa

SEQ ID NO: 1941193 - RNA, 19 nt, Homo sapiens
  misc_RNA (1)...(19): siRNA sense strand
cauguaagaugucagaaau

SEQ ID NO: 1941194 - RNA, 19 nt, Homo sapiens
  misc_RNA (1)...(19): siRNA sense strand
uagcagcucugacgaugaa

SEQ ID NO: 1941195 - RNA, 19 nt, Homo sapiens
  misc_RNA (1)...(19): siRNA sense strand
gaauaagcaacauguaaga

SEQ ID NO: 1941196 - RNA, 19 nt, Homo sapiens
  misc_RNA (1)...(19): siRNA sense strand
agaaaccaauguagaaaga

SEQ ID NO: 1941197 - RNA, 19 nt, Homo sapiens
  misc_RNA (1)...(19): siRNA sense strand
ggagaaaccaauguagaaa

SEQ ID NO: 1941198 - RNA, 19 nt, Homo sapiens
  misc_RNA (1)...(19): siRNA sense strand
cuacauaggcccucaagga

SEQ ID NO: 1941199 - RNA, 19 nt, Homo sapiens
  misc_RNA (1)...(19): siRNA sense strand
cagcagaacuaaagaaagc

SEQ ID NO: 1941200 - RNA, 19 nt, Homo sapiens
  misc_RNA (1)...(19): siRNA sense strand
ggacagcagaacuaaagaa

SEQ ID NO: 1941201 - RNA, 19 nt, Homo sapiens
  misc_RNA (1)...(19): siRNA sense strand
ggacauuggacuuaugaau

SEQ ID NO: 1941202 - RNA, 19 nt, Homo sapiens
  misc_RNA (1)...(19): siRNA sense strand
agaaagaaaggccaagaaa

SEQ ID NO: 1941203 - RNA, 19 nt, Homo sapiens
  misc_RNA (1)...(19): siRNA sense strand
gcaacaaagcauuggagaa

SEQ ID NO: 1941204 - RNA, 19 nt, Homo sapiens
  misc_RNA (1)...(19): siRNA sense strand
gaugaaccaccaaagaaga

SEQ ID NO: 1941205 - RNA, 19 nt, Homo sapiens
  misc_RNA (1)...(19): siRNA sense strand
ugucagaaaugcuuggaau

SEQ ID NO: 1941206 - RNA, 19 nt, Homo sapiens
  misc_RNA (1)...(19): siRNA sense strand
gaaagaaaggccaagaaaa

SEQ ID NO: 1941207 - RNA, 19 nt, Homo sapiens
  misc_RNA (1)...(19): siRNA sense strand
gacagcagaacuaaagaaa

SEQ ID NO: 1941208 - RNA, 19 nt, Homo sapiens
  misc_RNA (1)...(19): siRNA sense strand
gacaagcugaagcgaauaa

SEQ ID NO: 1941209 - RNA, 19 nt, Homo sapiens
  misc_RNA (1)...(19): siRNA sense strand
uaagaugucagaaaugcuu

SEQ ID NO: 1941210 - RNA, 19 nt, Homo sapiens
  misc_RNA (1)...(19): siRNA sense strand
guaaccaguuccaguagca

SEQ ID NO: 1941211 - RNA, 19 nt, Homo sapiens
  misc_RNA (1)...(19): siRNA sense strand
gaauuuggacauuggacuu

SEQ ID NO: 1941212 - RNA, 19 nt, Homo sapiens
  misc_RNA (1)...(19): siRNA sense strand
ugacaguucugccagugau

SEQ ID NO: 1941213 - RNA, 19 nt, Homo sapiens
  misc_RNA (1)...(19): siRNA sense strand
gacgaugaaccaccaaaga

SEQ ID NO: 1941214 - RNA, 19 nt, Homo sapiens
  misc_RNA (1)...(19): siRNA sense strand
ucccaugcaucggcuaaua

SEQ ID NO: 1941215 - RNA, 19 nt, Homo sapiens
  misc_RNA (1)...(19): siRNA sense strand
cuaagaguguaaccaguuc

SEQ ID NO: 1941216 - RNA, 19 nt, Homo sapiens
  misc_RNA (1)...(19): siRNA sense strand
gagaaaccaauguagaaag

SEQ ID NO: 1941217 - RNA, 19 nt, Homo sapiens
  misc_RNA (1)...(19): siRNA sense strand
cgaauaagcaacauguaag

SEQ ID NO: 1941218 - RNA, 19 nt, Homo sapiens
  misc_RNA (1)...(19): siRNA sense strand
uggagaaaccaauguagaa

SEQ ID NO: 1941219 - RNA, 19 nt, Homo sapiens
  misc_RNA (1)...(19): siRNA sense strand
ucaaggacagcagaacuaa

SEQ ID NO: 1941220 - RNA, 19 nt, Homo sapiens
  misc_RNA (1)...(19): siRNA sense strand
gaaccaccaaagaagaaga

SEQ ID NO: 1941221 - RNA, 19 nt, Homo sapiens
  misc_RNA (1)...(19): siRNA sense strand
gaaagcuccucuaguuccu

SEQ ID NO: 1941222 - RNA, 19 nt, Homo sapiens
  misc_RNA (1)...(19): siRNA sense strand
gaaaccaauguagaaagaa

SEQ ID NO: 1941223 - RNA, 19 nt, Homo sapiens
  misc_RNA (1)...(19): siRNA sense strand
gcaguagcagugacaguuc

SEQ ID NO: 1941224 - RNA, 19 nt, Homo sapiens
  misc_RNA (1)...(19): siRNA sense strand
gagagugaagaaacaucua

SEQ ID NO: 1941225 - RNA, 19 nt, Homo sapiens
  misc_RNA (1)...(19): siRNA sense strand
gcagaacuaaagaaagcuu

SEQ ID NO: 1941226 - RNA, 19 nt, Homo sapiens
  misc_RNA (1)...(19): siRNA sense strand
gcuuggaauuuggacauug

SEQ ID NO: 1941227 - RNA, 19 nt, Homo sapiens
  misc_RNA (1)...(19): siRNA sense strand
caucagagagugaagaaac

SEQ ID NO: 1941228 - RNA, 19 nt, Homo sapiens
  misc_RNA (1)...(19): siRNA sense strand
uagaaagaaaggccaagaa

SEQ ID NO: 1941229 - RNA, 19 nt, Homo sapiens
  misc_RNA (1)...(19): siRNA sense strand
guagaaagaaaggccaaga

SEQ ID NO: 1941230 - RNA, 19 nt, Homo sapiens
  misc_RNA (1)...(19): siRNA sense strand
uguaagaugucagaaaugc

SEQ ID NO: 1941231 - RNA, 19 nt, Homo sapiens
  misc_RNA (1)...(19): siRNA sense strand
caaggacagcagaacuaaa

SEQ ID NO: 1941232 - RNA, 19 nt, Homo sapiens
  misc_RNA (1)...(19): siRNA sense strand
ucuaagaguguaaccaguu

SEQ ID NO: 1941233 - RNA, 19 nt, Homo sapiens
  misc_RNA (1)...(19): siRNA sense strand
gaagcgaauaagcaacaug

SEQ ID NO: 1941234 - RNA, 19 nt, Homo sapiens
  misc_RNA (1)...(19): siRNA sense strand
acgaugaaccaccaaagaa

SEQ ID NO: 1941235 - RNA, 19 nt, Homo sapiens
  misc_RNA (1)...(19): siRNA sense strand
gcaguagcaccagcacaga

SEQ ID NO: 1941236 - RNA, 19 nt, Homo sapiens
  misc_RNA (1)...(19): siRNA sense strand
aguagcaccagcacagaua

SEQ ID NO: 1941237 - RNA, 19 nt, Homo sapiens
  misc_RNA (1)...(19): siRNA sense strand
aaggacagcagaacuaaag

SEQ ID NO: 1941238 - RNA, 19 nt, Homo sapiens
  misc_RNA (1)...(19): siRNA sense strand
cuaauagcccggagacaag

SEQ ID NO: 1941239 - RNA, 19 nt, Homo sapiens
  misc_RNA (1)...(19): siRNA sense strand
auaagcaacauguaagaug

SEQ ID NO: 1941240 - RNA, 19 nt, Homo sapiens
  misc_RNA (1)...(19): siRNA sense strand
aguguaaccaguuccagua

SEQ ID NO: 1941241 - RNA, 19 nt, Homo sapiens
  misc_RNA (1)...(19): siRNA sense strand
acuuaugaaugcacaggaa

SEQ ID NO: 1941242 - RNA, 19 nt, Homo sapiens
  misc_RNA (1)...(19): siRNA sense strand
cgaugaaccaccaaagaag

SEQ ID NO: 1941243 - RNA, 19 nt, Homo sapiens
  misc_RNA (1)...(19): siRNA sense strand
gaaagauccugcagagugu

SEQ ID NO: 1941244 - RNA, 19 nt, Homo sapiens
  misc_RNA (1)...(19): siRNA sense strand
ccaaugacaucucccacua

SEQ ID NO: 1941245 - RNA, 19 nt, Homo sapiens
  misc_RNA (1)...(19): siRNA sense strand
gcacaucgcagaucaaagu

SEQ ID NO: 1941246 - RNA, 19 nt, Homo sapiens
  misc_RNA (1)...(19): siRNA sense strand
cgacagagaucuucaucca

SEQ ID NO: 1941247 - RNA, 19 nt, Homo sapiens
  misc_RNA (1)...(19): siRNA sense strand
gaagggcuuuaaccagauu

SEQ ID NO: 1941248 - RNA, 19 nt, Homo sapiens
  misc_RNA (1)...(19): siRNA sense strand
ccucuaacacuacagauua

SEQ ID NO: 1941249 - RNA, 19 nt, Homo sapiens
  misc_RNA (1)...(19): siRNA sense strand
cauccuggcugacaugcua

SEQ ID NO: 1941250 - RNA, 19 nt, Homo sapiens
  misc_RNA (1)...(19): siRNA sense strand
ugaccuggccuguuccuua

SEQ ID NO: 1941251 - RNA, 19 nt, Homo sapiens
  misc_RNA (1)...(19): siRNA sense strand
gggaggagagcaccaauga

SEQ ID NO: 1941252 - RNA, 19 nt, Homo sapiens
  misc_RNA (1)...(19): siRNA sense strand
gaggagagcaccaaugaca

SEQ ID NO: 1941253 - RNA, 19 nt, Homo sapiens
  misc_RNA (1)...(19): siRNA sense strand
gcucuucuauuccacuguu

SEQ ID NO: 1941254 - RNA, 19 nt, Homo sapiens
  misc_RNA (1)...(19): siRNA sense strand
uggcagagcuugaggacau

SEQ ID NO: 1941255 - RNA, 19 nt, Homo sapiens
  misc_RNA (1)...(19): siRNA sense strand
gaggaggacuuggaaacug

SEQ ID NO: 1941256 - RNA, 19 nt, Homo sapiens
  misc_RNA (1)...(19): siRNA sense strand
cagggaagcuccacaccau

SEQ ID NO: 1941257 - RNA, 19 nt, Homo sapiens
  misc_RNA (1)...(19): siRNA sense strand
acacgguucuucaaacuuc

SEQ ID NO: 1941258 - RNA, 19 nt, Homo sapiens
  misc_RNA (1)...(19): siRNA sense strand
gaucucugcucccuucucu

SEQ ID NO: 1941259 - RNA, 19 nt, Homo sapiens
  misc_RNA (1)...(19): siRNA sense strand
ggcagaaguucaucaggau

SEQ ID NO: 1941260 - RNA, 19 nt, Homo sapiens
  misc_RNA (1)...(19): siRNA sense strand
ggaccaggaugagagaaag

SEQ ID NO: 1941261 - RNA, 19 nt, Homo sapiens
  misc_RNA (1)...(19): siRNA sense strand
ggagagcaccaaugacauc

SEQ ID NO: 1941262 - RNA, 19 nt, Homo sapiens
  misc_RNA (1)...(19): siRNA sense strand
caggaucuauaaacucuuc

SEQ ID NO: 1941263 - RNA, 19 nt, Homo sapiens
  misc_RNA (1)...(19): siRNA sense strand
agaccgagcugaccuucau

SEQ ID NO: 1941264 - RNA, 19 nt, Homo sapiens
  misc_RNA (1)...(19): siRNA sense strand
acucggaucuccuucugaa

SEQ ID NO: 1941265 - RNA, 19 nt, Homo sapiens
  misc_RNA (1)...(19): siRNA sense strand
gggagaagacgacagagau

SEQ ID NO: 1941266 - RNA, 19 nt, Homo sapiens
  misc_RNA (1)...(19): siRNA sense strand
gaccuggccuguuccuuac

SEQ ID NO: 1941267 - RNA, 19 nt, Homo sapiens
  misc_RNA (1)...(19): siRNA sense strand
cccgagagguccaggagaa

SEQ ID NO: 1941268 - RNA, 19 nt, Homo sapiens
  misc_RNA (1)...(19): siRNA sense strand
cugcucaccuucauugaug

SEQ ID NO: 1941269 - RNA, 19 nt, Homo sapiens
  misc_RNA (1)...(19): siRNA sense strand
uggcugacaugcuacucua

SEQ ID NO: 1941270 - RNA, 19 nt, Homo sapiens
  misc_RNA (1)...(19): siRNA sense strand
ucacacgguucuucaaacu

SEQ ID NO: 1941271 - RNA, 19 nt, Homo sapiens
  misc_RNA (1)...(19): siRNA sense strand
ccugggagaugaugaagag

SEQ ID NO: 1941272 - RNA, 19 nt, Homo sapiens
  misc_RNA (1)...(19): siRNA sense strand
ugacagaaguggugaaaag

SEQ ID NO: 1941273 - RNA, 19 nt, Homo sapiens
  misc_RNA (1)...(19): siRNA sense strand
uggaggcccugacgcuaaa

SEQ ID NO: 1941274 - RNA, 19 nt, Homo sapiens
  misc_RNA (1)...(19): siRNA sense strand
ucaccgugcugcugcugaa

SEQ ID NO: 1941275 - RNA, 19 nt, Homo sapiens
  misc_RNA (1)...(19): siRNA sense strand
ggccaucaguggacgaagu

SEQ ID NO: 1941276 - RNA, 19 nt, Homo sapiens
  misc_RNA (1)...(19): siRNA sense strand
ggagaagacgacagagauc

SEQ ID NO: 1941277 - RNA, 19 nt, Homo sapiens
  misc_RNA (1)...(19): siRNA sense strand
ggaagugcaggccgaguuc

SEQ ID NO: 1941278 - RNA, 19 nt, Homo sapiens
  misc_RNA (1)...(19): siRNA sense strand
aggaggacuuggaaacuga

SEQ ID NO: 1941279 - RNA, 19 nt, Homo sapiens
  misc_RNA (1)...(19): siRNA sense strand
gaacuccaaauccaagaag

SEQ ID NO: 1941280 - RNA, 19 nt, Homo sapiens
  misc_RNA (1)...(19): siRNA sense strand
guaccuccgugaaccucaa

SEQ ID NO: 1941281 - RNA, 19 nt, Homo sapiens
  misc_RNA (1)...(19): siRNA sense strand
gcucuuuggcgucccauga

SEQ ID NO: 1941282 - RNA, 19 nt, Homo sapiens
  misc_RNA (1)...(19): siRNA sense strand
ccaagaagggcuuuaacca

SEQ ID NO: 1941283 - RNA, 19 nt, Homo sapiens
  misc_RNA (1)...(19): siRNA sense strand
gauccugggagaugaugaa

SEQ ID NO: 1941284 - RNA, 19 nt, Homo sapiens
  misc_RNA (1)...(19): siRNA sense strand
aggcagaacuccaaaucca

SEQ ID NO: 1941285 - RNA, 19 nt, Homo sapiens
  misc_RNA (1)...(19): siRNA sense strand
caacccagcugcccauccu

SEQ ID NO: 1941286 - RNA, 19 nt, Homo sapiens
  misc_RNA (1)...(19): siRNA sense strand
gccaucugcugacuuccuu

SEQ ID NO: 1941287 - RNA, 19 nt, Homo sapiens
  misc_RNA (1)...(19): siRNA sense strand
gcuacaagccagagaagag

SEQ ID NO: 1941288 - RNA, 19 nt, Homo sapiens
  misc_RNA (1)...(19): siRNA sense strand
gaccggugcugcugcaacu

SEQ ID NO: 1941289 - RNA, 19 nt, Homo sapiens
  misc_RNA (1)...(19): siRNA sense strand
guuccuugcuguagccaau

SEQ ID NO: 1941290 - RNA, 19 nt, Homo sapiens
  misc_RNA (1)...(19): siRNA sense strand
cuauuccacuguucuuugu

SEQ ID NO: 1941291 - RNA, 19 nt, Homo sapiens
  misc_RNA (1)...(19): siRNA sense strand
gguaugagcgcaauguacu

SEQ ID NO: 1941292 - RNA, 19 nt, Homo sapiens
  misc_RNA (1)...(19): siRNA sense strand
ccacuuccuuauccuccuu

SEQ ID NO: 1941293 - RNA, 19 nt, Homo sapiens
  misc_RNA (1)...(19): siRNA sense strand
gcuacguguuguggucuuu

SEQ ID NO: 1941294 - RNA, 19 nt, Homo sapiens
  misc_RNA (1)...(19): siRNA sense strand
gcccugcucuucuauucca

SEQ ID NO: 1941295 - RNA, 19 nt, Homo sapiens
  misc_RNA (1)...(19): siRNA sense strand
cgcuaaaccugacagaagu

SEQ ID NO: 1941296 - RNA, 19 nt, Homo sapiens
  misc_RNA (1)...(19): siRNA sense strand
gcaauguacugggccucau

SEQ ID NO: 1941297 - RNA, 19 nt, Homo sapiens
  misc_RNA (1)...(19): siRNA sense strand
ggagguggaggaggacuug

SEQ ID NO: 1941298 - RNA, 19 nt, Homo sapiens
  misc_RNA (1)...(19): siRNA sense strand
gaaguucaucaggaucuau

SEQ ID NO: 1941299 - RNA, 19 nt, Homo sapiens
  misc_RNA (1)...(19): siRNA sense strand
gcagaguguagucagaugu

SEQ ID NO: 1941300 - RNA, 19 nt, Homo sapiens
  misc_RNA (1)...(19): siRNA sense strand
ggacaaggugcagaucauc

SEQ ID NO: 1941301 - RNA, 19 nt, Homo sapiens
  misc_RNA (1)...(19): siRNA sense strand
cugacaugcuacucuacua

SEQ ID NO: 1941302 - RNA, 19 nt, Homo sapiens
  misc_RNA (1)...(19): siRNA sense strand
guucaucaggaucuauaaa

SEQ ID NO: 1941303 - RNA, 19 nt, Homo sapiens
  misc_RNA (1)...(19): siRNA sense strand
ucccaugacuccaccuugu

SEQ ID NO: 1941304 - RNA, 19 nt, Homo sapiens
  misc_RNA (1)...(19): siRNA sense strand
uagcacaucgcagaucaaa

SEQ ID NO: 1941305 - RNA, 19 nt, Homo sapiens
  misc_RNA (1)...(19): siRNA sense strand
agaagggcuuuaaccagau

SEQ ID NO: 1941306 - RNA, 19 nt, Homo sapiens
  misc_RNA (1)...(19): siRNA sense strand
cacuacagauuauuuacag

SEQ ID NO: 1941307 - RNA, 19 nt, Homo sapiens
  misc_RNA (1)...(19): siRNA sense strand
agaaguucaucaggaucua

SEQ ID NO: 1941308 - RNA, 19 nt, Homo sapiens
  misc_RNA (1)...(19): siRNA sense strand
aaaggcagaacuccaaauc

SEQ ID NO: 1941309 - RNA, 19 nt, Homo sapiens
  misc_RNA (1)...(19): siRNA sense strand
ccucacacgguucuucaaa

SEQ ID NO: 1941310 - RNA, 19 nt, Homo sapiens
  misc_RNA (1)...(19): siRNA sense strand
ucaucaggaucuauaaacu

SEQ ID NO: 1941311 - RNA, 19 nt, Homo sapiens
  misc_RNA (1)...(19): siRNA sense strand
agacucggaucuccuucug

SEQ ID NO: 1941312 - RNA, 19 nt, Homo sapiens
  misc_RNA (1)...(19): siRNA sense strand
gccugcccaucaugacuuu

SEQ ID NO: 1941313 - RNA, 19 nt, Homo sapiens
  misc_RNA (1)...(19): siRNA sense strand
uuccugaccuggccuguuc

SEQ ID NO: 1941314 - RNA, 19 nt, Homo sapiens
  misc_RNA (1)...(19): siRNA sense strand
gagaagacgacagagaucu

SEQ ID NO: 1941315 - RNA, 19 nt, Homo sapiens
  misc_RNA (1)...(19): siRNA sense strand
ggaaacugacgggcacugu

SEQ ID NO: 1941316 - RNA, 19 nt, Homo sapiens
  misc_RNA (1)...(19): siRNA sense strand
gaaaaggcagaacuccaaa

SEQ ID NO: 1941317 - RNA, 19 nt, Homo sapiens
  misc_RNA (1)...(19): siRNA sense strand
gcacaggagcuggcaucug

SEQ ID NO: 1941318 - RNA, 19 nt, Homo sapiens
  misc_RNA (1)...(19): siRNA sense strand
gcaggccugggcagaaguu

SEQ ID NO: 1941319 - RNA, 19 nt, Homo sapiens
  misc_RNA (1)...(19): siRNA sense strand
ggaggaggacuuggaaacu

SEQ ID NO: 1941320 - RNA, 19 nt, Homo sapiens
  misc_RNA (1)...(19): siRNA sense strand
gguggaggaggacuuggaa

SEQ ID NO: 1941321 - RNA, 19 nt, Homo sapiens
  misc_RNA (1)...(19): siRNA sense strand
uggacaaggugcagaucau

SEQ ID NO: 1941322 - RNA, 19 nt, Homo sapiens
  misc_RNA (1)...(19): siRNA sense strand
uuaaccagauuagcacauc

SEQ ID NO: 1941323 - RNA, 19 nt, Homo sapiens
  misc_RNA (1)...(19): siRNA sense strand
uggcccugcucuucuauuc

SEQ ID NO: 1941324 - RNA, 19 nt, Homo sapiens
  misc_RNA (1)...(19): siRNA sense strand
gcugacuuccuuugucuca

SEQ ID NO: 1941325 - RNA, 19 nt, Homo sapiens
  misc_RNA (1)...(19): siRNA sense strand
ggagccaggacagcuuuga

SEQ ID NO: 1941326 - RNA, 19 nt, Homo sapiens
  misc_RNA (1)...(19): siRNA sense strand
ggucucaccgugcuacaag

SEQ ID NO: 1941327 - RNA, 19 nt, Homo sapiens
  misc_RNA (1)...(19): siRNA sense strand
gaucuauaaacucuucaag

SEQ ID NO: 1941328 - RNA, 19 nt, Homo sapiens
  misc_RNA (1)...(19): siRNA sense strand
agaguguagucagauguga

SEQ ID NO: 1941329 - RNA, 19 nt, Homo sapiens
  misc_RNA (1)...(19): siRNA sense strand
gaccaggaugagagaaaga

SEQ ID NO: 1941330 - RNA, 19 nt, Homo sapiens
  misc_RNA (1)...(19): siRNA sense strand
gcugggcugugucugaacu

SEQ ID NO: 1941331 - RNA, 19 nt, Homo sapiens
  misc_RNA (1)...(19): siRNA sense strand
guacaucaccucuuucauu

SEQ ID NO: 1941332 - RNA, 19 nt, Homo sapiens
  misc_RNA (1)...(19): siRNA sense strand
agacguacaucaccucuuu

SEQ ID NO: 1941333 - RNA, 19 nt, Homo sapiens
  misc_RNA (1)...(19): siRNA sense strand
ggaaggagcagacuaugga

SEQ ID NO: 1941334 - RNA, 19 nt, Homo sapiens
  misc_RNA (1)...(19): siRNA sense strand
uacaucaccucuuucauuu

SEQ ID NO: 1941335 - RNA, 19 nt, Homo sapiens
  misc_RNA (1)...(19): siRNA sense strand
caucaccucuuucauuucu

SEQ ID NO: 1941336 - RNA, 19 nt, Homo sapiens
  misc_RNA (1)...(19): siRNA sense strand
guuccacccuugugcauug

SEQ ID NO: 1941337 - RNA, 19 nt, Homo sapiens
  misc_RNA (1)...(19): siRNA sense strand
uuucauuucuccagauuca

SEQ ID NO: 1941338 - RNA, 19 nt, Homo sapiens
  misc_RNA (1)...(19): siRNA sense strand
gacuauggagccagagauu

SEQ ID NO: 1941339 - RNA, 19 nt, Homo sapiens
  misc_RNA (1)...(19): siRNA sense strand
uagaaucagacguacauca

SEQ ID NO: 1941340 - RNA, 19 nt, Homo sapiens
  misc_RNA (1)...(19): siRNA sense strand
cacuguagaaucagacgua

SEQ ID NO: 1941341 - RNA, 19 nt, Homo sapiens
  misc_RNA (1)...(19): siRNA sense strand
ccacccuugugcauuggaa

SEQ ID NO: 1941342 - RNA, 19 nt, Homo sapiens
  misc_RNA (1)...(19): siRNA sense strand
agacguggguuuucugguu

SEQ ID NO: 1941343 - RNA, 19 nt, Homo sapiens
  misc_RNA (1)...(19): siRNA sense strand
gaaggagaauuaccauuau

SEQ ID NO: 1941344 - RNA, 19 nt, Homo sapiens
  misc_RNA (1)...(19): siRNA sense strand
caaaggaaaucaucucuag

SEQ ID NO: 1941345 - RNA, 19 nt, Homo sapiens
  misc_RNA (1)...(19): siRNA sense strand
ggaagaaugugcucaaagg

SEQ ID NO: 1941346 - RNA, 19 nt, Homo sapiens
  misc_RNA (1)...(19): siRNA sense strand
gaacaaggcuaugauccau

SEQ ID NO: 1941347 - RNA, 19 nt, Homo sapiens
  misc_RNA (1)...(19): siRNA sense strand
agaaggagaauuaccauua

SEQ ID NO: 1941348 - RNA, 19 nt, Homo sapiens
  misc_RNA (1)...(19): siRNA sense strand
ggaugugacucaugauuca

SEQ ID NO: 1941349 - RNA, 19 nt, Homo sapiens
  misc_RNA (1)...(19): siRNA sense strand
acaaggcuaugauccauuu

SEQ ID NO: 1941350 - RNA, 19 nt, Homo sapiens
  misc_RNA (1)...(19): siRNA sense strand
ucauugagaaggagaauua

SEQ ID NO: 1941351 - RNA, 19 nt, Homo sapiens
  misc_RNA (1)...(19): siRNA sense strand
gcuaugauccauuuaaaga

SEQ ID NO: 1941352 - RNA, 19 nt, Homo sapiens
  misc_RNA (1)...(19): siRNA sense strand
ggugaaaccugggaagaau

SEQ ID NO: 1941353 - RNA, 19 nt, Homo sapiens
  misc_RNA (1)...(19): siRNA sense strand
uaaagaagaucugaaccau

SEQ ID NO: 1941354 - RNA, 19 nt, Homo sapiens
  misc_RNA (1)...(19): siRNA sense strand
ccucaguugugaauucuuu

SEQ ID NO: 1941355 - RNA, 19 nt, Homo sapiens
  misc_RNA (1)...(19): siRNA sense strand
gguuggagcuggcaguuuc

SEQ ID NO: 1941356 - RNA, 19 nt, Homo sapiens
  misc_RNA (1)...(19): siRNA sense strand
gaaaggagaaguggaugug

SEQ ID NO: 1941357 - RNA, 19 nt, Homo sapiens
  misc_RNA (1)...(19): siRNA sense strand
ggagaauuaccauuauguu

SEQ ID NO: 1941358 - RNA, 19 nt, Homo sapiens
  misc_RNA (1)...(19): siRNA sense strand
ggacugcguuguuuaaaag

SEQ ID NO: 1941359 - RNA, 19 nt, Homo sapiens
  misc_RNA (1)...(19): siRNA sense strand
caucuggaguucggugaaa

SEQ ID NO: 1941360 - RNA, 19 nt, Homo sapiens
  misc_RNA (1)...(19): siRNA sense strand
gagaaggagaauuaccauu

SEQ ID NO: 1941361 - RNA, 19 nt, Homo sapiens
  misc_RNA (1)...(19): siRNA sense strand
aggcuaugauccauuuaaa

SEQ ID NO: 1941362 - RNA, 19 nt, Homo sapiens
  misc_RNA (1)...(19): siRNA sense strand
gagaaguggaugugacuca

SEQ ID NO: 1941363 - RNA, 19 nt, Homo sapiens
  misc_RNA (1)...(19): siRNA sense strand
aaguggaugugacucauga

SEQ ID NO: 1941364 - RNA, 19 nt, Homo sapiens
  misc_RNA (1)...(19): siRNA sense strand
gaggaaaggcucgguugga

SEQ ID NO: 1941365 - RNA, 19 nt, Homo sapiens
  misc_RNA (1)...(19): siRNA sense strand
gaaguggaugugacucaug

SEQ ID NO: 1941366 - RNA, 19 nt, Homo sapiens
  misc_RNA (1)...(19): siRNA sense strand
ggauacaaaggaaaucauc

SEQ ID NO: 1941367 - RNA, 19 nt, Homo sapiens
  misc_RNA (1)...(19): siRNA sense strand
aaggagaauuaccauuaug

SEQ ID NO: 1941368 - RNA, 19 nt, Homo sapiens
  misc_RNA (1)...(19): siRNA sense strand
ggaaaccugggaagaagca

SEQ ID NO: 1941369 - RNA, 19 nt, Homo sapiens
  misc_RNA (1)...(19): siRNA sense strand
ucacuuugccucaguugug

SEQ ID NO: 1941370 - RNA, 19 nt, Homo sapiens
  misc_RNA (1)...(19): siRNA sense strand
gggacugcguuguuuaaaa

SEQ ID NO: 1941371 - RNA, 19 nt, Homo sapiens
  misc_RNA (1)...(19): siRNA sense strand
acaaaggaaaucaucucua

SEQ ID NO: 1941372 - RNA, 19 nt, Homo sapiens
  misc_RNA (1)...(19): siRNA sense strand
gaaugugcucaaagggaaa

SEQ ID NO: 1941373 - RNA, 19 nt, Homo sapiens
  misc_RNA (1)...(19): siRNA sense strand
uaaaagaacaaggcuauga

SEQ ID NO: 1941374 - RNA, 19 nt, Homo sapiens
  misc_RNA (1)...(19): siRNA sense strand
ugggaagaaugugcucaaa

SEQ ID NO: 1941375 - RNA, 19 nt, Homo sapiens
  misc_RNA (1)...(19): siRNA sense strand
ugaaaccugggaagaaugu

SEQ ID NO: 1941376 - RNA, 19 nt, Homo sapiens
  misc_RNA (1)...(19): siRNA sense strand
ggugggauacaaaggaaau

SEQ ID NO: 1941377 - RNA, 19 nt, Homo sapiens
  misc_RNA (1)...(19): siRNA sense strand
gggaagaaugugcucaaag

SEQ ID NO: 1941378 - RNA, 19 nt, Homo sapiens
  misc_RNA (1)...(19): siRNA sense strand
cacuuugccucaguuguga

SEQ ID NO: 1941379 - RNA, 19 nt, Homo sapiens
  misc_RNA (1)...(19): siRNA sense strand
aaagaacaaggcuaugauc

SEQ ID NO: 1941380 - RNA, 19 nt, Homo sapiens
  misc_RNA (1)...(19): siRNA sense strand
guggaugugacucaugauu

SEQ ID NO: 1941381 - RNA, 19 nt, Homo sapiens
  misc_RNA (1)...(19): siRNA sense strand
uuaaagaagaucugaacca

SEQ ID NO: 1941382 - RNA, 19 nt, Homo sapiens
  misc_RNA (1)...(19): siRNA sense strand
aaagggaaaccugggaaga

SEQ ID NO: 1941383 - RNA, 19 nt, Homo sapiens
  misc_RNA (1)...(19): siRNA sense strand
gauacaaaggaaaucaucu

SEQ ID NO: 1941384 - RNA, 19 nt, Homo sapiens
  misc_RNA (1)...(19): siRNA sense strand
aaugaaaggagaaguggau

SEQ ID NO: 1941385 - RNA, 19 nt, Homo sapiens
  misc_RNA (1)...(19): siRNA sense strand
aagggaaaccugggaagaa

SEQ ID NO: 1941386 - RNA, 19 nt, Homo sapiens
  misc_RNA (1)...(19): siRNA sense strand
ggaccuaucugaacuaccu

SEQ ID NO: 1941387 - RNA, 19 nt, Homo sapiens
  misc_RNA (1)...(19): siRNA sense strand
ucaaccggcucaagaagaa

SEQ ID NO: 1941388 - RNA, 19 nt, Homo sapiens
  misc_RNA (1)...(19): siRNA sense strand
ggcgaagccucaaugacaa

SEQ ID NO: 1941389 - RNA, 19 nt, Homo sapiens
  misc_RNA (1)...(19): siRNA sense strand
cagggccacuguugacuug

SEQ ID NO: 1941390 - RNA, 19 nt, Homo sapiens
  misc_RNA (1)...(19): siRNA sense strand
acagugacuuccuccagaa

SEQ ID NO: 1941391 - RNA, 19 nt, Homo sapiens
  misc_RNA (1)...(19): siRNA sense strand
gcugggaccuaucugaacu

SEQ ID NO: 1941392 - RNA, 19 nt, Homo sapiens
  misc_RNA (1)...(19): siRNA sense strand
ucaacgagccagacuucaa

SEQ ID NO: 1941393 - RNA, 19 nt, Homo sapiens
  misc_RNA (1)...(19): siRNA sense strand
gggccacuguugacuugga

SEQ ID NO: 1941394 - RNA, 19 nt, Homo sapiens
  misc_RNA (1)...(19): siRNA sense strand
uggcgaagccucaaugaca

SEQ ID NO: 1941395 - RNA, 19 nt, Homo sapiens
  misc_RNA (1)...(19): siRNA sense strand
gcgaagccucaaugacaaa

SEQ ID NO: 1941396 - RNA, 19 nt, Homo sapiens
  misc_RNA (1)...(19): siRNA sense strand
caacgagccagacuucaac

SEQ ID NO: 1941397 - RNA, 19 nt, Homo sapiens
  misc_RNA (1)...(19): siRNA sense strand
gcagugccagcucucaauc

SEQ ID NO: 1941398 - RNA, 19 nt, Homo sapiens
  misc_RNA (1)...(19): siRNA sense strand
gacuucaaccggcucaaga

SEQ ID NO: 1941399 - RNA, 19 nt, Homo sapiens
  misc_RNA (1)...(19): siRNA sense strand
ggacuucaaccggcucaag

SEQ ID NO: 1941400 - RNA, 19 nt, Homo sapiens
  misc_RNA (1)...(19): siRNA sense strand
ggaaggaacucggugguuu

SEQ ID NO: 1941401 - RNA, 19 nt, Homo sapiens
  misc_RNA (1)...(19): siRNA sense strand
guacagggguggcaaaaua

SEQ ID NO: 1941402 - RNA, 19 nt, Homo sapiens
  misc_RNA (1)...(19): siRNA sense strand
ggaacucggugguuuggaa

SEQ ID NO: 1941403 - RNA, 19 nt, Homo sapiens
  misc_RNA (1)...(19): siRNA sense strand
uccaugaccuccugaaaua

SEQ ID NO: 1941404 - RNA, 19 nt, Homo sapiens
  misc_RNA (1)...(19): siRNA sense strand
gaaagacagcaaagaugua

SEQ ID NO: 1941405 - RNA, 19 nt, Homo sapiens
  misc_RNA (1)...(19): siRNA sense strand
caagaaugcugacaacgau

SEQ ID NO: 1941406 - RNA, 19 nt, Homo sapiens
  misc_RNA (1)...(19): siRNA sense strand
ggaaagacagcaaagaugu

SEQ ID NO: 1941407 - RNA, 19 nt, Homo sapiens
  misc_RNA (1)...(19): siRNA sense strand
aaagagaaaugcaaccaau

SEQ ID NO: 1941408 - RNA, 19 nt, Homo sapiens
  misc_RNA (1)...(19): siRNA sense strand
caacaagaaugcugacaac

SEQ ID NO: 1941409 - RNA, 19 nt, Homo sapiens
  misc_RNA (1)...(19): siRNA sense strand
ugacauuccuaucacauau

SEQ ID NO: 1941410 - RNA, 19 nt, Homo sapiens
  misc_RNA (1)...(19): siRNA sense strand
aaauaugccugacggauca

SEQ ID NO: 1941411 - RNA, 19 nt, Homo sapiens
  misc_RNA (1)...(19): siRNA sense strand
gaauaucagucccuuaucc

SEQ ID NO: 1941412 - RNA, 19 nt, Homo sapiens
  misc_RNA (1)...(19): siRNA sense strand
gaaauaugaguuugacauc

SEQ ID NO: 1941413 - RNA, 19 nt, Homo sapiens
  misc_RNA (1)...(19): siRNA sense strand
uggacuagcucaucucaug

SEQ ID NO: 1941414 - RNA, 19 nt, Homo sapiens
  misc_RNA (1)...(19): siRNA sense strand
ugacaucgaguuugacauu

SEQ ID NO: 1941415 - RNA, 19 nt, Homo sapiens
  misc_RNA (1)...(19): siRNA sense strand
gaaggaacucggugguuug

SEQ ID NO: 1941416 - RNA, 19 nt, Homo sapiens
  misc_RNA (1)...(19): siRNA sense strand
ccugacggaucauuucaaa

SEQ ID NO: 1941417 - RNA, 19 nt, Homo sapiens
  misc_RNA (1)...(19): siRNA sense strand
ccuaucacauauccuacua

SEQ ID NO: 1941418 - RNA, 19 nt, Homo sapiens
  misc_RNA (1)...(19): siRNA sense strand
agagaaaugcaaccaauga

SEQ ID NO: 1941419 - RNA, 19 nt, Homo sapiens
  misc_RNA (1)...(19): siRNA sense strand
gaacucggugguuuggaaa

SEQ ID NO: 1941420 - RNA, 19 nt, Homo sapiens
  misc_RNA (1)...(19): siRNA sense strand
cggaucauuucaaaccuuu

SEQ ID NO: 1941421 - RNA, 19 nt, Homo sapiens
  misc_RNA (1)...(19): siRNA sense strand
ggaaaaugcugguauaucc

SEQ ID NO: 1941422 - RNA, 19 nt, Homo sapiens
  misc_RNA (1)...(19): siRNA sense strand
ucccggugcugaagacuaa

SEQ ID NO: 1941423 - RNA, 19 nt, Homo sapiens
  misc_RNA (1)...(19): siRNA sense strand
aauaugaguuugacaucga

SEQ ID NO: 1941424 - RNA, 19 nt, Homo sapiens
  misc_RNA (1)...(19): siRNA sense strand
guggaaaucccugaucuga

SEQ ID NO: 1941425 - RNA, 19 nt, Homo sapiens
  misc_RNA (1)...(19): siRNA sense strand
gaguuugacauuccuauca

SEQ ID NO: 1941426 - RNA, 19 nt, Homo sapiens
  misc_RNA (1)...(19): siRNA sense strand
caaagagaaaugcaaccaa

SEQ ID NO: 1941427 - RNA, 19 nt, Homo sapiens
  misc_RNA (1)...(19): siRNA sense strand
gacugaaggaggaauauca

SEQ ID NO: 1941428 - RNA, 19 nt, Homo sapiens
  misc_RNA (1)...(19): siRNA sense strand
ugagcuggauggaaagaca

SEQ ID NO: 1941429 - RNA, 19 nt, Homo sapiens
  misc_RNA (1)...(19): siRNA sense strand
gaggaauaucagucccuua

SEQ ID NO: 1941430 - RNA, 19 nt, Homo sapiens
  misc_RNA (1)...(19): siRNA sense strand
acaagaaugcugacaacga

SEQ ID NO: 1941431 - RNA, 19 nt, Homo sapiens
  misc_RNA (1)...(19): siRNA sense strand
gauggaaagacagcaaaga

SEQ ID NO: 1941432 - RNA, 19 nt, Homo sapiens
  misc_RNA (1)...(19): siRNA sense strand
caugaccuccugaaauaug

SEQ ID NO: 1941433 - RNA, 19 nt, Homo sapiens
  misc_RNA (1)...(19): siRNA sense strand
uaucacauauccuacuacu

SEQ ID NO: 1941434 - RNA, 19 nt, Homo sapiens
  misc_RNA (1)...(19): siRNA sense strand
gacaucgaguuugacauuc

SEQ ID NO: 1941435 - RNA, 19 nt, Homo sapiens
  misc_RNA (1)...(19): siRNA sense strand
aguuugacaucgaguuuga

SEQ ID NO: 1941436 - RNA, 19 nt, Homo sapiens
  misc_RNA (1)...(19): siRNA sense strand
guggagaacaacaagaaug

SEQ ID NO: 1941437 - RNA, 19 nt, Homo sapiens
  misc_RNA (1)...(19): siRNA sense strand
aggaauaucagucccuuau

SEQ ID NO: 1941438 - RNA, 19 nt, Homo sapiens
  misc_RNA (1)...(19): siRNA sense strand
ugaguuugacaucgaguuu

SEQ ID NO: 1941439 - RNA, 19 nt, Homo sapiens
  misc_RNA (1)...(19): siRNA sense strand
ggaauaucagucccuuauc

SEQ ID NO: 1941440 - RNA, 19 nt, Homo sapiens
  misc_RNA (1)...(19): siRNA sense strand
caguggaaaucccugaucu

SEQ ID NO: 1941441 - RNA, 19 nt, Homo sapiens
  misc_RNA (1)...(19): siRNA sense strand
gggcgucauccaccacaaa

SEQ ID NO: 1941442 - RNA, 19 nt, Homo sapiens
  misc_RNA (1)...(19): siRNA sense strand
agaaugcugacaacgauug

SEQ ID NO: 1941443 - RNA, 19 nt, Homo sapiens
  misc_RNA (1)...(19): siRNA sense strand
gcaguggaaaucccugauc

SEQ ID NO: 1941444 - RNA, 19 nt, Homo sapiens
  misc_RNA (1)...(19): siRNA sense strand
uggaaagacagcaaagaug

SEQ ID NO: 1941445 - RNA, 19 nt, Homo sapiens
  misc_RNA (1)...(19): siRNA sense strand
gguauguggagaacaacaa

SEQ ID NO: 1941446 - RNA, 19 nt, Homo sapiens
  misc_RNA (1)...(19): siRNA sense strand
acaacaagaaugcugacaa

SEQ ID NO: 1941447 - RNA, 19 nt, Homo sapiens
  misc_RNA (1)...(19): siRNA sense strand
uccgguauguggagaacaa

SEQ ID NO: 1941448 - RNA, 19 nt, Homo sapiens
  misc_RNA (1)...(19): siRNA sense strand
gacguguugugucugagau

SEQ ID NO: 1941449 - RNA, 19 nt, Homo sapiens
  misc_RNA (1)...(19): siRNA sense strand
cgcgacguguugugucuga

SEQ ID NO: 1941450 - RNA, 19 nt, Homo sapiens
  misc_RNA (1)...(19): siRNA sense strand
caagagauauucacggaaa

SEQ ID NO: 1941451 - RNA, 19 nt, Homo sapiens
  misc_RNA (1)...(19): siRNA sense strand
gaacagaagcucacaagga

SEQ ID NO: 1941452 - RNA, 19 nt, Homo sapiens
  misc_RNA (1)...(19): siRNA sense strand
ggagauacauucccagcaa

SEQ ID NO: 1941453 - RNA, 19 nt, Homo sapiens
  misc_RNA (1)...(19): siRNA sense strand
ugacagcauucaccaguua

SEQ ID NO: 1941454 - RNA, 19 nt, Homo sapiens
  misc_RNA (1)...(19): siRNA sense strand
caaaggcgaagaugaguua

SEQ ID NO: 1941455 - RNA, 19 nt, Homo sapiens
  misc_RNA (1)...(19): siRNA sense strand
gaacacaggaaagauuaua

SEQ ID NO: 1941456 - RNA, 19 nt, Homo sapiens
  misc_RNA (1)...(19): siRNA sense strand
ggaaggcaacgaagacaua

SEQ ID NO: 1941457 - RNA, 19 nt, Homo sapiens
  misc_RNA (1)...(19): siRNA sense strand
ggagagugguugagauuuc

SEQ ID NO: 1941458 - RNA, 19 nt, Homo sapiens
  misc_RNA (1)...(19): siRNA sense strand
gccauaccaugucugaaua

SEQ ID NO: 1941459 - RNA, 19 nt, Homo sapiens
  misc_RNA (1)...(19): siRNA sense strand
aaagagugguggauaagaa

SEQ ID NO: 1941460 - RNA, 19 nt, Homo sapiens
  misc_RNA (1)...(19): siRNA sense strand
cauaagagaggccauuaaa

SEQ ID NO: 1941461 - RNA, 19 nt, Homo sapiens
  misc_RNA (1)...(19): siRNA sense strand
gaaaaucagcgacuaauug

SEQ ID NO: 1941462 - RNA, 19 nt, Homo sapiens
  misc_RNA (1)...(19): siRNA sense strand
agaccaggaugcccagaua

SEQ ID NO: 1941463 - RNA, 19 nt, Homo sapiens
  misc_RNA (1)...(19): siRNA sense strand
gaaccagaaccaaauacaa

SEQ ID NO: 1941464 - RNA, 19 nt, Homo sapiens
  misc_RNA (1)...(19): siRNA sense strand
gaauccacaucuucugaga

SEQ ID NO: 1941465 - RNA, 19 nt, Homo sapiens
  misc_RNA (1)...(19): siRNA sense strand
gcgacuaauuggugaaaug

SEQ ID NO: 1941466 - RNA, 19 nt, Homo sapiens
  misc_RNA (1)...(19): siRNA sense strand
ggacaucacgcugcuauuc

SEQ ID NO: 1941467 - RNA, 19 nt, Homo sapiens
  misc_RNA (1)...(19): siRNA sense strand
cagagagccauccgaguua

SEQ ID NO: 1941468 - RNA, 19 nt, Homo sapiens
  misc_RNA (1)...(19): siRNA sense strand
ugaaacacaaccugaauug

SEQ ID NO: 1941469 - RNA, 19 nt, Homo sapiens
  misc_RNA (1)...(19): siRNA sense strand
gaaggcaacgaagacauaa

SEQ ID NO: 1941470 - RNA, 19 nt, Homo sapiens
  misc_RNA (1)...(19): siRNA sense strand
gcaacaggaagcugagauu

SEQ ID NO: 1941471 - RNA, 19 nt, Homo sapiens
  misc_RNA (1)...(19): siRNA sense strand
gaagauuacuugaaaagag

SEQ ID NO: 1941472 - RNA, 19 nt, Homo sapiens
  misc_RNA (1)...(19): siRNA sense strand
gcaacgaagacauaagaga

SEQ ID NO: 1941473 - RNA, 19 nt, Homo sapiens
  misc_RNA (1)...(19): siRNA sense strand
gaagggagagugguugaga

SEQ ID NO: 1941474 - RNA, 19 nt, Homo sapiens
  misc_RNA (1)...(19): siRNA sense strand
gcaauucagcaacuacgaa

SEQ ID NO: 1941475 - RNA, 19 nt, Homo sapiens
  misc_RNA (1)...(19): siRNA sense strand
gacauaagagaggccauua

SEQ ID NO: 1941476 - RNA, 19 nt, Homo sapiens
  misc_RNA (1)...(19): siRNA sense strand
caaauacaaagacaagaga

SEQ ID NO: 1941477 - RNA, 19 nt, Homo sapiens
  misc_RNA (1)...(19): siRNA sense strand
aaacuuuacucagaacaga

SEQ ID NO: 1941478 - RNA, 19 nt, Homo sapiens
  misc_RNA (1)...(19): siRNA sense strand
gaggaugacagacacagaa

SEQ ID NO: 1941479 - RNA, 19 nt, Homo sapiens
  misc_RNA (1)...(19): siRNA sense strand
gaaccaaauacaaagacaa

SEQ ID NO: 1941480 - RNA, 19 nt, Homo sapiens
  misc_RNA (1)...(19): siRNA sense strand
gcuuauagccauaccaugu

SEQ ID NO: 1941481 - RNA, 19 nt, Homo sapiens
  misc_RNA (1)...(19): siRNA sense strand
ggaccgcuguuuuggauuu

SEQ ID NO: 1941482 - RNA, 19 nt, Homo sapiens
  misc_RNA (1)...(19): siRNA sense strand
uggaacacaggaaagauua

SEQ ID NO: 1941483 - RNA, 19 nt, Homo sapiens
  misc_RNA (1)...(19): siRNA sense strand
acagagagccauccgaguu

SEQ ID NO: 1941484 - RNA, 19 nt, Homo sapiens
  misc_RNA (1)...(19): siRNA sense strand
gcaaaggcgaagaugaguu

SEQ ID NO: 1941485 - RNA, 19 nt, Homo sapiens
  misc_RNA (1)...(19): siRNA sense strand
gacaagagaauccacaucu

SEQ ID NO: 1941486 - RNA, 19 nt, Homo sapiens
  misc_RNA (1)...(19): siRNA sense strand
gaggaccuguucagaagca

SEQ ID NO: 1941487 - RNA, 19 nt, Homo sapiens
  misc_RNA (1)...(19): siRNA sense strand
cagcuuguuugaugaagug

SEQ ID NO: 1941488 - RNA, 19 nt, Homo sapiens
  misc_RNA (1)...(19): siRNA sense strand
ccagaagaaauacaaaugu

SEQ ID NO: 1941489 - RNA, 19 nt, Homo sapiens
  misc_RNA (1)...(19): siRNA sense strand
caaaagacucugaagaaaa

SEQ ID NO: 1941490 - RNA, 19 nt, Homo sapiens
  misc_RNA (1)...(19): siRNA sense strand
ucaaaagacucugaagaaa

SEQ ID NO: 1941491 - RNA, 19 nt, Homo sapiens
  misc_RNA (1)...(19): siRNA sense strand
caugaggaccuguucagaa

SEQ ID NO: 1941492 - RNA, 19 nt, Homo sapiens
  misc_RNA (1)...(19): siRNA sense strand
aaccagaaccaaauacaaa

SEQ ID NO: 1941493 - RNA, 19 nt, Homo sapiens
  misc_RNA (1)...(19): siRNA sense strand
uuaaaagagugguggauaa

SEQ ID NO: 1941494 - RNA, 19 nt, Homo sapiens
  misc_RNA (1)...(19): siRNA sense strand
cagaagcaauucagcaacu

SEQ ID NO: 1941495 - RNA, 19 nt, Homo sapiens
  misc_RNA (1)...(19): siRNA sense strand
caacaggaagcugagauug

SEQ ID NO: 1941496 - RNA, 19 nt, Homo sapiens
  misc_RNA (1)...(19): siRNA sense strand
agaagcaauucagcaacua

SEQ ID NO: 1941497 - RNA, 19 nt, Homo sapiens
  misc_RNA (1)...(19): siRNA sense strand
cgacuaauuggugaaauga

SEQ ID NO: 1941498 - RNA, 19 nt, Homo sapiens
  misc_RNA (1)...(19): siRNA sense strand
ggaaccagaaccaaauaca

SEQ ID NO: 1941499 - RNA, 19 nt, Homo sapiens
  misc_RNA (1)...(19): siRNA sense strand
agagagccauccgaguuaa

SEQ ID NO: 1941500 - RNA, 19 nt, Homo sapiens
  misc_RNA (1)...(19): siRNA sense strand
gaugacagacacagaacga

SEQ ID NO: 1941501 - RNA, 19 nt, Homo sapiens
  misc_RNA (1)...(19): siRNA sense strand
cacagaacgagaccagaua

SEQ ID NO: 1941502 - RNA, 19 nt, Homo sapiens
  misc_RNA (1)...(19): siRNA sense strand
gcucacaaggagauacauu

SEQ ID NO: 1941503 - RNA, 19 nt, Homo sapiens
  misc_RNA (1)...(19): siRNA sense strand
gcguguggauccucuucuu

SEQ ID NO: 1941504 - RNA, 19 nt, Homo sapiens
  misc_RNA (1)...(19): siRNA sense strand
ucaaggaaggcaacgaaga

SEQ ID NO: 1941505 - RNA, 19 nt, Homo sapiens
  misc_RNA (1)...(19): siRNA sense strand
gcugaaacacaaccugaau

SEQ ID NO: 1941506 - RNA, 19 nt, Homo sapiens
  misc_RNA (1)...(19): siRNA sense strand
ggaacacaggaaagauuau

SEQ ID NO: 1941507 - RNA, 19 nt, Homo sapiens
  misc_RNA (1)...(19): siRNA sense strand
uaucaaggaaggcaacgaa

SEQ ID NO: 1941508 - RNA, 19 nt, Homo sapiens
  misc_RNA (1)...(19): siRNA sense strand
ccaaauacaaagacaagag

SEQ ID NO: 1941509 - RNA, 19 nt, Homo sapiens
  misc_RNA (1)...(19): siRNA sense strand
gaccuguucagaagcaauu

SEQ ID NO: 1941510 - RNA, 19 nt, Homo sapiens
  misc_RNA (1)...(19): siRNA sense strand
ccagaaccaaauacaaaga

SEQ ID NO: 1941511 - RNA, 19 nt, Homo sapiens
  misc_RNA (1)...(19): siRNA sense strand
aaaagacucugaagaaaac

SEQ ID NO: 1941512 - RNA, 19 nt, Homo sapiens
  misc_RNA (1)...(19): siRNA sense strand
gagagccauccgaguuaaa

SEQ ID NO: 1941513 - RNA, 19 nt, Homo sapiens
  misc_RNA (1)...(19): siRNA sense strand
ucacauuggcaaacugaga

SEQ ID NO: 1941514 - RNA, 19 nt, Homo sapiens
  misc_RNA (1)...(19): siRNA sense strand
ggaggaugacagacacaga

SEQ ID NO: 1941515 - RNA, 19 nt, Homo sapiens
  misc_RNA (1)...(19): siRNA sense strand
gcauucaccaguuaguugu

SEQ ID NO: 1941516 - RNA, 19 nt, Homo sapiens
  misc_RNA (1)...(19): siRNA sense strand
gaaacacaaccugaauugg

SEQ ID NO: 1941517 - RNA, 19 nt, Homo sapiens
  misc_RNA (1)...(19): siRNA sense strand
gagauuuucuucuggaaca

SEQ ID NO: 1941518 - RNA, 19 nt, Homo sapiens
  misc_RNA (1)...(19): siRNA sense strand
uuggcaaacugagagauuu

SEQ ID NO: 1941519 - RNA, 19 nt, Homo sapiens
  misc_RNA (1)...(19): siRNA sense strand
ggaaaaucagcgacuaauu

SEQ ID NO: 1941520 - RNA, 19 nt, Homo sapiens
  misc_RNA (1)...(19): siRNA sense strand
cagaagcucacaaggagau

SEQ ID NO: 1941521 - RNA, 19 nt, Homo sapiens
  misc_RNA (1)...(19): siRNA sense strand
acaggaagcugagauugac

SEQ ID NO: 1941522 - RNA, 19 nt, Homo sapiens
  misc_RNA (1)...(19): siRNA sense strand
caggaugcccagauauuca

SEQ ID NO: 1941523 - RNA, 19 nt, Homo sapiens
  misc_RNA (1)...(19): siRNA sense strand
caaggaaggcaacgaagac

SEQ ID NO: 1941524 - RNA, 19 nt, Homo sapiens
  misc_RNA (1)...(19): siRNA sense strand
caacugaaaauaucaagga

SEQ ID NO: 1941525 - RNA, 19 nt, Homo sapiens
  misc_RNA (1)...(19): siRNA sense strand
ugaagugaggcaaaucgaa

SEQ ID NO: 1941526 - RNA, 19 nt, Homo sapiens
  misc_RNA (1)...(19): siRNA sense strand
agaaaacccugccacugaa

SEQ ID NO: 1941527 - RNA, 19 nt, Homo sapiens
  misc_RNA (1)...(19): siRNA sense strand
gaagcaauucagcaacuac

SEQ ID NO: 1941528 - RNA, 19 nt, Homo sapiens
  misc_RNA (1)...(19): siRNA sense strand
ccaggaugcccagauauuc

SEQ ID NO: 1941529 - RNA, 19 nt, Homo sapiens
  misc_RNA (1)...(19): siRNA sense strand
augaggaccuguucagaag

SEQ ID NO: 1941530 - RNA, 19 nt, Homo sapiens
  misc_RNA (1)...(19): siRNA sense strand
gggagagugguugagauuu

SEQ ID NO: 1941531 - RNA, 19 nt, Homo sapiens
  misc_RNA (1)...(19): siRNA sense strand
acacagaacgagaccagau

SEQ ID NO: 1941532 - RNA, 19 nt, Homo sapiens
  misc_RNA (1)...(19): siRNA sense strand
cagcaacuacgaacagaag

SEQ ID NO: 1941533 - RNA, 19 nt, Homo sapiens
  misc_RNA (1)...(19): siRNA sense strand
agaaccaaauacaaagaca

SEQ ID NO: 1941534 - RNA, 19 nt, Homo sapiens
  misc_RNA (1)...(19): siRNA sense strand
acauaagagaggccauuaa

SEQ ID NO: 1941535 - RNA, 19 nt, Homo sapiens
  misc_RNA (1)...(19): siRNA sense strand
aggcaacgaagacauaaga

SEQ ID NO: 1941536 - RNA, 19 nt, Homo sapiens
  misc_RNA (1)...(19): siRNA sense strand
aacaggaagcugagauuga

SEQ ID NO: 1941537 - RNA, 19 nt, Homo sapiens
  misc_RNA (1)...(19): siRNA sense strand
uuucacagaguccuucaaa

SEQ ID NO: 1941538 - RNA, 19 nt, Homo sapiens
  misc_RNA (1)...(19): siRNA sense strand
gaccaggaugcccagauau

SEQ ID NO: 1941539 - RNA, 19 nt, Homo sapiens
  misc_RNA (1)...(19): siRNA sense strand
ugaguuauccccagaagaa

SEQ ID NO: 1941540 - RNA, 19 nt, Homo sapiens
  misc_RNA (1)...(19): siRNA sense strand
caaccugaauugggaacgu

SEQ ID NO: 1941541 - RNA, 19 nt, Homo sapiens
  misc_RNA (1)...(19): siRNA sense strand
acuaauuggugaaaugaac

SEQ ID NO: 1941542 - RNA, 19 nt, Homo sapiens
  misc_RNA (1)...(19): siRNA sense strand
agacauaagagaggccauu

SEQ ID NO: 1941543 - RNA, 19 nt, Homo sapiens
  misc_RNA (1)...(19): siRNA sense strand
auacauucccagcaaguga

SEQ ID NO: 1941544 - RNA, 19 nt, Homo sapiens
  misc_RNA (1)...(19): siRNA sense strand
gauauucacggaaaagguu

SEQ ID NO: 1941545 - RNA, 19 nt, Homo sapiens
  misc_RNA (1)...(19): siRNA sense strand
gagagugguugagauuucc

SEQ ID NO: 1941546 - RNA, 19 nt, Homo sapiens
  misc_RNA (1)...(19): siRNA sense strand
gaugaagugaggcaaaucg

SEQ ID NO: 1941547 - RNA, 19 nt, Homo sapiens
  misc_RNA (1)...(19): siRNA sense strand
uuggugaaaugaacagcuu

SEQ ID NO: 1941548 - RNA, 19 nt, Homo sapiens
  misc_RNA (1)...(19): siRNA sense strand
cccagaagaaauacaaaug

SEQ ID NO: 1941549 - RNA, 19 nt, Homo sapiens
  misc_RNA (1)...(19): siRNA sense strand
aagaaaacccugccacuga

SEQ ID NO: 1941550 - RNA, 19 nt, Homo sapiens
  misc_RNA (1)...(19): siRNA sense strand
gaaaccaggugaaauuuau

SEQ ID NO: 1941551 - RNA, 19 nt, Homo sapiens
  misc_RNA (1)...(19): siRNA sense strand
caauauaaguuuccaguug

SEQ ID NO: 1941552 - RNA, 19 nt, Homo sapiens
  misc_RNA (1)...(19): siRNA sense strand
gaucauaaaucuagacaag

SEQ ID NO: 1941553 - RNA, 19 nt, Homo sapiens
  misc_RNA (1)...(19): siRNA sense strand
cagcacagaugaaguauau

SEQ ID NO: 1941554 - RNA, 19 nt, Homo sapiens
  misc_RNA (1)...(19): siRNA sense strand
guacgugccuuugaguuua

SEQ ID NO: 1941555 - RNA, 19 nt, Homo sapiens
  misc_RNA (1)...(19): siRNA sense strand
gacaugagauacccaauga

SEQ ID NO: 1941556 - RNA, 19 nt, Homo sapiens
  misc_RNA (1)...(19): siRNA sense strand
acaagaaacuuccuuuaug

SEQ ID NO: 1941557 - RNA, 19 nt, Homo sapiens
  misc_RNA (1)...(19): siRNA sense strand
ggaagauuauccaaacuau

SEQ ID NO: 1941558 - RNA, 19 nt, Homo sapiens
  misc_RNA (1)...(19): siRNA sense strand
ggaaaccaggugaaauuua

SEQ ID NO: 1941559 - RNA, 19 nt, Homo sapiens
  misc_RNA (1)...(19): siRNA sense strand
gguaagugcugcucaugaa

SEQ ID NO: 1941560 - RNA, 19 nt, Homo sapiens
  misc_RNA (1)...(19): siRNA sense strand
ggucagggcuucaaacaag

SEQ ID NO: 1941561 - RNA, 19 nt, Homo sapiens
  misc_RNA (1)...(19): siRNA sense strand
ggaaagaaggaauaaagaa

SEQ ID NO: 1941562 - RNA, 19 nt, Homo sapiens
  misc_RNA (1)...(19): siRNA sense strand
gaacuaauacaacugauca

SEQ ID NO: 1941563 - RNA, 19 nt, Homo sapiens
  misc_RNA (1)...(19): siRNA sense strand
acaagaagcaguaauguuu

SEQ ID NO: 1941564 - RNA, 19 nt, Homo sapiens
  misc_RNA (1)...(19): siRNA sense strand
uaaagugccuuggaaagaa

SEQ ID NO: 1941565 - RNA, 19 nt, Homo sapiens
  misc_RNA (1)...(19): siRNA sense strand
ccacaucaauauccagaaa

SEQ ID NO: 1941566 - RNA, 19 nt, Homo sapiens
  misc_RNA (1)...(19): siRNA sense strand
gaguggagaaguuuauuua

SEQ ID NO: 1941567 - RNA, 19 nt, Homo sapiens
  misc_RNA (1)...(19): siRNA sense strand
ccaaagaacuaauacaacu

SEQ ID NO: 1941568 - RNA, 19 nt, Homo sapiens
  misc_RNA (1)...(19): siRNA sense strand
ucaaagagaccaauucaga

SEQ ID NO: 1941569 - RNA, 19 nt, Homo sapiens
  misc_RNA (1)...(19): siRNA sense strand
caagaagcaguaauguuua

SEQ ID NO: 1941570 - RNA, 19 nt, Homo sapiens
  misc_RNA (1)...(19): siRNA sense strand
gaccuaaagugccuuggaa

SEQ ID NO: 1941571 - RNA, 19 nt, Homo sapiens
  misc_RNA (1)...(19): siRNA sense strand
caagaaacuuccuuuaugc

SEQ ID NO: 1941572 - RNA, 19 nt, Homo sapiens
  misc_RNA (1)...(19): siRNA sense strand
gauugucucuuuaguggaa

SEQ ID NO: 1941573 - RNA, 19 nt, Homo sapiens
  misc_RNA (1)...(19): siRNA sense strand
guggagaaguuuauuuaug

SEQ ID NO: 1941574 - RNA, 19 nt, Homo sapiens
  misc_RNA (1)...(19): siRNA sense strand
uagacaagcuggauuacug

SEQ ID NO: 1941575 - RNA, 19 nt, Homo sapiens
  misc_RNA (1)...(19): siRNA sense strand
gaucaaagagaccaauuca

SEQ ID NO: 1941576 - RNA, 19 nt, Homo sapiens
  misc_RNA (1)...(19): siRNA sense strand
cacauaugauugucucuuu

SEQ ID NO: 1941577 - RNA, 19 nt, Homo sapiens
  misc_RNA (1)...(19): siRNA sense strand
gaguuuaccuauguuaaug

SEQ ID NO: 1941578 - RNA, 19 nt, Homo sapiens
  misc_RNA (1)...(19): siRNA sense strand
acauguagaucuuucauuc

SEQ ID NO: 1941579 - RNA, 19 nt, Homo sapiens
  misc_RNA (1)...(19): siRNA sense strand
cagaaaagguuauuccaaa

SEQ ID NO: 1941580 - RNA, 19 nt, Homo sapiens
  misc_RNA (1)...(19): siRNA sense strand
acaaacacauguagaucuu

SEQ ID NO: 1941581 - RNA, 19 nt, Homo sapiens
  misc_RNA (1)...(19): siRNA sense strand
aaacacauguagaucuuuc

SEQ ID NO: 1941582 - RNA, 19 nt, Homo sapiens
  misc_RNA (1)...(19): siRNA sense strand
caaacaagaaacuuccuuu

SEQ ID NO: 1941583 - RNA, 19 nt, Homo sapiens
  misc_RNA (1)...(19): siRNA sense strand
gcacagaugaaguauaugg

SEQ ID NO: 1941584 - RNA, 19 nt, Homo sapiens
  misc_RNA (1)...(19): siRNA sense strand
uuagaacccuuuccgguau

SEQ ID NO: 1941585 - RNA, 19 nt, Homo sapiens
  misc_RNA (1)...(19): siRNA sense strand
ccaccaaugacaugagaua

SEQ ID NO: 1941586 - RNA, 19 nt, Homo sapiens
  misc_RNA (1)...(19): siRNA sense strand
uauacagggugacauaugu

SEQ ID NO: 1941587 - RNA, 19 nt, Homo sapiens
  misc_RNA (1)...(19): siRNA sense strand
ggagaaguuuauuuauguc

SEQ ID NO: 1941588 - RNA, 19 nt, Homo sapiens
  misc_RNA (1)...(19): siRNA sense strand
cggcggugcugguuucauu

SEQ ID NO: 1941589 - RNA, 19 nt, Homo sapiens
  misc_RNA (1)...(19): siRNA sense strand
uauaacaucggaaccaauu

SEQ ID NO: 1941590 - RNA, 19 nt, Homo sapiens
  misc_RNA (1)...(19): siRNA sense strand
gauacccaaugaagucaga

SEQ ID NO: 1941591 - RNA, 19 nt, Homo sapiens
  misc_RNA (1)...(19): siRNA sense strand
uuucacaacuggaagaaug

SEQ ID NO: 1941592 - RNA, 19 nt, Homo sapiens
  misc_RNA (1)...(19): siRNA sense strand
uacaaauccuuaugcauca

SEQ ID NO: 1941593 - RNA, 19 nt, Homo sapiens
  misc_RNA (1)...(19): siRNA sense strand
uaugguggcagucuugaua

SEQ ID NO: 1941594 - RNA, 19 nt, Homo sapiens
  misc_RNA (1)...(19): siRNA sense strand
auacauggcuuaggaugga

SEQ ID NO: 1941595 - RNA, 19 nt, Homo sapiens
  misc_RNA (1)...(19): siRNA sense strand
gcacaaacacauguagauc

SEQ ID NO: 1941596 - RNA, 19 nt, Homo sapiens
  misc_RNA (1)...(19): siRNA sense strand
gggaaaccaggugaaauuu

SEQ ID NO: 1941597 - RNA, 19 nt, Homo sapiens
  misc_RNA (1)...(19): siRNA sense strand
ugucagcacagaugaagua

SEQ ID NO: 1941598 - RNA, 19 nt, Homo sapiens
  misc_RNA (1)...(19): siRNA sense strand
uagaacccuuuccgguaua

SEQ ID NO: 1941599 - RNA, 19 nt, Homo sapiens
  misc_RNA (1)...(19): siRNA sense strand
ccaaacaaccuacaaaucc

SEQ ID NO: 1941600 - RNA, 19 nt, Homo sapiens
  misc_RNA (1)...(19): siRNA sense strand
ucauaaaucuagacaagcu

SEQ ID NO: 1941601 - RNA, 19 nt, Homo sapiens
  misc_RNA (1)...(19): siRNA sense strand
ccuuugaguuuaccuaugu

SEQ ID NO: 1941602 - RNA, 19 nt, Homo sapiens
  misc_RNA (1)...(19): siRNA sense strand
ugugcaagcuugaagaauc

SEQ ID NO: 1941603 - RNA, 19 nt, Homo sapiens
  misc_RNA (1)...(19): siRNA sense strand
gugcaagcuugaagaaucu

SEQ ID NO: 1941604 - RNA, 19 nt, Homo sapiens
  misc_RNA (1)...(19): siRNA sense strand
cuaaagugccuuggaaaga

SEQ ID NO: 1941605 - RNA, 19 nt, Homo sapiens
  misc_RNA (1)...(19): siRNA sense strand
caaacaaccuacaaauccu

SEQ ID NO: 1941606 - RNA, 19 nt, Homo sapiens
  misc_RNA (1)...(19): siRNA sense strand
ugagauacccaaugaaguc

SEQ ID NO: 1941607 - RNA, 19 nt, Homo sapiens
  misc_RNA (1)...(19): siRNA sense strand
cuaacaaacagaacuacaa

SEQ ID NO: 1941608 - RNA, 19 nt, Homo sapiens
  misc_RNA (1)...(19): siRNA sense strand
guggcagucuugauaagga

SEQ ID NO: 1941609 - RNA, 19 nt, Homo sapiens
  misc_RNA (1)...(19): siRNA sense strand
gauagacccaccaaugaca

SEQ ID NO: 1941610 - RNA, 19 nt, Homo sapiens
  misc_RNA (1)...(19): siRNA sense strand
aaugauagacccaccaaug

SEQ ID NO: 1941611 - RNA, 19 nt, Homo sapiens
  misc_RNA (1)...(19): siRNA sense strand
gaagcaguaauguuuaugg

SEQ ID NO: 1941612 - RNA, 19 nt, Homo sapiens
  misc_RNA (1)...(19): siRNA sense strand
guuuauggcacucacguuu

SEQ ID NO: 1941613 - RNA, 19 nt, Homo sapiens
  misc_RNA (1)...(19): siRNA sense strand
agaaacuuccuuuaugcua

SEQ ID NO: 1941614 - RNA, 19 nt, Homo sapiens
  misc_RNA (1)...(19): siRNA sense strand
agggaaaccaggugaaauu

SEQ ID NO: 1941615 - RNA, 19 nt, Homo sapiens
  misc_RNA (1)...(19): siRNA sense strand
aagcaguaauguuuaugga

SEQ ID NO: 1941616 - RNA, 19 nt, Homo sapiens
  misc_RNA (1)...(19): siRNA sense strand
ugacaugagauacccaaug

SEQ ID NO: 1941617 - RNA, 19 nt, Homo sapiens
  misc_RNA (1)...(19): siRNA sense strand
caaccuacaaauccuuaug

SEQ ID NO: 1941618 - RNA, 19 nt, Homo sapiens
  misc_RNA (1)...(19): siRNA sense strand
caacuggaagaauguggaa

SEQ ID NO: 1941619 - RNA, 19 nt, Homo sapiens
  misc_RNA (1)...(19): siRNA sense strand
gagagaauuuucacaacug

SEQ ID NO: 1941620 - RNA, 19 nt, Homo sapiens
  misc_RNA (1)...(19): siRNA sense strand
uuauggaccacaucaauau

SEQ ID NO: 1941621 - RNA, 19 nt, Homo sapiens
  misc_RNA (1)...(19): siRNA sense strand
cguacgugccuuugaguuu

SEQ ID NO: 1941622 - RNA, 19 nt, Homo sapiens
  misc_RNA (1)...(19): siRNA sense strand
gaaugguacagagagaauu

SEQ ID NO: 1941623 - RNA, 19 nt, Homo sapiens
  misc_RNA (1)...(19): siRNA sense strand
cagggugacauaugugauu

SEQ ID NO: 1941624 - RNA, 19 nt, Homo sapiens
  misc_RNA (1)...(19): siRNA sense strand
caugagauacccaaugaag

SEQ ID NO: 1941625 - RNA, 19 nt, Homo sapiens
  misc_RNA (1)...(19): siRNA sense strand
aaagagaccaauucagagu

SEQ ID NO: 1941626 - RNA, 19 nt, Homo sapiens
  misc_RNA (1)...(19): siRNA sense strand
aaagggaaaccaggugaaa

SEQ ID NO: 1941627 - RNA, 19 nt, Homo sapiens
  misc_RNA (1)...(19): siRNA sense strand
cacaagaagcaguaauguu

SEQ ID NO: 1941628 - RNA, 19 nt, Homo sapiens
  misc_RNA (1)...(19): siRNA sense strand
ccuuaugcaucaucuaaag

SEQ ID NO: 1941629 - RNA, 19 nt, Homo sapiens
  misc_RNA (1)...(19): siRNA sense strand
uguagaucuuucauucgua

SEQ ID NO: 1941630 - RNA, 19 nt, Homo sapiens
  misc_RNA (1)...(19): siRNA sense strand
guauaugguggcagucuug

SEQ ID NO: 1941631 - RNA, 19 nt, Homo sapiens
  misc_RNA (1)...(19): siRNA sense strand
ccagaguggagaaguuuau

SEQ ID NO: 1941632 - RNA, 19 nt, Homo sapiens
  misc_RNA (1)...(19): siRNA sense strand
aagccagaguggagaaguu

SEQ ID NO: 1941633 - RNA, 19 nt, Homo sapiens
  misc_RNA (1)...(19): siRNA sense strand
caaagaacuaauacaacug

SEQ ID NO: 1941634 - RNA, 19 nt, Homo sapiens
  misc_RNA (1)...(19): siRNA sense strand
ugccaaagaacuaauacaa

SEQ ID NO: 1941635 - RNA, 19 nt, Homo sapiens
  misc_RNA (1)...(19): siRNA sense strand
uuuauggaccacaucaaua

SEQ ID NO: 1941636 - RNA, 19 nt, Homo sapiens
  misc_RNA (1)...(19): siRNA sense strand
uggaaagaaggaauaaaga

SEQ ID NO: 1941637 - RNA, 19 nt, Homo sapiens
  misc_RNA (1)...(19): siRNA sense strand
uuaugcuacugauguugua

SEQ ID NO: 1941638 - RNA, 19 nt, Homo sapiens
  misc_RNA (1)...(19): siRNA sense strand
ccaggugaaauuuauaaca

SEQ ID NO: 1941639 - RNA, 19 nt, Homo sapiens
  misc_RNA (1)...(19): siRNA sense strand
caauugaaugguacagaga

SEQ ID NO: 1941640 - RNA, 19 nt, Homo sapiens
  misc_RNA (1)...(19): siRNA sense strand
aaagugccuuggaaagaag

SEQ ID NO: 1941641 - RNA, 19 nt, Homo sapiens
  misc_RNA (1)...(19): siRNA sense strand
agucugaaauggaaaauug

SEQ ID NO: 1941642 - RNA, 19 nt, Homo sapiens
  misc_RNA (1)...(19): siRNA sense strand
ccagcuugccaaagaacua

SEQ ID NO: 1941643 - RNA, 19 nt, Homo sapiens
  misc_RNA (1)...(19): siRNA sense strand
uaacaucggaaccaauuuu

SEQ ID NO: 1941644 - RNA, 19 nt, Homo sapiens
  misc_RNA (1)...(19): siRNA sense strand
uuauuuaugucagcacaga

SEQ ID NO: 1941645 - RNA, 19 nt, Homo sapiens
  misc_RNA (1)...(19): siRNA sense strand
aaugguacagagagaauuu

SEQ ID NO: 1941646 - RNA, 19 nt, Homo sapiens
  misc_RNA (1)...(19): siRNA sense strand
gcuugccaaagaacuaaua

SEQ ID NO: 1941647 - RNA, 19 nt, Homo sapiens
  misc_RNA (1)...(19): siRNA sense strand
caaacacauguagaucuuu

SEQ ID NO: 1941648 - RNA, 19 nt, Homo sapiens
  misc_RNA (1)...(19): siRNA sense strand
aaacuuccuuuaugcuacu

SEQ ID NO: 1941649 - RNA, 19 nt, Homo sapiens
  misc_RNA (1)...(19): siRNA sense strand
cuaauacaacugaucaaag

SEQ ID NO: 1941650 - RNA, 19 nt, Homo sapiens
  misc_RNA (1)...(19): siRNA sense strand
ggacccagcucaaguuuaa

SEQ ID NO: 1941651 - RNA, 19 nt, Homo sapiens
  misc_RNA (1)...(19): siRNA sense strand
ggaagaagcuaacuauugg

SEQ ID NO: 1941652 - RNA, 19 nt, Homo sapiens
  misc_RNA (1)...(19): siRNA sense strand
ggaaagaucuggcgaugac

SEQ ID NO: 1941653 - RNA, 19 nt, Homo sapiens
  misc_RNA (1)...(19): siRNA sense strand
gauaucagcccucaacauu

SEQ ID NO: 1941654 - RNA, 19 nt, Homo sapiens
  misc_RNA (1)...(19): siRNA sense strand
gaagcuaacuauuggaaag

SEQ ID NO: 1941655 - RNA, 19 nt, Homo sapiens
  misc_RNA (1)...(19): siRNA sense strand
gcgaugaccuacaaacaga

SEQ ID NO: 1941656 - RNA, 19 nt, Homo sapiens
  misc_RNA (1)...(19): siRNA sense strand
ggagggaagccgagaauau

SEQ ID NO: 1941657 - RNA, 19 nt, Homo sapiens
  misc_RNA (1)...(19): siRNA sense strand
ggaugaagccagagauuug

SEQ ID NO: 1941658 - RNA, 19 nt, Homo sapiens
  misc_RNA (1)...(19): siRNA sense strand
ggaggaagaagcuaacuau

SEQ ID NO: 1941659 - RNA, 19 nt, Homo sapiens
  misc_RNA (1)...(19): siRNA sense strand
agacgcagcugcaacaaau

SEQ ID NO: 1941660 - RNA, 19 nt, Homo sapiens
  misc_RNA (1)...(19): siRNA sense strand
uaucagcccucaacauugu

SEQ ID NO: 1941661 - RNA, 19 nt, Homo sapiens
  misc_RNA (1)...(19): siRNA sense strand
gagaauaugaagcugaauu

SEQ ID NO: 1941662 - RNA, 19 nt, Homo sapiens
  misc_RNA (1)...(19): siRNA sense strand
gcaaaugacgaccuggaaa

SEQ ID NO: 1941663 - RNA, 19 nt, Homo sapiens
  misc_RNA (1)...(19): siRNA sense strand
gcgcagaccaaagccauua

SEQ ID NO: 1941664 - RNA, 19 nt, Homo sapiens
  misc_RNA (1)...(19): siRNA sense strand
gcaagaggaacuccgagaa

SEQ ID NO: 1941665 - RNA, 19 nt, Homo sapiens
  misc_RNA (1)...(19): siRNA sense strand
aagaggaacuccgagaauu

SEQ ID NO: 1941666 - RNA, 19 nt, Homo sapiens
  misc_RNA (1)...(19): siRNA sense strand
gaaucaggccaucgaaaga

SEQ ID NO: 1941667 - RNA, 19 nt, Homo sapiens
  misc_RNA (1)...(19): siRNA sense strand
gagggaagccgagaauaug

SEQ ID NO: 1941668 - RNA, 19 nt, Homo sapiens
  misc_RNA (1)...(19): siRNA sense strand
aagaccaauugcagaaaua

SEQ ID NO: 1941669 - RNA, 19 nt, Homo sapiens
  misc_RNA (1)...(19): siRNA sense strand
aaagaccaauugcagaaau

SEQ ID NO: 1941670 - RNA, 19 nt, Homo sapiens
  misc_RNA (1)...(19): siRNA sense strand
gaccaaagccauuaaagac

SEQ ID NO: 1941671 - RNA, 19 nt, Homo sapiens
  misc_RNA (1)...(19): siRNA sense strand
ccgagaauaugaagcugaa

SEQ ID NO: 1941672 - RNA, 19 nt, Homo sapiens
  misc_RNA (1)...(19): siRNA sense strand
cagcucaaguuuaaacaca

SEQ ID NO: 1941673 - RNA, 19 nt, Homo sapiens
  misc_RNA (1)...(19): siRNA sense strand
aggaagaagcuaacuauug

SEQ ID NO: 1941674 - RNA, 19 nt, Homo sapiens
  misc_RNA (1)...(19): siRNA sense strand
uggaaaccaucaaggagaa

SEQ ID NO: 1941675 - RNA, 19 nt, Homo sapiens
  misc_RNA (1)...(19): siRNA sense strand
gcagaccaaagccauuaaa

SEQ ID NO: 1941676 - RNA, 19 nt, Homo sapiens
  misc_RNA (1)...(19): siRNA sense strand
caagaggaacuccgagaau

SEQ ID NO: 1941677 - RNA, 19 nt, Homo sapiens
  misc_RNA (1)...(19): siRNA sense strand
uuaaagaccaauugcagaa

SEQ ID NO: 1941678 - RNA, 19 nt, Homo sapiens
  misc_RNA (1)...(19): siRNA sense strand
gaggaagaagcuaacuauu

SEQ ID NO: 1941679 - RNA, 19 nt, Homo sapiens
  misc_RNA (1)...(19): siRNA sense strand
gggcggagcagcaagaaca

SEQ ID NO: 1941680 - RNA, 19 nt, Homo sapiens
  misc_RNA (1)...(19): siRNA sense strand
agaccaaagccauuaaaga

SEQ ID NO: 1941681 - RNA, 19 nt, Homo sapiens
  misc_RNA (1)...(19): siRNA sense strand
caacauugugggagaccua

SEQ ID NO: 1941682 - RNA, 19 nt, Homo sapiens
  misc_RNA (1)...(19): siRNA sense strand
aaacagagggcagaaaaua

SEQ ID NO: 1941683 - RNA, 19 nt, Homo sapiens
  misc_RNA (1)...(19): siRNA sense strand
caaaugacgaccuggaaag

SEQ ID NO: 1941684 - RNA, 19 nt, Homo sapiens
  misc_RNA (1)...(19): siRNA sense strand
gagacgcagcugcaacaaa

SEQ ID NO: 1941685 - RNA, 19 nt, Homo sapiens
  misc_RNA (1)...(19): siRNA sense strand
gaucucagccuuggaggau

SEQ ID NO: 1941686 - RNA, 19 nt, Homo sapiens
  misc_RNA (1)...(19): siRNA sense strand
caaagccauuaaagaccaa

SEQ ID NO: 1941687 - RNA, 19 nt, Homo sapiens
  misc_RNA (1)...(19): siRNA sense strand
ucucagccuuggaggauga

SEQ ID NO: 1941688 - RNA, 19 nt, Homo sapiens
  misc_RNA (1)...(19): siRNA sense strand
agaauaugaagcugaauug

SEQ ID NO: 1941689 - RNA, 19 nt, Homo sapiens
  misc_RNA (1)...(19): siRNA sense strand
gaggacccagcucaaguuu

SEQ ID NO: 1941690 - RNA, 19 nt, Homo sapiens
  misc_RNA (1)...(19): siRNA sense strand
gcgccacgaucaugucucu

SEQ ID NO: 1941691 - RNA, 19 nt, Homo sapiens
  misc_RNA (1)...(19): siRNA sense strand
caaauugaaaccaggaaca

SEQ ID NO: 1941692 - RNA, 19 nt, Homo sapiens
  misc_RNA (1)...(19): siRNA sense strand
gggaagccgagaauaugaa

SEQ ID NO: 1941693 - RNA, 19 nt, Homo sapiens
  misc_RNA (1)...(19): siRNA sense strand
caaggagaaguuugaagug

SEQ ID NO: 1941694 - RNA, 19 nt, Homo sapiens
  misc_RNA (1)...(19): siRNA sense strand
gaagaagcuaacuauugga

SEQ ID NO: 1941695 - RNA, 19 nt, Homo sapiens
  misc_RNA (1)...(19): siRNA sense strand
agaaucuccuggaaucugu

SEQ ID NO: 1941696 - RNA, 19 nt, Homo sapiens
  misc_RNA (1)...(19): siRNA sense strand
uaaagaccaauugcagaaa

SEQ ID NO: 1941697 - RNA, 19 nt, Homo sapiens
  misc_RNA (1)...(19): siRNA sense strand
ggauaucagcccucaacau

SEQ ID NO: 1941698 - RNA, 19 nt, Homo sapiens
  misc_RNA (1)...(19): siRNA sense strand
cgaggacccagcucaaguu

SEQ ID NO: 1941699 - RNA, 19 nt, Homo sapiens
  misc_RNA (1)...(19): siRNA sense strand
cagcugcaacaaauugaaa

SEQ ID NO: 1941700 - RNA, 19 nt, Homo sapiens
  misc_RNA (1)...(19): siRNA sense strand
gaaggaugaagccagagau

SEQ ID NO: 1941701 - RNA, 19 nt, Homo sapiens
  misc_RNA (1)...(19): siRNA sense strand
ugaaucaggccaucgaaag

SEQ ID NO: 1941702 - RNA, 19 nt, Homo sapiens
  misc_RNA (1)...(19): siRNA sense strand
gcuaacuauuggaaagauc

SEQ ID NO: 1941703 - RNA, 19 nt, Homo sapiens
  misc_RNA (1)...(19): siRNA sense strand
gcagcugcaacaaauugaa

SEQ ID NO: 1941704 - RNA, 19 nt, Homo sapiens
  misc_RNA (1)...(19): siRNA sense strand
aauaugaagcugaauugga

SEQ ID NO: 1941705 - RNA, 19 nt, Homo sapiens
  misc_RNA (1)...(19): siRNA sense strand
ggagaccuacugcggaaag

SEQ ID NO: 1941706 - RNA, 19 nt, Homo sapiens
  misc_RNA (1)...(19): siRNA sense strand
gaauaugaagcugaauugg

SEQ ID NO: 1941707 - RNA, 19 nt, Homo sapiens
  misc_RNA (1)...(19): siRNA sense strand
ccgaggaggaagaagcuaa

SEQ ID NO: 1941708 - RNA, 19 nt, Homo sapiens
  misc_RNA (1)...(19): siRNA sense strand
agagaccuccuguccgaaa

SEQ ID NO: 1941709 - RNA, 19 nt, Homo sapiens
  misc_RNA (1)...(19): siRNA sense strand
ggagcagcaagaacagaga

SEQ ID NO: 1941710 - RNA, 19 nt, Homo sapiens
  misc_RNA (1)...(19): siRNA sense strand
aagaagcuaacuauuggaa

SEQ ID NO: 1941711 - RNA, 19 nt, Homo sapiens
  misc_RNA (1)...(19): siRNA sense strand
agaggaacuccgagaauuc

SEQ ID NO: 1941712 - RNA, 19 nt, Homo sapiens
  misc_RNA (1)...(19): siRNA sense strand
ggaagccgagaauaugaag

SEQ ID NO: 1941713 - RNA, 19 nt, Homo sapiens
  misc_RNA (1)...(19): siRNA sense strand
caucagagagcuggagcaa

SEQ ID NO: 1941714 - RNA, 19 nt, Homo sapiens
  misc_RNA (1)...(19): siRNA sense strand
gaaggcuaccggcagaucu

SEQ ID NO: 1941715 - RNA, 19 nt, Homo sapiens
  misc_RNA (1)...(19): siRNA sense strand
ugaaggaugaagccagaga

SEQ ID NO: 1941716 - RNA, 19 nt, Homo sapiens
  misc_RNA (1)...(19): siRNA sense strand
gagcagcaagaacagagau

SEQ ID NO: 1941717 - RNA, 19 nt, Homo sapiens
  misc_RNA (1)...(19): siRNA sense strand
gaagcugagaggacagaca

SEQ ID NO: 1941718 - RNA, 19 nt, Homo sapiens
  misc_RNA (1)...(19): siRNA sense strand
gaaaccaucaaggagaagu

SEQ ID NO: 1941719 - RNA, 19 nt, Homo sapiens
  misc_RNA (1)...(19): siRNA sense strand
gagcuggagcaagcaaaug

SEQ ID NO: 1941720 - RNA, 19 nt, Homo sapiens
  misc_RNA (1)...(19): siRNA sense strand
gaccuccuguccgaaaaua

SEQ ID NO: 1941721 - RNA, 19 nt, Homo sapiens
  misc_RNA (1)...(19): siRNA sense strand
cagcgugccuuugggugau

SEQ ID NO: 1941722 - RNA, 19 nt, Homo sapiens
  misc_RNA (1)...(19): siRNA sense strand
gagauuugcggcaggaacu

SEQ ID NO: 1941723 - RNA, 19 nt, Homo sapiens
  misc_RNA (1)...(19): siRNA sense strand
aaucaggccaucgaaagaa

SEQ ID NO: 1941724 - RNA, 19 nt, Homo sapiens
  misc_RNA (1)...(19): siRNA sense strand
gcagagagaugcacguuaa

SEQ ID NO: 1941725 - RNA, 19 nt, Homo sapiens
  misc_RNA (1)...(19): siRNA sense strand
ucaucugccuucauuauua

SEQ ID NO: 1941726 - RNA, 19 nt, Homo sapiens
  misc_RNA (1)...(19): siRNA sense strand
gaaugaggaugcagagaga

SEQ ID NO: 1941727 - RNA, 19 nt, Homo sapiens
  misc_RNA (1)...(19): siRNA sense strand
caagacaaauggcacuuuc

SEQ ID NO: 1941728 - RNA, 19 nt, Homo sapiens
  misc_RNA (1)...(19): siRNA sense strand
gauucucgcuccuuucaga

SEQ ID NO: 1941729 - RNA, 19 nt, Homo sapiens
  misc_RNA (1)...(19): siRNA sense strand
aaaugauucucgcuccuuu

SEQ ID NO: 1941730 - RNA, 19 nt, Homo sapiens
  misc_RNA (1)...(19): siRNA sense strand
gcaagacaaauggcacuuu

SEQ ID NO: 1941731 - RNA, 19 nt, Homo sapiens
  misc_RNA (1)...(19): siRNA sense strand
ggucaagaggcaaauaaga

SEQ ID NO: 1941732 - RNA, 19 nt, Homo sapiens
  misc_RNA (1)...(19): siRNA sense strand
gaaaugauucucgcuccuu

SEQ ID NO: 1941733 - RNA, 19 nt, Homo sapiens
  misc_RNA (1)...(19): siRNA sense strand
caucaucugccuucauuau

SEQ ID NO: 1941734 - RNA, 19 nt, Homo sapiens
  misc_RNA (1)...(19): siRNA sense strand
aaauggcacuuuccuucuu

SEQ ID NO: 1941735 - RNA, 19 nt, Homo sapiens
  misc_RNA (1)...(19): siRNA sense strand
ccugaucccugcaagacaa

SEQ ID NO: 1941736 - RNA, 19 nt, Homo sapiens
  misc_RNA (1)...(19): siRNA sense strand
caucugccuucauuauuag

SEQ ID NO: 1941737 - RNA, 19 nt, Homo sapiens
  misc_RNA (1)...(19): siRNA sense strand
agcaucaucugccuucauu

SEQ ID NO: 1941738 - RNA, 19 nt, Homo sapiens
  misc_RNA (1)...(19): siRNA sense strand
gaggcucaguggagucugu

SEQ ID NO: 1941739 - RNA, 19 nt, Homo sapiens
  misc_RNA (1)...(19): siRNA sense strand
gaucugagggagaaaggau

SEQ ID NO: 1941740 - RNA, 19 nt, Homo sapiens
  misc_RNA (1)...(19): siRNA sense strand
caaggucaagaggcaaaua

SEQ ID NO: 1941741 - RNA, 19 nt, Homo sapiens
  misc_RNA (1)...(19): siRNA sense strand
cccaggaucugagggagaa

SEQ ID NO: 1941742 - RNA, 19 nt, Homo sapiens
  misc_RNA (1)...(19): siRNA sense strand
caaauggcacuuuccuucu

SEQ ID NO: 1941743 - RNA, 19 nt, Homo sapiens
  misc_RNA (1)...(19): siRNA sense strand
cccaugaaaucaaggucaa

SEQ ID NO: 1941744 - RNA, 19 nt, Homo sapiens
  misc_RNA (1)...(19): siRNA sense strand
gggcaggaaugaggaugca

SEQ ID NO: 1941745 - RNA, 19 nt, Homo sapiens
  misc_RNA (1)...(19): siRNA sense strand
cuauuugugucucauuuac

SEQ ID NO: 1941746 - RNA, 19 nt, Homo sapiens
  misc_RNA (1)...(19): siRNA sense strand
aaggucaagaggcaaauaa

SEQ ID NO: 1941747 - RNA, 19 nt, Homo sapiens
  misc_RNA (1)...(19): siRNA sense strand
gacaaauggcacuuuccuu

SEQ ID NO: 1941748 - RNA, 19 nt, Homo sapiens
  misc_RNA (1)...(19): siRNA sense strand
caguggagucugucuguug

SEQ ID NO: 1941749 - RNA, 19 nt, Homo sapiens
  misc_RNA (1)...(19): siRNA sense strand
gcaucaucugccuucauua

SEQ ID NO: 1941750 - RNA, 19 nt, Homo sapiens
  misc_RNA (1)...(19): siRNA sense strand
caugaaaucaaggucaaga

SEQ ID NO: 1941751 - RNA, 19 nt, Homo sapiens
  misc_RNA (1)...(19): siRNA sense strand
ucaguggagucugucuguu

SEQ ID NO: 1941752 - RNA, 19 nt, Homo sapiens
  misc_RNA (1)...(19): siRNA sense strand
ggacaaagcuuacaaguug

SEQ ID NO: 1941753 - RNA, 19 nt, Homo sapiens
  misc_RNA (1)...(19): siRNA sense strand
uugcagagcuggaaauuaa

SEQ ID NO: 1941754 - RNA, 19 nt, Homo sapiens
  misc_RNA (1)...(19): siRNA sense strand
ccaaagagaugcaugaaag

SEQ ID NO: 1941755 - RNA, 19 nt, Homo sapiens
  misc_RNA (1)...(19): siRNA sense strand
gaagagggcccuggaugua

SEQ ID NO: 1941756 - RNA, 19 nt, Homo sapiens
  misc_RNA (1)...(19): siRNA sense strand
gaagagagacucgguucua

SEQ ID NO: 1941757 - RNA, 19 nt, Homo sapiens
  misc_RNA (1)...(19): siRNA sense strand
ggaaagagaguggcagaaa

SEQ ID NO: 1941758 - RNA, 19 nt, Homo sapiens
  misc_RNA (1)...(19): siRNA sense strand
gagagaagccaaagagaug

SEQ ID NO: 1941759 - RNA, 19 nt, Homo sapiens
  misc_RNA (1)...(19): siRNA sense strand
gagacucgguucuaacuuc

SEQ ID NO: 1941760 - RNA, 19 nt, Homo sapiens
  misc_RNA (1)...(19): siRNA sense strand
gaaagagaguggcagaaaa

SEQ ID NO: 1941761 - RNA, 19 nt, Homo sapiens
  misc_RNA (1)...(19): siRNA sense strand
gauagauccugaaguuaca

SEQ ID NO: 1941762 - RNA, 19 nt, Homo sapiens
  misc_RNA (1)...(19): siRNA sense strand
acagugaggugaaacaaau

SEQ ID NO: 1941763 - RNA, 19 nt, Homo sapiens
  misc_RNA (1)...(19): siRNA sense strand
aaagagguuucggcaguua

SEQ ID NO: 1941764 - RNA, 19 nt, Homo sapiens
  misc_RNA (1)...(19): siRNA sense strand
gaaagagagagaagccaaa

SEQ ID NO: 1941765 - RNA, 19 nt, Homo sapiens
  misc_RNA (1)...(19): siRNA sense strand
gaaggaaaaccuacaauug

SEQ ID NO: 1941766 - RNA, 19 nt, Homo sapiens
  misc_RNA (1)...(19): siRNA sense strand
ucaagaugaugcugacaga

SEQ ID NO: 1941767 - RNA, 19 nt, Homo sapiens
  misc_RNA (1)...(19): siRNA sense strand
agagaugcaugaaaggaaa

SEQ ID NO: 1941768 - RNA, 19 nt, Homo sapiens
  misc_RNA (1)...(19): siRNA sense strand
guucaaacaagcuguauau

SEQ ID NO: 1941769 - RNA, 19 nt, Homo sapiens
  misc_RNA (1)...(19): siRNA sense strand
aagagagacucgguucuaa

SEQ ID NO: 1941770 - RNA, 19 nt, Homo sapiens
  misc_RNA (1)...(19): siRNA sense strand
ugaaacaaauagagaagag

SEQ ID NO: 1941771 - RNA, 19 nt, Homo sapiens
  misc_RNA (1)...(19): siRNA sense strand
ggacagcuggcgaaacuuc

SEQ ID NO: 1941772 - RNA, 19 nt, Homo sapiens
  misc_RNA (1)...(19): siRNA sense strand
gaaguuacagaugaagaaa

SEQ ID NO: 1941773 - RNA, 19 nt, Homo sapiens
  misc_RNA (1)...(19): siRNA sense strand
gcaccgaggaagcauuuau

SEQ ID NO: 1941774 - RNA, 19 nt, Homo sapiens
  misc_RNA (1)...(19): siRNA sense strand
acaaagggaagaagagauu

SEQ ID NO: 1941775 - RNA, 19 nt, Homo sapiens
  misc_RNA (1)...(19): siRNA sense strand
cauuugagguucuucagau

SEQ ID NO: 1941776 - RNA, 19 nt, Homo sapiens
  misc_RNA (1)...(19): siRNA sense strand
guggacagcuggcgaaacu

SEQ ID NO: 1941777 - RNA, 19 nt, Homo sapiens
  misc_RNA (1)...(19): siRNA sense strand
acaaguugcuacuggauca

SEQ ID NO: 1941778 - RNA, 19 nt, Homo sapiens
  misc_RNA (1)...(19): siRNA sense strand
gaggugaaacaaauagaga

SEQ ID NO: 1941779 - RNA, 19 nt, Homo sapiens
  misc_RNA (1)...(19): siRNA sense strand
ggagagagcgggacuucag

SEQ ID NO: 1941780 - RNA, 19 nt, Homo sapiens
  misc_RNA (1)...(19): siRNA sense strand
aagcauuuaugaccuucua

SEQ ID NO: 1941781 - RNA, 19 nt, Homo sapiens
  misc_RNA (1)...(19): siRNA sense strand
caugaaaggaaacgacaaa

SEQ ID NO: 1941782 - RNA, 19 nt, Homo sapiens
  misc_RNA (1)...(19): siRNA sense strand
agacugacccguccugguu

SEQ ID NO: 1941783 - RNA, 19 nt, Homo sapiens
  misc_RNA (1)...(19): siRNA sense strand
gaaacaaauagagaagaga

SEQ ID NO: 1941784 - RNA, 19 nt, Homo sapiens
  misc_RNA (1)...(19): siRNA sense strand
aaacagacaaugaaacucu

SEQ ID NO: 1941785 - RNA, 19 nt, Homo sapiens
  misc_RNA (1)...(19): siRNA sense strand
gaaacgacaaagggaagaa

SEQ ID NO: 1941786 - RNA, 19 nt, Homo sapiens
  misc_RNA (1)...(19): siRNA sense strand
ggaagaagagauugaagcu

SEQ ID NO: 1941787 - RNA, 19 nt, Homo sapiens
  misc_RNA (1)...(19): siRNA sense strand
ugaaguuacagaugaagaa

SEQ ID NO: 1941788 - RNA, 19 nt, Homo sapiens
  misc_RNA (1)...(19): siRNA sense strand
cagcaccgaggaagcauuu

SEQ ID NO: 1941789 - RNA, 19 nt, Homo sapiens
  misc_RNA (1)...(19): siRNA sense strand
ggaaggaaaaccuacaauu

SEQ ID NO: 1941790 - RNA, 19 nt, Homo sapiens
  misc_RNA (1)...(19): siRNA sense strand
gagagagaagccaaagaga

SEQ ID NO: 1941791 - RNA, 19 nt, Homo sapiens
  misc_RNA (1)...(19): siRNA sense strand
cagauagauccugaaguua

SEQ ID NO: 1941792 - RNA, 19 nt, Homo sapiens
  misc_RNA (1)...(19): siRNA sense strand
ugagaccaccgaaaguaaa

SEQ ID NO: 1941793 - RNA, 19 nt, Homo sapiens
  misc_RNA (1)...(19): siRNA sense strand
ugaggaaagucgagauggu

SEQ ID NO: 1941794 - RNA, 19 nt, Homo sapiens
  misc_RNA (1)...(19): siRNA sense strand
gccaaagagaugcaugaaa

SEQ ID NO: 1941795 - RNA, 19 nt, Homo sapiens
  misc_RNA (1)...(19): siRNA sense strand
cgacaaagggaagaagaga

SEQ ID NO: 1941796 - RNA, 19 nt, Homo sapiens
  misc_RNA (1)...(19): siRNA sense strand
gagagacucgguucuaacu

SEQ ID NO: 1941797 - RNA, 19 nt, Homo sapiens
  misc_RNA (1)...(19): siRNA sense strand
agagggcccuggauguaau

SEQ ID NO: 1941798 - RNA, 19 nt, Homo sapiens
  misc_RNA (1)...(19): siRNA sense strand
ccugagaccaccgaaagua

SEQ ID NO: 1941799 - RNA, 19 nt, Homo sapiens
  misc_RNA (1)...(19): siRNA sense strand
gcuacuggaucaggagcaa

SEQ ID NO: 1941800 - RNA, 19 nt, Homo sapiens
  misc_RNA (1)...(19): siRNA sense strand
ggaaacgacaaagggaaga

SEQ ID NO: 1941801 - RNA, 19 nt, Homo sapiens
  misc_RNA (1)...(19): siRNA sense strand
auccugaaguuacagauga

SEQ ID NO: 1941802 - RNA, 19 nt, Homo sapiens
  misc_RNA (1)...(19): siRNA sense strand
aaagggaagaagagauuga

SEQ ID NO: 1941803 - RNA, 19 nt, Homo sapiens
  misc_RNA (1)...(19): siRNA sense strand
gaaaagaauacguggaaca

SEQ ID NO: 1941804 - RNA, 19 nt, Homo sapiens
  misc_RNA (1)...(19): siRNA sense strand
gauccugaaguuacagaug

SEQ ID NO: 1941805 - RNA, 19 nt, Homo sapiens
  misc_RNA (1)...(19): siRNA sense strand
agagagaagccaaagagau

SEQ ID NO: 1941806 - RNA, 19 nt, Homo sapiens
  misc_RNA (1)...(19): siRNA sense strand
gcauuuaugaccuucuaca

SEQ ID NO: 1941807 - RNA, 19 nt, Homo sapiens
  misc_RNA (1)...(19): siRNA sense strand
cuuggugcauccugacaaa

SEQ ID NO: 1941808 - RNA, 19 nt, Homo sapiens
  misc_RNA (1)...(19): siRNA sense strand
uugagguucuucagauaga

SEQ ID NO: 1941809 - RNA, 19 nt, Homo sapiens
  misc_RNA (1)...(19): siRNA sense strand
aaagagaugcaugaaagga

SEQ ID NO: 1941810 - RNA, 19 nt, Homo sapiens
  misc_RNA (1)...(19): siRNA sense strand
uuaugaccuucuacaguga

SEQ ID NO: 1941811 - RNA, 19 nt, Homo sapiens
  misc_RNA (1)...(19): siRNA sense strand
agauagauccugaaguuac

SEQ ID NO: 1941812 - RNA, 19 nt, Homo sapiens
  misc_RNA (1)...(19): siRNA sense strand
agagagagaagccaaagag

SEQ ID NO: 1941813 - RNA, 19 nt, Homo sapiens
  misc_RNA (1)...(19): siRNA sense strand
agaagagggcccuggaugu

SEQ ID NO: 1941814 - RNA, 19 nt, Homo sapiens
  misc_RNA (1)...(19): siRNA sense strand
uggacaaagcuuacaaguu

SEQ ID NO: 1941815 - RNA, 19 nt, Homo sapiens
  misc_RNA (1)...(19): siRNA sense strand
aggaagcauuuaugaccuu

SEQ ID NO: 1941816 - RNA, 19 nt, Homo sapiens
  misc_RNA (1)...(19): siRNA sense strand
gcgaaacuuccaagccaau

SEQ ID NO: 1941817 - RNA, 19 nt, Homo sapiens
  misc_RNA (1)...(19): siRNA sense strand
caaagggaagaagagauug

SEQ ID NO: 1941818 - RNA, 19 nt, Homo sapiens
  misc_RNA (1)...(19): siRNA sense strand
guuccucuuacuucaauuu

SEQ ID NO: 1941819 - RNA, 19 nt, Homo sapiens
  misc_RNA (1)...(19): siRNA sense strand
gacaaagggaagaagagau

SEQ ID NO: 1941820 - RNA, 19 nt, Homo sapiens
  misc_RNA (1)...(19): siRNA sense strand
gcaugaaaggaaacgacaa

SEQ ID NO: 1941821 - RNA, 19 nt, Homo sapiens
  misc_RNA (1)...(19): siRNA sense strand
gcagagcuggaaauuaaaa

SEQ ID NO: 1941822 - RNA, 19 nt, Homo sapiens
  misc_RNA (1)...(19): siRNA sense strand
cuucuacagugaggugaaa

SEQ ID NO: 1941823 - RNA, 19 nt, Homo sapiens
  misc_RNA (1)...(19): siRNA sense strand
aagagggcccuggauguaa

SEQ ID NO: 1941824 - RNA, 19 nt, Homo sapiens
  misc_RNA (1)...(19): siRNA sense strand
cugagaccaccgaaaguaa

SEQ ID NO: 1941825 - RNA, 19 nt, Homo sapiens
  misc_RNA (1)...(19): siRNA sense strand
auuugagguucuucagaua

SEQ ID NO: 1941826 - RNA, 19 nt, Homo sapiens
  misc_RNA (1)...(19): siRNA sense strand
ugaaaggaaacgacaaagg

SEQ ID NO: 1941827 - RNA, 19 nt, Homo sapiens
  misc_RNA (1)...(19): siRNA sense strand
gacaaugaaacucuuugca

SEQ ID NO: 1941828 - RNA, 19 nt, Homo sapiens
  misc_RNA (1)...(19): siRNA sense strand
ggugaaacaaauagagaag

SEQ ID NO: 1941829 - RNA, 19 nt, Homo sapiens
  misc_RNA (1)...(19): siRNA sense strand
caaagagaugcaugaaagg

SEQ ID NO: 1941830 - RNA, 19 nt, Homo sapiens
  misc_RNA (1)...(19): siRNA sense strand
ccugguuccucuuacuuca

SEQ ID NO: 1941831 - RNA, 19 nt, Homo sapiens
  misc_RNA (1)...(19): siRNA sense strand
cagugaggugaaacaaaua

SEQ ID NO: 1941832 - RNA, 19 nt, Homo sapiens
  misc_RNA (1)...(19): siRNA sense strand
aagagaugcaugaaaggaa

SEQ ID NO: 1941833 - RNA, 19 nt, Homo sapiens
  misc_RNA (1)...(19): siRNA sense strand
guacuauguucucaucauc

SEQ ID NO: 1941834 - RNA, 19 nt, Homo sapiens
  misc_RNA (1)...(19): siRNA sense strand
ccacaguucccaccuuugu

SEQ ID NO: 1941835 - RNA, 19 nt, Homo sapiens
  misc_RNA (1)...(19): siRNA sense strand
caaaaugccugcuuacacu

SEQ ID NO: 1941836 - RNA, 19 nt, Homo sapiens
  misc_RNA (1)...(19): siRNA sense strand
ucucaucauccuauucuuu

SEQ ID NO: 1941837 - RNA, 19 nt, Homo sapiens
  misc_RNA (1)...(19): siRNA sense strand
agggucgucuacucaauuu

SEQ ID NO: 1941838 - RNA, 19 nt, Homo sapiens
  misc_RNA (1)...(19): siRNA sense strand
gcuccacaguucccaccuu

SEQ ID NO: 1941839 - RNA, 19 nt, Homo sapiens
  misc_RNA (1)...(19): siRNA sense strand
ccagggucgucuacucaau

SEQ ID NO: 1941840 - RNA, 19 nt, Homo sapiens
  misc_RNA (1)...(19): siRNA sense strand
cuccacaguucccaccuuu

SEQ ID NO: 1941841 - RNA, 19 nt, Homo sapiens
  misc_RNA (1)...(19): siRNA sense strand
ccagggcucucucuuaccu

SEQ ID NO: 1941842 - RNA, 19 nt, Homo sapiens
  misc_RNA (1)...(19): siRNA sense strand
ucccagggcucucucuuac

SEQ ID NO: 1941843 - RNA, 19 nt, Homo sapiens
  misc_RNA (1)...(19): siRNA sense strand
guucccaccuuuguucugu

SEQ ID NO: 1941844 - RNA, 19 nt, Homo sapiens
  misc_RNA (1)...(19): siRNA sense strand
cagggucgucuacucaauu

SEQ ID NO: 1941845 - RNA, 19 nt, Homo sapiens
  misc_RNA (1)...(19): siRNA sense strand
agggcucucucuuaccuuu

SEQ ID NO: 1941846 - RNA, 19 nt, Homo sapiens
  misc_RNA (1)...(19): siRNA sense strand
acagguauguggcaaaaug

SEQ ID NO: 1941847 - RNA, 19 nt, Homo sapiens
  misc_RNA (1)...(19): siRNA sense strand
uguacuauguucucaucau

SEQ ID NO: 1941848 - RNA, 19 nt, Homo sapiens
  misc_RNA (1)...(19): siRNA sense strand
ggaacugggcguagaucag

SEQ ID NO: 1941849 - RNA, 19 nt, Homo sapiens
  misc_RNA (1)...(19): siRNA sense strand
uauguucucaucauccuau

SEQ ID NO: 1941850 - RNA, 19 nt, Homo sapiens
  misc_RNA (1)...(19): siRNA sense strand
ggaaucaacucaauuacau

SEQ ID NO: 1941851 - RNA, 19 nt, Homo sapiens
  misc_RNA (1)...(19): siRNA sense strand
uaucaucccuggugacaua

SEQ ID NO: 1941852 - RNA, 19 nt, Homo sapiens
  misc_RNA (1)...(19): siRNA sense strand
gacauaaacucguuaguca

SEQ ID NO: 1941853 - RNA, 19 nt, Homo sapiens
  misc_RNA (1)...(19): siRNA sense strand
gauggaaucaacucaauua

SEQ ID NO: 1941854 - RNA, 19 nt, Homo sapiens
  misc_RNA (1)...(19): siRNA sense strand
ggaggaagacccugaguaa

SEQ ID NO: 1941855 - RNA, 19 nt, Homo sapiens
  misc_RNA (1)...(19): siRNA sense strand
gcacaaugaucaccaaguc

SEQ ID NO: 1941856 - RNA, 19 nt, Homo sapiens
  misc_RNA (1)...(19): siRNA sense strand
ucaauuacaucacagaaga

SEQ ID NO: 1941857 - RNA, 19 nt, Homo sapiens
  misc_RNA (1)...(19): siRNA sense strand
gugaugagauuuacaagga

SEQ ID NO: 1941858 - RNA, 19 nt, Homo sapiens
  misc_RNA (1)...(19): siRNA sense strand
caaggaaacacaaagaauu

SEQ ID NO: 1941859 - RNA, 19 nt, Homo sapiens
  misc_RNA (1)...(19): siRNA sense strand
gaugagauuuacaaggaaa

SEQ ID NO: 1941860 - RNA, 19 nt, Homo sapiens
  misc_RNA (1)...(19): siRNA sense strand
gaagcuacguccagaacau

SEQ ID NO: 1941861 - RNA, 19 nt, Homo sapiens
  misc_RNA (1)...(19): siRNA sense strand
gaacuuagaaacccuuaca

SEQ ID NO: 1941862 - RNA, 19 nt, Homo sapiens
  misc_RNA (1)...(19): siRNA sense strand
uuagaaacccuuacagaaa

SEQ ID NO: 1941863 - RNA, 19 nt, Homo sapiens
  misc_RNA (1)...(19): siRNA sense strand
gcucugggaucuucguuuc

SEQ ID NO: 1941864 - RNA, 19 nt, Homo sapiens
  misc_RNA (1)...(19): siRNA sense strand
uaagcggccuuuuauuuua

SEQ ID NO: 1941865 - RNA, 19 nt, Homo sapiens
  misc_RNA (1)...(19): siRNA sense strand
ggagagaggaugagaaguc

SEQ ID NO: 1941866 - RNA, 19 nt, Homo sapiens
  misc_RNA (1)...(19): siRNA sense strand
gagcuuggcacaaugauca

SEQ ID NO: 1941867 - RNA, 19 nt, Homo sapiens
  misc_RNA (1)...(19): siRNA sense strand
caaggugcccguagucauu

SEQ ID NO: 1941868 - RNA, 19 nt, Homo sapiens
  misc_RNA (1)...(19): siRNA sense strand
ggcgguggcugugacauuu

SEQ ID NO: 1941869 - RNA, 19 nt, Homo sapiens
  misc_RNA (1)...(19): siRNA sense strand
caaagccgauuaccaugca

SEQ ID NO: 1941870 - RNA, 19 nt, Homo sapiens
  misc_RNA (1)...(19): siRNA sense strand
uagaaacccuuacagaaac

SEQ ID NO: 1941871 - RNA, 19 nt, Homo sapiens
  misc_RNA (1)...(19): siRNA sense strand
gaaagcggagagaggauga

SEQ ID NO: 1941872 - RNA, 19 nt, Homo sapiens
  misc_RNA (1)...(19): siRNA sense strand
gagaguaucccuaccugau

SEQ ID NO: 1941873 - RNA, 19 nt, Homo sapiens
  misc_RNA (1)...(19): siRNA sense strand
ucacagaagaacuuagaaa

SEQ ID NO: 1941874 - RNA, 19 nt, Homo sapiens
  misc_RNA (1)...(19): siRNA sense strand
gguaucauagcaacgauuu

SEQ ID NO: 1941875 - RNA, 19 nt, Homo sapiens
  misc_RNA (1)...(19): siRNA sense strand
ucaugaacguguccuacuu

SEQ ID NO: 1941876 - RNA, 19 nt, Homo sapiens
  misc_RNA (1)...(19): siRNA sense strand
cauaaacucguuagucaau

SEQ ID NO: 1941877 - RNA, 19 nt, Homo sapiens
  misc_RNA (1)...(19): siRNA sense strand
cugcaagccuccucaaauc

SEQ ID NO: 1941878 - RNA, 19 nt, Homo sapiens
  misc_RNA (1)...(19): siRNA sense strand
gaucguggccaucaucauc

SEQ ID NO: 1941879 - RNA, 19 nt, Homo sapiens
  misc_RNA (1)...(19): siRNA sense strand
caucacagaagaacuuaga

SEQ ID NO: 1941880 - RNA, 19 nt, Homo sapiens
  misc_RNA (1)...(19): siRNA sense strand
gacauuuggugaccguguu

SEQ ID NO: 1941881 - RNA, 19 nt, Homo sapiens
  misc_RNA (1)...(19): siRNA sense strand
ucaacucaauuacaucaca

SEQ ID NO: 1941882 - RNA, 19 nt, Homo sapiens
  misc_RNA (1)...(19): siRNA sense strand
gcugcaagccuccucaaau

SEQ ID NO: 1941883 - RNA, 19 nt, Homo sapiens
  misc_RNA (1)...(19): siRNA sense strand
acugugugcuguuuauauu

SEQ ID NO: 1941884 - RNA, 19 nt, Homo sapiens
  misc_RNA (1)...(19): siRNA sense strand
ccaaggaaacacaaagaau

SEQ ID NO: 1941885 - RNA, 19 nt, Homo sapiens
  misc_RNA (1)...(19): siRNA sense strand
ucaaaucguugugaaaugc

SEQ ID NO: 1941886 - RNA, 19 nt, Homo sapiens
  misc_RNA (1)...(19): siRNA sense strand
ccagccugaucgucauuaa

SEQ ID NO: 1941887 - RNA, 19 nt, Homo sapiens
  misc_RNA (1)...(19): siRNA sense strand
uaacgggaccugcuucaca

SEQ ID NO: 1941888 - RNA, 19 nt, Homo sapiens
  misc_RNA (1)...(19): siRNA sense strand
aaaccugccuuuggccauu

SEQ ID NO: 1941889 - RNA, 19 nt, Homo sapiens
  misc_RNA (1)...(19): siRNA sense strand
ggcccugccucaucauaug

SEQ ID NO: 1941890 - RNA, 19 nt, Homo sapiens
  misc_RNA (1)...(19): siRNA sense strand
ccucuacugugugcuguuu

SEQ ID NO: 1941891 - RNA, 19 nt, Homo sapiens
  misc_RNA (1)...(19): siRNA sense strand
uuacaucacagaagaacuu

SEQ ID NO: 1941892 - RNA, 19 nt, Homo sapiens
  misc_RNA (1)...(19): siRNA sense strand
ggauggaaucaacucaauu

SEQ ID NO: 1941893 - RNA, 19 nt, Homo sapiens
  misc_RNA (1)...(19): siRNA sense strand
cuuagaaacccuuacagaa

SEQ ID NO: 1941894 - RNA, 19 nt, Homo sapiens
  misc_RNA (1)...(19): siRNA sense strand
ucucaaagccgauuaccau

SEQ ID NO: 1941895 - RNA, 19 nt, Homo sapiens
  misc_RNA (1)...(19): siRNA sense strand
ucauuaagcccacguccuu

SEQ ID NO: 1941896 - RNA, 19 nt, Homo sapiens
  misc_RNA (1)...(19): siRNA sense strand
gguucuggcuccaaucauc

SEQ ID NO: 1941897 - RNA, 19 nt, Homo sapiens
  misc_RNA (1)...(19): siRNA sense strand
gagcuggaaaggccuauca

SEQ ID NO: 1941898 - RNA, 19 nt, Homo sapiens
  misc_RNA (1)...(19): siRNA sense strand
caagccuccucaaaucguu

SEQ ID NO: 1941899 - RNA, 19 nt, Homo sapiens
  misc_RNA (1)...(19): siRNA sense strand
uggauggaaucaacucaau

SEQ ID NO: 1941900 - RNA, 19 nt, Homo sapiens
  misc_RNA (1)...(19): siRNA sense strand
gagaggaugagaagucgau

SEQ ID NO: 1941901 - RNA, 19 nt, Homo sapiens
  misc_RNA (1)...(19): siRNA sense strand
cguagucauucccgucuug

SEQ ID NO: 1941902 - RNA, 19 nt, Homo sapiens
  misc_RNA (1)...(19): siRNA sense strand
ugacauaaacucguuaguc

SEQ ID NO: 1941903 - RNA, 19 nt, Homo sapiens
  misc_RNA (1)...(19): siRNA sense strand
gauacuggccugagaaagc

SEQ ID NO: 1941904 - RNA, 19 nt, Homo sapiens
  misc_RNA (1)...(19): siRNA sense strand
uauauuaagcggccuuuua

SEQ ID NO: 1941905 - RNA, 19 nt, Homo sapiens
  misc_RNA (1)...(19): siRNA sense strand
ugaugagauuuacaaggaa

SEQ ID NO: 1941906 - RNA, 19 nt, Homo sapiens
  misc_RNA (1)...(19): siRNA sense strand
ggccuaugauggauggaau

SEQ ID NO: 1941907 - RNA, 19 nt, Homo sapiens
  misc_RNA (1)...(19): siRNA sense strand
cgauuaccaugcaccuuca

SEQ ID NO: 1941908 - RNA, 19 nt, Homo sapiens
  misc_RNA (1)...(19): siRNA sense strand
uggaaaggccuaucaaggu

SEQ ID NO: 1941909 - RNA, 19 nt, Homo sapiens
  misc_RNA (1)...(19): siRNA sense strand
gggauacuggccugagaaa

SEQ ID NO: 1941910 - RNA, 19 nt, Homo sapiens
  misc_RNA (1)...(19): siRNA sense strand
cgugcuacauccucaugaa

SEQ ID NO: 1941911 - RNA, 19 nt, Homo sapiens
  misc_RNA (1)...(19): siRNA sense strand
caucgugggcaccaucauu

SEQ ID NO: 1941912 - RNA, 19 nt, Homo sapiens
  misc_RNA (1)...(19): siRNA sense strand
ucuacugugugcuguuuau

SEQ ID NO: 1941913 - RNA, 19 nt, Homo sapiens
  misc_RNA (1)...(19): siRNA sense strand
uugcggagcuuggcacaau

SEQ ID NO: 1941914 - RNA, 19 nt, Homo sapiens
  misc_RNA (1)...(19): siRNA sense strand
cagcgggcagacucauuua

SEQ ID NO: 1941915 - RNA, 19 nt, Homo sapiens
  misc_RNA (1)...(19): siRNA sense strand
ccaucagccuggcguuuua

SEQ ID NO: 1941916 - RNA, 19 nt, Homo sapiens
  misc_RNA (1)...(19): siRNA sense strand
gcccaaggaaacacaaaga

SEQ ID NO: 1941917 - RNA, 19 nt, Homo sapiens
  misc_RNA (1)...(19): siRNA sense strand
gcggagagaggaugagaag

SEQ ID NO: 1941918 - RNA, 19 nt, Homo sapiens
  misc_RNA (1)...(19): siRNA sense strand
ccucaaaucguugugaaau

SEQ ID NO: 1941919 - RNA, 19 nt, Homo sapiens
  misc_RNA (1)...(19): siRNA sense strand
caaggaaagagcuggaaag

SEQ ID NO: 1941920 - RNA, 19 nt, Homo sapiens
  misc_RNA (1)...(19): siRNA sense strand
ucaauuauuucagcuuugc

SEQ ID NO: 1941921 - RNA, 19 nt, Homo sapiens
  misc_RNA (1)...(19): siRNA sense strand
gucaauuauuucagcuuug

SEQ ID NO: 1941922 - RNA, 19 nt, Homo sapiens
  misc_RNA (1)...(19): siRNA sense strand
acagcgggcagacucauuu

SEQ ID NO: 1941923 - RNA, 19 nt, Homo sapiens
  misc_RNA (1)...(19): siRNA sense strand
gcaagccuccucaaaucgu

SEQ ID NO: 1941924 - RNA, 19 nt, Homo sapiens
  misc_RNA (1)...(19): siRNA sense strand
uuacagaaaccugccuuug

SEQ ID NO: 1941925 - RNA, 19 nt, Homo sapiens
  misc_RNA (1)...(19): siRNA sense strand
cucaaaucguugugaaaug

SEQ ID NO: 1941926 - RNA, 19 nt, Homo sapiens
  misc_RNA (1)...(19): siRNA sense strand
cggaggaagacccugagua

SEQ ID NO: 1941927 - RNA, 19 nt, Homo sapiens
  misc_RNA (1)...(19): siRNA sense strand
gcuacauccucaugaacgu

SEQ ID NO: 1941928 - RNA, 19 nt, Homo sapiens
  misc_RNA (1)...(19): siRNA sense strand
gaaucaacucaauuacauc

SEQ ID NO: 1941929 - RNA, 19 nt, Homo sapiens
  misc_RNA (1)...(19): siRNA sense strand
gcggagcuuggcacaauga

SEQ ID NO: 1941930 - RNA, 19 nt, Homo sapiens
  misc_RNA (1)...(19): siRNA sense strand
ggacucugggccuaugaug

SEQ ID NO: 1941931 - RNA, 19 nt, Homo sapiens
  misc_RNA (1)...(19): siRNA sense strand
cggccaagcuggugaucgu

SEQ ID NO: 1941932 - RNA, 19 nt, Homo sapiens
  misc_RNA (1)...(19): siRNA sense strand
ccaccagucuccaaaagga

SEQ ID NO: 1941933 - RNA, 19 nt, Homo sapiens
  misc_RNA (1)...(19): siRNA sense strand
ugugugcgcccuucuaugu

SEQ ID NO: 1941934 - RNA, 19 nt, Homo sapiens
  misc_RNA (1)...(19): siRNA sense strand
cguguucucuauccugcuu

SEQ ID NO: 1941935 - RNA, 19 nt, Homo sapiens
  misc_RNA (1)...(19): siRNA sense strand
aaccugccuuuggccauua

SEQ ID NO: 1941936 - RNA, 19 nt, Homo sapiens
  misc_RNA (1)...(19): siRNA sense strand
caauuacaucacagaagaa

SEQ ID NO: 1941937 - RNA, 19 nt, Homo sapiens
  misc_RNA (1)...(19): siRNA sense strand
ggagcugggccucaucagu

SEQ ID NO: 1941938 - RNA, 19 nt, Homo sapiens
  misc_RNA (1)...(19): siRNA sense strand
uuguucaucucgacaguga

SEQ ID NO: 1941939 - RNA, 19 nt, Homo sapiens
  misc_RNA (1)...(19): siRNA sense strand
ccacguccuucgccaucau

SEQ ID NO: 1941940 - RNA, 19 nt, Homo sapiens
  misc_RNA (1)...(19): siRNA sense strand
ucaguggcaucuccaucau

SEQ ID NO: 1941941 - RNA, 19 nt, Homo sapiens
  misc_RNA (1)...(19): siRNA sense strand
guaucauagcaacgauuua

SEQ ID NO: 1941942 - RNA, 19 nt, Homo sapiens
  misc_RNA (1)...(19): siRNA sense strand
gagggucacaugcucaaag

SEQ ID NO: 1941943 - RNA, 19 nt, Homo sapiens
  misc_RNA (1)...(19): siRNA sense strand
ggaagcuacguccagaaca

SEQ ID NO: 1941944 - RNA, 19 nt, Homo sapiens
  misc_RNA (1)...(19): siRNA sense strand
cauuggcucugggaucuuc

SEQ ID NO: 1941945 - RNA, 19 nt, Homo sapiens
  misc_RNA (1)...(19): siRNA sense strand
cuggugacauaaacucguu

SEQ ID NO: 1941946 - RNA, 19 nt, Homo sapiens
  misc_RNA (1)...(19): siRNA sense strand
gccgccaucuuguucaucu

SEQ ID NO: 1941947 - RNA, 19 nt, Homo sapiens
  misc_RNA (1)...(19): siRNA sense strand
uuuauggccugacgauucu

SEQ ID NO: 1941948 - RNA, 19 nt, Homo sapiens
  misc_RNA (1)...(19): siRNA sense strand
cauagcaacgauuuauauc

SEQ ID NO: 1941949 - RNA, 19 nt, Homo sapiens
  misc_RNA (1)...(19): siRNA sense strand
uacagaaaccugccuuugg

SEQ ID NO: 1941950 - RNA, 19 nt, Homo sapiens
  misc_RNA (1)...(19): siRNA sense strand
gcacaggcaucaauacaug

SEQ ID NO: 1941951 - RNA, 19 nt, Homo sapiens
  misc_RNA (1)...(19): siRNA sense strand
gcacacagcaggcacuuga

SEQ ID NO: 1941952 - RNA, 19 nt, Homo sapiens
  misc_RNA (1)...(19): siRNA sense strand
gaacaccacuggcuuucuc

SEQ ID NO: 1941953 - RNA, 19 nt, Homo sapiens
  misc_RNA (1)...(19): siRNA sense strand
uuaagaagcagacacauuu

SEQ ID NO: 1941954 - RNA, 19 nt, Homo sapiens
  misc_RNA (1)...(19): siRNA sense strand
gcagacacauuuguugaau

SEQ ID NO: 1941955 - RNA, 19 nt, Homo sapiens
  misc_RNA (1)...(19): siRNA sense strand
gaagcagacacauuuguug

SEQ ID NO: 1941956 - RNA, 19 nt, Homo sapiens
  misc_RNA (1)...(19): siRNA sense strand
cagacacauuuguugaaua

SEQ ID NO: 1941957 - RNA, 19 nt, Homo sapiens
  misc_RNA (1)...(19): siRNA sense strand
ucagaacaccacuggcuuu

SEQ ID NO: 1941958 - RNA, 19 nt, Homo sapiens
  misc_RNA (1)...(19): siRNA sense strand
agaaugaagcaauggauga

SEQ ID NO: 1941959 - RNA, 19 nt, Homo sapiens
  misc_RNA (1)...(19): siRNA sense strand
caccuugccagacacaaua

SEQ ID NO: 1941960 - RNA, 19 nt, Homo sapiens
  misc_RNA (1)...(19): siRNA sense strand
ucucuucucucccaauucu

SEQ ID NO: 1941961 - RNA, 19 nt, Homo sapiens
  misc_RNA (1)...(19): siRNA sense strand
gcuggcacaggcaucaaua

SEQ ID NO: 1941962 - RNA, 19 nt, Homo sapiens
  misc_RNA (1)...(19): siRNA sense strand
uaagaagcagacacauuug

SEQ ID NO: 1941963 - RNA, 19 nt, Homo sapiens
  misc_RNA (1)...(19): siRNA sense strand
cagcaggcacuugacagua

SEQ ID NO: 1941964 - RNA, 19 nt, Homo sapiens
  misc_RNA (1)...(19): siRNA sense strand
ggccuuguccuccaucuuc

SEQ ID NO: 1941965 - RNA, 19 nt, Homo sapiens
  misc_RNA (1)...(19): siRNA sense strand
aagcagacacauuuguuga

SEQ ID NO: 1941966 - RNA, 19 nt, Homo sapiens
  misc_RNA (1)...(19): siRNA sense strand
agaagcagacacauuuguu

SEQ ID NO: 1941967 - RNA, 19 nt, Homo sapiens
  misc_RNA (1)...(19): siRNA sense strand
aggaucaccuugccagaca

SEQ ID NO: 1941968 - RNA, 19 nt, Homo sapiens
  misc_RNA (1)...(19): siRNA sense strand
gaaugaagcaauggaugag

SEQ ID NO: 1941969 - RNA, 19 nt, Homo sapiens
  misc_RNA (1)...(19): siRNA sense strand
uuuaagaagcagacacauu

SEQ ID NO: 1941970 - RNA, 19 nt, Homo sapiens
  misc_RNA (1)...(19): siRNA sense strand
ccacuggcuuucucuucuc

SEQ ID NO: 1941971 - RNA, 19 nt, Homo sapiens
  misc_RNA (1)...(19): siRNA sense strand
uuucucuucucucccaauu

SEQ ID NO: 1941972 - RNA, 19 nt, Homo sapiens
  misc_RNA (1)...(19): siRNA sense strand
uaucgggagcgcugucuug

SEQ ID NO: 1941973 - RNA, 19 nt, Homo sapiens
  misc_RNA (1)...(19): siRNA sense strand
agcaggcacuugacaguag

SEQ ID NO: 1941974 - RNA, 19 nt, Homo sapiens
  misc_RNA (1)...(19): siRNA sense strand
gaagagaaaucaccaaucu

SEQ ID NO: 1941975 - RNA, 19 nt, Homo sapiens
  misc_RNA (1)...(19): siRNA sense strand
gaucagaacuacauuaaca

SEQ ID NO: 1941976 - RNA, 19 nt, Homo sapiens
  misc_RNA (1)...(19): siRNA sense strand
aaacagacauggucauaaa

SEQ ID NO: 1941977 - RNA, 19 nt, Homo sapiens
  misc_RNA (1)...(19): siRNA sense strand
caggaaaucugcauagaaa

SEQ ID NO: 1941978 - RNA, 19 nt, Homo sapiens
  misc_RNA (1)...(19): siRNA sense strand
ccaagaagacacuauaaua

SEQ ID NO: 1941979 - RNA, 19 nt, Homo sapiens
  misc_RNA (1)...(19): siRNA sense strand
ucaccaaucuccauuaaug

SEQ ID NO: 1941980 - RNA, 19 nt, Homo sapiens
  misc_RNA (1)...(19): siRNA sense strand
gaagaagcaccuagaagaa

SEQ ID NO: 1941981 - RNA, 19 nt, Homo sapiens
  misc_RNA (1)...(19): siRNA sense strand
uagaaacacuuaggcuuua

SEQ ID NO: 1941982 - RNA, 19 nt, Homo sapiens
  misc_RNA (1)...(19): siRNA sense strand
gaacuacauuaacaccaaa

SEQ ID NO: 1941983 - RNA, 19 nt, Homo sapiens
  misc_RNA (1)...(19): siRNA sense strand
agaagcaccuagaagaaua

SEQ ID NO: 1941984 - RNA, 19 nt, Homo sapiens
  misc_RNA (1)...(19): siRNA sense strand
ugaacgaucucgcuccuuu

SEQ ID NO: 1941985 - RNA, 19 nt, Homo sapiens
  misc_RNA (1)...(19): siRNA sense strand
gcaagucgaucgaggucaa

SEQ ID NO: 1941986 - RNA, 19 nt, Homo sapiens
  misc_RNA (1)...(19): siRNA sense strand
gaacauacagcucgagauc

SEQ ID NO: 1941987 - RNA, 19 nt, Homo sapiens
  misc_RNA (1)...(19): siRNA sense strand
ccucauaagaucauuguua

SEQ ID NO: 1941988 - RNA, 19 nt, Homo sapiens
  misc_RNA (1)...(19): siRNA sense strand
ggacaggcgugaacgaucu

SEQ ID NO: 1941989 - RNA, 19 nt, Homo sapiens
  misc_RNA (1)...(19): siRNA sense strand
cuccaaaucuuucgucaaa

SEQ ID NO: 1941990 - RNA, 19 nt, Homo sapiens
  misc_RNA (1)...(19): siRNA sense strand
caauguguuuguucgauuu

SEQ ID NO: 1941991 - RNA, 19 nt, Homo sapiens
  misc_RNA (1)...(19): siRNA sense strand
caaacugccuggaauuaca

SEQ ID NO: 1941992 - RNA, 19 nt, Homo sapiens
  misc_RNA (1)...(19): siRNA sense strand
cgaagaagcaccuagaaga

SEQ ID NO: 1941993 - RNA, 19 nt, Homo sapiens
  misc_RNA (1)...(19): siRNA sense strand
ccaaaucuuucgucaaaca

SEQ ID NO: 1941994 - RNA, 19 nt, Homo sapiens
  misc_RNA (1)...(19): siRNA sense strand
ggagggugcuaaaggaguu

SEQ ID NO: 1941995 - RNA, 19 nt, Homo sapiens
  misc_RNA (1)...(19): siRNA sense strand
gaaaucaccaaucuccauu

SEQ ID NO: 1941996 - RNA, 19 nt, Homo sapiens
  misc_RNA (1)...(19): siRNA sense strand
gaaugugaacguaaucaaa

SEQ ID NO: 1941997 - RNA, 19 nt, Homo sapiens
  misc_RNA (1)...(19): siRNA sense strand
gaaacacuuaggcuuuaua

SEQ ID NO: 1941998 - RNA, 19 nt, Homo sapiens
  misc_RNA (1)...(19): siRNA sense strand
aaagacagcaagagaagua

SEQ ID NO: 1941999 - RNA, 19 nt, Homo sapiens
  misc_RNA (1)...(19): siRNA sense strand
gaagaggaaauccaggaaa

SEQ ID NO: 1942000 - RNA, 19 nt, Homo sapiens
  misc_RNA (1)...(19): siRNA sense strand
ggaaaucugcauagaaaca

SEQ ID NO: 1942001 - RNA, 19 nt, Homo sapiens
  misc_RNA (1)...(19): siRNA sense strand
aaucaccaaucuccauuaa

SEQ ID NO: 1942002 - RNA, 19 nt, Homo sapiens
  misc_RNA (1)...(19): siRNA sense strand
agaaauagcagaagugcaa

SEQ ID NO: 1942003 - RNA, 19 nt, Homo sapiens
  misc_RNA (1)...(19): siRNA sense strand
gcauaccagagaugauuua

SEQ ID NO: 1942004 - RNA, 19 nt, Homo sapiens
  misc_RNA (1)...(19): siRNA sense strand
gggcagguguuguuucauc

SEQ ID NO: 1942005 - RNA, 19 nt, Homo sapiens
  misc_RNA (1)...(19): siRNA sense strand
ugaaagcccucgaagacau

SEQ ID NO: 1942006 - RNA, 19 nt, Homo sapiens
  misc_RNA (1)...(19): siRNA sense strand
gaagcaccuagaagaauaa

SEQ ID NO: 1942007 - RNA, 19 nt, Homo sapiens
  misc_RNA (1)...(19): siRNA sense strand
aaaguagccuuacaagaag

SEQ ID NO: 1942008 - RNA, 19 nt, Homo sapiens
  misc_RNA (1)...(19): siRNA sense strand
gccaaacuaugaauuacug

SEQ ID NO: 1942009 - RNA, 19 nt, Homo sapiens
  misc_RNA (1)...(19): siRNA sense strand
ccaauguguuuguucgauu

SEQ ID NO: 1942010 - RNA, 19 nt, Homo sapiens
  misc_RNA (1)...(19): siRNA sense strand
gcagagaggagggugcuaa

SEQ ID NO: 1942011 - RNA, 19 nt, Homo sapiens
  misc_RNA (1)...(19): siRNA sense strand
gcuauggcuuguauuaauc

SEQ ID NO: 1942012 - RNA, 19 nt, Homo sapiens
  misc_RNA (1)...(19): siRNA sense strand
acauacagcucgagaucaa

SEQ ID NO: 1942013 - RNA, 19 nt, Homo sapiens
  misc_RNA (1)...(19): siRNA sense strand
aguaaaagcugaagagaaa

SEQ ID NO: 1942014 - RNA, 19 nt, Homo sapiens
  misc_RNA (1)...(19): siRNA sense strand
aaaaguagccuuacaagaa

SEQ ID NO: 1942015 - RNA, 19 nt, Homo sapiens
  misc_RNA (1)...(19): siRNA sense strand
cuuacaagaagccaaauua

SEQ ID NO: 1942016 - RNA, 19 nt, Homo sapiens
  misc_RNA (1)...(19): siRNA sense strand
agaacuacauuaacaccaa

SEQ ID NO: 1942017 - RNA, 19 nt, Homo sapiens
  misc_RNA (1)...(19): siRNA sense strand
ucaaacagacauggucaua

SEQ ID NO: 1942018 - RNA, 19 nt, Homo sapiens
  misc_RNA (1)...(19): siRNA sense strand
caagagaaguagaaauagc

SEQ ID NO: 1942019 - RNA, 19 nt, Homo sapiens
  misc_RNA (1)...(19): siRNA sense strand
agcaagagaaguagaaaua

SEQ ID NO: 1942020 - RNA, 19 nt, Homo sapiens
  misc_RNA (1)...(19): siRNA sense strand
gcaccuagaagaauaagag

SEQ ID NO: 1942021 - RNA, 19 nt, Homo sapiens
  misc_RNA (1)...(19): siRNA sense strand
aagaggaaauccaggaaau

SEQ ID NO: 1942022 - RNA, 19 nt, Homo sapiens
  misc_RNA (1)...(19): siRNA sense strand
uuacaagucuuagaaugug

SEQ ID NO: 1942023 - RNA, 19 nt, Homo sapiens
  misc_RNA (1)...(19): siRNA sense strand
gcuaaaggaguugggauuu

SEQ ID NO: 1942024 - RNA, 19 nt, Homo sapiens
  misc_RNA (1)...(19): siRNA sense strand
ccauuaaugugaagacagu

SEQ ID NO: 1942025 - RNA, 19 nt, Homo sapiens
  misc_RNA (1)...(19): siRNA sense strand
gagucgaucuggaacauac

SEQ ID NO: 1942026 - RNA, 19 nt, Homo sapiens
  misc_RNA (1)...(19): siRNA sense strand
guugcuauggcuuguauua

SEQ ID NO: 1942027 - RNA, 19 nt, Homo sapiens
  misc_RNA (1)...(19): siRNA sense strand
ccaagaaacacaggcauga

SEQ ID NO: 1942028 - RNA, 19 nt, Homo sapiens
  misc_RNA (1)...(19): siRNA sense strand
caaacagacauggucauaa

SEQ ID NO: 1942029 - RNA, 19 nt, Homo sapiens
  misc_RNA (1)...(19): siRNA sense strand
gaucacauacuccaagaag

SEQ ID NO: 1942030 - RNA, 19 nt, Homo sapiens
  misc_RNA (1)...(19): siRNA sense strand
ucaagaacacgaucacguu

SEQ ID NO: 1942031 - RNA, 19 nt, Homo sapiens
  misc_RNA (1)...(19): siRNA sense strand
gcagcuagagcacuucaga

SEQ ID NO: 1942032 - RNA, 19 nt, Homo sapiens
  misc_RNA (1)...(19): siRNA sense strand
ucaagcauccucauaagau

SEQ ID NO: 1942033 - RNA, 19 nt, Homo sapiens
  misc_RNA (1)...(19): siRNA sense strand
agaggagggugcuaaagga

SEQ ID NO: 1942034 - RNA, 19 nt, Homo sapiens
  misc_RNA (1)...(19): siRNA sense strand
caagcauccucauaagauc

SEQ ID NO: 1942035 - RNA, 19 nt, Homo sapiens
  misc_RNA (1)...(19): siRNA sense strand
uuacaugaaugacagucuu

SEQ ID NO: 1942036 - RNA, 19 nt, Homo sapiens
  misc_RNA (1)...(19): siRNA sense strand
ccaggaaaucugcauagaa

SEQ ID NO: 1942037 - RNA, 19 nt, Homo sapiens
  misc_RNA (1)...(19): siRNA sense strand
ggcagucgcucaggacaug

SEQ ID NO: 1942038 - RNA, 19 nt, Homo sapiens
  misc_RNA (1)...(19): siRNA sense strand
ucgaagacaucauaaucau

SEQ ID NO: 1942039 - RNA, 19 nt, Homo sapiens
  misc_RNA (1)...(19): siRNA sense strand
auagaaacacuuaggcuuu

SEQ ID NO: 1942040 - RNA, 19 nt, Homo sapiens
  misc_RNA (1)...(19): siRNA sense strand
gcaagagaaguagaaauag

SEQ ID NO: 1942041 - RNA, 19 nt, Homo sapiens
  misc_RNA (1)...(19): siRNA sense strand
caaaagcccuuacaauggu

SEQ ID NO: 1942042 - RNA, 19 nt, Homo sapiens
  misc_RNA (1)...(19): siRNA sense strand
caaucuccauuaaugugaa

SEQ ID NO: 1942043 - RNA, 19 nt, Homo sapiens
  misc_RNA (1)...(19): siRNA sense strand
gagaggagggugcuaaagg

SEQ ID NO: 1942044 - RNA, 19 nt, Homo sapiens
  misc_RNA (1)...(19): siRNA sense strand
aagaaacacaggcaugaaa

SEQ ID NO: 1942045 - RNA, 19 nt, Homo sapiens
  misc_RNA (1)...(19): siRNA sense strand
gguucaaacugccuggaau

SEQ ID NO: 1942046 - RNA, 19 nt, Homo sapiens
  misc_RNA (1)...(19): siRNA sense strand
gaacgaucucgcuccuuug

SEQ ID NO: 1942047 - RNA, 19 nt, Homo sapiens
  misc_RNA (1)...(19): siRNA sense strand
guuucgagauuguugcuau

SEQ ID NO: 1942048 - RNA, 19 nt, Homo sapiens
  misc_RNA (1)...(19): siRNA sense strand
uagaucacauacuccaaga

SEQ ID NO: 1942049 - RNA, 19 nt, Homo sapiens
  misc_RNA (1)...(19): siRNA sense strand
gaggaaauccaggaaaucu

SEQ ID NO: 1942050 - RNA, 19 nt, Homo sapiens
  misc_RNA (1)...(19): siRNA sense strand
ccuagaagaauaagagaug

SEQ ID NO: 1942051 - RNA, 19 nt, Homo sapiens
  misc_RNA (1)...(19): siRNA sense strand
ugcuauggcuuguauuaau

SEQ ID NO: 1942052 - RNA, 19 nt, Homo sapiens
  misc_RNA (1)...(19): siRNA sense strand
cuuagaaugugaacguaau

SEQ ID NO: 1942053 - RNA, 19 nt, Homo sapiens
  misc_RNA (1)...(19): siRNA sense strand
uaaaggaguugggauuuug

SEQ ID NO: 1942054 - RNA, 19 nt, Homo sapiens
  misc_RNA (1)...(19): siRNA sense strand
gauuucaaccagagacuau

SEQ ID NO: 1942055 - RNA, 19 nt, Homo sapiens
  misc_RNA (1)...(19): siRNA sense strand
caagaaacacaggcaugaa

SEQ ID NO: 1942056 - RNA, 19 nt, Homo sapiens
  misc_RNA (1)...(19): siRNA sense strand
aauaauaggcggagucgau

SEQ ID NO: 1942057 - RNA, 19 nt, Homo sapiens
  misc_RNA (1)...(19): siRNA sense strand
agaaguagaaauagcagaa

SEQ ID NO: 1942058 - RNA, 19 nt, Homo sapiens
  misc_RNA (1)...(19): siRNA sense strand
aaaagaaccugaggauaga

SEQ ID NO: 1942059 - RNA, 19 nt, Homo sapiens
  misc_RNA (1)...(19): siRNA sense strand
gaagccaaauuaaaagcaa

SEQ ID NO: 1942060 - RNA, 19 nt, Homo sapiens
  misc_RNA (1)...(19): siRNA sense strand
acacuuaggcuuuauacca

SEQ ID NO: 1942061 - RNA, 19 nt, Homo sapiens
  misc_RNA (1)...(19): siRNA sense strand
gcuagagcacuucagauuc

SEQ ID NO: 1942062 - RNA, 19 nt, Homo sapiens
  misc_RNA (1)...(19): siRNA sense strand
guucaaacugccuggaauu

SEQ ID NO: 1942063 - RNA, 19 nt, Homo sapiens
  misc_RNA (1)...(19): siRNA sense strand
gacagcaagagaaguagaa

SEQ ID NO: 1942064 - RNA, 19 nt, Homo sapiens
  misc_RNA (1)...(19): siRNA sense strand
gaaaagacagcaagagaag

SEQ ID NO: 1942065 - RNA, 19 nt, Homo sapiens
  misc_RNA (1)...(19): siRNA sense strand
ccaccaccuccgccaguua

SEQ ID NO: 1942066 - RNA, 19 nt, Homo sapiens
  misc_RNA (1)...(19): siRNA sense strand
gaaaaguagccuuacaaga

SEQ ID NO: 1942067 - RNA, 19 nt, Homo sapiens
  misc_RNA (1)...(19): siRNA sense strand
caucgaccacucucugauu

SEQ ID NO: 1942068 - RNA, 19 nt, Homo sapiens
  misc_RNA (1)...(19): siRNA sense strand
caaguuaucaaagcagaga

SEQ ID NO: 1942069 - RNA, 19 nt, Homo sapiens
  misc_RNA (1)...(19): siRNA sense strand
gaaacacaggcaugaaagg

SEQ ID NO: 1942070 - RNA, 19 nt, Homo sapiens
  misc_RNA (1)...(19): siRNA sense strand
aagcauaccagagaugauu

SEQ ID NO: 1942071 - RNA, 19 nt, Homo sapiens
  misc_RNA (1)...(19): siRNA sense strand
gggccucauucgacagcua

SEQ ID NO: 1942072 - RNA, 19 nt, Homo sapiens
  misc_RNA (1)...(19): siRNA sense strand
gaaagcccucgaagacauc

SEQ ID NO: 1942073 - RNA, 19 nt, Homo sapiens
  misc_RNA (1)...(19): siRNA sense strand
ccaagcauaccagagauga

SEQ ID NO: 1942074 - RNA, 19 nt, Homo sapiens
  misc_RNA (1)...(19): siRNA sense strand
ggaagaggcuggacuauau

SEQ ID NO: 1942075 - RNA, 19 nt, Homo sapiens
  misc_RNA (1)...(19): siRNA sense strand
ggagaaauaucaacagcua

SEQ ID NO: 1942076 - RNA, 19 nt, Homo sapiens
  misc_RNA (1)...(19): siRNA sense strand
cagaaggacuuaaguaaau

SEQ ID NO: 1942077 - RNA, 19 nt, Homo sapiens
  misc_RNA (1)...(19): siRNA sense strand
cagcugaaauuaagcgaua

SEQ ID NO: 1942078 - RNA, 19 nt, Homo sapiens
  misc_RNA (1)...(19): siRNA sense strand
gcagaaacuugaagcacaa

SEQ ID NO: 1942079 - RNA, 19 nt, Homo sapiens
  misc_RNA (1)...(19): siRNA sense strand
gaaauuaagcgauacgaau

SEQ ID NO: 1942080 - RNA, 19 nt, Homo sapiens
  misc_RNA (1)...(19): siRNA sense strand
gguccaacguggucuuuaa

SEQ ID NO: 1942081 - RNA, 19 nt, Homo sapiens
  misc_RNA (1)...(19): siRNA sense strand
uaucacagcugaaauuaag

SEQ ID NO: 1942082 - RNA, 19 nt, Homo sapiens
  misc_RNA (1)...(19): siRNA sense strand
agggagaaguggagaaaua

SEQ ID NO: 1942083 - RNA, 19 nt, Homo sapiens
  misc_RNA (1)...(19): siRNA sense strand
gaagcacaacuaacagaaa

SEQ ID NO: 1942084 - RNA, 19 nt, Homo sapiens
  misc_RNA (1)...(19): siRNA sense strand
gaaacuugaagcacaacua

SEQ ID NO: 1942085 - RNA, 19 nt, Homo sapiens
  misc_RNA (1)...(19): siRNA sense strand
gggaagaggcuggacuaua

SEQ ID NO: 1942086 - RNA, 19 nt, Homo sapiens
  misc_RNA (1)...(19): siRNA sense strand
caacguggucuuuaaacuu

SEQ ID NO: 1942087 - RNA, 19 nt, Homo sapiens
  misc_RNA (1)...(19): siRNA sense strand
gagaaguggagaaauauca

SEQ ID NO: 1942088 - RNA, 19 nt, Homo sapiens
  misc_RNA (1)...(19): siRNA sense strand
cuacagaaggacuuaagua

SEQ ID NO: 1942089 - RNA, 19 nt, Homo sapiens
  misc_RNA (1)...(19): siRNA sense strand
aaacuugaagcacaacuaa

SEQ ID NO: 1942090 - RNA, 19 nt, Homo sapiens
  misc_RNA (1)...(19): siRNA sense strand
uacagaaggacuuaaguaa

SEQ ID NO: 1942091 - RNA, 19 nt, Homo sapiens
  misc_RNA (1)...(19): siRNA sense strand
acagaaggacuuaaguaaa

SEQ ID NO: 1942092 - RNA, 19 nt, Homo sapiens
  misc_RNA (1)...(19): siRNA sense strand
gaagcuacagggagaagug

SEQ ID NO: 1942093 - RNA, 19 nt, Homo sapiens
  misc_RNA (1)...(19): siRNA sense strand
gcacaacuaacagaaaaua

SEQ ID NO: 1942094 - RNA, 19 nt, Homo sapiens
  misc_RNA (1)...(19): siRNA sense strand
cuauaucacagcugaaauu

SEQ ID NO: 1942095 - RNA, 19 nt, Homo sapiens
  misc_RNA (1)...(19): siRNA sense strand
gaagaggcuggacuauauc

SEQ ID NO: 1942096 - RNA, 19 nt, Homo sapiens
  misc_RNA (1)...(19): siRNA sense strand
gggagaaguggagaaauau

SEQ ID NO: 1942097 - RNA, 19 nt, Homo sapiens
  misc_RNA (1)...(19): siRNA sense strand
ccaacguggucuuuaaacu

SEQ ID NO: 1942098 - RNA, 19 nt, Homo sapiens
  misc_RNA (1)...(19): siRNA sense strand
gacuauaucacagcugaaa

SEQ ID NO: 1942099 - RNA, 19 nt, Homo sapiens
  misc_RNA (1)...(19): siRNA sense strand
aacguggucuuuaaacuuc

SEQ ID NO: 1942100 - RNA, 19 nt, Homo sapiens
  misc_RNA (1)...(19): siRNA sense strand
ggagaaguggagaaauauc

SEQ ID NO: 1942101 - RNA, 19 nt, Homo sapiens
  misc_RNA (1)...(19): siRNA sense strand
gaagaagcuacagggagaa

SEQ ID NO: 1942102 - RNA, 19 nt, Homo sapiens
  misc_RNA (1)...(19): siRNA sense strand
ggaacuggcccugcuggau

SEQ ID NO: 1942103 - RNA, 19 nt, Homo sapiens
  misc_RNA (1)...(19): siRNA sense strand
cggagcugauccagaagaa

SEQ ID NO: 1942104 - RNA, 19 nt, Homo sapiens
  misc_RNA (1)...(19): siRNA sense strand
agaaggacuuaaguaaauc

SEQ ID NO: 1942105 - RNA, 19 nt, Homo sapiens
  misc_RNA (1)...(19): siRNA sense strand
aaauuaagcgauacgaauc

SEQ ID NO: 1942106 - RNA, 19 nt, Homo sapiens
  misc_RNA (1)...(19): siRNA sense strand
ugaaauuaagcgauacgaa

SEQ ID NO: 1942107 - RNA, 19 nt, Homo sapiens
  misc_RNA (1)...(19): siRNA sense strand
agaaauaucaacagcuaca

SEQ ID NO: 1942108 - RNA, 19 nt, Homo sapiens
  misc_RNA (1)...(19): siRNA sense strand
aagcacaacuaacagaaaa

SEQ ID NO: 1942109 - RNA, 19 nt, Homo sapiens
  misc_RNA (1)...(19): siRNA sense strand
ugaagcacaacuaacagaa

SEQ ID NO: 1942110 - RNA, 19 nt, Homo sapiens
  misc_RNA (1)...(19): siRNA sense strand
aucaacagcuacagaagga

SEQ ID NO: 1942111 - RNA, 19 nt, Homo sapiens
  misc_RNA (1)...(19): siRNA sense strand
aauaucaacagcuacagaa

SEQ ID NO: 1942112 - RNA, 19 nt, Homo sapiens
  misc_RNA (1)...(19): siRNA sense strand
guccggugcuagucaaaca

SEQ ID NO: 1942113 - RNA, 19 nt, Homo sapiens
  misc_RNA (1)...(19): siRNA sense strand
gaggcuggacuauaucaca

SEQ ID NO: 1942114 - RNA, 19 nt, Homo sapiens
  misc_RNA (1)...(19): siRNA sense strand
uagggaagaggcuggacua

SEQ ID NO: 1942115 - RNA, 19 nt, Homo sapiens
  misc_RNA (1)...(19): siRNA sense strand
gcgauacgaaucccagcuu

SEQ ID NO: 1942116 - RNA, 19 nt, Homo sapiens
  misc_RNA (1)...(19): siRNA sense strand
guccaacguggucuuuaaa

SEQ ID NO: 1942117 - RNA, 19 nt, Homo sapiens
  misc_RNA (1)...(19): siRNA sense strand
gaaguggagaaauaucaac

SEQ ID NO: 1942118 - RNA, 19 nt, Homo sapiens
  misc_RNA (1)...(19): siRNA sense strand
aaauaucaacagcuacaga

SEQ ID NO: 1942119 - RNA, 19 nt, Homo sapiens
  misc_RNA (1)...(19): siRNA sense strand
gcggagcugauccagaaga

SEQ ID NO: 1942120 - RNA, 19 nt, Homo sapiens
  misc_RNA (1)...(19): siRNA sense strand
uaauaucgugaaagaggaa

SEQ ID NO: 1942121 - RNA, 19 nt, Homo sapiens
  misc_RNA (1)...(19): siRNA sense strand
caacagaagucauguauau

SEQ ID NO: 1942122 - RNA, 19 nt, Homo sapiens
  misc_RNA (1)...(19): siRNA sense strand
ggacaucugugaccaauga

SEQ ID NO: 1942123 - RNA, 19 nt, Homo sapiens
  misc_RNA (1)...(19): siRNA sense strand
caaacgaacuggugaauau

SEQ ID NO: 1942124 - RNA, 19 nt, Homo sapiens
  misc_RNA (1)...(19): siRNA sense strand
gaacaacaauuuggaugaa

SEQ ID NO: 1942125 - RNA, 19 nt, Homo sapiens
  misc_RNA (1)...(19): siRNA sense strand
ccuaucagcuguuucauuu

SEQ ID NO: 1942126 - RNA, 19 nt, Homo sapiens
  misc_RNA (1)...(19): siRNA sense strand
caauguaacucacuuggaa

SEQ ID NO: 1942127 - RNA, 19 nt, Homo sapiens
  misc_RNA (1)...(19): siRNA sense strand
gaaaguacaccuaacacaa

SEQ ID NO: 1942128 - RNA, 19 nt, Homo sapiens
  misc_RNA (1)...(19): siRNA sense strand
ugagagaaguggcauaaga

SEQ ID NO: 1942129 - RNA, 19 nt, Homo sapiens
  misc_RNA (1)...(19): siRNA sense strand
gaagucauguauaugcuau

SEQ ID NO: 1942130 - RNA, 19 nt, Homo sapiens
  misc_RNA (1)...(19): siRNA sense strand
caaagcauuucucuccaaa

SEQ ID NO: 1942131 - RNA, 19 nt, Homo sapiens
  misc_RNA (1)...(19): siRNA sense strand
caauugggaugaucaccua

SEQ ID NO: 1942132 - RNA, 19 nt, Homo sapiens
  misc_RNA (1)...(19): siRNA sense strand
gaucaccuaucagcuguuu

SEQ ID NO: 1942133 - RNA, 19 nt, Homo sapiens
  misc_RNA (1)...(19): siRNA sense strand
gaaaauccauggaguuuag

SEQ ID NO: 1942134 - RNA, 19 nt, Homo sapiens
  misc_RNA (1)...(19): siRNA sense strand
ugaaguggauggugauaau

SEQ ID NO: 1942135 - RNA, 19 nt, Homo sapiens
  misc_RNA (1)...(19): siRNA sense strand
guacagauuguuuggcaua

SEQ ID NO: 1942136 - RNA, 19 nt, Homo sapiens
  misc_RNA (1)...(19): siRNA sense strand
ggaguuuaguuacuguuga

SEQ ID NO: 1942137 - RNA, 19 nt, Homo sapiens
  misc_RNA (1)...(19): siRNA sense strand
ugacagauuuguucaccaa

SEQ ID NO: 1942138 - RNA, 19 nt, Homo sapiens
  misc_RNA (1)...(19): siRNA sense strand
gaacuguacagauuguuug

SEQ ID NO: 1942139 - RNA, 19 nt, Homo sapiens
  misc_RNA (1)...(19): siRNA sense strand
gcaauuaaagaagcugaua

SEQ ID NO: 1942140 - RNA, 19 nt, Homo sapiens
  misc_RNA (1)...(19): siRNA sense strand
gagagaaguggcauaagaa

SEQ ID NO: 1942141 - RNA, 19 nt, Homo sapiens
  misc_RNA (1)...(19): siRNA sense strand
guaacucacuuggaaccua

SEQ ID NO: 1942142 - RNA, 19 nt, Homo sapiens
  misc_RNA (1)...(19): siRNA sense strand
uuaagagaaugccaugaaa

SEQ ID NO: 1942143 - RNA, 19 nt, Homo sapiens
  misc_RNA (1)...(19): siRNA sense strand
ggaccaaagagaugaauuc

SEQ ID NO: 1942144 - RNA, 19 nt, Homo sapiens
  misc_RNA (1)...(19): siRNA sense strand
ucacaccucuggaacuguu

SEQ ID NO: 1942145 - RNA, 19 nt, Homo sapiens
  misc_RNA (1)...(19): siRNA sense strand
gguugguccuugugucaua

SEQ ID NO: 1942146 - RNA, 19 nt, Homo sapiens
  misc_RNA (1)...(19): siRNA sense strand
gcaacagaagucauguaua

SEQ ID NO: 1942147 - RNA, 19 nt, Homo sapiens
  misc_RNA (1)...(19): siRNA sense strand
gaaguggauggugauaaua

SEQ ID NO: 1942148 - RNA, 19 nt, Homo sapiens
  misc_RNA (1)...(19): siRNA sense strand
ggaaaagacagaaaacaaa

SEQ ID NO: 1942149 - RNA, 19 nt, Homo sapiens
  misc_RNA (1)...(19): siRNA sense strand
gcauuucucuccaaacacu

SEQ ID NO: 1942150 - RNA, 19 nt, Homo sapiens
  misc_RNA (1)...(19): siRNA sense strand
ucaaagcauuucucuccaa

SEQ ID NO: 1942151 - RNA, 19 nt, Homo sapiens
  misc_RNA (1)...(19): siRNA sense strand
ggcauaaagcaaauuguaa

SEQ ID NO: 1942152 - RNA, 19 nt, Homo sapiens
  misc_RNA (1)...(19): siRNA sense strand
gauugcauauuacaaacga

SEQ ID NO: 1942153 - RNA, 19 nt, Homo sapiens
  misc_RNA (1)...(19): siRNA sense strand
gguaauuguuucagaagag

SEQ ID NO: 1942154 - RNA, 19 nt, Homo sapiens
  misc_RNA (1)...(19): siRNA sense strand
ggaaaguacaccuaacaca

SEQ ID NO: 1942155 - RNA, 19 nt, Homo sapiens
  misc_RNA (1)...(19): siRNA sense strand
auauggaccuccucagaaa

SEQ ID NO: 1942156 - RNA, 19 nt, Homo sapiens
  misc_RNA (1)...(19): siRNA sense strand
cuaacacaaucaaagcauu

SEQ ID NO: 1942157 - RNA, 19 nt, Homo sapiens
  misc_RNA (1)...(19): siRNA sense strand
agauggagaacaacaauuu

SEQ ID NO: 1942158 - RNA, 19 nt, Homo sapiens
  misc_RNA (1)...(19): siRNA sense strand
aagcauuucucuccaaaca

SEQ ID NO: 1942159 - RNA, 19 nt, Homo sapiens
  misc_RNA (1)...(19): siRNA sense strand
cgaaacagcaccuucucaa

SEQ ID NO: 1942160 - RNA, 19 nt, Homo sapiens
  misc_RNA (1)...(19): siRNA sense strand
caacaauuuggaugaacua

SEQ ID NO: 1942161 - RNA, 19 nt, Homo sapiens
  misc_RNA (1)...(19): siRNA sense strand
caauggaaaguacaccuaa

SEQ ID NO: 1942162 - RNA, 19 nt, Homo sapiens
  misc_RNA (1)...(19): siRNA sense strand
gagaaugccaugaaaauga

SEQ ID NO: 1942163 - RNA, 19 nt, Homo sapiens
  misc_RNA (1)...(19): siRNA sense strand
aaaagugggucaugaaguu

SEQ ID NO: 1942164 - RNA, 19 nt, Homo sapiens
  misc_RNA (1)...(19): siRNA sense strand
gacccucacucugguagaa

SEQ ID NO: 1942165 - RNA, 19 nt, Homo sapiens
  misc_RNA (1)...(19): siRNA sense strand
gaguuuaguuacuguugau

SEQ ID NO: 1942166 - RNA, 19 nt, Homo sapiens
  misc_RNA (1)...(19): siRNA sense strand
gagaaguggcauaagaaga

SEQ ID NO: 1942167 - RNA, 19 nt, Homo sapiens
  misc_RNA (1)...(19): siRNA sense strand
gcugaccacccaaacaauu

SEQ ID NO: 1942168 - RNA, 19 nt, Homo sapiens
  misc_RNA (1)...(19): siRNA sense strand
uggcauaaagcaaauugua

SEQ ID NO: 1942169 - RNA, 19 nt, Homo sapiens
  misc_RNA (1)...(19): siRNA sense strand
gaaacagcaccuucucaag

SEQ ID NO: 1942170 - RNA, 19 nt, Homo sapiens
  misc_RNA (1)...(19): siRNA sense strand
aaaguacaccuaacacaau

SEQ ID NO: 1942171 - RNA, 19 nt, Homo sapiens
  misc_RNA (1)...(19): siRNA sense strand
gaccaaugaugccaaacag

SEQ ID NO: 1942172 - RNA, 19 nt, Homo sapiens
  misc_RNA (1)...(19): siRNA sense strand
ugaauggguugguccuugu

SEQ ID NO: 1942173 - RNA, 19 nt, Homo sapiens
  misc_RNA (1)...(19): siRNA sense strand
cagauuguuuggcauaaag

SEQ ID NO: 1942174 - RNA, 19 nt, Homo sapiens
  misc_RNA (1)...(19): siRNA sense strand
caguggagcucaucauggu

SEQ ID NO: 1942175 - RNA, 19 nt, Homo sapiens
  misc_RNA (1)...(19): siRNA sense strand
ggagaacaacaauuuggau

SEQ ID NO: 1942176 - RNA, 19 nt, Homo sapiens
  misc_RNA (1)...(19): siRNA sense strand
gccaaacaguggguauaug

SEQ ID NO: 1942177 - RNA, 19 nt, Homo sapiens
  misc_RNA (1)...(19): siRNA sense strand
gauggagaacaacaauuug

SEQ ID NO: 1942178 - RNA, 19 nt, Homo sapiens
  misc_RNA (1)...(19): siRNA sense strand
ggauggugauaauacaagu

SEQ ID NO: 1942179 - RNA, 19 nt, Homo sapiens
  misc_RNA (1)...(19): siRNA sense strand
ucacuuggaaccuacuaaa

SEQ ID NO: 1942180 - RNA, 19 nt, Homo sapiens
  misc_RNA (1)...(19): siRNA sense strand
uaucagcuguuucauuugc

SEQ ID NO: 1942181 - RNA, 19 nt, Homo sapiens
  misc_RNA (1)...(19): siRNA sense strand
gaacuguuaacccaaugga

SEQ ID NO: 1942182 - RNA, 19 nt, Homo sapiens
  misc_RNA (1)...(19): siRNA sense strand
uauauggaccuccucagaa

SEQ ID NO: 1942183 - RNA, 19 nt, Homo sapiens
  misc_RNA (1)...(19): siRNA sense strand
ggaccuucaucuuaaacag

SEQ ID NO: 1942184 - RNA, 19 nt, Homo sapiens
  misc_RNA (1)...(19): siRNA sense strand
ccaauggaaaguacaccua

SEQ ID NO: 1942185 - RNA, 19 nt, Homo sapiens
  misc_RNA (1)...(19): siRNA sense strand
cugguagaauccaauuauu

SEQ ID NO: 1942186 - RNA, 19 nt, Homo sapiens
  misc_RNA (1)...(19): siRNA sense strand
ucaccuaucagcuguuuca

SEQ ID NO: 1942187 - RNA, 19 nt, Homo sapiens
  misc_RNA (1)...(19): siRNA sense strand
caaacaauugggaugauca

SEQ ID NO: 1942188 - RNA, 19 nt, Homo sapiens
  misc_RNA (1)...(19): siRNA sense strand
ugaacuguacagauuguuu

SEQ ID NO: 1942189 - RNA, 19 nt, Homo sapiens
  misc_RNA (1)...(19): siRNA sense strand
agaacaacaauuuggauga

SEQ ID NO: 1942190 - RNA, 19 nt, Homo sapiens
  misc_RNA (1)...(19): siRNA sense strand
gauggugauaauacaagua

SEQ ID NO: 1942191 - RNA, 19 nt, Homo sapiens
  misc_RNA (1)...(19): siRNA sense strand
cuucagauagucuucauga

SEQ ID NO: 1942192 - RNA, 19 nt, Homo sapiens
  misc_RNA (1)...(19): siRNA sense strand
gugcugaccacccaaacaa

SEQ ID NO: 1942193 - RNA, 19 nt, Homo sapiens
  misc_RNA (1)...(19): siRNA sense strand
cuuaagagaaugccaugaa

SEQ ID NO: 1942194 - RNA, 19 nt, Homo sapiens
  misc_RNA (1)...(19): siRNA sense strand
acagauuguuuggcauaaa

SEQ ID NO: 1942195 - RNA, 19 nt, Homo sapiens
  misc_RNA (1)...(19): siRNA sense strand
acaaacgaacuggugaaua

SEQ ID NO: 1942196 - RNA, 19 nt, Homo sapiens
  misc_RNA (1)...(19): siRNA sense strand
gaccaaagagaugaauuca

SEQ ID NO: 1942197 - RNA, 19 nt, Homo sapiens
  misc_RNA (1)...(19): siRNA sense strand
ccauggaguuuaguuacug

SEQ ID NO: 1942198 - RNA, 19 nt, Homo sapiens
  misc_RNA (1)...(19): siRNA sense strand
gacaguggagcucaucaug

SEQ ID NO: 1942199 - RNA, 19 nt, Homo sapiens
  misc_RNA (1)...(19): siRNA sense strand
aauaauggaccaaagagau

SEQ ID NO: 1942200 - RNA, 19 nt, Homo sapiens
  misc_RNA (1)...(19): siRNA sense strand
gaccuucaucuuaaacaga

SEQ ID NO: 1942201 - RNA, 19 nt, Homo sapiens
  misc_RNA (1)...(19): siRNA sense strand
ggaaaauccauggaguuua

SEQ ID NO: 1942202 - RNA, 19 nt, Homo sapiens
  misc_RNA (1)...(19): siRNA sense strand
uagucgaaauccuuauaug

SEQ ID NO: 1942203 - RNA, 19 nt, Homo sapiens
  misc_RNA (1)...(19): siRNA sense strand
guacaccuaacacaaucaa

SEQ ID NO: 1942204 - RNA, 19 nt, Homo sapiens
  misc_RNA (1)...(19): siRNA sense strand
caccaaauggauugugauu

SEQ ID NO: 1942205 - RNA, 19 nt, Homo sapiens
  misc_RNA (1)...(19): siRNA sense strand
acaagcaacagaagucaug

SEQ ID NO: 1942206 - RNA, 19 nt, Homo sapiens
  misc_RNA (1)...(19): siRNA sense strand
aaacaguggguauaugcuu

SEQ ID NO: 1942207 - RNA, 19 nt, Homo sapiens
  misc_RNA (1)...(19): siRNA sense strand
cccaaacaauuaaauccau

SEQ ID NO: 1942208 - RNA, 19 nt, Homo sapiens
  misc_RNA (1)...(19): siRNA sense strand
gcauaagaagagcagcaaa

SEQ ID NO: 1942209 - RNA, 19 nt, Homo sapiens
  misc_RNA (1)...(19): siRNA sense strand
cagauugcauauuacaaac

SEQ ID NO: 1942210 - RNA, 19 nt, Homo sapiens
  misc_RNA (1)...(19): siRNA sense strand
agaaguggcauaagaagag

SEQ ID NO: 1942211 - RNA, 19 nt, Homo sapiens
  misc_RNA (1)...(19): siRNA sense strand
ccaaacaguggguauaugc

SEQ ID NO: 1942212 - RNA, 19 nt, Homo sapiens
  misc_RNA (1)...(19): siRNA sense strand
guggaaggauggucguuuu

SEQ ID NO: 1942213 - RNA, 19 nt, Homo sapiens
  misc_RNA (1)...(19): siRNA sense strand
ccagauggagaacaacaau

SEQ ID NO: 1942214 - RNA, 19 nt, Homo sapiens
  misc_RNA (1)...(19): siRNA sense strand
gccucuaugugauguuuca

SEQ ID NO: 1942215 - RNA, 19 nt, Homo sapiens
  misc_RNA (1)...(19): siRNA sense strand
gguggaaggauggucguuu

SEQ ID NO: 1942216 - RNA, 19 nt, Homo sapiens
  misc_RNA (1)...(19): siRNA sense strand
gagaauaagacaacuucac

SEQ ID NO: 1942217 - RNA, 19 nt, Homo sapiens
  misc_RNA (1)...(19): siRNA sense strand
acuguuaacccaauggaaa

SEQ ID NO: 1942218 - RNA, 19 nt, Homo sapiens
  misc_RNA (1)...(19): siRNA sense strand
ucucacaccucuggaacug

SEQ ID NO: 1942219 - RNA, 19 nt, Homo sapiens
  misc_RNA (1)...(19): siRNA sense strand
uacagauuguuuggcauaa

SEQ ID NO: 1942220 - RNA, 19 nt, Homo sapiens
  misc_RNA (1)...(19): siRNA sense strand
uaauaauggaccaaagaga

SEQ ID NO: 1942221 - RNA, 19 nt, Homo sapiens
  misc_RNA (1)...(19): siRNA sense strand
gagaagagcucguuaguuu

SEQ ID NO: 1942222 - RNA, 19 nt, Homo sapiens
  misc_RNA (1)...(19): siRNA sense strand
gaaauugaaucuccacaua

SEQ ID NO: 1942223 - RNA, 19 nt, Homo sapiens
  misc_RNA (1)...(19): siRNA sense strand
ggauagagaugacuuauga

SEQ ID NO: 1942224 - RNA, 19 nt, Homo sapiens
  misc_RNA (1)...(19): siRNA sense strand
gcagggaacuuaauaaaga

SEQ ID NO: 1942225 - RNA, 19 nt, Homo sapiens
  misc_RNA (1)...(19): siRNA sense strand
gaacuuaaaucuucuguca

SEQ ID NO: 1942226 - RNA, 19 nt, Homo sapiens
  misc_RNA (1)...(19): siRNA sense strand
gaagaacgguuuauggaaa

SEQ ID NO: 1942227 - RNA, 19 nt, Homo sapiens
  misc_RNA (1)...(19): siRNA sense strand
ggaaagaauuuaccaaugu

SEQ ID NO: 1942228 - RNA, 19 nt, Homo sapiens
  misc_RNA (1)...(19): siRNA sense strand
uagaggagcuggagaauuu

SEQ ID NO: 1942229 - RNA, 19 nt, Homo sapiens
  misc_RNA (1)...(19): siRNA sense strand
ggaauaauauccgacauaa

SEQ ID NO: 1942230 - RNA, 19 nt, Homo sapiens
  misc_RNA (1)...(19): siRNA sense strand
caacagaggcuucaucuuu

SEQ ID NO: 1942231 - RNA, 19 nt, Homo sapiens
  misc_RNA (1)...(19): siRNA sense strand
caacaucuguggaaauaaa

SEQ ID NO: 1942232 - RNA, 19 nt, Homo sapiens
  misc_RNA (1)...(19): siRNA sense strand
caaagaagcuacugacaau

SEQ ID NO: 1942233 - RNA, 19 nt, Homo sapiens
  misc_RNA (1)...(19): siRNA sense strand
gacaacaucuguggaaaua

SEQ ID NO: 1942234 - RNA, 19 nt, Homo sapiens
  misc_RNA (1)...(19): siRNA sense strand
guacaaauauacagcauug

SEQ ID NO: 1942235 - RNA, 19 nt, Homo sapiens
  misc_RNA (1)...(19): siRNA sense strand
uaacagcuauucagaugua

SEQ ID NO: 1942236 - RNA, 19 nt, Homo sapiens
  misc_RNA (1)...(19): siRNA sense strand
ugaaacagauugcaggaua

SEQ ID NO: 1942237 - RNA, 19 nt, Homo sapiens
  misc_RNA (1)...(19): siRNA sense strand
gaaagaagauaugaaagug

SEQ ID NO: 1942238 - RNA, 19 nt, Homo sapiens
  misc_RNA (1)...(19): siRNA sense strand
ccacgaagaagaagaauua

SEQ ID NO: 1942239 - RNA, 19 nt, Homo sapiens
  misc_RNA (1)...(19): siRNA sense strand
gugaagaugugaagauuaa

SEQ ID NO: 1942240 - RNA, 19 nt, Homo sapiens
  misc_RNA (1)...(19): siRNA sense strand
gaagagcucguuaguuuaa

SEQ ID NO: 1942241 - RNA, 19 nt, Homo sapiens
  misc_RNA (1)...(19): siRNA sense strand
gcaaguggaucacagauuc

SEQ ID NO: 1942242 - RNA, 19 nt, Homo sapiens
  misc_RNA (1)...(19): siRNA sense strand
gacaagaacuggcacauca

SEQ ID NO: 1942243 - RNA, 19 nt, Homo sapiens
  misc_RNA (1)...(19): siRNA sense strand
gaaaguuguucaccaauuc

SEQ ID NO: 1942244 - RNA, 19 nt, Homo sapiens
  misc_RNA (1)...(19): siRNA sense strand
gaacaaaccgaccauauca

SEQ ID NO: 1942245 - RNA, 19 nt, Homo sapiens
  misc_RNA (1)...(19): siRNA sense strand
gaccagaucuccagcaguu

SEQ ID NO: 1942246 - RNA, 19 nt, Homo sapiens
  misc_RNA (1)...(19): siRNA sense strand
guaacgagauguauagaga

SEQ ID NO: 1942247 - RNA, 19 nt, Homo sapiens
  misc_RNA (1)...(19): siRNA sense strand
uaagagaaccgaaaucaaa

SEQ ID NO: 1942248 - RNA, 19 nt, Homo sapiens
  misc_RNA (1)...(19): siRNA sense strand
gaagaaucgcugauauaua

SEQ ID NO: 1942249 - RNA, 19 nt, Homo sapiens
  misc_RNA (1)...(19): siRNA sense strand
aagaaucgcugauauauag

SEQ ID NO: 1942250 - RNA, 19 nt, Homo sapiens
  misc_RNA (1)...(19): siRNA sense strand
gaggauauccacaauguuu

SEQ ID NO: 1942251 - RNA, 19 nt, Homo sapiens
  misc_RNA (1)...(19): siRNA sense strand
gaauugacuucugagcuua

SEQ ID NO: 1942252 - RNA, 19 nt, Homo sapiens
  misc_RNA (1)...(19): siRNA sense strand
gaaauaauagucagcuuga

SEQ ID NO: 1942253 - RNA, 19 nt, Homo sapiens
  misc_RNA (1)...(19): siRNA sense strand
gcggauaggucaauuagau

SEQ ID NO: 1942254 - RNA, 19 nt, Homo sapiens
  misc_RNA (1)...(19): siRNA sense strand
gauguaagcaguuauaguu

SEQ ID NO: 1942255 - RNA, 19 nt, Homo sapiens
  misc_RNA (1)...(19): siRNA sense strand
gaaguucagugcauaucaa

SEQ ID NO: 1942256 - RNA, 19 nt, Homo sapiens
  misc_RNA (1)...(19): siRNA sense strand
gaagcuuuguguagaauga

SEQ ID NO: 1942257 - RNA, 19 nt, Homo sapiens
  misc_RNA (1)...(19): siRNA sense strand
ugaaagaaaugcuaaugug

SEQ ID NO: 1942258 - RNA, 19 nt, Homo sapiens
  misc_RNA (1)...(19): siRNA sense strand
gaaacagauugcaggauau

SEQ ID NO: 1942259 - RNA, 19 nt, Homo sapiens
  misc_RNA (1)...(19): siRNA sense strand
uaaggacucugaauuugaa

SEQ ID NO: 1942260 - RNA, 19 nt, Homo sapiens
  misc_RNA (1)...(19): siRNA sense strand
ggaguuggagguacaauaa

SEQ ID NO: 1942261 - RNA, 19 nt, Homo sapiens
  misc_RNA (1)...(19): siRNA sense strand
ggaauuugcuaaaccuuca

SEQ ID NO: 1942262 - RNA, 19 nt, Homo sapiens
  misc_RNA (1)...(19): siRNA sense strand
aaagagaacauaccaguaa

SEQ ID NO: 1942263 - RNA, 19 nt, Homo sapiens
  misc_RNA (1)...(19): siRNA sense strand
gggaaagaauuuaccaaug

SEQ ID NO: 1942264 - RNA, 19 nt, Homo sapiens
  misc_RNA (1)...(19): siRNA sense strand
agaugaagcuguucuaaau

SEQ ID NO: 1942265 - RNA, 19 nt, Homo sapiens
  misc_RNA (1)...(19): siRNA sense strand
caaaaugucugaaagugua

SEQ ID NO: 1942266 - RNA, 19 nt, Homo sapiens
  misc_RNA (1)...(19): siRNA sense strand
gaaucagacuuccacgaaa

SEQ ID NO: 1942267 - RNA, 19 nt, Homo sapiens
  misc_RNA (1)...(19): siRNA sense strand
gaucauaauucugaaggaa

SEQ ID NO: 1942268 - RNA, 19 nt, Homo sapiens
  misc_RNA (1)...(19): siRNA sense strand
gaagugagagaaucaaaga

SEQ ID NO: 1942269 - RNA, 19 nt, Homo sapiens
  misc_RNA (1)...(19): siRNA sense strand
gagcuuaauuccugggauu

SEQ ID NO: 1942270 - RNA, 19 nt, Homo sapiens
  misc_RNA (1)...(19): siRNA sense strand
guagaagcuuuguguagaa

SEQ ID NO: 1942271 - RNA, 19 nt, Homo sapiens
  misc_RNA (1)...(19): siRNA sense strand
caacaucugagaacaauga

SEQ ID NO: 1942272 - RNA, 19 nt, Homo sapiens
  misc_RNA (1)...(19): siRNA sense strand
gacaucaagucuacaagaa

SEQ ID NO: 1942273 - RNA, 19 nt, Homo sapiens
  misc_RNA (1)...(19): siRNA sense strand
uuaaaucgguucuccuaaa

SEQ ID NO: 1942274 - RNA, 19 nt, Homo sapiens
  misc_RNA (1)...(19): siRNA sense strand
ggacuucuaacgaugauaa

SEQ ID NO: 1942275 - RNA, 19 nt, Homo sapiens
  misc_RNA (1)...(19): siRNA sense strand
gaugacagcaagacugaua

SEQ ID NO: 1942276 - RNA, 19 nt, Homo sapiens
  misc_RNA (1)...(19): siRNA sense strand
cuacauugcuggagauaau

SEQ ID NO: 1942277 - RNA, 19 nt, Homo sapiens
  misc_RNA (1)...(19): siRNA sense strand
gaaguaacgagauguauag

SEQ ID NO: 1942278 - RNA, 19 nt, Homo sapiens
  misc_RNA (1)...(19): siRNA sense strand
guagcagaauccuugauaa

SEQ ID NO: 1942279 - RNA, 19 nt, Homo sapiens
  misc_RNA (1)...(19): siRNA sense strand
gacaaagggaauagaaaua

SEQ ID NO: 1942280 - RNA, 19 nt, Homo sapiens
  misc_RNA (1)...(19): siRNA sense strand
aaagaugguugccugguuu

SEQ ID NO: 1942281 - RNA, 19 nt, Homo sapiens
  misc_RNA (1)...(19): siRNA sense strand
ggaaagucauuuagcaucu

SEQ ID NO: 1942282 - RNA, 19 nt, Homo sapiens
  misc_RNA (1)...(19): siRNA sense strand
aaucgguucuccuaaauaa

SEQ ID NO: 1942283 - RNA, 19 nt, Homo sapiens
  misc_RNA (1)...(19): siRNA sense strand
gaaacacaaucagcaacaa

SEQ ID NO: 1942284 - RNA, 19 nt, Homo sapiens
  misc_RNA (1)...(19): siRNA sense strand
uaaagaggauauccacaau

SEQ ID NO: 1942285 - RNA, 19 nt, Homo sapiens
  misc_RNA (1)...(19): siRNA sense strand
gauagaagacuuaguugau

SEQ ID NO: 1942286 - RNA, 19 nt, Homo sapiens
  misc_RNA (1)...(19): siRNA sense strand
gaaagaaaugcuaaugugu

SEQ ID NO: 1942287 - RNA, 19 nt, Homo sapiens
  misc_RNA (1)...(19): siRNA sense strand
agaagggucuuuacauuuc

SEQ ID NO: 1942288 - RNA, 19 nt, Homo sapiens
  misc_RNA (1)...(19): siRNA sense strand
uaaaucgguucuccuaaau

SEQ ID NO: 1942289 - RNA, 19 nt, Homo sapiens
  misc_RNA (1)...(19): siRNA sense strand
guacaacucaguaaggaaa

SEQ ID NO: 1942290 - RNA, 19 nt, Homo sapiens
  misc_RNA (1)...(19): siRNA sense strand
gaugaagcuguucuaaaua

SEQ ID NO: 1942291 - RNA, 19 nt, Homo sapiens
  misc_RNA (1)...(19): siRNA sense strand
gaaagucauuuagcaucuu

SEQ ID NO: 1942292 - RNA, 19 nt, Homo sapiens
  misc_RNA (1)...(19): siRNA sense strand
ggaagacauagaagagaua

SEQ ID NO: 1942293 - RNA, 19 nt, Homo sapiens
  misc_RNA (1)...(19): siRNA sense strand
gaagcuguucuaaauauga

SEQ ID NO: 1942294 - RNA, 19 nt, Homo sapiens
  misc_RNA (1)...(19): siRNA sense strand
aagaaaugcuaauguguga

SEQ ID NO: 1942295 - RNA, 19 nt, Homo sapiens
  misc_RNA (1)...(19): siRNA sense strand
ccaaugaaguagaaaugga

SEQ ID NO: 1942296 - RNA, 19 nt, Homo sapiens
  misc_RNA (1)...(19): siRNA sense strand
ggauauuucucaaccuugu

SEQ ID NO: 1942297 - RNA, 19 nt, Homo sapiens
  misc_RNA (1)...(19): siRNA sense strand
gccagaaagucaaaucuca

SEQ ID NO: 1942298 - RNA, 19 nt, Homo sapiens
  misc_RNA (1)...(19): siRNA sense strand
uuaaggacaugcuagaaga

SEQ ID NO: 1942299 - RNA, 19 nt, Homo sapiens
  misc_RNA (1)...(19): siRNA sense strand
cgagauguguuugaugaaa

SEQ ID NO: 1942300 - RNA, 19 nt, Homo sapiens
  misc_RNA (1)...(19): siRNA sense strand
gaaaacagcucagcaacau

SEQ ID NO: 1942301 - RNA, 19 nt, Homo sapiens
  misc_RNA (1)...(19): siRNA sense strand
gaaacagaguacagaugug

SEQ ID NO: 1942302 - RNA, 19 nt, Homo sapiens
  misc_RNA (1)...(19): siRNA sense strand
gcugauauauaggaagaaa

SEQ ID NO: 1942303 - RNA, 19 nt, Homo sapiens
  misc_RNA (1)...(19): siRNA sense strand
aaacgucgcugcauauacu

SEQ ID NO: 1942304 - RNA, 19 nt, Homo sapiens
  misc_RNA (1)...(19): siRNA sense strand
ccagacauacuccaacuaa

SEQ ID NO: 1942305 - RNA, 19 nt, Homo sapiens
  misc_RNA (1)...(19): siRNA sense strand
gaaaagcaaccaaaacaaa

SEQ ID NO: 1942306 - RNA, 19 nt, Homo sapiens
  misc_RNA (1)...(19): siRNA sense strand
gaaggaagacauagaagag

SEQ ID NO: 1942307 - RNA, 19 nt, Homo sapiens
  misc_RNA (1)...(19): siRNA sense strand
gaaaacuacuccuagcaaa

SEQ ID NO: 1942308 - RNA, 19 nt, Homo sapiens
  misc_RNA (1)...(19): siRNA sense strand
gcaguuauaguucagaaga

SEQ ID NO: 1942309 - RNA, 19 nt, Homo sapiens
  misc_RNA (1)...(19): siRNA sense strand
cagccaagcucuaaaauga

SEQ ID NO: 1942310 - RNA, 19 nt, Homo sapiens
  misc_RNA (1)...(19): siRNA sense strand
gaagacuaccuuuguuaau

SEQ ID NO: 1942311 - RNA, 19 nt, Homo sapiens
  misc_RNA (1)...(19): siRNA sense strand
uaaagcagaaguagaaguu

SEQ ID NO: 1942312 - RNA, 19 nt, Homo sapiens
  misc_RNA (1)...(19): siRNA sense strand
ugcuggagauuaugacuua

SEQ ID NO: 1942313 - RNA, 19 nt, Homo sapiens
  misc_RNA (1)...(19): siRNA sense strand
gaacaacagaggcuucauc

SEQ ID NO: 1942314 - RNA, 19 nt, Homo sapiens
  misc_RNA (1)...(19): siRNA sense strand
gaagagaaaggagaaagga

SEQ ID NO: 1942315 - RNA, 19 nt, Homo sapiens
  misc_RNA (1)...(19): siRNA sense strand
aagaggauauccacaaugu

SEQ ID NO: 1942316 - RNA, 19 nt, Homo sapiens
  misc_RNA (1)...(19): siRNA sense strand
caaagaaacaacagaaagu

SEQ ID NO: 1942317 - RNA, 19 nt, Homo sapiens
  misc_RNA (1)...(19): siRNA sense strand
agauaaagcagaaguagaa

SEQ ID NO: 1942318 - RNA, 19 nt, Homo sapiens
  misc_RNA (1)...(19): siRNA sense strand
aaccacagcuaauagacua

SEQ ID NO: 1942319 - RNA, 19 nt, Homo sapiens
  misc_RNA (1)...(19): siRNA sense strand
aguagaaguuugcaagaaa

SEQ ID NO: 1942320 - RNA, 19 nt, Homo sapiens
  misc_RNA (1)...(19): siRNA sense strand
gaaguagaaguuugcaaga

SEQ ID NO: 1942321 - RNA, 19 nt, Homo sapiens
  misc_RNA (1)...(19): siRNA sense strand
aaacacaacuacaaagcua

SEQ ID NO: 1942322 - RNA, 19 nt, Homo sapiens
  misc_RNA (1)...(19): siRNA sense strand
aaagcuaccugccuuauga

SEQ ID NO: 1942323 - RNA, 19 nt, Homo sapiens
  misc_RNA (1)...(19): siRNA sense strand
cagcagaaguccaguauuc

SEQ ID NO: 1942324 - RNA, 19 nt, Homo sapiens
  misc_RNA (1)...(19): siRNA sense strand
uacacugcauccagaauua

SEQ ID NO: 1942325 - RNA, 19 nt, Homo sapiens
  misc_RNA (1)...(19): siRNA sense strand
gcaguugguucucuuugau

SEQ ID NO: 1942326 - RNA, 19 nt, Homo sapiens
  misc_RNA (1)...(19): siRNA sense strand
cuaccugccuuaugagauu

SEQ ID NO: 1942327 - RNA, 19 nt, Homo sapiens
  misc_RNA (1)...(19): siRNA sense strand
ggugaaagcaggccauaug

SEQ ID NO: 1942328 - RNA, 19 nt, Homo sapiens
  misc_RNA (1)...(19): siRNA sense strand
gcuugaggcaucccaaaua

SEQ ID NO: 1942329 - RNA, 19 nt, Homo sapiens
  misc_RNA (1)...(19): siRNA sense strand
gcagaaguccaguauucaa

SEQ ID NO: 1942330 - RNA, 19 nt, Homo sapiens
  misc_RNA (1)...(19): siRNA sense strand
uagcugcucugaacuagau

SEQ ID NO: 1942331 - RNA, 19 nt, Homo sapiens
  misc_RNA (1)...(19): siRNA sense strand
uauuugaucgggcuauuua

SEQ ID NO: 1942332 - RNA, 19 nt, Homo sapiens
  misc_RNA (1)...(19): siRNA sense strand
ugaucgggcuauuuaguug

SEQ ID NO: 1942333 - RNA, 19 nt, Homo sapiens
  misc_RNA (1)...(19): siRNA sense strand
gaaguccaguauucaacca

SEQ ID NO: 1942334 - RNA, 19 nt, Homo sapiens
  misc_RNA (1)...(19): siRNA sense strand
cuugaggcaucccaaauau

SEQ ID NO: 1942335 - RNA, 19 nt, Homo sapiens
  misc_RNA (1)...(19): siRNA sense strand
cauccagaauuagcagauu

SEQ ID NO: 1942336 - RNA, 19 nt, Homo sapiens
  misc_RNA (1)...(19): siRNA sense strand
uugauucucuggugcauuc

SEQ ID NO: 1942337 - RNA, 19 nt, Homo sapiens
  misc_RNA (1)...(19): siRNA sense strand
caaagcuaccugccuuaug

SEQ ID NO: 1942338 - RNA, 19 nt, Homo sapiens
  misc_RNA (1)...(19): siRNA sense strand
agacauacccgcaguuggu

SEQ ID NO: 1942339 - RNA, 19 nt, Homo sapiens
  misc_RNA (1)...(19): siRNA sense strand
cgcaguugguucucuuuga

SEQ ID NO: 1942340 - RNA, 19 nt, Homo sapiens
  misc_RNA (1)...(19): siRNA sense strand
cuacauuuccagccucuug

SEQ ID NO: 1942341 - RNA, 19 nt, Homo sapiens
  misc_RNA (1)...(19): siRNA sense strand
ugaggcaucccaaauaucu

SEQ ID NO: 1942342 - RNA, 19 nt, Homo sapiens
  misc_RNA (1)...(19): siRNA sense strand
ccaaagcccaaaggugaaa

SEQ ID NO: 1942343 - RNA, 19 nt, Homo sapiens
  misc_RNA (1)...(19): siRNA sense strand
gcucugaacuagauuuuac

SEQ ID NO: 1942344 - RNA, 19 nt, Homo sapiens
  misc_RNA (1)...(19): siRNA sense strand
uuacacugcauccagaauu

SEQ ID NO: 1942345 - RNA, 19 nt, Homo sapiens
  misc_RNA (1)...(19): siRNA sense strand
gggcaaaacacaacuacaa

SEQ ID NO: 1942346 - RNA, 19 nt, Homo sapiens
  misc_RNA (1)...(19): siRNA sense strand
ucuggugcauucaaagaga

SEQ ID NO: 1942347 - RNA, 19 nt, Homo sapiens
  misc_RNA (1)...(19): siRNA sense strand
gcauucaaagagaugacua

SEQ ID NO: 1942348 - RNA, 19 nt, Homo sapiens
  misc_RNA (1)...(19): siRNA sense strand
acuccuagcugcucugaac

SEQ ID NO: 1942349 - RNA, 19 nt, Homo sapiens
  misc_RNA (1)...(19): siRNA sense strand
aguccaguauucaaccaaa

SEQ ID NO: 1942350 - RNA, 19 nt, Homo sapiens
  misc_RNA (1)...(19): siRNA sense strand
uacaaagcuaccugccuua

SEQ ID NO: 1942351 - RNA, 19 nt, Homo sapiens
  misc_RNA (1)...(19): siRNA sense strand
gaccauacauugauugaga

SEQ ID NO: 1942352 - RNA, 19 nt, Homo sapiens
  misc_RNA (1)...(19): siRNA sense strand
caacuccugugaugacaua

SEQ ID NO: 1942353 - RNA, 19 nt, Homo sapiens
  misc_RNA (1)...(19): siRNA sense strand
caccagaucugcagaauuc

SEQ ID NO: 1942354 - RNA, 19 nt, Homo sapiens
  misc_RNA (1)...(19): siRNA sense strand
gcuauugggcucucauuua

SEQ ID NO: 1942355 - RNA, 19 nt, Homo sapiens
  misc_RNA (1)...(19): siRNA sense strand
ccuuauacuucaacuguua

SEQ ID NO: 1942356 - RNA, 19 nt, Homo sapiens
  misc_RNA (1)...(19): siRNA sense strand
uggagggucuuauaaauga

SEQ ID NO: 1942357 - RNA, 19 nt, Homo sapiens
  misc_RNA (1)...(19): siRNA sense strand
gaaccaaaaccaacuguua

SEQ ID NO: 1942358 - RNA, 19 nt, Homo sapiens
  misc_RNA (1)...(19): siRNA sense strand
ggugagaugauucguauuu

SEQ ID NO: 1942359 - RNA, 19 nt, Homo sapiens
  misc_RNA (1)...(19): siRNA sense strand
gaacaaagugaaacuggau

SEQ ID NO: 1942360 - RNA, 19 nt, Homo sapiens
  misc_RNA (1)...(19): siRNA sense strand
gcagcaggaacuagaauuu

SEQ ID NO: 1942361 - RNA, 19 nt, Homo sapiens
  misc_RNA (1)...(19): siRNA sense strand
gcuggaagaucaagagaag

SEQ ID NO: 1942362 - RNA, 19 nt, Homo sapiens
  misc_RNA (1)...(19): siRNA sense strand
gcaguuuaccucaauauca

SEQ ID NO: 1942363 - RNA, 19 nt, Homo sapiens
  misc_RNA (1)...(19): siRNA sense strand
caguuuaccucaauaucaa

SEQ ID NO: 1942364 - RNA, 19 nt, Homo sapiens
  misc_RNA (1)...(19): siRNA sense strand
gaccuccacugcugcuauu

SEQ ID NO: 1942365 - RNA, 19 nt, Homo sapiens
  misc_RNA (1)...(19): siRNA sense strand
gaccagaguggacuucauu

SEQ ID NO: 1942366 - RNA, 19 nt, Homo sapiens
  misc_RNA (1)...(19): siRNA sense strand
caacacuacuaccacaauc

SEQ ID NO: 1942367 - RNA, 19 nt, Homo sapiens
  misc_RNA (1)...(19): siRNA sense strand
gaaaagauuggaacaagaa

SEQ ID NO: 1942368 - RNA, 19 nt, Homo sapiens
  misc_RNA (1)...(19): siRNA sense strand
gaaacuggaucagaaaaga

SEQ ID NO: 1942369 - RNA, 19 nt, Homo sapiens
  misc_RNA (1)...(19): siRNA sense strand
uaaaugaguggaaccuuga

SEQ ID NO: 1942370 - RNA, 19 nt, Homo sapiens
  misc_RNA (1)...(19): siRNA sense strand
uugaaaaccuuguaccuua

SEQ ID NO: 1942371 - RNA, 19 nt, Homo sapiens
  misc_RNA (1)...(19): siRNA sense strand
agaguggacuucauuaucu

SEQ ID NO: 1942372 - RNA, 19 nt, Homo sapiens
  misc_RNA (1)...(19): siRNA sense strand
gauugagaauggugagaug

SEQ ID NO: 1942373 - RNA, 19 nt, Homo sapiens
  misc_RNA (1)...(19): siRNA sense strand
uggaagaucaagagaagua

SEQ ID NO: 1942374 - RNA, 19 nt, Homo sapiens
  misc_RNA (1)...(19): siRNA sense strand
cgacuaccaccgccacuuu

SEQ ID NO: 1942375 - RNA, 19 nt, Homo sapiens
  misc_RNA (1)...(19): siRNA sense strand
ggagaagugaacaaaguga

SEQ ID NO: 1942376 - RNA, 19 nt, Homo sapiens
  misc_RNA (1)...(19): siRNA sense strand
ugagaauggugagaugauu

SEQ ID NO: 1942377 - RNA, 19 nt, Homo sapiens
  misc_RNA (1)...(19): siRNA sense strand
aagugaaacuggaucagaa

SEQ ID NO: 1942378 - RNA, 19 nt, Homo sapiens
  misc_RNA (1)...(19): siRNA sense strand
caucuggagggucuuauaa

SEQ ID NO: 1942379 - RNA, 19 nt, Homo sapiens
  misc_RNA (1)...(19): siRNA sense strand
ucuggagggucuuauaaau

SEQ ID NO: 1942380 - RNA, 19 nt, Homo sapiens
  misc_RNA (1)...(19): siRNA sense strand
ccuuguaccuuauacuuca

SEQ ID NO: 1942381 - RNA, 19 nt, Homo sapiens
  misc_RNA (1)...(19): siRNA sense strand
cuauugggcucucauuuac

SEQ ID NO: 1942382 - RNA, 19 nt, Homo sapiens
  misc_RNA (1)...(19): siRNA sense strand
gagaagugaacaaagugaa

SEQ ID NO: 1942383 - RNA, 19 nt, Homo sapiens
  misc_RNA (1)...(19): siRNA sense strand
gaaaaccuuguaccuuaua

SEQ ID NO: 1942384 - RNA, 19 nt, Homo sapiens
  misc_RNA (1)...(19): siRNA sense strand
aagauuggaacaagaauug

SEQ ID NO: 1942385 - RNA, 19 nt, Homo sapiens
  misc_RNA (1)...(19): siRNA sense strand
aguagcaacuccugugaug

SEQ ID NO: 1942386 - RNA, 19 nt, Homo sapiens
  misc_RNA (1)...(19): siRNA sense strand
uacuucaacuguuagugua

SEQ ID NO: 1942387 - RNA, 19 nt, Homo sapiens
  misc_RNA (1)...(19): siRNA sense strand
cacaaucaccaguggcuuu

SEQ ID NO: 1942388 - RNA, 19 nt, Homo sapiens
  misc_RNA (1)...(19): siRNA sense strand
gaguggacuucauuaucug

SEQ ID NO: 1942389 - RNA, 19 nt, Homo sapiens
  misc_RNA (1)...(19): siRNA sense strand
ucuguugacuuauuuagag

SEQ ID NO: 1942390 - RNA, 19 nt, Homo sapiens
  misc_RNA (1)...(19): siRNA sense strand
gggcucucauuuacaacuu

SEQ ID NO: 1942391 - RNA, 19 nt, Homo sapiens
  misc_RNA (1)...(19): siRNA sense strand
acaaucaccaguggcuuua

SEQ ID NO: 1942392 - RNA, 19 nt, Homo sapiens
  misc_RNA (1)...(19): siRNA sense strand
gcucucauuuacaacuuca

SEQ ID NO: 1942393 - RNA, 19 nt, Homo sapiens
  misc_RNA (1)...(19): siRNA sense strand
guaguagcaacuccuguga

SEQ ID NO: 1942394 - RNA, 19 nt, Homo sapiens
  misc_RNA (1)...(19): siRNA sense strand
ggucaucuggagggucuua

SEQ ID NO: 1942395 - RNA, 19 nt, Homo sapiens
  misc_RNA (1)...(19): siRNA sense strand
cagaguggacuucauuauc

SEQ ID NO: 1942396 - RNA, 19 nt, Homo sapiens
  misc_RNA (1)...(19): siRNA sense strand
gaucaagagaaguacuuuc

SEQ ID NO: 1942397 - RNA, 19 nt, Homo sapiens
  misc_RNA (1)...(19): siRNA sense strand
ccagaguggacuucauuau

SEQ ID NO: 1942398 - RNA, 19 nt, Homo sapiens
  misc_RNA (1)...(19): siRNA sense strand
agaagugaacaaagugaaa

SEQ ID NO: 1942399 - RNA, 19 nt, Homo sapiens
  misc_RNA (1)...(19): siRNA sense strand
gaagugaacaaagugaaac

SEQ ID NO: 1942400 - RNA, 19 nt, Homo sapiens
  misc_RNA (1)...(19): siRNA sense strand
ggaacaagaauuggauuuu

SEQ ID NO: 1942401 - RNA, 19 nt, Homo sapiens
  misc_RNA (1)...(19): siRNA sense strand
gucaaugcuugggaccaua

SEQ ID NO: 1942402 - RNA, 19 nt, Homo sapiens
  misc_RNA (1)...(19): siRNA sense strand
auggugagaugauucguau

SEQ ID NO: 1942403 - RNA, 19 nt, Homo sapiens
  misc_RNA (1)...(19): siRNA sense strand
aaccaacuguuaucaagag

SEQ ID NO: 1942404 - RNA, 19 nt, Homo sapiens
  misc_RNA (1)...(19): siRNA sense strand
aaagugaaacuggaucaga

SEQ ID NO: 1942405 - RNA, 19 nt, Homo sapiens
  misc_RNA (1)...(19): siRNA sense strand
uaccuuauacuucaacugu

SEQ ID NO: 1942406 - RNA, 19 nt, Homo sapiens
  misc_RNA (1)...(19): siRNA sense strand
gauuggaacaagaauugga

SEQ ID NO: 1942407 - RNA, 19 nt, Homo sapiens
  misc_RNA (1)...(19): siRNA sense strand
auggagaagugaacaaagu

SEQ ID NO: 1942408 - RNA, 19 nt, Homo sapiens
  misc_RNA (1)...(19): siRNA sense strand
ccaacacuacuaccacaau

SEQ ID NO: 1942409 - RNA, 19 nt, Homo sapiens
  misc_RNA (1)...(19): siRNA sense strand
accuugagcuggaagauca

SEQ ID NO: 1942410 - RNA, 19 nt, Homo sapiens
  misc_RNA (1)...(19): siRNA sense strand
aaaccaacuguuaucaaga

SEQ ID NO: 1942411 - RNA, 19 nt, Homo sapiens
  misc_RNA (1)...(19): siRNA sense strand
cgaccagaguggacuucau

SEQ ID NO: 1942412 - RNA, 19 nt, Homo sapiens
  misc_RNA (1)...(19): siRNA sense strand
cagaaaagauuggaacaag

SEQ ID NO: 1942413 - RNA, 19 nt, Homo sapiens
  misc_RNA (1)...(19): siRNA sense strand
ccaggccacucaggucaau

SEQ ID NO: 1942414 - RNA, 19 nt, Homo sapiens
  misc_RNA (1)...(19): siRNA sense strand
gagcuggaagaucaagaga

SEQ ID NO: 1942415 - RNA, 19 nt, Homo sapiens
  misc_RNA (1)...(19): siRNA sense strand
gcuugggaccauacauuga

SEQ ID NO: 1942416 - RNA, 19 nt, Homo sapiens
  misc_RNA (1)...(19): siRNA sense strand
ccaccagaucugcagaauu

SEQ ID NO: 1942417 - RNA, 19 nt, Homo sapiens
  misc_RNA (1)...(19): siRNA sense strand
uuuacaacuucaacgacua

SEQ ID NO: 1942418 - RNA, 19 nt, Homo sapiens
  misc_RNA (1)...(19): siRNA sense strand
gggaccauacauugauuga

SEQ ID NO: 1942419 - RNA, 19 nt, Homo sapiens
  misc_RNA (1)...(19): siRNA sense strand
ugaaaaccuuguaccuuau

SEQ ID NO: 1942420 - RNA, 19 nt, Homo sapiens
  misc_RNA (1)...(19): siRNA sense strand
cagcaggaacuagaauuuc

SEQ ID NO: 1942421 - RNA, 19 nt, Homo sapiens
  misc_RNA (1)...(19): siRNA sense strand
uggaacaagaauuggauuu

SEQ ID NO: 1942422 - RNA, 19 nt, Homo sapiens
  misc_RNA (1)...(19): siRNA sense strand
auugggcucucauuuacaa

SEQ ID NO: 1942423 - RNA, 19 nt, Homo sapiens
  misc_RNA (1)...(19): siRNA sense strand
ucaucuggagggucuuaua

SEQ ID NO: 1942424 - RNA, 19 nt, Homo sapiens
  misc_RNA (1)...(19): siRNA sense strand
agaaaagauuggaacaaga

SEQ ID NO: 1942425 - RNA, 19 nt, Homo sapiens
  misc_RNA (1)...(19): siRNA sense strand
gaagaucaagagaaguacu

SEQ ID NO: 1942426 - RNA, 19 nt, Homo sapiens
  misc_RNA (1)...(19): siRNA sense strand
gaaccuugagcuggaagau

SEQ ID NO: 1942427 - RNA, 19 nt, Homo sapiens
  misc_RNA (1)...(19): siRNA sense strand
aaaaccaacuguuaucaag

SEQ ID NO: 1942428 - RNA, 19 nt, Homo sapiens
  misc_RNA (1)...(19): siRNA sense strand
ggaaacaaaugaaagucuu

SEQ ID NO: 1942429 - RNA, 19 nt, Homo sapiens
  misc_RNA (1)...(19): siRNA sense strand
gauaagcuuuguuggguuu

SEQ ID NO: 1942430 - RNA, 19 nt, Homo sapiens
  misc_RNA (1)...(19): siRNA sense strand
gagcaacaacacagauuua

SEQ ID NO: 1942431 - RNA, 19 nt, Homo sapiens
  misc_RNA (1)...(19): siRNA sense strand
gaugagaggccauauuuau

SEQ ID NO: 1942432 - RNA, 19 nt, Homo sapiens
  misc_RNA (1)...(19): siRNA sense strand
ggugcucccuuuaucuuua

SEQ ID NO: 1942433 - RNA, 19 nt, Homo sapiens
  misc_RNA (1)...(19): siRNA sense strand
gauaaacccauuccucaaa

SEQ ID NO: 1942434 - RNA, 19 nt, Homo sapiens
  misc_RNA (1)...(19): siRNA sense strand
ggaacucccugcuguuuua

SEQ ID NO: 1942435 - RNA, 19 nt, Homo sapiens
  misc_RNA (1)...(19): siRNA sense strand
ucaguggccuuuaggagua

SEQ ID NO: 1942436 - RNA, 19 nt, Homo sapiens
  misc_RNA (1)...(19): siRNA sense strand
agacagagcuuaaaaugaa

SEQ ID NO: 1942437 - RNA, 19 nt, Homo sapiens
  misc_RNA (1)...(19): siRNA sense strand
gaagaacacaguacagcuu

SEQ ID NO: 1942438 - RNA, 19 nt, Homo sapiens
  misc_RNA (1)...(19): siRNA sense strand
ggaagcggcucugcucguu

SEQ ID NO: 1942439 - RNA, 19 nt, Homo sapiens
  misc_RNA (1)...(19): siRNA sense strand
gcaacaacacagauuuaaa

SEQ ID NO: 1942440 - RNA, 19 nt, Homo sapiens
  misc_RNA (1)...(19): siRNA sense strand
cggcucugcucguuucuua

SEQ ID NO: 1942441 - RNA, 19 nt, Homo sapiens
  misc_RNA (1)...(19): siRNA sense strand
aaacagaucucaguguaca

SEQ ID NO: 1942442 - RNA, 19 nt, Homo sapiens
  misc_RNA (1)...(19): siRNA sense strand
gcuggcaacugugggaaua

SEQ ID NO: 1942443 - RNA, 19 nt, Homo sapiens
  misc_RNA (1)...(19): siRNA sense strand
agaaugcuaucgaaucuau

SEQ ID NO: 1942444 - RNA, 19 nt, Homo sapiens
  misc_RNA (1)...(19): siRNA sense strand
guagcaacauacaggaauu

SEQ ID NO: 1942445 - RNA, 19 nt, Homo sapiens
  misc_RNA (1)...(19): siRNA sense strand
ggaacgauaagcuuuguug

SEQ ID NO: 1942446 - RNA, 19 nt, Homo sapiens
  misc_RNA (1)...(19): siRNA sense strand
aaauguuacuucaguggua

SEQ ID NO: 1942447 - RNA, 19 nt, Homo sapiens
  misc_RNA (1)...(19): siRNA sense strand
guccaugggugcucccuuu

SEQ ID NO: 1942448 - RNA, 19 nt, Homo sapiens
  misc_RNA (1)...(19): siRNA sense strand
gauaaugaguggauaaacc

SEQ ID NO: 1942449 - RNA, 19 nt, Homo sapiens
  misc_RNA (1)...(19): siRNA sense strand
uuagauaaauccacgaaag

SEQ ID NO: 1942450 - RNA, 19 nt, Homo sapiens
  misc_RNA (1)...(19): siRNA sense strand
gaugggaacgauaagcuuu

SEQ ID NO: 1942451 - RNA, 19 nt, Homo sapiens
  misc_RNA (1)...(19): siRNA sense strand
gauaaauccacgaaaggaa

SEQ ID NO: 1942452 - RNA, 19 nt, Homo sapiens
  misc_RNA (1)...(19): siRNA sense strand
gccgagaacaguccacuuu

SEQ ID NO: 1942453 - RNA, 19 nt, Homo sapiens
  misc_RNA (1)...(19): siRNA sense strand
ggaggcaaguuggucaaug

SEQ ID NO: 1942454 - RNA, 19 nt, Homo sapiens
  misc_RNA (1)...(19): siRNA sense strand
guacuucuccguugaugug

SEQ ID NO: 1942455 - RNA, 19 nt, Homo sapiens
  misc_RNA (1)...(19): siRNA sense strand
ggaaagugaagaauggaau

SEQ ID NO: 1942456 - RNA, 19 nt, Homo sapiens
  misc_RNA (1)...(19): siRNA sense strand
cuaugaggcuugcuccuau

SEQ ID NO: 1942457 - RNA, 19 nt, Homo sapiens
  misc_RNA (1)...(19): siRNA sense strand
gacaggcacuaaugaacau

SEQ ID NO: 1942458 - RNA, 19 nt, Homo sapiens
  misc_RNA (1)...(19): siRNA sense strand
ugaauaaugugguacucau

SEQ ID NO: 1942459 - RNA, 19 nt, Homo sapiens
  misc_RNA (1)...(19): siRNA sense strand
cgaugugacugcucaaugg

SEQ ID NO: 1942460 - RNA, 19 nt, Homo sapiens
  misc_RNA (1)...(19): siRNA sense strand
gaaggaacucccugcuguu

SEQ ID NO: 1942461 - RNA, 19 nt, Homo sapiens
  misc_RNA (1)...(19): siRNA sense strand
ggagcugcuuuucauaaua

SEQ ID NO: 1942462 - RNA, 19 nt, Homo sapiens
  misc_RNA (1)...(19): siRNA sense strand
ggauaaacccauuccucaa

SEQ ID NO: 1942463 - RNA, 19 nt, Homo sapiens
  misc_RNA (1)...(19): siRNA sense strand
cgagaacaguccacuuugg

SEQ ID NO: 1942464 - RNA, 19 nt, Homo sapiens
  misc_RNA (1)...(19): siRNA sense strand
agaaggaaagucaaucgua

SEQ ID NO: 1942465 - RNA, 19 nt, Homo sapiens
  misc_RNA (1)...(19): siRNA sense strand
ggagagaaggaaagucaau

SEQ ID NO: 1942466 - RNA, 19 nt, Homo sapiens
  misc_RNA (1)...(19): siRNA sense strand
gaguaaacacagaaugcua

SEQ ID NO: 1942467 - RNA, 19 nt, Homo sapiens
  misc_RNA (1)...(19): siRNA sense strand
ugaugugaauaauguggua

SEQ ID NO: 1942468 - RNA, 19 nt, Homo sapiens
  misc_RNA (1)...(19): siRNA sense strand
acagaaugcuaucgaaucu

SEQ ID NO: 1942469 - RNA, 19 nt, Homo sapiens
  misc_RNA (1)...(19): siRNA sense strand
gaaagugaagaauggaauc

SEQ ID NO: 1942470 - RNA, 19 nt, Homo sapiens
  misc_RNA (1)...(19): siRNA sense strand
gagcugcuuuucauaauau

SEQ ID NO: 1942471 - RNA, 19 nt, Homo sapiens
  misc_RNA (1)...(19): siRNA sense strand
gaggcaaguuggucaaugc

SEQ ID NO: 1942472 - RNA, 19 nt, Homo sapiens
  misc_RNA (1)...(19): siRNA sense strand
uuugaaggcuuacuugauc

SEQ ID NO: 1942473 - RNA, 19 nt, Homo sapiens
  misc_RNA (1)...(19): siRNA sense strand
ccguugaugugaauaaugu

SEQ ID NO: 1942474 - RNA, 19 nt, Homo sapiens
  misc_RNA (1)...(19): siRNA sense strand
caggguacuucuccguuga

SEQ ID NO: 1942475 - RNA, 19 nt, Homo sapiens
  misc_RNA (1)...(19): siRNA sense strand
ccagacaggcacuaaugaa

SEQ ID NO: 1942476 - RNA, 19 nt, Homo sapiens
  misc_RNA (1)...(19): siRNA sense strand
guacaaaucuggggcaaag

SEQ ID NO: 1942477 - RNA, 19 nt, Homo sapiens
  misc_RNA (1)...(19): siRNA sense strand
caugggugcucccuuuauc

SEQ ID NO: 1942478 - RNA, 19 nt, Homo sapiens
  misc_RNA (1)...(19): siRNA sense strand
cuuaagaauuaccaagaug

SEQ ID NO: 1942479 - RNA, 19 nt, Homo sapiens
  misc_RNA (1)...(19): siRNA sense strand
ggauuaaugacguggaugu

SEQ ID NO: 1942480 - RNA, 19 nt, Homo sapiens
  misc_RNA (1)...(19): siRNA sense strand
gugguuacuuuaugcacaa

SEQ ID NO: 1942481 - RNA, 19 nt, Homo sapiens
  misc_RNA (1)...(19): siRNA sense strand
gaucucaguguacaaaucu

SEQ ID NO: 1942482 - RNA, 19 nt, Homo sapiens
  misc_RNA (1)...(19): siRNA sense strand
gaagcggcucugcucguuu

SEQ ID NO: 1942483 - RNA, 19 nt, Homo sapiens
  misc_RNA (1)...(19): siRNA sense strand
uaugacagccccuggauua

SEQ ID NO: 1942484 - RNA, 19 nt, Homo sapiens
  misc_RNA (1)...(19): siRNA sense strand
uuaaugacguggauguuuu

SEQ ID NO: 1942485 - RNA, 19 nt, Homo sapiens
  misc_RNA (1)...(19): siRNA sense strand
aaacacagaaugcuaucga

SEQ ID NO: 1942486 - RNA, 19 nt, Homo sapiens
  misc_RNA (1)...(19): siRNA sense strand
ugaugagaggccauauuua

SEQ ID NO: 1942487 - RNA, 19 nt, Homo sapiens
  misc_RNA (1)...(19): siRNA sense strand
ugagcaacaacacagauuu

SEQ ID NO: 1942488 - RNA, 19 nt, Homo sapiens
  misc_RNA (1)...(19): siRNA sense strand
guaggaagaacacaguaca

SEQ ID NO: 1942489 - RNA, 19 nt, Homo sapiens
  misc_RNA (1)...(19): siRNA sense strand
gugcucccuuuaucuuuau

SEQ ID NO: 1942490 - RNA, 19 nt, Homo sapiens
  misc_RNA (1)...(19): siRNA sense strand
ccucaggaaacaaaugaaa

SEQ ID NO: 1942491 - RNA, 19 nt, Homo sapiens
  misc_RNA (1)...(19): siRNA sense strand
auaaauccacgaaaggaaa

SEQ ID NO: 1942492 - RNA, 19 nt, Homo sapiens
  misc_RNA (1)...(19): siRNA sense strand
aagcggcucugcucguuuc

SEQ ID NO: 1942493 - RNA, 19 nt, Homo sapiens
  misc_RNA (1)...(19): siRNA sense strand
augaugagaggccauauuu

SEQ ID NO: 1942494 - RNA, 19 nt, Homo sapiens
  misc_RNA (1)...(19): siRNA sense strand
gaacacaguacagcuucau

SEQ ID NO: 1942495 - RNA, 19 nt, Homo sapiens
  misc_RNA (1)...(19): siRNA sense strand
cuuuaggaguagcaacaua

SEQ ID NO: 1942496 - RNA, 19 nt, Homo sapiens
  misc_RNA (1)...(19): siRNA sense strand
gcaucuugcuguuguuuug

SEQ ID NO: 1942497 - RNA, 19 nt, Homo sapiens
  misc_RNA (1)...(19): siRNA sense strand
ggaaagucaaucguaggaa

SEQ ID NO: 1942498 - RNA, 19 nt, Homo sapiens
  misc_RNA (1)...(19): siRNA sense strand
ucaggaaacaaaugaaagu

SEQ ID NO: 1942499 - RNA, 19 nt, Homo sapiens
  misc_RNA (1)...(19): siRNA sense strand
gcucugcucguuucuuauc

SEQ ID NO: 1942500 - RNA, 19 nt, Homo sapiens
  misc_RNA (1)...(19): siRNA sense strand
gcgaugugacugcucaaug

SEQ ID NO: 1942501 - RNA, 19 nt, Homo sapiens
  misc_RNA (1)...(19): siRNA sense strand
caagacagagcuuaaaaug

SEQ ID NO: 1942502 - RNA, 19 nt, Homo sapiens
  misc_RNA (1)...(19): siRNA sense strand
gguaucagcacuucaagac

SEQ ID NO: 1942503 - RNA, 19 nt, Homo sapiens
  misc_RNA (1)...(19): siRNA sense strand
ccucugcaguuacucaagu

SEQ ID NO: 1942504 - RNA, 19 nt, Homo sapiens
  misc_RNA (1)...(19): siRNA sense strand
uguaauuucuuaggaacga

SEQ ID NO: 1942505 - RNA, 19 nt, Homo sapiens
  misc_RNA (1)...(19): siRNA sense strand
gcacuucaagacagagcuu

SEQ ID NO: 1942506 - RNA, 19 nt, Homo sapiens
  misc_RNA (1)...(19): siRNA sense strand
gcaacugugggaauacauc

SEQ ID NO: 1942507 - RNA, 19 nt, Homo sapiens
  misc_RNA (1)...(19): siRNA sense strand
agacaggcacuaaugaaca

SEQ ID NO: 1942508 - RNA, 19 nt, Homo sapiens
  misc_RNA (1)...(19): siRNA sense strand
gaguagcaacauacaggaa

SEQ ID NO: 1942509 - RNA, 19 nt, Homo sapiens
  misc_RNA (1)...(19): siRNA sense strand
ggucggaguaaacacagaa

SEQ ID NO: 1942510 - RNA, 19 nt, Homo sapiens
  misc_RNA (1)...(19): siRNA sense strand
caugaugagaggccauauu

SEQ ID NO: 1942511 - RNA, 19 nt, Homo sapiens
  misc_RNA (1)...(19): siRNA sense strand
gcccuguacugccuauucu

SEQ ID NO: 1942512 - RNA, 19 nt, Homo sapiens
  misc_RNA (1)...(19): siRNA sense strand
gugauaaugaguggauaaa

SEQ ID NO: 1942513 - RNA, 19 nt, Homo sapiens
  misc_RNA (1)...(19): siRNA sense strand
ucuuaggaacgauuuauga

SEQ ID NO: 1942514 - RNA, 19 nt, Homo sapiens
  misc_RNA (1)...(19): siRNA sense strand
acagaucucaguguacaaa

SEQ ID NO: 1942515 - RNA, 19 nt, Homo sapiens
  misc_RNA (1)...(19): siRNA sense strand
gacagccccuggauuaaug

SEQ ID NO: 1942516 - RNA, 19 nt, Homo sapiens
  misc_RNA (1)...(19): siRNA sense strand
uuuggaaagugaagaaugg

SEQ ID NO: 1942517 - RNA, 19 nt, Homo sapiens
  misc_RNA (1)...(19): siRNA sense strand
gagagaaggaaagucaauc

SEQ ID NO: 1942518 - RNA, 19 nt, Homo sapiens
  misc_RNA (1)...(19): siRNA sense strand
aaggaacucccugcuguuu

SEQ ID NO: 1942519 - RNA, 19 nt, Homo sapiens
  misc_RNA (1)...(19): siRNA sense strand
uagcaacauacaggaauuu

SEQ ID NO: 1942520 - RNA, 19 nt, Homo sapiens
  misc_RNA (1)...(19): siRNA sense strand
agugaagaauggaauccuu

SEQ ID NO: 1942521 - RNA, 19 nt, Homo sapiens
  misc_RNA (1)...(19): siRNA sense strand
acacaguacagcuucauca

SEQ ID NO: 1942522 - RNA, 19 nt, Homo sapiens
  misc_RNA (1)...(19): siRNA sense strand
guaaacacagaaugcuauc

SEQ ID NO: 1942523 - RNA, 19 nt, Homo sapiens
  misc_RNA (1)...(19): siRNA sense strand
uaugaggcuugcuccuaug

SEQ ID NO: 1942524 - RNA, 19 nt, Homo sapiens
  misc_RNA (1)...(19): siRNA sense strand
cacagaaugcuaucgaauc

SEQ ID NO: 1942525 - RNA, 19 nt, Homo sapiens
  misc_RNA (1)...(19): siRNA sense strand
acccagugguuacuuuaug

SEQ ID NO: 1942526 - RNA, 19 nt, Homo sapiens
  misc_RNA (1)...(19): siRNA sense strand
aaugcuaucgaaucuauga

SEQ ID NO: 1942527 - RNA, 19 nt, Homo sapiens
  misc_RNA (1)...(19): siRNA sense strand
aguaaacacagaaugcuau

SEQ ID NO: 1942528 - RNA, 19 nt, Homo sapiens
  misc_RNA (1)...(19): siRNA sense strand
ugucaguucuucuagauuu

SEQ ID NO: 1942529 - RNA, 19 nt, Homo sapiens
  misc_RNA (1)...(19): siRNA sense strand
gacaugcccacuagaaaua

SEQ ID NO: 1942530 - RNA, 19 nt, Homo sapiens
  misc_RNA (1)...(19): siRNA sense strand
gaaugccuguugucaguuc

SEQ ID NO: 1942531 - RNA, 19 nt, Homo sapiens
  misc_RNA (1)...(19): siRNA sense strand
gggaugauucgucuaauug

SEQ ID NO: 1942532 - RNA, 19 nt, Homo sapiens
  misc_RNA (1)...(19): siRNA sense strand
gguaauuucucuguuucaa

SEQ ID NO: 1942533 - RNA, 19 nt, Homo sapiens
  misc_RNA (1)...(19): siRNA sense strand
gucaguucuucuagauuua

SEQ ID NO: 1942534 - RNA, 19 nt, Homo sapiens
  misc_RNA (1)...(19): siRNA sense strand
caugcccacuagaaauaua

SEQ ID NO: 1942535 - RNA, 19 nt, Homo sapiens
  misc_RNA (1)...(19): siRNA sense strand
ugggaugauucgucuaauu

SEQ ID NO: 1942536 - RNA, 19 nt, Homo sapiens
  misc_RNA (1)...(19): siRNA sense strand
uggaauugcugggucauau

SEQ ID NO: 1942537 - RNA, 19 nt, Homo sapiens
  misc_RNA (1)...(19): siRNA sense strand
uauuugggccuauauggua

SEQ ID NO: 1942538 - RNA, 19 nt, Homo sapiens
  misc_RNA (1)...(19): siRNA sense strand
ugacaugcccacuagaaau

SEQ ID NO: 1942539 - RNA, 19 nt, Homo sapiens
  misc_RNA (1)...(19): siRNA sense strand
ccacuagaaauauaugaga

SEQ ID NO: 1942540 - RNA, 19 nt, Homo sapiens
  misc_RNA (1)...(19): siRNA sense strand
guugucaguucuucuagau

SEQ ID NO: 1942541 - RNA, 19 nt, Homo sapiens
  misc_RNA (1)...(19): siRNA sense strand
cauuugacaugcccacuag

SEQ ID NO: 1942542 - RNA, 19 nt, Homo sapiens
  misc_RNA (1)...(19): siRNA sense strand
cacaucuucugacagcuuu

SEQ ID NO: 1942543 - RNA, 19 nt, Homo sapiens
  misc_RNA (1)...(19): siRNA sense strand
ggaauugcugggucauaug

SEQ ID NO: 1942544 - RNA, 19 nt, Homo sapiens
  misc_RNA (1)...(19): siRNA sense strand
guugggaugauucgucuaa

SEQ ID NO: 1942545 - RNA, 19 nt, Homo sapiens
  misc_RNA (1)...(19): siRNA sense strand
uugaaugccuguugucagu

SEQ ID NO: 1942546 - RNA, 19 nt, Homo sapiens
  misc_RNA (1)...(19): siRNA sense strand
uaccuuauuugggccuaua

SEQ ID NO: 1942547 - RNA, 19 nt, Homo sapiens
  misc_RNA (1)...(19): siRNA sense strand
gaauugcugggucauaugg

SEQ ID NO: 1942548 - RNA, 19 nt, Homo sapiens
  misc_RNA (1)...(19): siRNA sense strand
ggucauaugguaauuucuc

SEQ ID NO: 1942549 - RNA, 19 nt, Homo sapiens
  misc_RNA (1)...(19): siRNA sense strand
ugggucauaugguaauuuc

SEQ ID NO: 1942550 - RNA, 19 nt, Homo sapiens
  misc_RNA (1)...(19): siRNA sense strand
ccauuugacaugcccacua

SEQ ID NO: 1942551 - RNA, 19 nt, Homo sapiens
  misc_RNA (1)...(19): siRNA sense strand
ucacaucuucugacagcuu

SEQ ID NO: 1942552 - RNA, 19 nt, Homo sapiens
  misc_RNA (1)...(19): siRNA sense strand
gcugggucauaugguaauu

SEQ ID NO: 1942553 - RNA, 19 nt, Homo sapiens
  misc_RNA (1)...(19): siRNA sense strand
cauaugguaauuucucugu

SEQ ID NO: 1942554 - RNA, 19 nt, Homo sapiens
  misc_RNA (1)...(19): siRNA sense strand
ucgagaagcuugugauuua

SEQ ID NO: 1942555 - RNA, 19 nt, Homo sapiens
  misc_RNA (1)...(19): siRNA sense strand
ggaaugcucuuucacuaug

SEQ ID NO: 1942556 - RNA, 19 nt, Homo sapiens
  misc_RNA (1)...(19): siRNA sense strand
gaacucauccuacaacaag

SEQ ID NO: 1942557 - RNA, 19 nt, Homo sapiens
  misc_RNA (1)...(19): siRNA sense strand
agaggacgaugaugacuuu

SEQ ID NO: 1942558 - RNA, 19 nt, Homo sapiens
  misc_RNA (1)...(19): siRNA sense strand
guggaaugcucuuucacua

SEQ ID NO: 1942559 - RNA, 19 nt, Homo sapiens
  misc_RNA (1)...(19): siRNA sense strand
gcgaggagcgcaagaaguu

SEQ ID NO: 1942560 - RNA, 19 nt, Homo sapiens
  misc_RNA (1)...(19): siRNA sense strand
uuacaaagaccacgaccua

SEQ ID NO: 1942561 - RNA, 19 nt, Homo sapiens
  misc_RNA (1)...(19): siRNA sense strand
ggacgaugaugacuuugag

SEQ ID NO: 1942562 - RNA, 19 nt, Homo sapiens
  misc_RNA (1)...(19): siRNA sense strand
uggacgagauguaugauga

SEQ ID NO: 1942563 - RNA, 19 nt, Homo sapiens
  misc_RNA (1)...(19): siRNA sense strand
gaaugcucuuucacuauga

SEQ ID NO: 1942564 - RNA, 19 nt, Homo sapiens
  misc_RNA (1)...(19): siRNA sense strand
ccaaagaagacaugcaguu

SEQ ID NO: 1942565 - RNA, 19 nt, Homo sapiens
  misc_RNA (1)...(19): siRNA sense strand
gagaagcuugugauuuauu

SEQ ID NO: 1942566 - RNA, 19 nt, Homo sapiens
  misc_RNA (1)...(19): siRNA sense strand
ccaacuuucugaucgauag

SEQ ID NO: 1942567 - RNA, 19 nt, Homo sapiens
  misc_RNA (1)...(19): siRNA sense strand
gguggaggcuggguuuaug

SEQ ID NO: 1942568 - RNA, 19 nt, Homo sapiens
  misc_RNA (1)...(19): siRNA sense strand
gauuuauugugaccaguau

SEQ ID NO: 1942569 - RNA, 19 nt, Homo sapiens
  misc_RNA (1)...(19): siRNA sense strand
caaagaagacaugcaguuc

SEQ ID NO: 1942570 - RNA, 19 nt, Homo sapiens
  misc_RNA (1)...(19): siRNA sense strand
agaagcuugugauuuauug

SEQ ID NO: 1942571 - RNA, 19 nt, Homo sapiens
  misc_RNA (1)...(19): siRNA sense strand
gugcuuggcuuuuauguga

SEQ ID NO: 1942572 - RNA, 19 nt, Homo sapiens
  misc_RNA (1)...(19): siRNA sense strand
cgagaagcuugugauuuau

SEQ ID NO: 1942573 - RNA, 19 nt, Homo sapiens
  misc_RNA (1)...(19): siRNA sense strand
gaggagcgcaagaaguuug

SEQ ID NO: 1942574 - RNA, 19 nt, Homo sapiens
  misc_RNA (1)...(19): siRNA sense strand
cuuccuggcuugccucauu

SEQ ID NO: 1942575 - RNA, 19 nt, Homo sapiens
  misc_RNA (1)...(19): siRNA sense strand
ccaucgcacuguacagcua

SEQ ID NO: 1942576 - RNA, 19 nt, Homo sapiens
  misc_RNA (1)...(19): siRNA sense strand
ucgaggagcugaauguuuu

SEQ ID NO: 1942577 - RNA, 19 nt, Homo sapiens
  misc_RNA (1)...(19): siRNA sense strand
acaucacgcuggccaaaga

SEQ ID NO: 1942578 - RNA, 19 nt, Homo sapiens
  misc_RNA (1)...(19): siRNA sense strand
acaaagaccacgaccuaga

SEQ ID NO: 1942579 - RNA, 19 nt, Homo sapiens
  misc_RNA (1)...(19): siRNA sense strand
ccucauuggucgccaguuc

SEQ ID NO: 1942580 - RNA, 19 nt, Homo sapiens
  misc_RNA (1)...(19): siRNA sense strand
gagaggacgaugaugacuu

SEQ ID NO: 1942581 - RNA, 19 nt, Homo sapiens
  misc_RNA (1)...(19): siRNA sense strand
ucugaucgauagaaacuuc

SEQ ID NO: 1942582 - RNA, 19 nt, Homo sapiens
  misc_RNA (1)...(19): siRNA sense strand
uggcugugcuggagaagga

SEQ ID NO: 1942583 - RNA, 19 nt, Homo sapiens
  misc_RNA (1)...(19): siRNA sense strand
gagcgcaagaaguuugaaa

SEQ ID NO: 1942584 - RNA, 19 nt, Homo sapiens
  misc_RNA (1)...(19): siRNA sense strand
aaccugaacucauccuaca

SEQ ID NO: 1942585 - RNA, 19 nt, Homo sapiens
  misc_RNA (1)...(19): siRNA sense strand
gcgaggaggaggagaaucu

SEQ ID NO: 1942586 - RNA, 19 nt, Homo sapiens
  misc_RNA (1)...(19): siRNA sense strand
aagaagacaugcaguucca

SEQ ID NO: 1942587 - RNA, 19 nt, Homo sapiens
  misc_RNA (1)...(19): siRNA sense strand
uuccagggcuccaccuuug

SEQ ID NO: 1942588 - RNA, 19 nt, Homo sapiens
  misc_RNA (1)...(19): siRNA sense strand
gcaaauguggaaugcucuu

SEQ ID NO: 1942589 - RNA, 19 nt, Homo sapiens
  misc_RNA (1)...(19): siRNA sense strand
gacaacagcgcccuuaagc

SEQ ID NO: 1942590 - RNA, 19 nt, Homo sapiens
  misc_RNA (1)...(19): siRNA sense strand
gaccaacuuucugaucgau

SEQ ID NO: 1942591 - RNA, 19 nt, Homo sapiens
  misc_RNA (1)...(19): siRNA sense strand
aauguggaaugcucuuuca

SEQ ID NO: 1942592 - RNA, 19 nt, Homo sapiens
  misc_RNA (1)...(19): siRNA sense strand
cgacaacagcgcccuuaag

SEQ ID NO: 1942593 - RNA, 19 nt, Homo sapiens
  misc_RNA (1)...(19): siRNA sense strand
ugacuuugagaccaacuuu

SEQ ID NO: 1942594 - RNA, 19 nt, Homo sapiens
  misc_RNA (1)...(19): siRNA sense strand
caaauguggaaugcucuuu

SEQ ID NO: 1942595 - RNA, 19 nt, Homo sapiens
  misc_RNA (1)...(19): siRNA sense strand
gcgacaacagcgcccuuaa

SEQ ID NO: 1942596 - RNA, 19 nt, Homo sapiens
  misc_RNA (1)...(19): siRNA sense strand
gcaguggacgagauguaug

SEQ ID NO: 1942597 - RNA, 19 nt, Homo sapiens
  misc_RNA (1)...(19): siRNA sense strand
ucggagaggacgaugauga

SEQ ID NO: 1942598 - RNA, 19 nt, Homo sapiens
  misc_RNA (1)...(19): siRNA sense strand
ccgaaccgcuuacccucau

SEQ ID NO: 1942599 - RNA, 19 nt, Homo sapiens
  misc_RNA (1)...(19): siRNA sense strand
ugauuuauugugaccagua

SEQ ID NO: 1942600 - RNA, 19 nt, Homo sapiens
  misc_RNA (1)...(19): siRNA sense strand
ugacaucacgcuggccaaa

SEQ ID NO: 1942601 - RNA, 19 nt, Homo sapiens
  misc_RNA (1)...(19): siRNA sense strand
caaagaccacgaccuagac

SEQ ID NO: 1942602 - RNA, 19 nt, Homo sapiens
  misc_RNA (1)...(19): siRNA sense strand
cggcucaggguuacaaaga

SEQ ID NO: 1942603 - RNA, 19 nt, Homo sapiens
  misc_RNA (1)...(19): siRNA sense strand
caguggacgagauguauga

SEQ ID NO: 1942604 - RNA, 19 nt, Homo sapiens
  misc_RNA (1)...(19): siRNA sense strand
agaccaacuuucugaucga

SEQ ID NO: 1942605 - RNA, 19 nt, Homo sapiens
  misc_RNA (1)...(19): siRNA sense strand
gagugcugccuaccgcuuu

SEQ ID NO: 1942606 - RNA, 19 nt, Homo sapiens
  misc_RNA (1)...(19): siRNA sense strand
gaaacuuccagguguccau

SEQ ID NO: 1942607 - RNA, 19 nt, Homo sapiens
  misc_RNA (1)...(19): siRNA sense strand
ucuugcaguucuucuucua

SEQ ID NO: 1942608 - RNA, 19 nt, Homo sapiens
  misc_RNA (1)...(19): siRNA sense strand
gggcuccaccuuugacauc

SEQ ID NO: 1942609 - RNA, 19 nt, Homo sapiens
  misc_RNA (1)...(19): siRNA sense strand
uggaaugcucuuucacuau

SEQ ID NO: 1942610 - RNA, 19 nt, Homo sapiens
  misc_RNA (1)...(19): siRNA sense strand
ggacuuguacugggaugca

SEQ ID NO: 1942611 - RNA, 19 nt, Homo sapiens
  misc_RNA (1)...(19): siRNA sense strand
gaaacaagcuugaccacua

SEQ ID NO: 1942612 - RNA, 19 nt, Homo sapiens
  misc_RNA (1)...(19): siRNA sense strand
ccaagaagguaguguugaa

SEQ ID NO: 1942613 - RNA, 19 nt, Homo sapiens
  misc_RNA (1)...(19): siRNA sense strand
gccuaaagcugaagccaaa

SEQ ID NO: 1942614 - RNA, 19 nt, Homo sapiens
  misc_RNA (1)...(19): siRNA sense strand
gaagaagcucugugacauu

SEQ ID NO: 1942615 - RNA, 19 nt, Homo sapiens
  misc_RNA (1)...(19): siRNA sense strand
aaacaagcuugaccacuau

SEQ ID NO: 1942616 - RNA, 19 nt, Homo sapiens
  misc_RNA (1)...(19): siRNA sense strand
gaagcucugugacauugau

SEQ ID NO: 1942617 - RNA, 19 nt, Homo sapiens
  misc_RNA (1)...(19): siRNA sense strand
ugaagaagcucugugacau

SEQ ID NO: 1942618 - RNA, 19 nt, Homo sapiens
  misc_RNA (1)...(19): siRNA sense strand
caacaagcaccagaucaaa

SEQ ID NO: 1942619 - RNA, 19 nt, Homo sapiens
  misc_RNA (1)...(19): siRNA sense strand
aagaagcucugugacauug

SEQ ID NO: 1942620 - RNA, 19 nt, Homo sapiens
  misc_RNA (1)...(19): siRNA sense strand
caccgaaagugaagaagga

SEQ ID NO: 1942621 - RNA, 19 nt, Homo sapiens
  misc_RNA (1)...(19): siRNA sense strand
ccacuaugcuaucaucaag

SEQ ID NO: 1942622 - RNA, 19 nt, Homo sapiens
  misc_RNA (1)...(19): siRNA sense strand
ccaacaagcaccagaucaa

SEQ ID NO: 1942623 - RNA, 19 nt, Homo sapiens
  misc_RNA (1)...(19): siRNA sense strand
acuaugcuaucaucaaguu

SEQ ID NO: 1942624 - RNA, 19 nt, Homo sapiens
  misc_RNA (1)...(19): siRNA sense strand
caagaagguaguguugaaa

SEQ ID NO: 1942625 - RNA, 19 nt, Homo sapiens
  misc_RNA (1)...(19): siRNA sense strand
ugaccacuaugcuaucauc

SEQ ID NO: 1942626 - RNA, 19 nt, Homo sapiens
  misc_RNA (1)...(19): siRNA sense strand
gaagguaguguugaaaggu

SEQ ID NO: 1942627 - RNA, 19 nt, Homo sapiens
  misc_RNA (1)...(19): siRNA sense strand
gugaagaagcucugugaca

SEQ ID NO: 1942628 - RNA, 19 nt, Homo sapiens
  misc_RNA (1)...(19): siRNA sense strand
ggccaagaagguaguguug

SEQ ID NO: 1942629 - RNA, 19 nt, Homo sapiens
  misc_RNA (1)...(19): siRNA sense strand
aagcugaagccaaagcaaa

SEQ ID NO: 1942630 - RNA, 19 nt, Homo sapiens
  misc_RNA (1)...(19): siRNA sense strand
acaagcaccagaucaaaca

SEQ ID NO: 1942631 - RNA, 19 nt, Homo sapiens
  misc_RNA (1)...(19): siRNA sense strand
aaagaagauccgcauguca

SEQ ID NO: 1942632 - RNA, 19 nt, Homo sapiens
  misc_RNA (1)...(19): siRNA sense strand
agaagguaguguugaaagg

SEQ ID NO: 1942633 - RNA, 19 nt, Homo sapiens
  misc_RNA (1)...(19): siRNA sense strand
caaggucaacacccugaug

SEQ ID NO: 1942634 - RNA, 19 nt, Homo sapiens
  misc_RNA (1)...(19): siRNA sense strand
ccagauauccucggaagac

SEQ ID NO: 1942635 - RNA, 19 nt, Homo sapiens
  misc_RNA (1)...(19): siRNA sense strand
gaagauaaaagacaacaac

SEQ ID NO: 1942636 - RNA, 19 nt, Homo sapiens
  misc_RNA (1)...(19): siRNA sense strand
uuuaaaggccaagaaggua

SEQ ID NO: 1942637 - RNA, 19 nt, Homo sapiens
  misc_RNA (1)...(19): siRNA sense strand
uguguucacuguggauguu

SEQ ID NO: 1942638 - RNA, 19 nt, Homo sapiens
  misc_RNA (1)...(19): siRNA sense strand
aagcuugaccacuaugcua

SEQ ID NO: 1942639 - RNA, 19 nt, Homo sapiens
  misc_RNA (1)...(19): siRNA sense strand
gccaagaagguaguguuga

SEQ ID NO: 1942640 - RNA, 19 nt, Homo sapiens
  misc_RNA (1)...(19): siRNA sense strand
ccaggagaaacaagcuuga

SEQ ID NO: 1942641 - RNA, 19 nt, Homo sapiens
  misc_RNA (1)...(19): siRNA sense strand
caacagaccuugcaguaaa

SEQ ID NO: 1942642 - RNA, 19 nt, Homo sapiens
  misc_RNA (1)...(19): siRNA sense strand
cgaaagaucuguccaagaa

SEQ ID NO: 1942643 - RNA, 19 nt, Homo sapiens
  misc_RNA (1)...(19): siRNA sense strand
ggacaaccguuuaugagua

SEQ ID NO: 1942644 - RNA, 19 nt, Homo sapiens
  misc_RNA (1)...(19): siRNA sense strand
gcaaagggauuaugauguu

SEQ ID NO: 1942645 - RNA, 19 nt, Homo sapiens
  misc_RNA (1)...(19): siRNA sense strand
gaacagagcaguuuggaaa

SEQ ID NO: 1942646 - RNA, 19 nt, Homo sapiens
  misc_RNA (1)...(19): siRNA sense strand
gcaaacagcuggucaagca

SEQ ID NO: 1942647 - RNA, 19 nt, Homo sapiens
  misc_RNA (1)...(19): siRNA sense strand
gaacaagaccgauaucuau

SEQ ID NO: 1942648 - RNA, 19 nt, Homo sapiens
  misc_RNA (1)...(19): siRNA sense strand
ggaaugaaaucagagcaua

SEQ ID NO: 1942649 - RNA, 19 nt, Homo sapiens
  misc_RNA (1)...(19): siRNA sense strand
caagguacuucuaugaaua

SEQ ID NO: 1942650 - RNA, 19 nt, Homo sapiens
  misc_RNA (1)...(19): siRNA sense strand
gcacuaagaauguggauaa

SEQ ID NO: 1942651 - RNA, 19 nt, Homo sapiens
  misc_RNA (1)...(19): siRNA sense strand
agaaacagcucaggaauuu

SEQ ID NO: 1942652 - RNA, 19 nt, Homo sapiens
  misc_RNA (1)...(19): siRNA sense strand
gagauaacuuggacaauga

SEQ ID NO: 1942653 - RNA, 19 nt, Homo sapiens
  misc_RNA (1)...(19): siRNA sense strand
cacaauugcucacuacuua

SEQ ID NO: 1942654 - RNA, 19 nt, Homo sapiens
  misc_RNA (1)...(19): siRNA sense strand
gauagacacuggagaaguu

SEQ ID NO: 1942655 - RNA, 19 nt, Homo sapiens
  misc_RNA (1)...(19): siRNA sense strand
ggagauaacuuggacaaug

SEQ ID NO: 1942656 - RNA, 19 nt, Homo sapiens
  misc_RNA (1)...(19): siRNA sense strand
gcaauugccuacuggauga

SEQ ID NO: 1942657 - RNA, 19 nt, Homo sapiens
  misc_RNA (1)...(19): siRNA sense strand
gaaaugcuuuguggagaua

SEQ ID NO: 1942658 - RNA, 19 nt, Homo sapiens
  misc_RNA (1)...(19): siRNA sense strand
caggaaagaucuaugauga

SEQ ID NO: 1942659 - RNA, 19 nt, Homo sapiens
  misc_RNA (1)...(19): siRNA sense strand
gcaauucacuccacucuag

SEQ ID NO: 1942660 - RNA, 19 nt, Homo sapiens
  misc_RNA (1)...(19): siRNA sense strand
gagcauaguuccuguuugu

SEQ ID NO: 1942661 - RNA, 19 nt, Homo sapiens
  misc_RNA (1)...(19): siRNA sense strand
uggcaucucugucaucuua

SEQ ID NO: 1942662 - RNA, 19 nt, Homo sapiens
  misc_RNA (1)...(19): siRNA sense strand
caauacaccugaugcauga

SEQ ID NO: 1942663 - RNA, 19 nt, Homo sapiens
  misc_RNA (1)...(19): siRNA sense strand
cuauagaucuuuaccgaua

SEQ ID NO: 1942664 - RNA, 19 nt, Homo sapiens
  misc_RNA (1)...(19): siRNA sense strand
ggagcaaacugacugcaaa

SEQ ID NO: 1942665 - RNA, 19 nt, Homo sapiens
  misc_RNA (1)...(19): siRNA sense strand
gagauggaauucugugaaa

SEQ ID NO: 1942666 - RNA, 19 nt, Homo sapiens
  misc_RNA (1)...(19): siRNA sense strand
gcagaaagccuacaauaag

SEQ ID NO: 1942667 - RNA, 19 nt, Homo sapiens
  misc_RNA (1)...(19): siRNA sense strand
cgaccugccuuuaccuuua

SEQ ID NO: 1942668 - RNA, 19 nt, Homo sapiens
  misc_RNA (1)...(19): siRNA sense strand
gaaccaagcccaccugaau

SEQ ID NO: 1942669 - RNA, 19 nt, Homo sapiens
  misc_RNA (1)...(19): siRNA sense strand
gaaguugguuggagcuauu

SEQ ID NO: 1942670 - RNA, 19 nt, Homo sapiens
  misc_RNA (1)...(19): siRNA sense strand
ggaugaccauucaauauga

SEQ ID NO: 1942671 - RNA, 19 nt, Homo sapiens
  misc_RNA (1)...(19): siRNA sense strand
cagaggagaucaaugacua

SEQ ID NO: 1942672 - RNA, 19 nt, Homo sapiens
  misc_RNA (1)...(19): siRNA sense strand
gacacucacuacuucauua

SEQ ID NO: 1942673 - RNA, 19 nt, Homo sapiens
  misc_RNA (1)...(19): siRNA sense strand
ccacagugauuauggguuu

SEQ ID NO: 1942674 - RNA, 19 nt, Homo sapiens
  misc_RNA (1)...(19): siRNA sense strand
caaaguggaaucauacaua

SEQ ID NO: 1942675 - RNA, 19 nt, Homo sapiens
  misc_RNA (1)...(19): siRNA sense strand
ggagacagguuucauagag

SEQ ID NO: 1942676 - RNA, 19 nt, Homo sapiens
  misc_RNA (1)...(19): siRNA sense strand
gaacagcaacauaccauug

SEQ ID NO: 1942677 - RNA, 19 nt, Homo sapiens
  misc_RNA (1)...(19): siRNA sense strand
gcaaacaggaccucuuauu

SEQ ID NO: 1942678 - RNA, 19 nt, Homo sapiens
  misc_RNA (1)...(19): siRNA sense strand
gcacaggaaagaucuauga

SEQ ID NO: 1942679 - RNA, 19 nt, Homo sapiens
  misc_RNA (1)...(19): siRNA sense strand
gcaacuaguaccauauaua

SEQ ID NO: 1942680 - RNA, 19 nt, Homo sapiens
  misc_RNA (1)...(19): siRNA sense strand
ggacuauguuuauaacuuc

SEQ ID NO: 1942681 - RNA, 19 nt, Homo sapiens
  misc_RNA (1)...(19): siRNA sense strand
ggaaauguucgaauucgua

SEQ ID NO: 1942682 - RNA, 19 nt, Homo sapiens
  misc_RNA (1)...(19): siRNA sense strand
ccagucauaucaaccauaa

SEQ ID NO: 1942683 - RNA, 19 nt, Homo sapiens
  misc_RNA (1)...(19): siRNA sense strand
gauggaugcuucuaaccua

SEQ ID NO: 1942684 - RNA, 19 nt, Homo sapiens
  misc_RNA (1)...(19): siRNA sense strand
gaaugucacuguucuacug

SEQ ID NO: 1942685 - RNA, 19 nt, Homo sapiens
  misc_RNA (1)...(19): siRNA sense strand
gagcaaguauucguguuaa

SEQ ID NO: 1942686 - RNA, 19 nt, Homo sapiens
  misc_RNA (1)...(19): siRNA sense strand
aaggagagcuguaugcaaa

SEQ ID NO: 1942687 - RNA, 19 nt, Homo sapiens
  misc_RNA (1)...(19): siRNA sense strand
ccacagacaucagaaguug

SEQ ID NO: 1942688 - RNA, 19 nt, Homo sapiens
  misc_RNA (1)...(19): siRNA sense strand
ggaacaagaccgauaucua

SEQ ID NO: 1942689 - RNA, 19 nt, Homo sapiens
  misc_RNA (1)...(19): siRNA sense strand
gggagacccugcacgagua

SEQ ID NO: 1942690 - RNA, 19 nt, Homo sapiens
  misc_RNA (1)...(19): siRNA sense strand
agaauuaacuuacgagcuu

SEQ ID NO: 1942691 - RNA, 19 nt, Homo sapiens
  misc_RNA (1)...(19): siRNA sense strand
cacacaagcucggagauua

SEQ ID NO: 1942692 - RNA, 19 nt, Homo sapiens
  misc_RNA (1)...(19): siRNA sense strand
aggaguagaugccaauaua

SEQ ID NO: 1942693 - RNA, 19 nt, Homo sapiens
  misc_RNA (1)...(19): siRNA sense strand
gaagaaggccuugugaaug

SEQ ID NO: 1942694 - RNA, 19 nt, Homo sapiens
  misc_RNA (1)...(19): siRNA sense strand
aaagaucuguccaagaauu

SEQ ID NO: 1942695 - RNA, 19 nt, Homo sapiens
  misc_RNA (1)...(19): siRNA sense strand
ggaaacuccguuaguauuu

SEQ ID NO: 1942696 - RNA, 19 nt, Homo sapiens
  misc_RNA (1)...(19): siRNA sense strand
gaauggagaauacgagaaa

SEQ ID NO: 1942697 - RNA, 19 nt, Homo sapiens
  misc_RNA (1)...(19): siRNA sense strand
gguuggagcuauuugguuu

SEQ ID NO: 1942698 - RNA, 19 nt, Homo sapiens
  misc_RNA (1)...(19): siRNA sense strand
ggacaacggccuaucauca

SEQ ID NO: 1942699 - RNA, 19 nt, Homo sapiens
  misc_RNA (1)...(19): siRNA sense strand
uaaaucaggucauaacuac

SEQ ID NO: 1942700 - RNA, 19 nt, Homo sapiens
  misc_RNA (1)...(19): siRNA sense strand
gaaagccccuuccuccuua

SEQ ID NO: 1942701 - RNA, 19 nt, Homo sapiens
  misc_RNA (1)...(19): siRNA sense strand
ugcgauaucuccaacuuua

SEQ ID NO: 1942702 - RNA, 19 nt, Homo sapiens
  misc_RNA (1)...(19): siRNA sense strand
gggacaggcugcaauguug

SEQ ID NO: 1942703 - RNA, 19 nt, Homo sapiens
  misc_RNA (1)...(19): siRNA sense strand
ggaaaugcuuuguggagau

SEQ ID NO: 1942704 - RNA, 19 nt, Homo sapiens
  misc_RNA (1)...(19): siRNA sense strand
ucccaaaccugaauuagaa

SEQ ID NO: 1942705 - RNA, 19 nt, Homo sapiens
  misc_RNA (1)...(19): siRNA sense strand
gaggucaggucauaaagga

SEQ ID NO: 1942706 - RNA, 19 nt, Homo sapiens
  misc_RNA (1)...(19): siRNA sense strand
gacuacagcuacaacaauu

SEQ ID NO: 1942707 - RNA, 19 nt, Homo sapiens
  misc_RNA (1)...(19): siRNA sense strand
gcagagucuuauacaagua

SEQ ID NO: 1942708 - RNA, 19 nt, Homo sapiens
  misc_RNA (1)...(19): siRNA sense strand
ggagcaaguauucguguua

SEQ ID NO: 1942709 - RNA, 19 nt, Homo sapiens
  misc_RNA (1)...(19): siRNA sense strand
caaguauacuggcugacua

SEQ ID NO: 1942710 - RNA, 19 nt, Homo sapiens
  misc_RNA (1)...(19): siRNA sense strand
uaaauccuauggacaauuc

SEQ ID NO: 1942711 - RNA, 19 nt, Homo sapiens
  misc_RNA (1)...(19): siRNA sense strand
gcacaaguccugcucacaa

SEQ ID NO: 1942712 - RNA, 19 nt, Homo sapiens
  misc_RNA (1)...(19): siRNA sense strand
gcaauguugucauggaaau

SEQ ID NO: 1942713 - RNA, 19 nt, Homo sapiens
  misc_RNA (1)...(19): siRNA sense strand
gagggacacucacuacuuc

SEQ ID NO: 1942714 - RNA, 19 nt, Homo sapiens
  misc_RNA (1)...(19): siRNA sense strand
gcaguggugaagaauauua

SEQ ID NO: 1942715 - RNA, 19 nt, Homo sapiens
  misc_RNA (1)...(19): siRNA sense strand
gaaaccuacucuccauaga

SEQ ID NO: 1942716 - RNA, 19 nt, Homo sapiens
  misc_RNA (1)...(19): siRNA sense strand
gggacuauguuuauaacuu

SEQ ID NO: 1942717 - RNA, 19 nt, Homo sapiens
  misc_RNA (1)...(19): siRNA sense strand
cauuguaugucuuggauaa

SEQ ID NO: 1942718 - RNA, 19 nt, Homo sapiens
  misc_RNA (1)...(19): siRNA sense strand
gaaacgugcccugacuuua

SEQ ID NO: 1942719 - RNA, 19 nt, Homo sapiens
  misc_RNA (1)...(19): siRNA sense strand
cagcacacuucaagacuuu

SEQ ID NO: 1942720 - RNA, 19 nt, Homo sapiens
  misc_RNA (1)...(19): siRNA sense strand
gccaaacucucuucucuca

SEQ ID NO: 1942721 - RNA, 19 nt, Homo sapiens
  misc_RNA (1)...(19): siRNA sense strand
caaacaggaccucuuauug

SEQ ID NO: 1942722 - RNA, 19 nt, Homo sapiens
  misc_RNA (1)...(19): siRNA sense strand
ugacuucucuguugaaugg

SEQ ID NO: 1942723 - RNA, 19 nt, Homo sapiens
  misc_RNA (1)...(19): siRNA sense strand
uauguagccugugauaaua

SEQ ID NO: 1942724 - RNA, 19 nt, Homo sapiens
  misc_RNA (1)...(19): siRNA sense strand
guuaagcaguggugaagaa

SEQ ID NO: 1942725 - RNA, 19 nt, Homo sapiens
  misc_RNA (1)...(19): siRNA sense strand
uaacaagguacuucuauga

SEQ ID NO: 1942726 - RNA, 19 nt, Homo sapiens
  misc_RNA (1)...(19): siRNA sense strand
caugcaagcuguaaucaau

SEQ ID NO: 1942727 - RNA, 19 nt, Homo sapiens
  misc_RNA (1)...(19): siRNA sense strand
gcagcggacucucuucaga

SEQ ID NO: 1942728 - RNA, 19 nt, Homo sapiens
  misc_RNA (1)...(19): siRNA sense strand
ggaaaagaaucacguguug

SEQ ID NO: 1942729 - RNA, 19 nt, Homo sapiens
  misc_RNA (1)...(19): siRNA sense strand
guacuucuaugaauacgau

SEQ ID NO: 1942730 - RNA, 19 nt, Homo sapiens
  misc_RNA (1)...(19): siRNA sense strand
uuucugagguucucuauga

SEQ ID NO: 1942731 - RNA, 19 nt, Homo sapiens
  misc_RNA (1)...(19): siRNA sense strand
ggcguuacaucuuugagua

SEQ ID NO: 1942732 - RNA, 19 nt, Homo sapiens
  misc_RNA (1)...(19): siRNA sense strand
ggacaaugauggagauggu

SEQ ID NO: 1942733 - RNA, 19 nt, Homo sapiens
  misc_RNA (1)...(19): siRNA sense strand
ggagucugcucaagaggaa

SEQ ID NO: 1942734 - RNA, 19 nt, Homo sapiens
  misc_RNA (1)...(19): siRNA sense strand
agacagguuucauagagua

SEQ ID NO: 1942735 - RNA, 19 nt, Homo sapiens
  misc_RNA (1)...(19): siRNA sense strand
caagggcucugaugauaca

SEQ ID NO: 1942736 - RNA, 19 nt, Homo sapiens
  misc_RNA (1)...(19): siRNA sense strand
ggaugaagauggcuuucug

SEQ ID NO: 1942737 - RNA, 19 nt, Homo sapiens
  misc_RNA (1)...(19): siRNA sense strand
guaagcagauauaaugaag

SEQ ID NO: 1942738 - RNA, 19 nt, Homo sapiens
  misc_RNA (1)...(19): siRNA sense strand
gacaaccguuuaugaguau

SEQ ID NO: 1942739 - RNA, 19 nt, Homo sapiens
  misc_RNA (1)...(19): siRNA sense strand
caagggacuauguuuauaa

SEQ ID NO: 1942740 - RNA, 19 nt, Homo sapiens
  misc_RNA (1)...(19): siRNA sense strand
gcaaaggacagucguuuua

SEQ ID NO: 1942741 - RNA, 19 nt, Homo sapiens
  misc_RNA (1)...(19): siRNA sense strand
ucacugcccuucuuacuca

SEQ ID NO: 1942742 - RNA, 19 nt, Homo sapiens
  misc_RNA (1)...(19): siRNA sense strand
uuacucaucucuacugcaa

SEQ ID NO: 1942743 - RNA, 19 nt, Homo sapiens
  misc_RNA (1)...(19): siRNA sense strand
gcaagacucauuccuacug

SEQ ID NO: 1942744 - RNA, 19 nt, Homo sapiens
  misc_RNA (1)...(19): siRNA sense strand
caagacucauuccuacugu

SEQ ID NO: 1942745 - RNA, 19 nt, Homo sapiens
  misc_RNA (1)...(19): siRNA sense strand
gagaaguccaggauacaug

SEQ ID NO: 1942746 - RNA, 19 nt, Homo sapiens
  misc_RNA (1)...(19): siRNA sense strand
acucaucucuacugcaaga

SEQ ID NO: 1942747 - RNA, 19 nt, Homo sapiens
  misc_RNA (1)...(19): siRNA sense strand
cauccuggccaacauggua

SEQ ID NO: 1942748 - RNA, 19 nt, Homo sapiens
  misc_RNA (1)...(19): siRNA sense strand
caucucacugcccuucuua

SEQ ID NO: 1942749 - RNA, 19 nt, Homo sapiens
  misc_RNA (1)...(19): siRNA sense strand
gucaggagaucaagaccau

SEQ ID NO: 1942750 - RNA, 19 nt, Homo sapiens
  misc_RNA (1)...(19): siRNA sense strand
ccaucucacugcccuucuu

SEQ ID NO: 1942751 - RNA, 19 nt, Homo sapiens
  misc_RNA (1)...(19): siRNA sense strand
gaaguccaggauacauguu

SEQ ID NO: 1942752 - RNA, 19 nt, Homo sapiens
  misc_RNA (1)...(19): siRNA sense strand
uaaaaccccaucucuacua

SEQ ID NO: 1942753 - RNA, 19 nt, Homo sapiens
  misc_RNA (1)...(19): siRNA sense strand
gguaaaaccccaucucuac

SEQ ID NO: 1942754 - RNA, 19 nt, Homo sapiens
  misc_RNA (1)...(19): siRNA sense strand
acucauuccuacuguucaa

SEQ ID NO: 1942755 - RNA, 19 nt, Homo sapiens
  misc_RNA (1)...(19): siRNA sense strand
aaaaccccaucucuacuaa

SEQ ID NO: 1942756 - RNA, 19 nt, Homo sapiens
  misc_RNA (1)...(19): siRNA sense strand
gaagauggauccaaagaua

SEQ ID NO: 1942757 - RNA, 19 nt, Homo sapiens
  misc_RNA (1)...(19): siRNA sense strand
gaagaugacuugacaguuu

SEQ ID NO: 1942758 - RNA, 19 nt, Homo sapiens
  misc_RNA (1)...(19): siRNA sense strand
gaacucagacuacaucuua

SEQ ID NO: 1942759 - RNA, 19 nt, Homo sapiens
  misc_RNA (1)...(19): siRNA sense strand
gagaaucaguggugaaaua

SEQ ID NO: 1942760 - RNA, 19 nt, Homo sapiens
  misc_RNA (1)...(19): siRNA sense strand
ggaaggagcugcuggauuc

SEQ ID NO: 1942761 - RNA, 19 nt, Homo sapiens
  misc_RNA (1)...(19): siRNA sense strand
caagagagaucagcuuaua

SEQ ID NO: 1942762 - RNA, 19 nt, Homo sapiens
  misc_RNA (1)...(19): siRNA sense strand
ggacggcgauuguauaaug

SEQ ID NO: 1942763 - RNA, 19 nt, Homo sapiens
  misc_RNA (1)...(19): siRNA sense strand
gcaccugccuugauaauga

SEQ ID NO: 1942764 - RNA, 19 nt, Homo sapiens
  misc_RNA (1)...(19): siRNA sense strand
gaaagaaugaccaagauaa

SEQ ID NO: 1942765 - RNA, 19 nt, Homo sapiens
  misc_RNA (1)...(19): siRNA sense strand
ggaacaggcugauuaugaa

SEQ ID NO: 1942766 - RNA, 19 nt, Homo sapiens
  misc_RNA (1)...(19): siRNA sense strand
gauggaagcuucugugaga

SEQ ID NO: 1942767 - RNA, 19 nt, Homo sapiens
  misc_RNA (1)...(19): siRNA sense strand
ggaguuccauguuccuuua

SEQ ID NO: 1942768 - RNA, 19 nt, Homo sapiens
  misc_RNA (1)...(19): siRNA sense strand
gaaaugcgccucccuauuc

SEQ ID NO: 1942769 - RNA, 19 nt, Homo sapiens
  misc_RNA (1)...(19): siRNA sense strand
ugaaggaguugaagcuuua

SEQ ID NO: 1942770 - RNA, 19 nt, Homo sapiens
  misc_RNA (1)...(19): siRNA sense strand
ucaaggcccugaagaauuu

SEQ ID NO: 1942771 - RNA, 19 nt, Homo sapiens
  misc_RNA (1)...(19): siRNA sense strand
gcaaacaagucaucauuag

SEQ ID NO: 1942772 - RNA, 19 nt, Homo sapiens
  misc_RNA (1)...(19): siRNA sense strand
caaagaaucuaccacuuau

SEQ ID NO: 1942773 - RNA, 19 nt, Homo sapiens
  misc_RNA (1)...(19): siRNA sense strand
gaagagacaauggaauuua

SEQ ID NO: 1942774 - RNA, 19 nt, Homo sapiens
  misc_RNA (1)...(19): siRNA sense strand
gaagaggaguuccauguuc

SEQ ID NO: 1942775 - RNA, 19 nt, Homo sapiens
  misc_RNA (1)...(19): siRNA sense strand
guaaugggcuucccugaga

SEQ ID NO: 1942776 - RNA, 19 nt, Homo sapiens
  misc_RNA (1)...(19): siRNA sense strand
gaaagaagacggacaaagu

SEQ ID NO: 1942777 - RNA, 19 nt, Homo sapiens
  misc_RNA (1)...(19): siRNA sense strand
ggaacuauauugcuucuuc

SEQ ID NO: 1942778 - RNA, 19 nt, Homo sapiens
  misc_RNA (1)...(19): siRNA sense strand
gaccuuauauucaaacuug

SEQ ID NO: 1942779 - RNA, 19 nt, Homo sapiens
  misc_RNA (1)...(19): siRNA sense strand
ggacaaaguuaauccaaca

SEQ ID NO: 1942780 - RNA, 19 nt, Homo sapiens
  misc_RNA (1)...(19): siRNA sense strand
ggauggauguggacaguuu

SEQ ID NO: 1942781 - RNA, 19 nt, Homo sapiens
  misc_RNA (1)...(19): siRNA sense strand
ggaacaauccuaucagaaa

SEQ ID NO: 1942782 - RNA, 19 nt, Homo sapiens
  misc_RNA (1)...(19): siRNA sense strand
gauaacaacaguucuauga

SEQ ID NO: 1942783 - RNA, 19 nt, Homo sapiens
  misc_RNA (1)...(19): siRNA sense strand
ggaaacccauuuggauuaa

SEQ ID NO: 1942784 - RNA, 19 nt, Homo sapiens
  misc_RNA (1)...(19): siRNA sense strand
caagggaaccuaucuauau

SEQ ID NO: 1942785 - RNA, 19 nt, Homo sapiens
  misc_RNA (1)...(19): siRNA sense strand
aaagauacgucuaaggaaa

SEQ ID NO: 1942786 - RNA, 19 nt, Homo sapiens
  misc_RNA (1)...(19): siRNA sense strand
uggagugacuggaauaaua

SEQ ID NO: 1942787 - RNA, 19 nt, Homo sapiens
  misc_RNA (1)...(19): siRNA sense strand
ggaguuguaucucgaauca

SEQ ID NO: 1942788 - RNA, 19 nt, Homo sapiens
  misc_RNA (1)...(19): siRNA sense strand
ccacaaauggcaauucaua

SEQ ID NO: 1942789 - RNA, 19 nt, Homo sapiens
  misc_RNA (1)...(19): siRNA sense strand
acucaaagcucucuaugaa

SEQ ID NO: 1942790 - RNA, 19 nt, Homo sapiens
  misc_RNA (1)...(19): siRNA sense strand
gcagagagagcauguaaug

SEQ ID NO: 1942791 - RNA, 19 nt, Homo sapiens
  misc_RNA (1)...(19): siRNA sense strand
aaacuuacauggacauaug

SEQ ID NO: 1942792 - RNA, 19 nt, Homo sapiens
  misc_RNA (1)...(19): siRNA sense strand
gguaucaaaucgauuaaug

SEQ ID NO: 1942793 - RNA, 19 nt, Homo sapiens
  misc_RNA (1)...(19): siRNA sense strand
gaaauucgauaucaguucu

SEQ ID NO: 1942794 - RNA, 19 nt, Homo sapiens
  misc_RNA (1)...(19): siRNA sense strand
cacuacaggugcacuauua

SEQ ID NO: 1942795 - RNA, 19 nt, Homo sapiens
  misc_RNA (1)...(19): siRNA sense strand
caacagaaauaacggaaag

SEQ ID NO: 1942796 - RNA, 19 nt, Homo sapiens
  misc_RNA (1)...(19): siRNA sense strand
caauuugacuuucacuuug

SEQ ID NO: 1942797 - RNA, 19 nt, Homo sapiens
  misc_RNA (1)...(19): siRNA sense strand
cagcuuauauggaguguug

SEQ ID NO: 1942798 - RNA, 19 nt, Homo sapiens
  misc_RNA (1)...(19): siRNA sense strand
gcucaaugccaacuaauaa

SEQ ID NO: 1942799 - RNA, 19 nt, Homo sapiens
  misc_RNA (1)...(19): siRNA sense strand
gaaguguccugccaacaau

SEQ ID NO: 1942800 - RNA, 19 nt, Homo sapiens
  misc_RNA (1)...(19): siRNA sense strand
acaaagaaucuaccacuua

SEQ ID NO: 1942801 - RNA, 19 nt, Homo sapiens
  misc_RNA (1)...(19): siRNA sense strand
cgagaaugauugacagaaa

SEQ ID NO: 1942802 - RNA, 19 nt, Homo sapiens
  misc_RNA (1)...(19): siRNA sense strand
gcagcccuguucuuuauuu

SEQ ID NO: 1942803 - RNA, 19 nt, Homo sapiens
  misc_RNA (1)...(19): siRNA sense strand
gaacaauccuaucagaaac

SEQ ID NO: 1942804 - RNA, 19 nt, Homo sapiens
  misc_RNA (1)...(19): siRNA sense strand
caugggacauccucacaua

SEQ ID NO: 1942805 - RNA, 19 nt, Homo sapiens
  misc_RNA (1)...(19): siRNA sense strand
gggaaccuaucuauauuga

SEQ ID NO: 1942806 - RNA, 19 nt, Homo sapiens
  misc_RNA (1)...(19): siRNA sense strand
ggaguguuguuaggcauua

SEQ ID NO: 1942807 - RNA, 19 nt, Homo sapiens
  misc_RNA (1)...(19): siRNA sense strand
ugaguacaguaaagucuua

SEQ ID NO: 1942808 - RNA, 19 nt, Homo sapiens
  misc_RNA (1)...(19): siRNA sense strand
aauguucccuguuguauuu

SEQ ID NO: 1942809 - RNA, 19 nt, Homo sapiens
  misc_RNA (1)...(19): siRNA sense strand
gaaagaugacucuguuaga

SEQ ID NO: 1942810 - RNA, 19 nt, Homo sapiens
  misc_RNA (1)...(19): siRNA sense strand
gcaagaagacaauccuuau

SEQ ID NO: 1942811 - RNA, 19 nt, Homo sapiens
  misc_RNA (1)...(19): siRNA sense strand
agaaucaacugaggaagua

SEQ ID NO: 1942812 - RNA, 19 nt, Homo sapiens
  misc_RNA (1)...(19): siRNA sense strand
guagauauggccaguagua

SEQ ID NO: 1942813 - RNA, 19 nt, Homo sapiens
  misc_RNA (1)...(19): siRNA sense strand
ggagugacuggaauaauaa

SEQ ID NO: 1942814 - RNA, 19 nt, Homo sapiens
  misc_RNA (1)...(19): siRNA sense strand
gaaguugcauuugaguuug

SEQ ID NO: 1942815 - RNA, 19 nt, Homo sapiens
  misc_RNA (1)...(19): siRNA sense strand
uaucaggaauucagauuga

SEQ ID NO: 1942816 - RNA, 19 nt, Homo sapiens
  misc_RNA (1)...(19): siRNA sense strand
gaauuuaaggcuugaugua

SEQ ID NO: 1942817 - RNA, 19 nt, Homo sapiens
  misc_RNA (1)...(19): siRNA sense strand
caaguuaccuuagaaugug

SEQ ID NO: 1942818 - RNA, 19 nt, Homo sapiens
  misc_RNA (1)...(19): siRNA sense strand
ugauguggaugaccuuaua

SEQ ID NO: 1942819 - RNA, 19 nt, Homo sapiens
  misc_RNA (1)...(19): siRNA sense strand
caaaguuaauccaacaaga

SEQ ID NO: 1942820 - RNA, 19 nt, Homo sapiens
  misc_RNA (1)...(19): siRNA sense strand
gcagguugcucucagugaa

SEQ ID NO: 1942821 - RNA, 19 nt, Homo sapiens
  misc_RNA (1)...(19): siRNA sense strand
cagggaagauguuuaagga

SEQ ID NO: 1942822 - RNA, 19 nt, Homo sapiens
  misc_RNA (1)...(19): siRNA sense strand
ccacagaagugacgacagu

SEQ ID NO: 1942823 - RNA, 19 nt, Homo sapiens
  misc_RNA (1)...(19): siRNA sense strand
gagcaucaguacaaagaau

SEQ ID NO: 1942824 - RNA, 19 nt, Homo sapiens
  misc_RNA (1)...(19): siRNA sense strand
uaaaggccaugaucacaga

SEQ ID NO: 1942825 - RNA, 19 nt, Homo sapiens
  misc_RNA (1)...(19): siRNA sense strand
gggaagagacaauggaauu

SEQ ID NO: 1942826 - RNA, 19 nt, Homo sapiens
  misc_RNA (1)...(19): siRNA sense strand
ggaaagguuuggcagcaau

SEQ ID NO: 1942827 - RNA, 19 nt, Homo sapiens
  misc_RNA (1)...(19): siRNA sense strand
ccgcauacgugauacacua

SEQ ID NO: 1942828 - RNA, 19 nt, Homo sapiens
  misc_RNA (1)...(19): siRNA sense strand
gaacagcagaaacucauga

SEQ ID NO: 1942829 - RNA, 19 nt, Homo sapiens
  misc_RNA (1)...(19): siRNA sense strand
caagauaacaacaguucua

SEQ ID NO: 1942830 - RNA, 19 nt, Homo sapiens
  misc_RNA (1)...(19): siRNA sense strand
acagauguauguccuugua

SEQ ID NO: 1942831 - RNA, 19 nt, Homo sapiens
  misc_RNA (1)...(19): siRNA sense strand
gaccauggcuggauuaagc

SEQ ID NO: 1942832 - RNA, 19 nt, Homo sapiens
  misc_RNA (1)...(19): siRNA sense strand
gaacuauauugcuucuuca

SEQ ID NO: 1942833 - RNA, 19 nt, Homo sapiens
  misc_RNA (1)...(19): siRNA sense strand
aaauuggacuucucuaaug

SEQ ID NO: 1942834 - RNA, 19 nt, Homo sapiens
  misc_RNA (1)...(19): siRNA sense strand
acaucgaacuguaccuuua

SEQ ID NO: 1942835 - RNA, 19 nt, Homo sapiens
  misc_RNA (1)...(19): siRNA sense strand
ccaaagauacgucuaagga

SEQ ID NO: 1942836 - RNA, 19 nt, Homo sapiens
  misc_RNA (1)...(19): siRNA sense strand
cauuguaccucauggauau

SEQ ID NO: 1942837 - RNA, 19 nt, Homo sapiens
  misc_RNA (1)...(19): siRNA sense strand
ggaaauguuugcaguucau

SEQ ID NO: 1942838 - RNA, 19 nt, Homo sapiens
  misc_RNA (1)...(19): siRNA sense strand
ugaagaaucagacaaagaa

SEQ ID NO: 1942839 - RNA, 19 nt, Homo sapiens
  misc_RNA (1)...(19): siRNA sense strand
caagucaucauuagaacua

SEQ ID NO: 1942840 - RNA, 19 nt, Homo sapiens
  misc_RNA (1)...(19): siRNA sense strand
ugaaacauccagcugauuu

SEQ ID NO: 1942841 - RNA, 19 nt, Homo sapiens
  misc_RNA (1)...(19): siRNA sense strand
ggaauuaguccuggugaaa

SEQ ID NO: 1942842 - RNA, 19 nt, Homo sapiens
  misc_RNA (1)...(19): siRNA sense strand
caacaucgagaaugauuga

SEQ ID NO: 1942843 - RNA, 19 nt, Homo sapiens
  misc_RNA (1)...(19): siRNA sense strand
gaagacaauccuuaugguu

SEQ ID NO: 1942844 - RNA, 19 nt, Homo sapiens
  misc_RNA (1)...(19): siRNA sense strand
ggacaaggaauaucagcaa

SEQ ID NO: 1942845 - RNA, 19 nt, Homo sapiens
  misc_RNA (1)...(19): siRNA sense strand
gauaucaguucuacaagag

SEQ ID NO: 1942846 - RNA, 19 nt, Homo sapiens
  misc_RNA (1)...(19): siRNA sense strand
cagggaaggucaagauaga

SEQ ID NO: 1942847 - RNA, 19 nt, Homo sapiens
  misc_RNA (1)...(19): siRNA sense strand
ucaaagaacaagaagauug

SEQ ID NO: 1942848 - RNA, 19 nt, Homo sapiens
  misc_RNA (1)...(19): siRNA sense strand
gacaaggaauaucagcaaa

SEQ ID NO: 1942849 - RNA, 19 nt, Homo sapiens
  misc_RNA (1)...(19): siRNA sense strand
ggaaaugcgccucccuauu

SEQ ID NO: 1942850 - RNA, 19 nt, Homo sapiens
  misc_RNA (1)...(19): siRNA sense strand
aaauggaacaggcugauua

SEQ ID NO: 1942851 - RNA, 19 nt, Homo sapiens
  misc_RNA (1)...(19): siRNA sense strand
gaacauucaacugucauaa

SEQ ID NO: 1942852 - RNA, 19 nt, Homo sapiens
  misc_RNA (1)...(19): siRNA sense strand
cagaaagaaugaccaagau

SEQ ID NO: 1942853 - RNA, 19 nt, Homo sapiens
  misc_RNA (1)...(19): siRNA sense strand
gagaaugauugacagaaag

SEQ ID NO: 1942854 - RNA, 19 nt, Homo sapiens
  misc_RNA (1)...(19): siRNA sense strand
aaggauggcucaaugaaug

SEQ ID NO: 1942855 - RNA, 19 nt, Homo sapiens
  misc_RNA (1)...(19): siRNA sense strand
ccaauuugacuuucacuuu

SEQ ID NO: 1942856 - RNA, 19 nt, Homo sapiens
  misc_RNA (1)...(19): siRNA sense strand
ggacugaaaccuacuauga

SEQ ID NO: 1942857 - RNA, 19 nt, Homo sapiens
  misc_RNA (1)...(19): siRNA sense strand
gaauauagcaggaaguuga

SEQ ID NO: 1942858 - RNA, 19 nt, Homo sapiens
  misc_RNA (1)...(19): siRNA sense strand
gcaggaaguugaugaugaa

SEQ ID NO: 1942859 - RNA, 19 nt, Homo sapiens
  misc_RNA (1)...(19): siRNA sense strand
ggauuuaucagaaccuuua

SEQ ID NO: 1942860 - RNA, 19 nt, Homo sapiens
  misc_RNA (1)...(19): siRNA sense strand
gauguuaagugguggaguu

SEQ ID NO: 1942861 - RNA, 19 nt, Homo sapiens
  misc_RNA (1)...(19): siRNA sense strand
gaacugagccgguccuuuu

SEQ ID NO: 1942862 - RNA, 19 nt, Homo sapiens
  misc_RNA (1)...(19): siRNA sense strand
gaacucaguccucuucaug

SEQ ID NO: 1942863 - RNA, 19 nt, Homo sapiens
  misc_RNA (1)...(19): siRNA sense strand
gaaauccaauccugcuauc

SEQ ID NO: 1942864 - RNA, 19 nt, Homo sapiens
  misc_RNA (1)...(19): siRNA sense strand
ggagacaucagggaagaua

SEQ ID NO: 1942865 - RNA, 19 nt, Homo sapiens
  misc_RNA (1)...(19): siRNA sense strand
ggaaguugaugaugaacca

SEQ ID NO: 1942866 - RNA, 19 nt, Homo sapiens
  misc_RNA (1)...(19): siRNA sense strand
gaauucaaguucuuuccau

SEQ ID NO: 1942867 - RNA, 19 nt, Homo sapiens
  misc_RNA (1)...(19): siRNA sense strand
ugaaccaguuggaagcaua

SEQ ID NO: 1942868 - RNA, 19 nt, Homo sapiens
  misc_RNA (1)...(19): siRNA sense strand
ugagugaucugcagaaugc

SEQ ID NO: 1942869 - RNA, 19 nt, Homo sapiens
  misc_RNA (1)...(19): siRNA sense strand
acugaaaccuacuaugauu

SEQ ID NO: 1942870 - RNA, 19 nt, Homo sapiens
  misc_RNA (1)...(19): siRNA sense strand
caaugaaagugaagaugca

SEQ ID NO: 1942871 - RNA, 19 nt, Homo sapiens
  misc_RNA (1)...(19): siRNA sense strand
cccaguggauuguaucaaa

SEQ ID NO: 1942872 - RNA, 19 nt, Homo sapiens
  misc_RNA (1)...(19): siRNA sense strand
gagaaguaccaggcuauuu

SEQ ID NO: 1942873 - RNA, 19 nt, Homo sapiens
  misc_RNA (1)...(19): siRNA sense strand
uguaucaaauccagaauuc

SEQ ID NO: 1942874 - RNA, 19 nt, Homo sapiens
  misc_RNA (1)...(19): siRNA sense strand
guaccaggcuauuucuucu

SEQ ID NO: 1942875 - RNA, 19 nt, Homo sapiens
  misc_RNA (1)...(19): siRNA sense strand
cccuguaccuuugauguua

SEQ ID NO: 1942876 - RNA, 19 nt, Homo sapiens
  misc_RNA (1)...(19): siRNA sense strand
aaacaggcaggauuuauca

SEQ ID NO: 1942877 - RNA, 19 nt, Homo sapiens
  misc_RNA (1)...(19): siRNA sense strand
acugcugccugaagacuua

SEQ ID NO: 1942878 - RNA, 19 nt, Homo sapiens
  misc_RNA (1)...(19): siRNA sense strand
cuuauauucuggacugaaa

SEQ ID NO: 1942879 - RNA, 19 nt, Homo sapiens
  misc_RNA (1)...(19): siRNA sense strand
cauggacucucaagcacuu

SEQ ID NO: 1942880 - RNA, 19 nt, Homo sapiens
  misc_RNA (1)...(19): siRNA sense strand
guucuaccauggacucuca

SEQ ID NO: 1942881 - RNA, 19 nt, Homo sapiens
  misc_RNA (1)...(19): siRNA sense strand
caggcaggauuuaucagaa

SEQ ID NO: 1942882 - RNA, 19 nt, Homo sapiens
  misc_RNA (1)...(19): siRNA sense strand
ccaguggauuguaucaaau

SEQ ID NO: 1942883 - RNA, 19 nt, Homo sapiens
  misc_RNA (1)...(19): siRNA sense strand
gaauuaggcccuguaccuu

SEQ ID NO: 1942884 - RNA, 19 nt, Homo sapiens
  misc_RNA (1)...(19): siRNA sense strand
gccucuggcuugcgguaua

SEQ ID NO: 1942885 - RNA, 19 nt, Homo sapiens
  misc_RNA (1)...(19): siRNA sense strand
aguguggucugucaucaaa

SEQ ID NO: 1942886 - RNA, 19 nt, Homo sapiens
  misc_RNA (1)...(19): siRNA sense strand
gacguucccugaccuguac

SEQ ID NO: 1942887 - RNA, 19 nt, Homo sapiens
  misc_RNA (1)...(19): siRNA sense strand
agaaguaccaggcuauuuc

SEQ ID NO: 1942888 - RNA, 19 nt, Homo sapiens
  misc_RNA (1)...(19): siRNA sense strand
gcggaaaguggcuggauug

SEQ ID NO: 1942889 - RNA, 19 nt, Homo sapiens
  misc_RNA (1)...(19): siRNA sense strand
aggcaaagcugagugaucu

SEQ ID NO: 1942890 - RNA, 19 nt, Homo sapiens
  misc_RNA (1)...(19): siRNA sense strand
aagugaagaugcagacguu

SEQ ID NO: 1942891 - RNA, 19 nt, Homo sapiens
  misc_RNA (1)...(19): siRNA sense strand
cuucuucgguggcuaugaa

SEQ ID NO: 1942892 - RNA, 19 nt, Homo sapiens
  misc_RNA (1)...(19): siRNA sense strand
agcaggaaguugaugauga

SEQ ID NO: 1942893 - RNA, 19 nt, Homo sapiens
  misc_RNA (1)...(19): siRNA sense strand
ggaaaguggcuggauugga

SEQ ID NO: 1942894 - RNA, 19 nt, Homo sapiens
  misc_RNA (1)...(19): siRNA sense strand
cuacuaugauucgagcauu

SEQ ID NO: 1942895 - RNA, 19 nt, Homo sapiens
  misc_RNA (1)...(19): siRNA sense strand
ggaaaacaggcaggauuua

SEQ ID NO: 1942896 - RNA, 19 nt, Homo sapiens
  misc_RNA (1)...(19): siRNA sense strand
gggcuuccguggcuucuac

SEQ ID NO: 1942897 - RNA, 19 nt, Homo sapiens
  misc_RNA (1)...(19): siRNA sense strand
ccuguaccuuugauguuaa

SEQ ID NO: 1942898 - RNA, 19 nt, Homo sapiens
  misc_RNA (1)...(19): siRNA sense strand
gaaguaccaggcuauuucu

SEQ ID NO: 1942899 - RNA, 19 nt, Homo sapiens
  misc_RNA (1)...(19): siRNA sense strand
cagggaagauagccaagag

SEQ ID NO: 1942900 - RNA, 19 nt, Homo sapiens
  misc_RNA (1)...(19): siRNA sense strand
ucagggagaucaaaagaug

SEQ ID NO: 1942901 - RNA, 19 nt, Homo sapiens
  misc_RNA (1)...(19): siRNA sense strand
gcugagugaucugcagaau

SEQ ID NO: 1942902 - RNA, 19 nt, Homo sapiens
  misc_RNA (1)...(19): siRNA sense strand
gaugaugaaccaguuggaa

SEQ ID NO: 1942903 - RNA, 19 nt, Homo sapiens
  misc_RNA (1)...(19): siRNA sense strand
gccaagagccagaauacag

SEQ ID NO: 1942904 - RNA, 19 nt, Homo sapiens
  misc_RNA (1)...(19): siRNA sense strand
ggguaccaguccagcacua

SEQ ID NO: 1942905 - RNA, 19 nt, Homo sapiens
  misc_RNA (1)...(19): siRNA sense strand
gaaaacaggcaggauuuau

SEQ ID NO: 1942906 - RNA, 19 nt, Homo sapiens
  misc_RNA (1)...(19): siRNA sense strand
caaauccagaauucaaguu

SEQ ID NO: 1942907 - RNA, 19 nt, Homo sapiens
  misc_RNA (1)...(19): siRNA sense strand
gcagcccuuugacacaaug

SEQ ID NO: 1942908 - RNA, 19 nt, Homo sapiens
  misc_RNA (1)...(19): siRNA sense strand
guuaagugguggaguuggu

SEQ ID NO: 1942909 - RNA, 19 nt, Homo sapiens
  misc_RNA (1)...(19): siRNA sense strand
gacugaaaccuacuaugau

SEQ ID NO: 1942910 - RNA, 19 nt, Homo sapiens
  misc_RNA (1)...(19): siRNA sense strand
cugcagaccauguaugaga

SEQ ID NO: 1942911 - RNA, 19 nt, Homo sapiens
  misc_RNA (1)...(19): siRNA sense strand
ucgccaacaucgcugagaa

SEQ ID NO: 1942912 - RNA, 19 nt, Homo sapiens
  misc_RNA (1)...(19): siRNA sense strand
ccaagagccagaauacagu

SEQ ID NO: 1942913 - RNA, 19 nt, Homo sapiens
  misc_RNA (1)...(19): siRNA sense strand
caggcuauuucuucuucuu

SEQ ID NO: 1942914 - RNA, 19 nt, Homo sapiens
  misc_RNA (1)...(19): siRNA sense strand
gaaaccuacuaugauucga

SEQ ID NO: 1942915 - RNA, 19 nt, Homo sapiens
  misc_RNA (1)...(19): siRNA sense strand
gauuggacaagcaggcaaa

SEQ ID NO: 1942916 - RNA, 19 nt, Homo sapiens
  misc_RNA (1)...(19): siRNA sense strand
cucaagcacuuuacuucga

SEQ ID NO: 1942917 - RNA, 19 nt, Homo sapiens
  misc_RNA (1)...(19): siRNA sense strand
ggcugcagaccauguauga

SEQ ID NO: 1942918 - RNA, 19 nt, Homo sapiens
  misc_RNA (1)...(19): siRNA sense strand
acucaguccucuucaugug

SEQ ID NO: 1942919 - RNA, 19 nt, Homo sapiens
  misc_RNA (1)...(19): siRNA sense strand
auuaggcccuguaccuuug

SEQ ID NO: 1942920 - RNA, 19 nt, Homo sapiens
  misc_RNA (1)...(19): siRNA sense strand
aauuaggcccuguaccuuu

SEQ ID NO: 1942921 - RNA, 19 nt, Homo sapiens
  misc_RNA (1)...(19): siRNA sense strand
gcagaccauguaugagaug

SEQ ID NO: 1942922 - RNA, 19 nt, Homo sapiens
  misc_RNA (1)...(19): siRNA sense strand
ugcaggagguacagcaugu

SEQ ID NO: 1942923 - RNA, 19 nt, Homo sapiens
  misc_RNA (1)...(19): siRNA sense strand
uauagcaggaaguugauga

SEQ ID NO: 1942924 - RNA, 19 nt, Homo sapiens
  misc_RNA (1)...(19): siRNA sense strand
agacguucccugaccugua

SEQ ID NO: 1942925 - RNA, 19 nt, Homo sapiens
  misc_RNA (1)...(19): siRNA sense strand
cgguauacccaguggauug

SEQ ID NO: 1942926 - RNA, 19 nt, Homo sapiens
  misc_RNA (1)...(19): siRNA sense strand
ugaauuaggcccuguaccu

SEQ ID NO: 1942927 - RNA, 19 nt, Homo sapiens
  misc_RNA (1)...(19): siRNA sense strand
gaaccaguuggaagcauac

SEQ ID NO: 1942928 - RNA, 19 nt, Homo sapiens
  misc_RNA (1)...(19): siRNA sense strand
cgagaaguaccaggcuauu

SEQ ID NO: 1942929 - RNA, 19 nt, Homo sapiens
  misc_RNA (1)...(19): siRNA sense strand
ucaaguucuuuccaugucu

SEQ ID NO: 1942930 - RNA, 19 nt, Homo sapiens
  misc_RNA (1)...(19): siRNA sense strand
gcccuguaccuuugauguu

SEQ ID NO: 1942931 - RNA, 19 nt, Homo sapiens
  misc_RNA (1)...(19): siRNA sense strand
uauccaggcugccauugac

SEQ ID NO: 1942932 - RNA, 19 nt, Homo sapiens
  misc_RNA (1)...(19): siRNA sense strand
gcccuuugacacaaugaaa

SEQ ID NO: 1942933 - RNA, 19 nt, Homo sapiens
  misc_RNA (1)...(19): siRNA sense strand
guaccaguccagcacuaau

SEQ ID NO: 1942934 - RNA, 19 nt, Homo sapiens
  misc_RNA (1)...(19): siRNA sense strand
cagcacuaaucgccaacau

SEQ ID NO: 1942935 - RNA, 19 nt, Homo sapiens
  misc_RNA (1)...(19): siRNA sense strand
gguaccaguccagcacuaa

SEQ ID NO: 1942936 - RNA, 19 nt, Homo sapiens
  misc_RNA (1)...(19): siRNA sense strand
ugcggaaaguggcuggauu

SEQ ID NO: 1942937 - RNA, 19 nt, Homo sapiens
  misc_RNA (1)...(19): siRNA sense strand
acaggcaggauuuaucaga

SEQ ID NO: 1942938 - RNA, 19 nt, Homo sapiens
  misc_RNA (1)...(19): siRNA sense strand
ugguggaguuggugggauu

SEQ ID NO: 1942939 - RNA, 19 nt, Homo sapiens
  misc_RNA (1)...(19): siRNA sense strand
ggucugucaucaaaaguau

SEQ ID NO: 1942940 - RNA, 19 nt, Homo sapiens
  misc_RNA (1)...(19): siRNA sense strand
gaucaacccucccuaaauu

SEQ ID NO: 1942941 - RNA, 19 nt, Homo sapiens
  misc_RNA (1)...(19): siRNA sense strand
gcacagaugucaaggugua

SEQ ID NO: 1942942 - RNA, 19 nt, Homo sapiens
  misc_RNA (1)...(19): siRNA sense strand
gagaagauguaauccuuaa

SEQ ID NO: 1942943 - RNA, 19 nt, Homo sapiens
  misc_RNA (1)...(19): siRNA sense strand
gaaagucucugaggaaguu

SEQ ID NO: 1942944 - RNA, 19 nt, Homo sapiens
  misc_RNA (1)...(19): siRNA sense strand
gaugguaacucccaauuug

SEQ ID NO: 1942945 - RNA, 19 nt, Homo sapiens
  misc_RNA (1)...(19): siRNA sense strand
gaaggucugugaucaggua

SEQ ID NO: 1942946 - RNA, 19 nt, Homo sapiens
  misc_RNA (1)...(19): siRNA sense strand
guauugaucugccucgaua

SEQ ID NO: 1942947 - RNA, 19 nt, Homo sapiens
  misc_RNA (1)...(19): siRNA sense strand
gauagaaggugaagaccaa

SEQ ID NO: 1942948 - RNA, 19 nt, Homo sapiens
  misc_RNA (1)...(19): siRNA sense strand
gagcgacucugcagauuug

SEQ ID NO: 1942949 - RNA, 19 nt, Homo sapiens
  misc_RNA (1)...(19): siRNA sense strand
gaacuucguugugucauug

SEQ ID NO: 1942950 - RNA, 19 nt, Homo sapiens
  misc_RNA (1)...(19): siRNA sense strand
cacaagagcucuccauaga

SEQ ID NO: 1942951 - RNA, 19 nt, Homo sapiens
  misc_RNA (1)...(19): siRNA sense strand
guacaucuaugaggaguuu

SEQ ID NO: 1942952 - RNA, 19 nt, Homo sapiens
  misc_RNA (1)...(19): siRNA sense strand
ggagauguauggucacuuc

SEQ ID NO: 1942953 - RNA, 19 nt, Homo sapiens
  misc_RNA (1)...(19): siRNA sense strand
ggaggucccugaggagaua

SEQ ID NO: 1942954 - RNA, 19 nt, Homo sapiens
  misc_RNA (1)...(19): siRNA sense strand
gcagcgagcuuuggauuau

SEQ ID NO: 1942955 - RNA, 19 nt, Homo sapiens
  misc_RNA (1)...(19): siRNA sense strand
cagaagaccacaauguuua

SEQ ID NO: 1942956 - RNA, 19 nt, Homo sapiens
  misc_RNA (1)...(19): siRNA sense strand
gagcgugacuuucgacaga

SEQ ID NO: 1942957 - RNA, 19 nt, Homo sapiens
  misc_RNA (1)...(19): siRNA sense strand
gccaaugacucaaauccua

SEQ ID NO: 1942958 - RNA, 19 nt, Homo sapiens
  misc_RNA (1)...(19): siRNA sense strand
ggaaacccuuguagaaguu

SEQ ID NO: 1942959 - RNA, 19 nt, Homo sapiens
  misc_RNA (1)...(19): siRNA sense strand
gcagaagaccacaauguuu

SEQ ID NO: 1942960 - RNA, 19 nt, Homo sapiens
  misc_RNA (1)...(19): siRNA sense strand
gggagaagauguaauccuu

SEQ ID NO: 1942961 - RNA, 19 nt, Homo sapiens
  misc_RNA (1)...(19): siRNA sense strand
ggaaagagauucgauaucc

SEQ ID NO: 1942962 - RNA, 19 nt, Homo sapiens
  misc_RNA (1)...(19): siRNA sense strand
gaagauguaauccuuaaug

SEQ ID NO: 1942963 - RNA, 19 nt, Homo sapiens
  misc_RNA (1)...(19): siRNA sense strand
ggagaagacuggaaaacua

SEQ ID NO: 1942964 - RNA, 19 nt, Homo sapiens
  misc_RNA (1)...(19): siRNA sense strand
caagagcucuccauagaag

SEQ ID NO: 1942965 - RNA, 19 nt, Homo sapiens
  misc_RNA (1)...(19): siRNA sense strand
ucucagagcuuaacuacau

SEQ ID NO: 1942966 - RNA, 19 nt, Homo sapiens
  misc_RNA (1)...(19): siRNA sense strand
gcaagcugguccauaaguu

SEQ ID NO: 1942967 - RNA, 19 nt, Homo sapiens
  misc_RNA (1)...(19): siRNA sense strand
gucaagaacucgaugaaau

SEQ ID NO: 1942968 - RNA, 19 nt, Homo sapiens
  misc_RNA (1)...(19): siRNA sense strand
ggaguucccugaggagauu

SEQ ID NO: 1942969 - RNA, 19 nt, Homo sapiens
  misc_RNA (1)...(19): siRNA sense strand
gaaagguguugaggaagaa

SEQ ID NO: 1942970 - RNA, 19 nt, Homo sapiens
  misc_RNA (1)...(19): siRNA sense strand
caacacacaggaucccuua

SEQ ID NO: 1942971 - RNA, 19 nt, Homo sapiens
  misc_RNA (1)...(19): siRNA sense strand
gaaauacuacgaugacugu

SEQ ID NO: 1942972 - RNA, 19 nt, Homo sapiens
  misc_RNA (1)...(19): siRNA sense strand
ucaagaacucgaugaaaua

SEQ ID NO: 1942973 - RNA, 19 nt, Homo sapiens
  misc_RNA (1)...(19): siRNA sense strand
gagauucgauauccaguca

SEQ ID NO: 1942974 - RNA, 19 nt, Homo sapiens
  misc_RNA (1)...(19): siRNA sense strand
caauuuggcuucagugauc

SEQ ID NO: 1942975 - RNA, 19 nt, Homo sapiens
  misc_RNA (1)...(19): siRNA sense strand
ggaagguacaauugacuua

SEQ ID NO: 1942976 - RNA, 19 nt, Homo sapiens
  misc_RNA (1)...(19): siRNA sense strand
agaacucgaugaaauacua

SEQ ID NO: 1942977 - RNA, 19 nt, Homo sapiens
  misc_RNA (1)...(19): siRNA sense strand
ugaaagguguugaggaaga

SEQ ID NO: 1942978 - RNA, 19 nt, Homo sapiens
  misc_RNA (1)...(19): siRNA sense strand
ggagaagauguaauccuua

SEQ ID NO: 1942979 - RNA, 19 nt, Homo sapiens
  misc_RNA (1)...(19): siRNA sense strand
gugagugaauucuugagua

SEQ ID NO: 1942980 - RNA, 19 nt, Homo sapiens
  misc_RNA (1)...(19): siRNA sense strand
gcugugggcuucugucuuc

SEQ ID NO: 1942981 - RNA, 19 nt, Homo sapiens
  misc_RNA (1)...(19): siRNA sense strand
ggucacuucucagguauaa

SEQ ID NO: 1942982 - RNA, 19 nt, Homo sapiens
  misc_RNA (1)...(19): siRNA sense strand
uggcugaacuggagaaaga

SEQ ID NO: 1942983 - RNA, 19 nt, Homo sapiens
  misc_RNA (1)...(19): siRNA sense strand
ggaacuucguugugucauu

SEQ ID NO: 1942984 - RNA, 19 nt, Homo sapiens
  misc_RNA (1)...(19): siRNA sense strand
ggucugugaucagguauuu

SEQ ID NO: 1942985 - RNA, 19 nt, Homo sapiens
  misc_RNA (1)...(19): siRNA sense strand
cuacaagacagggaaauua

SEQ ID NO: 1942986 - RNA, 19 nt, Homo sapiens
  misc_RNA (1)...(19): siRNA sense strand
gaucauuguuggcaucugu

SEQ ID NO: 1942987 - RNA, 19 nt, Homo sapiens
  misc_RNA (1)...(19): siRNA sense strand
ggaguucucuguggagguu

SEQ ID NO: 1942988 - RNA, 19 nt, Homo sapiens
  misc_RNA (1)...(19): siRNA sense strand
ccaggaaacccuuguagaa

SEQ ID NO: 1942989 - RNA, 19 nt, Homo sapiens
  misc_RNA (1)...(19): siRNA sense strand
gcagagaacccacgaggau

SEQ ID NO: 1942990 - RNA, 19 nt, Homo sapiens
  misc_RNA (1)...(19): siRNA sense strand
gaagagugccaacaugaau

SEQ ID NO: 1942991 - RNA, 19 nt, Homo sapiens
  misc_RNA (1)...(19): siRNA sense strand
ggaagaggguauugaucug

SEQ ID NO: 1942992 - RNA, 19 nt, Homo sapiens
  misc_RNA (1)...(19): siRNA sense strand
uauggucacuucucaggua

SEQ ID NO: 1942993 - RNA, 19 nt, Homo sapiens
  misc_RNA (1)...(19): siRNA sense strand
uagagcagcugaagucugu

SEQ ID NO: 1942994 - RNA, 19 nt, Homo sapiens
  misc_RNA (1)...(19): siRNA sense strand
ucaaugaucuggccaugca

SEQ ID NO: 1942995 - RNA, 19 nt, Homo sapiens
  misc_RNA (1)...(19): siRNA sense strand
ugaggaaguuugccagcua

SEQ ID NO: 1942996 - RNA, 19 nt, Homo sapiens
  misc_RNA (1)...(19): siRNA sense strand
ggccucagauaacccauuu

SEQ ID NO: 1942997 - RNA, 19 nt, Homo sapiens
  misc_RNA (1)...(19): siRNA sense strand
ccauggagguacuuucuga

SEQ ID NO: 1942998 - RNA, 19 nt, Homo sapiens
  misc_RNA (1)...(19): siRNA sense strand
gagagcagcguccgaaaga

SEQ ID NO: 1942999 - RNA, 19 nt, Homo sapiens
  misc_RNA (1)...(19): siRNA sense strand
gccacugccucaucucuuu

SEQ ID NO: 1943000 - RNA, 19 nt, Homo sapiens
  misc_RNA (1)...(19): siRNA sense strand
cgaucaaucuguuaucuca

SEQ ID NO: 1943001 - RNA, 19 nt, Homo sapiens
  misc_RNA (1)...(19): siRNA sense strand
gcacaagagcucuccauag

SEQ ID NO: 1943002 - RNA, 19 nt, Homo sapiens
  misc_RNA (1)...(19): siRNA sense strand
ggaugagucugucaacaag

SEQ ID NO: 1943003 - RNA, 19 nt, Homo sapiens
  misc_RNA (1)...(19): siRNA sense strand
gaggagaaacuggaaauug

SEQ ID NO: 1943004 - RNA, 19 nt, Homo sapiens
  misc_RNA (1)...(19): siRNA sense strand
gcuaugauaucaguaagau

SEQ ID NO: 1943005 - RNA, 19 nt, Homo sapiens
  misc_RNA (1)...(19): siRNA sense strand
guacuucccugcucaacuc

SEQ ID NO: 1943006 - RNA, 19 nt, Homo sapiens
  misc_RNA (1)...(19): siRNA sense strand
gaaagagauucgauaucca

SEQ ID NO: 1943007 - RNA, 19 nt, Homo sapiens
  misc_RNA (1)...(19): siRNA sense strand
caacagauggcacagaugu

SEQ ID NO: 1943008 - RNA, 19 nt, Homo sapiens
  misc_RNA (1)...(19): siRNA sense strand
acacguggcugaagaacau

SEQ ID NO: 1943009 - RNA, 19 nt, Homo sapiens
  misc_RNA (1)...(19): siRNA sense strand
gauguauggucacuucuca

SEQ ID NO: 1943010 - RNA, 19 nt, Homo sapiens
  misc_RNA (1)...(19): siRNA sense strand
gaaccucagaucauuguug

SEQ ID NO: 1943011 - RNA, 19 nt, Homo sapiens
  misc_RNA (1)...(19): siRNA sense strand
gcagccaggccucagauaa

SEQ ID NO: 1943012 - RNA, 19 nt, Homo sapiens
  misc_RNA (1)...(19): siRNA sense strand
caacaugaaugggcuacug

SEQ ID NO: 1943013 - RNA, 19 nt, Homo sapiens
  misc_RNA (1)...(19): siRNA sense strand
guggugagaucgaggagaa

SEQ ID NO: 1943014 - RNA, 19 nt, Homo sapiens
  misc_RNA (1)...(19): siRNA sense strand
caagaucuaugccucugau

SEQ ID NO: 1943015 - RNA, 19 nt, Homo sapiens
  misc_RNA (1)...(19): siRNA sense strand
guccauaaguuccauguag

SEQ ID NO: 1943016 - RNA, 19 nt, Homo sapiens
  misc_RNA (1)...(19): siRNA sense strand
gcagaguggccuaggguuu

SEQ ID NO: 1943017 - RNA, 19 nt, Homo sapiens
  misc_RNA (1)...(19): siRNA sense strand
cuaaggcacuggcugaugu

SEQ ID NO: 1943018 - RNA, 19 nt, Homo sapiens
  misc_RNA (1)...(19): siRNA sense strand
ggugaagagugccaacaug

SEQ ID NO: 1943019 - RNA, 19 nt, Homo sapiens
  misc_RNA (1)...(19): siRNA sense strand
gccagcgucucuuucguaa

SEQ ID NO: 1943020 - RNA, 19 nt, Homo sapiens
  misc_RNA (1)...(19): siRNA sense strand
gaggaaguuugccagcuau

SEQ ID NO: 1943021 - RNA, 19 nt, Homo sapiens
  misc_RNA (1)...(19): siRNA sense strand
ccaaagugcugggauuaca

SEQ ID NO: 1943022 - RNA, 19 nt, Homo sapiens
  misc_RNA (1)...(19): siRNA sense strand
gaacgcgucucuauuucac

SEQ ID NO: 1943023 - RNA, 19 nt, Homo sapiens
  misc_RNA (1)...(19): siRNA sense strand
ggaaugcaaccugauagaa

SEQ ID NO: 1943024 - RNA, 19 nt, Homo sapiens
  misc_RNA (1)...(19): siRNA sense strand
ucccugaggagauaaauua

SEQ ID NO: 1943025 - RNA, 19 nt, Homo sapiens
  misc_RNA (1)...(19): siRNA sense strand
gaucaccccucauucguaa

SEQ ID NO: 1943026 - RNA, 19 nt, Homo sapiens
  misc_RNA (1)...(19): siRNA sense strand
agugaaagguguugaggaa

SEQ ID NO: 1943027 - RNA, 19 nt, Homo sapiens
  misc_RNA (1)...(19): siRNA sense strand
gauguaauccuuaaugaac

SEQ ID NO: 1943028 - RNA, 19 nt, Homo sapiens
  misc_RNA (1)...(19): siRNA sense strand
gaaugcaaccugauagaag

SEQ ID NO: 1943029 - RNA, 19 nt, Homo sapiens
  misc_RNA (1)...(19): siRNA sense strand
uuggcaagcugguccauaa

SEQ ID NO: 1943030 - RNA, 19 nt, Homo sapiens
  misc_RNA (1)...(19): siRNA sense strand
gauucgauauccagucaug

SEQ ID NO: 1943031 - RNA, 19 nt, Homo sapiens
  misc_RNA (1)...(19): siRNA sense strand
caccacaucuggcacuaug

SEQ ID NO: 1943032 - RNA, 19 nt, Homo sapiens
  misc_RNA (1)...(19): siRNA sense strand
ugagugaauucuugaguag

SEQ ID NO: 1943033 - RNA, 19 nt, Homo sapiens
  misc_RNA (1)...(19): siRNA sense strand
ggagguacuuucugagacu

SEQ ID NO: 1943034 - RNA, 19 nt, Homo sapiens
  misc_RNA (1)...(19): siRNA sense strand
ccaagccaaugacucaaau

SEQ ID NO: 1943035 - RNA, 19 nt, Homo sapiens
  misc_RNA (1)...(19): siRNA sense strand
gcugggcacccguggaaua

SEQ ID NO: 1943036 - RNA, 19 nt, Homo sapiens
  misc_RNA (1)...(19): siRNA sense strand
uagaaaaucuccagcuuug

SEQ ID NO: 1943037 - RNA, 19 nt, Homo sapiens
  misc_RNA (1)...(19): siRNA sense strand
gggcaucccugagauugau

SEQ ID NO: 1943038 - RNA, 19 nt, Homo sapiens
  misc_RNA (1)...(19): siRNA sense strand
agaugaagauggaagugaa

SEQ ID NO: 1943039 - RNA, 19 nt, Homo sapiens
  misc_RNA (1)...(19): siRNA sense strand
cgaugacugugccaagauu

SEQ ID NO: 1943040 - RNA, 19 nt, Homo sapiens
  misc_RNA (1)...(19): siRNA sense strand
gcacaugacacucggauua

SEQ ID NO: 1943041 - RNA, 19 nt, Homo sapiens
  misc_RNA (1)...(19): siRNA sense strand
gaaaauaccuucugcaaac

SEQ ID NO: 1943042 - RNA, 19 nt, Homo sapiens
  misc_RNA (1)...(19): siRNA sense strand
gagccaauccuucacuuaa

SEQ ID NO: 1943043 - RNA, 19 nt, Homo sapiens
  misc_RNA (1)...(19): siRNA sense strand
ugugacugcuuccguguua

SEQ ID NO: 1943044 - RNA, 19 nt, Homo sapiens
  misc_RNA (1)...(19): siRNA sense strand
ucacagcacucagcacaug

SEQ ID NO: 1943045 - RNA, 19 nt, Homo sapiens
  misc_RNA (1)...(19): siRNA sense strand
gccaauccuucacuuaaau

SEQ ID NO: 1943046 - RNA, 19 nt, Homo sapiens
  misc_RNA (1)...(19): siRNA sense strand
ggagccaauccuucacuua

SEQ ID NO: 1943047 - RNA, 19 nt, Homo sapiens
  misc_RNA (1)...(19): siRNA sense strand
gcauggagccaauccuuca

SEQ ID NO: 1943048 - RNA, 19 nt, Homo sapiens
  misc_RNA (1)...(19): siRNA sense strand
guucagacccucagaugug

SEQ ID NO: 1943049 - RNA, 19 nt, Homo sapiens
  misc_RNA (1)...(19): siRNA sense strand
gcacucagcacaugacacu

SEQ ID NO: 1943050 - RNA, 19 nt, Homo sapiens
  misc_RNA (1)...(19): siRNA sense strand
ggaaaauaccuucugcaaa

SEQ ID NO: 1943051 - RNA, 19 nt, Homo sapiens
  misc_RNA (1)...(19): siRNA sense strand
gacagaaccuacaaaagga

SEQ ID NO: 1943052 - RNA, 19 nt, Homo sapiens
  misc_RNA (1)...(19): siRNA sense strand
agccaauccuucacuuaaa

SEQ ID NO: 1943053 - RNA, 19 nt, Homo sapiens
  misc_RNA (1)...(19): siRNA sense strand
uuccugcacuuccaugaaa

SEQ ID NO: 1943054 - RNA, 19 nt, Homo sapiens
  misc_RNA (1)...(19): siRNA sense strand
gcacuuccaugaaaauaac

SEQ ID NO: 1943055 - RNA, 19 nt, Homo sapiens
  misc_RNA (1)...(19): siRNA sense strand
ucacugggccuggaaaaua

SEQ ID NO: 1943056 - RNA, 19 nt, Homo sapiens
  misc_RNA (1)...(19): siRNA sense strand
uugcaguuauccaaauguu

SEQ ID NO: 1943057 - RNA, 19 nt, Homo sapiens
  misc_RNA (1)...(19): siRNA sense strand
gcuuccguguuacugcuuu

SEQ ID NO: 1943058 - RNA, 19 nt, Homo sapiens
  misc_RNA (1)...(19): siRNA sense strand
ggaaagaguggauaauaaa

SEQ ID NO: 1943059 - RNA, 19 nt, Homo sapiens
  misc_RNA (1)...(19): siRNA sense strand
ccaagagacucguggaauu

SEQ ID NO: 1943060 - RNA, 19 nt, Homo sapiens
  misc_RNA (1)...(19): siRNA sense strand
uggaaagaguggauaauaa

SEQ ID NO: 1943061 - RNA, 19 nt, Homo sapiens
  misc_RNA (1)...(19): siRNA sense strand
cuacuucgauccuguaaga

SEQ ID NO: 1943062 - RNA, 19 nt, Homo sapiens
  misc_RNA (1)...(19): siRNA sense strand
ugagguggauugaugauga

SEQ ID NO: 1943063 - RNA, 19 nt, Homo sapiens
  misc_RNA (1)...(19): siRNA sense strand
ccagaaauaacuaguguuu

SEQ ID NO: 1943064 - RNA, 19 nt, Homo sapiens
  misc_RNA (1)...(19): siRNA sense strand
guaagacuuuaacccauga

SEQ ID NO: 1943065 - RNA, 19 nt, Homo sapiens
  misc_RNA (1)...(19): siRNA sense strand
gaacacagucacgaggaua

SEQ ID NO: 1943066 - RNA, 19 nt, Homo sapiens
  misc_RNA (1)...(19): siRNA sense strand
ugagaucggacacauauuu

SEQ ID NO: 1943067 - RNA, 19 nt, Homo sapiens
  misc_RNA (1)...(19): siRNA sense strand
caagagacucguggaauuu

SEQ ID NO: 1943068 - RNA, 19 nt, Homo sapiens
  misc_RNA (1)...(19): siRNA sense strand
gaauggaaagaguggauaa

SEQ ID NO: 1943069 - RNA, 19 nt, Homo sapiens
  misc_RNA (1)...(19): siRNA sense strand
cgacaacuauuauauucca

SEQ ID NO: 1943070 - RNA, 19 nt, Homo sapiens
  misc_RNA (1)...(19): siRNA sense strand
cgaggauaaugggaauuua

SEQ ID NO: 1943071 - RNA, 19 nt, Homo sapiens
  misc_RNA (1)...(19): siRNA sense strand
gagguggauugaugaugaa

SEQ ID NO: 1943072 - RNA, 19 nt, Homo sapiens
  misc_RNA (1)...(19): siRNA sense strand
caugagaucggacacauau

SEQ ID NO: 1943073 - RNA, 19 nt, Homo sapiens
  misc_RNA (1)...(19): siRNA sense strand
ugaagaagcucaagaaaac

SEQ ID NO: 1943074 - RNA, 19 nt, Homo sapiens
  misc_RNA (1)...(19): siRNA sense strand
gcacuggugagguggauug

SEQ ID NO: 1943075 - RNA, 19 nt, Homo sapiens
  misc_RNA (1)...(19): siRNA sense strand
ggaauggaaagaguggaua

SEQ ID NO: 1943076 - RNA, 19 nt, Homo sapiens
  misc_RNA (1)...(19): siRNA sense strand
ucacgaggauaaugggaau

SEQ ID NO: 1943077 - RNA, 19 nt, Homo sapiens
  misc_RNA (1)...(19): siRNA sense strand
gagaucggacacauauuug

SEQ ID NO: 1943078 - RNA, 19 nt, Homo sapiens
  misc_RNA (1)...(19): siRNA sense strand
gaucggacacauauuugga

SEQ ID NO: 1943079 - RNA, 19 nt, Homo sapiens
  misc_RNA (1)...(19): siRNA sense strand
cuucagcauuguagaaaga

SEQ ID NO: 1943080 - RNA, 19 nt, Homo sapiens
  misc_RNA (1)...(19): siRNA sense strand
gcaaagugaagaagcucaa

SEQ ID NO: 1943081 - RNA, 19 nt, Homo sapiens
  misc_RNA (1)...(19): siRNA sense strand
gaaacccguggaagccuuu

SEQ ID NO: 1943082 - RNA, 19 nt, Homo sapiens
  misc_RNA (1)...(19): siRNA sense strand
ucagcauuguagaaagaua

SEQ ID NO: 1943083 - RNA, 19 nt, Homo sapiens
  misc_RNA (1)...(19): siRNA sense strand
cuggugagguggauugaug

SEQ ID NO: 1943084 - RNA, 19 nt, Homo sapiens
  misc_RNA (1)...(19): siRNA sense strand
caucuucaagugacuauuc

SEQ ID NO: 1943085 - RNA, 19 nt, Homo sapiens
  misc_RNA (1)...(19): siRNA sense strand
cuaaaccuuugcccuaucu

SEQ ID NO: 1943086 - RNA, 19 nt, Homo sapiens
  misc_RNA (1)...(19): siRNA sense strand
gacuuuaacccaugagauc

SEQ ID NO: 1943087 - RNA, 19 nt, Homo sapiens
  misc_RNA (1)...(19): siRNA sense strand
gaggauaaugggaauuuac

SEQ ID NO: 1943088 - RNA, 19 nt, Homo sapiens
  misc_RNA (1)...(19): siRNA sense strand
ccaugagaucggacacaua

SEQ ID NO: 1943089 - RNA, 19 nt, Homo sapiens
  misc_RNA (1)...(19): siRNA sense strand
uuuaaggaauggaaagagu

SEQ ID NO: 1943090 - RNA, 19 nt, Homo sapiens
  misc_RNA (1)...(19): siRNA sense strand
caugcacuauaaaggcaaa

SEQ ID NO: 1943091 - RNA, 19 nt, Homo sapiens
  misc_RNA (1)...(19): siRNA sense strand
uauaaaggcaaagugaaga

SEQ ID NO: 1943092 - RNA, 19 nt, Homo sapiens
  misc_RNA (1)...(19): siRNA sense strand
gugaagaagcucaagaaaa

SEQ ID NO: 1943093 - RNA, 19 nt, Homo sapiens
  misc_RNA (1)...(19): siRNA sense strand
auggaaagaguggauaaua

SEQ ID NO: 1943094 - RNA, 19 nt, Homo sapiens
  misc_RNA (1)...(19): siRNA sense strand
uuccagaaauaacuagugu

SEQ ID NO: 1943095 - RNA, 19 nt, Homo sapiens
  misc_RNA (1)...(19): siRNA sense strand
agaacacagucacgaggau

SEQ ID NO: 1943096 - RNA, 19 nt, Homo sapiens
  misc_RNA (1)...(19): siRNA sense strand
aaagugaagaagcucaaga

SEQ ID NO: 1943097 - RNA, 19 nt, Homo sapiens
  misc_RNA (1)...(19): siRNA sense strand
caaguugcagugugcuguu

SEQ ID NO: 1943098 - RNA, 19 nt, Homo sapiens
  misc_RNA (1)...(19): siRNA sense strand
cuucgauccuguaagacuu

SEQ ID NO: 1943099 - RNA, 19 nt, Homo sapiens
  misc_RNA (1)...(19): siRNA sense strand
cuauaaaggcaaagugaag

SEQ ID NO: 1943100 - RNA, 19 nt, Homo sapiens
  misc_RNA (1)...(19): siRNA sense strand
gacaggccucuuugacaga

SEQ ID NO: 1943101 - RNA, 19 nt, Homo sapiens
  misc_RNA (1)...(19): siRNA sense strand
ccuuugcccuaucuguuug

SEQ ID NO: 1943102 - RNA, 19 nt, Homo sapiens
  misc_RNA (1)...(19): siRNA sense strand
aaacaucuucaagugacua

SEQ ID NO: 1943103 - RNA, 19 nt, Homo sapiens
  misc_RNA (1)...(19): siRNA sense strand
ccagguauggaggugauuu

SEQ ID NO: 1943104 - RNA, 19 nt, Homo sapiens
  misc_RNA (1)...(19): siRNA sense strand
cuaucuguuugcacaaguu

SEQ ID NO: 1943105 - RNA, 19 nt, Homo sapiens
  misc_RNA (1)...(19): siRNA sense strand
ucgauccuguaagacuuua

SEQ ID NO: 1943106 - RNA, 19 nt, Homo sapiens
  misc_RNA (1)...(19): siRNA sense strand
uuacuacuucgauccugua

SEQ ID NO: 1943107 - RNA, 19 nt, Homo sapiens
  misc_RNA (1)...(19): siRNA sense strand
uaacagagcugaacuauau

SEQ ID NO: 1943108 - RNA, 19 nt, Homo sapiens
  misc_RNA (1)...(19): siRNA sense strand
ggaaauagaggacgaauaa

SEQ ID NO: 1943109 - RNA, 19 nt, Homo sapiens
  misc_RNA (1)...(19): siRNA sense strand
ucacaaagaugcacaugua

SEQ ID NO: 1943110 - RNA, 19 nt, Homo sapiens
  misc_RNA (1)...(19): siRNA sense strand
gaaacucucugcaaaauua

SEQ ID NO: 1943111 - RNA, 19 nt, Homo sapiens
  misc_RNA (1)...(19): siRNA sense strand
uaacacaucugccaauuau

SEQ ID NO: 1943112 - RNA, 19 nt, Homo sapiens
  misc_RNA (1)...(19): siRNA sense strand
agaaagcagugaaagauua

SEQ ID NO: 1943113 - RNA, 19 nt, Homo sapiens
  misc_RNA (1)...(19): siRNA sense strand
ggaauuugcuggacguuug

SEQ ID NO: 1943114 - RNA, 19 nt, Homo sapiens
  misc_RNA (1)...(19): siRNA sense strand
gaaagauuaugaacaggaa

SEQ ID NO: 1943115 - RNA, 19 nt, Homo sapiens
  misc_RNA (1)...(19): siRNA sense strand
ggaugaaacuccacaagug

SEQ ID NO: 1943116 - RNA, 19 nt, Homo sapiens
  misc_RNA (1)...(19): siRNA sense strand
gacagaagaagauguguua

SEQ ID NO: 1943117 - RNA, 19 nt, Homo sapiens
  misc_RNA (1)...(19): siRNA sense strand
gauuucaccuguagaugua

SEQ ID NO: 1943118 - RNA, 19 nt, Homo sapiens
  misc_RNA (1)...(19): siRNA sense strand
gagcugaacuauaucaaca

SEQ ID NO: 1943119 - RNA, 19 nt, Homo sapiens
  misc_RNA (1)...(19): siRNA sense strand
guggaucacugcccuuaua

SEQ ID NO: 1943120 - RNA, 19 nt, Homo sapiens
  misc_RNA (1)...(19): siRNA sense strand
gaggaagaguuacagacua

SEQ ID NO: 1943121 - RNA, 19 nt, Homo sapiens
  misc_RNA (1)...(19): siRNA sense strand
gaagaaagagggaagacaa

SEQ ID NO: 1943122 - RNA, 19 nt, Homo sapiens
  misc_RNA (1)...(19): siRNA sense strand
gaaaacagauuaacuccuu

SEQ ID NO: 1943123 - RNA, 19 nt, Homo sapiens
  misc_RNA (1)...(19): siRNA sense strand
gaauagaacccaaggaauc

SEQ ID NO: 1943124 - RNA, 19 nt, Homo sapiens
  misc_RNA (1)...(19): siRNA sense strand
gcaagacucagagagauua

SEQ ID NO: 1943125 - RNA, 19 nt, Homo sapiens
  misc_RNA (1)...(19): siRNA sense strand
ccagagugcugcaguauuc

SEQ ID NO: 1943126 - RNA, 19 nt, Homo sapiens
  misc_RNA (1)...(19): siRNA sense strand
ggagcuacuucaucacaaa

SEQ ID NO: 1943127 - RNA, 19 nt, Homo sapiens
  misc_RNA (1)...(19): siRNA sense strand
gaaggcucguuuaaagaaa

SEQ ID NO: 1943128 - RNA, 19 nt, Homo sapiens
  misc_RNA (1)...(19): siRNA sense strand
gaaagaaacgaggaagaaa

SEQ ID NO: 1943129 - RNA, 19 nt, Homo sapiens
  misc_RNA (1)...(19): siRNA sense strand
ccuccugccuuacuaauuu

SEQ ID NO: 1943130 - RNA, 19 nt, Homo sapiens
  misc_RNA (1)...(19): siRNA sense strand
ugaaggauguggaggaaga

SEQ ID NO: 1943131 - RNA, 19 nt, Homo sapiens
  misc_RNA (1)...(19): siRNA sense strand
ggcugaagcugagauuaua

SEQ ID NO: 1943132 - RNA, 19 nt, Homo sapiens
  misc_RNA (1)...(19): siRNA sense strand
gaaagagggaagacaaaga

SEQ ID NO: 1943133 - RNA, 19 nt, Homo sapiens
  misc_RNA (1)...(19): siRNA sense strand
guuacagacuaccggauua

SEQ ID NO: 1943134 - RNA, 19 nt, Homo sapiens
  misc_RNA (1)...(19): siRNA sense strand
gauccagagugcugcagua

SEQ ID NO: 1943135 - RNA, 19 nt, Homo sapiens
  misc_RNA (1)...(19): siRNA sense strand
cguuugaacucuguuaaua

SEQ ID NO: 1943136 - RNA, 19 nt, Homo sapiens
  misc_RNA (1)...(19): siRNA sense strand
ggauguggaggaagaguua

SEQ ID NO: 1943137 - RNA, 19 nt, Homo sapiens
  misc_RNA (1)...(19): siRNA sense strand
gauaugcuggugaagaaua

SEQ ID NO: 1943138 - RNA, 19 nt, Homo sapiens
  misc_RNA (1)...(19): siRNA sense strand
gcaagcgguaguuccauua

SEQ ID NO: 1943139 - RNA, 19 nt, Homo sapiens
  misc_RNA (1)...(19): siRNA sense strand
guacaccaaggacaaauaa

SEQ ID NO: 1943140 - RNA, 19 nt, Homo sapiens
  misc_RNA (1)...(19): siRNA sense strand
gcaucuugcuaccaaauug

SEQ ID NO: 1943141 - RNA, 19 nt, Homo sapiens
  misc_RNA (1)...(19): siRNA sense strand
gcagaacguguuggaaaua

SEQ ID NO: 1943142 - RNA, 19 nt, Homo sapiens
  misc_RNA (1)...(19): siRNA sense strand
cccagaaccuccaaacaaa

SEQ ID NO: 1943143 - RNA, 19 nt, Homo sapiens
  misc_RNA (1)...(19): siRNA sense strand
gcuaacacaucugccaauu

SEQ ID NO: 1943144 - RNA, 19 nt, Homo sapiens
  misc_RNA (1)...(19): siRNA sense strand
ggaaacgauucaugaacau

SEQ ID NO: 1943145 - RNA, 19 nt, Homo sapiens
  misc_RNA (1)...(19): siRNA sense strand
cagcaugucggguuugaua

SEQ ID NO: 1943146 - RNA, 19 nt, Homo sapiens
  misc_RNA (1)...(19): siRNA sense strand
gaacgaaagaaacgaggaa

SEQ ID NO: 1943147 - RNA, 19 nt, Homo sapiens
  misc_RNA (1)...(19): siRNA sense strand
ccacgaaagucagguucua

SEQ ID NO: 1943148 - RNA, 19 nt, Homo sapiens
  misc_RNA (1)...(19): siRNA sense strand
gagcacauguuuuaaauuc

SEQ ID NO: 1943149 - RNA, 19 nt, Homo sapiens
  misc_RNA (1)...(19): siRNA sense strand
gagaaagcagugaaagauu

SEQ ID NO: 1943150 - RNA, 19 nt, Homo sapiens
  misc_RNA (1)...(19): siRNA sense strand
cauguggaaugaauuagaa

SEQ ID NO: 1943151 - RNA, 19 nt, Homo sapiens
  misc_RNA (1)...(19): siRNA sense strand
gaaagucagguucuaaagu

SEQ ID NO: 1943152 - RNA, 19 nt, Homo sapiens
  misc_RNA (1)...(19): siRNA sense strand
guacucuacucauggagaa

SEQ ID NO: 1943153 - RNA, 19 nt, Homo sapiens
  misc_RNA (1)...(19): siRNA sense strand
gaaagcagugaaagauuau

SEQ ID NO: 1943154 - RNA, 19 nt, Homo sapiens
  misc_RNA (1)...(19): siRNA sense strand
aagaagauguguuaaacug

SEQ ID NO: 1943155 - RNA, 19 nt, Homo sapiens
  misc_RNA (1)...(19): siRNA sense strand
ggaacaaccacgaaaguca

SEQ ID NO: 1943156 - RNA, 19 nt, Homo sapiens
  misc_RNA (1)...(19): siRNA sense strand
cuaaauggucguucuguuu

SEQ ID NO: 1943157 - RNA, 19 nt, Homo sapiens
  misc_RNA (1)...(19): siRNA sense strand
gaaacgauucaugaacaua

SEQ ID NO: 1943158 - RNA, 19 nt, Homo sapiens
  misc_RNA (1)...(19): siRNA sense strand
gaagacagccuuguaucug

SEQ ID NO: 1943159 - RNA, 19 nt, Homo sapiens
  misc_RNA (1)...(19): siRNA sense strand
gaagaggaagaacgaaaga

SEQ ID NO: 1943160 - RNA, 19 nt, Homo sapiens
  misc_RNA (1)...(19): siRNA sense strand
acacaucugccaauuauga

SEQ ID NO: 1943161 - RNA, 19 nt, Homo sapiens
  misc_RNA (1)...(19): siRNA sense strand
gagaaggcucguuuaaaga

SEQ ID NO: 1943162 - RNA, 19 nt, Homo sapiens
  misc_RNA (1)...(19): siRNA sense strand
cgaaagaaacgaggaagaa

SEQ ID NO: 1943163 - RNA, 19 nt, Homo sapiens
  misc_RNA (1)...(19): siRNA sense strand
cagaagaagauguguuaaa

SEQ ID NO: 1943164 - RNA, 19 nt, Homo sapiens
  misc_RNA (1)...(19): siRNA sense strand
aaagucagguucuaaaguc

SEQ ID NO: 1943165 - RNA, 19 nt, Homo sapiens
  misc_RNA (1)...(19): siRNA sense strand
gaggacgaauaaucuguau

SEQ ID NO: 1943166 - RNA, 19 nt, Homo sapiens
  misc_RNA (1)...(19): siRNA sense strand
ugaagacuguguccaggaa

SEQ ID NO: 1943167 - RNA, 19 nt, Homo sapiens
  misc_RNA (1)...(19): siRNA sense strand
gcgaaugcuugaagacugu

SEQ ID NO: 1943168 - RNA, 19 nt, Homo sapiens
  misc_RNA (1)...(19): siRNA sense strand
ccaguguuauugugaaaga

SEQ ID NO: 1943169 - RNA, 19 nt, Homo sapiens
  misc_RNA (1)...(19): siRNA sense strand
cagauuaacuccuuuucua

SEQ ID NO: 1943170 - RNA, 19 nt, Homo sapiens
  misc_RNA (1)...(19): siRNA sense strand
uagcaguucucgauccauu

SEQ ID NO: 1943171 - RNA, 19 nt, Homo sapiens
  misc_RNA (1)...(19): siRNA sense strand
ucagagagauuaaaaggaa

SEQ ID NO: 1943172 - RNA, 19 nt, Homo sapiens
  misc_RNA (1)...(19): siRNA sense strand
ggacguuugaacucuguua

SEQ ID NO: 1943173 - RNA, 19 nt, Homo sapiens
  misc_RNA (1)...(19): siRNA sense strand
cagaaaacaucaggaauuu

SEQ ID NO: 1943174 - RNA, 19 nt, Homo sapiens
  misc_RNA (1)...(19): siRNA sense strand
agaccuuccuccugccuua

SEQ ID NO: 1943175 - RNA, 19 nt, Homo sapiens
  misc_RNA (1)...(19): siRNA sense strand
ccuaugaucauuucacaaa

SEQ ID NO: 1943176 - RNA, 19 nt, Homo sapiens
  misc_RNA (1)...(19): siRNA sense strand
ugacuuggcuucaacuacu

SEQ ID NO: 1943177 - RNA, 19 nt, Homo sapiens
  misc_RNA (1)...(19): siRNA sense strand
gcccuuauauggcagaauc

SEQ ID NO: 1943178 - RNA, 19 nt, Homo sapiens
  misc_RNA (1)...(19): siRNA sense strand
acaaagaggacaagucaga

SEQ ID NO: 1943179 - RNA, 19 nt, Homo sapiens
  misc_RNA (1)...(19): siRNA sense strand
cuaccuauuuccacaguug

SEQ ID NO: 1943180 - RNA, 19 nt, Homo sapiens
  misc_RNA (1)...(19): siRNA sense strand
agaagaagauguguuaaac

SEQ ID NO: 1943181 - RNA, 19 nt, Homo sapiens
  misc_RNA (1)...(19): siRNA sense strand
caaagaugcacauguagau

SEQ ID NO: 1943182 - RNA, 19 nt, Homo sapiens
  misc_RNA (1)...(19): siRNA sense strand
aagacagccuuguaucuga

SEQ ID NO: 1943183 - RNA, 19 nt, Homo sapiens
  misc_RNA (1)...(19): siRNA sense strand
gggccagugucguuauuau

SEQ ID NO: 1943184 - RNA, 19 nt, Homo sapiens
  misc_RNA (1)...(19): siRNA sense strand
agacaaagaggacaaguca

SEQ ID NO: 1943185 - RNA, 19 nt, Homo sapiens
  misc_RNA (1)...(19): siRNA sense strand
gauccaccuucaauuagug

SEQ ID NO: 1943186 - RNA, 19 nt, Homo sapiens
  misc_RNA (1)...(19): siRNA sense strand
gaucacugcccuuauaugg

SEQ ID NO: 1943187 - RNA, 19 nt, Homo sapiens
  misc_RNA (1)...(19): siRNA sense strand
ggauuucaccuguagaugu

SEQ ID NO: 1943188 - RNA, 19 nt, Homo sapiens
  misc_RNA (1)...(19): siRNA sense strand
gacggcaucuugcuaccaa

SEQ ID NO: 1943189 - RNA, 19 nt, Homo sapiens
  misc_RNA (1)...(19): siRNA sense strand
ggagaaugcagaacguguu

SEQ ID NO: 1943190 - RNA, 19 nt, Homo sapiens
  misc_RNA (1)...(19): siRNA sense strand
uaucaacaacucagagaaa

SEQ ID NO: 1943191 - RNA, 19 nt, Homo sapiens
  misc_RNA (1)...(19): siRNA sense strand
uacuggagcuuaucggauu

SEQ ID NO: 1943192 - RNA, 19 nt, Homo sapiens
  misc_RNA (1)...(19): siRNA sense strand
caaggacaaauaacauuga

SEQ ID NO: 1943193 - RNA, 19 nt, Homo sapiens
  misc_RNA (1)...(19): siRNA sense strand
caaauauuccaaugaagga

SEQ ID NO: 1943194 - RNA, 19 nt, Homo sapiens
  misc_RNA (1)...(19): siRNA sense strand
cuaacacaucugccaauua

SEQ ID NO: 1943195 - RNA, 19 nt, Homo sapiens
  misc_RNA (1)...(19): siRNA sense strand
gguuugauaugcuggugaa

SEQ ID NO: 1943196 - RNA, 19 nt, Homo sapiens
  misc_RNA (1)...(19): siRNA sense strand
gcugaacuauaucaacauc

SEQ ID NO: 1943197 - RNA, 19 nt, Homo sapiens
  misc_RNA (1)...(19): siRNA sense strand
gaaagggcccuaaaagaga

SEQ ID NO: 1943198 - RNA, 19 nt, Homo sapiens
  misc_RNA (1)...(19): siRNA sense strand
acaugaggcucguacucua

SEQ ID NO: 1943199 - RNA, 19 nt, Homo sapiens
  misc_RNA (1)...(19): siRNA sense strand
aguggaaacucucugcaaa

SEQ ID NO: 1943200 - RNA, 19 nt, Homo sapiens
  misc_RNA (1)...(19): siRNA sense strand
gcaggacggcaucuugcua

SEQ ID NO: 1943201 - RNA, 19 nt, Homo sapiens
  misc_RNA (1)...(19): siRNA sense strand
ggaguaauagaaucaauac

SEQ ID NO: 1943202 - RNA, 19 nt, Homo sapiens
  misc_RNA (1)...(19): siRNA sense strand
ccaaggacaaauaacauug

SEQ ID NO: 1943203 - RNA, 19 nt, Homo sapiens
  misc_RNA (1)...(19): siRNA sense strand
uugauaugcuggugaagaa

SEQ ID NO: 1943204 - RNA, 19 nt, Homo sapiens
  misc_RNA (1)...(19): siRNA sense strand
gucauuagucauaugcuua

SEQ ID NO: 1943205 - RNA, 19 nt, Homo sapiens
  misc_RNA (1)...(19): siRNA sense strand
ggacaagucagagaaagca

SEQ ID NO: 1943206 - RNA, 19 nt, Homo sapiens
  misc_RNA (1)...(19): siRNA sense strand
aaaugauccucuaccuauu

SEQ ID NO: 1943207 - RNA, 19 nt, Homo sapiens
  misc_RNA (1)...(19): siRNA sense strand
gaccaaagauggauuaaua

SEQ ID NO: 1943208 - RNA, 19 nt, Homo sapiens
  misc_RNA (1)...(19): siRNA sense strand
gcucuuagcuggugccaua

SEQ ID NO: 1943209 - RNA, 19 nt, Homo sapiens
  misc_RNA (1)...(19): siRNA sense strand
ugacaaagcuggcaaagga

SEQ ID NO: 1943210 - RNA, 19 nt, Homo sapiens
  misc_RNA (1)...(19): siRNA sense strand
ggauuuaauucgcuccuua

SEQ ID NO: 1943211 - RNA, 19 nt, Homo sapiens
  misc_RNA (1)...(19): siRNA sense strand
gaucagagccaguuccuaa

SEQ ID NO: 1943212 - RNA, 19 nt, Homo sapiens
  misc_RNA (1)...(19): siRNA sense strand
ugggagaacucauguauaa

SEQ ID NO: 1943213 - RNA, 19 nt, Homo sapiens
  misc_RNA (1)...(19): siRNA sense strand
caaguuaguuucuccuauu

SEQ ID NO: 1943214 - RNA, 19 nt, Homo sapiens
  misc_RNA (1)...(19): siRNA sense strand
ggagaaagccagccuaauc

SEQ ID NO: 1943215 - RNA, 19 nt, Homo sapiens
  misc_RNA (1)...(19): siRNA sense strand
gaaagauacugcgugaaga

SEQ ID NO: 1943216 - RNA, 19 nt, Homo sapiens
  misc_RNA (1)...(19): siRNA sense strand
caggaaagauguugaagug

SEQ ID NO: 1943217 - RNA, 19 nt, Homo sapiens
  misc_RNA (1)...(19): siRNA sense strand
ucaagaauuuguugccuuu

SEQ ID NO: 1943218 - RNA, 19 nt, Homo sapiens
  misc_RNA (1)...(19): siRNA sense strand
gugauagacugcuuuagaa

SEQ ID NO: 1943219 - RNA, 19 nt, Homo sapiens
  misc_RNA (1)...(19): siRNA sense strand
ggacagaccacaauucauc

SEQ ID NO: 1943220 - RNA, 19 nt, Homo sapiens
  misc_RNA (1)...(19): siRNA sense strand
uaacuuugcugacuuacga

SEQ ID NO: 1943221 - RNA, 19 nt, Homo sapiens
  misc_RNA (1)...(19): siRNA sense strand
acauggaacucauuagaaa

SEQ ID NO: 1943222 - RNA, 19 nt, Homo sapiens
  misc_RNA (1)...(19): siRNA sense strand
gaacucugcccuuuaacuu

SEQ ID NO: 1943223 - RNA, 19 nt, Homo sapiens
  misc_RNA (1)...(19): siRNA sense strand
caacauggaacucauuaga

SEQ ID NO: 1943224 - RNA, 19 nt, Homo sapiens
  misc_RNA (1)...(19): siRNA sense strand
gcaaguggcaggagaaauc

SEQ ID NO: 1943225 - RNA, 19 nt, Homo sapiens
  misc_RNA (1)...(19): siRNA sense strand
gaaauuuggucagguuaca

SEQ ID NO: 1943226 - RNA, 19 nt, Homo sapiens
  misc_RNA (1)...(19): siRNA sense strand
cauggaaguugacaucuug

SEQ ID NO: 1943227 - RNA, 19 nt, Homo sapiens
  misc_RNA (1)...(19): siRNA sense strand
ggaaguugacaucuuguuu

SEQ ID NO: 1943228 - RNA, 19 nt, Homo sapiens
  misc_RNA (1)...(19): siRNA sense strand
ucagaaauuuggucagguu

SEQ ID NO: 1943229 - RNA, 19 nt, Homo sapiens
  misc_RNA (1)...(19): siRNA sense strand
ggagugauagacugcuuua

SEQ ID NO: 1943230 - RNA, 19 nt, Homo sapiens
  misc_RNA (1)...(19): siRNA sense strand
gaccuuagcagacauugaa

SEQ ID NO: 1943231 - RNA, 19 nt, Homo sapiens
  misc_RNA (1)...(19): siRNA sense strand
aaagacaccugacauaugc

SEQ ID NO: 1943232 - RNA, 19 nt, Homo sapiens
  misc_RNA (1)...(19): siRNA sense strand
gaaagauguugaagugacu

SEQ ID NO: 1943233 - RNA, 19 nt, Homo sapiens
  misc_RNA (1)...(19): siRNA sense strand
cagaaggccucaggugauu

SEQ ID NO: 1943234 - RNA, 19 nt, Homo sapiens
  misc_RNA (1)...(19): siRNA sense strand
ugacaucuuguuucaguua

SEQ ID NO: 1943235 - RNA, 19 nt, Homo sapiens
  misc_RNA (1)...(19): siRNA sense strand
gaaguugacaucuuguuuc

SEQ ID NO: 1943236 - RNA, 19 nt, Homo sapiens
  misc_RNA (1)...(19): siRNA sense strand
guguaacuuugcugacuua

SEQ ID NO: 1943237 - RNA, 19 nt, Homo sapiens
  misc_RNA (1)...(19): siRNA sense strand
ccacugcuguguauccuau

SEQ ID NO: 1943238 - RNA, 19 nt, Homo sapiens
  misc_RNA (1)...(19): siRNA sense strand
agaaagugcuacgcuauga

SEQ ID NO: 1943239 - RNA, 19 nt, Homo sapiens
  misc_RNA (1)...(19): siRNA sense strand
gauacugcgugaagaagga

SEQ ID NO: 1943240 - RNA, 19 nt, Homo sapiens
  misc_RNA (1)...(19): siRNA sense strand
gagaaggccauaaaacuua

SEQ ID NO: 1943241 - RNA, 19 nt, Homo sapiens
  misc_RNA (1)...(19): siRNA sense strand
ugauucagcucgaccaguu

SEQ ID NO: 1943242 - RNA, 19 nt, Homo sapiens
  misc_RNA (1)...(19): siRNA sense strand
cuacaagggugccaaagca

SEQ ID NO: 1943243 - RNA, 19 nt, Homo sapiens
  misc_RNA (1)...(19): siRNA sense strand
cacaaauccuuuagaaauc

SEQ ID NO: 1943244 - RNA, 19 nt, Homo sapiens
  misc_RNA (1)...(19): siRNA sense strand
gaccaguucuucuacaagu

SEQ ID NO: 1943245 - RNA, 19 nt, Homo sapiens
  misc_RNA (1)...(19): siRNA sense strand
caagauccguuugcaagug

SEQ ID NO: 1943246 - RNA, 19 nt, Homo sapiens
  misc_RNA (1)...(19): siRNA sense strand
cagcgaugguucuacauug

SEQ ID NO: 1943247 - RNA, 19 nt, Homo sapiens
  misc_RNA (1)...(19): siRNA sense strand
guugacaucuuguuucagu

SEQ ID NO: 1943248 - RNA, 19 nt, Homo sapiens
  misc_RNA (1)...(19): siRNA sense strand
gcagaaggccucaggugau

SEQ ID NO: 1943249 - RNA, 19 nt, Homo sapiens
  misc_RNA (1)...(19): siRNA sense strand
uaaguggagugguggauca

SEQ ID NO: 1943250 - RNA, 19 nt, Homo sapiens
  misc_RNA (1)...(19): siRNA sense strand
ccacaauucaucaacauau

SEQ ID NO: 1943251 - RNA, 19 nt, Homo sapiens
  misc_RNA (1)...(19): siRNA sense strand
cuacagcgaugguucuaca

SEQ ID NO: 1943252 - RNA, 19 nt, Homo sapiens
  misc_RNA (1)...(19): siRNA sense strand
gaauuugugcaacuacauu

SEQ ID NO: 1943253 - RNA, 19 nt, Homo sapiens
  misc_RNA (1)...(19): siRNA sense strand
ccugacauaugcggaauuu

SEQ ID NO: 1943254 - RNA, 19 nt, Homo sapiens
  misc_RNA (1)...(19): siRNA sense strand
caaauuuggacuuuaccua

SEQ ID NO: 1943255 - RNA, 19 nt, Homo sapiens
  misc_RNA (1)...(19): siRNA sense strand
ggagaacucauguauaaaa

SEQ ID NO: 1943256 - RNA, 19 nt, Homo sapiens
  misc_RNA (1)...(19): siRNA sense strand
acucgauacuugaacauuu

SEQ ID NO: 1943257 - RNA, 19 nt, Homo sapiens
  misc_RNA (1)...(19): siRNA sense strand
gaccacaauucaucaacau

SEQ ID NO: 1943258 - RNA, 19 nt, Homo sapiens
  misc_RNA (1)...(19): siRNA sense strand
ccacaguuauugggaguug

SEQ ID NO: 1943259 - RNA, 19 nt, Homo sapiens
  misc_RNA (1)...(19): siRNA sense strand
aagaauuuguugccuuuga

SEQ ID NO: 1943260 - RNA, 19 nt, Homo sapiens
  misc_RNA (1)...(19): siRNA sense strand
gaaagugcuacgcuaugaa

SEQ ID NO: 1943261 - RNA, 19 nt, Homo sapiens
  misc_RNA (1)...(19): siRNA sense strand
uaacaacauggaacucauu

SEQ ID NO: 1943262 - RNA, 19 nt, Homo sapiens
  misc_RNA (1)...(19): siRNA sense strand
gggcuggccaaaccacuua

SEQ ID NO: 1943263 - RNA, 19 nt, Homo sapiens
  misc_RNA (1)...(19): siRNA sense strand
gaaagccagccuaauccaa

SEQ ID NO: 1943264 - RNA, 19 nt, Homo sapiens
  misc_RNA (1)...(19): siRNA sense strand
ugacauaugcggaauuuac

SEQ ID NO: 1943265 - RNA, 19 nt, Homo sapiens
  misc_RNA (1)...(19): siRNA sense strand
aaacuuacagugaacgauu

SEQ ID NO: 1943266 - RNA, 19 nt, Homo sapiens
  misc_RNA (1)...(19): siRNA sense strand
uaagaaagugcuacgcuau

SEQ ID NO: 1943267 - RNA, 19 nt, Homo sapiens
  misc_RNA (1)...(19): siRNA sense strand
ggauugcuccucuggaaga

SEQ ID NO: 1943268 - RNA, 19 nt, Homo sapiens
  misc_RNA (1)...(19): siRNA sense strand
guuagcagauuuauaugag

SEQ ID NO: 1943269 - RNA, 19 nt, Homo sapiens
  misc_RNA (1)...(19): siRNA sense strand
ccauggaaguugacaucuu

SEQ ID NO: 1943270 - RNA, 19 nt, Homo sapiens
  misc_RNA (1)...(19): siRNA sense strand
ucaaguuaguuucuccuau

SEQ ID NO: 1943271 - RNA, 19 nt, Homo sapiens
  misc_RNA (1)...(19): siRNA sense strand
gguguaacuuugcugacuu

SEQ ID NO: 1943272 - RNA, 19 nt, Homo sapiens
  misc_RNA (1)...(19): siRNA sense strand
uuaccuaccucucuucaag

SEQ ID NO: 1943273 - RNA, 19 nt, Homo sapiens
  misc_RNA (1)...(19): siRNA sense strand
ggaacucauuagaaagauc

SEQ ID NO: 1943274 - RNA, 19 nt, Homo sapiens
  misc_RNA (1)...(19): siRNA sense strand
ucagaccaaagauggauua

SEQ ID NO: 1943275 - RNA, 19 nt, Homo sapiens
  misc_RNA (1)...(19): siRNA sense strand
aaaugaagaugggcagguu

SEQ ID NO: 1943276 - RNA, 19 nt, Homo sapiens
  misc_RNA (1)...(19): siRNA sense strand
agaagaaugucuaguagcu

SEQ ID NO: 1943277 - RNA, 19 nt, Homo sapiens
  misc_RNA (1)...(19): siRNA sense strand
gugcuaugcucaugugaag

SEQ ID NO: 1943278 - RNA, 19 nt, Homo sapiens
  misc_RNA (1)...(19): siRNA sense strand
ccauaaaacuuacagugaa

SEQ ID NO: 1943279 - RNA, 19 nt, Homo sapiens
  misc_RNA (1)...(19): siRNA sense strand
agaauuuguugccuuugaa

SEQ ID NO: 1943280 - RNA, 19 nt, Homo sapiens
  misc_RNA (1)...(19): siRNA sense strand
uuacacccauggaaguuga

SEQ ID NO: 1943281 - RNA, 19 nt, Homo sapiens
  misc_RNA (1)...(19): siRNA sense strand
gaacucauuagaaagaucu

SEQ ID NO: 1943282 - RNA, 19 nt, Homo sapiens
  misc_RNA (1)...(19): siRNA sense strand
ggacuuuaccuaccucucu

SEQ ID NO: 1943283 - RNA, 19 nt, Homo sapiens
  misc_RNA (1)...(19): siRNA sense strand
cgaugguucuacauugauu

SEQ ID NO: 1943284 - RNA, 19 nt, Homo sapiens
  misc_RNA (1)...(19): siRNA sense strand
gaaggccucaggugauuca

SEQ ID NO: 1943285 - RNA, 19 nt, Homo sapiens
  misc_RNA (1)...(19): siRNA sense strand
ugacuaaggaggaguuugu

SEQ ID NO: 1943286 - RNA, 19 nt, Homo sapiens
  misc_RNA (1)...(19): siRNA sense strand
uaccacaucccaucaaguu

SEQ ID NO: 1943287 - RNA, 19 nt, Homo sapiens
  misc_RNA (1)...(19): siRNA sense strand
aaagauacugcgugaagaa

SEQ ID NO: 1943288 - RNA, 19 nt, Homo sapiens
  misc_RNA (1)...(19): siRNA sense strand
ccaaagauggauuaauauc

SEQ ID NO: 1943289 - RNA, 19 nt, Homo sapiens
  misc_RNA (1)...(19): siRNA sense strand
aaagccagccuaauccaaa

SEQ ID NO: 1943290 - RNA, 19 nt, Homo sapiens
  misc_RNA (1)...(19): siRNA sense strand
ccacaucccaucaaguuag

SEQ ID NO: 1943291 - RNA, 19 nt, Homo sapiens
  misc_RNA (1)...(19): siRNA sense strand
cguaugaccuuagcagaca

SEQ ID NO: 1943292 - RNA, 19 nt, Homo sapiens
  misc_RNA (1)...(19): siRNA sense strand
ccuuucagcuguuugacaa

SEQ ID NO: 1943293 - RNA, 19 nt, Homo sapiens
  misc_RNA (1)...(19): siRNA sense strand
uauccuaucgaucuuguaa

SEQ ID NO: 1943294 - RNA, 19 nt, Homo sapiens
  misc_RNA (1)...(19): siRNA sense strand
gaucuacaagggugccaaa

SEQ ID NO: 1943295 - RNA, 19 nt, Homo sapiens
  misc_RNA (1)...(19): siRNA sense strand
cagagccaguuccuaaauc

SEQ ID NO: 1943296 - RNA, 19 nt, Homo sapiens
  misc_RNA (1)...(19): siRNA sense strand
agaaagauacugcgugaag

SEQ ID NO: 1943297 - RNA, 19 nt, Homo sapiens
  misc_RNA (1)...(19): siRNA sense strand
gaggauguuaagcaaguuu

SEQ ID NO: 1943298 - RNA, 19 nt, Homo sapiens
  misc_RNA (1)...(19): siRNA sense strand
gacuuuaccuaccucucuu

SEQ ID NO: 1943299 - RNA, 19 nt, Homo sapiens
  misc_RNA (1)...(19): siRNA sense strand
aggcuuccuuugcaaauga

SEQ ID NO: 1943300 - RNA, 19 nt, Homo sapiens
  misc_RNA (1)...(19): siRNA sense strand
ccaucuacuuuccgugcua

SEQ ID NO: 1943301 - RNA, 19 nt, Homo sapiens
  misc_RNA (1)...(19): siRNA sense strand
gcaccaggaaagauguuga

SEQ ID NO: 1943302 - RNA, 19 nt, Homo sapiens
  misc_RNA (1)...(19): siRNA sense strand
gguagccuuucagcuguuu

SEQ ID NO: 1943303 - RNA, 19 nt, Homo sapiens
  misc_RNA (1)...(19): siRNA sense strand
cagaauuugugcaacuaca

SEQ ID NO: 1943304 - RNA, 19 nt, Homo sapiens
  misc_RNA (1)...(19): siRNA sense strand
cuuuagaaaucgucaagau

SEQ ID NO: 1943305 - RNA, 19 nt, Homo sapiens
  misc_RNA (1)...(19): siRNA sense strand
uuugcugacuuacgaauug

SEQ ID NO: 1943306 - RNA, 19 nt, Homo sapiens
  misc_RNA (1)...(19): siRNA sense strand
gauguuaucaagacgagau

SEQ ID NO: 1943307 - RNA, 19 nt, Homo sapiens
  misc_RNA (1)...(19): siRNA sense strand
ggaaaugccugcacagaua

SEQ ID NO: 1943308 - RNA, 19 nt, Homo sapiens
  misc_RNA (1)...(19): siRNA sense strand
ggaagaacaugguuaggaa

SEQ ID NO: 1943309 - RNA, 19 nt, Homo sapiens
  misc_RNA (1)...(19): siRNA sense strand
ggagggaagaacaugguua

SEQ ID NO: 1943310 - RNA, 19 nt, Homo sapiens
  misc_RNA (1)...(19): siRNA sense strand
gaaugucacaaguguauau

SEQ ID NO: 1943311 - RNA, 19 nt, Homo sapiens
  misc_RNA (1)...(19): siRNA sense strand
gaagaacaugguuaggaaa

SEQ ID NO: 1943312 - RNA, 19 nt, Homo sapiens
  misc_RNA (1)...(19): siRNA sense strand
gaaauggacacggaccaaa

SEQ ID NO: 1943313 - RNA, 19 nt, Homo sapiens
  misc_RNA (1)...(19): siRNA sense strand
cauguaagccucucugaau

SEQ ID NO: 1943314 - RNA, 19 nt, Homo sapiens
  misc_RNA (1)...(19): siRNA sense strand
gcacagauagucaaaauag

SEQ ID NO: 1943315 - RNA, 19 nt, Homo sapiens
  misc_RNA (1)...(19): siRNA sense strand
gggaagaacaugguuagga

SEQ ID NO: 1943316 - RNA, 19 nt, Homo sapiens
  misc_RNA (1)...(19): siRNA sense strand
gaaaugccugcacagauag

SEQ ID NO: 1943317 - RNA, 19 nt, Homo sapiens
  misc_RNA (1)...(19): siRNA sense strand
gaaguuaggggaaauggaa

SEQ ID NO: 1943318 - RNA, 19 nt, Homo sapiens
  misc_RNA (1)...(19): siRNA sense strand
gaacaugguuaggaaaaca

SEQ ID NO: 1943319 - RNA, 19 nt, Homo sapiens
  misc_RNA (1)...(19): siRNA sense strand
gacugucuauuccacauca

SEQ ID NO: 1943320 - RNA, 19 nt, Homo sapiens
  misc_RNA (1)...(19): siRNA sense strand
gagggaagaacaugguuag

SEQ ID NO: 1943321 - RNA, 19 nt, Homo sapiens
  misc_RNA (1)...(19): siRNA sense strand
guaagccucucugaauguc

SEQ ID NO: 1943322 - RNA, 19 nt, Homo sapiens
  misc_RNA (1)...(19): siRNA sense strand
cugaaugucacaaguguau

SEQ ID NO: 1943323 - RNA, 19 nt, Homo sapiens
  misc_RNA (1)...(19): siRNA sense strand
guaccgagcucuccugcua

SEQ ID NO: 1943324 - RNA, 19 nt, Homo sapiens
  misc_RNA (1)...(19): siRNA sense strand
aaacagcucucguggcaaa

SEQ ID NO: 1943325 - RNA, 19 nt, Homo sapiens
  misc_RNA (1)...(19): siRNA sense strand
ucuauuaucuccaucuuug

SEQ ID NO: 1943326 - RNA, 19 nt, Homo sapiens
  misc_RNA (1)...(19): siRNA sense strand
ucagugagauucaguugau

SEQ ID NO: 1943327 - RNA, 19 nt, Homo sapiens
  misc_RNA (1)...(19): siRNA sense strand
cugaagagcccaucaagga

SEQ ID NO: 1943328 - RNA, 19 nt, Homo sapiens
  misc_RNA (1)...(19): siRNA sense strand
gcaaaucagagaagcuugu

SEQ ID NO: 1943329 - RNA, 19 nt, Homo sapiens
  misc_RNA (1)...(19): siRNA sense strand
gagcaagaaagccaagaga

SEQ ID NO: 1943330 - RNA, 19 nt, Homo sapiens
  misc_RNA (1)...(19): siRNA sense strand
cagcgacgauggagaagag

SEQ ID NO: 1943331 - RNA, 19 nt, Homo sapiens
  misc_RNA (1)...(19): siRNA sense strand
ggucuauuaucuccaucuu

SEQ ID NO: 1943332 - RNA, 19 nt, Homo sapiens
  misc_RNA (1)...(19): siRNA sense strand
gccuugugcuggaaaguga

SEQ ID NO: 1943333 - RNA, 19 nt, Homo sapiens
  misc_RNA (1)...(19): siRNA sense strand
ucccaugggucuauuaucu

SEQ ID NO: 1943334 - RNA, 19 nt, Homo sapiens
  misc_RNA (1)...(19): siRNA sense strand
agacaaaggagcaagaaag

SEQ ID NO: 1943335 - RNA, 19 nt, Homo sapiens
  misc_RNA (1)...(19): siRNA sense strand
gagacaaaggagcaagaaa

SEQ ID NO: 1943336 - RNA, 19 nt, Homo sapiens
  misc_RNA (1)...(19): siRNA sense strand
ccaagagacgggagaguca

SEQ ID NO: 1943337 - RNA, 19 nt, Homo sapiens
  misc_RNA (1)...(19): siRNA sense strand
guucugucaucuggacuuu

SEQ ID NO: 1943338 - RNA, 19 nt, Homo sapiens
  misc_RNA (1)...(19): siRNA sense strand
gcuggaaagugagacaaag

SEQ ID NO: 1943339 - RNA, 19 nt, Homo sapiens
  misc_RNA (1)...(19): siRNA sense strand
caagagugaaguugugauc

SEQ ID NO: 1943340 - RNA, 19 nt, Homo sapiens
  misc_RNA (1)...(19): siRNA sense strand
ggucagugagauucaguug

SEQ ID NO: 1943341 - RNA, 19 nt, Homo sapiens
  misc_RNA (1)...(19): siRNA sense strand
cagcucucguggcaaauca

SEQ ID NO: 1943342 - RNA, 19 nt, Homo sapiens
  misc_RNA (1)...(19): siRNA sense strand
ucaauucccaugggucuau

SEQ ID NO: 1943343 - RNA, 19 nt, Homo sapiens
  misc_RNA (1)...(19): siRNA sense strand
uggcagcgacgauggagaa

SEQ ID NO: 1943344 - RNA, 19 nt, Homo sapiens
  misc_RNA (1)...(19): siRNA sense strand
gacaaaggagcaagaaagc

SEQ ID NO: 1943345 - RNA, 19 nt, Homo sapiens
  misc_RNA (1)...(19): siRNA sense strand
caauucccaugggucuauu

SEQ ID NO: 1943346 - RNA, 19 nt, Homo sapiens
  misc_RNA (1)...(19): siRNA sense strand
uggcuuacagcuucaauuc

SEQ ID NO: 1943347 - RNA, 19 nt, Homo sapiens
  misc_RNA (1)...(19): siRNA sense strand
cagucccucuggucaguga

SEQ ID NO: 1943348 - RNA, 19 nt, Homo sapiens
  misc_RNA (1)...(19): siRNA sense strand
ggagcaagaaagccaagag

SEQ ID NO: 1943349 - RNA, 19 nt, Homo sapiens
  misc_RNA (1)...(19): siRNA sense strand
gaacaacucuuggaauuua

SEQ ID NO: 1943350 - RNA, 19 nt, Homo sapiens
  misc_RNA (1)...(19): siRNA sense strand
ggaagagcauucaguagua

SEQ ID NO: 1943351 - RNA, 19 nt, Homo sapiens
  misc_RNA (1)...(19): siRNA sense strand
gaucauagcacaaaguaua

SEQ ID NO: 1943352 - RNA, 19 nt, Homo sapiens
  misc_RNA (1)...(19): siRNA sense strand
ggacaaagaauacaugaaa

SEQ ID NO: 1943353 - RNA, 19 nt, Homo sapiens
  misc_RNA (1)...(19): siRNA sense strand
ucaaguggcucccaugaua

SEQ ID NO: 1943354 - RNA, 19 nt, Homo sapiens
  misc_RNA (1)...(19): siRNA sense strand
ggagaaacuucccaauaaa

SEQ ID NO: 1943355 - RNA, 19 nt, Homo sapiens
  misc_RNA (1)...(19): siRNA sense strand
ggaugaagaugaacaaguu

SEQ ID NO: 1943356 - RNA, 19 nt, Homo sapiens
  misc_RNA (1)...(19): siRNA sense strand
gaaacaggcugaagauaca

SEQ ID NO: 1943357 - RNA, 19 nt, Homo sapiens
  misc_RNA (1)...(19): siRNA sense strand
ggaagaaagugcccguaaa

SEQ ID NO: 1943358 - RNA, 19 nt, Homo sapiens
  misc_RNA (1)...(19): siRNA sense strand
gaagagauuugaagaaguc

SEQ ID NO: 1943359 - RNA, 19 nt, Homo sapiens
  misc_RNA (1)...(19): siRNA sense strand
ggaaagagcagggaccaua

SEQ ID NO: 1943360 - RNA, 19 nt, Homo sapiens
  misc_RNA (1)...(19): siRNA sense strand
caaaggaaguggucauuca

SEQ ID NO: 1943361 - RNA, 19 nt, Homo sapiens
  misc_RNA (1)...(19): siRNA sense strand
gauugaaccugaucaguau

SEQ ID NO: 1943362 - RNA, 19 nt, Homo sapiens
  misc_RNA (1)...(19): siRNA sense strand
caagauuacugccguauuc

SEQ ID NO: 1943363 - RNA, 19 nt, Homo sapiens
  misc_RNA (1)...(19): siRNA sense strand
ccacagaguucuccaagga

SEQ ID NO: 1943364 - RNA, 19 nt, Homo sapiens
  misc_RNA (1)...(19): siRNA sense strand
caaagccgcuacaucauga

SEQ ID NO: 1943365 - RNA, 19 nt, Homo sapiens
  misc_RNA (1)...(19): siRNA sense strand
gaaagaacaccgagaacuu

SEQ ID NO: 1943366 - RNA, 19 nt, Homo sapiens
  misc_RNA (1)...(19): siRNA sense strand
gcagggacauugugagaga

SEQ ID NO: 1943367 - RNA, 19 nt, Homo sapiens
  misc_RNA (1)...(19): siRNA sense strand
ggacagaugaugacauuga

SEQ ID NO: 1943368 - RNA, 19 nt, Homo sapiens
  misc_RNA (1)...(19): siRNA sense strand
gcagcagucuuucugauau

SEQ ID NO: 1943369 - RNA, 19 nt, Homo sapiens
  misc_RNA (1)...(19): siRNA sense strand
gaucagcuuuccaaacuug

SEQ ID NO: 1943370 - RNA, 19 nt, Homo sapiens
  misc_RNA (1)...(19): siRNA sense strand
cagaaaccauacaaugaua

SEQ ID NO: 1943371 - RNA, 19 nt, Homo sapiens
  misc_RNA (1)...(19): siRNA sense strand
ggaccauaguguuaaauga

SEQ ID NO: 1943372 - RNA, 19 nt, Homo sapiens
  misc_RNA (1)...(19): siRNA sense strand
uaagaauccuggugacaaa

SEQ ID NO: 1943373 - RNA, 19 nt, Homo sapiens
  misc_RNA (1)...(19): siRNA sense strand
gcacugcacuguagggaau

SEQ ID NO: 1943374 - RNA, 19 nt, Homo sapiens
  misc_RNA (1)...(19): siRNA sense strand
gcauagcccagcaagauua

SEQ ID NO: 1943375 - RNA, 19 nt, Homo sapiens
  misc_RNA (1)...(19): siRNA sense strand
uagacgggcuggucaauuu

SEQ ID NO: 1943376 - RNA, 19 nt, Homo sapiens
  misc_RNA (1)...(19): siRNA sense strand
gagaagcuccuuugccuuu

SEQ ID NO: 1943377 - RNA, 19 nt, Homo sapiens
  misc_RNA (1)...(19): siRNA sense strand
guaauguucucaauaguca

SEQ ID NO: 1943378 - RNA, 19 nt, Homo sapiens
  misc_RNA (1)...(19): siRNA sense strand
ucagacagguggucauaaa

SEQ ID NO: 1943379 - RNA, 19 nt, Homo sapiens
  misc_RNA (1)...(19): siRNA sense strand
gaaacucuuuguucagaug

SEQ ID NO: 1943380 - RNA, 19 nt, Homo sapiens
  misc_RNA (1)...(19): siRNA sense strand
ggaucaauauucacuaugu

SEQ ID NO: 1943381 - RNA, 19 nt, Homo sapiens
  misc_RNA (1)...(19): siRNA sense strand
ccagaaacauggcaaaaua

SEQ ID NO: 1943382 - RNA, 19 nt, Homo sapiens
  misc_RNA (1)...(19): siRNA sense strand
gaaacaaaccagcugaaga

SEQ ID NO: 1943383 - RNA, 19 nt, Homo sapiens
  misc_RNA (1)...(19): siRNA sense strand
ucagaaagguuaacaaugc

SEQ ID NO: 1943384 - RNA, 19 nt, Homo sapiens
  misc_RNA (1)...(19): siRNA sense strand
ggccgaggcuuauaugcua

SEQ ID NO: 1943385 - RNA, 19 nt, Homo sapiens
  misc_RNA (1)...(19): siRNA sense strand
caaaccagcugaagaggau

SEQ ID NO: 1943386 - RNA, 19 nt, Homo sapiens
  misc_RNA (1)...(19): siRNA sense strand
gaagauugaugacguuaac

SEQ ID NO: 1943387 - RNA, 19 nt, Homo sapiens
  misc_RNA (1)...(19): siRNA sense strand
gcagucacaucaucgcauu

SEQ ID NO: 1943388 - RNA, 19 nt, Homo sapiens
  misc_RNA (1)...(19): siRNA sense strand
gcaguaccuuuccaauuug

SEQ ID NO: 1943389 - RNA, 19 nt, Homo sapiens
  misc_RNA (1)...(19): siRNA sense strand
ggaaaugacucaaaaguag

SEQ ID NO: 1943390 - RNA, 19 nt, Homo sapiens
  misc_RNA (1)...(19): siRNA sense strand
gcagacagaauacaacuga

SEQ ID NO: 1943391 - RNA, 19 nt, Homo sapiens
  misc_RNA (1)...(19): siRNA sense strand
ggaguaaucaaacaaagaa

SEQ ID NO: 1943392 - RNA, 19 nt, Homo sapiens
  misc_RNA (1)...(19): siRNA sense strand
cagcaaagccgcuacauca

SEQ ID NO: 1943393 - RNA, 19 nt, Homo sapiens
  misc_RNA (1)...(19): siRNA sense strand
gaaagugcccguaaaggau

SEQ ID NO: 1943394 - RNA, 19 nt, Homo sapiens
  misc_RNA (1)...(19): siRNA sense strand
agcaguaccuuuccaauuu

SEQ ID NO: 1943395 - RNA, 19 nt, Homo sapiens
  misc_RNA (1)...(19): siRNA sense strand
gcucagcacuguggaaguu

SEQ ID NO: 1943396 - RNA, 19 nt, Homo sapiens
  misc_RNA (1)...(19): siRNA sense strand
gaggaaggagagauuguua

SEQ ID NO: 1943397 - RNA, 19 nt, Homo sapiens
  misc_RNA (1)...(19): siRNA sense strand
caacguggcccuucagaga

SEQ ID NO: 1943398 - RNA, 19 nt, Homo sapiens
  misc_RNA (1)...(19): siRNA sense strand
gaucaagugcuaaggguuu

SEQ ID NO: 1943399 - RNA, 19 nt, Homo sapiens
  misc_RNA (1)...(19): siRNA sense strand
gugccaaccugaagagauu

SEQ ID NO: 1943400 - RNA, 19 nt, Homo sapiens
  misc_RNA (1)...(19): siRNA sense strand
gugguacuguggauaauuu

SEQ ID NO: 1943401 - RNA, 19 nt, Homo sapiens
  misc_RNA (1)...(19): siRNA sense strand
cgagaacucugugcuguga

SEQ ID NO: 1943402 - RNA, 19 nt, Homo sapiens
  misc_RNA (1)...(19): siRNA sense strand
gcaguagccuaacgucugu

SEQ ID NO: 1943403 - RNA, 19 nt, Homo sapiens
  misc_RNA (1)...(19): siRNA sense strand
gaagaaagugcccguaaag

SEQ ID NO: 1943404 - RNA, 19 nt, Homo sapiens
  misc_RNA (1)...(19): siRNA sense strand
cauuaucucugcaguguga

SEQ ID NO: 1943405 - RNA, 19 nt, Homo sapiens
  misc_RNA (1)...(19): siRNA sense strand
gacauuaucucugcagugu

SEQ ID NO: 1943406 - RNA, 19 nt, Homo sapiens
  misc_RNA (1)...(19): siRNA sense strand
cagaaacucuuuguucaga

SEQ ID NO: 1943407 - RNA, 19 nt, Homo sapiens
  misc_RNA (1)...(19): siRNA sense strand
ccacagaaaccauacaaug

SEQ ID NO: 1943408 - RNA, 19 nt, Homo sapiens
  misc_RNA (1)...(19): siRNA sense strand
gauccaacauucauagaag

SEQ ID NO: 1943409 - RNA, 19 nt, Homo sapiens
  misc_RNA (1)...(19): siRNA sense strand
cgaggaggaugaagaugaa

SEQ ID NO: 1943410 - RNA, 19 nt, Homo sapiens
  misc_RNA (1)...(19): siRNA sense strand
cauugaaccuacugaauau

SEQ ID NO: 1943411 - RNA, 19 nt, Homo sapiens
  misc_RNA (1)...(19): siRNA sense strand
caaacuugcagacagaaua

SEQ ID NO: 1943412 - RNA, 19 nt, Homo sapiens
  misc_RNA (1)...(19): siRNA sense strand
gcaaagccgcuacaucaug

SEQ ID NO: 1943413 - RNA, 19 nt, Homo sapiens
  misc_RNA (1)...(19): siRNA sense strand
guaguauuauuguggguaa

SEQ ID NO: 1943414 - RNA, 19 nt, Homo sapiens
  misc_RNA (1)...(19): siRNA sense strand
gaagagcauucaguaguag

SEQ ID NO: 1943415 - RNA, 19 nt, Homo sapiens
  misc_RNA (1)...(19): siRNA sense strand
ggcauacucacuuugauua

SEQ ID NO: 1943416 - RNA, 19 nt, Homo sapiens
  misc_RNA (1)...(19): siRNA sense strand
cagaucagcuuuccaaacu

SEQ ID NO: 1943417 - RNA, 19 nt, Homo sapiens
  misc_RNA (1)...(19): siRNA sense strand
gcacaucccaacugcauug

SEQ ID NO: 1943418 - RNA, 19 nt, Homo sapiens
  misc_RNA (1)...(19): siRNA sense strand
caccuaaggcuguugaaua

SEQ ID NO: 1943419 - RNA, 19 nt, Homo sapiens
  misc_RNA (1)...(19): siRNA sense strand
ggucagugauucucaaugg

SEQ ID NO: 1943420 - RNA, 19 nt, Homo sapiens
  misc_RNA (1)...(19): siRNA sense strand
acaaguuucugcuguuuga

SEQ ID NO: 1943421 - RNA, 19 nt, Homo sapiens
  misc_RNA (1)...(19): siRNA sense strand
cagcaggccugugaacaaa

SEQ ID NO: 1943422 - RNA, 19 nt, Homo sapiens
  misc_RNA (1)...(19): siRNA sense strand
gcuguggcaucaaguacua

SEQ ID NO: 1943423 - RNA, 19 nt, Homo sapiens
  misc_RNA (1)...(19): siRNA sense strand
uggaagguauuaucugaaa

SEQ ID NO: 1943424 - RNA, 19 nt, Homo sapiens
  misc_RNA (1)...(19): siRNA sense strand
guaaggacacuacagcaaa

SEQ ID NO: 1943425 - RNA, 19 nt, Homo sapiens
  misc_RNA (1)...(19): siRNA sense strand
gaacuugaucgaacuggaa

SEQ ID NO: 1943426 - RNA, 19 nt, Homo sapiens
  misc_RNA (1)...(19): siRNA sense strand
ggaaggagagauuguuaug

SEQ ID NO: 1943427 - RNA, 19 nt, Homo sapiens
  misc_RNA (1)...(19): siRNA sense strand
gacagaugaugacauugaa

SEQ ID NO: 1943428 - RNA, 19 nt, Homo sapiens
  misc_RNA (1)...(19): siRNA sense strand
ggcauaaacucuccacaag

SEQ ID NO: 1943429 - RNA, 19 nt, Homo sapiens
  misc_RNA (1)...(19): siRNA sense strand
ccaaauggcucgaaaagug

SEQ ID NO: 1943430 - RNA, 19 nt, Homo sapiens
  misc_RNA (1)...(19): siRNA sense strand
aagaagaaauggcggaguu

SEQ ID NO: 1943431 - RNA, 19 nt, Homo sapiens
  misc_RNA (1)...(19): siRNA sense strand
gaagaucauuaagcauuuc

SEQ ID NO: 1943432 - RNA, 19 nt, Homo sapiens
  misc_RNA (1)...(19): siRNA sense strand
gacccgagccucagggaua

SEQ ID NO: 1943433 - RNA, 19 nt, Homo sapiens
  misc_RNA (1)...(19): siRNA sense strand
caucaaggguaccucagaa

SEQ ID NO: 1943434 - RNA, 19 nt, Homo sapiens
  misc_RNA (1)...(19): siRNA sense strand
uugaacaacucuuggaauu

SEQ ID NO: 1943435 - RNA, 19 nt, Homo sapiens
  misc_RNA (1)...(19): siRNA sense strand
ccggacagaugaugacauu

SEQ ID NO: 1943436 - RNA, 19 nt, Homo sapiens
  misc_RNA (1)...(19): siRNA sense strand
cgacacagcugggccuuca

SEQ ID NO: 1943437 - RNA, 19 nt, Homo sapiens
  misc_RNA (1)...(19): siRNA sense strand
acauugaaccuacugaaua

SEQ ID NO: 1943438 - RNA, 19 nt, Homo sapiens
  misc_RNA (1)...(19): siRNA sense strand
ggaaccuuaucauccagua

SEQ ID NO: 1943439 - RNA, 19 nt, Homo sapiens
  misc_RNA (1)...(19): siRNA sense strand
caauggaucuguggaagug

SEQ ID NO: 1943440 - RNA, 19 nt, Homo sapiens
  misc_RNA (1)...(19): siRNA sense strand
caacauucauagaagacuu

SEQ ID NO: 1943441 - RNA, 19 nt, Homo sapiens
  misc_RNA (1)...(19): siRNA sense strand
gagaaacuucccaauaaau

SEQ ID NO: 1943442 - RNA, 19 nt, Homo sapiens
  misc_RNA (1)...(19): siRNA sense strand
ggaaacagaaacucuuugu

SEQ ID NO: 1943443 - RNA, 19 nt, Homo sapiens
  misc_RNA (1)...(19): siRNA sense strand
gagcagcagucuuucugau

SEQ ID NO: 1943444 - RNA, 19 nt, Homo sapiens
  misc_RNA (1)...(19): siRNA sense strand
gacaagacucggaucagua

SEQ ID NO: 1943445 - RNA, 19 nt, Homo sapiens
  misc_RNA (1)...(19): siRNA sense strand
gaacaggugauaggacuug

SEQ ID NO: 1943446 - RNA, 19 nt, Homo sapiens
  misc_RNA (1)...(19): siRNA sense strand
gagaagcuaaggaugauug

SEQ ID NO: 1943447 - RNA, 19 nt, Homo sapiens
  misc_RNA (1)...(19): siRNA sense strand
gauccaguauuguuagcaa

SEQ ID NO: 1943448 - RNA, 19 nt, Homo sapiens
  misc_RNA (1)...(19): siRNA sense strand
uuaugaagaugcccaaaug

SEQ ID NO: 1943449 - RNA, 19 nt, Homo sapiens
  misc_RNA (1)...(19): siRNA sense strand
guacuaaauucucacacau

SEQ ID NO: 1943450 - RNA, 19 nt, Homo sapiens
  misc_RNA (1)...(19): siRNA sense strand
gguacuaaauucucacaca

SEQ ID NO: 1943451 - RNA, 19 nt, Homo sapiens
  misc_RNA (1)...(19): siRNA sense strand
ugccuauacucacgcauaa

SEQ ID NO: 1943452 - RNA, 19 nt, Homo sapiens
  misc_RNA (1)...(19): siRNA sense strand
ucccaagaauuacuauuuc

SEQ ID NO: 1943453 - RNA, 19 nt, Homo sapiens
  misc_RNA (1)...(19): siRNA sense strand
acacggcauuugguacuaa

SEQ ID NO: 1943454 - RNA, 19 nt, Homo sapiens
  misc_RNA (1)...(19): siRNA sense strand
guuaacacggcauuuggua

SEQ ID NO: 1943455 - RNA, 19 nt, Homo sapiens
  misc_RNA (1)...(19): siRNA sense strand
cccaagaauuacuauuuca

SEQ ID NO: 1943456 - RNA, 19 nt, Homo sapiens
  misc_RNA (1)...(19): siRNA sense strand
uaaauucucacacauaagc

SEQ ID NO: 1943457 - RNA, 19 nt, Homo sapiens
  misc_RNA (1)...(19): siRNA sense strand
uaacacggcauuugguacu

SEQ ID NO: 1943458 - RNA, 19 nt, Homo sapiens
  misc_RNA (1)...(19): siRNA sense strand
gaaucucccaaaugccuau

SEQ ID NO: 1943459 - RNA, 19 nt, Homo sapiens
  misc_RNA (1)...(19): siRNA sense strand
cacggcauuugguacuaaa

SEQ ID NO: 1943460 - RNA, 19 nt, Homo sapiens
  misc_RNA (1)...(19): siRNA sense strand
ucccaaaugccuauacuca

SEQ ID NO: 1943461 - RNA, 19 nt, Homo sapiens
  misc_RNA (1)...(19): siRNA sense strand
caaagugucuccucgguaa

SEQ ID NO: 1943462 - RNA, 19 nt, Homo sapiens
  misc_RNA (1)...(19): siRNA sense strand
uaaagugccugcugcaauu

SEQ ID NO: 1943463 - RNA, 19 nt, Homo sapiens
  misc_RNA (1)...(19): siRNA sense strand
gaccaguuauccauuaauu

SEQ ID NO: 1943464 - RNA, 19 nt, Homo sapiens
  misc_RNA (1)...(19): siRNA sense strand
acaaguacauuucaagaag

SEQ ID NO: 1943465 - RNA, 19 nt, Homo sapiens
  misc_RNA (1)...(19): siRNA sense strand
gcacauuugccuuaaagug

SEQ ID NO: 1943466 - RNA, 19 nt, Homo sapiens
  misc_RNA (1)...(19): siRNA sense strand
gcuauucaauucagcaagu

SEQ ID NO: 1943467 - RNA, 19 nt, Homo sapiens
  misc_RNA (1)...(19): siRNA sense strand
ccaguuauccauuaauuca

SEQ ID NO: 1943468 - RNA, 19 nt, Homo sapiens
  misc_RNA (1)...(19): siRNA sense strand
cucgguaacugcuauuaaa

SEQ ID NO: 1943469 - RNA, 19 nt, Homo sapiens
  misc_RNA (1)...(19): siRNA sense strand
ccacaaguacauuucaaga

SEQ ID NO: 1943470 - RNA, 19 nt, Homo sapiens
  misc_RNA (1)...(19): siRNA sense strand
gaaaacagacuuagcaucu

SEQ ID NO: 1943471 - RNA, 19 nt, Homo sapiens
  misc_RNA (1)...(19): siRNA sense strand
caaacaaacauuaguacca

SEQ ID NO: 1943472 - RNA, 19 nt, Homo sapiens
  misc_RNA (1)...(19): siRNA sense strand
gugcacauuugccuuaaag

SEQ ID NO: 1943473 - RNA, 19 nt, Homo sapiens
  misc_RNA (1)...(19): siRNA sense strand
acagugcacauuugccuua

SEQ ID NO: 1943474 - RNA, 19 nt, Homo sapiens
  misc_RNA (1)...(19): siRNA sense strand
caacagucaaacaaacauu

SEQ ID NO: 1943475 - RNA, 19 nt, Homo sapiens
  misc_RNA (1)...(19): siRNA sense strand
gaucaaggaaugcaauggu

SEQ ID NO: 1943476 - RNA, 19 nt, Homo sapiens
  misc_RNA (1)...(19): siRNA sense strand
agacuuagcaucuccaucu

SEQ ID NO: 1943477 - RNA, 19 nt, Homo sapiens
  misc_RNA (1)...(19): siRNA sense strand
aaacauuaguaccacaagu

SEQ ID NO: 1943478 - RNA, 19 nt, Homo sapiens
  misc_RNA (1)...(19): siRNA sense strand
agauacugcuauucaauuc

SEQ ID NO: 1943479 - RNA, 19 nt, Homo sapiens
  misc_RNA (1)...(19): siRNA sense strand
gcaaugguucucccaaguc

SEQ ID NO: 1943480 - RNA, 19 nt, Homo sapiens
  misc_RNA (1)...(19): siRNA sense strand
gcuaagccaacacaaagug

SEQ ID NO: 1943481 - RNA, 19 nt, Homo sapiens
  misc_RNA (1)...(19): siRNA sense strand
cauccaacagucaaacaaa

SEQ ID NO: 1943482 - RNA, 19 nt, Homo sapiens
  misc_RNA (1)...(19): siRNA sense strand
uagcaucuccaucuccauu

SEQ ID NO: 1943483 - RNA, 19 nt, Homo sapiens
  misc_RNA (1)...(19): siRNA sense strand
aacauuaguaccacaagua

SEQ ID NO: 1943484 - RNA, 19 nt, Homo sapiens
  misc_RNA (1)...(19): siRNA sense strand
cacaaguacauuucaagaa

SEQ ID NO: 1943485 - RNA, 19 nt, Homo sapiens
  misc_RNA (1)...(19): siRNA sense strand
gcaucuccaucuccauugg

SEQ ID NO: 1943486 - RNA, 19 nt, Homo sapiens
  misc_RNA (1)...(19): siRNA sense strand
gaugaucaaggaaugcaau

SEQ ID NO: 1943487 - RNA, 19 nt, Homo sapiens
  misc_RNA (1)...(19): siRNA sense strand
caauucagcaagugcauca

SEQ ID NO: 1943488 - RNA, 19 nt, Homo sapiens
  misc_RNA (1)...(19): siRNA sense strand
uaugcugccuccugugaug

SEQ ID NO: 1943489 - RNA, 19 nt, Homo sapiens
  misc_RNA (1)...(19): siRNA sense strand
uaccacaaguacauuucaa

SEQ ID NO: 1943490 - RNA, 19 nt, Homo sapiens
  misc_RNA (1)...(19): siRNA sense strand
uuaaagugccugcugcaau

SEQ ID NO: 1943491 - RNA, 19 nt, Homo sapiens
  misc_RNA (1)...(19): siRNA sense strand
ccacuuauggaccaguuau

SEQ ID NO: 1943492 - RNA, 19 nt, Homo sapiens
  misc_RNA (1)...(19): siRNA sense strand
ucaagaagccccaaauauc

SEQ ID NO: 1943493 - RNA, 19 nt, Homo sapiens
  misc_RNA (1)...(19): siRNA sense strand
ggaccaguuauccauuaau

SEQ ID NO: 1943494 - RNA, 19 nt, Homo sapiens
  misc_RNA (1)...(19): siRNA sense strand
cagugcacauuugccuuaa

SEQ ID NO: 1943495 - RNA, 19 nt, Homo sapiens
  misc_RNA (1)...(19): siRNA sense strand
ccucgguaacugcuauuaa

SEQ ID NO: 1943496 - RNA, 19 nt, Homo sapiens
  misc_RNA (1)...(19): siRNA sense strand
caagaagccccaaauaucu

SEQ ID NO: 1943497 - RNA, 19 nt, Homo sapiens
  misc_RNA (1)...(19): siRNA sense strand
caaguccacagugcacauu

SEQ ID NO: 1943498 - RNA, 19 nt, Homo sapiens
  misc_RNA (1)...(19): siRNA sense strand
caaggaaugcaaugguucu

SEQ ID NO: 1943499 - RNA, 19 nt, Homo sapiens
  misc_RNA (1)...(19): siRNA sense strand
aguccacagugcacauuug

SEQ ID NO: 1943500 - RNA, 19 nt, Homo sapiens
  misc_RNA (1)...(19): siRNA sense strand
gauacugcuauucaauuca

SEQ ID NO: 1943501 - RNA, 19 nt, Homo sapiens
  misc_RNA (1)...(19): siRNA sense strand
gguauaagcucugugaaug

SEQ ID NO: 1943502 - RNA, 19 nt, Homo sapiens
  misc_RNA (1)...(19): siRNA sense strand
ugaacagacuccugcuuua

SEQ ID NO: 1943503 - RNA, 19 nt, Homo sapiens
  misc_RNA (1)...(19): siRNA sense strand
acagacuccugcuuuauua

SEQ ID NO: 1943504 - RNA, 19 nt, Homo sapiens
  misc_RNA (1)...(19): siRNA sense strand
agcaauagcugaucaaaga

SEQ ID NO: 1943505 - RNA, 19 nt, Homo sapiens
  misc_RNA (1)...(19): siRNA sense strand
uauacaaccuccuucaauu

SEQ ID NO: 1943506 - RNA, 19 nt, Homo sapiens
  misc_RNA (1)...(19): siRNA sense strand
uaagguaaaugcaggaaug

SEQ ID NO: 1943507 - RNA, 19 nt, Homo sapiens
  misc_RNA (1)...(19): siRNA sense strand
ggaagaugaugaugaugau

SEQ ID NO: 1943508 - RNA, 19 nt, Homo sapiens
  misc_RNA (1)...(19): siRNA sense strand
caacuagucucauggacau

SEQ ID NO: 1943509 - RNA, 19 nt, Homo sapiens
  misc_RNA (1)...(19): siRNA sense strand
ucauccagcuuguccuuua

SEQ ID NO: 1943510 - RNA, 19 nt, Homo sapiens
  misc_RNA (1)...(19): siRNA sense strand
gaacagacuccugcuuuau

SEQ ID NO: 1943511 - RNA, 19 nt, Homo sapiens
  misc_RNA (1)...(19): siRNA sense strand
ggacauagaaacaaaugga

SEQ ID NO: 1943512 - RNA, 19 nt, Homo sapiens
  misc_RNA (1)...(19): siRNA sense strand
gauuagaguugacugaaca

SEQ ID NO: 1943513 - RNA, 19 nt, Homo sapiens
  misc_RNA (1)...(19): siRNA sense strand
ggacauaggggauucauuu

SEQ ID NO: 1943514 - RNA, 19 nt, Homo sapiens
  misc_RNA (1)...(19): siRNA sense strand
gaagaggacauagaaacaa

SEQ ID NO: 1943515 - RNA, 19 nt, Homo sapiens
  misc_RNA (1)...(19): siRNA sense strand
ugaugaugauguuguguuu

SEQ ID NO: 1943516 - RNA, 19 nt, Homo sapiens
  misc_RNA (1)...(19): siRNA sense strand
ggaaauauaagugagacaa

SEQ ID NO: 1943517 - RNA, 19 nt, Homo sapiens
  misc_RNA (1)...(19): siRNA sense strand
aagaggacauagaaacaaa

SEQ ID NO: 1943518 - RNA, 19 nt, Homo sapiens
  misc_RNA (1)...(19): siRNA sense strand
gaugauguuguguuuauug

SEQ ID NO: 1943519 - RNA, 19 nt, Homo sapiens
  misc_RNA (1)...(19): siRNA sense strand
ggaauggguaauaguggua

SEQ ID NO: 1943520 - RNA, 19 nt, Homo sapiens
  misc_RNA (1)...(19): siRNA sense strand
gcaggaauggguaauagug

SEQ ID NO: 1943521 - RNA, 19 nt, Homo sapiens
  misc_RNA (1)...(19): siRNA sense strand
agaauugacucugaaauac

SEQ ID NO: 1943522 - RNA, 19 nt, Homo sapiens
  misc_RNA (1)...(19): siRNA sense strand
gaacucaccaguggaagau

SEQ ID NO: 1943523 - RNA, 19 nt, Homo sapiens
  misc_RNA (1)...(19): siRNA sense strand
cuucauauuugcaucauca

SEQ ID NO: 1943524 - RNA, 19 nt, Homo sapiens
  misc_RNA (1)...(19): siRNA sense strand
gaauugacucugaaauaca

SEQ ID NO: 1943525 - RNA, 19 nt, Homo sapiens
  misc_RNA (1)...(19): siRNA sense strand
caauagcugaucaaagaaa

SEQ ID NO: 1943526 - RNA, 19 nt, Homo sapiens
  misc_RNA (1)...(19): siRNA sense strand
ggaacucaccaguggaaga

SEQ ID NO: 1943527 - RNA, 19 nt, Homo sapiens
  misc_RNA (1)...(19): siRNA sense strand
ugguaucacuacagaauug

SEQ ID NO: 1943528 - RNA, 19 nt, Homo sapiens
  misc_RNA (1)...(19): siRNA sense strand
auacaaccuccuucaauuu

SEQ ID NO: 1943529 - RNA, 19 nt, Homo sapiens
  misc_RNA (1)...(19): siRNA sense strand
ugaaaagccucaaggaaau

SEQ ID NO: 1943530 - RNA, 19 nt, Homo sapiens
  misc_RNA (1)...(19): siRNA sense strand
ggauuagaguugacugaac

SEQ ID NO: 1943531 - RNA, 19 nt, Homo sapiens
  misc_RNA (1)...(19): siRNA sense strand
gcaauagcugaucaaagaa

SEQ ID NO: 1943532 - RNA, 19 nt, Homo sapiens
  misc_RNA (1)...(19): siRNA sense strand
gaugaugauguuguguuua

SEQ ID NO: 1943533 - RNA, 19 nt, Homo sapiens
  misc_RNA (1)...(19): siRNA sense strand
gaugaagaggacauagaaa

SEQ ID NO: 1943534 - RNA, 19 nt, Homo sapiens
  misc_RNA (1)...(19): siRNA sense strand
ugaugaugaugaugauguu

SEQ ID NO: 1943535 - RNA, 19 nt, Homo sapiens
  misc_RNA (1)...(19): siRNA sense strand
gaggacauagaaacaaaug

SEQ ID NO: 1943536 - RNA, 19 nt, Homo sapiens
  misc_RNA (1)...(19): siRNA sense strand
ugaugaagaggacauagaa

SEQ ID NO: 1943537 - RNA, 19 nt, Homo sapiens
  misc_RNA (1)...(19): siRNA sense strand
gauuuggcaucucagaaag

SEQ ID NO: 1943538 - RNA, 19 nt, Homo sapiens
  misc_RNA (1)...(19): siRNA sense strand
uguaauuccuccuucuuca

SEQ ID NO: 1943539 - RNA, 19 nt, Homo sapiens
  misc_RNA (1)...(19): siRNA sense strand
gucaguagaucuaggaacu

SEQ ID NO: 1943540 - RNA, 19 nt, Homo sapiens
  misc_RNA (1)...(19): siRNA sense strand
uggaagaugaugaugauga

SEQ ID NO: 1943541 - RNA, 19 nt, Homo sapiens
  misc_RNA (1)...(19): siRNA sense strand
caguagaucuaggaacuca

SEQ ID NO: 1943542 - RNA, 19 nt, Homo sapiens
  misc_RNA (1)...(19): siRNA sense strand
caaccuccuucaauuucug

SEQ ID NO: 1943543 - RNA, 19 nt, Homo sapiens
  misc_RNA (1)...(19): siRNA sense strand
uaaaugcaggaauggguaa

SEQ ID NO: 1943544 - RNA, 19 nt, Homo sapiens
  misc_RNA (1)...(19): siRNA sense strand
aaauggaggagcagagaaa

SEQ ID NO: 1943545 - RNA, 19 nt, Homo sapiens
  misc_RNA (1)...(19): siRNA sense strand
cagaaaggaaauauaagug

SEQ ID NO: 1943546 - RNA, 19 nt, Homo sapiens
  misc_RNA (1)...(19): siRNA sense strand
ugaagaggacauagaaaca

SEQ ID NO: 1943547 - RNA, 19 nt, Homo sapiens
  misc_RNA (1)...(19): siRNA sense strand
aagaugaugaugaugauga

SEQ ID NO: 1943548 - RNA, 19 nt, Homo sapiens
  misc_RNA (1)...(19): siRNA sense strand
cugaacagacuccugcuuu

SEQ ID NO: 1943549 - RNA, 19 nt, Homo sapiens
  misc_RNA (1)...(19): siRNA sense strand
gaggauuagaguugacuga

SEQ ID NO: 1943550 - RNA, 19 nt, Homo sapiens
  misc_RNA (1)...(19): siRNA sense strand
caagaaguaagguaaaugc

SEQ ID NO: 1943551 - RNA, 19 nt, Homo sapiens
  misc_RNA (1)...(19): siRNA sense strand
acucaccaguggaagauga

SEQ ID NO: 1943552 - RNA, 19 nt, Homo sapiens
  misc_RNA (1)...(19): siRNA sense strand
guaauuccuccuucuucaa

SEQ ID NO: 1943553 - RNA, 19 nt, Homo sapiens
  misc_RNA (1)...(19): siRNA sense strand
gaaucuauacaaccuccuu

SEQ ID NO: 1943554 - RNA, 19 nt, Homo sapiens
  misc_RNA (1)...(19): siRNA sense strand
aguggaagaugaugaugau

SEQ ID NO: 1943555 - RNA, 19 nt, Homo sapiens
  misc_RNA (1)...(19): siRNA sense strand
agaguugacugaacagacu

SEQ ID NO: 1943556 - RNA, 19 nt, Homo sapiens
  misc_RNA (1)...(19): siRNA sense strand
gugggaggauuagaguuga

SEQ ID NO: 1943557 - RNA, 19 nt, Homo sapiens
  misc_RNA (1)...(19): siRNA sense strand
cuauacaaccuccuucaau

SEQ ID NO: 1943558 - RNA, 19 nt, Homo sapiens
  misc_RNA (1)...(19): siRNA sense strand
caaauggaggagcagagaa

SEQ ID NO: 1943559 - RNA, 19 nt, Homo sapiens
  misc_RNA (1)...(19): siRNA sense strand
guuacaaccuuagaaacag

SEQ ID NO: 1943560 - RNA, 19 nt, Homo sapiens
  misc_RNA (1)...(19): siRNA sense strand
ugaugaugaugauguugug

SEQ ID NO: 1943561 - RNA, 19 nt, Homo sapiens
  misc_RNA (1)...(19): siRNA sense strand
gaauauggccauggcaacu

SEQ ID NO: 1943562 - RNA, 19 nt, Homo sapiens
  misc_RNA (1)...(19): siRNA sense strand
gcuuguccuuuagucagua

SEQ ID NO: 1943563 - RNA, 19 nt, Homo sapiens
  misc_RNA (1)...(19): siRNA sense strand
aacagacuccugcuuuauu

SEQ ID NO: 1943564 - RNA, 19 nt, Homo sapiens
  misc_RNA (1)...(19): siRNA sense strand
uggcaucucagaaaggaaa

SEQ ID NO: 1943565 - RNA, 19 nt, Homo sapiens
  misc_RNA (1)...(19): siRNA sense strand
ugaugaugaugaugaugau

SEQ ID NO: 1943566 - RNA, 19 nt, Homo sapiens
  misc_RNA (1)...(19): siRNA sense strand
gaagaugaugaugaugaug

SEQ ID NO: 1943567 - RNA, 19 nt, Homo sapiens
  misc_RNA (1)...(19): siRNA sense strand
ggucauccagcuuguccuu

SEQ ID NO: 1943568 - RNA, 19 nt, Homo sapiens
  misc_RNA (1)...(19): siRNA sense strand
uauaagcucugugaaugcu

SEQ ID NO: 1943569 - RNA, 19 nt, Homo sapiens
  misc_RNA (1)...(19): siRNA sense strand
uacaaccuccuucaauuuc

SEQ ID NO: 1943570 - RNA, 19 nt, Homo sapiens
  misc_RNA (1)...(19): siRNA sense strand
uaggaacucaccaguggaa

SEQ ID NO: 1943571 - RNA, 19 nt, Homo sapiens
  misc_RNA (1)...(19): siRNA sense strand
cauccagcuuguccuuuag

SEQ ID NO: 1943572 - RNA, 19 nt, Homo sapiens
  misc_RNA (1)...(19): siRNA sense strand
gaaaagccucaaggaaauu

SEQ ID NO: 1943573 - RNA, 19 nt, Homo sapiens
  misc_RNA (1)...(19): siRNA sense strand
gcugaucaaagaaacuuca

SEQ ID NO: 1943574 - RNA, 19 nt, Homo sapiens
  misc_RNA (1)...(19): siRNA sense strand
ucaagaaguaagguaaaug

SEQ ID NO: 1943575 - RNA, 19 nt, Homo sapiens
  misc_RNA (1)...(19): siRNA sense strand
gaauggguaauagugguau

SEQ ID NO: 1943576 - RNA, 19 nt, Homo sapiens
  misc_RNA (1)...(19): siRNA sense strand
caguggaagaugaugauga

SEQ ID NO: 1943577 - RNA, 19 nt, Homo sapiens
  misc_RNA (1)...(19): siRNA sense strand
ugugaaugcugggcaagau

SEQ ID NO: 1943578 - RNA, 19 nt, Homo sapiens
  misc_RNA (1)...(19): siRNA sense strand
caucucagaaaggaaauau

SEQ ID NO: 1943579 - RNA, 19 nt, Homo sapiens
  misc_RNA (1)...(19): siRNA sense strand
agaugaugaugaugaugau

SEQ ID NO: 1943580 - RNA, 19 nt, Homo sapiens
  misc_RNA (1)...(19): siRNA sense strand
acaaauggaggagcagaga

SEQ ID NO: 1943581 - RNA, 19 nt, Homo sapiens
  misc_RNA (1)...(19): siRNA sense strand
gcaucucagaaaggaaaua

SEQ ID NO: 1943582 - RNA, 19 nt, Homo sapiens
  misc_RNA (1)...(19): siRNA sense strand
gcaaaggaauggaaggaau

SEQ ID NO: 1943583 - RNA, 19 nt, Homo sapiens
  misc_RNA (1)...(19): siRNA sense strand
gaagauacaaggccacauu

SEQ ID NO: 1943584 - RNA, 19 nt, Homo sapiens
  misc_RNA (1)...(19): siRNA sense strand
gauuacaccucuacaugga

SEQ ID NO: 1943585 - RNA, 19 nt, Homo sapiens
  misc_RNA (1)...(19): siRNA sense strand
cagcccagauucaagauug

SEQ ID NO: 1943586 - RNA, 19 nt, Homo sapiens
  misc_RNA (1)...(19): siRNA sense strand
caaaggaauggaaggaauu

SEQ ID NO: 1943587 - RNA, 19 nt, Homo sapiens
  misc_RNA (1)...(19): siRNA sense strand
uaacugcagccaucuuuga

SEQ ID NO: 1943588 - RNA, 19 nt, Homo sapiens
  misc_RNA (1)...(19): siRNA sense strand
aaaggaauggaaggaauua

SEQ ID NO: 1943589 - RNA, 19 nt, Homo sapiens
  misc_RNA (1)...(19): siRNA sense strand
caagauugaggaaauagau

SEQ ID NO: 1943590 - RNA, 19 nt, Homo sapiens
  misc_RNA (1)...(19): siRNA sense strand
ggaauggaaggaauuaacu

SEQ ID NO: 1943591 - RNA, 19 nt, Homo sapiens
  misc_RNA (1)...(19): siRNA sense strand
gauacaaggccacauugca

SEQ ID NO: 1943592 - RNA, 19 nt, Homo sapiens
  misc_RNA (1)...(19): siRNA sense strand
acccacagauucagauuuc

SEQ ID NO: 1943593 - RNA, 19 nt, Homo sapiens
  misc_RNA (1)...(19): siRNA sense strand
cacaaugucagcccagauu

SEQ ID NO: 1943594 - RNA, 19 nt, Homo sapiens
  misc_RNA (1)...(19): siRNA sense strand
gaauggaaggaauuaacug

SEQ ID NO: 1943595 - RNA, 19 nt, Homo sapiens
  misc_RNA (1)...(19): siRNA sense strand
cuacauggaagaagauaca

SEQ ID NO: 1943596 - RNA, 19 nt, Homo sapiens
  misc_RNA (1)...(19): siRNA sense strand
auacaaggccacauugcaa

SEQ ID NO: 1943597 - RNA, 19 nt, Homo sapiens
  misc_RNA (1)...(19): siRNA sense strand
ucaccacacccacagauuc

SEQ ID NO: 1943598 - RNA, 19 nt, Homo sapiens
  misc_RNA (1)...(19): siRNA sense strand
caaugucagcccagauuca

SEQ ID NO: 1943599 - RNA, 19 nt, Homo sapiens
  misc_RNA (1)...(19): siRNA sense strand
uacaaggccacauugcaaa

SEQ ID NO: 1943600 - RNA, 19 nt, Homo sapiens
  misc_RNA (1)...(19): siRNA sense strand
ugucagcccagauucaaga

SEQ ID NO: 1943601 - RNA, 19 nt, Homo sapiens
  misc_RNA (1)...(19): siRNA sense strand
ccacacccacagauucaga

SEQ ID NO: 1943602 - RNA, 19 nt, Homo sapiens
  misc_RNA (1)...(19): siRNA sense strand
caccacacccacagauuca

SEQ ID NO: 1943603 - RNA, 19 nt, Homo sapiens
  misc_RNA (1)...(19): siRNA sense strand
gaaaggagauguggcauua

SEQ ID NO: 1943604 - RNA, 19 nt, Homo sapiens
  misc_RNA (1)...(19): siRNA sense strand
ggacaaggcucucuuauau

SEQ ID NO: 1943605 - RNA, 19 nt, Homo sapiens
  misc_RNA (1)...(19): siRNA sense strand
gaaggaagaucuccagaaa

SEQ ID NO: 1943606 - RNA, 19 nt, Homo sapiens
  misc_RNA (1)...(19): siRNA sense strand
gaagaucuccagaaacuua

SEQ ID NO: 1943607 - RNA, 19 nt, Homo sapiens
  misc_RNA (1)...(19): siRNA sense strand
guaagaagauuccuagaga

SEQ ID NO: 1943608 - RNA, 19 nt, Homo sapiens
  misc_RNA (1)...(19): siRNA sense strand
gcugagaguucccuuuaua

SEQ ID NO: 1943609 - RNA, 19 nt, Homo sapiens
  misc_RNA (1)...(19): siRNA sense strand
acaaggcucucuuauauuu

SEQ ID NO: 1943610 - RNA, 19 nt, Homo sapiens
  misc_RNA (1)...(19): siRNA sense strand
ggaagacacuguucgauca

SEQ ID NO: 1943611 - RNA, 19 nt, Homo sapiens
  misc_RNA (1)...(19): siRNA sense strand
gaacgacagauuagaauaa

SEQ ID NO: 1943612 - RNA, 19 nt, Homo sapiens
  misc_RNA (1)...(19): siRNA sense strand
gaaggaguauguauuagug

SEQ ID NO: 1943613 - RNA, 19 nt, Homo sapiens
  misc_RNA (1)...(19): siRNA sense strand
ggaaggagauauugacaag

SEQ ID NO: 1943614 - RNA, 19 nt, Homo sapiens
  misc_RNA (1)...(19): siRNA sense strand
ugaagaaacucuacgaugu

SEQ ID NO: 1943615 - RNA, 19 nt, Homo sapiens
  misc_RNA (1)...(19): siRNA sense strand
gaagauuccuagagauuca

SEQ ID NO: 1943616 - RNA, 19 nt, Homo sapiens
  misc_RNA (1)...(19): siRNA sense strand
guucaaaggugucaacaug

SEQ ID NO: 1943617 - RNA, 19 nt, Homo sapiens
  misc_RNA (1)...(19): siRNA sense strand
gaugaaggcuugggaguug

SEQ ID NO: 1943618 - RNA, 19 nt, Homo sapiens
  misc_RNA (1)...(19): siRNA sense strand
gaagaaacauuccuguaac

SEQ ID NO: 1943619 - RNA, 19 nt, Homo sapiens
  misc_RNA (1)...(19): siRNA sense strand
guacagccauugugaauac

SEQ ID NO: 1943620 - RNA, 19 nt, Homo sapiens
  misc_RNA (1)...(19): siRNA sense strand
guugaucucucuuucauug

SEQ ID NO: 1943621 - RNA, 19 nt, Homo sapiens
  misc_RNA (1)...(19): siRNA sense strand
gaagaaacucuacgauguu

SEQ ID NO: 1943622 - RNA, 19 nt, Homo sapiens
  misc_RNA (1)...(19): siRNA sense strand
cuaccuaccugcagauauu

SEQ ID NO: 1943623 - RNA, 19 nt, Homo sapiens
  misc_RNA (1)...(19): siRNA sense strand
gaaacauuccuguaacauu

SEQ ID NO: 1943624 - RNA, 19 nt, Homo sapiens
  misc_RNA (1)...(19): siRNA sense strand
gaagcagcaucaaagaaau

SEQ ID NO: 1943625 - RNA, 19 nt, Homo sapiens
  misc_RNA (1)...(19): siRNA sense strand
ggaauuugaaggcuguuua

SEQ ID NO: 1943626 - RNA, 19 nt, Homo sapiens
  misc_RNA (1)...(19): siRNA sense strand
gaggaucugucugauauug

SEQ ID NO: 1943627 - RNA, 19 nt, Homo sapiens
  misc_RNA (1)...(19): siRNA sense strand
gaaagucucacagauaaga

SEQ ID NO: 1943628 - RNA, 19 nt, Homo sapiens
  misc_RNA (1)...(19): siRNA sense strand
gcaaugaaagucucacaga

SEQ ID NO: 1943629 - RNA, 19 nt, Homo sapiens
  misc_RNA (1)...(19): siRNA sense strand
guaccugaacgacagauua

SEQ ID NO: 1943630 - RNA, 19 nt, Homo sapiens
  misc_RNA (1)...(19): siRNA sense strand
gugaauaccagcaaugaaa

SEQ ID NO: 1943631 - RNA, 19 nt, Homo sapiens
  misc_RNA (1)...(19): siRNA sense strand
aaacgggccuuacuauaca

SEQ ID NO: 1943632 - RNA, 19 nt, Homo sapiens
  misc_RNA (1)...(19): siRNA sense strand
ggacagugauggugguagu

SEQ ID NO: 1943633 - RNA, 19 nt, Homo sapiens
  misc_RNA (1)...(19): siRNA sense strand
gaaauuauaaucgcugguu

SEQ ID NO: 1943634 - RNA, 19 nt, Homo sapiens
  misc_RNA (1)...(19): siRNA sense strand
gcacuucgcacuguaagaa

SEQ ID NO: 1943635 - RNA, 19 nt, Homo sapiens
  misc_RNA (1)...(19): siRNA sense strand
augaaagucucacagauaa

SEQ ID NO: 1943636 - RNA, 19 nt, Homo sapiens
  misc_RNA (1)...(19): siRNA sense strand
cagcugagaguucccuuua

SEQ ID NO: 1943637 - RNA, 19 nt, Homo sapiens
  misc_RNA (1)...(19): siRNA sense strand
gaaacucuacgauguuguu

SEQ ID NO: 1943638 - RNA, 19 nt, Homo sapiens
  misc_RNA (1)...(19): siRNA sense strand
cugaggaucugucugauau

SEQ ID NO: 1943639 - RNA, 19 nt, Homo sapiens
  misc_RNA (1)...(19): siRNA sense strand
guacaucccacauuucguu

SEQ ID NO: 1943640 - RNA, 19 nt, Homo sapiens
  misc_RNA (1)...(19): siRNA sense strand
gcugcuaccucucuacuuc

SEQ ID NO: 1943641 - RNA, 19 nt, Homo sapiens
  misc_RNA (1)...(19): siRNA sense strand
cagauugacuuuccuccuu

SEQ ID NO: 1943642 - RNA, 19 nt, Homo sapiens
  misc_RNA (1)...(19): siRNA sense strand
ggagauguggcauuacuga

SEQ ID NO: 1943643 - RNA, 19 nt, Homo sapiens
  misc_RNA (1)...(19): siRNA sense strand
ugugaaggaguauguauua

SEQ ID NO: 1943644 - RNA, 19 nt, Homo sapiens
  misc_RNA (1)...(19): siRNA sense strand
gaguugaucucucuuucau

SEQ ID NO: 1943645 - RNA, 19 nt, Homo sapiens
  misc_RNA (1)...(19): siRNA sense strand
caaugaaagucucacagau

SEQ ID NO: 1943646 - RNA, 19 nt, Homo sapiens
  misc_RNA (1)...(19): siRNA sense strand
ggaaaggagauguggcauu

SEQ ID NO: 1943647 - RNA, 19 nt, Homo sapiens
  misc_RNA (1)...(19): siRNA sense strand
gcagaagcagcaucaaaga

SEQ ID NO: 1943648 - RNA, 19 nt, Homo sapiens
  misc_RNA (1)...(19): siRNA sense strand
aaugaaagucucacagaua

SEQ ID NO: 1943649 - RNA, 19 nt, Homo sapiens
  misc_RNA (1)...(19): siRNA sense strand
gaaaacgggccuuacuaua

SEQ ID NO: 1943650 - RNA, 19 nt, Homo sapiens
  misc_RNA (1)...(19): siRNA sense strand
gauauugacaagcaaagaa

SEQ ID NO: 1943651 - RNA, 19 nt, Homo sapiens
  misc_RNA (1)...(19): siRNA sense strand
aaacguacuucaacuagca

SEQ ID NO: 1943652 - RNA, 19 nt, Homo sapiens
  misc_RNA (1)...(19): siRNA sense strand
auaaggacgucaauggaaa

SEQ ID NO: 1943653 - RNA, 19 nt, Homo sapiens
  misc_RNA (1)...(19): siRNA sense strand
uaagaauccugugucagaa

SEQ ID NO: 1943654 - RNA, 19 nt, Homo sapiens
  misc_RNA (1)...(19): siRNA sense strand
agaagcagcaucaaagaaa

SEQ ID NO: 1943655 - RNA, 19 nt, Homo sapiens
  misc_RNA (1)...(19): siRNA sense strand
acagugggaccuaaauaua

SEQ ID NO: 1943656 - RNA, 19 nt, Homo sapiens
  misc_RNA (1)...(19): siRNA sense strand
gaauggaaggagauauuga

SEQ ID NO: 1943657 - RNA, 19 nt, Homo sapiens
  misc_RNA (1)...(19): siRNA sense strand
cagauuagaauaagugaga

SEQ ID NO: 1943658 - RNA, 19 nt, Homo sapiens
  misc_RNA (1)...(19): siRNA sense strand
uaagaagauuccuagagau

SEQ ID NO: 1943659 - RNA, 19 nt, Homo sapiens
  misc_RNA (1)...(19): siRNA sense strand
gaagcaaaauugacaaaag

SEQ ID NO: 1943660 - RNA, 19 nt, Homo sapiens
  misc_RNA (1)...(19): siRNA sense strand
cagugggaccuaaauauaa

SEQ ID NO: 1943661 - RNA, 19 nt, Homo sapiens
  misc_RNA (1)...(19): siRNA sense strand
ggccugauuugaaggaaga

SEQ ID NO: 1943662 - RNA, 19 nt, Homo sapiens
  misc_RNA (1)...(19): siRNA sense strand
gaauuugaaggcuguuuau

SEQ ID NO: 1943663 - RNA, 19 nt, Homo sapiens
  misc_RNA (1)...(19): siRNA sense strand
ucaaguacaagaggaauuu

SEQ ID NO: 1943664 - RNA, 19 nt, Homo sapiens
  misc_RNA (1)...(19): siRNA sense strand
gauccuucagggacaauua

SEQ ID NO: 1943665 - RNA, 19 nt, Homo sapiens
  misc_RNA (1)...(19): siRNA sense strand
agaggagaaucgaucauug

SEQ ID NO: 1943666 - RNA, 19 nt, Homo sapiens
  misc_RNA (1)...(19): siRNA sense strand
aggaagaucuccagaaacu

SEQ ID NO: 1943667 - RNA, 19 nt, Homo sapiens
  misc_RNA (1)...(19): siRNA sense strand
cuaaaagccuuauaccaaa

SEQ ID NO: 1943668 - RNA, 19 nt, Homo sapiens
  misc_RNA (1)...(19): siRNA sense strand
gaacuguacagccauugug

SEQ ID NO: 1943669 - RNA, 19 nt, Homo sapiens
  misc_RNA (1)...(19): siRNA sense strand
ucaaaggugucaacauggu

SEQ ID NO: 1943670 - RNA, 19 nt, Homo sapiens
  misc_RNA (1)...(19): siRNA sense strand
aaagaaaacugauccuuca

SEQ ID NO: 1943671 - RNA, 19 nt, Homo sapiens
  misc_RNA (1)...(19): siRNA sense strand
gggaguugaucucucuuuc

SEQ ID NO: 1943672 - RNA, 19 nt, Homo sapiens
  misc_RNA (1)...(19): siRNA sense strand
cagaagauaaccaagaaga

SEQ ID NO: 1943673 - RNA, 19 nt, Homo sapiens
  misc_RNA (1)...(19): siRNA sense strand
uccagaagauaaccaagaa

SEQ ID NO: 1943674 - RNA, 19 nt, Homo sapiens
  misc_RNA (1)...(19): siRNA sense strand
cgacagauuagaauaagug

SEQ ID NO: 1943675 - RNA, 19 nt, Homo sapiens
  misc_RNA (1)...(19): siRNA sense strand
aaacgugguuauccuuuag

SEQ ID NO: 1943676 - RNA, 19 nt, Homo sapiens
  misc_RNA (1)...(19): siRNA sense strand
cuacagaaacguacuucaa

SEQ ID NO: 1943677 - RNA, 19 nt, Homo sapiens
  misc_RNA (1)...(19): siRNA sense strand
agugggaccuaaauauaaa

SEQ ID NO: 1943678 - RNA, 19 nt, Homo sapiens
  misc_RNA (1)...(19): siRNA sense strand
cagaaacguacuucaacua

SEQ ID NO: 1943679 - RNA, 19 nt, Homo sapiens
  misc_RNA (1)...(19): siRNA sense strand
gacaaggcucucuuauauu

SEQ ID NO: 1943680 - RNA, 19 nt, Homo sapiens
  misc_RNA (1)...(19): siRNA sense strand
ggagauauugacaagcaaa

SEQ ID NO: 1943681 - RNA, 19 nt, Homo sapiens
  misc_RNA (1)...(19): siRNA sense strand
ucuguuggcuucuguguca

SEQ ID NO: 1943682 - RNA, 19 nt, Homo sapiens
  misc_RNA (1)...(19): siRNA sense strand
auaagaauccugugucaga

SEQ ID NO: 1943683 - RNA, 19 nt, Homo sapiens
  misc_RNA (1)...(19): siRNA sense strand
cauaucaccagaacagauu

SEQ ID NO: 1943684 - RNA, 19 nt, Homo sapiens
  misc_RNA (1)...(19): siRNA sense strand
ggacgucaauggaaaagug

SEQ ID NO: 1943685 - RNA, 19 nt, Homo sapiens
  misc_RNA (1)...(19): siRNA sense strand
aagaaacucuacgauguug

SEQ ID NO: 1943686 - RNA, 19 nt, Homo sapiens
  misc_RNA (1)...(19): siRNA sense strand
aaggagauauugacaagca

SEQ ID NO: 1943687 - RNA, 19 nt, Homo sapiens
  misc_RNA (1)...(19): siRNA sense strand
cauagcacuucgcacugua

SEQ ID NO: 1943688 - RNA, 19 nt, Homo sapiens
  misc_RNA (1)...(19): siRNA sense strand
uggacaaggcucucuuaua

SEQ ID NO: 1943689 - RNA, 19 nt, Homo sapiens
  misc_RNA (1)...(19): siRNA sense strand
cagaacagauugacuuucc

SEQ ID NO: 1943690 - RNA, 19 nt, Homo sapiens
  misc_RNA (1)...(19): siRNA sense strand
guaguuggaagaaacauuc

SEQ ID NO: 1943691 - RNA, 19 nt, Homo sapiens
  misc_RNA (1)...(19): siRNA sense strand
ggccuuacuauacaucaua

SEQ ID NO: 1943692 - RNA, 19 nt, Homo sapiens
  misc_RNA (1)...(19): siRNA sense strand
agauugacuuuccuccuuu

SEQ ID NO: 1943693 - RNA, 19 nt, Homo sapiens
  misc_RNA (1)...(19): siRNA sense strand
acauugcugugaaggagua

SEQ ID NO: 1943694 - RNA, 19 nt, Homo sapiens
  misc_RNA (1)...(19): siRNA sense strand
aagaaacauuccuguaaca

SEQ ID NO: 1943695 - RNA, 19 nt, Homo sapiens
  misc_RNA (1)...(19): siRNA sense strand
gucagaaaguaucuucaug

SEQ ID NO: 1943696 - RNA, 19 nt, Homo sapiens
  misc_RNA (1)...(19): siRNA sense strand
gaaggcuguuuauuuugua

SEQ ID NO: 1943697 - RNA, 19 nt, Homo sapiens
  misc_RNA (1)...(19): siRNA sense strand
gauacuacagcugaaauau

SEQ ID NO: 1943698 - RNA, 19 nt, Homo sapiens
  misc_RNA (1)...(19): siRNA sense strand
aggaguauguauuagugua

SEQ ID NO: 1943699 - RNA, 19 nt, Homo sapiens
  misc_RNA (1)...(19): siRNA sense strand
ggugguaguuggaagaaac

SEQ ID NO: 1943700 - RNA, 19 nt, Homo sapiens
  misc_RNA (1)...(19): siRNA sense strand
ugaacgacagauuagaaua

SEQ ID NO: 1943701 - RNA, 19 nt, Homo sapiens
  misc_RNA (1)...(19): siRNA sense strand
aagaagauuccuagagauu

SEQ ID NO: 1943702 - RNA, 19 nt, Homo sapiens
  misc_RNA (1)...(19): siRNA sense strand
cagucaaugucuucuguug

SEQ ID NO: 1943703 - RNA, 19 nt, Homo sapiens
  misc_RNA (1)...(19): siRNA sense strand
cacaucuucucgucucuuu

SEQ ID NO: 1943704 - RNA, 19 nt, Homo sapiens
  misc_RNA (1)...(19): siRNA sense strand
ccaccacgcuuagcugauu

SEQ ID NO: 1943705 - RNA, 19 nt, Homo sapiens
  misc_RNA (1)...(19): siRNA sense strand
ccccaugacucaaauauua

SEQ ID NO: 1943706 - RNA, 19 nt, Homo sapiens
  misc_RNA (1)...(19): siRNA sense strand
ccaaagugcugggauuaca

SEQ ID NO: 1943707 - RNA, 19 nt, Homo sapiens
  misc_RNA (1)...(19): siRNA sense strand
gugcaaggguacaaucuca

SEQ ID NO: 1943708 - RNA, 19 nt, Homo sapiens
  misc_RNA (1)...(19): siRNA sense strand
agcauuagguacuuuguuu

SEQ ID NO: 1943709 - RNA, 19 nt, Homo sapiens
  misc_RNA (1)...(19): siRNA sense strand
ucaccauggucaaccuauu

SEQ ID NO: 1943710 - RNA, 19 nt, Homo sapiens
  misc_RNA (1)...(19): siRNA sense strand
ucaaccuauuccagcauua

SEQ ID NO: 1943711 - RNA, 19 nt, Homo sapiens
  misc_RNA (1)...(19): siRNA sense strand
gcaacacagccuccacuuc

SEQ ID NO: 1943712 - RNA, 19 nt, Homo sapiens
  misc_RNA (1)...(19): siRNA sense strand
cuccugaccucaugugaug

SEQ ID NO: 1943713 - RNA, 19 nt, Homo sapiens
  misc_RNA (1)...(19): siRNA sense strand
cugaguagcugggauuaca

SEQ ID NO: 1943714 - RNA, 19 nt, Homo sapiens
  misc_RNA (1)...(19): siRNA sense strand
gucaaccuauuccagcauu

SEQ ID NO: 1943715 - RNA, 19 nt, Homo sapiens
  misc_RNA (1)...(19): siRNA sense strand
ugccucagccucccaagua

SEQ ID NO: 1943716 - RNA, 19 nt, Homo sapiens
  misc_RNA (1)...(19): siRNA sense strand
gguacaaucucagcucacu

SEQ ID NO: 1943717 - RNA, 19 nt, Homo sapiens
  misc_RNA (1)...(19): siRNA sense strand
gaacuccugaccucaugug

SEQ ID NO: 1943718 - RNA, 19 nt, Homo sapiens
  misc_RNA (1)...(19): siRNA sense strand
guacccagccuagcauuag

SEQ ID NO: 1943719 - RNA, 19 nt, Homo sapiens
  misc_RNA (1)...(19): siRNA sense strand
caccacgcuuagcugauuu

SEQ ID NO: 1943720 - RNA, 19 nt, Homo sapiens
  misc_RNA (1)...(19): siRNA sense strand
ggagugcaaggguacaauc

SEQ ID NO: 1943721 - RNA, 19 nt, Homo sapiens
  misc_RNA (1)...(19): siRNA sense strand
cuaccggguucaagugauc

SEQ ID NO: 1943722 - RNA, 19 nt, Homo sapiens
  misc_RNA (1)...(19): siRNA sense strand
ucgaacuccugaccucaug

SEQ ID NO: 1943723 - RNA, 19 nt, Homo sapiens
  misc_RNA (1)...(19): siRNA sense strand
ccagguuggucucgaacuc

SEQ ID NO: 1943724 - RNA, 19 nt, Homo sapiens
  misc_RNA (1)...(19): siRNA sense strand
ccaccuaccggguucaagu

SEQ ID NO: 1943725 - RNA, 19 nt, Homo sapiens
  misc_RNA (1)...(19): siRNA sense strand
cccaugacucaaauauuaa

SEQ ID NO: 1943726 - RNA, 19 nt, Homo sapiens
  misc_RNA (1)...(19): siRNA sense strand
caaccuauuccagcauuag

SEQ ID NO: 1943727 - RNA, 19 nt, Homo sapiens
  misc_RNA (1)...(19): siRNA sense strand
caccauggucaaccuauuc

SEQ ID NO: 1943728 - RNA, 19 nt, Homo sapiens
  misc_RNA (1)...(19): siRNA sense strand
ucacugcaggcuccaccua

SEQ ID NO: 1943729 - RNA, 19 nt, Homo sapiens
  misc_RNA (1)...(19): siRNA sense strand
gagauggaguuuugcucuu

SEQ ID NO: 1943730 - RNA, 19 nt, Homo sapiens
  misc_RNA (1)...(19): siRNA sense strand
cguacccagccuagcauua

SEQ ID NO: 1943731 - RNA, 19 nt, Homo sapiens
  misc_RNA (1)...(19): siRNA sense strand
gaagaagacucauuucaua

SEQ ID NO: 1943732 - RNA, 19 nt, Homo sapiens
  misc_RNA (1)...(19): siRNA sense strand
gaaauuccaugucauugua

SEQ ID NO: 1943733 - RNA, 19 nt, Homo sapiens
  misc_RNA (1)...(19): siRNA sense strand
gcaccuauguucaaacuuu

SEQ ID NO: 1943734 - RNA, 19 nt, Homo sapiens
  misc_RNA (1)...(19): siRNA sense strand
ggagagugcucaagauuau

SEQ ID NO: 1943735 - RNA, 19 nt, Homo sapiens
  misc_RNA (1)...(19): siRNA sense strand
gaagaaguccugccauuca

SEQ ID NO: 1943736 - RNA, 19 nt, Homo sapiens
  misc_RNA (1)...(19): siRNA sense strand
gauuucagcuuccauuaug

SEQ ID NO: 1943737 - RNA, 19 nt, Homo sapiens
  misc_RNA (1)...(19): siRNA sense strand
caaagaggcugcccgaaag

SEQ ID NO: 1943738 - RNA, 19 nt, Homo sapiens
  misc_RNA (1)...(19): siRNA sense strand
gaaugcaccuuccuacauc

SEQ ID NO: 1943739 - RNA, 19 nt, Homo sapiens
  misc_RNA (1)...(19): siRNA sense strand
gaagacucauuucauaagu

SEQ ID NO: 1943740 - RNA, 19 nt, Homo sapiens
  misc_RNA (1)...(19): siRNA sense strand
caaagcagguauugagaca

SEQ ID NO: 1943741 - RNA, 19 nt, Homo sapiens
  misc_RNA (1)...(19): siRNA sense strand
ucaaagaggcugcccgaaa

SEQ ID NO: 1943742 - RNA, 19 nt, Homo sapiens
  misc_RNA (1)...(19): siRNA sense strand
caacuccaguccaacauca

SEQ ID NO: 1943743 - RNA, 19 nt, Homo sapiens
  misc_RNA (1)...(19): siRNA sense strand
gaggugaucaugaccauug

SEQ ID NO: 1943744 - RNA, 19 nt, Homo sapiens
  misc_RNA (1)...(19): siRNA sense strand
caacaucauugaggcgauu

SEQ ID NO: 1943745 - RNA, 19 nt, Homo sapiens
  misc_RNA (1)...(19): siRNA sense strand
ucaacaaggugaucauugg

SEQ ID NO: 1943746 - RNA, 19 nt, Homo sapiens
  misc_RNA (1)...(19): siRNA sense strand
guuuguggcuccugaagaa

SEQ ID NO: 1943747 - RNA, 19 nt, Homo sapiens
  misc_RNA (1)...(19): siRNA sense strand
gcgaagggcucggaguugu

SEQ ID NO: 1943748 - RNA, 19 nt, Homo sapiens
  misc_RNA (1)...(19): siRNA sense strand
cagagaggaucgagagcuu

SEQ ID NO: 1943749 - RNA, 19 nt, Homo sapiens
  misc_RNA (1)...(19): siRNA sense strand
cugaagaaguccugccauu

SEQ ID NO: 1943750 - RNA, 19 nt, Homo sapiens
  misc_RNA (1)...(19): siRNA sense strand
gccguuaugucaagaguca

SEQ ID NO: 1943751 - RNA, 19 nt, Homo sapiens
  misc_RNA (1)...(19): siRNA sense strand
gagcucauuacccucuuua

SEQ ID NO: 1943752 - RNA, 19 nt, Homo sapiens
  misc_RNA (1)...(19): siRNA sense strand
cggagagugcucaagauua

SEQ ID NO: 1943753 - RNA, 19 nt, Homo sapiens
  misc_RNA (1)...(19): siRNA sense strand
ggauuucagcuuccauuau

SEQ ID NO: 1943754 - RNA, 19 nt, Homo sapiens
  misc_RNA (1)...(19): siRNA sense strand
gcggagagugcucaagauu

SEQ ID NO: 1943755 - RNA, 19 nt, Homo sapiens
  misc_RNA (1)...(19): siRNA sense strand
gucaugaaauggcugugaa

SEQ ID NO: 1943756 - RNA, 19 nt, Homo sapiens
  misc_RNA (1)...(19): siRNA sense strand
agagagggcaggaggauga

SEQ ID NO: 1943757 - RNA, 19 nt, Homo sapiens
  misc_RNA (1)...(19): siRNA sense strand
uaaacgaggauuucagcuu

SEQ ID NO: 1943758 - RNA, 19 nt, Homo sapiens
  misc_RNA (1)...(19): siRNA sense strand
gcgcagcuccgaggaaaug

SEQ ID NO: 1943759 - RNA, 19 nt, Homo sapiens
  misc_RNA (1)...(19): siRNA sense strand
gcucauuacccucuuuauc

SEQ ID NO: 1943760 - RNA, 19 nt, Homo sapiens
  misc_RNA (1)...(19): siRNA sense strand
caucgucugugcaccuaug

SEQ ID NO: 1943761 - RNA, 19 nt, Homo sapiens
  misc_RNA (1)...(19): siRNA sense strand
gaggauuucagcuuccauu

SEQ ID NO: 1943762 - RNA, 19 nt, Homo sapiens
  misc_RNA (1)...(19): siRNA sense strand
gagaaggucagcgugcauu

SEQ ID NO: 1943763 - RNA, 19 nt, Homo sapiens
  misc_RNA (1)...(19): siRNA sense strand
gaagggcucggaguuguca

SEQ ID NO: 1943764 - RNA, 19 nt, Homo sapiens
  misc_RNA (1)...(19): siRNA sense strand
caugacugaugcugccauu

SEQ ID NO: 1943765 - RNA, 19 nt, Homo sapiens
  misc_RNA (1)...(19): siRNA sense strand
cucuuuaucuccaacauug

SEQ ID NO: 1943766 - RNA, 19 nt, Homo sapiens
  misc_RNA (1)...(19): siRNA sense strand
ugucaagagucaacaaggu

SEQ ID NO: 1943767 - RNA, 19 nt, Homo sapiens
  misc_RNA (1)...(19): siRNA sense strand
gaagggacaauggagaaca

SEQ ID NO: 1943768 - RNA, 19 nt, Homo sapiens
  misc_RNA (1)...(19): siRNA sense strand
uggcuucucccgaacagua

SEQ ID NO: 1943769 - RNA, 19 nt, Homo sapiens
  misc_RNA (1)...(19): siRNA sense strand
gcagagagggcaggaggau

SEQ ID NO: 1943770 - RNA, 19 nt, Homo sapiens
  misc_RNA (1)...(19): siRNA sense strand
gugcaccuauguucaaacu

SEQ ID NO: 1943771 - RNA, 19 nt, Homo sapiens
  misc_RNA (1)...(19): siRNA sense strand
gugcggagagugcucaaga

SEQ ID NO: 1943772 - RNA, 19 nt, Homo sapiens
  misc_RNA (1)...(19): siRNA sense strand
cagcgaagggcucggaguu

SEQ ID NO: 1943773 - RNA, 19 nt, Homo sapiens
  misc_RNA (1)...(19): siRNA sense strand
cugccagggucaugaaaug

SEQ ID NO: 1943774 - RNA, 19 nt, Homo sapiens
  misc_RNA (1)...(19): siRNA sense strand
ugcacaaacuguugacauc

SEQ ID NO: 1943775 - RNA, 19 nt, Homo sapiens
  misc_RNA (1)...(19): siRNA sense strand
gcaacauggugcggagagu

SEQ ID NO: 1943776 - RNA, 19 nt, Homo sapiens
  misc_RNA (1)...(19): siRNA sense strand
ggucaugaaauggcuguga

SEQ ID NO: 1943777 - RNA, 19 nt, Homo sapiens
  misc_RNA (1)...(19): siRNA sense strand
ucuaccgccugaugaguga

SEQ ID NO: 1943778 - RNA, 19 nt, Homo sapiens
  misc_RNA (1)...(19): siRNA sense strand
ucauuacccucuuuaucuc

SEQ ID NO: 1943779 - RNA, 19 nt, Homo sapiens
  misc_RNA (1)...(19): siRNA sense strand
aagcagguauugagacaac

SEQ ID NO: 1943780 - RNA, 19 nt, Homo sapiens
  misc_RNA (1)...(19): siRNA sense strand
caugaaauggcugugaauu

SEQ ID NO: 1943781 - RNA, 19 nt, Homo sapiens
  misc_RNA (1)...(19): siRNA sense strand
ugacaggaacucacacucu

SEQ ID NO: 1943782 - RNA, 19 nt, Homo sapiens
  misc_RNA (1)...(19): siRNA sense strand
ugaagaaguccugccauuc

SEQ ID NO: 1943783 - RNA, 19 nt, Homo sapiens
  misc_RNA (1)...(19): siRNA sense strand
gagcuggaagggacaaugg

SEQ ID NO: 1943784 - RNA, 19 nt, Homo sapiens
  misc_RNA (1)...(19): siRNA sense strand
ugacugaugcugccauuuu

SEQ ID NO: 1943785 - RNA, 19 nt, Homo sapiens
  misc_RNA (1)...(19): siRNA sense strand
guccaaagcagguauugag

SEQ ID NO: 1943786 - RNA, 19 nt, Homo sapiens
  misc_RNA (1)...(19): siRNA sense strand
agaagacucauuucauaag

SEQ ID NO: 1943787 - RNA, 19 nt, Homo sapiens
  misc_RNA (1)...(19): siRNA sense strand
gucaacaaggugaucauug

SEQ ID NO: 1943788 - RNA, 19 nt, Homo sapiens
  misc_RNA (1)...(19): siRNA sense strand
gcauugcccuguguuugac

SEQ ID NO: 1943789 - RNA, 19 nt, Homo sapiens
  misc_RNA (1)...(19): siRNA sense strand
caccuauguucaaacuuuc

SEQ ID NO: 1943790 - RNA, 19 nt, Homo sapiens
  misc_RNA (1)...(19): siRNA sense strand
gugcauugcccuguguuug

SEQ ID NO: 1943791 - RNA, 19 nt, Homo sapiens
  misc_RNA (1)...(19): siRNA sense strand
ggcgauuaaugagcugcua

SEQ ID NO: 1943792 - RNA, 19 nt, Homo sapiens
  misc_RNA (1)...(19): siRNA sense strand
uggaagggacaauggagaa

SEQ ID NO: 1943793 - RNA, 19 nt, Homo sapiens
  misc_RNA (1)...(19): siRNA sense strand
ugcauugcccuguguuuga

SEQ ID NO: 1943794 - RNA, 19 nt, Homo sapiens
  misc_RNA (1)...(19): siRNA sense strand
gcagguauugagacaacug

SEQ ID NO: 1943795 - RNA, 19 nt, Homo sapiens
  misc_RNA (1)...(19): siRNA sense strand
aggagucccugcacaaacu

SEQ ID NO: 1943796 - RNA, 19 nt, Homo sapiens
  misc_RNA (1)...(19): siRNA sense strand
gacaagagaugcggaguau

SEQ ID NO: 1943797 - RNA, 19 nt, Homo sapiens
  misc_RNA (1)...(19): siRNA sense strand
caagagaugcggaguaugu

SEQ ID NO: 1943798 - RNA, 19 nt, Homo sapiens
  misc_RNA (1)...(19): siRNA sense strand
ccucugcacucucaacuug

SEQ ID NO: 1943799 - RNA, 19 nt, Homo sapiens
  misc_RNA (1)...(19): siRNA sense strand
gccacgagcugauaauuac

SEQ ID NO: 1943800 - RNA, 19 nt, Homo sapiens
  misc_RNA (1)...(19): siRNA sense strand
gauaauuacagacaagaga

SEQ ID NO: 1943801 - RNA, 19 nt, Homo sapiens
  misc_RNA (1)...(19): siRNA sense strand
ggagagccaaguuugcauu

SEQ ID NO: 1943802 - RNA, 19 nt, Homo sapiens
  misc_RNA (1)...(19): siRNA sense strand
gagcugauaauuacagaca

SEQ ID NO: 1943803 - RNA, 19 nt, Homo sapiens
  misc_RNA (1)...(19): siRNA sense strand
gcugauaauuacagacaag

SEQ ID NO: 1943804 - RNA, 19 nt, Homo sapiens
  misc_RNA (1)...(19): siRNA sense strand
acacuccucugcacucuca

SEQ ID NO: 1943805 - RNA, 19 nt, Homo sapiens
  misc_RNA (1)...(19): siRNA sense strand
gagagccaaguuugcauuu

SEQ ID NO: 1943806 - RNA, 19 nt, Homo sapiens
  misc_RNA (1)...(19): siRNA sense strand
agacaagagaugcggagua

SEQ ID NO: 1943807 - RNA, 19 nt, Homo sapiens
  misc_RNA (1)...(19): siRNA sense strand
ccagggagagccaaguuug

SEQ ID NO: 1943808 - RNA, 19 nt, Homo sapiens
  misc_RNA (1)...(19): siRNA sense strand
gagccaaguuugcauuuuc

SEQ ID NO: 1943809 - RNA, 19 nt, Homo sapiens
  misc_RNA (1)...(19): siRNA sense strand
ucaccacccucauccugau

SEQ ID NO: 1943810 - RNA, 19 nt, Homo sapiens
  misc_RNA (1)...(19): siRNA sense strand
gguagccacgagcugauaa

SEQ ID NO: 1943811 - RNA, 19 nt, Homo sapiens
  misc_RNA (1)...(19): siRNA sense strand
agccacgagcugauaauua

SEQ ID NO: 1943812 - RNA, 19 nt, Homo sapiens
  misc_RNA (1)...(19): siRNA sense strand
uaccagagacucacccaau

SEQ ID NO: 1943813 - RNA, 19 nt, Homo sapiens
  misc_RNA (1)...(19): siRNA sense strand
gggcucauuauccugcaua

SEQ ID NO: 1943814 - RNA, 19 nt, Homo sapiens
  misc_RNA (1)...(19): siRNA sense strand
ucauuauccugcauagucu

SEQ ID NO: 1943815 - RNA, 19 nt, Homo sapiens
  misc_RNA (1)...(19): siRNA sense strand
accagagacucacccaaug

SEQ ID NO: 1943816 - RNA, 19 nt, Homo sapiens
  misc_RNA (1)...(19): siRNA sense strand
gccagggagagccaaguuu

SEQ ID NO: 1943817 - RNA, 19 nt, Homo sapiens
  misc_RNA (1)...(19): siRNA sense strand
ucccuuuccuggucugcua

SEQ ID NO: 1943818 - RNA, 19 nt, Homo sapiens
  misc_RNA (1)...(19): siRNA sense strand
uaauuacagacaagagaug

SEQ ID NO: 1943819 - RNA, 19 nt, Homo sapiens
  misc_RNA (1)...(19): siRNA sense strand
gaggggagagguagaggua

SEQ ID NO: 1943820 - RNA, 19 nt, Homo sapiens
  misc_RNA (1)...(19): siRNA sense strand
gaucaggaguuucguuucu

SEQ ID NO: 1943821 - RNA, 19 nt, Homo sapiens
  misc_RNA (1)...(19): siRNA sense strand
ccaggagucggaaauguua

SEQ ID NO: 1943822 - RNA, 19 nt, Homo sapiens
  misc_RNA (1)...(19): siRNA sense strand
cgaaagacccugaccuuca

SEQ ID NO: 1943823 - RNA, 19 nt, Homo sapiens
  misc_RNA (1)...(19): siRNA sense strand
ggucuucucucgcuaugau

SEQ ID NO: 1943824 - RNA, 19 nt, Homo sapiens
  misc_RNA (1)...(19): siRNA sense strand
gaucagaccauuucuaucg

SEQ ID NO: 1943825 - RNA, 19 nt, Homo sapiens
  misc_RNA (1)...(19): siRNA sense strand
ucaaaggccugugcagaug

SEQ ID NO: 1943826 - RNA, 19 nt, Homo sapiens
  misc_RNA (1)...(19): siRNA sense strand
gcagcgagggaacugguua

SEQ ID NO: 1943827 - RNA, 19 nt, Homo sapiens
  misc_RNA (1)...(19): siRNA sense strand
gcaauugucagaugaucga

SEQ ID NO: 1943828 - RNA, 19 nt, Homo sapiens
  misc_RNA (1)...(19): siRNA sense strand
cgagggaacugguuaucca

SEQ ID NO: 1943829 - RNA, 19 nt, Homo sapiens
  misc_RNA (1)...(19): siRNA sense strand
agucggaaauguuaaacuu

SEQ ID NO: 1943830 - RNA, 19 nt, Homo sapiens
  misc_RNA (1)...(19): siRNA sense strand
cgaagaagcagagggcauu

SEQ ID NO: 1943831 - RNA, 19 nt, Homo sapiens
  misc_RNA (1)...(19): siRNA sense strand
gaagaagcagagggcauuu

SEQ ID NO: 1943832 - RNA, 19 nt, Homo sapiens
  misc_RNA (1)...(19): siRNA sense strand
ucagaaggagcaagagauu

SEQ ID NO: 1943833 - RNA, 19 nt, Homo sapiens
  misc_RNA (1)...(19): siRNA sense strand
gagcgaggagcagcgguua

SEQ ID NO: 1943834 - RNA, 19 nt, Homo sapiens
  misc_RNA (1)...(19): siRNA sense strand
gaguuucguuucucacaca

SEQ ID NO: 1943835 - RNA, 19 nt, Homo sapiens
  misc_RNA (1)...(19): siRNA sense strand
acucggagcccacuacuga

SEQ ID NO: 1943836 - RNA, 19 nt, Homo sapiens
  misc_RNA (1)...(19): siRNA sense strand
ccgaggcgcugcagaaacu

SEQ ID NO: 1943837 - RNA, 19 nt, Homo sapiens
  misc_RNA (1)...(19): siRNA sense strand
cgagaggaccgaagaagca

SEQ ID NO: 1943838 - RNA, 19 nt, Homo sapiens
  misc_RNA (1)...(19): siRNA sense strand
ccgaucagaccauuucuau

SEQ ID NO: 1943839 - RNA, 19 nt, Homo sapiens
  misc_RNA (1)...(19): siRNA sense strand
ucaggaguuucguuucuca

SEQ ID NO: 1943840 - RNA, 19 nt, Homo sapiens
  misc_RNA (1)...(19): siRNA sense strand
ggacauacggaucgaugag

SEQ ID NO: 1943841 - RNA, 19 nt, Homo sapiens
  misc_RNA (1)...(19): siRNA sense strand
gcaaggguucuggcaguga

SEQ ID NO: 1943842 - RNA, 19 nt, Homo sapiens
  misc_RNA (1)...(19): siRNA sense strand
gaugaccuccagcugauuc

SEQ ID NO: 1943843 - RNA, 19 nt, Homo sapiens
  misc_RNA (1)...(19): siRNA sense strand
ucgcuaugaucaggaguuu

SEQ ID NO: 1943844 - RNA, 19 nt, Homo sapiens
  misc_RNA (1)...(19): siRNA sense strand
gcucugugcccaucaugug

SEQ ID NO: 1943845 - RNA, 19 nt, Homo sapiens
  misc_RNA (1)...(19): siRNA sense strand
ugcagaaacuugacaccau

SEQ ID NO: 1943846 - RNA, 19 nt, Homo sapiens
  misc_RNA (1)...(19): siRNA sense strand
ccaccuccuuccagaaugg

SEQ ID NO: 1943847 - RNA, 19 nt, Homo sapiens
  misc_RNA (1)...(19): siRNA sense strand
gucaaaggccugugcagau

SEQ ID NO: 1943848 - RNA, 19 nt, Homo sapiens
  misc_RNA (1)...(19): siRNA sense strand
cagaaggagcaagagauuu

SEQ ID NO: 1943849 - RNA, 19 nt, Homo sapiens
  misc_RNA (1)...(19): siRNA sense strand
gcuaugaucaggaguuucg

SEQ ID NO: 1943850 - RNA, 19 nt, Homo sapiens
  misc_RNA (1)...(19): siRNA sense strand
ggccuggugggcaugcuua

SEQ ID NO: 1943851 - RNA, 19 nt, Homo sapiens
  misc_RNA (1)...(19): siRNA sense strand
uuucguuucucacacaaug

SEQ ID NO: 1943852 - RNA, 19 nt, Homo sapiens
  misc_RNA (1)...(19): siRNA sense strand
agaaggagcaagagauuuu

SEQ ID NO: 1943853 - RNA, 19 nt, Homo sapiens
  misc_RNA (1)...(19): siRNA sense strand
guguagugcuggacuugca

SEQ ID NO: 1943854 - RNA, 19 nt, Homo sapiens
  misc_RNA (1)...(19): siRNA sense strand
ggagcagcgguuacuggaa

SEQ ID NO: 1943855 - RNA, 19 nt, Homo sapiens
  misc_RNA (1)...(19): siRNA sense strand
gucggaaauguuaaacuuu

SEQ ID NO: 1943856 - RNA, 19 nt, Homo sapiens
  misc_RNA (1)...(19): siRNA sense strand
gaaaggaaauacuguguua

SEQ ID NO: 1943857 - RNA, 19 nt, Homo sapiens
  misc_RNA (1)...(19): siRNA sense strand
gacauugacuccuaaauuu

SEQ ID NO: 1943858 - RNA, 19 nt, Homo sapiens
  misc_RNA (1)...(19): siRNA sense strand
gcacaucacucuccucaug

SEQ ID NO: 1943859 - RNA, 19 nt, Homo sapiens
  misc_RNA (1)...(19): siRNA sense strand
ggaagugagugagaucuua

SEQ ID NO: 1943860 - RNA, 19 nt, Homo sapiens
  misc_RNA (1)...(19): siRNA sense strand
uaauaaaccugcugaagaa

SEQ ID NO: 1943861 - RNA, 19 nt, Homo sapiens
  misc_RNA (1)...(19): siRNA sense strand
caagauacauuccucagaa

SEQ ID NO: 1943862 - RNA, 19 nt, Homo sapiens
  misc_RNA (1)...(19): siRNA sense strand
gaaagaggaugucuacagu

SEQ ID NO: 1943863 - RNA, 19 nt, Homo sapiens
  misc_RNA (1)...(19): siRNA sense strand
caagguaccucucaauguu

SEQ ID NO: 1943864 - RNA, 19 nt, Homo sapiens
  misc_RNA (1)...(19): siRNA sense strand
acacaccucuugucuauaa

SEQ ID NO: 1943865 - RNA, 19 nt, Homo sapiens
  misc_RNA (1)...(19): siRNA sense strand
guacuuggcugcagucaga

SEQ ID NO: 1943866 - RNA, 19 nt, Homo sapiens
  misc_RNA (1)...(19): siRNA sense strand
gaagguguguguaaaugaa

SEQ ID NO: 1943867 - RNA, 19 nt, Homo sapiens
  misc_RNA (1)...(19): siRNA sense strand
caagucagcuucucgauca

SEQ ID NO: 1943868 - RNA, 19 nt, Homo sapiens
  misc_RNA (1)...(19): siRNA sense strand
ggagauucauuaugucauu

SEQ ID NO: 1943869 - RNA, 19 nt, Homo sapiens
  misc_RNA (1)...(19): siRNA sense strand
uuaaacagcuuuccaagga

SEQ ID NO: 1943870 - RNA, 19 nt, Homo sapiens
  misc_RNA (1)...(19): siRNA sense strand
gcaaguaccuuuugaguga

SEQ ID NO: 1943871 - RNA, 19 nt, Homo sapiens
  misc_RNA (1)...(19): siRNA sense strand
gggaugaguuugaagauau

SEQ ID NO: 1943872 - RNA, 19 nt, Homo sapiens
  misc_RNA (1)...(19): siRNA sense strand
gaagaaaugcuugguugua

SEQ ID NO: 1943873 - RNA, 19 nt, Homo sapiens
  misc_RNA (1)...(19): siRNA sense strand
gcaguagcauugcagauga

SEQ ID NO: 1943874 - RNA, 19 nt, Homo sapiens
  misc_RNA (1)...(19): siRNA sense strand
cuacacaccucuugucuau

SEQ ID NO: 1943875 - RNA, 19 nt, Homo sapiens
  misc_RNA (1)...(19): siRNA sense strand
gaaacacacuaaaggacuu

SEQ ID NO: 1943876 - RNA, 19 nt, Homo sapiens
  misc_RNA (1)...(19): siRNA sense strand
ggaaccagcugcucaacau

SEQ ID NO: 1943877 - RNA, 19 nt, Homo sapiens
  misc_RNA (1)...(19): siRNA sense strand
gaagagaggaggcauguca

SEQ ID NO: 1943878 - RNA, 19 nt, Homo sapiens
  misc_RNA (1)...(19): siRNA sense strand
gaaacagucugaggacaug

SEQ ID NO: 1943879 - RNA, 19 nt, Homo sapiens
  misc_RNA (1)...(19): siRNA sense strand
guaguguucucaauucuga

SEQ ID NO: 1943880 - RNA, 19 nt, Homo sapiens
  misc_RNA (1)...(19): siRNA sense strand
aaauggagcuucugcaaau

SEQ ID NO: 1943881 - RNA, 19 nt, Homo sapiens
  misc_RNA (1)...(19): siRNA sense strand
gccaagacauugacuccua

SEQ ID NO: 1943882 - RNA, 19 nt, Homo sapiens
  misc_RNA (1)...(19): siRNA sense strand
gaaagauucucucugaaaa

SEQ ID NO: 1943883 - RNA, 19 nt, Homo sapiens
  misc_RNA (1)...(19): siRNA sense strand
gcugaaagccagaaagauu

SEQ ID NO: 1943884 - RNA, 19 nt, Homo sapiens
  misc_RNA (1)...(19): siRNA sense strand
ucacugaaguugccuacaa

SEQ ID NO: 1943885 - RNA, 19 nt, Homo sapiens
  misc_RNA (1)...(19): siRNA sense strand
guaggacucuuuaaaccuu

SEQ ID NO: 1943886 - RNA, 19 nt, Homo sapiens
  misc_RNA (1)...(19): siRNA sense strand
ucauuuggccugauaauaa

SEQ ID NO: 1943887 - RNA, 19 nt, Homo sapiens
  misc_RNA (1)...(19): siRNA sense strand
cgaaagacauccuaguuac

SEQ ID NO: 1943888 - RNA, 19 nt, Homo sapiens
  misc_RNA (1)...(19): siRNA sense strand
ccaagacauugacuccuaa

SEQ ID NO: 1943889 - RNA, 19 nt, Homo sapiens
  misc_RNA (1)...(19): siRNA sense strand
aagaaaugcuugguuguaa

SEQ ID NO: 1943890 - RNA, 19 nt, Homo sapiens
  misc_RNA (1)...(19): siRNA sense strand
ggaaauacuguguuagaau

SEQ ID NO: 1943891 - RNA, 19 nt, Homo sapiens
  misc_RNA (1)...(19): siRNA sense strand
ggaugaguuugaagauauu

SEQ ID NO: 1943892 - RNA, 19 nt, Homo sapiens
  misc_RNA (1)...(19): siRNA sense strand
gagcucauauaacuugguu

SEQ ID NO: 1943893 - RNA, 19 nt, Homo sapiens
  misc_RNA (1)...(19): siRNA sense strand
uaaaccugcugaagaaguu

SEQ ID NO: 1943894 - RNA, 19 nt, Homo sapiens
  misc_RNA (1)...(19): siRNA sense strand
ugaaaugagucacaaacug

SEQ ID NO: 1943895 - RNA, 19 nt, Homo sapiens
  misc_RNA (1)...(19): siRNA sense strand
gaaaugcuugguuguaaga

SEQ ID NO: 1943896 - RNA, 19 nt, Homo sapiens
  misc_RNA (1)...(19): siRNA sense strand
ccauguaaaccaauugaua

SEQ ID NO: 1943897 - RNA, 19 nt, Homo sapiens
  misc_RNA (1)...(19): siRNA sense strand
cugaggagauucauuaugu

SEQ ID NO: 1943898 - RNA, 19 nt, Homo sapiens
  misc_RNA (1)...(19): siRNA sense strand
cauuuggccugauaauaaa

SEQ ID NO: 1943899 - RNA, 19 nt, Homo sapiens
  misc_RNA (1)...(19): siRNA sense strand
uguauuaucuucugaugug

SEQ ID NO: 1943900 - RNA, 19 nt, Homo sapiens
  misc_RNA (1)...(19): siRNA sense strand
cuacugggcuguauucucu

SEQ ID NO: 1943901 - RNA, 19 nt, Homo sapiens
  misc_RNA (1)...(19): siRNA sense strand
aagaggaugucuacaguug

SEQ ID NO: 1943902 - RNA, 19 nt, Homo sapiens
  misc_RNA (1)...(19): siRNA sense strand
ggaaagaggaugucuacag

SEQ ID NO: 1943903 - RNA, 19 nt, Homo sapiens
  misc_RNA (1)...(19): siRNA sense strand
gacuugaaauuugcaauga

SEQ ID NO: 1943904 - RNA, 19 nt, Homo sapiens
  misc_RNA (1)...(19): siRNA sense strand
agacauugacuccuaaauu

SEQ ID NO: 1943905 - RNA, 19 nt, Homo sapiens
  misc_RNA (1)...(19): siRNA sense strand
gauguauuaucuucugaug

SEQ ID NO: 1943906 - RNA, 19 nt, Homo sapiens
  misc_RNA (1)...(19): siRNA sense strand
ccauacaagugacuacgaa

SEQ ID NO: 1943907 - RNA, 19 nt, Homo sapiens
  misc_RNA (1)...(19): siRNA sense strand
cauccuaguuacagagaaa

SEQ ID NO: 1943908 - RNA, 19 nt, Homo sapiens
  misc_RNA (1)...(19): siRNA sense strand
guaagacaccaauaggaaa

SEQ ID NO: 1943909 - RNA, 19 nt, Homo sapiens
  misc_RNA (1)...(19): siRNA sense strand
ucagauaauuugcaaguac

SEQ ID NO: 1943910 - RNA, 19 nt, Homo sapiens
  misc_RNA (1)...(19): siRNA sense strand
gaaagacauccuaguuaca

SEQ ID NO: 1943911 - RNA, 19 nt, Homo sapiens
  misc_RNA (1)...(19): siRNA sense strand
gaaccugccacaaccaaau

SEQ ID NO: 1943912 - RNA, 19 nt, Homo sapiens
  misc_RNA (1)...(19): siRNA sense strand
gagaggaagugagugagau

SEQ ID NO: 1943913 - RNA, 19 nt, Homo sapiens
  misc_RNA (1)...(19): siRNA sense strand
guuaugcuccuguugaauu

SEQ ID NO: 1943914 - RNA, 19 nt, Homo sapiens
  misc_RNA (1)...(19): siRNA sense strand
acgaaagacauccuaguua

SEQ ID NO: 1943915 - RNA, 19 nt, Homo sapiens
  misc_RNA (1)...(19): siRNA sense strand
gaaggcuguuaccugcuuu

SEQ ID NO: 1943916 - RNA, 19 nt, Homo sapiens
  misc_RNA (1)...(19): siRNA sense strand
gaaguggucgaugggcuua

SEQ ID NO: 1943917 - RNA, 19 nt, Homo sapiens
  misc_RNA (1)...(19): siRNA sense strand
aagcauccauguguacuuu

SEQ ID NO: 1943918 - RNA, 19 nt, Homo sapiens
  misc_RNA (1)...(19): siRNA sense strand
ccaauuaguaucaguuaug

SEQ ID NO: 1943919 - RNA, 19 nt, Homo sapiens
  misc_RNA (1)...(19): siRNA sense strand
gaaugguuaugcuccuguu

SEQ ID NO: 1943920 - RNA, 19 nt, Homo sapiens
  misc_RNA (1)...(19): siRNA sense strand
ccuaauaguugcuguucug

SEQ ID NO: 1943921 - RNA, 19 nt, Homo sapiens
  misc_RNA (1)...(19): siRNA sense strand
gagcuucugcaaauugaaa

SEQ ID NO: 1943922 - RNA, 19 nt, Homo sapiens
  misc_RNA (1)...(19): siRNA sense strand
agucggagcucauauaacu

SEQ ID NO: 1943923 - RNA, 19 nt, Homo sapiens
  misc_RNA (1)...(19): siRNA sense strand
aaagugggaugaguuugaa

SEQ ID NO: 1943924 - RNA, 19 nt, Homo sapiens
  misc_RNA (1)...(19): siRNA sense strand
auaauaaaccugcugaaga

SEQ ID NO: 1943925 - RNA, 19 nt, Homo sapiens
  misc_RNA (1)...(19): siRNA sense strand
uaccuugucccaauuagua

SEQ ID NO: 1943926 - RNA, 19 nt, Homo sapiens
  misc_RNA (1)...(19): siRNA sense strand
aggaaucccuucaaucugu

SEQ ID NO: 1943927 - RNA, 19 nt, Homo sapiens
  misc_RNA (1)...(19): siRNA sense strand
ccaggcauuuggaggguuu

SEQ ID NO: 1943928 - RNA, 19 nt, Homo sapiens
  misc_RNA (1)...(19): siRNA sense strand
gagaaaggaaauacugugu

SEQ ID NO: 1943929 - RNA, 19 nt, Homo sapiens
  misc_RNA (1)...(19): siRNA sense strand
uaagggaauuacuccaugu

SEQ ID NO: 1943930 - RNA, 19 nt, Homo sapiens
  misc_RNA (1)...(19): siRNA sense strand
gaaguugccuacaaaaugg

SEQ ID NO: 1943931 - RNA, 19 nt, Homo sapiens
  misc_RNA (1)...(19): siRNA sense strand
gauaauaaaccugcugaag

SEQ ID NO: 1943932 - RNA, 19 nt, Homo sapiens
  misc_RNA (1)...(19): siRNA sense strand
gauccugugucacuucgau

SEQ ID NO: 1943933 - RNA, 19 nt, Homo sapiens
  misc_RNA (1)...(19): siRNA sense strand
gaagaagguauucagaaac

SEQ ID NO: 1943934 - RNA, 19 nt, Homo sapiens
  misc_RNA (1)...(19): siRNA sense strand
gaucaagguaccucucaau

SEQ ID NO: 1943935 - RNA, 19 nt, Homo sapiens
  misc_RNA (1)...(19): siRNA sense strand
ugggaugaguuugaagaua

SEQ ID NO: 1943936 - RNA, 19 nt, Homo sapiens
  misc_RNA (1)...(19): siRNA sense strand
ucaaagaccaggugauucu

SEQ ID NO: 1943937 - RNA, 19 nt, Homo sapiens
  misc_RNA (1)...(19): siRNA sense strand
uuuggaggguuucucauuu

SEQ ID NO: 1943938 - RNA, 19 nt, Homo sapiens
  misc_RNA (1)...(19): siRNA sense strand
aauaguugcuguucugcuu

SEQ ID NO: 1943939 - RNA, 19 nt, Homo sapiens
  misc_RNA (1)...(19): siRNA sense strand
aagauacauuccucagaaa

SEQ ID NO: 1943940 - RNA, 19 nt, Homo sapiens
  misc_RNA (1)...(19): siRNA sense strand
aauguaguguucucaauuc

SEQ ID NO: 1943941 - RNA, 19 nt, Homo sapiens
  misc_RNA (1)...(19): siRNA sense strand
ucucgaagguguguguaaa

SEQ ID NO: 1943942 - RNA, 19 nt, Homo sapiens
  misc_RNA (1)...(19): siRNA sense strand
cuuaguagcaguagcauug

SEQ ID NO: 1943943 - RNA, 19 nt, Homo sapiens
  misc_RNA (1)...(19): siRNA sense strand
gaaccagcugcucaacauu

SEQ ID NO: 1943944 - RNA, 19 nt, Homo sapiens
  misc_RNA (1)...(19): siRNA sense strand
gcauucuucugcauuccaa

SEQ ID NO: 1943945 - RNA, 19 nt, Homo sapiens
  misc_RNA (1)...(19): siRNA sense strand
gaaaugcuacacaccucuu

SEQ ID NO: 1943946 - RNA, 19 nt, Homo sapiens
  misc_RNA (1)...(19): siRNA sense strand
gaagguauucagaaacuac

SEQ ID NO: 1943947 - RNA, 19 nt, Homo sapiens
  misc_RNA (1)...(19): siRNA sense strand
uaccuuugguggcaauaaa

SEQ ID NO: 1943948 - RNA, 19 nt, Homo sapiens
  misc_RNA (1)...(19): siRNA sense strand
gaggagauucauuauguca

SEQ ID NO: 1943949 - RNA, 19 nt, Homo sapiens
  misc_RNA (1)...(19): siRNA sense strand
auucugaggagauucauua

SEQ ID NO: 1943950 - RNA, 19 nt, Homo sapiens
  misc_RNA (1)...(19): siRNA sense strand
cacugaaguugccuacaaa

SEQ ID NO: 1943951 - RNA, 19 nt, Homo sapiens
  misc_RNA (1)...(19): siRNA sense strand
gaaacucuuuauguguaug

SEQ ID NO: 1943952 - RNA, 19 nt, Homo sapiens
  misc_RNA (1)...(19): siRNA sense strand
uagaugaaaugagucacaa

SEQ ID NO: 1943953 - RNA, 19 nt, Homo sapiens
  misc_RNA (1)...(19): siRNA sense strand
ccagcauucuucugcauuc

SEQ ID NO: 1943954 - RNA, 19 nt, Homo sapiens
  misc_RNA (1)...(19): siRNA sense strand
uguaagacaccaauaggaa

SEQ ID NO: 1943955 - RNA, 19 nt, Homo sapiens
  misc_RNA (1)...(19): siRNA sense strand
uggagaagaagaagauaaa

SEQ ID NO: 1943956 - RNA, 19 nt, Homo sapiens
  misc_RNA (1)...(19): siRNA sense strand
ggagcucgguuggugauuu

SEQ ID NO: 1943957 - RNA, 19 nt, Homo sapiens
  misc_RNA (1)...(19): siRNA sense strand
gggaggugcuuggaacuga

SEQ ID NO: 1943958 - RNA, 19 nt, Homo sapiens
  misc_RNA (1)...(19): siRNA sense strand
gagcucgguuggugauuuc

SEQ ID NO: 1943959 - RNA, 19 nt, Homo sapiens
  misc_RNA (1)...(19): siRNA sense strand
ccagacccuuguaauuguu

SEQ ID NO: 1943960 - RNA, 19 nt, Homo sapiens
  misc_RNA (1)...(19): siRNA sense strand
gaacgccccucagcccuuu

SEQ ID NO: 1943961 - RNA, 19 nt, Homo sapiens
  misc_RNA (1)...(19): siRNA sense strand
ggaggugcuuggaacugau

SEQ ID NO: 1943962 - RNA, 19 nt, Homo sapiens
  misc_RNA (1)...(19): siRNA sense strand
gcgcggugcccguuauuuc

SEQ ID NO: 1943963 - RNA, 19 nt, Homo sapiens
  misc_RNA (1)...(19): siRNA sense strand
uccagacccuuguaauugu

SEQ ID NO: 1943964 - RNA, 19 nt, Homo sapiens
  misc_RNA (1)...(19): siRNA sense strand
ggugauuucucggguuucu

SEQ ID NO: 1943965 - RNA, 19 nt, Homo sapiens
  misc_RNA (1)...(19): siRNA sense strand
uuggugauuucucggguuu

SEQ ID NO: 1943966 - RNA, 19 nt, Homo sapiens
  misc_RNA (1)...(19): siRNA sense strand
ccucgcggacuaagagaaa

SEQ ID NO: 1943967 - RNA, 19 nt, Homo sapiens
  misc_RNA (1)...(19): siRNA sense strand
uuccagacccuuguaauug

SEQ ID NO: 1943968 - RNA, 19 nt, Homo sapiens
  misc_RNA (1)...(19): siRNA sense strand
uuuccagacccuuguaauu

SEQ ID NO: 1943969 - RNA, 19 nt, Homo sapiens
  misc_RNA (1)...(19): siRNA sense strand
gcagaaagaugcuccaaga

SEQ ID NO: 1943970 - RNA, 19 nt, Homo sapiens
  misc_RNA (1)...(19): siRNA sense strand
gaacagagagaccauugua

SEQ ID NO: 1943971 - RNA, 19 nt, Homo sapiens
  misc_RNA (1)...(19): siRNA sense strand
gaaccaacacuaucaaugu

SEQ ID NO: 1943972 - RNA, 19 nt, Homo sapiens
  misc_RNA (1)...(19): siRNA sense strand
gacgaagcaacaugaauua

SEQ ID NO: 1943973 - RNA, 19 nt, Homo sapiens
  misc_RNA (1)...(19): siRNA sense strand
gcaagacaguggcauuucu

SEQ ID NO: 1943974 - RNA, 19 nt, Homo sapiens
  misc_RNA (1)...(19): siRNA sense strand
gagaacagagagaccauug

SEQ ID NO: 1943975 - RNA, 19 nt, Homo sapiens
  misc_RNA (1)...(19): siRNA sense strand
ccaagaaccaacacuauca

SEQ ID NO: 1943976 - RNA, 19 nt, Homo sapiens
  misc_RNA (1)...(19): siRNA sense strand
gcuccaagaaccaacacua

SEQ ID NO: 1943977 - RNA, 19 nt, Homo sapiens
  misc_RNA (1)...(19): siRNA sense strand
ccaacacuaucaaugucuu

SEQ ID NO: 1943978 - RNA, 19 nt, Homo sapiens
  misc_RNA (1)...(19): siRNA sense strand
cuaucaaugucuuugcaaa

SEQ ID NO: 1943979 - RNA, 19 nt, Homo sapiens
  misc_RNA (1)...(19): siRNA sense strand
caagaaccaacacuaucaa

SEQ ID NO: 1943980 - RNA, 19 nt, Homo sapiens
  misc_RNA (1)...(19): siRNA sense strand
caacacuaucaaugucuuu

SEQ ID NO: 1943981 - RNA, 19 nt, Homo sapiens
  misc_RNA (1)...(19): siRNA sense strand
ucaaucagagaugaacaua

SEQ ID NO: 1943982 - RNA, 19 nt, Homo sapiens
  misc_RNA (1)...(19): siRNA sense strand
gugcaagacaguggcauuu

SEQ ID NO: 1943983 - RNA, 19 nt, Homo sapiens
  misc_RNA (1)...(19): siRNA sense strand
cuucggauccgcacucauu

SEQ ID NO: 1943984 - RNA, 19 nt, Homo sapiens
  misc_RNA (1)...(19): siRNA sense strand
gggacugucugucaaaaga

SEQ ID NO: 1943985 - RNA, 19 nt, Homo sapiens
  misc_RNA (1)...(19): siRNA sense strand
caaucagagaugaacauaa

SEQ ID NO: 1943986 - RNA, 19 nt, Homo sapiens
  misc_RNA (1)...(19): siRNA sense strand
gcauuucuccucuccucuu

SEQ ID NO: 1943987 - RNA, 19 nt, Homo sapiens
  misc_RNA (1)...(19): siRNA sense strand
guauaucuuuuguggauga

SEQ ID NO: 1943988 - RNA, 19 nt, Homo sapiens
  misc_RNA (1)...(19): siRNA sense strand
agaaagaugcuccaagaac

SEQ ID NO: 1943989 - RNA, 19 nt, Homo sapiens
  misc_RNA (1)...(19): siRNA sense strand
gucaaaagacucuguauau

SEQ ID NO: 1943990 - RNA, 19 nt, Homo sapiens
  misc_RNA (1)...(19): siRNA sense strand
cagaaagaugcuccaagaa

SEQ ID NO: 1943991 - RNA, 19 nt, Homo sapiens
  misc_RNA (1)...(19): siRNA sense strand
caaaagacucuguauaucu

SEQ ID NO: 1943992 - RNA, 19 nt, Homo sapiens
  misc_RNA (1)...(19): siRNA sense strand
gcucagcacagcccuggau

SEQ ID NO: 1943993 - RNA, 19 nt, Homo sapiens
  misc_RNA (1)...(19): siRNA sense strand
cgaagcaacaugaauuagg

SEQ ID NO: 1943994 - RNA, 19 nt, Homo sapiens
  misc_RNA (1)...(19): siRNA sense strand
ucaaaagacucuguauauc

SEQ ID NO: 1943995 - RNA, 19 nt, Homo sapiens
  misc_RNA (1)...(19): siRNA sense strand
cauuucuccucuccucuug

SEQ ID NO: 1943996 - RNA, 19 nt, Homo sapiens
  misc_RNA (1)...(19): siRNA sense strand
aaccaacacuaucaauguc

SEQ ID NO: 1943997 - RNA, 19 nt, Homo sapiens
  misc_RNA (1)...(19): siRNA sense strand
ggugcaagacaguggcauu

SEQ ID NO: 1943998 - RNA, 19 nt, Homo sapiens
  misc_RNA (1)...(19): siRNA sense strand
agaaccaacacuaucaaug

SEQ ID NO: 1943999 - RNA, 19 nt, Homo sapiens
  misc_RNA (1)...(19): siRNA sense strand
cagagaugaacauaaagga

SEQ ID NO: 1944000 - RNA, 19 nt, Homo sapiens
  misc_RNA (1)...(19): siRNA sense strand
ggaaacgacucucggauua

SEQ ID NO: 1944001 - RNA, 19 nt, Homo sapiens
  misc_RNA (1)...(19): siRNA sense strand
aaacgacucucggauuaua

SEQ ID NO: 1944002 - RNA, 19 nt, Homo sapiens
  misc_RNA (1)...(19): siRNA sense strand
gaacagcuacagagggauu

SEQ ID NO: 1944003 - RNA, 19 nt, Homo sapiens
  misc_RNA (1)...(19): siRNA sense strand
cagcugaucuccaaagucu

SEQ ID NO: 1944004 - RNA, 19 nt, Homo sapiens
  misc_RNA (1)...(19): siRNA sense strand
ggagaaggugcuacuagaa

SEQ ID NO: 1944005 - RNA, 19 nt, Homo sapiens
  misc_RNA (1)...(19): siRNA sense strand
ugaagugacugagacaaug

SEQ ID NO: 1944006 - RNA, 19 nt, Homo sapiens
  misc_RNA (1)...(19): siRNA sense strand
gggaaacgacucucggauu

SEQ ID NO: 1944007 - RNA, 19 nt, Homo sapiens
  misc_RNA (1)...(19): siRNA sense strand
agaaggugcuacuagaaga

SEQ ID NO: 1944008 - RNA, 19 nt, Homo sapiens
  misc_RNA (1)...(19): siRNA sense strand
uggagaaggugcuacuaga

SEQ ID NO: 1944009 - RNA, 19 nt, Homo sapiens
  misc_RNA (1)...(19): siRNA sense strand
gaaggugcuacuagaagaa

SEQ ID NO: 1944010 - RNA, 19 nt, Homo sapiens
  misc_RNA (1)...(19): siRNA sense strand
ugacugagacaauggagaa

SEQ ID NO: 1944011 - RNA, 19 nt, Homo sapiens
  misc_RNA (1)...(19): siRNA sense strand
gcugaucuccaaagucuug

SEQ ID NO: 1944012 - RNA, 19 nt, Homo sapiens
  misc_RNA (1)...(19): siRNA sense strand
gaaacgacucucggauuau

SEQ ID NO: 1944013 - RNA, 19 nt, Homo sapiens
  misc_RNA (1)...(19): siRNA sense strand
gagaaggugcuacuagaag

SEQ ID NO: 1944014 - RNA, 19 nt, Homo sapiens
  misc_RNA (1)...(19): siRNA sense strand
ucuggcagcugaucuccaa

SEQ ID NO: 1944015 - RNA, 19 nt, Homo sapiens
  misc_RNA (1)...(19): siRNA sense strand
gaagugacugagacaaugg

SEQ ID NO: 1944016 - RNA, 19 nt, Homo sapiens
  misc_RNA (1)...(19): siRNA sense strand
caacuccaagcucaaccua

SEQ ID NO: 1944017 - RNA, 19 nt, Homo sapiens
  misc_RNA (1)...(19): siRNA sense strand
acuccaagcucaaccuagu

SEQ ID NO: 1944018 - RNA, 19 nt, Homo sapiens
  misc_RNA (1)...(19): siRNA sense strand
gcagaugggaaacgacucu

SEQ ID NO: 1944019 - RNA, 19 nt, Homo sapiens
  misc_RNA (1)...(19): siRNA sense strand
ggcagcugaucuccaaagu

SEQ ID NO: 1944020 - RNA, 19 nt, Homo sapiens
  misc_RNA (1)...(19): siRNA sense strand
gaacaccacucauccauca

SEQ ID NO: 1944021 - RNA, 19 nt, Homo sapiens
  misc_RNA (1)...(19): siRNA sense strand
gaacagugcgucucuauga

SEQ ID NO: 1944022 - RNA, 19 nt, Homo sapiens
  misc_RNA (1)...(19): siRNA sense strand
caacacaaauugccuccuu

SEQ ID NO: 1944023 - RNA, 19 nt, Homo sapiens
  misc_RNA (1)...(19): siRNA sense strand
caaauugccuccuuauguc

SEQ ID NO: 1944024 - RNA, 19 nt, Homo sapiens
  misc_RNA (1)...(19): siRNA sense strand
caagaagaaucucugugaa

SEQ ID NO: 1944025 - RNA, 19 nt, Homo sapiens
  misc_RNA (1)...(19): siRNA sense strand
aaucaccgcugcugucuuu

SEQ ID NO: 1944026 - RNA, 19 nt, Homo sapiens
  misc_RNA (1)...(19): siRNA sense strand
gaggagagucgccagcuua

SEQ ID NO: 1944027 - RNA, 19 nt, Homo sapiens
  misc_RNA (1)...(19): siRNA sense strand
gaaauccaccgacugaaga

SEQ ID NO: 1944028 - RNA, 19 nt, Homo sapiens
  misc_RNA (1)...(19): siRNA sense strand
gaccaaagcauccuccauu

SEQ ID NO: 1944029 - RNA, 19 nt, Homo sapiens
  misc_RNA (1)...(19): siRNA sense strand
ugacaaggcucaggaguuc

SEQ ID NO: 1944030 - RNA, 19 nt, Homo sapiens
  misc_RNA (1)...(19): siRNA sense strand
gaacuuugaugcggagugu

SEQ ID NO: 1944031 - RNA, 19 nt, Homo sapiens
  misc_RNA (1)...(19): siRNA sense strand
ccaagaagaaucucuguga

SEQ ID NO: 1944032 - RNA, 19 nt, Homo sapiens
  misc_RNA (1)...(19): siRNA sense strand
ccacggaacuccagaacca

SEQ ID NO: 1944033 - RNA, 19 nt, Homo sapiens
  misc_RNA (1)...(19): siRNA sense strand
guacagccuucaaucacaa

SEQ ID NO: 1944034 - RNA, 19 nt, Homo sapiens
  misc_RNA (1)...(19): siRNA sense strand
gaaucucugugaaaucaau

SEQ ID NO: 1944035 - RNA, 19 nt, Homo sapiens
  misc_RNA (1)...(19): siRNA sense strand
gcucaggaguucuuugcaa

SEQ ID NO: 1944036 - RNA, 19 nt, Homo sapiens
  misc_RNA (1)...(19): siRNA sense strand
agaagaaucucugugaaau

SEQ ID NO: 1944037 - RNA, 19 nt, Homo sapiens
  misc_RNA (1)...(19): siRNA sense strand
ccucagagcucggccaaga

SEQ ID NO: 1944038 - RNA, 19 nt, Homo sapiens
  misc_RNA (1)...(19): siRNA sense strand
aagaaucucugugaaauca

SEQ ID NO: 1944039 - RNA, 19 nt, Homo sapiens
  misc_RNA (1)...(19): siRNA sense strand
caccuuugcuaccuacuuu

SEQ ID NO: 1944040 - RNA, 19 nt, Homo sapiens
  misc_RNA (1)...(19): siRNA sense strand
caagaguggccucaaggua

SEQ ID NO: 1944041 - RNA, 19 nt, Homo sapiens
  misc_RNA (1)...(19): siRNA sense strand
gcugaaauccaccgacuga

SEQ ID NO: 1944042 - RNA, 19 nt, Homo sapiens
  misc_RNA (1)...(19): siRNA sense strand
acaaauugccuccuuaugu

SEQ ID NO: 1944043 - RNA, 19 nt, Homo sapiens
  misc_RNA (1)...(19): siRNA sense strand
uaaugcagguguaugacuu

SEQ ID NO: 1944044 - RNA, 19 nt, Homo sapiens
  misc_RNA (1)...(19): siRNA sense strand
ggaggagagucgccagcuu

SEQ ID NO: 1944045 - RNA, 19 nt, Homo sapiens
  misc_RNA (1)...(19): siRNA sense strand
uggcugcccuucgggauua

SEQ ID NO: 1944046 - RNA, 19 nt, Homo sapiens
  misc_RNA (1)...(19): siRNA sense strand
gaagaaucucugugaaauc

SEQ ID NO: 1944047 - RNA, 19 nt, Homo sapiens
  misc_RNA (1)...(19): siRNA sense strand
gaguucagcuaugaugaga

SEQ ID NO: 1944048 - RNA, 19 nt, Homo sapiens
  misc_RNA (1)...(19): siRNA sense strand
gcaacagccagaagaggaa

SEQ ID NO: 1944049 - RNA, 19 nt, Homo sapiens
  misc_RNA (1)...(19): siRNA sense strand
cagcaugagugcgcgauga

SEQ ID NO: 1944050 - RNA, 19 nt, Homo sapiens
  misc_RNA (1)...(19): siRNA sense strand
acacggaagccaagaagaa

SEQ ID NO: 1944051 - RNA, 19 nt, Homo sapiens
  misc_RNA (1)...(19): siRNA sense strand
caauaucaacgacaacaug

SEQ ID NO: 1944052 - RNA, 19 nt, Homo sapiens
  misc_RNA (1)...(19): siRNA sense strand
gaagaaagaggagcaacag

SEQ ID NO: 1944053 - RNA, 19 nt, Homo sapiens
  misc_RNA (1)...(19): siRNA sense strand
ccacccuccuggcccauaa

SEQ ID NO: 1944054 - RNA, 19 nt, Homo sapiens
  misc_RNA (1)...(19): siRNA sense strand
cagaacccauugcuaucaa

SEQ ID NO: 1944055 - RNA, 19 nt, Homo sapiens
  misc_RNA (1)...(19): siRNA sense strand
accaaagcauccuccauuu

SEQ ID NO: 1944056 - RNA, 19 nt, Homo sapiens
  misc_RNA (1)...(19): siRNA sense strand
ggaaauuacaugcugacau

SEQ ID NO: 1944057 - RNA, 19 nt, Homo sapiens
  misc_RNA (1)...(19): siRNA sense strand
ccuuugugcugucuggaua

SEQ ID NO: 1944058 - RNA, 19 nt, Homo sapiens
  misc_RNA (1)...(19): siRNA sense strand
aagaagaaucucugugaaa

SEQ ID NO: 1944059 - RNA, 19 nt, Homo sapiens
  misc_RNA (1)...(19): siRNA sense strand
aacacaaauugccuccuua

SEQ ID NO: 1944060 - RNA, 19 nt, Homo sapiens
  misc_RNA (1)...(19): siRNA sense strand
ugaagcagcagcuccaguu

SEQ ID NO: 1944061 - RNA, 19 nt, Homo sapiens
  misc_RNA (1)...(19): siRNA sense strand
gccauggugugcagccaaa

SEQ ID NO: 1944062 - RNA, 19 nt, Homo sapiens
  misc_RNA (1)...(19): siRNA sense strand
gggcugacaccuucauugu

SEQ ID NO: 1944063 - RNA, 19 nt, Homo sapiens
  misc_RNA (1)...(19): siRNA sense strand
ucagagcucggccaagaaa

SEQ ID NO: 1944064 - RNA, 19 nt, Homo sapiens
  misc_RNA (1)...(19): siRNA sense strand
gauccagaacccauugcua

SEQ ID NO: 1944065 - RNA, 19 nt, Homo sapiens
  misc_RNA (1)...(19): siRNA sense strand
ccaaagcauccuccauuuc

SEQ ID NO: 1944066 - RNA, 19 nt, Homo sapiens
  misc_RNA (1)...(19): siRNA sense strand
gcuacaagcagguucaagu

SEQ ID NO: 1944067 - RNA, 19 nt, Homo sapiens
  misc_RNA (1)...(19): siRNA sense strand
ucuacacaauccagacaaa

SEQ ID NO: 1944068 - RNA, 19 nt, Homo sapiens
  misc_RNA (1)...(19): siRNA sense strand
caacuguacagccuucaau

SEQ ID NO: 1944069 - RNA, 19 nt, Homo sapiens
  misc_RNA (1)...(19): siRNA sense strand
cccagaauccugucucuug

SEQ ID NO: 1944070 - RNA, 19 nt, Homo sapiens
  misc_RNA (1)...(19): siRNA sense strand
gggaacagugcgucucuau

SEQ ID NO: 1944071 - RNA, 19 nt, Homo sapiens
  misc_RNA (1)...(19): siRNA sense strand
gcagagaagaaaccagaag

SEQ ID NO: 1944072 - RNA, 19 nt, Homo sapiens
  misc_RNA (1)...(19): siRNA sense strand
gcaguggugugggaacagu

SEQ ID NO: 1944073 - RNA, 19 nt, Homo sapiens
  misc_RNA (1)...(19): siRNA sense strand
ccugugauccugaacuuug

SEQ ID NO: 1944074 - RNA, 19 nt, Homo sapiens
  misc_RNA (1)...(19): siRNA sense strand
gccucaagguauccgagua

SEQ ID NO: 1944075 - RNA, 19 nt, Homo sapiens
  misc_RNA (1)...(19): siRNA sense strand
gauauauacagacccacaa

SEQ ID NO: 1944076 - RNA, 19 nt, Homo sapiens
  misc_RNA (1)...(19): siRNA sense strand
ggaacagugcgucucuaug

SEQ ID NO: 1944077 - RNA, 19 nt, Homo sapiens
  misc_RNA (1)...(19): siRNA sense strand
ccgagcagcccuuuauugu

SEQ ID NO: 1944078 - RNA, 19 nt, Homo sapiens
  misc_RNA (1)...(19): siRNA sense strand
cucaggaguucuuugcaaa

SEQ ID NO: 1944079 - RNA, 19 nt, Homo sapiens
  misc_RNA (1)...(19): siRNA sense strand
aagaguggccucaagguau

SEQ ID NO: 1944080 - RNA, 19 nt, Homo sapiens
  misc_RNA (1)...(19): siRNA sense strand
ccauugcuaucaacuguac

SEQ ID NO: 1944081 - RNA, 19 nt, Homo sapiens
  misc_RNA (1)...(19): siRNA sense strand
caaagcauccuccauuucc

SEQ ID NO: 1944082 - RNA, 19 nt, Homo sapiens
  misc_RNA (1)...(19): siRNA sense strand
ccagaacccauugcuauca

SEQ ID NO: 1944083 - RNA, 19 nt, Homo sapiens
  misc_RNA (1)...(19): siRNA sense strand
caauccagacaaacagaaa

SEQ ID NO: 1944084 - RNA, 19 nt, Homo sapiens
  misc_RNA (1)...(19): siRNA sense strand
caagcuggguggcgaugag

SEQ ID NO: 1944085 - RNA, 19 nt, Homo sapiens
  misc_RNA (1)...(19): siRNA sense strand
agaguggccucaagguauc

SEQ ID NO: 1944086 - RNA, 19 nt, Homo sapiens
  misc_RNA (1)...(19): siRNA sense strand
ccacaauccacaagcugaa

SEQ ID NO: 1944087 - RNA, 19 nt, Homo sapiens
  misc_RNA (1)...(19): siRNA sense strand
gagagucgccagcuuagac

SEQ ID NO: 1944088 - RNA, 19 nt, Homo sapiens
  misc_RNA (1)...(19): siRNA sense strand
gcaguuaaugcagguguau

SEQ ID NO: 1944089 - RNA, 19 nt, Homo sapiens
  misc_RNA (1)...(19): siRNA sense strand
caaagcaggccacggaacu

SEQ ID NO: 1944090 - RNA, 19 nt, Homo sapiens
  misc_RNA (1)...(19): siRNA sense strand
gacagugggcugacaccuu

SEQ ID NO: 1944091 - RNA, 19 nt, Homo sapiens
  misc_RNA (1)...(19): siRNA sense strand
gaagcagcagcuccaguuc

SEQ ID NO: 1944092 - RNA, 19 nt, Homo sapiens
  misc_RNA (1)...(19): siRNA sense strand
caccagacaucggcagcaa

SEQ ID NO: 1944093 - RNA, 19 nt, Homo sapiens
  misc_RNA (1)...(19): siRNA sense strand
gggccucuuucgucuguuc

SEQ ID NO: 1944094 - RNA, 19 nt, Homo sapiens
  misc_RNA (1)...(19): siRNA sense strand
ucaaggcggacaaggagaa

SEQ ID NO: 1944095 - RNA, 19 nt, Homo sapiens
  misc_RNA (1)...(19): siRNA sense strand
ugaaauccaccgacugaag

SEQ ID NO: 1944096 - RNA, 19 nt, Homo sapiens
  misc_RNA (1)...(19): siRNA sense strand
cagacaaacagaaaugaca

SEQ ID NO: 1944097 - RNA, 19 nt, Homo sapiens
  misc_RNA (1)...(19): siRNA sense strand
ggaguucagcuaugaugag

SEQ ID NO: 1944098 - RNA, 19 nt, Homo sapiens
  misc_RNA (1)...(19): siRNA sense strand
uguacagccuucaaucaca

SEQ ID NO: 1944099 - RNA, 19 nt, Homo sapiens
  misc_RNA (1)...(19): siRNA sense strand
gggcaguggugugggaaca

SEQ ID NO: 1944100 - RNA, 19 nt, Homo sapiens
  misc_RNA (1)...(19): siRNA sense strand
acacaaauugccuccuuau

SEQ ID NO: 1944101 - RNA, 19 nt, Homo sapiens
  misc_RNA (1)...(19): siRNA sense strand
agacaaacagaaaugacaa

SEQ ID NO: 1944102 - RNA, 19 nt, Homo sapiens
  misc_RNA (1)...(19): siRNA sense strand
ugaagaaagaggagcaaca

SEQ ID NO: 1944103 - RNA, 19 nt, Homo sapiens
  misc_RNA (1)...(19): siRNA sense strand
gcugcugucuuuggaaugg

SEQ ID NO: 1944104 - RNA, 19 nt, Homo sapiens
  misc_RNA (1)...(19): siRNA sense strand
acucggaacuugccauggu

SEQ ID NO: 1944105 - RNA, 19 nt, Homo sapiens
  misc_RNA (1)...(19): siRNA sense strand
caggcugaguggaaggauu

SEQ ID NO: 1944106 - RNA, 19 nt, Homo sapiens
  misc_RNA (1)...(19): siRNA sense strand
ccgcugcugucuuuggaau

SEQ ID NO: 1944107 - RNA, 19 nt, Homo sapiens
  misc_RNA (1)...(19): siRNA sense strand
cuuggaggauauauacaga

SEQ ID NO: 1944108 - RNA, 19 nt, Homo sapiens
  misc_RNA (1)...(19): siRNA sense strand
ugaguggaaggauugguuu

SEQ ID NO: 1944109 - RNA, 19 nt, Homo sapiens
  misc_RNA (1)...(19): siRNA sense strand
ggguggcgaugagaagguu

SEQ ID NO: 1944110 - RNA, 19 nt, Homo sapiens
  misc_RNA (1)...(19): siRNA sense strand
gcagcaagggcaugaacca

SEQ ID NO: 1944111 - RNA, 19 nt, Homo sapiens
  misc_RNA (1)...(19): siRNA sense strand
gggaacaccacucauccau

SEQ ID NO: 1944112 - RNA, 19 nt, Homo sapiens
  misc_RNA (1)...(19): siRNA sense strand
guggaaggauugguuuguc

SEQ ID NO: 1944113 - RNA, 19 nt, Homo sapiens
  misc_RNA (1)...(19): siRNA sense strand
caccgcugcugucuuugga

SEQ ID NO: 1944114 - RNA, 19 nt, Homo sapiens
  misc_RNA (1)...(19): siRNA sense strand
ucacuucccagguggacuu

SEQ ID NO: 1944115 - RNA, 19 nt, Homo sapiens
  misc_RNA (1)...(19): siRNA sense strand
gggacagacugcucuugcu

SEQ ID NO: 1944116 - RNA, 19 nt, Homo sapiens
  misc_RNA (1)...(19): siRNA sense strand
ggacaccaaccccaccuuu

SEQ ID NO: 1944117 - RNA, 19 nt, Homo sapiens
  misc_RNA (1)...(19): siRNA sense strand
acccauugcuaucaacugu

SEQ ID NO: 1944118 - RNA, 19 nt, Homo sapiens
  misc_RNA (1)...(19): siRNA sense strand
acgacaacaugcccagaau

SEQ ID NO: 1944119 - RNA, 19 nt, Homo sapiens
  misc_RNA (1)...(19): siRNA sense strand
ccagugugcagagaagaaa

SEQ ID NO: 1944120 - RNA, 19 nt, Homo sapiens
  misc_RNA (1)...(19): siRNA sense strand
gaacagaggugacacagaa

SEQ ID NO: 1944121 - RNA, 19 nt, Homo sapiens
  misc_RNA (1)...(19): siRNA sense strand
gaacuuaacuugcgacaca

SEQ ID NO: 1944122 - RNA, 19 nt, Homo sapiens
  misc_RNA (1)...(19): siRNA sense strand
ugagagauguggauaauuu

SEQ ID NO: 1944123 - RNA, 19 nt, Homo sapiens
  misc_RNA (1)...(19): siRNA sense strand
gcacuggaaucucuggaua

SEQ ID NO: 1944124 - RNA, 19 nt, Homo sapiens
  misc_RNA (1)...(19): siRNA sense strand
ccacagaaaucaacaugaa

SEQ ID NO: 1944125 - RNA, 19 nt, Homo sapiens
  misc_RNA (1)...(19): siRNA sense strand
caacaaugcuuuacaaggu

SEQ ID NO: 1944126 - RNA, 19 nt, Homo sapiens
  misc_RNA (1)...(19): siRNA sense strand
gcaaggugaucauauuaau

SEQ ID NO: 1944127 - RNA, 19 nt, Homo sapiens
  misc_RNA (1)...(19): siRNA sense strand
uguagcaucuucugaguua

SEQ ID NO: 1944128 - RNA, 19 nt, Homo sapiens
  misc_RNA (1)...(19): siRNA sense strand
gaaggaagccacagaaauc

SEQ ID NO: 1944129 - RNA, 19 nt, Homo sapiens
  misc_RNA (1)...(19): siRNA sense strand
gaagcacccucucugcauu

SEQ ID NO: 1944130 - RNA, 19 nt, Homo sapiens
  misc_RNA (1)...(19): siRNA sense strand
cuaauucucugcaccuuaa

SEQ ID NO: 1944131 - RNA, 19 nt, Homo sapiens
  misc_RNA (1)...(19): siRNA sense strand
acacauaccuuguugaagu

SEQ ID NO: 1944132 - RNA, 19 nt, Homo sapiens
  misc_RNA (1)...(19): siRNA sense strand
ggauacacuuucccuauau

SEQ ID NO: 1944133 - RNA, 19 nt, Homo sapiens
  misc_RNA (1)...(19): siRNA sense strand
ggccacagauguucauuga

SEQ ID NO: 1944134 - RNA, 19 nt, Homo sapiens
  misc_RNA (1)...(19): siRNA sense strand
gacacagaaugauaugaua

SEQ ID NO: 1944135 - RNA, 19 nt, Homo sapiens
  misc_RNA (1)...(19): siRNA sense strand
gauaggaauuggaguguuc

SEQ ID NO: 1944136 - RNA, 19 nt, Homo sapiens
  misc_RNA (1)...(19): siRNA sense strand
gcucaucauugucaucauu

SEQ ID NO: 1944137 - RNA, 19 nt, Homo sapiens
  misc_RNA (1)...(19): siRNA sense strand
caacaugaccuugaaagaa

SEQ ID NO: 1944138 - RNA, 19 nt, Homo sapiens
  misc_RNA (1)...(19): siRNA sense strand
gagaaucacggaagaagaa

SEQ ID NO: 1944139 - RNA, 19 nt, Homo sapiens
  misc_RNA (1)...(19): siRNA sense strand
cacaaaucgugcuacauua

SEQ ID NO: 1944140 - RNA, 19 nt, Homo sapiens
  misc_RNA (1)...(19): siRNA sense strand
aacaugaccuugaaagaaa

SEQ ID NO: 1944141 - RNA, 19 nt, Homo sapiens
  misc_RNA (1)...(19): siRNA sense strand
caacaacgaguagccaaua

SEQ ID NO: 1944142 - RNA, 19 nt, Homo sapiens
  misc_RNA (1)...(19): siRNA sense strand
ggaaagucauaaacaaucu

SEQ ID NO: 1944143 - RNA, 19 nt, Homo sapiens
  misc_RNA (1)...(19): siRNA sense strand
ucccauagcucaagaguca

SEQ ID NO: 1944144 - RNA, 19 nt, Homo sapiens
  misc_RNA (1)...(19): siRNA sense strand
gcgggaaagucauaaacaa

SEQ ID NO: 1944145 - RNA, 19 nt, Homo sapiens
  misc_RNA (1)...(19): siRNA sense strand
acacuguccuucagaauau

SEQ ID NO: 1944146 - RNA, 19 nt, Homo sapiens
  misc_RNA (1)...(19): siRNA sense strand
acacaaaucgugcuacauu

SEQ ID NO: 1944147 - RNA, 19 nt, Homo sapiens
  misc_RNA (1)...(19): siRNA sense strand
gcuaagccauuucaguaug

SEQ ID NO: 1944148 - RNA, 19 nt, Homo sapiens
  misc_RNA (1)...(19): siRNA sense strand
ggaaugaucacaacagucu

SEQ ID NO: 1944149 - RNA, 19 nt, Homo sapiens
  misc_RNA (1)...(19): siRNA sense strand
gaccguauguccuaucauc

SEQ ID NO: 1944150 - RNA, 19 nt, Homo sapiens
  misc_RNA (1)...(19): siRNA sense strand
cguuagggaugcagucaua

SEQ ID NO: 1944151 - RNA, 19 nt, Homo sapiens
  misc_RNA (1)...(19): siRNA sense strand
gaggugacacagaaugaua

SEQ ID NO: 1944152 - RNA, 19 nt, Homo sapiens
  misc_RNA (1)...(19): siRNA sense strand
ggaaauacuauguacuguu

SEQ ID NO: 1944153 - RNA, 19 nt, Homo sapiens
  misc_RNA (1)...(19): siRNA sense strand
uggaaucucuggauaggaa

SEQ ID NO: 1944154 - RNA, 19 nt, Homo sapiens
  misc_RNA (1)...(19): siRNA sense strand
uuacaagguuuaucuguca

SEQ ID NO: 1944155 - RNA, 19 nt, Homo sapiens
  misc_RNA (1)...(19): siRNA sense strand
ggacuugcaacaacgagua

SEQ ID NO: 1944156 - RNA, 19 nt, Homo sapiens
  misc_RNA (1)...(19): siRNA sense strand
caucaucgcuuccugaaaa

SEQ ID NO: 1944157 - RNA, 19 nt, Homo sapiens
  misc_RNA (1)...(19): siRNA sense strand
ugaagagaaucacggaaga

SEQ ID NO: 1944158 - RNA, 19 nt, Homo sapiens
  misc_RNA (1)...(19): siRNA sense strand
caacgaguagccaauauug

SEQ ID NO: 1944159 - RNA, 19 nt, Homo sapiens
  misc_RNA (1)...(19): siRNA sense strand
gacaaaagcugaccguaug

SEQ ID NO: 1944160 - RNA, 19 nt, Homo sapiens
  misc_RNA (1)...(19): siRNA sense strand
gggaugcagucauagaaau

SEQ ID NO: 1944161 - RNA, 19 nt, Homo sapiens
  misc_RNA (1)...(19): siRNA sense strand
cuacuagaauccaaaggaa

SEQ ID NO: 1944162 - RNA, 19 nt, Homo sapiens
  misc_RNA (1)...(19): siRNA sense strand
gaagagaagaagcgggaaa

SEQ ID NO: 1944163 - RNA, 19 nt, Homo sapiens
  misc_RNA (1)...(19): siRNA sense strand
gcaaucccauagcucaaga

SEQ ID NO: 1944164 - RNA, 19 nt, Homo sapiens
  misc_RNA (1)...(19): siRNA sense strand
uaggcaaggugaucauauu

SEQ ID NO: 1944165 - RNA, 19 nt, Homo sapiens
  misc_RNA (1)...(19): siRNA sense strand
gcagcaauuuaacgcacua

SEQ ID NO: 1944166 - RNA, 19 nt, Homo sapiens
  misc_RNA (1)...(19): siRNA sense strand
aaucuuugcuuaaggagaa

SEQ ID NO: 1944167 - RNA, 19 nt, Homo sapiens
  misc_RNA (1)...(19): siRNA sense strand
gaagaaauuagugggcuuu

SEQ ID NO: 1944168 - RNA, 19 nt, Homo sapiens
  misc_RNA (1)...(19): siRNA sense strand
gcccaacuccgucguauug

SEQ ID NO: 1944169 - RNA, 19 nt, Homo sapiens
  misc_RNA (1)...(19): siRNA sense strand
caaaucgugcuacauuaaa

SEQ ID NO: 1944170 - RNA, 19 nt, Homo sapiens
  misc_RNA (1)...(19): siRNA sense strand
aaacacaaaucgugcuaca

SEQ ID NO: 1944171 - RNA, 19 nt, Homo sapiens
  misc_RNA (1)...(19): siRNA sense strand
caaaagacuuguaggagaa

SEQ ID NO: 1944172 - RNA, 19 nt, Homo sapiens
  misc_RNA (1)...(19): siRNA sense strand
ggaaauccaguugucaauu

SEQ ID NO: 1944173 - RNA, 19 nt, Homo sapiens
  misc_RNA (1)...(19): siRNA sense strand
cuacagaaguuaauaucgu

SEQ ID NO: 1944174 - RNA, 19 nt, Homo sapiens
  misc_RNA (1)...(19): siRNA sense strand
caauuucgguaucuacuag

SEQ ID NO: 1944175 - RNA, 19 nt, Homo sapiens
  misc_RNA (1)...(19): siRNA sense strand
gcaauuucgguaucuacua

SEQ ID NO: 1944176 - RNA, 19 nt, Homo sapiens
  misc_RNA (1)...(19): siRNA sense strand
ucaaggaaauccaguuguc

SEQ ID NO: 1944177 - RNA, 19 nt, Homo sapiens
  misc_RNA (1)...(19): siRNA sense strand
caacagucuccuucacuuu

SEQ ID NO: 1944178 - RNA, 19 nt, Homo sapiens
  misc_RNA (1)...(19): siRNA sense strand
ccaauauugcuacaaauga

SEQ ID NO: 1944179 - RNA, 19 nt, Homo sapiens
  misc_RNA (1)...(19): siRNA sense strand
gaagaagaaaggcguaugg

SEQ ID NO: 1944180 - RNA, 19 nt, Homo sapiens
  misc_RNA (1)...(19): siRNA sense strand
aagcuuagaugucuuggau

SEQ ID NO: 1944181 - RNA, 19 nt, Homo sapiens
  misc_RNA (1)...(19): siRNA sense strand
ugaaagaaacuacucaagu

SEQ ID NO: 1944182 - RNA, 19 nt, Homo sapiens
  misc_RNA (1)...(19): siRNA sense strand
caagcuaaauaaagacaca

SEQ ID NO: 1944183 - RNA, 19 nt, Homo sapiens
  misc_RNA (1)...(19): siRNA sense strand
gauacacuuucccuauaug

SEQ ID NO: 1944184 - RNA, 19 nt, Homo sapiens
  misc_RNA (1)...(19): siRNA sense strand
gaagagaaucacggaagaa

SEQ ID NO: 1944185 - RNA, 19 nt, Homo sapiens
  misc_RNA (1)...(19): siRNA sense strand
gacacaaucaaaucacuuu

SEQ ID NO: 1944186 - RNA, 19 nt, Homo sapiens
  misc_RNA (1)...(19): siRNA sense strand
acaaaucgugcuacauuaa

SEQ ID NO: 1944187 - RNA, 19 nt, Homo sapiens
  misc_RNA (1)...(19): siRNA sense strand
gcucaagagucaugguaca

SEQ ID NO: 1944188 - RNA, 19 nt, Homo sapiens
  misc_RNA (1)...(19): siRNA sense strand
guacaaacacacuguccuu

SEQ ID NO: 1944189 - RNA, 19 nt, Homo sapiens
  misc_RNA (1)...(19): siRNA sense strand
gauaugauaauggcugaaa

SEQ ID NO: 1944190 - RNA, 19 nt, Homo sapiens
  misc_RNA (1)...(19): siRNA sense strand
ucaaacagcaggaaugauc

SEQ ID NO: 1944191 - RNA, 19 nt, Homo sapiens
  misc_RNA (1)...(19): siRNA sense strand
agaagaagcgggaaaguca

SEQ ID NO: 1944192 - RNA, 19 nt, Homo sapiens
  misc_RNA (1)...(19): siRNA sense strand
ucaaaucuggagaaucuaa

SEQ ID NO: 1944193 - RNA, 19 nt, Homo sapiens
  misc_RNA (1)...(19): siRNA sense strand
cagaagcuuuggccacaga

SEQ ID NO: 1944194 - RNA, 19 nt, Homo sapiens
  misc_RNA (1)...(19): siRNA sense strand
ggauaggaauuggaguguu

SEQ ID NO: 1944195 - RNA, 19 nt, Homo sapiens
  misc_RNA (1)...(19): siRNA sense strand
gggaaagucauaaacaauc

SEQ ID NO: 1944196 - RNA, 19 nt, Homo sapiens
  misc_RNA (1)...(19): siRNA sense strand
ggcaaggugaucauauuaa

SEQ ID NO: 1944197 - RNA, 19 nt, Homo sapiens
  misc_RNA (1)...(19): siRNA sense strand
ggaugcagucauagaaauu

SEQ ID NO: 1944198 - RNA, 19 nt, Homo sapiens
  misc_RNA (1)...(19): siRNA sense strand
caggagcacuggaaucucu

SEQ ID NO: 1944199 - RNA, 19 nt, Homo sapiens
  misc_RNA (1)...(19): siRNA sense strand
acucaacaaugcuuuacaa

SEQ ID NO: 1944200 - RNA, 19 nt, Homo sapiens
  misc_RNA (1)...(19): siRNA sense strand
uuaaugggcuggauucacu

SEQ ID NO: 1944201 - RNA, 19 nt, Homo sapiens
  misc_RNA (1)...(19): siRNA sense strand
ucuuggaucuucauggaaa

SEQ ID NO: 1944202 - RNA, 19 nt, Homo sapiens
  misc_RNA (1)...(19): siRNA sense strand
gaacugcgggcuucaucug

SEQ ID NO: 1944203 - RNA, 19 nt, Homo sapiens
  misc_RNA (1)...(19): siRNA sense strand
cuccuucacuuucauagaa

SEQ ID NO: 1944204 - RNA, 19 nt, Homo sapiens
  misc_RNA (1)...(19): siRNA sense strand
gaagcgggaaagucauaaa

SEQ ID NO: 1944205 - RNA, 19 nt, Homo sapiens
  misc_RNA (1)...(19): siRNA sense strand
caaacacacuguccuucag

SEQ ID NO: 1944206 - RNA, 19 nt, Homo sapiens
  misc_RNA (1)...(19): siRNA sense strand
uuggugagcucaucauugu

SEQ ID NO: 1944207 - RNA, 19 nt, Homo sapiens
  misc_RNA (1)...(19): siRNA sense strand
cgugagagauguggauaau

SEQ ID NO: 1944208 - RNA, 19 nt, Homo sapiens
  misc_RNA (1)...(19): siRNA sense strand
cgggaaauaucgcucuguu

SEQ ID NO: 1944209 - RNA, 19 nt, Homo sapiens
  misc_RNA (1)...(19): siRNA sense strand
ggaagcacccucucugcau

SEQ ID NO: 1944210 - RNA, 19 nt, Homo sapiens
  misc_RNA (1)...(19): siRNA sense strand
uagcacauguagcaucuuc

SEQ ID NO: 1944211 - RNA, 19 nt, Homo sapiens
  misc_RNA (1)...(19): siRNA sense strand
ccaagugcuuccuaaacug

SEQ ID NO: 1944212 - RNA, 19 nt, Homo sapiens
  misc_RNA (1)...(19): siRNA sense strand
acaacagucuccuucacuu

SEQ ID NO: 1944213 - RNA, 19 nt, Homo sapiens
  misc_RNA (1)...(19): siRNA sense strand
acaaugcuuuacaagguuu

SEQ ID NO: 1944214 - RNA, 19 nt, Homo sapiens
  misc_RNA (1)...(19): siRNA sense strand
aaauaucgcucuguuucug

SEQ ID NO: 1944215 - RNA, 19 nt, Homo sapiens
  misc_RNA (1)...(19): siRNA sense strand
ugaaggaagccacagaaau

SEQ ID NO: 1944216 - RNA, 19 nt, Homo sapiens
  misc_RNA (1)...(19): siRNA sense strand
caagugcuuccuaaacuga

SEQ ID NO: 1944217 - RNA, 19 nt, Homo sapiens
  misc_RNA (1)...(19): siRNA sense strand
ggaauuggaguguucaaac

SEQ ID NO: 1944218 - RNA, 19 nt, Homo sapiens
  misc_RNA (1)...(19): siRNA sense strand
gcacauguagcaucuucug

SEQ ID NO: 1944219 - RNA, 19 nt, Homo sapiens
  misc_RNA (1)...(19): siRNA sense strand
gguauuaucaacgaagaaa

SEQ ID NO: 1944220 - RNA, 19 nt, Homo sapiens
  misc_RNA (1)...(19): siRNA sense strand
gaccagagauucauacaaa

SEQ ID NO: 1944221 - RNA, 19 nt, Homo sapiens
  misc_RNA (1)...(19): siRNA sense strand
gggaaugacuugaguuuga

SEQ ID NO: 1944222 - RNA, 19 nt, Homo sapiens
  misc_RNA (1)...(19): siRNA sense strand
ggugagaauugguuauaua

SEQ ID NO: 1944223 - RNA, 19 nt, Homo sapiens
  misc_RNA (1)...(19): siRNA sense strand
gagaauugguuauauagga

SEQ ID NO: 1944224 - RNA, 19 nt, Homo sapiens
  misc_RNA (1)...(19): siRNA sense strand
ggaaaggccuucaguaaaa

SEQ ID NO: 1944225 - RNA, 19 nt, Homo sapiens
  misc_RNA (1)...(19): siRNA sense strand
gcaaaggccugcacaagca

SEQ ID NO: 1944226 - RNA, 19 nt, Homo sapiens
  misc_RNA (1)...(19): siRNA sense strand
caaagaagcagauuauaga

SEQ ID NO: 1944227 - RNA, 19 nt, Homo sapiens
  misc_RNA (1)...(19): siRNA sense strand
gagagaaacccuauaaaug

SEQ ID NO: 1944228 - RNA, 19 nt, Homo sapiens
  misc_RNA (1)...(19): siRNA sense strand
ggacauaaauuugccacaa

SEQ ID NO: 1944229 - RNA, 19 nt, Homo sapiens
  misc_RNA (1)...(19): siRNA sense strand
caacuggacucugcuguaa

SEQ ID NO: 1944230 - RNA, 19 nt, Homo sapiens
  misc_RNA (1)...(19): siRNA sense strand
ggacuugggugaauuuaca

SEQ ID NO: 1944231 - RNA, 19 nt, Homo sapiens
  misc_RNA (1)...(19): siRNA sense strand
aaccggagcuccucucuua

SEQ ID NO: 1944232 - RNA, 19 nt, Homo sapiens
  misc_RNA (1)...(19): siRNA sense strand
ccaaacaacaguaaagaua

SEQ ID NO: 1944233 - RNA, 19 nt, Homo sapiens
  misc_RNA (1)...(19): siRNA sense strand
ucaguuagcucaauuugug

SEQ ID NO: 1944234 - RNA, 19 nt, Homo sapiens
  misc_RNA (1)...(19): siRNA sense strand
ggagagaaacccuauaaau

SEQ ID NO: 1944235 - RNA, 19 nt, Homo sapiens
  misc_RNA (1)...(19): siRNA sense strand
guucagacauuuccaguau

SEQ ID NO: 1944236 - RNA, 19 nt, Homo sapiens
  misc_RNA (1)...(19): siRNA sense strand
ucagacauuuccaguauuu

SEQ ID NO: 1944237 - RNA, 19 nt, Homo sapiens
  misc_RNA (1)...(19): siRNA sense strand
caacaggaguucaaaccuu

SEQ ID NO: 1944238 - RNA, 19 nt, Homo sapiens
  misc_RNA (1)...(19): siRNA sense strand
ugacaaggcuuaccgaaag

SEQ ID NO: 1944239 - RNA, 19 nt, Homo sapiens
  misc_RNA (1)...(19): siRNA sense strand
uuaggaaccugaauucauu

SEQ ID NO: 1944240 - RNA, 19 nt, Homo sapiens
  misc_RNA (1)...(19): siRNA sense strand
ggagagaaaccauucaaau

SEQ ID NO: 1944241 - RNA, 19 nt, Homo sapiens
  misc_RNA (1)...(19): siRNA sense strand
gaaaggugagaauugguua

SEQ ID NO: 1944242 - RNA, 19 nt, Homo sapiens
  misc_RNA (1)...(19): siRNA sense strand
ccagugacauucaaagaug

SEQ ID NO: 1944243 - RNA, 19 nt, Homo sapiens
  misc_RNA (1)...(19): siRNA sense strand
gagaaacccuauaaaugca

SEQ ID NO: 1944244 - RNA, 19 nt, Homo sapiens
  misc_RNA (1)...(19): siRNA sense strand
ggaggaagauuuugaaugu

SEQ ID NO: 1944245 - RNA, 19 nt, Homo sapiens
  misc_RNA (1)...(19): siRNA sense strand
gaaauaccaaggaagacua

SEQ ID NO: 1944246 - RNA, 19 nt, Homo sapiens
  misc_RNA (1)...(19): siRNA sense strand
agaaagaaauaccaaggaa

SEQ ID NO: 1944247 - RNA, 19 nt, Homo sapiens
  misc_RNA (1)...(19): siRNA sense strand
cauagaagaugugauugaa

SEQ ID NO: 1944248 - RNA, 19 nt, Homo sapiens
  misc_RNA (1)...(19): siRNA sense strand
aaagauggauaauggagaa

SEQ ID NO: 1944249 - RNA, 19 nt, Homo sapiens
  misc_RNA (1)...(19): siRNA sense strand
gcuugaagaugaagauaug

SEQ ID NO: 1944250 - RNA, 19 nt, Homo sapiens
  misc_RNA (1)...(19): siRNA sense strand
ugaaaugcuugaagaugaa

SEQ ID NO: 1944251 - RNA, 19 nt, Homo sapiens
  misc_RNA (1)...(19): siRNA sense strand
ggacacccuucuucagaug

SEQ ID NO: 1944252 - RNA, 19 nt, Homo sapiens
  misc_RNA (1)...(19): siRNA sense strand
guggaaaggccuucaguaa

SEQ ID NO: 1944253 - RNA, 19 nt, Homo sapiens
  misc_RNA (1)...(19): siRNA sense strand
gauggauaauggagaaaga

SEQ ID NO: 1944254 - RNA, 19 nt, Homo sapiens
  misc_RNA (1)...(19): siRNA sense strand
ggaaaggugagaauugguu

SEQ ID NO: 1944255 - RNA, 19 nt, Homo sapiens
  misc_RNA (1)...(19): siRNA sense strand
uugaaaugcuugaagauga

SEQ ID NO: 1944256 - RNA, 19 nt, Homo sapiens
  misc_RNA (1)...(19): siRNA sense strand
cgaaguucaucccuuauuc

SEQ ID NO: 1944257 - RNA, 19 nt, Homo sapiens
  misc_RNA (1)...(19): siRNA sense strand
gggaauuccuucaagaaag

SEQ ID NO: 1944258 - RNA, 19 nt, Homo sapiens
  misc_RNA (1)...(19): siRNA sense strand
gcaacuggacucugcugua

SEQ ID NO: 1944259 - RNA, 19 nt, Homo sapiens
  misc_RNA (1)...(19): siRNA sense strand
aaagaaauaccaaggaaga

SEQ ID NO: 1944260 - RNA, 19 nt, Homo sapiens
  misc_RNA (1)...(19): siRNA sense strand
gccuuaaguuggagaguaa

SEQ ID NO: 1944261 - RNA, 19 nt, Homo sapiens
  misc_RNA (1)...(19): siRNA sense strand
ggacucugcuguaaagaac

SEQ ID NO: 1944262 - RNA, 19 nt, Homo sapiens
  misc_RNA (1)...(19): siRNA sense strand
caacauccaaacaacagua

SEQ ID NO: 1944263 - RNA, 19 nt, Homo sapiens
  misc_RNA (1)...(19): siRNA sense strand
gaaaguggacacccuucuu

SEQ ID NO: 1944264 - RNA, 19 nt, Homo sapiens
  misc_RNA (1)...(19): siRNA sense strand
ugauugaaaugcuugaaga

SEQ ID NO: 1944265 - RNA, 19 nt, Homo sapiens
  misc_RNA (1)...(19): siRNA sense strand
acacugaggaggaagauuu

SEQ ID NO: 1944266 - RNA, 19 nt, Homo sapiens
  misc_RNA (1)...(19): siRNA sense strand
caggagagaaacccuauaa

SEQ ID NO: 1944267 - RNA, 19 nt, Homo sapiens
  misc_RNA (1)...(19): siRNA sense strand
ccucauagaagaugugauu

SEQ ID NO: 1944268 - RNA, 19 nt, Homo sapiens
  misc_RNA (1)...(19): siRNA sense strand
aaaccugucucuacgugaa

SEQ ID NO: 1944269 - RNA, 19 nt, Homo sapiens
  misc_RNA (1)...(19): siRNA sense strand
gagcuccucucuuauucga

SEQ ID NO: 1944270 - RNA, 19 nt, Homo sapiens
  misc_RNA (1)...(19): siRNA sense strand
ugccgaaguucaucccuua

SEQ ID NO: 1944271 - RNA, 19 nt, Homo sapiens
  misc_RNA (1)...(19): siRNA sense strand
ggaaugugaugcuggaaaa

SEQ ID NO: 1944272 - RNA, 19 nt, Homo sapiens
  misc_RNA (1)...(19): siRNA sense strand
ggaguucaaaccuuguuaa

SEQ ID NO: 1944273 - RNA, 19 nt, Homo sapiens
  misc_RNA (1)...(19): siRNA sense strand
gacauaaauuugccacaag

SEQ ID NO: 1944274 - RNA, 19 nt, Homo sapiens
  misc_RNA (1)...(19): siRNA sense strand
gugauuaugacaaggcuua

SEQ ID NO: 1944275 - RNA, 19 nt, Homo sapiens
  misc_RNA (1)...(19): siRNA sense strand
gagaaagaaauaccaagga

SEQ ID NO: 1944276 - RNA, 19 nt, Homo sapiens
  misc_RNA (1)...(19): siRNA sense strand
ggagcucugucuucaaugg

SEQ ID NO: 1944277 - RNA, 19 nt, Homo sapiens
  misc_RNA (1)...(19): siRNA sense strand
caaccgacguacaaaccuu

SEQ ID NO: 1944278 - RNA, 19 nt, Homo sapiens
  misc_RNA (1)...(19): siRNA sense strand
gcaaguugauggcuaucuc

SEQ ID NO: 1944279 - RNA, 19 nt, Homo sapiens
  misc_RNA (1)...(19): siRNA sense strand
gaguuugaguacagauauu

SEQ ID NO: 1944280 - RNA, 19 nt, Homo sapiens
  misc_RNA (1)...(19): siRNA sense strand
gcguaaagcacaucuacuu

SEQ ID NO: 1944281 - RNA, 19 nt, Homo sapiens
  misc_RNA (1)...(19): siRNA sense strand
acaaagagagguucugaga

SEQ ID NO: 1944282 - RNA, 19 nt, Homo sapiens
  misc_RNA (1)...(19): siRNA sense strand
gcacaucuacuuuccaaac

SEQ ID NO: 1944283 - RNA, 19 nt, Homo sapiens
  misc_RNA (1)...(19): siRNA sense strand
cuacaaugaauuccuauga

SEQ ID NO: 1944284 - RNA, 19 nt, Homo sapiens
  misc_RNA (1)...(19): siRNA sense strand
acaaagaagcagauuauag

SEQ ID NO: 1944285 - RNA, 19 nt, Homo sapiens
  misc_RNA (1)...(19): siRNA sense strand
uguaaggaauguaguaaag

SEQ ID NO: 1944286 - RNA, 19 nt, Homo sapiens
  misc_RNA (1)...(19): siRNA sense strand
gaagacaguaauaauccaa

SEQ ID NO: 1944287 - RNA, 19 nt, Homo sapiens
  misc_RNA (1)...(19): siRNA sense strand
ggaaugacuugaguuugag

SEQ ID NO: 1944288 - RNA, 19 nt, Homo sapiens
  misc_RNA (1)...(19): siRNA sense strand
acauaaauuugccacaaga

SEQ ID NO: 1944289 - RNA, 19 nt, Homo sapiens
  misc_RNA (1)...(19): siRNA sense strand
uggaaaggccuucaguaaa

SEQ ID NO: 1944290 - RNA, 19 nt, Homo sapiens
  misc_RNA (1)...(19): siRNA sense strand
agaagcagauuauagaacu

SEQ ID NO: 1944291 - RNA, 19 nt, Homo sapiens
  misc_RNA (1)...(19): siRNA sense strand
aagcacaucuacuuuccaa

SEQ ID NO: 1944292 - RNA, 19 nt, Homo sapiens
  misc_RNA (1)...(19): siRNA sense strand
aagaugugguuguggaauu

SEQ ID NO: 1944293 - RNA, 19 nt, Homo sapiens
  misc_RNA (1)...(19): siRNA sense strand
ccagagauucauacaaaga

SEQ ID NO: 1944294 - RNA, 19 nt, Homo sapiens
  misc_RNA (1)...(19): siRNA sense strand
ugagcaaguugauggcuau

SEQ ID NO: 1944295 - RNA, 19 nt, Homo sapiens
  misc_RNA (1)...(19): siRNA sense strand
cgacguacaaaccuuacua

SEQ ID NO: 1944296 - RNA, 19 nt, Homo sapiens
  misc_RNA (1)...(19): siRNA sense strand
agagaaacccuauaaaugc

SEQ ID NO: 1944297 - RNA, 19 nt, Homo sapiens
  misc_RNA (1)...(19): siRNA sense strand
caacugggaauuccuucaa

SEQ ID NO: 1944298 - RNA, 19 nt, Homo sapiens
  misc_RNA (1)...(19): siRNA sense strand
cugagacaauuuacacuga

SEQ ID NO: 1944299 - RNA, 19 nt, Homo sapiens
  misc_RNA (1)...(19): siRNA sense strand
gaagcagauuauagaacug

SEQ ID NO: 1944300 - RNA, 19 nt, Homo sapiens
  misc_RNA (1)...(19): siRNA sense strand
cauacaaagaagcagauua

SEQ ID NO: 1944301 - RNA, 19 nt, Homo sapiens
  misc_RNA (1)...(19): siRNA sense strand
gaguucaaaccuuguuaaa

SEQ ID NO: 1944302 - RNA, 19 nt, Homo sapiens
  misc_RNA (1)...(19): siRNA sense strand
cgucaaaaguucagacauu

SEQ ID NO: 1944303 - RNA, 19 nt, Homo sapiens
  misc_RNA (1)...(19): siRNA sense strand
ucugaggcaucucgucaaa

SEQ ID NO: 1944304 - RNA, 19 nt, Homo sapiens
  misc_RNA (1)...(19): siRNA sense strand
ugggagcucugucuucaau

SEQ ID NO: 1944305 - RNA, 19 nt, Homo sapiens
  misc_RNA (1)...(19): siRNA sense strand
uaauuuagacucaguaggu

SEQ ID NO: 1944306 - RNA, 19 nt, Homo sapiens
  misc_RNA (1)...(19): siRNA sense strand
ucauagaagaugugauuga

SEQ ID NO: 1944307 - RNA, 19 nt, Homo sapiens
  misc_RNA (1)...(19): siRNA sense strand
aaacugcauacucgagaua

SEQ ID NO: 1944308 - RNA, 19 nt, Homo sapiens
  misc_RNA (1)...(19): siRNA sense strand
agacauuuccaguauuuga

SEQ ID NO: 1944309 - RNA, 19 nt, Homo sapiens
  misc_RNA (1)...(19): siRNA sense strand
ccacaagaggcuuucauuc

SEQ ID NO: 1944310 - RNA, 19 nt, Homo sapiens
  misc_RNA (1)...(19): siRNA sense strand
uaaguuggagaguaagaaa

SEQ ID NO: 1944311 - RNA, 19 nt, Homo sapiens
  misc_RNA (1)...(19): siRNA sense strand
gaaagcuggcucacgaaca

SEQ ID NO: 1944312 - RNA, 19 nt, Homo sapiens
  misc_RNA (1)...(19): siRNA sense strand
gaaaggggucuccaaaaug

SEQ ID NO: 1944313 - RNA, 19 nt, Homo sapiens
  misc_RNA (1)...(19): siRNA sense strand
gacaaggcuuaccgaaagu

SEQ ID NO: 1944314 - RNA, 19 nt, Homo sapiens
  misc_RNA (1)...(19): siRNA sense strand
ggauaauggagaaagaaau

SEQ ID NO: 1944315 - RNA, 19 nt, Homo sapiens
  misc_RNA (1)...(19): siRNA sense strand
ucaaauguaaggaauguag

SEQ ID NO: 1944316 - RNA, 19 nt, Homo sapiens
  misc_RNA (1)...(19): siRNA sense strand
gggagagaaaccauucaaa

SEQ ID NO: 1944317 - RNA, 19 nt, Homo sapiens
  misc_RNA (1)...(19): siRNA sense strand
gaagcaaaggccugcacaa

SEQ ID NO: 1944318 - RNA, 19 nt, Homo sapiens
  misc_RNA (1)...(19): siRNA sense strand
gacguacaaaccuuacuaa

SEQ ID NO: 1944319 - RNA, 19 nt, Homo sapiens
  misc_RNA (1)...(19): siRNA sense strand
agaaaggggucuccaaaau

SEQ ID NO: 1944320 - RNA, 19 nt, Homo sapiens
  misc_RNA (1)...(19): siRNA sense strand
gaggaaggaugugcaguug

SEQ ID NO: 1944321 - RNA, 19 nt, Homo sapiens
  misc_RNA (1)...(19): siRNA sense strand
ggaggaaggaugugcaguu

SEQ ID NO: 1944322 - RNA, 19 nt, Homo sapiens
  misc_RNA (1)...(19): siRNA sense strand
gaacgggaggucaagaguu

SEQ ID NO: 1944323 - RNA, 19 nt, Homo sapiens
  misc_RNA (1)...(19): siRNA sense strand
ggaggaaggacgugcaguu

SEQ ID NO: 1944324 - RNA, 19 nt, Homo sapiens
  misc_RNA (1)...(19): siRNA sense strand
ggacuucacagccucuaga

SEQ ID NO: 1944325 - RNA, 19 nt, Homo sapiens
  misc_RNA (1)...(19): siRNA sense strand
agacgggccucagaccuaa

SEQ ID NO: 1944326 - RNA, 19 nt, Homo sapiens
  misc_RNA (1)...(19): siRNA sense strand
ggacuugcuuuggacuuuc

SEQ ID NO: 1944327 - RNA, 19 nt, Homo sapiens
  misc_RNA (1)...(19): siRNA sense strand
ggacuuucccuugcucuug

SEQ ID NO: 1944328 - RNA, 19 nt, Homo sapiens
  misc_RNA (1)...(19): siRNA sense strand
aacgggaggucaagaguug

SEQ ID NO: 1944329 - RNA, 19 nt, Homo sapiens
  misc_RNA (1)...(19): siRNA sense strand
gaggaaggacgugcaguug

SEQ ID NO: 1944330 - RNA, 19 nt, Homo sapiens
  misc_RNA (1)...(19): siRNA sense strand
agaagguccucgccagaug

SEQ ID NO: 1944331 - RNA, 19 nt, Homo sapiens
  misc_RNA (1)...(19): siRNA sense strand
ggauaugccacggacauug

SEQ ID NO: 1944332 - RNA, 19 nt, Homo sapiens
  misc_RNA (1)...(19): siRNA sense strand
caccugugcucuuggacuu

SEQ ID NO: 1944333 - RNA, 19 nt, Homo sapiens
  misc_RNA (1)...(19): siRNA sense strand
cagacgggccucagaccua

SEQ ID NO: 1944334 - RNA, 19 nt, Homo sapiens
  misc_RNA (1)...(19): siRNA sense strand
uggacuugcuuuggacuuu

SEQ ID NO: 1944335 - RNA, 19 nt, Homo sapiens
  misc_RNA (1)...(19): siRNA sense strand
gagagaggagcaagaaggu

SEQ ID NO: 1944336 - RNA, 19 nt, Homo sapiens
  misc_RNA (1)...(19): siRNA sense strand
gauaugccacggacauugg

SEQ ID NO: 1944337 - RNA, 19 nt, Homo sapiens
  misc_RNA (1)...(19): siRNA sense strand
ggcacagccuggagacaca

SEQ ID NO: 1944338 - RNA, 19 nt, Homo sapiens
  misc_RNA (1)...(19): siRNA sense strand
gagaacgggaggucaagag

SEQ ID NO: 1944339 - RNA, 19 nt, Homo sapiens
  misc_RNA (1)...(19): siRNA sense strand
ggaacggacggaggaagga

SEQ ID NO: 1944340 - RNA, 19 nt, Homo sapiens
  misc_RNA (1)...(19): siRNA sense strand
gaacggacggaggaaggau

SEQ ID NO: 1944341 - RNA, 19 nt, Homo sapiens
  misc_RNA (1)...(19): siRNA sense strand
cugcagaugcccugagaga

SEQ ID NO: 1944342 - RNA, 19 nt, Homo sapiens
  misc_RNA (1)...(19): siRNA sense strand
ccugagagaggagcaagaa

SEQ ID NO: 1944343 - RNA, 19 nt, Homo sapiens
  misc_RNA (1)...(19): siRNA sense strand
caacagcggccuccucuuu

SEQ ID NO: 1944344 - RNA, 19 nt, Homo sapiens
  misc_RNA (1)...(19): siRNA sense strand
ggacguggccuaucacugu

SEQ ID NO: 1944345 - RNA, 19 nt, Homo sapiens
  misc_RNA (1)...(19): siRNA sense strand
ccgaggagcugguggcauu

SEQ ID NO: 1944346 - RNA, 19 nt, Homo sapiens
  misc_RNA (1)...(19): siRNA sense strand
cgaacggccuguacgauga

SEQ ID NO: 1944347 - RNA, 19 nt, Homo sapiens
  misc_RNA (1)...(19): siRNA sense strand
guacucugcuggacacgaa

SEQ ID NO: 1944348 - RNA, 19 nt, Homo sapiens
  misc_RNA (1)...(19): siRNA sense strand
gcucugcacugcccucuuc

SEQ ID NO: 1944349 - RNA, 19 nt, Homo sapiens
  misc_RNA (1)...(19): siRNA sense strand
caacaaguguaacgacgau

SEQ ID NO: 1944350 - RNA, 19 nt, Homo sapiens
  misc_RNA (1)...(19): siRNA sense strand
gccagacgcccaaccauaa

SEQ ID NO: 1944351 - RNA, 19 nt, Homo sapiens
  misc_RNA (1)...(19): siRNA sense strand
gcgagcagccaccaaauug

SEQ ID NO: 1944352 - RNA, 19 nt, Homo sapiens
  misc_RNA (1)...(19): siRNA sense strand
gagcagccaccaaauugaa

SEQ ID NO: 1944353 - RNA, 19 nt, Homo sapiens
  misc_RNA (1)...(19): siRNA sense strand
cuguggagauuucaacuuu

SEQ ID NO: 1944354 - RNA, 19 nt, Homo sapiens
  misc_RNA (1)...(19): siRNA sense strand
agaagguccuggagaguga

SEQ ID NO: 1944355 - RNA, 19 nt, Homo sapiens
  misc_RNA (1)...(19): siRNA sense strand
gggcagagaauccgcaaug

SEQ ID NO: 1944356 - RNA, 19 nt, Homo sapiens
  misc_RNA (1)...(19): siRNA sense strand
aggacuggcuggcugauuu

SEQ ID NO: 1944357 - RNA, 19 nt, Homo sapiens
  misc_RNA (1)...(19): siRNA sense strand
ggccagacgcccaaccaua

SEQ ID NO: 1944358 - RNA, 19 nt, Homo sapiens
  misc_RNA (1)...(19): siRNA sense strand
guggaagaauucaguuuua

SEQ ID NO: 1944359 - RNA, 19 nt, Homo sapiens
  misc_RNA (1)...(19): siRNA sense strand
uaagggagcucuguuucuc

SEQ ID NO: 1944360 - RNA, 19 nt, Homo sapiens
  misc_RNA (1)...(19): siRNA sense strand
acgaugcccuggccucuaa

SEQ ID NO: 1944361 - RNA, 19 nt, Homo sapiens
  misc_RNA (1)...(19): siRNA sense strand
caagcgagcagccaccaaa

SEQ ID NO: 1944362 - RNA, 19 nt, Homo sapiens
  misc_RNA (1)...(19): siRNA sense strand
ucauggacguggccuauca

SEQ ID NO: 1944363 - RNA, 19 nt, Homo sapiens
  misc_RNA (1)...(19): siRNA sense strand
guccugggcccuuaucuuu

SEQ ID NO: 1944364 - RNA, 19 nt, Homo sapiens
  misc_RNA (1)...(19): siRNA sense strand
gcucgcugccuccuucaua

SEQ ID NO: 1944365 - RNA, 19 nt, Homo sapiens
  misc_RNA (1)...(19): siRNA sense strand
gggaguaccuggcguuucc

SEQ ID NO: 1944366 - RNA, 19 nt, Homo sapiens
  misc_RNA (1)...(19): siRNA sense strand
ggccccagaucaaaauuua

SEQ ID NO: 1944367 - RNA, 19 nt, Homo sapiens
  misc_RNA (1)...(19): siRNA sense strand
gcccuuaucuuuccaugcu

SEQ ID NO: 1944368 - RNA, 19 nt, Homo sapiens
  misc_RNA (1)...(19): siRNA sense strand
aggccgagguggaagaauu

SEQ ID NO: 1944369 - RNA, 19 nt, Homo sapiens
  misc_RNA (1)...(19): siRNA sense strand
gcacaccucaggaccaaag

SEQ ID NO: 1944370 - RNA, 19 nt, Homo sapiens
  misc_RNA (1)...(19): siRNA sense strand
ggaaggccgagguggaaga

SEQ ID NO: 1944371 - RNA, 19 nt, Homo sapiens
  misc_RNA (1)...(19): siRNA sense strand
ugcaggagguguuugacaa

SEQ ID NO: 1944372 - RNA, 19 nt, Homo sapiens
  misc_RNA (1)...(19): siRNA sense strand
cgucgucuguggagauuuc

SEQ ID NO: 1944373 - RNA, 19 nt, Homo sapiens
  misc_RNA (1)...(19): siRNA sense strand
gacguggccuaucacuguu

SEQ ID NO: 1944374 - RNA, 19 nt, Homo sapiens
  misc_RNA (1)...(19): siRNA sense strand
cagccucuguggaguacaa

SEQ ID NO: 1944375 - RNA, 19 nt, Homo sapiens
  misc_RNA (1)...(19): siRNA sense strand
cgacgaggccuucgaccau

SEQ ID NO: 1944376 - RNA, 19 nt, Homo sapiens
  misc_RNA (1)...(19): siRNA sense strand
ggacacgaacggccuguac

SEQ ID NO: 1944377 - RNA, 19 nt, Homo sapiens
  misc_RNA (1)...(19): siRNA sense strand
gaaggccgagguggaagaa

SEQ ID NO: 1944378 - RNA, 19 nt, Homo sapiens
  misc_RNA (1)...(19): siRNA sense strand
gagcucuguuucucaaggu

SEQ ID NO: 1944379 - RNA, 19 nt, Homo sapiens
  misc_RNA (1)...(19): siRNA sense strand
caagagcucgggccagaag

SEQ ID NO: 1944380 - RNA, 19 nt, Homo sapiens
  misc_RNA (1)...(19): siRNA sense strand
caaagaaucgucggguaca

SEQ ID NO: 1944381 - RNA, 19 nt, Homo sapiens
  misc_RNA (1)...(19): siRNA sense strand
aagcacaccucaggaccaa

SEQ ID NO: 1944382 - RNA, 19 nt, Homo sapiens
  misc_RNA (1)...(19): siRNA sense strand
ggacuggcuggcugauuuc

SEQ ID NO: 1944383 - RNA, 19 nt, Homo sapiens
  misc_RNA (1)...(19): siRNA sense strand
ugaggucuccgccuucuuc

SEQ ID NO: 1944384 - RNA, 19 nt, Homo sapiens
  misc_RNA (1)...(19): siRNA sense strand
auucacggcuggaagacaa

SEQ ID NO: 1944385 - RNA, 19 nt, Homo sapiens
  misc_RNA (1)...(19): siRNA sense strand
ggagaucgggcagagaauc

SEQ ID NO: 1944386 - RNA, 19 nt, Homo sapiens
  misc_RNA (1)...(19): siRNA sense strand
aaggagaucgggcagagaa

SEQ ID NO: 1944387 - RNA, 19 nt, Homo sapiens
  misc_RNA (1)...(19): siRNA sense strand
gcagcugcacggcuacuuc

SEQ ID NO: 1944388 - RNA, 19 nt, Homo sapiens
  misc_RNA (1)...(19): siRNA sense strand
cgagcagccaccaaauuga

SEQ ID NO: 1944389 - RNA, 19 nt, Homo sapiens
  misc_RNA (1)...(19): siRNA sense strand
aggccucgguggugaagaa

SEQ ID NO: 1944390 - RNA, 19 nt, Homo sapiens
  misc_RNA (1)...(19): siRNA sense strand
caucauggacguggccuau

SEQ ID NO: 1944391 - RNA, 19 nt, Homo sapiens
  misc_RNA (1)...(19): siRNA sense strand
gcaggagguguuugacaag

SEQ ID NO: 1944392 - RNA, 19 nt, Homo sapiens
  misc_RNA (1)...(19): siRNA sense strand
agggagcucuguuucucaa

SEQ ID NO: 1944393 - RNA, 19 nt, Homo sapiens
  misc_RNA (1)...(19): siRNA sense strand
gcagaagguccuggagagu

SEQ ID NO: 1944394 - RNA, 19 nt, Homo sapiens
  misc_RNA (1)...(19): siRNA sense strand
gcaagagcucgggccagaa

SEQ ID NO: 1944395 - RNA, 19 nt, Homo sapiens
  misc_RNA (1)...(19): siRNA sense strand
gccagggucaacaaccuuu

SEQ ID NO: 1944396 - RNA, 19 nt, Homo sapiens
  misc_RNA (1)...(19): siRNA sense strand
gaacggccuguacgaugag

SEQ ID NO: 1944397 - RNA, 19 nt, Homo sapiens
  misc_RNA (1)...(19): siRNA sense strand
uguccgcccugcacugugu

SEQ ID NO: 1944398 - RNA, 19 nt, Homo sapiens
  misc_RNA (1)...(19): siRNA sense strand
uguguguccugggcccuua

SEQ ID NO: 1944399 - RNA, 19 nt, Homo sapiens
  misc_RNA (1)...(19): siRNA sense strand
uguggagauuucaacuuug

SEQ ID NO: 1944400 - RNA, 19 nt, Homo sapiens
  misc_RNA (1)...(19): siRNA sense strand
gaggagcugguggcauuug

SEQ ID NO: 1944401 - RNA, 19 nt, Homo sapiens
  misc_RNA (1)...(19): siRNA sense strand
ccagacgcccaaccauaau

SEQ ID NO: 1944402 - RNA, 19 nt, Homo sapiens
  misc_RNA (1)...(19): siRNA sense strand
ggcagagaauccgcaaugg

SEQ ID NO: 1944403 - RNA, 19 nt, Homo sapiens
  misc_RNA (1)...(19): siRNA sense strand
ggagagaagucuuauaaau

SEQ ID NO: 1944404 - RNA, 19 nt, Homo sapiens
  misc_RNA (1)...(19): siRNA sense strand
gcucaaaucuucaaauuca

SEQ ID NO: 1944405 - RNA, 19 nt, Homo sapiens
  misc_RNA (1)...(19): siRNA sense strand
gguaaagguuucagucaua

SEQ ID NO: 1944406 - RNA, 19 nt, Homo sapiens
  misc_RNA (1)...(19): siRNA sense strand
guucaaagcuucacacuca

SEQ ID NO: 1944407 - RNA, 19 nt, Homo sapiens
  misc_RNA (1)...(19): siRNA sense strand
guacggaugugaugaaguu

SEQ ID NO: 1944408 - RNA, 19 nt, Homo sapiens
  misc_RNA (1)...(19): siRNA sense strand
gaucauaauucacaucuuc

SEQ ID NO: 1944409 - RNA, 19 nt, Homo sapiens
  misc_RNA (1)...(19): siRNA sense strand
ggaguucacuuucaucaga

SEQ ID NO: 1944410 - RNA, 19 nt, Homo sapiens
  misc_RNA (1)...(19): siRNA sense strand
gagagaaaccuuauaaaug

SEQ ID NO: 1944411 - RNA, 19 nt, Homo sapiens
  misc_RNA (1)...(19): siRNA sense strand
gagagaagccuuaucaaug

SEQ ID NO: 1944412 - RNA, 19 nt, Homo sapiens
  misc_RNA (1)...(19): siRNA sense strand
caaaugccgugaauauuau

SEQ ID NO: 1944413 - RNA, 19 nt, Homo sapiens
  misc_RNA (1)...(19): siRNA sense strand
gagagaaaccuuacaaaug

SEQ ID NO: 1944414 - RNA, 19 nt, Homo sapiens
  misc_RNA (1)...(19): siRNA sense strand
gauaaagaccucaguagaa

SEQ ID NO: 1944415 - RNA, 19 nt, Homo sapiens
  misc_RNA (1)...(19): siRNA sense strand
acaaaugccgugaauauua

SEQ ID NO: 1944416 - RNA, 19 nt, Homo sapiens
  misc_RNA (1)...(19): siRNA sense strand
gagcucaaaucuucgaauu

SEQ ID NO: 1944417 - RNA, 19 nt, Homo sapiens
  misc_RNA (1)...(19): siRNA sense strand
ggagagaaaccuuauaaau

SEQ ID NO: 1944418 - RNA, 19 nt, Homo sapiens
  misc_RNA (1)...(19): siRNA sense strand
gcucaaaucuucgaauuca

SEQ ID NO: 1944419 - RNA, 19 nt, Homo sapiens
  misc_RNA (1)...(19): siRNA sense strand
gagagaaacccuacaaaug

SEQ ID NO: 1944420 - RNA, 19 nt, Homo sapiens
  misc_RNA (1)...(19): siRNA sense strand
caagaaaccacauagguaa

SEQ ID NO: 1944421 - RNA, 19 nt, Homo sapiens
  misc_RNA (1)...(19): siRNA sense strand
gcgcucaaaucuucaaauu

SEQ ID NO: 1944422 - RNA, 19 nt, Homo sapiens
  misc_RNA (1)...(19): siRNA sense strand
guucuaaucuucacauuca

SEQ ID NO: 1944423 - RNA, 19 nt, Homo sapiens
  misc_RNA (1)...(19): siRNA sense strand
cuacaaaucccaagaagaa

SEQ ID NO: 1944424 - RNA, 19 nt, Homo sapiens
  misc_RNA (1)...(19): siRNA sense strand
gacgguaacuuucaucaga

SEQ ID NO: 1944425 - RNA, 19 nt, Homo sapiens
  misc_RNA (1)...(19): siRNA sense strand
gaucagacuuguauagaca

SEQ ID NO: 1944426 - RNA, 19 nt, Homo sapiens
  misc_RNA (1)...(19): siRNA sense strand
gagagaagucuuauaaaug

SEQ ID NO: 1944427 - RNA, 19 nt, Homo sapiens
  misc_RNA (1)...(19): siRNA sense strand
gcucagaucuucgcauuca

SEQ ID NO: 1944428 - RNA, 19 nt, Homo sapiens
  misc_RNA (1)...(19): siRNA sense strand
cuacaaaugugaagagugu

SEQ ID NO: 1944429 - RNA, 19 nt, Homo sapiens
  misc_RNA (1)...(19): siRNA sense strand
gagaaacccuacaaaugug

SEQ ID NO: 1944430 - RNA, 19 nt, Homo sapiens
  misc_RNA (1)...(19): siRNA sense strand
ggagaaacccuauacuugu

SEQ ID NO: 1944431 - RNA, 19 nt, Homo sapiens
  misc_RNA (1)...(19): siRNA sense strand
ggaaugagagcuacaaauc

SEQ ID NO: 1944432 - RNA, 19 nt, Homo sapiens
  misc_RNA (1)...(19): siRNA sense strand
guucacaucuucucauuca

SEQ ID NO: 1944433 - RNA, 19 nt, Homo sapiens
  misc_RNA (1)...(19): siRNA sense strand
gcaguaacauuugaagaug

SEQ ID NO: 1944434 - RNA, 19 nt, Homo sapiens
  misc_RNA (1)...(19): siRNA sense strand
caucagagcuccggaguuc

SEQ ID NO: 1944435 - RNA, 19 nt, Homo sapiens
  misc_RNA (1)...(19): siRNA sense strand
ggagagaaaccuuacaaau

SEQ ID NO: 1944436 - RNA, 19 nt, Homo sapiens
  misc_RNA (1)...(19): siRNA sense strand
gugaugaaguugacgguaa

SEQ ID NO: 1944437 - RNA, 19 nt, Homo sapiens
  misc_RNA (1)...(19): siRNA sense strand
agagaagccuuaucaaugu

SEQ ID NO: 1944438 - RNA, 19 nt, Homo sapiens
  misc_RNA (1)...(19): siRNA sense strand
caggagagaagucuuauaa

SEQ ID NO: 1944439 - RNA, 19 nt, Homo sapiens
  misc_RNA (1)...(19): siRNA sense strand
auaaagaccucaguagaaa

SEQ ID NO: 1944440 - RNA, 19 nt, Homo sapiens
  misc_RNA (1)...(19): siRNA sense strand
ccaagaaaccacauaggua

SEQ ID NO: 1944441 - RNA, 19 nt, Homo sapiens
  misc_RNA (1)...(19): siRNA sense strand
gagaaaagcccuauaaaug

SEQ ID NO: 1944442 - RNA, 19 nt, Homo sapiens
  misc_RNA (1)...(19): siRNA sense strand
gggagaaacccuauacuug

SEQ ID NO: 1944443 - RNA, 19 nt, Homo sapiens
  misc_RNA (1)...(19): siRNA sense strand
ggagagaaacccuacaaau

SEQ ID NO: 1944444 - RNA, 19 nt, Homo sapiens
  misc_RNA (1)...(19): siRNA sense strand
ggagagaagccuuaucaau

SEQ ID NO: 1944445 - RNA, 19 nt, Homo sapiens
  misc_RNA (1)...(19): siRNA sense strand
agagaaaccuuacaaaugc

SEQ ID NO: 1944446 - RNA, 19 nt, Homo sapiens
  misc_RNA (1)...(19): siRNA sense strand
gaagaccuacugagagauu

SEQ ID NO: 1944447 - RNA, 19 nt, Homo sapiens
  misc_RNA (1)...(19): siRNA sense strand
gagaaacccuauacuuguc

SEQ ID NO: 1944448 - RNA, 19 nt, Homo sapiens
  misc_RNA (1)...(19): siRNA sense strand
gaaaaguacuguggaugua

SEQ ID NO: 1944449 - RNA, 19 nt, Homo sapiens
  misc_RNA (1)...(19): siRNA sense strand
gaacuacacaaaugucaug

SEQ ID NO: 1944450 - RNA, 19 nt, Homo sapiens
  misc_RNA (1)...(19): siRNA sense strand
guagaaaacuggaaugaga

SEQ ID NO: 1944451 - RNA, 19 nt, Homo sapiens
  misc_RNA (1)...(19): siRNA sense strand
cuacacaaaugucauguca

SEQ ID NO: 1944452 - RNA, 19 nt, Homo sapiens
  misc_RNA (1)...(19): siRNA sense strand
ccagagacuucacauagga

SEQ ID NO: 1944453 - RNA, 19 nt, Homo sapiens
  misc_RNA (1)...(19): siRNA sense strand
gaaaccacauagguaagaa

SEQ ID NO: 1944454 - RNA, 19 nt, Homo sapiens
  misc_RNA (1)...(19): siRNA sense strand
cagauaccgucuuggcaua

SEQ ID NO: 1944455 - RNA, 19 nt, Homo sapiens
  misc_RNA (1)...(19): siRNA sense strand
gggauuugaucauaauuca

SEQ ID NO: 1944456 - RNA, 19 nt, Homo sapiens
  misc_RNA (1)...(19): siRNA sense strand
gaucuucgcauucaucaga

SEQ ID NO: 1944457 - RNA, 19 nt, Homo sapiens
  misc_RNA (1)...(19): siRNA sense strand
acacaaaugucaugucagu

SEQ ID NO: 1944458 - RNA, 19 nt, Homo sapiens
  misc_RNA (1)...(19): siRNA sense strand
ucaagacuaugguagagaa

SEQ ID NO: 1944459 - RNA, 19 nt, Homo sapiens
  misc_RNA (1)...(19): siRNA sense strand
gcucagcucuucgaauuca

SEQ ID NO: 1944460 - RNA, 19 nt, Homo sapiens
  misc_RNA (1)...(19): siRNA sense strand
aagaagaccuacugagaga

SEQ ID NO: 1944461 - RNA, 19 nt, Homo sapiens
  misc_RNA (1)...(19): siRNA sense strand
cagcucagaucuucgcauu

SEQ ID NO: 1944462 - RNA, 19 nt, Homo sapiens
  misc_RNA (1)...(19): siRNA sense strand
uuacaaaugccgugaauau

SEQ ID NO: 1944463 - RNA, 19 nt, Homo sapiens
  misc_RNA (1)...(19): siRNA sense strand
gagagaagccuuuuaaaug

SEQ ID NO: 1944464 - RNA, 19 nt, Homo sapiens
  misc_RNA (1)...(19): siRNA sense strand
ucauagaagaggaaacuua

SEQ ID NO: 1944465 - RNA, 19 nt, Homo sapiens
  misc_RNA (1)...(19): siRNA sense strand
agagaaacccuacaaaugu

SEQ ID NO: 1944466 - RNA, 19 nt, Homo sapiens
  misc_RNA (1)...(19): siRNA sense strand
gcaagaucguucccagugu

SEQ ID NO: 1944467 - RNA, 19 nt, Homo sapiens
  misc_RNA (1)...(19): siRNA sense strand
caggagagaaaccuuauaa

SEQ ID NO: 1944468 - RNA, 19 nt, Homo sapiens
  misc_RNA (1)...(19): siRNA sense strand
agccagagcucaaaucuuc

SEQ ID NO: 1944469 - RNA, 19 nt, Homo sapiens
  misc_RNA (1)...(19): siRNA sense strand
ggaguucaguacuucaugu

SEQ ID NO: 1944470 - RNA, 19 nt, Homo sapiens
  misc_RNA (1)...(19): siRNA sense strand
uggcaaggcugguggaaug

SEQ ID NO: 1944471 - RNA, 19 nt, Homo sapiens
  misc_RNA (1)...(19): siRNA sense strand
ucucuagucuucacaauca

SEQ ID NO: 1944472 - RNA, 19 nt, Homo sapiens
  misc_RNA (1)...(19): siRNA sense strand
ucaagaagaccuacugaga

SEQ ID NO: 1944473 - RNA, 19 nt, Homo sapiens
  misc_RNA (1)...(19): siRNA sense strand
ggaacuaugaacugacuuu

SEQ ID NO: 1944474 - RNA, 19 nt, Homo sapiens
  misc_RNA (1)...(19): siRNA sense strand
gagaguccauacaggagaa

SEQ ID NO: 1944475 - RNA, 19 nt, Homo sapiens
  misc_RNA (1)...(19): siRNA sense strand
caaaugucaugucaguaga

SEQ ID NO: 1944476 - RNA, 19 nt, Homo sapiens
  misc_RNA (1)...(19): siRNA sense strand
gagaaaccuuauaaaugug

SEQ ID NO: 1944477 - RNA, 19 nt, Homo sapiens
  misc_RNA (1)...(19): siRNA sense strand
ucaaagaguccacacagaa

SEQ ID NO: 1944478 - RNA, 19 nt, Homo sapiens
  misc_RNA (1)...(19): siRNA sense strand
acugagagauucaauggaa

SEQ ID NO: 1944479 - RNA, 19 nt, Homo sapiens
  misc_RNA (1)...(19): siRNA sense strand
ugggagaacuacacaaaug

SEQ ID NO: 1944480 - RNA, 19 nt, Homo sapiens
  misc_RNA (1)...(19): siRNA sense strand
ucagagaucagacuuguau

SEQ ID NO: 1944481 - RNA, 19 nt, Homo sapiens
  misc_RNA (1)...(19): siRNA sense strand
gcgcccagauguaugagaa

SEQ ID NO: 1944482 - RNA, 19 nt, Homo sapiens
  misc_RNA (1)...(19): siRNA sense strand
gaaaagcccuauaaauguc

SEQ ID NO: 1944483 - RNA, 19 nt, Homo sapiens
  misc_RNA (1)...(19): siRNA sense strand
acacaggagagaagucuua

SEQ ID NO: 1944484 - RNA, 19 nt, Homo sapiens
  misc_RNA (1)...(19): siRNA sense strand
ggugauaugucaagaagac

SEQ ID NO: 1944485 - RNA, 19 nt, Homo sapiens
  misc_RNA (1)...(19): siRNA sense strand
gagaagccuuuuaaaugua

SEQ ID NO: 1944486 - RNA, 19 nt, Homo sapiens
  misc_RNA (1)...(19): siRNA sense strand
guauagacauccaagaaac

SEQ ID NO: 1944487 - RNA, 19 nt, Homo sapiens
  misc_RNA (1)...(19): siRNA sense strand
gagaaaaccucugucaaug

SEQ ID NO: 1944488 - RNA, 19 nt, Homo sapiens
  misc_RNA (1)...(19): siRNA sense strand
guaaagguuucagucauag

SEQ ID NO: 1944489 - RNA, 19 nt, Homo sapiens
  misc_RNA (1)...(19): siRNA sense strand
gagauucaauggaagaaaa

SEQ ID NO: 1944490 - RNA, 19 nt, Homo sapiens
  misc_RNA (1)...(19): siRNA sense strand
gcucuucgaauucaucaaa

SEQ ID NO: 1944491 - RNA, 19 nt, Homo sapiens
  misc_RNA (1)...(19): siRNA sense strand
guucaguacuucauguuca

SEQ ID NO: 1944492 - RNA, 19 nt, Homo sapiens
  misc_RNA (1)...(19): siRNA sense strand
ccuuauagcuguaaugcau

SEQ ID NO: 1944493 - RNA, 19 nt, Homo sapiens
  misc_RNA (1)...(19): siRNA sense strand
gaaaucuacaugagugguu

SEQ ID NO: 1944494 - RNA, 19 nt, Homo sapiens
  misc_RNA (1)...(19): siRNA sense strand
gagaagccuuaucaaugug

SEQ ID NO: 1944495 - RNA, 19 nt, Homo sapiens
  misc_RNA (1)...(19): siRNA sense strand
gcuucacacucaucaaaga

SEQ ID NO: 1944496 - RNA, 19 nt, Homo sapiens
  misc_RNA (1)...(19): siRNA sense strand
caucagagaguucacauag

SEQ ID NO: 1944497 - RNA, 19 nt, Homo sapiens
  misc_RNA (1)...(19): siRNA sense strand
uuaauacucuccacacaag

SEQ ID NO: 1944498 - RNA, 19 nt, Homo sapiens
  misc_RNA (1)...(19): siRNA sense strand
aaagaccucaguagaaauu

SEQ ID NO: 1944499 - RNA, 19 nt, Homo sapiens
  misc_RNA (1)...(19): siRNA sense strand
gaagaaaaguacuguggau

SEQ ID NO: 1944500 - RNA, 19 nt, Homo sapiens
  misc_RNA (1)...(19): siRNA sense strand
agccagaucucuagucuuc

SEQ ID NO: 1944501 - RNA, 19 nt, Homo sapiens
  misc_RNA (1)...(19): siRNA sense strand
ggaaaggguuuuagucaca

SEQ ID NO: 1944502 - RNA, 19 nt, Homo sapiens
  misc_RNA (1)...(19): siRNA sense strand
gcguucacaucuucucauu

SEQ ID NO: 1944503 - RNA, 19 nt, Homo sapiens
  misc_RNA (1)...(19): siRNA sense strand
gagaauaccuguccuucau

SEQ ID NO: 1944504 - RNA, 19 nt, Homo sapiens
  misc_RNA (1)...(19): siRNA sense strand
aagcaagacucauaaggaa

SEQ ID NO: 1944505 - RNA, 19 nt, Homo sapiens
  misc_RNA (1)...(19): siRNA sense strand
gcuaguacccuaagcaaga

SEQ ID NO: 1944506 - RNA, 19 nt, Homo sapiens
  misc_RNA (1)...(19): siRNA sense strand
gagaagcacccaaaugcaa

SEQ ID NO: 1944507 - RNA, 19 nt, Homo sapiens
  misc_RNA (1)...(19): siRNA sense strand
gcacccaaaugcaaacauc

SEQ ID NO: 1944508 - RNA, 19 nt, Homo sapiens
  misc_RNA (1)...(19): siRNA sense strand
gaauaccuguccuucauac

SEQ ID NO: 1944509 - RNA, 19 nt, Homo sapiens
  misc_RNA (1)...(19): siRNA sense strand
uaagcaagacucauaagga

SEQ ID NO: 1944510 - RNA, 19 nt, Homo sapiens
  misc_RNA (1)...(19): siRNA sense strand
caaaugcaaacaucuacuu

SEQ ID NO: 1944511 - RNA, 19 nt, Homo sapiens
  misc_RNA (1)...(19): siRNA sense strand
gaaggucgggccuccauag

SEQ ID NO: 1944512 - RNA, 19 nt, Homo sapiens
  misc_RNA (1)...(19): siRNA sense strand
ccauaggucucuguuucuu

SEQ ID NO: 1944513 - RNA, 19 nt, Homo sapiens
  misc_RNA (1)...(19): siRNA sense strand
cuccauaggucucuguuuc

SEQ ID NO: 1944514 - RNA, 19 nt, Homo sapiens
  misc_RNA (1)...(19): siRNA sense strand
auacagagaagcacccaaa

SEQ ID NO: 1944515 - RNA, 19 nt, Homo sapiens
  misc_RNA (1)...(19): siRNA sense strand
gaagcuaguacccuaagca

SEQ ID NO: 1944516 - RNA, 19 nt, Homo sapiens
  misc_RNA (1)...(19): siRNA sense strand
cagagaagcacccaaaugc

SEQ ID NO: 1944517 - RNA, 19 nt, Homo sapiens
  misc_RNA (1)...(19): siRNA sense strand
ggaaggucgggccuccaua

SEQ ID NO: 1944518 - RNA, 19 nt, Homo sapiens
  misc_RNA (1)...(19): siRNA sense strand
agaauaccuguccuucaua

SEQ ID NO: 1944519 - RNA, 19 nt, Homo sapiens
  misc_RNA (1)...(19): siRNA sense strand
acagagaagcacccaaaug

SEQ ID NO: 1944520 - RNA, 19 nt, Homo sapiens
  misc_RNA (1)...(19): siRNA sense strand
agaagcacccaaaugcaaa

SEQ ID NO: 1944521 - RNA, 19 nt, Homo sapiens
  misc_RNA (1)...(19): siRNA sense strand
gaggugacucucaugaaca

SEQ ID NO: 1944522 - RNA, 19 nt, Homo sapiens
  misc_RNA (1)...(19): siRNA sense strand
acccuaagcaagacucaua

SEQ ID NO: 1944523 - RNA, 19 nt, Homo sapiens
  misc_RNA (1)...(19): siRNA sense strand
ucagaagcuaguacccuaa

SEQ ID NO: 1944524 - RNA, 19 nt, Homo sapiens
  misc_RNA (1)...(19): siRNA sense strand
auaggucucuguuucuucu

SEQ ID NO: 1944525 - RNA, 19 nt, Homo sapiens
  misc_RNA (1)...(19): siRNA sense strand
gaaauagacuggauagaga

SEQ ID NO: 1944526 - RNA, 19 nt, Homo sapiens
  misc_RNA (1)...(19): siRNA sense strand
gcagaucccuuuaauggua

SEQ ID NO: 1944527 - RNA, 19 nt, Homo sapiens
  misc_RNA (1)...(19): siRNA sense strand
caaccgugcuucugagaua

SEQ ID NO: 1944528 - RNA, 19 nt, Homo sapiens
  misc_RNA (1)...(19): siRNA sense strand
gagaaugccuggacuguuc

SEQ ID NO: 1944529 - RNA, 19 nt, Homo sapiens
  misc_RNA (1)...(19): siRNA sense strand
caaugcaagucaccaguua

SEQ ID NO: 1944530 - RNA, 19 nt, Homo sapiens
  misc_RNA (1)...(19): siRNA sense strand
ccaacaaauucuuccuuua

SEQ ID NO: 1944531 - RNA, 19 nt, Homo sapiens
  misc_RNA (1)...(19): siRNA sense strand
acaagaaguugaagcuaua

SEQ ID NO: 1944532 - RNA, 19 nt, Homo sapiens
  misc_RNA (1)...(19): siRNA sense strand
gaaccaccuucgaaugaaa

SEQ ID NO: 1944533 - RNA, 19 nt, Homo sapiens
  misc_RNA (1)...(19): siRNA sense strand
ggacuugacuuugaacuca

SEQ ID NO: 1944534 - RNA, 19 nt, Homo sapiens
  misc_RNA (1)...(19): siRNA sense strand
uaacuauccugccaacaaa

SEQ ID NO: 1944535 - RNA, 19 nt, Homo sapiens
  misc_RNA (1)...(19): siRNA sense strand
gaacagaagagaaaguaug

SEQ ID NO: 1944536 - RNA, 19 nt, Homo sapiens
  misc_RNA (1)...(19): siRNA sense strand
gccaacagcuccaaacaug

SEQ ID NO: 1944537 - RNA, 19 nt, Homo sapiens
  misc_RNA (1)...(19): siRNA sense strand
gucacaagcuuauugaauu

SEQ ID NO: 1944538 - RNA, 19 nt, Homo sapiens
  misc_RNA (1)...(19): siRNA sense strand
gcaagucaccaguuaacua

SEQ ID NO: 1944539 - RNA, 19 nt, Homo sapiens
  misc_RNA (1)...(19): siRNA sense strand
gaaauuacuaaccguauga

SEQ ID NO: 1944540 - RNA, 19 nt, Homo sapiens
  misc_RNA (1)...(19): siRNA sense strand
gcagaaagaauuccuguuc

SEQ ID NO: 1944541 - RNA, 19 nt, Homo sapiens
  misc_RNA (1)...(19): siRNA sense strand
gccaacaaauucuuccuuu

SEQ ID NO: 1944542 - RNA, 19 nt, Homo sapiens
  misc_RNA (1)...(19): siRNA sense strand
guacaggaauuaccagauc

SEQ ID NO: 1944543 - RNA, 19 nt, Homo sapiens
  misc_RNA (1)...(19): siRNA sense strand
gauaaacaacgaucuucua

SEQ ID NO: 1944544 - RNA, 19 nt, Homo sapiens
  misc_RNA (1)...(19): siRNA sense strand
acaacgaucuucuaauuuc

SEQ ID NO: 1944545 - RNA, 19 nt, Homo sapiens
  misc_RNA (1)...(19): siRNA sense strand
gaagagaaaguaugugcuu

SEQ ID NO: 1944546 - RNA, 19 nt, Homo sapiens
  misc_RNA (1)...(19): siRNA sense strand
uaugcacucuaccaaauua

SEQ ID NO: 1944547 - RNA, 19 nt, Homo sapiens
  misc_RNA (1)...(19): siRNA sense strand
gaagaagacaagacaaugu

SEQ ID NO: 1944548 - RNA, 19 nt, Homo sapiens
  misc_RNA (1)...(19): siRNA sense strand
cuugguaguugucauaaua

SEQ ID NO: 1944549 - RNA, 19 nt, Homo sapiens
  misc_RNA (1)...(19): siRNA sense strand
ggagacaaccacuguuauu

SEQ ID NO: 1944550 - RNA, 19 nt, Homo sapiens
  misc_RNA (1)...(19): siRNA sense strand
ucacaagcuuauugaauug

SEQ ID NO: 1944551 - RNA, 19 nt, Homo sapiens
  misc_RNA (1)...(19): siRNA sense strand
ccaaaucuuuaccuucuga

SEQ ID NO: 1944552 - RNA, 19 nt, Homo sapiens
  misc_RNA (1)...(19): siRNA sense strand
ggauauggcuucguguuca

SEQ ID NO: 1944553 - RNA, 19 nt, Homo sapiens
  misc_RNA (1)...(19): siRNA sense strand
ggaaauagacuggauagag

SEQ ID NO: 1944554 - RNA, 19 nt, Homo sapiens
  misc_RNA (1)...(19): siRNA sense strand
caacagcuccaaacaugaa

SEQ ID NO: 1944555 - RNA, 19 nt, Homo sapiens
  misc_RNA (1)...(19): siRNA sense strand
aaacuaagcaccaggaaga

SEQ ID NO: 1944556 - RNA, 19 nt, Homo sapiens
  misc_RNA (1)...(19): siRNA sense strand
gguauucguuacuucauug

SEQ ID NO: 1944557 - RNA, 19 nt, Homo sapiens
  misc_RNA (1)...(19): siRNA sense strand
gcaauacggcucgcuauau

SEQ ID NO: 1944558 - RNA, 19 nt, Homo sapiens
  misc_RNA (1)...(19): siRNA sense strand
gaucuugguaguugucaua

SEQ ID NO: 1944559 - RNA, 19 nt, Homo sapiens
  misc_RNA (1)...(19): siRNA sense strand
uuaaagagaugaugcaacu

SEQ ID NO: 1944560 - RNA, 19 nt, Homo sapiens
  misc_RNA (1)...(19): siRNA sense strand
gaggcguguuagucaauua

SEQ ID NO: 1944561 - RNA, 19 nt, Homo sapiens
  misc_RNA (1)...(19): siRNA sense strand
gcacagaggagagugaaga

SEQ ID NO: 1944562 - RNA, 19 nt, Homo sapiens
  misc_RNA (1)...(19): siRNA sense strand
gaagaggaacagaagagaa

SEQ ID NO: 1944563 - RNA, 19 nt, Homo sapiens
  misc_RNA (1)...(19): siRNA sense strand
ggaauuaccagaucgucuu

SEQ ID NO: 1944564 - RNA, 19 nt, Homo sapiens
  misc_RNA (1)...(19): siRNA sense strand
acaggaagaugugaacaaa

SEQ ID NO: 1944565 - RNA, 19 nt, Homo sapiens
  misc_RNA (1)...(19): siRNA sense strand
caacaaauucuuccuuuac

SEQ ID NO: 1944566 - RNA, 19 nt, Homo sapiens
  misc_RNA (1)...(19): siRNA sense strand
caccaaaucuuuaccuucu

SEQ ID NO: 1944567 - RNA, 19 nt, Homo sapiens
  misc_RNA (1)...(19): siRNA sense strand
gcguguuagucaauuauuu

SEQ ID NO: 1944568 - RNA, 19 nt, Homo sapiens
  misc_RNA (1)...(19): siRNA sense strand
gaauuggcauggccugcuu

SEQ ID NO: 1944569 - RNA, 19 nt, Homo sapiens
  misc_RNA (1)...(19): siRNA sense strand
cagaaccaccuucgaauga

SEQ ID NO: 1944570 - RNA, 19 nt, Homo sapiens
  misc_RNA (1)...(19): siRNA sense strand
gagacaaccgugcuucuga

SEQ ID NO: 1944571 - RNA, 19 nt, Homo sapiens
  misc_RNA (1)...(19): siRNA sense strand
ggaagaagacaagacaaug

SEQ ID NO: 1944572 - RNA, 19 nt, Homo sapiens
  misc_RNA (1)...(19): siRNA sense strand
gaacuacaacccucuuugg

SEQ ID NO: 1944573 - RNA, 19 nt, Homo sapiens
  misc_RNA (1)...(19): siRNA sense strand
ggaggaaauagacuggaua

SEQ ID NO: 1944574 - RNA, 19 nt, Homo sapiens
  misc_RNA (1)...(19): siRNA sense strand
caucaggguucuguacauu

SEQ ID NO: 1944575 - RNA, 19 nt, Homo sapiens
  misc_RNA (1)...(19): siRNA sense strand
gggcagcaugcauuucuua

SEQ ID NO: 1944576 - RNA, 19 nt, Homo sapiens
  misc_RNA (1)...(19): siRNA sense strand
caagucaccaguuaacuau

SEQ ID NO: 1944577 - RNA, 19 nt, Homo sapiens
  misc_RNA (1)...(19): siRNA sense strand
caugaucggaggcguguua

SEQ ID NO: 1944578 - RNA, 19 nt, Homo sapiens
  misc_RNA (1)...(19): siRNA sense strand
gaaaggaacaacucuacag

SEQ ID NO: 1944579 - RNA, 19 nt, Homo sapiens
  misc_RNA (1)...(19): siRNA sense strand
ugaaauuacuaaccguaug

SEQ ID NO: 1944580 - RNA, 19 nt, Homo sapiens
  misc_RNA (1)...(19): siRNA sense strand
ccagacaggugaaauuacu

SEQ ID NO: 1944581 - RNA, 19 nt, Homo sapiens
  misc_RNA (1)...(19): siRNA sense strand
caaccugggcauuggauuu

SEQ ID NO: 1944582 - RNA, 19 nt, Homo sapiens
  misc_RNA (1)...(19): siRNA sense strand
ggaagaacaggaagaugug

SEQ ID NO: 1944583 - RNA, 19 nt, Homo sapiens
  misc_RNA (1)...(19): siRNA sense strand
aacaagaaguugaagcuau

SEQ ID NO: 1944584 - RNA, 19 nt, Homo sapiens
  misc_RNA (1)...(19): siRNA sense strand
gaaacagggcucaaugucu

SEQ ID NO: 1944585 - RNA, 19 nt, Homo sapiens
  misc_RNA (1)...(19): siRNA sense strand
ccaaagauucgcccaacaa

SEQ ID NO: 1944586 - RNA, 19 nt, Homo sapiens
  misc_RNA (1)...(19): siRNA sense strand
cuucugagauacagccuuu

SEQ ID NO: 1944587 - RNA, 19 nt, Homo sapiens
  misc_RNA (1)...(19): siRNA sense strand
ugaugcaacucacaagaga

SEQ ID NO: 1944588 - RNA, 19 nt, Homo sapiens
  misc_RNA (1)...(19): siRNA sense strand
cgacuacacccacaucgaa

SEQ ID NO: 1944589 - RNA, 19 nt, Homo sapiens
  misc_RNA (1)...(19): siRNA sense strand
gagacaaccacuguuauug

SEQ ID NO: 1944590 - RNA, 19 nt, Homo sapiens
  misc_RNA (1)...(19): siRNA sense strand
cuccaaacaugaacaguga

SEQ ID NO: 1944591 - RNA, 19 nt, Homo sapiens
  misc_RNA (1)...(19): siRNA sense strand
ucucagacaccguuacuuu

SEQ ID NO: 1944592 - RNA, 19 nt, Homo sapiens
  misc_RNA (1)...(19): siRNA sense strand
ggauagagaaacauugugu

SEQ ID NO: 1944593 - RNA, 19 nt, Homo sapiens
  misc_RNA (1)...(19): siRNA sense strand
ggaggcguguuagucaauu

SEQ ID NO: 1944594 - RNA, 19 nt, Homo sapiens
  misc_RNA (1)...(19): siRNA sense strand
uaaaguugcuaucuuaacg

SEQ ID NO: 1944595 - RNA, 19 nt, Homo sapiens
  misc_RNA (1)...(19): siRNA sense strand
auacggcucgcuauauuua

SEQ ID NO: 1944596 - RNA, 19 nt, Homo sapiens
  misc_RNA (1)...(19): siRNA sense strand
ggaaacagggcucaauguc

SEQ ID NO: 1944597 - RNA, 19 nt, Homo sapiens
  misc_RNA (1)...(19): siRNA sense strand
ucuaugcacucuaccaaau

SEQ ID NO: 1944598 - RNA, 19 nt, Homo sapiens
  misc_RNA (1)...(19): siRNA sense strand
acaaacagcugggaauguc

SEQ ID NO: 1944599 - RNA, 19 nt, Homo sapiens
  misc_RNA (1)...(19): siRNA sense strand
ggaacuacaacccucuuug

SEQ ID NO: 1944600 - RNA, 19 nt, Homo sapiens
  misc_RNA (1)...(19): siRNA sense strand
gaccauggccuugaucguu

SEQ ID NO: 1944601 - RNA, 19 nt, Homo sapiens
  misc_RNA (1)...(19): siRNA sense strand
aguugaagcuauauucuug

SEQ ID NO: 1944602 - RNA, 19 nt, Homo sapiens
  misc_RNA (1)...(19): siRNA sense strand
caaccacuguuauuguuac

SEQ ID NO: 1944603 - RNA, 19 nt, Homo sapiens
  misc_RNA (1)...(19): siRNA sense strand
gagaaaguaugugcuugca

SEQ ID NO: 1944604 - RNA, 19 nt, Homo sapiens
  misc_RNA (1)...(19): siRNA sense strand
caaaccugcuaccuugaga

SEQ ID NO: 1944605 - RNA, 19 nt, Homo sapiens
  misc_RNA (1)...(19): siRNA sense strand
uaucuuaacggaugaugaa

SEQ ID NO: 1944606 - RNA, 19 nt, Homo sapiens
  misc_RNA (1)...(19): siRNA sense strand
gcuugcagaucccuuuaau

SEQ ID NO: 1944607 - RNA, 19 nt, Homo sapiens
  misc_RNA (1)...(19): siRNA sense strand
aaggagacaaccacuguua

SEQ ID NO: 1944608 - RNA, 19 nt, Homo sapiens
  misc_RNA (1)...(19): siRNA sense strand
ugagauguguaccaaagau

SEQ ID NO: 1944609 - RNA, 19 nt, Homo sapiens
  misc_RNA (1)...(19): siRNA sense strand
gaagaccucaauggaacua

SEQ ID NO: 1944610 - RNA, 19 nt, Homo sapiens
  misc_RNA (1)...(19): siRNA sense strand
gaagugcucaucgauggaa

SEQ ID NO: 1944611 - RNA, 19 nt, Homo sapiens
  misc_RNA (1)...(19): siRNA sense strand
ccaaggagacaaccacugu

SEQ ID NO: 1944612 - RNA, 19 nt, Homo sapiens
  misc_RNA (1)...(19): siRNA sense strand
gcaccaggaagaacaggaa

SEQ ID NO: 1944613 - RNA, 19 nt, Homo sapiens
  misc_RNA (1)...(19): siRNA sense strand
gaaguugaagcuauauucu

SEQ ID NO: 1944614 - RNA, 19 nt, Homo sapiens
  misc_RNA (1)...(19): siRNA sense strand
acaccuuccuccacagaaa

SEQ ID NO: 1944615 - RNA, 19 nt, Homo sapiens
  misc_RNA (1)...(19): siRNA sense strand
gagaugaugcaacucacaa

SEQ ID NO: 1944616 - RNA, 19 nt, Homo sapiens
  misc_RNA (1)...(19): siRNA sense strand
gaagaacaggaagauguga

SEQ ID NO: 1944617 - RNA, 19 nt, Homo sapiens
  misc_RNA (1)...(19): siRNA sense strand
aagaggaacagaagagaaa

SEQ ID NO: 1944618 - RNA, 19 nt, Homo sapiens
  misc_RNA (1)...(19): siRNA sense strand
augauggacuugacuuuga

SEQ ID NO: 1944619 - RNA, 19 nt, Homo sapiens
  misc_RNA (1)...(19): siRNA sense strand
aaagagaugaugcaacuca

SEQ ID NO: 1944620 - RNA, 19 nt, Homo sapiens
  misc_RNA (1)...(19): siRNA sense strand
guucauggguuuuggauau

SEQ ID NO: 1944621 - RNA, 19 nt, Homo sapiens
  misc_RNA (1)...(19): siRNA sense strand
uggcuugguucauggguuu

SEQ ID NO: 1944622 - RNA, 19 nt, Homo sapiens
  misc_RNA (1)...(19): siRNA sense strand
ggaaaggaacaacucuaca

SEQ ID NO: 1944623 - RNA, 19 nt, Homo sapiens
  misc_RNA (1)...(19): siRNA sense strand
ugauggacuugacuuugaa

SEQ ID NO: 1944624 - RNA, 19 nt, Homo sapiens
  misc_RNA (1)...(19): siRNA sense strand
gaugaugcaacucacaaga

SEQ ID NO: 1944625 - RNA, 19 nt, Homo sapiens
  misc_RNA (1)...(19): siRNA sense strand
ugaaaggucugguggauaa

SEQ ID NO: 1944626 - RNA, 19 nt, Homo sapiens
  misc_RNA (1)...(19): siRNA sense strand
gagaacaccuuggucauga

SEQ ID NO: 1944627 - RNA, 19 nt, Homo sapiens
  misc_RNA (1)...(19): siRNA sense strand
ucaagcagcuguugcaaug

SEQ ID NO: 1944628 - RNA, 19 nt, Homo sapiens
  misc_RNA (1)...(19): siRNA sense strand
gaucucugcuggccaguuu

SEQ ID NO: 1944629 - RNA, 19 nt, Homo sapiens
  misc_RNA (1)...(19): siRNA sense strand
gcagagaccacgacuguau

SEQ ID NO: 1944630 - RNA, 19 nt, Homo sapiens
  misc_RNA (1)...(19): siRNA sense strand
gcaguggucugggauaagu

SEQ ID NO: 1944631 - RNA, 19 nt, Homo sapiens
  misc_RNA (1)...(19): siRNA sense strand
gaacaccuuggucaugaaa

SEQ ID NO: 1944632 - RNA, 19 nt, Homo sapiens
  misc_RNA (1)...(19): siRNA sense strand
guggucagguugaacauga

SEQ ID NO: 1944633 - RNA, 19 nt, Homo sapiens
  misc_RNA (1)...(19): siRNA sense strand
guagagacagcuguagaua

SEQ ID NO: 1944634 - RNA, 19 nt, Homo sapiens
  misc_RNA (1)...(19): siRNA sense strand
gauaacaauagcaaaguga

SEQ ID NO: 1944635 - RNA, 19 nt, Homo sapiens
  misc_RNA (1)...(19): siRNA sense strand
agagacagcuguagauaac

SEQ ID NO: 1944636 - RNA, 19 nt, Homo sapiens
  misc_RNA (1)...(19): siRNA sense strand
gaagccugcagucacuuua

SEQ ID NO: 1944637 - RNA, 19 nt, Homo sapiens
  misc_RNA (1)...(19): siRNA sense strand
agacagcuguagauaacaa

SEQ ID NO: 1944638 - RNA, 19 nt, Homo sapiens
  misc_RNA (1)...(19): siRNA sense strand
gaagucaagggaacagaug

SEQ ID NO: 1944639 - RNA, 19 nt, Homo sapiens
  misc_RNA (1)...(19): siRNA sense strand
aagcagcuguugcaauguu

SEQ ID NO: 1944640 - RNA, 19 nt, Homo sapiens
  misc_RNA (1)...(19): siRNA sense strand
gaaggagccaguagagaca

SEQ ID NO: 1944641 - RNA, 19 nt, Homo sapiens
  misc_RNA (1)...(19): siRNA sense strand
guagauaacaauagcaaag

SEQ ID NO: 1944642 - RNA, 19 nt, Homo sapiens
  misc_RNA (1)...(19): siRNA sense strand
gaggaaggccuguaagaac

SEQ ID NO: 1944643 - RNA, 19 nt, Homo sapiens
  misc_RNA (1)...(19): siRNA sense strand
uagcagagaccacgacugu

SEQ ID NO: 1944644 - RNA, 19 nt, Homo sapiens
  misc_RNA (1)...(19): siRNA sense strand
cuguaucacucauugcuuu

SEQ ID NO: 1944645 - RNA, 19 nt, Homo sapiens
  misc_RNA (1)...(19): siRNA sense strand
uagagacagcuguagauaa

SEQ ID NO: 1944646 - RNA, 19 nt, Homo sapiens
  misc_RNA (1)...(19): siRNA sense strand
aaaaggugcuucugaguga

SEQ ID NO: 1944647 - RNA, 19 nt, Homo sapiens
  misc_RNA (1)...(19): siRNA sense strand
gagcauguggucagguuga

SEQ ID NO: 1944648 - RNA, 19 nt, Homo sapiens
  misc_RNA (1)...(19): siRNA sense strand
gauagcaaucuucaugaug

SEQ ID NO: 1944649 - RNA, 19 nt, Homo sapiens
  misc_RNA (1)...(19): siRNA sense strand
ugaacacucuccaggaucu

SEQ ID NO: 1944650 - RNA, 19 nt, Homo sapiens
  misc_RNA (1)...(19): siRNA sense strand
gcagcuguugcaauguuua

SEQ ID NO: 1944651 - RNA, 19 nt, Homo sapiens
  misc_RNA (1)...(19): siRNA sense strand
ugauagcaaucuucaugau

SEQ ID NO: 1944652 - RNA, 19 nt, Homo sapiens
  misc_RNA (1)...(19): siRNA sense strand
ccuguggccuugcugaaga

SEQ ID NO: 1944653 - RNA, 19 nt, Homo sapiens
  misc_RNA (1)...(19): siRNA sense strand
uaucacucauugcuuugaa

SEQ ID NO: 1944654 - RNA, 19 nt, Homo sapiens
  misc_RNA (1)...(19): siRNA sense strand
uggcaguggucugggauaa

SEQ ID NO: 1944655 - RNA, 19 nt, Homo sapiens
  misc_RNA (1)...(19): siRNA sense strand
agauaacaauagcaaagug

SEQ ID NO: 1944656 - RNA, 19 nt, Homo sapiens
  misc_RNA (1)...(19): siRNA sense strand
gacagcaugugcaucuucu

SEQ ID NO: 1944657 - RNA, 19 nt, Homo sapiens
  misc_RNA (1)...(19): siRNA sense strand
cgagaacaccuuggucaug

SEQ ID NO: 1944658 - RNA, 19 nt, Homo sapiens
  misc_RNA (1)...(19): siRNA sense strand
acaccuuggucaugaaagu

SEQ ID NO: 1944659 - RNA, 19 nt, Homo sapiens
  misc_RNA (1)...(19): siRNA sense strand
guuggccucuugagcaugu

SEQ ID NO: 1944660 - RNA, 19 nt, Homo sapiens
  misc_RNA (1)...(19): siRNA sense strand
gacgacagcaugugcaucu

SEQ ID NO: 1944661 - RNA, 19 nt, Homo sapiens
  misc_RNA (1)...(19): siRNA sense strand
gugauagcaaucuucauga

SEQ ID NO: 1944662 - RNA, 19 nt, Homo sapiens
  misc_RNA (1)...(19): siRNA sense strand
agaggaaggccuguaagaa

SEQ ID NO: 1944663 - RNA, 19 nt, Homo sapiens
  misc_RNA (1)...(19): siRNA sense strand
agaacaccuuggucaugaa

SEQ ID NO: 1944664 - RNA, 19 nt, Homo sapiens
  misc_RNA (1)...(19): siRNA sense strand
cgaagccugcagucacuuu

SEQ ID NO: 1944665 - RNA, 19 nt, Homo sapiens
  misc_RNA (1)...(19): siRNA sense strand
ucugaaaggucugguggau

SEQ ID NO: 1944666 - RNA, 19 nt, Homo sapiens
  misc_RNA (1)...(19): siRNA sense strand
gccaguagagacagcugua

SEQ ID NO: 1944667 - RNA, 19 nt, Homo sapiens
  misc_RNA (1)...(19): siRNA sense strand
aagugaagacagcaucuaa

SEQ ID NO: 1944668 - RNA, 19 nt, Homo sapiens
  misc_RNA (1)...(19): siRNA sense strand
ggaaggccuguaagaacug

SEQ ID NO: 1944669 - RNA, 19 nt, Homo sapiens
  misc_RNA (1)...(19): siRNA sense strand
aggaaggccuguaagaacu

SEQ ID NO: 1944670 - RNA, 19 nt, Homo sapiens
  misc_RNA (1)...(19): siRNA sense strand
acgacuguaucacucauug

SEQ ID NO: 1944671 - RNA, 19 nt, Homo sapiens
  misc_RNA (1)...(19): siRNA sense strand
cgacagcaugugcaucuuc

SEQ ID NO: 1944672 - RNA, 19 nt, Homo sapiens
  misc_RNA (1)...(19): siRNA sense strand
ccucucagccaacgauaug

SEQ ID NO: 1944673 - RNA, 19 nt, Homo sapiens
  misc_RNA (1)...(19): siRNA sense strand
guucuucuaggcagcuuaa

SEQ ID NO: 1944674 - RNA, 19 nt, Homo sapiens
  misc_RNA (1)...(19): siRNA sense strand
uuucuggucuuguggaagu

SEQ ID NO: 1944675 - RNA, 19 nt, Homo sapiens
  misc_RNA (1)...(19): siRNA sense strand
uuugaacacucuccaggau

SEQ ID NO: 1944676 - RNA, 19 nt, Homo sapiens
  misc_RNA (1)...(19): siRNA sense strand
acucaccguuggccucuug

SEQ ID NO: 1944677 - RNA, 19 nt, Homo sapiens
  misc_RNA (1)...(19): siRNA sense strand
uaacaauagcaaagugaag

SEQ ID NO: 1944678 - RNA, 19 nt, Homo sapiens
  misc_RNA (1)...(19): siRNA sense strand
agugauagcaaucuucaug

SEQ ID NO: 1944679 - RNA, 19 nt, Homo sapiens
  misc_RNA (1)...(19): siRNA sense strand
aagaggaaggccuguaaga

SEQ ID NO: 1944680 - RNA, 19 nt, Homo sapiens
  misc_RNA (1)...(19): siRNA sense strand
cacuuuagcuuuucauuag

SEQ ID NO: 1944681 - RNA, 19 nt, Homo sapiens
  misc_RNA (1)...(19): siRNA sense strand
uucuguggauguaguuuaa

SEQ ID NO: 1944682 - RNA, 19 nt, Homo sapiens
  misc_RNA (1)...(19): siRNA sense strand
cagcaugugcaucuucugu

SEQ ID NO: 1944683 - RNA, 19 nt, Homo sapiens
  misc_RNA (1)...(19): siRNA sense strand
ugagugauagcaaucuuca

SEQ ID NO: 1944684 - RNA, 19 nt, Homo sapiens
  misc_RNA (1)...(19): siRNA sense strand
uccagaagauuugaagaag

SEQ ID NO: 1944685 - RNA, 19 nt, Homo sapiens
  misc_RNA (1)...(19): siRNA sense strand
ccacgacuguaucacucau

SEQ ID NO: 1944686 - RNA, 19 nt, Homo sapiens
  misc_RNA (1)...(19): siRNA sense strand
aaagugacaaccugcuguu

SEQ ID NO: 1944687 - RNA, 19 nt, Homo sapiens
  misc_RNA (1)...(19): siRNA sense strand
ccugcgggcugcuucuugu

SEQ ID NO: 1944688 - RNA, 19 nt, Homo sapiens
  misc_RNA (1)...(19): siRNA sense strand
gauccagaagauuugaaga

SEQ ID NO: 1944689 - RNA, 19 nt, Homo sapiens
  misc_RNA (1)...(19): siRNA sense strand
caguagagacagcuguaga

SEQ ID NO: 1944690 - RNA, 19 nt, Homo sapiens
  misc_RNA (1)...(19): siRNA sense strand
uugagcauguggucagguu

SEQ ID NO: 1944691 - RNA, 19 nt, Homo sapiens
  misc_RNA (1)...(19): siRNA sense strand
gcugagauuuuggcugaaa

SEQ ID NO: 1944692 - RNA, 19 nt, Homo sapiens
  misc_RNA (1)...(19): siRNA sense strand
aaagugaagacagcaucua

SEQ ID NO: 1944693 - RNA, 19 nt, Homo sapiens
  misc_RNA (1)...(19): siRNA sense strand
gcuaucagcuucccaguuu

SEQ ID NO: 1944694 - RNA, 19 nt, Homo sapiens
  misc_RNA (1)...(19): siRNA sense strand
ggacagaugaugccaguua

SEQ ID NO: 1944695 - RNA, 19 nt, Homo sapiens
  misc_RNA (1)...(19): siRNA sense strand
aaaccaccaucuuguauaa

SEQ ID NO: 1944696 - RNA, 19 nt, Homo sapiens
  misc_RNA (1)...(19): siRNA sense strand
ggagacaguagaauauaaa

SEQ ID NO: 1944697 - RNA, 19 nt, Homo sapiens
  misc_RNA (1)...(19): siRNA sense strand
gacagaugaugccaguuaa

SEQ ID NO: 1944698 - RNA, 19 nt, Homo sapiens
  misc_RNA (1)...(19): siRNA sense strand
ggaccucuguggcagcauu

SEQ ID NO: 1944699 - RNA, 19 nt, Homo sapiens
  misc_RNA (1)...(19): siRNA sense strand
gaugccaguuaauuacuuu

SEQ ID NO: 1944700 - RNA, 19 nt, Homo sapiens
  misc_RNA (1)...(19): siRNA sense strand
cuggaaagcuuaacuucuu

SEQ ID NO: 1944701 - RNA, 19 nt, Homo sapiens
  misc_RNA (1)...(19): siRNA sense strand
gcacaauucaucaagaaau

SEQ ID NO: 1944702 - RNA, 19 nt, Homo sapiens
  misc_RNA (1)...(19): siRNA sense strand
uggaaagcuuaacuucuua

SEQ ID NO: 1944703 - RNA, 19 nt, Homo sapiens
  misc_RNA (1)...(19): siRNA sense strand
gaugcggauucuuauauug

SEQ ID NO: 1944704 - RNA, 19 nt, Homo sapiens
  misc_RNA (1)...(19): siRNA sense strand
uggagacaguagaauauaa

SEQ ID NO: 1944705 - RNA, 19 nt, Homo sapiens
  misc_RNA (1)...(19): siRNA sense strand
ccaccaucuuguauaaauu

SEQ ID NO: 1944706 - RNA, 19 nt, Homo sapiens
  misc_RNA (1)...(19): siRNA sense strand
agaugaugccaguuaauua

SEQ ID NO: 1944707 - RNA, 19 nt, Homo sapiens
  misc_RNA (1)...(19): siRNA sense strand
aagcuuaacuucuuaucca

SEQ ID NO: 1944708 - RNA, 19 nt, Homo sapiens
  misc_RNA (1)...(19): siRNA sense strand
cagaugaugccaguuaauu

SEQ ID NO: 1944709 - RNA, 19 nt, Homo sapiens
  misc_RNA (1)...(19): siRNA sense strand
gccaguuaauuacuuugaa

SEQ ID NO: 1944710 - RNA, 19 nt, Homo sapiens
  misc_RNA (1)...(19): siRNA sense strand
ugaggcaucuccuggaaag

SEQ ID NO: 1944711 - RNA, 19 nt, Homo sapiens
  misc_RNA (1)...(19): siRNA sense strand
gaugaugccaguuaauuac

SEQ ID NO: 1944712 - RNA, 19 nt, Homo sapiens
  misc_RNA (1)...(19): siRNA sense strand
agaugcggauucuuauauu

SEQ ID NO: 1944713 - RNA, 19 nt, Homo sapiens
  misc_RNA (1)...(19): siRNA sense strand
ggaaagcuuaacuucuuau

SEQ ID NO: 1944714 - RNA, 19 nt, Homo sapiens
  misc_RNA (1)...(19): siRNA sense strand
uugcacaauucaucaagaa

SEQ ID NO: 1944715 - RNA, 19 nt, Homo sapiens
  misc_RNA (1)...(19): siRNA sense strand
guguggagacaguagaaua

SEQ ID NO: 1944716 - RNA, 19 nt, Homo sapiens
  misc_RNA (1)...(19): siRNA sense strand
guggagacaguagaauaua

SEQ ID NO: 1944717 - RNA, 19 nt, Homo sapiens
  misc_RNA (1)...(19): siRNA sense strand
gaaagcuuaacuucuuauc

SEQ ID NO: 1944718 - RNA, 19 nt, Homo sapiens
  misc_RNA (1)...(19): siRNA sense strand
caccaucuuguauaaauug

SEQ ID NO: 1944719 - RNA, 19 nt, Homo sapiens
  misc_RNA (1)...(19): siRNA sense strand
aauaacaccuucgcugucu

SEQ ID NO: 1944720 - RNA, 19 nt, Homo sapiens
  misc_RNA (1)...(19): siRNA sense strand
ugaugccaguuaauuacuu

SEQ ID NO: 1944721 - RNA, 19 nt, Homo sapiens
  misc_RNA (1)...(19): siRNA sense strand
accaccaucuuguauaaau

SEQ ID NO: 1944722 - RNA, 19 nt, Homo sapiens
  misc_RNA (1)...(19): siRNA sense strand
gaacacaaaagagcuauca

SEQ ID NO: 1944723 - RNA, 19 nt, Homo sapiens
  misc_RNA (1)...(19): siRNA sense strand
cuucccaguuugcacaauu

SEQ ID NO: 1944724 - RNA, 19 nt, Homo sapiens
  misc_RNA (1)...(19): siRNA sense strand
gcaucuccuggaaagcuua

SEQ ID NO: 1944725 - RNA, 19 nt, Homo sapiens
  misc_RNA (1)...(19): siRNA sense strand
ccaguuugcacaauucauc

SEQ ID NO: 1944726 - RNA, 19 nt, Homo sapiens
  misc_RNA (1)...(19): siRNA sense strand
ggcaucuccuggaaagcuu

SEQ ID NO: 1944727 - RNA, 19 nt, Homo sapiens
  misc_RNA (1)...(19): siRNA sense strand
uguggagacaguagaauau

SEQ ID NO: 1944728 - RNA, 19 nt, Homo sapiens
  misc_RNA (1)...(19): siRNA sense strand
gcucuaauauugacucuuu

SEQ ID NO: 1944729 - RNA, 19 nt, Homo sapiens
  misc_RNA (1)...(19): siRNA sense strand
gaacaacuacuacauguau

SEQ ID NO: 1944730 - RNA, 19 nt, Homo sapiens
  misc_RNA (1)...(19): siRNA sense strand
ggagaucccugaugacuuc

SEQ ID NO: 1944731 - RNA, 19 nt, Homo sapiens
  misc_RNA (1)...(19): siRNA sense strand
gaagacacccuccagauga

SEQ ID NO: 1944732 - RNA, 19 nt, Homo sapiens
  misc_RNA (1)...(19): siRNA sense strand
ggacucagcaggauacaau

SEQ ID NO: 1944733 - RNA, 19 nt, Homo sapiens
  misc_RNA (1)...(19): siRNA sense strand
gaacaggaggcaagcaaga

SEQ ID NO: 1944734 - RNA, 19 nt, Homo sapiens
  misc_RNA (1)...(19): siRNA sense strand
ugagccaagugaacucuua

SEQ ID NO: 1944735 - RNA, 19 nt, Homo sapiens
  misc_RNA (1)...(19): siRNA sense strand
gacuggugcucuaauauug

SEQ ID NO: 1944736 - RNA, 19 nt, Homo sapiens
  misc_RNA (1)...(19): siRNA sense strand
caccaaccaugacuuuaaa

SEQ ID NO: 1944737 - RNA, 19 nt, Homo sapiens
  misc_RNA (1)...(19): siRNA sense strand
acucagagaucaacuuuca

SEQ ID NO: 1944738 - RNA, 19 nt, Homo sapiens
  misc_RNA (1)...(19): siRNA sense strand
uaacaccaaccaugacuuu

SEQ ID NO: 1944739 - RNA, 19 nt, Homo sapiens
  misc_RNA (1)...(19): siRNA sense strand
ccgcagaugucacuucaga

SEQ ID NO: 1944740 - RNA, 19 nt, Homo sapiens
  misc_RNA (1)...(19): siRNA sense strand
gcacaaccuuucucucaac

SEQ ID NO: 1944741 - RNA, 19 nt, Homo sapiens
  misc_RNA (1)...(19): siRNA sense strand
aaacaggagucagccauga

SEQ ID NO: 1944742 - RNA, 19 nt, Homo sapiens
  misc_RNA (1)...(19): siRNA sense strand
ggcauugguuggaagaauu

SEQ ID NO: 1944743 - RNA, 19 nt, Homo sapiens
  misc_RNA (1)...(19): siRNA sense strand
gugauaacuuccccuauua

SEQ ID NO: 1944744 - RNA, 19 nt, Homo sapiens
  misc_RNA (1)...(19): siRNA sense strand
gagaagacacccuccagau

SEQ ID NO: 1944745 - RNA, 19 nt, Homo sapiens
  misc_RNA (1)...(19): siRNA sense strand
caacacuggcuuugccuuu

SEQ ID NO: 1944746 - RNA, 19 nt, Homo sapiens
  misc_RNA (1)...(19): siRNA sense strand
caaccaugacuuuaaauuc

SEQ ID NO: 1944747 - RNA, 19 nt, Homo sapiens
  misc_RNA (1)...(19): siRNA sense strand
caaccuuucucucaacaag

SEQ ID NO: 1944748 - RNA, 19 nt, Homo sapiens
  misc_RNA (1)...(19): siRNA sense strand
acaccaaccaugacuuuaa

SEQ ID NO: 1944749 - RNA, 19 nt, Homo sapiens
  misc_RNA (1)...(19): siRNA sense strand
acugggacuugaucacuua

SEQ ID NO: 1944750 - RNA, 19 nt, Homo sapiens
  misc_RNA (1)...(19): siRNA sense strand
uaaaggaaagcuucaagau

SEQ ID NO: 1944751 - RNA, 19 nt, Homo sapiens
  misc_RNA (1)...(19): siRNA sense strand
ucugacuggugcucuaaua

SEQ ID NO: 1944752 - RNA, 19 nt, Homo sapiens
  misc_RNA (1)...(19): siRNA sense strand
ucgaacaacuacuacaugu

SEQ ID NO: 1944753 - RNA, 19 nt, Homo sapiens
  misc_RNA (1)...(19): siRNA sense strand
gaugaucugucccaagacu

SEQ ID NO: 1944754 - RNA, 19 nt, Homo sapiens
  misc_RNA (1)...(19): siRNA sense strand
gaacugauggagagucuac

SEQ ID NO: 1944755 - RNA, 19 nt, Homo sapiens
  misc_RNA (1)...(19): siRNA sense strand
ggcacaaccuuucucucaa

SEQ ID NO: 1944756 - RNA, 19 nt, Homo sapiens
  misc_RNA (1)...(19): siRNA sense strand
augaggagaucccugauga

SEQ ID NO: 1944757 - RNA, 19 nt, Homo sapiens
  misc_RNA (1)...(19): siRNA sense strand
ugacuggugcucuaauauu

SEQ ID NO: 1944758 - RNA, 19 nt, Homo sapiens
  misc_RNA (1)...(19): siRNA sense strand
aaaggaaagcuucaagaug

SEQ ID NO: 1944759 - RNA, 19 nt, Homo sapiens
  misc_RNA (1)...(19): siRNA sense strand
ucaauacggcacaaccuuu

SEQ ID NO: 1944760 - RNA, 19 nt, Homo sapiens
  misc_RNA (1)...(19): siRNA sense strand
ccucuacccuggcccauca

SEQ ID NO: 1944761 - RNA, 19 nt, Homo sapiens
  misc_RNA (1)...(19): siRNA sense strand
ccaaccaugacuuuaaauu

SEQ ID NO: 1944762 - RNA, 19 nt, Homo sapiens
  misc_RNA (1)...(19): siRNA sense strand
augaugaucugucccaaga

SEQ ID NO: 1944763 - RNA, 19 nt, Homo sapiens
  misc_RNA (1)...(19): siRNA sense strand
gggagcagccgcaaguguu

SEQ ID NO: 1944764 - RNA, 19 nt, Homo sapiens
  misc_RNA (1)...(19): siRNA sense strand
caucaccaauguacccaau

SEQ ID NO: 1944765 - RNA, 19 nt, Homo sapiens
  misc_RNA (1)...(19): siRNA sense strand
gacugggacuugaucacuu

SEQ ID NO: 1944766 - RNA, 19 nt, Homo sapiens
  misc_RNA (1)...(19): siRNA sense strand
gcaagccacgauacagcua

SEQ ID NO: 1944767 - RNA, 19 nt, Homo sapiens
  misc_RNA (1)...(19): siRNA sense strand
cuacucagagaucaacuuu

SEQ ID NO: 1944768 - RNA, 19 nt, Homo sapiens
  misc_RNA (1)...(19): siRNA sense strand
ucuauaacaccaaccauga

SEQ ID NO: 1944769 - RNA, 19 nt, Homo sapiens
  misc_RNA (1)...(19): siRNA sense strand
cgaacaacuacuacaugua

SEQ ID NO: 1944770 - RNA, 19 nt, Homo sapiens
  misc_RNA (1)...(19): siRNA sense strand
cuucugaccuagagaguag

SEQ ID NO: 1944771 - RNA, 19 nt, Homo sapiens
  misc_RNA (1)...(19): siRNA sense strand
gauggugaaucggcucaau

SEQ ID NO: 1944772 - RNA, 19 nt, Homo sapiens
  misc_RNA (1)...(19): siRNA sense strand
caucaacaacacuggcuuu

SEQ ID NO: 1944773 - RNA, 19 nt, Homo sapiens
  misc_RNA (1)...(19): siRNA sense strand
cggcacaaccuuucucuca

SEQ ID NO: 1944774 - RNA, 19 nt, Homo sapiens
  misc_RNA (1)...(19): siRNA sense strand
gcuuugccuuuccuucuga

SEQ ID NO: 1944775 - RNA, 19 nt, Homo sapiens
  misc_RNA (1)...(19): siRNA sense strand
gugacucccucaaccacuu

SEQ ID NO: 1944776 - RNA, 19 nt, Homo sapiens
  misc_RNA (1)...(19): siRNA sense strand
agaagacacccuccagaug

SEQ ID NO: 1944777 - RNA, 19 nt, Homo sapiens
  misc_RNA (1)...(19): siRNA sense strand
ucaaccacuuccuuacuca

SEQ ID NO: 1944778 - RNA, 19 nt, Homo sapiens
  misc_RNA (1)...(19): siRNA sense strand
ugacaccugcccugacauu

SEQ ID NO: 1944779 - RNA, 19 nt, Homo sapiens
  misc_RNA (1)...(19): siRNA sense strand
ggaauccgcagaugucacu

SEQ ID NO: 1944780 - RNA, 19 nt, Homo sapiens
  misc_RNA (1)...(19): siRNA sense strand
cuggaucugugauaacuuc

SEQ ID NO: 1944781 - RNA, 19 nt, Homo sapiens
  misc_RNA (1)...(19): siRNA sense strand
caauacggcacaaccuuuc

SEQ ID NO: 1944782 - RNA, 19 nt, Homo sapiens
  misc_RNA (1)...(19): siRNA sense strand
ugacuucgacugggacuug

SEQ ID NO: 1944783 - RNA, 19 nt, Homo sapiens
  misc_RNA (1)...(19): siRNA sense strand
cagaacugauggagagucu

SEQ ID NO: 1944784 - RNA, 19 nt, Homo sapiens
  misc_RNA (1)...(19): siRNA sense strand
gccaggcucccaucaacaa

SEQ ID NO: 1944785 - RNA, 19 nt, Homo sapiens
  misc_RNA (1)...(19): siRNA sense strand
ggagcagccgcaaguguuc

SEQ ID NO: 1944786 - RNA, 19 nt, Homo sapiens
  misc_RNA (1)...(19): siRNA sense strand
uuaaaggaaagcuucaaga

SEQ ID NO: 1944787 - RNA, 19 nt, Homo sapiens
  misc_RNA (1)...(19): siRNA sense strand
ugugauaacuuccccuauu

SEQ ID NO: 1944788 - RNA, 19 nt, Homo sapiens
  misc_RNA (1)...(19): siRNA sense strand
gaggagaucccugaugacu

SEQ ID NO: 1944789 - RNA, 19 nt, Homo sapiens
  misc_RNA (1)...(19): siRNA sense strand
gacaggcagagcagaagaa

SEQ ID NO: 1944790 - RNA, 19 nt, Homo sapiens
  misc_RNA (1)...(19): siRNA sense strand
ggucacccacagauccuaa

SEQ ID NO: 1944791 - RNA, 19 nt, Homo sapiens
  misc_RNA (1)...(19): siRNA sense strand
caucaccuaugccaucaac

SEQ ID NO: 1944792 - RNA, 19 nt, Homo sapiens
  misc_RNA (1)...(19): siRNA sense strand
gcauugguuggaagaauuc

SEQ ID NO: 1944793 - RNA, 19 nt, Homo sapiens
  misc_RNA (1)...(19): siRNA sense strand
gacuuuaaauucuccuacu

SEQ ID NO: 1944794 - RNA, 19 nt, Homo sapiens
  misc_RNA (1)...(19): siRNA sense strand
cagaacaggaggcaagcaa

SEQ ID NO: 1944795 - RNA, 19 nt, Homo sapiens
  misc_RNA (1)...(19): siRNA sense strand
agaguagccucaccuccau

SEQ ID NO: 1944796 - RNA, 19 nt, Homo sapiens
  misc_RNA (1)...(19): siRNA sense strand
ccuccgagcuaccauugag

SEQ ID NO: 1944797 - RNA, 19 nt, Homo sapiens
  misc_RNA (1)...(19): siRNA sense strand
ggacggcaagccacgauac

SEQ ID NO: 1944798 - RNA, 19 nt, Homo sapiens
  misc_RNA (1)...(19): siRNA sense strand
aggcagagcagaagaacug

SEQ ID NO: 1944799 - RNA, 19 nt, Homo sapiens
  misc_RNA (1)...(19): siRNA sense strand
aagacacccuccagaugau

SEQ ID NO: 1944800 - RNA, 19 nt, Homo sapiens
  misc_RNA (1)...(19): siRNA sense strand
gagccaagugaacucuuau

SEQ ID NO: 1944801 - RNA, 19 nt, Homo sapiens
  misc_RNA (1)...(19): siRNA sense strand
gugaaucggcucaauuggu

SEQ ID NO: 1944802 - RNA, 19 nt, Homo sapiens
  misc_RNA (1)...(19): siRNA sense strand
gcucaauugguccagcauu

SEQ ID NO: 1944803 - RNA, 19 nt, Homo sapiens
  misc_RNA (1)...(19): siRNA sense strand
cgacaggcagagcagaaga

SEQ ID NO: 1944804 - RNA, 19 nt, Homo sapiens
  misc_RNA (1)...(19): siRNA sense strand
uggcauugguuggaagaau

SEQ ID NO: 1944805 - RNA, 19 nt, Homo sapiens
  misc_RNA (1)...(19): siRNA sense strand
ccacucucaucaccuaugc

SEQ ID NO: 1944806 - RNA, 19 nt, Homo sapiens
  misc_RNA (1)...(19): siRNA sense strand
gaguagccucaccuccaua

SEQ ID NO: 1944807 - RNA, 19 nt, Homo sapiens
  misc_RNA (1)...(19): siRNA sense strand
ucccucaaccacuuccuua

SEQ ID NO: 1944808 - RNA, 19 nt, Homo sapiens
  misc_RNA (1)...(19): siRNA sense strand
acaccugcccugacauuuc

SEQ ID NO: 1944809 - RNA, 19 nt, Homo sapiens
  misc_RNA (1)...(19): siRNA sense strand
cacaaccuuucucucaaca

SEQ ID NO: 1944810 - RNA, 19 nt, Homo sapiens
  misc_RNA (1)...(19): siRNA sense strand
ucaccaauguacccaaucc

SEQ ID NO: 1944811 - RNA, 19 nt, Homo sapiens
  misc_RNA (1)...(19): siRNA sense strand
uggugaaucggcucaauug

SEQ ID NO: 1944812 - RNA, 19 nt, Homo sapiens
  misc_RNA (1)...(19): siRNA sense strand
acaacuacuacauguauca

SEQ ID NO: 1944813 - RNA, 19 nt, Homo sapiens
  misc_RNA (1)...(19): siRNA sense strand
agagaucaacuuucaggau

SEQ ID NO: 1944814 - RNA, 19 nt, Homo sapiens
  misc_RNA (1)...(19): siRNA sense strand
ucccaagacucaccagaac

SEQ ID NO: 1944815 - RNA, 19 nt, Homo sapiens
  misc_RNA (1)...(19): siRNA sense strand
gucccaagacucaccagaa

SEQ ID NO: 1944816 - RNA, 19 nt, Homo sapiens
  misc_RNA (1)...(19): siRNA sense strand
ggagaaaccuuaugaaugu

SEQ ID NO: 1944817 - RNA, 19 nt, Homo sapiens
  misc_RNA (1)...(19): siRNA sense strand
gagaaacccuuuacaugua

SEQ ID NO: 1944818 - RNA, 19 nt, Homo sapiens
  misc_RNA (1)...(19): siRNA sense strand
ggaaagcaguuauucauga

SEQ ID NO: 1944819 - RNA, 19 nt, Homo sapiens
  misc_RNA (1)...(19): siRNA sense strand
aggcagagcuauaaacuua

SEQ ID NO: 1944820 - RNA, 19 nt, Homo sapiens
  misc_RNA (1)...(19): siRNA sense strand
agacagaguucaugccuua

SEQ ID NO: 1944821 - RNA, 19 nt, Homo sapiens
  misc_RNA (1)...(19): siRNA sense strand
gcacaucaaagaauucaua

SEQ ID NO: 1944822 - RNA, 19 nt, Homo sapiens
  misc_RNA (1)...(19): siRNA sense strand
gagaaacucuaugaaugua

SEQ ID NO: 1944823 - RNA, 19 nt, Homo sapiens
  misc_RNA (1)...(19): siRNA sense strand
gcacaucaaagaacacaua

SEQ ID NO: 1944824 - RNA, 19 nt, Homo sapiens
  misc_RNA (1)...(19): siRNA sense strand
gggaaauccuuuagucaaa

SEQ ID NO: 1944825 - RNA, 19 nt, Homo sapiens
  misc_RNA (1)...(19): siRNA sense strand
ggagaagccuuaugaaugc

SEQ ID NO: 1944826 - RNA, 19 nt, Homo sapiens
  misc_RNA (1)...(19): siRNA sense strand
gagagaagcccuaugaaug

SEQ ID NO: 1944827 - RNA, 19 nt, Homo sapiens
  misc_RNA (1)...(19): siRNA sense strand
gugaagaaguggaugauug

SEQ ID NO: 1944828 - RNA, 19 nt, Homo sapiens
  misc_RNA (1)...(19): siRNA sense strand
ucucauaguuccucccuua

SEQ ID NO: 1944829 - RNA, 19 nt, Homo sapiens
  misc_RNA (1)...(19): siRNA sense strand
gcauucaccuuauucaguu

SEQ ID NO: 1944830 - RNA, 19 nt, Homo sapiens
  misc_RNA (1)...(19): siRNA sense strand
gagaagcccuaugaaugua

SEQ ID NO: 1944831 - RNA, 19 nt, Homo sapiens
  misc_RNA (1)...(19): siRNA sense strand
ggagaagaguggucugaau

SEQ ID NO: 1944832 - RNA, 19 nt, Homo sapiens
  misc_RNA (1)...(19): siRNA sense strand
caacaucagagaacucaua

SEQ ID NO: 1944833 - RNA, 19 nt, Homo sapiens
  misc_RNA (1)...(19): siRNA sense strand
ccucagagcauucaccuua

SEQ ID NO: 1944834 - RNA, 19 nt, Homo sapiens
  misc_RNA (1)...(19): siRNA sense strand
gagagaaacccuuuacaug

SEQ ID NO: 1944835 - RNA, 19 nt, Homo sapiens
  misc_RNA (1)...(19): siRNA sense strand
gagagaaaccguaugaaug

SEQ ID NO: 1944836 - RNA, 19 nt, Homo sapiens
  misc_RNA (1)...(19): siRNA sense strand
guaaagaccaguuggagaa

SEQ ID NO: 1944837 - RNA, 19 nt, Homo sapiens
  misc_RNA (1)...(19): siRNA sense strand
auccagagcuauaaacuua

SEQ ID NO: 1944838 - RNA, 19 nt, Homo sapiens
  misc_RNA (1)...(19): siRNA sense strand
gggagaagccuuaugaaug

SEQ ID NO: 1944839 - RNA, 19 nt, Homo sapiens
  misc_RNA (1)...(19): siRNA sense strand
ggagagaaaccauuugaau

SEQ ID NO: 1944840 - RNA, 19 nt, Homo sapiens
  misc_RNA (1)...(19): siRNA sense strand
guacaucagagaacucaua

SEQ ID NO: 1944841 - RNA, 19 nt, Homo sapiens
  misc_RNA (1)...(19): siRNA sense strand
agaaguggaugauuguaaa

SEQ ID NO: 1944842 - RNA, 19 nt, Homo sapiens
  misc_RNA (1)...(19): siRNA sense strand
gagaaaccguaugaaugua

SEQ ID NO: 1944843 - RNA, 19 nt, Homo sapiens
  misc_RNA (1)...(19): siRNA sense strand
ggagagaaaccguaugaau

SEQ ID NO: 1944844 - RNA, 19 nt, Homo sapiens
  misc_RNA (1)...(19): siRNA sense strand
gagaagaguggucugaauu

SEQ ID NO: 1944845 - RNA, 19 nt, Homo sapiens
  misc_RNA (1)...(19): siRNA sense strand
ggucugaauuccagucuau

SEQ ID NO: 1944846 - RNA, 19 nt, Homo sapiens
  misc_RNA (1)...(19): siRNA sense strand
gagaugugauccuggagaa

SEQ ID NO: 1944847 - RNA, 19 nt, Homo sapiens
  misc_RNA (1)...(19): siRNA sense strand
gagugaagauagaaagguu

SEQ ID NO: 1944848 - RNA, 19 nt, Homo sapiens
  misc_RNA (1)...(19): siRNA sense strand
ggagagaagcccuaugaau

SEQ ID NO: 1944849 - RNA, 19 nt, Homo sapiens
  misc_RNA (1)...(19): siRNA sense strand
gggagaaaccuuaugaaug

SEQ ID NO: 1944850 - RNA, 19 nt, Homo sapiens
  misc_RNA (1)...(19): siRNA sense strand
agugaaaccucucauaguu

SEQ ID NO: 1944851 - RNA, 19 nt, Homo sapiens
  misc_RNA (1)...(19): siRNA sense strand
gaacaacagagaauuccuu

SEQ ID NO: 1944852 - RNA, 19 nt, Homo sapiens
  misc_RNA (1)...(19): siRNA sense strand
gaaagcaguuauucaugag

SEQ ID NO: 1944853 - RNA, 19 nt, Homo sapiens
  misc_RNA (1)...(19): siRNA sense strand
ggcauucacucaaaggaaa

SEQ ID NO: 1944854 - RNA, 19 nt, Homo sapiens
  misc_RNA (1)...(19): siRNA sense strand
agaaugagacacuauauga

SEQ ID NO: 1944855 - RNA, 19 nt, Homo sapiens
  misc_RNA (1)...(19): siRNA sense strand
guucaugccuuacucaaca

SEQ ID NO: 1944856 - RNA, 19 nt, Homo sapiens
  misc_RNA (1)...(19): siRNA sense strand
uaaagaaugugggcagguu

SEQ ID NO: 1944857 - RNA, 19 nt, Homo sapiens
  misc_RNA (1)...(19): siRNA sense strand
gagaaaccuuaugaaugua

SEQ ID NO: 1944858 - RNA, 19 nt, Homo sapiens
  misc_RNA (1)...(19): siRNA sense strand
guaugaauguagugaaugu

SEQ ID NO: 1944859 - RNA, 19 nt, Homo sapiens
  misc_RNA (1)...(19): siRNA sense strand
gaaacucuaugaauguaac

SEQ ID NO: 1944860 - RNA, 19 nt, Homo sapiens
  misc_RNA (1)...(19): siRNA sense strand
ggagagaaacccuuuacau

SEQ ID NO: 1944861 - RNA, 19 nt, Homo sapiens
  misc_RNA (1)...(19): siRNA sense strand
gaaugagacacuauaugaa

SEQ ID NO: 1944862 - RNA, 19 nt, Homo sapiens
  misc_RNA (1)...(19): siRNA sense strand
gagaaaagcccuaugaaug

SEQ ID NO: 1944863 - RNA, 19 nt, Homo sapiens
  misc_RNA (1)...(19): siRNA sense strand
caacucauacugaagagaa

SEQ ID NO: 1944864 - RNA, 19 nt, Homo sapiens
  misc_RNA (1)...(19): siRNA sense strand
cuaauggagugaagauaga

SEQ ID NO: 1944865 - RNA, 19 nt, Homo sapiens
  misc_RNA (1)...(19): siRNA sense strand
ucagagcauucaccuuauu

SEQ ID NO: 1944866 - RNA, 19 nt, Homo sapiens
  misc_RNA (1)...(19): siRNA sense strand
acagggaccuagucucuug

SEQ ID NO: 1944867 - RNA, 19 nt, Homo sapiens
  misc_RNA (1)...(19): siRNA sense strand
gaacucauacuggagagaa

SEQ ID NO: 1944868 - RNA, 19 nt, Homo sapiens
  misc_RNA (1)...(19): siRNA sense strand
gaacucauacuggagagaa

SEQ ID NO: 1944869 - RNA, 19 nt, Homo sapiens
  misc_RNA (1)...(19): siRNA sense strand
gaguuauguucuuguugua

SEQ ID NO: 1944870 - RNA, 19 nt, Homo sapiens
  misc_RNA (1)...(19): siRNA sense strand
gaacucauacuggagagaa

SEQ ID NO: 1944871 - RNA, 19 nt, Homo sapiens
  misc_RNA (1)...(19): siRNA sense strand
gaugauccuugguuaucuu

SEQ ID NO: 1944872 - RNA, 19 nt, Homo sapiens
  misc_RNA (1)...(19): siRNA sense strand
gugaagauagaaagguuua

SEQ ID NO: 1944873 - RNA, 19 nt, Homo sapiens
  misc_RNA (1)...(19): siRNA sense strand
ccagaguuauguucuuguu

SEQ ID NO: 1944874 - RNA, 19 nt, Homo sapiens
  misc_RNA (1)...(19): siRNA sense strand
aaacagucaucagaagauu

SEQ ID NO: 1944875 - RNA, 19 nt, Homo sapiens
  misc_RNA (1)...(19): siRNA sense strand
gaaacccuuuacauguauu

SEQ ID NO: 1944876 - RNA, 19 nt, Homo sapiens
  misc_RNA (1)...(19): siRNA sense strand
agagaaacccuuuacaugu

SEQ ID NO: 1944877 - RNA, 19 nt, Homo sapiens
  misc_RNA (1)...(19): siRNA sense strand
guaugaauguaaucagugu

SEQ ID NO: 1944878 - RNA, 19 nt, Homo sapiens
  misc_RNA (1)...(19): siRNA sense strand
gaaaccguaugaauguagu

SEQ ID NO: 1944879 - RNA, 19 nt, Homo sapiens
  misc_RNA (1)...(19): siRNA sense strand
caucaaagaauucauacug

SEQ ID NO: 1944880 - RNA, 19 nt, Homo sapiens
  misc_RNA (1)...(19): siRNA sense strand
gaacucacacuggagagaa

SEQ ID NO: 1944881 - RNA, 19 nt, Homo sapiens
  misc_RNA (1)...(19): siRNA sense strand
gaagauagaaagguuuaca

SEQ ID NO: 1944882 - RNA, 19 nt, Homo sapiens
  misc_RNA (1)...(19): siRNA sense strand
agagaaaccguaugaaugu

SEQ ID NO: 1944883 - RNA, 19 nt, Homo sapiens
  misc_RNA (1)...(19): siRNA sense strand
gcacaucaaagaacucaca

SEQ ID NO: 1944884 - RNA, 19 nt, Homo sapiens
  misc_RNA (1)...(19): siRNA sense strand
gaagcccuaugaauguaau

SEQ ID NO: 1944885 - RNA, 19 nt, Homo sapiens
  misc_RNA (1)...(19): siRNA sense strand
ccagaguuauguccuuguu

SEQ ID NO: 1944886 - RNA, 19 nt, Homo sapiens
  misc_RNA (1)...(19): siRNA sense strand
agagaaaccuuuugaaugu

SEQ ID NO: 1944887 - RNA, 19 nt, Homo sapiens
  misc_RNA (1)...(19): siRNA sense strand
gagaaugagacacuauaug

SEQ ID NO: 1944888 - RNA, 19 nt, Homo sapiens
  misc_RNA (1)...(19): siRNA sense strand
caucagaagauuaaugaga

SEQ ID NO: 1944889 - RNA, 19 nt, Homo sapiens
  misc_RNA (1)...(19): siRNA sense strand
guaaacagucaucagaaga

SEQ ID NO: 1944890 - RNA, 19 nt, Homo sapiens
  misc_RNA (1)...(19): siRNA sense strand
cucaagagauuaucaucaa

SEQ ID NO: 1944891 - RNA, 19 nt, Homo sapiens
  misc_RNA (1)...(19): siRNA sense strand
caaaggaaagcaguuauuc

SEQ ID NO: 1944892 - RNA, 19 nt, Homo sapiens
  misc_RNA (1)...(19): siRNA sense strand
gugcaucaaagaacucaua

SEQ ID NO: 1944893 - RNA, 19 nt, Homo sapiens
  misc_RNA (1)...(19): siRNA sense strand
gcaguucucaccuuguuau

SEQ ID NO: 1944894 - RNA, 19 nt, Homo sapiens
  misc_RNA (1)...(19): siRNA sense strand
gugcaucaaagaacucaua

SEQ ID NO: 1944895 - RNA, 19 nt, Homo sapiens
  misc_RNA (1)...(19): siRNA sense strand
gaagagaaaccuuuugaau

SEQ ID NO: 1944896 - RNA, 19 nt, Homo sapiens
  misc_RNA (1)...(19): siRNA sense strand
caacagagaauuccuuuug

SEQ ID NO: 1944897 - RNA, 19 nt, Homo sapiens
  misc_RNA (1)...(19): siRNA sense strand
gaagauuaaugagaaugag

SEQ ID NO: 1944898 - RNA, 19 nt, Homo sapiens
  misc_RNA (1)...(19): siRNA sense strand
gaagaaguggaugauugua

SEQ ID NO: 1944899 - RNA, 19 nt, Homo sapiens
  misc_RNA (1)...(19): siRNA sense strand
agaaacccuuuacauguau

SEQ ID NO: 1944900 - RNA, 19 nt, Homo sapiens
  misc_RNA (1)...(19): siRNA sense strand
caucaaagaacucauacug

SEQ ID NO: 1944901 - RNA, 19 nt, Homo sapiens
  misc_RNA (1)...(19): siRNA sense strand
agaguuauguucuuguugu

SEQ ID NO: 1944902 - RNA, 19 nt, Homo sapiens
  misc_RNA (1)...(19): siRNA sense strand
caucaaagaacucauacug

SEQ ID NO: 1944903 - RNA, 19 nt, Homo sapiens
  misc_RNA (1)...(19): siRNA sense strand
gcuaauggagugaagauag

SEQ ID NO: 1944904 - RNA, 19 nt, Homo sapiens
  misc_RNA (1)...(19): siRNA sense strand
cgacuuauugugcaucaaa

SEQ ID NO: 1944905 - RNA, 19 nt, Homo sapiens
  misc_RNA (1)...(19): siRNA sense strand
cuugagugcucgacuuauu

SEQ ID NO: 1944906 - RNA, 19 nt, Homo sapiens
  misc_RNA (1)...(19): siRNA sense strand
gaaauccuuuagccagagu

SEQ ID NO: 1944907 - RNA, 19 nt, Homo sapiens
  misc_RNA (1)...(19): siRNA sense strand
gcacaucagagaacucaca

SEQ ID NO: 1944908 - RNA, 19 nt, Homo sapiens
  misc_RNA (1)...(19): siRNA sense strand
guagugaaaccucucauag

SEQ ID NO: 1944909 - RNA, 19 nt, Homo sapiens
  misc_RNA (1)...(19): siRNA sense strand
ucaaaggaaagcaguuauu

SEQ ID NO: 1944910 - RNA, 19 nt, Homo sapiens
  misc_RNA (1)...(19): siRNA sense strand
uggaagagcaggaugagaa

SEQ ID NO: 1944911 - RNA, 19 nt, Homo sapiens
  misc_RNA (1)...(19): siRNA sense strand
ucauuuauccagagcuaua

SEQ ID NO: 1944912 - RNA, 19 nt, Homo sapiens
  misc_RNA (1)...(19): siRNA sense strand
aaucauuuauccagagcua

SEQ ID NO: 1944913 - RNA, 19 nt, Homo sapiens
  misc_RNA (1)...(19): siRNA sense strand
gagagagucugcaaaagug

SEQ ID NO: 1944914 - RNA, 19 nt, Homo sapiens
  misc_RNA (1)...(19): siRNA sense strand
gagaacucauacuggagaa

SEQ ID NO: 1944915 - RNA, 19 nt, Homo sapiens
  misc_RNA (1)...(19): siRNA sense strand
caucagagaacucauacug

SEQ ID NO: 1944916 - RNA, 19 nt, Homo sapiens
  misc_RNA (1)...(19): siRNA sense strand
gaauauugcucaccuacua

SEQ ID NO: 1944917 - RNA, 19 nt, Homo sapiens
  misc_RNA (1)...(19): siRNA sense strand
cuacuggacugccauauua

SEQ ID NO: 1944918 - RNA, 19 nt, Homo sapiens
  misc_RNA (1)...(19): siRNA sense strand
gcacagagcugaaaacuga

SEQ ID NO: 1944919 - RNA, 19 nt, Homo sapiens
  misc_RNA (1)...(19): siRNA sense strand
gcagaaagccaaucucauu

SEQ ID NO: 1944920 - RNA, 19 nt, Homo sapiens
  misc_RNA (1)...(19): siRNA sense strand
guguagagcuggagcaauu

SEQ ID NO: 1944921 - RNA, 19 nt, Homo sapiens
  misc_RNA (1)...(19): siRNA sense strand
ggauaagccuauugagaug

SEQ ID NO: 1944922 - RNA, 19 nt, Homo sapiens
  misc_RNA (1)...(19): siRNA sense strand
cuacaaaguucgaaugcaa

SEQ ID NO: 1944923 - RNA, 19 nt, Homo sapiens
  misc_RNA (1)...(19): siRNA sense strand
ggagaauuguuaccacaga

SEQ ID NO: 1944924 - RNA, 19 nt, Homo sapiens
  misc_RNA (1)...(19): siRNA sense strand
cagaggagcuacuguauac

SEQ ID NO: 1944925 - RNA, 19 nt, Homo sapiens
  misc_RNA (1)...(19): siRNA sense strand
uaaccucacuguccuacaa

SEQ ID NO: 1944926 - RNA, 19 nt, Homo sapiens
  misc_RNA (1)...(19): siRNA sense strand
uauuaucccugccuuauug

SEQ ID NO: 1944927 - RNA, 19 nt, Homo sapiens
  misc_RNA (1)...(19): siRNA sense strand
ugcaagcacugaaauguuu

SEQ ID NO: 1944928 - RNA, 19 nt, Homo sapiens
  misc_RNA (1)...(19): siRNA sense strand
guaaagggccagaucauca

SEQ ID NO: 1944929 - RNA, 19 nt, Homo sapiens
  misc_RNA (1)...(19): siRNA sense strand
gcaauucggacagaugaua

SEQ ID NO: 1944930 - RNA, 19 nt, Homo sapiens
  misc_RNA (1)...(19): siRNA sense strand
gaccugaaguuuauugaag

SEQ ID NO: 1944931 - RNA, 19 nt, Homo sapiens
  misc_RNA (1)...(19): siRNA sense strand
gggauaagccuauugagau

SEQ ID NO: 1944932 - RNA, 19 nt, Homo sapiens
  misc_RNA (1)...(19): siRNA sense strand
uuuaggagcuguuccaaga

SEQ ID NO: 1944933 - RNA, 19 nt, Homo sapiens
  misc_RNA (1)...(19): siRNA sense strand
cgaugacccugguaaaugu

SEQ ID NO: 1944934 - RNA, 19 nt, Homo sapiens
  misc_RNA (1)...(19): siRNA sense strand
gaauuguuaccacagauuu

SEQ ID NO: 1944935 - RNA, 19 nt, Homo sapiens
  misc_RNA (1)...(19): siRNA sense strand
gagcaauucggacagauga

SEQ ID NO: 1944936 - RNA, 19 nt, Homo sapiens
  misc_RNA (1)...(19): siRNA sense strand
uaggagcuguuccaagauu

SEQ ID NO: 1944937 - RNA, 19 nt, Homo sapiens
  misc_RNA (1)...(19): siRNA sense strand
ccagaggagcuacuguaua

SEQ ID NO: 1944938 - RNA, 19 nt, Homo sapiens
  misc_RNA (1)...(19): siRNA sense strand
ccagaucaucaaacaauuu

SEQ ID NO: 1944939 - RNA, 19 nt, Homo sapiens
  misc_RNA (1)...(19): siRNA sense strand
ggaaacaacaagcagaaag

SEQ ID NO: 1944940 - RNA, 19 nt, Homo sapiens
  misc_RNA (1)...(19): siRNA sense strand
ugucagaucuucucacacu

SEQ ID NO: 1944941 - RNA, 19 nt, Homo sapiens
  misc_RNA (1)...(19): siRNA sense strand
ggccagaucaucaaacaau

SEQ ID NO: 1944942 - RNA, 19 nt, Homo sapiens
  misc_RNA (1)...(19): siRNA sense strand
gagaauuguuaccacagau

SEQ ID NO: 1944943 - RNA, 19 nt, Homo sapiens
  misc_RNA (1)...(19): siRNA sense strand
gccagaucaucaaacaauu

SEQ ID NO: 1944944 - RNA, 19 nt, Homo sapiens
  misc_RNA (1)...(19): siRNA sense strand
ucacuguccuacaaaguuc

SEQ ID NO: 1944945 - RNA, 19 nt, Homo sapiens
  misc_RNA (1)...(19): siRNA sense strand
gaaugcaagcacugaaaug

SEQ ID NO: 1944946 - RNA, 19 nt, Homo sapiens
  misc_RNA (1)...(19): siRNA sense strand
ucagaauauugcucaccua

SEQ ID NO: 1944947 - RNA, 19 nt, Homo sapiens
  misc_RNA (1)...(19): siRNA sense strand
gaaacaacaagcagaaagc

SEQ ID NO: 1944948 - RNA, 19 nt, Homo sapiens
  misc_RNA (1)...(19): siRNA sense strand
guugggaagucuugcuaug

SEQ ID NO: 1944949 - RNA, 19 nt, Homo sapiens
  misc_RNA (1)...(19): siRNA sense strand
gcagugguguugggaaguc

SEQ ID NO: 1944950 - RNA, 19 nt, Homo sapiens
  misc_RNA (1)...(19): siRNA sense strand
caauucggacagaugauaa

SEQ ID NO: 1944951 - RNA, 19 nt, Homo sapiens
  misc_RNA (1)...(19): siRNA sense strand
uaaagggccagaucaucaa

SEQ ID NO: 1944952 - RNA, 19 nt, Homo sapiens
  misc_RNA (1)...(19): siRNA sense strand
cauauuaucccugccuuau

SEQ ID NO: 1944953 - RNA, 19 nt, Homo sapiens
  misc_RNA (1)...(19): siRNA sense strand
gguugauggagaauuguua

SEQ ID NO: 1944954 - RNA, 19 nt, Homo sapiens
  misc_RNA (1)...(19): siRNA sense strand
gcagucgccacuauguuga

SEQ ID NO: 1944955 - RNA, 19 nt, Homo sapiens
  misc_RNA (1)...(19): siRNA sense strand
ggagcaauucggacagaug

SEQ ID NO: 1944956 - RNA, 19 nt, Homo sapiens
  misc_RNA (1)...(19): siRNA sense strand
guuccaagauuguuguacu

SEQ ID NO: 1944957 - RNA, 19 nt, Homo sapiens
  misc_RNA (1)...(19): siRNA sense strand
acagagggauaagccuauu

SEQ ID NO: 1944958 - RNA, 19 nt, Homo sapiens
  misc_RNA (1)...(19): siRNA sense strand
ccccagaccugaaguuuau

SEQ ID NO: 1944959 - RNA, 19 nt, Homo sapiens
  misc_RNA (1)...(19): siRNA sense strand
acggugcaguucagaauau

SEQ ID NO: 1944960 - RNA, 19 nt, Homo sapiens
  misc_RNA (1)...(19): siRNA sense strand
ccacggugcaguucagaau

SEQ ID NO: 1944961 - RNA, 19 nt, Homo sapiens
  misc_RNA (1)...(19): siRNA sense strand
uaaccacggugcaguucag

SEQ ID NO: 1944962 - RNA, 19 nt, Homo sapiens
  misc_RNA (1)...(19): siRNA sense strand
uacagaugccacagugaua

SEQ ID NO: 1944963 - RNA, 19 nt, Homo sapiens
  misc_RNA (1)...(19): siRNA sense strand
caacaagcagaaagccaau

SEQ ID NO: 1944964 - RNA, 19 nt, Homo sapiens
  misc_RNA (1)...(19): siRNA sense strand
uuugguugauggagaauug

SEQ ID NO: 1944965 - RNA, 19 nt, Homo sapiens
  misc_RNA (1)...(19): siRNA sense strand
cgaaugcaagcacugaaau

SEQ ID NO: 1944966 - RNA, 19 nt, Homo sapiens
  misc_RNA (1)...(19): siRNA sense strand
ccauauuaucccugccuua

SEQ ID NO: 1944967 - RNA, 19 nt, Homo sapiens
  misc_RNA (1)...(19): siRNA sense strand
agagggauaagccuauuga

SEQ ID NO: 1944968 - RNA, 19 nt, Homo sapiens
  misc_RNA (1)...(19): siRNA sense strand
aagcagaaagccaaucuca

SEQ ID NO: 1944969 - RNA, 19 nt, Homo sapiens
  misc_RNA (1)...(19): siRNA sense strand
uauguugacaggcuauuug

SEQ ID NO: 1944970 - RNA, 19 nt, Homo sapiens
  misc_RNA (1)...(19): siRNA sense strand
gcuauacccaggaguacau

SEQ ID NO: 1944971 - RNA, 19 nt, Homo sapiens
  misc_RNA (1)...(19): siRNA sense strand
ucgaugacccugguaaaug

SEQ ID NO: 1944972 - RNA, 19 nt, Homo sapiens
  misc_RNA (1)...(19): siRNA sense strand
ugaaaacaaugucaagucu

SEQ ID NO: 1944973 - RNA, 19 nt, Homo sapiens
  misc_RNA (1)...(19): siRNA sense strand
guaaauguuuugguugaug

SEQ ID NO: 1944974 - RNA, 19 nt, Homo sapiens
  misc_RNA (1)...(19): siRNA sense strand
gcuguaaagggccagauca

SEQ ID NO: 1944975 - RNA, 19 nt, Homo sapiens
  misc_RNA (1)...(19): siRNA sense strand
caccucauggcacugcuua

SEQ ID NO: 1944976 - RNA, 19 nt, Homo sapiens
  misc_RNA (1)...(19): siRNA sense strand
ccagaccugaaguuuauug

SEQ ID NO: 1944977 - RNA, 19 nt, Homo sapiens
  misc_RNA (1)...(19): siRNA sense strand
ugaaugugcagugguguug

SEQ ID NO: 1944978 - RNA, 19 nt, Homo sapiens
  misc_RNA (1)...(19): siRNA sense strand
guaucgaugacccugguaa

SEQ ID NO: 1944979 - RNA, 19 nt, Homo sapiens
  misc_RNA (1)...(19): siRNA sense strand
gcuagcagucgccacuaug

SEQ ID NO: 1944980 - RNA, 19 nt, Homo sapiens
  misc_RNA (1)...(19): siRNA sense strand
agaauuguuaccacagauu

SEQ ID NO: 1944981 - RNA, 19 nt, Homo sapiens
  misc_RNA (1)...(19): siRNA sense strand
ucgaaugcaagcacugaaa

SEQ ID NO: 1944982 - RNA, 19 nt, Homo sapiens
  misc_RNA (1)...(19): siRNA sense strand
ggagcuguuccaagauugu

SEQ ID NO: 1944983 - RNA, 19 nt, Homo sapiens
  misc_RNA (1)...(19): siRNA sense strand
uaucgaugacccugguaaa

SEQ ID NO: 1944984 - RNA, 19 nt, Homo sapiens
  misc_RNA (1)...(19): siRNA sense strand
agggauaagccuauugaga

SEQ ID NO: 1944985 - RNA, 19 nt, Homo sapiens
  misc_RNA (1)...(19): siRNA sense strand
gaauauugcucaccuacua

SEQ ID NO: 1944986 - RNA, 19 nt, Homo sapiens
  misc_RNA (1)...(19): siRNA sense strand
cuacuggacugccauauua

SEQ ID NO: 1944987 - RNA, 19 nt, Homo sapiens
  misc_RNA (1)...(19): siRNA sense strand
gcacagagcugaaaacuga

SEQ ID NO: 1944988 - RNA, 19 nt, Homo sapiens
  misc_RNA (1)...(19): siRNA sense strand
gcagaaagccaaucucauu

SEQ ID NO: 1944989 - RNA, 19 nt, Homo sapiens
  misc_RNA (1)...(19): siRNA sense strand
gagaaucgcuagcauaacu

SEQ ID NO: 1944990 - RNA, 19 nt, Homo sapiens
  misc_RNA (1)...(19): siRNA sense strand
guguagagcuggagcaauu

SEQ ID NO: 1944991 - RNA, 19 nt, Homo sapiens
  misc_RNA (1)...(19): siRNA sense strand
ggauaagccuauugagaug

SEQ ID NO: 1944992 - RNA, 19 nt, Homo sapiens
  misc_RNA (1)...(19): siRNA sense strand
cuacaaaguucgaaugcaa

SEQ ID NO: 1944993 - RNA, 19 nt, Homo sapiens
  misc_RNA (1)...(19): siRNA sense strand
ggagaauuguuaccacaga

SEQ ID NO: 1944994 - RNA, 19 nt, Homo sapiens
  misc_RNA (1)...(19): siRNA sense strand
cagaggagcuacuguauac

SEQ ID NO: 1944995 - RNA, 19 nt, Homo sapiens
  misc_RNA (1)...(19): siRNA sense strand
uaaccucacuguccuacaa

SEQ ID NO: 1944996 - RNA, 19 nt, Homo sapiens
  misc_RNA (1)...(19): siRNA sense strand
uauuaucccugccuuauug

SEQ ID NO: 1944997 - RNA, 19 nt, Homo sapiens
  misc_RNA (1)...(19): siRNA sense strand
ugcaagcacugaaauguuu

SEQ ID NO: 1944998 - RNA, 19 nt, Homo sapiens
  misc_RNA (1)...(19): siRNA sense strand
guaaagggccagaucauca

SEQ ID NO: 1944999 - RNA, 19 nt, Homo sapiens
  misc_RNA (1)...(19): siRNA sense strand
gcaauucggacagaugaua

SEQ ID NO: 1945000 - RNA, 19 nt, Homo sapiens
  misc_RNA (1)...(19): siRNA sense strand
gaccugaaguuuauugaag

SEQ ID NO: 1945001 - RNA, 19 nt, Homo sapiens
  misc_RNA (1)...(19): siRNA sense strand
cagagaaucgcuagcauaa

SEQ ID NO: 1945002 - RNA, 19 nt, Homo sapiens
  misc_RNA (1)...(19): siRNA sense strand
gggauaagccuauugagau

SEQ ID NO: 1945003 - RNA, 19 nt, Homo sapiens
  misc_RNA (1)...(19): siRNA sense strand
ugaaccagauguugagcua

SEQ ID NO: 1945004 - RNA, 19 nt, Homo sapiens
  misc_RNA (1)...(19): siRNA sense strand
uuuaggagcuguuccaaga

SEQ ID NO: 1945005 - RNA, 19 nt, Homo sapiens
  misc_RNA (1)...(19): siRNA sense strand
uuaaaaggcuugaucauga

SEQ ID NO: 1945006 - RNA, 19 nt, Homo sapiens
  misc_RNA (1)...(19): siRNA sense strand
cgaugacccugguaaaugu

SEQ ID NO: 1945007 - RNA, 19 nt, Homo sapiens
  misc_RNA (1)...(19): siRNA sense strand
gaauuguuaccacagauuu

SEQ ID NO: 1945008 - RNA, 19 nt, Homo sapiens
  misc_RNA (1)...(19): siRNA sense strand
gagcaauucggacagauga

SEQ ID NO: 1945009 - RNA, 19 nt, Homo sapiens
  misc_RNA (1)...(19): siRNA sense strand
uaggagcuguuccaagauu

SEQ ID NO: 1945010 - RNA, 19 nt, Homo sapiens
  misc_RNA (1)...(19): siRNA sense strand
ccagaggagcuacuguaua

SEQ ID NO: 1945011 - RNA, 19 nt, Homo sapiens
  misc_RNA (1)...(19): siRNA sense strand
ccagaucaucaaacaauuu

SEQ ID NO: 1945012 - RNA, 19 nt, Homo sapiens
  misc_RNA (1)...(19): siRNA sense strand
ggaaacaacaagcagaaag

SEQ ID NO: 1945013 - RNA, 19 nt, Homo sapiens
  misc_RNA (1)...(19): siRNA sense strand
ugucagaucuucucacacu

SEQ ID NO: 1945014 - RNA, 19 nt, Homo sapiens
  misc_RNA (1)...(19): siRNA sense strand
aaggcuugaucaugauuua

SEQ ID NO: 1945015 - RNA, 19 nt, Homo sapiens
  misc_RNA (1)...(19): siRNA sense strand
ggccagaucaucaaacaau

SEQ ID NO: 1945016 - RNA, 19 nt, Homo sapiens
  misc_RNA (1)...(19): siRNA sense strand
gagaauuguuaccacagau

SEQ ID NO: 1945017 - RNA, 19 nt, Homo sapiens
  misc_RNA (1)...(19): siRNA sense strand
gccagaucaucaaacaauu

SEQ ID NO: 1945018 - RNA, 19 nt, Homo sapiens
  misc_RNA (1)...(19): siRNA sense strand
ucacuguccuacaaaguuc

SEQ ID NO: 1945019 - RNA, 19 nt, Homo sapiens
  misc_RNA (1)...(19): siRNA sense strand
caugcuugcugauuauuuc

SEQ ID NO: 1945020 - RNA, 19 nt, Homo sapiens
  misc_RNA (1)...(19): siRNA sense strand
gaaugcaagcacugaaaug

SEQ ID NO: 1945021 - RNA, 19 nt, Homo sapiens
  misc_RNA (1)...(19): siRNA sense strand
gagcaaaugaugaagacau

SEQ ID NO: 1945022 - RNA, 19 nt, Homo sapiens
  misc_RNA (1)...(19): siRNA sense strand
acagagaaucgcuagcaua

SEQ ID NO: 1945023 - RNA, 19 nt, Homo sapiens
  misc_RNA (1)...(19): siRNA sense strand
ucagaauauugcucaccua

SEQ ID NO: 1945024 - RNA, 19 nt, Homo sapiens
  misc_RNA (1)...(19): siRNA sense strand
gauguugagcuacagagaa

SEQ ID NO: 1945025 - RNA, 19 nt, Homo sapiens
  misc_RNA (1)...(19): siRNA sense strand
guugggaagucuugcuaug

SEQ ID NO: 1945026 - RNA, 19 nt, Homo sapiens
  misc_RNA (1)...(19): siRNA sense strand
gaaacaacaagcagaaagc

SEQ ID NO: 1945027 - RNA, 19 nt, Homo sapiens
  misc_RNA (1)...(19): siRNA sense strand
gcagugguguugggaaguc

SEQ ID NO: 1945028 - RNA, 19 nt, Homo sapiens
  misc_RNA (1)...(19): siRNA sense strand
caauucggacagaugauaa

SEQ ID NO: 1945029 - RNA, 19 nt, Homo sapiens
  misc_RNA (1)...(19): siRNA sense strand
uaaagggccagaucaucaa

SEQ ID NO: 1945030 - RNA, 19 nt, Homo sapiens
  misc_RNA (1)...(19): siRNA sense strand
cauauuaucccugccuuau

SEQ ID NO: 1945031 - RNA, 19 nt, Homo sapiens
  misc_RNA (1)...(19): siRNA sense strand
gaaucgcuagcauaacuga

SEQ ID NO: 1945032 - RNA, 19 nt, Homo sapiens
  misc_RNA (1)...(19): siRNA sense strand
gguugauggagaauuguua

SEQ ID NO: 1945033 - RNA, 19 nt, Homo sapiens
  misc_RNA (1)...(19): siRNA sense strand
gcagucgccacuauguuga

SEQ ID NO: 1945034 - RNA, 19 nt, Homo sapiens
  misc_RNA (1)...(19): siRNA sense strand
ggcuugaucaugauuuaaa

SEQ ID NO: 1945035 - RNA, 19 nt, Homo sapiens
  misc_RNA (1)...(19): siRNA sense strand
gcucuaugccucucuugga

SEQ ID NO: 1945036 - RNA, 19 nt, Homo sapiens
  misc_RNA (1)...(19): siRNA sense strand
ggagcaauucggacagaug

SEQ ID NO: 1945037 - RNA, 19 nt, Homo sapiens
  misc_RNA (1)...(19): siRNA sense strand
caagcucuaugccucucuu

SEQ ID NO: 1945038 - RNA, 19 nt, Homo sapiens
  misc_RNA (1)...(19): siRNA sense strand
guuccaagauuguuguacu

SEQ ID NO: 1945039 - RNA, 19 nt, Homo sapiens
  misc_RNA (1)...(19): siRNA sense strand
acagagggauaagccuauu

SEQ ID NO: 1945040 - RNA, 19 nt, Homo sapiens
  misc_RNA (1)...(19): siRNA sense strand
ccccagaccugaaguuuau

SEQ ID NO: 1945041 - RNA, 19 nt, Homo sapiens
  misc_RNA (1)...(19): siRNA sense strand
ccgccaggcugcauucaag

SEQ ID NO: 1945042 - RNA, 19 nt, Homo sapiens
  misc_RNA (1)...(19): siRNA sense strand
aaccagauguugagcuaca

SEQ ID NO: 1945043 - RNA, 19 nt, Homo sapiens
  misc_RNA (1)...(19): siRNA sense strand
acggugcaguucagaauau

SEQ ID NO: 1945044 - RNA, 19 nt, Homo sapiens
  misc_RNA (1)...(19): siRNA sense strand
ccacggugcaguucagaau

SEQ ID NO: 1945045 - RNA, 19 nt, Homo sapiens
  misc_RNA (1)...(19): siRNA sense strand
uaaccacggugcaguucag

SEQ ID NO: 1945046 - RNA, 19 nt, Homo sapiens
  misc_RNA (1)...(19): siRNA sense strand
uacagaugccacagugaua

SEQ ID NO: 1945047 - RNA, 19 nt, Homo sapiens
  misc_RNA (1)...(19): siRNA sense strand
augaagacauccggaagaa

SEQ ID NO: 1945048 - RNA, 19 nt, Homo sapiens
  misc_RNA (1)...(19): siRNA sense strand
caacaagcagaaagccaau

SEQ ID NO: 1945049 - RNA, 19 nt, Homo sapiens
  misc_RNA (1)...(19): siRNA sense strand
uuugguugauggagaauug

SEQ ID NO: 1945050 - RNA, 19 nt, Homo sapiens
  misc_RNA (1)...(19): siRNA sense strand
cgaaugcaagcacugaaau

SEQ ID NO: 1945051 - RNA, 19 nt, Homo sapiens
  misc_RNA (1)...(19): siRNA sense strand
ccauauuaucccugccuua

SEQ ID NO: 1945052 - RNA, 19 nt, Homo sapiens
  misc_RNA (1)...(19): siRNA sense strand
ucaaguaucccagcucagu

SEQ ID NO: 1945053 - RNA, 19 nt, Homo sapiens
  misc_RNA (1)...(19): siRNA sense strand
gcugauuauuucaaguauc

SEQ ID NO: 1945054 - RNA, 19 nt, Homo sapiens
  misc_RNA (1)...(19): siRNA sense strand
agagggauaagccuauuga

SEQ ID NO: 1945055 - RNA, 19 nt, Homo sapiens
  misc_RNA (1)...(19): siRNA sense strand
uauguugacaggcuauuug

SEQ ID NO: 1945056 - RNA, 19 nt, Homo sapiens
  misc_RNA (1)...(19): siRNA sense strand
aagcagaaagccaaucuca

SEQ ID NO: 1945057 - RNA, 19 nt, Homo sapiens
  misc_RNA (1)...(19): siRNA sense strand
gcuauacccaggaguacau

SEQ ID NO: 1945058 - RNA, 19 nt, Homo sapiens
  misc_RNA (1)...(19): siRNA sense strand
ugccaugcuugcugauuau

SEQ ID NO: 1945059 - RNA, 19 nt, Homo sapiens
  misc_RNA (1)...(19): siRNA sense strand
ucgaugacccugguaaaug

SEQ ID NO: 1945060 - RNA, 19 nt, Homo sapiens
  misc_RNA (1)...(19): siRNA sense strand
ugaaaacaaugucaagucu

SEQ ID NO: 1945061 - RNA, 19 nt, Homo sapiens
  misc_RNA (1)...(19): siRNA sense strand
uaaaaggcuugaucaugau

SEQ ID NO: 1945062 - RNA, 19 nt, Homo sapiens
  misc_RNA (1)...(19): siRNA sense strand
gagauuacuagaggagaga

SEQ ID NO: 1945063 - RNA, 19 nt, Homo sapiens
  misc_RNA (1)...(19): siRNA sense strand
gugcaguaaggagagauua

SEQ ID NO: 1945064 - RNA, 19 nt, Homo sapiens
  misc_RNA (1)...(19): siRNA sense strand
guaaauguuuugguugaug

SEQ ID NO: 1945065 - RNA, 19 nt, Homo sapiens
  misc_RNA (1)...(19): siRNA sense strand
gcuguaaagggccagauca

SEQ ID NO: 1945066 - RNA, 19 nt, Homo sapiens
  misc_RNA (1)...(19): siRNA sense strand
caccucauggcacugcuua

SEQ ID NO: 1945067 - RNA, 19 nt, Homo sapiens
  misc_RNA (1)...(19): siRNA sense strand
ccagaccugaaguuuauug

SEQ ID NO: 1945068 - RNA, 19 nt, Homo sapiens
  misc_RNA (1)...(19): siRNA sense strand
ucgcuagcauaacugauca

SEQ ID NO: 1945069 - RNA, 19 nt, Homo sapiens
  misc_RNA (1)...(19): siRNA sense strand
ugaaugugcagugguguug

SEQ ID NO: 1945070 - RNA, 19 nt, Homo sapiens
  misc_RNA (1)...(19): siRNA sense strand
ccaugcuugcugauuauuu

SEQ ID NO: 1945071 - RNA, 19 nt, Homo sapiens
  misc_RNA (1)...(19): siRNA sense strand
cuacagagaaucgcuagca

SEQ ID NO: 1945072 - RNA, 19 nt, Homo sapiens
  misc_RNA (1)...(19): siRNA sense strand
guaucgaugacccugguaa

SEQ ID NO: 1945073 - RNA, 19 nt, Homo sapiens
  misc_RNA (1)...(19): siRNA sense strand
gcuagcagucgccacuaug

SEQ ID NO: 1945074 - RNA, 19 nt, Homo sapiens
  misc_RNA (1)...(19): siRNA sense strand
agaauuguuaccacagauu

SEQ ID NO: 1945075 - RNA, 19 nt, Homo sapiens
  misc_RNA (1)...(19): siRNA sense strand
ucgaaugcaagcacugaaa

SEQ ID NO: 1945076 - RNA, 19 nt, Homo sapiens
  misc_RNA (1)...(19): siRNA sense strand
ggagcuguuccaagauugu

SEQ ID NO: 1945077 - RNA, 19 nt, Homo sapiens
  misc_RNA (1)...(19): siRNA sense strand
uaucgaugacccugguaaa

SEQ ID NO: 1945078 - RNA, 19 nt, Homo sapiens
  misc_RNA (1)...(19): siRNA sense strand
gaacuccgccaggcugcau

SEQ ID NO: 1945079 - RNA, 19 nt, Homo sapiens
  misc_RNA (1)...(19): siRNA sense strand
agggauaagccuauugaga

SEQ ID NO: 1945080 - RNA, 19 nt, Homo sapiens
  misc_RNA (1)...(19): siRNA sense strand
gaagagguuucaggcagua

SEQ ID NO: 1945081 - RNA, 19 nt, Homo sapiens
  misc_RNA (1)...(19): siRNA sense strand
gugcucaucuuacuuguga

SEQ ID NO: 1945082 - RNA, 19 nt, Homo sapiens
  misc_RNA (1)...(19): siRNA sense strand
guucaugccugcacauuag

SEQ ID NO: 1945083 - RNA, 19 nt, Homo sapiens
  misc_RNA (1)...(19): siRNA sense strand
ccucuucacuuuaccagaa

SEQ ID NO: 1945084 - RNA, 19 nt, Homo sapiens
  misc_RNA (1)...(19): siRNA sense strand
gaagaaccgaggugagaga

SEQ ID NO: 1945085 - RNA, 19 nt, Homo sapiens
  misc_RNA (1)...(19): siRNA sense strand
agaacuaggugaugaagca

SEQ ID NO: 1945086 - RNA, 19 nt, Homo sapiens
  misc_RNA (1)...(19): siRNA sense strand
gaugaagcauuugauugug

SEQ ID NO: 1945087 - RNA, 19 nt, Homo sapiens
  misc_RNA (1)...(19): siRNA sense strand
uaccagaacuaggugauga

SEQ ID NO: 1945088 - RNA, 19 nt, Homo sapiens
  misc_RNA (1)...(19): siRNA sense strand
uuggcaaacuucugcguua

SEQ ID NO: 1945089 - RNA, 19 nt, Homo sapiens
  misc_RNA (1)...(19): siRNA sense strand
gaaucccucuucacuuuac

SEQ ID NO: 1945090 - RNA, 19 nt, Homo sapiens
  misc_RNA (1)...(19): siRNA sense strand
caucggaauccaaaucaaa

SEQ ID NO: 1945091 - RNA, 19 nt, Homo sapiens
  misc_RNA (1)...(19): siRNA sense strand
acuaggugaugaagcauuu

SEQ ID NO: 1945092 - RNA, 19 nt, Homo sapiens
  misc_RNA (1)...(19): siRNA sense strand
gagguuucaggcaguaaua

SEQ ID NO: 1945093 - RNA, 19 nt, Homo sapiens
  misc_RNA (1)...(19): siRNA sense strand
gcaaacuucugcguuacuc

SEQ ID NO: 1945094 - RNA, 19 nt, Homo sapiens
  misc_RNA (1)...(19): siRNA sense strand
gguucaugccugcacauua

SEQ ID NO: 1945095 - RNA, 19 nt, Homo sapiens
  misc_RNA (1)...(19): siRNA sense strand
ugaugaagcauuugauugu

SEQ ID NO: 1945096 - RNA, 19 nt, Homo sapiens
  misc_RNA (1)...(19): siRNA sense strand
ggugaugaagcauuugauu

SEQ ID NO: 1945097 - RNA, 19 nt, Homo sapiens
  misc_RNA (1)...(19): siRNA sense strand
aauuagagcuugggaacga

SEQ ID NO: 1945098 - RNA, 19 nt, Homo sapiens
  misc_RNA (1)...(19): siRNA sense strand
gugaugaagcauuugauug

SEQ ID NO: 1945099 - RNA, 19 nt, Homo sapiens
  misc_RNA (1)...(19): siRNA sense strand
ggugugcucaucuuacuug

SEQ ID NO: 1945100 - RNA, 19 nt, Homo sapiens
  misc_RNA (1)...(19): siRNA sense strand
gagacugggugugcucauc

SEQ ID NO: 1945101 - RNA, 19 nt, Homo sapiens
  misc_RNA (1)...(19): siRNA sense strand
uccaaugcgugucaguaaa

SEQ ID NO: 1945102 - RNA, 19 nt, Homo sapiens
  misc_RNA (1)...(19): siRNA sense strand
augaagcauuugauuguga

SEQ ID NO: 1945103 - RNA, 19 nt, Homo sapiens
  misc_RNA (1)...(19): siRNA sense strand
acugauuguuuccaaagaa

SEQ ID NO: 1945104 - RNA, 19 nt, Homo sapiens
  misc_RNA (1)...(19): siRNA sense strand
ccugagaagaggauuauuc

SEQ ID NO: 1945105 - RNA, 19 nt, Homo sapiens
  misc_RNA (1)...(19): siRNA sense strand
gcuccaaugcgugucagua

SEQ ID NO: 1945106 - RNA, 19 nt, Homo sapiens
  misc_RNA (1)...(19): siRNA sense strand
agaaucccucuucacuuua

SEQ ID NO: 1945107 - RNA, 19 nt, Homo sapiens
  misc_RNA (1)...(19): siRNA sense strand
gguuucaggcaguaauaaa

SEQ ID NO: 1945108 - RNA, 19 nt, Homo sapiens
  misc_RNA (1)...(19): siRNA sense strand
ugacuggggugaagagaug

SEQ ID NO: 1945109 - RNA, 19 nt, Homo sapiens
  misc_RNA (1)...(19): siRNA sense strand
ccaucggaauccaaaucaa

SEQ ID NO: 1945110 - RNA, 19 nt, Homo sapiens
  misc_RNA (1)...(19): siRNA sense strand
ccaccgagaaacugauugu

SEQ ID NO: 1945111 - RNA, 19 nt, Homo sapiens
  misc_RNA (1)...(19): siRNA sense strand
cugagaagaggauuauuca

SEQ ID NO: 1945112 - RNA, 19 nt, Homo sapiens
  misc_RNA (1)...(19): siRNA sense strand
cugauuguuuccaaagaau

SEQ ID NO: 1945113 - RNA, 19 nt, Homo sapiens
  misc_RNA (1)...(19): siRNA sense strand
gacugggugugcucaucuu

SEQ ID NO: 1945114 - RNA, 19 nt, Homo sapiens
  misc_RNA (1)...(19): siRNA sense strand
cuccaaugcgugucaguaa

SEQ ID NO: 1945115 - RNA, 19 nt, Homo sapiens
  misc_RNA (1)...(19): siRNA sense strand
ucacagcgcugauauaagu

SEQ ID NO: 1945116 - RNA, 19 nt, Homo sapiens
  misc_RNA (1)...(19): siRNA sense strand
gcaaaugguuccucagaag

SEQ ID NO: 1945117 - RNA, 19 nt, Homo sapiens
  misc_RNA (1)...(19): siRNA sense strand
gacgaggaguuacuaguuu

SEQ ID NO: 1945118 - RNA, 19 nt, Homo sapiens
  misc_RNA (1)...(19): siRNA sense strand
gaacaguaccguauaucuu

SEQ ID NO: 1945119 - RNA, 19 nt, Homo sapiens
  misc_RNA (1)...(19): siRNA sense strand
gagccauacuucccuauau

SEQ ID NO: 1945120 - RNA, 19 nt, Homo sapiens
  misc_RNA (1)...(19): siRNA sense strand
cagccaacguuuccaguuu

SEQ ID NO: 1945121 - RNA, 19 nt, Homo sapiens
  misc_RNA (1)...(19): siRNA sense strand
gaaccuugaagccuacaua

SEQ ID NO: 1945122 - RNA, 19 nt, Homo sapiens
  misc_RNA (1)...(19): siRNA sense strand
caagagaacaguaccguau

SEQ ID NO: 1945123 - RNA, 19 nt, Homo sapiens
  misc_RNA (1)...(19): siRNA sense strand
ccaaggcuguccaacaaug

SEQ ID NO: 1945124 - RNA, 19 nt, Homo sapiens
  misc_RNA (1)...(19): siRNA sense strand
uuucauagcucucaagucu

SEQ ID NO: 1945125 - RNA, 19 nt, Homo sapiens
  misc_RNA (1)...(19): siRNA sense strand
caagucuacugacaagaga

SEQ ID NO: 1945126 - RNA, 19 nt, Homo sapiens
  misc_RNA (1)...(19): siRNA sense strand
agagaacaguaccguauau

SEQ ID NO: 1945127 - RNA, 19 nt, Homo sapiens
  misc_RNA (1)...(19): siRNA sense strand
guagacaccucagcagcaa

SEQ ID NO: 1945128 - RNA, 19 nt, Homo sapiens
  misc_RNA (1)...(19): siRNA sense strand
ugccaaggcuguccaacaa

SEQ ID NO: 1945129 - RNA, 19 nt, Homo sapiens
  misc_RNA (1)...(19): siRNA sense strand
gcgcgaagccauccacaga

SEQ ID NO: 1945130 - RNA, 19 nt, Homo sapiens
  misc_RNA (1)...(19): siRNA sense strand
gcagcaggaggcaccuuua

SEQ ID NO: 1945131 - RNA, 19 nt, Homo sapiens
  misc_RNA (1)...(19): siRNA sense strand
gagauaaggaagagcagaa

SEQ ID NO: 1945132 - RNA, 19 nt, Homo sapiens
  misc_RNA (1)...(19): siRNA sense strand
gcucucaagucuacugaca

SEQ ID NO: 1945133 - RNA, 19 nt, Homo sapiens
  misc_RNA (1)...(19): siRNA sense strand
caaagacgaggaguuacua

SEQ ID NO: 1945134 - RNA, 19 nt, Homo sapiens
  misc_RNA (1)...(19): siRNA sense strand
ugacagcauagcuuucaua

SEQ ID NO: 1945135 - RNA, 19 nt, Homo sapiens
  misc_RNA (1)...(19): siRNA sense strand
ucauagcucucaagucuac

SEQ ID NO: 1945136 - RNA, 19 nt, Homo sapiens
  misc_RNA (1)...(19): siRNA sense strand
ggaaugcagccaacguuuc

SEQ ID NO: 1945137 - RNA, 19 nt, Homo sapiens
  misc_RNA (1)...(19): siRNA sense strand
ugagaaugcuauauuuggu

SEQ ID NO: 1945138 - RNA, 19 nt, Homo sapiens
  misc_RNA (1)...(19): siRNA sense strand
gccaacguuuccaguuuga

SEQ ID NO: 1945139 - RNA, 19 nt, Homo sapiens
  misc_RNA (1)...(19): siRNA sense strand
ugccaaagacgaggaguua

SEQ ID NO: 1945140 - RNA, 19 nt, Homo sapiens
  misc_RNA (1)...(19): siRNA sense strand
aacaguaccguauaucuuu

SEQ ID NO: 1945141 - RNA, 19 nt, Homo sapiens
  misc_RNA (1)...(19): siRNA sense strand
cagcaaaugguuccucaga

SEQ ID NO: 1945142 - RNA, 19 nt, Homo sapiens
  misc_RNA (1)...(19): siRNA sense strand
cuucacagcgcugauauaa

SEQ ID NO: 1945143 - RNA, 19 nt, Homo sapiens
  misc_RNA (1)...(19): siRNA sense strand
aggaagagcagaaccuuga

SEQ ID NO: 1945144 - RNA, 19 nt, Homo sapiens
  misc_RNA (1)...(19): siRNA sense strand
ccacagacuuccacaaccu

SEQ ID NO: 1945145 - RNA, 19 nt, Homo sapiens
  misc_RNA (1)...(19): siRNA sense strand
gcgaagccauccacagacu

SEQ ID NO: 1945146 - RNA, 19 nt, Homo sapiens
  misc_RNA (1)...(19): siRNA sense strand
cccugagaaugcuauauuu

SEQ ID NO: 1945147 - RNA, 19 nt, Homo sapiens
  misc_RNA (1)...(19): siRNA sense strand
ggaagagcagaaccuugaa

SEQ ID NO: 1945148 - RNA, 19 nt, Homo sapiens
  misc_RNA (1)...(19): siRNA sense strand
gcagccaacguuuccaguu

SEQ ID NO: 1945149 - RNA, 19 nt, Homo sapiens
  misc_RNA (1)...(19): siRNA sense strand
agacgaggaguuacuaguu

SEQ ID NO: 1945150 - RNA, 19 nt, Homo sapiens
  misc_RNA (1)...(19): siRNA sense strand
ucucaagucuacugacaag

SEQ ID NO: 1945151 - RNA, 19 nt, Homo sapiens
  misc_RNA (1)...(19): siRNA sense strand
ggccagagauaaggaagag

SEQ ID NO: 1945152 - RNA, 19 nt, Homo sapiens
  misc_RNA (1)...(19): siRNA sense strand
cgacaucccugagaaugcu

SEQ ID NO: 1945153 - RNA, 19 nt, Homo sapiens
  misc_RNA (1)...(19): siRNA sense strand
gggaaagaacugacugagu

SEQ ID NO: 1945154 - RNA, 19 nt, Homo sapiens
  misc_RNA (1)...(19): siRNA sense strand
aagagaacaguaccguaua

SEQ ID NO: 1945155 - RNA, 19 nt, Homo sapiens
  misc_RNA (1)...(19): siRNA sense strand
gaagagcagaaccuugaag

SEQ ID NO: 1945156 - RNA, 19 nt, Homo sapiens
  misc_RNA (1)...(19): siRNA sense strand
aggaguuacuaguuuggua

SEQ ID NO: 1945157 - RNA, 19 nt, Homo sapiens
  misc_RNA (1)...(19): siRNA sense strand
agacuucacagcgcugaua

SEQ ID NO: 1945158 - RNA, 19 nt, Homo sapiens
  misc_RNA (1)...(19): siRNA sense strand
acgaggaguuacuaguuug

SEQ ID NO: 1945159 - RNA, 19 nt, Homo sapiens
  misc_RNA (1)...(19): siRNA sense strand
caacguuuccaguuugagu

SEQ ID NO: 1945160 - RNA, 19 nt, Homo sapiens
  misc_RNA (1)...(19): siRNA sense strand
ccaaagacgaggaguuacu

SEQ ID NO: 1945161 - RNA, 19 nt, Homo sapiens
  misc_RNA (1)...(19): siRNA sense strand
ugagccauacuucccuaua

SEQ ID NO: 1945162 - RNA, 19 nt, Homo sapiens
  misc_RNA (1)...(19): siRNA sense strand
ccugcgacaucccugagaa

SEQ ID NO: 1945163 - RNA, 19 nt, Homo sapiens
  misc_RNA (1)...(19): siRNA sense strand
acaguaccguauaucuuuc

SEQ ID NO: 1945164 - RNA, 19 nt, Homo sapiens
  misc_RNA (1)...(19): siRNA sense strand
ccugagaaugcuauauuug

SEQ ID NO: 1945165 - RNA, 19 nt, Homo sapiens
  misc_RNA (1)...(19): siRNA sense strand
agcaaaugguuccucagaa

SEQ ID NO: 1945166 - RNA, 19 nt, Homo sapiens
  misc_RNA (1)...(19): siRNA sense strand
gacagcauagcuuucauag

SEQ ID NO: 1945167 - RNA, 19 nt, Homo sapiens
  misc_RNA (1)...(19): siRNA sense strand
ccaaucggccagagauaag

SEQ ID NO: 1945168 - RNA, 19 nt, Homo sapiens
  misc_RNA (1)...(19): siRNA sense strand
agccaacguuuccaguuug

SEQ ID NO: 1945169 - RNA, 19 nt, Homo sapiens
  misc_RNA (1)...(19): siRNA sense strand
gaaugcagccaacguuucc

SEQ ID NO: 1945170 - RNA, 19 nt, Homo sapiens
  misc_RNA (1)...(19): siRNA sense strand
ucaagucuacugacaagag

SEQ ID NO: 1945171 - RNA, 19 nt, Homo sapiens
  misc_RNA (1)...(19): siRNA sense strand
ucccugagaaugcuauauu

SEQ ID NO: 1945172 - RNA, 19 nt, Homo sapiens
  misc_RNA (1)...(19): siRNA sense strand
gagaacaguaccguauauc

SEQ ID NO: 1945173 - RNA, 19 nt, Homo sapiens
  misc_RNA (1)...(19): siRNA sense strand
gguccaaucggccagagau

SEQ ID NO: 1945174 - RNA, 19 nt, Homo sapiens
  misc_RNA (1)...(19): siRNA sense strand
agacaccucagcagcaaau

SEQ ID NO: 1945175 - RNA, 19 nt, Homo sapiens
  misc_RNA (1)...(19): siRNA sense strand
ccuugaagccuacauaaaa

SEQ ID NO: 1945176 - RNA, 19 nt, Homo sapiens
  misc_RNA (1)...(19): siRNA sense strand
gaaaugaccuggaauaaca

SEQ ID NO: 1945177 - RNA, 19 nt, Homo sapiens
  misc_RNA (1)...(19): siRNA sense strand
ggaacgaccugucugagaa

SEQ ID NO: 1945178 - RNA, 19 nt, Homo sapiens
  misc_RNA (1)...(19): siRNA sense strand
caagaagugugaucagaaa

SEQ ID NO: 1945179 - RNA, 19 nt, Homo sapiens
  misc_RNA (1)...(19): siRNA sense strand
aaacugauguggauuaaga

SEQ ID NO: 1945180 - RNA, 19 nt, Homo sapiens
  misc_RNA (1)...(19): siRNA sense strand
gaagguguaucucaaagug

SEQ ID NO: 1945181 - RNA, 19 nt, Homo sapiens
  misc_RNA (1)...(19): siRNA sense strand
aagaguacaucuccaauaa

SEQ ID NO: 1945182 - RNA, 19 nt, Homo sapiens
  misc_RNA (1)...(19): siRNA sense strand
gaacaaccuuccauccaau

SEQ ID NO: 1945183 - RNA, 19 nt, Homo sapiens
  misc_RNA (1)...(19): siRNA sense strand
gagaaacugauguggauua

SEQ ID NO: 1945184 - RNA, 19 nt, Homo sapiens
  misc_RNA (1)...(19): siRNA sense strand
acaaggagcuuccggagaa

SEQ ID NO: 1945185 - RNA, 19 nt, Homo sapiens
  misc_RNA (1)...(19): siRNA sense strand
ggguggagauuucuaauga

SEQ ID NO: 1945186 - RNA, 19 nt, Homo sapiens
  misc_RNA (1)...(19): siRNA sense strand
ggaauaacauggaaaagaa

SEQ ID NO: 1945187 - RNA, 19 nt, Homo sapiens
  misc_RNA (1)...(19): siRNA sense strand
ggacgaggaugaagaagag

SEQ ID NO: 1945188 - RNA, 19 nt, Homo sapiens
  misc_RNA (1)...(19): siRNA sense strand
uaaccaagauucuguccaa

SEQ ID NO: 1945189 - RNA, 19 nt, Homo sapiens
  misc_RNA (1)...(19): siRNA sense strand
gaagaagguguaucucaaa

SEQ ID NO: 1945190 - RNA, 19 nt, Homo sapiens
  misc_RNA (1)...(19): siRNA sense strand
ggaagcugcugucccagaa

SEQ ID NO: 1945191 - RNA, 19 nt, Homo sapiens
  misc_RNA (1)...(19): siRNA sense strand
ccaagaagccucccaugaa

SEQ ID NO: 1945192 - RNA, 19 nt, Homo sapiens
  misc_RNA (1)...(19): siRNA sense strand
ggucucagcucucggacaa

SEQ ID NO: 1945193 - RNA, 19 nt, Homo sapiens
  misc_RNA (1)...(19): siRNA sense strand
cuaaugaggugaggaaguu

SEQ ID NO: 1945194 - RNA, 19 nt, Homo sapiens
  misc_RNA (1)...(19): siRNA sense strand
aggaagacaugcugacuuu

SEQ ID NO: 1945195 - RNA, 19 nt, Homo sapiens
  misc_RNA (1)...(19): siRNA sense strand
ccaagaagaugaaauucca

SEQ ID NO: 1945196 - RNA, 19 nt, Homo sapiens
  misc_RNA (1)...(19): siRNA sense strand
gaaggacgccuaucacaag

SEQ ID NO: 1945197 - RNA, 19 nt, Homo sapiens
  misc_RNA (1)...(19): siRNA sense strand
gaguacaucuccaauaaac

SEQ ID NO: 1945198 - RNA, 19 nt, Homo sapiens
  misc_RNA (1)...(19): siRNA sense strand
gaaguuccguacauugaca

SEQ ID NO: 1945199 - RNA, 19 nt, Homo sapiens
  misc_RNA (1)...(19): siRNA sense strand
agaggaagaugaugagaau

SEQ ID NO: 1945200 - RNA, 19 nt, Homo sapiens
  misc_RNA (1)...(19): siRNA sense strand
gaagagaagaugcugaaca

SEQ ID NO: 1945201 - RNA, 19 nt, Homo sapiens
  misc_RNA (1)...(19): siRNA sense strand
gagacuauauccagaagca

SEQ ID NO: 1945202 - RNA, 19 nt, Homo sapiens
  misc_RNA (1)...(19): siRNA sense strand
caagaaacacccagacuuc

SEQ ID NO: 1945203 - RNA, 19 nt, Homo sapiens
  misc_RNA (1)...(19): siRNA sense strand
caagaagccucccaugaac

SEQ ID NO: 1945204 - RNA, 19 nt, Homo sapiens
  misc_RNA (1)...(19): siRNA sense strand
agaagaagguguaucucaa

SEQ ID NO: 1945205 - RNA, 19 nt, Homo sapiens
  misc_RNA (1)...(19): siRNA sense strand
agaagaagaaggccaagua

SEQ ID NO: 1945206 - RNA, 19 nt, Homo sapiens
  misc_RNA (1)...(19): siRNA sense strand
gaaauauauucaggacuuc

SEQ ID NO: 1945207 - RNA, 19 nt, Homo sapiens
  misc_RNA (1)...(19): siRNA sense strand
agaacaaccuuccauccaa

SEQ ID NO: 1945208 - RNA, 19 nt, Homo sapiens
  misc_RNA (1)...(19): siRNA sense strand
caaaagagcugaggagauc

SEQ ID NO: 1945209 - RNA, 19 nt, Homo sapiens
  misc_RNA (1)...(19): siRNA sense strand
ggaggaugaugaagaggau

SEQ ID NO: 1945210 - RNA, 19 nt, Homo sapiens
  misc_RNA (1)...(19): siRNA sense strand
ccauggaaaugaccuggaa

SEQ ID NO: 1945211 - RNA, 19 nt, Homo sapiens
  misc_RNA (1)...(19): siRNA sense strand
agagagagcugagugagau

SEQ ID NO: 1945212 - RNA, 19 nt, Homo sapiens
  misc_RNA (1)...(19): siRNA sense strand
aaugacagcuccaaguuca

SEQ ID NO: 1945213 - RNA, 19 nt, Homo sapiens
  misc_RNA (1)...(19): siRNA sense strand
cgaugaggaugaagauaau

SEQ ID NO: 1945214 - RNA, 19 nt, Homo sapiens
  misc_RNA (1)...(19): siRNA sense strand
ggaugacgaugaggaugaa

SEQ ID NO: 1945215 - RNA, 19 nt, Homo sapiens
  misc_RNA (1)...(19): siRNA sense strand
aaagaguacaucuccaaua

SEQ ID NO: 1945216 - RNA, 19 nt, Homo sapiens
  misc_RNA (1)...(19): siRNA sense strand
ggacgccuaucacaagaag

SEQ ID NO: 1945217 - RNA, 19 nt, Homo sapiens
  misc_RNA (1)...(19): siRNA sense strand
gaaacuccacccugagaug

SEQ ID NO: 1945218 - RNA, 19 nt, Homo sapiens
  misc_RNA (1)...(19): siRNA sense strand
ggaccgugcagcauauaaa

SEQ ID NO: 1945219 - RNA, 19 nt, Homo sapiens
  misc_RNA (1)...(19): siRNA sense strand
aagagaagaugcugaacau

SEQ ID NO: 1945220 - RNA, 19 nt, Homo sapiens
  misc_RNA (1)...(19): siRNA sense strand
gagaagaagaagaugaaau

SEQ ID NO: 1945221 - RNA, 19 nt, Homo sapiens
  misc_RNA (1)...(19): siRNA sense strand
ggaugagaaugaagaggau

SEQ ID NO: 1945222 - RNA, 19 nt, Homo sapiens
  misc_RNA (1)...(19): siRNA sense strand
agaaacugauguggauuaa

SEQ ID NO: 1945223 - RNA, 19 nt, Homo sapiens
  misc_RNA (1)...(19): siRNA sense strand
gaagaaggccaaguacaag

SEQ ID NO: 1945224 - RNA, 19 nt, Homo sapiens
  misc_RNA (1)...(19): siRNA sense strand
agaagaaggccaaguacaa

SEQ ID NO: 1945225 - RNA, 19 nt, Homo sapiens
  misc_RNA (1)...(19): siRNA sense strand
gggaagagaagaugcugaa

SEQ ID NO: 1945226 - RNA, 19 nt, Homo sapiens
  misc_RNA (1)...(19): siRNA sense strand
acgaggagaucaugagaga

SEQ ID NO: 1945227 - RNA, 19 nt, Homo sapiens
  misc_RNA (1)...(19): siRNA sense strand
ccaaugacagcuccaaguu

SEQ ID NO: 1945228 - RNA, 19 nt, Homo sapiens
  misc_RNA (1)...(19): siRNA sense strand
ccaggaccgugcagcauau

SEQ ID NO: 1945229 - RNA, 19 nt, Homo sapiens
  misc_RNA (1)...(19): siRNA sense strand
ccagaaggagcacuacaaa

SEQ ID NO: 1945230 - RNA, 19 nt, Homo sapiens
  misc_RNA (1)...(19): siRNA sense strand
caugaacgguuaccagaag

SEQ ID NO: 1945231 - RNA, 19 nt, Homo sapiens
  misc_RNA (1)...(19): siRNA sense strand
gaccuggaauaacauggaa

SEQ ID NO: 1945232 - RNA, 19 nt, Homo sapiens
  misc_RNA (1)...(19): siRNA sense strand
uggaaugcaugaagaacaa

SEQ ID NO: 1945233 - RNA, 19 nt, Homo sapiens
  misc_RNA (1)...(19): siRNA sense strand
aaucggacaucccagagaa

SEQ ID NO: 1945234 - RNA, 19 nt, Homo sapiens
  misc_RNA (1)...(19): siRNA sense strand
cgaggaggaugaugaagag

SEQ ID NO: 1945235 - RNA, 19 nt, Homo sapiens
  misc_RNA (1)...(19): siRNA sense strand
gaaaagaaggagaaacuga

SEQ ID NO: 1945236 - RNA, 19 nt, Homo sapiens
  misc_RNA (1)...(19): siRNA sense strand
gagagacuauauccagaag

SEQ ID NO: 1945237 - RNA, 19 nt, Homo sapiens
  misc_RNA (1)...(19): siRNA sense strand
gaagacaugcugacuuugc

SEQ ID NO: 1945238 - RNA, 19 nt, Homo sapiens
  misc_RNA (1)...(19): siRNA sense strand
cccaggagcugcuguccaa

SEQ ID NO: 1945239 - RNA, 19 nt, Homo sapiens
  misc_RNA (1)...(19): siRNA sense strand
ugacuuugcuggaaugcau

SEQ ID NO: 1945240 - RNA, 19 nt, Homo sapiens
  misc_RNA (1)...(19): siRNA sense strand
gagaaggacgccuaucaca

SEQ ID NO: 1945241 - RNA, 19 nt, Homo sapiens
  misc_RNA (1)...(19): siRNA sense strand
cgacgaggaugacgaugag

SEQ ID NO: 1945242 - RNA, 19 nt, Homo sapiens
  misc_RNA (1)...(19): siRNA sense strand
ggaaaugaccuggaauaac

SEQ ID NO: 1945243 - RNA, 19 nt, Homo sapiens
  misc_RNA (1)...(19): siRNA sense strand
gaagaagaaggccaaguac

SEQ ID NO: 1945244 - RNA, 19 nt, Homo sapiens
  misc_RNA (1)...(19): siRNA sense strand
caagaagccagcccaggaa

SEQ ID NO: 1945245 - RNA, 19 nt, Homo sapiens
  misc_RNA (1)...(19): siRNA sense strand
cacccagacuucccaaaga

SEQ ID NO: 1945246 - RNA, 19 nt, Homo sapiens
  misc_RNA (1)...(19): siRNA sense strand
guaagagcaugaccaagcu

SEQ ID NO: 1945247 - RNA, 19 nt, Homo sapiens
  misc_RNA (1)...(19): siRNA sense strand
gagagaaacaggaguucga

SEQ ID NO: 1945248 - RNA, 19 nt, Homo sapiens
  misc_RNA (1)...(19): siRNA sense strand
ggacuuccagagagagaaa

SEQ ID NO: 1945249 - RNA, 19 nt, Homo sapiens
  misc_RNA (1)...(19): siRNA sense strand
ggaaggaguacgaggagau

SEQ ID NO: 1945250 - RNA, 19 nt, Homo sapiens
  misc_RNA (1)...(19): siRNA sense strand
caccuggaccucuggguua

SEQ ID NO: 1945251 - RNA, 19 nt, Homo sapiens
  misc_RNA (1)...(19): siRNA sense strand
gagagagagcugagugaga

SEQ ID NO: 1945252 - RNA, 19 nt, Homo sapiens
  misc_RNA (1)...(19): siRNA sense strand
gaucaugagagacuauauc

SEQ ID NO: 1945253 - RNA, 19 nt, Homo sapiens
  misc_RNA (1)...(19): siRNA sense strand
ccaauaaacguaagagcau

SEQ ID NO: 1945254 - RNA, 19 nt, Homo sapiens
  misc_RNA (1)...(19): siRNA sense strand
guacaucuccaauaaacgu

SEQ ID NO: 1945255 - RNA, 19 nt, Homo sapiens
  misc_RNA (1)...(19): siRNA sense strand
aggagaaacugauguggau

SEQ ID NO: 1945256 - RNA, 19 nt, Homo sapiens
  misc_RNA (1)...(19): siRNA sense strand
ucaagaaacacccagacuu

SEQ ID NO: 1945257 - RNA, 19 nt, Homo sapiens
  misc_RNA (1)...(19): siRNA sense strand
ugaaccaccugccgcugaa

SEQ ID NO: 1945258 - RNA, 19 nt, Homo sapiens
  misc_RNA (1)...(19): siRNA sense strand
gaaggagaaggacgccuau

SEQ ID NO: 1945259 - RNA, 19 nt, Homo sapiens
  misc_RNA (1)...(19): siRNA sense strand
gcgaaacuccacccugaga

SEQ ID NO: 1945260 - RNA, 19 nt, Homo sapiens
  misc_RNA (1)...(19): siRNA sense strand
ggccagaugccacuacgaa

SEQ ID NO: 1945261 - RNA, 19 nt, Homo sapiens
  misc_RNA (1)...(19): siRNA sense strand
aaaagaggcugaaauggau

SEQ ID NO: 1945262 - RNA, 19 nt, Homo sapiens
  misc_RNA (1)...(19): siRNA sense strand
aauccagaaugccaagaaa

SEQ ID NO: 1945263 - RNA, 19 nt, Homo sapiens
  misc_RNA (1)...(19): siRNA sense strand
acgaugaggaugaagauaa

SEQ ID NO: 1945264 - RNA, 19 nt, Homo sapiens
  misc_RNA (1)...(19): siRNA sense strand
aagaagaggaagaugauga

SEQ ID NO: 1945265 - RNA, 19 nt, Homo sapiens
  misc_RNA (1)...(19): siRNA sense strand
ugaagaagaggaagaugau

SEQ ID NO: 1945266 - RNA, 19 nt, Homo sapiens
  misc_RNA (1)...(19): siRNA sense strand
gcucaaauggguggagauu

SEQ ID NO: 1945267 - RNA, 19 nt, Homo sapiens
  misc_RNA (1)...(19): siRNA sense strand
ugaaagccauggaaaugac

SEQ ID NO: 1945268 - RNA, 19 nt, Homo sapiens
  misc_RNA (1)...(19): siRNA sense strand
gaggagaucaugagagacu

SEQ ID NO: 1945269 - RNA, 19 nt, Homo sapiens
  misc_RNA (1)...(19): siRNA sense strand
ugacagcuccaaguucaaa

SEQ ID NO: 1945270 - RNA, 19 nt, Homo sapiens
  misc_RNA (1)...(19): siRNA sense strand
gagaucaugagagacuaua

SEQ ID NO: 1945271 - RNA, 19 nt, Homo sapiens
  misc_RNA (1)...(19): siRNA sense strand
gaccuaaccaagauucugu

SEQ ID NO: 1945272 - RNA, 19 nt, Homo sapiens
  misc_RNA (1)...(19): siRNA sense strand
cgaggacgaggaugaagaa

SEQ ID NO: 1945273 - RNA, 19 nt, Homo sapiens
  misc_RNA (1)...(19): siRNA sense strand
guacauugacagaauugau

SEQ ID NO: 1945274 - RNA, 19 nt, Homo sapiens
  misc_RNA (1)...(19): siRNA sense strand
cuacgaaggaggugaagga

SEQ ID NO: 1945275 - RNA, 19 nt, Homo sapiens
  misc_RNA (1)...(19): siRNA sense strand
gaugaaauuccagggagaa

SEQ ID NO: 1945276 - RNA, 19 nt, Homo sapiens
  misc_RNA (1)...(19): siRNA sense strand
guagaagaauggcugauua

SEQ ID NO: 1945277 - RNA, 19 nt, Homo sapiens
  misc_RNA (1)...(19): siRNA sense strand
gcucagaguucaugaaauc

SEQ ID NO: 1945278 - RNA, 19 nt, Homo sapiens
  misc_RNA (1)...(19): siRNA sense strand
gagccacucuaucaauuaa

SEQ ID NO: 1945279 - RNA, 19 nt, Homo sapiens
  misc_RNA (1)...(19): siRNA sense strand
gaagauguccggucaaagu

SEQ ID NO: 1945280 - RNA, 19 nt, Homo sapiens
  misc_RNA (1)...(19): siRNA sense strand
uacccggacuuuagaauua

SEQ ID NO: 1945281 - RNA, 19 nt, Homo sapiens
  misc_RNA (1)...(19): siRNA sense strand
gaagaauggcugauuaugu

SEQ ID NO: 1945282 - RNA, 19 nt, Homo sapiens
  misc_RNA (1)...(19): siRNA sense strand
gcagccagcuauaugcaaa

SEQ ID NO: 1945283 - RNA, 19 nt, Homo sapiens
  misc_RNA (1)...(19): siRNA sense strand
gaaagaaccauuccugucu

SEQ ID NO: 1945284 - RNA, 19 nt, Homo sapiens
  misc_RNA (1)...(19): siRNA sense strand
aagaauggcugauuaugug

SEQ ID NO: 1945285 - RNA, 19 nt, Homo sapiens
  misc_RNA (1)...(19): siRNA sense strand
ugaaaguccuguaaagugu

SEQ ID NO: 1945286 - RNA, 19 nt, Homo sapiens
  misc_RNA (1)...(19): siRNA sense strand
gaaaauacccggacuuuag

SEQ ID NO: 1945287 - RNA, 19 nt, Homo sapiens
  misc_RNA (1)...(19): siRNA sense strand
cgcaaaagcuacauuguua

SEQ ID NO: 1945288 - RNA, 19 nt, Homo sapiens
  misc_RNA (1)...(19): siRNA sense strand
ccagcuauaugcaaauguu

SEQ ID NO: 1945289 - RNA, 19 nt, Homo sapiens
  misc_RNA (1)...(19): siRNA sense strand
agaauuaccuggcccaucu

SEQ ID NO: 1945290 - RNA, 19 nt, Homo sapiens
  misc_RNA (1)...(19): siRNA sense strand
cugauuaugugacuuguga

SEQ ID NO: 1945291 - RNA, 19 nt, Homo sapiens
  misc_RNA (1)...(19): siRNA sense strand
ucuagaugcuggacaagaa

SEQ ID NO: 1945292 - RNA, 19 nt, Homo sapiens
  misc_RNA (1)...(19): siRNA sense strand
ccaguugacucuuccuuag

SEQ ID NO: 1945293 - RNA, 19 nt, Homo sapiens
  misc_RNA (1)...(19): siRNA sense strand
ggagaaagcgcaaaagcua

SEQ ID NO: 1945294 - RNA, 19 nt, Homo sapiens
  misc_RNA (1)...(19): siRNA sense strand
aagaagauguccggucaaa

SEQ ID NO: 1945295 - RNA, 19 nt, Homo sapiens
  misc_RNA (1)...(19): siRNA sense strand
augcaaauguucaguguug

SEQ ID NO: 1945296 - RNA, 19 nt, Homo sapiens
  misc_RNA (1)...(19): siRNA sense strand
gaaaguuaagcacgcagaa

SEQ ID NO: 1945297 - RNA, 19 nt, Homo sapiens
  misc_RNA (1)...(19): siRNA sense strand
cgagccacucuaucaauua

SEQ ID NO: 1945298 - RNA, 19 nt, Homo sapiens
  misc_RNA (1)...(19): siRNA sense strand
uggaauugaucgaaggauu

SEQ ID NO: 1945299 - RNA, 19 nt, Homo sapiens
  misc_RNA (1)...(19): siRNA sense strand
gcagagugguagaaagaac

SEQ ID NO: 1945300 - RNA, 19 nt, Homo sapiens
  misc_RNA (1)...(19): siRNA sense strand
gccuuuagguaccgaagaa

SEQ ID NO: 1945301 - RNA, 19 nt, Homo sapiens
  misc_RNA (1)...(19): siRNA sense strand
aaauagaaaccaaccaguu

SEQ ID NO: 1945302 - RNA, 19 nt, Homo sapiens
  misc_RNA (1)...(19): siRNA sense strand
gugcagagugguagaaaga

SEQ ID NO: 1945303 - RNA, 19 nt, Homo sapiens
  misc_RNA (1)...(19): siRNA sense strand
gguagaagaauggcugauu

SEQ ID NO: 1945304 - RNA, 19 nt, Homo sapiens
  misc_RNA (1)...(19): siRNA sense strand
ugagaccgguagaagaaug

SEQ ID NO: 1945305 - RNA, 19 nt, Homo sapiens
  misc_RNA (1)...(19): siRNA sense strand
gccacucuaucaauuaaca

SEQ ID NO: 1945306 - RNA, 19 nt, Homo sapiens
  misc_RNA (1)...(19): siRNA sense strand
gggucuagaugcuggacaa

SEQ ID NO: 1945307 - RNA, 19 nt, Homo sapiens
  misc_RNA (1)...(19): siRNA sense strand
acgagccacucuaucaauu

SEQ ID NO: 1945308 - RNA, 19 nt, Homo sapiens
  misc_RNA (1)...(19): siRNA sense strand
uguuaugucuccugaaagu

SEQ ID NO: 1945309 - RNA, 19 nt, Homo sapiens
  misc_RNA (1)...(19): siRNA sense strand
aaaacuaccuugccuuuag

SEQ ID NO: 1945310 - RNA, 19 nt, Homo sapiens
  misc_RNA (1)...(19): siRNA sense strand
auuguuaugucuccugaaa

SEQ ID NO: 1945311 - RNA, 19 nt, Homo sapiens
  misc_RNA (1)...(19): siRNA sense strand
uagaagaauggcugauuau

SEQ ID NO: 1945312 - RNA, 19 nt, Homo sapiens
  misc_RNA (1)...(19): siRNA sense strand
ucugagaccgguagaagaa

SEQ ID NO: 1945313 - RNA, 19 nt, Homo sapiens
  misc_RNA (1)...(19): siRNA sense strand
guucaugaaaucaagcauu

SEQ ID NO: 1945314 - RNA, 19 nt, Homo sapiens
  misc_RNA (1)...(19): siRNA sense strand
cccaacagccaaccugaaa

SEQ ID NO: 1945315 - RNA, 19 nt, Homo sapiens
  misc_RNA (1)...(19): siRNA sense strand
cugaaaguccuguaaagug

SEQ ID NO: 1945316 - RNA, 19 nt, Homo sapiens
  misc_RNA (1)...(19): siRNA sense strand
gaagaagauguccggucaa

SEQ ID NO: 1945317 - RNA, 19 nt, Homo sapiens
  misc_RNA (1)...(19): siRNA sense strand
cagaguucaugaaaucaag

SEQ ID NO: 1945318 - RNA, 19 nt, Homo sapiens
  misc_RNA (1)...(19): siRNA sense strand
gauuaugugacuugugaga

SEQ ID NO: 1945319 - RNA, 19 nt, Homo sapiens
  misc_RNA (1)...(19): siRNA sense strand
ucagcuuccuacucagaaa

SEQ ID NO: 1945320 - RNA, 19 nt, Homo sapiens
  misc_RNA (1)...(19): siRNA sense strand
aaacuaccuugccuuuagg

SEQ ID NO: 1945321 - RNA, 19 nt, Homo sapiens
  misc_RNA (1)...(19): siRNA sense strand
uuaccuggcccaucugaga

SEQ ID NO: 1945322 - RNA, 19 nt, Homo sapiens
  misc_RNA (1)...(19): siRNA sense strand
uacacgagccacucuauca

SEQ ID NO: 1945323 - RNA, 19 nt, Homo sapiens
  misc_RNA (1)...(19): siRNA sense strand
aagauguccggucaaagua

SEQ ID NO: 1945324 - RNA, 19 nt, Homo sapiens
  misc_RNA (1)...(19): siRNA sense strand
gcgcaaaagcuacauuguu

SEQ ID NO: 1945325 - RNA, 19 nt, Homo sapiens
  misc_RNA (1)...(19): siRNA sense strand
aaaguuaagcacgcagaaa

SEQ ID NO: 1945326 - RNA, 19 nt, Homo sapiens
  misc_RNA (1)...(19): siRNA sense strand
ucagaguucaugaaaucaa

SEQ ID NO: 1945327 - RNA, 19 nt, Homo sapiens
  misc_RNA (1)...(19): siRNA sense strand
caaaagcuacauuguuaug

SEQ ID NO: 1945328 - RNA, 19 nt, Homo sapiens
  misc_RNA (1)...(19): siRNA sense strand
gcagcagccagcuauaugc

SEQ ID NO: 1945329 - RNA, 19 nt, Homo sapiens
  misc_RNA (1)...(19): siRNA sense strand
auaugcaaauguucagugu

SEQ ID NO: 1945330 - RNA, 19 nt, Homo sapiens
  misc_RNA (1)...(19): siRNA sense strand
ggacagcauugcccuauua

SEQ ID NO: 1945331 - RNA, 19 nt, Homo sapiens
  misc_RNA (1)...(19): siRNA sense strand
gagagugaauuacaaguuu

SEQ ID NO: 1945332 - RNA, 19 nt, Homo sapiens
  misc_RNA (1)...(19): siRNA sense strand
gagaagcucugguuagguu

SEQ ID NO: 1945333 - RNA, 19 nt, Homo sapiens
  misc_RNA (1)...(19): siRNA sense strand
gcacagaagugucauaaaa

SEQ ID NO: 1945334 - RNA, 19 nt, Homo sapiens
  misc_RNA (1)...(19): siRNA sense strand
gcagcaagauggaacuuau

SEQ ID NO: 1945335 - RNA, 19 nt, Homo sapiens
  misc_RNA (1)...(19): siRNA sense strand
gaacggagaagcucugguu

SEQ ID NO: 1945336 - RNA, 19 nt, Homo sapiens
  misc_RNA (1)...(19): siRNA sense strand
guaguucagucucucgaua

SEQ ID NO: 1945337 - RNA, 19 nt, Homo sapiens
  misc_RNA (1)...(19): siRNA sense strand
ggccacagcugaagaagug

SEQ ID NO: 1945338 - RNA, 19 nt, Homo sapiens
  misc_RNA (1)...(19): siRNA sense strand
agauggaacuuauugauga

SEQ ID NO: 1945339 - RNA, 19 nt, Homo sapiens
  misc_RNA (1)...(19): siRNA sense strand
ccaaugagguagcccaguu

SEQ ID NO: 1945340 - RNA, 19 nt, Homo sapiens
  misc_RNA (1)...(19): siRNA sense strand
ccacagauauucguacuca

SEQ ID NO: 1945341 - RNA, 19 nt, Homo sapiens
  misc_RNA (1)...(19): siRNA sense strand
gaaggcauccucuuuguca

SEQ ID NO: 1945342 - RNA, 19 nt, Homo sapiens
  misc_RNA (1)...(19): siRNA sense strand
gaggaagcauaaagacuug

SEQ ID NO: 1945343 - RNA, 19 nt, Homo sapiens
  misc_RNA (1)...(19): siRNA sense strand
gcaccgagaccuagcacua

SEQ ID NO: 1945344 - RNA, 19 nt, Homo sapiens
  misc_RNA (1)...(19): siRNA sense strand
ggaguucgccacagauauu

SEQ ID NO: 1945345 - RNA, 19 nt, Homo sapiens
  misc_RNA (1)...(19): siRNA sense strand
auaaagacuuguuggguaa

SEQ ID NO: 1945346 - RNA, 19 nt, Homo sapiens
  misc_RNA (1)...(19): siRNA sense strand
ucaaaggacucaauauugc

SEQ ID NO: 1945347 - RNA, 19 nt, Homo sapiens
  misc_RNA (1)...(19): siRNA sense strand
uuucagagccuuauaauca

SEQ ID NO: 1945348 - RNA, 19 nt, Homo sapiens
  misc_RNA (1)...(19): siRNA sense strand
ugaggaauaugcacagaau

SEQ ID NO: 1945349 - RNA, 19 nt, Homo sapiens
  misc_RNA (1)...(19): siRNA sense strand
cagagagagugaauuacaa

SEQ ID NO: 1945350 - RNA, 19 nt, Homo sapiens
  misc_RNA (1)...(19): siRNA sense strand
caaggaaaaucaagucauu

SEQ ID NO: 1945351 - RNA, 19 nt, Homo sapiens
  misc_RNA (1)...(19): siRNA sense strand
cccgguauauugagguuua

SEQ ID NO: 1945352 - RNA, 19 nt, Homo sapiens
  misc_RNA (1)...(19): siRNA sense strand
uauggagccucucaaguug

SEQ ID NO: 1945353 - RNA, 19 nt, Homo sapiens
  misc_RNA (1)...(19): siRNA sense strand
aguacuaccucagcaauuu

SEQ ID NO: 1945354 - RNA, 19 nt, Homo sapiens
  misc_RNA (1)...(19): siRNA sense strand
caaagcaacaggugaagau

SEQ ID NO: 1945355 - RNA, 19 nt, Homo sapiens
  misc_RNA (1)...(19): siRNA sense strand
gagaugccuuuauccagau

SEQ ID NO: 1945356 - RNA, 19 nt, Homo sapiens
  misc_RNA (1)...(19): siRNA sense strand
gcagcacuuugucugaaug

SEQ ID NO: 1945357 - RNA, 19 nt, Homo sapiens
  misc_RNA (1)...(19): siRNA sense strand
aaacaugaaggacagauau

SEQ ID NO: 1945358 - RNA, 19 nt, Homo sapiens
  misc_RNA (1)...(19): siRNA sense strand
gcaagauggaacuuauuga

SEQ ID NO: 1945359 - RNA, 19 nt, Homo sapiens
  misc_RNA (1)...(19): siRNA sense strand
caagauggaacuuauugau

SEQ ID NO: 1945360 - RNA, 19 nt, Homo sapiens
  misc_RNA (1)...(19): siRNA sense strand
ccagagagagugaauuaca

SEQ ID NO: 1945361 - RNA, 19 nt, Homo sapiens
  misc_RNA (1)...(19): siRNA sense strand
ugaggaagcauaaagacuu

SEQ ID NO: 1945362 - RNA, 19 nt, Homo sapiens
  misc_RNA (1)...(19): siRNA sense strand
gaugauaacaccguaguca

SEQ ID NO: 1945363 - RNA, 19 nt, Homo sapiens
  misc_RNA (1)...(19): siRNA sense strand
gauggaacuuauugaugau

SEQ ID NO: 1945364 - RNA, 19 nt, Homo sapiens
  misc_RNA (1)...(19): siRNA sense strand
gagaagaguaguucagucu

SEQ ID NO: 1945365 - RNA, 19 nt, Homo sapiens
  misc_RNA (1)...(19): siRNA sense strand
aggugaagauuuccuuaaa

SEQ ID NO: 1945366 - RNA, 19 nt, Homo sapiens
  misc_RNA (1)...(19): siRNA sense strand
cuucaaaggacucaauauu

SEQ ID NO: 1945367 - RNA, 19 nt, Homo sapiens
  misc_RNA (1)...(19): siRNA sense strand
agucagggcacgagguuua

SEQ ID NO: 1945368 - RNA, 19 nt, Homo sapiens
  misc_RNA (1)...(19): siRNA sense strand
gaaaaucaagucauuguuc

SEQ ID NO: 1945369 - RNA, 19 nt, Homo sapiens
  misc_RNA (1)...(19): siRNA sense strand
uuacaaagcaacaggugaa

SEQ ID NO: 1945370 - RNA, 19 nt, Homo sapiens
  misc_RNA (1)...(19): siRNA sense strand
ggaagcauaaagacuuguu

SEQ ID NO: 1945371 - RNA, 19 nt, Homo sapiens
  misc_RNA (1)...(19): siRNA sense strand
ucaagauauugcaagauuc

SEQ ID NO: 1945372 - RNA, 19 nt, Homo sapiens
  misc_RNA (1)...(19): siRNA sense strand
cuacagaggcacaaacauc

SEQ ID NO: 1945373 - RNA, 19 nt, Homo sapiens
  misc_RNA (1)...(19): siRNA sense strand
cagcauugcccuauuacug

SEQ ID NO: 1945374 - RNA, 19 nt, Homo sapiens
  misc_RNA (1)...(19): siRNA sense strand
ggugaagauuuccuuaaaa

SEQ ID NO: 1945375 - RNA, 19 nt, Homo sapiens
  misc_RNA (1)...(19): siRNA sense strand
agagugaauuacaaguuug

SEQ ID NO: 1945376 - RNA, 19 nt, Homo sapiens
  misc_RNA (1)...(19): siRNA sense strand
agaucaagauauugcaaga

SEQ ID NO: 1945377 - RNA, 19 nt, Homo sapiens
  misc_RNA (1)...(19): siRNA sense strand
auauggagccucucaaguu

SEQ ID NO: 1945378 - RNA, 19 nt, Homo sapiens
  misc_RNA (1)...(19): siRNA sense strand
gaagcauaaagacuuguug

SEQ ID NO: 1945379 - RNA, 19 nt, Homo sapiens
  misc_RNA (1)...(19): siRNA sense strand
agcaacaggugaagauuuc

SEQ ID NO: 1945380 - RNA, 19 nt, Homo sapiens
  misc_RNA (1)...(19): siRNA sense strand
gaagcucugguuagguuug

SEQ ID NO: 1945381 - RNA, 19 nt, Homo sapiens
  misc_RNA (1)...(19): siRNA sense strand
caagauauugcaagauucu

SEQ ID NO: 1945382 - RNA, 19 nt, Homo sapiens
  misc_RNA (1)...(19): siRNA sense strand
gcucugguuagguuuguaa

SEQ ID NO: 1945383 - RNA, 19 nt, Homo sapiens
  misc_RNA (1)...(19): siRNA sense strand
caggugaagauuuccuuaa

SEQ ID NO: 1945384 - RNA, 19 nt, Homo sapiens
  misc_RNA (1)...(19): siRNA sense strand
aagcaacaggugaagauuu

SEQ ID NO: 1945385 - RNA, 19 nt, Homo sapiens
  misc_RNA (1)...(19): siRNA sense strand
gauauggagccucucaagu

SEQ ID NO: 1945386 - RNA, 19 nt, Homo sapiens
  misc_RNA (1)...(19): siRNA sense strand
gguaaaagauacauugaac

SEQ ID NO: 1945387 - RNA, 19 nt, Homo sapiens
  misc_RNA (1)...(19): siRNA sense strand
gagugaauuacaaguuuga

SEQ ID NO: 1945388 - RNA, 19 nt, Homo sapiens
  misc_RNA (1)...(19): siRNA sense strand
ugauuucagagccuuauaa

SEQ ID NO: 1945389 - RNA, 19 nt, Homo sapiens
  misc_RNA (1)...(19): siRNA sense strand
cggagaagcucugguuagg

SEQ ID NO: 1945390 - RNA, 19 nt, Homo sapiens
  misc_RNA (1)...(19): siRNA sense strand
caugaaggacagauauguu

SEQ ID NO: 1945391 - RNA, 19 nt, Homo sapiens
  misc_RNA (1)...(19): siRNA sense strand
acagauauucguacucaug

SEQ ID NO: 1945392 - RNA, 19 nt, Homo sapiens
  misc_RNA (1)...(19): siRNA sense strand
guacuaccucagcaauuug

SEQ ID NO: 1945393 - RNA, 19 nt, Homo sapiens
  misc_RNA (1)...(19): siRNA sense strand
caaugagguagcccaguuu

SEQ ID NO: 1945394 - RNA, 19 nt, Homo sapiens
  misc_RNA (1)...(19): siRNA sense strand
gacccgguauauugagguu

SEQ ID NO: 1945395 - RNA, 19 nt, Homo sapiens
  misc_RNA (1)...(19): siRNA sense strand
uaccauggcagucuucaga

SEQ ID NO: 1945396 - RNA, 19 nt, Homo sapiens
  misc_RNA (1)...(19): siRNA sense strand
auccagagagagugaauua

SEQ ID NO: 1945397 - RNA, 19 nt, Homo sapiens
  misc_RNA (1)...(19): siRNA sense strand
uucaaaggacucaauauug

SEQ ID NO: 1945398 - RNA, 19 nt, Homo sapiens
  misc_RNA (1)...(19): siRNA sense strand
gauuucagagccuuauaau

SEQ ID NO: 1945399 - RNA, 19 nt, Homo sapiens
  misc_RNA (1)...(19): siRNA sense strand
ugaaggacagauauguuga

SEQ ID NO: 1945400 - RNA, 19 nt, Homo sapiens
  misc_RNA (1)...(19): siRNA sense strand
cagcaagauggaacuuauu

SEQ ID NO: 1945401 - RNA, 19 nt, Homo sapiens
  misc_RNA (1)...(19): siRNA sense strand
gcggacagagcauuuaugg

SEQ ID NO: 1945402 - RNA, 19 nt, Homo sapiens
  misc_RNA (1)...(19): siRNA sense strand
ccauggcagucuucagauc

SEQ ID NO: 1945403 - RNA, 19 nt, Homo sapiens
  misc_RNA (1)...(19): siRNA sense strand
guagucagggcacgagguu

SEQ ID NO: 1945404 - RNA, 19 nt, Homo sapiens
  misc_RNA (1)...(19): siRNA sense strand
ucagagccuuauaaucaca

SEQ ID NO: 1945405 - RNA, 19 nt, Homo sapiens
  misc_RNA (1)...(19): siRNA sense strand
cacagaaugcguugaggaa

SEQ ID NO: 1945406 - RNA, 19 nt, Homo sapiens
  misc_RNA (1)...(19): siRNA sense strand
cugguuagguuuguaagug

SEQ ID NO: 1945407 - RNA, 19 nt, Homo sapiens
  misc_RNA (1)...(19): siRNA sense strand
caaauguuagagacuguau

SEQ ID NO: 1945408 - RNA, 19 nt, Homo sapiens
  misc_RNA (1)...(19): siRNA sense strand
agagagugaauuacaaguu

SEQ ID NO: 1945409 - RNA, 19 nt, Homo sapiens
  misc_RNA (1)...(19): siRNA sense strand
ugguuagguuuguaaguga

SEQ ID NO: 1945410 - RNA, 19 nt, Homo sapiens
  misc_RNA (1)...(19): siRNA sense strand
ggaaggcauccucuuuguc

SEQ ID NO: 1945411 - RNA, 19 nt, Homo sapiens
  misc_RNA (1)...(19): siRNA sense strand
gccuuauaaucacagguuu

SEQ ID NO: 1945412 - RNA, 19 nt, Homo sapiens
  misc_RNA (1)...(19): siRNA sense strand
ccuaugcagccacaauuga

SEQ ID NO: 1945413 - RNA, 19 nt, Homo sapiens
  misc_RNA (1)...(19): siRNA sense strand
auauugagguuuacaaagc

SEQ ID NO: 1945414 - RNA, 19 nt, Homo sapiens
  misc_RNA (1)...(19): siRNA sense strand
cccaguuucucuccaagga

SEQ ID NO: 1945415 - RNA, 19 nt, Homo sapiens
  misc_RNA (1)...(19): siRNA sense strand
ucccauuauuccaguacua

SEQ ID NO: 1945416 - RNA, 19 nt, Homo sapiens
  misc_RNA (1)...(19): siRNA sense strand
gcacuacagaggcacaaac

SEQ ID NO: 1945417 - RNA, 19 nt, Homo sapiens
  misc_RNA (1)...(19): siRNA sense strand
gcauuuauggcugcacaga

SEQ ID NO: 1945418 - RNA, 19 nt, Homo sapiens
  misc_RNA (1)...(19): siRNA sense strand
ccuucgaggucuucccuau

SEQ ID NO: 1945419 - RNA, 19 nt, Homo sapiens
  misc_RNA (1)...(19): siRNA sense strand
uagcccaguuucucuccaa

SEQ ID NO: 1945420 - RNA, 19 nt, Homo sapiens
  misc_RNA (1)...(19): siRNA sense strand
uaaaauugcuggugguacu

SEQ ID NO: 1945421 - RNA, 19 nt, Homo sapiens
  misc_RNA (1)...(19): siRNA sense strand
aagauggaacuuauugaug

SEQ ID NO: 1945422 - RNA, 19 nt, Homo sapiens
  misc_RNA (1)...(19): siRNA sense strand
uacagaggcacaaacauca

SEQ ID NO: 1945423 - RNA, 19 nt, Homo sapiens
  misc_RNA (1)...(19): siRNA sense strand
gaucaagauauugcaagau

SEQ ID NO: 1945424 - RNA, 19 nt, Homo sapiens
  misc_RNA (1)...(19): siRNA sense strand
gguauauugagguuuacaa

SEQ ID NO: 1945425 - RNA, 19 nt, Homo sapiens
  misc_RNA (1)...(19): siRNA sense strand
gggaguucgccacagauau

SEQ ID NO: 1945426 - RNA, 19 nt, Homo sapiens
  misc_RNA (1)...(19): siRNA sense strand
acaggugaagauuuccuua

SEQ ID NO: 1945427 - RNA, 19 nt, Homo sapiens
  misc_RNA (1)...(19): siRNA sense strand
uauugagguuuacaaagca

SEQ ID NO: 1945428 - RNA, 19 nt, Homo sapiens
  misc_RNA (1)...(19): siRNA sense strand
agaaugcguugaggaagca

SEQ ID NO: 1945429 - RNA, 19 nt, Homo sapiens
  misc_RNA (1)...(19): siRNA sense strand
uacaaauguuagagacugu

SEQ ID NO: 1945430 - RNA, 19 nt, Homo sapiens
  misc_RNA (1)...(19): siRNA sense strand
gaagcaaccgguucuauga

SEQ ID NO: 1945431 - RNA, 19 nt, Homo sapiens
  misc_RNA (1)...(19): siRNA sense strand
gcaaccgguucuaugauaa

SEQ ID NO: 1945432 - RNA, 19 nt, Homo sapiens
  misc_RNA (1)...(19): siRNA sense strand
gcaacugcuucacuacuga

SEQ ID NO: 1945433 - RNA, 19 nt, Homo sapiens
  misc_RNA (1)...(19): siRNA sense strand
ccacggauggugacaguua

SEQ ID NO: 1945434 - RNA, 19 nt, Homo sapiens
  misc_RNA (1)...(19): siRNA sense strand
gaccaucuguuacuucugu

SEQ ID NO: 1945435 - RNA, 19 nt, Homo sapiens
  misc_RNA (1)...(19): siRNA sense strand
ugaccgcucugggaaguua

SEQ ID NO: 1945436 - RNA, 19 nt, Homo sapiens
  misc_RNA (1)...(19): siRNA sense strand
gaagguggcauuacguguu

SEQ ID NO: 1945437 - RNA, 19 nt, Homo sapiens
  misc_RNA (1)...(19): siRNA sense strand
gagcuggccuugugucucu

SEQ ID NO: 1945438 - RNA, 19 nt, Homo sapiens
  misc_RNA (1)...(19): siRNA sense strand
ggaccaagucuacaggaaa

SEQ ID NO: 1945439 - RNA, 19 nt, Homo sapiens
  misc_RNA (1)...(19): siRNA sense strand
acaacaacaucuacaccua

SEQ ID NO: 1945440 - RNA, 19 nt, Homo sapiens
  misc_RNA (1)...(19): siRNA sense strand
caccgucgcucauuaagug

SEQ ID NO: 1945441 - RNA, 19 nt, Homo sapiens
  misc_RNA (1)...(19): siRNA sense strand
ggaagcaaccgguucuaug

SEQ ID NO: 1945442 - RNA, 19 nt, Homo sapiens
  misc_RNA (1)...(19): siRNA sense strand
uaacagaggguggcaugua

SEQ ID NO: 1945443 - RNA, 19 nt, Homo sapiens
  misc_RNA (1)...(19): siRNA sense strand
caggaaagguuguauacgu

SEQ ID NO: 1945444 - RNA, 19 nt, Homo sapiens
  misc_RNA (1)...(19): siRNA sense strand
gaccaagucuacaggaaag

SEQ ID NO: 1945445 - RNA, 19 nt, Homo sapiens
  misc_RNA (1)...(19): siRNA sense strand
cagagggcaucaaguucua

SEQ ID NO: 1945446 - RNA, 19 nt, Homo sapiens
  misc_RNA (1)...(19): siRNA sense strand
ccaaggcggucaccaugau

SEQ ID NO: 1945447 - RNA, 19 nt, Homo sapiens
  misc_RNA (1)...(19): siRNA sense strand
cagccuggaccaucuguua

SEQ ID NO: 1945448 - RNA, 19 nt, Homo sapiens
  misc_RNA (1)...(19): siRNA sense strand
acaagccacucaaguacaa

SEQ ID NO: 1945449 - RNA, 19 nt, Homo sapiens
  misc_RNA (1)...(19): siRNA sense strand
ugucuguuaucuccuauuu

SEQ ID NO: 1945450 - RNA, 19 nt, Homo sapiens
  misc_RNA (1)...(19): siRNA sense strand
ggacagccaguuugugugu

SEQ ID NO: 1945451 - RNA, 19 nt, Homo sapiens
  misc_RNA (1)...(19): siRNA sense strand
uaaugacugugaugccaaa

SEQ ID NO: 1945452 - RNA, 19 nt, Homo sapiens
  misc_RNA (1)...(19): siRNA sense strand
gaucuucaucuucuucuug

SEQ ID NO: 1945453 - RNA, 19 nt, Homo sapiens
  misc_RNA (1)...(19): siRNA sense strand
ggaacaacaagguggaguu

SEQ ID NO: 1945454 - RNA, 19 nt, Homo sapiens
  misc_RNA (1)...(19): siRNA sense strand
ucaaguacaacaacaucua

SEQ ID NO: 1945455 - RNA, 19 nt, Homo sapiens
  misc_RNA (1)...(19): siRNA sense strand
cggccaccgucgcucauua

SEQ ID NO: 1945456 - RNA, 19 nt, Homo sapiens
  misc_RNA (1)...(19): siRNA sense strand
auccuagccuugucuguua

SEQ ID NO: 1945457 - RNA, 19 nt, Homo sapiens
  misc_RNA (1)...(19): siRNA sense strand
ccgguucuaugauaacauu

SEQ ID NO: 1945458 - RNA, 19 nt, Homo sapiens
  misc_RNA (1)...(19): siRNA sense strand
agcaaccgguucuaugaua

SEQ ID NO: 1945459 - RNA, 19 nt, Homo sapiens
  misc_RNA (1)...(19): siRNA sense strand
guacaucuuccagcucuuu

SEQ ID NO: 1945460 - RNA, 19 nt, Homo sapiens
  misc_RNA (1)...(19): siRNA sense strand
gggaccaagucuacaggaa

SEQ ID NO: 1945461 - RNA, 19 nt, Homo sapiens
  misc_RNA (1)...(19): siRNA sense strand
ccacucaaguacaacaaca

SEQ ID NO: 1945462 - RNA, 19 nt, Homo sapiens
  misc_RNA (1)...(19): siRNA sense strand
gauugaggcccaucugaau

SEQ ID NO: 1945463 - RNA, 19 nt, Homo sapiens
  misc_RNA (1)...(19): siRNA sense strand
cuacagggacugcaucaug

SEQ ID NO: 1945464 - RNA, 19 nt, Homo sapiens
  misc_RNA (1)...(19): siRNA sense strand
ugauaacauugaagacaug

SEQ ID NO: 1945465 - RNA, 19 nt, Homo sapiens
  misc_RNA (1)...(19): siRNA sense strand
ggacacugcccgagaaacu

SEQ ID NO: 1945466 - RNA, 19 nt, Homo sapiens
  misc_RNA (1)...(19): siRNA sense strand
ucugggaaguuauaacaau

SEQ ID NO: 1945467 - RNA, 19 nt, Homo sapiens
  misc_RNA (1)...(19): siRNA sense strand
ggauggugacaguuaauga

SEQ ID NO: 1945468 - RNA, 19 nt, Homo sapiens
  misc_RNA (1)...(19): siRNA sense strand
ggaugugccuucucuucgu

SEQ ID NO: 1945469 - RNA, 19 nt, Homo sapiens
  misc_RNA (1)...(19): siRNA sense strand
ucgcagccaucacagagaa

SEQ ID NO: 1945470 - RNA, 19 nt, Homo sapiens
  misc_RNA (1)...(19): siRNA sense strand
gaccaucgcagccaucaca

SEQ ID NO: 1945471 - RNA, 19 nt, Homo sapiens
  misc_RNA (1)...(19): siRNA sense strand
aguacaagccacucaagua

SEQ ID NO: 1945472 - RNA, 19 nt, Homo sapiens
  misc_RNA (1)...(19): siRNA sense strand
gcucugggaaguuauaaca

SEQ ID NO: 1945473 - RNA, 19 nt, Homo sapiens
  misc_RNA (1)...(19): siRNA sense strand
cugggaaguuauaacaauu

SEQ ID NO: 1945474 - RNA, 19 nt, Homo sapiens
  misc_RNA (1)...(19): siRNA sense strand
caacuacagccaugugucu

SEQ ID NO: 1945475 - RNA, 19 nt, Homo sapiens
  misc_RNA (1)...(19): siRNA sense strand
cugcuucacuacugagcua

SEQ ID NO: 1945476 - RNA, 19 nt, Homo sapiens
  misc_RNA (1)...(19): siRNA sense strand
ugacugugaugccaaacuc

SEQ ID NO: 1945477 - RNA, 19 nt, Homo sapiens
  misc_RNA (1)...(19): siRNA sense strand
cacggauggugacaguuaa

SEQ ID NO: 1945478 - RNA, 19 nt, Homo sapiens
  misc_RNA (1)...(19): siRNA sense strand
aagguggcauuacguguug

SEQ ID NO: 1945479 - RNA, 19 nt, Homo sapiens
  misc_RNA (1)...(19): siRNA sense strand
gaguggaacacagagaauu

SEQ ID NO: 1945480 - RNA, 19 nt, Homo sapiens
  misc_RNA (1)...(19): siRNA sense strand
gcccacggauggugacagu

SEQ ID NO: 1945481 - RNA, 19 nt, Homo sapiens
  misc_RNA (1)...(19): siRNA sense strand
ccaugugucucugcagaau

SEQ ID NO: 1945482 - RNA, 19 nt, Homo sapiens
  misc_RNA (1)...(19): siRNA sense strand
aggcccaucugaaugugua

SEQ ID NO: 1945483 - RNA, 19 nt, Homo sapiens
  misc_RNA (1)...(19): siRNA sense strand
auuaaguggugcuggauga

SEQ ID NO: 1945484 - RNA, 19 nt, Homo sapiens
  misc_RNA (1)...(19): siRNA sense strand
gaggguggcauguacaucu

SEQ ID NO: 1945485 - RNA, 19 nt, Homo sapiens
  misc_RNA (1)...(19): siRNA sense strand
gagcaacuacagccaugug

SEQ ID NO: 1945486 - RNA, 19 nt, Homo sapiens
  misc_RNA (1)...(19): siRNA sense strand
auacgugacugcgacauuc

SEQ ID NO: 1945487 - RNA, 19 nt, Homo sapiens
  misc_RNA (1)...(19): siRNA sense strand
acaagugaagguggcauua

SEQ ID NO: 1945488 - RNA, 19 nt, Homo sapiens
  misc_RNA (1)...(19): siRNA sense strand
uuuauuugcuguggaauuc

SEQ ID NO: 1945489 - RNA, 19 nt, Homo sapiens
  misc_RNA (1)...(19): siRNA sense strand
ggaucuucaucuucuucuu

SEQ ID NO: 1945490 - RNA, 19 nt, Homo sapiens
  misc_RNA (1)...(19): siRNA sense strand
ggccaccgucgcucauuaa

SEQ ID NO: 1945491 - RNA, 19 nt, Homo sapiens
  misc_RNA (1)...(19): siRNA sense strand
acaacaagguggaguucgu

SEQ ID NO: 1945492 - RNA, 19 nt, Homo sapiens
  misc_RNA (1)...(19): siRNA sense strand
cagcacagaucugaaaaug

SEQ ID NO: 1945493 - RNA, 19 nt, Homo sapiens
  misc_RNA (1)...(19): siRNA sense strand
aguuugcccuuuauuugaa

SEQ ID NO: 1945494 - RNA, 19 nt, Homo sapiens
  misc_RNA (1)...(19): siRNA sense strand
cagagaaggagacgcacuu

SEQ ID NO: 1945495 - RNA, 19 nt, Homo sapiens
  misc_RNA (1)...(19): siRNA sense strand
ggaggggcauuccugauuc

SEQ ID NO: 1945496 - RNA, 19 nt, Homo sapiens
  misc_RNA (1)...(19): siRNA sense strand
ccuugucuguuaucuccua

SEQ ID NO: 1945497 - RNA, 19 nt, Homo sapiens
  misc_RNA (1)...(19): siRNA sense strand
ggacauguaccccaagguu

SEQ ID NO: 1945498 - RNA, 19 nt, Homo sapiens
  misc_RNA (1)...(19): siRNA sense strand
ccaccuuguucuucaugau

SEQ ID NO: 1945499 - RNA, 19 nt, Homo sapiens
  misc_RNA (1)...(19): siRNA sense strand
gauaacauugaagacauga

SEQ ID NO: 1945500 - RNA, 19 nt, Homo sapiens
  misc_RNA (1)...(19): siRNA sense strand
ccagcucuuugacuccuau

SEQ ID NO: 1945501 - RNA, 19 nt, Homo sapiens
  misc_RNA (1)...(19): siRNA sense strand
cauccuagccuugucuguu

SEQ ID NO: 1945502 - RNA, 19 nt, Homo sapiens
  misc_RNA (1)...(19): siRNA sense strand
ccgccgugguggacaugua

SEQ ID NO: 1945503 - RNA, 19 nt, Homo sapiens
  misc_RNA (1)...(19): siRNA sense strand
gguuugccaucuucucagu

SEQ ID NO: 1945504 - RNA, 19 nt, Homo sapiens
  misc_RNA (1)...(19): siRNA sense strand
ugauugaggcccaucugaa

SEQ ID NO: 1945505 - RNA, 19 nt, Homo sapiens
  misc_RNA (1)...(19): siRNA sense strand
ggcaugaguggaacacaga

SEQ ID NO: 1945506 - RNA, 19 nt, Homo sapiens
  misc_RNA (1)...(19): siRNA sense strand
gcuguggaauuccuguuuu

SEQ ID NO: 1945507 - RNA, 19 nt, Homo sapiens
  misc_RNA (1)...(19): siRNA sense strand
gagcuacccugggcuaccu

SEQ ID NO: 1945508 - RNA, 19 nt, Homo sapiens
  misc_RNA (1)...(19): siRNA sense strand
caaguacaacaacaucuac

SEQ ID NO: 1945509 - RNA, 19 nt, Homo sapiens
  misc_RNA (1)...(19): siRNA sense strand
gguucuaugauaacauuga

SEQ ID NO: 1945510 - RNA, 19 nt, Homo sapiens
  misc_RNA (1)...(19): siRNA sense strand
aaguuugcccuuuauuuga

SEQ ID NO: 1945511 - RNA, 19 nt, Homo sapiens
  misc_RNA (1)...(19): siRNA sense strand
uuccagaaacugaauguga

SEQ ID NO: 1945512 - RNA, 19 nt, Homo sapiens
  misc_RNA (1)...(19): siRNA sense strand
cagagaauuguguggaguu

SEQ ID NO: 1945513 - RNA, 19 nt, Homo sapiens
  misc_RNA (1)...(19): siRNA sense strand
ucagagggcaucaaguucu

SEQ ID NO: 1945514 - RNA, 19 nt, Homo sapiens
  misc_RNA (1)...(19): siRNA sense strand
aaguggugcuggaugauca

SEQ ID NO: 1945515 - RNA, 19 nt, Homo sapiens
  misc_RNA (1)...(19): siRNA sense strand
ucuguuaucuccuauuuuc

SEQ ID NO: 1945516 - RNA, 19 nt, Homo sapiens
  misc_RNA (1)...(19): siRNA sense strand
acagccaguuugugugugu

SEQ ID NO: 1945517 - RNA, 19 nt, Homo sapiens
  misc_RNA (1)...(19): siRNA sense strand
gcugcugauccuccugaua

SEQ ID NO: 1945518 - RNA, 19 nt, Homo sapiens
  misc_RNA (1)...(19): siRNA sense strand
ucaaguacaagccacucaa

SEQ ID NO: 1945519 - RNA, 19 nt, Homo sapiens
  misc_RNA (1)...(19): siRNA sense strand
agagaauuguguggaguuc

SEQ ID NO: 1945520 - RNA, 19 nt, Homo sapiens
  misc_RNA (1)...(19): siRNA sense strand
gugauugaggcccaucuga

SEQ ID NO: 1945521 - RNA, 19 nt, Homo sapiens
  misc_RNA (1)...(19): siRNA sense strand
caagucuacaggaaagguu

SEQ ID NO: 1945522 - RNA, 19 nt, Homo sapiens
  misc_RNA (1)...(19): siRNA sense strand
caccucagcuccuuauuua

SEQ ID NO: 1945523 - RNA, 19 nt, Homo sapiens
  misc_RNA (1)...(19): siRNA sense strand
gcacaggccuccaaauauc

SEQ ID NO: 1945524 - RNA, 19 nt, Homo sapiens
  misc_RNA (1)...(19): siRNA sense strand
ugaaauugcugucuucuug

SEQ ID NO: 1945525 - RNA, 19 nt, Homo sapiens
  misc_RNA (1)...(19): siRNA sense strand
ccaaauauccagaucuaaa

SEQ ID NO: 1945526 - RNA, 19 nt, Homo sapiens
  misc_RNA (1)...(19): siRNA sense strand
gcaaggaacacaacugguu

SEQ ID NO: 1945527 - RNA, 19 nt, Homo sapiens
  misc_RNA (1)...(19): siRNA sense strand
caagcacauuucaagauuu

SEQ ID NO: 1945528 - RNA, 19 nt, Homo sapiens
  misc_RNA (1)...(19): siRNA sense strand
acaagcacauuucaagauu

SEQ ID NO: 1945529 - RNA, 19 nt, Homo sapiens
  misc_RNA (1)...(19): siRNA sense strand
caucaucucugcuaaaauu

SEQ ID NO: 1945530 - RNA, 19 nt, Homo sapiens
  misc_RNA (1)...(19): siRNA sense strand
ggcaagacauccuacacaa

SEQ ID NO: 1945531 - RNA, 19 nt, Homo sapiens
  misc_RNA (1)...(19): siRNA sense strand
aagcacaggccuccaaaua

SEQ ID NO: 1945532 - RNA, 19 nt, Homo sapiens
  misc_RNA (1)...(19): siRNA sense strand
acacaacugguucaaauaa

SEQ ID NO: 1945533 - RNA, 19 nt, Homo sapiens
  misc_RNA (1)...(19): siRNA sense strand
cuccaaauauccagaucua

SEQ ID NO: 1945534 - RNA, 19 nt, Homo sapiens
  misc_RNA (1)...(19): siRNA sense strand
caacacagagggcaagaca

SEQ ID NO: 1945535 - RNA, 19 nt, Homo sapiens
  misc_RNA (1)...(19): siRNA sense strand
ucaccucagcuccuuauuu

SEQ ID NO: 1945536 - RNA, 19 nt, Homo sapiens
  misc_RNA (1)...(19): siRNA sense strand
gaauccucuuccugaaauu

SEQ ID NO: 1945537 - RNA, 19 nt, Homo sapiens
  misc_RNA (1)...(19): siRNA sense strand
gcucgcaucaucucugcua

SEQ ID NO: 1945538 - RNA, 19 nt, Homo sapiens
  misc_RNA (1)...(19): siRNA sense strand
cuagugacaugagcuggaa

SEQ ID NO: 1945539 - RNA, 19 nt, Homo sapiens
  misc_RNA (1)...(19): siRNA sense strand
ccacaucuuccaccacgaa

SEQ ID NO: 1945540 - RNA, 19 nt, Homo sapiens
  misc_RNA (1)...(19): siRNA sense strand
acacagagggcaagacauc

SEQ ID NO: 1945541 - RNA, 19 nt, Homo sapiens
  misc_RNA (1)...(19): siRNA sense strand
aaauugcugucuucuugga

SEQ ID NO: 1945542 - RNA, 19 nt, Homo sapiens
  misc_RNA (1)...(19): siRNA sense strand
ccucagcuccuuauuuauc

SEQ ID NO: 1945543 - RNA, 19 nt, Homo sapiens
  misc_RNA (1)...(19): siRNA sense strand
gcaagacauccuacacaag

SEQ ID NO: 1945544 - RNA, 19 nt, Homo sapiens
  misc_RNA (1)...(19): siRNA sense strand
gggcaagacauccuacaca

SEQ ID NO: 1945545 - RNA, 19 nt, Homo sapiens
  misc_RNA (1)...(19): siRNA sense strand
cacaagcacauuucaagau

SEQ ID NO: 1945546 - RNA, 19 nt, Homo sapiens
  misc_RNA (1)...(19): siRNA sense strand
acacaagcacauuucaaga

SEQ ID NO: 1945547 - RNA, 19 nt, Homo sapiens
  misc_RNA (1)...(19): siRNA sense strand
cacaacugguucaaauaag

SEQ ID NO: 1945548 - RNA, 19 nt, Homo sapiens
  misc_RNA (1)...(19): siRNA sense strand
caacugguucaaauaagca

SEQ ID NO: 1945549 - RNA, 19 nt, Homo sapiens
  misc_RNA (1)...(19): siRNA sense strand
cuacacaagcacauuucaa

SEQ ID NO: 1945550 - RNA, 19 nt, Homo sapiens
  misc_RNA (1)...(19): siRNA sense strand
acaacugguucaaauaagc

SEQ ID NO: 1945551 - RNA, 19 nt, Homo sapiens
  misc_RNA (1)...(19): siRNA sense strand
ccaaagcaaggaacacaac

SEQ ID NO: 1945552 - RNA, 19 nt, Homo sapiens
  misc_RNA (1)...(19): siRNA sense strand
ggaccaagauguuccuuua

SEQ ID NO: 1945553 - RNA, 19 nt, Homo sapiens
  misc_RNA (1)...(19): siRNA sense strand
ggacaaauguugccuuuca

SEQ ID NO: 1945554 - RNA, 19 nt, Homo sapiens
  misc_RNA (1)...(19): siRNA sense strand
caagauagauuugggaauu

SEQ ID NO: 1945555 - RNA, 19 nt, Homo sapiens
  misc_RNA (1)...(19): siRNA sense strand
ugauaaagccugaagauua

SEQ ID NO: 1945556 - RNA, 19 nt, Homo sapiens
  misc_RNA (1)...(19): siRNA sense strand
ggacuuugcuuccuacaug

SEQ ID NO: 1945557 - RNA, 19 nt, Homo sapiens
  misc_RNA (1)...(19): siRNA sense strand
gaaauaugguggcaucuca

SEQ ID NO: 1945558 - RNA, 19 nt, Homo sapiens
  misc_RNA (1)...(19): siRNA sense strand
gagcuacaauuaucaagaa

SEQ ID NO: 1945559 - RNA, 19 nt, Homo sapiens
  misc_RNA (1)...(19): siRNA sense strand
ggacucaguuaucauuaaa

SEQ ID NO: 1945560 - RNA, 19 nt, Homo sapiens
  misc_RNA (1)...(19): siRNA sense strand
gaagugagccgcaccuuau

SEQ ID NO: 1945561 - RNA, 19 nt, Homo sapiens
  misc_RNA (1)...(19): siRNA sense strand
gagaacaucuacucuuuca

SEQ ID NO: 1945562 - RNA, 19 nt, Homo sapiens
  misc_RNA (1)...(19): siRNA sense strand
ggaauuuaauggugucuau

SEQ ID NO: 1945563 - RNA, 19 nt, Homo sapiens
  misc_RNA (1)...(19): siRNA sense strand
caacugauauuuguagaug

SEQ ID NO: 1945564 - RNA, 19 nt, Homo sapiens
  misc_RNA (1)...(19): siRNA sense strand
aaugauggcucuggaaaua

SEQ ID NO: 1945565 - RNA, 19 nt, Homo sapiens
  misc_RNA (1)...(19): siRNA sense strand
gagcaauuaugggacaaua

SEQ ID NO: 1945566 - RNA, 19 nt, Homo sapiens
  misc_RNA (1)...(19): siRNA sense strand
gcaaccaggacaucuguua

SEQ ID NO: 1945567 - RNA, 19 nt, Homo sapiens
  misc_RNA (1)...(19): siRNA sense strand
ggacaucuguuacuacaac

SEQ ID NO: 1945568 - RNA, 19 nt, Homo sapiens
  misc_RNA (1)...(19): siRNA sense strand
ccgagaacaucuacucuuu

SEQ ID NO: 1945569 - RNA, 19 nt, Homo sapiens
  misc_RNA (1)...(19): siRNA sense strand
uaugugaaauccagucuuu

SEQ ID NO: 1945570 - RNA, 19 nt, Homo sapiens
  misc_RNA (1)...(19): siRNA sense strand
uaccaugucugcccuaauu

SEQ ID NO: 1945571 - RNA, 19 nt, Homo sapiens
  misc_RNA (1)...(19): siRNA sense strand
aauguugccuuucacuuua

SEQ ID NO: 1945572 - RNA, 19 nt, Homo sapiens
  misc_RNA (1)...(19): siRNA sense strand
cagaggagcuacaauuauc

SEQ ID NO: 1945573 - RNA, 19 nt, Homo sapiens
  misc_RNA (1)...(19): siRNA sense strand
ccaaagacguggacucagu

SEQ ID NO: 1945574 - RNA, 19 nt, Homo sapiens
  misc_RNA (1)...(19): siRNA sense strand
gcaauuaugggacaauaga

SEQ ID NO: 1945575 - RNA, 19 nt, Homo sapiens
  misc_RNA (1)...(19): siRNA sense strand
caacaacauucucagcaau

SEQ ID NO: 1945576 - RNA, 19 nt, Homo sapiens
  misc_RNA (1)...(19): siRNA sense strand
gaacaucuacucuuucaac

SEQ ID NO: 1945577 - RNA, 19 nt, Homo sapiens
  misc_RNA (1)...(19): siRNA sense strand
uauacaaguuucccaaaga

SEQ ID NO: 1945578 - RNA, 19 nt, Homo sapiens
  misc_RNA (1)...(19): siRNA sense strand
ucauuaaaguggugucuga

SEQ ID NO: 1945579 - RNA, 19 nt, Homo sapiens
  misc_RNA (1)...(19): siRNA sense strand
uuaccaagcugaagcacuu

SEQ ID NO: 1945580 - RNA, 19 nt, Homo sapiens
  misc_RNA (1)...(19): siRNA sense strand
gcuuauccauguucuguug

SEQ ID NO: 1945581 - RNA, 19 nt, Homo sapiens
  misc_RNA (1)...(19): siRNA sense strand
cgaccucuauauauggaua

SEQ ID NO: 1945582 - RNA, 19 nt, Homo sapiens
  misc_RNA (1)...(19): siRNA sense strand
gguggcaucucaucccauu

SEQ ID NO: 1945583 - RNA, 19 nt, Homo sapiens
  misc_RNA (1)...(19): siRNA sense strand
caucuacucuuucaacuac

SEQ ID NO: 1945584 - RNA, 19 nt, Homo sapiens
  misc_RNA (1)...(19): siRNA sense strand
ccucucaaccucaguauuu

SEQ ID NO: 1945585 - RNA, 19 nt, Homo sapiens
  misc_RNA (1)...(19): siRNA sense strand
uagccgaccucuauauaug

SEQ ID NO: 1945586 - RNA, 19 nt, Homo sapiens
  misc_RNA (1)...(19): siRNA sense strand
gagcaguucuucgugguau

SEQ ID NO: 1945587 - RNA, 19 nt, Homo sapiens
  misc_RNA (1)...(19): siRNA sense strand
caucaccauugcuguguuu

SEQ ID NO: 1945588 - RNA, 19 nt, Homo sapiens
  misc_RNA (1)...(19): siRNA sense strand
cauugucccuuccauuaaa

SEQ ID NO: 1945589 - RNA, 19 nt, Homo sapiens
  misc_RNA (1)...(19): siRNA sense strand
cuacaauuaucaagaagug

SEQ ID NO: 1945590 - RNA, 19 nt, Homo sapiens
  misc_RNA (1)...(19): siRNA sense strand
ccagggacuuugcuuccua

SEQ ID NO: 1945591 - RNA, 19 nt, Homo sapiens
  misc_RNA (1)...(19): siRNA sense strand
gggcugccaugguguucua

SEQ ID NO: 1945592 - RNA, 19 nt, Homo sapiens
  misc_RNA (1)...(19): siRNA sense strand
ucagcacccagauauauua

SEQ ID NO: 1945593 - RNA, 19 nt, Homo sapiens
  misc_RNA (1)...(19): siRNA sense strand
uguaugaucucgaccacaa

SEQ ID NO: 1945594 - RNA, 19 nt, Homo sapiens
  misc_RNA (1)...(19): siRNA sense strand
gcucagugcuugcuaccau

SEQ ID NO: 1945595 - RNA, 19 nt, Homo sapiens
  misc_RNA (1)...(19): siRNA sense strand
ucaacaacauucucagcaa

SEQ ID NO: 1945596 - RNA, 19 nt, Homo sapiens
  misc_RNA (1)...(19): siRNA sense strand
uuaaaguggugucugaaau

SEQ ID NO: 1945597 - RNA, 19 nt, Homo sapiens
  misc_RNA (1)...(19): siRNA sense strand
uggaggaucuuucuucauc

SEQ ID NO: 1945598 - RNA, 19 nt, Homo sapiens
  misc_RNA (1)...(19): siRNA sense strand
caccuuaugucccucagaa

SEQ ID NO: 1945599 - RNA, 19 nt, Homo sapiens
  misc_RNA (1)...(19): siRNA sense strand
ggaagccaaggacaucuuu

SEQ ID NO: 1945600 - RNA, 19 nt, Homo sapiens
  misc_RNA (1)...(19): siRNA sense strand
ugccagacauugagaguga

SEQ ID NO: 1945601 - RNA, 19 nt, Homo sapiens
  misc_RNA (1)...(19): siRNA sense strand
gauguuccuuuaccuguca

SEQ ID NO: 1945602 - RNA, 19 nt, Homo sapiens
  misc_RNA (1)...(19): siRNA sense strand
gcauucugcuggauuucuu

SEQ ID NO: 1945603 - RNA, 19 nt, Homo sapiens
  misc_RNA (1)...(19): siRNA sense strand
ccggacaaauguugccuuu

SEQ ID NO: 1945604 - RNA, 19 nt, Homo sapiens
  misc_RNA (1)...(19): siRNA sense strand
caggacaucuguuacuaca

SEQ ID NO: 1945605 - RNA, 19 nt, Homo sapiens
  misc_RNA (1)...(19): siRNA sense strand
ccaucacgcuacagaagaa

SEQ ID NO: 1945606 - RNA, 19 nt, Homo sapiens
  misc_RNA (1)...(19): siRNA sense strand
gacguggacucaguuauca

SEQ ID NO: 1945607 - RNA, 19 nt, Homo sapiens
  misc_RNA (1)...(19): siRNA sense strand
caacuacccgguccuuguu

SEQ ID NO: 1945608 - RNA, 19 nt, Homo sapiens
  misc_RNA (1)...(19): siRNA sense strand
ggaaggaccggagaauugu

SEQ ID NO: 1945609 - RNA, 19 nt, Homo sapiens
  misc_RNA (1)...(19): siRNA sense strand
ugucagauuuguccaggaa

SEQ ID NO: 1945610 - RNA, 19 nt, Homo sapiens
  misc_RNA (1)...(19): siRNA sense strand
ugauggcucuggaaauaug

SEQ ID NO: 1945611 - RNA, 19 nt, Homo sapiens
  misc_RNA (1)...(19): siRNA sense strand
aaauguugccuuucacuuu

SEQ ID NO: 1945612 - RNA, 19 nt, Homo sapiens
  misc_RNA (1)...(19): siRNA sense strand
uggacucaguuaucauuaa

SEQ ID NO: 1945613 - RNA, 19 nt, Homo sapiens
  misc_RNA (1)...(19): siRNA sense strand
gaagaaccgcgagugcauu

SEQ ID NO: 1945614 - RNA, 19 nt, Homo sapiens
  misc_RNA (1)...(19): siRNA sense strand
uccuuuaccugucagauuu

SEQ ID NO: 1945615 - RNA, 19 nt, Homo sapiens
  misc_RNA (1)...(19): siRNA sense strand
gcaguucuucgugguauuu

SEQ ID NO: 1945616 - RNA, 19 nt, Homo sapiens
  misc_RNA (1)...(19): siRNA sense strand
ccagaggagcuacaauuau

SEQ ID NO: 1945617 - RNA, 19 nt, Homo sapiens
  misc_RNA (1)...(19): siRNA sense strand
uaugggucguuucaagaua

SEQ ID NO: 1945618 - RNA, 19 nt, Homo sapiens
  misc_RNA (1)...(19): siRNA sense strand
ccuggaaucuacagcgaaa

SEQ ID NO: 1945619 - RNA, 19 nt, Homo sapiens
  misc_RNA (1)...(19): siRNA sense strand
uaaaguggugucugaaaug

SEQ ID NO: 1945620 - RNA, 19 nt, Homo sapiens
  misc_RNA (1)...(19): siRNA sense strand
ggagcuacaauuaucaaga

SEQ ID NO: 1945621 - RNA, 19 nt, Homo sapiens
  misc_RNA (1)...(19): siRNA sense strand
ccucagaagcaaccaauga

SEQ ID NO: 1945622 - RNA, 19 nt, Homo sapiens
  misc_RNA (1)...(19): siRNA sense strand
ugacagccgugagggugua

SEQ ID NO: 1945623 - RNA, 19 nt, Homo sapiens
  misc_RNA (1)...(19): siRNA sense strand
gcauugcauugaugaugga

SEQ ID NO: 1945624 - RNA, 19 nt, Homo sapiens
  misc_RNA (1)...(19): siRNA sense strand
ccaaugauggcucuggaaa

SEQ ID NO: 1945625 - RNA, 19 nt, Homo sapiens
  misc_RNA (1)...(19): siRNA sense strand
cgauuucgaucaugucuac

SEQ ID NO: 1945626 - RNA, 19 nt, Homo sapiens
  misc_RNA (1)...(19): siRNA sense strand
ccggagaauugucagcaaa

SEQ ID NO: 1945627 - RNA, 19 nt, Homo sapiens
  misc_RNA (1)...(19): siRNA sense strand
agaagugagccgcaccuua

SEQ ID NO: 1945628 - RNA, 19 nt, Homo sapiens
  misc_RNA (1)...(19): siRNA sense strand
gaaugguguugcugguugu

SEQ ID NO: 1945629 - RNA, 19 nt, Homo sapiens
  misc_RNA (1)...(19): siRNA sense strand
caguguagccgaccucuau

SEQ ID NO: 1945630 - RNA, 19 nt, Homo sapiens
  misc_RNA (1)...(19): siRNA sense strand
gauuaugccuguggaggau

SEQ ID NO: 1945631 - RNA, 19 nt, Homo sapiens
  misc_RNA (1)...(19): siRNA sense strand
gcuaugggcauugcauuga

SEQ ID NO: 1945632 - RNA, 19 nt, Homo sapiens
  misc_RNA (1)...(19): siRNA sense strand
gcgccgauuucgaucaugu

SEQ ID NO: 1945633 - RNA, 19 nt, Homo sapiens
  misc_RNA (1)...(19): siRNA sense strand
caaagacguggacucaguu

SEQ ID NO: 1945634 - RNA, 19 nt, Homo sapiens
  misc_RNA (1)...(19): siRNA sense strand
uaccagaggagcuacaauu

SEQ ID NO: 1945635 - RNA, 19 nt, Homo sapiens
  misc_RNA (1)...(19): siRNA sense strand
ggucauuaccuaucagaca

SEQ ID NO: 1945636 - RNA, 19 nt, Homo sapiens
  misc_RNA (1)...(19): siRNA sense strand
guagccgaccucuauauau

SEQ ID NO: 1945637 - RNA, 19 nt, Homo sapiens
  misc_RNA (1)...(19): siRNA sense strand
gcaccgagaacaucuacuc

SEQ ID NO: 1945638 - RNA, 19 nt, Homo sapiens
  misc_RNA (1)...(19): siRNA sense strand
aggaaggaccggagaauug

SEQ ID NO: 1945639 - RNA, 19 nt, Homo sapiens
  misc_RNA (1)...(19): siRNA sense strand
uuguuggguuuguucauua

SEQ ID NO: 1945640 - RNA, 19 nt, Homo sapiens
  misc_RNA (1)...(19): siRNA sense strand
ugcagcaacugauauuugu

SEQ ID NO: 1945641 - RNA, 19 nt, Homo sapiens
  misc_RNA (1)...(19): siRNA sense strand
cugggcaucuucaucugua

SEQ ID NO: 1945642 - RNA, 19 nt, Homo sapiens
  misc_RNA (1)...(19): siRNA sense strand
gcuaccaugucugcccuaa

SEQ ID NO: 1945643 - RNA, 19 nt, Homo sapiens
  misc_RNA (1)...(19): siRNA sense strand
ccauugucccuuccauuaa

SEQ ID NO: 1945644 - RNA, 19 nt, Homo sapiens
  misc_RNA (1)...(19): siRNA sense strand
accauugucccuuccauua

SEQ ID NO: 1945645 - RNA, 19 nt, Homo sapiens
  misc_RNA (1)...(19): siRNA sense strand
gcagcaacugauauuugua

SEQ ID NO: 1945646 - RNA, 19 nt, Homo sapiens
  misc_RNA (1)...(19): siRNA sense strand
uuauaugggucguuucaag

SEQ ID NO: 1945647 - RNA, 19 nt, Homo sapiens
  misc_RNA (1)...(19): siRNA sense strand
ccucagcacccagauauau

SEQ ID NO: 1945648 - RNA, 19 nt, Homo sapiens
  misc_RNA (1)...(19): siRNA sense strand
cgacaccuccuucauguac

SEQ ID NO: 1945649 - RNA, 19 nt, Homo sapiens
  misc_RNA (1)...(19): siRNA sense strand
acacuuuggucucuucuac

SEQ ID NO: 1945650 - RNA, 19 nt, Homo sapiens
  misc_RNA (1)...(19): siRNA sense strand
ggaacaucaucaccauugc

SEQ ID NO: 1945651 - RNA, 19 nt, Homo sapiens
  misc_RNA (1)...(19): siRNA sense strand
gcccucagcacccagauau

SEQ ID NO: 1945652 - RNA, 19 nt, Homo sapiens
  misc_RNA (1)...(19): siRNA sense strand
gcacuaauaugugaacuua

SEQ ID NO: 1945653 - RNA, 19 nt, Homo sapiens
  misc_RNA (1)...(19): siRNA sense strand
uaaaugaacuggaccaaau

SEQ ID NO: 1945654 - RNA, 19 nt, Homo sapiens
  misc_RNA (1)...(19): siRNA sense strand
gaacuuauggacaugaaua

SEQ ID NO: 1945655 - RNA, 19 nt, Homo sapiens
  misc_RNA (1)...(19): siRNA sense strand
guaagucccuggaucauau

SEQ ID NO: 1945656 - RNA, 19 nt, Homo sapiens
  misc_RNA (1)...(19): siRNA sense strand
aguaacagcugccagauuu

SEQ ID NO: 1945657 - RNA, 19 nt, Homo sapiens
  misc_RNA (1)...(19): siRNA sense strand
gggagaagauacccauuau

SEQ ID NO: 1945658 - RNA, 19 nt, Homo sapiens
  misc_RNA (1)...(19): siRNA sense strand
gaaacuacuaugcauguaa

SEQ ID NO: 1945659 - RNA, 19 nt, Homo sapiens
  misc_RNA (1)...(19): siRNA sense strand
gcggaaaggcggaagauaa

SEQ ID NO: 1945660 - RNA, 19 nt, Homo sapiens
  misc_RNA (1)...(19): siRNA sense strand
ggacaugaauauuuaugag

SEQ ID NO: 1945661 - RNA, 19 nt, Homo sapiens
  misc_RNA (1)...(19): siRNA sense strand
gaagacagauccgcagaag

SEQ ID NO: 1945662 - RNA, 19 nt, Homo sapiens
  misc_RNA (1)...(19): siRNA sense strand
ggaaacuacuaugcaugua

SEQ ID NO: 1945663 - RNA, 19 nt, Homo sapiens
  misc_RNA (1)...(19): siRNA sense strand
aggaauaccucuacuaaca

SEQ ID NO: 1945664 - RNA, 19 nt, Homo sapiens
  misc_RNA (1)...(19): siRNA sense strand
gaaacagucccuaaagcaa

SEQ ID NO: 1945665 - RNA, 19 nt, Homo sapiens
  misc_RNA (1)...(19): siRNA sense strand
gaucauauucacagaaaug

SEQ ID NO: 1945666 - RNA, 19 nt, Homo sapiens
  misc_RNA (1)...(19): siRNA sense strand
gcacugaggcgccugaauc

SEQ ID NO: 1945667 - RNA, 19 nt, Homo sapiens
  misc_RNA (1)...(19): siRNA sense strand
gcuuggaucuggaacaaau

SEQ ID NO: 1945668 - RNA, 19 nt, Homo sapiens
  misc_RNA (1)...(19): siRNA sense strand
gaaguuaugaagaugcaaa

SEQ ID NO: 1945669 - RNA, 19 nt, Homo sapiens
  misc_RNA (1)...(19): siRNA sense strand
gcacuauauguaccaguua

SEQ ID NO: 1945670 - RNA, 19 nt, Homo sapiens
  misc_RNA (1)...(19): siRNA sense strand
gauggaaacuacuaugcau

SEQ ID NO: 1945671 - RNA, 19 nt, Homo sapiens
  misc_RNA (1)...(19): siRNA sense strand
ucaggaauaccucuacuaa

SEQ ID NO: 1945672 - RNA, 19 nt, Homo sapiens
  misc_RNA (1)...(19): siRNA sense strand
gaacuggaccaaaucucaa

SEQ ID NO: 1945673 - RNA, 19 nt, Homo sapiens
  misc_RNA (1)...(19): siRNA sense strand
agacagauccgcagaagga

SEQ ID NO: 1945674 - RNA, 19 nt, Homo sapiens
  misc_RNA (1)...(19): siRNA sense strand
agaagauccucaccaaguu

SEQ ID NO: 1945675 - RNA, 19 nt, Homo sapiens
  misc_RNA (1)...(19): siRNA sense strand
gcagaaacagucccuaaag

SEQ ID NO: 1945676 - RNA, 19 nt, Homo sapiens
  misc_RNA (1)...(19): siRNA sense strand
ggaauaccucuacuaacaa

SEQ ID NO: 1945677 - RNA, 19 nt, Homo sapiens
  misc_RNA (1)...(19): siRNA sense strand
gaauaccucuacuaacaac

SEQ ID NO: 1945678 - RNA, 19 nt, Homo sapiens
  misc_RNA (1)...(19): siRNA sense strand
gaaaguauugagcaaguca

SEQ ID NO: 1945679 - RNA, 19 nt, Homo sapiens
  misc_RNA (1)...(19): siRNA sense strand
ccugagagauggaaacuac

SEQ ID NO: 1945680 - RNA, 19 nt, Homo sapiens
  misc_RNA (1)...(19): siRNA sense strand
gcaccggaaccacucagua

SEQ ID NO: 1945681 - RNA, 19 nt, Homo sapiens
  misc_RNA (1)...(19): siRNA sense strand
uggaucauauucacagaaa

SEQ ID NO: 1945682 - RNA, 19 nt, Homo sapiens
  misc_RNA (1)...(19): siRNA sense strand
cagaagauccucaccaagu

SEQ ID NO: 1945683 - RNA, 19 nt, Homo sapiens
  misc_RNA (1)...(19): siRNA sense strand
gaagaugcaaagccugaga

SEQ ID NO: 1945684 - RNA, 19 nt, Homo sapiens
  misc_RNA (1)...(19): siRNA sense strand
gcugccagauuuccaagga

SEQ ID NO: 1945685 - RNA, 19 nt, Homo sapiens
  misc_RNA (1)...(19): siRNA sense strand
gaacagaggaaaacagaga

SEQ ID NO: 1945686 - RNA, 19 nt, Homo sapiens
  misc_RNA (1)...(19): siRNA sense strand
guaaaugaacuggaccaaa

SEQ ID NO: 1945687 - RNA, 19 nt, Homo sapiens
  misc_RNA (1)...(19): siRNA sense strand
ccucuuuccuggaguaaau

SEQ ID NO: 1945688 - RNA, 19 nt, Homo sapiens
  misc_RNA (1)...(19): siRNA sense strand
gaagauccucaccaaguuc

SEQ ID NO: 1945689 - RNA, 19 nt, Homo sapiens
  misc_RNA (1)...(19): siRNA sense strand
acgcaaugguggccuauga

SEQ ID NO: 1945690 - RNA, 19 nt, Homo sapiens
  misc_RNA (1)...(19): siRNA sense strand
gcacacccgcucagaagau

SEQ ID NO: 1945691 - RNA, 19 nt, Homo sapiens
  misc_RNA (1)...(19): siRNA sense strand
cgagagauccaagcacuga

SEQ ID NO: 1945692 - RNA, 19 nt, Homo sapiens
  misc_RNA (1)...(19): siRNA sense strand
ggaacugcccaaacuaaag

SEQ ID NO: 1945693 - RNA, 19 nt, Homo sapiens
  misc_RNA (1)...(19): siRNA sense strand
ucauggaacugcccaaacu

SEQ ID NO: 1945694 - RNA, 19 nt, Homo sapiens
  misc_RNA (1)...(19): siRNA sense strand
caccggaaccacucaguaa

SEQ ID NO: 1945695 - RNA, 19 nt, Homo sapiens
  misc_RNA (1)...(19): siRNA sense strand
cgagagcuaugaauuuuga

SEQ ID NO: 1945696 - RNA, 19 nt, Homo sapiens
  misc_RNA (1)...(19): siRNA sense strand
uggaauauuucacagagau

SEQ ID NO: 1945697 - RNA, 19 nt, Homo sapiens
  misc_RNA (1)...(19): siRNA sense strand
cauauucacagaaauggaa

SEQ ID NO: 1945698 - RNA, 19 nt, Homo sapiens
  misc_RNA (1)...(19): siRNA sense strand
gagcuaauacgagggagaa

SEQ ID NO: 1945699 - RNA, 19 nt, Homo sapiens
  misc_RNA (1)...(19): siRNA sense strand
cugauggguucuacacgua

SEQ ID NO: 1945700 - RNA, 19 nt, Homo sapiens
  misc_RNA (1)...(19): siRNA sense strand
ugagagauggaaacuacua

SEQ ID NO: 1945701 - RNA, 19 nt, Homo sapiens
  misc_RNA (1)...(19): siRNA sense strand
uauguugcaugaagugguu

SEQ ID NO: 1945702 - RNA, 19 nt, Homo sapiens
  misc_RNA (1)...(19): siRNA sense strand
gugcuuggaucuggaacaa

SEQ ID NO: 1945703 - RNA, 19 nt, Homo sapiens
  misc_RNA (1)...(19): siRNA sense strand
gacgaggaccggccuaugu

SEQ ID NO: 1945704 - RNA, 19 nt, Homo sapiens
  misc_RNA (1)...(19): siRNA sense strand
cagaaacagucccuaaagc

SEQ ID NO: 1945705 - RNA, 19 nt, Homo sapiens
  misc_RNA (1)...(19): siRNA sense strand
cuauaaagcaauuggcaaa

SEQ ID NO: 1945706 - RNA, 19 nt, Homo sapiens
  misc_RNA (1)...(19): siRNA sense strand
ucacagagauguaaaacca

SEQ ID NO: 1945707 - RNA, 19 nt, Homo sapiens
  misc_RNA (1)...(19): siRNA sense strand
gcaagucaacaaccuacga

SEQ ID NO: 1945708 - RNA, 19 nt, Homo sapiens
  misc_RNA (1)...(19): siRNA sense strand
gaucaggaauaccucuacu

SEQ ID NO: 1945709 - RNA, 19 nt, Homo sapiens
  misc_RNA (1)...(19): siRNA sense strand
gaacugcccaaacuaaagc

SEQ ID NO: 1945710 - RNA, 19 nt, Homo sapiens
  misc_RNA (1)...(19): siRNA sense strand
aauaggagagggaacguuu

SEQ ID NO: 1945711 - RNA, 19 nt, Homo sapiens
  misc_RNA (1)...(19): siRNA sense strand
gcacccaaacauucuuaug

SEQ ID NO: 1945712 - RNA, 19 nt, Homo sapiens
  misc_RNA (1)...(19): siRNA sense strand
gcaaugguggccuaugauc

SEQ ID NO: 1945713 - RNA, 19 nt, Homo sapiens
  misc_RNA (1)...(19): siRNA sense strand
cuacuaugcauguaaacaa

SEQ ID NO: 1945714 - RNA, 19 nt, Homo sapiens
  misc_RNA (1)...(19): siRNA sense strand
agggagaagauacccauua

SEQ ID NO: 1945715 - RNA, 19 nt, Homo sapiens
  misc_RNA (1)...(19): siRNA sense strand
gugaacuuauggacaugaa

SEQ ID NO: 1945716 - RNA, 19 nt, Homo sapiens
  misc_RNA (1)...(19): siRNA sense strand
gucaacaaccuacgagaga

SEQ ID NO: 1945717 - RNA, 19 nt, Homo sapiens
  misc_RNA (1)...(19): siRNA sense strand
aagcagaaacagucccuaa

SEQ ID NO: 1945718 - RNA, 19 nt, Homo sapiens
  misc_RNA (1)...(19): siRNA sense strand
augcaaagccugagagaug

SEQ ID NO: 1945719 - RNA, 19 nt, Homo sapiens
  misc_RNA (1)...(19): siRNA sense strand
gaauauuucacagagaugu

SEQ ID NO: 1945720 - RNA, 19 nt, Homo sapiens
  misc_RNA (1)...(19): siRNA sense strand
cuaugcauguaaacaaaug

SEQ ID NO: 1945721 - RNA, 19 nt, Homo sapiens
  misc_RNA (1)...(19): siRNA sense strand
cacuauauguaccaguuau

SEQ ID NO: 1945722 - RNA, 19 nt, Homo sapiens
  misc_RNA (1)...(19): siRNA sense strand
agucgagagcuaugaauuu

SEQ ID NO: 1945723 - RNA, 19 nt, Homo sapiens
  misc_RNA (1)...(19): siRNA sense strand
ugaacuggaccaaaucuca

SEQ ID NO: 1945724 - RNA, 19 nt, Homo sapiens
  misc_RNA (1)...(19): siRNA sense strand
gcuaauacgagggagaaga

SEQ ID NO: 1945725 - RNA, 19 nt, Homo sapiens
  misc_RNA (1)...(19): siRNA sense strand
cucagaagauccucaccaa

SEQ ID NO: 1945726 - RNA, 19 nt, Homo sapiens
  misc_RNA (1)...(19): siRNA sense strand
ucaacaaccuacgagagau

SEQ ID NO: 1945727 - RNA, 19 nt, Homo sapiens
  misc_RNA (1)...(19): siRNA sense strand
gugcugagacccuugaagu

SEQ ID NO: 1945728 - RNA, 19 nt, Homo sapiens
  misc_RNA (1)...(19): siRNA sense strand
gagagauggaaacuacuau

SEQ ID NO: 1945729 - RNA, 19 nt, Homo sapiens
  misc_RNA (1)...(19): siRNA sense strand
gauccucaccaaguucaaa

SEQ ID NO: 1945730 - RNA, 19 nt, Homo sapiens
  misc_RNA (1)...(19): siRNA sense strand
guucuacacguacaagaug

SEQ ID NO: 1945731 - RNA, 19 nt, Homo sapiens
  misc_RNA (1)...(19): siRNA sense strand
caacaaccuacgagagauc

SEQ ID NO: 1945732 - RNA, 19 nt, Homo sapiens
  misc_RNA (1)...(19): siRNA sense strand
ggaucuggaacaaauggaa

SEQ ID NO: 1945733 - RNA, 19 nt, Homo sapiens
  misc_RNA (1)...(19): siRNA sense strand
aacagucccuaaagcaaga

SEQ ID NO: 1945734 - RNA, 19 nt, Homo sapiens
  misc_RNA (1)...(19): siRNA sense strand
gaauccgcacccaaacauu

SEQ ID NO: 1945735 - RNA, 19 nt, Homo sapiens
  misc_RNA (1)...(19): siRNA sense strand
ugcacuauauguaccaguu

SEQ ID NO: 1945736 - RNA, 19 nt, Homo sapiens
  misc_RNA (1)...(19): siRNA sense strand
agaaacagucccuaaagca

SEQ ID NO: 1945737 - RNA, 19 nt, Homo sapiens
  misc_RNA (1)...(19): siRNA sense strand
uugaaaguauugagcaagu

SEQ ID NO: 1945738 - RNA, 19 nt, Homo sapiens
  misc_RNA (1)...(19): siRNA sense strand
gauggguucuacacguaca

SEQ ID NO: 1945739 - RNA, 19 nt, Homo sapiens
  misc_RNA (1)...(19): siRNA sense strand
ggaauauuucacagagaug

SEQ ID NO: 1945740 - RNA, 19 nt, Homo sapiens
  misc_RNA (1)...(19): siRNA sense strand
ggaucauauucacagaaau

SEQ ID NO: 1945741 - RNA, 19 nt, Homo sapiens
  misc_RNA (1)...(19): siRNA sense strand
cuaauacgagggagaagau

SEQ ID NO: 1945742 - RNA, 19 nt, Homo sapiens
  misc_RNA (1)...(19): siRNA sense strand
gucgagagcuaugaauuuu

SEQ ID NO: 1945743 - RNA, 19 nt, Homo sapiens
  misc_RNA (1)...(19): siRNA sense strand
gccggagugucuauuccaa

SEQ ID NO: 1945744 - RNA, 19 nt, Homo sapiens
  misc_RNA (1)...(19): siRNA sense strand
ggaacguuuucugaaguua

SEQ ID NO: 1945745 - RNA, 19 nt, Homo sapiens
  misc_RNA (1)...(19): siRNA sense strand
gagauggaaacuacuaugc

SEQ ID NO: 1945746 - RNA, 19 nt, Homo sapiens
  misc_RNA (1)...(19): siRNA sense strand
uguaagucccuggaucaua

SEQ ID NO: 1945747 - RNA, 19 nt, Homo sapiens
  misc_RNA (1)...(19): siRNA sense strand
uucaaacagucgagagcua

SEQ ID NO: 1945748 - RNA, 19 nt, Homo sapiens
  misc_RNA (1)...(19): siRNA sense strand
ucuacgagaucgccagucu

SEQ ID NO: 1945749 - RNA, 19 nt, Homo sapiens
  misc_RNA (1)...(19): siRNA sense strand
uauguaagucccuggauca

SEQ ID NO: 1945750 - RNA, 19 nt, Homo sapiens
  misc_RNA (1)...(19): siRNA sense strand
ucaaacagucgagagcuau

SEQ ID NO: 1945751 - RNA, 19 nt, Homo sapiens
  misc_RNA (1)...(19): siRNA sense strand
gcaaagccugagagaugga

SEQ ID NO: 1945752 - RNA, 19 nt, Homo sapiens
  misc_RNA (1)...(19): siRNA sense strand
gaaguuccauugaaauuga

SEQ ID NO: 1945753 - RNA, 19 nt, Homo sapiens
  misc_RNA (1)...(19): siRNA sense strand
gaaauugagugucuuuaca

SEQ ID NO: 1945754 - RNA, 19 nt, Homo sapiens
  misc_RNA (1)...(19): siRNA sense strand
gaaacucccuuccuuuguc

SEQ ID NO: 1945755 - RNA, 19 nt, Homo sapiens
  misc_RNA (1)...(19): siRNA sense strand
aagaaugggugaaauguug

SEQ ID NO: 1945756 - RNA, 19 nt, Homo sapiens
  misc_RNA (1)...(19): siRNA sense strand
gcauccauccguuuaauaa

SEQ ID NO: 1945757 - RNA, 19 nt, Homo sapiens
  misc_RNA (1)...(19): siRNA sense strand
ggaggcauccauccguuua

SEQ ID NO: 1945758 - RNA, 19 nt, Homo sapiens
  misc_RNA (1)...(19): siRNA sense strand
gaaggaagaaugggugaaa

SEQ ID NO: 1945759 - RNA, 19 nt, Homo sapiens
  misc_RNA (1)...(19): siRNA sense strand
gaagaaugggugaaauguu

SEQ ID NO: 1945760 - RNA, 19 nt, Homo sapiens
  misc_RNA (1)...(19): siRNA sense strand
ccacuucccauuucucaaa

SEQ ID NO: 1945761 - RNA, 19 nt, Homo sapiens
  misc_RNA (1)...(19): siRNA sense strand
ggaagaaugggugaaaugu

SEQ ID NO: 1945762 - RNA, 19 nt, Homo sapiens
  misc_RNA (1)...(19): siRNA sense strand
uaugcuacuuucaccauuu

SEQ ID NO: 1945763 - RNA, 19 nt, Homo sapiens
  misc_RNA (1)...(19): siRNA sense strand
ccauugaaauugagugucu

SEQ ID NO: 1945764 - RNA, 19 nt, Homo sapiens
  misc_RNA (1)...(19): siRNA sense strand
caacagacaguuugaacag

SEQ ID NO: 1945765 - RNA, 19 nt, Homo sapiens
  misc_RNA (1)...(19): siRNA sense strand
aaucuucuauucccacuuc

SEQ ID NO: 1945766 - RNA, 19 nt, Homo sapiens
  misc_RNA (1)...(19): siRNA sense strand
ccgcaccacuccagcauca

SEQ ID NO: 1945767 - RNA, 19 nt, Homo sapiens
  misc_RNA (1)...(19): siRNA sense strand
ugggugaaauguuggaaau

SEQ ID NO: 1945768 - RNA, 19 nt, Homo sapiens
  misc_RNA (1)...(19): siRNA sense strand
gagugucuuuacagccuuu

SEQ ID NO: 1945769 - RNA, 19 nt, Homo sapiens
  misc_RNA (1)...(19): siRNA sense strand
aaacucccuuccuuuguca

SEQ ID NO: 1945770 - RNA, 19 nt, Homo sapiens
  misc_RNA (1)...(19): siRNA sense strand
ggcauccauccguuuaaua

SEQ ID NO: 1945771 - RNA, 19 nt, Homo sapiens
  misc_RNA (1)...(19): siRNA sense strand
gaggcauccauccguuuaa

SEQ ID NO: 1945772 - RNA, 19 nt, Homo sapiens
  misc_RNA (1)...(19): siRNA sense strand
gggaggcauccauccguuu

SEQ ID NO: 1945773 - RNA, 19 nt, Homo sapiens
  misc_RNA (1)...(19): siRNA sense strand
ugaaauugagugucuuuac

SEQ ID NO: 1945774 - RNA, 19 nt, Homo sapiens
  misc_RNA (1)...(19): siRNA sense strand
ccacaacagacaguuugaa

SEQ ID NO: 1945775 - RNA, 19 nt, Homo sapiens
  misc_RNA (1)...(19): siRNA sense strand
agaaguuccauugaaauug

SEQ ID NO: 1945776 - RNA, 19 nt, Homo sapiens
  misc_RNA (1)...(19): siRNA sense strand
guuggaaauuugugaagcu

SEQ ID NO: 1945777 - RNA, 19 nt, Homo sapiens
  misc_RNA (1)...(19): siRNA sense strand
ccaucuccaucuuccacaa

SEQ ID NO: 1945778 - RNA, 19 nt, Homo sapiens
  misc_RNA (1)...(19): siRNA sense strand
uugugaagcugagugagaa

SEQ ID NO: 1945779 - RNA, 19 nt, Homo sapiens
  misc_RNA (1)...(19): siRNA sense strand
aaggaagaaugggugaaau

SEQ ID NO: 1945780 - RNA, 19 nt, Homo sapiens
  misc_RNA (1)...(19): siRNA sense strand
gaaugggugaaauguugga

SEQ ID NO: 1945781 - RNA, 19 nt, Homo sapiens
  misc_RNA (1)...(19): siRNA sense strand
gaaguauucuugcagauua

SEQ ID NO: 1945782 - RNA, 19 nt, Homo sapiens
  misc_RNA (1)...(19): siRNA sense strand
gcaaguaauuggagaagua

SEQ ID NO: 1945783 - RNA, 19 nt, Homo sapiens
  misc_RNA (1)...(19): siRNA sense strand
gaucuagagcuguguguua

SEQ ID NO: 1945784 - RNA, 19 nt, Homo sapiens
  misc_RNA (1)...(19): siRNA sense strand
gaaggaagacugacacugu

SEQ ID NO: 1945785 - RNA, 19 nt, Homo sapiens
  misc_RNA (1)...(19): siRNA sense strand
ggauguggauagcuuguuu

SEQ ID NO: 1945786 - RNA, 19 nt, Homo sapiens
  misc_RNA (1)...(19): siRNA sense strand
guggauagcuuguuuagca

SEQ ID NO: 1945787 - RNA, 19 nt, Homo sapiens
  misc_RNA (1)...(19): siRNA sense strand
caaagaagccacugggaaa

SEQ ID NO: 1945788 - RNA, 19 nt, Homo sapiens
  misc_RNA (1)...(19): siRNA sense strand
aagaagagcugaaggaaca

SEQ ID NO: 1945789 - RNA, 19 nt, Homo sapiens
  misc_RNA (1)...(19): siRNA sense strand
gaaccggccaugcaaguaa

SEQ ID NO: 1945790 - RNA, 19 nt, Homo sapiens
  misc_RNA (1)...(19): siRNA sense strand
cgaauacaaccagaaauua

SEQ ID NO: 1945791 - RNA, 19 nt, Homo sapiens
  misc_RNA (1)...(19): siRNA sense strand
ugaagaggaugauggcaaa

SEQ ID NO: 1945792 - RNA, 19 nt, Homo sapiens
  misc_RNA (1)...(19): siRNA sense strand
gggaaaagaucauuaagga

SEQ ID NO: 1945793 - RNA, 19 nt, Homo sapiens
  misc_RNA (1)...(19): siRNA sense strand
gaacauuugagccacugua

SEQ ID NO: 1945794 - RNA, 19 nt, Homo sapiens
  misc_RNA (1)...(19): siRNA sense strand
ccaagcugcugucauuguu

SEQ ID NO: 1945795 - RNA, 19 nt, Homo sapiens
  misc_RNA (1)...(19): siRNA sense strand
gagcugauacagacagaaa

SEQ ID NO: 1945796 - RNA, 19 nt, Homo sapiens
  misc_RNA (1)...(19): siRNA sense strand
ugaugaagcacauaguaua

SEQ ID NO: 1945797 - RNA, 19 nt, Homo sapiens
  misc_RNA (1)...(19): siRNA sense strand
ggaagaagagcugaaggaa

SEQ ID NO: 1945798 - RNA, 19 nt, Homo sapiens
  misc_RNA (1)...(19): siRNA sense strand
gaauacaaccagaaauuac

SEQ ID NO: 1945799 - RNA, 19 nt, Homo sapiens
  misc_RNA (1)...(19): siRNA sense strand
gaaaaggauuaucucaaug

SEQ ID NO: 1945800 - RNA, 19 nt, Homo sapiens
  misc_RNA (1)...(19): siRNA sense strand
ccgaauacaaccagaaauu

SEQ ID NO: 1945801 - RNA, 19 nt, Homo sapiens
  misc_RNA (1)...(19): siRNA sense strand
auacuggaguccuaugaaa

SEQ ID NO: 1945802 - RNA, 19 nt, Homo sapiens
  misc_RNA (1)...(19): siRNA sense strand
gauuaaagggccacuggaa

SEQ ID NO: 1945803 - RNA, 19 nt, Homo sapiens
  misc_RNA (1)...(19): siRNA sense strand
uauccaguccuuaaaguaa

SEQ ID NO: 1945804 - RNA, 19 nt, Homo sapiens
  misc_RNA (1)...(19): siRNA sense strand
gagcugaaggaacauuuga

SEQ ID NO: 1945805 - RNA, 19 nt, Homo sapiens
  misc_RNA (1)...(19): siRNA sense strand
ccacuggaagauauuuaua

SEQ ID NO: 1945806 - RNA, 19 nt, Homo sapiens
  misc_RNA (1)...(19): siRNA sense strand
aggauuaucucaaugaucu

SEQ ID NO: 1945807 - RNA, 19 nt, Homo sapiens
  misc_RNA (1)...(19): siRNA sense strand
gaccgaauacaaccagaaa

SEQ ID NO: 1945808 - RNA, 19 nt, Homo sapiens
  misc_RNA (1)...(19): siRNA sense strand
caugaugaagcacauagua

SEQ ID NO: 1945809 - RNA, 19 nt, Homo sapiens
  misc_RNA (1)...(19): siRNA sense strand
caaccagaaauuacaagaa

SEQ ID NO: 1945810 - RNA, 19 nt, Homo sapiens
  misc_RNA (1)...(19): siRNA sense strand
gauguggauagcuuguuua

SEQ ID NO: 1945811 - RNA, 19 nt, Homo sapiens
  misc_RNA (1)...(19): siRNA sense strand
ggaaccggccaugcaagua

SEQ ID NO: 1945812 - RNA, 19 nt, Homo sapiens
  misc_RNA (1)...(19): siRNA sense strand
uuaaagggccacuggaaga

SEQ ID NO: 1945813 - RNA, 19 nt, Homo sapiens
  misc_RNA (1)...(19): siRNA sense strand
ugaagcacauaguauacug

SEQ ID NO: 1945814 - RNA, 19 nt, Homo sapiens
  misc_RNA (1)...(19): siRNA sense strand
gaagacugacacugugguu

SEQ ID NO: 1945815 - RNA, 19 nt, Homo sapiens
  misc_RNA (1)...(19): siRNA sense strand
uggaagaggccacaacaga

SEQ ID NO: 1945816 - RNA, 19 nt, Homo sapiens
  misc_RNA (1)...(19): siRNA sense strand
agaagccacugggaaagaa

SEQ ID NO: 1945817 - RNA, 19 nt, Homo sapiens
  misc_RNA (1)...(19): siRNA sense strand
aaucugacaggaccgaaua

SEQ ID NO: 1945818 - RNA, 19 nt, Homo sapiens
  misc_RNA (1)...(19): siRNA sense strand
guauccaguccuuaaagua

SEQ ID NO: 1945819 - RNA, 19 nt, Homo sapiens
  misc_RNA (1)...(19): siRNA sense strand
gaagagcugaaggaacauu

SEQ ID NO: 1945820 - RNA, 19 nt, Homo sapiens
  misc_RNA (1)...(19): siRNA sense strand
ggaccgaauacaaccagaa

SEQ ID NO: 1945821 - RNA, 19 nt, Homo sapiens
  misc_RNA (1)...(19): siRNA sense strand
agacugacacugugguuga

SEQ ID NO: 1945822 - RNA, 19 nt, Homo sapiens
  misc_RNA (1)...(19): siRNA sense strand
gagagaaggaagacugaca

SEQ ID NO: 1945823 - RNA, 19 nt, Homo sapiens
  misc_RNA (1)...(19): siRNA sense strand
gaugaagcacauaguauac

SEQ ID NO: 1945824 - RNA, 19 nt, Homo sapiens
  misc_RNA (1)...(19): siRNA sense strand
auaguauacuggaguccua

SEQ ID NO: 1945825 - RNA, 19 nt, Homo sapiens
  misc_RNA (1)...(19): siRNA sense strand
ugacaggaccgaauacaac

SEQ ID NO: 1945826 - RNA, 19 nt, Homo sapiens
  misc_RNA (1)...(19): siRNA sense strand
gaagccacugggaaagaaa

SEQ ID NO: 1945827 - RNA, 19 nt, Homo sapiens
  misc_RNA (1)...(19): siRNA sense strand
cagggugaguguucuguag

SEQ ID NO: 1945828 - RNA, 19 nt, Homo sapiens
  misc_RNA (1)...(19): siRNA sense strand
ucuauaugcuggagagaag

SEQ ID NO: 1945829 - RNA, 19 nt, Homo sapiens
  misc_RNA (1)...(19): siRNA sense strand
uucuguagcugagaccuua

SEQ ID NO: 1945830 - RNA, 19 nt, Homo sapiens
  misc_RNA (1)...(19): siRNA sense strand
aagggccacuggaagauau

SEQ ID NO: 1945831 - RNA, 19 nt, Homo sapiens
  misc_RNA (1)...(19): siRNA sense strand
ugaggaggagccaaucuga

SEQ ID NO: 1945832 - RNA, 19 nt, Homo sapiens
  misc_RNA (1)...(19): siRNA sense strand
caaguaauuggagaaguau

SEQ ID NO: 1945833 - RNA, 19 nt, Homo sapiens
  misc_RNA (1)...(19): siRNA sense strand
aaagggccacuggaagaua

SEQ ID NO: 1945834 - RNA, 19 nt, Homo sapiens
  misc_RNA (1)...(19): siRNA sense strand
ggccacuggaagauauuua

SEQ ID NO: 1945835 - RNA, 19 nt, Homo sapiens
  misc_RNA (1)...(19): siRNA sense strand
guauacuggaguccuauga

SEQ ID NO: 1945836 - RNA, 19 nt, Homo sapiens
  misc_RNA (1)...(19): siRNA sense strand
ggcuggauguggauagcuu

SEQ ID NO: 1945837 - RNA, 19 nt, Homo sapiens
  misc_RNA (1)...(19): siRNA sense strand
gccaagcugcugucauugu

SEQ ID NO: 1945838 - RNA, 19 nt, Homo sapiens
  misc_RNA (1)...(19): siRNA sense strand
caacauugaguccgugcau

SEQ ID NO: 1945839 - RNA, 19 nt, Homo sapiens
  misc_RNA (1)...(19): siRNA sense strand
agacugauaggcuggaugu

SEQ ID NO: 1945840 - RNA, 19 nt, Homo sapiens
  misc_RNA (1)...(19): siRNA sense strand
uguauccaguccuuaaagu

SEQ ID NO: 1945841 - RNA, 19 nt, Homo sapiens
  misc_RNA (1)...(19): siRNA sense strand
guccgugcaucagauauca

SEQ ID NO: 1945842 - RNA, 19 nt, Homo sapiens
  misc_RNA (1)...(19): siRNA sense strand
uggauagcuuguuuagcaa

SEQ ID NO: 1945843 - RNA, 19 nt, Homo sapiens
  misc_RNA (1)...(19): siRNA sense strand
ucaccaugaugaagcacau

SEQ ID NO: 1945844 - RNA, 19 nt, Homo sapiens
  misc_RNA (1)...(19): siRNA sense strand
gccacuggaagauauuuau

SEQ ID NO: 1945845 - RNA, 19 nt, Homo sapiens
  misc_RNA (1)...(19): siRNA sense strand
uaaagggccacuggaagau

SEQ ID NO: 1945846 - RNA, 19 nt, Homo sapiens
  misc_RNA (1)...(19): siRNA sense strand
gaccuuaaccccagaggaa

SEQ ID NO: 1945847 - RNA, 19 nt, Homo sapiens
  misc_RNA (1)...(19): siRNA sense strand
ugaguccgugcaucagaua

SEQ ID NO: 1945848 - RNA, 19 nt, Homo sapiens
  misc_RNA (1)...(19): siRNA sense strand
gauaggcuggauguggaua

SEQ ID NO: 1945849 - RNA, 19 nt, Homo sapiens
  misc_RNA (1)...(19): siRNA sense strand
gcaaagcgggaaaagauca

SEQ ID NO: 1945850 - RNA, 19 nt, Homo sapiens
  misc_RNA (1)...(19): siRNA sense strand
gaagcaagccugugagaua

SEQ ID NO: 1945851 - RNA, 19 nt, Homo sapiens
  misc_RNA (1)...(19): siRNA sense strand
gaagaucugucgucuguuc

SEQ ID NO: 1945852 - RNA, 19 nt, Homo sapiens
  misc_RNA (1)...(19): siRNA sense strand
gggaagaucugucgucugu

SEQ ID NO: 1945853 - RNA, 19 nt, Homo sapiens
  misc_RNA (1)...(19): siRNA sense strand
ggaagucugcaucaaagua

SEQ ID NO: 1945854 - RNA, 19 nt, Homo sapiens
  misc_RNA (1)...(19): siRNA sense strand
gaagucugcaucaaaguaa

SEQ ID NO: 1945855 - RNA, 19 nt, Homo sapiens
  misc_RNA (1)...(19): siRNA sense strand
gccaacagcuacauggaau

SEQ ID NO: 1945856 - RNA, 19 nt, Homo sapiens
  misc_RNA (1)...(19): siRNA sense strand
acagcuacauggaaucaaa

SEQ ID NO: 1945857 - RNA, 19 nt, Homo sapiens
  misc_RNA (1)...(19): siRNA sense strand
ugucgucuguucaggauuu

SEQ ID NO: 1945858 - RNA, 19 nt, Homo sapiens
  misc_RNA (1)...(19): siRNA sense strand
uaaguguugugcucaguau

SEQ ID NO: 1945859 - RNA, 19 nt, Homo sapiens
  misc_RNA (1)...(19): siRNA sense strand
caagaacugcguaaguguu

SEQ ID NO: 1945860 - RNA, 19 nt, Homo sapiens
  misc_RNA (1)...(19): siRNA sense strand
guaaguguugugcucagua

SEQ ID NO: 1945861 - RNA, 19 nt, Homo sapiens
  misc_RNA (1)...(19): siRNA sense strand
caacagcuacauggaauca

SEQ ID NO: 1945862 - RNA, 19 nt, Homo sapiens
  misc_RNA (1)...(19): siRNA sense strand
gccagaagcaagccuguga

SEQ ID NO: 1945863 - RNA, 19 nt, Homo sapiens
  misc_RNA (1)...(19): siRNA sense strand
cuacauggaaucaaagugu

SEQ ID NO: 1945864 - RNA, 19 nt, Homo sapiens
  misc_RNA (1)...(19): siRNA sense strand
uccaagaacugcguaagug

SEQ ID NO: 1945865 - RNA, 19 nt, Homo sapiens
  misc_RNA (1)...(19): siRNA sense strand
gugagauacagaaauguuu

SEQ ID NO: 1945866 - RNA, 19 nt, Homo sapiens
  misc_RNA (1)...(19): siRNA sense strand
gaacugcguaaguguugug

SEQ ID NO: 1945867 - RNA, 19 nt, Homo sapiens
  misc_RNA (1)...(19): siRNA sense strand
acacggaagucugcaucaa

SEQ ID NO: 1945868 - RNA, 19 nt, Homo sapiens
  misc_RNA (1)...(19): siRNA sense strand
gucaggcugucauccaaga

SEQ ID NO: 1945869 - RNA, 19 nt, Homo sapiens
  misc_RNA (1)...(19): siRNA sense strand
agaaggauccgugccagaa

SEQ ID NO: 1945870 - RNA, 19 nt, Homo sapiens
  misc_RNA (1)...(19): siRNA sense strand
aagcaagccugugagauac

SEQ ID NO: 1945871 - RNA, 19 nt, Homo sapiens
  misc_RNA (1)...(19): siRNA sense strand
ccaagaacugcguaagugu

SEQ ID NO: 1945872 - RNA, 19 nt, Homo sapiens
  misc_RNA (1)...(19): siRNA sense strand
gaaggauccgugccagaag

SEQ ID NO: 1945873 - RNA, 19 nt, Homo sapiens
  misc_RNA (1)...(19): siRNA sense strand
gaagaggaagaaaaccuaa

SEQ ID NO: 1945874 - RNA, 19 nt, Homo sapiens
  misc_RNA (1)...(19): siRNA sense strand
acggaagucugcaucaaag

SEQ ID NO: 1945875 - RNA, 19 nt, Homo sapiens
  misc_RNA (1)...(19): siRNA sense strand
cacggaagucugcaucaaa

SEQ ID NO: 1945876 - RNA, 19 nt, Homo sapiens
  misc_RNA (1)...(19): siRNA sense strand
gugucaggcugucauccaa

SEQ ID NO: 1945877 - RNA, 19 nt, Homo sapiens
  misc_RNA (1)...(19): siRNA sense strand
cagaagcaagccugugaga

SEQ ID NO: 1945878 - RNA, 19 nt, Homo sapiens
  misc_RNA (1)...(19): siRNA sense strand
caaagugucaggcugucau

SEQ ID NO: 1945879 - RNA, 19 nt, Homo sapiens
  misc_RNA (1)...(19): siRNA sense strand
aagaacugcguaaguguug

SEQ ID NO: 1945880 - RNA, 19 nt, Homo sapiens
  misc_RNA (1)...(19): siRNA sense strand
gagauacagaaauguuuac

SEQ ID NO: 1945881 - RNA, 19 nt, Homo sapiens
  misc_RNA (1)...(19): siRNA sense strand
ugugagauacagaaauguu

SEQ ID NO: 1945882 - RNA, 19 nt, Homo sapiens
  misc_RNA (1)...(19): siRNA sense strand
guuuacaagccaacagcua

SEQ ID NO: 1945883 - RNA, 19 nt, Homo sapiens
  misc_RNA (1)...(19): siRNA sense strand
gcccaaggcugaagauuua

SEQ ID NO: 1945884 - RNA, 19 nt, Homo sapiens
  misc_RNA (1)...(19): siRNA sense strand
gaagauggguucauauugu

SEQ ID NO: 1945885 - RNA, 19 nt, Homo sapiens
  misc_RNA (1)...(19): siRNA sense strand
gaaguacuaucaucagaaa

SEQ ID NO: 1945886 - RNA, 19 nt, Homo sapiens
  misc_RNA (1)...(19): siRNA sense strand
ugaggacgcugaugaaaua

SEQ ID NO: 1945887 - RNA, 19 nt, Homo sapiens
  misc_RNA (1)...(19): siRNA sense strand
gcaagaagaagaagaguaa

SEQ ID NO: 1945888 - RNA, 19 nt, Homo sapiens
  misc_RNA (1)...(19): siRNA sense strand
uaacggaaaugaacuauuc

SEQ ID NO: 1945889 - RNA, 19 nt, Homo sapiens
  misc_RNA (1)...(19): siRNA sense strand
ggagaaagaccuagaaaga

SEQ ID NO: 1945890 - RNA, 19 nt, Homo sapiens
  misc_RNA (1)...(19): siRNA sense strand
gcuggaagcucuugauuau

SEQ ID NO: 1945891 - RNA, 19 nt, Homo sapiens
  misc_RNA (1)...(19): siRNA sense strand
gcagauagguuagacagaa

SEQ ID NO: 1945892 - RNA, 19 nt, Homo sapiens
  misc_RNA (1)...(19): siRNA sense strand
gaagguuccuguagugauu

SEQ ID NO: 1945893 - RNA, 19 nt, Homo sapiens
  misc_RNA (1)...(19): siRNA sense strand
agaaagaccuagaaagaaa

SEQ ID NO: 1945894 - RNA, 19 nt, Homo sapiens
  misc_RNA (1)...(19): siRNA sense strand
ggagacagaugcuggaaga

SEQ ID NO: 1945895 - RNA, 19 nt, Homo sapiens
  misc_RNA (1)...(19): siRNA sense strand
ggaguagccuuuggagaua

SEQ ID NO: 1945896 - RNA, 19 nt, Homo sapiens
  misc_RNA (1)...(19): siRNA sense strand
ggacgcugaugaaauaauu

SEQ ID NO: 1945897 - RNA, 19 nt, Homo sapiens
  misc_RNA (1)...(19): siRNA sense strand
caagggaacuggagacaau

SEQ ID NO: 1945898 - RNA, 19 nt, Homo sapiens
  misc_RNA (1)...(19): siRNA sense strand
aagaagaacugaaugaaga

SEQ ID NO: 1945899 - RNA, 19 nt, Homo sapiens
  misc_RNA (1)...(19): siRNA sense strand
uggaagcucuugauuauga

SEQ ID NO: 1945900 - RNA, 19 nt, Homo sapiens
  misc_RNA (1)...(19): siRNA sense strand
gggcagaaguugaauauac

SEQ ID NO: 1945901 - RNA, 19 nt, Homo sapiens
  misc_RNA (1)...(19): siRNA sense strand
uauagcagauccauucuuu

SEQ ID NO: 1945902 - RNA, 19 nt, Homo sapiens
  misc_RNA (1)...(19): siRNA sense strand
ugaaugacauggaugacua

SEQ ID NO: 1945903 - RNA, 19 nt, Homo sapiens
  misc_RNA (1)...(19): siRNA sense strand
ggagaagguuccuguagug

SEQ ID NO: 1945904 - RNA, 19 nt, Homo sapiens
  misc_RNA (1)...(19): siRNA sense strand
uuacaaggaugccaagaaa

SEQ ID NO: 1945905 - RNA, 19 nt, Homo sapiens
  misc_RNA (1)...(19): siRNA sense strand
gcuggaagauggguucaua

SEQ ID NO: 1945906 - RNA, 19 nt, Homo sapiens
  misc_RNA (1)...(19): siRNA sense strand
ccaagaagauuccgauaag

SEQ ID NO: 1945907 - RNA, 19 nt, Homo sapiens
  misc_RNA (1)...(19): siRNA sense strand
gaucaaggaggcagauuaa

SEQ ID NO: 1945908 - RNA, 19 nt, Homo sapiens
  misc_RNA (1)...(19): siRNA sense strand
gcagauccauucuuugcuu

SEQ ID NO: 1945909 - RNA, 19 nt, Homo sapiens
  misc_RNA (1)...(19): siRNA sense strand
gacagaaaguggaagagaa

SEQ ID NO: 1945910 - RNA, 19 nt, Homo sapiens
  misc_RNA (1)...(19): siRNA sense strand
gaagaaccaugaucagcau

SEQ ID NO: 1945911 - RNA, 19 nt, Homo sapiens
  misc_RNA (1)...(19): siRNA sense strand
gaaauaugcgcaugauuca

SEQ ID NO: 1945912 - RNA, 19 nt, Homo sapiens
  misc_RNA (1)...(19): siRNA sense strand
ggaagaggauauagcagau

SEQ ID NO: 1945913 - RNA, 19 nt, Homo sapiens
  misc_RNA (1)...(19): siRNA sense strand
gaacugaaugugcaacuug

SEQ ID NO: 1945914 - RNA, 19 nt, Homo sapiens
  misc_RNA (1)...(19): siRNA sense strand
gaaauuuguuccacaggau

SEQ ID NO: 1945915 - RNA, 19 nt, Homo sapiens
  misc_RNA (1)...(19): siRNA sense strand
gcagaaacagugcugauga

SEQ ID NO: 1945916 - RNA, 19 nt, Homo sapiens
  misc_RNA (1)...(19): siRNA sense strand
gaucaguacagauaucuuu

SEQ ID NO: 1945917 - RNA, 19 nt, Homo sapiens
  misc_RNA (1)...(19): siRNA sense strand
gcaacaugcagauagguua

SEQ ID NO: 1945918 - RNA, 19 nt, Homo sapiens
  misc_RNA (1)...(19): siRNA sense strand
gaagugauggagacaauga

SEQ ID NO: 1945919 - RNA, 19 nt, Homo sapiens
  misc_RNA (1)...(19): siRNA sense strand
gaaacagugcugaugauga

SEQ ID NO: 1945920 - RNA, 19 nt, Homo sapiens
  misc_RNA (1)...(19): siRNA sense strand
gagaaagaccuagaaagaa

SEQ ID NO: 1945921 - RNA, 19 nt, Homo sapiens
  misc_RNA (1)...(19): siRNA sense strand
gcugugaacuguguccuaa

SEQ ID NO: 1945922 - RNA, 19 nt, Homo sapiens
  misc_RNA (1)...(19): siRNA sense strand
ggaagaaguacuaucauca

SEQ ID NO: 1945923 - RNA, 19 nt, Homo sapiens
  misc_RNA (1)...(19): siRNA sense strand
gacaaccgcuacagaggaa

SEQ ID NO: 1945924 - RNA, 19 nt, Homo sapiens
  misc_RNA (1)...(19): siRNA sense strand
ggaagauggguucauauug

SEQ ID NO: 1945925 - RNA, 19 nt, Homo sapiens
  misc_RNA (1)...(19): siRNA sense strand
gaagaagaagaguaaaguu

SEQ ID NO: 1945926 - RNA, 19 nt, Homo sapiens
  misc_RNA (1)...(19): siRNA sense strand
caaugaggaugaugaagau

SEQ ID NO: 1945927 - RNA, 19 nt, Homo sapiens
  misc_RNA (1)...(19): siRNA sense strand
gaagaagaacugaaugaag

SEQ ID NO: 1945928 - RNA, 19 nt, Homo sapiens
  misc_RNA (1)...(19): siRNA sense strand
uaaggaaccagugaaauuu

SEQ ID NO: 1945929 - RNA, 19 nt, Homo sapiens
  misc_RNA (1)...(19): siRNA sense strand
guaagaagaaccaugauca

SEQ ID NO: 1945930 - RNA, 19 nt, Homo sapiens
  misc_RNA (1)...(19): siRNA sense strand
uggaagagcugaaugacau

SEQ ID NO: 1945931 - RNA, 19 nt, Homo sapiens
  misc_RNA (1)...(19): siRNA sense strand
gaaagaguuccuagagaga

SEQ ID NO: 1945932 - RNA, 19 nt, Homo sapiens
  misc_RNA (1)...(19): siRNA sense strand
gcagauauggccauggaaa

SEQ ID NO: 1945933 - RNA, 19 nt, Homo sapiens
  misc_RNA (1)...(19): siRNA sense strand
gaagggagugguaauggaa

SEQ ID NO: 1945934 - RNA, 19 nt, Homo sapiens
  misc_RNA (1)...(19): siRNA sense strand
gggaagugauggagacaau

SEQ ID NO: 1945935 - RNA, 19 nt, Homo sapiens
  misc_RNA (1)...(19): siRNA sense strand
caagaagauuccgauaaga

SEQ ID NO: 1945936 - RNA, 19 nt, Homo sapiens
  misc_RNA (1)...(19): siRNA sense strand
gaagaacugaaugaagaua

SEQ ID NO: 1945937 - RNA, 19 nt, Homo sapiens
  misc_RNA (1)...(19): siRNA sense strand
gaggaacugaccaaugaua

SEQ ID NO: 1945938 - RNA, 19 nt, Homo sapiens
  misc_RNA (1)...(19): siRNA sense strand
aaacagugcugaugaugag

SEQ ID NO: 1945939 - RNA, 19 nt, Homo sapiens
  misc_RNA (1)...(19): siRNA sense strand
cgacgaaaccgaccacuuc

SEQ ID NO: 1945940 - RNA, 19 nt, Homo sapiens
  misc_RNA (1)...(19): siRNA sense strand
gcggaaagcagaacucaug

SEQ ID NO: 1945941 - RNA, 19 nt, Homo sapiens
  misc_RNA (1)...(19): siRNA sense strand
caugugaccugugcucaaa

SEQ ID NO: 1945942 - RNA, 19 nt, Homo sapiens
  misc_RNA (1)...(19): siRNA sense strand
gaaauaauucagugugaca

SEQ ID NO: 1945943 - RNA, 19 nt, Homo sapiens
  misc_RNA (1)...(19): siRNA sense strand
augaggaacugaccaauga

SEQ ID NO: 1945944 - RNA, 19 nt, Homo sapiens
  misc_RNA (1)...(19): siRNA sense strand
ugaaggcaaugaugaagau

SEQ ID NO: 1945945 - RNA, 19 nt, Homo sapiens
  misc_RNA (1)...(19): siRNA sense strand
uuaaggaaccagugaaauu

SEQ ID NO: 1945946 - RNA, 19 nt, Homo sapiens
  misc_RNA (1)...(19): siRNA sense strand
cagauccauucuuugcuua

SEQ ID NO: 1945947 - RNA, 19 nt, Homo sapiens
  misc_RNA (1)...(19): siRNA sense strand
gacccucgcuuugcuagaa

SEQ ID NO: 1945948 - RNA, 19 nt, Homo sapiens
  misc_RNA (1)...(19): siRNA sense strand
gcaacaguaucugagaaug

SEQ ID NO: 1945949 - RNA, 19 nt, Homo sapiens
  misc_RNA (1)...(19): siRNA sense strand
gauccauucuuugcuuauu

SEQ ID NO: 1945950 - RNA, 19 nt, Homo sapiens
  misc_RNA (1)...(19): siRNA sense strand
ggagaaagagaaggaaaga

SEQ ID NO: 1945951 - RNA, 19 nt, Homo sapiens
  misc_RNA (1)...(19): siRNA sense strand
caaggaggcagauuaagga

SEQ ID NO: 1945952 - RNA, 19 nt, Homo sapiens
  misc_RNA (1)...(19): siRNA sense strand
ucacagggcagaaguugaa

SEQ ID NO: 1945953 - RNA, 19 nt, Homo sapiens
  misc_RNA (1)...(19): siRNA sense strand
cagauagguuagacagaaa

SEQ ID NO: 1945954 - RNA, 19 nt, Homo sapiens
  misc_RNA (1)...(19): siRNA sense strand
agaaagagaaggaaagaga

SEQ ID NO: 1945955 - RNA, 19 nt, Homo sapiens
  misc_RNA (1)...(19): siRNA sense strand
aaagaaggaagaagaagaa

SEQ ID NO: 1945956 - RNA, 19 nt, Homo sapiens
  misc_RNA (1)...(19): siRNA sense strand
aaacuacauuaccaucuug

SEQ ID NO: 1945957 - RNA, 19 nt, Homo sapiens
  misc_RNA (1)...(19): siRNA sense strand
ugugauaccuguaaacuac

SEQ ID NO: 1945958 - RNA, 19 nt, Homo sapiens
  misc_RNA (1)...(19): siRNA sense strand
agaaauaugcgcaugauuc

SEQ ID NO: 1945959 - RNA, 19 nt, Homo sapiens
  misc_RNA (1)...(19): siRNA sense strand
gcacaggcaaggaucaaug

SEQ ID NO: 1945960 - RNA, 19 nt, Homo sapiens
  misc_RNA (1)...(19): siRNA sense strand
ccaaauauggugccaagga

SEQ ID NO: 1945961 - RNA, 19 nt, Homo sapiens
  misc_RNA (1)...(19): siRNA sense strand
gagggaagcgggagugaug

SEQ ID NO: 1945962 - RNA, 19 nt, Homo sapiens
  misc_RNA (1)...(19): siRNA sense strand
gaaccaugaucagcaucuu

SEQ ID NO: 1945963 - RNA, 19 nt, Homo sapiens
  misc_RNA (1)...(19): siRNA sense strand
cugcaguacuuuauaguug

SEQ ID NO: 1945964 - RNA, 19 nt, Homo sapiens
  misc_RNA (1)...(19): siRNA sense strand
gcagaacuagcucgaucua

SEQ ID NO: 1945965 - RNA, 19 nt, Homo sapiens
  misc_RNA (1)...(19): siRNA sense strand
ugacaaauuacgaccagua

SEQ ID NO: 1945966 - RNA, 19 nt, Homo sapiens
  misc_RNA (1)...(19): siRNA sense strand
cgagaaugaugaaggcaau

SEQ ID NO: 1945967 - RNA, 19 nt, Homo sapiens
  misc_RNA (1)...(19): siRNA sense strand
ucagcuauucguaaacuua

SEQ ID NO: 1945968 - RNA, 19 nt, Homo sapiens
  misc_RNA (1)...(19): siRNA sense strand
gcaacuaucaccagaagca

SEQ ID NO: 1945969 - RNA, 19 nt, Homo sapiens
  misc_RNA (1)...(19): siRNA sense strand
cagaaacagugcugaugau

SEQ ID NO: 1945970 - RNA, 19 nt, Homo sapiens
  misc_RNA (1)...(19): siRNA sense strand
gaaagaaaagggagaaaga

SEQ ID NO: 1945971 - RNA, 19 nt, Homo sapiens
  misc_RNA (1)...(19): siRNA sense strand
gauuaaggaaccagugaaa

SEQ ID NO: 1945972 - RNA, 19 nt, Homo sapiens
  misc_RNA (1)...(19): siRNA sense strand
aagcagauauggccaugga

SEQ ID NO: 1945973 - RNA, 19 nt, Homo sapiens
  misc_RNA (1)...(19): siRNA sense strand
gaauauaccggcaauuuug

SEQ ID NO: 1945974 - RNA, 19 nt, Homo sapiens
  misc_RNA (1)...(19): siRNA sense strand
gacaaggaauaugggcuuu

SEQ ID NO: 1945975 - RNA, 19 nt, Homo sapiens
  misc_RNA (1)...(19): siRNA sense strand
gagagaaauaugcgcauga

SEQ ID NO: 1945976 - RNA, 19 nt, Homo sapiens
  misc_RNA (1)...(19): siRNA sense strand
cugcagauuuugugaauua

SEQ ID NO: 1945977 - RNA, 19 nt, Homo sapiens
  misc_RNA (1)...(19): siRNA sense strand
gaagguuguuauggaguug

SEQ ID NO: 1945978 - RNA, 19 nt, Homo sapiens
  misc_RNA (1)...(19): siRNA sense strand
ugacauggaugacuaugac

SEQ ID NO: 1945979 - RNA, 19 nt, Homo sapiens
  misc_RNA (1)...(19): siRNA sense strand
caaguccuccugcuguuaa

SEQ ID NO: 1945980 - RNA, 19 nt, Homo sapiens
  misc_RNA (1)...(19): siRNA sense strand
gagagaaaaccaaguaaaa

SEQ ID NO: 1945981 - RNA, 19 nt, Homo sapiens
  misc_RNA (1)...(19): siRNA sense strand
gagagaagacaaagacagu

SEQ ID NO: 1945982 - RNA, 19 nt, Homo sapiens
  misc_RNA (1)...(19): siRNA sense strand
acaaggaugccaagaaaga

SEQ ID NO: 1945983 - RNA, 19 nt, Homo sapiens
  misc_RNA (1)...(19): siRNA sense strand
gggaacagcucaucucuuu

SEQ ID NO: 1945984 - RNA, 19 nt, Homo sapiens
  misc_RNA (1)...(19): siRNA sense strand
ccucagaacuugacuguga

SEQ ID NO: 1945985 - RNA, 19 nt, Homo sapiens
  misc_RNA (1)...(19): siRNA sense strand
ggaggagucugacccugua

SEQ ID NO: 1945986 - RNA, 19 nt, Homo sapiens
  misc_RNA (1)...(19): siRNA sense strand
gaacagcucaucucuuuca

SEQ ID NO: 1945987 - RNA, 19 nt, Homo sapiens
  misc_RNA (1)...(19): siRNA sense strand
ggaaagagagauccaguau

SEQ ID NO: 1945988 - RNA, 19 nt, Homo sapiens
  misc_RNA (1)...(19): siRNA sense strand
gggagauacuucuuucgua

SEQ ID NO: 1945989 - RNA, 19 nt, Homo sapiens
  misc_RNA (1)...(19): siRNA sense strand
ggaaugauauaagcuggaa

SEQ ID NO: 1945990 - RNA, 19 nt, Homo sapiens
  misc_RNA (1)...(19): siRNA sense strand
aaagagagauccaguaugc

SEQ ID NO: 1945991 - RNA, 19 nt, Homo sapiens
  misc_RNA (1)...(19): siRNA sense strand
agaguaaccggaaggauua

SEQ ID NO: 1945992 - RNA, 19 nt, Homo sapiens
  misc_RNA (1)...(19): siRNA sense strand
gaaagagagauccaguaug

SEQ ID NO: 1945993 - RNA, 19 nt, Homo sapiens
  misc_RNA (1)...(19): siRNA sense strand
caagaagccaccaacaaug

SEQ ID NO: 1945994 - RNA, 19 nt, Homo sapiens
  misc_RNA (1)...(19): siRNA sense strand
uggaaggacagaagaguaa

SEQ ID NO: 1945995 - RNA, 19 nt, Homo sapiens
  misc_RNA (1)...(19): siRNA sense strand
aagaagccaccaacaauga

SEQ ID NO: 1945996 - RNA, 19 nt, Homo sapiens
  misc_RNA (1)...(19): siRNA sense strand
aagaguaaccggaaggauu

SEQ ID NO: 1945997 - RNA, 19 nt, Homo sapiens
  misc_RNA (1)...(19): siRNA sense strand
gacugugacugucuuccaa

SEQ ID NO: 1945998 - RNA, 19 nt, Homo sapiens
  misc_RNA (1)...(19): siRNA sense strand
ugugucaucuucauuguag

SEQ ID NO: 1945999 - RNA, 19 nt, Homo sapiens
  misc_RNA (1)...(19): siRNA sense strand
caugugcgcugcuccuucu

SEQ ID NO: 1946000 - RNA, 19 nt, Homo sapiens
  misc_RNA (1)...(19): siRNA sense strand
guggaaggacagaagagua

SEQ ID NO: 1946001 - RNA, 19 nt, Homo sapiens
  misc_RNA (1)...(19): siRNA sense strand
ccacagcccuggucuuccu

SEQ ID NO: 1946002 - RNA, 19 nt, Homo sapiens
  misc_RNA (1)...(19): siRNA sense strand
gagaugccagaaugaguga

SEQ ID NO: 1946003 - RNA, 19 nt, Homo sapiens
  misc_RNA (1)...(19): siRNA sense strand
gggcagggaaugauauaag

SEQ ID NO: 1946004 - RNA, 19 nt, Homo sapiens
  misc_RNA (1)...(19): siRNA sense strand
ggaccgauuccaccuccuu

SEQ ID NO: 1946005 - RNA, 19 nt, Homo sapiens
  misc_RNA (1)...(19): siRNA sense strand
gcccucaaacccucuggua

SEQ ID NO: 1946006 - RNA, 19 nt, Homo sapiens
  misc_RNA (1)...(19): siRNA sense strand
guauggagaaaggaaauau

SEQ ID NO: 1946007 - RNA, 19 nt, Homo sapiens
  misc_RNA (1)...(19): siRNA sense strand
ggcagggaaugauauaagc

SEQ ID NO: 1946008 - RNA, 19 nt, Homo sapiens
  misc_RNA (1)...(19): siRNA sense strand
aauaugaccagcucucugu

SEQ ID NO: 1946009 - RNA, 19 nt, Homo sapiens
  misc_RNA (1)...(19): siRNA sense strand
ggacagccagacugacucu

SEQ ID NO: 1946010 - RNA, 19 nt, Homo sapiens
  misc_RNA (1)...(19): siRNA sense strand
gaagccaccaacaaugagu

SEQ ID NO: 1946011 - RNA, 19 nt, Homo sapiens
  misc_RNA (1)...(19): siRNA sense strand
gaaccucucccugcaacag

SEQ ID NO: 1946012 - RNA, 19 nt, Homo sapiens
  misc_RNA (1)...(19): siRNA sense strand
gaagaguaaccggaaggau

SEQ ID NO: 1946013 - RNA, 19 nt, Homo sapiens
  misc_RNA (1)...(19): siRNA sense strand
gaugccagaaugagugaug

SEQ ID NO: 1946014 - RNA, 19 nt, Homo sapiens
  misc_RNA (1)...(19): siRNA sense strand
caaaaugaggccuguauca

SEQ ID NO: 1946015 - RNA, 19 nt, Homo sapiens
  misc_RNA (1)...(19): siRNA sense strand
ggaguacacaggcaaaaug

SEQ ID NO: 1946016 - RNA, 19 nt, Homo sapiens
  misc_RNA (1)...(19): siRNA sense strand
ggagaaggcacagcaucca

SEQ ID NO: 1946017 - RNA, 19 nt, Homo sapiens
  misc_RNA (1)...(19): siRNA sense strand
gcgcuuggucugugcuguu

SEQ ID NO: 1946018 - RNA, 19 nt, Homo sapiens
  misc_RNA (1)...(19): siRNA sense strand
agacauaggcaugaaggau

SEQ ID NO: 1946019 - RNA, 19 nt, Homo sapiens
  misc_RNA (1)...(19): siRNA sense strand
gggaacagcucaucucuuu

SEQ ID NO: 1946020 - RNA, 19 nt, Homo sapiens
  misc_RNA (1)...(19): siRNA sense strand
ccucagaacuugacuguga

SEQ ID NO: 1946021 - RNA, 19 nt, Homo sapiens
  misc_RNA (1)...(19): siRNA sense strand
ggaggagucugacccugua

SEQ ID NO: 1946022 - RNA, 19 nt, Homo sapiens
  misc_RNA (1)...(19): siRNA sense strand
gaacagcucaucucuuuca

SEQ ID NO: 1946023 - RNA, 19 nt, Homo sapiens
  misc_RNA (1)...(19): siRNA sense strand
gggagauacuucuuucgua

SEQ ID NO: 1946024 - RNA, 19 nt, Homo sapiens
  misc_RNA (1)...(19): siRNA sense strand
ggaaugauauaagcuggaa

SEQ ID NO: 1946025 - RNA, 19 nt, Homo sapiens
  misc_RNA (1)...(19): siRNA sense strand
agaguaaccggaaggauua

SEQ ID NO: 1946026 - RNA, 19 nt, Homo sapiens
  misc_RNA (1)...(19): siRNA sense strand
uggaaggacagaagaguaa

SEQ ID NO: 1946027 - RNA, 19 nt, Homo sapiens
  misc_RNA (1)...(19): siRNA sense strand
aagaguaaccggaaggauu

SEQ ID NO: 1946028 - RNA, 19 nt, Homo sapiens
  misc_RNA (1)...(19): siRNA sense strand
gacugugacugucuuccaa

SEQ ID NO: 1946029 - RNA, 19 nt, Homo sapiens
  misc_RNA (1)...(19): siRNA sense strand
ugugucaucuucauuguag

SEQ ID NO: 1946030 - RNA, 19 nt, Homo sapiens
  misc_RNA (1)...(19): siRNA sense strand
caugugcgcugcuccuucu

SEQ ID NO: 1946031 - RNA, 19 nt, Homo sapiens
  misc_RNA (1)...(19): siRNA sense strand
ccacagcccuggucuuccu

SEQ ID NO: 1946032 - RNA, 19 nt, Homo sapiens
  misc_RNA (1)...(19): siRNA sense strand
guggaaggacagaagagua

SEQ ID NO: 1946033 - RNA, 19 nt, Homo sapiens
  misc_RNA (1)...(19): siRNA sense strand
gagaugccagaaugaguga

SEQ ID NO: 1946034 - RNA, 19 nt, Homo sapiens
  misc_RNA (1)...(19): siRNA sense strand
gggcagggaaugauauaag

SEQ ID NO: 1946035 - RNA, 19 nt, Homo sapiens
  misc_RNA (1)...(19): siRNA sense strand
ggaccgauuccaccuccuu

SEQ ID NO: 1946036 - RNA, 19 nt, Homo sapiens
  misc_RNA (1)...(19): siRNA sense strand
gcccucaaacccucuggua

SEQ ID NO: 1946037 - RNA, 19 nt, Homo sapiens
  misc_RNA (1)...(19): siRNA sense strand
guauggagaaaggaaauau

SEQ ID NO: 1946038 - RNA, 19 nt, Homo sapiens
  misc_RNA (1)...(19): siRNA sense strand
ggcagggaaugauauaagc

SEQ ID NO: 1946039 - RNA, 19 nt, Homo sapiens
  misc_RNA (1)...(19): siRNA sense strand
aauaugaccagcucucugu

SEQ ID NO: 1946040 - RNA, 19 nt, Homo sapiens
  misc_RNA (1)...(19): siRNA sense strand
ggacagccagacugacucu

SEQ ID NO: 1946041 - RNA, 19 nt, Homo sapiens
  misc_RNA (1)...(19): siRNA sense strand
gaaccucucccugcaacag

SEQ ID NO: 1946042 - RNA, 19 nt, Homo sapiens
  misc_RNA (1)...(19): siRNA sense strand
gaagaguaaccggaaggau

SEQ ID NO: 1946043 - RNA, 19 nt, Homo sapiens
  misc_RNA (1)...(19): siRNA sense strand
gaugccagaaugagugaug

SEQ ID NO: 1946044 - RNA, 19 nt, Homo sapiens
  misc_RNA (1)...(19): siRNA sense strand
caaaaugaggccuguauca

SEQ ID NO: 1946045 - RNA, 19 nt, Homo sapiens
  misc_RNA (1)...(19): siRNA sense strand
ggaguacacaggcaaaaug

SEQ ID NO: 1946046 - RNA, 19 nt, Homo sapiens
  misc_RNA (1)...(19): siRNA sense strand
ggagaaggcacagcaucca

SEQ ID NO: 1946047 - RNA, 19 nt, Homo sapiens
  misc_RNA (1)...(19): siRNA sense strand
gcgcuuggucugugcuguu

SEQ ID NO: 1946048 - RNA, 19 nt, Homo sapiens
  misc_RNA (1)...(19): siRNA sense strand
agacauaggcaugaaggau

SEQ ID NO: 1946049 - RNA, 19 nt, Homo sapiens
  misc_RNA (1)...(19): siRNA sense strand
ggaaacccuucaaauaguu

SEQ ID NO: 1946050 - RNA, 19 nt, Homo sapiens
  misc_RNA (1)...(19): siRNA sense strand
gcacagagaagggaaguuu

SEQ ID NO: 1946051 - RNA, 19 nt, Homo sapiens
  misc_RNA (1)...(19): siRNA sense strand
ucacaggucuauaugagaa

SEQ ID NO: 1946052 - RNA, 19 nt, Homo sapiens
  misc_RNA (1)...(19): siRNA sense strand
ggucagaugucagguuuga

SEQ ID NO: 1946053 - RNA, 19 nt, Homo sapiens
  misc_RNA (1)...(19): siRNA sense strand
cgaggacucugaugaacaa

SEQ ID NO: 1946054 - RNA, 19 nt, Homo sapiens
  misc_RNA (1)...(19): siRNA sense strand
ggagagagcgugaccuugu

SEQ ID NO: 1946055 - RNA, 19 nt, Homo sapiens
  misc_RNA (1)...(19): siRNA sense strand
auaggaaacccuucaaaua

SEQ ID NO: 1946056 - RNA, 19 nt, Homo sapiens
  misc_RNA (1)...(19): siRNA sense strand
gagaagggaaguuuaagga

SEQ ID NO: 1946057 - RNA, 19 nt, Homo sapiens
  misc_RNA (1)...(19): siRNA sense strand
uaggaaacccuucaaauag

SEQ ID NO: 1946058 - RNA, 19 nt, Homo sapiens
  misc_RNA (1)...(19): siRNA sense strand
caucacaggucuauaugag

SEQ ID NO: 1946059 - RNA, 19 nt, Homo sapiens
  misc_RNA (1)...(19): siRNA sense strand
gaguccagauccaaaguug

SEQ ID NO: 1946060 - RNA, 19 nt, Homo sapiens
  misc_RNA (1)...(19): siRNA sense strand
gaacauuccaggccgacuu

SEQ ID NO: 1946061 - RNA, 19 nt, Homo sapiens
  misc_RNA (1)...(19): siRNA sense strand
ccacugaaccaagcucuaa

SEQ ID NO: 1946062 - RNA, 19 nt, Homo sapiens
  misc_RNA (1)...(19): siRNA sense strand
acagagaagggaaguuuaa

SEQ ID NO: 1946063 - RNA, 19 nt, Homo sapiens
  misc_RNA (1)...(19): siRNA sense strand
ggaggaaccuacagaugcu

SEQ ID NO: 1946064 - RNA, 19 nt, Homo sapiens
  misc_RNA (1)...(19): siRNA sense strand
gcagggaccuacagaugcu

SEQ ID NO: 1946065 - RNA, 19 nt, Homo sapiens
  misc_RNA (1)...(19): siRNA sense strand
gagagagcgugaccuuguc

SEQ ID NO: 1946066 - RNA, 19 nt, Homo sapiens
  misc_RNA (1)...(19): siRNA sense strand
ggacucugaugaacaagac

SEQ ID NO: 1946067 - RNA, 19 nt, Homo sapiens
  misc_RNA (1)...(19): siRNA sense strand
uaugacauguaccaucuau

SEQ ID NO: 1946068 - RNA, 19 nt, Homo sapiens
  misc_RNA (1)...(19): siRNA sense strand
ggugaaaucagaagagaca

SEQ ID NO: 1946069 - RNA, 19 nt, Homo sapiens
  misc_RNA (1)...(19): siRNA sense strand
gagcuccuaugacauguac

SEQ ID NO: 1946070 - RNA, 19 nt, Homo sapiens
  misc_RNA (1)...(19): siRNA sense strand
agacagucauccugcaaug

SEQ ID NO: 1946071 - RNA, 19 nt, Homo sapiens
  misc_RNA (1)...(19): siRNA sense strand
gguaauggaccaagagucu

SEQ ID NO: 1946072 - RNA, 19 nt, Homo sapiens
  misc_RNA (1)...(19): siRNA sense strand
ucaaauaguuggccuucac

SEQ ID NO: 1946073 - RNA, 19 nt, Homo sapiens
  misc_RNA (1)...(19): siRNA sense strand
aggaaacccuucaaauagu

SEQ ID NO: 1946074 - RNA, 19 nt, Homo sapiens
  misc_RNA (1)...(19): siRNA sense strand
cauaggaaacccuucaaau

SEQ ID NO: 1946075 - RNA, 19 nt, Homo sapiens
  misc_RNA (1)...(19): siRNA sense strand
ccuaugacauguaccaucu

SEQ ID NO: 1946076 - RNA, 19 nt, Homo sapiens
  misc_RNA (1)...(19): siRNA sense strand
ucccggagcuccuaugaca

SEQ ID NO: 1946077 - RNA, 19 nt, Homo sapiens
  misc_RNA (1)...(19): siRNA sense strand
caaggucaacggaacauuc

SEQ ID NO: 1946078 - RNA, 19 nt, Homo sapiens
  misc_RNA (1)...(19): siRNA sense strand
gaaacccuucaaauaguug

SEQ ID NO: 1946079 - RNA, 19 nt, Homo sapiens
  misc_RNA (1)...(19): siRNA sense strand
gaauagcgaggacucugau

SEQ ID NO: 1946080 - RNA, 19 nt, Homo sapiens
  misc_RNA (1)...(19): siRNA sense strand
acagaugcuucggcucuuu

SEQ ID NO: 1946081 - RNA, 19 nt, Homo sapiens
  misc_RNA (1)...(19): siRNA sense strand
cgaauagcgaggacucuga

SEQ ID NO: 1946082 - RNA, 19 nt, Homo sapiens
  misc_RNA (1)...(19): siRNA sense strand
gcccaugaauguagguucu

SEQ ID NO: 1946083 - RNA, 19 nt, Homo sapiens
  misc_RNA (1)...(19): siRNA sense strand
ccacggaggaaccuacaga

SEQ ID NO: 1946084 - RNA, 19 nt, Homo sapiens
  misc_RNA (1)...(19): siRNA sense strand
caauguuggucagauguca

SEQ ID NO: 1946085 - RNA, 19 nt, Homo sapiens
  misc_RNA (1)...(19): siRNA sense strand
uuggucagaugucagguuu

SEQ ID NO: 1946086 - RNA, 19 nt, Homo sapiens
  misc_RNA (1)...(19): siRNA sense strand
cgacaccugcacauucuga

SEQ ID NO: 1946087 - RNA, 19 nt, Homo sapiens
  misc_RNA (1)...(19): siRNA sense strand
cacagagaagggaaguuua

SEQ ID NO: 1946088 - RNA, 19 nt, Homo sapiens
  misc_RNA (1)...(19): siRNA sense strand
caaaugcugaguccagauc

SEQ ID NO: 1946089 - RNA, 19 nt, Homo sapiens
  misc_RNA (1)...(19): siRNA sense strand
uagcgaggacucugaugaa

SEQ ID NO: 1946090 - RNA, 19 nt, Homo sapiens
  misc_RNA (1)...(19): siRNA sense strand
acagucauccugcaauguu

SEQ ID NO: 1946091 - RNA, 19 nt, Homo sapiens
  misc_RNA (1)...(19): siRNA sense strand
ggacacuuugcaccucauu

SEQ ID NO: 1946092 - RNA, 19 nt, Homo sapiens
  misc_RNA (1)...(19): siRNA sense strand
gggaggcccaugaauguag

SEQ ID NO: 1946093 - RNA, 19 nt, Homo sapiens
  misc_RNA (1)...(19): siRNA sense strand
ggagcuccuaugacaugua

SEQ ID NO: 1946094 - RNA, 19 nt, Homo sapiens
  misc_RNA (1)...(19): siRNA sense strand
ggucaucauccucuucauc

SEQ ID NO: 1946095 - RNA, 19 nt, Homo sapiens
  misc_RNA (1)...(19): siRNA sense strand
caccugcacauucugauug

SEQ ID NO: 1946096 - RNA, 19 nt, Homo sapiens
  misc_RNA (1)...(19): siRNA sense strand
cuacagaugcuacgguucu

SEQ ID NO: 1946097 - RNA, 19 nt, Homo sapiens
  misc_RNA (1)...(19): siRNA sense strand
caggagagagcgugaccuu

SEQ ID NO: 1946098 - RNA, 19 nt, Homo sapiens
  misc_RNA (1)...(19): siRNA sense strand
cagucauccugcaauguug

SEQ ID NO: 1946099 - RNA, 19 nt, Homo sapiens
  misc_RNA (1)...(19): siRNA sense strand
gcgaggacucugaugaaca

SEQ ID NO: 1946100 - RNA, 19 nt, Homo sapiens
  misc_RNA (1)...(19): siRNA sense strand
gagacagucauccugcaau

SEQ ID NO: 1946101 - RNA, 19 nt, Homo sapiens
  misc_RNA (1)...(19): siRNA sense strand
ucauaggaaacccuucaaa

SEQ ID NO: 1946102 - RNA, 19 nt, Homo sapiens
  misc_RNA (1)...(19): siRNA sense strand
ccggagcuccuaugacaug

SEQ ID NO: 1946103 - RNA, 19 nt, Homo sapiens
  misc_RNA (1)...(19): siRNA sense strand
cugcaauguuggucagaug

SEQ ID NO: 1946104 - RNA, 19 nt, Homo sapiens
  misc_RNA (1)...(19): siRNA sense strand
cuucauccuccucuucuuu

SEQ ID NO: 1946105 - RNA, 19 nt, Homo sapiens
  misc_RNA (1)...(19): siRNA sense strand
gugacccacugcuuguuuc

SEQ ID NO: 1946106 - RNA, 19 nt, Homo sapiens
  misc_RNA (1)...(19): siRNA sense strand
ugacauguaccaucuaucc

SEQ ID NO: 1946107 - RNA, 19 nt, Homo sapiens
  misc_RNA (1)...(19): siRNA sense strand
cccgacaccugcacauucu

SEQ ID NO: 1946108 - RNA, 19 nt, Homo sapiens
  misc_RNA (1)...(19): siRNA sense strand
gcccaaacaucucaacuua

SEQ ID NO: 1946109 - RNA, 19 nt, Homo sapiens
  misc_RNA (1)...(19): siRNA sense strand
gaagaaagauacaugacau

SEQ ID NO: 1946110 - RNA, 19 nt, Homo sapiens
  misc_RNA (1)...(19): siRNA sense strand
ccaaacaucucaacuuaca

SEQ ID NO: 1946111 - RNA, 19 nt, Homo sapiens
  misc_RNA (1)...(19): siRNA sense strand
aaaggaaguuguucaaaug

SEQ ID NO: 1946112 - RNA, 19 nt, Homo sapiens
  misc_RNA (1)...(19): siRNA sense strand
gaaagauacaugacauuga

SEQ ID NO: 1946113 - RNA, 19 nt, Homo sapiens
  misc_RNA (1)...(19): siRNA sense strand
guuauugguucucuaauga

SEQ ID NO: 1946114 - RNA, 19 nt, Homo sapiens
  misc_RNA (1)...(19): siRNA sense strand
ggauugggcuuaacuuuac

SEQ ID NO: 1946115 - RNA, 19 nt, Homo sapiens
  misc_RNA (1)...(19): siRNA sense strand
gcacugguauaaaaucuua

SEQ ID NO: 1946116 - RNA, 19 nt, Homo sapiens
  misc_RNA (1)...(19): siRNA sense strand
caaaugccacucaguauga

SEQ ID NO: 1946117 - RNA, 19 nt, Homo sapiens
  misc_RNA (1)...(19): siRNA sense strand
cagaauggcucaaauacca

SEQ ID NO: 1946118 - RNA, 19 nt, Homo sapiens
  misc_RNA (1)...(19): siRNA sense strand
gaauguacagucaaagaaa

SEQ ID NO: 1946119 - RNA, 19 nt, Homo sapiens
  misc_RNA (1)...(19): siRNA sense strand
gaaagaaaaucucaucuac

SEQ ID NO: 1946120 - RNA, 19 nt, Homo sapiens
  misc_RNA (1)...(19): siRNA sense strand
guucaaaugccacucagua

SEQ ID NO: 1946121 - RNA, 19 nt, Homo sapiens
  misc_RNA (1)...(19): siRNA sense strand
ugaggacacuggagaucua

SEQ ID NO: 1946122 - RNA, 19 nt, Homo sapiens
  misc_RNA (1)...(19): siRNA sense strand
ggcacaagaagaaauauaa

SEQ ID NO: 1946123 - RNA, 19 nt, Homo sapiens
  misc_RNA (1)...(19): siRNA sense strand
uaacuuuaccuccuugaaa

SEQ ID NO: 1946124 - RNA, 19 nt, Homo sapiens
  misc_RNA (1)...(19): siRNA sense strand
ggagugacaguuaugugua

SEQ ID NO: 1946125 - RNA, 19 nt, Homo sapiens
  misc_RNA (1)...(19): siRNA sense strand
caagggaaguguuauuggu

SEQ ID NO: 1946126 - RNA, 19 nt, Homo sapiens
  misc_RNA (1)...(19): siRNA sense strand
gagugacaguuauguguau

SEQ ID NO: 1946127 - RNA, 19 nt, Homo sapiens
  misc_RNA (1)...(19): siRNA sense strand
ggaugguucuccaauagau

SEQ ID NO: 1946128 - RNA, 19 nt, Homo sapiens
  misc_RNA (1)...(19): siRNA sense strand
gaugaagaaagauacauga

SEQ ID NO: 1946129 - RNA, 19 nt, Homo sapiens
  misc_RNA (1)...(19): siRNA sense strand
gaaauggcuuuuauacaga

SEQ ID NO: 1946130 - RNA, 19 nt, Homo sapiens
  misc_RNA (1)...(19): siRNA sense strand
aauaauggcacaagaagaa

SEQ ID NO: 1946131 - RNA, 19 nt, Homo sapiens
  misc_RNA (1)...(19): siRNA sense strand
uaaagggaccagcuaaaga

SEQ ID NO: 1946132 - RNA, 19 nt, Homo sapiens
  misc_RNA (1)...(19): siRNA sense strand
aaucagaauggcucaaaua

SEQ ID NO: 1946133 - RNA, 19 nt, Homo sapiens
  misc_RNA (1)...(19): siRNA sense strand
caauuaaacuacguaugga

SEQ ID NO: 1946134 - RNA, 19 nt, Homo sapiens
  misc_RNA (1)...(19): siRNA sense strand
aaagggaccagcuaaagaa

SEQ ID NO: 1946135 - RNA, 19 nt, Homo sapiens
  misc_RNA (1)...(19): siRNA sense strand
gaauaauggcacaagaaga

SEQ ID NO: 1946136 - RNA, 19 nt, Homo sapiens
  misc_RNA (1)...(19): siRNA sense strand
uggauugggcuuaacuuua

SEQ ID NO: 1946137 - RNA, 19 nt, Homo sapiens
  misc_RNA (1)...(19): siRNA sense strand
ggaaagaaaaucucaucua

SEQ ID NO: 1946138 - RNA, 19 nt, Homo sapiens
  misc_RNA (1)...(19): siRNA sense strand
aaagcuggagugacaguua

SEQ ID NO: 1946139 - RNA, 19 nt, Homo sapiens
  misc_RNA (1)...(19): siRNA sense strand
ugacuuugaucuccuugau

SEQ ID NO: 1946140 - RNA, 19 nt, Homo sapiens
  misc_RNA (1)...(19): siRNA sense strand
guacuaugccaaucagaau

SEQ ID NO: 1946141 - RNA, 19 nt, Homo sapiens
  misc_RNA (1)...(19): siRNA sense strand
gcacaagaagaaauauaag

SEQ ID NO: 1946142 - RNA, 19 nt, Homo sapiens
  misc_RNA (1)...(19): siRNA sense strand
acaauuaaacuacguaugg

SEQ ID NO: 1946143 - RNA, 19 nt, Homo sapiens
  misc_RNA (1)...(19): siRNA sense strand
gaaguguuauugguucucu

SEQ ID NO: 1946144 - RNA, 19 nt, Homo sapiens
  misc_RNA (1)...(19): siRNA sense strand
ugaaauggcuuuuauacag

SEQ ID NO: 1946145 - RNA, 19 nt, Homo sapiens
  misc_RNA (1)...(19): siRNA sense strand
caaucagaauggcucaaau

SEQ ID NO: 1946146 - RNA, 19 nt, Homo sapiens
  misc_RNA (1)...(19): siRNA sense strand
cauaaagggaccagcuaaa

SEQ ID NO: 1946147 - RNA, 19 nt, Homo sapiens
  misc_RNA (1)...(19): siRNA sense strand
guucuccaauagauucaaa

SEQ ID NO: 1946148 - RNA, 19 nt, Homo sapiens
  misc_RNA (1)...(19): siRNA sense strand
ugacguugcacugguauaa

SEQ ID NO: 1946149 - RNA, 19 nt, Homo sapiens
  misc_RNA (1)...(19): siRNA sense strand
auacaugaccaacuugaaa

SEQ ID NO: 1946150 - RNA, 19 nt, Homo sapiens
  misc_RNA (1)...(19): siRNA sense strand
gugaauaauggcacaagaa

SEQ ID NO: 1946151 - RNA, 19 nt, Homo sapiens
  misc_RNA (1)...(19): siRNA sense strand
ucaaaugccacucaguaug

SEQ ID NO: 1946152 - RNA, 19 nt, Homo sapiens
  misc_RNA (1)...(19): siRNA sense strand
ugacaguuauguguauugu

SEQ ID NO: 1946153 - RNA, 19 nt, Homo sapiens
  misc_RNA (1)...(19): siRNA sense strand
gcaagaugaagaaagauac

SEQ ID NO: 1946154 - RNA, 19 nt, Homo sapiens
  misc_RNA (1)...(19): siRNA sense strand
ugaauguacagucaaagaa

SEQ ID NO: 1946155 - RNA, 19 nt, Homo sapiens
  misc_RNA (1)...(19): siRNA sense strand
gguauucucacuuugacuu

SEQ ID NO: 1946156 - RNA, 19 nt, Homo sapiens
  misc_RNA (1)...(19): siRNA sense strand
gacauggacuuggguggau

SEQ ID NO: 1946157 - RNA, 19 nt, Homo sapiens
  misc_RNA (1)...(19): siRNA sense strand
agaaagauacaugacauug

SEQ ID NO: 1946158 - RNA, 19 nt, Homo sapiens
  misc_RNA (1)...(19): siRNA sense strand
ggaguucugcccaaacauc

SEQ ID NO: 1946159 - RNA, 19 nt, Homo sapiens
  misc_RNA (1)...(19): siRNA sense strand
ccaaucagaauggcucaaa

SEQ ID NO: 1946160 - RNA, 19 nt, Homo sapiens
  misc_RNA (1)...(19): siRNA sense strand
uguuauugguucucuaaug

SEQ ID NO: 1946161 - RNA, 19 nt, Homo sapiens
  misc_RNA (1)...(19): siRNA sense strand
ucucagggaguauugcuaa

SEQ ID NO: 1946162 - RNA, 19 nt, Homo sapiens
  misc_RNA (1)...(19): siRNA sense strand
gcagcaguguuuucaaaug

SEQ ID NO: 1946163 - RNA, 19 nt, Homo sapiens
  misc_RNA (1)...(19): siRNA sense strand
gugcugccauuaaggaaag

SEQ ID NO: 1946164 - RNA, 19 nt, Homo sapiens
  misc_RNA (1)...(19): siRNA sense strand
ucauaaagggaccagcuaa

SEQ ID NO: 1946165 - RNA, 19 nt, Homo sapiens
  misc_RNA (1)...(19): siRNA sense strand
ugaagaaagauacaugaca

SEQ ID NO: 1946166 - RNA, 19 nt, Homo sapiens
  misc_RNA (1)...(19): siRNA sense strand
aagcuggagugacaguuau

SEQ ID NO: 1946167 - RNA, 19 nt, Homo sapiens
  misc_RNA (1)...(19): siRNA sense strand
gacaguacuaugccaauca

SEQ ID NO: 1946168 - RNA, 19 nt, Homo sapiens
  misc_RNA (1)...(19): siRNA sense strand
guugguuucucagggagua

SEQ ID NO: 1946169 - RNA, 19 nt, Homo sapiens
  misc_RNA (1)...(19): siRNA sense strand
aaggaguucugcccaaaca

SEQ ID NO: 1946170 - RNA, 19 nt, Homo sapiens
  misc_RNA (1)...(19): siRNA sense strand
aauggcacaagaagaaaua

SEQ ID NO: 1946171 - RNA, 19 nt, Homo sapiens
  misc_RNA (1)...(19): siRNA sense strand
uaaacuacguauggauugg

SEQ ID NO: 1946172 - RNA, 19 nt, Homo sapiens
  misc_RNA (1)...(19): siRNA sense strand
gaauaucuggaaccgugaa

SEQ ID NO: 1946173 - RNA, 19 nt, Homo sapiens
  misc_RNA (1)...(19): siRNA sense strand
ucaaauaccaagggaagug

SEQ ID NO: 1946174 - RNA, 19 nt, Homo sapiens
  misc_RNA (1)...(19): siRNA sense strand
ugaauaauggcacaagaag

SEQ ID NO: 1946175 - RNA, 19 nt, Homo sapiens
  misc_RNA (1)...(19): siRNA sense strand
ucuggaaccgugaauggua

SEQ ID NO: 1946176 - RNA, 19 nt, Homo sapiens
  misc_RNA (1)...(19): siRNA sense strand
caagaugaagaaagauaca

SEQ ID NO: 1946177 - RNA, 19 nt, Homo sapiens
  misc_RNA (1)...(19): siRNA sense strand
ccuaagacaauuaaacuac

SEQ ID NO: 1946178 - RNA, 19 nt, Homo sapiens
  misc_RNA (1)...(19): siRNA sense strand
caucuacuaaucauacaug

SEQ ID NO: 1946179 - RNA, 19 nt, Homo sapiens
  misc_RNA (1)...(19): siRNA sense strand
uggcacaagaagaaauaua

SEQ ID NO: 1946180 - RNA, 19 nt, Homo sapiens
  misc_RNA (1)...(19): siRNA sense strand
uuacugggaauaucuggaa

SEQ ID NO: 1946181 - RNA, 19 nt, Homo sapiens
  misc_RNA (1)...(19): siRNA sense strand
aauaccaagggaaguguua

SEQ ID NO: 1946182 - RNA, 19 nt, Homo sapiens
  misc_RNA (1)...(19): siRNA sense strand
gaggacacuggagaucuaa

SEQ ID NO: 1946183 - RNA, 19 nt, Homo sapiens
  misc_RNA (1)...(19): siRNA sense strand
gaugguucuccaauagauu

SEQ ID NO: 1946184 - RNA, 19 nt, Homo sapiens
  misc_RNA (1)...(19): siRNA sense strand
ggacacuggagaucuaaaa

SEQ ID NO: 1946185 - RNA, 19 nt, Homo sapiens
  misc_RNA (1)...(19): siRNA sense strand
gcugugcugccauuaagga

SEQ ID NO: 1946186 - RNA, 19 nt, Homo sapiens
  misc_RNA (1)...(19): siRNA sense strand
cuggaaccgugaaugguau

SEQ ID NO: 1946187 - RNA, 19 nt, Homo sapiens
  misc_RNA (1)...(19): siRNA sense strand
uuaaacuacguauggauug

SEQ ID NO: 1946188 - RNA, 19 nt, Homo sapiens
  misc_RNA (1)...(19): siRNA sense strand
caacuugaaauggcuuuua

SEQ ID NO: 1946189 - RNA, 19 nt, Homo sapiens
  misc_RNA (1)...(19): siRNA sense strand
gggaaguguuauugguucu

SEQ ID NO: 1946190 - RNA, 19 nt, Homo sapiens
  misc_RNA (1)...(19): siRNA sense strand
guauucucacuuugacuuu

SEQ ID NO: 1946191 - RNA, 19 nt, Homo sapiens
  misc_RNA (1)...(19): siRNA sense strand
aaugguauucucacuuuga

SEQ ID NO: 1946192 - RNA, 19 nt, Homo sapiens
  misc_RNA (1)...(19): siRNA sense strand
gcagaccagacaguacuau

SEQ ID NO: 1946193 - RNA, 19 nt, Homo sapiens
  misc_RNA (1)...(19): siRNA sense strand
ggcuuaacuuuaccuccuu

SEQ ID NO: 1946194 - RNA, 19 nt, Homo sapiens
  misc_RNA (1)...(19): siRNA sense strand
guguauuguuuggaaagaa

SEQ ID NO: 1946195 - RNA, 19 nt, Homo sapiens
  misc_RNA (1)...(19): siRNA sense strand
caaauaccaagggaagugu

SEQ ID NO: 1946196 - RNA, 19 nt, Homo sapiens
  misc_RNA (1)...(19): siRNA sense strand
agacaguacuaugccaauc

SEQ ID NO: 1946197 - RNA, 19 nt, Homo sapiens
  misc_RNA (1)...(19): siRNA sense strand
aaaaggaguucugcccaaa

SEQ ID NO: 1946198 - RNA, 19 nt, Homo sapiens
  misc_RNA (1)...(19): siRNA sense strand
gacaauuaaacuacguaug

SEQ ID NO: 1946199 - RNA, 19 nt, Homo sapiens
  misc_RNA (1)...(19): siRNA sense strand
auucucacuuugacuuuga

SEQ ID NO: 1946200 - RNA, 19 nt, Homo sapiens
  misc_RNA (1)...(19): siRNA sense strand
agugaauaauggcacaaga

SEQ ID NO: 1946201 - RNA, 19 nt, Homo sapiens
  misc_RNA (1)...(19): siRNA sense strand
acguauggauugggcuuaa

SEQ ID NO: 1946202 - RNA, 19 nt, Homo sapiens
  misc_RNA (1)...(19): siRNA sense strand
cauacaugaccaacuugaa

SEQ ID NO: 1946203 - RNA, 19 nt, Homo sapiens
  misc_RNA (1)...(19): siRNA sense strand
cgacacaucucucaucaga

SEQ ID NO: 1946204 - RNA, 19 nt, Homo sapiens
  misc_RNA (1)...(19): siRNA sense strand
ugaauccguucgaguauua

SEQ ID NO: 1946205 - RNA, 19 nt, Homo sapiens
  misc_RNA (1)...(19): siRNA sense strand
caaccuggcugagaugauu

SEQ ID NO: 1946206 - RNA, 19 nt, Homo sapiens
  misc_RNA (1)...(19): siRNA sense strand
aaauguggcuucaucacua

SEQ ID NO: 1946207 - RNA, 19 nt, Homo sapiens
  misc_RNA (1)...(19): siRNA sense strand
gcuaugagaucgccagcuu

SEQ ID NO: 1946208 - RNA, 19 nt, Homo sapiens
  misc_RNA (1)...(19): siRNA sense strand
gaaacucuaccucuucuug

SEQ ID NO: 1946209 - RNA, 19 nt, Homo sapiens
  misc_RNA (1)...(19): siRNA sense strand
ggagaaaugggcacccuuu

SEQ ID NO: 1946210 - RNA, 19 nt, Homo sapiens
  misc_RNA (1)...(19): siRNA sense strand
ucagaaaggugagcagcua

SEQ ID NO: 1946211 - RNA, 19 nt, Homo sapiens
  misc_RNA (1)...(19): siRNA sense strand
guucgaguauuacauauuc

SEQ ID NO: 1946212 - RNA, 19 nt, Homo sapiens
  misc_RNA (1)...(19): siRNA sense strand
aggagaaccugcugaugua

SEQ ID NO: 1946213 - RNA, 19 nt, Homo sapiens
  misc_RNA (1)...(19): siRNA sense strand
gaaaugggcacccuuuguc

SEQ ID NO: 1946214 - RNA, 19 nt, Homo sapiens
  misc_RNA (1)...(19): siRNA sense strand
gcagaaacucuaccucuuc

SEQ ID NO: 1946215 - RNA, 19 nt, Homo sapiens
  misc_RNA (1)...(19): siRNA sense strand
ucaaugggcugcgaagguu

SEQ ID NO: 1946216 - RNA, 19 nt, Homo sapiens
  misc_RNA (1)...(19): siRNA sense strand
ccaacgaccuggacgagau

SEQ ID NO: 1946217 - RNA, 19 nt, Homo sapiens
  misc_RNA (1)...(19): siRNA sense strand
gguaccagaucaucaaugg

SEQ ID NO: 1946218 - RNA, 19 nt, Homo sapiens
  misc_RNA (1)...(19): siRNA sense strand
cugcgaagguuugaaauug

SEQ ID NO: 1946219 - RNA, 19 nt, Homo sapiens
  misc_RNA (1)...(19): siRNA sense strand
gagcuguccuggagaugug

SEQ ID NO: 1946220 - RNA, 19 nt, Homo sapiens
  misc_RNA (1)...(19): siRNA sense strand
ccaccacacuagccuccua

SEQ ID NO: 1946221 - RNA, 19 nt, Homo sapiens
  misc_RNA (1)...(19): siRNA sense strand
caaguuguuugugggcuuu

SEQ ID NO: 1946222 - RNA, 19 nt, Homo sapiens
  misc_RNA (1)...(19): siRNA sense strand
gaaauguggcuucaucacu

SEQ ID NO: 1946223 - RNA, 19 nt, Homo sapiens
  misc_RNA (1)...(19): siRNA sense strand
gaagguuugaaauugagua

SEQ ID NO: 1946224 - RNA, 19 nt, Homo sapiens
  misc_RNA (1)...(19): siRNA sense strand
ggccaggacugcaaguaca

SEQ ID NO: 1946225 - RNA, 19 nt, Homo sapiens
  misc_RNA (1)...(19): siRNA sense strand
gaaaggugagcagcuauuc

SEQ ID NO: 1946226 - RNA, 19 nt, Homo sapiens
  misc_RNA (1)...(19): siRNA sense strand
gauguacaccaaguuguuu

SEQ ID NO: 1946227 - RNA, 19 nt, Homo sapiens
  misc_RNA (1)...(19): siRNA sense strand
ucgcucagcucaucacaca

SEQ ID NO: 1946228 - RNA, 19 nt, Homo sapiens
  misc_RNA (1)...(19): siRNA sense strand
ggagaaggcccuggaguac

SEQ ID NO: 1946229 - RNA, 19 nt, Homo sapiens
  misc_RNA (1)...(19): siRNA sense strand
gcaccacccaggaugagaa

SEQ ID NO: 1946230 - RNA, 19 nt, Homo sapiens
  misc_RNA (1)...(19): siRNA sense strand
ucucauggcugggcuuuag

SEQ ID NO: 1946231 - RNA, 19 nt, Homo sapiens
  misc_RNA (1)...(19): siRNA sense strand
gcgaagguuugaaauugag

SEQ ID NO: 1946232 - RNA, 19 nt, Homo sapiens
  misc_RNA (1)...(19): siRNA sense strand
gggcugcgaagguuugaaa

SEQ ID NO: 1946233 - RNA, 19 nt, Homo sapiens
  misc_RNA (1)...(19): siRNA sense strand
ggaguaccugcgccagaua

SEQ ID NO: 1946234 - RNA, 19 nt, Homo sapiens
  misc_RNA (1)...(19): siRNA sense strand
gacaccagccauacccuuu

SEQ ID NO: 1946235 - RNA, 19 nt, Homo sapiens
  misc_RNA (1)...(19): siRNA sense strand
gguuugaaauugaguacca

SEQ ID NO: 1946236 - RNA, 19 nt, Homo sapiens
  misc_RNA (1)...(19): siRNA sense strand
uggagaaggcccuggagua

SEQ ID NO: 1946237 - RNA, 19 nt, Homo sapiens
  misc_RNA (1)...(19): siRNA sense strand
gagaaaugggcacccuuug

SEQ ID NO: 1946238 - RNA, 19 nt, Homo sapiens
  misc_RNA (1)...(19): siRNA sense strand
ucagagcuguccuggagau

SEQ ID NO: 1946239 - RNA, 19 nt, Homo sapiens
  misc_RNA (1)...(19): siRNA sense strand
ccacaacaagguccaguuc

SEQ ID NO: 1946240 - RNA, 19 nt, Homo sapiens
  misc_RNA (1)...(19): siRNA sense strand
ugcgaagguuugaaauuga

SEQ ID NO: 1946241 - RNA, 19 nt, Homo sapiens
  misc_RNA (1)...(19): siRNA sense strand
ucacugaugccuccuucaa

SEQ ID NO: 1946242 - RNA, 19 nt, Homo sapiens
  misc_RNA (1)...(19): siRNA sense strand
gcugcgaagguuugaaauu

SEQ ID NO: 1946243 - RNA, 19 nt, Homo sapiens
  misc_RNA (1)...(19): siRNA sense strand
aagcgcagcucaggcaguu

SEQ ID NO: 1946244 - RNA, 19 nt, Homo sapiens
  misc_RNA (1)...(19): siRNA sense strand
uaaagcgacacaucucuca

SEQ ID NO: 1946245 - RNA, 19 nt, Homo sapiens
  misc_RNA (1)...(19): siRNA sense strand
acuauuccuuggagaugua

SEQ ID NO: 1946246 - RNA, 19 nt, Homo sapiens
  misc_RNA (1)...(19): siRNA sense strand
ccauacccuuugcuuccua

SEQ ID NO: 1946247 - RNA, 19 nt, Homo sapiens
  misc_RNA (1)...(19): siRNA sense strand
gccaucaaccacagauuug

SEQ ID NO: 1946248 - RNA, 19 nt, Homo sapiens
  misc_RNA (1)...(19): siRNA sense strand
cuucagacugugccuauuu

SEQ ID NO: 1946249 - RNA, 19 nt, Homo sapiens
  misc_RNA (1)...(19): siRNA sense strand
gcugauguacaccaaguug

SEQ ID NO: 1946250 - RNA, 19 nt, Homo sapiens
  misc_RNA (1)...(19): siRNA sense strand
cgagguucguccagcagaa

SEQ ID NO: 1946251 - RNA, 19 nt, Homo sapiens
  misc_RNA (1)...(19): siRNA sense strand
cuacugaggagcauguguu

SEQ ID NO: 1946252 - RNA, 19 nt, Homo sapiens
  misc_RNA (1)...(19): siRNA sense strand
agacugugccuauuucauc

SEQ ID NO: 1946253 - RNA, 19 nt, Homo sapiens
  misc_RNA (1)...(19): siRNA sense strand
gcucaucacacaggccaaa

SEQ ID NO: 1946254 - RNA, 19 nt, Homo sapiens
  misc_RNA (1)...(19): siRNA sense strand
gcaaguacaccccgauguu

SEQ ID NO: 1946255 - RNA, 19 nt, Homo sapiens
  misc_RNA (1)...(19): siRNA sense strand
gguacgcgccugacaagca

SEQ ID NO: 1946256 - RNA, 19 nt, Homo sapiens
  misc_RNA (1)...(19): siRNA sense strand
gcgcagcucaggcaguuca

SEQ ID NO: 1946257 - RNA, 19 nt, Homo sapiens
  misc_RNA (1)...(19): siRNA sense strand
gggccuuggucugaacuug

SEQ ID NO: 1946258 - RNA, 19 nt, Homo sapiens
  misc_RNA (1)...(19): siRNA sense strand
ugauguacaccaaguuguu

SEQ ID NO: 1946259 - RNA, 19 nt, Homo sapiens
  misc_RNA (1)...(19): siRNA sense strand
agaaaugggcacccuuugu

SEQ ID NO: 1946260 - RNA, 19 nt, Homo sapiens
  misc_RNA (1)...(19): siRNA sense strand
gaagcaccugcacgccuuu

SEQ ID NO: 1946261 - RNA, 19 nt, Homo sapiens
  misc_RNA (1)...(19): siRNA sense strand
cagauuugcaggacagaug

SEQ ID NO: 1946262 - RNA, 19 nt, Homo sapiens
  misc_RNA (1)...(19): siRNA sense strand
ugccaucaaccacagauuu

SEQ ID NO: 1946263 - RNA, 19 nt, Homo sapiens
  misc_RNA (1)...(19): siRNA sense strand
aauguggcuucaucacuau

SEQ ID NO: 1946264 - RNA, 19 nt, Homo sapiens
  misc_RNA (1)...(19): siRNA sense strand
ccaaacacacagccaaguc

SEQ ID NO: 1946265 - RNA, 19 nt, Homo sapiens
  misc_RNA (1)...(19): siRNA sense strand
agaaaggugagcagcuauu

SEQ ID NO: 1946266 - RNA, 19 nt, Homo sapiens
  misc_RNA (1)...(19): siRNA sense strand
gagaaccugcugauguaca

SEQ ID NO: 1946267 - RNA, 19 nt, Homo sapiens
  misc_RNA (1)...(19): siRNA sense strand
agcagaaacucuaccucuu

SEQ ID NO: 1946268 - RNA, 19 nt, Homo sapiens
  misc_RNA (1)...(19): siRNA sense strand
gagguucguccagcagaaa

SEQ ID NO: 1946269 - RNA, 19 nt, Homo sapiens
  misc_RNA (1)...(19): siRNA sense strand
guccaucuccgaccagugu

SEQ ID NO: 1946270 - RNA, 19 nt, Homo sapiens
  misc_RNA (1)...(19): siRNA sense strand
gcugucgucugccaucaac

SEQ ID NO: 1946271 - RNA, 19 nt, Homo sapiens
  misc_RNA (1)...(19): siRNA sense strand
cugaauccguucgaguauu

SEQ ID NO: 1946272 - RNA, 19 nt, Homo sapiens
  misc_RNA (1)...(19): siRNA sense strand
cagaugaauaccuggagaa

SEQ ID NO: 1946273 - RNA, 19 nt, Homo sapiens
  misc_RNA (1)...(19): siRNA sense strand
uccggaagacagaugaaua

SEQ ID NO: 1946274 - RNA, 19 nt, Homo sapiens
  misc_RNA (1)...(19): siRNA sense strand
ccuuggagauguaucaaaa

SEQ ID NO: 1946275 - RNA, 19 nt, Homo sapiens
  misc_RNA (1)...(19): siRNA sense strand
cuucguggccucucuguuc

SEQ ID NO: 1946276 - RNA, 19 nt, Homo sapiens
  misc_RNA (1)...(19): siRNA sense strand
gaguaccugcgccagauau

SEQ ID NO: 1946277 - RNA, 19 nt, Homo sapiens
  misc_RNA (1)...(19): siRNA sense strand
uggaguaccugcgccagau

SEQ ID NO: 1946278 - RNA, 19 nt, Homo sapiens
  misc_RNA (1)...(19): siRNA sense strand
agaaggcccuggaguaccu

SEQ ID NO: 1946279 - RNA, 19 nt, Homo sapiens
  misc_RNA (1)...(19): siRNA sense strand
caacgaccuggacgagaug

SEQ ID NO: 1946280 - RNA, 19 nt, Homo sapiens
  misc_RNA (1)...(19): siRNA sense strand
ugagaugauucagaaaggu

SEQ ID NO: 1946281 - RNA, 19 nt, Homo sapiens
  misc_RNA (1)...(19): siRNA sense strand
acaacaagguccaguucac

SEQ ID NO: 1946282 - RNA, 19 nt, Homo sapiens
  misc_RNA (1)...(19): siRNA sense strand
uaccucuucuugcagcauu

SEQ ID NO: 1946283 - RNA, 19 nt, Homo sapiens
  misc_RNA (1)...(19): siRNA sense strand
cguccguacuucagacugu

SEQ ID NO: 1946284 - RNA, 19 nt, Homo sapiens
  misc_RNA (1)...(19): siRNA sense strand
aaaaugcaguccccucaug

SEQ ID NO: 1946285 - RNA, 19 nt, Homo sapiens
  misc_RNA (1)...(19): siRNA sense strand
ggaagacagaugaauaccu

SEQ ID NO: 1946286 - RNA, 19 nt, Homo sapiens
  misc_RNA (1)...(19): siRNA sense strand
cccugaauccguucgagua

SEQ ID NO: 1946287 - RNA, 19 nt, Homo sapiens
  misc_RNA (1)...(19): siRNA sense strand
guaccugcgccagauauuc

SEQ ID NO: 1946288 - RNA, 19 nt, Homo sapiens
  misc_RNA (1)...(19): siRNA sense strand
caaccuggcugagaugauu

SEQ ID NO: 1946289 - RNA, 19 nt, Homo sapiens
  misc_RNA (1)...(19): siRNA sense strand
gcuaugagaucgccagcuu

SEQ ID NO: 1946290 - RNA, 19 nt, Homo sapiens
  misc_RNA (1)...(19): siRNA sense strand
gaaacucuaccucuucuug

SEQ ID NO: 1946291 - RNA, 19 nt, Homo sapiens
  misc_RNA (1)...(19): siRNA sense strand
ggagaaaugggcacccuuu

SEQ ID NO: 1946292 - RNA, 19 nt, Homo sapiens
  misc_RNA (1)...(19): siRNA sense strand
ucagaaaggugagcagcua

SEQ ID NO: 1946293 - RNA, 19 nt, Homo sapiens
  misc_RNA (1)...(19): siRNA sense strand
aggagaaccugcugaugua

SEQ ID NO: 1946294 - RNA, 19 nt, Homo sapiens
  misc_RNA (1)...(19): siRNA sense strand
gaaaugggcacccuuuguc

SEQ ID NO: 1946295 - RNA, 19 nt, Homo sapiens
  misc_RNA (1)...(19): siRNA sense strand
gcagaaacucuaccucuuc

SEQ ID NO: 1946296 - RNA, 19 nt, Homo sapiens
  misc_RNA (1)...(19): siRNA sense strand
ucaaugggcugcgaagguu

SEQ ID NO: 1946297 - RNA, 19 nt, Homo sapiens
  misc_RNA (1)...(19): siRNA sense strand
ccaacgaccuggacgagau

SEQ ID NO: 1946298 - RNA, 19 nt, Homo sapiens
  misc_RNA (1)...(19): siRNA sense strand
gguaccagaucaucaaugg

SEQ ID NO: 1946299 - RNA, 19 nt, Homo sapiens
  misc_RNA (1)...(19): siRNA sense strand
cugcgaagguuugaaauug

SEQ ID NO: 1946300 - RNA, 19 nt, Homo sapiens
  misc_RNA (1)...(19): siRNA sense strand
gagcuguccuggagaugug

SEQ ID NO: 1946301 - RNA, 19 nt, Homo sapiens
  misc_RNA (1)...(19): siRNA sense strand
caaguuguuugugggcuuu

SEQ ID NO: 1946302 - RNA, 19 nt, Homo sapiens
  misc_RNA (1)...(19): siRNA sense strand
gaaaggugagcagcuauuc

SEQ ID NO: 1946303 - RNA, 19 nt, Homo sapiens
  misc_RNA (1)...(19): siRNA sense strand
gaagguuugaaauugagua

SEQ ID NO: 1946304 - RNA, 19 nt, Homo sapiens
  misc_RNA (1)...(19): siRNA sense strand
ggccaggacugcaaguaca

SEQ ID NO: 1946305 - RNA, 19 nt, Homo sapiens
  misc_RNA (1)...(19): siRNA sense strand
gauguacaccaaguuguuu

SEQ ID NO: 1946306 - RNA, 19 nt, Homo sapiens
  misc_RNA (1)...(19): siRNA sense strand
ucgcucagcucaucacaca

SEQ ID NO: 1946307 - RNA, 19 nt, Homo sapiens
  misc_RNA (1)...(19): siRNA sense strand
ggagaaggcccuggaguac

SEQ ID NO: 1946308 - RNA, 19 nt, Homo sapiens
  misc_RNA (1)...(19): siRNA sense strand
gcaccacccaggaugagaa

SEQ ID NO: 1946309 - RNA, 19 nt, Homo sapiens
  misc_RNA (1)...(19): siRNA sense strand
ucucauggcugggcuuuag

SEQ ID NO: 1946310 - RNA, 19 nt, Homo sapiens
  misc_RNA (1)...(19): siRNA sense strand
gcgaagguuugaaauugag

SEQ ID NO: 1946311 - RNA, 19 nt, Homo sapiens
  misc_RNA (1)...(19): siRNA sense strand
gggcugcgaagguuugaaa

SEQ ID NO: 1946312 - RNA, 19 nt, Homo sapiens
  misc_RNA (1)...(19): siRNA sense strand
ggaguaccugcgccagaua

SEQ ID NO: 1946313 - RNA, 19 nt, Homo sapiens
  misc_RNA (1)...(19): siRNA sense strand
ucagagcuguccuggagau

SEQ ID NO: 1946314 - RNA, 19 nt, Homo sapiens
  misc_RNA (1)...(19): siRNA sense strand
gguuugaaauugaguacca

SEQ ID NO: 1946315 - RNA, 19 nt, Homo sapiens
  misc_RNA (1)...(19): siRNA sense strand
uggagaaggcccuggagua

SEQ ID NO: 1946316 - RNA, 19 nt, Homo sapiens
  misc_RNA (1)...(19): siRNA sense strand
gagaaaugggcacccuuug

SEQ ID NO: 1946317 - RNA, 19 nt, Homo sapiens
  misc_RNA (1)...(19): siRNA sense strand
ugcgaagguuugaaauuga

SEQ ID NO: 1946318 - RNA, 19 nt, Homo sapiens
  misc_RNA (1)...(19): siRNA sense strand
ucacugaugccuccuucaa

SEQ ID NO: 1946319 - RNA, 19 nt, Homo sapiens
  misc_RNA (1)...(19): siRNA sense strand
gcugcgaagguuugaaauu

SEQ ID NO: 1946320 - RNA, 19 nt, Homo sapiens
  misc_RNA (1)...(19): siRNA sense strand
aagcgcagcucaggcaguu

SEQ ID NO: 1946321 - RNA, 19 nt, Homo sapiens
  misc_RNA (1)...(19): siRNA sense strand
acuauuccuuggagaugua

SEQ ID NO: 1946322 - RNA, 19 nt, Homo sapiens
  misc_RNA (1)...(19): siRNA sense strand
cgagguucguccagcagaa

SEQ ID NO: 1946323 - RNA, 19 nt, Homo sapiens
  misc_RNA (1)...(19): siRNA sense strand
gccaucaaccacagauuug

SEQ ID NO: 1946324 - RNA, 19 nt, Homo sapiens
  misc_RNA (1)...(19): siRNA sense strand
gcugauguacaccaaguug

SEQ ID NO: 1946325 - RNA, 19 nt, Homo sapiens
  misc_RNA (1)...(19): siRNA sense strand
cuacugaggagcauguguu

SEQ ID NO: 1946326 - RNA, 19 nt, Homo sapiens
  misc_RNA (1)...(19): siRNA sense strand
gcaaguacaccccgauguu

SEQ ID NO: 1946327 - RNA, 19 nt, Homo sapiens
  misc_RNA (1)...(19): siRNA sense strand
gcucaucacacaggccaaa

SEQ ID NO: 1946328 - RNA, 19 nt, Homo sapiens
  misc_RNA (1)...(19): siRNA sense strand
gguacgcgccugacaagca

SEQ ID NO: 1946329 - RNA, 19 nt, Homo sapiens
  misc_RNA (1)...(19): siRNA sense strand
gcgcagcucaggcaguuca

SEQ ID NO: 1946330 - RNA, 19 nt, Homo sapiens
  misc_RNA (1)...(19): siRNA sense strand
ugauguacaccaaguuguu

SEQ ID NO: 1946331 - RNA, 19 nt, Homo sapiens
  misc_RNA (1)...(19): siRNA sense strand
agaaaugggcacccuuugu

SEQ ID NO: 1946332 - RNA, 19 nt, Homo sapiens
  misc_RNA (1)...(19): siRNA sense strand
gaagcaccugcacgccuuu

SEQ ID NO: 1946333 - RNA, 19 nt, Homo sapiens
  misc_RNA (1)...(19): siRNA sense strand
cagauuugcaggacagaug

SEQ ID NO: 1946334 - RNA, 19 nt, Homo sapiens
  misc_RNA (1)...(19): siRNA sense strand
ugccaucaaccacagauuu

SEQ ID NO: 1946335 - RNA, 19 nt, Homo sapiens
  misc_RNA (1)...(19): siRNA sense strand
gagaaccugcugauguaca

SEQ ID NO: 1946336 - RNA, 19 nt, Homo sapiens
  misc_RNA (1)...(19): siRNA sense strand
agcagaaacucuaccucuu

SEQ ID NO: 1946337 - RNA, 19 nt, Homo sapiens
  misc_RNA (1)...(19): siRNA sense strand
ccaaacacacagccaaguc

SEQ ID NO: 1946338 - RNA, 19 nt, Homo sapiens
  misc_RNA (1)...(19): siRNA sense strand
agaaaggugagcagcuauu

SEQ ID NO: 1946339 - RNA, 19 nt, Homo sapiens
  misc_RNA (1)...(19): siRNA sense strand
gagguucguccagcagaaa

SEQ ID NO: 1946340 - RNA, 19 nt, Homo sapiens
  misc_RNA (1)...(19): siRNA sense strand
guccaucuccgaccagugu

SEQ ID NO: 1946341 - RNA, 19 nt, Homo sapiens
  misc_RNA (1)...(19): siRNA sense strand
gcugucgucugccaucaac

SEQ ID NO: 1946342 - RNA, 19 nt, Homo sapiens
  misc_RNA (1)...(19): siRNA sense strand
cagaugaauaccuggagaa

SEQ ID NO: 1946343 - RNA, 19 nt, Homo sapiens
  misc_RNA (1)...(19): siRNA sense strand
uccggaagacagaugaaua

SEQ ID NO: 1946344 - RNA, 19 nt, Homo sapiens
  misc_RNA (1)...(19): siRNA sense strand
ccuuggagauguaucaaaa

SEQ ID NO: 1946345 - RNA, 19 nt, Homo sapiens
  misc_RNA (1)...(19): siRNA sense strand
cuucguggccucucuguuc

SEQ ID NO: 1946346 - RNA, 19 nt, Homo sapiens
  misc_RNA (1)...(19): siRNA sense strand
gaguaccugcgccagauau

SEQ ID NO: 1946347 - RNA, 19 nt, Homo sapiens
  misc_RNA (1)...(19): siRNA sense strand
uggaguaccugcgccagau

SEQ ID NO: 1946348 - RNA, 19 nt, Homo sapiens
  misc_RNA (1)...(19): siRNA sense strand
agaaggcccuggaguaccu

SEQ ID NO: 1946349 - RNA, 19 nt, Homo sapiens
  misc_RNA (1)...(19): siRNA sense strand
caacgaccuggacgagaug

SEQ ID NO: 1946350 - RNA, 19 nt, Homo sapiens
  misc_RNA (1)...(19): siRNA sense strand
ugagaugauucagaaaggu

SEQ ID NO: 1946351 - RNA, 19 nt, Homo sapiens
  misc_RNA (1)...(19): siRNA sense strand
uaccucuucuugcagcauu

SEQ ID NO: 1946352 - RNA, 19 nt, Homo sapiens
  misc_RNA (1)...(19): siRNA sense strand
aaaaugcaguccccucaug

SEQ ID NO: 1946353 - RNA, 19 nt, Homo sapiens
  misc_RNA (1)...(19): siRNA sense strand
ggaagacagaugaauaccu

SEQ ID NO: 1946354 - RNA, 19 nt, Homo sapiens
  misc_RNA (1)...(19): siRNA sense strand
guaccugcgccagauauuc

SEQ ID NO: 1946355 - RNA, 19 nt, Homo sapiens
  misc_RNA (1)...(19): siRNA sense strand
caauguauccggugaauuu

SEQ ID NO: 1946356 - RNA, 19 nt, Homo sapiens
  misc_RNA (1)...(19): siRNA sense strand
ucaguaaguuguuauguug

SEQ ID NO: 1946357 - RNA, 19 nt, Homo sapiens
  misc_RNA (1)...(19): siRNA sense strand
ggaaagaguacaccuuaau

SEQ ID NO: 1946358 - RNA, 19 nt, Homo sapiens
  misc_RNA (1)...(19): siRNA sense strand
gaaagaguacaccuuaaug

SEQ ID NO: 1946359 - RNA, 19 nt, Homo sapiens
  misc_RNA (1)...(19): siRNA sense strand
gaaaggacagagucauuug

SEQ ID NO: 1946360 - RNA, 19 nt, Homo sapiens
  misc_RNA (1)...(19): siRNA sense strand
guaauugcuugugugcuua

SEQ ID NO: 1946361 - RNA, 19 nt, Homo sapiens
  misc_RNA (1)...(19): siRNA sense strand
ggacagagucauuugaugu

SEQ ID NO: 1946362 - RNA, 19 nt, Homo sapiens
  misc_RNA (1)...(19): siRNA sense strand
gaauuuggaugguccuucu

SEQ ID NO: 1946363 - RNA, 19 nt, Homo sapiens
  misc_RNA (1)...(19): siRNA sense strand
gaauaucgaaguccaguuc

SEQ ID NO: 1946364 - RNA, 19 nt, Homo sapiens
  misc_RNA (1)...(19): siRNA sense strand
caagaaaauuccagugauu

SEQ ID NO: 1946365 - RNA, 19 nt, Homo sapiens
  misc_RNA (1)...(19): siRNA sense strand
aagcuuauaucccaccauu

SEQ ID NO: 1946366 - RNA, 19 nt, Homo sapiens
  misc_RNA (1)...(19): siRNA sense strand
ggacuuugugcuugcauuu

SEQ ID NO: 1946367 - RNA, 19 nt, Homo sapiens
  misc_RNA (1)...(19): siRNA sense strand
ccggaaagaguacaccuua

SEQ ID NO: 1946368 - RNA, 19 nt, Homo sapiens
  misc_RNA (1)...(19): siRNA sense strand
agagcucccugacaaugua

SEQ ID NO: 1946369 - RNA, 19 nt, Homo sapiens
  misc_RNA (1)...(19): siRNA sense strand
uguaauugcuugugugcuu

SEQ ID NO: 1946370 - RNA, 19 nt, Homo sapiens
  misc_RNA (1)...(19): siRNA sense strand
cggaaagaguacaccuuaa

SEQ ID NO: 1946371 - RNA, 19 nt, Homo sapiens
  misc_RNA (1)...(19): siRNA sense strand
aaagaguacaccuuaauga

SEQ ID NO: 1946372 - RNA, 19 nt, Homo sapiens
  misc_RNA (1)...(19): siRNA sense strand
gaaguccaguucaagaaaa

SEQ ID NO: 1946373 - RNA, 19 nt, Homo sapiens
  misc_RNA (1)...(19): siRNA sense strand
gacaauguauccggugaau

SEQ ID NO: 1946374 - RNA, 19 nt, Homo sapiens
  misc_RNA (1)...(19): siRNA sense strand
gaacuacuccaccagaaac

SEQ ID NO: 1946375 - RNA, 19 nt, Homo sapiens
  misc_RNA (1)...(19): siRNA sense strand
cagaaaggacagagucauu

SEQ ID NO: 1946376 - RNA, 19 nt, Homo sapiens
  misc_RNA (1)...(19): siRNA sense strand
guuguuauguugcuggaau

SEQ ID NO: 1946377 - RNA, 19 nt, Homo sapiens
  misc_RNA (1)...(19): siRNA sense strand
cgaaguccaguucaagaaa

SEQ ID NO: 1946378 - RNA, 19 nt, Homo sapiens
  misc_RNA (1)...(19): siRNA sense strand
agaaaggacagagucauuu

SEQ ID NO: 1946379 - RNA, 19 nt, Homo sapiens
  misc_RNA (1)...(19): siRNA sense strand
gcaguucauggagaaauuu

SEQ ID NO: 1946380 - RNA, 19 nt, Homo sapiens
  misc_RNA (1)...(19): siRNA sense strand
acaccaaccggaaagagua

SEQ ID NO: 1946381 - RNA, 19 nt, Homo sapiens
  misc_RNA (1)...(19): siRNA sense strand
ccacgggcauucuccaucu

SEQ ID NO: 1946382 - RNA, 19 nt, Homo sapiens
  misc_RNA (1)...(19): siRNA sense strand
uuauguugcuggaauugaa

SEQ ID NO: 1946383 - RNA, 19 nt, Homo sapiens
  misc_RNA (1)...(19): siRNA sense strand
aacuagagcucccugacaa

SEQ ID NO: 1946384 - RNA, 19 nt, Homo sapiens
  misc_RNA (1)...(19): siRNA sense strand
cucaguaaguuguuauguu

SEQ ID NO: 1946385 - RNA, 19 nt, Homo sapiens
  misc_RNA (1)...(19): siRNA sense strand
aaaccacaauagcgggauu

SEQ ID NO: 1946386 - RNA, 19 nt, Homo sapiens
  misc_RNA (1)...(19): siRNA sense strand
agacuucugguaugaauau

SEQ ID NO: 1946387 - RNA, 19 nt, Homo sapiens
  misc_RNA (1)...(19): siRNA sense strand
gggcuuugaucggacuuug

SEQ ID NO: 1946388 - RNA, 19 nt, Homo sapiens
  misc_RNA (1)...(19): siRNA sense strand
aagaguacaccuuaaugaa

SEQ ID NO: 1946389 - RNA, 19 nt, Homo sapiens
  misc_RNA (1)...(19): siRNA sense strand
gcauuugccgaagcuuaua

SEQ ID NO: 1946390 - RNA, 19 nt, Homo sapiens
  misc_RNA (1)...(19): siRNA sense strand
ugaacuacuccaccagaaa

SEQ ID NO: 1946391 - RNA, 19 nt, Homo sapiens
  misc_RNA (1)...(19): siRNA sense strand
gugcuuagccucauuucca

SEQ ID NO: 1946392 - RNA, 19 nt, Homo sapiens
  misc_RNA (1)...(19): siRNA sense strand
uugugucucugcucccuua

SEQ ID NO: 1946393 - RNA, 19 nt, Homo sapiens
  misc_RNA (1)...(19): siRNA sense strand
gacagagucauuugaugug

SEQ ID NO: 1946394 - RNA, 19 nt, Homo sapiens
  misc_RNA (1)...(19): siRNA sense strand
guucauggagaaauuuguu

SEQ ID NO: 1946395 - RNA, 19 nt, Homo sapiens
  misc_RNA (1)...(19): siRNA sense strand
gaucccggaaaccacaaua

SEQ ID NO: 1946396 - RNA, 19 nt, Homo sapiens
  misc_RNA (1)...(19): siRNA sense strand
gcagaugaaaagacuuaua

SEQ ID NO: 1946397 - RNA, 19 nt, Homo sapiens
  misc_RNA (1)...(19): siRNA sense strand
gcuuauaucccaccauugc

SEQ ID NO: 1946398 - RNA, 19 nt, Homo sapiens
  misc_RNA (1)...(19): siRNA sense strand
cugagcaguucauggagaa

SEQ ID NO: 1946399 - RNA, 19 nt, Homo sapiens
  misc_RNA (1)...(19): siRNA sense strand
aaaggacagagucauuuga

SEQ ID NO: 1946400 - RNA, 19 nt, Homo sapiens
  misc_RNA (1)...(19): siRNA sense strand
aaacaugcauugguauagc

SEQ ID NO: 1946401 - RNA, 19 nt, Homo sapiens
  misc_RNA (1)...(19): siRNA sense strand
uguauccggugaauuugga

SEQ ID NO: 1946402 - RNA, 19 nt, Homo sapiens
  misc_RNA (1)...(19): siRNA sense strand
gagcaguucauggagaaau

SEQ ID NO: 1946403 - RNA, 19 nt, Homo sapiens
  misc_RNA (1)...(19): siRNA sense strand
uuugugaguuuagguuuga

SEQ ID NO: 1946404 - RNA, 19 nt, Homo sapiens
  misc_RNA (1)...(19): siRNA sense strand
cuucugcucucuucaucug

SEQ ID NO: 1946405 - RNA, 19 nt, Homo sapiens
  misc_RNA (1)...(19): siRNA sense strand
ccagugauuugaauaaaag

SEQ ID NO: 1946406 - RNA, 19 nt, Homo sapiens
  misc_RNA (1)...(19): siRNA sense strand
cauggcuucugcucucuuc

SEQ ID NO: 1946407 - RNA, 19 nt, Homo sapiens
  misc_RNA (1)...(19): siRNA sense strand
aaacuagagcucccugaca

SEQ ID NO: 1946408 - RNA, 19 nt, Homo sapiens
  misc_RNA (1)...(19): siRNA sense strand
gacuuauaaugaugcacuu

SEQ ID NO: 1946409 - RNA, 19 nt, Homo sapiens
  misc_RNA (1)...(19): siRNA sense strand
agaguacaccuuaaugaag

SEQ ID NO: 1946410 - RNA, 19 nt, Homo sapiens
  misc_RNA (1)...(19): siRNA sense strand
ucucugcucccuuacaguu

SEQ ID NO: 1946411 - RNA, 19 nt, Homo sapiens
  misc_RNA (1)...(19): siRNA sense strand
uuagugaugaggcagauga

SEQ ID NO: 1946412 - RNA, 19 nt, Homo sapiens
  misc_RNA (1)...(19): siRNA sense strand
uagcgggauugaucuccuu

SEQ ID NO: 1946413 - RNA, 19 nt, Homo sapiens
  misc_RNA (1)...(19): siRNA sense strand
ggauuguggagacggugua

SEQ ID NO: 1946414 - RNA, 19 nt, Homo sapiens
  misc_RNA (1)...(19): siRNA sense strand
gguauagcccaccagaaag

SEQ ID NO: 1946415 - RNA, 19 nt, Homo sapiens
  misc_RNA (1)...(19): siRNA sense strand
ggcauaucguguggcauga

SEQ ID NO: 1946416 - RNA, 19 nt, Homo sapiens
  misc_RNA (1)...(19): siRNA sense strand
cauuuguaauugcuugugu

SEQ ID NO: 1946417 - RNA, 19 nt, Homo sapiens
  misc_RNA (1)...(19): siRNA sense strand
gcuuugaucggacuuugug

SEQ ID NO: 1946418 - RNA, 19 nt, Homo sapiens
  misc_RNA (1)...(19): siRNA sense strand
guuuagguuugaugugcuu

SEQ ID NO: 1946419 - RNA, 19 nt, Homo sapiens
  misc_RNA (1)...(19): siRNA sense strand
gccaguuccuuuuaccuuu

SEQ ID NO: 1946420 - RNA, 19 nt, Homo sapiens
  misc_RNA (1)...(19): siRNA sense strand
ucauggagaaauuuguuga

SEQ ID NO: 1946421 - RNA, 19 nt, Homo sapiens
  misc_RNA (1)...(19): siRNA sense strand
ucaagaaaauuccagugau

SEQ ID NO: 1946422 - RNA, 19 nt, Homo sapiens
  misc_RNA (1)...(19): siRNA sense strand
uugaacuacuccaccagaa

SEQ ID NO: 1946423 - RNA, 19 nt, Homo sapiens
  misc_RNA (1)...(19): siRNA sense strand
ccaguuccuuuuaccuuuu

SEQ ID NO: 1946424 - RNA, 19 nt, Homo sapiens
  misc_RNA (1)...(19): siRNA sense strand
agcaguucauggagaaauu

SEQ ID NO: 1946425 - RNA, 19 nt, Homo sapiens
  misc_RNA (1)...(19): siRNA sense strand
guauagcccaccagaaagg

SEQ ID NO: 1946426 - RNA, 19 nt, Homo sapiens
  misc_RNA (1)...(19): siRNA sense strand
cuagagcucccugacaaug

SEQ ID NO: 1946427 - RNA, 19 nt, Homo sapiens
  misc_RNA (1)...(19): siRNA sense strand
cuucugguaugaauaucga

SEQ ID NO: 1946428 - RNA, 19 nt, Homo sapiens
  misc_RNA (1)...(19): siRNA sense strand
ucgaaguccaguucaagaa

SEQ ID NO: 1946429 - RNA, 19 nt, Homo sapiens
  misc_RNA (1)...(19): siRNA sense strand
ggaaacccuucaaauaguu

SEQ ID NO: 1946430 - RNA, 19 nt, Homo sapiens
  misc_RNA (1)...(19): siRNA sense strand
acaggaaacccuucaaaua

SEQ ID NO: 1946431 - RNA, 19 nt, Homo sapiens
  misc_RNA (1)...(19): siRNA sense strand
ggaaacagaacagcgaaua

SEQ ID NO: 1946432 - RNA, 19 nt, Homo sapiens
  misc_RNA (1)...(19): siRNA sense strand
cgaggacucugaugaacaa

SEQ ID NO: 1946433 - RNA, 19 nt, Homo sapiens
  misc_RNA (1)...(19): siRNA sense strand
gagagaaugugaccuuguc

SEQ ID NO: 1946434 - RNA, 19 nt, Homo sapiens
  misc_RNA (1)...(19): siRNA sense strand
caggaaacccuucaaauag

SEQ ID NO: 1946435 - RNA, 19 nt, Homo sapiens
  misc_RNA (1)...(19): siRNA sense strand
gaacauuccaggcugacuu

SEQ ID NO: 1946436 - RNA, 19 nt, Homo sapiens
  misc_RNA (1)...(19): siRNA sense strand
gaguccagauccaaaguug

SEQ ID NO: 1946437 - RNA, 19 nt, Homo sapiens
  misc_RNA (1)...(19): siRNA sense strand
ccaagagucugcaggaaac

SEQ ID NO: 1946438 - RNA, 19 nt, Homo sapiens
  misc_RNA (1)...(19): siRNA sense strand
gaaacagaacagcgaauag

SEQ ID NO: 1946439 - RNA, 19 nt, Homo sapiens
  misc_RNA (1)...(19): siRNA sense strand
gaccaagagucugcaggaa

SEQ ID NO: 1946440 - RNA, 19 nt, Homo sapiens
  misc_RNA (1)...(19): siRNA sense strand
gcagggaccuacagaugcu

SEQ ID NO: 1946441 - RNA, 19 nt, Homo sapiens
  misc_RNA (1)...(19): siRNA sense strand
ggagggaccuacagaugcu

SEQ ID NO: 1946442 - RNA, 19 nt, Homo sapiens
  misc_RNA (1)...(19): siRNA sense strand
ggugaaaucagaagagaca

SEQ ID NO: 1946443 - RNA, 19 nt, Homo sapiens
  misc_RNA (1)...(19): siRNA sense strand
ggacucugaugaacaagac

SEQ ID NO: 1946444 - RNA, 19 nt, Homo sapiens
  misc_RNA (1)...(19): siRNA sense strand
uaugacauguaccaucuau

SEQ ID NO: 1946445 - RNA, 19 nt, Homo sapiens
  misc_RNA (1)...(19): siRNA sense strand
gagcuccuaugacauguac

SEQ ID NO: 1946446 - RNA, 19 nt, Homo sapiens
  misc_RNA (1)...(19): siRNA sense strand
agacagucauccugcaaug

SEQ ID NO: 1946447 - RNA, 19 nt, Homo sapiens
  misc_RNA (1)...(19): siRNA sense strand
gguaauggaccaagagucu

SEQ ID NO: 1946448 - RNA, 19 nt, Homo sapiens
  misc_RNA (1)...(19): siRNA sense strand
ucaaauaguuggccuucac

SEQ ID NO: 1946449 - RNA, 19 nt, Homo sapiens
  misc_RNA (1)...(19): siRNA sense strand
aggaaacccuucaaauagu

SEQ ID NO: 1946450 - RNA, 19 nt, Homo sapiens
  misc_RNA (1)...(19): siRNA sense strand
ucacaggaaacccuucaaa

SEQ ID NO: 1946451 - RNA, 19 nt, Homo sapiens
  misc_RNA (1)...(19): siRNA sense strand
ccuaugacauguaccaucu

SEQ ID NO: 1946452 - RNA, 19 nt, Homo sapiens
  misc_RNA (1)...(19): siRNA sense strand
gcacagagaggggauguuu

SEQ ID NO: 1946453 - RNA, 19 nt, Homo sapiens
  misc_RNA (1)...(19): siRNA sense strand
caaggucaacggaacauuc

SEQ ID NO: 1946454 - RNA, 19 nt, Homo sapiens
  misc_RNA (1)...(19): siRNA sense strand
ucccggagcuccuaugaca

SEQ ID NO: 1946455 - RNA, 19 nt, Homo sapiens
  misc_RNA (1)...(19): siRNA sense strand
ggagagaaugugaccuugu

SEQ ID NO: 1946456 - RNA, 19 nt, Homo sapiens
  misc_RNA (1)...(19): siRNA sense strand
gagaggggauguuuaacga

SEQ ID NO: 1946457 - RNA, 19 nt, Homo sapiens
  misc_RNA (1)...(19): siRNA sense strand
gaauagcgaggacucugau

SEQ ID NO: 1946458 - RNA, 19 nt, Homo sapiens
  misc_RNA (1)...(19): siRNA sense strand
gaaacccuucaaauaguug

SEQ ID NO: 1946459 - RNA, 19 nt, Homo sapiens
  misc_RNA (1)...(19): siRNA sense strand
acagaugcuucggcucuuu

SEQ ID NO: 1946460 - RNA, 19 nt, Homo sapiens
  misc_RNA (1)...(19): siRNA sense strand
cgaauagcgaggacucuga

SEQ ID NO: 1946461 - RNA, 19 nt, Homo sapiens
  misc_RNA (1)...(19): siRNA sense strand
ggauguuuaacgacacuuu

SEQ ID NO: 1946462 - RNA, 19 nt, Homo sapiens
  misc_RNA (1)...(19): siRNA sense strand
ccauacgaguggucaaagu

SEQ ID NO: 1946463 - RNA, 19 nt, Homo sapiens
  misc_RNA (1)...(19): siRNA sense strand
caggagagaaugugaccuu

SEQ ID NO: 1946464 - RNA, 19 nt, Homo sapiens
  misc_RNA (1)...(19): siRNA sense strand
cgacaccugcacauucuga

SEQ ID NO: 1946465 - RNA, 19 nt, Homo sapiens
  misc_RNA (1)...(19): siRNA sense strand
ccacggagggaccuacaga

SEQ ID NO: 1946466 - RNA, 19 nt, Homo sapiens
  misc_RNA (1)...(19): siRNA sense strand
ucagucgcaugacgcaaga

SEQ ID NO: 1946467 - RNA, 19 nt, Homo sapiens
  misc_RNA (1)...(19): siRNA sense strand
caaaugcugaguccagauc

SEQ ID NO: 1946468 - RNA, 19 nt, Homo sapiens
  misc_RNA (1)...(19): siRNA sense strand
uagcgaggacucugaugaa

SEQ ID NO: 1946469 - RNA, 19 nt, Homo sapiens
  misc_RNA (1)...(19): siRNA sense strand
acagucauccugcaauguu

SEQ ID NO: 1946470 - RNA, 19 nt, Homo sapiens
  misc_RNA (1)...(19): siRNA sense strand
gauguuuaacgacacuuug

SEQ ID NO: 1946471 - RNA, 19 nt, Homo sapiens
  misc_RNA (1)...(19): siRNA sense strand
ggagcuccuaugacaugua

SEQ ID NO: 1946472 - RNA, 19 nt, Homo sapiens
  misc_RNA (1)...(19): siRNA sense strand
ggucaucauccucuucauc

SEQ ID NO: 1946473 - RNA, 19 nt, Homo sapiens
  misc_RNA (1)...(19): siRNA sense strand
caccugcacauucugauug

SEQ ID NO: 1946474 - RNA, 19 nt, Homo sapiens
  misc_RNA (1)...(19): siRNA sense strand
cacaggaaacccuucaaau

SEQ ID NO: 1946475 - RNA, 19 nt, Homo sapiens
  misc_RNA (1)...(19): siRNA sense strand
aaggccaacuucuccauca

SEQ ID NO: 1946476 - RNA, 19 nt, Homo sapiens
  misc_RNA (1)...(19): siRNA sense strand
cuacagaugcuacgguucu

SEQ ID NO: 1946477 - RNA, 19 nt, Homo sapiens
  misc_RNA (1)...(19): siRNA sense strand
gagacagucauccugcaau

SEQ ID NO: 1946478 - RNA, 19 nt, Homo sapiens
  misc_RNA (1)...(19): siRNA sense strand
gcgaggacucugaugaaca

SEQ ID NO: 1946479 - RNA, 19 nt, Homo sapiens
  misc_RNA (1)...(19): siRNA sense strand
cagucauccugcaauguug

SEQ ID NO: 1946480 - RNA, 19 nt, Homo sapiens
  misc_RNA (1)...(19): siRNA sense strand
ccggagcuccuaugacaug

SEQ ID NO: 1946481 - RNA, 19 nt, Homo sapiens
  misc_RNA (1)...(19): siRNA sense strand
uggcagggaccuacagaug

SEQ ID NO: 1946482 - RNA, 19 nt, Homo sapiens
  misc_RNA (1)...(19): siRNA sense strand
cuucauccuccucuucuuu

SEQ ID NO: 1946483 - RNA, 19 nt, Homo sapiens
  misc_RNA (1)...(19): siRNA sense strand
gugacccacugcuuguuuc

SEQ ID NO: 1946484 - RNA, 19 nt, Homo sapiens
  misc_RNA (1)...(19): siRNA sense strand
ugacauguaccaucuaucc

SEQ ID NO: 1946485 - RNA, 19 nt, Homo sapiens
  misc_RNA (1)...(19): siRNA sense strand
acagagaggggauguuuaa

SEQ ID NO: 1946486 - RNA, 19 nt, Homo sapiens
  misc_RNA (1)...(19): siRNA sense strand
gaugugaauucucuucuua

SEQ ID NO: 1946487 - RNA, 19 nt, Homo sapiens
  misc_RNA (1)...(19): siRNA sense strand
aaggagagauugcucguaa

SEQ ID NO: 1946488 - RNA, 19 nt, Homo sapiens
  misc_RNA (1)...(19): siRNA sense strand
gaauucagauugccgaaag

SEQ ID NO: 1946489 - RNA, 19 nt, Homo sapiens
  misc_RNA (1)...(19): siRNA sense strand
gguaaaagcugcugaaaca

SEQ ID NO: 1946490 - RNA, 19 nt, Homo sapiens
  misc_RNA (1)...(19): siRNA sense strand
gaacagaaagaugugaauu

SEQ ID NO: 1946491 - RNA, 19 nt, Homo sapiens
  misc_RNA (1)...(19): siRNA sense strand
caagaaagcaauacgauca

SEQ ID NO: 1946492 - RNA, 19 nt, Homo sapiens
  misc_RNA (1)...(19): siRNA sense strand
uaucaggaauuucaaccua

SEQ ID NO: 1946493 - RNA, 19 nt, Homo sapiens
  misc_RNA (1)...(19): siRNA sense strand
ugacacuucucaauaauca

SEQ ID NO: 1946494 - RNA, 19 nt, Homo sapiens
  misc_RNA (1)...(19): siRNA sense strand
gucaagagccgaaggaauu

SEQ ID NO: 1946495 - RNA, 19 nt, Homo sapiens
  misc_RNA (1)...(19): siRNA sense strand
gaaguuaaaggagagauug

SEQ ID NO: 1946496 - RNA, 19 nt, Homo sapiens
  misc_RNA (1)...(19): siRNA sense strand
agagauugcucguaaagau

SEQ ID NO: 1946497 - RNA, 19 nt, Homo sapiens
  misc_RNA (1)...(19): siRNA sense strand
gaacgggaaaucagcaaga

SEQ ID NO: 1946498 - RNA, 19 nt, Homo sapiens
  misc_RNA (1)...(19): siRNA sense strand
aagcugcugucguuucuaa

SEQ ID NO: 1946499 - RNA, 19 nt, Homo sapiens
  misc_RNA (1)...(19): siRNA sense strand
guauguugauuccaaagau

SEQ ID NO: 1946500 - RNA, 19 nt, Homo sapiens
  misc_RNA (1)...(19): siRNA sense strand
agaaagcaauacgaucaaa

SEQ ID NO: 1946501 - RNA, 19 nt, Homo sapiens
  misc_RNA (1)...(19): siRNA sense strand
ucaggaauuucaaccuaga

SEQ ID NO: 1946502 - RNA, 19 nt, Homo sapiens
  misc_RNA (1)...(19): siRNA sense strand
ggagagauugcucguaaag

SEQ ID NO: 1946503 - RNA, 19 nt, Homo sapiens
  misc_RNA (1)...(19): siRNA sense strand
aaccuggacugcugagaaa

SEQ ID NO: 1946504 - RNA, 19 nt, Homo sapiens
  misc_RNA (1)...(19): siRNA sense strand
gcagauuagucucuaucca

SEQ ID NO: 1946505 - RNA, 19 nt, Homo sapiens
  misc_RNA (1)...(19): siRNA sense strand
gagcauucccaaaggcaaa

SEQ ID NO: 1946506 - RNA, 19 nt, Homo sapiens
  misc_RNA (1)...(19): siRNA sense strand
cgaaagaccaucauuuuga

SEQ ID NO: 1946507 - RNA, 19 nt, Homo sapiens
  misc_RNA (1)...(19): siRNA sense strand
cgggaaaucagcaagauga

SEQ ID NO: 1946508 - RNA, 19 nt, Homo sapiens
  misc_RNA (1)...(19): siRNA sense strand
ggaauuucaaccuagagaa

SEQ ID NO: 1946509 - RNA, 19 nt, Homo sapiens
  misc_RNA (1)...(19): siRNA sense strand
gacaagaaagcaauacgau

SEQ ID NO: 1946510 - RNA, 19 nt, Homo sapiens
  misc_RNA (1)...(19): siRNA sense strand
ugaagacaagaaagcaaua

SEQ ID NO: 1946511 - RNA, 19 nt, Homo sapiens
  misc_RNA (1)...(19): siRNA sense strand
gagauugcucguaaagaug

SEQ ID NO: 1946512 - RNA, 19 nt, Homo sapiens
  misc_RNA (1)...(19): siRNA sense strand
gcaagaugaagcccucugu

SEQ ID NO: 1946513 - RNA, 19 nt, Homo sapiens
  misc_RNA (1)...(19): siRNA sense strand
ggaauucagauugccgaaa

SEQ ID NO: 1946514 - RNA, 19 nt, Homo sapiens
  misc_RNA (1)...(19): siRNA sense strand
aaaccuggacugcugagaa

SEQ ID NO: 1946515 - RNA, 19 nt, Homo sapiens
  misc_RNA (1)...(19): siRNA sense strand
gagcagauuagucucuauc

SEQ ID NO: 1946516 - RNA, 19 nt, Homo sapiens
  misc_RNA (1)...(19): siRNA sense strand
uuaagagcauucccaaagg

SEQ ID NO: 1946517 - RNA, 19 nt, Homo sapiens
  misc_RNA (1)...(19): siRNA sense strand
gccgaaggaauucagauug

SEQ ID NO: 1946518 - RNA, 19 nt, Homo sapiens
  misc_RNA (1)...(19): siRNA sense strand
gaauuucaaccuagagaac

SEQ ID NO: 1946519 - RNA, 19 nt, Homo sapiens
  misc_RNA (1)...(19): siRNA sense strand
cgaaaucuucccuccugaa

SEQ ID NO: 1946520 - RNA, 19 nt, Homo sapiens
  misc_RNA (1)...(19): siRNA sense strand
ggaaaucagcaagaugaag

SEQ ID NO: 1946521 - RNA, 19 nt, Homo sapiens
  misc_RNA (1)...(19): siRNA sense strand
gaagacaagaaagcaauac

SEQ ID NO: 1946522 - RNA, 19 nt, Homo sapiens
  misc_RNA (1)...(19): siRNA sense strand
ccgaaggaauucagauugc

SEQ ID NO: 1946523 - RNA, 19 nt, Homo sapiens
  misc_RNA (1)...(19): siRNA sense strand
uuccaaagauccugugucu

SEQ ID NO: 1946524 - RNA, 19 nt, Homo sapiens
  misc_RNA (1)...(19): siRNA sense strand
gaaagcaauacgaucaaaa

SEQ ID NO: 1946525 - RNA, 19 nt, Homo sapiens
  misc_RNA (1)...(19): siRNA sense strand
gccgaaagaccaucauuuu

SEQ ID NO: 1946526 - RNA, 19 nt, Homo sapiens
  misc_RNA (1)...(19): siRNA sense strand
gagagauugcucguaaaga

SEQ ID NO: 1946527 - RNA, 19 nt, Homo sapiens
  misc_RNA (1)...(19): siRNA sense strand
agaugugaauucucuucuu

SEQ ID NO: 1946528 - RNA, 19 nt, Homo sapiens
  misc_RNA (1)...(19): siRNA sense strand
augaaaagcugcugucguu

SEQ ID NO: 1946529 - RNA, 19 nt, Homo sapiens
  misc_RNA (1)...(19): siRNA sense strand
ggcaaaauuuccauuguag

SEQ ID NO: 1946530 - RNA, 19 nt, Homo sapiens
  misc_RNA (1)...(19): siRNA sense strand
gagcggaacgggaaaucag

SEQ ID NO: 1946531 - RNA, 19 nt, Homo sapiens
  misc_RNA (1)...(19): siRNA sense strand
ugucuuccuugcagguaaa

SEQ ID NO: 1946532 - RNA, 19 nt, Homo sapiens
  misc_RNA (1)...(19): siRNA sense strand
gggaaaucagcaagaugaa

SEQ ID NO: 1946533 - RNA, 19 nt, Homo sapiens
  misc_RNA (1)...(19): siRNA sense strand
uauguugauuccaaagauc

SEQ ID NO: 1946534 - RNA, 19 nt, Homo sapiens
  misc_RNA (1)...(19): siRNA sense strand
agauugcucguaaagauga

SEQ ID NO: 1946535 - RNA, 19 nt, Homo sapiens
  misc_RNA (1)...(19): siRNA sense strand
agacaagaaagcaauacga

SEQ ID NO: 1946536 - RNA, 19 nt, Homo sapiens
  misc_RNA (1)...(19): siRNA sense strand
uagucucuauccagaaguu

SEQ ID NO: 1946537 - RNA, 19 nt, Homo sapiens
  misc_RNA (1)...(19): siRNA sense strand
aggcaaaauuuccauugua

SEQ ID NO: 1946538 - RNA, 19 nt, Homo sapiens
  misc_RNA (1)...(19): siRNA sense strand
uaaaagcugcugaaacaug

SEQ ID NO: 1946539 - RNA, 19 nt, Homo sapiens
  misc_RNA (1)...(19): siRNA sense strand
aaaagcugcugaaacaugu

SEQ ID NO: 1946540 - RNA, 19 nt, Homo sapiens
  misc_RNA (1)...(19): siRNA sense strand
uguguauguugauuccaaa

SEQ ID NO: 1946541 - RNA, 19 nt, Homo sapiens
  misc_RNA (1)...(19): siRNA sense strand
uagaacagaaagaugugaa

SEQ ID NO: 1946542 - RNA, 19 nt, Homo sapiens
  misc_RNA (1)...(19): siRNA sense strand
gugucuuccuugcagguaa

SEQ ID NO: 1946543 - RNA, 19 nt, Homo sapiens
  misc_RNA (1)...(19): siRNA sense strand
auuaagagcauucccaaag

SEQ ID NO: 1946544 - RNA, 19 nt, Homo sapiens
  misc_RNA (1)...(19): siRNA sense strand
aacagaaagaugugaauuc

SEQ ID NO: 1946545 - RNA, 19 nt, Homo sapiens
  misc_RNA (1)...(19): siRNA sense strand
ggacgucacuccugaagag

SEQ ID NO: 1946546 - RNA, 19 nt, Homo sapiens
  misc_RNA (1)...(19): siRNA sense strand
gcagaccugugacaagugu

SEQ ID NO: 1946547 - RNA, 19 nt, Homo sapiens
  misc_RNA (1)...(19): siRNA sense strand
augagaagcuggcccguuu

SEQ ID NO: 1946548 - RNA, 19 nt, Homo sapiens
  misc_RNA (1)...(19): siRNA sense strand
gacgaggagugaggaauga

SEQ ID NO: 1946549 - RNA, 19 nt, Homo sapiens
  misc_RNA (1)...(19): siRNA sense strand
ccaaugaggaugagccaaa

SEQ ID NO: 1946550 - RNA, 19 nt, Homo sapiens
  misc_RNA (1)...(19): siRNA sense strand
gaauuccgcugcccugaac

SEQ ID NO: 1946551 - RNA, 19 nt, Homo sapiens
  misc_RNA (1)...(19): siRNA sense strand
ggaaugagagagaccaaag

SEQ ID NO: 1946552 - RNA, 19 nt, Homo sapiens
  misc_RNA (1)...(19): siRNA sense strand
ggaauuccgcugcccugaa

SEQ ID NO: 1946553 - RNA, 19 nt, Homo sapiens
  misc_RNA (1)...(19): siRNA sense strand
aagcagaccugugacaagu

SEQ ID NO: 1946554 - RNA, 19 nt, Homo sapiens
  misc_RNA (1)...(19): siRNA sense strand
gaaugagagagaccaaagu

SEQ ID NO: 1946555 - RNA, 19 nt, Homo sapiens
  misc_RNA (1)...(19): siRNA sense strand
gaagagcaagagcgucaag

SEQ ID NO: 1946556 - RNA, 19 nt, Homo sapiens
  misc_RNA (1)...(19): siRNA sense strand
gcgucaagcagaccuguga

SEQ ID NO: 1946557 - RNA, 19 nt, Homo sapiens
  misc_RNA (1)...(19): siRNA sense strand
aaugagagagaccaaaguu

SEQ ID NO: 1946558 - RNA, 19 nt, Homo sapiens
  misc_RNA (1)...(19): siRNA sense strand
ggagugcaagcaggugauu

SEQ ID NO: 1946559 - RNA, 19 nt, Homo sapiens
  misc_RNA (1)...(19): siRNA sense strand
ccgcugggcucacauucag

SEQ ID NO: 1946560 - RNA, 19 nt, Homo sapiens
  misc_RNA (1)...(19): siRNA sense strand
gagugaggaaugagagaga

SEQ ID NO: 1946561 - RNA, 19 nt, Homo sapiens
  misc_RNA (1)...(19): siRNA sense strand
caagcagaccugugacaag

SEQ ID NO: 1946562 - RNA, 19 nt, Homo sapiens
  misc_RNA (1)...(19): siRNA sense strand
caaugaggaugagccaaac

SEQ ID NO: 1946563 - RNA, 19 nt, Homo sapiens
  misc_RNA (1)...(19): siRNA sense strand
gcccugaacgcgugaugga

SEQ ID NO: 1946564 - RNA, 19 nt, Homo sapiens
  misc_RNA (1)...(19): siRNA sense strand
agacgaggagugaggaaug

SEQ ID NO: 1946565 - RNA, 19 nt, Homo sapiens
  misc_RNA (1)...(19): siRNA sense strand
agaccugugacaaguguaa

SEQ ID NO: 1946566 - RNA, 19 nt, Homo sapiens
  misc_RNA (1)...(19): siRNA sense strand
caacauggcuaugcuaauu

SEQ ID NO: 1946567 - RNA, 19 nt, Homo sapiens
  misc_RNA (1)...(19): siRNA sense strand
ugaaacaucucacaucgua

SEQ ID NO: 1946568 - RNA, 19 nt, Homo sapiens
  misc_RNA (1)...(19): siRNA sense strand
caacaguccuucaacagua

SEQ ID NO: 1946569 - RNA, 19 nt, Homo sapiens
  misc_RNA (1)...(19): siRNA sense strand
caaagucucuucucucaga

SEQ ID NO: 1946570 - RNA, 19 nt, Homo sapiens
  misc_RNA (1)...(19): siRNA sense strand
gaacaggagcuuuauauac

SEQ ID NO: 1946571 - RNA, 19 nt, Homo sapiens
  misc_RNA (1)...(19): siRNA sense strand
ggacauuaccuacaucuug

SEQ ID NO: 1946572 - RNA, 19 nt, Homo sapiens
  misc_RNA (1)...(19): siRNA sense strand
aaacaugccugaaacaucu

SEQ ID NO: 1946573 - RNA, 19 nt, Homo sapiens
  misc_RNA (1)...(19): siRNA sense strand
caucguagcuuuaacuucu

SEQ ID NO: 1946574 - RNA, 19 nt, Homo sapiens
  misc_RNA (1)...(19): siRNA sense strand
cccuauaacuccugaagua

SEQ ID NO: 1946575 - RNA, 19 nt, Homo sapiens
  misc_RNA (1)...(19): siRNA sense strand
caaacaaagucucuucucu

SEQ ID NO: 1946576 - RNA, 19 nt, Homo sapiens
  misc_RNA (1)...(19): siRNA sense strand
caucucacaucguagcuuu

SEQ ID NO: 1946577 - RNA, 19 nt, Homo sapiens
  misc_RNA (1)...(19): siRNA sense strand
uuaccuacaucuugccuuu

SEQ ID NO: 1946578 - RNA, 19 nt, Homo sapiens
  misc_RNA (1)...(19): siRNA sense strand
caaaagucauggugaaauu

SEQ ID NO: 1946579 - RNA, 19 nt, Homo sapiens
  misc_RNA (1)...(19): siRNA sense strand
cuacaaacaugccugaaac

SEQ ID NO: 1946580 - RNA, 19 nt, Homo sapiens
  misc_RNA (1)...(19): siRNA sense strand
aaucugaacaggagcuuua

SEQ ID NO: 1946581 - RNA, 19 nt, Homo sapiens
  misc_RNA (1)...(19): siRNA sense strand
aacaaagucucuucucuca

SEQ ID NO: 1946582 - RNA, 19 nt, Homo sapiens
  misc_RNA (1)...(19): siRNA sense strand
gaugaagaaggaacugaaa

SEQ ID NO: 1946583 - RNA, 19 nt, Homo sapiens
  misc_RNA (1)...(19): siRNA sense strand
ggaaagaaaagaugaagaa

SEQ ID NO: 1946584 - RNA, 19 nt, Homo sapiens
  misc_RNA (1)...(19): siRNA sense strand
cuccugaaguagauuauaa

SEQ ID NO: 1946585 - RNA, 19 nt, Homo sapiens
  misc_RNA (1)...(19): siRNA sense strand
cagcaacaguccuucaaca

SEQ ID NO: 1946586 - RNA, 19 nt, Homo sapiens
  misc_RNA (1)...(19): siRNA sense strand
ugaacaggagcuuuauaua

SEQ ID NO: 1946587 - RNA, 19 nt, Homo sapiens
  misc_RNA (1)...(19): siRNA sense strand
gaacaaaagcaaacuauac

SEQ ID NO: 1946588 - RNA, 19 nt, Homo sapiens
  misc_RNA (1)...(19): siRNA sense strand
uuucuuaucuguaccuuuc

SEQ ID NO: 1946589 - RNA, 19 nt, Homo sapiens
  misc_RNA (1)...(19): siRNA sense strand
caacaacauggcuaugcua

SEQ ID NO: 1946590 - RNA, 19 nt, Homo sapiens
  misc_RNA (1)...(19): siRNA sense strand
gcaacaguccuucaacagu

SEQ ID NO: 1946591 - RNA, 19 nt, Homo sapiens
  misc_RNA (1)...(19): siRNA sense strand
uaacacaaacccuauaacu

SEQ ID NO: 1946592 - RNA, 19 nt, Homo sapiens
  misc_RNA (1)...(19): siRNA sense strand
uaacuccugaaguagauua

SEQ ID NO: 1946593 - RNA, 19 nt, Homo sapiens
  misc_RNA (1)...(19): siRNA sense strand
uauaacuccugaaguagau

SEQ ID NO: 1946594 - RNA, 19 nt, Homo sapiens
  misc_RNA (1)...(19): siRNA sense strand
gcuaugcuaauuugcuuaa

SEQ ID NO: 1946595 - RNA, 19 nt, Homo sapiens
  misc_RNA (1)...(19): siRNA sense strand
gcagaaaccaaaaugaaaa

SEQ ID NO: 1946596 - RNA, 19 nt, Homo sapiens
  misc_RNA (1)...(19): siRNA sense strand
aagaaaagaugaagaagga

SEQ ID NO: 1946597 - RNA, 19 nt, Homo sapiens
  misc_RNA (1)...(19): siRNA sense strand
gcucacaggacccaaccua

SEQ ID NO: 1946598 - RNA, 19 nt, Homo sapiens
  misc_RNA (1)...(19): siRNA sense strand
gggauucaguuauucaaaa

SEQ ID NO: 1946599 - RNA, 19 nt, Homo sapiens
  misc_RNA (1)...(19): siRNA sense strand
acacacaggacauuaccua

SEQ ID NO: 1946600 - RNA, 19 nt, Homo sapiens
  misc_RNA (1)...(19): siRNA sense strand
caacaguacagagcauuga

SEQ ID NO: 1946601 - RNA, 19 nt, Homo sapiens
  misc_RNA (1)...(19): siRNA sense strand
caaacaugccugaaacauc

SEQ ID NO: 1946602 - RNA, 19 nt, Homo sapiens
  misc_RNA (1)...(19): siRNA sense strand
caagacaggcagaaaccaa

SEQ ID NO: 1946603 - RNA, 19 nt, Homo sapiens
  misc_RNA (1)...(19): siRNA sense strand
cacaggacauuaccuacau

SEQ ID NO: 1946604 - RNA, 19 nt, Homo sapiens
  misc_RNA (1)...(19): siRNA sense strand
acauggcuaugcuaauuug

SEQ ID NO: 1946605 - RNA, 19 nt, Homo sapiens
  misc_RNA (1)...(19): siRNA sense strand
gggcuaacaguacuucuuc

SEQ ID NO: 1946606 - RNA, 19 nt, Homo sapiens
  misc_RNA (1)...(19): siRNA sense strand
ugaaucagacacuuggaaa

SEQ ID NO: 1946607 - RNA, 19 nt, Homo sapiens
  misc_RNA (1)...(19): siRNA sense strand
uagaagcaauggcgauuuu

SEQ ID NO: 1946608 - RNA, 19 nt, Homo sapiens
  misc_RNA (1)...(19): siRNA sense strand
guaccuuucuauuucuauc

SEQ ID NO: 1946609 - RNA, 19 nt, Homo sapiens
  misc_RNA (1)...(19): siRNA sense strand
gacccaaccuagugaugca

SEQ ID NO: 1946610 - RNA, 19 nt, Homo sapiens
  misc_RNA (1)...(19): siRNA sense strand
gcaaacaaagucucuucuc

SEQ ID NO: 1946611 - RNA, 19 nt, Homo sapiens
  misc_RNA (1)...(19): siRNA sense strand
ggaacacacaggacauuac

SEQ ID NO: 1946612 - RNA, 19 nt, Homo sapiens
  misc_RNA (1)...(19): siRNA sense strand
ggaacaaaagcaaacuaua

SEQ ID NO: 1946613 - RNA, 19 nt, Homo sapiens
  misc_RNA (1)...(19): siRNA sense strand
cugaacaggagcuuuauau

SEQ ID NO: 1946614 - RNA, 19 nt, Homo sapiens
  misc_RNA (1)...(19): siRNA sense strand
aaggaugucugugcggaaa

SEQ ID NO: 1946615 - RNA, 19 nt, Homo sapiens
  misc_RNA (1)...(19): siRNA sense strand
uuccugggauucaguuauu

SEQ ID NO: 1946616 - RNA, 19 nt, Homo sapiens
  misc_RNA (1)...(19): siRNA sense strand
guacagagcauugaaaaca

SEQ ID NO: 1946617 - RNA, 19 nt, Homo sapiens
  misc_RNA (1)...(19): siRNA sense strand
ucacaggacccaaccuagu

SEQ ID NO: 1946618 - RNA, 19 nt, Homo sapiens
  misc_RNA (1)...(19): siRNA sense strand
cagcuacaagggaaagaaa

SEQ ID NO: 1946619 - RNA, 19 nt, Homo sapiens
  misc_RNA (1)...(19): siRNA sense strand
ggagugcucacagcuacaa

SEQ ID NO: 1946620 - RNA, 19 nt, Homo sapiens
  misc_RNA (1)...(19): siRNA sense strand
aaacaagacaggcagaaac

SEQ ID NO: 1946621 - RNA, 19 nt, Homo sapiens
  misc_RNA (1)...(19): siRNA sense strand
gcaagcgucagccuagaag

SEQ ID NO: 1946622 - RNA, 19 nt, Homo sapiens
  misc_RNA (1)...(19): siRNA sense strand
uggcuaugcuaauuugcuu

SEQ ID NO: 1946623 - RNA, 19 nt, Homo sapiens
  misc_RNA (1)...(19): siRNA sense strand
gaaaacacaagcaaaaguc

SEQ ID NO: 1946624 - RNA, 19 nt, Homo sapiens
  misc_RNA (1)...(19): siRNA sense strand
ucucacaucguagcuuuaa

SEQ ID NO: 1946625 - RNA, 19 nt, Homo sapiens
  misc_RNA (1)...(19): siRNA sense strand
cuacaucuugccuuucuga

SEQ ID NO: 1946626 - RNA, 19 nt, Homo sapiens
  misc_RNA (1)...(19): siRNA sense strand
cauuaacacaaacccuaua

SEQ ID NO: 1946627 - RNA, 19 nt, Homo sapiens
  misc_RNA (1)...(19): siRNA sense strand
cuauaacuccugaaguaga

SEQ ID NO: 1946628 - RNA, 19 nt, Homo sapiens
  misc_RNA (1)...(19): siRNA sense strand
gaacacacaggacauuacc

SEQ ID NO: 1946629 - RNA, 19 nt, Homo sapiens
  misc_RNA (1)...(19): siRNA sense strand
ucuacaaacaugccugaaa

SEQ ID NO: 1946630 - RNA, 19 nt, Homo sapiens
  misc_RNA (1)...(19): siRNA sense strand
aacaggagcuuuauauacc

SEQ ID NO: 1946631 - RNA, 19 nt, Homo sapiens
  misc_RNA (1)...(19): siRNA sense strand
ggaaaacaacaacaacaug

SEQ ID NO: 1946632 - RNA, 19 nt, Homo sapiens
  misc_RNA (1)...(19): siRNA sense strand
caggagcuuuauauaccuu

SEQ ID NO: 1946633 - RNA, 19 nt, Homo sapiens
  misc_RNA (1)...(19): siRNA sense strand
ucguagcuuuaacuucuaa

SEQ ID NO: 1946634 - RNA, 19 nt, Homo sapiens
  misc_RNA (1)...(19): siRNA sense strand
caacaacaacauggcuaug

SEQ ID NO: 1946635 - RNA, 19 nt, Homo sapiens
  misc_RNA (1)...(19): siRNA sense strand
uuucugaugacaacaguuu

SEQ ID NO: 1946636 - RNA, 19 nt, Homo sapiens
  misc_RNA (1)...(19): siRNA sense strand
uaccuucugucgucagcaa

SEQ ID NO: 1946637 - RNA, 19 nt, Homo sapiens
  misc_RNA (1)...(19): siRNA sense strand
ucagacacuuggaaaagaa

SEQ ID NO: 1946638 - RNA, 19 nt, Homo sapiens
  misc_RNA (1)...(19): siRNA sense strand
ggcaagcgucagccuagaa

SEQ ID NO: 1946639 - RNA, 19 nt, Homo sapiens
  misc_RNA (1)...(19): siRNA sense strand
ucuuaucuguaccuuucua

SEQ ID NO: 1946640 - RNA, 19 nt, Homo sapiens
  misc_RNA (1)...(19): siRNA sense strand
ucacaucguagcuuuaacu

SEQ ID NO: 1946641 - RNA, 19 nt, Homo sapiens
  misc_RNA (1)...(19): siRNA sense strand
cacaggacccaaccuagug

SEQ ID NO: 1946642 - RNA, 19 nt, Homo sapiens
  misc_RNA (1)...(19): siRNA sense strand
acacaggacauuaccuaca

SEQ ID NO: 1946643 - RNA, 19 nt, Homo sapiens
  misc_RNA (1)...(19): siRNA sense strand
aagcaaaagucauggugaa

SEQ ID NO: 1946644 - RNA, 19 nt, Homo sapiens
  misc_RNA (1)...(19): siRNA sense strand
ucaacaguacagagcauug

SEQ ID NO: 1946645 - RNA, 19 nt, Homo sapiens
  misc_RNA (1)...(19): siRNA sense strand
acaacaacauggcuaugcu

SEQ ID NO: 1946646 - RNA, 19 nt, Homo sapiens
  misc_RNA (1)...(19): siRNA sense strand
gcaaaagucauggugaaau

SEQ ID NO: 1946647 - RNA, 19 nt, Homo sapiens
  misc_RNA (1)...(19): siRNA sense strand
acaguacagagcauugaaa

SEQ ID NO: 1946648 - RNA, 19 nt, Homo sapiens
  misc_RNA (1)...(19): siRNA sense strand
gaacaauccuuccacuaau

SEQ ID NO: 1946649 - RNA, 19 nt, Homo sapiens
  misc_RNA (1)...(19): siRNA sense strand
gaagagagacagugauauu

SEQ ID NO: 1946650 - RNA, 19 nt, Homo sapiens
  misc_RNA (1)...(19): siRNA sense strand
caaaugacaugucgaugaa

SEQ ID NO: 1946651 - RNA, 19 nt, Homo sapiens
  misc_RNA (1)...(19): siRNA sense strand
gcaggaagauugccagaug

SEQ ID NO: 1946652 - RNA, 19 nt, Homo sapiens
  misc_RNA (1)...(19): siRNA sense strand
aaaggaagcagaacaaaua

SEQ ID NO: 1946653 - RNA, 19 nt, Homo sapiens
  misc_RNA (1)...(19): siRNA sense strand
cuaaugaaauuggcacuua

SEQ ID NO: 1946654 - RNA, 19 nt, Homo sapiens
  misc_RNA (1)...(19): siRNA sense strand
uaucuccucugaagaaaua

SEQ ID NO: 1946655 - RNA, 19 nt, Homo sapiens
  misc_RNA (1)...(19): siRNA sense strand
gagaagagagacagugaua

SEQ ID NO: 1946656 - RNA, 19 nt, Homo sapiens
  misc_RNA (1)...(19): siRNA sense strand
cuagggaacuuauagaaau

SEQ ID NO: 1946657 - RNA, 19 nt, Homo sapiens
  misc_RNA (1)...(19): siRNA sense strand
gaagaugauguagagauua

SEQ ID NO: 1946658 - RNA, 19 nt, Homo sapiens
  misc_RNA (1)...(19): siRNA sense strand
ugaacaauccuuccacuaa

SEQ ID NO: 1946659 - RNA, 19 nt, Homo sapiens
  misc_RNA (1)...(19): siRNA sense strand
ugaagaugauguagagauu

SEQ ID NO: 1946660 - RNA, 19 nt, Homo sapiens
  misc_RNA (1)...(19): siRNA sense strand
aaugacaugucgaugaaua

SEQ ID NO: 1946661 - RNA, 19 nt, Homo sapiens
  misc_RNA (1)...(19): siRNA sense strand
gaaacucaagucaauagaa

SEQ ID NO: 1946662 - RNA, 19 nt, Homo sapiens
  misc_RNA (1)...(19): siRNA sense strand
gaaccuccugggcauaaua

SEQ ID NO: 1946663 - RNA, 19 nt, Homo sapiens
  misc_RNA (1)...(19): siRNA sense strand
ucaaaugacaugucgauga

SEQ ID NO: 1946664 - RNA, 19 nt, Homo sapiens
  misc_RNA (1)...(19): siRNA sense strand
gaaauuggcacuuaaucag

SEQ ID NO: 1946665 - RNA, 19 nt, Homo sapiens
  misc_RNA (1)...(19): siRNA sense strand
ggagaaacucaagucaaua

SEQ ID NO: 1946666 - RNA, 19 nt, Homo sapiens
  misc_RNA (1)...(19): siRNA sense strand
gagaaacucaagucaauag

SEQ ID NO: 1946667 - RNA, 19 nt, Homo sapiens
  misc_RNA (1)...(19): siRNA sense strand
aaaugaagaugauguagag

SEQ ID NO: 1946668 - RNA, 19 nt, Homo sapiens
  misc_RNA (1)...(19): siRNA sense strand
guuacaggcuggagaggaa

SEQ ID NO: 1946669 - RNA, 19 nt, Homo sapiens
  misc_RNA (1)...(19): siRNA sense strand
gaugagaaguggguuacug

SEQ ID NO: 1946670 - RNA, 19 nt, Homo sapiens
  misc_RNA (1)...(19): siRNA sense strand
gaacaaauacuggcaacag

SEQ ID NO: 1946671 - RNA, 19 nt, Homo sapiens
  misc_RNA (1)...(19): siRNA sense strand
caucaugaaaugcaaguuu

SEQ ID NO: 1946672 - RNA, 19 nt, Homo sapiens
  misc_RNA (1)...(19): siRNA sense strand
aggagaaacucaagucaau

SEQ ID NO: 1946673 - RNA, 19 nt, Homo sapiens
  misc_RNA (1)...(19): siRNA sense strand
ggaagcagaacaaauacug

SEQ ID NO: 1946674 - RNA, 19 nt, Homo sapiens
  misc_RNA (1)...(19): siRNA sense strand
ggaauuucaagaacuaaug

SEQ ID NO: 1946675 - RNA, 19 nt, Homo sapiens
  misc_RNA (1)...(19): siRNA sense strand
gacccuacccaacugauuu

SEQ ID NO: 1946676 - RNA, 19 nt, Homo sapiens
  misc_RNA (1)...(19): siRNA sense strand
gauauucagcagcuacaaa

SEQ ID NO: 1946677 - RNA, 19 nt, Homo sapiens
  misc_RNA (1)...(19): siRNA sense strand
cauaggaucagugcaagua

SEQ ID NO: 1946678 - RNA, 19 nt, Homo sapiens
  misc_RNA (1)...(19): siRNA sense strand
gaaggagaaacucaaguca

SEQ ID NO: 1946679 - RNA, 19 nt, Homo sapiens
  misc_RNA (1)...(19): siRNA sense strand
gcuaaaggaagcagaacaa

SEQ ID NO: 1946680 - RNA, 19 nt, Homo sapiens
  misc_RNA (1)...(19): siRNA sense strand
caacugauuuagagaugag

SEQ ID NO: 1946681 - RNA, 19 nt, Homo sapiens
  misc_RNA (1)...(19): siRNA sense strand
gcaguaguagugagucuga

SEQ ID NO: 1946682 - RNA, 19 nt, Homo sapiens
  misc_RNA (1)...(19): siRNA sense strand
uaaaggaagcagaacaaau

SEQ ID NO: 1946683 - RNA, 19 nt, Homo sapiens
  misc_RNA (1)...(19): siRNA sense strand
ggugcuaucuccucugaag

SEQ ID NO: 1946684 - RNA, 19 nt, Homo sapiens
  misc_RNA (1)...(19): siRNA sense strand
guccuggaguuguuaauuc

SEQ ID NO: 1946685 - RNA, 19 nt, Homo sapiens
  misc_RNA (1)...(19): siRNA sense strand
ugucugcgcuugaggacuu

SEQ ID NO: 1946686 - RNA, 19 nt, Homo sapiens
  misc_RNA (1)...(19): siRNA sense strand
gagagacagugauauucag

SEQ ID NO: 1946687 - RNA, 19 nt, Homo sapiens
  misc_RNA (1)...(19): siRNA sense strand
ugaaauuggcacuuaauca

SEQ ID NO: 1946688 - RNA, 19 nt, Homo sapiens
  misc_RNA (1)...(19): siRNA sense strand
ucaacggacuccucaagca

SEQ ID NO: 1946689 - RNA, 19 nt, Homo sapiens
  misc_RNA (1)...(19): siRNA sense strand
cuacccaacugauuuagag

SEQ ID NO: 1946690 - RNA, 19 nt, Homo sapiens
  misc_RNA (1)...(19): siRNA sense strand
gcuaucuccucugaagaaa

SEQ ID NO: 1946691 - RNA, 19 nt, Homo sapiens
  misc_RNA (1)...(19): siRNA sense strand
uuauagaaaugcuggcaau

SEQ ID NO: 1946692 - RNA, 19 nt, Homo sapiens
  misc_RNA (1)...(19): siRNA sense strand
caccaaaucauaguaguga

SEQ ID NO: 1946693 - RNA, 19 nt, Homo sapiens
  misc_RNA (1)...(19): siRNA sense strand
gaauauguuaccaccaaau

SEQ ID NO: 1946694 - RNA, 19 nt, Homo sapiens
  misc_RNA (1)...(19): siRNA sense strand
ugaauauguuaccaccaaa

SEQ ID NO: 1946695 - RNA, 19 nt, Homo sapiens
  misc_RNA (1)...(19): siRNA sense strand
ccaacugauuuagagauga

SEQ ID NO: 1946696 - RNA, 19 nt, Homo sapiens
  misc_RNA (1)...(19): siRNA sense strand
uagggaacuuauagaaaug

SEQ ID NO: 1946697 - RNA, 19 nt, Homo sapiens
  misc_RNA (1)...(19): siRNA sense strand
gaugauguagagauuaugu

SEQ ID NO: 1946698 - RNA, 19 nt, Homo sapiens
  misc_RNA (1)...(19): siRNA sense strand
caagaacuaaugaaauugg

SEQ ID NO: 1946699 - RNA, 19 nt, Homo sapiens
  misc_RNA (1)...(19): siRNA sense strand
augaauauguuaccaccaa

SEQ ID NO: 1946700 - RNA, 19 nt, Homo sapiens
  misc_RNA (1)...(19): siRNA sense strand
uaggaucagugcaaguaau

SEQ ID NO: 1946701 - RNA, 19 nt, Homo sapiens
  misc_RNA (1)...(19): siRNA sense strand
guaguagugagucugauug

SEQ ID NO: 1946702 - RNA, 19 nt, Homo sapiens
  misc_RNA (1)...(19): siRNA sense strand
caggaagauugccagaugu

SEQ ID NO: 1946703 - RNA, 19 nt, Homo sapiens
  misc_RNA (1)...(19): siRNA sense strand
aacaauccuuccacuaaug

SEQ ID NO: 1946704 - RNA, 19 nt, Homo sapiens
  misc_RNA (1)...(19): siRNA sense strand
ucaccgagauggggaauuu

SEQ ID NO: 1946705 - RNA, 19 nt, Homo sapiens
  misc_RNA (1)...(19): siRNA sense strand
ccacuaauggcgugaaugg

SEQ ID NO: 1946706 - RNA, 19 nt, Homo sapiens
  misc_RNA (1)...(19): siRNA sense strand
aaggugcuaucuccucuga

SEQ ID NO: 1946707 - RNA, 19 nt, Homo sapiens
  misc_RNA (1)...(19): siRNA sense strand
uagagaagagagacaguga

SEQ ID NO: 1946708 - RNA, 19 nt, Homo sapiens
  misc_RNA (1)...(19): siRNA sense strand
uguccuugcuccacaguau

SEQ ID NO: 1946709 - RNA, 19 nt, Homo sapiens
  misc_RNA (1)...(19): siRNA sense strand
guuguuaauucaccgagau

SEQ ID NO: 1946710 - RNA, 19 nt, Homo sapiens
  misc_RNA (1)...(19): siRNA sense strand
agagagacagugauauuca

SEQ ID NO: 1946711 - RNA, 19 nt, Homo sapiens
  misc_RNA (1)...(19): siRNA sense strand
cgaaggagaaacucaaguc

SEQ ID NO: 1946712 - RNA, 19 nt, Homo sapiens
  misc_RNA (1)...(19): siRNA sense strand
ggucagaugaacaauccuu

SEQ ID NO: 1946713 - RNA, 19 nt, Homo sapiens
  misc_RNA (1)...(19): siRNA sense strand
gaaguagagaagagagaca

SEQ ID NO: 1946714 - RNA, 19 nt, Homo sapiens
  misc_RNA (1)...(19): siRNA sense strand
ggaaccuccugggcauaau

SEQ ID NO: 1946715 - RNA, 19 nt, Homo sapiens
  misc_RNA (1)...(19): siRNA sense strand
gcaaguaaugcuguaugug

SEQ ID NO: 1946716 - RNA, 19 nt, Homo sapiens
  misc_RNA (1)...(19): siRNA sense strand
ugcaaguaaugcuguaugu

SEQ ID NO: 1946717 - RNA, 19 nt, Homo sapiens
  misc_RNA (1)...(19): siRNA sense strand
gguccugucuagggaacuu

SEQ ID NO: 1946718 - RNA, 19 nt, Homo sapiens
  misc_RNA (1)...(19): siRNA sense strand
gguccuggaguuguuaauu

SEQ ID NO: 1946719 - RNA, 19 nt, Homo sapiens
  misc_RNA (1)...(19): siRNA sense strand
agagaugagaaguggguua

SEQ ID NO: 1946720 - RNA, 19 nt, Homo sapiens
  misc_RNA (1)...(19): siRNA sense strand
cccaacugauuuagagaug

SEQ ID NO: 1946721 - RNA, 19 nt, Homo sapiens
  misc_RNA (1)...(19): siRNA sense strand
ggagacccuacccaacuga

SEQ ID NO: 1946722 - RNA, 19 nt, Homo sapiens
  misc_RNA (1)...(19): siRNA sense strand
cuaaaggaagcagaacaaa

SEQ ID NO: 1946723 - RNA, 19 nt, Homo sapiens
  misc_RNA (1)...(19): siRNA sense strand
caaaucauaguagugacuu

SEQ ID NO: 1946724 - RNA, 19 nt, Homo sapiens
  misc_RNA (1)...(19): siRNA sense strand
caagaaaccaaaaguuguu

SEQ ID NO: 1946725 - RNA, 19 nt, Homo sapiens
  misc_RNA (1)...(19): siRNA sense strand
cagugcaaguaaugcugua

SEQ ID NO: 1946726 - RNA, 19 nt, Homo sapiens
  misc_RNA (1)...(19): siRNA sense strand
guggugagaaggagaagga

SEQ ID NO: 1946727 - RNA, 19 nt, Homo sapiens
  misc_RNA (1)...(19): siRNA sense strand
caguauccauggcagucaa

SEQ ID NO: 1946728 - RNA, 19 nt, Homo sapiens
  misc_RNA (1)...(19): siRNA sense strand
gcacuugcagcaggaagau

SEQ ID NO: 1946729 - RNA, 19 nt, Homo sapiens
  misc_RNA (1)...(19): siRNA sense strand
cggagacccuacccaacug

SEQ ID NO: 1946730 - RNA, 19 nt, Homo sapiens
  misc_RNA (1)...(19): siRNA sense strand
ugacaugucgaugaauaug

SEQ ID NO: 1946731 - RNA, 19 nt, Homo sapiens
  misc_RNA (1)...(19): siRNA sense strand
acggacuccucaagcagua

SEQ ID NO: 1946732 - RNA, 19 nt, Homo sapiens
  misc_RNA (1)...(19): siRNA sense strand
gauuuagagaugagaagug

SEQ ID NO: 1946733 - RNA, 19 nt, Homo sapiens
  misc_RNA (1)...(19): siRNA sense strand
gauguagagauuaugucaa

SEQ ID NO: 1946734 - RNA, 19 nt, Homo sapiens
  misc_RNA (1)...(19): siRNA sense strand
ugauguagagauuauguca

SEQ ID NO: 1946735 - RNA, 19 nt, Homo sapiens
  misc_RNA (1)...(19): siRNA sense strand
ccaccaaaucauaguagug

SEQ ID NO: 1946736 - RNA, 19 nt, Homo sapiens
  misc_RNA (1)...(19): siRNA sense strand
auccauggcagucaaauga

SEQ ID NO: 1946737 - RNA, 19 nt, Homo sapiens
  misc_RNA (1)...(19): siRNA sense strand
gagaugagaaguggguuac

SEQ ID NO: 1946738 - RNA, 19 nt, Homo sapiens
  misc_RNA (1)...(19): siRNA sense strand
gggaauuucaagaacuaau

SEQ ID NO: 1946739 - RNA, 19 nt, Homo sapiens
  misc_RNA (1)...(19): siRNA sense strand
acuuggagguccugucuag

SEQ ID NO: 1946740 - RNA, 19 nt, Homo sapiens
  misc_RNA (1)...(19): siRNA sense strand
cggagaagauccuguguaa

SEQ ID NO: 1946741 - RNA, 19 nt, Homo sapiens
  misc_RNA (1)...(19): siRNA sense strand
gagaagauccuguguaagg

SEQ ID NO: 1946742 - RNA, 19 nt, Homo sapiens
  misc_RNA (1)...(19): siRNA sense strand
gaugcgaccuaaagucaug

SEQ ID NO: 1946743 - RNA, 19 nt, Homo sapiens
  misc_RNA (1)...(19): siRNA sense strand
ucuauggacugguggaugu

SEQ ID NO: 1946744 - RNA, 19 nt, Homo sapiens
  misc_RNA (1)...(19): siRNA sense strand
gcggagaagauccugugua

SEQ ID NO: 1946745 - RNA, 19 nt, Homo sapiens
  misc_RNA (1)...(19): siRNA sense strand
gauggguggcuaccuguuc

SEQ ID NO: 1946746 - RNA, 19 nt, Homo sapiens
  misc_RNA (1)...(19): siRNA sense strand
ucuacacgaugcgaccuaa

SEQ ID NO: 1946747 - RNA, 19 nt, Homo sapiens
  misc_RNA (1)...(19): siRNA sense strand
uggccuggcuccacaagca

SEQ ID NO: 1946748 - RNA, 19 nt, Homo sapiens
  misc_RNA (1)...(19): siRNA sense strand
cugcacagcugcgagaucu

SEQ ID NO: 1946749 - RNA, 19 nt, Homo sapiens
  misc_RNA (1)...(19): siRNA sense strand
uggcugugcuggagggaau

SEQ ID NO: 1946750 - RNA, 19 nt, Homo sapiens
  misc_RNA (1)...(19): siRNA sense strand
gucaggaggcggagaagau

SEQ ID NO: 1946751 - RNA, 19 nt, Homo sapiens
  misc_RNA (1)...(19): siRNA sense strand
ggacaagguuucaguguua

SEQ ID NO: 1946752 - RNA, 19 nt, Homo sapiens
  misc_RNA (1)...(19): siRNA sense strand
guaggaaucucaagaauug

SEQ ID NO: 1946753 - RNA, 19 nt, Homo sapiens
  misc_RNA (1)...(19): siRNA sense strand
gguccaaacucuugaauaa

SEQ ID NO: 1946754 - RNA, 19 nt, Homo sapiens
  misc_RNA (1)...(19): siRNA sense strand
gggagaaacugcuaugagu

SEQ ID NO: 1946755 - RNA, 19 nt, Homo sapiens
  misc_RNA (1)...(19): siRNA sense strand
gaacaggccagaaagugaa

SEQ ID NO: 1946756 - RNA, 19 nt, Homo sapiens
  misc_RNA (1)...(19): siRNA sense strand
aaagaaagguccaaacucu

SEQ ID NO: 1946757 - RNA, 19 nt, Homo sapiens
  misc_RNA (1)...(19): siRNA sense strand
gaagaaagaggaaccaaag

SEQ ID NO: 1946758 - RNA, 19 nt, Homo sapiens
  misc_RNA (1)...(19): siRNA sense strand
gaagaagaguccagaacag

SEQ ID NO: 1946759 - RNA, 19 nt, Homo sapiens
  misc_RNA (1)...(19): siRNA sense strand
ggucaagccucugcuauca

SEQ ID NO: 1946760 - RNA, 19 nt, Homo sapiens
  misc_RNA (1)...(19): siRNA sense strand
ggagaaacugcuaugagua

SEQ ID NO: 1946761 - RNA, 19 nt, Homo sapiens
  misc_RNA (1)...(19): siRNA sense strand
uauagaaccugccgaguca

SEQ ID NO: 1946762 - RNA, 19 nt, Homo sapiens
  misc_RNA (1)...(19): siRNA sense strand
gagaaacugcuaugaguau

SEQ ID NO: 1946763 - RNA, 19 nt, Homo sapiens
  misc_RNA (1)...(19): siRNA sense strand
gaagucacaccuccucauu

SEQ ID NO: 1946764 - RNA, 19 nt, Homo sapiens
  misc_RNA (1)...(19): siRNA sense strand
ggaagaaagaggaaccaaa

SEQ ID NO: 1946765 - RNA, 19 nt, Homo sapiens
  misc_RNA (1)...(19): siRNA sense strand
gugaacugcuggucuggua

SEQ ID NO: 1946766 - RNA, 19 nt, Homo sapiens
  misc_RNA (1)...(19): siRNA sense strand
ggauacuccuggcugguaa

SEQ ID NO: 1946767 - RNA, 19 nt, Homo sapiens
  misc_RNA (1)...(19): siRNA sense strand
ggaagaagaguccagaaca

SEQ ID NO: 1946768 - RNA, 19 nt, Homo sapiens
  misc_RNA (1)...(19): siRNA sense strand
gucaagagaucaaagaaag

SEQ ID NO: 1946769 - RNA, 19 nt, Homo sapiens
  misc_RNA (1)...(19): siRNA sense strand
ccacacagccguaaugaca

SEQ ID NO: 1946770 - RNA, 19 nt, Homo sapiens
  misc_RNA (1)...(19): siRNA sense strand
agucaaaccuccucaguca

SEQ ID NO: 1946771 - RNA, 19 nt, Homo sapiens
  misc_RNA (1)...(19): siRNA sense strand
guaagaagagccugccauu

SEQ ID NO: 1946772 - RNA, 19 nt, Homo sapiens
  misc_RNA (1)...(19): siRNA sense strand
gagcagcaauauccagauc

SEQ ID NO: 1946773 - RNA, 19 nt, Homo sapiens
  misc_RNA (1)...(19): siRNA sense strand
agaagagccugccauuuca

SEQ ID NO: 1946774 - RNA, 19 nt, Homo sapiens
  misc_RNA (1)...(19): siRNA sense strand
aagaagagccugccauuuc

SEQ ID NO: 1946775 - RNA, 19 nt, Homo sapiens
  misc_RNA (1)...(19): siRNA sense strand
acacagccguaaugacaaa

SEQ ID NO: 1946776 - RNA, 19 nt, Homo sapiens
  misc_RNA (1)...(19): siRNA sense strand
acaggcagaucuucuauag

SEQ ID NO: 1946777 - RNA, 19 nt, Homo sapiens
  misc_RNA (1)...(19): siRNA sense strand
gaagaggcagccaacaaug

SEQ ID NO: 1946778 - RNA, 19 nt, Homo sapiens
  misc_RNA (1)...(19): siRNA sense strand
gacaagguuucaguguuaa

SEQ ID NO: 1946779 - RNA, 19 nt, Homo sapiens
  misc_RNA (1)...(19): siRNA sense strand
ggaaugaggcaucugaucu

SEQ ID NO: 1946780 - RNA, 19 nt, Homo sapiens
  misc_RNA (1)...(19): siRNA sense strand
gaugagguaugugaacugu

SEQ ID NO: 1946781 - RNA, 19 nt, Homo sapiens
  misc_RNA (1)...(19): siRNA sense strand
gguaggaaucucaagaauu

SEQ ID NO: 1946782 - RNA, 19 nt, Homo sapiens
  misc_RNA (1)...(19): siRNA sense strand
gaacuucccaggaccaucu

SEQ ID NO: 1946783 - RNA, 19 nt, Homo sapiens
  misc_RNA (1)...(19): siRNA sense strand
aaccaaaggucaagagauc

SEQ ID NO: 1946784 - RNA, 19 nt, Homo sapiens
  misc_RNA (1)...(19): siRNA sense strand
ggucaagagaucaaagaaa

SEQ ID NO: 1946785 - RNA, 19 nt, Homo sapiens
  misc_RNA (1)...(19): siRNA sense strand
cgcaaucacuccucucaga

SEQ ID NO: 1946786 - RNA, 19 nt, Homo sapiens
  misc_RNA (1)...(19): siRNA sense strand
ggaacacaggcaaauuauu

SEQ ID NO: 1946787 - RNA, 19 nt, Homo sapiens
  misc_RNA (1)...(19): siRNA sense strand
ccaacuggaugagguaugu

SEQ ID NO: 1946788 - RNA, 19 nt, Homo sapiens
  misc_RNA (1)...(19): siRNA sense strand
gaaagguccaaacucuuga

SEQ ID NO: 1946789 - RNA, 19 nt, Homo sapiens
  misc_RNA (1)...(19): siRNA sense strand
agaaucaggagcagcaaua

SEQ ID NO: 1946790 - RNA, 19 nt, Homo sapiens
  misc_RNA (1)...(19): siRNA sense strand
gcaaucacuccucucagaa

SEQ ID NO: 1946791 - RNA, 19 nt, Homo sapiens
  misc_RNA (1)...(19): siRNA sense strand
gcagcaaguggaagaaaga

SEQ ID NO: 1946792 - RNA, 19 nt, Homo sapiens
  misc_RNA (1)...(19): siRNA sense strand
agaaagguccaaacucuug

SEQ ID NO: 1946793 - RNA, 19 nt, Homo sapiens
  misc_RNA (1)...(19): siRNA sense strand
gaucaaagaaagguccaaa

SEQ ID NO: 1946794 - RNA, 19 nt, Homo sapiens
  misc_RNA (1)...(19): siRNA sense strand
gaacugcuggucugguaug

SEQ ID NO: 1946795 - RNA, 19 nt, Homo sapiens
  misc_RNA (1)...(19): siRNA sense strand
agucacaccuccucauuca

SEQ ID NO: 1946796 - RNA, 19 nt, Homo sapiens
  misc_RNA (1)...(19): siRNA sense strand
ggguaggaaucucaagaau

SEQ ID NO: 1946797 - RNA, 19 nt, Homo sapiens
  misc_RNA (1)...(19): siRNA sense strand
ggaugaauacggccaggaa

SEQ ID NO: 1946798 - RNA, 19 nt, Homo sapiens
  misc_RNA (1)...(19): siRNA sense strand
gaaacugcuaugaguaugu

SEQ ID NO: 1946799 - RNA, 19 nt, Homo sapiens
  misc_RNA (1)...(19): siRNA sense strand
agggaacacaggcaaauua

SEQ ID NO: 1946800 - RNA, 19 nt, Homo sapiens
  misc_RNA (1)...(19): siRNA sense strand
ggacauggcagagggagau

SEQ ID NO: 1946801 - RNA, 19 nt, Homo sapiens
  misc_RNA (1)...(19): siRNA sense strand
gcagcaauauccagaucca

SEQ ID NO: 1946802 - RNA, 19 nt, Homo sapiens
  misc_RNA (1)...(19): siRNA sense strand
cgaagaggcagccaacaau

SEQ ID NO: 1946803 - RNA, 19 nt, Homo sapiens
  misc_RNA (1)...(19): siRNA sense strand
uaagaagagccugccauuu

SEQ ID NO: 1946804 - RNA, 19 nt, Homo sapiens
  misc_RNA (1)...(19): siRNA sense strand
gaaugaggcaucugaucug

SEQ ID NO: 1946805 - RNA, 19 nt, Homo sapiens
  misc_RNA (1)...(19): siRNA sense strand
gggaacacaggcaaauuau

SEQ ID NO: 1946806 - RNA, 19 nt, Homo sapiens
  misc_RNA (1)...(19): siRNA sense strand
ccaggaccaucugcaagaa

SEQ ID NO: 1946807 - RNA, 19 nt, Homo sapiens
  misc_RNA (1)...(19): siRNA sense strand
gauccacacagccguaaug

SEQ ID NO: 1946808 - RNA, 19 nt, Homo sapiens
  misc_RNA (1)...(19): siRNA sense strand
guccagaacaggccagaaa

SEQ ID NO: 1946809 - RNA, 19 nt, Homo sapiens
  misc_RNA (1)...(19): siRNA sense strand
aaacugcuaugaguaugug

SEQ ID NO: 1946810 - RNA, 19 nt, Homo sapiens
  misc_RNA (1)...(19): siRNA sense strand
gauguuauuacacaccaaa

SEQ ID NO: 1946811 - RNA, 19 nt, Homo sapiens
  misc_RNA (1)...(19): siRNA sense strand
uggacaagguuucaguguu

SEQ ID NO: 1946812 - RNA, 19 nt, Homo sapiens
  misc_RNA (1)...(19): siRNA sense strand
caaagaaagguccaaacuc

SEQ ID NO: 1946813 - RNA, 19 nt, Homo sapiens
  misc_RNA (1)...(19): siRNA sense strand
ucacuccucucagaacuuc

SEQ ID NO: 1946814 - RNA, 19 nt, Homo sapiens
  misc_RNA (1)...(19): siRNA sense strand
gcugagaauugggccauca

SEQ ID NO: 1946815 - RNA, 19 nt, Homo sapiens
  misc_RNA (1)...(19): siRNA sense strand
gaaccugccgagucauuag

SEQ ID NO: 1946816 - RNA, 19 nt, Homo sapiens
  misc_RNA (1)...(19): siRNA sense strand
gauaaauccugggccaacu

SEQ ID NO: 1946817 - RNA, 19 nt, Homo sapiens
  misc_RNA (1)...(19): siRNA sense strand
ccaaaggucaagagaucaa

SEQ ID NO: 1946818 - RNA, 19 nt, Homo sapiens
  misc_RNA (1)...(19): siRNA sense strand
agucacaccuccucagaca

SEQ ID NO: 1946819 - RNA, 19 nt, Homo sapiens
  misc_RNA (1)...(19): siRNA sense strand
agucacaccuccucagaca

SEQ ID NO: 1946820 - RNA, 19 nt, Homo sapiens
  misc_RNA (1)...(19): siRNA sense strand
agucacaccuccucagaca

SEQ ID NO: 1946821 - RNA, 19 nt, Homo sapiens
  misc_RNA (1)...(19): siRNA sense strand
agucacaccuccucagaca

SEQ ID NO: 1946822 - RNA, 19 nt, Homo sapiens
  misc_RNA (1)...(19): siRNA sense strand
acacaccaaaggacacaua

SEQ ID NO: 1946823 - RNA, 19 nt, Homo sapiens
  misc_RNA (1)...(19): siRNA sense strand
agucaaguauggagagugu

SEQ ID NO: 1946824 - RNA, 19 nt, Homo sapiens
  misc_RNA (1)...(19): siRNA sense strand
ggacaaauggggagcugua

SEQ ID NO: 1946825 - RNA, 19 nt, Homo sapiens
  misc_RNA (1)...(19): siRNA sense strand
ucaaagaaagguccaaacu

SEQ ID NO: 1946826 - RNA, 19 nt, Homo sapiens
  misc_RNA (1)...(19): siRNA sense strand
gggcuuggaguauggaaug

SEQ ID NO: 1946827 - RNA, 19 nt, Homo sapiens
  misc_RNA (1)...(19): siRNA sense strand
agaacaggccagaaaguga

SEQ ID NO: 1946828 - RNA, 19 nt, Homo sapiens
  misc_RNA (1)...(19): siRNA sense strand
augaguauguggauggaaa

SEQ ID NO: 1946829 - RNA, 19 nt, Homo sapiens
  misc_RNA (1)...(19): siRNA sense strand
uaagucacaccuccucaga

SEQ ID NO: 1946830 - RNA, 19 nt, Homo sapiens
  misc_RNA (1)...(19): siRNA sense strand
uaagucacaccuccucaga

SEQ ID NO: 1946831 - RNA, 19 nt, Homo sapiens
  misc_RNA (1)...(19): siRNA sense strand
uaagucacaccuccucaga

SEQ ID NO: 1946832 - RNA, 19 nt, Homo sapiens
  misc_RNA (1)...(19): siRNA sense strand
uaagucacaccuccucaga

SEQ ID NO: 1946833 - RNA, 19 nt, Homo sapiens
  misc_RNA (1)...(19): siRNA sense strand
gagaguguggacaagguuu

SEQ ID NO: 1946834 - RNA, 19 nt, Homo sapiens
  misc_RNA (1)...(19): siRNA sense strand
ccuuaugagggccgaauua

SEQ ID NO: 1946835 - RNA, 19 nt, Homo sapiens
  misc_RNA (1)...(19): siRNA sense strand
gaaucaggagcagcaauau

SEQ ID NO: 1946836 - RNA, 19 nt, Homo sapiens
  misc_RNA (1)...(19): siRNA sense strand
caacauguagaacgcaauc

SEQ ID NO: 1946837 - RNA, 19 nt, Homo sapiens
  misc_RNA (1)...(19): siRNA sense strand
ccagagauccauccauguc

SEQ ID NO: 1946838 - RNA, 19 nt, Homo sapiens
  misc_RNA (1)...(19): siRNA sense strand
ccacaggcagaucuucuau

SEQ ID NO: 1946839 - RNA, 19 nt, Homo sapiens
  misc_RNA (1)...(19): siRNA sense strand
guuauuacacaccaaagga

SEQ ID NO: 1946840 - RNA, 19 nt, Homo sapiens
  misc_RNA (1)...(19): siRNA sense strand
gaauuacagaagacgaaga

SEQ ID NO: 1946841 - RNA, 19 nt, Homo sapiens
  misc_RNA (1)...(19): siRNA sense strand
ggcagcaaguggaagaaag

SEQ ID NO: 1946842 - RNA, 19 nt, Homo sapiens
  misc_RNA (1)...(19): siRNA sense strand
gcacuuuggcccuuaugag

SEQ ID NO: 1946843 - RNA, 19 nt, Homo sapiens
  misc_RNA (1)...(19): siRNA sense strand
ggagaguguggacaagguu

SEQ ID NO: 1946844 - RNA, 19 nt, Homo sapiens
  misc_RNA (1)...(19): siRNA sense strand
ggacagugcaguggacaag

SEQ ID NO: 1946845 - RNA, 19 nt, Homo sapiens
  misc_RNA (1)...(19): siRNA sense strand
caagagaucaaagaaaggu

SEQ ID NO: 1946846 - RNA, 19 nt, Homo sapiens
  misc_RNA (1)...(19): siRNA sense strand
guauggagaguguggacaa

SEQ ID NO: 1946847 - RNA, 19 nt, Homo sapiens
  misc_RNA (1)...(19): siRNA sense strand
cugcagggaggaugaguaa

SEQ ID NO: 1946848 - RNA, 19 nt, Homo sapiens
  misc_RNA (1)...(19): siRNA sense strand
agucaguccuccucacuca

SEQ ID NO: 1946849 - RNA, 19 nt, Homo sapiens
  misc_RNA (1)...(19): siRNA sense strand
agucaguccuccucacuca

SEQ ID NO: 1946850 - RNA, 19 nt, Homo sapiens
  misc_RNA (1)...(19): siRNA sense strand
ggaagucacaccuccucau

SEQ ID NO: 1946851 - RNA, 19 nt, Homo sapiens
  misc_RNA (1)...(19): siRNA sense strand
gcagauuuauuccagugaa

SEQ ID NO: 1946852 - RNA, 19 nt, Homo sapiens
  misc_RNA (1)...(19): siRNA sense strand
caacuaaugccaccaccaa

SEQ ID NO: 1946853 - RNA, 19 nt, Homo sapiens
  misc_RNA (1)...(19): siRNA sense strand
gaaacaacaacuggaacuu

SEQ ID NO: 1946854 - RNA, 19 nt, Homo sapiens
  misc_RNA (1)...(19): siRNA sense strand
cagauuuauuccagugaaa

SEQ ID NO: 1946855 - RNA, 19 nt, Homo sapiens
  misc_RNA (1)...(19): siRNA sense strand
aacaacaacuggaacuuca

SEQ ID NO: 1946856 - RNA, 19 nt, Homo sapiens
  misc_RNA (1)...(19): siRNA sense strand
uucugcaucucuacucuua

SEQ ID NO: 1946857 - RNA, 19 nt, Homo sapiens
  misc_RNA (1)...(19): siRNA sense strand
aaacaacaacuggaacuuc

SEQ ID NO: 1946858 - RNA, 19 nt, Homo sapiens
  misc_RNA (1)...(19): siRNA sense strand
caacaacuggaacuucaag

SEQ ID NO: 1946859 - RNA, 19 nt, Homo sapiens
  misc_RNA (1)...(19): siRNA sense strand
gucaacagccagucucuuc

SEQ ID NO: 1946860 - RNA, 19 nt, Homo sapiens
  misc_RNA (1)...(19): siRNA sense strand
gcuccuacccacgcagauu

SEQ ID NO: 1946861 - RNA, 19 nt, Homo sapiens
  misc_RNA (1)...(19): siRNA sense strand
gauuuauuccagugaaaca

SEQ ID NO: 1946862 - RNA, 19 nt, Homo sapiens
  misc_RNA (1)...(19): siRNA sense strand
ucucucuucugcaucucua

SEQ ID NO: 1946863 - RNA, 19 nt, Homo sapiens
  misc_RNA (1)...(19): siRNA sense strand
uacccacgcagauuuauuc

SEQ ID NO: 1946864 - RNA, 19 nt, Homo sapiens
  misc_RNA (1)...(19): siRNA sense strand
gaaaugcccucuucagauu

SEQ ID NO: 1946865 - RNA, 19 nt, Homo sapiens
  misc_RNA (1)...(19): siRNA sense strand
gaacugcacacgccaaaga

SEQ ID NO: 1946866 - RNA, 19 nt, Homo sapiens
  misc_RNA (1)...(19): siRNA sense strand
ggaaaugcccucuucagau

SEQ ID NO: 1946867 - RNA, 19 nt, Homo sapiens
  misc_RNA (1)...(19): siRNA sense strand
ccgaugagauguccaguug

SEQ ID NO: 1946868 - RNA, 19 nt, Homo sapiens
  misc_RNA (1)...(19): siRNA sense strand
ugaccagucugaucaaaga

SEQ ID NO: 1946869 - RNA, 19 nt, Homo sapiens
  misc_RNA (1)...(19): siRNA sense strand
gacaggaaaugcccucuuc

SEQ ID NO: 1946870 - RNA, 19 nt, Homo sapiens
  misc_RNA (1)...(19): siRNA sense strand
acaagaaggucgguguuaa

SEQ ID NO: 1946871 - RNA, 19 nt, Homo sapiens
  misc_RNA (1)...(19): siRNA sense strand
caagaaggucgguguuaaa

SEQ ID NO: 1946872 - RNA, 19 nt, Homo sapiens
  misc_RNA (1)...(19): siRNA sense strand
gacaagaaggucgguguua

SEQ ID NO: 1946873 - RNA, 19 nt, Homo sapiens
  misc_RNA (1)...(19): siRNA sense strand
cagcacaccugccucaaca

SEQ ID NO: 1946874 - RNA, 19 nt, Homo sapiens
  misc_RNA (1)...(19): siRNA sense strand
gcagauagagaagaacuga

SEQ ID NO: 1946875 - RNA, 19 nt, Homo sapiens
  misc_RNA (1)...(19): siRNA sense strand
gggaaugccugccugaaaa

SEQ ID NO: 1946876 - RNA, 19 nt, Homo sapiens
  misc_RNA (1)...(19): siRNA sense strand
gaaaaggacagcucacuau

SEQ ID NO: 1946877 - RNA, 19 nt, Homo sapiens
  misc_RNA (1)...(19): siRNA sense strand
cagaggaguuccagcuuca

SEQ ID NO: 1946878 - RNA, 19 nt, Homo sapiens
  misc_RNA (1)...(19): siRNA sense strand
gugaugguccuaagugaaa

SEQ ID NO: 1946879 - RNA, 19 nt, Homo sapiens
  misc_RNA (1)...(19): siRNA sense strand
ggacuccaccaccgauuug

SEQ ID NO: 1946880 - RNA, 19 nt, Homo sapiens
  misc_RNA (1)...(19): siRNA sense strand
gaccuacacuuuucucuug

SEQ ID NO: 1946881 - RNA, 19 nt, Homo sapiens
  misc_RNA (1)...(19): siRNA sense strand
gaaaagagacgcugcuaca

SEQ ID NO: 1946882 - RNA, 19 nt, Homo sapiens
  misc_RNA (1)...(19): siRNA sense strand
ucaaagaccucagcaucag

SEQ ID NO: 1946883 - RNA, 19 nt, Homo sapiens
  misc_RNA (1)...(19): siRNA sense strand
gaaggucgguguuaaaagg

SEQ ID NO: 1946884 - RNA, 19 nt, Homo sapiens
  misc_RNA (1)...(19): siRNA sense strand
ccaaagaagaugagucaag

SEQ ID NO: 1946885 - RNA, 19 nt, Homo sapiens
  misc_RNA (1)...(19): siRNA sense strand
ggacggcgaguuggacauu

SEQ ID NO: 1946886 - RNA, 19 nt, Homo sapiens
  misc_RNA (1)...(19): siRNA sense strand
agucaaggaccuacacuuu

SEQ ID NO: 1946887 - RNA, 19 nt, Homo sapiens
  misc_RNA (1)...(19): siRNA sense strand
caaccgagcaccagcaucu

SEQ ID NO: 1946888 - RNA, 19 nt, Homo sapiens
  misc_RNA (1)...(19): siRNA sense strand
ggacaggaaaugcccucuu

SEQ ID NO: 1946889 - RNA, 19 nt, Homo sapiens
  misc_RNA (1)...(19): siRNA sense strand
acauugagcagauagagaa

SEQ ID NO: 1946890 - RNA, 19 nt, Homo sapiens
  misc_RNA (1)...(19): siRNA sense strand
gcugugaccagucugauca

SEQ ID NO: 1946891 - RNA, 19 nt, Homo sapiens
  misc_RNA (1)...(19): siRNA sense strand
ucaaggaccuacacuuuuc

SEQ ID NO: 1946892 - RNA, 19 nt, Homo sapiens
  misc_RNA (1)...(19): siRNA sense strand
uugagcagauagagaagaa

SEQ ID NO: 1946893 - RNA, 19 nt, Homo sapiens
  misc_RNA (1)...(19): siRNA sense strand
guuggacauugagcagaua

SEQ ID NO: 1946894 - RNA, 19 nt, Homo sapiens
  misc_RNA (1)...(19): siRNA sense strand
ggugaugguccuaagugaa

SEQ ID NO: 1946895 - RNA, 19 nt, Homo sapiens
  misc_RNA (1)...(19): siRNA sense strand
ucccagccguguguccuua

SEQ ID NO: 1946896 - RNA, 19 nt, Homo sapiens
  misc_RNA (1)...(19): siRNA sense strand
aaugcccucuucagauuga

SEQ ID NO: 1946897 - RNA, 19 nt, Homo sapiens
  misc_RNA (1)...(19): siRNA sense strand
gagcagauagagaagaacu

SEQ ID NO: 1946898 - RNA, 19 nt, Homo sapiens
  misc_RNA (1)...(19): siRNA sense strand
gacauugagcagauagaga

SEQ ID NO: 1946899 - RNA, 19 nt, Homo sapiens
  misc_RNA (1)...(19): siRNA sense strand
cgccaaagaagaugaguca

SEQ ID NO: 1946900 - RNA, 19 nt, Homo sapiens
  misc_RNA (1)...(19): siRNA sense strand
ccaguugccggacaucaug

SEQ ID NO: 1946901 - RNA, 19 nt, Homo sapiens
  misc_RNA (1)...(19): siRNA sense strand
gcacacgccaaagaagaug

SEQ ID NO: 1946902 - RNA, 19 nt, Homo sapiens
  misc_RNA (1)...(19): siRNA sense strand
ggacauugagcagauagag

SEQ ID NO: 1946903 - RNA, 19 nt, Homo sapiens
  misc_RNA (1)...(19): siRNA sense strand
ugggaaugccugccugaaa

SEQ ID NO: 1946904 - RNA, 19 nt, Homo sapiens
  misc_RNA (1)...(19): siRNA sense strand
guggaauuauggaaaauga

SEQ ID NO: 1946905 - RNA, 19 nt, Homo sapiens
  misc_RNA (1)...(19): siRNA sense strand
aggaaaugcccucuucaga

SEQ ID NO: 1946906 - RNA, 19 nt, Homo sapiens
  misc_RNA (1)...(19): siRNA sense strand
gaggccuucucuagaccuu

SEQ ID NO: 1946907 - RNA, 19 nt, Homo sapiens
  misc_RNA (1)...(19): siRNA sense strand
aaaggacagcucacuaugg

SEQ ID NO: 1946908 - RNA, 19 nt, Homo sapiens
  misc_RNA (1)...(19): siRNA sense strand
acggcgaguuggacauuga

SEQ ID NO: 1946909 - RNA, 19 nt, Homo sapiens
  misc_RNA (1)...(19): siRNA sense strand
cugcagcggucccucucuu

SEQ ID NO: 1946910 - RNA, 19 nt, Homo sapiens
  misc_RNA (1)...(19): siRNA sense strand
gcaccaugcagaggaguuc

SEQ ID NO: 1946911 - RNA, 19 nt, Homo sapiens
  misc_RNA (1)...(19): siRNA sense strand
gacggcgaguuggacauug

SEQ ID NO: 1946912 - RNA, 19 nt, Homo sapiens
  misc_RNA (1)...(19): siRNA sense strand
caaaugcaccauccuguga

SEQ ID NO: 1946913 - RNA, 19 nt, Homo sapiens
  misc_RNA (1)...(19): siRNA sense strand
ugccacagaugaagaaaga

SEQ ID NO: 1946914 - RNA, 19 nt, Homo sapiens
  misc_RNA (1)...(19): siRNA sense strand
aaagagguggagagccuua

SEQ ID NO: 1946915 - RNA, 19 nt, Homo sapiens
  misc_RNA (1)...(19): siRNA sense strand
uggagagccuuaaguacca

SEQ ID NO: 1946916 - RNA, 19 nt, Homo sapiens
  misc_RNA (1)...(19): siRNA sense strand
ggacgugccacagaugaag

SEQ ID NO: 1946917 - RNA, 19 nt, Homo sapiens
  misc_RNA (1)...(19): siRNA sense strand
ccgagcugcugaaguggau

SEQ ID NO: 1946918 - RNA, 19 nt, Homo sapiens
  misc_RNA (1)...(19): siRNA sense strand
ggaaggcccugugaagaaa

SEQ ID NO: 1946919 - RNA, 19 nt, Homo sapiens
  misc_RNA (1)...(19): siRNA sense strand
gggaguaucugagaaagaa

SEQ ID NO: 1946920 - RNA, 19 nt, Homo sapiens
  misc_RNA (1)...(19): siRNA sense strand
gaggaagacuggcucuaug

SEQ ID NO: 1946921 - RNA, 19 nt, Homo sapiens
  misc_RNA (1)...(19): siRNA sense strand
ugagagacuugcaccuuaa

SEQ ID NO: 1946922 - RNA, 19 nt, Homo sapiens
  misc_RNA (1)...(19): siRNA sense strand
ugaggaggcuguucagugu

SEQ ID NO: 1946923 - RNA, 19 nt, Homo sapiens
  misc_RNA (1)...(19): siRNA sense strand
ggaagccaaugccaugugu

SEQ ID NO: 1946924 - RNA, 19 nt, Homo sapiens
  misc_RNA (1)...(19): siRNA sense strand
gcuggacucuaaucccuuu

SEQ ID NO: 1946925 - RNA, 19 nt, Homo sapiens
  misc_RNA (1)...(19): siRNA sense strand
aaagauggcuuccgcuucu

SEQ ID NO: 1946926 - RNA, 19 nt, Homo sapiens
  misc_RNA (1)...(19): siRNA sense strand
gaucgggaguaucugagaa

SEQ ID NO: 1946927 - RNA, 19 nt, Homo sapiens
  misc_RNA (1)...(19): siRNA sense strand
acaguuugcugccugguuu

SEQ ID NO: 1946928 - RNA, 19 nt, Homo sapiens
  misc_RNA (1)...(19): siRNA sense strand
ggaggaagacuggcucuau

SEQ ID NO: 1946929 - RNA, 19 nt, Homo sapiens
  misc_RNA (1)...(19): siRNA sense strand
gaagacuggcucuaugaga

SEQ ID NO: 1946930 - RNA, 19 nt, Homo sapiens
  misc_RNA (1)...(19): siRNA sense strand
augagagacuugcaccuua

SEQ ID NO: 1946931 - RNA, 19 nt, Homo sapiens
  misc_RNA (1)...(19): siRNA sense strand
gacccaugcgcaagaguua

SEQ ID NO: 1946932 - RNA, 19 nt, Homo sapiens
  misc_RNA (1)...(19): siRNA sense strand
aaaccaaccgccugcauga

SEQ ID NO: 1946933 - RNA, 19 nt, Homo sapiens
  misc_RNA (1)...(19): siRNA sense strand
cccaagagcagccagauug

SEQ ID NO: 1946934 - RNA, 19 nt, Homo sapiens
  misc_RNA (1)...(19): siRNA sense strand
uugcuucccuugucuucua

SEQ ID NO: 1946935 - RNA, 19 nt, Homo sapiens
  misc_RNA (1)...(19): siRNA sense strand
ggacccaugcgcaagaguu

SEQ ID NO: 1946936 - RNA, 19 nt, Homo sapiens
  misc_RNA (1)...(19): siRNA sense strand
ggcuuccgcuucuucacua

SEQ ID NO: 1946937 - RNA, 19 nt, Homo sapiens
  misc_RNA (1)...(19): siRNA sense strand
uggaaggcccugugaagaa

SEQ ID NO: 1946938 - RNA, 19 nt, Homo sapiens
  misc_RNA (1)...(19): siRNA sense strand
ccgccugcaugaccggaua

SEQ ID NO: 1946939 - RNA, 19 nt, Homo sapiens
  misc_RNA (1)...(19): siRNA sense strand
ggaccgagaggcauuugag

SEQ ID NO: 1946940 - RNA, 19 nt, Homo sapiens
  misc_RNA (1)...(19): siRNA sense strand
gcaugaccggauagucuuu

SEQ ID NO: 1946941 - RNA, 19 nt, Homo sapiens
  misc_RNA (1)...(19): siRNA sense strand
cuaccucagucaccugugu

SEQ ID NO: 1946942 - RNA, 19 nt, Homo sapiens
  misc_RNA (1)...(19): siRNA sense strand
guggaaggcccugugaaga

SEQ ID NO: 1946943 - RNA, 19 nt, Homo sapiens
  misc_RNA (1)...(19): siRNA sense strand
ggaagacuggcucuaugag

SEQ ID NO: 1946944 - RNA, 19 nt, Homo sapiens
  misc_RNA (1)...(19): siRNA sense strand
ggacucuaaucccuuugcu

SEQ ID NO: 1946945 - RNA, 19 nt, Homo sapiens
  misc_RNA (1)...(19): siRNA sense strand
aggaggaggcugagugcua

SEQ ID NO: 1946946 - RNA, 19 nt, Homo sapiens
  misc_RNA (1)...(19): siRNA sense strand
cacaggagauuccccuuug

SEQ ID NO: 1946947 - RNA, 19 nt, Homo sapiens
  misc_RNA (1)...(19): siRNA sense strand
acccucaggugauggaguu

SEQ ID NO: 1946948 - RNA, 19 nt, Homo sapiens
  misc_RNA (1)...(19): siRNA sense strand
uaugagagacuugcaccuu

SEQ ID NO: 1946949 - RNA, 19 nt, Homo sapiens
  misc_RNA (1)...(19): siRNA sense strand
aggaagacuggcucuauga

SEQ ID NO: 1946950 - RNA, 19 nt, Homo sapiens
  misc_RNA (1)...(19): siRNA sense strand
gggaagccaaugccaugug

SEQ ID NO: 1946951 - RNA, 19 nt, Homo sapiens
  misc_RNA (1)...(19): siRNA sense strand
ggaguucuggcaaggucaa

SEQ ID NO: 1946952 - RNA, 19 nt, Homo sapiens
  misc_RNA (1)...(19): siRNA sense strand
aagaggugcccaagccaaa

SEQ ID NO: 1946953 - RNA, 19 nt, Homo sapiens
  misc_RNA (1)...(19): siRNA sense strand
ggaacagcucuaccaggau

SEQ ID NO: 1946954 - RNA, 19 nt, Homo sapiens
  misc_RNA (1)...(19): siRNA sense strand
gcuuccgcuucuucacuaa

SEQ ID NO: 1946955 - RNA, 19 nt, Homo sapiens
  misc_RNA (1)...(19): siRNA sense strand
ggacaagggcuucaacuuu

SEQ ID NO: 1946956 - RNA, 19 nt, Homo sapiens
  misc_RNA (1)...(19): siRNA sense strand
gaaagacaccggagacaug

SEQ ID NO: 1946957 - RNA, 19 nt, Homo sapiens
  misc_RNA (1)...(19): siRNA sense strand
gaacaaggagcgcaucuuc

SEQ ID NO: 1946958 - RNA, 19 nt, Homo sapiens
  misc_RNA (1)...(19): siRNA sense strand
gaacuucaccuaccacauc

SEQ ID NO: 1946959 - RNA, 19 nt, Homo sapiens
  misc_RNA (1)...(19): siRNA sense strand
gacaagggcuucaacuuuu

SEQ ID NO: 1946960 - RNA, 19 nt, Homo sapiens
  misc_RNA (1)...(19): siRNA sense strand
gcaugcggcuggugcacua

SEQ ID NO: 1946961 - RNA, 19 nt, Homo sapiens
  misc_RNA (1)...(19): siRNA sense strand
ugaauggaaugaucaaaca

SEQ ID NO: 1946962 - RNA, 19 nt, Homo sapiens
  misc_RNA (1)...(19): siRNA sense strand
gcacagaaccagaacuaca

SEQ ID NO: 1946963 - RNA, 19 nt, Homo sapiens
  misc_RNA (1)...(19): siRNA sense strand
gaccaccgcuaacaacaug

SEQ ID NO: 1946964 - RNA, 19 nt, Homo sapiens
  misc_RNA (1)...(19): siRNA sense strand
gcccugaaccaguccauua

SEQ ID NO: 1946965 - RNA, 19 nt, Homo sapiens
  misc_RNA (1)...(19): siRNA sense strand
ucucaccgguggccaauaa

SEQ ID NO: 1946966 - RNA, 19 nt, Homo sapiens
  misc_RNA (1)...(19): siRNA sense strand
gcuaacaacaugcguaaga

SEQ ID NO: 1946967 - RNA, 19 nt, Homo sapiens
  misc_RNA (1)...(19): siRNA sense strand
ggacaccaccgagcaauug

SEQ ID NO: 1946968 - RNA, 19 nt, Homo sapiens
  misc_RNA (1)...(19): siRNA sense strand
caaaggaggaaccauguga

SEQ ID NO: 1946969 - RNA, 19 nt, Homo sapiens
  misc_RNA (1)...(19): siRNA sense strand
guacgaugcuaacuacaag

SEQ ID NO: 1946970 - RNA, 19 nt, Homo sapiens
  misc_RNA (1)...(19): siRNA sense strand
caauaaccauccuguccuu

SEQ ID NO: 1946971 - RNA, 19 nt, Homo sapiens
  misc_RNA (1)...(19): siRNA sense strand
gaucucagagcgcaucauu

SEQ ID NO: 1946972 - RNA, 19 nt, Homo sapiens
  misc_RNA (1)...(19): siRNA sense strand
ccgcugaacugcaacaaca

SEQ ID NO: 1946973 - RNA, 19 nt, Homo sapiens
  misc_RNA (1)...(19): siRNA sense strand
gacauggucuuugccaaug

SEQ ID NO: 1946974 - RNA, 19 nt, Homo sapiens
  misc_RNA (1)...(19): siRNA sense strand
gaaccaguccauuaacauc

SEQ ID NO: 1946975 - RNA, 19 nt, Homo sapiens
  misc_RNA (1)...(19): siRNA sense strand
cuaacaacaugcguaagaa

SEQ ID NO: 1946976 - RNA, 19 nt, Homo sapiens
  misc_RNA (1)...(19): siRNA sense strand
ugaauucaccuaccacuuc

SEQ ID NO: 1946977 - RNA, 19 nt, Homo sapiens
  misc_RNA (1)...(19): siRNA sense strand
ggaaaaccauagagaacuu

SEQ ID NO: 1946978 - RNA, 19 nt, Homo sapiens
  misc_RNA (1)...(19): siRNA sense strand
gagcgacagcgauguguug

SEQ ID NO: 1946979 - RNA, 19 nt, Homo sapiens
  misc_RNA (1)...(19): siRNA sense strand
gcagcgggaucuguacaug

SEQ ID NO: 1946980 - RNA, 19 nt, Homo sapiens
  misc_RNA (1)...(19): siRNA sense strand
acaaggagcugcccaugcu

SEQ ID NO: 1946981 - RNA, 19 nt, Homo sapiens
  misc_RNA (1)...(19): siRNA sense strand
gcccagaugcugaauggaa

SEQ ID NO: 1946982 - RNA, 19 nt, Homo sapiens
  misc_RNA (1)...(19): siRNA sense strand
caagguggccagcaaguca

SEQ ID NO: 1946983 - RNA, 19 nt, Homo sapiens
  misc_RNA (1)...(19): siRNA sense strand
gaugcugaauggaaugauc

SEQ ID NO: 1946984 - RNA, 19 nt, Homo sapiens
  misc_RNA (1)...(19): siRNA sense strand
ucucagagcgcaucauugu

SEQ ID NO: 1946985 - RNA, 19 nt, Homo sapiens
  misc_RNA (1)...(19): siRNA sense strand
ucaaguggcagccucauca

SEQ ID NO: 1946986 - RNA, 19 nt, Homo sapiens
  misc_RNA (1)...(19): siRNA sense strand
caagucaucguccgugguu

SEQ ID NO: 1946987 - RNA, 19 nt, Homo sapiens
  misc_RNA (1)...(19): siRNA sense strand
ugugcaagcugacagacaa

SEQ ID NO: 1946988 - RNA, 19 nt, Homo sapiens
  misc_RNA (1)...(19): siRNA sense strand
gaacugcaacaacaacaac

SEQ ID NO: 1946989 - RNA, 19 nt, Homo sapiens
  misc_RNA (1)...(19): siRNA sense strand
gucaugggcucgcuuaugc

SEQ ID NO: 1946990 - RNA, 19 nt, Homo sapiens
  misc_RNA (1)...(19): siRNA sense strand
gaccucugcuucccugaca

SEQ ID NO: 1946991 - RNA, 19 nt, Homo sapiens
  misc_RNA (1)...(19): siRNA sense strand
gggcaaagccaagaacagu

SEQ ID NO: 1946992 - RNA, 19 nt, Homo sapiens
  misc_RNA (1)...(19): siRNA sense strand
gaacagucccagccuuggu

SEQ ID NO: 1946993 - RNA, 19 nt, Homo sapiens
  misc_RNA (1)...(19): siRNA sense strand
ggucuuugccaaugggaaa

SEQ ID NO: 1946994 - RNA, 19 nt, Homo sapiens
  misc_RNA (1)...(19): siRNA sense strand
gcauacagcccucuuugcu

SEQ ID NO: 1946995 - RNA, 19 nt, Homo sapiens
  misc_RNA (1)...(19): siRNA sense strand
ccaacuaccaguccaucaa

SEQ ID NO: 1946996 - RNA, 19 nt, Homo sapiens
  misc_RNA (1)...(19): siRNA sense strand
ggacagugacagccucagu

SEQ ID NO: 1946997 - RNA, 19 nt, Homo sapiens
  misc_RNA (1)...(19): siRNA sense strand
ggaccagagguacuucaug

SEQ ID NO: 1946998 - RNA, 19 nt, Homo sapiens
  misc_RNA (1)...(19): siRNA sense strand
gcgugggcaucaacacaga

SEQ ID NO: 1946999 - RNA, 19 nt, Homo sapiens
  misc_RNA (1)...(19): siRNA sense strand
ggucaugggcucgcuuaug

SEQ ID NO: 1947000 - RNA, 19 nt, Homo sapiens
  misc_RNA (1)...(19): siRNA sense strand
ccuguacgaugcuaacuac

SEQ ID NO: 1947001 - RNA, 19 nt, Homo sapiens
  misc_RNA (1)...(19): siRNA sense strand
uggagacgcgcauugauga

SEQ ID NO: 1947002 - RNA, 19 nt, Homo sapiens
  misc_RNA (1)...(19): siRNA sense strand
agcgggaucuguacaugaa

SEQ ID NO: 1947003 - RNA, 19 nt, Homo sapiens
  misc_RNA (1)...(19): siRNA sense strand
ccacuucuaccgccugugu

SEQ ID NO: 1947004 - RNA, 19 nt, Homo sapiens
  misc_RNA (1)...(19): siRNA sense strand
acaaggagcgcaucuucau

SEQ ID NO: 1947005 - RNA, 19 nt, Homo sapiens
  misc_RNA (1)...(19): siRNA sense strand
ccgcuaacaacaugcguaa

SEQ ID NO: 1947006 - RNA, 19 nt, Homo sapiens
  misc_RNA (1)...(19): siRNA sense strand
gcgagaccaccgcuaacaa

SEQ ID NO: 1947007 - RNA, 19 nt, Homo sapiens
  misc_RNA (1)...(19): siRNA sense strand
caacuaccaguccaucaag

SEQ ID NO: 1947008 - RNA, 19 nt, Homo sapiens
  misc_RNA (1)...(19): siRNA sense strand
ccaagcaucacaagagucu

SEQ ID NO: 1947009 - RNA, 19 nt, Homo sapiens
  misc_RNA (1)...(19): siRNA sense strand
cuuuaacccuggccauguu

SEQ ID NO: 1947010 - RNA, 19 nt, Homo sapiens
  misc_RNA (1)...(19): siRNA sense strand
gcaccuuggacauguguuc

SEQ ID NO: 1947011 - RNA, 19 nt, Homo sapiens
  misc_RNA (1)...(19): siRNA sense strand
gccagaagaagaaccacuu

SEQ ID NO: 1947012 - RNA, 19 nt, Homo sapiens
  misc_RNA (1)...(19): siRNA sense strand
ucaaugcccagaugcugaa

SEQ ID NO: 1947013 - RNA, 19 nt, Homo sapiens
  misc_RNA (1)...(19): siRNA sense strand
gaggggagccuuccacaga

SEQ ID NO: 1947014 - RNA, 19 nt, Homo sapiens
  misc_RNA (1)...(19): siRNA sense strand
agaacuuccugguggugaa

SEQ ID NO: 1947015 - RNA, 19 nt, Homo sapiens
  misc_RNA (1)...(19): siRNA sense strand
ggaggugaaggagaucuug

SEQ ID NO: 1947016 - RNA, 19 nt, Homo sapiens
  misc_RNA (1)...(19): siRNA sense strand
gcaccccgcugaacugcaa

SEQ ID NO: 1947017 - RNA, 19 nt, Homo sapiens
  misc_RNA (1)...(19): siRNA sense strand
cugaaccaguccauuaaca

SEQ ID NO: 1947018 - RNA, 19 nt, Homo sapiens
  misc_RNA (1)...(19): siRNA sense strand
gaagcugcacggagugaag

SEQ ID NO: 1947019 - RNA, 19 nt, Homo sapiens
  misc_RNA (1)...(19): siRNA sense strand
cccagaugcugaauggaau

SEQ ID NO: 1947020 - RNA, 19 nt, Homo sapiens
  misc_RNA (1)...(19): siRNA sense strand
gagcccaaguacgucaaga

SEQ ID NO: 1947021 - RNA, 19 nt, Homo sapiens
  misc_RNA (1)...(19): siRNA sense strand
gaggaggaccugguagaca

SEQ ID NO: 1947022 - RNA, 19 nt, Homo sapiens
  misc_RNA (1)...(19): siRNA sense strand
cagaggaggaccugguaga

SEQ ID NO: 1947023 - RNA, 19 nt, Homo sapiens
  misc_RNA (1)...(19): siRNA sense strand
acagauacaagcccgaguu

SEQ ID NO: 1947024 - RNA, 19 nt, Homo sapiens
  misc_RNA (1)...(19): siRNA sense strand
ccaccgagcaauugaagag

SEQ ID NO: 1947025 - RNA, 19 nt, Homo sapiens
  misc_RNA (1)...(19): siRNA sense strand
uaacaacaugcguaagaag

SEQ ID NO: 1947026 - RNA, 19 nt, Homo sapiens
  misc_RNA (1)...(19): siRNA sense strand
gagaccaccgcuaacaaca

SEQ ID NO: 1947027 - RNA, 19 nt, Homo sapiens
  misc_RNA (1)...(19): siRNA sense strand
agacuaccacuuccacuuc

SEQ ID NO: 1947028 - RNA, 19 nt, Homo sapiens
  misc_RNA (1)...(19): siRNA sense strand
cagcaggccacgacaucaa

SEQ ID NO: 1947029 - RNA, 19 nt, Homo sapiens
  misc_RNA (1)...(19): siRNA sense strand
caaggagcgcaucuucaug

SEQ ID NO: 1947030 - RNA, 19 nt, Homo sapiens
  misc_RNA (1)...(19): siRNA sense strand
gccuuugugugccagaaga

SEQ ID NO: 1947031 - RNA, 19 nt, Homo sapiens
  misc_RNA (1)...(19): siRNA sense strand
gacuaccacuuccacuucu

SEQ ID NO: 1947032 - RNA, 19 nt, Homo sapiens
  misc_RNA (1)...(19): siRNA sense strand
cugcaggccugggaacuuc

SEQ ID NO: 1947033 - RNA, 19 nt, Homo sapiens
  misc_RNA (1)...(19): siRNA sense strand
gccagucaccaacaucaga

SEQ ID NO: 1947034 - RNA, 19 nt, Homo sapiens
  misc_RNA (1)...(19): siRNA sense strand
cacagaggaggaccuggua

SEQ ID NO: 1947035 - RNA, 19 nt, Homo sapiens
  misc_RNA (1)...(19): siRNA sense strand
cagcgggaucuguacauga

SEQ ID NO: 1947036 - RNA, 19 nt, Homo sapiens
  misc_RNA (1)...(19): siRNA sense strand
cugcuucccugacaucucu

SEQ ID NO: 1947037 - RNA, 19 nt, Homo sapiens
  misc_RNA (1)...(19): siRNA sense strand
cucaggaggugaaggagau

SEQ ID NO: 1947038 - RNA, 19 nt, Homo sapiens
  misc_RNA (1)...(19): siRNA sense strand
cucgacugcuucuaucuga

SEQ ID NO: 1947039 - RNA, 19 nt, Homo sapiens
  misc_RNA (1)...(19): siRNA sense strand
ccugguuccuugccucuca

SEQ ID NO: 1947040 - RNA, 19 nt, Homo sapiens
  misc_RNA (1)...(19): siRNA sense strand
cagacuaccacuuccacuu

SEQ ID NO: 1947041 - RNA, 19 nt, Homo sapiens
  misc_RNA (1)...(19): siRNA sense strand
ggccugggaacuucaccua

SEQ ID NO: 1947042 - RNA, 19 nt, Homo sapiens
  misc_RNA (1)...(19): siRNA sense strand
aggaguacaucagcaagga

SEQ ID NO: 1947043 - RNA, 19 nt, Homo sapiens
  misc_RNA (1)...(19): siRNA sense strand
gggcagggcaaagccaaga

SEQ ID NO: 1947044 - RNA, 19 nt, Homo sapiens
  misc_RNA (1)...(19): siRNA sense strand
uuccuugccucucagcauu

SEQ ID NO: 1947045 - RNA, 19 nt, Homo sapiens
  misc_RNA (1)...(19): siRNA sense strand
gaggaagcacucugaaucc

SEQ ID NO: 1947046 - RNA, 19 nt, Homo sapiens
  misc_RNA (1)...(19): siRNA sense strand
cacccucaaugcccagaug

SEQ ID NO: 1947047 - RNA, 19 nt, Homo sapiens
  misc_RNA (1)...(19): siRNA sense strand
gcagguccagccagagcuu

SEQ ID NO: 1947048 - RNA, 19 nt, Homo sapiens
  misc_RNA (1)...(19): siRNA sense strand
cugcagggaaccaucauug

SEQ ID NO: 1947049 - RNA, 19 nt, Homo sapiens
  misc_RNA (1)...(19): siRNA sense strand
acacaccccuccaagaaga

SEQ ID NO: 1947050 - RNA, 19 nt, Homo sapiens
  misc_RNA (1)...(19): siRNA sense strand
cgagagcgacagcgaugug

SEQ ID NO: 1947051 - RNA, 19 nt, Homo sapiens
  misc_RNA (1)...(19): siRNA sense strand
cugagcaggucacgaaggu

SEQ ID NO: 1947052 - RNA, 19 nt, Homo sapiens
  misc_RNA (1)...(19): siRNA sense strand
gaagaacaguguagcauug

SEQ ID NO: 1947053 - RNA, 19 nt, Homo sapiens
  misc_RNA (1)...(19): siRNA sense strand
gaagaucaguguagcuuug

SEQ ID NO: 1947054 - RNA, 19 nt, Homo sapiens
  misc_RNA (1)...(19): siRNA sense strand
caaacgugcugcuaagaaa

SEQ ID NO: 1947055 - RNA, 19 nt, Homo sapiens
  misc_RNA (1)...(19): siRNA sense strand
caaccaaacuugaauguac

SEQ ID NO: 1947056 - RNA, 19 nt, Homo sapiens
  misc_RNA (1)...(19): siRNA sense strand
ugacgagccuuuauuugaa

SEQ ID NO: 1947057 - RNA, 19 nt, Homo sapiens
  misc_RNA (1)...(19): siRNA sense strand
ccagaagaacaauguauua

SEQ ID NO: 1947058 - RNA, 19 nt, Homo sapiens
  misc_RNA (1)...(19): siRNA sense strand
aaacgucacuggaaucuca

SEQ ID NO: 1947059 - RNA, 19 nt, Homo sapiens
  misc_RNA (1)...(19): siRNA sense strand
cuauuuagcugaagaggaa

SEQ ID NO: 1947060 - RNA, 19 nt, Homo sapiens
  misc_RNA (1)...(19): siRNA sense strand
acagaucgauacccagaua

SEQ ID NO: 1947061 - RNA, 19 nt, Homo sapiens
  misc_RNA (1)...(19): siRNA sense strand
ggaaagacauaggaagcaa

SEQ ID NO: 1947062 - RNA, 19 nt, Homo sapiens
  misc_RNA (1)...(19): siRNA sense strand
gcucaaacgucacuggaau

SEQ ID NO: 1947063 - RNA, 19 nt, Homo sapiens
  misc_RNA (1)...(19): siRNA sense strand
ggaauaagaaugugagaca

SEQ ID NO: 1947064 - RNA, 19 nt, Homo sapiens
  misc_RNA (1)...(19): siRNA sense strand
cagcaaaguuacaagaaau

SEQ ID NO: 1947065 - RNA, 19 nt, Homo sapiens
  misc_RNA (1)...(19): siRNA sense strand
caaauggaguaccuucuuc

SEQ ID NO: 1947066 - RNA, 19 nt, Homo sapiens
  misc_RNA (1)...(19): siRNA sense strand
gaagaggaaagacauagga

SEQ ID NO: 1947067 - RNA, 19 nt, Homo sapiens
  misc_RNA (1)...(19): siRNA sense strand
ggacaaggcuuugcuuuuc

SEQ ID NO: 1947068 - RNA, 19 nt, Homo sapiens
  misc_RNA (1)...(19): siRNA sense strand
ugaaacaucucuauuuagc

SEQ ID NO: 1947069 - RNA, 19 nt, Homo sapiens
  misc_RNA (1)...(19): siRNA sense strand
acagcaaaguuacaagaaa

SEQ ID NO: 1947070 - RNA, 19 nt, Homo sapiens
  misc_RNA (1)...(19): siRNA sense strand
caagaagaauaugaacaga

SEQ ID NO: 1947071 - RNA, 19 nt, Homo sapiens
  misc_RNA (1)...(19): siRNA sense strand
gcaaaguuacaagaaauug

SEQ ID NO: 1947072 - RNA, 19 nt, Homo sapiens
  misc_RNA (1)...(19): siRNA sense strand
gaagaaaauggaaguguuu

SEQ ID NO: 1947073 - RNA, 19 nt, Homo sapiens
  misc_RNA (1)...(19): siRNA sense strand
guacaggaauaagaaugug

SEQ ID NO: 1947074 - RNA, 19 nt, Homo sapiens
  misc_RNA (1)...(19): siRNA sense strand
gcauugacgagccuuuauu

SEQ ID NO: 1947075 - RNA, 19 nt, Homo sapiens
  misc_RNA (1)...(19): siRNA sense strand
ccaaacgugcugcuaagaa

SEQ ID NO: 1947076 - RNA, 19 nt, Homo sapiens
  misc_RNA (1)...(19): siRNA sense strand
gaacagauacaagccaaac

SEQ ID NO: 1947077 - RNA, 19 nt, Homo sapiens
  misc_RNA (1)...(19): siRNA sense strand
agaaauugcuacggaagga

SEQ ID NO: 1947078 - RNA, 19 nt, Homo sapiens
  misc_RNA (1)...(19): siRNA sense strand
gagagaagaagcccaaagg

SEQ ID NO: 1947079 - RNA, 19 nt, Homo sapiens
  misc_RNA (1)...(19): siRNA sense strand
gaauaugaacagauacaag

SEQ ID NO: 1947080 - RNA, 19 nt, Homo sapiens
  misc_RNA (1)...(19): siRNA sense strand
gccagaagaacaauguauu

SEQ ID NO: 1947081 - RNA, 19 nt, Homo sapiens
  misc_RNA (1)...(19): siRNA sense strand
ugaagaacaguguagcauu

SEQ ID NO: 1947082 - RNA, 19 nt, Homo sapiens
  misc_RNA (1)...(19): siRNA sense strand
auaagaaugugagacagaa

SEQ ID NO: 1947083 - RNA, 19 nt, Homo sapiens
  misc_RNA (1)...(19): siRNA sense strand
gcugaagaggaaagacaua

SEQ ID NO: 1947084 - RNA, 19 nt, Homo sapiens
  misc_RNA (1)...(19): siRNA sense strand
cauugacgagccuuuauuu

SEQ ID NO: 1947085 - RNA, 19 nt, Homo sapiens
  misc_RNA (1)...(19): siRNA sense strand
uggaguaccuucuucaaaa

SEQ ID NO: 1947086 - RNA, 19 nt, Homo sapiens
  misc_RNA (1)...(19): siRNA sense strand
ggagaaaacaggagagaga

SEQ ID NO: 1947087 - RNA, 19 nt, Homo sapiens
  misc_RNA (1)...(19): siRNA sense strand
gacgagccuuuauuugaag

SEQ ID NO: 1947088 - RNA, 19 nt, Homo sapiens
  misc_RNA (1)...(19): siRNA sense strand
uugacgagccuuuauuuga

SEQ ID NO: 1947089 - RNA, 19 nt, Homo sapiens
  misc_RNA (1)...(19): siRNA sense strand
gguacaggaauaagaaugu

SEQ ID NO: 1947090 - RNA, 19 nt, Homo sapiens
  misc_RNA (1)...(19): siRNA sense strand
gaccauccuuugucagaac

SEQ ID NO: 1947091 - RNA, 19 nt, Homo sapiens
  misc_RNA (1)...(19): siRNA sense strand
gaaaauacagcaaaguuac

SEQ ID NO: 1947092 - RNA, 19 nt, Homo sapiens
  misc_RNA (1)...(19): siRNA sense strand
cgaccauccuuugucagaa

SEQ ID NO: 1947093 - RNA, 19 nt, Homo sapiens
  misc_RNA (1)...(19): siRNA sense strand
gaaauugcuacggaaggaa

SEQ ID NO: 1947094 - RNA, 19 nt, Homo sapiens
  misc_RNA (1)...(19): siRNA sense strand
uagcauugacgagccuuua

SEQ ID NO: 1947095 - RNA, 19 nt, Homo sapiens
  misc_RNA (1)...(19): siRNA sense strand
acaaauggaguaccuucuu

SEQ ID NO: 1947096 - RNA, 19 nt, Homo sapiens
  misc_RNA (1)...(19): siRNA sense strand
gcacaagaagaauaugaac

SEQ ID NO: 1947097 - RNA, 19 nt, Homo sapiens
  misc_RNA (1)...(19): siRNA sense strand
ugaccagccucagccagaa

SEQ ID NO: 1947098 - RNA, 19 nt, Homo sapiens
  misc_RNA (1)...(19): siRNA sense strand
caagaauucgagaggagaa

SEQ ID NO: 1947099 - RNA, 19 nt, Homo sapiens
  misc_RNA (1)...(19): siRNA sense strand
ugaauguacaaauggagua

SEQ ID NO: 1947100 - RNA, 19 nt, Homo sapiens
  misc_RNA (1)...(19): siRNA sense strand
gaucgauacccagauaauc

SEQ ID NO: 1947101 - RNA, 19 nt, Homo sapiens
  misc_RNA (1)...(19): siRNA sense strand
ccaaccaaacuugaaugua

SEQ ID NO: 1947102 - RNA, 19 nt, Homo sapiens
  misc_RNA (1)...(19): siRNA sense strand
auaggaagcaagcaagaaa

SEQ ID NO: 1947103 - RNA, 19 nt, Homo sapiens
  misc_RNA (1)...(19): siRNA sense strand
agacauaggaagcaagcaa

SEQ ID NO: 1947104 - RNA, 19 nt, Homo sapiens
  misc_RNA (1)...(19): siRNA sense strand
ucaauucacagaucgauac

SEQ ID NO: 1947105 - RNA, 19 nt, Homo sapiens
  misc_RNA (1)...(19): siRNA sense strand
gaaaacaggagagagaaga

SEQ ID NO: 1947106 - RNA, 19 nt, Homo sapiens
  misc_RNA (1)...(19): siRNA sense strand
caccagccguugcuugaag

SEQ ID NO: 1947107 - RNA, 19 nt, Homo sapiens
  misc_RNA (1)...(19): siRNA sense strand
gauaaucugaaacaucucu

SEQ ID NO: 1947108 - RNA, 19 nt, Homo sapiens
  misc_RNA (1)...(19): siRNA sense strand
gaaaagaaggcucaaacgu

SEQ ID NO: 1947109 - RNA, 19 nt, Homo sapiens
  misc_RNA (1)...(19): siRNA sense strand
aaccaaacuugaauguaca

SEQ ID NO: 1947110 - RNA, 19 nt, Homo sapiens
  misc_RNA (1)...(19): siRNA sense strand
acaagaagaauaugaacag

SEQ ID NO: 1947111 - RNA, 19 nt, Homo sapiens
  misc_RNA (1)...(19): siRNA sense strand
aagcacaagaagaauauga

SEQ ID NO: 1947112 - RNA, 19 nt, Homo sapiens
  misc_RNA (1)...(19): siRNA sense strand
aauaagaaugugagacaga

SEQ ID NO: 1947113 - RNA, 19 nt, Homo sapiens
  misc_RNA (1)...(19): siRNA sense strand
agaagaaaauggaaguguu

SEQ ID NO: 1947114 - RNA, 19 nt, Homo sapiens
  misc_RNA (1)...(19): siRNA sense strand
aagccaaacgugcugcuaa

SEQ ID NO: 1947115 - RNA, 19 nt, Homo sapiens
  misc_RNA (1)...(19): siRNA sense strand
agucgaccauccuuuguca

SEQ ID NO: 1947116 - RNA, 19 nt, Homo sapiens
  misc_RNA (1)...(19): siRNA sense strand
ggaaguguuuaaaauacug

SEQ ID NO: 1947117 - RNA, 19 nt, Homo sapiens
  misc_RNA (1)...(19): siRNA sense strand
cuaagaaacaagaauucga

SEQ ID NO: 1947118 - RNA, 19 nt, Homo sapiens
  misc_RNA (1)...(19): siRNA sense strand
gagccuuuauuugaagauc

SEQ ID NO: 1947119 - RNA, 19 nt, Homo sapiens
  misc_RNA (1)...(19): siRNA sense strand
gugaagggguuuccacugu

SEQ ID NO: 1947120 - RNA, 19 nt, Homo sapiens
  misc_RNA (1)...(19): siRNA sense strand
cugcuaagaaacaagaauu

SEQ ID NO: 1947121 - RNA, 19 nt, Homo sapiens
  misc_RNA (1)...(19): siRNA sense strand
ugaagaucaguguagcuuu

SEQ ID NO: 1947122 - RNA, 19 nt, Homo sapiens
  misc_RNA (1)...(19): siRNA sense strand
cauaggaagcaagcaagaa

SEQ ID NO: 1947123 - RNA, 19 nt, Homo sapiens
  misc_RNA (1)...(19): siRNA sense strand
cgaagaaaacugaaaauac

SEQ ID NO: 1947124 - RNA, 19 nt, Homo sapiens
  misc_RNA (1)...(19): siRNA sense strand
gggccaaccaaacuugaau

SEQ ID NO: 1947125 - RNA, 19 nt, Homo sapiens
  misc_RNA (1)...(19): siRNA sense strand
aaagggccaaccaaacuug

SEQ ID NO: 1947126 - RNA, 19 nt, Homo sapiens
  misc_RNA (1)...(19): siRNA sense strand
auacagcaaaguuacaaga

SEQ ID NO: 1947127 - RNA, 19 nt, Homo sapiens
  misc_RNA (1)...(19): siRNA sense strand
aaauugcuacggaaggaaa

SEQ ID NO: 1947128 - RNA, 19 nt, Homo sapiens
  misc_RNA (1)...(19): siRNA sense strand
aagaaugugagacagaaga

SEQ ID NO: 1947129 - RNA, 19 nt, Homo sapiens
  misc_RNA (1)...(19): siRNA sense strand
gaagaauaugaacagauac

SEQ ID NO: 1947130 - RNA, 19 nt, Homo sapiens
  misc_RNA (1)...(19): siRNA sense strand
cagaguggcuucuuucuua

SEQ ID NO: 1947131 - RNA, 19 nt, Homo sapiens
  misc_RNA (1)...(19): siRNA sense strand
ggacaaguaucuaucacua

SEQ ID NO: 1947132 - RNA, 19 nt, Homo sapiens
  misc_RNA (1)...(19): siRNA sense strand
ggaagaaacugcauuugau

SEQ ID NO: 1947133 - RNA, 19 nt, Homo sapiens
  misc_RNA (1)...(19): siRNA sense strand
gaagaaacugcauuugaua

SEQ ID NO: 1947134 - RNA, 19 nt, Homo sapiens
  misc_RNA (1)...(19): siRNA sense strand
gcuuguaaguggaauaaua

SEQ ID NO: 1947135 - RNA, 19 nt, Homo sapiens
  misc_RNA (1)...(19): siRNA sense strand
guggaaggcuguacaaauu

SEQ ID NO: 1947136 - RNA, 19 nt, Homo sapiens
  misc_RNA (1)...(19): siRNA sense strand
gaaacugcauuugauauug

SEQ ID NO: 1947137 - RNA, 19 nt, Homo sapiens
  misc_RNA (1)...(19): siRNA sense strand
ggaaacacauggacaccuu

SEQ ID NO: 1947138 - RNA, 19 nt, Homo sapiens
  misc_RNA (1)...(19): siRNA sense strand
gaacagagacagcaaggau

SEQ ID NO: 1947139 - RNA, 19 nt, Homo sapiens
  misc_RNA (1)...(19): siRNA sense strand
gaugaaccguuacgucaga

SEQ ID NO: 1947140 - RNA, 19 nt, Homo sapiens
  misc_RNA (1)...(19): siRNA sense strand
cagcaaggauacccuagaa

SEQ ID NO: 1947141 - RNA, 19 nt, Homo sapiens
  misc_RNA (1)...(19): siRNA sense strand
gcaauucugaugaagauga

SEQ ID NO: 1947142 - RNA, 19 nt, Homo sapiens
  misc_RNA (1)...(19): siRNA sense strand
gguaggcaauucugaugaa

SEQ ID NO: 1947143 - RNA, 19 nt, Homo sapiens
  misc_RNA (1)...(19): siRNA sense strand
aggaaaugaugauggaaua

SEQ ID NO: 1947144 - RNA, 19 nt, Homo sapiens
  misc_RNA (1)...(19): siRNA sense strand
gaaacacauggacaccuua

SEQ ID NO: 1947145 - RNA, 19 nt, Homo sapiens
  misc_RNA (1)...(19): siRNA sense strand
ggaaggcuguacaaauucu

SEQ ID NO: 1947146 - RNA, 19 nt, Homo sapiens
  misc_RNA (1)...(19): siRNA sense strand
ccacucacgugaacacuag

SEQ ID NO: 1947147 - RNA, 19 nt, Homo sapiens
  misc_RNA (1)...(19): siRNA sense strand
gaagagugguaucgauugc

SEQ ID NO: 1947148 - RNA, 19 nt, Homo sapiens
  misc_RNA (1)...(19): siRNA sense strand
cuagaacuccuccugauga

SEQ ID NO: 1947149 - RNA, 19 nt, Homo sapiens
  misc_RNA (1)...(19): siRNA sense strand
gcagauaucaaugcccaaa

SEQ ID NO: 1947150 - RNA, 19 nt, Homo sapiens
  misc_RNA (1)...(19): siRNA sense strand
ggaggacaaguaucuauca

SEQ ID NO: 1947151 - RNA, 19 nt, Homo sapiens
  misc_RNA (1)...(19): siRNA sense strand
ugguaucgauugcaagaaa

SEQ ID NO: 1947152 - RNA, 19 nt, Homo sapiens
  misc_RNA (1)...(19): siRNA sense strand
uggaagaaacugcauuuga

SEQ ID NO: 1947153 - RNA, 19 nt, Homo sapiens
  misc_RNA (1)...(19): siRNA sense strand
gcaaggauacccuagaacu

SEQ ID NO: 1947154 - RNA, 19 nt, Homo sapiens
  misc_RNA (1)...(19): siRNA sense strand
gaagaugaggagcaagaug

SEQ ID NO: 1947155 - RNA, 19 nt, Homo sapiens
  misc_RNA (1)...(19): siRNA sense strand
ucacuaccucuuugaaauu

SEQ ID NO: 1947156 - RNA, 19 nt, Homo sapiens
  misc_RNA (1)...(19): siRNA sense strand
acacauggacaccuuauuc

SEQ ID NO: 1947157 - RNA, 19 nt, Homo sapiens
  misc_RNA (1)...(19): siRNA sense strand
uagaacuccuccugaugaa

SEQ ID NO: 1947158 - RNA, 19 nt, Homo sapiens
  misc_RNA (1)...(19): siRNA sense strand
auaccagaguggcuucuuu

SEQ ID NO: 1947159 - RNA, 19 nt, Homo sapiens
  misc_RNA (1)...(19): siRNA sense strand
gauauugccaggaggacaa

SEQ ID NO: 1947160 - RNA, 19 nt, Homo sapiens
  misc_RNA (1)...(19): siRNA sense strand
cauggacaccuuauuccua

SEQ ID NO: 1947161 - RNA, 19 nt, Homo sapiens
  misc_RNA (1)...(19): siRNA sense strand
aagagaauuccuuggauuu

SEQ ID NO: 1947162 - RNA, 19 nt, Homo sapiens
  misc_RNA (1)...(19): siRNA sense strand
agauaucaaugcccaaaca

SEQ ID NO: 1947163 - RNA, 19 nt, Homo sapiens
  misc_RNA (1)...(19): siRNA sense strand
acacuuagauauuguucag

SEQ ID NO: 1947164 - RNA, 19 nt, Homo sapiens
  misc_RNA (1)...(19): siRNA sense strand
gaacacuagggaugaagau

SEQ ID NO: 1947165 - RNA, 19 nt, Homo sapiens
  misc_RNA (1)...(19): siRNA sense strand
auucuucaccucagucuua

SEQ ID NO: 1947166 - RNA, 19 nt, Homo sapiens
  misc_RNA (1)...(19): siRNA sense strand
gaauaccagaccaagagaa

SEQ ID NO: 1947167 - RNA, 19 nt, Homo sapiens
  misc_RNA (1)...(19): siRNA sense strand
gaaauuguggaaggcugua

SEQ ID NO: 1947168 - RNA, 19 nt, Homo sapiens
  misc_RNA (1)...(19): siRNA sense strand
ggaauaccagaccaagaga

SEQ ID NO: 1947169 - RNA, 19 nt, Homo sapiens
  misc_RNA (1)...(19): siRNA sense strand
acacuagggaugaagauga

SEQ ID NO: 1947170 - RNA, 19 nt, Homo sapiens
  misc_RNA (1)...(19): siRNA sense strand
aagaugaggagcaagauga

SEQ ID NO: 1947171 - RNA, 19 nt, Homo sapiens
  misc_RNA (1)...(19): siRNA sense strand
aggcaauucugaugaagau

SEQ ID NO: 1947172 - RNA, 19 nt, Homo sapiens
  misc_RNA (1)...(19): siRNA sense strand
aaacugcauuugauauugc

SEQ ID NO: 1947173 - RNA, 19 nt, Homo sapiens
  misc_RNA (1)...(19): siRNA sense strand
aaaaggaaaugaugaugga

SEQ ID NO: 1947174 - RNA, 19 nt, Homo sapiens
  misc_RNA (1)...(19): siRNA sense strand
gggaugaagaugaguauac

SEQ ID NO: 1947175 - RNA, 19 nt, Homo sapiens
  misc_RNA (1)...(19): siRNA sense strand
ugaugaagaugaggagcaa

SEQ ID NO: 1947176 - RNA, 19 nt, Homo sapiens
  misc_RNA (1)...(19): siRNA sense strand
uaucacuaccucuuugaaa

SEQ ID NO: 1947177 - RNA, 19 nt, Homo sapiens
  misc_RNA (1)...(19): siRNA sense strand
ugaagagugguaucgauug

SEQ ID NO: 1947178 - RNA, 19 nt, Homo sapiens
  misc_RNA (1)...(19): siRNA sense strand
cacuaccucuuugaaauug

SEQ ID NO: 1947179 - RNA, 19 nt, Homo sapiens
  misc_RNA (1)...(19): siRNA sense strand
caccuuauuccuacuggua

SEQ ID NO: 1947180 - RNA, 19 nt, Homo sapiens
  misc_RNA (1)...(19): siRNA sense strand
agagugguaucgauugcaa

SEQ ID NO: 1947181 - RNA, 19 nt, Homo sapiens
  misc_RNA (1)...(19): siRNA sense strand
gaacacuuuaaccaacuug

SEQ ID NO: 1947182 - RNA, 19 nt, Homo sapiens
  misc_RNA (1)...(19): siRNA sense strand
gauaucaaugcccaaacaa

SEQ ID NO: 1947183 - RNA, 19 nt, Homo sapiens
  misc_RNA (1)...(19): siRNA sense strand
uaucuaucacuaccucuuu

SEQ ID NO: 1947184 - RNA, 19 nt, Homo sapiens
  misc_RNA (1)...(19): siRNA sense strand
aaugaagagugguaucgau

SEQ ID NO: 1947185 - RNA, 19 nt, Homo sapiens
  misc_RNA (1)...(19): siRNA sense strand
uaccagaccaagagaauuc

SEQ ID NO: 1947186 - RNA, 19 nt, Homo sapiens
  misc_RNA (1)...(19): siRNA sense strand
ggaugaagaugaguauacc

SEQ ID NO: 1947187 - RNA, 19 nt, Homo sapiens
  misc_RNA (1)...(19): siRNA sense strand
ugaacacuuuaaccaacuu

SEQ ID NO: 1947188 - RNA, 19 nt, Homo sapiens
  misc_RNA (1)...(19): siRNA sense strand
ggacacuuagauauuguuc

SEQ ID NO: 1947189 - RNA, 19 nt, Homo sapiens
  misc_RNA (1)...(19): siRNA sense strand
acaaauucuucaccucagu

SEQ ID NO: 1947190 - RNA, 19 nt, Homo sapiens
  misc_RNA (1)...(19): siRNA sense strand
ccagaguggcuucuuucuu

SEQ ID NO: 1947191 - RNA, 19 nt, Homo sapiens
  misc_RNA (1)...(19): siRNA sense strand
gugcuuguaaguggaauaa

SEQ ID NO: 1947192 - RNA, 19 nt, Homo sapiens
  misc_RNA (1)...(19): siRNA sense strand
ggacaccuuauuccuacug

SEQ ID NO: 1947193 - RNA, 19 nt, Homo sapiens
  misc_RNA (1)...(19): siRNA sense strand
cuaccucuuugaaauugug

SEQ ID NO: 1947194 - RNA, 19 nt, Homo sapiens
  misc_RNA (1)...(19): siRNA sense strand
caggaggacaaguaucuau

SEQ ID NO: 1947195 - RNA, 19 nt, Homo sapiens
  misc_RNA (1)...(19): siRNA sense strand
gccaggaggacaaguaucu

SEQ ID NO: 1947196 - RNA, 19 nt, Homo sapiens
  misc_RNA (1)...(19): siRNA sense strand
guggacacuuagauauugu

SEQ ID NO: 1947197 - RNA, 19 nt, Homo sapiens
  misc_RNA (1)...(19): siRNA sense strand
cgugaacacuagggaugaa

SEQ ID NO: 1947198 - RNA, 19 nt, Homo sapiens
  misc_RNA (1)...(19): siRNA sense strand
aaaaucggcuuaccacagu

SEQ ID NO: 1947199 - RNA, 19 nt, Homo sapiens
  misc_RNA (1)...(19): siRNA sense strand
aaaugaugauggaauacca

SEQ ID NO: 1947200 - RNA, 19 nt, Homo sapiens
  misc_RNA (1)...(19): siRNA sense strand
aaacacauggacaccuuau

SEQ ID NO: 1947201 - RNA, 19 nt, Homo sapiens
  misc_RNA (1)...(19): siRNA sense strand
aaaggccacucacgugaac

SEQ ID NO: 1947202 - RNA, 19 nt, Homo sapiens
  misc_RNA (1)...(19): siRNA sense strand
ugaggagcaagaugacaaa

SEQ ID NO: 1947203 - RNA, 19 nt, Homo sapiens
  misc_RNA (1)...(19): siRNA sense strand
gaggacaaguaucuaucac

SEQ ID NO: 1947204 - RNA, 19 nt, Homo sapiens
  misc_RNA (1)...(19): siRNA sense strand
ggguaggcaauucugauga

SEQ ID NO: 1947205 - RNA, 19 nt, Homo sapiens
  misc_RNA (1)...(19): siRNA sense strand
cuagggaugaagaugagua

SEQ ID NO: 1947206 - RNA, 19 nt, Homo sapiens
  misc_RNA (1)...(19): siRNA sense strand
caauucugaugaagaugag

SEQ ID NO: 1947207 - RNA, 19 nt, Homo sapiens
  misc_RNA (1)...(19): siRNA sense strand
uguggaaggcuguacaaau

SEQ ID NO: 1947208 - RNA, 19 nt, Homo sapiens
  misc_RNA (1)...(19): siRNA sense strand
guaggcaauucugaugaag

SEQ ID NO: 1947209 - RNA, 19 nt, Homo sapiens
  misc_RNA (1)...(19): siRNA sense strand
uggaauaccagaccaagag

SEQ ID NO: 1947210 - RNA, 19 nt, Homo sapiens
  misc_RNA (1)...(19): siRNA sense strand
caaggauacccuagaacuc

SEQ ID NO: 1947211 - RNA, 19 nt, Homo sapiens
  misc_RNA (1)...(19): siRNA sense strand
uaucaaugcccaaacaaaa

SEQ ID NO: 1947212 - RNA, 19 nt, Homo sapiens
  misc_RNA (1)...(19): siRNA sense strand
acacuuuaaccaacuugaa

SEQ ID NO: 1947213 - RNA, 19 nt, Homo sapiens
  misc_RNA (1)...(19): siRNA sense strand
ggaaaugaugauggaauac

SEQ ID NO: 1947214 - RNA, 19 nt, Homo sapiens
  misc_RNA (1)...(19): siRNA sense strand
aacagagacagcaaggaua

SEQ ID NO: 1947215 - RNA, 19 nt, Homo sapiens
  misc_RNA (1)...(19): siRNA sense strand
aucacuaccucuuugaaau

SEQ ID NO: 1947216 - RNA, 19 nt, Homo sapiens
  misc_RNA (1)...(19): siRNA sense strand
gaaaugaugauggaauacc

SEQ ID NO: 1947217 - RNA, 19 nt, Homo sapiens
  misc_RNA (1)...(19): siRNA sense strand
gaaagaaacugcucaugau

SEQ ID NO: 1947218 - RNA, 19 nt, Homo sapiens
  misc_RNA (1)...(19): siRNA sense strand
ccacagacguccagaagaa

SEQ ID NO: 1947219 - RNA, 19 nt, Homo sapiens
  misc_RNA (1)...(19): siRNA sense strand
gcacacggcugcuguugga

SEQ ID NO: 1947220 - RNA, 19 nt, Homo sapiens
  misc_RNA (1)...(19): siRNA sense strand
cagcauggauggccuguuu

SEQ ID NO: 1947221 - RNA, 19 nt, Homo sapiens
  misc_RNA (1)...(19): siRNA sense strand
ggacagcccuccacuuugc

SEQ ID NO: 1947222 - RNA, 19 nt, Homo sapiens
  misc_RNA (1)...(19): siRNA sense strand
gagacgggcucccuggaaa

SEQ ID NO: 1947223 - RNA, 19 nt, Homo sapiens
  misc_RNA (1)...(19): siRNA sense strand
gaucuccgguuccgaauca

SEQ ID NO: 1947224 - RNA, 19 nt, Homo sapiens
  misc_RNA (1)...(19): siRNA sense strand
ggucagcgccgaugucauu

SEQ ID NO: 1947225 - RNA, 19 nt, Homo sapiens
  misc_RNA (1)...(19): siRNA sense strand
ugaaagaaacugcucauga

SEQ ID NO: 1947226 - RNA, 19 nt, Homo sapiens
  misc_RNA (1)...(19): siRNA sense strand
ggaagaagccaagaagaug

SEQ ID NO: 1947227 - RNA, 19 nt, Homo sapiens
  misc_RNA (1)...(19): siRNA sense strand
ccagcaaacugaugaagau

SEQ ID NO: 1947228 - RNA, 19 nt, Homo sapiens
  misc_RNA (1)...(19): siRNA sense strand
ccaaguggcugcugcucaa

SEQ ID NO: 1947229 - RNA, 19 nt, Homo sapiens
  misc_RNA (1)...(19): siRNA sense strand
gcauggagcuuuuggaaga

SEQ ID NO: 1947230 - RNA, 19 nt, Homo sapiens
  misc_RNA (1)...(19): siRNA sense strand
gaagaagccguuugcagau

SEQ ID NO: 1947231 - RNA, 19 nt, Homo sapiens
  misc_RNA (1)...(19): siRNA sense strand
gaacauccugcacaucaug

SEQ ID NO: 1947232 - RNA, 19 nt, Homo sapiens
  misc_RNA (1)...(19): siRNA sense strand
agauggagauggccaaguu

SEQ ID NO: 1947233 - RNA, 19 nt, Homo sapiens
  misc_RNA (1)...(19): siRNA sense strand
gcacggaagaucaguguca

SEQ ID NO: 1947234 - RNA, 19 nt, Homo sapiens
  misc_RNA (1)...(19): siRNA sense strand
acaccaagcacgauguaua

SEQ ID NO: 1947235 - RNA, 19 nt, Homo sapiens
  misc_RNA (1)...(19): siRNA sense strand
gaagaagaagcuuguggau

SEQ ID NO: 1947236 - RNA, 19 nt, Homo sapiens
  misc_RNA (1)...(19): siRNA sense strand
ccacuaccacgucaagauu

SEQ ID NO: 1947237 - RNA, 19 nt, Homo sapiens
  misc_RNA (1)...(19): siRNA sense strand
gaagaacgccucggucaac

SEQ ID NO: 1947238 - RNA, 19 nt, Homo sapiens
  misc_RNA (1)...(19): siRNA sense strand
ugaaaagccugaugacgaa

SEQ ID NO: 1947239 - RNA, 19 nt, Homo sapiens
  misc_RNA (1)...(19): siRNA sense strand
cacugucgcuguccuuuga

SEQ ID NO: 1947240 - RNA, 19 nt, Homo sapiens
  misc_RNA (1)...(19): siRNA sense strand
gcacgauguauacagcuuu

SEQ ID NO: 1947241 - RNA, 19 nt, Homo sapiens
  misc_RNA (1)...(19): siRNA sense strand
agaagccguuugcagauga

SEQ ID NO: 1947242 - RNA, 19 nt, Homo sapiens
  misc_RNA (1)...(19): siRNA sense strand
ucuccgagcuucucucaca

SEQ ID NO: 1947243 - RNA, 19 nt, Homo sapiens
  misc_RNA (1)...(19): siRNA sense strand
agaagaacauccugcacau

SEQ ID NO: 1947244 - RNA, 19 nt, Homo sapiens
  misc_RNA (1)...(19): siRNA sense strand
ggucaacgagguggacuuu

SEQ ID NO: 1947245 - RNA, 19 nt, Homo sapiens
  misc_RNA (1)...(19): siRNA sense strand
acgucaagauuucugauuu

SEQ ID NO: 1947246 - RNA, 19 nt, Homo sapiens
  misc_RNA (1)...(19): siRNA sense strand
agaaggccgugaccucaga

SEQ ID NO: 1947247 - RNA, 19 nt, Homo sapiens
  misc_RNA (1)...(19): siRNA sense strand
agaaacugcucaugaucug

SEQ ID NO: 1947248 - RNA, 19 nt, Homo sapiens
  misc_RNA (1)...(19): siRNA sense strand
aaaccgaggaccuguguga

SEQ ID NO: 1947249 - RNA, 19 nt, Homo sapiens
  misc_RNA (1)...(19): siRNA sense strand
ggacaccagcaaacugaug

SEQ ID NO: 1947250 - RNA, 19 nt, Homo sapiens
  misc_RNA (1)...(19): siRNA sense strand
gaugacgaagugaaagaaa

SEQ ID NO: 1947251 - RNA, 19 nt, Homo sapiens
  misc_RNA (1)...(19): siRNA sense strand
gcaaacugaugaagauccu

SEQ ID NO: 1947252 - RNA, 19 nt, Homo sapiens
  misc_RNA (1)...(19): siRNA sense strand
aagaacauccugcacauca

SEQ ID NO: 1947253 - RNA, 19 nt, Homo sapiens
  misc_RNA (1)...(19): siRNA sense strand
cgacaccaagcacgaugua

SEQ ID NO: 1947254 - RNA, 19 nt, Homo sapiens
  misc_RNA (1)...(19): siRNA sense strand
caagaggagugcgccaagu

SEQ ID NO: 1947255 - RNA, 19 nt, Homo sapiens
  misc_RNA (1)...(19): siRNA sense strand
ggccaaguuucgcuacauc

SEQ ID NO: 1947256 - RNA, 19 nt, Homo sapiens
  misc_RNA (1)...(19): siRNA sense strand
cucaugaucuggacgugaa

SEQ ID NO: 1947257 - RNA, 19 nt, Homo sapiens
  misc_RNA (1)...(19): siRNA sense strand
gacaccagcaaacugauga

SEQ ID NO: 1947258 - RNA, 19 nt, Homo sapiens
  misc_RNA (1)...(19): siRNA sense strand
gauggagauggccaaguuu

SEQ ID NO: 1947259 - RNA, 19 nt, Homo sapiens
  misc_RNA (1)...(19): siRNA sense strand
aggcccaccuuccaagaaa

SEQ ID NO: 1947260 - RNA, 19 nt, Homo sapiens
  misc_RNA (1)...(19): siRNA sense strand
gaagaacauccugcacauc

SEQ ID NO: 1947261 - RNA, 19 nt, Homo sapiens
  misc_RNA (1)...(19): siRNA sense strand
agacggcggugggcaugaa

SEQ ID NO: 1947262 - RNA, 19 nt, Homo sapiens
  misc_RNA (1)...(19): siRNA sense strand
cacgauguauacagcuuug

SEQ ID NO: 1947263 - RNA, 19 nt, Homo sapiens
  misc_RNA (1)...(19): siRNA sense strand
uggaagaagccaagaagau

SEQ ID NO: 1947264 - RNA, 19 nt, Homo sapiens
  misc_RNA (1)...(19): siRNA sense strand
cgucaagauuucugauuuu

SEQ ID NO: 1947265 - RNA, 19 nt, Homo sapiens
  misc_RNA (1)...(19): siRNA sense strand
gcuuugcgaucgucaucug

SEQ ID NO: 1947266 - RNA, 19 nt, Homo sapiens
  misc_RNA (1)...(19): siRNA sense strand
cacagacgguggagacucu

SEQ ID NO: 1947267 - RNA, 19 nt, Homo sapiens
  misc_RNA (1)...(19): siRNA sense strand
aagaagccguuugcagaug

SEQ ID NO: 1947268 - RNA, 19 nt, Homo sapiens
  misc_RNA (1)...(19): siRNA sense strand
cggaggugguggaggaguu

SEQ ID NO: 1947269 - RNA, 19 nt, Homo sapiens
  misc_RNA (1)...(19): siRNA sense strand
caagauuucugauuuuggu

SEQ ID NO: 1947270 - RNA, 19 nt, Homo sapiens
  misc_RNA (1)...(19): siRNA sense strand
caccuucgauaacgacuac

SEQ ID NO: 1947271 - RNA, 19 nt, Homo sapiens
  misc_RNA (1)...(19): siRNA sense strand
gcccaccuuccaagaaauu

SEQ ID NO: 1947272 - RNA, 19 nt, Homo sapiens
  misc_RNA (1)...(19): siRNA sense strand
gagcgcaucagggagaaga

SEQ ID NO: 1947273 - RNA, 19 nt, Homo sapiens
  misc_RNA (1)...(19): siRNA sense strand
aaagaaacugcucaugauc

SEQ ID NO: 1947274 - RNA, 19 nt, Homo sapiens
  misc_RNA (1)...(19): siRNA sense strand
acggacaccuggccacugu

SEQ ID NO: 1947275 - RNA, 19 nt, Homo sapiens
  misc_RNA (1)...(19): siRNA sense strand
acacagaagaagccguuug

SEQ ID NO: 1947276 - RNA, 19 nt, Homo sapiens
  misc_RNA (1)...(19): siRNA sense strand
ugaaaccgaggaccugugu

SEQ ID NO: 1947277 - RNA, 19 nt, Homo sapiens
  misc_RNA (1)...(19): siRNA sense strand
gaagccguuugcagaugag

SEQ ID NO: 1947278 - RNA, 19 nt, Homo sapiens
  misc_RNA (1)...(19): siRNA sense strand
caccaagcacgauguauac

SEQ ID NO: 1947279 - RNA, 19 nt, Homo sapiens
  misc_RNA (1)...(19): siRNA sense strand
cagcacgggcaggagaaua

SEQ ID NO: 1947280 - RNA, 19 nt, Homo sapiens
  misc_RNA (1)...(19): siRNA sense strand
cacggcugcuguuggagaa

SEQ ID NO: 1947281 - RNA, 19 nt, Homo sapiens
  misc_RNA (1)...(19): siRNA sense strand
gagcgggaaccuucaacca

SEQ ID NO: 1947282 - RNA, 19 nt, Homo sapiens
  misc_RNA (1)...(19): siRNA sense strand
guacaaggugcgccauguc

SEQ ID NO: 1947283 - RNA, 19 nt, Homo sapiens
  misc_RNA (1)...(19): siRNA sense strand
gcauggauggccuguuugg

SEQ ID NO: 1947284 - RNA, 19 nt, Homo sapiens
  misc_RNA (1)...(19): siRNA sense strand
ggaggugguggaggaguug

SEQ ID NO: 1947285 - RNA, 19 nt, Homo sapiens
  misc_RNA (1)...(19): siRNA sense strand
cacggaagaucagugucaa

SEQ ID NO: 1947286 - RNA, 19 nt, Homo sapiens
  misc_RNA (1)...(19): siRNA sense strand
guaccacagacguccagaa

SEQ ID NO: 1947287 - RNA, 19 nt, Homo sapiens
  misc_RNA (1)...(19): siRNA sense strand
uguacaaggugcgccaugu

SEQ ID NO: 1947288 - RNA, 19 nt, Homo sapiens
  misc_RNA (1)...(19): siRNA sense strand
aaagccugaugacgaagug

SEQ ID NO: 1947289 - RNA, 19 nt, Homo sapiens
  misc_RNA (1)...(19): siRNA sense strand
gauggccuguuuggcacaa

SEQ ID NO: 1947290 - RNA, 19 nt, Homo sapiens
  misc_RNA (1)...(19): siRNA sense strand
ccaagcccaugcuguggua

SEQ ID NO: 1947291 - RNA, 19 nt, Homo sapiens
  misc_RNA (1)...(19): siRNA sense strand
uggaggagcuggauaaugc

SEQ ID NO: 1947292 - RNA, 19 nt, Homo sapiens
  misc_RNA (1)...(19): siRNA sense strand
gaaacaggccguggcuaga

SEQ ID NO: 1947293 - RNA, 19 nt, Homo sapiens
  misc_RNA (1)...(19): siRNA sense strand
gcuuccagcugcccaaugu

SEQ ID NO: 1947294 - RNA, 19 nt, Homo sapiens
  misc_RNA (1)...(19): siRNA sense strand
gcugcucucugacuucugu

SEQ ID NO: 1947295 - RNA, 19 nt, Homo sapiens
  misc_RNA (1)...(19): siRNA sense strand
gcauggcaccugcgcagaa

SEQ ID NO: 1947296 - RNA, 19 nt, Homo sapiens
  misc_RNA (1)...(19): siRNA sense strand
cgcauacucucgcccugua

SEQ ID NO: 1947297 - RNA, 19 nt, Homo sapiens
  misc_RNA (1)...(19): siRNA sense strand
cauggcaccugcgcagaaa

SEQ ID NO: 1947298 - RNA, 19 nt, Homo sapiens
  misc_RNA (1)...(19): siRNA sense strand
acgacgcgcugcucucuga

SEQ ID NO: 1947299 - RNA, 19 nt, Homo sapiens
  misc_RNA (1)...(19): siRNA sense strand
ggccguggcuagagaagag

SEQ ID NO: 1947300 - RNA, 19 nt, Homo sapiens
  misc_RNA (1)...(19): siRNA sense strand
ccacacugcucggcguuuc

SEQ ID NO: 1947301 - RNA, 19 nt, Homo sapiens
  misc_RNA (1)...(19): siRNA sense strand
caccugcccucgcuguaau

SEQ ID NO: 1947302 - RNA, 19 nt, Homo sapiens
  misc_RNA (1)...(19): siRNA sense strand
gcgcugcucucugacuucu

SEQ ID NO: 1947303 - RNA, 19 nt, Homo sapiens
  misc_RNA (1)...(19): siRNA sense strand
gcuguaaugcgcccuacug

SEQ ID NO: 1947304 - RNA, 19 nt, Homo sapiens
  misc_RNA (1)...(19): siRNA sense strand
cgagcggguucuuggagau

SEQ ID NO: 1947305 - RNA, 19 nt, Homo sapiens
  misc_RNA (1)...(19): siRNA sense strand
caucggaacugcaauguua

SEQ ID NO: 1947306 - RNA, 19 nt, Homo sapiens
  misc_RNA (1)...(19): siRNA sense strand
gaagacgcauuggaaauau

SEQ ID NO: 1947307 - RNA, 19 nt, Homo sapiens
  misc_RNA (1)...(19): siRNA sense strand
uaaagucguugcagaucua

SEQ ID NO: 1947308 - RNA, 19 nt, Homo sapiens
  misc_RNA (1)...(19): siRNA sense strand
ucaaugugcugugugcuua

SEQ ID NO: 1947309 - RNA, 19 nt, Homo sapiens
  misc_RNA (1)...(19): siRNA sense strand
gcugugugcuuauuaucua

SEQ ID NO: 1947310 - RNA, 19 nt, Homo sapiens
  misc_RNA (1)...(19): siRNA sense strand
cagaagaguuugaguuaca

SEQ ID NO: 1947311 - RNA, 19 nt, Homo sapiens
  misc_RNA (1)...(19): siRNA sense strand
gcaacaaguggauggauuu

SEQ ID NO: 1947312 - RNA, 19 nt, Homo sapiens
  misc_RNA (1)...(19): siRNA sense strand
acaaguggauggauuugaa

SEQ ID NO: 1947313 - RNA, 19 nt, Homo sapiens
  misc_RNA (1)...(19): siRNA sense strand
ggagcagaguuguguguug

SEQ ID NO: 1947314 - RNA, 19 nt, Homo sapiens
  misc_RNA (1)...(19): siRNA sense strand
ugaagacgcauuggaaaua

SEQ ID NO: 1947315 - RNA, 19 nt, Homo sapiens
  misc_RNA (1)...(19): siRNA sense strand
agaguuguguguuggauuu

SEQ ID NO: 1947316 - RNA, 19 nt, Homo sapiens
  misc_RNA (1)...(19): siRNA sense strand
gauuugacauagaugaaga

SEQ ID NO: 1947317 - RNA, 19 nt, Homo sapiens
  misc_RNA (1)...(19): siRNA sense strand
gaucuaggaugugguugug

SEQ ID NO: 1947318 - RNA, 19 nt, Homo sapiens
  misc_RNA (1)...(19): siRNA sense strand
gaugaagacgcauuggaaa

SEQ ID NO: 1947319 - RNA, 19 nt, Homo sapiens
  misc_RNA (1)...(19): siRNA sense strand
gagagucgccugcaacaag

SEQ ID NO: 1947320 - RNA, 19 nt, Homo sapiens
  misc_RNA (1)...(19): siRNA sense strand
caagucauucgauacagua

SEQ ID NO: 1947321 - RNA, 19 nt, Homo sapiens
  misc_RNA (1)...(19): siRNA sense strand
uauuaugaauccucccuuu

SEQ ID NO: 1947322 - RNA, 19 nt, Homo sapiens
  misc_RNA (1)...(19): siRNA sense strand
gcagaucuaggaugugguu

SEQ ID NO: 1947323 - RNA, 19 nt, Homo sapiens
  misc_RNA (1)...(19): siRNA sense strand
uaacagaauguccaaguca

SEQ ID NO: 1947324 - RNA, 19 nt, Homo sapiens
  misc_RNA (1)...(19): siRNA sense strand
uaauaggaaugcagaagag

SEQ ID NO: 1947325 - RNA, 19 nt, Homo sapiens
  misc_RNA (1)...(19): siRNA sense strand
gcagaagaguuugaguuac

SEQ ID NO: 1947326 - RNA, 19 nt, Homo sapiens
  misc_RNA (1)...(19): siRNA sense strand
ugcagaagaguuugaguua

SEQ ID NO: 1947327 - RNA, 19 nt, Homo sapiens
  misc_RNA (1)...(19): siRNA sense strand
ggaaugcagaagaguuuga

SEQ ID NO: 1947328 - RNA, 19 nt, Homo sapiens
  misc_RNA (1)...(19): siRNA sense strand
acacuuaugaugacauuga

SEQ ID NO: 1947329 - RNA, 19 nt, Homo sapiens
  misc_RNA (1)...(19): siRNA sense strand
guacuuagcaucggaacug

SEQ ID NO: 1947330 - RNA, 19 nt, Homo sapiens
  misc_RNA (1)...(19): siRNA sense strand
ccaagucauucgauacagu

SEQ ID NO: 1947331 - RNA, 19 nt, Homo sapiens
  misc_RNA (1)...(19): siRNA sense strand
uaggaaugcagaagaguuu

SEQ ID NO: 1947332 - RNA, 19 nt, Homo sapiens
  misc_RNA (1)...(19): siRNA sense strand
ccaagcuacuucuggaaca

SEQ ID NO: 1947333 - RNA, 19 nt, Homo sapiens
  misc_RNA (1)...(19): siRNA sense strand
gcagaguuguguguuggau

SEQ ID NO: 1947334 - RNA, 19 nt, Homo sapiens
  misc_RNA (1)...(19): siRNA sense strand
agacgcauuggaaauauuu

SEQ ID NO: 1947335 - RNA, 19 nt, Homo sapiens
  misc_RNA (1)...(19): siRNA sense strand
aggaugugguuguggagua

SEQ ID NO: 1947336 - RNA, 19 nt, Homo sapiens
  misc_RNA (1)...(19): siRNA sense strand
caaguggauggauuugaaa

SEQ ID NO: 1947337 - RNA, 19 nt, Homo sapiens
  misc_RNA (1)...(19): siRNA sense strand
ugcaacaaguggauggauu

SEQ ID NO: 1947338 - RNA, 19 nt, Homo sapiens
  misc_RNA (1)...(19): siRNA sense strand
aaauaaagucguugcagau

SEQ ID NO: 1947339 - RNA, 19 nt, Homo sapiens
  misc_RNA (1)...(19): siRNA sense strand
cuaacagaauguccaaguc

SEQ ID NO: 1947340 - RNA, 19 nt, Homo sapiens
  misc_RNA (1)...(19): siRNA sense strand
caacaaguggauggauuug

SEQ ID NO: 1947341 - RNA, 19 nt, Homo sapiens
  misc_RNA (1)...(19): siRNA sense strand
gaaaagcccaagcuacuuc

SEQ ID NO: 1947342 - RNA, 19 nt, Homo sapiens
  misc_RNA (1)...(19): siRNA sense strand
agaugaagacgcauuggaa

SEQ ID NO: 1947343 - RNA, 19 nt, Homo sapiens
  misc_RNA (1)...(19): siRNA sense strand
agaagaguuugaguuacaa

SEQ ID NO: 1947344 - RNA, 19 nt, Homo sapiens
  misc_RNA (1)...(19): siRNA sense strand
uuaauaggaaugcagaaga

SEQ ID NO: 1947345 - RNA, 19 nt, Homo sapiens
  misc_RNA (1)...(19): siRNA sense strand
aagacgcauuggaaauauu

SEQ ID NO: 1947346 - RNA, 19 nt, Homo sapiens
  misc_RNA (1)...(19): siRNA sense strand
guuaggagcagaguugugu

SEQ ID NO: 1947347 - RNA, 19 nt, Homo sapiens
  misc_RNA (1)...(19): siRNA sense strand
cguugcagaucuaggaugu

SEQ ID NO: 1947348 - RNA, 19 nt, Homo sapiens
  misc_RNA (1)...(19): siRNA sense strand
aauguuaggagcagaguug

SEQ ID NO: 1947349 - RNA, 19 nt, Homo sapiens
  misc_RNA (1)...(19): siRNA sense strand
ggaugugguuguggaguac

SEQ ID NO: 1947350 - RNA, 19 nt, Homo sapiens
  misc_RNA (1)...(19): siRNA sense strand
cauagaugaagacgcauug

SEQ ID NO: 1947351 - RNA, 19 nt, Homo sapiens
  misc_RNA (1)...(19): siRNA sense strand
gugcuuauuaucuaacaga

SEQ ID NO: 1947352 - RNA, 19 nt, Homo sapiens
  misc_RNA (1)...(19): siRNA sense strand
caaauauugacaugguuca

SEQ ID NO: 1947353 - RNA, 19 nt, Homo sapiens
  misc_RNA (1)...(19): siRNA sense strand
cacuuaugaugacauugaa

SEQ ID NO: 1947354 - RNA, 19 nt, Homo sapiens
  misc_RNA (1)...(19): siRNA sense strand
gcaucggaacugcaauguu

SEQ ID NO: 1947355 - RNA, 19 nt, Homo sapiens
  misc_RNA (1)...(19): siRNA sense strand
agagucgccugcaacaagu

SEQ ID NO: 1947356 - RNA, 19 nt, Homo sapiens
  misc_RNA (1)...(19): siRNA sense strand
auaaagucguugcagaucu

SEQ ID NO: 1947357 - RNA, 19 nt, Homo sapiens
  misc_RNA (1)...(19): siRNA sense strand
aaugugcugugugcuuauu

SEQ ID NO: 1947358 - RNA, 19 nt, Homo sapiens
  misc_RNA (1)...(19): siRNA sense strand
uguguuggauuugacauag

SEQ ID NO: 1947359 - RNA, 19 nt, Homo sapiens
  misc_RNA (1)...(19): siRNA sense strand
ugugcugugugcuuauuau

SEQ ID NO: 1947360 - RNA, 19 nt, Homo sapiens
  misc_RNA (1)...(19): siRNA sense strand
guguuggauuugacauaga

SEQ ID NO: 1947361 - RNA, 19 nt, Homo sapiens
  misc_RNA (1)...(19): siRNA sense strand
ggacaacgagcucaagaaa

SEQ ID NO: 1947362 - RNA, 19 nt, Homo sapiens
  misc_RNA (1)...(19): siRNA sense strand
acaacgagcucaagaaauc

SEQ ID NO: 1947363 - RNA, 19 nt, Homo sapiens
  misc_RNA (1)...(19): siRNA sense strand
gaugcuacauucaaacuuc

SEQ ID NO: 1947364 - RNA, 19 nt, Homo sapiens
  misc_RNA (1)...(19): siRNA sense strand
ccagaaacccucggucaua

SEQ ID NO: 1947365 - RNA, 19 nt, Homo sapiens
  misc_RNA (1)...(19): siRNA sense strand
gaaguggacucccgaucuc

SEQ ID NO: 1947366 - RNA, 19 nt, Homo sapiens
  misc_RNA (1)...(19): siRNA sense strand
gauccaggcugcccacaag

SEQ ID NO: 1947367 - RNA, 19 nt, Homo sapiens
  misc_RNA (1)...(19): siRNA sense strand
ucauggacgucuucacuga

SEQ ID NO: 1947368 - RNA, 19 nt, Homo sapiens
  misc_RNA (1)...(19): siRNA sense strand
cagaaacccucggucauag

SEQ ID NO: 1947369 - RNA, 19 nt, Homo sapiens
  misc_RNA (1)...(19): siRNA sense strand
ccugcugacuggugaaauu

SEQ ID NO: 1947370 - RNA, 19 nt, Homo sapiens
  misc_RNA (1)...(19): siRNA sense strand
ggaaguggacucccgaucu

SEQ ID NO: 1947371 - RNA, 19 nt, Homo sapiens
  misc_RNA (1)...(19): siRNA sense strand
gcugacuggugaaauuguu

SEQ ID NO: 1947372 - RNA, 19 nt, Homo sapiens
  misc_RNA (1)...(19): siRNA sense strand
gcacuggaggcucuguuga

SEQ ID NO: 1947373 - RNA, 19 nt, Homo sapiens
  misc_RNA (1)...(19): siRNA sense strand
gcuaguggccguggucaug

SEQ ID NO: 1947374 - RNA, 19 nt, Homo sapiens
  misc_RNA (1)...(19): siRNA sense strand
gaaacccucggucauaggu

SEQ ID NO: 1947375 - RNA, 19 nt, Homo sapiens
  misc_RNA (1)...(19): siRNA sense strand
ggucauggacgucuucacu

SEQ ID NO: 1947376 - RNA, 19 nt, Homo sapiens
  misc_RNA (1)...(19): siRNA sense strand
gacaacgagcucaagaaau

SEQ ID NO: 1947377 - RNA, 19 nt, Homo sapiens
  misc_RNA (1)...(19): siRNA sense strand
gggacaacgagcucaagaa

SEQ ID NO: 1947378 - RNA, 19 nt, Homo sapiens
  misc_RNA (1)...(19): siRNA sense strand
caagagcccagaggcauca

SEQ ID NO: 1947379 - RNA, 19 nt, Homo sapiens
  misc_RNA (1)...(19): siRNA sense strand
ccaggcugcccacaagcua

SEQ ID NO: 1947380 - RNA, 19 nt, Homo sapiens
  misc_RNA (1)...(19): siRNA sense strand
ucaggauccuacagcuuca

SEQ ID NO: 1947381 - RNA, 19 nt, Homo sapiens
  misc_RNA (1)...(19): siRNA sense strand
gcuauucucugaacguauu

SEQ ID NO: 1947382 - RNA, 19 nt, Homo sapiens
  misc_RNA (1)...(19): siRNA sense strand
gaagauggaggaugagaug

SEQ ID NO: 1947383 - RNA, 19 nt, Homo sapiens
  misc_RNA (1)...(19): siRNA sense strand
ggaagaugaagaacgauuu

SEQ ID NO: 1947384 - RNA, 19 nt, Homo sapiens
  misc_RNA (1)...(19): siRNA sense strand
ccaaagagguguccuucuc

SEQ ID NO: 1947385 - RNA, 19 nt, Homo sapiens
  misc_RNA (1)...(19): siRNA sense strand
caggaucaguucccaguga

SEQ ID NO: 1947386 - RNA, 19 nt, Homo sapiens
  misc_RNA (1)...(19): siRNA sense strand
uaugagaacuacaacaagu

SEQ ID NO: 1947387 - RNA, 19 nt, Homo sapiens
  misc_RNA (1)...(19): siRNA sense strand
acaccaaccucuugagcaa

SEQ ID NO: 1947388 - RNA, 19 nt, Homo sapiens
  misc_RNA (1)...(19): siRNA sense strand
gaagaugaagaacgauuuc

SEQ ID NO: 1947389 - RNA, 19 nt, Homo sapiens
  misc_RNA (1)...(19): siRNA sense strand
gaagcugcaguuccucuuu

SEQ ID NO: 1947390 - RNA, 19 nt, Homo sapiens
  misc_RNA (1)...(19): siRNA sense strand
uagacaagcugcguagaga

SEQ ID NO: 1947391 - RNA, 19 nt, Homo sapiens
  misc_RNA (1)...(19): siRNA sense strand
ucacagaugcugcgcaaga

SEQ ID NO: 1947392 - RNA, 19 nt, Homo sapiens
  misc_RNA (1)...(19): siRNA sense strand
accaaccucuugagcaaua

SEQ ID NO: 1947393 - RNA, 19 nt, Homo sapiens
  misc_RNA (1)...(19): siRNA sense strand
ccgaguugcuggccaaugu

SEQ ID NO: 1947394 - RNA, 19 nt, Homo sapiens
  misc_RNA (1)...(19): siRNA sense strand
acgggaugcugaagcuuua

SEQ ID NO: 1947395 - RNA, 19 nt, Homo sapiens
  misc_RNA (1)...(19): siRNA sense strand
gagguguccuucuccaaca

SEQ ID NO: 1947396 - RNA, 19 nt, Homo sapiens
  misc_RNA (1)...(19): siRNA sense strand
guucagcccuguggaguuc

SEQ ID NO: 1947397 - RNA, 19 nt, Homo sapiens
  misc_RNA (1)...(19): siRNA sense strand
ggacccgacugaucugaac

SEQ ID NO: 1947398 - RNA, 19 nt, Homo sapiens
  misc_RNA (1)...(19): siRNA sense strand
gauggacaccaaccucuug

SEQ ID NO: 1947399 - RNA, 19 nt, Homo sapiens
  misc_RNA (1)...(19): siRNA sense strand
uccggaagauggaggauga

SEQ ID NO: 1947400 - RNA, 19 nt, Homo sapiens
  misc_RNA (1)...(19): siRNA sense strand
ccaccaacauggcagugau

SEQ ID NO: 1947401 - RNA, 19 nt, Homo sapiens
  misc_RNA (1)...(19): siRNA sense strand
aagcuauucucugaacgua

SEQ ID NO: 1947402 - RNA, 19 nt, Homo sapiens
  misc_RNA (1)...(19): siRNA sense strand
ugaccggcaucaucaagau

SEQ ID NO: 1947403 - RNA, 19 nt, Homo sapiens
  misc_RNA (1)...(19): siRNA sense strand
gcagggugguggugacaac

SEQ ID NO: 1947404 - RNA, 19 nt, Homo sapiens
  misc_RNA (1)...(19): siRNA sense strand
aagcugcaguuccucuuug

SEQ ID NO: 1947405 - RNA, 19 nt, Homo sapiens
  misc_RNA (1)...(19): siRNA sense strand
ggaaguuuaccuagacaag

SEQ ID NO: 1947406 - RNA, 19 nt, Homo sapiens
  misc_RNA (1)...(19): siRNA sense strand
agaaggagcugagaaaccu

SEQ ID NO: 1947407 - RNA, 19 nt, Homo sapiens
  misc_RNA (1)...(19): siRNA sense strand
agacgcugcuggagugugu

SEQ ID NO: 1947408 - RNA, 19 nt, Homo sapiens
  misc_RNA (1)...(19): siRNA sense strand
ucuaugagaacuacaacaa

SEQ ID NO: 1947409 - RNA, 19 nt, Homo sapiens
  misc_RNA (1)...(19): siRNA sense strand
gcagugaucaccgacuuca

SEQ ID NO: 1947410 - RNA, 19 nt, Homo sapiens
  misc_RNA (1)...(19): siRNA sense strand
cuacaacaaguucaucuca

SEQ ID NO: 1947411 - RNA, 19 nt, Homo sapiens
  misc_RNA (1)...(19): siRNA sense strand
cccaguugauggacaguga

SEQ ID NO: 1947412 - RNA, 19 nt, Homo sapiens
  misc_RNA (1)...(19): siRNA sense strand
agaggacuuucuccgugua

SEQ ID NO: 1947413 - RNA, 19 nt, Homo sapiens
  misc_RNA (1)...(19): siRNA sense strand
cauccucacucucacugau

SEQ ID NO: 1947414 - RNA, 19 nt, Homo sapiens
  misc_RNA (1)...(19): siRNA sense strand
ggaagauggaggaugagau

SEQ ID NO: 1947415 - RNA, 19 nt, Homo sapiens
  misc_RNA (1)...(19): siRNA sense strand
uggagaaggagcugagaaa

SEQ ID NO: 1947416 - RNA, 19 nt, Homo sapiens
  misc_RNA (1)...(19): siRNA sense strand
gugcugaccggcaucauca

SEQ ID NO: 1947417 - RNA, 19 nt, Homo sapiens
  misc_RNA (1)...(19): siRNA sense strand
gaagcuauucucugaacgu

SEQ ID NO: 1947418 - RNA, 19 nt, Homo sapiens
  misc_RNA (1)...(19): siRNA sense strand
accaacaccugcccucguu

SEQ ID NO: 1947419 - RNA, 19 nt, Homo sapiens
  misc_RNA (1)...(19): siRNA sense strand
cgaagaacucgugcacuug

SEQ ID NO: 1947420 - RNA, 19 nt, Homo sapiens
  misc_RNA (1)...(19): siRNA sense strand
ucucugaacguauugaugu

SEQ ID NO: 1947421 - RNA, 19 nt, Homo sapiens
  misc_RNA (1)...(19): siRNA sense strand
gcgacuggcucagcacucu

SEQ ID NO: 1947422 - RNA, 19 nt, Homo sapiens
  misc_RNA (1)...(19): siRNA sense strand
gacaagcugcguagagagu

SEQ ID NO: 1947423 - RNA, 19 nt, Homo sapiens
  misc_RNA (1)...(19): siRNA sense strand
uccggaagaugaagaacga

SEQ ID NO: 1947424 - RNA, 19 nt, Homo sapiens
  misc_RNA (1)...(19): siRNA sense strand
gccacuuucugcagcucua

SEQ ID NO: 1947425 - RNA, 19 nt, Homo sapiens
  misc_RNA (1)...(19): siRNA sense strand
uggcagugaucaccgacuu

SEQ ID NO: 1947426 - RNA, 19 nt, Homo sapiens
  misc_RNA (1)...(19): siRNA sense strand
aagaacgauuuccggaaga

SEQ ID NO: 1947427 - RNA, 19 nt, Homo sapiens
  misc_RNA (1)...(19): siRNA sense strand
gaacgauuuccggaagaug

SEQ ID NO: 1947428 - RNA, 19 nt, Homo sapiens
  misc_RNA (1)...(19): siRNA sense strand
ugagcaauauccagaagcu

SEQ ID NO: 1947429 - RNA, 19 nt, Homo sapiens
  misc_RNA (1)...(19): siRNA sense strand
gggugguggugacaacuca

SEQ ID NO: 1947430 - RNA, 19 nt, Homo sapiens
  misc_RNA (1)...(19): siRNA sense strand
ggaugcugaagcuuuacua

SEQ ID NO: 1947431 - RNA, 19 nt, Homo sapiens
  misc_RNA (1)...(19): siRNA sense strand
acagacaccauccggaaga

SEQ ID NO: 1947432 - RNA, 19 nt, Homo sapiens
  misc_RNA (1)...(19): siRNA sense strand
cugaacguauugauguguu

SEQ ID NO: 1947433 - RNA, 19 nt, Homo sapiens
  misc_RNA (1)...(19): siRNA sense strand
ggccuggucauaucacaga

SEQ ID NO: 1947434 - RNA, 19 nt, Homo sapiens
  misc_RNA (1)...(19): siRNA sense strand
cacgggaugcugaagcuuu

SEQ ID NO: 1947435 - RNA, 19 nt, Homo sapiens
  misc_RNA (1)...(19): siRNA sense strand
ggacgacugccaggucauc

SEQ ID NO: 1947436 - RNA, 19 nt, Homo sapiens
  misc_RNA (1)...(19): siRNA sense strand
ggacauggugcggcagauc

SEQ ID NO: 1947437 - RNA, 19 nt, Homo sapiens
  misc_RNA (1)...(19): siRNA sense strand
gagcaauauccagaagcua

SEQ ID NO: 1947438 - RNA, 19 nt, Homo sapiens
  misc_RNA (1)...(19): siRNA sense strand
agacggccaccaucuccua

SEQ ID NO: 1947439 - RNA, 19 nt, Homo sapiens
  misc_RNA (1)...(19): siRNA sense strand
cggaagaugaagaacgauu

SEQ ID NO: 1947440 - RNA, 19 nt, Homo sapiens
  misc_RNA (1)...(19): siRNA sense strand
gggcuucguccacucuaug

SEQ ID NO: 1947441 - RNA, 19 nt, Homo sapiens
  misc_RNA (1)...(19): siRNA sense strand
gagaaggagcugagaaacc

SEQ ID NO: 1947442 - RNA, 19 nt, Homo sapiens
  misc_RNA (1)...(19): siRNA sense strand
gccacgagcgcaucaccaa

SEQ ID NO: 1947443 - RNA, 19 nt, Homo sapiens
  misc_RNA (1)...(19): siRNA sense strand
caaaguggaugaagaugaa

SEQ ID NO: 1947444 - RNA, 19 nt, Homo sapiens
  misc_RNA (1)...(19): siRNA sense strand
caagguagaugaacugaug

SEQ ID NO: 1947445 - RNA, 19 nt, Homo sapiens
  misc_RNA (1)...(19): siRNA sense strand
gaagaacccucagucaaau

SEQ ID NO: 1947446 - RNA, 19 nt, Homo sapiens
  misc_RNA (1)...(19): siRNA sense strand
uagaugaacugaugacuga

SEQ ID NO: 1947447 - RNA, 19 nt, Homo sapiens
  misc_RNA (1)...(19): siRNA sense strand
gagaagauacugaucaaga

SEQ ID NO: 1947448 - RNA, 19 nt, Homo sapiens
  misc_RNA (1)...(19): siRNA sense strand
ggaugaagaugaagaagca

SEQ ID NO: 1947449 - RNA, 19 nt, Homo sapiens
  misc_RNA (1)...(19): siRNA sense strand
uaagagagcugcccuacag

SEQ ID NO: 1947450 - RNA, 19 nt, Homo sapiens
  misc_RNA (1)...(19): siRNA sense strand
gagcugcccuacaggcuuu

SEQ ID NO: 1947451 - RNA, 19 nt, Homo sapiens
  misc_RNA (1)...(19): siRNA sense strand
gaaggagacagagaagaua

SEQ ID NO: 1947452 - RNA, 19 nt, Homo sapiens
  misc_RNA (1)...(19): siRNA sense strand
gaagauacugaucaagaaa

SEQ ID NO: 1947453 - RNA, 19 nt, Homo sapiens
  misc_RNA (1)...(19): siRNA sense strand
gaagaagaacccucaguca

SEQ ID NO: 1947454 - RNA, 19 nt, Homo sapiens
  misc_RNA (1)...(19): siRNA sense strand
ggaauuggcccaggaguug

SEQ ID NO: 1947455 - RNA, 19 nt, Homo sapiens
  misc_RNA (1)...(19): siRNA sense strand
agaagauacugaucaagaa

SEQ ID NO: 1947456 - RNA, 19 nt, Homo sapiens
  misc_RNA (1)...(19): siRNA sense strand
ugaagaagcaauacagaaa

SEQ ID NO: 1947457 - RNA, 19 nt, Homo sapiens
  misc_RNA (1)...(19): siRNA sense strand
gcccaggaguuguuaaaug

SEQ ID NO: 1947458 - RNA, 19 nt, Homo sapiens
  misc_RNA (1)...(19): siRNA sense strand
gaagcaauacagaaacuga

SEQ ID NO: 1947459 - RNA, 19 nt, Homo sapiens
  misc_RNA (1)...(19): siRNA sense strand
gaucaagaaacaggaauuu

SEQ ID NO: 1947460 - RNA, 19 nt, Homo sapiens
  misc_RNA (1)...(19): siRNA sense strand
agaagaacccucagucaaa

SEQ ID NO: 1947461 - RNA, 19 nt, Homo sapiens
  misc_RNA (1)...(19): siRNA sense strand
cagagaagauacugaucaa

SEQ ID NO: 1947462 - RNA, 19 nt, Homo sapiens
  misc_RNA (1)...(19): siRNA sense strand
gagaaugccacuaccaaug

SEQ ID NO: 1947463 - RNA, 19 nt, Homo sapiens
  misc_RNA (1)...(19): siRNA sense strand
ugacugacaucacggaaca

SEQ ID NO: 1947464 - RNA, 19 nt, Homo sapiens
  misc_RNA (1)...(19): siRNA sense strand
ggacauggacauugacaag

SEQ ID NO: 1947465 - RNA, 19 nt, Homo sapiens
  misc_RNA (1)...(19): siRNA sense strand
gaagaugaagaagcacuaa

SEQ ID NO: 1947466 - RNA, 19 nt, Homo sapiens
  misc_RNA (1)...(19): siRNA sense strand
aagaagcacuaaagcaguu

SEQ ID NO: 1947467 - RNA, 19 nt, Homo sapiens
  misc_RNA (1)...(19): siRNA sense strand
cccaggaguuguuaaaugu

SEQ ID NO: 1947468 - RNA, 19 nt, Homo sapiens
  misc_RNA (1)...(19): siRNA sense strand
gcuggucccugugugauga

SEQ ID NO: 1947469 - RNA, 19 nt, Homo sapiens
  misc_RNA (1)...(19): siRNA sense strand
ccaaaguggaugaagauga

SEQ ID NO: 1947470 - RNA, 19 nt, Homo sapiens
  misc_RNA (1)...(19): siRNA sense strand
ucagucaaauugccuagug

SEQ ID NO: 1947471 - RNA, 19 nt, Homo sapiens
  misc_RNA (1)...(19): siRNA sense strand
caaacugacgggacauuau

SEQ ID NO: 1947472 - RNA, 19 nt, Homo sapiens
  misc_RNA (1)...(19): siRNA sense strand
cauggacauugacaaggua

SEQ ID NO: 1947473 - RNA, 19 nt, Homo sapiens
  misc_RNA (1)...(19): siRNA sense strand
caaauugccuaguguaccu

SEQ ID NO: 1947474 - RNA, 19 nt, Homo sapiens
  misc_RNA (1)...(19): siRNA sense strand
uacaaacagccaagaagua

SEQ ID NO: 1947475 - RNA, 19 nt, Homo sapiens
  misc_RNA (1)...(19): siRNA sense strand
ccuaugggcuuuggagaug

SEQ ID NO: 1947476 - RNA, 19 nt, Homo sapiens
  misc_RNA (1)...(19): siRNA sense strand
aguaugggaccaagaauaa

SEQ ID NO: 1947477 - RNA, 19 nt, Homo sapiens
  misc_RNA (1)...(19): siRNA sense strand
gaagaagcaauacagaaac

SEQ ID NO: 1947478 - RNA, 19 nt, Homo sapiens
  misc_RNA (1)...(19): siRNA sense strand
ugaaggagacagagaagau

SEQ ID NO: 1947479 - RNA, 19 nt, Homo sapiens
  misc_RNA (1)...(19): siRNA sense strand
acaaacagccaagaaguau

SEQ ID NO: 1947480 - RNA, 19 nt, Homo sapiens
  misc_RNA (1)...(19): siRNA sense strand
gaaugccacuaccaaugca

SEQ ID NO: 1947481 - RNA, 19 nt, Homo sapiens
  misc_RNA (1)...(19): siRNA sense strand
caacaggagcuacaaacag

SEQ ID NO: 1947482 - RNA, 19 nt, Homo sapiens
  misc_RNA (1)...(19): siRNA sense strand
agaaguaugggaccaagaa

SEQ ID NO: 1947483 - RNA, 19 nt, Homo sapiens
  misc_RNA (1)...(19): siRNA sense strand
aagaagaacccucagucaa

SEQ ID NO: 1947484 - RNA, 19 nt, Homo sapiens
  misc_RNA (1)...(19): siRNA sense strand
gaagauucaacaggagcua

SEQ ID NO: 1947485 - RNA, 19 nt, Homo sapiens
  misc_RNA (1)...(19): siRNA sense strand
gcaaggcuggucccugugu

SEQ ID NO: 1947486 - RNA, 19 nt, Homo sapiens
  misc_RNA (1)...(19): siRNA sense strand
ggacauugacaagguagau

SEQ ID NO: 1947487 - RNA, 19 nt, Homo sapiens
  misc_RNA (1)...(19): siRNA sense strand
accaggacauggacauuga

SEQ ID NO: 1947488 - RNA, 19 nt, Homo sapiens
  misc_RNA (1)...(19): siRNA sense strand
caauacagaaacugaagga

SEQ ID NO: 1947489 - RNA, 19 nt, Homo sapiens
  misc_RNA (1)...(19): siRNA sense strand
acaaacugacgggacauua

SEQ ID NO: 1947490 - RNA, 19 nt, Homo sapiens
  misc_RNA (1)...(19): siRNA sense strand
agacagagaagauacugau

SEQ ID NO: 1947491 - RNA, 19 nt, Homo sapiens
  misc_RNA (1)...(19): siRNA sense strand
aaacagccaagaaguaugg

SEQ ID NO: 1947492 - RNA, 19 nt, Homo sapiens
  misc_RNA (1)...(19): siRNA sense strand
acagagaagauacugauca

SEQ ID NO: 1947493 - RNA, 19 nt, Homo sapiens
  misc_RNA (1)...(19): siRNA sense strand
gggcgacaaggaagaagaa

SEQ ID NO: 1947494 - RNA, 19 nt, Homo sapiens
  misc_RNA (1)...(19): siRNA sense strand
gaaguaugggaccaagaau

SEQ ID NO: 1947495 - RNA, 19 nt, Homo sapiens
  misc_RNA (1)...(19): siRNA sense strand
cuacaaacagccaagaagu

SEQ ID NO: 1947496 - RNA, 19 nt, Homo sapiens
  misc_RNA (1)...(19): siRNA sense strand
cuaaagcaguuggcugagu

SEQ ID NO: 1947497 - RNA, 19 nt, Homo sapiens
  misc_RNA (1)...(19): siRNA sense strand
ugauguggaugaggaugaa

SEQ ID NO: 1947498 - RNA, 19 nt, Homo sapiens
  misc_RNA (1)...(19): siRNA sense strand
aaacugacgggacauuauc

SEQ ID NO: 1947499 - RNA, 19 nt, Homo sapiens
  misc_RNA (1)...(19): siRNA sense strand
aaacugaaggagacagaga

SEQ ID NO: 1947500 - RNA, 19 nt, Homo sapiens
  misc_RNA (1)...(19): siRNA sense strand
ugaagaugaagaagcacua

SEQ ID NO: 1947501 - RNA, 19 nt, Homo sapiens
  misc_RNA (1)...(19): siRNA sense strand
uaaaugugggcgacaagga

SEQ ID NO: 1947502 - RNA, 19 nt, Homo sapiens
  misc_RNA (1)...(19): siRNA sense strand
gaugaacugaugacugaca

SEQ ID NO: 1947503 - RNA, 19 nt, Homo sapiens
  misc_RNA (1)...(19): siRNA sense strand
acauggacauugacaaggu

SEQ ID NO: 1947504 - RNA, 19 nt, Homo sapiens
  misc_RNA (1)...(19): siRNA sense strand
aaguaugggaccaagaaua

SEQ ID NO: 1947505 - RNA, 19 nt, Homo sapiens
  misc_RNA (1)...(19): siRNA sense strand
aagaagcaauacagaaacu

SEQ ID NO: 1947506 - RNA, 19 nt, Homo sapiens
  misc_RNA (1)...(19): siRNA sense strand
agauacugaucaagaaaca

SEQ ID NO: 1947507 - RNA, 19 nt, Homo sapiens
  misc_RNA (1)...(19): siRNA sense strand
uaugggaccaagaauaaga

SEQ ID NO: 1947508 - RNA, 19 nt, Homo sapiens
  misc_RNA (1)...(19): siRNA sense strand
gcuacaaacagccaagaag

SEQ ID NO: 1947509 - RNA, 19 nt, Homo sapiens
  misc_RNA (1)...(19): siRNA sense strand
gcaugaagaaggccuacca

SEQ ID NO: 1947510 - RNA, 19 nt, Homo sapiens
  misc_RNA (1)...(19): siRNA sense strand
ugacaagguagaugaacug

SEQ ID NO: 1947511 - RNA, 19 nt, Homo sapiens
  misc_RNA (1)...(19): siRNA sense strand
ugacaucacggaacaacag

SEQ ID NO: 1947512 - RNA, 19 nt, Homo sapiens
  misc_RNA (1)...(19): siRNA sense strand
uaguguaccuucuacucau

SEQ ID NO: 1947513 - RNA, 19 nt, Homo sapiens
  misc_RNA (1)...(19): siRNA sense strand
gagacagagaagauacuga

SEQ ID NO: 1947514 - RNA, 19 nt, Homo sapiens
  misc_RNA (1)...(19): siRNA sense strand
aaaugugggcgacaaggaa

SEQ ID NO: 1947515 - RNA, 19 nt, Homo sapiens
  misc_RNA (1)...(19): siRNA sense strand
caaacagccaagaaguaug

SEQ ID NO: 1947516 - RNA, 19 nt, Homo sapiens
  misc_RNA (1)...(19): siRNA sense strand
cugaagaagcaauacagaa

SEQ ID NO: 1947517 - RNA, 19 nt, Homo sapiens
  misc_RNA (1)...(19): siRNA sense strand
ggagacagagaagauacug

SEQ ID NO: 1947518 - RNA, 19 nt, Homo sapiens
  misc_RNA (1)...(19): siRNA sense strand
agaacccucagucaaauug

SEQ ID NO: 1947519 - RNA, 19 nt, Homo sapiens
  misc_RNA (1)...(19): siRNA sense strand
ucaacaggagcuacaaaca

SEQ ID NO: 1947520 - RNA, 19 nt, Homo sapiens
  misc_RNA (1)...(19): siRNA sense strand
gaaggccuaccaggacaug

SEQ ID NO: 1947521 - RNA, 19 nt, Homo sapiens
  misc_RNA (1)...(19): siRNA sense strand
ugagaaugccacuaccaau

SEQ ID NO: 1947522 - RNA, 19 nt, Homo sapiens
  misc_RNA (1)...(19): siRNA sense strand
cuuuggagaugauguggau

SEQ ID NO: 1947523 - RNA, 19 nt, Homo sapiens
  misc_RNA (1)...(19): siRNA sense strand
acauugacaagguagauga

SEQ ID NO: 1947524 - RNA, 19 nt, Homo sapiens
  misc_RNA (1)...(19): siRNA sense strand
gaagaaaagauucgaacag

SEQ ID NO: 1947525 - RNA, 19 nt, Homo sapiens
  misc_RNA (1)...(19): siRNA sense strand
gaugaagaagcacuaaagc

SEQ ID NO: 1947526 - RNA, 19 nt, Homo sapiens
  misc_RNA (1)...(19): siRNA sense strand
gagcuacaaacagccaaga

SEQ ID NO: 1947527 - RNA, 19 nt, Homo sapiens
  misc_RNA (1)...(19): siRNA sense strand
ggaaggggaagaaggagaa

SEQ ID NO: 1947528 - RNA, 19 nt, Homo sapiens
  misc_RNA (1)...(19): siRNA sense strand
gaagaacuauccuguuaga

SEQ ID NO: 1947529 - RNA, 19 nt, Homo sapiens
  misc_RNA (1)...(19): siRNA sense strand
ucacagaauucccucauuu

SEQ ID NO: 1947530 - RNA, 19 nt, Homo sapiens
  misc_RNA (1)...(19): siRNA sense strand
gagcuggucuuccauuaug

SEQ ID NO: 1947531 - RNA, 19 nt, Homo sapiens
  misc_RNA (1)...(19): siRNA sense strand
gcaaagaggcugguucuga

SEQ ID NO: 1947532 - RNA, 19 nt, Homo sapiens
  misc_RNA (1)...(19): siRNA sense strand
ccaaacagccuauugaaau

SEQ ID NO: 1947533 - RNA, 19 nt, Homo sapiens
  misc_RNA (1)...(19): siRNA sense strand
acucauaccuucuguuuga

SEQ ID NO: 1947534 - RNA, 19 nt, Homo sapiens
  misc_RNA (1)...(19): siRNA sense strand
gaacacagacacagcuuau

SEQ ID NO: 1947535 - RNA, 19 nt, Homo sapiens
  misc_RNA (1)...(19): siRNA sense strand
ugaaaucuauggcccugua

SEQ ID NO: 1947536 - RNA, 19 nt, Homo sapiens
  misc_RNA (1)...(19): siRNA sense strand
uaaacucaaugcacagaaa

SEQ ID NO: 1947537 - RNA, 19 nt, Homo sapiens
  misc_RNA (1)...(19): siRNA sense strand
caaacagccuauugaaauc

SEQ ID NO: 1947538 - RNA, 19 nt, Homo sapiens
  misc_RNA (1)...(19): siRNA sense strand
gaaaagaaacgcccaggua

SEQ ID NO: 1947539 - RNA, 19 nt, Homo sapiens
  misc_RNA (1)...(19): siRNA sense strand
ucaauguccugcagaagaa

SEQ ID NO: 1947540 - RNA, 19 nt, Homo sapiens
  misc_RNA (1)...(19): siRNA sense strand
agaagugacucuagcagaa

SEQ ID NO: 1947541 - RNA, 19 nt, Homo sapiens
  misc_RNA (1)...(19): siRNA sense strand
gcaaaguugugccgugcaa

SEQ ID NO: 1947542 - RNA, 19 nt, Homo sapiens
  misc_RNA (1)...(19): siRNA sense strand
ggucuuccauuaugugguu

SEQ ID NO: 1947543 - RNA, 19 nt, Homo sapiens
  misc_RNA (1)...(19): siRNA sense strand
gauaagcauuccaaucaag

SEQ ID NO: 1947544 - RNA, 19 nt, Homo sapiens
  misc_RNA (1)...(19): siRNA sense strand
gcagggagaauuaccaaga

SEQ ID NO: 1947545 - RNA, 19 nt, Homo sapiens
  misc_RNA (1)...(19): siRNA sense strand
gggcuccucugcacaauca

SEQ ID NO: 1947546 - RNA, 19 nt, Homo sapiens
  misc_RNA (1)...(19): siRNA sense strand
gaacaaggaagaacuaucc

SEQ ID NO: 1947547 - RNA, 19 nt, Homo sapiens
  misc_RNA (1)...(19): siRNA sense strand
ggaacacagacacagcuua

SEQ ID NO: 1947548 - RNA, 19 nt, Homo sapiens
  misc_RNA (1)...(19): siRNA sense strand
acagauggcagcaacauuu

SEQ ID NO: 1947549 - RNA, 19 nt, Homo sapiens
  misc_RNA (1)...(19): siRNA sense strand
caaagaggaacaaggaaga

SEQ ID NO: 1947550 - RNA, 19 nt, Homo sapiens
  misc_RNA (1)...(19): siRNA sense strand
aguguuagaucuccaagaa

SEQ ID NO: 1947551 - RNA, 19 nt, Homo sapiens
  misc_RNA (1)...(19): siRNA sense strand
acacagacacagcuuauga

SEQ ID NO: 1947552 - RNA, 19 nt, Homo sapiens
  misc_RNA (1)...(19): siRNA sense strand
ucaaugcacagaaacuuaa

SEQ ID NO: 1947553 - RNA, 19 nt, Homo sapiens
  misc_RNA (1)...(19): siRNA sense strand
agaaacagauggcauugca

SEQ ID NO: 1947554 - RNA, 19 nt, Homo sapiens
  misc_RNA (1)...(19): siRNA sense strand
gaggaacaaggaagaacua

SEQ ID NO: 1947555 - RNA, 19 nt, Homo sapiens
  misc_RNA (1)...(19): siRNA sense strand
cggagcuggucuuccauua

SEQ ID NO: 1947556 - RNA, 19 nt, Homo sapiens
  misc_RNA (1)...(19): siRNA sense strand
gaagcaacccuggaugaug

SEQ ID NO: 1947557 - RNA, 19 nt, Homo sapiens
  misc_RNA (1)...(19): siRNA sense strand
gcauuucgccucuuucaca

SEQ ID NO: 1947558 - RNA, 19 nt, Homo sapiens
  misc_RNA (1)...(19): siRNA sense strand
acacggagcuggucuucca

SEQ ID NO: 1947559 - RNA, 19 nt, Homo sapiens
  misc_RNA (1)...(19): siRNA sense strand
aaagaaacgcccagguaaa

SEQ ID NO: 1947560 - RNA, 19 nt, Homo sapiens
  misc_RNA (1)...(19): siRNA sense strand
uccauuaugugguucauga

SEQ ID NO: 1947561 - RNA, 19 nt, Homo sapiens
  misc_RNA (1)...(19): siRNA sense strand
cuuaaagcagggagaauua

SEQ ID NO: 1947562 - RNA, 19 nt, Homo sapiens
  misc_RNA (1)...(19): siRNA sense strand
agacacagcuuaugaaaag

SEQ ID NO: 1947563 - RNA, 19 nt, Homo sapiens
  misc_RNA (1)...(19): siRNA sense strand
uaaaagaauuugcgcaugu

SEQ ID NO: 1947564 - RNA, 19 nt, Homo sapiens
  misc_RNA (1)...(19): siRNA sense strand
ggcgagugcuggcucuuug

SEQ ID NO: 1947565 - RNA, 19 nt, Homo sapiens
  misc_RNA (1)...(19): siRNA sense strand
gaauuugcgcaugugaaua

SEQ ID NO: 1947566 - RNA, 19 nt, Homo sapiens
  misc_RNA (1)...(19): siRNA sense strand
ccacagcacaccacagaug

SEQ ID NO: 1947567 - RNA, 19 nt, Homo sapiens
  misc_RNA (1)...(19): siRNA sense strand
gaguaaaacugugcuuuga

SEQ ID NO: 1947568 - RNA, 19 nt, Homo sapiens
  misc_RNA (1)...(19): siRNA sense strand
ccuguuagacucagaagaa

SEQ ID NO: 1947569 - RNA, 19 nt, Homo sapiens
  misc_RNA (1)...(19): siRNA sense strand
ggacaaagcaaaggagcau

SEQ ID NO: 1947570 - RNA, 19 nt, Homo sapiens
  misc_RNA (1)...(19): siRNA sense strand
aagcagaccuguugaucca

SEQ ID NO: 1947571 - RNA, 19 nt, Homo sapiens
  misc_RNA (1)...(19): siRNA sense strand
gacuuuaucuggcgaacca

SEQ ID NO: 1947572 - RNA, 19 nt, Homo sapiens
  misc_RNA (1)...(19): siRNA sense strand
cauaccuucuguuugauga

SEQ ID NO: 1947573 - RNA, 19 nt, Homo sapiens
  misc_RNA (1)...(19): siRNA sense strand
ggagaauuaccaagaucuu

SEQ ID NO: 1947574 - RNA, 19 nt, Homo sapiens
  misc_RNA (1)...(19): siRNA sense strand
uguuagaucuccaagaagu

SEQ ID NO: 1947575 - RNA, 19 nt, Homo sapiens
  misc_RNA (1)...(19): siRNA sense strand
cagggagaauuaccaagau

SEQ ID NO: 1947576 - RNA, 19 nt, Homo sapiens
  misc_RNA (1)...(19): siRNA sense strand
ggagaaacagauggcauug

SEQ ID NO: 1947577 - RNA, 19 nt, Homo sapiens
  misc_RNA (1)...(19): siRNA sense strand
ggccagagaaggagaaaca

SEQ ID NO: 1947578 - RNA, 19 nt, Homo sapiens
  misc_RNA (1)...(19): siRNA sense strand
caacuuaaagcagggagaa

SEQ ID NO: 1947579 - RNA, 19 nt, Homo sapiens
  misc_RNA (1)...(19): siRNA sense strand
ggaagaacuauccuguuag

SEQ ID NO: 1947580 - RNA, 19 nt, Homo sapiens
  misc_RNA (1)...(19): siRNA sense strand
agacaguccucccaaagag

SEQ ID NO: 1947581 - RNA, 19 nt, Homo sapiens
  misc_RNA (1)...(19): siRNA sense strand
ggagcuggucuuccauuau

SEQ ID NO: 1947582 - RNA, 19 nt, Homo sapiens
  misc_RNA (1)...(19): siRNA sense strand
acagaaacuuaaagaccuu

SEQ ID NO: 1947583 - RNA, 19 nt, Homo sapiens
  misc_RNA (1)...(19): siRNA sense strand
gcagacaguccucccaaag

SEQ ID NO: 1947584 - RNA, 19 nt, Homo sapiens
  misc_RNA (1)...(19): siRNA sense strand
gcuccaugguguccaaaca

SEQ ID NO: 1947585 - RNA, 19 nt, Homo sapiens
  misc_RNA (1)...(19): siRNA sense strand
ggccacagcacaccacaga

SEQ ID NO: 1947586 - RNA, 19 nt, Homo sapiens
  misc_RNA (1)...(19): siRNA sense strand
gaaacgcccagguaaacuc

SEQ ID NO: 1947587 - RNA, 19 nt, Homo sapiens
  misc_RNA (1)...(19): siRNA sense strand
guaaaacugugcuuugaag

SEQ ID NO: 1947588 - RNA, 19 nt, Homo sapiens
  misc_RNA (1)...(19): siRNA sense strand
cagacaguccucccaaaga

SEQ ID NO: 1947589 - RNA, 19 nt, Homo sapiens
  misc_RNA (1)...(19): siRNA sense strand
ccacgaagcaacccuggau

SEQ ID NO: 1947590 - RNA, 19 nt, Homo sapiens
  misc_RNA (1)...(19): siRNA sense strand
ggaacaaggaagaacuauc

SEQ ID NO: 1947591 - RNA, 19 nt, Homo sapiens
  misc_RNA (1)...(19): siRNA sense strand
ggaaaaugggguuacaauu

SEQ ID NO: 1947592 - RNA, 19 nt, Homo sapiens
  misc_RNA (1)...(19): siRNA sense strand
gagaauuaccaagaucuuc

SEQ ID NO: 1947593 - RNA, 19 nt, Homo sapiens
  misc_RNA (1)...(19): siRNA sense strand
ccaagaucuucaucacaca

SEQ ID NO: 1947594 - RNA, 19 nt, Homo sapiens
  misc_RNA (1)...(19): siRNA sense strand
ggugauaagcauuccaauc

SEQ ID NO: 1947595 - RNA, 19 nt, Homo sapiens
  misc_RNA (1)...(19): siRNA sense strand
cagagaaggagaaacagau

SEQ ID NO: 1947596 - RNA, 19 nt, Homo sapiens
  misc_RNA (1)...(19): siRNA sense strand
ccagagaaggagaaacaga

SEQ ID NO: 1947597 - RNA, 19 nt, Homo sapiens
  misc_RNA (1)...(19): siRNA sense strand
uggaauuucuguuguucug

SEQ ID NO: 1947598 - RNA, 19 nt, Homo sapiens
  misc_RNA (1)...(19): siRNA sense strand
caucacacaccuucaugga

SEQ ID NO: 1947599 - RNA, 19 nt, Homo sapiens
  misc_RNA (1)...(19): siRNA sense strand
gaagugacucuagcagaag

SEQ ID NO: 1947600 - RNA, 19 nt, Homo sapiens
  misc_RNA (1)...(19): siRNA sense strand
agauggcauugcagaacua

SEQ ID NO: 1947601 - RNA, 19 nt, Homo sapiens
  misc_RNA (1)...(19): siRNA sense strand
uaaagaccuugguguucca

SEQ ID NO: 1947602 - RNA, 19 nt, Homo sapiens
  misc_RNA (1)...(19): siRNA sense strand
acagacacagcuuaugaaa

SEQ ID NO: 1947603 - RNA, 19 nt, Homo sapiens
  misc_RNA (1)...(19): siRNA sense strand
agaucaauguccugcagaa

SEQ ID NO: 1947604 - RNA, 19 nt, Homo sapiens
  misc_RNA (1)...(19): siRNA sense strand
gaaaacucauaccuucugu

SEQ ID NO: 1947605 - RNA, 19 nt, Homo sapiens
  misc_RNA (1)...(19): siRNA sense strand
ugugggugauggaggagua

SEQ ID NO: 1947606 - RNA, 19 nt, Homo sapiens
  misc_RNA (1)...(19): siRNA sense strand
agaauuaccaagaucuuca

SEQ ID NO: 1947607 - RNA, 19 nt, Homo sapiens
  misc_RNA (1)...(19): siRNA sense strand
cagauggcauugcagaacu

SEQ ID NO: 1947608 - RNA, 19 nt, Homo sapiens
  misc_RNA (1)...(19): siRNA sense strand
ggaguaaaacugugcuuug

SEQ ID NO: 1947609 - RNA, 19 nt, Homo sapiens
  misc_RNA (1)...(19): siRNA sense strand
cacagaauucccucauuug

SEQ ID NO: 1947610 - RNA, 19 nt, Homo sapiens
  misc_RNA (1)...(19): siRNA sense strand
gcagaagaacuaaaagaau

SEQ ID NO: 1947611 - RNA, 19 nt, Homo sapiens
  misc_RNA (1)...(19): siRNA sense strand
gaaaagccaacuuaaagca

SEQ ID NO: 1947612 - RNA, 19 nt, Homo sapiens
  misc_RNA (1)...(19): siRNA sense strand
gaaccauggaacucucuca

SEQ ID NO: 1947613 - RNA, 19 nt, Homo sapiens
  misc_RNA (1)...(19): siRNA sense strand
guccaaacagccuauugaa

SEQ ID NO: 1947614 - RNA, 19 nt, Homo sapiens
  misc_RNA (1)...(19): siRNA sense strand
ccagauggacaaagcaaag

SEQ ID NO: 1947615 - RNA, 19 nt, Homo sapiens
  misc_RNA (1)...(19): siRNA sense strand
cucaaugcacagaaacuua

SEQ ID NO: 1947616 - RNA, 19 nt, Homo sapiens
  misc_RNA (1)...(19): siRNA sense strand
aaaagaaacgcccagguaa

SEQ ID NO: 1947617 - RNA, 19 nt, Homo sapiens
  misc_RNA (1)...(19): siRNA sense strand
agaauuugcgcaugugaau

SEQ ID NO: 1947618 - RNA, 19 nt, Homo sapiens
  misc_RNA (1)...(19): siRNA sense strand
uuucgccucuuucacagaa

SEQ ID NO: 1947619 - RNA, 19 nt, Homo sapiens
  misc_RNA (1)...(19): siRNA sense strand
uaagcauuccaaucaagaa

SEQ ID NO: 1947620 - RNA, 19 nt, Homo sapiens
  misc_RNA (1)...(19): siRNA sense strand
cagauggcagcaacauuug

SEQ ID NO: 1947621 - RNA, 19 nt, Homo sapiens
  misc_RNA (1)...(19): siRNA sense strand
aacagccuauugaaaucua

SEQ ID NO: 1947622 - RNA, 19 nt, Homo sapiens
  misc_RNA (1)...(19): siRNA sense strand
guaaacucaaugcacagaa

SEQ ID NO: 1947623 - RNA, 19 nt, Homo sapiens
  misc_RNA (1)...(19): siRNA sense strand
uguccaaacagccuauuga

SEQ ID NO: 1947624 - RNA, 19 nt, Homo sapiens
  misc_RNA (1)...(19): siRNA sense strand
gaauuaccaagaucuucau

SEQ ID NO: 1947625 - RNA, 19 nt, Homo sapiens
  misc_RNA (1)...(19): siRNA sense strand
caaugcacagaaacuuaaa

SEQ ID NO: 1947626 - RNA, 19 nt, Homo sapiens
  misc_RNA (1)...(19): siRNA sense strand
gguaaacucaaugcacaga

SEQ ID NO: 1947627 - RNA, 19 nt, Homo sapiens
  misc_RNA (1)...(19): siRNA sense strand
guagggcuucgggacuuua

SEQ ID NO: 1947628 - RNA, 19 nt, Homo sapiens
  misc_RNA (1)...(19): siRNA sense strand
cgacugagccgcuauaaua

SEQ ID NO: 1947629 - RNA, 19 nt, Homo sapiens
  misc_RNA (1)...(19): siRNA sense strand
cgaaggaacuugaagagaa

SEQ ID NO: 1947630 - RNA, 19 nt, Homo sapiens
  misc_RNA (1)...(19): siRNA sense strand
ggauagcguuguuggaauu

SEQ ID NO: 1947631 - RNA, 19 nt, Homo sapiens
  misc_RNA (1)...(19): siRNA sense strand
gaauuugcauuaccuuaug

SEQ ID NO: 1947632 - RNA, 19 nt, Homo sapiens
  misc_RNA (1)...(19): siRNA sense strand
ccagaaauuuguuaacaug

SEQ ID NO: 1947633 - RNA, 19 nt, Homo sapiens
  misc_RNA (1)...(19): siRNA sense strand
gaacgaaggaacuugaaga

SEQ ID NO: 1947634 - RNA, 19 nt, Homo sapiens
  misc_RNA (1)...(19): siRNA sense strand
gaacuugaagagaacauuu

SEQ ID NO: 1947635 - RNA, 19 nt, Homo sapiens
  misc_RNA (1)...(19): siRNA sense strand
gaauccaccuguugagaug

SEQ ID NO: 1947636 - RNA, 19 nt, Homo sapiens
  misc_RNA (1)...(19): siRNA sense strand
gaaggaacuugaagagaac

SEQ ID NO: 1947637 - RNA, 19 nt, Homo sapiens
  misc_RNA (1)...(19): siRNA sense strand
caagggacaucuuuuaaaa

SEQ ID NO: 1947638 - RNA, 19 nt, Homo sapiens
  misc_RNA (1)...(19): siRNA sense strand
ugcauuaccuuaugugauu

SEQ ID NO: 1947639 - RNA, 19 nt, Homo sapiens
  misc_RNA (1)...(19): siRNA sense strand
ugaaaugccugcggugcua

SEQ ID NO: 1947640 - RNA, 19 nt, Homo sapiens
  misc_RNA (1)...(19): siRNA sense strand
cagacaauauugccauaga

SEQ ID NO: 1947641 - RNA, 19 nt, Homo sapiens
  misc_RNA (1)...(19): siRNA sense strand
gcagagcaauguuggaaaa

SEQ ID NO: 1947642 - RNA, 19 nt, Homo sapiens
  misc_RNA (1)...(19): siRNA sense strand
ccucaguuguuuccuguaa

SEQ ID NO: 1947643 - RNA, 19 nt, Homo sapiens
  misc_RNA (1)...(19): siRNA sense strand
ggaaaaucaucucuaauca

SEQ ID NO: 1947644 - RNA, 19 nt, Homo sapiens
  misc_RNA (1)...(19): siRNA sense strand
caucucuaaucaagcuuua

SEQ ID NO: 1947645 - RNA, 19 nt, Homo sapiens
  misc_RNA (1)...(19): siRNA sense strand
uuagagcaccugaagauuu

SEQ ID NO: 1947646 - RNA, 19 nt, Homo sapiens
  misc_RNA (1)...(19): siRNA sense strand
ccauagaaaugugugaaga

SEQ ID NO: 1947647 - RNA, 19 nt, Homo sapiens
  misc_RNA (1)...(19): siRNA sense strand
gacaauauugccauagaaa

SEQ ID NO: 1947648 - RNA, 19 nt, Homo sapiens
  misc_RNA (1)...(19): siRNA sense strand
caauauugccauagaaaug

SEQ ID NO: 1947649 - RNA, 19 nt, Homo sapiens
  misc_RNA (1)...(19): siRNA sense strand
gugugaagaauuugcauua

SEQ ID NO: 1947650 - RNA, 19 nt, Homo sapiens
  misc_RNA (1)...(19): siRNA sense strand
agacaauauugccauagaa

SEQ ID NO: 1947651 - RNA, 19 nt, Homo sapiens
  misc_RNA (1)...(19): siRNA sense strand
uguaagugcugugaccuuu

SEQ ID NO: 1947652 - RNA, 19 nt, Homo sapiens
  misc_RNA (1)...(19): siRNA sense strand
ggaauccaccuguugagau

SEQ ID NO: 1947653 - RNA, 19 nt, Homo sapiens
  misc_RNA (1)...(19): siRNA sense strand
gggagacucuuugaaaugc

SEQ ID NO: 1947654 - RNA, 19 nt, Homo sapiens
  misc_RNA (1)...(19): siRNA sense strand
caugaaaacucaaggaugu

SEQ ID NO: 1947655 - RNA, 19 nt, Homo sapiens
  misc_RNA (1)...(19): siRNA sense strand
aaagaacgaaggaacuuga

SEQ ID NO: 1947656 - RNA, 19 nt, Homo sapiens
  misc_RNA (1)...(19): siRNA sense strand
ggacaucuuuuaaaacaag

SEQ ID NO: 1947657 - RNA, 19 nt, Homo sapiens
  misc_RNA (1)...(19): siRNA sense strand
gagcaauguuggaaaauca

SEQ ID NO: 1947658 - RNA, 19 nt, Homo sapiens
  misc_RNA (1)...(19): siRNA sense strand
uagagcaccugaagauuuu

SEQ ID NO: 1947659 - RNA, 19 nt, Homo sapiens
  misc_RNA (1)...(19): siRNA sense strand
ugguggacaugccagguua

SEQ ID NO: 1947660 - RNA, 19 nt, Homo sapiens
  misc_RNA (1)...(19): siRNA sense strand
guuggaaaaucaucucuaa

SEQ ID NO: 1947661 - RNA, 19 nt, Homo sapiens
  misc_RNA (1)...(19): siRNA sense strand
cuguugagaugcuuuauag

SEQ ID NO: 1947662 - RNA, 19 nt, Homo sapiens
  misc_RNA (1)...(19): siRNA sense strand
gcugugaccuuuucuggaa

SEQ ID NO: 1947663 - RNA, 19 nt, Homo sapiens
  misc_RNA (1)...(19): siRNA sense strand
cauagaaaugugugaagaa

SEQ ID NO: 1947664 - RNA, 19 nt, Homo sapiens
  misc_RNA (1)...(19): siRNA sense strand
gaccuucaccugcguaucu

SEQ ID NO: 1947665 - RNA, 19 nt, Homo sapiens
  misc_RNA (1)...(19): siRNA sense strand
ucaguuguuuccuguaagu

SEQ ID NO: 1947666 - RNA, 19 nt, Homo sapiens
  misc_RNA (1)...(19): siRNA sense strand
gaagucagagucuccaaaa

SEQ ID NO: 1947667 - RNA, 19 nt, Homo sapiens
  misc_RNA (1)...(19): siRNA sense strand
gcauuaccuuaugugauug

SEQ ID NO: 1947668 - RNA, 19 nt, Homo sapiens
  misc_RNA (1)...(19): siRNA sense strand
gaagaauuugcauuaccuu

SEQ ID NO: 1947669 - RNA, 19 nt, Homo sapiens
  misc_RNA (1)...(19): siRNA sense strand
ugaagaauuugcauuaccu

SEQ ID NO: 1947670 - RNA, 19 nt, Homo sapiens
  misc_RNA (1)...(19): siRNA sense strand
aacagacaauauugccaua

SEQ ID NO: 1947671 - RNA, 19 nt, Homo sapiens
  misc_RNA (1)...(19): siRNA sense strand
aaucaucucuaaucaagcu

SEQ ID NO: 1947672 - RNA, 19 nt, Homo sapiens
  misc_RNA (1)...(19): siRNA sense strand
guggauagcguuguuggaa

SEQ ID NO: 1947673 - RNA, 19 nt, Homo sapiens
  misc_RNA (1)...(19): siRNA sense strand
gaggugagaggcgauucua

SEQ ID NO: 1947674 - RNA, 19 nt, Homo sapiens
  misc_RNA (1)...(19): siRNA sense strand
aaaccaggacacacaagaa

SEQ ID NO: 1947675 - RNA, 19 nt, Homo sapiens
  misc_RNA (1)...(19): siRNA sense strand
ggaaccgcaucgacuacgu

SEQ ID NO: 1947676 - RNA, 19 nt, Homo sapiens
  misc_RNA (1)...(19): siRNA sense strand
ggaacuugaagagaacauu

SEQ ID NO: 1947677 - RNA, 19 nt, Homo sapiens
  misc_RNA (1)...(19): siRNA sense strand
ggacacacaagaaaaugaa

SEQ ID NO: 1947678 - RNA, 19 nt, Homo sapiens
  misc_RNA (1)...(19): siRNA sense strand
aauagcacgucccaagcuu

SEQ ID NO: 1947679 - RNA, 19 nt, Homo sapiens
  misc_RNA (1)...(19): siRNA sense strand
uagcguuguuggaauucaa

SEQ ID NO: 1947680 - RNA, 19 nt, Homo sapiens
  misc_RNA (1)...(19): siRNA sense strand
ugaagucagagucuccaaa

SEQ ID NO: 1947681 - RNA, 19 nt, Homo sapiens
  misc_RNA (1)...(19): siRNA sense strand
aaccaggacacacaagaaa

SEQ ID NO: 1947682 - RNA, 19 nt, Homo sapiens
  misc_RNA (1)...(19): siRNA sense strand
ccuguugagaugcuuuaua

SEQ ID NO: 1947683 - RNA, 19 nt, Homo sapiens
  misc_RNA (1)...(19): siRNA sense strand
gugaagaauuugcauuacc

SEQ ID NO: 1947684 - RNA, 19 nt, Homo sapiens
  misc_RNA (1)...(19): siRNA sense strand
uggauagcguuguuggaau

SEQ ID NO: 1947685 - RNA, 19 nt, Homo sapiens
  misc_RNA (1)...(19): siRNA sense strand
cuuuauagccaguguaaca

SEQ ID NO: 1947686 - RNA, 19 nt, Homo sapiens
  misc_RNA (1)...(19): siRNA sense strand
uauaggcagagcaauguug

SEQ ID NO: 1947687 - RNA, 19 nt, Homo sapiens
  misc_RNA (1)...(19): siRNA sense strand
gaugcuuuauagccagugu

SEQ ID NO: 1947688 - RNA, 19 nt, Homo sapiens
  misc_RNA (1)...(19): siRNA sense strand
uaagugcugugaccuuuuc

SEQ ID NO: 1947689 - RNA, 19 nt, Homo sapiens
  misc_RNA (1)...(19): siRNA sense strand
ccaagggacaucuuuuaaa

SEQ ID NO: 1947690 - RNA, 19 nt, Homo sapiens
  misc_RNA (1)...(19): siRNA sense strand
gcaaagaccuggaccuaau

SEQ ID NO: 1947691 - RNA, 19 nt, Homo sapiens
  misc_RNA (1)...(19): siRNA sense strand
ccaccaacgucaccuguua

SEQ ID NO: 1947692 - RNA, 19 nt, Homo sapiens
  misc_RNA (1)...(19): siRNA sense strand
ggaagaacguggagcugaa

SEQ ID NO: 1947693 - RNA, 19 nt, Homo sapiens
  misc_RNA (1)...(19): siRNA sense strand
ccaauaaucccaucucuga

SEQ ID NO: 1947694 - RNA, 19 nt, Homo sapiens
  misc_RNA (1)...(19): siRNA sense strand
gguccucacugaaguugua

SEQ ID NO: 1947695 - RNA, 19 nt, Homo sapiens
  misc_RNA (1)...(19): siRNA sense strand
caacagaggcagaauuuca

SEQ ID NO: 1947696 - RNA, 19 nt, Homo sapiens
  misc_RNA (1)...(19): siRNA sense strand
cuaccuggcugcccuguaa

SEQ ID NO: 1947697 - RNA, 19 nt, Homo sapiens
  misc_RNA (1)...(19): siRNA sense strand
ucacugaaguuguaccuau

SEQ ID NO: 1947698 - RNA, 19 nt, Homo sapiens
  misc_RNA (1)...(19): siRNA sense strand
gaacguggagcugaaguuu

SEQ ID NO: 1947699 - RNA, 19 nt, Homo sapiens
  misc_RNA (1)...(19): siRNA sense strand
gagaugugguucuguguuc

SEQ ID NO: 1947700 - RNA, 19 nt, Homo sapiens
  misc_RNA (1)...(19): siRNA sense strand
ggaggaggcaggcaucaaa

SEQ ID NO: 1947701 - RNA, 19 nt, Homo sapiens
  misc_RNA (1)...(19): siRNA sense strand
gaacccagaagaaaucaga

SEQ ID NO: 1947702 - RNA, 19 nt, Homo sapiens
  misc_RNA (1)...(19): siRNA sense strand
ccacagaccaggaagaaau

SEQ ID NO: 1947703 - RNA, 19 nt, Homo sapiens
  misc_RNA (1)...(19): siRNA sense strand
caagaacccagaagaaauc

SEQ ID NO: 1947704 - RNA, 19 nt, Homo sapiens
  misc_RNA (1)...(19): siRNA sense strand
ccauguggcucuuccaaca

SEQ ID NO: 1947705 - RNA, 19 nt, Homo sapiens
  misc_RNA (1)...(19): siRNA sense strand
ccaagaacccagaagaaau

SEQ ID NO: 1947706 - RNA, 19 nt, Homo sapiens
  misc_RNA (1)...(19): siRNA sense strand
caaguacgacuaccucaug

SEQ ID NO: 1947707 - RNA, 19 nt, Homo sapiens
  misc_RNA (1)...(19): siRNA sense strand
caacgucaccuguuacuac

SEQ ID NO: 1947708 - RNA, 19 nt, Homo sapiens
  misc_RNA (1)...(19): siRNA sense strand
ccacggacgaggcaacuuu

SEQ ID NO: 1947709 - RNA, 19 nt, Homo sapiens
  misc_RNA (1)...(19): siRNA sense strand
gauggcaacuucagcaacu

SEQ ID NO: 1947710 - RNA, 19 nt, Homo sapiens
  misc_RNA (1)...(19): siRNA sense strand
ggacgaggcaacuuuccaa

SEQ ID NO: 1947711 - RNA, 19 nt, Homo sapiens
  misc_RNA (1)...(19): siRNA sense strand
gaagaagagagaagcaagu

SEQ ID NO: 1947712 - RNA, 19 nt, Homo sapiens
  misc_RNA (1)...(19): siRNA sense strand
gaaguuugucgacuccauu

SEQ ID NO: 1947713 - RNA, 19 nt, Homo sapiens
  misc_RNA (1)...(19): siRNA sense strand
gcagaauuucagcugguua

SEQ ID NO: 1947714 - RNA, 19 nt, Homo sapiens
  misc_RNA (1)...(19): siRNA sense strand
guacagcaaccuucuugug

SEQ ID NO: 1947715 - RNA, 19 nt, Homo sapiens
  misc_RNA (1)...(19): siRNA sense strand
gaggagagcagcuguacca

SEQ ID NO: 1947716 - RNA, 19 nt, Homo sapiens
  misc_RNA (1)...(19): siRNA sense strand
aauuucagcugguuagaga

SEQ ID NO: 1947717 - RNA, 19 nt, Homo sapiens
  misc_RNA (1)...(19): siRNA sense strand
gcagaggagagcagcugua

SEQ ID NO: 1947718 - RNA, 19 nt, Homo sapiens
  misc_RNA (1)...(19): siRNA sense strand
gaacgagagcaccgugugu

SEQ ID NO: 1947719 - RNA, 19 nt, Homo sapiens
  misc_RNA (1)...(19): siRNA sense strand
guuggagacuuaccuucaa

SEQ ID NO: 1947720 - RNA, 19 nt, Homo sapiens
  misc_RNA (1)...(19): siRNA sense strand
cgucagugauggcaacuuc

SEQ ID NO: 1947721 - RNA, 19 nt, Homo sapiens
  misc_RNA (1)...(19): siRNA sense strand
guucuguguucccuucuga

SEQ ID NO: 1947722 - RNA, 19 nt, Homo sapiens
  misc_RNA (1)...(19): siRNA sense strand
gaagaaaucaaaacucuag

SEQ ID NO: 1947723 - RNA, 19 nt, Homo sapiens
  misc_RNA (1)...(19): siRNA sense strand
gaggcaacuuuccaaccuu

SEQ ID NO: 1947724 - RNA, 19 nt, Homo sapiens
  misc_RNA (1)...(19): siRNA sense strand
ucaccuacagccagccuua

SEQ ID NO: 1947725 - RNA, 19 nt, Homo sapiens
  misc_RNA (1)...(19): siRNA sense strand
uucuaugacuguuccaaua

SEQ ID NO: 1947726 - RNA, 19 nt, Homo sapiens
  misc_RNA (1)...(19): siRNA sense strand
cagaagcuagugaagguuu

SEQ ID NO: 1947727 - RNA, 19 nt, Homo sapiens
  misc_RNA (1)...(19): siRNA sense strand
ggaggcaggcaucaaagug

SEQ ID NO: 1947728 - RNA, 19 nt, Homo sapiens
  misc_RNA (1)...(19): siRNA sense strand
ggaccuaaucuuccaugug

SEQ ID NO: 1947729 - RNA, 19 nt, Homo sapiens
  misc_RNA (1)...(19): siRNA sense strand
ggaggcauaugugcagaag

SEQ ID NO: 1947730 - RNA, 19 nt, Homo sapiens
  misc_RNA (1)...(19): siRNA sense strand
agacugaucgccaccaaga

SEQ ID NO: 1947731 - RNA, 19 nt, Homo sapiens
  misc_RNA (1)...(19): siRNA sense strand
gcaacuucagcaacuacua

SEQ ID NO: 1947732 - RNA, 19 nt, Homo sapiens
  misc_RNA (1)...(19): siRNA sense strand
ccaccaagaacccagaaga

SEQ ID NO: 1947733 - RNA, 19 nt, Homo sapiens
  misc_RNA (1)...(19): siRNA sense strand
gguuagagaugugguucug

SEQ ID NO: 1947734 - RNA, 19 nt, Homo sapiens
  misc_RNA (1)...(19): siRNA sense strand
guacgacuaccucaugauc

SEQ ID NO: 1947735 - RNA, 19 nt, Homo sapiens
  misc_RNA (1)...(19): siRNA sense strand
ucuaugacuguuccaauaa

SEQ ID NO: 1947736 - RNA, 19 nt, Homo sapiens
  misc_RNA (1)...(19): siRNA sense strand
agauaacucugaaggacau

SEQ ID NO: 1947737 - RNA, 19 nt, Homo sapiens
  misc_RNA (1)...(19): siRNA sense strand
acguggagcugaaguuugu

SEQ ID NO: 1947738 - RNA, 19 nt, Homo sapiens
  misc_RNA (1)...(19): siRNA sense strand
uccaacagaggcagaauuu

SEQ ID NO: 1947739 - RNA, 19 nt, Homo sapiens
  misc_RNA (1)...(19): siRNA sense strand
ugaucucccucuccaacaa

SEQ ID NO: 1947740 - RNA, 19 nt, Homo sapiens
  misc_RNA (1)...(19): siRNA sense strand
gagaagcaaguacgacuac

SEQ ID NO: 1947741 - RNA, 19 nt, Homo sapiens
  misc_RNA (1)...(19): siRNA sense strand
aagaagagagaagcaagua

SEQ ID NO: 1947742 - RNA, 19 nt, Homo sapiens
  misc_RNA (1)...(19): siRNA sense strand
caccaagaacccagaagaa

SEQ ID NO: 1947743 - RNA, 19 nt, Homo sapiens
  misc_RNA (1)...(19): siRNA sense strand
caacugggaucagguuagc

SEQ ID NO: 1947744 - RNA, 19 nt, Homo sapiens
  misc_RNA (1)...(19): siRNA sense strand
ugcagaagcuagugaaggu

SEQ ID NO: 1947745 - RNA, 19 nt, Homo sapiens
  misc_RNA (1)...(19): siRNA sense strand
gcucaacugggaucagguu

SEQ ID NO: 1947746 - RNA, 19 nt, Homo sapiens
  misc_RNA (1)...(19): siRNA sense strand
cuaugacuguuccaauaau

SEQ ID NO: 1947747 - RNA, 19 nt, Homo sapiens
  misc_RNA (1)...(19): siRNA sense strand
ggcagaauuucagcugguu

SEQ ID NO: 1947748 - RNA, 19 nt, Homo sapiens
  misc_RNA (1)...(19): siRNA sense strand
cgaggcaacuuuccaaccu

SEQ ID NO: 1947749 - RNA, 19 nt, Homo sapiens
  misc_RNA (1)...(19): siRNA sense strand
ccaacaagaacgggaagaa

SEQ ID NO: 1947750 - RNA, 19 nt, Homo sapiens
  misc_RNA (1)...(19): siRNA sense strand
gcaaguacgacuaccucau

SEQ ID NO: 1947751 - RNA, 19 nt, Homo sapiens
  misc_RNA (1)...(19): siRNA sense strand
gcccacagaccaggaagaa

SEQ ID NO: 1947752 - RNA, 19 nt, Homo sapiens
  misc_RNA (1)...(19): siRNA sense strand
caacuucagcaacuacuac

SEQ ID NO: 1947753 - RNA, 19 nt, Homo sapiens
  misc_RNA (1)...(19): siRNA sense strand
caaagaccuggaccuaauc

SEQ ID NO: 1947754 - RNA, 19 nt, Homo sapiens
  misc_RNA (1)...(19): siRNA sense strand
cgacuucccggacauccuu

SEQ ID NO: 1947755 - RNA, 19 nt, Homo sapiens
  misc_RNA (1)...(19): siRNA sense strand
gcuccagguucuucaucga

SEQ ID NO: 1947756 - RNA, 19 nt, Homo sapiens
  misc_RNA (1)...(19): siRNA sense strand
agaccaggaagaaaucaaa

SEQ ID NO: 1947757 - RNA, 19 nt, Homo sapiens
  misc_RNA (1)...(19): siRNA sense strand
ugaggaagcuuuugaccau

SEQ ID NO: 1947758 - RNA, 19 nt, Homo sapiens
  misc_RNA (1)...(19): siRNA sense strand
caaaaucaguccagucacu

SEQ ID NO: 1947759 - RNA, 19 nt, Homo sapiens
  misc_RNA (1)...(19): siRNA sense strand
gagcaccgugugucucaug

SEQ ID NO: 1947760 - RNA, 19 nt, Homo sapiens
  misc_RNA (1)...(19): siRNA sense strand
gggauugcauguccuucag

SEQ ID NO: 1947761 - RNA, 19 nt, Homo sapiens
  misc_RNA (1)...(19): siRNA sense strand
ccuuggagauaacucugaa

SEQ ID NO: 1947762 - RNA, 19 nt, Homo sapiens
  misc_RNA (1)...(19): siRNA sense strand
gcacgacguccggcugaau

SEQ ID NO: 1947763 - RNA, 19 nt, Homo sapiens
  misc_RNA (1)...(19): siRNA sense strand
aaguacgacuaccucauga

SEQ ID NO: 1947764 - RNA, 19 nt, Homo sapiens
  misc_RNA (1)...(19): siRNA sense strand
agacuuaccuucaaaacca

SEQ ID NO: 1947765 - RNA, 19 nt, Homo sapiens
  misc_RNA (1)...(19): siRNA sense strand
uaugacuguuccaauaauc

SEQ ID NO: 1947766 - RNA, 19 nt, Homo sapiens
  misc_RNA (1)...(19): siRNA sense strand
ccauucggcgucaguuuga

SEQ ID NO: 1947767 - RNA, 19 nt, Homo sapiens
  misc_RNA (1)...(19): siRNA sense strand
gaagaacguggagcugaag

SEQ ID NO: 1947768 - RNA, 19 nt, Homo sapiens
  misc_RNA (1)...(19): siRNA sense strand
cagagggugugaacaagcu

SEQ ID NO: 1947769 - RNA, 19 nt, Homo sapiens
  misc_RNA (1)...(19): siRNA sense strand
uuggagacuuaccuucaaa

SEQ ID NO: 1947770 - RNA, 19 nt, Homo sapiens
  misc_RNA (1)...(19): siRNA sense strand
agaagcuagugaagguuug

SEQ ID NO: 1947771 - RNA, 19 nt, Homo sapiens
  misc_RNA (1)...(19): siRNA sense strand
aggcauaugugcagaagcu

SEQ ID NO: 1947772 - RNA, 19 nt, Homo sapiens
  misc_RNA (1)...(19): siRNA sense strand
ugaaguuugucgacuccau

SEQ ID NO: 1947773 - RNA, 19 nt, Homo sapiens
  misc_RNA (1)...(19): siRNA sense strand
agaccuggaccuaaucuuc

SEQ ID NO: 1947774 - RNA, 19 nt, Homo sapiens
  misc_RNA (1)...(19): siRNA sense strand
ucccaucucugagcacuuc

SEQ ID NO: 1947775 - RNA, 19 nt, Homo sapiens
  misc_RNA (1)...(19): siRNA sense strand
gccagagggugugaacaag

SEQ ID NO: 1947776 - RNA, 19 nt, Homo sapiens
  misc_RNA (1)...(19): siRNA sense strand
agagaagcaaguacgacua

SEQ ID NO: 1947777 - RNA, 19 nt, Homo sapiens
  misc_RNA (1)...(19): siRNA sense strand
cugcaaagaccuggaccua

SEQ ID NO: 1947778 - RNA, 19 nt, Homo sapiens
  misc_RNA (1)...(19): siRNA sense strand
caaguacagcaaccuucuu

SEQ ID NO: 1947779 - RNA, 19 nt, Homo sapiens
  misc_RNA (1)...(19): siRNA sense strand
caacaagaacgggaagaac

SEQ ID NO: 1947780 - RNA, 19 nt, Homo sapiens
  misc_RNA (1)...(19): siRNA sense strand
gaauuucagcugguuagag

SEQ ID NO: 1947781 - RNA, 19 nt, Homo sapiens
  misc_RNA (1)...(19): siRNA sense strand
gcagcuguaccagggauug

SEQ ID NO: 1947782 - RNA, 19 nt, Homo sapiens
  misc_RNA (1)...(19): siRNA sense strand
accaagaacccagaagaaa

SEQ ID NO: 1947783 - RNA, 19 nt, Homo sapiens
  misc_RNA (1)...(19): siRNA sense strand
acagacugaucgccaccaa

SEQ ID NO: 1947784 - RNA, 19 nt, Homo sapiens
  misc_RNA (1)...(19): siRNA sense strand
ugaacaagcucaaaaucag

SEQ ID NO: 1947785 - RNA, 19 nt, Homo sapiens
  misc_RNA (1)...(19): siRNA sense strand
gcagaagcuagugaagguu

SEQ ID NO: 1947786 - RNA, 19 nt, Homo sapiens
  misc_RNA (1)...(19): siRNA sense strand
ucccggacauccuugaaca

SEQ ID NO: 1947787 - RNA, 19 nt, Homo sapiens
  misc_RNA (1)...(19): siRNA sense strand
ccagguucuucaucgacuu

SEQ ID NO: 1947788 - RNA, 19 nt, Homo sapiens
  misc_RNA (1)...(19): siRNA sense strand
ggacuuugaggaagcuuuu

SEQ ID NO: 1947789 - RNA, 19 nt, Homo sapiens
  misc_RNA (1)...(19): siRNA sense strand
ccaaggagcuggucucgaa

SEQ ID NO: 1947790 - RNA, 19 nt, Homo sapiens
  misc_RNA (1)...(19): siRNA sense strand
gaacaagaauucccguuag

SEQ ID NO: 1947791 - RNA, 19 nt, Homo sapiens
  misc_RNA (1)...(19): siRNA sense strand
gcagagagcacaaacugua

SEQ ID NO: 1947792 - RNA, 19 nt, Homo sapiens
  misc_RNA (1)...(19): siRNA sense strand
uggcaaagcugcuaaagug

SEQ ID NO: 1947793 - RNA, 19 nt, Homo sapiens
  misc_RNA (1)...(19): siRNA sense strand
gaucccaucuuucuugaga

SEQ ID NO: 1947794 - RNA, 19 nt, Homo sapiens
  misc_RNA (1)...(19): siRNA sense strand
gagcuggucucgaaagcaa

SEQ ID NO: 1947795 - RNA, 19 nt, Homo sapiens
  misc_RNA (1)...(19): siRNA sense strand
gcagagaguggucuuagaa

SEQ ID NO: 1947796 - RNA, 19 nt, Homo sapiens
  misc_RNA (1)...(19): siRNA sense strand
gaaagcaacccacaugaag

SEQ ID NO: 1947797 - RNA, 19 nt, Homo sapiens
  misc_RNA (1)...(19): siRNA sense strand
gggaagagcuggagaugcu

SEQ ID NO: 1947798 - RNA, 19 nt, Homo sapiens
  misc_RNA (1)...(19): siRNA sense strand
gaacagugcagucaacaca

SEQ ID NO: 1947799 - RNA, 19 nt, Homo sapiens
  misc_RNA (1)...(19): siRNA sense strand
ccagagagcaucaaaggaa

SEQ ID NO: 1947800 - RNA, 19 nt, Homo sapiens
  misc_RNA (1)...(19): siRNA sense strand
gaagggaagcagaugguuu

SEQ ID NO: 1947801 - RNA, 19 nt, Homo sapiens
  misc_RNA (1)...(19): siRNA sense strand
caacaucugcaaagaagaa

SEQ ID NO: 1947802 - RNA, 19 nt, Homo sapiens
  misc_RNA (1)...(19): siRNA sense strand
gcgcaucacuaaugagcuu

SEQ ID NO: 1947803 - RNA, 19 nt, Homo sapiens
  misc_RNA (1)...(19): siRNA sense strand
ucacugggcgcaucacuaa

SEQ ID NO: 1947804 - RNA, 19 nt, Homo sapiens
  misc_RNA (1)...(19): siRNA sense strand
gaguggagguauuggaaga

SEQ ID NO: 1947805 - RNA, 19 nt, Homo sapiens
  misc_RNA (1)...(19): siRNA sense strand
cagagagcaucaaaggaaa

SEQ ID NO: 1947806 - RNA, 19 nt, Homo sapiens
  misc_RNA (1)...(19): siRNA sense strand
gaugagagauccccagaga

SEQ ID NO: 1947807 - RNA, 19 nt, Homo sapiens
  misc_RNA (1)...(19): siRNA sense strand
gaacaagauauuccaacau

SEQ ID NO: 1947808 - RNA, 19 nt, Homo sapiens
  misc_RNA (1)...(19): siRNA sense strand
ggagguauuggaagagaaa

SEQ ID NO: 1947809 - RNA, 19 nt, Homo sapiens
  misc_RNA (1)...(19): siRNA sense strand
ucagagccuugcaauaugu

SEQ ID NO: 1947810 - RNA, 19 nt, Homo sapiens
  misc_RNA (1)...(19): siRNA sense strand
cgaaagcaacccacaugaa

SEQ ID NO: 1947811 - RNA, 19 nt, Homo sapiens
  misc_RNA (1)...(19): siRNA sense strand
ggaugucauuccucucuca

SEQ ID NO: 1947812 - RNA, 19 nt, Homo sapiens
  misc_RNA (1)...(19): siRNA sense strand
gagagcacaaacuguagua

SEQ ID NO: 1947813 - RNA, 19 nt, Homo sapiens
  misc_RNA (1)...(19): siRNA sense strand
aacaagauauuccaacauc

SEQ ID NO: 1947814 - RNA, 19 nt, Homo sapiens
  misc_RNA (1)...(19): siRNA sense strand
agucagagccuugcaauau

SEQ ID NO: 1947815 - RNA, 19 nt, Homo sapiens
  misc_RNA (1)...(19): siRNA sense strand
gucagagccuugcaauaug

SEQ ID NO: 1947816 - RNA, 19 nt, Homo sapiens
  misc_RNA (1)...(19): siRNA sense strand
ggaauggcaaagcugcuaa

SEQ ID NO: 1947817 - RNA, 19 nt, Homo sapiens
  misc_RNA (1)...(19): siRNA sense strand
ggaagccaggaacaagaua

SEQ ID NO: 1947818 - RNA, 19 nt, Homo sapiens
  misc_RNA (1)...(19): siRNA sense strand
guauggcccuggcacuguu

SEQ ID NO: 1947819 - RNA, 19 nt, Homo sapiens
  misc_RNA (1)...(19): siRNA sense strand
cagaagucauggccagaga

SEQ ID NO: 1947820 - RNA, 19 nt, Homo sapiens
  misc_RNA (1)...(19): siRNA sense strand
gagaugcugccaacacaug

SEQ ID NO: 1947821 - RNA, 19 nt, Homo sapiens
  misc_RNA (1)...(19): siRNA sense strand
uggagaggcugcacaaguc

SEQ ID NO: 1947822 - RNA, 19 nt, Homo sapiens
  misc_RNA (1)...(19): siRNA sense strand
gaagccaggaacaagauau

SEQ ID NO: 1947823 - RNA, 19 nt, Homo sapiens
  misc_RNA (1)...(19): siRNA sense strand
gaauggcaaagcugcuaaa

SEQ ID NO: 1947824 - RNA, 19 nt, Homo sapiens
  misc_RNA (1)...(19): siRNA sense strand
gagcacaaacuguaguagu

SEQ ID NO: 1947825 - RNA, 19 nt, Homo sapiens
  misc_RNA (1)...(19): siRNA sense strand
cagcagagagcacaaacug

SEQ ID NO: 1947826 - RNA, 19 nt, Homo sapiens
  misc_RNA (1)...(19): siRNA sense strand
acagugcagucaacacaga

SEQ ID NO: 1947827 - RNA, 19 nt, Homo sapiens
  misc_RNA (1)...(19): siRNA sense strand
gcaagaagggaagcagaug

SEQ ID NO: 1947828 - RNA, 19 nt, Homo sapiens
  misc_RNA (1)...(19): siRNA sense strand
ccuggaagguccuaaagag

SEQ ID NO: 1947829 - RNA, 19 nt, Homo sapiens
  misc_RNA (1)...(19): siRNA sense strand
caacacauggguccuagca

SEQ ID NO: 1947830 - RNA, 19 nt, Homo sapiens
  misc_RNA (1)...(19): siRNA sense strand
ucuguaggauacucacuga

SEQ ID NO: 1947831 - RNA, 19 nt, Homo sapiens
  misc_RNA (1)...(19): siRNA sense strand
uccaacaucugcaaagaag

SEQ ID NO: 1947832 - RNA, 19 nt, Homo sapiens
  misc_RNA (1)...(19): siRNA sense strand
gauauuccaacaucugcaa

SEQ ID NO: 1947833 - RNA, 19 nt, Homo sapiens
  misc_RNA (1)...(19): siRNA sense strand
ggugaacagugcagucaac

SEQ ID NO: 1947834 - RNA, 19 nt, Homo sapiens
  misc_RNA (1)...(19): siRNA sense strand
gcagcagagaguggucuua

SEQ ID NO: 1947835 - RNA, 19 nt, Homo sapiens
  misc_RNA (1)...(19): siRNA sense strand
ggagucagagccuugcaau

SEQ ID NO: 1947836 - RNA, 19 nt, Homo sapiens
  misc_RNA (1)...(19): siRNA sense strand
cagccugaguggagguauu

SEQ ID NO: 1947837 - RNA, 19 nt, Homo sapiens
  misc_RNA (1)...(19): siRNA sense strand
cuuagaagaggaugucauu

SEQ ID NO: 1947838 - RNA, 19 nt, Homo sapiens
  misc_RNA (1)...(19): siRNA sense strand
gagucagagccuugcaaua

SEQ ID NO: 1947839 - RNA, 19 nt, Homo sapiens
  misc_RNA (1)...(19): siRNA sense strand
cccagagacugauggugaa

SEQ ID NO: 1947840 - RNA, 19 nt, Homo sapiens
  misc_RNA (1)...(19): siRNA sense strand
gggaagcugaacacagaaa

SEQ ID NO: 1947841 - RNA, 19 nt, Homo sapiens
  misc_RNA (1)...(19): siRNA sense strand
guggagguauuggaagaga

SEQ ID NO: 1947842 - RNA, 19 nt, Homo sapiens
  misc_RNA (1)...(19): siRNA sense strand
caauaugucaguggaacaa

SEQ ID NO: 1947843 - RNA, 19 nt, Homo sapiens
  misc_RNA (1)...(19): siRNA sense strand
agcacaaacuguaguagug

SEQ ID NO: 1947844 - RNA, 19 nt, Homo sapiens
  misc_RNA (1)...(19): siRNA sense strand
uggagaugcugccaacaca

SEQ ID NO: 1947845 - RNA, 19 nt, Homo sapiens
  misc_RNA (1)...(19): siRNA sense strand
ucacuguucauuucuggaa

SEQ ID NO: 1947846 - RNA, 19 nt, Homo sapiens
  misc_RNA (1)...(19): siRNA sense strand
aaacagcagagagcacaaa

SEQ ID NO: 1947847 - RNA, 19 nt, Homo sapiens
  misc_RNA (1)...(19): siRNA sense strand
gggaagccaggaacaagau

SEQ ID NO: 1947848 - RNA, 19 nt, Homo sapiens
  misc_RNA (1)...(19): siRNA sense strand
uaaagaggagaaaguagca

SEQ ID NO: 1947849 - RNA, 19 nt, Homo sapiens
  misc_RNA (1)...(19): siRNA sense strand
uaaccaggaccucagaagu

SEQ ID NO: 1947850 - RNA, 19 nt, Homo sapiens
  misc_RNA (1)...(19): siRNA sense strand
guggagaggcugcacaagu

SEQ ID NO: 1947851 - RNA, 19 nt, Homo sapiens
  misc_RNA (1)...(19): siRNA sense strand
gcaaagaagaaaaggauca

SEQ ID NO: 1947852 - RNA, 19 nt, Homo sapiens
  misc_RNA (1)...(19): siRNA sense strand
ggguccugcuuguggaauu

SEQ ID NO: 1947853 - RNA, 19 nt, Homo sapiens
  misc_RNA (1)...(19): siRNA sense strand
cacagaaagcggagucaga

SEQ ID NO: 1947854 - RNA, 19 nt, Homo sapiens
  misc_RNA (1)...(19): siRNA sense strand
gcaauaugucaguggaaca

SEQ ID NO: 1947855 - RNA, 19 nt, Homo sapiens
  misc_RNA (1)...(19): siRNA sense strand
gaagucauggccagagaac

SEQ ID NO: 1947856 - RNA, 19 nt, Homo sapiens
  misc_RNA (1)...(19): siRNA sense strand
acgacuugguggccucuaa

SEQ ID NO: 1947857 - RNA, 19 nt, Homo sapiens
  misc_RNA (1)...(19): siRNA sense strand
gguccugcuuguggaauuc

SEQ ID NO: 1947858 - RNA, 19 nt, Homo sapiens
  misc_RNA (1)...(19): siRNA sense strand
agucauggccagagaacuu

SEQ ID NO: 1947859 - RNA, 19 nt, Homo sapiens
  misc_RNA (1)...(19): siRNA sense strand
gucaguggaacaagaauuc

SEQ ID NO: 1947860 - RNA, 19 nt, Homo sapiens
  misc_RNA (1)...(19): siRNA sense strand
auaugucaguggaacaaga

SEQ ID NO: 1947861 - RNA, 19 nt, Homo sapiens
  misc_RNA (1)...(19): siRNA sense strand
ccaggaugccuuugcucaa

SEQ ID NO: 1947862 - RNA, 19 nt, Homo sapiens
  misc_RNA (1)...(19): siRNA sense strand
cugggcgcaucacuaauga

SEQ ID NO: 1947863 - RNA, 19 nt, Homo sapiens
  misc_RNA (1)...(19): siRNA sense strand
ggaagcugaacacagaaag

SEQ ID NO: 1947864 - RNA, 19 nt, Homo sapiens
  misc_RNA (1)...(19): siRNA sense strand
ccucauccuccuccuguga

SEQ ID NO: 1947865 - RNA, 19 nt, Homo sapiens
  misc_RNA (1)...(19): siRNA sense strand
gaggagaaaguagcaaugc

SEQ ID NO: 1947866 - RNA, 19 nt, Homo sapiens
  misc_RNA (1)...(19): siRNA sense strand
gagaugaguuggaagauau

SEQ ID NO: 1947867 - RNA, 19 nt, Homo sapiens
  misc_RNA (1)...(19): siRNA sense strand
ggagaugaguuggaagaua

SEQ ID NO: 1947868 - RNA, 19 nt, Homo sapiens
  misc_RNA (1)...(19): siRNA sense strand
ggaggaggaugaagccauu

SEQ ID NO: 1947869 - RNA, 19 nt, Homo sapiens
  misc_RNA (1)...(19): siRNA sense strand
ggucaacuguccagagaaa

SEQ ID NO: 1947870 - RNA, 19 nt, Homo sapiens
  misc_RNA (1)...(19): siRNA sense strand
gcccauauuucuucuuuga

SEQ ID NO: 1947871 - RNA, 19 nt, Homo sapiens
  misc_RNA (1)...(19): siRNA sense strand
ugacggagcccaugaagaa

SEQ ID NO: 1947872 - RNA, 19 nt, Homo sapiens
  misc_RNA (1)...(19): siRNA sense strand
gaagaugauugagauguuc

SEQ ID NO: 1947873 - RNA, 19 nt, Homo sapiens
  misc_RNA (1)...(19): siRNA sense strand
ugccaaagcuggagucguu

SEQ ID NO: 1947874 - RNA, 19 nt, Homo sapiens
  misc_RNA (1)...(19): siRNA sense strand
ggaaguccuuggccuaaag

SEQ ID NO: 1947875 - RNA, 19 nt, Homo sapiens
  misc_RNA (1)...(19): siRNA sense strand
gaugggagccucaacacuu

SEQ ID NO: 1947876 - RNA, 19 nt, Homo sapiens
  misc_RNA (1)...(19): siRNA sense strand
ggaugaagccauugagguu

SEQ ID NO: 1947877 - RNA, 19 nt, Homo sapiens
  misc_RNA (1)...(19): siRNA sense strand
gugcccauauuucuucuuu

SEQ ID NO: 1947878 - RNA, 19 nt, Homo sapiens
  misc_RNA (1)...(19): siRNA sense strand
agaagaugauugagauguu

SEQ ID NO: 1947879 - RNA, 19 nt, Homo sapiens
  misc_RNA (1)...(19): siRNA sense strand
gguaccagcuacaaguaug

SEQ ID NO: 1947880 - RNA, 19 nt, Homo sapiens
  misc_RNA (1)...(19): siRNA sense strand
guacaucugcaccuucuug

SEQ ID NO: 1947881 - RNA, 19 nt, Homo sapiens
  misc_RNA (1)...(19): siRNA sense strand
gaggagaugaguuggaaga

SEQ ID NO: 1947882 - RNA, 19 nt, Homo sapiens
  misc_RNA (1)...(19): siRNA sense strand
ugaguuggaagauauguuu

SEQ ID NO: 1947883 - RNA, 19 nt, Homo sapiens
  misc_RNA (1)...(19): siRNA sense strand
cagagaacgugcagacgau

SEQ ID NO: 1947884 - RNA, 19 nt, Homo sapiens
  misc_RNA (1)...(19): siRNA sense strand
ccuaaagccuugguucuca

SEQ ID NO: 1947885 - RNA, 19 nt, Homo sapiens
  misc_RNA (1)...(19): siRNA sense strand
guagcugccucuaugaucu

SEQ ID NO: 1947886 - RNA, 19 nt, Homo sapiens
  misc_RNA (1)...(19): siRNA sense strand
cccagaagaugauugagau

SEQ ID NO: 1947887 - RNA, 19 nt, Homo sapiens
  misc_RNA (1)...(19): siRNA sense strand
gcaccauccuugucuacag

SEQ ID NO: 1947888 - RNA, 19 nt, Homo sapiens
  misc_RNA (1)...(19): siRNA sense strand
ccagagaaagugauuaucu

SEQ ID NO: 1947889 - RNA, 19 nt, Homo sapiens
  misc_RNA (1)...(19): siRNA sense strand
ggaaaugucacugccaaag

SEQ ID NO: 1947890 - RNA, 19 nt, Homo sapiens
  misc_RNA (1)...(19): siRNA sense strand
cgacaaaagccacgaguuu

SEQ ID NO: 1947891 - RNA, 19 nt, Homo sapiens
  misc_RNA (1)...(19): siRNA sense strand
cucaaugucucccagaaga

SEQ ID NO: 1947892 - RNA, 19 nt, Homo sapiens
  misc_RNA (1)...(19): siRNA sense strand
gaaccaucccuguacaucu

SEQ ID NO: 1947893 - RNA, 19 nt, Homo sapiens
  misc_RNA (1)...(19): siRNA sense strand
aaaccaacgcccucaaugu

SEQ ID NO: 1947894 - RNA, 19 nt, Homo sapiens
  misc_RNA (1)...(19): siRNA sense strand
gcacaacugcauggcgaaa

SEQ ID NO: 1947895 - RNA, 19 nt, Homo sapiens
  misc_RNA (1)...(19): siRNA sense strand
cuaaagccuugguucucaa

SEQ ID NO: 1947896 - RNA, 19 nt, Homo sapiens
  misc_RNA (1)...(19): siRNA sense strand
ggaccugucagaggaaaug

SEQ ID NO: 1947897 - RNA, 19 nt, Homo sapiens
  misc_RNA (1)...(19): siRNA sense strand
ggagaaggaggaggagaug

SEQ ID NO: 1947898 - RNA, 19 nt, Homo sapiens
  misc_RNA (1)...(19): siRNA sense strand
ggacaaaacacaagaucga

SEQ ID NO: 1947899 - RNA, 19 nt, Homo sapiens
  misc_RNA (1)...(19): siRNA sense strand
gaaaugucacugccaaagc

SEQ ID NO: 1947900 - RNA, 19 nt, Homo sapiens
  misc_RNA (1)...(19): siRNA sense strand
aggaggagaugaguuggaa

SEQ ID NO: 1947901 - RNA, 19 nt, Homo sapiens
  misc_RNA (1)...(19): siRNA sense strand
gaugaugggagccucaaca

SEQ ID NO: 1947902 - RNA, 19 nt, Homo sapiens
  misc_RNA (1)...(19): siRNA sense strand
ccagugcccauauuucuuc

SEQ ID NO: 1947903 - RNA, 19 nt, Homo sapiens
  misc_RNA (1)...(19): siRNA sense strand
gagacggccuccuguucca

SEQ ID NO: 1947904 - RNA, 19 nt, Homo sapiens
  misc_RNA (1)...(19): siRNA sense strand
caauggcacugaggagaag

SEQ ID NO: 1947905 - RNA, 19 nt, Homo sapiens
  misc_RNA (1)...(19): siRNA sense strand
guaccagcuacaaguauga

SEQ ID NO: 1947906 - RNA, 19 nt, Homo sapiens
  misc_RNA (1)...(19): siRNA sense strand
agauauguuugccuucaug

SEQ ID NO: 1947907 - RNA, 19 nt, Homo sapiens
  misc_RNA (1)...(19): siRNA sense strand
ggacaccaagggucaacug

SEQ ID NO: 1947908 - RNA, 19 nt, Homo sapiens
  misc_RNA (1)...(19): siRNA sense strand
guccagagaaagugauuau

SEQ ID NO: 1947909 - RNA, 19 nt, Homo sapiens
  misc_RNA (1)...(19): siRNA sense strand
gagcuuccggucacagaga

SEQ ID NO: 1947910 - RNA, 19 nt, Homo sapiens
  misc_RNA (1)...(19): siRNA sense strand
aaaugucacugccaaagcu

SEQ ID NO: 1947911 - RNA, 19 nt, Homo sapiens
  misc_RNA (1)...(19): siRNA sense strand
aaccaucccuguacaucug

SEQ ID NO: 1947912 - RNA, 19 nt, Homo sapiens
  misc_RNA (1)...(19): siRNA sense strand
gagaacgugcagacgauuc

SEQ ID NO: 1947913 - RNA, 19 nt, Homo sapiens
  misc_RNA (1)...(19): siRNA sense strand
gaaggaggaggagaugagu

SEQ ID NO: 1947914 - RNA, 19 nt, Homo sapiens
  misc_RNA (1)...(19): siRNA sense strand
agggucaacuguccagaga

SEQ ID NO: 1947915 - RNA, 19 nt, Homo sapiens
  misc_RNA (1)...(19): siRNA sense strand
augaagccauugagguuga

SEQ ID NO: 1947916 - RNA, 19 nt, Homo sapiens
  misc_RNA (1)...(19): siRNA sense strand
cagaagaugauugagaugu

SEQ ID NO: 1947917 - RNA, 19 nt, Homo sapiens
  misc_RNA (1)...(19): siRNA sense strand
acaauggcacugaggagaa

SEQ ID NO: 1947918 - RNA, 19 nt, Homo sapiens
  misc_RNA (1)...(19): siRNA sense strand
caaugucucccagaagaug

SEQ ID NO: 1947919 - RNA, 19 nt, Homo sapiens
  misc_RNA (1)...(19): siRNA sense strand
uaaagccuugguucucaaa

SEQ ID NO: 1947920 - RNA, 19 nt, Homo sapiens
  misc_RNA (1)...(19): siRNA sense strand
gccagagccaugcuuccua

SEQ ID NO: 1947921 - RNA, 19 nt, Homo sapiens
  misc_RNA (1)...(19): siRNA sense strand
gaggaggagaugaguugga

SEQ ID NO: 1947922 - RNA, 19 nt, Homo sapiens
  misc_RNA (1)...(19): siRNA sense strand
gagauguucgugcggacaa

SEQ ID NO: 1947923 - RNA, 19 nt, Homo sapiens
  misc_RNA (1)...(19): siRNA sense strand
gagaaggaggaggagauga

SEQ ID NO: 1947924 - RNA, 19 nt, Homo sapiens
  misc_RNA (1)...(19): siRNA sense strand
gcucuguagcugccucuau

SEQ ID NO: 1947925 - RNA, 19 nt, Homo sapiens
  misc_RNA (1)...(19): siRNA sense strand
cugcauggcgaaacuguug

SEQ ID NO: 1947926 - RNA, 19 nt, Homo sapiens
  misc_RNA (1)...(19): siRNA sense strand
aagaggaggaggaggaaga

SEQ ID NO: 1947927 - RNA, 19 nt, Homo sapiens
  misc_RNA (1)...(19): siRNA sense strand
ucuuugacguuguuuacau

SEQ ID NO: 1947928 - RNA, 19 nt, Homo sapiens
  misc_RNA (1)...(19): siRNA sense strand
caacuguccagagaaagug

SEQ ID NO: 1947929 - RNA, 19 nt, Homo sapiens
  misc_RNA (1)...(19): siRNA sense strand
ucaacuguccagagaaagu

SEQ ID NO: 1947930 - RNA, 19 nt, Homo sapiens
  misc_RNA (1)...(19): siRNA sense strand
acaacugcauggcgaaacu

SEQ ID NO: 1947931 - RNA, 19 nt, Homo sapiens
  misc_RNA (1)...(19): siRNA sense strand
ccaaggguaccagcuacaa

SEQ ID NO: 1947932 - RNA, 19 nt, Homo sapiens
  misc_RNA (1)...(19): siRNA sense strand
aggaggaggagaugaguug

SEQ ID NO: 1947933 - RNA, 19 nt, Homo sapiens
  misc_RNA (1)...(19): siRNA sense strand
ggacgggccugaaagcauu

SEQ ID NO: 1947934 - RNA, 19 nt, Homo sapiens
  misc_RNA (1)...(19): siRNA sense strand
gcacugagagccaucauug

SEQ ID NO: 1947935 - RNA, 19 nt, Homo sapiens
  misc_RNA (1)...(19): siRNA sense strand
aaucaacuauugccacaaa

SEQ ID NO: 1947936 - RNA, 19 nt, Homo sapiens
  misc_RNA (1)...(19): siRNA sense strand
gcaagcgagucaccacguu

SEQ ID NO: 1947937 - RNA, 19 nt, Homo sapiens
  misc_RNA (1)...(19): siRNA sense strand
gcguggaccugcaugugua

SEQ ID NO: 1947938 - RNA, 19 nt, Homo sapiens
  misc_RNA (1)...(19): siRNA sense strand
agauaucucugcgacuuua

SEQ ID NO: 1947939 - RNA, 19 nt, Homo sapiens
  misc_RNA (1)...(19): siRNA sense strand
ccaguuggauugcaguuca

SEQ ID NO: 1947940 - RNA, 19 nt, Homo sapiens
  misc_RNA (1)...(19): siRNA sense strand
gcaggaugccggcagauau

SEQ ID NO: 1947941 - RNA, 19 nt, Homo sapiens
  misc_RNA (1)...(19): siRNA sense strand
guaccaaacaguccagaga

SEQ ID NO: 1947942 - RNA, 19 nt, Homo sapiens
  misc_RNA (1)...(19): siRNA sense strand
uguacgagauuccgguuga

SEQ ID NO: 1947943 - RNA, 19 nt, Homo sapiens
  misc_RNA (1)...(19): siRNA sense strand
gaacgccaguuggauugca

SEQ ID NO: 1947944 - RNA, 19 nt, Homo sapiens
  misc_RNA (1)...(19): siRNA sense strand
gaaagcauugacuccauca

SEQ ID NO: 1947945 - RNA, 19 nt, Homo sapiens
  misc_RNA (1)...(19): siRNA sense strand
gauugcaguucaggagcua

SEQ ID NO: 1947946 - RNA, 19 nt, Homo sapiens
  misc_RNA (1)...(19): siRNA sense strand
gcaguucaggagcuagaaa

SEQ ID NO: 1947947 - RNA, 19 nt, Homo sapiens
  misc_RNA (1)...(19): siRNA sense strand
gaggaaggcggugguagug

SEQ ID NO: 1947948 - RNA, 19 nt, Homo sapiens
  misc_RNA (1)...(19): siRNA sense strand
ugacgggauuuggcccuuu

SEQ ID NO: 1947949 - RNA, 19 nt, Homo sapiens
  misc_RNA (1)...(19): siRNA sense strand
gagccaucauugaggagau

SEQ ID NO: 1947950 - RNA, 19 nt, Homo sapiens
  misc_RNA (1)...(19): siRNA sense strand
gugaacgccaguuggauug

SEQ ID NO: 1947951 - RNA, 19 nt, Homo sapiens
  misc_RNA (1)...(19): siRNA sense strand
ucugcgacuuuaccuacua

SEQ ID NO: 1947952 - RNA, 19 nt, Homo sapiens
  misc_RNA (1)...(19): siRNA sense strand
gcuggacaacugccgcuuu

SEQ ID NO: 1947953 - RNA, 19 nt, Homo sapiens
  misc_RNA (1)...(19): siRNA sense strand
cgugaacgccaguuggauu

SEQ ID NO: 1947954 - RNA, 19 nt, Homo sapiens
  misc_RNA (1)...(19): siRNA sense strand
guggaggacgggccugaaa

SEQ ID NO: 1947955 - RNA, 19 nt, Homo sapiens
  misc_RNA (1)...(19): siRNA sense strand
cgaggaaggcggugguagu

SEQ ID NO: 1947956 - RNA, 19 nt, Homo sapiens
  misc_RNA (1)...(19): siRNA sense strand
gcauugacuccaucaucga

SEQ ID NO: 1947957 - RNA, 19 nt, Homo sapiens
  misc_RNA (1)...(19): siRNA sense strand
cugaaagcauugacuccau

SEQ ID NO: 1947958 - RNA, 19 nt, Homo sapiens
  misc_RNA (1)...(19): siRNA sense strand
ggacacaacaagggcuaca

SEQ ID NO: 1947959 - RNA, 19 nt, Homo sapiens
  misc_RNA (1)...(19): siRNA sense strand
uuaccuacuacaccucuuu

SEQ ID NO: 1947960 - RNA, 19 nt, Homo sapiens
  misc_RNA (1)...(19): siRNA sense strand
acaaggggcuggacaacug

SEQ ID NO: 1947961 - RNA, 19 nt, Homo sapiens
  misc_RNA (1)...(19): siRNA sense strand
gaauguaaccgccgauuua

SEQ ID NO: 1947962 - RNA, 19 nt, Homo sapiens
  misc_RNA (1)...(19): siRNA sense strand
guaaaucacuuaucgaaga

SEQ ID NO: 1947963 - RNA, 19 nt, Homo sapiens
  misc_RNA (1)...(19): siRNA sense strand
gaaagaagcauccagaguu

SEQ ID NO: 1947964 - RNA, 19 nt, Homo sapiens
  misc_RNA (1)...(19): siRNA sense strand
gcaaagacuuccuguguuc

SEQ ID NO: 1947965 - RNA, 19 nt, Homo sapiens
  misc_RNA (1)...(19): siRNA sense strand
ggauuuacaugaagaccua

SEQ ID NO: 1947966 - RNA, 19 nt, Homo sapiens
  misc_RNA (1)...(19): siRNA sense strand
acacaggacuugcuacauu

SEQ ID NO: 1947967 - RNA, 19 nt, Homo sapiens
  misc_RNA (1)...(19): siRNA sense strand
agaaagggauuuacaugaa

SEQ ID NO: 1947968 - RNA, 19 nt, Homo sapiens
  misc_RNA (1)...(19): siRNA sense strand
ggaagcaauuuaagcgaaa

SEQ ID NO: 1947969 - RNA, 19 nt, Homo sapiens
  misc_RNA (1)...(19): siRNA sense strand
gaagagacacccagacaug

SEQ ID NO: 1947970 - RNA, 19 nt, Homo sapiens
  misc_RNA (1)...(19): siRNA sense strand
gaaagggauuuacaugaag

SEQ ID NO: 1947971 - RNA, 19 nt, Homo sapiens
  misc_RNA (1)...(19): siRNA sense strand
uagaagaggugccagaguu

SEQ ID NO: 1947972 - RNA, 19 nt, Homo sapiens
  misc_RNA (1)...(19): siRNA sense strand
gcugaaagacuguuacauu

SEQ ID NO: 1947973 - RNA, 19 nt, Homo sapiens
  misc_RNA (1)...(19): siRNA sense strand
gaagaccuaugguuugagu

SEQ ID NO: 1947974 - RNA, 19 nt, Homo sapiens
  misc_RNA (1)...(19): siRNA sense strand
gaucauguggccauucaua

SEQ ID NO: 1947975 - RNA, 19 nt, Homo sapiens
  misc_RNA (1)...(19): siRNA sense strand
guaacuggaugauguuugu

SEQ ID NO: 1947976 - RNA, 19 nt, Homo sapiens
  misc_RNA (1)...(19): siRNA sense strand
gaaagaaagggauuuacau

SEQ ID NO: 1947977 - RNA, 19 nt, Homo sapiens
  misc_RNA (1)...(19): siRNA sense strand
gauuggagcugcagaaugc

SEQ ID NO: 1947978 - RNA, 19 nt, Homo sapiens
  misc_RNA (1)...(19): siRNA sense strand
ggaaagaaagggauuuaca

SEQ ID NO: 1947979 - RNA, 19 nt, Homo sapiens
  misc_RNA (1)...(19): siRNA sense strand
aagaaacgguucccagauu

SEQ ID NO: 1947980 - RNA, 19 nt, Homo sapiens
  misc_RNA (1)...(19): siRNA sense strand
agaaacgguucccagauuu

SEQ ID NO: 1947981 - RNA, 19 nt, Homo sapiens
  misc_RNA (1)...(19): siRNA sense strand
ugaggaagaugaggaagaa

SEQ ID NO: 1947982 - RNA, 19 nt, Homo sapiens
  misc_RNA (1)...(19): siRNA sense strand
gaacugucccagaccuuaa

SEQ ID NO: 1947983 - RNA, 19 nt, Homo sapiens
  misc_RNA (1)...(19): siRNA sense strand
gcaaagcccacauucugaa

SEQ ID NO: 1947984 - RNA, 19 nt, Homo sapiens
  misc_RNA (1)...(19): siRNA sense strand
gaaagaucauguggccauu

SEQ ID NO: 1947985 - RNA, 19 nt, Homo sapiens
  misc_RNA (1)...(19): siRNA sense strand
acaugaagcuccacucaga

SEQ ID NO: 1947986 - RNA, 19 nt, Homo sapiens
  misc_RNA (1)...(19): siRNA sense strand
uguaaccgccgauuuauaa

SEQ ID NO: 1947987 - RNA, 19 nt, Homo sapiens
  misc_RNA (1)...(19): siRNA sense strand
gguuugaguugucugauga

SEQ ID NO: 1947988 - RNA, 19 nt, Homo sapiens
  misc_RNA (1)...(19): siRNA sense strand
agaaucaccuggagcagaa

SEQ ID NO: 1947989 - RNA, 19 nt, Homo sapiens
  misc_RNA (1)...(19): siRNA sense strand
gaaaguucuucgagagcaa

SEQ ID NO: 1947990 - RNA, 19 nt, Homo sapiens
  misc_RNA (1)...(19): siRNA sense strand
gaacugaaggugugguaug

SEQ ID NO: 1947991 - RNA, 19 nt, Homo sapiens
  misc_RNA (1)...(19): siRNA sense strand
gaaagacuguuacauucac

SEQ ID NO: 1947992 - RNA, 19 nt, Homo sapiens
  misc_RNA (1)...(19): siRNA sense strand
gcauaucaccaaaccauga

SEQ ID NO: 1947993 - RNA, 19 nt, Homo sapiens
  misc_RNA (1)...(19): siRNA sense strand
gaacggaagcagcgaagug

SEQ ID NO: 1947994 - RNA, 19 nt, Homo sapiens
  misc_RNA (1)...(19): siRNA sense strand
aaagaagcauccagaguuc

SEQ ID NO: 1947995 - RNA, 19 nt, Homo sapiens
  misc_RNA (1)...(19): siRNA sense strand
ccaaagaggaagaggauga

SEQ ID NO: 1947996 - RNA, 19 nt, Homo sapiens
  misc_RNA (1)...(19): siRNA sense strand
gcaaacuucugcccucucu

SEQ ID NO: 1947997 - RNA, 19 nt, Homo sapiens
  misc_RNA (1)...(19): siRNA sense strand
gaagaggugccagaguuaa

SEQ ID NO: 1947998 - RNA, 19 nt, Homo sapiens
  misc_RNA (1)...(19): siRNA sense strand
acucagaccagaagacuua

SEQ ID NO: 1947999 - RNA, 19 nt, Homo sapiens
  misc_RNA (1)...(19): siRNA sense strand
cacaggacuugcuacauuu

SEQ ID NO: 1948000 - RNA, 19 nt, Homo sapiens
  misc_RNA (1)...(19): siRNA sense strand
gaauuggcccugcuaugaa

SEQ ID NO: 1948001 - RNA, 19 nt, Homo sapiens
  misc_RNA (1)...(19): siRNA sense strand
cugaaagacuguuacauuc

SEQ ID NO: 1948002 - RNA, 19 nt, Homo sapiens
  misc_RNA (1)...(19): siRNA sense strand
gucauuauguguuaucaga

SEQ ID NO: 1948003 - RNA, 19 nt, Homo sapiens
  misc_RNA (1)...(19): siRNA sense strand
gcgcaaagcccacauucug

SEQ ID NO: 1948004 - RNA, 19 nt, Homo sapiens
  misc_RNA (1)...(19): siRNA sense strand
cuagauguguuuagcagaa

SEQ ID NO: 1948005 - RNA, 19 nt, Homo sapiens
  misc_RNA (1)...(19): siRNA sense strand
agcagaaccugguggcuua

SEQ ID NO: 1948006 - RNA, 19 nt, Homo sapiens
  misc_RNA (1)...(19): siRNA sense strand
gcaacagcaucucaauucu

SEQ ID NO: 1948007 - RNA, 19 nt, Homo sapiens
  misc_RNA (1)...(19): siRNA sense strand
cgaagugcauaucaccaaa

SEQ ID NO: 1948008 - RNA, 19 nt, Homo sapiens
  misc_RNA (1)...(19): siRNA sense strand
gagagcaagagaagaauug

SEQ ID NO: 1948009 - RNA, 19 nt, Homo sapiens
  misc_RNA (1)...(19): siRNA sense strand
gaaccagccacucugaaug

SEQ ID NO: 1948010 - RNA, 19 nt, Homo sapiens
  misc_RNA (1)...(19): siRNA sense strand
gagccaagcgcauccgauu

SEQ ID NO: 1948011 - RNA, 19 nt, Homo sapiens
  misc_RNA (1)...(19): siRNA sense strand
ggaagcagcgaagugcaua

SEQ ID NO: 1948012 - RNA, 19 nt, Homo sapiens
  misc_RNA (1)...(19): siRNA sense strand
gggaacacaugcagaggau

SEQ ID NO: 1948013 - RNA, 19 nt, Homo sapiens
  misc_RNA (1)...(19): siRNA sense strand
ccacugaccugugaucucu

SEQ ID NO: 1948014 - RNA, 19 nt, Homo sapiens
  misc_RNA (1)...(19): siRNA sense strand
ggacgaggacacugaggaa

SEQ ID NO: 1948015 - RNA, 19 nt, Homo sapiens
  misc_RNA (1)...(19): siRNA sense strand
ggaagaggaugaggaugag

SEQ ID NO: 1948016 - RNA, 19 nt, Homo sapiens
  misc_RNA (1)...(19): siRNA sense strand
ccagcagccucagcacaua

SEQ ID NO: 1948017 - RNA, 19 nt, Homo sapiens
  misc_RNA (1)...(19): siRNA sense strand
gcugguaaaucacuuaucg

SEQ ID NO: 1948018 - RNA, 19 nt, Homo sapiens
  misc_RNA (1)...(19): siRNA sense strand
gcggcaugcugguaaauca

SEQ ID NO: 1948019 - RNA, 19 nt, Homo sapiens
  misc_RNA (1)...(19): siRNA sense strand
gcacauacagcugcaagug

SEQ ID NO: 1948020 - RNA, 19 nt, Homo sapiens
  misc_RNA (1)...(19): siRNA sense strand
aaagggauuuacaugaaga

SEQ ID NO: 1948021 - RNA, 19 nt, Homo sapiens
  misc_RNA (1)...(19): siRNA sense strand
gacgacagcugugaucagu

SEQ ID NO: 1948022 - RNA, 19 nt, Homo sapiens
  misc_RNA (1)...(19): siRNA sense strand
gcucuucagcaucuguuua

SEQ ID NO: 1948023 - RNA, 19 nt, Homo sapiens
  misc_RNA (1)...(19): siRNA sense strand
agaauuggcccugcuauga

SEQ ID NO: 1948024 - RNA, 19 nt, Homo sapiens
  misc_RNA (1)...(19): siRNA sense strand
cugaugagacgcuuuguaa

SEQ ID NO: 1948025 - RNA, 19 nt, Homo sapiens
  misc_RNA (1)...(19): siRNA sense strand
gaacaugaaccagaaacuc

SEQ ID NO: 1948026 - RNA, 19 nt, Homo sapiens
  misc_RNA (1)...(19): siRNA sense strand
gaggggaacugcccacuga

SEQ ID NO: 1948027 - RNA, 19 nt, Homo sapiens
  misc_RNA (1)...(19): siRNA sense strand
ggugugaggagugcaauaa

SEQ ID NO: 1948028 - RNA, 19 nt, Homo sapiens
  misc_RNA (1)...(19): siRNA sense strand
cagaaagucaaucagaauu

SEQ ID NO: 1948029 - RNA, 19 nt, Homo sapiens
  misc_RNA (1)...(19): siRNA sense strand
uaacucuacccaucauaaa

SEQ ID NO: 1948030 - RNA, 19 nt, Homo sapiens
  misc_RNA (1)...(19): siRNA sense strand
ggacacaggacuugcuaca

SEQ ID NO: 1948031 - RNA, 19 nt, Homo sapiens
  misc_RNA (1)...(19): siRNA sense strand
aaauuuauccgccuggaaa

SEQ ID NO: 1948032 - RNA, 19 nt, Homo sapiens
  misc_RNA (1)...(19): siRNA sense strand
ccagaaaauucaugacauu

SEQ ID NO: 1948033 - RNA, 19 nt, Homo sapiens
  misc_RNA (1)...(19): siRNA sense strand
gaugagacgcuuuguaacu

SEQ ID NO: 1948034 - RNA, 19 nt, Homo sapiens
  misc_RNA (1)...(19): siRNA sense strand
aaagaaagggauuuacaug

SEQ ID NO: 1948035 - RNA, 19 nt, Homo sapiens
  misc_RNA (1)...(19): siRNA sense strand
ccucauugccaguucauaa

SEQ ID NO: 1948036 - RNA, 19 nt, Homo sapiens
  misc_RNA (1)...(19): siRNA sense strand
caggaaagaaagggauuua

SEQ ID NO: 1948037 - RNA, 19 nt, Homo sapiens
  misc_RNA (1)...(19): siRNA sense strand
caugaagaccuaugguuug

SEQ ID NO: 1948038 - RNA, 19 nt, Homo sapiens
  misc_RNA (1)...(19): siRNA sense strand
uacgacagcuucacguuca

SEQ ID NO: 1948039 - RNA, 19 nt, Homo sapiens
  misc_RNA (1)...(19): siRNA sense strand
gaugagaaacuagaugugu

SEQ ID NO: 1948040 - RNA, 19 nt, Homo sapiens
  misc_RNA (1)...(19): siRNA sense strand
ccugugaucucuguaacaa

SEQ ID NO: 1948041 - RNA, 19 nt, Homo sapiens
  misc_RNA (1)...(19): siRNA sense strand
uaucagaaagucaaucaga

SEQ ID NO: 1948042 - RNA, 19 nt, Homo sapiens
  misc_RNA (1)...(19): siRNA sense strand
agaagaggugccagaguua

SEQ ID NO: 1948043 - RNA, 19 nt, Homo sapiens
  misc_RNA (1)...(19): siRNA sense strand
cgcaaagacuuccuguguu

SEQ ID NO: 1948044 - RNA, 19 nt, Homo sapiens
  misc_RNA (1)...(19): siRNA sense strand
ccgcaaagacuuccugugu

SEQ ID NO: 1948045 - RNA, 19 nt, Homo sapiens
  misc_RNA (1)...(19): siRNA sense strand
aagaaagggauuuacauga

SEQ ID NO: 1948046 - RNA, 19 nt, Homo sapiens
  misc_RNA (1)...(19): siRNA sense strand
ccagagaauucaguacauc

SEQ ID NO: 1948047 - RNA, 19 nt, Homo sapiens
  misc_RNA (1)...(19): siRNA sense strand
caauaacgcgcaugcuuca

SEQ ID NO: 1948048 - RNA, 19 nt, Homo sapiens
  misc_RNA (1)...(19): siRNA sense strand
gccuugauuuguugaaaga

SEQ ID NO: 1948049 - RNA, 19 nt, Homo sapiens
  misc_RNA (1)...(19): siRNA sense strand
aacagcaucucaauucuca

SEQ ID NO: 1948050 - RNA, 19 nt, Homo sapiens
  misc_RNA (1)...(19): siRNA sense strand
acaugaagaccuaugguuu

SEQ ID NO: 1948051 - RNA, 19 nt, Homo sapiens
  misc_RNA (1)...(19): siRNA sense strand
cgaggacacugaggaagau

SEQ ID NO: 1948052 - RNA, 19 nt, Homo sapiens
  misc_RNA (1)...(19): siRNA sense strand
cugcccaacuuguaagaaa

SEQ ID NO: 1948053 - RNA, 19 nt, Homo sapiens
  misc_RNA (1)...(19): siRNA sense strand
gcaucucaauucucaugau

SEQ ID NO: 1948054 - RNA, 19 nt, Homo sapiens
  misc_RNA (1)...(19): siRNA sense strand
gaagaauuggcccugcuau

SEQ ID NO: 1948055 - RNA, 19 nt, Homo sapiens
  misc_RNA (1)...(19): siRNA sense strand
caagaugguccagcacauu

SEQ ID NO: 1948056 - RNA, 19 nt, Homo sapiens
  misc_RNA (1)...(19): siRNA sense strand
uaaaucacuuaucgaagag

SEQ ID NO: 1948057 - RNA, 19 nt, Homo sapiens
  misc_RNA (1)...(19): siRNA sense strand
caaacuacgggaacacaug

SEQ ID NO: 1948058 - RNA, 19 nt, Homo sapiens
  misc_RNA (1)...(19): siRNA sense strand
ugaccgccuugauuuguug

SEQ ID NO: 1948059 - RNA, 19 nt, Homo sapiens
  misc_RNA (1)...(19): siRNA sense strand
ggaaaucaccagcgaaaau

SEQ ID NO: 1948060 - RNA, 19 nt, Homo sapiens
  misc_RNA (1)...(19): siRNA sense strand
acccagacaugaagauaga

SEQ ID NO: 1948061 - RNA, 19 nt, Homo sapiens
  misc_RNA (1)...(19): siRNA sense strand
gcaaagaggacaacccuaa

SEQ ID NO: 1948062 - RNA, 19 nt, Homo sapiens
  misc_RNA (1)...(19): siRNA sense strand
uggcugagcucaaauccua

SEQ ID NO: 1948063 - RNA, 19 nt, Homo sapiens
  misc_RNA (1)...(19): siRNA sense strand
ucaugaagaucgugaaaga

SEQ ID NO: 1948064 - RNA, 19 nt, Homo sapiens
  misc_RNA (1)...(19): siRNA sense strand
caugguggauguacaguuu

SEQ ID NO: 1948065 - RNA, 19 nt, Homo sapiens
  misc_RNA (1)...(19): siRNA sense strand
gcucaaauccuaucaucaa

SEQ ID NO: 1948066 - RNA, 19 nt, Homo sapiens
  misc_RNA (1)...(19): siRNA sense strand
ccagagagccgccuagaga

SEQ ID NO: 1948067 - RNA, 19 nt, Homo sapiens
  misc_RNA (1)...(19): siRNA sense strand
agagaaagguguagaugug

SEQ ID NO: 1948068 - RNA, 19 nt, Homo sapiens
  misc_RNA (1)...(19): siRNA sense strand
gagcucaaauccuaucauc

SEQ ID NO: 1948069 - RNA, 19 nt, Homo sapiens
  misc_RNA (1)...(19): siRNA sense strand
ccaugaagcugggagaaga

SEQ ID NO: 1948070 - RNA, 19 nt, Homo sapiens
  misc_RNA (1)...(19): siRNA sense strand
gacaagggacuaucaggaa

SEQ ID NO: 1948071 - RNA, 19 nt, Homo sapiens
  misc_RNA (1)...(19): siRNA sense strand
gggaugguguucguaacua

SEQ ID NO: 1948072 - RNA, 19 nt, Homo sapiens
  misc_RNA (1)...(19): siRNA sense strand
acaagggacuaucaggaaa

SEQ ID NO: 1948073 - RNA, 19 nt, Homo sapiens
  misc_RNA (1)...(19): siRNA sense strand
ccacacacaguuugagaaa

SEQ ID NO: 1948074 - RNA, 19 nt, Homo sapiens
  misc_RNA (1)...(19): siRNA sense strand
ucgcaggacucaugaagau

SEQ ID NO: 1948075 - RNA, 19 nt, Homo sapiens
  misc_RNA (1)...(19): siRNA sense strand
gcacagcccaaacagacaa

SEQ ID NO: 1948076 - RNA, 19 nt, Homo sapiens
  misc_RNA (1)...(19): siRNA sense strand
ggaaaaggaaccaaguuaa

SEQ ID NO: 1948077 - RNA, 19 nt, Homo sapiens
  misc_RNA (1)...(19): siRNA sense strand
agaaagguguagaugugaa

SEQ ID NO: 1948078 - RNA, 19 nt, Homo sapiens
  misc_RNA (1)...(19): siRNA sense strand
caaauccuaucaucaagcu

SEQ ID NO: 1948079 - RNA, 19 nt, Homo sapiens
  misc_RNA (1)...(19): siRNA sense strand
ggaagaguuugauuuuguu

SEQ ID NO: 1948080 - RNA, 19 nt, Homo sapiens
  misc_RNA (1)...(19): siRNA sense strand
gaaaacgcaccaaaacuga

SEQ ID NO: 1948081 - RNA, 19 nt, Homo sapiens
  misc_RNA (1)...(19): siRNA sense strand
gagaaagguguagauguga

SEQ ID NO: 1948082 - RNA, 19 nt, Homo sapiens
  misc_RNA (1)...(19): siRNA sense strand
ucaaagcacagcccaaaca

SEQ ID NO: 1948083 - RNA, 19 nt, Homo sapiens
  misc_RNA (1)...(19): siRNA sense strand
caggugaggcauuagcuaa

SEQ ID NO: 1948084 - RNA, 19 nt, Homo sapiens
  misc_RNA (1)...(19): siRNA sense strand
aaaacaauccccauuauga

SEQ ID NO: 1948085 - RNA, 19 nt, Homo sapiens
  misc_RNA (1)...(19): siRNA sense strand
ggugaggcauuagcuaaag

SEQ ID NO: 1948086 - RNA, 19 nt, Homo sapiens
  misc_RNA (1)...(19): siRNA sense strand
cuaccaggcucggaacuuc

SEQ ID NO: 1948087 - RNA, 19 nt, Homo sapiens
  misc_RNA (1)...(19): siRNA sense strand
gaaguucagcauugaggau

SEQ ID NO: 1948088 - RNA, 19 nt, Homo sapiens
  misc_RNA (1)...(19): siRNA sense strand
ggaaaacgcaccaaaacug

SEQ ID NO: 1948089 - RNA, 19 nt, Homo sapiens
  misc_RNA (1)...(19): siRNA sense strand
gcugggaugguguucguaa

SEQ ID NO: 1948090 - RNA, 19 nt, Homo sapiens
  misc_RNA (1)...(19): siRNA sense strand
gaaagguguagaugugaag

SEQ ID NO: 1948091 - RNA, 19 nt, Homo sapiens
  misc_RNA (1)...(19): siRNA sense strand
ggaugguguucguaacuac

SEQ ID NO: 1948092 - RNA, 19 nt, Homo sapiens
  misc_RNA (1)...(19): siRNA sense strand
aaauaugguucucuucacu

SEQ ID NO: 1948093 - RNA, 19 nt, Homo sapiens
  misc_RNA (1)...(19): siRNA sense strand
guacaguuuguucggauga

SEQ ID NO: 1948094 - RNA, 19 nt, Homo sapiens
  misc_RNA (1)...(19): siRNA sense strand
gaccacacacaguuugaga

SEQ ID NO: 1948095 - RNA, 19 nt, Homo sapiens
  misc_RNA (1)...(19): siRNA sense strand
ugacccaucuagcaaagag

SEQ ID NO: 1948096 - RNA, 19 nt, Homo sapiens
  misc_RNA (1)...(19): siRNA sense strand
agagagccgccuagagaaa

SEQ ID NO: 1948097 - RNA, 19 nt, Homo sapiens
  misc_RNA (1)...(19): siRNA sense strand
ccaggaagaguuugauuuu

SEQ ID NO: 1948098 - RNA, 19 nt, Homo sapiens
  misc_RNA (1)...(19): siRNA sense strand
ucucaaagcacagcccaaa

SEQ ID NO: 1948099 - RNA, 19 nt, Homo sapiens
  misc_RNA (1)...(19): siRNA sense strand
caaagaggacaacccuaag

SEQ ID NO: 1948100 - RNA, 19 nt, Homo sapiens
  misc_RNA (1)...(19): siRNA sense strand
guucggaugaugaaacguu

SEQ ID NO: 1948101 - RNA, 19 nt, Homo sapiens
  misc_RNA (1)...(19): siRNA sense strand
ccagaccacacacaguuug

SEQ ID NO: 1948102 - RNA, 19 nt, Homo sapiens
  misc_RNA (1)...(19): siRNA sense strand
cccaggaagaguuugauuu

SEQ ID NO: 1948103 - RNA, 19 nt, Homo sapiens
  misc_RNA (1)...(19): siRNA sense strand
cagagagccgccuagagaa

SEQ ID NO: 1948104 - RNA, 19 nt, Homo sapiens
  misc_RNA (1)...(19): siRNA sense strand
uagagaaagguguagaugu

SEQ ID NO: 1948105 - RNA, 19 nt, Homo sapiens
  misc_RNA (1)...(19): siRNA sense strand
cauuaugacccaucuagca

SEQ ID NO: 1948106 - RNA, 19 nt, Homo sapiens
  misc_RNA (1)...(19): siRNA sense strand
aaagaggacaacccuaagu

SEQ ID NO: 1948107 - RNA, 19 nt, Homo sapiens
  misc_RNA (1)...(19): siRNA sense strand
gagagccgccuagagaaag

SEQ ID NO: 1948108 - RNA, 19 nt, Homo sapiens
  misc_RNA (1)...(19): siRNA sense strand
uaugacccaucuagcaaag

SEQ ID NO: 1948109 - RNA, 19 nt, Homo sapiens
  misc_RNA (1)...(19): siRNA sense strand
ggcugggacuucugguuca

SEQ ID NO: 1948110 - RNA, 19 nt, Homo sapiens
  misc_RNA (1)...(19): siRNA sense strand
uaccauagcaacugcaaag

SEQ ID NO: 1948111 - RNA, 19 nt, Homo sapiens
  misc_RNA (1)...(19): siRNA sense strand
gugaggcauuagcuaaagu

SEQ ID NO: 1948112 - RNA, 19 nt, Homo sapiens
  misc_RNA (1)...(19): siRNA sense strand
gaggcuggcugggacuucu

SEQ ID NO: 1948113 - RNA, 19 nt, Homo sapiens
  misc_RNA (1)...(19): siRNA sense strand
gaaacugacucuacucugu

SEQ ID NO: 1948114 - RNA, 19 nt, Homo sapiens
  misc_RNA (1)...(19): siRNA sense strand
gaacuuaauaaccugcuua

SEQ ID NO: 1948115 - RNA, 19 nt, Homo sapiens
  misc_RNA (1)...(19): siRNA sense strand
ggacguacccggugcuguu

SEQ ID NO: 1948116 - RNA, 19 nt, Homo sapiens
  misc_RNA (1)...(19): siRNA sense strand
gcugggaacuaaagggaaa

SEQ ID NO: 1948117 - RNA, 19 nt, Homo sapiens
  misc_RNA (1)...(19): siRNA sense strand
gaaacauggugguccuugu

SEQ ID NO: 1948118 - RNA, 19 nt, Homo sapiens
  misc_RNA (1)...(19): siRNA sense strand
gaugggaguuuccuuguac

SEQ ID NO: 1948119 - RNA, 19 nt, Homo sapiens
  misc_RNA (1)...(19): siRNA sense strand
caagacagaugggaguuuc

SEQ ID NO: 1948120 - RNA, 19 nt, Homo sapiens
  misc_RNA (1)...(19): siRNA sense strand
agaaugacauccugcugaa

SEQ ID NO: 1948121 - RNA, 19 nt, Homo sapiens
  misc_RNA (1)...(19): siRNA sense strand
gcugggaacuugaaaccau

SEQ ID NO: 1948122 - RNA, 19 nt, Homo sapiens
  misc_RNA (1)...(19): siRNA sense strand
ggaacuaaagggaaacaug

SEQ ID NO: 1948123 - RNA, 19 nt, Homo sapiens
  misc_RNA (1)...(19): siRNA sense strand
ccuucuaucucaaagcuaa

SEQ ID NO: 1948124 - RNA, 19 nt, Homo sapiens
  misc_RNA (1)...(19): siRNA sense strand
ugaauggccucagucauca

SEQ ID NO: 1948125 - RNA, 19 nt, Homo sapiens
  misc_RNA (1)...(19): siRNA sense strand
caaagcuaauuguaaaguc

SEQ ID NO: 1948126 - RNA, 19 nt, Homo sapiens
  misc_RNA (1)...(19): siRNA sense strand
gcacucauccaguccuuca

SEQ ID NO: 1948127 - RNA, 19 nt, Homo sapiens
  misc_RNA (1)...(19): siRNA sense strand
agaugggaguuuccuugua

SEQ ID NO: 1948128 - RNA, 19 nt, Homo sapiens
  misc_RNA (1)...(19): siRNA sense strand
ggaacuuaauaaccugcuu

SEQ ID NO: 1948129 - RNA, 19 nt, Homo sapiens
  misc_RNA (1)...(19): siRNA sense strand
gugcuagacuucauucacu

SEQ ID NO: 1948130 - RNA, 19 nt, Homo sapiens
  misc_RNA (1)...(19): siRNA sense strand
uaccugugauucuugacua

SEQ ID NO: 1948131 - RNA, 19 nt, Homo sapiens
  misc_RNA (1)...(19): siRNA sense strand
ugugauucuugacuacaua

SEQ ID NO: 1948132 - RNA, 19 nt, Homo sapiens
  misc_RNA (1)...(19): siRNA sense strand
guggagaugcggaggauga

SEQ ID NO: 1948133 - RNA, 19 nt, Homo sapiens
  misc_RNA (1)...(19): siRNA sense strand
gagaggcucgguggacgua

SEQ ID NO: 1948134 - RNA, 19 nt, Homo sapiens
  misc_RNA (1)...(19): siRNA sense strand
ggcuaaugcugggaacuug

SEQ ID NO: 1948135 - RNA, 19 nt, Homo sapiens
  misc_RNA (1)...(19): siRNA sense strand
cggaggaugaggagaauga

SEQ ID NO: 1948136 - RNA, 19 nt, Homo sapiens
  misc_RNA (1)...(19): siRNA sense strand
gagcgugggcagcuugugu

SEQ ID NO: 1948137 - RNA, 19 nt, Homo sapiens
  misc_RNA (1)...(19): siRNA sense strand
aaugacauccugcugaaug

SEQ ID NO: 1948138 - RNA, 19 nt, Homo sapiens
  misc_RNA (1)...(19): siRNA sense strand
gaugugcacgggcagguau

SEQ ID NO: 1948139 - RNA, 19 nt, Homo sapiens
  misc_RNA (1)...(19): siRNA sense strand
ccaagacagaugggaguuu

SEQ ID NO: 1948140 - RNA, 19 nt, Homo sapiens
  misc_RNA (1)...(19): siRNA sense strand
gcuaaugcugggaacuuga

SEQ ID NO: 1948141 - RNA, 19 nt, Homo sapiens
  misc_RNA (1)...(19): siRNA sense strand
guguaccugugauucuuga

SEQ ID NO: 1948142 - RNA, 19 nt, Homo sapiens
  misc_RNA (1)...(19): siRNA sense strand
ggaacuugaaaccauuguu

SEQ ID NO: 1948143 - RNA, 19 nt, Homo sapiens
  misc_RNA (1)...(19): siRNA sense strand
aaacauggugguccuugug

SEQ ID NO: 1948144 - RNA, 19 nt, Homo sapiens
  misc_RNA (1)...(19): siRNA sense strand
aaccauuguuugaguuugu

SEQ ID NO: 1948145 - RNA, 19 nt, Homo sapiens
  misc_RNA (1)...(19): siRNA sense strand
cugggaacuugaaaccauu

SEQ ID NO: 1948146 - RNA, 19 nt, Homo sapiens
  misc_RNA (1)...(19): siRNA sense strand
ccacuuucucuccuucuau

SEQ ID NO: 1948147 - RNA, 19 nt, Homo sapiens
  misc_RNA (1)...(19): siRNA sense strand
ggaugugcacgggcaggua

SEQ ID NO: 1948148 - RNA, 19 nt, Homo sapiens
  misc_RNA (1)...(19): siRNA sense strand
ugcuagacuucauucacua

SEQ ID NO: 1948149 - RNA, 19 nt, Homo sapiens
  misc_RNA (1)...(19): siRNA sense strand
gggaaacugacucuacucu

SEQ ID NO: 1948150 - RNA, 19 nt, Homo sapiens
  misc_RNA (1)...(19): siRNA sense strand
cuaaugcugggaacuugaa

SEQ ID NO: 1948151 - RNA, 19 nt, Homo sapiens
  misc_RNA (1)...(19): siRNA sense strand
gaaagaagcucugucacaa

SEQ ID NO: 1948152 - RNA, 19 nt, Homo sapiens
  misc_RNA (1)...(19): siRNA sense strand
gaugucagauguaaaugua

SEQ ID NO: 1948153 - RNA, 19 nt, Homo sapiens
  misc_RNA (1)...(19): siRNA sense strand
gaagaaagaagcucuguca

SEQ ID NO: 1948154 - RNA, 19 nt, Homo sapiens
  misc_RNA (1)...(19): siRNA sense strand
caaucaagguuaccauuau

SEQ ID NO: 1948155 - RNA, 19 nt, Homo sapiens
  misc_RNA (1)...(19): siRNA sense strand
uaucugcccucccuauaaa

SEQ ID NO: 1948156 - RNA, 19 nt, Homo sapiens
  misc_RNA (1)...(19): siRNA sense strand
gagccaacgugcugaacaa

SEQ ID NO: 1948157 - RNA, 19 nt, Homo sapiens
  misc_RNA (1)...(19): siRNA sense strand
ccaagaauuucgaggaugu

SEQ ID NO: 1948158 - RNA, 19 nt, Homo sapiens
  misc_RNA (1)...(19): siRNA sense strand
gaagcucugucacaaucaa

SEQ ID NO: 1948159 - RNA, 19 nt, Homo sapiens
  misc_RNA (1)...(19): siRNA sense strand
ucagaaagauugugauugc

SEQ ID NO: 1948160 - RNA, 19 nt, Homo sapiens
  misc_RNA (1)...(19): siRNA sense strand
ggccugauguagaagcaua

SEQ ID NO: 1948161 - RNA, 19 nt, Homo sapiens
  misc_RNA (1)...(19): siRNA sense strand
acagagugaugaugauauu

SEQ ID NO: 1948162 - RNA, 19 nt, Homo sapiens
  misc_RNA (1)...(19): siRNA sense strand
gaggaugucagauguaaau

SEQ ID NO: 1948163 - RNA, 19 nt, Homo sapiens
  misc_RNA (1)...(19): siRNA sense strand
gcaaauaugaagaaagaag

SEQ ID NO: 1948164 - RNA, 19 nt, Homo sapiens
  misc_RNA (1)...(19): siRNA sense strand
gaacaagguagaauaugca

SEQ ID NO: 1948165 - RNA, 19 nt, Homo sapiens
  misc_RNA (1)...(19): siRNA sense strand
acaaucaagguuaccauua

SEQ ID NO: 1948166 - RNA, 19 nt, Homo sapiens
  misc_RNA (1)...(19): siRNA sense strand
aagaagcucugucacaauc

SEQ ID NO: 1948167 - RNA, 19 nt, Homo sapiens
  misc_RNA (1)...(19): siRNA sense strand
gaauuucgaggaugucaga

SEQ ID NO: 1948168 - RNA, 19 nt, Homo sapiens
  misc_RNA (1)...(19): siRNA sense strand
gugauugccuucauguugu

SEQ ID NO: 1948169 - RNA, 19 nt, Homo sapiens
  misc_RNA (1)...(19): siRNA sense strand
gauacagagugaugaugau

SEQ ID NO: 1948170 - RNA, 19 nt, Homo sapiens
  misc_RNA (1)...(19): siRNA sense strand
guaucugcccucccuauaa

SEQ ID NO: 1948171 - RNA, 19 nt, Homo sapiens
  misc_RNA (1)...(19): siRNA sense strand
ugaacaagguagaauaugc

SEQ ID NO: 1948172 - RNA, 19 nt, Homo sapiens
  misc_RNA (1)...(19): siRNA sense strand
ucgaggaugucagauguaa

SEQ ID NO: 1948173 - RNA, 19 nt, Homo sapiens
  misc_RNA (1)...(19): siRNA sense strand
ccaacgugcugaacaaggu

SEQ ID NO: 1948174 - RNA, 19 nt, Homo sapiens
  misc_RNA (1)...(19): siRNA sense strand
gcugaacaagguagaauau

SEQ ID NO: 1948175 - RNA, 19 nt, Homo sapiens
  misc_RNA (1)...(19): siRNA sense strand
aagaacauaucucagaaag

SEQ ID NO: 1948176 - RNA, 19 nt, Homo sapiens
  misc_RNA (1)...(19): siRNA sense strand
ggacaugcacaguugauac

SEQ ID NO: 1948177 - RNA, 19 nt, Homo sapiens
  misc_RNA (1)...(19): siRNA sense strand
gcugugaaugcaaauauga

SEQ ID NO: 1948178 - RNA, 19 nt, Homo sapiens
  misc_RNA (1)...(19): siRNA sense strand
cuacuucuguacaugguau

SEQ ID NO: 1948179 - RNA, 19 nt, Homo sapiens
  misc_RNA (1)...(19): siRNA sense strand
gauugugauugccuucaug

SEQ ID NO: 1948180 - RNA, 19 nt, Homo sapiens
  misc_RNA (1)...(19): siRNA sense strand
agaaagaagcucugucaca

SEQ ID NO: 1948181 - RNA, 19 nt, Homo sapiens
  misc_RNA (1)...(19): siRNA sense strand
ugauacagagugaugauga

SEQ ID NO: 1948182 - RNA, 19 nt, Homo sapiens
  misc_RNA (1)...(19): siRNA sense strand
ugucagauguaaauguauc

SEQ ID NO: 1948183 - RNA, 19 nt, Homo sapiens
  misc_RNA (1)...(19): siRNA sense strand
ggaugucagauguaaaugu

SEQ ID NO: 1948184 - RNA, 19 nt, Homo sapiens
  misc_RNA (1)...(19): siRNA sense strand
cacaguugauacagaguga

SEQ ID NO: 1948185 - RNA, 19 nt, Homo sapiens
  misc_RNA (1)...(19): siRNA sense strand
caugcacaguugauacaga

SEQ ID NO: 1948186 - RNA, 19 nt, Homo sapiens
  misc_RNA (1)...(19): siRNA sense strand
ggcauguuguccucagcua

SEQ ID NO: 1948187 - RNA, 19 nt, Homo sapiens
  misc_RNA (1)...(19): siRNA sense strand
cauacugucuacgcuguga

SEQ ID NO: 1948188 - RNA, 19 nt, Homo sapiens
  misc_RNA (1)...(19): siRNA sense strand
ugugauugccuucauguug

SEQ ID NO: 1948189 - RNA, 19 nt, Homo sapiens
  misc_RNA (1)...(19): siRNA sense strand
gcauguuguccucagcuaa

SEQ ID NO: 1948190 - RNA, 19 nt, Homo sapiens
  misc_RNA (1)...(19): siRNA sense strand
uuucgaggaugucagaugu

SEQ ID NO: 1948191 - RNA, 19 nt, Homo sapiens
  misc_RNA (1)...(19): siRNA sense strand
caacgugcugaacaaggua

SEQ ID NO: 1948192 - RNA, 19 nt, Homo sapiens
  misc_RNA (1)...(19): siRNA sense strand
guacaugguauaucuuacu

SEQ ID NO: 1948193 - RNA, 19 nt, Homo sapiens
  misc_RNA (1)...(19): siRNA sense strand
gguauaucuuacucugguu

SEQ ID NO: 1948194 - RNA, 19 nt, Homo sapiens
  misc_RNA (1)...(19): siRNA sense strand
gacaugcacaguugauaca

SEQ ID NO: 1948195 - RNA, 19 nt, Homo sapiens
  misc_RNA (1)...(19): siRNA sense strand
ucucagaaagauugugauu

SEQ ID NO: 1948196 - RNA, 19 nt, Homo sapiens
  misc_RNA (1)...(19): siRNA sense strand
cgccaagaauuucgaggau

SEQ ID NO: 1948197 - RNA, 19 nt, Homo sapiens
  misc_RNA (1)...(19): siRNA sense strand
ugucgugccuggcgcuuuc

SEQ ID NO: 1948198 - RNA, 19 nt, Homo sapiens
  misc_RNA (1)...(19): siRNA sense strand
cuuuggacaugcacaguug

SEQ ID NO: 1948199 - RNA, 19 nt, Homo sapiens
  misc_RNA (1)...(19): siRNA sense strand
guugagcccauacugaaga

SEQ ID NO: 1948200 - RNA, 19 nt, Homo sapiens
  misc_RNA (1)...(19): siRNA sense strand
ugauguagaagcauacugu

SEQ ID NO: 1948201 - RNA, 19 nt, Homo sapiens
  misc_RNA (1)...(19): siRNA sense strand
gagcagcgaaagucugucu

SEQ ID NO: 1948202 - RNA, 19 nt, Homo sapiens
  misc_RNA (1)...(19): siRNA sense strand
auacagagugaugaugaua

SEQ ID NO: 1948203 - RNA, 19 nt, Homo sapiens
  misc_RNA (1)...(19): siRNA sense strand
aaagaagcucugucacaau

SEQ ID NO: 1948204 - RNA, 19 nt, Homo sapiens
  misc_RNA (1)...(19): siRNA sense strand
ucuacgcugugaaugcaaa

SEQ ID NO: 1948205 - RNA, 19 nt, Homo sapiens
  misc_RNA (1)...(19): siRNA sense strand
cacaaucaagguuaccauu

SEQ ID NO: 1948206 - RNA, 19 nt, Homo sapiens
  misc_RNA (1)...(19): siRNA sense strand
ggaagcuucaaguccaaga

SEQ ID NO: 1948207 - RNA, 19 nt, Homo sapiens
  misc_RNA (1)...(19): siRNA sense strand
cuguacaugguauaucuua

SEQ ID NO: 1948208 - RNA, 19 nt, Homo sapiens
  misc_RNA (1)...(19): siRNA sense strand
ugucuacgcugugaaugca

SEQ ID NO: 1948209 - RNA, 19 nt, Homo sapiens
  misc_RNA (1)...(19): siRNA sense strand
ugcccucccuauaaagaaa

SEQ ID NO: 1948210 - RNA, 19 nt, Homo sapiens
  misc_RNA (1)...(19): siRNA sense strand
gugaaugcaaauaugaaga

SEQ ID NO: 1948211 - RNA, 19 nt, Homo sapiens
  misc_RNA (1)...(19): siRNA sense strand
uguaucugcccucccuaua

SEQ ID NO: 1948212 - RNA, 19 nt, Homo sapiens
  misc_RNA (1)...(19): siRNA sense strand
caacacaccuuaugagaaa

SEQ ID NO: 1948213 - RNA, 19 nt, Homo sapiens
  misc_RNA (1)...(19): siRNA sense strand
ugacauauccucagaauuu

SEQ ID NO: 1948214 - RNA, 19 nt, Homo sapiens
  misc_RNA (1)...(19): siRNA sense strand
ccugcgagcucaaauauua

SEQ ID NO: 1948215 - RNA, 19 nt, Homo sapiens
  misc_RNA (1)...(19): siRNA sense strand
guacacaacucaacacaga

SEQ ID NO: 1948216 - RNA, 19 nt, Homo sapiens
  misc_RNA (1)...(19): siRNA sense strand
agagagagcugcacauguu

SEQ ID NO: 1948217 - RNA, 19 nt, Homo sapiens
  misc_RNA (1)...(19): siRNA sense strand
aggaagagaugcuugauaa

SEQ ID NO: 1948218 - RNA, 19 nt, Homo sapiens
  misc_RNA (1)...(19): siRNA sense strand
gaaguuaucauuccugaga

SEQ ID NO: 1948219 - RNA, 19 nt, Homo sapiens
  misc_RNA (1)...(19): siRNA sense strand
gacauauccucagaauuua

SEQ ID NO: 1948220 - RNA, 19 nt, Homo sapiens
  misc_RNA (1)...(19): siRNA sense strand
gaagagaugcuugauaauc

SEQ ID NO: 1948221 - RNA, 19 nt, Homo sapiens
  misc_RNA (1)...(19): siRNA sense strand
gaaggccagucagcuagua

SEQ ID NO: 1948222 - RNA, 19 nt, Homo sapiens
  misc_RNA (1)...(19): siRNA sense strand
gcucauggcugacauaucc

SEQ ID NO: 1948223 - RNA, 19 nt, Homo sapiens
  misc_RNA (1)...(19): siRNA sense strand
gaagagagagcugcacaug

SEQ ID NO: 1948224 - RNA, 19 nt, Homo sapiens
  misc_RNA (1)...(19): siRNA sense strand
gaggaagagaugcuugaua

SEQ ID NO: 1948225 - RNA, 19 nt, Homo sapiens
  misc_RNA (1)...(19): siRNA sense strand
ccugagagguacccauuug

SEQ ID NO: 1948226 - RNA, 19 nt, Homo sapiens
  misc_RNA (1)...(19): siRNA sense strand
gagagagcugcacauguua

SEQ ID NO: 1948227 - RNA, 19 nt, Homo sapiens
  misc_RNA (1)...(19): siRNA sense strand
ggauuugucuggauguucu

SEQ ID NO: 1948228 - RNA, 19 nt, Homo sapiens
  misc_RNA (1)...(19): siRNA sense strand
ccucagauccgauuucuca

SEQ ID NO: 1948229 - RNA, 19 nt, Homo sapiens
  misc_RNA (1)...(19): siRNA sense strand
gagccaacacaccuuauga

SEQ ID NO: 1948230 - RNA, 19 nt, Homo sapiens
  misc_RNA (1)...(19): siRNA sense strand
cgauuucucacuccaauuu

SEQ ID NO: 1948231 - RNA, 19 nt, Homo sapiens
  misc_RNA (1)...(19): siRNA sense strand
acaaaaggcugaugaggaa

SEQ ID NO: 1948232 - RNA, 19 nt, Homo sapiens
  misc_RNA (1)...(19): siRNA sense strand
gcaagauaaagaccaaaug

SEQ ID NO: 1948233 - RNA, 19 nt, Homo sapiens
  misc_RNA (1)...(19): siRNA sense strand
gaccugcgagcucaaauau

SEQ ID NO: 1948234 - RNA, 19 nt, Homo sapiens
  misc_RNA (1)...(19): siRNA sense strand
gucuggauguucucaaauu

SEQ ID NO: 1948235 - RNA, 19 nt, Homo sapiens
  misc_RNA (1)...(19): siRNA sense strand
ccaacacaccuuaugagaa

SEQ ID NO: 1948236 - RNA, 19 nt, Homo sapiens
  misc_RNA (1)...(19): siRNA sense strand
gaagcaugcaagacagaaa

SEQ ID NO: 1948237 - RNA, 19 nt, Homo sapiens
  misc_RNA (1)...(19): siRNA sense strand
ucacauguuggcaagauaa

SEQ ID NO: 1948238 - RNA, 19 nt, Homo sapiens
  misc_RNA (1)...(19): siRNA sense strand
auaaagaccaaauggauga

SEQ ID NO: 1948239 - RNA, 19 nt, Homo sapiens
  misc_RNA (1)...(19): siRNA sense strand
caagauaaagaccaaaugg

SEQ ID NO: 1948240 - RNA, 19 nt, Homo sapiens
  misc_RNA (1)...(19): siRNA sense strand
cagagaagcaugcaagaca

SEQ ID NO: 1948241 - RNA, 19 nt, Homo sapiens
  misc_RNA (1)...(19): siRNA sense strand
guucucaaauugccaccaa

SEQ ID NO: 1948242 - RNA, 19 nt, Homo sapiens
  misc_RNA (1)...(19): siRNA sense strand
caucacauguuggcaagau

SEQ ID NO: 1948243 - RNA, 19 nt, Homo sapiens
  misc_RNA (1)...(19): siRNA sense strand
gccagacaguggacagaga

SEQ ID NO: 1948244 - RNA, 19 nt, Homo sapiens
  misc_RNA (1)...(19): siRNA sense strand
acacaacucaacacagaaa

SEQ ID NO: 1948245 - RNA, 19 nt, Homo sapiens
  misc_RNA (1)...(19): siRNA sense strand
ggaagagaugcuugauaau

SEQ ID NO: 1948246 - RNA, 19 nt, Homo sapiens
  misc_RNA (1)...(19): siRNA sense strand
gauuucucacuccaauuua

SEQ ID NO: 1948247 - RNA, 19 nt, Homo sapiens
  misc_RNA (1)...(19): siRNA sense strand
gagaagcaugcaagacaga

SEQ ID NO: 1948248 - RNA, 19 nt, Homo sapiens
  misc_RNA (1)...(19): siRNA sense strand
ugaccugcgagcucaaaua

SEQ ID NO: 1948249 - RNA, 19 nt, Homo sapiens
  misc_RNA (1)...(19): siRNA sense strand
gccaacacaccuuaugaga

SEQ ID NO: 1948250 - RNA, 19 nt, Homo sapiens
  misc_RNA (1)...(19): siRNA sense strand
cuauucagcugcucauguc

SEQ ID NO: 1948251 - RNA, 19 nt, Homo sapiens
  misc_RNA (1)...(19): siRNA sense strand
gagaccaucccucaacauc

SEQ ID NO: 1948252 - RNA, 19 nt, Homo sapiens
  misc_RNA (1)...(19): siRNA sense strand
cauguuggcaagauaaaga

SEQ ID NO: 1948253 - RNA, 19 nt, Homo sapiens
  misc_RNA (1)...(19): siRNA sense strand
ugagagguacccauuugaa

SEQ ID NO: 1948254 - RNA, 19 nt, Homo sapiens
  misc_RNA (1)...(19): siRNA sense strand
agauaaagaccaaauggau

SEQ ID NO: 1948255 - RNA, 19 nt, Homo sapiens
  misc_RNA (1)...(19): siRNA sense strand
aagccagccuuccucaaga

SEQ ID NO: 1948256 - RNA, 19 nt, Homo sapiens
  misc_RNA (1)...(19): siRNA sense strand
ugauucugcuggaaggauu

SEQ ID NO: 1948257 - RNA, 19 nt, Homo sapiens
  misc_RNA (1)...(19): siRNA sense strand
ggagccaacacaccuuaug

SEQ ID NO: 1948258 - RNA, 19 nt, Homo sapiens
  misc_RNA (1)...(19): siRNA sense strand
caugcaagacagaaacaaa

SEQ ID NO: 1948259 - RNA, 19 nt, Homo sapiens
  misc_RNA (1)...(19): siRNA sense strand
ucuggauguucucaaauug

SEQ ID NO: 1948260 - RNA, 19 nt, Homo sapiens
  misc_RNA (1)...(19): siRNA sense strand
guggagccaacacaccuua

SEQ ID NO: 1948261 - RNA, 19 nt, Homo sapiens
  misc_RNA (1)...(19): siRNA sense strand
cagcuaguaggcauagaaa

SEQ ID NO: 1948262 - RNA, 19 nt, Homo sapiens
  misc_RNA (1)...(19): siRNA sense strand
uaagccagccuuccucaag

SEQ ID NO: 1948263 - RNA, 19 nt, Homo sapiens
  misc_RNA (1)...(19): siRNA sense strand
ccagacaguggacagagaa

SEQ ID NO: 1948264 - RNA, 19 nt, Homo sapiens
  misc_RNA (1)...(19): siRNA sense strand
gcuagaaguuaucauuccu

SEQ ID NO: 1948265 - RNA, 19 nt, Homo sapiens
  misc_RNA (1)...(19): siRNA sense strand
ggcaagauaaagaccaaau

SEQ ID NO: 1948266 - RNA, 19 nt, Homo sapiens
  misc_RNA (1)...(19): siRNA sense strand
aaggaaggccagucagcua

SEQ ID NO: 1948267 - RNA, 19 nt, Homo sapiens
  misc_RNA (1)...(19): siRNA sense strand
gacagagaagcaugcaaga

SEQ ID NO: 1948268 - RNA, 19 nt, Homo sapiens
  misc_RNA (1)...(19): siRNA sense strand
gagagguacccauuugaac

SEQ ID NO: 1948269 - RNA, 19 nt, Homo sapiens
  misc_RNA (1)...(19): siRNA sense strand
cauuugaaccuccucagau

SEQ ID NO: 1948270 - RNA, 19 nt, Homo sapiens
  misc_RNA (1)...(19): siRNA sense strand
ucagcuaguaggcauagaa

SEQ ID NO: 1948271 - RNA, 19 nt, Homo sapiens
  misc_RNA (1)...(19): siRNA sense strand
gaaggauuugucuggaugu

SEQ ID NO: 1948272 - RNA, 19 nt, Homo sapiens
  misc_RNA (1)...(19): siRNA sense strand
uggaaggauuugucuggau

SEQ ID NO: 1948273 - RNA, 19 nt, Homo sapiens
  misc_RNA (1)...(19): siRNA sense strand
cagccuuccucaagaaugc

SEQ ID NO: 1948274 - RNA, 19 nt, Homo sapiens
  misc_RNA (1)...(19): siRNA sense strand
gaugaccugcgagcucaaa

SEQ ID NO: 1948275 - RNA, 19 nt, Homo sapiens
  misc_RNA (1)...(19): siRNA sense strand
cagaacccaacccugauga

SEQ ID NO: 1948276 - RNA, 19 nt, Homo sapiens
  misc_RNA (1)...(19): siRNA sense strand
ggaaggccagucagcuagu

SEQ ID NO: 1948277 - RNA, 19 nt, Homo sapiens
  misc_RNA (1)...(19): siRNA sense strand
gaugcuugauaaucuacca

SEQ ID NO: 1948278 - RNA, 19 nt, Homo sapiens
  misc_RNA (1)...(19): siRNA sense strand
ccauuugaaccuccucaga

SEQ ID NO: 1948279 - RNA, 19 nt, Homo sapiens
  misc_RNA (1)...(19): siRNA sense strand
gacaguggacagagaagca

SEQ ID NO: 1948280 - RNA, 19 nt, Homo sapiens
  misc_RNA (1)...(19): siRNA sense strand
uggagaccaucccucaaca

SEQ ID NO: 1948281 - RNA, 19 nt, Homo sapiens
  misc_RNA (1)...(19): siRNA sense strand
ucgagaaccuggacgauaa

SEQ ID NO: 1948282 - RNA, 19 nt, Homo sapiens
  misc_RNA (1)...(19): siRNA sense strand
gcagccgccuggugcuuua

SEQ ID NO: 1948283 - RNA, 19 nt, Homo sapiens
  misc_RNA (1)...(19): siRNA sense strand
ggagaccucgcgcaaguau

SEQ ID NO: 1948284 - RNA, 19 nt, Homo sapiens
  misc_RNA (1)...(19): siRNA sense strand
caucgugggcuuccaaguu

SEQ ID NO: 1948285 - RNA, 19 nt, Homo sapiens
  misc_RNA (1)...(19): siRNA sense strand
gcgcgcucgugcugcaaua

SEQ ID NO: 1948286 - RNA, 19 nt, Homo sapiens
  misc_RNA (1)...(19): siRNA sense strand
caaaguucuucaccuucga

SEQ ID NO: 1948287 - RNA, 19 nt, Homo sapiens
  misc_RNA (1)...(19): siRNA sense strand
agccaaaguucuucaccuu

SEQ ID NO: 1948288 - RNA, 19 nt, Homo sapiens
  misc_RNA (1)...(19): siRNA sense strand
uccaaguucucaacgcuau

SEQ ID NO: 1948289 - RNA, 19 nt, Homo sapiens
  misc_RNA (1)...(19): siRNA sense strand
gcgcugccuucugcugcua

SEQ ID NO: 1948290 - RNA, 19 nt, Homo sapiens
  misc_RNA (1)...(19): siRNA sense strand
ccaggacgccacgcaagaa

SEQ ID NO: 1948291 - RNA, 19 nt, Homo sapiens
  misc_RNA (1)...(19): siRNA sense strand
ccacggugaaccuccugua

SEQ ID NO: 1948292 - RNA, 19 nt, Homo sapiens
  misc_RNA (1)...(19): siRNA sense strand
gggauguggucagcugcuu

SEQ ID NO: 1948293 - RNA, 19 nt, Homo sapiens
  misc_RNA (1)...(19): siRNA sense strand
ggacgacguggagcucaug

SEQ ID NO: 1948294 - RNA, 19 nt, Homo sapiens
  misc_RNA (1)...(19): siRNA sense strand
ggugaaaugugucaaugaa

SEQ ID NO: 1948295 - RNA, 19 nt, Homo sapiens
  misc_RNA (1)...(19): siRNA sense strand
gacccuauguucagaauug

SEQ ID NO: 1948296 - RNA, 19 nt, Homo sapiens
  misc_RNA (1)...(19): siRNA sense strand
ugacaaacuuccuaucuuc

SEQ ID NO: 1948297 - RNA, 19 nt, Homo sapiens
  misc_RNA (1)...(19): siRNA sense strand
gaauaacccuggaaaaguu

SEQ ID NO: 1948298 - RNA, 19 nt, Homo sapiens
  misc_RNA (1)...(19): siRNA sense strand
gagcugcgaucaaguacau

SEQ ID NO: 1948299 - RNA, 19 nt, Homo sapiens
  misc_RNA (1)...(19): siRNA sense strand
aagcugagaccaagaauaa

SEQ ID NO: 1948300 - RNA, 19 nt, Homo sapiens
  misc_RNA (1)...(19): siRNA sense strand
cuuccuaucuucccugauu

SEQ ID NO: 1948301 - RNA, 19 nt, Homo sapiens
  misc_RNA (1)...(19): siRNA sense strand
ucagagcugcgaucaagua

SEQ ID NO: 1948302 - RNA, 19 nt, Homo sapiens
  misc_RNA (1)...(19): siRNA sense strand
gagaagcgacucagcaaag

SEQ ID NO: 1948303 - RNA, 19 nt, Homo sapiens
  misc_RNA (1)...(19): siRNA sense strand
ccucagagcugcgaucaag

SEQ ID NO: 1948304 - RNA, 19 nt, Homo sapiens
  misc_RNA (1)...(19): siRNA sense strand
gcugcgaucaaguacauua

SEQ ID NO: 1948305 - RNA, 19 nt, Homo sapiens
  misc_RNA (1)...(19): siRNA sense strand
aaaguuuccuccaugauag

SEQ ID NO: 1948306 - RNA, 19 nt, Homo sapiens
  misc_RNA (1)...(19): siRNA sense strand
ucaaguacauuaacuaccu

SEQ ID NO: 1948307 - RNA, 19 nt, Homo sapiens
  misc_RNA (1)...(19): siRNA sense strand
ccaagaauaacccuggaaa

SEQ ID NO: 1948308 - RNA, 19 nt, Homo sapiens
  misc_RNA (1)...(19): siRNA sense strand
ggagaagcgacucagcaaa

SEQ ID NO: 1948309 - RNA, 19 nt, Homo sapiens
  misc_RNA (1)...(19): siRNA sense strand
ccaccaugcugacccuaug

SEQ ID NO: 1948310 - RNA, 19 nt, Homo sapiens
  misc_RNA (1)...(19): siRNA sense strand
ucucuucuguacccugaua

SEQ ID NO: 1948311 - RNA, 19 nt, Homo sapiens
  misc_RNA (1)...(19): siRNA sense strand
uuaacuaccugcagucucu

SEQ ID NO: 1948312 - RNA, 19 nt, Homo sapiens
  misc_RNA (1)...(19): siRNA sense strand
ggaaaggcagcgggugaaa

SEQ ID NO: 1948313 - RNA, 19 nt, Homo sapiens
  misc_RNA (1)...(19): siRNA sense strand
gaucaaguacauuaacuac

SEQ ID NO: 1948314 - RNA, 19 nt, Homo sapiens
  misc_RNA (1)...(19): siRNA sense strand
aaaggcagcgggugaaaug

SEQ ID NO: 1948315 - RNA, 19 nt, Homo sapiens
  misc_RNA (1)...(19): siRNA sense strand
gaaaggcagcgggugaaau

SEQ ID NO: 1948316 - RNA, 19 nt, Homo sapiens
  misc_RNA (1)...(19): siRNA sense strand
ucucuuauccugggaaauu

SEQ ID NO: 1948317 - RNA, 19 nt, Homo sapiens
  misc_RNA (1)...(19): siRNA sense strand
uagucuaccugacaaacuu

SEQ ID NO: 1948318 - RNA, 19 nt, Homo sapiens
  misc_RNA (1)...(19): siRNA sense strand
ccugggaaauuacagugaa

SEQ ID NO: 1948319 - RNA, 19 nt, Homo sapiens
  misc_RNA (1)...(19): siRNA sense strand
caaaguggaaacccucaga

SEQ ID NO: 1948320 - RNA, 19 nt, Homo sapiens
  misc_RNA (1)...(19): siRNA sense strand
cugacaaacuuccuaucuu

SEQ ID NO: 1948321 - RNA, 19 nt, Homo sapiens
  misc_RNA (1)...(19): siRNA sense strand
gcgaucaaguacauuaacu

SEQ ID NO: 1948322 - RNA, 19 nt, Homo sapiens
  misc_RNA (1)...(19): siRNA sense strand
cccgaugccuuauccaaau

SEQ ID NO: 1948323 - RNA, 19 nt, Homo sapiens
  misc_RNA (1)...(19): siRNA sense strand
ccgaugccuuauccaaauu

SEQ ID NO: 1948324 - RNA, 19 nt, Homo sapiens
  misc_RNA (1)...(19): siRNA sense strand
ggcagcgggugaaaugugu

SEQ ID NO: 1948325 - RNA, 19 nt, Homo sapiens
  misc_RNA (1)...(19): siRNA sense strand
cagaggaguauuuggagaa

SEQ ID NO: 1948326 - RNA, 19 nt, Homo sapiens
  misc_RNA (1)...(19): siRNA sense strand
uggagcccauggucacuuu

SEQ ID NO: 1948327 - RNA, 19 nt, Homo sapiens
  misc_RNA (1)...(19): siRNA sense strand
ccuauguucagaauuguuu

SEQ ID NO: 1948328 - RNA, 19 nt, Homo sapiens
  misc_RNA (1)...(19): siRNA sense strand
gaagcgacucagcaaagug

SEQ ID NO: 1948329 - RNA, 19 nt, Homo sapiens
  misc_RNA (1)...(19): siRNA sense strand
ucucuuucccgaugccuua

SEQ ID NO: 1948330 - RNA, 19 nt, Homo sapiens
  misc_RNA (1)...(19): siRNA sense strand
cgaucaaguacauuaacua

SEQ ID NO: 1948331 - RNA, 19 nt, Homo sapiens
  misc_RNA (1)...(19): siRNA sense strand
aaagcugagaccaagaaua

SEQ ID NO: 1948332 - RNA, 19 nt, Homo sapiens
  misc_RNA (1)...(19): siRNA sense strand
cgaugccuuauccaaauua

SEQ ID NO: 1948333 - RNA, 19 nt, Homo sapiens
  misc_RNA (1)...(19): siRNA sense strand
aaaaguuuccuccaugaua

SEQ ID NO: 1948334 - RNA, 19 nt, Homo sapiens
  misc_RNA (1)...(19): siRNA sense strand
gauaaagcugagaccaaga

SEQ ID NO: 1948335 - RNA, 19 nt, Homo sapiens
  misc_RNA (1)...(19): siRNA sense strand
cgggugaaaugugucaaug

SEQ ID NO: 1948336 - RNA, 19 nt, Homo sapiens
  misc_RNA (1)...(19): siRNA sense strand
uaccugcagucucuucugu

SEQ ID NO: 1948337 - RNA, 19 nt, Homo sapiens
  misc_RNA (1)...(19): siRNA sense strand
agaagcgacucagcaaagu

SEQ ID NO: 1948338 - RNA, 19 nt, Homo sapiens
  misc_RNA (1)...(19): siRNA sense strand
gggugaaaugugucaauga

SEQ ID NO: 1948339 - RNA, 19 nt, Homo sapiens
  misc_RNA (1)...(19): siRNA sense strand
uuacagagggugcgaguac

SEQ ID NO: 1948340 - RNA, 19 nt, Homo sapiens
  misc_RNA (1)...(19): siRNA sense strand
auaaagcugagaccaagaa

SEQ ID NO: 1948341 - RNA, 19 nt, Homo sapiens
  misc_RNA (1)...(19): siRNA sense strand
cgacucagcaaaguggaaa

SEQ ID NO: 1948342 - RNA, 19 nt, Homo sapiens
  misc_RNA (1)...(19): siRNA sense strand
gggaaaggcagcgggugaa

SEQ ID NO: 1948343 - RNA, 19 nt, Homo sapiens
  misc_RNA (1)...(19): siRNA sense strand
gagggugcgaguacuccua

SEQ ID NO: 1948344 - RNA, 19 nt, Homo sapiens
  misc_RNA (1)...(19): siRNA sense strand
acucuagucuaccugacaa

SEQ ID NO: 1948345 - RNA, 19 nt, Homo sapiens
  misc_RNA (1)...(19): siRNA sense strand
ucugcccgcuugccacuga

SEQ ID NO: 1948346 - RNA, 19 nt, Homo sapiens
  misc_RNA (1)...(19): siRNA sense strand
cucuuauccugggaaauua

SEQ ID NO: 1948347 - RNA, 19 nt, Homo sapiens
  misc_RNA (1)...(19): siRNA sense strand
gagaagaacuguagucaug

SEQ ID NO: 1948348 - RNA, 19 nt, Homo sapiens
  misc_RNA (1)...(19): siRNA sense strand
caacaaaggucuacaaacu

SEQ ID NO: 1948349 - RNA, 19 nt, Homo sapiens
  misc_RNA (1)...(19): siRNA sense strand
gagauucuaugaagacuuu

SEQ ID NO: 1948350 - RNA, 19 nt, Homo sapiens
  misc_RNA (1)...(19): siRNA sense strand
gcagguauuugaagaguuu

SEQ ID NO: 1948351 - RNA, 19 nt, Homo sapiens
  misc_RNA (1)...(19): siRNA sense strand
gaacaagccucaguauauc

SEQ ID NO: 1948352 - RNA, 19 nt, Homo sapiens
  misc_RNA (1)...(19): siRNA sense strand
gaauacagcccucugcuuu

SEQ ID NO: 1948353 - RNA, 19 nt, Homo sapiens
  misc_RNA (1)...(19): siRNA sense strand
ggucaagucucuuaaggaa

SEQ ID NO: 1948354 - RNA, 19 nt, Homo sapiens
  misc_RNA (1)...(19): siRNA sense strand
gaagaacuguagucaugaa

SEQ ID NO: 1948355 - RNA, 19 nt, Homo sapiens
  misc_RNA (1)...(19): siRNA sense strand
gaaagggaccgccaugaaa

SEQ ID NO: 1948356 - RNA, 19 nt, Homo sapiens
  misc_RNA (1)...(19): siRNA sense strand
ggaguuagcauaucaugaa

SEQ ID NO: 1948357 - RNA, 19 nt, Homo sapiens
  misc_RNA (1)...(19): siRNA sense strand
gcacacagguuuggguuug

SEQ ID NO: 1948358 - RNA, 19 nt, Homo sapiens
  misc_RNA (1)...(19): siRNA sense strand
gaacuguagucaugaagug

SEQ ID NO: 1948359 - RNA, 19 nt, Homo sapiens
  misc_RNA (1)...(19): siRNA sense strand
ggaguuugcuggcaucaga

SEQ ID NO: 1948360 - RNA, 19 nt, Homo sapiens
  misc_RNA (1)...(19): siRNA sense strand
cagaugagcugugaaaugu

SEQ ID NO: 1948361 - RNA, 19 nt, Homo sapiens
  misc_RNA (1)...(19): siRNA sense strand
uaaggaagauuuacagaag

SEQ ID NO: 1948362 - RNA, 19 nt, Homo sapiens
  misc_RNA (1)...(19): siRNA sense strand
ggacagcccacgaaaggua

SEQ ID NO: 1948363 - RNA, 19 nt, Homo sapiens
  misc_RNA (1)...(19): siRNA sense strand
gcagaacguuccacaaagu

SEQ ID NO: 1948364 - RNA, 19 nt, Homo sapiens
  misc_RNA (1)...(19): siRNA sense strand
gaauaaaacuggcaggaaa

SEQ ID NO: 1948365 - RNA, 19 nt, Homo sapiens
  misc_RNA (1)...(19): siRNA sense strand
gaacaacaaaggucuacaa

SEQ ID NO: 1948366 - RNA, 19 nt, Homo sapiens
  misc_RNA (1)...(19): siRNA sense strand
agaaagcugugaaugguuu

SEQ ID NO: 1948367 - RNA, 19 nt, Homo sapiens
  misc_RNA (1)...(19): siRNA sense strand
ucacuucucguaaccauua

SEQ ID NO: 1948368 - RNA, 19 nt, Homo sapiens
  misc_RNA (1)...(19): siRNA sense strand
caaguugccuggagaagau

SEQ ID NO: 1948369 - RNA, 19 nt, Homo sapiens
  misc_RNA (1)...(19): siRNA sense strand
gagaacaagccucaguaua

SEQ ID NO: 1948370 - RNA, 19 nt, Homo sapiens
  misc_RNA (1)...(19): siRNA sense strand
ggaaagggaccgccaugaa

SEQ ID NO: 1948371 - RNA, 19 nt, Homo sapiens
  misc_RNA (1)...(19): siRNA sense strand
cgcgauaccuucccaagua

SEQ ID NO: 1948372 - RNA, 19 nt, Homo sapiens
  misc_RNA (1)...(19): siRNA sense strand
ccaugaagcuuacguccaa

SEQ ID NO: 1948373 - RNA, 19 nt, Homo sapiens
  misc_RNA (1)...(19): siRNA sense strand
gcaccuguuugauagcuuu

SEQ ID NO: 1948374 - RNA, 19 nt, Homo sapiens
  misc_RNA (1)...(19): siRNA sense strand
gcagaugacugggcccauu

SEQ ID NO: 1948375 - RNA, 19 nt, Homo sapiens
  misc_RNA (1)...(19): siRNA sense strand
gcagggcuaccaaaucaua

SEQ ID NO: 1948376 - RNA, 19 nt, Homo sapiens
  misc_RNA (1)...(19): siRNA sense strand
gaagagcuccgcccaguca

SEQ ID NO: 1948377 - RNA, 19 nt, Homo sapiens
  misc_RNA (1)...(19): siRNA sense strand
caccagacccgacagaaua

SEQ ID NO: 1948378 - RNA, 19 nt, Homo sapiens
  misc_RNA (1)...(19): siRNA sense strand
gaagauggugugcagauga

SEQ ID NO: 1948379 - RNA, 19 nt, Homo sapiens
  misc_RNA (1)...(19): siRNA sense strand
ggaaggagaagaacuguag

SEQ ID NO: 1948380 - RNA, 19 nt, Homo sapiens
  misc_RNA (1)...(19): siRNA sense strand
agaacaagccucaguauau

SEQ ID NO: 1948381 - RNA, 19 nt, Homo sapiens
  misc_RNA (1)...(19): siRNA sense strand
gggcagaacguuccacaaa

SEQ ID NO: 1948382 - RNA, 19 nt, Homo sapiens
  misc_RNA (1)...(19): siRNA sense strand
gggcagugaugaugagcua

SEQ ID NO: 1948383 - RNA, 19 nt, Homo sapiens
  misc_RNA (1)...(19): siRNA sense strand
caacaguggugcagguaug

SEQ ID NO: 1948384 - RNA, 19 nt, Homo sapiens
  misc_RNA (1)...(19): siRNA sense strand
ggacuucacuucucguaac

SEQ ID NO: 1948385 - RNA, 19 nt, Homo sapiens
  misc_RNA (1)...(19): siRNA sense strand
gcgagcaccuguuugauag

SEQ ID NO: 1948386 - RNA, 19 nt, Homo sapiens
  misc_RNA (1)...(19): siRNA sense strand
caaguauccuuaugaaucu

SEQ ID NO: 1948387 - RNA, 19 nt, Homo sapiens
  misc_RNA (1)...(19): siRNA sense strand
gaaauaaaccgagccucaa

SEQ ID NO: 1948388 - RNA, 19 nt, Homo sapiens
  misc_RNA (1)...(19): siRNA sense strand
ccaaguauccuuaugaauc

SEQ ID NO: 1948389 - RNA, 19 nt, Homo sapiens
  misc_RNA (1)...(19): siRNA sense strand
gaaguggaccgccuacuca

SEQ ID NO: 1948390 - RNA, 19 nt, Homo sapiens
  misc_RNA (1)...(19): siRNA sense strand
gcagcgagcaccuguuuga

SEQ ID NO: 1948391 - RNA, 19 nt, Homo sapiens
  misc_RNA (1)...(19): siRNA sense strand
gaguccagcugcucucuga

SEQ ID NO: 1948392 - RNA, 19 nt, Homo sapiens
  misc_RNA (1)...(19): siRNA sense strand
gaaacguacugggaucgaa

SEQ ID NO: 1948393 - RNA, 19 nt, Homo sapiens
  misc_RNA (1)...(19): siRNA sense strand
gaaugcagccuuugagauc

SEQ ID NO: 1948394 - RNA, 19 nt, Homo sapiens
  misc_RNA (1)...(19): siRNA sense strand
caucaagcuuggagacauu

SEQ ID NO: 1948395 - RNA, 19 nt, Homo sapiens
  misc_RNA (1)...(19): siRNA sense strand
gaugacagcccagcaggua

SEQ ID NO: 1948396 - RNA, 19 nt, Homo sapiens
  misc_RNA (1)...(19): siRNA sense strand
augaaaggcuugcagauga

SEQ ID NO: 1948397 - RNA, 19 nt, Homo sapiens
  misc_RNA (1)...(19): siRNA sense strand
gaacuguggguuaagaaug

SEQ ID NO: 1948398 - RNA, 19 nt, Homo sapiens
  misc_RNA (1)...(19): siRNA sense strand
ccauugacaucaugcagaa

SEQ ID NO: 1948399 - RNA, 19 nt, Homo sapiens
  misc_RNA (1)...(19): siRNA sense strand
aagugacgcugaaggauaa

SEQ ID NO: 1948400 - RNA, 19 nt, Homo sapiens
  misc_RNA (1)...(19): siRNA sense strand
cuacgucggcuaugguuua

SEQ ID NO: 1948401 - RNA, 19 nt, Homo sapiens
  misc_RNA (1)...(19): siRNA sense strand
ugagaaagcugugaauggu

SEQ ID NO: 1948402 - RNA, 19 nt, Homo sapiens
  misc_RNA (1)...(19): siRNA sense strand
uaacuucccugcugagaac

SEQ ID NO: 1948403 - RNA, 19 nt, Homo sapiens
  misc_RNA (1)...(19): siRNA sense strand
gagagucacagucgaaaga

SEQ ID NO: 1948404 - RNA, 19 nt, Homo sapiens
  misc_RNA (1)...(19): siRNA sense strand
cuacaucaaccgcaacuuu

SEQ ID NO: 1948405 - RNA, 19 nt, Homo sapiens
  misc_RNA (1)...(19): siRNA sense strand
gauauguggcgacuaaaga

SEQ ID NO: 1948406 - RNA, 19 nt, Homo sapiens
  misc_RNA (1)...(19): siRNA sense strand
gacuucagcuuaauugagu

SEQ ID NO: 1948407 - RNA, 19 nt, Homo sapiens
  misc_RNA (1)...(19): siRNA sense strand
gaccaguauuggcugagua

SEQ ID NO: 1948408 - RNA, 19 nt, Homo sapiens
  misc_RNA (1)...(19): siRNA sense strand
ggagagcaaccguuacaug

SEQ ID NO: 1948409 - RNA, 19 nt, Homo sapiens
  misc_RNA (1)...(19): siRNA sense strand
acaaagugguggugcagaa

SEQ ID NO: 1948410 - RNA, 19 nt, Homo sapiens
  misc_RNA (1)...(19): siRNA sense strand
gcugaucuauuuaccaagu

SEQ ID NO: 1948411 - RNA, 19 nt, Homo sapiens
  misc_RNA (1)...(19): siRNA sense strand
gaagauuuacagaaggaaa

SEQ ID NO: 1948412 - RNA, 19 nt, Homo sapiens
  misc_RNA (1)...(19): siRNA sense strand
gcuuugaacccgaaacgua

SEQ ID NO: 1948413 - RNA, 19 nt, Homo sapiens
  misc_RNA (1)...(19): siRNA sense strand
gauaguaacggacaaagag

SEQ ID NO: 1948414 - RNA, 19 nt, Homo sapiens
  misc_RNA (1)...(19): siRNA sense strand
acgaacggcuggaggagua

SEQ ID NO: 1948415 - RNA, 19 nt, Homo sapiens
  misc_RNA (1)...(19): siRNA sense strand
aaagugacgcugaaggaua

SEQ ID NO: 1948416 - RNA, 19 nt, Homo sapiens
  misc_RNA (1)...(19): siRNA sense strand
gaauauggcggagcuacaa

SEQ ID NO: 1948417 - RNA, 19 nt, Homo sapiens
  misc_RNA (1)...(19): siRNA sense strand
gaacgcccuucccauccaa

SEQ ID NO: 1948418 - RNA, 19 nt, Homo sapiens
  misc_RNA (1)...(19): siRNA sense strand
ccaucaaucugucauucaa

SEQ ID NO: 1948419 - RNA, 19 nt, Homo sapiens
  misc_RNA (1)...(19): siRNA sense strand
gaauugguguggauuuggu

SEQ ID NO: 1948420 - RNA, 19 nt, Homo sapiens
  misc_RNA (1)...(19): siRNA sense strand
gggcagcgagcaccuguuu

SEQ ID NO: 1948421 - RNA, 19 nt, Homo sapiens
  misc_RNA (1)...(19): siRNA sense strand
gguuugagguggccuuugu

SEQ ID NO: 1948422 - RNA, 19 nt, Homo sapiens
  misc_RNA (1)...(19): siRNA sense strand
aaagguaucuguggaccaa

SEQ ID NO: 1948423 - RNA, 19 nt, Homo sapiens
  misc_RNA (1)...(19): siRNA sense strand
aagcuuacguccaacagaa

SEQ ID NO: 1948424 - RNA, 19 nt, Homo sapiens
  misc_RNA (1)...(19): siRNA sense strand
cuaugacgcucaaguguuc

SEQ ID NO: 1948425 - RNA, 19 nt, Homo sapiens
  misc_RNA (1)...(19): siRNA sense strand
guuacaugcugucccauug

SEQ ID NO: 1948426 - RNA, 19 nt, Homo sapiens
  misc_RNA (1)...(19): siRNA sense strand
ggaugugacccuugaccua

SEQ ID NO: 1948427 - RNA, 19 nt, Homo sapiens
  misc_RNA (1)...(19): siRNA sense strand
cacaggcgauggccauuga

SEQ ID NO: 1948428 - RNA, 19 nt, Homo sapiens
  misc_RNA (1)...(19): siRNA sense strand
gcauguccuucuugaacuu

SEQ ID NO: 1948429 - RNA, 19 nt, Homo sapiens
  misc_RNA (1)...(19): siRNA sense strand
ccaagcagcggaugauaga

SEQ ID NO: 1948430 - RNA, 19 nt, Homo sapiens
  misc_RNA (1)...(19): siRNA sense strand
uuuccuugcugaucuauuu

SEQ ID NO: 1948431 - RNA, 19 nt, Homo sapiens
  misc_RNA (1)...(19): siRNA sense strand
ggugaacuguggguuaaga

SEQ ID NO: 1948432 - RNA, 19 nt, Homo sapiens
  misc_RNA (1)...(19): siRNA sense strand
caggaugucuauguuaaug

SEQ ID NO: 1948433 - RNA, 19 nt, Homo sapiens
  misc_RNA (1)...(19): siRNA sense strand
ccaaacagccacuccuaug

SEQ ID NO: 1948434 - RNA, 19 nt, Homo sapiens
  misc_RNA (1)...(19): siRNA sense strand
gcaguagcccacucuauag

SEQ ID NO: 1948435 - RNA, 19 nt, Homo sapiens
  misc_RNA (1)...(19): siRNA sense strand
caugggagagcaaccguua

SEQ ID NO: 1948436 - RNA, 19 nt, Homo sapiens
  misc_RNA (1)...(19): siRNA sense strand
ggaugucuauguuaauguc

SEQ ID NO: 1948437 - RNA, 19 nt, Homo sapiens
  misc_RNA (1)...(19): siRNA sense strand
gacugugacucaaguguuc

SEQ ID NO: 1948438 - RNA, 19 nt, Homo sapiens
  misc_RNA (1)...(19): siRNA sense strand
ggcaacuccuggaugguuu

SEQ ID NO: 1948439 - RNA, 19 nt, Homo sapiens
  misc_RNA (1)...(19): siRNA sense strand
gagaagccauccagaucca

SEQ ID NO: 1948440 - RNA, 19 nt, Homo sapiens
  misc_RNA (1)...(19): siRNA sense strand
ccaaguggaaggagaagaa

SEQ ID NO: 1948441 - RNA, 19 nt, Homo sapiens
  misc_RNA (1)...(19): siRNA sense strand
ggggauauguggcgacuaa

SEQ ID NO: 1948442 - RNA, 19 nt, Homo sapiens
  misc_RNA (1)...(19): siRNA sense strand
uaucaggaugucuauguua

SEQ ID NO: 1948443 - RNA, 19 nt, Homo sapiens
  misc_RNA (1)...(19): siRNA sense strand
gaccuuaucaggaugucua

SEQ ID NO: 1948444 - RNA, 19 nt, Homo sapiens
  misc_RNA (1)...(19): siRNA sense strand
gcaggcagcugugcauggu

SEQ ID NO: 1948445 - RNA, 19 nt, Homo sapiens
  misc_RNA (1)...(19): siRNA sense strand
cagcaguacucuucgagau

SEQ ID NO: 1948446 - RNA, 19 nt, Homo sapiens
  misc_RNA (1)...(19): siRNA sense strand
gaccaaacagccacuccua

SEQ ID NO: 1948447 - RNA, 19 nt, Homo sapiens
  misc_RNA (1)...(19): siRNA sense strand
ggaagaaccgcaucuauaa

SEQ ID NO: 1948448 - RNA, 19 nt, Homo sapiens
  misc_RNA (1)...(19): siRNA sense strand
gcgcagaggccaucaauuu

SEQ ID NO: 1948449 - RNA, 19 nt, Homo sapiens
  misc_RNA (1)...(19): siRNA sense strand
ccagagagaccuaugauaa

SEQ ID NO: 1948450 - RNA, 19 nt, Homo sapiens
  misc_RNA (1)...(19): siRNA sense strand
cagaggacauggaccuuua

SEQ ID NO: 1948451 - RNA, 19 nt, Homo sapiens
  misc_RNA (1)...(19): siRNA sense strand
agagagaccuaugauaaua

SEQ ID NO: 1948452 - RNA, 19 nt, Homo sapiens
  misc_RNA (1)...(19): siRNA sense strand
ccaaagaagaguuuaauga

SEQ ID NO: 1948453 - RNA, 19 nt, Homo sapiens
  misc_RNA (1)...(19): siRNA sense strand
uaagauaauuccacccaaa

SEQ ID NO: 1948454 - RNA, 19 nt, Homo sapiens
  misc_RNA (1)...(19): siRNA sense strand
ccagaaggaaguccaguua

SEQ ID NO: 1948455 - RNA, 19 nt, Homo sapiens
  misc_RNA (1)...(19): siRNA sense strand
gauauuucauccaaccaaa

SEQ ID NO: 1948456 - RNA, 19 nt, Homo sapiens
  misc_RNA (1)...(19): siRNA sense strand
ccacgccgaucugcaguua

SEQ ID NO: 1948457 - RNA, 19 nt, Homo sapiens
  misc_RNA (1)...(19): siRNA sense strand
ucaggaggcuggagaguuc

SEQ ID NO: 1948458 - RNA, 19 nt, Homo sapiens
  misc_RNA (1)...(19): siRNA sense strand
uggaagaaccgcaucuaua

SEQ ID NO: 1948459 - RNA, 19 nt, Homo sapiens
  misc_RNA (1)...(19): siRNA sense strand
gauaauuccacccaaagaa

SEQ ID NO: 1948460 - RNA, 19 nt, Homo sapiens
  misc_RNA (1)...(19): siRNA sense strand
gaagaaccgcaucuauaau

SEQ ID NO: 1948461 - RNA, 19 nt, Homo sapiens
  misc_RNA (1)...(19): siRNA sense strand
acuaaacaauggaaucuug

SEQ ID NO: 1948462 - RNA, 19 nt, Homo sapiens
  misc_RNA (1)...(19): siRNA sense strand
caaccaaagaagaguuuaa

SEQ ID NO: 1948463 - RNA, 19 nt, Homo sapiens
  misc_RNA (1)...(19): siRNA sense strand
gcccagaauccaaauugua

SEQ ID NO: 1948464 - RNA, 19 nt, Homo sapiens
  misc_RNA (1)...(19): siRNA sense strand
gagcuggcuuggcuaagau

SEQ ID NO: 1948465 - RNA, 19 nt, Homo sapiens
  misc_RNA (1)...(19): siRNA sense strand
caucaguggcuccuuguuu

SEQ ID NO: 1948466 - RNA, 19 nt, Homo sapiens
  misc_RNA (1)...(19): siRNA sense strand
gaaccgcaucuauaauuca

SEQ ID NO: 1948467 - RNA, 19 nt, Homo sapiens
  misc_RNA (1)...(19): siRNA sense strand
gaauggaaagccagagaga

SEQ ID NO: 1948468 - RNA, 19 nt, Homo sapiens
  misc_RNA (1)...(19): siRNA sense strand
uggcuuggcuaagauaauu

SEQ ID NO: 1948469 - RNA, 19 nt, Homo sapiens
  misc_RNA (1)...(19): siRNA sense strand
ucgaagauuuggagcgaaa

SEQ ID NO: 1948470 - RNA, 19 nt, Homo sapiens
  misc_RNA (1)...(19): siRNA sense strand
aagaaccgcaucuauaauu

SEQ ID NO: 1948471 - RNA, 19 nt, Homo sapiens
  misc_RNA (1)...(19): siRNA sense strand
ggaaagccagagagaccua

SEQ ID NO: 1948472 - RNA, 19 nt, Homo sapiens
  misc_RNA (1)...(19): siRNA sense strand
caucuauaauucaccgauu

SEQ ID NO: 1948473 - RNA, 19 nt, Homo sapiens
  misc_RNA (1)...(19): siRNA sense strand
caccagaauuucgaagauu

SEQ ID NO: 1948474 - RNA, 19 nt, Homo sapiens
  misc_RNA (1)...(19): siRNA sense strand
gagagaccuaugauaauau

SEQ ID NO: 1948475 - RNA, 19 nt, Homo sapiens
  misc_RNA (1)...(19): siRNA sense strand
gagaguucauggugaccuu

SEQ ID NO: 1948476 - RNA, 19 nt, Homo sapiens
  misc_RNA (1)...(19): siRNA sense strand
ggccaacugugcccagaau

SEQ ID NO: 1948477 - RNA, 19 nt, Homo sapiens
  misc_RNA (1)...(19): siRNA sense strand
cccagaauccaaauuguaa

SEQ ID NO: 1948478 - RNA, 19 nt, Homo sapiens
  misc_RNA (1)...(19): siRNA sense strand
cauagaaggcgucaauaca

SEQ ID NO: 1948479 - RNA, 19 nt, Homo sapiens
  misc_RNA (1)...(19): siRNA sense strand
cagagagaccuaugauaau

SEQ ID NO: 1948480 - RNA, 19 nt, Homo sapiens
  misc_RNA (1)...(19): siRNA sense strand
accagaauuucgaagauuu

SEQ ID NO: 1948481 - RNA, 19 nt, Homo sapiens
  misc_RNA (1)...(19): siRNA sense strand
gcuaugaccuguggaaacg

SEQ ID NO: 1948482 - RNA, 19 nt, Homo sapiens
  misc_RNA (1)...(19): siRNA sense strand
gaaacuaugaagucuaagg

SEQ ID NO: 1948483 - RNA, 19 nt, Homo sapiens
  misc_RNA (1)...(19): siRNA sense strand
caaaauggccucccagugu

SEQ ID NO: 1948484 - RNA, 19 nt, Homo sapiens
  misc_RNA (1)...(19): siRNA sense strand
ucagugaaaucuuaauagc

SEQ ID NO: 1948485 - RNA, 19 nt, Homo sapiens
  misc_RNA (1)...(19): siRNA sense strand
aaaauggccucccagugua

SEQ ID NO: 1948486 - RNA, 19 nt, Homo sapiens
  misc_RNA (1)...(19): siRNA sense strand
gcacaagguggcccucauc

SEQ ID NO: 1948487 - RNA, 19 nt, Homo sapiens
  misc_RNA (1)...(19): siRNA sense strand
gauuuauggugcugacauc

SEQ ID NO: 1948488 - RNA, 19 nt, Homo sapiens
  misc_RNA (1)...(19): siRNA sense strand
acaccagaauuucgaagau

SEQ ID NO: 1948489 - RNA, 19 nt, Homo sapiens
  misc_RNA (1)...(19): siRNA sense strand
ccugcaaccugaacgcuau

SEQ ID NO: 1948490 - RNA, 19 nt, Homo sapiens
  misc_RNA (1)...(19): siRNA sense strand
cuacaguucucaaggaaaa

SEQ ID NO: 1948491 - RNA, 19 nt, Homo sapiens
  misc_RNA (1)...(19): siRNA sense strand
agagcuggcuuggcuaaga

SEQ ID NO: 1948492 - RNA, 19 nt, Homo sapiens
  misc_RNA (1)...(19): siRNA sense strand
agaaccgcaucuauaauuc

SEQ ID NO: 1948493 - RNA, 19 nt, Homo sapiens
  misc_RNA (1)...(19): siRNA sense strand
gagcgaaaauacuggaaga

SEQ ID NO: 1948494 - RNA, 19 nt, Homo sapiens
  misc_RNA (1)...(19): siRNA sense strand
ugaaaacacuaaacaaugg

SEQ ID NO: 1948495 - RNA, 19 nt, Homo sapiens
  misc_RNA (1)...(19): siRNA sense strand
cgcgauggauugauuaugg

SEQ ID NO: 1948496 - RNA, 19 nt, Homo sapiens
  misc_RNA (1)...(19): siRNA sense strand
gccuacaguucucaaggaa

SEQ ID NO: 1948497 - RNA, 19 nt, Homo sapiens
  misc_RNA (1)...(19): siRNA sense strand
gggcagggguguuuacuca

SEQ ID NO: 1948498 - RNA, 19 nt, Homo sapiens
  misc_RNA (1)...(19): siRNA sense strand
ggcacaacaugcacagcuu

SEQ ID NO: 1948499 - RNA, 19 nt, Homo sapiens
  misc_RNA (1)...(19): siRNA sense strand
gguguuuacucaauaccau

SEQ ID NO: 1948500 - RNA, 19 nt, Homo sapiens
  misc_RNA (1)...(19): siRNA sense strand
gccagagagaccuaugaua

SEQ ID NO: 1948501 - RNA, 19 nt, Homo sapiens
  misc_RNA (1)...(19): siRNA sense strand
acauggaccuuuacagcau

SEQ ID NO: 1948502 - RNA, 19 nt, Homo sapiens
  misc_RNA (1)...(19): siRNA sense strand
gcagaggccaucaauuuug

SEQ ID NO: 1948503 - RNA, 19 nt, Homo sapiens
  misc_RNA (1)...(19): siRNA sense strand
acuccgcgauggauugauu

SEQ ID NO: 1948504 - RNA, 19 nt, Homo sapiens
  misc_RNA (1)...(19): siRNA sense strand
gcagggguguuuacucaau

SEQ ID NO: 1948505 - RNA, 19 nt, Homo sapiens
  misc_RNA (1)...(19): siRNA sense strand
ugucauagaaggcgucaau

SEQ ID NO: 1948506 - RNA, 19 nt, Homo sapiens
  misc_RNA (1)...(19): siRNA sense strand
ccagaauuucgaagauuug

SEQ ID NO: 1948507 - RNA, 19 nt, Homo sapiens
  misc_RNA (1)...(19): siRNA sense strand
gacaagccuguaccacuga

SEQ ID NO: 1948508 - RNA, 19 nt, Homo sapiens
  misc_RNA (1)...(19): siRNA sense strand
gcaagaccgggcaguugug

SEQ ID NO: 1948509 - RNA, 19 nt, Homo sapiens
  misc_RNA (1)...(19): siRNA sense strand
gcccucaucucgccuacag

SEQ ID NO: 1948510 - RNA, 19 nt, Homo sapiens
  misc_RNA (1)...(19): siRNA sense strand
ggaaugugggguugucaua

SEQ ID NO: 1948511 - RNA, 19 nt, Homo sapiens
  misc_RNA (1)...(19): siRNA sense strand
ccucaucucgccuacaguu

SEQ ID NO: 1948512 - RNA, 19 nt, Homo sapiens
  misc_RNA (1)...(19): siRNA sense strand
gcuccagcauccugucaag

SEQ ID NO: 1948513 - RNA, 19 nt, Homo sapiens
  misc_RNA (1)...(19): siRNA sense strand
cauggugaccuuucccuau

SEQ ID NO: 1948514 - RNA, 19 nt, Homo sapiens
  misc_RNA (1)...(19): siRNA sense strand
gugcccagaauccaaauug

SEQ ID NO: 1948515 - RNA, 19 nt, Homo sapiens
  misc_RNA (1)...(19): siRNA sense strand
gcugagcacccagaaggaa

SEQ ID NO: 1948516 - RNA, 19 nt, Homo sapiens
  misc_RNA (1)...(19): siRNA sense strand
ggcaagaccgggcaguugu

SEQ ID NO: 1948517 - RNA, 19 nt, Homo sapiens
  misc_RNA (1)...(19): siRNA sense strand
cgccuacaguucucaagga

SEQ ID NO: 1948518 - RNA, 19 nt, Homo sapiens
  misc_RNA (1)...(19): siRNA sense strand
acacccuacuuguacuuug

SEQ ID NO: 1948519 - RNA, 19 nt, Homo sapiens
  misc_RNA (1)...(19): siRNA sense strand
cagauuauccacccgucaa

SEQ ID NO: 1948520 - RNA, 19 nt, Homo sapiens
  misc_RNA (1)...(19): siRNA sense strand
aucaguggcuccuuguuug

SEQ ID NO: 1948521 - RNA, 19 nt, Homo sapiens
  misc_RNA (1)...(19): siRNA sense strand
gaaagccagagagaccuau

SEQ ID NO: 1948522 - RNA, 19 nt, Homo sapiens
  misc_RNA (1)...(19): siRNA sense strand
gucaauacacccuacuugu

SEQ ID NO: 1948523 - RNA, 19 nt, Homo sapiens
  misc_RNA (1)...(19): siRNA sense strand
cgucaauacacccuacuug

SEQ ID NO: 1948524 - RNA, 19 nt, Homo sapiens
  misc_RNA (1)...(19): siRNA sense strand
gggcaccugggaacaauuc

SEQ ID NO: 1948525 - RNA, 19 nt, Homo sapiens
  misc_RNA (1)...(19): siRNA sense strand
guggcuccuuguuugauga

SEQ ID NO: 1948526 - RNA, 19 nt, Homo sapiens
  misc_RNA (1)...(19): siRNA sense strand
aagcccagcucaacuccau

SEQ ID NO: 1948527 - RNA, 19 nt, Homo sapiens
  misc_RNA (1)...(19): siRNA sense strand
cuaccaugcuggcuucaac

SEQ ID NO: 1948528 - RNA, 19 nt, Homo sapiens
  misc_RNA (1)...(19): siRNA sense strand
cagaauccaaauuguaaca

SEQ ID NO: 1948529 - RNA, 19 nt, Homo sapiens
  misc_RNA (1)...(19): siRNA sense strand
acgccgaucugcaguuagu

SEQ ID NO: 1948530 - RNA, 19 nt, Homo sapiens
  misc_RNA (1)...(19): siRNA sense strand
cuaagaagcccagcucaac

SEQ ID NO: 1948531 - RNA, 19 nt, Homo sapiens
  misc_RNA (1)...(19): siRNA sense strand
ucauagaaggcgucaauac

SEQ ID NO: 1948532 - RNA, 19 nt, Homo sapiens
  misc_RNA (1)...(19): siRNA sense strand
auggauugauuauggcaaa

SEQ ID NO: 1948533 - RNA, 19 nt, Homo sapiens
  misc_RNA (1)...(19): siRNA sense strand
acagagcuggcuuggcuaa

SEQ ID NO: 1948534 - RNA, 19 nt, Homo sapiens
  misc_RNA (1)...(19): siRNA sense strand
ucaguggcuccuuguuuga

SEQ ID NO: 1948535 - RNA, 19 nt, Homo sapiens
  misc_RNA (1)...(19): siRNA sense strand
uaagaagcccagcucaacu

SEQ ID NO: 1948536 - RNA, 19 nt, Homo sapiens
  misc_RNA (1)...(19): siRNA sense strand
agaaggaaguccaguuacc

SEQ ID NO: 1948537 - RNA, 19 nt, Homo sapiens
  misc_RNA (1)...(19): siRNA sense strand
uuacauggaaucccaaggu

SEQ ID NO: 1948538 - RNA, 19 nt, Homo sapiens
  misc_RNA (1)...(19): siRNA sense strand
auggugaccuuucccuaug

SEQ ID NO: 1948539 - RNA, 19 nt, Homo sapiens
  misc_RNA (1)...(19): siRNA sense strand
gagcguagccuguacauaa

SEQ ID NO: 1948540 - RNA, 19 nt, Homo sapiens
  misc_RNA (1)...(19): siRNA sense strand
gcaaucugcucaucaaguc

SEQ ID NO: 1948541 - RNA, 19 nt, Homo sapiens
  misc_RNA (1)...(19): siRNA sense strand
gcugcaaucugcucaucaa

SEQ ID NO: 1948542 - RNA, 19 nt, Homo sapiens
  misc_RNA (1)...(19): siRNA sense strand
ggacgagcguagccuguac

SEQ ID NO: 1948543 - RNA, 19 nt, Homo sapiens
  misc_RNA (1)...(19): siRNA sense strand
ccgagggcaugaucaacuu

SEQ ID NO: 1948544 - RNA, 19 nt, Homo sapiens
  misc_RNA (1)...(19): siRNA sense strand
ggucuucggcaucuucuuc

SEQ ID NO: 1948545 - RNA, 19 nt, Homo sapiens
  misc_RNA (1)...(19): siRNA sense strand
gugcagaucgcggucaugu

SEQ ID NO: 1948546 - RNA, 19 nt, Homo sapiens
  misc_RNA (1)...(19): siRNA sense strand
ggucaugugcgugcucuca

SEQ ID NO: 1948547 - RNA, 19 nt, Homo sapiens
  misc_RNA (1)...(19): siRNA sense strand
gaugugggcuucaauauca

SEQ ID NO: 1948548 - RNA, 19 nt, Homo sapiens
  misc_RNA (1)...(19): siRNA sense strand
gauaaucgaucccaagaug

SEQ ID NO: 1948549 - RNA, 19 nt, Homo sapiens
  misc_RNA (1)...(19): siRNA sense strand
gaaagaagccggaagagau

SEQ ID NO: 1948550 - RNA, 19 nt, Homo sapiens
  misc_RNA (1)...(19): siRNA sense strand
cgaccuagauguauucuug

SEQ ID NO: 1948551 - RNA, 19 nt, Homo sapiens
  misc_RNA (1)...(19): siRNA sense strand
uaacaaagcguacuugaag

SEQ ID NO: 1948552 - RNA, 19 nt, Homo sapiens
  misc_RNA (1)...(19): siRNA sense strand
cauuacagguggcuuguuu

SEQ ID NO: 1948553 - RNA, 19 nt, Homo sapiens
  misc_RNA (1)...(19): siRNA sense strand
gaaguggugaauaugauuu

SEQ ID NO: 1948554 - RNA, 19 nt, Homo sapiens
  misc_RNA (1)...(19): siRNA sense strand
gaaccgccgucccaacauc

SEQ ID NO: 1948555 - RNA, 19 nt, Homo sapiens
  misc_RNA (1)...(19): siRNA sense strand
gaaagagaacccaggaagu

SEQ ID NO: 1948556 - RNA, 19 nt, Homo sapiens
  misc_RNA (1)...(19): siRNA sense strand
ugccauacaucgugcuuaa

SEQ ID NO: 1948557 - RNA, 19 nt, Homo sapiens
  misc_RNA (1)...(19): siRNA sense strand
ugugugaaauucuacauug

SEQ ID NO: 1948558 - RNA, 19 nt, Homo sapiens
  misc_RNA (1)...(19): siRNA sense strand
cccaggaaguggugaauau

SEQ ID NO: 1948559 - RNA, 19 nt, Homo sapiens
  misc_RNA (1)...(19): siRNA sense strand
ggaaguggugaauaugauu

SEQ ID NO: 1948560 - RNA, 19 nt, Homo sapiens
  misc_RNA (1)...(19): siRNA sense strand
aagcguacuugaagacuga

SEQ ID NO: 1948561 - RNA, 19 nt, Homo sapiens
  misc_RNA (1)...(19): siRNA sense strand
gcugcgaccuagauguauu

SEQ ID NO: 1948562 - RNA, 19 nt, Homo sapiens
  misc_RNA (1)...(19): siRNA sense strand
aaagaagccggaagagauu

SEQ ID NO: 1948563 - RNA, 19 nt, Homo sapiens
  misc_RNA (1)...(19): siRNA sense strand
gagaugugggcuucaauau

SEQ ID NO: 1948564 - RNA, 19 nt, Homo sapiens
  misc_RNA (1)...(19): siRNA sense strand
ccuagaagaacuauuauca

SEQ ID NO: 1948565 - RNA, 19 nt, Homo sapiens
  misc_RNA (1)...(19): siRNA sense strand
ugagaugugggcuucaaua

SEQ ID NO: 1948566 - RNA, 19 nt, Homo sapiens
  misc_RNA (1)...(19): siRNA sense strand
ggugaucggugucuuuggu

SEQ ID NO: 1948567 - RNA, 19 nt, Homo sapiens
  misc_RNA (1)...(19): siRNA sense strand
gauauaugggagagccuua

SEQ ID NO: 1948568 - RNA, 19 nt, Homo sapiens
  misc_RNA (1)...(19): siRNA sense strand
gagcccaguuugagaugug

SEQ ID NO: 1948569 - RNA, 19 nt, Homo sapiens
  misc_RNA (1)...(19): siRNA sense strand
gugugaaauucuacauuga

SEQ ID NO: 1948570 - RNA, 19 nt, Homo sapiens
  misc_RNA (1)...(19): siRNA sense strand
ggaagagauuuuaccuauu

SEQ ID NO: 1948571 - RNA, 19 nt, Homo sapiens
  misc_RNA (1)...(19): siRNA sense strand
aaagagaacccaggaagug

SEQ ID NO: 1948572 - RNA, 19 nt, Homo sapiens
  misc_RNA (1)...(19): siRNA sense strand
gcacagguccucggcaaag

SEQ ID NO: 1948573 - RNA, 19 nt, Homo sapiens
  misc_RNA (1)...(19): siRNA sense strand
cggaagagauuuuaccuau

SEQ ID NO: 1948574 - RNA, 19 nt, Homo sapiens
  misc_RNA (1)...(19): siRNA sense strand
aaagaugggcugaaacaca

SEQ ID NO: 1948575 - RNA, 19 nt, Homo sapiens
  misc_RNA (1)...(19): siRNA sense strand
caggaaguggugaauauga

SEQ ID NO: 1948576 - RNA, 19 nt, Homo sapiens
  misc_RNA (1)...(19): siRNA sense strand
ugaaagaagccggaagaga

SEQ ID NO: 1948577 - RNA, 19 nt, Homo sapiens
  misc_RNA (1)...(19): siRNA sense strand
ggaagcaaggaacggugua

SEQ ID NO: 1948578 - RNA, 19 nt, Homo sapiens
  misc_RNA (1)...(19): siRNA sense strand
gcagcaaacaagugucugu

SEQ ID NO: 1948579 - RNA, 19 nt, Homo sapiens
  misc_RNA (1)...(19): siRNA sense strand
gguguaugcgcaagugaaa

SEQ ID NO: 1948580 - RNA, 19 nt, Homo sapiens
  misc_RNA (1)...(19): siRNA sense strand
uaugggagagccuuagaaa

SEQ ID NO: 1948581 - RNA, 19 nt, Homo sapiens
  misc_RNA (1)...(19): siRNA sense strand
ccauacaucgugcuuaaca

SEQ ID NO: 1948582 - RNA, 19 nt, Homo sapiens
  misc_RNA (1)...(19): siRNA sense strand
gaacccaggaaguggugaa

SEQ ID NO: 1948583 - RNA, 19 nt, Homo sapiens
  misc_RNA (1)...(19): siRNA sense strand
gaagcaaggaacgguguau

SEQ ID NO: 1948584 - RNA, 19 nt, Homo sapiens
  misc_RNA (1)...(19): siRNA sense strand
ccaguccuagcaagauaua

SEQ ID NO: 1948585 - RNA, 19 nt, Homo sapiens
  misc_RNA (1)...(19): siRNA sense strand
cauacaucgugcuuaacaa

SEQ ID NO: 1948586 - RNA, 19 nt, Homo sapiens
  misc_RNA (1)...(19): siRNA sense strand
gaggugaucggugucuuug

SEQ ID NO: 1948587 - RNA, 19 nt, Homo sapiens
  misc_RNA (1)...(19): siRNA sense strand
auacaucgugcuuaacaaa

SEQ ID NO: 1948588 - RNA, 19 nt, Homo sapiens
  misc_RNA (1)...(19): siRNA sense strand
uuaacaaagcguacuugaa

SEQ ID NO: 1948589 - RNA, 19 nt, Homo sapiens
  misc_RNA (1)...(19): siRNA sense strand
aacaaagcguacuugaaga

SEQ ID NO: 1948590 - RNA, 19 nt, Homo sapiens
  misc_RNA (1)...(19): siRNA sense strand
uguaaaagaugggcugaaa

SEQ ID NO: 1948591 - RNA, 19 nt, Homo sapiens
  misc_RNA (1)...(19): siRNA sense strand
gggcuucaauaucaaaaga

SEQ ID NO: 1948592 - RNA, 19 nt, Homo sapiens
  misc_RNA (1)...(19): siRNA sense strand
uaaucgaucccaagaugau

SEQ ID NO: 1948593 - RNA, 19 nt, Homo sapiens
  misc_RNA (1)...(19): siRNA sense strand
gaacgguguaugcgcaagu

SEQ ID NO: 1948594 - RNA, 19 nt, Homo sapiens
  misc_RNA (1)...(19): siRNA sense strand
ugaggugaucggugucuuu

SEQ ID NO: 1948595 - RNA, 19 nt, Homo sapiens
  misc_RNA (1)...(19): siRNA sense strand
aggaaguggugaauaugau

SEQ ID NO: 1948596 - RNA, 19 nt, Homo sapiens
  misc_RNA (1)...(19): siRNA sense strand
aagauaaucgaucccaaga

SEQ ID NO: 1948597 - RNA, 19 nt, Homo sapiens
  misc_RNA (1)...(19): siRNA sense strand
uguaugcgcaagugaaaga

SEQ ID NO: 1948598 - RNA, 19 nt, Homo sapiens
  misc_RNA (1)...(19): siRNA sense strand
acgcugcgaccuagaugua

SEQ ID NO: 1948599 - RNA, 19 nt, Homo sapiens
  misc_RNA (1)...(19): siRNA sense strand
uaaaagaugggcugaaaca

SEQ ID NO: 1948600 - RNA, 19 nt, Homo sapiens
  misc_RNA (1)...(19): siRNA sense strand
auccaguccuagcaagaua

SEQ ID NO: 1948601 - RNA, 19 nt, Homo sapiens
  misc_RNA (1)...(19): siRNA sense strand
gcaaagagaugagcuuauu

SEQ ID NO: 1948602 - RNA, 19 nt, Homo sapiens
  misc_RNA (1)...(19): siRNA sense strand
gaacagcacuggacaagau

SEQ ID NO: 1948603 - RNA, 19 nt, Homo sapiens
  misc_RNA (1)...(19): siRNA sense strand
gcagagagaugccaauaga

SEQ ID NO: 1948604 - RNA, 19 nt, Homo sapiens
  misc_RNA (1)...(19): siRNA sense strand
gaagggccauuagauguaa

SEQ ID NO: 1948605 - RNA, 19 nt, Homo sapiens
  misc_RNA (1)...(19): siRNA sense strand
gaaacauggcuuaguuaua

SEQ ID NO: 1948606 - RNA, 19 nt, Homo sapiens
  misc_RNA (1)...(19): siRNA sense strand
gaacuggaacgacaacaaa

SEQ ID NO: 1948607 - RNA, 19 nt, Homo sapiens
  misc_RNA (1)...(19): siRNA sense strand
gaagcuacaacgagaguua

SEQ ID NO: 1948608 - RNA, 19 nt, Homo sapiens
  misc_RNA (1)...(19): siRNA sense strand
gaaaguugaagaugaauug

SEQ ID NO: 1948609 - RNA, 19 nt, Homo sapiens
  misc_RNA (1)...(19): siRNA sense strand
ggacagguucugagauaua

SEQ ID NO: 1948610 - RNA, 19 nt, Homo sapiens
  misc_RNA (1)...(19): siRNA sense strand
gaagaugaagcuuugagua

SEQ ID NO: 1948611 - RNA, 19 nt, Homo sapiens
  misc_RNA (1)...(19): siRNA sense strand
ugagaaaguugaagaugaa

SEQ ID NO: 1948612 - RNA, 19 nt, Homo sapiens
  misc_RNA (1)...(19): siRNA sense strand
gaagaacaauuugaucuac

SEQ ID NO: 1948613 - RNA, 19 nt, Homo sapiens
  misc_RNA (1)...(19): siRNA sense strand
gaaggaagaacuacuguca

SEQ ID NO: 1948614 - RNA, 19 nt, Homo sapiens
  misc_RNA (1)...(19): siRNA sense strand
ggacaccagcagcuuaaua

SEQ ID NO: 1948615 - RNA, 19 nt, Homo sapiens
  misc_RNA (1)...(19): siRNA sense strand
gaaaagaacaccugugaaa

SEQ ID NO: 1948616 - RNA, 19 nt, Homo sapiens
  misc_RNA (1)...(19): siRNA sense strand
gagaaacauggcuuaguua

SEQ ID NO: 1948617 - RNA, 19 nt, Homo sapiens
  misc_RNA (1)...(19): siRNA sense strand
cagaaaugcuccaggaaug

SEQ ID NO: 1948618 - RNA, 19 nt, Homo sapiens
  misc_RNA (1)...(19): siRNA sense strand
gacagguucugagauauaa

SEQ ID NO: 1948619 - RNA, 19 nt, Homo sapiens
  misc_RNA (1)...(19): siRNA sense strand
gauggaagaacuuaaagaa

SEQ ID NO: 1948620 - RNA, 19 nt, Homo sapiens
  misc_RNA (1)...(19): siRNA sense strand
ggagaagggccauuagaug

SEQ ID NO: 1948621 - RNA, 19 nt, Homo sapiens
  misc_RNA (1)...(19): siRNA sense strand
gagaagggccauuagaugu

SEQ ID NO: 1948622 - RNA, 19 nt, Homo sapiens
  misc_RNA (1)...(19): siRNA sense strand
ggaagcugcucaggucuug

SEQ ID NO: 1948623 - RNA, 19 nt, Homo sapiens
  misc_RNA (1)...(19): siRNA sense strand
ccaagcggcuggagaagau

SEQ ID NO: 1948624 - RNA, 19 nt, Homo sapiens
  misc_RNA (1)...(19): siRNA sense strand
ggacaagauugaggagaug

SEQ ID NO: 1948625 - RNA, 19 nt, Homo sapiens
  misc_RNA (1)...(19): siRNA sense strand
aaagaacaccugugaaaga

SEQ ID NO: 1948626 - RNA, 19 nt, Homo sapiens
  misc_RNA (1)...(19): siRNA sense strand
gaugaagcuuugaguaaca

SEQ ID NO: 1948627 - RNA, 19 nt, Homo sapiens
  misc_RNA (1)...(19): siRNA sense strand
ugaguaacauugccagaga

SEQ ID NO: 1948628 - RNA, 19 nt, Homo sapiens
  misc_RNA (1)...(19): siRNA sense strand
ugagaaugcugagaaaguu

SEQ ID NO: 1948629 - RNA, 19 nt, Homo sapiens
  misc_RNA (1)...(19): siRNA sense strand
ggcagaagcaagagauaua

SEQ ID NO: 1948630 - RNA, 19 nt, Homo sapiens
  misc_RNA (1)...(19): siRNA sense strand
uuagaaaggcagaaacaua

SEQ ID NO: 1948631 - RNA, 19 nt, Homo sapiens
  misc_RNA (1)...(19): siRNA sense strand
gauccagacacuucauuaa

SEQ ID NO: 1948632 - RNA, 19 nt, Homo sapiens
  misc_RNA (1)...(19): siRNA sense strand
gcagaauggcucagacuug

SEQ ID NO: 1948633 - RNA, 19 nt, Homo sapiens
  misc_RNA (1)...(19): siRNA sense strand
gguuuccaaugcacaguua

SEQ ID NO: 1948634 - RNA, 19 nt, Homo sapiens
  misc_RNA (1)...(19): siRNA sense strand
aggaacagauggcagaauu

SEQ ID NO: 1948635 - RNA, 19 nt, Homo sapiens
  misc_RNA (1)...(19): siRNA sense strand
cugagaaaguugaagauga

SEQ ID NO: 1948636 - RNA, 19 nt, Homo sapiens
  misc_RNA (1)...(19): siRNA sense strand
agggacagguucugagaua

SEQ ID NO: 1948637 - RNA, 19 nt, Homo sapiens
  misc_RNA (1)...(19): siRNA sense strand
uagaaaggcagaaacauau

SEQ ID NO: 1948638 - RNA, 19 nt, Homo sapiens
  misc_RNA (1)...(19): siRNA sense strand
gaaaggcagaaacauaugu

SEQ ID NO: 1948639 - RNA, 19 nt, Homo sapiens
  misc_RNA (1)...(19): siRNA sense strand
gcagaacaggauauaacua

SEQ ID NO: 1948640 - RNA, 19 nt, Homo sapiens
  misc_RNA (1)...(19): siRNA sense strand
aaagaaggccugcggcaaa

SEQ ID NO: 1948641 - RNA, 19 nt, Homo sapiens
  misc_RNA (1)...(19): siRNA sense strand
gagaagaacaauuugaucu

SEQ ID NO: 1948642 - RNA, 19 nt, Homo sapiens
  misc_RNA (1)...(19): siRNA sense strand
aaagagaugagcuuauuga

SEQ ID NO: 1948643 - RNA, 19 nt, Homo sapiens
  misc_RNA (1)...(19): siRNA sense strand
gacaaacaguaugcugaaa

SEQ ID NO: 1948644 - RNA, 19 nt, Homo sapiens
  misc_RNA (1)...(19): siRNA sense strand
ggaacagauggcagaauuu

SEQ ID NO: 1948645 - RNA, 19 nt, Homo sapiens
  misc_RNA (1)...(19): siRNA sense strand
gagaagaugaaggccaaua

SEQ ID NO: 1948646 - RNA, 19 nt, Homo sapiens
  misc_RNA (1)...(19): siRNA sense strand
caacgagaguuacgaacag

SEQ ID NO: 1948647 - RNA, 19 nt, Homo sapiens
  misc_RNA (1)...(19): siRNA sense strand
aagaugaagcuuugaguaa

SEQ ID NO: 1948648 - RNA, 19 nt, Homo sapiens
  misc_RNA (1)...(19): siRNA sense strand
gcagaaacauauguguagu

SEQ ID NO: 1948649 - RNA, 19 nt, Homo sapiens
  misc_RNA (1)...(19): siRNA sense strand
uaauagauccagacacuuc

SEQ ID NO: 1948650 - RNA, 19 nt, Homo sapiens
  misc_RNA (1)...(19): siRNA sense strand
gaugccaauagacaaauua

SEQ ID NO: 1948651 - RNA, 19 nt, Homo sapiens
  misc_RNA (1)...(19): siRNA sense strand
gcaagagauauacgcauga

SEQ ID NO: 1948652 - RNA, 19 nt, Homo sapiens
  misc_RNA (1)...(19): siRNA sense strand
caauuugaucuaccaagua

SEQ ID NO: 1948653 - RNA, 19 nt, Homo sapiens
  misc_RNA (1)...(19): siRNA sense strand
gcucagacuugcaguucau

SEQ ID NO: 1948654 - RNA, 19 nt, Homo sapiens
  misc_RNA (1)...(19): siRNA sense strand
gaacagauggcagaauuuu

SEQ ID NO: 1948655 - RNA, 19 nt, Homo sapiens
  misc_RNA (1)...(19): siRNA sense strand
agaaacauauguguagugu

SEQ ID NO: 1948656 - RNA, 19 nt, Homo sapiens
  misc_RNA (1)...(19): siRNA sense strand
ugcagaagaugaagcuuug

SEQ ID NO: 1948657 - RNA, 19 nt, Homo sapiens
  misc_RNA (1)...(19): siRNA sense strand
cuuaauagauccagacacu

SEQ ID NO: 1948658 - RNA, 19 nt, Homo sapiens
  misc_RNA (1)...(19): siRNA sense strand
uaacuaccuuggagcaaag

SEQ ID NO: 1948659 - RNA, 19 nt, Homo sapiens
  misc_RNA (1)...(19): siRNA sense strand
uagacacacucaaggaugu

SEQ ID NO: 1948660 - RNA, 19 nt, Homo sapiens
  misc_RNA (1)...(19): siRNA sense strand
ugacaaacaguaugcugaa

SEQ ID NO: 1948661 - RNA, 19 nt, Homo sapiens
  misc_RNA (1)...(19): siRNA sense strand
ggaguuagaaaggcagaaa

SEQ ID NO: 1948662 - RNA, 19 nt, Homo sapiens
  misc_RNA (1)...(19): siRNA sense strand
acaauuugaucuaccaagu

SEQ ID NO: 1948663 - RNA, 19 nt, Homo sapiens
  misc_RNA (1)...(19): siRNA sense strand
gauauacgcaugagagaac

SEQ ID NO: 1948664 - RNA, 19 nt, Homo sapiens
  misc_RNA (1)...(19): siRNA sense strand
gaaaugcuccaggaaugau

SEQ ID NO: 1948665 - RNA, 19 nt, Homo sapiens
  misc_RNA (1)...(19): siRNA sense strand
agaccuucaucucgaaauu

SEQ ID NO: 1948666 - RNA, 19 nt, Homo sapiens
  misc_RNA (1)...(19): siRNA sense strand
aggaagaacuacugucaca

SEQ ID NO: 1948667 - RNA, 19 nt, Homo sapiens
  misc_RNA (1)...(19): siRNA sense strand
agaagggccauuagaugua

SEQ ID NO: 1948668 - RNA, 19 nt, Homo sapiens
  misc_RNA (1)...(19): siRNA sense strand
acaagaccuucaucucgaa

SEQ ID NO: 1948669 - RNA, 19 nt, Homo sapiens
  misc_RNA (1)...(19): siRNA sense strand
gaggaggaacgacagaaau

SEQ ID NO: 1948670 - RNA, 19 nt, Homo sapiens
  misc_RNA (1)...(19): siRNA sense strand
gagauauacgcaugagaga

SEQ ID NO: 1948671 - RNA, 19 nt, Homo sapiens
  misc_RNA (1)...(19): siRNA sense strand
gagagaugccaauagacaa

SEQ ID NO: 1948672 - RNA, 19 nt, Homo sapiens
  misc_RNA (1)...(19): siRNA sense strand
gacuugcaguucaucgaaa

SEQ ID NO: 1948673 - RNA, 19 nt, Homo sapiens
  misc_RNA (1)...(19): siRNA sense strand
caaagagaugagcuuauug

SEQ ID NO: 1948674 - RNA, 19 nt, Homo sapiens
  misc_RNA (1)...(19): siRNA sense strand
gacaccagcagcuuaauag

SEQ ID NO: 1948675 - RNA, 19 nt, Homo sapiens
  misc_RNA (1)...(19): siRNA sense strand
caagagauauacgcaugag

SEQ ID NO: 1948676 - RNA, 19 nt, Homo sapiens
  misc_RNA (1)...(19): siRNA sense strand
auaacuaccuuggagcaaa

SEQ ID NO: 1948677 - RNA, 19 nt, Homo sapiens
  misc_RNA (1)...(19): siRNA sense strand
ggcagaaacauauguguag

SEQ ID NO: 1948678 - RNA, 19 nt, Homo sapiens
  misc_RNA (1)...(19): siRNA sense strand
ccaaguagacacacucaag

SEQ ID NO: 1948679 - RNA, 19 nt, Homo sapiens
  misc_RNA (1)...(19): siRNA sense strand
gacaaugagaagaacaauu

SEQ ID NO: 1948680 - RNA, 19 nt, Homo sapiens
  misc_RNA (1)...(19): siRNA sense strand
ccaaugcacaguuagacaa

SEQ ID NO: 1948681 - RNA, 19 nt, Homo sapiens
  misc_RNA (1)...(19): siRNA sense strand
caaacaguaugcugaaaau

SEQ ID NO: 1948682 - RNA, 19 nt, Homo sapiens
  misc_RNA (1)...(19): siRNA sense strand
gaagaugaaggccaauagg

SEQ ID NO: 1948683 - RNA, 19 nt, Homo sapiens
  misc_RNA (1)...(19): siRNA sense strand
uaaaacugcugcugagaau

SEQ ID NO: 1948684 - RNA, 19 nt, Homo sapiens
  misc_RNA (1)...(19): siRNA sense strand
ucaucgaaaugcagagaga

SEQ ID NO: 1948685 - RNA, 19 nt, Homo sapiens
  misc_RNA (1)...(19): siRNA sense strand
gcacaguuagacaaugaga

SEQ ID NO: 1948686 - RNA, 19 nt, Homo sapiens
  misc_RNA (1)...(19): siRNA sense strand
gaagcuuugaguaacauug

SEQ ID NO: 1948687 - RNA, 19 nt, Homo sapiens
  misc_RNA (1)...(19): siRNA sense strand
uacaagaaagccaugguuu

SEQ ID NO: 1948688 - RNA, 19 nt, Homo sapiens
  misc_RNA (1)...(19): siRNA sense strand
uggacaagauugaggagau

SEQ ID NO: 1948689 - RNA, 19 nt, Homo sapiens
  misc_RNA (1)...(19): siRNA sense strand
gagaaugcugagaaaguug

SEQ ID NO: 1948690 - RNA, 19 nt, Homo sapiens
  misc_RNA (1)...(19): siRNA sense strand
augcacaguuagacaauga

SEQ ID NO: 1948691 - RNA, 19 nt, Homo sapiens
  misc_RNA (1)...(19): siRNA sense strand
gggacagguucugagauau

SEQ ID NO: 1948692 - RNA, 19 nt, Homo sapiens
  misc_RNA (1)...(19): siRNA sense strand
gagaaggaagaacuacugu

SEQ ID NO: 1948693 - RNA, 19 nt, Homo sapiens
  misc_RNA (1)...(19): siRNA sense strand
cggcaaagagaugagcuua

SEQ ID NO: 1948694 - RNA, 19 nt, Homo sapiens
  misc_RNA (1)...(19): siRNA sense strand
gaacaauuugaucuaccaa

SEQ ID NO: 1948695 - RNA, 19 nt, Homo sapiens
  misc_RNA (1)...(19): siRNA sense strand
aaucaaaggaguuagaaag

SEQ ID NO: 1948696 - RNA, 19 nt, Homo sapiens
  misc_RNA (1)...(19): siRNA sense strand
cagaacaggauauaacuac

SEQ ID NO: 1948697 - RNA, 19 nt, Homo sapiens
  misc_RNA (1)...(19): siRNA sense strand
accagcagcuuaauagauc

SEQ ID NO: 1948698 - RNA, 19 nt, Homo sapiens
  misc_RNA (1)...(19): siRNA sense strand
gggcagaagcaagagauau

SEQ ID NO: 1948699 - RNA, 19 nt, Homo sapiens
  misc_RNA (1)...(19): siRNA sense strand
gaacaggauauaacuaccu

SEQ ID NO: 1948700 - RNA, 19 nt, Homo sapiens
  misc_RNA (1)...(19): siRNA sense strand
gcaacaaccccucuaagug

SEQ ID NO: 1948701 - RNA, 19 nt, Homo sapiens
  misc_RNA (1)...(19): siRNA sense strand
gcaaagagaugagcuuauu

SEQ ID NO: 1948702 - RNA, 19 nt, Homo sapiens
  misc_RNA (1)...(19): siRNA sense strand
gaacagcacuggacaagau

SEQ ID NO: 1948703 - RNA, 19 nt, Homo sapiens
  misc_RNA (1)...(19): siRNA sense strand
gcagagagaugccaauaga

SEQ ID NO: 1948704 - RNA, 19 nt, Homo sapiens
  misc_RNA (1)...(19): siRNA sense strand
gaagggccauuagauguaa

SEQ ID NO: 1948705 - RNA, 19 nt, Homo sapiens
  misc_RNA (1)...(19): siRNA sense strand
gaaacauggcuuaguuaua

SEQ ID NO: 1948706 - RNA, 19 nt, Homo sapiens
  misc_RNA (1)...(19): siRNA sense strand
gaacuggaacgacaacaaa

SEQ ID NO: 1948707 - RNA, 19 nt, Homo sapiens
  misc_RNA (1)...(19): siRNA sense strand
gaagcuacaacgagaguua

SEQ ID NO: 1948708 - RNA, 19 nt, Homo sapiens
  misc_RNA (1)...(19): siRNA sense strand
gaaaguugaagaugaauug

SEQ ID NO: 1948709 - RNA, 19 nt, Homo sapiens
  misc_RNA (1)...(19): siRNA sense strand
ggacagguucugagauaua

SEQ ID NO: 1948710 - RNA, 19 nt, Homo sapiens
  misc_RNA (1)...(19): siRNA sense strand
gaagaugaagcuuugagua

SEQ ID NO: 1948711 - RNA, 19 nt, Homo sapiens
  misc_RNA (1)...(19): siRNA sense strand
ugagaaaguugaagaugaa

SEQ ID NO: 1948712 - RNA, 19 nt, Homo sapiens
  misc_RNA (1)...(19): siRNA sense strand
gaagaacaauuugaucuac

SEQ ID NO: 1948713 - RNA, 19 nt, Homo sapiens
  misc_RNA (1)...(19): siRNA sense strand
gaaggaagaacuacuguca

SEQ ID NO: 1948714 - RNA, 19 nt, Homo sapiens
  misc_RNA (1)...(19): siRNA sense strand
ggacaccagcagcuuaaua

SEQ ID NO: 1948715 - RNA, 19 nt, Homo sapiens
  misc_RNA (1)...(19): siRNA sense strand
gaaaagaacaccugugaaa

SEQ ID NO: 1948716 - RNA, 19 nt, Homo sapiens
  misc_RNA (1)...(19): siRNA sense strand
gagaaacauggcuuaguua

SEQ ID NO: 1948717 - RNA, 19 nt, Homo sapiens
  misc_RNA (1)...(19): siRNA sense strand
cagaaaugcuccaggaaug

SEQ ID NO: 1948718 - RNA, 19 nt, Homo sapiens
  misc_RNA (1)...(19): siRNA sense strand
gacagguucugagauauaa

SEQ ID NO: 1948719 - RNA, 19 nt, Homo sapiens
  misc_RNA (1)...(19): siRNA sense strand
gauggaagaacuuaaagaa

SEQ ID NO: 1948720 - RNA, 19 nt, Homo sapiens
  misc_RNA (1)...(19): siRNA sense strand
ggagaagggccauuagaug

SEQ ID NO: 1948721 - RNA, 19 nt, Homo sapiens
  misc_RNA (1)...(19): siRNA sense strand
gagaagggccauuagaugu

SEQ ID NO: 1948722 - RNA, 19 nt, Homo sapiens
  misc_RNA (1)...(19): siRNA sense strand
ggaagcugcucaggucuug

SEQ ID NO: 1948723 - RNA, 19 nt, Homo sapiens
  misc_RNA (1)...(19): siRNA sense strand
ccaagcggcuggagaagau

SEQ ID NO: 1948724 - RNA, 19 nt, Homo sapiens
  misc_RNA (1)...(19): siRNA sense strand
ggacaagauugaggagaug

SEQ ID NO: 1948725 - RNA, 19 nt, Homo sapiens
  misc_RNA (1)...(19): siRNA sense strand
aaagaacaccugugaaaga

SEQ ID NO: 1948726 - RNA, 19 nt, Homo sapiens
  misc_RNA (1)...(19): siRNA sense strand
gaugaagcuuugaguaaca

SEQ ID NO: 1948727 - RNA, 19 nt, Homo sapiens
  misc_RNA (1)...(19): siRNA sense strand
ugaguaacauugccagaga

SEQ ID NO: 1948728 - RNA, 19 nt, Homo sapiens
  misc_RNA (1)...(19): siRNA sense strand
ugagaaugcugagaaaguu

SEQ ID NO: 1948729 - RNA, 19 nt, Homo sapiens
  misc_RNA (1)...(19): siRNA sense strand
ggcagaagcaagagauaua

SEQ ID NO: 1948730 - RNA, 19 nt, Homo sapiens
  misc_RNA (1)...(19): siRNA sense strand
uuagaaaggcagaaacaua

SEQ ID NO: 1948731 - RNA, 19 nt, Homo sapiens
  misc_RNA (1)...(19): siRNA sense strand
gauccagacacuucauuaa

SEQ ID NO: 1948732 - RNA, 19 nt, Homo sapiens
  misc_RNA (1)...(19): siRNA sense strand
gcagaauggcucagacuug

SEQ ID NO: 1948733 - RNA, 19 nt, Homo sapiens
  misc_RNA (1)...(19): siRNA sense strand
gguuuccaaugcacaguua

SEQ ID NO: 1948734 - RNA, 19 nt, Homo sapiens
  misc_RNA (1)...(19): siRNA sense strand
aggaacagauggcagaauu

SEQ ID NO: 1948735 - RNA, 19 nt, Homo sapiens
  misc_RNA (1)...(19): siRNA sense strand
cugagaaaguugaagauga

SEQ ID NO: 1948736 - RNA, 19 nt, Homo sapiens
  misc_RNA (1)...(19): siRNA sense strand
agggacagguucugagaua

SEQ ID NO: 1948737 - RNA, 19 nt, Homo sapiens
  misc_RNA (1)...(19): siRNA sense strand
uagaaaggcagaaacauau

SEQ ID NO: 1948738 - RNA, 19 nt, Homo sapiens
  misc_RNA (1)...(19): siRNA sense strand
gaaaggcagaaacauaugu

SEQ ID NO: 1948739 - RNA, 19 nt, Homo sapiens
  misc_RNA (1)...(19): siRNA sense strand
gcagaacaggauauaacua

SEQ ID NO: 1948740 - RNA, 19 nt, Homo sapiens
  misc_RNA (1)...(19): siRNA sense strand
aaagaaggccugcggcaaa

SEQ ID NO: 1948741 - RNA, 19 nt, Homo sapiens
  misc_RNA (1)...(19): siRNA sense strand
gagaagaacaauuugaucu

SEQ ID NO: 1948742 - RNA, 19 nt, Homo sapiens
  misc_RNA (1)...(19): siRNA sense strand
aaagagaugagcuuauuga

SEQ ID NO: 1948743 - RNA, 19 nt, Homo sapiens
  misc_RNA (1)...(19): siRNA sense strand
gacaaacaguaugcugaaa

SEQ ID NO: 1948744 - RNA, 19 nt, Homo sapiens
  misc_RNA (1)...(19): siRNA sense strand
ggaacagauggcagaauuu

SEQ ID NO: 1948745 - RNA, 19 nt, Homo sapiens
  misc_RNA (1)...(19): siRNA sense strand
gagaagaugaaggccaaua

SEQ ID NO: 1948746 - RNA, 19 nt, Homo sapiens
  misc_RNA (1)...(19): siRNA sense strand
caacgagaguuacgaacag

SEQ ID NO: 1948747 - RNA, 19 nt, Homo sapiens
  misc_RNA (1)...(19): siRNA sense strand
aagaugaagcuuugaguaa

SEQ ID NO: 1948748 - RNA, 19 nt, Homo sapiens
  misc_RNA (1)...(19): siRNA sense strand
gcagaaacauauguguagu

SEQ ID NO: 1948749 - RNA, 19 nt, Homo sapiens
  misc_RNA (1)...(19): siRNA sense strand
uaauagauccagacacuuc

SEQ ID NO: 1948750 - RNA, 19 nt, Homo sapiens
  misc_RNA (1)...(19): siRNA sense strand
gaugccaauagacaaauua

SEQ ID NO: 1948751 - RNA, 19 nt, Homo sapiens
  misc_RNA (1)...(19): siRNA sense strand
gcaagagauauacgcauga

SEQ ID NO: 1948752 - RNA, 19 nt, Homo sapiens
  misc_RNA (1)...(19): siRNA sense strand
caauuugaucuaccaagua

SEQ ID NO: 1948753 - RNA, 19 nt, Homo sapiens
  misc_RNA (1)...(19): siRNA sense strand
gcucagacuugcaguucau

SEQ ID NO: 1948754 - RNA, 19 nt, Homo sapiens
  misc_RNA (1)...(19): siRNA sense strand
gaacagauggcagaauuuu

SEQ ID NO: 1948755 - RNA, 19 nt, Homo sapiens
  misc_RNA (1)...(19): siRNA sense strand
agaaacauauguguagugu

SEQ ID NO: 1948756 - RNA, 19 nt, Homo sapiens
  misc_RNA (1)...(19): siRNA sense strand
ugcagaagaugaagcuuug

SEQ ID NO: 1948757 - RNA, 19 nt, Homo sapiens
  misc_RNA (1)...(19): siRNA sense strand
cuuaauagauccagacacu

SEQ ID NO: 1948758 - RNA, 19 nt, Homo sapiens
  misc_RNA (1)...(19): siRNA sense strand
uaacuaccuuggagcaaag

SEQ ID NO: 1948759 - RNA, 19 nt, Homo sapiens
  misc_RNA (1)...(19): siRNA sense strand
uagacacacucaaggaugu

SEQ ID NO: 1948760 - RNA, 19 nt, Homo sapiens
  misc_RNA (1)...(19): siRNA sense strand
ugacaaacaguaugcugaa

SEQ ID NO: 1948761 - RNA, 19 nt, Homo sapiens
  misc_RNA (1)...(19): siRNA sense strand
ggaguuagaaaggcagaaa

SEQ ID NO: 1948762 - RNA, 19 nt, Homo sapiens
  misc_RNA (1)...(19): siRNA sense strand
acaauuugaucuaccaagu

SEQ ID NO: 1948763 - RNA, 19 nt, Homo sapiens
  misc_RNA (1)...(19): siRNA sense strand
gauauacgcaugagagaac

SEQ ID NO: 1948764 - RNA, 19 nt, Homo sapiens
  misc_RNA (1)...(19): siRNA sense strand
gaaaugcuccaggaaugau

SEQ ID NO: 1948765 - RNA, 19 nt, Homo sapiens
  misc_RNA (1)...(19): siRNA sense strand
agaccuucaucucgaaauu

SEQ ID NO: 1948766 - RNA, 19 nt, Homo sapiens
  misc_RNA (1)...(19): siRNA sense strand
aggaagaacuacugucaca

SEQ ID NO: 1948767 - RNA, 19 nt, Homo sapiens
  misc_RNA (1)...(19): siRNA sense strand
agaagggccauuagaugua

SEQ ID NO: 1948768 - RNA, 19 nt, Homo sapiens
  misc_RNA (1)...(19): siRNA sense strand
acaagaccuucaucucgaa

SEQ ID NO: 1948769 - RNA, 19 nt, Homo sapiens
  misc_RNA (1)...(19): siRNA sense strand
gaggaggaacgacagaaau

SEQ ID NO: 1948770 - RNA, 19 nt, Homo sapiens
  misc_RNA (1)...(19): siRNA sense strand
gagauauacgcaugagaga

SEQ ID NO: 1948771 - RNA, 19 nt, Homo sapiens
  misc_RNA (1)...(19): siRNA sense strand
gagagaugccaauagacaa

SEQ ID NO: 1948772 - RNA, 19 nt, Homo sapiens
  misc_RNA (1)...(19): siRNA sense strand
gacuugcaguucaucgaaa

SEQ ID NO: 1948773 - RNA, 19 nt, Homo sapiens
  misc_RNA (1)...(19): siRNA sense strand
caaagagaugagcuuauug

SEQ ID NO: 1948774 - RNA, 19 nt, Homo sapiens
  misc_RNA (1)...(19): siRNA sense strand
gacaccagcagcuuaauag

SEQ ID NO: 1948775 - RNA, 19 nt, Homo sapiens
  misc_RNA (1)...(19): siRNA sense strand
caagagauauacgcaugag

SEQ ID NO: 1948776 - RNA, 19 nt, Homo sapiens
  misc_RNA (1)...(19): siRNA sense strand
auaacuaccuuggagcaaa

SEQ ID NO: 1948777 - RNA, 19 nt, Homo sapiens
  misc_RNA (1)...(19): siRNA sense strand
ggcagaaacauauguguag

SEQ ID NO: 1948778 - RNA, 19 nt, Homo sapiens
  misc_RNA (1)...(19): siRNA sense strand
ccaaguagacacacucaag

SEQ ID NO: 1948779 - RNA, 19 nt, Homo sapiens
  misc_RNA (1)...(19): siRNA sense strand
gacaaugagaagaacaauu

SEQ ID NO: 1948780 - RNA, 19 nt, Homo sapiens
  misc_RNA (1)...(19): siRNA sense strand
ccaaugcacaguuagacaa

SEQ ID NO: 1948781 - RNA, 19 nt, Homo sapiens
  misc_RNA (1)...(19): siRNA sense strand
caaacaguaugcugaaaau

SEQ ID NO: 1948782 - RNA, 19 nt, Homo sapiens
  misc_RNA (1)...(19): siRNA sense strand
gaagaugaaggccaauagg

SEQ ID NO: 1948783 - RNA, 19 nt, Homo sapiens
  misc_RNA (1)...(19): siRNA sense strand
uaaaacugcugcugagaau

SEQ ID NO: 1948784 - RNA, 19 nt, Homo sapiens
  misc_RNA (1)...(19): siRNA sense strand
ucaucgaaaugcagagaga

SEQ ID NO: 1948785 - RNA, 19 nt, Homo sapiens
  misc_RNA (1)...(19): siRNA sense strand
gcacaguuagacaaugaga

SEQ ID NO: 1948786 - RNA, 19 nt, Homo sapiens
  misc_RNA (1)...(19): siRNA sense strand
gaagcuuugaguaacauug

SEQ ID NO: 1948787 - RNA, 19 nt, Homo sapiens
  misc_RNA (1)...(19): siRNA sense strand
uacaagaaagccaugguuu

SEQ ID NO: 1948788 - RNA, 19 nt, Homo sapiens
  misc_RNA (1)...(19): siRNA sense strand
uggacaagauugaggagau

SEQ ID NO: 1948789 - RNA, 19 nt, Homo sapiens
  misc_RNA (1)...(19): siRNA sense strand
gagaaugcugagaaaguug

SEQ ID NO: 1948790 - RNA, 19 nt, Homo sapiens
  misc_RNA (1)...(19): siRNA sense strand
augcacaguuagacaauga

SEQ ID NO: 1948791 - RNA, 19 nt, Homo sapiens
  misc_RNA (1)...(19): siRNA sense strand
gggacagguucugagauau

SEQ ID NO: 1948792 - RNA, 19 nt, Homo sapiens
  misc_RNA (1)...(19): siRNA sense strand
gagaaggaagaacuacugu

SEQ ID NO: 1948793 - RNA, 19 nt, Homo sapiens
  misc_RNA (1)...(19): siRNA sense strand
cggcaaagagaugagcuua

SEQ ID NO: 1948794 - RNA, 19 nt, Homo sapiens
  misc_RNA (1)...(19): siRNA sense strand
gaacaauuugaucuaccaa

SEQ ID NO: 1948795 - RNA, 19 nt, Homo sapiens
  misc_RNA (1)...(19): siRNA sense strand
aaucaaaggaguuagaaag

SEQ ID NO: 1948796 - RNA, 19 nt, Homo sapiens
  misc_RNA (1)...(19): siRNA sense strand
cagaacaggauauaacuac

SEQ ID NO: 1948797 - RNA, 19 nt, Homo sapiens
  misc_RNA (1)...(19): siRNA sense strand
accagcagcuuaauagauc

SEQ ID NO: 1948798 - RNA, 19 nt, Homo sapiens
  misc_RNA (1)...(19): siRNA sense strand
gggcagaagcaagagauau

SEQ ID NO: 1948799 - RNA, 19 nt, Homo sapiens
  misc_RNA (1)...(19): siRNA sense strand
gaacaggauauaacuaccu

SEQ ID NO: 1948800 - RNA, 19 nt, Homo sapiens
  misc_RNA (1)...(19): siRNA sense strand
gcaacaaccccucuaagug

SEQ ID NO: 1948801 - RNA, 19 nt, Homo sapiens
  misc_RNA (1)...(19): siRNA sense strand
caaaucagcuggcuucuuc

SEQ ID NO: 1948802 - RNA, 19 nt, Homo sapiens
  misc_RNA (1)...(19): siRNA sense strand
gcucaccucucuuccuuua

SEQ ID NO: 1948803 - RNA, 19 nt, Homo sapiens
  misc_RNA (1)...(19): siRNA sense strand
gcauggagguggucaagga

SEQ ID NO: 1948804 - RNA, 19 nt, Homo sapiens
  misc_RNA (1)...(19): siRNA sense strand
ggagaagucugagcagguu

SEQ ID NO: 1948805 - RNA, 19 nt, Homo sapiens
  misc_RNA (1)...(19): siRNA sense strand
gaagaaaauugaccugauu

SEQ ID NO: 1948806 - RNA, 19 nt, Homo sapiens
  misc_RNA (1)...(19): siRNA sense strand
gacaagaacaaccgcuaua

SEQ ID NO: 1948807 - RNA, 19 nt, Homo sapiens
  misc_RNA (1)...(19): siRNA sense strand
aagaggagccuucaucauu

SEQ ID NO: 1948808 - RNA, 19 nt, Homo sapiens
  misc_RNA (1)...(19): siRNA sense strand
gcagguaaguugguuugga

SEQ ID NO: 1948809 - RNA, 19 nt, Homo sapiens
  misc_RNA (1)...(19): siRNA sense strand
ggagcuccaggcagaauua

SEQ ID NO: 1948810 - RNA, 19 nt, Homo sapiens
  misc_RNA (1)...(19): siRNA sense strand
cugagcagguucuggauaa

SEQ ID NO: 1948811 - RNA, 19 nt, Homo sapiens
  misc_RNA (1)...(19): siRNA sense strand
gaggagccuucaucauuca

SEQ ID NO: 1948812 - RNA, 19 nt, Homo sapiens
  misc_RNA (1)...(19): siRNA sense strand
gaauuagacaugcuuaagu

SEQ ID NO: 1948813 - RNA, 19 nt, Homo sapiens
  misc_RNA (1)...(19): siRNA sense strand
ggaaguugagcccaagaaa

SEQ ID NO: 1948814 - RNA, 19 nt, Homo sapiens
  misc_RNA (1)...(19): siRNA sense strand
ccaauuggaggaugaagaa

SEQ ID NO: 1948815 - RNA, 19 nt, Homo sapiens
  misc_RNA (1)...(19): siRNA sense strand
ggacaagaacaaccgcuau

SEQ ID NO: 1948816 - RNA, 19 nt, Homo sapiens
  misc_RNA (1)...(19): siRNA sense strand
ucaggaaaguccccaaaua

SEQ ID NO: 1948817 - RNA, 19 nt, Homo sapiens
  misc_RNA (1)...(19): siRNA sense strand
guacagcgaggacuacaug

SEQ ID NO: 1948818 - RNA, 19 nt, Homo sapiens
  misc_RNA (1)...(19): siRNA sense strand
caaggagccaggccaauug

SEQ ID NO: 1948819 - RNA, 19 nt, Homo sapiens
  misc_RNA (1)...(19): siRNA sense strand
gcagaauuagacaugcuua

SEQ ID NO: 1948820 - RNA, 19 nt, Homo sapiens
  misc_RNA (1)...(19): siRNA sense strand
guauucgccuaaagaagaa

SEQ ID NO: 1948821 - RNA, 19 nt, Homo sapiens
  misc_RNA (1)...(19): siRNA sense strand
agaggagccuucaucauuc

SEQ ID NO: 1948822 - RNA, 19 nt, Homo sapiens
  misc_RNA (1)...(19): siRNA sense strand
gaacuucccaccaccucuu

SEQ ID NO: 1948823 - RNA, 19 nt, Homo sapiens
  misc_RNA (1)...(19): siRNA sense strand
ggacacuaguggagagagu

SEQ ID NO: 1948824 - RNA, 19 nt, Homo sapiens
  misc_RNA (1)...(19): siRNA sense strand
caaccgcuauaaguccaua

SEQ ID NO: 1948825 - RNA, 19 nt, Homo sapiens
  misc_RNA (1)...(19): siRNA sense strand
ccaaggagccaggccaauu

SEQ ID NO: 1948826 - RNA, 19 nt, Homo sapiens
  misc_RNA (1)...(19): siRNA sense strand
gcaccucacuggucaucag

SEQ ID NO: 1948827 - RNA, 19 nt, Homo sapiens
  misc_RNA (1)...(19): siRNA sense strand
uaaguugguuuggaugaga

SEQ ID NO: 1948828 - RNA, 19 nt, Homo sapiens
  misc_RNA (1)...(19): siRNA sense strand
cagguaaguugguuuggau

SEQ ID NO: 1948829 - RNA, 19 nt, Homo sapiens
  misc_RNA (1)...(19): siRNA sense strand
ccagagagagaaagacaga

SEQ ID NO: 1948830 - RNA, 19 nt, Homo sapiens
  misc_RNA (1)...(19): siRNA sense strand
uguauucgccuaaagaaga

SEQ ID NO: 1948831 - RNA, 19 nt, Homo sapiens
  misc_RNA (1)...(19): siRNA sense strand
gcacagcaugucccaggaa

SEQ ID NO: 1948832 - RNA, 19 nt, Homo sapiens
  misc_RNA (1)...(19): siRNA sense strand
uaacuguauucgccuaaag

SEQ ID NO: 1948833 - RNA, 19 nt, Homo sapiens
  misc_RNA (1)...(19): siRNA sense strand
agaaugaccgagaacauga

SEQ ID NO: 1948834 - RNA, 19 nt, Homo sapiens
  misc_RNA (1)...(19): siRNA sense strand
ggacuccucggccauggaa

SEQ ID NO: 1948835 - RNA, 19 nt, Homo sapiens
  misc_RNA (1)...(19): siRNA sense strand
cccauggugugcagaauau

SEQ ID NO: 1948836 - RNA, 19 nt, Homo sapiens
  misc_RNA (1)...(19): siRNA sense strand
acagugagcgcaucuacuu

SEQ ID NO: 1948837 - RNA, 19 nt, Homo sapiens
  misc_RNA (1)...(19): siRNA sense strand
gggaggagagggagcagaa

SEQ ID NO: 1948838 - RNA, 19 nt, Homo sapiens
  misc_RNA (1)...(19): siRNA sense strand
caagaacaaccgcuauaag

SEQ ID NO: 1948839 - RNA, 19 nt, Homo sapiens
  misc_RNA (1)...(19): siRNA sense strand
acaagaacaaccgcuauaa

SEQ ID NO: 1948840 - RNA, 19 nt, Homo sapiens
  misc_RNA (1)...(19): siRNA sense strand
agagagaaagacagaauga

SEQ ID NO: 1948841 - RNA, 19 nt, Homo sapiens
  misc_RNA (1)...(19): siRNA sense strand
gaaugaccgagaacaugaa

SEQ ID NO: 1948842 - RNA, 19 nt, Homo sapiens
  misc_RNA (1)...(19): siRNA sense strand
gagagagaaagacagaaug

SEQ ID NO: 1948843 - RNA, 19 nt, Homo sapiens
  misc_RNA (1)...(19): siRNA sense strand
gaaguugagcccaagaaac

SEQ ID NO: 1948844 - RNA, 19 nt, Homo sapiens
  misc_RNA (1)...(19): siRNA sense strand
ucucggacccugcagguaa

SEQ ID NO: 1948845 - RNA, 19 nt, Homo sapiens
  misc_RNA (1)...(19): siRNA sense strand
aauuagacaugcuuaaguc

SEQ ID NO: 1948846 - RNA, 19 nt, Homo sapiens
  misc_RNA (1)...(19): siRNA sense strand
aagaacaaccgcuauaagu

SEQ ID NO: 1948847 - RNA, 19 nt, Homo sapiens
  misc_RNA (1)...(19): siRNA sense strand
aggaguacuucguggauga

SEQ ID NO: 1948848 - RNA, 19 nt, Homo sapiens
  misc_RNA (1)...(19): siRNA sense strand
cacagcaugucccaggaaa

SEQ ID NO: 1948849 - RNA, 19 nt, Homo sapiens
  misc_RNA (1)...(19): siRNA sense strand
ccucggccauggaaguuga

SEQ ID NO: 1948850 - RNA, 19 nt, Homo sapiens
  misc_RNA (1)...(19): siRNA sense strand
gguaaguugguuuggauga

SEQ ID NO: 1948851 - RNA, 19 nt, Homo sapiens
  misc_RNA (1)...(19): siRNA sense strand
gcacagugagcgcaucuac

SEQ ID NO: 1948852 - RNA, 19 nt, Homo sapiens
  misc_RNA (1)...(19): siRNA sense strand
gaucuccacccaggacaaa

SEQ ID NO: 1948853 - RNA, 19 nt, Homo sapiens
  misc_RNA (1)...(19): siRNA sense strand
gagagugacgugcgaugug

SEQ ID NO: 1948854 - RNA, 19 nt, Homo sapiens
  misc_RNA (1)...(19): siRNA sense strand
cagaaugaccgagaacaug

SEQ ID NO: 1948855 - RNA, 19 nt, Homo sapiens
  misc_RNA (1)...(19): siRNA sense strand
ggacccugcagguaaguug

SEQ ID NO: 1948856 - RNA, 19 nt, Homo sapiens
  misc_RNA (1)...(19): siRNA sense strand
ugaccgagaacaugaagga

SEQ ID NO: 1948857 - RNA, 19 nt, Homo sapiens
  misc_RNA (1)...(19): siRNA sense strand
ccucacuggucaucaggaa

SEQ ID NO: 1948858 - RNA, 19 nt, Homo sapiens
  misc_RNA (1)...(19): siRNA sense strand
cagaauuagacaugcuuaa

SEQ ID NO: 1948859 - RNA, 19 nt, Homo sapiens
  misc_RNA (1)...(19): siRNA sense strand
ugaauccgagccaggagua

SEQ ID NO: 1948860 - RNA, 19 nt, Homo sapiens
  misc_RNA (1)...(19): siRNA sense strand
guaaguugguuuggaugag

SEQ ID NO: 1948861 - RNA, 19 nt, Homo sapiens
  misc_RNA (1)...(19): siRNA sense strand
cguauugccaccacaggua

SEQ ID NO: 1948862 - RNA, 19 nt, Homo sapiens
  misc_RNA (1)...(19): siRNA sense strand
ccaggcagaauuagacaug

SEQ ID NO: 1948863 - RNA, 19 nt, Homo sapiens
  misc_RNA (1)...(19): siRNA sense strand
caucugacccucaugaacu

SEQ ID NO: 1948864 - RNA, 19 nt, Homo sapiens
  misc_RNA (1)...(19): siRNA sense strand
gggcaaaagucccuacaag

SEQ ID NO: 1948865 - RNA, 19 nt, Homo sapiens
  misc_RNA (1)...(19): siRNA sense strand
aggccucccuugcaucuga

SEQ ID NO: 1948866 - RNA, 19 nt, Homo sapiens
  misc_RNA (1)...(19): siRNA sense strand
ggaugaaugcccaaaccau

SEQ ID NO: 1948867 - RNA, 19 nt, Homo sapiens
  misc_RNA (1)...(19): siRNA sense strand
cuaacuguauucgccuaaa

SEQ ID NO: 1948868 - RNA, 19 nt, Homo sapiens
  misc_RNA (1)...(19): siRNA sense strand
aagacagaaugaccgagaa

SEQ ID NO: 1948869 - RNA, 19 nt, Homo sapiens
  misc_RNA (1)...(19): siRNA sense strand
ugaagcgccugcacagcau

SEQ ID NO: 1948870 - RNA, 19 nt, Homo sapiens
  misc_RNA (1)...(19): siRNA sense strand
ugagguacguggucaucuc

SEQ ID NO: 1948871 - RNA, 19 nt, Homo sapiens
  misc_RNA (1)...(19): siRNA sense strand
agagagagaaagacagaau

SEQ ID NO: 1948872 - RNA, 19 nt, Homo sapiens
  misc_RNA (1)...(19): siRNA sense strand
agagugacgugcgaugugu

SEQ ID NO: 1948873 - RNA, 19 nt, Homo sapiens
  misc_RNA (1)...(19): siRNA sense strand
gcuaagaagaagaaaauug

SEQ ID NO: 1948874 - RNA, 19 nt, Homo sapiens
  misc_RNA (1)...(19): siRNA sense strand
ccagaggagagaagagguu

SEQ ID NO: 1948875 - RNA, 19 nt, Homo sapiens
  misc_RNA (1)...(19): siRNA sense strand
caggccaauuggaggauga

SEQ ID NO: 1948876 - RNA, 19 nt, Homo sapiens
  misc_RNA (1)...(19): siRNA sense strand
guacuucguggaugaaugc

SEQ ID NO: 1948877 - RNA, 19 nt, Homo sapiens
  misc_RNA (1)...(19): siRNA sense strand
cagcgaggacuacaugaag

SEQ ID NO: 1948878 - RNA, 19 nt, Homo sapiens
  misc_RNA (1)...(19): siRNA sense strand
agaacaaccgcuauaaguc

SEQ ID NO: 1948879 - RNA, 19 nt, Homo sapiens
  misc_RNA (1)...(19): siRNA sense strand
guugagcccaagaaacuga

SEQ ID NO: 1948880 - RNA, 19 nt, Homo sapiens
  misc_RNA (1)...(19): siRNA sense strand
cuggaggccucacuggaau

SEQ ID NO: 1948881 - RNA, 19 nt, Homo sapiens
  misc_RNA (1)...(19): siRNA sense strand
ugguuuggaugagauuauu

SEQ ID NO: 1948882 - RNA, 19 nt, Homo sapiens
  misc_RNA (1)...(19): siRNA sense strand
ucacuggucaucaggaaag

SEQ ID NO: 1948883 - RNA, 19 nt, Homo sapiens
  misc_RNA (1)...(19): siRNA sense strand
ccaacuggaugagguacgu

SEQ ID NO: 1948884 - RNA, 19 nt, Homo sapiens
  misc_RNA (1)...(19): siRNA sense strand
gccaauuggaggaugaaga

SEQ ID NO: 1948885 - RNA, 19 nt, Homo sapiens
  misc_RNA (1)...(19): siRNA sense strand
ggaguacuucguggaugaa

SEQ ID NO: 1948886 - RNA, 19 nt, Homo sapiens
  misc_RNA (1)...(19): siRNA sense strand
gaggagagaagagguugca

SEQ ID NO: 1948887 - RNA, 19 nt, Homo sapiens
  misc_RNA (1)...(19): siRNA sense strand
ccaaagagguaaucaacuu

SEQ ID NO: 1948888 - RNA, 19 nt, Homo sapiens
  misc_RNA (1)...(19): siRNA sense strand
gaacuuccacuuucuuuga

SEQ ID NO: 1948889 - RNA, 19 nt, Homo sapiens
  misc_RNA (1)...(19): siRNA sense strand
gagcuugucuuugguugua

SEQ ID NO: 1948890 - RNA, 19 nt, Homo sapiens
  misc_RNA (1)...(19): siRNA sense strand
gaguuucucuguccucuug

SEQ ID NO: 1948891 - RNA, 19 nt, Homo sapiens
  misc_RNA (1)...(19): siRNA sense strand
cagaaucacuggcuaaguc

SEQ ID NO: 1948892 - RNA, 19 nt, Homo sapiens
  misc_RNA (1)...(19): siRNA sense strand
caacugcacccaugggaaa

SEQ ID NO: 1948893 - RNA, 19 nt, Homo sapiens
  misc_RNA (1)...(19): siRNA sense strand
aaucugaacuuccacuuuc

SEQ ID NO: 1948894 - RNA, 19 nt, Homo sapiens
  misc_RNA (1)...(19): siRNA sense strand
gaggcagcuuuauuuccua

SEQ ID NO: 1948895 - RNA, 19 nt, Homo sapiens
  misc_RNA (1)...(19): siRNA sense strand
gcacccaugggaaaucuga

SEQ ID NO: 1948896 - RNA, 19 nt, Homo sapiens
  misc_RNA (1)...(19): siRNA sense strand
cauaugagaagucaaccaa

SEQ ID NO: 1948897 - RNA, 19 nt, Homo sapiens
  misc_RNA (1)...(19): siRNA sense strand
gaaaucugaacuuccacuu

SEQ ID NO: 1948898 - RNA, 19 nt, Homo sapiens
  misc_RNA (1)...(19): siRNA sense strand
caugggaaaucugaacuuc

SEQ ID NO: 1948899 - RNA, 19 nt, Homo sapiens
  misc_RNA (1)...(19): siRNA sense strand
ucuuugagcuugucuuugg

SEQ ID NO: 1948900 - RNA, 19 nt, Homo sapiens
  misc_RNA (1)...(19): siRNA sense strand
uugcucagccugcauauga

SEQ ID NO: 1948901 - RNA, 19 nt, Homo sapiens
  misc_RNA (1)...(19): siRNA sense strand
gagaagucaaccaagcauu

SEQ ID NO: 1948902 - RNA, 19 nt, Homo sapiens
  misc_RNA (1)...(19): siRNA sense strand
gagguaaucaacuuuaacu

SEQ ID NO: 1948903 - RNA, 19 nt, Homo sapiens
  misc_RNA (1)...(19): siRNA sense strand
uuauguauccaaagaggua

SEQ ID NO: 1948904 - RNA, 19 nt, Homo sapiens
  misc_RNA (1)...(19): siRNA sense strand
gcacuuugugacaugcuuu

SEQ ID NO: 1948905 - RNA, 19 nt, Homo sapiens
  misc_RNA (1)...(19): siRNA sense strand
cagcuuuauuuccuacaga

SEQ ID NO: 1948906 - RNA, 19 nt, Homo sapiens
  misc_RNA (1)...(19): siRNA sense strand
ugaggcagcuuuauuuccu

SEQ ID NO: 1948907 - RNA, 19 nt, Homo sapiens
  misc_RNA (1)...(19): siRNA sense strand
gaagucaaccaagcauucu

SEQ ID NO: 1948908 - RNA, 19 nt, Homo sapiens
  misc_RNA (1)...(19): siRNA sense strand
gagcucaagcacagagaug

SEQ ID NO: 1948909 - RNA, 19 nt, Homo sapiens
  misc_RNA (1)...(19): siRNA sense strand
ccacuuucuuugagcuugu

SEQ ID NO: 1948910 - RNA, 19 nt, Homo sapiens
  misc_RNA (1)...(19): siRNA sense strand
agaagucaaccaagcauuc

SEQ ID NO: 1948911 - RNA, 19 nt, Homo sapiens
  misc_RNA (1)...(19): siRNA sense strand
gcagcuuuauuuccuacag

SEQ ID NO: 1948912 - RNA, 19 nt, Homo sapiens
  misc_RNA (1)...(19): siRNA sense strand
aaucagaaucacuggcuaa

SEQ ID NO: 1948913 - RNA, 19 nt, Homo sapiens
  misc_RNA (1)...(19): siRNA sense strand
aaaucugaacuuccacuuu

SEQ ID NO: 1948914 - RNA, 19 nt, Homo sapiens
  misc_RNA (1)...(19): siRNA sense strand
ugucuuugguuguaauaag

SEQ ID NO: 1948915 - RNA, 19 nt, Homo sapiens
  misc_RNA (1)...(19): siRNA sense strand
cauccuggaaucagaauca

SEQ ID NO: 1948916 - RNA, 19 nt, Homo sapiens
  misc_RNA (1)...(19): siRNA sense strand
gcuugucuuugguuguaau

SEQ ID NO: 1948917 - RNA, 19 nt, Homo sapiens
  misc_RNA (1)...(19): siRNA sense strand
caucaucguuuaucuguau

SEQ ID NO: 1948918 - RNA, 19 nt, Homo sapiens
  misc_RNA (1)...(19): siRNA sense strand
gggcugguguacauguuua

SEQ ID NO: 1948919 - RNA, 19 nt, Homo sapiens
  misc_RNA (1)...(19): siRNA sense strand
ccaaauacaaugacacuga

SEQ ID NO: 1948920 - RNA, 19 nt, Homo sapiens
  misc_RNA (1)...(19): siRNA sense strand
gaccaccaccuuugugaua

SEQ ID NO: 1948921 - RNA, 19 nt, Homo sapiens
  misc_RNA (1)...(19): siRNA sense strand
ucucugccaucccucauua

SEQ ID NO: 1948922 - RNA, 19 nt, Homo sapiens
  misc_RNA (1)...(19): siRNA sense strand
ggaagaggauggagaaccu

SEQ ID NO: 1948923 - RNA, 19 nt, Homo sapiens
  misc_RNA (1)...(19): siRNA sense strand
gggucaacuuguucuauuu

SEQ ID NO: 1948924 - RNA, 19 nt, Homo sapiens
  misc_RNA (1)...(19): siRNA sense strand
guacauguuuaaccucauc

SEQ ID NO: 1948925 - RNA, 19 nt, Homo sapiens
  misc_RNA (1)...(19): siRNA sense strand
ucaaggaggaggaagauga

SEQ ID NO: 1948926 - RNA, 19 nt, Homo sapiens
  misc_RNA (1)...(19): siRNA sense strand
ggaagcagacaccaaauac

SEQ ID NO: 1948927 - RNA, 19 nt, Homo sapiens
  misc_RNA (1)...(19): siRNA sense strand
gcagacaccaaauacaaug

SEQ ID NO: 1948928 - RNA, 19 nt, Homo sapiens
  misc_RNA (1)...(19): siRNA sense strand
ucacagaccggguggaaau

SEQ ID NO: 1948929 - RNA, 19 nt, Homo sapiens
  misc_RNA (1)...(19): siRNA sense strand
ggauggagaaccucaagga

SEQ ID NO: 1948930 - RNA, 19 nt, Homo sapiens
  misc_RNA (1)...(19): siRNA sense strand
ccuccauguucuucaauaa

SEQ ID NO: 1948931 - RNA, 19 nt, Homo sapiens
  misc_RNA (1)...(19): siRNA sense strand
gcaucaucguuuaucugua

SEQ ID NO: 1948932 - RNA, 19 nt, Homo sapiens
  misc_RNA (1)...(19): siRNA sense strand
ucacaaggcugguguuccu

SEQ ID NO: 1948933 - RNA, 19 nt, Homo sapiens
  misc_RNA (1)...(19): siRNA sense strand
ccaaguaccugcagauccu

SEQ ID NO: 1948934 - RNA, 19 nt, Homo sapiens
  misc_RNA (1)...(19): siRNA sense strand
gauccugaccucucugaug

SEQ ID NO: 1948935 - RNA, 19 nt, Homo sapiens
  misc_RNA (1)...(19): siRNA sense strand
gcuuucuccugcuucauuu

SEQ ID NO: 1948936 - RNA, 19 nt, Homo sapiens
  misc_RNA (1)...(19): siRNA sense strand
acucuacucuuccuacguu

SEQ ID NO: 1948937 - RNA, 19 nt, Homo sapiens
  misc_RNA (1)...(19): siRNA sense strand
gaagcagacaccaaauaca

SEQ ID NO: 1948938 - RNA, 19 nt, Homo sapiens
  misc_RNA (1)...(19): siRNA sense strand
aagcagacaccaaauacaa

SEQ ID NO: 1948939 - RNA, 19 nt, Homo sapiens
  misc_RNA (1)...(19): siRNA sense strand
ccaccaccuuugugauaga

SEQ ID NO: 1948940 - RNA, 19 nt, Homo sapiens
  misc_RNA (1)...(19): siRNA sense strand
uggaagcagacaccaaaua

SEQ ID NO: 1948941 - RNA, 19 nt, Homo sapiens
  misc_RNA (1)...(19): siRNA sense strand
gcaucuacuuggcgaucuu

SEQ ID NO: 1948942 - RNA, 19 nt, Homo sapiens
  misc_RNA (1)...(19): siRNA sense strand
gccuccauguucuucaaua

SEQ ID NO: 1948943 - RNA, 19 nt, Homo sapiens
  misc_RNA (1)...(19): siRNA sense strand
gcaccggcauccaguacgu

SEQ ID NO: 1948944 - RNA, 19 nt, Homo sapiens
  misc_RNA (1)...(19): siRNA sense strand
acacccagcuggccuuugg

SEQ ID NO: 1948945 - RNA, 19 nt, Homo sapiens
  misc_RNA (1)...(19): siRNA sense strand
auccugaccucucugauga

SEQ ID NO: 1948946 - RNA, 19 nt, Homo sapiens
  misc_RNA (1)...(19): siRNA sense strand
ggagaccucgccaucuaug

SEQ ID NO: 1948947 - RNA, 19 nt, Homo sapiens
  misc_RNA (1)...(19): siRNA sense strand
gcgacagccucauggacau

SEQ ID NO: 1948948 - RNA, 19 nt, Homo sapiens
  misc_RNA (1)...(19): siRNA sense strand
caacccguuugaaaucaca

SEQ ID NO: 1948949 - RNA, 19 nt, Homo sapiens
  misc_RNA (1)...(19): siRNA sense strand
gguggaccgcgucguguuu

SEQ ID NO: 1948950 - RNA, 19 nt, Homo sapiens
  misc_RNA (1)...(19): siRNA sense strand
cauguacacccucaacuuc

SEQ ID NO: 1948951 - RNA, 19 nt, Homo sapiens
  misc_RNA (1)...(19): siRNA sense strand
ggacauguacacccucaac

SEQ ID NO: 1948952 - RNA, 19 nt, Homo sapiens
  misc_RNA (1)...(19): siRNA sense strand
ggucaacuuguucuauuuc

SEQ ID NO: 1948953 - RNA, 19 nt, Homo sapiens
  misc_RNA (1)...(19): siRNA sense strand
gacaccaaauacaaugaca

SEQ ID NO: 1948954 - RNA, 19 nt, Homo sapiens
  misc_RNA (1)...(19): siRNA sense strand
ucaccgccaucuucugcuu

SEQ ID NO: 1948955 - RNA, 19 nt, Homo sapiens
  misc_RNA (1)...(19): siRNA sense strand
ggaccguucaccuucuuug

SEQ ID NO: 1948956 - RNA, 19 nt, Homo sapiens
  misc_RNA (1)...(19): siRNA sense strand
ggggucaacuuguucuauu

SEQ ID NO: 1948957 - RNA, 19 nt, Homo sapiens
  misc_RNA (1)...(19): siRNA sense strand
gaucucccaacccguuuga

SEQ ID NO: 1948958 - RNA, 19 nt, Homo sapiens
  misc_RNA (1)...(19): siRNA sense strand
gaugagauggaucgcuuuc

SEQ ID NO: 1948959 - RNA, 19 nt, Homo sapiens
  misc_RNA (1)...(19): siRNA sense strand
gaccguucaccuucuuuga

SEQ ID NO: 1948960 - RNA, 19 nt, Homo sapiens
  misc_RNA (1)...(19): siRNA sense strand
ggguggaaaugggacaaau

SEQ ID NO: 1948961 - RNA, 19 nt, Homo sapiens
  misc_RNA (1)...(19): siRNA sense strand
uguggaagcagacaccaaa

SEQ ID NO: 1948962 - RNA, 19 nt, Homo sapiens
  misc_RNA (1)...(19): siRNA sense strand
ggacacccagcuggccuuu

SEQ ID NO: 1948963 - RNA, 19 nt, Homo sapiens
  misc_RNA (1)...(19): siRNA sense strand
gguggaaaugggacaaaug

SEQ ID NO: 1948964 - RNA, 19 nt, Homo sapiens
  misc_RNA (1)...(19): siRNA sense strand
uccauguucuucaauaaag

SEQ ID NO: 1948965 - RNA, 19 nt, Homo sapiens
  misc_RNA (1)...(19): siRNA sense strand
cuucaugaccaccaccuuu

SEQ ID NO: 1948966 - RNA, 19 nt, Homo sapiens
  misc_RNA (1)...(19): siRNA sense strand
ggacgccuaccgcaucuac

SEQ ID NO: 1948967 - RNA, 19 nt, Homo sapiens
  misc_RNA (1)...(19): siRNA sense strand
ggcuuucuccugcuucauu

SEQ ID NO: 1948968 - RNA, 19 nt, Homo sapiens
  misc_RNA (1)...(19): siRNA sense strand
guggaaaugggacaaaugg

SEQ ID NO: 1948969 - RNA, 19 nt, Homo sapiens
  misc_RNA (1)...(19): siRNA sense strand
gggugugcgucuacuccuu

SEQ ID NO: 1948970 - RNA, 19 nt, Homo sapiens
  misc_RNA (1)...(19): siRNA sense strand
ucaacuuguucuauuucug

SEQ ID NO: 1948971 - RNA, 19 nt, Homo sapiens
  misc_RNA (1)...(19): siRNA sense strand
ccauguucuucaauaaagu

SEQ ID NO: 1948972 - RNA, 19 nt, Homo sapiens
  misc_RNA (1)...(19): siRNA sense strand
ucucccaacccguuugaaa

SEQ ID NO: 1948973 - RNA, 19 nt, Homo sapiens
  misc_RNA (1)...(19): siRNA sense strand
gugcugcucugggcuuucu

SEQ ID NO: 1948974 - RNA, 19 nt, Homo sapiens
  misc_RNA (1)...(19): siRNA sense strand
gugcgucuacuccuucaug

SEQ ID NO: 1948975 - RNA, 19 nt, Homo sapiens
  misc_RNA (1)...(19): siRNA sense strand
caucguuuaucuguaugga

SEQ ID NO: 1948976 - RNA, 19 nt, Homo sapiens
  misc_RNA (1)...(19): siRNA sense strand
ggaaaggacgcauggaaua

SEQ ID NO: 1948977 - RNA, 19 nt, Homo sapiens
  misc_RNA (1)...(19): siRNA sense strand
ggacgugaccucaaacuuu

SEQ ID NO: 1948978 - RNA, 19 nt, Homo sapiens
  misc_RNA (1)...(19): siRNA sense strand
uggaauaccucgugaaaug

SEQ ID NO: 1948979 - RNA, 19 nt, Homo sapiens
  misc_RNA (1)...(19): siRNA sense strand
uaacacggaccaaggcuuu

SEQ ID NO: 1948980 - RNA, 19 nt, Homo sapiens
  misc_RNA (1)...(19): siRNA sense strand
ggaaagggaaagagagaug

SEQ ID NO: 1948981 - RNA, 19 nt, Homo sapiens
  misc_RNA (1)...(19): siRNA sense strand
gcucgcagccuuugaggaa

SEQ ID NO: 1948982 - RNA, 19 nt, Homo sapiens
  misc_RNA (1)...(19): siRNA sense strand
ggagggccuucgaaacaug

SEQ ID NO: 1948983 - RNA, 19 nt, Homo sapiens
  misc_RNA (1)...(19): siRNA sense strand
gaggaaagggaaagagaga

SEQ ID NO: 1948984 - RNA, 19 nt, Homo sapiens
  misc_RNA (1)...(19): siRNA sense strand
ggagcgggaucgagaaagg

SEQ ID NO: 1948985 - RNA, 19 nt, Homo sapiens
  misc_RNA (1)...(19): siRNA sense strand
gacgugaccucaaacuuuu

SEQ ID NO: 1948986 - RNA, 19 nt, Homo sapiens
  misc_RNA (1)...(19): siRNA sense strand
gaaaggacgcauggaauac

SEQ ID NO: 1948987 - RNA, 19 nt, Homo sapiens
  misc_RNA (1)...(19): siRNA sense strand
gaauaccucgugaaaugga

SEQ ID NO: 1948988 - RNA, 19 nt, Homo sapiens
  misc_RNA (1)...(19): siRNA sense strand
cauggaauaccucgugaaa

SEQ ID NO: 1948989 - RNA, 19 nt, Homo sapiens
  misc_RNA (1)...(19): siRNA sense strand
gaccgucaccauuaaggaa

SEQ ID NO: 1948990 - RNA, 19 nt, Homo sapiens
  misc_RNA (1)...(19): siRNA sense strand
gggagggccuucgaaacau

SEQ ID NO: 1948991 - RNA, 19 nt, Homo sapiens
  misc_RNA (1)...(19): siRNA sense strand
ggaagggauggucgcagaa

SEQ ID NO: 1948992 - RNA, 19 nt, Homo sapiens
  misc_RNA (1)...(19): siRNA sense strand
aggcaaaggccaaaacuua

SEQ ID NO: 1948993 - RNA, 19 nt, Homo sapiens
  misc_RNA (1)...(19): siRNA sense strand
ccagcagaguggaugacaa

SEQ ID NO: 1948994 - RNA, 19 nt, Homo sapiens
  misc_RNA (1)...(19): siRNA sense strand
cgggagggccuucgaaaca

SEQ ID NO: 1948995 - RNA, 19 nt, Homo sapiens
  misc_RNA (1)...(19): siRNA sense strand
ggaauaccucgugaaaugg

SEQ ID NO: 1948996 - RNA, 19 nt, Homo sapiens
  misc_RNA (1)...(19): siRNA sense strand
gauggucgcagaaguacag

SEQ ID NO: 1948997 - RNA, 19 nt, Homo sapiens
  misc_RNA (1)...(19): siRNA sense strand
gaagggauggucgcagaag

SEQ ID NO: 1948998 - RNA, 19 nt, Homo sapiens
  misc_RNA (1)...(19): siRNA sense strand
cagcagaguggaugacaag

SEQ ID NO: 1948999 - RNA, 19 nt, Homo sapiens
  misc_RNA (1)...(19): siRNA sense strand
cuuacgaguuucgaaguga

SEQ ID NO: 1949000 - RNA, 19 nt, Homo sapiens
  misc_RNA (1)...(19): siRNA sense strand
cggaaaggacgcauggaau

SEQ ID NO: 1949001 - RNA, 19 nt, Homo sapiens
  misc_RNA (1)...(19): siRNA sense strand
ggaucccuguggccagaau

SEQ ID NO: 1949002 - RNA, 19 nt, Homo sapiens
  misc_RNA (1)...(19): siRNA sense strand
cggccagggugauaaagca

SEQ ID NO: 1949003 - RNA, 19 nt, Homo sapiens
  misc_RNA (1)...(19): siRNA sense strand
aaaccuuccuccucaaagc

SEQ ID NO: 1949004 - RNA, 19 nt, Homo sapiens
  misc_RNA (1)...(19): siRNA sense strand
ucgcagaaguacagcacau

SEQ ID NO: 1949005 - RNA, 19 nt, Homo sapiens
  misc_RNA (1)...(19): siRNA sense strand
ucaccauuaaggaaaguaa

SEQ ID NO: 1949006 - RNA, 19 nt, Homo sapiens
  misc_RNA (1)...(19): siRNA sense strand
gcauggaauaccucgugaa

SEQ ID NO: 1949007 - RNA, 19 nt, Homo sapiens
  misc_RNA (1)...(19): siRNA sense strand
agggauggucgcagaagua

SEQ ID NO: 1949008 - RNA, 19 nt, Homo sapiens
  misc_RNA (1)...(19): siRNA sense strand
ccagagagcuuugcaauca

SEQ ID NO: 1949009 - RNA, 19 nt, Homo sapiens
  misc_RNA (1)...(19): siRNA sense strand
gcaagaagguguuagugau

SEQ ID NO: 1949010 - RNA, 19 nt, Homo sapiens
  misc_RNA (1)...(19): siRNA sense strand
gcaauugacaccauaaaga

SEQ ID NO: 1949011 - RNA, 19 nt, Homo sapiens
  misc_RNA (1)...(19): siRNA sense strand
guacuucccacgacugaua

SEQ ID NO: 1949012 - RNA, 19 nt, Homo sapiens
  misc_RNA (1)...(19): siRNA sense strand
cauuaaagguggcaugaga

SEQ ID NO: 1949013 - RNA, 19 nt, Homo sapiens
  misc_RNA (1)...(19): siRNA sense strand
gaugauggccauuuaaaca

SEQ ID NO: 1949014 - RNA, 19 nt, Homo sapiens
  misc_RNA (1)...(19): siRNA sense strand
ggguggaaauucuuuguga

SEQ ID NO: 1949015 - RNA, 19 nt, Homo sapiens
  misc_RNA (1)...(19): siRNA sense strand
ggaaauucuuugugaguac

SEQ ID NO: 1949016 - RNA, 19 nt, Homo sapiens
  misc_RNA (1)...(19): siRNA sense strand
acuagaugauggccauuua

SEQ ID NO: 1949017 - RNA, 19 nt, Homo sapiens
  misc_RNA (1)...(19): siRNA sense strand
caaacguuaucugcaauug

SEQ ID NO: 1949018 - RNA, 19 nt, Homo sapiens
  misc_RNA (1)...(19): siRNA sense strand
guucacagaucggcagcua

SEQ ID NO: 1949019 - RNA, 19 nt, Homo sapiens
  misc_RNA (1)...(19): siRNA sense strand
gaagaacagucagcaaucc

SEQ ID NO: 1949020 - RNA, 19 nt, Homo sapiens
  misc_RNA (1)...(19): siRNA sense strand
uggaaauucuuugugagua

SEQ ID NO: 1949021 - RNA, 19 nt, Homo sapiens
  misc_RNA (1)...(19): siRNA sense strand
ucuuugagcucuccaguuc

SEQ ID NO: 1949022 - RNA, 19 nt, Homo sapiens
  misc_RNA (1)...(19): siRNA sense strand
ggcaagaagguguuaguga

SEQ ID NO: 1949023 - RNA, 19 nt, Homo sapiens
  misc_RNA (1)...(19): siRNA sense strand
caauugacaccauaaagau

SEQ ID NO: 1949024 - RNA, 19 nt, Homo sapiens
  misc_RNA (1)...(19): siRNA sense strand
caagaagguguuagugaug

SEQ ID NO: 1949025 - RNA, 19 nt, Homo sapiens
  misc_RNA (1)...(19): siRNA sense strand
ccaucgcauucaaacguua

SEQ ID NO: 1949026 - RNA, 19 nt, Homo sapiens
  misc_RNA (1)...(19): siRNA sense strand
gaucggcagcuacucagaa

SEQ ID NO: 1949027 - RNA, 19 nt, Homo sapiens
  misc_RNA (1)...(19): siRNA sense strand
cggcagcuacucagaaauu

SEQ ID NO: 1949028 - RNA, 19 nt, Homo sapiens
  misc_RNA (1)...(19): siRNA sense strand
uagaugauggccauuuaaa

SEQ ID NO: 1949029 - RNA, 19 nt, Homo sapiens
  misc_RNA (1)...(19): siRNA sense strand
gugaagaacagucagcaau

SEQ ID NO: 1949030 - RNA, 19 nt, Homo sapiens
  misc_RNA (1)...(19): siRNA sense strand
agucagcaaucccuuacuu

SEQ ID NO: 1949031 - RNA, 19 nt, Homo sapiens
  misc_RNA (1)...(19): siRNA sense strand
auucaaacguuaucugcaa

SEQ ID NO: 1949032 - RNA, 19 nt, Homo sapiens
  misc_RNA (1)...(19): siRNA sense strand
guggauggacaccaacuuu

SEQ ID NO: 1949033 - RNA, 19 nt, Homo sapiens
  misc_RNA (1)...(19): siRNA sense strand
gcgaugccguggugaaacu

SEQ ID NO: 1949034 - RNA, 19 nt, Homo sapiens
  misc_RNA (1)...(19): siRNA sense strand
ucagcaaucccuuacuuuc

SEQ ID NO: 1949035 - RNA, 19 nt, Homo sapiens
  misc_RNA (1)...(19): siRNA sense strand
cuagaugauggccauuuaa

SEQ ID NO: 1949036 - RNA, 19 nt, Homo sapiens
  misc_RNA (1)...(19): siRNA sense strand
uaucugcaauugacaccau

SEQ ID NO: 1949037 - RNA, 19 nt, Homo sapiens
  misc_RNA (1)...(19): siRNA sense strand
gcaaucccuuacuuuccau

SEQ ID NO: 1949038 - RNA, 19 nt, Homo sapiens
  misc_RNA (1)...(19): siRNA sense strand
ccauuuaaacaacucuuug

SEQ ID NO: 1949039 - RNA, 19 nt, Homo sapiens
  misc_RNA (1)...(19): siRNA sense strand
ugaagaacagucagcaauc

SEQ ID NO: 1949040 - RNA, 19 nt, Homo sapiens
  misc_RNA (1)...(19): siRNA sense strand
cgacugauaguuccauuuu

SEQ ID NO: 1949041 - RNA, 19 nt, Homo sapiens
  misc_RNA (1)...(19): siRNA sense strand
aaacguuaucugcaauuga

SEQ ID NO: 1949042 - RNA, 19 nt, Homo sapiens
  misc_RNA (1)...(19): siRNA sense strand
guuuguggauggacaccaa

SEQ ID NO: 1949043 - RNA, 19 nt, Homo sapiens
  misc_RNA (1)...(19): siRNA sense strand
ggagaggggugaagaacag

SEQ ID NO: 1949044 - RNA, 19 nt, Homo sapiens
  misc_RNA (1)...(19): siRNA sense strand
caugagaccaggcaagaag

SEQ ID NO: 1949045 - RNA, 19 nt, Homo sapiens
  misc_RNA (1)...(19): siRNA sense strand
gcaugagaccaggcaagaa

SEQ ID NO: 1949046 - RNA, 19 nt, Homo sapiens
  misc_RNA (1)...(19): siRNA sense strand
ucaaacguuaucugcaauu

SEQ ID NO: 1949047 - RNA, 19 nt, Homo sapiens
  misc_RNA (1)...(19): siRNA sense strand
gccauuuaaacaacucuuu

SEQ ID NO: 1949048 - RNA, 19 nt, Homo sapiens
  misc_RNA (1)...(19): siRNA sense strand
ggcaugagaccaggcaaga

SEQ ID NO: 1949049 - RNA, 19 nt, Homo sapiens
  misc_RNA (1)...(19): siRNA sense strand
ggcagcuacucagaaauuc

SEQ ID NO: 1949050 - RNA, 19 nt, Homo sapiens
  misc_RNA (1)...(19): siRNA sense strand
cagcgaugccguggugaaa

SEQ ID NO: 1949051 - RNA, 19 nt, Homo sapiens
  misc_RNA (1)...(19): siRNA sense strand
ucacagaucggcagcuacu

SEQ ID NO: 1949052 - RNA, 19 nt, Homo sapiens
  misc_RNA (1)...(19): siRNA sense strand
gaccaggcaagaagguguu

SEQ ID NO: 1949053 - RNA, 19 nt, Homo sapiens
  misc_RNA (1)...(19): siRNA sense strand
gauggccauuuaaacaacu

SEQ ID NO: 1949054 - RNA, 19 nt, Homo sapiens
  misc_RNA (1)...(19): siRNA sense strand
guagaccucaacccagaga

SEQ ID NO: 1949055 - RNA, 19 nt, Homo sapiens
  misc_RNA (1)...(19): siRNA sense strand
gucagcaaucccuuacuuu

SEQ ID NO: 1949056 - RNA, 19 nt, Homo sapiens
  misc_RNA (1)...(19): siRNA sense strand
ugauggccauuuaaacaac

SEQ ID NO: 1949057 - RNA, 19 nt, Homo sapiens
  misc_RNA (1)...(19): siRNA sense strand
guggaaauucuuugugagu

SEQ ID NO: 1949058 - RNA, 19 nt, Homo sapiens
  misc_RNA (1)...(19): siRNA sense strand
gaacuugccuguccaguca

SEQ ID NO: 1949059 - RNA, 19 nt, Homo sapiens
  misc_RNA (1)...(19): siRNA sense strand
gaugugcucuacuauauuu

SEQ ID NO: 1949060 - RNA, 19 nt, Homo sapiens
  misc_RNA (1)...(19): siRNA sense strand
gaacuucugcuuccaaauu

SEQ ID NO: 1949061 - RNA, 19 nt, Homo sapiens
  misc_RNA (1)...(19): siRNA sense strand
gaccaagaaugcugaacua

SEQ ID NO: 1949062 - RNA, 19 nt, Homo sapiens
  misc_RNA (1)...(19): siRNA sense strand
cagaugugcucuacuauau

SEQ ID NO: 1949063 - RNA, 19 nt, Homo sapiens
  misc_RNA (1)...(19): siRNA sense strand
gaagaguacauccgaguaa

SEQ ID NO: 1949064 - RNA, 19 nt, Homo sapiens
  misc_RNA (1)...(19): siRNA sense strand
gcaggcacguaccagaaua

SEQ ID NO: 1949065 - RNA, 19 nt, Homo sapiens
  misc_RNA (1)...(19): siRNA sense strand
gauccaggcugcagaaauc

SEQ ID NO: 1949066 - RNA, 19 nt, Homo sapiens
  misc_RNA (1)...(19): siRNA sense strand
gaaggaugcucagaacaga

SEQ ID NO: 1949067 - RNA, 19 nt, Homo sapiens
  misc_RNA (1)...(19): siRNA sense strand
caccacaucuguagugaaa

SEQ ID NO: 1949068 - RNA, 19 nt, Homo sapiens
  misc_RNA (1)...(19): siRNA sense strand
caagaaugcugaacuagag

SEQ ID NO: 1949069 - RNA, 19 nt, Homo sapiens
  misc_RNA (1)...(19): siRNA sense strand
gccagaaaguuacagauga

SEQ ID NO: 1949070 - RNA, 19 nt, Homo sapiens
  misc_RNA (1)...(19): siRNA sense strand
ccaaguacuuccuauugaa

SEQ ID NO: 1949071 - RNA, 19 nt, Homo sapiens
  misc_RNA (1)...(19): siRNA sense strand
gaagaagggcuugaaguau

SEQ ID NO: 1949072 - RNA, 19 nt, Homo sapiens
  misc_RNA (1)...(19): siRNA sense strand
gaacagauuggcacccauu

SEQ ID NO: 1949073 - RNA, 19 nt, Homo sapiens
  misc_RNA (1)...(19): siRNA sense strand
gaaggaauuucuggacuca

SEQ ID NO: 1949074 - RNA, 19 nt, Homo sapiens
  misc_RNA (1)...(19): siRNA sense strand
gaccaucccuguuuauucu

SEQ ID NO: 1949075 - RNA, 19 nt, Homo sapiens
  misc_RNA (1)...(19): siRNA sense strand
uaugggcucugucuaauga

SEQ ID NO: 1949076 - RNA, 19 nt, Homo sapiens
  misc_RNA (1)...(19): siRNA sense strand
gcagagcauuacccacauu

SEQ ID NO: 1949077 - RNA, 19 nt, Homo sapiens
  misc_RNA (1)...(19): siRNA sense strand
gagaauccauugagauguc

SEQ ID NO: 1949078 - RNA, 19 nt, Homo sapiens
  misc_RNA (1)...(19): siRNA sense strand
ggugggaacugcauauaca

SEQ ID NO: 1949079 - RNA, 19 nt, Homo sapiens
  misc_RNA (1)...(19): siRNA sense strand
aagaagggcuugaaguaug

SEQ ID NO: 1949080 - RNA, 19 nt, Homo sapiens
  misc_RNA (1)...(19): siRNA sense strand
ccagguugcugaaguugaa

SEQ ID NO: 1949081 - RNA, 19 nt, Homo sapiens
  misc_RNA (1)...(19): siRNA sense strand
gaaaguuacagaugacaug

SEQ ID NO: 1949082 - RNA, 19 nt, Homo sapiens
  misc_RNA (1)...(19): siRNA sense strand
ggaacugcauauacacaga

SEQ ID NO: 1949083 - RNA, 19 nt, Homo sapiens
  misc_RNA (1)...(19): siRNA sense strand
agaagaagggcuugaagua

SEQ ID NO: 1949084 - RNA, 19 nt, Homo sapiens
  misc_RNA (1)...(19): siRNA sense strand
ggcucaaacuguccauaua

SEQ ID NO: 1949085 - RNA, 19 nt, Homo sapiens
  misc_RNA (1)...(19): siRNA sense strand
aaacucccaugaagaggua

SEQ ID NO: 1949086 - RNA, 19 nt, Homo sapiens
  misc_RNA (1)...(19): siRNA sense strand
ucuccgaucuuuauuaugu

SEQ ID NO: 1949087 - RNA, 19 nt, Homo sapiens
  misc_RNA (1)...(19): siRNA sense strand
gcacaucccacaucagcaa

SEQ ID NO: 1949088 - RNA, 19 nt, Homo sapiens
  misc_RNA (1)...(19): siRNA sense strand
ugaaguggcugggucuuug

SEQ ID NO: 1949089 - RNA, 19 nt, Homo sapiens
  misc_RNA (1)...(19): siRNA sense strand
gagagcagaugggacaaau

SEQ ID NO: 1949090 - RNA, 19 nt, Homo sapiens
  misc_RNA (1)...(19): siRNA sense strand
gaacaccaucuccuuugaa

SEQ ID NO: 1949091 - RNA, 19 nt, Homo sapiens
  misc_RNA (1)...(19): siRNA sense strand
caacgcaguucacgucagu

SEQ ID NO: 1949092 - RNA, 19 nt, Homo sapiens
  misc_RNA (1)...(19): siRNA sense strand
cagacuggccagaaaguua

SEQ ID NO: 1949093 - RNA, 19 nt, Homo sapiens
  misc_RNA (1)...(19): siRNA sense strand
cagcacaguucaugaaugg

SEQ ID NO: 1949094 - RNA, 19 nt, Homo sapiens
  misc_RNA (1)...(19): siRNA sense strand
gcucaaacuguccauauau

SEQ ID NO: 1949095 - RNA, 19 nt, Homo sapiens
  misc_RNA (1)...(19): siRNA sense strand
ccagaugugcucuacuaua

SEQ ID NO: 1949096 - RNA, 19 nt, Homo sapiens
  misc_RNA (1)...(19): siRNA sense strand
uggcagaguugaauuaugg

SEQ ID NO: 1949097 - RNA, 19 nt, Homo sapiens
  misc_RNA (1)...(19): siRNA sense strand
gcagaguuaugugucuuug

SEQ ID NO: 1949098 - RNA, 19 nt, Homo sapiens
  misc_RNA (1)...(19): siRNA sense strand
ggaccaucccuguuuauuc

SEQ ID NO: 1949099 - RNA, 19 nt, Homo sapiens
  misc_RNA (1)...(19): siRNA sense strand
acccucauguucuuuaaua

SEQ ID NO: 1949100 - RNA, 19 nt, Homo sapiens
  misc_RNA (1)...(19): siRNA sense strand
ccacgugacugaggagaug

SEQ ID NO: 1949101 - RNA, 19 nt, Homo sapiens
  misc_RNA (1)...(19): siRNA sense strand
uggagaaggugaacccuau

SEQ ID NO: 1949102 - RNA, 19 nt, Homo sapiens
  misc_RNA (1)...(19): siRNA sense strand
cuguuaagcuggaggauga

SEQ ID NO: 1949103 - RNA, 19 nt, Homo sapiens
  misc_RNA (1)...(19): siRNA sense strand
caacacaggaugaaggaau

SEQ ID NO: 1949104 - RNA, 19 nt, Homo sapiens
  misc_RNA (1)...(19): siRNA sense strand
uacaugaaguucugaagga

SEQ ID NO: 1949105 - RNA, 19 nt, Homo sapiens
  misc_RNA (1)...(19): siRNA sense strand
guucaugaauggcaacauc

SEQ ID NO: 1949106 - RNA, 19 nt, Homo sapiens
  misc_RNA (1)...(19): siRNA sense strand
gagaaggugaacccuauga

SEQ ID NO: 1949107 - RNA, 19 nt, Homo sapiens
  misc_RNA (1)...(19): siRNA sense strand
ccuggaccaucccuguuua

SEQ ID NO: 1949108 - RNA, 19 nt, Homo sapiens
  misc_RNA (1)...(19): siRNA sense strand
ccaagaaugcugaacuaga

SEQ ID NO: 1949109 - RNA, 19 nt, Homo sapiens
  misc_RNA (1)...(19): siRNA sense strand
uggacucacuggccucuaa

SEQ ID NO: 1949110 - RNA, 19 nt, Homo sapiens
  misc_RNA (1)...(19): siRNA sense strand
ugacauguaugcagaacag

SEQ ID NO: 1949111 - RNA, 19 nt, Homo sapiens
  misc_RNA (1)...(19): siRNA sense strand
agaacaccaucuccuuuga

SEQ ID NO: 1949112 - RNA, 19 nt, Homo sapiens
  misc_RNA (1)...(19): siRNA sense strand
acccagaugugcucuacua

SEQ ID NO: 1949113 - RNA, 19 nt, Homo sapiens
  misc_RNA (1)...(19): siRNA sense strand
gcaagcagcccagcagauc

SEQ ID NO: 1949114 - RNA, 19 nt, Homo sapiens
  misc_RNA (1)...(19): siRNA sense strand
caagcucuaugauuucuac

SEQ ID NO: 1949115 - RNA, 19 nt, Homo sapiens
  misc_RNA (1)...(19): siRNA sense strand
caaagaagaaccccucuaa

SEQ ID NO: 1949116 - RNA, 19 nt, Homo sapiens
  misc_RNA (1)...(19): siRNA sense strand
ugaccacccucauguucuu

SEQ ID NO: 1949117 - RNA, 19 nt, Homo sapiens
  misc_RNA (1)...(19): siRNA sense strand
gcagcagaguuaugugucu

SEQ ID NO: 1949118 - RNA, 19 nt, Homo sapiens
  misc_RNA (1)...(19): siRNA sense strand
cagagaauccauugagaug

SEQ ID NO: 1949119 - RNA, 19 nt, Homo sapiens
  misc_RNA (1)...(19): siRNA sense strand
ccacugggaccauuacuag

SEQ ID NO: 1949120 - RNA, 19 nt, Homo sapiens
  misc_RNA (1)...(19): siRNA sense strand
gugaaaggccggaaugaca

SEQ ID NO: 1949121 - RNA, 19 nt, Homo sapiens
  misc_RNA (1)...(19): siRNA sense strand
ccacccucauguucuuuaa

SEQ ID NO: 1949122 - RNA, 19 nt, Homo sapiens
  misc_RNA (1)...(19): siRNA sense strand
gcagcaaacuccccaggaa

SEQ ID NO: 1949123 - RNA, 19 nt, Homo sapiens
  misc_RNA (1)...(19): siRNA sense strand
gagcagaugggacaaaugc

SEQ ID NO: 1949124 - RNA, 19 nt, Homo sapiens
  misc_RNA (1)...(19): siRNA sense strand
ucacuccacuuggcuaugu

SEQ ID NO: 1949125 - RNA, 19 nt, Homo sapiens
  misc_RNA (1)...(19): siRNA sense strand
ccucagcagcagagcauua

SEQ ID NO: 1949126 - RNA, 19 nt, Homo sapiens
  misc_RNA (1)...(19): siRNA sense strand
acgggaagcucgaaaugga

SEQ ID NO: 1949127 - RNA, 19 nt, Homo sapiens
  misc_RNA (1)...(19): siRNA sense strand
ccagcacaguucaugaaug

SEQ ID NO: 1949128 - RNA, 19 nt, Homo sapiens
  misc_RNA (1)...(19): siRNA sense strand
gcagacccuugcaaacucu

SEQ ID NO: 1949129 - RNA, 19 nt, Homo sapiens
  misc_RNA (1)...(19): siRNA sense strand
gguacucaguccagccuau

SEQ ID NO: 1949130 - RNA, 19 nt, Homo sapiens
  misc_RNA (1)...(19): siRNA sense strand
uaccaaguacuuccuauug

SEQ ID NO: 1949131 - RNA, 19 nt, Homo sapiens
  misc_RNA (1)...(19): siRNA sense strand
ucacggaguggcuacauga

SEQ ID NO: 1949132 - RNA, 19 nt, Homo sapiens
  misc_RNA (1)...(19): siRNA sense strand
ccacaaacccagcaagaac

SEQ ID NO: 1949133 - RNA, 19 nt, Homo sapiens
  misc_RNA (1)...(19): siRNA sense strand
ccaacagcccaaucuggua

SEQ ID NO: 1949134 - RNA, 19 nt, Homo sapiens
  misc_RNA (1)...(19): siRNA sense strand
ggaaggguagaugacauuu

SEQ ID NO: 1949135 - RNA, 19 nt, Homo sapiens
  misc_RNA (1)...(19): siRNA sense strand
cagcagacagccaccacua

SEQ ID NO: 1949136 - RNA, 19 nt, Homo sapiens
  misc_RNA (1)...(19): siRNA sense strand
ccagaaaguuacagaugac

SEQ ID NO: 1949137 - RNA, 19 nt, Homo sapiens
  misc_RNA (1)...(19): siRNA sense strand
accaaguacuuccuauuga

SEQ ID NO: 1949138 - RNA, 19 nt, Homo sapiens
  misc_RNA (1)...(19): siRNA sense strand
cggaguggcuacaugaagu

SEQ ID NO: 1949139 - RNA, 19 nt, Homo sapiens
  misc_RNA (1)...(19): siRNA sense strand
aagaguacauccgaguaaa

SEQ ID NO: 1949140 - RNA, 19 nt, Homo sapiens
  misc_RNA (1)...(19): siRNA sense strand
agagaaggaugcucagaac

SEQ ID NO: 1949141 - RNA, 19 nt, Homo sapiens
  misc_RNA (1)...(19): siRNA sense strand
agaguuaugugucuuugag

SEQ ID NO: 1949142 - RNA, 19 nt, Homo sapiens
  misc_RNA (1)...(19): siRNA sense strand
aacacaggaugaaggaauu

SEQ ID NO: 1949143 - RNA, 19 nt, Homo sapiens
  misc_RNA (1)...(19): siRNA sense strand
ggccagaaaguuacagaug

SEQ ID NO: 1949144 - RNA, 19 nt, Homo sapiens
  misc_RNA (1)...(19): siRNA sense strand
uagagaaggaugcucagaa

SEQ ID NO: 1949145 - RNA, 19 nt, Homo sapiens
  misc_RNA (1)...(19): siRNA sense strand
ugaagaguacauccgagua

SEQ ID NO: 1949146 - RNA, 19 nt, Homo sapiens
  misc_RNA (1)...(19): siRNA sense strand
gaccauuacuagcccuaca

SEQ ID NO: 1949147 - RNA, 19 nt, Homo sapiens
  misc_RNA (1)...(19): siRNA sense strand
ugacugaggagaugcuaug

SEQ ID NO: 1949148 - RNA, 19 nt, Homo sapiens
  misc_RNA (1)...(19): siRNA sense strand
aauuaugggcucugucuaa

SEQ ID NO: 1949149 - RNA, 19 nt, Homo sapiens
  misc_RNA (1)...(19): siRNA sense strand
agaauacggcucaaacugu

SEQ ID NO: 1949150 - RNA, 19 nt, Homo sapiens
  misc_RNA (1)...(19): siRNA sense strand
ccaucuccuuugaagagua

SEQ ID NO: 1949151 - RNA, 19 nt, Homo sapiens
  misc_RNA (1)...(19): siRNA sense strand
ggaguggcuacaugaaguu

SEQ ID NO: 1949152 - RNA, 19 nt, Homo sapiens
  misc_RNA (1)...(19): siRNA sense strand
ucaccagccuacugagcaa

SEQ ID NO: 1949153 - RNA, 19 nt, Homo sapiens
  misc_RNA (1)...(19): siRNA sense strand
ggauccuggugauaagaga

SEQ ID NO: 1949154 - RNA, 19 nt, Homo sapiens
  misc_RNA (1)...(19): siRNA sense strand
ccagagaauccauugagau

SEQ ID NO: 1949155 - RNA, 19 nt, Homo sapiens
  misc_RNA (1)...(19): siRNA sense strand
gaauuaugggcucugucua

SEQ ID NO: 1949156 - RNA, 19 nt, Homo sapiens
  misc_RNA (1)...(19): siRNA sense strand
agaagggcuugaaguaugg

SEQ ID NO: 1949157 - RNA, 19 nt, Homo sapiens
  misc_RNA (1)...(19): siRNA sense strand
gaggagcacaucccacauc

SEQ ID NO: 1949158 - RNA, 19 nt, Homo sapiens
  misc_RNA (1)...(19): siRNA sense strand
gaacuugccuguccaguca

SEQ ID NO: 1949159 - RNA, 19 nt, Homo sapiens
  misc_RNA (1)...(19): siRNA sense strand
gaugugcucuacuauauuu

SEQ ID NO: 1949160 - RNA, 19 nt, Homo sapiens
  misc_RNA (1)...(19): siRNA sense strand
gaacuucugcuuccaaauu

SEQ ID NO: 1949161 - RNA, 19 nt, Homo sapiens
  misc_RNA (1)...(19): siRNA sense strand
gaccaagaaugcugaacua

SEQ ID NO: 1949162 - RNA, 19 nt, Homo sapiens
  misc_RNA (1)...(19): siRNA sense strand
cagaugugcucuacuauau

SEQ ID NO: 1949163 - RNA, 19 nt, Homo sapiens
  misc_RNA (1)...(19): siRNA sense strand
gaagaguacauccgaguaa

SEQ ID NO: 1949164 - RNA, 19 nt, Homo sapiens
  misc_RNA (1)...(19): siRNA sense strand
gcaggcacguaccagaaua

SEQ ID NO: 1949165 - RNA, 19 nt, Homo sapiens
  misc_RNA (1)...(19): siRNA sense strand
gauccaggcugcagaaauc

SEQ ID NO: 1949166 - RNA, 19 nt, Homo sapiens
  misc_RNA (1)...(19): siRNA sense strand
gaaggaugcucagaacaga

SEQ ID NO: 1949167 - RNA, 19 nt, Homo sapiens
  misc_RNA (1)...(19): siRNA sense strand
caccacaucuguagugaaa

SEQ ID NO: 1949168 - RNA, 19 nt, Homo sapiens
  misc_RNA (1)...(19): siRNA sense strand
caagaaugcugaacuagag

SEQ ID NO: 1949169 - RNA, 19 nt, Homo sapiens
  misc_RNA (1)...(19): siRNA sense strand
gccagaaaguuacagauga

SEQ ID NO: 1949170 - RNA, 19 nt, Homo sapiens
  misc_RNA (1)...(19): siRNA sense strand
ccaaguacuuccuauugaa

SEQ ID NO: 1949171 - RNA, 19 nt, Homo sapiens
  misc_RNA (1)...(19): siRNA sense strand
gaagaagggcuugaaguau

SEQ ID NO: 1949172 - RNA, 19 nt, Homo sapiens
  misc_RNA (1)...(19): siRNA sense strand
gaacagauuggcacccauu

SEQ ID NO: 1949173 - RNA, 19 nt, Homo sapiens
  misc_RNA (1)...(19): siRNA sense strand
gaaggaauuucuggacuca

SEQ ID NO: 1949174 - RNA, 19 nt, Homo sapiens
  misc_RNA (1)...(19): siRNA sense strand
gaccaucccuguuuauucu

SEQ ID NO: 1949175 - RNA, 19 nt, Homo sapiens
  misc_RNA (1)...(19): siRNA sense strand
uaugggcucugucuaauga

SEQ ID NO: 1949176 - RNA, 19 nt, Homo sapiens
  misc_RNA (1)...(19): siRNA sense strand
gcagagcauuacccacauu

SEQ ID NO: 1949177 - RNA, 19 nt, Homo sapiens
  misc_RNA (1)...(19): siRNA sense strand
gagaauccauugagauguc

SEQ ID NO: 1949178 - RNA, 19 nt, Homo sapiens
  misc_RNA (1)...(19): siRNA sense strand
ggugggaacugcauauaca

SEQ ID NO: 1949179 - RNA, 19 nt, Homo sapiens
  misc_RNA (1)...(19): siRNA sense strand
aagaagggcuugaaguaug

SEQ ID NO: 1949180 - RNA, 19 nt, Homo sapiens
  misc_RNA (1)...(19): siRNA sense strand
ccagguugcugaaguugaa

SEQ ID NO: 1949181 - RNA, 19 nt, Homo sapiens
  misc_RNA (1)...(19): siRNA sense strand
gaaaguuacagaugacaug

SEQ ID NO: 1949182 - RNA, 19 nt, Homo sapiens
  misc_RNA (1)...(19): siRNA sense strand
ggaacugcauauacacaga

SEQ ID NO: 1949183 - RNA, 19 nt, Homo sapiens
  misc_RNA (1)...(19): siRNA sense strand
agaagaagggcuugaagua

SEQ ID NO: 1949184 - RNA, 19 nt, Homo sapiens
  misc_RNA (1)...(19): siRNA sense strand
ggcucaaacuguccauaua

SEQ ID NO: 1949185 - RNA, 19 nt, Homo sapiens
  misc_RNA (1)...(19): siRNA sense strand
aaacucccaugaagaggua

SEQ ID NO: 1949186 - RNA, 19 nt, Homo sapiens
  misc_RNA (1)...(19): siRNA sense strand
ucuccgaucuuuauuaugu

SEQ ID NO: 1949187 - RNA, 19 nt, Homo sapiens
  misc_RNA (1)...(19): siRNA sense strand
gcacaucccacaucagcaa

SEQ ID NO: 1949188 - RNA, 19 nt, Homo sapiens
  misc_RNA (1)...(19): siRNA sense strand
ugaaguggcugggucuuug

SEQ ID NO: 1949189 - RNA, 19 nt, Homo sapiens
  misc_RNA (1)...(19): siRNA sense strand
gagagcagaugggacaaau

SEQ ID NO: 1949190 - RNA, 19 nt, Homo sapiens
  misc_RNA (1)...(19): siRNA sense strand
gaacaccaucuccuuugaa

SEQ ID NO: 1949191 - RNA, 19 nt, Homo sapiens
  misc_RNA (1)...(19): siRNA sense strand
caacgcaguucacgucagu

SEQ ID NO: 1949192 - RNA, 19 nt, Homo sapiens
  misc_RNA (1)...(19): siRNA sense strand
cagacuggccagaaaguua

SEQ ID NO: 1949193 - RNA, 19 nt, Homo sapiens
  misc_RNA (1)...(19): siRNA sense strand
cagcacaguucaugaaugg

SEQ ID NO: 1949194 - RNA, 19 nt, Homo sapiens
  misc_RNA (1)...(19): siRNA sense strand
gcucaaacuguccauauau

SEQ ID NO: 1949195 - RNA, 19 nt, Homo sapiens
  misc_RNA (1)...(19): siRNA sense strand
ccagaugugcucuacuaua

SEQ ID NO: 1949196 - RNA, 19 nt, Homo sapiens
  misc_RNA (1)...(19): siRNA sense strand
uggcagaguugaauuaugg

SEQ ID NO: 1949197 - RNA, 19 nt, Homo sapiens
  misc_RNA (1)...(19): siRNA sense strand
gcagaguuaugugucuuug

SEQ ID NO: 1949198 - RNA, 19 nt, Homo sapiens
  misc_RNA (1)...(19): siRNA sense strand
ggaccaucccuguuuauuc

SEQ ID NO: 1949199 - RNA, 19 nt, Homo sapiens
  misc_RNA (1)...(19): siRNA sense strand
acccucauguucuuuaaua

SEQ ID NO: 1949200 - RNA, 19 nt, Homo sapiens
  misc_RNA (1)...(19): siRNA sense strand
ccacgugacugaggagaug

SEQ ID NO: 1949201 - RNA, 19 nt, Homo sapiens
  misc_RNA (1)...(19): siRNA sense strand
uggagaaggugaacccuau

SEQ ID NO: 1949202 - RNA, 19 nt, Homo sapiens
  misc_RNA (1)...(19): siRNA sense strand
cuguuaagcuggaggauga

SEQ ID NO: 1949203 - RNA, 19 nt, Homo sapiens
  misc_RNA (1)...(19): siRNA sense strand
caacacaggaugaaggaau

SEQ ID NO: 1949204 - RNA, 19 nt, Homo sapiens
  misc_RNA (1)...(19): siRNA sense strand
uacaugaaguucugaagga

SEQ ID NO: 1949205 - RNA, 19 nt, Homo sapiens
  misc_RNA (1)...(19): siRNA sense strand
guucaugaauggcaacauc

SEQ ID NO: 1949206 - RNA, 19 nt, Homo sapiens
  misc_RNA (1)...(19): siRNA sense strand
gagaaggugaacccuauga

SEQ ID NO: 1949207 - RNA, 19 nt, Homo sapiens
  misc_RNA (1)...(19): siRNA sense strand
ccuggaccaucccuguuua

SEQ ID NO: 1949208 - RNA, 19 nt, Homo sapiens
  misc_RNA (1)...(19): siRNA sense strand
ccaagaaugcugaacuaga

SEQ ID NO: 1949209 - RNA, 19 nt, Homo sapiens
  misc_RNA (1)...(19): siRNA sense strand
uggacucacuggccucuaa

SEQ ID NO: 1949210 - RNA, 19 nt, Homo sapiens
  misc_RNA (1)...(19): siRNA sense strand
ugacauguaugcagaacag

SEQ ID NO: 1949211 - RNA, 19 nt, Homo sapiens
  misc_RNA (1)...(19): siRNA sense strand
agaacaccaucuccuuuga

SEQ ID NO: 1949212 - RNA, 19 nt, Homo sapiens
  misc_RNA (1)...(19): siRNA sense strand
acccagaugugcucuacua

SEQ ID NO: 1949213 - RNA, 19 nt, Homo sapiens
  misc_RNA (1)...(19): siRNA sense strand
gcaagcagcccagcagauc

SEQ ID NO: 1949214 - RNA, 19 nt, Homo sapiens
  misc_RNA (1)...(19): siRNA sense strand
caagcucuaugauuucuac

SEQ ID NO: 1949215 - RNA, 19 nt, Homo sapiens
  misc_RNA (1)...(19): siRNA sense strand
caaagaagaaccccucuaa

SEQ ID NO: 1949216 - RNA, 19 nt, Homo sapiens
  misc_RNA (1)...(19): siRNA sense strand
ugaccacccucauguucuu

SEQ ID NO: 1949217 - RNA, 19 nt, Homo sapiens
  misc_RNA (1)...(19): siRNA sense strand
gcagcagaguuaugugucu

SEQ ID NO: 1949218 - RNA, 19 nt, Homo sapiens
  misc_RNA (1)...(19): siRNA sense strand
cagagaauccauugagaug

SEQ ID NO: 1949219 - RNA, 19 nt, Homo sapiens
  misc_RNA (1)...(19): siRNA sense strand
ccacugggaccauuacuag

SEQ ID NO: 1949220 - RNA, 19 nt, Homo sapiens
  misc_RNA (1)...(19): siRNA sense strand
gugaaaggccggaaugaca

SEQ ID NO: 1949221 - RNA, 19 nt, Homo sapiens
  misc_RNA (1)...(19): siRNA sense strand
ccacccucauguucuuuaa

SEQ ID NO: 1949222 - RNA, 19 nt, Homo sapiens
  misc_RNA (1)...(19): siRNA sense strand
gcagcaaacuccccaggaa

SEQ ID NO: 1949223 - RNA, 19 nt, Homo sapiens
  misc_RNA (1)...(19): siRNA sense strand
gagcagaugggacaaaugc

SEQ ID NO: 1949224 - RNA, 19 nt, Homo sapiens
  misc_RNA (1)...(19): siRNA sense strand
ucacuccacuuggcuaugu

SEQ ID NO: 1949225 - RNA, 19 nt, Homo sapiens
  misc_RNA (1)...(19): siRNA sense strand
ccucagcagcagagcauua

SEQ ID NO: 1949226 - RNA, 19 nt, Homo sapiens
  misc_RNA (1)...(19): siRNA sense strand
acgggaagcucgaaaugga

SEQ ID NO: 1949227 - RNA, 19 nt, Homo sapiens
  misc_RNA (1)...(19): siRNA sense strand
ccagcacaguucaugaaug

SEQ ID NO: 1949228 - RNA, 19 nt, Homo sapiens
  misc_RNA (1)...(19): siRNA sense strand
gcagacccuugcaaacucu

SEQ ID NO: 1949229 - RNA, 19 nt, Homo sapiens
  misc_RNA (1)...(19): siRNA sense strand
gguacucaguccagccuau

SEQ ID NO: 1949230 - RNA, 19 nt, Homo sapiens
  misc_RNA (1)...(19): siRNA sense strand
uaccaaguacuuccuauug

SEQ ID NO: 1949231 - RNA, 19 nt, Homo sapiens
  misc_RNA (1)...(19): siRNA sense strand
ucacggaguggcuacauga

SEQ ID NO: 1949232 - RNA, 19 nt, Homo sapiens
  misc_RNA (1)...(19): siRNA sense strand
ccacaaacccagcaagaac

SEQ ID NO: 1949233 - RNA, 19 nt, Homo sapiens
  misc_RNA (1)...(19): siRNA sense strand
ccaacagcccaaucuggua

SEQ ID NO: 1949234 - RNA, 19 nt, Homo sapiens
  misc_RNA (1)...(19): siRNA sense strand
ggaaggguagaugacauuu

SEQ ID NO: 1949235 - RNA, 19 nt, Homo sapiens
  misc_RNA (1)...(19): siRNA sense strand
cagcagacagccaccacua

SEQ ID NO: 1949236 - RNA, 19 nt, Homo sapiens
  misc_RNA (1)...(19): siRNA sense strand
ccagaaaguuacagaugac

SEQ ID NO: 1949237 - RNA, 19 nt, Homo sapiens
  misc_RNA (1)...(19): siRNA sense strand
accaaguacuuccuauuga

SEQ ID NO: 1949238 - RNA, 19 nt, Homo sapiens
  misc_RNA (1)...(19): siRNA sense strand
cggaguggcuacaugaagu

SEQ ID NO: 1949239 - RNA, 19 nt, Homo sapiens
  misc_RNA (1)...(19): siRNA sense strand
aagaguacauccgaguaaa

SEQ ID NO: 1949240 - RNA, 19 nt, Homo sapiens
  misc_RNA (1)...(19): siRNA sense strand
agagaaggaugcucagaac

SEQ ID NO: 1949241 - RNA, 19 nt, Homo sapiens
  misc_RNA (1)...(19): siRNA sense strand
agaguuaugugucuuugag

SEQ ID NO: 1949242 - RNA, 19 nt, Homo sapiens
  misc_RNA (1)...(19): siRNA sense strand
aacacaggaugaaggaauu

SEQ ID NO: 1949243 - RNA, 19 nt, Homo sapiens
  misc_RNA (1)...(19): siRNA sense strand
ggccagaaaguuacagaug

SEQ ID NO: 1949244 - RNA, 19 nt, Homo sapiens
  misc_RNA (1)...(19): siRNA sense strand
uagagaaggaugcucagaa

SEQ ID NO: 1949245 - RNA, 19 nt, Homo sapiens
  misc_RNA (1)...(19): siRNA sense strand
ugaagaguacauccgagua

SEQ ID NO: 1949246 - RNA, 19 nt, Homo sapiens
  misc_RNA (1)...(19): siRNA sense strand
gaccauuacuagcccuaca

SEQ ID NO: 1949247 - RNA, 19 nt, Homo sapiens
  misc_RNA (1)...(19): siRNA sense strand
ugacugaggagaugcuaug

SEQ ID NO: 1949248 - RNA, 19 nt, Homo sapiens
  misc_RNA (1)...(19): siRNA sense strand
aauuaugggcucugucuaa

SEQ ID NO: 1949249 - RNA, 19 nt, Homo sapiens
  misc_RNA (1)...(19): siRNA sense strand
agaauacggcucaaacugu

SEQ ID NO: 1949250 - RNA, 19 nt, Homo sapiens
  misc_RNA (1)...(19): siRNA sense strand
ccaucuccuuugaagagua

SEQ ID NO: 1949251 - RNA, 19 nt, Homo sapiens
  misc_RNA (1)...(19): siRNA sense strand
ggaguggcuacaugaaguu

SEQ ID NO: 1949252 - RNA, 19 nt, Homo sapiens
  misc_RNA (1)...(19): siRNA sense strand
ucaccagccuacugagcaa

SEQ ID NO: 1949253 - RNA, 19 nt, Homo sapiens
  misc_RNA (1)...(19): siRNA sense strand
ggauccuggugauaagaga

SEQ ID NO: 1949254 - RNA, 19 nt, Homo sapiens
  misc_RNA (1)...(19): siRNA sense strand
ccagagaauccauugagau

SEQ ID NO: 1949255 - RNA, 19 nt, Homo sapiens
  misc_RNA (1)...(19): siRNA sense strand
gaauuaugggcucugucua

SEQ ID NO: 1949256 - RNA, 19 nt, Homo sapiens
  misc_RNA (1)...(19): siRNA sense strand
agaagggcuugaaguaugg

SEQ ID NO: 1949257 - RNA, 19 nt, Homo sapiens
  misc_RNA (1)...(19): siRNA sense strand
gaggagcacaucccacauc

SEQ ID NO: 1949258 - RNA, 19 nt, Homo sapiens
  misc_RNA (1)...(19): siRNA sense strand
gagaaacccuuuagaugua

SEQ ID NO: 1949259 - RNA, 19 nt, Homo sapiens
  misc_RNA (1)...(19): siRNA sense strand
gaaagaaaccguacaaaug

SEQ ID NO: 1949260 - RNA, 19 nt, Homo sapiens
  misc_RNA (1)...(19): siRNA sense strand
gcagagaacuuauaaagag

SEQ ID NO: 1949261 - RNA, 19 nt, Homo sapiens
  misc_RNA (1)...(19): siRNA sense strand
caacuucagugcaagauuu

SEQ ID NO: 1949262 - RNA, 19 nt, Homo sapiens
  misc_RNA (1)...(19): siRNA sense strand
gagagaaaccuuauaaaug

SEQ ID NO: 1949263 - RNA, 19 nt, Homo sapiens
  misc_RNA (1)...(19): siRNA sense strand
ccacagagcuaauuuaacu

SEQ ID NO: 1949264 - RNA, 19 nt, Homo sapiens
  misc_RNA (1)...(19): siRNA sense strand
ccagagaacucauacuaga

SEQ ID NO: 1949265 - RNA, 19 nt, Homo sapiens
  misc_RNA (1)...(19): siRNA sense strand
gagcaaggauucaacuuca

SEQ ID NO: 1949266 - RNA, 19 nt, Homo sapiens
  misc_RNA (1)...(19): siRNA sense strand
ggagagaaaccuuauaaau

SEQ ID NO: 1949267 - RNA, 19 nt, Homo sapiens
  misc_RNA (1)...(19): siRNA sense strand
ggaagcagcccuugaaugu

SEQ ID NO: 1949268 - RNA, 19 nt, Homo sapiens
  misc_RNA (1)...(19): siRNA sense strand
ggaaaagccuucauucauu

SEQ ID NO: 1949269 - RNA, 19 nt, Homo sapiens
  misc_RNA (1)...(19): siRNA sense strand
ggaaagaaaccguacaaau

SEQ ID NO: 1949270 - RNA, 19 nt, Homo sapiens
  misc_RNA (1)...(19): siRNA sense strand
cauugaagcuugagagaaa

SEQ ID NO: 1949271 - RNA, 19 nt, Homo sapiens
  misc_RNA (1)...(19): siRNA sense strand
ggagagacauuugagagaa

SEQ ID NO: 1949272 - RNA, 19 nt, Homo sapiens
  misc_RNA (1)...(19): siRNA sense strand
ggagagagaccuuaugaau

SEQ ID NO: 1949273 - RNA, 19 nt, Homo sapiens
  misc_RNA (1)...(19): siRNA sense strand
caucagacaucaaagaguu

SEQ ID NO: 1949274 - RNA, 19 nt, Homo sapiens
  misc_RNA (1)...(19): siRNA sense strand
gcagaaucaugcaaaguug

SEQ ID NO: 1949275 - RNA, 19 nt, Homo sapiens
  misc_RNA (1)...(19): siRNA sense strand
caucagcacucauuaaaca

SEQ ID NO: 1949276 - RNA, 19 nt, Homo sapiens
  misc_RNA (1)...(19): siRNA sense strand
gcaaggaaaucaggagaga

SEQ ID NO: 1949277 - RNA, 19 nt, Homo sapiens
  misc_RNA (1)...(19): siRNA sense strand
caacaucagagaacucaua

SEQ ID NO: 1949278 - RNA, 19 nt, Homo sapiens
  misc_RNA (1)...(19): siRNA sense strand
aaacagaccauaagcauga

SEQ ID NO: 1949279 - RNA, 19 nt, Homo sapiens
  misc_RNA (1)...(19): siRNA sense strand
gagagaaacccuuuagaug

SEQ ID NO: 1949280 - RNA, 19 nt, Homo sapiens
  misc_RNA (1)...(19): siRNA sense strand
gagagacauuugagagaaa

SEQ ID NO: 1949281 - RNA, 19 nt, Homo sapiens
  misc_RNA (1)...(19): siRNA sense strand
gagcacacaucuuguucaa

SEQ ID NO: 1949282 - RNA, 19 nt, Homo sapiens
  misc_RNA (1)...(19): siRNA sense strand
gagaaacccuaugagugua

SEQ ID NO: 1949283 - RNA, 19 nt, Homo sapiens
  misc_RNA (1)...(19): siRNA sense strand
agacagaguucccaaagga

SEQ ID NO: 1949284 - RNA, 19 nt, Homo sapiens
  misc_RNA (1)...(19): siRNA sense strand
gaagcuggauccugcacaa

SEQ ID NO: 1949285 - RNA, 19 nt, Homo sapiens
  misc_RNA (1)...(19): siRNA sense strand
ggagagaaacccuuuagau

SEQ ID NO: 1949286 - RNA, 19 nt, Homo sapiens
  misc_RNA (1)...(19): siRNA sense strand
gcucaucccuugcaacaca

SEQ ID NO: 1949287 - RNA, 19 nt, Homo sapiens
  misc_RNA (1)...(19): siRNA sense strand
ggauucaacuucagugcaa

SEQ ID NO: 1949288 - RNA, 19 nt, Homo sapiens
  misc_RNA (1)...(19): siRNA sense strand
aagcagcccuugaauguga

SEQ ID NO: 1949289 - RNA, 19 nt, Homo sapiens
  misc_RNA (1)...(19): siRNA sense strand
ggagacagauuuggcugaa

SEQ ID NO: 1949290 - RNA, 19 nt, Homo sapiens
  misc_RNA (1)...(19): siRNA sense strand
caucagcucucauucaaca

SEQ ID NO: 1949291 - RNA, 19 nt, Homo sapiens
  misc_RNA (1)...(19): siRNA sense strand
gcaauaauagacagacuga

SEQ ID NO: 1949292 - RNA, 19 nt, Homo sapiens
  misc_RNA (1)...(19): siRNA sense strand
ugaaaugccugagaaagga

SEQ ID NO: 1949293 - RNA, 19 nt, Homo sapiens
  misc_RNA (1)...(19): siRNA sense strand
agagagaccuuaugaaugc

SEQ ID NO: 1949294 - RNA, 19 nt, Homo sapiens
  misc_RNA (1)...(19): siRNA sense strand
aaagaaaccguacaaaugu

SEQ ID NO: 1949295 - RNA, 19 nt, Homo sapiens
  misc_RNA (1)...(19): siRNA sense strand
gagugaagccuuaugaaug

SEQ ID NO: 1949296 - RNA, 19 nt, Homo sapiens
  misc_RNA (1)...(19): siRNA sense strand
gagagagaccuuaugaaug

SEQ ID NO: 1949297 - RNA, 19 nt, Homo sapiens
  misc_RNA (1)...(19): siRNA sense strand
guucaucucucaucagaca

SEQ ID NO: 1949298 - RNA, 19 nt, Homo sapiens
  misc_RNA (1)...(19): siRNA sense strand
ggaaacagaccauaagcau

SEQ ID NO: 1949299 - RNA, 19 nt, Homo sapiens
  misc_RNA (1)...(19): siRNA sense strand
uaacuaagcaucagagagu

SEQ ID NO: 1949300 - RNA, 19 nt, Homo sapiens
  misc_RNA (1)...(19): siRNA sense strand
gcucaucccuaacuaagca

SEQ ID NO: 1949301 - RNA, 19 nt, Homo sapiens
  misc_RNA (1)...(19): siRNA sense strand
gaaaagccuucauucauuc

SEQ ID NO: 1949302 - RNA, 19 nt, Homo sapiens
  misc_RNA (1)...(19): siRNA sense strand
auacuggagugaagccuua

SEQ ID NO: 1949303 - RNA, 19 nt, Homo sapiens
  misc_RNA (1)...(19): siRNA sense strand
ggagugaagccuuaugaau

SEQ ID NO: 1949304 - RNA, 19 nt, Homo sapiens
  misc_RNA (1)...(19): siRNA sense strand
caaagcagaaucaugcaaa

SEQ ID NO: 1949305 - RNA, 19 nt, Homo sapiens
  misc_RNA (1)...(19): siRNA sense strand
ggagagaaacccuaugagu

SEQ ID NO: 1949306 - RNA, 19 nt, Homo sapiens
  misc_RNA (1)...(19): siRNA sense strand
gagaacucauacuagaauu

SEQ ID NO: 1949307 - RNA, 19 nt, Homo sapiens
  misc_RNA (1)...(19): siRNA sense strand
ggaaaucaggagagacauu

SEQ ID NO: 1949308 - RNA, 19 nt, Homo sapiens
  misc_RNA (1)...(19): siRNA sense strand
gaaagcucaucccuugcaa

SEQ ID NO: 1949309 - RNA, 19 nt, Homo sapiens
  misc_RNA (1)...(19): siRNA sense strand
gaagacagaguucccaaag

SEQ ID NO: 1949310 - RNA, 19 nt, Homo sapiens
  misc_RNA (1)...(19): siRNA sense strand
ucacaugaauucacucucu

SEQ ID NO: 1949311 - RNA, 19 nt, Homo sapiens
  misc_RNA (1)...(19): siRNA sense strand
agagaaauguucacucaca

SEQ ID NO: 1949312 - RNA, 19 nt, Homo sapiens
  misc_RNA (1)...(19): siRNA sense strand
gaaccuagucucacuuugg

SEQ ID NO: 1949313 - RNA, 19 nt, Homo sapiens
  misc_RNA (1)...(19): siRNA sense strand
gaacucauacuggagagaa

SEQ ID NO: 1949314 - RNA, 19 nt, Homo sapiens
  misc_RNA (1)...(19): siRNA sense strand
ucaaggauguggccaugga

SEQ ID NO: 1949315 - RNA, 19 nt, Homo sapiens
  misc_RNA (1)...(19): siRNA sense strand
gggaugugaugcuggagaa

SEQ ID NO: 1949316 - RNA, 19 nt, Homo sapiens
  misc_RNA (1)...(19): siRNA sense strand
agagaaacccuuuagaugu

SEQ ID NO: 1949317 - RNA, 19 nt, Homo sapiens
  misc_RNA (1)...(19): siRNA sense strand
ccauaugaaugcagugaau

SEQ ID NO: 1949318 - RNA, 19 nt, Homo sapiens
  misc_RNA (1)...(19): siRNA sense strand
aagaaaaccuucacagaaa

SEQ ID NO: 1949319 - RNA, 19 nt, Homo sapiens
  misc_RNA (1)...(19): siRNA sense strand
caccagagaacucauacua

SEQ ID NO: 1949320 - RNA, 19 nt, Homo sapiens
  misc_RNA (1)...(19): siRNA sense strand
ccauaagcaugauguauac

SEQ ID NO: 1949321 - RNA, 19 nt, Homo sapiens
  misc_RNA (1)...(19): siRNA sense strand
ggaaaagcuucaaucagaa

SEQ ID NO: 1949322 - RNA, 19 nt, Homo sapiens
  misc_RNA (1)...(19): siRNA sense strand
gaacucauaccggagagaa

SEQ ID NO: 1949323 - RNA, 19 nt, Homo sapiens
  misc_RNA (1)...(19): siRNA sense strand
ucagagaauucacguugga

SEQ ID NO: 1949324 - RNA, 19 nt, Homo sapiens
  misc_RNA (1)...(19): siRNA sense strand
cagagaacuuauaaagaga

SEQ ID NO: 1949325 - RNA, 19 nt, Homo sapiens
  misc_RNA (1)...(19): siRNA sense strand
uggaaaagcuucaaucaga

SEQ ID NO: 1949326 - RNA, 19 nt, Homo sapiens
  misc_RNA (1)...(19): siRNA sense strand
gagaaaagccauaugaaug

SEQ ID NO: 1949327 - RNA, 19 nt, Homo sapiens
  misc_RNA (1)...(19): siRNA sense strand
aaucuguccuuaucacuga

SEQ ID NO: 1949328 - RNA, 19 nt, Homo sapiens
  misc_RNA (1)...(19): siRNA sense strand
caacacaucagagaauuca

SEQ ID NO: 1949329 - RNA, 19 nt, Homo sapiens
  misc_RNA (1)...(19): siRNA sense strand
agagaaacccuaugagugu

SEQ ID NO: 1949330 - RNA, 19 nt, Homo sapiens
  misc_RNA (1)...(19): siRNA sense strand
gagaaaccuuauaaauguc

SEQ ID NO: 1949331 - RNA, 19 nt, Homo sapiens
  misc_RNA (1)...(19): siRNA sense strand
agugaagccuuaugaaugu

SEQ ID NO: 1949332 - RNA, 19 nt, Homo sapiens
  misc_RNA (1)...(19): siRNA sense strand
aagcagcuauucagacaug

SEQ ID NO: 1949333 - RNA, 19 nt, Homo sapiens
  misc_RNA (1)...(19): siRNA sense strand
caucaaagaacucauacug

SEQ ID NO: 1949334 - RNA, 19 nt, Homo sapiens
  misc_RNA (1)...(19): siRNA sense strand
aaacaccagagaacucaua

SEQ ID NO: 1949335 - RNA, 19 nt, Homo sapiens
  misc_RNA (1)...(19): siRNA sense strand
ucacuuuggcuuccaguuu

SEQ ID NO: 1949336 - RNA, 19 nt, Homo sapiens
  misc_RNA (1)...(19): siRNA sense strand
caguucaucucucaucaga

SEQ ID NO: 1949337 - RNA, 19 nt, Homo sapiens
  misc_RNA (1)...(19): siRNA sense strand
gagaguucauacuggagaa

SEQ ID NO: 1949338 - RNA, 19 nt, Homo sapiens
  misc_RNA (1)...(19): siRNA sense strand
caagaaaaccuucacagaa

SEQ ID NO: 1949339 - RNA, 19 nt, Homo sapiens
  misc_RNA (1)...(19): siRNA sense strand
gaacucuucaccuaccauu
